United States Patent Application Publication US 2015/0141320 A1 - sequence listing, part 12

SEQ ID NO: 289641 - DNA, 15 bp, Homo sapiens
tgtctaattgtttcc

SEQ ID NO: 289642 - DNA, 15 bp, Homo sapiens
gtgtctaattgtttc

SEQ ID NO: 289643 - DNA, 15 bp, Homo sapiens
agtgtctaattgttt

SEQ ID NO: 289644 - DNA, 15 bp, Homo sapiens
cagtgtctaattgtt

SEQ ID NO: 289645 - DNA, 15 bp, Homo sapiens
gcagtgtctaattgt

SEQ ID NO: 289646 - DNA, 15 bp, Homo sapiens
tgcagtgtctaattg

SEQ ID NO: 289647 - DNA, 15 bp, Homo sapiens
atgcagtgtctaatt

SEQ ID NO: 289648 - DNA, 15 bp, Homo sapiens
catgcagtgtctaat

SEQ ID NO: 289649 - DNA, 15 bp, Homo sapiens
ccatgcagtgtctaa

SEQ ID NO: 289650 - DNA, 15 bp, Homo sapiens
tccatgcagtgtcta

SEQ ID NO: 289651 - DNA, 15 bp, Homo sapiens
ttccatgcagtgtct

SEQ ID NO: 289652 - DNA, 15 bp, Homo sapiens
tttccatgcagtgtc

SEQ ID NO: 289653 - DNA, 15 bp, Homo sapiens
ctttccatgcagtgt

SEQ ID NO: 289654 - DNA, 15 bp, Homo sapiens
cctttccatgcagtg

SEQ ID NO: 289655 - DNA, 15 bp, Homo sapiens
gcctttccatgcagt

SEQ ID NO: 289656 - DNA, 15 bp, Homo sapiens
agcctttccatgcag

SEQ ID NO: 289657 - DNA, 15 bp, Homo sapiens
gagcctttccatgca

SEQ ID NO: 289658 - DNA, 15 bp, Homo sapiens
agagcctttccatgc

SEQ ID NO: 289659 - DNA, 15 bp, Homo sapiens
aagagcctttccatg

SEQ ID NO: 289660 - DNA, 15 bp, Homo sapiens
taagagcctttccat

SEQ ID NO: 289661 - DNA, 15 bp, Homo sapiens
ctaagagcctttcca

SEQ ID NO: 289662 - DNA, 15 bp, Homo sapiens
actaagagcctttcc

SEQ ID NO: 289663 - DNA, 15 bp, Homo sapiens
tactaagagcctttc

SEQ ID NO: 289664 - DNA, 15 bp, Homo sapiens
gtactaagagccttt

SEQ ID NO: 289665 - DNA, 15 bp, Homo sapiens
tgtactaagagcctt

SEQ ID NO: 289666 - DNA, 15 bp, Homo sapiens
ctgtactaagagcct

SEQ ID NO: 289667 - DNA, 15 bp, Homo sapiens
actgtactaagagcc

SEQ ID NO: 289668 - DNA, 15 bp, Homo sapiens
cactgtactaagagc

SEQ ID NO: 289669 - DNA, 15 bp, Homo sapiens
gcactgtactaagag

SEQ ID NO: 289670 - DNA, 15 bp, Homo sapiens
ggcactgtactaaga

SEQ ID NO: 289671 - DNA, 15 bp, Homo sapiens
gggcactgtactaag

SEQ ID NO: 289672 - DNA, 15 bp, Homo sapiens
tgggcactgtactaa

SEQ ID NO: 289673 - DNA, 15 bp, Homo sapiens
ctgggcactgtacta

SEQ ID NO: 289674 - DNA, 15 bp, Homo sapiens
gctgggcactgtact

SEQ ID NO: 289675 - DNA, 15 bp, Homo sapiens
agctgggcactgtac

SEQ ID NO: 289676 - DNA, 15 bp, Homo sapiens
aagctgggcactgta

SEQ ID NO: 289677 - DNA, 15 bp, Homo sapiens
caagctgggcactgt

SEQ ID NO: 289678 - DNA, 15 bp, Homo sapiens
tcaagctgggcactg

SEQ ID NO: 289679 - DNA, 15 bp, Homo sapiens
ttcaagctgggcact

SEQ ID NO: 289680 - DNA, 15 bp, Homo sapiens
gttcaagctgggcac

SEQ ID NO: 289681 - DNA, 15 bp, Homo sapiens
tgttcaagctgggca

SEQ ID NO: 289682 - DNA, 15 bp, Homo sapiens
atgttcaagctgggc

SEQ ID NO: 289683 - DNA, 15 bp, Homo sapiens
catgttcaagctggg

SEQ ID NO: 289684 - DNA, 15 bp, Homo sapiens
tcatgttcaagctgg

SEQ ID NO: 289685 - DNA, 15 bp, Homo sapiens
gtcatgttcaagctg

SEQ ID NO: 289686 - DNA, 15 bp, Homo sapiens
ggtcatgttcaagct

SEQ ID NO: 289687 - DNA, 15 bp, Homo sapiens
tggtcatgttcaagc

SEQ ID NO: 289688 - DNA, 15 bp, Homo sapiens
ttggtcatgttcaag

SEQ ID NO: 289689 - DNA, 15 bp, Homo sapiens
tttggtcatgttcaa

SEQ ID NO: 289690 - DNA, 15 bp, Homo sapiens
ttttggtcatgttca

SEQ ID NO: 289691 - DNA, 15 bp, Homo sapiens
tttttggtcatgttc

SEQ ID NO: 289692 - DNA, 15 bp, Homo sapiens
ttttttggtcatgtt

SEQ ID NO: 289693 - DNA, 15 bp, Homo sapiens
tttttttggtcatgt

SEQ ID NO: 289694 - DNA, 15 bp, Homo sapiens
ctttttttggtcatg

SEQ ID NO: 289695 - DNA, 15 bp, Homo sapiens
actttttttggtcat

SEQ ID NO: 289696 - DNA, 15 bp, Homo sapiens
tactttttttggtca

SEQ ID NO: 289697 - DNA, 15 bp, Homo sapiens
atactttttttggtc

SEQ ID NO: 289698 - DNA, 15 bp, Homo sapiens
aatactttttttggt

SEQ ID NO: 289699 - DNA, 15 bp, Homo sapiens
taatactttttttgg

SEQ ID NO: 289700 - DNA, 15 bp, Homo sapiens
ctaatactttttttg

SEQ ID NO: 289701 - DNA, 15 bp, Homo sapiens
tctaatacttttttt

SEQ ID NO: 289702 - DNA, 15 bp, Homo sapiens
atctaatactttttt

SEQ ID NO: 289703 - DNA, 15 bp, Homo sapiens
tatctaatacttttt

SEQ ID NO: 289704 - DNA, 15 bp, Homo sapiens
atatctaatactttt

SEQ ID NO: 289705 - DNA, 15 bp, Homo sapiens
aatatctaatacttt

SEQ ID NO: 289706 - DNA, 15 bp, Homo sapiens
taatatctaatactt

SEQ ID NO: 289707 - DNA, 15 bp, Homo sapiens
ataatatctaatact

SEQ ID NO: 289708 - DNA, 15 bp, Homo sapiens
aataatatctaatac

SEQ ID NO: 289709 - DNA, 15 bp, Homo sapiens
caataatatctaata

SEQ ID NO: 289710 - DNA, 15 bp, Homo sapiens
ccaataatatctaat

SEQ ID NO: 289711 - DNA, 15 bp, Homo sapiens
accaataatatctaa

SEQ ID NO: 289712 - DNA, 15 bp, Homo sapiens
taccaataatatcta

SEQ ID NO: 289713 - DNA, 15 bp, Homo sapiens
ataccaataatatct

SEQ ID NO: 289714 - DNA, 15 bp, Homo sapiens
aataccaataatatc

SEQ ID NO: 289715 - DNA, 15 bp, Homo sapiens
caataccaataatat

SEQ ID NO: 289716 - DNA, 15 bp, Homo sapiens
acaataccaataata

SEQ ID NO: 289717 - DNA, 15 bp, Homo sapiens
aacaataccaataat

SEQ ID NO: 289718 - DNA, 15 bp, Homo sapiens
gaacaataccaataa

SEQ ID NO: 289719 - DNA, 15 bp, Homo sapiens
agaacaataccaata

SEQ ID NO: 289720 - DNA, 15 bp, Homo sapiens
aagaacaataccaat

SEQ ID NO: 289721 - DNA, 15 bp, Homo sapiens
aaagaacaataccaa

SEQ ID NO: 289722 - DNA, 15 bp, Homo sapiens
aaaagaacaatacca

SEQ ID NO: 289723 - DNA, 15 bp, Homo sapiens
aaaaagaacaatacc

SEQ ID NO: 289724 - DNA, 15 bp, Homo sapiens
caaaaagaacaatac

SEQ ID NO: 289725 - DNA, 15 bp, Homo sapiens
tcaaaaagaacaata

SEQ ID NO: 289726 - DNA, 15 bp, Homo sapiens
ctcaaaaagaacaat

SEQ ID NO: 289727 - DNA, 15 bp, Homo sapiens
cctcaaaaagaacaa

SEQ ID NO: 289728 - DNA, 15 bp, Homo sapiens
acctcaaaaagaaca

SEQ ID NO: 289729 - DNA, 15 bp, Homo sapiens
gacctcaaaaagaac

SEQ ID NO: 289730 - DNA, 15 bp, Homo sapiens
agacctcaaaaagaa

SEQ ID NO: 289731 - DNA, 15 bp, Homo sapiens
cagacctcaaaaaga

SEQ ID NO: 289732 - DNA, 15 bp, Homo sapiens
acagacctcaaaaag

SEQ ID NO: 289733 - DNA, 15 bp, Homo sapiens
aacagacctcaaaaa

SEQ ID NO: 289734 - DNA, 15 bp, Homo sapiens
aaacagacctcaaaa

SEQ ID NO: 289735 - DNA, 15 bp, Homo sapiens
aaaacagacctcaaa

SEQ ID NO: 289736 - DNA, 15 bp, Homo sapiens
caaaacagacctcaa

SEQ ID NO: 289737 - DNA, 15 bp, Homo sapiens
tcaaaacagacctca

SEQ ID NO: 289738 - DNA, 15 bp, Homo sapiens
ttcaaaacagacctc

SEQ ID NO: 289739 - DNA, 15 bp, Homo sapiens
tttcaaaacagacct

SEQ ID NO: 289740 - DNA, 15 bp, Homo sapiens
gtttcaaaacagacc

SEQ ID NO: 289741 - DNA, 15 bp, Homo sapiens
agtttcaaaacagac

SEQ ID NO: 289742 - DNA, 15 bp, Homo sapiens
aagtttcaaaacaga

SEQ ID NO: 289743 - DNA, 15 bp, Homo sapiens
aaagtttcaaaacag

SEQ ID NO: 289744 - DNA, 15 bp, Homo sapiens
aaaagtttcaaaaca

SEQ ID NO: 289745 - DNA, 15 bp, Homo sapiens
taaaagtttcaaaac

SEQ ID NO: 289746 - DNA, 15 bp, Homo sapiens
ttaaaagtttcaaaa

SEQ ID NO: 289747 - DNA, 15 bp, Homo sapiens
attaaaagtttcaaa

SEQ ID NO: 289748 - DNA, 15 bp, Homo sapiens
gattaaaagtttcaa

SEQ ID NO: 289749 - DNA, 15 bp, Homo sapiens
tgattaaaagtttca

SEQ ID NO: 289750 - DNA, 15 bp, Homo sapiens
ctgattaaaagtttc

SEQ ID NO: 289751 - DNA, 15 bp, Homo sapiens
cctgattaaaagttt

SEQ ID NO: 289752 - DNA, 15 bp, Homo sapiens
acctgattaaaagtt

SEQ ID NO: 289753 - DNA, 15 bp, Homo sapiens
gacctgattaaaagt

SEQ ID NO: 289754 - DNA, 15 bp, Homo sapiens
agacctgattaaaag

SEQ ID NO: 289755 - DNA, 15 bp, Homo sapiens
aagacctgattaaaa

SEQ ID NO: 289756 - DNA, 15 bp, Homo sapiens
caagacctgattaaa

SEQ ID NO: 289757 - DNA, 15 bp, Homo sapiens
tcaagacctgattaa

SEQ ID NO: 289758 - DNA, 15 bp, Homo sapiens
ctcaagacctgatta

SEQ ID NO: 289759 - DNA, 15 bp, Homo sapiens
tctcaagacctgatt

SEQ ID NO: 289760 - DNA, 15 bp, Homo sapiens
ctctcaagacctgat

SEQ ID NO: 289761 - DNA, 15 bp, Homo sapiens
tctctcaagacctga

SEQ ID NO: 289762 - DNA, 15 bp, Homo sapiens
ctctctcaagacctg

SEQ ID NO: 289763 - DNA, 15 bp, Homo sapiens
tctctctcaagacct

SEQ ID NO: 289764 - DNA, 15 bp, Homo sapiens
atctctctcaagacc

SEQ ID NO: 289765 - DNA, 15 bp, Homo sapiens
catctctctcaagac

SEQ ID NO: 289766 - DNA, 15 bp, Homo sapiens
tcatctctctcaaga

SEQ ID NO: 289767 - DNA, 15 bp, Homo sapiens
ctcatctctctcaag

SEQ ID NO: 289768 - DNA, 15 bp, Homo sapiens
tctcatctctctcaa

SEQ ID NO: 289769 - DNA, 15 bp, Homo sapiens
atctcatctctctca

SEQ ID NO: 289770 - DNA, 15 bp, Homo sapiens
tatctcatctctctc

SEQ ID NO: 289771 - DNA, 15 bp, Homo sapiens
atatctcatctctct

SEQ ID NO: 289772 - DNA, 15 bp, Homo sapiens
tatatctcatctctc

SEQ ID NO: 289773 - DNA, 15 bp, Homo sapiens
ttatatctcatctct

SEQ ID NO: 289774 - DNA, 15 bp, Homo sapiens
tttatatctcatctc

SEQ ID NO: 289775 - DNA, 15 bp, Homo sapiens
gtttatatctcatct

SEQ ID NO: 289776 - DNA, 15 bp, Homo sapiens
tgtttatatctcatc

SEQ ID NO: 289777 - DNA, 15 bp, Homo sapiens
gtgtttatatctcat

SEQ ID NO: 289778 - DNA, 15 bp, Homo sapiens
tgtgtttatatctca

SEQ ID NO: 289779 - DNA, 15 bp, Homo sapiens
ctgtgtttatatctc

SEQ ID NO: 289780 - DNA, 15 bp, Homo sapiens
actgtgtttatatct

SEQ ID NO: 289781 - DNA, 15 bp, Homo sapiens
cactgtgtttatatc

SEQ ID NO: 289782 - DNA, 15 bp, Homo sapiens
tcactgtgtttatat

SEQ ID NO: 289783 - DNA, 15 bp, Homo sapiens
ttcactgtgtttata

SEQ ID NO: 289784 - DNA, 15 bp, Homo sapiens
cttcactgtgtttat

SEQ ID NO: 289785 - DNA, 15 bp, Homo sapiens
acttcactgtgttta

SEQ ID NO: 289786 - DNA, 15 bp, Homo sapiens
aacttcactgtgttt

SEQ ID NO: 289787 - DNA, 15 bp, Homo sapiens
taacttcactgtgtt

SEQ ID NO: 289788 - DNA, 15 bp, Homo sapiens
ttaacttcactgtgt

SEQ ID NO: 289789 - DNA, 15 bp, Homo sapiens
cttaacttcactgtg

SEQ ID NO: 289790 - DNA, 15 bp, Homo sapiens
tcttaacttcactgt

SEQ ID NO: 289791 - DNA, 15 bp, Homo sapiens
ttcttaacttcactg

SEQ ID NO: 289792 - DNA, 15 bp, Homo sapiens
tttcttaacttcact

SEQ ID NO: 289793 - DNA, 15 bp, Homo sapiens
gtttcttaacttcac

SEQ ID NO: 289794 - DNA, 15 bp, Homo sapiens
tgtttcttaacttca

SEQ ID NO: 289795 - DNA, 15 bp, Homo sapiens
ttgtttcttaacttc

SEQ ID NO: 289796 - DNA, 15 bp, Homo sapiens
tttgtttcttaactt

SEQ ID NO: 289797 - DNA, 15 bp, Homo sapiens
ttttgtttcttaact

SEQ ID NO: 289798 - DNA, 15 bp, Homo sapiens
attttgtttcttaac

SEQ ID NO: 289799 - DNA, 15 bp, Homo sapiens
tattttgtttcttaa

SEQ ID NO: 289800 - DNA, 15 bp, Homo sapiens
ttattttgtttctta

SEQ ID NO: 289801 - DNA, 15 bp, Homo sapiens
cttattttgtttctt

SEQ ID NO: 289802 - DNA, 15 bp, Homo sapiens
tcttattttgtttct

SEQ ID NO: 289803 - DNA, 15 bp, Homo sapiens
atcttattttgtttc

SEQ ID NO: 289804 - DNA, 15 bp, Homo sapiens
catcttattttgttt

SEQ ID NO: 289805 - DNA, 15 bp, Homo sapiens
acatcttattttgtt

SEQ ID NO: 289806 - DNA, 15 bp, Homo sapiens
tacatcttattttgt

SEQ ID NO: 289807 - DNA, 15 bp, Homo sapiens
atacatcttattttg

SEQ ID NO: 289808 - DNA, 15 bp, Homo sapiens
aatacatcttatttt

SEQ ID NO: 289809 - DNA, 15 bp, Homo sapiens
caatacatcttattt

SEQ ID NO: 289810 - DNA, 15 bp, Homo sapiens
acaatacatcttatt

SEQ ID NO: 289811 - DNA, 15 bp, Homo sapiens
tacaatacatcttat

SEQ ID NO: 289812 - DNA, 15 bp, Homo sapiens
ttacaatacatctta

SEQ ID NO: 289813 - DNA, 15 bp, Homo sapiens
cttacaatacatctt

SEQ ID NO: 289814 - DNA, 15 bp, Homo sapiens
ccttacaatacatct

SEQ ID NO: 289815 - DNA, 15 bp, Homo sapiens
gccttacaatacatc

SEQ ID NO: 289816 - DNA, 15 bp, Homo sapiens
tgccttacaatacat

SEQ ID NO: 289817 - DNA, 15 bp, Homo sapiens
ctgccttacaataca

SEQ ID NO: 289818 - DNA, 15 bp, Homo sapiens
actgccttacaatac

SEQ ID NO: 289819 - DNA, 15 bp, Homo sapiens
tactgccttacaata

SEQ ID NO: 289820 - DNA, 15 bp, Homo sapiens
ttactgccttacaat

SEQ ID NO: 289821 - DNA, 15 bp, Homo sapiens
tttactgccttacaa

SEQ ID NO: 289822 - DNA, 15 bp, Homo sapiens
ctttactgccttaca

SEQ ID NO: 289823 - DNA, 15 bp, Homo sapiens
tctttactgccttac

SEQ ID NO: 289824 - DNA, 15 bp, Homo sapiens
ctctttactgcctta

SEQ ID NO: 289825 - DNA, 15 bp, Homo sapiens
tctctttactgcctt

SEQ ID NO: 289826 - DNA, 15 bp, Homo sapiens
atctctttactgcct

SEQ ID NO: 289827 - DNA, 15 bp, Homo sapiens
gatctctttactgcc

SEQ ID NO: 289828 - DNA, 15 bp, Homo sapiens
cgatctctttactgc

SEQ ID NO: 289829 - DNA, 15 bp, Homo sapiens
ccgatctctttactg

SEQ ID NO: 289830 - DNA, 15 bp, Homo sapiens
accgatctctttact

SEQ ID NO: 289831 - DNA, 15 bp, Homo sapiens
aaccgatctctttac

SEQ ID NO: 289832 - DNA, 15 bp, Homo sapiens
taaccgatctcttta

SEQ ID NO: 289833 - DNA, 15 bp, Homo sapiens
ataaccgatctcttt

SEQ ID NO: 289834 - DNA, 15 bp, Homo sapiens
gataaccgatctctt

SEQ ID NO: 289835 - DNA, 15 bp, Homo sapiens
tgataaccgatctct

SEQ ID NO: 289836 - DNA, 15 bp, Homo sapiens
ctgataaccgatctc

SEQ ID NO: 289837 - DNA, 15 bp, Homo sapiens
tctgataaccgatct

SEQ ID NO: 289838 - DNA, 15 bp, Homo sapiens
ttctgataaccgatc

SEQ ID NO: 289839 - DNA, 15 bp, Homo sapiens
attctgataaccgat

SEQ ID NO: 289840 - DNA, 15 bp, Homo sapiens
tattctgataaccga

SEQ ID NO: 289841 - DNA, 15 bp, Homo sapiens
ttattctgataaccg

SEQ ID NO: 289842 - DNA, 15 bp, Homo sapiens
attattctgataacc

SEQ ID NO: 289843 - DNA, 15 bp, Homo sapiens
cattattctgataac

SEQ ID NO: 289844 - DNA, 15 bp, Homo sapiens
ccattattctgataa

SEQ ID NO: 289845 - DNA, 15 bp, Homo sapiens
tccattattctgata

SEQ ID NO: 289846 - DNA, 15 bp, Homo sapiens
gtccattattctgat

SEQ ID NO: 289847 - DNA, 15 bp, Homo sapiens
cgtccattattctga

SEQ ID NO: 289848 - DNA, 15 bp, Homo sapiens
tcgtccattattctg

SEQ ID NO: 289849 - DNA, 15 bp, Homo sapiens
ctcgtccattattct

SEQ ID NO: 289850 - DNA, 15 bp, Homo sapiens
tctcgtccattattc

SEQ ID NO: 289851 - DNA, 15 bp, Homo sapiens
gtctcgtccattatt

SEQ ID NO: 289852 - DNA, 15 bp, Homo sapiens
ggtctcgtccattat

SEQ ID NO: 289853 - DNA, 15 bp, Homo sapiens
aggtctcgtccatta

SEQ ID NO: 289854 - DNA, 15 bp, Homo sapiens
caggtctcgtccatt

SEQ ID NO: 289855 - DNA, 15 bp, Homo sapiens
acaggtctcgtccat

SEQ ID NO: 289856 - DNA, 15 bp, Homo sapiens
cacaggtctcgtcca

SEQ ID NO: 289857 - DNA, 15 bp, Homo sapiens
gcacaggtctcgtcc

SEQ ID NO: 289858 - DNA, 15 bp, Homo sapiens
agcacaggtctcgtc

SEQ ID NO: 289859 - DNA, 15 bp, Homo sapiens
aagcacaggtctcgt

SEQ ID NO: 289860 - DNA, 15 bp, Homo sapiens
gaagcacaggtctcg

SEQ ID NO: 289861 - DNA, 15 bp, Homo sapiens
agaagcacaggtctc

SEQ ID NO: 289862 - DNA, 15 bp, Homo sapiens
cagaagcacaggtct

SEQ ID NO: 289863 - DNA, 15 bp, Homo sapiens
tcagaagcacaggtc

SEQ ID NO: 289864 - DNA, 15 bp, Homo sapiens
ttcagaagcacaggt

SEQ ID NO: 289865 - DNA, 15 bp, Homo sapiens
tttcagaagcacagg

SEQ ID NO: 289866 - DNA, 15 bp, Homo sapiens
ttttcagaagcacag

SEQ ID NO: 289867 - DNA, 15 bp, Homo sapiens
gttttcagaagcaca

SEQ ID NO: 289868 - DNA, 15 bp, Homo sapiens
agttttcagaagcac

SEQ ID NO: 289869 - DNA, 15 bp, Homo sapiens
cagttttcagaagca

SEQ ID NO: 289870 - DNA, 15 bp, Homo sapiens
gcagttttcagaagc

SEQ ID NO: 289871 - DNA, 15 bp, Homo sapiens
tgcagttttcagaag

SEQ ID NO: 289872 - DNA, 15 bp, Homo sapiens
ttgcagttttcagaa

SEQ ID NO: 289873 - DNA, 15 bp, Homo sapiens
attgcagttttcaga

SEQ ID NO: 289874 - DNA, 15 bp, Homo sapiens
gattgcagttttcag

SEQ ID NO: 289875 - DNA, 15 bp, Homo sapiens
agattgcagttttca

SEQ ID NO: 289876 - DNA, 15 bp, Homo sapiens
gagattgcagttttc

SEQ ID NO: 289877 - DNA, 15 bp, Homo sapiens
tgagattgcagtttt

SEQ ID NO: 289878 - DNA, 15 bp, Homo sapiens
ttgagattgcagttt

SEQ ID NO: 289879 - DNA, 15 bp, Homo sapiens
gttgagattgcagtt

SEQ ID NO: 289880 - DNA, 15 bp, Homo sapiens
agttgagattgcagt

SEQ ID NO: 289881 - DNA, 15 bp, Homo sapiens
gagttgagattgcag

SEQ ID NO: 289882 - DNA, 15 bp, Homo sapiens
tgagttgagattgca

SEQ ID NO: 289883 - DNA, 15 bp, Homo sapiens
atgagttgagattgc

SEQ ID NO: 289884 - DNA, 15 bp, Homo sapiens
aatgagttgagattg

SEQ ID NO: 289885 - DNA, 15 bp, Homo sapiens
gaatgagttgagatt

SEQ ID NO: 289886 - DNA, 15 bp, Homo sapiens
tgaatgagttgagat

SEQ ID NO: 289887 - DNA, 15 bp, Homo sapiens
atgaatgagttgaga

SEQ ID NO: 289888 - DNA, 15 bp, Homo sapiens
catgaatgagttgag

SEQ ID NO: 289889 - DNA, 15 bp, Homo sapiens
ccatgaatgagttga

SEQ ID NO: 289890 - DNA, 15 bp, Homo sapiens
accatgaatgagttg

SEQ ID NO: 289891 - DNA, 15 bp, Homo sapiens
aaccatgaatgagtt

SEQ ID NO: 289892 - DNA, 15 bp, Homo sapiens
aaaccatgaatgagt

SEQ ID NO: 289893 - DNA, 15 bp, Homo sapiens
caaaccatgaatgag

SEQ ID NO: 289894 - DNA, 15 bp, Homo sapiens
acaaaccatgaatga

SEQ ID NO: 289895 - DNA, 15 bp, Homo sapiens
cacaaaccatgaatg

SEQ ID NO: 289896 - DNA, 15 bp, Homo sapiens
tcacaaaccatgaat

SEQ ID NO: 289897 - DNA, 15 bp, Homo sapiens
ttcacaaaccatgaa

SEQ ID NO: 289898 - DNA, 15 bp, Homo sapiens
tttcacaaaccatga

SEQ ID NO: 289899 - DNA, 15 bp, Homo sapiens
ctttcacaaaccatg

SEQ ID NO: 289900 - DNA, 15 bp, Homo sapiens
cctttcacaaaccat

SEQ ID NO: 289901 - DNA, 15 bp, Homo sapiens
tcctttcacaaacca

SEQ ID NO: 289902 - DNA, 15 bp, Homo sapiens
ttcctttcacaaacc

SEQ ID NO: 289903 - DNA, 15 bp, Homo sapiens
tttcctttcacaaac

SEQ ID NO: 289904 - DNA, 15 bp, Homo sapiens
ttttcctttcacaaa

SEQ ID NO: 289905 - DNA, 15 bp, Homo sapiens
tttttcctttcacaa

SEQ ID NO: 289906 - DNA, 15 bp, Homo sapiens
gtttttcctttcaca

SEQ ID NO: 289907 - DNA, 15 bp, Homo sapiens
tgtttttcctttcac

SEQ ID NO: 289908 - DNA, 15 bp, Homo sapiens
ttgtttttcctttca

SEQ ID NO: 289909 - DNA, 15 bp, Homo sapiens
cttgtttttcctttc

SEQ ID NO: 289910 - DNA, 15 bp, Homo sapiens
gcttgtttttccttt

SEQ ID NO: 289911 - DNA, 15 bp, Homo sapiens
tgcttgtttttcctt

SEQ ID NO: 289912 - DNA, 15 bp, Homo sapiens
atgcttgtttttcct

SEQ ID NO: 289913 - DNA, 15 bp, Homo sapiens
aatgcttgtttttcc

SEQ ID NO: 289914 - DNA, 15 bp, Homo sapiens
aaatgcttgtttttc

SEQ ID NO: 289915 - DNA, 15 bp, Homo sapiens
taaatgcttgttttt

SEQ ID NO: 289916 - DNA, 15 bp, Homo sapiens
ttaaatgcttgtttt

SEQ ID NO: 289917 - DNA, 15 bp, Homo sapiens
tttaaatgcttgttt

SEQ ID NO: 289918 - DNA, 15 bp, Homo sapiens
ttttaaatgcttgtt

SEQ ID NO: 289919 - DNA, 15 bp, Homo sapiens
tttttaaatgcttgt

SEQ ID NO: 289920 - DNA, 15 bp, Homo sapiens
ttttttaaatgcttg

SEQ ID NO: 289921 - DNA, 15 bp, Homo sapiens
cttttttaaatgctt

SEQ ID NO: 289922 - DNA, 15 bp, Homo sapiens
tcttttttaaatgct

SEQ ID NO: 289923 - DNA, 15 bp, Homo sapiens
atcttttttaaatgc

SEQ ID NO: 289924 - DNA, 15 bp, Homo sapiens
catcttttttaaatg

SEQ ID NO: 289925 - DNA, 15 bp, Homo sapiens
tcatcttttttaaat

SEQ ID NO: 289926 - DNA, 15 bp, Homo sapiens
gtcatcttttttaaa

SEQ ID NO: 289927 - DNA, 15 bp, Homo sapiens
tgtcatcttttttaa

SEQ ID NO: 289928 - DNA, 15 bp, Homo sapiens
gtgtcatctttttta

SEQ ID NO: 289929 - DNA, 15 bp, Homo sapiens
tgtgtcatctttttt

SEQ ID NO: 289930 - DNA, 15 bp, Homo sapiens
ctgtgtcatcttttt

SEQ ID NO: 289931 - DNA, 15 bp, Homo sapiens
gctgtgtcatctttt

SEQ ID NO: 289932 - DNA, 15 bp, Homo sapiens
agctgtgtcatcttt

SEQ ID NO: 289933 - DNA, 15 bp, Homo sapiens
cagctgtgtcatctt

SEQ ID NO: 289934 - DNA, 15 bp, Homo sapiens
ccagctgtgtcatct

SEQ ID NO: 289935 - DNA, 15 bp, Homo sapiens
cccagctgtgtcatc

SEQ ID NO: 289936 - DNA, 15 bp, Homo sapiens
gcccagctgtgtcat

SEQ ID NO: 289937 - DNA, 15 bp, Homo sapiens
tgcccagctgtgtca

SEQ ID NO: 289938 - DNA, 15 bp, Homo sapiens
atgcccagctgtgtc

SEQ ID NO: 289939 - DNA, 15 bp, Homo sapiens
catgcccagctgtgt

SEQ ID NO: 289940 - DNA, 15 bp, Homo sapiens
ccatgcccagctgtg

SEQ ID NO: 289941 - DNA, 15 bp, Homo sapiens
accatgcccagctgt

SEQ ID NO: 289942 - DNA, 15 bp, Homo sapiens
caccatgcccagctg

SEQ ID NO: 289943 - DNA, 15 bp, Homo sapiens
aagccaccatgccca

SEQ ID NO: 289944 - DNA, 15 bp, Homo sapiens
aaagccaccatgccc

SEQ ID NO: 289945 - DNA, 15 bp, Homo sapiens
aaaagccaccatgcc

SEQ ID NO: 289946 - DNA, 15 bp, Homo sapiens
taaaagccaccatgc

SEQ ID NO: 289947 - DNA, 15 bp, Homo sapiens
gtaaaagccaccatg

SEQ ID NO: 289948 - DNA, 15 bp, Homo sapiens
ggtaaaagccaccat

SEQ ID NO: 289949 - DNA, 15 bp, Homo sapiens
aggtaaaagccacca

SEQ ID NO: 289950 - DNA, 15 bp, Homo sapiens
taggtaaaagccacc

SEQ ID NO: 289951 - DNA, 15 bp, Homo sapiens
ataggtaaaagccac

SEQ ID NO: 289952 - DNA, 15 bp, Homo sapiens
tataggtaaaagcca

SEQ ID NO: 289953 - DNA, 15 bp, Homo sapiens
ttataggtaaaagcc

SEQ ID NO: 289954 - DNA, 15 bp, Homo sapiens
attataggtaaaagc

SEQ ID NO: 289955 - DNA, 15 bp, Homo sapiens
gattataggtaaaag

SEQ ID NO: 289956 - DNA, 15 bp, Homo sapiens
ggattataggtaaaa

SEQ ID NO: 289957 - DNA, 15 bp, Homo sapiens
gggattataggtaaa

SEQ ID NO: 289958 - DNA, 15 bp, Homo sapiens
tgggattataggtaa

SEQ ID NO: 289959 - DNA, 15 bp, Homo sapiens
ctgggattataggta

SEQ ID NO: 289960 - DNA, 15 bp, Homo sapiens
gctgggattataggt

SEQ ID NO: 289961 - DNA, 15 bp, Homo sapiens
agctgggattatagg

SEQ ID NO: 289962 - DNA, 15 bp, Homo sapiens
tagctgggattatag

SEQ ID NO: 289963 - DNA, 15 bp, Homo sapiens
gtagctgggattata

SEQ ID NO: 289964 - DNA, 15 bp, Homo sapiens
agtagctgggattat

SEQ ID NO: 289965 - DNA, 15 bp, Homo sapiens
tgagtagctgggatt

SEQ ID NO: 289966 - DNA, 15 bp, Homo sapiens
ctgagtagctgggat

SEQ ID NO: 289967 - DNA, 15 bp, Homo sapiens
actcagcctcctgag

SEQ ID NO: 289968 - DNA, 15 bp, Homo sapiens
gactcagcctcctga

SEQ ID NO: 289969 - DNA, 15 bp, Homo sapiens
tgactcagcctcctg

SEQ ID NO: 289970 - DNA, 15 bp, Homo sapiens
ttgactcagcctcct

SEQ ID NO: 289971 - DNA, 15 bp, Homo sapiens
cttgactcagcctcc

SEQ ID NO: 289972 - DNA, 15 bp, Homo sapiens
tcttgactcagcctc

SEQ ID NO: 289973 - DNA, 15 bp, Homo sapiens
ctcttgactcagcct

SEQ ID NO: 289974 - DNA, 15 bp, Homo sapiens
actcttgactcagcc

SEQ ID NO: 289975 - DNA, 15 bp, Homo sapiens
tactcttgactcagc

SEQ ID NO: 289976 - DNA, 15 bp, Homo sapiens
atactcttgactcag

SEQ ID NO: 289977 - DNA, 15 bp, Homo sapiens
catactcttgactca

SEQ ID NO: 289978 - DNA, 15 bp, Homo sapiens
ccatactcttgactc

SEQ ID NO: 289979 - DNA, 15 bp, Homo sapiens
gccatactcttgact

SEQ ID NO: 289980 - DNA, 15 bp, Homo sapiens
agccatactcttgac

SEQ ID NO: 289981 - DNA, 15 bp, Homo sapiens
aagccatactcttga

SEQ ID NO: 289982 - DNA, 15 bp, Homo sapiens
caagccatactcttg

SEQ ID NO: 289983 - DNA, 15 bp, Homo sapiens
tcaagccatactctt

SEQ ID NO: 289984 - DNA, 15 bp, Homo sapiens
ctcaagccatactct

SEQ ID NO: 289985 - DNA, 15 bp, Homo sapiens
cctcaagccatactc

SEQ ID NO: 289986 - DNA, 15 bp, Homo sapiens
gcctcaagccatact

SEQ ID NO: 289987 - DNA, 15 bp, Homo sapiens
ggcctcaagccatac

SEQ ID NO: 289988 - DNA, 15 bp, Homo sapiens
tggcctcaagccata

SEQ ID NO: 289989 - DNA, 15 bp, Homo sapiens
ttggcctcaagccat

SEQ ID NO: 289990 - DNA, 15 bp, Homo sapiens
cttggcctcaagcca

SEQ ID NO: 289991 - DNA, 15 bp, Homo sapiens
tcttggcctcaagcc

SEQ ID NO: 289992 - DNA, 15 bp, Homo sapiens
ctcttggcctcaagc

SEQ ID NO: 289993 - DNA, 15 bp, Homo sapiens
actcttggcctcaag

SEQ ID NO: 289994 - DNA, 15 bp, Homo sapiens
aactcttggcctcaa

SEQ ID NO: 289995 - DNA, 15 bp, Homo sapiens
aaactcttggcctca

SEQ ID NO: 289996 - DNA, 15 bp, Homo sapiens
caaactcttggcctc

SEQ ID NO: 289997 - DNA, 15 bp, Homo sapiens
tcaaactcttggcct

SEQ ID NO: 289998 - DNA, 15 bp, Homo sapiens
tctcaaactcttggc

SEQ ID NO: 289999 - DNA, 15 bp, Homo sapiens
atctcaaactcttgg

SEQ ID NO: 290000 - DNA, 15 bp, Homo sapiens
gatctcaaactcttg

SEQ ID NO: 290001 - DNA, 15 bp, Homo sapiens
tgatctcaaactctt

SEQ ID NO: 290002 - DNA, 15 bp, Homo sapiens
ctgatctcaaactct

SEQ ID NO: 290003 - DNA, 15 bp, Homo sapiens
gctgatctcaaactc

SEQ ID NO: 290004 - DNA, 15 bp, Homo sapiens
ggctgatctcaaact

SEQ ID NO: 290005 - DNA, 15 bp, Homo sapiens
aggctgatctcaaac

SEQ ID NO: 290006 - DNA, 15 bp, Homo sapiens
caggctgatctcaaa

SEQ ID NO: 290007 - DNA, 15 bp, Homo sapiens
ccaggctgatctcaa

SEQ ID NO: 290008 - DNA, 15 bp, Homo sapiens
cccaggctgatctca

SEQ ID NO: 290009 - DNA, 15 bp, Homo sapiens
tcccaggctgatctc

SEQ ID NO: 290010 - DNA, 15 bp, Homo sapiens
ttcccaggctgatct

SEQ ID NO: 290011 - DNA, 15 bp, Homo sapiens
tttcccaggctgatc

SEQ ID NO: 290012 - DNA, 15 bp, Homo sapiens
gtttcccaggctgat

SEQ ID NO: 290013 - DNA, 15 bp, Homo sapiens
tgtttcccaggctga

SEQ ID NO: 290014 - DNA, 15 bp, Homo sapiens
ctgtttcccaggctg

SEQ ID NO: 290015 - DNA, 15 bp, Homo sapiens
tctgtttcccaggct

SEQ ID NO: 290016 - DNA, 15 bp, Homo sapiens
ctctgtttcccaggc

SEQ ID NO: 290017 - DNA, 15 bp, Homo sapiens
actctgtttcccagg

SEQ ID NO: 290018 - DNA, 15 bp, Homo sapiens
cactctgtttcccag

SEQ ID NO: 290019 - DNA, 15 bp, Homo sapiens
ccactctgtttccca

SEQ ID NO: 290020 - DNA, 15 bp, Homo sapiens
cccactctgtttccc

SEQ ID NO: 290021 - DNA, 15 bp, Homo sapiens
tcccactctgtttcc

SEQ ID NO: 290022 - DNA, 15 bp, Homo sapiens
gtcccactctgtttc

SEQ ID NO: 290023 - DNA, 15 bp, Homo sapiens
ggtcccactctgttt

SEQ ID NO: 290024 - DNA, 15 bp, Homo sapiens
aggtcccactctgtt

SEQ ID NO: 290025 - DNA, 15 bp, Homo sapiens
aaggtcccactctgt

SEQ ID NO: 290026 - DNA, 15 bp, Homo sapiens
caaggtcccactctg

SEQ ID NO: 290027 - DNA, 15 bp, Homo sapiens
acaaggtcccactct

SEQ ID NO: 290028 - DNA, 15 bp, Homo sapiens
gacaaggtcccactc

SEQ ID NO: 290029 - DNA, 15 bp, Homo sapiens
agacaaggtcccact

SEQ ID NO: 290030 - DNA, 15 bp, Homo sapiens
gagacaaggtcccac

SEQ ID NO: 290031 - DNA, 15 bp, Homo sapiens
agagacaaggtccca

SEQ ID NO: 290032 - DNA, 15 bp, Homo sapiens
tagagacaaggtccc

SEQ ID NO: 290033 - DNA, 15 bp, Homo sapiens
ttagagacaaggtcc

SEQ ID NO: 290034 - DNA, 15 bp, Homo sapiens
tttagagacaaggtc

SEQ ID NO: 290035 - DNA, 15 bp, Homo sapiens
ttttagagacaaggt

SEQ ID NO: 290036 - DNA, 15 bp, Homo sapiens
cttttagagacaagg

SEQ ID NO: 290037 - DNA, 15 bp, Homo sapiens
acttttagagacaag

SEQ ID NO: 290038 - DNA, 15 bp, Homo sapiens
tacttttagagacaa

SEQ ID NO: 290039 - DNA, 15 bp, Homo sapiens
gtacttttagagaca

SEQ ID NO: 290040 - DNA, 15 bp, Homo sapiens
tgtacttttagagac

SEQ ID NO: 290041 - DNA, 15 bp, Homo sapiens
atgtacttttagaga

SEQ ID NO: 290042 - DNA, 15 bp, Homo sapiens
tatgtacttttagag

SEQ ID NO: 290043 - DNA, 15 bp, Homo sapiens
gtatgtacttttaga

SEQ ID NO: 290044 - DNA, 15 bp, Homo sapiens
tgtatgtacttttag

SEQ ID NO: 290045 - DNA, 15 bp, Homo sapiens
atgtatgtactttta

SEQ ID NO: 290046 - DNA, 15 bp, Homo sapiens
tatgtatgtactttt

SEQ ID NO: 290047 - DNA, 15 bp, Homo sapiens
ttatgtatgtacttt

SEQ ID NO: 290048 - DNA, 15 bp, Homo sapiens
tttatgtatgtactt

SEQ ID NO: 290049 - DNA, 15 bp, Homo sapiens
atttatgtatgtact

SEQ ID NO: 290050 - DNA, 15 bp, Homo sapiens
tatttatgtatgtac

SEQ ID NO: 290051 - DNA, 15 bp, Homo sapiens
ttatttatgtatgta

SEQ ID NO: 290052 - DNA, 15 bp, Homo sapiens
tttatttatgtatgt

SEQ ID NO: 290053 - DNA, 15 bp, Homo sapiens
atttatttatgtatg

SEQ ID NO: 290054 - DNA, 15 bp, Homo sapiens
tatttatttatgtat

SEQ ID NO: 290055 - DNA, 15 bp, Homo sapiens
ttatttatttatgta

SEQ ID NO: 290056 - DNA, 15 bp, Homo sapiens
tttatttatttatgt

SEQ ID NO: 290057 - DNA, 15 bp, Homo sapiens
ttttatttatttatg

SEQ ID NO: 290058 - DNA, 15 bp, Homo sapiens
gttttatttatttat

SEQ ID NO: 290059 - DNA, 15 bp, Homo sapiens
tgttttatttattta

SEQ ID NO: 290060 - DNA, 15 bp, Homo sapiens
atgttttatttattt

SEQ ID NO: 290061 - DNA, 15 bp, Homo sapiens
catgttttatttatt

SEQ ID NO: 290062 - DNA, 15 bp, Homo sapiens
tcatgttttatttat

SEQ ID NO: 290063 - DNA, 15 bp, Homo sapiens
ctcatgttttattta

SEQ ID NO: 290064 - DNA, 15 bp, Homo sapiens
tctcatgttttattt

SEQ ID NO: 290065 - DNA, 15 bp, Homo sapiens
atctcatgttttatt

SEQ ID NO: 290066 - DNA, 15 bp, Homo sapiens
aatctcatgttttat

SEQ ID NO: 290067 - DNA, 15 bp, Homo sapiens
caatctcatgtttta

SEQ ID NO: 290068 - DNA, 15 bp, Homo sapiens
tcaatctcatgtttt

SEQ ID NO: 290069 - DNA, 15 bp, Homo sapiens
atcaatctcatgttt

SEQ ID NO: 290070 - DNA, 15 bp, Homo sapiens
gatcaatctcatgtt

SEQ ID NO: 290071 - DNA, 15 bp, Homo sapiens
tgatcaatctcatgt

SEQ ID NO: 290072 - DNA, 15 bp, Homo sapiens
ctgatcaatctcatg

SEQ ID NO: 290073 - DNA, 15 bp, Homo sapiens
gctgatcaatctcat

SEQ ID NO: 290074 - DNA, 15 bp, Homo sapiens
ggctgatcaatctca

SEQ ID NO: 290075 - DNA, 15 bp, Homo sapiens
gggctgatcaatctc

SEQ ID NO: 290076 - DNA, 15 bp, Homo sapiens
tgggctgatcaatct

SEQ ID NO: 290077 - DNA, 15 bp, Homo sapiens
ttgggctgatcaatc

SEQ ID NO: 290078 - DNA, 15 bp, Homo sapiens
cttgggctgatcaat

SEQ ID NO: 290079 - DNA, 15 bp, Homo sapiens
tcttgggctgatcaa

SEQ ID NO: 290080 - DNA, 15 bp, Homo sapiens
atcttgggctgatca

SEQ ID NO: 290081 - DNA, 15 bp, Homo sapiens
catcttgggctgatc

SEQ ID NO: 290082 - DNA, 15 bp, Homo sapiens
ccatcttgggctgat

SEQ ID NO: 290083 - DNA, 15 bp, Homo sapiens
tccatcttgggctga

SEQ ID NO: 290084 - DNA, 15 bp, Homo sapiens
ttccatcttgggctg

SEQ ID NO: 290085 - DNA, 15 bp, Homo sapiens
tttccatcttgggct

SEQ ID NO: 290086 - DNA, 15 bp, Homo sapiens
atttccatcttgggc

SEQ ID NO: 290087 - DNA, 15 bp, Homo sapiens
tatttccatcttggg

SEQ ID NO: 290088 - DNA, 15 bp, Homo sapiens
atatttccatcttgg

SEQ ID NO: 290089 - DNA, 15 bp, Homo sapiens
tatatttccatcttg

SEQ ID NO: 290090 - DNA, 15 bp, Homo sapiens
ctatatttccatctt

SEQ ID NO: 290091 - DNA, 15 bp, Homo sapiens
gctatatttccatct

SEQ ID NO: 290092 - DNA, 15 bp, Homo sapiens
agctatatttccatc

SEQ ID NO: 290093 - DNA, 15 bp, Homo sapiens
tagctatatttccat

SEQ ID NO: 290094 - DNA, 15 bp, Homo sapiens
ctagctatatttcca

SEQ ID NO: 290095 - DNA, 15 bp, Homo sapiens
tctagctatatttcc

SEQ ID NO: 290096 - DNA, 15 bp, Homo sapiens
ctctagctatatttc

SEQ ID NO: 290097 - DNA, 15 bp, Homo sapiens
tctctagctatattt

SEQ ID NO: 290098 - DNA, 15 bp, Homo sapiens
ttctctagctatatt

SEQ ID NO: 290099 - DNA, 15 bp, Homo sapiens
cttctctagctatat

SEQ ID NO: 290100 - DNA, 15 bp, Homo sapiens
acttctctagctata

SEQ ID NO: 290101 - DNA, 15 bp, Homo sapiens
aacttctctagctat

SEQ ID NO: 290102 - DNA, 15 bp, Homo sapiens
gaacttctctagcta

SEQ ID NO: 290103 - DNA, 15 bp, Homo sapiens
tgaacttctctagct

SEQ ID NO: 290104 - DNA, 15 bp, Homo sapiens
ttgaacttctctagc

SEQ ID NO: 290105 - DNA, 15 bp, Homo sapiens
attgaacttctctag

SEQ ID NO: 290106 - DNA, 15 bp, Homo sapiens
aattgaacttctcta

SEQ ID NO: 290107 - DNA, 15 bp, Homo sapiens
aaattgaacttctct

SEQ ID NO: 290108 - DNA, 15 bp, Homo sapiens
caaattgaacttctc

SEQ ID NO: 290109 - DNA, 15 bp, Homo sapiens
tcaaattgaacttct

SEQ ID NO: 290110 - DNA, 15 bp, Homo sapiens
atcaaattgaacttc

SEQ ID NO: 290111 - DNA, 15 bp, Homo sapiens
aatcaaattgaactt

SEQ ID NO: 290112 - DNA, 15 bp, Homo sapiens
aaatcaaattgaact

SEQ ID NO: 290113 - DNA, 15 bp, Homo sapiens
aaaatcaaattgaac

SEQ ID NO: 290114 - DNA, 15 bp, Homo sapiens
taaaatcaaattgaa

SEQ ID NO: 290115 - DNA, 15 bp, Homo sapiens
ataaaatcaaattga

SEQ ID NO: 290116 - DNA, 15 bp, Homo sapiens
cataaaatcaaattg

SEQ ID NO: 290117 - DNA, 15 bp, Homo sapiens
tcataaaatcaaatt

SEQ ID NO: 290118 - DNA, 15 bp, Homo sapiens
ttcataaaatcaaat

SEQ ID NO: 290119 - DNA, 15 bp, Homo sapiens
tttcataaaatcaaa

SEQ ID NO: 290120 - DNA, 15 bp, Homo sapiens
gtttcataaaatcaa

SEQ ID NO: 290121 - DNA, 15 bp, Homo sapiens
agtttcataaaatca

SEQ ID NO: 290122 - DNA, 15 bp, Homo sapiens
aagtttcataaaatc

SEQ ID NO: 290123 - DNA, 15 bp, Homo sapiens
aaagtttcataaaat

SEQ ID NO: 290124 - DNA, 15 bp, Homo sapiens
aaaagtttcataaaa

SEQ ID NO: 290125 - DNA, 15 bp, Homo sapiens
caaaagtttcataaa

SEQ ID NO: 290126 - DNA, 15 bp, Homo sapiens
acaaaagtttcataa

SEQ ID NO: 290127 - DNA, 15 bp, Homo sapiens
aacaaaagtttcata

SEQ ID NO: 290128 - DNA, 15 bp, Homo sapiens
aaacaaaagtttcat

SEQ ID NO: 290129 - DNA, 15 bp, Homo sapiens
gaaacaaaagtttca

SEQ ID NO: 290130 - DNA, 15 bp, Homo sapiens
ggaaacaaaagtttc

SEQ ID NO: 290131 - DNA, 15 bp, Homo sapiens
tggaaacaaaagttt

SEQ ID NO: 290132 - DNA, 15 bp, Homo sapiens
atggaaacaaaagtt

SEQ ID NO: 290133 - DNA, 15 bp, Homo sapiens
aatggaaacaaaagt

SEQ ID NO: 290134 - DNA, 15 bp, Homo sapiens
taatggaaacaaaag

SEQ ID NO: 290135 - DNA, 15 bp, Homo sapiens
gtaatggaaacaaaa

SEQ ID NO: 290136 - DNA, 15 bp, Homo sapiens
tgtaatggaaacaaa

SEQ ID NO: 290137 - DNA, 15 bp, Homo sapiens
atgtaatggaaacaa

SEQ ID NO: 290138 - DNA, 15 bp, Homo sapiens
tatgtaatggaaaca

SEQ ID NO: 290139 - DNA, 15 bp, Homo sapiens
atatgtaatggaaac

SEQ ID NO: 290140 - DNA, 15 bp, Homo sapiens
tatatgtaatggaaa

SEQ ID NO: 290141 - DNA, 15 bp, Homo sapiens
atatatgtaatggaa

SEQ ID NO: 290142 - DNA, 15 bp, Homo sapiens
tatatatgtaatgga

SEQ ID NO: 290143 - DNA, 15 bp, Homo sapiens
ctatatatgtaatgg

SEQ ID NO: 290144 - DNA, 15 bp, Homo sapiens
tctatatatgtaatg

SEQ ID NO: 290145 - DNA, 15 bp, Homo sapiens
atctatatatgtaat

SEQ ID NO: 290146 - DNA, 15 bp, Homo sapiens
gatctatatatgtaa

SEQ ID NO: 290147 - DNA, 15 bp, Homo sapiens
agatctatatatgta

SEQ ID NO: 290148 - DNA, 15 bp, Homo sapiens
tagatctatatatgt

SEQ ID NO: 290149 - DNA, 15 bp, Homo sapiens
atagatctatatatg

SEQ ID NO: 290150 - DNA, 15 bp, Homo sapiens
catagatctatatat

SEQ ID NO: 290151 - DNA, 15 bp, Homo sapiens
acatagatctatata

SEQ ID NO: 290152 - DNA, 15 bp, Homo sapiens
tacatagatctatat

SEQ ID NO: 290153 - DNA, 15 bp, Homo sapiens
gtacatagatctata

SEQ ID NO: 290154 - DNA, 15 bp, Homo sapiens
agtacatagatctat

SEQ ID NO: 290155 - DNA, 15 bp, Homo sapiens
cagtacatagatcta

SEQ ID NO: 290156 - DNA, 15 bp, Homo sapiens
acagtacatagatct

SEQ ID NO: 290157 - DNA, 15 bp, Homo sapiens
tacagtacatagatc

SEQ ID NO: 290158 - DNA, 15 bp, Homo sapiens
atacagtacatagat

SEQ ID NO: 290159 - DNA, 15 bp, Homo sapiens
tatacagtacataga

SEQ ID NO: 290160 - DNA, 15 bp, Homo sapiens
ttatacagtacatag

SEQ ID NO: 290161 - DNA, 15 bp, Homo sapiens
tttatacagtacata

SEQ ID NO: 290162 - DNA, 15 bp, Homo sapiens
atttatacagtacat

SEQ ID NO: 290163 - DNA, 15 bp, Homo sapiens
catttatacagtaca

SEQ ID NO: 290164 - DNA, 15 bp, Homo sapiens
acatttatacagtac

SEQ ID NO: 290165 - DNA, 15 bp, Homo sapiens
tacatttatacagta

SEQ ID NO: 290166 - DNA, 15 bp, Homo sapiens
atacatttatacagt

SEQ ID NO: 290167 - DNA, 15 bp, Homo sapiens
tatacatttatacag

SEQ ID NO: 290168 - DNA, 15 bp, Homo sapiens
atatacatttataca

SEQ ID NO: 290169 - DNA, 15 bp, Homo sapiens
tatatacatttatac

SEQ ID NO: 290170 - DNA, 15 bp, Homo sapiens
atatatacatttata

SEQ ID NO: 290171 - DNA, 15 bp, Homo sapiens
tatatatacatttat

SEQ ID NO: 290172 - DNA, 15 bp, Homo sapiens
gtatatatacattta

SEQ ID NO: 290173 - DNA, 15 bp, Homo sapiens
agtatatatacattt

SEQ ID NO: 290174 - DNA, 15 bp, Homo sapiens
cagtatatatacatt

SEQ ID NO: 290175 - DNA, 15 bp, Homo sapiens
acagtatatatacat

SEQ ID NO: 290176 - DNA, 15 bp, Homo sapiens
tacagtatatataca

SEQ ID NO: 290177 - DNA, 15 bp, Homo sapiens
atacagtatatatac

SEQ ID NO: 290178 - DNA, 15 bp, Homo sapiens
tatacagtatatata

SEQ ID NO: 290179 - DNA, 15 bp, Homo sapiens
ttatacagtatatat

SEQ ID NO: 290180 - DNA, 15 bp, Homo sapiens
tttatacagtatata

SEQ ID NO: 290181 - DNA, 15 bp, Homo sapiens
gtttatacagtatat

SEQ ID NO: 290182 - DNA, 15 bp, Homo sapiens
cgtttatacagtata

SEQ ID NO: 290183 - DNA, 15 bp, Homo sapiens
acgtttatacagtat

SEQ ID NO: 290184 - DNA, 15 bp, Homo sapiens
tacgtttatacagta

SEQ ID NO: 290185 - DNA, 15 bp, Homo sapiens
atacgtttatacagt

SEQ ID NO: 290186 - DNA, 15 bp, Homo sapiens
catacgtttatacag

SEQ ID NO: 290187 - DNA, 15 bp, Homo sapiens
acatacgtttataca

SEQ ID NO: 290188 - DNA, 15 bp, Homo sapiens
tacatacgtttatac

SEQ ID NO: 290189 - DNA, 15 bp, Homo sapiens
atacatacgtttata

SEQ ID NO: 290190 - DNA, 15 bp, Homo sapiens
tatacatacgtttat

SEQ ID NO: 290191 - DNA, 15 bp, Homo sapiens
gtatacatacgttta

SEQ ID NO: 290192 - DNA, 15 bp, Homo sapiens
agtatacatacgttt

SEQ ID NO: 290193 - DNA, 15 bp, Homo sapiens
cagtatacatacgtt

SEQ ID NO: 290194 - DNA, 15 bp, Homo sapiens
acagtatacatacgt

SEQ ID NO: 290195 - DNA, 15 bp, Homo sapiens
tacagtatacatacg

SEQ ID NO: 290196 - DNA, 15 bp, Homo sapiens
atacagtatacatac

SEQ ID NO: 290197 - DNA, 15 bp, Homo sapiens
tatacagtatacata

SEQ ID NO: 290198 - DNA, 15 bp, Homo sapiens
ttatacagtatacat

SEQ ID NO: 290199 - DNA, 15 bp, Homo sapiens
tttatacagtataca

SEQ ID NO: 290200 - DNA, 15 bp, Homo sapiens
atttatacagtatac

SEQ ID NO: 290201 - DNA, 15 bp, Homo sapiens
catttatacagtata

SEQ ID NO: 290202 - DNA, 15 bp, Homo sapiens
acatttatacagtat

SEQ ID NO: 290203 - DNA, 15 bp, Homo sapiens
gtacatttatacagt

SEQ ID NO: 290204 - DNA, 15 bp, Homo sapiens
agtacatttatacag

SEQ ID NO: 290205 - DNA, 15 bp, Homo sapiens
cagtacatttataca

SEQ ID NO: 290206 - DNA, 15 bp, Homo sapiens
tcagtacatttatac

SEQ ID NO: 290207 - DNA, 15 bp, Homo sapiens
atcagtacatttata

SEQ ID NO: 290208 - DNA, 15 bp, Homo sapiens
aatcagtacatttat

SEQ ID NO: 290209 - DNA, 15 bp, Homo sapiens
aaatcagtacattta

SEQ ID NO: 290210 - DNA, 15 bp, Homo sapiens
caaatcagtacattt

SEQ ID NO: 290211 - DNA, 15 bp, Homo sapiens
acaaatcagtacatt

SEQ ID NO: 290212 - DNA, 15 bp, Homo sapiens
cacaaatcagtacat

SEQ ID NO: 290213 - DNA, 15 bp, Homo sapiens
tcacaaatcagtaca

SEQ ID NO: 290214 - DNA, 15 bp, Homo sapiens
gtcacaaatcagtac

SEQ ID NO: 290215 - DNA, 15 bp, Homo sapiens
cgtcacaaatcagta

SEQ ID NO: 290216 - DNA, 15 bp, Homo sapiens
acgtcacaaatcagt

SEQ ID NO: 290217 - DNA, 15 bp, Homo sapiens
tacgtcacaaatcag

SEQ ID NO: 290218 - DNA, 15 bp, Homo sapiens
ttacgtcacaaatca

SEQ ID NO: 290219 - DNA, 15 bp, Homo sapiens
tttacgtcacaaatc

SEQ ID NO: 290220 - DNA, 15 bp, Homo sapiens
gtttacgtcacaaat

SEQ ID NO: 290221 - DNA, 15 bp, Homo sapiens
agtttacgtcacaaa

SEQ ID NO: 290222 - DNA, 15 bp, Homo sapiens
gagtttacgtcacaa

SEQ ID NO: 290223 - DNA, 15 bp, Homo sapiens
agagtttacgtcaca

SEQ ID NO: 290224 - DNA, 15 bp, Homo sapiens
cagagtttacgtcac

SEQ ID NO: 290225 - DNA, 15 bp, Homo sapiens
acagagtttacgtca

SEQ ID NO: 290226 - DNA, 15 bp, Homo sapiens
aacagagtttacgtc

SEQ ID NO: 290227 - DNA, 15 bp, Homo sapiens
aaacagagtttacgt

SEQ ID NO: 290228 - DNA, 15 bp, Homo sapiens
gaaacagagtttacg

SEQ ID NO: 290229 - DNA, 15 bp, Homo sapiens
agaaacagagtttac

SEQ ID NO: 290230 - DNA, 15 bp, Homo sapiens
aagaaacagagttta

SEQ ID NO: 290231 - DNA, 15 bp, Homo sapiens
taagaaacagagttt

SEQ ID NO: 290232 - DNA, 15 bp, Homo sapiens
gtaagaaacagagtt

SEQ ID NO: 290233 - DNA, 15 bp, Homo sapiens
agtaagaaacagagt

SEQ ID NO: 290234 - DNA, 15 bp, Homo sapiens
cagtaagaaacagag

SEQ ID NO: 290235 - DNA, 15 bp, Homo sapiens
acagtaagaaacaga

SEQ ID NO: 290236 - DNA, 15 bp, Homo sapiens
cacagtaagaaacag

SEQ ID NO: 290237 - DNA, 15 bp, Homo sapiens
ccacagtaagaaaca

SEQ ID NO: 290238 - DNA, 15 bp, Homo sapiens
tccacagtaagaaac

SEQ ID NO: 290239 - DNA, 15 bp, Homo sapiens
ttccacagtaagaaa

SEQ ID NO: 290240 - DNA, 15 bp, Homo sapiens
attccacagtaagaa

SEQ ID NO: 290241 - DNA, 15 bp, Homo sapiens
aattccacagtaaga

SEQ ID NO: 290242 - DNA, 15 bp, Homo sapiens
aaattccacagtaag

SEQ ID NO: 290243 - DNA, 15 bp, Homo sapiens
caaattccacagtaa

SEQ ID NO: 290244 - DNA, 15 bp, Homo sapiens
gcaaattccacagta

SEQ ID NO: 290245 - DNA, 15 bp, Homo sapiens
agcaaattccacagt

SEQ ID NO: 290246 - DNA, 15 bp, Homo sapiens
tagcaaattccacag

SEQ ID NO: 290247 - DNA, 15 bp, Homo sapiens
ttagcaaattccaca

SEQ ID NO: 290248 - DNA, 15 bp, Homo sapiens
tttagcaaattccac

SEQ ID NO: 290249 - DNA, 15 bp, Homo sapiens
ttttagcaaattcca

SEQ ID NO: 290250 - DNA, 15 bp, Homo sapiens
tttttagcaaattcc

SEQ ID NO: 290251 - DNA, 15 bp, Homo sapiens
ctttttagcaaattc

SEQ ID NO: 290252 - DNA, 15 bp, Homo sapiens
gctttttagcaaatt

SEQ ID NO: 290253 - DNA, 15 bp, Homo sapiens
cgctttttagcaaat

SEQ ID NO: 290254 - DNA, 15 bp, Homo sapiens
acgctttttagcaaa

SEQ ID NO: 290255 - DNA, 15 bp, Homo sapiens
aacgctttttagcaa

SEQ ID NO: 290256 - DNA, 15 bp, Homo sapiens
aaacgctttttagca

SEQ ID NO: 290257 - DNA, 15 bp, Homo sapiens
taaacgctttttagc

SEQ ID NO: 290258 - DNA, 15 bp, Homo sapiens
ttaaacgctttttag

SEQ ID NO: 290259 - DNA, 15 bp, Homo sapiens
cttaaacgcttttta

SEQ ID NO: 290260 - DNA, 15 bp, Homo sapiens
tcttaaacgcttttt

SEQ ID NO: 290261 - DNA, 15 bp, Homo sapiens
ttcttaaacgctttt

SEQ ID NO: 290262 - DNA, 15 bp, Homo sapiens
tttcttaaacgcttt

SEQ ID NO: 290263 - DNA, 15 bp, Homo sapiens
gtttcttaaacgctt

SEQ ID NO: 290264 - DNA, 15 bp, Homo sapiens
tgtttcttaaacgct

SEQ ID NO: 290265 - DNA, 15 bp, Homo sapiens
gtgtttcttaaacgc

SEQ ID NO: 290266 - DNA, 15 bp, Homo sapiens
agtgtttcttaaacg

SEQ ID NO: 290267 - DNA, 15 bp, Homo sapiens
tagtgtttcttaaac

SEQ ID NO: 290268 - DNA, 15 bp, Homo sapiens
ctagtgtttcttaaa

SEQ ID NO: 290269 - DNA, 15 bp, Homo sapiens
gctagtgtttcttaa

SEQ ID NO: 290270 - DNA, 15 bp, Homo sapiens
agctagtgtttctta

SEQ ID NO: 290271 - DNA, 15 bp, Homo sapiens
aagctagtgtttctt

SEQ ID NO: 290272 - DNA, 15 bp, Homo sapiens
aaagctagtgtttct

SEQ ID NO: 290273 - DNA, 15 bp, Homo sapiens
aaaagctagtgtttc

SEQ ID NO: 290274 - DNA, 15 bp, Homo sapiens
taaaagctagtgttt

SEQ ID NO: 290275 - DNA, 15 bp, Homo sapiens
ctaaaagctagtgtt

SEQ ID NO: 290276 - DNA, 15 bp, Homo sapiens
actaaaagctagtgt

SEQ ID NO: 290277 - DNA, 15 bp, Homo sapiens
cactaaaagctagtg

SEQ ID NO: 290278 - DNA, 15 bp, Homo sapiens
acactaaaagctagt

SEQ ID NO: 290279 - DNA, 15 bp, Homo sapiens
tacactaaaagctag

SEQ ID NO: 290280 - DNA, 15 bp, Homo sapiens
ctacactaaaagcta

SEQ ID NO: 290281 - DNA, 15 bp, Homo sapiens
tctacactaaaagct

SEQ ID NO: 290282 - DNA, 15 bp, Homo sapiens
ttctacactaaaagc

SEQ ID NO: 290283 - DNA, 15 bp, Homo sapiens
cttctacactaaaag

SEQ ID NO: 290284 - DNA, 15 bp, Homo sapiens
gcttctacactaaaa

SEQ ID NO: 290285 - DNA, 15 bp, Homo sapiens
ggcttctacactaaa

SEQ ID NO: 290286 - DNA, 15 bp, Homo sapiens
tggcttctacactaa

SEQ ID NO: 290287 - DNA, 15 bp, Homo sapiens
ctggcttctacacta

SEQ ID NO: 290288 - DNA, 15 bp, Homo sapiens
gctggcttctacact

SEQ ID NO: 290289 - DNA, 15 bp, Homo sapiens
tgctggcttctacac

SEQ ID NO: 290290 - DNA, 15 bp, Homo sapiens
atgctggcttctaca

SEQ ID NO: 290291 - DNA, 15 bp, Homo sapiens
tatgctggcttctac

SEQ ID NO: 290292 - DNA, 15 bp, Homo sapiens
gtatgctggcttcta

SEQ ID NO: 290293 - DNA, 15 bp, Homo sapiens
agtatgctggcttct

SEQ ID NO: 290294 - DNA, 15 bp, Homo sapiens
aagtatgctggcttc

SEQ ID NO: 290295 - DNA, 15 bp, Homo sapiens
caagtatgctggctt

SEQ ID NO: 290296 - DNA, 15 bp, Homo sapiens
gcaagtatgctggct

SEQ ID NO: 290297 - DNA, 15 bp, Homo sapiens
agcaagtatgctggc

SEQ ID NO: 290298 - DNA, 15 bp, Homo sapiens
cagcaagtatgctgg

SEQ ID NO: 290299 - DNA, 15 bp, Homo sapiens
ccagcaagtatgctg

SEQ ID NO: 290300 - DNA, 15 bp, Homo sapiens
accagcaagtatgct

SEQ ID NO: 290301 - DNA, 15 bp, Homo sapiens
aaccagcaagtatgc

SEQ ID NO: 290302 - DNA, 15 bp, Homo sapiens
caaccagcaagtatg

SEQ ID NO: 290303 - DNA, 15 bp, Homo sapiens
gcaaccagcaagtat

SEQ ID NO: 290304 - DNA, 15 bp, Homo sapiens
tgcaaccagcaagta

SEQ ID NO: 290305 - DNA, 15 bp, Homo sapiens
ctgcaaccagcaagt

SEQ ID NO: 290306 - DNA, 15 bp, Homo sapiens
actgcaaccagcaag

SEQ ID NO: 290307 - DNA, 15 bp, Homo sapiens
tactgcaaccagcaa

SEQ ID NO: 290308 - DNA, 15 bp, Homo sapiens
ttactgcaaccagca

SEQ ID NO: 290309 - DNA, 15 bp, Homo sapiens
attactgcaaccagc

SEQ ID NO: 290310 - DNA, 15 bp, Homo sapiens
gattactgcaaccag

SEQ ID NO: 290311 - DNA, 15 bp, Homo sapiens
ggattactgcaacca

SEQ ID NO: 290312 - DNA, 15 bp, Homo sapiens
tggattactgcaacc

SEQ ID NO: 290313 - DNA, 15 bp, Homo sapiens
ctggattactgcaac

SEQ ID NO: 290314 - DNA, 15 bp, Homo sapiens
cctggattactgcaa

SEQ ID NO: 290315 - DNA, 15 bp, Homo sapiens
ccctggattactgca

SEQ ID NO: 290316 - DNA, 15 bp, Homo sapiens
tccctggattactgc

SEQ ID NO: 290317 - DNA, 15 bp, Homo sapiens
ttccctggattactg

SEQ ID NO: 290318 - DNA, 15 bp, Homo sapiens
gttccctggattact

SEQ ID NO: 290319 - DNA, 15 bp, Homo sapiens
agttccctggattac

SEQ ID NO: 290320 - DNA, 15 bp, Homo sapiens
aagttccctggatta

SEQ ID NO: 290321 - DNA, 15 bp, Homo sapiens
aaagttccctggatt

SEQ ID NO: 290322 - DNA, 15 bp, Homo sapiens
taaagttccctggat

SEQ ID NO: 290323 - DNA, 15 bp, Homo sapiens
ttaaagttccctgga

SEQ ID NO: 290324 - DNA, 15 bp, Homo sapiens
cttaaagttccctgg

SEQ ID NO: 290325 - DNA, 15 bp, Homo sapiens
ccttaaagttccctg

SEQ ID NO: 290326 - DNA, 15 bp, Homo sapiens
tccttaaagttccct

SEQ ID NO: 290327 - DNA, 15 bp, Homo sapiens
ttccttaaagttccc

SEQ ID NO: 290328 - DNA, 15 bp, Homo sapiens
cttccttaaagttcc

SEQ ID NO: 290329 - DNA, 15 bp, Homo sapiens
ccttccttaaagttc

SEQ ID NO: 290330 - DNA, 15 bp, Homo sapiens
tccttccttaaagtt

SEQ ID NO: 290331 - DNA, 15 bp, Homo sapiens
atccttccttaaagt

SEQ ID NO: 290332 - DNA, 15 bp, Homo sapiens
catccttccttaaag

SEQ ID NO: 290333 - DNA, 15 bp, Homo sapiens
ccatccttccttaaa

SEQ ID NO: 290334 - DNA, 15 bp, Homo sapiens
gccatccttccttaa

SEQ ID NO: 290335 - DNA, 15 bp, Homo sapiens
tgccatccttcctta

SEQ ID NO: 290336 - DNA, 15 bp, Homo sapiens
ctgccatccttcctt

SEQ ID NO: 290337 - DNA, 15 bp, Homo sapiens
cctgccatccttcct

SEQ ID NO: 290338 - DNA, 15 bp, Homo sapiens
gcctgccatccttcc

SEQ ID NO: 290339 - DNA, 15 bp, Homo sapiens
agcctgccatccttc

SEQ ID NO: 290340 - DNA, 15 bp, Homo sapiens
tagcctgccatcctt

SEQ ID NO: 290341 - DNA, 15 bp, Homo sapiens
ctagcctgccatcct

SEQ ID NO: 290342 - DNA, 15 bp, Homo sapiens
tctagcctgccatcc

SEQ ID NO: 290343 - DNA, 15 bp, Homo sapiens
ctctagcctgccatc

SEQ ID NO: 290344 - DNA, 15 bp, Homo sapiens
actctagcctgccat

SEQ ID NO: 290345 - DNA, 15 bp, Homo sapiens
aactctagcctgcca

SEQ ID NO: 290346 - DNA, 15 bp, Homo sapiens
caactctagcctgcc

SEQ ID NO: 290347 - DNA, 15 bp, Homo sapiens
ccaactctagcctgc

SEQ ID NO: 290348 - DNA, 15 bp, Homo sapiens
cccaactctagcctg

SEQ ID NO: 290349 - DNA, 15 bp, Homo sapiens
acccaactctagcct

SEQ ID NO: 290350 - DNA, 15 bp, Homo sapiens
gacccaactctagcc

SEQ ID NO: 290351 - DNA, 15 bp, Homo sapiens
ggacccaactctagc

SEQ ID NO: 290352 - DNA, 15 bp, Homo sapiens
gggacccaactctag

SEQ ID NO: 290353 - DNA, 15 bp, Homo sapiens
tgggacccaactcta

SEQ ID NO: 290354 - DNA, 15 bp, Homo sapiens
ttgggacccaactct

SEQ ID NO: 290355 - DNA, 15 bp, Homo sapiens
cttgggacccaactc

SEQ ID NO: 290356 - DNA, 15 bp, Homo sapiens
ccttgggacccaact

SEQ ID NO: 290357 - DNA, 15 bp, Homo sapiens
gccttgggacccaac

SEQ ID NO: 290358 - DNA, 15 bp, Homo sapiens
tgccttgggacccaa

SEQ ID NO: 290359 - DNA, 15 bp, Homo sapiens
atgccttgggaccca

SEQ ID NO: 290360 - DNA, 15 bp, Homo sapiens
catgccttgggaccc

SEQ ID NO: 290361 - DNA, 15 bp, Homo sapiens
ccatgccttgggacc

SEQ ID NO: 290362 - DNA, 15 bp, Homo sapiens
cccatgccttgggac

SEQ ID NO: 290363 - DNA, 15 bp, Homo sapiens
acccatgccttggga

SEQ ID NO: 290364 - DNA, 15 bp, Homo sapiens
tacccatgccttggg

SEQ ID NO: 290365 - DNA, 15 bp, Homo sapiens
ctacccatgccttgg

SEQ ID NO: 290366 - DNA, 15 bp, Homo sapiens
tctacccatgccttg

SEQ ID NO: 290367 - DNA, 15 bp, Homo sapiens
ttctacccatgcctt

SEQ ID NO: 290368 - DNA, 15 bp, Homo sapiens
attctacccatgcct

SEQ ID NO: 290369 - DNA, 15 bp, Homo sapiens
aattctacccatgcc

SEQ ID NO: 290370 - DNA, 15 bp, Homo sapiens
aaattctacccatgc

SEQ ID NO: 290371 - DNA, 15 bp, Homo sapiens
caaattctacccatg

SEQ ID NO: 290372 - DNA, 15 bp, Homo sapiens
ccaaattctacccat

SEQ ID NO: 290373 - DNA, 15 bp, Homo sapiens
tccaaattctaccca

SEQ ID NO: 290374 - DNA, 15 bp, Homo sapiens
atccaaattctaccc

SEQ ID NO: 290375 - DNA, 15 bp, Homo sapiens
catccaaattctacc

SEQ ID NO: 290376 - DNA, 15 bp, Homo sapiens
gcatccaaattctac

SEQ ID NO: 290377 - DNA, 15 bp, Homo sapiens
agcatccaaattcta

SEQ ID NO: 290378 - DNA, 15 bp, Homo sapiens
cagcatccaaattct

SEQ ID NO: 290379 - DNA, 15 bp, Homo sapiens
gcagcatccaaattc

SEQ ID NO: 290380 - DNA, 15 bp, Homo sapiens
tgcagcatccaaatt

SEQ ID NO: 290381 - DNA, 15 bp, Homo sapiens
ctgcagcatccaaat

SEQ ID NO: 290382 - DNA, 15 bp, Homo sapiens
tctgcagcatccaaa

SEQ ID NO: 290383 - DNA, 15 bp, Homo sapiens
ttctgcagcatccaa

SEQ ID NO: 290384 - DNA, 15 bp, Homo sapiens
cttctgcagcatcca

SEQ ID NO: 290385 - DNA, 15 bp, Homo sapiens
tcttctgcagcatcc

SEQ ID NO: 290386 - DNA, 15 bp, Homo sapiens
ctcttctgcagcatc

SEQ ID NO: 290387 - DNA, 15 bp, Homo sapiens
cctcttctgcagcat

SEQ ID NO: 290388 - DNA, 15 bp, Homo sapiens
ccctcttctgcagca

SEQ ID NO: 290389 - DNA, 15 bp, Homo sapiens
cccctcttctgcagc

SEQ ID NO: 290390 - DNA, 15 bp, Homo sapiens
gcccctcttctgcag

SEQ ID NO: 290391 - DNA, 15 bp, Homo sapiens
tgcccctcttctgca

SEQ ID NO: 290392 - DNA, 15 bp, Homo sapiens
atgcccctcttctgc

SEQ ID NO: 290393 - DNA, 15 bp, Homo sapiens
catgcccctcttctg

SEQ ID NO: 290394 - DNA, 15 bp, Homo sapiens
ccatgcccctcttct

SEQ ID NO: 290395 - DNA, 15 bp, Homo sapiens
cccatgcccctcttc

SEQ ID NO: 290396 - DNA, 15 bp, Homo sapiens
ccccatgcccctctt

SEQ ID NO: 290397 - DNA, 15 bp, Homo sapiens
accccatgcccctct

SEQ ID NO: 290398 - DNA, 15 bp, Homo sapiens
caccccatgcccctc

SEQ ID NO: 290399 - DNA, 15 bp, Homo sapiens
tcaccccatgcccct

SEQ ID NO: 290400 - DNA, 15 bp, Homo sapiens
ctcaccccatgcccc

SEQ ID NO: 290401 - DNA, 15 bp, Homo sapiens
gctcaccccatgccc

SEQ ID NO: 290402 - DNA, 15 bp, Homo sapiens
tgctcaccccatgcc

SEQ ID NO: 290403 - DNA, 15 bp, Homo sapiens
ctgctcaccccatgc

SEQ ID NO: 290404 - DNA, 15 bp, Homo sapiens
actgctcaccccatg

SEQ ID NO: 290405 - DNA, 15 bp, Homo sapiens
gactgctcaccccat

SEQ ID NO: 290406 - DNA, 15 bp, Homo sapiens
ggactgctcacccca

SEQ ID NO: 290407 - DNA, 15 bp, Homo sapiens
gggactgctcacccc

SEQ ID NO: 290408 - DNA, 15 bp, Homo sapiens
ggggactgctcaccc

SEQ ID NO: 290409 - DNA, 15 bp, Homo sapiens
tggggactgctcacc

SEQ ID NO: 290410 - DNA, 15 bp, Homo sapiens
ttggggactgctcac

SEQ ID NO: 290411 - DNA, 15 bp, Homo sapiens
cttggggactgctca

SEQ ID NO: 290412 - DNA, 15 bp, Homo sapiens
tcttggggactgctc

SEQ ID NO: 290413 - DNA, 15 bp, Homo sapiens
gtcttggggactgct

SEQ ID NO: 290414 - DNA, 15 bp, Homo sapiens
ggtcttggggactgc

SEQ ID NO: 290415 - DNA, 15 bp, Homo sapiens
tggtcttggggactg

SEQ ID NO: 290416 - DNA, 15 bp, Homo sapiens
atggtcttggggact

SEQ ID NO: 290417 - DNA, 15 bp, Homo sapiens
gatggtcttggggac

SEQ ID NO: 290418 - DNA, 15 bp, Homo sapiens
ggatggtcttgggga

SEQ ID NO: 290419 - DNA, 15 bp, Homo sapiens
aggatggtcttgggg

SEQ ID NO: 290420 - DNA, 15 bp, Homo sapiens
gaggatggtcttggg

SEQ ID NO: 290421 - DNA, 15 bp, Homo sapiens
ggaggatggtcttgg

SEQ ID NO: 290422 - DNA, 15 bp, Homo sapiens
gggaggatggtcttg

SEQ ID NO: 290423 - DNA, 15 bp, Homo sapiens
agggaggatggtctt

SEQ ID NO: 290424 - DNA, 15 bp, Homo sapiens
gagggaggatggtct

SEQ ID NO: 290425 - DNA, 15 bp, Homo sapiens
agagggaggatggtc

SEQ ID NO: 290426 - DNA, 15 bp, Homo sapiens
cagagggaggatggt

SEQ ID NO: 290427 - DNA, 15 bp, Homo sapiens
tcagagggaggatgg

SEQ ID NO: 290428 - DNA, 15 bp, Homo sapiens
gtcagagggaggatg

SEQ ID NO: 290429 - DNA, 15 bp, Homo sapiens
tgtcagagggaggat

SEQ ID NO: 290430 - DNA, 15 bp, Homo sapiens
atgtcagagggagga

SEQ ID NO: 290431 - DNA, 15 bp, Homo sapiens
gatgtcagagggagg

SEQ ID NO: 290432 - DNA, 15 bp, Homo sapiens
tgatgtcagagggag

SEQ ID NO: 290433 - DNA, 15 bp, Homo sapiens
ttgatgtcagaggga

SEQ ID NO: 290434 - DNA, 15 bp, Homo sapiens
gttgatgtcagaggg

SEQ ID NO: 290435 - DNA, 15 bp, Homo sapiens
agttgatgtcagagg

SEQ ID NO: 290436 - DNA, 15 bp, Homo sapiens
cagttgatgtcagag

SEQ ID NO: 290437 - DNA, 15 bp, Homo sapiens
gcagttgatgtcaga

SEQ ID NO: 290438 - DNA, 15 bp, Homo sapiens
tgcagttgatgtcag

SEQ ID NO: 290439 - DNA, 15 bp, Homo sapiens
ctgcagttgatgtca

SEQ ID NO: 290440 - DNA, 15 bp, Homo sapiens
cctgcagttgatgtc

SEQ ID NO: 290441 - DNA, 15 bp, Homo sapiens
acctgcagttgatgt

SEQ ID NO: 290442 - DNA, 15 bp, Homo sapiens
aacctgcagttgatg

SEQ ID NO: 290443 - DNA, 15 bp, Homo sapiens
aaacctgcagttgat

SEQ ID NO: 290444 - DNA, 15 bp, Homo sapiens
caaacctgcagttga

SEQ ID NO: 290445 - DNA, 15 bp, Homo sapiens
ccaaacctgcagttg

SEQ ID NO: 290446 - DNA, 15 bp, Homo sapiens
gccaaacctgcagtt

SEQ ID NO: 290447 - DNA, 15 bp, Homo sapiens
tgccaaacctgcagt

SEQ ID NO: 290448 - DNA, 15 bp, Homo sapiens
gtgccaaacctgcag

SEQ ID NO: 290449 - DNA, 15 bp, Homo sapiens
cgtgccaaacctgca

SEQ ID NO: 290450 - DNA, 15 bp, Homo sapiens
acgtgccaaacctgc

SEQ ID NO: 290451 - DNA, 15 bp, Homo sapiens
aacgtgccaaacctg

SEQ ID NO: 290452 - DNA, 15 bp, Homo sapiens
gaacgtgccaaacct

SEQ ID NO: 290453 - DNA, 15 bp, Homo sapiens
ggaacgtgccaaacc

SEQ ID NO: 290454 - DNA, 15 bp, Homo sapiens
gggaacgtgccaaac

SEQ ID NO: 290455 - DNA, 15 bp, Homo sapiens
ggggaacgtgccaaa

SEQ ID NO: 290456 - DNA, 15 bp, Homo sapiens
tggggaacgtgccaa

SEQ ID NO: 290457 - DNA, 15 bp, Homo sapiens
ttggggaacgtgcca

SEQ ID NO: 290458 - DNA, 15 bp, Homo sapiens
cttggggaacgtgcc

SEQ ID NO: 290459 - DNA, 15 bp, Homo sapiens
acttggggaacgtgc

SEQ ID NO: 290460 - DNA, 15 bp, Homo sapiens
gacttggggaacgtg

SEQ ID NO: 290461 - DNA, 15 bp, Homo sapiens
tgacttggggaacgt

SEQ ID NO: 290462 - DNA, 15 bp, Homo sapiens
gtgacttggggaacg

SEQ ID NO: 290463 - DNA, 15 bp, Homo sapiens
ggtgacttggggaac

SEQ ID NO: 290464 - DNA, 15 bp, Homo sapiens
aggtgacttggggaa

SEQ ID NO: 290465 - DNA, 15 bp, Homo sapiens
aaggtgacttgggga

SEQ ID NO: 290466 - DNA, 15 bp, Homo sapiens
gaaggtgacttgggg

SEQ ID NO: 290467 - DNA, 15 bp, Homo sapiens
tgaaggtgacttggg

SEQ ID NO: 290468 - DNA, 15 bp, Homo sapiens
ctgaaggtgacttgg

SEQ ID NO: 290469 - DNA, 15 bp, Homo sapiens
cctgaaggtgacttg

SEQ ID NO: 290470 - DNA, 15 bp, Homo sapiens
acctgaaggtgactt

SEQ ID NO: 290471 - DNA, 15 bp, Homo sapiens
aacctgaaggtgact

SEQ ID NO: 290472 - DNA, 15 bp, Homo sapiens
gaacctgaaggtgac

SEQ ID NO: 290473 - DNA, 15 bp, Homo sapiens
cgaacctgaaggtga

SEQ ID NO: 290474 - DNA, 15 bp, Homo sapiens
tcgaacctgaaggtg

SEQ ID NO: 290475 - DNA, 15 bp, Homo sapiens
atcgaacctgaaggt

SEQ ID NO: 290476 - DNA, 15 bp, Homo sapiens
tatcgaacctgaagg

SEQ ID NO: 290477 - DNA, 15 bp, Homo sapiens
ttatcgaacctgaag

SEQ ID NO: 290478 - DNA, 15 bp, Homo sapiens
attatcgaacctgaa

SEQ ID NO: 290479 - DNA, 15 bp, Homo sapiens
cattatcgaacctga

SEQ ID NO: 290480 - DNA, 15 bp, Homo sapiens
gcattatcgaacctg

SEQ ID NO: 290481 - DNA, 15 bp, Homo sapiens
tgcattatcgaacct

SEQ ID NO: 290482 - DNA, 15 bp, Homo sapiens
atgcattatcgaacc

SEQ ID NO: 290483 - DNA, 15 bp, Homo sapiens
tatgcattatcgaac

SEQ ID NO: 290484 - DNA, 15 bp, Homo sapiens
ctatgcattatcgaa

SEQ ID NO: 290485 - DNA, 15 bp, Homo sapiens
cctatgcattatcga

SEQ ID NO: 290486 - DNA, 15 bp, Homo sapiens
tcctatgcattatcg

SEQ ID NO: 290487 - DNA, 15 bp, Homo sapiens
gtcctatgcattatc

SEQ ID NO: 290488 - DNA, 15 bp, Homo sapiens
agtcctatgcattat

SEQ ID NO: 290489 - DNA, 15 bp, Homo sapiens
cagtcctatgcatta

SEQ ID NO: 290490 - DNA, 15 bp, Homo sapiens
gcagtcctatgcatt

SEQ ID NO: 290491 - DNA, 15 bp, Homo sapiens
tgcagtcctatgcat

SEQ ID NO: 290492 - DNA, 15 bp, Homo sapiens
ctgcagtcctatgca

SEQ ID NO: 290493 - DNA, 15 bp, Homo sapiens
tctgcagtcctatgc

SEQ ID NO: 290494 - DNA, 15 bp, Homo sapiens
ctctgcagtcctatg

SEQ ID NO: 290495 - DNA, 15 bp, Homo sapiens
gctctgcagtcctat

SEQ ID NO: 290496 - DNA, 15 bp, Homo sapiens
agctctgcagtccta

SEQ ID NO: 290497 - DNA, 15 bp, Homo sapiens
gagctctgcagtcct

SEQ ID NO: 290498 - DNA, 15 bp, Homo sapiens
tgagctctgcagtcc

SEQ ID NO: 290499 - DNA, 15 bp, Homo sapiens
gtgagctctgcagtc

SEQ ID NO: 290500 - DNA, 15 bp, Homo sapiens
agtgagctctgcagt

SEQ ID NO: 290501 - DNA, 15 bp, Homo sapiens
cagtgagctctgcag

SEQ ID NO: 290502 - DNA, 15 bp, Homo sapiens
tcagtgagctctgca

SEQ ID NO: 290503 - DNA, 15 bp, Homo sapiens
ttcagtgagctctgc

SEQ ID NO: 290504 - DNA, 15 bp, Homo sapiens
cttcagtgagctctg

SEQ ID NO: 290505 - DNA, 15 bp, Homo sapiens
ccttcagtgagctct

SEQ ID NO: 290506 - DNA, 15 bp, Homo sapiens
gccttcagtgagctc

SEQ ID NO: 290507 - DNA, 15 bp, Homo sapiens
agccttcagtgagct

SEQ ID NO: 290508 - DNA, 15 bp, Homo sapiens
tagccttcagtgagc

SEQ ID NO: 290509 - DNA, 15 bp, Homo sapiens
atagccttcagtgag

SEQ ID NO: 290510 - DNA, 15 bp, Homo sapiens
aatagccttcagtga

SEQ ID NO: 290511 - DNA, 15 bp, Homo sapiens
taatagccttcagtg

SEQ ID NO: 290512 - DNA, 15 bp, Homo sapiens
ataatagccttcagt

SEQ ID NO: 290513 - DNA, 15 bp, Homo sapiens
tataatagccttcag

SEQ ID NO: 290514 - DNA, 15 bp, Homo sapiens
gtataatagccttca

SEQ ID NO: 290515 - DNA, 15 bp, Homo sapiens
agtataatagccttc

SEQ ID NO: 290516 - DNA, 15 bp, Homo sapiens
gagtataatagcctt

SEQ ID NO: 290517 - DNA, 15 bp, Homo sapiens
tgagtataatagcct

SEQ ID NO: 290518 - DNA, 15 bp, Homo sapiens
gtgagtataatagcc

SEQ ID NO: 290519 - DNA, 15 bp, Homo sapiens
cgtgagtataatagc

SEQ ID NO: 290520 - DNA, 15 bp, Homo sapiens
ccgtgagtataatag

SEQ ID NO: 290521 - DNA, 15 bp, Homo sapiens
accgtgagtataata

SEQ ID NO: 290522 - DNA, 15 bp, Homo sapiens
aaccgtgagtataat

SEQ ID NO: 290523 - DNA, 15 bp, Homo sapiens
taaccgtgagtataa

SEQ ID NO: 290524 - DNA, 15 bp, Homo sapiens
gtaaccgtgagtata

SEQ ID NO: 290525 - DNA, 15 bp, Homo sapiens
tgtaaccgtgagtat

SEQ ID NO: 290526 - DNA, 15 bp, Homo sapiens
ttgtaaccgtgagta

SEQ ID NO: 290527 - DNA, 15 bp, Homo sapiens
attgtaaccgtgagt

SEQ ID NO: 290528 - DNA, 15 bp, Homo sapiens
aattgtaaccgtgag

SEQ ID NO: 290529 - DNA, 15 bp, Homo sapiens
aaattgtaaccgtga

SEQ ID NO: 290530 - DNA, 15 bp, Homo sapiens
taaattgtaaccgtg

SEQ ID NO: 290531 - DNA, 15 bp, Homo sapiens
ataaattgtaaccgt

SEQ ID NO: 290532 - DNA, 15 bp, Homo sapiens
aataaattgtaaccg

SEQ ID NO: 290533 - DNA, 15 bp, Homo sapiens
taataaattgtaacc

SEQ ID NO: 290534 - DNA, 15 bp, Homo sapiens
gtaataaattgtaac

SEQ ID NO: 290535 - DNA, 15 bp, Homo sapiens
tgtaataaattgtaa

SEQ ID NO: 290536 - DNA, 15 bp, Homo sapiens
ctgtaataaattgta

SEQ ID NO: 290537 - DNA, 15 bp, Homo sapiens
cctgtaataaattgt

SEQ ID NO: 290538 - DNA, 15 bp, Homo sapiens
ccctgtaataaattg

SEQ ID NO: 290539 - DNA, 15 bp, Homo sapiens
tccctgtaataaatt

SEQ ID NO: 290540 - DNA, 15 bp, Homo sapiens
ttccctgtaataaat

SEQ ID NO: 290541 - DNA, 15 bp, Homo sapiens
tttccctgtaataaa

SEQ ID NO: 290542 - DNA, 15 bp, Homo sapiens
ttttccctgtaataa

SEQ ID NO: 290543 - DNA, 15 bp, Homo sapiens
cttttccctgtaata

SEQ ID NO: 290544 - DNA, 15 bp, Homo sapiens
tcttttccctgtaat

SEQ ID NO: 290545 - DNA, 15 bp, Homo sapiens
atcttttccctgtaa

SEQ ID NO: 290546 - DNA, 15 bp, Homo sapiens
tatcttttccctgta

SEQ ID NO: 290547 - DNA, 15 bp, Homo sapiens
gtatcttttccctgt

SEQ ID NO: 290548 - DNA, 15 bp, Homo sapiens
tgtatcttttccctg

SEQ ID NO: 290549 - DNA, 15 bp, Homo sapiens
ctgtatcttttccct

SEQ ID NO: 290550 - DNA, 15 bp, Homo sapiens
tctgtatcttttccc

SEQ ID NO: 290551 - DNA, 15 bp, Homo sapiens
atctgtatcttttcc

SEQ ID NO: 290552 - DNA, 15 bp, Homo sapiens
aatctgtatcttttc

SEQ ID NO: 290553 - DNA, 15 bp, Homo sapiens
taatctgtatctttt

SEQ ID NO: 290554 - DNA, 15 bp, Homo sapiens
ttaatctgtatcttt

SEQ ID NO: 290555 - DNA, 15 bp, Homo sapiens
tttaatctgtatctt

SEQ ID NO: 290556 - DNA, 15 bp, Homo sapiens
ttttaatctgtatct

SEQ ID NO: 290557 - DNA, 15 bp, Homo sapiens
attttaatctgtatc

SEQ ID NO: 290558 - DNA, 15 bp, Homo sapiens
gattttaatctgtat

SEQ ID NO: 290559 - DNA, 15 bp, Homo sapiens
tgattttaatctgta

SEQ ID NO: 290560 - DNA, 15 bp, Homo sapiens
ttgattttaatctgt

SEQ ID NO: 290561 - DNA, 15 bp, Homo sapiens
gttgattttaatctg

SEQ ID NO: 290562 - DNA, 15 bp, Homo sapiens
ggttgattttaatct

SEQ ID NO: 290563 - DNA, 15 bp, Homo sapiens
tggttgattttaatc

SEQ ID NO: 290564 - DNA, 15 bp, Homo sapiens
ttggttgattttaat

SEQ ID NO: 290565 - DNA, 15 bp, Homo sapiens
tttggttgattttaa

SEQ ID NO: 290566 - DNA, 15 bp, Homo sapiens
ctttggttgatttta

SEQ ID NO: 290567 - DNA, 15 bp, Homo sapiens
cctttggttgatttt

SEQ ID NO: 290568 - DNA, 15 bp, Homo sapiens
tcctttggttgattt

SEQ ID NO: 290569 - DNA, 15 bp, Homo sapiens
gtcctttggttgatt

SEQ ID NO: 290570 - DNA, 15 bp, Homo sapiens
tgtcctttggttgat

SEQ ID NO: 290571 - DNA, 15 bp, Homo sapiens
ttgtcctttggttga

SEQ ID NO: 290572 - DNA, 15 bp, Homo sapiens
tttgtcctttggttg

SEQ ID NO: 290573 - DNA, 15 bp, Homo sapiens
ctttgtcctttggtt

SEQ ID NO: 290574 - DNA, 15 bp, Homo sapiens
actttgtcctttggt

SEQ ID NO: 290575 - DNA, 15 bp, Homo sapiens
tactttgtcctttgg

SEQ ID NO: 290576 - DNA, 15 bp, Homo sapiens
gtactttgtcctttg

SEQ ID NO: 290577 - DNA, 15 bp, Homo sapiens
tgtactttgtccttt

SEQ ID NO: 290578 - DNA, 15 bp, Homo sapiens
atgtactttgtcctt

SEQ ID NO: 290579 - DNA, 15 bp, Homo sapiens
tatgtactttgtcct

SEQ ID NO: 290580 - DNA, 15 bp, Homo sapiens
ctatgtactttgtcc

SEQ ID NO: 290581 - DNA, 15 bp, Homo sapiens
cctatgtactttgtc

SEQ ID NO: 290582 - DNA, 15 bp, Homo sapiens
gcctatgtactttgt

SEQ ID NO: 290583 - DNA, 15 bp, Homo sapiens
ggcctatgtactttg

SEQ ID NO: 290584 - DNA, 15 bp, Homo sapiens
tggcctatgtacttt

SEQ ID NO: 290585 - DNA, 15 bp, Homo sapiens
ctggcctatgtactt

SEQ ID NO: 290586 - DNA, 15 bp, Homo sapiens
tctggcctatgtact

SEQ ID NO: 290587 - DNA, 15 bp, Homo sapiens
ctctggcctatgtac

SEQ ID NO: 290588 - DNA, 15 bp, Homo sapiens
actctggcctatgta

SEQ ID NO: 290589 - DNA, 15 bp, Homo sapiens
gactctggcctatgt

SEQ ID NO: 290590 - DNA, 15 bp, Homo sapiens
agactctggcctatg

SEQ ID NO: 290591 - DNA, 15 bp, Homo sapiens
cagactctggcctat

SEQ ID NO: 290592 - DNA, 15 bp, Homo sapiens
ccagactctggccta

SEQ ID NO: 290593 - DNA, 15 bp, Homo sapiens
cccagactctggcct

SEQ ID NO: 290594 - DNA, 15 bp, Homo sapiens
tcccagactctggcc

SEQ ID NO: 290595 - DNA, 15 bp, Homo sapiens
ttcccagactctggc

SEQ ID NO: 290596 - DNA, 15 bp, Homo sapiens
tttcccagactctgg

SEQ ID NO: 290597 - DNA, 15 bp, Homo sapiens
ctttcccagactctg

SEQ ID NO: 290598 - DNA, 15 bp, Homo sapiens
tctttcccagactct

SEQ ID NO: 290599 - DNA, 15 bp, Homo sapiens
atctttcccagactc

SEQ ID NO: 290600 - DNA, 15 bp, Homo sapiens
gatctttcccagact

SEQ ID NO: 290601 - DNA, 15 bp, Homo sapiens
ggatctttcccagac

SEQ ID NO: 290602 - DNA, 15 bp, Homo sapiens
tggatctttcccaga

SEQ ID NO: 290603 - DNA, 15 bp, Homo sapiens
ttggatctttcccag

SEQ ID NO: 290604 - DNA, 15 bp, Homo sapiens
tttggatctttccca

SEQ ID NO: 290605 - DNA, 15 bp, Homo sapiens
atttggatctttccc

SEQ ID NO: 290606 - DNA, 15 bp, Homo sapiens
tatttggatctttcc

SEQ ID NO: 290607 - DNA, 15 bp, Homo sapiens
atatttggatctttc

SEQ ID NO: 290608 - DNA, 15 bp, Homo sapiens
catatttggatcttt

SEQ ID NO: 290609 - DNA, 15 bp, Homo sapiens
ccatatttggatctt

SEQ ID NO: 290610 - DNA, 15 bp, Homo sapiens
accatatttggatct

SEQ ID NO: 290611 - DNA, 15 bp, Homo sapiens
caccatatttggatc

SEQ ID NO: 290612 - DNA, 15 bp, Homo sapiens
gcaccatatttggat

SEQ ID NO: 290613 - DNA, 15 bp, Homo sapiens
agcaccatatttgga

SEQ ID NO: 290614 - DNA, 15 bp, Homo sapiens
aagcaccatatttgg

SEQ ID NO: 290615 - DNA, 15 bp, Homo sapiens
aaagcaccatatttg

SEQ ID NO: 290616 - DNA, 15 bp, Homo sapiens
gaaagcaccatattt

SEQ ID NO: 290617 - DNA, 15 bp, Homo sapiens
tgaaagcaccatatt

SEQ ID NO: 290618 - DNA, 15 bp, Homo sapiens
atgaaagcaccatat

SEQ ID NO: 290619 - DNA, 15 bp, Homo sapiens
aatgaaagcaccata

SEQ ID NO: 290620 - DNA, 15 bp, Homo sapiens
taatgaaagcaccat

SEQ ID NO: 290621 - DNA, 15 bp, Homo sapiens
ataatgaaagcacca

SEQ ID NO: 290622 - DNA, 15 bp, Homo sapiens
gataatgaaagcacc

SEQ ID NO: 290623 - DNA, 15 bp, Homo sapiens
agataatgaaagcac

SEQ ID NO: 290624 - DNA, 15 bp, Homo sapiens
gagataatgaaagca

SEQ ID NO: 290625 - DNA, 15 bp, Homo sapiens
ggagataatgaaagc

SEQ ID NO: 290626 - DNA, 15 bp, Homo sapiens
aggagataatgaaag

SEQ ID NO: 290627 - DNA, 15 bp, Homo sapiens
gaggagataatgaaa

SEQ ID NO: 290628 - DNA, 15 bp, Homo sapiens
ggaggagataatgaa

SEQ ID NO: 290629 - DNA, 15 bp, Homo sapiens
tggaggagataatga

SEQ ID NO: 290630 - DNA, 15 bp, Homo sapiens
atggaggagataatg

SEQ ID NO: 290631 - DNA, 15 bp, Homo sapiens
catggaggagataat

SEQ ID NO: 290632 - DNA, 15 bp, Homo sapiens
acatggaggagataa

SEQ ID NO: 290633 - DNA, 15 bp, Homo sapiens
cacatggaggagata

SEQ ID NO: 290634 - DNA, 15 bp, Homo sapiens
ccacatggaggagat

SEQ ID NO: 290635 - DNA, 15 bp, Homo sapiens
tccacatggaggaga

SEQ ID NO: 290636 - DNA, 15 bp, Homo sapiens
ctccacatggaggag

SEQ ID NO: 290637 - DNA, 15 bp, Homo sapiens
actccacatggagga

SEQ ID NO: 290638 - DNA, 15 bp, Homo sapiens
gactccacatggagg

SEQ ID NO: 290639 - DNA, 15 bp, Homo sapiens
tgactccacatggag

SEQ ID NO: 290640 - DNA, 15 bp, Homo sapiens
atgactccacatgga

SEQ ID NO: 290641 - DNA, 15 bp, Homo sapiens
catgactccacatgg

SEQ ID NO: 290642 - DNA, 15 bp, Homo sapiens
ccatgactccacatg

SEQ ID NO: 290643 - DNA, 15 bp, Homo sapiens
tccatgactccacat

SEQ ID NO: 290644 - DNA, 15 bp, Homo sapiens
atccatgactccaca

SEQ ID NO: 290645 - DNA, 15 bp, Homo sapiens
gatccatgactccac

SEQ ID NO: 290646 - DNA, 15 bp, Homo sapiens
cgatccatgactcca

SEQ ID NO: 290647 - DNA, 15 bp, Homo sapiens
acgatccatgactcc

SEQ ID NO: 290648 - DNA, 15 bp, Homo sapiens
cacgatccatgactc

SEQ ID NO: 290649 - DNA, 15 bp, Homo sapiens
acacgatccatgact

SEQ ID NO: 290650 - DNA, 15 bp, Homo sapiens
aacacgatccatgac

SEQ ID NO: 290651 - DNA, 15 bp, Homo sapiens
taacacgatccatga

SEQ ID NO: 290652 - DNA, 15 bp, Homo sapiens
gtaacacgatccatg

SEQ ID NO: 290653 - DNA, 15 bp, Homo sapiens
ggtaacacgatccat

SEQ ID NO: 290654 - DNA, 15 bp, Homo sapiens
aggtaacacgatcca

SEQ ID NO: 290655 - DNA, 15 bp, Homo sapiens
gaggtaacacgatcc

SEQ ID NO: 290656 - DNA, 15 bp, Homo sapiens
ggaggtaacacgatc

SEQ ID NO: 290657 - DNA, 15 bp, Homo sapiens
gggaggtaacacgat

SEQ ID NO: 290658 - DNA, 15 bp, Homo sapiens
tgggaggtaacacga

SEQ ID NO: 290659 - DNA, 15 bp, Homo sapiens
ctgggaggtaacacg

SEQ ID NO: 290660 - DNA, 15 bp, Homo sapiens
gctgggaggtaacac

SEQ ID NO: 290661 - DNA, 15 bp, Homo sapiens
tgctgggaggtaaca

SEQ ID NO: 290662 - DNA, 15 bp, Homo sapiens
atgctgggaggtaac

SEQ ID NO: 290663 - DNA, 15 bp, Homo sapiens
gatgctgggaggtaa

SEQ ID NO: 290664 - DNA, 15 bp, Homo sapiens
tgatgctgggaggta

SEQ ID NO: 290665 - DNA, 15 bp, Homo sapiens
ttgatgctgggaggt

SEQ ID NO: 290666 - DNA, 15 bp, Homo sapiens
attgatgctgggagg

SEQ ID NO: 290667 - DNA, 15 bp, Homo sapiens
cattgatgctgggag

SEQ ID NO: 290668 - DNA, 15 bp, Homo sapiens
acattgatgctggga

SEQ ID NO: 290669 - DNA, 15 bp, Homo sapiens
cacattgatgctggg

SEQ ID NO: 290670 - DNA, 15 bp, Homo sapiens
acacattgatgctgg

SEQ ID NO: 290671 - DNA, 15 bp, Homo sapiens
cacacattgatgctg

SEQ ID NO: 290672 - DNA, 15 bp, Homo sapiens
tcacacattgatgct

SEQ ID NO: 290673 - DNA, 15 bp, Homo sapiens
gtcacacattgatgc

SEQ ID NO: 290674 - DNA, 15 bp, Homo sapiens
agtcacacattgatg

SEQ ID NO: 290675 - DNA, 15 bp, Homo sapiens
tagtcacacattgat

SEQ ID NO: 290676 - DNA, 15 bp, Homo sapiens
gtagtcacacattga

SEQ ID NO: 290677 - DNA, 15 bp, Homo sapiens
tgtagtcacacattg

SEQ ID NO: 290678 - DNA, 15 bp, Homo sapiens
gtgtagtcacacatt

SEQ ID NO: 290679 - DNA, 15 bp, Homo sapiens
cgtgtagtcacacat

SEQ ID NO: 290680 - DNA, 15 bp, Homo sapiens
gcgtgtagtcacaca

SEQ ID NO: 290681 - DNA, 15 bp, Homo sapiens
tgcgtgtagtcacac

SEQ ID NO: 290682 - DNA, 15 bp, Homo sapiens
ttgcgtgtagtcaca

SEQ ID NO: 290683 - DNA, 15 bp, Homo sapiens
cttgcgtgtagtcac

SEQ ID NO: 290684 - DNA, 15 bp, Homo sapiens
ccttgcgtgtagtca

SEQ ID NO: 290685 - DNA, 15 bp, Homo sapiens
tccttgcgtgtagtc

SEQ ID NO: 290686 - DNA, 15 bp, Homo sapiens
ctccttgcgtgtagt

SEQ ID NO: 290687 - DNA, 15 bp, Homo sapiens
actccttgcgtgtag

SEQ ID NO: 290688 - DNA, 15 bp, Homo sapiens
tactccttgcgtgta

SEQ ID NO: 290689 - DNA, 15 bp, Homo sapiens
gtactccttgcgtgt

SEQ ID NO: 290690 - DNA, 15 bp, Homo sapiens
agtactccttgcgtg

SEQ ID NO: 290691 - DNA, 15 bp, Homo sapiens
cagtactccttgcgt

SEQ ID NO: 290692 - DNA, 15 bp, Homo sapiens
acagtactccttgcg

SEQ ID NO: 290693 - DNA, 15 bp, Homo sapiens
gacagtactccttgc

SEQ ID NO: 290694 - DNA, 15 bp, Homo sapiens
tgacagtactccttg

SEQ ID NO: 290695 - DNA, 15 bp, Homo sapiens
ttgacagtactcctt

SEQ ID NO: 290696 - DNA, 15 bp, Homo sapiens
attgacagtactcct

SEQ ID NO: 290697 - DNA, 15 bp, Homo sapiens
gattgacagtactcc

SEQ ID NO: 290698 - DNA, 15 bp, Homo sapiens
cgattgacagtactc

SEQ ID NO: 290699 - DNA, 15 bp, Homo sapiens
tcgattgacagtact

SEQ ID NO: 290700 - DNA, 15 bp, Homo sapiens
ctcgattgacagtac

SEQ ID NO: 290701 - DNA, 15 bp, Homo sapiens
tctcgattgacagta

SEQ ID NO: 290702 - DNA, 15 bp, Homo sapiens
ttctcgattgacagt

SEQ ID NO: 290703 - DNA, 15 bp, Homo sapiens
tttctcgattgacag

SEQ ID NO: 290704 - DNA, 15 bp, Homo sapiens
ctttctcgattgaca

SEQ ID NO: 290705 - DNA, 15 bp, Homo sapiens
actttctcgattgac

SEQ ID NO: 290706 - DNA, 15 bp, Homo sapiens
aactttctcgattga

SEQ ID NO: 290707 - DNA, 15 bp, Homo sapiens
gaactttctcgattg

SEQ ID NO: 290708 - DNA, 15 bp, Homo sapiens
cgaactttctcgatt

SEQ ID NO: 290709 - DNA, 15 bp, Homo sapiens
gcgaactttctcgat

SEQ ID NO: 290710 - DNA, 15 bp, Homo sapiens
ggcgaactttctcga

SEQ ID NO: 290711 - DNA, 15 bp, Homo sapiens
gggcgaactttctcg

SEQ ID NO: 290712 - DNA, 15 bp, Homo sapiens
cgggcgaactttctc

SEQ ID NO: 290713 - DNA, 15 bp, Homo sapiens
ccgggcgaactttct

SEQ ID NO: 290714 - DNA, 15 bp, Homo sapiens
cccgggcgaactttc

SEQ ID NO: 290715 - DNA, 15 bp, Homo sapiens
gcccgggcgaacttt

SEQ ID NO: 290716 - DNA, 15 bp, Homo sapiens
ggcccgggcgaactt

SEQ ID NO: 290717 - DNA, 15 bp, Homo sapiens
aggcccgggcgaact

SEQ ID NO: 290718 - DNA, 15 bp, Homo sapiens
gaggcccgggcgaac

SEQ ID NO: 290719 - DNA, 15 bp, Homo sapiens
cgaggcccgggcgaa

SEQ ID NO: 290720 - DNA, 15 bp, Homo sapiens
ccgaggcccgggcga

SEQ ID NO: 290721 - DNA, 15 bp, Homo sapiens
tccgaggcccgggcg

SEQ ID NO: 290722 - DNA, 15 bp, Homo sapiens
ctccgaggcccgggc

SEQ ID NO: 290723 - DNA, 15 bp, Homo sapiens
actccgaggcccggg

SEQ ID NO: 290724 - DNA, 15 bp, Homo sapiens
aactccgaggcccgg

SEQ ID NO: 290725 - DNA, 15 bp, Homo sapiens
gaactccgaggcccg

SEQ ID NO: 290726 - DNA, 15 bp, Homo sapiens
tgaactccgaggccc

SEQ ID NO: 290727 - DNA, 15 bp, Homo sapiens
ttgaactccgaggcc

SEQ ID NO: 290728 - DNA, 15 bp, Homo sapiens
tttgaactccgaggc

SEQ ID NO: 290729 - DNA, 15 bp, Homo sapiens
ctttgaactccgagg

SEQ ID NO: 290730 - DNA, 15 bp, Homo sapiens
actttgaactccgag

SEQ ID NO: 290731 - DNA, 15 bp, Homo sapiens
aactttgaactccga

SEQ ID NO: 290732 - DNA, 15 bp, Homo sapiens
aaactttgaactccg

SEQ ID NO: 290733 - DNA, 15 bp, Homo sapiens
aaaactttgaactcc

SEQ ID NO: 290734 - DNA, 15 bp, Homo sapiens
aaaaactttgaactc

SEQ ID NO: 290735 - DNA, 15 bp, Homo sapiens
taaaaactttgaact

SEQ ID NO: 290736 - DNA, 15 bp, Homo sapiens
gtaaaaactttgaac

SEQ ID NO: 290737 - DNA, 15 bp, Homo sapiens
agtaaaaactttgaa

SEQ ID NO: 290738 - DNA, 15 bp, Homo sapiens
cagtaaaaactttga

SEQ ID NO: 290739 - DNA, 15 bp, Homo sapiens
ccagtaaaaactttg

SEQ ID NO: 290740 - DNA, 15 bp, Homo sapiens
cccagtaaaaacttt

SEQ ID NO: 290741 - DNA, 15 bp, Homo sapiens
tcccagtaaaaactt

SEQ ID NO: 290742 - DNA, 15 bp, Homo sapiens
gtcccagtaaaaact

SEQ ID NO: 290743 - DNA, 15 bp, Homo sapiens
agtcccagtaaaaac

SEQ ID NO: 290744 - DNA, 15 bp, Homo sapiens
cagtcccagtaaaaa

SEQ ID NO: 290745 - DNA, 15 bp, Homo sapiens
ccagtcccagtaaaa

SEQ ID NO: 290746 - DNA, 15 bp, Homo sapiens
tccagtcccagtaaa

SEQ ID NO: 290747 - DNA, 15 bp, Homo sapiens
atccagtcccagtaa

SEQ ID NO: 290748 - DNA, 15 bp, Homo sapiens
gatccagtcccagta

SEQ ID NO: 290749 - DNA, 15 bp, Homo sapiens
tgatccagtcccagt

SEQ ID NO: 290750 - DNA, 15 bp, Homo sapiens
atgatccagtcccag

SEQ ID NO: 290751 - DNA, 15 bp, Homo sapiens
catgatccagtccca

SEQ ID NO: 290752 - DNA, 15 bp, Homo sapiens
acatgatccagtccc

SEQ ID NO: 290753 - DNA, 15 bp, Homo sapiens
tacatgatccagtcc

SEQ ID NO: 290754 - DNA, 15 bp, Homo sapiens
ttacatgatccagtc

SEQ ID NO: 290755 - DNA, 15 bp, Homo sapiens
tttacatgatccagt

SEQ ID NO: 290756 - DNA, 15 bp, Homo sapiens
gtttacatgatccag

SEQ ID NO: 290757 - DNA, 15 bp, Homo sapiens
agtttacatgatcca

SEQ ID NO: 290758 - DNA, 15 bp, Homo sapiens
aagtttacatgatcc

SEQ ID NO: 290759 - DNA, 15 bp, Homo sapiens
caagtttacatgatc

SEQ ID NO: 290760 - DNA, 15 bp, Homo sapiens
tcaagtttacatgat

SEQ ID NO: 290761 - DNA, 15 bp, Homo sapiens
ttcaagtttacatga

SEQ ID NO: 290762 - DNA, 15 bp, Homo sapiens
attcaagtttacatg

SEQ ID NO: 290763 - DNA, 15 bp, Homo sapiens
cattcaagtttacat

SEQ ID NO: 290764 - DNA, 15 bp, Homo sapiens
tcattcaagtttaca

SEQ ID NO: 290765 - DNA, 15 bp, Homo sapiens
gtcattcaagtttac

SEQ ID NO: 290766 - DNA, 15 bp, Homo sapiens
agtcattcaagttta

SEQ ID NO: 290767 - DNA, 15 bp, Homo sapiens
cagtcattcaagttt

SEQ ID NO: 290768 - DNA, 15 bp, Homo sapiens
gcagtcattcaagtt

SEQ ID NO: 290769 - DNA, 15 bp, Homo sapiens
ggcagtcattcaagt

SEQ ID NO: 290770 - DNA, 15 bp, Homo sapiens
gggcagtcattcaag

SEQ ID NO: 290771 - DNA, 15 bp, Homo sapiens
agggcagtcattcaa

SEQ ID NO: 290772 - DNA, 15 bp, Homo sapiens
gagggcagtcattca

SEQ ID NO: 290773 - DNA, 15 bp, Homo sapiens
tgagggcagtcattc

SEQ ID NO: 290774 - DNA, 15 bp, Homo sapiens
atgagggcagtcatt

SEQ ID NO: 290775 - DNA, 15 bp, Homo sapiens
catgagggcagtcat

SEQ ID NO: 290776 - DNA, 15 bp, Homo sapiens
ccatgagggcagtca

SEQ ID NO: 290777 - DNA, 15 bp, Homo sapiens
gccatgagggcagtc

SEQ ID NO: 290778 - DNA, 15 bp, Homo sapiens
ggccatgagggcagt

SEQ ID NO: 290779 - DNA, 15 bp, Homo sapiens
tggccatgagggcag

SEQ ID NO: 290780 - DNA, 15 bp, Homo sapiens
ctggccatgagggca

SEQ ID NO: 290781 - DNA, 15 bp, Homo sapiens
gctggccatgagggc

SEQ ID NO: 290782 - DNA, 15 bp, Homo sapiens
ggctggccatgaggg

SEQ ID NO: 290783 - DNA, 15 bp, Homo sapiens
aggctggccatgagg

SEQ ID NO: 290784 - DNA, 15 bp, Homo sapiens
gaggctggccatgag

SEQ ID NO: 290785 - DNA, 15 bp, Homo sapiens
tgaggctggccatga

SEQ ID NO: 290786 - DNA, 15 bp, Homo sapiens
ctgaggctggccatg

SEQ ID NO: 290787 - DNA, 15 bp, Homo sapiens
actgaggctggccat

SEQ ID NO: 290788 - DNA, 15 bp, Homo sapiens
gactgaggctggcca

SEQ ID NO: 290789 - DNA, 15 bp, Homo sapiens
ggactgaggctggcc

SEQ ID NO: 290790 - DNA, 15 bp, Homo sapiens
gggactgaggctggc

SEQ ID NO: 290791 - DNA, 15 bp, Homo sapiens
ggggactgaggctgg

SEQ ID NO: 290792 - DNA, 15 bp, Homo sapiens
aggggactgaggctg

SEQ ID NO: 290793 - DNA, 15 bp, Homo sapiens
caggggactgaggct

SEQ ID NO: 290794 - DNA, 15 bp, Homo sapiens
gcaggggactgaggc

SEQ ID NO: 290795 - DNA, 15 bp, Homo sapiens
agcaggggactgagg

SEQ ID NO: 290796 - DNA, 15 bp, Homo sapiens
gagcaggggactgag

SEQ ID NO: 290797 - DNA, 15 bp, Homo sapiens
ggagcaggggactga

SEQ ID NO: 290798 - DNA, 15 bp, Homo sapiens
gggagcaggggactg

SEQ ID NO: 290799 - DNA, 15 bp, Homo sapiens
ggggagcaggggact

SEQ ID NO: 290800 - DNA, 15 bp, Homo sapiens
aggggagcaggggac

SEQ ID NO: 290801 - DNA, 15 bp, Homo sapiens
caggggagcagggga

SEQ ID NO: 290802 - DNA, 15 bp, Homo sapiens
ccaggggagcagggg

SEQ ID NO: 290803 - DNA, 15 bp, Homo sapiens
tccaggggagcaggg

SEQ ID NO: 290804 - DNA, 15 bp, Homo sapiens
ctccaggggagcagg

SEQ ID NO: 290805 - DNA, 15 bp, Homo sapiens
cctccaggggagcag

SEQ ID NO: 290806 - DNA, 15 bp, Homo sapiens
acctccaggggagca

SEQ ID NO: 290807 - DNA, 15 bp, Homo sapiens
cacctccaggggagc

SEQ ID NO: 290808 - DNA, 15 bp, Homo sapiens
ccacctccaggggag

SEQ ID NO: 290809 - DNA, 15 bp, Homo sapiens
tccacctccagggga

SEQ ID NO: 290810 - DNA, 15 bp, Homo sapiens
atccacctccagggg

SEQ ID NO: 290811 - DNA, 15 bp, Homo sapiens
catccacctccaggg

SEQ ID NO: 290812 - DNA, 15 bp, Homo sapiens
ccatccacctccagg

SEQ ID NO: 290813 - DNA, 15 bp, Homo sapiens
tccatccacctccag

SEQ ID NO: 290814 - DNA, 15 bp, Homo sapiens
atccatccacctcca

SEQ ID NO: 290815 - DNA, 15 bp, Homo sapiens
tatccatccacctcc

SEQ ID NO: 290816 - DNA, 15 bp, Homo sapiens
gtatccatccacctc

SEQ ID NO: 290817 - DNA, 15 bp, Homo sapiens
ggtatccatccacct

SEQ ID NO: 290818 - DNA, 15 bp, Homo sapiens
tggtatccatccacc

SEQ ID NO: 290819 - DNA, 15 bp, Homo sapiens
atggtatccatccac

SEQ ID NO: 290820 - DNA, 15 bp, Homo sapiens
catggtatccatcca

SEQ ID NO: 290821 - DNA, 15 bp, Homo sapiens
acatggtatccatcc

SEQ ID NO: 290822 - DNA, 15 bp, Homo sapiens
tacatggtatccatc

SEQ ID NO: 290823 - DNA, 15 bp, Homo sapiens
ttacatggtatccat

SEQ ID NO: 290824 - DNA, 15 bp, Homo sapiens
gttacatggtatcca

SEQ ID NO: 290825 - DNA, 15 bp, Homo sapiens
ggttacatggtatcc

SEQ ID NO: 290826 - DNA, 15 bp, Homo sapiens
gggttacatggtatc

SEQ ID NO: 290827 - DNA, 15 bp, Homo sapiens
tgggttacatggtat

SEQ ID NO: 290828 - DNA, 15 bp, Homo sapiens
ttgggttacatggta

SEQ ID NO: 290829 - DNA, 15 bp, Homo sapiens
tttgggttacatggt

SEQ ID NO: 290830 - DNA, 15 bp, Homo sapiens
ctttgggttacatgg

SEQ ID NO: 290831 - DNA, 15 bp, Homo sapiens
gctttgggttacatg

SEQ ID NO: 290832 - DNA, 15 bp, Homo sapiens
ggctttgggttacat

SEQ ID NO: 290833 - DNA, 15 bp, Homo sapiens
aggctttgggttaca

SEQ ID NO: 290834 - DNA, 15 bp, Homo sapiens
gaggctttgggttac

SEQ ID NO: 290835 - DNA, 15 bp, Homo sapiens
ggaggctttgggtta

SEQ ID NO: 290836 - DNA, 15 bp, Homo sapiens
tggaggctttgggtt

SEQ ID NO: 290837 - DNA, 15 bp, Homo sapiens
atggaggctttgggt

SEQ ID NO: 290838 - DNA, 15 bp, Homo sapiens
gatggaggctttggg

SEQ ID NO: 290839 - DNA, 15 bp, Homo sapiens
tgatggaggctttgg

SEQ ID NO: 290840 - DNA, 15 bp, Homo sapiens
atgatggaggctttg

SEQ ID NO: 290841 - DNA, 15 bp, Homo sapiens
tatgatggaggcttt

SEQ ID NO: 290842 - DNA, 15 bp, Homo sapiens
ttatgatggaggctt

SEQ ID NO: 290843 - DNA, 15 bp, Homo sapiens
tttatgatggaggct

SEQ ID NO: 290844 - DNA, 15 bp, Homo sapiens
atttatgatggaggc

SEQ ID NO: 290845 - DNA, 15 bp, Homo sapiens
catttatgatggagg

SEQ ID NO: 290846 - DNA, 15 bp, Homo sapiens
tcatttatgatggag

SEQ ID NO: 290847 - DNA, 15 bp, Homo sapiens
gtcatttatgatgga

SEQ ID NO: 290848 - DNA, 15 bp, Homo sapiens
tgtcatttatgatgg

SEQ ID NO: 290849 - DNA, 15 bp, Homo sapiens
atgtcatttatgatg

SEQ ID NO: 290850 - DNA, 15 bp, Homo sapiens
aatgtcatttatgat

SEQ ID NO: 290851 - DNA, 15 bp, Homo sapiens
caatgtcatttatga

SEQ ID NO: 290852 - DNA, 15 bp, Homo sapiens
acaatgtcatttatg

SEQ ID NO: 290853 - DNA, 15 bp, Homo sapiens
aacaatgtcatttat

SEQ ID NO: 290854 - DNA, 15 bp, Homo sapiens
taacaatgtcattta

SEQ ID NO: 290855 - DNA, 15 bp, Homo sapiens
ctaacaatgtcattt

SEQ ID NO: 290856 - DNA, 15 bp, Homo sapiens
tctaacaatgtcatt

SEQ ID NO: 290857 - DNA, 15 bp, Homo sapiens
gtctaacaatgtcat

SEQ ID NO: 290858 - DNA, 15 bp, Homo sapiens
agtctaacaatgtca

SEQ ID NO: 290859 - DNA, 15 bp, Homo sapiens
aagtctaacaatgtc

SEQ ID NO: 290860 - DNA, 15 bp, Homo sapiens
aaagtctaacaatgt

SEQ ID NO: 290861 - DNA, 15 bp, Homo sapiens
gaaagtctaacaatg

SEQ ID NO: 290862 - DNA, 15 bp, Homo sapiens
agaaagtctaacaat

SEQ ID NO: 290863 - DNA, 15 bp, Homo sapiens
cagaaagtctaacaa

SEQ ID NO: 290864 - DNA, 15 bp, Homo sapiens
ccagaaagtctaaca

SEQ ID NO: 290865 - DNA, 15 bp, Homo sapiens
gccagaaagtctaac

SEQ ID NO: 290866 - DNA, 15 bp, Homo sapiens
tgccagaaagtctaa

SEQ ID NO: 290867 - DNA, 15 bp, Homo sapiens
atgccagaaagtcta

SEQ ID NO: 290868 - DNA, 15 bp, Homo sapiens
catgccagaaagtct

SEQ ID NO: 290869 - DNA, 15 bp, Homo sapiens
ccatgccagaaagtc

SEQ ID NO: 290870 - DNA, 15 bp, Homo sapiens
accatgccagaaagt

SEQ ID NO: 290871 - DNA, 15 bp, Homo sapiens
gaccatgccagaaag

SEQ ID NO: 290872 - DNA, 15 bp, Homo sapiens
tgaccatgccagaaa

SEQ ID NO: 290873 - DNA, 15 bp, Homo sapiens
ctgaccatgccagaa

SEQ ID NO: 290874 - DNA, 15 bp, Homo sapiens
gctgaccatgccaga

SEQ ID NO: 290875 - DNA, 15 bp, Homo sapiens
ggctgaccatgccag

SEQ ID NO: 290876 - DNA, 15 bp, Homo sapiens
gggctgaccatgcca

SEQ ID NO: 290877 - DNA, 15 bp, Homo sapiens
ggggctgaccatgcc

SEQ ID NO: 290878 - DNA, 15 bp, Homo sapiens
aggggctgaccatgc

SEQ ID NO: 290879 - DNA, 15 bp, Homo sapiens
taggggctgaccatg

SEQ ID NO: 290880 - DNA, 15 bp, Homo sapiens
gtaggggctgaccat

SEQ ID NO: 290881 - DNA, 15 bp, Homo sapiens
ggtaggggctgacca

SEQ ID NO: 290882 - DNA, 15 bp, Homo sapiens
gggtaggggctgacc

SEQ ID NO: 290883 - DNA, 15 bp, Homo sapiens
tgggtaggggctgac

SEQ ID NO: 290884 - DNA, 15 bp, Homo sapiens
ttgggtaggggctga

SEQ ID NO: 290885 - DNA, 15 bp, Homo sapiens
tttgggtaggggctg

SEQ ID NO: 290886 - DNA, 15 bp, Homo sapiens
ttttgggtaggggct

SEQ ID NO: 290887 - DNA, 15 bp, Homo sapiens
attttgggtaggggc

SEQ ID NO: 290888 - DNA, 15 bp, Homo sapiens
tattttgggtagggg

SEQ ID NO: 290889 - DNA, 15 bp, Homo sapiens
ttattttgggtaggg

SEQ ID NO: 290890 - DNA, 15 bp, Homo sapiens
gttattttgggtagg

SEQ ID NO: 290891 - DNA, 15 bp, Homo sapiens
tgttattttgggtag

SEQ ID NO: 290892 - DNA, 15 bp, Homo sapiens
gtgttattttgggta

SEQ ID NO: 290893 - DNA, 15 bp, Homo sapiens
agtgttattttgggt

SEQ ID NO: 290894 - DNA, 15 bp, Homo sapiens
cagtgttattttggg

SEQ ID NO: 290895 - DNA, 15 bp, Homo sapiens
acagtgttattttgg

SEQ ID NO: 290896 - DNA, 15 bp, Homo sapiens
aacagtgttattttg

SEQ ID NO: 290897 - DNA, 15 bp, Homo sapiens
taacagtgttatttt

SEQ ID NO: 290898 - DNA, 15 bp, Homo sapiens
gtaacagtgttattt

SEQ ID NO: 290899 - DNA, 15 bp, Homo sapiens
agtaacagtgttatt

SEQ ID NO: 290900 - DNA, 15 bp, Homo sapiens
tagtaacagtgttat

SEQ ID NO: 290901 - DNA, 15 bp, Homo sapiens
atagtaacagtgtta

SEQ ID NO: 290902 - DNA, 15 bp, Homo sapiens
gatagtaacagtgtt

SEQ ID NO: 290903 - DNA, 15 bp, Homo sapiens
agatagtaacagtgt

SEQ ID NO: 290904 - DNA, 15 bp, Homo sapiens
cagatagtaacagtg

SEQ ID NO: 290905 - DNA, 15 bp, Homo sapiens
ccagatagtaacagt

SEQ ID NO: 290906 - DNA, 15 bp, Homo sapiens
gccagatagtaacag

SEQ ID NO: 290907 - DNA, 15 bp, Homo sapiens
ggccagatagtaaca

SEQ ID NO: 290908 - DNA, 15 bp, Homo sapiens
tggccagatagtaac

SEQ ID NO: 290909 - DNA, 15 bp, Homo sapiens
ctggccagatagtaa

SEQ ID NO: 290910 - DNA, 15 bp, Homo sapiens
gctggccagatagta

SEQ ID NO: 290911 - DNA, 15 bp, Homo sapiens
ggctggccagatagt

SEQ ID NO: 290912 - DNA, 15 bp, Homo sapiens
gggctggccagatag

SEQ ID NO: 290913 - DNA, 15 bp, Homo sapiens
tgggctggccagata

SEQ ID NO: 290914 - DNA, 15 bp, Homo sapiens
ttgggctggccagat

SEQ ID NO: 290915 - DNA, 15 bp, Homo sapiens
cttgggctggccaga

SEQ ID NO: 290916 - DNA, 15 bp, Homo sapiens
tcttgggctggccag

SEQ ID NO: 290917 - DNA, 15 bp, Homo sapiens
gtcttgggctggcca

SEQ ID NO: 290918 - DNA, 15 bp, Homo sapiens
ggtcttgggctggcc

SEQ ID NO: 290919 - DNA, 15 bp, Homo sapiens
gggtcttgggctggc

SEQ ID NO: 290920 - DNA, 15 bp, Homo sapiens
ggggtcttgggctgg

SEQ ID NO: 290921 - DNA, 15 bp, Homo sapiens
aggggtcttgggctg

SEQ ID NO: 290922 - DNA, 15 bp, Homo sapiens
caggggtcttgggct

SEQ ID NO: 290923 - DNA, 15 bp, Homo sapiens
ccaggggtcttgggc

SEQ ID NO: 290924 - DNA, 15 bp, Homo sapiens
tccaggggtcttggg

SEQ ID NO: 290925 - DNA, 15 bp, Homo sapiens
ttccaggggtcttgg

SEQ ID NO: 290926 - DNA, 15 bp, Homo sapiens
tttccaggggtcttg

SEQ ID NO: 290927 - DNA, 15 bp, Homo sapiens
ttttccaggggtctt

SEQ ID NO: 290928 - DNA, 15 bp, Homo sapiens
cttttccaggggtct

SEQ ID NO: 290929 - DNA, 15 bp, Homo sapiens
tcttttccaggggtc

SEQ ID NO: 290930 - DNA, 15 bp, Homo sapiens
gtcttttccaggggt

SEQ ID NO: 290931 - DNA, 15 bp, Homo sapiens
tgtcttttccagggg

SEQ ID NO: 290932 - DNA, 15 bp, Homo sapiens
gtgtcttttccaggg

SEQ ID NO: 290933 - DNA, 15 bp, Homo sapiens
agtgtcttttccagg

SEQ ID NO: 290934 - DNA, 15 bp, Homo sapiens
aagtgtcttttccag

SEQ ID NO: 290935 - DNA, 15 bp, Homo sapiens
aaagtgtcttttcca

SEQ ID NO: 290936 - DNA, 15 bp, Homo sapiens
aaaagtgtcttttcc

SEQ ID NO: 290937 - DNA, 15 bp, Homo sapiens
taaaagtgtcttttc

SEQ ID NO: 290938 - DNA, 15 bp, Homo sapiens
ataaaagtgtctttt

SEQ ID NO: 290939 - DNA, 15 bp, Homo sapiens
gataaaagtgtcttt

SEQ ID NO: 290940 - DNA, 15 bp, Homo sapiens
tgataaaagtgtctt

SEQ ID NO: 290941 - DNA, 15 bp, Homo sapiens
ctgataaaagtgtct

SEQ ID NO: 290942 - DNA, 15 bp, Homo sapiens
cctgataaaagtgtc

SEQ ID NO: 290943 - DNA, 15 bp, Homo sapiens
gcctgataaaagtgt

SEQ ID NO: 290944 - DNA, 15 bp, Homo sapiens
tgcctgataaaagtg

SEQ ID NO: 290945 - DNA, 15 bp, Homo sapiens
atgcctgataaaagt

SEQ ID NO: 290946 - DNA, 15 bp, Homo sapiens
catgcctgataaaag

SEQ ID NO: 290947 - DNA, 15 bp, Homo sapiens
tcatgcctgataaaa

SEQ ID NO: 290948 - DNA, 15 bp, Homo sapiens
gtcatgcctgataaa

SEQ ID NO: 290949 - DNA, 15 bp, Homo sapiens
tgtcatgcctgataa

SEQ ID NO: 290950 - DNA, 15 bp, Homo sapiens
gtgtcatgcctgata

SEQ ID NO: 290951 - DNA, 15 bp, Homo sapiens
agtgtcatgcctgat

SEQ ID NO: 290952 - DNA, 15 bp, Homo sapiens
gagtgtcatgcctga

SEQ ID NO: 290953 - DNA, 15 bp, Homo sapiens
ggagtgtcatgcctg

SEQ ID NO: 290954 - DNA, 15 bp, Homo sapiens
tggagtgtcatgcct

SEQ ID NO: 290955 - DNA, 15 bp, Homo sapiens
ttggagtgtcatgcc

SEQ ID NO: 290956 - DNA, 15 bp, Homo sapiens
cttggagtgtcatgc

SEQ ID NO: 290957 - DNA, 15 bp, Homo sapiens
ccttggagtgtcatg

SEQ ID NO: 290958 - DNA, 15 bp, Homo sapiens
cccttggagtgtcat

SEQ ID NO: 290959 - DNA, 15 bp, Homo sapiens
gcccttggagtgtca

SEQ ID NO: 290960 - DNA, 15 bp, Homo sapiens
agcccttggagtgtc

SEQ ID NO: 290961 - DNA, 15 bp, Homo sapiens
aagcccttggagtgt

SEQ ID NO: 290962 - DNA, 15 bp, Homo sapiens
taagcccttggagtg

SEQ ID NO: 290963 - DNA, 15 bp, Homo sapiens
ctaagcccttggagt

SEQ ID NO: 290964 - DNA, 15 bp, Homo sapiens
tctaagcccttggag

SEQ ID NO: 290965 - DNA, 15 bp, Homo sapiens
gtctaagcccttgga

SEQ ID NO: 290966 - DNA, 15 bp, Homo sapiens
tgtctaagcccttgg

SEQ ID NO: 290967 - DNA, 15 bp, Homo sapiens
atgtctaagcccttg

SEQ ID NO: 290968 - DNA, 15 bp, Homo sapiens
aatgtctaagccctt

SEQ ID NO: 290969 - DNA, 15 bp, Homo sapiens
caatgtctaagccct

SEQ ID NO: 290970 - DNA, 15 bp, Homo sapiens
gcaatgtctaagccc

SEQ ID NO: 290971 - DNA, 15 bp, Homo sapiens
ggcaatgtctaagcc

SEQ ID NO: 290972 - DNA, 15 bp, Homo sapiens
aggcaatgtctaagc

SEQ ID NO: 290973 - DNA, 15 bp, Homo sapiens
gaggcaatgtctaag

SEQ ID NO: 290974 - DNA, 15 bp, Homo sapiens
ggaggcaatgtctaa

SEQ ID NO: 290975 - DNA, 15 bp, Homo sapiens
gggaggcaatgtcta

SEQ ID NO: 290976 - DNA, 15 bp, Homo sapiens
tgggaggcaatgtct

SEQ ID NO: 290977 - DNA, 15 bp, Homo sapiens
ctgggaggcaatgtc

SEQ ID NO: 290978 - DNA, 15 bp, Homo sapiens
tctgggaggcaatgt

SEQ ID NO: 290979 - DNA, 15 bp, Homo sapiens
ttctgggaggcaatg

SEQ ID NO: 290980 - DNA, 15 bp, Homo sapiens
cttctgggaggcaat

SEQ ID NO: 290981 - DNA, 15 bp, Homo sapiens
gcttctgggaggcaa

SEQ ID NO: 290982 - DNA, 15 bp, Homo sapiens
agcttctgggaggca

SEQ ID NO: 290983 - DNA, 15 bp, Homo sapiens
gagcttctgggaggc

SEQ ID NO: 290984 - DNA, 15 bp, Homo sapiens
tgagcttctgggagg

SEQ ID NO: 290985 - DNA, 15 bp, Homo sapiens
ctgagcttctgggag

SEQ ID NO: 290986 - DNA, 15 bp, Homo sapiens
cctgagcttctggga

SEQ ID NO: 290987 - DNA, 15 bp, Homo sapiens
tcctgagcttctggg

SEQ ID NO: 290988 - DNA, 15 bp, Homo sapiens
gtcctgagcttctgg

SEQ ID NO: 290989 - DNA, 15 bp, Homo sapiens
tgtcctgagcttctg

SEQ ID NO: 290990 - DNA, 15 bp, Homo sapiens
ttgtcctgagcttct

SEQ ID NO: 290991 - DNA, 15 bp, Homo sapiens
cttgtcctgagcttc

SEQ ID NO: 290992 - DNA, 15 bp, Homo sapiens
ccttgtcctgagctt

SEQ ID NO: 290993 - DNA, 15 bp, Homo sapiens
gccttgtcctgagct

SEQ ID NO: 290994 - DNA, 15 bp, Homo sapiens
ggccttgtcctgagc

SEQ ID NO: 290995 - DNA, 15 bp, Homo sapiens
tggccttgtcctgag

SEQ ID NO: 290996 - DNA, 15 bp, Homo sapiens
ctggccttgtcctga

SEQ ID NO: 290997 - DNA, 15 bp, Homo sapiens
cctggccttgtcctg

SEQ ID NO: 290998 - DNA, 15 bp, Homo sapiens
gcctggccttgtcct

SEQ ID NO: 290999 - DNA, 15 bp, Homo sapiens
ggcctggccttgtcc

SEQ ID NO: 291000 - DNA, 15 bp, Homo sapiens
aggcctggccttgtc

SEQ ID NO: 291001 - DNA, 15 bp, Homo sapiens
gaggcctggccttgt

SEQ ID NO: 291002 - DNA, 15 bp, Homo sapiens
agaggcctggccttg

SEQ ID NO: 291003 - DNA, 15 bp, Homo sapiens
gagaggcctggcctt

SEQ ID NO: 291004 - DNA, 15 bp, Homo sapiens
agagaggcctggcct

SEQ ID NO: 291005 - DNA, 15 bp, Homo sapiens
aagagaggcctggcc

SEQ ID NO: 291006 - DNA, 15 bp, Homo sapiens
aaagagaggcctggc

SEQ ID NO: 291007 - DNA, 15 bp, Homo sapiens
caaagagaggcctgg

SEQ ID NO: 291008 - DNA, 15 bp, Homo sapiens
ccaaagagaggcctg

SEQ ID NO: 291009 - DNA, 15 bp, Homo sapiens
cccaaagagaggcct

SEQ ID NO: 291010 - DNA, 15 bp, Homo sapiens
gcccaaagagaggcc

SEQ ID NO: 291011 - DNA, 15 bp, Homo sapiens
tgcccaaagagaggc

SEQ ID NO: 291012 - DNA, 15 bp, Homo sapiens
ttgcccaaagagagg

SEQ ID NO: 291013 - DNA, 15 bp, Homo sapiens
tttgcccaaagagag

SEQ ID NO: 291014 - DNA, 15 bp, Homo sapiens
ctttgcccaaagaga

SEQ ID NO: 291015 - DNA, 15 bp, Homo sapiens
actttgcccaaagag

SEQ ID NO: 291016 - DNA, 15 bp, Homo sapiens
aactttgcccaaaga

SEQ ID NO: 291017 - DNA, 15 bp, Homo sapiens
taactttgcccaaag

SEQ ID NO: 291018 - DNA, 15 bp, Homo sapiens
ttaactttgcccaaa

SEQ ID NO: 291019 - DNA, 15 bp, Homo sapiens
attaactttgcccaa

SEQ ID NO: 291020 - DNA, 15 bp, Homo sapiens
cattaactttgccca

SEQ ID NO: 291021 - DNA, 15 bp, Homo sapiens
acattaactttgccc

SEQ ID NO: 291022 - DNA, 15 bp, Homo sapiens
gacattaactttgcc

SEQ ID NO: 291023 - DNA, 15 bp, Homo sapiens
agacattaactttgc

SEQ ID NO: 291024 - DNA, 15 bp, Homo sapiens
aagacattaactttg

SEQ ID NO: 291025 - DNA, 15 bp, Homo sapiens
aaagacattaacttt

SEQ ID NO: 291026 - DNA, 15 bp, Homo sapiens
taaagacattaactt

SEQ ID NO: 291027 - DNA, 15 bp, Homo sapiens
gtaaagacattaact

SEQ ID NO: 291028 - DNA, 15 bp, Homo sapiens
tgtaaagacattaac

SEQ ID NO: 291029 - DNA, 15 bp, Homo sapiens
ttgtaaagacattaa

SEQ ID NO: 291030 - DNA, 15 bp, Homo sapiens
tttgtaaagacatta

SEQ ID NO: 291031 - DNA, 15 bp, Homo sapiens
ttttgtaaagacatt

SEQ ID NO: 291032 - DNA, 15 bp, Homo sapiens
tttttgtaaagacat

SEQ ID NO: 291033 - DNA, 15 bp, Homo sapiens
atttttgtaaagaca

SEQ ID NO: 291034 - DNA, 15 bp, Homo sapiens
tatttttgtaaagac

SEQ ID NO: 291035 - DNA, 15 bp, Homo sapiens
ctatttttgtaaaga

SEQ ID NO: 291036 - DNA, 15 bp, Homo sapiens
actatttttgtaaag

SEQ ID NO: 291037 - DNA, 15 bp, Homo sapiens
gactatttttgtaaa

SEQ ID NO: 291038 - DNA, 15 bp, Homo sapiens
tgactatttttgtaa

SEQ ID NO: 291039 - DNA, 15 bp, Homo sapiens
ctgactatttttgta

SEQ ID NO: 291040 - DNA, 15 bp, Homo sapiens
actgactatttttgt

SEQ ID NO: 291041 - DNA, 15 bp, Homo sapiens
cactgactatttttg

SEQ ID NO: 291042 - DNA, 15 bp, Homo sapiens
tcactgactattttt

SEQ ID NO: 291043 - DNA, 15 bp, Homo sapiens
ttcactgactatttt

SEQ ID NO: 291044 - DNA, 15 bp, Homo sapiens
cttcactgactattt

SEQ ID NO: 291045 - DNA, 15 bp, Homo sapiens
ccttcactgactatt

SEQ ID NO: 291046 - DNA, 15 bp, Homo sapiens
cccttcactgactat

SEQ ID NO: 291047 - DNA, 15 bp, Homo sapiens
tcccttcactgacta

SEQ ID NO: 291048 - DNA, 15 bp, Homo sapiens
gtcccttcactgact

SEQ ID NO: 291049 - DNA, 15 bp, Homo sapiens
agtcccttcactgac

SEQ ID NO: 291050 - DNA, 15 bp, Homo sapiens
aagtcccttcactga

SEQ ID NO: 291051 - DNA, 15 bp, Homo sapiens
aaagtcccttcactg

SEQ ID NO: 291052 - DNA, 15 bp, Homo sapiens
caaagtcccttcact

SEQ ID NO: 291053 - DNA, 15 bp, Homo sapiens
acaaagtcccttcac

SEQ ID NO: 291054 - DNA, 15 bp, Homo sapiens
aacaaagtcccttca

SEQ ID NO: 291055 - DNA, 15 bp, Homo sapiens
caacaaagtcccttc

SEQ ID NO: 291056 - DNA, 15 bp, Homo sapiens
ccaacaaagtccctt

SEQ ID NO: 291057 - DNA, 15 bp, Homo sapiens
gccaacaaagtccct

SEQ ID NO: 291058 - DNA, 15 bp, Homo sapiens
agccaacaaagtccc

SEQ ID NO: 291059 - DNA, 15 bp, Homo sapiens
cagccaacaaagtcc

SEQ ID NO: 291060 - DNA, 15 bp, Homo sapiens
ccagccaacaaagtc

SEQ ID NO: 291061 - DNA, 15 bp, Homo sapiens
tccagccaacaaagt

SEQ ID NO: 291062 - DNA, 15 bp, Homo sapiens
ctccagccaacaaag

SEQ ID NO: 291063 - DNA, 15 bp, Homo sapiens
cctccagccaacaaa

SEQ ID NO: 291064 - DNA, 15 bp, Homo sapiens
tcctccagccaacaa

SEQ ID NO: 291065 - DNA, 15 bp, Homo sapiens
ctcctccagccaaca

SEQ ID NO: 291066 - DNA, 15 bp, Homo sapiens
tctcctccagccaac

SEQ ID NO: 291067 - DNA, 15 bp, Homo sapiens
ctctcctccagccaa

SEQ ID NO: 291068 - DNA, 15 bp, Homo sapiens
cctctcctccagcca

SEQ ID NO: 291069 - DNA, 15 bp, Homo sapiens
gcctctcctccagcc

SEQ ID NO: 291070 - DNA, 15 bp, Homo sapiens
ggcctctcctccagc

SEQ ID NO: 291071 - DNA, 15 bp, Homo sapiens
aggcctctcctccag

SEQ ID NO: 291072 - DNA, 15 bp, Homo sapiens
gaggcctctcctcca

SEQ ID NO: 291073 - DNA, 15 bp, Homo sapiens
agaggcctctcctcc

SEQ ID NO: 291074 - DNA, 15 bp, Homo sapiens
gagaggcctctcctc

SEQ ID NO: 291075 - DNA, 15 bp, Homo sapiens
agagaggcctctcct

SEQ ID NO: 291076 - DNA, 15 bp, Homo sapiens
aagagaggcctctcc

SEQ ID NO: 291077 - DNA, 15 bp, Homo sapiens
caagagaggcctctc

SEQ ID NO: 291078 - DNA, 15 bp, Homo sapiens
tcaagagaggcctct

SEQ ID NO: 291079 - DNA, 15 bp, Homo sapiens
ctcaagagaggcctc

SEQ ID NO: 291080 - DNA, 15 bp, Homo sapiens
cctcaagagaggcct

SEQ ID NO: 291081 - DNA, 15 bp, Homo sapiens
tcctcaagagaggcc

SEQ ID NO: 291082 - DNA, 15 bp, Homo sapiens
ttcctcaagagaggc

SEQ ID NO: 291083 - DNA, 15 bp, Homo sapiens
cttcctcaagagagg

SEQ ID NO: 291084 - DNA, 15 bp, Homo sapiens
ccttcctcaagagag

SEQ ID NO: 291085 - DNA, 15 bp, Homo sapiens
gccttcctcaagaga

SEQ ID NO: 291086 - DNA, 15 bp, Homo sapiens
agccttcctcaagag

SEQ ID NO: 291087 - DNA, 15 bp, Homo sapiens
cagccttcctcaaga

SEQ ID NO: 291088 - DNA, 15 bp, Homo sapiens
ccagccttcctcaag

SEQ ID NO: 291089 - DNA, 15 bp, Homo sapiens
tccagccttcctcaa

SEQ ID NO: 291090 - DNA, 15 bp, Homo sapiens
ttccagccttcctca

SEQ ID NO: 291091 - DNA, 15 bp, Homo sapiens
cttccagccttcctc

SEQ ID NO: 291092 - DNA, 15 bp, Homo sapiens
acttccagccttcct

SEQ ID NO: 291093 - DNA, 15 bp, Homo sapiens
cacttccagccttcc

SEQ ID NO: 291094 - DNA, 15 bp, Homo sapiens
ccacttccagccttc

SEQ ID NO: 291095 - DNA, 15 bp, Homo sapiens
cccacttccagcctt

SEQ ID NO: 291096 - DNA, 15 bp, Homo sapiens
acccacttccagcct

SEQ ID NO: 291097 - DNA, 15 bp, Homo sapiens
gacccacttccagcc

SEQ ID NO: 291098 - DNA, 15 bp, Homo sapiens
ggacccacttccagc

SEQ ID NO: 291099 - DNA, 15 bp, Homo sapiens
aggacccacttccag

SEQ ID NO: 291100 - DNA, 15 bp, Homo sapiens
aaggacccacttcca

SEQ ID NO: 291101 - DNA, 15 bp, Homo sapiens
aaaggacccacttcc

SEQ ID NO: 291102 - DNA, 15 bp, Homo sapiens
caaaggacccacttc

SEQ ID NO: 291103 - DNA, 15 bp, Homo sapiens
tcaaaggacccactt

SEQ ID NO: 291104 - DNA, 15 bp, Homo sapiens
atcaaaggacccact

SEQ ID NO: 291105 - DNA, 15 bp, Homo sapiens
gatcaaaggacccac

SEQ ID NO: 291106 - DNA, 15 bp, Homo sapiens
tgatcaaaggaccca

SEQ ID NO: 291107 - DNA, 15 bp, Homo sapiens
gtgatcaaaggaccc

SEQ ID NO: 291108 - DNA, 15 bp, Homo sapiens
agtgatcaaaggacc

SEQ ID NO: 291109 - DNA, 15 bp, Homo sapiens
aagtgatcaaaggac

SEQ ID NO: 291110 - DNA, 15 bp, Homo sapiens
caagtgatcaaagga

SEQ ID NO: 291111 - DNA, 15 bp, Homo sapiens
gcaagtgatcaaagg

SEQ ID NO: 291112 - DNA, 15 bp, Homo sapiens
tgcaagtgatcaaag

SEQ ID NO: 291113 - DNA, 15 bp, Homo sapiens
atgcaagtgatcaaa

SEQ ID NO: 291114 - DNA, 15 bp, Homo sapiens
catgcaagtgatcaa

SEQ ID NO: 291115 - DNA, 15 bp, Homo sapiens
tcatgcaagtgatca

SEQ ID NO: 291116 - DNA, 15 bp, Homo sapiens
ttcatgcaagtgatc

SEQ ID NO: 291117 - DNA, 15 bp, Homo sapiens
attcatgcaagtgat

SEQ ID NO: 291118 - DNA, 15 bp, Homo sapiens
tattcatgcaagtga

SEQ ID NO: 291119 - DNA, 15 bp, Homo sapiens
ctattcatgcaagtg

SEQ ID NO: 291120 - DNA, 15 bp, Homo sapiens
gctattcatgcaagt

SEQ ID NO: 291121 - DNA, 15 bp, Homo sapiens
tgctattcatgcaag

SEQ ID NO: 291122 - DNA, 15 bp, Homo sapiens
ctgctattcatgcaa

SEQ ID NO: 291123 - DNA, 15 bp, Homo sapiens
tctgctattcatgca

SEQ ID NO: 291124 - DNA, 15 bp, Homo sapiens
ctctgctattcatgc

SEQ ID NO: 291125 - DNA, 15 bp, Homo sapiens
cctctgctattcatg

SEQ ID NO: 291126 - DNA, 15 bp, Homo sapiens
tcctctgctattcat

SEQ ID NO: 291127 - DNA, 15 bp, Homo sapiens
ctcctctgctattca

SEQ ID NO: 291128 - DNA, 15 bp, Homo sapiens
tctcctctgctattc

SEQ ID NO: 291129 - DNA, 15 bp, Homo sapiens
ctctcctctgctatt

SEQ ID NO: 291130 - DNA, 15 bp, Homo sapiens
cctctcctctgctat

SEQ ID NO: 291131 - DNA, 15 bp, Homo sapiens
tcctctcctctgcta

SEQ ID NO: 291132 - DNA, 15 bp, Homo sapiens
ttcctctcctctgct

SEQ ID NO: 291133 - DNA, 15 bp, Homo sapiens
tttcctctcctctgc

SEQ ID NO: 291134 - DNA, 15 bp, Homo sapiens
ttttcctctcctctg

SEQ ID NO: 291135 - DNA, 15 bp, Homo sapiens
attttcctctcctct

SEQ ID NO: 291136 - DNA, 15 bp, Homo sapiens
cattttcctctcctc

SEQ ID NO: 291137 - DNA, 15 bp, Homo sapiens
gcattttcctctcct

SEQ ID NO: 291138 - DNA, 15 bp, Homo sapiens
agcattttcctctcc

SEQ ID NO: 291139 - DNA, 15 bp, Homo sapiens
tagcattttcctctc

SEQ ID NO: 291140 - DNA, 15 bp, Homo sapiens
gtagcattttcctct

SEQ ID NO: 291141 - DNA, 15 bp, Homo sapiens
agtagcattttcctc

SEQ ID NO: 291142 - DNA, 15 bp, Homo sapiens
gagtagcattttcct

SEQ ID NO: 291143 - DNA, 15 bp, Homo sapiens
ggagtagcattttcc

SEQ ID NO: 291144 - DNA, 15 bp, Homo sapiens
tggagtagcattttc

SEQ ID NO: 291145 - DNA, 15 bp, Homo sapiens
atggagtagcatttt

SEQ ID NO: 291146 - DNA, 15 bp, Homo sapiens
catggagtagcattt

SEQ ID NO: 291147 - DNA, 15 bp, Homo sapiens
tcatggagtagcatt

SEQ ID NO: 291148 - DNA, 15 bp, Homo sapiens
ttcatggagtagcat

SEQ ID NO: 291149 - DNA, 15 bp, Homo sapiens
cttcatggagtagca

SEQ ID NO: 291150 - DNA, 15 bp, Homo sapiens
acttcatggagtagc

SEQ ID NO: 291151 - DNA, 15 bp, Homo sapiens
cacttcatggagtag

SEQ ID NO: 291152 - DNA, 15 bp, Homo sapiens
ccacttcatggagta

SEQ ID NO: 291153 - DNA, 15 bp, Homo sapiens
tccacttcatggagt

SEQ ID NO: 291154 - DNA, 15 bp, Homo sapiens
atccacttcatggag

SEQ ID NO: 291155 - DNA, 15 bp, Homo sapiens
catccacttcatgga

SEQ ID NO: 291156 - DNA, 15 bp, Homo sapiens
gcatccacttcatgg

SEQ ID NO: 291157 - DNA, 15 bp, Homo sapiens
agcatccacttcatg

SEQ ID NO: 291158 - DNA, 15 bp, Homo sapiens
aagcatccacttcat

SEQ ID NO: 291159 - DNA, 15 bp, Homo sapiens
gaagcatccacttca

SEQ ID NO: 291160 - DNA, 15 bp, Homo sapiens
ggaagcatccacttc

SEQ ID NO: 291161 - DNA, 15 bp, Homo sapiens
tggaagcatccactt

SEQ ID NO: 291162 - DNA, 15 bp, Homo sapiens
ctggaagcatccact

SEQ ID NO: 291163 - DNA, 15 bp, Homo sapiens
tctggaagcatccac

SEQ ID NO: 291164 - DNA, 15 bp, Homo sapiens
atctggaagcatcca

SEQ ID NO: 291165 - DNA, 15 bp, Homo sapiens
aatctggaagcatcc

SEQ ID NO: 291166 - DNA, 15 bp, Homo sapiens
gaatctggaagcatc

SEQ ID NO: 291167 - DNA, 15 bp, Homo sapiens
agaatctggaagcat

SEQ ID NO: 291168 - DNA, 15 bp, Homo sapiens
tagaatctggaagca

SEQ ID NO: 291169 - DNA, 15 bp, Homo sapiens
gtagaatctggaagc

SEQ ID NO: 291170 - DNA, 15 bp, Homo sapiens
agtagaatctggaag

SEQ ID NO: 291171 - DNA, 15 bp, Homo sapiens
tagtagaatctggaa

SEQ ID NO: 291172 - DNA, 15 bp, Homo sapiens
ttagtagaatctgga

SEQ ID NO: 291173 - DNA, 15 bp, Homo sapiens
attagtagaatctgg

SEQ ID NO: 291174 - DNA, 15 bp, Homo sapiens
cattagtagaatctg

SEQ ID NO: 291175 - DNA, 15 bp, Homo sapiens
acattagtagaatct

SEQ ID NO: 291176 - DNA, 15 bp, Homo sapiens
gacattagtagaatc

SEQ ID NO: 291177 - DNA, 15 bp, Homo sapiens
tgacattagtagaat

SEQ ID NO: 291178 - DNA, 15 bp, Homo sapiens
ttgacattagtagaa

SEQ ID NO: 291179 - DNA, 15 bp, Homo sapiens
gttgacattagtaga

SEQ ID NO: 291180 - DNA, 15 bp, Homo sapiens
tgttgacattagtag

SEQ ID NO: 291181 - DNA, 15 bp, Homo sapiens
ttgttgacattagta

SEQ ID NO: 291182 - DNA, 15 bp, Homo sapiens
tttgttgacattagt

SEQ ID NO: 291183 - DNA, 15 bp, Homo sapiens
ttttgttgacattag

SEQ ID NO: 291184 - DNA, 15 bp, Homo sapiens
attttgttgacatta

SEQ ID NO: 291185 - DNA, 15 bp, Homo sapiens
gattttgttgacatt

SEQ ID NO: 291186 - DNA, 15 bp, Homo sapiens
ggattttgttgacat

SEQ ID NO: 291187 - DNA, 15 bp, Homo sapiens
gggattttgttgaca

SEQ ID NO: 291188 - DNA, 15 bp, Homo sapiens
agggattttgttgac

SEQ ID NO: 291189 - DNA, 15 bp, Homo sapiens
cagggattttgttga

SEQ ID NO: 291190 - DNA, 15 bp, Homo sapiens
acagggattttgttg

SEQ ID NO: 291191 - DNA, 15 bp, Homo sapiens
aacagggattttgtt

SEQ ID NO: 291192 - DNA, 15 bp, Homo sapiens
caacagggattttgt

SEQ ID NO: 291193 - DNA, 15 bp, Homo sapiens
tcaacagggattttg

SEQ ID NO: 291194 - DNA, 15 bp, Homo sapiens
ttcaacagggatttt

SEQ ID NO: 291195 - DNA, 15 bp, Homo sapiens
tttcaacagggattt

SEQ ID NO: 291196 - DNA, 15 bp, Homo sapiens
ttttcaacagggatt

SEQ ID NO: 291197 - DNA, 15 bp, Homo sapiens
gttttcaacagggat

SEQ ID NO: 291198 - DNA, 15 bp, Homo sapiens
cgttttcaacaggga

SEQ ID NO: 291199 - DNA, 15 bp, Homo sapiens
tcgttttcaacaggg

SEQ ID NO: 291200 - DNA, 15 bp, Homo sapiens
ttcgttttcaacagg

SEQ ID NO: 291201 - DNA, 15 bp, Homo sapiens
cttcgttttcaacag

SEQ ID NO: 291202 - DNA, 15 bp, Homo sapiens
gcttcgttttcaaca

SEQ ID NO: 291203 - DNA, 15 bp, Homo sapiens
cgcttcgttttcaac

SEQ ID NO: 291204 - DNA, 15 bp, Homo sapiens
tcgcttcgttttcaa

SEQ ID NO: 291205 - DNA, 15 bp, Homo sapiens
atcgcttcgttttca

SEQ ID NO: 291206 - DNA, 15 bp, Homo sapiens
aatcgcttcgttttc

SEQ ID NO: 291207 - DNA, 15 bp, Homo sapiens
aaatcgcttcgtttt

SEQ ID NO: 291208 - DNA, 15 bp, Homo sapiens
taaatcgcttcgttt

SEQ ID NO: 291209 - DNA, 15 bp, Homo sapiens
ataaatcgcttcgtt

SEQ ID NO: 291210 - DNA, 15 bp, Homo sapiens
aataaatcgcttcgt

SEQ ID NO: 291211 - DNA, 15 bp, Homo sapiens
gaataaatcgcttcg

SEQ ID NO: 291212 - DNA, 15 bp, Homo sapiens
ggaataaatcgcttc

SEQ ID NO: 291213 - DNA, 15 bp, Homo sapiens
aggaataaatcgctt

SEQ ID NO: 291214 - DNA, 15 bp, Homo sapiens
aaggaataaatcgct

SEQ ID NO: 291215 - DNA, 15 bp, Homo sapiens
gaaggaataaatcgc

SEQ ID NO: 291216 - DNA, 15 bp, Homo sapiens
ggaaggaataaatcg

SEQ ID NO: 291217 - DNA, 15 bp, Homo sapiens
gggaaggaataaatc

SEQ ID NO: 291218 - DNA, 15 bp, Homo sapiens
agggaaggaataaat

SEQ ID NO: 291219 - DNA, 15 bp, Homo sapiens
aagggaaggaataaa

SEQ ID NO: 291220 - DNA, 15 bp, Homo sapiens
caagggaaggaataa

SEQ ID NO: 291221 - DNA, 15 bp, Homo sapiens
ccaagggaaggaata

SEQ ID NO: 291222 - DNA, 15 bp, Homo sapiens
gccaagggaaggaat

SEQ ID NO: 291223 - DNA, 15 bp, Homo sapiens
agccaagggaaggaa

SEQ ID NO: 291224 - DNA, 15 bp, Homo sapiens
gagccaagggaagga

SEQ ID NO: 291225 - DNA, 15 bp, Homo sapiens
ggagccaagggaagg

SEQ ID NO: 291226 - DNA, 15 bp, Homo sapiens
aggagccaagggaag

SEQ ID NO: 291227 - DNA, 15 bp, Homo sapiens
gaggagccaagggaa

SEQ ID NO: 291228 - DNA, 15 bp, Homo sapiens
agaggagccaaggga

SEQ ID NO: 291229 - DNA, 15 bp, Homo sapiens
cagaggagccaaggg

SEQ ID NO: 291230 - DNA, 15 bp, Homo sapiens
gcagaggagccaagg

SEQ ID NO: 291231 - DNA, 15 bp, Homo sapiens
tgcagaggagccaag

SEQ ID NO: 291232 - DNA, 15 bp, Homo sapiens
atgcagaggagccaa

SEQ ID NO: 291233 - DNA, 15 bp, Homo sapiens
tatgcagaggagcca

SEQ ID NO: 291234 - DNA, 15 bp, Homo sapiens
gtatgcagaggagcc

SEQ ID NO: 291235 - DNA, 15 bp, Homo sapiens
ggtatgcagaggagc

SEQ ID NO: 291236 - DNA, 15 bp, Homo sapiens
gggtatgcagaggag

SEQ ID NO: 291237 - DNA, 15 bp, Homo sapiens
cgggtatgcagagga

SEQ ID NO: 291238 - DNA, 15 bp, Homo sapiens
ccgggtatgcagagg

SEQ ID NO: 291239 - DNA, 15 bp, Homo sapiens
cccgggtatgcagag

SEQ ID NO: 291240 - DNA, 15 bp, Homo sapiens
gcccgggtatgcaga

SEQ ID NO: 291241 - DNA, 15 bp, Homo sapiens
agcccgggtatgcag

SEQ ID NO: 291242 - DNA, 15 bp, Homo sapiens
cagcccgggtatgca

SEQ ID NO: 291243 - DNA, 15 bp, Homo sapiens
tcagcccgggtatgc

SEQ ID NO: 291244 - DNA, 15 bp, Homo sapiens
ttcagcccgggtatg

SEQ ID NO: 291245 - DNA, 15 bp, Homo sapiens
attcagcccgggtat

SEQ ID NO: 291246 - DNA, 15 bp, Homo sapiens
tattcagcccgggta

SEQ ID NO: 291247 - DNA, 15 bp, Homo sapiens
ttattcagcccgggt

SEQ ID NO: 291248 - DNA, 15 bp, Homo sapiens
gttattcagcccggg

SEQ ID NO: 291249 - DNA, 15 bp, Homo sapiens
ggttattcagcccgg

SEQ ID NO: 291250 - DNA, 15 bp, Homo sapiens
aggttattcagcccg

SEQ ID NO: 291251 - DNA, 15 bp, Homo sapiens
caggttattcagccc

SEQ ID NO: 291252 - DNA, 15 bp, Homo sapiens
acaggttattcagcc

SEQ ID NO: 291253 - DNA, 15 bp, Homo sapiens
aacaggttattcagc

SEQ ID NO: 291254 - DNA, 15 bp, Homo sapiens
taacaggttattcag

SEQ ID NO: 291255 - DNA, 15 bp, Homo sapiens
ctaacaggttattca

SEQ ID NO: 291256 - DNA, 15 bp, Homo sapiens
gctaacaggttattc

SEQ ID NO: 291257 - DNA, 15 bp, Homo sapiens
ggctaacaggttatt

SEQ ID NO: 291258 - DNA, 15 bp, Homo sapiens
tggctaacaggttat

SEQ ID NO: 291259 - DNA, 15 bp, Homo sapiens
ctggctaacaggtta

SEQ ID NO: 291260 - DNA, 15 bp, Homo sapiens
actggctaacaggtt

SEQ ID NO: 291261 - DNA, 15 bp, Homo sapiens
tactggctaacaggt

SEQ ID NO: 291262 - DNA, 15 bp, Homo sapiens
ttactggctaacagg

SEQ ID NO: 291263 - DNA, 15 bp, Homo sapiens
cttactggctaacag

SEQ ID NO: 291264 - DNA, 15 bp, Homo sapiens
ccttactggctaaca

SEQ ID NO: 291265 - DNA, 15 bp, Homo sapiens
cccttactggctaac

SEQ ID NO: 291266 - DNA, 15 bp, Homo sapiens
ccccttactggctaa

SEQ ID NO: 291267 - DNA, 15 bp, Homo sapiens
tccccttactggcta

SEQ ID NO: 291268 - DNA, 15 bp, Homo sapiens
ttccccttactggct

SEQ ID NO: 291269 - DNA, 15 bp, Homo sapiens
tttccccttactggc

SEQ ID NO: 291270 - DNA, 15 bp, Homo sapiens
ttttccccttactgg

SEQ ID NO: 291271 - DNA, 15 bp, Homo sapiens
attttccccttactg

SEQ ID NO: 291272 - DNA, 15 bp, Homo sapiens
cattttccccttact

SEQ ID NO: 291273 - DNA, 15 bp, Homo sapiens
tcattttccccttac

SEQ ID NO: 291274 - DNA, 15 bp, Homo sapiens
ctcattttcccctta

SEQ ID NO: 291275 - DNA, 15 bp, Homo sapiens
cctcattttcccctt

SEQ ID NO: 291276 - DNA, 15 bp, Homo sapiens
gcctcattttcccct

SEQ ID NO: 291277 - DNA, 15 bp, Homo sapiens
tgcctcattttcccc

SEQ ID NO: 291278 - DNA, 15 bp, Homo sapiens
gtgcctcattttccc

SEQ ID NO: 291279 - DNA, 15 bp, Homo sapiens
tgtgcctcattttcc

SEQ ID NO: 291280 - DNA, 15 bp, Homo sapiens
ctgtgcctcattttc

SEQ ID NO: 291281 - DNA, 15 bp, Homo sapiens
cctgtgcctcatttt

SEQ ID NO: 291282 - DNA, 15 bp, Homo sapiens
tcctgtgcctcattt

SEQ ID NO: 291283 - DNA, 15 bp, Homo sapiens
ttcctgtgcctcatt

SEQ ID NO: 291284 - DNA, 15 bp, Homo sapiens
tttcctgtgcctcat

SEQ ID NO: 291285 - DNA, 15 bp, Homo sapiens
ctttcctgtgcctca

SEQ ID NO: 291286 - DNA, 15 bp, Homo sapiens
tctttcctgtgcctc

SEQ ID NO: 291287 - DNA, 15 bp, Homo sapiens
ctctttcctgtgcct

SEQ ID NO: 291288 - DNA, 15 bp, Homo sapiens
cctctttcctgtgcc

SEQ ID NO: 291289 - DNA, 15 bp, Homo sapiens
tcctctttcctgtgc

SEQ ID NO: 291290 - DNA, 15 bp, Homo sapiens
ttcctctttcctgtg

SEQ ID NO: 291291 - DNA, 15 bp, Homo sapiens
tttcctctttcctgt

SEQ ID NO: 291292 - DNA, 15 bp, Homo sapiens
ctttcctctttcctg

SEQ ID NO: 291293 - DNA, 15 bp, Homo sapiens
cctttcctctttcct

SEQ ID NO: 291294 - DNA, 15 bp, Homo sapiens
ccctttcctctttcc

SEQ ID NO: 291295 - DNA, 15 bp, Homo sapiens
cccctttcctctttc

SEQ ID NO: 291296 - DNA, 15 bp, Homo sapiens
acccctttcctcttt

SEQ ID NO: 291297 - DNA, 15 bp, Homo sapiens
gacccctttcctctt

SEQ ID NO: 291298 - DNA, 15 bp, Homo sapiens
tgacccctttcctct

SEQ ID NO: 291299 - DNA, 15 bp, Homo sapiens
ctgacccctttcctc

SEQ ID NO: 291300 - DNA, 15 bp, Homo sapiens
gctgacccctttcct

SEQ ID NO: 291301 - DNA, 15 bp, Homo sapiens
ggctgacccctttcc

SEQ ID NO: 291302 - DNA, 15 bp, Homo sapiens
aggctgacccctttc

SEQ ID NO: 291303 - DNA, 15 bp, Homo sapiens
caggctgaccccttt

SEQ ID NO: 291304 - DNA, 15 bp, Homo sapiens
ccaggctgacccctt

SEQ ID NO: 291305 - DNA, 15 bp, Homo sapiens
tccaggctgacccct

SEQ ID NO: 291306 - DNA, 15 bp, Homo sapiens
atccaggctgacccc

SEQ ID NO: 291307 - DNA, 15 bp, Homo sapiens
catccaggctgaccc

SEQ ID NO: 291308 - DNA, 15 bp, Homo sapiens
acatccaggctgacc

SEQ ID NO: 291309 - DNA, 15 bp, Homo sapiens
tacatccaggctgac

SEQ ID NO: 291310 - DNA, 15 bp, Homo sapiens
atacatccaggctga

SEQ ID NO: 291311 - DNA, 15 bp, Homo sapiens
catacatccaggctg

SEQ ID NO: 291312 - DNA, 15 bp, Homo sapiens
gcatacatccaggct

SEQ ID NO: 291313 - DNA, 15 bp, Homo sapiens
agcatacatccaggc

SEQ ID NO: 291314 - DNA, 15 bp, Homo sapiens
aagcatacatccagg

SEQ ID NO: 291315 - DNA, 15 bp, Homo sapiens
caagcatacatccag

SEQ ID NO: 291316 - DNA, 15 bp, Homo sapiens
gcaagcatacatcca

SEQ ID NO: 291317 - DNA, 15 bp, Homo sapiens
ggcaagcatacatcc

SEQ ID NO: 291318 - DNA, 15 bp, Homo sapiens
tggcaagcatacatc

SEQ ID NO: 291319 - DNA, 15 bp, Homo sapiens
atggcaagcatacat

SEQ ID NO: 291320 - DNA, 15 bp, Homo sapiens
catggcaagcataca

SEQ ID NO: 291321 - DNA, 15 bp, Homo sapiens
acatggcaagcatac

SEQ ID NO: 291322 - DNA, 15 bp, Homo sapiens
cacatggcaagcata

SEQ ID NO: 291323 - DNA, 15 bp, Homo sapiens
ccacatggcaagcat

SEQ ID NO: 291324 - DNA, 15 bp, Homo sapiens
cccacatggcaagca

SEQ ID NO: 291325 - DNA, 15 bp, Homo sapiens
acccacatggcaagc

SEQ ID NO: 291326 - DNA, 15 bp, Homo sapiens
cacccacatggcaag

SEQ ID NO: 291327 - DNA, 15 bp, Homo sapiens
tcacccacatggcaa

SEQ ID NO: 291328 - DNA, 15 bp, Homo sapiens
ctcacccacatggca

SEQ ID NO: 291329 - DNA, 15 bp, Homo sapiens
actcacccacatggc

SEQ ID NO: 291330 - DNA, 15 bp, Homo sapiens
cactcacccacatgg

SEQ ID NO: 291331 - DNA, 15 bp, Homo sapiens
tcactcacccacatg

SEQ ID NO: 291332 - DNA, 15 bp, Homo sapiens
gtcactcacccacat

SEQ ID NO: 291333 - DNA, 15 bp, Homo sapiens
ggtcactcacccaca

SEQ ID NO: 291334 - DNA, 15 bp, Homo sapiens
aggtcactcacccac

SEQ ID NO: 291335 - DNA, 15 bp, Homo sapiens
aaggtcactcaccca

SEQ ID NO: 291336 - DNA, 15 bp, Homo sapiens
caaggtcactcaccc

SEQ ID NO: 291337 - DNA, 15 bp, Homo sapiens
ccaaggtcactcacc

SEQ ID NO: 291338 - DNA, 15 bp, Homo sapiens
cccaaggtcactcac

SEQ ID NO: 291339 - DNA, 15 bp, Homo sapiens
gcccaaggtcactca

SEQ ID NO: 291340 - DNA, 15 bp, Homo sapiens
tgcccaaggtcactc

SEQ ID NO: 291341 - DNA, 15 bp, Homo sapiens
atgcccaaggtcact

SEQ ID NO: 291342 - DNA, 15 bp, Homo sapiens
tatgcccaaggtcac

SEQ ID NO: 291343 - DNA, 15 bp, Homo sapiens
ttatgcccaaggtca

SEQ ID NO: 291344 - DNA, 15 bp, Homo sapiens
attatgcccaaggtc

SEQ ID NO: 291345 - DNA, 15 bp, Homo sapiens
cattatgcccaaggt

SEQ ID NO: 291346 - DNA, 15 bp, Homo sapiens
ccattatgcccaagg

SEQ ID NO: 291347 - DNA, 15 bp, Homo sapiens
tccattatgcccaag

SEQ ID NO: 291348 - DNA, 15 bp, Homo sapiens
gtccattatgcccaa

SEQ ID NO: 291349 - DNA, 15 bp, Homo sapiens
ggtccattatgccca

SEQ ID NO: 291350 - DNA, 15 bp, Homo sapiens
aggtccattatgccc

SEQ ID NO: 291351 - DNA, 15 bp, Homo sapiens
aaggtccattatgcc

SEQ ID NO: 291352 - DNA, 15 bp, Homo sapiens
aaaggtccattatgc

SEQ ID NO: 291353 - DNA, 15 bp, Homo sapiens
caaaggtccattatg

SEQ ID NO: 291354 - DNA, 15 bp, Homo sapiens
ccaaaggtccattat

SEQ ID NO: 291355 - DNA, 15 bp, Homo sapiens
accaaaggtccatta

SEQ ID NO: 291356 - DNA, 15 bp, Homo sapiens
aaccaaaggtccatt

SEQ ID NO: 291357 - DNA, 15 bp, Homo sapiens
taaccaaaggtccat

SEQ ID NO: 291358 - DNA, 15 bp, Homo sapiens
ctaaccaaaggtcca

SEQ ID NO: 291359 - DNA, 15 bp, Homo sapiens
tctaaccaaaggtcc

SEQ ID NO: 291360 - DNA, 15 bp, Homo sapiens
atctaaccaaaggtc

SEQ ID NO: 291361 - DNA, 15 bp, Homo sapiens
gatctaaccaaaggt

SEQ ID NO: 291362 - DNA, 15 bp, Homo sapiens
agatctaaccaaagg

SEQ ID NO: 291363 - DNA, 15 bp, Homo sapiens
gagatctaaccaaag

SEQ ID NO: 291364 - DNA, 15 bp, Homo sapiens
tgagatctaaccaaa

SEQ ID NO: 291365 - DNA, 15 bp, Homo sapiens
atgagatctaaccaa

SEQ ID NO: 291366 - DNA, 15 bp, Homo sapiens
aatgagatctaacca

SEQ ID NO: 291367 - DNA, 15 bp, Homo sapiens
aaatgagatctaacc

SEQ ID NO: 291368 - DNA, 15 bp, Homo sapiens
caaatgagatctaac

SEQ ID NO: 291369 - DNA, 15 bp, Homo sapiens
gcaaatgagatctaa

SEQ ID NO: 291370 - DNA, 15 bp, Homo sapiens
agcaaatgagatcta

SEQ ID NO: 291371 - DNA, 15 bp, Homo sapiens
cagcaaatgagatct

SEQ ID NO: 291372 - DNA, 15 bp, Homo sapiens
gcagcaaatgagatc

SEQ ID NO: 291373 - DNA, 15 bp, Homo sapiens
ggcagcaaatgagat

SEQ ID NO: 291374 - DNA, 15 bp, Homo sapiens
tggcagcaaatgaga

SEQ ID NO: 291375 - DNA, 15 bp, Homo sapiens
gtggcagcaaatgag

SEQ ID NO: 291376 - DNA, 15 bp, Homo sapiens
ggtggcagcaaatga

SEQ ID NO: 291377 - DNA, 15 bp, Homo sapiens
aggtggcagcaaatg

SEQ ID NO: 291378 - DNA, 15 bp, Homo sapiens
gaggtggcagcaaat

SEQ ID NO: 291379 - DNA, 15 bp, Homo sapiens
ggaggtggcagcaaa

SEQ ID NO: 291380 - DNA, 15 bp, Homo sapiens
cggaggtggcagcaa

SEQ ID NO: 291381 - DNA, 15 bp, Homo sapiens
ccggaggtggcagca

SEQ ID NO: 291382 - DNA, 15 bp, Homo sapiens
cccggaggtggcagc

SEQ ID NO: 291383 - DNA, 15 bp, Homo sapiens
acccggaggtggcag

SEQ ID NO: 291384 - DNA, 15 bp, Homo sapiens
cacccggaggtggca

SEQ ID NO: 291385 - DNA, 15 bp, Homo sapiens
tcacccggaggtggc

SEQ ID NO: 291386 - DNA, 15 bp, Homo sapiens
gtcacccggaggtgg

SEQ ID NO: 291387 - DNA, 15 bp, Homo sapiens
ggtcacccggaggtg

SEQ ID NO: 291388 - DNA, 15 bp, Homo sapiens
tggtcacccggaggt

SEQ ID NO: 291389 - DNA, 15 bp, Homo sapiens
ctggtcacccggagg

SEQ ID NO: 291390 - DNA, 15 bp, Homo sapiens
cctggtcacccggag

SEQ ID NO: 291391 - DNA, 15 bp, Homo sapiens
tcctggtcacccgga

SEQ ID NO: 291392 - DNA, 15 bp, Homo sapiens
gtcctggtcacccgg

SEQ ID NO: 291393 - DNA, 15 bp, Homo sapiens
agtcctggtcacccg

SEQ ID NO: 291394 - DNA, 15 bp, Homo sapiens
aagtcctggtcaccc

SEQ ID NO: 291395 - DNA, 15 bp, Homo sapiens
aaagtcctggtcacc

SEQ ID NO: 291396 - DNA, 15 bp, Homo sapiens
aaaagtcctggtcac

SEQ ID NO: 291397 - DNA, 15 bp, Homo sapiens
gaaaagtcctggtca

SEQ ID NO: 291398 - DNA, 15 bp, Homo sapiens
ggaaaagtcctggtc

SEQ ID NO: 291399 - DNA, 15 bp, Homo sapiens
aggaaaagtcctggt

SEQ ID NO: 291400 - DNA, 15 bp, Homo sapiens
caggaaaagtcctgg

SEQ ID NO: 291401 - DNA, 15 bp, Homo sapiens
acaggaaaagtcctg

SEQ ID NO: 291402 - DNA, 15 bp, Homo sapiens
cacaggaaaagtcct

SEQ ID NO: 291403 - DNA, 15 bp, Homo sapiens
gcacaggaaaagtcc

SEQ ID NO: 291404 - DNA, 15 bp, Homo sapiens
ggcacaggaaaagtc

SEQ ID NO: 291405 - DNA, 15 bp, Homo sapiens
aggcacaggaaaagt

SEQ ID NO: 291406 - DNA, 15 bp, Homo sapiens
aaggcacaggaaaag

SEQ ID NO: 291407 - DNA, 15 bp, Homo sapiens
caaggcacaggaaaa

SEQ ID NO: 291408 - DNA, 15 bp, Homo sapiens
acaaggcacaggaaa

SEQ ID NO: 291409 - DNA, 15 bp, Homo sapiens
aacaaggcacaggaa

SEQ ID NO: 291410 - DNA, 15 bp, Homo sapiens
aaacaaggcacagga

SEQ ID NO: 291411 - DNA, 15 bp, Homo sapiens
gaaacaaggcacagg

SEQ ID NO: 291412 - DNA, 15 bp, Homo sapiens
agaaacaaggcacag

SEQ ID NO: 291413 - DNA, 15 bp, Homo sapiens
aagaaacaaggcaca

SEQ ID NO: 291414 - DNA, 15 bp, Homo sapiens
aaagaaacaaggcac

SEQ ID NO: 291415 - DNA, 15 bp, Homo sapiens
caaagaaacaaggca

SEQ ID NO: 291416 - DNA, 15 bp, Homo sapiens
gcaaagaaacaaggc

SEQ ID NO: 291417 - DNA, 15 bp, Homo sapiens
tgcaaagaaacaagg

SEQ ID NO: 291418 - DNA, 15 bp, Homo sapiens
ctgcaaagaaacaag

SEQ ID NO: 291419 - DNA, 15 bp, Homo sapiens
tctgcaaagaaacaa

SEQ ID NO: 291420 - DNA, 15 bp, Homo sapiens
gtctgcaaagaaaca

SEQ ID NO: 291421 - DNA, 15 bp, Homo sapiens
ggtctgcaaagaaac

SEQ ID NO: 291422 - DNA, 15 bp, Homo sapiens
aggtctgcaaagaaa

SEQ ID NO: 291423 - DNA, 15 bp, Homo sapiens
caggtctgcaaagaa

SEQ ID NO: 291424 - DNA, 15 bp, Homo sapiens
tcaggtctgcaaaga

SEQ ID NO: 291425 - DNA, 15 bp, Homo sapiens
atcaggtctgcaaag

SEQ ID NO: 291426 - DNA, 15 bp, Homo sapiens
catcaggtctgcaaa

SEQ ID NO: 291427 - DNA, 15 bp, Homo sapiens
tcatcaggtctgcaa

SEQ ID NO: 291428 - DNA, 15 bp, Homo sapiens
ttcatcaggtctgca

SEQ ID NO: 291429 - DNA, 15 bp, Homo sapiens
attcatcaggtctgc

SEQ ID NO: 291430 - DNA, 15 bp, Homo sapiens
cattcatcaggtctg

SEQ ID NO: 291431 - DNA, 15 bp, Homo sapiens
ccattcatcaggtct

SEQ ID NO: 291432 - DNA, 15 bp, Homo sapiens
accattcatcaggtc

SEQ ID NO: 291433 - DNA, 15 bp, Homo sapiens
gaccattcatcaggt

SEQ ID NO: 291434 - DNA, 15 bp, Homo sapiens
ggaccattcatcagg

SEQ ID NO: 291435 - DNA, 15 bp, Homo sapiens
aggaccattcatcag

SEQ ID NO: 291436 - DNA, 15 bp, Homo sapiens
gaggaccattcatca

SEQ ID NO: 291437 - DNA, 15 bp, Homo sapiens
agaggaccattcatc

SEQ ID NO: 291438 - DNA, 15 bp, Homo sapiens
cagaggaccattcat

SEQ ID NO: 291439 - DNA, 15 bp, Homo sapiens
acagaggaccattca

SEQ ID NO: 291440 - DNA, 15 bp, Homo sapiens
cacagaggaccattc

SEQ ID NO: 291441 - DNA, 15 bp, Homo sapiens
acacagaggaccatt

SEQ ID NO: 291442 - DNA, 15 bp, Homo sapiens
cacacagaggaccat

SEQ ID NO: 291443 - DNA, 15 bp, Homo sapiens
gcacacagaggacca

SEQ ID NO: 291444 - DNA, 15 bp, Homo sapiens
ggcacacagaggacc

SEQ ID NO: 291445 - DNA, 15 bp, Homo sapiens
gggcacacagaggac

SEQ ID NO: 291446 - DNA, 15 bp, Homo sapiens
cgggcacacagagga

SEQ ID NO: 291447 - DNA, 15 bp, Homo sapiens
acgggcacacagagg

SEQ ID NO: 291448 - DNA, 15 bp, Homo sapiens
cacgggcacacagag

SEQ ID NO: 291449 - DNA, 15 bp, Homo sapiens
tcacgggcacacaga

SEQ ID NO: 291450 - DNA, 15 bp, Homo sapiens
gtcacgggcacacag

SEQ ID NO: 291451 - DNA, 15 bp, Homo sapiens
tgtcacgggcacaca

SEQ ID NO: 291452 - DNA, 15 bp, Homo sapiens
ttgtcacgggcacac

SEQ ID NO: 291453 - DNA, 15 bp, Homo sapiens
gttgtcacgggcaca

SEQ ID NO: 291454 - DNA, 15 bp, Homo sapiens
agttgtcacgggcac

SEQ ID NO: 291455 - DNA, 15 bp, Homo sapiens
aagttgtcacgggca

SEQ ID NO: 291456 - DNA, 15 bp, Homo sapiens
aaagttgtcacgggc

SEQ ID NO: 291457 - DNA, 15 bp, Homo sapiens
taaagttgtcacggg

SEQ ID NO: 291458 - DNA, 15 bp, Homo sapiens
ctaaagttgtcacgg

SEQ ID NO: 291459 - DNA, 15 bp, Homo sapiens
actaaagttgtcacg

SEQ ID NO: 291460 - DNA, 15 bp, Homo sapiens
tactaaagttgtcac

SEQ ID NO: 291461 - DNA, 15 bp, Homo sapiens
ttactaaagttgtca

SEQ ID NO: 291462 - DNA, 15 bp, Homo sapiens
cttactaaagttgtc

SEQ ID NO: 291463 - DNA, 15 bp, Homo sapiens
ccttactaaagttgt

SEQ ID NO: 291464 - DNA, 15 bp, Homo sapiens
tccttactaaagttg

SEQ ID NO: 291465 - DNA, 15 bp, Homo sapiens
ctccttactaaagtt

SEQ ID NO: 291466 - DNA, 15 bp, Homo sapiens
tctccttactaaagt

SEQ ID NO: 291467 - DNA, 15 bp, Homo sapiens
ttctccttactaaag

SEQ ID NO: 291468 - DNA, 15 bp, Homo sapiens
attctccttactaaa

SEQ ID NO: 291469 - DNA, 15 bp, Homo sapiens
tattctccttactaa

SEQ ID NO: 291470 - DNA, 15 bp, Homo sapiens
atattctccttacta

SEQ ID NO: 291471 - DNA, 15 bp, Homo sapiens
gatattctccttact

SEQ ID NO: 291472 - DNA, 15 bp, Homo sapiens
agatattctccttac

SEQ ID NO: 291473 - DNA, 15 bp, Homo sapiens
cagatattctcctta

SEQ ID NO: 291474 - DNA, 15 bp, Homo sapiens
acagatattctcctt

SEQ ID NO: 291475 - DNA, 15 bp, Homo sapiens
gacagatattctcct

SEQ ID NO: 291476 - DNA, 15 bp, Homo sapiens
agacagatattctcc

SEQ ID NO: 291477 - DNA, 15 bp, Homo sapiens
gagacagatattctc

SEQ ID NO: 291478 - DNA, 15 bp, Homo sapiens
ggagacagatattct

SEQ ID NO: 291479 - DNA, 15 bp, Homo sapiens
gggagacagatattc

SEQ ID NO: 291480 - DNA, 15 bp, Homo sapiens
agggagacagatatt

SEQ ID NO: 291481 - DNA, 15 bp, Homo sapiens
cagggagacagatat

SEQ ID NO: 291482 - DNA, 15 bp, Homo sapiens
gcagggagacagata

SEQ ID NO: 291483 - DNA, 15 bp, Homo sapiens
agcagggagacagat

SEQ ID NO: 291484 - DNA, 15 bp, Homo sapiens
gagcagggagacaga

SEQ ID NO: 291485 - DNA, 15 bp, Homo sapiens
ggagcagggagacag

SEQ ID NO: 291486 - DNA, 15 bp, Homo sapiens
tggagcagggagaca

SEQ ID NO: 291487 - DNA, 15 bp, Homo sapiens
ttggagcagggagac

SEQ ID NO: 291488 - DNA, 15 bp, Homo sapiens
attggagcagggaga

SEQ ID NO: 291489 - DNA, 15 bp, Homo sapiens
aattggagcagggag

SEQ ID NO: 291490 - DNA, 15 bp, Homo sapiens
aaattggagcaggga

SEQ ID NO: 291491 - DNA, 15 bp, Homo sapiens
taaattggagcaggg

SEQ ID NO: 291492 - DNA, 15 bp, Homo sapiens
ttaaattggagcagg

SEQ ID NO: 291493 - DNA, 15 bp, Homo sapiens
gttaaattggagcag

SEQ ID NO: 291494 - DNA, 15 bp, Homo sapiens
agttaaattggagca

SEQ ID NO: 291495 - DNA, 15 bp, Homo sapiens
aagttaaattggagc

SEQ ID NO: 291496 - DNA, 15 bp, Homo sapiens
gaagttaaattggag

SEQ ID NO: 291497 - DNA, 15 bp, Homo sapiens
ggaagttaaattgga

SEQ ID NO: 291498 - DNA, 15 bp, Homo sapiens
aggaagttaaattgg

SEQ ID NO: 291499 - DNA, 15 bp, Homo sapiens
aaggaagttaaattg

SEQ ID NO: 291500 - DNA, 15 bp, Homo sapiens
aaaggaagttaaatt

SEQ ID NO: 291501 - DNA, 15 bp, Homo sapiens
gaaaggaagttaaat

SEQ ID NO: 291502 - DNA, 15 bp, Homo sapiens
agaaaggaagttaaa

SEQ ID NO: 291503 - DNA, 15 bp, Homo sapiens
cagaaaggaagttaa

SEQ ID NO: 291504 - DNA, 15 bp, Homo sapiens
acagaaaggaagtta

SEQ ID NO: 291505 - DNA, 15 bp, Homo sapiens
tacagaaaggaagtt

SEQ ID NO: 291506 - DNA, 15 bp, Homo sapiens
ttacagaaaggaagt

SEQ ID NO: 291507 - DNA, 15 bp, Homo sapiens
tttacagaaaggaag

SEQ ID NO: 291508 - DNA, 15 bp, Homo sapiens
ttttacagaaaggaa

SEQ ID NO: 291509 - DNA, 15 bp, Homo sapiens
gttttacagaaagga

SEQ ID NO: 291510 - DNA, 15 bp, Homo sapiens
agttttacagaaagg

SEQ ID NO: 291511 - DNA, 15 bp, Homo sapiens
aagttttacagaaag

SEQ ID NO: 291512 - DNA, 15 bp, Homo sapiens
caagttttacagaaa

SEQ ID NO: 291513 - DNA, 15 bp, Homo sapiens
tcaagttttacagaa

SEQ ID NO: 291514 - DNA, 15 bp, Homo sapiens
atcaagttttacaga

SEQ ID NO: 291515 - DNA, 15 bp, Homo sapiens
catcaagttttacag

SEQ ID NO: 291516 - DNA, 15 bp, Homo sapiens
tcatcaagttttaca

SEQ ID NO: 291517 - DNA, 15 bp, Homo sapiens
ctcatcaagttttac

SEQ ID NO: 291518 - DNA, 15 bp, Homo sapiens
cctcatcaagtttta

SEQ ID NO: 291519 - DNA, 15 bp, Homo sapiens
acctcatcaagtttt

SEQ ID NO: 291520 - DNA, 15 bp, Homo sapiens
gacctcatcaagttt

SEQ ID NO: 291521 - DNA, 15 bp, Homo sapiens
tgacctcatcaagtt

SEQ ID NO: 291522 - DNA, 15 bp, Homo sapiens
ttgacctcatcaagt

SEQ ID NO: 291523 - DNA, 15 bp, Homo sapiens
tttgacctcatcaag

SEQ ID NO: 291524 - DNA, 15 bp, Homo sapiens
ctttgacctcatcaa

SEQ ID NO: 291525 - DNA, 15 bp, Homo sapiens
gctttgacctcatca

SEQ ID NO: 291526 - DNA, 15 bp, Homo sapiens
ggctttgacctcatc

SEQ ID NO: 291527 - DNA, 15 bp, Homo sapiens
tggctttgacctcat

SEQ ID NO: 291528 - DNA, 15 bp, Homo sapiens
ctggctttgacctca

SEQ ID NO: 291529 - DNA, 15 bp, Homo sapiens
tctggctttgacctc

SEQ ID NO: 291530 - DNA, 15 bp, Homo sapiens
ttctggctttgacct

SEQ ID NO: 291531 - DNA, 15 bp, Homo sapiens
tttctggctttgacc

SEQ ID NO: 291532 - DNA, 15 bp, Homo sapiens
ctttctggctttgac

SEQ ID NO: 291533 - DNA, 15 bp, Homo sapiens
gctttctggctttga

SEQ ID NO: 291534 - DNA, 15 bp, Homo sapiens
tgctttctggctttg

SEQ ID NO: 291535 - DNA, 15 bp, Homo sapiens
gtgctttctggcttt

SEQ ID NO: 291536 - DNA, 15 bp, Homo sapiens
agtgctttctggctt

SEQ ID NO: 291537 - DNA, 15 bp, Homo sapiens
cagtgctttctggct

SEQ ID NO: 291538 - DNA, 15 bp, Homo sapiens
tcagtgctttctggc

SEQ ID NO: 291539 - DNA, 15 bp, Homo sapiens
ttcagtgctttctgg

SEQ ID NO: 291540 - DNA, 15 bp, Homo sapiens
tttcagtgctttctg

SEQ ID NO: 291541 - DNA, 15 bp, Homo sapiens
gtttcagtgctttct

SEQ ID NO: 291542 - DNA, 15 bp, Homo sapiens
agtttcagtgctttc

SEQ ID NO: 291543 - DNA, 15 bp, Homo sapiens
aagtttcagtgcttt

SEQ ID NO: 291544 - DNA, 15 bp, Homo sapiens
gaagtttcagtgctt

SEQ ID NO: 291545 - DNA, 15 bp, Homo sapiens
tgaagtttcagtgct

SEQ ID NO: 291546 - DNA, 15 bp, Homo sapiens
ttgaagtttcagtgc

SEQ ID NO: 291547 - DNA, 15 bp, Homo sapiens
cttgaagtttcagtg

SEQ ID NO: 291548 - DNA, 15 bp, Homo sapiens
gcttgaagtttcagt

SEQ ID NO: 291549 - DNA, 15 bp, Homo sapiens
agcttgaagtttcag

SEQ ID NO: 291550 - DNA, 15 bp, Homo sapiens
cagcttgaagtttca

SEQ ID NO: 291551 - DNA, 15 bp, Homo sapiens
ccagcttgaagtttc

SEQ ID NO: 291552 - DNA, 15 bp, Homo sapiens
cccagcttgaagttt

SEQ ID NO: 291553 - DNA, 15 bp, Homo sapiens
ccccagcttgaagtt

SEQ ID NO: 291554 - DNA, 15 bp, Homo sapiens
tccccagcttgaagt

SEQ ID NO: 291555 - DNA, 15 bp, Homo sapiens
atccccagcttgaag

SEQ ID NO: 291556 - DNA, 15 bp, Homo sapiens
gatccccagcttgaa

SEQ ID NO: 291557 - DNA, 15 bp, Homo sapiens
tgatccccagcttga

SEQ ID NO: 291558 - DNA, 15 bp, Homo sapiens
ttgatccccagcttg

SEQ ID NO: 291559 - DNA, 15 bp, Homo sapiens
tttgatccccagctt

SEQ ID NO: 291560 - DNA, 15 bp, Homo sapiens
ttttgatccccagct

SEQ ID NO: 291561 - DNA, 15 bp, Homo sapiens
cttttgatccccagc

SEQ ID NO: 291562 - DNA, 15 bp, Homo sapiens
gcttttgatccccag

SEQ ID NO: 291563 - DNA, 15 bp, Homo sapiens
tgcttttgatcccca

SEQ ID NO: 291564 - DNA, 15 bp, Homo sapiens
atgcttttgatcccc

SEQ ID NO: 291565 - DNA, 15 bp, Homo sapiens
catgcttttgatccc

SEQ ID NO: 291566 - DNA, 15 bp, Homo sapiens
acatgcttttgatcc

SEQ ID NO: 291567 - DNA, 15 bp, Homo sapiens
gacatgcttttgatc

SEQ ID NO: 291568 - DNA, 15 bp, Homo sapiens
tgacatgcttttgat

SEQ ID NO: 291569 - DNA, 15 bp, Homo sapiens
atgacatgcttttga

SEQ ID NO: 291570 - DNA, 15 bp, Homo sapiens
gatgacatgcttttg

SEQ ID NO: 291571 - DNA, 15 bp, Homo sapiens
ggatgacatgctttt

SEQ ID NO: 291572 - DNA, 15 bp, Homo sapiens
tggatgacatgcttt

SEQ ID NO: 291573 - DNA, 15 bp, Homo sapiens
ctggatgacatgctt

SEQ ID NO: 291574 - DNA, 15 bp, Homo sapiens
gctggatgacatgct

SEQ ID NO: 291575 - DNA, 15 bp, Homo sapiens
ggctggatgacatgc

SEQ ID NO: 291576 - DNA, 15 bp, Homo sapiens
tggctggatgacatg

SEQ ID NO: 291577 - DNA, 15 bp, Homo sapiens
atggctggatgacat

SEQ ID NO: 291578 - DNA, 15 bp, Homo sapiens
catggctggatgaca

SEQ ID NO: 291579 - DNA, 15 bp, Homo sapiens
gcatggctggatgac

SEQ ID NO: 291580 - DNA, 15 bp, Homo sapiens
agcatggctggatga

SEQ ID NO: 291581 - DNA, 15 bp, Homo sapiens
cagcatggctggatg

SEQ ID NO: 291582 - DNA, 15 bp, Homo sapiens
gcagcatggctggat

SEQ ID NO: 291583 - DNA, 15 bp, Homo sapiens
ggcagcatggctgga

SEQ ID NO: 291584 - DNA, 15 bp, Homo sapiens
gggcagcatggctgg

SEQ ID NO: 291585 - DNA, 15 bp, Homo sapiens
ggggcagcatggctg

SEQ ID NO: 291586 - DNA, 15 bp, Homo sapiens
gggggcagcatggct

SEQ ID NO: 291587 - DNA, 15 bp, Homo sapiens
agggggcagcatggc

SEQ ID NO: 291588 - DNA, 15 bp, Homo sapiens
aagggggcagcatgg

SEQ ID NO: 291589 - DNA, 15 bp, Homo sapiens
caagggggcagcatg

SEQ ID NO: 291590 - DNA, 15 bp, Homo sapiens
gcaagggggcagcat

SEQ ID NO: 291591 - DNA, 15 bp, Homo sapiens
tgcaagggggcagca

SEQ ID NO: 291592 - DNA, 15 bp, Homo sapiens
ttgcaagggggcagc

SEQ ID NO: 291593 - DNA, 15 bp, Homo sapiens
gttgcaagggggcag

SEQ ID NO: 291594 - DNA, 15 bp, Homo sapiens
ggttgcaagggggca

SEQ ID NO: 291595 - DNA, 15 bp, Homo sapiens
aggttgcaagggggc

SEQ ID NO: 291596 - DNA, 15 bp, Homo sapiens
caggttgcaaggggg

SEQ ID NO: 291597 - DNA, 15 bp, Homo sapiens
ccaggttgcaagggg

SEQ ID NO: 291598 - DNA, 15 bp, Homo sapiens
gccaggttgcaaggg

SEQ ID NO: 291599 - DNA, 15 bp, Homo sapiens
tgccaggttgcaagg

SEQ ID NO: 291600 - DNA, 15 bp, Homo sapiens
ttgccaggttgcaag

SEQ ID NO: 291601 - DNA, 15 bp, Homo sapiens
tttgccaggttgcaa

SEQ ID NO: 291602 - DNA, 15 bp, Homo sapiens
atttgccaggttgca

SEQ ID NO: 291603 - DNA, 15 bp, Homo sapiens
catttgccaggttgc

SEQ ID NO: 291604 - DNA, 15 bp, Homo sapiens
tcatttgccaggttg

SEQ ID NO: 291605 - DNA, 15 bp, Homo sapiens
ctcatttgccaggtt

SEQ ID NO: 291606 - DNA, 15 bp, Homo sapiens
tctcatttgccaggt

SEQ ID NO: 291607 - DNA, 15 bp, Homo sapiens
gtctcatttgccagg

SEQ ID NO: 291608 - DNA, 15 bp, Homo sapiens
tgtctcatttgccag

SEQ ID NO: 291609 - DNA, 15 bp, Homo sapiens
ttgtctcatttgcca

SEQ ID NO: 291610 - DNA, 15 bp, Homo sapiens
gttgtctcatttgcc

SEQ ID NO: 291611 - DNA, 15 bp, Homo sapiens
ggttgtctcatttgc

SEQ ID NO: 291612 - DNA, 15 bp, Homo sapiens
aggttgtctcatttg

SEQ ID NO: 291613 - DNA, 15 bp, Homo sapiens
gaggttgtctcattt

SEQ ID NO: 291614 - DNA, 15 bp, Homo sapiens
ggaggttgtctcatt

SEQ ID NO: 291615 - DNA, 15 bp, Homo sapiens
tggaggttgtctcat

SEQ ID NO: 291616 - DNA, 15 bp, Homo sapiens
ctggaggttgtctca

SEQ ID NO: 291617 - DNA, 15 bp, Homo sapiens
gctggaggttgtctc

SEQ ID NO: 291618 - DNA, 15 bp, Homo sapiens
ggctggaggttgtct

SEQ ID NO: 291619 - DNA, 15 bp, Homo sapiens
tggctggaggttgtc

SEQ ID NO: 291620 - DNA, 15 bp, Homo sapiens
ctggctggaggttgt

SEQ ID NO: 291621 - DNA, 15 bp, Homo sapiens
cctggctggaggttg

SEQ ID NO: 291622 - DNA, 15 bp, Homo sapiens
ccctggctggaggtt

SEQ ID NO: 291623 - DNA, 15 bp, Homo sapiens
tccctggctggaggt

SEQ ID NO: 291624 - DNA, 15 bp, Homo sapiens
gtccctggctggagg

SEQ ID NO: 291625 - DNA, 15 bp, Homo sapiens
tgtccctggctggag

SEQ ID NO: 291626 - DNA, 15 bp, Homo sapiens
ctgtccctggctgga

SEQ ID NO: 291627 - DNA, 15 bp, Homo sapiens
actgtccctggctgg

SEQ ID NO: 291628 - DNA, 15 bp, Homo sapiens
aactgtccctggctg

SEQ ID NO: 291629 - DNA, 15 bp, Homo sapiens
aaactgtccctggct

SEQ ID NO: 291630 - DNA, 15 bp, Homo sapiens
taaactgtccctggc

SEQ ID NO: 291631 - DNA, 15 bp, Homo sapiens
ataaactgtccctgg

SEQ ID NO: 291632 - DNA, 15 bp, Homo sapiens
tataaactgtccctg

SEQ ID NO: 291633 - DNA, 15 bp, Homo sapiens
ttataaactgtccct

SEQ ID NO: 291634 - DNA, 15 bp, Homo sapiens
attataaactgtccc

SEQ ID NO: 291635 - DNA, 15 bp, Homo sapiens
aattataaactgtcc

SEQ ID NO: 291636 - DNA, 15 bp, Homo sapiens
caattataaactgtc

SEQ ID NO: 291637 - DNA, 15 bp, Homo sapiens
acaattataaactgt

SEQ ID NO: 291638 - DNA, 15 bp, Homo sapiens
cacaattataaactg

SEQ ID NO: 291639 - DNA, 15 bp, Homo sapiens
gcacaattataaact

SEQ ID NO: 291640 - DNA, 15 bp, Homo sapiens
tgcacaattataaac

SEQ ID NO: 291641 - DNA, 15 bp, Homo sapiens
ttgcacaattataaa

SEQ ID NO: 291642 - DNA, 15 bp, Homo sapiens
attgcacaattataa

SEQ ID NO: 291643 - DNA, 15 bp, Homo sapiens
gattgcacaattata

SEQ ID NO: 291644 - DNA, 15 bp, Homo sapiens
tgattgcacaattat

SEQ ID NO: 291645 - DNA, 15 bp, Homo sapiens
ttgattgcacaatta

SEQ ID NO: 291646 - DNA, 15 bp, Homo sapiens
tttgattgcacaatt

SEQ ID NO: 291647 - DNA, 15 bp, Homo sapiens
atttgattgcacaat

SEQ ID NO: 291648 - DNA, 15 bp, Homo sapiens
aatttgattgcacaa

SEQ ID NO: 291649 - DNA, 15 bp, Homo sapiens
taatttgattgcaca

SEQ ID NO: 291650 - DNA, 15 bp, Homo sapiens
ttaatttgattgcac

SEQ ID NO: 291651 - DNA, 15 bp, Homo sapiens
gttaatttgattgca

SEQ ID NO: 291652 - DNA, 15 bp, Homo sapiens
agttaatttgattgc

SEQ ID NO: 291653 - DNA, 15 bp, Homo sapiens
aagttaatttgattg

SEQ ID NO: 291654 - DNA, 15 bp, Homo sapiens
caagttaatttgatt

SEQ ID NO: 291655 - DNA, 15 bp, Homo sapiens
ccaagttaatttgat

SEQ ID NO: 291656 - DNA, 15 bp, Homo sapiens
tccaagttaatttga

SEQ ID NO: 291657 - DNA, 15 bp, Homo sapiens
atccaagttaatttg

SEQ ID NO: 291658 - DNA, 15 bp, Homo sapiens
aatccaagttaattt

SEQ ID NO: 291659 - DNA, 15 bp, Homo sapiens
aaatccaagttaatt

SEQ ID NO: 291660 - DNA, 15 bp, Homo sapiens
gaaatccaagttaat

SEQ ID NO: 291661 - DNA, 15 bp, Homo sapiens
tgaaatccaagttaa

SEQ ID NO: 291662 - DNA, 15 bp, Homo sapiens
ctgaaatccaagtta

SEQ ID NO: 291663 - DNA, 15 bp, Homo sapiens
gctgaaatccaagtt

SEQ ID NO: 291664 - DNA, 15 bp, Homo sapiens
ggctgaaatccaagt

SEQ ID NO: 291665 - DNA, 15 bp, Homo sapiens
aggctgaaatccaag

SEQ ID NO: 291666 - DNA, 15 bp, Homo sapiens
taggctgaaatccaa

SEQ ID NO: 291667 - DNA, 15 bp, Homo sapiens
ttaggctgaaatcca

SEQ ID NO: 291668 - DNA, 15 bp, Homo sapiens
attaggctgaaatcc

SEQ ID NO: 291669 - DNA, 15 bp, Homo sapiens
cattaggctgaaatc

SEQ ID NO: 291670 - DNA, 15 bp, Homo sapiens
tcattaggctgaaat

SEQ ID NO: 291671 - DNA, 15 bp, Homo sapiens
ttcattaggctgaaa

SEQ ID NO: 291672 - DNA, 15 bp, Homo sapiens
cttcattaggctgaa

SEQ ID NO: 291673 - DNA, 15 bp, Homo sapiens
acttcattaggctga

SEQ ID NO: 291674 - DNA, 15 bp, Homo sapiens
gacttcattaggctg

SEQ ID NO: 291675 - DNA, 15 bp, Homo sapiens
ggacttcattaggct

SEQ ID NO: 291676 - DNA, 15 bp, Homo sapiens
aggacttcattaggc

SEQ ID NO: 291677 - DNA, 15 bp, Homo sapiens
aaggacttcattagg

SEQ ID NO: 291678 - DNA, 15 bp, Homo sapiens
taaggacttcattag

SEQ ID NO: 291679 - DNA, 15 bp, Homo sapiens
ttaaggacttcatta

SEQ ID NO: 291680 - DNA, 15 bp, Homo sapiens
attaaggacttcatt

SEQ ID NO: 291681 - DNA, 15 bp, Homo sapiens
cattaaggacttcat

SEQ ID NO: 291682 - DNA, 15 bp, Homo sapiens
gcattaaggacttca

SEQ ID NO: 291683 - DNA, 15 bp, Homo sapiens
ggcattaaggacttc

SEQ ID NO: 291684 - DNA, 15 bp, Homo sapiens
gggcattaaggactt

SEQ ID NO: 291685 - DNA, 15 bp, Homo sapiens
agggcattaaggact

SEQ ID NO: 291686 - DNA, 15 bp, Homo sapiens
cagggcattaaggac

SEQ ID NO: 291687 - DNA, 15 bp, Homo sapiens
tcagggcattaagga

SEQ ID NO: 291688 - DNA, 15 bp, Homo sapiens
ttcagggcattaagg

SEQ ID NO: 291689 - DNA, 15 bp, Homo sapiens
attcagggcattaag

SEQ ID NO: 291690 - DNA, 15 bp, Homo sapiens
cattcagggcattaa

SEQ ID NO: 291691 - DNA, 15 bp, Homo sapiens
tcattcagggcatta

SEQ ID NO: 291692 - DNA, 15 bp, Homo sapiens
ctcattcagggcatt

SEQ ID NO: 291693 - DNA, 15 bp, Homo sapiens
cctcattcagggcat

SEQ ID NO: 291694 - DNA, 15 bp, Homo sapiens
gcctcattcagggca

SEQ ID NO: 291695 - DNA, 15 bp, Homo sapiens
ggcctcattcagggc

SEQ ID NO: 291696 - DNA, 15 bp, Homo sapiens
tggcctcattcaggg

SEQ ID NO: 291697 - DNA, 15 bp, Homo sapiens
ttggcctcattcagg

SEQ ID NO: 291698 - DNA, 15 bp, Homo sapiens
cttggcctcattcag

SEQ ID NO: 291699 - DNA, 15 bp, Homo sapiens
gcttggcctcattca

SEQ ID NO: 291700 - DNA, 15 bp, Homo sapiens
ggcttggcctcattc

SEQ ID NO: 291701 - DNA, 15 bp, Homo sapiens
gggcttggcctcatt

SEQ ID NO: 291702 - DNA, 15 bp, Homo sapiens
agggcttggcctcat

SEQ ID NO: 291703 - DNA, 15 bp, Homo sapiens
tagggcttggcctca

SEQ ID NO: 291704 - DNA, 15 bp, Homo sapiens
ttagggcttggcctc

SEQ ID NO: 291705 - DNA, 15 bp, Homo sapiens
attagggcttggcct

SEQ ID NO: 291706 - DNA, 15 bp, Homo sapiens
tattagggcttggcc

SEQ ID NO: 291707 - DNA, 15 bp, Homo sapiens
atattagggcttggc

SEQ ID NO: 291708 - DNA, 15 bp, Homo sapiens
aatattagggcttgg

SEQ ID NO: 291709 - DNA, 15 bp, Homo sapiens
aaatattagggcttg

SEQ ID NO: 291710 - DNA, 15 bp, Homo sapiens
taaatattagggctt

SEQ ID NO: 291711 - DNA, 15 bp, Homo sapiens
ctaaatattagggct

SEQ ID NO: 291712 - DNA, 15 bp, Homo sapiens
tctaaatattagggc

SEQ ID NO: 291713 - DNA, 15 bp, Homo sapiens
ctctaaatattaggg

SEQ ID NO: 291714 - DNA, 15 bp, Homo sapiens
tctctaaatattagg

SEQ ID NO: 291715 - DNA, 15 bp, Homo sapiens
ttctctaaatattag

SEQ ID NO: 291716 - DNA, 15 bp, Homo sapiens
cttctctaaatatta

SEQ ID NO: 291717 - DNA, 15 bp, Homo sapiens
gcttctctaaatatt

SEQ ID NO: 291718 - DNA, 15 bp, Homo sapiens
tgcttctctaaatat

SEQ ID NO: 291719 - DNA, 15 bp, Homo sapiens
ctgcttctctaaata

SEQ ID NO: 291720 - DNA, 15 bp, Homo sapiens
tctgcttctctaaat

SEQ ID NO: 291721 - DNA, 15 bp, Homo sapiens
gtctgcttctctaaa

SEQ ID NO: 291722 - DNA, 15 bp, Homo sapiens
agtctgcttctctaa

SEQ ID NO: 291723 - DNA, 15 bp, Homo sapiens
cagtctgcttctcta

SEQ ID NO: 291724 - DNA, 15 bp, Homo sapiens
ccagtctgcttctct

SEQ ID NO: 291725 - DNA, 15 bp, Homo sapiens
tccagtctgcttctc

SEQ ID NO: 291726 - DNA, 15 bp, Homo sapiens
gtccagtctgcttct

SEQ ID NO: 291727 - DNA, 15 bp, Homo sapiens
ggtccagtctgcttc

SEQ ID NO: 291728 - DNA, 15 bp, Homo sapiens
gggtccagtctgctt

SEQ ID NO: 291729 - DNA, 15 bp, Homo sapiens
ggggtccagtctgct

SEQ ID NO: 291730 - DNA, 15 bp, Homo sapiens
tggggtccagtctgc

SEQ ID NO: 291731 - DNA, 15 bp, Homo sapiens
ctggggtccagtctg

SEQ ID NO: 291732 - DNA, 15 bp, Homo sapiens
cctggggtccagtct

SEQ ID NO: 291733 - DNA, 15 bp, Homo sapiens
tcctggggtccagtc

SEQ ID NO: 291734 - DNA, 15 bp, Homo sapiens
ttcctggggtccagt

SEQ ID NO: 291735 - DNA, 15 bp, Homo sapiens
tttcctggggtccag

SEQ ID NO: 291736 - DNA, 15 bp, Homo sapiens
ctttcctggggtcca

SEQ ID NO: 291737 - DNA, 15 bp, Homo sapiens
tctttcctggggtcc

SEQ ID NO: 291738 - DNA, 15 bp, Homo sapiens
ttctttcctggggtc

SEQ ID NO: 291739 - DNA, 15 bp, Homo sapiens
tttctttcctggggt

SEQ ID NO: 291740 - DNA, 15 bp, Homo sapiens
ttttctttcctgggg

SEQ ID NO: 291741 - DNA, 15 bp, Homo sapiens
cttttctttcctggg

SEQ ID NO: 291742 - DNA, 15 bp, Homo sapiens
tcttttctttcctgg

SEQ ID NO: 291743 - DNA, 15 bp, Homo sapiens
ttcttttctttcctg

SEQ ID NO: 291744 - DNA, 15 bp, Homo sapiens
gttcttttctttcct

SEQ ID NO: 291745 - DNA, 15 bp, Homo sapiens
tgttcttttctttcc

SEQ ID NO: 291746 - DNA, 15 bp, Homo sapiens
ctgttcttttctttc

SEQ ID NO: 291747 - DNA, 15 bp, Homo sapiens
cctgttcttttcttt

SEQ ID NO: 291748 - DNA, 15 bp, Homo sapiens
gcctgttcttttctt

SEQ ID NO: 291749 - DNA, 15 bp, Homo sapiens
agcctgttcttttct

SEQ ID NO: 291750 - DNA, 15 bp, Homo sapiens
aagcctgttcttttc

SEQ ID NO: 291751 - DNA, 15 bp, Homo sapiens
gaagcctgttctttt

SEQ ID NO: 291752 - DNA, 15 bp, Homo sapiens
tgaagcctgttcttt

SEQ ID NO: 291753 - DNA, 15 bp, Homo sapiens
ctgaagcctgttctt

SEQ ID NO: 291754 - DNA, 15 bp, Homo sapiens
actgaagcctgttct

SEQ ID NO: 291755 - DNA, 15 bp, Homo sapiens
aactgaagcctgttc

SEQ ID NO: 291756 - DNA, 15 bp, Homo sapiens
taactgaagcctgtt

SEQ ID NO: 291757 - DNA, 15 bp, Homo sapiens
ttaactgaagcctgt

SEQ ID NO: 291758 - DNA, 15 bp, Homo sapiens
attaactgaagcctg

SEQ ID NO: 291759 - DNA, 15 bp, Homo sapiens
cattaactgaagcct

SEQ ID NO: 291760 - DNA, 15 bp, Homo sapiens
gcattaactgaagcc

SEQ ID NO: 291761 - DNA, 15 bp, Homo sapiens
ggcattaactgaagc

SEQ ID NO: 291762 - DNA, 15 bp, Homo sapiens
aggcattaactgaag

SEQ ID NO: 291763 - DNA, 15 bp, Homo sapiens
caggcattaactgaa

SEQ ID NO: 291764 - DNA, 15 bp, Homo sapiens
gcaggcattaactga

SEQ ID NO: 291765 - DNA, 15 bp, Homo sapiens
agcaggcattaactg

SEQ ID NO: 291766 - DNA, 15 bp, Homo sapiens
tagcaggcattaact

SEQ ID NO: 291767 - DNA, 15 bp, Homo sapiens
ctagcaggcattaac

SEQ ID NO: 291768 - DNA, 15 bp, Homo sapiens
actagcaggcattaa

SEQ ID NO: 291769 - DNA, 15 bp, Homo sapiens
tactagcaggcatta

SEQ ID NO: 291770 - DNA, 15 bp, Homo sapiens
atactagcaggcatt

SEQ ID NO: 291771 - DNA, 15 bp, Homo sapiens
aatactagcaggcat

SEQ ID NO: 291772 - DNA, 15 bp, Homo sapiens
taatactagcaggca

SEQ ID NO: 291773 - DNA, 15 bp, Homo sapiens
ttaatactagcaggc

SEQ ID NO: 291774 - DNA, 15 bp, Homo sapiens
attaatactagcagg

SEQ ID NO: 291775 - DNA, 15 bp, Homo sapiens
aattaatactagcag

SEQ ID NO: 291776 - DNA, 15 bp, Homo sapiens
taattaatactagca

SEQ ID NO: 291777 - DNA, 15 bp, Homo sapiens
ataattaatactagc

SEQ ID NO: 291778 - DNA, 15 bp, Homo sapiens
cataattaatactag

SEQ ID NO: 291779 - DNA, 15 bp, Homo sapiens
gcataattaatacta

SEQ ID NO: 291780 - DNA, 15 bp, Homo sapiens
agcataattaatact

SEQ ID NO: 291781 - DNA, 15 bp, Homo sapiens
aagcataattaatac

SEQ ID NO: 291782 - DNA, 15 bp, Homo sapiens
gaagcataattaata

SEQ ID NO: 291783 - DNA, 15 bp, Homo sapiens
agaagcataattaat

SEQ ID NO: 291784 - DNA, 15 bp, Homo sapiens
aagaagcataattaa

SEQ ID NO: 291785 - DNA, 15 bp, Homo sapiens
gaagaagcataatta

SEQ ID NO: 291786 - DNA, 15 bp, Homo sapiens
ggaagaagcataatt

SEQ ID NO: 291787 - DNA, 15 bp, Homo sapiens
tggaagaagcataat

SEQ ID NO: 291788 - DNA, 15 bp, Homo sapiens
ttggaagaagcataa

SEQ ID NO: 291789 - DNA, 15 bp, Homo sapiens
tttggaagaagcata

SEQ ID NO: 291790 - DNA, 15 bp, Homo sapiens
ttttggaagaagcat

SEQ ID NO: 291791 - DNA, 15 bp, Homo sapiens
attttggaagaagca

SEQ ID NO: 291792 - DNA, 15 bp, Homo sapiens
aattttggaagaagc

SEQ ID NO: 291793 - DNA, 15 bp, Homo sapiens
gaattttggaagaag

SEQ ID NO: 291794 - DNA, 15 bp, Homo sapiens
tgaattttggaagaa

SEQ ID NO: 291795 - DNA, 15 bp, Homo sapiens
atgaattttggaaga

SEQ ID NO: 291796 - DNA, 15 bp, Homo sapiens
gatgaattttggaag

SEQ ID NO: 291797 - DNA, 15 bp, Homo sapiens
agatgaattttggaa

SEQ ID NO: 291798 - DNA, 15 bp, Homo sapiens
aagatgaattttgga

SEQ ID NO: 291799 - DNA, 15 bp, Homo sapiens
gaagatgaattttgg

SEQ ID NO: 291800 - DNA, 15 bp, Homo sapiens
agaagatgaattttg

SEQ ID NO: 291801 - DNA, 15 bp, Homo sapiens
gagaagatgaatttt

SEQ ID NO: 291802 - DNA, 15 bp, Homo sapiens
cgagaagatgaattt

SEQ ID NO: 291803 - DNA, 15 bp, Homo sapiens
acgagaagatgaatt

SEQ ID NO: 291804 - DNA, 15 bp, Homo sapiens
tacgagaagatgaat

SEQ ID NO: 291805 - DNA, 15 bp, Homo sapiens
ctacgagaagatgaa

SEQ ID NO: 291806 - DNA, 15 bp, Homo sapiens
cctacgagaagatga

SEQ ID NO: 291807 - DNA, 15 bp, Homo sapiens
tcctacgagaagatg

SEQ ID NO: 291808 - DNA, 15 bp, Homo sapiens
ctcctacgagaagat

SEQ ID NO: 291809 - DNA, 15 bp, Homo sapiens
cctcctacgagaaga

SEQ ID NO: 291810 - DNA, 15 bp, Homo sapiens
gcctcctacgagaag

SEQ ID NO: 291811 - DNA, 15 bp, Homo sapiens
tgcctcctacgagaa

SEQ ID NO: 291812 - DNA, 15 bp, Homo sapiens
ttgcctcctacgaga

SEQ ID NO: 291813 - DNA, 15 bp, Homo sapiens
gttgcctcctacgag

SEQ ID NO: 291814 - DNA, 15 bp, Homo sapiens
ggttgcctcctacga

SEQ ID NO: 291815 - DNA, 15 bp, Homo sapiens
aggttgcctcctacg

SEQ ID NO: 291816 - DNA, 15 bp, Homo sapiens
caggttgcctcctac

SEQ ID NO: 291817 - DNA, 15 bp, Homo sapiens
tcaggttgcctccta

SEQ ID NO: 291818 - DNA, 15 bp, Homo sapiens
atcaggttgcctcct

SEQ ID NO: 291819 - DNA, 15 bp, Homo sapiens
tatcaggttgcctcc

SEQ ID NO: 291820 - DNA, 15 bp, Homo sapiens
ctatcaggttgcctc

SEQ ID NO: 291821 - DNA, 15 bp, Homo sapiens
gctatcaggttgcct

SEQ ID NO: 291822 - DNA, 15 bp, Homo sapiens
tgctatcaggttgcc

SEQ ID NO: 291823 - DNA, 15 bp, Homo sapiens
gtgctatcaggttgc

SEQ ID NO: 291824 - DNA, 15 bp, Homo sapiens
ggtgctatcaggttg

SEQ ID NO: 291825 - DNA, 15 bp, Homo sapiens
gggtgctatcaggtt

SEQ ID NO: 291826 - DNA, 15 bp, Homo sapiens
tgggtgctatcaggt

SEQ ID NO: 291827 - DNA, 15 bp, Homo sapiens
ctgggtgctatcagg

SEQ ID NO: 291828 - DNA, 15 bp, Homo sapiens
actgggtgctatcag

SEQ ID NO: 291829 - DNA, 15 bp, Homo sapiens
aactgggtgctatca

SEQ ID NO: 291830 - DNA, 15 bp, Homo sapiens
gaactgggtgctatc

SEQ ID NO: 291831 - DNA, 15 bp, Homo sapiens
agaactgggtgctat

SEQ ID NO: 291832 - DNA, 15 bp, Homo sapiens
cagaactgggtgcta

SEQ ID NO: 291833 - DNA, 15 bp, Homo sapiens
gcagaactgggtgct

SEQ ID NO: 291834 - DNA, 15 bp, Homo sapiens
agcagaactgggtgc

SEQ ID NO: 291835 - DNA, 15 bp, Homo sapiens
tagcagaactgggtg

SEQ ID NO: 291836 - DNA, 15 bp, Homo sapiens
ttagcagaactgggt

SEQ ID NO: 291837 - DNA, 15 bp, Homo sapiens
cttagcagaactggg

SEQ ID NO: 291838 - DNA, 15 bp, Homo sapiens
ccttagcagaactgg

SEQ ID NO: 291839 - DNA, 15 bp, Homo sapiens
cccttagcagaactg

SEQ ID NO: 291840 - DNA, 15 bp, Homo sapiens
ccccttagcagaact

SEQ ID NO: 291841 - DNA, 15 bp, Homo sapiens
accccttagcagaac

SEQ ID NO: 291842 - DNA, 15 bp, Homo sapiens
aaccccttagcagaa

SEQ ID NO: 291843 - DNA, 15 bp, Homo sapiens
aaaccccttagcaga

SEQ ID NO: 291844 - DNA, 15 bp, Homo sapiens
aaaaccccttagcag

SEQ ID NO: 291845 - DNA, 15 bp, Homo sapiens
gaaaaccccttagca

SEQ ID NO: 291846 - DNA, 15 bp, Homo sapiens
ggaaaaccccttagc

SEQ ID NO: 291847 - DNA, 15 bp, Homo sapiens
aggaaaaccccttag

SEQ ID NO: 291848 - DNA, 15 bp, Homo sapiens
caggaaaacccctta

SEQ ID NO: 291849 - DNA, 15 bp, Homo sapiens
gcaggaaaacccctt

SEQ ID NO: 291850 - DNA, 15 bp, Homo sapiens
agcaggaaaacccct

SEQ ID NO: 291851 - DNA, 15 bp, Homo sapiens
cagcaggaaaacccc

SEQ ID NO: 291852 - DNA, 15 bp, Homo sapiens
acagcaggaaaaccc

SEQ ID NO: 291853 - DNA, 15 bp, Homo sapiens
cacagcaggaaaacc

SEQ ID NO: 291854 - DNA, 15 bp, Homo sapiens
ccacagcaggaaaac

SEQ ID NO: 291855 - DNA, 15 bp, Homo sapiens
gccacagcaggaaaa

SEQ ID NO: 291856 - DNA, 15 bp, Homo sapiens
agccacagcaggaaa

SEQ ID NO: 291857 - DNA, 15 bp, Homo sapiens
gagccacagcaggaa

SEQ ID NO: 291858 - DNA, 15 bp, Homo sapiens
tgagccacagcagga

SEQ ID NO: 291859 - DNA, 15 bp, Homo sapiens
atgagccacagcagg

SEQ ID NO: 291860 - DNA, 15 bp, Homo sapiens
tatgagccacagcag

SEQ ID NO: 291861 - DNA, 15 bp, Homo sapiens
ttatgagccacagca

SEQ ID NO: 291862 - DNA, 15 bp, Homo sapiens
cttatgagccacagc

SEQ ID NO: 291863 - DNA, 15 bp, Homo sapiens
ccttatgagccacag

SEQ ID NO: 291864 - DNA, 15 bp, Homo sapiens
tccttatgagccaca

SEQ ID NO: 291865 - DNA, 15 bp, Homo sapiens
ctccttatgagccac

SEQ ID NO: 291866 - DNA, 15 bp, Homo sapiens
tctccttatgagcca

SEQ ID NO: 291867 - DNA, 15 bp, Homo sapiens
ttctccttatgagcc

SEQ ID NO: 291868 - DNA, 15 bp, Homo sapiens
gttctccttatgagc

SEQ ID NO: 291869 - DNA, 15 bp, Homo sapiens
tgttctccttatgag

SEQ ID NO: 291870 - DNA, 15 bp, Homo sapiens
ctgttctccttatga

SEQ ID NO: 291871 - DNA, 15 bp, Homo sapiens
actgttctccttatg

SEQ ID NO: 291872 - DNA, 15 bp, Homo sapiens
cactgttctccttat

SEQ ID NO: 291873 - DNA, 15 bp, Homo sapiens
ccactgttctcctta

SEQ ID NO: 291874 - DNA, 15 bp, Homo sapiens
tccactgttctcctt

SEQ ID NO: 291875 - DNA, 15 bp, Homo sapiens
ttccactgttctcct

SEQ ID NO: 291876 - DNA, 15 bp, Homo sapiens
tttccactgttctcc

SEQ ID NO: 291877 - DNA, 15 bp, Homo sapiens
ctttccactgttctc

SEQ ID NO: 291878 - DNA, 15 bp, Homo sapiens
tctttccactgttct

SEQ ID NO: 291879 - DNA, 15 bp, Homo sapiens
ttctttccactgttc

SEQ ID NO: 291880 - DNA, 15 bp, Homo sapiens
gttctttccactgtt

SEQ ID NO: 291881 - DNA, 15 bp, Homo sapiens
tgttctttccactgt

SEQ ID NO: 291882 - DNA, 15 bp, Homo sapiens
atgttctttccactg

SEQ ID NO: 291883 - DNA, 15 bp, Homo sapiens
aatgttctttccact

SEQ ID NO: 291884 - DNA, 15 bp, Homo sapiens
aaatgttctttccac

SEQ ID NO: 291885 - DNA, 15 bp, Homo sapiens
aaaatgttctttcca

SEQ ID NO: 291886 - DNA, 15 bp, Homo sapiens
taaaatgttctttcc

SEQ ID NO: 291887 - DNA, 15 bp, Homo sapiens
ataaaatgttctttc

SEQ ID NO: 291888 - DNA, 15 bp, Homo sapiens
aataaaatgttcttt

SEQ ID NO: 291889 - DNA, 15 bp, Homo sapiens
caataaaatgttctt

SEQ ID NO: 291890 - DNA, 15 bp, Homo sapiens
ccaataaaatgttct

SEQ ID NO: 291891 - DNA, 15 bp, Homo sapiens
tccaataaaatgttc

SEQ ID NO: 291892 - DNA, 15 bp, Homo sapiens
ttccaataaaatgtt

SEQ ID NO: 291893 - DNA, 15 bp, Homo sapiens
tttccaataaaatgt

SEQ ID NO: 291894 - DNA, 15 bp, Homo sapiens
atttccaataaaatg

SEQ ID NO: 291895 - DNA, 15 bp, Homo sapiens
gatttccaataaaat

SEQ ID NO: 291896 - DNA, 15 bp, Homo sapiens
agatttccaataaaa

SEQ ID NO: 291897 - DNA, 15 bp, Homo sapiens
gagatttccaataaa

SEQ ID NO: 291898 - DNA, 15 bp, Homo sapiens
agagatttccaataa

SEQ ID NO: 291899 - DNA, 15 bp, Homo sapiens
cagagatttccaata

SEQ ID NO: 291900 - DNA, 15 bp, Homo sapiens
gcagagatttccaat

SEQ ID NO: 291901 - DNA, 15 bp, Homo sapiens
agcagagatttccaa

SEQ ID NO: 291902 - DNA, 15 bp, Homo sapiens
cagcagagatttcca

SEQ ID NO: 291903 - DNA, 15 bp, Homo sapiens
tcagcagagatttcc

SEQ ID NO: 291904 - DNA, 15 bp, Homo sapiens
ttcagcagagatttc

SEQ ID NO: 291905 - DNA, 15 bp, Homo sapiens
gttcagcagagattt

SEQ ID NO: 291906 - DNA, 15 bp, Homo sapiens
agttcagcagagatt

SEQ ID NO: 291907 - DNA, 15 bp, Homo sapiens
gagttcagcagagat

SEQ ID NO: 291908 - DNA, 15 bp, Homo sapiens
agagttcagcagaga

SEQ ID NO: 291909 - DNA, 15 bp, Homo sapiens
cagagttcagcagag

SEQ ID NO: 291910 - DNA, 15 bp, Homo sapiens
gcagagttcagcaga

SEQ ID NO: 291911 - DNA, 15 bp, Homo sapiens
cgcagagttcagcag

SEQ ID NO: 291912 - DNA, 15 bp, Homo sapiens
acgcagagttcagca

SEQ ID NO: 291913 - DNA, 15 bp, Homo sapiens
aacgcagagttcagc

SEQ ID NO: 291914 - DNA, 15 bp, Homo sapiens
gaacgcagagttcag

SEQ ID NO: 291915 - DNA, 15 bp, Homo sapiens
agaacgcagagttca

SEQ ID NO: 291916 - DNA, 15 bp, Homo sapiens
cagaacgcagagttc

SEQ ID NO: 291917 - DNA, 15 bp, Homo sapiens
ccagaacgcagagtt

SEQ ID NO: 291918 - DNA, 15 bp, Homo sapiens
cccagaacgcagagt

SEQ ID NO: 291919 - DNA, 15 bp, Homo sapiens
gcccagaacgcagag

SEQ ID NO: 291920 - DNA, 15 bp, Homo sapiens
ggcccagaacgcaga

SEQ ID NO: 291921 - DNA, 15 bp, Homo sapiens
tggcccagaacgcag

SEQ ID NO: 291922 - DNA, 15 bp, Homo sapiens
gtggcccagaacgca

SEQ ID NO: 291923 - DNA, 15 bp, Homo sapiens
tgtggcccagaacgc

SEQ ID NO: 291924 - DNA, 15 bp, Homo sapiens
atgtggcccagaacg

SEQ ID NO: 291925 - DNA, 15 bp, Homo sapiens
aatgtggcccagaac

SEQ ID NO: 291926 - DNA, 15 bp, Homo sapiens
aaatgtggcccagaa

SEQ ID NO: 291927 - DNA, 15 bp, Homo sapiens
gaaatgtggcccaga

SEQ ID NO: 291928 - DNA, 15 bp, Homo sapiens
agaaatgtggcccag

SEQ ID NO: 291929 - DNA, 15 bp, Homo sapiens
aagaaatgtggccca

SEQ ID NO: 291930 - DNA, 15 bp, Homo sapiens
taagaaatgtggccc

SEQ ID NO: 291931 - DNA, 15 bp, Homo sapiens
ttaagaaatgtggcc

SEQ ID NO: 291932 - DNA, 15 bp, Homo sapiens
gttaagaaatgtggc

SEQ ID NO: 291933 - DNA, 15 bp, Homo sapiens
agttaagaaatgtgg

SEQ ID NO: 291934 - DNA, 15 bp, Homo sapiens
aagttaagaaatgtg

SEQ ID NO: 291935 - DNA, 15 bp, Homo sapiens
gaagttaagaaatgt

SEQ ID NO: 291936 - DNA, 15 bp, Homo sapiens
tgaagttaagaaatg

SEQ ID NO: 291937 - DNA, 15 bp, Homo sapiens
gtgaagttaagaaat

SEQ ID NO: 291938 - DNA, 15 bp, Homo sapiens
tgtgaagttaagaaa

SEQ ID NO: 291939 - DNA, 15 bp, Homo sapiens
ctgtgaagttaagaa

SEQ ID NO: 291940 - DNA, 15 bp, Homo sapiens
cctgtgaagttaaga

SEQ ID NO: 291941 - DNA, 15 bp, Homo sapiens
tcctgtgaagttaag

SEQ ID NO: 291942 - DNA, 15 bp, Homo sapiens
atcctgtgaagttaa

SEQ ID NO: 291943 - DNA, 15 bp, Homo sapiens
gatcctgtgaagtta

SEQ ID NO: 291944 - DNA, 15 bp, Homo sapiens
agatcctgtgaagtt

SEQ ID NO: 291945 - DNA, 15 bp, Homo sapiens
aagatcctgtgaagt

SEQ ID NO: 291946 - DNA, 15 bp, Homo sapiens
taagatcctgtgaag

SEQ ID NO: 291947 - DNA, 15 bp, Homo sapiens
ctaagatcctgtgaa

SEQ ID NO: 291948 - DNA, 15 bp, Homo sapiens
gctaagatcctgtga

SEQ ID NO: 291949 - DNA, 15 bp, Homo sapiens
agctaagatcctgtg

SEQ ID NO: 291950 - DNA, 15 bp, Homo sapiens
aagctaagatcctgt

SEQ ID NO: 291951 - DNA, 15 bp, Homo sapiens
aaagctaagatcctg

SEQ ID NO: 291952 - DNA, 15 bp, Homo sapiens
gaaagctaagatcct

SEQ ID NO: 291953 - DNA, 15 bp, Homo sapiens
agaaagctaagatcc

SEQ ID NO: 291954 - DNA, 15 bp, Homo sapiens
gagaaagctaagatc

SEQ ID NO: 291955 - DNA, 15 bp, Homo sapiens
tgagaaagctaagat

SEQ ID NO: 291956 - DNA, 15 bp, Homo sapiens
ctgagaaagctaaga

SEQ ID NO: 291957 - DNA, 15 bp, Homo sapiens
actgagaaagctaag

SEQ ID NO: 291958 - DNA, 15 bp, Homo sapiens
aactgagaaagctaa

SEQ ID NO: 291959 - DNA, 15 bp, Homo sapiens
caactgagaaagcta

SEQ ID NO: 291960 - DNA, 15 bp, Homo sapiens
tcaactgagaaagct

SEQ ID NO: 291961 - DNA, 15 bp, Homo sapiens
ttcaactgagaaagc

SEQ ID NO: 291962 - DNA, 15 bp, Homo sapiens
gttcaactgagaaag

SEQ ID NO: 291963 - DNA, 15 bp, Homo sapiens
tgttcaactgagaaa

SEQ ID NO: 291964 - DNA, 15 bp, Homo sapiens
ctgttcaactgagaa

SEQ ID NO: 291965 - DNA, 15 bp, Homo sapiens
cctgttcaactgaga

SEQ ID NO: 291966 - DNA, 15 bp, Homo sapiens
tcctgttcaactgag

SEQ ID NO: 291967 - DNA, 15 bp, Homo sapiens
ttcctgttcaactga

SEQ ID NO: 291968 - DNA, 15 bp, Homo sapiens
cttcctgttcaactg

SEQ ID NO: 291969 - DNA, 15 bp, Homo sapiens
tcttcctgttcaact

SEQ ID NO: 291970 - DNA, 15 bp, Homo sapiens
ttcttcctgttcaac

SEQ ID NO: 291971 - DNA, 15 bp, Homo sapiens
tttcttcctgttcaa

SEQ ID NO: 291972 - DNA, 15 bp, Homo sapiens
ttttcttcctgttca

SEQ ID NO: 291973 - DNA, 15 bp, Homo sapiens
attttcttcctgttc

SEQ ID NO: 291974 - DNA, 15 bp, Homo sapiens
aattttcttcctgtt

SEQ ID NO: 291975 - DNA, 15 bp, Homo sapiens
gaattttcttcctgt

SEQ ID NO: 291976 - DNA, 15 bp, Homo sapiens
ggaattttcttcctg

SEQ ID NO: 291977 - DNA, 15 bp, Homo sapiens
aggaattttcttcct

SEQ ID NO: 291978 - DNA, 15 bp, Homo sapiens
gaggaattttcttcc

SEQ ID NO: 291979 - DNA, 15 bp, Homo sapiens
ggaggaattttcttc

SEQ ID NO: 291980 - DNA, 15 bp, Homo sapiens
aggaggaattttctt

SEQ ID NO: 291981 - DNA, 15 bp, Homo sapiens
gaggaggaattttct

SEQ ID NO: 291982 - DNA, 15 bp, Homo sapiens
agaggaggaattttc

SEQ ID NO: 291983 - DNA, 15 bp, Homo sapiens
gagaggaggaatttt

SEQ ID NO: 291984 - DNA, 15 bp, Homo sapiens
agagaggaggaattt

SEQ ID NO: 291985 - DNA, 15 bp, Homo sapiens
aagagaggaggaatt

SEQ ID NO: 291986 - DNA, 15 bp, Homo sapiens
taagagaggaggaat

SEQ ID NO: 291987 - DNA, 15 bp, Homo sapiens
ctaagagaggaggaa

SEQ ID NO: 291988 - DNA, 15 bp, Homo sapiens
tctaagagaggagga

SEQ ID NO: 291989 - DNA, 15 bp, Homo sapiens
ttctaagagaggagg

SEQ ID NO: 291990 - DNA, 15 bp, Homo sapiens
cttctaagagaggag

SEQ ID NO: 291991 - DNA, 15 bp, Homo sapiens
acttctaagagagga

SEQ ID NO: 291992 - DNA, 15 bp, Homo sapiens
cacttctaagagagg

SEQ ID NO: 291993 - DNA, 15 bp, Homo sapiens
acacttctaagagag

SEQ ID NO: 291994 - DNA, 15 bp, Homo sapiens
aacacttctaagaga

SEQ ID NO: 291995 - DNA, 15 bp, Homo sapiens
aaacacttctaagag

SEQ ID NO: 291996 - DNA, 15 bp, Homo sapiens
aaaacacttctaaga

SEQ ID NO: 291997 - DNA, 15 bp, Homo sapiens
taaaacacttctaag

SEQ ID NO: 291998 - DNA, 15 bp, Homo sapiens
ataaaacacttctaa

SEQ ID NO: 291999 - DNA, 15 bp, Homo sapiens
aataaaacacttcta

SEQ ID NO: 292000 - DNA, 15 bp, Homo sapiens
caataaaacacttct

SEQ ID NO: 292001 - DNA, 15 bp, Homo sapiens
acaataaaacacttc

SEQ ID NO: 292002 - DNA, 15 bp, Homo sapiens
tacaataaaacactt

SEQ ID NO: 292003 - DNA, 15 bp, Homo sapiens
ctacaataaaacact

SEQ ID NO: 292004 - DNA, 15 bp, Homo sapiens
actacaataaaacac

SEQ ID NO: 292005 - DNA, 15 bp, Homo sapiens
aactacaataaaaca

SEQ ID NO: 292006 - DNA, 15 bp, Homo sapiens
taactacaataaaac

SEQ ID NO: 292007 - DNA, 15 bp, Homo sapiens
ttaactacaataaaa

SEQ ID NO: 292008 - DNA, 15 bp, Homo sapiens
tttaactacaataaa

SEQ ID NO: 292009 - DNA, 15 bp, Homo sapiens
ttttaactacaataa

SEQ ID NO: 292010 - DNA, 15 bp, Homo sapiens
tttttaactacaata

SEQ ID NO: 292011 - DNA, 15 bp, Homo sapiens
atttttaactacaat

SEQ ID NO: 292012 - DNA, 15 bp, Homo sapiens
gatttttaactacaa

SEQ ID NO: 292013 - DNA, 15 bp, Homo sapiens
tgatttttaactaca

SEQ ID NO: 292014 - DNA, 15 bp, Homo sapiens
ttgatttttaactac

SEQ ID NO: 292015 - DNA, 15 bp, Homo sapiens
attgatttttaacta

SEQ ID NO: 292016 - DNA, 15 bp, Homo sapiens
tattgatttttaact

SEQ ID NO: 292017 - DNA, 15 bp, Homo sapiens
gtattgatttttaac

SEQ ID NO: 292018 - DNA, 15 bp, Homo sapiens
agtattgatttttaa

SEQ ID NO: 292019 - DNA, 15 bp, Homo sapiens
gagtattgattttta

SEQ ID NO: 292020 - DNA, 15 bp, Homo sapiens
agagtattgattttt

SEQ ID NO: 292021 - DNA, 15 bp, Homo sapiens
cagagtattgatttt

SEQ ID NO: 292022 - DNA, 15 bp, Homo sapiens
tcagagtattgattt

SEQ ID NO: 292023 - DNA, 15 bp, Homo sapiens
ttcagagtattgatt

SEQ ID NO: 292024 - DNA, 15 bp, Homo sapiens
cttcagagtattgat

SEQ ID NO: 292025 - DNA, 15 bp, Homo sapiens
ccttcagagtattga

SEQ ID NO: 292026 - DNA, 15 bp, Homo sapiens
gccttcagagtattg

SEQ ID NO: 292027 - DNA, 15 bp, Homo sapiens
tgccttcagagtatt

SEQ ID NO: 292028 - DNA, 15 bp, Homo sapiens
ctgccttcagagtat

SEQ ID NO: 292029 - DNA, 15 bp, Homo sapiens
cctgccttcagagta

SEQ ID NO: 292030 - DNA, 15 bp, Homo sapiens
acctgccttcagagt

SEQ ID NO: 292031 - DNA, 15 bp, Homo sapiens
tacctgccttcagag

SEQ ID NO: 292032 - DNA, 15 bp, Homo sapiens
ctacctgccttcaga

SEQ ID NO: 292033 - DNA, 15 bp, Homo sapiens
cctacctgccttcag

SEQ ID NO: 292034 - DNA, 15 bp, Homo sapiens
gcctacctgccttca

SEQ ID NO: 292035 - DNA, 15 bp, Homo sapiens
agcctacctgccttc

SEQ ID NO: 292036 - DNA, 15 bp, Homo sapiens
aagcctacctgcctt

SEQ ID NO: 292037 - DNA, 15 bp, Homo sapiens
caagcctacctgcct

SEQ ID NO: 292038 - DNA, 15 bp, Homo sapiens
ccaagcctacctgcc

SEQ ID NO: 292039 - DNA, 15 bp, Homo sapiens
accaagcctacctgc

SEQ ID NO: 292040 - DNA, 15 bp, Homo sapiens
aaccaagcctacctg

SEQ ID NO: 292041 - DNA, 15 bp, Homo sapiens
caaccaagcctacct

SEQ ID NO: 292042 - DNA, 15 bp, Homo sapiens
gcaaccaagcctacc

SEQ ID NO: 292043 - DNA, 15 bp, Homo sapiens
tgcaaccaagcctac

SEQ ID NO: 292044 - DNA, 15 bp, Homo sapiens
ttgcaaccaagccta

SEQ ID NO: 292045 - DNA, 15 bp, Homo sapiens
tttgcaaccaagcct

SEQ ID NO: 292046 - DNA, 15 bp, Homo sapiens
atttgcaaccaagcc

SEQ ID NO: 292047 - DNA, 15 bp, Homo sapiens
gatttgcaaccaagc

SEQ ID NO: 292048 - DNA, 15 bp, Homo sapiens
ggatttgcaaccaag

SEQ ID NO: 292049 - DNA, 15 bp, Homo sapiens
gggatttgcaaccaa

SEQ ID NO: 292050 - DNA, 15 bp, Homo sapiens
tgggatttgcaacca

SEQ ID NO: 292051 - DNA, 15 bp, Homo sapiens
ttgggatttgcaacc

SEQ ID NO: 292052 - DNA, 15 bp, Homo sapiens
gttgggatttgcaac

SEQ ID NO: 292053 - DNA, 15 bp, Homo sapiens
agttgggatttgcaa

SEQ ID NO: 292054 - DNA, 15 bp, Homo sapiens
gagttgggatttgca

SEQ ID NO: 292055 - DNA, 15 bp, Homo sapiens
agagttgggatttgc

SEQ ID NO: 292056 - DNA, 15 bp, Homo sapiens
cagagttgggatttg

SEQ ID NO: 292057 - DNA, 15 bp, Homo sapiens
acagagttgggattt

SEQ ID NO: 292058 - DNA, 15 bp, Homo sapiens
gacagagttgggatt

SEQ ID NO: 292059 - DNA, 15 bp, Homo sapiens
tgacagagttgggat

SEQ ID NO: 292060 - DNA, 15 bp, Homo sapiens
atgacagagttggga

SEQ ID NO: 292061 - DNA, 15 bp, Homo sapiens
aatgacagagttggg

SEQ ID NO: 292062 - DNA, 15 bp, Homo sapiens
aaatgacagagttgg

SEQ ID NO: 292063 - DNA, 15 bp, Homo sapiens
caaatgacagagttg

SEQ ID NO: 292064 - DNA, 15 bp, Homo sapiens
acaaatgacagagtt

SEQ ID NO: 292065 - DNA, 15 bp, Homo sapiens
aacaaatgacagagt

SEQ ID NO: 292066 - DNA, 15 bp, Homo sapiens
taacaaatgacagag

SEQ ID NO: 292067 - DNA, 15 bp, Homo sapiens
ctaacaaatgacaga

SEQ ID NO: 292068 - DNA, 15 bp, Homo sapiens
gctaacaaatgacag

SEQ ID NO: 292069 - DNA, 15 bp, Homo sapiens
agctaacaaatgaca

SEQ ID NO: 292070 - DNA, 15 bp, Homo sapiens
tagctaacaaatgac

SEQ ID NO: 292071 - DNA, 15 bp, Homo sapiens
atagctaacaaatga

SEQ ID NO: 292072 - DNA, 15 bp, Homo sapiens
catagctaacaaatg

SEQ ID NO: 292073 - DNA, 15 bp, Homo sapiens
acatagctaacaaat

SEQ ID NO: 292074 - DNA, 15 bp, Homo sapiens
cacatagctaacaaa

SEQ ID NO: 292075 - DNA, 15 bp, Homo sapiens
tcacatagctaacaa

SEQ ID NO: 292076 - DNA, 15 bp, Homo sapiens
ttcacatagctaaca

SEQ ID NO: 292077 - DNA, 15 bp, Homo sapiens
gttcacatagctaac

SEQ ID NO: 292078 - DNA, 15 bp, Homo sapiens
agttcacatagctaa

SEQ ID NO: 292079 - DNA, 15 bp, Homo sapiens
aagttcacatagcta

SEQ ID NO: 292080 - DNA, 15 bp, Homo sapiens
caagttcacatagct

SEQ ID NO: 292081 - DNA, 15 bp, Homo sapiens
tcaagttcacatagc

SEQ ID NO: 292082 - DNA, 15 bp, Homo sapiens
ctcaagttcacatag

SEQ ID NO: 292083 - DNA, 15 bp, Homo sapiens
actcaagttcacata

SEQ ID NO: 292084 - DNA, 15 bp, Homo sapiens
cactcaagttcacat

SEQ ID NO: 292085 - DNA, 15 bp, Homo sapiens
tcactcaagttcaca

SEQ ID NO: 292086 - DNA, 15 bp, Homo sapiens
ctcactcaagttcac

SEQ ID NO: 292087 - DNA, 15 bp, Homo sapiens
tctcactcaagttca

SEQ ID NO: 292088 - DNA, 15 bp, Homo sapiens
ttctcactcaagttc

SEQ ID NO: 292089 - DNA, 15 bp, Homo sapiens
tttctcactcaagtt

SEQ ID NO: 292090 - DNA, 15 bp, Homo sapiens
atttctcactcaagt

SEQ ID NO: 292091 - DNA, 15 bp, Homo sapiens
aatttctcactcaag

SEQ ID NO: 292092 - DNA, 15 bp, Homo sapiens
taatttctcactcaa

SEQ ID NO: 292093 - DNA, 15 bp, Homo sapiens
ttaatttctcactca

SEQ ID NO: 292094 - DNA, 15 bp, Homo sapiens
gttaatttctcactc

SEQ ID NO: 292095 - DNA, 15 bp, Homo sapiens
ggttaatttctcact

SEQ ID NO: 292096 - DNA, 15 bp, Homo sapiens
aggttaatttctcac

SEQ ID NO: 292097 - DNA, 15 bp, Homo sapiens
gaggttaatttctca

SEQ ID NO: 292098 - DNA, 15 bp, Homo sapiens
agaggttaatttctc

SEQ ID NO: 292099 - DNA, 15 bp, Homo sapiens
gagaggttaatttct

SEQ ID NO: 292100 - DNA, 15 bp, Homo sapiens
agagaggttaatttc

SEQ ID NO: 292101 - DNA, 15 bp, Homo sapiens
cagagaggttaattt

SEQ ID NO: 292102 - DNA, 15 bp, Homo sapiens
tcagagaggttaatt

SEQ ID NO: 292103 - DNA, 15 bp, Homo sapiens
ctcagagaggttaat

SEQ ID NO: 292104 - DNA, 15 bp, Homo sapiens
cctcagagaggttaa

SEQ ID NO: 292105 - DNA, 15 bp, Homo sapiens
gcctcagagaggtta

SEQ ID NO: 292106 - DNA, 15 bp, Homo sapiens
agcctcagagaggtt

SEQ ID NO: 292107 - DNA, 15 bp, Homo sapiens
aagcctcagagaggt

SEQ ID NO: 292108 - DNA, 15 bp, Homo sapiens
taagcctcagagagg

SEQ ID NO: 292109 - DNA, 15 bp, Homo sapiens
ctaagcctcagagag

SEQ ID NO: 292110 - DNA, 15 bp, Homo sapiens
actaagcctcagaga

SEQ ID NO: 292111 - DNA, 15 bp, Homo sapiens
aactaagcctcagag

SEQ ID NO: 292112 - DNA, 15 bp, Homo sapiens
gaactaagcctcaga

SEQ ID NO: 292113 - DNA, 15 bp, Homo sapiens
ggaactaagcctcag

SEQ ID NO: 292114 - DNA, 15 bp, Homo sapiens
gggaactaagcctca

SEQ ID NO: 292115 - DNA, 15 bp, Homo sapiens
agggaactaagcctc

SEQ ID NO: 292116 - DNA, 15 bp, Homo sapiens
aagggaactaagcct

SEQ ID NO: 292117 - DNA, 15 bp, Homo sapiens
taagggaactaagcc

SEQ ID NO: 292118 - DNA, 15 bp, Homo sapiens
ttaagggaactaagc

SEQ ID NO: 292119 - DNA, 15 bp, Homo sapiens
gttaagggaactaag

SEQ ID NO: 292120 - DNA, 15 bp, Homo sapiens
agttaagggaactaa

SEQ ID NO: 292121 - DNA, 15 bp, Homo sapiens
cagttaagggaacta

SEQ ID NO: 292122 - DNA, 15 bp, Homo sapiens
acagttaagggaact

SEQ ID NO: 292123 - DNA, 15 bp, Homo sapiens
tacagttaagggaac

SEQ ID NO: 292124 - DNA, 15 bp, Homo sapiens
ttacagttaagggaa

SEQ ID NO: 292125 - DNA, 15 bp, Homo sapiens
cttacagttaaggga

SEQ ID NO: 292126 - DNA, 15 bp, Homo sapiens
acttacagttaaggg

SEQ ID NO: 292127 - DNA, 15 bp, Homo sapiens
tacttacagttaagg

SEQ ID NO: 292128 - DNA, 15 bp, Homo sapiens
atacttacagttaag

SEQ ID NO: 292129 - DNA, 15 bp, Homo sapiens
catacttacagttaa

SEQ ID NO: 292130 - DNA, 15 bp, Homo sapiens
ccatacttacagtta

SEQ ID NO: 292131 - DNA, 15 bp, Homo sapiens
accatacttacagtt

SEQ ID NO: 292132 - DNA, 15 bp, Homo sapiens
aaccatacttacagt

SEQ ID NO: 292133 - DNA, 15 bp, Homo sapiens
taaccatacttacag

SEQ ID NO: 292134 - DNA, 15 bp, Homo sapiens
ttaaccatacttaca

SEQ ID NO: 292135 - DNA, 15 bp, Homo sapiens
attaaccatacttac

SEQ ID NO: 292136 - DNA, 15 bp, Homo sapiens
cattaaccatactta

SEQ ID NO: 292137 - DNA, 15 bp, Homo sapiens
tcattaaccatactt

SEQ ID NO: 292138 - DNA, 15 bp, Homo sapiens
atcattaaccatact

SEQ ID NO: 292139 - DNA, 15 bp, Homo sapiens
tatcattaaccatac

SEQ ID NO: 292140 - DNA, 15 bp, Homo sapiens
atatcattaaccata

SEQ ID NO: 292141 - DNA, 15 bp, Homo sapiens
aatatcattaaccat

SEQ ID NO: 292142 - DNA, 15 bp, Homo sapiens
gaatatcattaacca

SEQ ID NO: 292143 - DNA, 15 bp, Homo sapiens
agaatatcattaacc

SEQ ID NO: 292144 - DNA, 15 bp, Homo sapiens
aagaatatcattaac

SEQ ID NO: 292145 - DNA, 15 bp, Homo sapiens
caagaatatcattaa

SEQ ID NO: 292146 - DNA, 15 bp, Homo sapiens
ccaagaatatcatta

SEQ ID NO: 292147 - DNA, 15 bp, Homo sapiens
accaagaatatcatt

SEQ ID NO: 292148 - DNA, 15 bp, Homo sapiens
aaccaagaatatcat

SEQ ID NO: 292149 - DNA, 15 bp, Homo sapiens
caaccaagaatatca

SEQ ID NO: 292150 - DNA, 15 bp, Homo sapiens
acaaccaagaatatc

SEQ ID NO: 292151 - DNA, 15 bp, Homo sapiens
aacaaccaagaatat

SEQ ID NO: 292152 - DNA, 15 bp, Homo sapiens
taacaaccaagaata

SEQ ID NO: 292153 - DNA, 15 bp, Homo sapiens
ctaacaaccaagaat

SEQ ID NO: 292154 - DNA, 15 bp, Homo sapiens
actaacaaccaagaa

SEQ ID NO: 292155 - DNA, 15 bp, Homo sapiens
tactaacaaccaaga

SEQ ID NO: 292156 - DNA, 15 bp, Homo sapiens
atactaacaaccaag

SEQ ID NO: 292157 - DNA, 15 bp, Homo sapiens
catactaacaaccaa

SEQ ID NO: 292158 - DNA, 15 bp, Homo sapiens
ccatactaacaacca

SEQ ID NO: 292159 - DNA, 15 bp, Homo sapiens
tccatactaacaacc

SEQ ID NO: 292160 - DNA, 15 bp, Homo sapiens
ctccatactaacaac

SEQ ID NO: 292161 - DNA, 15 bp, Homo sapiens
tctccatactaacaa

SEQ ID NO: 292162 - DNA, 15 bp, Homo sapiens
ttctccatactaaca

SEQ ID NO: 292163 - DNA, 15 bp, Homo sapiens
attctccatactaac

SEQ ID NO: 292164 - DNA, 15 bp, Homo sapiens
tattctccatactaa

SEQ ID NO: 292165 - DNA, 15 bp, Homo sapiens
ctattctccatacta

SEQ ID NO: 292166 - DNA, 15 bp, Homo sapiens
actattctccatact

SEQ ID NO: 292167 - DNA, 15 bp, Homo sapiens
cactattctccatac

SEQ ID NO: 292168 - DNA, 15 bp, Homo sapiens
tcactattctccata

SEQ ID NO: 292169 - DNA, 15 bp, Homo sapiens
ttcactattctccat

SEQ ID NO: 292170 - DNA, 15 bp, Homo sapiens
attcactattctcca

SEQ ID NO: 292171 - DNA, 15 bp, Homo sapiens
cattcactattctcc

SEQ ID NO: 292172 - DNA, 15 bp, Homo sapiens
tcattcactattctc

SEQ ID NO: 292173 - DNA, 15 bp, Homo sapiens
ctcattcactattct

SEQ ID NO: 292174 - DNA, 15 bp, Homo sapiens
tctcattcactattc

SEQ ID NO: 292175 - DNA, 15 bp, Homo sapiens
atctcattcactatt

SEQ ID NO: 292176 - DNA, 15 bp, Homo sapiens
tatctcattcactat

SEQ ID NO: 292177 - DNA, 15 bp, Homo sapiens
gtatctcattcacta

SEQ ID NO: 292178 - DNA, 15 bp, Homo sapiens
agtatctcattcact

SEQ ID NO: 292179 - DNA, 15 bp, Homo sapiens
cagtatctcattcac

SEQ ID NO: 292180 - DNA, 15 bp, Homo sapiens
acagtatctcattca

SEQ ID NO: 292181 - DNA, 15 bp, Homo sapiens
cacagtatctcattc

SEQ ID NO: 292182 - DNA, 15 bp, Homo sapiens
gcacagtatctcatt

SEQ ID NO: 292183 - DNA, 15 bp, Homo sapiens
tgcacagtatctcat

SEQ ID NO: 292184 - DNA, 15 bp, Homo sapiens
atgcacagtatctca

SEQ ID NO: 292185 - DNA, 15 bp, Homo sapiens
gatgcacagtatctc

SEQ ID NO: 292186 - DNA, 15 bp, Homo sapiens
tgatgcacagtatct

SEQ ID NO: 292187 - DNA, 15 bp, Homo sapiens
ttgatgcacagtatc

SEQ ID NO: 292188 - DNA, 15 bp, Homo sapiens
cttgatgcacagtat

SEQ ID NO: 292189 - DNA, 15 bp, Homo sapiens
gcttgatgcacagta

SEQ ID NO: 292190 - DNA, 15 bp, Homo sapiens
tgcttgatgcacagt

SEQ ID NO: 292191 - DNA, 15 bp, Homo sapiens
gtgcttgatgcacag

SEQ ID NO: 292192 - DNA, 15 bp, Homo sapiens
agtgcttgatgcaca

SEQ ID NO: 292193 - DNA, 15 bp, Homo sapiens
aagtgcttgatgcac

SEQ ID NO: 292194 - DNA, 15 bp, Homo sapiens
taagtgcttgatgca

SEQ ID NO: 292195 - DNA, 15 bp, Homo sapiens
ttaagtgcttgatgc

SEQ ID NO: 292196 - DNA, 15 bp, Homo sapiens
attaagtgcttgatg

SEQ ID NO: 292197 - DNA, 15 bp, Homo sapiens
tattaagtgcttgat

SEQ ID NO: 292198 - DNA, 15 bp, Homo sapiens
gtattaagtgcttga

SEQ ID NO: 292199 - DNA, 15 bp, Homo sapiens
tgtattaagtgcttg

SEQ ID NO: 292200 - DNA, 15 bp, Homo sapiens
ctgtattaagtgctt

SEQ ID NO: 292201 - DNA, 15 bp, Homo sapiens
gctgtattaagtgct

SEQ ID NO: 292202 - DNA, 15 bp, Homo sapiens
tgctgtattaagtgc

SEQ ID NO: 292203 - DNA, 15 bp, Homo sapiens
gtgctgtattaagtg

SEQ ID NO: 292204 - DNA, 15 bp, Homo sapiens
tgtgctgtattaagt

SEQ ID NO: 292205 - DNA, 15 bp, Homo sapiens
atgtgctgtattaag

SEQ ID NO: 292206 - DNA, 15 bp, Homo sapiens
tatgtgctgtattaa

SEQ ID NO: 292207 - DNA, 15 bp, Homo sapiens
ctatgtgctgtatta

SEQ ID NO: 292208 - DNA, 15 bp, Homo sapiens
cctatgtgctgtatt

SEQ ID NO: 292209 - DNA, 15 bp, Homo sapiens
tcctatgtgctgtat

SEQ ID NO: 292210 - DNA, 15 bp, Homo sapiens
gtcctatgtgctgta

SEQ ID NO: 292211 - DNA, 15 bp, Homo sapiens
tgtcctatgtgctgt

SEQ ID NO: 292212 - DNA, 15 bp, Homo sapiens
atgtcctatgtgctg

SEQ ID NO: 292213 - DNA, 15 bp, Homo sapiens
catgtcctatgtgct

SEQ ID NO: 292214 - DNA, 15 bp, Homo sapiens
gcatgtcctatgtgc

SEQ ID NO: 292215 - DNA, 15 bp, Homo sapiens
agcatgtcctatgtg

SEQ ID NO: 292216 - DNA, 15 bp, Homo sapiens
cagcatgtcctatgt

SEQ ID NO: 292217 - DNA, 15 bp, Homo sapiens
ccagcatgtcctatg

SEQ ID NO: 292218 - DNA, 15 bp, Homo sapiens
gccagcatgtcctat

SEQ ID NO: 292219 - DNA, 15 bp, Homo sapiens
tgccagcatgtccta

SEQ ID NO: 292220 - DNA, 15 bp, Homo sapiens
atgccagcatgtcct

SEQ ID NO: 292221 - DNA, 15 bp, Homo sapiens
aatgccagcatgtcc

SEQ ID NO: 292222 - DNA, 15 bp, Homo sapiens
aaatgccagcatgtc

SEQ ID NO: 292223 - DNA, 15 bp, Homo sapiens
taaatgccagcatgt

SEQ ID NO: 292224 - DNA, 15 bp, Homo sapiens
ataaatgccagcatg

SEQ ID NO: 292225 - DNA, 15 bp, Homo sapiens
aataaatgccagcat

SEQ ID NO: 292226 - DNA, 15 bp, Homo sapiens
taataaatgccagca

SEQ ID NO: 292227 - DNA, 15 bp, Homo sapiens
ttaataaatgccagc

SEQ ID NO: 292228 - DNA, 15 bp, Homo sapiens
tttaataaatgccag

SEQ ID NO: 292229 - DNA, 15 bp, Homo sapiens
atttaataaatgcca

SEQ ID NO: 292230 - DNA, 15 bp, Homo sapiens
gatttaataaatgcc

SEQ ID NO: 292231 - DNA, 15 bp, Homo sapiens
agatttaataaatgc

SEQ ID NO: 292232 - DNA, 15 bp, Homo sapiens
tagatttaataaatg

SEQ ID NO: 292233 - DNA, 15 bp, Homo sapiens
ttagatttaataaat

SEQ ID NO: 292234 - DNA, 15 bp, Homo sapiens
attagatttaataaa

SEQ ID NO: 292235 - DNA, 15 bp, Homo sapiens
cattagatttaataa

SEQ ID NO: 292236 - DNA, 15 bp, Homo sapiens
tcattagatttaata

SEQ ID NO: 292237 - DNA, 15 bp, Homo sapiens
atcattagatttaat

SEQ ID NO: 292238 - DNA, 15 bp, Homo sapiens
catcattagatttaa

SEQ ID NO: 292239 - DNA, 15 bp, Homo sapiens
tcatcattagattta

SEQ ID NO: 292240 - DNA, 15 bp, Homo sapiens
atcatcattagattt

SEQ ID NO: 292241 - DNA, 15 bp, Homo sapiens
catcatcattagatt

SEQ ID NO: 292242 - DNA, 15 bp, Homo sapiens
tcatcatcattagat

SEQ ID NO: 292243 - DNA, 15 bp, Homo sapiens
atcatcatcattaga

SEQ ID NO: 292244 - DNA, 15 bp, Homo sapiens
catcatcatcattag

SEQ ID NO: 292245 - DNA, 15 bp, Homo sapiens
ccatcatcatcatta

SEQ ID NO: 292246 - DNA, 15 bp, Homo sapiens
gccatcatcatcatt

SEQ ID NO: 292247 - DNA, 15 bp, Homo sapiens
tgccatcatcatcat

SEQ ID NO: 292248 - DNA, 15 bp, Homo sapiens
atgccatcatcatca

SEQ ID NO: 292249 - DNA, 15 bp, Homo sapiens
tatgccatcatcatc

SEQ ID NO: 292250 - DNA, 15 bp, Homo sapiens
ttatgccatcatcat

SEQ ID NO: 292251 - DNA, 15 bp, Homo sapiens
tttatgccatcatca

SEQ ID NO: 292252 - DNA, 15 bp, Homo sapiens
atttatgccatcatc

SEQ ID NO: 292253 - DNA, 15 bp, Homo sapiens
catttatgccatcat

SEQ ID NO: 292254 - DNA, 15 bp, Homo sapiens
acatttatgccatca

SEQ ID NO: 292255 - DNA, 15 bp, Homo sapiens
tacatttatgccatc

SEQ ID NO: 292256 - DNA, 15 bp, Homo sapiens
ttacatttatgccat

SEQ ID NO: 292257 - DNA, 15 bp, Homo sapiens
tttacatttatgcca

SEQ ID NO: 292258 - DNA, 15 bp, Homo sapiens
ttttacatttatgcc

SEQ ID NO: 292259 - DNA, 15 bp, Homo sapiens
attttacatttatgc

SEQ ID NO: 292260 - DNA, 15 bp, Homo sapiens
tattttacatttatg

SEQ ID NO: 292261 - DNA, 15 bp, Homo sapiens
ttattttacatttat

SEQ ID NO: 292262 - DNA, 15 bp, Homo sapiens
attattttacattta

SEQ ID NO: 292263 - DNA, 15 bp, Homo sapiens
aattattttacattt

SEQ ID NO: 292264 - DNA, 15 bp, Homo sapiens
aaattattttacatt

SEQ ID NO: 292265 - DNA, 15 bp, Homo sapiens
aaaattattttacat

SEQ ID NO: 292266 - DNA, 15 bp, Homo sapiens
gaaaattattttaca

SEQ ID NO: 292267 - DNA, 15 bp, Homo sapiens
tgaaaattattttac

SEQ ID NO: 292268 - DNA, 15 bp, Homo sapiens
ctgaaaattatttta

SEQ ID NO: 292269 - DNA, 15 bp, Homo sapiens
actgaaaattatttt

SEQ ID NO: 292270 - DNA, 15 bp, Homo sapiens
tactgaaaattattt

SEQ ID NO: 292271 - DNA, 15 bp, Homo sapiens
atactgaaaattatt

SEQ ID NO: 292272 - DNA, 15 bp, Homo sapiens
catactgaaaattat

SEQ ID NO: 292273 - DNA, 15 bp, Homo sapiens
ccatactgaaaatta

SEQ ID NO: 292274 - DNA, 15 bp, Homo sapiens
tccatactgaaaatt

SEQ ID NO: 292275 - DNA, 15 bp, Homo sapiens
atccatactgaaaat

SEQ ID NO: 292276 - DNA, 15 bp, Homo sapiens
aatccatactgaaaa

SEQ ID NO: 292277 - DNA, 15 bp, Homo sapiens
taatccatactgaaa

SEQ ID NO: 292278 - DNA, 15 bp, Homo sapiens
gtaatccatactgaa

SEQ ID NO: 292279 - DNA, 15 bp, Homo sapiens
tgtaatccatactga

SEQ ID NO: 292280 - DNA, 15 bp, Homo sapiens
atgtaatccatactg

SEQ ID NO: 292281 - DNA, 15 bp, Homo sapiens
catgtaatccatact

SEQ ID NO: 292282 - DNA, 15 bp, Homo sapiens
acatgtaatccatac

SEQ ID NO: 292283 - DNA, 15 bp, Homo sapiens
gacatgtaatccata

SEQ ID NO: 292284 - DNA, 15 bp, Homo sapiens
tgacatgtaatccat

SEQ ID NO: 292285 - DNA, 15 bp, Homo sapiens
gtgacatgtaatcca

SEQ ID NO: 292286 - DNA, 15 bp, Homo sapiens
agtgacatgtaatcc

SEQ ID NO: 292287 - DNA, 15 bp, Homo sapiens
tagtgacatgtaatc

SEQ ID NO: 292288 - DNA, 15 bp, Homo sapiens
ttagtgacatgtaat

SEQ ID NO: 292289 - DNA, 15 bp, Homo sapiens
attagtgacatgtaa

SEQ ID NO: 292290 - DNA, 15 bp, Homo sapiens
aattagtgacatgta

SEQ ID NO: 292291 - DNA, 15 bp, Homo sapiens
aaattagtgacatgt

SEQ ID NO: 292292 - DNA, 15 bp, Homo sapiens
caaattagtgacatg

SEQ ID NO: 292293 - DNA, 15 bp, Homo sapiens
ccaaattagtgacat

SEQ ID NO: 292294 - DNA, 15 bp, Homo sapiens
accaaattagtgaca

SEQ ID NO: 292295 - DNA, 15 bp, Homo sapiens
taccaaattagtgac

SEQ ID NO: 292296 - DNA, 15 bp, Homo sapiens
ataccaaattagtga

SEQ ID NO: 292297 - DNA, 15 bp, Homo sapiens
gataccaaattagtg

SEQ ID NO: 292298 - DNA, 15 bp, Homo sapiens
tgataccaaattagt

SEQ ID NO: 292299 - DNA, 15 bp, Homo sapiens
ctgataccaaattag

SEQ ID NO: 292300 - DNA, 15 bp, Homo sapiens
actgataccaaatta

SEQ ID NO: 292301 - DNA, 15 bp, Homo sapiens
tactgataccaaatt

SEQ ID NO: 292302 - DNA, 15 bp, Homo sapiens
ctactgataccaaat

SEQ ID NO: 292303 - DNA, 15 bp, Homo sapiens
actactgataccaaa

SEQ ID NO: 292304 - DNA, 15 bp, Homo sapiens
gactactgataccaa

SEQ ID NO: 292305 - DNA, 15 bp, Homo sapiens
agactactgatacca

SEQ ID NO: 292306 - DNA, 15 bp, Homo sapiens
aagactactgatacc

SEQ ID NO: 292307 - DNA, 15 bp, Homo sapiens
aaagactactgatac

SEQ ID NO: 292308 - DNA, 15 bp, Homo sapiens
taaagactactgata

SEQ ID NO: 292309 - DNA, 15 bp, Homo sapiens
ataaagactactgat

SEQ ID NO: 292310 - DNA, 15 bp, Homo sapiens
aataaagactactga

SEQ ID NO: 292311 - DNA, 15 bp, Homo sapiens
aaataaagactactg

SEQ ID NO: 292312 - DNA, 15 bp, Homo sapiens
aaaataaagactact

SEQ ID NO: 292313 - DNA, 15 bp, Homo sapiens
gaaaataaagactac

SEQ ID NO: 292314 - DNA, 15 bp, Homo sapiens
tgaaaataaagacta

SEQ ID NO: 292315 - DNA, 15 bp, Homo sapiens
atgaaaataaagact

SEQ ID NO: 292316 - DNA, 15 bp, Homo sapiens
aatgaaaataaagac

SEQ ID NO: 292317 - DNA, 15 bp, Homo sapiens
taatgaaaataaaga

SEQ ID NO: 292318 - DNA, 15 bp, Homo sapiens
ttaatgaaaataaag

SEQ ID NO: 292319 - DNA, 15 bp, Homo sapiens
cttaatgaaaataaa

SEQ ID NO: 292320 - DNA, 15 bp, Homo sapiens
gcttaatgaaaataa

SEQ ID NO: 292321 - DNA, 15 bp, Homo sapiens
ggcttaatgaaaata

SEQ ID NO: 292322 - DNA, 15 bp, Homo sapiens
tggcttaatgaaaat

SEQ ID NO: 292323 - DNA, 15 bp, Homo sapiens
ttggcttaatgaaaa

SEQ ID NO: 292324 - DNA, 15 bp, Homo sapiens
attggcttaatgaaa

SEQ ID NO: 292325 - DNA, 15 bp, Homo sapiens
cattggcttaatgaa

SEQ ID NO: 292326 - DNA, 15 bp, Homo sapiens
tcattggcttaatga

SEQ ID NO: 292327 - DNA, 15 bp, Homo sapiens
atcattggcttaatg

SEQ ID NO: 292328 - DNA, 15 bp, Homo sapiens
aatcattggcttaat

SEQ ID NO: 292329 - DNA, 15 bp, Homo sapiens
aaatcattggcttaa

SEQ ID NO: 292330 - DNA, 15 bp, Homo sapiens
taaatcattggctta

SEQ ID NO: 292331 - DNA, 15 bp, Homo sapiens
ctaaatcattggctt

SEQ ID NO: 292332 - DNA, 15 bp, Homo sapiens
gctaaatcattggct

SEQ ID NO: 292333 - DNA, 15 bp, Homo sapiens
agctaaatcattggc

SEQ ID NO: 292334 - DNA, 15 bp, Homo sapiens
gagctaaatcattgg

SEQ ID NO: 292335 - DNA, 15 bp, Homo sapiens
agagctaaatcattg

SEQ ID NO: 292336 - DNA, 15 bp, Homo sapiens
aagagctaaatcatt

SEQ ID NO: 292337 - DNA, 15 bp, Homo sapiens
caagagctaaatcat

SEQ ID NO: 292338 - DNA, 15 bp, Homo sapiens
acaagagctaaatca

SEQ ID NO: 292339 - DNA, 15 bp, Homo sapiens
aacaagagctaaatc

SEQ ID NO: 292340 - DNA, 15 bp, Homo sapiens
aaacaagagctaaat

SEQ ID NO: 292341 - DNA, 15 bp, Homo sapiens
taaacaagagctaaa

SEQ ID NO: 292342 - DNA, 15 bp, Homo sapiens
ctaaacaagagctaa

SEQ ID NO: 292343 - DNA, 15 bp, Homo sapiens
tctaaacaagagcta

SEQ ID NO: 292344 - DNA, 15 bp, Homo sapiens
ttctaaacaagagct

SEQ ID NO: 292345 - DNA, 15 bp, Homo sapiens
tttctaaacaagagc

SEQ ID NO: 292346 - DNA, 15 bp, Homo sapiens
ttttctaaacaagag

SEQ ID NO: 292347 - DNA, 15 bp, Homo sapiens
attttctaaacaaga

SEQ ID NO: 292348 - DNA, 15 bp, Homo sapiens
aattttctaaacaag

SEQ ID NO: 292349 - DNA, 15 bp, Homo sapiens
caattttctaaacaa

SEQ ID NO: 292350 - DNA, 15 bp, Homo sapiens
gcaattttctaaaca

SEQ ID NO: 292351 - DNA, 15 bp, Homo sapiens
agcaattttctaaac

SEQ ID NO: 292352 - DNA, 15 bp, Homo sapiens
cagcaattttctaaa

SEQ ID NO: 292353 - DNA, 15 bp, Homo sapiens
gcagcaattttctaa

SEQ ID NO: 292354 - DNA, 15 bp, Homo sapiens
agcagcaattttcta

SEQ ID NO: 292355 - DNA, 15 bp, Homo sapiens
cagcagcaattttct

SEQ ID NO: 292356 - DNA, 15 bp, Homo sapiens
tcagcagcaattttc

SEQ ID NO: 292357 - DNA, 15 bp, Homo sapiens
atcagcagcaatttt

SEQ ID NO: 292358 - DNA, 15 bp, Homo sapiens
aatcagcagcaattt

SEQ ID NO: 292359 - DNA, 15 bp, Homo sapiens
gaatcagcagcaatt

SEQ ID NO: 292360 - DNA, 15 bp, Homo sapiens
ggaatcagcagcaat

SEQ ID NO: 292361 - DNA, 15 bp, Homo sapiens
cggaatcagcagcaa

SEQ ID NO: 292362 - DNA, 15 bp, Homo sapiens
acggaatcagcagca

SEQ ID NO: 292363 - DNA, 15 bp, Homo sapiens
tacggaatcagcagc

SEQ ID NO: 292364 - DNA, 15 bp, Homo sapiens
ttacggaatcagcag

SEQ ID NO: 292365 - DNA, 15 bp, Homo sapiens
attacggaatcagca

SEQ ID NO: 292366 - DNA, 15 bp, Homo sapiens
aattacggaatcagc

SEQ ID NO: 292367 - DNA, 15 bp, Homo sapiens
taattacggaatcag

SEQ ID NO: 292368 - DNA, 15 bp, Homo sapiens
ttaattacggaatca

SEQ ID NO: 292369 - DNA, 15 bp, Homo sapiens
gttaattacggaatc

SEQ ID NO: 292370 - DNA, 15 bp, Homo sapiens
agttaattacggaat

SEQ ID NO: 292371 - DNA, 15 bp, Homo sapiens
gagttaattacggaa

SEQ ID NO: 292372 - DNA, 15 bp, Homo sapiens
tgagttaattacgga

SEQ ID NO: 292373 - DNA, 15 bp, Homo sapiens
ttgagttaattacgg

SEQ ID NO: 292374 - DNA, 15 bp, Homo sapiens
attgagttaattacg

SEQ ID NO: 292375 - DNA, 15 bp, Homo sapiens
tattgagttaattac

SEQ ID NO: 292376 - DNA, 15 bp, Homo sapiens
ttattgagttaatta

SEQ ID NO: 292377 - DNA, 15 bp, Homo sapiens
tttattgagttaatt

SEQ ID NO: 292378 - DNA, 15 bp, Homo sapiens
atttattgagttaat

SEQ ID NO: 292379 - DNA, 15 bp, Homo sapiens
tatttattgagttaa

SEQ ID NO: 292380 - DNA, 15 bp, Homo sapiens
atatttattgagtta

SEQ ID NO: 292381 - DNA, 15 bp, Homo sapiens
aatatttattgagtt

SEQ ID NO: 292382 - DNA, 15 bp, Homo sapiens
aaatatttattgagt

SEQ ID NO: 292383 - DNA, 15 bp, Homo sapiens
taaatatttattgag

SEQ ID NO: 292384 - DNA, 15 bp, Homo sapiens
ataaatatttattga

SEQ ID NO: 292385 - DNA, 15 bp, Homo sapiens
aataaatatttattg

SEQ ID NO: 292386 - DNA, 15 bp, Homo sapiens
caataaatatttatt

SEQ ID NO: 292387 - DNA, 15 bp, Homo sapiens
tcaataaatatttat

SEQ ID NO: 292388 - DNA, 15 bp, Homo sapiens
ttcaataaatattta

SEQ ID NO: 292389 - DNA, 15 bp, Homo sapiens
attcaataaatattt

SEQ ID NO: 292390 - DNA, 15 bp, Homo sapiens
cattcaataaatatt

SEQ ID NO: 292391 - DNA, 15 bp, Homo sapiens
ccattcaataaatat

SEQ ID NO: 292392 - DNA, 15 bp, Homo sapiens
gccattcaataaata

SEQ ID NO: 292393 - DNA, 15 bp, Homo sapiens
agccattcaataaat

SEQ ID NO: 292394 - DNA, 15 bp, Homo sapiens
tagccattcaataaa

SEQ ID NO: 292395 - DNA, 15 bp, Homo sapiens
atagccattcaataa

SEQ ID NO: 292396 - DNA, 15 bp, Homo sapiens
aatagccattcaata

SEQ ID NO: 292397 - DNA, 15 bp, Homo sapiens
taatagccattcaat

SEQ ID NO: 292398 - DNA, 15 bp, Homo sapiens
ataatagccattcaa

SEQ ID NO: 292399 - DNA, 15 bp, Homo sapiens
cataatagccattca

SEQ ID NO: 292400 - DNA, 15 bp, Homo sapiens
acataatagccattc

SEQ ID NO: 292401 - DNA, 15 bp, Homo sapiens
cacataatagccatt

SEQ ID NO: 292402 - DNA, 15 bp, Homo sapiens
gcacataatagccat

SEQ ID NO: 292403 - DNA, 15 bp, Homo sapiens
ggcacataatagcca

SEQ ID NO: 292404 - DNA, 15 bp, Homo sapiens
aggcacataatagcc

SEQ ID NO: 292405 - DNA, 15 bp, Homo sapiens
caggcacataatagc

SEQ ID NO: 292406 - DNA, 15 bp, Homo sapiens
tcaggcacataatag

SEQ ID NO: 292407 - DNA, 15 bp, Homo sapiens
gtcaggcacataata

SEQ ID NO: 292408 - DNA, 15 bp, Homo sapiens
tgtcaggcacataat

SEQ ID NO: 292409 - DNA, 15 bp, Homo sapiens
gtgtcaggcacataa

SEQ ID NO: 292410 - DNA, 15 bp, Homo sapiens
agtgtcaggcacata

SEQ ID NO: 292411 - DNA, 15 bp, Homo sapiens
tagtgtcaggcacat

SEQ ID NO: 292412 - DNA, 15 bp, Homo sapiens
atagtgtcaggcaca

SEQ ID NO: 292413 - DNA, 15 bp, Homo sapiens
aatagtgtcaggcac

SEQ ID NO: 292414 - DNA, 15 bp, Homo sapiens
aaatagtgtcaggca

SEQ ID NO: 292415 - DNA, 15 bp, Homo sapiens
aaaatagtgtcaggc

SEQ ID NO: 292416 - DNA, 15 bp, Homo sapiens
taaaatagtgtcagg

SEQ ID NO: 292417 - DNA, 15 bp, Homo sapiens
ttaaaatagtgtcag

SEQ ID NO: 292418 - DNA, 15 bp, Homo sapiens
cttaaaatagtgtca

SEQ ID NO: 292419 - DNA, 15 bp, Homo sapiens
gcttaaaatagtgtc

SEQ ID NO: 292420 - DNA, 15 bp, Homo sapiens
ggcttaaaatagtgt

SEQ ID NO: 292421 - DNA, 15 bp, Homo sapiens
gggcttaaaatagtg

SEQ ID NO: 292422 - DNA, 15 bp, Homo sapiens
agggcttaaaatagt

SEQ ID NO: 292423 - DNA, 15 bp, Homo sapiens
tagggcttaaaatag

SEQ ID NO: 292424 - DNA, 15 bp, Homo sapiens
ttagggcttaaaata

SEQ ID NO: 292425 - DNA, 15 bp, Homo sapiens
cttagggcttaaaat

SEQ ID NO: 292426 - DNA, 15 bp, Homo sapiens
gcttagggcttaaaa

SEQ ID NO: 292427 - DNA, 15 bp, Homo sapiens
tgcttagggcttaaa

SEQ ID NO: 292428 - DNA, 15 bp, Homo sapiens
gtgcttagggcttaa

SEQ ID NO: 292429 - DNA, 15 bp, Homo sapiens
agtgcttagggctta

SEQ ID NO: 292430 - DNA, 15 bp, Homo sapiens
aagtgcttagggctt

SEQ ID NO: 292431 - DNA, 15 bp, Homo sapiens
taagtgcttagggct

SEQ ID NO: 292432 - DNA, 15 bp, Homo sapiens
gtaagtgcttagggc

SEQ ID NO: 292433 - DNA, 15 bp, Homo sapiens
tgtaagtgcttaggg

SEQ ID NO: 292434 - DNA, 15 bp, Homo sapiens
atgtaagtgcttagg

SEQ ID NO: 292435 - DNA, 15 bp, Homo sapiens
aatgtaagtgcttag

SEQ ID NO: 292436 - DNA, 15 bp, Homo sapiens
gaatgtaagtgctta

SEQ ID NO: 292437 - DNA, 15 bp, Homo sapiens
ggaatgtaagtgctt

SEQ ID NO: 292438 - DNA, 15 bp, Homo sapiens
tggaatgtaagtgct

SEQ ID NO: 292439 - DNA, 15 bp, Homo sapiens
ctggaatgtaagtgc

SEQ ID NO: 292440 - DNA, 15 bp, Homo sapiens
actggaatgtaagtg

SEQ ID NO: 292441 - DNA, 15 bp, Homo sapiens
tactggaatgtaagt

SEQ ID NO: 292442 - DNA, 15 bp, Homo sapiens
atactggaatgtaag

SEQ ID NO: 292443 - DNA, 15 bp, Homo sapiens
gatactggaatgtaa

SEQ ID NO: 292444 - DNA, 15 bp, Homo sapiens
tgatactggaatgta

SEQ ID NO: 292445 - DNA, 15 bp, Homo sapiens
ctgatactggaatgt

SEQ ID NO: 292446 - DNA, 15 bp, Homo sapiens
tctgatactggaatg

SEQ ID NO: 292447 - DNA, 15 bp, Homo sapiens
ttctgatactggaat

SEQ ID NO: 292448 - DNA, 15 bp, Homo sapiens
tttctgatactggaa

SEQ ID NO: 292449 - DNA, 15 bp, Homo sapiens
ctttctgatactgga

SEQ ID NO: 292450 - DNA, 15 bp, Homo sapiens
tctttctgatactgg

SEQ ID NO: 292451 - DNA, 15 bp, Homo sapiens
ctctttctgatactg

SEQ ID NO: 292452 - DNA, 15 bp, Homo sapiens
tctctttctgatact

SEQ ID NO: 292453 - DNA, 15 bp, Homo sapiens
gtctctttctgatac

SEQ ID NO: 292454 - DNA, 15 bp, Homo sapiens
tgtctctttctgata

SEQ ID NO: 292455 - DNA, 15 bp, Homo sapiens
ctgtctctttctgat

SEQ ID NO: 292456 - DNA, 15 bp, Homo sapiens
tctgtctctttctga

SEQ ID NO: 292457 - DNA, 15 bp, Homo sapiens
gtctgtctctttctg

SEQ ID NO: 292458 - DNA, 15 bp, Homo sapiens
ggtctgtctctttct

SEQ ID NO: 292459 - DNA, 15 bp, Homo sapiens
cggtctgtctctttc

SEQ ID NO: 292460 - DNA, 15 bp, Homo sapiens
acggtctgtctcttt

SEQ ID NO: 292461 - DNA, 15 bp, Homo sapiens
tacggtctgtctctt

SEQ ID NO: 292462 - DNA, 15 bp, Homo sapiens
ttacggtctgtctct

SEQ ID NO: 292463 - DNA, 15 bp, Homo sapiens
tttacggtctgtctc

SEQ ID NO: 292464 - DNA, 15 bp, Homo sapiens
gtttacggtctgtct

SEQ ID NO: 292465 - DNA, 15 bp, Homo sapiens
tgtttacggtctgtc

SEQ ID NO: 292466 - DNA, 15 bp, Homo sapiens
ttgtttacggtctgt

SEQ ID NO: 292467 - DNA, 15 bp, Homo sapiens
cttgtttacggtctg

SEQ ID NO: 292468 - DNA, 15 bp, Homo sapiens
acttgtttacggtct

SEQ ID NO: 292469 - DNA, 15 bp, Homo sapiens
aacttgtttacggtc

SEQ ID NO: 292470 - DNA, 15 bp, Homo sapiens
caacttgtttacggt

SEQ ID NO: 292471 - DNA, 15 bp, Homo sapiens
tcaacttgtttacgg

SEQ ID NO: 292472 - DNA, 15 bp, Homo sapiens
gtcaacttgtttacg

SEQ ID NO: 292473 - DNA, 15 bp, Homo sapiens
tgtcaacttgtttac

SEQ ID NO: 292474 - DNA, 15 bp, Homo sapiens
ttgtcaacttgttta

SEQ ID NO: 292475 - DNA, 15 bp, Homo sapiens
cttgtcaacttgttt

SEQ ID NO: 292476 - DNA, 15 bp, Homo sapiens
acttgtcaacttgtt

SEQ ID NO: 292477 - DNA, 15 bp, Homo sapiens
tacttgtcaacttgt

SEQ ID NO: 292478 - DNA, 15 bp, Homo sapiens
ttacttgtcaacttg

SEQ ID NO: 292479 - DNA, 15 bp, Homo sapiens
tttacttgtcaactt

SEQ ID NO: 292480 - DNA, 15 bp, Homo sapiens
atttacttgtcaact

SEQ ID NO: 292481 - DNA, 15 bp, Homo sapiens
tatttacttgtcaac

SEQ ID NO: 292482 - DNA, 15 bp, Homo sapiens
ttatttacttgtcaa

SEQ ID NO: 292483 - DNA, 15 bp, Homo sapiens
cttatttacttgtca

SEQ ID NO: 292484 - DNA, 15 bp, Homo sapiens
tcttatttacttgtc

SEQ ID NO: 292485 - DNA, 15 bp, Homo sapiens
atcttatttacttgt

SEQ ID NO: 292486 - DNA, 15 bp, Homo sapiens
tatcttatttacttg

SEQ ID NO: 292487 - DNA, 15 bp, Homo sapiens
ttatcttatttactt

SEQ ID NO: 292488 - DNA, 15 bp, Homo sapiens
tttatcttatttact

SEQ ID NO: 292489 - DNA, 15 bp, Homo sapiens
atttatcttatttac

SEQ ID NO: 292490 - DNA, 15 bp, Homo sapiens
aatttatcttattta

SEQ ID NO: 292491 - DNA, 15 bp, Homo sapiens
gaatttatcttattt

SEQ ID NO: 292492 - DNA, 15 bp, Homo sapiens
tgaatttatcttatt

SEQ ID NO: 292493 - DNA, 15 bp, Homo sapiens
ctgaatttatcttat

SEQ ID NO: 292494 - DNA, 15 bp, Homo sapiens
actgaatttatctta

SEQ ID NO: 292495 - DNA, 15 bp, Homo sapiens
aactgaatttatctt

SEQ ID NO: 292496 - DNA, 15 bp, Homo sapiens
caactgaatttatct

SEQ ID NO: 292497 - DNA, 15 bp, Homo sapiens
tcaactgaatttatc

SEQ ID NO: 292498 - DNA, 15 bp, Homo sapiens
atcaactgaatttat

SEQ ID NO: 292499 - DNA, 15 bp, Homo sapiens
catcaactgaattta

SEQ ID NO: 292500 - DNA, 15 bp, Homo sapiens
gcatcaactgaattt

SEQ ID NO: 292501 - DNA, 15 bp, Homo sapiens
ggcatcaactgaatt

SEQ ID NO: 292502 - DNA, 15 bp, Homo sapiens
tggcatcaactgaat

SEQ ID NO: 292503 - DNA, 15 bp, Homo sapiens
atggcatcaactgaa

SEQ ID NO: 292504 - DNA, 15 bp, Homo sapiens
catggcatcaactga

SEQ ID NO: 292505 - DNA, 15 bp, Homo sapiens
acatggcatcaactg

SEQ ID NO: 292506 - DNA, 15 bp, Homo sapiens
cacatggcatcaact

SEQ ID NO: 292507 - DNA, 15 bp, Homo sapiens
gcacatggcatcaac

SEQ ID NO: 292508 - DNA, 15 bp, Homo sapiens
agcacatggcatcaa

SEQ ID NO: 292509 - DNA, 15 bp, Homo sapiens
cagcacatggcatca

SEQ ID NO: 292510 - DNA, 15 bp, Homo sapiens
ccagcacatggcatc

SEQ ID NO: 292511 - DNA, 15 bp, Homo sapiens
cccagcacatggcat

SEQ ID NO: 292512 - DNA, 15 bp, Homo sapiens
tcccagcacatggca

SEQ ID NO: 292513 - DNA, 15 bp, Homo sapiens
ttcccagcacatggc

SEQ ID NO: 292514 - DNA, 15 bp, Homo sapiens
cttcccagcacatgg

SEQ ID NO: 292515 - DNA, 15 bp, Homo sapiens
tcttcccagcacatg

SEQ ID NO: 292516 - DNA, 15 bp, Homo sapiens
ttcttcccagcacat

SEQ ID NO: 292517 - DNA, 15 bp, Homo sapiens
tttcttcccagcaca

SEQ ID NO: 292518 - DNA, 15 bp, Homo sapiens
ttttcttcccagcac

SEQ ID NO: 292519 - DNA, 15 bp, Homo sapiens
attttcttcccagca

SEQ ID NO: 292520 - DNA, 15 bp, Homo sapiens
tattttcttcccagc

SEQ ID NO: 292521 - DNA, 15 bp, Homo sapiens
ttattttcttcccag

SEQ ID NO: 292522 - DNA, 15 bp, Homo sapiens
tttattttcttccca

SEQ ID NO: 292523 - DNA, 15 bp, Homo sapiens
ttttattttcttccc

SEQ ID NO: 292524 - DNA, 15 bp, Homo sapiens
gttttattttcttcc

SEQ ID NO: 292525 - DNA, 15 bp, Homo sapiens
agttttattttcttc

SEQ ID NO: 292526 - DNA, 15 bp, Homo sapiens
cagttttattttctt

SEQ ID NO: 292527 - DNA, 15 bp, Homo sapiens
ccagttttattttct

SEQ ID NO: 292528 - DNA, 15 bp, Homo sapiens
accagttttattttc

SEQ ID NO: 292529 - DNA, 15 bp, Homo sapiens
taccagttttatttt

SEQ ID NO: 292530 - DNA, 15 bp, Homo sapiens
ttaccagttttattt

SEQ ID NO: 292531 - DNA, 15 bp, Homo sapiens
attaccagttttatt

SEQ ID NO: 292532 - DNA, 15 bp, Homo sapiens
cattaccagttttat

SEQ ID NO: 292533 - DNA, 15 bp, Homo sapiens
ccattaccagtttta

SEQ ID NO: 292534 - DNA, 15 bp, Homo sapiens
tccattaccagtttt

SEQ ID NO: 292535 - DNA, 15 bp, Homo sapiens
ttccattaccagttt

SEQ ID NO: 292536 - DNA, 15 bp, Homo sapiens
tttccattaccagtt

SEQ ID NO: 292537 - DNA, 15 bp, Homo sapiens
ttttccattaccagt

SEQ ID NO: 292538 - DNA, 15 bp, Homo sapiens
tttttccattaccag

SEQ ID NO: 292539 - DNA, 15 bp, Homo sapiens
ctttttccattacca

SEQ ID NO: 292540 - DNA, 15 bp, Homo sapiens
gctttttccattacc

SEQ ID NO: 292541 - DNA, 15 bp, Homo sapiens
tgctttttccattac

SEQ ID NO: 292542 - DNA, 15 bp, Homo sapiens
ctgctttttccatta

SEQ ID NO: 292543 - DNA, 15 bp, Homo sapiens
cctgctttttccatt

SEQ ID NO: 292544 - DNA, 15 bp, Homo sapiens
ccctgctttttccat

SEQ ID NO: 292545 - DNA, 15 bp, Homo sapiens
accctgctttttcca

SEQ ID NO: 292546 - DNA, 15 bp, Homo sapiens
aaccctgctttttcc

SEQ ID NO: 292547 - DNA, 15 bp, Homo sapiens
aaaccctgctttttc

SEQ ID NO: 292548 - DNA, 15 bp, Homo sapiens
gaaaccctgcttttt

SEQ ID NO: 292549 - DNA, 15 bp, Homo sapiens
agaaaccctgctttt

SEQ ID NO: 292550 - DNA, 15 bp, Homo sapiens
aagaaaccctgcttt

SEQ ID NO: 292551 - DNA, 15 bp, Homo sapiens
taagaaaccctgctt

SEQ ID NO: 292552 - DNA, 15 bp, Homo sapiens
ttaagaaaccctgct

SEQ ID NO: 292553 - DNA, 15 bp, Homo sapiens
tttaagaaaccctgc

SEQ ID NO: 292554 - DNA, 15 bp, Homo sapiens
atttaagaaaccctg

SEQ ID NO: 292555 - DNA, 15 bp, Homo sapiens
catttaagaaaccct

SEQ ID NO: 292556 - DNA, 15 bp, Homo sapiens
acatttaagaaaccc

SEQ ID NO: 292557 - DNA, 15 bp, Homo sapiens
aacatttaagaaacc

SEQ ID NO: 292558 - DNA, 15 bp, Homo sapiens
aaacatttaagaaac

SEQ ID NO: 292559 - DNA, 15 bp, Homo sapiens
aaaacatttaagaaa

SEQ ID NO: 292560 - DNA, 15 bp, Homo sapiens
caaaacatttaagaa

SEQ ID NO: 292561 - DNA, 15 bp, Homo sapiens
acaaaacatttaaga

SEQ ID NO: 292562 - DNA, 15 bp, Homo sapiens
cacaaaacatttaag

SEQ ID NO: 292563 - DNA, 15 bp, Homo sapiens
gcacaaaacatttaa

SEQ ID NO: 292564 - DNA, 15 bp, Homo sapiens
agcacaaaacattta

SEQ ID NO: 292565 - DNA, 15 bp, Homo sapiens
cagcacaaaacattt

SEQ ID NO: 292566 - DNA, 15 bp, Homo sapiens
tcagcacaaaacatt

SEQ ID NO: 292567 - DNA, 15 bp, Homo sapiens
ctcagcacaaaacat

SEQ ID NO: 292568 - DNA, 15 bp, Homo sapiens
cctcagcacaaaaca

SEQ ID NO: 292569 - DNA, 15 bp, Homo sapiens
tcctcagcacaaaac

SEQ ID NO: 292570 - DNA, 15 bp, Homo sapiens
gtcctcagcacaaaa

SEQ ID NO: 292571 - DNA, 15 bp, Homo sapiens
agtcctcagcacaaa

SEQ ID NO: 292572 - DNA, 15 bp, Homo sapiens
aagtcctcagcacaa

SEQ ID NO: 292573 - DNA, 15 bp, Homo sapiens
gaagtcctcagcaca

SEQ ID NO: 292574 - DNA, 15 bp, Homo sapiens
agaagtcctcagcac

SEQ ID NO: 292575 - DNA, 15 bp, Homo sapiens
aagaagtcctcagca

SEQ ID NO: 292576 - DNA, 15 bp, Homo sapiens
aaagaagtcctcagc

SEQ ID NO: 292577 - DNA, 15 bp, Homo sapiens
caaagaagtcctcag

SEQ ID NO: 292578 - DNA, 15 bp, Homo sapiens
ccaaagaagtcctca

SEQ ID NO: 292579 - DNA, 15 bp, Homo sapiens
gccaaagaagtcctc

SEQ ID NO: 292580 - DNA, 15 bp, Homo sapiens
tgccaaagaagtcct

SEQ ID NO: 292581 - DNA, 15 bp, Homo sapiens
ctgccaaagaagtcc

SEQ ID NO: 292582 - DNA, 15 bp, Homo sapiens
actgccaaagaagtc

SEQ ID NO: 292583 - DNA, 15 bp, Homo sapiens
gactgccaaagaagt

SEQ ID NO: 292584 - DNA, 15 bp, Homo sapiens
agactgccaaagaag

SEQ ID NO: 292585 - DNA, 15 bp, Homo sapiens
cagactgccaaagaa

SEQ ID NO: 292586 - DNA, 15 bp, Homo sapiens
ccagactgccaaaga

SEQ ID NO: 292587 - DNA, 15 bp, Homo sapiens
accagactgccaaag

SEQ ID NO: 292588 - DNA, 15 bp, Homo sapiens
caccagactgccaaa

SEQ ID NO: 292589 - DNA, 15 bp, Homo sapiens
tcaccagactgccaa

SEQ ID NO: 292590 - DNA, 15 bp, Homo sapiens
ttcaccagactgcca

SEQ ID NO: 292591 - DNA, 15 bp, Homo sapiens
cttcaccagactgcc

SEQ ID NO: 292592 - DNA, 15 bp, Homo sapiens
tcttcaccagactgc

SEQ ID NO: 292593 - DNA, 15 bp, Homo sapiens
gtcttcaccagactg

SEQ ID NO: 292594 - DNA, 15 bp, Homo sapiens
agtcttcaccagact

SEQ ID NO: 292595 - DNA, 15 bp, Homo sapiens
tagtcttcaccagac

SEQ ID NO: 292596 - DNA, 15 bp, Homo sapiens
atagtcttcaccaga

SEQ ID NO: 292597 - DNA, 15 bp, Homo sapiens
catagtcttcaccag

SEQ ID NO: 292598 - DNA, 15 bp, Homo sapiens
tcatagtcttcacca

SEQ ID NO: 292599 - DNA, 15 bp, Homo sapiens
gtcatagtcttcacc

SEQ ID NO: 292600 - DNA, 15 bp, Homo sapiens
ggtcatagtcttcac

SEQ ID NO: 292601 - DNA, 15 bp, Homo sapiens
gggtcatagtcttca

SEQ ID NO: 292602 - DNA, 15 bp, Homo sapiens
ggggtcatagtcttc

SEQ ID NO: 292603 - DNA, 15 bp, Homo sapiens
aggggtcatagtctt

SEQ ID NO: 292604 - DNA, 15 bp, Homo sapiens
aaggggtcatagtct

SEQ ID NO: 292605 - DNA, 15 bp, Homo sapiens
aaaggggtcatagtc

SEQ ID NO: 292606 - DNA, 15 bp, Homo sapiens
gaaaggggtcatagt

SEQ ID NO: 292607 - DNA, 15 bp, Homo sapiens
agaaaggggtcatag

SEQ ID NO: 292608 - DNA, 15 bp, Homo sapiens
gagaaaggggtcata

SEQ ID NO: 292609 - DNA, 15 bp, Homo sapiens
tgagaaaggggtcat

SEQ ID NO: 292610 - DNA, 15 bp, Homo sapiens
ctgagaaaggggtca

SEQ ID NO: 292611 - DNA, 15 bp, Homo sapiens
tctgagaaaggggtc

SEQ ID NO: 292612 - DNA, 15 bp, Homo sapiens
ttctgagaaaggggt

SEQ ID NO: 292613 - DNA, 15 bp, Homo sapiens
tttctgagaaagggg

SEQ ID NO: 292614 - DNA, 15 bp, Homo sapiens
ttttctgagaaaggg

SEQ ID NO: 292615 - DNA, 15 bp, Homo sapiens
tttttctgagaaagg

SEQ ID NO: 292616 - DNA, 15 bp, Homo sapiens
atttttctgagaaag

SEQ ID NO: 292617 - DNA, 15 bp, Homo sapiens
tatttttctgagaaa

SEQ ID NO: 292618 - DNA, 15 bp, Homo sapiens
atatttttctgagaa

SEQ ID NO: 292619 - DNA, 15 bp, Homo sapiens
aatatttttctgaga

SEQ ID NO: 292620 - DNA, 15 bp, Homo sapiens
taatatttttctgag

SEQ ID NO: 292621 - DNA, 15 bp, Homo sapiens
ataatatttttctga

SEQ ID NO: 292622 - DNA, 15 bp, Homo sapiens
aataatatttttctg

SEQ ID NO: 292623 - DNA, 15 bp, Homo sapiens
aaataatatttttct

SEQ ID NO: 292624 - DNA, 15 bp, Homo sapiens
taaataatatttttc

SEQ ID NO: 292625 - DNA, 15 bp, Homo sapiens
ataaataatattttt

SEQ ID NO: 292626 - DNA, 15 bp, Homo sapiens
tataaataatatttt

SEQ ID NO: 292627 - DNA, 15 bp, Homo sapiens
ttataaataatattt

SEQ ID NO: 292628 - DNA, 15 bp, Homo sapiens
tttataaataatatt

SEQ ID NO: 292629 - DNA, 15 bp, Homo sapiens
ctttataaataatat

SEQ ID NO: 292630 - DNA, 15 bp, Homo sapiens
cctttataaataata

SEQ ID NO: 292631 - DNA, 15 bp, Homo sapiens
gcctttataaataat

SEQ ID NO: 292632 - DNA, 15 bp, Homo sapiens
tgcctttataaataa

SEQ ID NO: 292633 - DNA, 15 bp, Homo sapiens
atgcctttataaata

SEQ ID NO: 292634 - DNA, 15 bp, Homo sapiens
tatgcctttataaat

SEQ ID NO: 292635 - DNA, 15 bp, Homo sapiens
ttatgcctttataaa

SEQ ID NO: 292636 - DNA, 15 bp, Homo sapiens
attatgcctttataa

SEQ ID NO: 292637 - DNA, 15 bp, Homo sapiens
tattatgcctttata

SEQ ID NO: 292638 - DNA, 15 bp, Homo sapiens
atattatgcctttat

SEQ ID NO: 292639 - DNA, 15 bp, Homo sapiens
tatattatgccttta

SEQ ID NO: 292640 - DNA, 15 bp, Homo sapiens
ttatattatgccttt

SEQ ID NO: 292641 - DNA, 15 bp, Homo sapiens
tttatattatgcctt

SEQ ID NO: 292642 - DNA, 15 bp, Homo sapiens
ttttatattatgcct

SEQ ID NO: 292643 - DNA, 15 bp, Homo sapiens
tttttatattatgcc

SEQ ID NO: 292644 - DNA, 15 bp, Homo sapiens
gtttttatattatgc

SEQ ID NO: 292645 - DNA, 15 bp, Homo sapiens
tgtttttatattatg

SEQ ID NO: 292646 - DNA, 15 bp, Homo sapiens
atgtttttatattat

SEQ ID NO: 292647 - DNA, 15 bp, Homo sapiens
aatgtttttatatta

SEQ ID NO: 292648 - DNA, 15 bp, Homo sapiens
caatgtttttatatt

SEQ ID NO: 292649 - DNA, 15 bp, Homo sapiens
ccaatgtttttatat

SEQ ID NO: 292650 - DNA, 15 bp, Homo sapiens
tccaatgtttttata

SEQ ID NO: 292651 - DNA, 15 bp, Homo sapiens
atccaatgtttttat

SEQ ID NO: 292652 - DNA, 15 bp, Homo sapiens
aatccaatgttttta

SEQ ID NO: 292653 - DNA, 15 bp, Homo sapiens
taatccaatgttttt

SEQ ID NO: 292654 - DNA, 15 bp, Homo sapiens
ataatccaatgtttt

SEQ ID NO: 292655 - DNA, 15 bp, Homo sapiens
tataatccaatgttt

SEQ ID NO: 292656 - DNA, 15 bp, Homo sapiens
ttataatccaatgtt

SEQ ID NO: 292657 - DNA, 15 bp, Homo sapiens
cttataatccaatgt

SEQ ID NO: 292658 - DNA, 15 bp, Homo sapiens
tcttataatccaatg

SEQ ID NO: 292659 - DNA, 15 bp, Homo sapiens
ttcttataatccaat

SEQ ID NO: 292660 - DNA, 15 bp, Homo sapiens
tttcttataatccaa

SEQ ID NO: 292661 - DNA, 15 bp, Homo sapiens
ttttcttataatcca

SEQ ID NO: 292662 - DNA, 15 bp, Homo sapiens
attttcttataatcc

SEQ ID NO: 292663 - DNA, 15 bp, Homo sapiens
tattttcttataatc

SEQ ID NO: 292664 - DNA, 15 bp, Homo sapiens
ctattttcttataat

SEQ ID NO: 292665 - DNA, 15 bp, Homo sapiens
tctattttcttataa

SEQ ID NO: 292666 - DNA, 15 bp, Homo sapiens
atctattttcttata

SEQ ID NO: 292667 - DNA, 15 bp, Homo sapiens
aatctattttcttat

SEQ ID NO: 292668 - DNA, 15 bp, Homo sapiens
taatctattttctta

SEQ ID NO: 292669 - DNA, 15 bp, Homo sapiens
ataatctattttctt

SEQ ID NO: 292670 - DNA, 15 bp, Homo sapiens
cataatctattttct

SEQ ID NO: 292671 - DNA, 15 bp, Homo sapiens
acataatctattttc

SEQ ID NO: 292672 - DNA, 15 bp, Homo sapiens
aacataatctatttt

SEQ ID NO: 292673 - DNA, 15 bp, Homo sapiens
taacataatctattt

SEQ ID NO: 292674 - DNA, 15 bp, Homo sapiens
ttaacataatctatt

SEQ ID NO: 292675 - DNA, 15 bp, Homo sapiens
tttaacataatctat

SEQ ID NO: 292676 - DNA, 15 bp, Homo sapiens
ttttaacataatcta

SEQ ID NO: 292677 - DNA, 15 bp, Homo sapiens
attttaacataatct

SEQ ID NO: 292678 - DNA, 15 bp, Homo sapiens
gattttaacataatc

SEQ ID NO: 292679 - DNA, 15 bp, Homo sapiens
tgattttaacataat

SEQ ID NO: 292680 - DNA, 15 bp, Homo sapiens
ctgattttaacataa

SEQ ID NO: 292681 - DNA, 15 bp, Homo sapiens
actgattttaacata

SEQ ID NO: 292682 - DNA, 15 bp, Homo sapiens
aactgattttaacat

SEQ ID NO: 292683 - DNA, 15 bp, Homo sapiens
taactgattttaaca

SEQ ID NO: 292684 - DNA, 15 bp, Homo sapiens
ataactgattttaac

SEQ ID NO: 292685 - DNA, 15 bp, Homo sapiens
gataactgattttaa

SEQ ID NO: 292686 - DNA, 15 bp, Homo sapiens
tgataactgatttta

SEQ ID NO: 292687 - DNA, 15 bp, Homo sapiens
ctgataactgatttt

SEQ ID NO: 292688 - DNA, 15 bp, Homo sapiens
tctgataactgattt

SEQ ID NO: 292689 - DNA, 15 bp, Homo sapiens
atctgataactgatt

SEQ ID NO: 292690 - DNA, 15 bp, Homo sapiens
aatctgataactgat

SEQ ID NO: 292691 - DNA, 15 bp, Homo sapiens
taatctgataactga

SEQ ID NO: 292692 - DNA, 15 bp, Homo sapiens
ataatctgataactg

SEQ ID NO: 292693 - DNA, 15 bp, Homo sapiens
tataatctgataact

SEQ ID NO: 292694 - DNA, 15 bp, Homo sapiens
ttataatctgataac

SEQ ID NO: 292695 - DNA, 15 bp, Homo sapiens
tttataatctgataa

SEQ ID NO: 292696 - DNA, 15 bp, Homo sapiens
ttttataatctgata

SEQ ID NO: 292697 - DNA, 15 bp, Homo sapiens
tttttataatctgat

SEQ ID NO: 292698 - DNA, 15 bp, Homo sapiens
gttttttataatctg

SEQ ID NO: 292699 - DNA, 15 bp, Homo sapiens
tgttttttataatct

SEQ ID NO: 292700 - DNA, 15 bp, Homo sapiens
ttgttttttataatc

SEQ ID NO: 292701 - DNA, 15 bp, Homo sapiens
tttgttttttataat

SEQ ID NO: 292702 - DNA, 15 bp, Homo sapiens
atttgttttttataa

SEQ ID NO: 292703 - DNA, 15 bp, Homo sapiens
aatttgttttttata

SEQ ID NO: 292704 - DNA, 15 bp, Homo sapiens
taatttgttttttat

SEQ ID NO: 292705 - DNA, 15 bp, Homo sapiens
ataatttgtttttta

SEQ ID NO: 292706 - DNA, 15 bp, Homo sapiens
cataatttgtttttt

SEQ ID NO: 292707 - DNA, 15 bp, Homo sapiens
tcataatttgttttt

SEQ ID NO: 292708 - DNA, 15 bp, Homo sapiens
atcataatttgtttt

SEQ ID NO: 292709 - DNA, 15 bp, Homo sapiens
tatcataatttgttt

SEQ ID NO: 292710 - DNA, 15 bp, Homo sapiens
ttatcataatttgtt

SEQ ID NO: 292711 - DNA, 15 bp, Homo sapiens
tttatcataatttgt

SEQ ID NO: 292712 - DNA, 15 bp, Homo sapiens
ctttatcataatttg

SEQ ID NO: 292713 - DNA, 15 bp, Homo sapiens
actttatcataattt

SEQ ID NO: 292714 - DNA, 15 bp, Homo sapiens
gactttatcataatt

SEQ ID NO: 292715 - DNA, 15 bp, Homo sapiens
agactttatcataat

SEQ ID NO: 292716 - DNA, 15 bp, Homo sapiens
cagactttatcataa

SEQ ID NO: 292717 - DNA, 15 bp, Homo sapiens
gcagactttatcata

SEQ ID NO: 292718 - DNA, 15 bp, Homo sapiens
agcagactttatcat

SEQ ID NO: 292719 - DNA, 15 bp, Homo sapiens
aagcagactttatca

SEQ ID NO: 292720 - DNA, 15 bp, Homo sapiens
caagcagactttatc

SEQ ID NO: 292721 - DNA, 15 bp, Homo sapiens
gcaagcagactttat

SEQ ID NO: 292722 - DNA, 15 bp, Homo sapiens
agcaagcagacttta

SEQ ID NO: 292723 - DNA, 15 bp, Homo sapiens
aagcaagcagacttt

SEQ ID NO: 292724 - DNA, 15 bp, Homo sapiens
gaagcaagcagactt

SEQ ID NO: 292725 - DNA, 15 bp, Homo sapiens
agaagcaagcagact

SEQ ID NO: 292726 - DNA, 15 bp, Homo sapiens
aagaagcaagcagac

SEQ ID NO: 292727 - DNA, 15 bp, Homo sapiens
caagaagcaagcaga

SEQ ID NO: 292728 - DNA, 15 bp, Homo sapiens
tcaagaagcaagcag

SEQ ID NO: 292729 - DNA, 15 bp, Homo sapiens
atcaagaagcaagca

SEQ ID NO: 292730 - DNA, 15 bp, Homo sapiens
aatcaagaagcaagc

SEQ ID NO: 292731 - DNA, 15 bp, Homo sapiens
taatcaagaagcaag

SEQ ID NO: 292732 - DNA, 15 bp, Homo sapiens
ctaatcaagaagcaa

SEQ ID NO: 292733 - DNA, 15 bp, Homo sapiens
cctaatcaagaagca

SEQ ID NO: 292734 - DNA, 15 bp, Homo sapiens
ccctaatcaagaagc

SEQ ID NO: 292735 - DNA, 15 bp, Homo sapiens
gccctaatcaagaag

SEQ ID NO: 292736 - DNA, 15 bp, Homo sapiens
tgccctaatcaagaa

SEQ ID NO: 292737 - DNA, 15 bp, Homo sapiens
atgccctaatcaaga

SEQ ID NO: 292738 - DNA, 15 bp, Homo sapiens
aatgccctaatcaag

SEQ ID NO: 292739 - DNA, 15 bp, Homo sapiens
aaatgccctaatcaa

SEQ ID NO: 292740 - DNA, 15 bp, Homo sapiens
aaaatgccctaatca

SEQ ID NO: 292741 - DNA, 15 bp, Homo sapiens
aaaaatgccctaatc

SEQ ID NO: 292742 - DNA, 15 bp, Homo sapiens
taaaaatgccctaat

SEQ ID NO: 292743 - DNA, 15 bp, Homo sapiens
ataaaaatgccctaa

SEQ ID NO: 292744 - DNA, 15 bp, Homo sapiens
cataaaaatgcccta

SEQ ID NO: 292745 - DNA, 15 bp, Homo sapiens
tcataaaaatgccct

SEQ ID NO: 292746 - DNA, 15 bp, Homo sapiens
ttcataaaaatgccc

SEQ ID NO: 292747 - DNA, 15 bp, Homo sapiens
cttcataaaaatgcc

SEQ ID NO: 292748 - DNA, 15 bp, Homo sapiens
tcttcataaaaatgc

SEQ ID NO: 292749 - DNA, 15 bp, Homo sapiens
atcttcataaaaatg

SEQ ID NO: 292750 - DNA, 15 bp, Homo sapiens
gatcttcataaaaat

SEQ ID NO: 292751 - DNA, 15 bp, Homo sapiens
ggatcttcataaaaa

SEQ ID NO: 292752 - DNA, 15 bp, Homo sapiens
tggatcttcataaaa

SEQ ID NO: 292753 - DNA, 15 bp, Homo sapiens
ctggatcttcataaa

SEQ ID NO: 292754 - DNA, 15 bp, Homo sapiens
gctggatcttcataa

SEQ ID NO: 292755 - DNA, 15 bp, Homo sapiens
tgctggatcttcata

SEQ ID NO: 292756 - DNA, 15 bp, Homo sapiens
ttgctggatcttcat

SEQ ID NO: 292757 - DNA, 15 bp, Homo sapiens
attgctggatcttca

SEQ ID NO: 292758 - DNA, 15 bp, Homo sapiens
tattgctggatcttc

SEQ ID NO: 292759 - DNA, 15 bp, Homo sapiens
ttattgctggatctt

SEQ ID NO: 292760 - DNA, 15 bp, Homo sapiens
attattgctggatct

SEQ ID NO: 292761 - DNA, 15 bp, Homo sapiens
aattattgctggatc

SEQ ID NO: 292762 - DNA, 15 bp, Homo sapiens
gaattattgctggat

SEQ ID NO: 292763 - DNA, 15 bp, Homo sapiens
agaattattgctgga

SEQ ID NO: 292764 - DNA, 15 bp, Homo sapiens
tagaattattgctgg

SEQ ID NO: 292765 - DNA, 15 bp, Homo sapiens
ttagaattattgctg

SEQ ID NO: 292766 - DNA, 15 bp, Homo sapiens
attagaattattgct

SEQ ID NO: 292767 - DNA, 15 bp, Homo sapiens
tattagaattattgc

SEQ ID NO: 292768 - DNA, 15 bp, Homo sapiens
atattagaattattg

SEQ ID NO: 292769 - DNA, 15 bp, Homo sapiens
tatattagaattatt

SEQ ID NO: 292770 - DNA, 15 bp, Homo sapiens
gtatattagaattat

SEQ ID NO: 292771 - DNA, 15 bp, Homo sapiens
ggtatattagaatta

SEQ ID NO: 292772 - DNA, 15 bp, Homo sapiens
tggtatattagaatt

SEQ ID NO: 292773 - DNA, 15 bp, Homo sapiens
gtggtatattagaat

SEQ ID NO: 292774 - DNA, 15 bp, Homo sapiens
ggtggtatattagaa

SEQ ID NO: 292775 - DNA, 15 bp, Homo sapiens
tggtggtatattaga

SEQ ID NO: 292776 - DNA, 15 bp, Homo sapiens
atggtggtatattag

SEQ ID NO: 292777 - DNA, 15 bp, Homo sapiens
gatggtggtatatta

SEQ ID NO: 292778 - DNA, 15 bp, Homo sapiens
tgatggtggtatatt

SEQ ID NO: 292779 - DNA, 15 bp, Homo sapiens
atgatggtggtatat

SEQ ID NO: 292780 - DNA, 15 bp, Homo sapiens
aatgatggtggtata

SEQ ID NO: 292781 - DNA, 15 bp, Homo sapiens
aaatgatggtggtat

SEQ ID NO: 292782 - DNA, 15 bp, Homo sapiens
aaaatgatggtggta

SEQ ID NO: 292783 - DNA, 15 bp, Homo sapiens
taaaatgatggtggt

SEQ ID NO: 292784 - DNA, 15 bp, Homo sapiens
ttaaaatgatggtgg

SEQ ID NO: 292785 - DNA, 15 bp, Homo sapiens
tttaaaatgatggtg

SEQ ID NO: 292786 - DNA, 15 bp, Homo sapiens
ctttaaaatgatggt

SEQ ID NO: 292787 - DNA, 15 bp, Homo sapiens
actttaaaatgatgg

SEQ ID NO: 292788 - DNA, 15 bp, Homo sapiens
tactttaaaatgatg

SEQ ID NO: 292789 - DNA, 15 bp, Homo sapiens
ctactttaaaatgat

SEQ ID NO: 292790 - DNA, 15 bp, Homo sapiens
cctactttaaaatga

SEQ ID NO: 292791 - DNA, 15 bp, Homo sapiens
tcctactttaaaatg

SEQ ID NO: 292792 - DNA, 15 bp, Homo sapiens
atcctactttaaaat

SEQ ID NO: 292793 - DNA, 15 bp, Homo sapiens
aatcctactttaaaa

SEQ ID NO: 292794 - DNA, 15 bp, Homo sapiens
taatcctactttaaa

SEQ ID NO: 292795 - DNA, 15 bp, Homo sapiens
ttaatcctactttaa

SEQ ID NO: 292796 - DNA, 15 bp, Homo sapiens
attaatcctacttta

SEQ ID NO: 292797 - DNA, 15 bp, Homo sapiens
tattaatcctacttt

SEQ ID NO: 292798 - DNA, 15 bp, Homo sapiens
atattaatcctactt

SEQ ID NO: 292799 - DNA, 15 bp, Homo sapiens
tatattaatcctact

SEQ ID NO: 292800 - DNA, 15 bp, Homo sapiens
ttatattaatcctac

SEQ ID NO: 292801 - DNA, 15 bp, Homo sapiens
cttatattaatccta

SEQ ID NO: 292802 - DNA, 15 bp, Homo sapiens
acttatattaatcct

SEQ ID NO: 292803 - DNA, 15 bp, Homo sapiens
tacttatattaatcc

SEQ ID NO: 292804 - DNA, 15 bp, Homo sapiens
ttacttatattaatc

SEQ ID NO: 292805 - DNA, 15 bp, Homo sapiens
attacttatattaat

SEQ ID NO: 292806 - DNA, 15 bp, Homo sapiens
tattacttatattaa

SEQ ID NO: 292807 - DNA, 15 bp, Homo sapiens
gtattacttatatta

SEQ ID NO: 292808 - DNA, 15 bp, Homo sapiens
agtattacttatatt

SEQ ID NO: 292809 - DNA, 15 bp, Homo sapiens
aagtattacttatat

SEQ ID NO: 292810 - DNA, 15 bp, Homo sapiens
aaagtattacttata

SEQ ID NO: 292811 - DNA, 15 bp, Homo sapiens
caaagtattacttat

SEQ ID NO: 292812 - DNA, 15 bp, Homo sapiens
tcaaagtattactta

SEQ ID NO: 292813 - DNA, 15 bp, Homo sapiens
ctcaaagtattactt

SEQ ID NO: 292814 - DNA, 15 bp, Homo sapiens
tctcaaagtattact

SEQ ID NO: 292815 - DNA, 15 bp, Homo sapiens
atctcaaagtattac

SEQ ID NO: 292816 - DNA, 15 bp, Homo sapiens
tatctcaaagtatta

SEQ ID NO: 292817 - DNA, 15 bp, Homo sapiens
gtatctcaaagtatt

SEQ ID NO: 292818 - DNA, 15 bp, Homo sapiens
ggtatctcaaagtat

SEQ ID NO: 292819 - DNA, 15 bp, Homo sapiens
aggtatctcaaagta

SEQ ID NO: 292820 - DNA, 15 bp, Homo sapiens
caggtatctcaaagt

SEQ ID NO: 292821 - DNA, 15 bp, Homo sapiens
acaggtatctcaaag

SEQ ID NO: 292822 - DNA, 15 bp, Homo sapiens
tacaggtatctcaaa

SEQ ID NO: 292823 - DNA, 15 bp, Homo sapiens
ttacaggtatctcaa

SEQ ID NO: 292824 - DNA, 15 bp, Homo sapiens
gttacaggtatctca

SEQ ID NO: 292825 - DNA, 15 bp, Homo sapiens
tgttacaggtatctc

SEQ ID NO: 292826 - DNA, 15 bp, Homo sapiens
ttgttacaggtatct

SEQ ID NO: 292827 - DNA, 15 bp, Homo sapiens
attgttacaggtatc

SEQ ID NO: 292828 - DNA, 15 bp, Homo sapiens
aattgttacaggtat

SEQ ID NO: 292829 - DNA, 15 bp, Homo sapiens
caattgttacaggta

SEQ ID NO: 292830 - DNA, 15 bp, Homo sapiens
acaattgttacaggt

SEQ ID NO: 292831 - DNA, 15 bp, Homo sapiens
tacaattgttacagg

SEQ ID NO: 292832 - DNA, 15 bp, Homo sapiens
ttacaattgttacag

SEQ ID NO: 292833 - DNA, 15 bp, Homo sapiens
attacaattgttaca

SEQ ID NO: 292834 - DNA, 15 bp, Homo sapiens
gattacaattgttac

SEQ ID NO: 292835 - DNA, 15 bp, Homo sapiens
agattacaattgtta

SEQ ID NO: 292836 - DNA, 15 bp, Homo sapiens
aagattacaattgtt

SEQ ID NO: 292837 - DNA, 15 bp, Homo sapiens
taagattacaattgt

SEQ ID NO: 292838 - DNA, 15 bp, Homo sapiens
ataagattacaattg

SEQ ID NO: 292839 - DNA, 15 bp, Homo sapiens
tataagattacaatt

SEQ ID NO: 292840 - DNA, 15 bp, Homo sapiens
atataagattacaat

SEQ ID NO: 292841 - DNA, 15 bp, Homo sapiens
catataagattacaa

SEQ ID NO: 292842 - DNA, 15 bp, Homo sapiens
acatataagattaca

SEQ ID NO: 292843 - DNA, 15 bp, Homo sapiens
tacatataagattac

SEQ ID NO: 292844 - DNA, 15 bp, Homo sapiens
ttacatataagatta

SEQ ID NO: 292845 - DNA, 15 bp, Homo sapiens
tttacatataagatt

SEQ ID NO: 292846 - DNA, 15 bp, Homo sapiens
atttacatataagat

SEQ ID NO: 292847 - DNA, 15 bp, Homo sapiens
tatttacatataaga

SEQ ID NO: 292848 - DNA, 15 bp, Homo sapiens
atatttacatataag

SEQ ID NO: 292849 - DNA, 15 bp, Homo sapiens
gatatttacatataa

SEQ ID NO: 292850 - DNA, 15 bp, Homo sapiens
agatatttacatata

SEQ ID NO: 292851 - DNA, 15 bp, Homo sapiens
cagatatttacatat

SEQ ID NO: 292852 - DNA, 15 bp, Homo sapiens
tcagatatttacata

SEQ ID NO: 292853 - DNA, 15 bp, Homo sapiens
ctcagatatttacat

SEQ ID NO: 292854 - DNA, 15 bp, Homo sapiens
tctcagatatttaca

SEQ ID NO: 292855 - DNA, 15 bp, Homo sapiens
atctcagatatttac

SEQ ID NO: 292856 - DNA, 15 bp, Homo sapiens
aatctcagatattta

SEQ ID NO: 292857 - DNA, 15 bp, Homo sapiens
aaatctcagatattt

SEQ ID NO: 292858 - DNA, 15 bp, Homo sapiens
gaaatctcagatatt

SEQ ID NO: 292859 - DNA, 15 bp, Homo sapiens
agaaatctcagatat

SEQ ID NO: 292860 - DNA, 15 bp, Homo sapiens
cagaaatctcagata

SEQ ID NO: 292861 - DNA, 15 bp, Homo sapiens
acagaaatctcagat

SEQ ID NO: 292862 - DNA, 15 bp, Homo sapiens
aacagaaatctcaga

SEQ ID NO: 292863 - DNA, 15 bp, Homo sapiens
caacagaaatctcag

SEQ ID NO: 292864 - DNA, 15 bp, Homo sapiens
gcaacagaaatctca

SEQ ID NO: 292865 - DNA, 15 bp, Homo sapiens
agcaacagaaatctc

SEQ ID NO: 292866 - DNA, 15 bp, Homo sapiens
tagcaacagaaatct

SEQ ID NO: 292867 - DNA, 15 bp, Homo sapiens
ttagcaacagaaatc

SEQ ID NO: 292868 - DNA, 15 bp, Homo sapiens
tttagcaacagaaat

SEQ ID NO: 292869 - DNA, 15 bp, Homo sapiens
ttttagcaacagaaa

SEQ ID NO: 292870 - DNA, 15 bp, Homo sapiens
tttttagcaacagaa

SEQ ID NO: 292871 - DNA, 15 bp, Homo sapiens
ttttttagcaacaga

SEQ ID NO: 292872 - DNA, 15 bp, Homo sapiens
tttttttagcaacag

SEQ ID NO: 292873 - DNA, 15 bp, Homo sapiens
ctttttttagcaaca

SEQ ID NO: 292874 - DNA, 15 bp, Homo sapiens
actttttttagcaac

SEQ ID NO: 292875 - DNA, 15 bp, Homo sapiens
aactttttttagcaa

SEQ ID NO: 292876 - DNA, 15 bp, Homo sapiens
taactttttttagca

SEQ ID NO: 292877 - DNA, 15 bp, Homo sapiens
gtaactttttttagc

SEQ ID NO: 292878 - DNA, 15 bp, Homo sapiens
tgtaactttttttag

SEQ ID NO: 292879 - DNA, 15 bp, Homo sapiens
ttgtaacttttttta

SEQ ID NO: 292880 - DNA, 15 bp, Homo sapiens
cttgtaacttttttt

SEQ ID NO: 292881 - DNA, 15 bp, Homo sapiens
acttgtaactttttt

SEQ ID NO: 292882 - DNA, 15 bp, Homo sapiens
cacttgtaacttttt

SEQ ID NO: 292883 - DNA, 15 bp, Homo sapiens
acacttgtaactttt

SEQ ID NO: 292884 - DNA, 15 bp, Homo sapiens
gacacttgtaacttt

SEQ ID NO: 292885 - DNA, 15 bp, Homo sapiens
tgacacttgtaactt

SEQ ID NO: 292886 - DNA, 15 bp, Homo sapiens
atgacacttgtaact

SEQ ID NO: 292887 - DNA, 15 bp, Homo sapiens
aatgacacttgtaac

SEQ ID NO: 292888 - DNA, 15 bp, Homo sapiens
taatgacacttgtaa

SEQ ID NO: 292889 - DNA, 15 bp, Homo sapiens
ttaatgacacttgta

SEQ ID NO: 292890 - DNA, 15 bp, Homo sapiens
attaatgacacttgt

SEQ ID NO: 292891 - DNA, 15 bp, Homo sapiens
tattaatgacacttg

SEQ ID NO: 292892 - DNA, 15 bp, Homo sapiens
gtattaatgacactt

SEQ ID NO: 292893 - DNA, 15 bp, Homo sapiens
agtattaatgacact

SEQ ID NO: 292894 - DNA, 15 bp, Homo sapiens
cagtattaatgacac

SEQ ID NO: 292895 - DNA, 15 bp, Homo sapiens
acagtattaatgaca

SEQ ID NO: 292896 - DNA, 15 bp, Homo sapiens
aacagtattaatgac

SEQ ID NO: 292897 - DNA, 15 bp, Homo sapiens
gaacagtattaatga

SEQ ID NO: 292898 - DNA, 15 bp, Homo sapiens
agaacagtattaatg

SEQ ID NO: 292899 - DNA, 15 bp, Homo sapiens
tagaacagtattaat

SEQ ID NO: 292900 - DNA, 15 bp, Homo sapiens
ttagaacagtattaa

SEQ ID NO: 292901 - DNA, 15 bp, Homo sapiens
attagaacagtatta

SEQ ID NO: 292902 - DNA, 15 bp, Homo sapiens
aattagaacagtatt

SEQ ID NO: 292903 - DNA, 15 bp, Homo sapiens
aaattagaacagtat

SEQ ID NO: 292904 - DNA, 15 bp, Homo sapiens
taaattagaacagta

SEQ ID NO: 292905 - DNA, 15 bp, Homo sapiens
ataaattagaacagt

SEQ ID NO: 292906 - DNA, 15 bp, Homo sapiens
aataaattagaacag

SEQ ID NO: 292907 - DNA, 15 bp, Homo sapiens
caataaattagaaca

SEQ ID NO: 292908 - DNA, 15 bp, Homo sapiens
acaataaattagaac

SEQ ID NO: 292909 - DNA, 15 bp, Homo sapiens
tacaataaattagaa

SEQ ID NO: 292910 - DNA, 15 bp, Homo sapiens
ctacaataaattaga

SEQ ID NO: 292911 - DNA, 15 bp, Homo sapiens
tctacaataaattag

SEQ ID NO: 292912 - DNA, 15 bp, Homo sapiens
ttctacaataaatta

SEQ ID NO: 292913 - DNA, 15 bp, Homo sapiens
gttctacaataaatt

SEQ ID NO: 292914 - DNA, 15 bp, Homo sapiens
tgttctacaataaat

SEQ ID NO: 292915 - DNA, 15 bp, Homo sapiens
gtgttctacaataaa

SEQ ID NO: 292916 - DNA, 15 bp, Homo sapiens
ggtgttctacaataa

SEQ ID NO: 292917 - DNA, 15 bp, Homo sapiens
aggtgttctacaata

SEQ ID NO: 292918 - DNA, 15 bp, Homo sapiens
caggtgttctacaat

SEQ ID NO: 292919 - DNA, 15 bp, Homo sapiens
tcaggtgttctacaa

SEQ ID NO: 292920 - DNA, 15 bp, Homo sapiens
atcaggtgttctaca

SEQ ID NO: 292921 - DNA, 15 bp, Homo sapiens
aatcaggtgttctac

SEQ ID NO: 292922 - DNA, 15 bp, Homo sapiens
gaatcaggtgttcta

SEQ ID NO: 292923 - DNA, 15 bp, Homo sapiens
agaatcaggtgttct

SEQ ID NO: 292924 - DNA, 15 bp, Homo sapiens
cagaatcaggtgttc

SEQ ID NO: 292925 - DNA, 15 bp, Homo sapiens
acagaatcaggtgtt

SEQ ID NO: 292926 - DNA, 15 bp, Homo sapiens
gacagaatcaggtgt

SEQ ID NO: 292927 - DNA, 15 bp, Homo sapiens
tgacagaatcaggtg

SEQ ID NO: 292928 - DNA, 15 bp, Homo sapiens
gtgacagaatcaggt

SEQ ID NO: 292929 - DNA, 15 bp, Homo sapiens
agtgacagaatcagg

SEQ ID NO: 292930 - DNA, 15 bp, Homo sapiens
cagtgacagaatcag

SEQ ID NO: 292931 - DNA, 15 bp, Homo sapiens
acagtgacagaatca

SEQ ID NO: 292932 - DNA, 15 bp, Homo sapiens
aacagtgacagaatc

SEQ ID NO: 292933 - DNA, 15 bp, Homo sapiens
gaacagtgacagaat

SEQ ID NO: 292934 - DNA, 15 bp, Homo sapiens
cgaacagtgacagaa

SEQ ID NO: 292935 - DNA, 15 bp, Homo sapiens
ccgaacagtgacaga

SEQ ID NO: 292936 - DNA, 15 bp, Homo sapiens
cccgaacagtgacag

SEQ ID NO: 292937 - DNA, 15 bp, Homo sapiens
ccccgaacagtgaca

SEQ ID NO: 292938 - DNA, 15 bp, Homo sapiens
accccgaacagtgac

SEQ ID NO: 292939 - DNA, 15 bp, Homo sapiens
caccccgaacagtga

SEQ ID NO: 292940 - DNA, 15 bp, Homo sapiens
gcaccccgaacagtg

SEQ ID NO: 292941 - DNA, 15 bp, Homo sapiens
ggcaccccgaacagt

SEQ ID NO: 292942 - DNA, 15 bp, Homo sapiens
tggcaccccgaacag

SEQ ID NO: 292943 - DNA, 15 bp, Homo sapiens
gtggcaccccgaaca

SEQ ID NO: 292944 - DNA, 15 bp, Homo sapiens
agtggcaccccgaac

SEQ ID NO: 292945 - DNA, 15 bp, Homo sapiens
aagtggcaccccgaa

SEQ ID NO: 292946 - DNA, 15 bp, Homo sapiens
caagtggcaccccga

SEQ ID NO: 292947 - DNA, 15 bp, Homo sapiens
acaagtggcaccccg

SEQ ID NO: 292948 - DNA, 15 bp, Homo sapiens
tacaagtggcacccc

SEQ ID NO: 292949 - DNA, 15 bp, Homo sapiens
ttacaagtggcaccc

SEQ ID NO: 292950 - DNA, 15 bp, Homo sapiens
gttacaagtggcacc

SEQ ID NO: 292951 - DNA, 15 bp, Homo sapiens
ggttacaagtggcac

SEQ ID NO: 292952 - DNA, 15 bp, Homo sapiens
aggttacaagtggca

SEQ ID NO: 292953 - DNA, 15 bp, Homo sapiens
caggttacaagtggc

SEQ ID NO: 292954 - DNA, 15 bp, Homo sapiens
gcaggttacaagtgg

SEQ ID NO: 292955 - DNA, 15 bp, Homo sapiens
ggcaggttacaagtg

SEQ ID NO: 292956 - DNA, 15 bp, Homo sapiens
tggcaggttacaagt

SEQ ID NO: 292957 - DNA, 15 bp, Homo sapiens
atggcaggttacaag

SEQ ID NO: 292958 - DNA, 15 bp, Homo sapiens
catggcaggttacaa

SEQ ID NO: 292959 - DNA, 15 bp, Homo sapiens
tcatggcaggttaca

SEQ ID NO: 292960 - DNA, 15 bp, Homo sapiens
atcatggcaggttac

SEQ ID NO: 292961 - DNA, 15 bp, Homo sapiens
gatcatggcaggtta

SEQ ID NO: 292962 - DNA, 15 bp, Homo sapiens
ggatcatggcaggtt

SEQ ID NO: 292963 - DNA, 15 bp, Homo sapiens
gggatcatggcaggt

SEQ ID NO: 292964 - DNA, 15 bp, Homo sapiens
agggatcatggcagg

SEQ ID NO: 292965 - DNA, 15 bp, Homo sapiens
cagggatcatggcag

SEQ ID NO: 292966 - DNA, 15 bp, Homo sapiens
ccagggatcatggca

SEQ ID NO: 292967 - DNA, 15 bp, Homo sapiens
accagggatcatggc

SEQ ID NO: 292968 - DNA, 15 bp, Homo sapiens
caccagggatcatgg

SEQ ID NO: 292969 - DNA, 15 bp, Homo sapiens
ccaccagggatcatg

SEQ ID NO: 292970 - DNA, 15 bp, Homo sapiens
tccaccagggatcat

SEQ ID NO: 292971 - DNA, 15 bp, Homo sapiens
gtccaccagggatca

SEQ ID NO: 292972 - DNA, 15 bp, Homo sapiens
agtccaccagggatc

SEQ ID NO: 292973 - DNA, 15 bp, Homo sapiens
cagtccaccagggat

SEQ ID NO: 292974 - DNA, 15 bp, Homo sapiens
tcagtccaccaggga

SEQ ID NO: 292975 - DNA, 15 bp, Homo sapiens
ttcagtccaccaggg

SEQ ID NO: 292976 - DNA, 15 bp, Homo sapiens
gttcagtccaccagg

SEQ ID NO: 292977 - DNA, 15 bp, Homo sapiens
tgttcagtccaccag

SEQ ID NO: 292978 - DNA, 15 bp, Homo sapiens
ttgttcagtccacca

SEQ ID NO: 292979 - DNA, 15 bp, Homo sapiens
tttgttcagtccacc

SEQ ID NO: 292980 - DNA, 15 bp, Homo sapiens
ctttgttcagtccac

SEQ ID NO: 292981 - DNA, 15 bp, Homo sapiens
actttgttcagtcca

SEQ ID NO: 292982 - DNA, 15 bp, Homo sapiens
cactttgttcagtcc

SEQ ID NO: 292983 - DNA, 15 bp, Homo sapiens
ccactttgttcagtc

SEQ ID NO: 292984 - DNA, 15 bp, Homo sapiens
cccactttgttcagt

SEQ ID NO: 292985 - DNA, 15 bp, Homo sapiens
ccccactttgttcag

SEQ ID NO: 292986 - DNA, 15 bp, Homo sapiens
gccccactttgttca

SEQ ID NO: 292987 - DNA, 15 bp, Homo sapiens
agccccactttgttc

SEQ ID NO: 292988 - DNA, 15 bp, Homo sapiens
tagccccactttgtt

SEQ ID NO: 292989 - DNA, 15 bp, Homo sapiens
ttagccccactttgt

SEQ ID NO: 292990 - DNA, 15 bp, Homo sapiens
gttagccccactttg

SEQ ID NO: 292991 - DNA, 15 bp, Homo sapiens
agttagccccacttt

SEQ ID NO: 292992 - DNA, 15 bp, Homo sapiens
cagttagccccactt

SEQ ID NO: 292993 - DNA, 15 bp, Homo sapiens
ccagttagccccact

SEQ ID NO: 292994 - DNA, 15 bp, Homo sapiens
cccagttagccccac

SEQ ID NO: 292995 - DNA, 15 bp, Homo sapiens
ccccagttagcccca

SEQ ID NO: 292996 - DNA, 15 bp, Homo sapiens
tccccagttagcccc

SEQ ID NO: 292997 - DNA, 15 bp, Homo sapiens
ttccccagttagccc

SEQ ID NO: 292998 - DNA, 15 bp, Homo sapiens
attccccagttagcc

SEQ ID NO: 292999 - DNA, 15 bp, Homo sapiens
tattccccagttagc

SEQ ID NO: 293000 - DNA, 15 bp, Homo sapiens
ttattccccagttag

SEQ ID NO: 293001 - DNA, 15 bp, Homo sapiens
tttattccccagtta

SEQ ID NO: 293002 - DNA, 15 bp, Homo sapiens
ttttattccccagtt

SEQ ID NO: 293003 - DNA, 15 bp, Homo sapiens
cttttattccccagt

SEQ ID NO: 293004 - DNA, 15 bp, Homo sapiens
acttttattccccag

SEQ ID NO: 293005 - DNA, 15 bp, Homo sapiens
gacttttattcccca

SEQ ID NO: 293006 - DNA, 15 bp, Homo sapiens
tgacttttattcccc

SEQ ID NO: 293007 - DNA, 15 bp, Homo sapiens
ttgacttttattccc

SEQ ID NO: 293008 - DNA, 15 bp, Homo sapiens
tttgacttttattcc

SEQ ID NO: 293009 - DNA, 15 bp, Homo sapiens
ctttgacttttattc

SEQ ID NO: 293010 - DNA, 15 bp, Homo sapiens
tctttgacttttatt

SEQ ID NO: 293011 - DNA, 15 bp, Homo sapiens
gtctttgacttttat

SEQ ID NO: 293012 - DNA, 15 bp, Homo sapiens
tgtctttgactttta

SEQ ID NO: 293013 - DNA, 15 bp, Homo sapiens
ttgtctttgactttt

SEQ ID NO: 293014 - DNA, 15 bp, Homo sapiens
cttgtctttgacttt

SEQ ID NO: 293015 - DNA, 15 bp, Homo sapiens
tcttgtctttgactt

SEQ ID NO: 293016 - DNA, 15 bp, Homo sapiens
ctcttgtctttgact

SEQ ID NO: 293017 - DNA, 15 bp, Homo sapiens
tctcttgtctttgac

SEQ ID NO: 293018 - DNA, 15 bp, Homo sapiens
ctctcttgtctttga

SEQ ID NO: 293019 - DNA, 15 bp, Homo sapiens
actctcttgtctttg

SEQ ID NO: 293020 - DNA, 15 bp, Homo sapiens
tactctcttgtcttt

SEQ ID NO: 293021 - DNA, 15 bp, Homo sapiens
atactctcttgtctt

SEQ ID NO: 293022 - DNA, 15 bp, Homo sapiens
tatactctcttgtct

SEQ ID NO: 293023 - DNA, 15 bp, Homo sapiens
atatactctcttgtc

SEQ ID NO: 293024 - DNA, 15 bp, Homo sapiens
aatatactctcttgt

SEQ ID NO: 293025 - DNA, 15 bp, Homo sapiens
caaatatactctctt

SEQ ID NO: 293026 - DNA, 15 bp, Homo sapiens
ccaaatatactctct

SEQ ID NO: 293027 - DNA, 15 bp, Homo sapiens
tccaaatatactctc

SEQ ID NO: 293028 - DNA, 15 bp, Homo sapiens
ttccaaatatactct

SEQ ID NO: 293029 - DNA, 15 bp, Homo sapiens
cttccaaatatactc

SEQ ID NO: 293030 - DNA, 15 bp, Homo sapiens
tcttccaaatatact

SEQ ID NO: 293031 - DNA, 15 bp, Homo sapiens
ttcttccaaatatac

SEQ ID NO: 293032 - DNA, 15 bp, Homo sapiens
cttcttccaaatata

SEQ ID NO: 293033 - DNA, 15 bp, Homo sapiens
ccttcttccaaatat

SEQ ID NO: 293034 - DNA, 15 bp, Homo sapiens
cccttcttccaaata

SEQ ID NO: 293035 - DNA, 15 bp, Homo sapiens
ccccttcttccaaat

SEQ ID NO: 293036 - DNA, 15 bp, Homo sapiens
accccttcttccaaa

SEQ ID NO: 293037 - DNA, 15 bp, Homo sapiens
aaccccttcttccaa

SEQ ID NO: 293038 - DNA, 15 bp, Homo sapiens
caaccccttcttcca

SEQ ID NO: 293039 - DNA, 15 bp, Homo sapiens
ccaaccccttcttcc

SEQ ID NO: 293040 - DNA, 15 bp, Homo sapiens
cccaaccccttcttc

SEQ ID NO: 293041 - DNA, 15 bp, Homo sapiens
ccccaaccccttctt

SEQ ID NO: 293042 - DNA, 15 bp, Homo sapiens
cccccaaccccttct

SEQ ID NO: 293043 - DNA, 15 bp, Homo sapiens
gcccccaaccccttc

SEQ ID NO: 293044 - DNA, 15 bp, Homo sapiens
tgcccccaacccctt

SEQ ID NO: 293045 - DNA, 15 bp, Homo sapiens
gtgcccccaacccct

SEQ ID NO: 293046 - DNA, 15 bp, Homo sapiens
ggtgcccccaacccc

SEQ ID NO: 293047 - DNA, 15 bp, Homo sapiens
aggtgcccccaaccc

SEQ ID NO: 293048 - DNA, 15 bp, Homo sapiens
gaggtgcccccaacc

SEQ ID NO: 293049 - DNA, 15 bp, Homo sapiens
cgaggtgcccccaac

SEQ ID NO: 293050 - DNA, 15 bp, Homo sapiens
gcgaggtgcccccaa

SEQ ID NO: 293051 - DNA, 15 bp, Homo sapiens
ggcgaggtgccccca

SEQ ID NO: 293052 - DNA, 15 bp, Homo sapiens
aggcgaggtgccccc

SEQ ID NO: 293053 - DNA, 15 bp, Homo sapiens
gaggcgaggtgcccc

SEQ ID NO: 293054 - DNA, 15 bp, Homo sapiens
agaggcgaggtgccc

SEQ ID NO: 293055 - DNA, 15 bp, Homo sapiens
tagaggcgaggtgcc

SEQ ID NO: 293056 - DNA, 15 bp, Homo sapiens
ctagaggcgaggtgc

SEQ ID NO: 293057 - DNA, 15 bp, Homo sapiens
actagaggcgaggtg

SEQ ID NO: 293058 - DNA, 15 bp, Homo sapiens
cactagaggcgaggt

SEQ ID NO: 293059 - DNA, 15 bp, Homo sapiens
ccactagaggcgagg

SEQ ID NO: 293060 - DNA, 15 bp, Homo sapiens
tccactagaggcgag

SEQ ID NO: 293061 - DNA, 15 bp, Homo sapiens
gtccactagaggcga

SEQ ID NO: 293062 - DNA, 15 bp, Homo sapiens
tgtccactagaggcg

SEQ ID NO: 293063 - DNA, 15 bp, Homo sapiens
ttgtccactagaggc

SEQ ID NO: 293064 - DNA, 15 bp, Homo sapiens
cttgtccactagagg

SEQ ID NO: 293065 - DNA, 15 bp, Homo sapiens
ccttgtccactagag

SEQ ID NO: 293066 - DNA, 15 bp, Homo sapiens
cccttgtccactaga

SEQ ID NO: 293067 - DNA, 15 bp, Homo sapiens
gcccttgtccactag

SEQ ID NO: 293068 - DNA, 15 bp, Homo sapiens
ggcccttgtccacta

SEQ ID NO: 293069 - DNA, 15 bp, Homo sapiens
gggcccttgtccact

SEQ ID NO: 293070 - DNA, 15 bp, Homo sapiens
agggcccttgtccac

SEQ ID NO: 293071 - DNA, 15 bp, Homo sapiens
cagggcccttgtcca

SEQ ID NO: 293072 - DNA, 15 bp, Homo sapiens
tcagggcccttgtcc

SEQ ID NO: 293073 - DNA, 15 bp, Homo sapiens
ctcagggcccttgtc

SEQ ID NO: 293074 - DNA, 15 bp, Homo sapiens
gctcagggcccttgt

SEQ ID NO: 293075 - DNA, 15 bp, Homo sapiens
agctcagggcccttg

SEQ ID NO: 293076 - DNA, 15 bp, Homo sapiens
cagctcagggccctt

SEQ ID NO: 293077 - DNA, 15 bp, Homo sapiens
acagctcagggccct

SEQ ID NO: 293078 - DNA, 15 bp, Homo sapiens
aacagctcagggccc

SEQ ID NO: 293079 - DNA, 15 bp, Homo sapiens
aaacagctcagggcc

SEQ ID NO: 293080 - DNA, 15 bp, Homo sapiens
gaaacagctcagggc

SEQ ID NO: 293081 - DNA, 15 bp, Homo sapiens
cgaaacagctcaggg

SEQ ID NO: 293082 - DNA, 15 bp, Homo sapiens
ccgaaacagctcagg

SEQ ID NO: 293083 - DNA, 15 bp, Homo sapiens
accgaaacagctcag

SEQ ID NO: 293084 - DNA, 15 bp, Homo sapiens
gaccgaaacagctca

SEQ ID NO: 293085 - DNA, 15 bp, Homo sapiens
ggaccgaaacagctc

SEQ ID NO: 293086 - DNA, 15 bp, Homo sapiens
aggaccgaaacagct

SEQ ID NO: 293087 - DNA, 15 bp, Homo sapiens
gaggaccgaaacagc

SEQ ID NO: 293088 - DNA, 15 bp, Homo sapiens
ggaggaccgaaacag

SEQ ID NO: 293089 - DNA, 15 bp, Homo sapiens
cggaggaccgaaaca

SEQ ID NO: 293090 - DNA, 15 bp, Homo sapiens
tcggaggaccgaaac

SEQ ID NO: 293091 - DNA, 15 bp, Homo sapiens
ttcggaggaccgaaa

SEQ ID NO: 293092 - DNA, 15 bp, Homo sapiens
attcggaggaccgaa

SEQ ID NO: 293093 - DNA, 15 bp, Homo sapiens
aattcggaggaccga

SEQ ID NO: 293094 - DNA, 15 bp, Homo sapiens
aaattcggaggaccg

SEQ ID NO: 293095 - DNA, 15 bp, Homo sapiens
taaattcggaggacc

SEQ ID NO: 293096 - DNA, 15 bp, Homo sapiens
ataaattcggaggac

SEQ ID NO: 293097 - DNA, 15 bp, Homo sapiens
aataaattcggagga

SEQ ID NO: 293098 - DNA, 15 bp, Homo sapiens
taataaattcggagg

SEQ ID NO: 293099 - DNA, 15 bp, Homo sapiens
ctaataaattcggag

SEQ ID NO: 293100 - DNA, 15 bp, Homo sapiens
cctaataaattcgga

SEQ ID NO: 293101 - DNA, 15 bp, Homo sapiens
acctaataaattcgg

SEQ ID NO: 293102 - DNA, 15 bp, Homo sapiens
tacctaataaattcg

SEQ ID NO: 293103 - DNA, 15 bp, Homo sapiens
ttacctaataaattc

SEQ ID NO: 293104 - DNA, 15 bp, Homo sapiens
tttacctaataaatt

SEQ ID NO: 293105 - DNA, 15 bp, Homo sapiens
ttttacctaataaat

SEQ ID NO: 293106 - DNA, 15 bp, Homo sapiens
cttttacctaataaa

SEQ ID NO: 293107 - DNA, 15 bp, Homo sapiens
tcttttacctaataa

SEQ ID NO: 293108 - DNA, 15 bp, Homo sapiens
ctcttttacctaata

SEQ ID NO: 293109 - DNA, 15 bp, Homo sapiens
tctcttttacctaat

SEQ ID NO: 293110 - DNA, 15 bp, Homo sapiens
atctcttttacctaa

SEQ ID NO: 293111 - DNA, 15 bp, Homo sapiens
tatctcttttaccta

SEQ ID NO: 293112 - DNA, 15 bp, Homo sapiens
ttatctcttttacct

SEQ ID NO: 293113 - DNA, 15 bp, Homo sapiens
gttatctcttttacc

SEQ ID NO: 293114 - DNA, 15 bp, Homo sapiens
cgttatctcttttac

SEQ ID NO: 293115 - DNA, 15 bp, Homo sapiens
tcgttatctctttta

SEQ ID NO: 293116 - DNA, 15 bp, Homo sapiens
ctcgttatctctttt

SEQ ID NO: 293117 - DNA, 15 bp, Homo sapiens
tctcgttatctcttt

SEQ ID NO: 293118 - DNA, 15 bp, Homo sapiens
ttctcgttatctctt

SEQ ID NO: 293119 - DNA, 15 bp, Homo sapiens
tttctcgttatctct

SEQ ID NO: 293120 - DNA, 15 bp, Homo sapiens
ctttctcgttatctc

SEQ ID NO: 293121 - DNA, 15 bp, Homo sapiens
cctttctcgttatct

SEQ ID NO: 293122 - DNA, 15 bp, Homo sapiens
ccctttctcgttatc

SEQ ID NO: 293123 - DNA, 15 bp, Homo sapiens
cccctttctcgttat

SEQ ID NO: 293124 - DNA, 15 bp, Homo sapiens
gcccctttctcgtta

SEQ ID NO: 293125 - DNA, 15 bp, Homo sapiens
tgcccctttctcgtt

SEQ ID NO: 293126 - DNA, 15 bp, Homo sapiens
ctgcccctttctcgt

SEQ ID NO: 293127 - DNA, 15 bp, Homo sapiens
cctgcccctttctcg

SEQ ID NO: 293128 - DNA, 15 bp, Homo sapiens
acctgcccctttctc

SEQ ID NO: 293129 - DNA, 15 bp, Homo sapiens
cacctgcccctttct

SEQ ID NO: 293130 - DNA, 15 bp, Homo sapiens
ccacctgcccctttc

SEQ ID NO: 293131 - DNA, 15 bp, Homo sapiens
accacctgccccttt

SEQ ID NO: 293132 - DNA, 15 bp, Homo sapiens
aaccacctgcccctt

SEQ ID NO: 293133 - DNA, 15 bp, Homo sapiens
caaccacctgcccct

SEQ ID NO: 293134 - DNA, 15 bp, Homo sapiens
acaaccacctgcccc

SEQ ID NO: 293135 - DNA, 15 bp, Homo sapiens
gacaaccacctgccc

SEQ ID NO: 293136 - DNA, 15 bp, Homo sapiens
cgacaaccacctgcc

SEQ ID NO: 293137 - DNA, 15 bp, Homo sapiens
ccgacaaccacctgc

SEQ ID NO: 293138 - DNA, 15 bp, Homo sapiens
gccgacaaccacctg

SEQ ID NO: 293139 - DNA, 15 bp, Homo sapiens
ggccgacaaccacct

SEQ ID NO: 293140 - DNA, 15 bp, Homo sapiens
tggccgacaaccacc

SEQ ID NO: 293141 - DNA, 15 bp, Homo sapiens
ctggccgacaaccac

SEQ ID NO: 293142 - DNA, 15 bp, Homo sapiens
gctggccgacaacca

SEQ ID NO: 293143 - DNA, 15 bp, Homo sapiens
tgctggccgacaacc

SEQ ID NO: 293144 - DNA, 15 bp, Homo sapiens
ctgctggccgacaac

SEQ ID NO: 293145 - DNA, 15 bp, Homo sapiens
actgctggccgacaa

SEQ ID NO: 293146 - DNA, 15 bp, Homo sapiens
aactgctggccgaca

SEQ ID NO: 293147 - DNA, 15 bp, Homo sapiens
aaactgctggccgac

SEQ ID NO: 293148 - DNA, 15 bp, Homo sapiens
caaactgctggccga

SEQ ID NO: 293149 - DNA, 15 bp, Homo sapiens
tcaaactgctggccg

SEQ ID NO: 293150 - DNA, 15 bp, Homo sapiens
ttcaaactgctggcc

SEQ ID NO: 293151 - DNA, 15 bp, Homo sapiens
attcaaactgctggc

SEQ ID NO: 293152 - DNA, 15 bp, Homo sapiens
gattcaaactgctgg

SEQ ID NO: 293153 - DNA, 15 bp, Homo sapiens
tgattcaaactgctg

SEQ ID NO: 293154 - DNA, 15 bp, Homo sapiens
gtgattcaaactgct

SEQ ID NO: 293155 - DNA, 15 bp, Homo sapiens
tgtgattcaaactgc

SEQ ID NO: 293156 - DNA, 15 bp, Homo sapiens
ctgtgattcaaactg

SEQ ID NO: 293157 - DNA, 15 bp, Homo sapiens
gctgtgattcaaact

SEQ ID NO: 293158 - DNA, 15 bp, Homo sapiens
tgctgtgattcaaac

SEQ ID NO: 293159 - DNA, 15 bp, Homo sapiens
ctgctgtgattcaaa

SEQ ID NO: 293160 - DNA, 15 bp, Homo sapiens
cctgctgtgattcaa

SEQ ID NO: 293161 - DNA, 15 bp, Homo sapiens
gcctgctgtgattca

SEQ ID NO: 293162 - DNA, 15 bp, Homo sapiens
agcctgctgtgattc

SEQ ID NO: 293163 - DNA, 15 bp, Homo sapiens
aagcctgctgtgatt

SEQ ID NO: 293164 - DNA, 15 bp, Homo sapiens
caagcctgctgtgat

SEQ ID NO: 293165 - DNA, 15 bp, Homo sapiens
gcaagcctgctgtga

SEQ ID NO: 293166 - DNA, 15 bp, Homo sapiens
tgcaagcctgctgtg

SEQ ID NO: 293167 - DNA, 15 bp, Homo sapiens
ttgcaagcctgctgt

SEQ ID NO: 293168 - DNA, 15 bp, Homo sapiens
cttgcaagcctgctg

SEQ ID NO: 293169 - DNA, 15 bp, Homo sapiens
tcttgcaagcctgct

SEQ ID NO: 293170 - DNA, 15 bp, Homo sapiens
gtcttgcaagcctgc

SEQ ID NO: 293171 - DNA, 15 bp, Homo sapiens
agtcttgcaagcctg

SEQ ID NO: 293172 - DNA, 15 bp, Homo sapiens
cagtcttgcaagcct

SEQ ID NO: 293173 - DNA, 15 bp, Homo sapiens
gcagtcttgcaagcc

SEQ ID NO: 293174 - DNA, 15 bp, Homo sapiens
tgcagtcttgcaagc

SEQ ID NO: 293175 - DNA, 15 bp, Homo sapiens
atgcagtcttgcaag

SEQ ID NO: 293176 - DNA, 15 bp, Homo sapiens
aatgcagtcttgcaa

SEQ ID NO: 293177 - DNA, 15 bp, Homo sapiens
gaatgcagtcttgca

SEQ ID NO: 293178 - DNA, 15 bp, Homo sapiens
agaatgcagtcttgc

SEQ ID NO: 293179 - DNA, 15 bp, Homo sapiens
aagaatgcagtcttg

SEQ ID NO: 293180 - DNA, 15 bp, Homo sapiens
gaagaatgcagtctt

SEQ ID NO: 293181 - DNA, 15 bp, Homo sapiens
tgaagaatgcagtct

SEQ ID NO: 293182 - DNA, 15 bp, Homo sapiens
ttgaagaatgcagtc

SEQ ID NO: 293183 - DNA, 15 bp, Homo sapiens
tttgaagaatgcagt

SEQ ID NO: 293184 - DNA, 15 bp, Homo sapiens
gtttgaagaatgcag

SEQ ID NO: 293185 - DNA, 15 bp, Homo sapiens
tgtttgaagaatgca

SEQ ID NO: 293186 - DNA, 15 bp, Homo sapiens
ttgtttgaagaatgc

SEQ ID NO: 293187 - DNA, 15 bp, Homo sapiens
attgtttgaagaatg

SEQ ID NO: 293188 - DNA, 15 bp, Homo sapiens
tattgtttgaagaat

SEQ ID NO: 293189 - DNA, 15 bp, Homo sapiens
ctattgtttgaagaa

SEQ ID NO: 293190 - DNA, 15 bp, Homo sapiens
cctattgtttgaaga

SEQ ID NO: 293191 - DNA, 15 bp, Homo sapiens
gcctattgtttgaag

SEQ ID NO: 293192 - DNA, 15 bp, Homo sapiens
tgcctattgtttgaa

SEQ ID NO: 293193 - DNA, 15 bp, Homo sapiens
gtgcctattgtttga

SEQ ID NO: 293194 - DNA, 15 bp, Homo sapiens
agtgcctattgtttg

SEQ ID NO: 293195 - DNA, 15 bp, Homo sapiens
tagtgcctattgttt

SEQ ID NO: 293196 - DNA, 15 bp, Homo sapiens
ctagtgcctattgtt

SEQ ID NO: 293197 - DNA, 15 bp, Homo sapiens
tctagtgcctattgt

SEQ ID NO: 293198 - DNA, 15 bp, Homo sapiens
atctagtgcctattg

SEQ ID NO: 293199 - DNA, 15 bp, Homo sapiens
aatctagtgcctatt

SEQ ID NO: 293200 - DNA, 15 bp, Homo sapiens
aaatctagtgcctat

SEQ ID NO: 293201 - DNA, 15 bp, Homo sapiens
gaaatctagtgccta

SEQ ID NO: 293202 - DNA, 15 bp, Homo sapiens
ggaaatctagtgcct

SEQ ID NO: 293203 - DNA, 15 bp, Homo sapiens
gggaaatctagtgcc

SEQ ID NO: 293204 - DNA, 15 bp, Homo sapiens
tgggaaatctagtgc

SEQ ID NO: 293205 - DNA, 15 bp, Homo sapiens
ctgggaaatctagtg

SEQ ID NO: 293206 - DNA, 15 bp, Homo sapiens
actgggaaatctagt

SEQ ID NO: 293207 - DNA, 15 bp, Homo sapiens
tactgggaaatctag

SEQ ID NO: 293208 - DNA, 15 bp, Homo sapiens
ctactgggaaatcta

SEQ ID NO: 293209 - DNA, 15 bp, Homo sapiens
tctactgggaaatct

SEQ ID NO: 293210 - DNA, 15 bp, Homo sapiens
atctactgggaaatc

SEQ ID NO: 293211 - DNA, 15 bp, Homo sapiens
tatctactgggaaat

SEQ ID NO: 293212 - DNA, 15 bp, Homo sapiens
ttatctactgggaaa

SEQ ID NO: 293213 - DNA, 15 bp, Homo sapiens
gttatctactgggaa

SEQ ID NO: 293214 - DNA, 15 bp, Homo sapiens
agttatctactggga

SEQ ID NO: 293215 - DNA, 15 bp, Homo sapiens
aagttatctactggg

SEQ ID NO: 293216 - DNA, 15 bp, Homo sapiens
aaagttatctactgg

SEQ ID NO: 293217 - DNA, 15 bp, Homo sapiens
taaagttatctactg

SEQ ID NO: 293218 - DNA, 15 bp, Homo sapiens
ttaaagttatctact

SEQ ID NO: 293219 - DNA, 15 bp, Homo sapiens
cttaaagttatctac

SEQ ID NO: 293220 - DNA, 15 bp, Homo sapiens
ccttaaagttatcta

SEQ ID NO: 293221 - DNA, 15 bp, Homo sapiens
tccttaaagttatct

SEQ ID NO: 293222 - DNA, 15 bp, Homo sapiens
ctccttaaagttatc

SEQ ID NO: 293223 - DNA, 15 bp, Homo sapiens
gctccttaaagttat

SEQ ID NO: 293224 - DNA, 15 bp, Homo sapiens
ggctccttaaagtta

SEQ ID NO: 293225 - DNA, 15 bp, Homo sapiens
gggctccttaaagtt

SEQ ID NO: 293226 - DNA, 15 bp, Homo sapiens
tgggctccttaaagt

SEQ ID NO: 293227 - DNA, 15 bp, Homo sapiens
ctgggctccttaaag

SEQ ID NO: 293228 - DNA, 15 bp, Homo sapiens
gctgggctccttaaa

SEQ ID NO: 293229 - DNA, 15 bp, Homo sapiens
tgctgggctccttaa

SEQ ID NO: 293230 - DNA, 15 bp, Homo sapiens
ttgctgggctcctta

SEQ ID NO: 293231 - DNA, 15 bp, Homo sapiens
tttgctgggctcctt

SEQ ID NO: 293232 - DNA, 15 bp, Homo sapiens
gtttgctgggctcct

SEQ ID NO: 293233 - DNA, 15 bp, Homo sapiens
ggtttgctgggctcc

SEQ ID NO: 293234 - DNA, 15 bp, Homo sapiens
aggtttgctgggctc

SEQ ID NO: 293235 - DNA, 15 bp, Homo sapiens
gaggtttgctgggct

SEQ ID NO: 293236 - DNA, 15 bp, Homo sapiens
ggaggtttgctgggc

SEQ ID NO: 293237 - DNA, 15 bp, Homo sapiens
aggaggtttgctggg

SEQ ID NO: 293238 - DNA, 15 bp, Homo sapiens
caggaggtttgctgg

SEQ ID NO: 293239 - DNA, 15 bp, Homo sapiens
ccaggaggtttgctg

SEQ ID NO: 293240 - DNA, 15 bp, Homo sapiens
gccaggaggtttgct

SEQ ID NO: 293241 - DNA, 15 bp, Homo sapiens
ggccaggaggtttgc

SEQ ID NO: 293242 - DNA, 15 bp, Homo sapiens
gggccaggaggtttg

SEQ ID NO: 293243 - DNA, 15 bp, Homo sapiens
agggccaggaggttt

SEQ ID NO: 293244 - DNA, 15 bp, Homo sapiens
aagggccaggaggtt

SEQ ID NO: 293245 - DNA, 15 bp, Homo sapiens
taagggccaggaggt

SEQ ID NO: 293246 - DNA, 15 bp, Homo sapiens
ctaagggccaggagg

SEQ ID NO: 293247 - DNA, 15 bp, Homo sapiens
gctaagggccaggag

SEQ ID NO: 293248 - DNA, 15 bp, Homo sapiens
tgctaagggccagga

SEQ ID NO: 293249 - DNA, 15 bp, Homo sapiens
ttgctaagggccagg

SEQ ID NO: 293250 - DNA, 15 bp, Homo sapiens
tttgctaagggccag

SEQ ID NO: 293251 - DNA, 15 bp, Homo sapiens
gtttgctaagggcca

SEQ ID NO: 293252 - DNA, 15 bp, Homo sapiens
ggtttgctaagggcc

SEQ ID NO: 293253 - DNA, 15 bp, Homo sapiens
aggtttgctaagggc

SEQ ID NO: 293254 - DNA, 15 bp, Homo sapiens
gaggtttgctaaggg

SEQ ID NO: 293255 - DNA, 15 bp, Homo sapiens
ggaggtttgctaagg

SEQ ID NO: 293256 - DNA, 15 bp, Homo sapiens
aggaggtttgctaag

SEQ ID NO: 293257 - DNA, 15 bp, Homo sapiens
caggaggtttgctaa

SEQ ID NO: 293258 - DNA, 15 bp, Homo sapiens
ccaggaggtttgcta

SEQ ID NO: 293259 - DNA, 15 bp, Homo sapiens
tccaggaggtttgct

SEQ ID NO: 293260 - DNA, 15 bp, Homo sapiens
ctccaggaggtttgc

SEQ ID NO: 293261 - DNA, 15 bp, Homo sapiens
cctccaggaggtttg

SEQ ID NO: 293262 - DNA, 15 bp, Homo sapiens
gcctccaggaggttt

SEQ ID NO: 293263 - DNA, 15 bp, Homo sapiens
tgcctccaggaggtt

SEQ ID NO: 293264 - DNA, 15 bp, Homo sapiens
atgcctccaggaggt

SEQ ID NO: 293265 - DNA, 15 bp, Homo sapiens
catgcctccaggagg

SEQ ID NO: 293266 - DNA, 15 bp, Homo sapiens
gcatgcctccaggag

SEQ ID NO: 293267 - DNA, 15 bp, Homo sapiens
cgcatgcctccagga

SEQ ID NO: 293268 - DNA, 15 bp, Homo sapiens
gcgcatgcctccagg

SEQ ID NO: 293269 - DNA, 15 bp, Homo sapiens
tgcgcatgcctccag

SEQ ID NO: 293270 - DNA, 15 bp, Homo sapiens
ctgcgcatgcctcca

SEQ ID NO: 293271 - DNA, 15 bp, Homo sapiens
actgcgcatgcctcc

SEQ ID NO: 293272 - DNA, 15 bp, Homo sapiens
gactgcgcatgcctc

SEQ ID NO: 293273 - DNA, 15 bp, Homo sapiens
ggactgcgcatgcct

SEQ ID NO: 293274 - DNA, 15 bp, Homo sapiens
aggactgcgcatgcc

SEQ ID NO: 293275 - DNA, 15 bp, Homo sapiens
caggactgcgcatgc

SEQ ID NO: 293276 - DNA, 15 bp, Homo sapiens
tcaggactgcgcatg

SEQ ID NO: 293277 - DNA, 15 bp, Homo sapiens
ctcaggactgcgcat

SEQ ID NO: 293278 - DNA, 15 bp, Homo sapiens
actcaggactgcgca

SEQ ID NO: 293279 - DNA, 15 bp, Homo sapiens
aactcaggactgcgc

SEQ ID NO: 293280 - DNA, 15 bp, Homo sapiens
aaactcaggactgcg

SEQ ID NO: 293281 - DNA, 15 bp, Homo sapiens
caaactcaggactgc

SEQ ID NO: 293282 - DNA, 15 bp, Homo sapiens
gcaaactcaggactg

SEQ ID NO: 293283 - DNA, 15 bp, Homo sapiens
agcaaactcaggact

SEQ ID NO: 293284 - DNA, 15 bp, Homo sapiens
gagcaaactcaggac

SEQ ID NO: 293285 - DNA, 15 bp, Homo sapiens
tgagcaaactcagga

SEQ ID NO: 293286 - DNA, 15 bp, Homo sapiens
gtgagcaaactcagg

SEQ ID NO: 293287 - DNA, 15 bp, Homo sapiens
tgtgagcaaactcag

SEQ ID NO: 293288 - DNA, 15 bp, Homo sapiens
atgtgagcaaactca

SEQ ID NO: 293289 - DNA, 15 bp, Homo sapiens
aatgtgagcaaactc

SEQ ID NO: 293290 - DNA, 15 bp, Homo sapiens
gaatgtgagcaaact

SEQ ID NO: 293291 - DNA, 15 bp, Homo sapiens
agaatgtgagcaaac

SEQ ID NO: 293292 - DNA, 15 bp, Homo sapiens
cagaatgtgagcaaa

SEQ ID NO: 293293 - DNA, 15 bp, Homo sapiens
gcagaatgtgagcaa

SEQ ID NO: 293294 - DNA, 15 bp, Homo sapiens
tgcagaatgtgagca

SEQ ID NO: 293295 - DNA, 15 bp, Homo sapiens
atgcagaatgtgagc

SEQ ID NO: 293296 - DNA, 15 bp, Homo sapiens
aatgcagaatgtgag

SEQ ID NO: 293297 - DNA, 15 bp, Homo sapiens
gaatgcagaatgtga

SEQ ID NO: 293298 - DNA, 15 bp, Homo sapiens
tgaatgcagaatgtg

SEQ ID NO: 293299 - DNA, 15 bp, Homo sapiens
gtgaatgcagaatgt

SEQ ID NO: 293300 - DNA, 15 bp, Homo sapiens
cgtgaatgcagaatg

SEQ ID NO: 293301 - DNA, 15 bp, Homo sapiens
tcgtgaatgcagaat

SEQ ID NO: 293302 - DNA, 15 bp, Homo sapiens
atcgtgaatgcagaa

SEQ ID NO: 293303 - DNA, 15 bp, Homo sapiens
tatcgtgaatgcaga

SEQ ID NO: 293304 - DNA, 15 bp, Homo sapiens
ttatcgtgaatgcag

SEQ ID NO: 293305 - DNA, 15 bp, Homo sapiens
tttatcgtgaatgca

SEQ ID NO: 293306 - DNA, 15 bp, Homo sapiens
gtttatcgtgaatgc

SEQ ID NO: 293307 - DNA, 15 bp, Homo sapiens
tgtttatcgtgaatg

SEQ ID NO: 293308 - DNA, 15 bp, Homo sapiens
ctgtttatcgtgaat

SEQ ID NO: 293309 - DNA, 15 bp, Homo sapiens
actgtttatcgtgaa

SEQ ID NO: 293310 - DNA, 15 bp, Homo sapiens
aactgtttatcgtga

SEQ ID NO: 293311 - DNA, 15 bp, Homo sapiens
aaactgtttatcgtg

SEQ ID NO: 293312 - DNA, 15 bp, Homo sapiens
caaactgtttatcgt

SEQ ID NO: 293313 - DNA, 15 bp, Homo sapiens
gcaaactgtttatcg

SEQ ID NO: 293314 - DNA, 15 bp, Homo sapiens
agcaaactgtttatc

SEQ ID NO: 293315 - DNA, 15 bp, Homo sapiens
cagcaaactgtttat

SEQ ID NO: 293316 - DNA, 15 bp, Homo sapiens
acagcaaactgttta

SEQ ID NO: 293317 - DNA, 15 bp, Homo sapiens
aacagcaaactgttt

SEQ ID NO: 293318 - DNA, 15 bp, Homo sapiens
aaacagcaaactgtt

SEQ ID NO: 293319 - DNA, 15 bp, Homo sapiens
caaacagcaaactgt

SEQ ID NO: 293320 - DNA, 15 bp, Homo sapiens
tcaaacagcaaactg

SEQ ID NO: 293321 - DNA, 15 bp, Homo sapiens
atcaaacagcaaact

SEQ ID NO: 293322 - DNA, 15 bp, Homo sapiens
gatcaaacagcaaac

SEQ ID NO: 293323 - DNA, 15 bp, Homo sapiens
tgatcaaacagcaaa

SEQ ID NO: 293324 - DNA, 15 bp, Homo sapiens
atgatcaaacagcaa

SEQ ID NO: 293325 - DNA, 15 bp, Homo sapiens
tatgatcaaacagca

SEQ ID NO: 293326 - DNA, 15 bp, Homo sapiens
atatgatcaaacagc

SEQ ID NO: 293327 - DNA, 15 bp, Homo sapiens
tatatgatcaaacag

SEQ ID NO: 293328 - DNA, 15 bp, Homo sapiens
ctatatgatcaaaca

SEQ ID NO: 293329 - DNA, 15 bp, Homo sapiens
gctatatgatcaaac

SEQ ID NO: 293330 - DNA, 15 bp, Homo sapiens
ggctatatgatcaaa

SEQ ID NO: 293331 - DNA, 15 bp, Homo sapiens
aggctatatgatcaa

SEQ ID NO: 293332 - DNA, 15 bp, Homo sapiens
gaggctatatgatca

SEQ ID NO: 293333 - DNA, 15 bp, Homo sapiens
ggaggctatatgatc

SEQ ID NO: 293334 - DNA, 15 bp, Homo sapiens
tggaggctatatgat

SEQ ID NO: 293335 - DNA, 15 bp, Homo sapiens
ctggaggctatatga

SEQ ID NO: 293336 - DNA, 15 bp, Homo sapiens
actggaggctatatg

SEQ ID NO: 293337 - DNA, 15 bp, Homo sapiens
cactggaggctatat

SEQ ID NO: 293338 - DNA, 15 bp, Homo sapiens
ccactggaggctata

SEQ ID NO: 293339 - DNA, 15 bp, Homo sapiens
tccactggaggctat

SEQ ID NO: 293340 - DNA, 15 bp, Homo sapiens
ttccactggaggcta

SEQ ID NO: 293341 - DNA, 15 bp, Homo sapiens
attccactggaggct

SEQ ID NO: 293342 - DNA, 15 bp, Homo sapiens
cattccactggaggc

SEQ ID NO: 293343 - DNA, 15 bp, Homo sapiens
gcattccactggagg

SEQ ID NO: 293344 - DNA, 15 bp, Homo sapiens
agcattccactggag

SEQ ID NO: 293345 - DNA, 15 bp, Homo sapiens
cagcattccactgga

SEQ ID NO: 293346 - DNA, 15 bp, Homo sapiens
tcagcattccactgg

SEQ ID NO: 293347 - DNA, 15 bp, Homo sapiens
ctcagcattccactg

SEQ ID NO: 293348 - DNA, 15 bp, Homo sapiens
actcagcattccact

SEQ ID NO: 293349 - DNA, 15 bp, Homo sapiens
aactcagcattccac

SEQ ID NO: 293350 - DNA, 15 bp, Homo sapiens
caactcagcattcca

SEQ ID NO: 293351 - DNA, 15 bp, Homo sapiens
ccaactcagcattcc

SEQ ID NO: 293352 - DNA, 15 bp, Homo sapiens
accaactcagcattc

SEQ ID NO: 293353 - DNA, 15 bp, Homo sapiens
gaccaactcagcatt

SEQ ID NO: 293354 - DNA, 15 bp, Homo sapiens
tgaccaactcagcat

SEQ ID NO: 293355 - DNA, 15 bp, Homo sapiens
atgaccaactcagca

SEQ ID NO: 293356 - DNA, 15 bp, Homo sapiens
catgaccaactcagc

SEQ ID NO: 293357 - DNA, 15 bp, Homo sapiens
acatgaccaactcag

SEQ ID NO: 293358 - DNA, 15 bp, Homo sapiens
gacatgaccaactca

SEQ ID NO: 293359 - DNA, 15 bp, Homo sapiens
ggacatgaccaactc

SEQ ID NO: 293360 - DNA, 15 bp, Homo sapiens
gggacatgaccaact

SEQ ID NO: 293361 - DNA, 15 bp, Homo sapiens
tgggacatgaccaac

SEQ ID NO: 293362 - DNA, 15 bp, Homo sapiens
atgggacatgaccaa

SEQ ID NO: 293363 - DNA, 15 bp, Homo sapiens
catgggacatgacca

SEQ ID NO: 293364 - DNA, 15 bp, Homo sapiens
ccatgggacatgacc

SEQ ID NO: 293365 - DNA, 15 bp, Homo sapiens
cccatgggacatgac

SEQ ID NO: 293366 - DNA, 15 bp, Homo sapiens
gcccatgggacatga

SEQ ID NO: 293367 - DNA, 15 bp, Homo sapiens
ggcccatgggacatg

SEQ ID NO: 293368 - DNA, 15 bp, Homo sapiens
aggcccatgggacat

SEQ ID NO: 293369 - DNA, 15 bp, Homo sapiens
aaggcccatgggaca

SEQ ID NO: 293370 - DNA, 15 bp, Homo sapiens
aaaggcccatgggac

SEQ ID NO: 293371 - DNA, 15 bp, Homo sapiens
caaaggcccatggga

SEQ ID NO: 293372 - DNA, 15 bp, Homo sapiens
ccaaaggcccatggg

SEQ ID NO: 293373 - DNA, 15 bp, Homo sapiens
gccaaaggcccatgg

SEQ ID NO: 293374 - DNA, 15 bp, Homo sapiens
agccaaaggcccatg

SEQ ID NO: 293375 - DNA, 15 bp, Homo sapiens
gagccaaaggcccat

SEQ ID NO: 293376 - DNA, 15 bp, Homo sapiens
ggagccaaaggccca

SEQ ID NO: 293377 - DNA, 15 bp, Homo sapiens
gggagccaaaggccc

SEQ ID NO: 293378 - DNA, 15 bp, Homo sapiens
agggagccaaaggcc

SEQ ID NO: 293379 - DNA, 15 bp, Homo sapiens
tagggagccaaaggc

SEQ ID NO: 293380 - DNA, 15 bp, Homo sapiens
gtagggagccaaagg

SEQ ID NO: 293381 - DNA, 15 bp, Homo sapiens
tgtagggagccaaag

SEQ ID NO: 293382 - DNA, 15 bp, Homo sapiens
ctgtagggagccaaa

SEQ ID NO: 293383 - DNA, 15 bp, Homo sapiens
actgtagggagccaa

SEQ ID NO: 293384 - DNA, 15 bp, Homo sapiens
aactgtagggagcca

SEQ ID NO: 293385 - DNA, 15 bp, Homo sapiens
aaactgtagggagcc

SEQ ID NO: 293386 - DNA, 15 bp, Homo sapiens
taaactgtagggagc

SEQ ID NO: 293387 - DNA, 15 bp, Homo sapiens
ataaactgtagggag

SEQ ID NO: 293388 - DNA, 15 bp, Homo sapiens
aataaactgtaggga

SEQ ID NO: 293389 - DNA, 15 bp, Homo sapiens
caataaactgtaggg

SEQ ID NO: 293390 - DNA, 15 bp, Homo sapiens
gcaataaactgtagg

SEQ ID NO: 293391 - DNA, 15 bp, Homo sapiens
agcaataaactgtag

SEQ ID NO: 293392 - DNA, 15 bp, Homo sapiens
tagcaataaactgta

SEQ ID NO: 293393 - DNA, 15 bp, Homo sapiens
atagcaataaactgt

SEQ ID NO: 293394 - DNA, 15 bp, Homo sapiens
tatagcaataaactg

SEQ ID NO: 293395 - DNA, 15 bp, Homo sapiens
atatagcaataaact

SEQ ID NO: 293396 - DNA, 15 bp, Homo sapiens
aatatagcaataaac

SEQ ID NO: 293397 - DNA, 15 bp, Homo sapiens
gaatatagcaataaa

SEQ ID NO: 293398 - DNA, 15 bp, Homo sapiens
tgaatatagcaataa

SEQ ID NO: 293399 - DNA, 15 bp, Homo sapiens
atgaatatagcaata

SEQ ID NO: 293400 - DNA, 15 bp, Homo sapiens
tatgaatatagcaat

SEQ ID NO: 293401 - DNA, 15 bp, Homo sapiens
ttatgaatatagcaa

SEQ ID NO: 293402 - DNA, 15 bp, Homo sapiens
attatgaatatagca

SEQ ID NO: 293403 - DNA, 15 bp, Homo sapiens
aattatgaatatagc

SEQ ID NO: 293404 - DNA, 15 bp, Homo sapiens
taattatgaatatag

SEQ ID NO: 293405 - DNA, 15 bp, Homo sapiens
ttaattatgaatata

SEQ ID NO: 293406 - DNA, 15 bp, Homo sapiens
tttaattatgaatat

SEQ ID NO: 293407 - DNA, 15 bp, Homo sapiens
ctttaattatgaata

SEQ ID NO: 293408 - DNA, 15 bp, Homo sapiens
cctttaattatgaat

SEQ ID NO: 293409 - DNA, 15 bp, Homo sapiens
tcctttaattatgaa

SEQ ID NO: 293410 - DNA, 15 bp, Homo sapiens
ttcctttaattatga

SEQ ID NO: 293411 - DNA, 15 bp, Homo sapiens
tttcctttaattatg

SEQ ID NO: 293412 - DNA, 15 bp, Homo sapiens
atttcctttaattat

SEQ ID NO: 293413 - DNA, 15 bp, Homo sapiens
catttcctttaatta

SEQ ID NO: 293414 - DNA, 15 bp, Homo sapiens
gcatttcctttaatt

SEQ ID NO: 293415 - DNA, 15 bp, Homo sapiens
ggcatttcctttaat

SEQ ID NO: 293416 - DNA, 15 bp, Homo sapiens
tggcatttcctttaa

SEQ ID NO: 293417 - DNA, 15 bp, Homo sapiens
ttggcatttccttta

SEQ ID NO: 293418 - DNA, 15 bp, Homo sapiens
tttggcatttccttt

SEQ ID NO: 293419 - DNA, 15 bp, Homo sapiens
atttggcatttcctt

SEQ ID NO: 293420 - DNA, 15 bp, Homo sapiens
aatttggcatttcct

SEQ ID NO: 293421 - DNA, 15 bp, Homo sapiens
aaatttggcatttcc

SEQ ID NO: 293422 - DNA, 15 bp, Homo sapiens
caaatttggcatttc

SEQ ID NO: 293423 - DNA, 15 bp, Homo sapiens
tcaaatttggcattt

SEQ ID NO: 293424 - DNA, 15 bp, Homo sapiens
ttcaaatttggcatt

SEQ ID NO: 293425 - DNA, 15 bp, Homo sapiens
attcaaatttggcat

SEQ ID NO: 293426 - DNA, 15 bp, Homo sapiens
aattcaaatttggca

SEQ ID NO: 293427 - DNA, 15 bp, Homo sapiens
taattcaaatttggc

SEQ ID NO: 293428 - DNA, 15 bp, Homo sapiens
ctaattcaaatttgg

SEQ ID NO: 293429 - DNA, 15 bp, Homo sapiens
tctaattcaaatttg

SEQ ID NO: 293430 - DNA, 15 bp, Homo sapiens
ctctaattcaaattt

SEQ ID NO: 293431 - DNA, 15 bp, Homo sapiens
cctctaattcaaatt

SEQ ID NO: 293432 - DNA, 15 bp, Homo sapiens
acctctaattcaaat

SEQ ID NO: 293433 - DNA, 15 bp, Homo sapiens
aacctctaattcaaa

SEQ ID NO: 293434 - DNA, 15 bp, Homo sapiens
taacctctaattcaa

SEQ ID NO: 293435 - DNA, 15 bp, Homo sapiens
ttaacctctaattca

SEQ ID NO: 293436 - DNA, 15 bp, Homo sapiens
attaacctctaattc

SEQ ID NO: 293437 - DNA, 15 bp, Homo sapiens
tattaacctctaatt

SEQ ID NO: 293438 - DNA, 15 bp, Homo sapiens
ttattaacctctaat

SEQ ID NO: 293439 - DNA, 15 bp, Homo sapiens
tttattaacctctaa

SEQ ID NO: 293440 - DNA, 15 bp, Homo sapiens
ttttattaacctcta

SEQ ID NO: 293441 - DNA, 15 bp, Homo sapiens
tttttattaacctct

SEQ ID NO: 293442 - DNA, 15 bp, Homo sapiens
atttttattaacctc

SEQ ID NO: 293443 - DNA, 15 bp, Homo sapiens
tatttttattaacct

SEQ ID NO: 293444 - DNA, 15 bp, Homo sapiens
ttatttttattaacc

SEQ ID NO: 293445 - DNA, 15 bp, Homo sapiens
tttatttttattaac

SEQ ID NO: 293446 - DNA, 15 bp, Homo sapiens
ctttatttttattaa

SEQ ID NO: 293447 - DNA, 15 bp, Homo sapiens
tctttatttttatta

SEQ ID NO: 293448 - DNA, 15 bp, Homo sapiens
atctttatttttatt

SEQ ID NO: 293449 - DNA, 15 bp, Homo sapiens
catctttatttttat

SEQ ID NO: 293450 - DNA, 15 bp, Homo sapiens
acatctttattttta

SEQ ID NO: 293451 - DNA, 15 bp, Homo sapiens
tacatctttattttt

SEQ ID NO: 293452 - DNA, 15 bp, Homo sapiens
ttacatctttatttt

SEQ ID NO: 293453 - DNA, 15 bp, Homo sapiens
attacatctttattt

SEQ ID NO: 293454 - DNA, 15 bp, Homo sapiens
aattacatctttatt

SEQ ID NO: 293455 - DNA, 15 bp, Homo sapiens
aaattacatctttat

SEQ ID NO: 293456 - DNA, 15 bp, Homo sapiens
aaaattacatcttta

SEQ ID NO: 293457 - DNA, 15 bp, Homo sapiens
aaaaattacatcttt

SEQ ID NO: 293458 - DNA, 15 bp, Homo sapiens
aaaaaattacatctt

SEQ ID NO: 293459 - DNA, 15 bp, Homo sapiens
aaaaaaattacatct

SEQ ID NO: 293460 - DNA, 15 bp, Homo sapiens
caaaaaaattacatc

SEQ ID NO: 293461 - DNA, 15 bp, Homo sapiens
ccaaaaaaattacat

SEQ ID NO: 293462 - DNA, 15 bp, Homo sapiens
accaaaaaaattaca

SEQ ID NO: 293463 - DNA, 15 bp, Homo sapiens
gaccaaaaaaattac

SEQ ID NO: 293464 - DNA, 15 bp, Homo sapiens
ggaccaaaaaaatta

SEQ ID NO: 293465 - DNA, 15 bp, Homo sapiens
tggaccaaaaaaatt

SEQ ID NO: 293466 - DNA, 15 bp, Homo sapiens
ttggaccaaaaaaat

SEQ ID NO: 293467 - DNA, 15 bp, Homo sapiens
tttggaccaaaaaaa

SEQ ID NO: 293468 - DNA, 15 bp, Homo sapiens
atttggaccaaaaaa

SEQ ID NO: 293469 - DNA, 15 bp, Homo sapiens
gatttggaccaaaaa

SEQ ID NO: 293470 - DNA, 15 bp, Homo sapiens
tgatttggaccaaaa

SEQ ID NO: 293471 - DNA, 15 bp, Homo sapiens
atgatttggaccaaa

SEQ ID NO: 293472 - DNA, 15 bp, Homo sapiens
catgatttggaccaa

SEQ ID NO: 293473 - DNA, 15 bp, Homo sapiens
ccatgatttggacca

SEQ ID NO: 293474 - DNA, 15 bp, Homo sapiens
tccatgatttggacc

SEQ ID NO: 293475 - DNA, 15 bp, Homo sapiens
gtccatgatttggac

SEQ ID NO: 293476 - DNA, 15 bp, Homo sapiens
agtccatgatttgga

SEQ ID NO: 293477 - DNA, 15 bp, Homo sapiens
gagtccatgatttgg

SEQ ID NO: 293478 - DNA, 15 bp, Homo sapiens
ggagtccatgatttg

SEQ ID NO: 293479 - DNA, 15 bp, Homo sapiens
gggagtccatgattt

SEQ ID NO: 293480 - DNA, 15 bp, Homo sapiens
agggagtccatgatt

SEQ ID NO: 293481 - DNA, 15 bp, Homo sapiens
cagggagtccatgat

SEQ ID NO: 293482 - DNA, 15 bp, Homo sapiens
tcagggagtccatga

SEQ ID NO: 293483 - DNA, 15 bp, Homo sapiens
ctcagggagtccatg

SEQ ID NO: 293484 - DNA, 15 bp, Homo sapiens
actcagggagtccat

SEQ ID NO: 293485 - DNA, 15 bp, Homo sapiens
tactcagggagtcca

SEQ ID NO: 293486 - DNA, 15 bp, Homo sapiens
gtactcagggagtcc

SEQ ID NO: 293487 - DNA, 15 bp, Homo sapiens
agtactcagggagtc

SEQ ID NO: 293488 - DNA, 15 bp, Homo sapiens
cagtactcagggagt

SEQ ID NO: 293489 - DNA, 15 bp, Homo sapiens
gcagtactcagggag

SEQ ID NO: 293490 - DNA, 15 bp, Homo sapiens
tgcagtactcaggga

SEQ ID NO: 293491 - DNA, 15 bp, Homo sapiens
gtgcagtactcaggg

SEQ ID NO: 293492 - DNA, 15 bp, Homo sapiens
tgtgcagtactcagg

SEQ ID NO: 293493 - DNA, 15 bp, Homo sapiens
ttgtgcagtactcag

SEQ ID NO: 293494 - DNA, 15 bp, Homo sapiens
cttgtgcagtactca

SEQ ID NO: 293495 - DNA, 15 bp, Homo sapiens
ccttgtgcagtactc

SEQ ID NO: 293496 - DNA, 15 bp, Homo sapiens
tccttgtgcagtact

SEQ ID NO: 293497 - DNA, 15 bp, Homo sapiens
gtccttgtgcagtac

SEQ ID NO: 293498 - DNA, 15 bp, Homo sapiens
ggtccttgtgcagta

SEQ ID NO: 293499 - DNA, 15 bp, Homo sapiens
aggtccttgtgcagt

SEQ ID NO: 293500 - DNA, 15 bp, Homo sapiens
gaggtccttgtgcag

SEQ ID NO: 293501 - DNA, 15 bp, Homo sapiens
agaggtccttgtgca

SEQ ID NO: 293502 - DNA, 15 bp, Homo sapiens
aagaggtccttgtgc

SEQ ID NO: 293503 - DNA, 15 bp, Homo sapiens
caagaggtccttgtg

SEQ ID NO: 293504 - DNA, 15 bp, Homo sapiens
ccaagaggtccttgt

SEQ ID NO: 293505 - DNA, 15 bp, Homo sapiens
tccaagaggtccttg

SEQ ID NO: 293506 - DNA, 15 bp, Homo sapiens
ttccaagaggtcctt

SEQ ID NO: 293507 - DNA, 15 bp, Homo sapiens
cttccaagaggtcct

SEQ ID NO: 293508 - DNA, 15 bp, Homo sapiens
acttccaagaggtcc

SEQ ID NO: 293509 - DNA, 15 bp, Homo sapiens
tacttccaagaggtc

SEQ ID NO: 293510 - DNA, 15 bp, Homo sapiens
atacttccaagaggt

SEQ ID NO: 293511 - DNA, 15 bp, Homo sapiens
tatacttccaagagg

SEQ ID NO: 293512 - DNA, 15 bp, Homo sapiens
atatacttccaagag

SEQ ID NO: 293513 - DNA, 15 bp, Homo sapiens
catatacttccaaga

SEQ ID NO: 293514 - DNA, 15 bp, Homo sapiens
ccatatacttccaag

SEQ ID NO: 293515 - DNA, 15 bp, Homo sapiens
gccatatacttccaa

SEQ ID NO: 293516 - DNA, 15 bp, Homo sapiens
ggccatatacttcca

SEQ ID NO: 293517 - DNA, 15 bp, Homo sapiens
gggccatatacttcc

SEQ ID NO: 293518 - DNA, 15 bp, Homo sapiens
ggggccatatacttc

SEQ ID NO: 293519 - DNA, 15 bp, Homo sapiens
tggggccatatactt

SEQ ID NO: 293520 - DNA, 15 bp, Homo sapiens
ttggggccatatact

SEQ ID NO: 293521 - DNA, 15 bp, Homo sapiens
cttggggccatatac

SEQ ID NO: 293522 - DNA, 15 bp, Homo sapiens
acttggggccatata

SEQ ID NO: 293523 - DNA, 15 bp, Homo sapiens
cacttggggccatat

SEQ ID NO: 293524 - DNA, 15 bp, Homo sapiens
tcacttggggccata

SEQ ID NO: 293525 - DNA, 15 bp, Homo sapiens
ttcacttggggccat

SEQ ID NO: 293526 - DNA, 15 bp, Homo sapiens
cttcacttggggcca

SEQ ID NO: 293527 - DNA, 15 bp, Homo sapiens
tcttcacttggggcc

SEQ ID NO: 293528 - DNA, 15 bp, Homo sapiens
ttcttcacttggggc

SEQ ID NO: 293529 - DNA, 15 bp, Homo sapiens
attcttcacttgggg

SEQ ID NO: 293530 - DNA, 15 bp, Homo sapiens
gattcttcacttggg

SEQ ID NO: 293531 - DNA, 15 bp, Homo sapiens
ggattcttcacttgg

SEQ ID NO: 293532 - DNA, 15 bp, Homo sapiens
aggattcttcacttg

SEQ ID NO: 293533 - DNA, 15 bp, Homo sapiens
aaggattcttcactt

SEQ ID NO: 293534 - DNA, 15 bp, Homo sapiens
caaggattcttcact

SEQ ID NO: 293535 - DNA, 15 bp, Homo sapiens
ccaaggattcttcac

SEQ ID NO: 293536 - DNA, 15 bp, Homo sapiens
cccaaggattcttca

SEQ ID NO: 293537 - DNA, 15 bp, Homo sapiens
tcccaaggattcttc

SEQ ID NO: 293538 - DNA, 15 bp, Homo sapiens
atcccaaggattctt

SEQ ID NO: 293539 - DNA, 15 bp, Homo sapiens
tatcccaaggattct

SEQ ID NO: 293540 - DNA, 15 bp, Homo sapiens
ctatcccaaggattc

SEQ ID NO: 293541 - DNA, 15 bp, Homo sapiens
tctatcccaaggatt

SEQ ID NO: 293542 - DNA, 15 bp, Homo sapiens
ctctatcccaaggat

SEQ ID NO: 293543 - DNA, 15 bp, Homo sapiens
tctctatcccaagga

SEQ ID NO: 293544 - DNA, 15 bp, Homo sapiens
ttctctatcccaagg

SEQ ID NO: 293545 - DNA, 15 bp, Homo sapiens
attctctatcccaag

SEQ ID NO: 293546 - DNA, 15 bp, Homo sapiens
cattctctatcccaa

SEQ ID NO: 293547 - DNA, 15 bp, Homo sapiens
tcattctctatccca

SEQ ID NO: 293548 - DNA, 15 bp, Homo sapiens
gtcattctctatccc

SEQ ID NO: 293549 - DNA, 15 bp, Homo sapiens
agtcattctctatcc

SEQ ID NO: 293550 - DNA, 15 bp, Homo sapiens
aagtcattctctatc

SEQ ID NO: 293551 - DNA, 15 bp, Homo sapiens
caagtcattctctat

SEQ ID NO: 293552 - DNA, 15 bp, Homo sapiens
acaagtcattctcta

SEQ ID NO: 293553 - DNA, 15 bp, Homo sapiens
tacaagtcattctct

SEQ ID NO: 293554 - DNA, 15 bp, Homo sapiens
atacaagtcattctc

SEQ ID NO: 293555 - DNA, 15 bp, Homo sapiens
aatacaagtcattct

SEQ ID NO: 293556 - DNA, 15 bp, Homo sapiens
caatacaagtcattc

SEQ ID NO: 293557 - DNA, 15 bp, Homo sapiens
ccaatacaagtcatt

SEQ ID NO: 293558 - DNA, 15 bp, Homo sapiens
cccaatacaagtcat

SEQ ID NO: 293559 - DNA, 15 bp, Homo sapiens
gcccaatacaagtca

SEQ ID NO: 293560 - DNA, 15 bp, Homo sapiens
tgcccaatacaagtc

SEQ ID NO: 293561 - DNA, 15 bp, Homo sapiens
atgcccaatacaagt

SEQ ID NO: 293562 - DNA, 15 bp, Homo sapiens
aatgcccaatacaag

SEQ ID NO: 293563 - DNA, 15 bp, Homo sapiens
taatgcccaatacaa

SEQ ID NO: 293564 - DNA, 15 bp, Homo sapiens
ctaatgcccaataca

SEQ ID NO: 293565 - DNA, 15 bp, Homo sapiens
cctaatgcccaatac

SEQ ID NO: 293566 - DNA, 15 bp, Homo sapiens
gcctaatgcccaata

SEQ ID NO: 293567 - DNA, 15 bp, Homo sapiens
agcctaatgcccaat

SEQ ID NO: 293568 - DNA, 15 bp, Homo sapiens
tagcctaatgcccaa

SEQ ID NO: 293569 - DNA, 15 bp, Homo sapiens
atagcctaatgccca

SEQ ID NO: 293570 - DNA, 15 bp, Homo sapiens
aatagcctaatgccc

SEQ ID NO: 293571 - DNA, 15 bp, Homo sapiens
taatagcctaatgcc

SEQ ID NO: 293572 - DNA, 15 bp, Homo sapiens
gtaatagcctaatgc

SEQ ID NO: 293573 - DNA, 15 bp, Homo sapiens
agtaatagcctaatg

SEQ ID NO: 293574 - DNA, 15 bp, Homo sapiens
aagtaatagcctaat

SEQ ID NO: 293575 - DNA, 15 bp, Homo sapiens
aaagtaatagcctaa

SEQ ID NO: 293576 - DNA, 15 bp, Homo sapiens
taaagtaatagccta

SEQ ID NO: 293577 - DNA, 15 bp, Homo sapiens
ctaaagtaatagcct

SEQ ID NO: 293578 - DNA, 15 bp, Homo sapiens
tctaaagtaatagcc

SEQ ID NO: 293579 - DNA, 15 bp, Homo sapiens
ttctaaagtaatagc

SEQ ID NO: 293580 - DNA, 15 bp, Homo sapiens
tttctaaagtaatag

SEQ ID NO: 293581 - DNA, 15 bp, Homo sapiens
ctttctaaagtaata

SEQ ID NO: 293582 - DNA, 15 bp, Homo sapiens
tctttctaaagtaat

SEQ ID NO: 293583 - DNA, 15 bp, Homo sapiens
ctctttctaaagtaa

SEQ ID NO: 293584 - DNA, 15 bp, Homo sapiens
actctttctaaagta

SEQ ID NO: 293585 - DNA, 15 bp, Homo sapiens
tactctttctaaagt

SEQ ID NO: 293586 - DNA, 15 bp, Homo sapiens
ttactctttctaaag

SEQ ID NO: 293587 - DNA, 15 bp, Homo sapiens
attactctttctaaa

SEQ ID NO: 293588 - DNA, 15 bp, Homo sapiens
tattactctttctaa

SEQ ID NO: 293589 - DNA, 15 bp, Homo sapiens
ttattactctttcta

SEQ ID NO: 293590 - DNA, 15 bp, Homo sapiens
attattactctttct

SEQ ID NO: 293591 - DNA, 15 bp, Homo sapiens
cattattactctttc

SEQ ID NO: 293592 - DNA, 15 bp, Homo sapiens
gcattattactcttt

SEQ ID NO: 293593 - DNA, 15 bp, Homo sapiens
tgcattattactctt

SEQ ID NO: 293594 - DNA, 15 bp, Homo sapiens
ttgcattattactct

SEQ ID NO: 293595 - DNA, 15 bp, Homo sapiens
attgcattattactc

SEQ ID NO: 293596 - DNA, 15 bp, Homo sapiens
aattgcattattact

SEQ ID NO: 293597 - DNA, 15 bp, Homo sapiens
aaattgcattattac

SEQ ID NO: 293598 - DNA, 15 bp, Homo sapiens
gaaattgcattatta

SEQ ID NO: 293599 - DNA, 15 bp, Homo sapiens
ggaaattgcattatt

SEQ ID NO: 293600 - DNA, 15 bp, Homo sapiens
tggaaattgcattat

SEQ ID NO: 293601 - DNA, 15 bp, Homo sapiens
gtggaaattgcatta

SEQ ID NO: 293602 - DNA, 15 bp, Homo sapiens
agtggaaattgcatt

SEQ ID NO: 293603 - DNA, 15 bp, Homo sapiens
aagtggaaattgcat

SEQ ID NO: 293604 - DNA, 15 bp, Homo sapiens
aaagtggaaattgca

SEQ ID NO: 293605 - DNA, 15 bp, Homo sapiens
aaaagtggaaattgc

SEQ ID NO: 293606 - DNA, 15 bp, Homo sapiens
taaaagtggaaattg

SEQ ID NO: 293607 - DNA, 15 bp, Homo sapiens
ttaaaagtggaaatt

SEQ ID NO: 293608 - DNA, 15 bp, Homo sapiens
tttaaaagtggaaat

SEQ ID NO: 293609 - DNA, 15 bp, Homo sapiens
gtttaaaagtggaaa

SEQ ID NO: 293610 - DNA, 15 bp, Homo sapiens
tgtttaaaagtggaa

SEQ ID NO: 293611 - DNA, 15 bp, Homo sapiens
ctgtttaaaagtgga

SEQ ID NO: 293612 - DNA, 15 bp, Homo sapiens
actgtttaaaagtgg

SEQ ID NO: 293613 - DNA, 15 bp, Homo sapiens
gactgtttaaaagtg

SEQ ID NO: 293614 - DNA, 15 bp, Homo sapiens
tgactgtttaaaagt

SEQ ID NO: 293615 - DNA, 15 bp, Homo sapiens
atgactgtttaaaag

SEQ ID NO: 293616 - DNA, 15 bp, Homo sapiens
aatgactgtttaaaa

SEQ ID NO: 293617 - DNA, 15 bp, Homo sapiens
gaatgactgtttaaa

SEQ ID NO: 293618 - DNA, 15 bp, Homo sapiens
agaatgactgtttaa

SEQ ID NO: 293619 - DNA, 15 bp, Homo sapiens
cagaatgactgttta

SEQ ID NO: 293620 - DNA, 15 bp, Homo sapiens
ccagaatgactgttt

SEQ ID NO: 293621 - DNA, 15 bp, Homo sapiens
tccagaatgactgtt

SEQ ID NO: 293622 - DNA, 15 bp, Homo sapiens
gtccagaatgactgt

SEQ ID NO: 293623 - DNA, 15 bp, Homo sapiens
tgtccagaatgactg

SEQ ID NO: 293624 - DNA, 15 bp, Homo sapiens
atgtccagaatgact

SEQ ID NO: 293625 - DNA, 15 bp, Homo sapiens
tatgtccagaatgac

SEQ ID NO: 293626 - DNA, 15 bp, Homo sapiens
atatgtccagaatga

SEQ ID NO: 293627 - DNA, 15 bp, Homo sapiens
tatatgtccagaatg

SEQ ID NO: 293628 - DNA, 15 bp, Homo sapiens
ctatatgtccagaat

SEQ ID NO: 293629 - DNA, 15 bp, Homo sapiens
tctatatgtccagaa

SEQ ID NO: 293630 - DNA, 15 bp, Homo sapiens
atctatatgtccaga

SEQ ID NO: 293631 - DNA, 15 bp, Homo sapiens
gatctatatgtccag

SEQ ID NO: 293632 - DNA, 15 bp, Homo sapiens
tgatctatatgtcca

SEQ ID NO: 293633 - DNA, 15 bp, Homo sapiens
ctgatctatatgtcc

SEQ ID NO: 293634 - DNA, 15 bp, Homo sapiens
actgatctatatgtc

SEQ ID NO: 293635 - DNA, 15 bp, Homo sapiens
cactgatctatatgt

SEQ ID NO: 293636 - DNA, 15 bp, Homo sapiens
ccactgatctatatg

SEQ ID NO: 293637 - DNA, 15 bp, Homo sapiens
tccactgatctatat

SEQ ID NO: 293638 - DNA, 15 bp, Homo sapiens
ttccactgatctata

SEQ ID NO: 293639 - DNA, 15 bp, Homo sapiens
attccactgatctat

SEQ ID NO: 293640 - DNA, 15 bp, Homo sapiens
tattccactgatcta

SEQ ID NO: 293641 - DNA, 15 bp, Homo sapiens
ctattccactgatct

SEQ ID NO: 293642 - DNA, 15 bp, Homo sapiens
tctattccactgatc

SEQ ID NO: 293643 - DNA, 15 bp, Homo sapiens
ttctattccactgat

SEQ ID NO: 293644 - DNA, 15 bp, Homo sapiens
attctattccactga

SEQ ID NO: 293645 - DNA, 15 bp, Homo sapiens
aattctattccactg

SEQ ID NO: 293646 - DNA, 15 bp, Homo sapiens
caattctattccact

SEQ ID NO: 293647 - DNA, 15 bp, Homo sapiens
tcaattctattccac

SEQ ID NO: 293648 - DNA, 15 bp, Homo sapiens
ctcaattctattcca

SEQ ID NO: 293649 - DNA, 15 bp, Homo sapiens
tctcaattctattcc

SEQ ID NO: 293650 - DNA, 15 bp, Homo sapiens
ctctcaattctattc

SEQ ID NO: 293651 - DNA, 15 bp, Homo sapiens
actctcaattctatt

SEQ ID NO: 293652 - DNA, 15 bp, Homo sapiens
gactctcaattctat

SEQ ID NO: 293653 - DNA, 15 bp, Homo sapiens
ggactctcaattcta

SEQ ID NO: 293654 - DNA, 15 bp, Homo sapiens
tctggactctcaatt

SEQ ID NO: 293655 - DNA, 15 bp, Homo sapiens
ttctggactctcaat

SEQ ID NO: 293656 - DNA, 15 bp, Homo sapiens
tttctggactctcaa

SEQ ID NO: 293657 - DNA, 15 bp, Homo sapiens
atttctggactctca

SEQ ID NO: 293658 - DNA, 15 bp, Homo sapiens
tatttctggactctc

SEQ ID NO: 293659 - DNA, 15 bp, Homo sapiens
gtatttctggactct

SEQ ID NO: 293660 - DNA, 15 bp, Homo sapiens
tgtatttctggactc

SEQ ID NO: 293661 - DNA, 15 bp, Homo sapiens
atgtatttctggact

SEQ ID NO: 293662 - DNA, 15 bp, Homo sapiens
gatgtatttctggac

SEQ ID NO: 293663 - DNA, 15 bp, Homo sapiens
ggatgtatttctgga

SEQ ID NO: 293664 - DNA, 15 bp, Homo sapiens
tggatgtatttctgg

SEQ ID NO: 293665 - DNA, 15 bp, Homo sapiens
ctggatgtatttctg

SEQ ID NO: 293666 - DNA, 15 bp, Homo sapiens
actggatgtatttct

SEQ ID NO: 293667 - DNA, 15 bp, Homo sapiens
aactggatgtatttc

SEQ ID NO: 293668 - DNA, 15 bp, Homo sapiens
aaactggatgtattt

SEQ ID NO: 293669 - DNA, 15 bp, Homo sapiens
aaaactggatgtatt

SEQ ID NO: 293670 - DNA, 15 bp, Homo sapiens
aaaaactggatgtat

SEQ ID NO: 293671 - DNA, 15 bp, Homo sapiens
taaaaactggatgta

SEQ ID NO: 293672 - DNA, 15 bp, Homo sapiens
ataaaaactggatgt

SEQ ID NO: 293673 - DNA, 15 bp, Homo sapiens
tataaaaactggatg

SEQ ID NO: 293674 - DNA, 15 bp, Homo sapiens
ctataaaaactggat

SEQ ID NO: 293675 - DNA, 15 bp, Homo sapiens
actataaaaactgga

SEQ ID NO: 293676 - DNA, 15 bp, Homo sapiens
gactataaaaactgg

SEQ ID NO: 293677 - DNA, 15 bp, Homo sapiens
tgactataaaaactg

SEQ ID NO: 293678 - DNA, 15 bp, Homo sapiens
ttgactataaaaact

SEQ ID NO: 293679 - DNA, 15 bp, Homo sapiens
gttgactataaaaac

SEQ ID NO: 293680 - DNA, 15 bp, Homo sapiens
agttgactataaaaa

SEQ ID NO: 293681 - DNA, 15 bp, Homo sapiens
tagttgactataaaa

SEQ ID NO: 293682 - DNA, 15 bp, Homo sapiens
ttagttgactataaa

SEQ ID NO: 293683 - DNA, 15 bp, Homo sapiens
attagttgactataa

SEQ ID NO: 293684 - DNA, 15 bp, Homo sapiens
aattagttgactata

SEQ ID NO: 293685 - DNA, 15 bp, Homo sapiens
aaattagttgactat

SEQ ID NO: 293686 - DNA, 15 bp, Homo sapiens
aaaattagttgacta

SEQ ID NO: 293687 - DNA, 15 bp, Homo sapiens
aaaaattagttgact

SEQ ID NO: 293688 - DNA, 15 bp, Homo sapiens
caaaaattagttgac

SEQ ID NO: 293689 - DNA, 15 bp, Homo sapiens
tcaaaaattagttga

SEQ ID NO: 293690 - DNA, 15 bp, Homo sapiens
ctcaaaaattagttg

SEQ ID NO: 293691 - DNA, 15 bp, Homo sapiens
tctcaaaaattagtt

SEQ ID NO: 293692 - DNA, 15 bp, Homo sapiens
ttctcaaaaattagt

SEQ ID NO: 293693 - DNA, 15 bp, Homo sapiens
attctcaaaaattag

SEQ ID NO: 293694 - DNA, 15 bp, Homo sapiens
tattctcaaaaatta

SEQ ID NO: 293695 - DNA, 15 bp, Homo sapiens
ttattctcaaaaatt

SEQ ID NO: 293696 - DNA, 15 bp, Homo sapiens
attattctcaaaaat

SEQ ID NO: 293697 - DNA, 15 bp, Homo sapiens
tattattctcaaaaa

SEQ ID NO: 293698 - DNA, 15 bp, Homo sapiens
gtattattctcaaaa

SEQ ID NO: 293699 - DNA, 15 bp, Homo sapiens
ggtattattctcaaa

SEQ ID NO: 293700 - DNA, 15 bp, Homo sapiens
tggtattattctcaa

SEQ ID NO: 293701 - DNA, 15 bp, Homo sapiens
ttggtattattctca

SEQ ID NO: 293702 - DNA, 15 bp, Homo sapiens
cttggtattattctc

SEQ ID NO: 293703 - DNA, 15 bp, Homo sapiens
tcttggtattattct

SEQ ID NO: 293704 - DNA, 15 bp, Homo sapiens
gtcttggtattattc

SEQ ID NO: 293705 - DNA, 15 bp, Homo sapiens
ggtcttggtattatt

SEQ ID NO: 293706 - DNA, 15 bp, Homo sapiens
tggtcttggtattat

SEQ ID NO: 293707 - DNA, 15 bp, Homo sapiens
atggtcttggtatta

SEQ ID NO: 293708 - DNA, 15 bp, Homo sapiens
aatggtcttggtatt

SEQ ID NO: 293709 - DNA, 15 bp, Homo sapiens
aaatggtcttggtat

SEQ ID NO: 293710 - DNA, 15 bp, Homo sapiens
taaatggtcttggta

SEQ ID NO: 293711 - DNA, 15 bp, Homo sapiens
ttaaatggtcttggt

SEQ ID NO: 293712 - DNA, 15 bp, Homo sapiens
attaaatggtcttgg

SEQ ID NO: 293713 - DNA, 15 bp, Homo sapiens
cattaaatggtcttg

SEQ ID NO: 293714 - DNA, 15 bp, Homo sapiens
tcattaaatggtctt

SEQ ID NO: 293715 - DNA, 15 bp, Homo sapiens
ctcattaaatggtct

SEQ ID NO: 293716 - DNA, 15 bp, Homo sapiens
cctcattaaatggtc

SEQ ID NO: 293717 - DNA, 15 bp, Homo sapiens
tcctcattaaatggt

SEQ ID NO: 293718 - DNA, 15 bp, Homo sapiens
ttcctcattaaatgg

SEQ ID NO: 293719 - DNA, 15 bp, Homo sapiens
tttcctcattaaatg

SEQ ID NO: 293720 - DNA, 15 bp, Homo sapiens
ctttcctcattaaat

SEQ ID NO: 293721 - DNA, 15 bp, Homo sapiens
tctttcctcattaaa

SEQ ID NO: 293722 - DNA, 15 bp, Homo sapiens
ttctttcctcattaa

SEQ ID NO: 293723 - DNA, 15 bp, Homo sapiens
attctttcctcatta

SEQ ID NO: 293724 - DNA, 15 bp, Homo sapiens
tattctttcctcatt

SEQ ID NO: 293725 - DNA, 15 bp, Homo sapiens
ctattctttcctcat

SEQ ID NO: 293726 - DNA, 15 bp, Homo sapiens
actattctttcctca

SEQ ID NO: 293727 - DNA, 15 bp, Homo sapiens
aactattctttcctc

SEQ ID NO: 293728 - DNA, 15 bp, Homo sapiens
aaactattctttcct

SEQ ID NO: 293729 - DNA, 15 bp, Homo sapiens
aaaactattctttcc

SEQ ID NO: 293730 - DNA, 15 bp, Homo sapiens
aaaaactattctttc

SEQ ID NO: 293731 - DNA, 15 bp, Homo sapiens
gaaaaactattcttt

SEQ ID NO: 293732 - DNA, 15 bp, Homo sapiens
ggaaaaactattctt

SEQ ID NO: 293733 - DNA, 15 bp, Homo sapiens
tggaaaaactattct

SEQ ID NO: 293734 - DNA, 15 bp, Homo sapiens
ttggaaaaactattc

SEQ ID NO: 293735 - DNA, 15 bp, Homo sapiens
attggaaaaactatt

SEQ ID NO: 293736 - DNA, 15 bp, Homo sapiens
aattggaaaaactat

SEQ ID NO: 293737 - DNA, 15 bp, Homo sapiens
taattggaaaaacta

SEQ ID NO: 293738 - DNA, 15 bp, Homo sapiens
ttaattggaaaaact

SEQ ID NO: 293739 - DNA, 15 bp, Homo sapiens
attaattggaaaaac

SEQ ID NO: 293740 - DNA, 15 bp, Homo sapiens
cattaattggaaaaa

SEQ ID NO: 293741 - DNA, 15 bp, Homo sapiens
tcattaattggaaaa

SEQ ID NO: 293742 - DNA, 15 bp, Homo sapiens
atcattaattggaaa

SEQ ID NO: 293743 - DNA, 15 bp, Homo sapiens
catcattaattggaa

SEQ ID NO: 293744 - DNA, 15 bp, Homo sapiens
gcatcattaattgga

SEQ ID NO: 293745 - DNA, 15 bp, Homo sapiens
agcatcattaattgg

SEQ ID NO: 293746 - DNA, 15 bp, Homo sapiens
cagcatcattaattg

SEQ ID NO: 293747 - DNA, 15 bp, Homo sapiens
acagcatcattaatt

SEQ ID NO: 293748 - DNA, 15 bp, Homo sapiens
gacagcatcattaat

SEQ ID NO: 293749 - DNA, 15 bp, Homo sapiens
ggacagcatcattaa

SEQ ID NO: 293750 - DNA, 15 bp, Homo sapiens
tggacagcatcatta

SEQ ID NO: 293751 - DNA, 15 bp, Homo sapiens
ctggacagcatcatt

SEQ ID NO: 293752 - DNA, 15 bp, Homo sapiens
actggacagcatcat

SEQ ID NO: 293753 - DNA, 15 bp, Homo sapiens
cactggacagcatca

SEQ ID NO: 293754 - DNA, 15 bp, Homo sapiens
acactggacagcatc

SEQ ID NO: 293755 - DNA, 15 bp, Homo sapiens
cacactggacagcat

SEQ ID NO: 293756 - DNA, 15 bp, Homo sapiens
ccacactggacagca

SEQ ID NO: 293757 - DNA, 15 bp, Homo sapiens
cccacactggacagc

SEQ ID NO: 293758 - DNA, 15 bp, Homo sapiens
gcccacactggacag

SEQ ID NO: 293759 - DNA, 15 bp, Homo sapiens
tgcccacactggaca

SEQ ID NO: 293760 - DNA, 15 bp, Homo sapiens
ttgcccacactggac

SEQ ID NO: 293761 - DNA, 15 bp, Homo sapiens
gttgcccacactgga

SEQ ID NO: 293762 - DNA, 15 bp, Homo sapiens
tgttgcccacactgg

SEQ ID NO: 293763 - DNA, 15 bp, Homo sapiens
atgttgcccacactg

SEQ ID NO: 293764 - DNA, 15 bp, Homo sapiens
tatgttgcccacact

SEQ ID NO: 293765 - DNA, 15 bp, Homo sapiens
ctatgttgcccacac

SEQ ID NO: 293766 - DNA, 15 bp, Homo sapiens
actatgttgcccaca

SEQ ID NO: 293767 - DNA, 15 bp, Homo sapiens
cactatgttgcccac

SEQ ID NO: 293768 - DNA, 15 bp, Homo sapiens
tcactatgttgccca

SEQ ID NO: 293769 - DNA, 15 bp, Homo sapiens
ctcactatgttgccc

SEQ ID NO: 293770 - DNA, 15 bp, Homo sapiens
tctcactatgttgcc

SEQ ID NO: 293771 - DNA, 15 bp, Homo sapiens
gtctcactatgttgc

SEQ ID NO: 293772 - DNA, 15 bp, Homo sapiens
agtctcactatgttg

SEQ ID NO: 293773 - DNA, 15 bp, Homo sapiens
gagtctcactatgtt

SEQ ID NO: 293774 - DNA, 15 bp, Homo sapiens
agagtctcactatgt

SEQ ID NO: 293775 - DNA, 15 bp, Homo sapiens
cagagtctcactatg

SEQ ID NO: 293776 - DNA, 15 bp, Homo sapiens
acagagtctcactat

SEQ ID NO: 293777 - DNA, 15 bp, Homo sapiens
gacagagtctcacta

SEQ ID NO: 293778 - DNA, 15 bp, Homo sapiens
agagacagagtctca

SEQ ID NO: 293779 - DNA, 15 bp, Homo sapiens
tagagacagagtctc

SEQ ID NO: 293780 - DNA, 15 bp, Homo sapiens
gtagagacagagtct

SEQ ID NO: 293781 - DNA, 15 bp, Homo sapiens
tgtagagacagagtc

SEQ ID NO: 293782 - DNA, 15 bp, Homo sapiens
ttgtagagacagagt

SEQ ID NO: 293783 - DNA, 15 bp, Homo sapiens
tttgtagagacagag

SEQ ID NO: 293784 - DNA, 15 bp, Homo sapiens
atttgtagagacaga

SEQ ID NO: 293785 - DNA, 15 bp, Homo sapiens
aatttgtagagacag

SEQ ID NO: 293786 - DNA, 15 bp, Homo sapiens
aaatttgtagagaca

SEQ ID NO: 293787 - DNA, 15 bp, Homo sapiens
gaaatttgtagagac

SEQ ID NO: 293788 - DNA, 15 bp, Homo sapiens
agaaatttgtagaga

SEQ ID NO: 293789 - DNA, 15 bp, Homo sapiens
aagaaatttgtagag

SEQ ID NO: 293790 - DNA, 15 bp, Homo sapiens
aaagaaatttgtaga

SEQ ID NO: 293791 - DNA, 15 bp, Homo sapiens
aaaagaaatttgtag

SEQ ID NO: 293792 - DNA, 15 bp, Homo sapiens
aaaaagaaatttgta

SEQ ID NO: 293793 - DNA, 15 bp, Homo sapiens
aaaaaagaaatttgt

SEQ ID NO: 293794 - DNA, 15 bp, Homo sapiens
taaaaaagaaatttg

SEQ ID NO: 293795 - DNA, 15 bp, Homo sapiens
ttaaaaaagaaattt

SEQ ID NO: 293796 - DNA, 15 bp, Homo sapiens
tttaaaaaagaaatt

SEQ ID NO: 293797 - DNA, 15 bp, Homo sapiens
gtttaaaaaagaaat

SEQ ID NO: 293798 - DNA, 15 bp, Homo sapiens
tgtttaaaaaagaaa

SEQ ID NO: 293799 - DNA, 15 bp, Homo sapiens
atgtttaaaaaagaa

SEQ ID NO: 293800 - DNA, 15 bp, Homo sapiens
aatgtttaaaaaaga

SEQ ID NO: 293801 - DNA, 15 bp, Homo sapiens
taatgtttaaaaaag

SEQ ID NO: 293802 - DNA, 15 bp, Homo sapiens
ctaatgtttaaaaaa

SEQ ID NO: 293803 - DNA, 15 bp, Homo sapiens
gctaatgtttaaaaa

SEQ ID NO: 293804 - DNA, 15 bp, Homo sapiens
ggctaatgtttaaaa

SEQ ID NO: 293805 - DNA, 15 bp, Homo sapiens
tggctaatgtttaaa

SEQ ID NO: 293806 - DNA, 15 bp, Homo sapiens
ctggctaatgtttaa

SEQ ID NO: 293807 - DNA, 15 bp, Homo sapiens
cctggctaatgttta

SEQ ID NO: 293808 - DNA, 15 bp, Homo sapiens
acctggctaatgttt

SEQ ID NO: 293809 - DNA, 15 bp, Homo sapiens
tacctggctaatgtt

SEQ ID NO: 293810 - DNA, 15 bp, Homo sapiens
atacctggctaatgt

SEQ ID NO: 293811 - DNA, 15 bp, Homo sapiens
catacctggctaatg

SEQ ID NO: 293812 - DNA, 15 bp, Homo sapiens
tgccaccatacctgg

SEQ ID NO: 293813 - DNA, 15 bp, Homo sapiens
gtgccaccatacctg

SEQ ID NO: 293814 - DNA, 15 bp, Homo sapiens
tgtgccaccatacct

SEQ ID NO: 293815 - DNA, 15 bp, Homo sapiens
gtgtgccaccatacc

SEQ ID NO: 293816 - DNA, 15 bp, Homo sapiens
cgtgtgccaccatac

SEQ ID NO: 293817 - DNA, 15 bp, Homo sapiens
gcgtgtgccaccata

SEQ ID NO: 293818 - DNA, 15 bp, Homo sapiens
agcgtgtgccaccat

SEQ ID NO: 293819 - DNA, 15 bp, Homo sapiens
aagcgtgtgccacca

SEQ ID NO: 293820 - DNA, 15 bp, Homo sapiens
caagcgtgtgccacc

SEQ ID NO: 293821 - DNA, 15 bp, Homo sapiens
acaagcgtgtgccac

SEQ ID NO: 293822 - DNA, 15 bp, Homo sapiens
cacaagcgtgtgcca

SEQ ID NO: 293823 - DNA, 15 bp, Homo sapiens
tcacaagcgtgtgcc

SEQ ID NO: 293824 - DNA, 15 bp, Homo sapiens
ttcacaagcgtgtgc

SEQ ID NO: 293825 - DNA, 15 bp, Homo sapiens
gttcacaagcgtgtg

SEQ ID NO: 293826 - DNA, 15 bp, Homo sapiens
ggttcacaagcgtgt

SEQ ID NO: 293827 - DNA, 15 bp, Homo sapiens
gggttcacaagcgtg

SEQ ID NO: 293828 - DNA, 15 bp, Homo sapiens
tgggttcacaagcgt

SEQ ID NO: 293829 - DNA, 15 bp, Homo sapiens
ctgggttcacaagcg

SEQ ID NO: 293830 - DNA, 15 bp, Homo sapiens
gctgggttcacaagc

SEQ ID NO: 293831 - DNA, 15 bp, Homo sapiens
agctgggttcacaag

SEQ ID NO: 293832 - DNA, 15 bp, Homo sapiens
tagctgggttcacaa

SEQ ID NO: 293833 - DNA, 15 bp, Homo sapiens
gtagctgggttcaca

SEQ ID NO: 293834 - DNA, 15 bp, Homo sapiens
agtagctgggttcac

SEQ ID NO: 293835 - DNA, 15 bp, Homo sapiens
aagtagctgggttca

SEQ ID NO: 293836 - DNA, 15 bp, Homo sapiens
caagtagctgggttc

SEQ ID NO: 293837 - DNA, 15 bp, Homo sapiens
tcaagtagctgggtt

SEQ ID NO: 293838 - DNA, 15 bp, Homo sapiens
ctcaagtagctgggt

SEQ ID NO: 293839 - DNA, 15 bp, Homo sapiens
tctcaagtagctggg

SEQ ID NO: 293840 - DNA, 15 bp, Homo sapiens
ctctcaagtagctgg

SEQ ID NO: 293841 - DNA, 15 bp, Homo sapiens
cctctcaagtagctg

SEQ ID NO: 293842 - DNA, 15 bp, Homo sapiens
gcctctcaagtagct

SEQ ID NO: 293843 - DNA, 15 bp, Homo sapiens
agcctctcaagtagc

SEQ ID NO: 293844 - DNA, 15 bp, Homo sapiens
cagcctctcaagtag

SEQ ID NO: 293845 - DNA, 15 bp, Homo sapiens
tcagcctctcaagta

SEQ ID NO: 293846 - DNA, 15 bp, Homo sapiens
ctcagcctctcaagt

SEQ ID NO: 293847 - DNA, 15 bp, Homo sapiens
tctcagcctctcaag

SEQ ID NO: 293848 - DNA, 15 bp, Homo sapiens
atctcagcctctcaa

SEQ ID NO: 293849 - DNA, 15 bp, Homo sapiens
catctcagcctctca

SEQ ID NO: 293850 - DNA, 15 bp, Homo sapiens
tcatctcagcctctc

SEQ ID NO: 293851 - DNA, 15 bp, Homo sapiens
ctcatctcagcctct

SEQ ID NO: 293852 - DNA, 15 bp, Homo sapiens
tctcatctcagcctc

SEQ ID NO: 293853 - DNA, 15 bp, Homo sapiens
ctctcatctcagcct

SEQ ID NO: 293854 - DNA, 15 bp, Homo sapiens
cctctcatctcagcc

SEQ ID NO: 293855 - DNA, 15 bp, Homo sapiens
tcctctcatctcagc

SEQ ID NO: 293856 - DNA, 15 bp, Homo sapiens
atcctctcatctcag

SEQ ID NO: 293857 - DNA, 15 bp, Homo sapiens
gatcctctcatctca

SEQ ID NO: 293858 - DNA, 15 bp, Homo sapiens
tgatcctctcatctc

SEQ ID NO: 293859 - DNA, 15 bp, Homo sapiens
gtgatcctctcatct

SEQ ID NO: 293860 - DNA, 15 bp, Homo sapiens
agtgatcctctcatc

SEQ ID NO: 293861 - DNA, 15 bp, Homo sapiens
aagtgatcctctcat

SEQ ID NO: 293862 - DNA, 15 bp, Homo sapiens
caagtgatcctctca

SEQ ID NO: 293863 - DNA, 15 bp, Homo sapiens
tcaagtgatcctctc

SEQ ID NO: 293864 - DNA, 15 bp, Homo sapiens
caggctcaagtgatc

SEQ ID NO: 293865 - DNA, 15 bp, Homo sapiens
tcaggctcaagtgat

SEQ ID NO: 293866 - DNA, 15 bp, Homo sapiens
ctcaggctcaagtga

SEQ ID NO: 293867 - DNA, 15 bp, Homo sapiens
tctcaggctcaagtg

SEQ ID NO: 293868 - DNA, 15 bp, Homo sapiens
ctctcaggctcaagt

SEQ ID NO: 293869 - DNA, 15 bp, Homo sapiens
cctctcaggctcaag

SEQ ID NO: 293870 - DNA, 15 bp, Homo sapiens
acctctcaggctcaa

SEQ ID NO: 293871 - DNA, 15 bp, Homo sapiens
cacctctcaggctca

SEQ ID NO: 293872 - DNA, 15 bp, Homo sapiens
ccacctctcaggctc

SEQ ID NO: 293873 - DNA, 15 bp, Homo sapiens
tccacctctcaggct

SEQ ID NO: 293874 - DNA, 15 bp, Homo sapiens
ctccacctctcaggc

SEQ ID NO: 293875 - DNA, 15 bp, Homo sapiens
cctccacctctcagg

SEQ ID NO: 293876 - DNA, 15 bp, Homo sapiens
gcctccacctctcag

SEQ ID NO: 293877 - DNA, 15 bp, Homo sapiens
agcctccacctctca

SEQ ID NO: 293878 - DNA, 15 bp, Homo sapiens
cagcctccacctctc

SEQ ID NO: 293879 - DNA, 15 bp, Homo sapiens
gcagcctccacctct

SEQ ID NO: 293880 - DNA, 15 bp, Homo sapiens
tgcagcctccacctc

SEQ ID NO: 293881 - DNA, 15 bp, Homo sapiens
ctgcagcctccacct

SEQ ID NO: 293882 - DNA, 15 bp, Homo sapiens
actgcagcctccacc

SEQ ID NO: 293883 - DNA, 15 bp, Homo sapiens
cactgcagcctccac

SEQ ID NO: 293884 - DNA, 15 bp, Homo sapiens
tcactgcagcctcca

SEQ ID NO: 293885 - DNA, 15 bp, Homo sapiens
actcactgcagcctc

SEQ ID NO: 293886 - DNA, 15 bp, Homo sapiens
aactcactgcagcct

SEQ ID NO: 293887 - DNA, 15 bp, Homo sapiens
caactcactgcagcc

SEQ ID NO: 293888 - DNA, 15 bp, Homo sapiens
acaactcactgcagc

SEQ ID NO: 293889 - DNA, 15 bp, Homo sapiens
cacaactcactgcag

SEQ ID NO: 293890 - DNA, 15 bp, Homo sapiens
tcacaactcactgca

SEQ ID NO: 293891 - DNA, 15 bp, Homo sapiens
atcacaactcactgc

SEQ ID NO: 293892 - DNA, 15 bp, Homo sapiens
aatcacaactcactg

SEQ ID NO: 293893 - DNA, 15 bp, Homo sapiens
caatcacaactcact

SEQ ID NO: 293894 - DNA, 15 bp, Homo sapiens
acaatcacaactcac

SEQ ID NO: 293895 - DNA, 15 bp, Homo sapiens
cacaatcacaactca

SEQ ID NO: 293896 - DNA, 15 bp, Homo sapiens
gcacaatcacaactc

SEQ ID NO: 293897 - DNA, 15 bp, Homo sapiens
ggcacaatcacaact

SEQ ID NO: 293898 - DNA, 15 bp, Homo sapiens
tggcacaatcacaac

SEQ ID NO: 293899 - DNA, 15 bp, Homo sapiens
gtggcacaatcacaa

SEQ ID NO: 293900 - DNA, 15 bp, Homo sapiens
agtggcacaatcaca

SEQ ID NO: 293901 - DNA, 15 bp, Homo sapiens
cagtggcacaatcac

SEQ ID NO: 293902 - DNA, 15 bp, Homo sapiens
acccagactggagtg

SEQ ID NO: 293903 - DNA, 15 bp, Homo sapiens
cacccagactggagt

SEQ ID NO: 293904 - DNA, 15 bp, Homo sapiens
tcacccagactggag

SEQ ID NO: 293905 - DNA, 15 bp, Homo sapiens
gtcacccagactgga

SEQ ID NO: 293906 - DNA, 15 bp, Homo sapiens
tgtcacccagactgg

SEQ ID NO: 293907 - DNA, 15 bp, Homo sapiens
ctgtcacccagactg

SEQ ID NO: 293908 - DNA, 15 bp, Homo sapiens
tctgtcacccagact

SEQ ID NO: 293909 - DNA, 15 bp, Homo sapiens
ctctgtcacccagac

SEQ ID NO: 293910 - DNA, 15 bp, Homo sapiens
actctgtcacccaga

SEQ ID NO: 293911 - DNA, 15 bp, Homo sapiens
ttgagacagggtctc

SEQ ID NO: 293912 - DNA, 15 bp, Homo sapiens
tttgagacagggtct

SEQ ID NO: 293913 - DNA, 15 bp, Homo sapiens
ttttgagacagggtc

SEQ ID NO: 293914 - DNA, 15 bp, Homo sapiens
tttttgagacagggt

SEQ ID NO: 293915 - DNA, 15 bp, Homo sapiens
ttttttgagacaggg

SEQ ID NO: 293916 - DNA, 15 bp, Homo sapiens
tttttttgagacagg

SEQ ID NO: 293917 - DNA, 15 bp, Homo sapiens
ccatttttttttttt

SEQ ID NO: 293918 - DNA, 15 bp, Homo sapiens
accattttttttttt

SEQ ID NO: 293919 - DNA, 15 bp, Homo sapiens
caccatttttttttt

SEQ ID NO: 293920 - DNA, 15 bp, Homo sapiens
gcaccattttttttt

SEQ ID NO: 293921 - DNA, 15 bp, Homo sapiens
agcaccatttttttt

SEQ ID NO: 293922 - DNA, 15 bp, Homo sapiens
cagcaccattttttt

SEQ ID NO: 293923 - DNA, 15 bp, Homo sapiens
ccagcaccatttttt

SEQ ID NO: 293924 - DNA, 15 bp, Homo sapiens
cccagcaccattttt

SEQ ID NO: 293925 - DNA, 15 bp, Homo sapiens
tcccagcaccatttt

SEQ ID NO: 293926 - DNA, 15 bp, Homo sapiens
atcccagcaccattt

SEQ ID NO: 293927 - DNA, 15 bp, Homo sapiens
tatcccagcaccatt

SEQ ID NO: 293928 - DNA, 15 bp, Homo sapiens
ttatcccagcaccat

SEQ ID NO: 293929 - DNA, 15 bp, Homo sapiens
gttatcccagcacca

SEQ ID NO: 293930 - DNA, 15 bp, Homo sapiens
agttatcccagcacc

SEQ ID NO: 293931 - DNA, 15 bp, Homo sapiens
tagttatcccagcac

SEQ ID NO: 293932 - DNA, 15 bp, Homo sapiens
ctagttatcccagca

SEQ ID NO: 293933 - DNA, 15 bp, Homo sapiens
tctagttatcccagc

SEQ ID NO: 293934 - DNA, 15 bp, Homo sapiens
atctagttatcccag

SEQ ID NO: 293935 - DNA, 15 bp, Homo sapiens
tatctagttatccca

SEQ ID NO: 293936 - DNA, 15 bp, Homo sapiens
ctatctagttatccc

SEQ ID NO: 293937 - DNA, 15 bp, Homo sapiens
cctatctagttatcc

SEQ ID NO: 293938 - DNA, 15 bp, Homo sapiens
gcctatctagttatc

SEQ ID NO: 293939 - DNA, 15 bp, Homo sapiens
tgcctatctagttat

SEQ ID NO: 293940 - DNA, 15 bp, Homo sapiens
gtgcctatctagtta

SEQ ID NO: 293941 - DNA, 15 bp, Homo sapiens
tgtgcctatctagtt

SEQ ID NO: 293942 - DNA, 15 bp, Homo sapiens
atgtgcctatctagt

SEQ ID NO: 293943 - DNA, 15 bp, Homo sapiens
catgtgcctatctag

SEQ ID NO: 293944 - DNA, 15 bp, Homo sapiens
gcatgtgcctatcta

SEQ ID NO: 293945 - DNA, 15 bp, Homo sapiens
tgcatgtgcctatct

SEQ ID NO: 293946 - DNA, 15 bp, Homo sapiens
ttgcatgtgcctatc

SEQ ID NO: 293947 - DNA, 15 bp, Homo sapiens
tttgcatgtgcctat

SEQ ID NO: 293948 - DNA, 15 bp, Homo sapiens
ttttgcatgtgccta

SEQ ID NO: 293949 - DNA, 15 bp, Homo sapiens
attttgcatgtgcct

SEQ ID NO: 293950 - DNA, 15 bp, Homo sapiens
tattttgcatgtgcc

SEQ ID NO: 293951 - DNA, 15 bp, Homo sapiens
ttattttgcatgtgc

SEQ ID NO: 293952 - DNA, 15 bp, Homo sapiens
attattttgcatgtg

SEQ ID NO: 293953 - DNA, 15 bp, Homo sapiens
tattattttgcatgt

SEQ ID NO: 293954 - DNA, 15 bp, Homo sapiens
ttattattttgcatg

SEQ ID NO: 293955 - DNA, 15 bp, Homo sapiens
tttattattttgcat

SEQ ID NO: 293956 - DNA, 15 bp, Homo sapiens
ttttattattttgca

SEQ ID NO: 293957 - DNA, 15 bp, Homo sapiens
attttattattttgc

SEQ ID NO: 293958 - DNA, 15 bp, Homo sapiens
aattttattattttg

SEQ ID NO: 293959 - DNA, 15 bp, Homo sapiens
caattttattatttt

SEQ ID NO: 293960 - DNA, 15 bp, Homo sapiens
ccaattttattattt

SEQ ID NO: 293961 - DNA, 15 bp, Homo sapiens
tccaattttattatt

SEQ ID NO: 293962 - DNA, 15 bp, Homo sapiens
gtccaattttattat

SEQ ID NO: 293963 - DNA, 15 bp, Homo sapiens
agtccaattttatta

SEQ ID NO: 293964 - DNA, 15 bp, Homo sapiens
gagtccaattttatt

SEQ ID NO: 293965 - DNA, 15 bp, Homo sapiens
agagtccaattttat

SEQ ID NO: 293966 - DNA, 15 bp, Homo sapiens
aagagtccaatttta

SEQ ID NO: 293967 - DNA, 15 bp, Homo sapiens
gaagagtccaatttt

SEQ ID NO: 293968 - DNA, 15 bp, Homo sapiens
tgaagagtccaattt

SEQ ID NO: 293969 - DNA, 15 bp, Homo sapiens
gtgaagagtccaatt

SEQ ID NO: 293970 - DNA, 15 bp, Homo sapiens
tgtgaagagtccaat

SEQ ID NO: 293971 - DNA, 15 bp, Homo sapiens
atgtgaagagtccaa

SEQ ID NO: 293972 - DNA, 15 bp, Homo sapiens
gatgtgaagagtcca

SEQ ID NO: 293973 - DNA, 15 bp, Homo sapiens
tgatgtgaagagtcc

SEQ ID NO: 293974 - DNA, 15 bp, Homo sapiens
ttgatgtgaagagtc

SEQ ID NO: 293975 - DNA, 15 bp, Homo sapiens
attgatgtgaagagt

SEQ ID NO: 293976 - DNA, 15 bp, Homo sapiens
aattgatgtgaagag

SEQ ID NO: 293977 - DNA, 15 bp, Homo sapiens
taattgatgtgaaga

SEQ ID NO: 293978 - DNA, 15 bp, Homo sapiens
ttaattgatgtgaag

SEQ ID NO: 293979 - DNA, 15 bp, Homo sapiens
gttaattgatgtgaa

SEQ ID NO: 293980 - DNA, 15 bp, Homo sapiens
agttaattgatgtga

SEQ ID NO: 293981 - DNA, 15 bp, Homo sapiens
gagttaattgatgtg

SEQ ID NO: 293982 - DNA, 15 bp, Homo sapiens
tgagttaattgatgt

SEQ ID NO: 293983 - DNA, 15 bp, Homo sapiens
ttgagttaattgatg

SEQ ID NO: 293984 - DNA, 15 bp, Homo sapiens
tttgagttaattgat

SEQ ID NO: 293985 - DNA, 15 bp, Homo sapiens
ttttgagttaattga

SEQ ID NO: 293986 - DNA, 15 bp, Homo sapiens
attttgagttaattg

SEQ ID NO: 293987 - DNA, 15 bp, Homo sapiens
tattttgagttaatt

SEQ ID NO: 293988 - DNA, 15 bp, Homo sapiens
ctattttgagttaat

SEQ ID NO: 293989 - DNA, 15 bp, Homo sapiens
tctattttgagttaa

SEQ ID NO: 293990 - DNA, 15 bp, Homo sapiens
atctattttgagtta

SEQ ID NO: 293991 - DNA, 15 bp, Homo sapiens
gatctattttgagtt

SEQ ID NO: 293992 - DNA, 15 bp, Homo sapiens
tgatctattttgagt

SEQ ID NO: 293993 - DNA, 15 bp, Homo sapiens
ttgatctattttgag

SEQ ID NO: 293994 - DNA, 15 bp, Homo sapiens
tttgatctattttga

SEQ ID NO: 293995 - DNA, 15 bp, Homo sapiens
ctttgatctattttg

SEQ ID NO: 293996 - DNA, 15 bp, Homo sapiens
tctttgatctatttt

SEQ ID NO: 293997 - DNA, 15 bp, Homo sapiens
atctttgatctattt

SEQ ID NO: 293998 - DNA, 15 bp, Homo sapiens
gatctttgatctatt

SEQ ID NO: 293999 - DNA, 15 bp, Homo sapiens
agatctttgatctat

SEQ ID NO: 294000 - DNA, 15 bp, Homo sapiens
tagatctttgatcta

SEQ ID NO: 294001 - DNA, 15 bp, Homo sapiens
gtagatctttgatct

SEQ ID NO: 294002 - DNA, 15 bp, Homo sapiens
tgtagatctttgatc

SEQ ID NO: 294003 - DNA, 15 bp, Homo sapiens
atgtagatctttgat

SEQ ID NO: 294004 - DNA, 15 bp, Homo sapiens
catgtagatctttga

SEQ ID NO: 294005 - DNA, 15 bp, Homo sapiens
acatgtagatctttg

SEQ ID NO: 294006 - DNA, 15 bp, Homo sapiens
cacatgtagatcttt

SEQ ID NO: 294007 - DNA, 15 bp, Homo sapiens
tcacatgtagatctt

SEQ ID NO: 294008 - DNA, 15 bp, Homo sapiens
ctcacatgtagatct

SEQ ID NO: 294009 - DNA, 15 bp, Homo sapiens
tctcacatgtagatc

SEQ ID NO: 294010 - DNA, 15 bp, Homo sapiens
ctctcacatgtagat

SEQ ID NO: 294011 - DNA, 15 bp, Homo sapiens
gctctcacatgtaga

SEQ ID NO: 294012 - DNA, 15 bp, Homo sapiens
tgctctcacatgtag

SEQ ID NO: 294013 - DNA, 15 bp, Homo sapiens
ttgctctcacatgta

SEQ ID NO: 294014 - DNA, 15 bp, Homo sapiens
tttgctctcacatgt

SEQ ID NO: 294015 - DNA, 15 bp, Homo sapiens
ttttgctctcacatg

SEQ ID NO: 294016 - DNA, 15 bp, Homo sapiens
tttttgctctcacat

SEQ ID NO: 294017 - DNA, 15 bp, Homo sapiens
gtttttgctctcaca

SEQ ID NO: 294018 - DNA, 15 bp, Homo sapiens
tgtttttgctctcac

SEQ ID NO: 294019 - DNA, 15 bp, Homo sapiens
atgtttttgctctca

SEQ ID NO: 294020 - DNA, 15 bp, Homo sapiens
aatgtttttgctctc

SEQ ID NO: 294021 - DNA, 15 bp, Homo sapiens
aaatgtttttgctct

SEQ ID NO: 294022 - DNA, 15 bp, Homo sapiens
taaatgtttttgctc

SEQ ID NO: 294023 - DNA, 15 bp, Homo sapiens
ttaaatgtttttgct

SEQ ID NO: 294024 - DNA, 15 bp, Homo sapiens
tttaaatgtttttgc

SEQ ID NO: 294025 - DNA, 15 bp, Homo sapiens
gtttaaatgtttttg

SEQ ID NO: 294026 - DNA, 15 bp, Homo sapiens
agtttaaatgttttt

SEQ ID NO: 294027 - DNA, 15 bp, Homo sapiens
aagtttaaatgtttt

SEQ ID NO: 294028 - DNA, 15 bp, Homo sapiens
aaagtttaaatgttt

SEQ ID NO: 294029 - DNA, 15 bp, Homo sapiens
aaaagtttaaatgtt

SEQ ID NO: 294030 - DNA, 15 bp, Homo sapiens
taaaagtttaaatgt

SEQ ID NO: 294031 - DNA, 15 bp, Homo sapiens
ctaaaagtttaaatg

SEQ ID NO: 294032 - DNA, 15 bp, Homo sapiens
cctaaaagtttaaat

SEQ ID NO: 294033 - DNA, 15 bp, Homo sapiens
tcctaaaagtttaaa

SEQ ID NO: 294034 - DNA, 15 bp, Homo sapiens
ctcctaaaagtttaa

SEQ ID NO: 294035 - DNA, 15 bp, Homo sapiens
tctcctaaaagttta

SEQ ID NO: 294036 - DNA, 15 bp, Homo sapiens
ctctcctaaaagttt

SEQ ID NO: 294037 - DNA, 15 bp, Homo sapiens
tctctcctaaaagtt

SEQ ID NO: 294038 - DNA, 15 bp, Homo sapiens
ttctctcctaaaagt

SEQ ID NO: 294039 - DNA, 15 bp, Homo sapiens
cttctctcctaaaag

SEQ ID NO: 294040 - DNA, 15 bp, Homo sapiens
tcttctctcctaaaa

SEQ ID NO: 294041 - DNA, 15 bp, Homo sapiens
gtcttctctcctaaa

SEQ ID NO: 294042 - DNA, 15 bp, Homo sapiens
cgtcttctctcctaa

SEQ ID NO: 294043 - DNA, 15 bp, Homo sapiens
ccgtcttctctccta

SEQ ID NO: 294044 - DNA, 15 bp, Homo sapiens
cccgtcttctctcct

SEQ ID NO: 294045 - DNA, 15 bp, Homo sapiens
ccccgtcttctctcc

SEQ ID NO: 294046 - DNA, 15 bp, Homo sapiens
accccgtcttctctc

SEQ ID NO: 294047 - DNA, 15 bp, Homo sapiens
taccccgtcttctct

SEQ ID NO: 294048 - DNA, 15 bp, Homo sapiens
ctaccccgtcttctc

SEQ ID NO: 294049 - DNA, 15 bp, Homo sapiens
tctaccccgtcttct

SEQ ID NO: 294050 - DNA, 15 bp, Homo sapiens
gtctaccccgtcttc

SEQ ID NO: 294051 - DNA, 15 bp, Homo sapiens
ggtctaccccgtctt

SEQ ID NO: 294052 - DNA, 15 bp, Homo sapiens
aggtctaccccgtct

SEQ ID NO: 294053 - DNA, 15 bp, Homo sapiens
aaggtctaccccgtc

SEQ ID NO: 294054 - DNA, 15 bp, Homo sapiens
aaaggtctaccccgt

SEQ ID NO: 294055 - DNA, 15 bp, Homo sapiens
caaaggtctaccccg

SEQ ID NO: 294056 - DNA, 15 bp, Homo sapiens
acaaaggtctacccc

SEQ ID NO: 294057 - DNA, 15 bp, Homo sapiens
cacaaaggtctaccc

SEQ ID NO: 294058 - DNA, 15 bp, Homo sapiens
tcacaaaggtctacc

SEQ ID NO: 294059 - DNA, 15 bp, Homo sapiens
gtcacaaaggtctac

SEQ ID NO: 294060 - DNA, 15 bp, Homo sapiens
tgtcacaaaggtcta

SEQ ID NO: 294061 - DNA, 15 bp, Homo sapiens
atgtcacaaaggtct

SEQ ID NO: 294062 - DNA, 15 bp, Homo sapiens
aatgtcacaaaggtc

SEQ ID NO: 294063 - DNA, 15 bp, Homo sapiens
caatgtcacaaaggt

SEQ ID NO: 294064 - DNA, 15 bp, Homo sapiens
ccaatgtcacaaagg

SEQ ID NO: 294065 - DNA, 15 bp, Homo sapiens
tccaatgtcacaaag

SEQ ID NO: 294066 - DNA, 15 bp, Homo sapiens
atccaatgtcacaaa

SEQ ID NO: 294067 - DNA, 15 bp, Homo sapiens
aatccaatgtcacaa

SEQ ID NO: 294068 - DNA, 15 bp, Homo sapiens
aaatccaatgtcaca

SEQ ID NO: 294069 - DNA, 15 bp, Homo sapiens
taaatccaatgtcac

SEQ ID NO: 294070 - DNA, 15 bp, Homo sapiens
ctaaatccaatgtca

SEQ ID NO: 294071 - DNA, 15 bp, Homo sapiens
gctaaatccaatgtc

SEQ ID NO: 294072 - DNA, 15 bp, Homo sapiens
ggctaaatccaatgt

SEQ ID NO: 294073 - DNA, 15 bp, Homo sapiens
tggctaaatccaatg

SEQ ID NO: 294074 - DNA, 15 bp, Homo sapiens
atggctaaatccaat

SEQ ID NO: 294075 - DNA, 15 bp, Homo sapiens
catggctaaatccaa

SEQ ID NO: 294076 - DNA, 15 bp, Homo sapiens
tcatggctaaatcca

SEQ ID NO: 294077 - DNA, 15 bp, Homo sapiens
ttcatggctaaatcc

SEQ ID NO: 294078 - DNA, 15 bp, Homo sapiens
attcatggctaaatc

SEQ ID NO: 294079 - DNA, 15 bp, Homo sapiens
aattcatggctaaat

SEQ ID NO: 294080 - DNA, 15 bp, Homo sapiens
gaattcatggctaaa

SEQ ID NO: 294081 - DNA, 15 bp, Homo sapiens
agaattcatggctaa

SEQ ID NO: 294082 - DNA, 15 bp, Homo sapiens
aagaattcatggcta

SEQ ID NO: 294083 - DNA, 15 bp, Homo sapiens
taagaattcatggct

SEQ ID NO: 294084 - DNA, 15 bp, Homo sapiens
ttaagaattcatggc

SEQ ID NO: 294085 - DNA, 15 bp, Homo sapiens
tttaagaattcatgg

SEQ ID NO: 294086 - DNA, 15 bp, Homo sapiens
atttaagaattcatg

SEQ ID NO: 294087 - DNA, 15 bp, Homo sapiens
tatttaagaattcat

SEQ ID NO: 294088 - DNA, 15 bp, Homo sapiens
atatttaagaattca

SEQ ID NO: 294089 - DNA, 15 bp, Homo sapiens
catatttaagaattc

SEQ ID NO: 294090 - DNA, 15 bp, Homo sapiens
tcatatttaagaatt

SEQ ID NO: 294091 - DNA, 15 bp, Homo sapiens
atcatatttaagaat

SEQ ID NO: 294092 - DNA, 15 bp, Homo sapiens
tatcatatttaagaa

SEQ ID NO: 294093 - DNA, 15 bp, Homo sapiens
gtatcatatttaaga

SEQ ID NO: 294094 - DNA, 15 bp, Homo sapiens
ggtatcatatttaag

SEQ ID NO: 294095 - DNA, 15 bp, Homo sapiens
tggtatcatatttaa

SEQ ID NO: 294096 - DNA, 15 bp, Homo sapiens
ttggtatcatattta

SEQ ID NO: 294097 - DNA, 15 bp, Homo sapiens
tttggtatcatattt

SEQ ID NO: 294098 - DNA, 15 bp, Homo sapiens
gtttggtatcatatt

SEQ ID NO: 294099 - DNA, 15 bp, Homo sapiens
tgtttggtatcatat

SEQ ID NO: 294100 - DNA, 15 bp, Homo sapiens
gtgtttggtatcata

SEQ ID NO: 294101 - DNA, 15 bp, Homo sapiens
tgtgtttggtatcat

SEQ ID NO: 294102 - DNA, 15 bp, Homo sapiens
ttgtgtttggtatca

SEQ ID NO: 294103 - DNA, 15 bp, Homo sapiens
tttgtgtttggtatc

SEQ ID NO: 294104 - DNA, 15 bp, Homo sapiens
ttttgtgtttggtat

SEQ ID NO: 294105 - DNA, 15 bp, Homo sapiens
cttttgtgtttggta

SEQ ID NO: 294106 - DNA, 15 bp, Homo sapiens
gcttttgtgtttggt

SEQ ID NO: 294107 - DNA, 15 bp, Homo sapiens
tgcttttgtgtttgg

SEQ ID NO: 294108 - DNA, 15 bp, Homo sapiens
ttgcttttgtgtttg

SEQ ID NO: 294109 - DNA, 15 bp, Homo sapiens
gttgcttttgtgttt

SEQ ID NO: 294110 - DNA, 15 bp, Homo sapiens
tgttgcttttgtgtt

SEQ ID NO: 294111 - DNA, 15 bp, Homo sapiens
ttgttgcttttgtgt

SEQ ID NO: 294112 - DNA, 15 bp, Homo sapiens
tttgttgcttttgtg

SEQ ID NO: 294113 - DNA, 15 bp, Homo sapiens
ttttgttgcttttgt

SEQ ID NO: 294114 - DNA, 15 bp, Homo sapiens
cttttgttgcttttg

SEQ ID NO: 294115 - DNA, 15 bp, Homo sapiens
tcttttgttgctttt

SEQ ID NO: 294116 - DNA, 15 bp, Homo sapiens
ttcttttgttgcttt

SEQ ID NO: 294117 - DNA, 15 bp, Homo sapiens
tttcttttgttgctt

SEQ ID NO: 294118 - DNA, 15 bp, Homo sapiens
ttttcttttgttgct

SEQ ID NO: 294119 - DNA, 15 bp, Homo sapiens
tttttcttttgttgc

SEQ ID NO: 294120 - DNA, 15 bp, Homo sapiens
ctttttcttttgttg

SEQ ID NO: 294121 - DNA, 15 bp, Homo sapiens
actttttcttttgtt

SEQ ID NO: 294122 - DNA, 15 bp, Homo sapiens
tactttttcttttgt

SEQ ID NO: 294123 - DNA, 15 bp, Homo sapiens
ctactttttcttttg

SEQ ID NO: 294124 - DNA, 15 bp, Homo sapiens
tctactttttctttt

SEQ ID NO: 294125 - DNA, 15 bp, Homo sapiens
atctactttttcttt

SEQ ID NO: 294126 - DNA, 15 bp, Homo sapiens
tatctactttttctt

SEQ ID NO: 294127 - DNA, 15 bp, Homo sapiens
ttatctactttttct

SEQ ID NO: 294128 - DNA, 15 bp, Homo sapiens
tttatctactttttc

SEQ ID NO: 294129 - DNA, 15 bp, Homo sapiens
atttatctacttttt

SEQ ID NO: 294130 - DNA, 15 bp, Homo sapiens
aatttatctactttt

SEQ ID NO: 294131 - DNA, 15 bp, Homo sapiens
caatttatctacttt

SEQ ID NO: 294132 - DNA, 15 bp, Homo sapiens
ccaatttatctactt

SEQ ID NO: 294133 - DNA, 15 bp, Homo sapiens
tccaatttatctact

SEQ ID NO: 294134 - DNA, 15 bp, Homo sapiens
gtccaatttatctac

SEQ ID NO: 294135 - DNA, 15 bp, Homo sapiens
ggtccaatttatcta

SEQ ID NO: 294136 - DNA, 15 bp, Homo sapiens
aggtccaatttatct

SEQ ID NO: 294137 - DNA, 15 bp, Homo sapiens
gaggtccaatttatc

SEQ ID NO: 294138 - DNA, 15 bp, Homo sapiens
tgaggtccaatttat

SEQ ID NO: 294139 - DNA, 15 bp, Homo sapiens
atgaggtccaattta

SEQ ID NO: 294140 - DNA, 15 bp, Homo sapiens
gatgaggtccaattt

SEQ ID NO: 294141 - DNA, 15 bp, Homo sapiens
tgatgaggtccaatt

SEQ ID NO: 294142 - DNA, 15 bp, Homo sapiens
ttgatgaggtccaat

SEQ ID NO: 294143 - DNA, 15 bp, Homo sapiens
tttgatgaggtccaa

SEQ ID NO: 294144 - DNA, 15 bp, Homo sapiens
ttttgatgaggtcca

SEQ ID NO: 294145 - DNA, 15 bp, Homo sapiens
attttgatgaggtcc

SEQ ID NO: 294146 - DNA, 15 bp, Homo sapiens
aattttgatgaggtc

SEQ ID NO: 294147 - DNA, 15 bp, Homo sapiens
taattttgatgaggt

SEQ ID NO: 294148 - DNA, 15 bp, Homo sapiens
ttaattttgatgagg

SEQ ID NO: 294149 - DNA, 15 bp, Homo sapiens
tttaattttgatgag

SEQ ID NO: 294150 - DNA, 15 bp, Homo sapiens
ttttaattttgatga

SEQ ID NO: 294151 - DNA, 15 bp, Homo sapiens
tttttaattttgatg

SEQ ID NO: 294152 - DNA, 15 bp, Homo sapiens
gtttttaattttgat

SEQ ID NO: 294153 - DNA, 15 bp, Homo sapiens
tgtttttaattttga

SEQ ID NO: 294154 - DNA, 15 bp, Homo sapiens
atgtttttaattttg

SEQ ID NO: 294155 - DNA, 15 bp, Homo sapiens
aatgtttttaatttt

SEQ ID NO: 294156 - DNA, 15 bp, Homo sapiens
aaatgtttttaattt

SEQ ID NO: 294157 - DNA, 15 bp, Homo sapiens
caaatgtttttaatt

SEQ ID NO: 294158 - DNA, 15 bp, Homo sapiens
acaaatgtttttaat

SEQ ID NO: 294159 - DNA, 15 bp, Homo sapiens
cacaaatgtttttaa

SEQ ID NO: 294160 - DNA, 15 bp, Homo sapiens
acacaaatgttttta

SEQ ID NO: 294161 - DNA, 15 bp, Homo sapiens
aacacaaatgttttt

SEQ ID NO: 294162 - DNA, 15 bp, Homo sapiens
aaacacaaatgtttt

SEQ ID NO: 294163 - DNA, 15 bp, Homo sapiens
gaaacacaaatgttt

SEQ ID NO: 294164 - DNA, 15 bp, Homo sapiens
tgaaacacaaatgtt

SEQ ID NO: 294165 - DNA, 15 bp, Homo sapiens
ttgaaacacaaatgt

SEQ ID NO: 294166 - DNA, 15 bp, Homo sapiens
attgaaacacaaatg

SEQ ID NO: 294167 - DNA, 15 bp, Homo sapiens
cattgaaacacaaat

SEQ ID NO: 294168 - DNA, 15 bp, Homo sapiens
ccattgaaacacaaa

SEQ ID NO: 294169 - DNA, 15 bp, Homo sapiens
tccattgaaacacaa

SEQ ID NO: 294170 - DNA, 15 bp, Homo sapiens
ttccattgaaacaca

SEQ ID NO: 294171 - DNA, 15 bp, Homo sapiens
cttccattgaaacac

SEQ ID NO: 294172 - DNA, 15 bp, Homo sapiens
ccttccattgaaaca

SEQ ID NO: 294173 - DNA, 15 bp, Homo sapiens
tccttccattgaaac

SEQ ID NO: 294174 - DNA, 15 bp, Homo sapiens
gtccttccattgaaa

SEQ ID NO: 294175 - DNA, 15 bp, Homo sapiens
tgtccttccattgaa

SEQ ID NO: 294176 - DNA, 15 bp, Homo sapiens
atgtccttccattga

SEQ ID NO: 294177 - DNA, 15 bp, Homo sapiens
aatgtccttccattg

SEQ ID NO: 294178 - DNA, 15 bp, Homo sapiens
taatgtccttccatt

SEQ ID NO: 294179 - DNA, 15 bp, Homo sapiens
gtaatgtccttccat

SEQ ID NO: 294180 - DNA, 15 bp, Homo sapiens
tgtaatgtccttcca

SEQ ID NO: 294181 - DNA, 15 bp, Homo sapiens
ttgtaatgtccttcc

SEQ ID NO: 294182 - DNA, 15 bp, Homo sapiens
tttgtaatgtccttc

SEQ ID NO: 294183 - DNA, 15 bp, Homo sapiens
ctttgtaatgtcctt

SEQ ID NO: 294184 - DNA, 15 bp, Homo sapiens
tctttgtaatgtcct

SEQ ID NO: 294185 - DNA, 15 bp, Homo sapiens
ttctttgtaatgtcc

SEQ ID NO: 294186 - DNA, 15 bp, Homo sapiens
tttctttgtaatgtc

SEQ ID NO: 294187 - DNA, 15 bp, Homo sapiens
ctttctttgtaatgt

SEQ ID NO: 294188 - DNA, 15 bp, Homo sapiens
actttctttgtaatg

SEQ ID NO: 294189 - DNA, 15 bp, Homo sapiens
cactttctttgtaat

SEQ ID NO: 294190 - DNA, 15 bp, Homo sapiens
tcactttctttgtaa

SEQ ID NO: 294191 - DNA, 15 bp, Homo sapiens
ttcactttctttgta

SEQ ID NO: 294192 - DNA, 15 bp, Homo sapiens
tttcactttctttgt

SEQ ID NO: 294193 - DNA, 15 bp, Homo sapiens
atttcactttctttg

SEQ ID NO: 294194 - DNA, 15 bp, Homo sapiens
catttcactttcttt

SEQ ID NO: 294195 - DNA, 15 bp, Homo sapiens
tcatttcactttctt

SEQ ID NO: 294196 - DNA, 15 bp, Homo sapiens
gtcatttcactttct

SEQ ID NO: 294197 - DNA, 15 bp, Homo sapiens
tgtcatttcactttc

SEQ ID NO: 294198 - DNA, 15 bp, Homo sapiens
ctgtcatttcacttt

SEQ ID NO: 294199 - DNA, 15 bp, Homo sapiens
gctgtcatttcactt

SEQ ID NO: 294200 - DNA, 15 bp, Homo sapiens
ggctgtcatttcact

SEQ ID NO: 294201 - DNA, 15 bp, Homo sapiens
gggctgtcatttcac

SEQ ID NO: 294202 - DNA, 15 bp, Homo sapiens
tgggctgtcatttca

SEQ ID NO: 294203 - DNA, 15 bp, Homo sapiens
ctgggctgtcatttc

SEQ ID NO: 294204 - DNA, 15 bp, Homo sapiens
actgggctgtcattt

SEQ ID NO: 294205 - DNA, 15 bp, Homo sapiens
aactgggctgtcatt

SEQ ID NO: 294206 - DNA, 15 bp, Homo sapiens
aaactgggctgtcat

SEQ ID NO: 294207 - DNA, 15 bp, Homo sapiens
taaactgggctgtca

SEQ ID NO: 294208 - DNA, 15 bp, Homo sapiens
ttaaactgggctgtc

SEQ ID NO: 294209 - DNA, 15 bp, Homo sapiens
tttaaactgggctgt

SEQ ID NO: 294210 - DNA, 15 bp, Homo sapiens
ttttaaactgggctg

SEQ ID NO: 294211 - DNA, 15 bp, Homo sapiens
tttttaaactgggct

SEQ ID NO: 294212 - DNA, 15 bp, Homo sapiens
atttttaaactgggc

SEQ ID NO: 294213 - DNA, 15 bp, Homo sapiens
catttttaaactggg

SEQ ID NO: 294214 - DNA, 15 bp, Homo sapiens
ccatttttaaactgg

SEQ ID NO: 294215 - DNA, 15 bp, Homo sapiens
accatttttaaactg

SEQ ID NO: 294216 - DNA, 15 bp, Homo sapiens
gaccatttttaaact

SEQ ID NO: 294217 - DNA, 15 bp, Homo sapiens
tgaccatttttaaac

SEQ ID NO: 294218 - DNA, 15 bp, Homo sapiens
ctgaccatttttaaa

SEQ ID NO: 294219 - DNA, 15 bp, Homo sapiens
actgaccatttttaa

SEQ ID NO: 294220 - DNA, 15 bp, Homo sapiens
aactgaccattttta

SEQ ID NO: 294221 - DNA, 15 bp, Homo sapiens
aaactgaccattttt

SEQ ID NO: 294222 - DNA, 15 bp, Homo sapiens
taaactgaccatttt

SEQ ID NO: 294223 - DNA, 15 bp, Homo sapiens
ataaactgaccattt

SEQ ID NO: 294224 - DNA, 15 bp, Homo sapiens
cataaactgaccatt

SEQ ID NO: 294225 - DNA, 15 bp, Homo sapiens
tcataaactgaccat

SEQ ID NO: 294226 - DNA, 15 bp, Homo sapiens
ttcataaactgacca

SEQ ID NO: 294227 - DNA, 15 bp, Homo sapiens
attcataaactgacc

SEQ ID NO: 294228 - DNA, 15 bp, Homo sapiens
tattcataaactgac

SEQ ID NO: 294229 - DNA, 15 bp, Homo sapiens
gtattcataaactga

SEQ ID NO: 294230 - DNA, 15 bp, Homo sapiens
tgtattcataaactg

SEQ ID NO: 294231 - DNA, 15 bp, Homo sapiens
atgtattcataaact

SEQ ID NO: 294232 - DNA, 15 bp, Homo sapiens
gatgtattcataaac

SEQ ID NO: 294233 - DNA, 15 bp, Homo sapiens
agatgtattcataaa

SEQ ID NO: 294234 - DNA, 15 bp, Homo sapiens
gagatgtattcataa

SEQ ID NO: 294235 - DNA, 15 bp, Homo sapiens
agagatgtattcata

SEQ ID NO: 294236 - DNA, 15 bp, Homo sapiens
gagagatgtattcat

SEQ ID NO: 294237 - DNA, 15 bp, Homo sapiens
agagagatgtattca

SEQ ID NO: 294238 - DNA, 15 bp, Homo sapiens
gagagagatgtattc

SEQ ID NO: 294239 - DNA, 15 bp, Homo sapiens
agagagagatgtatt

SEQ ID NO: 294240 - DNA, 15 bp, Homo sapiens
tagagagagatgtat

SEQ ID NO: 294241 - DNA, 15 bp, Homo sapiens
ttagagagagatgta

SEQ ID NO: 294242 - DNA, 15 bp, Homo sapiens
tttagagagagatgt

SEQ ID NO: 294243 - DNA, 15 bp, Homo sapiens
ctttagagagagatg

SEQ ID NO: 294244 - DNA, 15 bp, Homo sapiens
tctttagagagagat

SEQ ID NO: 294245 - DNA, 15 bp, Homo sapiens
ttctttagagagaga

SEQ ID NO: 294246 - DNA, 15 bp, Homo sapiens
cttctttagagagag

SEQ ID NO: 294247 - DNA, 15 bp, Homo sapiens
tcttctttagagaga

SEQ ID NO: 294248 - DNA, 15 bp, Homo sapiens
atcttctttagagag

SEQ ID NO: 294249 - DNA, 15 bp, Homo sapiens
tatcttctttagaga

SEQ ID NO: 294250 - DNA, 15 bp, Homo sapiens
atatcttctttagag

SEQ ID NO: 294251 - DNA, 15 bp, Homo sapiens
tatatcttctttaga

SEQ ID NO: 294252 - DNA, 15 bp, Homo sapiens
gtatatcttctttag

SEQ ID NO: 294253 - DNA, 15 bp, Homo sapiens
tgtatatcttcttta

SEQ ID NO: 294254 - DNA, 15 bp, Homo sapiens
ttgtatatcttcttt

SEQ ID NO: 294255 - DNA, 15 bp, Homo sapiens
tttgtatatcttctt

SEQ ID NO: 294256 - DNA, 15 bp, Homo sapiens
atttgtatatcttct

SEQ ID NO: 294257 - DNA, 15 bp, Homo sapiens
tatttgtatatcttc

SEQ ID NO: 294258 - DNA, 15 bp, Homo sapiens
ctatttgtatatctt

SEQ ID NO: 294259 - DNA, 15 bp, Homo sapiens
actatttgtatatct

SEQ ID NO: 294260 - DNA, 15 bp, Homo sapiens
gactatttgtatatc

SEQ ID NO: 294261 - DNA, 15 bp, Homo sapiens
tgactatttgtatat

SEQ ID NO: 294262 - DNA, 15 bp, Homo sapiens
ttgactatttgtata

SEQ ID NO: 294263 - DNA, 15 bp, Homo sapiens
cttgactatttgtat

SEQ ID NO: 294264 - DNA, 15 bp, Homo sapiens
tcttgactatttgta

SEQ ID NO: 294265 - DNA, 15 bp, Homo sapiens
ttcttgactatttgt

SEQ ID NO: 294266 - DNA, 15 bp, Homo sapiens
cttcttgactatttg

SEQ ID NO: 294267 - DNA, 15 bp, Homo sapiens
gcttcttgactattt

SEQ ID NO: 294268 - DNA, 15 bp, Homo sapiens
tgcttcttgactatt

SEQ ID NO: 294269 - DNA, 15 bp, Homo sapiens
gtgcttcttgactat

SEQ ID NO: 294270 - DNA, 15 bp, Homo sapiens
tgtgcttcttgacta

SEQ ID NO: 294271 - DNA, 15 bp, Homo sapiens
atgtgcttcttgact

SEQ ID NO: 294272 - DNA, 15 bp, Homo sapiens
catgtgcttcttgac

SEQ ID NO: 294273 - DNA, 15 bp, Homo sapiens
tcatgtgcttcttga

SEQ ID NO: 294274 - DNA, 15 bp, Homo sapiens
ttcatgtgcttcttg

SEQ ID NO: 294275 - DNA, 15 bp, Homo sapiens
tttcatgtgcttctt

SEQ ID NO: 294276 - DNA, 15 bp, Homo sapiens
ttttcatgtgcttct

SEQ ID NO: 294277 - DNA, 15 bp, Homo sapiens
cttttcatgtgcttc

SEQ ID NO: 294278 - DNA, 15 bp, Homo sapiens
tcttttcatgtgctt

SEQ ID NO: 294279 - DNA, 15 bp, Homo sapiens
atcttttcatgtgct

SEQ ID NO: 294280 - DNA, 15 bp, Homo sapiens
catcttttcatgtgc

SEQ ID NO: 294281 - DNA, 15 bp, Homo sapiens
acatcttttcatgtg

SEQ ID NO: 294282 - DNA, 15 bp, Homo sapiens
aacatcttttcatgt

SEQ ID NO: 294283 - DNA, 15 bp, Homo sapiens
gaacatcttttcatg

SEQ ID NO: 294284 - DNA, 15 bp, Homo sapiens
tgaacatcttttcat

SEQ ID NO: 294285 - DNA, 15 bp, Homo sapiens
ttgaacatcttttca

SEQ ID NO: 294286 - DNA, 15 bp, Homo sapiens
gttgaacatcttttc

SEQ ID NO: 294287 - DNA, 15 bp, Homo sapiens
tgttgaacatctttt

SEQ ID NO: 294288 - DNA, 15 bp, Homo sapiens
gtgttgaacatcttt

SEQ ID NO: 294289 - DNA, 15 bp, Homo sapiens
ggtgttgaacatctt

SEQ ID NO: 294290 - DNA, 15 bp, Homo sapiens
aggtgttgaacatct

SEQ ID NO: 294291 - DNA, 15 bp, Homo sapiens
aaggtgttgaacatc

SEQ ID NO: 294292 - DNA, 15 bp, Homo sapiens
taaggtgttgaacat

SEQ ID NO: 294293 - DNA, 15 bp, Homo sapiens
ctaaggtgttgaaca

SEQ ID NO: 294294 - DNA, 15 bp, Homo sapiens
actaaggtgttgaac

SEQ ID NO: 294295 - DNA, 15 bp, Homo sapiens
gactaaggtgttgaa

SEQ ID NO: 294296 - DNA, 15 bp, Homo sapiens
tgactaaggtgttga

SEQ ID NO: 294297 - DNA, 15 bp, Homo sapiens
atgactaaggtgttg

SEQ ID NO: 294298 - DNA, 15 bp, Homo sapiens
gatgactaaggtgtt

SEQ ID NO: 294299 - DNA, 15 bp, Homo sapiens
tgatgactaaggtgt

SEQ ID NO: 294300 - DNA, 15 bp, Homo sapiens
ctgatgactaaggtg

SEQ ID NO: 294301 - DNA, 15 bp, Homo sapiens
tctgatgactaaggt

SEQ ID NO: 294302 - DNA, 15 bp, Homo sapiens
ctctgatgactaagg

SEQ ID NO: 294303 - DNA, 15 bp, Homo sapiens
tctctgatgactaag

SEQ ID NO: 294304 - DNA, 15 bp, Homo sapiens
ttctctgatgactaa

SEQ ID NO: 294305 - DNA, 15 bp, Homo sapiens
tttctctgatgacta

SEQ ID NO: 294306 - DNA, 15 bp, Homo sapiens
atttctctgatgact

SEQ ID NO: 294307 - DNA, 15 bp, Homo sapiens
catttctctgatgac

SEQ ID NO: 294308 - DNA, 15 bp, Homo sapiens
gcatttctctgatga

SEQ ID NO: 294309 - DNA, 15 bp, Homo sapiens
tgcatttctctgatg

SEQ ID NO: 294310 - DNA, 15 bp, Homo sapiens
ttgcatttctctgat

SEQ ID NO: 294311 - DNA, 15 bp, Homo sapiens
tttgcatttctctga

SEQ ID NO: 294312 - DNA, 15 bp, Homo sapiens
atttgcatttctctg

SEQ ID NO: 294313 - DNA, 15 bp, Homo sapiens
gatttgcatttctct

SEQ ID NO: 294314 - DNA, 15 bp, Homo sapiens
tgatttgcatttctc

SEQ ID NO: 294315 - DNA, 15 bp, Homo sapiens
ttgatttgcatttct

SEQ ID NO: 294316 - DNA, 15 bp, Homo sapiens
tttgatttgcatttc

SEQ ID NO: 294317 - DNA, 15 bp, Homo sapiens
ttttgatttgcattt

SEQ ID NO: 294318 - DNA, 15 bp, Homo sapiens
gttttgatttgcatt

SEQ ID NO: 294319 - DNA, 15 bp, Homo sapiens
ggttttgatttgcat

SEQ ID NO: 294320 - DNA, 15 bp, Homo sapiens
tggttttgatttgca

SEQ ID NO: 294321 - DNA, 15 bp, Homo sapiens
atggttttgatttgc

SEQ ID NO: 294322 - DNA, 15 bp, Homo sapiens
catggttttgatttg

SEQ ID NO: 294323 - DNA, 15 bp, Homo sapiens
ccatggttttgattt

SEQ ID NO: 294324 - DNA, 15 bp, Homo sapiens
accatggttttgatt

SEQ ID NO: 294325 - DNA, 15 bp, Homo sapiens
caccatggttttgat

SEQ ID NO: 294326 - DNA, 15 bp, Homo sapiens
tcaccatggttttga

SEQ ID NO: 294327 - DNA, 15 bp, Homo sapiens
ctcaccatggttttg

SEQ ID NO: 294328 - DNA, 15 bp, Homo sapiens
tctcaccatggtttt

SEQ ID NO: 294329 - DNA, 15 bp, Homo sapiens
atctcaccatggttt

SEQ ID NO: 294330 - DNA, 15 bp, Homo sapiens
tatctcaccatggtt

SEQ ID NO: 294331 - DNA, 15 bp, Homo sapiens
gtatctcaccatggt

SEQ ID NO: 294332 - DNA, 15 bp, Homo sapiens
ggtatctcaccatgg

SEQ ID NO: 294333 - DNA, 15 bp, Homo sapiens
tggtatctcaccatg

SEQ ID NO: 294334 - DNA, 15 bp, Homo sapiens
gtggtatctcaccat

SEQ ID NO: 294335 - DNA, 15 bp, Homo sapiens
agtggtatctcacca

SEQ ID NO: 294336 - DNA, 15 bp, Homo sapiens
aagtggtatctcacc

SEQ ID NO: 294337 - DNA, 15 bp, Homo sapiens
aaagtggtatctcac

SEQ ID NO: 294338 - DNA, 15 bp, Homo sapiens
taaagtggtatctca

SEQ ID NO: 294339 - DNA, 15 bp, Homo sapiens
gtaaagtggtatctc

SEQ ID NO: 294340 - DNA, 15 bp, Homo sapiens
tgtaaagtggtatct

SEQ ID NO: 294341 - DNA, 15 bp, Homo sapiens
gtgtaaagtggtatc

SEQ ID NO: 294342 - DNA, 15 bp, Homo sapiens
ggtgtaaagtggtat

SEQ ID NO: 294343 - DNA, 15 bp, Homo sapiens
gggtgtaaagtggta

SEQ ID NO: 294344 - DNA, 15 bp, Homo sapiens
tgggtgtaaagtggt

SEQ ID NO: 294345 - DNA, 15 bp, Homo sapiens
atgggtgtaaagtgg

SEQ ID NO: 294346 - DNA, 15 bp, Homo sapiens
aatgggtgtaaagtg

SEQ ID NO: 294347 - DNA, 15 bp, Homo sapiens
aaatgggtgtaaagt

SEQ ID NO: 294348 - DNA, 15 bp, Homo sapiens
caaatgggtgtaaag

SEQ ID NO: 294349 - DNA, 15 bp, Homo sapiens
ccaaatgggtgtaaa

SEQ ID NO: 294350 - DNA, 15 bp, Homo sapiens
tccaaatgggtgtaa

SEQ ID NO: 294351 - DNA, 15 bp, Homo sapiens
atccaaatgggtgta

SEQ ID NO: 294352 - DNA, 15 bp, Homo sapiens
catccaaatgggtgt

SEQ ID NO: 294353 - DNA, 15 bp, Homo sapiens
ccatccaaatgggtg

SEQ ID NO: 294354 - DNA, 15 bp, Homo sapiens
gccatccaaatgggt

SEQ ID NO: 294355 - DNA, 15 bp, Homo sapiens
agccatccaaatggg

SEQ ID NO: 294356 - DNA, 15 bp, Homo sapiens
tagccatccaaatgg

SEQ ID NO: 294357 - DNA, 15 bp, Homo sapiens
atagccatccaaatg

SEQ ID NO: 294358 - DNA, 15 bp, Homo sapiens
tatagccatccaaat

SEQ ID NO: 294359 - DNA, 15 bp, Homo sapiens
gtatagccatccaaa

SEQ ID NO: 294360 - DNA, 15 bp, Homo sapiens
agtatagccatccaa

SEQ ID NO: 294361 - DNA, 15 bp, Homo sapiens
aagtatagccatcca

SEQ ID NO: 294362 - DNA, 15 bp, Homo sapiens
caagtatagccatcc

SEQ ID NO: 294363 - DNA, 15 bp, Homo sapiens
tcaagtatagccatc

SEQ ID NO: 294364 - DNA, 15 bp, Homo sapiens
ttcaagtatagccat

SEQ ID NO: 294365 - DNA, 15 bp, Homo sapiens
tttcaagtatagcca

SEQ ID NO: 294366 - DNA, 15 bp, Homo sapiens
ttttcaagtatagcc

SEQ ID NO: 294367 - DNA, 15 bp, Homo sapiens
cttttcaagtatagc

SEQ ID NO: 294368 - DNA, 15 bp, Homo sapiens
tcttttcaagtatag

SEQ ID NO: 294369 - DNA, 15 bp, Homo sapiens
gtcttttcaagtata

SEQ ID NO: 294370 - DNA, 15 bp, Homo sapiens
tgtcttttcaagtat

SEQ ID NO: 294371 - DNA, 15 bp, Homo sapiens
ctgtcttttcaagta

SEQ ID NO: 294372 - DNA, 15 bp, Homo sapiens
tctgtcttttcaagt

SEQ ID NO: 294373 - DNA, 15 bp, Homo sapiens
atctgtcttttcaag

SEQ ID NO: 294374 - DNA, 15 bp, Homo sapiens
gatctgtcttttcaa

SEQ ID NO: 294375 - DNA, 15 bp, Homo sapiens
tgatctgtcttttca

SEQ ID NO: 294376 - DNA, 15 bp, Homo sapiens
atgatctgtcttttc

SEQ ID NO: 294377 - DNA, 15 bp, Homo sapiens
tatgatctgtctttt

SEQ ID NO: 294378 - DNA, 15 bp, Homo sapiens
ttatgatctgtcttt

SEQ ID NO: 294379 - DNA, 15 bp, Homo sapiens
gttatgatctgtctt

SEQ ID NO: 294380 - DNA, 15 bp, Homo sapiens
tgttatgatctgtct

SEQ ID NO: 294381 - DNA, 15 bp, Homo sapiens
ttgttatgatctgtc

SEQ ID NO: 294382 - DNA, 15 bp, Homo sapiens
cttgttatgatctgt

SEQ ID NO: 294383 - DNA, 15 bp, Homo sapiens
acttgttatgatctg

SEQ ID NO: 294384 - DNA, 15 bp, Homo sapiens
cacttgttatgatct

SEQ ID NO: 294385 - DNA, 15 bp, Homo sapiens
acacttgttatgatc

SEQ ID NO: 294386 - DNA, 15 bp, Homo sapiens
aacacttgttatgat

SEQ ID NO: 294387 - DNA, 15 bp, Homo sapiens
caacacttgttatga

SEQ ID NO: 294388 - DNA, 15 bp, Homo sapiens
tcaacacttgttatg

SEQ ID NO: 294389 - DNA, 15 bp, Homo sapiens
gtcaacacttgttat

SEQ ID NO: 294390 - DNA, 15 bp, Homo sapiens
tgtcaacacttgtta

SEQ ID NO: 294391 - DNA, 15 bp, Homo sapiens
ttgtcaacacttgtt

SEQ ID NO: 294392 - DNA, 15 bp, Homo sapiens
cttgtcaacacttgt

SEQ ID NO: 294393 - DNA, 15 bp, Homo sapiens
ccttgtcaacacttg

SEQ ID NO: 294394 - DNA, 15 bp, Homo sapiens
tccttgtcaacactt

SEQ ID NO: 294395 - DNA, 15 bp, Homo sapiens
atccttgtcaacact

SEQ ID NO: 294396 - DNA, 15 bp, Homo sapiens
tatccttgtcaacac

SEQ ID NO: 294397 - DNA, 15 bp, Homo sapiens
atatccttgtcaaca

SEQ ID NO: 294398 - DNA, 15 bp, Homo sapiens
catatccttgtcaac

SEQ ID NO: 294399 - DNA, 15 bp, Homo sapiens
ccatatccttgtcaa

SEQ ID NO: 294400 - DNA, 15 bp, Homo sapiens
tccatatccttgtca

SEQ ID NO: 294401 - DNA, 15 bp, Homo sapiens
atccatatccttgtc

SEQ ID NO: 294402 - DNA, 15 bp, Homo sapiens
tatccatatccttgt

SEQ ID NO: 294403 - DNA, 15 bp, Homo sapiens
ttatccatatccttg

SEQ ID NO: 294404 - DNA, 15 bp, Homo sapiens
tttatccatatcctt

SEQ ID NO: 294405 - DNA, 15 bp, Homo sapiens
atttatccatatcct

SEQ ID NO: 294406 - DNA, 15 bp, Homo sapiens
aatttatccatatcc

SEQ ID NO: 294407 - DNA, 15 bp, Homo sapiens
caatttatccatatc

SEQ ID NO: 294408 - DNA, 15 bp, Homo sapiens
gcaatttatccatat

SEQ ID NO: 294409 - DNA, 15 bp, Homo sapiens
tgcaatttatccata

SEQ ID NO: 294410 - DNA, 15 bp, Homo sapiens
ttgcaatttatccat

SEQ ID NO: 294411 - DNA, 15 bp, Homo sapiens
gttgcaatttatcca

SEQ ID NO: 294412 - DNA, 15 bp, Homo sapiens
ggttgcaatttatcc

SEQ ID NO: 294413 - DNA, 15 bp, Homo sapiens
gggttgcaatttatc

SEQ ID NO: 294414 - DNA, 15 bp, Homo sapiens
agggttgcaatttat

SEQ ID NO: 294415 - DNA, 15 bp, Homo sapiens
aagggttgcaattta

SEQ ID NO: 294416 - DNA, 15 bp, Homo sapiens
caagggttgcaattt

SEQ ID NO: 294417 - DNA, 15 bp, Homo sapiens
acaagggttgcaatt

SEQ ID NO: 294418 - DNA, 15 bp, Homo sapiens
cacaagggttgcaat

SEQ ID NO: 294419 - DNA, 15 bp, Homo sapiens
ccacaagggttgcaa

SEQ ID NO: 294420 - DNA, 15 bp, Homo sapiens
gccacaagggttgca

SEQ ID NO: 294421 - DNA, 15 bp, Homo sapiens
agccacaagggttgc

SEQ ID NO: 294422 - DNA, 15 bp, Homo sapiens
cagccacaagggttg

SEQ ID NO: 294423 - DNA, 15 bp, Homo sapiens
gcagccacaagggtt

SEQ ID NO: 294424 - DNA, 15 bp, Homo sapiens
agcagccacaagggt

SEQ ID NO: 294425 - DNA, 15 bp, Homo sapiens
gagcagccacaaggg

SEQ ID NO: 294426 - DNA, 15 bp, Homo sapiens
cgagcagccacaagg

SEQ ID NO: 294427 - DNA, 15 bp, Homo sapiens
acgagcagccacaag

SEQ ID NO: 294428 - DNA, 15 bp, Homo sapiens
cacgagcagccacaa

SEQ ID NO: 294429 - DNA, 15 bp, Homo sapiens
ccacgagcagccaca

SEQ ID NO: 294430 - DNA, 15 bp, Homo sapiens
cccacgagcagccac

SEQ ID NO: 294431 - DNA, 15 bp, Homo sapiens
ccccacgagcagcca

SEQ ID NO: 294432 - DNA, 15 bp, Homo sapiens
tccccacgagcagcc

SEQ ID NO: 294433 - DNA, 15 bp, Homo sapiens
atccccacgagcagc

SEQ ID NO: 294434 - DNA, 15 bp, Homo sapiens
catccccacgagcag

SEQ ID NO: 294435 - DNA, 15 bp, Homo sapiens
tcatccccacgagca

SEQ ID NO: 294436 - DNA, 15 bp, Homo sapiens
atcatccccacgagc

SEQ ID NO: 294437 - DNA, 15 bp, Homo sapiens
catcatccccacgag

SEQ ID NO: 294438 - DNA, 15 bp, Homo sapiens
acatcatccccacga

SEQ ID NO: 294439 - DNA, 15 bp, Homo sapiens
tacatcatccccacg

SEQ ID NO: 294440 - DNA, 15 bp, Homo sapiens
ctacatcatccccac

SEQ ID NO: 294441 - DNA, 15 bp, Homo sapiens
tctacatcatcccca

SEQ ID NO: 294442 - DNA, 15 bp, Homo sapiens
ttctacatcatcccc

SEQ ID NO: 294443 - DNA, 15 bp, Homo sapiens
attctacatcatccc

SEQ ID NO: 294444 - DNA, 15 bp, Homo sapiens
cattctacatcatcc

SEQ ID NO: 294445 - DNA, 15 bp, Homo sapiens
ccattctacatcatc

SEQ ID NO: 294446 - DNA, 15 bp, Homo sapiens
accattctacatcat

SEQ ID NO: 294447 - DNA, 15 bp, Homo sapiens
caccattctacatca

SEQ ID NO: 294448 - DNA, 15 bp, Homo sapiens
gcaccattctacatc

SEQ ID NO: 294449 - DNA, 15 bp, Homo sapiens
agcaccattctacat

SEQ ID NO: 294450 - DNA, 15 bp, Homo sapiens
cagcaccattctaca

SEQ ID NO: 294451 - DNA, 15 bp, Homo sapiens
acagcaccattctac

SEQ ID NO: 294452 - DNA, 15 bp, Homo sapiens
tacagcaccattcta

SEQ ID NO: 294453 - DNA, 15 bp, Homo sapiens
ctacagcaccattct

SEQ ID NO: 294454 - DNA, 15 bp, Homo sapiens
gctacagcaccattc

SEQ ID NO: 294455 - DNA, 15 bp, Homo sapiens
agctacagcaccatt

SEQ ID NO: 294456 - DNA, 15 bp, Homo sapiens
aagctacagcaccat

SEQ ID NO: 294457 - DNA, 15 bp, Homo sapiens
aaagctacagcacca

SEQ ID NO: 294458 - DNA, 15 bp, Homo sapiens
caaagctacagcacc

SEQ ID NO: 294459 - DNA, 15 bp, Homo sapiens
ccaaagctacagcac

SEQ ID NO: 294460 - DNA, 15 bp, Homo sapiens
tccaaagctacagca

SEQ ID NO: 294461 - DNA, 15 bp, Homo sapiens
ttccaaagctacagc

SEQ ID NO: 294462 - DNA, 15 bp, Homo sapiens
tttccaaagctacag

SEQ ID NO: 294463 - DNA, 15 bp, Homo sapiens
ttttccaaagctaca

SEQ ID NO: 294464 - DNA, 15 bp, Homo sapiens
gttttccaaagctac

SEQ ID NO: 294465 - DNA, 15 bp, Homo sapiens
tgttttccaaagcta

SEQ ID NO: 294466 - DNA, 15 bp, Homo sapiens
ctgttttccaaagct

SEQ ID NO: 294467 - DNA, 15 bp, Homo sapiens
gctgttttccaaagc

SEQ ID NO: 294468 - DNA, 15 bp, Homo sapiens
ggctgttttccaaag

SEQ ID NO: 294469 - DNA, 15 bp, Homo sapiens
aggctgttttccaaa

SEQ ID NO: 294470 - DNA, 15 bp, Homo sapiens
caggctgttttccaa

SEQ ID NO: 294471 - DNA, 15 bp, Homo sapiens
ccaggctgttttcca

SEQ ID NO: 294472 - DNA, 15 bp, Homo sapiens
gccaggctgttttcc

SEQ ID NO: 294473 - DNA, 15 bp, Homo sapiens
tgccaggctgttttc

SEQ ID NO: 294474 - DNA, 15 bp, Homo sapiens
ttgccaggctgtttt

SEQ ID NO: 294475 - DNA, 15 bp, Homo sapiens
attgccaggctgttt

SEQ ID NO: 294476 - DNA, 15 bp, Homo sapiens
aattgccaggctgtt

SEQ ID NO: 294477 - DNA, 15 bp, Homo sapiens
gaattgccaggctgt

SEQ ID NO: 294478 - DNA, 15 bp, Homo sapiens
ggaattgccaggctg

SEQ ID NO: 294479 - DNA, 15 bp, Homo sapiens
aggaattgccaggct

SEQ ID NO: 294480 - DNA, 15 bp, Homo sapiens
caggaattgccaggc

SEQ ID NO: 294481 - DNA, 15 bp, Homo sapiens
tcaggaattgccagg

SEQ ID NO: 294482 - DNA, 15 bp, Homo sapiens
ttcaggaattgccag

SEQ ID NO: 294483 - DNA, 15 bp, Homo sapiens
tttcaggaattgcca

SEQ ID NO: 294484 - DNA, 15 bp, Homo sapiens
ttttcaggaattgcc

SEQ ID NO: 294485 - DNA, 15 bp, Homo sapiens
tttttcaggaattgc

SEQ ID NO: 294486 - DNA, 15 bp, Homo sapiens
gtttttcaggaattg

SEQ ID NO: 294487 - DNA, 15 bp, Homo sapiens
agtttttcaggaatt

SEQ ID NO: 294488 - DNA, 15 bp, Homo sapiens
cagtttttcaggaat

SEQ ID NO: 294489 - DNA, 15 bp, Homo sapiens
tcagtttttcaggaa

SEQ ID NO: 294490 - DNA, 15 bp, Homo sapiens
ttcagtttttcagga

SEQ ID NO: 294491 - DNA, 15 bp, Homo sapiens
tttcagtttttcagg

SEQ ID NO: 294492 - DNA, 15 bp, Homo sapiens
ctttcagtttttcag

SEQ ID NO: 294493 - DNA, 15 bp, Homo sapiens
tctttcagtttttca

SEQ ID NO: 294494 - DNA, 15 bp, Homo sapiens
gtctttcagtttttc

SEQ ID NO: 294495 - DNA, 15 bp, Homo sapiens
tgtctttcagttttt

SEQ ID NO: 294496 - DNA, 15 bp, Homo sapiens
ctgtctttcagtttt

SEQ ID NO: 294497 - DNA, 15 bp, Homo sapiens
tctgtctttcagttt

SEQ ID NO: 294498 - DNA, 15 bp, Homo sapiens
ctctgtctttcagtt

SEQ ID NO: 294499 - DNA, 15 bp, Homo sapiens
gctctgtctttcagt

SEQ ID NO: 294500 - DNA, 15 bp, Homo sapiens
agctctgtctttcag

SEQ ID NO: 294501 - DNA, 15 bp, Homo sapiens
tagctctgtctttca

SEQ ID NO: 294502 - DNA, 15 bp, Homo sapiens
gtagctctgtctttc

SEQ ID NO: 294503 - DNA, 15 bp, Homo sapiens
ggtagctctgtcttt

SEQ ID NO: 294504 - DNA, 15 bp, Homo sapiens
tggtagctctgtctt

SEQ ID NO: 294505 - DNA, 15 bp, Homo sapiens
atggtagctctgtct

SEQ ID NO: 294506 - DNA, 15 bp, Homo sapiens
catggtagctctgtc

SEQ ID NO: 294507 - DNA, 15 bp, Homo sapiens
tcatggtagctctgt

SEQ ID NO: 294508 - DNA, 15 bp, Homo sapiens
gtcatggtagctctg

SEQ ID NO: 294509 - DNA, 15 bp, Homo sapiens
tgtcatggtagctct

SEQ ID NO: 294510 - DNA, 15 bp, Homo sapiens
atgtcatggtagctc

SEQ ID NO: 294511 - DNA, 15 bp, Homo sapiens
catgtcatggtagct

SEQ ID NO: 294512 - DNA, 15 bp, Homo sapiens
acatgtcatggtagc

SEQ ID NO: 294513 - DNA, 15 bp, Homo sapiens
tacatgtcatggtag

SEQ ID NO: 294514 - DNA, 15 bp, Homo sapiens
gtacatgtcatggta

SEQ ID NO: 294515 - DNA, 15 bp, Homo sapiens
tgtacatgtcatggt

SEQ ID NO: 294516 - DNA, 15 bp, Homo sapiens
atgtacatgtcatgg

SEQ ID NO: 294517 - DNA, 15 bp, Homo sapiens
aatgtacatgtcatg

SEQ ID NO: 294518 - DNA, 15 bp, Homo sapiens
gaatgtacatgtcat

SEQ ID NO: 294519 - DNA, 15 bp, Homo sapiens
ggaatgtacatgtca

SEQ ID NO: 294520 - DNA, 15 bp, Homo sapiens
tggaatgtacatgtc

SEQ ID NO: 294521 - DNA, 15 bp, Homo sapiens
gtggaatgtacatgt

SEQ ID NO: 294522 - DNA, 15 bp, Homo sapiens
agtggaatgtacatg

SEQ ID NO: 294523 - DNA, 15 bp, Homo sapiens
gagtggaatgtacat

SEQ ID NO: 294524 - DNA, 15 bp, Homo sapiens
ggagtggaatgtaca

SEQ ID NO: 294525 - DNA, 15 bp, Homo sapiens
aggagtggaatgtac

SEQ ID NO: 294526 - DNA, 15 bp, Homo sapiens
taggagtggaatgta

SEQ ID NO: 294527 - DNA, 15 bp, Homo sapiens
ctaggagtggaatgt

SEQ ID NO: 294528 - DNA, 15 bp, Homo sapiens
cctaggagtggaatg

SEQ ID NO: 294529 - DNA, 15 bp, Homo sapiens
acctaggagtggaat

SEQ ID NO: 294530 - DNA, 15 bp, Homo sapiens
tacctaggagtggaa

SEQ ID NO: 294531 - DNA, 15 bp, Homo sapiens
atacctaggagtgga

SEQ ID NO: 294532 - DNA, 15 bp, Homo sapiens
aatacctaggagtgg

SEQ ID NO: 294533 - DNA, 15 bp, Homo sapiens
aaatacctaggagtg

SEQ ID NO: 294534 - DNA, 15 bp, Homo sapiens
taaatacctaggagt

SEQ ID NO: 294535 - DNA, 15 bp, Homo sapiens
gtaaatacctaggag

SEQ ID NO: 294536 - DNA, 15 bp, Homo sapiens
ggtaaatacctagga

SEQ ID NO: 294537 - DNA, 15 bp, Homo sapiens
gggtaaatacctagg

SEQ ID NO: 294538 - DNA, 15 bp, Homo sapiens
tgggtaaatacctag

SEQ ID NO: 294539 - DNA, 15 bp, Homo sapiens
ttgggtaaataccta

SEQ ID NO: 294540 - DNA, 15 bp, Homo sapiens
gttgggtaaatacct

SEQ ID NO: 294541 - DNA, 15 bp, Homo sapiens
tgttgggtaaatacc

SEQ ID NO: 294542 - DNA, 15 bp, Homo sapiens
ctgttgggtaaatac

SEQ ID NO: 294543 - DNA, 15 bp, Homo sapiens
tctgttgggtaaata

SEQ ID NO: 294544 - DNA, 15 bp, Homo sapiens
ttctgttgggtaaat

SEQ ID NO: 294545 - DNA, 15 bp, Homo sapiens
tttctgttgggtaaa

SEQ ID NO: 294546 - DNA, 15 bp, Homo sapiens
atttctgttgggtaa

SEQ ID NO: 294547 - DNA, 15 bp, Homo sapiens
catttctgttgggta

SEQ ID NO: 294548 - DNA, 15 bp, Homo sapiens
tcatttctgttgggt

SEQ ID NO: 294549 - DNA, 15 bp, Homo sapiens
ttcatttctgttggg

SEQ ID NO: 294550 - DNA, 15 bp, Homo sapiens
tttcatttctgttgg

SEQ ID NO: 294551 - DNA, 15 bp, Homo sapiens
ttttcatttctgttg

SEQ ID NO: 294552 - DNA, 15 bp, Homo sapiens
attttcatttctgtt

SEQ ID NO: 294553 - DNA, 15 bp, Homo sapiens
tattttcatttctgt

SEQ ID NO: 294554 - DNA, 15 bp, Homo sapiens
gtattttcatttctg

SEQ ID NO: 294555 - DNA, 15 bp, Homo sapiens
tgtattttcatttct

SEQ ID NO: 294556 - DNA, 15 bp, Homo sapiens
atgtattttcatttc

SEQ ID NO: 294557 - DNA, 15 bp, Homo sapiens
catgtattttcattt

SEQ ID NO: 294558 - DNA, 15 bp, Homo sapiens
acatgtattttcatt

SEQ ID NO: 294559 - DNA, 15 bp, Homo sapiens
gacatgtattttcat

SEQ ID NO: 294560 - DNA, 15 bp, Homo sapiens
ggacatgtattttca

SEQ ID NO: 294561 - DNA, 15 bp, Homo sapiens
tggacatgtattttc

SEQ ID NO: 294562 - DNA, 15 bp, Homo sapiens
gtggacatgtatttt

SEQ ID NO: 294563 - DNA, 15 bp, Homo sapiens
tgtggacatgtattt

SEQ ID NO: 294564 - DNA, 15 bp, Homo sapiens
gtgtggacatgtatt

SEQ ID NO: 294565 - DNA, 15 bp, Homo sapiens
tgtgtggacatgtat

SEQ ID NO: 294566 - DNA, 15 bp, Homo sapiens
ttgtgtggacatgta

SEQ ID NO: 294567 - DNA, 15 bp, Homo sapiens
tttgtgtggacatgt

SEQ ID NO: 294568 - DNA, 15 bp, Homo sapiens
ttttgtgtggacatg

SEQ ID NO: 294569 - DNA, 15 bp, Homo sapiens
gttttgtgtggacat

SEQ ID NO: 294570 - DNA, 15 bp, Homo sapiens
agttttgtgtggaca

SEQ ID NO: 294571 - DNA, 15 bp, Homo sapiens
aagttttgtgtggac

SEQ ID NO: 294572 - DNA, 15 bp, Homo sapiens
caagttttgtgtgga

SEQ ID NO: 294573 - DNA, 15 bp, Homo sapiens
gcaagttttgtgtgg

SEQ ID NO: 294574 - DNA, 15 bp, Homo sapiens
cgcaagttttgtgtg

SEQ ID NO: 294575 - DNA, 15 bp, Homo sapiens
gcgcaagttttgtgt

SEQ ID NO: 294576 - DNA, 15 bp, Homo sapiens
agcgcaagttttgtg

SEQ ID NO: 294577 - DNA, 15 bp, Homo sapiens
aagcgcaagttttgt

SEQ ID NO: 294578 - DNA, 15 bp, Homo sapiens
caagcgcaagttttg

SEQ ID NO: 294579 - DNA, 15 bp, Homo sapiens
tcaagcgcaagtttt

SEQ ID NO: 294580 - DNA, 15 bp, Homo sapiens
ttcaagcgcaagttt

SEQ ID NO: 294581 - DNA, 15 bp, Homo sapiens
gttcaagcgcaagtt

SEQ ID NO: 294582 - DNA, 15 bp, Homo sapiens
tgttcaagcgcaagt

SEQ ID NO: 294583 - DNA, 15 bp, Homo sapiens
atgttcaagcgcaag

SEQ ID NO: 294584 - DNA, 15 bp, Homo sapiens
aatgttcaagcgcaa

SEQ ID NO: 294585 - DNA, 15 bp, Homo sapiens
gaatgttcaagcgca

SEQ ID NO: 294586 - DNA, 15 bp, Homo sapiens
tgaatgttcaagcgc

SEQ ID NO: 294587 - DNA, 15 bp, Homo sapiens
atgaatgttcaagcg

SEQ ID NO: 294588 - DNA, 15 bp, Homo sapiens
tatgaatgttcaagc

SEQ ID NO: 294589 - DNA, 15 bp, Homo sapiens
ttatgaatgttcaag

SEQ ID NO: 294590 - DNA, 15 bp, Homo sapiens
gttatgaatgttcaa

SEQ ID NO: 294591 - DNA, 15 bp, Homo sapiens
tgttatgaatgttca

SEQ ID NO: 294592 - DNA, 15 bp, Homo sapiens
ctgttatgaatgttc

SEQ ID NO: 294593 - DNA, 15 bp, Homo sapiens
gctgttatgaatgtt

SEQ ID NO: 294594 - DNA, 15 bp, Homo sapiens
cgctgttatgaatgt

SEQ ID NO: 294595 - DNA, 15 bp, Homo sapiens
tcgctgttatgaatg

SEQ ID NO: 294596 - DNA, 15 bp, Homo sapiens
ttcgctgttatgaat

SEQ ID NO: 294597 - DNA, 15 bp, Homo sapiens
tttcgctgttatgaa

SEQ ID NO: 294598 - DNA, 15 bp, Homo sapiens
gtttcgctgttatga

SEQ ID NO: 294599 - DNA, 15 bp, Homo sapiens
tgtttcgctgttatg

SEQ ID NO: 294600 - DNA, 15 bp, Homo sapiens
ttgtttcgctgttat

SEQ ID NO: 294601 - DNA, 15 bp, Homo sapiens
attgtttcgctgtta

SEQ ID NO: 294602 - DNA, 15 bp, Homo sapiens
gattgtttcgctgtt

SEQ ID NO: 294603 - DNA, 15 bp, Homo sapiens
agattgtttcgctgt

SEQ ID NO: 294604 - DNA, 15 bp, Homo sapiens
tagattgtttcgctg

SEQ ID NO: 294605 - DNA, 15 bp, Homo sapiens
ttagattgtttcgct

SEQ ID NO: 294606 - DNA, 15 bp, Homo sapiens
tttagattgtttcgc

SEQ ID NO: 294607 - DNA, 15 bp, Homo sapiens
atttagattgtttcg

SEQ ID NO: 294608 - DNA, 15 bp, Homo sapiens
catttagattgtttc

SEQ ID NO: 294609 - DNA, 15 bp, Homo sapiens
gcatttagattgttt

SEQ ID NO: 294610 - DNA, 15 bp, Homo sapiens
ggcatttagattgtt

SEQ ID NO: 294611 - DNA, 15 bp, Homo sapiens
gggcatttagattgt

SEQ ID NO: 294612 - DNA, 15 bp, Homo sapiens
tgggcatttagattg

SEQ ID NO: 294613 - DNA, 15 bp, Homo sapiens
atgggcatttagatt

SEQ ID NO: 294614 - DNA, 15 bp, Homo sapiens
gatgggcatttagat

SEQ ID NO: 294615 - DNA, 15 bp, Homo sapiens
tgatgggcatttaga

SEQ ID NO: 294616 - DNA, 15 bp, Homo sapiens
ttgatgggcatttag

SEQ ID NO: 294617 - DNA, 15 bp, Homo sapiens
gttgatgggcattta

SEQ ID NO: 294618 - DNA, 15 bp, Homo sapiens
tgttgatgggcattt

SEQ ID NO: 294619 - DNA, 15 bp, Homo sapiens
ctgttgatgggcatt

SEQ ID NO: 294620 - DNA, 15 bp, Homo sapiens
tctgttgatgggcat

SEQ ID NO: 294621 - DNA, 15 bp, Homo sapiens
atctgttgatgggca

SEQ ID NO: 294622 - DNA, 15 bp, Homo sapiens
catctgttgatgggc

SEQ ID NO: 294623 - DNA, 15 bp, Homo sapiens
tcatctgttgatggg

SEQ ID NO: 294624 - DNA, 15 bp, Homo sapiens
gtcatctgttgatgg

SEQ ID NO: 294625 - DNA, 15 bp, Homo sapiens
agtcatctgttgatg

SEQ ID NO: 294626 - DNA, 15 bp, Homo sapiens
cagtcatctgttgat

SEQ ID NO: 294627 - DNA, 15 bp, Homo sapiens
ccagtcatctgttga

SEQ ID NO: 294628 - DNA, 15 bp, Homo sapiens
tccagtcatctgttg

SEQ ID NO: 294629 - DNA, 15 bp, Homo sapiens
atccagtcatctgtt

SEQ ID NO: 294630 - DNA, 15 bp, Homo sapiens
aatccagtcatctgt

SEQ ID NO: 294631 - DNA, 15 bp, Homo sapiens
taatccagtcatctg

SEQ ID NO: 294632 - DNA, 15 bp, Homo sapiens
ttaatccagtcatct

SEQ ID NO: 294633 - DNA, 15 bp, Homo sapiens
gttaatccagtcatc

SEQ ID NO: 294634 - DNA, 15 bp, Homo sapiens
tgttaatccagtcat

SEQ ID NO: 294635 - DNA, 15 bp, Homo sapiens
ttgttaatccagtca

SEQ ID NO: 294636 - DNA, 15 bp, Homo sapiens
tttgttaatccagtc

SEQ ID NO: 294637 - DNA, 15 bp, Homo sapiens
ttttgttaatccagt

SEQ ID NO: 294638 - DNA, 15 bp, Homo sapiens
attttgttaatccag

SEQ ID NO: 294639 - DNA, 15 bp, Homo sapiens
cattttgttaatcca

SEQ ID NO: 294640 - DNA, 15 bp, Homo sapiens
acattttgttaatcc

SEQ ID NO: 294641 - DNA, 15 bp, Homo sapiens
cacattttgttaatc

SEQ ID NO: 294642 - DNA, 15 bp, Homo sapiens
tcacattttgttaat

SEQ ID NO: 294643 - DNA, 15 bp, Homo sapiens
atcacattttgttaa

SEQ ID NO: 294644 - DNA, 15 bp, Homo sapiens
catcacattttgtta

SEQ ID NO: 294645 - DNA, 15 bp, Homo sapiens
acatcacattttgtt

SEQ ID NO: 294646 - DNA, 15 bp, Homo sapiens
cacatcacattttgt

SEQ ID NO: 294647 - DNA, 15 bp, Homo sapiens
gcacatcacattttg

SEQ ID NO: 294648 - DNA, 15 bp, Homo sapiens
agcacatcacatttt

SEQ ID NO: 294649 - DNA, 15 bp, Homo sapiens
aagcacatcacattt

SEQ ID NO: 294650 - DNA, 15 bp, Homo sapiens
taagcacatcacatt

SEQ ID NO: 294651 - DNA, 15 bp, Homo sapiens
ataagcacatcacat

SEQ ID NO: 294652 - DNA, 15 bp, Homo sapiens
cataagcacatcaca

SEQ ID NO: 294653 - DNA, 15 bp, Homo sapiens
gcataagcacatcac

SEQ ID NO: 294654 - DNA, 15 bp, Homo sapiens
tgcataagcacatca

SEQ ID NO: 294655 - DNA, 15 bp, Homo sapiens
ctgcataagcacatc

SEQ ID NO: 294656 - DNA, 15 bp, Homo sapiens
actgcataagcacat

SEQ ID NO: 294657 - DNA, 15 bp, Homo sapiens
cactgcataagcaca

SEQ ID NO: 294658 - DNA, 15 bp, Homo sapiens
ccactgcataagcac

SEQ ID NO: 294659 - DNA, 15 bp, Homo sapiens
tccactgcataagca

SEQ ID NO: 294660 - DNA, 15 bp, Homo sapiens
ttccactgcataagc

SEQ ID NO: 294661 - DNA, 15 bp, Homo sapiens
attccactgcataag

SEQ ID NO: 294662 - DNA, 15 bp, Homo sapiens
tattccactgcataa

SEQ ID NO: 294663 - DNA, 15 bp, Homo sapiens
gtattccactgcata

SEQ ID NO: 294664 - DNA, 15 bp, Homo sapiens
ggtattccactgcat

SEQ ID NO: 294665 - DNA, 15 bp, Homo sapiens
tggtattccactgca

SEQ ID NO: 294666 - DNA, 15 bp, Homo sapiens
atggtattccactgc

SEQ ID NO: 294667 - DNA, 15 bp, Homo sapiens
aatggtattccactg

SEQ ID NO: 294668 - DNA, 15 bp, Homo sapiens
aaatggtattccact

SEQ ID NO: 294669 - DNA, 15 bp, Homo sapiens
caaatggtattccac

SEQ ID NO: 294670 - DNA, 15 bp, Homo sapiens
ccaaatggtattcca

SEQ ID NO: 294671 - DNA, 15 bp, Homo sapiens
gccaaatggtattcc

SEQ ID NO: 294672 - DNA, 15 bp, Homo sapiens
agccaaatggtattc

SEQ ID NO: 294673 - DNA, 15 bp, Homo sapiens
tagccaaatggtatt

SEQ ID NO: 294674 - DNA, 15 bp, Homo sapiens
atagccaaatggtat

SEQ ID NO: 294675 - DNA, 15 bp, Homo sapiens
tatagccaaatggta

SEQ ID NO: 294676 - DNA, 15 bp, Homo sapiens
ttatagccaaatggt

SEQ ID NO: 294677 - DNA, 15 bp, Homo sapiens
tttatagccaaatgg

SEQ ID NO: 294678 - DNA, 15 bp, Homo sapiens
ttttatagccaaatg

SEQ ID NO: 294679 - DNA, 15 bp, Homo sapiens
tttttatagccaaat

SEQ ID NO: 294680 - DNA, 15 bp, Homo sapiens
ctttttatagccaaa

SEQ ID NO: 294681 - DNA, 15 bp, Homo sapiens
cctttttatagccaa

SEQ ID NO: 294682 - DNA, 15 bp, Homo sapiens
tcctttttatagcca

SEQ ID NO: 294683 - DNA, 15 bp, Homo sapiens
ttcctttttatagcc

SEQ ID NO: 294684 - DNA, 15 bp, Homo sapiens
attcctttttatagc

SEQ ID NO: 294685 - DNA, 15 bp, Homo sapiens
cattcctttttatag

SEQ ID NO: 294686 - DNA, 15 bp, Homo sapiens
ccattcctttttata

SEQ ID NO: 294687 - DNA, 15 bp, Homo sapiens
tccattcctttttat

SEQ ID NO: 294688 - DNA, 15 bp, Homo sapiens
ctccattccttttta

SEQ ID NO: 294689 - DNA, 15 bp, Homo sapiens
tctccattccttttt

SEQ ID NO: 294690 - DNA, 15 bp, Homo sapiens
ttctccattcctttt

SEQ ID NO: 294691 - DNA, 15 bp, Homo sapiens
gttctccattccttt

SEQ ID NO: 294692 - DNA, 15 bp, Homo sapiens
agttctccattcctt

SEQ ID NO: 294693 - DNA, 15 bp, Homo sapiens
cagttctccattcct

SEQ ID NO: 294694 - DNA, 15 bp, Homo sapiens
tcagttctccattcc

SEQ ID NO: 294695 - DNA, 15 bp, Homo sapiens
ttcagttctccattc

SEQ ID NO: 294696 - DNA, 15 bp, Homo sapiens
tttcagttctccatt

SEQ ID NO: 294697 - DNA, 15 bp, Homo sapiens
gtttcagttctccat

SEQ ID NO: 294698 - DNA, 15 bp, Homo sapiens
tgtttcagttctcca

SEQ ID NO: 294699 - DNA, 15 bp, Homo sapiens
atgtttcagttctcc

SEQ ID NO: 294700 - DNA, 15 bp, Homo sapiens
catgtttcagttctc

SEQ ID NO: 294701 - DNA, 15 bp, Homo sapiens
gcatgtttcagttct

SEQ ID NO: 294702 - DNA, 15 bp, Homo sapiens
ggcatgtttcagttc

SEQ ID NO: 294703 - DNA, 15 bp, Homo sapiens
tggcatgtttcagtt

SEQ ID NO: 294704 - DNA, 15 bp, Homo sapiens
accaaaactgaaaac

SEQ ID NO: 294705 - DNA, 15 bp, Homo sapiens
caccaaaactgaaaa

SEQ ID NO: 294706 - DNA, 15 bp, Homo sapiens
tcaccaaaactgaaa

SEQ ID NO: 294707 - DNA, 15 bp, Homo sapiens
ctcaccaaaactgaa

SEQ ID NO: 294708 - DNA, 15 bp, Homo sapiens
tctcaccaaaactga

SEQ ID NO: 294709 - DNA, 15 bp, Homo sapiens
ttctcaccaaaactg

SEQ ID NO: 294710 - DNA, 15 bp, Homo sapiens
cttctcaccaaaact

SEQ ID NO: 294711 - DNA, 15 bp, Homo sapiens
gcttctcaccaaaac

SEQ ID NO: 294712 - DNA, 15 bp, Homo sapiens
tgcttctcaccaaaa

SEQ ID NO: 294713 - DNA, 15 bp, Homo sapiens
ctgcttctcaccaaa

SEQ ID NO: 294714 - DNA, 15 bp, Homo sapiens
gctgcttctcaccaa

SEQ ID NO: 294715 - DNA, 15 bp, Homo sapiens
ggctgcttctcacca

SEQ ID NO: 294716 - DNA, 15 bp, Homo sapiens
aggctgcttctcacc

SEQ ID NO: 294717 - DNA, 15 bp, Homo sapiens
caggctgcttctcac

SEQ ID NO: 294718 - DNA, 15 bp, Homo sapiens
ccaggctgcttctca

SEQ ID NO: 294719 - DNA, 15 bp, Homo sapiens
gccaggctgcttctc

SEQ ID NO: 294720 - DNA, 15 bp, Homo sapiens
agccaggctgcttct

SEQ ID NO: 294721 - DNA, 15 bp, Homo sapiens
aagccaggctgcttc

SEQ ID NO: 294722 - DNA, 15 bp, Homo sapiens
aaagccaggctgctt

SEQ ID NO: 294723 - DNA, 15 bp, Homo sapiens
gaaagccaggctgct

SEQ ID NO: 294724 - DNA, 15 bp, Homo sapiens
ggaaagccaggctgc

SEQ ID NO: 294725 - DNA, 15 bp, Homo sapiens
aggaaagccaggctg

SEQ ID NO: 294726 - DNA, 15 bp, Homo sapiens
caggaaagccaggct

SEQ ID NO: 294727 - DNA, 15 bp, Homo sapiens
tcaggaaagccaggc

SEQ ID NO: 294728 - DNA, 15 bp, Homo sapiens
ctcaggaaagccagg

SEQ ID NO: 294729 - DNA, 15 bp, Homo sapiens
gctcaggaaagccag

SEQ ID NO: 294730 - DNA, 15 bp, Homo sapiens
agctcaggaaagcca

SEQ ID NO: 294731 - DNA, 15 bp, Homo sapiens
gagctcaggaaagcc

SEQ ID NO: 294732 - DNA, 15 bp, Homo sapiens
agagctcaggaaagc

SEQ ID NO: 294733 - DNA, 15 bp, Homo sapiens
cagagctcaggaaag

SEQ ID NO: 294734 - DNA, 15 bp, Homo sapiens
ccagagctcaggaaa

SEQ ID NO: 294735 - DNA, 15 bp, Homo sapiens
cccagagctcaggaa

SEQ ID NO: 294736 - DNA, 15 bp, Homo sapiens
gcccagagctcagga

SEQ ID NO: 294737 - DNA, 15 bp, Homo sapiens
agcccagagctcagg

SEQ ID NO: 294738 - DNA, 15 bp, Homo sapiens
cagcccagagctcag

SEQ ID NO: 294739 - DNA, 15 bp, Homo sapiens
ccagcccagagctca

SEQ ID NO: 294740 - DNA, 15 bp, Homo sapiens
cccagcccagagctc

SEQ ID NO: 294741 - DNA, 15 bp, Homo sapiens
acccagcccagagct

SEQ ID NO: 294742 - DNA, 15 bp, Homo sapiens
gacccagcccagagc

SEQ ID NO: 294743 - DNA, 15 bp, Homo sapiens
agacccagcccagag

SEQ ID NO: 294744 - DNA, 15 bp, Homo sapiens
aagacccagcccaga

SEQ ID NO: 294745 - DNA, 15 bp, Homo sapiens
aaagacccagcccag

SEQ ID NO: 294746 - DNA, 15 bp, Homo sapiens
caaagacccagccca

SEQ ID NO: 294747 - DNA, 15 bp, Homo sapiens
ccaaagacccagccc

SEQ ID NO: 294748 - DNA, 15 bp, Homo sapiens
cccaaagacccagcc

SEQ ID NO: 294749 - DNA, 15 bp, Homo sapiens
tcccaaagacccagc

SEQ ID NO: 294750 - DNA, 15 bp, Homo sapiens
ctcccaaagacccag

SEQ ID NO: 294751 - DNA, 15 bp, Homo sapiens
gctcccaaagaccca

SEQ ID NO: 294752 - DNA, 15 bp, Homo sapiens
agctcccaaagaccc

SEQ ID NO: 294753 - DNA, 15 bp, Homo sapiens
cagctcccaaagacc

SEQ ID NO: 294754 - DNA, 15 bp, Homo sapiens
ccagctcccaaagac

SEQ ID NO: 294755 - DNA, 15 bp, Homo sapiens
cccagctcccaaaga

SEQ ID NO: 294756 - DNA, 15 bp, Homo sapiens
tcccagctcccaaag

SEQ ID NO: 294757 - DNA, 15 bp, Homo sapiens
atcccagctcccaaa

SEQ ID NO: 294758 - DNA, 15 bp, Homo sapiens
aatcccagctcccaa

SEQ ID NO: 294759 - DNA, 15 bp, Homo sapiens
caatcccagctccca

SEQ ID NO: 294760 - DNA, 15 bp, Homo sapiens
acaatcccagctccc

SEQ ID NO: 294761 - DNA, 15 bp, Homo sapiens
gacaatcccagctcc

SEQ ID NO: 294762 - DNA, 15 bp, Homo sapiens
ggacaatcccagctc

SEQ ID NO: 294763 - DNA, 15 bp, Homo sapiens
aggacaatcccagct

SEQ ID NO: 294764 - DNA, 15 bp, Homo sapiens
caggacaatcccagc

SEQ ID NO: 294765 - DNA, 15 bp, Homo sapiens
gcaggacaatcccag

SEQ ID NO: 294766 - DNA, 15 bp, Homo sapiens
tgcaggacaatccca

SEQ ID NO: 294767 - DNA, 15 bp, Homo sapiens
ctgcaggacaatccc

SEQ ID NO: 294768 - DNA, 15 bp, Homo sapiens
gctgcaggacaatcc

SEQ ID NO: 294769 - DNA, 15 bp, Homo sapiens
ggctgcaggacaatc

SEQ ID NO: 294770 - DNA, 15 bp, Homo sapiens
gggctgcaggacaat

SEQ ID NO: 294771 - DNA, 15 bp, Homo sapiens
ggggctgcaggacaa

SEQ ID NO: 294772 - DNA, 15 bp, Homo sapiens
aggggctgcaggaca

SEQ ID NO: 294773 - DNA, 15 bp, Homo sapiens
aaggggctgcaggac

SEQ ID NO: 294774 - DNA, 15 bp, Homo sapiens
aaaggggctgcagga

SEQ ID NO: 294775 - DNA, 15 bp, Homo sapiens
gaaaggggctgcagg

SEQ ID NO: 294776 - DNA, 15 bp, Homo sapiens
agaaaggggctgcag

SEQ ID NO: 294777 - DNA, 15 bp, Homo sapiens
aagaaaggggctgca

SEQ ID NO: 294778 - DNA, 15 bp, Homo sapiens
caagaaaggggctgc

SEQ ID NO: 294779 - DNA, 15 bp, Homo sapiens
acaagaaaggggctg

SEQ ID NO: 294780 - DNA, 15 bp, Homo sapiens
tacaagaaaggggct

SEQ ID NO: 294781 - DNA, 15 bp, Homo sapiens
ctacaagaaaggggc

SEQ ID NO: 294782 - DNA, 15 bp, Homo sapiens
actacaagaaagggg

SEQ ID NO: 294783 - DNA, 15 bp, Homo sapiens
cactacaagaaaggg

SEQ ID NO: 294784 - DNA, 15 bp, Homo sapiens
acactacaagaaagg

SEQ ID NO: 294785 - DNA, 15 bp, Homo sapiens
tacactacaagaaag

SEQ ID NO: 294786 - DNA, 15 bp, Homo sapiens
ttacactacaagaaa

SEQ ID NO: 294787 - DNA, 15 bp, Homo sapiens
tttacactacaagaa

SEQ ID NO: 294788 - DNA, 15 bp, Homo sapiens
ctttacactacaaga

SEQ ID NO: 294789 - DNA, 15 bp, Homo sapiens
tctttacactacaag

SEQ ID NO: 294790 - DNA, 15 bp, Homo sapiens
gtctttacactacaa

SEQ ID NO: 294791 - DNA, 15 bp, Homo sapiens
agtctttacactaca

SEQ ID NO: 294792 - DNA, 15 bp, Homo sapiens
cagtctttacactac

SEQ ID NO: 294793 - DNA, 15 bp, Homo sapiens
acagtctttacacta

SEQ ID NO: 294794 - DNA, 15 bp, Homo sapiens
gacagtctttacact

SEQ ID NO: 294795 - DNA, 15 bp, Homo sapiens
tgacagtctttacac

SEQ ID NO: 294796 - DNA, 15 bp, Homo sapiens
atgacagtctttaca

SEQ ID NO: 294797 - DNA, 15 bp, Homo sapiens
tatgacagtctttac

SEQ ID NO: 294798 - DNA, 15 bp, Homo sapiens
ctatgacagtcttta

SEQ ID NO: 294799 - DNA, 15 bp, Homo sapiens
tctatgacagtcttt

SEQ ID NO: 294800 - DNA, 15 bp, Homo sapiens
ttctatgacagtctt

SEQ ID NO: 294801 - DNA, 15 bp, Homo sapiens
tttctatgacagtct

SEQ ID NO: 294802 - DNA, 15 bp, Homo sapiens
ttttctatgacagtc

SEQ ID NO: 294803 - DNA, 15 bp, Homo sapiens
cttttctatgacagt

SEQ ID NO: 294804 - DNA, 15 bp, Homo sapiens
ccttttctatgacag

SEQ ID NO: 294805 - DNA, 15 bp, Homo sapiens
gccttttctatgaca

SEQ ID NO: 294806 - DNA, 15 bp, Homo sapiens
tgccttttctatgac

SEQ ID NO: 294807 - DNA, 15 bp, Homo sapiens
ttgccttttctatga

SEQ ID NO: 294808 - DNA, 15 bp, Homo sapiens
cttgccttttctatg

SEQ ID NO: 294809 - DNA, 15 bp, Homo sapiens
acttgccttttctat

SEQ ID NO: 294810 - DNA, 15 bp, Homo sapiens
aacttgccttttcta

SEQ ID NO: 294811 - DNA, 15 bp, Homo sapiens
gaacttgccttttct

SEQ ID NO: 294812 - DNA, 15 bp, Homo sapiens
tgaacttgccttttc

SEQ ID NO: 294813 - DNA, 15 bp, Homo sapiens
atgaacttgcctttt

SEQ ID NO: 294814 - DNA, 15 bp, Homo sapiens
gatgaacttgccttt

SEQ ID NO: 294815 - DNA, 15 bp, Homo sapiens
tgatgaacttgcctt

SEQ ID NO: 294816 - DNA, 15 bp, Homo sapiens
ctgatgaacttgcct

SEQ ID NO: 294817 - DNA, 15 bp, Homo sapiens
cctgatgaacttgcc

SEQ ID NO: 294818 - DNA, 15 bp, Homo sapiens
ccctgatgaacttgc

SEQ ID NO: 294819 - DNA, 15 bp, Homo sapiens
accctgatgaacttg

SEQ ID NO: 294820 - DNA, 15 bp, Homo sapiens
gaccctgatgaactt

SEQ ID NO: 294821 - DNA, 15 bp, Homo sapiens
ggaccctgatgaact

SEQ ID NO: 294822 - DNA, 15 bp, Homo sapiens
aggaccctgatgaac

SEQ ID NO: 294823 - DNA, 15 bp, Homo sapiens
caggaccctgatgaa

SEQ ID NO: 294824 - DNA, 15 bp, Homo sapiens
gcaggaccctgatga

SEQ ID NO: 294825 - DNA, 15 bp, Homo sapiens
ggcaggaccctgatg

SEQ ID NO: 294826 - DNA, 15 bp, Homo sapiens
aggcaggaccctgat

SEQ ID NO: 294827 - DNA, 15 bp, Homo sapiens
aaggcaggaccctga

SEQ ID NO: 294828 - DNA, 15 bp, Homo sapiens
aaaggcaggaccctg

SEQ ID NO: 294829 - DNA, 15 bp, Homo sapiens
caaaggcaggaccct

SEQ ID NO: 294830 - DNA, 15 bp, Homo sapiens
gcaaaggcaggaccc

SEQ ID NO: 294831 - DNA, 15 bp, Homo sapiens
tgcaaaggcaggacc

SEQ ID NO: 294832 - DNA, 15 bp, Homo sapiens
atgcaaaggcaggac

SEQ ID NO: 294833 - DNA, 15 bp, Homo sapiens
gatgcaaaggcagga

SEQ ID NO: 294834 - DNA, 15 bp, Homo sapiens
ggatgcaaaggcagg

SEQ ID NO: 294835 - DNA, 15 bp, Homo sapiens
tggatgcaaaggcag

SEQ ID NO: 294836 - DNA, 15 bp, Homo sapiens
ctggatgcaaaggca

SEQ ID NO: 294837 - DNA, 15 bp, Homo sapiens
cctggatgcaaaggc

SEQ ID NO: 294838 - DNA, 15 bp, Homo sapiens
ccctggatgcaaagg

SEQ ID NO: 294839 - DNA, 15 bp, Homo sapiens
cccctggatgcaaag

SEQ ID NO: 294840 - DNA, 15 bp, Homo sapiens
ccccctggatgcaaa

SEQ ID NO: 294841 - DNA, 15 bp, Homo sapiens
gccccctggatgcaa

SEQ ID NO: 294842 - DNA, 15 bp, Homo sapiens
agccccctggatgca

SEQ ID NO: 294843 - DNA, 15 bp, Homo sapiens
aagccccctggatgc

SEQ ID NO: 294844 - DNA, 15 bp, Homo sapiens
caagccccctggatg

SEQ ID NO: 294845 - DNA, 15 bp, Homo sapiens
tcaagccccctggat

SEQ ID NO: 294846 - DNA, 15 bp, Homo sapiens
ctcaagccccctgga

SEQ ID NO: 294847 - DNA, 15 bp, Homo sapiens
tctcaagccccctgg

SEQ ID NO: 294848 - DNA, 15 bp, Homo sapiens
ctctcaagccccctg

SEQ ID NO: 294849 - DNA, 15 bp, Homo sapiens
gctctcaagccccct

SEQ ID NO: 294850 - DNA, 15 bp, Homo sapiens
agctctcaagccccc

SEQ ID NO: 294851 - DNA, 15 bp, Homo sapiens
tagctctcaagcccc

SEQ ID NO: 294852 - DNA, 15 bp, Homo sapiens
atagctctcaagccc

SEQ ID NO: 294853 - DNA, 15 bp, Homo sapiens
tatagctctcaagcc

SEQ ID NO: 294854 - DNA, 15 bp, Homo sapiens
gtatagctctcaagc

SEQ ID NO: 294855 - DNA, 15 bp, Homo sapiens
agtatagctctcaag

SEQ ID NO: 294856 - DNA, 15 bp, Homo sapiens
cagtatagctctcaa

SEQ ID NO: 294857 - DNA, 15 bp, Homo sapiens
tcagtatagctctca

SEQ ID NO: 294858 - DNA, 15 bp, Homo sapiens
ttcagtatagctctc

SEQ ID NO: 294859 - DNA, 15 bp, Homo sapiens
tttcagtatagctct

SEQ ID NO: 294860 - DNA, 15 bp, Homo sapiens
ttttcagtatagctc

SEQ ID NO: 294861 - DNA, 15 bp, Homo sapiens
cttttcagtatagct

SEQ ID NO: 294862 - DNA, 15 bp, Homo sapiens
tcttttcagtatagc

SEQ ID NO: 294863 - DNA, 15 bp, Homo sapiens
ctcttttcagtatag

SEQ ID NO: 294864 - DNA, 15 bp, Homo sapiens
cctcttttcagtata

SEQ ID NO: 294865 - DNA, 15 bp, Homo sapiens
tcctcttttcagtat

SEQ ID NO: 294866 - DNA, 15 bp, Homo sapiens
ctcctcttttcagta

SEQ ID NO: 294867 - DNA, 15 bp, Homo sapiens
tctcctcttttcagt

SEQ ID NO: 294868 - DNA, 15 bp, Homo sapiens
ttctcctcttttcag

SEQ ID NO: 294869 - DNA, 15 bp, Homo sapiens
cttctcctcttttca

SEQ ID NO: 294870 - DNA, 15 bp, Homo sapiens
tcttctcctcttttc

SEQ ID NO: 294871 - DNA, 15 bp, Homo sapiens
atcttctcctctttt

SEQ ID NO: 294872 - DNA, 15 bp, Homo sapiens
catcttctcctcttt

SEQ ID NO: 294873 - DNA, 15 bp, Homo sapiens
acatcttctcctctt

SEQ ID NO: 294874 - DNA, 15 bp, Homo sapiens
cacatcttctcctct

SEQ ID NO: 294875 - DNA, 15 bp, Homo sapiens
tcacatcttctcctc

SEQ ID NO: 294876 - DNA, 15 bp, Homo sapiens
ttcacatcttctcct

SEQ ID NO: 294877 - DNA, 15 bp, Homo sapiens
tttcacatcttctcc

SEQ ID NO: 294878 - DNA, 15 bp, Homo sapiens
atttcacatcttctc

SEQ ID NO: 294879 - DNA, 15 bp, Homo sapiens
gatttcacatcttct

SEQ ID NO: 294880 - DNA, 15 bp, Homo sapiens
ggatttcacatcttc

SEQ ID NO: 294881 - DNA, 15 bp, Homo sapiens
tggatttcacatctt

SEQ ID NO: 294882 - DNA, 15 bp, Homo sapiens
gtggatttcacatct

SEQ ID NO: 294883 - DNA, 15 bp, Homo sapiens
cgtggatttcacatc

SEQ ID NO: 294884 - DNA, 15 bp, Homo sapiens
acgtggatttcacat

SEQ ID NO: 294885 - DNA, 15 bp, Homo sapiens
cacgtggatttcaca

SEQ ID NO: 294886 - DNA, 15 bp, Homo sapiens
gcacgtggatttcac

SEQ ID NO: 294887 - DNA, 15 bp, Homo sapiens
agcacgtggatttca

SEQ ID NO: 294888 - DNA, 15 bp, Homo sapiens
gagcacgtggatttc

SEQ ID NO: 294889 - DNA, 15 bp, Homo sapiens
tgagcacgtggattt

SEQ ID NO: 294890 - DNA, 15 bp, Homo sapiens
ctgagcacgtggatt

SEQ ID NO: 294891 - DNA, 15 bp, Homo sapiens
gctgagcacgtggat

SEQ ID NO: 294892 - DNA, 15 bp, Homo sapiens
agctgagcacgtgga

SEQ ID NO: 294893 - DNA, 15 bp, Homo sapiens
gagctgagcacgtgg

SEQ ID NO: 294894 - DNA, 15 bp, Homo sapiens
ggagctgagcacgtg

SEQ ID NO: 294895 - DNA, 15 bp, Homo sapiens
tggagctgagcacgt

SEQ ID NO: 294896 - DNA, 15 bp, Homo sapiens
atggagctgagcacg

SEQ ID NO: 294897 - DNA, 15 bp, Homo sapiens
gatggagctgagcac

SEQ ID NO: 294898 - DNA, 15 bp, Homo sapiens
ggatggagctgagca

SEQ ID NO: 294899 - DNA, 15 bp, Homo sapiens
aggatggagctgagc

SEQ ID NO: 294900 - DNA, 15 bp, Homo sapiens
gaggatggagctgag

SEQ ID NO: 294901 - DNA, 15 bp, Homo sapiens
tgaggatggagctga

SEQ ID NO: 294902 - DNA, 15 bp, Homo sapiens
ttgaggatggagctg

SEQ ID NO: 294903 - DNA, 15 bp, Homo sapiens
tttgaggatggagct

SEQ ID NO: 294904 - DNA, 15 bp, Homo sapiens
ttttgaggatggagc

SEQ ID NO: 294905 - DNA, 15 bp, Homo sapiens
gttttgaggatggag

SEQ ID NO: 294906 - DNA, 15 bp, Homo sapiens
agttttgaggatgga

SEQ ID NO: 294907 - DNA, 15 bp, Homo sapiens
gagttttgaggatgg

SEQ ID NO: 294908 - DNA, 15 bp, Homo sapiens
ggagttttgaggatg

SEQ ID NO: 294909 - DNA, 15 bp, Homo sapiens
tggagttttgaggat

SEQ ID NO: 294910 - DNA, 15 bp, Homo sapiens
gtggagttttgagga

SEQ ID NO: 294911 - DNA, 15 bp, Homo sapiens
agtggagttttgagg

SEQ ID NO: 294912 - DNA, 15 bp, Homo sapiens
aagtggagttttgag

SEQ ID NO: 294913 - DNA, 15 bp, Homo sapiens
gaagtggagttttga

SEQ ID NO: 294914 - DNA, 15 bp, Homo sapiens
agaagtggagttttg

SEQ ID NO: 294915 - DNA, 15 bp, Homo sapiens
tagaagtggagtttt

SEQ ID NO: 294916 - DNA, 15 bp, Homo sapiens
ttagaagtggagttt

SEQ ID NO: 294917 - DNA, 15 bp, Homo sapiens
tttagaagtggagtt

SEQ ID NO: 294918 - DNA, 15 bp, Homo sapiens
ctttagaagtggagt

SEQ ID NO: 294919 - DNA, 15 bp, Homo sapiens
actttagaagtggag

SEQ ID NO: 294920 - DNA, 15 bp, Homo sapiens
gactttagaagtgga

SEQ ID NO: 294921 - DNA, 15 bp, Homo sapiens
tgactttagaagtgg

SEQ ID NO: 294922 - DNA, 15 bp, Homo sapiens
gtgactttagaagtg

SEQ ID NO: 294923 - DNA, 15 bp, Homo sapiens
agtgactttagaagt

SEQ ID NO: 294924 - DNA, 15 bp, Homo sapiens
gagtgactttagaag

SEQ ID NO: 294925 - DNA, 15 bp, Homo sapiens
tgagtgactttagaa

SEQ ID NO: 294926 - DNA, 15 bp, Homo sapiens
atgagtgactttaga

SEQ ID NO: 294927 - DNA, 15 bp, Homo sapiens
aatgagtgactttag

SEQ ID NO: 294928 - DNA, 15 bp, Homo sapiens
aaatgagtgacttta

SEQ ID NO: 294929 - DNA, 15 bp, Homo sapiens
caaatgagtgacttt

SEQ ID NO: 294930 - DNA, 15 bp, Homo sapiens
ccaaatgagtgactt

SEQ ID NO: 294931 - DNA, 15 bp, Homo sapiens
cccaaatgagtgact

SEQ ID NO: 294932 - DNA, 15 bp, Homo sapiens
tcccaaatgagtgac

SEQ ID NO: 294933 - DNA, 15 bp, Homo sapiens
gtcccaaatgagtga

SEQ ID NO: 294934 - DNA, 15 bp, Homo sapiens
agtcccaaatgagtg

SEQ ID NO: 294935 - DNA, 15 bp, Homo sapiens
cagtcccaaatgagt

SEQ ID NO: 294936 - DNA, 15 bp, Homo sapiens
tcagtcccaaatgag

SEQ ID NO: 294937 - DNA, 15 bp, Homo sapiens
ttcagtcccaaatga

SEQ ID NO: 294938 - DNA, 15 bp, Homo sapiens
tttcagtcccaaatg

SEQ ID NO: 294939 - DNA, 15 bp, Homo sapiens
ctttcagtcccaaat

SEQ ID NO: 294940 - DNA, 15 bp, Homo sapiens
actttcagtcccaaa

SEQ ID NO: 294941 - DNA, 15 bp, Homo sapiens
aactttcagtcccaa

SEQ ID NO: 294942 - DNA, 15 bp, Homo sapiens
aaactttcagtccca

SEQ ID NO: 294943 - DNA, 15 bp, Homo sapiens
aaaactttcagtccc

SEQ ID NO: 294944 - DNA, 15 bp, Homo sapiens
aaaaactttcagtcc

SEQ ID NO: 294945 - DNA, 15 bp, Homo sapiens
aaaaaactttcagtc

SEQ ID NO: 294946 - DNA, 15 bp, Homo sapiens
taaaaaactttcagt

SEQ ID NO: 294947 - DNA, 15 bp, Homo sapiens
ctaaaaaactttcag

SEQ ID NO: 294948 - DNA, 15 bp, Homo sapiens
tctaaaaaactttca

SEQ ID NO: 294949 - DNA, 15 bp, Homo sapiens
ttctaaaaaactttc

SEQ ID NO: 294950 - DNA, 15 bp, Homo sapiens
tttctaaaaaacttt

SEQ ID NO: 294951 - DNA, 15 bp, Homo sapiens
gtttctaaaaaactt

SEQ ID NO: 294952 - DNA, 15 bp, Homo sapiens
agtttctaaaaaact

SEQ ID NO: 294953 - DNA, 15 bp, Homo sapiens
acagtttctaaaaaa

SEQ ID NO: 294954 - DNA, 15 bp, Homo sapiens
aacagtttctaaaaa

SEQ ID NO: 294955 - DNA, 15 bp, Homo sapiens
gaacagtttctaaaa

SEQ ID NO: 294956 - DNA, 15 bp, Homo sapiens
tgaacagtttctaaa

SEQ ID NO: 294957 - DNA, 15 bp, Homo sapiens
ctgaacagtttctaa

SEQ ID NO: 294958 - DNA, 15 bp, Homo sapiens
tctgaacagtttcta

SEQ ID NO: 294959 - DNA, 15 bp, Homo sapiens
ttctgaacagtttct

SEQ ID NO: 294960 - DNA, 15 bp, Homo sapiens
cttctgaacagtttc

SEQ ID NO: 294961 - DNA, 15 bp, Homo sapiens
ccttctgaacagttt

SEQ ID NO: 294962 - DNA, 15 bp, Homo sapiens
tccttctgaacagtt

SEQ ID NO: 294963 - DNA, 15 bp, Homo sapiens
ttccttctgaacagt

SEQ ID NO: 294964 - DNA, 15 bp, Homo sapiens
attccttctgaacag

SEQ ID NO: 294965 - DNA, 15 bp, Homo sapiens
cattccttctgaaca

SEQ ID NO: 294966 - DNA, 15 bp, Homo sapiens
acattccttctgaac

SEQ ID NO: 294967 - DNA, 15 bp, Homo sapiens
cacattccttctgaa

SEQ ID NO: 294968 - DNA, 15 bp, Homo sapiens
ccacattccttctga

SEQ ID NO: 294969 - DNA, 15 bp, Homo sapiens
gccacattccttctg

SEQ ID NO: 294970 - DNA, 15 bp, Homo sapiens
agccacattccttct

SEQ ID NO: 294971 - DNA, 15 bp, Homo sapiens
gagccacattccttc

SEQ ID NO: 294972 - DNA, 15 bp, Homo sapiens
ggagccacattcctt

SEQ ID NO: 294973 - DNA, 15 bp, Homo sapiens
aggagccacattcct

SEQ ID NO: 294974 - DNA, 15 bp, Homo sapiens
gaggagccacattcc

SEQ ID NO: 294975 - DNA, 15 bp, Homo sapiens
agaggagccacattc

SEQ ID NO: 294976 - DNA, 15 bp, Homo sapiens
gagaggagccacatt

SEQ ID NO: 294977 - DNA, 15 bp, Homo sapiens
ggagaggagccacat

SEQ ID NO: 294978 - DNA, 15 bp, Homo sapiens
gggagaggagccaca

SEQ ID NO: 294979 - DNA, 15 bp, Homo sapiens
tgggagaggagccac

SEQ ID NO: 294980 - DNA, 15 bp, Homo sapiens
ctgggagaggagcca

SEQ ID NO: 294981 - DNA, 15 bp, Homo sapiens
actgggagaggagcc

SEQ ID NO: 294982 - DNA, 15 bp, Homo sapiens
gactgggagaggagc

SEQ ID NO: 294983 - DNA, 15 bp, Homo sapiens
agactgggagaggag

SEQ ID NO: 294984 - DNA, 15 bp, Homo sapiens
cagactgggagagga

SEQ ID NO: 294985 - DNA, 15 bp, Homo sapiens
ccagactgggagagg

SEQ ID NO: 294986 - DNA, 15 bp, Homo sapiens
cccagactgggagag

SEQ ID NO: 294987 - DNA, 15 bp, Homo sapiens
ccccagactgggaga

SEQ ID NO: 294988 - DNA, 15 bp, Homo sapiens
gccccagactgggag

SEQ ID NO: 294989 - DNA, 15 bp, Homo sapiens
agccccagactggga

SEQ ID NO: 294990 - DNA, 15 bp, Homo sapiens
tagccccagactggg

SEQ ID NO: 294991 - DNA, 15 bp, Homo sapiens
atagccccagactgg

SEQ ID NO: 294992 - DNA, 15 bp, Homo sapiens
catagccccagactg

SEQ ID NO: 294993 - DNA, 15 bp, Homo sapiens
ccatagccccagact

SEQ ID NO: 294994 - DNA, 15 bp, Homo sapiens
cccatagccccagac

SEQ ID NO: 294995 - DNA, 15 bp, Homo sapiens
gcccatagccccaga

SEQ ID NO: 294996 - DNA, 15 bp, Homo sapiens
ggcccatagccccag

SEQ ID NO: 294997 - DNA, 15 bp, Homo sapiens
tggcccatagcccca

SEQ ID NO: 294998 - DNA, 15 bp, Homo sapiens
atggcccatagcccc

SEQ ID NO: 294999 - DNA, 15 bp, Homo sapiens
catggcccatagccc

SEQ ID NO: 295000 - DNA, 15 bp, Homo sapiens
ccatggcccatagcc

SEQ ID NO: 295001 - DNA, 15 bp, Homo sapiens
cccatggcccatagc

SEQ ID NO: 295002 - DNA, 15 bp, Homo sapiens
gcccatggcccatag

SEQ ID NO: 295003 - DNA, 15 bp, Homo sapiens
ggcccatggcccata

SEQ ID NO: 295004 - DNA, 15 bp, Homo sapiens
aggcccatggcccat

SEQ ID NO: 295005 - DNA, 15 bp, Homo sapiens
taggcccatggccca

SEQ ID NO: 295006 - DNA, 15 bp, Homo sapiens
ctaggcccatggccc

SEQ ID NO: 295007 - DNA, 15 bp, Homo sapiens
cctaggcccatggcc

SEQ ID NO: 295008 - DNA, 15 bp, Homo sapiens
acctaggcccatggc

SEQ ID NO: 295009 - DNA, 15 bp, Homo sapiens
gacctaggcccatgg

SEQ ID NO: 295010 - DNA, 15 bp, Homo sapiens
tgacctaggcccatg

SEQ ID NO: 295011 - DNA, 15 bp, Homo sapiens
gtgacctaggcccat

SEQ ID NO: 295012 - DNA, 15 bp, Homo sapiens
tgtgacctaggccca

SEQ ID NO: 295013 - DNA, 15 bp, Homo sapiens
gtgtgacctaggccc

SEQ ID NO: 295014 - DNA, 15 bp, Homo sapiens
ggtgtgacctaggcc

SEQ ID NO: 295015 - DNA, 15 bp, Homo sapiens
aggtgtgacctaggc

SEQ ID NO: 295016 - DNA, 15 bp, Homo sapiens
aaggtgtgacctagg

SEQ ID NO: 295017 - DNA, 15 bp, Homo sapiens
caaggtgtgacctag

SEQ ID NO: 295018 - DNA, 15 bp, Homo sapiens
gcaaggtgtgaccta

SEQ ID NO: 295019 - DNA, 15 bp, Homo sapiens
agcaaggtgtgacct

SEQ ID NO: 295020 - DNA, 15 bp, Homo sapiens
cagcaaggtgtgacc

SEQ ID NO: 295021 - DNA, 15 bp, Homo sapiens
tcagcaaggtgtgac

SEQ ID NO: 295022 - DNA, 15 bp, Homo sapiens
atcagcaaggtgtga

SEQ ID NO: 295023 - DNA, 15 bp, Homo sapiens
gatcagcaaggtgtg

SEQ ID NO: 295024 - DNA, 15 bp, Homo sapiens
tgatcagcaaggtgt

SEQ ID NO: 295025 - DNA, 15 bp, Homo sapiens
ctgatcagcaaggtg

SEQ ID NO: 295026 - DNA, 15 bp, Homo sapiens
cctgatcagcaaggt

SEQ ID NO: 295027 - DNA, 15 bp, Homo sapiens
tcctgatcagcaagg

SEQ ID NO: 295028 - DNA, 15 bp, Homo sapiens
gtcctgatcagcaag

SEQ ID NO: 295029 - DNA, 15 bp, Homo sapiens
tgtcctgatcagcaa

SEQ ID NO: 295030 - DNA, 15 bp, Homo sapiens
ctgtcctgatcagca

SEQ ID NO: 295031 - DNA, 15 bp, Homo sapiens
tctgtcctgatcagc

SEQ ID NO: 295032 - DNA, 15 bp, Homo sapiens
ttctgtcctgatcag

SEQ ID NO: 295033 - DNA, 15 bp, Homo sapiens
tttctgtcctgatca

SEQ ID NO: 295034 - DNA, 15 bp, Homo sapiens
gtttctgtcctgatc

SEQ ID NO: 295035 - DNA, 15 bp, Homo sapiens
agtttctgtcctgat

SEQ ID NO: 295036 - DNA, 15 bp, Homo sapiens
cagtttctgtcctga

SEQ ID NO: 295037 - DNA, 15 bp, Homo sapiens
ccagtttctgtcctg

SEQ ID NO: 295038 - DNA, 15 bp, Homo sapiens
tccagtttctgtcct

SEQ ID NO: 295039 - DNA, 15 bp, Homo sapiens
ttccagtttctgtcc

SEQ ID NO: 295040 - DNA, 15 bp, Homo sapiens
attccagtttctgtc

SEQ ID NO: 295041 - DNA, 15 bp, Homo sapiens
tattccagtttctgt

SEQ ID NO: 295042 - DNA, 15 bp, Homo sapiens
ttattccagtttctg

SEQ ID NO: 295043 - DNA, 15 bp, Homo sapiens
tttattccagtttct

SEQ ID NO: 295044 - DNA, 15 bp, Homo sapiens
atttattccagtttc

SEQ ID NO: 295045 - DNA, 15 bp, Homo sapiens
catttattccagttt

SEQ ID NO: 295046 - DNA, 15 bp, Homo sapiens
tcatttattccagtt

SEQ ID NO: 295047 - DNA, 15 bp, Homo sapiens
gtcatttattccagt

SEQ ID NO: 295048 - DNA, 15 bp, Homo sapiens
agtcatttattccag

SEQ ID NO: 295049 - DNA, 15 bp, Homo sapiens
gagtcatttattcca

SEQ ID NO: 295050 - DNA, 15 bp, Homo sapiens
agagtcatttattcc

SEQ ID NO: 295051 - DNA, 15 bp, Homo sapiens
gagagtcatttattc

SEQ ID NO: 295052 - DNA, 15 bp, Homo sapiens
agagagtcatttatt

SEQ ID NO: 295053 - DNA, 15 bp, Homo sapiens
tagagagtcatttat

SEQ ID NO: 295054 - DNA, 15 bp, Homo sapiens
atagagagtcattta

SEQ ID NO: 295055 - DNA, 15 bp, Homo sapiens
aatagagagtcattt

SEQ ID NO: 295056 - DNA, 15 bp, Homo sapiens
aaatagagagtcatt

SEQ ID NO: 295057 - DNA, 15 bp, Homo sapiens
aaaatagagagtcat

SEQ ID NO: 295058 - DNA, 15 bp, Homo sapiens
caaaatagagagtca

SEQ ID NO: 295059 - DNA, 15 bp, Homo sapiens
ccaaaatagagagtc

SEQ ID NO: 295060 - DNA, 15 bp, Homo sapiens
cccaaaatagagagt

SEQ ID NO: 295061 - DNA, 15 bp, Homo sapiens
tcccaaaatagagag

SEQ ID NO: 295062 - DNA, 15 bp, Homo sapiens
ctcccaaaatagaga

SEQ ID NO: 295063 - DNA, 15 bp, Homo sapiens
gctcccaaaatagag

SEQ ID NO: 295064 - DNA, 15 bp, Homo sapiens
tgctcccaaaataga

SEQ ID NO: 295065 - DNA, 15 bp, Homo sapiens
ctgctcccaaaatag

SEQ ID NO: 295066 - DNA, 15 bp, Homo sapiens
tctgctcccaaaata

SEQ ID NO: 295067 - DNA, 15 bp, Homo sapiens
gtctgctcccaaaat

SEQ ID NO: 295068 - DNA, 15 bp, Homo sapiens
tgtctgctcccaaaa

SEQ ID NO: 295069 - DNA, 15 bp, Homo sapiens
gtgtctgctcccaaa

SEQ ID NO: 295070 - DNA, 15 bp, Homo sapiens
tgtgtctgctcccaa

SEQ ID NO: 295071 - DNA, 15 bp, Homo sapiens
atgtgtctgctccca

SEQ ID NO: 295072 - DNA, 15 bp, Homo sapiens
catgtgtctgctccc

SEQ ID NO: 295073 - DNA, 15 bp, Homo sapiens
acatgtgtctgctcc

SEQ ID NO: 295074 - DNA, 15 bp, Homo sapiens
tacatgtgtctgctc

SEQ ID NO: 295075 - DNA, 15 bp, Homo sapiens
ttacatgtgtctgct

SEQ ID NO: 295076 - DNA, 15 bp, Homo sapiens
cttacatgtgtctgc

SEQ ID NO: 295077 - DNA, 15 bp, Homo sapiens
ccttacatgtgtctg

SEQ ID NO: 295078 - DNA, 15 bp, Homo sapiens
gccttacatgtgtct

SEQ ID NO: 295079 - DNA, 15 bp, Homo sapiens
agccttacatgtgtc

SEQ ID NO: 295080 - DNA, 15 bp, Homo sapiens
tagccttacatgtgt

SEQ ID NO: 295081 - DNA, 15 bp, Homo sapiens
ttagccttacatgtg

SEQ ID NO: 295082 - DNA, 15 bp, Homo sapiens
attagccttacatgt

SEQ ID NO: 295083 - DNA, 15 bp, Homo sapiens
aattagccttacatg

SEQ ID NO: 295084 - DNA, 15 bp, Homo sapiens
taattagccttacat

SEQ ID NO: 295085 - DNA, 15 bp, Homo sapiens
ctaattagccttaca

SEQ ID NO: 295086 - DNA, 15 bp, Homo sapiens
cctaattagccttac

SEQ ID NO: 295087 - DNA, 15 bp, Homo sapiens
acctaattagcctta

SEQ ID NO: 295088 - DNA, 15 bp, Homo sapiens
gacctaattagcctt

SEQ ID NO: 295089 - DNA, 15 bp, Homo sapiens
agacctaattagcct

SEQ ID NO: 295090 - DNA, 15 bp, Homo sapiens
cagacctaattagcc

SEQ ID NO: 295091 - DNA, 15 bp, Homo sapiens
gcagacctaattagc

SEQ ID NO: 295092 - DNA, 15 bp, Homo sapiens
agcagacctaattag

SEQ ID NO: 295093 - DNA, 15 bp, Homo sapiens
cagcagacctaatta

SEQ ID NO: 295094 - DNA, 15 bp, Homo sapiens
tcagcagacctaatt

SEQ ID NO: 295095 - DNA, 15 bp, Homo sapiens
ttcagcagacctaat

SEQ ID NO: 295096 - DNA, 15 bp, Homo sapiens
gttcagcagacctaa

SEQ ID NO: 295097 - DNA, 15 bp, Homo sapiens
ggttcagcagaccta

SEQ ID NO: 295098 - DNA, 15 bp, Homo sapiens
gggttcagcagacct

SEQ ID NO: 295099 - DNA, 15 bp, Homo sapiens
ggggttcagcagacc

SEQ ID NO: 295100 - DNA, 15 bp, Homo sapiens
tggggttcagcagac

SEQ ID NO: 295101 - DNA, 15 bp, Homo sapiens
ctggggttcagcaga

SEQ ID NO: 295102 - DNA, 15 bp, Homo sapiens
cctggggttcagcag

SEQ ID NO: 295103 - DNA, 15 bp, Homo sapiens
acctggggttcagca

SEQ ID NO: 295104 - DNA, 15 bp, Homo sapiens
cacctggggttcagc

SEQ ID NO: 295105 - DNA, 15 bp, Homo sapiens
acacctggggttcag

SEQ ID NO: 295106 - DNA, 15 bp, Homo sapiens
tacacctggggttca

SEQ ID NO: 295107 - DNA, 15 bp, Homo sapiens
atacacctggggttc

SEQ ID NO: 295108 - DNA, 15 bp, Homo sapiens
gatacacctggggtt

SEQ ID NO: 295109 - DNA, 15 bp, Homo sapiens
tgatacacctggggt

SEQ ID NO: 295110 - DNA, 15 bp, Homo sapiens
ctgatacacctgggg

SEQ ID NO: 295111 - DNA, 15 bp, Homo sapiens
cctgatacacctggg

SEQ ID NO: 295112 - DNA, 15 bp, Homo sapiens
ccctgatacacctgg

SEQ ID NO: 295113 - DNA, 15 bp, Homo sapiens
accctgatacacctg

SEQ ID NO: 295114 - DNA, 15 bp, Homo sapiens
gaccctgatacacct

SEQ ID NO: 295115 - DNA, 15 bp, Homo sapiens
agaccctgatacacc

SEQ ID NO: 295116 - DNA, 15 bp, Homo sapiens
cagaccctgatacac

SEQ ID NO: 295117 - DNA, 15 bp, Homo sapiens
acagaccctgataca

SEQ ID NO: 295118 - DNA, 15 bp, Homo sapiens
cacagaccctgatac

SEQ ID NO: 295119 - DNA, 15 bp, Homo sapiens
ccacagaccctgata

SEQ ID NO: 295120 - DNA, 15 bp, Homo sapiens
tccacagaccctgat

SEQ ID NO: 295121 - DNA, 15 bp, Homo sapiens
ttccacagaccctga

SEQ ID NO: 295122 - DNA, 15 bp, Homo sapiens
gttccacagaccctg

SEQ ID NO: 295123 - DNA, 15 bp, Homo sapiens
agttccacagaccct

SEQ ID NO: 295124 - DNA, 15 bp, Homo sapiens
cagttccacagaccc

SEQ ID NO: 295125 - DNA, 15 bp, Homo sapiens
acagttccacagacc

SEQ ID NO: 295126 - DNA, 15 bp, Homo sapiens
tacagttccacagac

SEQ ID NO: 295127 - DNA, 15 bp, Homo sapiens
gtacagttccacaga

SEQ ID NO: 295128 - DNA, 15 bp, Homo sapiens
ggtacagttccacag

SEQ ID NO: 295129 - DNA, 15 bp, Homo sapiens
tggtacagttccaca

SEQ ID NO: 295130 - DNA, 15 bp, Homo sapiens
atggtacagttccac

SEQ ID NO: 295131 - DNA, 15 bp, Homo sapiens
gatggtacagttcca

SEQ ID NO: 295132 - DNA, 15 bp, Homo sapiens
ggatggtacagttcc

SEQ ID NO: 295133 - DNA, 15 bp, Homo sapiens
gggatggtacagttc

SEQ ID NO: 295134 - DNA, 15 bp, Homo sapiens
tgggatggtacagtt

SEQ ID NO: 295135 - DNA, 15 bp, Homo sapiens
ctgggatggtacagt

SEQ ID NO: 295136 - DNA, 15 bp, Homo sapiens
tctgggatggtacag

SEQ ID NO: 295137 - DNA, 15 bp, Homo sapiens
atctgggatggtaca

SEQ ID NO: 295138 - DNA, 15 bp, Homo sapiens
tatctgggatggtac

SEQ ID NO: 295139 - DNA, 15 bp, Homo sapiens
ctatctgggatggta

SEQ ID NO: 295140 - DNA, 15 bp, Homo sapiens
cctatctgggatggt

SEQ ID NO: 295141 - DNA, 15 bp, Homo sapiens
ccctatctgggatgg

SEQ ID NO: 295142 - DNA, 15 bp, Homo sapiens
tccctatctgggatg

SEQ ID NO: 295143 - DNA, 15 bp, Homo sapiens
ctccctatctgggat

SEQ ID NO: 295144 - DNA, 15 bp, Homo sapiens
gctccctatctggga

SEQ ID NO: 295145 - DNA, 15 bp, Homo sapiens
tgctccctatctggg

SEQ ID NO: 295146 - DNA, 15 bp, Homo sapiens
ttgctccctatctgg

SEQ ID NO: 295147 - DNA, 15 bp, Homo sapiens
tttgctccctatctg

SEQ ID NO: 295148 - DNA, 15 bp, Homo sapiens
atttgctccctatct

SEQ ID NO: 295149 - DNA, 15 bp, Homo sapiens
tatttgctccctatc

SEQ ID NO: 295150 - DNA, 15 bp, Homo sapiens
atatttgctccctat

SEQ ID NO: 295151 - DNA, 15 bp, Homo sapiens
catatttgctcccta

SEQ ID NO: 295152 - DNA, 15 bp, Homo sapiens
ccatatttgctccct

SEQ ID NO: 295153 - DNA, 15 bp, Homo sapiens
gccatatttgctccc

SEQ ID NO: 295154 - DNA, 15 bp, Homo sapiens
tgccatatttgctcc

SEQ ID NO: 295155 - DNA, 15 bp, Homo sapiens
ttgccatatttgctc

SEQ ID NO: 295156 - DNA, 15 bp, Homo sapiens
tttgccatatttgct

SEQ ID NO: 295157 - DNA, 15 bp, Homo sapiens
ctttgccatatttgc

SEQ ID NO: 295158 - DNA, 15 bp, Homo sapiens
actttgccatatttg

SEQ ID NO: 295159 - DNA, 15 bp, Homo sapiens
cactttgccatattt

SEQ ID NO: 295160 - DNA, 15 bp, Homo sapiens
tcactttgccatatt

SEQ ID NO: 295161 - DNA, 15 bp, Homo sapiens
ctcactttgccatat

SEQ ID NO: 295162 - DNA, 15 bp, Homo sapiens
tctcactttgccata

SEQ ID NO: 295163 - DNA, 15 bp, Homo sapiens
ttctcactttgccat

SEQ ID NO: 295164 - DNA, 15 bp, Homo sapiens
cttctcactttgcca

SEQ ID NO: 295165 - DNA, 15 bp, Homo sapiens
ccttctcactttgcc

SEQ ID NO: 295166 - DNA, 15 bp, Homo sapiens
gccttctcactttgc

SEQ ID NO: 295167 - DNA, 15 bp, Homo sapiens
tgccttctcactttg

SEQ ID NO: 295168 - DNA, 15 bp, Homo sapiens
ctgccttctcacttt

SEQ ID NO: 295169 - DNA, 15 bp, Homo sapiens
tctgccttctcactt

SEQ ID NO: 295170 - DNA, 15 bp, Homo sapiens
ttctgccttctcact

SEQ ID NO: 295171 - DNA, 15 bp, Homo sapiens
cttctgccttctcac

SEQ ID NO: 295172 - DNA, 15 bp, Homo sapiens
gcttctgccttctca

SEQ ID NO: 295173 - DNA, 15 bp, Homo sapiens
tgcttctgccttctc

SEQ ID NO: 295174 - DNA, 15 bp, Homo sapiens
ctgcttctgccttct

SEQ ID NO: 295175 - DNA, 15 bp, Homo sapiens
gctgcttctgccttc

SEQ ID NO: 295176 - DNA, 15 bp, Homo sapiens
tgctgcttctgcctt

SEQ ID NO: 295177 - DNA, 15 bp, Homo sapiens
ctgctgcttctgcct

SEQ ID NO: 295178 - DNA, 15 bp, Homo sapiens
actgctgcttctgcc

SEQ ID NO: 295179 - DNA, 15 bp, Homo sapiens
aactgctgcttctgc

SEQ ID NO: 295180 - DNA, 15 bp, Homo sapiens
caactgctgcttctg

SEQ ID NO: 295181 - DNA, 15 bp, Homo sapiens
tcaactgctgcttct

SEQ ID NO: 295182 - DNA, 15 bp, Homo sapiens
ctcaactgctgcttc

SEQ ID NO: 295183 - DNA, 15 bp, Homo sapiens
tctcaactgctgctt

SEQ ID NO: 295184 - DNA, 15 bp, Homo sapiens
ttctcaactgctgct

SEQ ID NO: 295185 - DNA, 15 bp, Homo sapiens
attctcaactgctgc

SEQ ID NO: 295186 - DNA, 15 bp, Homo sapiens
cattctcaactgctg

SEQ ID NO: 295187 - DNA, 15 bp, Homo sapiens
ccattctcaactgct

SEQ ID NO: 295188 - DNA, 15 bp, Homo sapiens
gccattctcaactgc

SEQ ID NO: 295189 - DNA, 15 bp, Homo sapiens
agccattctcaactg

SEQ ID NO: 295190 - DNA, 15 bp, Homo sapiens
cagccattctcaact

SEQ ID NO: 295191 - DNA, 15 bp, Homo sapiens
tcagccattctcaac

SEQ ID NO: 295192 - DNA, 15 bp, Homo sapiens
gtcagccattctcaa

SEQ ID NO: 295193 - DNA, 15 bp, Homo sapiens
agtcagccattctca

SEQ ID NO: 295194 - DNA, 15 bp, Homo sapiens
gagtcagccattctc

SEQ ID NO: 295195 - DNA, 15 bp, Homo sapiens
tgagtcagccattct

SEQ ID NO: 295196 - DNA, 15 bp, Homo sapiens
atgagtcagccattc

SEQ ID NO: 295197 - DNA, 15 bp, Homo sapiens
catgagtcagccatt

SEQ ID NO: 295198 - DNA, 15 bp, Homo sapiens
ccatgagtcagccat

SEQ ID NO: 295199 - DNA, 15 bp, Homo sapiens
cccatgagtcagcca

SEQ ID NO: 295200 - DNA, 15 bp, Homo sapiens
gcccatgagtcagcc

SEQ ID NO: 295201 - DNA, 15 bp, Homo sapiens
tgcccatgagtcagc

SEQ ID NO: 295202 - DNA, 15 bp, Homo sapiens
ctgcccatgagtcag

SEQ ID NO: 295203 - DNA, 15 bp, Homo sapiens
gctgcccatgagtca

SEQ ID NO: 295204 - DNA, 15 bp, Homo sapiens
tgctgcccatgagtc

SEQ ID NO: 295205 - DNA, 15 bp, Homo sapiens
gtgctgcccatgagt

SEQ ID NO: 295206 - DNA, 15 bp, Homo sapiens
ggtgctgcccatgag

SEQ ID NO: 295207 - DNA, 15 bp, Homo sapiens
aggtgctgcccatga

SEQ ID NO: 295208 - DNA, 15 bp, Homo sapiens
gaggtgctgcccatg

SEQ ID NO: 295209 - DNA, 15 bp, Homo sapiens
agaggtgctgcccat

SEQ ID NO: 295210 - DNA, 15 bp, Homo sapiens
aagaggtgctgccca

SEQ ID NO: 295211 - DNA, 15 bp, Homo sapiens
gaagaggtgctgccc

SEQ ID NO: 295212 - DNA, 15 bp, Homo sapiens
ggaagaggtgctgcc

SEQ ID NO: 295213 - DNA, 15 bp, Homo sapiens
gggaagaggtgctgc

SEQ ID NO: 295214 - DNA, 15 bp, Homo sapiens
agggaagaggtgctg

SEQ ID NO: 295215 - DNA, 15 bp, Homo sapiens
cagggaagaggtgct

SEQ ID NO: 295216 - DNA, 15 bp, Homo sapiens
ccagggaagaggtgc

SEQ ID NO: 295217 - DNA, 15 bp, Homo sapiens
gccagggaagaggtg

SEQ ID NO: 295218 - DNA, 15 bp, Homo sapiens
ggccagggaagaggt

SEQ ID NO: 295219 - DNA, 15 bp, Homo sapiens
aggccagggaagagg

SEQ ID NO: 295220 - DNA, 15 bp, Homo sapiens
caggccagggaagag

SEQ ID NO: 295221 - DNA, 15 bp, Homo sapiens
tcaggccagggaaga

SEQ ID NO: 295222 - DNA, 15 bp, Homo sapiens
gtcaggccagggaag

SEQ ID NO: 295223 - DNA, 15 bp, Homo sapiens
agtcaggccagggaa

SEQ ID NO: 295224 - DNA, 15 bp, Homo sapiens
aagtcaggccaggga

SEQ ID NO: 295225 - DNA, 15 bp, Homo sapiens
gaagtcaggccaggg

SEQ ID NO: 295226 - DNA, 15 bp, Homo sapiens
tgaagtcaggccagg

SEQ ID NO: 295227 - DNA, 15 bp, Homo sapiens
ctgaagtcaggccag

SEQ ID NO: 295228 - DNA, 15 bp, Homo sapiens
gctgaagtcaggcca

SEQ ID NO: 295229 - DNA, 15 bp, Homo sapiens
tgctgaagtcaggcc

SEQ ID NO: 295230 - DNA, 15 bp, Homo sapiens
ctgctgaagtcaggc

SEQ ID NO: 295231 - DNA, 15 bp, Homo sapiens
cctgctgaagtcagg

SEQ ID NO: 295232 - DNA, 15 bp, Homo sapiens
ccctgctgaagtcag

SEQ ID NO: 295233 - DNA, 15 bp, Homo sapiens
cccctgctgaagtca

SEQ ID NO: 295234 - DNA, 15 bp, Homo sapiens
ccccctgctgaagtc

SEQ ID NO: 295235 - DNA, 15 bp, Homo sapiens
gccccctgctgaagt

SEQ ID NO: 295236 - DNA, 15 bp, Homo sapiens
tgccccctgctgaag

SEQ ID NO: 295237 - DNA, 15 bp, Homo sapiens
ctgccccctgctgaa

SEQ ID NO: 295238 - DNA, 15 bp, Homo sapiens
tctgccccctgctga

SEQ ID NO: 295239 - DNA, 15 bp, Homo sapiens
atctgccccctgctg

SEQ ID NO: 295240 - DNA, 15 bp, Homo sapiens
catctgccccctgct

SEQ ID NO: 295241 - DNA, 15 bp, Homo sapiens
ccatctgccccctgc

SEQ ID NO: 295242 - DNA, 15 bp, Homo sapiens
gccatctgccccctg

SEQ ID NO: 295243 - DNA, 15 bp, Homo sapiens
tgccatctgccccct

SEQ ID NO: 295244 - DNA, 15 bp, Homo sapiens
ctgccatctgccccc

SEQ ID NO: 295245 - DNA, 15 bp, Homo sapiens
tctgccatctgcccc

SEQ ID NO: 295246 - DNA, 15 bp, Homo sapiens
ctctgccatctgccc

SEQ ID NO: 295247 - DNA, 15 bp, Homo sapiens
cctctgccatctgcc

SEQ ID NO: 295248 - DNA, 15 bp, Homo sapiens
gcctctgccatctgc

SEQ ID NO: 295249 - DNA, 15 bp, Homo sapiens
cgcctctgccatctg

SEQ ID NO: 295250 - DNA, 15 bp, Homo sapiens
acgcctctgccatct

SEQ ID NO: 295251 - DNA, 15 bp, Homo sapiens
cacgcctctgccatc

SEQ ID NO: 295252 - DNA, 15 bp, Homo sapiens
ccacgcctctgccat

SEQ ID NO: 295253 - DNA, 15 bp, Homo sapiens
gccacgcctctgcca

SEQ ID NO: 295254 - DNA, 15 bp, Homo sapiens
tgccacgcctctgcc

SEQ ID NO: 295255 - DNA, 15 bp, Homo sapiens
ctgccacgcctctgc

SEQ ID NO: 295256 - DNA, 15 bp, Homo sapiens
tctgccacgcctctg

SEQ ID NO: 295257 - DNA, 15 bp, Homo sapiens
ctctgccacgcctct

SEQ ID NO: 295258 - DNA, 15 bp, Homo sapiens
gctctgccacgcctc

SEQ ID NO: 295259 - DNA, 15 bp, Homo sapiens
tgctctgccacgcct

SEQ ID NO: 295260 - DNA, 15 bp, Homo sapiens
ttgctctgccacgcc

SEQ ID NO: 295261 - DNA, 15 bp, Homo sapiens
cttgctctgccacgc

SEQ ID NO: 295262 - DNA, 15 bp, Homo sapiens
gcttgctctgccacg

SEQ ID NO: 295263 - DNA, 15 bp, Homo sapiens
tgcttgctctgccac

SEQ ID NO: 295264 - DNA, 15 bp, Homo sapiens
ttgcttgctctgcca

SEQ ID NO: 295265 - DNA, 15 bp, Homo sapiens
attgcttgctctgcc

SEQ ID NO: 295266 - DNA, 15 bp, Homo sapiens
gattgcttgctctgc

SEQ ID NO: 295267 - DNA, 15 bp, Homo sapiens
agattgcttgctctg

SEQ ID NO: 295268 - DNA, 15 bp, Homo sapiens
cagattgcttgctct

SEQ ID NO: 295269 - DNA, 15 bp, Homo sapiens
tcagattgcttgctc

SEQ ID NO: 295270 - DNA, 15 bp, Homo sapiens
ctcagattgcttgct

SEQ ID NO: 295271 - DNA, 15 bp, Homo sapiens
gctcagattgcttgc

SEQ ID NO: 295272 - DNA, 15 bp, Homo sapiens
ggctcagattgcttg

SEQ ID NO: 295273 - DNA, 15 bp, Homo sapiens
gggctcagattgctt

SEQ ID NO: 295274 - DNA, 15 bp, Homo sapiens
agggctcagattgct

SEQ ID NO: 295275 - DNA, 15 bp, Homo sapiens
gagggctcagattgc

SEQ ID NO: 295276 - DNA, 15 bp, Homo sapiens
ggagggctcagattg

SEQ ID NO: 295277 - DNA, 15 bp, Homo sapiens
aggagggctcagatt

SEQ ID NO: 295278 - DNA, 15 bp, Homo sapiens
caggagggctcagat

SEQ ID NO: 295279 - DNA, 15 bp, Homo sapiens
acaggagggctcaga

SEQ ID NO: 295280 - DNA, 15 bp, Homo sapiens
tacaggagggctcag

SEQ ID NO: 295281 - DNA, 15 bp, Homo sapiens
ctacaggagggctca

SEQ ID NO: 295282 - DNA, 15 bp, Homo sapiens
gctacaggagggctc

SEQ ID NO: 295283 - DNA, 15 bp, Homo sapiens
agctacaggagggct

SEQ ID NO: 295284 - DNA, 15 bp, Homo sapiens
cagctacaggagggc

SEQ ID NO: 295285 - DNA, 15 bp, Homo sapiens
gcagctacaggaggg

SEQ ID NO: 295286 - DNA, 15 bp, Homo sapiens
agcagctacaggagg

SEQ ID NO: 295287 - DNA, 15 bp, Homo sapiens
cagcagctacaggag

SEQ ID NO: 295288 - DNA, 15 bp, Homo sapiens
ccagcagctacagga

SEQ ID NO: 295289 - DNA, 15 bp, Homo sapiens
cccagcagctacagg

SEQ ID NO: 295290 - DNA, 15 bp, Homo sapiens
acccagcagctacag

SEQ ID NO: 295291 - DNA, 15 bp, Homo sapiens
gacccagcagctaca

SEQ ID NO: 295292 - DNA, 15 bp, Homo sapiens
ggacccagcagctac

SEQ ID NO: 295293 - DNA, 15 bp, Homo sapiens
tggacccagcagcta

SEQ ID NO: 295294 - DNA, 15 bp, Homo sapiens
atggacccagcagct

SEQ ID NO: 295295 - DNA, 15 bp, Homo sapiens
catggacccagcagc

SEQ ID NO: 295296 - DNA, 15 bp, Homo sapiens
gcatggacccagcag

SEQ ID NO: 295297 - DNA, 15 bp, Homo sapiens
agcatggacccagca

SEQ ID NO: 295298 - DNA, 15 bp, Homo sapiens
cagcatggacccagc

SEQ ID NO: 295299 - DNA, 15 bp, Homo sapiens
ccagcatggacccag

SEQ ID NO: 295300 - DNA, 15 bp, Homo sapiens
tccagcatggaccca

SEQ ID NO: 295301 - DNA, 15 bp, Homo sapiens
ttccagcatggaccc

SEQ ID NO: 295302 - DNA, 15 bp, Homo sapiens
cttccagcatggacc

SEQ ID NO: 295303 - DNA, 15 bp, Homo sapiens
tcttccagcatggac

SEQ ID NO: 295304 - DNA, 15 bp, Homo sapiens
ctcttccagcatgga

SEQ ID NO: 295305 - DNA, 15 bp, Homo sapiens
cctcttccagcatgg

SEQ ID NO: 295306 - DNA, 15 bp, Homo sapiens
gcctcttccagcatg

SEQ ID NO: 295307 - DNA, 15 bp, Homo sapiens
agcctcttccagcat

SEQ ID NO: 295308 - DNA, 15 bp, Homo sapiens
gagcctcttccagca

SEQ ID NO: 295309 - DNA, 15 bp, Homo sapiens
ggagcctcttccagc

SEQ ID NO: 295310 - DNA, 15 bp, Homo sapiens
aggagcctcttccag

SEQ ID NO: 295311 - DNA, 15 bp, Homo sapiens
gaggagcctcttcca

SEQ ID NO: 295312 - DNA, 15 bp, Homo sapiens
agaggagcctcttcc

SEQ ID NO: 295313 - DNA, 15 bp, Homo sapiens
cagaggagcctcttc

SEQ ID NO: 295314 - DNA, 15 bp, Homo sapiens
acagaggagcctctt

SEQ ID NO: 295315 - DNA, 15 bp, Homo sapiens
aacagaggagcctct

SEQ ID NO: 295316 - DNA, 15 bp, Homo sapiens
gaacagaggagcctc

SEQ ID NO: 295317 - DNA, 15 bp, Homo sapiens
agaacagaggagcct

SEQ ID NO: 295318 - DNA, 15 bp, Homo sapiens
cagaacagaggagcc

SEQ ID NO: 295319 - DNA, 15 bp, Homo sapiens
ccagaacagaggagc

SEQ ID NO: 295320 - DNA, 15 bp, Homo sapiens
tccagaacagaggag

SEQ ID NO: 295321 - DNA, 15 bp, Homo sapiens
ttccagaacagagga

SEQ ID NO: 295322 - DNA, 15 bp, Homo sapiens
gttccagaacagagg

SEQ ID NO: 295323 - DNA, 15 bp, Homo sapiens
agttccagaacagag

SEQ ID NO: 295324 - DNA, 15 bp, Homo sapiens
aagttccagaacaga

SEQ ID NO: 295325 - DNA, 15 bp, Homo sapiens
gaagttccagaacag

SEQ ID NO: 295326 - DNA, 15 bp, Homo sapiens
agaagttccagaaca

SEQ ID NO: 295327 - DNA, 15 bp, Homo sapiens
gagaagttccagaac

SEQ ID NO: 295328 - DNA, 15 bp, Homo sapiens
agagaagttccagaa

SEQ ID NO: 295329 - DNA, 15 bp, Homo sapiens
gagagaagttccaga

SEQ ID NO: 295330 - DNA, 15 bp, Homo sapiens
cgagagaagttccag

SEQ ID NO: 295331 - DNA, 15 bp, Homo sapiens
acgagagaagttcca

SEQ ID NO: 295332 - DNA, 15 bp, Homo sapiens
cacgagagaagttcc

SEQ ID NO: 295333 - DNA, 15 bp, Homo sapiens
ccacgagagaagttc

SEQ ID NO: 295334 - DNA, 15 bp, Homo sapiens
gccacgagagaagtt

SEQ ID NO: 295335 - DNA, 15 bp, Homo sapiens
tgccacgagagaagt

SEQ ID NO: 295336 - DNA, 15 bp, Homo sapiens
ctgccacgagagaag

SEQ ID NO: 295337 - DNA, 15 bp, Homo sapiens
actgccacgagagaa

SEQ ID NO: 295338 - DNA, 15 bp, Homo sapiens
aactgccacgagaga

SEQ ID NO: 295339 - DNA, 15 bp, Homo sapiens
caactgccacgagag

SEQ ID NO: 295340 - DNA, 15 bp, Homo sapiens
ccaactgccacgaga

SEQ ID NO: 295341 - DNA, 15 bp, Homo sapiens
tccaactgccacgag

SEQ ID NO: 295342 - DNA, 15 bp, Homo sapiens
atccaactgccacga

SEQ ID NO: 295343 - DNA, 15 bp, Homo sapiens
tatccaactgccacg

SEQ ID NO: 295344 - DNA, 15 bp, Homo sapiens
atatccaactgccac

SEQ ID NO: 295345 - DNA, 15 bp, Homo sapiens
aatatccaactgcca

SEQ ID NO: 295346 - DNA, 15 bp, Homo sapiens
aaatatccaactgcc

SEQ ID NO: 295347 - DNA, 15 bp, Homo sapiens
aaaatatccaactgc

SEQ ID NO: 295348 - DNA, 15 bp, Homo sapiens
taaaatatccaactg

SEQ ID NO: 295349 - DNA, 15 bp, Homo sapiens
ttaaaatatccaact

SEQ ID NO: 295350 - DNA, 15 bp, Homo sapiens
cttaaaatatccaac

SEQ ID NO: 295351 - DNA, 15 bp, Homo sapiens
acttaaaatatccaa

SEQ ID NO: 295352 - DNA, 15 bp, Homo sapiens
gacttaaaatatcca

SEQ ID NO: 295353 - DNA, 15 bp, Homo sapiens
tgacttaaaatatcc

SEQ ID NO: 295354 - DNA, 15 bp, Homo sapiens
atgacttaaaatatc

SEQ ID NO: 295355 - DNA, 15 bp, Homo sapiens
catgacttaaaatat

SEQ ID NO: 295356 - DNA, 15 bp, Homo sapiens
tcatgacttaaaata

SEQ ID NO: 295357 - DNA, 15 bp, Homo sapiens
ttcatgacttaaaat

SEQ ID NO: 295358 - DNA, 15 bp, Homo sapiens
ccttcatgacttaaa

SEQ ID NO: 295359 - DNA, 15 bp, Homo sapiens
gccttcatgacttaa

SEQ ID NO: 295360 - DNA, 15 bp, Homo sapiens
agccttcatgactta

SEQ ID NO: 295361 - DNA, 15 bp, Homo sapiens
aagccttcatgactt

SEQ ID NO: 295362 - DNA, 15 bp, Homo sapiens
gaagccttcatgact

SEQ ID NO: 295363 - DNA, 15 bp, Homo sapiens
ggaagccttcatgac

SEQ ID NO: 295364 - DNA, 15 bp, Homo sapiens
tggaagccttcatga

SEQ ID NO: 295365 - DNA, 15 bp, Homo sapiens
atggaagccttcatg

SEQ ID NO: 295366 - DNA, 15 bp, Homo sapiens
tatggaagccttcat

SEQ ID NO: 295367 - DNA, 15 bp, Homo sapiens
atatggaagccttca

SEQ ID NO: 295368 - DNA, 15 bp, Homo sapiens
tatatggaagccttc

SEQ ID NO: 295369 - DNA, 15 bp, Homo sapiens
gtatatggaagcctt

SEQ ID NO: 295370 - DNA, 15 bp, Homo sapiens
agtatatggaagcct

SEQ ID NO: 295371 - DNA, 15 bp, Homo sapiens
aagtatatggaagcc

SEQ ID NO: 295372 - DNA, 15 bp, Homo sapiens
taagtatatggaagc

SEQ ID NO: 295373 - DNA, 15 bp, Homo sapiens
ctaagtatatggaag

SEQ ID NO: 295374 - DNA, 15 bp, Homo sapiens
gctaagtatatggaa

SEQ ID NO: 295375 - DNA, 15 bp, Homo sapiens
tgctaagtatatgga

SEQ ID NO: 295376 - DNA, 15 bp, Homo sapiens
ctgctaagtatatgg

SEQ ID NO: 295377 - DNA, 15 bp, Homo sapiens
tctgctaagtatatg

SEQ ID NO: 295378 - DNA, 15 bp, Homo sapiens
atctgctaagtatat

SEQ ID NO: 295379 - DNA, 15 bp, Homo sapiens
gatctgctaagtata

SEQ ID NO: 295380 - DNA, 15 bp, Homo sapiens
agatctgctaagtat

SEQ ID NO: 295381 - DNA, 15 bp, Homo sapiens
gagatctgctaagta

SEQ ID NO: 295382 - DNA, 15 bp, Homo sapiens
agagatctgctaagt

SEQ ID NO: 295383 - DNA, 15 bp, Homo sapiens
cagagatctgctaag

SEQ ID NO: 295384 - DNA, 15 bp, Homo sapiens
tcagagatctgctaa

SEQ ID NO: 295385 - DNA, 15 bp, Homo sapiens
gtcagagatctgcta

SEQ ID NO: 295386 - DNA, 15 bp, Homo sapiens
agtcagagatctgct

SEQ ID NO: 295387 - DNA, 15 bp, Homo sapiens
gagtcagagatctgc

SEQ ID NO: 295388 - DNA, 15 bp, Homo sapiens
tgagtcagagatctg

SEQ ID NO: 295389 - DNA, 15 bp, Homo sapiens
atgagtcagagatct

SEQ ID NO: 295390 - DNA, 15 bp, Homo sapiens
aatgagtcagagatc

SEQ ID NO: 295391 - DNA, 15 bp, Homo sapiens
caatgagtcagagat

SEQ ID NO: 295392 - DNA, 15 bp, Homo sapiens
ccaatgagtcagaga

SEQ ID NO: 295393 - DNA, 15 bp, Homo sapiens
cccaatgagtcagag

SEQ ID NO: 295394 - DNA, 15 bp, Homo sapiens
gcccaatgagtcaga

SEQ ID NO: 295395 - DNA, 15 bp, Homo sapiens
agcccaatgagtcag

SEQ ID NO: 295396 - DNA, 15 bp, Homo sapiens
cagcccaatgagtca

SEQ ID NO: 295397 - DNA, 15 bp, Homo sapiens
acagcccaatgagtc

SEQ ID NO: 295398 - DNA, 15 bp, Homo sapiens
aacagcccaatgagt

SEQ ID NO: 295399 - DNA, 15 bp, Homo sapiens
aaacagcccaatgag

SEQ ID NO: 295400 - DNA, 15 bp, Homo sapiens
caaacagcccaatga

SEQ ID NO: 295401 - DNA, 15 bp, Homo sapiens
tcaaacagcccaatg

SEQ ID NO: 295402 - DNA, 15 bp, Homo sapiens
atcaaacagcccaat

SEQ ID NO: 295403 - DNA, 15 bp, Homo sapiens
aatcaaacagcccaa

SEQ ID NO: 295404 - DNA, 15 bp, Homo sapiens
gaatcaaacagccca

SEQ ID NO: 295405 - DNA, 15 bp, Homo sapiens
ggaatcaaacagccc

SEQ ID NO: 295406 - DNA, 15 bp, Homo sapiens
aggaatcaaacagcc

SEQ ID NO: 295407 - DNA, 15 bp, Homo sapiens
aaggaatcaaacagc

SEQ ID NO: 295408 - DNA, 15 bp, Homo sapiens
caaggaatcaaacag

SEQ ID NO: 295409 - DNA, 15 bp, Homo sapiens
gcaaggaatcaaaca

SEQ ID NO: 295410 - DNA, 15 bp, Homo sapiens
cgcaaggaatcaaac

SEQ ID NO: 295411 - DNA, 15 bp, Homo sapiens
acgcaaggaatcaaa

SEQ ID NO: 295412 - DNA, 15 bp, Homo sapiens
cacgcaaggaatcaa

SEQ ID NO: 295413 - DNA, 15 bp, Homo sapiens
tcacgcaaggaatca

SEQ ID NO: 295414 - DNA, 15 bp, Homo sapiens
ttcacgcaaggaatc

SEQ ID NO: 295415 - DNA, 15 bp, Homo sapiens
gttcacgcaaggaat

SEQ ID NO: 295416 - DNA, 15 bp, Homo sapiens
ggttcacgcaaggaa

SEQ ID NO: 295417 - DNA, 15 bp, Homo sapiens
tggttcacgcaagga

SEQ ID NO: 295418 - DNA, 15 bp, Homo sapiens
ctggttcacgcaagg

SEQ ID NO: 295419 - DNA, 15 bp, Homo sapiens
actggttcacgcaag

SEQ ID NO: 295420 - DNA, 15 bp, Homo sapiens
tactggttcacgcaa

SEQ ID NO: 295421 - DNA, 15 bp, Homo sapiens
gtactggttcacgca

SEQ ID NO: 295422 - DNA, 15 bp, Homo sapiens
ggtactggttcacgc

SEQ ID NO: 295423 - DNA, 15 bp, Homo sapiens
tggtactggttcacg

SEQ ID NO: 295424 - DNA, 15 bp, Homo sapiens
gtggtactggttcac

SEQ ID NO: 295425 - DNA, 15 bp, Homo sapiens
ggtggtactggttca

SEQ ID NO: 295426 - DNA, 15 bp, Homo sapiens
tggtggtactggttc

SEQ ID NO: 295427 - DNA, 15 bp, Homo sapiens
ttggtggtactggtt

SEQ ID NO: 295428 - DNA, 15 bp, Homo sapiens
cttggtggtactggt

SEQ ID NO: 295429 - DNA, 15 bp, Homo sapiens
tcttggtggtactgg

SEQ ID NO: 295430 - DNA, 15 bp, Homo sapiens
gtcttggtggtactg

SEQ ID NO: 295431 - DNA, 15 bp, Homo sapiens
agtcttggtggtact

SEQ ID NO: 295432 - DNA, 15 bp, Homo sapiens
aagtcttggtggtac

SEQ ID NO: 295433 - DNA, 15 bp, Homo sapiens
gaagtcttggtggta

SEQ ID NO: 295434 - DNA, 15 bp, Homo sapiens
tgaagtcttggtggt

SEQ ID NO: 295435 - DNA, 15 bp, Homo sapiens
gtgaagtcttggtgg

SEQ ID NO: 295436 - DNA, 15 bp, Homo sapiens
agtgaagtcttggtg

SEQ ID NO: 295437 - DNA, 15 bp, Homo sapiens
aagtgaagtcttggt

SEQ ID NO: 295438 - DNA, 15 bp, Homo sapiens
aaagtgaagtcttgg

SEQ ID NO: 295439 - DNA, 15 bp, Homo sapiens
aaaagtgaagtcttg

SEQ ID NO: 295440 - DNA, 15 bp, Homo sapiens
caaaagtgaagtctt

SEQ ID NO: 295441 - DNA, 15 bp, Homo sapiens
acaaaagtgaagtct

SEQ ID NO: 295442 - DNA, 15 bp, Homo sapiens
gacaaaagtgaagtc

SEQ ID NO: 295443 - DNA, 15 bp, Homo sapiens
agacaaaagtgaagt

SEQ ID NO: 295444 - DNA, 15 bp, Homo sapiens
gaagacaaaagtgaa

SEQ ID NO: 295445 - DNA, 15 bp, Homo sapiens
tgaagacaaaagtga

SEQ ID NO: 295446 - DNA, 15 bp, Homo sapiens
gtgaagacaaaagtg

SEQ ID NO: 295447 - DNA, 15 bp, Homo sapiens
agtgaagacaaaagt

SEQ ID NO: 295448 - DNA, 15 bp, Homo sapiens
aagtgaagacaaaag

SEQ ID NO: 295449 - DNA, 15 bp, Homo sapiens
gaagtgaagacaaaa

SEQ ID NO: 295450 - DNA, 15 bp, Homo sapiens
cgaagtgaagacaaa

SEQ ID NO: 295451 - DNA, 15 bp, Homo sapiens
acgaagtgaagacaa

SEQ ID NO: 295452 - DNA, 15 bp, Homo sapiens
gacgaagtgaagaca

SEQ ID NO: 295453 - DNA, 15 bp, Homo sapiens
ggacgaagtgaagac

SEQ ID NO: 295454 - DNA, 15 bp, Homo sapiens
tggacgaagtgaaga

SEQ ID NO: 295455 - DNA, 15 bp, Homo sapiens
atggacgaagtgaag

SEQ ID NO: 295456 - DNA, 15 bp, Homo sapiens
catggacgaagtgaa

SEQ ID NO: 295457 - DNA, 15 bp, Homo sapiens
tcatggacgaagtga

SEQ ID NO: 295458 - DNA, 15 bp, Homo sapiens
gtcatggacgaagtg

SEQ ID NO: 295459 - DNA, 15 bp, Homo sapiens
ggtcatggacgaagt

SEQ ID NO: 295460 - DNA, 15 bp, Homo sapiens
aggtcatggacgaag

SEQ ID NO: 295461 - DNA, 15 bp, Homo sapiens
gaggtcatggacgaa

SEQ ID NO: 295462 - DNA, 15 bp, Homo sapiens
agaggtcatggacga

SEQ ID NO: 295463 - DNA, 15 bp, Homo sapiens
tagaggtcatggacg

SEQ ID NO: 295464 - DNA, 15 bp, Homo sapiens
gtagaggtcatggac

SEQ ID NO: 295465 - DNA, 15 bp, Homo sapiens
ggtagaggtcatgga

SEQ ID NO: 295466 - DNA, 15 bp, Homo sapiens
tggtagaggtcatgg

SEQ ID NO: 295467 - DNA, 15 bp, Homo sapiens
ctggtagaggtcatg

SEQ ID NO: 295468 - DNA, 15 bp, Homo sapiens
tctggtagaggtcat

SEQ ID NO: 295469 - DNA, 15 bp, Homo sapiens
atctggtagaggtca

SEQ ID NO: 295470 - DNA, 15 bp, Homo sapiens
gatctggtagaggtc

SEQ ID NO: 295471 - DNA, 15 bp, Homo sapiens
ggatctggtagaggt

SEQ ID NO: 295472 - DNA, 15 bp, Homo sapiens
tggatctggtagagg

SEQ ID NO: 295473 - DNA, 15 bp, Homo sapiens
ttggatctggtagag

SEQ ID NO: 295474 - DNA, 15 bp, Homo sapiens
cttggatctggtaga

SEQ ID NO: 295475 - DNA, 15 bp, Homo sapiens
gcttggatctggtag

SEQ ID NO: 295476 - DNA, 15 bp, Homo sapiens
tgcttggatctggta

SEQ ID NO: 295477 - DNA, 15 bp, Homo sapiens
gtgcttggatctggt

SEQ ID NO: 295478 - DNA, 15 bp, Homo sapiens
tgtgcttggatctgg

SEQ ID NO: 295479 - DNA, 15 bp, Homo sapiens
gtgtgcttggatctg

SEQ ID NO: 295480 - DNA, 15 bp, Homo sapiens
ggtgtgcttggatct

SEQ ID NO: 295481 - DNA, 15 bp, Homo sapiens
gggtgtgcttggatc

SEQ ID NO: 295482 - DNA, 15 bp, Homo sapiens
agggtgtgcttggat

SEQ ID NO: 295483 - DNA, 15 bp, Homo sapiens
gagggtgtgcttgga

SEQ ID NO: 295484 - DNA, 15 bp, Homo sapiens
ggagggtgtgcttgg

SEQ ID NO: 295485 - DNA, 15 bp, Homo sapiens
aggagggtgtgcttg

SEQ ID NO: 295486 - DNA, 15 bp, Homo sapiens
aaggagggtgtgctt

SEQ ID NO: 295487 - DNA, 15 bp, Homo sapiens
caaggagggtgtgct

SEQ ID NO: 295488 - DNA, 15 bp, Homo sapiens
tcaaggagggtgtgc

SEQ ID NO: 295489 - DNA, 15 bp, Homo sapiens
ttcaaggagggtgtg

SEQ ID NO: 295490 - DNA, 15 bp, Homo sapiens
tttcaaggagggtgt

SEQ ID NO: 295491 - DNA, 15 bp, Homo sapiens
gtttcaaggagggtg

SEQ ID NO: 295492 - DNA, 15 bp, Homo sapiens
agtttcaaggagggt

SEQ ID NO: 295493 - DNA, 15 bp, Homo sapiens
cagtttcaaggaggg

SEQ ID NO: 295494 - DNA, 15 bp, Homo sapiens
acagtttcaaggagg

SEQ ID NO: 295495 - DNA, 15 bp, Homo sapiens
cacagtttcaaggag

SEQ ID NO: 295496 - DNA, 15 bp, Homo sapiens
gcacagtttcaagga

SEQ ID NO: 295497 - DNA, 15 bp, Homo sapiens
agcacagtttcaagg

SEQ ID NO: 295498 - DNA, 15 bp, Homo sapiens
tagcacagtttcaag

SEQ ID NO: 295499 - DNA, 15 bp, Homo sapiens
atagcacagtttcaa

SEQ ID NO: 295500 - DNA, 15 bp, Homo sapiens
gatagcacagtttca

SEQ ID NO: 295501 - DNA, 15 bp, Homo sapiens
agatagcacagtttc

SEQ ID NO: 295502 - DNA, 15 bp, Homo sapiens
cagatagcacagttt

SEQ ID NO: 295503 - DNA, 15 bp, Homo sapiens
gcagatagcacagtt

SEQ ID NO: 295504 - DNA, 15 bp, Homo sapiens
tgcagatagcacagt

SEQ ID NO: 295505 - DNA, 15 bp, Homo sapiens
ttgcagatagcacag

SEQ ID NO: 295506 - DNA, 15 bp, Homo sapiens
gttgcagatagcaca

SEQ ID NO: 295507 - DNA, 15 bp, Homo sapiens
ggttgcagatagcac

SEQ ID NO: 295508 - DNA, 15 bp, Homo sapiens
cggttgcagatagca

SEQ ID NO: 295509 - DNA, 15 bp, Homo sapiens
acggttgcagatagc

SEQ ID NO: 295510 - DNA, 15 bp, Homo sapiens
cacggttgcagatag

SEQ ID NO: 295511 - DNA, 15 bp, Homo sapiens
gcacggttgcagata

SEQ ID NO: 295512 - DNA, 15 bp, Homo sapiens
cgcacggttgcagat

SEQ ID NO: 295513 - DNA, 15 bp, Homo sapiens
ccgcacggttgcaga

SEQ ID NO: 295514 - DNA, 15 bp, Homo sapiens
accgcacggttgcag

SEQ ID NO: 295515 - DNA, 15 bp, Homo sapiens
caccgcacggttgca

SEQ ID NO: 295516 - DNA, 15 bp, Homo sapiens
acaccgcacggttgc

SEQ ID NO: 295517 - DNA, 15 bp, Homo sapiens
tacaccgcacggttg

SEQ ID NO: 295518 - DNA, 15 bp, Homo sapiens
ttacaccgcacggtt

SEQ ID NO: 295519 - DNA, 15 bp, Homo sapiens
tttacaccgcacggt

SEQ ID NO: 295520 - DNA, 15 bp, Homo sapiens
ctttacaccgcacgg

SEQ ID NO: 295521 - DNA, 15 bp, Homo sapiens
tctttacaccgcacg

SEQ ID NO: 295522 - DNA, 15 bp, Homo sapiens
ttctttacaccgcac

SEQ ID NO: 295523 - DNA, 15 bp, Homo sapiens
cttctttacaccgca

SEQ ID NO: 295524 - DNA, 15 bp, Homo sapiens
acttctttacaccgc

SEQ ID NO: 295525 - DNA, 15 bp, Homo sapiens
gacttctttacaccg

SEQ ID NO: 295526 - DNA, 15 bp, Homo sapiens
tgacttctttacacc

SEQ ID NO: 295527 - DNA, 15 bp, Homo sapiens
atgacttctttacac

SEQ ID NO: 295528 - DNA, 15 bp, Homo sapiens
gatgacttctttaca

SEQ ID NO: 295529 - DNA, 15 bp, Homo sapiens
agatgacttctttac

SEQ ID NO: 295530 - DNA, 15 bp, Homo sapiens
cagatgacttcttta

SEQ ID NO: 295531 - DNA, 15 bp, Homo sapiens
acagatgacttcttt

SEQ ID NO: 295532 - DNA, 15 bp, Homo sapiens
cacagatgacttctt

SEQ ID NO: 295533 - DNA, 15 bp, Homo sapiens
ccacagatgacttct

SEQ ID NO: 295534 - DNA, 15 bp, Homo sapiens
accacagatgacttc

SEQ ID NO: 295535 - DNA, 15 bp, Homo sapiens
aaccacagatgactt

SEQ ID NO: 295536 - DNA, 15 bp, Homo sapiens
taaccacagatgact

SEQ ID NO: 295537 - DNA, 15 bp, Homo sapiens
ctaaccacagatgac

SEQ ID NO: 295538 - DNA, 15 bp, Homo sapiens
tctaaccacagatga

SEQ ID NO: 295539 - DNA, 15 bp, Homo sapiens
ctctaaccacagatg

SEQ ID NO: 295540 - DNA, 15 bp, Homo sapiens
cctctaaccacagat

SEQ ID NO: 295541 - DNA, 15 bp, Homo sapiens
tcctctaaccacaga

SEQ ID NO: 295542 - DNA, 15 bp, Homo sapiens
gtcctctaaccacag

SEQ ID NO: 295543 - DNA, 15 bp, Homo sapiens
tgtcctctaaccaca

SEQ ID NO: 295544 - DNA, 15 bp, Homo sapiens
ctgtcctctaaccac

SEQ ID NO: 295545 - DNA, 15 bp, Homo sapiens
actgtcctctaacca

SEQ ID NO: 295546 - DNA, 15 bp, Homo sapiens
cactgtcctctaacc

SEQ ID NO: 295547 - DNA, 15 bp, Homo sapiens
gcactgtcctctaac

SEQ ID NO: 295548 - DNA, 15 bp, Homo sapiens
ggcactgtcctctaa

SEQ ID NO: 295549 - DNA, 15 bp, Homo sapiens
gggcactgtcctcta

SEQ ID NO: 295550 - DNA, 15 bp, Homo sapiens
ggggcactgtcctct

SEQ ID NO: 295551 - DNA, 15 bp, Homo sapiens
tggggcactgtcctc

SEQ ID NO: 295552 - DNA, 15 bp, Homo sapiens
gtggggcactgtcct

SEQ ID NO: 295553 - DNA, 15 bp, Homo sapiens
tgtggggcactgtcc

SEQ ID NO: 295554 - DNA, 15 bp, Homo sapiens
ttgtggggcactgtc

SEQ ID NO: 295555 - DNA, 15 bp, Homo sapiens
attgtggggcactgt

SEQ ID NO: 295556 - DNA, 15 bp, Homo sapiens
aattgtggggcactg

SEQ ID NO: 295557 - DNA, 15 bp, Homo sapiens
caattgtggggcact

SEQ ID NO: 295558 - DNA, 15 bp, Homo sapiens
tcaattgtggggcac

SEQ ID NO: 295559 - DNA, 15 bp, Homo sapiens
ctcaattgtggggca

SEQ ID NO: 295560 - DNA, 15 bp, Homo sapiens
cctcaattgtggggc

SEQ ID NO: 295561 - DNA, 15 bp, Homo sapiens
tcctcaattgtgggg

SEQ ID NO: 295562 - DNA, 15 bp, Homo sapiens
ttcctcaattgtggg

SEQ ID NO: 295563 - DNA, 15 bp, Homo sapiens
cttcctcaattgtgg

SEQ ID NO: 295564 - DNA, 15 bp, Homo sapiens
ccttcctcaattgtg

SEQ ID NO: 295565 - DNA, 15 bp, Homo sapiens
tccttcctcaattgt

SEQ ID NO: 295566 - DNA, 15 bp, Homo sapiens
ttccttcctcaattg

SEQ ID NO: 295567 - DNA, 15 bp, Homo sapiens
tttccttcctcaatt

SEQ ID NO: 295568 - DNA, 15 bp, Homo sapiens
ttttccttcctcaat

SEQ ID NO: 295569 - DNA, 15 bp, Homo sapiens
tttttccttcctcaa

SEQ ID NO: 295570 - DNA, 15 bp, Homo sapiens
ttttttccttcctca

SEQ ID NO: 295571 - DNA, 15 bp, Homo sapiens
cttttttccttcctc

SEQ ID NO: 295572 - DNA, 15 bp, Homo sapiens
ccttttttccttcct

SEQ ID NO: 295573 - DNA, 15 bp, Homo sapiens
gccttttttccttcc

SEQ ID NO: 295574 - DNA, 15 bp, Homo sapiens
tgccttttttccttc

SEQ ID NO: 295575 - DNA, 15 bp, Homo sapiens
atgccttttttcctt

SEQ ID NO: 295576 - DNA, 15 bp, Homo sapiens
catgccttttttcct

SEQ ID NO: 295577 - DNA, 15 bp, Homo sapiens
gcatgccttttttcc

SEQ ID NO: 295578 - DNA, 15 bp, Homo sapiens
ggcatgccttttttc

SEQ ID NO: 295579 - DNA, 15 bp, Homo sapiens
tggcatgcctttttt

SEQ ID NO: 295580 - DNA, 15 bp, Homo sapiens
ttggcatgccttttt

SEQ ID NO: 295581 - DNA, 15 bp, Homo sapiens
attggcatgcctttt

SEQ ID NO: 295582 - DNA, 15 bp, Homo sapiens
gattggcatgccttt

SEQ ID NO: 295583 - DNA, 15 bp, Homo sapiens
tgattggcatgcctt

SEQ ID NO: 295584 - DNA, 15 bp, Homo sapiens
ctgattggcatgcct

SEQ ID NO: 295585 - DNA, 15 bp, Homo sapiens
tctgattggcatgcc

SEQ ID NO: 295586 - DNA, 15 bp, Homo sapiens
ctctgattggcatgc

SEQ ID NO: 295587 - DNA, 15 bp, Homo sapiens
tctctgattggcatg

SEQ ID NO: 295588 - DNA, 15 bp, Homo sapiens
ctctctgattggcat

SEQ ID NO: 295589 - DNA, 15 bp, Homo sapiens
cctctctgattggca

SEQ ID NO: 295590 - DNA, 15 bp, Homo sapiens
ccctctctgattggc

SEQ ID NO: 295591 - DNA, 15 bp, Homo sapiens
gccctctctgattgg

SEQ ID NO: 295592 - DNA, 15 bp, Homo sapiens
tgccctctctgattg

SEQ ID NO: 295593 - DNA, 15 bp, Homo sapiens
ttgccctctctgatt

SEQ ID NO: 295594 - DNA, 15 bp, Homo sapiens
tttgccctctctgat

SEQ ID NO: 295595 - DNA, 15 bp, Homo sapiens
ttttgccctctctga

SEQ ID NO: 295596 - DNA, 15 bp, Homo sapiens
gttttgccctctctg

SEQ ID NO: 295597 - DNA, 15 bp, Homo sapiens
tgttttgccctctct

SEQ ID NO: 295598 - DNA, 15 bp, Homo sapiens
gtgttttgccctctc

SEQ ID NO: 295599 - DNA, 15 bp, Homo sapiens
agtgttttgccctct

SEQ ID NO: 295600 - DNA, 15 bp, Homo sapiens
gagtgttttgccctc

SEQ ID NO: 295601 - DNA, 15 bp, Homo sapiens
tgagtgttttgccct

SEQ ID NO: 295602 - DNA, 15 bp, Homo sapiens
gtgagtgttttgccc

SEQ ID NO: 295603 - DNA, 15 bp, Homo sapiens
tgtgagtgttttgcc

SEQ ID NO: 295604 - DNA, 15 bp, Homo sapiens
atgtgagtgttttgc

SEQ ID NO: 295605 - DNA, 15 bp, Homo sapiens
aatgtgagtgttttg

SEQ ID NO: 295606 - DNA, 15 bp, Homo sapiens
aaatgtgagtgtttt

SEQ ID NO: 295607 - DNA, 15 bp, Homo sapiens
caaatgtgagtgttt

SEQ ID NO: 295608 - DNA, 15 bp, Homo sapiens
tcaaatgtgagtgtt

SEQ ID NO: 295609 - DNA, 15 bp, Homo sapiens
ctcaaatgtgagtgt

SEQ ID NO: 295610 - DNA, 15 bp, Homo sapiens
tctcaaatgtgagtg

SEQ ID NO: 295611 - DNA, 15 bp, Homo sapiens
ttctcaaatgtgagt

SEQ ID NO: 295612 - DNA, 15 bp, Homo sapiens
tttctcaaatgtgag

SEQ ID NO: 295613 - DNA, 15 bp, Homo sapiens
ttttctcaaatgtga

SEQ ID NO: 295614 - DNA, 15 bp, Homo sapiens
attttctcaaatgtg

SEQ ID NO: 295615 - DNA, 15 bp, Homo sapiens
cattttctcaaatgt

SEQ ID NO: 295616 - DNA, 15 bp, Homo sapiens
tcattttctcaaatg

SEQ ID NO: 295617 - DNA, 15 bp, Homo sapiens
ttcattttctcaaat

SEQ ID NO: 295618 - DNA, 15 bp, Homo sapiens
gttcattttctcaaa

SEQ ID NO: 295619 - DNA, 15 bp, Homo sapiens
agttcattttctcaa

SEQ ID NO: 295620 - DNA, 15 bp, Homo sapiens
aagttcattttctca

SEQ ID NO: 295621 - DNA, 15 bp, Homo sapiens
caagttcattttctc

SEQ ID NO: 295622 - DNA, 15 bp, Homo sapiens
acaagttcattttct

SEQ ID NO: 295623 - DNA, 15 bp, Homo sapiens
cacaagttcattttc

SEQ ID NO: 295624 - DNA, 15 bp, Homo sapiens
acacaagttcatttt

SEQ ID NO: 295625 - DNA, 15 bp, Homo sapiens
aacacaagttcattt

SEQ ID NO: 295626 - DNA, 15 bp, Homo sapiens
gaacacaagttcatt

SEQ ID NO: 295627 - DNA, 15 bp, Homo sapiens
agaacacaagttcat

SEQ ID NO: 295628 - DNA, 15 bp, Homo sapiens
tagaacacaagttca

SEQ ID NO: 295629 - DNA, 15 bp, Homo sapiens
ctagaacacaagttc

SEQ ID NO: 295630 - DNA, 15 bp, Homo sapiens
actagaacacaagtt

SEQ ID NO: 295631 - DNA, 15 bp, Homo sapiens
tactagaacacaagt

SEQ ID NO: 295632 - DNA, 15 bp, Homo sapiens
ttactagaacacaag

SEQ ID NO: 295633 - DNA, 15 bp, Homo sapiens
cttactagaacacaa

SEQ ID NO: 295634 - DNA, 15 bp, Homo sapiens
gcttactagaacaca

SEQ ID NO: 295635 - DNA, 15 bp, Homo sapiens
agcttactagaacac

SEQ ID NO: 295636 - DNA, 15 bp, Homo sapiens
gagcttactagaaca

SEQ ID NO: 295637 - DNA, 15 bp, Homo sapiens
ggagcttactagaac

SEQ ID NO: 295638 - DNA, 15 bp, Homo sapiens
tggagcttactagaa

SEQ ID NO: 295639 - DNA, 15 bp, Homo sapiens
atggagcttactaga

SEQ ID NO: 295640 - DNA, 15 bp, Homo sapiens
gatggagcttactag

SEQ ID NO: 295641 - DNA, 15 bp, Homo sapiens
cgatggagcttacta

SEQ ID NO: 295642 - DNA, 15 bp, Homo sapiens
gcgatggagcttact

SEQ ID NO: 295643 - DNA, 15 bp, Homo sapiens
agcgatggagcttac

SEQ ID NO: 295644 - DNA, 15 bp, Homo sapiens
gagcgatggagctta

SEQ ID NO: 295645 - DNA, 15 bp, Homo sapiens
agagcgatggagctt

SEQ ID NO: 295646 - DNA, 15 bp, Homo sapiens
cagagcgatggagct

SEQ ID NO: 295647 - DNA, 15 bp, Homo sapiens
tcagagcgatggagc

SEQ ID NO: 295648 - DNA, 15 bp, Homo sapiens
gtcagagcgatggag

SEQ ID NO: 295649 - DNA, 15 bp, Homo sapiens
ggtcagagcgatgga

SEQ ID NO: 295650 - DNA, 15 bp, Homo sapiens
gggtcagagcgatgg

SEQ ID NO: 295651 - DNA, 15 bp, Homo sapiens
agggtcagagcgatg

SEQ ID NO: 295652 - DNA, 15 bp, Homo sapiens
gagggtcagagcgat

SEQ ID NO: 295653 - DNA, 15 bp, Homo sapiens
ggagggtcagagcga

SEQ ID NO: 295654 - DNA, 15 bp, Homo sapiens
gggagggtcagagcg

SEQ ID NO: 295655 - DNA, 15 bp, Homo sapiens
cgggagggtcagagc

SEQ ID NO: 295656 - DNA, 15 bp, Homo sapiens
ccgggagggtcagag

SEQ ID NO: 295657 - DNA, 15 bp, Homo sapiens
gccgggagggtcaga

SEQ ID NO: 295658 - DNA, 15 bp, Homo sapiens
agccgggagggtcag

SEQ ID NO: 295659 - DNA, 15 bp, Homo sapiens
aagccgggagggtca

SEQ ID NO: 295660 - DNA, 15 bp, Homo sapiens
gaagccgggagggtc

SEQ ID NO: 295661 - DNA, 15 bp, Homo sapiens
agaagccgggagggt

SEQ ID NO: 295662 - DNA, 15 bp, Homo sapiens
cagaagccgggaggg

SEQ ID NO: 295663 - DNA, 15 bp, Homo sapiens
tcagaagccgggagg

SEQ ID NO: 295664 - DNA, 15 bp, Homo sapiens
ctcagaagccgggag

SEQ ID NO: 295665 - DNA, 15 bp, Homo sapiens
actcagaagccggga

SEQ ID NO: 295666 - DNA, 15 bp, Homo sapiens
aactcagaagccggg

SEQ ID NO: 295667 - DNA, 15 bp, Homo sapiens
aaactcagaagccgg

SEQ ID NO: 295668 - DNA, 15 bp, Homo sapiens
aaaactcagaagccg

SEQ ID NO: 295669 - DNA, 15 bp, Homo sapiens
gaaaactcagaagcc

SEQ ID NO: 295670 - DNA, 15 bp, Homo sapiens
agaaaactcagaagc

SEQ ID NO: 295671 - DNA, 15 bp, Homo sapiens
cagaaaactcagaag

SEQ ID NO: 295672 - DNA, 15 bp, Homo sapiens
acagaaaactcagaa

SEQ ID NO: 295673 - DNA, 15 bp, Homo sapiens
gacagaaaactcaga

SEQ ID NO: 295674 - DNA, 15 bp, Homo sapiens
tgacagaaaactcag

SEQ ID NO: 295675 - DNA, 15 bp, Homo sapiens
gtgacagaaaactca

SEQ ID NO: 295676 - DNA, 15 bp, Homo sapiens
ggtgacagaaaactc

SEQ ID NO: 295677 - DNA, 15 bp, Homo sapiens
tggtgacagaaaact

SEQ ID NO: 295678 - DNA, 15 bp, Homo sapiens
atggtgacagaaaac

SEQ ID NO: 295679 - DNA, 15 bp, Homo sapiens
catggtgacagaaaa

SEQ ID NO: 295680 - DNA, 15 bp, Homo sapiens
acatggtgacagaaa

SEQ ID NO: 295681 - DNA, 15 bp, Homo sapiens
gacatggtgacagaa

SEQ ID NO: 295682 - DNA, 15 bp, Homo sapiens
agacatggtgacaga

SEQ ID NO: 295683 - DNA, 15 bp, Homo sapiens
cagacatggtgacag

SEQ ID NO: 295684 - DNA, 15 bp, Homo sapiens
acagacatggtgaca

SEQ ID NO: 295685 - DNA, 15 bp, Homo sapiens
gacagacatggtgac

SEQ ID NO: 295686 - DNA, 15 bp, Homo sapiens
agacagacatggtga

SEQ ID NO: 295687 - DNA, 15 bp, Homo sapiens
cagacagacatggtg

SEQ ID NO: 295688 - DNA, 15 bp, Homo sapiens
acagacagacatggt

SEQ ID NO: 295689 - DNA, 15 bp, Homo sapiens
atacagacagacatg

SEQ ID NO: 295690 - DNA, 15 bp, Homo sapiens
catacagacagacat

SEQ ID NO: 295691 - DNA, 15 bp, Homo sapiens
acatacagacagaca

SEQ ID NO: 295692 - DNA, 15 bp, Homo sapiens
gacatacagacagac

SEQ ID NO: 295693 - DNA, 15 bp, Homo sapiens
ggacatacagacaga

SEQ ID NO: 295694 - DNA, 15 bp, Homo sapiens
tggacatacagacag

SEQ ID NO: 295695 - DNA, 15 bp, Homo sapiens
ttggacatacagaca

SEQ ID NO: 295696 - DNA, 15 bp, Homo sapiens
attggacatacagac

SEQ ID NO: 295697 - DNA, 15 bp, Homo sapiens
gattggacatacaga

SEQ ID NO: 295698 - DNA, 15 bp, Homo sapiens
tgattggacatacag

SEQ ID NO: 295699 - DNA, 15 bp, Homo sapiens
ttgattggacataca

SEQ ID NO: 295700 - DNA, 15 bp, Homo sapiens
cttgattggacatac

SEQ ID NO: 295701 - DNA, 15 bp, Homo sapiens
tcttgattggacata

SEQ ID NO: 295702 - DNA, 15 bp, Homo sapiens
gtcttgattggacat

SEQ ID NO: 295703 - DNA, 15 bp, Homo sapiens
agtcttgattggaca

SEQ ID NO: 295704 - DNA, 15 bp, Homo sapiens
cagtcttgattggac

SEQ ID NO: 295705 - DNA, 15 bp, Homo sapiens
acagtcttgattgga

SEQ ID NO: 295706 - DNA, 15 bp, Homo sapiens
tacagtcttgattgg

SEQ ID NO: 295707 - DNA, 15 bp, Homo sapiens
atacagtcttgattg

SEQ ID NO: 295708 - DNA, 15 bp, Homo sapiens
gatacagtcttgatt

SEQ ID NO: 295709 - DNA, 15 bp, Homo sapiens
ggatacagtcttgat

SEQ ID NO: 295710 - DNA, 15 bp, Homo sapiens
gggatacagtcttga

SEQ ID NO: 295711 - DNA, 15 bp, Homo sapiens
tgggatacagtcttg

SEQ ID NO: 295712 - DNA, 15 bp, Homo sapiens
atgggatacagtctt

SEQ ID NO: 295713 - DNA, 15 bp, Homo sapiens
gatgggatacagtct

SEQ ID NO: 295714 - DNA, 15 bp, Homo sapiens
agatgggatacagtc

SEQ ID NO: 295715 - DNA, 15 bp, Homo sapiens
aagatgggatacagt

SEQ ID NO: 295716 - DNA, 15 bp, Homo sapiens
caagatgggatacag

SEQ ID NO: 295717 - DNA, 15 bp, Homo sapiens
ccaagatgggataca

SEQ ID NO: 295718 - DNA, 15 bp, Homo sapiens
tccaagatgggatac

SEQ ID NO: 295719 - DNA, 15 bp, Homo sapiens
atccaagatgggata

SEQ ID NO: 295720 - DNA, 15 bp, Homo sapiens
catccaagatgggat

SEQ ID NO: 295721 - DNA, 15 bp, Homo sapiens
acatccaagatggga

SEQ ID NO: 295722 - DNA, 15 bp, Homo sapiens
gacatccaagatggg

SEQ ID NO: 295723 - DNA, 15 bp, Homo sapiens
tgacatccaagatgg

SEQ ID NO: 295724 - DNA, 15 bp, Homo sapiens
atgacatccaagatg

SEQ ID NO: 295725 - DNA, 15 bp, Homo sapiens
catgacatccaagat

SEQ ID NO: 295726 - DNA, 15 bp, Homo sapiens
ccatgacatccaaga

SEQ ID NO: 295727 - DNA, 15 bp, Homo sapiens
cccatgacatccaag

SEQ ID NO: 295728 - DNA, 15 bp, Homo sapiens
tcccatgacatccaa

SEQ ID NO: 295729 - DNA, 15 bp, Homo sapiens
atcccatgacatcca

SEQ ID NO: 295730 - DNA, 15 bp, Homo sapiens
aatcccatgacatcc

SEQ ID NO: 295731 - DNA, 15 bp, Homo sapiens
gaatcccatgacatc

SEQ ID NO: 295732 - DNA, 15 bp, Homo sapiens
agaatcccatgacat

SEQ ID NO: 295733 - DNA, 15 bp, Homo sapiens
gagaatcccatgaca

SEQ ID NO: 295734 - DNA, 15 bp, Homo sapiens
tgagaatcccatgac

SEQ ID NO: 295735 - DNA, 15 bp, Homo sapiens
atgagaatcccatga

SEQ ID NO: 295736 - DNA, 15 bp, Homo sapiens
aatgagaatcccatg

SEQ ID NO: 295737 - DNA, 15 bp, Homo sapiens
aaatgagaatcccat

SEQ ID NO: 295738 - DNA, 15 bp, Homo sapiens
aaaatgagaatccca

SEQ ID NO: 295739 - DNA, 15 bp, Homo sapiens
aaaaatgagaatccc

SEQ ID NO: 295740 - DNA, 15 bp, Homo sapiens
aaaaaatgagaatcc

SEQ ID NO: 295741 - DNA, 15 bp, Homo sapiens
taaaaaatgagaatc

SEQ ID NO: 295742 - DNA, 15 bp, Homo sapiens
ataaaaaatgagaat

SEQ ID NO: 295743 - DNA, 15 bp, Homo sapiens
aataaaaaatgagaa

SEQ ID NO: 295744 - DNA, 15 bp, Homo sapiens
gaataaaaaatgaga

SEQ ID NO: 295745 - DNA, 15 bp, Homo sapiens
tgaataaaaaatgag

SEQ ID NO: 295746 - DNA, 15 bp, Homo sapiens
atgaataaaaaatga

SEQ ID NO: 295747 - DNA, 15 bp, Homo sapiens
aatgaataaaaaatg

SEQ ID NO: 295748 - DNA, 15 bp, Homo sapiens
gaatgaataaaaaat

SEQ ID NO: 295749 - DNA, 15 bp, Homo sapiens
agaatgaataaaaaa

SEQ ID NO: 295750 - DNA, 15 bp, Homo sapiens
tagaatgaataaaaa

SEQ ID NO: 295751 - DNA, 15 bp, Homo sapiens
ctagaatgaataaaa

SEQ ID NO: 295752 - DNA, 15 bp, Homo sapiens
tctagaatgaataaa

SEQ ID NO: 295753 - DNA, 15 bp, Homo sapiens
atctagaatgaataa

SEQ ID NO: 295754 - DNA, 15 bp, Homo sapiens
tatctagaatgaata

SEQ ID NO: 295755 - DNA, 15 bp, Homo sapiens
gtatctagaatgaat

SEQ ID NO: 295756 - DNA, 15 bp, Homo sapiens
tgtatctagaatgaa

SEQ ID NO: 295757 - DNA, 15 bp, Homo sapiens
gtgtatctagaatga

SEQ ID NO: 295758 - DNA, 15 bp, Homo sapiens
agtgtatctagaatg

SEQ ID NO: 295759 - DNA, 15 bp, Homo sapiens
gagtgtatctagaat

SEQ ID NO: 295760 - DNA, 15 bp, Homo sapiens
agagtgtatctagaa

SEQ ID NO: 295761 - DNA, 15 bp, Homo sapiens
cagagtgtatctaga

SEQ ID NO: 295762 - DNA, 15 bp, Homo sapiens
tcagagtgtatctag

SEQ ID NO: 295763 - DNA, 15 bp, Homo sapiens
atcagagtgtatcta

SEQ ID NO: 295764 - DNA, 15 bp, Homo sapiens
aatcagagtgtatct

SEQ ID NO: 295765 - DNA, 15 bp, Homo sapiens
taatcagagtgtatc

SEQ ID NO: 295766 - DNA, 15 bp, Homo sapiens
ataatcagagtgtat

SEQ ID NO: 295767 - DNA, 15 bp, Homo sapiens
aataatcagagtgta

SEQ ID NO: 295768 - DNA, 15 bp, Homo sapiens
gaataatcagagtgt

SEQ ID NO: 295769 - DNA, 15 bp, Homo sapiens
agaataatcagagtg

SEQ ID NO: 295770 - DNA, 15 bp, Homo sapiens
cagaataatcagagt

SEQ ID NO: 295771 - DNA, 15 bp, Homo sapiens
gcagaataatcagag

SEQ ID NO: 295772 - DNA, 15 bp, Homo sapiens
tgcagaataatcaga

SEQ ID NO: 295773 - DNA, 15 bp, Homo sapiens
gtgcagaataatcag

SEQ ID NO: 295774 - DNA, 15 bp, Homo sapiens
agtgcagaataatca

SEQ ID NO: 295775 - DNA, 15 bp, Homo sapiens
aagtgcagaataatc

SEQ ID NO: 295776 - DNA, 15 bp, Homo sapiens
aaagtgcagaataat

SEQ ID NO: 295777 - DNA, 15 bp, Homo sapiens
gaaagtgcagaataa

SEQ ID NO: 295778 - DNA, 15 bp, Homo sapiens
agaaagtgcagaata

SEQ ID NO: 295779 - DNA, 15 bp, Homo sapiens
aagaaagtgcagaat

SEQ ID NO: 295780 - DNA, 15 bp, Homo sapiens
aaagaaagtgcagaa

SEQ ID NO: 295781 - DNA, 15 bp, Homo sapiens
aaaagaaagtgcaga

SEQ ID NO: 295782 - DNA, 15 bp, Homo sapiens
gaaaagaaagtgcag

SEQ ID NO: 295783 - DNA, 15 bp, Homo sapiens
tgaaaagaaagtgca

SEQ ID NO: 295784 - DNA, 15 bp, Homo sapiens
ttgaaaagaaagtgc

SEQ ID NO: 295785 - DNA, 15 bp, Homo sapiens
gttgaaaagaaagtg

SEQ ID NO: 295786 - DNA, 15 bp, Homo sapiens
agttgaaaagaaagt

SEQ ID NO: 295787 - DNA, 15 bp, Homo sapiens
aagttgaaaagaaag

SEQ ID NO: 295788 - DNA, 15 bp, Homo sapiens
caagttgaaaagaaa

SEQ ID NO: 295789 - DNA, 15 bp, Homo sapiens
acaagttgaaaagaa

SEQ ID NO: 295790 - DNA, 15 bp, Homo sapiens
aacaagttgaaaaga

SEQ ID NO: 295791 - DNA, 15 bp, Homo sapiens
aaacaagttgaaaag

SEQ ID NO: 295792 - DNA, 15 bp, Homo sapiens
caaacaagttgaaaa

SEQ ID NO: 295793 - DNA, 15 bp, Homo sapiens
ccaaacaagttgaaa

SEQ ID NO: 295794 - DNA, 15 bp, Homo sapiens
cccaaacaagttgaa

SEQ ID NO: 295795 - DNA, 15 bp, Homo sapiens
ccccaaacaagttga

SEQ ID NO: 295796 - DNA, 15 bp, Homo sapiens
cccccaaacaagttg

SEQ ID NO: 295797 - DNA, 15 bp, Homo sapiens
tcccccaaacaagtt

SEQ ID NO: 295798 - DNA, 15 bp, Homo sapiens
gtcccccaaacaagt

SEQ ID NO: 295799 - DNA, 15 bp, Homo sapiens
tgtcccccaaacaag

SEQ ID NO: 295800 - DNA, 15 bp, Homo sapiens
ttgtcccccaaacaa

SEQ ID NO: 295801 - DNA, 15 bp, Homo sapiens
tttgtcccccaaaca

SEQ ID NO: 295802 - DNA, 15 bp, Homo sapiens
gtttgtcccccaaac

SEQ ID NO: 295803 - DNA, 15 bp, Homo sapiens
tgtttgtcccccaaa

SEQ ID NO: 295804 - DNA, 15 bp, Homo sapiens
ctgtttgtcccccaa

SEQ ID NO: 295805 - DNA, 15 bp, Homo sapiens
gctgtttgtccccca

SEQ ID NO: 295806 - DNA, 15 bp, Homo sapiens
agctgtttgtccccc

SEQ ID NO: 295807 - DNA, 15 bp, Homo sapiens
aagctgtttgtcccc

SEQ ID NO: 295808 - DNA, 15 bp, Homo sapiens
aaagctgtttgtccc

SEQ ID NO: 295809 - DNA, 15 bp, Homo sapiens
aaaagctgtttgtcc

SEQ ID NO: 295810 - DNA, 15 bp, Homo sapiens
taaaagctgtttgtc

SEQ ID NO: 295811 - DNA, 15 bp, Homo sapiens
ataaaagctgtttgt

SEQ ID NO: 295812 - DNA, 15 bp, Homo sapiens
tataaaagctgtttg

SEQ ID NO: 295813 - DNA, 15 bp, Homo sapiens
ctataaaagctgttt

SEQ ID NO: 295814 - DNA, 15 bp, Homo sapiens
gctataaaagctgtt

SEQ ID NO: 295815 - DNA, 15 bp, Homo sapiens
agctataaaagctgt

SEQ ID NO: 295816 - DNA, 15 bp, Homo sapiens
cagctataaaagctg

SEQ ID NO: 295817 - DNA, 15 bp, Homo sapiens
ccagctataaaagct

SEQ ID NO: 295818 - DNA, 15 bp, Homo sapiens
cccagctataaaagc

SEQ ID NO: 295819 - DNA, 15 bp, Homo sapiens
ccccagctataaaag

SEQ ID NO: 295820 - DNA, 15 bp, Homo sapiens
tccccagctataaaa

SEQ ID NO: 295821 - DNA, 15 bp, Homo sapiens
ctccccagctataaa

SEQ ID NO: 295822 - DNA, 15 bp, Homo sapiens
actccccagctataa

SEQ ID NO: 295823 - DNA, 15 bp, Homo sapiens
cactccccagctata

SEQ ID NO: 295824 - DNA, 15 bp, Homo sapiens
tcactccccagctat

SEQ ID NO: 295825 - DNA, 15 bp, Homo sapiens
ctcactccccagcta

SEQ ID NO: 295826 - DNA, 15 bp, Homo sapiens
cctcactccccagct

SEQ ID NO: 295827 - DNA, 15 bp, Homo sapiens
acctcactccccagc

SEQ ID NO: 295828 - DNA, 15 bp, Homo sapiens
aacctcactccccag

SEQ ID NO: 295829 - DNA, 15 bp, Homo sapiens
caacctcactcccca

SEQ ID NO: 295830 - DNA, 15 bp, Homo sapiens
tcaacctcactcccc

SEQ ID NO: 295831 - DNA, 15 bp, Homo sapiens
atcaacctcactccc

SEQ ID NO: 295832 - DNA, 15 bp, Homo sapiens
tatcaacctcactcc

SEQ ID NO: 295833 - DNA, 15 bp, Homo sapiens
ttatcaacctcactc

SEQ ID NO: 295834 - DNA, 15 bp, Homo sapiens
attatcaacctcact

SEQ ID NO: 295835 - DNA, 15 bp, Homo sapiens
tattatcaacctcac

SEQ ID NO: 295836 - DNA, 15 bp, Homo sapiens
ttattatcaacctca

SEQ ID NO: 295837 - DNA, 15 bp, Homo sapiens
tttattatcaacctc

SEQ ID NO: 295838 - DNA, 15 bp, Homo sapiens
ctttattatcaacct

SEQ ID NO: 295839 - DNA, 15 bp, Homo sapiens
tctttattatcaacc

SEQ ID NO: 295840 - DNA, 15 bp, Homo sapiens
gtctttattatcaac

SEQ ID NO: 295841 - DNA, 15 bp, Homo sapiens
agtctttattatcaa

SEQ ID NO: 295842 - DNA, 15 bp, Homo sapiens
aagtctttattatca

SEQ ID NO: 295843 - DNA, 15 bp, Homo sapiens
aaagtctttattatc

SEQ ID NO: 295844 - DNA, 15 bp, Homo sapiens
taaagtctttattat

SEQ ID NO: 295845 - DNA, 15 bp, Homo sapiens
ttaaagtctttatta

SEQ ID NO: 295846 - DNA, 15 bp, Homo sapiens
tttaaagtctttatt

SEQ ID NO: 295847 - DNA, 15 bp, Homo sapiens
ctttaaagtctttat

SEQ ID NO: 295848 - DNA, 15 bp, Homo sapiens
tctttaaagtcttta

SEQ ID NO: 295849 - DNA, 15 bp, Homo sapiens
gtctttaaagtcttt

SEQ ID NO: 295850 - DNA, 15 bp, Homo sapiens
tgtctttaaagtctt

SEQ ID NO: 295851 - DNA, 15 bp, Homo sapiens
ttgtctttaaagtct

SEQ ID NO: 295852 - DNA, 15 bp, Homo sapiens
tttgtctttaaagtc

SEQ ID NO: 295853 - DNA, 15 bp, Homo sapiens
ttttgtctttaaagt

SEQ ID NO: 295854 - DNA, 15 bp, Homo sapiens
tttttgtctttaaag

SEQ ID NO: 295855 - DNA, 15 bp, Homo sapiens
atttttgtctttaaa

SEQ ID NO: 295856 - DNA, 15 bp, Homo sapiens
tatttttgtctttaa

SEQ ID NO: 295857 - DNA, 15 bp, Homo sapiens
gtatttttgtcttta

SEQ ID NO: 295858 - DNA, 15 bp, Homo sapiens
tgtatttttgtcttt

SEQ ID NO: 295859 - DNA, 15 bp, Homo sapiens
ctgtatttttgtctt

SEQ ID NO: 295860 - DNA, 15 bp, Homo sapiens
tctgtatttttgtct

SEQ ID NO: 295861 - DNA, 15 bp, Homo sapiens
atctgtatttttgtc

SEQ ID NO: 295862 - DNA, 15 bp, Homo sapiens
catctgtatttttgt

SEQ ID NO: 295863 - DNA, 15 bp, Homo sapiens
acatctgtatttttg

SEQ ID NO: 295864 - DNA, 15 bp, Homo sapiens
cacatctgtattttt

SEQ ID NO: 295865 - DNA, 15 bp, Homo sapiens
gcacatctgtatttt

SEQ ID NO: 295866 - DNA, 15 bp, Homo sapiens
tgcacatctgtattt

SEQ ID NO: 295867 - DNA, 15 bp, Homo sapiens
ctgcacatctgtatt

SEQ ID NO: 295868 - DNA, 15 bp, Homo sapiens
cctgcacatctgtat

SEQ ID NO: 295869 - DNA, 15 bp, Homo sapiens
acctgcacatctgta

SEQ ID NO: 295870 - DNA, 15 bp, Homo sapiens
aacctgcacatctgt

SEQ ID NO: 295871 - DNA, 15 bp, Homo sapiens
taacctgcacatctg

SEQ ID NO: 295872 - DNA, 15 bp, Homo sapiens
ttaacctgcacatct

SEQ ID NO: 295873 - DNA, 15 bp, Homo sapiens
gttaacctgcacatc

SEQ ID NO: 295874 - DNA, 15 bp, Homo sapiens
agttaacctgcacat

SEQ ID NO: 295875 - DNA, 15 bp, Homo sapiens
cagttaacctgcaca

SEQ ID NO: 295876 - DNA, 15 bp, Homo sapiens
tcagttaacctgcac

SEQ ID NO: 295877 - DNA, 15 bp, Homo sapiens
ctcagttaacctgca

SEQ ID NO: 295878 - DNA, 15 bp, Homo sapiens
gctcagttaacctgc

SEQ ID NO: 295879 - DNA, 15 bp, Homo sapiens
tgctcagttaacctg

SEQ ID NO: 295880 - DNA, 15 bp, Homo sapiens
ctgctcagttaacct

SEQ ID NO: 295881 - DNA, 15 bp, Homo sapiens
cctgctcagttaacc

SEQ ID NO: 295882 - DNA, 15 bp, Homo sapiens
tcctgctcagttaac

SEQ ID NO: 295883 - DNA, 15 bp, Homo sapiens
gtcctgctcagttaa

SEQ ID NO: 295884 - DNA, 15 bp, Homo sapiens
ggtcctgctcagtta

SEQ ID NO: 295885 - DNA, 15 bp, Homo sapiens
tggtcctgctcagtt

SEQ ID NO: 295886 - DNA, 15 bp, Homo sapiens
ttggtcctgctcagt

SEQ ID NO: 295887 - DNA, 15 bp, Homo sapiens
cttggtcctgctcag

SEQ ID NO: 295888 - DNA, 15 bp, Homo sapiens
tcttggtcctgctca

SEQ ID NO: 295889 - DNA, 15 bp, Homo sapiens
atcttggtcctgctc

SEQ ID NO: 295890 - DNA, 15 bp, Homo sapiens
catcttggtcctgct

SEQ ID NO: 295891 - DNA, 15 bp, Homo sapiens
tcatcttggtcctgc

SEQ ID NO: 295892 - DNA, 15 bp, Homo sapiens
ctcatcttggtcctg

SEQ ID NO: 295893 - DNA, 15 bp, Homo sapiens
gctcatcttggtcct

SEQ ID NO: 295894 - DNA, 15 bp, Homo sapiens
tgctcatcttggtcc

SEQ ID NO: 295895 - DNA, 15 bp, Homo sapiens
ctgctcatcttggtc

SEQ ID NO: 295896 - DNA, 15 bp, Homo sapiens
cctgctcatcttggt

SEQ ID NO: 295897 - DNA, 15 bp, Homo sapiens
acctgctcatcttgg

SEQ ID NO: 295898 - DNA, 15 bp, Homo sapiens
cacctgctcatcttg

SEQ ID NO: 295899 - DNA, 15 bp, Homo sapiens
ccacctgctcatctt

SEQ ID NO: 295900 - DNA, 15 bp, Homo sapiens
gccacctgctcatct

SEQ ID NO: 295901 - DNA, 15 bp, Homo sapiens
agccacctgctcatc

SEQ ID NO: 295902 - DNA, 15 bp, Homo sapiens
cagccacctgctcat

SEQ ID NO: 295903 - DNA, 15 bp, Homo sapiens
ccagccacctgctca

SEQ ID NO: 295904 - DNA, 15 bp, Homo sapiens
cccagccacctgctc

SEQ ID NO: 295905 - DNA, 15 bp, Homo sapiens
acccagccacctgct

SEQ ID NO: 295906 - DNA, 15 bp, Homo sapiens
aacccagccacctgc

SEQ ID NO: 295907 - DNA, 15 bp, Homo sapiens
taacccagccacctg

SEQ ID NO: 295908 - DNA, 15 bp, Homo sapiens
ttaacccagccacct

SEQ ID NO: 295909 - DNA, 15 bp, Homo sapiens
attaacccagccacc

SEQ ID NO: 295910 - DNA, 15 bp, Homo sapiens
cattaacccagccac

SEQ ID NO: 295911 - DNA, 15 bp, Homo sapiens
acattaacccagcca

SEQ ID NO: 295912 - DNA, 15 bp, Homo sapiens
gacattaacccagcc

SEQ ID NO: 295913 - DNA, 15 bp, Homo sapiens
tgacattaacccagc

SEQ ID NO: 295914 - DNA, 15 bp, Homo sapiens
atgacattaacccag

SEQ ID NO: 295915 - DNA, 15 bp, Homo sapiens
gatgacattaaccca

SEQ ID NO: 295916 - DNA, 15 bp, Homo sapiens
agatgacattaaccc

SEQ ID NO: 295917 - DNA, 15 bp, Homo sapiens
cagatgacattaacc

SEQ ID NO: 295918 - DNA, 15 bp, Homo sapiens
tcagatgacattaac

SEQ ID NO: 295919 - DNA, 15 bp, Homo sapiens
ttcagatgacattaa

SEQ ID NO: 295920 - DNA, 15 bp, Homo sapiens
tttcagatgacatta

SEQ ID NO: 295921 - DNA, 15 bp, Homo sapiens
ttttcagatgacatt

SEQ ID NO: 295922 - DNA, 15 bp, Homo sapiens
cttttcagatgacat

SEQ ID NO: 295923 - DNA, 15 bp, Homo sapiens
gcttttcagatgaca

SEQ ID NO: 295924 - DNA, 15 bp, Homo sapiens
ggcttttcagatgac

SEQ ID NO: 295925 - DNA, 15 bp, Homo sapiens
tggcttttcagatga

SEQ ID NO: 295926 - DNA, 15 bp, Homo sapiens
ttggcttttcagatg

SEQ ID NO: 295927 - DNA, 15 bp, Homo sapiens
attggcttttcagat

SEQ ID NO: 295928 - DNA, 15 bp, Homo sapiens
tattggcttttcaga

SEQ ID NO: 295929 - DNA, 15 bp, Homo sapiens
gtattggcttttcag

SEQ ID NO: 295930 - DNA, 15 bp, Homo sapiens
tgtattggcttttca

SEQ ID NO: 295931 - DNA, 15 bp, Homo sapiens
gtgtattggcttttc

SEQ ID NO: 295932 - DNA, 15 bp, Homo sapiens
agtgtattggctttt

SEQ ID NO: 295933 - DNA, 15 bp, Homo sapiens
cagtgtattggcttt

SEQ ID NO: 295934 - DNA, 15 bp, Homo sapiens
acagtgtattggctt

SEQ ID NO: 295935 - DNA, 15 bp, Homo sapiens
cacagtgtattggct

SEQ ID NO: 295936 - DNA, 15 bp, Homo sapiens
acacagtgtattggc

SEQ ID NO: 295937 - DNA, 15 bp, Homo sapiens
cacacagtgtattgg

SEQ ID NO: 295938 - DNA, 15 bp, Homo sapiens
acacacagtgtattg

SEQ ID NO: 295939 - DNA, 15 bp, Homo sapiens
gacacacagtgtatt

SEQ ID NO: 295940 - DNA, 15 bp, Homo sapiens
tgacacacagtgtat

SEQ ID NO: 295941 - DNA, 15 bp, Homo sapiens
gtgacacacagtgta

SEQ ID NO: 295942 - DNA, 15 bp, Homo sapiens
tgtgacacacagtgt

SEQ ID NO: 295943 - DNA, 15 bp, Homo sapiens
ttgtgacacacagtg

SEQ ID NO: 295944 - DNA, 15 bp, Homo sapiens
gttgtgacacacagt

SEQ ID NO: 295945 - DNA, 15 bp, Homo sapiens
tgttgtgacacacag

SEQ ID NO: 295946 - DNA, 15 bp, Homo sapiens
atgttgtgacacaca

SEQ ID NO: 295947 - DNA, 15 bp, Homo sapiens
catgttgtgacacac

SEQ ID NO: 295948 - DNA, 15 bp, Homo sapiens
ccatgttgtgacaca

SEQ ID NO: 295949 - DNA, 15 bp, Homo sapiens
accatgttgtgacac

SEQ ID NO: 295950 - DNA, 15 bp, Homo sapiens
gaccatgttgtgaca

SEQ ID NO: 295951 - DNA, 15 bp, Homo sapiens
agaccatgttgtgac

SEQ ID NO: 295952 - DNA, 15 bp, Homo sapiens
cagaccatgttgtga

SEQ ID NO: 295953 - DNA, 15 bp, Homo sapiens
tcagaccatgttgtg

SEQ ID NO: 295954 - DNA, 15 bp, Homo sapiens
ctcagaccatgttgt

SEQ ID NO: 295955 - DNA, 15 bp, Homo sapiens
gctcagaccatgttg

SEQ ID NO: 295956 - DNA, 15 bp, Homo sapiens
tgctcagaccatgtt

SEQ ID NO: 295957 - DNA, 15 bp, Homo sapiens
ttgctcagaccatgt

SEQ ID NO: 295958 - DNA, 15 bp, Homo sapiens
tttgctcagaccatg

SEQ ID NO: 295959 - DNA, 15 bp, Homo sapiens
ttttgctcagaccat

SEQ ID NO: 295960 - DNA, 15 bp, Homo sapiens
tttttgctcagacca

SEQ ID NO: 295961 - DNA, 15 bp, Homo sapiens
gtttttgctcagacc

SEQ ID NO: 295962 - DNA, 15 bp, Homo sapiens
agtttttgctcagac

SEQ ID NO: 295963 - DNA, 15 bp, Homo sapiens
tagtttttgctcaga

SEQ ID NO: 295964 - DNA, 15 bp, Homo sapiens
gtagtttttgctcag

SEQ ID NO: 295965 - DNA, 15 bp, Homo sapiens
tgtagtttttgctca

SEQ ID NO: 295966 - DNA, 15 bp, Homo sapiens
ttgtagtttttgctc

SEQ ID NO: 295967 - DNA, 15 bp, Homo sapiens
gttgtagtttttgct

SEQ ID NO: 295968 - DNA, 15 bp, Homo sapiens
ggttgtagtttttgc

SEQ ID NO: 295969 - DNA, 15 bp, Homo sapiens
tggttgtagtttttg

SEQ ID NO: 295970 - DNA, 15 bp, Homo sapiens
gtggttgtagttttt

SEQ ID NO: 295971 - DNA, 15 bp, Homo sapiens
agtggttgtagtttt

SEQ ID NO: 295972 - DNA, 15 bp, Homo sapiens
tagtggttgtagttt

SEQ ID NO: 295973 - DNA, 15 bp, Homo sapiens
atagtggttgtagtt

SEQ ID NO: 295974 - DNA, 15 bp, Homo sapiens
catagtggttgtagt

SEQ ID NO: 295975 - DNA, 15 bp, Homo sapiens
tcatagtggttgtag

SEQ ID NO: 295976 - DNA, 15 bp, Homo sapiens
ttcatagtggttgta

SEQ ID NO: 295977 - DNA, 15 bp, Homo sapiens
attcatagtggttgt

SEQ ID NO: 295978 - DNA, 15 bp, Homo sapiens
cattcatagtggttg

SEQ ID NO: 295979 - DNA, 15 bp, Homo sapiens
ccattcatagtggtt

SEQ ID NO: 295980 - DNA, 15 bp, Homo sapiens
gccattcatagtggt

SEQ ID NO: 295981 - DNA, 15 bp, Homo sapiens
agccattcatagtgg

SEQ ID NO: 295982 - DNA, 15 bp, Homo sapiens
aagccattcatagtg

SEQ ID NO: 295983 - DNA, 15 bp, Homo sapiens
gaagccattcatagt

SEQ ID NO: 295984 - DNA, 15 bp, Homo sapiens
ggaagccattcatag

SEQ ID NO: 295985 - DNA, 15 bp, Homo sapiens
tggaagccattcata

SEQ ID NO: 295986 - DNA, 15 bp, Homo sapiens
tttggaagccattca

SEQ ID NO: 295987 - DNA, 15 bp, Homo sapiens
atttggaagccattc

SEQ ID NO: 295988 - DNA, 15 bp, Homo sapiens
aatttggaagccatt

SEQ ID NO: 295989 - DNA, 15 bp, Homo sapiens
taatttggaagccat

SEQ ID NO: 295990 - DNA, 15 bp, Homo sapiens
ttaatttggaagcca

SEQ ID NO: 295991 - DNA, 15 bp, Homo sapiens
tttaatttggaagcc

SEQ ID NO: 295992 - DNA, 15 bp, Homo sapiens
ttttaatttggaagc

SEQ ID NO: 295993 - DNA, 15 bp, Homo sapiens
attttaatttggaag

SEQ ID NO: 295994 - DNA, 15 bp, Homo sapiens
aattttaatttggaa

SEQ ID NO: 295995 - DNA, 15 bp, Homo sapiens
gaattttaatttgga

SEQ ID NO: 295996 - DNA, 15 bp, Homo sapiens
agaattttaatttgg

SEQ ID NO: 295997 - DNA, 15 bp, Homo sapiens
aagaattttaatttg

SEQ ID NO: 295998 - DNA, 15 bp, Homo sapiens
aaagaattttaattt

SEQ ID NO: 295999 - DNA, 15 bp, Homo sapiens
aaaagaattttaatt

SEQ ID NO: 296000 - DNA, 15 bp, Homo sapiens
aaaaagaattttaat

SEQ ID NO: 296001 - DNA, 15 bp, Homo sapiens
aaaaaagaattttaa

SEQ ID NO: 296002 - DNA, 15 bp, Homo sapiens
aaaaaaagaatttta

SEQ ID NO: 296003 - DNA, 15 bp, Homo sapiens
aaaaaaaagaatttt

SEQ ID NO: 296004 - DNA, 15 bp, Homo sapiens
aaaaaaaaagaattt

SEQ ID NO: 296005 - DNA, 15 bp, Homo sapiens
aaaaaaaaaagaatt

SEQ ID NO: 296006 - DNA, 15 bp, Homo sapiens
aaaaaaaaaaagaat

SEQ ID NO: 296007 - DNA, 15 bp, Homo sapiens
gaaaaaaaaaaaaag

SEQ ID NO: 296008 - DNA, 15 bp, Homo sapiens
agaaaaaaaaaaaaa

SEQ ID NO: 296009 - DNA, 15 bp, Homo sapiens
cagaaaaaaaaaaaa

SEQ ID NO: 296010 - DNA, 15 bp, Homo sapiens
tcagaaaaaaaaaaa

SEQ ID NO: 296011 - DNA, 15 bp, Homo sapiens
ctcagaaaaaaaaaa

SEQ ID NO: 296012 - DNA, 15 bp, Homo sapiens
tctcagaaaaaaaaa

SEQ ID NO: 296013 - DNA, 15 bp, Homo sapiens
atctcagaaaaaaaa

SEQ ID NO: 296014 - DNA, 15 bp, Homo sapiens
catctcagaaaaaaa

SEQ ID NO: 296015 - DNA, 15 bp, Homo sapiens
ccatctcagaaaaaa

SEQ ID NO: 296016 - DNA, 15 bp, Homo sapiens
tccatctcagaaaaa

SEQ ID NO: 296017 - DNA, 15 bp, Homo sapiens
ttccatctcagaaaa

SEQ ID NO: 296018 - DNA, 15 bp, Homo sapiens
tttccatctcagaaa

SEQ ID NO: 296019 - DNA, 15 bp, Homo sapiens
gtttccatctcagaa

SEQ ID NO: 296020 - DNA, 15 bp, Homo sapiens
agtttccatctcaga

SEQ ID NO: 296021 - DNA, 15 bp, Homo sapiens
aagtttccatctcag

SEQ ID NO: 296022 - DNA, 15 bp, Homo sapiens
caagtttccatctca

SEQ ID NO: 296023 - DNA, 15 bp, Homo sapiens
gcaagtttccatctc

SEQ ID NO: 296024 - DNA, 15 bp, Homo sapiens
agcaagtttccatct

SEQ ID NO: 296025 - DNA, 15 bp, Homo sapiens
gagcaagtttccatc

SEQ ID NO: 296026 - DNA, 15 bp, Homo sapiens
agagcaagtttccat

SEQ ID NO: 296027 - DNA, 15 bp, Homo sapiens
cagagcaagtttcca

SEQ ID NO: 296028 - DNA, 15 bp, Homo sapiens
acagagcaagtttcc

SEQ ID NO: 296029 - DNA, 15 bp, Homo sapiens
gacagagcaagtttc

SEQ ID NO: 296030 - DNA, 15 bp, Homo sapiens
tgacagagcaagttt

SEQ ID NO: 296031 - DNA, 15 bp, Homo sapiens
gtgacagagcaagtt

SEQ ID NO: 296032 - DNA, 15 bp, Homo sapiens
ggtgacagagcaagt

SEQ ID NO: 296033 - DNA, 15 bp, Homo sapiens
tctgggtgacagagc

SEQ ID NO: 296034 - DNA, 15 bp, Homo sapiens
ctctgggtgacagag

SEQ ID NO: 296035 - DNA, 15 bp, Homo sapiens
gctctgggtgacaga

SEQ ID NO: 296036 - DNA, 15 bp, Homo sapiens
agctctgggtgacag

SEQ ID NO: 296037 - DNA, 15 bp, Homo sapiens
cagctctgggtgaca

SEQ ID NO: 296038 - DNA, 15 bp, Homo sapiens
ccagctctgggtgac

SEQ ID NO: 296039 - DNA, 15 bp, Homo sapiens
tccagctctgggtga

SEQ ID NO: 296040 - DNA, 15 bp, Homo sapiens
ctccagctctgggtg

SEQ ID NO: 296041 - DNA, 15 bp, Homo sapiens
actccagctctgggt

SEQ ID NO: 296042 - DNA, 15 bp, Homo sapiens
cactccagctctggg

SEQ ID NO: 296043 - DNA, 15 bp, Homo sapiens
gcactccagctctgg

SEQ ID NO: 296044 - DNA, 15 bp, Homo sapiens
tgcactccagctctg

SEQ ID NO: 296045 - DNA, 15 bp, Homo sapiens
ttgcactccagctct

SEQ ID NO: 296046 - DNA, 15 bp, Homo sapiens
attgcactccagctc

SEQ ID NO: 296047 - DNA, 15 bp, Homo sapiens
cattgcactccagct

SEQ ID NO: 296048 - DNA, 15 bp, Homo sapiens
atgccattgcactcc

SEQ ID NO: 296049 - DNA, 15 bp, Homo sapiens
catgccattgcactc

SEQ ID NO: 296050 - DNA, 15 bp, Homo sapiens
tcatgccattgcact

SEQ ID NO: 296051 - DNA, 15 bp, Homo sapiens
atcatgccattgcac

SEQ ID NO: 296052 - DNA, 15 bp, Homo sapiens
gatcatgccattgca

SEQ ID NO: 296053 - DNA, 15 bp, Homo sapiens
agatcatgccattgc

SEQ ID NO: 296054 - DNA, 15 bp, Homo sapiens
gagatcatgccattg

SEQ ID NO: 296055 - DNA, 15 bp, Homo sapiens
tgagatcatgccatt

SEQ ID NO: 296056 - DNA, 15 bp, Homo sapiens
ctgagatcatgccat

SEQ ID NO: 296057 - DNA, 15 bp, Homo sapiens
cgctgagatcatgcc

SEQ ID NO: 296058 - DNA, 15 bp, Homo sapiens
gcgctgagatcatgc

SEQ ID NO: 296059 - DNA, 15 bp, Homo sapiens
tgcgctgagatcatg

SEQ ID NO: 296060 - DNA, 15 bp, Homo sapiens
gtgcgctgagatcat

SEQ ID NO: 296061 - DNA, 15 bp, Homo sapiens
agtgcgctgagatca

SEQ ID NO: 296062 - DNA, 15 bp, Homo sapiens
cagtgcgctgagatc

SEQ ID NO: 296063 - DNA, 15 bp, Homo sapiens
gcagtgcgctgagat

SEQ ID NO: 296064 - DNA, 15 bp, Homo sapiens
tgcagtgcgctgaga

SEQ ID NO: 296065 - DNA, 15 bp, Homo sapiens
ttgcagtgcgctgag

SEQ ID NO: 296066 - DNA, 15 bp, Homo sapiens
gttgcagtgcgctga

SEQ ID NO: 296067 - DNA, 15 bp, Homo sapiens
ggttgcagtgcgctg

SEQ ID NO: 296068 - DNA, 15 bp, Homo sapiens
gggttgcagtgcgct

SEQ ID NO: 296069 - DNA, 15 bp, Homo sapiens
ggggttgcagtgcgc

SEQ ID NO: 296070 - DNA, 15 bp, Homo sapiens
aggggttgcagtgcg

SEQ ID NO: 296071 - DNA, 15 bp, Homo sapiens
caggggttgcagtgc

SEQ ID NO: 296072 - DNA, 15 bp, Homo sapiens
gcaggggttgcagtg

SEQ ID NO: 296073 - DNA, 15 bp, Homo sapiens
ggcaggggttgcagt

SEQ ID NO: 296074 - DNA, 15 bp, Homo sapiens
aggcaggggttgcag

SEQ ID NO: 296075 - DNA, 15 bp, Homo sapiens
gaggcaggggttgca

SEQ ID NO: 296076 - DNA, 15 bp, Homo sapiens
ggaggcaggggttgc

SEQ ID NO: 296077 - DNA, 15 bp, Homo sapiens
gggaggcaggggttg

SEQ ID NO: 296078 - DNA, 15 bp, Homo sapiens
cgggaggcaggggtt

SEQ ID NO: 296079 - DNA, 15 bp, Homo sapiens
ccgggaggcaggggt

SEQ ID NO: 296080 - DNA, 15 bp, Homo sapiens
cccgggaggcagggg

SEQ ID NO: 296081 - DNA, 15 bp, Homo sapiens
acccgggaggcaggg

SEQ ID NO: 296082 - DNA, 15 bp, Homo sapiens
aacccgggaggcagg

SEQ ID NO: 296083 - DNA, 15 bp, Homo sapiens
gcttgaacccgggag

SEQ ID NO: 296084 - DNA, 15 bp, Homo sapiens
tgcttgaacccggga

SEQ ID NO: 296085 - DNA, 15 bp, Homo sapiens
ttgcttgaacccggg

SEQ ID NO: 296086 - DNA, 15 bp, Homo sapiens
attgcttgaacccgg

SEQ ID NO: 296087 - DNA, 15 bp, Homo sapiens
aattgcttgaacccg

SEQ ID NO: 296088 - DNA, 15 bp, Homo sapiens
gcacctgtagtccca

SEQ ID NO: 296089 - DNA, 15 bp, Homo sapiens
ggcacctgtagtccc

SEQ ID NO: 296090 - DNA, 15 bp, Homo sapiens
aggcacctgtagtcc

SEQ ID NO: 296091 - DNA, 15 bp, Homo sapiens
caggcacctgtagtc

SEQ ID NO: 296092 - DNA, 15 bp, Homo sapiens
gcaggcacctgtagt

SEQ ID NO: 296093 - DNA, 15 bp, Homo sapiens
ggcaggcacctgtag

SEQ ID NO: 296094 - DNA, 15 bp, Homo sapiens
tggcaggcacctgta

SEQ ID NO: 296095 - DNA, 15 bp, Homo sapiens
gtggcaggcacctgt

SEQ ID NO: 296096 - DNA, 15 bp, Homo sapiens
ggtggcaggcacctg

SEQ ID NO: 296097 - DNA, 15 bp, Homo sapiens
tggtggcaggcacct

SEQ ID NO: 296098 - DNA, 15 bp, Homo sapiens
atggtggcaggcacc

SEQ ID NO: 296099 - DNA, 15 bp, Homo sapiens
catggtggcaggcac

SEQ ID NO: 296100 - DNA, 15 bp, Homo sapiens
gcatggtggcaggca

SEQ ID NO: 296101 - DNA, 15 bp, Homo sapiens
cgggcatggtggcag

SEQ ID NO: 296102 - DNA, 15 bp, Homo sapiens
ccgggcatggtggca

SEQ ID NO: 296103 - DNA, 15 bp, Homo sapiens
accgggcatggtggc

SEQ ID NO: 296104 - DNA, 15 bp, Homo sapiens
aaccgggcatggtgg

SEQ ID NO: 296105 - DNA, 15 bp, Homo sapiens
taaccgggcatggtg

SEQ ID NO: 296106 - DNA, 15 bp, Homo sapiens
ttaaccgggcatggt

SEQ ID NO: 296107 - DNA, 15 bp, Homo sapiens
cttaaccgggcatgg

SEQ ID NO: 296108 - DNA, 15 bp, Homo sapiens
acttaaccgggcatg

SEQ ID NO: 296109 - DNA, 15 bp, Homo sapiens
aacttaaccgggcat

SEQ ID NO: 296110 - DNA, 15 bp, Homo sapiens
aaacttaaccgggca

SEQ ID NO: 296111 - DNA, 15 bp, Homo sapiens
aaaacttaaccgggc

SEQ ID NO: 296112 - DNA, 15 bp, Homo sapiens
aaaaacttaaccggg

SEQ ID NO: 296113 - DNA, 15 bp, Homo sapiens
caaaaacttaaccgg

SEQ ID NO: 296114 - DNA, 15 bp, Homo sapiens
acaaaaacttaaccg

SEQ ID NO: 296115 - DNA, 15 bp, Homo sapiens
tacaaaaacttaacc

SEQ ID NO: 296116 - DNA, 15 bp, Homo sapiens
atacaaaaacttaac

SEQ ID NO: 296117 - DNA, 15 bp, Homo sapiens
aatacaaaaacttaa

SEQ ID NO: 296118 - DNA, 15 bp, Homo sapiens
aaatacaaaaactta

SEQ ID NO: 296119 - DNA, 15 bp, Homo sapiens
aaaatacaaaaactt

SEQ ID NO: 296120 - DNA, 15 bp, Homo sapiens
aaggtcaggagttcg

SEQ ID NO: 296121 - DNA, 15 bp, Homo sapiens
caaggtcaggagttc

SEQ ID NO: 296122 - DNA, 15 bp, Homo sapiens
acaaggtcaggagtt

SEQ ID NO: 296123 - DNA, 15 bp, Homo sapiens
cacaaggtcaggagt

SEQ ID NO: 296124 - DNA, 15 bp, Homo sapiens
agatcacaaggtcag

SEQ ID NO: 296125 - DNA, 15 bp, Homo sapiens
cagatcacaaggtca

SEQ ID NO: 296126 - DNA, 15 bp, Homo sapiens
gcagatcacaaggtc

SEQ ID NO: 296127 - DNA, 15 bp, Homo sapiens
ggcagatcacaaggt

SEQ ID NO: 296128 - DNA, 15 bp, Homo sapiens
aggcagatcacaagg

SEQ ID NO: 296129 - DNA, 15 bp, Homo sapiens
caggcagatcacaag

SEQ ID NO: 296130 - DNA, 15 bp, Homo sapiens
gcaggcagatcacaa

SEQ ID NO: 296131 - DNA, 15 bp, Homo sapiens
ggcaggcagatcaca

SEQ ID NO: 296132 - DNA, 15 bp, Homo sapiens
tgaggcaggcagatc

SEQ ID NO: 296133 - DNA, 15 bp, Homo sapiens
ctgaggcaggcagat

SEQ ID NO: 296134 - DNA, 15 bp, Homo sapiens
gctgaggcaggcaga

SEQ ID NO: 296135 - DNA, 15 bp, Homo sapiens
ggctgaggcaggcag

SEQ ID NO: 296136 - DNA, 15 bp, Homo sapiens
aggctgaggcaggca

SEQ ID NO: 296137 - DNA, 15 bp, Homo sapiens
atgtaatctcagcac

SEQ ID NO: 296138 - DNA, 15 bp, Homo sapiens
catgtaatctcagca

SEQ ID NO: 296139 - DNA, 15 bp, Homo sapiens
acatgtaatctcagc

SEQ ID NO: 296140 - DNA, 15 bp, Homo sapiens
cacatgtaatctcag

SEQ ID NO: 296141 - DNA, 15 bp, Homo sapiens
acacatgtaatctca

SEQ ID NO: 296142 - DNA, 15 bp, Homo sapiens
cacacatgtaatctc

SEQ ID NO: 296143 - DNA, 15 bp, Homo sapiens
tcacacatgtaatct

SEQ ID NO: 296144 - DNA, 15 bp, Homo sapiens
ctcacacatgtaatc

SEQ ID NO: 296145 - DNA, 15 bp, Homo sapiens
gctcacacatgtaat

SEQ ID NO: 296146 - DNA, 15 bp, Homo sapiens
agctcacacatgtaa

SEQ ID NO: 296147 - DNA, 15 bp, Homo sapiens
tagctcacacatgta

SEQ ID NO: 296148 - DNA, 15 bp, Homo sapiens
gtagctcacacatgt

SEQ ID NO: 296149 - DNA, 15 bp, Homo sapiens
ggtagctcacacatg

SEQ ID NO: 296150 - DNA, 15 bp, Homo sapiens
tggtagctcacacat

SEQ ID NO: 296151 - DNA, 15 bp, Homo sapiens
gtggtagctcacaca

SEQ ID NO: 296152 - DNA, 15 bp, Homo sapiens
cgtggtagctcacac

SEQ ID NO: 296153 - DNA, 15 bp, Homo sapiens
gcgtggtagctcaca

SEQ ID NO: 296154 - DNA, 15 bp, Homo sapiens
ggcgtggtagctcac

SEQ ID NO: 296155 - DNA, 15 bp, Homo sapiens
gggcgtggtagctca

SEQ ID NO: 296156 - DNA, 15 bp, Homo sapiens
tgggcgtggtagctc

SEQ ID NO: 296157 - DNA, 15 bp, Homo sapiens
ctgggcgtggtagct

SEQ ID NO: 296158 - DNA, 15 bp, Homo sapiens
gctgggcgtggtagc

SEQ ID NO: 296159 - DNA, 15 bp, Homo sapiens
ggctgggcgtggtag

SEQ ID NO: 296160 - DNA, 15 bp, Homo sapiens
gggctgggcgtggta

SEQ ID NO: 296161 - DNA, 15 bp, Homo sapiens
ggggctgggcgtggt

SEQ ID NO: 296162 - DNA, 15 bp, Homo sapiens
tggggctgggcgtgg

SEQ ID NO: 296163 - DNA, 15 bp, Homo sapiens
ttggggctgggcgtg

SEQ ID NO: 296164 - DNA, 15 bp, Homo sapiens
tttggggctgggcgt

SEQ ID NO: 296165 - DNA, 15 bp, Homo sapiens
atttggggctgggcg

SEQ ID NO: 296166 - DNA, 15 bp, Homo sapiens
aatttggggctgggc

SEQ ID NO: 296167 - DNA, 15 bp, Homo sapiens
taatttggggctggg

SEQ ID NO: 296168 - DNA, 15 bp, Homo sapiens
ttaatttggggctgg

SEQ ID NO: 296169 - DNA, 15 bp, Homo sapiens
tttaatttggggctg

SEQ ID NO: 296170 - DNA, 15 bp, Homo sapiens
ttttaatttggggct

SEQ ID NO: 296171 - DNA, 15 bp, Homo sapiens
attttaatttggggc

SEQ ID NO: 296172 - DNA, 15 bp, Homo sapiens
aattttaatttgggg

SEQ ID NO: 296173 - DNA, 15 bp, Homo sapiens
gaattttaatttggg

SEQ ID NO: 296174 - DNA, 15 bp, Homo sapiens
taaagaattttaatt

SEQ ID NO: 296175 - DNA, 15 bp, Homo sapiens
ataaagaattttaat

SEQ ID NO: 296176 - DNA, 15 bp, Homo sapiens
tataaagaattttaa

SEQ ID NO: 296177 - DNA, 15 bp, Homo sapiens
ctataaagaatttta

SEQ ID NO: 296178 - DNA, 15 bp, Homo sapiens
gctataaagaatttt

SEQ ID NO: 296179 - DNA, 15 bp, Homo sapiens
ggctataaagaattt

SEQ ID NO: 296180 - DNA, 15 bp, Homo sapiens
tggctataaagaatt

SEQ ID NO: 296181 - DNA, 15 bp, Homo sapiens
ttggctataaagaat

SEQ ID NO: 296182 - DNA, 15 bp, Homo sapiens
tttggctataaagaa

SEQ ID NO: 296183 - DNA, 15 bp, Homo sapiens
ctttggctataaaga

SEQ ID NO: 296184 - DNA, 15 bp, Homo sapiens
tctttggctataaag

SEQ ID NO: 296185 - DNA, 15 bp, Homo sapiens
ctctttggctataaa

SEQ ID NO: 296186 - DNA, 15 bp, Homo sapiens
tctctttggctataa

SEQ ID NO: 296187 - DNA, 15 bp, Homo sapiens
ttctctttggctata

SEQ ID NO: 296188 - DNA, 15 bp, Homo sapiens
tttctctttggctat

SEQ ID NO: 296189 - DNA, 15 bp, Homo sapiens
atttctctttggcta

SEQ ID NO: 296190 - DNA, 15 bp, Homo sapiens
catttctctttggct

SEQ ID NO: 296191 - DNA, 15 bp, Homo sapiens
tcatttctctttggc

SEQ ID NO: 296192 - DNA, 15 bp, Homo sapiens
atcatttctctttgg

SEQ ID NO: 296193 - DNA, 15 bp, Homo sapiens
tatcatttctctttg

SEQ ID NO: 296194 - DNA, 15 bp, Homo sapiens
atatcatttctcttt

SEQ ID NO: 296195 - DNA, 15 bp, Homo sapiens
tatatcatttctctt

SEQ ID NO: 296196 - DNA, 15 bp, Homo sapiens
ttatatcatttctct

SEQ ID NO: 296197 - DNA, 15 bp, Homo sapiens
attatatcatttctc

SEQ ID NO: 296198 - DNA, 15 bp, Homo sapiens
cattatatcatttct

SEQ ID NO: 296199 - DNA, 15 bp, Homo sapiens
tcattatatcatttc

SEQ ID NO: 296200 - DNA, 15 bp, Homo sapiens
atcattatatcattt

SEQ ID NO: 296201 - DNA, 15 bp, Homo sapiens
aatcattatatcatt

SEQ ID NO: 296202 - DNA, 15 bp, Homo sapiens
aaatcattatatcat

SEQ ID NO: 296203 - DNA, 15 bp, Homo sapiens
gaaatcattatatca

SEQ ID NO: 296204 - DNA, 15 bp, Homo sapiens
tgaaatcattatatc

SEQ ID NO: 296205 - DNA, 15 bp, Homo sapiens
ttgaaatcattatat

SEQ ID NO: 296206 - DNA, 15 bp, Homo sapiens
attgaaatcattata

SEQ ID NO: 296207 - DNA, 15 bp, Homo sapiens
cattgaaatcattat

SEQ ID NO: 296208 - DNA, 15 bp, Homo sapiens
gcattgaaatcatta

SEQ ID NO: 296209 - DNA, 15 bp, Homo sapiens
tgcattgaaatcatt

SEQ ID NO: 296210 - DNA, 15 bp, Homo sapiens
ctgcattgaaatcat

SEQ ID NO: 296211 - DNA, 15 bp, Homo sapiens
actgcattgaaatca

SEQ ID NO: 296212 - DNA, 15 bp, Homo sapiens
aactgcattgaaatc

SEQ ID NO: 296213 - DNA, 15 bp, Homo sapiens
taactgcattgaaat

SEQ ID NO: 296214 - DNA, 15 bp, Homo sapiens
ttaactgcattgaaa

SEQ ID NO: 296215 - DNA, 15 bp, Homo sapiens
tttaactgcattgaa

SEQ ID NO: 296216 - DNA, 15 bp, Homo sapiens
gtttaactgcattga

SEQ ID NO: 296217 - DNA, 15 bp, Homo sapiens
agtttaactgcattg

SEQ ID NO: 296218 - DNA, 15 bp, Homo sapiens
gagtttaactgcatt

SEQ ID NO: 296219 - DNA, 15 bp, Homo sapiens
agagtttaactgcat

SEQ ID NO: 296220 - DNA, 15 bp, Homo sapiens
cagagtttaactgca

SEQ ID NO: 296221 - DNA, 15 bp, Homo sapiens
gcagagtttaactgc

SEQ ID NO: 296222 - DNA, 15 bp, Homo sapiens
tgcagagtttaactg

SEQ ID NO: 296223 - DNA, 15 bp, Homo sapiens
ctgcagagtttaact

SEQ ID NO: 296224 - DNA, 15 bp, Homo sapiens
actgcagagtttaac

SEQ ID NO: 296225 - DNA, 15 bp, Homo sapiens
tactgcagagtttaa

SEQ ID NO: 296226 - DNA, 15 bp, Homo sapiens
ctactgcagagttta

SEQ ID NO: 296227 - DNA, 15 bp, Homo sapiens
gctactgcagagttt

SEQ ID NO: 296228 - DNA, 15 bp, Homo sapiens
tgctactgcagagtt

SEQ ID NO: 296229 - DNA, 15 bp, Homo sapiens
atgctactgcagagt

SEQ ID NO: 296230 - DNA, 15 bp, Homo sapiens
catgctactgcagag

SEQ ID NO: 296231 - DNA, 15 bp, Homo sapiens
gcatgctactgcaga

SEQ ID NO: 296232 - DNA, 15 bp, Homo sapiens
ggcatgctactgcag

SEQ ID NO: 296233 - DNA, 15 bp, Homo sapiens
gggcatgctactgca

SEQ ID NO: 296234 - DNA, 15 bp, Homo sapiens
ggggcatgctactgc

SEQ ID NO: 296235 - DNA, 15 bp, Homo sapiens
tggggcatgctactg

SEQ ID NO: 296236 - DNA, 15 bp, Homo sapiens
gtggggcatgctact

SEQ ID NO: 296237 - DNA, 15 bp, Homo sapiens
tgtggggcatgctac

SEQ ID NO: 296238 - DNA, 15 bp, Homo sapiens
ttgtggggcatgcta

SEQ ID NO: 296239 - DNA, 15 bp, Homo sapiens
attgtggggcatgct

SEQ ID NO: 296240 - DNA, 15 bp, Homo sapiens
tattgtggggcatgc

SEQ ID NO: 296241 - DNA, 15 bp, Homo sapiens
gtattgtggggcatg

SEQ ID NO: 296242 - DNA, 15 bp, Homo sapiens
tgtattgtggggcat

SEQ ID NO: 296243 - DNA, 15 bp, Homo sapiens
ttgtattgtggggca

SEQ ID NO: 296244 - DNA, 15 bp, Homo sapiens
attgtattgtggggc

SEQ ID NO: 296245 - DNA, 15 bp, Homo sapiens
gattgtattgtgggg

SEQ ID NO: 296246 - DNA, 15 bp, Homo sapiens
tgattgtattgtggg

SEQ ID NO: 296247 - DNA, 15 bp, Homo sapiens
atgattgtattgtgg

SEQ ID NO: 296248 - DNA, 15 bp, Homo sapiens
tatgattgtattgtg

SEQ ID NO: 296249 - DNA, 15 bp, Homo sapiens
ttatgattgtattgt

SEQ ID NO: 296250 - DNA, 15 bp, Homo sapiens
attatgattgtattg

SEQ ID NO: 296251 - DNA, 15 bp, Homo sapiens
tattatgattgtatt

SEQ ID NO: 296252 - DNA, 15 bp, Homo sapiens
atattatgattgtat

SEQ ID NO: 296253 - DNA, 15 bp, Homo sapiens
tatattatgattgta

SEQ ID NO: 296254 - DNA, 15 bp, Homo sapiens
ttatattatgattgt

SEQ ID NO: 296255 - DNA, 15 bp, Homo sapiens
tttatattatgattg

SEQ ID NO: 296256 - DNA, 15 bp, Homo sapiens
ttttatattatgatt

SEQ ID NO: 296257 - DNA, 15 bp, Homo sapiens
attttatattatgat

SEQ ID NO: 296258 - DNA, 15 bp, Homo sapiens
gattttatattatga

SEQ ID NO: 296259 - DNA, 15 bp, Homo sapiens
tgattttatattatg

SEQ ID NO: 296260 - DNA, 15 bp, Homo sapiens
ctgattttatattat

SEQ ID NO: 296261 - DNA, 15 bp, Homo sapiens
tctgattttatatta

SEQ ID NO: 296262 - DNA, 15 bp, Homo sapiens
atctgattttatatt

SEQ ID NO: 296263 - DNA, 15 bp, Homo sapiens
tatctgattttatat

SEQ ID NO: 296264 - DNA, 15 bp, Homo sapiens
atatctgattttata

SEQ ID NO: 296265 - DNA, 15 bp, Homo sapiens
catatctgattttat

SEQ ID NO: 296266 - DNA, 15 bp, Homo sapiens
acatatctgatttta

SEQ ID NO: 296267 - DNA, 15 bp, Homo sapiens
tacatatctgatttt

SEQ ID NO: 296268 - DNA, 15 bp, Homo sapiens
ctacatatctgattt

SEQ ID NO: 296269 - DNA, 15 bp, Homo sapiens
tctacatatctgatt

SEQ ID NO: 296270 - DNA, 15 bp, Homo sapiens
ctctacatatctgat

SEQ ID NO: 296271 - DNA, 15 bp, Homo sapiens
tctctacatatctga

SEQ ID NO: 296272 - DNA, 15 bp, Homo sapiens
ttctctacatatctg

SEQ ID NO: 296273 - DNA, 15 bp, Homo sapiens
attctctacatatct

SEQ ID NO: 296274 - DNA, 15 bp, Homo sapiens
cattctctacatatc

SEQ ID NO: 296275 - DNA, 15 bp, Homo sapiens
ccattctctacatat

SEQ ID NO: 296276 - DNA, 15 bp, Homo sapiens
gccattctctacata

SEQ ID NO: 296277 - DNA, 15 bp, Homo sapiens
tgccattctctacat

SEQ ID NO: 296278 - DNA, 15 bp, Homo sapiens
ttgccattctctaca

SEQ ID NO: 296279 - DNA, 15 bp, Homo sapiens
attgccattctctac

SEQ ID NO: 296280 - DNA, 15 bp, Homo sapiens
gattgccattctcta

SEQ ID NO: 296281 - DNA, 15 bp, Homo sapiens
tgattgccattctct

SEQ ID NO: 296282 - DNA, 15 bp, Homo sapiens
ctgattgccattctc

SEQ ID NO: 296283 - DNA, 15 bp, Homo sapiens
gctgattgccattct

SEQ ID NO: 296284 - DNA, 15 bp, Homo sapiens
agctgattgccattc

SEQ ID NO: 296285 - DNA, 15 bp, Homo sapiens
aagctgattgccatt

SEQ ID NO: 296286 - DNA, 15 bp, Homo sapiens
gaagctgattgccat

SEQ ID NO: 296287 - DNA, 15 bp, Homo sapiens
tgaagctgattgcca

SEQ ID NO: 296288 - DNA, 15 bp, Homo sapiens
ttgaagctgattgcc

SEQ ID NO: 296289 - DNA, 15 bp, Homo sapiens
attgaagctgattgc

SEQ ID NO: 296290 - DNA, 15 bp, Homo sapiens
gattgaagctgattg

SEQ ID NO: 296291 - DNA, 15 bp, Homo sapiens
ggattgaagctgatt

SEQ ID NO: 296292 - DNA, 15 bp, Homo sapiens
aggattgaagctgat

SEQ ID NO: 296293 - DNA, 15 bp, Homo sapiens
gaggattgaagctga

SEQ ID NO: 296294 - DNA, 15 bp, Homo sapiens
agaggattgaagctg

SEQ ID NO: 296295 - DNA, 15 bp, Homo sapiens
cagaggattgaagct

SEQ ID NO: 296296 - DNA, 15 bp, Homo sapiens
gcagaggattgaagc

SEQ ID NO: 296297 - DNA, 15 bp, Homo sapiens
ggcagaggattgaag

SEQ ID NO: 296298 - DNA, 15 bp, Homo sapiens
aggcagaggattgaa

SEQ ID NO: 296299 - DNA, 15 bp, Homo sapiens
caggcagaggattga

SEQ ID NO: 296300 - DNA, 15 bp, Homo sapiens
acaggcagaggattg

SEQ ID NO: 296301 - DNA, 15 bp, Homo sapiens
gacaggcagaggatt

SEQ ID NO: 296302 - DNA, 15 bp, Homo sapiens
agacaggcagaggat

SEQ ID NO: 296303 - DNA, 15 bp, Homo sapiens
gagacaggcagagga

SEQ ID NO: 296304 - DNA, 15 bp, Homo sapiens
tgagacaggcagagg

SEQ ID NO: 296305 - DNA, 15 bp, Homo sapiens
ctgagacaggcagag

SEQ ID NO: 296306 - DNA, 15 bp, Homo sapiens
tctgagacaggcaga

SEQ ID NO: 296307 - DNA, 15 bp, Homo sapiens
atctgagacaggcag

SEQ ID NO: 296308 - DNA, 15 bp, Homo sapiens
tatctgagacaggca

SEQ ID NO: 296309 - DNA, 15 bp, Homo sapiens
ttatctgagacaggc

SEQ ID NO: 296310 - DNA, 15 bp, Homo sapiens
attatctgagacagg

SEQ ID NO: 296311 - DNA, 15 bp, Homo sapiens
tattatctgagacag

SEQ ID NO: 296312 - DNA, 15 bp, Homo sapiens
ttattatctgagaca

SEQ ID NO: 296313 - DNA, 15 bp, Homo sapiens
tttattatctgagac

SEQ ID NO: 296314 - DNA, 15 bp, Homo sapiens
ctttattatctgaga

SEQ ID NO: 296315 - DNA, 15 bp, Homo sapiens
gctttattatctgag

SEQ ID NO: 296316 - DNA, 15 bp, Homo sapiens
agctttattatctga

SEQ ID NO: 296317 - DNA, 15 bp, Homo sapiens
tagctttattatctg

SEQ ID NO: 296318 - DNA, 15 bp, Homo sapiens
ttagctttattatct

SEQ ID NO: 296319 - DNA, 15 bp, Homo sapiens
tttagctttattatc

SEQ ID NO: 296320 - DNA, 15 bp, Homo sapiens
ctttagctttattat

SEQ ID NO: 296321 - DNA, 15 bp, Homo sapiens
actttagctttatta

SEQ ID NO: 296322 - DNA, 15 bp, Homo sapiens
aactttagctttatt

SEQ ID NO: 296323 - DNA, 15 bp, Homo sapiens
gaactttagctttat

SEQ ID NO: 296324 - DNA, 15 bp, Homo sapiens
agaactttagcttta

SEQ ID NO: 296325 - DNA, 15 bp, Homo sapiens
aagaactttagcttt

SEQ ID NO: 296326 - DNA, 15 bp, Homo sapiens
aaagaactttagctt

SEQ ID NO: 296327 - DNA, 15 bp, Homo sapiens
aaaagaactttagct

SEQ ID NO: 296328 - DNA, 15 bp, Homo sapiens
aaaaagaactttagc

SEQ ID NO: 296329 - DNA, 15 bp, Homo sapiens
aaaaaagaactttag

SEQ ID NO: 296330 - DNA, 15 bp, Homo sapiens
gaaaaaagaacttta

SEQ ID NO: 296331 - DNA, 15 bp, Homo sapiens
agaaaaaagaacttt

SEQ ID NO: 296332 - DNA, 15 bp, Homo sapiens
cagaaaaaagaactt

SEQ ID NO: 296333 - DNA, 15 bp, Homo sapiens
ccagaaaaaagaact

SEQ ID NO: 296334 - DNA, 15 bp, Homo sapiens
cccagaaaaaagaac

SEQ ID NO: 296335 - DNA, 15 bp, Homo sapiens
tcccagaaaaaagaa

SEQ ID NO: 296336 - DNA, 15 bp, Homo sapiens
ctcccagaaaaaaga

SEQ ID NO: 296337 - DNA, 15 bp, Homo sapiens
actcccagaaaaaag

SEQ ID NO: 296338 - DNA, 15 bp, Homo sapiens
cactcccagaaaaaa

SEQ ID NO: 296339 - DNA, 15 bp, Homo sapiens
tcactcccagaaaaa

SEQ ID NO: 296340 - DNA, 15 bp, Homo sapiens
ctcactcccagaaaa

SEQ ID NO: 296341 - DNA, 15 bp, Homo sapiens
cctcactcccagaaa

SEQ ID NO: 296342 - DNA, 15 bp, Homo sapiens
gcctcactcccagaa

SEQ ID NO: 296343 - DNA, 15 bp, Homo sapiens
tgcctcactcccaga

SEQ ID NO: 296344 - DNA, 15 bp, Homo sapiens
ttgcctcactcccag

SEQ ID NO: 296345 - DNA, 15 bp, Homo sapiens
gttgcctcactccca

SEQ ID NO: 296346 - DNA, 15 bp, Homo sapiens
ggttgcctcactccc

SEQ ID NO: 296347 - DNA, 15 bp, Homo sapiens
aggttgcctcactcc

SEQ ID NO: 296348 - DNA, 15 bp, Homo sapiens
aaggttgcctcactc

SEQ ID NO: 296349 - DNA, 15 bp, Homo sapiens
caaggttgcctcact

SEQ ID NO: 296350 - DNA, 15 bp, Homo sapiens
gcaaggttgcctcac

SEQ ID NO: 296351 - DNA, 15 bp, Homo sapiens
ggcaaggttgcctca

SEQ ID NO: 296352 - DNA, 15 bp, Homo sapiens
tggcaaggttgcctc

SEQ ID NO: 296353 - DNA, 15 bp, Homo sapiens
atggcaaggttgcct

SEQ ID NO: 296354 - DNA, 15 bp, Homo sapiens
catggcaaggttgcc

SEQ ID NO: 296355 - DNA, 15 bp, Homo sapiens
tcatggcaaggttgc

SEQ ID NO: 296356 - DNA, 15 bp, Homo sapiens
ctcatggcaaggttg

SEQ ID NO: 296357 - DNA, 15 bp, Homo sapiens
tctcatggcaaggtt

SEQ ID NO: 296358 - DNA, 15 bp, Homo sapiens
ttctcatggcaaggt

SEQ ID NO: 296359 - DNA, 15 bp, Homo sapiens
tttctcatggcaagg

SEQ ID NO: 296360 - DNA, 15 bp, Homo sapiens
atttctcatggcaag

SEQ ID NO: 296361 - DNA, 15 bp, Homo sapiens
tatttctcatggcaa

SEQ ID NO: 296362 - DNA, 15 bp, Homo sapiens
ctatttctcatggca

SEQ ID NO: 296363 - DNA, 15 bp, Homo sapiens
tctatttctcatggc

SEQ ID NO: 296364 - DNA, 15 bp, Homo sapiens
ttctatttctcatgg

SEQ ID NO: 296365 - DNA, 15 bp, Homo sapiens
tttctatttctcatg

SEQ ID NO: 296366 - DNA, 15 bp, Homo sapiens
atttctatttctcat

SEQ ID NO: 296367 - DNA, 15 bp, Homo sapiens
catttctatttctca

SEQ ID NO: 296368 - DNA, 15 bp, Homo sapiens
gcatttctatttctc

SEQ ID NO: 296369 - DNA, 15 bp, Homo sapiens
tgcatttctatttct

SEQ ID NO: 296370 - DNA, 15 bp, Homo sapiens
ttgcatttctatttc

SEQ ID NO: 296371 - DNA, 15 bp, Homo sapiens
tttgcatttctattt

SEQ ID NO: 296372 - DNA, 15 bp, Homo sapiens
ctttgcatttctatt

SEQ ID NO: 296373 - DNA, 15 bp, Homo sapiens
cctttgcatttctat

SEQ ID NO: 296374 - DNA, 15 bp, Homo sapiens
acctttgcatttcta

SEQ ID NO: 296375 - DNA, 15 bp, Homo sapiens
cacctttgcatttct

SEQ ID NO: 296376 - DNA, 15 bp, Homo sapiens
ccacctttgcatttc

SEQ ID NO: 296377 - DNA, 15 bp, Homo sapiens
cccacctttgcattt

SEQ ID NO: 296378 - DNA, 15 bp, Homo sapiens
ccccacctttgcatt

SEQ ID NO: 296379 - DNA, 15 bp, Homo sapiens
accccacctttgcat

SEQ ID NO: 296380 - DNA, 15 bp, Homo sapiens
gaccccacctttgca

SEQ ID NO: 296381 - DNA, 15 bp, Homo sapiens
ggaccccacctttgc

SEQ ID NO: 296382 - DNA, 15 bp, Homo sapiens
aggaccccacctttg

SEQ ID NO: 296383 - DNA, 15 bp, Homo sapiens
gaggaccccaccttt

SEQ ID NO: 296384 - DNA, 15 bp, Homo sapiens
agaggaccccacctt

SEQ ID NO: 296385 - DNA, 15 bp, Homo sapiens
aagaggaccccacct

SEQ ID NO: 296386 - DNA, 15 bp, Homo sapiens
caagaggaccccacc

SEQ ID NO: 296387 - DNA, 15 bp, Homo sapiens
ccaagaggaccccac

SEQ ID NO: 296388 - DNA, 15 bp, Homo sapiens
gccaagaggacccca

SEQ ID NO: 296389 - DNA, 15 bp, Homo sapiens
ggccaagaggacccc

SEQ ID NO: 296390 - DNA, 15 bp, Homo sapiens
aggccaagaggaccc

SEQ ID NO: 296391 - DNA, 15 bp, Homo sapiens
caggccaagaggacc

SEQ ID NO: 296392 - DNA, 15 bp, Homo sapiens
gcaggccaagaggac

SEQ ID NO: 296393 - DNA, 15 bp, Homo sapiens
cgcaggccaagagga

SEQ ID NO: 296394 - DNA, 15 bp, Homo sapiens
acgcaggccaagagg

SEQ ID NO: 296395 - DNA, 15 bp, Homo sapiens
aacgcaggccaagag

SEQ ID NO: 296396 - DNA, 15 bp, Homo sapiens
gaacgcaggccaaga

SEQ ID NO: 296397 - DNA, 15 bp, Homo sapiens
agaacgcaggccaag

SEQ ID NO: 296398 - DNA, 15 bp, Homo sapiens
cagaacgcaggccaa

SEQ ID NO: 296399 - DNA, 15 bp, Homo sapiens
acagaacgcaggcca

SEQ ID NO: 296400 - DNA, 15 bp, Homo sapiens
aacagaacgcaggcc

SEQ ID NO: 296401 - DNA, 15 bp, Homo sapiens
caacagaacgcaggc

SEQ ID NO: 296402 - DNA, 15 bp, Homo sapiens
ccaacagaacgcagg

SEQ ID NO: 296403 - DNA, 15 bp, Homo sapiens
gccaacagaacgcag

SEQ ID NO: 296404 - DNA, 15 bp, Homo sapiens
ggccaacagaacgca

SEQ ID NO: 296405 - DNA, 15 bp, Homo sapiens
aggccaacagaacgc

SEQ ID NO: 296406 - DNA, 15 bp, Homo sapiens
caggccaacagaacg

SEQ ID NO: 296407 - DNA, 15 bp, Homo sapiens
acaggccaacagaac

SEQ ID NO: 296408 - DNA, 15 bp, Homo sapiens
aacaggccaacagaa

SEQ ID NO: 296409 - DNA, 15 bp, Homo sapiens
gaacaggccaacaga

SEQ ID NO: 296410 - DNA, 15 bp, Homo sapiens
agaacaggccaacag

SEQ ID NO: 296411 - DNA, 15 bp, Homo sapiens
gagaacaggccaaca

SEQ ID NO: 296412 - DNA, 15 bp, Homo sapiens
agagaacaggccaac

SEQ ID NO: 296413 - DNA, 15 bp, Homo sapiens
cagagaacaggccaa

SEQ ID NO: 296414 - DNA, 15 bp, Homo sapiens
ccagagaacaggcca

SEQ ID NO: 296415 - DNA, 15 bp, Homo sapiens
tccagagaacaggcc

SEQ ID NO: 296416 - DNA, 15 bp, Homo sapiens
ttccagagaacaggc

SEQ ID NO: 296417 - DNA, 15 bp, Homo sapiens
attccagagaacagg

SEQ ID NO: 296418 - DNA, 15 bp, Homo sapiens
gattccagagaacag

SEQ ID NO: 296419 - DNA, 15 bp, Homo sapiens
tgattccagagaaca

SEQ ID NO: 296420 - DNA, 15 bp, Homo sapiens
ctgattccagagaac

SEQ ID NO: 296421 - DNA, 15 bp, Homo sapiens
cctgattccagagaa

SEQ ID NO: 296422 - DNA, 15 bp, Homo sapiens
tcctgattccagaga

SEQ ID NO: 296423 - DNA, 15 bp, Homo sapiens
ttcctgattccagag

SEQ ID NO: 296424 - DNA, 15 bp, Homo sapiens
attcctgattccaga

SEQ ID NO: 296425 - DNA, 15 bp, Homo sapiens
gattcctgattccag

SEQ ID NO: 296426 - DNA, 15 bp, Homo sapiens
agattcctgattcca

SEQ ID NO: 296427 - DNA, 15 bp, Homo sapiens
tagattcctgattcc

SEQ ID NO: 296428 - DNA, 15 bp, Homo sapiens
ctagattcctgattc

SEQ ID NO: 296429 - DNA, 15 bp, Homo sapiens
gctagattcctgatt

SEQ ID NO: 296430 - DNA, 15 bp, Homo sapiens
ggctagattcctgat

SEQ ID NO: 296431 - DNA, 15 bp, Homo sapiens
gggctagattcctga

SEQ ID NO: 296432 - DNA, 15 bp, Homo sapiens
tgggctagattcctg

SEQ ID NO: 296433 - DNA, 15 bp, Homo sapiens
atgggctagattcct

SEQ ID NO: 296434 - DNA, 15 bp, Homo sapiens
tatgggctagattcc

SEQ ID NO: 296435 - DNA, 15 bp, Homo sapiens
gtatgggctagattc

SEQ ID NO: 296436 - DNA, 15 bp, Homo sapiens
tgtatgggctagatt

SEQ ID NO: 296437 - DNA, 15 bp, Homo sapiens
ttgtatgggctagat

SEQ ID NO: 296438 - DNA, 15 bp, Homo sapiens
gttgtatgggctaga

SEQ ID NO: 296439 - DNA, 15 bp, Homo sapiens
tgttgtatgggctag

SEQ ID NO: 296440 - DNA, 15 bp, Homo sapiens
ctgttgtatgggcta

SEQ ID NO: 296441 - DNA, 15 bp, Homo sapiens
cctgttgtatgggct

SEQ ID NO: 296442 - DNA, 15 bp, Homo sapiens
tcctgttgtatgggc

SEQ ID NO: 296443 - DNA, 15 bp, Homo sapiens
ctcctgttgtatggg

SEQ ID NO: 296444 - DNA, 15 bp, Homo sapiens
gctcctgttgtatgg

SEQ ID NO: 296445 - DNA, 15 bp, Homo sapiens
tgctcctgttgtatg

SEQ ID NO: 296446 - DNA, 15 bp, Homo sapiens
ctgctcctgttgtat

SEQ ID NO: 296447 - DNA, 15 bp, Homo sapiens
tctgctcctgttgta

SEQ ID NO: 296448 - DNA, 15 bp, Homo sapiens
atctgctcctgttgt

SEQ ID NO: 296449 - DNA, 15 bp, Homo sapiens
aatctgctcctgttg

SEQ ID NO: 296450 - DNA, 15 bp, Homo sapiens
taatctgctcctgtt

SEQ ID NO: 296451 - DNA, 15 bp, Homo sapiens
ttaatctgctcctgt

SEQ ID NO: 296452 - DNA, 15 bp, Homo sapiens
attaatctgctcctg

SEQ ID NO: 296453 - DNA, 15 bp, Homo sapiens
gattaatctgctcct

SEQ ID NO: 296454 - DNA, 15 bp, Homo sapiens
cgattaatctgctcc

SEQ ID NO: 296455 - DNA, 15 bp, Homo sapiens
tcgattaatctgctc

SEQ ID NO: 296456 - DNA, 15 bp, Homo sapiens
gtcgattaatctgct

SEQ ID NO: 296457 - DNA, 15 bp, Homo sapiens
agtcgattaatctgc

SEQ ID NO: 296458 - DNA, 15 bp, Homo sapiens
aagtcgattaatctg

SEQ ID NO: 296459 - DNA, 15 bp, Homo sapiens
gaagtcgattaatct

SEQ ID NO: 296460 - DNA, 15 bp, Homo sapiens
tgaagtcgattaatc

SEQ ID NO: 296461 - DNA, 15 bp, Homo sapiens
ctgaagtcgattaat

SEQ ID NO: 296462 - DNA, 15 bp, Homo sapiens
cctgaagtcgattaa

SEQ ID NO: 296463 - DNA, 15 bp, Homo sapiens
tcctgaagtcgatta

SEQ ID NO: 296464 - DNA, 15 bp, Homo sapiens
atcctgaagtcgatt

SEQ ID NO: 296465 - DNA, 15 bp, Homo sapiens
catcctgaagtcgat

SEQ ID NO: 296466 - DNA, 15 bp, Homo sapiens
acatcctgaagtcga

SEQ ID NO: 296467 - DNA, 15 bp, Homo sapiens
aacatcctgaagtcg

SEQ ID NO: 296468 - DNA, 15 bp, Homo sapiens
aaacatcctgaagtc

SEQ ID NO: 296469 - DNA, 15 bp, Homo sapiens
aaaacatcctgaagt

SEQ ID NO: 296470 - DNA, 15 bp, Homo sapiens
aaaaacatcctgaag

SEQ ID NO: 296471 - DNA, 15 bp, Homo sapiens
caaaaacatcctgaa

SEQ ID NO: 296472 - DNA, 15 bp, Homo sapiens
tcaaaaacatcctga

SEQ ID NO: 296473 - DNA, 15 bp, Homo sapiens
ttcaaaaacatcctg

SEQ ID NO: 296474 - DNA, 15 bp, Homo sapiens
cttcaaaaacatcct

SEQ ID NO: 296475 - DNA, 15 bp, Homo sapiens
acttcaaaaacatcc

SEQ ID NO: 296476 - DNA, 15 bp, Homo sapiens
gacttcaaaaacatc

SEQ ID NO: 296477 - DNA, 15 bp, Homo sapiens
tgacttcaaaaacat

SEQ ID NO: 296478 - DNA, 15 bp, Homo sapiens
atgacttcaaaaaca

SEQ ID NO: 296479 - DNA, 15 bp, Homo sapiens
aatgacttcaaaaac

SEQ ID NO: 296480 - DNA, 15 bp, Homo sapiens
caatgacttcaaaaa

SEQ ID NO: 296481 - DNA, 15 bp, Homo sapiens
tcaatgacttcaaaa

SEQ ID NO: 296482 - DNA, 15 bp, Homo sapiens
atcaatgacttcaaa

SEQ ID NO: 296483 - DNA, 15 bp, Homo sapiens
catcaatgacttcaa

SEQ ID NO: 296484 - DNA, 15 bp, Homo sapiens
gcatcaatgacttca

SEQ ID NO: 296485 - DNA, 15 bp, Homo sapiens
agcatcaatgacttc

SEQ ID NO: 296486 - DNA, 15 bp, Homo sapiens
cagcatcaatgactt

SEQ ID NO: 296487 - DNA, 15 bp, Homo sapiens
acagcatcaatgact

SEQ ID NO: 296488 - DNA, 15 bp, Homo sapiens
aacagcatcaatgac

SEQ ID NO: 296489 - DNA, 15 bp, Homo sapiens
gaacagcatcaatga

SEQ ID NO: 296490 - DNA, 15 bp, Homo sapiens
agaacagcatcaatg

SEQ ID NO: 296491 - DNA, 15 bp, Homo sapiens
cagaacagcatcaat

SEQ ID NO: 296492 - DNA, 15 bp, Homo sapiens
ccagaacagcatcaa

SEQ ID NO: 296493 - DNA, 15 bp, Homo sapiens
tccagaacagcatca

SEQ ID NO: 296494 - DNA, 15 bp, Homo sapiens
ttccagaacagcatc

SEQ ID NO: 296495 - DNA, 15 bp, Homo sapiens
cttccagaacagcat

SEQ ID NO: 296496 - DNA, 15 bp, Homo sapiens
acttccagaacagca

SEQ ID NO: 296497 - DNA, 15 bp, Homo sapiens
gacttccagaacagc

SEQ ID NO: 296498 - DNA, 15 bp, Homo sapiens
ggacttccagaacag

SEQ ID NO: 296499 - DNA, 15 bp, Homo sapiens
gggacttccagaaca

SEQ ID NO: 296500 - DNA, 15 bp, Homo sapiens
tgggacttccagaac

SEQ ID NO: 296501 - DNA, 15 bp, Homo sapiens
ttgggacttccagaa

SEQ ID NO: 296502 - DNA, 15 bp, Homo sapiens
gttgggacttccaga

SEQ ID NO: 296503 - DNA, 15 bp, Homo sapiens
tgttgggacttccag

SEQ ID NO: 296504 - DNA, 15 bp, Homo sapiens
ctgttgggacttcca

SEQ ID NO: 296505 - DNA, 15 bp, Homo sapiens
gctgttgggacttcc

SEQ ID NO: 296506 - DNA, 15 bp, Homo sapiens
ggctgttgggacttc

SEQ ID NO: 296507 - DNA, 15 bp, Homo sapiens
tggctgttgggactt

SEQ ID NO: 296508 - DNA, 15 bp, Homo sapiens
ttggctgttgggact

SEQ ID NO: 296509 - DNA, 15 bp, Homo sapiens
tttggctgttgggac

SEQ ID NO: 296510 - DNA, 15 bp, Homo sapiens
ctttggctgttggga

SEQ ID NO: 296511 - DNA, 15 bp, Homo sapiens
cctttggctgttggg

SEQ ID NO: 296512 - DNA, 15 bp, Homo sapiens
tcctttggctgttgg

SEQ ID NO: 296513 - DNA, 15 bp, Homo sapiens
atcctttggctgttg

SEQ ID NO: 296514 - DNA, 15 bp, Homo sapiens
gatcctttggctgtt

SEQ ID NO: 296515 - DNA, 15 bp, Homo sapiens
agatcctttggctgt

SEQ ID NO: 296516 - DNA, 15 bp, Homo sapiens
tagatcctttggctg

SEQ ID NO: 296517 - DNA, 15 bp, Homo sapiens
ctagatcctttggct

SEQ ID NO: 296518 - DNA, 15 bp, Homo sapiens
tctagatcctttggc

SEQ ID NO: 296519 - DNA, 15 bp, Homo sapiens
ttctagatcctttgg

SEQ ID NO: 296520 - DNA, 15 bp, Homo sapiens
cttctagatcctttg

SEQ ID NO: 296521 - DNA, 15 bp, Homo sapiens
gcttctagatccttt

SEQ ID NO: 296522 - DNA, 15 bp, Homo sapiens
ggcttctagatcctt

SEQ ID NO: 296523 - DNA, 15 bp, Homo sapiens
aggcttctagatcct

SEQ ID NO: 296524 - DNA, 15 bp, Homo sapiens
gaggcttctagatcc

SEQ ID NO: 296525 - DNA, 15 bp, Homo sapiens
agaggcttctagatc

SEQ ID NO: 296526 - DNA, 15 bp, Homo sapiens
tagaggcttctagat

SEQ ID NO: 296527 - DNA, 15 bp, Homo sapiens
ttagaggcttctaga

SEQ ID NO: 296528 - DNA, 15 bp, Homo sapiens
attagaggcttctag

SEQ ID NO: 296529 - DNA, 15 bp, Homo sapiens
aattagaggcttcta

SEQ ID NO: 296530 - DNA, 15 bp, Homo sapiens
caattagaggcttct

SEQ ID NO: 296531 - DNA, 15 bp, Homo sapiens
tcaattagaggcttc

SEQ ID NO: 296532 - DNA, 15 bp, Homo sapiens
atcaattagaggctt

SEQ ID NO: 296533 - DNA, 15 bp, Homo sapiens
tatcaattagaggct

SEQ ID NO: 296534 - DNA, 15 bp, Homo sapiens
atatcaattagaggc

SEQ ID NO: 296535 - DNA, 15 bp, Homo sapiens
aatatcaattagagg

SEQ ID NO: 296536 - DNA, 15 bp, Homo sapiens
aaatatcaattagag

SEQ ID NO: 296537 - DNA, 15 bp, Homo sapiens
taaatatcaattaga

SEQ ID NO: 296538 - DNA, 15 bp, Homo sapiens
gtaaatatcaattag

SEQ ID NO: 296539 - DNA, 15 bp, Homo sapiens
ggtaaatatcaatta

SEQ ID NO: 296540 - DNA, 15 bp, Homo sapiens
gggtaaatatcaatt

SEQ ID NO: 296541 - DNA, 15 bp, Homo sapiens
ggggtaaatatcaat

SEQ ID NO: 296542 - DNA, 15 bp, Homo sapiens
tggggtaaatatcaa

SEQ ID NO: 296543 - DNA, 15 bp, Homo sapiens
ctggggtaaatatca

SEQ ID NO: 296544 - DNA, 15 bp, Homo sapiens
tctggggtaaatatc

SEQ ID NO: 296545 - DNA, 15 bp, Homo sapiens
ctctggggtaaatat

SEQ ID NO: 296546 - DNA, 15 bp, Homo sapiens
gctctggggtaaata

SEQ ID NO: 296547 - DNA, 15 bp, Homo sapiens
tgctctggggtaaat

SEQ ID NO: 296548 - DNA, 15 bp, Homo sapiens
ctgctctggggtaaa

SEQ ID NO: 296549 - DNA, 15 bp, Homo sapiens
gctgctctggggtaa

SEQ ID NO: 296550 - DNA, 15 bp, Homo sapiens
cgctgctctggggta

SEQ ID NO: 296551 - DNA, 15 bp, Homo sapiens
tcgctgctctggggt

SEQ ID NO: 296552 - DNA, 15 bp, Homo sapiens
ttcgctgctctgggg

SEQ ID NO: 296553 - DNA, 15 bp, Homo sapiens
gttcgctgctctggg

SEQ ID NO: 296554 - DNA, 15 bp, Homo sapiens
agttcgctgctctgg

SEQ ID NO: 296555 - DNA, 15 bp, Homo sapiens
cagttcgctgctctg

SEQ ID NO: 296556 - DNA, 15 bp, Homo sapiens
tcagttcgctgctct

SEQ ID NO: 296557 - DNA, 15 bp, Homo sapiens
gtcagttcgctgctc

SEQ ID NO: 296558 - DNA, 15 bp, Homo sapiens
ggtcagttcgctgct

SEQ ID NO: 296559 - DNA, 15 bp, Homo sapiens
gggtcagttcgctgc

SEQ ID NO: 296560 - DNA, 15 bp, Homo sapiens
tgggtcagttcgctg

SEQ ID NO: 296561 - DNA, 15 bp, Homo sapiens
ctgggtcagttcgct

SEQ ID NO: 296562 - DNA, 15 bp, Homo sapiens
cctgggtcagttcgc

SEQ ID NO: 296563 - DNA, 15 bp, Homo sapiens
acctgggtcagttcg

SEQ ID NO: 296564 - DNA, 15 bp, Homo sapiens
tacctgggtcagttc

SEQ ID NO: 296565 - DNA, 15 bp, Homo sapiens
ctacctgggtcagtt

SEQ ID NO: 296566 - DNA, 15 bp, Homo sapiens
tctacctgggtcagt

SEQ ID NO: 296567 - DNA, 15 bp, Homo sapiens
ttctacctgggtcag

SEQ ID NO: 296568 - DNA, 15 bp, Homo sapiens
gttctacctgggtca

SEQ ID NO: 296569 - DNA, 15 bp, Homo sapiens
ggttctacctgggtc

SEQ ID NO: 296570 - DNA, 15 bp, Homo sapiens
aggttctacctgggt

SEQ ID NO: 296571 - DNA, 15 bp, Homo sapiens
caggttctacctggg

SEQ ID NO: 296572 - DNA, 15 bp, Homo sapiens
tcaggttctacctgg

SEQ ID NO: 296573 - DNA, 15 bp, Homo sapiens
ttcaggttctacctg

SEQ ID NO: 296574 - DNA, 15 bp, Homo sapiens
tttcaggttctacct

SEQ ID NO: 296575 - DNA, 15 bp, Homo sapiens
ttttcaggttctacc

SEQ ID NO: 296576 - DNA, 15 bp, Homo sapiens
attttcaggttctac

SEQ ID NO: 296577 - DNA, 15 bp, Homo sapiens
tattttcaggttcta

SEQ ID NO: 296578 - DNA, 15 bp, Homo sapiens
atattttcaggttct

SEQ ID NO: 296579 - DNA, 15 bp, Homo sapiens
aatattttcaggttc

SEQ ID NO: 296580 - DNA, 15 bp, Homo sapiens
caatattttcaggtt

SEQ ID NO: 296581 - DNA, 15 bp, Homo sapiens
ccaatattttcaggt

SEQ ID NO: 296582 - DNA, 15 bp, Homo sapiens
cccaatattttcagg

SEQ ID NO: 296583 - DNA, 15 bp, Homo sapiens
tcccaatattttcag

SEQ ID NO: 296584 - DNA, 15 bp, Homo sapiens
atcccaatattttca

SEQ ID NO: 296585 - DNA, 15 bp, Homo sapiens
gatcccaatattttc

SEQ ID NO: 296586 - DNA, 15 bp, Homo sapiens
agatcccaatatttt

SEQ ID NO: 296587 - DNA, 15 bp, Homo sapiens
aagatcccaatattt

SEQ ID NO: 296588 - DNA, 15 bp, Homo sapiens
caagatcccaatatt

SEQ ID NO: 296589 - DNA, 15 bp, Homo sapiens
gcaagatcccaatat

SEQ ID NO: 296590 - DNA, 15 bp, Homo sapiens
tgcaagatcccaata

SEQ ID NO: 296591 - DNA, 15 bp, Homo sapiens
ctgcaagatcccaat

SEQ ID NO: 296592 - DNA, 15 bp, Homo sapiens
tctgcaagatcccaa

SEQ ID NO: 296593 - DNA, 15 bp, Homo sapiens
ttctgcaagatccca

SEQ ID NO: 296594 - DNA, 15 bp, Homo sapiens
cttctgcaagatccc

SEQ ID NO: 296595 - DNA, 15 bp, Homo sapiens
ccttctgcaagatcc

SEQ ID NO: 296596 - DNA, 15 bp, Homo sapiens
tccttctgcaagatc

SEQ ID NO: 296597 - DNA, 15 bp, Homo sapiens
gtccttctgcaagat

SEQ ID NO: 296598 - DNA, 15 bp, Homo sapiens
agtccttctgcaaga

SEQ ID NO: 296599 - DNA, 15 bp, Homo sapiens
cagtccttctgcaag

SEQ ID NO: 296600 - DNA, 15 bp, Homo sapiens
gcagtccttctgcaa

SEQ ID NO: 296601 - DNA, 15 bp, Homo sapiens
tgcagtccttctgca

SEQ ID NO: 296602 - DNA, 15 bp, Homo sapiens
ctgcagtccttctgc

SEQ ID NO: 296603 - DNA, 15 bp, Homo sapiens
tctgcagtccttctg

SEQ ID NO: 296604 - DNA, 15 bp, Homo sapiens
gtctgcagtccttct

SEQ ID NO: 296605 - DNA, 15 bp, Homo sapiens
tgtctgcagtccttc

SEQ ID NO: 296606 - DNA, 15 bp, Homo sapiens
atgtctgcagtcctt

SEQ ID NO: 296607 - DNA, 15 bp, Homo sapiens
gatgtctgcagtcct

SEQ ID NO: 296608 - DNA, 15 bp, Homo sapiens
agatgtctgcagtcc

SEQ ID NO: 296609 - DNA, 15 bp, Homo sapiens
cagatgtctgcagtc

SEQ ID NO: 296610 - DNA, 15 bp, Homo sapiens
ccagatgtctgcagt

SEQ ID NO: 296611 - DNA, 15 bp, Homo sapiens
gccagatgtctgcag

SEQ ID NO: 296612 - DNA, 15 bp, Homo sapiens
agccagatgtctgca

SEQ ID NO: 296613 - DNA, 15 bp, Homo sapiens
tagccagatgtctgc

SEQ ID NO: 296614 - DNA, 15 bp, Homo sapiens
atagccagatgtctg

SEQ ID NO: 296615 - DNA, 15 bp, Homo sapiens
catagccagatgtct

SEQ ID NO: 296616 - DNA, 15 bp, Homo sapiens
gcatagccagatgtc

SEQ ID NO: 296617 - DNA, 15 bp, Homo sapiens
cgcatagccagatgt

SEQ ID NO: 296618 - DNA, 15 bp, Homo sapiens
ccgcatagccagatg

SEQ ID NO: 296619 - DNA, 15 bp, Homo sapiens
cccgcatagccagat

SEQ ID NO: 296620 - DNA, 15 bp, Homo sapiens
gcccgcatagccaga

SEQ ID NO: 296621 - DNA, 15 bp, Homo sapiens
agcccgcatagccag

SEQ ID NO: 296622 - DNA, 15 bp, Homo sapiens
aagcccgcatagcca

SEQ ID NO: 296623 - DNA, 15 bp, Homo sapiens
gaagcccgcatagcc

SEQ ID NO: 296624 - DNA, 15 bp, Homo sapiens
ggaagcccgcatagc

SEQ ID NO: 296625 - DNA, 15 bp, Homo sapiens
aggaagcccgcatag

SEQ ID NO: 296626 - DNA, 15 bp, Homo sapiens
caggaagcccgcata

SEQ ID NO: 296627 - DNA, 15 bp, Homo sapiens
tcaggaagcccgcat

SEQ ID NO: 296628 - DNA, 15 bp, Homo sapiens
ctcaggaagcccgca

SEQ ID NO: 296629 - DNA, 15 bp, Homo sapiens
cctcaggaagcccgc

SEQ ID NO: 296630 - DNA, 15 bp, Homo sapiens
acctcaggaagcccg

SEQ ID NO: 296631 - DNA, 15 bp, Homo sapiens
gacctcaggaagccc

SEQ ID NO: 296632 - DNA, 15 bp, Homo sapiens
tgacctcaggaagcc

SEQ ID NO: 296633 - DNA, 15 bp, Homo sapiens
atgacctcaggaagc

SEQ ID NO: 296634 - DNA, 15 bp, Homo sapiens
aatgacctcaggaag

SEQ ID NO: 296635 - DNA, 15 bp, Homo sapiens
aaatgacctcaggaa

SEQ ID NO: 296636 - DNA, 15 bp, Homo sapiens
gaaatgacctcagga

SEQ ID NO: 296637 - DNA, 15 bp, Homo sapiens
tgaaatgacctcagg

SEQ ID NO: 296638 - DNA, 15 bp, Homo sapiens
ctgaaatgacctcag

SEQ ID NO: 296639 - DNA, 15 bp, Homo sapiens
actgaaatgacctca

SEQ ID NO: 296640 - DNA, 15 bp, Homo sapiens
cactgaaatgacctc

SEQ ID NO: 296641 - DNA, 15 bp, Homo sapiens
gcactgaaatgacct

SEQ ID NO: 296642 - DNA, 15 bp, Homo sapiens
ggcactgaaatgacc

SEQ ID NO: 296643 - DNA, 15 bp, Homo sapiens
gggcactgaaatgac

SEQ ID NO: 296644 - DNA, 15 bp, Homo sapiens
agggcactgaaatga

SEQ ID NO: 296645 - DNA, 15 bp, Homo sapiens
aagggcactgaaatg

SEQ ID NO: 296646 - DNA, 15 bp, Homo sapiens
taagggcactgaaat

SEQ ID NO: 296647 - DNA, 15 bp, Homo sapiens
gtaagggcactgaaa

SEQ ID NO: 296648 - DNA, 15 bp, Homo sapiens
agtaagggcactgaa

SEQ ID NO: 296649 - DNA, 15 bp, Homo sapiens
cagtaagggcactga

SEQ ID NO: 296650 - DNA, 15 bp, Homo sapiens
acagtaagggcactg

SEQ ID NO: 296651 - DNA, 15 bp, Homo sapiens
cacagtaagggcact

SEQ ID NO: 296652 - DNA, 15 bp, Homo sapiens
ccacagtaagggcac

SEQ ID NO: 296653 - DNA, 15 bp, Homo sapiens
accacagtaagggca

SEQ ID NO: 296654 - DNA, 15 bp, Homo sapiens
caccacagtaagggc

SEQ ID NO: 296655 - DNA, 15 bp, Homo sapiens
gcaccacagtaaggg

SEQ ID NO: 296656 - DNA, 15 bp, Homo sapiens
tgcaccacagtaagg

SEQ ID NO: 296657 - DNA, 15 bp, Homo sapiens
ttgcaccacagtaag

SEQ ID NO: 296658 - DNA, 15 bp, Homo sapiens
gttgcaccacagtaa

SEQ ID NO: 296659 - DNA, 15 bp, Homo sapiens
agttgcaccacagta

SEQ ID NO: 296660 - DNA, 15 bp, Homo sapiens
aagttgcaccacagt

SEQ ID NO: 296661 - DNA, 15 bp, Homo sapiens
gaagttgcaccacag

SEQ ID NO: 296662 - DNA, 15 bp, Homo sapiens
tgaagttgcaccaca

SEQ ID NO: 296663 - DNA, 15 bp, Homo sapiens
gtgaagttgcaccac

SEQ ID NO: 296664 - DNA, 15 bp, Homo sapiens
tgtgaagttgcacca

SEQ ID NO: 296665 - DNA, 15 bp, Homo sapiens
atgtgaagttgcacc

SEQ ID NO: 296666 - DNA, 15 bp, Homo sapiens
aatgtgaagttgcac

SEQ ID NO: 296667 - DNA, 15 bp, Homo sapiens
caatgtgaagttgca

SEQ ID NO: 296668 - DNA, 15 bp, Homo sapiens
acaatgtgaagttgc

SEQ ID NO: 296669 - DNA, 15 bp, Homo sapiens
tacaatgtgaagttg

SEQ ID NO: 296670 - DNA, 15 bp, Homo sapiens
gtacaatgtgaagtt

SEQ ID NO: 296671 - DNA, 15 bp, Homo sapiens
tgtacaatgtgaagt

SEQ ID NO: 296672 - DNA, 15 bp, Homo sapiens
atgtacaatgtgaag

SEQ ID NO: 296673 - DNA, 15 bp, Homo sapiens
catgtacaatgtgaa

SEQ ID NO: 296674 - DNA, 15 bp, Homo sapiens
tcatgtacaatgtga

SEQ ID NO: 296675 - DNA, 15 bp, Homo sapiens
atcatgtacaatgtg

SEQ ID NO: 296676 - DNA, 15 bp, Homo sapiens
aatcatgtacaatgt

SEQ ID NO: 296677 - DNA, 15 bp, Homo sapiens
caatcatgtacaatg

SEQ ID NO: 296678 - DNA, 15 bp, Homo sapiens
tcaatcatgtacaat

SEQ ID NO: 296679 - DNA, 15 bp, Homo sapiens
ttcaatcatgtacaa

SEQ ID NO: 296680 - DNA, 15 bp, Homo sapiens
tttcaatcatgtaca

SEQ ID NO: 296681 - DNA, 15 bp, Homo sapiens
atttcaatcatgtac

SEQ ID NO: 296682 - DNA, 15 bp, Homo sapiens
catttcaatcatgta

SEQ ID NO: 296683 - DNA, 15 bp, Homo sapiens
acatttcaatcatgt

SEQ ID NO: 296684 - DNA, 15 bp, Homo sapiens
aacatttcaatcatg

SEQ ID NO: 296685 - DNA, 15 bp, Homo sapiens
aaacatttcaatcat

SEQ ID NO: 296686 - DNA, 15 bp, Homo sapiens
taaacatttcaatca

SEQ ID NO: 296687 - DNA, 15 bp, Homo sapiens
ctaaacatttcaatc

SEQ ID NO: 296688 - DNA, 15 bp, Homo sapiens
cctaaacatttcaat

SEQ ID NO: 296689 - DNA, 15 bp, Homo sapiens
gcctaaacatttcaa

SEQ ID NO: 296690 - DNA, 15 bp, Homo sapiens
agcctaaacatttca

SEQ ID NO: 296691 - DNA, 15 bp, Homo sapiens
aagcctaaacatttc

SEQ ID NO: 296692 - DNA, 15 bp, Homo sapiens
aaagcctaaacattt

SEQ ID NO: 296693 - DNA, 15 bp, Homo sapiens
caaagcctaaacatt

SEQ ID NO: 296694 - DNA, 15 bp, Homo sapiens
gcaaagcctaaacat

SEQ ID NO: 296695 - DNA, 15 bp, Homo sapiens
agcaaagcctaaaca

SEQ ID NO: 296696 - DNA, 15 bp, Homo sapiens
aagcaaagcctaaac

SEQ ID NO: 296697 - DNA, 15 bp, Homo sapiens
taagcaaagcctaaa

SEQ ID NO: 296698 - DNA, 15 bp, Homo sapiens
ataagcaaagcctaa

SEQ ID NO: 296699 - DNA, 15 bp, Homo sapiens
gataagcaaagccta

SEQ ID NO: 296700 - DNA, 15 bp, Homo sapiens
tgataagcaaagcct

SEQ ID NO: 296701 - DNA, 15 bp, Homo sapiens
gtgataagcaaagcc

SEQ ID NO: 296702 - DNA, 15 bp, Homo sapiens
tgtgataagcaaagc

SEQ ID NO: 296703 - DNA, 15 bp, Homo sapiens
atgtgataagcaaag

SEQ ID NO: 296704 - DNA, 15 bp, Homo sapiens
aatgtgataagcaaa

SEQ ID NO: 296705 - DNA, 15 bp, Homo sapiens
taatgtgataagcaa

SEQ ID NO: 296706 - DNA, 15 bp, Homo sapiens
ataatgtgataagca

SEQ ID NO: 296707 - DNA, 15 bp, Homo sapiens
cataatgtgataagc

SEQ ID NO: 296708 - DNA, 15 bp, Homo sapiens
acataatgtgataag

SEQ ID NO: 296709 - DNA, 15 bp, Homo sapiens
aacataatgtgataa

SEQ ID NO: 296710 - DNA, 15 bp, Homo sapiens
caacataatgtgata

SEQ ID NO: 296711 - DNA, 15 bp, Homo sapiens
ccaacataatgtgat

SEQ ID NO: 296712 - DNA, 15 bp, Homo sapiens
cccaacataatgtga

SEQ ID NO: 296713 - DNA, 15 bp, Homo sapiens
tcccaacataatgtg

SEQ ID NO: 296714 - DNA, 15 bp, Homo sapiens
ctcccaacataatgt

SEQ ID NO: 296715 - DNA, 15 bp, Homo sapiens
actcccaacataatg

SEQ ID NO: 296716 - DNA, 15 bp, Homo sapiens
tactcccaacataat

SEQ ID NO: 296717 - DNA, 15 bp, Homo sapiens
ctactcccaacataa

SEQ ID NO: 296718 - DNA, 15 bp, Homo sapiens
actactcccaacata

SEQ ID NO: 296719 - DNA, 15 bp, Homo sapiens
tactactcccaacat

SEQ ID NO: 296720 - DNA, 15 bp, Homo sapiens
ctactactcccaaca

SEQ ID NO: 296721 - DNA, 15 bp, Homo sapiens
cctactactcccaac

SEQ ID NO: 296722 - DNA, 15 bp, Homo sapiens
acctactactcccaa

SEQ ID NO: 296723 - DNA, 15 bp, Homo sapiens
tacctactactccca

SEQ ID NO: 296724 - DNA, 15 bp, Homo sapiens
ctacctactactccc

SEQ ID NO: 296725 - DNA, 15 bp, Homo sapiens
tctacctactactcc

SEQ ID NO: 296726 - DNA, 15 bp, Homo sapiens
ctctacctactactc

SEQ ID NO: 296727 - DNA, 15 bp, Homo sapiens
tctctacctactact

SEQ ID NO: 296728 - DNA, 15 bp, Homo sapiens
gtctctacctactac

SEQ ID NO: 296729 - DNA, 15 bp, Homo sapiens
tgtctctacctacta

SEQ ID NO: 296730 - DNA, 15 bp, Homo sapiens
ctgtctctacctact

SEQ ID NO: 296731 - DNA, 15 bp, Homo sapiens
actgtctctacctac

SEQ ID NO: 296732 - DNA, 15 bp, Homo sapiens
tactgtctctaccta

SEQ ID NO: 296733 - DNA, 15 bp, Homo sapiens
ctactgtctctacct

SEQ ID NO: 296734 - DNA, 15 bp, Homo sapiens
cctactgtctctacc

SEQ ID NO: 296735 - DNA, 15 bp, Homo sapiens
tcctactgtctctac

SEQ ID NO: 296736 - DNA, 15 bp, Homo sapiens
ctcctactgtctcta

SEQ ID NO: 296737 - DNA, 15 bp, Homo sapiens
tctcctactgtctct

SEQ ID NO: 296738 - DNA, 15 bp, Homo sapiens
ttctcctactgtctc

SEQ ID NO: 296739 - DNA, 15 bp, Homo sapiens
attctcctactgtct

SEQ ID NO: 296740 - DNA, 15 bp, Homo sapiens
tattctcctactgtc

SEQ ID NO: 296741 - DNA, 15 bp, Homo sapiens
ctattctcctactgt

SEQ ID NO: 296742 - DNA, 15 bp, Homo sapiens
tctattctcctactg

SEQ ID NO: 296743 - DNA, 15 bp, Homo sapiens
ctctattctcctact

SEQ ID NO: 296744 - DNA, 15 bp, Homo sapiens
cctctattctcctac

SEQ ID NO: 296745 - DNA, 15 bp, Homo sapiens
ccctctattctccta

SEQ ID NO: 296746 - DNA, 15 bp, Homo sapiens
accctctattctcct

SEQ ID NO: 296747 - DNA, 15 bp, Homo sapiens
aaccctctattctcc

SEQ ID NO: 296748 - DNA, 15 bp, Homo sapiens
taaccctctattctc

SEQ ID NO: 296749 - DNA, 15 bp, Homo sapiens
ctaaccctctattct

SEQ ID NO: 296750 - DNA, 15 bp, Homo sapiens
tctaaccctctattc

SEQ ID NO: 296751 - DNA, 15 bp, Homo sapiens
ctctaaccctctatt

SEQ ID NO: 296752 - DNA, 15 bp, Homo sapiens
cctctaaccctctat

SEQ ID NO: 296753 - DNA, 15 bp, Homo sapiens
gcctctaaccctcta

SEQ ID NO: 296754 - DNA, 15 bp, Homo sapiens
agcctctaaccctct

SEQ ID NO: 296755 - DNA, 15 bp, Homo sapiens
aagcctctaaccctc

SEQ ID NO: 296756 - DNA, 15 bp, Homo sapiens
taagcctctaaccct

SEQ ID NO: 296757 - DNA, 15 bp, Homo sapiens
ataagcctctaaccc

SEQ ID NO: 296758 - DNA, 15 bp, Homo sapiens
aataagcctctaacc

SEQ ID NO: 296759 - DNA, 15 bp, Homo sapiens
aaataagcctctaac

SEQ ID NO: 296760 - DNA, 15 bp, Homo sapiens
aaaataagcctctaa

SEQ ID NO: 296761 - DNA, 15 bp, Homo sapiens
taaaataagcctcta

SEQ ID NO: 296762 - DNA, 15 bp, Homo sapiens
ttaaaataagcctct

SEQ ID NO: 296763 - DNA, 15 bp, Homo sapiens
tttaaaataagcctc

SEQ ID NO: 296764 - DNA, 15 bp, Homo sapiens
atttaaaataagcct

SEQ ID NO: 296765 - DNA, 15 bp, Homo sapiens
gatttaaaataagcc

SEQ ID NO: 296766 - DNA, 15 bp, Homo sapiens
tgatttaaaataagc

SEQ ID NO: 296767 - DNA, 15 bp, Homo sapiens
ctgatttaaaataag

SEQ ID NO: 296768 - DNA, 15 bp, Homo sapiens
tctgatttaaaataa

SEQ ID NO: 296769 - DNA, 15 bp, Homo sapiens
atctgatttaaaata

SEQ ID NO: 296770 - DNA, 15 bp, Homo sapiens
aatctgatttaaaat

SEQ ID NO: 296771 - DNA, 15 bp, Homo sapiens
caatctgatttaaaa

SEQ ID NO: 296772 - DNA, 15 bp, Homo sapiens
ccaatctgatttaaa

SEQ ID NO: 296773 - DNA, 15 bp, Homo sapiens
cccaatctgatttaa

SEQ ID NO: 296774 - DNA, 15 bp, Homo sapiens
gcccaatctgattta

SEQ ID NO: 296775 - DNA, 15 bp, Homo sapiens
tgcccaatctgattt

SEQ ID NO: 296776 - DNA, 15 bp, Homo sapiens
atgcccaatctgatt

SEQ ID NO: 296777 - DNA, 15 bp, Homo sapiens
catgcccaatctgat

SEQ ID NO: 296778 - DNA, 15 bp, Homo sapiens
acatgcccaatctga

SEQ ID NO: 296779 - DNA, 15 bp, Homo sapiens
gacatgcccaatctg

SEQ ID NO: 296780 - DNA, 15 bp, Homo sapiens
tgacatgcccaatct

SEQ ID NO: 296781 - DNA, 15 bp, Homo sapiens
gtgacatgcccaatc

SEQ ID NO: 296782 - DNA, 15 bp, Homo sapiens
agtgacatgcccaat

SEQ ID NO: 296783 - DNA, 15 bp, Homo sapiens
tagtgacatgcccaa

SEQ ID NO: 296784 - DNA, 15 bp, Homo sapiens
atagtgacatgccca

SEQ ID NO: 296785 - DNA, 15 bp, Homo sapiens
tatagtgacatgccc

SEQ ID NO: 296786 - DNA, 15 bp, Homo sapiens
ttatagtgacatgcc

SEQ ID NO: 296787 - DNA, 15 bp, Homo sapiens
cttatagtgacatgc

SEQ ID NO: 296788 - DNA, 15 bp, Homo sapiens
tcttatagtgacatg

SEQ ID NO: 296789 - DNA, 15 bp, Homo sapiens
atcttatagtgacat

SEQ ID NO: 296790 - DNA, 15 bp, Homo sapiens
gatcttatagtgaca

SEQ ID NO: 296791 - DNA, 15 bp, Homo sapiens
agatcttatagtgac

SEQ ID NO: 296792 - DNA, 15 bp, Homo sapiens
tagatcttatagtga

SEQ ID NO: 296793 - DNA, 15 bp, Homo sapiens
atagatcttatagtg

SEQ ID NO: 296794 - DNA, 15 bp, Homo sapiens
tatagatcttatagt

SEQ ID NO: 296795 - DNA, 15 bp, Homo sapiens
ttatagatcttatag

SEQ ID NO: 296796 - DNA, 15 bp, Homo sapiens
tttatagatcttata

SEQ ID NO: 296797 - DNA, 15 bp, Homo sapiens
ttttatagatcttat

SEQ ID NO: 296798 - DNA, 15 bp, Homo sapiens
tttttatagatctta

SEQ ID NO: 296799 - DNA, 15 bp, Homo sapiens
ctttttatagatctt

SEQ ID NO: 296800 - DNA, 15 bp, Homo sapiens
cctttttatagatct

SEQ ID NO: 296801 - DNA, 15 bp, Homo sapiens
acctttttatagatc

SEQ ID NO: 296802 - DNA, 15 bp, Homo sapiens
aacctttttatagat

SEQ ID NO: 296803 - DNA, 15 bp, Homo sapiens
aaacctttttataga

SEQ ID NO: 296804 - DNA, 15 bp, Homo sapiens
taaacctttttatag

SEQ ID NO: 296805 - DNA, 15 bp, Homo sapiens
ataaacctttttata

SEQ ID NO: 296806 - DNA, 15 bp, Homo sapiens
tataaacctttttat

SEQ ID NO: 296807 - DNA, 15 bp, Homo sapiens
ttataaaccttttta

SEQ ID NO: 296808 - DNA, 15 bp, Homo sapiens
attataaaccttttt

SEQ ID NO: 296809 - DNA, 15 bp, Homo sapiens
gattataaacctttt

SEQ ID NO: 296810 - DNA, 15 bp, Homo sapiens
agattataaaccttt

SEQ ID NO: 296811 - DNA, 15 bp, Homo sapiens
tagattataaacctt

SEQ ID NO: 296812 - DNA, 15 bp, Homo sapiens
ttagattataaacct

SEQ ID NO: 296813 - DNA, 15 bp, Homo sapiens
attagattataaacc

SEQ ID NO: 296814 - DNA, 15 bp, Homo sapiens
tattagattataaac

SEQ ID NO: 296815 - DNA, 15 bp, Homo sapiens
atattagattataaa

SEQ ID NO: 296816 - DNA, 15 bp, Homo sapiens
catattagattataa

SEQ ID NO: 296817 - DNA, 15 bp, Homo sapiens
tcatattagattata

SEQ ID NO: 296818 - DNA, 15 bp, Homo sapiens
atcatattagattat

SEQ ID NO: 296819 - DNA, 15 bp, Homo sapiens
catcatattagatta

SEQ ID NO: 296820 - DNA, 15 bp, Homo sapiens
gcatcatattagatt

SEQ ID NO: 296821 - DNA, 15 bp, Homo sapiens
agcatcatattagat

SEQ ID NO: 296822 - DNA, 15 bp, Homo sapiens
gagcatcatattaga

SEQ ID NO: 296823 - DNA, 15 bp, Homo sapiens
tgagcatcatattag

SEQ ID NO: 296824 - DNA, 15 bp, Homo sapiens
atgagcatcatatta

SEQ ID NO: 296825 - DNA, 15 bp, Homo sapiens
tatgagcatcatatt

SEQ ID NO: 296826 - DNA, 15 bp, Homo sapiens
ttatgagcatcatat

SEQ ID NO: 296827 - DNA, 15 bp, Homo sapiens
tttatgagcatcata

SEQ ID NO: 296828 - DNA, 15 bp, Homo sapiens
ctttatgagcatcat

SEQ ID NO: 296829 - DNA, 15 bp, Homo sapiens
tctttatgagcatca

SEQ ID NO: 296830 - DNA, 15 bp, Homo sapiens
ctctttatgagcatc

SEQ ID NO: 296831 - DNA, 15 bp, Homo sapiens
actctttatgagcat

SEQ ID NO: 296832 - DNA, 15 bp, Homo sapiens
cactctttatgagca

SEQ ID NO: 296833 - DNA, 15 bp, Homo sapiens
gcactctttatgagc

SEQ ID NO: 296834 - DNA, 15 bp, Homo sapiens
agcactctttatgag

SEQ ID NO: 296835 - DNA, 15 bp, Homo sapiens
gagcactctttatga

SEQ ID NO: 296836 - DNA, 15 bp, Homo sapiens
agagcactctttatg

SEQ ID NO: 296837 - DNA, 15 bp, Homo sapiens
aagagcactctttat

SEQ ID NO: 296838 - DNA, 15 bp, Homo sapiens
gaagagcactcttta

SEQ ID NO: 296839 - DNA, 15 bp, Homo sapiens
ggaagagcactcttt

SEQ ID NO: 296840 - DNA, 15 bp, Homo sapiens
tggaagagcactctt

SEQ ID NO: 296841 - DNA, 15 bp, Homo sapiens
ttggaagagcactct

SEQ ID NO: 296842 - DNA, 15 bp, Homo sapiens
attggaagagcactc

SEQ ID NO: 296843 - DNA, 15 bp, Homo sapiens
gattggaagagcact

SEQ ID NO: 296844 - DNA, 15 bp, Homo sapiens
agattggaagagcac

SEQ ID NO: 296845 - DNA, 15 bp, Homo sapiens
cagattggaagagca

SEQ ID NO: 296846 - DNA, 15 bp, Homo sapiens
tcagattggaagagc

SEQ ID NO: 296847 - DNA, 15 bp, Homo sapiens
atcagattggaagag

SEQ ID NO: 296848 - DNA, 15 bp, Homo sapiens
aatcagattggaaga

SEQ ID NO: 296849 - DNA, 15 bp, Homo sapiens
gaatcagattggaag

SEQ ID NO: 296850 - DNA, 15 bp, Homo sapiens
agaatcagattggaa

SEQ ID NO: 296851 - DNA, 15 bp, Homo sapiens
aagaatcagattgga

SEQ ID NO: 296852 - DNA, 15 bp, Homo sapiens
taagaatcagattgg

SEQ ID NO: 296853 - DNA, 15 bp, Homo sapiens
ataagaatcagattg

SEQ ID NO: 296854 - DNA, 15 bp, Homo sapiens
cataagaatcagatt

SEQ ID NO: 296855 - DNA, 15 bp, Homo sapiens
ccataagaatcagat

SEQ ID NO: 296856 - DNA, 15 bp, Homo sapiens
tccataagaatcaga

SEQ ID NO: 296857 - DNA, 15 bp, Homo sapiens
atccataagaatcag

SEQ ID NO: 296858 - DNA, 15 bp, Homo sapiens
aatccataagaatca

SEQ ID NO: 296859 - DNA, 15 bp, Homo sapiens
aaatccataagaatc

SEQ ID NO: 296860 - DNA, 15 bp, Homo sapiens
gaaatccataagaat

SEQ ID NO: 296861 - DNA, 15 bp, Homo sapiens
ggaaatccataagaa

SEQ ID NO: 296862 - DNA, 15 bp, Homo sapiens
gggaaatccataaga

SEQ ID NO: 296863 - DNA, 15 bp, Homo sapiens
tgggaaatccataag

SEQ ID NO: 296864 - DNA, 15 bp, Homo sapiens
ctgggaaatccataa

SEQ ID NO: 296865 - DNA, 15 bp, Homo sapiens
cctgggaaatccata

SEQ ID NO: 296866 - DNA, 15 bp, Homo sapiens
ccctgggaaatccat

SEQ ID NO: 296867 - DNA, 15 bp, Homo sapiens
cccctgggaaatcca

SEQ ID NO: 296868 - DNA, 15 bp, Homo sapiens
acccctgggaaatcc

SEQ ID NO: 296869 - DNA, 15 bp, Homo sapiens
cacccctgggaaatc

SEQ ID NO: 296870 - DNA, 15 bp, Homo sapiens
tcacccctgggaaat

SEQ ID NO: 296871 - DNA, 15 bp, Homo sapiens
atcacccctgggaaa

SEQ ID NO: 296872 - DNA, 15 bp, Homo sapiens
gatcacccctgggaa

SEQ ID NO: 296873 - DNA, 15 bp, Homo sapiens
ggatcacccctggga

SEQ ID NO: 296874 - DNA, 15 bp, Homo sapiens
gggatcacccctggg

SEQ ID NO: 296875 - DNA, 15 bp, Homo sapiens
tgggatcacccctgg

SEQ ID NO: 296876 - DNA, 15 bp, Homo sapiens
ttgggatcacccctg

SEQ ID NO: 296877 - DNA, 15 bp, Homo sapiens
attgggatcacccct

SEQ ID NO: 296878 - DNA, 15 bp, Homo sapiens
gattgggatcacccc

SEQ ID NO: 296879 - DNA, 15 bp, Homo sapiens
agattgggatcaccc

SEQ ID NO: 296880 - DNA, 15 bp, Homo sapiens
cagattgggatcacc

SEQ ID NO: 296881 - DNA, 15 bp, Homo sapiens
tcagattgggatcac

SEQ ID NO: 296882 - DNA, 15 bp, Homo sapiens
atcagattgggatca

SEQ ID NO: 296883 - DNA, 15 bp, Homo sapiens
aatcagattgggatc

SEQ ID NO: 296884 - DNA, 15 bp, Homo sapiens
caatcagattgggat

SEQ ID NO: 296885 - DNA, 15 bp, Homo sapiens
acaatcagattggga

SEQ ID NO: 296886 - DNA, 15 bp, Homo sapiens
gacaatcagattggg

SEQ ID NO: 296887 - DNA, 15 bp, Homo sapiens
agacaatcagattgg

SEQ ID NO: 296888 - DNA, 15 bp, Homo sapiens
aagacaatcagattg

SEQ ID NO: 296889 - DNA, 15 bp, Homo sapiens
aaagacaatcagatt

SEQ ID NO: 296890 - DNA, 15 bp, Homo sapiens
caaagacaatcagat

SEQ ID NO: 296891 - DNA, 15 bp, Homo sapiens
acaaagacaatcaga

SEQ ID NO: 296892 - DNA, 15 bp, Homo sapiens
tacaaagacaatcag

SEQ ID NO: 296893 - DNA, 15 bp, Homo sapiens
ctacaaagacaatca

SEQ ID NO: 296894 - DNA, 15 bp, Homo sapiens
actacaaagacaatc

SEQ ID NO: 296895 - DNA, 15 bp, Homo sapiens
tactacaaagacaat

SEQ ID NO: 296896 - DNA, 15 bp, Homo sapiens
gtactacaaagacaa

SEQ ID NO: 296897 - DNA, 15 bp, Homo sapiens
tgtactacaaagaca

SEQ ID NO: 296898 - DNA, 15 bp, Homo sapiens
ctgtactacaaagac

SEQ ID NO: 296899 - DNA, 15 bp, Homo sapiens
actgtactacaaaga

SEQ ID NO: 296900 - DNA, 15 bp, Homo sapiens
cactgtactacaaag

SEQ ID NO: 296901 - DNA, 15 bp, Homo sapiens
tcactgtactacaaa

SEQ ID NO: 296902 - DNA, 15 bp, Homo sapiens
gtcactgtactacaa

SEQ ID NO: 296903 - DNA, 15 bp, Homo sapiens
ggtcactgtactaca

SEQ ID NO: 296904 - DNA, 15 bp, Homo sapiens
aggtcactgtactac

SEQ ID NO: 296905 - DNA, 15 bp, Homo sapiens
aaggtcactgtacta

SEQ ID NO: 296906 - DNA, 15 bp, Homo sapiens
gaaggtcactgtact

SEQ ID NO: 296907 - DNA, 15 bp, Homo sapiens
tgaaggtcactgtac

SEQ ID NO: 296908 - DNA, 15 bp, Homo sapiens
atgaaggtcactgta

SEQ ID NO: 296909 - DNA, 15 bp, Homo sapiens
gatgaaggtcactgt

SEQ ID NO: 296910 - DNA, 15 bp, Homo sapiens
agatgaaggtcactg

SEQ ID NO: 296911 - DNA, 15 bp, Homo sapiens
aagatgaaggtcact

SEQ ID NO: 296912 - DNA, 15 bp, Homo sapiens
aaagatgaaggtcac

SEQ ID NO: 296913 - DNA, 15 bp, Homo sapiens
taaagatgaaggtca

SEQ ID NO: 296914 - DNA, 15 bp, Homo sapiens
ctaaagatgaaggtc

SEQ ID NO: 296915 - DNA, 15 bp, Homo sapiens
gctaaagatgaaggt

SEQ ID NO: 296916 - DNA, 15 bp, Homo sapiens
tgctaaagatgaagg

SEQ ID NO: 296917 - DNA, 15 bp, Homo sapiens
ttgctaaagatgaag

SEQ ID NO: 296918 - DNA, 15 bp, Homo sapiens
tttgctaaagatgaa

SEQ ID NO: 296919 - DNA, 15 bp, Homo sapiens
ctttgctaaagatga

SEQ ID NO: 296920 - DNA, 15 bp, Homo sapiens
gctttgctaaagatg

SEQ ID NO: 296921 - DNA, 15 bp, Homo sapiens
ggctttgctaaagat

SEQ ID NO: 296922 - DNA, 15 bp, Homo sapiens
tggctttgctaaaga

SEQ ID NO: 296923 - DNA, 15 bp, Homo sapiens
ctggctttgctaaag

SEQ ID NO: 296924 - DNA, 15 bp, Homo sapiens
tctggctttgctaaa

SEQ ID NO: 296925 - DNA, 15 bp, Homo sapiens
ttctggctttgctaa

SEQ ID NO: 296926 - DNA, 15 bp, Homo sapiens
tttctggctttgcta

SEQ ID NO: 296927 - DNA, 15 bp, Homo sapiens
atttctggctttgct

SEQ ID NO: 296928 - DNA, 15 bp, Homo sapiens
catttctggctttgc

SEQ ID NO: 296929 - DNA, 15 bp, Homo sapiens
gcatttctggctttg

SEQ ID NO: 296930 - DNA, 15 bp, Homo sapiens
tgcatttctggcttt

SEQ ID NO: 296931 - DNA, 15 bp, Homo sapiens
ctgcatttctggctt

SEQ ID NO: 296932 - DNA, 15 bp, Homo sapiens
actgcatttctggct

SEQ ID NO: 296933 - DNA, 15 bp, Homo sapiens
aactgcatttctggc

SEQ ID NO: 296934 - DNA, 15 bp, Homo sapiens
gaactgcatttctgg

SEQ ID NO: 296935 - DNA, 15 bp, Homo sapiens
ggaactgcatttctg

SEQ ID NO: 296936 - DNA, 15 bp, Homo sapiens
gggaactgcatttct

SEQ ID NO: 296937 - DNA, 15 bp, Homo sapiens
tgggaactgcatttc

SEQ ID NO: 296938 - DNA, 15 bp, Homo sapiens
ttgggaactgcattt

SEQ ID NO: 296939 - DNA, 15 bp, Homo sapiens
tttgggaactgcatt

SEQ ID NO: 296940 - DNA, 15 bp, Homo sapiens
ctttgggaactgcat

SEQ ID NO: 296941 - DNA, 15 bp, Homo sapiens
tctttgggaactgca

SEQ ID NO: 296942 - DNA, 15 bp, Homo sapiens
atctttgggaactgc

SEQ ID NO: 296943 - DNA, 15 bp, Homo sapiens
catctttgggaactg

SEQ ID NO: 296944 - DNA, 15 bp, Homo sapiens
ccatctttgggaact

SEQ ID NO: 296945 - DNA, 15 bp, Homo sapiens
cccatctttgggaac

SEQ ID NO: 296946 - DNA, 15 bp, Homo sapiens
tcccatctttgggaa

SEQ ID NO: 296947 - DNA, 15 bp, Homo sapiens
ctcccatctttggga

SEQ ID NO: 296948 - DNA, 15 bp, Homo sapiens
tctcccatctttggg

SEQ ID NO: 296949 - DNA, 15 bp, Homo sapiens
ctctcccatctttgg

SEQ ID NO: 296950 - DNA, 15 bp, Homo sapiens
gctctcccatctttg

SEQ ID NO: 296951 - DNA, 15 bp, Homo sapiens
tgctctcccatcttt

SEQ ID NO: 296952 - DNA, 15 bp, Homo sapiens
ctgctctcccatctt

SEQ ID NO: 296953 - DNA, 15 bp, Homo sapiens
gctgctctcccatct

SEQ ID NO: 296954 - DNA, 15 bp, Homo sapiens
cgctgctctcccatc

SEQ ID NO: 296955 - DNA, 15 bp, Homo sapiens
acgctgctctcccat

SEQ ID NO: 296956 - DNA, 15 bp, Homo sapiens
gacgctgctctccca

SEQ ID NO: 296957 - DNA, 15 bp, Homo sapiens
agacgctgctctccc

SEQ ID NO: 296958 - DNA, 15 bp, Homo sapiens
gagacgctgctctcc

SEQ ID NO: 296959 - DNA, 15 bp, Homo sapiens
agagacgctgctctc

SEQ ID NO: 296960 - DNA, 15 bp, Homo sapiens
tagagacgctgctct

SEQ ID NO: 296961 - DNA, 15 bp, Homo sapiens
gtagagacgctgctc

SEQ ID NO: 296962 - DNA, 15 bp, Homo sapiens
agtagagacgctgct

SEQ ID NO: 296963 - DNA, 15 bp, Homo sapiens
gagtagagacgctgc

SEQ ID NO: 296964 - DNA, 15 bp, Homo sapiens
ggagtagagacgctg

SEQ ID NO: 296965 - DNA, 15 bp, Homo sapiens
aggagtagagacgct

SEQ ID NO: 296966 - DNA, 15 bp, Homo sapiens
caggagtagagacgc

SEQ ID NO: 296967 - DNA, 15 bp, Homo sapiens
tcaggagtagagacg

SEQ ID NO: 296968 - DNA, 15 bp, Homo sapiens
ctcaggagtagagac

SEQ ID NO: 296969 - DNA, 15 bp, Homo sapiens
gctcaggagtagaga

SEQ ID NO: 296970 - DNA, 15 bp, Homo sapiens
ggctcaggagtagag

SEQ ID NO: 296971 - DNA, 15 bp, Homo sapiens
aggctcaggagtaga

SEQ ID NO: 296972 - DNA, 15 bp, Homo sapiens
taggctcaggagtag

SEQ ID NO: 296973 - DNA, 15 bp, Homo sapiens
ctaggctcaggagta

SEQ ID NO: 296974 - DNA, 15 bp, Homo sapiens
tctaggctcaggagt

SEQ ID NO: 296975 - DNA, 15 bp, Homo sapiens
atctaggctcaggag

SEQ ID NO: 296976 - DNA, 15 bp, Homo sapiens
gatctaggctcagga

SEQ ID NO: 296977 - DNA, 15 bp, Homo sapiens
agatctaggctcagg

SEQ ID NO: 296978 - DNA, 15 bp, Homo sapiens
cagatctaggctcag

SEQ ID NO: 296979 - DNA, 15 bp, Homo sapiens
gcagatctaggctca

SEQ ID NO: 296980 - DNA, 15 bp, Homo sapiens
ggcagatctaggctc

SEQ ID NO: 296981 - DNA, 15 bp, Homo sapiens
aggcagatctaggct

SEQ ID NO: 296982 - DNA, 15 bp, Homo sapiens
aaggcagatctaggc

SEQ ID NO: 296983 - DNA, 15 bp, Homo sapiens
aaaggcagatctagg

SEQ ID NO: 296984 - DNA, 15 bp, Homo sapiens
aaaaggcagatctag

SEQ ID NO: 296985 - DNA, 15 bp, Homo sapiens
aaaaaggcagatcta

SEQ ID NO: 296986 - DNA, 15 bp, Homo sapiens
aaaaaaggcagatct

SEQ ID NO: 296987 - DNA, 15 bp, Homo sapiens
aaaaaaaggcagatc

SEQ ID NO: 296988 - DNA, 15 bp, Homo sapiens
gaaaaaaaggcagat

SEQ ID NO: 296989 - DNA, 15 bp, Homo sapiens
agaaaaaaaggcaga

SEQ ID NO: 296990 - DNA, 15 bp, Homo sapiens
gagaaaaaaaggcag

SEQ ID NO: 296991 - DNA, 15 bp, Homo sapiens
agagaaaaaaaggca

SEQ ID NO: 296992 - DNA, 15 bp, Homo sapiens
gagagaaaaaaaggc

SEQ ID NO: 296993 - DNA, 15 bp, Homo sapiens
agagagaaaaaaagg

SEQ ID NO: 296994 - DNA, 15 bp, Homo sapiens
gagagagaaaaaaag

SEQ ID NO: 296995 - DNA, 15 bp, Homo sapiens
tacaagagagagaaa

SEQ ID NO: 296996 - DNA, 15 bp, Homo sapiens
ctacaagagagagaa

SEQ ID NO: 296997 - DNA, 15 bp, Homo sapiens
cctacaagagagaga

SEQ ID NO: 296998 - DNA, 15 bp, Homo sapiens
ccctacaagagagag

SEQ ID NO: 296999 - DNA, 15 bp, Homo sapiens
tccctacaagagaga

SEQ ID NO: 297000 - DNA, 15 bp, Homo sapiens
ctccctacaagagag

SEQ ID NO: 297001 - DNA, 15 bp, Homo sapiens
cctccctacaagaga

SEQ ID NO: 297002 - DNA, 15 bp, Homo sapiens
tcctccctacaagag

SEQ ID NO: 297003 - DNA, 15 bp, Homo sapiens
atcctccctacaaga

SEQ ID NO: 297004 - DNA, 15 bp, Homo sapiens
aatcctccctacaag

SEQ ID NO: 297005 - DNA, 15 bp, Homo sapiens
aaatcctccctacaa

SEQ ID NO: 297006 - DNA, 15 bp, Homo sapiens
aaaatcctccctaca

SEQ ID NO: 297007 - DNA, 15 bp, Homo sapiens
gaaaatcctccctac

SEQ ID NO: 297008 - DNA, 15 bp, Homo sapiens
tgaaaatcctcccta

SEQ ID NO: 297009 - DNA, 15 bp, Homo sapiens
atgaaaatcctccct

SEQ ID NO: 297010 - DNA, 15 bp, Homo sapiens
aatgaaaatcctccc

SEQ ID NO: 297011 - DNA, 15 bp, Homo sapiens
aaatgaaaatcctcc

SEQ ID NO: 297012 - DNA, 15 bp, Homo sapiens
aaaatgaaaatcctc

SEQ ID NO: 297013 - DNA, 15 bp, Homo sapiens
caaaatgaaaatcct

SEQ ID NO: 297014 - DNA, 15 bp, Homo sapiens
gcaaaatgaaaatcc

SEQ ID NO: 297015 - DNA, 15 bp, Homo sapiens
ggcaaaatgaaaatc

SEQ ID NO: 297016 - DNA, 15 bp, Homo sapiens
gggcaaaatgaaaat

SEQ ID NO: 297017 - DNA, 15 bp, Homo sapiens
agggcaaaatgaaaa

SEQ ID NO: 297018 - DNA, 15 bp, Homo sapiens
aagggcaaaatgaaa

SEQ ID NO: 297019 - DNA, 15 bp, Homo sapiens
aaagggcaaaatgaa

SEQ ID NO: 297020 - DNA, 15 bp, Homo sapiens
gaaagggcaaaatga

SEQ ID NO: 297021 - DNA, 15 bp, Homo sapiens
agaaagggcaaaatg

SEQ ID NO: 297022 - DNA, 15 bp, Homo sapiens
tagaaagggcaaaat

SEQ ID NO: 297023 - DNA, 15 bp, Homo sapiens
atagaaagggcaaaa

SEQ ID NO: 297024 - DNA, 15 bp, Homo sapiens
catagaaagggcaaa

SEQ ID NO: 297025 - DNA, 15 bp, Homo sapiens
acatagaaagggcaa

SEQ ID NO: 297026 - DNA, 15 bp, Homo sapiens
tacatagaaagggca

SEQ ID NO: 297027 - DNA, 15 bp, Homo sapiens
gtacatagaaagggc

SEQ ID NO: 297028 - DNA, 15 bp, Homo sapiens
tgtacatagaaaggg

SEQ ID NO: 297029 - DNA, 15 bp, Homo sapiens
ttgtacatagaaagg

SEQ ID NO: 297030 - DNA, 15 bp, Homo sapiens
tttgtacatagaaag

SEQ ID NO: 297031 - DNA, 15 bp, Homo sapiens
atttgtacatagaaa

SEQ ID NO: 297032 - DNA, 15 bp, Homo sapiens
catttgtacatagaa

SEQ ID NO: 297033 - DNA, 15 bp, Homo sapiens
gcatttgtacataga

SEQ ID NO: 297034 - DNA, 15 bp, Homo sapiens
agcatttgtacatag

SEQ ID NO: 297035 - DNA, 15 bp, Homo sapiens
aagcatttgtacata

SEQ ID NO: 297036 - DNA, 15 bp, Homo sapiens
aaagcatttgtacat

SEQ ID NO: 297037 - DNA, 15 bp, Homo sapiens
caaagcatttgtaca

SEQ ID NO: 297038 - DNA, 15 bp, Homo sapiens
acaaagcatttgtac

SEQ ID NO: 297039 - DNA, 15 bp, Homo sapiens
cacaaagcatttgta

SEQ ID NO: 297040 - DNA, 15 bp, Homo sapiens
gcacaaagcatttgt

SEQ ID NO: 297041 - DNA, 15 bp, Homo sapiens
agcacaaagcatttg

SEQ ID NO: 297042 - DNA, 15 bp, Homo sapiens
aagcacaaagcattt

SEQ ID NO: 297043 - DNA, 15 bp, Homo sapiens
aaagcacaaagcatt

SEQ ID NO: 297044 - DNA, 15 bp, Homo sapiens
gaaagcacaaagcat

SEQ ID NO: 297045 - DNA, 15 bp, Homo sapiens
agaaagcacaaagca

SEQ ID NO: 297046 - DNA, 15 bp, Homo sapiens
gagaaagcacaaagc

SEQ ID NO: 297047 - DNA, 15 bp, Homo sapiens
cgagaaagcacaaag

SEQ ID NO: 297048 - DNA, 15 bp, Homo sapiens
acgagaaagcacaaa

SEQ ID NO: 297049 - DNA, 15 bp, Homo sapiens
tacgagaaagcacaa

SEQ ID NO: 297050 - DNA, 15 bp, Homo sapiens
atacgagaaagcaca

SEQ ID NO: 297051 - DNA, 15 bp, Homo sapiens
aatacgagaaagcac

SEQ ID NO: 297052 - DNA, 15 bp, Homo sapiens
taatacgagaaagca

SEQ ID NO: 297053 - DNA, 15 bp, Homo sapiens
ataatacgagaaagc

SEQ ID NO: 297054 - DNA, 15 bp, Homo sapiens
aataatacgagaaag

SEQ ID NO: 297055 - DNA, 15 bp, Homo sapiens
aaataatacgagaaa

SEQ ID NO: 297056 - DNA, 15 bp, Homo sapiens
aaaataatacgagaa

SEQ ID NO: 297057 - DNA, 15 bp, Homo sapiens
caaaataatacgaga

SEQ ID NO: 297058 - DNA, 15 bp, Homo sapiens
acaaaataatacgag

SEQ ID NO: 297059 - DNA, 15 bp, Homo sapiens
tacaaaataatacga

SEQ ID NO: 297060 - DNA, 15 bp, Homo sapiens
atacaaaataatacg

SEQ ID NO: 297061 - DNA, 15 bp, Homo sapiens
tatacaaaataatac

SEQ ID NO: 297062 - DNA, 15 bp, Homo sapiens
ctatacaaaataata

SEQ ID NO: 297063 - DNA, 15 bp, Homo sapiens
actatacaaaataat

SEQ ID NO: 297064 - DNA, 15 bp, Homo sapiens
gactatacaaaataa

SEQ ID NO: 297065 - DNA, 15 bp, Homo sapiens
tgactatacaaaata

SEQ ID NO: 297066 - DNA, 15 bp, Homo sapiens
gtgactatacaaaat

SEQ ID NO: 297067 - DNA, 15 bp, Homo sapiens
ggtgactatacaaaa

SEQ ID NO: 297068 - DNA, 15 bp, Homo sapiens
gggtgactatacaaa

SEQ ID NO: 297069 - DNA, 15 bp, Homo sapiens
tgggtgactatacaa

SEQ ID NO: 297070 - DNA, 15 bp, Homo sapiens
ttgggtgactataca

SEQ ID NO: 297071 - DNA, 15 bp, Homo sapiens
attgggtgactatac

SEQ ID NO: 297072 - DNA, 15 bp, Homo sapiens
tattgggtgactata

SEQ ID NO: 297073 - DNA, 15 bp, Homo sapiens
ttattgggtgactat

SEQ ID NO: 297074 - DNA, 15 bp, Homo sapiens
attattgggtgacta

SEQ ID NO: 297075 - DNA, 15 bp, Homo sapiens
gattattgggtgact

SEQ ID NO: 297076 - DNA, 15 bp, Homo sapiens
ggattattgggtgac

SEQ ID NO: 297077 - DNA, 15 bp, Homo sapiens
aggattattgggtga

SEQ ID NO: 297078 - DNA, 15 bp, Homo sapiens
caggattattgggtg

SEQ ID NO: 297079 - DNA, 15 bp, Homo sapiens
acaggattattgggt

SEQ ID NO: 297080 - DNA, 15 bp, Homo sapiens
tacaggattattggg

SEQ ID NO: 297081 - DNA, 15 bp, Homo sapiens
gtacaggattattgg

SEQ ID NO: 297082 - DNA, 15 bp, Homo sapiens
agtacaggattattg

SEQ ID NO: 297083 - DNA, 15 bp, Homo sapiens
cagtacaggattatt

SEQ ID NO: 297084 - DNA, 15 bp, Homo sapiens
tcagtacaggattat

SEQ ID NO: 297085 - DNA, 15 bp, Homo sapiens
ttcagtacaggatta

SEQ ID NO: 297086 - DNA, 15 bp, Homo sapiens
cttcagtacaggatt

SEQ ID NO: 297087 - DNA, 15 bp, Homo sapiens
ccttcagtacaggat

SEQ ID NO: 297088 - DNA, 15 bp, Homo sapiens
tccttcagtacagga

SEQ ID NO: 297089 - DNA, 15 bp, Homo sapiens
ctccttcagtacagg

SEQ ID NO: 297090 - DNA, 15 bp, Homo sapiens
actccttcagtacag

SEQ ID NO: 297091 - DNA, 15 bp, Homo sapiens
aactccttcagtaca

SEQ ID NO: 297092 - DNA, 15 bp, Homo sapiens
taactccttcagtac

SEQ ID NO: 297093 - DNA, 15 bp, Homo sapiens
ataactccttcagta

SEQ ID NO: 297094 - DNA, 15 bp, Homo sapiens
cataactccttcagt

SEQ ID NO: 297095 - DNA, 15 bp, Homo sapiens
tcataactccttcag

SEQ ID NO: 297096 - DNA, 15 bp, Homo sapiens
atcataactccttca

SEQ ID NO: 297097 - DNA, 15 bp, Homo sapiens
gatcataactccttc

SEQ ID NO: 297098 - DNA, 15 bp, Homo sapiens
tgatcataactcctt

SEQ ID NO: 297099 - DNA, 15 bp, Homo sapiens
gtgatcataactcct

SEQ ID NO: 297100 - DNA, 15 bp, Homo sapiens
ggtgatcataactcc

SEQ ID NO: 297101 - DNA, 15 bp, Homo sapiens
tggtgatcataactc

SEQ ID NO: 297102 - DNA, 15 bp, Homo sapiens
atggtgatcataact

SEQ ID NO: 297103 - DNA, 15 bp, Homo sapiens
aatggtgatcataac

SEQ ID NO: 297104 - DNA, 15 bp, Homo sapiens
aaatggtgatcataa

SEQ ID NO: 297105 - DNA, 15 bp, Homo sapiens
aaaatggtgatcata

SEQ ID NO: 297106 - DNA, 15 bp, Homo sapiens
taaaatggtgatcat

SEQ ID NO: 297107 - DNA, 15 bp, Homo sapiens
gtaaaatggtgatca

SEQ ID NO: 297108 - DNA, 15 bp, Homo sapiens
tgtaaaatggtgatc

SEQ ID NO: 297109 - DNA, 15 bp, Homo sapiens
ctgtaaaatggtgat

SEQ ID NO: 297110 - DNA, 15 bp, Homo sapiens
tctgtaaaatggtga

SEQ ID NO: 297111 - DNA, 15 bp, Homo sapiens
atctgtaaaatggtg

SEQ ID NO: 297112 - DNA, 15 bp, Homo sapiens
catctgtaaaatggt

SEQ ID NO: 297113 - DNA, 15 bp, Homo sapiens
tcatctgtaaaatgg

SEQ ID NO: 297114 - DNA, 15 bp, Homo sapiens
atcatctgtaaaatg

SEQ ID NO: 297115 - DNA, 15 bp, Homo sapiens
catcatctgtaaaat

SEQ ID NO: 297116 - DNA, 15 bp, Homo sapiens
tcatcatctgtaaaa

SEQ ID NO: 297117 - DNA, 15 bp, Homo sapiens
ttcatcatctgtaaa

SEQ ID NO: 297118 - DNA, 15 bp, Homo sapiens
tttcatcatctgtaa

SEQ ID NO: 297119 - DNA, 15 bp, Homo sapiens
atttcatcatctgta

SEQ ID NO: 297120 - DNA, 15 bp, Homo sapiens
tatttcatcatctgt

SEQ ID NO: 297121 - DNA, 15 bp, Homo sapiens
ctatttcatcatctg

SEQ ID NO: 297122 - DNA, 15 bp, Homo sapiens
cctatttcatcatct

SEQ ID NO: 297123 - DNA, 15 bp, Homo sapiens
gcctatttcatcatc

SEQ ID NO: 297124 - DNA, 15 bp, Homo sapiens
agcctatttcatcat

SEQ ID NO: 297125 - DNA, 15 bp, Homo sapiens
gagcctatttcatca

SEQ ID NO: 297126 - DNA, 15 bp, Homo sapiens
tgagcctatttcatc

SEQ ID NO: 297127 - DNA, 15 bp, Homo sapiens
ctgagcctatttcat

SEQ ID NO: 297128 - DNA, 15 bp, Homo sapiens
tctgagcctatttca

SEQ ID NO: 297129 - DNA, 15 bp, Homo sapiens
ctctgagcctatttc

SEQ ID NO: 297130 - DNA, 15 bp, Homo sapiens
tctctgagcctattt

SEQ ID NO: 297131 - DNA, 15 bp, Homo sapiens
ttctctgagcctatt

SEQ ID NO: 297132 - DNA, 15 bp, Homo sapiens
attctctgagcctat

SEQ ID NO: 297133 - DNA, 15 bp, Homo sapiens
aattctctgagccta

SEQ ID NO: 297134 - DNA, 15 bp, Homo sapiens
aaattctctgagcct

SEQ ID NO: 297135 - DNA, 15 bp, Homo sapiens
caaattctctgagcc

SEQ ID NO: 297136 - DNA, 15 bp, Homo sapiens
tcaaattctctgagc

SEQ ID NO: 297137 - DNA, 15 bp, Homo sapiens
gtcaaattctctgag

SEQ ID NO: 297138 - DNA, 15 bp, Homo sapiens
tgtcaaattctctga

SEQ ID NO: 297139 - DNA, 15 bp, Homo sapiens
atgtcaaattctctg

SEQ ID NO: 297140 - DNA, 15 bp, Homo sapiens
aatgtcaaattctct

SEQ ID NO: 297141 - DNA, 15 bp, Homo sapiens
aaatgtcaaattctc

SEQ ID NO: 297142 - DNA, 15 bp, Homo sapiens
caaatgtcaaattct

SEQ ID NO: 297143 - DNA, 15 bp, Homo sapiens
acaaatgtcaaattc

SEQ ID NO: 297144 - DNA, 15 bp, Homo sapiens
gacaaatgtcaaatt

SEQ ID NO: 297145 - DNA, 15 bp, Homo sapiens
agacaaatgtcaaat

SEQ ID NO: 297146 - DNA, 15 bp, Homo sapiens
tagacaaatgtcaaa

SEQ ID NO: 297147 - DNA, 15 bp, Homo sapiens
ttagacaaatgtcaa

SEQ ID NO: 297148 - DNA, 15 bp, Homo sapiens
tttagacaaatgtca

SEQ ID NO: 297149 - DNA, 15 bp, Homo sapiens
atttagacaaatgtc

SEQ ID NO: 297150 - DNA, 15 bp, Homo sapiens
aatttagacaaatgt

SEQ ID NO: 297151 - DNA, 15 bp, Homo sapiens
gaatttagacaaatg

SEQ ID NO: 297152 - DNA, 15 bp, Homo sapiens
tgaatttagacaaat

SEQ ID NO: 297153 - DNA, 15 bp, Homo sapiens
atgaatttagacaaa

SEQ ID NO: 297154 - DNA, 15 bp, Homo sapiens
catgaatttagacaa

SEQ ID NO: 297155 - DNA, 15 bp, Homo sapiens
gcatgaatttagaca

SEQ ID NO: 297156 - DNA, 15 bp, Homo sapiens
tgcatgaatttagac

SEQ ID NO: 297157 - DNA, 15 bp, Homo sapiens
ctgcatgaatttaga

SEQ ID NO: 297158 - DNA, 15 bp, Homo sapiens
gctgcatgaatttag

SEQ ID NO: 297159 - DNA, 15 bp, Homo sapiens
agctgcatgaattta

SEQ ID NO: 297160 - DNA, 15 bp, Homo sapiens
gagctgcatgaattt

SEQ ID NO: 297161 - DNA, 15 bp, Homo sapiens
cgagctgcatgaatt

SEQ ID NO: 297162 - DNA, 15 bp, Homo sapiens
acgagctgcatgaat

SEQ ID NO: 297163 - DNA, 15 bp, Homo sapiens
tacgagctgcatgaa

SEQ ID NO: 297164 - DNA, 15 bp, Homo sapiens
ttacgagctgcatga

SEQ ID NO: 297165 - DNA, 15 bp, Homo sapiens
cttacgagctgcatg

SEQ ID NO: 297166 - DNA, 15 bp, Homo sapiens
acttacgagctgcat

SEQ ID NO: 297167 - DNA, 15 bp, Homo sapiens
cacttacgagctgca

SEQ ID NO: 297168 - DNA, 15 bp, Homo sapiens
tcacttacgagctgc

SEQ ID NO: 297169 - DNA, 15 bp, Homo sapiens
gtcacttacgagctg

SEQ ID NO: 297170 - DNA, 15 bp, Homo sapiens
tgtcacttacgagct

SEQ ID NO: 297171 - DNA, 15 bp, Homo sapiens
ctgtcacttacgagc

SEQ ID NO: 297172 - DNA, 15 bp, Homo sapiens
tctgtcacttacgag

SEQ ID NO: 297173 - DNA, 15 bp, Homo sapiens
ctctgtcacttacga

SEQ ID NO: 297174 - DNA, 15 bp, Homo sapiens
gctctgtcacttacg

SEQ ID NO: 297175 - DNA, 15 bp, Homo sapiens
agctctgtcacttac

SEQ ID NO: 297176 - DNA, 15 bp, Homo sapiens
cagctctgtcactta

SEQ ID NO: 297177 - DNA, 15 bp, Homo sapiens
ccagctctgtcactt

SEQ ID NO: 297178 - DNA, 15 bp, Homo sapiens
cccagctctgtcact

SEQ ID NO: 297179 - DNA, 15 bp, Homo sapiens
tcccagctctgtcac

SEQ ID NO: 297180 - DNA, 15 bp, Homo sapiens
atcccagctctgtca

SEQ ID NO: 297181 - DNA, 15 bp, Homo sapiens
aatcccagctctgtc

SEQ ID NO: 297182 - DNA, 15 bp, Homo sapiens
aaatcccagctctgt

SEQ ID NO: 297183 - DNA, 15 bp, Homo sapiens
caaatcccagctctg

SEQ ID NO: 297184 - DNA, 15 bp, Homo sapiens
tcaaatcccagctct

SEQ ID NO: 297185 - DNA, 15 bp, Homo sapiens
ttcaaatcccagctc

SEQ ID NO: 297186 - DNA, 15 bp, Homo sapiens
gttcaaatcccagct

SEQ ID NO: 297187 - DNA, 15 bp, Homo sapiens
ggttcaaatcccagc

SEQ ID NO: 297188 - DNA, 15 bp, Homo sapiens
aggttcaaatcccag

SEQ ID NO: 297189 - DNA, 15 bp, Homo sapiens
caggttcaaatccca

SEQ ID NO: 297190 - DNA, 15 bp, Homo sapiens
gcaggttcaaatccc

SEQ ID NO: 297191 - DNA, 15 bp, Homo sapiens
tgcaggttcaaatcc

SEQ ID NO: 297192 - DNA, 15 bp, Homo sapiens
atgcaggttcaaatc

SEQ ID NO: 297193 - DNA, 15 bp, Homo sapiens
gatgcaggttcaaat

SEQ ID NO: 297194 - DNA, 15 bp, Homo sapiens
agatgcaggttcaaa

SEQ ID NO: 297195 - DNA, 15 bp, Homo sapiens
cagatgcaggttcaa

SEQ ID NO: 297196 - DNA, 15 bp, Homo sapiens
acagatgcaggttca

SEQ ID NO: 297197 - DNA, 15 bp, Homo sapiens
gacagatgcaggttc

SEQ ID NO: 297198 - DNA, 15 bp, Homo sapiens
agacagatgcaggtt

SEQ ID NO: 297199 - DNA, 15 bp, Homo sapiens
cagacagatgcaggt

SEQ ID NO: 297200 - DNA, 15 bp, Homo sapiens
ccagacagatgcagg

SEQ ID NO: 297201 - DNA, 15 bp, Homo sapiens
gccagacagatgcag

SEQ ID NO: 297202 - DNA, 15 bp, Homo sapiens
agccagacagatgca

SEQ ID NO: 297203 - DNA, 15 bp, Homo sapiens
gagccagacagatgc

SEQ ID NO: 297204 - DNA, 15 bp, Homo sapiens
ggagccagacagatg

SEQ ID NO: 297205 - DNA, 15 bp, Homo sapiens
aggagccagacagat

SEQ ID NO: 297206 - DNA, 15 bp, Homo sapiens
taggagccagacaga

SEQ ID NO: 297207 - DNA, 15 bp, Homo sapiens
ttaggagccagacag

SEQ ID NO: 297208 - DNA, 15 bp, Homo sapiens
cttaggagccagaca

SEQ ID NO: 297209 - DNA, 15 bp, Homo sapiens
gcttaggagccagac

SEQ ID NO: 297210 - DNA, 15 bp, Homo sapiens
ggcttaggagccaga

SEQ ID NO: 297211 - DNA, 15 bp, Homo sapiens
aggcttaggagccag

SEQ ID NO: 297212 - DNA, 15 bp, Homo sapiens
caggcttaggagcca

SEQ ID NO: 297213 - DNA, 15 bp, Homo sapiens
ccaggcttaggagcc

SEQ ID NO: 297214 - DNA, 15 bp, Homo sapiens
cccaggcttaggagc

SEQ ID NO: 297215 - DNA, 15 bp, Homo sapiens
gcccaggcttaggag

SEQ ID NO: 297216 - DNA, 15 bp, Homo sapiens
agcccaggcttagga

SEQ ID NO: 297217 - DNA, 15 bp, Homo sapiens
cagcccaggcttagg

SEQ ID NO: 297218 - DNA, 15 bp, Homo sapiens
acagcccaggcttag

SEQ ID NO: 297219 - DNA, 15 bp, Homo sapiens
gacagcccaggctta

SEQ ID NO: 297220 - DNA, 15 bp, Homo sapiens
agacagcccaggctt

SEQ ID NO: 297221 - DNA, 15 bp, Homo sapiens
gagacagcccaggct

SEQ ID NO: 297222 - DNA, 15 bp, Homo sapiens
tgagacagcccaggc

SEQ ID NO: 297223 - DNA, 15 bp, Homo sapiens
gtgagacagcccagg

SEQ ID NO: 297224 - DNA, 15 bp, Homo sapiens
agtgagacagcccag

SEQ ID NO: 297225 - DNA, 15 bp, Homo sapiens
gagtgagacagccca

SEQ ID NO: 297226 - DNA, 15 bp, Homo sapiens
agagtgagacagccc

SEQ ID NO: 297227 - DNA, 15 bp, Homo sapiens
cagagtgagacagcc

SEQ ID NO: 297228 - DNA, 15 bp, Homo sapiens
gcagagtgagacagc

SEQ ID NO: 297229 - DNA, 15 bp, Homo sapiens
tgcagagtgagacag

SEQ ID NO: 297230 - DNA, 15 bp, Homo sapiens
atgcagagtgagaca

SEQ ID NO: 297231 - DNA, 15 bp, Homo sapiens
gatgcagagtgagac

SEQ ID NO: 297232 - DNA, 15 bp, Homo sapiens
tgatgcagagtgaga

SEQ ID NO: 297233 - DNA, 15 bp, Homo sapiens
atgatgcagagtgag

SEQ ID NO: 297234 - DNA, 15 bp, Homo sapiens
tatgatgcagagtga

SEQ ID NO: 297235 - DNA, 15 bp, Homo sapiens
ttatgatgcagagtg

SEQ ID NO: 297236 - DNA, 15 bp, Homo sapiens
tttatgatgcagagt

SEQ ID NO: 297237 - DNA, 15 bp, Homo sapiens
atttatgatgcagag

SEQ ID NO: 297238 - DNA, 15 bp, Homo sapiens
tatttatgatgcaga

SEQ ID NO: 297239 - DNA, 15 bp, Homo sapiens
atatttatgatgcag

SEQ ID NO: 297240 - DNA, 15 bp, Homo sapiens
aatatttatgatgca

SEQ ID NO: 297241 - DNA, 15 bp, Homo sapiens
gaatatttatgatgc

SEQ ID NO: 297242 - DNA, 15 bp, Homo sapiens
ggaatatttatgatg

SEQ ID NO: 297243 - DNA, 15 bp, Homo sapiens
aggaatatttatgat

SEQ ID NO: 297244 - DNA, 15 bp, Homo sapiens
aaggaatatttatga

SEQ ID NO: 297245 - DNA, 15 bp, Homo sapiens
caaggaatatttatg

SEQ ID NO: 297246 - DNA, 15 bp, Homo sapiens
acaaggaatatttat

SEQ ID NO: 297247 - DNA, 15 bp, Homo sapiens
cacaaggaatattta

SEQ ID NO: 297248 - DNA, 15 bp, Homo sapiens
tcacaaggaatattt

SEQ ID NO: 297249 - DNA, 15 bp, Homo sapiens
atcacaaggaatatt

SEQ ID NO: 297250 - DNA, 15 bp, Homo sapiens
catcacaaggaatat

SEQ ID NO: 297251 - DNA, 15 bp, Homo sapiens
gcatcacaaggaata

SEQ ID NO: 297252 - DNA, 15 bp, Homo sapiens
tgcatcacaaggaat

SEQ ID NO: 297253 - DNA, 15 bp, Homo sapiens
ctgcatcacaaggaa

SEQ ID NO: 297254 - DNA, 15 bp, Homo sapiens
actgcatcacaagga

SEQ ID NO: 297255 - DNA, 15 bp, Homo sapiens
cactgcatcacaagg

SEQ ID NO: 297256 - DNA, 15 bp, Homo sapiens
acactgcatcacaag

SEQ ID NO: 297257 - DNA, 15 bp, Homo sapiens
aacactgcatcacaa

SEQ ID NO: 297258 - DNA, 15 bp, Homo sapiens
aaacactgcatcaca

SEQ ID NO: 297259 - DNA, 15 bp, Homo sapiens
taaacactgcatcac

SEQ ID NO: 297260 - DNA, 15 bp, Homo sapiens
ctaaacactgcatca

SEQ ID NO: 297261 - DNA, 15 bp, Homo sapiens
cctaaacactgcatc

SEQ ID NO: 297262 - DNA, 15 bp, Homo sapiens
acctaaacactgcat

SEQ ID NO: 297263 - DNA, 15 bp, Homo sapiens
cacctaaacactgca

SEQ ID NO: 297264 - DNA, 15 bp, Homo sapiens
ccacctaaacactgc

SEQ ID NO: 297265 - DNA, 15 bp, Homo sapiens
cccacctaaacactg

SEQ ID NO: 297266 - DNA, 15 bp, Homo sapiens
acccacctaaacact

SEQ ID NO: 297267 - DNA, 15 bp, Homo sapiens
tacccacctaaacac

SEQ ID NO: 297268 - DNA, 15 bp, Homo sapiens
gtacccacctaaaca

SEQ ID NO: 297269 - DNA, 15 bp, Homo sapiens
tgtacccacctaaac

SEQ ID NO: 297270 - DNA, 15 bp, Homo sapiens
ctgtacccacctaaa

SEQ ID NO: 297271 - DNA, 15 bp, Homo sapiens
actgtacccacctaa

SEQ ID NO: 297272 - DNA, 15 bp, Homo sapiens
gactgtacccaccta

SEQ ID NO: 297273 - DNA, 15 bp, Homo sapiens
agactgtacccacct

SEQ ID NO: 297274 - DNA, 15 bp, Homo sapiens
tagactgtacccacc

SEQ ID NO: 297275 - DNA, 15 bp, Homo sapiens
ctagactgtacccac

SEQ ID NO: 297276 - DNA, 15 bp, Homo sapiens
actagactgtaccca

SEQ ID NO: 297277 - DNA, 15 bp, Homo sapiens
gactagactgtaccc

SEQ ID NO: 297278 - DNA, 15 bp, Homo sapiens
ggactagactgtacc

SEQ ID NO: 297279 - DNA, 15 bp, Homo sapiens
aggactagactgtac

SEQ ID NO: 297280 - DNA, 15 bp, Homo sapiens
aaggactagactgta

SEQ ID NO: 297281 - DNA, 15 bp, Homo sapiens
aaaggactagactgt

SEQ ID NO: 297282 - DNA, 15 bp, Homo sapiens
taaaggactagactg

SEQ ID NO: 297283 - DNA, 15 bp, Homo sapiens
ttaaaggactagact

SEQ ID NO: 297284 - DNA, 15 bp, Homo sapiens
attaaaggactagac

SEQ ID NO: 297285 - DNA, 15 bp, Homo sapiens
cattaaaggactaga

SEQ ID NO: 297286 - DNA, 15 bp, Homo sapiens
gcattaaaggactag

SEQ ID NO: 297287 - DNA, 15 bp, Homo sapiens
agcattaaaggacta

SEQ ID NO: 297288 - DNA, 15 bp, Homo sapiens
aagcattaaaggact

SEQ ID NO: 297289 - DNA, 15 bp, Homo sapiens
taagcattaaaggac

SEQ ID NO: 297290 - DNA, 15 bp, Homo sapiens
ttaagcattaaagga

SEQ ID NO: 297291 - DNA, 15 bp, Homo sapiens
attaagcattaaagg

SEQ ID NO: 297292 - DNA, 15 bp, Homo sapiens
cattaagcattaaag

SEQ ID NO: 297293 - DNA, 15 bp, Homo sapiens
gcattaagcattaaa

SEQ ID NO: 297294 - DNA, 15 bp, Homo sapiens
agcattaagcattaa

SEQ ID NO: 297295 - DNA, 15 bp, Homo sapiens
cagcattaagcatta

SEQ ID NO: 297296 - DNA, 15 bp, Homo sapiens
acagcattaagcatt

SEQ ID NO: 297297 - DNA, 15 bp, Homo sapiens
aacagcattaagcat

SEQ ID NO: 297298 - DNA, 15 bp, Homo sapiens
aaacagcattaagca

SEQ ID NO: 297299 - DNA, 15 bp, Homo sapiens
aaaacagcattaagc

SEQ ID NO: 297300 - DNA, 15 bp, Homo sapiens
taaaacagcattaag

SEQ ID NO: 297301 - DNA, 15 bp, Homo sapiens
ctaaaacagcattaa

SEQ ID NO: 297302 - DNA, 15 bp, Homo sapiens
cctaaaacagcatta

SEQ ID NO: 297303 - DNA, 15 bp, Homo sapiens
ccctaaaacagcatt

SEQ ID NO: 297304 - DNA, 15 bp, Homo sapiens
cccctaaaacagcat

SEQ ID NO: 297305 - DNA, 15 bp, Homo sapiens
ccccctaaaacagca

SEQ ID NO: 297306 - DNA, 15 bp, Homo sapiens
accccctaaaacagc

SEQ ID NO: 297307 - DNA, 15 bp, Homo sapiens
aaccccctaaaacag

SEQ ID NO: 297308 - DNA, 15 bp, Homo sapiens
caaccccctaaaaca

SEQ ID NO: 297309 - DNA, 15 bp, Homo sapiens
ccaaccccctaaaac

SEQ ID NO: 297310 - DNA, 15 bp, Homo sapiens
cccaaccccctaaaa

SEQ ID NO: 297311 - DNA, 15 bp, Homo sapiens
ccccaaccccctaaa

SEQ ID NO: 297312 - DNA, 15 bp, Homo sapiens
tccccaaccccctaa

SEQ ID NO: 297313 - DNA, 15 bp, Homo sapiens
ctccccaacccccta

SEQ ID NO: 297314 - DNA, 15 bp, Homo sapiens
tctccccaaccccct

SEQ ID NO: 297315 - DNA, 15 bp, Homo sapiens
ttctccccaaccccc

SEQ ID NO: 297316 - DNA, 15 bp, Homo sapiens
gttctccccaacccc

SEQ ID NO: 297317 - DNA, 15 bp, Homo sapiens
tgttctccccaaccc

SEQ ID NO: 297318 - DNA, 15 bp, Homo sapiens
atgttctccccaacc

SEQ ID NO: 297319 - DNA, 15 bp, Homo sapiens
tatgttctccccaac

SEQ ID NO: 297320 - DNA, 15 bp, Homo sapiens
ctatgttctccccaa

SEQ ID NO: 297321 - DNA, 15 bp, Homo sapiens
tctatgttctcccca

SEQ ID NO: 297322 - DNA, 15 bp, Homo sapiens
gtctatgttctcccc

SEQ ID NO: 297323 - DNA, 15 bp, Homo sapiens
agtctatgttctccc

SEQ ID NO: 297324 - DNA, 15 bp, Homo sapiens
aagtctatgttctcc

SEQ ID NO: 297325 - DNA, 15 bp, Homo sapiens
aaagtctatgttctc

SEQ ID NO: 297326 - DNA, 15 bp, Homo sapiens
gaaagtctatgttct

SEQ ID NO: 297327 - DNA, 15 bp, Homo sapiens
agaaagtctatgttc

SEQ ID NO: 297328 - DNA, 15 bp, Homo sapiens
aagaaagtctatgtt

SEQ ID NO: 297329 - DNA, 15 bp, Homo sapiens
caagaaagtctatgt

SEQ ID NO: 297330 - DNA, 15 bp, Homo sapiens
tcaagaaagtctatg

SEQ ID NO: 297331 - DNA, 15 bp, Homo sapiens
ctcaagaaagtctat

SEQ ID NO: 297332 - DNA, 15 bp, Homo sapiens
tctcaagaaagtcta

SEQ ID NO: 297333 - DNA, 15 bp, Homo sapiens
ttctcaagaaagtct

SEQ ID NO: 297334 - DNA, 15 bp, Homo sapiens
attctcaagaaagtc

SEQ ID NO: 297335 - DNA, 15 bp, Homo sapiens
aattctcaagaaagt

SEQ ID NO: 297336 - DNA, 15 bp, Homo sapiens
aaattctcaagaaag

SEQ ID NO: 297337 - DNA, 15 bp, Homo sapiens
caaattctcaagaaa

SEQ ID NO: 297338 - DNA, 15 bp, Homo sapiens
tcaaattctcaagaa

SEQ ID NO: 297339 - DNA, 15 bp, Homo sapiens
atcaaattctcaaga

SEQ ID NO: 297340 - DNA, 15 bp, Homo sapiens
catcaaattctcaag

SEQ ID NO: 297341 - DNA, 15 bp, Homo sapiens
tcatcaaattctcaa

SEQ ID NO: 297342 - DNA, 15 bp, Homo sapiens
ttcatcaaattctca

SEQ ID NO: 297343 - DNA, 15 bp, Homo sapiens
tttcatcaaattctc

SEQ ID NO: 297344 - DNA, 15 bp, Homo sapiens
ttttcatcaaattct

SEQ ID NO: 297345 - DNA, 15 bp, Homo sapiens
attttcatcaaattc

SEQ ID NO: 297346 - DNA, 15 bp, Homo sapiens
aattttcatcaaatt

SEQ ID NO: 297347 - DNA, 15 bp, Homo sapiens
caattttcatcaaat

SEQ ID NO: 297348 - DNA, 15 bp, Homo sapiens
ccaattttcatcaaa

SEQ ID NO: 297349 - DNA, 15 bp, Homo sapiens
tccaattttcatcaa

SEQ ID NO: 297350 - DNA, 15 bp, Homo sapiens
gtccaattttcatca

SEQ ID NO: 297351 - DNA, 15 bp, Homo sapiens
ggtccaattttcatc

SEQ ID NO: 297352 - DNA, 15 bp, Homo sapiens
aggtccaattttcat

SEQ ID NO: 297353 - DNA, 15 bp, Homo sapiens
gaggtccaattttca

SEQ ID NO: 297354 - DNA, 15 bp, Homo sapiens
agaggtccaattttc

SEQ ID NO: 297355 - DNA, 15 bp, Homo sapiens
aagaggtccaatttt

SEQ ID NO: 297356 - DNA, 15 bp, Homo sapiens
caagaggtccaattt

SEQ ID NO: 297357 - DNA, 15 bp, Homo sapiens
ccaagaggtccaatt

SEQ ID NO: 297358 - DNA, 15 bp, Homo sapiens
cccaagaggtccaat

SEQ ID NO: 297359 - DNA, 15 bp, Homo sapiens
acccaagaggtccaa

SEQ ID NO: 297360 - DNA, 15 bp, Homo sapiens
cacccaagaggtcca

SEQ ID NO: 297361 - DNA, 15 bp, Homo sapiens
ccacccaagaggtcc

SEQ ID NO: 297362 - DNA, 15 bp, Homo sapiens
cccacccaagaggtc

SEQ ID NO: 297363 - DNA, 15 bp, Homo sapiens
gcccacccaagaggt

SEQ ID NO: 297364 - DNA, 15 bp, Homo sapiens
tgcccacccaagagg

SEQ ID NO: 297365 - DNA, 15 bp, Homo sapiens
ctgcccacccaagag

SEQ ID NO: 297366 - DNA, 15 bp, Homo sapiens
cctgcccacccaaga

SEQ ID NO: 297367 - DNA, 15 bp, Homo sapiens
ccctgcccacccaag

SEQ ID NO: 297368 - DNA, 15 bp, Homo sapiens
tccctgcccacccaa

SEQ ID NO: 297369 - DNA, 15 bp, Homo sapiens
ctccctgcccaccca

SEQ ID NO: 297370 - DNA, 15 bp, Homo sapiens
gctccctgcccaccc

SEQ ID NO: 297371 - DNA, 15 bp, Homo sapiens
ggctccctgcccacc

SEQ ID NO: 297372 - DNA, 15 bp, Homo sapiens
tggctccctgcccac

SEQ ID NO: 297373 - DNA, 15 bp, Homo sapiens
ctggctccctgccca

SEQ ID NO: 297374 - DNA, 15 bp, Homo sapiens
cctggctccctgccc

SEQ ID NO: 297375 - DNA, 15 bp, Homo sapiens
tcctggctccctgcc

SEQ ID NO: 297376 - DNA, 15 bp, Homo sapiens
ttcctggctccctgc

SEQ ID NO: 297377 - DNA, 15 bp, Homo sapiens
cttcctggctccctg

SEQ ID NO: 297378 - DNA, 15 bp, Homo sapiens
acttcctggctccct

SEQ ID NO: 297379 - DNA, 15 bp, Homo sapiens
tacttcctggctccc

SEQ ID NO: 297380 - DNA, 15 bp, Homo sapiens
gtacttcctggctcc

SEQ ID NO: 297381 - DNA, 15 bp, Homo sapiens
ggtacttcctggctc

SEQ ID NO: 297382 - DNA, 15 bp, Homo sapiens
gggtacttcctggct

SEQ ID NO: 297383 - DNA, 15 bp, Homo sapiens
agggtacttcctggc

SEQ ID NO: 297384 - DNA, 15 bp, Homo sapiens
tagggtacttcctgg

SEQ ID NO: 297385 - DNA, 15 bp, Homo sapiens
gtagggtacttcctg

SEQ ID NO: 297386 - DNA, 15 bp, Homo sapiens
ggtagggtacttcct

SEQ ID NO: 297387 - DNA, 15 bp, Homo sapiens
gggtagggtacttcc

SEQ ID NO: 297388 - DNA, 15 bp, Homo sapiens
agggtagggtacttc

SEQ ID NO: 297389 - DNA, 15 bp, Homo sapiens
gagggtagggtactt

SEQ ID NO: 297390 - DNA, 15 bp, Homo sapiens
tgagggtagggtact

SEQ ID NO: 297391 - DNA, 15 bp, Homo sapiens
gtgagggtagggtac

SEQ ID NO: 297392 - DNA, 15 bp, Homo sapiens
tgtgagggtagggta

SEQ ID NO: 297393 - DNA, 15 bp, Homo sapiens
ttgtgagggtagggt

SEQ ID NO: 297394 - DNA, 15 bp, Homo sapiens
attgtgagggtaggg

SEQ ID NO: 297395 - DNA, 15 bp, Homo sapiens
aattgtgagggtagg

SEQ ID NO: 297396 - DNA, 15 bp, Homo sapiens
aaattgtgagggtag

SEQ ID NO: 297397 - DNA, 15 bp, Homo sapiens
aaaattgtgagggta

SEQ ID NO: 297398 - DNA, 15 bp, Homo sapiens
aaaaattgtgagggt

SEQ ID NO: 297399 - DNA, 15 bp, Homo sapiens
aaaaaattgtgaggg

SEQ ID NO: 297400 - DNA, 15 bp, Homo sapiens
caaaaaattgtgagg

SEQ ID NO: 297401 - DNA, 15 bp, Homo sapiens
acaaaaaattgtgag

SEQ ID NO: 297402 - DNA, 15 bp, Homo sapiens
aacaaaaaattgtga

SEQ ID NO: 297403 - DNA, 15 bp, Homo sapiens
aaacaaaaaattgtg

SEQ ID NO: 297404 - DNA, 15 bp, Homo sapiens
caaacaaaaaattgt

SEQ ID NO: 297405 - DNA, 15 bp, Homo sapiens
acaaacaaaaaattg

SEQ ID NO: 297406 - DNA, 15 bp, Homo sapiens
aacaaacaaaaaatt

SEQ ID NO: 297407 - DNA, 15 bp, Homo sapiens
aaacaaacaaaaaat

SEQ ID NO: 297408 - DNA, 15 bp, Homo sapiens
aaaacaaacaaaaaa

SEQ ID NO: 297409 - DNA, 15 bp, Homo sapiens
taaaaacaaacaaaa

SEQ ID NO: 297410 - DNA, 15 bp, Homo sapiens
ttaaaaacaaacaaa

SEQ ID NO: 297411 - DNA, 15 bp, Homo sapiens
attaaaaacaaacaa

SEQ ID NO: 297412 - DNA, 15 bp, Homo sapiens
aattaaaaacaaaca

SEQ ID NO: 297413 - DNA, 15 bp, Homo sapiens
aaattaaaaacaaac

SEQ ID NO: 297414 - DNA, 15 bp, Homo sapiens
aaaattaaaaacaaa

SEQ ID NO: 297415 - DNA, 15 bp, Homo sapiens
aaaaattaaaaacaa

SEQ ID NO: 297416 - DNA, 15 bp, Homo sapiens
taaaaattaaaaaca

SEQ ID NO: 297417 - DNA, 15 bp, Homo sapiens
ttaaaaattaaaaac

SEQ ID NO: 297418 - DNA, 15 bp, Homo sapiens
attaaaaattaaaaa

SEQ ID NO: 297419 - DNA, 15 bp, Homo sapiens
aattaaaaattaaaa

SEQ ID NO: 297420 - DNA, 15 bp, Homo sapiens
aaattaaaaattaaa

SEQ ID NO: 297421 - DNA, 15 bp, Homo sapiens
aaaattaaaaattaa

SEQ ID NO: 297422 - DNA, 15 bp, Homo sapiens
aaaaattaaaaatta

SEQ ID NO: 297423 - DNA, 15 bp, Homo sapiens
caaaaattaaaaatt

SEQ ID NO: 297424 - DNA, 15 bp, Homo sapiens
gcaaaaattaaaaat

SEQ ID NO: 297425 - DNA, 15 bp, Homo sapiens
cgcaaaaattaaaaa

SEQ ID NO: 297426 - DNA, 15 bp, Homo sapiens
ccgcaaaaattaaaa

SEQ ID NO: 297427 - DNA, 15 bp, Homo sapiens
cccgcaaaaattaaa

SEQ ID NO: 297428 - DNA, 15 bp, Homo sapiens
acccgcaaaaattaa

SEQ ID NO: 297429 - DNA, 15 bp, Homo sapiens
tacccgcaaaaatta

SEQ ID NO: 297430 - DNA, 15 bp, Homo sapiens
atacccgcaaaaatt

SEQ ID NO: 297431 - DNA, 15 bp, Homo sapiens
tatacccgcaaaaat

SEQ ID NO: 297432 - DNA, 15 bp, Homo sapiens
atatacccgcaaaaa

SEQ ID NO: 297433 - DNA, 15 bp, Homo sapiens
tatatacccgcaaaa

SEQ ID NO: 297434 - DNA, 15 bp, Homo sapiens
ctatatacccgcaaa

SEQ ID NO: 297435 - DNA, 15 bp, Homo sapiens
gctatatacccgcaa

SEQ ID NO: 297436 - DNA, 15 bp, Homo sapiens
tgctatatacccgca

SEQ ID NO: 297437 - DNA, 15 bp, Homo sapiens
ttgctatatacccgc

SEQ ID NO: 297438 - DNA, 15 bp, Homo sapiens
cttgctatatacccg

SEQ ID NO: 297439 - DNA, 15 bp, Homo sapiens
acttgctatataccc

SEQ ID NO: 297440 - DNA, 15 bp, Homo sapiens
cacttgctatatacc

SEQ ID NO: 297441 - DNA, 15 bp, Homo sapiens
acacttgctatatac

SEQ ID NO: 297442 - DNA, 15 bp, Homo sapiens
tacacttgctatata

SEQ ID NO: 297443 - DNA, 15 bp, Homo sapiens
atacacttgctatat

SEQ ID NO: 297444 - DNA, 15 bp, Homo sapiens
tatacacttgctata

SEQ ID NO: 297445 - DNA, 15 bp, Homo sapiens
atatacacttgctat

SEQ ID NO: 297446 - DNA, 15 bp, Homo sapiens
tatatacacttgcta

SEQ ID NO: 297447 - DNA, 15 bp, Homo sapiens
atatatacacttgct

SEQ ID NO: 297448 - DNA, 15 bp, Homo sapiens
gatatatacacttgc

SEQ ID NO: 297449 - DNA, 15 bp, Homo sapiens
agatatatacacttg

SEQ ID NO: 297450 - DNA, 15 bp, Homo sapiens
cagatatatacactt

SEQ ID NO: 297451 - DNA, 15 bp, Homo sapiens
acagatatatacact

SEQ ID NO: 297452 - DNA, 15 bp, Homo sapiens
cacagatatatacac

SEQ ID NO: 297453 - DNA, 15 bp, Homo sapiens
ccacagatatataca

SEQ ID NO: 297454 - DNA, 15 bp, Homo sapiens
gccacagatatatac

SEQ ID NO: 297455 - DNA, 15 bp, Homo sapiens
tgccacagatatata

SEQ ID NO: 297456 - DNA, 15 bp, Homo sapiens
atgccacagatatat

SEQ ID NO: 297457 - DNA, 15 bp, Homo sapiens
tatgccacagatata

SEQ ID NO: 297458 - DNA, 15 bp, Homo sapiens
gtatgccacagatat

SEQ ID NO: 297459 - DNA, 15 bp, Homo sapiens
tgtatgccacagata

SEQ ID NO: 297460 - DNA, 15 bp, Homo sapiens
atgtatgccacagat

SEQ ID NO: 297461 - DNA, 15 bp, Homo sapiens
catgtatgccacaga

SEQ ID NO: 297462 - DNA, 15 bp, Homo sapiens
tcatgtatgccacag

SEQ ID NO: 297463 - DNA, 15 bp, Homo sapiens
gtcatgtatgccaca

SEQ ID NO: 297464 - DNA, 15 bp, Homo sapiens
ggtcatgtatgccac

SEQ ID NO: 297465 - DNA, 15 bp, Homo sapiens
aggtcatgtatgcca

SEQ ID NO: 297466 - DNA, 15 bp, Homo sapiens
caggtcatgtatgcc

SEQ ID NO: 297467 - DNA, 15 bp, Homo sapiens
acaggtcatgtatgc

SEQ ID NO: 297468 - DNA, 15 bp, Homo sapiens
aacaggtcatgtatg

SEQ ID NO: 297469 - DNA, 15 bp, Homo sapiens
aaacaggtcatgtat

SEQ ID NO: 297470 - DNA, 15 bp, Homo sapiens
aaaacaggtcatgta

SEQ ID NO: 297471 - DNA, 15 bp, Homo sapiens
caaaacaggtcatgt

SEQ ID NO: 297472 - DNA, 15 bp, Homo sapiens
tcaaaacaggtcatg

SEQ ID NO: 297473 - DNA, 15 bp, Homo sapiens
atcaaaacaggtcat

SEQ ID NO: 297474 - DNA, 15 bp, Homo sapiens
tatcaaaacaggtca

SEQ ID NO: 297475 - DNA, 15 bp, Homo sapiens
gtatcaaaacaggtc

SEQ ID NO: 297476 - DNA, 15 bp, Homo sapiens
tgtatcaaaacaggt

SEQ ID NO: 297477 - DNA, 15 bp, Homo sapiens
ctgtatcaaaacagg

SEQ ID NO: 297478 - DNA, 15 bp, Homo sapiens
cctgtatcaaaacag

SEQ ID NO: 297479 - DNA, 15 bp, Homo sapiens
gtgcctgtatcaaaa

SEQ ID NO: 297480 - DNA, 15 bp, Homo sapiens
agtgcctgtatcaaa

SEQ ID NO: 297481 - DNA, 15 bp, Homo sapiens
aagtgcctgtatcaa

SEQ ID NO: 297482 - DNA, 15 bp, Homo sapiens
taagtgcctgtatca

SEQ ID NO: 297483 - DNA, 15 bp, Homo sapiens
ataagtgcctgtatc

SEQ ID NO: 297484 - DNA, 15 bp, Homo sapiens
aataagtgcctgtat

SEQ ID NO: 297485 - DNA, 15 bp, Homo sapiens
taataagtgcctgta

SEQ ID NO: 297486 - DNA, 15 bp, Homo sapiens
ataataagtgcctgt

SEQ ID NO: 297487 - DNA, 15 bp, Homo sapiens
cataataagtgcctg

SEQ ID NO: 297488 - DNA, 15 bp, Homo sapiens
acataataagtgcct

SEQ ID NO: 297489 - DNA, 15 bp, Homo sapiens
tacataataagtgcc

SEQ ID NO: 297490 - DNA, 15 bp, Homo sapiens
ttacataataagtgc

SEQ ID NO: 297491 - DNA, 15 bp, Homo sapiens
attacataataagtg

SEQ ID NO: 297492 - DNA, 15 bp, Homo sapiens
tattacataataagt

SEQ ID NO: 297493 - DNA, 15 bp, Homo sapiens
ttattacataataag

SEQ ID NO: 297494 - DNA, 15 bp, Homo sapiens
attattacataataa

SEQ ID NO: 297495 - DNA, 15 bp, Homo sapiens
gattattacataata

SEQ ID NO: 297496 - DNA, 15 bp, Homo sapiens
tgattattacataat

SEQ ID NO: 297497 - DNA, 15 bp, Homo sapiens
gtgattattacataa

SEQ ID NO: 297498 - DNA, 15 bp, Homo sapiens
tgtgattattacata

SEQ ID NO: 297499 - DNA, 15 bp, Homo sapiens
atgtgattattacat

SEQ ID NO: 297500 - DNA, 15 bp, Homo sapiens
gatgtgattattaca

SEQ ID NO: 297501 - DNA, 15 bp, Homo sapiens
tgatgtgattattac

SEQ ID NO: 297502 - DNA, 15 bp, Homo sapiens
atgatgtgattatta

SEQ ID NO: 297503 - DNA, 15 bp, Homo sapiens
catgatgtgattatt

SEQ ID NO: 297504 - DNA, 15 bp, Homo sapiens
ccatgatgtgattat

SEQ ID NO: 297505 - DNA, 15 bp, Homo sapiens
tccatgatgtgatta

SEQ ID NO: 297506 - DNA, 15 bp, Homo sapiens
ctccatgatgtgatt

SEQ ID NO: 297507 - DNA, 15 bp, Homo sapiens
tctccatgatgtgat

SEQ ID NO: 297508 - DNA, 15 bp, Homo sapiens
ttctccatgatgtga

SEQ ID NO: 297509 - DNA, 15 bp, Homo sapiens
attctccatgatgtg

SEQ ID NO: 297510 - DNA, 15 bp, Homo sapiens
cattctccatgatgt

SEQ ID NO: 297511 - DNA, 15 bp, Homo sapiens
ccattctccatgatg

SEQ ID NO: 297512 - DNA, 15 bp, Homo sapiens
cccattctccatgat

SEQ ID NO: 297513 - DNA, 15 bp, Homo sapiens
ccccattctccatga

SEQ ID NO: 297514 - DNA, 15 bp, Homo sapiens
accccattctccatg

SEQ ID NO: 297515 - DNA, 15 bp, Homo sapiens
taccccattctccat

SEQ ID NO: 297516 - DNA, 15 bp, Homo sapiens
ataccccattctcca

SEQ ID NO: 297517 - DNA, 15 bp, Homo sapiens
gataccccattctcc

SEQ ID NO: 297518 - DNA, 15 bp, Homo sapiens
ggataccccattctc

SEQ ID NO: 297519 - DNA, 15 bp, Homo sapiens
tggataccccattct

SEQ ID NO: 297520 - DNA, 15 bp, Homo sapiens
atggataccccattc

SEQ ID NO: 297521 - DNA, 15 bp, Homo sapiens
gatggataccccatt

SEQ ID NO: 297522 - DNA, 15 bp, Homo sapiens
ggatggataccccat

SEQ ID NO: 297523 - DNA, 15 bp, Homo sapiens
gggatggatacccca

SEQ ID NO: 297524 - DNA, 15 bp, Homo sapiens
ggggatggatacccc

SEQ ID NO: 297525 - DNA, 15 bp, Homo sapiens
aggggatggataccc

SEQ ID NO: 297526 - DNA, 15 bp, Homo sapiens
taggggatggatacc

SEQ ID NO: 297527 - DNA, 15 bp, Homo sapiens
ctaggggatggatac

SEQ ID NO: 297528 - DNA, 15 bp, Homo sapiens
tctaggggatggata

SEQ ID NO: 297529 - DNA, 15 bp, Homo sapiens
ctctaggggatggat

SEQ ID NO: 297530 - DNA, 15 bp, Homo sapiens
gctctaggggatgga

SEQ ID NO: 297531 - DNA, 15 bp, Homo sapiens
tgctctaggggatgg

SEQ ID NO: 297532 - DNA, 15 bp, Homo sapiens
gtgctctaggggatg

SEQ ID NO: 297533 - DNA, 15 bp, Homo sapiens
agtgctctaggggat

SEQ ID NO: 297534 - DNA, 15 bp, Homo sapiens
aagtgctctagggga

SEQ ID NO: 297535 - DNA, 15 bp, Homo sapiens
taagtgctctagggg

SEQ ID NO: 297536 - DNA, 15 bp, Homo sapiens
ataagtgctctaggg

SEQ ID NO: 297537 - DNA, 15 bp, Homo sapiens
gataagtgctctagg

SEQ ID NO: 297538 - DNA, 15 bp, Homo sapiens
cgataagtgctctag

SEQ ID NO: 297539 - DNA, 15 bp, Homo sapiens
acgataagtgctcta

SEQ ID NO: 297540 - DNA, 15 bp, Homo sapiens
aacgataagtgctct

SEQ ID NO: 297541 - DNA, 15 bp, Homo sapiens
aaacgataagtgctc

SEQ ID NO: 297542 - DNA, 15 bp, Homo sapiens
caaacgataagtgct

SEQ ID NO: 297543 - DNA, 15 bp, Homo sapiens
acaaacgataagtgc

SEQ ID NO: 297544 - DNA, 15 bp, Homo sapiens
cacaaacgataagtg

SEQ ID NO: 297545 - DNA, 15 bp, Homo sapiens
acacaaacgataagt

SEQ ID NO: 297546 - DNA, 15 bp, Homo sapiens
aacacaaacgataag

SEQ ID NO: 297547 - DNA, 15 bp, Homo sapiens
caacacaaacgataa

SEQ ID NO: 297548 - DNA, 15 bp, Homo sapiens
gcaacacaaacgata

SEQ ID NO: 297549 - DNA, 15 bp, Homo sapiens
tgcaacacaaacgat

SEQ ID NO: 297550 - DNA, 15 bp, Homo sapiens
ttgcaacacaaacga

SEQ ID NO: 297551 - DNA, 15 bp, Homo sapiens
tttgcaacacaaacg

SEQ ID NO: 297552 - DNA, 15 bp, Homo sapiens
gtttgcaacacaaac

SEQ ID NO: 297553 - DNA, 15 bp, Homo sapiens
tgtttgcaacacaaa

SEQ ID NO: 297554 - DNA, 15 bp, Homo sapiens
ttgtttgcaacacaa

SEQ ID NO: 297555 - DNA, 15 bp, Homo sapiens
attgtttgcaacaca

SEQ ID NO: 297556 - DNA, 15 bp, Homo sapiens
gattgtttgcaacac

SEQ ID NO: 297557 - DNA, 15 bp, Homo sapiens
ggattgtttgcaaca

SEQ ID NO: 297558 - DNA, 15 bp, Homo sapiens
tggattgtttgcaac

SEQ ID NO: 297559 - DNA, 15 bp, Homo sapiens
ttggattgtttgcaa

SEQ ID NO: 297560 - DNA, 15 bp, Homo sapiens
attggattgtttgca

SEQ ID NO: 297561 - DNA, 15 bp, Homo sapiens
aattggattgtttgc

SEQ ID NO: 297562 - DNA, 15 bp, Homo sapiens
taattggattgtttg

SEQ ID NO: 297563 - DNA, 15 bp, Homo sapiens
gtaattggattgttt

SEQ ID NO: 297564 - DNA, 15 bp, Homo sapiens
tgtaattggattgtt

SEQ ID NO: 297565 - DNA, 15 bp, Homo sapiens
gtgtaattggattgt

SEQ ID NO: 297566 - DNA, 15 bp, Homo sapiens
agtgtaattggattg

SEQ ID NO: 297567 - DNA, 15 bp, Homo sapiens
gagtgtaattggatt

SEQ ID NO: 297568 - DNA, 15 bp, Homo sapiens
agagtgtaattggat

SEQ ID NO: 297569 - DNA, 15 bp, Homo sapiens
aagagtgtaattgga

SEQ ID NO: 297570 - DNA, 15 bp, Homo sapiens
caagagtgtaattgg

SEQ ID NO: 297571 - DNA, 15 bp, Homo sapiens
gcaagagtgtaattg

SEQ ID NO: 297572 - DNA, 15 bp, Homo sapiens
tgcaagagtgtaatt

SEQ ID NO: 297573 - DNA, 15 bp, Homo sapiens
ctgcaagagtgtaat

SEQ ID NO: 297574 - DNA, 15 bp, Homo sapiens
actgcaagagtgtaa

SEQ ID NO: 297575 - DNA, 15 bp, Homo sapiens
aactgcaagagtgta

SEQ ID NO: 297576 - DNA, 15 bp, Homo sapiens
taactgcaagagtgt

SEQ ID NO: 297577 - DNA, 15 bp, Homo sapiens
ttaactgcaagagtg

SEQ ID NO: 297578 - DNA, 15 bp, Homo sapiens
attaactgcaagagt

SEQ ID NO: 297579 - DNA, 15 bp, Homo sapiens
aattaactgcaagag

SEQ ID NO: 297580 - DNA, 15 bp, Homo sapiens
aaattaactgcaaga

SEQ ID NO: 297581 - DNA, 15 bp, Homo sapiens
aaaattaactgcaag

SEQ ID NO: 297582 - DNA, 15 bp, Homo sapiens
taaaattaactgcaa

SEQ ID NO: 297583 - DNA, 15 bp, Homo sapiens
ttaaaattaactgca

SEQ ID NO: 297584 - DNA, 15 bp, Homo sapiens
tttaaaattaactgc

SEQ ID NO: 297585 - DNA, 15 bp, Homo sapiens
ttttaaaattaactg

SEQ ID NO: 297586 - DNA, 15 bp, Homo sapiens
cttttaaaattaact

SEQ ID NO: 297587 - DNA, 15 bp, Homo sapiens
ccttttaaaattaac

SEQ ID NO: 297588 - DNA, 15 bp, Homo sapiens
accttttaaaattaa

SEQ ID NO: 297589 - DNA, 15 bp, Homo sapiens
taccttttaaaatta

SEQ ID NO: 297590 - DNA, 15 bp, Homo sapiens
gtaccttttaaaatt

SEQ ID NO: 297591 - DNA, 15 bp, Homo sapiens
tgtaccttttaaaat

SEQ ID NO: 297592 - DNA, 15 bp, Homo sapiens
ttgtaccttttaaaa

SEQ ID NO: 297593 - DNA, 15 bp, Homo sapiens
attgtaccttttaaa

SEQ ID NO: 297594 - DNA, 15 bp, Homo sapiens
aattgtaccttttaa

SEQ ID NO: 297595 - DNA, 15 bp, Homo sapiens
taattgtacctttta

SEQ ID NO: 297596 - DNA, 15 bp, Homo sapiens
ttaattgtacctttt

SEQ ID NO: 297597 - DNA, 15 bp, Homo sapiens
cttaattgtaccttt

SEQ ID NO: 297598 - DNA, 15 bp, Homo sapiens
acttaattgtacctt

SEQ ID NO: 297599 - DNA, 15 bp, Homo sapiens
aacttaattgtacct

SEQ ID NO: 297600 - DNA, 15 bp, Homo sapiens
taacttaattgtacc

SEQ ID NO: 297601 - DNA, 15 bp, Homo sapiens
gtaacttaattgtac

SEQ ID NO: 297602 - DNA, 15 bp, Homo sapiens
agtaacttaattgta

SEQ ID NO: 297603 - DNA, 15 bp, Homo sapiens
tagtaacttaattgt

SEQ ID NO: 297604 - DNA, 15 bp, Homo sapiens
atagtaacttaattg

SEQ ID NO: 297605 - DNA, 15 bp, Homo sapiens
aatagtaacttaatt

SEQ ID NO: 297606 - DNA, 15 bp, Homo sapiens
caatagtaacttaat

SEQ ID NO: 297607 - DNA, 15 bp, Homo sapiens
tcaatagtaacttaa

SEQ ID NO: 297608 - DNA, 15 bp, Homo sapiens
gtcaatagtaactta

SEQ ID NO: 297609 - DNA, 15 bp, Homo sapiens
agtcaatagtaactt

SEQ ID NO: 297610 - DNA, 15 bp, Homo sapiens
tagtcaatagtaact

SEQ ID NO: 297611 - DNA, 15 bp, Homo sapiens
atagtcaatagtaac

SEQ ID NO: 297612 - DNA, 15 bp, Homo sapiens
tatagtcaatagtaa

SEQ ID NO: 297613 - DNA, 15 bp, Homo sapiens
ctatagtcaatagta

SEQ ID NO: 297614 - DNA, 15 bp, Homo sapiens
actatagtcaatagt

SEQ ID NO: 297615 - DNA, 15 bp, Homo sapiens
gactatagtcaatag

SEQ ID NO: 297616 - DNA, 15 bp, Homo sapiens
gagggtgactatagt

SEQ ID NO: 297617 - DNA, 15 bp, Homo sapiens
agagggtgactatag

SEQ ID NO: 297618 - DNA, 15 bp, Homo sapiens
aagagggtgactata

SEQ ID NO: 297619 - DNA, 15 bp, Homo sapiens
caagagggtgactat

SEQ ID NO: 297620 - DNA, 15 bp, Homo sapiens
acaagagggtgacta

SEQ ID NO: 297621 - DNA, 15 bp, Homo sapiens
cacaagagggtgact

SEQ ID NO: 297622 - DNA, 15 bp, Homo sapiens
gcacaagagggtgac

SEQ ID NO: 297623 - DNA, 15 bp, Homo sapiens
agcacaagagggtga

SEQ ID NO: 297624 - DNA, 15 bp, Homo sapiens
tagcacaagagggtg

SEQ ID NO: 297625 - DNA, 15 bp, Homo sapiens
atagcacaagagggt

SEQ ID NO: 297626 - DNA, 15 bp, Homo sapiens
gatagcacaagaggg

SEQ ID NO: 297627 - DNA, 15 bp, Homo sapiens
tgatagcacaagagg

SEQ ID NO: 297628 - DNA, 15 bp, Homo sapiens
ttgatagcacaagag

SEQ ID NO: 297629 - DNA, 15 bp, Homo sapiens
tttgatagcacaaga

SEQ ID NO: 297630 - DNA, 15 bp, Homo sapiens
atttgatagcacaag

SEQ ID NO: 297631 - DNA, 15 bp, Homo sapiens
tatttgatagcacaa

SEQ ID NO: 297632 - DNA, 15 bp, Homo sapiens
ctatttgatagcaca

SEQ ID NO: 297633 - DNA, 15 bp, Homo sapiens
actatttgatagcac

SEQ ID NO: 297634 - DNA, 15 bp, Homo sapiens
tactatttgatagca

SEQ ID NO: 297635 - DNA, 15 bp, Homo sapiens
ctactatttgatagc

SEQ ID NO: 297636 - DNA, 15 bp, Homo sapiens
cctactatttgatag

SEQ ID NO: 297637 - DNA, 15 bp, Homo sapiens
acctactatttgata

SEQ ID NO: 297638 - DNA, 15 bp, Homo sapiens
gacctactatttgat

SEQ ID NO: 297639 - DNA, 15 bp, Homo sapiens
agacctactatttga

SEQ ID NO: 297640 - DNA, 15 bp, Homo sapiens
aagacctactatttg

SEQ ID NO: 297641 - DNA, 15 bp, Homo sapiens
taagacctactattt

SEQ ID NO: 297642 - DNA, 15 bp, Homo sapiens
ataagacctactatt

SEQ ID NO: 297643 - DNA, 15 bp, Homo sapiens
aataagacctactat

SEQ ID NO: 297644 - DNA, 15 bp, Homo sapiens
gaataagacctacta

SEQ ID NO: 297645 - DNA, 15 bp, Homo sapiens
tgaataagacctact

SEQ ID NO: 297646 - DNA, 15 bp, Homo sapiens
atgaataagacctac

SEQ ID NO: 297647 - DNA, 15 bp, Homo sapiens
aatgaataagaccta

SEQ ID NO: 297648 - DNA, 15 bp, Homo sapiens
gaatgaataagacct

SEQ ID NO: 297649 - DNA, 15 bp, Homo sapiens
agaatgaataagacc

SEQ ID NO: 297650 - DNA, 15 bp, Homo sapiens
aagaatgaataagac

SEQ ID NO: 297651 - DNA, 15 bp, Homo sapiens
aaagaatgaataaga

SEQ ID NO: 297652 - DNA, 15 bp, Homo sapiens
gaaagaatgaataag

SEQ ID NO: 297653 - DNA, 15 bp, Homo sapiens
cagaaagaatgaata

SEQ ID NO: 297654 - DNA, 15 bp, Homo sapiens
tcagaaagaatgaat

SEQ ID NO: 297655 - DNA, 15 bp, Homo sapiens
atcagaaagaatgaa

SEQ ID NO: 297656 - DNA, 15 bp, Homo sapiens
aatcagaaagaatga

SEQ ID NO: 297657 - DNA, 15 bp, Homo sapiens
aaatcagaaagaatg

SEQ ID NO: 297658 - DNA, 15 bp, Homo sapiens
aaaatcagaaagaat

SEQ ID NO: 297659 - DNA, 15 bp, Homo sapiens
aaaaatcagaaagaa

SEQ ID NO: 297660 - DNA, 15 bp, Homo sapiens
aaaaaatcagaaaga

SEQ ID NO: 297661 - DNA, 15 bp, Homo sapiens
aaaaaaatcagaaag

SEQ ID NO: 297662 - DNA, 15 bp, Homo sapiens
aaaaaaaatcagaaa

SEQ ID NO: 297663 - DNA, 15 bp, Homo sapiens
caaaaaaaatcagaa

SEQ ID NO: 297664 - DNA, 15 bp, Homo sapiens
gcaaaaaaaatcaga

SEQ ID NO: 297665 - DNA, 15 bp, Homo sapiens
tgcaaaaaaaatcag

SEQ ID NO: 297666 - DNA, 15 bp, Homo sapiens
gtgcaaaaaaaatca

SEQ ID NO: 297667 - DNA, 15 bp, Homo sapiens
ggtgcaaaaaaaatc

SEQ ID NO: 297668 - DNA, 15 bp, Homo sapiens
gggtgcaaaaaaaat

SEQ ID NO: 297669 - DNA, 15 bp, Homo sapiens
tgggtgcaaaaaaaa

SEQ ID NO: 297670 - DNA, 15 bp, Homo sapiens
gtgggtgcaaaaaaa

SEQ ID NO: 297671 - DNA, 15 bp, Homo sapiens
ggtgggtgcaaaaaa

SEQ ID NO: 297672 - DNA, 15 bp, Homo sapiens
gggtgggtgcaaaaa

SEQ ID NO: 297673 - DNA, 15 bp, Homo sapiens
ggggtgggtgcaaaa

SEQ ID NO: 297674 - DNA, 15 bp, Homo sapiens
gggggtgggtgcaaa

SEQ ID NO: 297675 - DNA, 15 bp, Homo sapiens
tgggggtgggtgcaa

SEQ ID NO: 297676 - DNA, 15 bp, Homo sapiens
gtgggggtgggtgca

SEQ ID NO: 297677 - DNA, 15 bp, Homo sapiens
tgtgggggtgggtgc

SEQ ID NO: 297678 - DNA, 15 bp, Homo sapiens
ttgtgggggtgggtg

SEQ ID NO: 297679 - DNA, 15 bp, Homo sapiens
attgtgggggtgggt

SEQ ID NO: 297680 - DNA, 15 bp, Homo sapiens
aattgtgggggtggg

SEQ ID NO: 297681 - DNA, 15 bp, Homo sapiens
aaattgtgggggtgg

SEQ ID NO: 297682 - DNA, 15 bp, Homo sapiens
aaaattgtgggggtg

SEQ ID NO: 297683 - DNA, 15 bp, Homo sapiens
caaaattgtgggggt

SEQ ID NO: 297684 - DNA, 15 bp, Homo sapiens
gcaaaattgtggggg

SEQ ID NO: 297685 - DNA, 15 bp, Homo sapiens
tgcaaaattgtgggg

SEQ ID NO: 297686 - DNA, 15 bp, Homo sapiens
atgcaaaattgtggg

SEQ ID NO: 297687 - DNA, 15 bp, Homo sapiens
tatgcaaaattgtgg

SEQ ID NO: 297688 - DNA, 15 bp, Homo sapiens
atatgcaaaattgtg

SEQ ID NO: 297689 - DNA, 15 bp, Homo sapiens
tatatgcaaaattgt

SEQ ID NO: 297690 - DNA, 15 bp, Homo sapiens
ttatatgcaaaattg

SEQ ID NO: 297691 - DNA, 15 bp, Homo sapiens
attatatgcaaaatt

SEQ ID NO: 297692 - DNA, 15 bp, Homo sapiens
aattatatgcaaaat

SEQ ID NO: 297693 - DNA, 15 bp, Homo sapiens
aaattatatgcaaaa

SEQ ID NO: 297694 - DNA, 15 bp, Homo sapiens
gaaattatatgcaaa

SEQ ID NO: 297695 - DNA, 15 bp, Homo sapiens
tgaaattatatgcaa

SEQ ID NO: 297696 - DNA, 15 bp, Homo sapiens
ctgaaattatatgca

SEQ ID NO: 297697 - DNA, 15 bp, Homo sapiens
gctgaaattatatgc

SEQ ID NO: 297698 - DNA, 15 bp, Homo sapiens
agctgaaattatatg

SEQ ID NO: 297699 - DNA, 15 bp, Homo sapiens
tagctgaaattatat

SEQ ID NO: 297700 - DNA, 15 bp, Homo sapiens
ctagctgaaattata

SEQ ID NO: 297701 - DNA, 15 bp, Homo sapiens
gctagctgaaattat

SEQ ID NO: 297702 - DNA, 15 bp, Homo sapiens
agctagctgaaatta

SEQ ID NO: 297703 - DNA, 15 bp, Homo sapiens
gagctagctgaaatt

SEQ ID NO: 297704 - DNA, 15 bp, Homo sapiens
tgagctagctgaaat

SEQ ID NO: 297705 - DNA, 15 bp, Homo sapiens
atgagctagctgaaa

SEQ ID NO: 297706 - DNA, 15 bp, Homo sapiens
catgagctagctgaa

SEQ ID NO: 297707 - DNA, 15 bp, Homo sapiens
ccatgagctagctga

SEQ ID NO: 297708 - DNA, 15 bp, Homo sapiens
cccatgagctagctg

SEQ ID NO: 297709 - DNA, 15 bp, Homo sapiens
ccccatgagctagct

SEQ ID NO: 297710 - DNA, 15 bp, Homo sapiens
accccatgagctagc

SEQ ID NO: 297711 - DNA, 15 bp, Homo sapiens
gaccccatgagctag

SEQ ID NO: 297712 - DNA, 15 bp, Homo sapiens
ggaccccatgagcta

SEQ ID NO: 297713 - DNA, 15 bp, Homo sapiens
gggaccccatgagct

SEQ ID NO: 297714 - DNA, 15 bp, Homo sapiens
agggaccccatgagc

SEQ ID NO: 297715 - DNA, 15 bp, Homo sapiens
cagggaccccatgag

SEQ ID NO: 297716 - DNA, 15 bp, Homo sapiens
tcagggaccccatga

SEQ ID NO: 297717 - DNA, 15 bp, Homo sapiens
ttcagggaccccatg

SEQ ID NO: 297718 - DNA, 15 bp, Homo sapiens
cttcagggaccccat

SEQ ID NO: 297719 - DNA, 15 bp, Homo sapiens
gcttcagggacccca

SEQ ID NO: 297720 - DNA, 15 bp, Homo sapiens
cgcttcagggacccc

SEQ ID NO: 297721 - DNA, 15 bp, Homo sapiens
gcgcttcagggaccc

SEQ ID NO: 297722 - DNA, 15 bp, Homo sapiens
tgcgcttcagggacc

SEQ ID NO: 297723 - DNA, 15 bp, Homo sapiens
atgcgcttcagggac

SEQ ID NO: 297724 - DNA, 15 bp, Homo sapiens
gatgcgcttcaggga

SEQ ID NO: 297725 - DNA, 15 bp, Homo sapiens
agatgcgcttcaggg

SEQ ID NO: 297726 - DNA, 15 bp, Homo sapiens
tagatgcgcttcagg

SEQ ID NO: 297727 - DNA, 15 bp, Homo sapiens
atagatgcgcttcag

SEQ ID NO: 297728 - DNA, 15 bp, Homo sapiens
catagatgcgcttca

SEQ ID NO: 297729 - DNA, 15 bp, Homo sapiens
ccatagatgcgcttc

SEQ ID NO: 297730 - DNA, 15 bp, Homo sapiens
tccatagatgcgctt

SEQ ID NO: 297731 - DNA, 15 bp, Homo sapiens
atccatagatgcgct

SEQ ID NO: 297732 - DNA, 15 bp, Homo sapiens
aatccatagatgcgc

SEQ ID NO: 297733 - DNA, 15 bp, Homo sapiens
taatccatagatgcg

SEQ ID NO: 297734 - DNA, 15 bp, Homo sapiens
ataatccatagatgc

SEQ ID NO: 297735 - DNA, 15 bp, Homo sapiens
aataatccatagatg

SEQ ID NO: 297736 - DNA, 15 bp, Homo sapiens
aaataatccatagat

SEQ ID NO: 297737 - DNA, 15 bp, Homo sapiens
taaataatccataga

SEQ ID NO: 297738 - DNA, 15 bp, Homo sapiens
ctaaataatccatag

SEQ ID NO: 297739 - DNA, 15 bp, Homo sapiens
cctaaataatccata

SEQ ID NO: 297740 - DNA, 15 bp, Homo sapiens
gcctaaataatccat

SEQ ID NO: 297741 - DNA, 15 bp, Homo sapiens
ggcctaaataatcca

SEQ ID NO: 297742 - DNA, 15 bp, Homo sapiens
aggcctaaataatcc

SEQ ID NO: 297743 - DNA, 15 bp, Homo sapiens
taggcctaaataatc

SEQ ID NO: 297744 - DNA, 15 bp, Homo sapiens
ctaggcctaaataat

SEQ ID NO: 297745 - DNA, 15 bp, Homo sapiens
cctaggcctaaataa

SEQ ID NO: 297746 - DNA, 15 bp, Homo sapiens
ccctaggcctaaata

SEQ ID NO: 297747 - DNA, 15 bp, Homo sapiens
gccctaggcctaaat

SEQ ID NO: 297748 - DNA, 15 bp, Homo sapiens
tgccctaggcctaaa

SEQ ID NO: 297749 - DNA, 15 bp, Homo sapiens
ctgccctaggcctaa

SEQ ID NO: 297750 - DNA, 15 bp, Homo sapiens
actgccctaggccta

SEQ ID NO: 297751 - DNA, 15 bp, Homo sapiens
gactgccctaggcct

SEQ ID NO: 297752 - DNA, 15 bp, Homo sapiens
ggactgccctaggcc

SEQ ID NO: 297753 - DNA, 15 bp, Homo sapiens
aggactgccctaggc

SEQ ID NO: 297754 - DNA, 15 bp, Homo sapiens
aaggactgccctagg

SEQ ID NO: 297755 - DNA, 15 bp, Homo sapiens
caaggactgccctag

SEQ ID NO: 297756 - DNA, 15 bp, Homo sapiens
ccaaggactgcccta

SEQ ID NO: 297757 - DNA, 15 bp, Homo sapiens
tccaaggactgccct

SEQ ID NO: 297758 - DNA, 15 bp, Homo sapiens
atccaaggactgccc

SEQ ID NO: 297759 - DNA, 15 bp, Homo sapiens
gatccaaggactgcc

SEQ ID NO: 297760 - DNA, 15 bp, Homo sapiens
ggatccaaggactgc

SEQ ID NO: 297761 - DNA, 15 bp, Homo sapiens
gggatccaaggactg

SEQ ID NO: 297762 - DNA, 15 bp, Homo sapiens
tgggatccaaggact

SEQ ID NO: 297763 - DNA, 15 bp, Homo sapiens
ctgggatccaaggac

SEQ ID NO: 297764 - DNA, 15 bp, Homo sapiens
cctgggatccaagga

SEQ ID NO: 297765 - DNA, 15 bp, Homo sapiens
acctgggatccaagg

SEQ ID NO: 297766 - DNA, 15 bp, Homo sapiens
aacctgggatccaag

SEQ ID NO: 297767 - DNA, 15 bp, Homo sapiens
taacctgggatccaa

SEQ ID NO: 297768 - DNA, 15 bp, Homo sapiens
ttaacctgggatcca

SEQ ID NO: 297769 - DNA, 15 bp, Homo sapiens
cttaacctgggatcc

SEQ ID NO: 297770 - DNA, 15 bp, Homo sapiens
gcttaacctgggatc

SEQ ID NO: 297771 - DNA, 15 bp, Homo sapiens
agcttaacctgggat

SEQ ID NO: 297772 - DNA, 15 bp, Homo sapiens
tagcttaacctggga

SEQ ID NO: 297773 - DNA, 15 bp, Homo sapiens
ttagcttaacctggg

SEQ ID NO: 297774 - DNA, 15 bp, Homo sapiens
attagcttaacctgg

SEQ ID NO: 297775 - DNA, 15 bp, Homo sapiens
aattagcttaacctg

SEQ ID NO: 297776 - DNA, 15 bp, Homo sapiens
taattagcttaacct

SEQ ID NO: 297777 - DNA, 15 bp, Homo sapiens
ctaattagcttaacc

SEQ ID NO: 297778 - DNA, 15 bp, Homo sapiens
cctaattagcttaac

SEQ ID NO: 297779 - DNA, 15 bp, Homo sapiens
ccctaattagcttaa

SEQ ID NO: 297780 - DNA, 15 bp, Homo sapiens
accctaattagctta

SEQ ID NO: 297781 - DNA, 15 bp, Homo sapiens
gaccctaattagctt

SEQ ID NO: 297782 - DNA, 15 bp, Homo sapiens
agaccctaattagct

SEQ ID NO: 297783 - DNA, 15 bp, Homo sapiens
aagaccctaattagc

SEQ ID NO: 297784 - DNA, 15 bp, Homo sapiens
caagaccctaattag

SEQ ID NO: 297785 - DNA, 15 bp, Homo sapiens
ccaagaccctaatta

SEQ ID NO: 297786 - DNA, 15 bp, Homo sapiens
cccaagaccctaatt

SEQ ID NO: 297787 - DNA, 15 bp, Homo sapiens
tcccaagaccctaat

SEQ ID NO: 297788 - DNA, 15 bp, Homo sapiens
ttcccaagaccctaa

SEQ ID NO: 297789 - DNA, 15 bp, Homo sapiens
cttcccaagacccta

SEQ ID NO: 297790 - DNA, 15 bp, Homo sapiens
tcttcccaagaccct

SEQ ID NO: 297791 - DNA, 15 bp, Homo sapiens
atcttcccaagaccc

SEQ ID NO: 297792 - DNA, 15 bp, Homo sapiens
aatcttcccaagacc

SEQ ID NO: 297793 - DNA, 15 bp, Homo sapiens
gaatcttcccaagac

SEQ ID NO: 297794 - DNA, 15 bp, Homo sapiens
cgaatcttcccaaga

SEQ ID NO: 297795 - DNA, 15 bp, Homo sapiens
acgaatcttcccaag

SEQ ID NO: 297796 - DNA, 15 bp, Homo sapiens
aacgaatcttcccaa

SEQ ID NO: 297797 - DNA, 15 bp, Homo sapiens
taacgaatcttccca

SEQ ID NO: 297798 - DNA, 15 bp, Homo sapiens
ttaacgaatcttccc

SEQ ID NO: 297799 - DNA, 15 bp, Homo sapiens
tttaacgaatcttcc

SEQ ID NO: 297800 - DNA, 15 bp, Homo sapiens
atttaacgaatcttc

SEQ ID NO: 297801 - DNA, 15 bp, Homo sapiens
aatttaacgaatctt

SEQ ID NO: 297802 - DNA, 15 bp, Homo sapiens
aaatttaacgaatct

SEQ ID NO: 297803 - DNA, 15 bp, Homo sapiens
aaaatttaacgaatc

SEQ ID NO: 297804 - DNA, 15 bp, Homo sapiens
aaaaatttaacgaat

SEQ ID NO: 297805 - DNA, 15 bp, Homo sapiens
aaaaaatttaacgaa

SEQ ID NO: 297806 - DNA, 15 bp, Homo sapiens
aaaaaaatttaacga

SEQ ID NO: 297807 - DNA, 15 bp, Homo sapiens
taaaaaaatttaacg

SEQ ID NO: 297808 - DNA, 15 bp, Homo sapiens
ctaaaaaaatttaac

SEQ ID NO: 297809 - DNA, 15 bp, Homo sapiens
tctaaaaaaatttaa

SEQ ID NO: 297810 - DNA, 15 bp, Homo sapiens
ctctaaaaaaattta

SEQ ID NO: 297811 - DNA, 15 bp, Homo sapiens
tctctaaaaaaattt

SEQ ID NO: 297812 - DNA, 15 bp, Homo sapiens
ttctctaaaaaaatt

SEQ ID NO: 297813 - DNA, 15 bp, Homo sapiens
tttctctaaaaaaat

SEQ ID NO: 297814 - DNA, 15 bp, Homo sapiens
ttttctctaaaaaaa

SEQ ID NO: 297815 - DNA, 15 bp, Homo sapiens
tttttctctaaaaaa

SEQ ID NO: 297816 - DNA, 15 bp, Homo sapiens
ctttttctctaaaaa

SEQ ID NO: 297817 - DNA, 15 bp, Homo sapiens
gctttttctctaaaa

SEQ ID NO: 297818 - DNA, 15 bp, Homo sapiens
agctttttctctaaa

SEQ ID NO: 297819 - DNA, 15 bp, Homo sapiens
aagctttttctctaa

SEQ ID NO: 297820 - DNA, 15 bp, Homo sapiens
caagctttttctcta

SEQ ID NO: 297821 - DNA, 15 bp, Homo sapiens
tcaagctttttctct

SEQ ID NO: 297822 - DNA, 15 bp, Homo sapiens
ctcaagctttttctc

SEQ ID NO: 297823 - DNA, 15 bp, Homo sapiens
actcaagctttttct

SEQ ID NO: 297824 - DNA, 15 bp, Homo sapiens
cactcaagctttttc

SEQ ID NO: 297825 - DNA, 15 bp, Homo sapiens
tcactcaagcttttt

SEQ ID NO: 297826 - DNA, 15 bp, Homo sapiens
atcactcaagctttt

SEQ ID NO: 297827 - DNA, 15 bp, Homo sapiens
aatcactcaagcttt

SEQ ID NO: 297828 - DNA, 15 bp, Homo sapiens
taatcactcaagctt

SEQ ID NO: 297829 - DNA, 15 bp, Homo sapiens
ctaatcactcaagct

SEQ ID NO: 297830 - DNA, 15 bp, Homo sapiens
tctaatcactcaagc

SEQ ID NO: 297831 - DNA, 15 bp, Homo sapiens
ttctaatcactcaag

SEQ ID NO: 297832 - DNA, 15 bp, Homo sapiens
cttctaatcactcaa

SEQ ID NO: 297833 - DNA, 15 bp, Homo sapiens
ccttctaatcactca

SEQ ID NO: 297834 - DNA, 15 bp, Homo sapiens
accttctaatcactc

SEQ ID NO: 297835 - DNA, 15 bp, Homo sapiens
gaccttctaatcact

SEQ ID NO: 297836 - DNA, 15 bp, Homo sapiens
tgaccttctaatcac

SEQ ID NO: 297837 - DNA, 15 bp, Homo sapiens
atgaccttctaatca

SEQ ID NO: 297838 - DNA, 15 bp, Homo sapiens
aatgaccttctaatc

SEQ ID NO: 297839 - DNA, 15 bp, Homo sapiens
aaatgaccttctaat

SEQ ID NO: 297840 - DNA, 15 bp, Homo sapiens
gaaatgaccttctaa

SEQ ID NO: 297841 - DNA, 15 bp, Homo sapiens
ggaaatgaccttcta

SEQ ID NO: 297842 - DNA, 15 bp, Homo sapiens
tggaaatgaccttct

SEQ ID NO: 297843 - DNA, 15 bp, Homo sapiens
ctggaaatgaccttc

SEQ ID NO: 297844 - DNA, 15 bp, Homo sapiens
tctggaaatgacctt

SEQ ID NO: 297845 - DNA, 15 bp, Homo sapiens
ttctggaaatgacct

SEQ ID NO: 297846 - DNA, 15 bp, Homo sapiens
tttctggaaatgacc

SEQ ID NO: 297847 - DNA, 15 bp, Homo sapiens
atttctggaaatgac

SEQ ID NO: 297848 - DNA, 15 bp, Homo sapiens
aatttctggaaatga

SEQ ID NO: 297849 - DNA, 15 bp, Homo sapiens
aaatttctggaaatg

SEQ ID NO: 297850 - DNA, 15 bp, Homo sapiens
gaaatttctggaaat

SEQ ID NO: 297851 - DNA, 15 bp, Homo sapiens
ggaaatttctggaaa

SEQ ID NO: 297852 - DNA, 15 bp, Homo sapiens
aggaaatttctggaa

SEQ ID NO: 297853 - DNA, 15 bp, Homo sapiens
aaggaaatttctgga

SEQ ID NO: 297854 - DNA, 15 bp, Homo sapiens
aaaggaaatttctgg

SEQ ID NO: 297855 - DNA, 15 bp, Homo sapiens
aaaaggaaatttctg

SEQ ID NO: 297856 - DNA, 15 bp, Homo sapiens
caaaaggaaatttct

SEQ ID NO: 297857 - DNA, 15 bp, Homo sapiens
ccaaaaggaaatttc

SEQ ID NO: 297858 - DNA, 15 bp, Homo sapiens
gccaaaaggaaattt

SEQ ID NO: 297859 - DNA, 15 bp, Homo sapiens
agccaaaaggaaatt

SEQ ID NO: 297860 - DNA, 15 bp, Homo sapiens
gagccaaaaggaaat

SEQ ID NO: 297861 - DNA, 15 bp, Homo sapiens
agagccaaaaggaaa

SEQ ID NO: 297862 - DNA, 15 bp, Homo sapiens
aagagccaaaaggaa

SEQ ID NO: 297863 - DNA, 15 bp, Homo sapiens
gaagagccaaaagga

SEQ ID NO: 297864 - DNA, 15 bp, Homo sapiens
tgaagagccaaaagg

SEQ ID NO: 297865 - DNA, 15 bp, Homo sapiens
ctgaagagccaaaag

SEQ ID NO: 297866 - DNA, 15 bp, Homo sapiens
cctgaagagccaaaa

SEQ ID NO: 297867 - DNA, 15 bp, Homo sapiens
tcctgaagagccaaa

SEQ ID NO: 297868 - DNA, 15 bp, Homo sapiens
ttcctgaagagccaa

SEQ ID NO: 297869 - DNA, 15 bp, Homo sapiens
attcctgaagagcca

SEQ ID NO: 297870 - DNA, 15 bp, Homo sapiens
tattcctgaagagcc

SEQ ID NO: 297871 - DNA, 15 bp, Homo sapiens
ttattcctgaagagc

SEQ ID NO: 297872 - DNA, 15 bp, Homo sapiens
tttattcctgaagag

SEQ ID NO: 297873 - DNA, 15 bp, Homo sapiens
ctttattcctgaaga

SEQ ID NO: 297874 - DNA, 15 bp, Homo sapiens
tctttattcctgaag

SEQ ID NO: 297875 - DNA, 15 bp, Homo sapiens
ctctttattcctgaa

SEQ ID NO: 297876 - DNA, 15 bp, Homo sapiens
tctctttattcctga

SEQ ID NO: 297877 - DNA, 15 bp, Homo sapiens
gtctctttattcctg

SEQ ID NO: 297878 - DNA, 15 bp, Homo sapiens
agtctctttattcct

SEQ ID NO: 297879 - DNA, 15 bp, Homo sapiens
cagtctctttattcc

SEQ ID NO: 297880 - DNA, 15 bp, Homo sapiens
ccagtctctttattc

SEQ ID NO: 297881 - DNA, 15 bp, Homo sapiens
cccagtctctttatt

SEQ ID NO: 297882 - DNA, 15 bp, Homo sapiens
acccagtctctttat

SEQ ID NO: 297883 - DNA, 15 bp, Homo sapiens
cacccagtctcttta

SEQ ID NO: 297884 - DNA, 15 bp, Homo sapiens
tcacccagtctcttt

SEQ ID NO: 297885 - DNA, 15 bp, Homo sapiens
ctcacccagtctctt

SEQ ID NO: 297886 - DNA, 15 bp, Homo sapiens
cctcacccagtctct

SEQ ID NO: 297887 - DNA, 15 bp, Homo sapiens
tcctcacccagtctc

SEQ ID NO: 297888 - DNA, 15 bp, Homo sapiens
ctcctcacccagtct

SEQ ID NO: 297889 - DNA, 15 bp, Homo sapiens
tctcctcacccagtc

SEQ ID NO: 297890 - DNA, 15 bp, Homo sapiens
ctctcctcacccagt

SEQ ID NO: 297891 - DNA, 15 bp, Homo sapiens
tctctcctcacccag

SEQ ID NO: 297892 - DNA, 15 bp, Homo sapiens
ctctctcctcaccca

SEQ ID NO: 297893 - DNA, 15 bp, Homo sapiens
cctctctcctcaccc

SEQ ID NO: 297894 - DNA, 15 bp, Homo sapiens
tcctctctcctcacc

SEQ ID NO: 297895 - DNA, 15 bp, Homo sapiens
ctcctctctcctcac

SEQ ID NO: 297896 - DNA, 15 bp, Homo sapiens
cctcctctctcctca

SEQ ID NO: 297897 - DNA, 15 bp, Homo sapiens
tcctcctctctcctc

SEQ ID NO: 297898 - DNA, 15 bp, Homo sapiens
atcctcctctctcct

SEQ ID NO: 297899 - DNA, 15 bp, Homo sapiens
catcctcctctctcc

SEQ ID NO: 297900 - DNA, 15 bp, Homo sapiens
ccatcctcctctctc

SEQ ID NO: 297901 - DNA, 15 bp, Homo sapiens
accatcctcctctct

SEQ ID NO: 297902 - DNA, 15 bp, Homo sapiens
caccatcctcctctc

SEQ ID NO: 297903 - DNA, 15 bp, Homo sapiens
tcaccatcctcctct

SEQ ID NO: 297904 - DNA, 15 bp, Homo sapiens
ctcaccatcctcctc

SEQ ID NO: 297905 - DNA, 15 bp, Homo sapiens
cctcaccatcctcct

SEQ ID NO: 297906 - DNA, 15 bp, Homo sapiens
ccctcaccatcctcc

SEQ ID NO: 297907 - DNA, 15 bp, Homo sapiens
cccctcaccatcctc

SEQ ID NO: 297908 - DNA, 15 bp, Homo sapiens
tcccctcaccatcct

SEQ ID NO: 297909 - DNA, 15 bp, Homo sapiens
ttcccctcaccatcc

SEQ ID NO: 297910 - DNA, 15 bp, Homo sapiens
cttcccctcaccatc

SEQ ID NO: 297911 - DNA, 15 bp, Homo sapiens
tcttcccctcaccat

SEQ ID NO: 297912 - DNA, 15 bp, Homo sapiens
ctcttcccctcacca

SEQ ID NO: 297913 - DNA, 15 bp, Homo sapiens
cctcttcccctcacc

SEQ ID NO: 297914 - DNA, 15 bp, Homo sapiens
tcctcttcccctcac

SEQ ID NO: 297915 - DNA, 15 bp, Homo sapiens
ttcctcttcccctca

SEQ ID NO: 297916 - DNA, 15 bp, Homo sapiens
gttcctcttcccctc

SEQ ID NO: 297917 - DNA, 15 bp, Homo sapiens
agttcctcttcccct

SEQ ID NO: 297918 - DNA, 15 bp, Homo sapiens
cagttcctcttcccc

SEQ ID NO: 297919 - DNA, 15 bp, Homo sapiens
ccagttcctcttccc

SEQ ID NO: 297920 - DNA, 15 bp, Homo sapiens
tccagttcctcttcc

SEQ ID NO: 297921 - DNA, 15 bp, Homo sapiens
atccagttcctcttc

SEQ ID NO: 297922 - DNA, 15 bp, Homo sapiens
catccagttcctctt

SEQ ID NO: 297923 - DNA, 15 bp, Homo sapiens
ccatccagttcctct

SEQ ID NO: 297924 - DNA, 15 bp, Homo sapiens
tccatccagttcctc

SEQ ID NO: 297925 - DNA, 15 bp, Homo sapiens
ttccatccagttcct

SEQ ID NO: 297926 - DNA, 15 bp, Homo sapiens
cttccatccagttcc

SEQ ID NO: 297927 - DNA, 15 bp, Homo sapiens
tcttccatccagttc

SEQ ID NO: 297928 - DNA, 15 bp, Homo sapiens
gtcttccatccagtt

SEQ ID NO: 297929 - DNA, 15 bp, Homo sapiens
tgtcttccatccagt

SEQ ID NO: 297930 - DNA, 15 bp, Homo sapiens
atgtcttccatccag

SEQ ID NO: 297931 - DNA, 15 bp, Homo sapiens
catgtcttccatcca

SEQ ID NO: 297932 - DNA, 15 bp, Homo sapiens
tcatgtcttccatcc

SEQ ID NO: 297933 - DNA, 15 bp, Homo sapiens
ttcatgtcttccatc

SEQ ID NO: 297934 - DNA, 15 bp, Homo sapiens
cttcatgtcttccat

SEQ ID NO: 297935 - DNA, 15 bp, Homo sapiens
tcttcatgtcttcca

SEQ ID NO: 297936 - DNA, 15 bp, Homo sapiens
ttcttcatgtcttcc

SEQ ID NO: 297937 - DNA, 15 bp, Homo sapiens
tttcttcatgtcttc

SEQ ID NO: 297938 - DNA, 15 bp, Homo sapiens
atttcttcatgtctt

SEQ ID NO: 297939 - DNA, 15 bp, Homo sapiens
aatttcttcatgtct

SEQ ID NO: 297940 - DNA, 15 bp, Homo sapiens
taatttcttcatgtc

SEQ ID NO: 297941 - DNA, 15 bp, Homo sapiens
ctaatttcttcatgt

SEQ ID NO: 297942 - DNA, 15 bp, Homo sapiens
gctaatttcttcatg

SEQ ID NO: 297943 - DNA, 15 bp, Homo sapiens
tgctaatttcttcat

SEQ ID NO: 297944 - DNA, 15 bp, Homo sapiens
ttgctaatttcttca

SEQ ID NO: 297945 - DNA, 15 bp, Homo sapiens
cttgctaatttcttc

SEQ ID NO: 297946 - DNA, 15 bp, Homo sapiens
gcttgctaatttctt

SEQ ID NO: 297947 - DNA, 15 bp, Homo sapiens
tgcttgctaatttct

SEQ ID NO: 297948 - DNA, 15 bp, Homo sapiens
ctgcttgctaatttc

SEQ ID NO: 297949 - DNA, 15 bp, Homo sapiens
actgcttgctaattt

SEQ ID NO: 297950 - DNA, 15 bp, Homo sapiens
tactgcttgctaatt

SEQ ID NO: 297951 - DNA, 15 bp, Homo sapiens
ttactgcttgctaat

SEQ ID NO: 297952 - DNA, 15 bp, Homo sapiens
tttactgcttgctaa

SEQ ID NO: 297953 - DNA, 15 bp, Homo sapiens
ttttactgcttgcta

SEQ ID NO: 297954 - DNA, 15 bp, Homo sapiens
cttttactgcttgct

SEQ ID NO: 297955 - DNA, 15 bp, Homo sapiens
gcttttactgcttgc

SEQ ID NO: 297956 - DNA, 15 bp, Homo sapiens
tgcttttactgcttg

SEQ ID NO: 297957 - DNA, 15 bp, Homo sapiens
ttgcttttactgctt

SEQ ID NO: 297958 - DNA, 15 bp, Homo sapiens
attgcttttactgct

SEQ ID NO: 297959 - DNA, 15 bp, Homo sapiens
aattgcttttactgc

SEQ ID NO: 297960 - DNA, 15 bp, Homo sapiens
aaattgcttttactg

SEQ ID NO: 297961 - DNA, 15 bp, Homo sapiens
caaattgcttttact

SEQ ID NO: 297962 - DNA, 15 bp, Homo sapiens
gcaaattgcttttac

SEQ ID NO: 297963 - DNA, 15 bp, Homo sapiens
tgcaaattgctttta

SEQ ID NO: 297964 - DNA, 15 bp, Homo sapiens
atgcaaattgctttt

SEQ ID NO: 297965 - DNA, 15 bp, Homo sapiens
aatgcaaattgcttt

SEQ ID NO: 297966 - DNA, 15 bp, Homo sapiens
aaatgcaaattgctt

SEQ ID NO: 297967 - DNA, 15 bp, Homo sapiens
caaatgcaaattgct

SEQ ID NO: 297968 - DNA, 15 bp, Homo sapiens
acaaatgcaaattgc

SEQ ID NO: 297969 - DNA, 15 bp, Homo sapiens
cacaaatgcaaattg

SEQ ID NO: 297970 - DNA, 15 bp, Homo sapiens
tcacaaatgcaaatt

SEQ ID NO: 297971 - DNA, 15 bp, Homo sapiens
ttcacaaatgcaaat

SEQ ID NO: 297972 - DNA, 15 bp, Homo sapiens
attcacaaatgcaaa

SEQ ID NO: 297973 - DNA, 15 bp, Homo sapiens
tattcacaaatgcaa

SEQ ID NO: 297974 - DNA, 15 bp, Homo sapiens
ttattcacaaatgca

SEQ ID NO: 297975 - DNA, 15 bp, Homo sapiens
attattcacaaatgc

SEQ ID NO: 297976 - DNA, 15 bp, Homo sapiens
aattattcacaaatg

SEQ ID NO: 297977 - DNA, 15 bp, Homo sapiens
taattattcacaaat

SEQ ID NO: 297978 - DNA, 15 bp, Homo sapiens
ttaattattcacaaa

SEQ ID NO: 297979 - DNA, 15 bp, Homo sapiens
cttaattattcacaa

SEQ ID NO: 297980 - DNA, 15 bp, Homo sapiens
ccttaattattcaca

SEQ ID NO: 297981 - DNA, 15 bp, Homo sapiens
accttaattattcac

SEQ ID NO: 297982 - DNA, 15 bp, Homo sapiens
aaccttaattattca

SEQ ID NO: 297983 - DNA, 15 bp, Homo sapiens
caaccttaattattc

SEQ ID NO: 297984 - DNA, 15 bp, Homo sapiens
acaaccttaattatt

SEQ ID NO: 297985 - DNA, 15 bp, Homo sapiens
aacaaccttaattat

SEQ ID NO: 297986 - DNA, 15 bp, Homo sapiens
taacaaccttaatta

SEQ ID NO: 297987 - DNA, 15 bp, Homo sapiens
ttaacaaccttaatt

SEQ ID NO: 297988 - DNA, 15 bp, Homo sapiens
cttaacaaccttaat

SEQ ID NO: 297989 - DNA, 15 bp, Homo sapiens
tcttaacaaccttaa

SEQ ID NO: 297990 - DNA, 15 bp, Homo sapiens
gtcttaacaacctta

SEQ ID NO: 297991 - DNA, 15 bp, Homo sapiens
ggtcttaacaacctt

SEQ ID NO: 297992 - DNA, 15 bp, Homo sapiens
gggtcttaacaacct

SEQ ID NO: 297993 - DNA, 15 bp, Homo sapiens
agggtcttaacaacc

SEQ ID NO: 297994 - DNA, 15 bp, Homo sapiens
tagggtcttaacaac

SEQ ID NO: 297995 - DNA, 15 bp, Homo sapiens
gtagggtcttaacaa

SEQ ID NO: 297996 - DNA, 15 bp, Homo sapiens
cgtagggtcttaaca

SEQ ID NO: 297997 - DNA, 15 bp, Homo sapiens
ccgtagggtcttaac

SEQ ID NO: 297998 - DNA, 15 bp, Homo sapiens
tccgtagggtcttaa

SEQ ID NO: 297999 - DNA, 15 bp, Homo sapiens
gtccgtagggtctta

SEQ ID NO: 298000 - DNA, 15 bp, Homo sapiens
agtccgtagggtctt

SEQ ID NO: 298001 - DNA, 15 bp, Homo sapiens
aagtccgtagggtct

SEQ ID NO: 298002 - DNA, 15 bp, Homo sapiens
caagtccgtagggtc

SEQ ID NO: 298003 - DNA, 15 bp, Homo sapiens
ccaagtccgtagggt

SEQ ID NO: 298004 - DNA, 15 bp, Homo sapiens
gccaagtccgtaggg

SEQ ID NO: 298005 - DNA, 15 bp, Homo sapiens
agccaagtccgtagg

SEQ ID NO: 298006 - DNA, 15 bp, Homo sapiens
tagccaagtccgtag

SEQ ID NO: 298007 - DNA, 15 bp, Homo sapiens
ttagccaagtccgta

SEQ ID NO: 298008 - DNA, 15 bp, Homo sapiens
gttagccaagtccgt

SEQ ID NO: 298009 - DNA, 15 bp, Homo sapiens
cgttagccaagtccg

SEQ ID NO: 298010 - DNA, 15 bp, Homo sapiens
gcgttagccaagtcc

SEQ ID NO: 298011 - DNA, 15 bp, Homo sapiens
tgcgttagccaagtc

SEQ ID NO: 298012 - DNA, 15 bp, Homo sapiens
gtgcgttagccaagt

SEQ ID NO: 298013 - DNA, 15 bp, Homo sapiens
ggtgcgttagccaag

SEQ ID NO: 298014 - DNA, 15 bp, Homo sapiens
tggtgcgttagccaa

SEQ ID NO: 298015 - DNA, 15 bp, Homo sapiens
atggtgcgttagcca

SEQ ID NO: 298016 - DNA, 15 bp, Homo sapiens
aatggtgcgttagcc

SEQ ID NO: 298017 - DNA, 15 bp, Homo sapiens
gaatggtgcgttagc

SEQ ID NO: 298018 - DNA, 15 bp, Homo sapiens
tgaatggtgcgttag

SEQ ID NO: 298019 - DNA, 15 bp, Homo sapiens
gtgaatggtgcgtta

SEQ ID NO: 298020 - DNA, 15 bp, Homo sapiens
agtgaatggtgcgtt

SEQ ID NO: 298021 - DNA, 15 bp, Homo sapiens
tagtgaatggtgcgt

SEQ ID NO: 298022 - DNA, 15 bp, Homo sapiens
ctagtgaatggtgcg

SEQ ID NO: 298023 - DNA, 15 bp, Homo sapiens
gctagtgaatggtgc

SEQ ID NO: 298024 - DNA, 15 bp, Homo sapiens
tgctagtgaatggtg

SEQ ID NO: 298025 - DNA, 15 bp, Homo sapiens
ctgctagtgaatggt

SEQ ID NO: 298026 - DNA, 15 bp, Homo sapiens
actgctagtgaatgg

SEQ ID NO: 298027 - DNA, 15 bp, Homo sapiens
aactgctagtgaatg

SEQ ID NO: 298028 - DNA, 15 bp, Homo sapiens
aaactgctagtgaat

SEQ ID NO: 298029 - DNA, 15 bp, Homo sapiens
gaaactgctagtgaa

SEQ ID NO: 298030 - DNA, 15 bp, Homo sapiens
agaaactgctagtga

SEQ ID NO: 298031 - DNA, 15 bp, Homo sapiens
aagaaactgctagtg

SEQ ID NO: 298032 - DNA, 15 bp, Homo sapiens
aaagaaactgctagt

SEQ ID NO: 298033 - DNA, 15 bp, Homo sapiens
aaaagaaactgctag

SEQ ID NO: 298034 - DNA, 15 bp, Homo sapiens
gaaaagaaactgcta

SEQ ID NO: 298035 - DNA, 15 bp, Homo sapiens
tgaaaagaaactgct

SEQ ID NO: 298036 - DNA, 15 bp, Homo sapiens
ctgaaaagaaactgc

SEQ ID NO: 298037 - DNA, 15 bp, Homo sapiens
cctgaaaagaaactg

SEQ ID NO: 298038 - DNA, 15 bp, Homo sapiens
acctgaaaagaaact

SEQ ID NO: 298039 - DNA, 15 bp, Homo sapiens
aacctgaaaagaaac

SEQ ID NO: 298040 - DNA, 15 bp, Homo sapiens
taacctgaaaagaaa

SEQ ID NO: 298041 - DNA, 15 bp, Homo sapiens
ttaacctgaaaagaa

SEQ ID NO: 298042 - DNA, 15 bp, Homo sapiens
tttaacctgaaaaga

SEQ ID NO: 298043 - DNA, 15 bp, Homo sapiens
ttttaacctgaaaag

SEQ ID NO: 298044 - DNA, 15 bp, Homo sapiens
attttaacctgaaaa

SEQ ID NO: 298045 - DNA, 15 bp, Homo sapiens
aattttaacctgaaa

SEQ ID NO: 298046 - DNA, 15 bp, Homo sapiens
taattttaacctgaa

SEQ ID NO: 298047 - DNA, 15 bp, Homo sapiens
ttaattttaacctga

SEQ ID NO: 298048 - DNA, 15 bp, Homo sapiens
attaattttaacctg

SEQ ID NO: 298049 - DNA, 15 bp, Homo sapiens
aattaattttaacct

SEQ ID NO: 298050 - DNA, 15 bp, Homo sapiens
caattaattttaacc

SEQ ID NO: 298051 - DNA, 15 bp, Homo sapiens
ccaattaattttaac

SEQ ID NO: 298052 - DNA, 15 bp, Homo sapiens
tccaattaattttaa

SEQ ID NO: 298053 - DNA, 15 bp, Homo sapiens
ctccaattaatttta

SEQ ID NO: 298054 - DNA, 15 bp, Homo sapiens
actccaattaatttt

SEQ ID NO: 298055 - DNA, 15 bp, Homo sapiens
cactccaattaattt

SEQ ID NO: 298056 - DNA, 15 bp, Homo sapiens
acactccaattaatt

SEQ ID NO: 298057 - DNA, 15 bp, Homo sapiens
aacactccaattaat

SEQ ID NO: 298058 - DNA, 15 bp, Homo sapiens
caacactccaattaa

SEQ ID NO: 298059 - DNA, 15 bp, Homo sapiens
ccaacactccaatta

SEQ ID NO: 298060 - DNA, 15 bp, Homo sapiens
accaacactccaatt

SEQ ID NO: 298061 - DNA, 15 bp, Homo sapiens
aaccaacactccaat

SEQ ID NO: 298062 - DNA, 15 bp, Homo sapiens
aaaccaacactccaa

SEQ ID NO: 298063 - DNA, 15 bp, Homo sapiens
taaaccaacactcca

SEQ ID NO: 298064 - DNA, 15 bp, Homo sapiens
ataaaccaacactcc

SEQ ID NO: 298065 - DNA, 15 bp, Homo sapiens
aataaaccaacactc

SEQ ID NO: 298066 - DNA, 15 bp, Homo sapiens
aaataaaccaacact

SEQ ID NO: 298067 - DNA, 15 bp, Homo sapiens
taaataaaccaacac

SEQ ID NO: 298068 - DNA, 15 bp, Homo sapiens
ataaataaaccaaca

SEQ ID NO: 298069 - DNA, 15 bp, Homo sapiens
gataaataaaccaac

SEQ ID NO: 298070 - DNA, 15 bp, Homo sapiens
agataaataaaccaa

SEQ ID NO: 298071 - DNA, 15 bp, Homo sapiens
aagataaataaacca

SEQ ID NO: 298072 - DNA, 15 bp, Homo sapiens
aaagataaataaacc

SEQ ID NO: 298073 - DNA, 15 bp, Homo sapiens
aaaagataaataaac

SEQ ID NO: 298074 - DNA, 15 bp, Homo sapiens
gaaaagataaataaa

SEQ ID NO: 298075 - DNA, 15 bp, Homo sapiens
ggaaaagataaataa

SEQ ID NO: 298076 - DNA, 15 bp, Homo sapiens
gggaaaagataaata

SEQ ID NO: 298077 - DNA, 15 bp, Homo sapiens
agggaaaagataaat

SEQ ID NO: 298078 - DNA, 15 bp, Homo sapiens
aagggaaaagataaa

SEQ ID NO: 298079 - DNA, 15 bp, Homo sapiens
caagggaaaagataa

SEQ ID NO: 298080 - DNA, 15 bp, Homo sapiens
ccaagggaaaagata

SEQ ID NO: 298081 - DNA, 15 bp, Homo sapiens
accaagggaaaagat

SEQ ID NO: 298082 - DNA, 15 bp, Homo sapiens
caccaagggaaaaga

SEQ ID NO: 298083 - DNA, 15 bp, Homo sapiens
tcaccaagggaaaag

SEQ ID NO: 298084 - DNA, 15 bp, Homo sapiens
ttcaccaagggaaaa

SEQ ID NO: 298085 - DNA, 15 bp, Homo sapiens
attcaccaagggaaa

SEQ ID NO: 298086 - DNA, 15 bp, Homo sapiens
gattcaccaagggaa

SEQ ID NO: 298087 - DNA, 15 bp, Homo sapiens
tgattcaccaaggga

SEQ ID NO: 298088 - DNA, 15 bp, Homo sapiens
ttgattcaccaaggg

SEQ ID NO: 298089 - DNA, 15 bp, Homo sapiens
tttgattcaccaagg

SEQ ID NO: 298090 - DNA, 15 bp, Homo sapiens
atttgattcaccaag

SEQ ID NO: 298091 - DNA, 15 bp, Homo sapiens
catttgattcaccaa

SEQ ID NO: 298092 - DNA, 15 bp, Homo sapiens
tcatttgattcacca

SEQ ID NO: 298093 - DNA, 15 bp, Homo sapiens
gtcatttgattcacc

SEQ ID NO: 298094 - DNA, 15 bp, Homo sapiens
agtcatttgattcac

SEQ ID NO: 298095 - DNA, 15 bp, Homo sapiens
gagtcatttgattca

SEQ ID NO: 298096 - DNA, 15 bp, Homo sapiens
tgagtcatttgattc

SEQ ID NO: 298097 - DNA, 15 bp, Homo sapiens
atgagtcatttgatt

SEQ ID NO: 298098 - DNA, 15 bp, Homo sapiens
gatgagtcatttgat

SEQ ID NO: 298099 - DNA, 15 bp, Homo sapiens
ggatgagtcatttga

SEQ ID NO: 298100 - DNA, 15 bp, Homo sapiens
aggatgagtcatttg

SEQ ID NO: 298101 - DNA, 15 bp, Homo sapiens
caggatgagtcattt

SEQ ID NO: 298102 - DNA, 15 bp, Homo sapiens
tcaggatgagtcatt

SEQ ID NO: 298103 - DNA, 15 bp, Homo sapiens
atcaggatgagtcat

SEQ ID NO: 298104 - DNA, 15 bp, Homo sapiens
aatcaggatgagtca

SEQ ID NO: 298105 - DNA, 15 bp, Homo sapiens
aaatcaggatgagtc

SEQ ID NO: 298106 - DNA, 15 bp, Homo sapiens
taaatcaggatgagt

SEQ ID NO: 298107 - DNA, 15 bp, Homo sapiens
ataaatcaggatgag

SEQ ID NO: 298108 - DNA, 15 bp, Homo sapiens
tataaatcaggatga

SEQ ID NO: 298109 - DNA, 15 bp, Homo sapiens
ttataaatcaggatg

SEQ ID NO: 298110 - DNA, 15 bp, Homo sapiens
tttataaatcaggat

SEQ ID NO: 298111 - DNA, 15 bp, Homo sapiens
gtttataaatcagga

SEQ ID NO: 298112 - DNA, 15 bp, Homo sapiens
ggtttataaatcagg

SEQ ID NO: 298113 - DNA, 15 bp, Homo sapiens
aggtttataaatcag

SEQ ID NO: 298114 - DNA, 15 bp, Homo sapiens
aaggtttataaatca

SEQ ID NO: 298115 - DNA, 15 bp, Homo sapiens
gaaggtttataaatc

SEQ ID NO: 298116 - DNA, 15 bp, Homo sapiens
ggaaggtttataaat

SEQ ID NO: 298117 - DNA, 15 bp, Homo sapiens
tggaaggtttataaa

SEQ ID NO: 298118 - DNA, 15 bp, Homo sapiens
gtggaaggtttataa

SEQ ID NO: 298119 - DNA, 15 bp, Homo sapiens
ggtggaaggtttata

SEQ ID NO: 298120 - DNA, 15 bp, Homo sapiens
aggtggaaggtttat

SEQ ID NO: 298121 - DNA, 15 bp, Homo sapiens
taggtggaaggttta

SEQ ID NO: 298122 - DNA, 15 bp, Homo sapiens
ataggtggaaggttt

SEQ ID NO: 298123 - DNA, 15 bp, Homo sapiens
gataggtggaaggtt

SEQ ID NO: 298124 - DNA, 15 bp, Homo sapiens
ggataggtggaaggt

SEQ ID NO: 298125 - DNA, 15 bp, Homo sapiens
tggataggtggaagg

SEQ ID NO: 298126 - DNA, 15 bp, Homo sapiens
gtggataggtggaag

SEQ ID NO: 298127 - DNA, 15 bp, Homo sapiens
agtggataggtggaa

SEQ ID NO: 298128 - DNA, 15 bp, Homo sapiens
gagtggataggtgga

SEQ ID NO: 298129 - DNA, 15 bp, Homo sapiens
agagtggataggtgg

SEQ ID NO: 298130 - DNA, 15 bp, Homo sapiens
gagagtggataggtg

SEQ ID NO: 298131 - DNA, 15 bp, Homo sapiens
agagagtggataggt

SEQ ID NO: 298132 - DNA, 15 bp, Homo sapiens
tagagagtggatagg

SEQ ID NO: 298133 - DNA, 15 bp, Homo sapiens
atagagagtggatag

SEQ ID NO: 298134 - DNA, 15 bp, Homo sapiens
aatagagagtggata

SEQ ID NO: 298135 - DNA, 15 bp, Homo sapiens
taatagagagtggat

SEQ ID NO: 298136 - DNA, 15 bp, Homo sapiens
ttaatagagagtgga

SEQ ID NO: 298137 - DNA, 15 bp, Homo sapiens
cttaatagagagtgg

SEQ ID NO: 298138 - DNA, 15 bp, Homo sapiens
tcttaatagagagtg

SEQ ID NO: 298139 - DNA, 15 bp, Homo sapiens
gtcttaatagagagt

SEQ ID NO: 298140 - DNA, 15 bp, Homo sapiens
ggtcttaatagagag

SEQ ID NO: 298141 - DNA, 15 bp, Homo sapiens
aggtcttaatagaga

SEQ ID NO: 298142 - DNA, 15 bp, Homo sapiens
caggtcttaatagag

SEQ ID NO: 298143 - DNA, 15 bp, Homo sapiens
acaggtcttaataga

SEQ ID NO: 298144 - DNA, 15 bp, Homo sapiens
cacaggtcttaatag

SEQ ID NO: 298145 - DNA, 15 bp, Homo sapiens
ccacaggtcttaata

SEQ ID NO: 298146 - DNA, 15 bp, Homo sapiens
cccacaggtcttaat

SEQ ID NO: 298147 - DNA, 15 bp, Homo sapiens
ccccacaggtcttaa

SEQ ID NO: 298148 - DNA, 15 bp, Homo sapiens
cccccacaggtctta

SEQ ID NO: 298149 - DNA, 15 bp, Homo sapiens
gcccccacaggtctt

SEQ ID NO: 298150 - DNA, 15 bp, Homo sapiens
agcccccacaggtct

SEQ ID NO: 298151 - DNA, 15 bp, Homo sapiens
tagcccccacaggtc

SEQ ID NO: 298152 - DNA, 15 bp, Homo sapiens
ctagcccccacaggt

SEQ ID NO: 298153 - DNA, 15 bp, Homo sapiens
gctagcccccacagg

SEQ ID NO: 298154 - DNA, 15 bp, Homo sapiens
cgctagcccccacag

SEQ ID NO: 298155 - DNA, 15 bp, Homo sapiens
tcgctagcccccaca

SEQ ID NO: 298156 - DNA, 15 bp, Homo sapiens
atcgctagcccccac

SEQ ID NO: 298157 - DNA, 15 bp, Homo sapiens
aatcgctagccccca

SEQ ID NO: 298158 - DNA, 15 bp, Homo sapiens
caatcgctagccccc

SEQ ID NO: 298159 - DNA, 15 bp, Homo sapiens
tcaatcgctagcccc

SEQ ID NO: 298160 - DNA, 15 bp, Homo sapiens
atcaatcgctagccc

SEQ ID NO: 298161 - DNA, 15 bp, Homo sapiens
tatcaatcgctagcc

SEQ ID NO: 298162 - DNA, 15 bp, Homo sapiens
ttatcaatcgctagc

SEQ ID NO: 298163 - DNA, 15 bp, Homo sapiens
attatcaatcgctag

SEQ ID NO: 298164 - DNA, 15 bp, Homo sapiens
aattatcaatcgcta

SEQ ID NO: 298165 - DNA, 15 bp, Homo sapiens
aaattatcaatcgct

SEQ ID NO: 298166 - DNA, 15 bp, Homo sapiens
aaaattatcaatcgc

SEQ ID NO: 298167 - DNA, 15 bp, Homo sapiens
taaaattatcaatcg

SEQ ID NO: 298168 - DNA, 15 bp, Homo sapiens
ataaaattatcaatc

SEQ ID NO: 298169 - DNA, 15 bp, Homo sapiens
aataaaattatcaat

SEQ ID NO: 298170 - DNA, 15 bp, Homo sapiens
caataaaattatcaa

SEQ ID NO: 298171 - DNA, 15 bp, Homo sapiens
tcaataaaattatca

SEQ ID NO: 298172 - DNA, 15 bp, Homo sapiens
ctcaataaaattatc

SEQ ID NO: 298173 - DNA, 15 bp, Homo sapiens
actcaataaaattat

SEQ ID NO: 298174 - DNA, 15 bp, Homo sapiens
aactcaataaaatta

SEQ ID NO: 298175 - DNA, 15 bp, Homo sapiens
gaactcaataaaatt

SEQ ID NO: 298176 - DNA, 15 bp, Homo sapiens
ggaactcaataaaat

SEQ ID NO: 298177 - DNA, 15 bp, Homo sapiens
gggaactcaataaaa

SEQ ID NO: 298178 - DNA, 15 bp, Homo sapiens
ggggaactcaataaa

SEQ ID NO: 298179 - DNA, 15 bp, Homo sapiens
tggggaactcaataa

SEQ ID NO: 298180 - DNA, 15 bp, Homo sapiens
ctggggaactcaata

SEQ ID NO: 298181 - DNA, 15 bp, Homo sapiens
cctggggaactcaat

SEQ ID NO: 298182 - DNA, 15 bp, Homo sapiens
ccctggggaactcaa

SEQ ID NO: 298183 - DNA, 15 bp, Homo sapiens
tccctggggaactca

SEQ ID NO: 298184 - DNA, 15 bp, Homo sapiens
gtccctggggaactc

SEQ ID NO: 298185 - DNA, 15 bp, Homo sapiens
tgtccctggggaact

SEQ ID NO: 298186 - DNA, 15 bp, Homo sapiens
atgtccctggggaac

SEQ ID NO: 298187 - DNA, 15 bp, Homo sapiens
aatgtccctggggaa

SEQ ID NO: 298188 - DNA, 15 bp, Homo sapiens
taatgtccctgggga

SEQ ID NO: 298189 - DNA, 15 bp, Homo sapiens
ataatgtccctgggg

SEQ ID NO: 298190 - DNA, 15 bp, Homo sapiens
aataatgtccctggg

SEQ ID NO: 298191 - DNA, 15 bp, Homo sapiens
aaataatgtccctgg

SEQ ID NO: 298192 - DNA, 15 bp, Homo sapiens
caaataatgtccctg

SEQ ID NO: 298193 - DNA, 15 bp, Homo sapiens
acaaataatgtccct

SEQ ID NO: 298194 - DNA, 15 bp, Homo sapiens
tacaaataatgtccc

SEQ ID NO: 298195 - DNA, 15 bp, Homo sapiens
ctacaaataatgtcc

SEQ ID NO: 298196 - DNA, 15 bp, Homo sapiens
tctacaaataatgtc

SEQ ID NO: 298197 - DNA, 15 bp, Homo sapiens
ttctacaaataatgt

SEQ ID NO: 298198 - DNA, 15 bp, Homo sapiens
gttctacaaataatg

SEQ ID NO: 298199 - DNA, 15 bp, Homo sapiens
ggttctacaaataat

SEQ ID NO: 298200 - DNA, 15 bp, Homo sapiens
gggttctacaaataa

SEQ ID NO: 298201 - DNA, 15 bp, Homo sapiens
tgggttctacaaata

SEQ ID NO: 298202 - DNA, 15 bp, Homo sapiens
ctgggttctacaaat

SEQ ID NO: 298203 - DNA, 15 bp, Homo sapiens
actgggttctacaaa

SEQ ID NO: 298204 - DNA, 15 bp, Homo sapiens
aactgggttctacaa

SEQ ID NO: 298205 - DNA, 15 bp, Homo sapiens
caactgggttctaca

SEQ ID NO: 298206 - DNA, 15 bp, Homo sapiens
gcaactgggttctac

SEQ ID NO: 298207 - DNA, 15 bp, Homo sapiens
agcaactgggttcta

SEQ ID NO: 298208 - DNA, 15 bp, Homo sapiens
tagcaactgggttct

SEQ ID NO: 298209 - DNA, 15 bp, Homo sapiens
ttagcaactgggttc

SEQ ID NO: 298210 - DNA, 15 bp, Homo sapiens
attagcaactgggtt

SEQ ID NO: 298211 - DNA, 15 bp, Homo sapiens
cattagcaactgggt

SEQ ID NO: 298212 - DNA, 15 bp, Homo sapiens
ccattagcaactggg

SEQ ID NO: 298213 - DNA, 15 bp, Homo sapiens
accattagcaactgg

SEQ ID NO: 298214 - DNA, 15 bp, Homo sapiens
aaccattagcaactg

SEQ ID NO: 298215 - DNA, 15 bp, Homo sapiens
taaccattagcaact

SEQ ID NO: 298216 - DNA, 15 bp, Homo sapiens
ctaaccattagcaac

SEQ ID NO: 298217 - DNA, 15 bp, Homo sapiens
cctaaccattagcaa

SEQ ID NO: 298218 - DNA, 15 bp, Homo sapiens
acctaaccattagca

SEQ ID NO: 298219 - DNA, 15 bp, Homo sapiens
gacctaaccattagc

SEQ ID NO: 298220 - DNA, 15 bp, Homo sapiens
tgacctaaccattag

SEQ ID NO: 298221 - DNA, 15 bp, Homo sapiens
ctgacctaaccatta

SEQ ID NO: 298222 - DNA, 15 bp, Homo sapiens
actgacctaaccatt

SEQ ID NO: 298223 - DNA, 15 bp, Homo sapiens
cactgacctaaccat

SEQ ID NO: 298224 - DNA, 15 bp, Homo sapiens
tcactgacctaacca

SEQ ID NO: 298225 - DNA, 15 bp, Homo sapiens
gtcactgacctaacc

SEQ ID NO: 298226 - DNA, 15 bp, Homo sapiens
ggtcactgacctaac

SEQ ID NO: 298227 - DNA, 15 bp, Homo sapiens
cggtcactgacctaa

SEQ ID NO: 298228 - DNA, 15 bp, Homo sapiens
gcggtcactgaccta

SEQ ID NO: 298229 - DNA, 15 bp, Homo sapiens
agcggtcactgacct

SEQ ID NO: 298230 - DNA, 15 bp, Homo sapiens
tagcggtcactgacc

SEQ ID NO: 298231 - DNA, 15 bp, Homo sapiens
ctagcggtcactgac

SEQ ID NO: 298232 - DNA, 15 bp, Homo sapiens
tctagcggtcactga

SEQ ID NO: 298233 - DNA, 15 bp, Homo sapiens
ctctagcggtcactg

SEQ ID NO: 298234 - DNA, 15 bp, Homo sapiens
tctctagcggtcact

SEQ ID NO: 298235 - DNA, 15 bp, Homo sapiens
gtctctagcggtcac

SEQ ID NO: 298236 - DNA, 15 bp, Homo sapiens
tgtctctagcggtca

SEQ ID NO: 298237 - DNA, 15 bp, Homo sapiens
atgtctctagcggtc

SEQ ID NO: 298238 - DNA, 15 bp, Homo sapiens
gatgtctctagcggt

SEQ ID NO: 298239 - DNA, 15 bp, Homo sapiens
agatgtctctagcgg

SEQ ID NO: 298240 - DNA, 15 bp, Homo sapiens
gagatgtctctagcg

SEQ ID NO: 298241 - DNA, 15 bp, Homo sapiens
tgagatgtctctagc

SEQ ID NO: 298242 - DNA, 15 bp, Homo sapiens
ctgagatgtctctag

SEQ ID NO: 298243 - DNA, 15 bp, Homo sapiens
tctgagatgtctcta

SEQ ID NO: 298244 - DNA, 15 bp, Homo sapiens
ttctgagatgtctct

SEQ ID NO: 298245 - DNA, 15 bp, Homo sapiens
gttctgagatgtctc

SEQ ID NO: 298246 - DNA, 15 bp, Homo sapiens
ggttctgagatgtct

SEQ ID NO: 298247 - DNA, 15 bp, Homo sapiens
gggttctgagatgtc

SEQ ID NO: 298248 - DNA, 15 bp, Homo sapiens
ggggttctgagatgt

SEQ ID NO: 298249 - DNA, 15 bp, Homo sapiens
tggggttctgagatg

SEQ ID NO: 298250 - DNA, 15 bp, Homo sapiens
ctggggttctgagat

SEQ ID NO: 298251 - DNA, 15 bp, Homo sapiens
tctggggttctgaga

SEQ ID NO: 298252 - DNA, 15 bp, Homo sapiens
ttctggggttctgag

SEQ ID NO: 298253 - DNA, 15 bp, Homo sapiens
cttctggggttctga

SEQ ID NO: 298254 - DNA, 15 bp, Homo sapiens
gcttctggggttctg

SEQ ID NO: 298255 - DNA, 15 bp, Homo sapiens
agcttctggggttct

SEQ ID NO: 298256 - DNA, 15 bp, Homo sapiens
gagcttctggggttc

SEQ ID NO: 298257 - DNA, 15 bp, Homo sapiens
agagcttctggggtt

SEQ ID NO: 298258 - DNA, 15 bp, Homo sapiens
cagagcttctggggt

SEQ ID NO: 298259 - DNA, 15 bp, Homo sapiens
ccagagcttctgggg

SEQ ID NO: 298260 - DNA, 15 bp, Homo sapiens
accagagcttctggg

SEQ ID NO: 298261 - DNA, 15 bp, Homo sapiens
aaccagagcttctgg

SEQ ID NO: 298262 - DNA, 15 bp, Homo sapiens
aaaccagagcttctg

SEQ ID NO: 298263 - DNA, 15 bp, Homo sapiens
gaaaccagagcttct

SEQ ID NO: 298264 - DNA, 15 bp, Homo sapiens
agaaaccagagcttc

SEQ ID NO: 298265 - DNA, 15 bp, Homo sapiens
tagaaaccagagctt

SEQ ID NO: 298266 - DNA, 15 bp, Homo sapiens
atagaaaccagagct

SEQ ID NO: 298267 - DNA, 15 bp, Homo sapiens
catagaaaccagagc

SEQ ID NO: 298268 - DNA, 15 bp, Homo sapiens
tcatagaaaccagag

SEQ ID NO: 298269 - DNA, 15 bp, Homo sapiens
ttcatagaaaccaga

SEQ ID NO: 298270 - DNA, 15 bp, Homo sapiens
tttcatagaaaccag

SEQ ID NO: 298271 - DNA, 15 bp, Homo sapiens
ttttcatagaaacca

SEQ ID NO: 298272 - DNA, 15 bp, Homo sapiens
cttttcatagaaacc

SEQ ID NO: 298273 - DNA, 15 bp, Homo sapiens
tcttttcatagaaac

SEQ ID NO: 298274 - DNA, 15 bp, Homo sapiens
ctcttttcatagaaa

SEQ ID NO: 298275 - DNA, 15 bp, Homo sapiens
tctcttttcatagaa

SEQ ID NO: 298276 - DNA, 15 bp, Homo sapiens
ttctcttttcataga

SEQ ID NO: 298277 - DNA, 15 bp, Homo sapiens
tttctcttttcatag

SEQ ID NO: 298278 - DNA, 15 bp, Homo sapiens
ttttctcttttcata

SEQ ID NO: 298279 - DNA, 15 bp, Homo sapiens
gttttctcttttcat

SEQ ID NO: 298280 - DNA, 15 bp, Homo sapiens
tgttttctcttttca

SEQ ID NO: 298281 - DNA, 15 bp, Homo sapiens
ctgttttctcttttc

SEQ ID NO: 298282 - DNA, 15 bp, Homo sapiens
gctgttttctctttt

SEQ ID NO: 298283 - DNA, 15 bp, Homo sapiens
ggctgttttctcttt

SEQ ID NO: 298284 - DNA, 15 bp, Homo sapiens
gggctgttttctctt

SEQ ID NO: 298285 - DNA, 15 bp, Homo sapiens
ggggctgttttctct

SEQ ID NO: 298286 - DNA, 15 bp, Homo sapiens
tggggctgttttctc

SEQ ID NO: 298287 - DNA, 15 bp, Homo sapiens
ttggggctgttttct

SEQ ID NO: 298288 - DNA, 15 bp, Homo sapiens
gttggggctgttttc

SEQ ID NO: 298289 - DNA, 15 bp, Homo sapiens
tgttggggctgtttt

SEQ ID NO: 298290 - DNA, 15 bp, Homo sapiens
ctgttggggctgttt

SEQ ID NO: 298291 - DNA, 15 bp, Homo sapiens
actgttggggctgtt

SEQ ID NO: 298292 - DNA, 15 bp, Homo sapiens
aactgttggggctgt

SEQ ID NO: 298293 - DNA, 15 bp, Homo sapiens
caactgttggggctg

SEQ ID NO: 298294 - DNA, 15 bp, Homo sapiens
ccaactgttggggct

SEQ ID NO: 298295 - DNA, 15 bp, Homo sapiens
tccaactgttggggc

SEQ ID NO: 298296 - DNA, 15 bp, Homo sapiens
atccaactgttgggg

SEQ ID NO: 298297 - DNA, 15 bp, Homo sapiens
catccaactgttggg

SEQ ID NO: 298298 - DNA, 15 bp, Homo sapiens
acatccaactgttgg

SEQ ID NO: 298299 - DNA, 15 bp, Homo sapiens
gacatccaactgttg

SEQ ID NO: 298300 - DNA, 15 bp, Homo sapiens
tgacatccaactgtt

SEQ ID NO: 298301 - DNA, 15 bp, Homo sapiens
gtgacatccaactgt

SEQ ID NO: 298302 - DNA, 15 bp, Homo sapiens
agtgacatccaactg

SEQ ID NO: 298303 - DNA, 15 bp, Homo sapiens
aagtgacatccaact

SEQ ID NO: 298304 - DNA, 15 bp, Homo sapiens
taagtgacatccaac

SEQ ID NO: 298305 - DNA, 15 bp, Homo sapiens
ataagtgacatccaa

SEQ ID NO: 298306 - DNA, 15 bp, Homo sapiens
tataagtgacatcca

SEQ ID NO: 298307 - DNA, 15 bp, Homo sapiens
atataagtgacatcc

SEQ ID NO: 298308 - DNA, 15 bp, Homo sapiens
gatataagtgacatc

SEQ ID NO: 298309 - DNA, 15 bp, Homo sapiens
agatataagtgacat

SEQ ID NO: 298310 - DNA, 15 bp, Homo sapiens
aagatataagtgaca

SEQ ID NO: 298311 - DNA, 15 bp, Homo sapiens
caagatataagtgac

SEQ ID NO: 298312 - DNA, 15 bp, Homo sapiens
tcaagatataagtga

SEQ ID NO: 298313 - DNA, 15 bp, Homo sapiens
ctcaagatataagtg

SEQ ID NO: 298314 - DNA, 15 bp, Homo sapiens
cctcaagatataagt

SEQ ID NO: 298315 - DNA, 15 bp, Homo sapiens
gcctcaagatataag

SEQ ID NO: 298316 - DNA, 15 bp, Homo sapiens
tgcctcaagatataa

SEQ ID NO: 298317 - DNA, 15 bp, Homo sapiens
ctgcctcaagatata

SEQ ID NO: 298318 - DNA, 15 bp, Homo sapiens
tctgcctcaagatat

SEQ ID NO: 298319 - DNA, 15 bp, Homo sapiens
gtctgcctcaagata

SEQ ID NO: 298320 - DNA, 15 bp, Homo sapiens
agtctgcctcaagat

SEQ ID NO: 298321 - DNA, 15 bp, Homo sapiens
aagtctgcctcaaga

SEQ ID NO: 298322 - DNA, 15 bp, Homo sapiens
aaagtctgcctcaag

SEQ ID NO: 298323 - DNA, 15 bp, Homo sapiens
aaaagtctgcctcaa

SEQ ID NO: 298324 - DNA, 15 bp, Homo sapiens
aaaaagtctgcctca

SEQ ID NO: 298325 - DNA, 15 bp, Homo sapiens
aaaaaagtctgcctc

SEQ ID NO: 298326 - DNA, 15 bp, Homo sapiens
aaaaaaagtctgcct

SEQ ID NO: 298327 - DNA, 15 bp, Homo sapiens
taaaaaaagtctgcc

SEQ ID NO: 298328 - DNA, 15 bp, Homo sapiens
ctaaaaaaagtctgc

SEQ ID NO: 298329 - DNA, 15 bp, Homo sapiens
gctaaaaaaagtctg

SEQ ID NO: 298330 - DNA, 15 bp, Homo sapiens
tgctaaaaaaagtct

SEQ ID NO: 298331 - DNA, 15 bp, Homo sapiens
ctgctaaaaaaagtc

SEQ ID NO: 298332 - DNA, 15 bp, Homo sapiens
tctgctaaaaaaagt

SEQ ID NO: 298333 - DNA, 15 bp, Homo sapiens
ttctgctaaaaaaag

SEQ ID NO: 298334 - DNA, 15 bp, Homo sapiens
tttctgctaaaaaaa

SEQ ID NO: 298335 - DNA, 15 bp, Homo sapiens
gtttctgctaaaaaa

SEQ ID NO: 298336 - DNA, 15 bp, Homo sapiens
agtttctgctaaaaa

SEQ ID NO: 298337 - DNA, 15 bp, Homo sapiens
cagtttctgctaaaa

SEQ ID NO: 298338 - DNA, 15 bp, Homo sapiens
ccagtttctgctaaa

SEQ ID NO: 298339 - DNA, 15 bp, Homo sapiens
tccagtttctgctaa

SEQ ID NO: 298340 - DNA, 15 bp, Homo sapiens
ttccagtttctgcta

SEQ ID NO: 298341 - DNA, 15 bp, Homo sapiens
attccagtttctgct

SEQ ID NO: 298342 - DNA, 15 bp, Homo sapiens
tattccagtttctgc

SEQ ID NO: 298343 - DNA, 15 bp, Homo sapiens
atattccagtttctg

SEQ ID NO: 298344 - DNA, 15 bp, Homo sapiens
tatattccagtttct

SEQ ID NO: 298345 - DNA, 15 bp, Homo sapiens
atatattccagtttc

SEQ ID NO: 298346 - DNA, 15 bp, Homo sapiens
catatattccagttt

SEQ ID NO: 298347 - DNA, 15 bp, Homo sapiens
ccatatattccagtt

SEQ ID NO: 298348 - DNA, 15 bp, Homo sapiens
gccatatattccagt

SEQ ID NO: 298349 - DNA, 15 bp, Homo sapiens
agccatatattccag

SEQ ID NO: 298350 - DNA, 15 bp, Homo sapiens
tagccatatattcca

SEQ ID NO: 298351 - DNA, 15 bp, Homo sapiens
ttagccatatattcc

SEQ ID NO: 298352 - DNA, 15 bp, Homo sapiens
cttagccatatattc

SEQ ID NO: 298353 - DNA, 15 bp, Homo sapiens
ccttagccatatatt

SEQ ID NO: 298354 - DNA, 15 bp, Homo sapiens
cccttagccatatat

SEQ ID NO: 298355 - DNA, 15 bp, Homo sapiens
ccccttagccatata

SEQ ID NO: 298356 - DNA, 15 bp, Homo sapiens
cccccttagccatat

SEQ ID NO: 298357 - DNA, 15 bp, Homo sapiens
acccccttagccata

SEQ ID NO: 298358 - DNA, 15 bp, Homo sapiens
tacccccttagccat

SEQ ID NO: 298359 - DNA, 15 bp, Homo sapiens
ttacccccttagcca

SEQ ID NO: 298360 - DNA, 15 bp, Homo sapiens
tttacccccttagcc

SEQ ID NO: 298361 - DNA, 15 bp, Homo sapiens
ttttacccccttagc

SEQ ID NO: 298362 - DNA, 15 bp, Homo sapiens
tttttacccccttag

SEQ ID NO: 298363 - DNA, 15 bp, Homo sapiens
ctttttaccccctta

SEQ ID NO: 298364 - DNA, 15 bp, Homo sapiens
cctttttaccccctt

SEQ ID NO: 298365 - DNA, 15 bp, Homo sapiens
tcctttttaccccct

SEQ ID NO: 298366 - DNA, 15 bp, Homo sapiens
gtcctttttaccccc

SEQ ID NO: 298367 - DNA, 15 bp, Homo sapiens
ggtcctttttacccc

SEQ ID NO: 298368 - DNA, 15 bp, Homo sapiens
tggtcctttttaccc

SEQ ID NO: 298369 - DNA, 15 bp, Homo sapiens
ctggtcctttttacc

SEQ ID NO: 298370 - DNA, 15 bp, Homo sapiens
tctggtcctttttac

SEQ ID NO: 298371 - DNA, 15 bp, Homo sapiens
atctggtccttttta

SEQ ID NO: 298372 - DNA, 15 bp, Homo sapiens
gatctggtccttttt

SEQ ID NO: 298373 - DNA, 15 bp, Homo sapiens
ggatctggtcctttt

SEQ ID NO: 298374 - DNA, 15 bp, Homo sapiens
tggatctggtccttt

SEQ ID NO: 298375 - DNA, 15 bp, Homo sapiens
ttggatctggtcctt

SEQ ID NO: 298376 - DNA, 15 bp, Homo sapiens
cttggatctggtcct

SEQ ID NO: 298377 - DNA, 15 bp, Homo sapiens
tcttggatctggtcc

SEQ ID NO: 298378 - DNA, 15 bp, Homo sapiens
ctcttggatctggtc

SEQ ID NO: 298379 - DNA, 15 bp, Homo sapiens
gctcttggatctggt

SEQ ID NO: 298380 - DNA, 15 bp, Homo sapiens
agctcttggatctgg

SEQ ID NO: 298381 - DNA, 15 bp, Homo sapiens
aagctcttggatctg

SEQ ID NO: 298382 - DNA, 15 bp, Homo sapiens
caagctcttggatct

SEQ ID NO: 298383 - DNA, 15 bp, Homo sapiens
ccaagctcttggatc

SEQ ID NO: 298384 - DNA, 15 bp, Homo sapiens
cccaagctcttggat

SEQ ID NO: 298385 - DNA, 15 bp, Homo sapiens
ccccaagctcttgga

SEQ ID NO: 298386 - DNA, 15 bp, Homo sapiens
tccccaagctcttgg

SEQ ID NO: 298387 - DNA, 15 bp, Homo sapiens
atccccaagctcttg

SEQ ID NO: 298388 - DNA, 15 bp, Homo sapiens
aatccccaagctctt

SEQ ID NO: 298389 - DNA, 15 bp, Homo sapiens
aaatccccaagctct

SEQ ID NO: 298390 - DNA, 15 bp, Homo sapiens
aaaatccccaagctc

SEQ ID NO: 298391 - DNA, 15 bp, Homo sapiens
aaaaatccccaagct

SEQ ID NO: 298392 - DNA, 15 bp, Homo sapiens
taaaaatccccaagc

SEQ ID NO: 298393 - DNA, 15 bp, Homo sapiens
ctaaaaatccccaag

SEQ ID NO: 298394 - DNA, 15 bp, Homo sapiens
tctaaaaatccccaa

SEQ ID NO: 298395 - DNA, 15 bp, Homo sapiens
atctaaaaatcccca

SEQ ID NO: 298396 - DNA, 15 bp, Homo sapiens
aatctaaaaatcccc

SEQ ID NO: 298397 - DNA, 15 bp, Homo sapiens
aaatctaaaaatccc

SEQ ID NO: 298398 - DNA, 15 bp, Homo sapiens
gaaatctaaaaatcc

SEQ ID NO: 298399 - DNA, 15 bp, Homo sapiens
tgaaatctaaaaatc

SEQ ID NO: 298400 - DNA, 15 bp, Homo sapiens
ttgaaatctaaaaat

SEQ ID NO: 298401 - DNA, 15 bp, Homo sapiens
tttgaaatctaaaaa

SEQ ID NO: 298402 - DNA, 15 bp, Homo sapiens
ttttgaaatctaaaa

SEQ ID NO: 298403 - DNA, 15 bp, Homo sapiens
gttttgaaatctaaa

SEQ ID NO: 298404 - DNA, 15 bp, Homo sapiens
agttttgaaatctaa

SEQ ID NO: 298405 - DNA, 15 bp, Homo sapiens
tagttttgaaatcta

SEQ ID NO: 298406 - DNA, 15 bp, Homo sapiens
ctagttttgaaatct

SEQ ID NO: 298407 - DNA, 15 bp, Homo sapiens
tctagttttgaaatc

SEQ ID NO: 298408 - DNA, 15 bp, Homo sapiens
atctagttttgaaat

SEQ ID NO: 298409 - DNA, 15 bp, Homo sapiens
tatctagttttgaaa

SEQ ID NO: 298410 - DNA, 15 bp, Homo sapiens
ctatctagttttgaa

SEQ ID NO: 298411 - DNA, 15 bp, Homo sapiens
actatctagttttga

SEQ ID NO: 298412 - DNA, 15 bp, Homo sapiens
aactatctagttttg

SEQ ID NO: 298413 - DNA, 15 bp, Homo sapiens
aaactatctagtttt

SEQ ID NO: 298414 - DNA, 15 bp, Homo sapiens
gaaactatctagttt

SEQ ID NO: 298415 - DNA, 15 bp, Homo sapiens
tgaaactatctagtt

SEQ ID NO: 298416 - DNA, 15 bp, Homo sapiens
ttgaaactatctagt

SEQ ID NO: 298417 - DNA, 15 bp, Homo sapiens
tttgaaactatctag

SEQ ID NO: 298418 - DNA, 15 bp, Homo sapiens
gtttgaaactatcta

SEQ ID NO: 298419 - DNA, 15 bp, Homo sapiens
agtttgaaactatct

SEQ ID NO: 298420 - DNA, 15 bp, Homo sapiens
gagtttgaaactatc

SEQ ID NO: 298421 - DNA, 15 bp, Homo sapiens
ggagtttgaaactat

SEQ ID NO: 298422 - DNA, 15 bp, Homo sapiens
gggagtttgaaacta

SEQ ID NO: 298423 - DNA, 15 bp, Homo sapiens
ggggagtttgaaact

SEQ ID NO: 298424 - DNA, 15 bp, Homo sapiens
tggggagtttgaaac

SEQ ID NO: 298425 - DNA, 15 bp, Homo sapiens
ctggggagtttgaaa

SEQ ID NO: 298426 - DNA, 15 bp, Homo sapiens
cctggggagtttgaa

SEQ ID NO: 298427 - DNA, 15 bp, Homo sapiens
tcctggggagtttga

SEQ ID NO: 298428 - DNA, 15 bp, Homo sapiens
ttcctggggagtttg

SEQ ID NO: 298429 - DNA, 15 bp, Homo sapiens
tttcctggggagttt

SEQ ID NO: 298430 - DNA, 15 bp, Homo sapiens
ctttcctggggagtt

SEQ ID NO: 298431 - DNA, 15 bp, Homo sapiens
cctttcctggggagt

SEQ ID NO: 298432 - DNA, 15 bp, Homo sapiens
tcctttcctggggag

SEQ ID NO: 298433 - DNA, 15 bp, Homo sapiens
ttcctttcctgggga

SEQ ID NO: 298434 - DNA, 15 bp, Homo sapiens
cttcctttcctgggg

SEQ ID NO: 298435 - DNA, 15 bp, Homo sapiens
tcttcctttcctggg

SEQ ID NO: 298436 - DNA, 15 bp, Homo sapiens
ctcttcctttcctgg

SEQ ID NO: 298437 - DNA, 15 bp, Homo sapiens
tctcttcctttcctg

SEQ ID NO: 298438 - DNA, 15 bp, Homo sapiens
ctctcttcctttcct

SEQ ID NO: 298439 - DNA, 15 bp, Homo sapiens
cctctcttcctttcc

SEQ ID NO: 298440 - DNA, 15 bp, Homo sapiens
ccctctcttcctttc

SEQ ID NO: 298441 - DNA, 15 bp, Homo sapiens
gccctctcttccttt

SEQ ID NO: 298442 - DNA, 15 bp, Homo sapiens
agccctctcttcctt

SEQ ID NO: 298443 - DNA, 15 bp, Homo sapiens
tagccctctcttcct

SEQ ID NO: 298444 - DNA, 15 bp, Homo sapiens
gtagccctctcttcc

SEQ ID NO: 298445 - DNA, 15 bp, Homo sapiens
agtagccctctcttc

SEQ ID NO: 298446 - DNA, 15 bp, Homo sapiens
tagtagccctctctt

SEQ ID NO: 298447 - DNA, 15 bp, Homo sapiens
ttagtagccctctct

SEQ ID NO: 298448 - DNA, 15 bp, Homo sapiens
tttagtagccctctc

SEQ ID NO: 298449 - DNA, 15 bp, Homo sapiens
ttttagtagccctct

SEQ ID NO: 298450 - DNA, 15 bp, Homo sapiens
gttttagtagccctc

SEQ ID NO: 298451 - DNA, 15 bp, Homo sapiens
tgttttagtagccct

SEQ ID NO: 298452 - DNA, 15 bp, Homo sapiens
ttgttttagtagccc

SEQ ID NO: 298453 - DNA, 15 bp, Homo sapiens
attgttttagtagcc

SEQ ID NO: 298454 - DNA, 15 bp, Homo sapiens
gattgttttagtagc

SEQ ID NO: 298455 - DNA, 15 bp, Homo sapiens
agattgttttagtag

SEQ ID NO: 298456 - DNA, 15 bp, Homo sapiens
gagattgttttagta

SEQ ID NO: 298457 - DNA, 15 bp, Homo sapiens
ggagattgttttagt

SEQ ID NO: 298458 - DNA, 15 bp, Homo sapiens
aggagattgttttag

SEQ ID NO: 298459 - DNA, 15 bp, Homo sapiens
gaggagattgtttta

SEQ ID NO: 298460 - DNA, 15 bp, Homo sapiens
ggaggagattgtttt

SEQ ID NO: 298461 - DNA, 15 bp, Homo sapiens
gggaggagattgttt

SEQ ID NO: 298462 - DNA, 15 bp, Homo sapiens
ggggaggagattgtt

SEQ ID NO: 298463 - DNA, 15 bp, Homo sapiens
aggggaggagattgt

SEQ ID NO: 298464 - DNA, 15 bp, Homo sapiens
aaggggaggagattg

SEQ ID NO: 298465 - DNA, 15 bp, Homo sapiens
aaaggggaggagatt

SEQ ID NO: 298466 - DNA, 15 bp, Homo sapiens
aaaaggggaggagat

SEQ ID NO: 298467 - DNA, 15 bp, Homo sapiens
caaaaggggaggaga

SEQ ID NO: 298468 - DNA, 15 bp, Homo sapiens
acaaaaggggaggag

SEQ ID NO: 298469 - DNA, 15 bp, Homo sapiens
gacaaaaggggagga

SEQ ID NO: 298470 - DNA, 15 bp, Homo sapiens
agacaaaaggggagg

SEQ ID NO: 298471 - DNA, 15 bp, Homo sapiens
tagacaaaaggggag

SEQ ID NO: 298472 - DNA, 15 bp, Homo sapiens
ctagacaaaagggga

SEQ ID NO: 298473 - DNA, 15 bp, Homo sapiens
tctagacaaaagggg

SEQ ID NO: 298474 - DNA, 15 bp, Homo sapiens
ttctagacaaaaggg

SEQ ID NO: 298475 - DNA, 15 bp, Homo sapiens
tttctagacaaaagg

SEQ ID NO: 298476 - DNA, 15 bp, Homo sapiens
ttttctagacaaaag

SEQ ID NO: 298477 - DNA, 15 bp, Homo sapiens
cttttctagacaaaa

SEQ ID NO: 298478 - DNA, 15 bp, Homo sapiens
tcttttctagacaaa

SEQ ID NO: 298479 - DNA, 15 bp, Homo sapiens
gtcttttctagacaa

SEQ ID NO: 298480 - DNA, 15 bp, Homo sapiens
ggtcttttctagaca

SEQ ID NO: 298481 - DNA, 15 bp, Homo sapiens
gggtcttttctagac

SEQ ID NO: 298482 - DNA, 15 bp, Homo sapiens
ggggtcttttctaga

SEQ ID NO: 298483 - DNA, 15 bp, Homo sapiens
aggggtcttttctag

SEQ ID NO: 298484 - DNA, 15 bp, Homo sapiens
aaggggtcttttcta

SEQ ID NO: 298485 - DNA, 15 bp, Homo sapiens
caaggggtcttttct

SEQ ID NO: 298486 - DNA, 15 bp, Homo sapiens
tcaaggggtcttttc

SEQ ID NO: 298487 - DNA, 15 bp, Homo sapiens
ttcaaggggtctttt

SEQ ID NO: 298488 - DNA, 15 bp, Homo sapiens
tttcaaggggtcttt

SEQ ID NO: 298489 - DNA, 15 bp, Homo sapiens
gtttcaaggggtctt

SEQ ID NO: 298490 - DNA, 15 bp, Homo sapiens
ggtttcaaggggtct

SEQ ID NO: 298491 - DNA, 15 bp, Homo sapiens
tggtttcaaggggtc

SEQ ID NO: 298492 - DNA, 15 bp, Homo sapiens
gtggtttcaaggggt

SEQ ID NO: 298493 - DNA, 15 bp, Homo sapiens
agtggtttcaagggg

SEQ ID NO: 298494 - DNA, 15 bp, Homo sapiens
tagtggtttcaaggg

SEQ ID NO: 298495 - DNA, 15 bp, Homo sapiens
atagtggtttcaagg

SEQ ID NO: 298496 - DNA, 15 bp, Homo sapiens
aatagtggtttcaag

SEQ ID NO: 298497 - DNA, 15 bp, Homo sapiens
taatagtggtttcaa

SEQ ID NO: 298498 - DNA, 15 bp, Homo sapiens
ctaatagtggtttca

SEQ ID NO: 298499 - DNA, 15 bp, Homo sapiens
tctaatagtggtttc

SEQ ID NO: 298500 - DNA, 15 bp, Homo sapiens
ttctaatagtggttt

SEQ ID NO: 298501 - DNA, 15 bp, Homo sapiens
attctaatagtggtt

SEQ ID NO: 298502 - DNA, 15 bp, Homo sapiens
cattctaatagtggt

SEQ ID NO: 298503 - DNA, 15 bp, Homo sapiens
ccattctaatagtgg

SEQ ID NO: 298504 - DNA, 15 bp, Homo sapiens
gccattctaatagtg

SEQ ID NO: 298505 - DNA, 15 bp, Homo sapiens
ggccattctaatagt

SEQ ID NO: 298506 - DNA, 15 bp, Homo sapiens
gggccattctaatag

SEQ ID NO: 298507 - DNA, 15 bp, Homo sapiens
ggggccattctaata

SEQ ID NO: 298508 - DNA, 15 bp, Homo sapiens
aggggccattctaat

SEQ ID NO: 298509 - DNA, 15 bp, Homo sapiens
aaggggccattctaa

SEQ ID NO: 298510 - DNA, 15 bp, Homo sapiens
aaaggggccattcta

SEQ ID NO: 298511 - DNA, 15 bp, Homo sapiens
caaaggggccattct

SEQ ID NO: 298512 - DNA, 15 bp, Homo sapiens
acaaaggggccattc

SEQ ID NO: 298513 - DNA, 15 bp, Homo sapiens
tacaaaggggccatt

SEQ ID NO: 298514 - DNA, 15 bp, Homo sapiens
atacaaaggggccat

SEQ ID NO: 298515 - DNA, 15 bp, Homo sapiens
catacaaaggggcca

SEQ ID NO: 298516 - DNA, 15 bp, Homo sapiens
gcatacaaaggggcc

SEQ ID NO: 298517 - DNA, 15 bp, Homo sapiens
tgcatacaaaggggc

SEQ ID NO: 298518 - DNA, 15 bp, Homo sapiens
gtgcatacaaagggg

SEQ ID NO: 298519 - DNA, 15 bp, Homo sapiens
tgtgcatacaaaggg

SEQ ID NO: 298520 - DNA, 15 bp, Homo sapiens
ttgtgcatacaaagg

SEQ ID NO: 298521 - DNA, 15 bp, Homo sapiens
tttgtgcatacaaag

SEQ ID NO: 298522 - DNA, 15 bp, Homo sapiens
ttttgtgcatacaaa

SEQ ID NO: 298523 - DNA, 15 bp, Homo sapiens
tttttgtgcatacaa

SEQ ID NO: 298524 - DNA, 15 bp, Homo sapiens
gtttttgtgcataca

SEQ ID NO: 298525 - DNA, 15 bp, Homo sapiens
cgtttttgtgcatac

SEQ ID NO: 298526 - DNA, 15 bp, Homo sapiens
tcgtttttgtgcata

SEQ ID NO: 298527 - DNA, 15 bp, Homo sapiens
gtcgtttttgtgcat

SEQ ID NO: 298528 - DNA, 15 bp, Homo sapiens
ggtcgtttttgtgca

SEQ ID NO: 298529 - DNA, 15 bp, Homo sapiens
gggtcgtttttgtgc

SEQ ID NO: 298530 - DNA, 15 bp, Homo sapiens
tgggtcgtttttgtg

SEQ ID NO: 298531 - DNA, 15 bp, Homo sapiens
ctgggtcgtttttgt

SEQ ID NO: 298532 - DNA, 15 bp, Homo sapiens
tctgggtcgtttttg

SEQ ID NO: 298533 - DNA, 15 bp, Homo sapiens
atctgggtcgttttt

SEQ ID NO: 298534 - DNA, 15 bp, Homo sapiens
aatctgggtcgtttt

SEQ ID NO: 298535 - DNA, 15 bp, Homo sapiens
aaatctgggtcgttt

SEQ ID NO: 298536 - DNA, 15 bp, Homo sapiens
aaaatctgggtcgtt

SEQ ID NO: 298537 - DNA, 15 bp, Homo sapiens
gaaaatctgggtcgt

SEQ ID NO: 298538 - DNA, 15 bp, Homo sapiens
agaaaatctgggtcg

SEQ ID NO: 298539 - DNA, 15 bp, Homo sapiens
aagaaaatctgggtc

SEQ ID NO: 298540 - DNA, 15 bp, Homo sapiens
gaagaaaatctgggt

SEQ ID NO: 298541 - DNA, 15 bp, Homo sapiens
agaagaaaatctggg

SEQ ID NO: 298542 - DNA, 15 bp, Homo sapiens
aagaagaaaatctgg

SEQ ID NO: 298543 - DNA, 15 bp, Homo sapiens
taagaagaaaatctg

SEQ ID NO: 298544 - DNA, 15 bp, Homo sapiens
ataagaagaaaatct

SEQ ID NO: 298545 - DNA, 15 bp, Homo sapiens
gataagaagaaaatc

SEQ ID NO: 298546 - DNA, 15 bp, Homo sapiens
tgataagaagaaaat

SEQ ID NO: 298547 - DNA, 15 bp, Homo sapiens
gtgataagaagaaaa

SEQ ID NO: 298548 - DNA, 15 bp, Homo sapiens
agtgataagaagaaa

SEQ ID NO: 298549 - DNA, 15 bp, Homo sapiens
aagtgataagaagaa

SEQ ID NO: 298550 - DNA, 15 bp, Homo sapiens
taagtgataagaaga

SEQ ID NO: 298551 - DNA, 15 bp, Homo sapiens
ataagtgataagaag

SEQ ID NO: 298552 - DNA, 15 bp, Homo sapiens
gataagtgataagaa

SEQ ID NO: 298553 - DNA, 15 bp, Homo sapiens
agataagtgataaga

SEQ ID NO: 298554 - DNA, 15 bp, Homo sapiens
cagataagtgataag

SEQ ID NO: 298555 - DNA, 15 bp, Homo sapiens
gcagataagtgataa

SEQ ID NO: 298556 - DNA, 15 bp, Homo sapiens
agcagataagtgata

SEQ ID NO: 298557 - DNA, 15 bp, Homo sapiens
gagcagataagtgat

SEQ ID NO: 298558 - DNA, 15 bp, Homo sapiens
agagcagataagtga

SEQ ID NO: 298559 - DNA, 15 bp, Homo sapiens
gagagcagataagtg

SEQ ID NO: 298560 - DNA, 15 bp, Homo sapiens
ggagagcagataagt

SEQ ID NO: 298561 - DNA, 15 bp, Homo sapiens
aggagagcagataag

SEQ ID NO: 298562 - DNA, 15 bp, Homo sapiens
taggagagcagataa

SEQ ID NO: 298563 - DNA, 15 bp, Homo sapiens
ctaggagagcagata

SEQ ID NO: 298564 - DNA, 15 bp, Homo sapiens
tctaggagagcagat

SEQ ID NO: 298565 - DNA, 15 bp, Homo sapiens
ttctaggagagcaga

SEQ ID NO: 298566 - DNA, 15 bp, Homo sapiens
cttctaggagagcag

SEQ ID NO: 298567 - DNA, 15 bp, Homo sapiens
acttctaggagagca

SEQ ID NO: 298568 - DNA, 15 bp, Homo sapiens
aacttctaggagagc

SEQ ID NO: 298569 - DNA, 15 bp, Homo sapiens
aaacttctaggagag

SEQ ID NO: 298570 - DNA, 15 bp, Homo sapiens
aaaacttctaggaga

SEQ ID NO: 298571 - DNA, 15 bp, Homo sapiens
taaaacttctaggag

SEQ ID NO: 298572 - DNA, 15 bp, Homo sapiens
ttaaaacttctagga

SEQ ID NO: 298573 - DNA, 15 bp, Homo sapiens
tttaaaacttctagg

SEQ ID NO: 298574 - DNA, 15 bp, Homo sapiens
ttttaaaacttctag

SEQ ID NO: 298575 - DNA, 15 bp, Homo sapiens
attttaaaacttcta

SEQ ID NO: 298576 - DNA, 15 bp, Homo sapiens
gattttaaaacttct

SEQ ID NO: 298577 - DNA, 15 bp, Homo sapiens
agattttaaaacttc

SEQ ID NO: 298578 - DNA, 15 bp, Homo sapiens
gagattttaaaactt

SEQ ID NO: 298579 - DNA, 15 bp, Homo sapiens
ggagattttaaaact

SEQ ID NO: 298580 - DNA, 15 bp, Homo sapiens
aggagattttaaaac

SEQ ID NO: 298581 - DNA, 15 bp, Homo sapiens
caggagattttaaaa

SEQ ID NO: 298582 - DNA, 15 bp, Homo sapiens
tcaggagattttaaa

SEQ ID NO: 298583 - DNA, 15 bp, Homo sapiens
gtcaggagattttaa

SEQ ID NO: 298584 - DNA, 15 bp, Homo sapiens
tgtcaggagatttta

SEQ ID NO: 298585 - DNA, 15 bp, Homo sapiens
atgtcaggagatttt

SEQ ID NO: 298586 - DNA, 15 bp, Homo sapiens
aatgtcaggagattt

SEQ ID NO: 298587 - DNA, 15 bp, Homo sapiens
aaatgtcaggagatt

SEQ ID NO: 298588 - DNA, 15 bp, Homo sapiens
taaatgtcaggagat

SEQ ID NO: 298589 - DNA, 15 bp, Homo sapiens
ttaaatgtcaggaga

SEQ ID NO: 298590 - DNA, 15 bp, Homo sapiens
tttaaatgtcaggag

SEQ ID NO: 298591 - DNA, 15 bp, Homo sapiens
ttttaaatgtcagga

SEQ ID NO: 298592 - DNA, 15 bp, Homo sapiens
tttttaaatgtcagg

SEQ ID NO: 298593 - DNA, 15 bp, Homo sapiens
ttttttaaatgtcag

SEQ ID NO: 298594 - DNA, 15 bp, Homo sapiens
attttttaaatgtca

SEQ ID NO: 298595 - DNA, 15 bp, Homo sapiens
tattttttaaatgtc

SEQ ID NO: 298596 - DNA, 15 bp, Homo sapiens
ttattttttaaatgt

SEQ ID NO: 298597 - DNA, 15 bp, Homo sapiens
tttattttttaaatg

SEQ ID NO: 298598 - DNA, 15 bp, Homo sapiens
atttattttttaaat

SEQ ID NO: 298599 - DNA, 15 bp, Homo sapiens
catttattttttaaa

SEQ ID NO: 298600 - DNA, 15 bp, Homo sapiens
tcatttattttttaa

SEQ ID NO: 298601 - DNA, 15 bp, Homo sapiens
gtcatttatttttta

SEQ ID NO: 298602 - DNA, 15 bp, Homo sapiens
tgtcatttatttttt

SEQ ID NO: 298603 - DNA, 15 bp, Homo sapiens
ttgtcatttattttt

SEQ ID NO: 298604 - DNA, 15 bp, Homo sapiens
cttgtcatttatttt

SEQ ID NO: 298605 - DNA, 15 bp, Homo sapiens
ccttgtcatttattt

SEQ ID NO: 298606 - DNA, 15 bp, Homo sapiens
tccttgtcatttatt

SEQ ID NO: 298607 - DNA, 15 bp, Homo sapiens
ttccttgtcatttat

SEQ ID NO: 298608 - DNA, 15 bp, Homo sapiens
tttccttgtcattta

SEQ ID NO: 298609 - DNA, 15 bp, Homo sapiens
atttccttgtcattt

SEQ ID NO: 298610 - DNA, 15 bp, Homo sapiens
catttccttgtcatt

SEQ ID NO: 298611 - DNA, 15 bp, Homo sapiens
acatttccttgtcat

SEQ ID NO: 298612 - DNA, 15 bp, Homo sapiens
aacatttccttgtca

SEQ ID NO: 298613 - DNA, 15 bp, Homo sapiens
aaacatttccttgtc

SEQ ID NO: 298614 - DNA, 15 bp, Homo sapiens
aaaacatttccttgt

SEQ ID NO: 298615 - DNA, 15 bp, Homo sapiens
aaaaacatttccttg

SEQ ID NO: 298616 - DNA, 15 bp, Homo sapiens
gaaaaacatttcctt

SEQ ID NO: 298617 - DNA, 15 bp, Homo sapiens
ggaaaaacatttcct

SEQ ID NO: 298618 - DNA, 15 bp, Homo sapiens
gggaaaaacatttcc

SEQ ID NO: 298619 - DNA, 15 bp, Homo sapiens
tgggaaaaacatttc

SEQ ID NO: 298620 - DNA, 15 bp, Homo sapiens
ctgggaaaaacattt

SEQ ID NO: 298621 - DNA, 15 bp, Homo sapiens
gctgggaaaaacatt

SEQ ID NO: 298622 - DNA, 15 bp, Homo sapiens
ggctgggaaaaacat

SEQ ID NO: 298623 - DNA, 15 bp, Homo sapiens
aggctgggaaaaaca

SEQ ID NO: 298624 - DNA, 15 bp, Homo sapiens
taggctgggaaaaac

SEQ ID NO: 298625 - DNA, 15 bp, Homo sapiens
ctaggctgggaaaaa

SEQ ID NO: 298626 - DNA, 15 bp, Homo sapiens
gctaggctgggaaaa

SEQ ID NO: 298627 - DNA, 15 bp, Homo sapiens
agctaggctgggaaa

SEQ ID NO: 298628 - DNA, 15 bp, Homo sapiens
gagctaggctgggaa

SEQ ID NO: 298629 - DNA, 15 bp, Homo sapiens
agagctaggctggga

SEQ ID NO: 298630 - DNA, 15 bp, Homo sapiens
cagagctaggctggg

SEQ ID NO: 298631 - DNA, 15 bp, Homo sapiens
tcagagctaggctgg

SEQ ID NO: 298632 - DNA, 15 bp, Homo sapiens
ctcagagctaggctg

SEQ ID NO: 298633 - DNA, 15 bp, Homo sapiens
tctcagagctaggct

SEQ ID NO: 298634 - DNA, 15 bp, Homo sapiens
ttctcagagctaggc

SEQ ID NO: 298635 - DNA, 15 bp, Homo sapiens
tttctcagagctagg

SEQ ID NO: 298636 - DNA, 15 bp, Homo sapiens
ctttctcagagctag

SEQ ID NO: 298637 - DNA, 15 bp, Homo sapiens
cctttctcagagcta

SEQ ID NO: 298638 - DNA, 15 bp, Homo sapiens
gcctttctcagagct

SEQ ID NO: 298639 - DNA, 15 bp, Homo sapiens
tgcctttctcagagc

SEQ ID NO: 298640 - DNA, 15 bp, Homo sapiens
ctgcctttctcagag

SEQ ID NO: 298641 - DNA, 15 bp, Homo sapiens
actgcctttctcaga

SEQ ID NO: 298642 - DNA, 15 bp, Homo sapiens
tactgcctttctcag

SEQ ID NO: 298643 - DNA, 15 bp, Homo sapiens
gtactgcctttctca

SEQ ID NO: 298644 - DNA, 15 bp, Homo sapiens
tgtactgcctttctc

SEQ ID NO: 298645 - DNA, 15 bp, Homo sapiens
atgtactgcctttct

SEQ ID NO: 298646 - DNA, 15 bp, Homo sapiens
gatgtactgcctttc

SEQ ID NO: 298647 - DNA, 15 bp, Homo sapiens
ggatgtactgccttt

SEQ ID NO: 298648 - DNA, 15 bp, Homo sapiens
tggatgtactgcctt

SEQ ID NO: 298649 - DNA, 15 bp, Homo sapiens
atggatgtactgcct

SEQ ID NO: 298650 - DNA, 15 bp, Homo sapiens
gatggatgtactgcc

SEQ ID NO: 298651 - DNA, 15 bp, Homo sapiens
ggatggatgtactgc

SEQ ID NO: 298652 - DNA, 15 bp, Homo sapiens
gggatggatgtactg

SEQ ID NO: 298653 - DNA, 15 bp, Homo sapiens
tgggatggatgtact

SEQ ID NO: 298654 - DNA, 15 bp, Homo sapiens
ctgggatggatgtac

SEQ ID NO: 298655 - DNA, 15 bp, Homo sapiens
tctgggatggatgta

SEQ ID NO: 298656 - DNA, 15 bp, Homo sapiens
gtctgggatggatgt

SEQ ID NO: 298657 - DNA, 15 bp, Homo sapiens
ggtctgggatggatg

SEQ ID NO: 298658 - DNA, 15 bp, Homo sapiens
gggtctgggatggat

SEQ ID NO: 298659 - DNA, 15 bp, Homo sapiens
agggtctgggatgga

SEQ ID NO: 298660 - DNA, 15 bp, Homo sapiens
cagggtctgggatgg

SEQ ID NO: 298661 - DNA, 15 bp, Homo sapiens
gcagggtctgggatg

SEQ ID NO: 298662 - DNA, 15 bp, Homo sapiens
agcagggtctgggat

SEQ ID NO: 298663 - DNA, 15 bp, Homo sapiens
cagcagggtctggga

SEQ ID NO: 298664 - DNA, 15 bp, Homo sapiens
gcagcagggtctggg

SEQ ID NO: 298665 - DNA, 15 bp, Homo sapiens
ggcagcagggtctgg

SEQ ID NO: 298666 - DNA, 15 bp, Homo sapiens
tggcagcagggtctg

SEQ ID NO: 298667 - DNA, 15 bp, Homo sapiens
ctggcagcagggtct

SEQ ID NO: 298668 - DNA, 15 bp, Homo sapiens
gctggcagcagggtc

SEQ ID NO: 298669 - DNA, 15 bp, Homo sapiens
ggctggcagcagggt

SEQ ID NO: 298670 - DNA, 15 bp, Homo sapiens
cggctggcagcaggg

SEQ ID NO: 298671 - DNA, 15 bp, Homo sapiens
acggctggcagcagg

SEQ ID NO: 298672 - DNA, 15 bp, Homo sapiens
aacggctggcagcag

SEQ ID NO: 298673 - DNA, 15 bp, Homo sapiens
caacggctggcagca

SEQ ID NO: 298674 - DNA, 15 bp, Homo sapiens
ccaacggctggcagc

SEQ ID NO: 298675 - DNA, 15 bp, Homo sapiens
tccaacggctggcag

SEQ ID NO: 298676 - DNA, 15 bp, Homo sapiens
ctccaacggctggca

SEQ ID NO: 298677 - DNA, 15 bp, Homo sapiens
gctccaacggctggc

SEQ ID NO: 298678 - DNA, 15 bp, Homo sapiens
ggctccaacggctgg

SEQ ID NO: 298679 - DNA, 15 bp, Homo sapiens
tggctccaacggctg

SEQ ID NO: 298680 - DNA, 15 bp, Homo sapiens
gtggctccaacggct

SEQ ID NO: 298681 - DNA, 15 bp, Homo sapiens
agtggctccaacggc

SEQ ID NO: 298682 - DNA, 15 bp, Homo sapiens
cagtggctccaacgg

SEQ ID NO: 298683 - DNA, 15 bp, Homo sapiens
gcagtggctccaacg

SEQ ID NO: 298684 - DNA, 15 bp, Homo sapiens
tgcagtggctccaac

SEQ ID NO: 298685 - DNA, 15 bp, Homo sapiens
ctgcagtggctccaa

SEQ ID NO: 298686 - DNA, 15 bp, Homo sapiens
tctgcagtggctcca

SEQ ID NO: 298687 - DNA, 15 bp, Homo sapiens
ctctgcagtggctcc

SEQ ID NO: 298688 - DNA, 15 bp, Homo sapiens
cctctgcagtggctc

SEQ ID NO: 298689 - DNA, 15 bp, Homo sapiens
tcctctgcagtggct

SEQ ID NO: 298690 - DNA, 15 bp, Homo sapiens
ttcctctgcagtggc

SEQ ID NO: 298691 - DNA, 15 bp, Homo sapiens
tttcctctgcagtgg

SEQ ID NO: 298692 - DNA, 15 bp, Homo sapiens
atttcctctgcagtg

SEQ ID NO: 298693 - DNA, 15 bp, Homo sapiens
gatttcctctgcagt

SEQ ID NO: 298694 - DNA, 15 bp, Homo sapiens
agatttcctctgcag

SEQ ID NO: 298695 - DNA, 15 bp, Homo sapiens
cagatttcctctgca

SEQ ID NO: 298696 - DNA, 15 bp, Homo sapiens
tcagatttcctctgc

SEQ ID NO: 298697 - DNA, 15 bp, Homo sapiens
gtcagatttcctctg

SEQ ID NO: 298698 - DNA, 15 bp, Homo sapiens
ggtcagatttcctct

SEQ ID NO: 298699 - DNA, 15 bp, Homo sapiens
gggtcagatttcctc

SEQ ID NO: 298700 - DNA, 15 bp, Homo sapiens
ggggtcagatttcct

SEQ ID NO: 298701 - DNA, 15 bp, Homo sapiens
tggggtcagatttcc

SEQ ID NO: 298702 - DNA, 15 bp, Homo sapiens
atggggtcagatttc

SEQ ID NO: 298703 - DNA, 15 bp, Homo sapiens
catggggtcagattt

SEQ ID NO: 298704 - DNA, 15 bp, Homo sapiens
tcatggggtcagatt

SEQ ID NO: 298705 - DNA, 15 bp, Homo sapiens
ttcatggggtcagat

SEQ ID NO: 298706 - DNA, 15 bp, Homo sapiens
gttcatggggtcaga

SEQ ID NO: 298707 - DNA, 15 bp, Homo sapiens
tgttcatggggtcag

SEQ ID NO: 298708 - DNA, 15 bp, Homo sapiens
atgttcatggggtca

SEQ ID NO: 298709 - DNA, 15 bp, Homo sapiens
gatgttcatggggtc

SEQ ID NO: 298710 - DNA, 15 bp, Homo sapiens
agatgttcatggggt

SEQ ID NO: 298711 - DNA, 15 bp, Homo sapiens
tagatgttcatgggg

SEQ ID NO: 298712 - DNA, 15 bp, Homo sapiens
ttagatgttcatggg

SEQ ID NO: 298713 - DNA, 15 bp, Homo sapiens
cttagatgttcatgg

SEQ ID NO: 298714 - DNA, 15 bp, Homo sapiens
gcttagatgttcatg

SEQ ID NO: 298715 - DNA, 15 bp, Homo sapiens
tgcttagatgttcat

SEQ ID NO: 298716 - DNA, 15 bp, Homo sapiens
ctgcttagatgttca

SEQ ID NO: 298717 - DNA, 15 bp, Homo sapiens
cctgcttagatgttc

SEQ ID NO: 298718 - DNA, 15 bp, Homo sapiens
gcctgcttagatgtt

SEQ ID NO: 298719 - DNA, 15 bp, Homo sapiens
ggcctgcttagatgt

SEQ ID NO: 298720 - DNA, 15 bp, Homo sapiens
cggcctgcttagatg

SEQ ID NO: 298721 - DNA, 15 bp, Homo sapiens
gcggcctgcttagat

SEQ ID NO: 298722 - DNA, 15 bp, Homo sapiens
tgcggcctgcttaga

SEQ ID NO: 298723 - DNA, 15 bp, Homo sapiens
ctgcggcctgcttag

SEQ ID NO: 298724 - DNA, 15 bp, Homo sapiens
tctgcggcctgctta

SEQ ID NO: 298725 - DNA, 15 bp, Homo sapiens
ctctgcggcctgctt

SEQ ID NO: 298726 - DNA, 15 bp, Homo sapiens
gctctgcggcctgct

SEQ ID NO: 298727 - DNA, 15 bp, Homo sapiens
tgctctgcggcctgc

SEQ ID NO: 298728 - DNA, 15 bp, Homo sapiens
gtgctctgcggcctg

SEQ ID NO: 298729 - DNA, 15 bp, Homo sapiens
tgtgctctgcggcct

SEQ ID NO: 298730 - DNA, 15 bp, Homo sapiens
atgtgctctgcggcc

SEQ ID NO: 298731 - DNA, 15 bp, Homo sapiens
catgtgctctgcggc

SEQ ID NO: 298732 - DNA, 15 bp, Homo sapiens
ccatgtgctctgcgg

SEQ ID NO: 298733 - DNA, 15 bp, Homo sapiens
gccatgtgctctgcg

SEQ ID NO: 298734 - DNA, 15 bp, Homo sapiens
agccatgtgctctgc

SEQ ID NO: 298735 - DNA, 15 bp, Homo sapiens
cagccatgtgctctg

SEQ ID NO: 298736 - DNA, 15 bp, Homo sapiens
gcagccatgtgctct

SEQ ID NO: 298737 - DNA, 15 bp, Homo sapiens
ggcagccatgtgctc

SEQ ID NO: 298738 - DNA, 15 bp, Homo sapiens
gggcagccatgtgct

SEQ ID NO: 298739 - DNA, 15 bp, Homo sapiens
ggggcagccatgtgc

SEQ ID NO: 298740 - DNA, 15 bp, Homo sapiens
aggggcagccatgtg

SEQ ID NO: 298741 - DNA, 15 bp, Homo sapiens
caggggcagccatgt

SEQ ID NO: 298742 - DNA, 15 bp, Homo sapiens
acaggggcagccatg

SEQ ID NO: 298743 - DNA, 15 bp, Homo sapiens
cacaggggcagccat

SEQ ID NO: 298744 - DNA, 15 bp, Homo sapiens
ccacaggggcagcca

SEQ ID NO: 298745 - DNA, 15 bp, Homo sapiens
gccacaggggcagcc

SEQ ID NO: 298746 - DNA, 15 bp, Homo sapiens
agccacaggggcagc

SEQ ID NO: 298747 - DNA, 15 bp, Homo sapiens
gagccacaggggcag

SEQ ID NO: 298748 - DNA, 15 bp, Homo sapiens
agagccacaggggca

SEQ ID NO: 298749 - DNA, 15 bp, Homo sapiens
tagagccacaggggc

SEQ ID NO: 298750 - DNA, 15 bp, Homo sapiens
ctagagccacagggg

SEQ ID NO: 298751 - DNA, 15 bp, Homo sapiens
tctagagccacaggg

SEQ ID NO: 298752 - DNA, 15 bp, Homo sapiens
atctagagccacagg

SEQ ID NO: 298753 - DNA, 15 bp, Homo sapiens
aatctagagccacag

SEQ ID NO: 298754 - DNA, 15 bp, Homo sapiens
gaatctagagccaca

SEQ ID NO: 298755 - DNA, 15 bp, Homo sapiens
agaatctagagccac

SEQ ID NO: 298756 - DNA, 15 bp, Homo sapiens
cagaatctagagcca

SEQ ID NO: 298757 - DNA, 15 bp, Homo sapiens
tcagaatctagagcc

SEQ ID NO: 298758 - DNA, 15 bp, Homo sapiens
gtcagaatctagagc

SEQ ID NO: 298759 - DNA, 15 bp, Homo sapiens
ggtcagaatctagag

SEQ ID NO: 298760 - DNA, 15 bp, Homo sapiens
tggtcagaatctaga

SEQ ID NO: 298761 - DNA, 15 bp, Homo sapiens
gtggtcagaatctag

SEQ ID NO: 298762 - DNA, 15 bp, Homo sapiens
tgtggtcagaatcta

SEQ ID NO: 298763 - DNA, 15 bp, Homo sapiens
atgtggtcagaatct

SEQ ID NO: 298764 - DNA, 15 bp, Homo sapiens
catgtggtcagaatc

SEQ ID NO: 298765 - DNA, 15 bp, Homo sapiens
ccatgtggtcagaat

SEQ ID NO: 298766 - DNA, 15 bp, Homo sapiens
tccatgtggtcagaa

SEQ ID NO: 298767 - DNA, 15 bp, Homo sapiens
ctccatgtggtcaga

SEQ ID NO: 298768 - DNA, 15 bp, Homo sapiens
actccatgtggtcag

SEQ ID NO: 298769 - DNA, 15 bp, Homo sapiens
tactccatgtggtca

SEQ ID NO: 298770 - DNA, 15 bp, Homo sapiens
ctactccatgtggtc

SEQ ID NO: 298771 - DNA, 15 bp, Homo sapiens
tctactccatgtggt

SEQ ID NO: 298772 - DNA, 15 bp, Homo sapiens
gtctactccatgtgg

SEQ ID NO: 298773 - DNA, 15 bp, Homo sapiens
agtctactccatgtg

SEQ ID NO: 298774 - DNA, 15 bp, Homo sapiens
gagtctactccatgt

SEQ ID NO: 298775 - DNA, 15 bp, Homo sapiens
tgagtctactccatg

SEQ ID NO: 298776 - DNA, 15 bp, Homo sapiens
ttgagtctactccat

SEQ ID NO: 298777 - DNA, 15 bp, Homo sapiens
tttgagtctactcca

SEQ ID NO: 298778 - DNA, 15 bp, Homo sapiens
gtttgagtctactcc

SEQ ID NO: 298779 - DNA, 15 bp, Homo sapiens
agtttgagtctactc

SEQ ID NO: 298780 - DNA, 15 bp, Homo sapiens
gagtttgagtctact

SEQ ID NO: 298781 - DNA, 15 bp, Homo sapiens
ggagtttgagtctac

SEQ ID NO: 298782 - DNA, 15 bp, Homo sapiens
tggagtttgagtcta

SEQ ID NO: 298783 - DNA, 15 bp, Homo sapiens
ctggagtttgagtct

SEQ ID NO: 298784 - DNA, 15 bp, Homo sapiens
gctggagtttgagtc

SEQ ID NO: 298785 - DNA, 15 bp, Homo sapiens
ggctggagtttgagt

SEQ ID NO: 298786 - DNA, 15 bp, Homo sapiens
aggctggagtttgag

SEQ ID NO: 298787 - DNA, 15 bp, Homo sapiens
aaggctggagtttga

SEQ ID NO: 298788 - DNA, 15 bp, Homo sapiens
taaggctggagtttg

SEQ ID NO: 298789 - DNA, 15 bp, Homo sapiens
ttaaggctggagttt

SEQ ID NO: 298790 - DNA, 15 bp, Homo sapiens
gttaaggctggagtt

SEQ ID NO: 298791 - DNA, 15 bp, Homo sapiens
ggttaaggctggagt

SEQ ID NO: 298792 - DNA, 15 bp, Homo sapiens
tggttaaggctggag

SEQ ID NO: 298793 - DNA, 15 bp, Homo sapiens
ctggttaaggctgga

SEQ ID NO: 298794 - DNA, 15 bp, Homo sapiens
actggttaaggctgg

SEQ ID NO: 298795 - DNA, 15 bp, Homo sapiens
cactggttaaggctg

SEQ ID NO: 298796 - DNA, 15 bp, Homo sapiens
ccactggttaaggct

SEQ ID NO: 298797 - DNA, 15 bp, Homo sapiens
accactggttaaggc

SEQ ID NO: 298798 - DNA, 15 bp, Homo sapiens
caccactggttaagg

SEQ ID NO: 298799 - DNA, 15 bp, Homo sapiens
acaccactggttaag

SEQ ID NO: 298800 - DNA, 15 bp, Homo sapiens
cacaccactggttaa

SEQ ID NO: 298801 - DNA, 15 bp, Homo sapiens
tcacaccactggtta

SEQ ID NO: 298802 - DNA, 15 bp, Homo sapiens
gtcacaccactggtt

SEQ ID NO: 298803 - DNA, 15 bp, Homo sapiens
agtcacaccactggt

SEQ ID NO: 298804 - DNA, 15 bp, Homo sapiens
aagtcacaccactgg

SEQ ID NO: 298805 - DNA, 15 bp, Homo sapiens
aaagtcacaccactg

SEQ ID NO: 298806 - DNA, 15 bp, Homo sapiens
caaagtcacaccact

SEQ ID NO: 298807 - DNA, 15 bp, Homo sapiens
tcaaagtcacaccac

SEQ ID NO: 298808 - DNA, 15 bp, Homo sapiens
ctcaaagtcacacca

SEQ ID NO: 298809 - DNA, 15 bp, Homo sapiens
gctcaaagtcacacc

SEQ ID NO: 298810 - DNA, 15 bp, Homo sapiens
tgctcaaagtcacac

SEQ ID NO: 298811 - DNA, 15 bp, Homo sapiens
ttgctcaaagtcaca

SEQ ID NO: 298812 - DNA, 15 bp, Homo sapiens
tttgctcaaagtcac

SEQ ID NO: 298813 - DNA, 15 bp, Homo sapiens
atttgctcaaagtca

SEQ ID NO: 298814 - DNA, 15 bp, Homo sapiens
gatttgctcaaagtc

SEQ ID NO: 298815 - DNA, 15 bp, Homo sapiens
tgatttgctcaaagt

SEQ ID NO: 298816 - DNA, 15 bp, Homo sapiens
ctgatttgctcaaag

SEQ ID NO: 298817 - DNA, 15 bp, Homo sapiens
gctgatttgctcaaa

SEQ ID NO: 298818 - DNA, 15 bp, Homo sapiens
ggctgatttgctcaa

SEQ ID NO: 298819 - DNA, 15 bp, Homo sapiens
aggctgatttgctca

SEQ ID NO: 298820 - DNA, 15 bp, Homo sapiens
taggctgatttgctc

SEQ ID NO: 298821 - DNA, 15 bp, Homo sapiens
ctaggctgatttgct

SEQ ID NO: 298822 - DNA, 15 bp, Homo sapiens
gctaggctgatttgc

SEQ ID NO: 298823 - DNA, 15 bp, Homo sapiens
tgctaggctgatttg

SEQ ID NO: 298824 - DNA, 15 bp, Homo sapiens
ctgctaggctgattt

SEQ ID NO: 298825 - DNA, 15 bp, Homo sapiens
actgctaggctgatt

SEQ ID NO: 298826 - DNA, 15 bp, Homo sapiens
tactgctaggctgat

SEQ ID NO: 298827 - DNA, 15 bp, Homo sapiens
ttactgctaggctga

SEQ ID NO: 298828 - DNA, 15 bp, Homo sapiens
tttactgctaggctg

SEQ ID NO: 298829 - DNA, 15 bp, Homo sapiens
ttttactgctaggct

SEQ ID NO: 298830 - DNA, 15 bp, Homo sapiens
cttttactgctaggc

SEQ ID NO: 298831 - DNA, 15 bp, Homo sapiens
gcttttactgctagg

SEQ ID NO: 298832 - DNA, 15 bp, Homo sapiens
tgcttttactgctag

SEQ ID NO: 298833 - DNA, 15 bp, Homo sapiens
gtgcttttactgcta

SEQ ID NO: 298834 - DNA, 15 bp, Homo sapiens
tgtgcttttactgct

SEQ ID NO: 298835 - DNA, 15 bp, Homo sapiens
ctgtgcttttactgc

SEQ ID NO: 298836 - DNA, 15 bp, Homo sapiens
gctgtgcttttactg

SEQ ID NO: 298837 - DNA, 15 bp, Homo sapiens
agctgtgcttttact

SEQ ID NO: 298838 - DNA, 15 bp, Homo sapiens
aagctgtgcttttac

SEQ ID NO: 298839 - DNA, 15 bp, Homo sapiens
aaagctgtgctttta

SEQ ID NO: 298840 - DNA, 15 bp, Homo sapiens
caaagctgtgctttt

SEQ ID NO: 298841 - DNA, 15 bp, Homo sapiens
ccaaagctgtgcttt

SEQ ID NO: 298842 - DNA, 15 bp, Homo sapiens
accaaagctgtgctt

SEQ ID NO: 298843 - DNA, 15 bp, Homo sapiens
caccaaagctgtgct

SEQ ID NO: 298844 - DNA, 15 bp, Homo sapiens
acaccaaagctgtgc

SEQ ID NO: 298845 - DNA, 15 bp, Homo sapiens
gacaccaaagctgtg

SEQ ID NO: 298846 - DNA, 15 bp, Homo sapiens
tgacaccaaagctgt

SEQ ID NO: 298847 - DNA, 15 bp, Homo sapiens
ttgacaccaaagctg

SEQ ID NO: 298848 - DNA, 15 bp, Homo sapiens
cttgacaccaaagct

SEQ ID NO: 298849 - DNA, 15 bp, Homo sapiens
gcttgacaccaaagc

SEQ ID NO: 298850 - DNA, 15 bp, Homo sapiens
agcttgacaccaaag

SEQ ID NO: 298851 - DNA, 15 bp, Homo sapiens
cagcttgacaccaaa

SEQ ID NO: 298852 - DNA, 15 bp, Homo sapiens
gcagcttgacaccaa

SEQ ID NO: 298853 - DNA, 15 bp, Homo sapiens
ggcagcttgacacca

SEQ ID NO: 298854 - DNA, 15 bp, Homo sapiens
gggcagcttgacacc

SEQ ID NO: 298855 - DNA, 15 bp, Homo sapiens
tgggcagcttgacac

SEQ ID NO: 298856 - DNA, 15 bp, Homo sapiens
ttgggcagcttgaca

SEQ ID NO: 298857 - DNA, 15 bp, Homo sapiens
cttgggcagcttgac

SEQ ID NO: 298858 - DNA, 15 bp, Homo sapiens
acttgggcagcttga

SEQ ID NO: 298859 - DNA, 15 bp, Homo sapiens
aacttgggcagcttg

SEQ ID NO: 298860 - DNA, 15 bp, Homo sapiens
gaacttgggcagctt

SEQ ID NO: 298861 - DNA, 15 bp, Homo sapiens
tgaacttgggcagct

SEQ ID NO: 298862 - DNA, 15 bp, Homo sapiens
ttgaacttgggcagc

SEQ ID NO: 298863 - DNA, 15 bp, Homo sapiens
cttgaacttgggcag

SEQ ID NO: 298864 - DNA, 15 bp, Homo sapiens
acttgaacttgggca

SEQ ID NO: 298865 - DNA, 15 bp, Homo sapiens
aacttgaacttgggc

SEQ ID NO: 298866 - DNA, 15 bp, Homo sapiens
gaacttgaacttggg

SEQ ID NO: 298867 - DNA, 15 bp, Homo sapiens
agaacttgaacttgg

SEQ ID NO: 298868 - DNA, 15 bp, Homo sapiens
cagaacttgaacttg

SEQ ID NO: 298869 - DNA, 15 bp, Homo sapiens
gcagaacttgaactt

SEQ ID NO: 298870 - DNA, 15 bp, Homo sapiens
ggcagaacttgaact

SEQ ID NO: 298871 - DNA, 15 bp, Homo sapiens
aggcagaacttgaac

SEQ ID NO: 298872 - DNA, 15 bp, Homo sapiens
taggcagaacttgaa

SEQ ID NO: 298873 - DNA, 15 bp, Homo sapiens
ttaggcagaacttga

SEQ ID NO: 298874 - DNA, 15 bp, Homo sapiens
attaggcagaacttg

SEQ ID NO: 298875 - DNA, 15 bp, Homo sapiens
aattaggcagaactt

SEQ ID NO: 298876 - DNA, 15 bp, Homo sapiens
taattaggcagaact

SEQ ID NO: 298877 - DNA, 15 bp, Homo sapiens
gtaattaggcagaac

SEQ ID NO: 298878 - DNA, 15 bp, Homo sapiens
agtaattaggcagaa

SEQ ID NO: 298879 - DNA, 15 bp, Homo sapiens
gagtaattaggcaga

SEQ ID NO: 298880 - DNA, 15 bp, Homo sapiens
tgagtaattaggcag

SEQ ID NO: 298881 - DNA, 15 bp, Homo sapiens
gtgagtaattaggca

SEQ ID NO: 298882 - DNA, 15 bp, Homo sapiens
ggtgagtaattaggc

SEQ ID NO: 298883 - DNA, 15 bp, Homo sapiens
tggtgagtaattagg

SEQ ID NO: 298884 - DNA, 15 bp, Homo sapiens
ctggtgagtaattag

SEQ ID NO: 298885 - DNA, 15 bp, Homo sapiens
gctggtgagtaatta

SEQ ID NO: 298886 - DNA, 15 bp, Homo sapiens
agctggtgagtaatt

SEQ ID NO: 298887 - DNA, 15 bp, Homo sapiens
tagctggtgagtaat

SEQ ID NO: 298888 - DNA, 15 bp, Homo sapiens
ttagctggtgagtaa

SEQ ID NO: 298889 - DNA, 15 bp, Homo sapiens
cttagctggtgagta

SEQ ID NO: 298890 - DNA, 15 bp, Homo sapiens
acttagctggtgagt

SEQ ID NO: 298891 - DNA, 15 bp, Homo sapiens
cacttagctggtgag

SEQ ID NO: 298892 - DNA, 15 bp, Homo sapiens
tcacttagctggtga

SEQ ID NO: 298893 - DNA, 15 bp, Homo sapiens
atcacttagctggtg

SEQ ID NO: 298894 - DNA, 15 bp, Homo sapiens
gatcacttagctggt

SEQ ID NO: 298895 - DNA, 15 bp, Homo sapiens
agatcacttagctgg

SEQ ID NO: 298896 - DNA, 15 bp, Homo sapiens
aagatcacttagctg

SEQ ID NO: 298897 - DNA, 15 bp, Homo sapiens
taagatcacttagct

SEQ ID NO: 298898 - DNA, 15 bp, Homo sapiens
ataagatcacttagc

SEQ ID NO: 298899 - DNA, 15 bp, Homo sapiens
aataagatcacttag

SEQ ID NO: 298900 - DNA, 15 bp, Homo sapiens
aaataagatcactta

SEQ ID NO: 298901 - DNA, 15 bp, Homo sapiens
gaaataagatcactt

SEQ ID NO: 298902 - DNA, 15 bp, Homo sapiens
tgaaataagatcact

SEQ ID NO: 298903 - DNA, 15 bp, Homo sapiens
gtgaaataagatcac

SEQ ID NO: 298904 - DNA, 15 bp, Homo sapiens
ggtgaaataagatca

SEQ ID NO: 298905 - DNA, 15 bp, Homo sapiens
aggtgaaataagatc

SEQ ID NO: 298906 - DNA, 15 bp, Homo sapiens
gaggtgaaataagat

SEQ ID NO: 298907 - DNA, 15 bp, Homo sapiens
agaggtgaaataaga

SEQ ID NO: 298908 - DNA, 15 bp, Homo sapiens
aagaggtgaaataag

SEQ ID NO: 298909 - DNA, 15 bp, Homo sapiens
gaagaggtgaaataa

SEQ ID NO: 298910 - DNA, 15 bp, Homo sapiens
ggaagaggtgaaata

SEQ ID NO: 298911 - DNA, 15 bp, Homo sapiens
gggaagaggtgaaat

SEQ ID NO: 298912 - DNA, 15 bp, Homo sapiens
agggaagaggtgaaa

SEQ ID NO: 298913 - DNA, 15 bp, Homo sapiens
cagggaagaggtgaa

SEQ ID NO: 298914 - DNA, 15 bp, Homo sapiens
acagggaagaggtga

SEQ ID NO: 298915 - DNA, 15 bp, Homo sapiens
cacagggaagaggtg

SEQ ID NO: 298916 - DNA, 15 bp, Homo sapiens
gcacagggaagaggt

SEQ ID NO: 298917 - DNA, 15 bp, Homo sapiens
ggcacagggaagagg

SEQ ID NO: 298918 - DNA, 15 bp, Homo sapiens
aggcacagggaagag

SEQ ID NO: 298919 - DNA, 15 bp, Homo sapiens
gaggcacagggaaga

SEQ ID NO: 298920 - DNA, 15 bp, Homo sapiens
tgaggcacagggaag

SEQ ID NO: 298921 - DNA, 15 bp, Homo sapiens
ctgaggcacagggaa

SEQ ID NO: 298922 - DNA, 15 bp, Homo sapiens
actgaggcacaggga

SEQ ID NO: 298923 - DNA, 15 bp, Homo sapiens
aactgaggcacaggg

SEQ ID NO: 298924 - DNA, 15 bp, Homo sapiens
aaactgaggcacagg

SEQ ID NO: 298925 - DNA, 15 bp, Homo sapiens
gaaactgaggcacag

SEQ ID NO: 298926 - DNA, 15 bp, Homo sapiens
agaaactgaggcaca

SEQ ID NO: 298927 - DNA, 15 bp, Homo sapiens
aagaaactgaggcac

SEQ ID NO: 298928 - DNA, 15 bp, Homo sapiens
gaagaaactgaggca

SEQ ID NO: 298929 - DNA, 15 bp, Homo sapiens
tgaagaaactgaggc

SEQ ID NO: 298930 - DNA, 15 bp, Homo sapiens
atgaagaaactgagg

SEQ ID NO: 298931 - DNA, 15 bp, Homo sapiens
aatgaagaaactgag

SEQ ID NO: 298932 - DNA, 15 bp, Homo sapiens
aaatgaagaaactga

SEQ ID NO: 298933 - DNA, 15 bp, Homo sapiens
caaatgaagaaactg

SEQ ID NO: 298934 - DNA, 15 bp, Homo sapiens
acaaatgaagaaact

SEQ ID NO: 298935 - DNA, 15 bp, Homo sapiens
tacaaatgaagaaac

SEQ ID NO: 298936 - DNA, 15 bp, Homo sapiens
attacaaatgaagaa

SEQ ID NO: 298937 - DNA, 15 bp, Homo sapiens
tattacaaatgaaga

SEQ ID NO: 298938 - DNA, 15 bp, Homo sapiens
atattacaaatgaag

SEQ ID NO: 298939 - DNA, 15 bp, Homo sapiens
catattacaaatgaa

SEQ ID NO: 298940 - DNA, 15 bp, Homo sapiens
tcatattacaaatga

SEQ ID NO: 298941 - DNA, 15 bp, Homo sapiens
ttcatattacaaatg

SEQ ID NO: 298942 - DNA, 15 bp, Homo sapiens
cttcatattacaaat

SEQ ID NO: 298943 - DNA, 15 bp, Homo sapiens
tcttcatattacaaa

SEQ ID NO: 298944 - DNA, 15 bp, Homo sapiens
gtcttcatattacaa

SEQ ID NO: 298945 - DNA, 15 bp, Homo sapiens
tgtcttcatattaca

SEQ ID NO: 298946 - DNA, 15 bp, Homo sapiens
ttgtcttcatattac

SEQ ID NO: 298947 - DNA, 15 bp, Homo sapiens
gttgtcttcatatta

SEQ ID NO: 298948 - DNA, 15 bp, Homo sapiens
tgttgtcttcatatt

SEQ ID NO: 298949 - DNA, 15 bp, Homo sapiens
atgttgtcttcatat

SEQ ID NO: 298950 - DNA, 15 bp, Homo sapiens
tatgttgtcttcata

SEQ ID NO: 298951 - DNA, 15 bp, Homo sapiens
ttatgttgtcttcat

SEQ ID NO: 298952 - DNA, 15 bp, Homo sapiens
tttatgttgtcttca

SEQ ID NO: 298953 - DNA, 15 bp, Homo sapiens
atttatgttgtcttc

SEQ ID NO: 298954 - DNA, 15 bp, Homo sapiens
tatttatgttgtctt

SEQ ID NO: 298955 - DNA, 15 bp, Homo sapiens
ctatttatgttgtct

SEQ ID NO: 298956 - DNA, 15 bp, Homo sapiens
actatttatgttgtc

SEQ ID NO: 298957 - DNA, 15 bp, Homo sapiens
tactatttatgttgt

SEQ ID NO: 298958 - DNA, 15 bp, Homo sapiens
ttactatttatgttg

SEQ ID NO: 298959 - DNA, 15 bp, Homo sapiens
gttactatttatgtt

SEQ ID NO: 298960 - DNA, 15 bp, Homo sapiens
tgttactatttatgt

SEQ ID NO: 298961 - DNA, 15 bp, Homo sapiens
gtgttactatttatg

SEQ ID NO: 298962 - DNA, 15 bp, Homo sapiens
tgtgttactatttat

SEQ ID NO: 298963 - DNA, 15 bp, Homo sapiens
ttgtgttactattta

SEQ ID NO: 298964 - DNA, 15 bp, Homo sapiens
tttgtgttactattt

SEQ ID NO: 298965 - DNA, 15 bp, Homo sapiens
ttttgtgttactatt

SEQ ID NO: 298966 - DNA, 15 bp, Homo sapiens
tttttgtgttactat

SEQ ID NO: 298967 - DNA, 15 bp, Homo sapiens
ctttttgtgttacta

SEQ ID NO: 298968 - DNA, 15 bp, Homo sapiens
cctttttgtgttact

SEQ ID NO: 298969 - DNA, 15 bp, Homo sapiens
ccctttttgtgttac

SEQ ID NO: 298970 - DNA, 15 bp, Homo sapiens
accctttttgtgtta

SEQ ID NO: 298971 - DNA, 15 bp, Homo sapiens
caccctttttgtgtt

SEQ ID NO: 298972 - DNA, 15 bp, Homo sapiens
acaccctttttgtgt

SEQ ID NO: 298973 - DNA, 15 bp, Homo sapiens
aacaccctttttgtg

SEQ ID NO: 298974 - DNA, 15 bp, Homo sapiens
taacaccctttttgt

SEQ ID NO: 298975 - DNA, 15 bp, Homo sapiens
ataacaccctttttg

SEQ ID NO: 298976 - DNA, 15 bp, Homo sapiens
cataacacccttttt

SEQ ID NO: 298977 - DNA, 15 bp, Homo sapiens
tcataacaccctttt

SEQ ID NO: 298978 - DNA, 15 bp, Homo sapiens
ctcataacacccttt

SEQ ID NO: 298979 - DNA, 15 bp, Homo sapiens
cctcataacaccctt

SEQ ID NO: 298980 - DNA, 15 bp, Homo sapiens
tcctcataacaccct

SEQ ID NO: 298981 - DNA, 15 bp, Homo sapiens
atcctcataacaccc

SEQ ID NO: 298982 - DNA, 15 bp, Homo sapiens
aatcctcataacacc

SEQ ID NO: 298983 - DNA, 15 bp, Homo sapiens
taatcctcataacac

SEQ ID NO: 298984 - DNA, 15 bp, Homo sapiens
ttaatcctcataaca

SEQ ID NO: 298985 - DNA, 15 bp, Homo sapiens
attaatcctcataac

SEQ ID NO: 298986 - DNA, 15 bp, Homo sapiens
aattaatcctcataa

SEQ ID NO: 298987 - DNA, 15 bp, Homo sapiens
caattaatcctcata

SEQ ID NO: 298988 - DNA, 15 bp, Homo sapiens
tcaattaatcctcat

SEQ ID NO: 298989 - DNA, 15 bp, Homo sapiens
ctcaattaatcctca

SEQ ID NO: 298990 - DNA, 15 bp, Homo sapiens
actcaattaatcctc

SEQ ID NO: 298991 - DNA, 15 bp, Homo sapiens
gactcaattaatcct

SEQ ID NO: 298992 - DNA, 15 bp, Homo sapiens
tgactcaattaatcc

SEQ ID NO: 298993 - DNA, 15 bp, Homo sapiens
ttgactcaattaatc

SEQ ID NO: 298994 - DNA, 15 bp, Homo sapiens
gttgactcaattaat

SEQ ID NO: 298995 - DNA, 15 bp, Homo sapiens
tgttgactcaattaa

SEQ ID NO: 298996 - DNA, 15 bp, Homo sapiens
ctgttgactcaatta

SEQ ID NO: 298997 - DNA, 15 bp, Homo sapiens
tctgttgactcaatt

SEQ ID NO: 298998 - DNA, 15 bp, Homo sapiens
atctgttgactcaat

SEQ ID NO: 298999 - DNA, 15 bp, Homo sapiens
tatctgttgactcaa

SEQ ID NO: 299000 - DNA, 15 bp, Homo sapiens
ttatctgttgactca

SEQ ID NO: 299001 - DNA, 15 bp, Homo sapiens
tttatctgttgactc

SEQ ID NO: 299002 - DNA, 15 bp, Homo sapiens
ttttatctgttgact

SEQ ID NO: 299003 - DNA, 15 bp, Homo sapiens
tttttatctgttgac

SEQ ID NO: 299004 - DNA, 15 bp, Homo sapiens
gtttttatctgttga

SEQ ID NO: 299005 - DNA, 15 bp, Homo sapiens
tgtttttatctgttg

SEQ ID NO: 299006 - DNA, 15 bp, Homo sapiens
gtgtttttatctgtt

SEQ ID NO: 299007 - DNA, 15 bp, Homo sapiens
agtgtttttatctgt

SEQ ID NO: 299008 - DNA, 15 bp, Homo sapiens
gagtgtttttatctg

SEQ ID NO: 299009 - DNA, 15 bp, Homo sapiens
tgagtgtttttatct

SEQ ID NO: 299010 - DNA, 15 bp, Homo sapiens
ctgagtgtttttatc

SEQ ID NO: 299011 - DNA, 15 bp, Homo sapiens
tctgagtgtttttat

SEQ ID NO: 299012 - DNA, 15 bp, Homo sapiens
ttctgagtgttttta

SEQ ID NO: 299013 - DNA, 15 bp, Homo sapiens
gttctgagtgttttt

SEQ ID NO: 299014 - DNA, 15 bp, Homo sapiens
tgttctgagtgtttt

SEQ ID NO: 299015 - DNA, 15 bp, Homo sapiens
ctgttctgagtgttt

SEQ ID NO: 299016 - DNA, 15 bp, Homo sapiens
actgttctgagtgtt

SEQ ID NO: 299017 - DNA, 15 bp, Homo sapiens
cactgttctgagtgt

SEQ ID NO: 299018 - DNA, 15 bp, Homo sapiens
gcactgttctgagtg

SEQ ID NO: 299019 - DNA, 15 bp, Homo sapiens
ggcactgttctgagt

SEQ ID NO: 299020 - DNA, 15 bp, Homo sapiens
aggcactgttctgag

SEQ ID NO: 299021 - DNA, 15 bp, Homo sapiens
caggcactgttctga

SEQ ID NO: 299022 - DNA, 15 bp, Homo sapiens
ccaggcactgttctg

SEQ ID NO: 299023 - DNA, 15 bp, Homo sapiens
accaggcactgttct

SEQ ID NO: 299024 - DNA, 15 bp, Homo sapiens
taccaggcactgttc

SEQ ID NO: 299025 - DNA, 15 bp, Homo sapiens
ataccaggcactgtt

SEQ ID NO: 299026 - DNA, 15 bp, Homo sapiens
cataccaggcactgt

SEQ ID NO: 299027 - DNA, 15 bp, Homo sapiens
acataccaggcactg

SEQ ID NO: 299028 - DNA, 15 bp, Homo sapiens
cacataccaggcact

SEQ ID NO: 299029 - DNA, 15 bp, Homo sapiens
acacataccaggcac

SEQ ID NO: 299030 - DNA, 15 bp, Homo sapiens
tacacataccaggca

SEQ ID NO: 299031 - DNA, 15 bp, Homo sapiens
ctacacataccaggc

SEQ ID NO: 299032 - DNA, 15 bp, Homo sapiens
actacacataccagg

SEQ ID NO: 299033 - DNA, 15 bp, Homo sapiens
cactacacataccag

SEQ ID NO: 299034 - DNA, 15 bp, Homo sapiens
ccactacacatacca

SEQ ID NO: 299035 - DNA, 15 bp, Homo sapiens
cccactacacatacc

SEQ ID NO: 299036 - DNA, 15 bp, Homo sapiens
gcccactacacatac

SEQ ID NO: 299037 - DNA, 15 bp, Homo sapiens
agcccactacacata

SEQ ID NO: 299038 - DNA, 15 bp, Homo sapiens
tagcccactacacat

SEQ ID NO: 299039 - DNA, 15 bp, Homo sapiens
ctagcccactacaca

SEQ ID NO: 299040 - DNA, 15 bp, Homo sapiens
tctagcccactacac

SEQ ID NO: 299041 - DNA, 15 bp, Homo sapiens
ttctagcccactaca

SEQ ID NO: 299042 - DNA, 15 bp, Homo sapiens
cttctagcccactac

SEQ ID NO: 299043 - DNA, 15 bp, Homo sapiens
ccttctagcccacta

SEQ ID NO: 299044 - DNA, 15 bp, Homo sapiens
cccttctagcccact

SEQ ID NO: 299045 - DNA, 15 bp, Homo sapiens
gcccttctagcccac

SEQ ID NO: 299046 - DNA, 15 bp, Homo sapiens
tgcccttctagccca

SEQ ID NO: 299047 - DNA, 15 bp, Homo sapiens
gtgcccttctagccc

SEQ ID NO: 299048 - DNA, 15 bp, Homo sapiens
ggtgcccttctagcc

SEQ ID NO: 299049 - DNA, 15 bp, Homo sapiens
gggtgcccttctagc

SEQ ID NO: 299050 - DNA, 15 bp, Homo sapiens
agggtgcccttctag

SEQ ID NO: 299051 - DNA, 15 bp, Homo sapiens
aagggtgcccttcta

SEQ ID NO: 299052 - DNA, 15 bp, Homo sapiens
gaagggtgcccttct

SEQ ID NO: 299053 - DNA, 15 bp, Homo sapiens
tgaagggtgcccttc

SEQ ID NO: 299054 - DNA, 15 bp, Homo sapiens
atgaagggtgccctt

SEQ ID NO: 299055 - DNA, 15 bp, Homo sapiens
catgaagggtgccct

SEQ ID NO: 299056 - DNA, 15 bp, Homo sapiens
tcatgaagggtgccc

SEQ ID NO: 299057 - DNA, 15 bp, Homo sapiens
ttcatgaagggtgcc

SEQ ID NO: 299058 - DNA, 15 bp, Homo sapiens
attcatgaagggtgc

SEQ ID NO: 299059 - DNA, 15 bp, Homo sapiens
aattcatgaagggtg

SEQ ID NO: 299060 - DNA, 15 bp, Homo sapiens
aaattcatgaagggt

SEQ ID NO: 299061 - DNA, 15 bp, Homo sapiens
aaaattcatgaaggg

SEQ ID NO: 299062 - DNA, 15 bp, Homo sapiens
taaaattcatgaagg

SEQ ID NO: 299063 - DNA, 15 bp, Homo sapiens
ctaaaattcatgaag

SEQ ID NO: 299064 - DNA, 15 bp, Homo sapiens
actaaaattcatgaa

SEQ ID NO: 299065 - DNA, 15 bp, Homo sapiens
aactaaaattcatga

SEQ ID NO: 299066 - DNA, 15 bp, Homo sapiens
taactaaaattcatg

SEQ ID NO: 299067 - DNA, 15 bp, Homo sapiens
ataactaaaattcat

SEQ ID NO: 299068 - DNA, 15 bp, Homo sapiens
aataactaaaattca

SEQ ID NO: 299069 - DNA, 15 bp, Homo sapiens
taataactaaaattc

SEQ ID NO: 299070 - DNA, 15 bp, Homo sapiens
ataataactaaaatt

SEQ ID NO: 299071 - DNA, 15 bp, Homo sapiens
aataataactaaaat

SEQ ID NO: 299072 - DNA, 15 bp, Homo sapiens
taataataactaaaa

SEQ ID NO: 299073 - DNA, 15 bp, Homo sapiens
ataataataactaaa

SEQ ID NO: 299074 - DNA, 15 bp, Homo sapiens
aataataataactaa

SEQ ID NO: 299075 - DNA, 15 bp, Homo sapiens
taataataataacta

SEQ ID NO: 299076 - DNA, 15 bp, Homo sapiens
ataataataataact

SEQ ID NO: 299077 - DNA, 15 bp, Homo sapiens
aataataataataac

SEQ ID NO: 299078 - DNA, 15 bp, Homo sapiens
aaataataataataa

SEQ ID NO: 299079 - DNA, 15 bp, Homo sapiens
taaataataataata

SEQ ID NO: 299080 - DNA, 15 bp, Homo sapiens
ttaaataataataat

SEQ ID NO: 299081 - DNA, 15 bp, Homo sapiens
cttaaataataataa

SEQ ID NO: 299082 - DNA, 15 bp, Homo sapiens
gcttaaataataata

SEQ ID NO: 299083 - DNA, 15 bp, Homo sapiens
agcttaaataataat

SEQ ID NO: 299084 - DNA, 15 bp, Homo sapiens
gagcttaaataataa

SEQ ID NO: 299085 - DNA, 15 bp, Homo sapiens
agagcttaaataata

SEQ ID NO: 299086 - DNA, 15 bp, Homo sapiens
gagagcttaaataat

SEQ ID NO: 299087 - DNA, 15 bp, Homo sapiens
agagagcttaaataa

SEQ ID NO: 299088 - DNA, 15 bp, Homo sapiens
tagagagcttaaata

SEQ ID NO: 299089 - DNA, 15 bp, Homo sapiens
ttagagagcttaaat

SEQ ID NO: 299090 - DNA, 15 bp, Homo sapiens
cttagagagcttaaa

SEQ ID NO: 299091 - DNA, 15 bp, Homo sapiens
acttagagagcttaa

SEQ ID NO: 299092 - DNA, 15 bp, Homo sapiens
aacttagagagctta

SEQ ID NO: 299093 - DNA, 15 bp, Homo sapiens
aaacttagagagctt

SEQ ID NO: 299094 - DNA, 15 bp, Homo sapiens
gaaacttagagagct

SEQ ID NO: 299095 - DNA, 15 bp, Homo sapiens
tgaaacttagagagc

SEQ ID NO: 299096 - DNA, 15 bp, Homo sapiens
ttgaaacttagagag

SEQ ID NO: 299097 - DNA, 15 bp, Homo sapiens
cttgaaacttagaga

SEQ ID NO: 299098 - DNA, 15 bp, Homo sapiens
ccttgaaacttagag

SEQ ID NO: 299099 - DNA, 15 bp, Homo sapiens
accttgaaacttaga

SEQ ID NO: 299100 - DNA, 15 bp, Homo sapiens
gaccttgaaacttag

SEQ ID NO: 299101 - DNA, 15 bp, Homo sapiens
agaccttgaaactta

SEQ ID NO: 299102 - DNA, 15 bp, Homo sapiens
gagaccttgaaactt

SEQ ID NO: 299103 - DNA, 15 bp, Homo sapiens
ggagaccttgaaact

SEQ ID NO: 299104 - DNA, 15 bp, Homo sapiens
tggagaccttgaaac

SEQ ID NO: 299105 - DNA, 15 bp, Homo sapiens
gtggagaccttgaaa

SEQ ID NO: 299106 - DNA, 15 bp, Homo sapiens
agtggagaccttgaa

SEQ ID NO: 299107 - DNA, 15 bp, Homo sapiens
aagtggagaccttga

SEQ ID NO: 299108 - DNA, 15 bp, Homo sapiens
caagtggagaccttg

SEQ ID NO: 299109 - DNA, 15 bp, Homo sapiens
acaagtggagacctt

SEQ ID NO: 299110 - DNA, 15 bp, Homo sapiens
cacaagtggagacct

SEQ ID NO: 299111 - DNA, 15 bp, Homo sapiens
ccacaagtggagacc

SEQ ID NO: 299112 - DNA, 15 bp, Homo sapiens
tccacaagtggagac

SEQ ID NO: 299113 - DNA, 15 bp, Homo sapiens
ttccacaagtggaga

SEQ ID NO: 299114 - DNA, 15 bp, Homo sapiens
attccacaagtggag

SEQ ID NO: 299115 - DNA, 15 bp, Homo sapiens
cattccacaagtgga

SEQ ID NO: 299116 - DNA, 15 bp, Homo sapiens
ccattccacaagtgg

SEQ ID NO: 299117 - DNA, 15 bp, Homo sapiens
tccattccacaagtg

SEQ ID NO: 299118 - DNA, 15 bp, Homo sapiens
ctccattccacaagt

SEQ ID NO: 299119 - DNA, 15 bp, Homo sapiens
gctccattccacaag

SEQ ID NO: 299120 - DNA, 15 bp, Homo sapiens
agctccattccacaa

SEQ ID NO: 299121 - DNA, 15 bp, Homo sapiens
cagctccattccaca

SEQ ID NO: 299122 - DNA, 15 bp, Homo sapiens
tcagctccattccac

SEQ ID NO: 299123 - DNA, 15 bp, Homo sapiens
atcagctccattcca

SEQ ID NO: 299124 - DNA, 15 bp, Homo sapiens
tatcagctccattcc

SEQ ID NO: 299125 - DNA, 15 bp, Homo sapiens
ttatcagctccattc

SEQ ID NO: 299126 - DNA, 15 bp, Homo sapiens
attatcagctccatt

SEQ ID NO: 299127 - DNA, 15 bp, Homo sapiens
cattatcagctccat

SEQ ID NO: 299128 - DNA, 15 bp, Homo sapiens
ccattatcagctcca

SEQ ID NO: 299129 - DNA, 15 bp, Homo sapiens
cccattatcagctcc

SEQ ID NO: 299130 - DNA, 15 bp, Homo sapiens
ccccattatcagctc

SEQ ID NO: 299131 - DNA, 15 bp, Homo sapiens
tccccattatcagct

SEQ ID NO: 299132 - DNA, 15 bp, Homo sapiens
atccccattatcagc

SEQ ID NO: 299133 - DNA, 15 bp, Homo sapiens
aatccccattatcag

SEQ ID NO: 299134 - DNA, 15 bp, Homo sapiens
aaatccccattatca

SEQ ID NO: 299135 - DNA, 15 bp, Homo sapiens
aaaatccccattatc

SEQ ID NO: 299136 - DNA, 15 bp, Homo sapiens
taaaatccccattat

SEQ ID NO: 299137 - DNA, 15 bp, Homo sapiens
ataaaatccccatta

SEQ ID NO: 299138 - DNA, 15 bp, Homo sapiens
cataaaatccccatt

SEQ ID NO: 299139 - DNA, 15 bp, Homo sapiens
tcataaaatccccat

SEQ ID NO: 299140 - DNA, 15 bp, Homo sapiens
ctcataaaatcccca

SEQ ID NO: 299141 - DNA, 15 bp, Homo sapiens
cctcataaaatcccc

SEQ ID NO: 299142 - DNA, 15 bp, Homo sapiens
tcctcataaaatccc

SEQ ID NO: 299143 - DNA, 15 bp, Homo sapiens
atcctcataaaatcc

SEQ ID NO: 299144 - DNA, 15 bp, Homo sapiens
tatcctcataaaatc

SEQ ID NO: 299145 - DNA, 15 bp, Homo sapiens
ttatcctcataaaat

SEQ ID NO: 299146 - DNA, 15 bp, Homo sapiens
attatcctcataaaa

SEQ ID NO: 299147 - DNA, 15 bp, Homo sapiens
cattatcctcataaa

SEQ ID NO: 299148 - DNA, 15 bp, Homo sapiens
tcattatcctcataa

SEQ ID NO: 299149 - DNA, 15 bp, Homo sapiens
ctcattatcctcata

SEQ ID NO: 299150 - DNA, 15 bp, Homo sapiens
tctcattatcctcat

SEQ ID NO: 299151 - DNA, 15 bp, Homo sapiens
ttctcattatcctca

SEQ ID NO: 299152 - DNA, 15 bp, Homo sapiens
cttctcattatcctc

SEQ ID NO: 299153 - DNA, 15 bp, Homo sapiens
tcttctcattatcct

SEQ ID NO: 299154 - DNA, 15 bp, Homo sapiens
atcttctcattatcc

SEQ ID NO: 299155 - DNA, 15 bp, Homo sapiens
tatcttctcattatc

SEQ ID NO: 299156 - DNA, 15 bp, Homo sapiens
gtatcttctcattat

SEQ ID NO: 299157 - DNA, 15 bp, Homo sapiens
tgtatcttctcatta

SEQ ID NO: 299158 - DNA, 15 bp, Homo sapiens
gtgtatcttctcatt

SEQ ID NO: 299159 - DNA, 15 bp, Homo sapiens
agtgtatcttctcat

SEQ ID NO: 299160 - DNA, 15 bp, Homo sapiens
aagtgtatcttctca

SEQ ID NO: 299161 - DNA, 15 bp, Homo sapiens
taagtgtatcttctc

SEQ ID NO: 299162 - DNA, 15 bp, Homo sapiens
ttaagtgtatcttct

SEQ ID NO: 299163 - DNA, 15 bp, Homo sapiens
cttaagtgtatcttc

SEQ ID NO: 299164 - DNA, 15 bp, Homo sapiens
acttaagtgtatctt

SEQ ID NO: 299165 - DNA, 15 bp, Homo sapiens
aacttaagtgtatct

SEQ ID NO: 299166 - DNA, 15 bp, Homo sapiens
gaacttaagtgtatc

SEQ ID NO: 299167 - DNA, 15 bp, Homo sapiens
agaacttaagtgtat

SEQ ID NO: 299168 - DNA, 15 bp, Homo sapiens
aagaacttaagtgta

SEQ ID NO: 299169 - DNA, 15 bp, Homo sapiens
taagaacttaagtgt

SEQ ID NO: 299170 - DNA, 15 bp, Homo sapiens
ctaagaacttaagtg

SEQ ID NO: 299171 - DNA, 15 bp, Homo sapiens
tctaagaacttaagt

SEQ ID NO: 299172 - DNA, 15 bp, Homo sapiens
ttctaagaacttaag

SEQ ID NO: 299173 - DNA, 15 bp, Homo sapiens
tttctaagaacttaa

SEQ ID NO: 299174 - DNA, 15 bp, Homo sapiens
ttttctaagaactta

SEQ ID NO: 299175 - DNA, 15 bp, Homo sapiens
gttttctaagaactt

SEQ ID NO: 299176 - DNA, 15 bp, Homo sapiens
tgttttctaagaact

SEQ ID NO: 299177 - DNA, 15 bp, Homo sapiens
ttgttttctaagaac

SEQ ID NO: 299178 - DNA, 15 bp, Homo sapiens
attgttttctaagaa

SEQ ID NO: 299179 - DNA, 15 bp, Homo sapiens
cattgttttctaaga

SEQ ID NO: 299180 - DNA, 15 bp, Homo sapiens
gcattgttttctaag

SEQ ID NO: 299181 - DNA, 15 bp, Homo sapiens
ggcattgttttctaa

SEQ ID NO: 299182 - DNA, 15 bp, Homo sapiens
tggcattgttttcta

SEQ ID NO: 299183 - DNA, 15 bp, Homo sapiens
gtggcattgttttct

SEQ ID NO: 299184 - DNA, 15 bp, Homo sapiens
agtggcattgttttc

SEQ ID NO: 299185 - DNA, 15 bp, Homo sapiens
cagtggcattgtttt

SEQ ID NO: 299186 - DNA, 15 bp, Homo sapiens
ccagtggcattgttt

SEQ ID NO: 299187 - DNA, 15 bp, Homo sapiens
cccagtggcattgtt

SEQ ID NO: 299188 - DNA, 15 bp, Homo sapiens
gcccagtggcattgt

SEQ ID NO: 299189 - DNA, 15 bp, Homo sapiens
tgcccagtggcattg

SEQ ID NO: 299190 - DNA, 15 bp, Homo sapiens
ctgcccagtggcatt

SEQ ID NO: 299191 - DNA, 15 bp, Homo sapiens
tctgcccagtggcat

SEQ ID NO: 299192 - DNA, 15 bp, Homo sapiens
ctctgcccagtggca

SEQ ID NO: 299193 - DNA, 15 bp, Homo sapiens
gctctgcccagtggc

SEQ ID NO: 299194 - DNA, 15 bp, Homo sapiens
tgctctgcccagtgg

SEQ ID NO: 299195 - DNA, 15 bp, Homo sapiens
atgctctgcccagtg

SEQ ID NO: 299196 - DNA, 15 bp, Homo sapiens
catgctctgcccagt

SEQ ID NO: 299197 - DNA, 15 bp, Homo sapiens
tcatgctctgcccag

SEQ ID NO: 299198 - DNA, 15 bp, Homo sapiens
gtcatgctctgccca

SEQ ID NO: 299199 - DNA, 15 bp, Homo sapiens
agtcatgctctgccc

SEQ ID NO: 299200 - DNA, 15 bp, Homo sapiens
cagtcatgctctgcc

SEQ ID NO: 299201 - DNA, 15 bp, Homo sapiens
gcagtcatgctctgc

SEQ ID NO: 299202 - DNA, 15 bp, Homo sapiens
agcagtcatgctctg

SEQ ID NO: 299203 - DNA, 15 bp, Homo sapiens
gagcagtcatgctct

SEQ ID NO: 299204 - DNA, 15 bp, Homo sapiens
tgagcagtcatgctc

SEQ ID NO: 299205 - DNA, 15 bp, Homo sapiens
ctgagcagtcatgct

SEQ ID NO: 299206 - DNA, 15 bp, Homo sapiens
gctgagcagtcatgc

SEQ ID NO: 299207 - DNA, 15 bp, Homo sapiens
ggctgagcagtcatg

SEQ ID NO: 299208 - DNA, 15 bp, Homo sapiens
tggctgagcagtcat

SEQ ID NO: 299209 - DNA, 15 bp, Homo sapiens
ctggctgagcagtca

SEQ ID NO: 299210 - DNA, 15 bp, Homo sapiens
actggctgagcagtc

SEQ ID NO: 299211 - DNA, 15 bp, Homo sapiens
cactggctgagcagt

SEQ ID NO: 299212 - DNA, 15 bp, Homo sapiens
acactggctgagcag

SEQ ID NO: 299213 - DNA, 15 bp, Homo sapiens
aacactggctgagca

SEQ ID NO: 299214 - DNA, 15 bp, Homo sapiens
gaacactggctgagc

SEQ ID NO: 299215 - DNA, 15 bp, Homo sapiens
cgaacactggctgag

SEQ ID NO: 299216 - DNA, 15 bp, Homo sapiens
ccgaacactggctga

SEQ ID NO: 299217 - DNA, 15 bp, Homo sapiens
gccgaacactggctg

SEQ ID NO: 299218 - DNA, 15 bp, Homo sapiens
tgccgaacactggct

SEQ ID NO: 299219 - DNA, 15 bp, Homo sapiens
ttgccgaacactggc

SEQ ID NO: 299220 - DNA, 15 bp, Homo sapiens
attgccgaacactgg

SEQ ID NO: 299221 - DNA, 15 bp, Homo sapiens
gattgccgaacactg

SEQ ID NO: 299222 - DNA, 15 bp, Homo sapiens
tgattgccgaacact

SEQ ID NO: 299223 - DNA, 15 bp, Homo sapiens
atgattgccgaacac

SEQ ID NO: 299224 - DNA, 15 bp, Homo sapiens
catgattgccgaaca

SEQ ID NO: 299225 - DNA, 15 bp, Homo sapiens
tcatgattgccgaac

SEQ ID NO: 299226 - DNA, 15 bp, Homo sapiens
ctcatgattgccgaa

SEQ ID NO: 299227 - DNA, 15 bp, Homo sapiens
actcatgattgccga

SEQ ID NO: 299228 - DNA, 15 bp, Homo sapiens
aactcatgattgccg

SEQ ID NO: 299229 - DNA, 15 bp, Homo sapiens
taactcatgattgcc

SEQ ID NO: 299230 - DNA, 15 bp, Homo sapiens
gtaactcatgattgc

SEQ ID NO: 299231 - DNA, 15 bp, Homo sapiens
ggtaactcatgattg

SEQ ID NO: 299232 - DNA, 15 bp, Homo sapiens
tggtaactcatgatt

SEQ ID NO: 299233 - DNA, 15 bp, Homo sapiens
atggtaactcatgat

SEQ ID NO: 299234 - DNA, 15 bp, Homo sapiens
catggtaactcatga

SEQ ID NO: 299235 - DNA, 15 bp, Homo sapiens
acatggtaactcatg

SEQ ID NO: 299236 - DNA, 15 bp, Homo sapiens
aacatggtaactcat

SEQ ID NO: 299237 - DNA, 15 bp, Homo sapiens
taacatggtaactca

SEQ ID NO: 299238 - DNA, 15 bp, Homo sapiens
ctaacatggtaactc

SEQ ID NO: 299239 - DNA, 15 bp, Homo sapiens
actaacatggtaact

SEQ ID NO: 299240 - DNA, 15 bp, Homo sapiens
cactaacatggtaac

SEQ ID NO: 299241 - DNA, 15 bp, Homo sapiens
tcactaacatggtaa

SEQ ID NO: 299242 - DNA, 15 bp, Homo sapiens
atcactaacatggta

SEQ ID NO: 299243 - DNA, 15 bp, Homo sapiens
catcactaacatggt

SEQ ID NO: 299244 - DNA, 15 bp, Homo sapiens
tcatcactaacatgg

SEQ ID NO: 299245 - DNA, 15 bp, Homo sapiens
ctcatcactaacatg

SEQ ID NO: 299246 - DNA, 15 bp, Homo sapiens
tctcatcactaacat

SEQ ID NO: 299247 - DNA, 15 bp, Homo sapiens
ttctcatcactaaca

SEQ ID NO: 299248 - DNA, 15 bp, Homo sapiens
tttctcatcactaac

SEQ ID NO: 299249 - DNA, 15 bp, Homo sapiens
gtttctcatcactaa

SEQ ID NO: 299250 - DNA, 15 bp, Homo sapiens
tgtttctcatcacta

SEQ ID NO: 299251 - DNA, 15 bp, Homo sapiens
ttgtttctcatcact

SEQ ID NO: 299252 - DNA, 15 bp, Homo sapiens
tttgtttctcatcac

SEQ ID NO: 299253 - DNA, 15 bp, Homo sapiens
gtttgtttctcatca

SEQ ID NO: 299254 - DNA, 15 bp, Homo sapiens
ggtttgtttctcatc

SEQ ID NO: 299255 - DNA, 15 bp, Homo sapiens
tggtttgtttctcat

SEQ ID NO: 299256 - DNA, 15 bp, Homo sapiens
ctggtttgtttctca

SEQ ID NO: 299257 - DNA, 15 bp, Homo sapiens
actggtttgtttctc

SEQ ID NO: 299258 - DNA, 15 bp, Homo sapiens
tactggtttgtttct

SEQ ID NO: 299259 - DNA, 15 bp, Homo sapiens
ctactggtttgtttc

SEQ ID NO: 299260 - DNA, 15 bp, Homo sapiens
actactggtttgttt

SEQ ID NO: 299261 - DNA, 15 bp, Homo sapiens
gactactggtttgtt

SEQ ID NO: 299262 - DNA, 15 bp, Homo sapiens
agactactggtttgt

SEQ ID NO: 299263 - DNA, 15 bp, Homo sapiens
aagactactggtttg

SEQ ID NO: 299264 - DNA, 15 bp, Homo sapiens
gaagactactggttt

SEQ ID NO: 299265 - DNA, 15 bp, Homo sapiens
agaagactactggtt

SEQ ID NO: 299266 - DNA, 15 bp, Homo sapiens
aagaagactactggt

SEQ ID NO: 299267 - DNA, 15 bp, Homo sapiens
taagaagactactgg

SEQ ID NO: 299268 - DNA, 15 bp, Homo sapiens
gtaagaagactactg

SEQ ID NO: 299269 - DNA, 15 bp, Homo sapiens
tgtaagaagactact

SEQ ID NO: 299270 - DNA, 15 bp, Homo sapiens
ctgtaagaagactac

SEQ ID NO: 299271 - DNA, 15 bp, Homo sapiens
actgtaagaagacta

SEQ ID NO: 299272 - DNA, 15 bp, Homo sapiens
aactgtaagaagact

SEQ ID NO: 299273 - DNA, 15 bp, Homo sapiens
gaactgtaagaagac

SEQ ID NO: 299274 - DNA, 15 bp, Homo sapiens
ggaactgtaagaaga

SEQ ID NO: 299275 - DNA, 15 bp, Homo sapiens
aggaactgtaagaag

SEQ ID NO: 299276 - DNA, 15 bp, Homo sapiens
taggaactgtaagaa

SEQ ID NO: 299277 - DNA, 15 bp, Homo sapiens
ataggaactgtaaga

SEQ ID NO: 299278 - DNA, 15 bp, Homo sapiens
tataggaactgtaag

SEQ ID NO: 299279 - DNA, 15 bp, Homo sapiens
atataggaactgtaa

SEQ ID NO: 299280 - DNA, 15 bp, Homo sapiens
catataggaactgta

SEQ ID NO: 299281 - DNA, 15 bp, Homo sapiens
ccatataggaactgt

SEQ ID NO: 299282 - DNA, 15 bp, Homo sapiens
tccatataggaactg

SEQ ID NO: 299283 - DNA, 15 bp, Homo sapiens
atccatataggaact

SEQ ID NO: 299284 - DNA, 15 bp, Homo sapiens
aatccatataggaac

SEQ ID NO: 299285 - DNA, 15 bp, Homo sapiens
taatccatataggaa

SEQ ID NO: 299286 - DNA, 15 bp, Homo sapiens
ttaatccatatagga

SEQ ID NO: 299287 - DNA, 15 bp, Homo sapiens
cttaatccatatagg

SEQ ID NO: 299288 - DNA, 15 bp, Homo sapiens
tcttaatccatatag

SEQ ID NO: 299289 - DNA, 15 bp, Homo sapiens
gtcttaatccatata

SEQ ID NO: 299290 - DNA, 15 bp, Homo sapiens
agtcttaatccatat

SEQ ID NO: 299291 - DNA, 15 bp, Homo sapiens
aagtcttaatccata

SEQ ID NO: 299292 - DNA, 15 bp, Homo sapiens
caagtcttaatccat

SEQ ID NO: 299293 - DNA, 15 bp, Homo sapiens
tcaagtcttaatcca

SEQ ID NO: 299294 - DNA, 15 bp, Homo sapiens
ctcaagtcttaatcc

SEQ ID NO: 299295 - DNA, 15 bp, Homo sapiens
cctcaagtcttaatc

SEQ ID NO: 299296 - DNA, 15 bp, Homo sapiens
acctcaagtcttaat

SEQ ID NO: 299297 - DNA, 15 bp, Homo sapiens
aacctcaagtcttaa

SEQ ID NO: 299298 - DNA, 15 bp, Homo sapiens
caacctcaagtctta

SEQ ID NO: 299299 - DNA, 15 bp, Homo sapiens
gcaacctcaagtctt

SEQ ID NO: 299300 - DNA, 15 bp, Homo sapiens
agcaacctcaagtct

SEQ ID NO: 299301 - DNA, 15 bp, Homo sapiens
tagcaacctcaagtc

SEQ ID NO: 299302 - DNA, 15 bp, Homo sapiens
ttagcaacctcaagt

SEQ ID NO: 299303 - DNA, 15 bp, Homo sapiens
tttagcaacctcaag

SEQ ID NO: 299304 - DNA, 15 bp, Homo sapiens
atttagcaacctcaa

SEQ ID NO: 299305 - DNA, 15 bp, Homo sapiens
aatttagcaacctca

SEQ ID NO: 299306 - DNA, 15 bp, Homo sapiens
taatttagcaacctc

SEQ ID NO: 299307 - DNA, 15 bp, Homo sapiens
ctaatttagcaacct

SEQ ID NO: 299308 - DNA, 15 bp, Homo sapiens
gctaatttagcaacc

SEQ ID NO: 299309 - DNA, 15 bp, Homo sapiens
ggctaatttagcaac

SEQ ID NO: 299310 - DNA, 15 bp, Homo sapiens
tggctaatttagcaa

SEQ ID NO: 299311 - DNA, 15 bp, Homo sapiens
ctggctaatttagca

SEQ ID NO: 299312 - DNA, 15 bp, Homo sapiens
cctggctaatttagc

SEQ ID NO: 299313 - DNA, 15 bp, Homo sapiens
acctggctaatttag

SEQ ID NO: 299314 - DNA, 15 bp, Homo sapiens
cacctggctaattta

SEQ ID NO: 299315 - DNA, 15 bp, Homo sapiens
accaccacacctggc

SEQ ID NO: 299316 - DNA, 15 bp, Homo sapiens
caccaccacacctgg

SEQ ID NO: 299317 - DNA, 15 bp, Homo sapiens
ccaccaccacacctg

SEQ ID NO: 299318 - DNA, 15 bp, Homo sapiens
cccaccaccacacct

SEQ ID NO: 299319 - DNA, 15 bp, Homo sapiens
acccaccaccacacc

SEQ ID NO: 299320 - DNA, 15 bp, Homo sapiens
cacccaccaccacac

SEQ ID NO: 299321 - DNA, 15 bp, Homo sapiens
gcacccaccaccaca

SEQ ID NO: 299322 - DNA, 15 bp, Homo sapiens
ggcacccaccaccac

SEQ ID NO: 299323 - DNA, 15 bp, Homo sapiens
ctcttgcctcagcct

SEQ ID NO: 299324 - DNA, 15 bp, Homo sapiens
tctcttgcctcagcc

SEQ ID NO: 299325 - DNA, 15 bp, Homo sapiens
ttctcttgcctcagc

SEQ ID NO: 299326 - DNA, 15 bp, Homo sapiens
attctcttgcctcag

SEQ ID NO: 299327 - DNA, 15 bp, Homo sapiens
aattctcttgcctca

SEQ ID NO: 299328 - DNA, 15 bp, Homo sapiens
caattctcttgcctc

SEQ ID NO: 299329 - DNA, 15 bp, Homo sapiens
gcaattctcttgcct

SEQ ID NO: 299330 - DNA, 15 bp, Homo sapiens
agcaattctcttgcc

SEQ ID NO: 299331 - DNA, 15 bp, Homo sapiens
aagcaattctcttgc

SEQ ID NO: 299332 - DNA, 15 bp, Homo sapiens
caagcaattctcttg

SEQ ID NO: 299333 - DNA, 15 bp, Homo sapiens
tcaagcaattctctt

SEQ ID NO: 299334 - DNA, 15 bp, Homo sapiens
gctctgcctcccggg

SEQ ID NO: 299335 - DNA, 15 bp, Homo sapiens
agctctgcctcccgg

SEQ ID NO: 299336 - DNA, 15 bp, Homo sapiens
aagctctgcctcccg

SEQ ID NO: 299337 - DNA, 15 bp, Homo sapiens
caagctctgcctccc

SEQ ID NO: 299338 - DNA, 15 bp, Homo sapiens
gcaagctctgcctcc

SEQ ID NO: 299339 - DNA, 15 bp, Homo sapiens
tgcaagctctgcctc

SEQ ID NO: 299340 - DNA, 15 bp, Homo sapiens
ctgcaagctctgcct

SEQ ID NO: 299341 - DNA, 15 bp, Homo sapiens
actgcaagctctgcc

SEQ ID NO: 299342 - DNA, 15 bp, Homo sapiens
cactgcaagctctgc

SEQ ID NO: 299343 - DNA, 15 bp, Homo sapiens
tcactgcaagctctg

SEQ ID NO: 299344 - DNA, 15 bp, Homo sapiens
ctcactgcaagctct

SEQ ID NO: 299345 - DNA, 15 bp, Homo sapiens
gctctgtcgcccagg

SEQ ID NO: 299346 - DNA, 15 bp, Homo sapiens
tgctctgtcgcccag

SEQ ID NO: 299347 - DNA, 15 bp, Homo sapiens
ttgctctgtcgccca

SEQ ID NO: 299348 - DNA, 15 bp, Homo sapiens
tttgctctgtcgccc

SEQ ID NO: 299349 - DNA, 15 bp, Homo sapiens
ttttgctctgtcgcc

SEQ ID NO: 299350 - DNA, 15 bp, Homo sapiens
gttttgctctgtcgc

SEQ ID NO: 299351 - DNA, 15 bp, Homo sapiens
agttttgctctgtcg

SEQ ID NO: 299352 - DNA, 15 bp, Homo sapiens
gagttttgctctgtc

SEQ ID NO: 299353 - DNA, 15 bp, Homo sapiens
ggagttttgctctgt

SEQ ID NO: 299354 - DNA, 15 bp, Homo sapiens
tggagttttgctctg

SEQ ID NO: 299355 - DNA, 15 bp, Homo sapiens
atggagttttgctct

SEQ ID NO: 299356 - DNA, 15 bp, Homo sapiens
gatggagttttgctc

SEQ ID NO: 299357 - DNA, 15 bp, Homo sapiens
agatggagttttgct

SEQ ID NO: 299358 - DNA, 15 bp, Homo sapiens
tgagatggagttttg

SEQ ID NO: 299359 - DNA, 15 bp, Homo sapiens
ttgagatggagtttt

SEQ ID NO: 299360 - DNA, 15 bp, Homo sapiens
tttgagatggagttt

SEQ ID NO: 299361 - DNA, 15 bp, Homo sapiens
ttttgagatggagtt

SEQ ID NO: 299362 - DNA, 15 bp, Homo sapiens
gtttttgagatggag

SEQ ID NO: 299363 - DNA, 15 bp, Homo sapiens
tgtttttgagatgga

SEQ ID NO: 299364 - DNA, 15 bp, Homo sapiens
ttgtttttgagatgg

SEQ ID NO: 299365 - DNA, 15 bp, Homo sapiens
tttgtttttgagatg

SEQ ID NO: 299366 - DNA, 15 bp, Homo sapiens
ttttgtttttgagat

SEQ ID NO: 299367 - DNA, 15 bp, Homo sapiens
gttttgtttttgaga

SEQ ID NO: 299368 - DNA, 15 bp, Homo sapiens
tgttttgtttttgag

SEQ ID NO: 299369 - DNA, 15 bp, Homo sapiens
ttgttttgtttttga

SEQ ID NO: 299370 - DNA, 15 bp, Homo sapiens
cgttttgttttgttt

SEQ ID NO: 299371 - DNA, 15 bp, Homo sapiens
tcgttttgttttgtt

SEQ ID NO: 299372 - DNA, 15 bp, Homo sapiens
ttcgttttgttttgt

SEQ ID NO: 299373 - DNA, 15 bp, Homo sapiens
gttcgttttgttttg

SEQ ID NO: 299374 - DNA, 15 bp, Homo sapiens
tgttcgttttgtttt

SEQ ID NO: 299375 - DNA, 15 bp, Homo sapiens
ttgttcgttttgttt

SEQ ID NO: 299376 - DNA, 15 bp, Homo sapiens
gttgttcgttttgtt

SEQ ID NO: 299377 - DNA, 15 bp, Homo sapiens
tgttgttcgttttgt

SEQ ID NO: 299378 - DNA, 15 bp, Homo sapiens
ttgttgttcgttttg

SEQ ID NO: 299379 - DNA, 15 bp, Homo sapiens
gttgttgttcgtttt

SEQ ID NO: 299380 - DNA, 15 bp, Homo sapiens
tgttgttgttcgttt

SEQ ID NO: 299381 - DNA, 15 bp, Homo sapiens
ttgttgttgttcgtt

SEQ ID NO: 299382 - DNA, 15 bp, Homo sapiens
gttgttgttgttcgt

SEQ ID NO: 299383 - DNA, 15 bp, Homo sapiens
tgttgttgttgttcg

SEQ ID NO: 299384 - DNA, 15 bp, Homo sapiens
ttgttgttgttgttc

SEQ ID NO: 299385 - DNA, 15 bp, Homo sapiens
ctttgttgttgttgt

SEQ ID NO: 299386 - DNA, 15 bp, Homo sapiens
cctttgttgttgttg

SEQ ID NO: 299387 - DNA, 15 bp, Homo sapiens
tcctttgttgttgtt

SEQ ID NO: 299388 - DNA, 15 bp, Homo sapiens
gtcctttgttgttgt

SEQ ID NO: 299389 - DNA, 15 bp, Homo sapiens
tgtcctttgttgttg

SEQ ID NO: 299390 - DNA, 15 bp, Homo sapiens
atgtcctttgttgtt

SEQ ID NO: 299391 - DNA, 15 bp, Homo sapiens
aatgtcctttgttgt

SEQ ID NO: 299392 - DNA, 15 bp, Homo sapiens
aaatgtcctttgttg

SEQ ID NO: 299393 - DNA, 15 bp, Homo sapiens
caaatgtcctttgtt

SEQ ID NO: 299394 - DNA, 15 bp, Homo sapiens
tcaaatgtcctttgt

SEQ ID NO: 299395 - DNA, 15 bp, Homo sapiens
ctcaaatgtcctttg

SEQ ID NO: 299396 - DNA, 15 bp, Homo sapiens
cctcaaatgtccttt

SEQ ID NO: 299397 - DNA, 15 bp, Homo sapiens
acctcaaatgtcctt

SEQ ID NO: 299398 - DNA, 15 bp, Homo sapiens
aacctcaaatgtcct

SEQ ID NO: 299399 - DNA, 15 bp, Homo sapiens
aaacctcaaatgtcc

SEQ ID NO: 299400 - DNA, 15 bp, Homo sapiens
gaaacctcaaatgtc

SEQ ID NO: 299401 - DNA, 15 bp, Homo sapiens
agaaacctcaaatgt

SEQ ID NO: 299402 - DNA, 15 bp, Homo sapiens
cagaaacctcaaatg

SEQ ID NO: 299403 - DNA, 15 bp, Homo sapiens
tcagaaacctcaaat

SEQ ID NO: 299404 - DNA, 15 bp, Homo sapiens
ctcagaaacctcaaa

SEQ ID NO: 299405 - DNA, 15 bp, Homo sapiens
tctcagaaacctcaa

SEQ ID NO: 299406 - DNA, 15 bp, Homo sapiens
ttctcagaaacctca

SEQ ID NO: 299407 - DNA, 15 bp, Homo sapiens
tttctcagaaacctc

SEQ ID NO: 299408 - DNA, 15 bp, Homo sapiens
atttctcagaaacct

SEQ ID NO: 299409 - DNA, 15 bp, Homo sapiens
gatttctcagaaacc

SEQ ID NO: 299410 - DNA, 15 bp, Homo sapiens
tgatttctcagaaac

SEQ ID NO: 299411 - DNA, 15 bp, Homo sapiens
atgatttctcagaaa

SEQ ID NO: 299412 - DNA, 15 bp, Homo sapiens
tatgatttctcagaa

SEQ ID NO: 299413 - DNA, 15 bp, Homo sapiens
atatgatttctcaga

SEQ ID NO: 299414 - DNA, 15 bp, Homo sapiens
catatgatttctcag

SEQ ID NO: 299415 - DNA, 15 bp, Homo sapiens
ccatatgatttctca

SEQ ID NO: 299416 - DNA, 15 bp, Homo sapiens
accatatgatttctc

SEQ ID NO: 299417 - DNA, 15 bp, Homo sapiens
caccatatgatttct

SEQ ID NO: 299418 - DNA, 15 bp, Homo sapiens
ccaccatatgatttc

SEQ ID NO: 299419 - DNA, 15 bp, Homo sapiens
cccaccatatgattt

SEQ ID NO: 299420 - DNA, 15 bp, Homo sapiens
acccaccatatgatt

SEQ ID NO: 299421 - DNA, 15 bp, Homo sapiens
cacccaccatatgat

SEQ ID NO: 299422 - DNA, 15 bp, Homo sapiens
ccacccaccatatga

SEQ ID NO: 299423 - DNA, 15 bp, Homo sapiens
tccacccaccatatg

SEQ ID NO: 299424 - DNA, 15 bp, Homo sapiens
ctccacccaccatat

SEQ ID NO: 299425 - DNA, 15 bp, Homo sapiens
tctccacccaccata

SEQ ID NO: 299426 - DNA, 15 bp, Homo sapiens
gtctccacccaccat

SEQ ID NO: 299427 - DNA, 15 bp, Homo sapiens
agtctccacccacca

SEQ ID NO: 299428 - DNA, 15 bp, Homo sapiens
aagtctccacccacc

SEQ ID NO: 299429 - DNA, 15 bp, Homo sapiens
aaagtctccacccac

SEQ ID NO: 299430 - DNA, 15 bp, Homo sapiens
taaagtctccaccca

SEQ ID NO: 299431 - DNA, 15 bp, Homo sapiens
ttaaagtctccaccc

SEQ ID NO: 299432 - DNA, 15 bp, Homo sapiens
tttaaagtctccacc

SEQ ID NO: 299433 - DNA, 15 bp, Homo sapiens
ttttaaagtctccac

SEQ ID NO: 299434 - DNA, 15 bp, Homo sapiens
gttttaaagtctcca

SEQ ID NO: 299435 - DNA, 15 bp, Homo sapiens
tgttttaaagtctcc

SEQ ID NO: 299436 - DNA, 15 bp, Homo sapiens
gtgttttaaagtctc

SEQ ID NO: 299437 - DNA, 15 bp, Homo sapiens
agtgttttaaagtct

SEQ ID NO: 299438 - DNA, 15 bp, Homo sapiens
cagtgttttaaagtc

SEQ ID NO: 299439 - DNA, 15 bp, Homo sapiens
tcagtgttttaaagt

SEQ ID NO: 299440 - DNA, 15 bp, Homo sapiens
atcagtgttttaaag

SEQ ID NO: 299441 - DNA, 15 bp, Homo sapiens
gatcagtgttttaaa

SEQ ID NO: 299442 - DNA, 15 bp, Homo sapiens
agatcagtgttttaa

SEQ ID NO: 299443 - DNA, 15 bp, Homo sapiens
aagatcagtgtttta

SEQ ID NO: 299444 - DNA, 15 bp, Homo sapiens
aaagatcagtgtttt

SEQ ID NO: 299445 - DNA, 15 bp, Homo sapiens
gaaagatcagtgttt

SEQ ID NO: 299446 - DNA, 15 bp, Homo sapiens
agaaagatcagtgtt

SEQ ID NO: 299447 - DNA, 15 bp, Homo sapiens
aagaaagatcagtgt

SEQ ID NO: 299448 - DNA, 15 bp, Homo sapiens
aaagaaagatcagtg

SEQ ID NO: 299449 - DNA, 15 bp, Homo sapiens
taaagaaagatcagt

SEQ ID NO: 299450 - DNA, 15 bp, Homo sapiens
gtaaagaaagatcag

SEQ ID NO: 299451 - DNA, 15 bp, Homo sapiens
agtaaagaaagatca

SEQ ID NO: 299452 - DNA, 15 bp, Homo sapiens
aagtaaagaaagatc

SEQ ID NO: 299453 - DNA, 15 bp, Homo sapiens
aaagtaaagaaagat

SEQ ID NO: 299454 - DNA, 15 bp, Homo sapiens
gaaagtaaagaaaga

SEQ ID NO: 299455 - DNA, 15 bp, Homo sapiens
agaaagtaaagaaag

SEQ ID NO: 299456 - DNA, 15 bp, Homo sapiens
cagaaagtaaagaaa

SEQ ID NO: 299457 - DNA, 15 bp, Homo sapiens
acagaaagtaaagaa

SEQ ID NO: 299458 - DNA, 15 bp, Homo sapiens
tacagaaagtaaaga

SEQ ID NO: 299459 - DNA, 15 bp, Homo sapiens
gtacagaaagtaaag

SEQ ID NO: 299460 - DNA, 15 bp, Homo sapiens
ggtacagaaagtaaa

SEQ ID NO: 299461 - DNA, 15 bp, Homo sapiens
gggtacagaaagtaa

SEQ ID NO: 299462 - DNA, 15 bp, Homo sapiens
agggtacagaaagta

SEQ ID NO: 299463 - DNA, 15 bp, Homo sapiens
gagggtacagaaagt

SEQ ID NO: 299464 - DNA, 15 bp, Homo sapiens
tgagggtacagaaag

SEQ ID NO: 299465 - DNA, 15 bp, Homo sapiens
atgagggtacagaaa

SEQ ID NO: 299466 - DNA, 15 bp, Homo sapiens
tatgagggtacagaa

SEQ ID NO: 299467 - DNA, 15 bp, Homo sapiens
ttatgagggtacaga

SEQ ID NO: 299468 - DNA, 15 bp, Homo sapiens
attatgagggtacag

SEQ ID NO: 299469 - DNA, 15 bp, Homo sapiens
gattatgagggtaca

SEQ ID NO: 299470 - DNA, 15 bp, Homo sapiens
agattatgagggtac

SEQ ID NO: 299471 - DNA, 15 bp, Homo sapiens
aagattatgagggta

SEQ ID NO: 299472 - DNA, 15 bp, Homo sapiens
aaagattatgagggt

SEQ ID NO: 299473 - DNA, 15 bp, Homo sapiens
caaagattatgaggg

SEQ ID NO: 299474 - DNA, 15 bp, Homo sapiens
ccaaagattatgagg

SEQ ID NO: 299475 - DNA, 15 bp, Homo sapiens
gccaaagattatgag

SEQ ID NO: 299476 - DNA, 15 bp, Homo sapiens
tgccaaagattatga

SEQ ID NO: 299477 - DNA, 15 bp, Homo sapiens
gtgccaaagattatg

SEQ ID NO: 299478 - DNA, 15 bp, Homo sapiens
agtgccaaagattat

SEQ ID NO: 299479 - DNA, 15 bp, Homo sapiens
tagtgccaaagatta

SEQ ID NO: 299480 - DNA, 15 bp, Homo sapiens
ttagtgccaaagatt

SEQ ID NO: 299481 - DNA, 15 bp, Homo sapiens
gttagtgccaaagat

SEQ ID NO: 299482 - DNA, 15 bp, Homo sapiens
agttagtgccaaaga

SEQ ID NO: 299483 - DNA, 15 bp, Homo sapiens
cagttagtgccaaag

SEQ ID NO: 299484 - DNA, 15 bp, Homo sapiens
gcagttagtgccaaa

SEQ ID NO: 299485 - DNA, 15 bp, Homo sapiens
tgcagttagtgccaa

SEQ ID NO: 299486 - DNA, 15 bp, Homo sapiens
ctgcagttagtgcca

SEQ ID NO: 299487 - DNA, 15 bp, Homo sapiens
gctgcagttagtgcc

SEQ ID NO: 299488 - DNA, 15 bp, Homo sapiens
agctgcagttagtgc

SEQ ID NO: 299489 - DNA, 15 bp, Homo sapiens
cagctgcagttagtg

SEQ ID NO: 299490 - DNA, 15 bp, Homo sapiens
gcagctgcagttagt

SEQ ID NO: 299491 - DNA, 15 bp, Homo sapiens
agcagctgcagttag

SEQ ID NO: 299492 - DNA, 15 bp, Homo sapiens
cagcagctgcagtta

SEQ ID NO: 299493 - DNA, 15 bp, Homo sapiens
ccagcagctgcagtt

SEQ ID NO: 299494 - DNA, 15 bp, Homo sapiens
cccagcagctgcagt

SEQ ID NO: 299495 - DNA, 15 bp, Homo sapiens
acccagcagctgcag

SEQ ID NO: 299496 - DNA, 15 bp, Homo sapiens
aacccagcagctgca

SEQ ID NO: 299497 - DNA, 15 bp, Homo sapiens
aaacccagcagctgc

SEQ ID NO: 299498 - DNA, 15 bp, Homo sapiens
taaacccagcagctg

SEQ ID NO: 299499 - DNA, 15 bp, Homo sapiens
ctaaacccagcagct

SEQ ID NO: 299500 - DNA, 15 bp, Homo sapiens
cctaaacccagcagc

SEQ ID NO: 299501 - DNA, 15 bp, Homo sapiens
ccctaaacccagcag

SEQ ID NO: 299502 - DNA, 15 bp, Homo sapiens
gccctaaacccagca

SEQ ID NO: 299503 - DNA, 15 bp, Homo sapiens
agccctaaacccagc

SEQ ID NO: 299504 - DNA, 15 bp, Homo sapiens
gagccctaaacccag

SEQ ID NO: 299505 - DNA, 15 bp, Homo sapiens
tgagccctaaaccca

SEQ ID NO: 299506 - DNA, 15 bp, Homo sapiens
ctgagccctaaaccc

SEQ ID NO: 299507 - DNA, 15 bp, Homo sapiens
cctgagccctaaacc

SEQ ID NO: 299508 - DNA, 15 bp, Homo sapiens
ccctgagccctaaac

SEQ ID NO: 299509 - DNA, 15 bp, Homo sapiens
tccctgagccctaaa

SEQ ID NO: 299510 - DNA, 15 bp, Homo sapiens
ttccctgagccctaa

SEQ ID NO: 299511 - DNA, 15 bp, Homo sapiens
tttccctgagcccta

SEQ ID NO: 299512 - DNA, 15 bp, Homo sapiens
ttttccctgagccct

SEQ ID NO: 299513 - DNA, 15 bp, Homo sapiens
cttttccctgagccc

SEQ ID NO: 299514 - DNA, 15 bp, Homo sapiens
gcttttccctgagcc

SEQ ID NO: 299515 - DNA, 15 bp, Homo sapiens
ggcttttccctgagc

SEQ ID NO: 299516 - DNA, 15 bp, Homo sapiens
tggcttttccctgag

SEQ ID NO: 299517 - DNA, 15 bp, Homo sapiens
gtggcttttccctga

SEQ ID NO: 299518 - DNA, 15 bp, Homo sapiens
ggtggcttttccctg

SEQ ID NO: 299519 - DNA, 15 bp, Homo sapiens
tggtggcttttccct

SEQ ID NO: 299520 - DNA, 15 bp, Homo sapiens
gtggtggcttttccc

SEQ ID NO: 299521 - DNA, 15 bp, Homo sapiens
ggtggtggcttttcc

SEQ ID NO: 299522 - DNA, 15 bp, Homo sapiens
gggtggtggcttttc

SEQ ID NO: 299523 - DNA, 15 bp, Homo sapiens
ggggtggtggctttt

SEQ ID NO: 299524 - DNA, 15 bp, Homo sapiens
aggggtggtggcttt

SEQ ID NO: 299525 - DNA, 15 bp, Homo sapiens
gaggggtggtggctt

SEQ ID NO: 299526 - DNA, 15 bp, Homo sapiens
agaggggtggtggct

SEQ ID NO: 299527 - DNA, 15 bp, Homo sapiens
aagaggggtggtggc

SEQ ID NO: 299528 - DNA, 15 bp, Homo sapiens
taagaggggtggtgg

SEQ ID NO: 299529 - DNA, 15 bp, Homo sapiens
ctaagaggggtggtg

SEQ ID NO: 299530 - DNA, 15 bp, Homo sapiens
tctaagaggggtggt

SEQ ID NO: 299531 - DNA, 15 bp, Homo sapiens
ttctaagaggggtgg

SEQ ID NO: 299532 - DNA, 15 bp, Homo sapiens
gttctaagaggggtg

SEQ ID NO: 299533 - DNA, 15 bp, Homo sapiens
ggttctaagaggggt

SEQ ID NO: 299534 - DNA, 15 bp, Homo sapiens
gggttctaagagggg

SEQ ID NO: 299535 - DNA, 15 bp, Homo sapiens
tgggttctaagaggg

SEQ ID NO: 299536 - DNA, 15 bp, Homo sapiens
ttgggttctaagagg

SEQ ID NO: 299537 - DNA, 15 bp, Homo sapiens
cttgggttctaagag

SEQ ID NO: 299538 - DNA, 15 bp, Homo sapiens
tcttgggttctaaga

SEQ ID NO: 299539 - DNA, 15 bp, Homo sapiens
gtcttgggttctaag

SEQ ID NO: 299540 - DNA, 15 bp, Homo sapiens
ggtcttgggttctaa

SEQ ID NO: 299541 - DNA, 15 bp, Homo sapiens
gggtcttgggttcta

SEQ ID NO: 299542 - DNA, 15 bp, Homo sapiens
ggggtcttgggttct

SEQ ID NO: 299543 - DNA, 15 bp, Homo sapiens
tggggtcttgggttc

SEQ ID NO: 299544 - DNA, 15 bp, Homo sapiens
ctggggtcttgggtt

SEQ ID NO: 299545 - DNA, 15 bp, Homo sapiens
cctggggtcttgggt

SEQ ID NO: 299546 - DNA, 15 bp, Homo sapiens
gcctggggtcttggg

SEQ ID NO: 299547 - DNA, 15 bp, Homo sapiens
agcctggggtcttgg

SEQ ID NO: 299548 - DNA, 15 bp, Homo sapiens
cagcctggggtcttg

SEQ ID NO: 299549 - DNA, 15 bp, Homo sapiens
ccagcctggggtctt

SEQ ID NO: 299550 - DNA, 15 bp, Homo sapiens
accagcctggggtct

SEQ ID NO: 299551 - DNA, 15 bp, Homo sapiens
taccagcctggggtc

SEQ ID NO: 299552 - DNA, 15 bp, Homo sapiens
ataccagcctggggt

SEQ ID NO: 299553 - DNA, 15 bp, Homo sapiens
cataccagcctgggg

SEQ ID NO: 299554 - DNA, 15 bp, Homo sapiens
ccataccagcctggg

SEQ ID NO: 299555 - DNA, 15 bp, Homo sapiens
tccataccagcctgg

SEQ ID NO: 299556 - DNA, 15 bp, Homo sapiens
atccataccagcctg

SEQ ID NO: 299557 - DNA, 15 bp, Homo sapiens
tatccataccagcct

SEQ ID NO: 299558 - DNA, 15 bp, Homo sapiens
atatccataccagcc

SEQ ID NO: 299559 - DNA, 15 bp, Homo sapiens
catatccataccagc

SEQ ID NO: 299560 - DNA, 15 bp, Homo sapiens
ccatatccataccag

SEQ ID NO: 299561 - DNA, 15 bp, Homo sapiens
tccatatccatacca

SEQ ID NO: 299562 - DNA, 15 bp, Homo sapiens
ttccatatccatacc

SEQ ID NO: 299563 - DNA, 15 bp, Homo sapiens
attccatatccatac

SEQ ID NO: 299564 - DNA, 15 bp, Homo sapiens
cattccatatccata

SEQ ID NO: 299565 - DNA, 15 bp, Homo sapiens
acattccatatccat

SEQ ID NO: 299566 - DNA, 15 bp, Homo sapiens
tacattccatatcca

SEQ ID NO: 299567 - DNA, 15 bp, Homo sapiens
gtacattccatatcc

SEQ ID NO: 299568 - DNA, 15 bp, Homo sapiens
tgtacattccatatc

SEQ ID NO: 299569 - DNA, 15 bp, Homo sapiens
gtgtacattccatat

SEQ ID NO: 299570 - DNA, 15 bp, Homo sapiens
cgtgtacattccata

SEQ ID NO: 299571 - DNA, 15 bp, Homo sapiens
acgtgtacattccat

SEQ ID NO: 299572 - DNA, 15 bp, Homo sapiens
gacgtgtacattcca

SEQ ID NO: 299573 - DNA, 15 bp, Homo sapiens
agacgtgtacattcc

SEQ ID NO: 299574 - DNA, 15 bp, Homo sapiens
gagacgtgtacattc

SEQ ID NO: 299575 - DNA, 15 bp, Homo sapiens
agagacgtgtacatt

SEQ ID NO: 299576 - DNA, 15 bp, Homo sapiens
gagagacgtgtacat

SEQ ID NO: 299577 - DNA, 15 bp, Homo sapiens
agagagacgtgtaca

SEQ ID NO: 299578 - DNA, 15 bp, Homo sapiens
aagagagacgtgtac

SEQ ID NO: 299579 - DNA, 15 bp, Homo sapiens
gaagagagacgtgta

SEQ ID NO: 299580 - DNA, 15 bp, Homo sapiens
agaagagagacgtgt

SEQ ID NO: 299581 - DNA, 15 bp, Homo sapiens
aagaagagagacgtg

SEQ ID NO: 299582 - DNA, 15 bp, Homo sapiens
gaagaagagagacgt

SEQ ID NO: 299583 - DNA, 15 bp, Homo sapiens
ggaagaagagagacg

SEQ ID NO: 299584 - DNA, 15 bp, Homo sapiens
gggaagaagagagac

SEQ ID NO: 299585 - DNA, 15 bp, Homo sapiens
ggggaagaagagaga

SEQ ID NO: 299586 - DNA, 15 bp, Homo sapiens
tggggaagaagagag

SEQ ID NO: 299587 - DNA, 15 bp, Homo sapiens
gtggggaagaagaga

SEQ ID NO: 299588 - DNA, 15 bp, Homo sapiens
agtggggaagaagag

SEQ ID NO: 299589 - DNA, 15 bp, Homo sapiens
gagtggggaagaaga

SEQ ID NO: 299590 - DNA, 15 bp, Homo sapiens
ggagtggggaagaag

SEQ ID NO: 299591 - DNA, 15 bp, Homo sapiens
cggagtggggaagaa

SEQ ID NO: 299592 - DNA, 15 bp, Homo sapiens
gcggagtggggaaga

SEQ ID NO: 299593 - DNA, 15 bp, Homo sapiens
agcggagtggggaag

SEQ ID NO: 299594 - DNA, 15 bp, Homo sapiens
tagcggagtggggaa

SEQ ID NO: 299595 - DNA, 15 bp, Homo sapiens
ctagcggagtgggga

SEQ ID NO: 299596 - DNA, 15 bp, Homo sapiens
actagcggagtgggg

SEQ ID NO: 299597 - DNA, 15 bp, Homo sapiens
aactagcggagtggg

SEQ ID NO: 299598 - DNA, 15 bp, Homo sapiens
aaactagcggagtgg

SEQ ID NO: 299599 - DNA, 15 bp, Homo sapiens
taaactagcggagtg

SEQ ID NO: 299600 - DNA, 15 bp, Homo sapiens
ttaaactagcggagt

SEQ ID NO: 299601 - DNA, 15 bp, Homo sapiens
cttaaactagcggag

SEQ ID NO: 299602 - DNA, 15 bp, Homo sapiens
gcttaaactagcgga

SEQ ID NO: 299603 - DNA, 15 bp, Homo sapiens
tgcttaaactagcgg

SEQ ID NO: 299604 - DNA, 15 bp, Homo sapiens
ctgcttaaactagcg

SEQ ID NO: 299605 - DNA, 15 bp, Homo sapiens
tctgcttaaactagc

SEQ ID NO: 299606 - DNA, 15 bp, Homo sapiens
ctctgcttaaactag

SEQ ID NO: 299607 - DNA, 15 bp, Homo sapiens
actctgcttaaacta

SEQ ID NO: 299608 - DNA, 15 bp, Homo sapiens
cactctgcttaaact

SEQ ID NO: 299609 - DNA, 15 bp, Homo sapiens
tcactctgcttaaac

SEQ ID NO: 299610 - DNA, 15 bp, Homo sapiens
ctcactctgcttaaa

SEQ ID NO: 299611 - DNA, 15 bp, Homo sapiens
gctcactctgcttaa

SEQ ID NO: 299612 - DNA, 15 bp, Homo sapiens
ggctcactctgctta

SEQ ID NO: 299613 - DNA, 15 bp, Homo sapiens
aggctcactctgctt

SEQ ID NO: 299614 - DNA, 15 bp, Homo sapiens
caggctcactctgct

SEQ ID NO: 299615 - DNA, 15 bp, Homo sapiens
tcaggctcactctgc

SEQ ID NO: 299616 - DNA, 15 bp, Homo sapiens
ctcaggctcactctg

SEQ ID NO: 299617 - DNA, 15 bp, Homo sapiens
actcaggctcactct

SEQ ID NO: 299618 - DNA, 15 bp, Homo sapiens
cactcaggctcactc

SEQ ID NO: 299619 - DNA, 15 bp, Homo sapiens
gcactcaggctcact

SEQ ID NO: 299620 - DNA, 15 bp, Homo sapiens
ggcactcaggctcac

SEQ ID NO: 299621 - DNA, 15 bp, Homo sapiens
aggcactcaggctca

SEQ ID NO: 299622 - DNA, 15 bp, Homo sapiens
caggcactcaggctc

SEQ ID NO: 299623 - DNA, 15 bp, Homo sapiens
tcaggcactcaggct

SEQ ID NO: 299624 - DNA, 15 bp, Homo sapiens
ctcaggcactcaggc

SEQ ID NO: 299625 - DNA, 15 bp, Homo sapiens
actcaggcactcagg

SEQ ID NO: 299626 - DNA, 15 bp, Homo sapiens
gactcaggcactcag

SEQ ID NO: 299627 - DNA, 15 bp, Homo sapiens
ggactcaggcactca

SEQ ID NO: 299628 - DNA, 15 bp, Homo sapiens
aggactcaggcactc

SEQ ID NO: 299629 - DNA, 15 bp, Homo sapiens
taggactcaggcact

SEQ ID NO: 299630 - DNA, 15 bp, Homo sapiens
ataggactcaggcac

SEQ ID NO: 299631 - DNA, 15 bp, Homo sapiens
cataggactcaggca

SEQ ID NO: 299632 - DNA, 15 bp, Homo sapiens
acataggactcaggc

SEQ ID NO: 299633 - DNA, 15 bp, Homo sapiens
gacataggactcagg

SEQ ID NO: 299634 - DNA, 15 bp, Homo sapiens
agacataggactcag

SEQ ID NO: 299635 - DNA, 15 bp, Homo sapiens
tagacataggactca

SEQ ID NO: 299636 - DNA, 15 bp, Homo sapiens
atagacataggactc

SEQ ID NO: 299637 - DNA, 15 bp, Homo sapiens
aatagacataggact

SEQ ID NO: 299638 - DNA, 15 bp, Homo sapiens
taatagacataggac

SEQ ID NO: 299639 - DNA, 15 bp, Homo sapiens
ttaatagacatagga

SEQ ID NO: 299640 - DNA, 15 bp, Homo sapiens
gttaatagacatagg

SEQ ID NO: 299641 - DNA, 15 bp, Homo sapiens
agttaatagacatag

SEQ ID NO: 299642 - DNA, 15 bp, Homo sapiens
aagttaatagacata

SEQ ID NO: 299643 - DNA, 15 bp, Homo sapiens
aaagttaatagacat

SEQ ID NO: 299644 - DNA, 15 bp, Homo sapiens
aaaagttaatagaca

SEQ ID NO: 299645 - DNA, 15 bp, Homo sapiens
aaaaagttaatagac

SEQ ID NO: 299646 - DNA, 15 bp, Homo sapiens
caaaaagttaataga

SEQ ID NO: 299647 - DNA, 15 bp, Homo sapiens
acaaaaagttaatag

SEQ ID NO: 299648 - DNA, 15 bp, Homo sapiens
aacaaaaagttaata

SEQ ID NO: 299649 - DNA, 15 bp, Homo sapiens
caacaaaaagttaat

SEQ ID NO: 299650 - DNA, 15 bp, Homo sapiens
acaacaaaaagttaa

SEQ ID NO: 299651 - DNA, 15 bp, Homo sapiens
gacaacaaaaagtta

SEQ ID NO: 299652 - DNA, 15 bp, Homo sapiens
tgacaacaaaaagtt

SEQ ID NO: 299653 - DNA, 15 bp, Homo sapiens
ctgacaacaaaaagt

SEQ ID NO: 299654 - DNA, 15 bp, Homo sapiens
gctgacaacaaaaag

SEQ ID NO: 299655 - DNA, 15 bp, Homo sapiens
agctgacaacaaaaa

SEQ ID NO: 299656 - DNA, 15 bp, Homo sapiens
gagctgacaacaaaa

SEQ ID NO: 299657 - DNA, 15 bp, Homo sapiens
ggagctgacaacaaa

SEQ ID NO: 299658 - DNA, 15 bp, Homo sapiens
tggagctgacaacaa

SEQ ID NO: 299659 - DNA, 15 bp, Homo sapiens
gtggagctgacaaca

SEQ ID NO: 299660 - DNA, 15 bp, Homo sapiens
agtggagctgacaac

SEQ ID NO: 299661 - DNA, 15 bp, Homo sapiens
cagtggagctgacaa

SEQ ID NO: 299662 - DNA, 15 bp, Homo sapiens
ccagtggagctgaca

SEQ ID NO: 299663 - DNA, 15 bp, Homo sapiens
accagtggagctgac

SEQ ID NO: 299664 - DNA, 15 bp, Homo sapiens
taccagtggagctga

SEQ ID NO: 299665 - DNA, 15 bp, Homo sapiens
ttaccagtggagctg

SEQ ID NO: 299666 - DNA, 15 bp, Homo sapiens
attaccagtggagct

SEQ ID NO: 299667 - DNA, 15 bp, Homo sapiens
tattaccagtggagc

SEQ ID NO: 299668 - DNA, 15 bp, Homo sapiens
ctattaccagtggag

SEQ ID NO: 299669 - DNA, 15 bp, Homo sapiens
actattaccagtgga

SEQ ID NO: 299670 - DNA, 15 bp, Homo sapiens
cactattaccagtgg

SEQ ID NO: 299671 - DNA, 15 bp, Homo sapiens
gcactattaccagtg

SEQ ID NO: 299672 - DNA, 15 bp, Homo sapiens
agcactattaccagt

SEQ ID NO: 299673 - DNA, 15 bp, Homo sapiens
aagcactattaccag

SEQ ID NO: 299674 - DNA, 15 bp, Homo sapiens
gaagcactattacca

SEQ ID NO: 299675 - DNA, 15 bp, Homo sapiens
tgaagcactattacc

SEQ ID NO: 299676 - DNA, 15 bp, Homo sapiens
ttgaagcactattac

SEQ ID NO: 299677 - DNA, 15 bp, Homo sapiens
tttgaagcactatta

SEQ ID NO: 299678 - DNA, 15 bp, Homo sapiens
ctttgaagcactatt

SEQ ID NO: 299679 - DNA, 15 bp, Homo sapiens
tctttgaagcactat

SEQ ID NO: 299680 - DNA, 15 bp, Homo sapiens
ttctttgaagcacta

SEQ ID NO: 299681 - DNA, 15 bp, Homo sapiens
tttctttgaagcact

SEQ ID NO: 299682 - DNA, 15 bp, Homo sapiens
atttctttgaagcac

SEQ ID NO: 299683 - DNA, 15 bp, Homo sapiens
catttctttgaagca

SEQ ID NO: 299684 - DNA, 15 bp, Homo sapiens
tcatttctttgaagc

SEQ ID NO: 299685 - DNA, 15 bp, Homo sapiens
ttcatttctttgaag

SEQ ID NO: 299686 - DNA, 15 bp, Homo sapiens
gttcatttctttgaa

SEQ ID NO: 299687 - DNA, 15 bp, Homo sapiens
cgttcatttctttga

SEQ ID NO: 299688 - DNA, 15 bp, Homo sapiens
acgttcatttctttg

SEQ ID NO: 299689 - DNA, 15 bp, Homo sapiens
gacgttcatttcttt

SEQ ID NO: 299690 - DNA, 15 bp, Homo sapiens
agacgttcatttctt

SEQ ID NO: 299691 - DNA, 15 bp, Homo sapiens
aagacgttcatttct

SEQ ID NO: 299692 - DNA, 15 bp, Homo sapiens
taagacgttcatttc

SEQ ID NO: 299693 - DNA, 15 bp, Homo sapiens
ctaagacgttcattt

SEQ ID NO: 299694 - DNA, 15 bp, Homo sapiens
cctaagacgttcatt

SEQ ID NO: 299695 - DNA, 15 bp, Homo sapiens
tcctaagacgttcat

SEQ ID NO: 299696 - DNA, 15 bp, Homo sapiens
atcctaagacgttca

SEQ ID NO: 299697 - DNA, 15 bp, Homo sapiens
gatcctaagacgttc

SEQ ID NO: 299698 - DNA, 15 bp, Homo sapiens
ggatcctaagacgtt

SEQ ID NO: 299699 - DNA, 15 bp, Homo sapiens
aggatcctaagacgt

SEQ ID NO: 299700 - DNA, 15 bp, Homo sapiens
aaggatcctaagacg

SEQ ID NO: 299701 - DNA, 15 bp, Homo sapiens
gaaggatcctaagac

SEQ ID NO: 299702 - DNA, 15 bp, Homo sapiens
agaaggatcctaaga

SEQ ID NO: 299703 - DNA, 15 bp, Homo sapiens
aagaaggatcctaag

SEQ ID NO: 299704 - DNA, 15 bp, Homo sapiens
taagaaggatcctaa

SEQ ID NO: 299705 - DNA, 15 bp, Homo sapiens
ctaagaaggatccta

SEQ ID NO: 299706 - DNA, 15 bp, Homo sapiens
tctaagaaggatcct

SEQ ID NO: 299707 - DNA, 15 bp, Homo sapiens
ttctaagaaggatcc

SEQ ID NO: 299708 - DNA, 15 bp, Homo sapiens
cttctaagaaggatc

SEQ ID NO: 299709 - DNA, 15 bp, Homo sapiens
gcttctaagaaggat

SEQ ID NO: 299710 - DNA, 15 bp, Homo sapiens
tgcttctaagaagga

SEQ ID NO: 299711 - DNA, 15 bp, Homo sapiens
atgcttctaagaagg

SEQ ID NO: 299712 - DNA, 15 bp, Homo sapiens
catgcttctaagaag

SEQ ID NO: 299713 - DNA, 15 bp, Homo sapiens
acatgcttctaagaa

SEQ ID NO: 299714 - DNA, 15 bp, Homo sapiens
gacatgcttctaaga

SEQ ID NO: 299715 - DNA, 15 bp, Homo sapiens
cgacatgcttctaag

SEQ ID NO: 299716 - DNA, 15 bp, Homo sapiens
acgacatgcttctaa

SEQ ID NO: 299717 - DNA, 15 bp, Homo sapiens
gacgacatgcttcta

SEQ ID NO: 299718 - DNA, 15 bp, Homo sapiens
tgacgacatgcttct

SEQ ID NO: 299719 - DNA, 15 bp, Homo sapiens
gtgacgacatgcttc

SEQ ID NO: 299720 - DNA, 15 bp, Homo sapiens
cgtgacgacatgctt

SEQ ID NO: 299721 - DNA, 15 bp, Homo sapiens
tcgtgacgacatgct

SEQ ID NO: 299722 - DNA, 15 bp, Homo sapiens
atcgtgacgacatgc

SEQ ID NO: 299723 - DNA, 15 bp, Homo sapiens
aatcgtgacgacatg

SEQ ID NO: 299724 - DNA, 15 bp, Homo sapiens
caatcgtgacgacat

SEQ ID NO: 299725 - DNA, 15 bp, Homo sapiens
acaatcgtgacgaca

SEQ ID NO: 299726 - DNA, 15 bp, Homo sapiens
tacaatcgtgacgac

SEQ ID NO: 299727 - DNA, 15 bp, Homo sapiens
atacaatcgtgacga

SEQ ID NO: 299728 - DNA, 15 bp, Homo sapiens
aatacaatcgtgacg

SEQ ID NO: 299729 - DNA, 15 bp, Homo sapiens
taatacaatcgtgac

SEQ ID NO: 299730 - DNA, 15 bp, Homo sapiens
ttaatacaatcgtga

SEQ ID NO: 299731 - DNA, 15 bp, Homo sapiens
cttaatacaatcgtg

SEQ ID NO: 299732 - DNA, 15 bp, Homo sapiens
gcttaatacaatcgt

SEQ ID NO: 299733 - DNA, 15 bp, Homo sapiens
agcttaatacaatcg

SEQ ID NO: 299734 - DNA, 15 bp, Homo sapiens
cagcttaatacaatc

SEQ ID NO: 299735 - DNA, 15 bp, Homo sapiens
tcagcttaatacaat

SEQ ID NO: 299736 - DNA, 15 bp, Homo sapiens
atcagcttaatacaa

SEQ ID NO: 299737 - DNA, 15 bp, Homo sapiens
catcagcttaataca

SEQ ID NO: 299738 - DNA, 15 bp, Homo sapiens
ccatcagcttaatac

SEQ ID NO: 299739 - DNA, 15 bp, Homo sapiens
tccatcagcttaata

SEQ ID NO: 299740 - DNA, 15 bp, Homo sapiens
ttccatcagcttaat

SEQ ID NO: 299741 - DNA, 15 bp, Homo sapiens
tttccatcagcttaa

SEQ ID NO: 299742 - DNA, 15 bp, Homo sapiens
ctttccatcagctta

SEQ ID NO: 299743 - DNA, 15 bp, Homo sapiens
gctttccatcagctt

SEQ ID NO: 299744 - DNA, 15 bp, Homo sapiens
tgctttccatcagct

SEQ ID NO: 299745 - DNA, 15 bp, Homo sapiens
ctgctttccatcagc

SEQ ID NO: 299746 - DNA, 15 bp, Homo sapiens
tctgctttccatcag

SEQ ID NO: 299747 - DNA, 15 bp, Homo sapiens
ttctgctttccatca

SEQ ID NO: 299748 - DNA, 15 bp, Homo sapiens
gttctgctttccatc

SEQ ID NO: 299749 - DNA, 15 bp, Homo sapiens
tgttctgctttccat

SEQ ID NO: 299750 - DNA, 15 bp, Homo sapiens
ttgttctgctttcca

SEQ ID NO: 299751 - DNA, 15 bp, Homo sapiens
attgttctgctttcc

SEQ ID NO: 299752 - DNA, 15 bp, Homo sapiens
tattgttctgctttc

SEQ ID NO: 299753 - DNA, 15 bp, Homo sapiens
ttattgttctgcttt

SEQ ID NO: 299754 - DNA, 15 bp, Homo sapiens
gttattgttctgctt

SEQ ID NO: 299755 - DNA, 15 bp, Homo sapiens
tgttattgttctgct

SEQ ID NO: 299756 - DNA, 15 bp, Homo sapiens
ttgttattgttctgc

SEQ ID NO: 299757 - DNA, 15 bp, Homo sapiens
gttgttattgttctg

SEQ ID NO: 299758 - DNA, 15 bp, Homo sapiens
tgttgttattgttct

SEQ ID NO: 299759 - DNA, 15 bp, Homo sapiens
ttgttgttattgttc

SEQ ID NO: 299760 - DNA, 15 bp, Homo sapiens
gttgttgttattgtt

SEQ ID NO: 299761 - DNA, 15 bp, Homo sapiens
tgttgttgttattgt

SEQ ID NO: 299762 - DNA, 15 bp, Homo sapiens
ttgttgttgttattg

SEQ ID NO: 299763 - DNA, 15 bp, Homo sapiens
gttgttgttgttatt

SEQ ID NO: 299764 - DNA, 15 bp, Homo sapiens
tgttgttgttgttat

SEQ ID NO: 299765 - DNA, 15 bp, Homo sapiens
ttgttgttgttgtta

SEQ ID NO: 299766 - DNA, 15 bp, Homo sapiens
tttttgttgttgttg

SEQ ID NO: 299767 - DNA, 15 bp, Homo sapiens
gtttttgttgttgtt

SEQ ID NO: 299768 - DNA, 15 bp, Homo sapiens
tgtttttgttgttgt

SEQ ID NO: 299769 - DNA, 15 bp, Homo sapiens
ttgtttttgttgttg

SEQ ID NO: 299770 - DNA, 15 bp, Homo sapiens
gttgtttttgttgtt

SEQ ID NO: 299771 - DNA, 15 bp, Homo sapiens
tgttgtttttgttgt

SEQ ID NO: 299772 - DNA, 15 bp, Homo sapiens
atgttgtttttgttg

SEQ ID NO: 299773 - DNA, 15 bp, Homo sapiens
aatgttgtttttgtt

SEQ ID NO: 299774 - DNA, 15 bp, Homo sapiens
gaatgttgtttttgt

SEQ ID NO: 299775 - DNA, 15 bp, Homo sapiens
ggaatgttgtttttg

SEQ ID NO: 299776 - DNA, 15 bp, Homo sapiens
aggaatgttgttttt

SEQ ID NO: 299777 - DNA, 15 bp, Homo sapiens
aaggaatgttgtttt

SEQ ID NO: 299778 - DNA, 15 bp, Homo sapiens
aaaggaatgttgttt

SEQ ID NO: 299779 - DNA, 15 bp, Homo sapiens
gaaaggaatgttgtt

SEQ ID NO: 299780 - DNA, 15 bp, Homo sapiens
agaaaggaatgttgt

SEQ ID NO: 299781 - DNA, 15 bp, Homo sapiens
tagaaaggaatgttg

SEQ ID NO: 299782 - DNA, 15 bp, Homo sapiens
ttagaaaggaatgtt

SEQ ID NO: 299783 - DNA, 15 bp, Homo sapiens
cttagaaaggaatgt

SEQ ID NO: 299784 - DNA, 15 bp, Homo sapiens
gcttagaaaggaatg

SEQ ID NO: 299785 - DNA, 15 bp, Homo sapiens
ggcttagaaaggaat

SEQ ID NO: 299786 - DNA, 15 bp, Homo sapiens
gggcttagaaaggaa

SEQ ID NO: 299787 - DNA, 15 bp, Homo sapiens
agggcttagaaagga

SEQ ID NO: 299788 - DNA, 15 bp, Homo sapiens
cagggcttagaaagg

SEQ ID NO: 299789 - DNA, 15 bp, Homo sapiens
acagggcttagaaag

SEQ ID NO: 299790 - DNA, 15 bp, Homo sapiens
agaacttaaattagg

SEQ ID NO: 299791 - DNA, 15 bp, Homo sapiens
cagaacttaaattag

SEQ ID NO: 299792 - DNA, 15 bp, Homo sapiens
tcagaacttaaatta

SEQ ID NO: 299793 - DNA, 15 bp, Homo sapiens
ttcagaacttaaatt

SEQ ID NO: 299794 - DNA, 15 bp, Homo sapiens
attcagaacttaaat

SEQ ID NO: 299795 - DNA, 15 bp, Homo sapiens
aattcagaacttaaa

SEQ ID NO: 299796 - DNA, 15 bp, Homo sapiens
caattcagaacttaa

SEQ ID NO: 299797 - DNA, 15 bp, Homo sapiens
ccaattcagaactta

SEQ ID NO: 299798 - DNA, 15 bp, Homo sapiens
accaattcagaactt

SEQ ID NO: 299799 - DNA, 15 bp, Homo sapiens
taccaattcagaact

SEQ ID NO: 299800 - DNA, 15 bp, Homo sapiens
ataccaattcagaac

SEQ ID NO: 299801 - DNA, 15 bp, Homo sapiens
cataccaattcagaa

SEQ ID NO: 299802 - DNA, 15 bp, Homo sapiens
ccataccaattcaga

SEQ ID NO: 299803 - DNA, 15 bp, Homo sapiens
cccataccaattcag

SEQ ID NO: 299804 - DNA, 15 bp, Homo sapiens
tcccataccaattca

SEQ ID NO: 299805 - DNA, 15 bp, Homo sapiens
gtcccataccaattc

SEQ ID NO: 299806 - DNA, 15 bp, Homo sapiens
agtcccataccaatt

SEQ ID NO: 299807 - DNA, 15 bp, Homo sapiens
tagtcccataccaat

SEQ ID NO: 299808 - DNA, 15 bp, Homo sapiens
atagtcccataccaa

SEQ ID NO: 299809 - DNA, 15 bp, Homo sapiens
catagtcccatacca

SEQ ID NO: 299810 - DNA, 15 bp, Homo sapiens
ccatagtcccatacc

SEQ ID NO: 299811 - DNA, 15 bp, Homo sapiens
cccatagtcccatac

SEQ ID NO: 299812 - DNA, 15 bp, Homo sapiens
ccccatagtcccata

SEQ ID NO: 299813 - DNA, 15 bp, Homo sapiens
gccccatagtcccat

SEQ ID NO: 299814 - DNA, 15 bp, Homo sapiens
ggccccatagtccca

SEQ ID NO: 299815 - DNA, 15 bp, Homo sapiens
tggccccatagtccc

SEQ ID NO: 299816 - DNA, 15 bp, Homo sapiens
atggccccatagtcc

SEQ ID NO: 299817 - DNA, 15 bp, Homo sapiens
aatggccccatagtc

SEQ ID NO: 299818 - DNA, 15 bp, Homo sapiens
aaatggccccatagt

SEQ ID NO: 299819 - DNA, 15 bp, Homo sapiens
caaatggccccatag

SEQ ID NO: 299820 - DNA, 15 bp, Homo sapiens
tcaaatggccccata

SEQ ID NO: 299821 - DNA, 15 bp, Homo sapiens
ttcaaatggccccat

SEQ ID NO: 299822 - DNA, 15 bp, Homo sapiens
tttcaaatggcccca

SEQ ID NO: 299823 - DNA, 15 bp, Homo sapiens
gtttcaaatggcccc

SEQ ID NO: 299824 - DNA, 15 bp, Homo sapiens
ggtttcaaatggccc

SEQ ID NO: 299825 - DNA, 15 bp, Homo sapiens
tggtttcaaatggcc

SEQ ID NO: 299826 - DNA, 15 bp, Homo sapiens
atggtttcaaatggc

SEQ ID NO: 299827 - DNA, 15 bp, Homo sapiens
catggtttcaaatgg

SEQ ID NO: 299828 - DNA, 15 bp, Homo sapiens
acatggtttcaaatg

SEQ ID NO: 299829 - DNA, 15 bp, Homo sapiens
aacatggtttcaaat

SEQ ID NO: 299830 - DNA, 15 bp, Homo sapiens
caacatggtttcaaa

SEQ ID NO: 299831 - DNA, 15 bp, Homo sapiens
ccaacatggtttcaa

SEQ ID NO: 299832 - DNA, 15 bp, Homo sapiens
cccaacatggtttca

SEQ ID NO: 299833 - DNA, 15 bp, Homo sapiens
tcccaacatggtttc

SEQ ID NO: 299834 - DNA, 15 bp, Homo sapiens
ctcccaacatggttt

SEQ ID NO: 299835 - DNA, 15 bp, Homo sapiens
tctcccaacatggtt

SEQ ID NO: 299836 - DNA, 15 bp, Homo sapiens
atctcccaacatggt

SEQ ID NO: 299837 - DNA, 15 bp, Homo sapiens
catctcccaacatgg

SEQ ID NO: 299838 - DNA, 15 bp, Homo sapiens
ccatctcccaacatg

SEQ ID NO: 299839 - DNA, 15 bp, Homo sapiens
cccatctcccaacat

SEQ ID NO: 299840 - DNA, 15 bp, Homo sapiens
tcccatctcccaaca

SEQ ID NO: 299841 - DNA, 15 bp, Homo sapiens
gtcccatctcccaac

SEQ ID NO: 299842 - DNA, 15 bp, Homo sapiens
agtcccatctcccaa

SEQ ID NO: 299843 - DNA, 15 bp, Homo sapiens
aagtcccatctccca

SEQ ID NO: 299844 - DNA, 15 bp, Homo sapiens
gaagtcccatctccc

SEQ ID NO: 299845 - DNA, 15 bp, Homo sapiens
ggaagtcccatctcc

SEQ ID NO: 299846 - DNA, 15 bp, Homo sapiens
gggaagtcccatctc

SEQ ID NO: 299847 - DNA, 15 bp, Homo sapiens
agggaagtcccatct

SEQ ID NO: 299848 - DNA, 15 bp, Homo sapiens
tagggaagtcccatc

SEQ ID NO: 299849 - DNA, 15 bp, Homo sapiens
ctagggaagtcccat

SEQ ID NO: 299850 - DNA, 15 bp, Homo sapiens
actagggaagtccca

SEQ ID NO: 299851 - DNA, 15 bp, Homo sapiens
tactagggaagtccc

SEQ ID NO: 299852 - DNA, 15 bp, Homo sapiens
atactagggaagtcc

SEQ ID NO: 299853 - DNA, 15 bp, Homo sapiens
gatactagggaagtc

SEQ ID NO: 299854 - DNA, 15 bp, Homo sapiens
agatactagggaagt

SEQ ID NO: 299855 - DNA, 15 bp, Homo sapiens
aagatactagggaag

SEQ ID NO: 299856 - DNA, 15 bp, Homo sapiens
caagatactagggaa

SEQ ID NO: 299857 - DNA, 15 bp, Homo sapiens
ccaagatactaggga

SEQ ID NO: 299858 - DNA, 15 bp, Homo sapiens
accaagatactaggg

SEQ ID NO: 299859 - DNA, 15 bp, Homo sapiens
taccaagatactagg

SEQ ID NO: 299860 - DNA, 15 bp, Homo sapiens
gtaccaagatactag

SEQ ID NO: 299861 - DNA, 15 bp, Homo sapiens
agtaccaagatacta

SEQ ID NO: 299862 - DNA, 15 bp, Homo sapiens
cagtaccaagatact

SEQ ID NO: 299863 - DNA, 15 bp, Homo sapiens
acagtaccaagatac

SEQ ID NO: 299864 - DNA, 15 bp, Homo sapiens
aacagtaccaagata

SEQ ID NO: 299865 - DNA, 15 bp, Homo sapiens
caacagtaccaagat

SEQ ID NO: 299866 - DNA, 15 bp, Homo sapiens
tcaacagtaccaaga

SEQ ID NO: 299867 - DNA, 15 bp, Homo sapiens
ttcaacagtaccaag

SEQ ID NO: 299868 - DNA, 15 bp, Homo sapiens
attcaacagtaccaa

SEQ ID NO: 299869 - DNA, 15 bp, Homo sapiens
aattcaacagtacca

SEQ ID NO: 299870 - DNA, 15 bp, Homo sapiens
taattcaacagtacc

SEQ ID NO: 299871 - DNA, 15 bp, Homo sapiens
ataattcaacagtac

SEQ ID NO: 299872 - DNA, 15 bp, Homo sapiens
tataattcaacagta

SEQ ID NO: 299873 - DNA, 15 bp, Homo sapiens
ttataattcaacagt

SEQ ID NO: 299874 - DNA, 15 bp, Homo sapiens
attataattcaacag

SEQ ID NO: 299875 - DNA, 15 bp, Homo sapiens
gattataattcaaca

SEQ ID NO: 299876 - DNA, 15 bp, Homo sapiens
tgattataattcaac

SEQ ID NO: 299877 - DNA, 15 bp, Homo sapiens
ctgattataattcaa

SEQ ID NO: 299878 - DNA, 15 bp, Homo sapiens
actgattataattca

SEQ ID NO: 299879 - DNA, 15 bp, Homo sapiens
aactgattataattc

SEQ ID NO: 299880 - DNA, 15 bp, Homo sapiens
aaactgattataatt

SEQ ID NO: 299881 - DNA, 15 bp, Homo sapiens
gaaactgattataat

SEQ ID NO: 299882 - DNA, 15 bp, Homo sapiens
ggaaactgattataa

SEQ ID NO: 299883 - DNA, 15 bp, Homo sapiens
aggaaactgattata

SEQ ID NO: 299884 - DNA, 15 bp, Homo sapiens
gaggaaactgattat

SEQ ID NO: 299885 - DNA, 15 bp, Homo sapiens
ggaggaaactgatta

SEQ ID NO: 299886 - DNA, 15 bp, Homo sapiens
tggaggaaactgatt

SEQ ID NO: 299887 - DNA, 15 bp, Homo sapiens
ctggaggaaactgat

SEQ ID NO: 299888 - DNA, 15 bp, Homo sapiens
cctggaggaaactga

SEQ ID NO: 299889 - DNA, 15 bp, Homo sapiens
acctggaggaaactg

SEQ ID NO: 299890 - DNA, 15 bp, Homo sapiens
aacctggaggaaact

SEQ ID NO: 299891 - DNA, 15 bp, Homo sapiens
aaacctggaggaaac

SEQ ID NO: 299892 - DNA, 15 bp, Homo sapiens
caaacctggaggaaa

SEQ ID NO: 299893 - DNA, 15 bp, Homo sapiens
acaaacctggaggaa

SEQ ID NO: 299894 - DNA, 15 bp, Homo sapiens
gacaaacctggagga

SEQ ID NO: 299895 - DNA, 15 bp, Homo sapiens
agacaaacctggagg

SEQ ID NO: 299896 - DNA, 15 bp, Homo sapiens
tagacaaacctggag

SEQ ID NO: 299897 - DNA, 15 bp, Homo sapiens
atagacaaacctgga

SEQ ID NO: 299898 - DNA, 15 bp, Homo sapiens
aatagacaaacctgg

SEQ ID NO: 299899 - DNA, 15 bp, Homo sapiens
aaatagacaaacctg

SEQ ID NO: 299900 - DNA, 15 bp, Homo sapiens
aaaatagacaaacct

SEQ ID NO: 299901 - DNA, 15 bp, Homo sapiens
gaaaatagacaaacc

SEQ ID NO: 299902 - DNA, 15 bp, Homo sapiens
agaaaatagacaaac

SEQ ID NO: 299903 - DNA, 15 bp, Homo sapiens
gagaaaatagacaaa

SEQ ID NO: 299904 - DNA, 15 bp, Homo sapiens
ggagaaaatagacaa

SEQ ID NO: 299905 - DNA, 15 bp, Homo sapiens
gggagaaaatagaca

SEQ ID NO: 299906 - DNA, 15 bp, Homo sapiens
agggagaaaatagac

SEQ ID NO: 299907 - DNA, 15 bp, Homo sapiens
gagggagaaaataga

SEQ ID NO: 299908 - DNA, 15 bp, Homo sapiens
tgagggagaaaatag

SEQ ID NO: 299909 - DNA, 15 bp, Homo sapiens
ttgagggagaaaata

SEQ ID NO: 299910 - DNA, 15 bp, Homo sapiens
attgagggagaaaat

SEQ ID NO: 299911 - DNA, 15 bp, Homo sapiens
aattgagggagaaaa

SEQ ID NO: 299912 - DNA, 15 bp, Homo sapiens
gaattgagggagaaa

SEQ ID NO: 299913 - DNA, 15 bp, Homo sapiens
tgaattgagggagaa

SEQ ID NO: 299914 - DNA, 15 bp, Homo sapiens
atgaattgagggaga

SEQ ID NO: 299915 - DNA, 15 bp, Homo sapiens
aatgaattgagggag

SEQ ID NO: 299916 - DNA, 15 bp, Homo sapiens
aaatgaattgaggga

SEQ ID NO: 299917 - DNA, 15 bp, Homo sapiens
taaatgaattgaggg

SEQ ID NO: 299918 - DNA, 15 bp, Homo sapiens
ataaatgaattgagg

SEQ ID NO: 299919 - DNA, 15 bp, Homo sapiens
aataaatgaattgag

SEQ ID NO: 299920 - DNA, 15 bp, Homo sapiens
aaaataaatgaattg

SEQ ID NO: 299921 - DNA, 15 bp, Homo sapiens
aaaaataaatgaatt

SEQ ID NO: 299922 - DNA, 15 bp, Homo sapiens
gaaaaataaatgaat

SEQ ID NO: 299923 - DNA, 15 bp, Homo sapiens
agaaaaataaatgaa

SEQ ID NO: 299924 - DNA, 15 bp, Homo sapiens
gagaaaaataaatga

SEQ ID NO: 299925 - DNA, 15 bp, Homo sapiens
ggagaaaaataaatg

SEQ ID NO: 299926 - DNA, 15 bp, Homo sapiens
aggagaaaaataaat

SEQ ID NO: 299927 - DNA, 15 bp, Homo sapiens
gaggagaaaaataaa

SEQ ID NO: 299928 - DNA, 15 bp, Homo sapiens
ggaggagaaaaataa

SEQ ID NO: 299929 - DNA, 15 bp, Homo sapiens
aggaggagaaaaata

SEQ ID NO: 299930 - DNA, 15 bp, Homo sapiens
gaggaggagaaaaat

SEQ ID NO: 299931 - DNA, 15 bp, Homo sapiens
ggaggaggagaaaaa

SEQ ID NO: 299932 - DNA, 15 bp, Homo sapiens
aggaggaggagaaaa

SEQ ID NO: 299933 - DNA, 15 bp, Homo sapiens
aaggaggaggagaaa

SEQ ID NO: 299934 - DNA, 15 bp, Homo sapiens
taaggaggaggagaa

SEQ ID NO: 299935 - DNA, 15 bp, Homo sapiens
ttaaggaggaggaga

SEQ ID NO: 299936 - DNA, 15 bp, Homo sapiens
tttaaggaggaggag

SEQ ID NO: 299937 - DNA, 15 bp, Homo sapiens
gtttaaggaggagga

SEQ ID NO: 299938 - DNA, 15 bp, Homo sapiens
tgtttaaggaggagg

SEQ ID NO: 299939 - DNA, 15 bp, Homo sapiens
atgtttaaggaggag

SEQ ID NO: 299940 - DNA, 15 bp, Homo sapiens
catgtttaaggagga

SEQ ID NO: 299941 - DNA, 15 bp, Homo sapiens
acatgtttaaggagg

SEQ ID NO: 299942 - DNA, 15 bp, Homo sapiens
tacatgtttaaggag

SEQ ID NO: 299943 - DNA, 15 bp, Homo sapiens
atacatgtttaagga

SEQ ID NO: 299944 - DNA, 15 bp, Homo sapiens
aatacatgtttaagg

SEQ ID NO: 299945 - DNA, 15 bp, Homo sapiens
caatacatgtttaag

SEQ ID NO: 299946 - DNA, 15 bp, Homo sapiens
tcaatacatgtttaa

SEQ ID NO: 299947 - DNA, 15 bp, Homo sapiens
ctcaatacatgttta

SEQ ID NO: 299948 - DNA, 15 bp, Homo sapiens
cctcaatacatgttt

SEQ ID NO: 299949 - DNA, 15 bp, Homo sapiens
ccctcaatacatgtt

SEQ ID NO: 299950 - DNA, 15 bp, Homo sapiens
gccctcaatacatgt

SEQ ID NO: 299951 - DNA, 15 bp, Homo sapiens
ggccctcaatacatg

SEQ ID NO: 299952 - DNA, 15 bp, Homo sapiens
aggccctcaatacat

SEQ ID NO: 299953 - DNA, 15 bp, Homo sapiens
taggccctcaataca

SEQ ID NO: 299954 - DNA, 15 bp, Homo sapiens
ataggccctcaatac

SEQ ID NO: 299955 - DNA, 15 bp, Homo sapiens
aataggccctcaata

SEQ ID NO: 299956 - DNA, 15 bp, Homo sapiens
aaataggccctcaat

SEQ ID NO: 299957 - DNA, 15 bp, Homo sapiens
aaaataggccctcaa

SEQ ID NO: 299958 - DNA, 15 bp, Homo sapiens
caaaataggccctca

SEQ ID NO: 299959 - DNA, 15 bp, Homo sapiens
gcaaaataggccctc

SEQ ID NO: 299960 - DNA, 15 bp, Homo sapiens
cgcaaaataggccct

SEQ ID NO: 299961 - DNA, 15 bp, Homo sapiens
ccgcaaaataggccc

SEQ ID NO: 299962 - DNA, 15 bp, Homo sapiens
cccgcaaaataggcc

SEQ ID NO: 299963 - DNA, 15 bp, Homo sapiens
acccgcaaaataggc

SEQ ID NO: 299964 - DNA, 15 bp, Homo sapiens
tacccgcaaaatagg

SEQ ID NO: 299965 - DNA, 15 bp, Homo sapiens
gtacccgcaaaatag

SEQ ID NO: 299966 - DNA, 15 bp, Homo sapiens
ggtacccgcaaaata

SEQ ID NO: 299967 - DNA, 15 bp, Homo sapiens
tggtacccgcaaaat

SEQ ID NO: 299968 - DNA, 15 bp, Homo sapiens
atggtacccgcaaaa

SEQ ID NO: 299969 - DNA, 15 bp, Homo sapiens
catggtacccgcaaa

SEQ ID NO: 299970 - DNA, 15 bp, Homo sapiens
tcatggtacccgcaa

SEQ ID NO: 299971 - DNA, 15 bp, Homo sapiens
atcatggtacccgca

SEQ ID NO: 299972 - DNA, 15 bp, Homo sapiens
catcatggtacccgc

SEQ ID NO: 299973 - DNA, 15 bp, Homo sapiens
tcatcatggtacccg

SEQ ID NO: 299974 - DNA, 15 bp, Homo sapiens
atcatcatggtaccc

SEQ ID NO: 299975 - DNA, 15 bp, Homo sapiens
catcatcatggtacc

SEQ ID NO: 299976 - DNA, 15 bp, Homo sapiens
ccatcatcatggtac

SEQ ID NO: 299977 - DNA, 15 bp, Homo sapiens
cccatcatcatggta

SEQ ID NO: 299978 - DNA, 15 bp, Homo sapiens
tcccatcatcatggt

SEQ ID NO: 299979 - DNA, 15 bp, Homo sapiens
ttcccatcatcatgg

SEQ ID NO: 299980 - DNA, 15 bp, Homo sapiens
gttcccatcatcatg

SEQ ID NO: 299981 - DNA, 15 bp, Homo sapiens
ggttcccatcatcat

SEQ ID NO: 299982 - DNA, 15 bp, Homo sapiens
gggttcccatcatca

SEQ ID NO: 299983 - DNA, 15 bp, Homo sapiens
tgggttcccatcatc

SEQ ID NO: 299984 - DNA, 15 bp, Homo sapiens
ctgggttcccatcat

SEQ ID NO: 299985 - DNA, 15 bp, Homo sapiens
tctgggttcccatca

SEQ ID NO: 299986 - DNA, 15 bp, Homo sapiens
gtctgggttcccatc

SEQ ID NO: 299987 - DNA, 15 bp, Homo sapiens
tgtctgggttcccat

SEQ ID NO: 299988 - DNA, 15 bp, Homo sapiens
gtgtctgggttccca

SEQ ID NO: 299989 - DNA, 15 bp, Homo sapiens
tgtgtctgggttccc

SEQ ID NO: 299990 - DNA, 15 bp, Homo sapiens
ttgtgtctgggttcc

SEQ ID NO: 299991 - DNA, 15 bp, Homo sapiens
tttgtgtctgggttc

SEQ ID NO: 299992 - DNA, 15 bp, Homo sapiens
ttttgtgtctgggtt

SEQ ID NO: 299993 - DNA, 15 bp, Homo sapiens
gttttgtgtctgggt

SEQ ID NO: 299994 - DNA, 15 bp, Homo sapiens
tgttttgtgtctggg

SEQ ID NO: 299995 - DNA, 15 bp, Homo sapiens
gtgttttgtgtctgg

SEQ ID NO: 299996 - DNA, 15 bp, Homo sapiens
ggtgttttgtgtctg

SEQ ID NO: 299997 - DNA, 15 bp, Homo sapiens
tggtgttttgtgtct

SEQ ID NO: 299998 - DNA, 15 bp, Homo sapiens
ttggtgttttgtgtc

SEQ ID NO: 299999 - DNA, 15 bp, Homo sapiens
cttggtgttttgtgt

SEQ ID NO: 300000 - DNA, 15 bp, Homo sapiens
ccttggtgttttgtg

SEQ ID NO: 300001 - DNA, 15 bp, Homo sapiens
gccttggtgttttgt

SEQ ID NO: 300002 - DNA, 15 bp, Homo sapiens
agccttggtgttttg

SEQ ID NO: 300003 - DNA, 15 bp, Homo sapiens
gagccttggtgtttt

SEQ ID NO: 300004 - DNA, 15 bp, Homo sapiens
agagccttggtgttt

SEQ ID NO: 300005 - DNA, 15 bp, Homo sapiens
gagagccttggtgtt

SEQ ID NO: 300006 - DNA, 15 bp, Homo sapiens
ggagagccttggtgt

SEQ ID NO: 300007 - DNA, 15 bp, Homo sapiens
gggagagccttggtg

SEQ ID NO: 300008 - DNA, 15 bp, Homo sapiens
ggggagagccttggt

SEQ ID NO: 300009 - DNA, 15 bp, Homo sapiens
aggggagagccttgg

SEQ ID NO: 300010 - DNA, 15 bp, Homo sapiens
gaggggagagccttg

SEQ ID NO: 300011 - DNA, 15 bp, Homo sapiens
tgaggggagagcctt

SEQ ID NO: 300012 - DNA, 15 bp, Homo sapiens
ctgaggggagagcct

SEQ ID NO: 300013 - DNA, 15 bp, Homo sapiens
cctgaggggagagcc

SEQ ID NO: 300014 - DNA, 15 bp, Homo sapiens
tcctgaggggagagc

SEQ ID NO: 300015 - DNA, 15 bp, Homo sapiens
ctcctgaggggagag

SEQ ID NO: 300016 - DNA, 15 bp, Homo sapiens
gctcctgaggggaga

SEQ ID NO: 300017 - DNA, 15 bp, Homo sapiens
agctcctgaggggag

SEQ ID NO: 300018 - DNA, 15 bp, Homo sapiens
gagctcctgagggga

SEQ ID NO: 300019 - DNA, 15 bp, Homo sapiens
tgagctcctgagggg

SEQ ID NO: 300020 - DNA, 15 bp, Homo sapiens
gtgagctcctgaggg

SEQ ID NO: 300021 - DNA, 15 bp, Homo sapiens
tgtgagctcctgagg

SEQ ID NO: 300022 - DNA, 15 bp, Homo sapiens
ctgtgagctcctgag

SEQ ID NO: 300023 - DNA, 15 bp, Homo sapiens
actgtgagctcctga

SEQ ID NO: 300024 - DNA, 15 bp, Homo sapiens
gactgtgagctcctg

SEQ ID NO: 300025 - DNA, 15 bp, Homo sapiens
agactgtgagctcct

SEQ ID NO: 300026 - DNA, 15 bp, Homo sapiens
tagactgtgagctcc

SEQ ID NO: 300027 - DNA, 15 bp, Homo sapiens
ctagactgtgagctc

SEQ ID NO: 300028 - DNA, 15 bp, Homo sapiens
gctagactgtgagct

SEQ ID NO: 300029 - DNA, 15 bp, Homo sapiens
tgctagactgtgagc

SEQ ID NO: 300030 - DNA, 15 bp, Homo sapiens
ctgctagactgtgag

SEQ ID NO: 300031 - DNA, 15 bp, Homo sapiens
cctgctagactgtga

SEQ ID NO: 300032 - DNA, 15 bp, Homo sapiens
ccctgctagactgtg

SEQ ID NO: 300033 - DNA, 15 bp, Homo sapiens
tccctgctagactgt

SEQ ID NO: 300034 - DNA, 15 bp, Homo sapiens
ttccctgctagactg

SEQ ID NO: 300035 - DNA, 15 bp, Homo sapiens
cttccctgctagact

SEQ ID NO: 300036 - DNA, 15 bp, Homo sapiens
ccttccctgctagac

SEQ ID NO: 300037 - DNA, 15 bp, Homo sapiens
cccttccctgctaga

SEQ ID NO: 300038 - DNA, 15 bp, Homo sapiens
tcccttccctgctag

SEQ ID NO: 300039 - DNA, 15 bp, Homo sapiens
ctcccttccctgcta

SEQ ID NO: 300040 - DNA, 15 bp, Homo sapiens
tctcccttccctgct

SEQ ID NO: 300041 - DNA, 15 bp, Homo sapiens
gtctcccttccctgc

SEQ ID NO: 300042 - DNA, 15 bp, Homo sapiens
tgtctcccttccctg

SEQ ID NO: 300043 - DNA, 15 bp, Homo sapiens
ctgtctcccttccct

SEQ ID NO: 300044 - DNA, 15 bp, Homo sapiens
tctgtctcccttccc

SEQ ID NO: 300045 - DNA, 15 bp, Homo sapiens
atctgtctcccttcc

SEQ ID NO: 300046 - DNA, 15 bp, Homo sapiens
tatctgtctcccttc

SEQ ID NO: 300047 - DNA, 15 bp, Homo sapiens
gtatctgtctccctt

SEQ ID NO: 300048 - DNA, 15 bp, Homo sapiens
tgtatctgtctccct

SEQ ID NO: 300049 - DNA, 15 bp, Homo sapiens
gtgtatctgtctccc

SEQ ID NO: 300050 - DNA, 15 bp, Homo sapiens
tgtgtatctgtctcc

SEQ ID NO: 300051 - DNA, 15 bp, Homo sapiens
ttgtgtatctgtctc

SEQ ID NO: 300052 - DNA, 15 bp, Homo sapiens
tttgtgtatctgtct

SEQ ID NO: 300053 - DNA, 15 bp, Homo sapiens
gtttgtgtatctgtc

SEQ ID NO: 300054 - DNA, 15 bp, Homo sapiens
tgtttgtgtatctgt

SEQ ID NO: 300055 - DNA, 15 bp, Homo sapiens
ttgtttgtgtatctg

SEQ ID NO: 300056 - DNA, 15 bp, Homo sapiens
tttgtttgtgtatct

SEQ ID NO: 300057 - DNA, 15 bp, Homo sapiens
atttgtttgtgtatc

SEQ ID NO: 300058 - DNA, 15 bp, Homo sapiens
tatttgtttgtgtat

SEQ ID NO: 300059 - DNA, 15 bp, Homo sapiens
ttatttgtttgtgta

SEQ ID NO: 300060 - DNA, 15 bp, Homo sapiens
tttatttgtttgtgt

SEQ ID NO: 300061 - DNA, 15 bp, Homo sapiens
atttatttgtttgtg

SEQ ID NO: 300062 - DNA, 15 bp, Homo sapiens
aatttatttgtttgt

SEQ ID NO: 300063 - DNA, 15 bp, Homo sapiens
taatttatttgtttg

SEQ ID NO: 300064 - DNA, 15 bp, Homo sapiens
gtaatttatttgttt

SEQ ID NO: 300065 - DNA, 15 bp, Homo sapiens
ggtaatttatttgtt

SEQ ID NO: 300066 - DNA, 15 bp, Homo sapiens
tggtaatttatttgt

SEQ ID NO: 300067 - DNA, 15 bp, Homo sapiens
gtggtaatttatttg

SEQ ID NO: 300068 - DNA, 15 bp, Homo sapiens
agtggtaatttattt

SEQ ID NO: 300069 - DNA, 15 bp, Homo sapiens
aagtggtaatttatt

SEQ ID NO: 300070 - DNA, 15 bp, Homo sapiens
gaagtggtaatttat

SEQ ID NO: 300071 - DNA, 15 bp, Homo sapiens
tgaagtggtaattta

SEQ ID NO: 300072 - DNA, 15 bp, Homo sapiens
atgaagtggtaattt

SEQ ID NO: 300073 - DNA, 15 bp, Homo sapiens
catgaagtggtaatt

SEQ ID NO: 300074 - DNA, 15 bp, Homo sapiens
tcatgaagtggtaat

SEQ ID NO: 300075 - DNA, 15 bp, Homo sapiens
ctcatgaagtggtaa

SEQ ID NO: 300076 - DNA, 15 bp, Homo sapiens
actcatgaagtggta

SEQ ID NO: 300077 - DNA, 15 bp, Homo sapiens
cactcatgaagtggt

SEQ ID NO: 300078 - DNA, 15 bp, Homo sapiens
tcactcatgaagtgg

SEQ ID NO: 300079 - DNA, 15 bp, Homo sapiens
atcactcatgaagtg

SEQ ID NO: 300080 - DNA, 15 bp, Homo sapiens
catcactcatgaagt

SEQ ID NO: 300081 - DNA, 15 bp, Homo sapiens
tcatcactcatgaag

SEQ ID NO: 300082 - DNA, 15 bp, Homo sapiens
ctcatcactcatgaa

SEQ ID NO: 300083 - DNA, 15 bp, Homo sapiens
gctcatcactcatga

SEQ ID NO: 300084 - DNA, 15 bp, Homo sapiens
cgctcatcactcatg

SEQ ID NO: 300085 - DNA, 15 bp, Homo sapiens
gcgctcatcactcat

SEQ ID NO: 300086 - DNA, 15 bp, Homo sapiens
ggcgctcatcactca

SEQ ID NO: 300087 - DNA, 15 bp, Homo sapiens
tggcgctcatcactc

SEQ ID NO: 300088 - DNA, 15 bp, Homo sapiens
gtggcgctcatcact

SEQ ID NO: 300089 - DNA, 15 bp, Homo sapiens
tgtggcgctcatcac

SEQ ID NO: 300090 - DNA, 15 bp, Homo sapiens
ttgtggcgctcatca

SEQ ID NO: 300091 - DNA, 15 bp, Homo sapiens
gttgtggcgctcatc

SEQ ID NO: 300092 - DNA, 15 bp, Homo sapiens
tgttgtggcgctcat

SEQ ID NO: 300093 - DNA, 15 bp, Homo sapiens
ctgttgtggcgctca

SEQ ID NO: 300094 - DNA, 15 bp, Homo sapiens
tctgttgtggcgctc

SEQ ID NO: 300095 - DNA, 15 bp, Homo sapiens
ttctgttgtggcgct

SEQ ID NO: 300096 - DNA, 15 bp, Homo sapiens
cttctgttgtggcgc

SEQ ID NO: 300097 - DNA, 15 bp, Homo sapiens
gcttctgttgtggcg

SEQ ID NO: 300098 - DNA, 15 bp, Homo sapiens
tgcttctgttgtggc

SEQ ID NO: 300099 - DNA, 15 bp, Homo sapiens
gtgcttctgttgtgg

SEQ ID NO: 300100 - DNA, 15 bp, Homo sapiens
ggtgcttctgttgtg

SEQ ID NO: 300101 - DNA, 15 bp, Homo sapiens
gggtgcttctgttgt

SEQ ID NO: 300102 - DNA, 15 bp, Homo sapiens
tgggtgcttctgttg

SEQ ID NO: 300103 - DNA, 15 bp, Homo sapiens
ctgggtgcttctgtt

SEQ ID NO: 300104 - DNA, 15 bp, Homo sapiens
cctgggtgcttctgt

SEQ ID NO: 300105 - DNA, 15 bp, Homo sapiens
tcctgggtgcttctg

SEQ ID NO: 300106 - DNA, 15 bp, Homo sapiens
ttcctgggtgcttct

SEQ ID NO: 300107 - DNA, 15 bp, Homo sapiens
cttcctgggtgcttc

SEQ ID NO: 300108 - DNA, 15 bp, Homo sapiens
tcttcctgggtgctt

SEQ ID NO: 300109 - DNA, 15 bp, Homo sapiens
ttcttcctgggtgct

SEQ ID NO: 300110 - DNA, 15 bp, Homo sapiens
tttcttcctgggtgc

SEQ ID NO: 300111 - DNA, 15 bp, Homo sapiens
ttttcttcctgggtg

SEQ ID NO: 300112 - DNA, 15 bp, Homo sapiens
cttttcttcctgggt

SEQ ID NO: 300113 - DNA, 15 bp, Homo sapiens
gcttttcttcctggg

SEQ ID NO: 300114 - DNA, 15 bp, Homo sapiens
ggcttttcttcctgg

SEQ ID NO: 300115 - DNA, 15 bp, Homo sapiens
aggcttttcttcctg

SEQ ID NO: 300116 - DNA, 15 bp, Homo sapiens
taggcttttcttcct

SEQ ID NO: 300117 - DNA, 15 bp, Homo sapiens
ctaggcttttcttcc

SEQ ID NO: 300118 - DNA, 15 bp, Homo sapiens
tctaggcttttcttc

SEQ ID NO: 300119 - DNA, 15 bp, Homo sapiens
ttctaggcttttctt

SEQ ID NO: 300120 - DNA, 15 bp, Homo sapiens
tttctaggcttttct

SEQ ID NO: 300121 - DNA, 15 bp, Homo sapiens
ttttctaggcttttc

SEQ ID NO: 300122 - DNA, 15 bp, Homo sapiens
tttttctaggctttt

SEQ ID NO: 300123 - DNA, 15 bp, Homo sapiens
ctttttctaggcttt

SEQ ID NO: 300124 - DNA, 15 bp, Homo sapiens
cctttttctaggctt

SEQ ID NO: 300125 - DNA, 15 bp, Homo sapiens
acctttttctaggct

SEQ ID NO: 300126 - DNA, 15 bp, Homo sapiens
aacctttttctaggc

SEQ ID NO: 300127 - DNA, 15 bp, Homo sapiens
gaacctttttctagg

SEQ ID NO: 300128 - DNA, 15 bp, Homo sapiens
tgaacctttttctag

SEQ ID NO: 300129 - DNA, 15 bp, Homo sapiens
ctgaacctttttcta

SEQ ID NO: 300130 - DNA, 15 bp, Homo sapiens
actgaacctttttct

SEQ ID NO: 300131 - DNA, 15 bp, Homo sapiens
aactgaacctttttc

SEQ ID NO: 300132 - DNA, 15 bp, Homo sapiens
taactgaaccttttt

SEQ ID NO: 300133 - DNA, 15 bp, Homo sapiens
gtaactgaacctttt

SEQ ID NO: 300134 - DNA, 15 bp, Homo sapiens
ggtaactgaaccttt

SEQ ID NO: 300135 - DNA, 15 bp, Homo sapiens
aggtaactgaacctt

SEQ ID NO: 300136 - DNA, 15 bp, Homo sapiens
gaggtaactgaacct

SEQ ID NO: 300137 - DNA, 15 bp, Homo sapiens
agaggtaactgaacc

SEQ ID NO: 300138 - DNA, 15 bp, Homo sapiens
cagaggtaactgaac

SEQ ID NO: 300139 - DNA, 15 bp, Homo sapiens
ccagaggtaactgaa

SEQ ID NO: 300140 - DNA, 15 bp, Homo sapiens
cccagaggtaactga

SEQ ID NO: 300141 - DNA, 15 bp, Homo sapiens
acccagaggtaactg

SEQ ID NO: 300142 - DNA, 15 bp, Homo sapiens
cacccagaggtaact

SEQ ID NO: 300143 - DNA, 15 bp, Homo sapiens
ccacccagaggtaac

SEQ ID NO: 300144 - DNA, 15 bp, Homo sapiens
cccacccagaggtaa

SEQ ID NO: 300145 - DNA, 15 bp, Homo sapiens
tcccacccagaggta

SEQ ID NO: 300146 - DNA, 15 bp, Homo sapiens
ctcccacccagaggt

SEQ ID NO: 300147 - DNA, 15 bp, Homo sapiens
cctcccacccagagg

SEQ ID NO: 300148 - DNA, 15 bp, Homo sapiens
tcctcccacccagag

SEQ ID NO: 300149 - DNA, 15 bp, Homo sapiens
ctcctcccacccaga

SEQ ID NO: 300150 - DNA, 15 bp, Homo sapiens
cctcctcccacccag

SEQ ID NO: 300151 - DNA, 15 bp, Homo sapiens
tcctcctcccaccca

SEQ ID NO: 300152 - DNA, 15 bp, Homo sapiens
atcctcctcccaccc

SEQ ID NO: 300153 - DNA, 15 bp, Homo sapiens
gatcctcctcccacc

SEQ ID NO: 300154 - DNA, 15 bp, Homo sapiens
tgatcctcctcccac

SEQ ID NO: 300155 - DNA, 15 bp, Homo sapiens
ctgatcctcctccca

SEQ ID NO: 300156 - DNA, 15 bp, Homo sapiens
cctgatcctcctccc

SEQ ID NO: 300157 - DNA, 15 bp, Homo sapiens
ccctgatcctcctcc

SEQ ID NO: 300158 - DNA, 15 bp, Homo sapiens
cccctgatcctcctc

SEQ ID NO: 300159 - DNA, 15 bp, Homo sapiens
tcccctgatcctcct

SEQ ID NO: 300160 - DNA, 15 bp, Homo sapiens
ctcccctgatcctcc

SEQ ID NO: 300161 - DNA, 15 bp, Homo sapiens
cctcccctgatcctc

SEQ ID NO: 300162 - DNA, 15 bp, Homo sapiens
gcctcccctgatcct

SEQ ID NO: 300163 - DNA, 15 bp, Homo sapiens
agcctcccctgatcc

SEQ ID NO: 300164 - DNA, 15 bp, Homo sapiens
aagcctcccctgatc

SEQ ID NO: 300165 - DNA, 15 bp, Homo sapiens
aaagcctcccctgat

SEQ ID NO: 300166 - DNA, 15 bp, Homo sapiens
gaaagcctcccctga

SEQ ID NO: 300167 - DNA, 15 bp, Homo sapiens
agaaagcctcccctg

SEQ ID NO: 300168 - DNA, 15 bp, Homo sapiens
cagaaagcctcccct

SEQ ID NO: 300169 - DNA, 15 bp, Homo sapiens
ccagaaagcctcccc

SEQ ID NO: 300170 - DNA, 15 bp, Homo sapiens
tccagaaagcctccc

SEQ ID NO: 300171 - DNA, 15 bp, Homo sapiens
ctccagaaagcctcc

SEQ ID NO: 300172 - DNA, 15 bp, Homo sapiens
cctccagaaagcctc

SEQ ID NO: 300173 - DNA, 15 bp, Homo sapiens
tcctccagaaagcct

SEQ ID NO: 300174 - DNA, 15 bp, Homo sapiens
ctcctccagaaagcc

SEQ ID NO: 300175 - DNA, 15 bp, Homo sapiens
cctcctccagaaagc

SEQ ID NO: 300176 - DNA, 15 bp, Homo sapiens
gcctcctccagaaag

SEQ ID NO: 300177 - DNA, 15 bp, Homo sapiens
tgcctcctccagaaa

SEQ ID NO: 300178 - DNA, 15 bp, Homo sapiens
ctgcctcctccagaa

SEQ ID NO: 300179 - DNA, 15 bp, Homo sapiens
gctgcctcctccaga

SEQ ID NO: 300180 - DNA, 15 bp, Homo sapiens
ggctgcctcctccag

SEQ ID NO: 300181 - DNA, 15 bp, Homo sapiens
tggctgcctcctcca

SEQ ID NO: 300182 - DNA, 15 bp, Homo sapiens
gtggctgcctcctcc

SEQ ID NO: 300183 - DNA, 15 bp, Homo sapiens
agtggctgcctcctc

SEQ ID NO: 300184 - DNA, 15 bp, Homo sapiens
cagtggctgcctcct

SEQ ID NO: 300185 - DNA, 15 bp, Homo sapiens
tcagtggctgcctcc

SEQ ID NO: 300186 - DNA, 15 bp, Homo sapiens
ctcagtggctgcctc

SEQ ID NO: 300187 - DNA, 15 bp, Homo sapiens
actcagtggctgcct

SEQ ID NO: 300188 - DNA, 15 bp, Homo sapiens
aactcagtggctgcc

SEQ ID NO: 300189 - DNA, 15 bp, Homo sapiens
caactcagtggctgc

SEQ ID NO: 300190 - DNA, 15 bp, Homo sapiens
tcaactcagtggctg

SEQ ID NO: 300191 - DNA, 15 bp, Homo sapiens
ctcaactcagtggct

SEQ ID NO: 300192 - DNA, 15 bp, Homo sapiens
actcaactcagtggc

SEQ ID NO: 300193 - DNA, 15 bp, Homo sapiens
cactcaactcagtgg

SEQ ID NO: 300194 - DNA, 15 bp, Homo sapiens
acactcaactcagtg

SEQ ID NO: 300195 - DNA, 15 bp, Homo sapiens
aacactcaactcagt

SEQ ID NO: 300196 - DNA, 15 bp, Homo sapiens
gaacactcaactcag

SEQ ID NO: 300197 - DNA, 15 bp, Homo sapiens
tgaacactcaactca

SEQ ID NO: 300198 - DNA, 15 bp, Homo sapiens
ttgaacactcaactc

SEQ ID NO: 300199 - DNA, 15 bp, Homo sapiens
tttgaacactcaact

SEQ ID NO: 300200 - DNA, 15 bp, Homo sapiens
ctttgaacactcaac

SEQ ID NO: 300201 - DNA, 15 bp, Homo sapiens
cctttgaacactcaa

SEQ ID NO: 300202 - DNA, 15 bp, Homo sapiens
acctttgaacactca

SEQ ID NO: 300203 - DNA, 15 bp, Homo sapiens
cacctttgaacactc

SEQ ID NO: 300204 - DNA, 15 bp, Homo sapiens
ccacctttgaacact

SEQ ID NO: 300205 - DNA, 15 bp, Homo sapiens
tccacctttgaacac

SEQ ID NO: 300206 - DNA, 15 bp, Homo sapiens
atccacctttgaaca

SEQ ID NO: 300207 - DNA, 15 bp, Homo sapiens
catccacctttgaac

SEQ ID NO: 300208 - DNA, 15 bp, Homo sapiens
tcatccacctttgaa

SEQ ID NO: 300209 - DNA, 15 bp, Homo sapiens
ctcatccacctttga

SEQ ID NO: 300210 - DNA, 15 bp, Homo sapiens
actcatccacctttg

SEQ ID NO: 300211 - DNA, 15 bp, Homo sapiens
tactcatccaccttt

SEQ ID NO: 300212 - DNA, 15 bp, Homo sapiens
ttactcatccacctt

SEQ ID NO: 300213 - DNA, 15 bp, Homo sapiens
cttactcatccacct

SEQ ID NO: 300214 - DNA, 15 bp, Homo sapiens
tcttactcatccacc

SEQ ID NO: 300215 - DNA, 15 bp, Homo sapiens
ctcttactcatccac

SEQ ID NO: 300216 - DNA, 15 bp, Homo sapiens
gctcttactcatcca

SEQ ID NO: 300217 - DNA, 15 bp, Homo sapiens
agctcttactcatcc

SEQ ID NO: 300218 - DNA, 15 bp, Homo sapiens
aagctcttactcatc

SEQ ID NO: 300219 - DNA, 15 bp, Homo sapiens
caagctcttactcat

SEQ ID NO: 300220 - DNA, 15 bp, Homo sapiens
gcaagctcttactca

SEQ ID NO: 300221 - DNA, 15 bp, Homo sapiens
tgcaagctcttactc

SEQ ID NO: 300222 - DNA, 15 bp, Homo sapiens
ttgcaagctcttact

SEQ ID NO: 300223 - DNA, 15 bp, Homo sapiens
cttgcaagctcttac

SEQ ID NO: 300224 - DNA, 15 bp, Homo sapiens
ccttgcaagctctta

SEQ ID NO: 300225 - DNA, 15 bp, Homo sapiens
cccttgcaagctctt

SEQ ID NO: 300226 - DNA, 15 bp, Homo sapiens
tcccttgcaagctct

SEQ ID NO: 300227 - DNA, 15 bp, Homo sapiens
ttcccttgcaagctc

SEQ ID NO: 300228 - DNA, 15 bp, Homo sapiens
attcccttgcaagct

SEQ ID NO: 300229 - DNA, 15 bp, Homo sapiens
tattcccttgcaagc

SEQ ID NO: 300230 - DNA, 15 bp, Homo sapiens
ctattcccttgcaag

SEQ ID NO: 300231 - DNA, 15 bp, Homo sapiens
gctattcccttgcaa

SEQ ID NO: 300232 - DNA, 15 bp, Homo sapiens
tgctattcccttgca

SEQ ID NO: 300233 - DNA, 15 bp, Homo sapiens
atgctattcccttgc

SEQ ID NO: 300234 - DNA, 15 bp, Homo sapiens
catgctattcccttg

SEQ ID NO: 300235 - DNA, 15 bp, Homo sapiens
ccatgctattccctt

SEQ ID NO: 300236 - DNA, 15 bp, Homo sapiens
cccatgctattccct

SEQ ID NO: 300237 - DNA, 15 bp, Homo sapiens
acccatgctattccc

SEQ ID NO: 300238 - DNA, 15 bp, Homo sapiens
cacccatgctattcc

SEQ ID NO: 300239 - DNA, 15 bp, Homo sapiens
acacccatgctattc

SEQ ID NO: 300240 - DNA, 15 bp, Homo sapiens
cacacccatgctatt

SEQ ID NO: 300241 - DNA, 15 bp, Homo sapiens
tcacacccatgctat

SEQ ID NO: 300242 - DNA, 15 bp, Homo sapiens
ttcacacccatgcta

SEQ ID NO: 300243 - DNA, 15 bp, Homo sapiens
tttcacacccatgct

SEQ ID NO: 300244 - DNA, 15 bp, Homo sapiens
gtttcacacccatgc

SEQ ID NO: 300245 - DNA, 15 bp, Homo sapiens
tgtttcacacccatg

SEQ ID NO: 300246 - DNA, 15 bp, Homo sapiens
ctgtttcacacccat

SEQ ID NO: 300247 - DNA, 15 bp, Homo sapiens
tctgtttcacaccca

SEQ ID NO: 300248 - DNA, 15 bp, Homo sapiens
ctctgtttcacaccc

SEQ ID NO: 300249 - DNA, 15 bp, Homo sapiens
cctctgtttcacacc

SEQ ID NO: 300250 - DNA, 15 bp, Homo sapiens
tcctctgtttcacac

SEQ ID NO: 300251 - DNA, 15 bp, Homo sapiens
ctcctctgtttcaca

SEQ ID NO: 300252 - DNA, 15 bp, Homo sapiens
actcctctgtttcac

SEQ ID NO: 300253 - DNA, 15 bp, Homo sapiens
cactcctctgtttca

SEQ ID NO: 300254 - DNA, 15 bp, Homo sapiens
tcactcctctgtttc

SEQ ID NO: 300255 - DNA, 15 bp, Homo sapiens
ttcactcctctgttt

SEQ ID NO: 300256 - DNA, 15 bp, Homo sapiens
attcactcctctgtt

SEQ ID NO: 300257 - DNA, 15 bp, Homo sapiens
cattcactcctctgt

SEQ ID NO: 300258 - DNA, 15 bp, Homo sapiens
gcattcactcctctg

SEQ ID NO: 300259 - DNA, 15 bp, Homo sapiens
tgcattcactcctct

SEQ ID NO: 300260 - DNA, 15 bp, Homo sapiens
ctgcattcactcctc

SEQ ID NO: 300261 - DNA, 15 bp, Homo sapiens
gctgcattcactcct

SEQ ID NO: 300262 - DNA, 15 bp, Homo sapiens
tgctgcattcactcc

SEQ ID NO: 300263 - DNA, 15 bp, Homo sapiens
ctgctgcattcactc

SEQ ID NO: 300264 - DNA, 15 bp, Homo sapiens
gctgctgcattcact

SEQ ID NO: 300265 - DNA, 15 bp, Homo sapiens
ggctgctgcattcac

SEQ ID NO: 300266 - DNA, 15 bp, Homo sapiens
gggctgctgcattca

SEQ ID NO: 300267 - DNA, 15 bp, Homo sapiens
cgggctgctgcattc

SEQ ID NO: 300268 - DNA, 15 bp, Homo sapiens
acgggctgctgcatt

SEQ ID NO: 300269 - DNA, 15 bp, Homo sapiens
gacgggctgctgcat

SEQ ID NO: 300270 - DNA, 15 bp, Homo sapiens
ggacgggctgctgca

SEQ ID NO: 300271 - DNA, 15 bp, Homo sapiens
tggacgggctgctgc

SEQ ID NO: 300272 - DNA, 15 bp, Homo sapiens
atggacgggctgctg

SEQ ID NO: 300273 - DNA, 15 bp, Homo sapiens
aatggacgggctgct

SEQ ID NO: 300274 - DNA, 15 bp, Homo sapiens
gaatggacgggctgc

SEQ ID NO: 300275 - DNA, 15 bp, Homo sapiens
agaatggacgggctg

SEQ ID NO: 300276 - DNA, 15 bp, Homo sapiens
aagaatggacgggct

SEQ ID NO: 300277 - DNA, 15 bp, Homo sapiens
taagaatggacgggc

SEQ ID NO: 300278 - DNA, 15 bp, Homo sapiens
ctaagaatggacggg

SEQ ID NO: 300279 - DNA, 15 bp, Homo sapiens
gctaagaatggacgg

SEQ ID NO: 300280 - DNA, 15 bp, Homo sapiens
agctaagaatggacg

SEQ ID NO: 300281 - DNA, 15 bp, Homo sapiens
cagctaagaatggac

SEQ ID NO: 300282 - DNA, 15 bp, Homo sapiens
gcagctaagaatgga

SEQ ID NO: 300283 - DNA, 15 bp, Homo sapiens
agcagctaagaatgg

SEQ ID NO: 300284 - DNA, 15 bp, Homo sapiens
cagcagctaagaatg

SEQ ID NO: 300285 - DNA, 15 bp, Homo sapiens
acagcagctaagaat

SEQ ID NO: 300286 - DNA, 15 bp, Homo sapiens
aacagcagctaagaa

SEQ ID NO: 300287 - DNA, 15 bp, Homo sapiens
gaacagcagctaaga

SEQ ID NO: 300288 - DNA, 15 bp, Homo sapiens
tgaacagcagctaag

SEQ ID NO: 300289 - DNA, 15 bp, Homo sapiens
atgaacagcagctaa

SEQ ID NO: 300290 - DNA, 15 bp, Homo sapiens
aatgaacagcagcta

SEQ ID NO: 300291 - DNA, 15 bp, Homo sapiens
gaatgaacagcagct

SEQ ID NO: 300292 - DNA, 15 bp, Homo sapiens
agaatgaacagcagc

SEQ ID NO: 300293 - DNA, 15 bp, Homo sapiens
aagaatgaacagcag

SEQ ID NO: 300294 - DNA, 15 bp, Homo sapiens
taagaatgaacagca

SEQ ID NO: 300295 - DNA, 15 bp, Homo sapiens
gtaagaatgaacagc

SEQ ID NO: 300296 - DNA, 15 bp, Homo sapiens
tgtaagaatgaacag

SEQ ID NO: 300297 - DNA, 15 bp, Homo sapiens
ctgtaagaatgaaca

SEQ ID NO: 300298 - DNA, 15 bp, Homo sapiens
tctgtaagaatgaac

SEQ ID NO: 300299 - DNA, 15 bp, Homo sapiens
atctgtaagaatgaa

SEQ ID NO: 300300 - DNA, 15 bp, Homo sapiens
catctgtaagaatga

SEQ ID NO: 300301 - DNA, 15 bp, Homo sapiens
acatctgtaagaatg

SEQ ID NO: 300302 - DNA, 15 bp, Homo sapiens
gacatctgtaagaat

SEQ ID NO: 300303 - DNA, 15 bp, Homo sapiens
tgacatctgtaagaa

SEQ ID NO: 300304 - DNA, 15 bp, Homo sapiens
ttgacatctgtaaga

SEQ ID NO: 300305 - DNA, 15 bp, Homo sapiens
tttgacatctgtaag

SEQ ID NO: 300306 - DNA, 15 bp, Homo sapiens
atttgacatctgtaa

SEQ ID NO: 300307 - DNA, 15 bp, Homo sapiens
tatttgacatctgta

SEQ ID NO: 300308 - DNA, 15 bp, Homo sapiens
atatttgacatctgt

SEQ ID NO: 300309 - DNA, 15 bp, Homo sapiens
aatatttgacatctg

SEQ ID NO: 300310 - DNA, 15 bp, Homo sapiens
aaatatttgacatct

SEQ ID NO: 300311 - DNA, 15 bp, Homo sapiens
gaaatatttgacatc

SEQ ID NO: 300312 - DNA, 15 bp, Homo sapiens
agaaatatttgacat

SEQ ID NO: 300313 - DNA, 15 bp, Homo sapiens
cagaaatatttgaca

SEQ ID NO: 300314 - DNA, 15 bp, Homo sapiens
ccagaaatatttgac

SEQ ID NO: 300315 - DNA, 15 bp, Homo sapiens
cccagaaatatttga

SEQ ID NO: 300316 - DNA, 15 bp, Homo sapiens
tcccagaaatatttg

SEQ ID NO: 300317 - DNA, 15 bp, Homo sapiens
ctcccagaaatattt

SEQ ID NO: 300318 - DNA, 15 bp, Homo sapiens
actcccagaaatatt

SEQ ID NO: 300319 - DNA, 15 bp, Homo sapiens
gactcccagaaatat

SEQ ID NO: 300320 - DNA, 15 bp, Homo sapiens
agactcccagaaata

SEQ ID NO: 300321 - DNA, 15 bp, Homo sapiens
aagactcccagaaat

SEQ ID NO: 300322 - DNA, 15 bp, Homo sapiens
gaagactcccagaaa

SEQ ID NO: 300323 - DNA, 15 bp, Homo sapiens
agaagactcccagaa

SEQ ID NO: 300324 - DNA, 15 bp, Homo sapiens
cagaagactcccaga

SEQ ID NO: 300325 - DNA, 15 bp, Homo sapiens
acagaagactcccag

SEQ ID NO: 300326 - DNA, 15 bp, Homo sapiens
gacagaagactccca

SEQ ID NO: 300327 - DNA, 15 bp, Homo sapiens
agacagaagactccc

SEQ ID NO: 300328 - DNA, 15 bp, Homo sapiens
aagacagaagactcc

SEQ ID NO: 300329 - DNA, 15 bp, Homo sapiens
gaagacagaagactc

SEQ ID NO: 300330 - DNA, 15 bp, Homo sapiens
ggaagacagaagact

SEQ ID NO: 300331 - DNA, 15 bp, Homo sapiens
tggaagacagaagac

SEQ ID NO: 300332 - DNA, 15 bp, Homo sapiens
gtggaagacagaaga

SEQ ID NO: 300333 - DNA, 15 bp, Homo sapiens
agtggaagacagaag

SEQ ID NO: 300334 - DNA, 15 bp, Homo sapiens
cagtggaagacagaa

SEQ ID NO: 300335 - DNA, 15 bp, Homo sapiens
acagtggaagacaga

SEQ ID NO: 300336 - DNA, 15 bp, Homo sapiens
aacagtggaagacag

SEQ ID NO: 300337 - DNA, 15 bp, Homo sapiens
taacagtggaagaca

SEQ ID NO: 300338 - DNA, 15 bp, Homo sapiens
gtaacagtggaagac

SEQ ID NO: 300339 - DNA, 15 bp, Homo sapiens
tgtaacagtggaaga

SEQ ID NO: 300340 - DNA, 15 bp, Homo sapiens
ttgtaacagtggaag

SEQ ID NO: 300341 - DNA, 15 bp, Homo sapiens
tttgtaacagtggaa

SEQ ID NO: 300342 - DNA, 15 bp, Homo sapiens
ttttgtaacagtgga

SEQ ID NO: 300343 - DNA, 15 bp, Homo sapiens
gttttgtaacagtgg

SEQ ID NO: 300344 - DNA, 15 bp, Homo sapiens
agttttgtaacagtg

SEQ ID NO: 300345 - DNA, 15 bp, Homo sapiens
aagttttgtaacagt

SEQ ID NO: 300346 - DNA, 15 bp, Homo sapiens
gaagttttgtaacag

SEQ ID NO: 300347 - DNA, 15 bp, Homo sapiens
agaagttttgtaaca

SEQ ID NO: 300348 - DNA, 15 bp, Homo sapiens
aagaagttttgtaac

SEQ ID NO: 300349 - DNA, 15 bp, Homo sapiens
aaagaagttttgtaa

SEQ ID NO: 300350 - DNA, 15 bp, Homo sapiens
taaagaagttttgta

SEQ ID NO: 300351 - DNA, 15 bp, Homo sapiens
ttaaagaagttttgt

SEQ ID NO: 300352 - DNA, 15 bp, Homo sapiens
tttaaagaagttttg

SEQ ID NO: 300353 - DNA, 15 bp, Homo sapiens
ttttaaagaagtttt

SEQ ID NO: 300354 - DNA, 15 bp, Homo sapiens
tttttaaagaagttt

SEQ ID NO: 300355 - DNA, 15 bp, Homo sapiens
atttttaaagaagtt

SEQ ID NO: 300356 - DNA, 15 bp, Homo sapiens
aatttttaaagaagt

SEQ ID NO: 300357 - DNA, 15 bp, Homo sapiens
caatttttaaagaag

SEQ ID NO: 300358 - DNA, 15 bp, Homo sapiens
acaatttttaaagaa

SEQ ID NO: 300359 - DNA, 15 bp, Homo sapiens
aacaatttttaaaga

SEQ ID NO: 300360 - DNA, 15 bp, Homo sapiens
caacaatttttaaag

SEQ ID NO: 300361 - DNA, 15 bp, Homo sapiens
acaacaatttttaaa

SEQ ID NO: 300362 - DNA, 15 bp, Homo sapiens
cacaacaatttttaa

SEQ ID NO: 300363 - DNA, 15 bp, Homo sapiens
tcacaacaattttta

SEQ ID NO: 300364 - DNA, 15 bp, Homo sapiens
atcacaacaattttt

SEQ ID NO: 300365 - DNA, 15 bp, Homo sapiens
aatcacaacaatttt

SEQ ID NO: 300366 - DNA, 15 bp, Homo sapiens
taatcacaacaattt

SEQ ID NO: 300367 - DNA, 15 bp, Homo sapiens
ctaatcacaacaatt

SEQ ID NO: 300368 - DNA, 15 bp, Homo sapiens
cctaatcacaacaat

SEQ ID NO: 300369 - DNA, 15 bp, Homo sapiens
tcctaatcacaacaa

SEQ ID NO: 300370 - DNA, 15 bp, Homo sapiens
atcctaatcacaaca

SEQ ID NO: 300371 - DNA, 15 bp, Homo sapiens
tatcctaatcacaac

SEQ ID NO: 300372 - DNA, 15 bp, Homo sapiens
ctatcctaatcacaa

SEQ ID NO: 300373 - DNA, 15 bp, Homo sapiens
cctatcctaatcaca

SEQ ID NO: 300374 - DNA, 15 bp, Homo sapiens
tcctatcctaatcac

SEQ ID NO: 300375 - DNA, 15 bp, Homo sapiens
gtcctatcctaatca

SEQ ID NO: 300376 - DNA, 15 bp, Homo sapiens
ggtcctatcctaatc

SEQ ID NO: 300377 - DNA, 15 bp, Homo sapiens
gggtcctatcctaat

SEQ ID NO: 300378 - DNA, 15 bp, Homo sapiens
agggtcctatcctaa

SEQ ID NO: 300379 - DNA, 15 bp, Homo sapiens
aagggtcctatccta

SEQ ID NO: 300380 - DNA, 15 bp, Homo sapiens
gaagggtcctatcct

SEQ ID NO: 300381 - DNA, 15 bp, Homo sapiens
agaagggtcctatcc

SEQ ID NO: 300382 - DNA, 15 bp, Homo sapiens
aagaagggtcctatc

SEQ ID NO: 300383 - DNA, 15 bp, Homo sapiens
gaagaagggtcctat

SEQ ID NO: 300384 - DNA, 15 bp, Homo sapiens
tgaagaagggtccta

SEQ ID NO: 300385 - DNA, 15 bp, Homo sapiens
atgaagaagggtcct

SEQ ID NO: 300386 - DNA, 15 bp, Homo sapiens
tatgaagaagggtcc

SEQ ID NO: 300387 - DNA, 15 bp, Homo sapiens
ctatgaagaagggtc

SEQ ID NO: 300388 - DNA, 15 bp, Homo sapiens
gctatgaagaagggt

SEQ ID NO: 300389 - DNA, 15 bp, Homo sapiens
tgctatgaagaaggg

SEQ ID NO: 300390 - DNA, 15 bp, Homo sapiens
ctgctatgaagaagg

SEQ ID NO: 300391 - DNA, 15 bp, Homo sapiens
cctgctatgaagaag

SEQ ID NO: 300392 - DNA, 15 bp, Homo sapiens
tcctgctatgaagaa

SEQ ID NO: 300393 - DNA, 15 bp, Homo sapiens
ctcctgctatgaaga

SEQ ID NO: 300394 - DNA, 15 bp, Homo sapiens
actcctgctatgaag

SEQ ID NO: 300395 - DNA, 15 bp, Homo sapiens
aactcctgctatgaa

SEQ ID NO: 300396 - DNA, 15 bp, Homo sapiens
aaactcctgctatga

SEQ ID NO: 300397 - DNA, 15 bp, Homo sapiens
gaaactcctgctatg

SEQ ID NO: 300398 - DNA, 15 bp, Homo sapiens
ggaaactcctgctat

SEQ ID NO: 300399 - DNA, 15 bp, Homo sapiens
gggaaactcctgcta

SEQ ID NO: 300400 - DNA, 15 bp, Homo sapiens
tgggaaactcctgct

SEQ ID NO: 300401 - DNA, 15 bp, Homo sapiens
ctgggaaactcctgc

SEQ ID NO: 300402 - DNA, 15 bp, Homo sapiens
actgggaaactcctg

SEQ ID NO: 300403 - DNA, 15 bp, Homo sapiens
aactgggaaactcct

SEQ ID NO: 300404 - DNA, 15 bp, Homo sapiens
gaactgggaaactcc

SEQ ID NO: 300405 - DNA, 15 bp, Homo sapiens
agaactgggaaactc

SEQ ID NO: 300406 - DNA, 15 bp, Homo sapiens
aagaactgggaaact

SEQ ID NO: 300407 - DNA, 15 bp, Homo sapiens
aaagaactgggaaac

SEQ ID NO: 300408 - DNA, 15 bp, Homo sapiens
caaagaactgggaaa

SEQ ID NO: 300409 - DNA, 15 bp, Homo sapiens
ccaaagaactgggaa

SEQ ID NO: 300410 - DNA, 15 bp, Homo sapiens
cccaaagaactggga

SEQ ID NO: 300411 - DNA, 15 bp, Homo sapiens
ccccaaagaactggg

SEQ ID NO: 300412 - DNA, 15 bp, Homo sapiens
tccccaaagaactgg

SEQ ID NO: 300413 - DNA, 15 bp, Homo sapiens
ttccccaaagaactg

SEQ ID NO: 300414 - DNA, 15 bp, Homo sapiens
attccccaaagaact

SEQ ID NO: 300415 - DNA, 15 bp, Homo sapiens
cattccccaaagaac

SEQ ID NO: 300416 - DNA, 15 bp, Homo sapiens
gcattccccaaagaa

SEQ ID NO: 300417 - DNA, 15 bp, Homo sapiens
agcattccccaaaga

SEQ ID NO: 300418 - DNA, 15 bp, Homo sapiens
aagcattccccaaag

SEQ ID NO: 300419 - DNA, 15 bp, Homo sapiens
aaagcattccccaaa

SEQ ID NO: 300420 - DNA, 15 bp, Homo sapiens
caaagcattccccaa

SEQ ID NO: 300421 - DNA, 15 bp, Homo sapiens
tcaaagcattcccca

SEQ ID NO: 300422 - DNA, 15 bp, Homo sapiens
ttcaaagcattcccc

SEQ ID NO: 300423 - DNA, 15 bp, Homo sapiens
tttcaaagcattccc

SEQ ID NO: 300424 - DNA, 15 bp, Homo sapiens
ttttcaaagcattcc

SEQ ID NO: 300425 - DNA, 15 bp, Homo sapiens
tttttcaaagcattc

SEQ ID NO: 300426 - DNA, 15 bp, Homo sapiens
atttttcaaagcatt

SEQ ID NO: 300427 - DNA, 15 bp, Homo sapiens
aatttttcaaagcat

SEQ ID NO: 300428 - DNA, 15 bp, Homo sapiens
gaatttttcaaagca

SEQ ID NO: 300429 - DNA, 15 bp, Homo sapiens
tgaatttttcaaagc

SEQ ID NO: 300430 - DNA, 15 bp, Homo sapiens
atgaatttttcaaag

SEQ ID NO: 300431 - DNA, 15 bp, Homo sapiens
aatgaatttttcaaa

SEQ ID NO: 300432 - DNA, 15 bp, Homo sapiens
aaatgaatttttcaa

SEQ ID NO: 300433 - DNA, 15 bp, Homo sapiens
caaatgaatttttca

SEQ ID NO: 300434 - DNA, 15 bp, Homo sapiens
acaaatgaatttttc

SEQ ID NO: 300435 - DNA, 15 bp, Homo sapiens
aacaaatgaattttt

SEQ ID NO: 300436 - DNA, 15 bp, Homo sapiens
gaacaaatgaatttt

SEQ ID NO: 300437 - DNA, 15 bp, Homo sapiens
ggaacaaatgaattt

SEQ ID NO: 300438 - DNA, 15 bp, Homo sapiens
gggaacaaatgaatt

SEQ ID NO: 300439 - DNA, 15 bp, Homo sapiens
cgggaacaaatgaat

SEQ ID NO: 300440 - DNA, 15 bp, Homo sapiens
ccgggaacaaatgaa

SEQ ID NO: 300441 - DNA, 15 bp, Homo sapiens
tccgggaacaaatga

SEQ ID NO: 300442 - DNA, 15 bp, Homo sapiens
atccgggaacaaatg

SEQ ID NO: 300443 - DNA, 15 bp, Homo sapiens
aatccgggaacaaat

SEQ ID NO: 300444 - DNA, 15 bp, Homo sapiens
caatccgggaacaaa

SEQ ID NO: 300445 - DNA, 15 bp, Homo sapiens
tcaatccgggaacaa

SEQ ID NO: 300446 - DNA, 15 bp, Homo sapiens
ctcaatccgggaaca

SEQ ID NO: 300447 - DNA, 15 bp, Homo sapiens
gctcaatccgggaac

SEQ ID NO: 300448 - DNA, 15 bp, Homo sapiens
agctcaatccgggaa

SEQ ID NO: 300449 - DNA, 15 bp, Homo sapiens
cagctcaatccggga

SEQ ID NO: 300450 - DNA, 15 bp, Homo sapiens
acagctcaatccggg

SEQ ID NO: 300451 - DNA, 15 bp, Homo sapiens
aacagctcaatccgg

SEQ ID NO: 300452 - DNA, 15 bp, Homo sapiens
gaacagctcaatccg

SEQ ID NO: 300453 - DNA, 15 bp, Homo sapiens
agaacagctcaatcc

SEQ ID NO: 300454 - DNA, 15 bp, Homo sapiens
tagaacagctcaatc

SEQ ID NO: 300455 - DNA, 15 bp, Homo sapiens
ctagaacagctcaat

SEQ ID NO: 300456 - DNA, 15 bp, Homo sapiens
actagaacagctcaa

SEQ ID NO: 300457 - DNA, 15 bp, Homo sapiens
aactagaacagctca

SEQ ID NO: 300458 - DNA, 15 bp, Homo sapiens
caactagaacagctc

SEQ ID NO: 300459 - DNA, 15 bp, Homo sapiens
acaactagaacagct

SEQ ID NO: 300460 - DNA, 15 bp, Homo sapiens
aacaactagaacagc

SEQ ID NO: 300461 - DNA, 15 bp, Homo sapiens
aaacaactagaacag

SEQ ID NO: 300462 - DNA, 15 bp, Homo sapiens
taaacaactagaaca

SEQ ID NO: 300463 - DNA, 15 bp, Homo sapiens
ataaacaactagaac

SEQ ID NO: 300464 - DNA, 15 bp, Homo sapiens
gataaacaactagaa

SEQ ID NO: 300465 - DNA, 15 bp, Homo sapiens
ggataaacaactaga

SEQ ID NO: 300466 - DNA, 15 bp, Homo sapiens
aggataaacaactag

SEQ ID NO: 300467 - DNA, 15 bp, Homo sapiens
aaggataaacaacta

SEQ ID NO: 300468 - DNA, 15 bp, Homo sapiens
aaaggataaacaact

SEQ ID NO: 300469 - DNA, 15 bp, Homo sapiens
taaaggataaacaac

SEQ ID NO: 300470 - DNA, 15 bp, Homo sapiens
ttaaaggataaacaa

SEQ ID NO: 300471 - DNA, 15 bp, Homo sapiens
tttaaaggataaaca

SEQ ID NO: 300472 - DNA, 15 bp, Homo sapiens
gtttaaaggataaac

SEQ ID NO: 300473 - DNA, 15 bp, Homo sapiens
tgtttaaaggataaa

SEQ ID NO: 300474 - DNA, 15 bp, Homo sapiens
ctgtttaaaggataa

SEQ ID NO: 300475 - DNA, 15 bp, Homo sapiens
gctgtttaaaggata

SEQ ID NO: 300476 - DNA, 15 bp, Homo sapiens
tgctgtttaaaggat

SEQ ID NO: 300477 - DNA, 15 bp, Homo sapiens
ttgctgtttaaagga

SEQ ID NO: 300478 - DNA, 15 bp, Homo sapiens
cttgctgtttaaagg

SEQ ID NO: 300479 - DNA, 15 bp, Homo sapiens
tcttgctgtttaaag

SEQ ID NO: 300480 - DNA, 15 bp, Homo sapiens
ttcttgctgtttaaa

SEQ ID NO: 300481 - DNA, 15 bp, Homo sapiens
tttcttgctgtttaa

SEQ ID NO: 300482 - DNA, 15 bp, Homo sapiens
ttttcttgctgttta

SEQ ID NO: 300483 - DNA, 15 bp, Homo sapiens
tttttcttgctgttt

SEQ ID NO: 300484 - DNA, 15 bp, Homo sapiens
ctttttcttgctgtt

SEQ ID NO: 300485 - DNA, 15 bp, Homo sapiens
tctttttcttgctgt

SEQ ID NO: 300486 - DNA, 15 bp, Homo sapiens
atctttttcttgctg

SEQ ID NO: 300487 - DNA, 15 bp, Homo sapiens
catctttttcttgct

SEQ ID NO: 300488 - DNA, 15 bp, Homo sapiens
ccatctttttcttgc

SEQ ID NO: 300489 - DNA, 15 bp, Homo sapiens
accatctttttcttg

SEQ ID NO: 300490 - DNA, 15 bp, Homo sapiens
taccatctttttctt

SEQ ID NO: 300491 - DNA, 15 bp, Homo sapiens
gtaccatctttttct

SEQ ID NO: 300492 - DNA, 15 bp, Homo sapiens
agtaccatctttttc

SEQ ID NO: 300493 - DNA, 15 bp, Homo sapiens
aagtaccatcttttt

SEQ ID NO: 300494 - DNA, 15 bp, Homo sapiens
gaagtaccatctttt

SEQ ID NO: 300495 - DNA, 15 bp, Homo sapiens
ggaagtaccatcttt

SEQ ID NO: 300496 - DNA, 15 bp, Homo sapiens
tggaagtaccatctt

SEQ ID NO: 300497 - DNA, 15 bp, Homo sapiens
ctggaagtaccatct

SEQ ID NO: 300498 - DNA, 15 bp, Homo sapiens
tctggaagtaccatc

SEQ ID NO: 300499 - DNA, 15 bp, Homo sapiens
gtctggaagtaccat

SEQ ID NO: 300500 - DNA, 15 bp, Homo sapiens
agtctggaagtacca

SEQ ID NO: 300501 - DNA, 15 bp, Homo sapiens
aagtctggaagtacc

SEQ ID NO: 300502 - DNA, 15 bp, Homo sapiens
gaagtctggaagtac

SEQ ID NO: 300503 - DNA, 15 bp, Homo sapiens
agaagtctggaagta

SEQ ID NO: 300504 - DNA, 15 bp, Homo sapiens
aagaagtctggaagt

SEQ ID NO: 300505 - DNA, 15 bp, Homo sapiens
taagaagtctggaag

SEQ ID NO: 300506 - DNA, 15 bp, Homo sapiens
ttaagaagtctggaa

SEQ ID NO: 300507 - DNA, 15 bp, Homo sapiens
tttaagaagtctgga

SEQ ID NO: 300508 - DNA, 15 bp, Homo sapiens
ttttaagaagtctgg

SEQ ID NO: 300509 - DNA, 15 bp, Homo sapiens
cttttaagaagtctg

SEQ ID NO: 300510 - DNA, 15 bp, Homo sapiens
gcttttaagaagtct

SEQ ID NO: 300511 - DNA, 15 bp, Homo sapiens
ggcttttaagaagtc

SEQ ID NO: 300512 - DNA, 15 bp, Homo sapiens
gggcttttaagaagt

SEQ ID NO: 300513 - DNA, 15 bp, Homo sapiens
tgggcttttaagaag

SEQ ID NO: 300514 - DNA, 15 bp, Homo sapiens
ttgggcttttaagaa

SEQ ID NO: 300515 - DNA, 15 bp, Homo sapiens
cttgggcttttaaga

SEQ ID NO: 300516 - DNA, 15 bp, Homo sapiens
gcttgggcttttaag

SEQ ID NO: 300517 - DNA, 15 bp, Homo sapiens
ggcttgggcttttaa

SEQ ID NO: 300518 - DNA, 15 bp, Homo sapiens
tggcttgggctttta

SEQ ID NO: 300519 - DNA, 15 bp, Homo sapiens
gtggcttgggctttt

SEQ ID NO: 300520 - DNA, 15 bp, Homo sapiens
agtggcttgggcttt

SEQ ID NO: 300521 - DNA, 15 bp, Homo sapiens
aagtggcttgggctt

SEQ ID NO: 300522 - DNA, 15 bp, Homo sapiens
caagtggcttgggct

SEQ ID NO: 300523 - DNA, 15 bp, Homo sapiens
gcaagtggcttgggc

SEQ ID NO: 300524 - DNA, 15 bp, Homo sapiens
tgcaagtggcttggg

SEQ ID NO: 300525 - DNA, 15 bp, Homo sapiens
ctgcaagtggcttgg

SEQ ID NO: 300526 - DNA, 15 bp, Homo sapiens
cctgcaagtggcttg

SEQ ID NO: 300527 - DNA, 15 bp, Homo sapiens
acctgcaagtggctt

SEQ ID NO: 300528 - DNA, 15 bp, Homo sapiens
tacctgcaagtggct

SEQ ID NO: 300529 - DNA, 15 bp, Homo sapiens
ttacctgcaagtggc

SEQ ID NO: 300530 - DNA, 15 bp, Homo sapiens
attacctgcaagtgg

SEQ ID NO: 300531 - DNA, 15 bp, Homo sapiens
atcatttatttatca

SEQ ID NO: 300532 - DNA, 15 bp, Homo sapiens
aatcatttatttatc

SEQ ID NO: 300533 - DNA, 15 bp, Homo sapiens
aaatcatttatttat

SEQ ID NO: 300534 - DNA, 15 bp, Homo sapiens
aaaatcatttattta

SEQ ID NO: 300535 - DNA, 15 bp, Homo sapiens
gaaaatcatttattt

SEQ ID NO: 300536 - DNA, 15 bp, Homo sapiens
tgaaaatcatttatt

SEQ ID NO: 300537 - DNA, 15 bp, Homo sapiens
ttgaaaatcatttat

SEQ ID NO: 300538 - DNA, 15 bp, Homo sapiens
attgaaaatcattta

SEQ ID NO: 300539 - DNA, 15 bp, Homo sapiens
cattgaaaatcattt

SEQ ID NO: 300540 - DNA, 15 bp, Homo sapiens
acattgaaaatcatt

SEQ ID NO: 300541 - DNA, 15 bp, Homo sapiens
aacattgaaaatcat

SEQ ID NO: 300542 - DNA, 15 bp, Homo sapiens
taacattgaaaatca

SEQ ID NO: 300543 - DNA, 15 bp, Homo sapiens
ttaacattgaaaatc

SEQ ID NO: 300544 - DNA, 15 bp, Homo sapiens
attaacattgaaaat

SEQ ID NO: 300545 - DNA, 15 bp, Homo sapiens
aattaacattgaaaa

SEQ ID NO: 300546 - DNA, 15 bp, Homo sapiens
taattaacattgaaa

SEQ ID NO: 300547 - DNA, 15 bp, Homo sapiens
ctaattaacattgaa

SEQ ID NO: 300548 - DNA, 15 bp, Homo sapiens
tctaattaacattga

SEQ ID NO: 300549 - DNA, 15 bp, Homo sapiens
ttctaattaacattg

SEQ ID NO: 300550 - DNA, 15 bp, Homo sapiens
cttctaattaacatt

SEQ ID NO: 300551 - DNA, 15 bp, Homo sapiens
gcttctaattaacat

SEQ ID NO: 300552 - DNA, 15 bp, Homo sapiens
tgcttctaattaaca

SEQ ID NO: 300553 - DNA, 15 bp, Homo sapiens
ttgcttctaattaac

SEQ ID NO: 300554 - DNA, 15 bp, Homo sapiens
cttgcttctaattaa

SEQ ID NO: 300555 - DNA, 15 bp, Homo sapiens
tcttgcttctaatta

SEQ ID NO: 300556 - DNA, 15 bp, Homo sapiens
ttcttgcttctaatt

SEQ ID NO: 300557 - DNA, 15 bp, Homo sapiens
cttcttgcttctaat

SEQ ID NO: 300558 - DNA, 15 bp, Homo sapiens
ccttcttgcttctaa

SEQ ID NO: 300559 - DNA, 15 bp, Homo sapiens
tccttcttgcttcta

SEQ ID NO: 300560 - DNA, 15 bp, Homo sapiens
ttccttcttgcttct

SEQ ID NO: 300561 - DNA, 15 bp, Homo sapiens
tttccttcttgcttc

SEQ ID NO: 300562 - DNA, 15 bp, Homo sapiens
ctttccttcttgctt

SEQ ID NO: 300563 - DNA, 15 bp, Homo sapiens
tctttccttcttgct

SEQ ID NO: 300564 - DNA, 15 bp, Homo sapiens
ttctttccttcttgc

SEQ ID NO: 300565 - DNA, 15 bp, Homo sapiens
tttctttccttcttg

SEQ ID NO: 300566 - DNA, 15 bp, Homo sapiens
ttttctttccttctt

SEQ ID NO: 300567 - DNA, 15 bp, Homo sapiens
tttttctttccttct

SEQ ID NO: 300568 - DNA, 15 bp, Homo sapiens
ttttttctttccttc

SEQ ID NO: 300569 - DNA, 15 bp, Homo sapiens
tttttttctttcctt

SEQ ID NO: 300570 - DNA, 15 bp, Homo sapiens
cctttttttttcttt

SEQ ID NO: 300571 - DNA, 15 bp, Homo sapiens
tcctttttttttctt

SEQ ID NO: 300572 - DNA, 15 bp, Homo sapiens
ttcctttttttttct

SEQ ID NO: 300573 - DNA, 15 bp, Homo sapiens
tttcctttttttttc

SEQ ID NO: 300574 - DNA, 15 bp, Homo sapiens
ttttccttttttttt

SEQ ID NO: 300575 - DNA, 15 bp, Homo sapiens
cttttcctttttttt

SEQ ID NO: 300576 - DNA, 15 bp, Homo sapiens
tcttttccttttttt

SEQ ID NO: 300577 - DNA, 15 bp, Homo sapiens
ttcttttcctttttt

SEQ ID NO: 300578 - DNA, 15 bp, Homo sapiens
tttcttttccttttt

SEQ ID NO: 300579 - DNA, 15 bp, Homo sapiens
atttcttttcctttt

SEQ ID NO: 300580 - DNA, 15 bp, Homo sapiens
catttcttttccttt

SEQ ID NO: 300581 - DNA, 15 bp, Homo sapiens
acatttcttttcctt

SEQ ID NO: 300582 - DNA, 15 bp, Homo sapiens
aacatttcttttcct

SEQ ID NO: 300583 - DNA, 15 bp, Homo sapiens
gaacatttcttttcc

SEQ ID NO: 300584 - DNA, 15 bp, Homo sapiens
ggaacatttcttttc

SEQ ID NO: 300585 - DNA, 15 bp, Homo sapiens
tggaacatttctttt

SEQ ID NO: 300586 - DNA, 15 bp, Homo sapiens
ctggaacatttcttt

SEQ ID NO: 300587 - DNA, 15 bp, Homo sapiens
cctggaacatttctt

SEQ ID NO: 300588 - DNA, 15 bp, Homo sapiens
tcctggaacatttct

SEQ ID NO: 300589 - DNA, 15 bp, Homo sapiens
ctcctggaacatttc

SEQ ID NO: 300590 - DNA, 15 bp, Homo sapiens
tctcctggaacattt

SEQ ID NO: 300591 - DNA, 15 bp, Homo sapiens
atctcctggaacatt

SEQ ID NO: 300592 - DNA, 15 bp, Homo sapiens
catctcctggaacat

SEQ ID NO: 300593 - DNA, 15 bp, Homo sapiens
tcatctcctggaaca

SEQ ID NO: 300594 - DNA, 15 bp, Homo sapiens
ctcatctcctggaac

SEQ ID NO: 300595 - DNA, 15 bp, Homo sapiens
tctcatctcctggaa

SEQ ID NO: 300596 - DNA, 15 bp, Homo sapiens
gtctcatctcctgga

SEQ ID NO: 300597 - DNA, 15 bp, Homo sapiens
tgtctcatctcctgg

SEQ ID NO: 300598 - DNA, 15 bp, Homo sapiens
atgtctcatctcctg

SEQ ID NO: 300599 - DNA, 15 bp, Homo sapiens
aatgtctcatctcct

SEQ ID NO: 300600 - DNA, 15 bp, Homo sapiens
taatgtctcatctcc

SEQ ID NO: 300601 - DNA, 15 bp, Homo sapiens
gtaatgtctcatctc

SEQ ID NO: 300602 - DNA, 15 bp, Homo sapiens
agtaatgtctcatct

SEQ ID NO: 300603 - DNA, 15 bp, Homo sapiens
aagtaatgtctcatc

SEQ ID NO: 300604 - DNA, 15 bp, Homo sapiens
aaagtaatgtctcat

SEQ ID NO: 300605 - DNA, 15 bp, Homo sapiens
gaaagtaatgtctca

SEQ ID NO: 300606 - DNA, 15 bp, Homo sapiens
tgaaagtaatgtctc

SEQ ID NO: 300607 - DNA, 15 bp, Homo sapiens
atgaaagtaatgtct

SEQ ID NO: 300608 - DNA, 15 bp, Homo sapiens
catgaaagtaatgtc

SEQ ID NO: 300609 - DNA, 15 bp, Homo sapiens
tcatgaaagtaatgt

SEQ ID NO: 300610 - DNA, 15 bp, Homo sapiens
ttcatgaaagtaatg

SEQ ID NO: 300611 - DNA, 15 bp, Homo sapiens
cttcatgaaagtaat

SEQ ID NO: 300612 - DNA, 15 bp, Homo sapiens
acttcatgaaagtaa

SEQ ID NO: 300613 - DNA, 15 bp, Homo sapiens
aacttcatgaaagta

SEQ ID NO: 300614 - DNA, 15 bp, Homo sapiens
caacttcatgaaagt

SEQ ID NO: 300615 - DNA, 15 bp, Homo sapiens
acaacttcatgaaag

SEQ ID NO: 300616 - DNA, 15 bp, Homo sapiens
gacaacttcatgaaa

SEQ ID NO: 300617 - DNA, 15 bp, Homo sapiens
tgacaacttcatgaa

SEQ ID NO: 300618 - DNA, 15 bp, Homo sapiens
ttgacaacttcatga

SEQ ID NO: 300619 - DNA, 15 bp, Homo sapiens
cttgacaacttcatg

SEQ ID NO: 300620 - DNA, 15 bp, Homo sapiens
tcttgacaacttcat

SEQ ID NO: 300621 - DNA, 15 bp, Homo sapiens
ttcttgacaacttca

SEQ ID NO: 300622 - DNA, 15 bp, Homo sapiens
cttcttgacaacttc

SEQ ID NO: 300623 - DNA, 15 bp, Homo sapiens
ccttcttgacaactt

SEQ ID NO: 300624 - DNA, 15 bp, Homo sapiens
tccttcttgacaact

SEQ ID NO: 300625 - DNA, 15 bp, Homo sapiens
ttccttcttgacaac

SEQ ID NO: 300626 - DNA, 15 bp, Homo sapiens
tttccttcttgacaa

SEQ ID NO: 300627 - DNA, 15 bp, Homo sapiens
atttccttcttgaca

SEQ ID NO: 300628 - DNA, 15 bp, Homo sapiens
catttccttcttgac

SEQ ID NO: 300629 - DNA, 15 bp, Homo sapiens
tcatttccttcttga

SEQ ID NO: 300630 - DNA, 15 bp, Homo sapiens
ttcatttccttcttg

SEQ ID NO: 300631 - DNA, 15 bp, Homo sapiens
tttcatttccttctt

SEQ ID NO: 300632 - DNA, 15 bp, Homo sapiens
ttttcatttccttct

SEQ ID NO: 300633 - DNA, 15 bp, Homo sapiens
cttttcatttccttc

SEQ ID NO: 300634 - DNA, 15 bp, Homo sapiens
acttttcatttcctt

SEQ ID NO: 300635 - DNA, 15 bp, Homo sapiens
cacttttcatttcct

SEQ ID NO: 300636 - DNA, 15 bp, Homo sapiens
acacttttcatttcc

SEQ ID NO: 300637 - DNA, 15 bp, Homo sapiens
cacacttttcatttc

SEQ ID NO: 300638 - DNA, 15 bp, Homo sapiens
gcacacttttcattt

SEQ ID NO: 300639 - DNA, 15 bp, Homo sapiens
tgcacacttttcatt

SEQ ID NO: 300640 - DNA, 15 bp, Homo sapiens
atgcacacttttcat

SEQ ID NO: 300641 - DNA, 15 bp, Homo sapiens
tatgcacacttttca

SEQ ID NO: 300642 - DNA, 15 bp, Homo sapiens
gtatgcacacttttc

SEQ ID NO: 300643 - DNA, 15 bp, Homo sapiens
agtatgcacactttt

SEQ ID NO: 300644 - DNA, 15 bp, Homo sapiens
aagtatgcacacttt

SEQ ID NO: 300645 - DNA, 15 bp, Homo sapiens
caagtatgcacactt

SEQ ID NO: 300646 - DNA, 15 bp, Homo sapiens
tcaagtatgcacact

SEQ ID NO: 300647 - DNA, 15 bp, Homo sapiens
ttcaagtatgcacac

SEQ ID NO: 300648 - DNA, 15 bp, Homo sapiens
cttcaagtatgcaca

SEQ ID NO: 300649 - DNA, 15 bp, Homo sapiens
tcttcaagtatgcac

SEQ ID NO: 300650 - DNA, 15 bp, Homo sapiens
atcttcaagtatgca

SEQ ID NO: 300651 - DNA, 15 bp, Homo sapiens
tatcttcaagtatgc

SEQ ID NO: 300652 - DNA, 15 bp, Homo sapiens
atatcttcaagtatg

SEQ ID NO: 300653 - DNA, 15 bp, Homo sapiens
catatcttcaagtat

SEQ ID NO: 300654 - DNA, 15 bp, Homo sapiens
tcatatcttcaagta

SEQ ID NO: 300655 - DNA, 15 bp, Homo sapiens
atcatatcttcaagt

SEQ ID NO: 300656 - DNA, 15 bp, Homo sapiens
aatcatatcttcaag

SEQ ID NO: 300657 - DNA, 15 bp, Homo sapiens
caatcatatcttcaa

SEQ ID NO: 300658 - DNA, 15 bp, Homo sapiens
acaatcatatcttca

SEQ ID NO: 300659 - DNA, 15 bp, Homo sapiens
tacaatcatatcttc

SEQ ID NO: 300660 - DNA, 15 bp, Homo sapiens
atacaatcatatctt

SEQ ID NO: 300661 - DNA, 15 bp, Homo sapiens
tatacaatcatatct

SEQ ID NO: 300662 - DNA, 15 bp, Homo sapiens
ttatacaatcatatc

SEQ ID NO: 300663 - DNA, 15 bp, Homo sapiens
attatacaatcatat

SEQ ID NO: 300664 - DNA, 15 bp, Homo sapiens
gattatacaatcata

SEQ ID NO: 300665 - DNA, 15 bp, Homo sapiens
tgattatacaatcat

SEQ ID NO: 300666 - DNA, 15 bp, Homo sapiens
atgattatacaatca

SEQ ID NO: 300667 - DNA, 15 bp, Homo sapiens
tatgattatacaatc

SEQ ID NO: 300668 - DNA, 15 bp, Homo sapiens
ctatgattatacaat

SEQ ID NO: 300669 - DNA, 15 bp, Homo sapiens
cctatgattatacaa

SEQ ID NO: 300670 - DNA, 15 bp, Homo sapiens
ccctatgattataca

SEQ ID NO: 300671 - DNA, 15 bp, Homo sapiens
cccctatgattatac

SEQ ID NO: 300672 - DNA, 15 bp, Homo sapiens
acccctatgattata

SEQ ID NO: 300673 - DNA, 15 bp, Homo sapiens
aacccctatgattat

SEQ ID NO: 300674 - DNA, 15 bp, Homo sapiens
taacccctatgatta

SEQ ID NO: 300675 - DNA, 15 bp, Homo sapiens
ttaacccctatgatt

SEQ ID NO: 300676 - DNA, 15 bp, Homo sapiens
attaacccctatgat

SEQ ID NO: 300677 - DNA, 15 bp, Homo sapiens
tattaacccctatga

SEQ ID NO: 300678 - DNA, 15 bp, Homo sapiens
ttattaacccctatg

SEQ ID NO: 300679 - DNA, 15 bp, Homo sapiens
cttattaacccctat

SEQ ID NO: 300680 - DNA, 15 bp, Homo sapiens
acttattaaccccta

SEQ ID NO: 300681 - DNA, 15 bp, Homo sapiens
gacttattaacccct

SEQ ID NO: 300682 - DNA, 15 bp, Homo sapiens
tgacttattaacccc

SEQ ID NO: 300683 - DNA, 15 bp, Homo sapiens
atgacttattaaccc

SEQ ID NO: 300684 - DNA, 15 bp, Homo sapiens
aatgacttattaacc

SEQ ID NO: 300685 - DNA, 15 bp, Homo sapiens
caatgacttattaac

SEQ ID NO: 300686 - DNA, 15 bp, Homo sapiens
gcaatgacttattaa

SEQ ID NO: 300687 - DNA, 15 bp, Homo sapiens
ggcaatgacttatta

SEQ ID NO: 300688 - DNA, 15 bp, Homo sapiens
tggcaatgacttatt

SEQ ID NO: 300689 - DNA, 15 bp, Homo sapiens
atggcaatgacttat

SEQ ID NO: 300690 - DNA, 15 bp, Homo sapiens
aatggcaatgactta

SEQ ID NO: 300691 - DNA, 15 bp, Homo sapiens
aaatggcaatgactt

SEQ ID NO: 300692 - DNA, 15 bp, Homo sapiens
aaaatggcaatgact

SEQ ID NO: 300693 - DNA, 15 bp, Homo sapiens
gaaaatggcaatgac

SEQ ID NO: 300694 - DNA, 15 bp, Homo sapiens
ggaaaatggcaatga

SEQ ID NO: 300695 - DNA, 15 bp, Homo sapiens
gggaaaatggcaatg

SEQ ID NO: 300696 - DNA, 15 bp, Homo sapiens
agggaaaatggcaat

SEQ ID NO: 300697 - DNA, 15 bp, Homo sapiens
tagggaaaatggcaa

SEQ ID NO: 300698 - DNA, 15 bp, Homo sapiens
atagggaaaatggca

SEQ ID NO: 300699 - DNA, 15 bp, Homo sapiens
aatagggaaaatggc

SEQ ID NO: 300700 - DNA, 15 bp, Homo sapiens
taatagggaaaatgg

SEQ ID NO: 300701 - DNA, 15 bp, Homo sapiens
ttaatagggaaaatg

SEQ ID NO: 300702 - DNA, 15 bp, Homo sapiens
attaatagggaaaat

SEQ ID NO: 300703 - DNA, 15 bp, Homo sapiens
cattaatagggaaaa

SEQ ID NO: 300704 - DNA, 15 bp, Homo sapiens
tcattaatagggaaa

SEQ ID NO: 300705 - DNA, 15 bp, Homo sapiens
atcattaatagggaa

SEQ ID NO: 300706 - DNA, 15 bp, Homo sapiens
catcattaataggga

SEQ ID NO: 300707 - DNA, 15 bp, Homo sapiens
tcatcattaataggg

SEQ ID NO: 300708 - DNA, 15 bp, Homo sapiens
gtcatcattaatagg

SEQ ID NO: 300709 - DNA, 15 bp, Homo sapiens
tgtcatcattaatag

SEQ ID NO: 300710 - DNA, 15 bp, Homo sapiens
ctgtcatcattaata

SEQ ID NO: 300711 - DNA, 15 bp, Homo sapiens
actgtcatcattaat

SEQ ID NO: 300712 - DNA, 15 bp, Homo sapiens
aactgtcatcattaa

SEQ ID NO: 300713 - DNA, 15 bp, Homo sapiens
aaactgtcatcatta

SEQ ID NO: 300714 - DNA, 15 bp, Homo sapiens
caaactgtcatcatt

SEQ ID NO: 300715 - DNA, 15 bp, Homo sapiens
acaaactgtcatcat

SEQ ID NO: 300716 - DNA, 15 bp, Homo sapiens
aacaaactgtcatca

SEQ ID NO: 300717 - DNA, 15 bp, Homo sapiens
aaacaaactgtcatc

SEQ ID NO: 300718 - DNA, 15 bp, Homo sapiens
aaaacaaactgtcat

SEQ ID NO: 300719 - DNA, 15 bp, Homo sapiens
taaaacaaactgtca

SEQ ID NO: 300720 - DNA, 15 bp, Homo sapiens
ttaaaacaaactgtc

SEQ ID NO: 300721 - DNA, 15 bp, Homo sapiens
tttaaaacaaactgt

SEQ ID NO: 300722 - DNA, 15 bp, Homo sapiens
ctttaaaacaaactg

SEQ ID NO: 300723 - DNA, 15 bp, Homo sapiens
cctttaaaacaaact

SEQ ID NO: 300724 - DNA, 15 bp, Homo sapiens
acctttaaaacaaac

SEQ ID NO: 300725 - DNA, 15 bp, Homo sapiens
tacctttaaaacaaa

SEQ ID NO: 300726 - DNA, 15 bp, Homo sapiens
ttacctttaaaacaa

SEQ ID NO: 300727 - DNA, 15 bp, Homo sapiens
gttacctttaaaaca

SEQ ID NO: 300728 - DNA, 15 bp, Homo sapiens
agttacctttaaaac

SEQ ID NO: 300729 - DNA, 15 bp, Homo sapiens
gagttacctttaaaa

SEQ ID NO: 300730 - DNA, 15 bp, Homo sapiens
tgagttacctttaaa

SEQ ID NO: 300731 - DNA, 15 bp, Homo sapiens
atgagttacctttaa

SEQ ID NO: 300732 - DNA, 15 bp, Homo sapiens
gatgagttaccttta

SEQ ID NO: 300733 - DNA, 15 bp, Homo sapiens
ggatgagttaccttt

SEQ ID NO: 300734 - DNA, 15 bp, Homo sapiens
aggatgagttacctt

SEQ ID NO: 300735 - DNA, 15 bp, Homo sapiens
caggatgagttacct

SEQ ID NO: 300736 - DNA, 15 bp, Homo sapiens
acaggatgagttacc

SEQ ID NO: 300737 - DNA, 15 bp, Homo sapiens
gacaggatgagttac

SEQ ID NO: 300738 - DNA, 15 bp, Homo sapiens
agacaggatgagtta

SEQ ID NO: 300739 - DNA, 15 bp, Homo sapiens
cagacaggatgagtt

SEQ ID NO: 300740 - DNA, 15 bp, Homo sapiens
tcagacaggatgagt

SEQ ID NO: 300741 - DNA, 15 bp, Homo sapiens
atcagacaggatgag

SEQ ID NO: 300742 - DNA, 15 bp, Homo sapiens
aatcagacaggatga

SEQ ID NO: 300743 - DNA, 15 bp, Homo sapiens
aaatcagacaggatg

SEQ ID NO: 300744 - DNA, 15 bp, Homo sapiens
aaaatcagacaggat

SEQ ID NO: 300745 - DNA, 15 bp, Homo sapiens
gaaaatcagacagga

SEQ ID NO: 300746 - DNA, 15 bp, Homo sapiens
ggaaaatcagacagg

SEQ ID NO: 300747 - DNA, 15 bp, Homo sapiens
tggaaaatcagacag

SEQ ID NO: 300748 - DNA, 15 bp, Homo sapiens
atggaaaatcagaca

SEQ ID NO: 300749 - DNA, 15 bp, Homo sapiens
catggaaaatcagac

SEQ ID NO: 300750 - DNA, 15 bp, Homo sapiens
ccatggaaaatcaga

SEQ ID NO: 300751 - DNA, 15 bp, Homo sapiens
accatggaaaatcag

SEQ ID NO: 300752 - DNA, 15 bp, Homo sapiens
caccatggaaaatca

SEQ ID NO: 300753 - DNA, 15 bp, Homo sapiens
ccaccatggaaaatc

SEQ ID NO: 300754 - DNA, 15 bp, Homo sapiens
accaccatggaaaat

SEQ ID NO: 300755 - DNA, 15 bp, Homo sapiens
caccaccatggaaaa

SEQ ID NO: 300756 - DNA, 15 bp, Homo sapiens
acaccaccatggaaa

SEQ ID NO: 300757 - DNA, 15 bp, Homo sapiens
aacaccaccatggaa

SEQ ID NO: 300758 - DNA, 15 bp, Homo sapiens
caacaccaccatgga

SEQ ID NO: 300759 - DNA, 15 bp, Homo sapiens
ccaacaccaccatgg

SEQ ID NO: 300760 - DNA, 15 bp, Homo sapiens
accaacaccaccatg

SEQ ID NO: 300761 - DNA, 15 bp, Homo sapiens
aaccaacaccaccat

SEQ ID NO: 300762 - DNA, 15 bp, Homo sapiens
aaaccaacaccacca

SEQ ID NO: 300763 - DNA, 15 bp, Homo sapiens
gaaaccaacaccacc

SEQ ID NO: 300764 - DNA, 15 bp, Homo sapiens
agaaaccaacaccac

SEQ ID NO: 300765 - DNA, 15 bp, Homo sapiens
tagaaaccaacacca

SEQ ID NO: 300766 - DNA, 15 bp, Homo sapiens
gtagaaaccaacacc

SEQ ID NO: 300767 - DNA, 15 bp, Homo sapiens
agtagaaaccaacac

SEQ ID NO: 300768 - DNA, 15 bp, Homo sapiens
cagtagaaaccaaca

SEQ ID NO: 300769 - DNA, 15 bp, Homo sapiens
gcagtagaaaccaac

SEQ ID NO: 300770 - DNA, 15 bp, Homo sapiens
ggcagtagaaaccaa

SEQ ID NO: 300771 - DNA, 15 bp, Homo sapiens
gggcagtagaaacca

SEQ ID NO: 300772 - DNA, 15 bp, Homo sapiens
tgggcagtagaaacc

SEQ ID NO: 300773 - DNA, 15 bp, Homo sapiens
ctgggcagtagaaac

SEQ ID NO: 300774 - DNA, 15 bp, Homo sapiens
cctgggcagtagaaa

SEQ ID NO: 300775 - DNA, 15 bp, Homo sapiens
acctgggcagtagaa

SEQ ID NO: 300776 - DNA, 15 bp, Homo sapiens
gacctgggcagtaga

SEQ ID NO: 300777 - DNA, 15 bp, Homo sapiens
ggacctgggcagtag

SEQ ID NO: 300778 - DNA, 15 bp, Homo sapiens
aggacctgggcagta

SEQ ID NO: 300779 - DNA, 15 bp, Homo sapiens
aaggacctgggcagt

SEQ ID NO: 300780 - DNA, 15 bp, Homo sapiens
aaaggacctgggcag

SEQ ID NO: 300781 - DNA, 15 bp, Homo sapiens
taaaggacctgggca

SEQ ID NO: 300782 - DNA, 15 bp, Homo sapiens
ataaaggacctgggc

SEQ ID NO: 300783 - DNA, 15 bp, Homo sapiens
cataaaggacctggg

SEQ ID NO: 300784 - DNA, 15 bp, Homo sapiens
tcataaaggacctgg

SEQ ID NO: 300785 - DNA, 15 bp, Homo sapiens
gtcataaaggacctg

SEQ ID NO: 300786 - DNA, 15 bp, Homo sapiens
tgtcataaaggacct

SEQ ID NO: 300787 - DNA, 15 bp, Homo sapiens
atgtcataaaggacc

SEQ ID NO: 300788 - DNA, 15 bp, Homo sapiens
aatgtcataaaggac

SEQ ID NO: 300789 - DNA, 15 bp, Homo sapiens
gaatgtcataaagga

SEQ ID NO: 300790 - DNA, 15 bp, Homo sapiens
ggaatgtcataaagg

SEQ ID NO: 300791 - DNA, 15 bp, Homo sapiens
aggaatgtcataaag

SEQ ID NO: 300792 - DNA, 15 bp, Homo sapiens
taggaatgtcataaa

SEQ ID NO: 300793 - DNA, 15 bp, Homo sapiens
ttaggaatgtcataa

SEQ ID NO: 300794 - DNA, 15 bp, Homo sapiens
cttaggaatgtcata

SEQ ID NO: 300795 - DNA, 15 bp, Homo sapiens
ccttaggaatgtcat

SEQ ID NO: 300796 - DNA, 15 bp, Homo sapiens
tccttaggaatgtca

SEQ ID NO: 300797 - DNA, 15 bp, Homo sapiens
ctccttaggaatgtc

SEQ ID NO: 300798 - DNA, 15 bp, Homo sapiens
actccttaggaatgt

SEQ ID NO: 300799 - DNA, 15 bp, Homo sapiens
cactccttaggaatg

SEQ ID NO: 300800 - DNA, 15 bp, Homo sapiens
tcactccttaggaat

SEQ ID NO: 300801 - DNA, 15 bp, Homo sapiens
gtcactccttaggaa

SEQ ID NO: 300802 - DNA, 15 bp, Homo sapiens
agtcactccttagga

SEQ ID NO: 300803 - DNA, 15 bp, Homo sapiens
gagtcactccttagg

SEQ ID NO: 300804 - DNA, 15 bp, Homo sapiens
agagtcactccttag

SEQ ID NO: 300805 - DNA, 15 bp, Homo sapiens
tagagtcactcctta

SEQ ID NO: 300806 - DNA, 15 bp, Homo sapiens
ctagagtcactcctt

SEQ ID NO: 300807 - DNA, 15 bp, Homo sapiens
gctagagtcactcct

SEQ ID NO: 300808 - DNA, 15 bp, Homo sapiens
ggctagagtcactcc

SEQ ID NO: 300809 - DNA, 15 bp, Homo sapiens
aggctagagtcactc

SEQ ID NO: 300810 - DNA, 15 bp, Homo sapiens
aaggctagagtcact

SEQ ID NO: 300811 - DNA, 15 bp, Homo sapiens
caaggctagagtcac

SEQ ID NO: 300812 - DNA, 15 bp, Homo sapiens
acaaggctagagtca

SEQ ID NO: 300813 - DNA, 15 bp, Homo sapiens
tacaaggctagagtc

SEQ ID NO: 300814 - DNA, 15 bp, Homo sapiens
gtacaaggctagagt

SEQ ID NO: 300815 - DNA, 15 bp, Homo sapiens
agtacaaggctagag

SEQ ID NO: 300816 - DNA, 15 bp, Homo sapiens
gagtacaaggctaga

SEQ ID NO: 300817 - DNA, 15 bp, Homo sapiens
tgagtacaaggctag

SEQ ID NO: 300818 - DNA, 15 bp, Homo sapiens
ctgagtacaaggcta

SEQ ID NO: 300819 - DNA, 15 bp, Homo sapiens
gctgagtacaaggct

SEQ ID NO: 300820 - DNA, 15 bp, Homo sapiens
tctgctgagtacaag

SEQ ID NO: 300821 - DNA, 15 bp, Homo sapiens
gtctgctgagtacaa

SEQ ID NO: 300822 - DNA, 15 bp, Homo sapiens
ggtctgctgagtaca

SEQ ID NO: 300823 - DNA, 15 bp, Homo sapiens
gggtctgctgagtac

SEQ ID NO: 300824 - DNA, 15 bp, Homo sapiens
tgggtctgctgagta

SEQ ID NO: 300825 - DNA, 15 bp, Homo sapiens
atgggtctgctgagt

SEQ ID NO: 300826 - DNA, 15 bp, Homo sapiens
catgggtctgctgag

SEQ ID NO: 300827 - DNA, 15 bp, Homo sapiens
tcatgggtctgctga

SEQ ID NO: 300828 - DNA, 15 bp, Homo sapiens
gtcatgggtctgctg

SEQ ID NO: 300829 - DNA, 15 bp, Homo sapiens
agtcatgggtctgct

SEQ ID NO: 300830 - DNA, 15 bp, Homo sapiens
aagtcatgggtctgc

SEQ ID NO: 300831 - DNA, 15 bp, Homo sapiens
gaagtcatgggtctg

SEQ ID NO: 300832 - DNA, 15 bp, Homo sapiens
agaagtcatgggtct

SEQ ID NO: 300833 - DNA, 15 bp, Homo sapiens
tagaagtcatgggtc

SEQ ID NO: 300834 - DNA, 15 bp, Homo sapiens
ttagaagtcatgggt

SEQ ID NO: 300835 - DNA, 15 bp, Homo sapiens
attagaagtcatggg

SEQ ID NO: 300836 - DNA, 15 bp, Homo sapiens
gattagaagtcatgg

SEQ ID NO: 300837 - DNA, 15 bp, Homo sapiens
tgattagaagtcatg

SEQ ID NO: 300838 - DNA, 15 bp, Homo sapiens
ctgattagaagtcat

SEQ ID NO: 300839 - DNA, 15 bp, Homo sapiens
gctgattagaagtca

SEQ ID NO: 300840 - DNA, 15 bp, Homo sapiens
tgctgattagaagtc

SEQ ID NO: 300841 - DNA, 15 bp, Homo sapiens
ctgctgattagaagt

SEQ ID NO: 300842 - DNA, 15 bp, Homo sapiens
gctgctgattagaag

SEQ ID NO: 300843 - DNA, 15 bp, Homo sapiens
tgctgctgattagaa

SEQ ID NO: 300844 - DNA, 15 bp, Homo sapiens
atgctgctgattaga

SEQ ID NO: 300845 - DNA, 15 bp, Homo sapiens
gatgctgctgattag

SEQ ID NO: 300846 - DNA, 15 bp, Homo sapiens
agatgctgctgatta

SEQ ID NO: 300847 - DNA, 15 bp, Homo sapiens
gagatgctgctgatt

SEQ ID NO: 300848 - DNA, 15 bp, Homo sapiens
tgagatgctgctgat

SEQ ID NO: 300849 - DNA, 15 bp, Homo sapiens
ctgagatgctgctga

SEQ ID NO: 300850 - DNA, 15 bp, Homo sapiens
tctgagatgctgctg

SEQ ID NO: 300851 - DNA, 15 bp, Homo sapiens
gtctgagatgctgct

SEQ ID NO: 300852 - DNA, 15 bp, Homo sapiens
tgtctgagatgctgc

SEQ ID NO: 300853 - DNA, 15 bp, Homo sapiens
gtgtctgagatgctg

SEQ ID NO: 300854 - DNA, 15 bp, Homo sapiens
agtgtctgagatgct

SEQ ID NO: 300855 - DNA, 15 bp, Homo sapiens
gagtgtctgagatgc

SEQ ID NO: 300856 - DNA, 15 bp, Homo sapiens
ggagtgtctgagatg

SEQ ID NO: 300857 - DNA, 15 bp, Homo sapiens
cggagtgtctgagat

SEQ ID NO: 300858 - DNA, 15 bp, Homo sapiens
acggagtgtctgaga

SEQ ID NO: 300859 - DNA, 15 bp, Homo sapiens
aacggagtgtctgag

SEQ ID NO: 300860 - DNA, 15 bp, Homo sapiens
aaacggagtgtctga

SEQ ID NO: 300861 - DNA, 15 bp, Homo sapiens
aaaacggagtgtctg

SEQ ID NO: 300862 - DNA, 15 bp, Homo sapiens
caaaacggagtgtct

SEQ ID NO: 300863 - DNA, 15 bp, Homo sapiens
ccaaaacggagtgtc

SEQ ID NO: 300864 - DNA, 15 bp, Homo sapiens
gccaaaacggagtgt

SEQ ID NO: 300865 - DNA, 15 bp, Homo sapiens
agccaaaacggagtg

SEQ ID NO: 300866 - DNA, 15 bp, Homo sapiens
cagccaaaacggagt

SEQ ID NO: 300867 - DNA, 15 bp, Homo sapiens
acagccaaaacggag

SEQ ID NO: 300868 - DNA, 15 bp, Homo sapiens
cacagccaaaacgga

SEQ ID NO: 300869 - DNA, 15 bp, Homo sapiens
tcacagccaaaacgg

SEQ ID NO: 300870 - DNA, 15 bp, Homo sapiens
ctcacagccaaaacg

SEQ ID NO: 300871 - DNA, 15 bp, Homo sapiens
cctcacagccaaaac

SEQ ID NO: 300872 - DNA, 15 bp, Homo sapiens
gcctcacagccaaaa

SEQ ID NO: 300873 - DNA, 15 bp, Homo sapiens
agcctcacagccaaa

SEQ ID NO: 300874 - DNA, 15 bp, Homo sapiens
cagcctcacagccaa

SEQ ID NO: 300875 - DNA, 15 bp, Homo sapiens
gcagcctcacagcca

SEQ ID NO: 300876 - DNA, 15 bp, Homo sapiens
agcagcctcacagcc

SEQ ID NO: 300877 - DNA, 15 bp, Homo sapiens
tagcagcctcacagc

SEQ ID NO: 300878 - DNA, 15 bp, Homo sapiens
ctagcagcctcacag

SEQ ID NO: 300879 - DNA, 15 bp, Homo sapiens
cctagcagcctcaca

SEQ ID NO: 300880 - DNA, 15 bp, Homo sapiens
gcctagcagcctcac

SEQ ID NO: 300881 - DNA, 15 bp, Homo sapiens
agcctagcagcctca

SEQ ID NO: 300882 - DNA, 15 bp, Homo sapiens
gagcctagcagcctc

SEQ ID NO: 300883 - DNA, 15 bp, Homo sapiens
agagcctagcagcct

SEQ ID NO: 300884 - DNA, 15 bp, Homo sapiens
gagagcctagcagcc

SEQ ID NO: 300885 - DNA, 15 bp, Homo sapiens
tgagagcctagcagc

SEQ ID NO: 300886 - DNA, 15 bp, Homo sapiens
ttgagagcctagcag

SEQ ID NO: 300887 - DNA, 15 bp, Homo sapiens
gttgagagcctagca

SEQ ID NO: 300888 - DNA, 15 bp, Homo sapiens
tgttgagagcctagc

SEQ ID NO: 300889 - DNA, 15 bp, Homo sapiens
ttgttgagagcctag

SEQ ID NO: 300890 - DNA, 15 bp, Homo sapiens
tttgttgagagccta

SEQ ID NO: 300891 - DNA, 15 bp, Homo sapiens
ttttgttgagagcct

SEQ ID NO: 300892 - DNA, 15 bp, Homo sapiens
gttttgttgagagcc

SEQ ID NO: 300893 - DNA, 15 bp, Homo sapiens
agttttgttgagagc

SEQ ID NO: 300894 - DNA, 15 bp, Homo sapiens
gagttttgttgagag

SEQ ID NO: 300895 - DNA, 15 bp, Homo sapiens
ggagttttgttgaga

SEQ ID NO: 300896 - DNA, 15 bp, Homo sapiens
aggagttttgttgag

SEQ ID NO: 300897 - DNA, 15 bp, Homo sapiens
taggagttttgttga

SEQ ID NO: 300898 - DNA, 15 bp, Homo sapiens
ttaggagttttgttg

SEQ ID NO: 300899 - DNA, 15 bp, Homo sapiens
tttaggagttttgtt

SEQ ID NO: 300900 - DNA, 15 bp, Homo sapiens
atttaggagttttgt

SEQ ID NO: 300901 - DNA, 15 bp, Homo sapiens
tatttaggagttttg

SEQ ID NO: 300902 - DNA, 15 bp, Homo sapiens
ctatttaggagtttt

SEQ ID NO: 300903 - DNA, 15 bp, Homo sapiens
cctatttaggagttt

SEQ ID NO: 300904 - DNA, 15 bp, Homo sapiens
tcctatttaggagtt

SEQ ID NO: 300905 - DNA, 15 bp, Homo sapiens
ttcctatttaggagt

SEQ ID NO: 300906 - DNA, 15 bp, Homo sapiens
tttcctatttaggag

SEQ ID NO: 300907 - DNA, 15 bp, Homo sapiens
ttttcctatttagga

SEQ ID NO: 300908 - DNA, 15 bp, Homo sapiens
gttttcctatttagg

SEQ ID NO: 300909 - DNA, 15 bp, Homo sapiens
agttttcctatttag

SEQ ID NO: 300910 - DNA, 15 bp, Homo sapiens
aagttttcctattta

SEQ ID NO: 300911 - DNA, 15 bp, Homo sapiens
taagttttcctattt

SEQ ID NO: 300912 - DNA, 15 bp, Homo sapiens
gtaagttttcctatt

SEQ ID NO: 300913 - DNA, 15 bp, Homo sapiens
tgtaagttttcctat

SEQ ID NO: 300914 - DNA, 15 bp, Homo sapiens
ttgtaagttttccta

SEQ ID NO: 300915 - DNA, 15 bp, Homo sapiens
tttgtaagttttcct

SEQ ID NO: 300916 - DNA, 15 bp, Homo sapiens
ttttgtaagttttcc

SEQ ID NO: 300917 - DNA, 15 bp, Homo sapiens
gttttgtaagttttc

SEQ ID NO: 300918 - DNA, 15 bp, Homo sapiens
agttttgtaagtttt

SEQ ID NO: 300919 - DNA, 15 bp, Homo sapiens
aagttttgtaagttt

SEQ ID NO: 300920 - DNA, 15 bp, Homo sapiens
gaagttttgtaagtt

SEQ ID NO: 300921 - DNA, 15 bp, Homo sapiens
ggaagttttgtaagt

SEQ ID NO: 300922 - DNA, 15 bp, Homo sapiens
tggaagttttgtaag

SEQ ID NO: 300923 - DNA, 15 bp, Homo sapiens
ctggaagttttgtaa

SEQ ID NO: 300924 - DNA, 15 bp, Homo sapiens
cctggaagttttgta

SEQ ID NO: 300925 - DNA, 15 bp, Homo sapiens
gcctggaagttttgt

SEQ ID NO: 300926 - DNA, 15 bp, Homo sapiens
ggcctggaagttttg

SEQ ID NO: 300927 - DNA, 15 bp, Homo sapiens
aggcctggaagtttt

SEQ ID NO: 300928 - DNA, 15 bp, Homo sapiens
aaggcctggaagttt

SEQ ID NO: 300929 - DNA, 15 bp, Homo sapiens
taaggcctggaagtt

SEQ ID NO: 300930 - DNA, 15 bp, Homo sapiens
ctaaggcctggaagt

SEQ ID NO: 300931 - DNA, 15 bp, Homo sapiens
gctaaggcctggaag

SEQ ID NO: 300932 - DNA, 15 bp, Homo sapiens
agctaaggcctggaa

SEQ ID NO: 300933 - DNA, 15 bp, Homo sapiens
cagctaaggcctgga

SEQ ID NO: 300934 - DNA, 15 bp, Homo sapiens
acagctaaggcctgg

SEQ ID NO: 300935 - DNA, 15 bp, Homo sapiens
gacagctaaggcctg

SEQ ID NO: 300936 - DNA, 15 bp, Homo sapiens
tgacagctaaggcct

SEQ ID NO: 300937 - DNA, 15 bp, Homo sapiens
ctgacagctaaggcc

SEQ ID NO: 300938 - DNA, 15 bp, Homo sapiens
gctgacagctaaggc

SEQ ID NO: 300939 - DNA, 15 bp, Homo sapiens
ggctgacagctaagg

SEQ ID NO: 300940 - DNA, 15 bp, Homo sapiens
tggctgacagctaag

SEQ ID NO: 300941 - DNA, 15 bp, Homo sapiens
ttggctgacagctaa

SEQ ID NO: 300942 - DNA, 15 bp, Homo sapiens
tttggctgacagcta

SEQ ID NO: 300943 - DNA, 15 bp, Homo sapiens
ctttggctgacagct

SEQ ID NO: 300944 - DNA, 15 bp, Homo sapiens
tctttggctgacagc

SEQ ID NO: 300945 - DNA, 15 bp, Homo sapiens
gtctttggctgacag

SEQ ID NO: 300946 - DNA, 15 bp, Homo sapiens
cgtctttggctgaca

SEQ ID NO: 300947 - DNA, 15 bp, Homo sapiens
ccgtctttggctgac

SEQ ID NO: 300948 - DNA, 15 bp, Homo sapiens
tccgtctttggctga

SEQ ID NO: 300949 - DNA, 15 bp, Homo sapiens
ctccgtctttggctg

SEQ ID NO: 300950 - DNA, 15 bp, Homo sapiens
gctccgtctttggct

SEQ ID NO: 300951 - DNA, 15 bp, Homo sapiens
agctccgtctttggc

SEQ ID NO: 300952 - DNA, 15 bp, Homo sapiens
tagctccgtctttgg

SEQ ID NO: 300953 - DNA, 15 bp, Homo sapiens
ttagctccgtctttg

SEQ ID NO: 300954 - DNA, 15 bp, Homo sapiens
cttagctccgtcttt

SEQ ID NO: 300955 - DNA, 15 bp, Homo sapiens
tcttagctccgtctt

SEQ ID NO: 300956 - DNA, 15 bp, Homo sapiens
gtcttagctccgtct

SEQ ID NO: 300957 - DNA, 15 bp, Homo sapiens
tgtcttagctccgtc

SEQ ID NO: 300958 - DNA, 15 bp, Homo sapiens
gtgtcttagctccgt

SEQ ID NO: 300959 - DNA, 15 bp, Homo sapiens
tgtgtcttagctccg

SEQ ID NO: 300960 - DNA, 15 bp, Homo sapiens
ctgtgtcttagctcc

SEQ ID NO: 300961 - DNA, 15 bp, Homo sapiens
gctgtgtcttagctc

SEQ ID NO: 300962 - DNA, 15 bp, Homo sapiens
agctgtgtcttagct

SEQ ID NO: 300963 - DNA, 15 bp, Homo sapiens
tagctgtgtcttagc

SEQ ID NO: 300964 - DNA, 15 bp, Homo sapiens
atagctgtgtcttag

SEQ ID NO: 300965 - DNA, 15 bp, Homo sapiens
aatagctgtgtctta

SEQ ID NO: 300966 - DNA, 15 bp, Homo sapiens
aaatagctgtgtctt

SEQ ID NO: 300967 - DNA, 15 bp, Homo sapiens
aaaatagctgtgtct

SEQ ID NO: 300968 - DNA, 15 bp, Homo sapiens
taaaatagctgtgtc

SEQ ID NO: 300969 - DNA, 15 bp, Homo sapiens
ataaaatagctgtgt

SEQ ID NO: 300970 - DNA, 15 bp, Homo sapiens
aataaaatagctgtg

SEQ ID NO: 300971 - DNA, 15 bp, Homo sapiens
aaataaaatagctgt

SEQ ID NO: 300972 - DNA, 15 bp, Homo sapiens
gaaataaaatagctg

SEQ ID NO: 300973 - DNA, 15 bp, Homo sapiens
ggaaataaaatagct

SEQ ID NO: 300974 - DNA, 15 bp, Homo sapiens
aggaaataaaatagc

SEQ ID NO: 300975 - DNA, 15 bp, Homo sapiens
aaggaaataaaatag

SEQ ID NO: 300976 - DNA, 15 bp, Homo sapiens
caaggaaataaaata

SEQ ID NO: 300977 - DNA, 15 bp, Homo sapiens
acaaggaaataaaat

SEQ ID NO: 300978 - DNA, 15 bp, Homo sapiens
cacaaggaaataaaa

SEQ ID NO: 300979 - DNA, 15 bp, Homo sapiens
gcacaaggaaataaa

SEQ ID NO: 300980 - DNA, 15 bp, Homo sapiens
tgcacaaggaaataa

SEQ ID NO: 300981 - DNA, 15 bp, Homo sapiens
ttgcacaaggaaata

SEQ ID NO: 300982 - DNA, 15 bp, Homo sapiens
attgcacaaggaaat

SEQ ID NO: 300983 - DNA, 15 bp, Homo sapiens
tattgcacaaggaaa

SEQ ID NO: 300984 - DNA, 15 bp, Homo sapiens
ttattgcacaaggaa

SEQ ID NO: 300985 - DNA, 15 bp, Homo sapiens
tttattgcacaagga

SEQ ID NO: 300986 - DNA, 15 bp, Homo sapiens
ctttattgcacaagg

SEQ ID NO: 300987 - DNA, 15 bp, Homo sapiens
cctttattgcacaag

SEQ ID NO: 300988 - DNA, 15 bp, Homo sapiens
acctttattgcacaa

SEQ ID NO: 300989 - DNA, 15 bp, Homo sapiens
tacctttattgcaca

SEQ ID NO: 300990 - DNA, 15 bp, Homo sapiens
atacctttattgcac

SEQ ID NO: 300991 - DNA, 15 bp, Homo sapiens
tatacctttattgca

SEQ ID NO: 300992 - DNA, 15 bp, Homo sapiens
ttatacctttattgc

SEQ ID NO: 300993 - DNA, 15 bp, Homo sapiens
attatacctttattg

SEQ ID NO: 300994 - DNA, 15 bp, Homo sapiens
aattatacctttatt

SEQ ID NO: 300995 - DNA, 15 bp, Homo sapiens
caattatacctttat

SEQ ID NO: 300996 - DNA, 15 bp, Homo sapiens
acaattataccttta

SEQ ID NO: 300997 - DNA, 15 bp, Homo sapiens
gacaattataccttt

SEQ ID NO: 300998 - DNA, 15 bp, Homo sapiens
agacaattatacctt

SEQ ID NO: 300999 - DNA, 15 bp, Homo sapiens
aagacaattatacct

SEQ ID NO: 301000 - DNA, 15 bp, Homo sapiens
gaagacaattatacc

SEQ ID NO: 301001 - DNA, 15 bp, Homo sapiens
agaagacaattatac

SEQ ID NO: 301002 - DNA, 15 bp, Homo sapiens
tagaagacaattata

SEQ ID NO: 301003 - DNA, 15 bp, Homo sapiens
atagaagacaattat

SEQ ID NO: 301004 - DNA, 15 bp, Homo sapiens
catagaagacaatta

SEQ ID NO: 301005 - DNA, 15 bp, Homo sapiens
gcatagaagacaatt

SEQ ID NO: 301006 - DNA, 15 bp, Homo sapiens
ggcatagaagacaat

SEQ ID NO: 301007 - DNA, 15 bp, Homo sapiens
tggcatagaagacaa

SEQ ID NO: 301008 - DNA, 15 bp, Homo sapiens
ctggcatagaagaca

SEQ ID NO: 301009 - DNA, 15 bp, Homo sapiens
tctggcatagaagac

SEQ ID NO: 301010 - DNA, 15 bp, Homo sapiens
atctggcatagaaga

SEQ ID NO: 301011 - DNA, 15 bp, Homo sapiens
catctggcatagaag

SEQ ID NO: 301012 - DNA, 15 bp, Homo sapiens
acatctggcatagaa

SEQ ID NO: 301013 - DNA, 15 bp, Homo sapiens
gacatctggcataga

SEQ ID NO: 301014 - DNA, 15 bp, Homo sapiens
tgacatctggcatag

SEQ ID NO: 301015 - DNA, 15 bp, Homo sapiens
ctgacatctggcata

SEQ ID NO: 301016 - DNA, 15 bp, Homo sapiens
tctgacatctggcat

SEQ ID NO: 301017 - DNA, 15 bp, Homo sapiens
ttctgacatctggca

SEQ ID NO: 301018 - DNA, 15 bp, Homo sapiens
tttctgacatctggc

SEQ ID NO: 301019 - DNA, 15 bp, Homo sapiens
ctttctgacatctgg

SEQ ID NO: 301020 - DNA, 15 bp, Homo sapiens
tctttctgacatctg

SEQ ID NO: 301021 - DNA, 15 bp, Homo sapiens
gtctttctgacatct

SEQ ID NO: 301022 - DNA, 15 bp, Homo sapiens
agtctttctgacatc

SEQ ID NO: 301023 - DNA, 15 bp, Homo sapiens
aagtctttctgacat

SEQ ID NO: 301024 - DNA, 15 bp, Homo sapiens
gaagtctttctgaca

SEQ ID NO: 301025 - DNA, 15 bp, Homo sapiens
agaagtctttctgac

SEQ ID NO: 301026 - DNA, 15 bp, Homo sapiens
tagaagtctttctga

SEQ ID NO: 301027 - DNA, 15 bp, Homo sapiens
gtagaagtctttctg

SEQ ID NO: 301028 - DNA, 15 bp, Homo sapiens
ggtagaagtctttct

SEQ ID NO: 301029 - DNA, 15 bp, Homo sapiens
tggtagaagtctttc

SEQ ID NO: 301030 - DNA, 15 bp, Homo sapiens
ctggtagaagtcttt

SEQ ID NO: 301031 - DNA, 15 bp, Homo sapiens
cctggtagaagtctt

SEQ ID NO: 301032 - DNA, 15 bp, Homo sapiens
acctggtagaagtct

SEQ ID NO: 301033 - DNA, 15 bp, Homo sapiens
gacctggtagaagtc

SEQ ID NO: 301034 - DNA, 15 bp, Homo sapiens
agacctggtagaagt

SEQ ID NO: 301035 - DNA, 15 bp, Homo sapiens
aagacctggtagaag

SEQ ID NO: 301036 - DNA, 15 bp, Homo sapiens
gaaagacctggtaga

SEQ ID NO: 301037 - DNA, 15 bp, Homo sapiens
agaaagacctggtag

SEQ ID NO: 301038 - DNA, 15 bp, Homo sapiens
gagaaagacctggta

SEQ ID NO: 301039 - DNA, 15 bp, Homo sapiens
agagaaagacctggt

SEQ ID NO: 301040 - DNA, 15 bp, Homo sapiens
cagagaaagacctgg

SEQ ID NO: 301041 - DNA, 15 bp, Homo sapiens
acagagaaagacctg

SEQ ID NO: 301042 - DNA, 15 bp, Homo sapiens
cacagagaaagacct

SEQ ID NO: 301043 - DNA, 15 bp, Homo sapiens
acacagagaaagacc

SEQ ID NO: 301044 - DNA, 15 bp, Homo sapiens
cacacagagaaagac

SEQ ID NO: 301045 - DNA, 15 bp, Homo sapiens
acacacagagaaaga

SEQ ID NO: 301046 - DNA, 15 bp, Homo sapiens
aacacacagagaaag

SEQ ID NO: 301047 - DNA, 15 bp, Homo sapiens
gaacacacagagaaa

SEQ ID NO: 301048 - DNA, 15 bp, Homo sapiens
agaacacacagagaa

SEQ ID NO: 301049 - DNA, 15 bp, Homo sapiens
aagaacacacagaga

SEQ ID NO: 301050 - DNA, 15 bp, Homo sapiens
taagaacacacagag

SEQ ID NO: 301051 - DNA, 15 bp, Homo sapiens
ttaagaacacacaga

SEQ ID NO: 301052 - DNA, 15 bp, Homo sapiens
tttaagaacacacag

SEQ ID NO: 301053 - DNA, 15 bp, Homo sapiens
ttttaagaacacaca

SEQ ID NO: 301054 - DNA, 15 bp, Homo sapiens
tttttaagaacacac

SEQ ID NO: 301055 - DNA, 15 bp, Homo sapiens
ttttttaagaacaca

SEQ ID NO: 301056 - DNA, 15 bp, Homo sapiens
tttttttaagaacac

SEQ ID NO: 301057 - DNA, 15 bp, Homo sapiens
ttttttttaagaaca

SEQ ID NO: 301058 - DNA, 15 bp, Homo sapiens
attttttttaagaac

SEQ ID NO: 301059 - DNA, 15 bp, Homo sapiens
gattttttttaagaa

SEQ ID NO: 301060 - DNA, 15 bp, Homo sapiens
ggattttttttaaga

SEQ ID NO: 301061 - DNA, 15 bp, Homo sapiens
aggattttttttaag

SEQ ID NO: 301062 - DNA, 15 bp, Homo sapiens
gaggattttttttaa

SEQ ID NO: 301063 - DNA, 15 bp, Homo sapiens
tgaggatttttttta

SEQ ID NO: 301064 - DNA, 15 bp, Homo sapiens
ttgaggatttttttt

SEQ ID NO: 301065 - DNA, 15 bp, Homo sapiens
gttgaggattttttt

SEQ ID NO: 301066 - DNA, 15 bp, Homo sapiens
tgttgaggatttttt

SEQ ID NO: 301067 - DNA, 15 bp, Homo sapiens
ttgttgaggattttt

SEQ ID NO: 301068 - DNA, 15 bp, Homo sapiens
gttgttgaggatttt

SEQ ID NO: 301069 - DNA, 15 bp, Homo sapiens
tgttgttgaggattt

SEQ ID NO: 301070 - DNA, 15 bp, Homo sapiens
ttgttgttgaggatt

SEQ ID NO: 301071 - DNA, 15 bp, Homo sapiens
gttgttgttgaggat

SEQ ID NO: 301072 - DNA, 15 bp, Homo sapiens
tgttgttgttgagga

SEQ ID NO: 301073 - DNA, 15 bp, Homo sapiens
ttgttgttgttgagg

SEQ ID NO: 301074 - DNA, 15 bp, Homo sapiens
gttgttgttgttgag

SEQ ID NO: 301075 - DNA, 15 bp, Homo sapiens
tgttgttgttgttga

SEQ ID NO: 301076 - DNA, 15 bp, Homo sapiens
agttttgttgttgtt

SEQ ID NO: 301077 - DNA, 15 bp, Homo sapiens
aagttttgttgttgt

SEQ ID NO: 301078 - DNA, 15 bp, Homo sapiens
gaagttttgttgttg

SEQ ID NO: 301079 - DNA, 15 bp, Homo sapiens
tgaagttttgttgtt

SEQ ID NO: 301080 - DNA, 15 bp, Homo sapiens
ttgaagttttgttgt

SEQ ID NO: 301081 - DNA, 15 bp, Homo sapiens
cttgaagttttgttg

SEQ ID NO: 301082 - DNA, 15 bp, Homo sapiens
tcttgaagttttgtt

SEQ ID NO: 301083 - DNA, 15 bp, Homo sapiens
atcttgaagttttgt

SEQ ID NO: 301084 - DNA, 15 bp, Homo sapiens
catcttgaagttttg

SEQ ID NO: 301085 - DNA, 15 bp, Homo sapiens
acatcttgaagtttt

SEQ ID NO: 301086 - DNA, 15 bp, Homo sapiens
aacatcttgaagttt

SEQ ID NO: 301087 - DNA, 15 bp, Homo sapiens
taacatcttgaagtt

SEQ ID NO: 301088 - DNA, 15 bp, Homo sapiens
ctaacatcttgaagt

SEQ ID NO: 301089 - DNA, 15 bp, Homo sapiens
tctaacatcttgaag

SEQ ID NO: 301090 - DNA, 15 bp, Homo sapiens
ttctaacatcttgaa

SEQ ID NO: 301091 - DNA, 15 bp, Homo sapiens
tttctaacatcttga

SEQ ID NO: 301092 - DNA, 15 bp, Homo sapiens
atttctaacatcttg

SEQ ID NO: 301093 - DNA, 15 bp, Homo sapiens
tatttctaacatctt

SEQ ID NO: 301094 - DNA, 15 bp, Homo sapiens
ctatttctaacatct

SEQ ID NO: 301095 - DNA, 15 bp, Homo sapiens
tctatttctaacatc

SEQ ID NO: 301096 - DNA, 15 bp, Homo sapiens
atctatttctaacat

SEQ ID NO: 301097 - DNA, 15 bp, Homo sapiens
tatctatttctaaca

SEQ ID NO: 301098 - DNA, 15 bp, Homo sapiens
atatctatttctaac

SEQ ID NO: 301099 - DNA, 15 bp, Homo sapiens
tatatctatttctaa

SEQ ID NO: 301100 - DNA, 15 bp, Homo sapiens
ttatatctatttcta

SEQ ID NO: 301101 - DNA, 15 bp, Homo sapiens
cttatatctatttct

SEQ ID NO: 301102 - DNA, 15 bp, Homo sapiens
gcttatatctatttc

SEQ ID NO: 301103 - DNA, 15 bp, Homo sapiens
ggcttatatctattt

SEQ ID NO: 301104 - DNA, 15 bp, Homo sapiens
tggcttatatctatt

SEQ ID NO: 301105 - DNA, 15 bp, Homo sapiens
atggcttatatctat

SEQ ID NO: 301106 - DNA, 15 bp, Homo sapiens
aatggcttatatcta

SEQ ID NO: 301107 - DNA, 15 bp, Homo sapiens
taatggcttatatct

SEQ ID NO: 301108 - DNA, 15 bp, Homo sapiens
ataatggcttatatc

SEQ ID NO: 301109 - DNA, 15 bp, Homo sapiens
tataatggcttatat

SEQ ID NO: 301110 - DNA, 15 bp, Homo sapiens
ttataatggcttata

SEQ ID NO: 301111 - DNA, 15 bp, Homo sapiens
attataatggcttat

SEQ ID NO: 301112 - DNA, 15 bp, Homo sapiens
aattataatggctta

SEQ ID NO: 301113 - DNA, 15 bp, Homo sapiens
taattataatggctt

SEQ ID NO: 301114 - DNA, 15 bp, Homo sapiens
ataattataatggct

SEQ ID NO: 301115 - DNA, 15 bp, Homo sapiens
gataattataatggc

SEQ ID NO: 301116 - DNA, 15 bp, Homo sapiens
ggataattataatgg

SEQ ID NO: 301117 - DNA, 15 bp, Homo sapiens
aggataattataatg

SEQ ID NO: 301118 - DNA, 15 bp, Homo sapiens
aaggataattataat

SEQ ID NO: 301119 - DNA, 15 bp, Homo sapiens
gaaggataattataa

SEQ ID NO: 301120 - DNA, 15 bp, Homo sapiens
tgaaggataattata

SEQ ID NO: 301121 - DNA, 15 bp, Homo sapiens
ctgaaggataattat

SEQ ID NO: 301122 - DNA, 15 bp, Homo sapiens
gctgaaggataatta

SEQ ID NO: 301123 - DNA, 15 bp, Homo sapiens
tgctgaaggataatt

SEQ ID NO: 301124 - DNA, 15 bp, Homo sapiens
atgctgaaggataat

SEQ ID NO: 301125 - DNA, 15 bp, Homo sapiens
gatgctgaaggataa

SEQ ID NO: 301126 - DNA, 15 bp, Homo sapiens
tgatgctgaaggata

SEQ ID NO: 301127 - DNA, 15 bp, Homo sapiens
gtgatgctgaaggat

SEQ ID NO: 301128 - DNA, 15 bp, Homo sapiens
tgtgatgctgaagga

SEQ ID NO: 301129 - DNA, 15 bp, Homo sapiens
atgtgatgctgaagg

SEQ ID NO: 301130 - DNA, 15 bp, Homo sapiens
tatgtgatgctgaag

SEQ ID NO: 301131 - DNA, 15 bp, Homo sapiens
atatgtgatgctgaa

SEQ ID NO: 301132 - DNA, 15 bp, Homo sapiens
tatatgtgatgctga

SEQ ID NO: 301133 - DNA, 15 bp, Homo sapiens
ttatatgtgatgctg

SEQ ID NO: 301134 - DNA, 15 bp, Homo sapiens
tttatatgtgatgct

SEQ ID NO: 301135 - DNA, 15 bp, Homo sapiens
atttatatgtgatgc

SEQ ID NO: 301136 - DNA, 15 bp, Homo sapiens
aatttatatgtgatg

SEQ ID NO: 301137 - DNA, 15 bp, Homo sapiens
gaatttatatgtgat

SEQ ID NO: 301138 - DNA, 15 bp, Homo sapiens
tgaatttatatgtga

SEQ ID NO: 301139 - DNA, 15 bp, Homo sapiens
atgaatttatatgtg

SEQ ID NO: 301140 - DNA, 15 bp, Homo sapiens
catgaatttatatgt

SEQ ID NO: 301141 - DNA, 15 bp, Homo sapiens
acatgaatttatatg

SEQ ID NO: 301142 - DNA, 15 bp, Homo sapiens
cacatgaatttatat

SEQ ID NO: 301143 - DNA, 15 bp, Homo sapiens
acacatgaatttata

SEQ ID NO: 301144 - DNA, 15 bp, Homo sapiens
tacacatgaatttat

SEQ ID NO: 301145 - DNA, 15 bp, Homo sapiens
ttacacatgaattta

SEQ ID NO: 301146 - DNA, 15 bp, Homo sapiens
gttacacatgaattt

SEQ ID NO: 301147 - DNA, 15 bp, Homo sapiens
agttacacatgaatt

SEQ ID NO: 301148 - DNA, 15 bp, Homo sapiens
aagttacacatgaat

SEQ ID NO: 301149 - DNA, 15 bp, Homo sapiens
aaagttacacatgaa

SEQ ID NO: 301150 - DNA, 15 bp, Homo sapiens
taaagttacacatga

SEQ ID NO: 301151 - DNA, 15 bp, Homo sapiens
ttaaagttacacatg

SEQ ID NO: 301152 - DNA, 15 bp, Homo sapiens
tttaaagttacacat

SEQ ID NO: 301153 - DNA, 15 bp, Homo sapiens
gtttaaagttacaca

SEQ ID NO: 301154 - DNA, 15 bp, Homo sapiens
tgtttaaagttacac

SEQ ID NO: 301155 - DNA, 15 bp, Homo sapiens
ttgtttaaagttaca

SEQ ID NO: 301156 - DNA, 15 bp, Homo sapiens
cttgtttaaagttac

SEQ ID NO: 301157 - DNA, 15 bp, Homo sapiens
gcttgtttaaagtta

SEQ ID NO: 301158 - DNA, 15 bp, Homo sapiens
agcttgtttaaagtt

SEQ ID NO: 301159 - DNA, 15 bp, Homo sapiens
cagcttgtttaaagt

SEQ ID NO: 301160 - DNA, 15 bp, Homo sapiens
ccagcttgtttaaag

SEQ ID NO: 301161 - DNA, 15 bp, Homo sapiens
accagcttgtttaaa

SEQ ID NO: 301162 - DNA, 15 bp, Homo sapiens
caccagcttgtttaa

SEQ ID NO: 301163 - DNA, 15 bp, Homo sapiens
acaccagcttgttta

SEQ ID NO: 301164 - DNA, 15 bp, Homo sapiens
gacaccagcttgttt

SEQ ID NO: 301165 - DNA, 15 bp, Homo sapiens
ggacaccagcttgtt

SEQ ID NO: 301166 - DNA, 15 bp, Homo sapiens
aggacaccagcttgt

SEQ ID NO: 301167 - DNA, 15 bp, Homo sapiens
aaggacaccagcttg

SEQ ID NO: 301168 - DNA, 15 bp, Homo sapiens
caaggacaccagctt

SEQ ID NO: 301169 - DNA, 15 bp, Homo sapiens
acaaggacaccagct

SEQ ID NO: 301170 - DNA, 15 bp, Homo sapiens
cacaaggacaccagc

SEQ ID NO: 301171 - DNA, 15 bp, Homo sapiens
ccacaaggacaccag

SEQ ID NO: 301172 - DNA, 15 bp, Homo sapiens
accacaaggacacca

SEQ ID NO: 301173 - DNA, 15 bp, Homo sapiens
caccacaaggacacc

SEQ ID NO: 301174 - DNA, 15 bp, Homo sapiens
tcaccacaaggacac

SEQ ID NO: 301175 - DNA, 15 bp, Homo sapiens
gtcaccacaaggaca

SEQ ID NO: 301176 - DNA, 15 bp, Homo sapiens
agtcaccacaaggac

SEQ ID NO: 301177 - DNA, 15 bp, Homo sapiens
tagtcaccacaagga

SEQ ID NO: 301178 - DNA, 15 bp, Homo sapiens
atagtcaccacaagg

SEQ ID NO: 301179 - DNA, 15 bp, Homo sapiens
gatagtcaccacaag

SEQ ID NO: 301180 - DNA, 15 bp, Homo sapiens
agatagtcaccacaa

SEQ ID NO: 301181 - DNA, 15 bp, Homo sapiens
tagatagtcaccaca

SEQ ID NO: 301182 - DNA, 15 bp, Homo sapiens
atagatagtcaccac

SEQ ID NO: 301183 - DNA, 15 bp, Homo sapiens
catagatagtcacca

SEQ ID NO: 301184 - DNA, 15 bp, Homo sapiens
acatagatagtcacc

SEQ ID NO: 301185 - DNA, 15 bp, Homo sapiens
aacatagatagtcac

SEQ ID NO: 301186 - DNA, 15 bp, Homo sapiens
taacatagatagtca

SEQ ID NO: 301187 - DNA, 15 bp, Homo sapiens
ataacatagatagtc

SEQ ID NO: 301188 - DNA, 15 bp, Homo sapiens
cataacatagatagt

SEQ ID NO: 301189 - DNA, 15 bp, Homo sapiens
acataacatagatag

SEQ ID NO: 301190 - DNA, 15 bp, Homo sapiens
cacataacatagata

SEQ ID NO: 301191 - DNA, 15 bp, Homo sapiens
tcacataacatagat

SEQ ID NO: 301192 - DNA, 15 bp, Homo sapiens
gtcacataacataga

SEQ ID NO: 301193 - DNA, 15 bp, Homo sapiens
tgtcacataacatag

SEQ ID NO: 301194 - DNA, 15 bp, Homo sapiens
atgtcacataacata

SEQ ID NO: 301195 - DNA, 15 bp, Homo sapiens
aatgtcacataacat

SEQ ID NO: 301196 - DNA, 15 bp, Homo sapiens
caatgtcacataaca

SEQ ID NO: 301197 - DNA, 15 bp, Homo sapiens
acaatgtcacataac

SEQ ID NO: 301198 - DNA, 15 bp, Homo sapiens
aacaatgtcacataa

SEQ ID NO: 301199 - DNA, 15 bp, Homo sapiens
aaacaatgtcacata

SEQ ID NO: 301200 - DNA, 15 bp, Homo sapiens
aaaacaatgtcacat

SEQ ID NO: 301201 - DNA, 15 bp, Homo sapiens
gaaaacaatgtcaca

SEQ ID NO: 301202 - DNA, 15 bp, Homo sapiens
agaaaacaatgtcac

SEQ ID NO: 301203 - DNA, 15 bp, Homo sapiens
cagaaaacaatgtca

SEQ ID NO: 301204 - DNA, 15 bp, Homo sapiens
acagaaaacaatgtc

SEQ ID NO: 301205 - DNA, 15 bp, Homo sapiens
aacagaaaacaatgt

SEQ ID NO: 301206 - DNA, 15 bp, Homo sapiens
gaacagaaaacaatg

SEQ ID NO: 301207 - DNA, 15 bp, Homo sapiens
cgaacagaaaacaat

SEQ ID NO: 301208 - DNA, 15 bp, Homo sapiens
acgaacagaaaacaa

SEQ ID NO: 301209 - DNA, 15 bp, Homo sapiens
gacgaacagaaaaca

SEQ ID NO: 301210 - DNA, 15 bp, Homo sapiens
tgacgaacagaaaac

SEQ ID NO: 301211 - DNA, 15 bp, Homo sapiens
ttgacgaacagaaaa

SEQ ID NO: 301212 - DNA, 15 bp, Homo sapiens
tttgacgaacagaaa

SEQ ID NO: 301213 - DNA, 15 bp, Homo sapiens
ctttgacgaacagaa

SEQ ID NO: 301214 - DNA, 15 bp, Homo sapiens
actttgacgaacaga

SEQ ID NO: 301215 - DNA, 15 bp, Homo sapiens
cactttgacgaacag

SEQ ID NO: 301216 - DNA, 15 bp, Homo sapiens
tcactttgacgaaca

SEQ ID NO: 301217 - DNA, 15 bp, Homo sapiens
ttcactttgacgaac

SEQ ID NO: 301218 - DNA, 15 bp, Homo sapiens
cttcactttgacgaa

SEQ ID NO: 301219 - DNA, 15 bp, Homo sapiens
gcttcactttgacga

SEQ ID NO: 301220 - DNA, 15 bp, Homo sapiens
tgcttcactttgacg

SEQ ID NO: 301221 - DNA, 15 bp, Homo sapiens
ctgcttcactttgac

SEQ ID NO: 301222 - DNA, 15 bp, Homo sapiens
gctgcttcactttga

SEQ ID NO: 301223 - DNA, 15 bp, Homo sapiens
tgctgcttcactttg

SEQ ID NO: 301224 - DNA, 15 bp, Homo sapiens
ctgctgcttcacttt

SEQ ID NO: 301225 - DNA, 15 bp, Homo sapiens
tctgctgcttcactt

SEQ ID NO: 301226 - DNA, 15 bp, Homo sapiens
atctgctgcttcact

SEQ ID NO: 301227 - DNA, 15 bp, Homo sapiens
tatctgctgcttcac

SEQ ID NO: 301228 - DNA, 15 bp, Homo sapiens
ttatctgctgcttca

SEQ ID NO: 301229 - DNA, 15 bp, Homo sapiens
tttatctgctgcttc

SEQ ID NO: 301230 - DNA, 15 bp, Homo sapiens
atttatctgctgctt

SEQ ID NO: 301231 - DNA, 15 bp, Homo sapiens
catttatctgctgct

SEQ ID NO: 301232 - DNA, 15 bp, Homo sapiens
ccatttatctgctgc

SEQ ID NO: 301233 - DNA, 15 bp, Homo sapiens
tccatttatctgctg

SEQ ID NO: 301234 - DNA, 15 bp, Homo sapiens
ttccatttatctgct

SEQ ID NO: 301235 - DNA, 15 bp, Homo sapiens
gttccatttatctgc

SEQ ID NO: 301236 - DNA, 15 bp, Homo sapiens
tgttccatttatctg

SEQ ID NO: 301237 - DNA, 15 bp, Homo sapiens
ttgttccatttatct

SEQ ID NO: 301238 - DNA, 15 bp, Homo sapiens
gttgttccatttatc

SEQ ID NO: 301239 - DNA, 15 bp, Homo sapiens
agttgttccatttat

SEQ ID NO: 301240 - DNA, 15 bp, Homo sapiens
cagttgttccattta

SEQ ID NO: 301241 - DNA, 15 bp, Homo sapiens
acagttgttccattt

SEQ ID NO: 301242 - DNA, 15 bp, Homo sapiens
aacagttgttccatt

SEQ ID NO: 301243 - DNA, 15 bp, Homo sapiens
aaacagttgttccat

SEQ ID NO: 301244 - DNA, 15 bp, Homo sapiens
aaaacagttgttcca

SEQ ID NO: 301245 - DNA, 15 bp, Homo sapiens
aaaaacagttgttcc

SEQ ID NO: 301246 - DNA, 15 bp, Homo sapiens
aaaaaacagttgttc

SEQ ID NO: 301247 - DNA, 15 bp, Homo sapiens
taaaaaacagttgtt

SEQ ID NO: 301248 - DNA, 15 bp, Homo sapiens
ttaaaaaacagttgt

SEQ ID NO: 301249 - DNA, 15 bp, Homo sapiens
tttaaaaaacagttg

SEQ ID NO: 301250 - DNA, 15 bp, Homo sapiens
gtttaaaaaacagtt

SEQ ID NO: 301251 - DNA, 15 bp, Homo sapiens
tgtttaaaaaacagt

SEQ ID NO: 301252 - DNA, 15 bp, Homo sapiens
atgtttaaaaaacag

SEQ ID NO: 301253 - DNA, 15 bp, Homo sapiens
tatgtttaaaaaaca

SEQ ID NO: 301254 - DNA, 15 bp, Homo sapiens
ttatgtttaaaaaac

SEQ ID NO: 301255 - DNA, 15 bp, Homo sapiens
attatgtttaaaaaa

SEQ ID NO: 301256 - DNA, 15 bp, Homo sapiens
aattatgtttaaaaa

SEQ ID NO: 301257 - DNA, 15 bp, Homo sapiens
taattatgtttaaaa

SEQ ID NO: 301258 - DNA, 15 bp, Homo sapiens
ataattatgtttaaa

SEQ ID NO: 301259 - DNA, 15 bp, Homo sapiens
aataattatgtttaa

SEQ ID NO: 301260 - DNA, 15 bp, Homo sapiens
aaataattatgttta

SEQ ID NO: 301261 - DNA, 15 bp, Homo sapiens
aaaataattatgttt

SEQ ID NO: 301262 - DNA, 15 bp, Homo sapiens
aaaaataattatgtt

SEQ ID NO: 301263 - DNA, 15 bp, Homo sapiens
aaaaaataattatgt

SEQ ID NO: 301264 - DNA, 15 bp, Homo sapiens
aaaaaaataattatg

SEQ ID NO: 301265 - DNA, 15 bp, Homo sapiens
aaaaaaaataattat

SEQ ID NO: 301266 - DNA, 15 bp, Homo sapiens
aaaaaaaaataatta

SEQ ID NO: 301267 - DNA, 15 bp, Homo sapiens
gaaaaaaaaataatt

SEQ ID NO: 301268 - DNA, 15 bp, Homo sapiens
ggaaaaaaaaataat

SEQ ID NO: 301269 - DNA, 15 bp, Homo sapiens
tggaaaaaaaaataa

SEQ ID NO: 301270 - DNA, 15 bp, Homo sapiens
ctggaaaaaaaaata

SEQ ID NO: 301271 - DNA, 15 bp, Homo sapiens
tctggaaaaaaaaat

SEQ ID NO: 301272 - DNA, 15 bp, Homo sapiens
atctggaaaaaaaaa

SEQ ID NO: 301273 - DNA, 15 bp, Homo sapiens
catctggaaaaaaaa

SEQ ID NO: 301274 - DNA, 15 bp, Homo sapiens
acatctggaaaaaaa

SEQ ID NO: 301275 - DNA, 15 bp, Homo sapiens
aacatctggaaaaaa

SEQ ID NO: 301276 - DNA, 15 bp, Homo sapiens
gaacatctggaaaaa

SEQ ID NO: 301277 - DNA, 15 bp, Homo sapiens
agaacatctggaaaa

SEQ ID NO: 301278 - DNA, 15 bp, Homo sapiens
gagaacatctggaaa

SEQ ID NO: 301279 - DNA, 15 bp, Homo sapiens
tgagaacatctggaa

SEQ ID NO: 301280 - DNA, 15 bp, Homo sapiens
ctgagaacatctgga

SEQ ID NO: 301281 - DNA, 15 bp, Homo sapiens
cctgagaacatctgg

SEQ ID NO: 301282 - DNA, 15 bp, Homo sapiens
gcctgagaacatctg

SEQ ID NO: 301283 - DNA, 15 bp, Homo sapiens
agcctgagaacatct

SEQ ID NO: 301284 - DNA, 15 bp, Homo sapiens
aagcctgagaacatc

SEQ ID NO: 301285 - DNA, 15 bp, Homo sapiens
gaagcctgagaacat

SEQ ID NO: 301286 - DNA, 15 bp, Homo sapiens
ggaagcctgagaaca

SEQ ID NO: 301287 - DNA, 15 bp, Homo sapiens
aggaagcctgagaac

SEQ ID NO: 301288 - DNA, 15 bp, Homo sapiens
taggaagcctgagaa

SEQ ID NO: 301289 - DNA, 15 bp, Homo sapiens
gtaggaagcctgaga

SEQ ID NO: 301290 - DNA, 15 bp, Homo sapiens
tgtaggaagcctgag

SEQ ID NO: 301291 - DNA, 15 bp, Homo sapiens
atgtaggaagcctga

SEQ ID NO: 301292 - DNA, 15 bp, Homo sapiens
aatgtaggaagcctg

SEQ ID NO: 301293 - DNA, 15 bp, Homo sapiens
gaatgtaggaagcct

SEQ ID NO: 301294 - DNA, 15 bp, Homo sapiens
tgaatgtaggaagcc

SEQ ID NO: 301295 - DNA, 15 bp, Homo sapiens
ctgaatgtaggaagc

SEQ ID NO: 301296 - DNA, 15 bp, Homo sapiens
cctgaatgtaggaag

SEQ ID NO: 301297 - DNA, 15 bp, Homo sapiens
tcctgaatgtaggaa

SEQ ID NO: 301298 - DNA, 15 bp, Homo sapiens
atcctgaatgtagga

SEQ ID NO: 301299 - DNA, 15 bp, Homo sapiens
gatcctgaatgtagg

SEQ ID NO: 301300 - DNA, 15 bp, Homo sapiens
tgatcctgaatgtag

SEQ ID NO: 301301 - DNA, 15 bp, Homo sapiens
ctgatcctgaatgta

SEQ ID NO: 301302 - DNA, 15 bp, Homo sapiens
gctgatcctgaatgt

SEQ ID NO: 301303 - DNA, 15 bp, Homo sapiens
tgctgatcctgaatg

SEQ ID NO: 301304 - DNA, 15 bp, Homo sapiens
ttgctgatcctgaat

SEQ ID NO: 301305 - DNA, 15 bp, Homo sapiens
cttgctgatcctgaa

SEQ ID NO: 301306 - DNA, 15 bp, Homo sapiens
acttgctgatcctga

SEQ ID NO: 301307 - DNA, 15 bp, Homo sapiens
gacttgctgatcctg

SEQ ID NO: 301308 - DNA, 15 bp, Homo sapiens
agacttgctgatcct

SEQ ID NO: 301309 - DNA, 15 bp, Homo sapiens
aagacttgctgatcc

SEQ ID NO: 301310 - DNA, 15 bp, Homo sapiens
gaagacttgctgatc

SEQ ID NO: 301311 - DNA, 15 bp, Homo sapiens
tgaagacttgctgat

SEQ ID NO: 301312 - DNA, 15 bp, Homo sapiens
ctgaagacttgctga

SEQ ID NO: 301313 - DNA, 15 bp, Homo sapiens
gctgaagacttgctg

SEQ ID NO: 301314 - DNA, 15 bp, Homo sapiens
tgctgaagacttgct

SEQ ID NO: 301315 - DNA, 15 bp, Homo sapiens
atgctgaagacttgc

SEQ ID NO: 301316 - DNA, 15 bp, Homo sapiens
aatgctgaagacttg

SEQ ID NO: 301317 - DNA, 15 bp, Homo sapiens
caatgctgaagactt

SEQ ID NO: 301318 - DNA, 15 bp, Homo sapiens
ccaatgctgaagact

SEQ ID NO: 301319 - DNA, 15 bp, Homo sapiens
accaatgctgaagac

SEQ ID NO: 301320 - DNA, 15 bp, Homo sapiens
taccaatgctgaaga

SEQ ID NO: 301321 - DNA, 15 bp, Homo sapiens
gtaccaatgctgaag

SEQ ID NO: 301322 - DNA, 15 bp, Homo sapiens
agtaccaatgctgaa

SEQ ID NO: 301323 - DNA, 15 bp, Homo sapiens
gagtaccaatgctga

SEQ ID NO: 301324 - DNA, 15 bp, Homo sapiens
agagtaccaatgctg

SEQ ID NO: 301325 - DNA, 15 bp, Homo sapiens
aagagtaccaatgct

SEQ ID NO: 301326 - DNA, 15 bp, Homo sapiens
aaagagtaccaatgc

SEQ ID NO: 301327 - DNA, 15 bp, Homo sapiens
caaagagtaccaatg

SEQ ID NO: 301328 - DNA, 15 bp, Homo sapiens
acaaagagtaccaat

SEQ ID NO: 301329 - DNA, 15 bp, Homo sapiens
aacaaagagtaccaa

SEQ ID NO: 301330 - DNA, 15 bp, Homo sapiens
taacaaagagtacca

SEQ ID NO: 301331 - DNA, 15 bp, Homo sapiens
ctaacaaagagtacc

SEQ ID NO: 301332 - DNA, 15 bp, Homo sapiens
actaacaaagagtac

SEQ ID NO: 301333 - DNA, 15 bp, Homo sapiens
cactaacaaagagta

SEQ ID NO: 301334 - DNA, 15 bp, Homo sapiens
acactaacaaagagt

SEQ ID NO: 301335 - DNA, 15 bp, Homo sapiens
tacactaacaaagag

SEQ ID NO: 301336 - DNA, 15 bp, Homo sapiens
ctacactaacaaaga

SEQ ID NO: 301337 - DNA, 15 bp, Homo sapiens
tctacactaacaaag

SEQ ID NO: 301338 - DNA, 15 bp, Homo sapiens
gtctacactaacaaa

SEQ ID NO: 301339 - DNA, 15 bp, Homo sapiens
ggtctacactaacaa

SEQ ID NO: 301340 - DNA, 15 bp, Homo sapiens
aggtctacactaaca

SEQ ID NO: 301341 - DNA, 15 bp, Homo sapiens
aaggtctacactaac

SEQ ID NO: 301342 - DNA, 15 bp, Homo sapiens
caaggtctacactaa

SEQ ID NO: 301343 - DNA, 15 bp, Homo sapiens
tcaaggtctacacta

SEQ ID NO: 301344 - DNA, 15 bp, Homo sapiens
ctcaaggtctacact

SEQ ID NO: 301345 - DNA, 15 bp, Homo sapiens
actcaaggtctacac

SEQ ID NO: 301346 - DNA, 15 bp, Homo sapiens
cactcaaggtctaca

SEQ ID NO: 301347 - DNA, 15 bp, Homo sapiens
gcactcaaggtctac

SEQ ID NO: 301348 - DNA, 15 bp, Homo sapiens
ggcactcaaggtcta

SEQ ID NO: 301349 - DNA, 15 bp, Homo sapiens
gggcactcaaggtct

SEQ ID NO: 301350 - DNA, 15 bp, Homo sapiens
agggcactcaaggtc

SEQ ID NO: 301351 - DNA, 15 bp, Homo sapiens
cagggcactcaaggt

SEQ ID NO: 301352 - DNA, 15 bp, Homo sapiens
gcagggcactcaagg

SEQ ID NO: 301353 - DNA, 15 bp, Homo sapiens
agcagggcactcaag

SEQ ID NO: 301354 - DNA, 15 bp, Homo sapiens
cagcagggcactcaa

SEQ ID NO: 301355 - DNA, 15 bp, Homo sapiens
tcagcagggcactca

SEQ ID NO: 301356 - DNA, 15 bp, Homo sapiens
ctcagcagggcactc

SEQ ID NO: 301357 - DNA, 15 bp, Homo sapiens
cctcagcagggcact

SEQ ID NO: 301358 - DNA, 15 bp, Homo sapiens
ccctcagcagggcac

SEQ ID NO: 301359 - DNA, 15 bp, Homo sapiens
cccctcagcagggca

SEQ ID NO: 301360 - DNA, 15 bp, Homo sapiens
gcccctcagcagggc

SEQ ID NO: 301361 - DNA, 15 bp, Homo sapiens
agcccctcagcaggg

SEQ ID NO: 301362 - DNA, 15 bp, Homo sapiens
aagcccctcagcagg

SEQ ID NO: 301363 - DNA, 15 bp, Homo sapiens
caagcccctcagcag

SEQ ID NO: 301364 - DNA, 15 bp, Homo sapiens
acaagcccctcagca

SEQ ID NO: 301365 - DNA, 15 bp, Homo sapiens
cacaagcccctcagc

SEQ ID NO: 301366 - DNA, 15 bp, Homo sapiens
acacaagcccctcag

SEQ ID NO: 301367 - DNA, 15 bp, Homo sapiens
cacacaagcccctca

SEQ ID NO: 301368 - DNA, 15 bp, Homo sapiens
gcacacaagcccctc

SEQ ID NO: 301369 - DNA, 15 bp, Homo sapiens
ggcacacaagcccct

SEQ ID NO: 301370 - DNA, 15 bp, Homo sapiens
tggcacacaagcccc

SEQ ID NO: 301371 - DNA, 15 bp, Homo sapiens
atggcacacaagccc

SEQ ID NO: 301372 - DNA, 15 bp, Homo sapiens
aatggcacacaagcc

SEQ ID NO: 301373 - DNA, 15 bp, Homo sapiens
gaatggcacacaagc

SEQ ID NO: 301374 - DNA, 15 bp, Homo sapiens
agaatggcacacaag

SEQ ID NO: 301375 - DNA, 15 bp, Homo sapiens
cagaatggcacacaa

SEQ ID NO: 301376 - DNA, 15 bp, Homo sapiens
gcagaatggcacaca

SEQ ID NO: 301377 - DNA, 15 bp, Homo sapiens
agcagaatggcacac

SEQ ID NO: 301378 - DNA, 15 bp, Homo sapiens
aagcagaatggcaca

SEQ ID NO: 301379 - DNA, 15 bp, Homo sapiens
caagcagaatggcac

SEQ ID NO: 301380 - DNA, 15 bp, Homo sapiens
tcaagcagaatggca

SEQ ID NO: 301381 - DNA, 15 bp, Homo sapiens
ctcaagcagaatggc

SEQ ID NO: 301382 - DNA, 15 bp, Homo sapiens
actcaagcagaatgg

SEQ ID NO: 301383 - DNA, 15 bp, Homo sapiens
cactcaagcagaatg

SEQ ID NO: 301384 - DNA, 15 bp, Homo sapiens
gcactcaagcagaat

SEQ ID NO: 301385 - DNA, 15 bp, Homo sapiens
tgcactcaagcagaa

SEQ ID NO: 301386 - DNA, 15 bp, Homo sapiens
ctgcactcaagcaga

SEQ ID NO: 301387 - DNA, 15 bp, Homo sapiens
tctgcactcaagcag

SEQ ID NO: 301388 - DNA, 15 bp, Homo sapiens
atctgcactcaagca

SEQ ID NO: 301389 - DNA, 15 bp, Homo sapiens
catctgcactcaagc

SEQ ID NO: 301390 - DNA, 15 bp, Homo sapiens
acatctgcactcaag

SEQ ID NO: 301391 - DNA, 15 bp, Homo sapiens
cacatctgcactcaa

SEQ ID NO: 301392 - DNA, 15 bp, Homo sapiens
gcacatctgcactca

SEQ ID NO: 301393 - DNA, 15 bp, Homo sapiens
ggcacatctgcactc

SEQ ID NO: 301394 - DNA, 15 bp, Homo sapiens
tggcacatctgcact

SEQ ID NO: 301395 - DNA, 15 bp, Homo sapiens
ttggcacatctgcac

SEQ ID NO: 301396 - DNA, 15 bp, Homo sapiens
cttggcacatctgca

SEQ ID NO: 301397 - DNA, 15 bp, Homo sapiens
tcttggcacatctgc

SEQ ID NO: 301398 - DNA, 15 bp, Homo sapiens
ctcttggcacatctg

SEQ ID NO: 301399 - DNA, 15 bp, Homo sapiens
cctcttggcacatct

SEQ ID NO: 301400 - DNA, 15 bp, Homo sapiens
acctcttggcacatc

SEQ ID NO: 301401 - DNA, 15 bp, Homo sapiens
tacctcttggcacat

SEQ ID NO: 301402 - DNA, 15 bp, Homo sapiens
gtacctcttggcaca

SEQ ID NO: 301403 - DNA, 15 bp, Homo sapiens
tgtacctcttggcac

SEQ ID NO: 301404 - DNA, 15 bp, Homo sapiens
ttgtacctcttggca

SEQ ID NO: 301405 - DNA, 15 bp, Homo sapiens
cttgtacctcttggc

SEQ ID NO: 301406 - DNA, 15 bp, Homo sapiens
tcttgtacctcttgg

SEQ ID NO: 301407 - DNA, 15 bp, Homo sapiens
ctcttgtacctcttg

SEQ ID NO: 301408 - DNA, 15 bp, Homo sapiens
actcttgtacctctt

SEQ ID NO: 301409 - DNA, 15 bp, Homo sapiens
aactcttgtacctct

SEQ ID NO: 301410 - DNA, 15 bp, Homo sapiens
caactcttgtacctc

SEQ ID NO: 301411 - DNA, 15 bp, Homo sapiens
ccaactcttgtacct

SEQ ID NO: 301412 - DNA, 15 bp, Homo sapiens
tccaactcttgtacc

SEQ ID NO: 301413 - DNA, 15 bp, Homo sapiens
ttccaactcttgtac

SEQ ID NO: 301414 - DNA, 15 bp, Homo sapiens
gttccaactcttgta

SEQ ID NO: 301415 - DNA, 15 bp, Homo sapiens
agttccaactcttgt

SEQ ID NO: 301416 - DNA, 15 bp, Homo sapiens
cagttccaactcttg

SEQ ID NO: 301417 - DNA, 15 bp, Homo sapiens
acagttccaactctt

SEQ ID NO: 301418 - DNA, 15 bp, Homo sapiens
tacagttccaactct

SEQ ID NO: 301419 - DNA, 15 bp, Homo sapiens
ttacagttccaactc

SEQ ID NO: 301420 - DNA, 15 bp, Homo sapiens
attacagttccaact

SEQ ID NO: 301421 - DNA, 15 bp, Homo sapiens
tattacagttccaac

SEQ ID NO: 301422 - DNA, 15 bp, Homo sapiens
ctattacagttccaa

SEQ ID NO: 301423 - DNA, 15 bp, Homo sapiens
tctattacagttcca

SEQ ID NO: 301424 - DNA, 15 bp, Homo sapiens
gtctattacagttcc

SEQ ID NO: 301425 - DNA, 15 bp, Homo sapiens
ggtctattacagttc

SEQ ID NO: 301426 - DNA, 15 bp, Homo sapiens
aggtctattacagtt

SEQ ID NO: 301427 - DNA, 15 bp, Homo sapiens
gaggtctattacagt

SEQ ID NO: 301428 - DNA, 15 bp, Homo sapiens
agaggtctattacag

SEQ ID NO: 301429 - DNA, 15 bp, Homo sapiens
aagaggtctattaca

SEQ ID NO: 301430 - DNA, 15 bp, Homo sapiens
taagaggtctattac

SEQ ID NO: 301431 - DNA, 15 bp, Homo sapiens
ctaagaggtctatta

SEQ ID NO: 301432 - DNA, 15 bp, Homo sapiens
cctaagaggtctatt

SEQ ID NO: 301433 - DNA, 15 bp, Homo sapiens
gcctaagaggtctat

SEQ ID NO: 301434 - DNA, 15 bp, Homo sapiens
agcctaagaggtcta

SEQ ID NO: 301435 - DNA, 15 bp, Homo sapiens
tagcctaagaggtct

SEQ ID NO: 301436 - DNA, 15 bp, Homo sapiens
gtagcctaagaggtc

SEQ ID NO: 301437 - DNA, 15 bp, Homo sapiens
agtagcctaagaggt

SEQ ID NO: 301438 - DNA, 15 bp, Homo sapiens
cagtagcctaagagg

SEQ ID NO: 301439 - DNA, 15 bp, Homo sapiens
ccagtagcctaagag

SEQ ID NO: 301440 - DNA, 15 bp, Homo sapiens
gccagtagcctaaga

SEQ ID NO: 301441 - DNA, 15 bp, Homo sapiens
agccagtagcctaag

SEQ ID NO: 301442 - DNA, 15 bp, Homo sapiens
cagccagtagcctaa

SEQ ID NO: 301443 - DNA, 15 bp, Homo sapiens
tcagccagtagccta

SEQ ID NO: 301444 - DNA, 15 bp, Homo sapiens
ttcagccagtagcct

SEQ ID NO: 301445 - DNA, 15 bp, Homo sapiens
tttcagccagtagcc

SEQ ID NO: 301446 - DNA, 15 bp, Homo sapiens
atttcagccagtagc

SEQ ID NO: 301447 - DNA, 15 bp, Homo sapiens
tatttcagccagtag

SEQ ID NO: 301448 - DNA, 15 bp, Homo sapiens
gtatttcagccagta

SEQ ID NO: 301449 - DNA, 15 bp, Homo sapiens
agtatttcagccagt

SEQ ID NO: 301450 - DNA, 15 bp, Homo sapiens
tagtatttcagccag

SEQ ID NO: 301451 - DNA, 15 bp, Homo sapiens
ttagtatttcagcca

SEQ ID NO: 301452 - DNA, 15 bp, Homo sapiens
cttagtatttcagcc

SEQ ID NO: 301453 - DNA, 15 bp, Homo sapiens
ccttagtatttcagc

SEQ ID NO: 301454 - DNA, 15 bp, Homo sapiens
accttagtatttcag

SEQ ID NO: 301455 - DNA, 15 bp, Homo sapiens
aaccttagtatttca

SEQ ID NO: 301456 - DNA, 15 bp, Homo sapiens
gaaccttagtatttc

SEQ ID NO: 301457 - DNA, 15 bp, Homo sapiens
tgaaccttagtattt

SEQ ID NO: 301458 - DNA, 15 bp, Homo sapiens
ctgaaccttagtatt

SEQ ID NO: 301459 - DNA, 15 bp, Homo sapiens
tctgaaccttagtat

SEQ ID NO: 301460 - DNA, 15 bp, Homo sapiens
ttctgaaccttagta

SEQ ID NO: 301461 - DNA, 15 bp, Homo sapiens
attctgaaccttagt

SEQ ID NO: 301462 - DNA, 15 bp, Homo sapiens
tattctgaaccttag

SEQ ID NO: 301463 - DNA, 15 bp, Homo sapiens
ttattctgaacctta

SEQ ID NO: 301464 - DNA, 15 bp, Homo sapiens
cttattctgaacctt

SEQ ID NO: 301465 - DNA, 15 bp, Homo sapiens
tcttattctgaacct

SEQ ID NO: 301466 - DNA, 15 bp, Homo sapiens
ttcttattctgaacc

SEQ ID NO: 301467 - DNA, 15 bp, Homo sapiens
tttcttattctgaac

SEQ ID NO: 301468 - DNA, 15 bp, Homo sapiens
ctttcttattctgaa

SEQ ID NO: 301469 - DNA, 15 bp, Homo sapiens
tctttcttattctga

SEQ ID NO: 301470 - DNA, 15 bp, Homo sapiens
ctctttcttattctg

SEQ ID NO: 301471 - DNA, 15 bp, Homo sapiens
tctctttcttattct

SEQ ID NO: 301472 - DNA, 15 bp, Homo sapiens
atctctttcttattc

SEQ ID NO: 301473 - DNA, 15 bp, Homo sapiens
tatctctttcttatt

SEQ ID NO: 301474 - DNA, 15 bp, Homo sapiens
gtatctctttcttat

SEQ ID NO: 301475 - DNA, 15 bp, Homo sapiens
cgtatctctttctta

SEQ ID NO: 301476 - DNA, 15 bp, Homo sapiens
acgtatctctttctt

SEQ ID NO: 301477 - DNA, 15 bp, Homo sapiens
gacgtatctctttct

SEQ ID NO: 301478 - DNA, 15 bp, Homo sapiens
agacgtatctctttc

SEQ ID NO: 301479 - DNA, 15 bp, Homo sapiens
gagacgtatctcttt

SEQ ID NO: 301480 - DNA, 15 bp, Homo sapiens
tgagacgtatctctt

SEQ ID NO: 301481 - DNA, 15 bp, Homo sapiens
ctgagacgtatctct

SEQ ID NO: 301482 - DNA, 15 bp, Homo sapiens
cctgagacgtatctc

SEQ ID NO: 301483 - DNA, 15 bp, Homo sapiens
gcctgagacgtatct

SEQ ID NO: 301484 - DNA, 15 bp, Homo sapiens
tgcctgagacgtatc

SEQ ID NO: 301485 - DNA, 15 bp, Homo sapiens
atgcctgagacgtat

SEQ ID NO: 301486 - DNA, 15 bp, Homo sapiens
gatgcctgagacgta

SEQ ID NO: 301487 - DNA, 15 bp, Homo sapiens
agatgcctgagacgt

SEQ ID NO: 301488 - DNA, 15 bp, Homo sapiens
gagatgcctgagacg

SEQ ID NO: 301489 - DNA, 15 bp, Homo sapiens
tgagatgcctgagac

SEQ ID NO: 301490 - DNA, 15 bp, Homo sapiens
atgagatgcctgaga

SEQ ID NO: 301491 - DNA, 15 bp, Homo sapiens
aatgagatgcctgag

SEQ ID NO: 301492 - DNA, 15 bp, Homo sapiens
taatgagatgcctga

SEQ ID NO: 301493 - DNA, 15 bp, Homo sapiens
ataatgagatgcctg

SEQ ID NO: 301494 - DNA, 15 bp, Homo sapiens
gataatgagatgcct

SEQ ID NO: 301495 - DNA, 15 bp, Homo sapiens
ggataatgagatgcc

SEQ ID NO: 301496 - DNA, 15 bp, Homo sapiens
cggataatgagatgc

SEQ ID NO: 301497 - DNA, 15 bp, Homo sapiens
gcggataatgagatg

SEQ ID NO: 301498 - DNA, 15 bp, Homo sapiens
tgcggataatgagat

SEQ ID NO: 301499 - DNA, 15 bp, Homo sapiens
ttgcggataatgaga

SEQ ID NO: 301500 - DNA, 15 bp, Homo sapiens
gttgcggataatgag

SEQ ID NO: 301501 - DNA, 15 bp, Homo sapiens
agttgcggataatga

SEQ ID NO: 301502 - DNA, 15 bp, Homo sapiens
cagttgcggataatg

SEQ ID NO: 301503 - DNA, 15 bp, Homo sapiens
acagttgcggataat

SEQ ID NO: 301504 - DNA, 15 bp, Homo sapiens
gacagttgcggataa

SEQ ID NO: 301505 - DNA, 15 bp, Homo sapiens
tgacagttgcggata

SEQ ID NO: 301506 - DNA, 15 bp, Homo sapiens
ctgacagttgcggat

SEQ ID NO: 301507 - DNA, 15 bp, Homo sapiens
actgacagttgcgga

SEQ ID NO: 301508 - DNA, 15 bp, Homo sapiens
gactgacagttgcgg

SEQ ID NO: 301509 - DNA, 15 bp, Homo sapiens
ggactgacagttgcg

SEQ ID NO: 301510 - DNA, 15 bp, Homo sapiens
cggactgacagttgc

SEQ ID NO: 301511 - DNA, 15 bp, Homo sapiens
ccggactgacagttg

SEQ ID NO: 301512 - DNA, 15 bp, Homo sapiens
tccggactgacagtt

SEQ ID NO: 301513 - DNA, 15 bp, Homo sapiens
ttccggactgacagt

SEQ ID NO: 301514 - DNA, 15 bp, Homo sapiens
gttccggactgacag

SEQ ID NO: 301515 - DNA, 15 bp, Homo sapiens
agttccggactgaca

SEQ ID NO: 301516 - DNA, 15 bp, Homo sapiens
gagttccggactgac

SEQ ID NO: 301517 - DNA, 15 bp, Homo sapiens
tgagttccggactga

SEQ ID NO: 301518 - DNA, 15 bp, Homo sapiens
ctgagttccggactg

SEQ ID NO: 301519 - DNA, 15 bp, Homo sapiens
tctgagttccggact

SEQ ID NO: 301520 - DNA, 15 bp, Homo sapiens
ttctgagttccggac

SEQ ID NO: 301521 - DNA, 15 bp, Homo sapiens
gttctgagttccgga

SEQ ID NO: 301522 - DNA, 15 bp, Homo sapiens
tgttctgagttccgg

SEQ ID NO: 301523 - DNA, 15 bp, Homo sapiens
ctgttctgagttccg

SEQ ID NO: 301524 - DNA, 15 bp, Homo sapiens
cctgttctgagttcc

SEQ ID NO: 301525 - DNA, 15 bp, Homo sapiens
gcctgttctgagttc

SEQ ID NO: 301526 - DNA, 15 bp, Homo sapiens
agcctgttctgagtt

SEQ ID NO: 301527 - DNA, 15 bp, Homo sapiens
cagcctgttctgagt

SEQ ID NO: 301528 - DNA, 15 bp, Homo sapiens
ccagcctgttctgag

SEQ ID NO: 301529 - DNA, 15 bp, Homo sapiens
accagcctgttctga

SEQ ID NO: 301530 - DNA, 15 bp, Homo sapiens
aaccagcctgttctg

SEQ ID NO: 301531 - DNA, 15 bp, Homo sapiens
gaaccagcctgttct

SEQ ID NO: 301532 - DNA, 15 bp, Homo sapiens
agaaccagcctgttc

SEQ ID NO: 301533 - DNA, 15 bp, Homo sapiens
tagaaccagcctgtt

SEQ ID NO: 301534 - DNA, 15 bp, Homo sapiens
ctagaaccagcctgt

SEQ ID NO: 301535 - DNA, 15 bp, Homo sapiens
gctagaaccagcctg

SEQ ID NO: 301536 - DNA, 15 bp, Homo sapiens
agctagaaccagcct

SEQ ID NO: 301537 - DNA, 15 bp, Homo sapiens
cagctagaaccagcc

SEQ ID NO: 301538 - DNA, 15 bp, Homo sapiens
acagctagaaccagc

SEQ ID NO: 301539 - DNA, 15 bp, Homo sapiens
gacagctagaaccag

SEQ ID NO: 301540 - DNA, 15 bp, Homo sapiens
cgacagctagaacca

SEQ ID NO: 301541 - DNA, 15 bp, Homo sapiens
tcgacagctagaacc

SEQ ID NO: 301542 - DNA, 15 bp, Homo sapiens
atcgacagctagaac

SEQ ID NO: 301543 - DNA, 15 bp, Homo sapiens
aatcgacagctagaa

SEQ ID NO: 301544 - DNA, 15 bp, Homo sapiens
gaatcgacagctaga

SEQ ID NO: 301545 - DNA, 15 bp, Homo sapiens
tgaatcgacagctag

SEQ ID NO: 301546 - DNA, 15 bp, Homo sapiens
ttgaatcgacagcta

SEQ ID NO: 301547 - DNA, 15 bp, Homo sapiens
attgaatcgacagct

SEQ ID NO: 301548 - DNA, 15 bp, Homo sapiens
tattgaatcgacagc

SEQ ID NO: 301549 - DNA, 15 bp, Homo sapiens
ctattgaatcgacag

SEQ ID NO: 301550 - DNA, 15 bp, Homo sapiens
actattgaatcgaca

SEQ ID NO: 301551 - DNA, 15 bp, Homo sapiens
aactattgaatcgac

SEQ ID NO: 301552 - DNA, 15 bp, Homo sapiens
aaactattgaatcga

SEQ ID NO: 301553 - DNA, 15 bp, Homo sapiens
aaaactattgaatcg

SEQ ID NO: 301554 - DNA, 15 bp, Homo sapiens
taaaactattgaatc

SEQ ID NO: 301555 - DNA, 15 bp, Homo sapiens
ctaaaactattgaat

SEQ ID NO: 301556 - DNA, 15 bp, Homo sapiens
gctaaaactattgaa

SEQ ID NO: 301557 - DNA, 15 bp, Homo sapiens
agctaaaactattga

SEQ ID NO: 301558 - DNA, 15 bp, Homo sapiens
aagctaaaactattg

SEQ ID NO: 301559 - DNA, 15 bp, Homo sapiens
gaagctaaaactatt

SEQ ID NO: 301560 - DNA, 15 bp, Homo sapiens
agaagctaaaactat

SEQ ID NO: 301561 - DNA, 15 bp, Homo sapiens
cagaagctaaaacta

SEQ ID NO: 301562 - DNA, 15 bp, Homo sapiens
acagaagctaaaact

SEQ ID NO: 301563 - DNA, 15 bp, Homo sapiens
tacagaagctaaaac

SEQ ID NO: 301564 - DNA, 15 bp, Homo sapiens
gtacagaagctaaaa

SEQ ID NO: 301565 - DNA, 15 bp, Homo sapiens
agtacagaagctaaa

SEQ ID NO: 301566 - DNA, 15 bp, Homo sapiens
gagtacagaagctaa

SEQ ID NO: 301567 - DNA, 15 bp, Homo sapiens
ggagtacagaagcta

SEQ ID NO: 301568 - DNA, 15 bp, Homo sapiens
tggagtacagaagct

SEQ ID NO: 301569 - DNA, 15 bp, Homo sapiens
ttggagtacagaagc

SEQ ID NO: 301570 - DNA, 15 bp, Homo sapiens
tttggagtacagaag

SEQ ID NO: 301571 - DNA, 15 bp, Homo sapiens
atttggagtacagaa

SEQ ID NO: 301572 - DNA, 15 bp, Homo sapiens
gatttggagtacaga

SEQ ID NO: 301573 - DNA, 15 bp, Homo sapiens
ggatttggagtacag

SEQ ID NO: 301574 - DNA, 15 bp, Homo sapiens
aggatttggagtaca

SEQ ID NO: 301575 - DNA, 15 bp, Homo sapiens
aaggatttggagtac

SEQ ID NO: 301576 - DNA, 15 bp, Homo sapiens
taaggatttggagta

SEQ ID NO: 301577 - DNA, 15 bp, Homo sapiens
gtaaggatttggagt

SEQ ID NO: 301578 - DNA, 15 bp, Homo sapiens
tgtaaggatttggag

SEQ ID NO: 301579 - DNA, 15 bp, Homo sapiens
ctgtaaggatttgga

SEQ ID NO: 301580 - DNA, 15 bp, Homo sapiens
cctgtaaggatttgg

SEQ ID NO: 301581 - DNA, 15 bp, Homo sapiens
acctgtaaggatttg

SEQ ID NO: 301582 - DNA, 15 bp, Homo sapiens
tacctgtaaggattt

SEQ ID NO: 301583 - DNA, 15 bp, Homo sapiens
ctacctgtaaggatt

SEQ ID NO: 301584 - DNA, 15 bp, Homo sapiens
tctacctgtaaggat

SEQ ID NO: 301585 - DNA, 15 bp, Homo sapiens
gtctacctgtaagga

SEQ ID NO: 301586 - DNA, 15 bp, Homo sapiens
ggtctacctgtaagg

SEQ ID NO: 301587 - DNA, 15 bp, Homo sapiens
gggtctacctgtaag

SEQ ID NO: 301588 - DNA, 15 bp, Homo sapiens
tgggtctacctgtaa

SEQ ID NO: 301589 - DNA, 15 bp, Homo sapiens
atgggtctacctgta

SEQ ID NO: 301590 - DNA, 15 bp, Homo sapiens
tatgggtctacctgt

SEQ ID NO: 301591 - DNA, 15 bp, Homo sapiens
ctatgggtctacctg

SEQ ID NO: 301592 - DNA, 15 bp, Homo sapiens
gctatgggtctacct

SEQ ID NO: 301593 - DNA, 15 bp, Homo sapiens
tgctatgggtctacc

SEQ ID NO: 301594 - DNA, 15 bp, Homo sapiens
ttgctatgggtctac

SEQ ID NO: 301595 - DNA, 15 bp, Homo sapiens
cttgctatgggtcta

SEQ ID NO: 301596 - DNA, 15 bp, Homo sapiens
ccttgctatgggtct

SEQ ID NO: 301597 - DNA, 15 bp, Homo sapiens
accttgctatgggtc

SEQ ID NO: 301598 - DNA, 15 bp, Homo sapiens
caccttgctatgggt

SEQ ID NO: 301599 - DNA, 15 bp, Homo sapiens
gcaccttgctatggg

SEQ ID NO: 301600 - DNA, 15 bp, Homo sapiens
ggcaccttgctatgg

SEQ ID NO: 301601 - DNA, 15 bp, Homo sapiens
tggcaccttgctatg

SEQ ID NO: 301602 - DNA, 15 bp, Homo sapiens
atggcaccttgctat

SEQ ID NO: 301603 - DNA, 15 bp, Homo sapiens
aatggcaccttgcta

SEQ ID NO: 301604 - DNA, 15 bp, Homo sapiens
caatggcaccttgct

SEQ ID NO: 301605 - DNA, 15 bp, Homo sapiens
gcaatggcaccttgc

SEQ ID NO: 301606 - DNA, 15 bp, Homo sapiens
ggcaatggcaccttg

SEQ ID NO: 301607 - DNA, 15 bp, Homo sapiens
tggcaatggcacctt

SEQ ID NO: 301608 - DNA, 15 bp, Homo sapiens
ctggcaatggcacct

SEQ ID NO: 301609 - DNA, 15 bp, Homo sapiens
cctggcaatggcacc

SEQ ID NO: 301610 - DNA, 15 bp, Homo sapiens
ccctggcaatggcac

SEQ ID NO: 301611 - DNA, 15 bp, Homo sapiens
accctggcaatggca

SEQ ID NO: 301612 - DNA, 15 bp, Homo sapiens
gaccctggcaatggc

SEQ ID NO: 301613 - DNA, 15 bp, Homo sapiens
tgaccctggcaatgg

SEQ ID NO: 301614 - DNA, 15 bp, Homo sapiens
atgaccctggcaatg

SEQ ID NO: 301615 - DNA, 15 bp, Homo sapiens
catgaccctggcaat

SEQ ID NO: 301616 - DNA, 15 bp, Homo sapiens
gcatgaccctggcaa

SEQ ID NO: 301617 - DNA, 15 bp, Homo sapiens
ggcatgaccctggca

SEQ ID NO: 301618 - DNA, 15 bp, Homo sapiens
tggcatgaccctggc

SEQ ID NO: 301619 - DNA, 15 bp, Homo sapiens
atggcatgaccctgg

SEQ ID NO: 301620 - DNA, 15 bp, Homo sapiens
gatggcatgaccctg

SEQ ID NO: 301621 - DNA, 15 bp, Homo sapiens
ggatggcatgaccct

SEQ ID NO: 301622 - DNA, 15 bp, Homo sapiens
tggatggcatgaccc

SEQ ID NO: 301623 - DNA, 15 bp, Homo sapiens
ctggatggcatgacc

SEQ ID NO: 301624 - DNA, 15 bp, Homo sapiens
cctggatggcatgac

SEQ ID NO: 301625 - DNA, 15 bp, Homo sapiens
acctggatggcatga

SEQ ID NO: 301626 - DNA, 15 bp, Homo sapiens
tacctggatggcatg

SEQ ID NO: 301627 - DNA, 15 bp, Homo sapiens
atacctggatggcat

SEQ ID NO: 301628 - DNA, 15 bp, Homo sapiens
catacctggatggca

SEQ ID NO: 301629 - DNA, 15 bp, Homo sapiens
tcatacctggatggc

SEQ ID NO: 301630 - DNA, 15 bp, Homo sapiens
gtcatacctggatgg

SEQ ID NO: 301631 - DNA, 15 bp, Homo sapiens
tgtcatacctggatg

SEQ ID NO: 301632 - DNA, 15 bp, Homo sapiens
ctgtcatacctggat

SEQ ID NO: 301633 - DNA, 15 bp, Homo sapiens
cctgtcatacctgga

SEQ ID NO: 301634 - DNA, 15 bp, Homo sapiens
tcctgtcatacctgg

SEQ ID NO: 301635 - DNA, 15 bp, Homo sapiens
gtcctgtcatacctg

SEQ ID NO: 301636 - DNA, 15 bp, Homo sapiens
agtcctgtcatacct

SEQ ID NO: 301637 - DNA, 15 bp, Homo sapiens
tagtcctgtcatacc

SEQ ID NO: 301638 - DNA, 15 bp, Homo sapiens
atagtcctgtcatac

SEQ ID NO: 301639 - DNA, 15 bp, Homo sapiens
catagtcctgtcata

SEQ ID NO: 301640 - DNA, 15 bp, Homo sapiens
acatagtcctgtcat

SEQ ID NO: 301641 - DNA, 15 bp, Homo sapiens
gacatagtcctgtca

SEQ ID NO: 301642 - DNA, 15 bp, Homo sapiens
tgacatagtcctgtc

SEQ ID NO: 301643 - DNA, 15 bp, Homo sapiens
ttgacatagtcctgt

SEQ ID NO: 301644 - DNA, 15 bp, Homo sapiens
tttgacatagtcctg

SEQ ID NO: 301645 - DNA, 15 bp, Homo sapiens
ctttgacatagtcct

SEQ ID NO: 301646 - DNA, 15 bp, Homo sapiens
gctttgacatagtcc

SEQ ID NO: 301647 - DNA, 15 bp, Homo sapiens
ggctttgacatagtc

SEQ ID NO: 301648 - DNA, 15 bp, Homo sapiens
tggctttgacatagt

SEQ ID NO: 301649 - DNA, 15 bp, Homo sapiens
ctggctttgacatag

SEQ ID NO: 301650 - DNA, 15 bp, Homo sapiens
cctggctttgacata

SEQ ID NO: 301651 - DNA, 15 bp, Homo sapiens
acctggctttgacat

SEQ ID NO: 301652 - DNA, 15 bp, Homo sapiens
tacctggctttgaca

SEQ ID NO: 301653 - DNA, 15 bp, Homo sapiens
ctacctggctttgac

SEQ ID NO: 301654 - DNA, 15 bp, Homo sapiens
cctacctggctttga

SEQ ID NO: 301655 - DNA, 15 bp, Homo sapiens
tcctacctggctttg

SEQ ID NO: 301656 - DNA, 15 bp, Homo sapiens
ctcctacctggcttt

SEQ ID NO: 301657 - DNA, 15 bp, Homo sapiens
cctcctacctggctt

SEQ ID NO: 301658 - DNA, 15 bp, Homo sapiens
ccctcctacctggct

SEQ ID NO: 301659 - DNA, 15 bp, Homo sapiens
gccctcctacctggc

SEQ ID NO: 301660 - DNA, 15 bp, Homo sapiens
tgccctcctacctgg

SEQ ID NO: 301661 - DNA, 15 bp, Homo sapiens
ttgccctcctacctg

SEQ ID NO: 301662 - DNA, 15 bp, Homo sapiens
cttgccctcctacct

SEQ ID NO: 301663 - DNA, 15 bp, Homo sapiens
tcttgccctcctacc

SEQ ID NO: 301664 - DNA, 15 bp, Homo sapiens
ttcttgccctcctac

SEQ ID NO: 301665 - DNA, 15 bp, Homo sapiens
tttcttgccctccta

SEQ ID NO: 301666 - DNA, 15 bp, Homo sapiens
ttttcttgccctcct

SEQ ID NO: 301667 - DNA, 15 bp, Homo sapiens
cttttcttgccctcc

SEQ ID NO: 301668 - DNA, 15 bp, Homo sapiens
ccttttcttgccctc

SEQ ID NO: 301669 - DNA, 15 bp, Homo sapiens
cccttttcttgccct

SEQ ID NO: 301670 - DNA, 15 bp, Homo sapiens
tcccttttcttgccc

SEQ ID NO: 301671 - DNA, 15 bp, Homo sapiens
ctcccttttcttgcc

SEQ ID NO: 301672 - DNA, 15 bp, Homo sapiens
actcccttttcttgc

SEQ ID NO: 301673 - DNA, 15 bp, Homo sapiens
tactcccttttcttg

SEQ ID NO: 301674 - DNA, 15 bp, Homo sapiens
atactcccttttctt

SEQ ID NO: 301675 - DNA, 15 bp, Homo sapiens
tatactcccttttct

SEQ ID NO: 301676 - DNA, 15 bp, Homo sapiens
ttatactcccttttc

SEQ ID NO: 301677 - DNA, 15 bp, Homo sapiens
cttatactccctttt

SEQ ID NO: 301678 - DNA, 15 bp, Homo sapiens
ccttatactcccttt

SEQ ID NO: 301679 - DNA, 15 bp, Homo sapiens
gccttatactccctt

SEQ ID NO: 301680 - DNA, 15 bp, Homo sapiens
tgccttatactccct

SEQ ID NO: 301681 - DNA, 15 bp, Homo sapiens
atgccttatactccc

SEQ ID NO: 301682 - DNA, 15 bp, Homo sapiens
tatgccttatactcc

SEQ ID NO: 301683 - DNA, 15 bp, Homo sapiens
ttatgccttatactc

SEQ ID NO: 301684 - DNA, 15 bp, Homo sapiens
cttatgccttatact

SEQ ID NO: 301685 - DNA, 15 bp, Homo sapiens
acttatgccttatac

SEQ ID NO: 301686 - DNA, 15 bp, Homo sapiens
aacttatgccttata

SEQ ID NO: 301687 - DNA, 15 bp, Homo sapiens
taacttatgccttat

SEQ ID NO: 301688 - DNA, 15 bp, Homo sapiens
ttaacttatgcctta

SEQ ID NO: 301689 - DNA, 15 bp, Homo sapiens
tttaacttatgcctt

SEQ ID NO: 301690 - DNA, 15 bp, Homo sapiens
atttaacttatgcct

SEQ ID NO: 301691 - DNA, 15 bp, Homo sapiens
tatttaacttatgcc

SEQ ID NO: 301692 - DNA, 15 bp, Homo sapiens
ctatttaacttatgc

SEQ ID NO: 301693 - DNA, 15 bp, Homo sapiens
cctatttaacttatg

SEQ ID NO: 301694 - DNA, 15 bp, Homo sapiens
ccctatttaacttat

SEQ ID NO: 301695 - DNA, 15 bp, Homo sapiens
cccctatttaactta

SEQ ID NO: 301696 - DNA, 15 bp, Homo sapiens
tcccctatttaactt

SEQ ID NO: 301697 - DNA, 15 bp, Homo sapiens
gtcccctatttaact

SEQ ID NO: 301698 - DNA, 15 bp, Homo sapiens
agtcccctatttaac

SEQ ID NO: 301699 - DNA, 15 bp, Homo sapiens
cagtcccctatttaa

SEQ ID NO: 301700 - DNA, 15 bp, Homo sapiens
ccagtcccctattta

SEQ ID NO: 301701 - DNA, 15 bp, Homo sapiens
accagtcccctattt

SEQ ID NO: 301702 - DNA, 15 bp, Homo sapiens
caccagtcccctatt

SEQ ID NO: 301703 - DNA, 15 bp, Homo sapiens
tcaccagtcccctat

SEQ ID NO: 301704 - DNA, 15 bp, Homo sapiens
ctcaccagtccccta

SEQ ID NO: 301705 - DNA, 15 bp, Homo sapiens
tctcaccagtcccct

SEQ ID NO: 301706 - DNA, 15 bp, Homo sapiens
atctcaccagtcccc

SEQ ID NO: 301707 - DNA, 15 bp, Homo sapiens
catctcaccagtccc

SEQ ID NO: 301708 - DNA, 15 bp, Homo sapiens
tcatctcaccagtcc

SEQ ID NO: 301709 - DNA, 15 bp, Homo sapiens
gtcatctcaccagtc

SEQ ID NO: 301710 - DNA, 15 bp, Homo sapiens
ggtcatctcaccagt

SEQ ID NO: 301711 - DNA, 15 bp, Homo sapiens
tggtcatctcaccag

SEQ ID NO: 301712 - DNA, 15 bp, Homo sapiens
ctggtcatctcacca

SEQ ID NO: 301713 - DNA, 15 bp, Homo sapiens
cctggtcatctcacc

SEQ ID NO: 301714 - DNA, 15 bp, Homo sapiens
ccctggtcatctcac

SEQ ID NO: 301715 - DNA, 15 bp, Homo sapiens
cccctggtcatctca

SEQ ID NO: 301716 - DNA, 15 bp, Homo sapiens
tcccctggtcatctc

SEQ ID NO: 301717 - DNA, 15 bp, Homo sapiens
ctcccctggtcatct

SEQ ID NO: 301718 - DNA, 15 bp, Homo sapiens
cctcccctggtcatc

SEQ ID NO: 301719 - DNA, 15 bp, Homo sapiens
gcctcccctggtcat

SEQ ID NO: 301720 - DNA, 15 bp, Homo sapiens
ggcctcccctggtca

SEQ ID NO: 301721 - DNA, 15 bp, Homo sapiens
gggcctcccctggtc

SEQ ID NO: 301722 - DNA, 15 bp, Homo sapiens
tgggcctcccctggt

SEQ ID NO: 301723 - DNA, 15 bp, Homo sapiens
ttgggcctcccctgg

SEQ ID NO: 301724 - DNA, 15 bp, Homo sapiens
tttgggcctcccctg

SEQ ID NO: 301725 - DNA, 15 bp, Homo sapiens
ctttgggcctcccct

SEQ ID NO: 301726 - DNA, 15 bp, Homo sapiens
tctttgggcctcccc

SEQ ID NO: 301727 - DNA, 15 bp, Homo sapiens
ctctttgggcctccc

SEQ ID NO: 301728 - DNA, 15 bp, Homo sapiens
actctttgggcctcc

SEQ ID NO: 301729 - DNA, 15 bp, Homo sapiens
gactctttgggcctc

SEQ ID NO: 301730 - DNA, 15 bp, Homo sapiens
ggactctttgggcct

SEQ ID NO: 301731 - DNA, 15 bp, Homo sapiens
tggactctttgggcc

SEQ ID NO: 301732 - DNA, 15 bp, Homo sapiens
ttggactctttgggc

SEQ ID NO: 301733 - DNA, 15 bp, Homo sapiens
cttggactctttggg

SEQ ID NO: 301734 - DNA, 15 bp, Homo sapiens
ccttggactctttgg

SEQ ID NO: 301735 - DNA, 15 bp, Homo sapiens
gccttggactctttg

SEQ ID NO: 301736 - DNA, 15 bp, Homo sapiens
tgccttggactcttt

SEQ ID NO: 301737 - DNA, 15 bp, Homo sapiens
ttgccttggactctt

SEQ ID NO: 301738 - DNA, 15 bp, Homo sapiens
tttgccttggactct

SEQ ID NO: 301739 - DNA, 15 bp, Homo sapiens
gtttgccttggactc

SEQ ID NO: 301740 - DNA, 15 bp, Homo sapiens
tgtttgccttggact

SEQ ID NO: 301741 - DNA, 15 bp, Homo sapiens
atgtttgccttggac

SEQ ID NO: 301742 - DNA, 15 bp, Homo sapiens
gatgtttgccttgga

SEQ ID NO: 301743 - DNA, 15 bp, Homo sapiens
agatgtttgccttgg

SEQ ID NO: 301744 - DNA, 15 bp, Homo sapiens
cagatgtttgccttg

SEQ ID NO: 301745 - DNA, 15 bp, Homo sapiens
ccagatgtttgcctt

SEQ ID NO: 301746 - DNA, 15 bp, Homo sapiens
tccagatgtttgcct

SEQ ID NO: 301747 - DNA, 15 bp, Homo sapiens
ctccagatgtttgcc

SEQ ID NO: 301748 - DNA, 15 bp, Homo sapiens
tctccagatgtttgc

SEQ ID NO: 301749 - DNA, 15 bp, Homo sapiens
ttctccagatgtttg

SEQ ID NO: 301750 - DNA, 15 bp, Homo sapiens
cttctccagatgttt

SEQ ID NO: 301751 - DNA, 15 bp, Homo sapiens
ccttctccagatgtt

SEQ ID NO: 301752 - DNA, 15 bp, Homo sapiens
gccttctccagatgt

SEQ ID NO: 301753 - DNA, 15 bp, Homo sapiens
agccttctccagatg

SEQ ID NO: 301754 - DNA, 15 bp, Homo sapiens
gagccttctccagat

SEQ ID NO: 301755 - DNA, 15 bp, Homo sapiens
tgagccttctccaga

SEQ ID NO: 301756 - DNA, 15 bp, Homo sapiens
ctgagccttctccag

SEQ ID NO: 301757 - DNA, 15 bp, Homo sapiens
tctgagccttctcca

SEQ ID NO: 301758 - DNA, 15 bp, Homo sapiens
gtctgagccttctcc

SEQ ID NO: 301759 - DNA, 15 bp, Homo sapiens
tgtctgagccttctc

SEQ ID NO: 301760 - DNA, 15 bp, Homo sapiens
ctgtctgagccttct

SEQ ID NO: 301761 - DNA, 15 bp, Homo sapiens
tctgtctgagccttc

SEQ ID NO: 301762 - DNA, 15 bp, Homo sapiens
ttctgtctgagcctt

SEQ ID NO: 301763 - DNA, 15 bp, Homo sapiens
attctgtctgagcct

SEQ ID NO: 301764 - DNA, 15 bp, Homo sapiens
aattctgtctgagcc

SEQ ID NO: 301765 - DNA, 15 bp, Homo sapiens
aaattctgtctgagc

SEQ ID NO: 301766 - DNA, 15 bp, Homo sapiens
aaaattctgtctgag

SEQ ID NO: 301767 - DNA, 15 bp, Homo sapiens
caaaattctgtctga

SEQ ID NO: 301768 - DNA, 15 bp, Homo sapiens
tcaaaattctgtctg

SEQ ID NO: 301769 - DNA, 15 bp, Homo sapiens
ttcaaaattctgtct

SEQ ID NO: 301770 - DNA, 15 bp, Homo sapiens
cttcaaaattctgtc

SEQ ID NO: 301771 - DNA, 15 bp, Homo sapiens
acttcaaaattctgt

SEQ ID NO: 301772 - DNA, 15 bp, Homo sapiens
gacttcaaaattctg

SEQ ID NO: 301773 - DNA, 15 bp, Homo sapiens
agacttcaaaattct

SEQ ID NO: 301774 - DNA, 15 bp, Homo sapiens
cagacttcaaaattc

SEQ ID NO: 301775 - DNA, 15 bp, Homo sapiens
gcagacttcaaaatt

SEQ ID NO: 301776 - DNA, 15 bp, Homo sapiens
tgcagacttcaaaat

SEQ ID NO: 301777 - DNA, 15 bp, Homo sapiens
atgcagacttcaaaa

SEQ ID NO: 301778 - DNA, 15 bp, Homo sapiens
gatgcagacttcaaa

SEQ ID NO: 301779 - DNA, 15 bp, Homo sapiens
agatgcagacttcaa

SEQ ID NO: 301780 - DNA, 15 bp, Homo sapiens
tagatgcagacttca

SEQ ID NO: 301781 - DNA, 15 bp, Homo sapiens
ctagatgcagacttc

SEQ ID NO: 301782 - DNA, 15 bp, Homo sapiens
actagatgcagactt

SEQ ID NO: 301783 - DNA, 15 bp, Homo sapiens
tactagatgcagact

SEQ ID NO: 301784 - DNA, 15 bp, Homo sapiens
ttactagatgcagac

SEQ ID NO: 301785 - DNA, 15 bp, Homo sapiens
gttactagatgcaga

SEQ ID NO: 301786 - DNA, 15 bp, Homo sapiens
tgttactagatgcag

SEQ ID NO: 301787 - DNA, 15 bp, Homo sapiens
ctgttactagatgca

SEQ ID NO: 301788 - DNA, 15 bp, Homo sapiens
gctgttactagatgc

SEQ ID NO: 301789 - DNA, 15 bp, Homo sapiens
ggctgttactagatg

SEQ ID NO: 301790 - DNA, 15 bp, Homo sapiens
gggctgttactagat

SEQ ID NO: 301791 - DNA, 15 bp, Homo sapiens
tgggctgttactaga

SEQ ID NO: 301792 - DNA, 15 bp, Homo sapiens
ttgggctgttactag

SEQ ID NO: 301793 - DNA, 15 bp, Homo sapiens
tttgggctgttacta

SEQ ID NO: 301794 - DNA, 15 bp, Homo sapiens
ctttgggctgttact

SEQ ID NO: 301795 - DNA, 15 bp, Homo sapiens
tctttgggctgttac

SEQ ID NO: 301796 - DNA, 15 bp, Homo sapiens
ttctttgggctgtta

SEQ ID NO: 301797 - DNA, 15 bp, Homo sapiens
cttctttgggctgtt

SEQ ID NO: 301798 - DNA, 15 bp, Homo sapiens
acttctttgggctgt

SEQ ID NO: 301799 - DNA, 15 bp, Homo sapiens
gacttctttgggctg

SEQ ID NO: 301800 - DNA, 15 bp, Homo sapiens
ggacttctttgggct

SEQ ID NO: 301801 - DNA, 15 bp, Homo sapiens
gggacttctttgggc

SEQ ID NO: 301802 - DNA, 15 bp, Homo sapiens
tgggacttctttggg

SEQ ID NO: 301803 - DNA, 15 bp, Homo sapiens
gtgggacttctttgg

SEQ ID NO: 301804 - DNA, 15 bp, Homo sapiens
tgtgggacttctttg

SEQ ID NO: 301805 - DNA, 15 bp, Homo sapiens
ctgtgggacttcttt

SEQ ID NO: 301806 - DNA, 15 bp, Homo sapiens
actgtgggacttctt

SEQ ID NO: 301807 - DNA, 15 bp, Homo sapiens
cactgtgggacttct

SEQ ID NO: 301808 - DNA, 15 bp, Homo sapiens
tcactgtgggacttc

SEQ ID NO: 301809 - DNA, 15 bp, Homo sapiens
atcactgtgggactt

SEQ ID NO: 301810 - DNA, 15 bp, Homo sapiens
aatcactgtgggact

SEQ ID NO: 301811 - DNA, 15 bp, Homo sapiens
aaatcactgtgggac

SEQ ID NO: 301812 - DNA, 15 bp, Homo sapiens
caaatcactgtggga

SEQ ID NO: 301813 - DNA, 15 bp, Homo sapiens
tcaaatcactgtggg

SEQ ID NO: 301814 - DNA, 15 bp, Homo sapiens
gtcaaatcactgtgg

SEQ ID NO: 301815 - DNA, 15 bp, Homo sapiens
tgtcaaatcactgtg

SEQ ID NO: 301816 - DNA, 15 bp, Homo sapiens
ctgtcaaatcactgt

SEQ ID NO: 301817 - DNA, 15 bp, Homo sapiens
actgtcaaatcactg

SEQ ID NO: 301818 - DNA, 15 bp, Homo sapiens
gactgtcaaatcact

SEQ ID NO: 301819 - DNA, 15 bp, Homo sapiens
agactgtcaaatcac

SEQ ID NO: 301820 - DNA, 15 bp, Homo sapiens
cagactgtcaaatca

SEQ ID NO: 301821 - DNA, 15 bp, Homo sapiens
acagactgtcaaatc

SEQ ID NO: 301822 - DNA, 15 bp, Homo sapiens
aacagactgtcaaat

SEQ ID NO: 301823 - DNA, 15 bp, Homo sapiens
taacagactgtcaaa

SEQ ID NO: 301824 - DNA, 15 bp, Homo sapiens
ataacagactgtcaa

SEQ ID NO: 301825 - DNA, 15 bp, Homo sapiens
cataacagactgtca

SEQ ID NO: 301826 - DNA, 15 bp, Homo sapiens
gcataacagactgtc

SEQ ID NO: 301827 - DNA, 15 bp, Homo sapiens
agcataacagactgt

SEQ ID NO: 301828 - DNA, 15 bp, Homo sapiens
tagcataacagactg

SEQ ID NO: 301829 - DNA, 15 bp, Homo sapiens
atagcataacagact

SEQ ID NO: 301830 - DNA, 15 bp, Homo sapiens
catagcataacagac

SEQ ID NO: 301831 - DNA, 15 bp, Homo sapiens
ccatagcataacaga

SEQ ID NO: 301832 - DNA, 15 bp, Homo sapiens
cccatagcataacag

SEQ ID NO: 301833 - DNA, 15 bp, Homo sapiens
tcccatagcataaca

SEQ ID NO: 301834 - DNA, 15 bp, Homo sapiens
ctcccatagcataac

SEQ ID NO: 301835 - DNA, 15 bp, Homo sapiens
actcccatagcataa

SEQ ID NO: 301836 - DNA, 15 bp, Homo sapiens
tactcccatagcata

SEQ ID NO: 301837 - DNA, 15 bp, Homo sapiens
gtactcccatagcat

SEQ ID NO: 301838 - DNA, 15 bp, Homo sapiens
ggtactcccatagca

SEQ ID NO: 301839 - DNA, 15 bp, Homo sapiens
tggtactcccatagc

SEQ ID NO: 301840 - DNA, 15 bp, Homo sapiens
ctggtactcccatag

SEQ ID NO: 301841 - DNA, 15 bp, Homo sapiens
gctggtactcccata

SEQ ID NO: 301842 - DNA, 15 bp, Homo sapiens
ggctggtactcccat

SEQ ID NO: 301843 - DNA, 15 bp, Homo sapiens
aggctggtactccca

SEQ ID NO: 301844 - DNA, 15 bp, Homo sapiens
taggctggtactccc

SEQ ID NO: 301845 - DNA, 15 bp, Homo sapiens
gtaggctggtactcc

SEQ ID NO: 301846 - DNA, 15 bp, Homo sapiens
ggtaggctggtactc

SEQ ID NO: 301847 - DNA, 15 bp, Homo sapiens
aggtaggctggtact

SEQ ID NO: 301848 - DNA, 15 bp, Homo sapiens
caggtaggctggtac

SEQ ID NO: 301849 - DNA, 15 bp, Homo sapiens
gcaggtaggctggta

SEQ ID NO: 301850 - DNA, 15 bp, Homo sapiens
ggcaggtaggctggt

SEQ ID NO: 301851 - DNA, 15 bp, Homo sapiens
gggcaggtaggctgg

SEQ ID NO: 301852 - DNA, 15 bp, Homo sapiens
tgggcaggtaggctg

SEQ ID NO: 301853 - DNA, 15 bp, Homo sapiens
ttgggcaggtaggct

SEQ ID NO: 301854 - DNA, 15 bp, Homo sapiens
gttgggcaggtaggc

SEQ ID NO: 301855 - DNA, 15 bp, Homo sapiens
ggttgggcaggtagg

SEQ ID NO: 301856 - DNA, 15 bp, Homo sapiens
cggttgggcaggtag

SEQ ID NO: 301857 - DNA, 15 bp, Homo sapiens
acggttgggcaggta

SEQ ID NO: 301858 - DNA, 15 bp, Homo sapiens
cacggttgggcaggt

SEQ ID NO: 301859 - DNA, 15 bp, Homo sapiens
gcacggttgggcagg

SEQ ID NO: 301860 - DNA, 15 bp, Homo sapiens
ggcacggttgggcag

SEQ ID NO: 301861 - DNA, 15 bp, Homo sapiens
gggcacggttgggca

SEQ ID NO: 301862 - DNA, 15 bp, Homo sapiens
agggcacggttgggc

SEQ ID NO: 301863 - DNA, 15 bp, Homo sapiens
cagggcacggttggg

SEQ ID NO: 301864 - DNA, 15 bp, Homo sapiens
tcagggcacggttgg

SEQ ID NO: 301865 - DNA, 15 bp, Homo sapiens
atcagggcacggttg

SEQ ID NO: 301866 - DNA, 15 bp, Homo sapiens
aatcagggcacggtt

SEQ ID NO: 301867 - DNA, 15 bp, Homo sapiens
caatcagggcacggt

SEQ ID NO: 301868 - DNA, 15 bp, Homo sapiens
ccaatcagggcacgg

SEQ ID NO: 301869 - DNA, 15 bp, Homo sapiens
gccaatcagggcacg

SEQ ID NO: 301870 - DNA, 15 bp, Homo sapiens
ggccaatcagggcac

SEQ ID NO: 301871 - DNA, 15 bp, Homo sapiens
tggccaatcagggca

SEQ ID NO: 301872 - DNA, 15 bp, Homo sapiens
ctggccaatcagggc

SEQ ID NO: 301873 - DNA, 15 bp, Homo sapiens
gctggccaatcaggg

SEQ ID NO: 301874 - DNA, 15 bp, Homo sapiens
ggctggccaatcagg

SEQ ID NO: 301875 - DNA, 15 bp, Homo sapiens
aggctggccaatcag

SEQ ID NO: 301876 - DNA, 15 bp, Homo sapiens
aaggctggccaatca

SEQ ID NO: 301877 - DNA, 15 bp, Homo sapiens
aaaggctggccaatc

SEQ ID NO: 301878 - DNA, 15 bp, Homo sapiens
caaaggctggccaat

SEQ ID NO: 301879 - DNA, 15 bp, Homo sapiens
ccaaaggctggccaa

SEQ ID NO: 301880 - DNA, 15 bp, Homo sapiens
gccaaaggctggcca

SEQ ID NO: 301881 - DNA, 15 bp, Homo sapiens
tgccaaaggctggcc

SEQ ID NO: 301882 - DNA, 15 bp, Homo sapiens
ttgccaaaggctggc

SEQ ID NO: 301883 - DNA, 15 bp, Homo sapiens
tttgccaaaggctgg

SEQ ID NO: 301884 - DNA, 15 bp, Homo sapiens
atttgccaaaggctg

SEQ ID NO: 301885 - DNA, 15 bp, Homo sapiens
tatttgccaaaggct

SEQ ID NO: 301886 - DNA, 15 bp, Homo sapiens
ctatttgccaaaggc

SEQ ID NO: 301887 - DNA, 15 bp, Homo sapiens
tctatttgccaaagg

SEQ ID NO: 301888 - DNA, 15 bp, Homo sapiens
ctctatttgccaaag

SEQ ID NO: 301889 - DNA, 15 bp, Homo sapiens
tctctatttgccaaa

SEQ ID NO: 301890 - DNA, 15 bp, Homo sapiens
ctctctatttgccaa

SEQ ID NO: 301891 - DNA, 15 bp, Homo sapiens
gctctctatttgcca

SEQ ID NO: 301892 - DNA, 15 bp, Homo sapiens
agctctctatttgcc

SEQ ID NO: 301893 - DNA, 15 bp, Homo sapiens
gagctctctatttgc

SEQ ID NO: 301894 - DNA, 15 bp, Homo sapiens
agagctctctatttg

SEQ ID NO: 301895 - DNA, 15 bp, Homo sapiens
aagagctctctattt

SEQ ID NO: 301896 - DNA, 15 bp, Homo sapiens
gaagagctctctatt

SEQ ID NO: 301897 - DNA, 15 bp, Homo sapiens
agaagagctctctat

SEQ ID NO: 301898 - DNA, 15 bp, Homo sapiens
aagaagagctctcta

SEQ ID NO: 301899 - DNA, 15 bp, Homo sapiens
aaagaagagctctct

SEQ ID NO: 301900 - DNA, 15 bp, Homo sapiens
aaaagaagagctctc

SEQ ID NO: 301901 - DNA, 15 bp, Homo sapiens
gaaaagaagagctct

SEQ ID NO: 301902 - DNA, 15 bp, Homo sapiens
agaaaagaagagctc

SEQ ID NO: 301903 - DNA, 15 bp, Homo sapiens
gagaaaagaagagct

SEQ ID NO: 301904 - DNA, 15 bp, Homo sapiens
agagaaaagaagagc

SEQ ID NO: 301905 - DNA, 15 bp, Homo sapiens
aagagaaaagaagag

SEQ ID NO: 301906 - DNA, 15 bp, Homo sapiens
taagagaaaagaaga

SEQ ID NO: 301907 - DNA, 15 bp, Homo sapiens
ctaagagaaaagaag

SEQ ID NO: 301908 - DNA, 15 bp, Homo sapiens
cctaagagaaaagaa

SEQ ID NO: 301909 - DNA, 15 bp, Homo sapiens
tcctaagagaaaaga

SEQ ID NO: 301910 - DNA, 15 bp, Homo sapiens
ctcctaagagaaaag

SEQ ID NO: 301911 - DNA, 15 bp, Homo sapiens
gctcctaagagaaaa

SEQ ID NO: 301912 - DNA, 15 bp, Homo sapiens
ggctcctaagagaaa

SEQ ID NO: 301913 - DNA, 15 bp, Homo sapiens
aggctcctaagagaa

SEQ ID NO: 301914 - DNA, 15 bp, Homo sapiens
gaggctcctaagaga

SEQ ID NO: 301915 - DNA, 15 bp, Homo sapiens
agaggctcctaagag

SEQ ID NO: 301916 - DNA, 15 bp, Homo sapiens
cagaggctcctaaga

SEQ ID NO: 301917 - DNA, 15 bp, Homo sapiens
gcagaggctcctaag

SEQ ID NO: 301918 - DNA, 15 bp, Homo sapiens
ggcagaggctcctaa

SEQ ID NO: 301919 - DNA, 15 bp, Homo sapiens
tggcagaggctccta

SEQ ID NO: 301920 - DNA, 15 bp, Homo sapiens
atggcagaggctcct

SEQ ID NO: 301921 - DNA, 15 bp, Homo sapiens
gatggcagaggctcc

SEQ ID NO: 301922 - DNA, 15 bp, Homo sapiens
ggatggcagaggctc

SEQ ID NO: 301923 - DNA, 15 bp, Homo sapiens
gggatggcagaggct

SEQ ID NO: 301924 - DNA, 15 bp, Homo sapiens
ggggatggcagaggc

SEQ ID NO: 301925 - DNA, 15 bp, Homo sapiens
aggggatggcagagg

SEQ ID NO: 301926 - DNA, 15 bp, Homo sapiens
caggggatggcagag

SEQ ID NO: 301927 - DNA, 15 bp, Homo sapiens
acaggggatggcaga

SEQ ID NO: 301928 - DNA, 15 bp, Homo sapiens
tacaggggatggcag

SEQ ID NO: 301929 - DNA, 15 bp, Homo sapiens
atacaggggatggca

SEQ ID NO: 301930 - DNA, 15 bp, Homo sapiens
catacaggggatggc

SEQ ID NO: 301931 - DNA, 15 bp, Homo sapiens
tcatacaggggatgg

SEQ ID NO: 301932 - DNA, 15 bp, Homo sapiens
ttcatacaggggatg

SEQ ID NO: 301933 - DNA, 15 bp, Homo sapiens
attcatacaggggat

SEQ ID NO: 301934 - DNA, 15 bp, Homo sapiens
tattcatacagggga

SEQ ID NO: 301935 - DNA, 15 bp, Homo sapiens
atattcatacagggg

SEQ ID NO: 301936 - DNA, 15 bp, Homo sapiens
catattcatacaggg

SEQ ID NO: 301937 - DNA, 15 bp, Homo sapiens
tcatattcatacagg

SEQ ID NO: 301938 - DNA, 15 bp, Homo sapiens
ctcatattcatacag

SEQ ID NO: 301939 - DNA, 15 bp, Homo sapiens
cctcatattcataca

SEQ ID NO: 301940 - DNA, 15 bp, Homo sapiens
ccctcatattcatac

SEQ ID NO: 301941 - DNA, 15 bp, Homo sapiens
gccctcatattcata

SEQ ID NO: 301942 - DNA, 15 bp, Homo sapiens
agccctcatattcat

SEQ ID NO: 301943 - DNA, 15 bp, Homo sapiens
aagccctcatattca

SEQ ID NO: 301944 - DNA, 15 bp, Homo sapiens
gaagccctcatattc

SEQ ID NO: 301945 - DNA, 15 bp, Homo sapiens
agaagccctcatatt

SEQ ID NO: 301946 - DNA, 15 bp, Homo sapiens
aagaagccctcatat

SEQ ID NO: 301947 - DNA, 15 bp, Homo sapiens
taagaagccctcata

SEQ ID NO: 301948 - DNA, 15 bp, Homo sapiens
ataagaagccctcat

SEQ ID NO: 301949 - DNA, 15 bp, Homo sapiens
aataagaagccctca

SEQ ID NO: 301950 - DNA, 15 bp, Homo sapiens
aaataagaagccctc

SEQ ID NO: 301951 - DNA, 15 bp, Homo sapiens
caaataagaagccct

SEQ ID NO: 301952 - DNA, 15 bp, Homo sapiens
ccaaataagaagccc

SEQ ID NO: 301953 - DNA, 15 bp, Homo sapiens
cccaaataagaagcc

SEQ ID NO: 301954 - DNA, 15 bp, Homo sapiens
tcccaaataagaagc

SEQ ID NO: 301955 - DNA, 15 bp, Homo sapiens
ttcccaaataagaag

SEQ ID NO: 301956 - DNA, 15 bp, Homo sapiens
cttcccaaataagaa

SEQ ID NO: 301957 - DNA, 15 bp, Homo sapiens
gcttcccaaataaga

SEQ ID NO: 301958 - DNA, 15 bp, Homo sapiens
ggcttcccaaataag

SEQ ID NO: 301959 - DNA, 15 bp, Homo sapiens
aggcttcccaaataa

SEQ ID NO: 301960 - DNA, 15 bp, Homo sapiens
aaggcttcccaaata

SEQ ID NO: 301961 - DNA, 15 bp, Homo sapiens
caaggcttcccaaat

SEQ ID NO: 301962 - DNA, 15 bp, Homo sapiens
tcaaggcttcccaaa

SEQ ID NO: 301963 - DNA, 15 bp, Homo sapiens
atcaaggcttcccaa

SEQ ID NO: 301964 - DNA, 15 bp, Homo sapiens
tatcaaggcttccca

SEQ ID NO: 301965 - DNA, 15 bp, Homo sapiens
atatcaaggcttccc

SEQ ID NO: 301966 - DNA, 15 bp, Homo sapiens
catatcaaggcttcc

SEQ ID NO: 301967 - DNA, 15 bp, Homo sapiens
tcatatcaaggcttc

SEQ ID NO: 301968 - DNA, 15 bp, Homo sapiens
ttcatatcaaggctt

SEQ ID NO: 301969 - DNA, 15 bp, Homo sapiens
cttcatatcaaggct

SEQ ID NO: 301970 - DNA, 15 bp, Homo sapiens
acttcatatcaaggc

SEQ ID NO: 301971 - DNA, 15 bp, Homo sapiens
cacttcatatcaagg

SEQ ID NO: 301972 - DNA, 15 bp, Homo sapiens
gcacttcatatcaag

SEQ ID NO: 301973 - DNA, 15 bp, Homo sapiens
ggcacttcatatcaa

SEQ ID NO: 301974 - DNA, 15 bp, Homo sapiens
aggcacttcatatca

SEQ ID NO: 301975 - DNA, 15 bp, Homo sapiens
aaggcacttcatatc

SEQ ID NO: 301976 - DNA, 15 bp, Homo sapiens
caaggcacttcatat

SEQ ID NO: 301977 - DNA, 15 bp, Homo sapiens
tcaaggcacttcata

SEQ ID NO: 301978 - DNA, 15 bp, Homo sapiens
ttcaaggcacttcat

SEQ ID NO: 301979 - DNA, 15 bp, Homo sapiens
tttcaaggcacttca

SEQ ID NO: 301980 - DNA, 15 bp, Homo sapiens
gtttcaaggcacttc

SEQ ID NO: 301981 - DNA, 15 bp, Homo sapiens
agtttcaaggcactt

SEQ ID NO: 301982 - DNA, 15 bp, Homo sapiens
cagtttcaaggcact

SEQ ID NO: 301983 - DNA, 15 bp, Homo sapiens
acagtttcaaggcac

SEQ ID NO: 301984 - DNA, 15 bp, Homo sapiens
tacagtttcaaggca

SEQ ID NO: 301985 - DNA, 15 bp, Homo sapiens
gtacagtttcaaggc

SEQ ID NO: 301986 - DNA, 15 bp, Homo sapiens
ggtacagtttcaagg

SEQ ID NO: 301987 - DNA, 15 bp, Homo sapiens
gggtacagtttcaag

SEQ ID NO: 301988 - DNA, 15 bp, Homo sapiens
agggtacagtttcaa

SEQ ID NO: 301989 - DNA, 15 bp, Homo sapiens
cagggtacagtttca

SEQ ID NO: 301990 - DNA, 15 bp, Homo sapiens
tcagggtacagtttc

SEQ ID NO: 301991 - DNA, 15 bp, Homo sapiens
ctcagggtacagttt

SEQ ID NO: 301992 - DNA, 15 bp, Homo sapiens
gctcagggtacagtt

SEQ ID NO: 301993 - DNA, 15 bp, Homo sapiens
agctcagggtacagt

SEQ ID NO: 301994 - DNA, 15 bp, Homo sapiens
tagctcagggtacag

SEQ ID NO: 301995 - DNA, 15 bp, Homo sapiens
gtagctcagggtaca

SEQ ID NO: 301996 - DNA, 15 bp, Homo sapiens
agtagctcagggtac

SEQ ID NO: 301997 - DNA, 15 bp, Homo sapiens
aagtagctcagggta

SEQ ID NO: 301998 - DNA, 15 bp, Homo sapiens
aaagtagctcagggt

SEQ ID NO: 301999 - DNA, 15 bp, Homo sapiens
gaaagtagctcaggg

SEQ ID NO: 302000 - DNA, 15 bp, Homo sapiens
agaaagtagctcagg

SEQ ID NO: 302001 - DNA, 15 bp, Homo sapiens
gagaaagtagctcag

SEQ ID NO: 302002 - DNA, 15 bp, Homo sapiens
agagaaagtagctca

SEQ ID NO: 302003 - DNA, 15 bp, Homo sapiens
tagagaaagtagctc

SEQ ID NO: 302004 - DNA, 15 bp, Homo sapiens
ctagagaaagtagct

SEQ ID NO: 302005 - DNA, 15 bp, Homo sapiens
cctagagaaagtagc

SEQ ID NO: 302006 - DNA, 15 bp, Homo sapiens
tcctagagaaagtag

SEQ ID NO: 302007 - DNA, 15 bp, Homo sapiens
atcctagagaaagta

SEQ ID NO: 302008 - DNA, 15 bp, Homo sapiens
catcctagagaaagt

SEQ ID NO: 302009 - DNA, 15 bp, Homo sapiens
gcatcctagagaaag

SEQ ID NO: 302010 - DNA, 15 bp, Homo sapiens
ggcatcctagagaaa

SEQ ID NO: 302011 - DNA, 15 bp, Homo sapiens
gggcatcctagagaa

SEQ ID NO: 302012 - DNA, 15 bp, Homo sapiens
agggcatcctagaga

SEQ ID NO: 302013 - DNA, 15 bp, Homo sapiens
gagggcatcctagag

SEQ ID NO: 302014 - DNA, 15 bp, Homo sapiens
agagggcatcctaga

SEQ ID NO: 302015 - DNA, 15 bp, Homo sapiens
gagagggcatcctag

SEQ ID NO: 302016 - DNA, 15 bp, Homo sapiens
agagagggcatccta

SEQ ID NO: 302017 - DNA, 15 bp, Homo sapiens
aagagagggcatcct

SEQ ID NO: 302018 - DNA, 15 bp, Homo sapiens
aaagagagggcatcc

SEQ ID NO: 302019 - DNA, 15 bp, Homo sapiens
gaaagagagggcatc

SEQ ID NO: 302020 - DNA, 15 bp, Homo sapiens
tgaaagagagggcat

SEQ ID NO: 302021 - DNA, 15 bp, Homo sapiens
ctgaaagagagggca

SEQ ID NO: 302022 - DNA, 15 bp, Homo sapiens
tctgaaagagagggc

SEQ ID NO: 302023 - DNA, 15 bp, Homo sapiens
ttctgaaagagaggg

SEQ ID NO: 302024 - DNA, 15 bp, Homo sapiens
tttctgaaagagagg

SEQ ID NO: 302025 - DNA, 15 bp, Homo sapiens
atttctgaaagagag

SEQ ID NO: 302026 - DNA, 15 bp, Homo sapiens
catttctgaaagaga

SEQ ID NO: 302027 - DNA, 15 bp, Homo sapiens
acatttctgaaagag

SEQ ID NO: 302028 - DNA, 15 bp, Homo sapiens
cacatttctgaaaga

SEQ ID NO: 302029 - DNA, 15 bp, Homo sapiens
tcacatttctgaaag

SEQ ID NO: 302030 - DNA, 15 bp, Homo sapiens
gctcacatttctgaa

SEQ ID NO: 302031 - DNA, 15 bp, Homo sapiens
agctcacatttctga

SEQ ID NO: 302032 - DNA, 15 bp, Homo sapiens
gagctcacatttctg

SEQ ID NO: 302033 - DNA, 15 bp, Homo sapiens
ggagctcacatttct

SEQ ID NO: 302034 - DNA, 15 bp, Homo sapiens
tggagctcacatttc

SEQ ID NO: 302035 - DNA, 15 bp, Homo sapiens
ctggagctcacattt

SEQ ID NO: 302036 - DNA, 15 bp, Homo sapiens
cctggagctcacatt

SEQ ID NO: 302037 - DNA, 15 bp, Homo sapiens
gcctggagctcacat

SEQ ID NO: 302038 - DNA, 15 bp, Homo sapiens
agcctggagctcaca

SEQ ID NO: 302039 - DNA, 15 bp, Homo sapiens
cagcctggagctcac

SEQ ID NO: 302040 - DNA, 15 bp, Homo sapiens
acagcctggagctca

SEQ ID NO: 302041 - DNA, 15 bp, Homo sapiens
aacagcctggagctc

SEQ ID NO: 302042 - DNA, 15 bp, Homo sapiens
caacagcctggagct

SEQ ID NO: 302043 - DNA, 15 bp, Homo sapiens
gcaacagcctggagc

SEQ ID NO: 302044 - DNA, 15 bp, Homo sapiens
agcaacagcctggag

SEQ ID NO: 302045 - DNA, 15 bp, Homo sapiens
ggggagcaacagcct

SEQ ID NO: 302046 - DNA, 15 bp, Homo sapiens
tggggagcaacagcc

SEQ ID NO: 302047 - DNA, 15 bp, Homo sapiens
ttggggagcaacagc

SEQ ID NO: 302048 - DNA, 15 bp, Homo sapiens
attggggagcaacag

SEQ ID NO: 302049 - DNA, 15 bp, Homo sapiens
cattggggagcaaca

SEQ ID NO: 302050 - DNA, 15 bp, Homo sapiens
ccattggggagcaac

SEQ ID NO: 302051 - DNA, 15 bp, Homo sapiens
gccattggggagcaa

SEQ ID NO: 302052 - DNA, 15 bp, Homo sapiens
agccattggggagca

SEQ ID NO: 302053 - DNA, 15 bp, Homo sapiens
tagccattggggagc

SEQ ID NO: 302054 - DNA, 15 bp, Homo sapiens
ctagccattggggag

SEQ ID NO: 302055 - DNA, 15 bp, Homo sapiens
cctagccattgggga

SEQ ID NO: 302056 - DNA, 15 bp, Homo sapiens
ccctagccattgggg

SEQ ID NO: 302057 - DNA, 15 bp, Homo sapiens
cccctagccattggg

SEQ ID NO: 302058 - DNA, 15 bp, Homo sapiens
acccctagccattgg

SEQ ID NO: 302059 - DNA, 15 bp, Homo sapiens
aacccctagccattg

SEQ ID NO: 302060 - DNA, 15 bp, Homo sapiens
caacccctagccatt

SEQ ID NO: 302061 - DNA, 15 bp, Homo sapiens
acaacccctagccat

SEQ ID NO: 302062 - DNA, 15 bp, Homo sapiens
aacaacccctagcca

SEQ ID NO: 302063 - DNA, 15 bp, Homo sapiens
caacaacccctagcc

SEQ ID NO: 302064 - DNA, 15 bp, Homo sapiens
ccaacaacccctagc

SEQ ID NO: 302065 - DNA, 15 bp, Homo sapiens
gccaacaacccctag

SEQ ID NO: 302066 - DNA, 15 bp, Homo sapiens
agccaacaaccccta

SEQ ID NO: 302067 - DNA, 15 bp, Homo sapiens
tagccaacaacccct

SEQ ID NO: 302068 - DNA, 15 bp, Homo sapiens
atagccaacaacccc

SEQ ID NO: 302069 - DNA, 15 bp, Homo sapiens
gatagccaacaaccc

SEQ ID NO: 302070 - DNA, 15 bp, Homo sapiens
ggatagccaacaacc

SEQ ID NO: 302071 - DNA, 15 bp, Homo sapiens
gggatagccaacaac

SEQ ID NO: 302072 - DNA, 15 bp, Homo sapiens
agggatagccaacaa

SEQ ID NO: 302073 - DNA, 15 bp, Homo sapiens
cagggatagccaaca

SEQ ID NO: 302074 - DNA, 15 bp, Homo sapiens
ccagggatagccaac

SEQ ID NO: 302075 - DNA, 15 bp, Homo sapiens
accagggatagccaa

SEQ ID NO: 302076 - DNA, 15 bp, Homo sapiens
aaccagggatagcca

SEQ ID NO: 302077 - DNA, 15 bp, Homo sapiens
taaccagggatagcc

SEQ ID NO: 302078 - DNA, 15 bp, Homo sapiens
ataaccagggatagc

SEQ ID NO: 302079 - DNA, 15 bp, Homo sapiens
tataaccagggatag

SEQ ID NO: 302080 - DNA, 15 bp, Homo sapiens
ctataaccagggata

SEQ ID NO: 302081 - DNA, 15 bp, Homo sapiens
tctataaccagggat

SEQ ID NO: 302082 - DNA, 15 bp, Homo sapiens
atctataaccaggga

SEQ ID NO: 302083 - DNA, 15 bp, Homo sapiens
aatctataaccaggg

SEQ ID NO: 302084 - DNA, 15 bp, Homo sapiens
taatctataaccagg

SEQ ID NO: 302085 - DNA, 15 bp, Homo sapiens
ataatctataaccag

SEQ ID NO: 302086 - DNA, 15 bp, Homo sapiens
aataatctataacca

SEQ ID NO: 302087 - DNA, 15 bp, Homo sapiens
caataatctataacc

SEQ ID NO: 302088 - DNA, 15 bp, Homo sapiens
acaataatctataac

SEQ ID NO: 302089 - DNA, 15 bp, Homo sapiens
aacaataatctataa

SEQ ID NO: 302090 - DNA, 15 bp, Homo sapiens
aaacaataatctata

SEQ ID NO: 302091 - DNA, 15 bp, Homo sapiens
taaacaataatctat

SEQ ID NO: 302092 - DNA, 15 bp, Homo sapiens
ataaacaataatcta

SEQ ID NO: 302093 - DNA, 15 bp, Homo sapiens
gataaacaataatct

SEQ ID NO: 302094 - DNA, 15 bp, Homo sapiens
tgataaacaataatc

SEQ ID NO: 302095 - DNA, 15 bp, Homo sapiens
ctgataaacaataat

SEQ ID NO: 302096 - DNA, 15 bp, Homo sapiens
gctgataaacaataa

SEQ ID NO: 302097 - DNA, 15 bp, Homo sapiens
ggctgataaacaata

SEQ ID NO: 302098 - DNA, 15 bp, Homo sapiens
aggctgataaacaat

SEQ ID NO: 302099 - DNA, 15 bp, Homo sapiens
gaggctgataaacaa

SEQ ID NO: 302100 - DNA, 15 bp, Homo sapiens
ggaggctgataaaca

SEQ ID NO: 302101 - DNA, 15 bp, Homo sapiens
aggaggctgataaac

SEQ ID NO: 302102 - DNA, 15 bp, Homo sapiens
taggaggctgataaa

SEQ ID NO: 302103 - DNA, 15 bp, Homo sapiens
ctaggaggctgataa

SEQ ID NO: 302104 - DNA, 15 bp, Homo sapiens
gctaggaggctgata

SEQ ID NO: 302105 - DNA, 15 bp, Homo sapiens
tgctaggaggctgat

SEQ ID NO: 302106 - DNA, 15 bp, Homo sapiens
gtgctaggaggctga

SEQ ID NO: 302107 - DNA, 15 bp, Homo sapiens
tgtgctaggaggctg

SEQ ID NO: 302108 - DNA, 15 bp, Homo sapiens
atgtgctaggaggct

SEQ ID NO: 302109 - DNA, 15 bp, Homo sapiens
tatgtgctaggaggc

SEQ ID NO: 302110 - DNA, 15 bp, Homo sapiens
ctatgtgctaggagg

SEQ ID NO: 302111 - DNA, 15 bp, Homo sapiens
cctatgtgctaggag

SEQ ID NO: 302112 - DNA, 15 bp, Homo sapiens
acctatgtgctagga

SEQ ID NO: 302113 - DNA, 15 bp, Homo sapiens
cacctatgtgctagg

SEQ ID NO: 302114 - DNA, 15 bp, Homo sapiens
ccacctatgtgctag

SEQ ID NO: 302115 - DNA, 15 bp, Homo sapiens
gccacctatgtgcta

SEQ ID NO: 302116 - DNA, 15 bp, Homo sapiens
tgccacctatgtgct

SEQ ID NO: 302117 - DNA, 15 bp, Homo sapiens
ttgccacctatgtgc

SEQ ID NO: 302118 - DNA, 15 bp, Homo sapiens
attgccacctatgtg

SEQ ID NO: 302119 - DNA, 15 bp, Homo sapiens
aattgccacctatgt

SEQ ID NO: 302120 - DNA, 15 bp, Homo sapiens
aaattgccacctatg

SEQ ID NO: 302121 - DNA, 15 bp, Homo sapiens
aaaattgccacctat

SEQ ID NO: 302122 - DNA, 15 bp, Homo sapiens
taaaattgccaccta

SEQ ID NO: 302123 - DNA, 15 bp, Homo sapiens
ttaaaattgccacct

SEQ ID NO: 302124 - DNA, 15 bp, Homo sapiens
attaaaattgccacc

SEQ ID NO: 302125 - DNA, 15 bp, Homo sapiens
tattaaaattgccac

SEQ ID NO: 302126 - DNA, 15 bp, Homo sapiens
atattaaaattgcca

SEQ ID NO: 302127 - DNA, 15 bp, Homo sapiens
gatattaaaattgcc

SEQ ID NO: 302128 - DNA, 15 bp, Homo sapiens
ggatattaaaattgc

SEQ ID NO: 302129 - DNA, 15 bp, Homo sapiens
tggatattaaaattg

SEQ ID NO: 302130 - DNA, 15 bp, Homo sapiens
ctggatattaaaatt

SEQ ID NO: 302131 - DNA, 15 bp, Homo sapiens
tctggatattaaaat

SEQ ID NO: 302132 - DNA, 15 bp, Homo sapiens
ttctggatattaaaa

SEQ ID NO: 302133 - DNA, 15 bp, Homo sapiens
tttctggatattaaa

SEQ ID NO: 302134 - DNA, 15 bp, Homo sapiens
ttttctggatattaa

SEQ ID NO: 302135 - DNA, 15 bp, Homo sapiens
tttttctggatatta

SEQ ID NO: 302136 - DNA, 15 bp, Homo sapiens
ttttttctggatatt

SEQ ID NO: 302137 - DNA, 15 bp, Homo sapiens
tttttttctggatat

SEQ ID NO: 302138 - DNA, 15 bp, Homo sapiens
ttttttttctggata

SEQ ID NO: 302139 - DNA, 15 bp, Homo sapiens
cttttttttctggat

SEQ ID NO: 302140 - DNA, 15 bp, Homo sapiens
ccttttttttctgga

SEQ ID NO: 302141 - DNA, 15 bp, Homo sapiens
gccttttttttctgg

SEQ ID NO: 302142 - DNA, 15 bp, Homo sapiens
tgccttttttttctg

SEQ ID NO: 302143 - DNA, 15 bp, Homo sapiens
atgccttttttttct

SEQ ID NO: 302144 - DNA, 15 bp, Homo sapiens
tatgccttttttttc

SEQ ID NO: 302145 - DNA, 15 bp, Homo sapiens
ctatgcctttttttt

SEQ ID NO: 302146 - DNA, 15 bp, Homo sapiens
cctatgccttttttt

SEQ ID NO: 302147 - DNA, 15 bp, Homo sapiens
tcctatgcctttttt

SEQ ID NO: 302148 - DNA, 15 bp, Homo sapiens
ttcctatgccttttt

SEQ ID NO: 302149 - DNA, 15 bp, Homo sapiens
cttcctatgcctttt

SEQ ID NO: 302150 - DNA, 15 bp, Homo sapiens
gcttcctatgccttt

SEQ ID NO: 302151 - DNA, 15 bp, Homo sapiens
tgcttcctatgcctt

SEQ ID NO: 302152 - DNA, 15 bp, Homo sapiens
ctgcttcctatgcct

SEQ ID NO: 302153 - DNA, 15 bp, Homo sapiens
tctgcttcctatgcc

SEQ ID NO: 302154 - DNA, 15 bp, Homo sapiens
ttctgcttcctatgc

SEQ ID NO: 302155 - DNA, 15 bp, Homo sapiens
attctgcttcctatg

SEQ ID NO: 302156 - DNA, 15 bp, Homo sapiens
cattctgcttcctat

SEQ ID NO: 302157 - DNA, 15 bp, Homo sapiens
acattctgcttccta

SEQ ID NO: 302158 - DNA, 15 bp, Homo sapiens
tacattctgcttcct

SEQ ID NO: 302159 - DNA, 15 bp, Homo sapiens
ctacattctgcttcc

SEQ ID NO: 302160 - DNA, 15 bp, Homo sapiens
actacattctgcttc

SEQ ID NO: 302161 - DNA, 15 bp, Homo sapiens
cactacattctgctt

SEQ ID NO: 302162 - DNA, 15 bp, Homo sapiens
ccactacattctgct

SEQ ID NO: 302163 - DNA, 15 bp, Homo sapiens
accactacattctgc

SEQ ID NO: 302164 - DNA, 15 bp, Homo sapiens
aaccactacattctg

SEQ ID NO: 302165 - DNA, 15 bp, Homo sapiens
taaccactacattct

SEQ ID NO: 302166 - DNA, 15 bp, Homo sapiens
gtaaccactacattc

SEQ ID NO: 302167 - DNA, 15 bp, Homo sapiens
tgtaaccactacatt

SEQ ID NO: 302168 - DNA, 15 bp, Homo sapiens
atgtaaccactacat

SEQ ID NO: 302169 - DNA, 15 bp, Homo sapiens
catgtaaccactaca

SEQ ID NO: 302170 - DNA, 15 bp, Homo sapiens
tcatgtaaccactac

SEQ ID NO: 302171 - DNA, 15 bp, Homo sapiens
ttcatgtaaccacta

SEQ ID NO: 302172 - DNA, 15 bp, Homo sapiens
attcatgtaaccact

SEQ ID NO: 302173 - DNA, 15 bp, Homo sapiens
tattcatgtaaccac

SEQ ID NO: 302174 - DNA, 15 bp, Homo sapiens
ctattcatgtaacca

SEQ ID NO: 302175 - DNA, 15 bp, Homo sapiens
actattcatgtaacc

SEQ ID NO: 302176 - DNA, 15 bp, Homo sapiens
gactattcatgtaac

SEQ ID NO: 302177 - DNA, 15 bp, Homo sapiens
agactattcatgtaa

SEQ ID NO: 302178 - DNA, 15 bp, Homo sapiens
tagactattcatgta

SEQ ID NO: 302179 - DNA, 15 bp, Homo sapiens
atagactattcatgt

SEQ ID NO: 302180 - DNA, 15 bp, Homo sapiens
aatagactattcatg

SEQ ID NO: 302181 - DNA, 15 bp, Homo sapiens
gaatagactattcat

SEQ ID NO: 302182 - DNA, 15 bp, Homo sapiens
agaatagactattca

SEQ ID NO: 302183 - DNA, 15 bp, Homo sapiens
aagaatagactattc

SEQ ID NO: 302184 - DNA, 15 bp, Homo sapiens
caagaatagactatt

SEQ ID NO: 302185 - DNA, 15 bp, Homo sapiens
acaagaatagactat

SEQ ID NO: 302186 - DNA, 15 bp, Homo sapiens
aacaagaatagacta

SEQ ID NO: 302187 - DNA, 15 bp, Homo sapiens
aaacaagaatagact

SEQ ID NO: 302188 - DNA, 15 bp, Homo sapiens
gaaacaagaatagac

SEQ ID NO: 302189 - DNA, 15 bp, Homo sapiens
ggaaacaagaataga

SEQ ID NO: 302190 - DNA, 15 bp, Homo sapiens
gggaaacaagaatag

SEQ ID NO: 302191 - DNA, 15 bp, Homo sapiens
agggaaacaagaata

SEQ ID NO: 302192 - DNA, 15 bp, Homo sapiens
tagggaaacaagaat

SEQ ID NO: 302193 - DNA, 15 bp, Homo sapiens
ctagggaaacaagaa

SEQ ID NO: 302194 - DNA, 15 bp, Homo sapiens
cctagggaaacaaga

SEQ ID NO: 302195 - DNA, 15 bp, Homo sapiens
tcctagggaaacaag

SEQ ID NO: 302196 - DNA, 15 bp, Homo sapiens
gtcctagggaaacaa

SEQ ID NO: 302197 - DNA, 15 bp, Homo sapiens
agtcctagggaaaca

SEQ ID NO: 302198 - DNA, 15 bp, Homo sapiens
tagtcctagggaaac

SEQ ID NO: 302199 - DNA, 15 bp, Homo sapiens
ttagtcctagggaaa

SEQ ID NO: 302200 - DNA, 15 bp, Homo sapiens
tttagtcctagggaa

SEQ ID NO: 302201 - DNA, 15 bp, Homo sapiens
atttagtcctaggga

SEQ ID NO: 302202 - DNA, 15 bp, Homo sapiens
aatttagtcctaggg

SEQ ID NO: 302203 - DNA, 15 bp, Homo sapiens
gaatttagtcctagg

SEQ ID NO: 302204 - DNA, 15 bp, Homo sapiens
ggaatttagtcctag

SEQ ID NO: 302205 - DNA, 15 bp, Homo sapiens
aggaatttagtccta

SEQ ID NO: 302206 - DNA, 15 bp, Homo sapiens
caggaatttagtcct

SEQ ID NO: 302207 - DNA, 15 bp, Homo sapiens
acaggaatttagtcc

SEQ ID NO: 302208 - DNA, 15 bp, Homo sapiens
tacaggaatttagtc

SEQ ID NO: 302209 - DNA, 15 bp, Homo sapiens
ctacaggaatttagt

SEQ ID NO: 302210 - DNA, 15 bp, Homo sapiens
tctacaggaatttag

SEQ ID NO: 302211 - DNA, 15 bp, Homo sapiens
atctacaggaattta

SEQ ID NO: 302212 - DNA, 15 bp, Homo sapiens
catctacaggaattt

SEQ ID NO: 302213 - DNA, 15 bp, Homo sapiens
acatctacaggaatt

SEQ ID NO: 302214 - DNA, 15 bp, Homo sapiens
cacatctacaggaat

SEQ ID NO: 302215 - DNA, 15 bp, Homo sapiens
tcacatctacaggaa

SEQ ID NO: 302216 - DNA, 15 bp, Homo sapiens
ctcacatctacagga

SEQ ID NO: 302217 - DNA, 15 bp, Homo sapiens
tctcacatctacagg

SEQ ID NO: 302218 - DNA, 15 bp, Homo sapiens
ctctcacatctacag

SEQ ID NO: 302219 - DNA, 15 bp, Homo sapiens
cctctcacatctaca

SEQ ID NO: 302220 - DNA, 15 bp, Homo sapiens
tcctctcacatctac

SEQ ID NO: 302221 - DNA, 15 bp, Homo sapiens
ctcctctcacatcta

SEQ ID NO: 302222 - DNA, 15 bp, Homo sapiens
actcctctcacatct

SEQ ID NO: 302223 - DNA, 15 bp, Homo sapiens
tactcctctcacatc

SEQ ID NO: 302224 - DNA, 15 bp, Homo sapiens
atactcctctcacat

SEQ ID NO: 302225 - DNA, 15 bp, Homo sapiens
catactcctctcaca

SEQ ID NO: 302226 - DNA, 15 bp, Homo sapiens
ccatactcctctcac

SEQ ID NO: 302227 - DNA, 15 bp, Homo sapiens
tccatactcctctca

SEQ ID NO: 302228 - DNA, 15 bp, Homo sapiens
atccatactcctctc

SEQ ID NO: 302229 - DNA, 15 bp, Homo sapiens
gatccatactcctct

SEQ ID NO: 302230 - DNA, 15 bp, Homo sapiens
ggatccatactcctc

SEQ ID NO: 302231 - DNA, 15 bp, Homo sapiens
tggatccatactcct

SEQ ID NO: 302232 - DNA, 15 bp, Homo sapiens
ctggatccatactcc

SEQ ID NO: 302233 - DNA, 15 bp, Homo sapiens
cctggatccatactc

SEQ ID NO: 302234 - DNA, 15 bp, Homo sapiens
ccctggatccatact

SEQ ID NO: 302235 - DNA, 15 bp, Homo sapiens
cccctggatccatac

SEQ ID NO: 302236 - DNA, 15 bp, Homo sapiens
acccctggatccata

SEQ ID NO: 302237 - DNA, 15 bp, Homo sapiens
gacccctggatccat

SEQ ID NO: 302238 - DNA, 15 bp, Homo sapiens
tgacccctggatcca

SEQ ID NO: 302239 - DNA, 15 bp, Homo sapiens
ctgacccctggatcc

SEQ ID NO: 302240 - DNA, 15 bp, Homo sapiens
tctgacccctggatc

SEQ ID NO: 302241 - DNA, 15 bp, Homo sapiens
ctctgacccctggat

SEQ ID NO: 302242 - DNA, 15 bp, Homo sapiens
cctctgacccctgga

SEQ ID NO: 302243 - DNA, 15 bp, Homo sapiens
acctctgacccctgg

SEQ ID NO: 302244 - DNA, 15 bp, Homo sapiens
aacctctgacccctg

SEQ ID NO: 302245 - DNA, 15 bp, Homo sapiens
gaacctctgacccct

SEQ ID NO: 302246 - DNA, 15 bp, Homo sapiens
ggaacctctgacccc

SEQ ID NO: 302247 - DNA, 15 bp, Homo sapiens
tggaacctctgaccc

SEQ ID NO: 302248 - DNA, 15 bp, Homo sapiens
atggaacctctgacc

SEQ ID NO: 302249 - DNA, 15 bp, Homo sapiens
aatggaacctctgac

SEQ ID NO: 302250 - DNA, 15 bp, Homo sapiens
gaatggaacctctga

SEQ ID NO: 302251 - DNA, 15 bp, Homo sapiens
ggaatggaacctctg

SEQ ID NO: 302252 - DNA, 15 bp, Homo sapiens
gggaatggaacctct

SEQ ID NO: 302253 - DNA, 15 bp, Homo sapiens
ggggaatggaacctc

SEQ ID NO: 302254 - DNA, 15 bp, Homo sapiens
tggggaatggaacct

SEQ ID NO: 302255 - DNA, 15 bp, Homo sapiens
atggggaatggaacc

SEQ ID NO: 302256 - DNA, 15 bp, Homo sapiens
catggggaatggaac

SEQ ID NO: 302257 - DNA, 15 bp, Homo sapiens
gcatggggaatggaa

SEQ ID NO: 302258 - DNA, 15 bp, Homo sapiens
ggcatggggaatgga

SEQ ID NO: 302259 - DNA, 15 bp, Homo sapiens
tggcatggggaatgg

SEQ ID NO: 302260 - DNA, 15 bp, Homo sapiens
ctggcatggggaatg

SEQ ID NO: 302261 - DNA, 15 bp, Homo sapiens
gctggcatggggaat

SEQ ID NO: 302262 - DNA, 15 bp, Homo sapiens
tgctggcatggggaa

SEQ ID NO: 302263 - DNA, 15 bp, Homo sapiens
atgctggcatgggga

SEQ ID NO: 302264 - DNA, 15 bp, Homo sapiens
aatgctggcatgggg

SEQ ID NO: 302265 - DNA, 15 bp, Homo sapiens
aaatgctggcatggg

SEQ ID NO: 302266 - DNA, 15 bp, Homo sapiens
caaatgctggcatgg

SEQ ID NO: 302267 - DNA, 15 bp, Homo sapiens
acaaatgctggcatg

SEQ ID NO: 302268 - DNA, 15 bp, Homo sapiens
cacaaatgctggcat

SEQ ID NO: 302269 - DNA, 15 bp, Homo sapiens
acacaaatgctggca

SEQ ID NO: 302270 - DNA, 15 bp, Homo sapiens
gacacaaatgctggc

SEQ ID NO: 302271 - DNA, 15 bp, Homo sapiens
agacacaaatgctgg

SEQ ID NO: 302272 - DNA, 15 bp, Homo sapiens
tagacacaaatgctg

SEQ ID NO: 302273 - DNA, 15 bp, Homo sapiens
ctagacacaaatgct

SEQ ID NO: 302274 - DNA, 15 bp, Homo sapiens
tctagacacaaatgc

SEQ ID NO: 302275 - DNA, 15 bp, Homo sapiens
atctagacacaaatg

SEQ ID NO: 302276 - DNA, 15 bp, Homo sapiens
aatctagacacaaat

SEQ ID NO: 302277 - DNA, 15 bp, Homo sapiens
gaatctagacacaaa

SEQ ID NO: 302278 - DNA, 15 bp, Homo sapiens
agaatctagacacaa

SEQ ID NO: 302279 - DNA, 15 bp, Homo sapiens
gagaatctagacaca

SEQ ID NO: 302280 - DNA, 15 bp, Homo sapiens
tgagaatctagacac

SEQ ID NO: 302281 - DNA, 15 bp, Homo sapiens
ctgagaatctagaca

SEQ ID NO: 302282 - DNA, 15 bp, Homo sapiens
gctgagaatctagac

SEQ ID NO: 302283 - DNA, 15 bp, Homo sapiens
agctgagaatctaga

SEQ ID NO: 302284 - DNA, 15 bp, Homo sapiens
gagctgagaatctag

SEQ ID NO: 302285 - DNA, 15 bp, Homo sapiens
agagctgagaatcta

SEQ ID NO: 302286 - DNA, 15 bp, Homo sapiens
gagagctgagaatct

SEQ ID NO: 302287 - DNA, 15 bp, Homo sapiens
ggagagctgagaatc

SEQ ID NO: 302288 - DNA, 15 bp, Homo sapiens
tggagagctgagaat

SEQ ID NO: 302289 - DNA, 15 bp, Homo sapiens
atggagagctgagaa

SEQ ID NO: 302290 - DNA, 15 bp, Homo sapiens
aatggagagctgaga

SEQ ID NO: 302291 - DNA, 15 bp, Homo sapiens
gaatggagagctgag

SEQ ID NO: 302292 - DNA, 15 bp, Homo sapiens
tgaatggagagctga

SEQ ID NO: 302293 - DNA, 15 bp, Homo sapiens
ctgaatggagagctg

SEQ ID NO: 302294 - DNA, 15 bp, Homo sapiens
tctgaatggagagct

SEQ ID NO: 302295 - DNA, 15 bp, Homo sapiens
gtctgaatggagagc

SEQ ID NO: 302296 - DNA, 15 bp, Homo sapiens
ggtctgaatggagag

SEQ ID NO: 302297 - DNA, 15 bp, Homo sapiens
aggtctgaatggaga

SEQ ID NO: 302298 - DNA, 15 bp, Homo sapiens
caggtctgaatggag

SEQ ID NO: 302299 - DNA, 15 bp, Homo sapiens
ccaggtctgaatgga

SEQ ID NO: 302300 - DNA, 15 bp, Homo sapiens
cccaggtctgaatgg

SEQ ID NO: 302301 - DNA, 15 bp, Homo sapiens
tcccaggtctgaatg

SEQ ID NO: 302302 - DNA, 15 bp, Homo sapiens
gtcccaggtctgaat

SEQ ID NO: 302303 - DNA, 15 bp, Homo sapiens
agtcccaggtctgaa

SEQ ID NO: 302304 - DNA, 15 bp, Homo sapiens
aagtcccaggtctga

SEQ ID NO: 302305 - DNA, 15 bp, Homo sapiens
gaagtcccaggtctg

SEQ ID NO: 302306 - DNA, 15 bp, Homo sapiens
agaagtcccaggtct

SEQ ID NO: 302307 - DNA, 15 bp, Homo sapiens
gagaagtcccaggtc

SEQ ID NO: 302308 - DNA, 15 bp, Homo sapiens
agagaagtcccaggt

SEQ ID NO: 302309 - DNA, 15 bp, Homo sapiens
aagagaagtcccagg

SEQ ID NO: 302310 - DNA, 15 bp, Homo sapiens
gaagagaagtcccag

SEQ ID NO: 302311 - DNA, 15 bp, Homo sapiens
agaagagaagtccca

SEQ ID NO: 302312 - DNA, 15 bp, Homo sapiens
gagaagagaagtccc

SEQ ID NO: 302313 - DNA, 15 bp, Homo sapiens
agagaagagaagtcc

SEQ ID NO: 302314 - DNA, 15 bp, Homo sapiens
aagagaagagaagtc

SEQ ID NO: 302315 - DNA, 15 bp, Homo sapiens
aaagagaagagaagt

SEQ ID NO: 302316 - DNA, 15 bp, Homo sapiens
gaaagagaagagaag

SEQ ID NO: 302317 - DNA, 15 bp, Homo sapiens
ggaaagagaagagaa

SEQ ID NO: 302318 - DNA, 15 bp, Homo sapiens
aggaaagagaagaga

SEQ ID NO: 302319 - DNA, 15 bp, Homo sapiens
aaggaaagagaagag

SEQ ID NO: 302320 - DNA, 15 bp, Homo sapiens
gggaaaggaaagaga

SEQ ID NO: 302321 - DNA, 15 bp, Homo sapiens
ggggaaaggaaagag

SEQ ID NO: 302322 - DNA, 15 bp, Homo sapiens
gggggaaaggaaaga

SEQ ID NO: 302323 - DNA, 15 bp, Homo sapiens
tgggggaaaggaaag

SEQ ID NO: 302324 - DNA, 15 bp, Homo sapiens
atgggggaaaggaaa

SEQ ID NO: 302325 - DNA, 15 bp, Homo sapiens
aatgggggaaaggaa

SEQ ID NO: 302326 - DNA, 15 bp, Homo sapiens
aaatgggggaaagga

SEQ ID NO: 302327 - DNA, 15 bp, Homo sapiens
gaaatgggggaaagg

SEQ ID NO: 302328 - DNA, 15 bp, Homo sapiens
agaaatgggggaaag

SEQ ID NO: 302329 - DNA, 15 bp, Homo sapiens
tagaaatgggggaaa

SEQ ID NO: 302330 - DNA, 15 bp, Homo sapiens
ttagaaatgggggaa

SEQ ID NO: 302331 - DNA, 15 bp, Homo sapiens
attagaaatggggga

SEQ ID NO: 302332 - DNA, 15 bp, Homo sapiens
gattagaaatggggg

SEQ ID NO: 302333 - DNA, 15 bp, Homo sapiens
tgattagaaatgggg

SEQ ID NO: 302334 - DNA, 15 bp, Homo sapiens
gtgattagaaatggg

SEQ ID NO: 302335 - DNA, 15 bp, Homo sapiens
ggtgattagaaatgg

SEQ ID NO: 302336 - DNA, 15 bp, Homo sapiens
aggtgattagaaatg

SEQ ID NO: 302337 - DNA, 15 bp, Homo sapiens
gaggtgattagaaat

SEQ ID NO: 302338 - DNA, 15 bp, Homo sapiens
tgaggtgattagaaa

SEQ ID NO: 302339 - DNA, 15 bp, Homo sapiens
atgaggtgattagaa

SEQ ID NO: 302340 - DNA, 15 bp, Homo sapiens
gatgaggtgattaga

SEQ ID NO: 302341 - DNA, 15 bp, Homo sapiens
agatgaggtgattag

SEQ ID NO: 302342 - DNA, 15 bp, Homo sapiens
tagatgaggtgatta

SEQ ID NO: 302343 - DNA, 15 bp, Homo sapiens
ctagatgaggtgatt

SEQ ID NO: 302344 - DNA, 15 bp, Homo sapiens
cctagatgaggtgat

SEQ ID NO: 302345 - DNA, 15 bp, Homo sapiens
gcctagatgaggtga

SEQ ID NO: 302346 - DNA, 15 bp, Homo sapiens
agcctagatgaggtg

SEQ ID NO: 302347 - DNA, 15 bp, Homo sapiens
cagcctagatgaggt

SEQ ID NO: 302348 - DNA, 15 bp, Homo sapiens
acagcctagatgagg

SEQ ID NO: 302349 - DNA, 15 bp, Homo sapiens
gacagcctagatgag

SEQ ID NO: 302350 - DNA, 15 bp, Homo sapiens
ggacagcctagatga

SEQ ID NO: 302351 - DNA, 15 bp, Homo sapiens
aggacagcctagatg

SEQ ID NO: 302352 - DNA, 15 bp, Homo sapiens
caggacagcctagat

SEQ ID NO: 302353 - DNA, 15 bp, Homo sapiens
acaggacagcctaga

SEQ ID NO: 302354 - DNA, 15 bp, Homo sapiens
aacaggacagcctag

SEQ ID NO: 302355 - DNA, 15 bp, Homo sapiens
aaacaggacagccta

SEQ ID NO: 302356 - DNA, 15 bp, Homo sapiens
aaaacaggacagcct

SEQ ID NO: 302357 - DNA, 15 bp, Homo sapiens
caaaacaggacagcc

SEQ ID NO: 302358 - DNA, 15 bp, Homo sapiens
acaaaacaggacagc

SEQ ID NO: 302359 - DNA, 15 bp, Homo sapiens
cacaaaacaggacag

SEQ ID NO: 302360 - DNA, 15 bp, Homo sapiens
tcacaaaacaggaca

SEQ ID NO: 302361 - DNA, 15 bp, Homo sapiens
ctcacaaaacaggac

SEQ ID NO: 302362 - DNA, 15 bp, Homo sapiens
actcacaaaacagga

SEQ ID NO: 302363 - DNA, 15 bp, Homo sapiens
cactcacaaaacagg

SEQ ID NO: 302364 - DNA, 15 bp, Homo sapiens
ccactcacaaaacag

SEQ ID NO: 302365 - DNA, 15 bp, Homo sapiens
accactcacaaaaca

SEQ ID NO: 302366 - DNA, 15 bp, Homo sapiens
gaccactcacaaaac

SEQ ID NO: 302367 - DNA, 15 bp, Homo sapiens
ggaccactcacaaaa

SEQ ID NO: 302368 - DNA, 15 bp, Homo sapiens
gggaccactcacaaa

SEQ ID NO: 302369 - DNA, 15 bp, Homo sapiens
tgggaccactcacaa

SEQ ID NO: 302370 - DNA, 15 bp, Homo sapiens
ctgggaccactcaca

SEQ ID NO: 302371 - DNA, 15 bp, Homo sapiens
tctgggaccactcac

SEQ ID NO: 302372 - DNA, 15 bp, Homo sapiens
ctctgggaccactca

SEQ ID NO: 302373 - DNA, 15 bp, Homo sapiens
actctgggaccactc

SEQ ID NO: 302374 - DNA, 15 bp, Homo sapiens
cactctgggaccact

SEQ ID NO: 302375 - DNA, 15 bp, Homo sapiens
ccactctgggaccac

SEQ ID NO: 302376 - DNA, 15 bp, Homo sapiens
cccactctgggacca

SEQ ID NO: 302377 - DNA, 15 bp, Homo sapiens
ccccactctgggacc

SEQ ID NO: 302378 - DNA, 15 bp, Homo sapiens
accccactctgggac

SEQ ID NO: 302379 - DNA, 15 bp, Homo sapiens
aaccccactctggga

SEQ ID NO: 302380 - DNA, 15 bp, Homo sapiens
caaccccactctggg

SEQ ID NO: 302381 - DNA, 15 bp, Homo sapiens
ccaaccccactctgg

SEQ ID NO: 302382 - DNA, 15 bp, Homo sapiens
cccaaccccactctg

SEQ ID NO: 302383 - DNA, 15 bp, Homo sapiens
ccccaaccccactct

SEQ ID NO: 302384 - DNA, 15 bp, Homo sapiens
accccaaccccactc

SEQ ID NO: 302385 - DNA, 15 bp, Homo sapiens
aaccccaaccccact

SEQ ID NO: 302386 - DNA, 15 bp, Homo sapiens
caaccccaaccccac

SEQ ID NO: 302387 - DNA, 15 bp, Homo sapiens
ccaaccccaacccca

SEQ ID NO: 302388 - DNA, 15 bp, Homo sapiens
tccaaccccaacccc

SEQ ID NO: 302389 - DNA, 15 bp, Homo sapiens
atccaaccccaaccc

SEQ ID NO: 302390 - DNA, 15 bp, Homo sapiens
catccaaccccaacc

SEQ ID NO: 302391 - DNA, 15 bp, Homo sapiens
ccatccaaccccaac

SEQ ID NO: 302392 - DNA, 15 bp, Homo sapiens
tccatccaaccccaa

SEQ ID NO: 302393 - DNA, 15 bp, Homo sapiens
ctccatccaacccca

SEQ ID NO: 302394 - DNA, 15 bp, Homo sapiens
tctccatccaacccc

SEQ ID NO: 302395 - DNA, 15 bp, Homo sapiens
ctctccatccaaccc

SEQ ID NO: 302396 - DNA, 15 bp, Homo sapiens
gctctccatccaacc

SEQ ID NO: 302397 - DNA, 15 bp, Homo sapiens
tgctctccatccaac

SEQ ID NO: 302398 - DNA, 15 bp, Homo sapiens
atgctctccatccaa

SEQ ID NO: 302399 - DNA, 15 bp, Homo sapiens
tatgctctccatcca

SEQ ID NO: 302400 - DNA, 15 bp, Homo sapiens
atatgctctccatcc

SEQ ID NO: 302401 - DNA, 15 bp, Homo sapiens
tatatgctctccatc

SEQ ID NO: 302402 - DNA, 15 bp, Homo sapiens
atatatgctctccat

SEQ ID NO: 302403 - DNA, 15 bp, Homo sapiens
aatatatgctctcca

SEQ ID NO: 302404 - DNA, 15 bp, Homo sapiens
aaatatatgctctcc

SEQ ID NO: 302405 - DNA, 15 bp, Homo sapiens
caaatatatgctctc

SEQ ID NO: 302406 - DNA, 15 bp, Homo sapiens
acaaatatatgctct

SEQ ID NO: 302407 - DNA, 15 bp, Homo sapiens
cacaaatatatgctc

SEQ ID NO: 302408 - DNA, 15 bp, Homo sapiens
gcacaaatatatgct

SEQ ID NO: 302409 - DNA, 15 bp, Homo sapiens
agcacaaatatatgc

SEQ ID NO: 302410 - DNA, 15 bp, Homo sapiens
cagcacaaatatatg

SEQ ID NO: 302411 - DNA, 15 bp, Homo sapiens
ccagcacaaatatat

SEQ ID NO: 302412 - DNA, 15 bp, Homo sapiens
cccagcacaaatata

SEQ ID NO: 302413 - DNA, 15 bp, Homo sapiens
tcccagcacaaatat

SEQ ID NO: 302414 - DNA, 15 bp, Homo sapiens
ctcccagcacaaata

SEQ ID NO: 302415 - DNA, 15 bp, Homo sapiens
cctcccagcacaaat

SEQ ID NO: 302416 - DNA, 15 bp, Homo sapiens
gcctcccagcacaaa

SEQ ID NO: 302417 - DNA, 15 bp, Homo sapiens
agcctcccagcacaa

SEQ ID NO: 302418 - DNA, 15 bp, Homo sapiens
cagcctcccagcaca

SEQ ID NO: 302419 - DNA, 15 bp, Homo sapiens
ccagcctcccagcac

SEQ ID NO: 302420 - DNA, 15 bp, Homo sapiens
cccagcctcccagca

SEQ ID NO: 302421 - DNA, 15 bp, Homo sapiens
tccccagcctcccag

SEQ ID NO: 302422 - DNA, 15 bp, Homo sapiens
atccccagcctccca

SEQ ID NO: 302423 - DNA, 15 bp, Homo sapiens
catccccagcctccc

SEQ ID NO: 302424 - DNA, 15 bp, Homo sapiens
acatccccagcctcc

SEQ ID NO: 302425 - DNA, 15 bp, Homo sapiens
aacatccccagcctc

SEQ ID NO: 302426 - DNA, 15 bp, Homo sapiens
aaacatccccagcct

SEQ ID NO: 302427 - DNA, 15 bp, Homo sapiens
caaacatccccagcc

SEQ ID NO: 302428 - DNA, 15 bp, Homo sapiens
acaaacatccccagc

SEQ ID NO: 302429 - DNA, 15 bp, Homo sapiens
cacaaacatccccag

SEQ ID NO: 302430 - DNA, 15 bp, Homo sapiens
acacaaacatcccca

SEQ ID NO: 302431 - DNA, 15 bp, Homo sapiens
cacacaaacatcccc

SEQ ID NO: 302432 - DNA, 15 bp, Homo sapiens
acacacaaacatccc

SEQ ID NO: 302433 - DNA, 15 bp, Homo sapiens
tacacacaaacatcc

SEQ ID NO: 302434 - DNA, 15 bp, Homo sapiens
gtacacacaaacatc

SEQ ID NO: 302435 - DNA, 15 bp, Homo sapiens
tgtacacacaaacat

SEQ ID NO: 302436 - DNA, 15 bp, Homo sapiens
gtgtacacacaaaca

SEQ ID NO: 302437 - DNA, 15 bp, Homo sapiens
cgtgtacacacaaac

SEQ ID NO: 302438 - DNA, 15 bp, Homo sapiens
acgtgtacacacaaa

SEQ ID NO: 302439 - DNA, 15 bp, Homo sapiens
aacgtgtacacacaa

SEQ ID NO: 302440 - DNA, 15 bp, Homo sapiens
caacgtgtacacaca

SEQ ID NO: 302441 - DNA, 15 bp, Homo sapiens
acaacgtgtacacac

SEQ ID NO: 302442 - DNA, 15 bp, Homo sapiens
cacaacgtgtacaca

SEQ ID NO: 302443 - DNA, 15 bp, Homo sapiens
acacaacgtgtacac

SEQ ID NO: 302444 - DNA, 15 bp, Homo sapiens
cacacaacgtgtaca

SEQ ID NO: 302445 - DNA, 15 bp, Homo sapiens
ccacacaacgtgtac

SEQ ID NO: 302446 - DNA, 15 bp, Homo sapiens
cccacacaacgtgta

SEQ ID NO: 302447 - DNA, 15 bp, Homo sapiens
acccacacaacgtgt

SEQ ID NO: 302448 - DNA, 15 bp, Homo sapiens
cacccacacaacgtg

SEQ ID NO: 302449 - DNA, 15 bp, Homo sapiens
gcacccacacaacgt

SEQ ID NO: 302450 - DNA, 15 bp, Homo sapiens
ggcacccacacaacg

SEQ ID NO: 302451 - DNA, 15 bp, Homo sapiens
gggcacccacacaac

SEQ ID NO: 302452 - DNA, 15 bp, Homo sapiens
tgggcacccacacaa

SEQ ID NO: 302453 - DNA, 15 bp, Homo sapiens
gtgggcacccacaca

SEQ ID NO: 302454 - DNA, 15 bp, Homo sapiens
ggtgggcacccacac

SEQ ID NO: 302455 - DNA, 15 bp, Homo sapiens
gggtgggcacccaca

SEQ ID NO: 302456 - DNA, 15 bp, Homo sapiens
tgggtgggcacccac

SEQ ID NO: 302457 - DNA, 15 bp, Homo sapiens
gtgggtgggcaccca

SEQ ID NO: 302458 - DNA, 15 bp, Homo sapiens
tgtgggtgggcaccc

SEQ ID NO: 302459 - DNA, 15 bp, Homo sapiens
atgtgggtgggcacc

SEQ ID NO: 302460 - DNA, 15 bp, Homo sapiens
catgtgggtgggcac

SEQ ID NO: 302461 - DNA, 15 bp, Homo sapiens
tcatgtgggtgggca

SEQ ID NO: 302462 - DNA, 15 bp, Homo sapiens
ttcatgtgggtgggc

SEQ ID NO: 302463 - DNA, 15 bp, Homo sapiens
gttcatgtgggtggg

SEQ ID NO: 302464 - DNA, 15 bp, Homo sapiens
ggttcatgtgggtgg

SEQ ID NO: 302465 - DNA, 15 bp, Homo sapiens
tggttcatgtgggtg

SEQ ID NO: 302466 - DNA, 15 bp, Homo sapiens
gtggttcatgtgggt

SEQ ID NO: 302467 - DNA, 15 bp, Homo sapiens
agtggttcatgtggg

SEQ ID NO: 302468 - DNA, 15 bp, Homo sapiens
gagtggttcatgtgg

SEQ ID NO: 302469 - DNA, 15 bp, Homo sapiens
ggagtggttcatgtg

SEQ ID NO: 302470 - DNA, 15 bp, Homo sapiens
tggagtggttcatgt

SEQ ID NO: 302471 - DNA, 15 bp, Homo sapiens
atggagtggttcatg

SEQ ID NO: 302472 - DNA, 15 bp, Homo sapiens
tatggagtggttcat

SEQ ID NO: 302473 - DNA, 15 bp, Homo sapiens
gtatggagtggttca

SEQ ID NO: 302474 - DNA, 15 bp, Homo sapiens
ggtatggagtggttc

SEQ ID NO: 302475 - DNA, 15 bp, Homo sapiens
aggtatggagtggtt

SEQ ID NO: 302476 - DNA, 15 bp, Homo sapiens
taggtatggagtggt

SEQ ID NO: 302477 - DNA, 15 bp, Homo sapiens
ataggtatggagtgg

SEQ ID NO: 302478 - DNA, 15 bp, Homo sapiens
tataggtatggagtg

SEQ ID NO: 302479 - DNA, 15 bp, Homo sapiens
gtataggtatggagt

SEQ ID NO: 302480 - DNA, 15 bp, Homo sapiens
tgtataggtatggag

SEQ ID NO: 302481 - DNA, 15 bp, Homo sapiens
atgtataggtatgga

SEQ ID NO: 302482 - DNA, 15 bp, Homo sapiens
catgtataggtatgg

SEQ ID NO: 302483 - DNA, 15 bp, Homo sapiens
ccatgtataggtatg

SEQ ID NO: 302484 - DNA, 15 bp, Homo sapiens
gccatgtataggtat

SEQ ID NO: 302485 - DNA, 15 bp, Homo sapiens
agccatgtataggta

SEQ ID NO: 302486 - DNA, 15 bp, Homo sapiens
gagccatgtataggt

SEQ ID NO: 302487 - DNA, 15 bp, Homo sapiens
tgagccatgtatagg

SEQ ID NO: 302488 - DNA, 15 bp, Homo sapiens
atgagccatgtatag

SEQ ID NO: 302489 - DNA, 15 bp, Homo sapiens
aatgagccatgtata

SEQ ID NO: 302490 - DNA, 15 bp, Homo sapiens
caatgagccatgtat

SEQ ID NO: 302491 - DNA, 15 bp, Homo sapiens
tcaatgagccatgta

SEQ ID NO: 302492 - DNA, 15 bp, Homo sapiens
gtcaatgagccatgt

SEQ ID NO: 302493 - DNA, 15 bp, Homo sapiens
ggtcaatgagccatg

SEQ ID NO: 302494 - DNA, 15 bp, Homo sapiens
gggtcaatgagccat

SEQ ID NO: 302495 - DNA, 15 bp, Homo sapiens
agggtcaatgagcca

SEQ ID NO: 302496 - DNA, 15 bp, Homo sapiens
cagggtcaatgagcc

SEQ ID NO: 302497 - DNA, 15 bp, Homo sapiens
gcagggtcaatgagc

SEQ ID NO: 302498 - DNA, 15 bp, Homo sapiens
ggcagggtcaatgag

SEQ ID NO: 302499 - DNA, 15 bp, Homo sapiens
gggcagggtcaatga

SEQ ID NO: 302500 - DNA, 15 bp, Homo sapiens
agggcagggtcaatg

SEQ ID NO: 302501 - DNA, 15 bp, Homo sapiens
gagggcagggtcaat

SEQ ID NO: 302502 - DNA, 15 bp, Homo sapiens
cgagggcagggtcaa

SEQ ID NO: 302503 - DNA, 15 bp, Homo sapiens
tcgagggcagggtca

SEQ ID NO: 302504 - DNA, 15 bp, Homo sapiens
ttcgagggcagggtc

SEQ ID NO: 302505 - DNA, 15 bp, Homo sapiens
cttcgagggcagggt

SEQ ID NO: 302506 - DNA, 15 bp, Homo sapiens
tcttcgagggcaggg

SEQ ID NO: 302507 - DNA, 15 bp, Homo sapiens
ttcttcgagggcagg

SEQ ID NO: 302508 - DNA, 15 bp, Homo sapiens
gttcttcgagggcag

SEQ ID NO: 302509 - DNA, 15 bp, Homo sapiens
agttcttcgagggca

SEQ ID NO: 302510 - DNA, 15 bp, Homo sapiens
aagttcttcgagggc

SEQ ID NO: 302511 - DNA, 15 bp, Homo sapiens
aaagttcttcgaggg

SEQ ID NO: 302512 - DNA, 15 bp, Homo sapiens
gaaagttcttcgagg

SEQ ID NO: 302513 - DNA, 15 bp, Homo sapiens
tgaaagttcttcgag

SEQ ID NO: 302514 - DNA, 15 bp, Homo sapiens
gtgaaagttcttcga

SEQ ID NO: 302515 - DNA, 15 bp, Homo sapiens
agtgaaagttcttcg

SEQ ID NO: 302516 - DNA, 15 bp, Homo sapiens
gagtgaaagttcttc

SEQ ID NO: 302517 - DNA, 15 bp, Homo sapiens
agagtgaaagttctt

SEQ ID NO: 302518 - DNA, 15 bp, Homo sapiens
cagagtgaaagttct

SEQ ID NO: 302519 - DNA, 15 bp, Homo sapiens
acagagtgaaagttc

SEQ ID NO: 302520 - DNA, 15 bp, Homo sapiens
gacagagtgaaagtt

SEQ ID NO: 302521 - DNA, 15 bp, Homo sapiens
agacagagtgaaagt

SEQ ID NO: 302522 - DNA, 15 bp, Homo sapiens
aagacagagtgaaag

SEQ ID NO: 302523 - DNA, 15 bp, Homo sapiens
gaagacagagtgaaa

SEQ ID NO: 302524 - DNA, 15 bp, Homo sapiens
agaagacagagtgaa

SEQ ID NO: 302525 - DNA, 15 bp, Homo sapiens
cagaagacagagtga

SEQ ID NO: 302526 - DNA, 15 bp, Homo sapiens
ccagaagacagagtg

SEQ ID NO: 302527 - DNA, 15 bp, Homo sapiens
accagaagacagagt

SEQ ID NO: 302528 - DNA, 15 bp, Homo sapiens
taccagaagacagag

SEQ ID NO: 302529 - DNA, 15 bp, Homo sapiens
ataccagaagacaga

SEQ ID NO: 302530 - DNA, 15 bp, Homo sapiens
tataccagaagacag

SEQ ID NO: 302531 - DNA, 15 bp, Homo sapiens
atataccagaagaca

SEQ ID NO: 302532 - DNA, 15 bp, Homo sapiens
catataccagaagac

SEQ ID NO: 302533 - DNA, 15 bp, Homo sapiens
acatataccagaaga

SEQ ID NO: 302534 - DNA, 15 bp, Homo sapiens
cacatataccagaag

SEQ ID NO: 302535 - DNA, 15 bp, Homo sapiens
gcacatataccagaa

SEQ ID NO: 302536 - DNA, 15 bp, Homo sapiens
tgcacatataccaga

SEQ ID NO: 302537 - DNA, 15 bp, Homo sapiens
atgcacatataccag

SEQ ID NO: 302538 - DNA, 15 bp, Homo sapiens
tatgcacatatacca

SEQ ID NO: 302539 - DNA, 15 bp, Homo sapiens
ttatgcacatatacc

SEQ ID NO: 302540 - DNA, 15 bp, Homo sapiens
cttatgcacatatac

SEQ ID NO: 302541 - DNA, 15 bp, Homo sapiens
acttatgcacatata

SEQ ID NO: 302542 - DNA, 15 bp, Homo sapiens
cacttatgcacatat

SEQ ID NO: 302543 - DNA, 15 bp, Homo sapiens
gcacttatgcacata

SEQ ID NO: 302544 - DNA, 15 bp, Homo sapiens
tgcacttatgcacat

SEQ ID NO: 302545 - DNA, 15 bp, Homo sapiens
atgcacttatgcaca

SEQ ID NO: 302546 - DNA, 15 bp, Homo sapiens
tatgcacttatgcac

SEQ ID NO: 302547 - DNA, 15 bp, Homo sapiens
atatgcacttatgca

SEQ ID NO: 302548 - DNA, 15 bp, Homo sapiens
catatgcacttatgc

SEQ ID NO: 302549 - DNA, 15 bp, Homo sapiens
gcatatgcacttatg

SEQ ID NO: 302550 - DNA, 15 bp, Homo sapiens
tgcatatgcacttat

SEQ ID NO: 302551 - DNA, 15 bp, Homo sapiens
atgcatatgcactta

SEQ ID NO: 302552 - DNA, 15 bp, Homo sapiens
aatgcatatgcactt

SEQ ID NO: 302553 - DNA, 15 bp, Homo sapiens
aaatgcatatgcact

SEQ ID NO: 302554 - DNA, 15 bp, Homo sapiens
taaatgcatatgcac

SEQ ID NO: 302555 - DNA, 15 bp, Homo sapiens
ctaaatgcatatgca

SEQ ID NO: 302556 - DNA, 15 bp, Homo sapiens
actaaatgcatatgc

SEQ ID NO: 302557 - DNA, 15 bp, Homo sapiens
cactaaatgcatatg

SEQ ID NO: 302558 - DNA, 15 bp, Homo sapiens
gcactaaatgcatat

SEQ ID NO: 302559 - DNA, 15 bp, Homo sapiens
agcactaaatgcata

SEQ ID NO: 302560 - DNA, 15 bp, Homo sapiens
tagcactaaatgcat

SEQ ID NO: 302561 - DNA, 15 bp, Homo sapiens
atagcactaaatgca

SEQ ID NO: 302562 - DNA, 15 bp, Homo sapiens
aatagcactaaatgc

SEQ ID NO: 302563 - DNA, 15 bp, Homo sapiens
aaatagcactaaatg

SEQ ID NO: 302564 - DNA, 15 bp, Homo sapiens
caaatagcactaaat

SEQ ID NO: 302565 - DNA, 15 bp, Homo sapiens
tcaaatagcactaaa

SEQ ID NO: 302566 - DNA, 15 bp, Homo sapiens
ttcaaatagcactaa

SEQ ID NO: 302567 - DNA, 15 bp, Homo sapiens
attcaaatagcacta

SEQ ID NO: 302568 - DNA, 15 bp, Homo sapiens
gattcaaatagcact

SEQ ID NO: 302569 - DNA, 15 bp, Homo sapiens
tgattcaaatagcac

SEQ ID NO: 302570 - DNA, 15 bp, Homo sapiens
gtgattcaaatagca

SEQ ID NO: 302571 - DNA, 15 bp, Homo sapiens
ggtgattcaaatagc

SEQ ID NO: 302572 - DNA, 15 bp, Homo sapiens
aggtgattcaaatag

SEQ ID NO: 302573 - DNA, 15 bp, Homo sapiens
taggtgattcaaata

SEQ ID NO: 302574 - DNA, 15 bp, Homo sapiens
gtaggtgattcaaat

SEQ ID NO: 302575 - DNA, 15 bp, Homo sapiens
agtaggtgattcaaa

SEQ ID NO: 302576 - DNA, 15 bp, Homo sapiens
gagtaggtgattcaa

SEQ ID NO: 302577 - DNA, 15 bp, Homo sapiens
ggagtaggtgattca

SEQ ID NO: 302578 - DNA, 15 bp, Homo sapiens
tggagtaggtgattc

SEQ ID NO: 302579 - DNA, 15 bp, Homo sapiens
atggagtaggtgatt

SEQ ID NO: 302580 - DNA, 15 bp, Homo sapiens
gatggagtaggtgat

SEQ ID NO: 302581 - DNA, 15 bp, Homo sapiens
ggatggagtaggtga

SEQ ID NO: 302582 - DNA, 15 bp, Homo sapiens
gggatggagtaggtg

SEQ ID NO: 302583 - DNA, 15 bp, Homo sapiens
tgggatggagtaggt

SEQ ID NO: 302584 - DNA, 15 bp, Homo sapiens
atgggatggagtagg

SEQ ID NO: 302585 - DNA, 15 bp, Homo sapiens
aatgggatggagtag

SEQ ID NO: 302586 - DNA, 15 bp, Homo sapiens
gaatgggatggagta

SEQ ID NO: 302587 - DNA, 15 bp, Homo sapiens
ggaatgggatggagt

SEQ ID NO: 302588 - DNA, 15 bp, Homo sapiens
aggaatgggatggag

SEQ ID NO: 302589 - DNA, 15 bp, Homo sapiens
aaggaatgggatgga

SEQ ID NO: 302590 - DNA, 15 bp, Homo sapiens
aaaggaatgggatgg

SEQ ID NO: 302591 - DNA, 15 bp, Homo sapiens
aaaaggaatgggatg

SEQ ID NO: 302592 - DNA, 15 bp, Homo sapiens
gaaaaggaatgggat

SEQ ID NO: 302593 - DNA, 15 bp, Homo sapiens
agaaaaggaatggga

SEQ ID NO: 302594 - DNA, 15 bp, Homo sapiens
tagaaaaggaatggg

SEQ ID NO: 302595 - DNA, 15 bp, Homo sapiens
ctagaaaaggaatgg

SEQ ID NO: 302596 - DNA, 15 bp, Homo sapiens
tctagaaaaggaatg

SEQ ID NO: 302597 - DNA, 15 bp, Homo sapiens
atctagaaaaggaat

SEQ ID NO: 302598 - DNA, 15 bp, Homo sapiens
tatctagaaaaggaa

SEQ ID NO: 302599 - DNA, 15 bp, Homo sapiens
ttatctagaaaagga

SEQ ID NO: 302600 - DNA, 15 bp, Homo sapiens
tttatctagaaaagg

SEQ ID NO: 302601 - DNA, 15 bp, Homo sapiens
atttatctagaaaag

SEQ ID NO: 302602 - DNA, 15 bp, Homo sapiens
tatttatctagaaaa

SEQ ID NO: 302603 - DNA, 15 bp, Homo sapiens
ttatttatctagaaa

SEQ ID NO: 302604 - DNA, 15 bp, Homo sapiens
cttatttatctagaa

SEQ ID NO: 302605 - DNA, 15 bp, Homo sapiens
ccttatttatctaga

SEQ ID NO: 302606 - DNA, 15 bp, Homo sapiens
cccttatttatctag

SEQ ID NO: 302607 - DNA, 15 bp, Homo sapiens
acccttatttatcta

SEQ ID NO: 302608 - DNA, 15 bp, Homo sapiens
aacccttatttatct

SEQ ID NO: 302609 - DNA, 15 bp, Homo sapiens
gaacccttatttatc

SEQ ID NO: 302610 - DNA, 15 bp, Homo sapiens
ggaacccttatttat

SEQ ID NO: 302611 - DNA, 15 bp, Homo sapiens
gggaacccttattta

SEQ ID NO: 302612 - DNA, 15 bp, Homo sapiens
agggaacccttattt

SEQ ID NO: 302613 - DNA, 15 bp, Homo sapiens
tagggaacccttatt

SEQ ID NO: 302614 - DNA, 15 bp, Homo sapiens
ttagggaacccttat

SEQ ID NO: 302615 - DNA, 15 bp, Homo sapiens
tttagggaaccctta

SEQ ID NO: 302616 - DNA, 15 bp, Homo sapiens
ttttagggaaccctt

SEQ ID NO: 302617 - DNA, 15 bp, Homo sapiens
tttttagggaaccct

SEQ ID NO: 302618 - DNA, 15 bp, Homo sapiens
ttttttagggaaccc

SEQ ID NO: 302619 - DNA, 15 bp, Homo sapiens
tttttttagggaacc

SEQ ID NO: 302620 - DNA, 15 bp, Homo sapiens
ttttttttagggaac

SEQ ID NO: 302621 - DNA, 15 bp, Homo sapiens
cttttttttagggaa

SEQ ID NO: 302622 - DNA, 15 bp, Homo sapiens
ccttttttttaggga

SEQ ID NO: 302623 - DNA, 15 bp, Homo sapiens
cccttttttttaggg

SEQ ID NO: 302624 - DNA, 15 bp, Homo sapiens
tcccttttttttagg

SEQ ID NO: 302625 - DNA, 15 bp, Homo sapiens
atcccttttttttag

SEQ ID NO: 302626 - DNA, 15 bp, Homo sapiens
catccctttttttta

SEQ ID NO: 302627 - DNA, 15 bp, Homo sapiens
ccatccctttttttt

SEQ ID NO: 302628 - DNA, 15 bp, Homo sapiens
gccatcccttttttt

SEQ ID NO: 302629 - DNA, 15 bp, Homo sapiens
agccatccctttttt

SEQ ID NO: 302630 - DNA, 15 bp, Homo sapiens
tagccatcccttttt

SEQ ID NO: 302631 - DNA, 15 bp, Homo sapiens
ctagccatccctttt

SEQ ID NO: 302632 - DNA, 15 bp, Homo sapiens
tctagccatcccttt

SEQ ID NO: 302633 - DNA, 15 bp, Homo sapiens
ttctagccatccctt

SEQ ID NO: 302634 - DNA, 15 bp, Homo sapiens
attctagccatccct

SEQ ID NO: 302635 - DNA, 15 bp, Homo sapiens
gattctagccatccc

SEQ ID NO: 302636 - DNA, 15 bp, Homo sapiens
tgattctagccatcc

SEQ ID NO: 302637 - DNA, 15 bp, Homo sapiens
ctgattctagccatc

SEQ ID NO: 302638 - DNA, 15 bp, Homo sapiens
actgattctagccat

SEQ ID NO: 302639 - DNA, 15 bp, Homo sapiens
cactgattctagcca

SEQ ID NO: 302640 - DNA, 15 bp, Homo sapiens
ccactgattctagcc

SEQ ID NO: 302641 - DNA, 15 bp, Homo sapiens
tccactgattctagc

SEQ ID NO: 302642 - DNA, 15 bp, Homo sapiens
ctccactgattctag

SEQ ID NO: 302643 - DNA, 15 bp, Homo sapiens
cctccactgattcta

SEQ ID NO: 302644 - DNA, 15 bp, Homo sapiens
ccctccactgattct

SEQ ID NO: 302645 - DNA, 15 bp, Homo sapiens
tccctccactgattc

SEQ ID NO: 302646 - DNA, 15 bp, Homo sapiens
ctccctccactgatt

SEQ ID NO: 302647 - DNA, 15 bp, Homo sapiens
actccctccactgat

SEQ ID NO: 302648 - DNA, 15 bp, Homo sapiens
cactccctccactga

SEQ ID NO: 302649 - DNA, 15 bp, Homo sapiens
ccactccctccactg

SEQ ID NO: 302650 - DNA, 15 bp, Homo sapiens
tccactccctccact

SEQ ID NO: 302651 - DNA, 15 bp, Homo sapiens
ttccactccctccac

SEQ ID NO: 302652 - DNA, 15 bp, Homo sapiens
gttccactccctcca

SEQ ID NO: 302653 - DNA, 15 bp, Homo sapiens
cgttccactccctcc

SEQ ID NO: 302654 - DNA, 15 bp, Homo sapiens
tcgttccactccctc

SEQ ID NO: 302655 - DNA, 15 bp, Homo sapiens
ctcgttccactccct

SEQ ID NO: 302656 - DNA, 15 bp, Homo sapiens
actcgttccactccc

SEQ ID NO: 302657 - DNA, 15 bp, Homo sapiens
cactcgttccactcc

SEQ ID NO: 302658 - DNA, 15 bp, Homo sapiens
tcactcgttccactc

SEQ ID NO: 302659 - DNA, 15 bp, Homo sapiens
ctcactcgttccact

SEQ ID NO: 302660 - DNA, 15 bp, Homo sapiens
actcactcgttccac

SEQ ID NO: 302661 - DNA, 15 bp, Homo sapiens
tactcactcgttcca

SEQ ID NO: 302662 - DNA, 15 bp, Homo sapiens
ctactcactcgttcc

SEQ ID NO: 302663 - DNA, 15 bp, Homo sapiens
tctactcactcgttc

SEQ ID NO: 302664 - DNA, 15 bp, Homo sapiens
ttctactcactcgtt

SEQ ID NO: 302665 - DNA, 15 bp, Homo sapiens
attctactcactcgt

SEQ ID NO: 302666 - DNA, 15 bp, Homo sapiens
aattctactcactcg

SEQ ID NO: 302667 - DNA, 15 bp, Homo sapiens
caattctactcactc

SEQ ID NO: 302668 - DNA, 15 bp, Homo sapiens
ccaattctactcact

SEQ ID NO: 302669 - DNA, 15 bp, Homo sapiens
accaattctactcac

SEQ ID NO: 302670 - DNA, 15 bp, Homo sapiens
gaccaattctactca

SEQ ID NO: 302671 - DNA, 15 bp, Homo sapiens
tgaccaattctactc

SEQ ID NO: 302672 - DNA, 15 bp, Homo sapiens
ctgaccaattctact

SEQ ID NO: 302673 - DNA, 15 bp, Homo sapiens
actgaccaattctac

SEQ ID NO: 302674 - DNA, 15 bp, Homo sapiens
gactgaccaattcta

SEQ ID NO: 302675 - DNA, 15 bp, Homo sapiens
tgactgaccaattct

SEQ ID NO: 302676 - DNA, 15 bp, Homo sapiens
atgactgaccaattc

SEQ ID NO: 302677 - DNA, 15 bp, Homo sapiens
catgactgaccaatt

SEQ ID NO: 302678 - DNA, 15 bp, Homo sapiens
tcatgactgaccaat

SEQ ID NO: 302679 - DNA, 15 bp, Homo sapiens
atcatgactgaccaa

SEQ ID NO: 302680 - DNA, 15 bp, Homo sapiens
aatcatgactgacca

SEQ ID NO: 302681 - DNA, 15 bp, Homo sapiens
gaatcatgactgacc

SEQ ID NO: 302682 - DNA, 15 bp, Homo sapiens
ggaatcatgactgac

SEQ ID NO: 302683 - DNA, 15 bp, Homo sapiens
aggaatcatgactga

SEQ ID NO: 302684 - DNA, 15 bp, Homo sapiens
taggaatcatgactg

SEQ ID NO: 302685 - DNA, 15 bp, Homo sapiens
ttaggaatcatgact

SEQ ID NO: 302686 - DNA, 15 bp, Homo sapiens
cttaggaatcatgac

SEQ ID NO: 302687 - DNA, 15 bp, Homo sapiens
tcttaggaatcatga

SEQ ID NO: 302688 - DNA, 15 bp, Homo sapiens
gtcttaggaatcatg

SEQ ID NO: 302689 - DNA, 15 bp, Homo sapiens
tgtcttaggaatcat

SEQ ID NO: 302690 - DNA, 15 bp, Homo sapiens
ctgtcttaggaatca

SEQ ID NO: 302691 - DNA, 15 bp, Homo sapiens
actgtcttaggaatc

SEQ ID NO: 302692 - DNA, 15 bp, Homo sapiens
aactgtcttaggaat

SEQ ID NO: 302693 - DNA, 15 bp, Homo sapiens
aaactgtcttaggaa

SEQ ID NO: 302694 - DNA, 15 bp, Homo sapiens
taaactgtcttagga

SEQ ID NO: 302695 - DNA, 15 bp, Homo sapiens
ctaaactgtcttagg

SEQ ID NO: 302696 - DNA, 15 bp, Homo sapiens
actaaactgtcttag

SEQ ID NO: 302697 - DNA, 15 bp, Homo sapiens
cactaaactgtctta

SEQ ID NO: 302698 - DNA, 15 bp, Homo sapiens
tcactaaactgtctt

SEQ ID NO: 302699 - DNA, 15 bp, Homo sapiens
ttcactaaactgtct

SEQ ID NO: 302700 - DNA, 15 bp, Homo sapiens
tttcactaaactgtc

SEQ ID NO: 302701 - DNA, 15 bp, Homo sapiens
ttttcactaaactgt

SEQ ID NO: 302702 - DNA, 15 bp, Homo sapiens
gttttcactaaactg

SEQ ID NO: 302703 - DNA, 15 bp, Homo sapiens
agttttcactaaact

SEQ ID NO: 302704 - DNA, 15 bp, Homo sapiens
tagttttcactaaac

SEQ ID NO: 302705 - DNA, 15 bp, Homo sapiens
ttagttttcactaaa

SEQ ID NO: 302706 - DNA, 15 bp, Homo sapiens
tttagttttcactaa

SEQ ID NO: 302707 - DNA, 15 bp, Homo sapiens
ttttagttttcacta

SEQ ID NO: 302708 - DNA, 15 bp, Homo sapiens
attttagttttcact

SEQ ID NO: 302709 - DNA, 15 bp, Homo sapiens
gattttagttttcac

SEQ ID NO: 302710 - DNA, 15 bp, Homo sapiens
tgattttagttttca

SEQ ID NO: 302711 - DNA, 15 bp, Homo sapiens
ttgattttagttttc

SEQ ID NO: 302712 - DNA, 15 bp, Homo sapiens
cttgattttagtttt

SEQ ID NO: 302713 - DNA, 15 bp, Homo sapiens
gcttgattttagttt

SEQ ID NO: 302714 - DNA, 15 bp, Homo sapiens
tgcttgattttagtt

SEQ ID NO: 302715 - DNA, 15 bp, Homo sapiens
ttgcttgattttagt

SEQ ID NO: 302716 - DNA, 15 bp, Homo sapiens
attgcttgattttag

SEQ ID NO: 302717 - DNA, 15 bp, Homo sapiens
tattgcttgatttta

SEQ ID NO: 302718 - DNA, 15 bp, Homo sapiens
gtattgcttgatttt

SEQ ID NO: 302719 - DNA, 15 bp, Homo sapiens
agtattgcttgattt

SEQ ID NO: 302720 - DNA, 15 bp, Homo sapiens
aagtattgcttgatt

SEQ ID NO: 302721 - DNA, 15 bp, Homo sapiens
caagtattgcttgat

SEQ ID NO: 302722 - DNA, 15 bp, Homo sapiens
acaagtattgcttga

SEQ ID NO: 302723 - DNA, 15 bp, Homo sapiens
aacaagtattgcttg

SEQ ID NO: 302724 - DNA, 15 bp, Homo sapiens
aaacaagtattgctt

SEQ ID NO: 302725 - DNA, 15 bp, Homo sapiens
caaacaagtattgct

SEQ ID NO: 302726 - DNA, 15 bp, Homo sapiens
ccaaacaagtattgc

SEQ ID NO: 302727 - DNA, 15 bp, Homo sapiens
tccaaacaagtattg

SEQ ID NO: 302728 - DNA, 15 bp, Homo sapiens
ttccaaacaagtatt

SEQ ID NO: 302729 - DNA, 15 bp, Homo sapiens
tttccaaacaagtat

SEQ ID NO: 302730 - DNA, 15 bp, Homo sapiens
ctttccaaacaagta

SEQ ID NO: 302731 - DNA, 15 bp, Homo sapiens
tctttccaaacaagt

SEQ ID NO: 302732 - DNA, 15 bp, Homo sapiens
gtctttccaaacaag

SEQ ID NO: 302733 - DNA, 15 bp, Homo sapiens
agtctttccaaacaa

SEQ ID NO: 302734 - DNA, 15 bp, Homo sapiens
gagtctttccaaaca

SEQ ID NO: 302735 - DNA, 15 bp, Homo sapiens
agagtctttccaaac

SEQ ID NO: 302736 - DNA, 15 bp, Homo sapiens
cagagtctttccaaa

SEQ ID NO: 302737 - DNA, 15 bp, Homo sapiens
acagagtctttccaa

SEQ ID NO: 302738 - DNA, 15 bp, Homo sapiens
aacagagtctttcca

SEQ ID NO: 302739 - DNA, 15 bp, Homo sapiens
aaacagagtctttcc

SEQ ID NO: 302740 - DNA, 15 bp, Homo sapiens
aaaacagagtctttc

SEQ ID NO: 302741 - DNA, 15 bp, Homo sapiens
taaaacagagtcttt

SEQ ID NO: 302742 - DNA, 15 bp, Homo sapiens
ataaaacagagtctt

SEQ ID NO: 302743 - DNA, 15 bp, Homo sapiens
cataaaacagagtct

SEQ ID NO: 302744 - DNA, 15 bp, Homo sapiens
acataaaacagagtc

SEQ ID NO: 302745 - DNA, 15 bp, Homo sapiens
tacataaaacagagt

SEQ ID NO: 302746 - DNA, 15 bp, Homo sapiens
ctacataaaacagag

SEQ ID NO: 302747 - DNA, 15 bp, Homo sapiens
actacataaaacaga

SEQ ID NO: 302748 - DNA, 15 bp, Homo sapiens
tactacataaaacag

SEQ ID NO: 302749 - DNA, 15 bp, Homo sapiens
ctactacataaaaca

SEQ ID NO: 302750 - DNA, 15 bp, Homo sapiens
gctactacataaaac

SEQ ID NO: 302751 - DNA, 15 bp, Homo sapiens
agctactacataaaa

SEQ ID NO: 302752 - DNA, 15 bp, Homo sapiens
aagctactacataaa

SEQ ID NO: 302753 - DNA, 15 bp, Homo sapiens
taagctactacataa

SEQ ID NO: 302754 - DNA, 15 bp, Homo sapiens
ctaagctactacata

SEQ ID NO: 302755 - DNA, 15 bp, Homo sapiens
gctaagctactacat

SEQ ID NO: 302756 - DNA, 15 bp, Homo sapiens
agctaagctactaca

SEQ ID NO: 302757 - DNA, 15 bp, Homo sapiens
gagctaagctactac

SEQ ID NO: 302758 - DNA, 15 bp, Homo sapiens
agagctaagctacta

SEQ ID NO: 302759 - DNA, 15 bp, Homo sapiens
cagagctaagctact

SEQ ID NO: 302760 - DNA, 15 bp, Homo sapiens
tcagagctaagctac

SEQ ID NO: 302761 - DNA, 15 bp, Homo sapiens
atcagagctaagcta

SEQ ID NO: 302762 - DNA, 15 bp, Homo sapiens
aatcagagctaagct

SEQ ID NO: 302763 - DNA, 15 bp, Homo sapiens
aaatcagagctaagc

SEQ ID NO: 302764 - DNA, 15 bp, Homo sapiens
taaatcagagctaag

SEQ ID NO: 302765 - DNA, 15 bp, Homo sapiens
ataaatcagagctaa

SEQ ID NO: 302766 - DNA, 15 bp, Homo sapiens
aataaatcagagcta

SEQ ID NO: 302767 - DNA, 15 bp, Homo sapiens
taataaatcagagct

SEQ ID NO: 302768 - DNA, 15 bp, Homo sapiens
gtaataaatcagagc

SEQ ID NO: 302769 - DNA, 15 bp, Homo sapiens
tgtaataaatcagag

SEQ ID NO: 302770 - DNA, 15 bp, Homo sapiens
atgtaataaatcaga

SEQ ID NO: 302771 - DNA, 15 bp, Homo sapiens
tatgtaataaatcag

SEQ ID NO: 302772 - DNA, 15 bp, Homo sapiens
ctatgtaataaatca

SEQ ID NO: 302773 - DNA, 15 bp, Homo sapiens
tctatgtaataaatc

SEQ ID NO: 302774 - DNA, 15 bp, Homo sapiens
ttctatgtaataaat

SEQ ID NO: 302775 - DNA, 15 bp, Homo sapiens
cttctatgtaataaa

SEQ ID NO: 302776 - DNA, 15 bp, Homo sapiens
acttctatgtaataa

SEQ ID NO: 302777 - DNA, 15 bp, Homo sapiens
aacttctatgtaata

SEQ ID NO: 302778 - DNA, 15 bp, Homo sapiens
caacttctatgtaat

SEQ ID NO: 302779 - DNA, 15 bp, Homo sapiens
gcaacttctatgtaa

SEQ ID NO: 302780 - DNA, 15 bp, Homo sapiens
agcaacttctatgta

SEQ ID NO: 302781 - DNA, 15 bp, Homo sapiens
cagcaacttctatgt

SEQ ID NO: 302782 - DNA, 15 bp, Homo sapiens
ccagcaacttctatg

SEQ ID NO: 302783 - DNA, 15 bp, Homo sapiens
gccagcaacttctat

SEQ ID NO: 302784 - DNA, 15 bp, Homo sapiens
tgccagcaacttcta

SEQ ID NO: 302785 - DNA, 15 bp, Homo sapiens
ttgccagcaacttct

SEQ ID NO: 302786 - DNA, 15 bp, Homo sapiens
tttgccagcaacttc

SEQ ID NO: 302787 - DNA, 15 bp, Homo sapiens
atttgccagcaactt

SEQ ID NO: 302788 - DNA, 15 bp, Homo sapiens
tatttgccagcaact

SEQ ID NO: 302789 - DNA, 15 bp, Homo sapiens
atatttgccagcaac

SEQ ID NO: 302790 - DNA, 15 bp, Homo sapiens
catatttgccagcaa

SEQ ID NO: 302791 - DNA, 15 bp, Homo sapiens
tcatatttgccagca

SEQ ID NO: 302792 - DNA, 15 bp, Homo sapiens
ttcatatttgccagc

SEQ ID NO: 302793 - DNA, 15 bp, Homo sapiens
gttcatatttgccag

SEQ ID NO: 302794 - DNA, 15 bp, Homo sapiens
tgttcatatttgcca

SEQ ID NO: 302795 - DNA, 15 bp, Homo sapiens
gtgttcatatttgcc

SEQ ID NO: 302796 - DNA, 15 bp, Homo sapiens
agtgttcatatttgc

SEQ ID NO: 302797 - DNA, 15 bp, Homo sapiens
tagtgttcatatttg

SEQ ID NO: 302798 - DNA, 15 bp, Homo sapiens
ttagtgttcatattt

SEQ ID NO: 302799 - DNA, 15 bp, Homo sapiens
attagtgttcatatt

SEQ ID NO: 302800 - DNA, 15 bp, Homo sapiens
aattagtgttcatat

SEQ ID NO: 302801 - DNA, 15 bp, Homo sapiens
gaattagtgttcata

SEQ ID NO: 302802 - DNA, 15 bp, Homo sapiens
agaattagtgttcat

SEQ ID NO: 302803 - DNA, 15 bp, Homo sapiens
tagaattagtgttca

SEQ ID NO: 302804 - DNA, 15 bp, Homo sapiens
gtagaattagtgttc

SEQ ID NO: 302805 - DNA, 15 bp, Homo sapiens
agtagaattagtgtt

SEQ ID NO: 302806 - DNA, 15 bp, Homo sapiens
gagtagaattagtgt

SEQ ID NO: 302807 - DNA, 15 bp, Homo sapiens
agagtagaattagtg

SEQ ID NO: 302808 - DNA, 15 bp, Homo sapiens
cagagtagaattagt

SEQ ID NO: 302809 - DNA, 15 bp, Homo sapiens
ccagagtagaattag

SEQ ID NO: 302810 - DNA, 15 bp, Homo sapiens
accagagtagaatta

SEQ ID NO: 302811 - DNA, 15 bp, Homo sapiens
taccagagtagaatt

SEQ ID NO: 302812 - DNA, 15 bp, Homo sapiens
ttaccagagtagaat

SEQ ID NO: 302813 - DNA, 15 bp, Homo sapiens
gttaccagagtagaa

SEQ ID NO: 302814 - DNA, 15 bp, Homo sapiens
tgttaccagagtaga

SEQ ID NO: 302815 - DNA, 15 bp, Homo sapiens
ttgttaccagagtag

SEQ ID NO: 302816 - DNA, 15 bp, Homo sapiens
gttgttaccagagta

SEQ ID NO: 302817 - DNA, 15 bp, Homo sapiens
agttgttaccagagt

SEQ ID NO: 302818 - DNA, 15 bp, Homo sapiens
cagttgttaccagag

SEQ ID NO: 302819 - DNA, 15 bp, Homo sapiens
acagttgttaccaga

SEQ ID NO: 302820 - DNA, 15 bp, Homo sapiens
cacagttgttaccag

SEQ ID NO: 302821 - DNA, 15 bp, Homo sapiens
tcacagttgttacca

SEQ ID NO: 302822 - DNA, 15 bp, Homo sapiens
atcacagttgttacc

SEQ ID NO: 302823 - DNA, 15 bp, Homo sapiens
aatcacagttgttac

SEQ ID NO: 302824 - DNA, 15 bp, Homo sapiens
caatcacagttgtta

SEQ ID NO: 302825 - DNA, 15 bp, Homo sapiens
tcaatcacagttgtt

SEQ ID NO: 302826 - DNA, 15 bp, Homo sapiens
ttcaatcacagttgt

SEQ ID NO: 302827 - DNA, 15 bp, Homo sapiens
tttcaatcacagttg

SEQ ID NO: 302828 - DNA, 15 bp, Homo sapiens
atttcaatcacagtt

SEQ ID NO: 302829 - DNA, 15 bp, Homo sapiens
tatttcaatcacagt

SEQ ID NO: 302830 - DNA, 15 bp, Homo sapiens
ttatttcaatcacag

SEQ ID NO: 302831 - DNA, 15 bp, Homo sapiens
attatttcaatcaca

SEQ ID NO: 302832 - DNA, 15 bp, Homo sapiens
aattatttcaatcac

SEQ ID NO: 302833 - DNA, 15 bp, Homo sapiens
caattatttcaatca

SEQ ID NO: 302834 - DNA, 15 bp, Homo sapiens
acaattatttcaatc

SEQ ID NO: 302835 - DNA, 15 bp, Homo sapiens
tacaattatttcaat

SEQ ID NO: 302836 - DNA, 15 bp, Homo sapiens
ctacaattatttcaa

SEQ ID NO: 302837 - DNA, 15 bp, Homo sapiens
actacaattatttca

SEQ ID NO: 302838 - DNA, 15 bp, Homo sapiens
gactacaattatttc

SEQ ID NO: 302839 - DNA, 15 bp, Homo sapiens
agactacaattattt

SEQ ID NO: 302840 - DNA, 15 bp, Homo sapiens
cagactacaattatt

SEQ ID NO: 302841 - DNA, 15 bp, Homo sapiens
gcagactacaattat

SEQ ID NO: 302842 - DNA, 15 bp, Homo sapiens
tgcagactacaatta

SEQ ID NO: 302843 - DNA, 15 bp, Homo sapiens
ctgcagactacaatt

SEQ ID NO: 302844 - DNA, 15 bp, Homo sapiens
tctgcagactacaat

SEQ ID NO: 302845 - DNA, 15 bp, Homo sapiens
atctgcagactacaa

SEQ ID NO: 302846 - DNA, 15 bp, Homo sapiens
tatctgcagactaca

SEQ ID NO: 302847 - DNA, 15 bp, Homo sapiens
ttatctgcagactac

SEQ ID NO: 302848 - DNA, 15 bp, Homo sapiens
cttatctgcagacta

SEQ ID NO: 302849 - DNA, 15 bp, Homo sapiens
gcttatctgcagact

SEQ ID NO: 302850 - DNA, 15 bp, Homo sapiens
agcttatctgcagac

SEQ ID NO: 302851 - DNA, 15 bp, Homo sapiens
cagcttatctgcaga

SEQ ID NO: 302852 - DNA, 15 bp, Homo sapiens
ccagcttatctgcag

SEQ ID NO: 302853 - DNA, 15 bp, Homo sapiens
tccagcttatctgca

SEQ ID NO: 302854 - DNA, 15 bp, Homo sapiens
ctccagcttatctgc

SEQ ID NO: 302855 - DNA, 15 bp, Homo sapiens
tctccagcttatctg

SEQ ID NO: 302856 - DNA, 15 bp, Homo sapiens
ttctccagcttatct

SEQ ID NO: 302857 - DNA, 15 bp, Homo sapiens
tttctccagcttatc

SEQ ID NO: 302858 - DNA, 15 bp, Homo sapiens
ttttctccagcttat

SEQ ID NO: 302859 - DNA, 15 bp, Homo sapiens
gttttctccagctta

SEQ ID NO: 302860 - DNA, 15 bp, Homo sapiens
tgttttctccagctt

SEQ ID NO: 302861 - DNA, 15 bp, Homo sapiens
ttgttttctccagct

SEQ ID NO: 302862 - DNA, 15 bp, Homo sapiens
cttgttttctccagc

SEQ ID NO: 302863 - DNA, 15 bp, Homo sapiens
gcttgttttctccag

SEQ ID NO: 302864 - DNA, 15 bp, Homo sapiens
tgcttgttttctcca

SEQ ID NO: 302865 - DNA, 15 bp, Homo sapiens
atgcttgttttctcc

SEQ ID NO: 302866 - DNA, 15 bp, Homo sapiens
aatgcttgttttctc

SEQ ID NO: 302867 - DNA, 15 bp, Homo sapiens
taatgcttgttttct

SEQ ID NO: 302868 - DNA, 15 bp, Homo sapiens
ctaatgcttgttttc

SEQ ID NO: 302869 - DNA, 15 bp, Homo sapiens
actaatgcttgtttt

SEQ ID NO: 302870 - DNA, 15 bp, Homo sapiens
cactaatgcttgttt

SEQ ID NO: 302871 - DNA, 15 bp, Homo sapiens
ccactaatgcttgtt

SEQ ID NO: 302872 - DNA, 15 bp, Homo sapiens
cccactaatgcttgt

SEQ ID NO: 302873 - DNA, 15 bp, Homo sapiens
acccactaatgcttg

SEQ ID NO: 302874 - DNA, 15 bp, Homo sapiens
tacccactaatgctt

SEQ ID NO: 302875 - DNA, 15 bp, Homo sapiens
ctacccactaatgct

SEQ ID NO: 302876 - DNA, 15 bp, Homo sapiens
cctacccactaatgc

SEQ ID NO: 302877 - DNA, 15 bp, Homo sapiens
acctacccactaatg

SEQ ID NO: 302878 - DNA, 15 bp, Homo sapiens
aacctacccactaat

SEQ ID NO: 302879 - DNA, 15 bp, Homo sapiens
acaacctacccacta

SEQ ID NO: 302880 - DNA, 15 bp, Homo sapiens
gacaacctacccact

SEQ ID NO: 302881 - DNA, 15 bp, Homo sapiens
agacaacctacccac

SEQ ID NO: 302882 - DNA, 15 bp, Homo sapiens
aagacaacctaccca

SEQ ID NO: 302883 - DNA, 15 bp, Homo sapiens
caagacaacctaccc

SEQ ID NO: 302884 - DNA, 15 bp, Homo sapiens
ccaagacaacctacc

SEQ ID NO: 302885 - DNA, 15 bp, Homo sapiens
tccaagacaacctac

SEQ ID NO: 302886 - DNA, 15 bp, Homo sapiens
gtccaagacaaccta

SEQ ID NO: 302887 - DNA, 15 bp, Homo sapiens
tgtccaagacaacct

SEQ ID NO: 302888 - DNA, 15 bp, Homo sapiens
atgtccaagacaacc

SEQ ID NO: 302889 - DNA, 15 bp, Homo sapiens
gatgtccaagacaac

SEQ ID NO: 302890 - DNA, 15 bp, Homo sapiens
tgatgtccaagacaa

SEQ ID NO: 302891 - DNA, 15 bp, Homo sapiens
atgatgtccaagaca

SEQ ID NO: 302892 - DNA, 15 bp, Homo sapiens
aatgatgtccaagac

SEQ ID NO: 302893 - DNA, 15 bp, Homo sapiens
gaatgatgtccaaga

SEQ ID NO: 302894 - DNA, 15 bp, Homo sapiens
ggaatgatgtccaag

SEQ ID NO: 302895 - DNA, 15 bp, Homo sapiens
tggaatgatgtccaa

SEQ ID NO: 302896 - DNA, 15 bp, Homo sapiens
ttggaatgatgtcca

SEQ ID NO: 302897 - DNA, 15 bp, Homo sapiens
tttggaatgatgtcc

SEQ ID NO: 302898 - DNA, 15 bp, Homo sapiens
ttttggaatgatgtc

SEQ ID NO: 302899 - DNA, 15 bp, Homo sapiens
cttttggaatgatgt

SEQ ID NO: 302900 - DNA, 15 bp, Homo sapiens
acttttggaatgatg

SEQ ID NO: 302901 - DNA, 15 bp, Homo sapiens
cacttttggaatgat

SEQ ID NO: 302902 - DNA, 15 bp, Homo sapiens
acacttttggaatga

SEQ ID NO: 302903 - DNA, 15 bp, Homo sapiens
tacacttttggaatg

SEQ ID NO: 302904 - DNA, 15 bp, Homo sapiens
ttacacttttggaat

SEQ ID NO: 302905 - DNA, 15 bp, Homo sapiens
gttacacttttggaa

SEQ ID NO: 302906 - DNA, 15 bp, Homo sapiens
tgttacacttttgga

SEQ ID NO: 302907 - DNA, 15 bp, Homo sapiens
ctgttacacttttgg

SEQ ID NO: 302908 - DNA, 15 bp, Homo sapiens
actgttacacttttg

SEQ ID NO: 302909 - DNA, 15 bp, Homo sapiens
cactgttacactttt

SEQ ID NO: 302910 - DNA, 15 bp, Homo sapiens
tcactgttacacttt

SEQ ID NO: 302911 - DNA, 15 bp, Homo sapiens
ttcactgttacactt

SEQ ID NO: 302912 - DNA, 15 bp, Homo sapiens
tttcactgttacact

SEQ ID NO: 302913 - DNA, 15 bp, Homo sapiens
ttttcactgttacac

SEQ ID NO: 302914 - DNA, 15 bp, Homo sapiens
tttttcactgttaca

SEQ ID NO: 302915 - DNA, 15 bp, Homo sapiens
ctttttcactgttac

SEQ ID NO: 302916 - DNA, 15 bp, Homo sapiens
actttttcactgtta

SEQ ID NO: 302917 - DNA, 15 bp, Homo sapiens
tactttttcactgtt

SEQ ID NO: 302918 - DNA, 15 bp, Homo sapiens
gtactttttcactgt

SEQ ID NO: 302919 - DNA, 15 bp, Homo sapiens
cgtactttttcactg

SEQ ID NO: 302920 - DNA, 15 bp, Homo sapiens
acgtactttttcact

SEQ ID NO: 302921 - DNA, 15 bp, Homo sapiens
cacgtactttttcac

SEQ ID NO: 302922 - DNA, 15 bp, Homo sapiens
gcacgtactttttca

SEQ ID NO: 302923 - DNA, 15 bp, Homo sapiens
agcacgtactttttc

SEQ ID NO: 302924 - DNA, 15 bp, Homo sapiens
gagcacgtacttttt

SEQ ID NO: 302925 - DNA, 15 bp, Homo sapiens
agagcacgtactttt

SEQ ID NO: 302926 - DNA, 15 bp, Homo sapiens
aagagcacgtacttt

SEQ ID NO: 302927 - DNA, 15 bp, Homo sapiens
taagagcacgtactt

SEQ ID NO: 302928 - DNA, 15 bp, Homo sapiens
ctaagagcacgtact

SEQ ID NO: 302929 - DNA, 15 bp, Homo sapiens
tctaagagcacgtac

SEQ ID NO: 302930 - DNA, 15 bp, Homo sapiens
ctctaagagcacgta

SEQ ID NO: 302931 - DNA, 15 bp, Homo sapiens
tctctaagagcacgt

SEQ ID NO: 302932 - DNA, 15 bp, Homo sapiens
ttctctaagagcacg

SEQ ID NO: 302933 - DNA, 15 bp, Homo sapiens
cttctctaagagcac

SEQ ID NO: 302934 - DNA, 15 bp, Homo sapiens
tcttctctaagagca

SEQ ID NO: 302935 - DNA, 15 bp, Homo sapiens
ttcttctctaagagc

SEQ ID NO: 302936 - DNA, 15 bp, Homo sapiens
tttcttctctaagag

SEQ ID NO: 302937 - DNA, 15 bp, Homo sapiens
ttttcttctctaaga

SEQ ID NO: 302938 - DNA, 15 bp, Homo sapiens
gttttcttctctaag

SEQ ID NO: 302939 - DNA, 15 bp, Homo sapiens
agttttcttctctaa

SEQ ID NO: 302940 - DNA, 15 bp, Homo sapiens
aagttttcttctcta

SEQ ID NO: 302941 - DNA, 15 bp, Homo sapiens
taagttttcttctct

SEQ ID NO: 302942 - DNA, 15 bp, Homo sapiens
gtaagttttcttctc

SEQ ID NO: 302943 - DNA, 15 bp, Homo sapiens
tgtaagttttcttct

SEQ ID NO: 302944 - DNA, 15 bp, Homo sapiens
ttgtaagttttcttc

SEQ ID NO: 302945 - DNA, 15 bp, Homo sapiens
cttgtaagttttctt

SEQ ID NO: 302946 - DNA, 15 bp, Homo sapiens
tcttgtaagttttct

SEQ ID NO: 302947 - DNA, 15 bp, Homo sapiens
ctcttgtaagttttc

SEQ ID NO: 302948 - DNA, 15 bp, Homo sapiens
tctcttgtaagtttt

SEQ ID NO: 302949 - DNA, 15 bp, Homo sapiens
atctcttgtaagttt

SEQ ID NO: 302950 - DNA, 15 bp, Homo sapiens
tatctcttgtaagtt

SEQ ID NO: 302951 - DNA, 15 bp, Homo sapiens
atatctcttgtaagt

SEQ ID NO: 302952 - DNA, 15 bp, Homo sapiens
aatatctcttgtaag

SEQ ID NO: 302953 - DNA, 15 bp, Homo sapiens
aaatatctcttgtaa

SEQ ID NO: 302954 - DNA, 15 bp, Homo sapiens
taaatatctcttgta

SEQ ID NO: 302955 - DNA, 15 bp, Homo sapiens
gtaaatatctcttgt

SEQ ID NO: 302956 - DNA, 15 bp, Homo sapiens
tgtaaatatctcttg

SEQ ID NO: 302957 - DNA, 15 bp, Homo sapiens
ttgtaaatatctctt

SEQ ID NO: 302958 - DNA, 15 bp, Homo sapiens
cttgtaaatatctct

SEQ ID NO: 302959 - DNA, 15 bp, Homo sapiens
tcttgtaaatatctc

SEQ ID NO: 302960 - DNA, 15 bp, Homo sapiens
gtcttgtaaatatct

SEQ ID NO: 302961 - DNA, 15 bp, Homo sapiens
tgtcttgtaaatatc

SEQ ID NO: 302962 - DNA, 15 bp, Homo sapiens
atgtcttgtaaatat

SEQ ID NO: 302963 - DNA, 15 bp, Homo sapiens
tatgtcttgtaaata

SEQ ID NO: 302964 - DNA, 15 bp, Homo sapiens
atatgtcttgtaaat

SEQ ID NO: 302965 - DNA, 15 bp, Homo sapiens
catatgtcttgtaaa

SEQ ID NO: 302966 - DNA, 15 bp, Homo sapiens
tcatatgtcttgtaa

SEQ ID NO: 302967 - DNA, 15 bp, Homo sapiens
gtcatatgtcttgta

SEQ ID NO: 302968 - DNA, 15 bp, Homo sapiens
agtcatatgtcttgt

SEQ ID NO: 302969 - DNA, 15 bp, Homo sapiens
cagtcatatgtcttg

SEQ ID NO: 302970 - DNA, 15 bp, Homo sapiens
ccagtcatatgtctt

SEQ ID NO: 302971 - DNA, 15 bp, Homo sapiens
accagtcatatgtct

SEQ ID NO: 302972 - DNA, 15 bp, Homo sapiens
aaccagtcatatgtc

SEQ ID NO: 302973 - DNA, 15 bp, Homo sapiens
gaaccagtcatatgt

SEQ ID NO: 302974 - DNA, 15 bp, Homo sapiens
tgaaccagtcatatg

SEQ ID NO: 302975 - DNA, 15 bp, Homo sapiens
ctgaaccagtcatat

SEQ ID NO: 302976 - DNA, 15 bp, Homo sapiens
tctgaaccagtcata

SEQ ID NO: 302977 - DNA, 15 bp, Homo sapiens
atctgaaccagtcat

SEQ ID NO: 302978 - DNA, 15 bp, Homo sapiens
gatctgaaccagtca

SEQ ID NO: 302979 - DNA, 15 bp, Homo sapiens
agatctgaaccagtc

SEQ ID NO: 302980 - DNA, 15 bp, Homo sapiens
gagatctgaaccagt

SEQ ID NO: 302981 - DNA, 15 bp, Homo sapiens
agagatctgaaccag

SEQ ID NO: 302982 - DNA, 15 bp, Homo sapiens
cagagatctgaacca

SEQ ID NO: 302983 - DNA, 15 bp, Homo sapiens
gcagagatctgaacc

SEQ ID NO: 302984 - DNA, 15 bp, Homo sapiens
ggcagagatctgaac

SEQ ID NO: 302985 - DNA, 15 bp, Homo sapiens
aggcagagatctgaa

SEQ ID NO: 302986 - DNA, 15 bp, Homo sapiens
gaggcagagatctga

SEQ ID NO: 302987 - DNA, 15 bp, Homo sapiens
agaggcagagatctg

SEQ ID NO: 302988 - DNA, 15 bp, Homo sapiens
aagaggcagagatct

SEQ ID NO: 302989 - DNA, 15 bp, Homo sapiens
taagaggcagagatc

SEQ ID NO: 302990 - DNA, 15 bp, Homo sapiens
ataagaggcagagat

SEQ ID NO: 302991 - DNA, 15 bp, Homo sapiens
cataagaggcagaga

SEQ ID NO: 302992 - DNA, 15 bp, Homo sapiens
acataagaggcagag

SEQ ID NO: 302993 - DNA, 15 bp, Homo sapiens
tacataagaggcaga

SEQ ID NO: 302994 - DNA, 15 bp, Homo sapiens
ctacataagaggcag

SEQ ID NO: 302995 - DNA, 15 bp, Homo sapiens
tctacataagaggca

SEQ ID NO: 302996 - DNA, 15 bp, Homo sapiens
atctacataagaggc

SEQ ID NO: 302997 - DNA, 15 bp, Homo sapiens
gatctacataagagg

SEQ ID NO: 302998 - DNA, 15 bp, Homo sapiens
ggatctacataagag

SEQ ID NO: 302999 - DNA, 15 bp, Homo sapiens
cggatctacataaga

SEQ ID NO: 303000 - DNA, 15 bp, Homo sapiens
acggatctacataag

SEQ ID NO: 303001 - DNA, 15 bp, Homo sapiens
cacggatctacataa

SEQ ID NO: 303002 - DNA, 15 bp, Homo sapiens
gcacggatctacata

SEQ ID NO: 303003 - DNA, 15 bp, Homo sapiens
agcacggatctacat

SEQ ID NO: 303004 - DNA, 15 bp, Homo sapiens
tagcacggatctaca

SEQ ID NO: 303005 - DNA, 15 bp, Homo sapiens
ttagcacggatctac

SEQ ID NO: 303006 - DNA, 15 bp, Homo sapiens
cttagcacggatcta

SEQ ID NO: 303007 - DNA, 15 bp, Homo sapiens
gcttagcacggatct

SEQ ID NO: 303008 - DNA, 15 bp, Homo sapiens
ggcttagcacggatc

SEQ ID NO: 303009 - DNA, 15 bp, Homo sapiens
tggcttagcacggat

SEQ ID NO: 303010 - DNA, 15 bp, Homo sapiens
ttggcttagcacgga

SEQ ID NO: 303011 - DNA, 15 bp, Homo sapiens
gttggcttagcacgg

SEQ ID NO: 303012 - DNA, 15 bp, Homo sapiens
ggttggcttagcacg

SEQ ID NO: 303013 - DNA, 15 bp, Homo sapiens
tggttggcttagcac

SEQ ID NO: 303014 - DNA, 15 bp, Homo sapiens
ctggttggcttagca

SEQ ID NO: 303015 - DNA, 15 bp, Homo sapiens
cctggttggcttagc

SEQ ID NO: 303016 - DNA, 15 bp, Homo sapiens
gcctggttggcttag

SEQ ID NO: 303017 - DNA, 15 bp, Homo sapiens
tgcctggttggctta

SEQ ID NO: 303018 - DNA, 15 bp, Homo sapiens
ttgcctggttggctt

SEQ ID NO: 303019 - DNA, 15 bp, Homo sapiens
cttgcctggttggct

SEQ ID NO: 303020 - DNA, 15 bp, Homo sapiens
ccttgcctggttggc

SEQ ID NO: 303021 - DNA, 15 bp, Homo sapiens
tccttgcctggttgg

SEQ ID NO: 303022 - DNA, 15 bp, Homo sapiens
ttccttgcctggttg

SEQ ID NO: 303023 - DNA, 15 bp, Homo sapiens
tttccttgcctggtt

SEQ ID NO: 303024 - DNA, 15 bp, Homo sapiens
ctttccttgcctggt

SEQ ID NO: 303025 - DNA, 15 bp, Homo sapiens
gctttccttgcctgg

SEQ ID NO: 303026 - DNA, 15 bp, Homo sapiens
agctttccttgcctg

SEQ ID NO: 303027 - DNA, 15 bp, Homo sapiens
gagctttccttgcct

SEQ ID NO: 303028 - DNA, 15 bp, Homo sapiens
agagctttccttgcc

SEQ ID NO: 303029 - DNA, 15 bp, Homo sapiens
gagagctttccttgc

SEQ ID NO: 303030 - DNA, 15 bp, Homo sapiens
tgagagctttccttg

SEQ ID NO: 303031 - DNA, 15 bp, Homo sapiens
atgagagctttcctt

SEQ ID NO: 303032 - DNA, 15 bp, Homo sapiens
gatgagagctttcct

SEQ ID NO: 303033 - DNA, 15 bp, Homo sapiens
agatgagagctttcc

SEQ ID NO: 303034 - DNA, 15 bp, Homo sapiens
gagatgagagctttc

SEQ ID NO: 303035 - DNA, 15 bp, Homo sapiens
agagatgagagcttt

SEQ ID NO: 303036 - DNA, 15 bp, Homo sapiens
tagagatgagagctt

SEQ ID NO: 303037 - DNA, 15 bp, Homo sapiens
ttagagatgagagct

SEQ ID NO: 303038 - DNA, 15 bp, Homo sapiens
tttagagatgagagc

SEQ ID NO: 303039 - DNA, 15 bp, Homo sapiens
ttttagagatgagag

SEQ ID NO: 303040 - DNA, 15 bp, Homo sapiens
tttttagagatgaga

SEQ ID NO: 303041 - DNA, 15 bp, Homo sapiens
ttttttagagatgag

SEQ ID NO: 303042 - DNA, 15 bp, Homo sapiens
tttttttagagatga

SEQ ID NO: 303043 - DNA, 15 bp, Homo sapiens
ttttttttagagatg

SEQ ID NO: 303044 - DNA, 15 bp, Homo sapiens
tttttttttagagat

SEQ ID NO: 303045 - DNA, 15 bp, Homo sapiens
ttttttttttagaga

SEQ ID NO: 303046 - DNA, 15 bp, Homo sapiens
tttttttttttagag

SEQ ID NO: 303047 - DNA, 15 bp, Homo sapiens
gtttttttttttaga

SEQ ID NO: 303048 - DNA, 15 bp, Homo sapiens
agtttttttttttag

SEQ ID NO: 303049 - DNA, 15 bp, Homo sapiens
tagttttttttttta

SEQ ID NO: 303050 - DNA, 15 bp, Homo sapiens
ctagttttttttttt

SEQ ID NO: 303051 - DNA, 15 bp, Homo sapiens
cctagtttttttttt

SEQ ID NO: 303052 - DNA, 15 bp, Homo sapiens
tcctagttttttttt

SEQ ID NO: 303053 - DNA, 15 bp, Homo sapiens
ttcctagtttttttt

SEQ ID NO: 303054 - DNA, 15 bp, Homo sapiens
tttcctagttttttt

SEQ ID NO: 303055 - DNA, 15 bp, Homo sapiens
ttttcctagtttttt

SEQ ID NO: 303056 - DNA, 15 bp, Homo sapiens
tttttcctagttttt

SEQ ID NO: 303057 - DNA, 15 bp, Homo sapiens
ttttttcctagtttt

SEQ ID NO: 303058 - DNA, 15 bp, Homo sapiens
cttttttcctagttt

SEQ ID NO: 303059 - DNA, 15 bp, Homo sapiens
ccttttttcctagtt

SEQ ID NO: 303060 - DNA, 15 bp, Homo sapiens
tccttttttcctagt

SEQ ID NO: 303061 - DNA, 15 bp, Homo sapiens
ctccttttttcctag

SEQ ID NO: 303062 - DNA, 15 bp, Homo sapiens
tctccttttttccta

SEQ ID NO: 303063 - DNA, 15 bp, Homo sapiens
ttctccttttttcct

SEQ ID NO: 303064 - DNA, 15 bp, Homo sapiens
attctccttttttcc

SEQ ID NO: 303065 - DNA, 15 bp, Homo sapiens
tattctccttttttc

SEQ ID NO: 303066 - DNA, 15 bp, Homo sapiens
ttattctcctttttt

SEQ ID NO: 303067 - DNA, 15 bp, Homo sapiens
gttattctccttttt

SEQ ID NO: 303068 - DNA, 15 bp, Homo sapiens
tgttattctcctttt

SEQ ID NO: 303069 - DNA, 15 bp, Homo sapiens
ttgttattctccttt

SEQ ID NO: 303070 - DNA, 15 bp, Homo sapiens
tttgttattctcctt

SEQ ID NO: 303071 - DNA, 15 bp, Homo sapiens
gtttgttattctcct

SEQ ID NO: 303072 - DNA, 15 bp, Homo sapiens
agtttgttattctcc

SEQ ID NO: 303073 - DNA, 15 bp, Homo sapiens
gagtttgttattctc

SEQ ID NO: 303074 - DNA, 15 bp, Homo sapiens
ggagtttgttattct

SEQ ID NO: 303075 - DNA, 15 bp, Homo sapiens
aggagtttgttattc

SEQ ID NO: 303076 - DNA, 15 bp, Homo sapiens
caggagtttgttatt

SEQ ID NO: 303077 - DNA, 15 bp, Homo sapiens
acaggagtttgttat

SEQ ID NO: 303078 - DNA, 15 bp, Homo sapiens
cacaggagtttgtta

SEQ ID NO: 303079 - DNA, 15 bp, Homo sapiens
ccacaggagtttgtt

SEQ ID NO: 303080 - DNA, 15 bp, Homo sapiens
gccacaggagtttgt

SEQ ID NO: 303081 - DNA, 15 bp, Homo sapiens
ggccacaggagtttg

SEQ ID NO: 303082 - DNA, 15 bp, Homo sapiens
tggccacaggagttt

SEQ ID NO: 303083 - DNA, 15 bp, Homo sapiens
gtggccacaggagtt

SEQ ID NO: 303084 - DNA, 15 bp, Homo sapiens
agtggccacaggagt

SEQ ID NO: 303085 - DNA, 15 bp, Homo sapiens
gagtggccacaggag

SEQ ID NO: 303086 - DNA, 15 bp, Homo sapiens
tgagtggccacagga

SEQ ID NO: 303087 - DNA, 15 bp, Homo sapiens
atgagtggccacagg

SEQ ID NO: 303088 - DNA, 15 bp, Homo sapiens
aatgagtggccacag

SEQ ID NO: 303089 - DNA, 15 bp, Homo sapiens
taatgagtggccaca

SEQ ID NO: 303090 - DNA, 15 bp, Homo sapiens
ttaatgagtggccac

SEQ ID NO: 303091 - DNA, 15 bp, Homo sapiens
tttaatgagtggcca

SEQ ID NO: 303092 - DNA, 15 bp, Homo sapiens
ctttaatgagtggcc

SEQ ID NO: 303093 - DNA, 15 bp, Homo sapiens
actttaatgagtggc

SEQ ID NO: 303094 - DNA, 15 bp, Homo sapiens
cactttaatgagtgg

SEQ ID NO: 303095 - DNA, 15 bp, Homo sapiens
tcactttaatgagtg

SEQ ID NO: 303096 - DNA, 15 bp, Homo sapiens
gtcactttaatgagt

SEQ ID NO: 303097 - DNA, 15 bp, Homo sapiens
agtcactttaatgag

SEQ ID NO: 303098 - DNA, 15 bp, Homo sapiens
aagtcactttaatga

SEQ ID NO: 303099 - DNA, 15 bp, Homo sapiens
taagtcactttaatg

SEQ ID NO: 303100 - DNA, 15 bp, Homo sapiens
ataagtcactttaat

SEQ ID NO: 303101 - DNA, 15 bp, Homo sapiens
cataagtcactttaa

SEQ ID NO: 303102 - DNA, 15 bp, Homo sapiens
ccataagtcacttta

SEQ ID NO: 303103 - DNA, 15 bp, Homo sapiens
gccataagtcacttt

SEQ ID NO: 303104 - DNA, 15 bp, Homo sapiens
agccataagtcactt

SEQ ID NO: 303105 - DNA, 15 bp, Homo sapiens
aagccataagtcact

SEQ ID NO: 303106 - DNA, 15 bp, Homo sapiens
aaagccataagtcac

SEQ ID NO: 303107 - DNA, 15 bp, Homo sapiens
gaaagccataagtca

SEQ ID NO: 303108 - DNA, 15 bp, Homo sapiens
agaaagccataagtc

SEQ ID NO: 303109 - DNA, 15 bp, Homo sapiens
gagaaagccataagt

SEQ ID NO: 303110 - DNA, 15 bp, Homo sapiens
agagaaagccataag

SEQ ID NO: 303111 - DNA, 15 bp, Homo sapiens
cagagaaagccataa

SEQ ID NO: 303112 - DNA, 15 bp, Homo sapiens
acagagaaagccata

SEQ ID NO: 303113 - DNA, 15 bp, Homo sapiens
gacagagaaagccat

SEQ ID NO: 303114 - DNA, 15 bp, Homo sapiens
tgacagagaaagcca

SEQ ID NO: 303115 - DNA, 15 bp, Homo sapiens
ttgacagagaaagcc

SEQ ID NO: 303116 - DNA, 15 bp, Homo sapiens
cttgacagagaaagc

SEQ ID NO: 303117 - DNA, 15 bp, Homo sapiens
tcttgacagagaaag

SEQ ID NO: 303118 - DNA, 15 bp, Homo sapiens
ttcttgacagagaaa

SEQ ID NO: 303119 - DNA, 15 bp, Homo sapiens
tttcttgacagagaa

SEQ ID NO: 303120 - DNA, 15 bp, Homo sapiens
atttcttgacagaga

SEQ ID NO: 303121 - DNA, 15 bp, Homo sapiens
gatttcttgacagag

SEQ ID NO: 303122 - DNA, 15 bp, Homo sapiens
agatttcttgacaga

SEQ ID NO: 303123 - DNA, 15 bp, Homo sapiens
aagatttcttgacag

SEQ ID NO: 303124 - DNA, 15 bp, Homo sapiens
caagatttcttgaca

SEQ ID NO: 303125 - DNA, 15 bp, Homo sapiens
ccaagatttcttgac

SEQ ID NO: 303126 - DNA, 15 bp, Homo sapiens
gccaagatttcttga

SEQ ID NO: 303127 - DNA, 15 bp, Homo sapiens
agccaagatttcttg

SEQ ID NO: 303128 - DNA, 15 bp, Homo sapiens
tagccaagatttctt

SEQ ID NO: 303129 - DNA, 15 bp, Homo sapiens
ttagccaagatttct

SEQ ID NO: 303130 - DNA, 15 bp, Homo sapiens
attagccaagatttc

SEQ ID NO: 303131 - DNA, 15 bp, Homo sapiens
aattagccaagattt

SEQ ID NO: 303132 - DNA, 15 bp, Homo sapiens
taattagccaagatt

SEQ ID NO: 303133 - DNA, 15 bp, Homo sapiens
ataattagccaagat

SEQ ID NO: 303134 - DNA, 15 bp, Homo sapiens
aataattagccaaga

SEQ ID NO: 303135 - DNA, 15 bp, Homo sapiens
aaataattagccaag

SEQ ID NO: 303136 - DNA, 15 bp, Homo sapiens
taaataattagccaa

SEQ ID NO: 303137 - DNA, 15 bp, Homo sapiens
ctaaataattagcca

SEQ ID NO: 303138 - DNA, 15 bp, Homo sapiens
gctaaataattagcc

SEQ ID NO: 303139 - DNA, 15 bp, Homo sapiens
tgctaaataattagc

SEQ ID NO: 303140 - DNA, 15 bp, Homo sapiens
atgctaaataattag

SEQ ID NO: 303141 - DNA, 15 bp, Homo sapiens
aatgctaaataatta

SEQ ID NO: 303142 - DNA, 15 bp, Homo sapiens
aaatgctaaataatt

SEQ ID NO: 303143 - DNA, 15 bp, Homo sapiens
taaatgctaaataat

SEQ ID NO: 303144 - DNA, 15 bp, Homo sapiens
ataaatgctaaataa

SEQ ID NO: 303145 - DNA, 15 bp, Homo sapiens
cataaatgctaaata

SEQ ID NO: 303146 - DNA, 15 bp, Homo sapiens
tcataaatgctaaat

SEQ ID NO: 303147 - DNA, 15 bp, Homo sapiens
ctcataaatgctaaa

SEQ ID NO: 303148 - DNA, 15 bp, Homo sapiens
tctcataaatgctaa

SEQ ID NO: 303149 - DNA, 15 bp, Homo sapiens
gtctcataaatgcta

SEQ ID NO: 303150 - DNA, 15 bp, Homo sapiens
agtctcataaatgct

SEQ ID NO: 303151 - DNA, 15 bp, Homo sapiens
cagtctcataaatgc

SEQ ID NO: 303152 - DNA, 15 bp, Homo sapiens
acagtctcataaatg

SEQ ID NO: 303153 - DNA, 15 bp, Homo sapiens
cacagtctcataaat

SEQ ID NO: 303154 - DNA, 15 bp, Homo sapiens
acacagtctcataaa

SEQ ID NO: 303155 - DNA, 15 bp, Homo sapiens
cacacagtctcataa

SEQ ID NO: 303156 - DNA, 15 bp, Homo sapiens
ccacacagtctcata

SEQ ID NO: 303157 - DNA, 15 bp, Homo sapiens
gccacacagtctcat

SEQ ID NO: 303158 - DNA, 15 bp, Homo sapiens
agccacacagtctca

SEQ ID NO: 303159 - DNA, 15 bp, Homo sapiens
cagccacacagtctc

SEQ ID NO: 303160 - DNA, 15 bp, Homo sapiens
gcagccacacagtct

SEQ ID NO: 303161 - DNA, 15 bp, Homo sapiens
ggcagccacacagtc

SEQ ID NO: 303162 - DNA, 15 bp, Homo sapiens
aggcagccacacagt

SEQ ID NO: 303163 - DNA, 15 bp, Homo sapiens
aaggcagccacacag

SEQ ID NO: 303164 - DNA, 15 bp, Homo sapiens
gaaggcagccacaca

SEQ ID NO: 303165 - DNA, 15 bp, Homo sapiens
tgaaggcagccacac

SEQ ID NO: 303166 - DNA, 15 bp, Homo sapiens
atgaaggcagccaca

SEQ ID NO: 303167 - DNA, 15 bp, Homo sapiens
catgaaggcagccac

SEQ ID NO: 303168 - DNA, 15 bp, Homo sapiens
ccatgaaggcagcca

SEQ ID NO: 303169 - DNA, 15 bp, Homo sapiens
tccatgaaggcagcc

SEQ ID NO: 303170 - DNA, 15 bp, Homo sapiens
ttccatgaaggcagc

SEQ ID NO: 303171 - DNA, 15 bp, Homo sapiens
tttccatgaaggcag

SEQ ID NO: 303172 - DNA, 15 bp, Homo sapiens
atttccatgaaggca

SEQ ID NO: 303173 - DNA, 15 bp, Homo sapiens
tatttccatgaaggc

SEQ ID NO: 303174 - DNA, 15 bp, Homo sapiens
atatttccatgaagg

SEQ ID NO: 303175 - DNA, 15 bp, Homo sapiens
tatatttccatgaag

SEQ ID NO: 303176 - DNA, 15 bp, Homo sapiens
ttatatttccatgaa

SEQ ID NO: 303177 - DNA, 15 bp, Homo sapiens
attatatttccatga

SEQ ID NO: 303178 - DNA, 15 bp, Homo sapiens
aattatatttccatg

SEQ ID NO: 303179 - DNA, 15 bp, Homo sapiens
aaattatatttccat

SEQ ID NO: 303180 - DNA, 15 bp, Homo sapiens
aaaattatatttcca

SEQ ID NO: 303181 - DNA, 15 bp, Homo sapiens
gaaaattatatttcc

SEQ ID NO: 303182 - DNA, 15 bp, Homo sapiens
tgaaaattatatttc

SEQ ID NO: 303183 - DNA, 15 bp, Homo sapiens
gtgaaaattatattt

SEQ ID NO: 303184 - DNA, 15 bp, Homo sapiens
agtgaaaattatatt

SEQ ID NO: 303185 - DNA, 15 bp, Homo sapiens
aagtgaaaattatat

SEQ ID NO: 303186 - DNA, 15 bp, Homo sapiens
aaagtgaaaattata

SEQ ID NO: 303187 - DNA, 15 bp, Homo sapiens
aaaagtgaaaattat

SEQ ID NO: 303188 - DNA, 15 bp, Homo sapiens
aaaaagtgaaaatta

SEQ ID NO: 303189 - DNA, 15 bp, Homo sapiens
gaaaaagtgaaaatt

SEQ ID NO: 303190 - DNA, 15 bp, Homo sapiens
agaaaaagtgaaaat

SEQ ID NO: 303191 - DNA, 15 bp, Homo sapiens
aagaaaaagtgaaaa

SEQ ID NO: 303192 - DNA, 15 bp, Homo sapiens
gaagaaaaagtgaaa

SEQ ID NO: 303193 - DNA, 15 bp, Homo sapiens
agaagaaaaagtgaa

SEQ ID NO: 303194 - DNA, 15 bp, Homo sapiens
aagaagaaaaagtga

SEQ ID NO: 303195 - DNA, 15 bp, Homo sapiens
aaagaagaaaaagtg

SEQ ID NO: 303196 - DNA, 15 bp, Homo sapiens
taaagaagaaaaagt

SEQ ID NO: 303197 - DNA, 15 bp, Homo sapiens
ttaaagaagaaaaag

SEQ ID NO: 303198 - DNA, 15 bp, Homo sapiens
attaaagaagaaaaa

SEQ ID NO: 303199 - DNA, 15 bp, Homo sapiens
tattaaagaagaaaa

SEQ ID NO: 303200 - DNA, 15 bp, Homo sapiens
gtattaaagaagaaa

SEQ ID NO: 303201 - DNA, 15 bp, Homo sapiens
agtattaaagaagaa

SEQ ID NO: 303202 - DNA, 15 bp, Homo sapiens
gagtattaaagaaga

SEQ ID NO: 303203 - DNA, 15 bp, Homo sapiens
agagtattaaagaag

SEQ ID NO: 303204 - DNA, 15 bp, Homo sapiens
tagagtattaaagaa

SEQ ID NO: 303205 - DNA, 15 bp, Homo sapiens
atagagtattaaaga

SEQ ID NO: 303206 - DNA, 15 bp, Homo sapiens
tatagagtattaaag

SEQ ID NO: 303207 - DNA, 15 bp, Homo sapiens
ctatagagtattaaa

SEQ ID NO: 303208 - DNA, 15 bp, Homo sapiens
tctatagagtattaa

SEQ ID NO: 303209 - DNA, 15 bp, Homo sapiens
ttctatagagtatta

SEQ ID NO: 303210 - DNA, 15 bp, Homo sapiens
attctatagagtatt

SEQ ID NO: 303211 - DNA, 15 bp, Homo sapiens
aattctatagagtat

SEQ ID NO: 303212 - DNA, 15 bp, Homo sapiens
taattctatagagta

SEQ ID NO: 303213 - DNA, 15 bp, Homo sapiens
ataattctatagagt

SEQ ID NO: 303214 - DNA, 15 bp, Homo sapiens
tataattctatagag

SEQ ID NO: 303215 - DNA, 15 bp, Homo sapiens
gtataattctataga

SEQ ID NO: 303216 - DNA, 15 bp, Homo sapiens
agtataattctatag

SEQ ID NO: 303217 - DNA, 15 bp, Homo sapiens
tagtataattctata

SEQ ID NO: 303218 - DNA, 15 bp, Homo sapiens
ctagtataattctat

SEQ ID NO: 303219 - DNA, 15 bp, Homo sapiens
cctagtataattcta

SEQ ID NO: 303220 - DNA, 15 bp, Homo sapiens
gcctagtataattct

SEQ ID NO: 303221 - DNA, 15 bp, Homo sapiens
tgcctagtataattc

SEQ ID NO: 303222 - DNA, 15 bp, Homo sapiens
atgcctagtataatt

SEQ ID NO: 303223 - DNA, 15 bp, Homo sapiens
aatgcctagtataat

SEQ ID NO: 303224 - DNA, 15 bp, Homo sapiens
aaatgcctagtataa

SEQ ID NO: 303225 - DNA, 15 bp, Homo sapiens
caaatgcctagtata

SEQ ID NO: 303226 - DNA, 15 bp, Homo sapiens
acaaatgcctagtat

SEQ ID NO: 303227 - DNA, 15 bp, Homo sapiens
cacaaatgcctagta

SEQ ID NO: 303228 - DNA, 15 bp, Homo sapiens
tcacaaatgcctagt

SEQ ID NO: 303229 - DNA, 15 bp, Homo sapiens
ttcacaaatgcctag

SEQ ID NO: 303230 - DNA, 15 bp, Homo sapiens
tttcacaaatgccta

SEQ ID NO: 303231 - DNA, 15 bp, Homo sapiens
atttcacaaatgcct

SEQ ID NO: 303232 - DNA, 15 bp, Homo sapiens
gatttcacaaatgcc

SEQ ID NO: 303233 - DNA, 15 bp, Homo sapiens
agatttcacaaatgc

SEQ ID NO: 303234 - DNA, 15 bp, Homo sapiens
aagatttcacaaatg

SEQ ID NO: 303235 - DNA, 15 bp, Homo sapiens
taagatttcacaaat

SEQ ID NO: 303236 - DNA, 15 bp, Homo sapiens
gtaagatttcacaaa

SEQ ID NO: 303237 - DNA, 15 bp, Homo sapiens
tgtaagatttcacaa

SEQ ID NO: 303238 - DNA, 15 bp, Homo sapiens
ctgtaagatttcaca

SEQ ID NO: 303239 - DNA, 15 bp, Homo sapiens
actgtaagatttcac

SEQ ID NO: 303240 - DNA, 15 bp, Homo sapiens
tactgtaagatttca

SEQ ID NO: 303241 - DNA, 15 bp, Homo sapiens
ctactgtaagatttc

SEQ ID NO: 303242 - DNA, 15 bp, Homo sapiens
gctactgtaagattt

SEQ ID NO: 303243 - DNA, 15 bp, Homo sapiens
ggctactgtaagatt

SEQ ID NO: 303244 - DNA, 15 bp, Homo sapiens
gggctactgtaagat

SEQ ID NO: 303245 - DNA, 15 bp, Homo sapiens
tgggctactgtaaga

SEQ ID NO: 303246 - DNA, 15 bp, Homo sapiens
ttgggctactgtaag

SEQ ID NO: 303247 - DNA, 15 bp, Homo sapiens
attgggctactgtaa

SEQ ID NO: 303248 - DNA, 15 bp, Homo sapiens
cattgggctactgta

SEQ ID NO: 303249 - DNA, 15 bp, Homo sapiens
gcattgggctactgt

SEQ ID NO: 303250 - DNA, 15 bp, Homo sapiens
tgcattgggctactg

SEQ ID NO: 303251 - DNA, 15 bp, Homo sapiens
gtgcattgggctact

SEQ ID NO: 303252 - DNA, 15 bp, Homo sapiens
tgtgcattgggctac

SEQ ID NO: 303253 - DNA, 15 bp, Homo sapiens
ctgtgcattgggcta

SEQ ID NO: 303254 - DNA, 15 bp, Homo sapiens
gctgtgcattgggct

SEQ ID NO: 303255 - DNA, 15 bp, Homo sapiens
ggctgtgcattgggc

SEQ ID NO: 303256 - DNA, 15 bp, Homo sapiens
aggctgtgcattggg

SEQ ID NO: 303257 - DNA, 15 bp, Homo sapiens
caggctgtgcattgg

SEQ ID NO: 303258 - DNA, 15 bp, Homo sapiens
acaggctgtgcattg

SEQ ID NO: 303259 - DNA, 15 bp, Homo sapiens
aacaggctgtgcatt

SEQ ID NO: 303260 - DNA, 15 bp, Homo sapiens
caacaggctgtgcat

SEQ ID NO: 303261 - DNA, 15 bp, Homo sapiens
ccaacaggctgtgca

SEQ ID NO: 303262 - DNA, 15 bp, Homo sapiens
cccaacaggctgtgc

SEQ ID NO: 303263 - DNA, 15 bp, Homo sapiens
gcccaacaggctgtg

SEQ ID NO: 303264 - DNA, 15 bp, Homo sapiens
tgcccaacaggctgt

SEQ ID NO: 303265 - DNA, 15 bp, Homo sapiens
atgcccaacaggctg

SEQ ID NO: 303266 - DNA, 15 bp, Homo sapiens
aatgcccaacaggct

SEQ ID NO: 303267 - DNA, 15 bp, Homo sapiens
aaatgcccaacaggc

SEQ ID NO: 303268 - DNA, 15 bp, Homo sapiens
caaatgcccaacagg

SEQ ID NO: 303269 - DNA, 15 bp, Homo sapiens
ccaaatgcccaacag

SEQ ID NO: 303270 - DNA, 15 bp, Homo sapiens
tccaaatgcccaaca

SEQ ID NO: 303271 - DNA, 15 bp, Homo sapiens
atccaaatgcccaac

SEQ ID NO: 303272 - DNA, 15 bp, Homo sapiens
aatccaaatgcccaa

SEQ ID NO: 303273 - DNA, 15 bp, Homo sapiens
taatccaaatgccca

SEQ ID NO: 303274 - DNA, 15 bp, Homo sapiens
gtaatccaaatgccc

SEQ ID NO: 303275 - DNA, 15 bp, Homo sapiens
tgtaatccaaatgcc

SEQ ID NO: 303276 - DNA, 15 bp, Homo sapiens
ctgtaatccaaatgc

SEQ ID NO: 303277 - DNA, 15 bp, Homo sapiens
actgtaatccaaatg

SEQ ID NO: 303278 - DNA, 15 bp, Homo sapiens
cactgtaatccaaat

SEQ ID NO: 303279 - DNA, 15 bp, Homo sapiens
gcactgtaatccaaa

SEQ ID NO: 303280 - DNA, 15 bp, Homo sapiens
tgcactgtaatccaa

SEQ ID NO: 303281 - DNA, 15 bp, Homo sapiens
ttgcactgtaatcca

SEQ ID NO: 303282 - DNA, 15 bp, Homo sapiens
gttgcactgtaatcc

SEQ ID NO: 303283 - DNA, 15 bp, Homo sapiens
tgttgcactgtaatc

SEQ ID NO: 303284 - DNA, 15 bp, Homo sapiens
gtgttgcactgtaat

SEQ ID NO: 303285 - DNA, 15 bp, Homo sapiens
ggtgttgcactgtaa

SEQ ID NO: 303286 - DNA, 15 bp, Homo sapiens
tggtgttgcactgta

SEQ ID NO: 303287 - DNA, 15 bp, Homo sapiens
ctggtgttgcactgt

SEQ ID NO: 303288 - DNA, 15 bp, Homo sapiens
tctggtgttgcactg

SEQ ID NO: 303289 - DNA, 15 bp, Homo sapiens
atctggtgttgcact

SEQ ID NO: 303290 - DNA, 15 bp, Homo sapiens
tatctggtgttgcac

SEQ ID NO: 303291 - DNA, 15 bp, Homo sapiens
ttatctggtgttgca

SEQ ID NO: 303292 - DNA, 15 bp, Homo sapiens
tttatctggtgttgc

SEQ ID NO: 303293 - DNA, 15 bp, Homo sapiens
ctttatctggtgttg

SEQ ID NO: 303294 - DNA, 15 bp, Homo sapiens
tctttatctggtgtt

SEQ ID NO: 303295 - DNA, 15 bp, Homo sapiens
ctctttatctggtgt

SEQ ID NO: 303296 - DNA, 15 bp, Homo sapiens
cctctttatctggtg

SEQ ID NO: 303297 - DNA, 15 bp, Homo sapiens
gcctctttatctggt

SEQ ID NO: 303298 - DNA, 15 bp, Homo sapiens
tgcctctttatctgg

SEQ ID NO: 303299 - DNA, 15 bp, Homo sapiens
ctgcctctttatctg

SEQ ID NO: 303300 - DNA, 15 bp, Homo sapiens
actgcctctttatct

SEQ ID NO: 303301 - DNA, 15 bp, Homo sapiens
tactgcctctttatc

SEQ ID NO: 303302 - DNA, 15 bp, Homo sapiens
ttactgcctctttat

SEQ ID NO: 303303 - DNA, 15 bp, Homo sapiens
tttactgcctcttta

SEQ ID NO: 303304 - DNA, 15 bp, Homo sapiens
ctttactgcctcttt

SEQ ID NO: 303305 - DNA, 15 bp, Homo sapiens
gctttactgcctctt

SEQ ID NO: 303306 - DNA, 15 bp, Homo sapiens
tgctttactgcctct

SEQ ID NO: 303307 - DNA, 15 bp, Homo sapiens
ctgctttactgcctc

SEQ ID NO: 303308 - DNA, 15 bp, Homo sapiens
tctgctttactgcct

SEQ ID NO: 303309 - DNA, 15 bp, Homo sapiens
atctgctttactgcc

SEQ ID NO: 303310 - DNA, 15 bp, Homo sapiens
tatctgctttactgc

SEQ ID NO: 303311 - DNA, 15 bp, Homo sapiens
gtatctgctttactg

SEQ ID NO: 303312 - DNA, 15 bp, Homo sapiens
tgtatctgctttact

SEQ ID NO: 303313 - DNA, 15 bp, Homo sapiens
ttgtatctgctttac

SEQ ID NO: 303314 - DNA, 15 bp, Homo sapiens
tttgtatctgcttta

SEQ ID NO: 303315 - DNA, 15 bp, Homo sapiens
atttgtatctgcttt

SEQ ID NO: 303316 - DNA, 15 bp, Homo sapiens
catttgtatctgctt

SEQ ID NO: 303317 - DNA, 15 bp, Homo sapiens
tcatttgtatctgct

SEQ ID NO: 303318 - DNA, 15 bp, Homo sapiens
ttcatttgtatctgc

SEQ ID NO: 303319 - DNA, 15 bp, Homo sapiens
tttcatttgtatctg

SEQ ID NO: 303320 - DNA, 15 bp, Homo sapiens
ttttcatttgtatct

SEQ ID NO: 303321 - DNA, 15 bp, Homo sapiens
tttttcatttgtatc

SEQ ID NO: 303322 - DNA, 15 bp, Homo sapiens
ttttttcatttgtat

SEQ ID NO: 303323 - DNA, 15 bp, Homo sapiens
tttttttcatttgta

SEQ ID NO: 303324 - DNA, 15 bp, Homo sapiens
atttttttcatttgt

SEQ ID NO: 303325 - DNA, 15 bp, Homo sapiens
tatttttttcatttg

SEQ ID NO: 303326 - DNA, 15 bp, Homo sapiens
ctatttttttcattt

SEQ ID NO: 303327 - DNA, 15 bp, Homo sapiens
tctatttttttcatt

SEQ ID NO: 303328 - DNA, 15 bp, Homo sapiens
ttctatttttttcat

SEQ ID NO: 303329 - DNA, 15 bp, Homo sapiens
tttctatttttttca

SEQ ID NO: 303330 - DNA, 15 bp, Homo sapiens
gtttctatttttttc

SEQ ID NO: 303331 - DNA, 15 bp, Homo sapiens
tgtttctattttttt

SEQ ID NO: 303332 - DNA, 15 bp, Homo sapiens
ttgtttctatttttt

SEQ ID NO: 303333 - DNA, 15 bp, Homo sapiens
attgtttctattttt

SEQ ID NO: 303334 - DNA, 15 bp, Homo sapiens
aattgtttctatttt

SEQ ID NO: 303335 - DNA, 15 bp, Homo sapiens
caattgtttctattt

SEQ ID NO: 303336 - DNA, 15 bp, Homo sapiens
tcaattgtttctatt

SEQ ID NO: 303337 - DNA, 15 bp, Homo sapiens
atcaattgtttctat

SEQ ID NO: 303338 - DNA, 15 bp, Homo sapiens
gatcaattgtttcta

SEQ ID NO: 303339 - DNA, 15 bp, Homo sapiens
ggatcaattgtttct

SEQ ID NO: 303340 - DNA, 15 bp, Homo sapiens
aggatcaattgtttc

SEQ ID NO: 303341 - DNA, 15 bp, Homo sapiens
taggatcaattgttt

SEQ ID NO: 303342 - DNA, 15 bp, Homo sapiens
ataggatcaattgtt

SEQ ID NO: 303343 - DNA, 15 bp, Homo sapiens
gataggatcaattgt

SEQ ID NO: 303344 - DNA, 15 bp, Homo sapiens
tgataggatcaattg

SEQ ID NO: 303345 - DNA, 15 bp, Homo sapiens
ctgataggatcaatt

SEQ ID NO: 303346 - DNA, 15 bp, Homo sapiens
actgataggatcaat

SEQ ID NO: 303347 - DNA, 15 bp, Homo sapiens
aactgataggatcaa

SEQ ID NO: 303348 - DNA, 15 bp, Homo sapiens
aaactgataggatca

SEQ ID NO: 303349 - DNA, 15 bp, Homo sapiens
aaaactgataggatc

SEQ ID NO: 303350 - DNA, 15 bp, Homo sapiens
aaaaactgataggat

SEQ ID NO: 303351 - DNA, 15 bp, Homo sapiens
caaaaactgatagga

SEQ ID NO: 303352 - DNA, 15 bp, Homo sapiens
acaaaaactgatagg

SEQ ID NO: 303353 - DNA, 15 bp, Homo sapiens
aacaaaaactgatag

SEQ ID NO: 303354 - DNA, 15 bp, Homo sapiens
gaacaaaaactgata

SEQ ID NO: 303355 - DNA, 15 bp, Homo sapiens
tgaacaaaaactgat

SEQ ID NO: 303356 - DNA, 15 bp, Homo sapiens
ctgaacaaaaactga

SEQ ID NO: 303357 - DNA, 15 bp, Homo sapiens
actgaacaaaaactg

SEQ ID NO: 303358 - DNA, 15 bp, Homo sapiens
aactgaacaaaaact

SEQ ID NO: 303359 - DNA, 15 bp, Homo sapiens
caactgaacaaaaac

SEQ ID NO: 303360 - DNA, 15 bp, Homo sapiens
tcaactgaacaaaaa

SEQ ID NO: 303361 - DNA, 15 bp, Homo sapiens
ttcaactgaacaaaa

SEQ ID NO: 303362 - DNA, 15 bp, Homo sapiens
attcaactgaacaaa

SEQ ID NO: 303363 - DNA, 15 bp, Homo sapiens
cattcaactgaacaa

SEQ ID NO: 303364 - DNA, 15 bp, Homo sapiens
tcattcaactgaaca

SEQ ID NO: 303365 - DNA, 15 bp, Homo sapiens
atcattcaactgaac

SEQ ID NO: 303366 - DNA, 15 bp, Homo sapiens
aatcattcaactgaa

SEQ ID NO: 303367 - DNA, 15 bp, Homo sapiens
caatcattcaactga

SEQ ID NO: 303368 - DNA, 15 bp, Homo sapiens
gcaatcattcaactg

SEQ ID NO: 303369 - DNA, 15 bp, Homo sapiens
ggcaatcattcaact

SEQ ID NO: 303370 - DNA, 15 bp, Homo sapiens
aggcaatcattcaac

SEQ ID NO: 303371 - DNA, 15 bp, Homo sapiens
aaggcaatcattcaa

SEQ ID NO: 303372 - DNA, 15 bp, Homo sapiens
aaaggcaatcattca

SEQ ID NO: 303373 - DNA, 15 bp, Homo sapiens
aaaaggcaatcattc

SEQ ID NO: 303374 - DNA, 15 bp, Homo sapiens
caaaaggcaatcatt

SEQ ID NO: 303375 - DNA, 15 bp, Homo sapiens
ccaaaaggcaatcat

SEQ ID NO: 303376 - DNA, 15 bp, Homo sapiens
cccaaaaggcaatca

SEQ ID NO: 303377 - DNA, 15 bp, Homo sapiens
ccccaaaaggcaatc

SEQ ID NO: 303378 - DNA, 15 bp, Homo sapiens
cccccaaaaggcaat

SEQ ID NO: 303379 - DNA, 15 bp, Homo sapiens
gcccccaaaaggcaa

SEQ ID NO: 303380 - DNA, 15 bp, Homo sapiens
tgcccccaaaaggca

SEQ ID NO: 303381 - DNA, 15 bp, Homo sapiens
atgcccccaaaaggc

SEQ ID NO: 303382 - DNA, 15 bp, Homo sapiens
aatgcccccaaaagg

SEQ ID NO: 303383 - DNA, 15 bp, Homo sapiens
aaatgcccccaaaag

SEQ ID NO: 303384 - DNA, 15 bp, Homo sapiens
aaaatgcccccaaaa

SEQ ID NO: 303385 - DNA, 15 bp, Homo sapiens
gaaaatgcccccaaa

SEQ ID NO: 303386 - DNA, 15 bp, Homo sapiens
agaaaatgcccccaa

SEQ ID NO: 303387 - DNA, 15 bp, Homo sapiens
tagaaaatgccccca

SEQ ID NO: 303388 - DNA, 15 bp, Homo sapiens
gtagaaaatgccccc

SEQ ID NO: 303389 - DNA, 15 bp, Homo sapiens
tgtagaaaatgcccc

SEQ ID NO: 303390 - DNA, 15 bp, Homo sapiens
ttgtagaaaatgccc

SEQ ID NO: 303391 - DNA, 15 bp, Homo sapiens
tttgtagaaaatgcc

SEQ ID NO: 303392 - DNA, 15 bp, Homo sapiens
gtttgtagaaaatgc

SEQ ID NO: 303393 - DNA, 15 bp, Homo sapiens
tgtttgtagaaaatg

SEQ ID NO: 303394 - DNA, 15 bp, Homo sapiens
ctgtttgtagaaaat

SEQ ID NO: 303395 - DNA, 15 bp, Homo sapiens
actgtttgtagaaaa

SEQ ID NO: 303396 - DNA, 15 bp, Homo sapiens
aactgtttgtagaaa

SEQ ID NO: 303397 - DNA, 15 bp, Homo sapiens
taactgtttgtagaa

SEQ ID NO: 303398 - DNA, 15 bp, Homo sapiens
gtaactgtttgtaga

SEQ ID NO: 303399 - DNA, 15 bp, Homo sapiens
agtaactgtttgtag

SEQ ID NO: 303400 - DNA, 15 bp, Homo sapiens
tagtaactgtttgta

SEQ ID NO: 303401 - DNA, 15 bp, Homo sapiens
atagtaactgtttgt

SEQ ID NO: 303402 - DNA, 15 bp, Homo sapiens
aatagtaactgtttg

SEQ ID NO: 303403 - DNA, 15 bp, Homo sapiens
taatagtaactgttt

SEQ ID NO: 303404 - DNA, 15 bp, Homo sapiens
ataatagtaactgtt

SEQ ID NO: 303405 - DNA, 15 bp, Homo sapiens
gataatagtaactgt

SEQ ID NO: 303406 - DNA, 15 bp, Homo sapiens
tgataatagtaactg

SEQ ID NO: 303407 - DNA, 15 bp, Homo sapiens
gtgataatagtaact

SEQ ID NO: 303408 - DNA, 15 bp, Homo sapiens
agtgataatagtaac

SEQ ID NO: 303409 - DNA, 15 bp, Homo sapiens
tagtgataatagtaa

SEQ ID NO: 303410 - DNA, 15 bp, Homo sapiens
atagtgataatagta

SEQ ID NO: 303411 - DNA, 15 bp, Homo sapiens
aatagtgataatagt

SEQ ID NO: 303412 - DNA, 15 bp, Homo sapiens
taatagtgataatag

SEQ ID NO: 303413 - DNA, 15 bp, Homo sapiens
ataatagtgataata

SEQ ID NO: 303414 - DNA, 15 bp, Homo sapiens
aataatagtgataat

SEQ ID NO: 303415 - DNA, 15 bp, Homo sapiens
taataatagtgataa

SEQ ID NO: 303416 - DNA, 15 bp, Homo sapiens
ataataatagtgata

SEQ ID NO: 303417 - DNA, 15 bp, Homo sapiens
aataataatagtgat

SEQ ID NO: 303418 - DNA, 15 bp, Homo sapiens
taataataatagtga

SEQ ID NO: 303419 - DNA, 15 bp, Homo sapiens
gtaataataatagtg

SEQ ID NO: 303420 - DNA, 15 bp, Homo sapiens
ggtaataataatagt

SEQ ID NO: 303421 - DNA, 15 bp, Homo sapiens
aggtaataataatag

SEQ ID NO: 303422 - DNA, 15 bp, Homo sapiens
aaggtaataataata

SEQ ID NO: 303423 - DNA, 15 bp, Homo sapiens
taaggtaataataat

SEQ ID NO: 303424 - DNA, 15 bp, Homo sapiens
ctaaggtaataataa

SEQ ID NO: 303425 - DNA, 15 bp, Homo sapiens
actaaggtaataata

SEQ ID NO: 303426 - DNA, 15 bp, Homo sapiens
aactaaggtaataat

SEQ ID NO: 303427 - DNA, 15 bp, Homo sapiens
aaactaaggtaataa

SEQ ID NO: 303428 - DNA, 15 bp, Homo sapiens
aaaactaaggtaata

SEQ ID NO: 303429 - DNA, 15 bp, Homo sapiens
caaaactaaggtaat

SEQ ID NO: 303430 - DNA, 15 bp, Homo sapiens
ccaaaactaaggtaa

SEQ ID NO: 303431 - DNA, 15 bp, Homo sapiens
tccaaaactaaggta

SEQ ID NO: 303432 - DNA, 15 bp, Homo sapiens
ttccaaaactaaggt

SEQ ID NO: 303433 - DNA, 15 bp, Homo sapiens
tttccaaaactaagg

SEQ ID NO: 303434 - DNA, 15 bp, Homo sapiens
atttccaaaactaag

SEQ ID NO: 303435 - DNA, 15 bp, Homo sapiens
aatttccaaaactaa

SEQ ID NO: 303436 - DNA, 15 bp, Homo sapiens
taatttccaaaacta

SEQ ID NO: 303437 - DNA, 15 bp, Homo sapiens
gtaatttccaaaact

SEQ ID NO: 303438 - DNA, 15 bp, Homo sapiens
agtaatttccaaaac

SEQ ID NO: 303439 - DNA, 15 bp, Homo sapiens
tagtaatttccaaaa

SEQ ID NO: 303440 - DNA, 15 bp, Homo sapiens
atagtaatttccaaa

SEQ ID NO: 303441 - DNA, 15 bp, Homo sapiens
gatagtaatttccaa

SEQ ID NO: 303442 - DNA, 15 bp, Homo sapiens
tgatagtaatttcca

SEQ ID NO: 303443 - DNA, 15 bp, Homo sapiens
gtgatagtaatttcc

SEQ ID NO: 303444 - DNA, 15 bp, Homo sapiens
agtgatagtaatttc

SEQ ID NO: 303445 - DNA, 15 bp, Homo sapiens
aagtgatagtaattt

SEQ ID NO: 303446 - DNA, 15 bp, Homo sapiens
aaagtgatagtaatt

SEQ ID NO: 303447 - DNA, 15 bp, Homo sapiens
aaaagtgatagtaat

SEQ ID NO: 303448 - DNA, 15 bp, Homo sapiens
caaaagtgatagtaa

SEQ ID NO: 303449 - DNA, 15 bp, Homo sapiens
tcaaaagtgatagta

SEQ ID NO: 303450 - DNA, 15 bp, Homo sapiens
ctcaaaagtgatagt

SEQ ID NO: 303451 - DNA, 15 bp, Homo sapiens
actcaaaagtgatag

SEQ ID NO: 303452 - DNA, 15 bp, Homo sapiens
cactcaaaagtgata

SEQ ID NO: 303453 - DNA, 15 bp, Homo sapiens
gcactcaaaagtgat

SEQ ID NO: 303454 - DNA, 15 bp, Homo sapiens
agcactcaaaagtga

SEQ ID NO: 303455 - DNA, 15 bp, Homo sapiens
cagcactcaaaagtg

SEQ ID NO: 303456 - DNA, 15 bp, Homo sapiens
tcagcactcaaaagt

SEQ ID NO: 303457 - DNA, 15 bp, Homo sapiens
ctcagcactcaaaag

SEQ ID NO: 303458 - DNA, 15 bp, Homo sapiens
actcagcactcaaaa

SEQ ID NO: 303459 - DNA, 15 bp, Homo sapiens
gactcagcactcaaa

SEQ ID NO: 303460 - DNA, 15 bp, Homo sapiens
tgactcagcactcaa

SEQ ID NO: 303461 - DNA, 15 bp, Homo sapiens
atgactcagcactca

SEQ ID NO: 303462 - DNA, 15 bp, Homo sapiens
gatgactcagcactc

SEQ ID NO: 303463 - DNA, 15 bp, Homo sapiens
agatgactcagcact

SEQ ID NO: 303464 - DNA, 15 bp, Homo sapiens
cagatgactcagcac

SEQ ID NO: 303465 - DNA, 15 bp, Homo sapiens
tcagatgactcagca

SEQ ID NO: 303466 - DNA, 15 bp, Homo sapiens
atcagatgactcagc

SEQ ID NO: 303467 - DNA, 15 bp, Homo sapiens
aatcagatgactcag

SEQ ID NO: 303468 - DNA, 15 bp, Homo sapiens
gaatcagatgactca

SEQ ID NO: 303469 - DNA, 15 bp, Homo sapiens
tgaatcagatgactc

SEQ ID NO: 303470 - DNA, 15 bp, Homo sapiens
ctgaatcagatgact

SEQ ID NO: 303471 - DNA, 15 bp, Homo sapiens
actgaatcagatgac

SEQ ID NO: 303472 - DNA, 15 bp, Homo sapiens
gactgaatcagatga

SEQ ID NO: 303473 - DNA, 15 bp, Homo sapiens
agactgaatcagatg

SEQ ID NO: 303474 - DNA, 15 bp, Homo sapiens
aagactgaatcagat

SEQ ID NO: 303475 - DNA, 15 bp, Homo sapiens
taagactgaatcaga

SEQ ID NO: 303476 - DNA, 15 bp, Homo sapiens
ctaagactgaatcag

SEQ ID NO: 303477 - DNA, 15 bp, Homo sapiens
tctaagactgaatca

SEQ ID NO: 303478 - DNA, 15 bp, Homo sapiens
ttctaagactgaatc

SEQ ID NO: 303479 - DNA, 15 bp, Homo sapiens
gttctaagactgaat

SEQ ID NO: 303480 - DNA, 15 bp, Homo sapiens
tgttctaagactgaa

SEQ ID NO: 303481 - DNA, 15 bp, Homo sapiens
ttgttctaagactga

SEQ ID NO: 303482 - DNA, 15 bp, Homo sapiens
gttgttctaagactg

SEQ ID NO: 303483 - DNA, 15 bp, Homo sapiens
cgttgttctaagact

SEQ ID NO: 303484 - DNA, 15 bp, Homo sapiens
acgttgttctaagac

SEQ ID NO: 303485 - DNA, 15 bp, Homo sapiens
aacgttgttctaaga

SEQ ID NO: 303486 - DNA, 15 bp, Homo sapiens
caacgttgttctaag

SEQ ID NO: 303487 - DNA, 15 bp, Homo sapiens
ccaacgttgttctaa

SEQ ID NO: 303488 - DNA, 15 bp, Homo sapiens
cccaacgttgttcta

SEQ ID NO: 303489 - DNA, 15 bp, Homo sapiens
tcccaacgttgttct

SEQ ID NO: 303490 - DNA, 15 bp, Homo sapiens
ttcccaacgttgttc

SEQ ID NO: 303491 - DNA, 15 bp, Homo sapiens
attcccaacgttgtt

SEQ ID NO: 303492 - DNA, 15 bp, Homo sapiens
aattcccaacgttgt

SEQ ID NO: 303493 - DNA, 15 bp, Homo sapiens
gaattcccaacgttg

SEQ ID NO: 303494 - DNA, 15 bp, Homo sapiens
cgaattcccaacgtt

SEQ ID NO: 303495 - DNA, 15 bp, Homo sapiens
acgaattcccaacgt

SEQ ID NO: 303496 - DNA, 15 bp, Homo sapiens
tacgaattcccaacg

SEQ ID NO: 303497 - DNA, 15 bp, Homo sapiens
ttacgaattcccaac

SEQ ID NO: 303498 - DNA, 15 bp, Homo sapiens
gttacgaattcccaa

SEQ ID NO: 303499 - DNA, 15 bp, Homo sapiens
ggttacgaattccca

SEQ ID NO: 303500 - DNA, 15 bp, Homo sapiens
aggttacgaattccc

SEQ ID NO: 303501 - DNA, 15 bp, Homo sapiens
aaggttacgaattcc

SEQ ID NO: 303502 - DNA, 15 bp, Homo sapiens
taaggttacgaattc

SEQ ID NO: 303503 - DNA, 15 bp, Homo sapiens
ataaggttacgaatt

SEQ ID NO: 303504 - DNA, 15 bp, Homo sapiens
gataaggttacgaat

SEQ ID NO: 303505 - DNA, 15 bp, Homo sapiens
ggataaggttacgaa

SEQ ID NO: 303506 - DNA, 15 bp, Homo sapiens
gggataaggttacga

SEQ ID NO: 303507 - DNA, 15 bp, Homo sapiens
ggggataaggttacg

SEQ ID NO: 303508 - DNA, 15 bp, Homo sapiens
tggggataaggttac

SEQ ID NO: 303509 - DNA, 15 bp, Homo sapiens
ctggggataaggtta

SEQ ID NO: 303510 - DNA, 15 bp, Homo sapiens
actggggataaggtt

SEQ ID NO: 303511 - DNA, 15 bp, Homo sapiens
aactggggataaggt

SEQ ID NO: 303512 - DNA, 15 bp, Homo sapiens
aaactggggataagg

SEQ ID NO: 303513 - DNA, 15 bp, Homo sapiens
taaactggggataag

SEQ ID NO: 303514 - DNA, 15 bp, Homo sapiens
gtaaactggggataa

SEQ ID NO: 303515 - DNA, 15 bp, Homo sapiens
tgtaaactggggata

SEQ ID NO: 303516 - DNA, 15 bp, Homo sapiens
ctgtaaactggggat

SEQ ID NO: 303517 - DNA, 15 bp, Homo sapiens
tctgtaaactgggga

SEQ ID NO: 303518 - DNA, 15 bp, Homo sapiens
ttctgtaaactgggg

SEQ ID NO: 303519 - DNA, 15 bp, Homo sapiens
cttctgtaaactggg

SEQ ID NO: 303520 - DNA, 15 bp, Homo sapiens
tcttctgtaaactgg

SEQ ID NO: 303521 - DNA, 15 bp, Homo sapiens
ctcttctgtaaactg

SEQ ID NO: 303522 - DNA, 15 bp, Homo sapiens
tctcttctgtaaact

SEQ ID NO: 303523 - DNA, 15 bp, Homo sapiens
ttctcttctgtaaac

SEQ ID NO: 303524 - DNA, 15 bp, Homo sapiens
tttctcttctgtaaa

SEQ ID NO: 303525 - DNA, 15 bp, Homo sapiens
ttttctcttctgtaa

SEQ ID NO: 303526 - DNA, 15 bp, Homo sapiens
gttttctcttctgta

SEQ ID NO: 303527 - DNA, 15 bp, Homo sapiens
tgttttctcttctgt

SEQ ID NO: 303528 - DNA, 15 bp, Homo sapiens
ttgttttctcttctg

SEQ ID NO: 303529 - DNA, 15 bp, Homo sapiens
tttgttttctcttct

SEQ ID NO: 303530 - DNA, 15 bp, Homo sapiens
ctttgttttctcttc

SEQ ID NO: 303531 - DNA, 15 bp, Homo sapiens
tctttgttttctctt

SEQ ID NO: 303532 - DNA, 15 bp, Homo sapiens
gtctttgttttctct

SEQ ID NO: 303533 - DNA, 15 bp, Homo sapiens
agtctttgttttctc

SEQ ID NO: 303534 - DNA, 15 bp, Homo sapiens
aagtctttgttttct

SEQ ID NO: 303535 - DNA, 15 bp, Homo sapiens
caagtctttgttttc

SEQ ID NO: 303536 - DNA, 15 bp, Homo sapiens
tcaagtctttgtttt

SEQ ID NO: 303537 - DNA, 15 bp, Homo sapiens
ttcaagtctttgttt

SEQ ID NO: 303538 - DNA, 15 bp, Homo sapiens
cttcaagtctttgtt

SEQ ID NO: 303539 - DNA, 15 bp, Homo sapiens
tcttcaagtctttgt

SEQ ID NO: 303540 - DNA, 15 bp, Homo sapiens
ctcttcaagtctttg

SEQ ID NO: 303541 - DNA, 15 bp, Homo sapiens
cctcttcaagtcttt

SEQ ID NO: 303542 - DNA, 15 bp, Homo sapiens
acctcttcaagtctt

SEQ ID NO: 303543 - DNA, 15 bp, Homo sapiens
gacctcttcaagtct

SEQ ID NO: 303544 - DNA, 15 bp, Homo sapiens
tgacctcttcaagtc

SEQ ID NO: 303545 - DNA, 15 bp, Homo sapiens
ttgacctcttcaagt

SEQ ID NO: 303546 - DNA, 15 bp, Homo sapiens
tttgacctcttcaag

SEQ ID NO: 303547 - DNA, 15 bp, Homo sapiens
atttgacctcttcaa

SEQ ID NO: 303548 - DNA, 15 bp, Homo sapiens
aatttgacctcttca

SEQ ID NO: 303549 - DNA, 15 bp, Homo sapiens
taatttgacctcttc

SEQ ID NO: 303550 - DNA, 15 bp, Homo sapiens
ataatttgacctctt

SEQ ID NO: 303551 - DNA, 15 bp, Homo sapiens
aataatttgacctct

SEQ ID NO: 303552 - DNA, 15 bp, Homo sapiens
aaataatttgacctc

SEQ ID NO: 303553 - DNA, 15 bp, Homo sapiens
caaataatttgacct

SEQ ID NO: 303554 - DNA, 15 bp, Homo sapiens
gcaaataatttgacc

SEQ ID NO: 303555 - DNA, 15 bp, Homo sapiens
agcaaataatttgac

SEQ ID NO: 303556 - DNA, 15 bp, Homo sapiens
aagcaaataatttga

SEQ ID NO: 303557 - DNA, 15 bp, Homo sapiens
taagcaaataatttg

SEQ ID NO: 303558 - DNA, 15 bp, Homo sapiens
ttagcagtgaagcta

SEQ ID NO: 303559 - DNA, 15 bp, Homo sapiens
gttagcagtgaagct

SEQ ID NO: 303560 - DNA, 15 bp, Homo sapiens
agttagcagtgaagc

SEQ ID NO: 303561 - DNA, 15 bp, Homo sapiens
cagttagcagtgaag

SEQ ID NO: 303562 - DNA, 15 bp, Homo sapiens
ccagttagcagtgaa

SEQ ID NO: 303563 - DNA, 15 bp, Homo sapiens
gccagttagcagtga

SEQ ID NO: 303564 - DNA, 15 bp, Homo sapiens
agccagttagcagtg

SEQ ID NO: 303565 - DNA, 15 bp, Homo sapiens
aagccagttagcagt

SEQ ID NO: 303566 - DNA, 15 bp, Homo sapiens
aaagccagttagcag

SEQ ID NO: 303567 - DNA, 15 bp, Homo sapiens
caaagccagttagca

SEQ ID NO: 303568 - DNA, 15 bp, Homo sapiens
acaaagccagttagc

SEQ ID NO: 303569 - DNA, 15 bp, Homo sapiens
cacaaagccagttag

SEQ ID NO: 303570 - DNA, 15 bp, Homo sapiens
tcacaaagccagtta

SEQ ID NO: 303571 - DNA, 15 bp, Homo sapiens
gtcacaaagccagtt

SEQ ID NO: 303572 - DNA, 15 bp, Homo sapiens
ggtcacaaagccagt

SEQ ID NO: 303573 - DNA, 15 bp, Homo sapiens
aggtcacaaagccag

SEQ ID NO: 303574 - DNA, 15 bp, Homo sapiens
caggtcacaaagcca

SEQ ID NO: 303575 - DNA, 15 bp, Homo sapiens
ccaggtcacaaagcc

SEQ ID NO: 303576 - DNA, 15 bp, Homo sapiens
cccaggtcacaaagc

SEQ ID NO: 303577 - DNA, 15 bp, Homo sapiens
tcccaggtcacaaag

SEQ ID NO: 303578 - DNA, 15 bp, Homo sapiens
ctcccaggtcacaaa

SEQ ID NO: 303579 - DNA, 15 bp, Homo sapiens
gctcccaggtcacaa

SEQ ID NO: 303580 - DNA, 15 bp, Homo sapiens
agctcccaggtcaca

SEQ ID NO: 303581 - DNA, 15 bp, Homo sapiens
gagctcccaggtcac

SEQ ID NO: 303582 - DNA, 15 bp, Homo sapiens
tgagctcccaggtca

SEQ ID NO: 303583 - DNA, 15 bp, Homo sapiens
ttgagctcccaggtc

SEQ ID NO: 303584 - DNA, 15 bp, Homo sapiens
attgagctcccaggt

SEQ ID NO: 303585 - DNA, 15 bp, Homo sapiens
aattgagctcccagg

SEQ ID NO: 303586 - DNA, 15 bp, Homo sapiens
aaattgagctcccag

SEQ ID NO: 303587 - DNA, 15 bp, Homo sapiens
aaaattgagctccca

SEQ ID NO: 303588 - DNA, 15 bp, Homo sapiens
gaaaattgagctccc

SEQ ID NO: 303589 - DNA, 15 bp, Homo sapiens
agaaaattgagctcc

SEQ ID NO: 303590 - DNA, 15 bp, Homo sapiens
aagaaaattgagctc

SEQ ID NO: 303591 - DNA, 15 bp, Homo sapiens
aaagaaaattgagct

SEQ ID NO: 303592 - DNA, 15 bp, Homo sapiens
taaagaaaattgagc

SEQ ID NO: 303593 - DNA, 15 bp, Homo sapiens
gtaaagaaaattgag

SEQ ID NO: 303594 - DNA, 15 bp, Homo sapiens
ggtaaagaaaattga

SEQ ID NO: 303595 - DNA, 15 bp, Homo sapiens
aggtaaagaaaattg

SEQ ID NO: 303596 - DNA, 15 bp, Homo sapiens
taggtaaagaaaatt

SEQ ID NO: 303597 - DNA, 15 bp, Homo sapiens
ctaggtaaagaaaat

SEQ ID NO: 303598 - DNA, 15 bp, Homo sapiens
gctaggtaaagaaaa

SEQ ID NO: 303599 - DNA, 15 bp, Homo sapiens
ggctaggtaaagaaa

SEQ ID NO: 303600 - DNA, 15 bp, Homo sapiens
aggctaggtaaagaa

SEQ ID NO: 303601 - DNA, 15 bp, Homo sapiens
caggctaggtaaaga

SEQ ID NO: 303602 - DNA, 15 bp, Homo sapiens
acaggctaggtaaag

SEQ ID NO: 303603 - DNA, 15 bp, Homo sapiens
aacaggctaggtaaa

SEQ ID NO: 303604 - DNA, 15 bp, Homo sapiens
caacaggctaggtaa

SEQ ID NO: 303605 - DNA, 15 bp, Homo sapiens
acaacaggctaggta

SEQ ID NO: 303606 - DNA, 15 bp, Homo sapiens
aacaacaggctaggt

SEQ ID NO: 303607 - DNA, 15 bp, Homo sapiens
aaacaacaggctagg

SEQ ID NO: 303608 - DNA, 15 bp, Homo sapiens
aaaacaacaggctag

SEQ ID NO: 303609 - DNA, 15 bp, Homo sapiens
aaaaacaacaggcta

SEQ ID NO: 303610 - DNA, 15 bp, Homo sapiens
gaaaaacaacaggct

SEQ ID NO: 303611 - DNA, 15 bp, Homo sapiens
tgaaaaacaacaggc

SEQ ID NO: 303612 - DNA, 15 bp, Homo sapiens
atgaaaaacaacagg

SEQ ID NO: 303613 - DNA, 15 bp, Homo sapiens
gatgaaaaacaacag

SEQ ID NO: 303614 - DNA, 15 bp, Homo sapiens
agatgaaaaacaaca

SEQ ID NO: 303615 - DNA, 15 bp, Homo sapiens
cagatgaaaaacaac

SEQ ID NO: 303616 - DNA, 15 bp, Homo sapiens
acagatgaaaaacaa

SEQ ID NO: 303617 - DNA, 15 bp, Homo sapiens
tacagatgaaaaaca

SEQ ID NO: 303618 - DNA, 15 bp, Homo sapiens
ttacagatgaaaaac

SEQ ID NO: 303619 - DNA, 15 bp, Homo sapiens
cttacagatgaaaaa

SEQ ID NO: 303620 - DNA, 15 bp, Homo sapiens
tcttacagatgaaaa

SEQ ID NO: 303621 - DNA, 15 bp, Homo sapiens
atcttacagatgaaa

SEQ ID NO: 303622 - DNA, 15 bp, Homo sapiens
tatcttacagatgaa

SEQ ID NO: 303623 - DNA, 15 bp, Homo sapiens
ttatcttacagatga

SEQ ID NO: 303624 - DNA, 15 bp, Homo sapiens
tttatcttacagatg

SEQ ID NO: 303625 - DNA, 15 bp, Homo sapiens
ctttatcttacagat

SEQ ID NO: 303626 - DNA, 15 bp, Homo sapiens
tctttatcttacaga

SEQ ID NO: 303627 - DNA, 15 bp, Homo sapiens
atctttatcttacag

SEQ ID NO: 303628 - DNA, 15 bp, Homo sapiens
aatctttatcttaca

SEQ ID NO: 303629 - DNA, 15 bp, Homo sapiens
aaatctttatcttac

SEQ ID NO: 303630 - DNA, 15 bp, Homo sapiens
caaatctttatctta

SEQ ID NO: 303631 - DNA, 15 bp, Homo sapiens
ccaaatctttatctt

SEQ ID NO: 303632 - DNA, 15 bp, Homo sapiens
gccaaatctttatct

SEQ ID NO: 303633 - DNA, 15 bp, Homo sapiens
agccaaatctttatc

SEQ ID NO: 303634 - DNA, 15 bp, Homo sapiens
tagccaaatctttat

SEQ ID NO: 303635 - DNA, 15 bp, Homo sapiens
ctagccaaatcttta

SEQ ID NO: 303636 - DNA, 15 bp, Homo sapiens
tctagccaaatcttt

SEQ ID NO: 303637 - DNA, 15 bp, Homo sapiens
atctagccaaatctt

SEQ ID NO: 303638 - DNA, 15 bp, Homo sapiens
catctagccaaatct

SEQ ID NO: 303639 - DNA, 15 bp, Homo sapiens
tcatctagccaaatc

SEQ ID NO: 303640 - DNA, 15 bp, Homo sapiens
gtcatctagccaaat

SEQ ID NO: 303641 - DNA, 15 bp, Homo sapiens
agtcatctagccaaa

SEQ ID NO: 303642 - DNA, 15 bp, Homo sapiens
aagtcatctagccaa

SEQ ID NO: 303643 - DNA, 15 bp, Homo sapiens
gaagtcatctagcca

SEQ ID NO: 303644 - DNA, 15 bp, Homo sapiens
cgaagtcatctagcc

SEQ ID NO: 303645 - DNA, 15 bp, Homo sapiens
tcgaagtcatctagc

SEQ ID NO: 303646 - DNA, 15 bp, Homo sapiens
ttcgaagtcatctag

SEQ ID NO: 303647 - DNA, 15 bp, Homo sapiens
cttcgaagtcatcta

SEQ ID NO: 303648 - DNA, 15 bp, Homo sapiens
tcttcgaagtcatct

SEQ ID NO: 303649 - DNA, 15 bp, Homo sapiens
ttcttcgaagtcatc

SEQ ID NO: 303650 - DNA, 15 bp, Homo sapiens
attcttcgaagtcat

SEQ ID NO: 303651 - DNA, 15 bp, Homo sapiens
gattcttcgaagtca

SEQ ID NO: 303652 - DNA, 15 bp, Homo sapiens
agattcttcgaagtc

SEQ ID NO: 303653 - DNA, 15 bp, Homo sapiens
aagattcttcgaagt

SEQ ID NO: 303654 - DNA, 15 bp, Homo sapiens
aaagattcttcgaag

SEQ ID NO: 303655 - DNA, 15 bp, Homo sapiens
aaaagattcttcgaa

SEQ ID NO: 303656 - DNA, 15 bp, Homo sapiens
taaaagattcttcga

SEQ ID NO: 303657 - DNA, 15 bp, Homo sapiens
ctaaaagattcttcg

SEQ ID NO: 303658 - DNA, 15 bp, Homo sapiens
gctaaaagattcttc

SEQ ID NO: 303659 - DNA, 15 bp, Homo sapiens
agctaaaagattctt

SEQ ID NO: 303660 - DNA, 15 bp, Homo sapiens
gagctaaaagattct

SEQ ID NO: 303661 - DNA, 15 bp, Homo sapiens
tgagctaaaagattc

SEQ ID NO: 303662 - DNA, 15 bp, Homo sapiens
ctgagctaaaagatt

SEQ ID NO: 303663 - DNA, 15 bp, Homo sapiens
tctgagctaaaagat

SEQ ID NO: 303664 - DNA, 15 bp, Homo sapiens
ttctgagctaaaaga

SEQ ID NO: 303665 - DNA, 15 bp, Homo sapiens
tttctgagctaaaag

SEQ ID NO: 303666 - DNA, 15 bp, Homo sapiens
ctttctgagctaaaa

SEQ ID NO: 303667 - DNA, 15 bp, Homo sapiens
actttctgagctaaa

SEQ ID NO: 303668 - DNA, 15 bp, Homo sapiens
gactttctgagctaa

SEQ ID NO: 303669 - DNA, 15 bp, Homo sapiens
agactttctgagcta

SEQ ID NO: 303670 - DNA, 15 bp, Homo sapiens
aagactttctgagct

SEQ ID NO: 303671 - DNA, 15 bp, Homo sapiens
aaagactttctgagc

SEQ ID NO: 303672 - DNA, 15 bp, Homo sapiens
taaagactttctgag

SEQ ID NO: 303673 - DNA, 15 bp, Homo sapiens
ttaaagactttctga

SEQ ID NO: 303674 - DNA, 15 bp, Homo sapiens
cttaaagactttctg

SEQ ID NO: 303675 - DNA, 15 bp, Homo sapiens
ccttaaagactttct

SEQ ID NO: 303676 - DNA, 15 bp, Homo sapiens
accttaaagactttc

SEQ ID NO: 303677 - DNA, 15 bp, Homo sapiens
aaccttaaagacttt

SEQ ID NO: 303678 - DNA, 15 bp, Homo sapiens
gaaccttaaagactt

SEQ ID NO: 303679 - DNA, 15 bp, Homo sapiens
agaaccttaaagact

SEQ ID NO: 303680 - DNA, 15 bp, Homo sapiens
aagaaccttaaagac

SEQ ID NO: 303681 - DNA, 15 bp, Homo sapiens
caagaaccttaaaga

SEQ ID NO: 303682 - DNA, 15 bp, Homo sapiens
ccaagaaccttaaag

SEQ ID NO: 303683 - DNA, 15 bp, Homo sapiens
cccaagaaccttaaa

SEQ ID NO: 303684 - DNA, 15 bp, Homo sapiens
acccaagaaccttaa

SEQ ID NO: 303685 - DNA, 15 bp, Homo sapiens
gacccaagaacctta

SEQ ID NO: 303686 - DNA, 15 bp, Homo sapiens
tgacccaagaacctt

SEQ ID NO: 303687 - DNA, 15 bp, Homo sapiens
atgacccaagaacct

SEQ ID NO: 303688 - DNA, 15 bp, Homo sapiens
aatgacccaagaacc

SEQ ID NO: 303689 - DNA, 15 bp, Homo sapiens
taatgacccaagaac

SEQ ID NO: 303690 - DNA, 15 bp, Homo sapiens
ttaatgacccaagaa

SEQ ID NO: 303691 - DNA, 15 bp, Homo sapiens
attaatgacccaaga

SEQ ID NO: 303692 - DNA, 15 bp, Homo sapiens
cattaatgacccaag

SEQ ID NO: 303693 - DNA, 15 bp, Homo sapiens
ccattaatgacccaa

SEQ ID NO: 303694 - DNA, 15 bp, Homo sapiens
cccattaatgaccca

SEQ ID NO: 303695 - DNA, 15 bp, Homo sapiens
tcccattaatgaccc

SEQ ID NO: 303696 - DNA, 15 bp, Homo sapiens
ttcccattaatgacc

SEQ ID NO: 303697 - DNA, 15 bp, Homo sapiens
tttcccattaatgac

SEQ ID NO: 303698 - DNA, 15 bp, Homo sapiens
atttcccattaatga

SEQ ID NO: 303699 - DNA, 15 bp, Homo sapiens
aatttcccattaatg

SEQ ID NO: 303700 - DNA, 15 bp, Homo sapiens
aaatttcccattaat

SEQ ID NO: 303701 - DNA, 15 bp, Homo sapiens
caaatttcccattaa

SEQ ID NO: 303702 - DNA, 15 bp, Homo sapiens
ccaaatttcccatta

SEQ ID NO: 303703 - DNA, 15 bp, Homo sapiens
cccaaatttcccatt

SEQ ID NO: 303704 - DNA, 15 bp, Homo sapiens
tcccaaatttcccat

SEQ ID NO: 303705 - DNA, 15 bp, Homo sapiens
atcccaaatttccca

SEQ ID NO: 303706 - DNA, 15 bp, Homo sapiens
gatcccaaatttccc

SEQ ID NO: 303707 - DNA, 15 bp, Homo sapiens
agatcccaaatttcc

SEQ ID NO: 303708 - DNA, 15 bp, Homo sapiens
tagatcccaaatttc

SEQ ID NO: 303709 - DNA, 15 bp, Homo sapiens
ctagatcccaaattt

SEQ ID NO: 303710 - DNA, 15 bp, Homo sapiens
cctagatcccaaatt

SEQ ID NO: 303711 - DNA, 15 bp, Homo sapiens
acctagatcccaaat

SEQ ID NO: 303712 - DNA, 15 bp, Homo sapiens
gacctagatcccaaa

SEQ ID NO: 303713 - DNA, 15 bp, Homo sapiens
tgacctagatcccaa

SEQ ID NO: 303714 - DNA, 15 bp, Homo sapiens
atgacctagatccca

SEQ ID NO: 303715 - DNA, 15 bp, Homo sapiens
aatgacctagatccc

SEQ ID NO: 303716 - DNA, 15 bp, Homo sapiens
caatgacctagatcc

SEQ ID NO: 303717 - DNA, 15 bp, Homo sapiens
ccaatgacctagatc

SEQ ID NO: 303718 - DNA, 15 bp, Homo sapiens
cccaatgacctagat

SEQ ID NO: 303719 - DNA, 15 bp, Homo sapiens
ccccaatgacctaga

SEQ ID NO: 303720 - DNA, 15 bp, Homo sapiens
accccaatgacctag

SEQ ID NO: 303721 - DNA, 15 bp, Homo sapiens
caccccaatgaccta

SEQ ID NO: 303722 - DNA, 15 bp, Homo sapiens
ccaccccaatgacct

SEQ ID NO: 303723 - DNA, 15 bp, Homo sapiens
tccaccccaatgacc

SEQ ID NO: 303724 - DNA, 15 bp, Homo sapiens
gtccaccccaatgac

SEQ ID NO: 303725 - DNA, 15 bp, Homo sapiens
tgtccaccccaatga

SEQ ID NO: 303726 - DNA, 15 bp, Homo sapiens
ctgtccaccccaatg

SEQ ID NO: 303727 - DNA, 15 bp, Homo sapiens
cctgtccaccccaat

SEQ ID NO: 303728 - DNA, 15 bp, Homo sapiens
ccctgtccaccccaa

SEQ ID NO: 303729 - DNA, 15 bp, Homo sapiens
tccctgtccacccca

SEQ ID NO: 303730 - DNA, 15 bp, Homo sapiens
ttccctgtccacccc

SEQ ID NO: 303731 - DNA, 15 bp, Homo sapiens
cttccctgtccaccc

SEQ ID NO: 303732 - DNA, 15 bp, Homo sapiens
gcttccctgtccacc

SEQ ID NO: 303733 - DNA, 15 bp, Homo sapiens
agcttccctgtccac

SEQ ID NO: 303734 - DNA, 15 bp, Homo sapiens
tagcttccctgtcca

SEQ ID NO: 303735 - DNA, 15 bp, Homo sapiens
ctagcttccctgtcc

SEQ ID NO: 303736 - DNA, 15 bp, Homo sapiens
actagcttccctgtc

SEQ ID NO: 303737 - DNA, 15 bp, Homo sapiens
tactagcttccctgt

SEQ ID NO: 303738 - DNA, 15 bp, Homo sapiens
ctactagcttccctg

SEQ ID NO: 303739 - DNA, 15 bp, Homo sapiens
tctactagcttccct

SEQ ID NO: 303740 - DNA, 15 bp, Homo sapiens
ttctactagcttccc

SEQ ID NO: 303741 - DNA, 15 bp, Homo sapiens
attctactagcttcc

SEQ ID NO: 303742 - DNA, 15 bp, Homo sapiens
aattctactagcttc

SEQ ID NO: 303743 - DNA, 15 bp, Homo sapiens
gaattctactagctt

SEQ ID NO: 303744 - DNA, 15 bp, Homo sapiens
agaattctactagct

SEQ ID NO: 303745 - DNA, 15 bp, Homo sapiens
tagaattctactagc

SEQ ID NO: 303746 - DNA, 15 bp, Homo sapiens
atagaattctactag

SEQ ID NO: 303747 - DNA, 15 bp, Homo sapiens
gatagaattctacta

SEQ ID NO: 303748 - DNA, 15 bp, Homo sapiens
tgatagaattctact

SEQ ID NO: 303749 - DNA, 15 bp, Homo sapiens
ctgatagaattctac

SEQ ID NO: 303750 - DNA, 15 bp, Homo sapiens
gctgatagaattcta

SEQ ID NO: 303751 - DNA, 15 bp, Homo sapiens
tgctgatagaattct

SEQ ID NO: 303752 - DNA, 15 bp, Homo sapiens
ctgctgatagaattc

SEQ ID NO: 303753 - DNA, 15 bp, Homo sapiens
gctgctgatagaatt

SEQ ID NO: 303754 - DNA, 15 bp, Homo sapiens
tgctgctgatagaat

SEQ ID NO: 303755 - DNA, 15 bp, Homo sapiens
gtgctgctgatagaa

SEQ ID NO: 303756 - DNA, 15 bp, Homo sapiens
ggtgctgctgataga

SEQ ID NO: 303757 - DNA, 15 bp, Homo sapiens
gggtgctgctgatag

SEQ ID NO: 303758 - DNA, 15 bp, Homo sapiens
ggggtgctgctgata

SEQ ID NO: 303759 - DNA, 15 bp, Homo sapiens
aggggtgctgctgat

SEQ ID NO: 303760 - DNA, 15 bp, Homo sapiens
caggggtgctgctga

SEQ ID NO: 303761 - DNA, 15 bp, Homo sapiens
tcaggggtgctgctg

SEQ ID NO: 303762 - DNA, 15 bp, Homo sapiens
ctcaggggtgctgct

SEQ ID NO: 303763 - DNA, 15 bp, Homo sapiens
actcaggggtgctgc

SEQ ID NO: 303764 - DNA, 15 bp, Homo sapiens
gactcaggggtgctg

SEQ ID NO: 303765 - DNA, 15 bp, Homo sapiens
tgactcaggggtgct

SEQ ID NO: 303766 - DNA, 15 bp, Homo sapiens
ttgactcaggggtgc

SEQ ID NO: 303767 - DNA, 15 bp, Homo sapiens
tttgactcaggggtg

SEQ ID NO: 303768 - DNA, 15 bp, Homo sapiens
ttttgactcaggggt

SEQ ID NO: 303769 - DNA, 15 bp, Homo sapiens
attttgactcagggg

SEQ ID NO: 303770 - DNA, 15 bp, Homo sapiens
aattttgactcaggg

SEQ ID NO: 303771 - DNA, 15 bp, Homo sapiens
taattttgactcagg

SEQ ID NO: 303772 - DNA, 15 bp, Homo sapiens
ataattttgactcag

SEQ ID NO: 303773 - DNA, 15 bp, Homo sapiens
cataattttgactca

SEQ ID NO: 303774 - DNA, 15 bp, Homo sapiens
ccataattttgactc

SEQ ID NO: 303775 - DNA, 15 bp, Homo sapiens
tccataattttgact

SEQ ID NO: 303776 - DNA, 15 bp, Homo sapiens
atccataattttgac

SEQ ID NO: 303777 - DNA, 15 bp, Homo sapiens
catccataattttga

SEQ ID NO: 303778 - DNA, 15 bp, Homo sapiens
tcatccataattttg

SEQ ID NO: 303779 - DNA, 15 bp, Homo sapiens
ctcatccataatttt

SEQ ID NO: 303780 - DNA, 15 bp, Homo sapiens
actcatccataattt

SEQ ID NO: 303781 - DNA, 15 bp, Homo sapiens
aactcatccataatt

SEQ ID NO: 303782 - DNA, 15 bp, Homo sapiens
caactcatccataat

SEQ ID NO: 303783 - DNA, 15 bp, Homo sapiens
acaactcatccataa

SEQ ID NO: 303784 - DNA, 15 bp, Homo sapiens
aacaactcatccata

SEQ ID NO: 303785 - DNA, 15 bp, Homo sapiens
taacaactcatccat

SEQ ID NO: 303786 - DNA, 15 bp, Homo sapiens
ttaacaactcatcca

SEQ ID NO: 303787 - DNA, 15 bp, Homo sapiens
gttaacaactcatcc

SEQ ID NO: 303788 - DNA, 15 bp, Homo sapiens
tgttaacaactcatc

SEQ ID NO: 303789 - DNA, 15 bp, Homo sapiens
ctgttaacaactcat

SEQ ID NO: 303790 - DNA, 15 bp, Homo sapiens
cctgttaacaactca

SEQ ID NO: 303791 - DNA, 15 bp, Homo sapiens
ccctgttaacaactc

SEQ ID NO: 303792 - DNA, 15 bp, Homo sapiens
tccctgttaacaact

SEQ ID NO: 303793 - DNA, 15 bp, Homo sapiens
gtccctgttaacaac

SEQ ID NO: 303794 - DNA, 15 bp, Homo sapiens
agtccctgttaacaa

SEQ ID NO: 303795 - DNA, 15 bp, Homo sapiens
gagtccctgttaaca

SEQ ID NO: 303796 - DNA, 15 bp, Homo sapiens
ggagtccctgttaac

SEQ ID NO: 303797 - DNA, 15 bp, Homo sapiens
aggagtccctgttaa

SEQ ID NO: 303798 - DNA, 15 bp, Homo sapiens
aaggagtccctgtta

SEQ ID NO: 303799 - DNA, 15 bp, Homo sapiens
aaaggagtccctgtt

SEQ ID NO: 303800 - DNA, 15 bp, Homo sapiens
aaaaggagtccctgt

SEQ ID NO: 303801 - DNA, 15 bp, Homo sapiens
taaaaggagtccctg

SEQ ID NO: 303802 - DNA, 15 bp, Homo sapiens
ttaaaaggagtccct

SEQ ID NO: 303803 - DNA, 15 bp, Homo sapiens
tttaaaaggagtccc

SEQ ID NO: 303804 - DNA, 15 bp, Homo sapiens
ttttaaaaggagtcc

SEQ ID NO: 303805 - DNA, 15 bp, Homo sapiens
gttttaaaaggagtc

SEQ ID NO: 303806 - DNA, 15 bp, Homo sapiens
tgttttaaaaggagt

SEQ ID NO: 303807 - DNA, 15 bp, Homo sapiens
atgttttaaaaggag

SEQ ID NO: 303808 - DNA, 15 bp, Homo sapiens
gatgttttaaaagga

SEQ ID NO: 303809 - DNA, 15 bp, Homo sapiens
agatgttttaaaagg

SEQ ID NO: 303810 - DNA, 15 bp, Homo sapiens
aagatgttttaaaag

SEQ ID NO: 303811 - DNA, 15 bp, Homo sapiens
caagatgttttaaaa

SEQ ID NO: 303812 - DNA, 15 bp, Homo sapiens
acaagatgttttaaa

SEQ ID NO: 303813 - DNA, 15 bp, Homo sapiens
aacaagatgttttaa

SEQ ID NO: 303814 - DNA, 15 bp, Homo sapiens
caacaagatgtttta

SEQ ID NO: 303815 - DNA, 15 bp, Homo sapiens
gcaacaagatgtttt

SEQ ID NO: 303816 - DNA, 15 bp, Homo sapiens
agcaacaagatgttt

SEQ ID NO: 303817 - DNA, 15 bp, Homo sapiens
tagcaacaagatgtt

SEQ ID NO: 303818 - DNA, 15 bp, Homo sapiens
ttagcaacaagatgt

SEQ ID NO: 303819 - DNA, 15 bp, Homo sapiens
cttagcaacaagatg

SEQ ID NO: 303820 - DNA, 15 bp, Homo sapiens
tcttagcaacaagat

SEQ ID NO: 303821 - DNA, 15 bp, Homo sapiens
ctcttagcaacaaga

SEQ ID NO: 303822 - DNA, 15 bp, Homo sapiens
actcttagcaacaag

SEQ ID NO: 303823 - DNA, 15 bp, Homo sapiens
aactcttagcaacaa

SEQ ID NO: 303824 - DNA, 15 bp, Homo sapiens
gaactcttagcaaca

SEQ ID NO: 303825 - DNA, 15 bp, Homo sapiens
tgaactcttagcaac

SEQ ID NO: 303826 - DNA, 15 bp, Homo sapiens
ttgaactcttagcaa

SEQ ID NO: 303827 - DNA, 15 bp, Homo sapiens
tttgaactcttagca

SEQ ID NO: 303828 - DNA, 15 bp, Homo sapiens
gtttgaactcttagc

SEQ ID NO: 303829 - DNA, 15 bp, Homo sapiens
tgtttgaactcttag

SEQ ID NO: 303830 - DNA, 15 bp, Homo sapiens
gtgtttgaactctta

SEQ ID NO: 303831 - DNA, 15 bp, Homo sapiens
tgtgtttgaactctt

SEQ ID NO: 303832 - DNA, 15 bp, Homo sapiens
atgtgtttgaactct

SEQ ID NO: 303833 - DNA, 15 bp, Homo sapiens
tatgtgtttgaactc

SEQ ID NO: 303834 - DNA, 15 bp, Homo sapiens
gtatgtgtttgaact

SEQ ID NO: 303835 - DNA, 15 bp, Homo sapiens
ggtatgtgtttgaac

SEQ ID NO: 303836 - DNA, 15 bp, Homo sapiens
gggtatgtgtttgaa

SEQ ID NO: 303837 - DNA, 15 bp, Homo sapiens
tgggtatgtgtttga

SEQ ID NO: 303838 - DNA, 15 bp, Homo sapiens
atgggtatgtgtttg

SEQ ID NO: 303839 - DNA, 15 bp, Homo sapiens
catgggtatgtgttt

SEQ ID NO: 303840 - DNA, 15 bp, Homo sapiens
gcatgggtatgtgtt

SEQ ID NO: 303841 - DNA, 15 bp, Homo sapiens
tgcatgggtatgtgt

SEQ ID NO: 303842 - DNA, 15 bp, Homo sapiens
gtgcatgggtatgtg

SEQ ID NO: 303843 - DNA, 15 bp, Homo sapiens
tgtgcatgggtatgt

SEQ ID NO: 303844 - DNA, 15 bp, Homo sapiens
gtgtgcatgggtatg

SEQ ID NO: 303845 - DNA, 15 bp, Homo sapiens
tgtgtgcatgggtat

SEQ ID NO: 303846 - DNA, 15 bp, Homo sapiens
gtgtgtgcatgggta

SEQ ID NO: 303847 - DNA, 15 bp, Homo sapiens
tgtgtgtgcatgggt

SEQ ID NO: 303848 - DNA, 15 bp, Homo sapiens
ctgtgtgtgcatggg

SEQ ID NO: 303849 - DNA, 15 bp, Homo sapiens
cctgtgtgtgcatgg

SEQ ID NO: 303850 - DNA, 15 bp, Homo sapiens
ccctgtgtgtgcatg

SEQ ID NO: 303851 - DNA, 15 bp, Homo sapiens
tccctgtgtgtgcat

SEQ ID NO: 303852 - DNA, 15 bp, Homo sapiens
ttccctgtgtgtgca

SEQ ID NO: 303853 - DNA, 15 bp, Homo sapiens
tttccctgtgtgtgc

SEQ ID NO: 303854 - DNA, 15 bp, Homo sapiens
atttccctgtgtgtg

SEQ ID NO: 303855 - DNA, 15 bp, Homo sapiens
gatttccctgtgtgt

SEQ ID NO: 303856 - DNA, 15 bp, Homo sapiens
cgatttccctgtgtg

SEQ ID NO: 303857 - DNA, 15 bp, Homo sapiens
tcgatttccctgtgt

SEQ ID NO: 303858 - DNA, 15 bp, Homo sapiens
atcgatttccctgtg

SEQ ID NO: 303859 - DNA, 15 bp, Homo sapiens
catcgatttccctgt

SEQ ID NO: 303860 - DNA, 15 bp, Homo sapiens
ccatcgatttccctg

SEQ ID NO: 303861 - DNA, 15 bp, Homo sapiens
cccatcgatttccct

SEQ ID NO: 303862 - DNA, 15 bp, Homo sapiens
ccccatcgatttccc

SEQ ID NO: 303863 - DNA, 15 bp, Homo sapiens
tccccatcgatttcc

SEQ ID NO: 303864 - DNA, 15 bp, Homo sapiens
ttccccatcgatttc

SEQ ID NO: 303865 - DNA, 15 bp, Homo sapiens
cttccccatcgattt

SEQ ID NO: 303866 - DNA, 15 bp, Homo sapiens
ccttccccatcgatt

SEQ ID NO: 303867 - DNA, 15 bp, Homo sapiens
cccttccccatcgat

SEQ ID NO: 303868 - DNA, 15 bp, Homo sapiens
ccccttccccatcga

SEQ ID NO: 303869 - DNA, 15 bp, Homo sapiens
tccccttccccatcg

SEQ ID NO: 303870 - DNA, 15 bp, Homo sapiens
ctccccttccccatc

SEQ ID NO: 303871 - DNA, 15 bp, Homo sapiens
tctccccttccccat

SEQ ID NO: 303872 - DNA, 15 bp, Homo sapiens
ctctccccttcccca

SEQ ID NO: 303873 - DNA, 15 bp, Homo sapiens
cctctccccttcccc

SEQ ID NO: 303874 - DNA, 15 bp, Homo sapiens
acctctccccttccc

SEQ ID NO: 303875 - DNA, 15 bp, Homo sapiens
cacctctccccttcc

SEQ ID NO: 303876 - DNA, 15 bp, Homo sapiens
ccacctctccccttc

SEQ ID NO: 303877 - DNA, 15 bp, Homo sapiens
cccacctctcccctt

SEQ ID NO: 303878 - DNA, 15 bp, Homo sapiens
tcccacctctcccct

SEQ ID NO: 303879 - DNA, 15 bp, Homo sapiens
atcccacctctcccc

SEQ ID NO: 303880 - DNA, 15 bp, Homo sapiens
gatcccacctctccc

SEQ ID NO: 303881 - DNA, 15 bp, Homo sapiens
agatcccacctctcc

SEQ ID NO: 303882 - DNA, 15 bp, Homo sapiens
cagatcccacctctc

SEQ ID NO: 303883 - DNA, 15 bp, Homo sapiens
gcagatcccacctct

SEQ ID NO: 303884 - DNA, 15 bp, Homo sapiens
ggcagatcccacctc

SEQ ID NO: 303885 - DNA, 15 bp, Homo sapiens
aggcagatcccacct

SEQ ID NO: 303886 - DNA, 15 bp, Homo sapiens
aaggcagatcccacc

SEQ ID NO: 303887 - DNA, 15 bp, Homo sapiens
gaaggcagatcccac

SEQ ID NO: 303888 - DNA, 15 bp, Homo sapiens
agaaggcagatccca

SEQ ID NO: 303889 - DNA, 15 bp, Homo sapiens
aagaaggcagatccc

SEQ ID NO: 303890 - DNA, 15 bp, Homo sapiens
gaagaaggcagatcc

SEQ ID NO: 303891 - DNA, 15 bp, Homo sapiens
tgaagaaggcagatc

SEQ ID NO: 303892 - DNA, 15 bp, Homo sapiens
gtgaagaaggcagat

SEQ ID NO: 303893 - DNA, 15 bp, Homo sapiens
agtgaagaaggcaga

SEQ ID NO: 303894 - DNA, 15 bp, Homo sapiens
cagtgaagaaggcag

SEQ ID NO: 303895 - DNA, 15 bp, Homo sapiens
tcagtgaagaaggca

SEQ ID NO: 303896 - DNA, 15 bp, Homo sapiens
ctcagtgaagaaggc

SEQ ID NO: 303897 - DNA, 15 bp, Homo sapiens
gctcagtgaagaagg

SEQ ID NO: 303898 - DNA, 15 bp, Homo sapiens
agctcagtgaagaag

SEQ ID NO: 303899 - DNA, 15 bp, Homo sapiens
cagctcagtgaagaa

SEQ ID NO: 303900 - DNA, 15 bp, Homo sapiens
acagctcagtgaaga

SEQ ID NO: 303901 - DNA, 15 bp, Homo sapiens
cacagctcagtgaag

SEQ ID NO: 303902 - DNA, 15 bp, Homo sapiens
gcacagctcagtgaa

SEQ ID NO: 303903 - DNA, 15 bp, Homo sapiens
agcacagctcagtga

SEQ ID NO: 303904 - DNA, 15 bp, Homo sapiens
aagcacagctcagtg

SEQ ID NO: 303905 - DNA, 15 bp, Homo sapiens
taagcacagctcagt

SEQ ID NO: 303906 - DNA, 15 bp, Homo sapiens
ttaagcacagctcag

SEQ ID NO: 303907 - DNA, 15 bp, Homo sapiens
attaagcacagctca

SEQ ID NO: 303908 - DNA, 15 bp, Homo sapiens
aattaagcacagctc

SEQ ID NO: 303909 - DNA, 15 bp, Homo sapiens
taattaagcacagct

SEQ ID NO: 303910 - DNA, 15 bp, Homo sapiens
gtaattaagcacagc

SEQ ID NO: 303911 - DNA, 15 bp, Homo sapiens
ggtaattaagcacag

SEQ ID NO: 303912 - DNA, 15 bp, Homo sapiens
gggtaattaagcaca

SEQ ID NO: 303913 - DNA, 15 bp, Homo sapiens
agggtaattaagcac

SEQ ID NO: 303914 - DNA, 15 bp, Homo sapiens
cagggtaattaagca

SEQ ID NO: 303915 - DNA, 15 bp, Homo sapiens
acagggtaattaagc

SEQ ID NO: 303916 - DNA, 15 bp, Homo sapiens
cacagggtaattaag

SEQ ID NO: 303917 - DNA, 15 bp, Homo sapiens
gcacagggtaattaa

SEQ ID NO: 303918 - DNA, 15 bp, Homo sapiens
tgcacagggtaatta

SEQ ID NO: 303919 - DNA, 15 bp, Homo sapiens
gtgcacagggtaatt

SEQ ID NO: 303920 - DNA, 15 bp, Homo sapiens
agtgcacagggtaat

SEQ ID NO: 303921 - DNA, 15 bp, Homo sapiens
gagtgcacagggtaa

SEQ ID NO: 303922 - DNA, 15 bp, Homo sapiens
cgagtgcacagggta

SEQ ID NO: 303923 - DNA, 15 bp, Homo sapiens
tcgagtgcacagggt

SEQ ID NO: 303924 - DNA, 15 bp, Homo sapiens
ttcgagtgcacaggg

SEQ ID NO: 303925 - DNA, 15 bp, Homo sapiens
gttcgagtgcacagg

SEQ ID NO: 303926 - DNA, 15 bp, Homo sapiens
tgttcgagtgcacag

SEQ ID NO: 303927 - DNA, 15 bp, Homo sapiens
ttgttcgagtgcaca

SEQ ID NO: 303928 - DNA, 15 bp, Homo sapiens
gttgttcgagtgcac

SEQ ID NO: 303929 - DNA, 15 bp, Homo sapiens
ggttgttcgagtgca

SEQ ID NO: 303930 - DNA, 15 bp, Homo sapiens
tggttgttcgagtgc

SEQ ID NO: 303931 - DNA, 15 bp, Homo sapiens
gtggttgttcgagtg

SEQ ID NO: 303932 - DNA, 15 bp, Homo sapiens
agtggttgttcgagt

SEQ ID NO: 303933 - DNA, 15 bp, Homo sapiens
aagtggttgttcgag

SEQ ID NO: 303934 - DNA, 15 bp, Homo sapiens
aaagtggttgttcga

SEQ ID NO: 303935 - DNA, 15 bp, Homo sapiens
caaagtggttgttcg

SEQ ID NO: 303936 - DNA, 15 bp, Homo sapiens
gcaaagtggttgttc

SEQ ID NO: 303937 - DNA, 15 bp, Homo sapiens
agcaaagtggttgtt

SEQ ID NO: 303938 - DNA, 15 bp, Homo sapiens
aagcaaagtggttgt

SEQ ID NO: 303939 - DNA, 15 bp, Homo sapiens
aaagcaaagtggttg

SEQ ID NO: 303940 - DNA, 15 bp, Homo sapiens
aaaagcaaagtggtt

SEQ ID NO: 303941 - DNA, 15 bp, Homo sapiens
gaaaagcaaagtggt

SEQ ID NO: 303942 - DNA, 15 bp, Homo sapiens
agaaaagcaaagtgg

SEQ ID NO: 303943 - DNA, 15 bp, Homo sapiens
cagaaaagcaaagtg

SEQ ID NO: 303944 - DNA, 15 bp, Homo sapiens
ccagaaaagcaaagt

SEQ ID NO: 303945 - DNA, 15 bp, Homo sapiens
tccagaaaagcaaag

SEQ ID NO: 303946 - DNA, 15 bp, Homo sapiens
atccagaaaagcaaa

SEQ ID NO: 303947 - DNA, 15 bp, Homo sapiens
gatccagaaaagcaa

SEQ ID NO: 303948 - DNA, 15 bp, Homo sapiens
ggatccagaaaagca

SEQ ID NO: 303949 - DNA, 15 bp, Homo sapiens
aggatccagaaaagc

SEQ ID NO: 303950 - DNA, 15 bp, Homo sapiens
gaggatccagaaaag

SEQ ID NO: 303951 - DNA, 15 bp, Homo sapiens
tgaggatccagaaaa

SEQ ID NO: 303952 - DNA, 15 bp, Homo sapiens
ctgaggatccagaaa

SEQ ID NO: 303953 - DNA, 15 bp, Homo sapiens
actgaggatccagaa

SEQ ID NO: 303954 - DNA, 15 bp, Homo sapiens
aactgaggatccaga

SEQ ID NO: 303955 - DNA, 15 bp, Homo sapiens
aaactgaggatccag

SEQ ID NO: 303956 - DNA, 15 bp, Homo sapiens
aaaactgaggatcca

SEQ ID NO: 303957 - DNA, 15 bp, Homo sapiens
gaaaactgaggatcc

SEQ ID NO: 303958 - DNA, 15 bp, Homo sapiens
agaaaactgaggatc

SEQ ID NO: 303959 - DNA, 15 bp, Homo sapiens
gagaaaactgaggat

SEQ ID NO: 303960 - DNA, 15 bp, Homo sapiens
tgagaaaactgagga

SEQ ID NO: 303961 - DNA, 15 bp, Homo sapiens
tcagatgagaaaact

SEQ ID NO: 303962 - DNA, 15 bp, Homo sapiens
ttcagatgagaaaac

SEQ ID NO: 303963 - DNA, 15 bp, Homo sapiens
cttcagatgagaaaa

SEQ ID NO: 303964 - DNA, 15 bp, Homo sapiens
tcttcagatgagaaa

SEQ ID NO: 303965 - DNA, 15 bp, Homo sapiens
ttcttcagatgagaa

SEQ ID NO: 303966 - DNA, 15 bp, Homo sapiens
attcttcagatgaga

SEQ ID NO: 303967 - DNA, 15 bp, Homo sapiens
cattcttcagatgag

SEQ ID NO: 303968 - DNA, 15 bp, Homo sapiens
ccattcttcagatga

SEQ ID NO: 303969 - DNA, 15 bp, Homo sapiens
cccattcttcagatg

SEQ ID NO: 303970 - DNA, 15 bp, Homo sapiens
ccccattcttcagat

SEQ ID NO: 303971 - DNA, 15 bp, Homo sapiens
cccccattcttcaga

SEQ ID NO: 303972 - DNA, 15 bp, Homo sapiens
acccccattcttcag

SEQ ID NO: 303973 - DNA, 15 bp, Homo sapiens
aacccccattcttca

SEQ ID NO: 303974 - DNA, 15 bp, Homo sapiens
aaacccccattcttc

SEQ ID NO: 303975 - DNA, 15 bp, Homo sapiens
taaacccccattctt

SEQ ID NO: 303976 - DNA, 15 bp, Homo sapiens
ttaaacccccattct

SEQ ID NO: 303977 - DNA, 15 bp, Homo sapiens
tttaaacccccattc

SEQ ID NO: 303978 - DNA, 15 bp, Homo sapiens
atttaaacccccatt

SEQ ID NO: 303979 - DNA, 15 bp, Homo sapiens
catttaaacccccat

SEQ ID NO: 303980 - DNA, 15 bp, Homo sapiens
tcatttaaaccccca

SEQ ID NO: 303981 - DNA, 15 bp, Homo sapiens
ttcatttaaaccccc

SEQ ID NO: 303982 - DNA, 15 bp, Homo sapiens
tttcatttaaacccc

SEQ ID NO: 303983 - DNA, 15 bp, Homo sapiens
atttcatttaaaccc

SEQ ID NO: 303984 - DNA, 15 bp, Homo sapiens
aatttcatttaaacc

SEQ ID NO: 303985 - DNA, 15 bp, Homo sapiens
ggtaatttcatttaa

SEQ ID NO: 303986 - DNA, 15 bp, Homo sapiens
aggtaatttcattta

SEQ ID NO: 303987 - DNA, 15 bp, Homo sapiens
aaggtaatttcattt

SEQ ID NO: 303988 - DNA, 15 bp, Homo sapiens
gaaggtaatttcatt

SEQ ID NO: 303989 - DNA, 15 bp, Homo sapiens
agaaggtaatttcat

SEQ ID NO: 303990 - DNA, 15 bp, Homo sapiens
tagaaggtaatttca

SEQ ID NO: 303991 - DNA, 15 bp, Homo sapiens
ctagaaggtaatttc

SEQ ID NO: 303992 - DNA, 15 bp, Homo sapiens
actagaaggtaattt

SEQ ID NO: 303993 - DNA, 15 bp, Homo sapiens
gactagaaggtaatt

SEQ ID NO: 303994 - DNA, 15 bp, Homo sapiens
ggactagaaggtaat

SEQ ID NO: 303995 - DNA, 15 bp, Homo sapiens
aggactagaaggtaa

SEQ ID NO: 303996 - DNA, 15 bp, Homo sapiens
gaggactagaaggta

SEQ ID NO: 303997 - DNA, 15 bp, Homo sapiens
tgaggactagaaggt

SEQ ID NO: 303998 - DNA, 15 bp, Homo sapiens
gtgaggactagaagg

SEQ ID NO: 303999 - DNA, 15 bp, Homo sapiens
tgtgaggactagaag

SEQ ID NO: 304000 - DNA, 15 bp, Homo sapiens
gtgtgaggactagaa

SEQ ID NO: 304001 - DNA, 15 bp, Homo sapiens
agtgtgaggactaga

SEQ ID NO: 304002 - DNA, 15 bp, Homo sapiens
aagtgtgaggactag

SEQ ID NO: 304003 - DNA, 15 bp, Homo sapiens
gaagtgtgaggacta

SEQ ID NO: 304004 - DNA, 15 bp, Homo sapiens
tgaagtgtgaggact

SEQ ID NO: 304005 - DNA, 15 bp, Homo sapiens
atgaagtgtgaggac

SEQ ID NO: 304006 - DNA, 15 bp, Homo sapiens
catgaagtgtgagga

SEQ ID NO: 304007 - DNA, 15 bp, Homo sapiens
tcatgaagtgtgagg

SEQ ID NO: 304008 - DNA, 15 bp, Homo sapiens
ttcatgaagtgtgag

SEQ ID NO: 304009 - DNA, 15 bp, Homo sapiens
attcatgaagtgtga

SEQ ID NO: 304010 - DNA, 15 bp, Homo sapiens
gattcatgaagtgtg

SEQ ID NO: 304011 - DNA, 15 bp, Homo sapiens
agattcatgaagtgt

SEQ ID NO: 304012 - DNA, 15 bp, Homo sapiens
cagattcatgaagtg

SEQ ID NO: 304013 - DNA, 15 bp, Homo sapiens
gcagattcatgaagt

SEQ ID NO: 304014 - DNA, 15 bp, Homo sapiens
tgcagattcatgaag

SEQ ID NO: 304015 - DNA, 15 bp, Homo sapiens
gtgcagattcatgaa

SEQ ID NO: 304016 - DNA, 15 bp, Homo sapiens
agtgcagattcatga

SEQ ID NO: 304017 - DNA, 15 bp, Homo sapiens
aagtgcagattcatg

SEQ ID NO: 304018 - DNA, 15 bp, Homo sapiens
aaagtgcagattcat

SEQ ID NO: 304019 - DNA, 15 bp, Homo sapiens
gaaagtgcagattca

SEQ ID NO: 304020 - DNA, 15 bp, Homo sapiens
agaaagtgcagattc

SEQ ID NO: 304021 - DNA, 15 bp, Homo sapiens
cagaaagtgcagatt

SEQ ID NO: 304022 - DNA, 15 bp, Homo sapiens
gcagaaagtgcagat

SEQ ID NO: 304023 - DNA, 15 bp, Homo sapiens
ggcagaaagtgcaga

SEQ ID NO: 304024 - DNA, 15 bp, Homo sapiens
tggcagaaagtgcag

SEQ ID NO: 304025 - DNA, 15 bp, Homo sapiens
ctggcagaaagtgca

SEQ ID NO: 304026 - DNA, 15 bp, Homo sapiens
actggcagaaagtgc

SEQ ID NO: 304027 - DNA, 15 bp, Homo sapiens
cactggcagaaagtg

SEQ ID NO: 304028 - DNA, 15 bp, Homo sapiens
acactggcagaaagt

SEQ ID NO: 304029 - DNA, 15 bp, Homo sapiens
gacactggcagaaag

SEQ ID NO: 304030 - DNA, 15 bp, Homo sapiens
ggacactggcagaaa

SEQ ID NO: 304031 - DNA, 15 bp, Homo sapiens
tggacactggcagaa

SEQ ID NO: 304032 - DNA, 15 bp, Homo sapiens
atggacactggcaga

SEQ ID NO: 304033 - DNA, 15 bp, Homo sapiens
aatggacactggcag

SEQ ID NO: 304034 - DNA, 15 bp, Homo sapiens
caatggacactggca

SEQ ID NO: 304035 - DNA, 15 bp, Homo sapiens
acaatggacactggc

SEQ ID NO: 304036 - DNA, 15 bp, Homo sapiens
gacaatggacactgg

SEQ ID NO: 304037 - DNA, 15 bp, Homo sapiens
agacaatggacactg

SEQ ID NO: 304038 - DNA, 15 bp, Homo sapiens
gagacaatggacact

SEQ ID NO: 304039 - DNA, 15 bp, Homo sapiens
agagacaatggacac

SEQ ID NO: 304040 - DNA, 15 bp, Homo sapiens
aagagacaatggaca

SEQ ID NO: 304041 - DNA, 15 bp, Homo sapiens
caagagacaatggac

SEQ ID NO: 304042 - DNA, 15 bp, Homo sapiens
ccaagagacaatgga

SEQ ID NO: 304043 - DNA, 15 bp, Homo sapiens
accaagagacaatgg

SEQ ID NO: 304044 - DNA, 15 bp, Homo sapiens
gaccaagagacaatg

SEQ ID NO: 304045 - DNA, 15 bp, Homo sapiens
ggaccaagagacaat

SEQ ID NO: 304046 - DNA, 15 bp, Homo sapiens
gggaccaagagacaa

SEQ ID NO: 304047 - DNA, 15 bp, Homo sapiens
ggggaccaagagaca

SEQ ID NO: 304048 - DNA, 15 bp, Homo sapiens
aggggaccaagagac

SEQ ID NO: 304049 - DNA, 15 bp, Homo sapiens
caggggaccaagaga

SEQ ID NO: 304050 - DNA, 15 bp, Homo sapiens
acaggggaccaagag

SEQ ID NO: 304051 - DNA, 15 bp, Homo sapiens
cacaggggaccaaga

SEQ ID NO: 304052 - DNA, 15 bp, Homo sapiens
ccacaggggaccaag

SEQ ID NO: 304053 - DNA, 15 bp, Homo sapiens
cccacaggggaccaa

SEQ ID NO: 304054 - DNA, 15 bp, Homo sapiens
gcccacaggggacca

SEQ ID NO: 304055 - DNA, 15 bp, Homo sapiens
ggcccacaggggacc

SEQ ID NO: 304056 - DNA, 15 bp, Homo sapiens
aggcccacaggggac

SEQ ID NO: 304057 - DNA, 15 bp, Homo sapiens
caggcccacagggga

SEQ ID NO: 304058 - DNA, 15 bp, Homo sapiens
ccaggcccacagggg

SEQ ID NO: 304059 - DNA, 15 bp, Homo sapiens
cccaggcccacaggg

SEQ ID NO: 304060 - DNA, 15 bp, Homo sapiens
acccaggcccacagg

SEQ ID NO: 304061 - DNA, 15 bp, Homo sapiens
cacccaggcccacag

SEQ ID NO: 304062 - DNA, 15 bp, Homo sapiens
tcacccaggcccaca

SEQ ID NO: 304063 - DNA, 15 bp, Homo sapiens
atcacccaggcccac

SEQ ID NO: 304064 - DNA, 15 bp, Homo sapiens
catcacccaggccca

SEQ ID NO: 304065 - DNA, 15 bp, Homo sapiens
ccatcacccaggccc

SEQ ID NO: 304066 - DNA, 15 bp, Homo sapiens
tccatcacccaggcc

SEQ ID NO: 304067 - DNA, 15 bp, Homo sapiens
ttccatcacccaggc

SEQ ID NO: 304068 - DNA, 15 bp, Homo sapiens
cttccatcacccagg

SEQ ID NO: 304069 - DNA, 15 bp, Homo sapiens
ccttccatcacccag

SEQ ID NO: 304070 - DNA, 15 bp, Homo sapiens
cccttccatcaccca

SEQ ID NO: 304071 - DNA, 15 bp, Homo sapiens
gcccttccatcaccc

SEQ ID NO: 304072 - DNA, 15 bp, Homo sapiens
agcccttccatcacc

SEQ ID NO: 304073 - DNA, 15 bp, Homo sapiens
gagcccttccatcac

SEQ ID NO: 304074 - DNA, 15 bp, Homo sapiens
ggagcccttccatca

SEQ ID NO: 304075 - DNA, 15 bp, Homo sapiens
gggagcccttccatc

SEQ ID NO: 304076 - DNA, 15 bp, Homo sapiens
agggagcccttccat

SEQ ID NO: 304077 - DNA, 15 bp, Homo sapiens
cagggagcccttcca

SEQ ID NO: 304078 - DNA, 15 bp, Homo sapiens
ccagggagcccttcc

SEQ ID NO: 304079 - DNA, 15 bp, Homo sapiens
accagggagcccttc

SEQ ID NO: 304080 - DNA, 15 bp, Homo sapiens
caccagggagccctt

SEQ ID NO: 304081 - DNA, 15 bp, Homo sapiens
tcaccagggagccct

SEQ ID NO: 304082 - DNA, 15 bp, Homo sapiens
gtcaccagggagccc

SEQ ID NO: 304083 - DNA, 15 bp, Homo sapiens
agtcaccagggagcc

SEQ ID NO: 304084 - DNA, 15 bp, Homo sapiens
cagtcaccagggagc

SEQ ID NO: 304085 - DNA, 15 bp, Homo sapiens
acagtcaccagggag

SEQ ID NO: 304086 - DNA, 15 bp, Homo sapiens
cacagtcaccaggga

SEQ ID NO: 304087 - DNA, 15 bp, Homo sapiens
ccacagtcaccaggg

SEQ ID NO: 304088 - DNA, 15 bp, Homo sapiens
accacagtcaccagg

SEQ ID NO: 304089 - DNA, 15 bp, Homo sapiens
caccacagtcaccag

SEQ ID NO: 304090 - DNA, 15 bp, Homo sapiens
ccaccacagtcacca

SEQ ID NO: 304091 - DNA, 15 bp, Homo sapiens
tccaccacagtcacc

SEQ ID NO: 304092 - DNA, 15 bp, Homo sapiens
ctccaccacagtcac

SEQ ID NO: 304093 - DNA, 15 bp, Homo sapiens
tctccaccacagtca

SEQ ID NO: 304094 - DNA, 15 bp, Homo sapiens
gtctccaccacagtc

SEQ ID NO: 304095 - DNA, 15 bp, Homo sapiens
tgtctccaccacagt

SEQ ID NO: 304096 - DNA, 15 bp, Homo sapiens
atgtctccaccacag

SEQ ID NO: 304097 - DNA, 15 bp, Homo sapiens
gatgtctccaccaca

SEQ ID NO: 304098 - DNA, 15 bp, Homo sapiens
ggatgtctccaccac

SEQ ID NO: 304099 - DNA, 15 bp, Homo sapiens
aggatgtctccacca

SEQ ID NO: 304100 - DNA, 15 bp, Homo sapiens
gaggatgtctccacc

SEQ ID NO: 304101 - DNA, 15 bp, Homo sapiens
ggaggatgtctccac

SEQ ID NO: 304102 - DNA, 15 bp, Homo sapiens
aggaggatgtctcca

SEQ ID NO: 304103 - DNA, 15 bp, Homo sapiens
gaggaggatgtctcc

SEQ ID NO: 304104 - DNA, 15 bp, Homo sapiens
agaggaggatgtctc

SEQ ID NO: 304105 - DNA, 15 bp, Homo sapiens
cagaggaggatgtct

SEQ ID NO: 304106 - DNA, 15 bp, Homo sapiens
gcagaggaggatgtc

SEQ ID NO: 304107 - DNA, 15 bp, Homo sapiens
tgcagaggaggatgt

SEQ ID NO: 304108 - DNA, 15 bp, Homo sapiens
ctgcagaggaggatg

SEQ ID NO: 304109 - DNA, 15 bp, Homo sapiens
actgcagaggaggat

SEQ ID NO: 304110 - DNA, 15 bp, Homo sapiens
cactgcagaggagga

SEQ ID NO: 304111 - DNA, 15 bp, Homo sapiens
tcactgcagaggagg

SEQ ID NO: 304112 - DNA, 15 bp, Homo sapiens
ctcactgcagaggag

SEQ ID NO: 304113 - DNA, 15 bp, Homo sapiens
gctcactgcagagga

SEQ ID NO: 304114 - DNA, 15 bp, Homo sapiens
tgctcactgcagagg

SEQ ID NO: 304115 - DNA, 15 bp, Homo sapiens
ctgctcactgcagag

SEQ ID NO: 304116 - DNA, 15 bp, Homo sapiens
tctgctcactgcaga

SEQ ID NO: 304117 - DNA, 15 bp, Homo sapiens
ttctgctcactgcag

SEQ ID NO: 304118 - DNA, 15 bp, Homo sapiens
gttctgctcactgca

SEQ ID NO: 304119 - DNA, 15 bp, Homo sapiens
tgttctgctcactgc

SEQ ID NO: 304120 - DNA, 15 bp, Homo sapiens
atgttctgctcactg

SEQ ID NO: 304121 - DNA, 15 bp, Homo sapiens
catgttctgctcact

SEQ ID NO: 304122 - DNA, 15 bp, Homo sapiens
gcatgttctgctcac

SEQ ID NO: 304123 - DNA, 15 bp, Homo sapiens
ggcatgttctgctca

SEQ ID NO: 304124 - DNA, 15 bp, Homo sapiens
gggcatgttctgctc

SEQ ID NO: 304125 - DNA, 15 bp, Homo sapiens
ggggcatgttctgct

SEQ ID NO: 304126 - DNA, 15 bp, Homo sapiens
gggggcatgttctgc

SEQ ID NO: 304127 - DNA, 15 bp, Homo sapiens
cgggggcatgttctg

SEQ ID NO: 304128 - DNA, 15 bp, Homo sapiens
ccgggggcatgttct

SEQ ID NO: 304129 - DNA, 15 bp, Homo sapiens
accgggggcatgttc

SEQ ID NO: 304130 - DNA, 15 bp, Homo sapiens
taccgggggcatgtt

SEQ ID NO: 304131 - DNA, 15 bp, Homo sapiens
ttaccgggggcatgt

SEQ ID NO: 304132 - DNA, 15 bp, Homo sapiens
tttaccgggggcatg

SEQ ID NO: 304133 - DNA, 15 bp, Homo sapiens
ttttaccgggggcat

SEQ ID NO: 304134 - DNA, 15 bp, Homo sapiens
cttttaccgggggca

SEQ ID NO: 304135 - DNA, 15 bp, Homo sapiens
acttttaccgggggc

SEQ ID NO: 304136 - DNA, 15 bp, Homo sapiens
cacttttaccggggg

SEQ ID NO: 304137 - DNA, 15 bp, Homo sapiens
acacttttaccgggg

SEQ ID NO: 304138 - DNA, 15 bp, Homo sapiens
cacacttttaccggg

SEQ ID NO: 304139 - DNA, 15 bp, Homo sapiens
ccacacttttaccgg

SEQ ID NO: 304140 - DNA, 15 bp, Homo sapiens
tccacacttttaccg

SEQ ID NO: 304141 - DNA, 15 bp, Homo sapiens
ctccacacttttacc

SEQ ID NO: 304142 - DNA, 15 bp, Homo sapiens
gctccacacttttac

SEQ ID NO: 304143 - DNA, 15 bp, Homo sapiens
ggctccacactttta

SEQ ID NO: 304144 - DNA, 15 bp, Homo sapiens
gggctccacactttt

SEQ ID NO: 304145 - DNA, 15 bp, Homo sapiens
tgggctccacacttt

SEQ ID NO: 304146 - DNA, 15 bp, Homo sapiens
ctgggctccacactt

SEQ ID NO: 304147 - DNA, 15 bp, Homo sapiens
gctgggctccacact

SEQ ID NO: 304148 - DNA, 15 bp, Homo sapiens
agctgggctccacac

SEQ ID NO: 304149 - DNA, 15 bp, Homo sapiens
aagctgggctccaca

SEQ ID NO: 304150 - DNA, 15 bp, Homo sapiens
gaagctgggctccac

SEQ ID NO: 304151 - DNA, 15 bp, Homo sapiens
ggaagctgggctcca

SEQ ID NO: 304152 - DNA, 15 bp, Homo sapiens
aggaagctgggctcc

SEQ ID NO: 304153 - DNA, 15 bp, Homo sapiens
aaggaagctgggctc

SEQ ID NO: 304154 - DNA, 15 bp, Homo sapiens
caaggaagctgggct

SEQ ID NO: 304155 - DNA, 15 bp, Homo sapiens
acaaggaagctgggc

SEQ ID NO: 304156 - DNA, 15 bp, Homo sapiens
cacaaggaagctggg

SEQ ID NO: 304157 - DNA, 15 bp, Homo sapiens
ccacaaggaagctgg

SEQ ID NO: 304158 - DNA, 15 bp, Homo sapiens
accacaaggaagctg

SEQ ID NO: 304159 - DNA, 15 bp, Homo sapiens
caccacaaggaagct

SEQ ID NO: 304160 - DNA, 15 bp, Homo sapiens
tcaccacaaggaagc

SEQ ID NO: 304161 - DNA, 15 bp, Homo sapiens
ctcaccacaaggaag

SEQ ID NO: 304162 - DNA, 15 bp, Homo sapiens
actcaccacaaggaa

SEQ ID NO: 304163 - DNA, 15 bp, Homo sapiens
cactcaccacaagga

SEQ ID NO: 304164 - DNA, 15 bp, Homo sapiens
tcactcaccacaagg

SEQ ID NO: 304165 - DNA, 15 bp, Homo sapiens
gtcactcaccacaag

SEQ ID NO: 304166 - DNA, 15 bp, Homo sapiens
tgtcactcaccacaa

SEQ ID NO: 304167 - DNA, 15 bp, Homo sapiens
gtgtcactcaccaca

SEQ ID NO: 304168 - DNA, 15 bp, Homo sapiens
cgtgtcactcaccac

SEQ ID NO: 304169 - DNA, 15 bp, Homo sapiens
acgtgtcactcacca

SEQ ID NO: 304170 - DNA, 15 bp, Homo sapiens
aacgtgtcactcacc

SEQ ID NO: 304171 - DNA, 15 bp, Homo sapiens
gaacgtgtcactcac

SEQ ID NO: 304172 - DNA, 15 bp, Homo sapiens
ggaacgtgtcactca

SEQ ID NO: 304173 - DNA, 15 bp, Homo sapiens
gggaacgtgtcactc

SEQ ID NO: 304174 - DNA, 15 bp, Homo sapiens
agggaacgtgtcact

SEQ ID NO: 304175 - DNA, 15 bp, Homo sapiens
cagggaacgtgtcac

SEQ ID NO: 304176 - DNA, 15 bp, Homo sapiens
tcagggaacgtgtca

SEQ ID NO: 304177 - DNA, 15 bp, Homo sapiens
ttcagggaacgtgtc

SEQ ID NO: 304178 - DNA, 15 bp, Homo sapiens
cttcagggaacgtgt

SEQ ID NO: 304179 - DNA, 15 bp, Homo sapiens
gcttcagggaacgtg

SEQ ID NO: 304180 - DNA, 15 bp, Homo sapiens
tgcttcagggaacgt

SEQ ID NO: 304181 - DNA, 15 bp, Homo sapiens
atgcttcagggaacg

SEQ ID NO: 304182 - DNA, 15 bp, Homo sapiens
aatgcttcagggaac

SEQ ID NO: 304183 - DNA, 15 bp, Homo sapiens
aaatgcttcagggaa

SEQ ID NO: 304184 - DNA, 15 bp, Homo sapiens
aaaatgcttcaggga

SEQ ID NO: 304185 - DNA, 15 bp, Homo sapiens
taaaatgcttcaggg

SEQ ID NO: 304186 - DNA, 15 bp, Homo sapiens
ctaaaatgcttcagg

SEQ ID NO: 304187 - DNA, 15 bp, Homo sapiens
cctaaaatgcttcag

SEQ ID NO: 304188 - DNA, 15 bp, Homo sapiens
ccctaaaatgcttca

SEQ ID NO: 304189 - DNA, 15 bp, Homo sapiens
gccctaaaatgcttc

SEQ ID NO: 304190 - DNA, 15 bp, Homo sapiens
ggccctaaaatgctt

SEQ ID NO: 304191 - DNA, 15 bp, Homo sapiens
tggccctaaaatgct

SEQ ID NO: 304192 - DNA, 15 bp, Homo sapiens
ctggccctaaaatgc

SEQ ID NO: 304193 - DNA, 15 bp, Homo sapiens
cctggccctaaaatg

SEQ ID NO: 304194 - DNA, 15 bp, Homo sapiens
tcctggccctaaaat

SEQ ID NO: 304195 - DNA, 15 bp, Homo sapiens
ctcctggccctaaaa

SEQ ID NO: 304196 - DNA, 15 bp, Homo sapiens
actcctggccctaaa

SEQ ID NO: 304197 - DNA, 15 bp, Homo sapiens
aactcctggccctaa

SEQ ID NO: 304198 - DNA, 15 bp, Homo sapiens
gaactcctggcccta

SEQ ID NO: 304199 - DNA, 15 bp, Homo sapiens
agaactcctggccct

SEQ ID NO: 304200 - DNA, 15 bp, Homo sapiens
cagaactcctggccc

SEQ ID NO: 304201 - DNA, 15 bp, Homo sapiens
ccagaactcctggcc

SEQ ID NO: 304202 - DNA, 15 bp, Homo sapiens
accagaactcctggc

SEQ ID NO: 304203 - DNA, 15 bp, Homo sapiens
taccagaactcctgg

SEQ ID NO: 304204 - DNA, 15 bp, Homo sapiens
ataccagaactcctg

SEQ ID NO: 304205 - DNA, 15 bp, Homo sapiens
cataccagaactcct

SEQ ID NO: 304206 - DNA, 15 bp, Homo sapiens
gcataccagaactcc

SEQ ID NO: 304207 - DNA, 15 bp, Homo sapiens
agcataccagaactc

SEQ ID NO: 304208 - DNA, 15 bp, Homo sapiens
aagcataccagaact

SEQ ID NO: 304209 - DNA, 15 bp, Homo sapiens
aaagcataccagaac

SEQ ID NO: 304210 - DNA, 15 bp, Homo sapiens
caaagcataccagaa

SEQ ID NO: 304211 - DNA, 15 bp, Homo sapiens
tcaaagcataccaga

SEQ ID NO: 304212 - DNA, 15 bp, Homo sapiens
ttcaaagcataccag

SEQ ID NO: 304213 - DNA, 15 bp, Homo sapiens
tttcaaagcatacca

SEQ ID NO: 304214 - DNA, 15 bp, Homo sapiens
atttcaaagcatacc

SEQ ID NO: 304215 - DNA, 15 bp, Homo sapiens
gatttcaaagcatac

SEQ ID NO: 304216 - DNA, 15 bp, Homo sapiens
ggatttcaaagcata

SEQ ID NO: 304217 - DNA, 15 bp, Homo sapiens
tggatttcaaagcat

SEQ ID NO: 304218 - DNA, 15 bp, Homo sapiens
atggatttcaaagca

SEQ ID NO: 304219 - DNA, 15 bp, Homo sapiens
tatggatttcaaagc

SEQ ID NO: 304220 - DNA, 15 bp, Homo sapiens
ctatggatttcaaag

SEQ ID NO: 304221 - DNA, 15 bp, Homo sapiens
gctatggatttcaaa

SEQ ID NO: 304222 - DNA, 15 bp, Homo sapiens
ggctatggatttcaa

SEQ ID NO: 304223 - DNA, 15 bp, Homo sapiens
aggctatggatttca

SEQ ID NO: 304224 - DNA, 15 bp, Homo sapiens
aaggctatggatttc

SEQ ID NO: 304225 - DNA, 15 bp, Homo sapiens
gaaggctatggattt

SEQ ID NO: 304226 - DNA, 15 bp, Homo sapiens
ggaaggctatggatt

SEQ ID NO: 304227 - DNA, 15 bp, Homo sapiens
aggaaggctatggat

SEQ ID NO: 304228 - DNA, 15 bp, Homo sapiens
caggaaggctatgga

SEQ ID NO: 304229 - DNA, 15 bp, Homo sapiens
acaggaaggctatgg

SEQ ID NO: 304230 - DNA, 15 bp, Homo sapiens
cacaggaaggctatg

SEQ ID NO: 304231 - DNA, 15 bp, Homo sapiens
ccacaggaaggctat

SEQ ID NO: 304232 - DNA, 15 bp, Homo sapiens
tccacaggaaggcta

SEQ ID NO: 304233 - DNA, 15 bp, Homo sapiens
atccacaggaaggct

SEQ ID NO: 304234 - DNA, 15 bp, Homo sapiens
catccacaggaaggc

SEQ ID NO: 304235 - DNA, 15 bp, Homo sapiens
tcatccacaggaagg

SEQ ID NO: 304236 - DNA, 15 bp, Homo sapiens
atcatccacaggaag

SEQ ID NO: 304237 - DNA, 15 bp, Homo sapiens
aatcatccacaggaa

SEQ ID NO: 304238 - DNA, 15 bp, Homo sapiens
aaatcatccacagga

SEQ ID NO: 304239 - DNA, 15 bp, Homo sapiens
taaatcatccacagg

SEQ ID NO: 304240 - DNA, 15 bp, Homo sapiens
ttaaatcatccacag

SEQ ID NO: 304241 - DNA, 15 bp, Homo sapiens
attaaatcatccaca

SEQ ID NO: 304242 - DNA, 15 bp, Homo sapiens
aattaaatcatccac

SEQ ID NO: 304243 - DNA, 15 bp, Homo sapiens
gaattaaatcatcca

SEQ ID NO: 304244 - DNA, 15 bp, Homo sapiens
agaattaaatcatcc

SEQ ID NO: 304245 - DNA, 15 bp, Homo sapiens
cagaattaaatcatc

SEQ ID NO: 304246 - DNA, 15 bp, Homo sapiens
tcagaattaaatcat

SEQ ID NO: 304247 - DNA, 15 bp, Homo sapiens
atcagaattaaatca

SEQ ID NO: 304248 - DNA, 15 bp, Homo sapiens
aatcagaattaaatc

SEQ ID NO: 304249 - DNA, 15 bp, Homo sapiens
aaatcagaattaaat

SEQ ID NO: 304250 - DNA, 15 bp, Homo sapiens
aaaatcagaattaaa

SEQ ID NO: 304251 - DNA, 15 bp, Homo sapiens
aaaaatcagaattaa

SEQ ID NO: 304252 - DNA, 15 bp, Homo sapiens
caaaaatcagaatta

SEQ ID NO: 304253 - DNA, 15 bp, Homo sapiens
ccaaaaatcagaatt

SEQ ID NO: 304254 - DNA, 15 bp, Homo sapiens
tccaaaaatcagaat

SEQ ID NO: 304255 - DNA, 15 bp, Homo sapiens
ctccaaaaatcagaa

SEQ ID NO: 304256 - DNA, 15 bp, Homo sapiens
tctccaaaaatcaga

SEQ ID NO: 304257 - DNA, 15 bp, Homo sapiens
atctccaaaaatcag

SEQ ID NO: 304258 - DNA, 15 bp, Homo sapiens
tatctccaaaaatca

SEQ ID NO: 304259 - DNA, 15 bp, Homo sapiens
atatctccaaaaatc

SEQ ID NO: 304260 - DNA, 15 bp, Homo sapiens
catatctccaaaaat

SEQ ID NO: 304261 - DNA, 15 bp, Homo sapiens
acatatctccaaaaa

SEQ ID NO: 304262 - DNA, 15 bp, Homo sapiens
aacatatctccaaaa

SEQ ID NO: 304263 - DNA, 15 bp, Homo sapiens
caacatatctccaaa

SEQ ID NO: 304264 - DNA, 15 bp, Homo sapiens
acaacatatctccaa

SEQ ID NO: 304265 - DNA, 15 bp, Homo sapiens
cacaacatatctcca

SEQ ID NO: 304266 - DNA, 15 bp, Homo sapiens
tcacaacatatctcc

SEQ ID NO: 304267 - DNA, 15 bp, Homo sapiens
atcacaacatatctc

SEQ ID NO: 304268 - DNA, 15 bp, Homo sapiens
gatcacaacatatct

SEQ ID NO: 304269 - DNA, 15 bp, Homo sapiens
agatcacaacatatc

SEQ ID NO: 304270 - DNA, 15 bp, Homo sapiens
gagatcacaacatat

SEQ ID NO: 304271 - DNA, 15 bp, Homo sapiens
tgagatcacaacata

SEQ ID NO: 304272 - DNA, 15 bp, Homo sapiens
atgagatcacaacat

SEQ ID NO: 304273 - DNA, 15 bp, Homo sapiens
tatgagatcacaaca

SEQ ID NO: 304274 - DNA, 15 bp, Homo sapiens
ttatgagatcacaac

SEQ ID NO: 304275 - DNA, 15 bp, Homo sapiens
tttatgagatcacaa

SEQ ID NO: 304276 - DNA, 15 bp, Homo sapiens
ttttatgagatcaca

SEQ ID NO: 304277 - DNA, 15 bp, Homo sapiens
tttttatgagatcac

SEQ ID NO: 304278 - DNA, 15 bp, Homo sapiens
ttttttatgagatca

SEQ ID NO: 304279 - DNA, 15 bp, Homo sapiens
attttttatgagatc

SEQ ID NO: 304280 - DNA, 15 bp, Homo sapiens
gattttttatgagat

SEQ ID NO: 304281 - DNA, 15 bp, Homo sapiens
agattttttatgaga

SEQ ID NO: 304282 - DNA, 15 bp, Homo sapiens
tagattttttatgag

SEQ ID NO: 304283 - DNA, 15 bp, Homo sapiens
atagattttttatga

SEQ ID NO: 304284 - DNA, 15 bp, Homo sapiens
aatagattttttatg

SEQ ID NO: 304285 - DNA, 15 bp, Homo sapiens
caatagattttttat

SEQ ID NO: 304286 - DNA, 15 bp, Homo sapiens
ccaatagatttttta

SEQ ID NO: 304287 - DNA, 15 bp, Homo sapiens
gccaatagatttttt

SEQ ID NO: 304288 - DNA, 15 bp, Homo sapiens
tgccaatagattttt

SEQ ID NO: 304289 - DNA, 15 bp, Homo sapiens
gtgccaatagatttt

SEQ ID NO: 304290 - DNA, 15 bp, Homo sapiens
tgtgccaatagattt

SEQ ID NO: 304291 - DNA, 15 bp, Homo sapiens
ttgtgccaatagatt

SEQ ID NO: 304292 - DNA, 15 bp, Homo sapiens
tttgtgccaatagat

SEQ ID NO: 304293 - DNA, 15 bp, Homo sapiens
gtttgtgccaataga

SEQ ID NO: 304294 - DNA, 15 bp, Homo sapiens
tgtttgtgccaatag

SEQ ID NO: 304295 - DNA, 15 bp, Homo sapiens
gtgtttgtgccaata

SEQ ID NO: 304296 - DNA, 15 bp, Homo sapiens
tgtgtttgtgccaat

SEQ ID NO: 304297 - DNA, 15 bp, Homo sapiens
ctgtgtttgtgccaa

SEQ ID NO: 304298 - DNA, 15 bp, Homo sapiens
tctgtgtttgtgcca

SEQ ID NO: 304299 - DNA, 15 bp, Homo sapiens
ttctgtgtttgtgcc

SEQ ID NO: 304300 - DNA, 15 bp, Homo sapiens
attctgtgtttgtgc

SEQ ID NO: 304301 - DNA, 15 bp, Homo sapiens
cattctgtgtttgtg

SEQ ID NO: 304302 - DNA, 15 bp, Homo sapiens
ccattctgtgtttgt

SEQ ID NO: 304303 - DNA, 15 bp, Homo sapiens
cccattctgtgtttg

SEQ ID NO: 304304 - DNA, 15 bp, Homo sapiens
ccccattctgtgttt

SEQ ID NO: 304305 - DNA, 15 bp, Homo sapiens
cccccattctgtgtt

SEQ ID NO: 304306 - DNA, 15 bp, Homo sapiens
acccccattctgtgt

SEQ ID NO: 304307 - DNA, 15 bp, Homo sapiens
cacccccattctgtg

SEQ ID NO: 304308 - DNA, 15 bp, Homo sapiens
tcacccccattctgt

SEQ ID NO: 304309 - DNA, 15 bp, Homo sapiens
ttcacccccattctg

SEQ ID NO: 304310 - DNA, 15 bp, Homo sapiens
tttcacccccattct

SEQ ID NO: 304311 - DNA, 15 bp, Homo sapiens
ttttcacccccattc

SEQ ID NO: 304312 - DNA, 15 bp, Homo sapiens
tttttcacccccatt

SEQ ID NO: 304313 - DNA, 15 bp, Homo sapiens
ttttttcacccccat

SEQ ID NO: 304314 - DNA, 15 bp, Homo sapiens
tttttttcaccccca

SEQ ID NO: 304315 - DNA, 15 bp, Homo sapiens
atttttttcaccccc

SEQ ID NO: 304316 - DNA, 15 bp, Homo sapiens
aatttttttcacccc

SEQ ID NO: 304317 - DNA, 15 bp, Homo sapiens
caatttttttcaccc

SEQ ID NO: 304318 - DNA, 15 bp, Homo sapiens
tcaatttttttcacc

SEQ ID NO: 304319 - DNA, 15 bp, Homo sapiens
ttcaatttttttcac

SEQ ID NO: 304320 - DNA, 15 bp, Homo sapiens
attcaatttttttca

SEQ ID NO: 304321 - DNA, 15 bp, Homo sapiens
tattcaatttttttc

SEQ ID NO: 304322 - DNA, 15 bp, Homo sapiens
ctattcaattttttt

SEQ ID NO: 304323 - DNA, 15 bp, Homo sapiens
cctattcaatttttt

SEQ ID NO: 304324 - DNA, 15 bp, Homo sapiens
tcctattcaattttt

SEQ ID NO: 304325 - DNA, 15 bp, Homo sapiens
ttcctattcaatttt

SEQ ID NO: 304326 - DNA, 15 bp, Homo sapiens
tttcctattcaattt

SEQ ID NO: 304327 - DNA, 15 bp, Homo sapiens
atttcctattcaatt

SEQ ID NO: 304328 - DNA, 15 bp, Homo sapiens
tatttcctattcaat

SEQ ID NO: 304329 - DNA, 15 bp, Homo sapiens
ttatttcctattcaa

SEQ ID NO: 304330 - DNA, 15 bp, Homo sapiens
tttatttcctattca

SEQ ID NO: 304331 - DNA, 15 bp, Homo sapiens
ttttatttcctattc

SEQ ID NO: 304332 - DNA, 15 bp, Homo sapiens
cttttatttcctatt

SEQ ID NO: 304333 - DNA, 15 bp, Homo sapiens
tcttttatttcctat

SEQ ID NO: 304334 - DNA, 15 bp, Homo sapiens
ctcttttatttccta

SEQ ID NO: 304335 - DNA, 15 bp, Homo sapiens
cctcttttatttcct

SEQ ID NO: 304336 - DNA, 15 bp, Homo sapiens
acctcttttatttcc

SEQ ID NO: 304337 - DNA, 15 bp, Homo sapiens
cacctcttttatttc

SEQ ID NO: 304338 - DNA, 15 bp, Homo sapiens
ccacctcttttattt

SEQ ID NO: 304339 - DNA, 15 bp, Homo sapiens
tccacctcttttatt

SEQ ID NO: 304340 - DNA, 15 bp, Homo sapiens
ttccacctcttttat

SEQ ID NO: 304341 - DNA, 15 bp, Homo sapiens
tttccacctctttta

SEQ ID NO: 304342 - DNA, 15 bp, Homo sapiens
atttccacctctttt

SEQ ID NO: 304343 - DNA, 15 bp, Homo sapiens
catttccacctcttt

SEQ ID NO: 304344 - DNA, 15 bp, Homo sapiens
tcatttccacctctt

SEQ ID NO: 304345 - DNA, 15 bp, Homo sapiens
ttcatttccacctct

SEQ ID NO: 304346 - DNA, 15 bp, Homo sapiens
attcatttccacctc

SEQ ID NO: 304347 - DNA, 15 bp, Homo sapiens
aattcatttccacct

SEQ ID NO: 304348 - DNA, 15 bp, Homo sapiens
aaattcatttccacc

SEQ ID NO: 304349 - DNA, 15 bp, Homo sapiens
gaaattcatttccac

SEQ ID NO: 304350 - DNA, 15 bp, Homo sapiens
agaaattcatttcca

SEQ ID NO: 304351 - DNA, 15 bp, Homo sapiens
tagaaattcatttcc

SEQ ID NO: 304352 - DNA, 15 bp, Homo sapiens
ttagaaattcatttc

SEQ ID NO: 304353 - DNA, 15 bp, Homo sapiens
attagaaattcattt

SEQ ID NO: 304354 - DNA, 15 bp, Homo sapiens
cattagaaattcatt

SEQ ID NO: 304355 - DNA, 15 bp, Homo sapiens
tcattagaaattcat

SEQ ID NO: 304356 - DNA, 15 bp, Homo sapiens
ctcattagaaattca

SEQ ID NO: 304357 - DNA, 15 bp, Homo sapiens
tctcattagaaattc

SEQ ID NO: 304358 - DNA, 15 bp, Homo sapiens
atctcattagaaatt

SEQ ID NO: 304359 - DNA, 15 bp, Homo sapiens
tatctcattagaaat

SEQ ID NO: 304360 - DNA, 15 bp, Homo sapiens
gtatctcattagaaa

SEQ ID NO: 304361 - DNA, 15 bp, Homo sapiens
tgtatctcattagaa

SEQ ID NO: 304362 - DNA, 15 bp, Homo sapiens
atgtatctcattaga

SEQ ID NO: 304363 - DNA, 15 bp, Homo sapiens
gatgtatctcattag

SEQ ID NO: 304364 - DNA, 15 bp, Homo sapiens
agatgtatctcatta

SEQ ID NO: 304365 - DNA, 15 bp, Homo sapiens
aagatgtatctcatt

SEQ ID NO: 304366 - DNA, 15 bp, Homo sapiens
aaagatgtatctcat

SEQ ID NO: 304367 - DNA, 15 bp, Homo sapiens
caaagatgtatctca

SEQ ID NO: 304368 - DNA, 15 bp, Homo sapiens
acaaagatgtatctc

SEQ ID NO: 304369 - DNA, 15 bp, Homo sapiens
tacaaagatgtatct

SEQ ID NO: 304370 - DNA, 15 bp, Homo sapiens
atacaaagatgtatc

SEQ ID NO: 304371 - DNA, 15 bp, Homo sapiens
gatacaaagatgtat

SEQ ID NO: 304372 - DNA, 15 bp, Homo sapiens
tgatacaaagatgta

SEQ ID NO: 304373 - DNA, 15 bp, Homo sapiens
ttgatacaaagatgt

SEQ ID NO: 304374 - DNA, 15 bp, Homo sapiens
gttgatacaaagatg

SEQ ID NO: 304375 - DNA, 15 bp, Homo sapiens
agttgatacaaagat

SEQ ID NO: 304376 - DNA, 15 bp, Homo sapiens
cagttgatacaaaga

SEQ ID NO: 304377 - DNA, 15 bp, Homo sapiens
acagttgatacaaag

SEQ ID NO: 304378 - DNA, 15 bp, Homo sapiens
cacagttgatacaaa

SEQ ID NO: 304379 - DNA, 15 bp, Homo sapiens
ccacagttgatacaa

SEQ ID NO: 304380 - DNA, 15 bp, Homo sapiens
accacagttgataca

SEQ ID NO: 304381 - DNA, 15 bp, Homo sapiens
gaccacagttgatac

SEQ ID NO: 304382 - DNA, 15 bp, Homo sapiens
cgaccacagttgata

SEQ ID NO: 304383 - DNA, 15 bp, Homo sapiens
gcgaccacagttgat

SEQ ID NO: 304384 - DNA, 15 bp, Homo sapiens
agcgaccacagttga

SEQ ID NO: 304385 - DNA, 15 bp, Homo sapiens
aagcgaccacagttg

SEQ ID NO: 304386 - DNA, 15 bp, Homo sapiens
aaagcgaccacagtt

SEQ ID NO: 304387 - DNA, 15 bp, Homo sapiens
gaaagcgaccacagt

SEQ ID NO: 304388 - DNA, 15 bp, Homo sapiens
ggaaagcgaccacag

SEQ ID NO: 304389 - DNA, 15 bp, Homo sapiens
tggaaagcgaccaca

SEQ ID NO: 304390 - DNA, 15 bp, Homo sapiens
ttggaaagcgaccac

SEQ ID NO: 304391 - DNA, 15 bp, Homo sapiens
tttggaaagcgacca

SEQ ID NO: 304392 - DNA, 15 bp, Homo sapiens
ttttggaaagcgacc

SEQ ID NO: 304393 - DNA, 15 bp, Homo sapiens
cttttggaaagcgac

SEQ ID NO: 304394 - DNA, 15 bp, Homo sapiens
tcttttggaaagcga

SEQ ID NO: 304395 - DNA, 15 bp, Homo sapiens
ttcttttggaaagcg

SEQ ID NO: 304396 - DNA, 15 bp, Homo sapiens
tttcttttggaaagc

SEQ ID NO: 304397 - DNA, 15 bp, Homo sapiens
atttcttttggaaag

SEQ ID NO: 304398 - DNA, 15 bp, Homo sapiens
catttcttttggaaa

SEQ ID NO: 304399 - DNA, 15 bp, Homo sapiens
acatttcttttggaa

SEQ ID NO: 304400 - DNA, 15 bp, Homo sapiens
cacatttcttttgga

SEQ ID NO: 304401 - DNA, 15 bp, Homo sapiens
gcacatttcttttgg

SEQ ID NO: 304402 - DNA, 15 bp, Homo sapiens
agcacatttcttttg

SEQ ID NO: 304403 - DNA, 15 bp, Homo sapiens
gagcacatttctttt

SEQ ID NO: 304404 - DNA, 15 bp, Homo sapiens
agagcacatttcttt

SEQ ID NO: 304405 - DNA, 15 bp, Homo sapiens
tagagcacatttctt

SEQ ID NO: 304406 - DNA, 15 bp, Homo sapiens
ttagagcacatttct

SEQ ID NO: 304407 - DNA, 15 bp, Homo sapiens
tttagagcacatttc

SEQ ID NO: 304408 - DNA, 15 bp, Homo sapiens
atttagagcacattt

SEQ ID NO: 304409 - DNA, 15 bp, Homo sapiens
catttagagcacatt

SEQ ID NO: 304410 - DNA, 15 bp, Homo sapiens
acatttagagcacat

SEQ ID NO: 304411 - DNA, 15 bp, Homo sapiens
cacatttagagcaca

SEQ ID NO: 304412 - DNA, 15 bp, Homo sapiens
gcacatttagagcac

SEQ ID NO: 304413 - DNA, 15 bp, Homo sapiens
agcacatttagagca

SEQ ID NO: 304414 - DNA, 15 bp, Homo sapiens
aagcacatttagagc

SEQ ID NO: 304415 - DNA, 15 bp, Homo sapiens
gaagcacatttagag

SEQ ID NO: 304416 - DNA, 15 bp, Homo sapiens
ggaagcacatttaga

SEQ ID NO: 304417 - DNA, 15 bp, Homo sapiens
tggaagcacatttag

SEQ ID NO: 304418 - DNA, 15 bp, Homo sapiens
atggaagcacattta

SEQ ID NO: 304419 - DNA, 15 bp, Homo sapiens
aatggaagcacattt

SEQ ID NO: 304420 - DNA, 15 bp, Homo sapiens
aaatggaagcacatt

SEQ ID NO: 304421 - DNA, 15 bp, Homo sapiens
caaatggaagcacat

SEQ ID NO: 304422 - DNA, 15 bp, Homo sapiens
acaaatggaagcaca

SEQ ID NO: 304423 - DNA, 15 bp, Homo sapiens
tacaaatggaagcac

SEQ ID NO: 304424 - DNA, 15 bp, Homo sapiens
atacaaatggaagca

SEQ ID NO: 304425 - DNA, 15 bp, Homo sapiens
tatacaaatggaagc

SEQ ID NO: 304426 - DNA, 15 bp, Homo sapiens
atatacaaatggaag

SEQ ID NO: 304427 - DNA, 15 bp, Homo sapiens
aatatacaaatggaa

SEQ ID NO: 304428 - DNA, 15 bp, Homo sapiens
taatatacaaatgga

SEQ ID NO: 304429 - DNA, 15 bp, Homo sapiens
ttaatatacaaatgg

SEQ ID NO: 304430 - DNA, 15 bp, Homo sapiens
attaatatacaaatg

SEQ ID NO: 304431 - DNA, 15 bp, Homo sapiens
tattaatatacaaat

SEQ ID NO: 304432 - DNA, 15 bp, Homo sapiens
atattaatatacaaa

SEQ ID NO: 304433 - DNA, 15 bp, Homo sapiens
aatattaatatacaa

SEQ ID NO: 304434 - DNA, 15 bp, Homo sapiens
aaatattaatataca

SEQ ID NO: 304435 - DNA, 15 bp, Homo sapiens
taaatattaatatac

SEQ ID NO: 304436 - DNA, 15 bp, Homo sapiens
ataaatattaatata

SEQ ID NO: 304437 - DNA, 15 bp, Homo sapiens
aataaatattaatat

SEQ ID NO: 304438 - DNA, 15 bp, Homo sapiens
caataaatattaata

SEQ ID NO: 304439 - DNA, 15 bp, Homo sapiens
tcaataaatattaat

SEQ ID NO: 304440 - DNA, 15 bp, Homo sapiens
ctcaataaatattaa

SEQ ID NO: 304441 - DNA, 15 bp, Homo sapiens
gctcaataaatatta

SEQ ID NO: 304442 - DNA, 15 bp, Homo sapiens
tgctcaataaatatt

SEQ ID NO: 304443 - DNA, 15 bp, Homo sapiens
atgctcaataaatat

SEQ ID NO: 304444 - DNA, 15 bp, Homo sapiens
gatgctcaataaata

SEQ ID NO: 304445 - DNA, 15 bp, Homo sapiens
agatgctcaataaat

SEQ ID NO: 304446 - DNA, 15 bp, Homo sapiens
tagatgctcaataaa

SEQ ID NO: 304447 - DNA, 15 bp, Homo sapiens
gtagatgctcaataa

SEQ ID NO: 304448 - DNA, 15 bp, Homo sapiens
agtagatgctcaata

SEQ ID NO: 304449 - DNA, 15 bp, Homo sapiens
tagtagatgctcaat

SEQ ID NO: 304450 - DNA, 15 bp, Homo sapiens
atagtagatgctcaa

SEQ ID NO: 304451 - DNA, 15 bp, Homo sapiens
tatagtagatgctca

SEQ ID NO: 304452 - DNA, 15 bp, Homo sapiens
atatagtagatgctc

SEQ ID NO: 304453 - DNA, 15 bp, Homo sapiens
catatagtagatgct

SEQ ID NO: 304454 - DNA, 15 bp, Homo sapiens
acatatagtagatgc

SEQ ID NO: 304455 - DNA, 15 bp, Homo sapiens
gacatatagtagatg

SEQ ID NO: 304456 - DNA, 15 bp, Homo sapiens
tgacatatagtagat

SEQ ID NO: 304457 - DNA, 15 bp, Homo sapiens
ctgacatatagtaga

SEQ ID NO: 304458 - DNA, 15 bp, Homo sapiens
cctgacatatagtag

SEQ ID NO: 304459 - DNA, 15 bp, Homo sapiens
acctgacatatagta

SEQ ID NO: 304460 - DNA, 15 bp, Homo sapiens
tacctgacatatagt

SEQ ID NO: 304461 - DNA, 15 bp, Homo sapiens
gtacctgacatatag

SEQ ID NO: 304462 - DNA, 15 bp, Homo sapiens
ggtacctgacatata

SEQ ID NO: 304463 - DNA, 15 bp, Homo sapiens
tggtacctgacatat

SEQ ID NO: 304464 - DNA, 15 bp, Homo sapiens
atggtacctgacata

SEQ ID NO: 304465 - DNA, 15 bp, Homo sapiens
aatggtacctgacat

SEQ ID NO: 304466 - DNA, 15 bp, Homo sapiens
gaatggtacctgaca

SEQ ID NO: 304467 - DNA, 15 bp, Homo sapiens
ggaatggtacctgac

SEQ ID NO: 304468 - DNA, 15 bp, Homo sapiens
tggaatggtacctga

SEQ ID NO: 304469 - DNA, 15 bp, Homo sapiens
ctggaatggtacctg

SEQ ID NO: 304470 - DNA, 15 bp, Homo sapiens
tctggaatggtacct

SEQ ID NO: 304471 - DNA, 15 bp, Homo sapiens
atctggaatggtacc

SEQ ID NO: 304472 - DNA, 15 bp, Homo sapiens
catctggaatggtac

SEQ ID NO: 304473 - DNA, 15 bp, Homo sapiens
tcatctggaatggta

SEQ ID NO: 304474 - DNA, 15 bp, Homo sapiens
atcatctggaatggt

SEQ ID NO: 304475 - DNA, 15 bp, Homo sapiens
aatcatctggaatgg

SEQ ID NO: 304476 - DNA, 15 bp, Homo sapiens
caatcatctggaatg

SEQ ID NO: 304477 - DNA, 15 bp, Homo sapiens
ccaatcatctggaat

SEQ ID NO: 304478 - DNA, 15 bp, Homo sapiens
cccaatcatctggaa

SEQ ID NO: 304479 - DNA, 15 bp, Homo sapiens
tcccaatcatctgga

SEQ ID NO: 304480 - DNA, 15 bp, Homo sapiens
ttcccaatcatctgg

SEQ ID NO: 304481 - DNA, 15 bp, Homo sapiens
tttcccaatcatctg

SEQ ID NO: 304482 - DNA, 15 bp, Homo sapiens
gtttcccaatcatct

SEQ ID NO: 304483 - DNA, 15 bp, Homo sapiens
tgtttcccaatcatc

SEQ ID NO: 304484 - DNA, 15 bp, Homo sapiens
ttgtttcccaatcat

SEQ ID NO: 304485 - DNA, 15 bp, Homo sapiens
gttgtttcccaatca

SEQ ID NO: 304486 - DNA, 15 bp, Homo sapiens
tgttgtttcccaatc

SEQ ID NO: 304487 - DNA, 15 bp, Homo sapiens
ctgttgtttcccaat

SEQ ID NO: 304488 - DNA, 15 bp, Homo sapiens
actgttgtttcccaa

SEQ ID NO: 304489 - DNA, 15 bp, Homo sapiens
cactgttgtttccca

SEQ ID NO: 304490 - DNA, 15 bp, Homo sapiens
tcactgttgtttccc

SEQ ID NO: 304491 - DNA, 15 bp, Homo sapiens
ttcactgttgtttcc

SEQ ID NO: 304492 - DNA, 15 bp, Homo sapiens
cttcactgttgtttc

SEQ ID NO: 304493 - DNA, 15 bp, Homo sapiens
tcttcactgttgttt

SEQ ID NO: 304494 - DNA, 15 bp, Homo sapiens
ttcttcactgttgtt

SEQ ID NO: 304495 - DNA, 15 bp, Homo sapiens
tttcttcactgttgt

SEQ ID NO: 304496 - DNA, 15 bp, Homo sapiens
atttcttcactgttg

SEQ ID NO: 304497 - DNA, 15 bp, Homo sapiens
tatttcttcactgtt

SEQ ID NO: 304498 - DNA, 15 bp, Homo sapiens
ctatttcttcactgt

SEQ ID NO: 304499 - DNA, 15 bp, Homo sapiens
tctatttcttcactg

SEQ ID NO: 304500 - DNA, 15 bp, Homo sapiens
ctctatttcttcact

SEQ ID NO: 304501 - DNA, 15 bp, Homo sapiens
actctatttcttcac

SEQ ID NO: 304502 - DNA, 15 bp, Homo sapiens
gactctatttcttca

SEQ ID NO: 304503 - DNA, 15 bp, Homo sapiens
ggactctatttcttc

SEQ ID NO: 304504 - DNA, 15 bp, Homo sapiens
aggactctatttctt

SEQ ID NO: 304505 - DNA, 15 bp, Homo sapiens
taggactctatttct

SEQ ID NO: 304506 - DNA, 15 bp, Homo sapiens
ataggactctatttc

SEQ ID NO: 304507 - DNA, 15 bp, Homo sapiens
gataggactctattt

SEQ ID NO: 304508 - DNA, 15 bp, Homo sapiens
ggataggactctatt

SEQ ID NO: 304509 - DNA, 15 bp, Homo sapiens
gggataggactctat

SEQ ID NO: 304510 - DNA, 15 bp, Homo sapiens
ggggataggactcta

SEQ ID NO: 304511 - DNA, 15 bp, Homo sapiens
gggggataggactct

SEQ ID NO: 304512 - DNA, 15 bp, Homo sapiens
agggggataggactc

SEQ ID NO: 304513 - DNA, 15 bp, Homo sapiens
tagggggataggact

SEQ ID NO: 304514 - DNA, 15 bp, Homo sapiens
gtagggggataggac

SEQ ID NO: 304515 - DNA, 15 bp, Homo sapiens
ggtagggggatagga

SEQ ID NO: 304516 - DNA, 15 bp, Homo sapiens
gggtagggggatagg

SEQ ID NO: 304517 - DNA, 15 bp, Homo sapiens
agggtagggggatag

SEQ ID NO: 304518 - DNA, 15 bp, Homo sapiens
gagggtagggggata

SEQ ID NO: 304519 - DNA, 15 bp, Homo sapiens
ggagggtagggggat

SEQ ID NO: 304520 - DNA, 15 bp, Homo sapiens
aggagggtaggggga

SEQ ID NO: 304521 - DNA, 15 bp, Homo sapiens
taggagggtaggggg

SEQ ID NO: 304522 - DNA, 15 bp, Homo sapiens
ataggagggtagggg

SEQ ID NO: 304523 - DNA, 15 bp, Homo sapiens
tataggagggtaggg

SEQ ID NO: 304524 - DNA, 15 bp, Homo sapiens
gtataggagggtagg

SEQ ID NO: 304525 - DNA, 15 bp, Homo sapiens
agtataggagggtag

SEQ ID NO: 304526 - DNA, 15 bp, Homo sapiens
cagtataggagggta

SEQ ID NO: 304527 - DNA, 15 bp, Homo sapiens
gcagtataggagggt

SEQ ID NO: 304528 - DNA, 15 bp, Homo sapiens
tgcagtataggaggg

SEQ ID NO: 304529 - DNA, 15 bp, Homo sapiens
ctgcagtataggagg

SEQ ID NO: 304530 - DNA, 15 bp, Homo sapiens
actgcagtataggag

SEQ ID NO: 304531 - DNA, 15 bp, Homo sapiens
cactgcagtatagga

SEQ ID NO: 304532 - DNA, 15 bp, Homo sapiens
acactgcagtatagg

SEQ ID NO: 304533 - DNA, 15 bp, Homo sapiens
aacactgcagtatag

SEQ ID NO: 304534 - DNA, 15 bp, Homo sapiens
caacactgcagtata

SEQ ID NO: 304535 - DNA, 15 bp, Homo sapiens
ccaacactgcagtat

SEQ ID NO: 304536 - DNA, 15 bp, Homo sapiens
cccaacactgcagta

SEQ ID NO: 304537 - DNA, 15 bp, Homo sapiens
tcccaacactgcagt

SEQ ID NO: 304538 - DNA, 15 bp, Homo sapiens
ttcccaacactgcag

SEQ ID NO: 304539 - DNA, 15 bp, Homo sapiens
tttcccaacactgca

SEQ ID NO: 304540 - DNA, 15 bp, Homo sapiens
ctttcccaacactgc

SEQ ID NO: 304541 - DNA, 15 bp, Homo sapiens
gctttcccaacactg

SEQ ID NO: 304542 - DNA, 15 bp, Homo sapiens
tgctttcccaacact

SEQ ID NO: 304543 - DNA, 15 bp, Homo sapiens
ctgctttcccaacac

SEQ ID NO: 304544 - DNA, 15 bp, Homo sapiens
cctgctttcccaaca

SEQ ID NO: 304545 - DNA, 15 bp, Homo sapiens
tcctgctttcccaac

SEQ ID NO: 304546 - DNA, 15 bp, Homo sapiens
ttcctgctttcccaa

SEQ ID NO: 304547 - DNA, 15 bp, Homo sapiens
tttcctgctttccca

SEQ ID NO: 304548 - DNA, 15 bp, Homo sapiens
gtttcctgctttccc

SEQ ID NO: 304549 - DNA, 15 bp, Homo sapiens
tgtttcctgctttcc

SEQ ID NO: 304550 - DNA, 15 bp, Homo sapiens
gtgtttcctgctttc

SEQ ID NO: 304551 - DNA, 15 bp, Homo sapiens
agtgtttcctgcttt

SEQ ID NO: 304552 - DNA, 15 bp, Homo sapiens
cagtgtttcctgctt

SEQ ID NO: 304553 - DNA, 15 bp, Homo sapiens
tcagtgtttcctgct

SEQ ID NO: 304554 - DNA, 15 bp, Homo sapiens
ttcagtgtttcctgc

SEQ ID NO: 304555 - DNA, 15 bp, Homo sapiens
gttcagtgtttcctg

SEQ ID NO: 304556 - DNA, 15 bp, Homo sapiens
ggttcagtgtttcct

SEQ ID NO: 304557 - DNA, 15 bp, Homo sapiens
aggttcagtgtttcc

SEQ ID NO: 304558 - DNA, 15 bp, Homo sapiens
taggttcagtgtttc

SEQ ID NO: 304559 - DNA, 15 bp, Homo sapiens
ttaggttcagtgttt

SEQ ID NO: 304560 - DNA, 15 bp, Homo sapiens
attaggttcagtgtt

SEQ ID NO: 304561 - DNA, 15 bp, Homo sapiens
tattaggttcagtgt

SEQ ID NO: 304562 - DNA, 15 bp, Homo sapiens
ttattaggttcagtg

SEQ ID NO: 304563 - DNA, 15 bp, Homo sapiens
cttattaggttcagt

SEQ ID NO: 304564 - DNA, 15 bp, Homo sapiens
ccttattaggttcag

SEQ ID NO: 304565 - DNA, 15 bp, Homo sapiens
tccttattaggttca

SEQ ID NO: 304566 - DNA, 15 bp, Homo sapiens
ttccttattaggttc

SEQ ID NO: 304567 - DNA, 15 bp, Homo sapiens
cttccttattaggtt

SEQ ID NO: 304568 - DNA, 15 bp, Homo sapiens
acttccttattaggt

SEQ ID NO: 304569 - DNA, 15 bp, Homo sapiens
tacttccttattagg

SEQ ID NO: 304570 - DNA, 15 bp, Homo sapiens
ttacttccttattag

SEQ ID NO: 304571 - DNA, 15 bp, Homo sapiens
tttacttccttatta

SEQ ID NO: 304572 - DNA, 15 bp, Homo sapiens
atttacttccttatt

SEQ ID NO: 304573 - DNA, 15 bp, Homo sapiens
catttacttccttat

SEQ ID NO: 304574 - DNA, 15 bp, Homo sapiens
tcatttacttcctta

SEQ ID NO: 304575 - DNA, 15 bp, Homo sapiens
atcatttacttcctt

SEQ ID NO: 304576 - DNA, 15 bp, Homo sapiens
tatcatttacttcct

SEQ ID NO: 304577 - DNA, 15 bp, Homo sapiens
gtatcatttacttcc

SEQ ID NO: 304578 - DNA, 15 bp, Homo sapiens
cgtatcatttacttc

SEQ ID NO: 304579 - DNA, 15 bp, Homo sapiens
ccgtatcatttactt

SEQ ID NO: 304580 - DNA, 15 bp, Homo sapiens
accgtatcatttact

SEQ ID NO: 304581 - DNA, 15 bp, Homo sapiens
taccgtatcatttac

SEQ ID NO: 304582 - DNA, 15 bp, Homo sapiens
ataccgtatcattta

SEQ ID NO: 304583 - DNA, 15 bp, Homo sapiens
cataccgtatcattt

SEQ ID NO: 304584 - DNA, 15 bp, Homo sapiens
ccataccgtatcatt

SEQ ID NO: 304585 - DNA, 15 bp, Homo sapiens
accataccgtatcat

SEQ ID NO: 304586 - DNA, 15 bp, Homo sapiens
aaccataccgtatca

SEQ ID NO: 304587 - DNA, 15 bp, Homo sapiens
taaccataccgtatc

SEQ ID NO: 304588 - DNA, 15 bp, Homo sapiens
ctaaccataccgtat

SEQ ID NO: 304589 - DNA, 15 bp, Homo sapiens
cctaaccataccgta

SEQ ID NO: 304590 - DNA, 15 bp, Homo sapiens
tcctaaccataccgt

SEQ ID NO: 304591 - DNA, 15 bp, Homo sapiens
ttcctaaccataccg

SEQ ID NO: 304592 - DNA, 15 bp, Homo sapiens
cttcctaaccatacc

SEQ ID NO: 304593 - DNA, 15 bp, Homo sapiens
gcttcctaaccatac

SEQ ID NO: 304594 - DNA, 15 bp, Homo sapiens
tgcttcctaaccata

SEQ ID NO: 304595 - DNA, 15 bp, Homo sapiens
atgcttcctaaccat

SEQ ID NO: 304596 - DNA, 15 bp, Homo sapiens
tatgcttcctaacca

SEQ ID NO: 304597 - DNA, 15 bp, Homo sapiens
ttatgcttcctaacc

SEQ ID NO: 304598 - DNA, 15 bp, Homo sapiens
cttatgcttcctaac

SEQ ID NO: 304599 - DNA, 15 bp, Homo sapiens
acttatgcttcctaa

SEQ ID NO: 304600 - DNA, 15 bp, Homo sapiens
tacttatgcttccta

SEQ ID NO: 304601 - DNA, 15 bp, Homo sapiens
gtacttatgcttcct

SEQ ID NO: 304602 - DNA, 15 bp, Homo sapiens
agtacttatgcttcc

SEQ ID NO: 304603 - DNA, 15 bp, Homo sapiens
tagtacttatgcttc

SEQ ID NO: 304604 - DNA, 15 bp, Homo sapiens
atagtacttatgctt

SEQ ID NO: 304605 - DNA, 15 bp, Homo sapiens
aatagtacttatgct

SEQ ID NO: 304606 - DNA, 15 bp, Homo sapiens
caatagtacttatgc

SEQ ID NO: 304607 - DNA, 15 bp, Homo sapiens
tcaatagtacttatg

SEQ ID NO: 304608 - DNA, 15 bp, Homo sapiens
ttcaatagtacttat

SEQ ID NO: 304609 - DNA, 15 bp, Homo sapiens
tttcaatagtactta

SEQ ID NO: 304610 - DNA, 15 bp, Homo sapiens
atttcaatagtactt

SEQ ID NO: 304611 - DNA, 15 bp, Homo sapiens
aatttcaatagtact

SEQ ID NO: 304612 - DNA, 15 bp, Homo sapiens
caatttcaatagtac

SEQ ID NO: 304613 - DNA, 15 bp, Homo sapiens
tcaatttcaatagta

SEQ ID NO: 304614 - DNA, 15 bp, Homo sapiens
ttcaatttcaatagt

SEQ ID NO: 304615 - DNA, 15 bp, Homo sapiens
gttcaatttcaatag

SEQ ID NO: 304616 - DNA, 15 bp, Homo sapiens
tgttcaatttcaata

SEQ ID NO: 304617 - DNA, 15 bp, Homo sapiens
gtgttcaatttcaat

SEQ ID NO: 304618 - DNA, 15 bp, Homo sapiens
tgtgttcaatttcaa

SEQ ID NO: 304619 - DNA, 15 bp, Homo sapiens
atgtgttcaatttca

SEQ ID NO: 304620 - DNA, 15 bp, Homo sapiens
tatgtgttcaatttc

SEQ ID NO: 304621 - DNA, 15 bp, Homo sapiens
ctatgtgttcaattt

SEQ ID NO: 304622 - DNA, 15 bp, Homo sapiens
tctatgtgttcaatt

SEQ ID NO: 304623 - DNA, 15 bp, Homo sapiens
ttctatgtgttcaat

SEQ ID NO: 304624 - DNA, 15 bp, Homo sapiens
gttctatgtgttcaa

SEQ ID NO: 304625 - DNA, 15 bp, Homo sapiens
tgttctatgtgttca

SEQ ID NO: 304626 - DNA, 15 bp, Homo sapiens
ttgttctatgtgttc

SEQ ID NO: 304627 - DNA, 15 bp, Homo sapiens
attgttctatgtgtt

SEQ ID NO: 304628 - DNA, 15 bp, Homo sapiens
tattgttctatgtgt

SEQ ID NO: 304629 - DNA, 15 bp, Homo sapiens
ttattgttctatgtg

SEQ ID NO: 304630 - DNA, 15 bp, Homo sapiens
gttattgttctatgt

SEQ ID NO: 304631 - DNA, 15 bp, Homo sapiens
ggttattgttctatg

SEQ ID NO: 304632 - DNA, 15 bp, Homo sapiens
aggttattgttctat

SEQ ID NO: 304633 - DNA, 15 bp, Homo sapiens
aaggttattgttcta

SEQ ID NO: 304634 - DNA, 15 bp, Homo sapiens
aaaggttattgttct

SEQ ID NO: 304635 - DNA, 15 bp, Homo sapiens
aaaaggttattgttc

SEQ ID NO: 304636 - DNA, 15 bp, Homo sapiens
caaaaggttattgtt

SEQ ID NO: 304637 - DNA, 15 bp, Homo sapiens
ccaaaaggttattgt

SEQ ID NO: 304638 - DNA, 15 bp, Homo sapiens
cccaaaaggttattg

SEQ ID NO: 304639 - DNA, 15 bp, Homo sapiens
tcccaaaaggttatt

SEQ ID NO: 304640 - DNA, 15 bp, Homo sapiens
atcccaaaaggttat

SEQ ID NO: 304641 - DNA, 15 bp, Homo sapiens
tatcccaaaaggtta

SEQ ID NO: 304642 - DNA, 15 bp, Homo sapiens
atatcccaaaaggtt

SEQ ID NO: 304643 - DNA, 15 bp, Homo sapiens
catatcccaaaaggt

SEQ ID NO: 304644 - DNA, 15 bp, Homo sapiens
tcatatcccaaaagg

SEQ ID NO: 304645 - DNA, 15 bp, Homo sapiens
ttcatatcccaaaag

SEQ ID NO: 304646 - DNA, 15 bp, Homo sapiens
tttcatatcccaaaa

SEQ ID NO: 304647 - DNA, 15 bp, Homo sapiens
atttcatatcccaaa

SEQ ID NO: 304648 - DNA, 15 bp, Homo sapiens
tatttcatatcccaa

SEQ ID NO: 304649 - DNA, 15 bp, Homo sapiens
ttatttcatatccca

SEQ ID NO: 304650 - DNA, 15 bp, Homo sapiens
attatttcatatccc

SEQ ID NO: 304651 - DNA, 15 bp, Homo sapiens
tattatttcatatcc

SEQ ID NO: 304652 - DNA, 15 bp, Homo sapiens
ttattatttcatatc

SEQ ID NO: 304653 - DNA, 15 bp, Homo sapiens
attattatttcatat

SEQ ID NO: 304654 - DNA, 15 bp, Homo sapiens
tattattatttcata

SEQ ID NO: 304655 - DNA, 15 bp, Homo sapiens
ttattattatttcat

SEQ ID NO: 304656 - DNA, 15 bp, Homo sapiens
gttattattatttca

SEQ ID NO: 304657 - DNA, 15 bp, Homo sapiens
tgttattattatttc

SEQ ID NO: 304658 - DNA, 15 bp, Homo sapiens
ttgttattattattt

SEQ ID NO: 304659 - DNA, 15 bp, Homo sapiens
tttgttattattatt

SEQ ID NO: 304660 - DNA, 15 bp, Homo sapiens
ttttgttattattat

SEQ ID NO: 304661 - DNA, 15 bp, Homo sapiens
tttttgttattatta

SEQ ID NO: 304662 - DNA, 15 bp, Homo sapiens
atttttgttattatt

SEQ ID NO: 304663 - DNA, 15 bp, Homo sapiens
tatttttgttattat

SEQ ID NO: 304664 - DNA, 15 bp, Homo sapiens
ttatttttgttatta

SEQ ID NO: 304665 - DNA, 15 bp, Homo sapiens
tttatttttgttatt

SEQ ID NO: 304666 - DNA, 15 bp, Homo sapiens
ttttttatttttgtt

SEQ ID NO: 304667 - DNA, 15 bp, Homo sapiens
tttttttatttttgt

SEQ ID NO: 304668 - DNA, 15 bp, Homo sapiens
gtttttttatttttg

SEQ ID NO: 304669 - DNA, 15 bp, Homo sapiens
ggtttttttattttt

SEQ ID NO: 304670 - DNA, 15 bp, Homo sapiens
aggtttttttatttt

SEQ ID NO: 304671 - DNA, 15 bp, Homo sapiens
gaggtttttttattt

SEQ ID NO: 304672 - DNA, 15 bp, Homo sapiens
agaggtttttttatt

SEQ ID NO: 304673 - DNA, 15 bp, Homo sapiens
aagaggtttttttat

SEQ ID NO: 304674 - DNA, 15 bp, Homo sapiens
aaagaggttttttta

SEQ ID NO: 304675 - DNA, 15 bp, Homo sapiens
gaaagaggttttttt

SEQ ID NO: 304676 - DNA, 15 bp, Homo sapiens
ggaaagaggtttttt

SEQ ID NO: 304677 - DNA, 15 bp, Homo sapiens
aggaaagaggttttt

SEQ ID NO: 304678 - DNA, 15 bp, Homo sapiens
gaggaaagaggtttt

SEQ ID NO: 304679 - DNA, 15 bp, Homo sapiens
agaggaaagaggttt

SEQ ID NO: 304680 - DNA, 15 bp, Homo sapiens
aagaggaaagaggtt

SEQ ID NO: 304681 - DNA, 15 bp, Homo sapiens
caagaggaaagaggt

SEQ ID NO: 304682 - DNA, 15 bp, Homo sapiens
acaagaggaaagagg

SEQ ID NO: 304683 - DNA, 15 bp, Homo sapiens
tacaagaggaaagag

SEQ ID NO: 304684 - DNA, 15 bp, Homo sapiens
ctacaagaggaaaga

SEQ ID NO: 304685 - DNA, 15 bp, Homo sapiens
cctacaagaggaaag

SEQ ID NO: 304686 - DNA, 15 bp, Homo sapiens
tcctacaagaggaaa

SEQ ID NO: 304687 - DNA, 15 bp, Homo sapiens
ctcctacaagaggaa

SEQ ID NO: 304688 - DNA, 15 bp, Homo sapiens
tctcctacaagagga

SEQ ID NO: 304689 - DNA, 15 bp, Homo sapiens
ttctcctacaagagg

SEQ ID NO: 304690 - DNA, 15 bp, Homo sapiens
tttctcctacaagag

SEQ ID NO: 304691 - DNA, 15 bp, Homo sapiens
ctttctcctacaaga

SEQ ID NO: 304692 - DNA, 15 bp, Homo sapiens
gctttctcctacaag

SEQ ID NO: 304693 - DNA, 15 bp, Homo sapiens
tgctttctcctacaa

SEQ ID NO: 304694 - DNA, 15 bp, Homo sapiens
gtgctttctcctaca

SEQ ID NO: 304695 - DNA, 15 bp, Homo sapiens
ggtgctttctcctac

SEQ ID NO: 304696 - DNA, 15 bp, Homo sapiens
aggtgctttctccta

SEQ ID NO: 304697 - DNA, 15 bp, Homo sapiens
aaggtgctttctcct

SEQ ID NO: 304698 - DNA, 15 bp, Homo sapiens
aaaggtgctttctcc

SEQ ID NO: 304699 - DNA, 15 bp, Homo sapiens
taaaggtgctttctc

SEQ ID NO: 304700 - DNA, 15 bp, Homo sapiens
ttaaaggtgctttct

SEQ ID NO: 304701 - DNA, 15 bp, Homo sapiens
attaaaggtgctttc

SEQ ID NO: 304702 - DNA, 15 bp, Homo sapiens
cattaaaggtgcttt

SEQ ID NO: 304703 - DNA, 15 bp, Homo sapiens
tcattaaaggtgctt

SEQ ID NO: 304704 - DNA, 15 bp, Homo sapiens
ttcattaaaggtgct

SEQ ID NO: 304705 - DNA, 15 bp, Homo sapiens
tttcattaaaggtgc

SEQ ID NO: 304706 - DNA, 15 bp, Homo sapiens
atttcattaaaggtg

SEQ ID NO: 304707 - DNA, 15 bp, Homo sapiens
catttcattaaaggt

SEQ ID NO: 304708 - DNA, 15 bp, Homo sapiens
gcatttcattaaagg

SEQ ID NO: 304709 - DNA, 15 bp, Homo sapiens
agcatttcattaaag

SEQ ID NO: 304710 - DNA, 15 bp, Homo sapiens
aagcatttcattaaa

SEQ ID NO: 304711 - DNA, 15 bp, Homo sapiens
aaagcatttcattaa

SEQ ID NO: 304712 - DNA, 15 bp, Homo sapiens
taaagcatttcatta

SEQ ID NO: 304713 - DNA, 15 bp, Homo sapiens
ctaaagcatttcatt

SEQ ID NO: 304714 - DNA, 15 bp, Homo sapiens
cctaaagcatttcat

SEQ ID NO: 304715 - DNA, 15 bp, Homo sapiens
acctaaagcatttca

SEQ ID NO: 304716 - DNA, 15 bp, Homo sapiens
aacctaaagcatttc

SEQ ID NO: 304717 - DNA, 15 bp, Homo sapiens
gaacctaaagcattt

SEQ ID NO: 304718 - DNA, 15 bp, Homo sapiens
agaacctaaagcatt

SEQ ID NO: 304719 - DNA, 15 bp, Homo sapiens
aagaacctaaagcat

SEQ ID NO: 304720 - DNA, 15 bp, Homo sapiens
aaagaacctaaagca

SEQ ID NO: 304721 - DNA, 15 bp, Homo sapiens
caaagaacctaaagc

SEQ ID NO: 304722 - DNA, 15 bp, Homo sapiens
ccaaagaacctaaag

SEQ ID NO: 304723 - DNA, 15 bp, Homo sapiens
accaaagaacctaaa

SEQ ID NO: 304724 - DNA, 15 bp, Homo sapiens
taccaaagaacctaa

SEQ ID NO: 304725 - DNA, 15 bp, Homo sapiens
ctaccaaagaaccta

SEQ ID NO: 304726 - DNA, 15 bp, Homo sapiens
gctaccaaagaacct

SEQ ID NO: 304727 - DNA, 15 bp, Homo sapiens
cgctaccaaagaacc

SEQ ID NO: 304728 - DNA, 15 bp, Homo sapiens
tcgctaccaaagaac

SEQ ID NO: 304729 - DNA, 15 bp, Homo sapiens
ttcgctaccaaagaa

SEQ ID NO: 304730 - DNA, 15 bp, Homo sapiens
tttcgctaccaaaga

SEQ ID NO: 304731 - DNA, 15 bp, Homo sapiens
atttcgctaccaaag

SEQ ID NO: 304732 - DNA, 15 bp, Homo sapiens
gatttcgctaccaaa

SEQ ID NO: 304733 - DNA, 15 bp, Homo sapiens
agatttcgctaccaa

SEQ ID NO: 304734 - DNA, 15 bp, Homo sapiens
gagatttcgctacca

SEQ ID NO: 304735 - DNA, 15 bp, Homo sapiens
ggagatttcgctacc

SEQ ID NO: 304736 - DNA, 15 bp, Homo sapiens
aggagatttcgctac

SEQ ID NO: 304737 - DNA, 15 bp, Homo sapiens
aaggagatttcgcta

SEQ ID NO: 304738 - DNA, 15 bp, Homo sapiens
caaggagatttcgct

SEQ ID NO: 304739 - DNA, 15 bp, Homo sapiens
ccaaggagatttcgc

SEQ ID NO: 304740 - DNA, 15 bp, Homo sapiens
cccaaggagatttcg

SEQ ID NO: 304741 - DNA, 15 bp, Homo sapiens
acccaaggagatttc

SEQ ID NO: 304742 - DNA, 15 bp, Homo sapiens
cacccaaggagattt

SEQ ID NO: 304743 - DNA, 15 bp, Homo sapiens
tcacccaaggagatt

SEQ ID NO: 304744 - DNA, 15 bp, Homo sapiens
ttcacccaaggagat

SEQ ID NO: 304745 - DNA, 15 bp, Homo sapiens
tttcacccaaggaga

SEQ ID NO: 304746 - DNA, 15 bp, Homo sapiens
atttcacccaaggag

SEQ ID NO: 304747 - DNA, 15 bp, Homo sapiens
gatttcacccaagga

SEQ ID NO: 304748 - DNA, 15 bp, Homo sapiens
agatttcacccaagg

SEQ ID NO: 304749 - DNA, 15 bp, Homo sapiens
tagatttcacccaag

SEQ ID NO: 304750 - DNA, 15 bp, Homo sapiens
ttagatttcacccaa

SEQ ID NO: 304751 - DNA, 15 bp, Homo sapiens
tttagatttcaccca

SEQ ID NO: 304752 - DNA, 15 bp, Homo sapiens
ttttagatttcaccc

SEQ ID NO: 304753 - DNA, 15 bp, Homo sapiens
gttttagatttcacc

SEQ ID NO: 304754 - DNA, 15 bp, Homo sapiens
agttttagatttcac

SEQ ID NO: 304755 - DNA, 15 bp, Homo sapiens
cagttttagatttca

SEQ ID NO: 304756 - DNA, 15 bp, Homo sapiens
tcagttttagatttc

SEQ ID NO: 304757 - DNA, 15 bp, Homo sapiens
atcagttttagattt

SEQ ID NO: 304758 - DNA, 15 bp, Homo sapiens
gatcagttttagatt

SEQ ID NO: 304759 - DNA, 15 bp, Homo sapiens
agatcagttttagat

SEQ ID NO: 304760 - DNA, 15 bp, Homo sapiens
gagatcagttttaga

SEQ ID NO: 304761 - DNA, 15 bp, Homo sapiens
ggagatcagttttag

SEQ ID NO: 304762 - DNA, 15 bp, Homo sapiens
gggagatcagtttta

SEQ ID NO: 304763 - DNA, 15 bp, Homo sapiens
agggagatcagtttt

SEQ ID NO: 304764 - DNA, 15 bp, Homo sapiens
cagggagatcagttt

SEQ ID NO: 304765 - DNA, 15 bp, Homo sapiens
acagggagatcagtt

SEQ ID NO: 304766 - DNA, 15 bp, Homo sapiens
aacagggagatcagt

SEQ ID NO: 304767 - DNA, 15 bp, Homo sapiens
taacagggagatcag

SEQ ID NO: 304768 - DNA, 15 bp, Homo sapiens
ataacagggagatca

SEQ ID NO: 304769 - DNA, 15 bp, Homo sapiens
cataacagggagatc

SEQ ID NO: 304770 - DNA, 15 bp, Homo sapiens
ccataacagggagat

SEQ ID NO: 304771 - DNA, 15 bp, Homo sapiens
tccataacagggaga

SEQ ID NO: 304772 - DNA, 15 bp, Homo sapiens
ttccataacagggag

SEQ ID NO: 304773 - DNA, 15 bp, Homo sapiens
cttccataacaggga

SEQ ID NO: 304774 - DNA, 15 bp, Homo sapiens
tcttccataacaggg

SEQ ID NO: 304775 - DNA, 15 bp, Homo sapiens
ctcttccataacagg

SEQ ID NO: 304776 - DNA, 15 bp, Homo sapiens
tctcttccataacag

SEQ ID NO: 304777 - DNA, 15 bp, Homo sapiens
ttctcttccataaca

SEQ ID NO: 304778 - DNA, 15 bp, Homo sapiens
attctcttccataac

SEQ ID NO: 304779 - DNA, 15 bp, Homo sapiens
aattctcttccataa

SEQ ID NO: 304780 - DNA, 15 bp, Homo sapiens
gaattctcttccata

SEQ ID NO: 304781 - DNA, 15 bp, Homo sapiens
tgaattctcttccat

SEQ ID NO: 304782 - DNA, 15 bp, Homo sapiens
ctgaattctcttcca

SEQ ID NO: 304783 - DNA, 15 bp, Homo sapiens
actgaattctcttcc

SEQ ID NO: 304784 - DNA, 15 bp, Homo sapiens
tactgaattctcttc

SEQ ID NO: 304785 - DNA, 15 bp, Homo sapiens
gtactgaattctctt

SEQ ID NO: 304786 - DNA, 15 bp, Homo sapiens
tgtactgaattctct

SEQ ID NO: 304787 - DNA, 15 bp, Homo sapiens
ttgtactgaattctc

SEQ ID NO: 304788 - DNA, 15 bp, Homo sapiens
attgtactgaattct

SEQ ID NO: 304789 - DNA, 15 bp, Homo sapiens
tattgtactgaattc

SEQ ID NO: 304790 - DNA, 15 bp, Homo sapiens
ttattgtactgaatt

SEQ ID NO: 304791 - DNA, 15 bp, Homo sapiens
attattgtactgaat

SEQ ID NO: 304792 - DNA, 15 bp, Homo sapiens
tattattgtactgaa

SEQ ID NO: 304793 - DNA, 15 bp, Homo sapiens
atattattgtactga

SEQ ID NO: 304794 - DNA, 15 bp, Homo sapiens
aatattattgtactg

SEQ ID NO: 304795 - DNA, 15 bp, Homo sapiens
aaatattattgtact

SEQ ID NO: 304796 - DNA, 15 bp, Homo sapiens
gaaatattattgtac

SEQ ID NO: 304797 - DNA, 15 bp, Homo sapiens
tgaaatattattgta

SEQ ID NO: 304798 - DNA, 15 bp, Homo sapiens
ttgaaatattattgt

SEQ ID NO: 304799 - DNA, 15 bp, Homo sapiens
cttgaaatattattg

SEQ ID NO: 304800 - DNA, 15 bp, Homo sapiens
ccttgaaatattatt

SEQ ID NO: 304801 - DNA, 15 bp, Homo sapiens
tccttgaaatattat

SEQ ID NO: 304802 - DNA, 15 bp, Homo sapiens
ctccttgaaatatta

SEQ ID NO: 304803 - DNA, 15 bp, Homo sapiens
cctccttgaaatatt

SEQ ID NO: 304804 - DNA, 15 bp, Homo sapiens
acctccttgaaatat

SEQ ID NO: 304805 - DNA, 15 bp, Homo sapiens
aacctccttgaaata

SEQ ID NO: 304806 - DNA, 15 bp, Homo sapiens
gaacctccttgaaat

SEQ ID NO: 304807 - DNA, 15 bp, Homo sapiens
agaacctccttgaaa

SEQ ID NO: 304808 - DNA, 15 bp, Homo sapiens
gagaacctccttgaa

SEQ ID NO: 304809 - DNA, 15 bp, Homo sapiens
tgagaacctccttga

SEQ ID NO: 304810 - DNA, 15 bp, Homo sapiens
atgagaacctccttg

SEQ ID NO: 304811 - DNA, 15 bp, Homo sapiens
gatgagaacctcctt

SEQ ID NO: 304812 - DNA, 15 bp, Homo sapiens
agatgagaacctcct

SEQ ID NO: 304813 - DNA, 15 bp, Homo sapiens
cagatgagaacctcc

SEQ ID NO: 304814 - DNA, 15 bp, Homo sapiens
tcagatgagaacctc

SEQ ID NO: 304815 - DNA, 15 bp, Homo sapiens
gtcagatgagaacct

SEQ ID NO: 304816 - DNA, 15 bp, Homo sapiens
agtcagatgagaacc

SEQ ID NO: 304817 - DNA, 15 bp, Homo sapiens
aagtcagatgagaac

SEQ ID NO: 304818 - DNA, 15 bp, Homo sapiens
taagtcagatgagaa

SEQ ID NO: 304819 - DNA, 15 bp, Homo sapiens
ttaagtcagatgaga

SEQ ID NO: 304820 - DNA, 15 bp, Homo sapiens
attaagtcagatgag

SEQ ID NO: 304821 - DNA, 15 bp, Homo sapiens
tattaagtcagatga

SEQ ID NO: 304822 - DNA, 15 bp, Homo sapiens
gtattaagtcagatg

SEQ ID NO: 304823 - DNA, 15 bp, Homo sapiens
tgtattaagtcagat

SEQ ID NO: 304824 - DNA, 15 bp, Homo sapiens
atgtattaagtcaga

SEQ ID NO: 304825 - DNA, 15 bp, Homo sapiens
catgtattaagtcag

SEQ ID NO: 304826 - DNA, 15 bp, Homo sapiens
ccatgtattaagtca

SEQ ID NO: 304827 - DNA, 15 bp, Homo sapiens
cccatgtattaagtc

SEQ ID NO: 304828 - DNA, 15 bp, Homo sapiens
acccatgtattaagt

SEQ ID NO: 304829 - DNA, 15 bp, Homo sapiens
aacccatgtattaag

SEQ ID NO: 304830 - DNA, 15 bp, Homo sapiens
taacccatgtattaa

SEQ ID NO: 304831 - DNA, 15 bp, Homo sapiens
ataacccatgtatta

SEQ ID NO: 304832 - DNA, 15 bp, Homo sapiens
aataacccatgtatt

SEQ ID NO: 304833 - DNA, 15 bp, Homo sapiens
taataacccatgtat

SEQ ID NO: 304834 - DNA, 15 bp, Homo sapiens
gtaataacccatgta

SEQ ID NO: 304835 - DNA, 15 bp, Homo sapiens
tgtaataacccatgt

SEQ ID NO: 304836 - DNA, 15 bp, Homo sapiens
atgtaataacccatg

SEQ ID NO: 304837 - DNA, 15 bp, Homo sapiens
aatgtaataacccat

SEQ ID NO: 304838 - DNA, 15 bp, Homo sapiens
caatgtaataaccca

SEQ ID NO: 304839 - DNA, 15 bp, Homo sapiens
acaatgtaataaccc

SEQ ID NO: 304840 - DNA, 15 bp, Homo sapiens
cacaatgtaataacc

SEQ ID NO: 304841 - DNA, 15 bp, Homo sapiens
tcacaatgtaataac

SEQ ID NO: 304842 - DNA, 15 bp, Homo sapiens
ttcacaatgtaataa

SEQ ID NO: 304843 - DNA, 15 bp, Homo sapiens
tttcacaatgtaata

SEQ ID NO: 304844 - DNA, 15 bp, Homo sapiens
gtttcacaatgtaat

SEQ ID NO: 304845 - DNA, 15 bp, Homo sapiens
tgtttcacaatgtaa

SEQ ID NO: 304846 - DNA, 15 bp, Homo sapiens
ttgtttcacaatgta

SEQ ID NO: 304847 - DNA, 15 bp, Homo sapiens
gttgtttcacaatgt

SEQ ID NO: 304848 - DNA, 15 bp, Homo sapiens
ggttgtttcacaatg

SEQ ID NO: 304849 - DNA, 15 bp, Homo sapiens
tggttgtttcacaat

SEQ ID NO: 304850 - DNA, 15 bp, Homo sapiens
atggttgtttcacaa

SEQ ID NO: 304851 - DNA, 15 bp, Homo sapiens
aatggttgtttcaca

SEQ ID NO: 304852 - DNA, 15 bp, Homo sapiens
caatggttgtttcac

SEQ ID NO: 304853 - DNA, 15 bp, Homo sapiens
acaatggttgtttca

SEQ ID NO: 304854 - DNA, 15 bp, Homo sapiens
tacaatggttgtttc

SEQ ID NO: 304855 - DNA, 15 bp, Homo sapiens
gtacaatggttgttt

SEQ ID NO: 304856 - DNA, 15 bp, Homo sapiens
ggtacaatggttgtt

SEQ ID NO: 304857 - DNA, 15 bp, Homo sapiens
tggtacaatggttgt

SEQ ID NO: 304858 - DNA, 15 bp, Homo sapiens
ttggtacaatggttg

SEQ ID NO: 304859 - DNA, 15 bp, Homo sapiens
attggtacaatggtt

SEQ ID NO: 304860 - DNA, 15 bp, Homo sapiens
cattggtacaatggt

SEQ ID NO: 304861 - DNA, 15 bp, Homo sapiens
tcattggtacaatgg

SEQ ID NO: 304862 - DNA, 15 bp, Homo sapiens
ctcattggtacaatg

SEQ ID NO: 304863 - DNA, 15 bp, Homo sapiens
gctcattggtacaat

SEQ ID NO: 304864 - DNA, 15 bp, Homo sapiens
agctcattggtacaa

SEQ ID NO: 304865 - DNA, 15 bp, Homo sapiens
aagctcattggtaca

SEQ ID NO: 304866 - DNA, 15 bp, Homo sapiens
gaagctcattggtac

SEQ ID NO: 304867 - DNA, 15 bp, Homo sapiens
ggaagctcattggta

SEQ ID NO: 304868 - DNA, 15 bp, Homo sapiens
tggaagctcattggt

SEQ ID NO: 304869 - DNA, 15 bp, Homo sapiens
ctggaagctcattgg

SEQ ID NO: 304870 - DNA, 15 bp, Homo sapiens
tctggaagctcattg

SEQ ID NO: 304871 - DNA, 15 bp, Homo sapiens
ctctggaagctcatt

SEQ ID NO: 304872 - DNA, 15 bp, Homo sapiens
tctctggaagctcat

SEQ ID NO: 304873 - DNA, 15 bp, Homo sapiens
ctctctggaagctca

SEQ ID NO: 304874 - DNA, 15 bp, Homo sapiens
tctctctggaagctc

SEQ ID NO: 304875 - DNA, 15 bp, Homo sapiens
ttctctctggaagct

SEQ ID NO: 304876 - DNA, 15 bp, Homo sapiens
tttctctctggaagc

SEQ ID NO: 304877 - DNA, 15 bp, Homo sapiens
ttttctctctggaag

SEQ ID NO: 304878 - DNA, 15 bp, Homo sapiens
attttctctctggaa

SEQ ID NO: 304879 - DNA, 15 bp, Homo sapiens
cattttctctctgga

SEQ ID NO: 304880 - DNA, 15 bp, Homo sapiens
tcattttctctctgg

SEQ ID NO: 304881 - DNA, 15 bp, Homo sapiens
ttcattttctctctg

SEQ ID NO: 304882 - DNA, 15 bp, Homo sapiens
gttcattttctctct

SEQ ID NO: 304883 - DNA, 15 bp, Homo sapiens
tgttcattttctctc

SEQ ID NO: 304884 - DNA, 15 bp, Homo sapiens
atgttcattttctct

SEQ ID NO: 304885 - DNA, 15 bp, Homo sapiens
aatgttcattttctc

SEQ ID NO: 304886 - DNA, 15 bp, Homo sapiens
gaatgttcattttct

SEQ ID NO: 304887 - DNA, 15 bp, Homo sapiens
ggaatgttcattttc

SEQ ID NO: 304888 - DNA, 15 bp, Homo sapiens
gggaatgttcatttt

SEQ ID NO: 304889 - DNA, 15 bp, Homo sapiens
tgggaatgttcattt

SEQ ID NO: 304890 - DNA, 15 bp, Homo sapiens
atgggaatgttcatt

SEQ ID NO: 304891 - DNA, 15 bp, Homo sapiens
catgggaatgttcat

SEQ ID NO: 304892 - DNA, 15 bp, Homo sapiens
tcatgggaatgttca

SEQ ID NO: 304893 - DNA, 15 bp, Homo sapiens
ctcatgggaatgttc

SEQ ID NO: 304894 - DNA, 15 bp, Homo sapiens
tctcatgggaatgtt

SEQ ID NO: 304895 - DNA, 15 bp, Homo sapiens
atctcatgggaatgt

SEQ ID NO: 304896 - DNA, 15 bp, Homo sapiens
tatctcatgggaatg

SEQ ID NO: 304897 - DNA, 15 bp, Homo sapiens
atatctcatgggaat

SEQ ID NO: 304898 - DNA, 15 bp, Homo sapiens
catatctcatgggaa

SEQ ID NO: 304899 - DNA, 15 bp, Homo sapiens
tcatatctcatggga

SEQ ID NO: 304900 - DNA, 15 bp, Homo sapiens
gtcatatctcatggg

SEQ ID NO: 304901 - DNA, 15 bp, Homo sapiens
agtcatatctcatgg

SEQ ID NO: 304902 - DNA, 15 bp, Homo sapiens
aagtcatatctcatg

SEQ ID NO: 304903 - DNA, 15 bp, Homo sapiens
taagtcatatctcat

SEQ ID NO: 304904 - DNA, 15 bp, Homo sapiens
ataagtcatatctca

SEQ ID NO: 304905 - DNA, 15 bp, Homo sapiens
tataagtcatatctc

SEQ ID NO: 304906 - DNA, 15 bp, Homo sapiens
ttataagtcatatct

SEQ ID NO: 304907 - DNA, 15 bp, Homo sapiens
tttataagtcatatc

SEQ ID NO: 304908 - DNA, 15 bp, Homo sapiens
ctttataagtcatat

SEQ ID NO: 304909 - DNA, 15 bp, Homo sapiens
cctttataagtcata

SEQ ID NO: 304910 - DNA, 15 bp, Homo sapiens
tcctttataagtcat

SEQ ID NO: 304911 - DNA, 15 bp, Homo sapiens
ctcctttataagtca

SEQ ID NO: 304912 - DNA, 15 bp, Homo sapiens
tctcctttataagtc

SEQ ID NO: 304913 - DNA, 15 bp, Homo sapiens
ttctcctttataagt

SEQ ID NO: 304914 - DNA, 15 bp, Homo sapiens
cttctcctttataag

SEQ ID NO: 304915 - DNA, 15 bp, Homo sapiens
tcttctcctttataa

SEQ ID NO: 304916 - DNA, 15 bp, Homo sapiens
ttcttctcctttata

SEQ ID NO: 304917 - DNA, 15 bp, Homo sapiens
tttcttctcctttat

SEQ ID NO: 304918 - DNA, 15 bp, Homo sapiens
atttcttctccttta

SEQ ID NO: 304919 - DNA, 15 bp, Homo sapiens
tatttcttctccttt

SEQ ID NO: 304920 - DNA, 15 bp, Homo sapiens
ttatttcttctcctt

SEQ ID NO: 304921 - DNA, 15 bp, Homo sapiens
attatttcttctcct

SEQ ID NO: 304922 - DNA, 15 bp, Homo sapiens
gattatttcttctcc

SEQ ID NO: 304923 - DNA, 15 bp, Homo sapiens
ggattatttcttctc

SEQ ID NO: 304924 - DNA, 15 bp, Homo sapiens
gggattatttcttct

SEQ ID NO: 304925 - DNA, 15 bp, Homo sapiens
tgggattatttcttc

SEQ ID NO: 304926 - DNA, 15 bp, Homo sapiens
atgggattatttctt

SEQ ID NO: 304927 - DNA, 15 bp, Homo sapiens
aatgggattatttct

SEQ ID NO: 304928 - DNA, 15 bp, Homo sapiens
taatgggattatttc

SEQ ID NO: 304929 - DNA, 15 bp, Homo sapiens
ttaatgggattattt

SEQ ID NO: 304930 - DNA, 15 bp, Homo sapiens
tttaatgggattatt

SEQ ID NO: 304931 - DNA, 15 bp, Homo sapiens
atttaatgggattat

SEQ ID NO: 304932 - DNA, 15 bp, Homo sapiens
tatttaatgggatta

SEQ ID NO: 304933 - DNA, 15 bp, Homo sapiens
ctatttaatgggatt

SEQ ID NO: 304934 - DNA, 15 bp, Homo sapiens
cctatttaatgggat

SEQ ID NO: 304935 - DNA, 15 bp, Homo sapiens
ccctatttaatggga

SEQ ID NO: 304936 - DNA, 15 bp, Homo sapiens
cccctatttaatggg

SEQ ID NO: 304937 - DNA, 15 bp, Homo sapiens
gcccctatttaatgg

SEQ ID NO: 304938 - DNA, 15 bp, Homo sapiens
tgcccctatttaatg

SEQ ID NO: 304939 - DNA, 15 bp, Homo sapiens
atgcccctatttaat

SEQ ID NO: 304940 - DNA, 15 bp, Homo sapiens
aatgcccctatttaa

SEQ ID NO: 304941 - DNA, 15 bp, Homo sapiens
aaatgcccctattta

SEQ ID NO: 304942 - DNA, 15 bp, Homo sapiens
gaaatgcccctattt

SEQ ID NO: 304943 - DNA, 15 bp, Homo sapiens
tgaaatgcccctatt

SEQ ID NO: 304944 - DNA, 15 bp, Homo sapiens
ctgaaatgcccctat

SEQ ID NO: 304945 - DNA, 15 bp, Homo sapiens
cctgaaatgccccta

SEQ ID NO: 304946 - DNA, 15 bp, Homo sapiens
gcctgaaatgcccct

SEQ ID NO: 304947 - DNA, 15 bp, Homo sapiens
tgcctgaaatgcccc

SEQ ID NO: 304948 - DNA, 15 bp, Homo sapiens
atgcctgaaatgccc

SEQ ID NO: 304949 - DNA, 15 bp, Homo sapiens
catgcctgaaatgcc

SEQ ID NO: 304950 - DNA, 15 bp, Homo sapiens
ccatgcctgaaatgc

SEQ ID NO: 304951 - DNA, 15 bp, Homo sapiens
gccatgcctgaaatg

SEQ ID NO: 304952 - DNA, 15 bp, Homo sapiens
agccatgcctgaaat

SEQ ID NO: 304953 - DNA, 15 bp, Homo sapiens
cagccatgcctgaaa

SEQ ID NO: 304954 - DNA, 15 bp, Homo sapiens
gcagccatgcctgaa

SEQ ID NO: 304955 - DNA, 15 bp, Homo sapiens
ggcagccatgcctga

SEQ ID NO: 304956 - DNA, 15 bp, Homo sapiens
gggcagccatgcctg

SEQ ID NO: 304957 - DNA, 15 bp, Homo sapiens
agggcagccatgcct

SEQ ID NO: 304958 - DNA, 15 bp, Homo sapiens
aagggcagccatgcc

SEQ ID NO: 304959 - DNA, 15 bp, Homo sapiens
gaagggcagccatgc

SEQ ID NO: 304960 - DNA, 15 bp, Homo sapiens
agaagggcagccatg

SEQ ID NO: 304961 - DNA, 15 bp, Homo sapiens
gagaagggcagccat

SEQ ID NO: 304962 - DNA, 15 bp, Homo sapiens
ggagaagggcagcca

SEQ ID NO: 304963 - DNA, 15 bp, Homo sapiens
aggagaagggcagcc

SEQ ID NO: 304964 - DNA, 15 bp, Homo sapiens
caggagaagggcagc

SEQ ID NO: 304965 - DNA, 15 bp, Homo sapiens
ccaggagaagggcag

SEQ ID NO: 304966 - DNA, 15 bp, Homo sapiens
tccaggagaagggca

SEQ ID NO: 304967 - DNA, 15 bp, Homo sapiens
ttccaggagaagggc

SEQ ID NO: 304968 - DNA, 15 bp, Homo sapiens
tttccaggagaaggg

SEQ ID NO: 304969 - DNA, 15 bp, Homo sapiens
ctttccaggagaagg

SEQ ID NO: 304970 - DNA, 15 bp, Homo sapiens
actttccaggagaag

SEQ ID NO: 304971 - DNA, 15 bp, Homo sapiens
cactttccaggagaa

SEQ ID NO: 304972 - DNA, 15 bp, Homo sapiens
ccactttccaggaga

SEQ ID NO: 304973 - DNA, 15 bp, Homo sapiens
tccactttccaggag

SEQ ID NO: 304974 - DNA, 15 bp, Homo sapiens
ttccactttccagga

SEQ ID NO: 304975 - DNA, 15 bp, Homo sapiens
cttccactttccagg

SEQ ID NO: 304976 - DNA, 15 bp, Homo sapiens
ccttccactttccag

SEQ ID NO: 304977 - DNA, 15 bp, Homo sapiens
cccttccactttcca

SEQ ID NO: 304978 - DNA, 15 bp, Homo sapiens
acccttccactttcc

SEQ ID NO: 304979 - DNA, 15 bp, Homo sapiens
cacccttccactttc

SEQ ID NO: 304980 - DNA, 15 bp, Homo sapiens
gcacccttccacttt

SEQ ID NO: 304981 - DNA, 15 bp, Homo sapiens
agcacccttccactt

SEQ ID NO: 304982 - DNA, 15 bp, Homo sapiens
cagcacccttccact

SEQ ID NO: 304983 - DNA, 15 bp, Homo sapiens
gcagcacccttccac

SEQ ID NO: 304984 - DNA, 15 bp, Homo sapiens
ggcagcacccttcca

SEQ ID NO: 304985 - DNA, 15 bp, Homo sapiens
aggcagcacccttcc

SEQ ID NO: 304986 - DNA, 15 bp, Homo sapiens
aaggcagcacccttc

SEQ ID NO: 304987 - DNA, 15 bp, Homo sapiens
aaaggcagcaccctt

SEQ ID NO: 304988 - DNA, 15 bp, Homo sapiens
aaaaggcagcaccct

SEQ ID NO: 304989 - DNA, 15 bp, Homo sapiens
gaaaaggcagcaccc

SEQ ID NO: 304990 - DNA, 15 bp, Homo sapiens
agaaaaggcagcacc

SEQ ID NO: 304991 - DNA, 15 bp, Homo sapiens
cagaaaaggcagcac

SEQ ID NO: 304992 - DNA, 15 bp, Homo sapiens
ccagaaaaggcagca

SEQ ID NO: 304993 - DNA, 15 bp, Homo sapiens
gccagaaaaggcagc

SEQ ID NO: 304994 - DNA, 15 bp, Homo sapiens
agccagaaaaggcag

SEQ ID NO: 304995 - DNA, 15 bp, Homo sapiens
cagccagaaaaggca

SEQ ID NO: 304996 - DNA, 15 bp, Homo sapiens
tcagccagaaaaggc

SEQ ID NO: 304997 - DNA, 15 bp, Homo sapiens
ctcagccagaaaagg

SEQ ID NO: 304998 - DNA, 15 bp, Homo sapiens
cctcagccagaaaag

SEQ ID NO: 304999 - DNA, 15 bp, Homo sapiens
acctcagccagaaaa

SEQ ID NO: 305000 - DNA, 15 bp, Homo sapiens
aacctcagccagaaa

SEQ ID NO: 305001 - DNA, 15 bp, Homo sapiens
aaacctcagccagaa

SEQ ID NO: 305002 - DNA, 15 bp, Homo sapiens
caaacctcagccaga

SEQ ID NO: 305003 - DNA, 15 bp, Homo sapiens
ccaaacctcagccag

SEQ ID NO: 305004 - DNA, 15 bp, Homo sapiens
cccaaacctcagcca

SEQ ID NO: 305005 - DNA, 15 bp, Homo sapiens
tcccaaacctcagcc

SEQ ID NO: 305006 - DNA, 15 bp, Homo sapiens
atcccaaacctcagc

SEQ ID NO: 305007 - DNA, 15 bp, Homo sapiens
tatcccaaacctcag

SEQ ID NO: 305008 - DNA, 15 bp, Homo sapiens
ttatcccaaacctca

SEQ ID NO: 305009 - DNA, 15 bp, Homo sapiens
cttatcccaaacctc

SEQ ID NO: 305010 - DNA, 15 bp, Homo sapiens
tcttatcccaaacct

SEQ ID NO: 305011 - DNA, 15 bp, Homo sapiens
atcttatcccaaacc

SEQ ID NO: 305012 - DNA, 15 bp, Homo sapiens
catcttatcccaaac

SEQ ID NO: 305013 - DNA, 15 bp, Homo sapiens
gcatcttatcccaaa

SEQ ID NO: 305014 - DNA, 15 bp, Homo sapiens
tgcatcttatcccaa

SEQ ID NO: 305015 - DNA, 15 bp, Homo sapiens
ctgcatcttatccca

SEQ ID NO: 305016 - DNA, 15 bp, Homo sapiens
cctgcatcttatccc

SEQ ID NO: 305017 - DNA, 15 bp, Homo sapiens
tcctgcatcttatcc

SEQ ID NO: 305018 - DNA, 15 bp, Homo sapiens
ttcctgcatcttatc

SEQ ID NO: 305019 - DNA, 15 bp, Homo sapiens
tttcctgcatcttat

SEQ ID NO: 305020 - DNA, 15 bp, Homo sapiens
gtttcctgcatctta

SEQ ID NO: 305021 - DNA, 15 bp, Homo sapiens
ggtttcctgcatctt

SEQ ID NO: 305022 - DNA, 15 bp, Homo sapiens
cggtttcctgcatct

SEQ ID NO: 305023 - DNA, 15 bp, Homo sapiens
tcggtttcctgcatc

SEQ ID NO: 305024 - DNA, 15 bp, Homo sapiens
ttcggtttcctgcat

SEQ ID NO: 305025 - DNA, 15 bp, Homo sapiens
cttcggtttcctgca

SEQ ID NO: 305026 - DNA, 15 bp, Homo sapiens
acttcggtttcctgc

SEQ ID NO: 305027 - DNA, 15 bp, Homo sapiens
gacttcggtttcctg

SEQ ID NO: 305028 - DNA, 15 bp, Homo sapiens
agacttcggtttcct

SEQ ID NO: 305029 - DNA, 15 bp, Homo sapiens
tagacttcggtttcc

SEQ ID NO: 305030 - DNA, 15 bp, Homo sapiens
atagacttcggtttc

SEQ ID NO: 305031 - DNA, 15 bp, Homo sapiens
gatagacttcggttt

SEQ ID NO: 305032 - DNA, 15 bp, Homo sapiens
ggatagacttcggtt

SEQ ID NO: 305033 - DNA, 15 bp, Homo sapiens
gggatagacttcggt

SEQ ID NO: 305034 - DNA, 15 bp, Homo sapiens
ggggatagacttcgg

SEQ ID NO: 305035 - DNA, 15 bp, Homo sapiens
tggggatagacttcg

SEQ ID NO: 305036 - DNA, 15 bp, Homo sapiens
atggggatagacttc

SEQ ID NO: 305037 - DNA, 15 bp, Homo sapiens
aatggggatagactt

SEQ ID NO: 305038 - DNA, 15 bp, Homo sapiens
gaatggggatagact

SEQ ID NO: 305039 - DNA, 15 bp, Homo sapiens
agaatggggatagac

SEQ ID NO: 305040 - DNA, 15 bp, Homo sapiens
gagaatggggataga

SEQ ID NO: 305041 - DNA, 15 bp, Homo sapiens
ggagaatggggatag

SEQ ID NO: 305042 - DNA, 15 bp, Homo sapiens
aggagaatggggata

SEQ ID NO: 305043 - DNA, 15 bp, Homo sapiens
caggagaatggggat

SEQ ID NO: 305044 - DNA, 15 bp, Homo sapiens
gcaggagaatgggga

SEQ ID NO: 305045 - DNA, 15 bp, Homo sapiens
tgcaggagaatgggg

SEQ ID NO: 305046 - DNA, 15 bp, Homo sapiens
gtgcaggagaatggg

SEQ ID NO: 305047 - DNA, 15 bp, Homo sapiens
tgtgcaggagaatgg

SEQ ID NO: 305048 - DNA, 15 bp, Homo sapiens
ttgtgcaggagaatg

SEQ ID NO: 305049 - DNA, 15 bp, Homo sapiens
tttgtgcaggagaat

SEQ ID NO: 305050 - DNA, 15 bp, Homo sapiens
gtttgtgcaggagaa

SEQ ID NO: 305051 - DNA, 15 bp, Homo sapiens
agtttgtgcaggaga

SEQ ID NO: 305052 - DNA, 15 bp, Homo sapiens
aagtttgtgcaggag

SEQ ID NO: 305053 - DNA, 15 bp, Homo sapiens
aaagtttgtgcagga

SEQ ID NO: 305054 - DNA, 15 bp, Homo sapiens
gaaagtttgtgcagg

SEQ ID NO: 305055 - DNA, 15 bp, Homo sapiens
ggaaagtttgtgcag

SEQ ID NO: 305056 - DNA, 15 bp, Homo sapiens
aggaaagtttgtgca

SEQ ID NO: 305057 - DNA, 15 bp, Homo sapiens
caggaaagtttgtgc

SEQ ID NO: 305058 - DNA, 15 bp, Homo sapiens
ccaggaaagtttgtg

SEQ ID NO: 305059 - DNA, 15 bp, Homo sapiens
gccaggaaagtttgt

SEQ ID NO: 305060 - DNA, 15 bp, Homo sapiens
ggccaggaaagtttg

SEQ ID NO: 305061 - DNA, 15 bp, Homo sapiens
gggccaggaaagttt

SEQ ID NO: 305062 - DNA, 15 bp, Homo sapiens
agggccaggaaagtt

SEQ ID NO: 305063 - DNA, 15 bp, Homo sapiens
cagggccaggaaagt

SEQ ID NO: 305064 - DNA, 15 bp, Homo sapiens
gcagggccaggaaag

SEQ ID NO: 305065 - DNA, 15 bp, Homo sapiens
agcagggccaggaaa

SEQ ID NO: 305066 - DNA, 15 bp, Homo sapiens
cagcagggccaggaa

SEQ ID NO: 305067 - DNA, 15 bp, Homo sapiens
tcagcagggccagga

SEQ ID NO: 305068 - DNA, 15 bp, Homo sapiens
ctcagcagggccagg

SEQ ID NO: 305069 - DNA, 15 bp, Homo sapiens
cctcagcagggccag

SEQ ID NO: 305070 - DNA, 15 bp, Homo sapiens
ccctcagcagggcca

SEQ ID NO: 305071 - DNA, 15 bp, Homo sapiens
accctcagcagggcc

SEQ ID NO: 305072 - DNA, 15 bp, Homo sapiens
taccctcagcagggc

SEQ ID NO: 305073 - DNA, 15 bp, Homo sapiens
gtaccctcagcaggg

SEQ ID NO: 305074 - DNA, 15 bp, Homo sapiens
tgtaccctcagcagg

SEQ ID NO: 305075 - DNA, 15 bp, Homo sapiens
ctgtaccctcagcag

SEQ ID NO: 305076 - DNA, 15 bp, Homo sapiens
cctgtaccctcagca

SEQ ID NO: 305077 - DNA, 15 bp, Homo sapiens
tcctgtaccctcagc

SEQ ID NO: 305078 - DNA, 15 bp, Homo sapiens
gtcctgtaccctcag

SEQ ID NO: 305079 - DNA, 15 bp, Homo sapiens
agtcctgtaccctca

SEQ ID NO: 305080 - DNA, 15 bp, Homo sapiens
cagtcctgtaccctc

SEQ ID NO: 305081 - DNA, 15 bp, Homo sapiens
acagtcctgtaccct

SEQ ID NO: 305082 - DNA, 15 bp, Homo sapiens
cacagtcctgtaccc

SEQ ID NO: 305083 - DNA, 15 bp, Homo sapiens
gcacagtcctgtacc

SEQ ID NO: 305084 - DNA, 15 bp, Homo sapiens
cgcacagtcctgtac

SEQ ID NO: 305085 - DNA, 15 bp, Homo sapiens
ccgcacagtcctgta

SEQ ID NO: 305086 - DNA, 15 bp, Homo sapiens
accgcacagtcctgt

SEQ ID NO: 305087 - DNA, 15 bp, Homo sapiens
taccgcacagtcctg

SEQ ID NO: 305088 - DNA, 15 bp, Homo sapiens
ctaccgcacagtcct

SEQ ID NO: 305089 - DNA, 15 bp, Homo sapiens
gctaccgcacagtcc

SEQ ID NO: 305090 - DNA, 15 bp, Homo sapiens
agctaccgcacagtc

SEQ ID NO: 305091 - DNA, 15 bp, Homo sapiens
cagctaccgcacagt

SEQ ID NO: 305092 - DNA, 15 bp, Homo sapiens
ccagctaccgcacag

SEQ ID NO: 305093 - DNA, 15 bp, Homo sapiens
gccagctaccgcaca

SEQ ID NO: 305094 - DNA, 15 bp, Homo sapiens
agccagctaccgcac

SEQ ID NO: 305095 - DNA, 15 bp, Homo sapiens
gagccagctaccgca

SEQ ID NO: 305096 - DNA, 15 bp, Homo sapiens
agagccagctaccgc

SEQ ID NO: 305097 - DNA, 15 bp, Homo sapiens
cagagccagctaccg

SEQ ID NO: 305098 - DNA, 15 bp, Homo sapiens
acagagccagctacc

SEQ ID NO: 305099 - DNA, 15 bp, Homo sapiens
cacagagccagctac

SEQ ID NO: 305100 - DNA, 15 bp, Homo sapiens
ccacagagccagcta

SEQ ID NO: 305101 - DNA, 15 bp, Homo sapiens
cccacagagccagct

SEQ ID NO: 305102 - DNA, 15 bp, Homo sapiens
tcccacagagccagc

SEQ ID NO: 305103 - DNA, 15 bp, Homo sapiens
ctcccacagagccag

SEQ ID NO: 305104 - DNA, 15 bp, Homo sapiens
tctcccacagagcca

SEQ ID NO: 305105 - DNA, 15 bp, Homo sapiens
atctcccacagagcc

SEQ ID NO: 305106 - DNA, 15 bp, Homo sapiens
tatctcccacagagc

SEQ ID NO: 305107 - DNA, 15 bp, Homo sapiens
ttatctcccacagag

SEQ ID NO: 305108 - DNA, 15 bp, Homo sapiens
tttttatctcccaca

SEQ ID NO: 305109 - DNA, 15 bp, Homo sapiens
gtttttatctcccac

SEQ ID NO: 305110 - DNA, 15 bp, Homo sapiens
ggtttttatctccca

SEQ ID NO: 305111 - DNA, 15 bp, Homo sapiens
tggtttttatctccc

SEQ ID NO: 305112 - DNA, 15 bp, Homo sapiens
ctggtttttatctcc

SEQ ID NO: 305113 - DNA, 15 bp, Homo sapiens
tctggtttttatctc

SEQ ID NO: 305114 - DNA, 15 bp, Homo sapiens
ctctggtttttatct

SEQ ID NO: 305115 - DNA, 15 bp, Homo sapiens
actctggtttttatc

SEQ ID NO: 305116 - DNA, 15 bp, Homo sapiens
cactctggtttttat

SEQ ID NO: 305117 - DNA, 15 bp, Homo sapiens
tcactctggttttta

SEQ ID NO: 305118 - DNA, 15 bp, Homo sapiens
ttcactctggttttt

SEQ ID NO: 305119 - DNA, 15 bp, Homo sapiens
attcactctggtttt

SEQ ID NO: 305120 - DNA, 15 bp, Homo sapiens
cattcactctggttt

SEQ ID NO: 305121 - DNA, 15 bp, Homo sapiens
gcattcactctggtt

SEQ ID NO: 305122 - DNA, 15 bp, Homo sapiens
tgcattcactctggt

SEQ ID NO: 305123 - DNA, 15 bp, Homo sapiens
ctgcattcactctgg

SEQ ID NO: 305124 - DNA, 15 bp, Homo sapiens
cctgcattcactctg

SEQ ID NO: 305125 - DNA, 15 bp, Homo sapiens
ccctgcattcactct

SEQ ID NO: 305126 - DNA, 15 bp, Homo sapiens
accctgcattcactc

SEQ ID NO: 305127 - DNA, 15 bp, Homo sapiens
gaccctgcattcact

SEQ ID NO: 305128 - DNA, 15 bp, Homo sapiens
ggaccctgcattcac

SEQ ID NO: 305129 - DNA, 15 bp, Homo sapiens
gggaccctgcattca

SEQ ID NO: 305130 - DNA, 15 bp, Homo sapiens
agggaccctgcattc

SEQ ID NO: 305131 - DNA, 15 bp, Homo sapiens
cagggaccctgcatt

SEQ ID NO: 305132 - DNA, 15 bp, Homo sapiens
gcagggaccctgcat

SEQ ID NO: 305133 - DNA, 15 bp, Homo sapiens
ggcagggaccctgca

SEQ ID NO: 305134 - DNA, 15 bp, Homo sapiens
gggcagggaccctgc

SEQ ID NO: 305135 - DNA, 15 bp, Homo sapiens
agggcagggaccctg

SEQ ID NO: 305136 - DNA, 15 bp, Homo sapiens
aagggcagggaccct

SEQ ID NO: 305137 - DNA, 15 bp, Homo sapiens
taagggcagggaccc

SEQ ID NO: 305138 - DNA, 15 bp, Homo sapiens
gtaagggcagggacc

SEQ ID NO: 305139 - DNA, 15 bp, Homo sapiens
ggtaagggcagggac

SEQ ID NO: 305140 - DNA, 15 bp, Homo sapiens
aggtaagggcaggga

SEQ ID NO: 305141 - DNA, 15 bp, Homo sapiens
caggtaagggcaggg

SEQ ID NO: 305142 - DNA, 15 bp, Homo sapiens
acaggtaagggcagg

SEQ ID NO: 305143 - DNA, 15 bp, Homo sapiens
gacaggtaagggcag

SEQ ID NO: 305144 - DNA, 15 bp, Homo sapiens
ggacaggtaagggca

SEQ ID NO: 305145 - DNA, 15 bp, Homo sapiens
gggacaggtaagggc

SEQ ID NO: 305146 - DNA, 15 bp, Homo sapiens
tgggacaggtaaggg

SEQ ID NO: 305147 - DNA, 15 bp, Homo sapiens
ctgggacaggtaagg

SEQ ID NO: 305148 - DNA, 15 bp, Homo sapiens
tctgggacaggtaag

SEQ ID NO: 305149 - DNA, 15 bp, Homo sapiens
ttctgggacaggtaa

SEQ ID NO: 305150 - DNA, 15 bp, Homo sapiens
gttctgggacaggta

SEQ ID NO: 305151 - DNA, 15 bp, Homo sapiens
cgttctgggacaggt

SEQ ID NO: 305152 - DNA, 15 bp, Homo sapiens
gcgttctgggacagg

SEQ ID NO: 305153 - DNA, 15 bp, Homo sapiens
agcgttctgggacag

SEQ ID NO: 305154 - DNA, 15 bp, Homo sapiens
gagcgttctgggaca

SEQ ID NO: 305155 - DNA, 15 bp, Homo sapiens
ggagcgttctgggac

SEQ ID NO: 305156 - DNA, 15 bp, Homo sapiens
gggagcgttctggga

SEQ ID NO: 305157 - DNA, 15 bp, Homo sapiens
ggggagcgttctggg

SEQ ID NO: 305158 - DNA, 15 bp, Homo sapiens
tggggagcgttctgg

SEQ ID NO: 305159 - DNA, 15 bp, Homo sapiens
gtggggagcgttctg

SEQ ID NO: 305160 - DNA, 15 bp, Homo sapiens
tgtggggagcgttct

SEQ ID NO: 305161 - DNA, 15 bp, Homo sapiens
gtgtggggagcgttc

SEQ ID NO: 305162 - DNA, 15 bp, Homo sapiens
ggtgtggggagcgtt

SEQ ID NO: 305163 - DNA, 15 bp, Homo sapiens
cggtgtggggagcgt

SEQ ID NO: 305164 - DNA, 15 bp, Homo sapiens
acggtgtggggagcg

SEQ ID NO: 305165 - DNA, 15 bp, Homo sapiens
cacggtgtggggagc

SEQ ID NO: 305166 - DNA, 15 bp, Homo sapiens
acacggtgtggggag

SEQ ID NO: 305167 - DNA, 15 bp, Homo sapiens
aacacggtgtgggga

SEQ ID NO: 305168 - DNA, 15 bp, Homo sapiens
aaacacggtgtgggg

SEQ ID NO: 305169 - DNA, 15 bp, Homo sapiens
taaacacggtgtggg

SEQ ID NO: 305170 - DNA, 15 bp, Homo sapiens
ctaaacacggtgtgg

SEQ ID NO: 305171 - DNA, 15 bp, Homo sapiens
actaaacacggtgtg

SEQ ID NO: 305172 - DNA, 15 bp, Homo sapiens
aactaaacacggtgt

SEQ ID NO: 305173 - DNA, 15 bp, Homo sapiens
aaactaaacacggtg

SEQ ID NO: 305174 - DNA, 15 bp, Homo sapiens
aaaactaaacacggt

SEQ ID NO: 305175 - DNA, 15 bp, Homo sapiens
gaaaactaaacacgg

SEQ ID NO: 305176 - DNA, 15 bp, Homo sapiens
tgaaaactaaacacg

SEQ ID NO: 305177 - DNA, 15 bp, Homo sapiens
ttgaaaactaaacac

SEQ ID NO: 305178 - DNA, 15 bp, Homo sapiens
attgaaaactaaaca

SEQ ID NO: 305179 - DNA, 15 bp, Homo sapiens
aattgaaaactaaac

SEQ ID NO: 305180 - DNA, 15 bp, Homo sapiens
caattgaaaactaaa

SEQ ID NO: 305181 - DNA, 15 bp, Homo sapiens
acaattgaaaactaa

SEQ ID NO: 305182 - DNA, 15 bp, Homo sapiens
gacaattgaaaacta

SEQ ID NO: 305183 - DNA, 15 bp, Homo sapiens
cgacaattgaaaact

SEQ ID NO: 305184 - DNA, 15 bp, Homo sapiens
ccgacaattgaaaac

SEQ ID NO: 305185 - DNA, 15 bp, Homo sapiens
gccgacaattgaaaa

SEQ ID NO: 305186 - DNA, 15 bp, Homo sapiens
tgccgacaattgaaa

SEQ ID NO: 305187 - DNA, 15 bp, Homo sapiens
atgccgacaattgaa

SEQ ID NO: 305188 - DNA, 15 bp, Homo sapiens
tatgccgacaattga

SEQ ID NO: 305189 - DNA, 15 bp, Homo sapiens
atatgccgacaattg

SEQ ID NO: 305190 - DNA, 15 bp, Homo sapiens
catatgccgacaatt

SEQ ID NO: 305191 - DNA, 15 bp, Homo sapiens
tcatatgccgacaat

SEQ ID NO: 305192 - DNA, 15 bp, Homo sapiens
atcatatgccgacaa

SEQ ID NO: 305193 - DNA, 15 bp, Homo sapiens
aatcatatgccgaca

SEQ ID NO: 305194 - DNA, 15 bp, Homo sapiens
caatcatatgccgac

SEQ ID NO: 305195 - DNA, 15 bp, Homo sapiens
gcaatcatatgccga

SEQ ID NO: 305196 - DNA, 15 bp, Homo sapiens
cgcaatcatatgccg

SEQ ID NO: 305197 - DNA, 15 bp, Homo sapiens
acgcaatcatatgcc

SEQ ID NO: 305198 - DNA, 15 bp, Homo sapiens
cacgcaatcatatgc

SEQ ID NO: 305199 - DNA, 15 bp, Homo sapiens
acacgcaatcatatg

SEQ ID NO: 305200 - DNA, 15 bp, Homo sapiens
aacacgcaatcatat

SEQ ID NO: 305201 - DNA, 15 bp, Homo sapiens
caacacgcaatcata

SEQ ID NO: 305202 - DNA, 15 bp, Homo sapiens
acaacacgcaatcat

SEQ ID NO: 305203 - DNA, 15 bp, Homo sapiens
tacaacacgcaatca

SEQ ID NO: 305204 - DNA, 15 bp, Homo sapiens
atacaacacgcaatc

SEQ ID NO: 305205 - DNA, 15 bp, Homo sapiens
tatacaacacgcaat

SEQ ID NO: 305206 - DNA, 15 bp, Homo sapiens
ctatacaacacgcaa

SEQ ID NO: 305207 - DNA, 15 bp, Homo sapiens
actatacaacacgca

SEQ ID NO: 305208 - DNA, 15 bp, Homo sapiens
tactatacaacacgc

SEQ ID NO: 305209 - DNA, 15 bp, Homo sapiens
gtactatacaacacg

SEQ ID NO: 305210 - DNA, 15 bp, Homo sapiens
tgtactatacaacac

SEQ ID NO: 305211 - DNA, 15 bp, Homo sapiens
ctgtactatacaaca

SEQ ID NO: 305212 - DNA, 15 bp, Homo sapiens
tctgtactatacaac

SEQ ID NO: 305213 - DNA, 15 bp, Homo sapiens
ttctgtactatacaa

SEQ ID NO: 305214 - DNA, 15 bp, Homo sapiens
attctgtactataca

SEQ ID NO: 305215 - DNA, 15 bp, Homo sapiens
tattctgtactatac

SEQ ID NO: 305216 - DNA, 15 bp, Homo sapiens
atattctgtactata

SEQ ID NO: 305217 - DNA, 15 bp, Homo sapiens
tatattctgtactat

SEQ ID NO: 305218 - DNA, 15 bp, Homo sapiens
atatattctgtacta

SEQ ID NO: 305219 - DNA, 15 bp, Homo sapiens
aatatattctgtact

SEQ ID NO: 305220 - DNA, 15 bp, Homo sapiens
gaatatattctgtac

SEQ ID NO: 305221 - DNA, 15 bp, Homo sapiens
tgaatatattctgta

SEQ ID NO: 305222 - DNA, 15 bp, Homo sapiens
atgaatatattctgt

SEQ ID NO: 305223 - DNA, 15 bp, Homo sapiens
aatgaatatattctg

SEQ ID NO: 305224 - DNA, 15 bp, Homo sapiens
caatgaatatattct

SEQ ID NO: 305225 - DNA, 15 bp, Homo sapiens
acaatgaatatattc

SEQ ID NO: 305226 - DNA, 15 bp, Homo sapiens
cacaatgaatatatt

SEQ ID NO: 305227 - DNA, 15 bp, Homo sapiens
gcacaatgaatatat

SEQ ID NO: 305228 - DNA, 15 bp, Homo sapiens
tgcacaatgaatata

SEQ ID NO: 305229 - DNA, 15 bp, Homo sapiens
ctgcacaatgaatat

SEQ ID NO: 305230 - DNA, 15 bp, Homo sapiens
tctgcacaatgaata

SEQ ID NO: 305231 - DNA, 15 bp, Homo sapiens
atctgcacaatgaat

SEQ ID NO: 305232 - DNA, 15 bp, Homo sapiens
gatctgcacaatgaa

SEQ ID NO: 305233 - DNA, 15 bp, Homo sapiens
tgatctgcacaatga

SEQ ID NO: 305234 - DNA, 15 bp, Homo sapiens
atgatctgcacaatg

SEQ ID NO: 305235 - DNA, 15 bp, Homo sapiens
gatgatctgcacaat

SEQ ID NO: 305236 - DNA, 15 bp, Homo sapiens
ggatgatctgcacaa

SEQ ID NO: 305237 - DNA, 15 bp, Homo sapiens
aggatgatctgcaca

SEQ ID NO: 305238 - DNA, 15 bp, Homo sapiens
taggatgatctgcac

SEQ ID NO: 305239 - DNA, 15 bp, Homo sapiens
ctaggatgatctgca

SEQ ID NO: 305240 - DNA, 15 bp, Homo sapiens
actaggatgatctgc

SEQ ID NO: 305241 - DNA, 15 bp, Homo sapiens
cactaggatgatctg

SEQ ID NO: 305242 - DNA, 15 bp, Homo sapiens
gcactaggatgatct

SEQ ID NO: 305243 - DNA, 15 bp, Homo sapiens
tgcactaggatgatc

SEQ ID NO: 305244 - DNA, 15 bp, Homo sapiens
atgcactaggatgat

SEQ ID NO: 305245 - DNA, 15 bp, Homo sapiens
catgcactaggatga

SEQ ID NO: 305246 - DNA, 15 bp, Homo sapiens
acatgcactaggatg

SEQ ID NO: 305247 - DNA, 15 bp, Homo sapiens
tacatgcactaggat

SEQ ID NO: 305248 - DNA, 15 bp, Homo sapiens
ttacatgcactagga

SEQ ID NO: 305249 - DNA, 15 bp, Homo sapiens
gttacatgcactagg

SEQ ID NO: 305250 - DNA, 15 bp, Homo sapiens
cgttacatgcactag

SEQ ID NO: 305251 - DNA, 15 bp, Homo sapiens
ccgttacatgcacta

SEQ ID NO: 305252 - DNA, 15 bp, Homo sapiens
accgttacatgcact

SEQ ID NO: 305253 - DNA, 15 bp, Homo sapiens
caccgttacatgcac

SEQ ID NO: 305254 - DNA, 15 bp, Homo sapiens
acaccgttacatgca

SEQ ID NO: 305255 - DNA, 15 bp, Homo sapiens
tacaccgttacatgc

SEQ ID NO: 305256 - DNA, 15 bp, Homo sapiens
gtacaccgttacatg

SEQ ID NO: 305257 - DNA, 15 bp, Homo sapiens
agtacaccgttacat

SEQ ID NO: 305258 - DNA, 15 bp, Homo sapiens
gagtacaccgttaca

SEQ ID NO: 305259 - DNA, 15 bp, Homo sapiens
tgagtacaccgttac

SEQ ID NO: 305260 - DNA, 15 bp, Homo sapiens
atgagtacaccgtta

SEQ ID NO: 305261 - DNA, 15 bp, Homo sapiens
tatgagtacaccgtt

SEQ ID NO: 305262 - DNA, 15 bp, Homo sapiens
ctatgagtacaccgt

SEQ ID NO: 305263 - DNA, 15 bp, Homo sapiens
tctatgagtacaccg

SEQ ID NO: 305264 - DNA, 15 bp, Homo sapiens
ctctatgagtacacc

SEQ ID NO: 305265 - DNA, 15 bp, Homo sapiens
tctctatgagtacac

SEQ ID NO: 305266 - DNA, 15 bp, Homo sapiens
gtctctatgagtaca

SEQ ID NO: 305267 - DNA, 15 bp, Homo sapiens
tgtctctatgagtac

SEQ ID NO: 305268 - DNA, 15 bp, Homo sapiens
gtgtctctatgagta

SEQ ID NO: 305269 - DNA, 15 bp, Homo sapiens
agtgtctctatgagt

SEQ ID NO: 305270 - DNA, 15 bp, Homo sapiens
tagtgtctctatgag

SEQ ID NO: 305271 - DNA, 15 bp, Homo sapiens
gtagtgtctctatga

SEQ ID NO: 305272 - DNA, 15 bp, Homo sapiens
agtagtgtctctatg

SEQ ID NO: 305273 - DNA, 15 bp, Homo sapiens
tagtagtgtctctat

SEQ ID NO: 305274 - DNA, 15 bp, Homo sapiens
atagtagtgtctcta

SEQ ID NO: 305275 - DNA, 15 bp, Homo sapiens
catagtagtgtctct

SEQ ID NO: 305276 - DNA, 15 bp, Homo sapiens
acatagtagtgtctc

SEQ ID NO: 305277 - DNA, 15 bp, Homo sapiens
tacatagtagtgtct

SEQ ID NO: 305278 - DNA, 15 bp, Homo sapiens
ctacatagtagtgtc

SEQ ID NO: 305279 - DNA, 15 bp, Homo sapiens
actacatagtagtgt

SEQ ID NO: 305280 - DNA, 15 bp, Homo sapiens
gactacatagtagtg

SEQ ID NO: 305281 - DNA, 15 bp, Homo sapiens
tgactacatagtagt

SEQ ID NO: 305282 - DNA, 15 bp, Homo sapiens
ctgactacatagtag

SEQ ID NO: 305283 - DNA, 15 bp, Homo sapiens
gctgactacatagta

SEQ ID NO: 305284 - DNA, 15 bp, Homo sapiens
agctgactacatagt

SEQ ID NO: 305285 - DNA, 15 bp, Homo sapiens
gagctgactacatag

SEQ ID NO: 305286 - DNA, 15 bp, Homo sapiens
ggagctgactacata

SEQ ID NO: 305287 - DNA, 15 bp, Homo sapiens
aggagctgactacat

SEQ ID NO: 305288 - DNA, 15 bp, Homo sapiens
taggagctgactaca

SEQ ID NO: 305289 - DNA, 15 bp, Homo sapiens
gtaggagctgactac

SEQ ID NO: 305290 - DNA, 15 bp, Homo sapiens
agtaggagctgacta

SEQ ID NO: 305291 - DNA, 15 bp, Homo sapiens
cagtaggagctgact

SEQ ID NO: 305292 - DNA, 15 bp, Homo sapiens
acagtaggagctgac

SEQ ID NO: 305293 - DNA, 15 bp, Homo sapiens
cacagtaggagctga

SEQ ID NO: 305294 - DNA, 15 bp, Homo sapiens
acacagtaggagctg

SEQ ID NO: 305295 - DNA, 15 bp, Homo sapiens
cacacagtaggagct

SEQ ID NO: 305296 - DNA, 15 bp, Homo sapiens
tcacacagtaggagc

SEQ ID NO: 305297 - DNA, 15 bp, Homo sapiens
atcacacagtaggag

SEQ ID NO: 305298 - DNA, 15 bp, Homo sapiens
catcacacagtagga

SEQ ID NO: 305299 - DNA, 15 bp, Homo sapiens
ccatcacacagtagg

SEQ ID NO: 305300 - DNA, 15 bp, Homo sapiens
cccatcacacagtag

SEQ ID NO: 305301 - DNA, 15 bp, Homo sapiens
gcccatcacacagta

SEQ ID NO: 305302 - DNA, 15 bp, Homo sapiens
tgcccatcacacagt

SEQ ID NO: 305303 - DNA, 15 bp, Homo sapiens
gtgcccatcacacag

SEQ ID NO: 305304 - DNA, 15 bp, Homo sapiens
agtgcccatcacaca

SEQ ID NO: 305305 - DNA, 15 bp, Homo sapiens
gagtgcccatcacac

SEQ ID NO: 305306 - DNA, 15 bp, Homo sapiens
agagtgcccatcaca

SEQ ID NO: 305307 - DNA, 15 bp, Homo sapiens
cagagtgcccatcac

SEQ ID NO: 305308 - DNA, 15 bp, Homo sapiens
ccagagtgcccatca

SEQ ID NO: 305309 - DNA, 15 bp, Homo sapiens
tccagagtgcccatc

SEQ ID NO: 305310 - DNA, 15 bp, Homo sapiens
ttccagagtgcccat

SEQ ID NO: 305311 - DNA, 15 bp, Homo sapiens
tttccagagtgccca

SEQ ID NO: 305312 - DNA, 15 bp, Homo sapiens
ctttccagagtgccc

SEQ ID NO: 305313 - DNA, 15 bp, Homo sapiens
gctttccagagtgcc

SEQ ID NO: 305314 - DNA, 15 bp, Homo sapiens
ggctttccagagtgc

SEQ ID NO: 305315 - DNA, 15 bp, Homo sapiens
gggctttccagagtg

SEQ ID NO: 305316 - DNA, 15 bp, Homo sapiens
ggggctttccagagt

SEQ ID NO: 305317 - DNA, 15 bp, Homo sapiens
aggggctttccagag

SEQ ID NO: 305318 - DNA, 15 bp, Homo sapiens
gaggggctttccaga

SEQ ID NO: 305319 - DNA, 15 bp, Homo sapiens
tgaggggctttccag

SEQ ID NO: 305320 - DNA, 15 bp, Homo sapiens
gtgaggggctttcca

SEQ ID NO: 305321 - DNA, 15 bp, Homo sapiens
tgtgaggggctttcc

SEQ ID NO: 305322 - DNA, 15 bp, Homo sapiens
ctgtgaggggctttc

SEQ ID NO: 305323 - DNA, 15 bp, Homo sapiens
tctgtgaggggcttt

SEQ ID NO: 305324 - DNA, 15 bp, Homo sapiens
gtctgtgaggggctt

SEQ ID NO: 305325 - DNA, 15 bp, Homo sapiens
tgtctgtgaggggct

SEQ ID NO: 305326 - DNA, 15 bp, Homo sapiens
gtgtctgtgaggggc

SEQ ID NO: 305327 - DNA, 15 bp, Homo sapiens
cgtgtctgtgagggg

SEQ ID NO: 305328 - DNA, 15 bp, Homo sapiens
ccgtgtctgtgaggg

SEQ ID NO: 305329 - DNA, 15 bp, Homo sapiens
tccgtgtctgtgagg

SEQ ID NO: 305330 - DNA, 15 bp, Homo sapiens
gtccgtgtctgtgag

SEQ ID NO: 305331 - DNA, 15 bp, Homo sapiens
agtccgtgtctgtga

SEQ ID NO: 305332 - DNA, 15 bp, Homo sapiens
gagtccgtgtctgtg

SEQ ID NO: 305333 - DNA, 15 bp, Homo sapiens
tgagtccgtgtctgt

SEQ ID NO: 305334 - DNA, 15 bp, Homo sapiens
gtgagtccgtgtctg

SEQ ID NO: 305335 - DNA, 15 bp, Homo sapiens
agtgagtccgtgtct

SEQ ID NO: 305336 - DNA, 15 bp, Homo sapiens
aagtgagtccgtgtc

SEQ ID NO: 305337 - DNA, 15 bp, Homo sapiens
taagtgagtccgtgt

SEQ ID NO: 305338 - DNA, 15 bp, Homo sapiens
ttaagtgagtccgtg

SEQ ID NO: 305339 - DNA, 15 bp, Homo sapiens
attaagtgagtccgt

SEQ ID NO: 305340 - DNA, 15 bp, Homo sapiens
gattaagtgagtccg

SEQ ID NO: 305341 - DNA, 15 bp, Homo sapiens
ggattaagtgagtcc

SEQ ID NO: 305342 - DNA, 15 bp, Homo sapiens
aggattaagtgagtc

SEQ ID NO: 305343 - DNA, 15 bp, Homo sapiens
gaggattaagtgagt

SEQ ID NO: 305344 - DNA, 15 bp, Homo sapiens
tgaggattaagtgag

SEQ ID NO: 305345 - DNA, 15 bp, Homo sapiens
ctgaggattaagtga

SEQ ID NO: 305346 - DNA, 15 bp, Homo sapiens
tctgaggattaagtg

SEQ ID NO: 305347 - DNA, 15 bp, Homo sapiens
ctctgaggattaagt

SEQ ID NO: 305348 - DNA, 15 bp, Homo sapiens
gctctgaggattaag

SEQ ID NO: 305349 - DNA, 15 bp, Homo sapiens
tgctctgaggattaa

SEQ ID NO: 305350 - DNA, 15 bp, Homo sapiens
ttgctctgaggatta

SEQ ID NO: 305351 - DNA, 15 bp, Homo sapiens
tttgctctgaggatt

SEQ ID NO: 305352 - DNA, 15 bp, Homo sapiens
gtttgctctgaggat

SEQ ID NO: 305353 - DNA, 15 bp, Homo sapiens
ggtttgctctgagga

SEQ ID NO: 305354 - DNA, 15 bp, Homo sapiens
aggtttgctctgagg

SEQ ID NO: 305355 - DNA, 15 bp, Homo sapiens
taggtttgctctgag

SEQ ID NO: 305356 - DNA, 15 bp, Homo sapiens
ataggtttgctctga

SEQ ID NO: 305357 - DNA, 15 bp, Homo sapiens
cataggtttgctctg

SEQ ID NO: 305358 - DNA, 15 bp, Homo sapiens
tcataggtttgctct

SEQ ID NO: 305359 - DNA, 15 bp, Homo sapiens
ctcataggtttgctc

SEQ ID NO: 305360 - DNA, 15 bp, Homo sapiens
cctcataggtttgct

SEQ ID NO: 305361 - DNA, 15 bp, Homo sapiens
gcctcataggtttgc

SEQ ID NO: 305362 - DNA, 15 bp, Homo sapiens
tgcctcataggtttg

SEQ ID NO: 305363 - DNA, 15 bp, Homo sapiens
ctgcctcataggttt

SEQ ID NO: 305364 - DNA, 15 bp, Homo sapiens
cctgcctcataggtt

SEQ ID NO: 305365 - DNA, 15 bp, Homo sapiens
tcctgcctcataggt

SEQ ID NO: 305366 - DNA, 15 bp, Homo sapiens
gtcctgcctcatagg

SEQ ID NO: 305367 - DNA, 15 bp, Homo sapiens
agtcctgcctcatag

SEQ ID NO: 305368 - DNA, 15 bp, Homo sapiens
aagtcctgcctcata

SEQ ID NO: 305369 - DNA, 15 bp, Homo sapiens
caagtcctgcctcat

SEQ ID NO: 305370 - DNA, 15 bp, Homo sapiens
acaagtcctgcctca

SEQ ID NO: 305371 - DNA, 15 bp, Homo sapiens
gacaagtcctgcctc

SEQ ID NO: 305372 - DNA, 15 bp, Homo sapiens
tgacaagtcctgcct

SEQ ID NO: 305373 - DNA, 15 bp, Homo sapiens
atgacaagtcctgcc

SEQ ID NO: 305374 - DNA, 15 bp, Homo sapiens
aatgacaagtcctgc

SEQ ID NO: 305375 - DNA, 15 bp, Homo sapiens
aaatgacaagtcctg

SEQ ID NO: 305376 - DNA, 15 bp, Homo sapiens
gaaatgacaagtcct

SEQ ID NO: 305377 - DNA, 15 bp, Homo sapiens
ggaaatgacaagtcc

SEQ ID NO: 305378 - DNA, 15 bp, Homo sapiens
gggaaatgacaagtc

SEQ ID NO: 305379 - DNA, 15 bp, Homo sapiens
ggggaaatgacaagt

SEQ ID NO: 305380 - DNA, 15 bp, Homo sapiens
tggggaaatgacaag

SEQ ID NO: 305381 - DNA, 15 bp, Homo sapiens
atggggaaatgacaa

SEQ ID NO: 305382 - DNA, 15 bp, Homo sapiens
aatggggaaatgaca

SEQ ID NO: 305383 - DNA, 15 bp, Homo sapiens
aaatggggaaatgac

SEQ ID NO: 305384 - DNA, 15 bp, Homo sapiens
taaatggggaaatga

SEQ ID NO: 305385 - DNA, 15 bp, Homo sapiens
gtaaatggggaaatg

SEQ ID NO: 305386 - DNA, 15 bp, Homo sapiens
tgtaaatggggaaat

SEQ ID NO: 305387 - DNA, 15 bp, Homo sapiens
ctgtaaatggggaaa

SEQ ID NO: 305388 - DNA, 15 bp, Homo sapiens
tctgtaaatggggaa

SEQ ID NO: 305389 - DNA, 15 bp, Homo sapiens
atctgtaaatgggga

SEQ ID NO: 305390 - DNA, 15 bp, Homo sapiens
catctgtaaatgggg

SEQ ID NO: 305391 - DNA, 15 bp, Homo sapiens
tcatctgtaaatggg

SEQ ID NO: 305392 - DNA, 15 bp, Homo sapiens
ttcatctgtaaatgg

SEQ ID NO: 305393 - DNA, 15 bp, Homo sapiens
cttcatctgtaaatg

SEQ ID NO: 305394 - DNA, 15 bp, Homo sapiens
tcttcatctgtaaat

SEQ ID NO: 305395 - DNA, 15 bp, Homo sapiens
ttcttcatctgtaaa

SEQ ID NO: 305396 - DNA, 15 bp, Homo sapiens
tttcttcatctgtaa

SEQ ID NO: 305397 - DNA, 15 bp, Homo sapiens
gtttcttcatctgta

SEQ ID NO: 305398 - DNA, 15 bp, Homo sapiens
agtttcttcatctgt

SEQ ID NO: 305399 - DNA, 15 bp, Homo sapiens
cagtttcttcatctg

SEQ ID NO: 305400 - DNA, 15 bp, Homo sapiens
tcagtttcttcatct

SEQ ID NO: 305401 - DNA, 15 bp, Homo sapiens
ctcagtttcttcatc

SEQ ID NO: 305402 - DNA, 15 bp, Homo sapiens
cctcagtttcttcat

SEQ ID NO: 305403 - DNA, 15 bp, Homo sapiens
gcctcagtttcttca

SEQ ID NO: 305404 - DNA, 15 bp, Homo sapiens
agcctcagtttcttc

SEQ ID NO: 305405 - DNA, 15 bp, Homo sapiens
tagcctcagtttctt

SEQ ID NO: 305406 - DNA, 15 bp, Homo sapiens
ttagcctcagtttct

SEQ ID NO: 305407 - DNA, 15 bp, Homo sapiens
cttagcctcagtttc

SEQ ID NO: 305408 - DNA, 15 bp, Homo sapiens
tcttagcctcagttt

SEQ ID NO: 305409 - DNA, 15 bp, Homo sapiens
ctcttagcctcagtt

SEQ ID NO: 305410 - DNA, 15 bp, Homo sapiens
tctcttagcctcagt

SEQ ID NO: 305411 - DNA, 15 bp, Homo sapiens
ctctcttagcctcag

SEQ ID NO: 305412 - DNA, 15 bp, Homo sapiens
tctctcttagcctca

SEQ ID NO: 305413 - DNA, 15 bp, Homo sapiens
atctctcttagcctc

SEQ ID NO: 305414 - DNA, 15 bp, Homo sapiens
aatctctcttagcct

SEQ ID NO: 305415 - DNA, 15 bp, Homo sapiens
taatctctcttagcc

SEQ ID NO: 305416 - DNA, 15 bp, Homo sapiens
ataatctctcttagc

SEQ ID NO: 305417 - DNA, 15 bp, Homo sapiens
gataatctctcttag

SEQ ID NO: 305418 - DNA, 15 bp, Homo sapiens
agataatctctctta

SEQ ID NO: 305419 - DNA, 15 bp, Homo sapiens
aagataatctctctt

SEQ ID NO: 305420 - DNA, 15 bp, Homo sapiens
caagataatctctct

SEQ ID NO: 305421 - DNA, 15 bp, Homo sapiens
acaagataatctctc

SEQ ID NO: 305422 - DNA, 15 bp, Homo sapiens
gacaagataatctct

SEQ ID NO: 305423 - DNA, 15 bp, Homo sapiens
ggacaagataatctc

SEQ ID NO: 305424 - DNA, 15 bp, Homo sapiens
tggacaagataatct

SEQ ID NO: 305425 - DNA, 15 bp, Homo sapiens
ttggacaagataatc

SEQ ID NO: 305426 - DNA, 15 bp, Homo sapiens
cttggacaagataat

SEQ ID NO: 305427 - DNA, 15 bp, Homo sapiens
ccttggacaagataa

SEQ ID NO: 305428 - DNA, 15 bp, Homo sapiens
accttggacaagata

SEQ ID NO: 305429 - DNA, 15 bp, Homo sapiens
gaccttggacaagat

SEQ ID NO: 305430 - DNA, 15 bp, Homo sapiens
tgaccttggacaaga

SEQ ID NO: 305431 - DNA, 15 bp, Homo sapiens
tgtgaccttggacaa

SEQ ID NO: 305432 - DNA, 15 bp, Homo sapiens
atgtgaccttggaca

SEQ ID NO: 305433 - DNA, 15 bp, Homo sapiens
gatgtgaccttggac

SEQ ID NO: 305434 - DNA, 15 bp, Homo sapiens
agatgtgaccttgga

SEQ ID NO: 305435 - DNA, 15 bp, Homo sapiens
gagatgtgaccttgg

SEQ ID NO: 305436 - DNA, 15 bp, Homo sapiens
ggagatgtgaccttg

SEQ ID NO: 305437 - DNA, 15 bp, Homo sapiens
aggagatgtgacctt

SEQ ID NO: 305438 - DNA, 15 bp, Homo sapiens
caggagatgtgacct

SEQ ID NO: 305439 - DNA, 15 bp, Homo sapiens
ccaggagatgtgacc

SEQ ID NO: 305440 - DNA, 15 bp, Homo sapiens
cccaggagatgtgac

SEQ ID NO: 305441 - DNA, 15 bp, Homo sapiens
tcccaggagatgtga

SEQ ID NO: 305442 - DNA, 15 bp, Homo sapiens
ctcccaggagatgtg

SEQ ID NO: 305443 - DNA, 15 bp, Homo sapiens
actcccaggagatgt

SEQ ID NO: 305444 - DNA, 15 bp, Homo sapiens
cactcccaggagatg

SEQ ID NO: 305445 - DNA, 15 bp, Homo sapiens
ccactcccaggagat

SEQ ID NO: 305446 - DNA, 15 bp, Homo sapiens
accactcccaggaga

SEQ ID NO: 305447 - DNA, 15 bp, Homo sapiens
caccactcccaggag

SEQ ID NO: 305448 - DNA, 15 bp, Homo sapiens
ccaccactcccagga

SEQ ID NO: 305449 - DNA, 15 bp, Homo sapiens
cccaccactcccagg

SEQ ID NO: 305450 - DNA, 15 bp, Homo sapiens
tcccaccactcccag

SEQ ID NO: 305451 - DNA, 15 bp, Homo sapiens
ctcccaccactccca

SEQ ID NO: 305452 - DNA, 15 bp, Homo sapiens
cctcccaccactccc

SEQ ID NO: 305453 - DNA, 15 bp, Homo sapiens
ccctcccaccactcc

SEQ ID NO: 305454 - DNA, 15 bp, Homo sapiens
cccctcccaccactc

SEQ ID NO: 305455 - DNA, 15 bp, Homo sapiens
acccctcccaccact

SEQ ID NO: 305456 - DNA, 15 bp, Homo sapiens
cacccctcccaccac

SEQ ID NO: 305457 - DNA, 15 bp, Homo sapiens
gcacccctcccacca

SEQ ID NO: 305458 - DNA, 15 bp, Homo sapiens
tgcacccctcccacc

SEQ ID NO: 305459 - DNA, 15 bp, Homo sapiens
atgcacccctcccac

SEQ ID NO: 305460 - DNA, 15 bp, Homo sapiens
aatgcacccctccca

SEQ ID NO: 305461 - DNA, 15 bp, Homo sapiens
gaatgcacccctccc

SEQ ID NO: 305462 - DNA, 15 bp, Homo sapiens
ggaatgcacccctcc

SEQ ID NO: 305463 - DNA, 15 bp, Homo sapiens
gggaatgcacccctc

SEQ ID NO: 305464 - DNA, 15 bp, Homo sapiens
ggggaatgcacccct

SEQ ID NO: 305465 - DNA, 15 bp, Homo sapiens
tggggaatgcacccc

SEQ ID NO: 305466 - DNA, 15 bp, Homo sapiens
ctggggaatgcaccc

SEQ ID NO: 305467 - DNA, 15 bp, Homo sapiens
actggggaatgcacc

SEQ ID NO: 305468 - DNA, 15 bp, Homo sapiens
tactggggaatgcac

SEQ ID NO: 305469 - DNA, 15 bp, Homo sapiens
atactggggaatgca

SEQ ID NO: 305470 - DNA, 15 bp, Homo sapiens
catactggggaatgc

SEQ ID NO: 305471 - DNA, 15 bp, Homo sapiens
acatactggggaatg

SEQ ID NO: 305472 - DNA, 15 bp, Homo sapiens
cacatactggggaat

SEQ ID NO: 305473 - DNA, 15 bp, Homo sapiens
ccacatactggggaa

SEQ ID NO: 305474 - DNA, 15 bp, Homo sapiens
accacatactgggga

SEQ ID NO: 305475 - DNA, 15 bp, Homo sapiens
gaccacatactgggg

SEQ ID NO: 305476 - DNA, 15 bp, Homo sapiens
agaccacatactggg

SEQ ID NO: 305477 - DNA, 15 bp, Homo sapiens
cagaccacatactgg

SEQ ID NO: 305478 - DNA, 15 bp, Homo sapiens
tcagaccacatactg

SEQ ID NO: 305479 - DNA, 15 bp, Homo sapiens
gtcagaccacatact

SEQ ID NO: 305480 - DNA, 15 bp, Homo sapiens
agtcagaccacatac

SEQ ID NO: 305481 - DNA, 15 bp, Homo sapiens
aagtcagaccacata

SEQ ID NO: 305482 - DNA, 15 bp, Homo sapiens
aaagtcagaccacat

SEQ ID NO: 305483 - DNA, 15 bp, Homo sapiens
taaagtcagaccaca

SEQ ID NO: 305484 - DNA, 15 bp, Homo sapiens
ataaagtcagaccac

SEQ ID NO: 305485 - DNA, 15 bp, Homo sapiens
cataaagtcagacca

SEQ ID NO: 305486 - DNA, 15 bp, Homo sapiens
acataaagtcagacc

SEQ ID NO: 305487 - DNA, 15 bp, Homo sapiens
gacataaagtcagac

SEQ ID NO: 305488 - DNA, 15 bp, Homo sapiens
ggacataaagtcaga

SEQ ID NO: 305489 - DNA, 15 bp, Homo sapiens
tggacataaagtcag

SEQ ID NO: 305490 - DNA, 15 bp, Homo sapiens
gtggacataaagtca

SEQ ID NO: 305491 - DNA, 15 bp, Homo sapiens
tgtggacataaagtc

SEQ ID NO: 305492 - DNA, 15 bp, Homo sapiens
gtgtggacataaagt

SEQ ID NO: 305493 - DNA, 15 bp, Homo sapiens
agtgtggacataaag

SEQ ID NO: 305494 - DNA, 15 bp, Homo sapiens
gagtgtggacataaa

SEQ ID NO: 305495 - DNA, 15 bp, Homo sapiens
agagtgtggacataa

SEQ ID NO: 305496 - DNA, 15 bp, Homo sapiens
aagagtgtggacata

SEQ ID NO: 305497 - DNA, 15 bp, Homo sapiens
gaagagtgtggacat

SEQ ID NO: 305498 - DNA, 15 bp, Homo sapiens
ggaagagtgtggaca

SEQ ID NO: 305499 - DNA, 15 bp, Homo sapiens
aggaagagtgtggac

SEQ ID NO: 305500 - DNA, 15 bp, Homo sapiens
gaggaagagtgtgga

SEQ ID NO: 305501 - DNA, 15 bp, Homo sapiens
agaggaagagtgtgg

SEQ ID NO: 305502 - DNA, 15 bp, Homo sapiens
cagaggaagagtgtg

SEQ ID NO: 305503 - DNA, 15 bp, Homo sapiens
gcagaggaagagtgt

SEQ ID NO: 305504 - DNA, 15 bp, Homo sapiens
agcagaggaagagtg

SEQ ID NO: 305505 - DNA, 15 bp, Homo sapiens
gagcagaggaagagt

SEQ ID NO: 305506 - DNA, 15 bp, Homo sapiens
agagcagaggaagag

SEQ ID NO: 305507 - DNA, 15 bp, Homo sapiens
aagagcagaggaaga

SEQ ID NO: 305508 - DNA, 15 bp, Homo sapiens
gaagagcagaggaag

SEQ ID NO: 305509 - DNA, 15 bp, Homo sapiens
agaagagcagaggaa

SEQ ID NO: 305510 - DNA, 15 bp, Homo sapiens
aagaagagcagagga

SEQ ID NO: 305511 - DNA, 15 bp, Homo sapiens
aaagaagagcagagg

SEQ ID NO: 305512 - DNA, 15 bp, Homo sapiens
gaaagaagagcagag

SEQ ID NO: 305513 - DNA, 15 bp, Homo sapiens
cagaaagaagagcag

SEQ ID NO: 305514 - DNA, 15 bp, Homo sapiens
acagaaagaagagca

SEQ ID NO: 305515 - DNA, 15 bp, Homo sapiens
cacagaaagaagagc

SEQ ID NO: 305516 - DNA, 15 bp, Homo sapiens
acacagaaagaagag

SEQ ID NO: 305517 - DNA, 15 bp, Homo sapiens
gacacagaaagaaga

SEQ ID NO: 305518 - DNA, 15 bp, Homo sapiens
ggacacagaaagaag

SEQ ID NO: 305519 - DNA, 15 bp, Homo sapiens
aggacacagaaagaa

SEQ ID NO: 305520 - DNA, 15 bp, Homo sapiens
aaggacacagaaaga

SEQ ID NO: 305521 - DNA, 15 bp, Homo sapiens
taaggacacagaaag

SEQ ID NO: 305522 - DNA, 15 bp, Homo sapiens
gtaaggacacagaaa

SEQ ID NO: 305523 - DNA, 15 bp, Homo sapiens
ggtaaggacacagaa

SEQ ID NO: 305524 - DNA, 15 bp, Homo sapiens
gggtaaggacacaga

SEQ ID NO: 305525 - DNA, 15 bp, Homo sapiens
ggggtaaggacacag

SEQ ID NO: 305526 - DNA, 15 bp, Homo sapiens
aggggtaaggacaca

SEQ ID NO: 305527 - DNA, 15 bp, Homo sapiens
aaggggtaaggacac

SEQ ID NO: 305528 - DNA, 15 bp, Homo sapiens
caaggggtaaggaca

SEQ ID NO: 305529 - DNA, 15 bp, Homo sapiens
tcaaggggtaaggac

SEQ ID NO: 305530 - DNA, 15 bp, Homo sapiens
ttcaaggggtaagga

SEQ ID NO: 305531 - DNA, 15 bp, Homo sapiens
attcaaggggtaagg

SEQ ID NO: 305532 - DNA, 15 bp, Homo sapiens
cattcaaggggtaag

SEQ ID NO: 305533 - DNA, 15 bp, Homo sapiens
tcattcaaggggtaa

SEQ ID NO: 305534 - DNA, 15 bp, Homo sapiens
atcattcaaggggta

SEQ ID NO: 305535 - DNA, 15 bp, Homo sapiens
aatcattcaaggggt

SEQ ID NO: 305536 - DNA, 15 bp, Homo sapiens
aaatcattcaagggg

SEQ ID NO: 305537 - DNA, 15 bp, Homo sapiens
caaatcattcaaggg

SEQ ID NO: 305538 - DNA, 15 bp, Homo sapiens
ccaaatcattcaagg

SEQ ID NO: 305539 - DNA, 15 bp, Homo sapiens
tccaaatcattcaag

SEQ ID NO: 305540 - DNA, 15 bp, Homo sapiens
ctccaaatcattcaa

SEQ ID NO: 305541 - DNA, 15 bp, Homo sapiens
actccaaatcattca

SEQ ID NO: 305542 - DNA, 15 bp, Homo sapiens
aactccaaatcattc

SEQ ID NO: 305543 - DNA, 15 bp, Homo sapiens
caactccaaatcatt

SEQ ID NO: 305544 - DNA, 15 bp, Homo sapiens
acaactccaaatcat

SEQ ID NO: 305545 - DNA, 15 bp, Homo sapiens
cacaactccaaatca

SEQ ID NO: 305546 - DNA, 15 bp, Homo sapiens
tcacaactccaaatc

SEQ ID NO: 305547 - DNA, 15 bp, Homo sapiens
ctcacaactccaaat

SEQ ID NO: 305548 - DNA, 15 bp, Homo sapiens
cctcacaactccaaa

SEQ ID NO: 305549 - DNA, 15 bp, Homo sapiens
gcctcacaactccaa

SEQ ID NO: 305550 - DNA, 15 bp, Homo sapiens
ggcctcacaactcca

SEQ ID NO: 305551 - DNA, 15 bp, Homo sapiens
aggcctcacaactcc

SEQ ID NO: 305552 - DNA, 15 bp, Homo sapiens
caggcctcacaactc

SEQ ID NO: 305553 - DNA, 15 bp, Homo sapiens
ccaggcctcacaact

SEQ ID NO: 305554 - DNA, 15 bp, Homo sapiens
cccaggcctcacaac

SEQ ID NO: 305555 - DNA, 15 bp, Homo sapiens
acccaggcctcacaa

SEQ ID NO: 305556 - DNA, 15 bp, Homo sapiens
aacccaggcctcaca

SEQ ID NO: 305557 - DNA, 15 bp, Homo sapiens
caacccaggcctcac

SEQ ID NO: 305558 - DNA, 15 bp, Homo sapiens
ccaacccaggcctca

SEQ ID NO: 305559 - DNA, 15 bp, Homo sapiens
cccaacccaggcctc

SEQ ID NO: 305560 - DNA, 15 bp, Homo sapiens
tcccaacccaggcct

SEQ ID NO: 305561 - DNA, 15 bp, Homo sapiens
ttcccaacccaggcc

SEQ ID NO: 305562 - DNA, 15 bp, Homo sapiens
attcccaacccaggc

SEQ ID NO: 305563 - DNA, 15 bp, Homo sapiens
cattcccaacccagg

SEQ ID NO: 305564 - DNA, 15 bp, Homo sapiens
tcattcccaacccag

SEQ ID NO: 305565 - DNA, 15 bp, Homo sapiens
gtcattcccaaccca

SEQ ID NO: 305566 - DNA, 15 bp, Homo sapiens
tgtcattcccaaccc

SEQ ID NO: 305567 - DNA, 15 bp, Homo sapiens
ctgtcattcccaacc

SEQ ID NO: 305568 - DNA, 15 bp, Homo sapiens
cctgtcattcccaac

SEQ ID NO: 305569 - DNA, 15 bp, Homo sapiens
ccctgtcattcccaa

SEQ ID NO: 305570 - DNA, 15 bp, Homo sapiens
gccctgtcattccca

SEQ ID NO: 305571 - DNA, 15 bp, Homo sapiens
agccctgtcattccc

SEQ ID NO: 305572 - DNA, 15 bp, Homo sapiens
tagccctgtcattcc

SEQ ID NO: 305573 - DNA, 15 bp, Homo sapiens
ctagccctgtcattc

SEQ ID NO: 305574 - DNA, 15 bp, Homo sapiens
actagccctgtcatt

SEQ ID NO: 305575 - DNA, 15 bp, Homo sapiens
aactagccctgtcat

SEQ ID NO: 305576 - DNA, 15 bp, Homo sapiens
aaactagccctgtca

SEQ ID NO: 305577 - DNA, 15 bp, Homo sapiens
aaaactagccctgtc

SEQ ID NO: 305578 - DNA, 15 bp, Homo sapiens
caaaactagccctgt

SEQ ID NO: 305579 - DNA, 15 bp, Homo sapiens
gcaaaactagccctg

SEQ ID NO: 305580 - DNA, 15 bp, Homo sapiens
agcaaaactagccct

SEQ ID NO: 305581 - DNA, 15 bp, Homo sapiens
cagcaaaactagccc

SEQ ID NO: 305582 - DNA, 15 bp, Homo sapiens
acagcaaaactagcc

SEQ ID NO: 305583 - DNA, 15 bp, Homo sapiens
cacagcaaaactagc

SEQ ID NO: 305584 - DNA, 15 bp, Homo sapiens
acacagcaaaactag

SEQ ID NO: 305585 - DNA, 15 bp, Homo sapiens
aacacagcaaaacta

SEQ ID NO: 305586 - DNA, 15 bp, Homo sapiens
caacacagcaaaact

SEQ ID NO: 305587 - DNA, 15 bp, Homo sapiens
acaacacagcaaaac

SEQ ID NO: 305588 - DNA, 15 bp, Homo sapiens
cacaacacagcaaaa

SEQ ID NO: 305589 - DNA, 15 bp, Homo sapiens
acacaacacagcaaa

SEQ ID NO: 305590 - DNA, 15 bp, Homo sapiens
aacacaacacagcaa

SEQ ID NO: 305591 - DNA, 15 bp, Homo sapiens
caacacaacacagca

SEQ ID NO: 305592 - DNA, 15 bp, Homo sapiens
ccaacacaacacagc

SEQ ID NO: 305593 - DNA, 15 bp, Homo sapiens
gccaacacaacacag

SEQ ID NO: 305594 - DNA, 15 bp, Homo sapiens
tgccaacacaacaca

SEQ ID NO: 305595 - DNA, 15 bp, Homo sapiens
atgccaacacaacac

SEQ ID NO: 305596 - DNA, 15 bp, Homo sapiens
gatgccaacacaaca

SEQ ID NO: 305597 - DNA, 15 bp, Homo sapiens
ggatgccaacacaac

SEQ ID NO: 305598 - DNA, 15 bp, Homo sapiens
gggatgccaacacaa

SEQ ID NO: 305599 - DNA, 15 bp, Homo sapiens
agggatgccaacaca

SEQ ID NO: 305600 - DNA, 15 bp, Homo sapiens
gagggatgccaacac

SEQ ID NO: 305601 - DNA, 15 bp, Homo sapiens
ggagggatgccaaca

SEQ ID NO: 305602 - DNA, 15 bp, Homo sapiens
tggagggatgccaac

SEQ ID NO: 305603 - DNA, 15 bp, Homo sapiens
atggagggatgccaa

SEQ ID NO: 305604 - DNA, 15 bp, Homo sapiens
gatggagggatgcca

SEQ ID NO: 305605 - DNA, 15 bp, Homo sapiens
cgatggagggatgcc

SEQ ID NO: 305606 - DNA, 15 bp, Homo sapiens
ccgatggagggatgc

SEQ ID NO: 305607 - DNA, 15 bp, Homo sapiens
accgatggagggatg

SEQ ID NO: 305608 - DNA, 15 bp, Homo sapiens
caccgatggagggat

SEQ ID NO: 305609 - DNA, 15 bp, Homo sapiens
gcaccgatggaggga

SEQ ID NO: 305610 - DNA, 15 bp, Homo sapiens
agcaccgatggaggg

SEQ ID NO: 305611 - DNA, 15 bp, Homo sapiens
aagcaccgatggagg

SEQ ID NO: 305612 - DNA, 15 bp, Homo sapiens
taagcaccgatggag

SEQ ID NO: 305613 - DNA, 15 bp, Homo sapiens
gtaagcaccgatgga

SEQ ID NO: 305614 - DNA, 15 bp, Homo sapiens
agtaagcaccgatgg

SEQ ID NO: 305615 - DNA, 15 bp, Homo sapiens
gagtaagcaccgatg

SEQ ID NO: 305616 - DNA, 15 bp, Homo sapiens
tgagtaagcaccgat

SEQ ID NO: 305617 - DNA, 15 bp, Homo sapiens
atgagtaagcaccga

SEQ ID NO: 305618 - DNA, 15 bp, Homo sapiens
tatgagtaagcaccg

SEQ ID NO: 305619 - DNA, 15 bp, Homo sapiens
ttatgagtaagcacc

SEQ ID NO: 305620 - DNA, 15 bp, Homo sapiens
tttatgagtaagcac

SEQ ID NO: 305621 - DNA, 15 bp, Homo sapiens
ctttatgagtaagca

SEQ ID NO: 305622 - DNA, 15 bp, Homo sapiens
cctttatgagtaagc

SEQ ID NO: 305623 - DNA, 15 bp, Homo sapiens
ccctttatgagtaag

SEQ ID NO: 305624 - DNA, 15 bp, Homo sapiens
gccctttatgagtaa

SEQ ID NO: 305625 - DNA, 15 bp, Homo sapiens
agccctttatgagta

SEQ ID NO: 305626 - DNA, 15 bp, Homo sapiens
aagccctttatgagt

SEQ ID NO: 305627 - DNA, 15 bp, Homo sapiens
gaagccctttatgag

SEQ ID NO: 305628 - DNA, 15 bp, Homo sapiens
tgaagccctttatga

SEQ ID NO: 305629 - DNA, 15 bp, Homo sapiens
gtgaagccctttatg

SEQ ID NO: 305630 - DNA, 15 bp, Homo sapiens
agtgaagccctttat

SEQ ID NO: 305631 - DNA, 15 bp, Homo sapiens
gagtgaagcccttta

SEQ ID NO: 305632 - DNA, 15 bp, Homo sapiens
ggagtgaagcccttt

SEQ ID NO: 305633 - DNA, 15 bp, Homo sapiens
tggagtgaagccctt

SEQ ID NO: 305634 - DNA, 15 bp, Homo sapiens
ctggagtgaagccct

SEQ ID NO: 305635 - DNA, 15 bp, Homo sapiens
cctggagtgaagccc

SEQ ID NO: 305636 - DNA, 15 bp, Homo sapiens
gcctggagtgaagcc

SEQ ID NO: 305637 - DNA, 15 bp, Homo sapiens
tgcctggagtgaagc

SEQ ID NO: 305638 - DNA, 15 bp, Homo sapiens
ctgcctggagtgaag

SEQ ID NO: 305639 - DNA, 15 bp, Homo sapiens
cctgcctggagtgaa

SEQ ID NO: 305640 - DNA, 15 bp, Homo sapiens
tcctgcctggagtga

SEQ ID NO: 305641 - DNA, 15 bp, Homo sapiens
ttcctgcctggagtg

SEQ ID NO: 305642 - DNA, 15 bp, Homo sapiens
cttcctgcctggagt

SEQ ID NO: 305643 - DNA, 15 bp, Homo sapiens
tcttcctgcctggag

SEQ ID NO: 305644 - DNA, 15 bp, Homo sapiens
ctcttcctgcctgga

SEQ ID NO: 305645 - DNA, 15 bp, Homo sapiens
tctcttcctgcctgg

SEQ ID NO: 305646 - DNA, 15 bp, Homo sapiens
ctctcttcctgcctg

SEQ ID NO: 305647 - DNA, 15 bp, Homo sapiens
cctctcttcctgcct

SEQ ID NO: 305648 - DNA, 15 bp, Homo sapiens
ccctctcttcctgcc

SEQ ID NO: 305649 - DNA, 15 bp, Homo sapiens
tccctctcttcctgc

SEQ ID NO: 305650 - DNA, 15 bp, Homo sapiens
ttccctctcttcctg

SEQ ID NO: 305651 - DNA, 15 bp, Homo sapiens
cttccctctcttcct

SEQ ID NO: 305652 - DNA, 15 bp, Homo sapiens
tcttccctctcttcc

SEQ ID NO: 305653 - DNA, 15 bp, Homo sapiens
ctcttccctctcttc

SEQ ID NO: 305654 - DNA, 15 bp, Homo sapiens
tctcttccctctctt

SEQ ID NO: 305655 - DNA, 15 bp, Homo sapiens
atctcttccctctct

SEQ ID NO: 305656 - DNA, 15 bp, Homo sapiens
gatctcttccctctc

SEQ ID NO: 305657 - DNA, 15 bp, Homo sapiens
agatctcttccctct

SEQ ID NO: 305658 - DNA, 15 bp, Homo sapiens
aagatctcttccctc

SEQ ID NO: 305659 - DNA, 15 bp, Homo sapiens
taagatctcttccct

SEQ ID NO: 305660 - DNA, 15 bp, Homo sapiens
ataagatctcttccc

SEQ ID NO: 305661 - DNA, 15 bp, Homo sapiens
aataagatctcttcc

SEQ ID NO: 305662 - DNA, 15 bp, Homo sapiens
aaataagatctcttc

SEQ ID NO: 305663 - DNA, 15 bp, Homo sapiens
taaataagatctctt

SEQ ID NO: 305664 - DNA, 15 bp, Homo sapiens
ttaaataagatctct

SEQ ID NO: 305665 - DNA, 15 bp, Homo sapiens
cttaaataagatctc

SEQ ID NO: 305666 - DNA, 15 bp, Homo sapiens
tcttaaataagatct

SEQ ID NO: 305667 - DNA, 15 bp, Homo sapiens
gtcttaaataagatc

SEQ ID NO: 305668 - DNA, 15 bp, Homo sapiens
agtcttaaataagat

SEQ ID NO: 305669 - DNA, 15 bp, Homo sapiens
gagtcttaaataaga

SEQ ID NO: 305670 - DNA, 15 bp, Homo sapiens
ggagtcttaaataag

SEQ ID NO: 305671 - DNA, 15 bp, Homo sapiens
cggagtcttaaataa

SEQ ID NO: 305672 - DNA, 15 bp, Homo sapiens
acggagtcttaaata

SEQ ID NO: 305673 - DNA, 15 bp, Homo sapiens
cacggagtcttaaat

SEQ ID NO: 305674 - DNA, 15 bp, Homo sapiens
acacggagtcttaaa

SEQ ID NO: 305675 - DNA, 15 bp, Homo sapiens
aacacggagtcttaa

SEQ ID NO: 305676 - DNA, 15 bp, Homo sapiens
gaacacggagtctta

SEQ ID NO: 305677 - DNA, 15 bp, Homo sapiens
agaacacggagtctt

SEQ ID NO: 305678 - DNA, 15 bp, Homo sapiens
gagaacacggagtct

SEQ ID NO: 305679 - DNA, 15 bp, Homo sapiens
ggagaacacggagtc

SEQ ID NO: 305680 - DNA, 15 bp, Homo sapiens
aggagaacacggagt

SEQ ID NO: 305681 - DNA, 15 bp, Homo sapiens
caggagaacacggag

SEQ ID NO: 305682 - DNA, 15 bp, Homo sapiens
ccaggagaacacgga

SEQ ID NO: 305683 - DNA, 15 bp, Homo sapiens
gccaggagaacacgg

SEQ ID NO: 305684 - DNA, 15 bp, Homo sapiens
agccaggagaacacg

SEQ ID NO: 305685 - DNA, 15 bp, Homo sapiens
gagccaggagaacac

SEQ ID NO: 305686 - DNA, 15 bp, Homo sapiens
ggagccaggagaaca

SEQ ID NO: 305687 - DNA, 15 bp, Homo sapiens
aggagccaggagaac

SEQ ID NO: 305688 - DNA, 15 bp, Homo sapiens
gaggagccaggagaa

SEQ ID NO: 305689 - DNA, 15 bp, Homo sapiens
agaggagccaggaga

SEQ ID NO: 305690 - DNA, 15 bp, Homo sapiens
aagaggagccaggag

SEQ ID NO: 305691 - DNA, 15 bp, Homo sapiens
aaagaggagccagga

SEQ ID NO: 305692 - DNA, 15 bp, Homo sapiens
gaaagaggagccagg

SEQ ID NO: 305693 - DNA, 15 bp, Homo sapiens
ggaaagaggagccag

SEQ ID NO: 305694 - DNA, 15 bp, Homo sapiens
gggaaagaggagcca

SEQ ID NO: 305695 - DNA, 15 bp, Homo sapiens
ggggaaagaggagcc

SEQ ID NO: 305696 - DNA, 15 bp, Homo sapiens
gagggggaaagagga

SEQ ID NO: 305697 - DNA, 15 bp, Homo sapiens
ggagggggaaagagg

SEQ ID NO: 305698 - DNA, 15 bp, Homo sapiens
aggagggggaaagag

SEQ ID NO: 305699 - DNA, 15 bp, Homo sapiens
gaggagggggaaaga

SEQ ID NO: 305700 - DNA, 15 bp, Homo sapiens
ggaggagggggaaag

SEQ ID NO: 305701 - DNA, 15 bp, Homo sapiens
aggaggagggggaaa

SEQ ID NO: 305702 - DNA, 15 bp, Homo sapiens
aaggaggagggggaa

SEQ ID NO: 305703 - DNA, 15 bp, Homo sapiens
caaggaggaggggga

SEQ ID NO: 305704 - DNA, 15 bp, Homo sapiens
gcaaggaggaggggg

SEQ ID NO: 305705 - DNA, 15 bp, Homo sapiens
ggcaaggaggagggg

SEQ ID NO: 305706 - DNA, 15 bp, Homo sapiens
gggcaaggaggaggg

SEQ ID NO: 305707 - DNA, 15 bp, Homo sapiens
tgggcaaggaggagg

SEQ ID NO: 305708 - DNA, 15 bp, Homo sapiens
gtgggcaaggaggag

SEQ ID NO: 305709 - DNA, 15 bp, Homo sapiens
ggtgggcaaggagga

SEQ ID NO: 305710 - DNA, 15 bp, Homo sapiens
aggtgggcaaggagg

SEQ ID NO: 305711 - DNA, 15 bp, Homo sapiens
gaggtgggcaaggag

SEQ ID NO: 305712 - DNA, 15 bp, Homo sapiens
ggaggtgggcaagga

SEQ ID NO: 305713 - DNA, 15 bp, Homo sapiens
tggaggtgggcaagg

SEQ ID NO: 305714 - DNA, 15 bp, Homo sapiens
ctggaggtgggcaag

SEQ ID NO: 305715 - DNA, 15 bp, Homo sapiens
actggaggtgggcaa

SEQ ID NO: 305716 - DNA, 15 bp, Homo sapiens
aactggaggtgggca

SEQ ID NO: 305717 - DNA, 15 bp, Homo sapiens
aaactggaggtgggc

SEQ ID NO: 305718 - DNA, 15 bp, Homo sapiens
gaaactggaggtggg

SEQ ID NO: 305719 - DNA, 15 bp, Homo sapiens
agaaactggaggtgg

SEQ ID NO: 305720 - DNA, 15 bp, Homo sapiens
tagaaactggaggtg

SEQ ID NO: 305721 - DNA, 15 bp, Homo sapiens
ctagaaactggaggt

SEQ ID NO: 305722 - DNA, 15 bp, Homo sapiens
tctagaaactggagg

SEQ ID NO: 305723 - DNA, 15 bp, Homo sapiens
ttctagaaactggag

SEQ ID NO: 305724 - DNA, 15 bp, Homo sapiens
tttctagaaactgga

SEQ ID NO: 305725 - DNA, 15 bp, Homo sapiens
atttctagaaactgg

SEQ ID NO: 305726 - DNA, 15 bp, Homo sapiens
catttctagaaactg

SEQ ID NO: 305727 - DNA, 15 bp, Homo sapiens
gcatttctagaaact

SEQ ID NO: 305728 - DNA, 15 bp, Homo sapiens
ggcatttctagaaac

SEQ ID NO: 305729 - DNA, 15 bp, Homo sapiens
tggcatttctagaaa

SEQ ID NO: 305730 - DNA, 15 bp, Homo sapiens
ctggcatttctagaa

SEQ ID NO: 305731 - DNA, 15 bp, Homo sapiens
cctggcatttctaga

SEQ ID NO: 305732 - DNA, 15 bp, Homo sapiens
tcctggcatttctag

SEQ ID NO: 305733 - DNA, 15 bp, Homo sapiens
ctcctggcatttcta

SEQ ID NO: 305734 - DNA, 15 bp, Homo sapiens
cctcctggcatttct

SEQ ID NO: 305735 - DNA, 15 bp, Homo sapiens
tcctcctggcatttc

SEQ ID NO: 305736 - DNA, 15 bp, Homo sapiens
gtcctcctggcattt

SEQ ID NO: 305737 - DNA, 15 bp, Homo sapiens
ggtcctcctggcatt

SEQ ID NO: 305738 - DNA, 15 bp, Homo sapiens
tggtcctcctggcat

SEQ ID NO: 305739 - DNA, 15 bp, Homo sapiens
ctggtcctcctggca

SEQ ID NO: 305740 - DNA, 15 bp, Homo sapiens
tctggtcctcctggc

SEQ ID NO: 305741 - DNA, 15 bp, Homo sapiens
ttctggtcctcctgg

SEQ ID NO: 305742 - DNA, 15 bp, Homo sapiens
cttctggtcctcctg

SEQ ID NO: 305743 - DNA, 15 bp, Homo sapiens
tcttctggtcctcct

SEQ ID NO: 305744 - DNA, 15 bp, Homo sapiens
ttcttctggtcctcc

SEQ ID NO: 305745 - DNA, 15 bp, Homo sapiens
attcttctggtcctc

SEQ ID NO: 305746 - DNA, 15 bp, Homo sapiens
cattcttctggtcct

SEQ ID NO: 305747 - DNA, 15 bp, Homo sapiens
gcattcttctggtcc

SEQ ID NO: 305748 - DNA, 15 bp, Homo sapiens
tgcattcttctggtc

SEQ ID NO: 305749 - DNA, 15 bp, Homo sapiens
ctgcattcttctggt

SEQ ID NO: 305750 - DNA, 15 bp, Homo sapiens
tctgcattcttctgg

SEQ ID NO: 305751 - DNA, 15 bp, Homo sapiens
ctctgcattcttctg

SEQ ID NO: 305752 - DNA, 15 bp, Homo sapiens
gctctgcattcttct

SEQ ID NO: 305753 - DNA, 15 bp, Homo sapiens
agctctgcattcttc

SEQ ID NO: 305754 - DNA, 15 bp, Homo sapiens
tagctctgcattctt

SEQ ID NO: 305755 - DNA, 15 bp, Homo sapiens
ctagctctgcattct

SEQ ID NO: 305756 - DNA, 15 bp, Homo sapiens
gctagctctgcattc

SEQ ID NO: 305757 - DNA, 15 bp, Homo sapiens
ggctagctctgcatt

SEQ ID NO: 305758 - DNA, 15 bp, Homo sapiens
aggctagctctgcat

SEQ ID NO: 305759 - DNA, 15 bp, Homo sapiens
caggctagctctgca

SEQ ID NO: 305760 - DNA, 15 bp, Homo sapiens
ccaggctagctctgc

SEQ ID NO: 305761 - DNA, 15 bp, Homo sapiens
accaggctagctctg

SEQ ID NO: 305762 - DNA, 15 bp, Homo sapiens
caccaggctagctct

SEQ ID NO: 305763 - DNA, 15 bp, Homo sapiens
acaccaggctagctc

SEQ ID NO: 305764 - DNA, 15 bp, Homo sapiens
gacaccaggctagct

SEQ ID NO: 305765 - DNA, 15 bp, Homo sapiens
agacaccaggctagc

SEQ ID NO: 305766 - DNA, 15 bp, Homo sapiens
gagacaccaggctag

SEQ ID NO: 305767 - DNA, 15 bp, Homo sapiens
ggagacaccaggcta

SEQ ID NO: 305768 - DNA, 15 bp, Homo sapiens
gggagacaccaggct

SEQ ID NO: 305769 - DNA, 15 bp, Homo sapiens
cgggagacaccaggc

SEQ ID NO: 305770 - DNA, 15 bp, Homo sapiens
tcgggagacaccagg

SEQ ID NO: 305771 - DNA, 15 bp, Homo sapiens
ctcgggagacaccag

SEQ ID NO: 305772 - DNA, 15 bp, Homo sapiens
actcgggagacacca

SEQ ID NO: 305773 - DNA, 15 bp, Homo sapiens
gactcgggagacacc

SEQ ID NO: 305774 - DNA, 15 bp, Homo sapiens
ggactcgggagacac

SEQ ID NO: 305775 - DNA, 15 bp, Homo sapiens
aggactcgggagaca

SEQ ID NO: 305776 - DNA, 15 bp, Homo sapiens
taggactcgggagac

SEQ ID NO: 305777 - DNA, 15 bp, Homo sapiens
ctaggactcgggaga

SEQ ID NO: 305778 - DNA, 15 bp, Homo sapiens
actaggactcgggag

SEQ ID NO: 305779 - DNA, 15 bp, Homo sapiens
cactaggactcggga

SEQ ID NO: 305780 - DNA, 15 bp, Homo sapiens
gcactaggactcggg

SEQ ID NO: 305781 - DNA, 15 bp, Homo sapiens
ggcactaggactcgg

SEQ ID NO: 305782 - DNA, 15 bp, Homo sapiens
gggcactaggactcg

SEQ ID NO: 305783 - DNA, 15 bp, Homo sapiens
ggggcactaggactc

SEQ ID NO: 305784 - DNA, 15 bp, Homo sapiens
aggggcactaggact

SEQ ID NO: 305785 - DNA, 15 bp, Homo sapiens
gaggggcactaggac

SEQ ID NO: 305786 - DNA, 15 bp, Homo sapiens
tgaggggcactagga

SEQ ID NO: 305787 - DNA, 15 bp, Homo sapiens
ctgaggggcactagg

SEQ ID NO: 305788 - DNA, 15 bp, Homo sapiens
gctgaggggcactag

SEQ ID NO: 305789 - DNA, 15 bp, Homo sapiens
tgctgaggggcacta

SEQ ID NO: 305790 - DNA, 15 bp, Homo sapiens
ctgctgaggggcact

SEQ ID NO: 305791 - DNA, 15 bp, Homo sapiens
gctgctgaggggcac

SEQ ID NO: 305792 - DNA, 15 bp, Homo sapiens
agctgctgaggggca

SEQ ID NO: 305793 - DNA, 15 bp, Homo sapiens
aagctgctgaggggc

SEQ ID NO: 305794 - DNA, 15 bp, Homo sapiens
caagctgctgagggg

SEQ ID NO: 305795 - DNA, 15 bp, Homo sapiens
ccaagctgctgaggg

SEQ ID NO: 305796 - DNA, 15 bp, Homo sapiens
tccaagctgctgagg

SEQ ID NO: 305797 - DNA, 15 bp, Homo sapiens
ctccaagctgctgag

SEQ ID NO: 305798 - DNA, 15 bp, Homo sapiens
tctccaagctgctga

SEQ ID NO: 305799 - DNA, 15 bp, Homo sapiens
atctccaagctgctg

SEQ ID NO: 305800 - DNA, 15 bp, Homo sapiens
gatctccaagctgct

SEQ ID NO: 305801 - DNA, 15 bp, Homo sapiens
ggatctccaagctgc

SEQ ID NO: 305802 - DNA, 15 bp, Homo sapiens
cggatctccaagctg

SEQ ID NO: 305803 - DNA, 15 bp, Homo sapiens
tcggatctccaagct

SEQ ID NO: 305804 - DNA, 15 bp, Homo sapiens
gtcggatctccaagc

SEQ ID NO: 305805 - DNA, 15 bp, Homo sapiens
ggtcggatctccaag

SEQ ID NO: 305806 - DNA, 15 bp, Homo sapiens
aggtcggatctccaa

SEQ ID NO: 305807 - DNA, 15 bp, Homo sapiens
caggtcggatctcca

SEQ ID NO: 305808 - DNA, 15 bp, Homo sapiens
gcaggtcggatctcc

SEQ ID NO: 305809 - DNA, 15 bp, Homo sapiens
agcaggtcggatctc

SEQ ID NO: 305810 - DNA, 15 bp, Homo sapiens
gagcaggtcggatct

SEQ ID NO: 305811 - DNA, 15 bp, Homo sapiens
ggagcaggtcggatc

SEQ ID NO: 305812 - DNA, 15 bp, Homo sapiens
tggagcaggtcggat

SEQ ID NO: 305813 - DNA, 15 bp, Homo sapiens
atggagcaggtcgga

SEQ ID NO: 305814 - DNA, 15 bp, Homo sapiens
gatggagcaggtcgg

SEQ ID NO: 305815 - DNA, 15 bp, Homo sapiens
agatggagcaggtcg

SEQ ID NO: 305816 - DNA, 15 bp, Homo sapiens
cagatggagcaggtc

SEQ ID NO: 305817 - DNA, 15 bp, Homo sapiens
ccagatggagcaggt

SEQ ID NO: 305818 - DNA, 15 bp, Homo sapiens
cccagatggagcagg

SEQ ID NO: 305819 - DNA, 15 bp, Homo sapiens
tcccagatggagcag

SEQ ID NO: 305820 - DNA, 15 bp, Homo sapiens
gtcccagatggagca

SEQ ID NO: 305821 - DNA, 15 bp, Homo sapiens
tgtcccagatggagc

SEQ ID NO: 305822 - DNA, 15 bp, Homo sapiens
ctgtcccagatggag

SEQ ID NO: 305823 - DNA, 15 bp, Homo sapiens
tctgtcccagatgga

SEQ ID NO: 305824 - DNA, 15 bp, Homo sapiens
ctctgtcccagatgg

SEQ ID NO: 305825 - DNA, 15 bp, Homo sapiens
tctctgtcccagatg

SEQ ID NO: 305826 - DNA, 15 bp, Homo sapiens
ctctctgtcccagat

SEQ ID NO: 305827 - DNA, 15 bp, Homo sapiens
tctctctgtcccaga

SEQ ID NO: 305828 - DNA, 15 bp, Homo sapiens
gtctctctgtcccag

SEQ ID NO: 305829 - DNA, 15 bp, Homo sapiens
agtctctctgtccca

SEQ ID NO: 305830 - DNA, 15 bp, Homo sapiens
cagtctctctgtccc

SEQ ID NO: 305831 - DNA, 15 bp, Homo sapiens
ccagtctctctgtcc

SEQ ID NO: 305832 - DNA, 15 bp, Homo sapiens
cccagtctctctgtc

SEQ ID NO: 305833 - DNA, 15 bp, Homo sapiens
ccccagtctctctgt

SEQ ID NO: 305834 - DNA, 15 bp, Homo sapiens
gccccagtctctctg

SEQ ID NO: 305835 - DNA, 15 bp, Homo sapiens
agccccagtctctct

SEQ ID NO: 305836 - DNA, 15 bp, Homo sapiens
aagccccagtctctc

SEQ ID NO: 305837 - DNA, 15 bp, Homo sapiens
taagccccagtctct

SEQ ID NO: 305838 - DNA, 15 bp, Homo sapiens
ttaagccccagtctc

SEQ ID NO: 305839 - DNA, 15 bp, Homo sapiens
cttaagccccagtct

SEQ ID NO: 305840 - DNA, 15 bp, Homo sapiens
tcttaagccccagtc

SEQ ID NO: 305841 - DNA, 15 bp, Homo sapiens
ttcttaagccccagt

SEQ ID NO: 305842 - DNA, 15 bp, Homo sapiens
gttcttaagccccag

SEQ ID NO: 305843 - DNA, 15 bp, Homo sapiens
tgttcttaagcccca

SEQ ID NO: 305844 - DNA, 15 bp, Homo sapiens
gtgttcttaagcccc

SEQ ID NO: 305845 - DNA, 15 bp, Homo sapiens
ggtgttcttaagccc

SEQ ID NO: 305846 - DNA, 15 bp, Homo sapiens
gggtgttcttaagcc

SEQ ID NO: 305847 - DNA, 15 bp, Homo sapiens
ggggtgttcttaagc

SEQ ID NO: 305848 - DNA, 15 bp, Homo sapiens
cggggtgttcttaag

SEQ ID NO: 305849 - DNA, 15 bp, Homo sapiens
ccggggtgttcttaa

SEQ ID NO: 305850 - DNA, 15 bp, Homo sapiens
tccggggtgttctta

SEQ ID NO: 305851 - DNA, 15 bp, Homo sapiens
atccggggtgttctt

SEQ ID NO: 305852 - DNA, 15 bp, Homo sapiens
tatccggggtgttct

SEQ ID NO: 305853 - DNA, 15 bp, Homo sapiens
atatccggggtgttc

SEQ ID NO: 305854 - DNA, 15 bp, Homo sapiens
aatatccggggtgtt

SEQ ID NO: 305855 - DNA, 15 bp, Homo sapiens
caatatccggggtgt

SEQ ID NO: 305856 - DNA, 15 bp, Homo sapiens
ccaatatccggggtg

SEQ ID NO: 305857 - DNA, 15 bp, Homo sapiens
gccaatatccggggt

SEQ ID NO: 305858 - DNA, 15 bp, Homo sapiens
cgccaatatccgggg

SEQ ID NO: 305859 - DNA, 15 bp, Homo sapiens
gcgccaatatccggg

SEQ ID NO: 305860 - DNA, 15 bp, Homo sapiens
tgcgccaatatccgg

SEQ ID NO: 305861 - DNA, 15 bp, Homo sapiens
ctgcgccaatatccg

SEQ ID NO: 305862 - DNA, 15 bp, Homo sapiens
tctgcgccaatatcc

SEQ ID NO: 305863 - DNA, 15 bp, Homo sapiens
ctctgcgccaatatc

SEQ ID NO: 305864 - DNA, 15 bp, Homo sapiens
actctgcgccaatat

SEQ ID NO: 305865 - DNA, 15 bp, Homo sapiens
tactctgcgccaata

SEQ ID NO: 305866 - DNA, 15 bp, Homo sapiens
ctactctgcgccaat

SEQ ID NO: 305867 - DNA, 15 bp, Homo sapiens
tctactctgcgccaa

SEQ ID NO: 305868 - DNA, 15 bp, Homo sapiens
atctactctgcgcca

SEQ ID NO: 305869 - DNA, 15 bp, Homo sapiens
aatctactctgcgcc

SEQ ID NO: 305870 - DNA, 15 bp, Homo sapiens
taatctactctgcgc

SEQ ID NO: 305871 - DNA, 15 bp, Homo sapiens
ttaatctactctgcg

SEQ ID NO: 305872 - DNA, 15 bp, Homo sapiens
tttaatctactctgc

SEQ ID NO: 305873 - DNA, 15 bp, Homo sapiens
ctttaatctactctg

SEQ ID NO: 305874 - DNA, 15 bp, Homo sapiens
gctttaatctactct

SEQ ID NO: 305875 - DNA, 15 bp, Homo sapiens
agctttaatctactc

SEQ ID NO: 305876 - DNA, 15 bp, Homo sapiens
gagctttaatctact

SEQ ID NO: 305877 - DNA, 15 bp, Homo sapiens
tgagctttaatctac

SEQ ID NO: 305878 - DNA, 15 bp, Homo sapiens
ctgagctttaatcta

SEQ ID NO: 305879 - DNA, 15 bp, Homo sapiens
gctgagctttaatct

SEQ ID NO: 305880 - DNA, 15 bp, Homo sapiens
agctgagctttaatc

SEQ ID NO: 305881 - DNA, 15 bp, Homo sapiens
gagctgagctttaat

SEQ ID NO: 305882 - DNA, 15 bp, Homo sapiens
agagctgagctttaa

SEQ ID NO: 305883 - DNA, 15 bp, Homo sapiens
cagagctgagcttta

SEQ ID NO: 305884 - DNA, 15 bp, Homo sapiens
tcagagctgagcttt

SEQ ID NO: 305885 - DNA, 15 bp, Homo sapiens
ctcagagctgagctt

SEQ ID NO: 305886 - DNA, 15 bp, Homo sapiens
gctcagagctgagct

SEQ ID NO: 305887 - DNA, 15 bp, Homo sapiens
agctcagagctgagc

SEQ ID NO: 305888 - DNA, 15 bp, Homo sapiens
gagctcagagctgag

SEQ ID NO: 305889 - DNA, 15 bp, Homo sapiens
ggagctcagagctga

SEQ ID NO: 305890 - DNA, 15 bp, Homo sapiens
tggagctcagagctg

SEQ ID NO: 305891 - DNA, 15 bp, Homo sapiens
gtggagctcagagct

SEQ ID NO: 305892 - DNA, 15 bp, Homo sapiens
ggtggagctcagagc

SEQ ID NO: 305893 - DNA, 15 bp, Homo sapiens
tggtggagctcagag

SEQ ID NO: 305894 - DNA, 15 bp, Homo sapiens
ttggtggagctcaga

SEQ ID NO: 305895 - DNA, 15 bp, Homo sapiens
gttggtggagctcag

SEQ ID NO: 305896 - DNA, 15 bp, Homo sapiens
agttggtggagctca

SEQ ID NO: 305897 - DNA, 15 bp, Homo sapiens
gagttggtggagctc

SEQ ID NO: 305898 - DNA, 15 bp, Homo sapiens
tgagttggtggagct

SEQ ID NO: 305899 - DNA, 15 bp, Homo sapiens
ctgagttggtggagc

SEQ ID NO: 305900 - DNA, 15 bp, Homo sapiens
actgagttggtggag

SEQ ID NO: 305901 - DNA, 15 bp, Homo sapiens
gactgagttggtgga

SEQ ID NO: 305902 - DNA, 15 bp, Homo sapiens
ggactgagttggtgg

SEQ ID NO: 305903 - DNA, 15 bp, Homo sapiens
tggactgagttggtg

SEQ ID NO: 305904 - DNA, 15 bp, Homo sapiens
gtggactgagttggt

SEQ ID NO: 305905 - DNA, 15 bp, Homo sapiens
tgtggactgagttgg

SEQ ID NO: 305906 - DNA, 15 bp, Homo sapiens
atgtggactgagttg

SEQ ID NO: 305907 - DNA, 15 bp, Homo sapiens
gatgtggactgagtt

SEQ ID NO: 305908 - DNA, 15 bp, Homo sapiens
agatgtggactgagt

SEQ ID NO: 305909 - DNA, 15 bp, Homo sapiens
aagatgtggactgag

SEQ ID NO: 305910 - DNA, 15 bp, Homo sapiens
caagatgtggactga

SEQ ID NO: 305911 - DNA, 15 bp, Homo sapiens
ccaagatgtggactg

SEQ ID NO: 305912 - DNA, 15 bp, Homo sapiens
gccaagatgtggact

SEQ ID NO: 305913 - DNA, 15 bp, Homo sapiens
agccaagatgtggac

SEQ ID NO: 305914 - DNA, 15 bp, Homo sapiens
tagccaagatgtgga

SEQ ID NO: 305915 - DNA, 15 bp, Homo sapiens
ttagccaagatgtgg

SEQ ID NO: 305916 - DNA, 15 bp, Homo sapiens
tttagccaagatgtg

SEQ ID NO: 305917 - DNA, 15 bp, Homo sapiens
gtttagccaagatgt

SEQ ID NO: 305918 - DNA, 15 bp, Homo sapiens
agtttagccaagatg

SEQ ID NO: 305919 - DNA, 15 bp, Homo sapiens
cagtttagccaagat

SEQ ID NO: 305920 - DNA, 15 bp, Homo sapiens
acagtttagccaaga

SEQ ID NO: 305921 - DNA, 15 bp, Homo sapiens
aacagtttagccaag

SEQ ID NO: 305922 - DNA, 15 bp, Homo sapiens
aaacagtttagccaa

SEQ ID NO: 305923 - DNA, 15 bp, Homo sapiens
caaacagtttagcca

SEQ ID NO: 305924 - DNA, 15 bp, Homo sapiens
gcaaacagtttagcc

SEQ ID NO: 305925 - DNA, 15 bp, Homo sapiens
agcaaacagtttagc

SEQ ID NO: 305926 - DNA, 15 bp, Homo sapiens
cagcaaacagtttag

SEQ ID NO: 305927 - DNA, 15 bp, Homo sapiens
tcagcaaacagttta

SEQ ID NO: 305928 - DNA, 15 bp, Homo sapiens
atcagcaaacagttt

SEQ ID NO: 305929 - DNA, 15 bp, Homo sapiens
catcagcaaacagtt

SEQ ID NO: 305930 - DNA, 15 bp, Homo sapiens
ccatcagcaaacagt

SEQ ID NO: 305931 - DNA, 15 bp, Homo sapiens
cccatcagcaaacag

SEQ ID NO: 305932 - DNA, 15 bp, Homo sapiens
acccatcagcaaaca

SEQ ID NO: 305933 - DNA, 15 bp, Homo sapiens
gacccatcagcaaac

SEQ ID NO: 305934 - DNA, 15 bp, Homo sapiens
cgacccatcagcaaa

SEQ ID NO: 305935 - DNA, 15 bp, Homo sapiens
gcgacccatcagcaa

SEQ ID NO: 305936 - DNA, 15 bp, Homo sapiens
agcgacccatcagca

SEQ ID NO: 305937 - DNA, 15 bp, Homo sapiens
gagcgacccatcagc

SEQ ID NO: 305938 - DNA, 15 bp, Homo sapiens
tgagcgacccatcag

SEQ ID NO: 305939 - DNA, 15 bp, Homo sapiens
ctgagcgacccatca

SEQ ID NO: 305940 - DNA, 15 bp, Homo sapiens
gctgagcgacccatc

SEQ ID NO: 305941 - DNA, 15 bp, Homo sapiens
tgctgagcgacccat

SEQ ID NO: 305942 - DNA, 15 bp, Homo sapiens
atgctgagcgaccca

SEQ ID NO: 305943 - DNA, 15 bp, Homo sapiens
catgctgagcgaccc

SEQ ID NO: 305944 - DNA, 15 bp, Homo sapiens
tcatgctgagcgacc

SEQ ID NO: 305945 - DNA, 15 bp, Homo sapiens
ctcatgctgagcgac

SEQ ID NO: 305946 - DNA, 15 bp, Homo sapiens
gctcatgctgagcga

SEQ ID NO: 305947 - DNA, 15 bp, Homo sapiens
tgctcatgctgagcg

SEQ ID NO: 305948 - DNA, 15 bp, Homo sapiens
atgctcatgctgagc

SEQ ID NO: 305949 - DNA, 15 bp, Homo sapiens
aatgctcatgctgag

SEQ ID NO: 305950 - DNA, 15 bp, Homo sapiens
aaatgctcatgctga

SEQ ID NO: 305951 - DNA, 15 bp, Homo sapiens
aaaatgctcatgctg

SEQ ID NO: 305952 - DNA, 15 bp, Homo sapiens
taaaatgctcatgct

SEQ ID NO: 305953 - DNA, 15 bp, Homo sapiens
ataaaatgctcatgc

SEQ ID NO: 305954 - DNA, 15 bp, Homo sapiens
gataaaatgctcatg

SEQ ID NO: 305955 - DNA, 15 bp, Homo sapiens
agataaaatgctcat

SEQ ID NO: 305956 - DNA, 15 bp, Homo sapiens
cagataaaatgctca

SEQ ID NO: 305957 - DNA, 15 bp, Homo sapiens
gcagataaaatgctc

SEQ ID NO: 305958 - DNA, 15 bp, Homo sapiens
ggcagataaaatgct

SEQ ID NO: 305959 - DNA, 15 bp, Homo sapiens
aggcagataaaatgc

SEQ ID NO: 305960 - DNA, 15 bp, Homo sapiens
gaggcagataaaatg

SEQ ID NO: 305961 - DNA, 15 bp, Homo sapiens
tgaggcagataaaat

SEQ ID NO: 305962 - DNA, 15 bp, Homo sapiens
ctgaggcagataaaa

SEQ ID NO: 305963 - DNA, 15 bp, Homo sapiens
cctgaggcagataaa

SEQ ID NO: 305964 - DNA, 15 bp, Homo sapiens
gcctgaggcagataa

SEQ ID NO: 305965 - DNA, 15 bp, Homo sapiens
agcctgaggcagata

SEQ ID NO: 305966 - DNA, 15 bp, Homo sapiens
gagcctgaggcagat

SEQ ID NO: 305967 - DNA, 15 bp, Homo sapiens
tgagcctgaggcaga

SEQ ID NO: 305968 - DNA, 15 bp, Homo sapiens
ctgagcctgaggcag

SEQ ID NO: 305969 - DNA, 15 bp, Homo sapiens
actgagcctgaggca

SEQ ID NO: 305970 - DNA, 15 bp, Homo sapiens
aactgagcctgaggc

SEQ ID NO: 305971 - DNA, 15 bp, Homo sapiens
taactgagcctgagg

SEQ ID NO: 305972 - DNA, 15 bp, Homo sapiens
ataactgagcctgag

SEQ ID NO: 305973 - DNA, 15 bp, Homo sapiens
gataactgagcctga

SEQ ID NO: 305974 - DNA, 15 bp, Homo sapiens
agataactgagcctg

SEQ ID NO: 305975 - DNA, 15 bp, Homo sapiens
gagataactgagcct

SEQ ID NO: 305976 - DNA, 15 bp, Homo sapiens
tgagataactgagcc

SEQ ID NO: 305977 - DNA, 15 bp, Homo sapiens
gtgagataactgagc

SEQ ID NO: 305978 - DNA, 15 bp, Homo sapiens
ggtgagataactgag

SEQ ID NO: 305979 - DNA, 15 bp, Homo sapiens
aggtgagataactga

SEQ ID NO: 305980 - DNA, 15 bp, Homo sapiens
caggtgagataactg

SEQ ID NO: 305981 - DNA, 15 bp, Homo sapiens
acaggtgagataact

SEQ ID NO: 305982 - DNA, 15 bp, Homo sapiens
tacaggtgagataac

SEQ ID NO: 305983 - DNA, 15 bp, Homo sapiens
gtacaggtgagataa

SEQ ID NO: 305984 - DNA, 15 bp, Homo sapiens
tgtacaggtgagata

SEQ ID NO: 305985 - DNA, 15 bp, Homo sapiens
ttgtacaggtgagat

SEQ ID NO: 305986 - DNA, 15 bp, Homo sapiens
attgtacaggtgaga

SEQ ID NO: 305987 - DNA, 15 bp, Homo sapiens
cattgtacaggtgag

SEQ ID NO: 305988 - DNA, 15 bp, Homo sapiens
ccattgtacaggtga

SEQ ID NO: 305989 - DNA, 15 bp, Homo sapiens
cccattgtacaggtg

SEQ ID NO: 305990 - DNA, 15 bp, Homo sapiens
gcccattgtacaggt

SEQ ID NO: 305991 - DNA, 15 bp, Homo sapiens
agcccattgtacagg

SEQ ID NO: 305992 - DNA, 15 bp, Homo sapiens
tagcccattgtacag

SEQ ID NO: 305993 - DNA, 15 bp, Homo sapiens
ttagcccattgtaca

SEQ ID NO: 305994 - DNA, 15 bp, Homo sapiens
attagcccattgtac

SEQ ID NO: 305995 - DNA, 15 bp, Homo sapiens
aattagcccattgta

SEQ ID NO: 305996 - DNA, 15 bp, Homo sapiens
taattagcccattgt

SEQ ID NO: 305997 - DNA, 15 bp, Homo sapiens
gtaattagcccattg

SEQ ID NO: 305998 - DNA, 15 bp, Homo sapiens
tgtaattagcccatt

SEQ ID NO: 305999 - DNA, 15 bp, Homo sapiens
ctgtaattagcccat

SEQ ID NO: 306000 - DNA, 15 bp, Homo sapiens
gctgtaattagccca

SEQ ID NO: 306001 - DNA, 15 bp, Homo sapiens
tgctgtaattagccc

SEQ ID NO: 306002 - DNA, 15 bp, Homo sapiens
gtgctgtaattagcc

SEQ ID NO: 306003 - DNA, 15 bp, Homo sapiens
ggtgctgtaattagc

SEQ ID NO: 306004 - DNA, 15 bp, Homo sapiens
gggtgctgtaattag

SEQ ID NO: 306005 - DNA, 15 bp, Homo sapiens
tgggtgctgtaatta

SEQ ID NO: 306006 - DNA, 15 bp, Homo sapiens
gtgggtgctgtaatt

SEQ ID NO: 306007 - DNA, 15 bp, Homo sapiens
ggtgggtgctgtaat

SEQ ID NO: 306008 - DNA, 15 bp, Homo sapiens
aggtgggtgctgtaa

SEQ ID NO: 306009 - DNA, 15 bp, Homo sapiens
gaggtgggtgctgta

SEQ ID NO: 306010 - DNA, 15 bp, Homo sapiens
tgaggtgggtgctgt

SEQ ID NO: 306011 - DNA, 15 bp, Homo sapiens
atgaggtgggtgctg

SEQ ID NO: 306012 - DNA, 15 bp, Homo sapiens
tatgaggtgggtgct

SEQ ID NO: 306013 - DNA, 15 bp, Homo sapiens
ctatgaggtgggtgc

SEQ ID NO: 306014 - DNA, 15 bp, Homo sapiens
cctatgaggtgggtg

SEQ ID NO: 306015 - DNA, 15 bp, Homo sapiens
ccctatgaggtgggt

SEQ ID NO: 306016 - DNA, 15 bp, Homo sapiens
tccctatgaggtggg

SEQ ID NO: 306017 - DNA, 15 bp, Homo sapiens
atccctatgaggtgg

SEQ ID NO: 306018 - DNA, 15 bp, Homo sapiens
aatccctatgaggtg

SEQ ID NO: 306019 - DNA, 15 bp, Homo sapiens
gaatccctatgaggt

SEQ ID NO: 306020 - DNA, 15 bp, Homo sapiens
tgaatccctatgagg

SEQ ID NO: 306021 - DNA, 15 bp, Homo sapiens
gtgaatccctatgag

SEQ ID NO: 306022 - DNA, 15 bp, Homo sapiens
ggtgaatccctatga

SEQ ID NO: 306023 - DNA, 15 bp, Homo sapiens
cggtgaatccctatg

SEQ ID NO: 306024 - DNA, 15 bp, Homo sapiens
tcggtgaatccctat

SEQ ID NO: 306025 - DNA, 15 bp, Homo sapiens
ctcggtgaatcccta

SEQ ID NO: 306026 - DNA, 15 bp, Homo sapiens
cctcggtgaatccct

SEQ ID NO: 306027 - DNA, 15 bp, Homo sapiens
acctcggtgaatccc

SEQ ID NO: 306028 - DNA, 15 bp, Homo sapiens
tacctcggtgaatcc

SEQ ID NO: 306029 - DNA, 15 bp, Homo sapiens
ttacctcggtgaatc

SEQ ID NO: 306030 - DNA, 15 bp, Homo sapiens
attacctcggtgaat

SEQ ID NO: 306031 - DNA, 15 bp, Homo sapiens
cattacctcggtgaa

SEQ ID NO: 306032 - DNA, 15 bp, Homo sapiens
acattacctcggtga

SEQ ID NO: 306033 - DNA, 15 bp, Homo sapiens
cacattacctcggtg

SEQ ID NO: 306034 - DNA, 15 bp, Homo sapiens
tcacattacctcggt

SEQ ID NO: 306035 - DNA, 15 bp, Homo sapiens
ctcacattacctcgg

SEQ ID NO: 306036 - DNA, 15 bp, Homo sapiens
actcacattacctcg

SEQ ID NO: 306037 - DNA, 15 bp, Homo sapiens
tactcacattacctc

SEQ ID NO: 306038 - DNA, 15 bp, Homo sapiens
ctactcacattacct

SEQ ID NO: 306039 - DNA, 15 bp, Homo sapiens
gctactcacattacc

SEQ ID NO: 306040 - DNA, 15 bp, Homo sapiens
tgctactcacattac

SEQ ID NO: 306041 - DNA, 15 bp, Homo sapiens
gtgctactcacatta

SEQ ID NO: 306042 - DNA, 15 bp, Homo sapiens
tgtgctactcacatt

SEQ ID NO: 306043 - DNA, 15 bp, Homo sapiens
ctgtgctactcacat

SEQ ID NO: 306044 - DNA, 15 bp, Homo sapiens
gctgtgctactcaca

SEQ ID NO: 306045 - DNA, 15 bp, Homo sapiens
tgctgtgctactcac

SEQ ID NO: 306046 - DNA, 15 bp, Homo sapiens
gtgctgtgctactca

SEQ ID NO: 306047 - DNA, 15 bp, Homo sapiens
cgtgctgtgctactc

SEQ ID NO: 306048 - DNA, 15 bp, Homo sapiens
acgtgctgtgctact

SEQ ID NO: 306049 - DNA, 15 bp, Homo sapiens
tacgtgctgtgctac

SEQ ID NO: 306050 - DNA, 15 bp, Homo sapiens
gtacgtgctgtgcta

SEQ ID NO: 306051 - DNA, 15 bp, Homo sapiens
agtacgtgctgtgct

SEQ ID NO: 306052 - DNA, 15 bp, Homo sapiens
aagtacgtgctgtgc

SEQ ID NO: 306053 - DNA, 15 bp, Homo sapiens
gaagtacgtgctgtg

SEQ ID NO: 306054 - DNA, 15 bp, Homo sapiens
tgaagtacgtgctgt

SEQ ID NO: 306055 - DNA, 15 bp, Homo sapiens
atgaagtacgtgctg

SEQ ID NO: 306056 - DNA, 15 bp, Homo sapiens
tatgaagtacgtgct

SEQ ID NO: 306057 - DNA, 15 bp, Homo sapiens
gtatgaagtacgtgc

SEQ ID NO: 306058 - DNA, 15 bp, Homo sapiens
cgtatgaagtacgtg

SEQ ID NO: 306059 - DNA, 15 bp, Homo sapiens
tcgtatgaagtacgt

SEQ ID NO: 306060 - DNA, 15 bp, Homo sapiens
ctcgtatgaagtacg

SEQ ID NO: 306061 - DNA, 15 bp, Homo sapiens
gctcgtatgaagtac

SEQ ID NO: 306062 - DNA, 15 bp, Homo sapiens
agctcgtatgaagta

SEQ ID NO: 306063 - DNA, 15 bp, Homo sapiens
aagctcgtatgaagt

SEQ ID NO: 306064 - DNA, 15 bp, Homo sapiens
taagctcgtatgaag

SEQ ID NO: 306065 - DNA, 15 bp, Homo sapiens
ttaagctcgtatgaa

SEQ ID NO: 306066 - DNA, 15 bp, Homo sapiens
attaagctcgtatga

SEQ ID NO: 306067 - DNA, 15 bp, Homo sapiens
cattaagctcgtatg

SEQ ID NO: 306068 - DNA, 15 bp, Homo sapiens
tcattaagctcgtat

SEQ ID NO: 306069 - DNA, 15 bp, Homo sapiens
ttcattaagctcgta

SEQ ID NO: 306070 - DNA, 15 bp, Homo sapiens
gttcattaagctcgt

SEQ ID NO: 306071 - DNA, 15 bp, Homo sapiens
tgttcattaagctcg

SEQ ID NO: 306072 - DNA, 15 bp, Homo sapiens
ctgttcattaagctc

SEQ ID NO: 306073 - DNA, 15 bp, Homo sapiens
tctgttcattaagct

SEQ ID NO: 306074 - DNA, 15 bp, Homo sapiens
ttctgttcattaagc

SEQ ID NO: 306075 - DNA, 15 bp, Homo sapiens
cttctgttcattaag

SEQ ID NO: 306076 - DNA, 15 bp, Homo sapiens
gcttctgttcattaa

SEQ ID NO: 306077 - DNA, 15 bp, Homo sapiens
ggcttctgttcatta

SEQ ID NO: 306078 - DNA, 15 bp, Homo sapiens
tggcttctgttcatt

SEQ ID NO: 306079 - DNA, 15 bp, Homo sapiens
ctggcttctgttcat

SEQ ID NO: 306080 - DNA, 15 bp, Homo sapiens
cctggcttctgttca

SEQ ID NO: 306081 - DNA, 15 bp, Homo sapiens
tcctggcttctgttc

SEQ ID NO: 306082 - DNA, 15 bp, Homo sapiens
atcctggcttctgtt

SEQ ID NO: 306083 - DNA, 15 bp, Homo sapiens
aatcctggcttctgt

SEQ ID NO: 306084 - DNA, 15 bp, Homo sapiens
taatcctggcttctg

SEQ ID NO: 306085 - DNA, 15 bp, Homo sapiens
gtaatcctggcttct

SEQ ID NO: 306086 - DNA, 15 bp, Homo sapiens
ggtaatcctggcttc

SEQ ID NO: 306087 - DNA, 15 bp, Homo sapiens
aggtaatcctggctt

SEQ ID NO: 306088 - DNA, 15 bp, Homo sapiens
gaggtaatcctggct

SEQ ID NO: 306089 - DNA, 15 bp, Homo sapiens
cgaggtaatcctggc

SEQ ID NO: 306090 - DNA, 15 bp, Homo sapiens
ccgaggtaatcctgg

SEQ ID NO: 306091 - DNA, 15 bp, Homo sapiens
accgaggtaatcctg

SEQ ID NO: 306092 - DNA, 15 bp, Homo sapiens
gaccgaggtaatcct

SEQ ID NO: 306093 - DNA, 15 bp, Homo sapiens
agaccgaggtaatcc

SEQ ID NO: 306094 - DNA, 15 bp, Homo sapiens
gagaccgaggtaatc

SEQ ID NO: 306095 - DNA, 15 bp, Homo sapiens
agagaccgaggtaat

SEQ ID NO: 306096 - DNA, 15 bp, Homo sapiens
gagagaccgaggtaa

SEQ ID NO: 306097 - DNA, 15 bp, Homo sapiens
agagagaccgaggta

SEQ ID NO: 306098 - DNA, 15 bp, Homo sapiens
aagagagaccgaggt

SEQ ID NO: 306099 - DNA, 15 bp, Homo sapiens
aaagagagaccgagg

SEQ ID NO: 306100 - DNA, 15 bp, Homo sapiens
gaaagagagaccgag

SEQ ID NO: 306101 - DNA, 15 bp, Homo sapiens
agaaagagagaccga

SEQ ID NO: 306102 - DNA, 15 bp, Homo sapiens
tagaaagagagaccg

SEQ ID NO: 306103 - DNA, 15 bp, Homo sapiens
ttagaaagagagacc

SEQ ID NO: 306104 - DNA, 15 bp, Homo sapiens
gttagaaagagagac

SEQ ID NO: 306105 - DNA, 15 bp, Homo sapiens
ggttagaaagagaga

SEQ ID NO: 306106 - DNA, 15 bp, Homo sapiens
aggttagaaagagag

SEQ ID NO: 306107 - DNA, 15 bp, Homo sapiens
taggttagaaagaga

SEQ ID NO: 306108 - DNA, 15 bp, Homo sapiens
gtaggttagaaagag

SEQ ID NO: 306109 - DNA, 15 bp, Homo sapiens
ggtaggttagaaaga

SEQ ID NO: 306110 - DNA, 15 bp, Homo sapiens
gggtaggttagaaag

SEQ ID NO: 306111 - DNA, 15 bp, Homo sapiens
tgggtaggttagaaa

SEQ ID NO: 306112 - DNA, 15 bp, Homo sapiens
atgggtaggttagaa

SEQ ID NO: 306113 - DNA, 15 bp, Homo sapiens
gatgggtaggttaga

SEQ ID NO: 306114 - DNA, 15 bp, Homo sapiens
tgatgggtaggttag

SEQ ID NO: 306115 - DNA, 15 bp, Homo sapiens
atgatgggtaggtta

SEQ ID NO: 306116 - DNA, 15 bp, Homo sapiens
tatgatgggtaggtt

SEQ ID NO: 306117 - DNA, 15 bp, Homo sapiens
atatgatgggtaggt

SEQ ID NO: 306118 - DNA, 15 bp, Homo sapiens
aatatgatgggtagg

SEQ ID NO: 306119 - DNA, 15 bp, Homo sapiens
aaatatgatgggtag

SEQ ID NO: 306120 - DNA, 15 bp, Homo sapiens
aaaatatgatgggta

SEQ ID NO: 306121 - DNA, 15 bp, Homo sapiens
taaaatatgatgggt

SEQ ID NO: 306122 - DNA, 15 bp, Homo sapiens
ttaaaatatgatggg

SEQ ID NO: 306123 - DNA, 15 bp, Homo sapiens
tttaaaatatgatgg

SEQ ID NO: 306124 - DNA, 15 bp, Homo sapiens
ctttaaaatatgatg

SEQ ID NO: 306125 - DNA, 15 bp, Homo sapiens
gctttaaaatatgat

SEQ ID NO: 306126 - DNA, 15 bp, Homo sapiens
tgctttaaaatatga

SEQ ID NO: 306127 - DNA, 15 bp, Homo sapiens
gtgctttaaaatatg

SEQ ID NO: 306128 - DNA, 15 bp, Homo sapiens
ggtgctttaaaatat

SEQ ID NO: 306129 - DNA, 15 bp, Homo sapiens
cggtgctttaaaata

SEQ ID NO: 306130 - DNA, 15 bp, Homo sapiens
gcggtgctttaaaat

SEQ ID NO: 306131 - DNA, 15 bp, Homo sapiens
tgcggtgctttaaaa

SEQ ID NO: 306132 - DNA, 15 bp, Homo sapiens
ctgcggtgctttaaa

SEQ ID NO: 306133 - DNA, 15 bp, Homo sapiens
cctgcggtgctttaa

SEQ ID NO: 306134 - DNA, 15 bp, Homo sapiens
tcctgcggtgcttta

SEQ ID NO: 306135 - DNA, 15 bp, Homo sapiens
ctcctgcggtgcttt

SEQ ID NO: 306136 - DNA, 15 bp, Homo sapiens
tctcctgcggtgctt

SEQ ID NO: 306137 - DNA, 15 bp, Homo sapiens
ttctcctgcggtgct

SEQ ID NO: 306138 - DNA, 15 bp, Homo sapiens
tttctcctgcggtgc

SEQ ID NO: 306139 - DNA, 15 bp, Homo sapiens
ttttctcctgcggtg

SEQ ID NO: 306140 - DNA, 15 bp, Homo sapiens
gttttctcctgcggt

SEQ ID NO: 306141 - DNA, 15 bp, Homo sapiens
tgttttctcctgcgg

SEQ ID NO: 306142 - DNA, 15 bp, Homo sapiens
ttgttttctcctgcg

SEQ ID NO: 306143 - DNA, 15 bp, Homo sapiens
tttgttttctcctgc

SEQ ID NO: 306144 - DNA, 15 bp, Homo sapiens
gtttgttttctcctg

SEQ ID NO: 306145 - DNA, 15 bp, Homo sapiens
ggtttgttttctcct

SEQ ID NO: 306146 - DNA, 15 bp, Homo sapiens
tggtttgttttctcc

SEQ ID NO: 306147 - DNA, 15 bp, Homo sapiens
ctggtttgttttctc

SEQ ID NO: 306148 - DNA, 15 bp, Homo sapiens
tctggtttgttttct

SEQ ID NO: 306149 - DNA, 15 bp, Homo sapiens
ttctggtttgttttc

SEQ ID NO: 306150 - DNA, 15 bp, Homo sapiens
gttctggtttgtttt

SEQ ID NO: 306151 - DNA, 15 bp, Homo sapiens
tgttctggtttgttt

SEQ ID NO: 306152 - DNA, 15 bp, Homo sapiens
ctgttctggtttgtt

SEQ ID NO: 306153 - DNA, 15 bp, Homo sapiens
tctgttctggtttgt

SEQ ID NO: 306154 - DNA, 15 bp, Homo sapiens
ttctgttctggtttg

SEQ ID NO: 306155 - DNA, 15 bp, Homo sapiens
attctgttctggttt

SEQ ID NO: 306156 - DNA, 15 bp, Homo sapiens
tattctgttctggtt

SEQ ID NO: 306157 - DNA, 15 bp, Homo sapiens
ttattctgttctggt

SEQ ID NO: 306158 - DNA, 15 bp, Homo sapiens
tttattctgttctgg

SEQ ID NO: 306159 - DNA, 15 bp, Homo sapiens
ttttattctgttctg

SEQ ID NO: 306160 - DNA, 15 bp, Homo sapiens
tttttattctgttct

SEQ ID NO: 306161 - DNA, 15 bp, Homo sapiens
ttttttattctgttc

SEQ ID NO: 306162 - DNA, 15 bp, Homo sapiens
attttttattctgtt

SEQ ID NO: 306163 - DNA, 15 bp, Homo sapiens
tattttttattctgt

SEQ ID NO: 306164 - DNA, 15 bp, Homo sapiens
ttattttttattctg

SEQ ID NO: 306165 - DNA, 15 bp, Homo sapiens
cttattttttattct

SEQ ID NO: 306166 - DNA, 15 bp, Homo sapiens
ccttattttttattc

SEQ ID NO: 306167 - DNA, 15 bp, Homo sapiens
gccttattttttatt

SEQ ID NO: 306168 - DNA, 15 bp, Homo sapiens
tgccttattttttat

SEQ ID NO: 306169 - DNA, 15 bp, Homo sapiens
ctgccttatttttta

SEQ ID NO: 306170 - DNA, 15 bp, Homo sapiens
gctgccttatttttt

SEQ ID NO: 306171 - DNA, 15 bp, Homo sapiens
cgctgccttattttt

SEQ ID NO: 306172 - DNA, 15 bp, Homo sapiens
ccgctgccttatttt

SEQ ID NO: 306173 - DNA, 15 bp, Homo sapiens
tccgctgccttattt

SEQ ID NO: 306174 - DNA, 15 bp, Homo sapiens
atccgctgccttatt

SEQ ID NO: 306175 - DNA, 15 bp, Homo sapiens
catccgctgccttat

SEQ ID NO: 306176 - DNA, 15 bp, Homo sapiens
acatccgctgcctta

SEQ ID NO: 306177 - DNA, 15 bp, Homo sapiens
cacatccgctgcctt

SEQ ID NO: 306178 - DNA, 15 bp, Homo sapiens
tcacatccgctgcct

SEQ ID NO: 306179 - DNA, 15 bp, Homo sapiens
ctcacatccgctgcc

SEQ ID NO: 306180 - DNA, 15 bp, Homo sapiens
cctcacatccgctgc

SEQ ID NO: 306181 - DNA, 15 bp, Homo sapiens
tcctcacatccgctg

SEQ ID NO: 306182 - DNA, 15 bp, Homo sapiens
gtcctcacatccgct

SEQ ID NO: 306183 - DNA, 15 bp, Homo sapiens
tgtcctcacatccgc

SEQ ID NO: 306184 - DNA, 15 bp, Homo sapiens
ctgtcctcacatccg

SEQ ID NO: 306185 - DNA, 15 bp, Homo sapiens
actgtcctcacatcc

SEQ ID NO: 306186 - DNA, 15 bp, Homo sapiens
gactgtcctcacatc

SEQ ID NO: 306187 - DNA, 15 bp, Homo sapiens
tgactgtcctcacat

SEQ ID NO: 306188 - DNA, 15 bp, Homo sapiens
atgactgtcctcaca

SEQ ID NO: 306189 - DNA, 15 bp, Homo sapiens
catgactgtcctcac

SEQ ID NO: 306190 - DNA, 15 bp, Homo sapiens
acatgactgtcctca

SEQ ID NO: 306191 - DNA, 15 bp, Homo sapiens
gacatgactgtcctc

SEQ ID NO: 306192 - DNA, 15 bp, Homo sapiens
cgacatgactgtcct

SEQ ID NO: 306193 - DNA, 15 bp, Homo sapiens
ccgacatgactgtcc

SEQ ID NO: 306194 - DNA, 15 bp, Homo sapiens
gccgacatgactgtc

SEQ ID NO: 306195 - DNA, 15 bp, Homo sapiens
tgccgacatgactgt

SEQ ID NO: 306196 - DNA, 15 bp, Homo sapiens
ttgccgacatgactg

SEQ ID NO: 306197 - DNA, 15 bp, Homo sapiens
cttgccgacatgact

SEQ ID NO: 306198 - DNA, 15 bp, Homo sapiens
gcttgccgacatgac

SEQ ID NO: 306199 - DNA, 15 bp, Homo sapiens
tgcttgccgacatga

SEQ ID NO: 306200 - DNA, 15 bp, Homo sapiens
ctgcttgccgacatg

SEQ ID NO: 306201 - DNA, 15 bp, Homo sapiens
gctgcttgccgacat

SEQ ID NO: 306202 - DNA, 15 bp, Homo sapiens
tgctgcttgccgaca

SEQ ID NO: 306203 - DNA, 15 bp, Homo sapiens
ttgctgcttgccgac

SEQ ID NO: 306204 - DNA, 15 bp, Homo sapiens
cttgctgcttgccga

SEQ ID NO: 306205 - DNA, 15 bp, Homo sapiens
tcttgctgcttgccg

SEQ ID NO: 306206 - DNA, 15 bp, Homo sapiens
gtcttgctgcttgcc

SEQ ID NO: 306207 - DNA, 15 bp, Homo sapiens
cgtcttgctgcttgc

SEQ ID NO: 306208 - DNA, 15 bp, Homo sapiens
gcgtcttgctgcttg

SEQ ID NO: 306209 - DNA, 15 bp, Homo sapiens
agcgtcttgctgctt

SEQ ID NO: 306210 - DNA, 15 bp, Homo sapiens
cagcgtcttgctgct

SEQ ID NO: 306211 - DNA, 15 bp, Homo sapiens
gcagcgtcttgctgc

SEQ ID NO: 306212 - DNA, 15 bp, Homo sapiens
agcagcgtcttgctg

SEQ ID NO: 306213 - DNA, 15 bp, Homo sapiens
aagcagcgtcttgct

SEQ ID NO: 306214 - DNA, 15 bp, Homo sapiens
taagcagcgtcttgc

SEQ ID NO: 306215 - DNA, 15 bp, Homo sapiens
ataagcagcgtcttg

SEQ ID NO: 306216 - DNA, 15 bp, Homo sapiens
aataagcagcgtctt

SEQ ID NO: 306217 - DNA, 15 bp, Homo sapiens
aaataagcagcgtct

SEQ ID NO: 306218 - DNA, 15 bp, Homo sapiens
aaaataagcagcgtc

SEQ ID NO: 306219 - DNA, 15 bp, Homo sapiens
taaaataagcagcgt

SEQ ID NO: 306220 - DNA, 15 bp, Homo sapiens
ttaaaataagcagcg

SEQ ID NO: 306221 - DNA, 15 bp, Homo sapiens
attaaaataagcagc

SEQ ID NO: 306222 - DNA, 15 bp, Homo sapiens
aattaaaataagcag

SEQ ID NO: 306223 - DNA, 15 bp, Homo sapiens
gaattaaaataagca

SEQ ID NO: 306224 - DNA, 15 bp, Homo sapiens
ggaattaaaataagc

SEQ ID NO: 306225 - DNA, 15 bp, Homo sapiens
aggaattaaaataag

SEQ ID NO: 306226 - DNA, 15 bp, Homo sapiens
caggaattaaaataa

SEQ ID NO: 306227 - DNA, 15 bp, Homo sapiens
acaggaattaaaata

SEQ ID NO: 306228 - DNA, 15 bp, Homo sapiens
gacaggaattaaaat

SEQ ID NO: 306229 - DNA, 15 bp, Homo sapiens
ggacaggaattaaaa

SEQ ID NO: 306230 - DNA, 15 bp, Homo sapiens
gggacaggaattaaa

SEQ ID NO: 306231 - DNA, 15 bp, Homo sapiens
ggggacaggaattaa

SEQ ID NO: 306232 - DNA, 15 bp, Homo sapiens
tggggacaggaatta

SEQ ID NO: 306233 - DNA, 15 bp, Homo sapiens
gtggggacaggaatt

SEQ ID NO: 306234 - DNA, 15 bp, Homo sapiens
ggtggggacaggaat

SEQ ID NO: 306235 - DNA, 15 bp, Homo sapiens
gggtggggacaggaa

SEQ ID NO: 306236 - DNA, 15 bp, Homo sapiens
tgggtggggacagga

SEQ ID NO: 306237 - DNA, 15 bp, Homo sapiens
gtgggtggggacagg

SEQ ID NO: 306238 - DNA, 15 bp, Homo sapiens
ggtgggtggggacag

SEQ ID NO: 306239 - DNA, 15 bp, Homo sapiens
tggtgggtggggaca

SEQ ID NO: 306240 - DNA, 15 bp, Homo sapiens
ttggtgggtggggac

SEQ ID NO: 306241 - DNA, 15 bp, Homo sapiens
gttggtgggtgggga

SEQ ID NO: 306242 - DNA, 15 bp, Homo sapiens
agttggtgggtgggg

SEQ ID NO: 306243 - DNA, 15 bp, Homo sapiens
aagttggtgggtggg

SEQ ID NO: 306244 - DNA, 15 bp, Homo sapiens
taagttggtgggtgg

SEQ ID NO: 306245 - DNA, 15 bp, Homo sapiens
ataagttggtgggtg

SEQ ID NO: 306246 - DNA, 15 bp, Homo sapiens
aataagttggtgggt

SEQ ID NO: 306247 - DNA, 15 bp, Homo sapiens
gaataagttggtggg

SEQ ID NO: 306248 - DNA, 15 bp, Homo sapiens
tgaataagttggtgg

SEQ ID NO: 306249 - DNA, 15 bp, Homo sapiens
atgaataagttggtg

SEQ ID NO: 306250 - DNA, 15 bp, Homo sapiens
aatgaataagttggt

SEQ ID NO: 306251 - DNA, 15 bp, Homo sapiens
aaatgaataagttgg

SEQ ID NO: 306252 - DNA, 15 bp, Homo sapiens
aaaatgaataagttg

SEQ ID NO: 306253 - DNA, 15 bp, Homo sapiens
caaaatgaataagtt

SEQ ID NO: 306254 - DNA, 15 bp, Homo sapiens
acaaaatgaataagt

SEQ ID NO: 306255 - DNA, 15 bp, Homo sapiens
aacaaaatgaataag

SEQ ID NO: 306256 - DNA, 15 bp, Homo sapiens
aaacaaaatgaataa

SEQ ID NO: 306257 - DNA, 15 bp, Homo sapiens
gaaacaaaatgaata

SEQ ID NO: 306258 - DNA, 15 bp, Homo sapiens
ggaaacaaaatgaat

SEQ ID NO: 306259 - DNA, 15 bp, Homo sapiens
gggaaacaaaatgaa

SEQ ID NO: 306260 - DNA, 15 bp, Homo sapiens
agggaaacaaaatga

SEQ ID NO: 306261 - DNA, 15 bp, Homo sapiens
aagggaaacaaaatg

SEQ ID NO: 306262 - DNA, 15 bp, Homo sapiens
taagggaaacaaaat

SEQ ID NO: 306263 - DNA, 15 bp, Homo sapiens
gtaagggaaacaaaa

SEQ ID NO: 306264 - DNA, 15 bp, Homo sapiens
tgtaagggaaacaaa

SEQ ID NO: 306265 - DNA, 15 bp, Homo sapiens
ttgtaagggaaacaa

SEQ ID NO: 306266 - DNA, 15 bp, Homo sapiens
tttgtaagggaaaca

SEQ ID NO: 306267 - DNA, 15 bp, Homo sapiens
atttgtaagggaaac

SEQ ID NO: 306268 - DNA, 15 bp, Homo sapiens
gatttgtaagggaaa

SEQ ID NO: 306269 - DNA, 15 bp, Homo sapiens
ggatttgtaagggaa

SEQ ID NO: 306270 - DNA, 15 bp, Homo sapiens
tggatttgtaaggga

SEQ ID NO: 306271 - DNA, 15 bp, Homo sapiens
ttggatttgtaaggg

SEQ ID NO: 306272 - DNA, 15 bp, Homo sapiens
tttggatttgtaagg

SEQ ID NO: 306273 - DNA, 15 bp, Homo sapiens
gtttggatttgtaag

SEQ ID NO: 306274 - DNA, 15 bp, Homo sapiens
ggtttggatttgtaa

SEQ ID NO: 306275 - DNA, 15 bp, Homo sapiens
aggtttggatttgta

SEQ ID NO: 306276 - DNA, 15 bp, Homo sapiens
gaggtttggatttgt

SEQ ID NO: 306277 - DNA, 15 bp, Homo sapiens
tgaggtttggatttg

SEQ ID NO: 306278 - DNA, 15 bp, Homo sapiens
gtgaggtttggattt

SEQ ID NO: 306279 - DNA, 15 bp, Homo sapiens
agtgaggtttggatt

SEQ ID NO: 306280 - DNA, 15 bp, Homo sapiens
tagtgaggtttggat

SEQ ID NO: 306281 - DNA, 15 bp, Homo sapiens
ttagtgaggtttgga

SEQ ID NO: 306282 - DNA, 15 bp, Homo sapiens
tttagtgaggtttgg

SEQ ID NO: 306283 - DNA, 15 bp, Homo sapiens
ttttagtgaggtttg

SEQ ID NO: 306284 - DNA, 15 bp, Homo sapiens
attttagtgaggttt

SEQ ID NO: 306285 - DNA, 15 bp, Homo sapiens
tattttagtgaggtt

SEQ ID NO: 306286 - DNA, 15 bp, Homo sapiens
ttattttagtgaggt

SEQ ID NO: 306287 - DNA, 15 bp, Homo sapiens
tttattttagtgagg

SEQ ID NO: 306288 - DNA, 15 bp, Homo sapiens
atttattttagtgag

SEQ ID NO: 306289 - DNA, 15 bp, Homo sapiens
catttattttagtga

SEQ ID NO: 306290 - DNA, 15 bp, Homo sapiens
gcatttattttagtg

SEQ ID NO: 306291 - DNA, 15 bp, Homo sapiens
tgcatttattttagt

SEQ ID NO: 306292 - DNA, 15 bp, Homo sapiens
gtgcatttattttag

SEQ ID NO: 306293 - DNA, 15 bp, Homo sapiens
ggtgcatttatttta

SEQ ID NO: 306294 - DNA, 15 bp, Homo sapiens
aggtgcatttatttt

SEQ ID NO: 306295 - DNA, 15 bp, Homo sapiens
aaggtgcatttattt

SEQ ID NO: 306296 - DNA, 15 bp, Homo sapiens
caaggtgcatttatt

SEQ ID NO: 306297 - DNA, 15 bp, Homo sapiens
tcaaggtgcatttat

SEQ ID NO: 306298 - DNA, 15 bp, Homo sapiens
ttcaaggtgcattta

SEQ ID NO: 306299 - DNA, 15 bp, Homo sapiens
tttcaaggtgcattt

SEQ ID NO: 306300 - DNA, 15 bp, Homo sapiens
atttcaaggtgcatt

SEQ ID NO: 306301 - DNA, 15 bp, Homo sapiens
catttcaaggtgcat

SEQ ID NO: 306302 - DNA, 15 bp, Homo sapiens
tcatttcaaggtgca

SEQ ID NO: 306303 - DNA, 15 bp, Homo sapiens
ctcatttcaaggtgc

SEQ ID NO: 306304 - DNA, 15 bp, Homo sapiens
tctcatttcaaggtg

SEQ ID NO: 306305 - DNA, 15 bp, Homo sapiens
ctctcatttcaaggt

SEQ ID NO: 306306 - DNA, 15 bp, Homo sapiens
gctctcatttcaagg

SEQ ID NO: 306307 - DNA, 15 bp, Homo sapiens
agctctcatttcaag

SEQ ID NO: 306308 - DNA, 15 bp, Homo sapiens
aagctctcatttcaa

SEQ ID NO: 306309 - DNA, 15 bp, Homo sapiens
aaagctctcatttca

SEQ ID NO: 306310 - DNA, 15 bp, Homo sapiens
taaagctctcatttc

SEQ ID NO: 306311 - DNA, 15 bp, Homo sapiens
ataaagctctcattt

SEQ ID NO: 306312 - DNA, 15 bp, Homo sapiens
gataaagctctcatt

SEQ ID NO: 306313 - DNA, 15 bp, Homo sapiens
agataaagctctcat

SEQ ID NO: 306314 - DNA, 15 bp, Homo sapiens
aagataaagctctca

SEQ ID NO: 306315 - DNA, 15 bp, Homo sapiens
taagataaagctctc

SEQ ID NO: 306316 - DNA, 15 bp, Homo sapiens
ataagataaagctct

SEQ ID NO: 306317 - DNA, 15 bp, Homo sapiens
aataagataaagctc

SEQ ID NO: 306318 - DNA, 15 bp, Homo sapiens
aaataagataaagct

SEQ ID NO: 306319 - DNA, 15 bp, Homo sapiens
aaaataagataaagc

SEQ ID NO: 306320 - DNA, 15 bp, Homo sapiens
caaaataagataaag

SEQ ID NO: 306321 - DNA, 15 bp, Homo sapiens
tcaaaataagataaa

SEQ ID NO: 306322 - DNA, 15 bp, Homo sapiens
ctcaaaataagataa

SEQ ID NO: 306323 - DNA, 15 bp, Homo sapiens
tctcaaaataagata

SEQ ID NO: 306324 - DNA, 15 bp, Homo sapiens
atctcaaaataagat

SEQ ID NO: 306325 - DNA, 15 bp, Homo sapiens
aatctcaaaataaga

SEQ ID NO: 306326 - DNA, 15 bp, Homo sapiens
aaatctcaaaataag

SEQ ID NO: 306327 - DNA, 15 bp, Homo sapiens
caaatctcaaaataa

SEQ ID NO: 306328 - DNA, 15 bp, Homo sapiens
tcaaatctcaaaata

SEQ ID NO: 306329 - DNA, 15 bp, Homo sapiens
ttcaaatctcaaaat

SEQ ID NO: 306330 - DNA, 15 bp, Homo sapiens
attcaaatctcaaaa

SEQ ID NO: 306331 - DNA, 15 bp, Homo sapiens
tattcaaatctcaaa

SEQ ID NO: 306332 - DNA, 15 bp, Homo sapiens
ttattcaaatctcaa

SEQ ID NO: 306333 - DNA, 15 bp, Homo sapiens
gttattcaaatctca

SEQ ID NO: 306334 - DNA, 15 bp, Homo sapiens
tgttattcaaatctc

SEQ ID NO: 306335 - DNA, 15 bp, Homo sapiens
atgttattcaaatct

SEQ ID NO: 306336 - DNA, 15 bp, Homo sapiens
catgttattcaaatc

SEQ ID NO: 306337 - DNA, 15 bp, Homo sapiens
gcatgttattcaaat

SEQ ID NO: 306338 - DNA, 15 bp, Homo sapiens
agcatgttattcaaa

SEQ ID NO: 306339 - DNA, 15 bp, Homo sapiens
gagcatgttattcaa

SEQ ID NO: 306340 - DNA, 15 bp, Homo sapiens
ggagcatgttattca

SEQ ID NO: 306341 - DNA, 15 bp, Homo sapiens
tggagcatgttattc

SEQ ID NO: 306342 - DNA, 15 bp, Homo sapiens
ttggagcatgttatt

SEQ ID NO: 306343 - DNA, 15 bp, Homo sapiens
cttggagcatgttat

SEQ ID NO: 306344 - DNA, 15 bp, Homo sapiens
ccttggagcatgtta

SEQ ID NO: 306345 - DNA, 15 bp, Homo sapiens
tccttggagcatgtt

SEQ ID NO: 306346 - DNA, 15 bp, Homo sapiens
ctccttggagcatgt

SEQ ID NO: 306347 - DNA, 15 bp, Homo sapiens
tctccttggagcatg

SEQ ID NO: 306348 - DNA, 15 bp, Homo sapiens
ttctccttggagcat

SEQ ID NO: 306349 - DNA, 15 bp, Homo sapiens
gttctccttggagca

SEQ ID NO: 306350 - DNA, 15 bp, Homo sapiens
agttctccttggagc

SEQ ID NO: 306351 - DNA, 15 bp, Homo sapiens
gagttctccttggag

SEQ ID NO: 306352 - DNA, 15 bp, Homo sapiens
tgagttctccttgga

SEQ ID NO: 306353 - DNA, 15 bp, Homo sapiens
atgagttctccttgg

SEQ ID NO: 306354 - DNA, 15 bp, Homo sapiens
tatgagttctccttg

SEQ ID NO: 306355 - DNA, 15 bp, Homo sapiens
atatgagttctcctt

SEQ ID NO: 306356 - DNA, 15 bp, Homo sapiens
catatgagttctcct

SEQ ID NO: 306357 - DNA, 15 bp, Homo sapiens
acatatgagttctcc

SEQ ID NO: 306358 - DNA, 15 bp, Homo sapiens
gacatatgagttctc

SEQ ID NO: 306359 - DNA, 15 bp, Homo sapiens
ggacatatgagttct

SEQ ID NO: 306360 - DNA, 15 bp, Homo sapiens
cggacatatgagttc

SEQ ID NO: 306361 - DNA, 15 bp, Homo sapiens
acggacatatgagtt

SEQ ID NO: 306362 - DNA, 15 bp, Homo sapiens
gacggacatatgagt

SEQ ID NO: 306363 - DNA, 15 bp, Homo sapiens
agacggacatatgag

SEQ ID NO: 306364 - DNA, 15 bp, Homo sapiens
cagacggacatatga

SEQ ID NO: 306365 - DNA, 15 bp, Homo sapiens
acagacggacatatg

SEQ ID NO: 306366 - DNA, 15 bp, Homo sapiens
gacagacggacatat

SEQ ID NO: 306367 - DNA, 15 bp, Homo sapiens
agacagacggacata

SEQ ID NO: 306368 - DNA, 15 bp, Homo sapiens
gagacagacggacat

SEQ ID NO: 306369 - DNA, 15 bp, Homo sapiens
tgagacagacggaca

SEQ ID NO: 306370 - DNA, 15 bp, Homo sapiens
atgagacagacggac

SEQ ID NO: 306371 - DNA, 15 bp, Homo sapiens
aatgagacagacgga

SEQ ID NO: 306372 - DNA, 15 bp, Homo sapiens
gaatgagacagacgg

SEQ ID NO: 306373 - DNA, 15 bp, Homo sapiens
agaatgagacagacg

SEQ ID NO: 306374 - DNA, 15 bp, Homo sapiens
gagaatgagacagac

SEQ ID NO: 306375 - DNA, 15 bp, Homo sapiens
agagaatgagacaga

SEQ ID NO: 306376 - DNA, 15 bp, Homo sapiens
aagagaatgagacag

SEQ ID NO: 306377 - DNA, 15 bp, Homo sapiens
aaagagaatgagaca

SEQ ID NO: 306378 - DNA, 15 bp, Homo sapiens
aaaagagaatgagac

SEQ ID NO: 306379 - DNA, 15 bp, Homo sapiens
caaaagagaatgaga

SEQ ID NO: 306380 - DNA, 15 bp, Homo sapiens
ccaaaagagaatgag

SEQ ID NO: 306381 - DNA, 15 bp, Homo sapiens
cccaaaagagaatga

SEQ ID NO: 306382 - DNA, 15 bp, Homo sapiens
tcccaaaagagaatg

SEQ ID NO: 306383 - DNA, 15 bp, Homo sapiens
ttcccaaaagagaat

SEQ ID NO: 306384 - DNA, 15 bp, Homo sapiens
attcccaaaagagaa

SEQ ID NO: 306385 - DNA, 15 bp, Homo sapiens
cattcccaaaagaga

SEQ ID NO: 306386 - DNA, 15 bp, Homo sapiens
acattcccaaaagag

SEQ ID NO: 306387 - DNA, 15 bp, Homo sapiens
tacattcccaaaaga

SEQ ID NO: 306388 - DNA, 15 bp, Homo sapiens
atacattcccaaaag

SEQ ID NO: 306389 - DNA, 15 bp, Homo sapiens
gatacattcccaaaa

SEQ ID NO: 306390 - DNA, 15 bp, Homo sapiens
ggatacattcccaaa

SEQ ID NO: 306391 - DNA, 15 bp, Homo sapiens
gggatacattcccaa

SEQ ID NO: 306392 - DNA, 15 bp, Homo sapiens
ggggatacattccca

SEQ ID NO: 306393 - DNA, 15 bp, Homo sapiens
tggggatacattccc

SEQ ID NO: 306394 - DNA, 15 bp, Homo sapiens
ttggggatacattcc

SEQ ID NO: 306395 - DNA, 15 bp, Homo sapiens
cttggggatacattc

SEQ ID NO: 306396 - DNA, 15 bp, Homo sapiens
ccttggggatacatt

SEQ ID NO: 306397 - DNA, 15 bp, Homo sapiens
accttggggatacat

SEQ ID NO: 306398 - DNA, 15 bp, Homo sapiens
taccttggggataca

SEQ ID NO: 306399 - DNA, 15 bp, Homo sapiens
ctaccttggggatac

SEQ ID NO: 306400 - DNA, 15 bp, Homo sapiens
cctaccttggggata

SEQ ID NO: 306401 - DNA, 15 bp, Homo sapiens
acctaccttggggat

SEQ ID NO: 306402 - DNA, 15 bp, Homo sapiens
gacctaccttgggga

SEQ ID NO: 306403 - DNA, 15 bp, Homo sapiens
tgacctaccttgggg

SEQ ID NO: 306404 - DNA, 15 bp, Homo sapiens
ttgacctaccttggg

SEQ ID NO: 306405 - DNA, 15 bp, Homo sapiens
attgacctaccttgg

SEQ ID NO: 306406 - DNA, 15 bp, Homo sapiens
cattgacctaccttg

SEQ ID NO: 306407 - DNA, 15 bp, Homo sapiens
ccattgacctacctt

SEQ ID NO: 306408 - DNA, 15 bp, Homo sapiens
cccattgacctacct

SEQ ID NO: 306409 - DNA, 15 bp, Homo sapiens
gcccattgacctacc

SEQ ID NO: 306410 - DNA, 15 bp, Homo sapiens
agcccattgacctac

SEQ ID NO: 306411 - DNA, 15 bp, Homo sapiens
cagcccattgaccta

SEQ ID NO: 306412 - DNA, 15 bp, Homo sapiens
acagcccattgacct

SEQ ID NO: 306413 - DNA, 15 bp, Homo sapiens
cacagcccattgacc

SEQ ID NO: 306414 - DNA, 15 bp, Homo sapiens
gcacagcccattgac

SEQ ID NO: 306415 - DNA, 15 bp, Homo sapiens
agcacagcccattga

SEQ ID NO: 306416 - DNA, 15 bp, Homo sapiens
cagcacagcccattg

SEQ ID NO: 306417 - DNA, 15 bp, Homo sapiens
gcagcacagcccatt

SEQ ID NO: 306418 - DNA, 15 bp, Homo sapiens
ggcagcacagcccat

SEQ ID NO: 306419 - DNA, 15 bp, Homo sapiens
aggcagcacagccca

SEQ ID NO: 306420 - DNA, 15 bp, Homo sapiens
gaggcagcacagccc

SEQ ID NO: 306421 - DNA, 15 bp, Homo sapiens
agaggcagcacagcc

SEQ ID NO: 306422 - DNA, 15 bp, Homo sapiens
cagaggcagcacagc

SEQ ID NO: 306423 - DNA, 15 bp, Homo sapiens
acagaggcagcacag

SEQ ID NO: 306424 - DNA, 15 bp, Homo sapiens
aacagaggcagcaca

SEQ ID NO: 306425 - DNA, 15 bp, Homo sapiens
aaacagaggcagcac

SEQ ID NO: 306426 - DNA, 15 bp, Homo sapiens
caaacagaggcagca

SEQ ID NO: 306427 - DNA, 15 bp, Homo sapiens
acaaacagaggcagc

SEQ ID NO: 306428 - DNA, 15 bp, Homo sapiens
cacaaacagaggcag

SEQ ID NO: 306429 - DNA, 15 bp, Homo sapiens
acacaaacagaggca

SEQ ID NO: 306430 - DNA, 15 bp, Homo sapiens
cacacaaacagaggc

SEQ ID NO: 306431 - DNA, 15 bp, Homo sapiens
acacacaaacagagg

SEQ ID NO: 306432 - DNA, 15 bp, Homo sapiens
tacacacaaacagag

SEQ ID NO: 306433 - DNA, 15 bp, Homo sapiens
atacacacaaacaga

SEQ ID NO: 306434 - DNA, 15 bp, Homo sapiens
catacacacaaacag

SEQ ID NO: 306435 - DNA, 15 bp, Homo sapiens
acatacacacaaaca

SEQ ID NO: 306436 - DNA, 15 bp, Homo sapiens
aacatacacacaaac

SEQ ID NO: 306437 - DNA, 15 bp, Homo sapiens
aaacatacacacaaa

SEQ ID NO: 306438 - DNA, 15 bp, Homo sapiens
aaaacatacacacaa

SEQ ID NO: 306439 - DNA, 15 bp, Homo sapiens
aaaaacatacacaca

SEQ ID NO: 306440 - DNA, 15 bp, Homo sapiens
aaaaaacatacacac

SEQ ID NO: 306441 - DNA, 15 bp, Homo sapiens
aaaaaaacatacaca

SEQ ID NO: 306442 - DNA, 15 bp, Homo sapiens
caaaaaaacatacac

SEQ ID NO: 306443 - DNA, 15 bp, Homo sapiens
acaaaaaaacataca

SEQ ID NO: 306444 - DNA, 15 bp, Homo sapiens
aacaaaaaaacatac

SEQ ID NO: 306445 - DNA, 15 bp, Homo sapiens
aaacaaaaaaacata

SEQ ID NO: 306446 - DNA, 15 bp, Homo sapiens
aaaacaaaaaaacat

SEQ ID NO: 306447 - DNA, 15 bp, Homo sapiens
cacaaaaacaaaaac

SEQ ID NO: 306448 - DNA, 15 bp, Homo sapiens
acacaaaaacaaaaa

SEQ ID NO: 306449 - DNA, 15 bp, Homo sapiens
aacacaaaaacaaaa

SEQ ID NO: 306450 - DNA, 15 bp, Homo sapiens
aaacacaaaaacaaa

SEQ ID NO: 306451 - DNA, 15 bp, Homo sapiens
aaaacacaaaaacaa

SEQ ID NO: 306452 - DNA, 15 bp, Homo sapiens
caaaacacaaaaaca

SEQ ID NO: 306453 - DNA, 15 bp, Homo sapiens
ccaaaacacaaaaac

SEQ ID NO: 306454 - DNA, 15 bp, Homo sapiens
tccaaaacacaaaaa

SEQ ID NO: 306455 - DNA, 15 bp, Homo sapiens
ctccaaaacacaaaa

SEQ ID NO: 306456 - DNA, 15 bp, Homo sapiens
actccaaaacacaaa

SEQ ID NO: 306457 - DNA, 15 bp, Homo sapiens
aactccaaaacacaa

SEQ ID NO: 306458 - DNA, 15 bp, Homo sapiens
aaactccaaaacaca

SEQ ID NO: 306459 - DNA, 15 bp, Homo sapiens
gaaactccaaaacac

SEQ ID NO: 306460 - DNA, 15 bp, Homo sapiens
cgaaactccaaaaca

SEQ ID NO: 306461 - DNA, 15 bp, Homo sapiens
gcgaaactccaaaac

SEQ ID NO: 306462 - DNA, 15 bp, Homo sapiens
ggcgaaactccaaaa

SEQ ID NO: 306463 - DNA, 15 bp, Homo sapiens
gggcgaaactccaaa

SEQ ID NO: 306464 - DNA, 15 bp, Homo sapiens
agggcgaaactccaa

SEQ ID NO: 306465 - DNA, 15 bp, Homo sapiens
aagggcgaaactcca

SEQ ID NO: 306466 - DNA, 15 bp, Homo sapiens
caagggcgaaactcc

SEQ ID NO: 306467 - DNA, 15 bp, Homo sapiens
acaagggcgaaactc

SEQ ID NO: 306468 - DNA, 15 bp, Homo sapiens
aacaagggcgaaact

SEQ ID NO: 306469 - DNA, 15 bp, Homo sapiens
caacaagggcgaaac

SEQ ID NO: 306470 - DNA, 15 bp, Homo sapiens
gcaacaagggcgaaa

SEQ ID NO: 306471 - DNA, 15 bp, Homo sapiens
ggcaacaagggcgaa

SEQ ID NO: 306472 - DNA, 15 bp, Homo sapiens
gggcaacaagggcga

SEQ ID NO: 306473 - DNA, 15 bp, Homo sapiens
tgggcaacaagggcg

SEQ ID NO: 306474 - DNA, 15 bp, Homo sapiens
ctgggcaacaagggc

SEQ ID NO: 306475 - DNA, 15 bp, Homo sapiens
cctgggcaacaaggg

SEQ ID NO: 306476 - DNA, 15 bp, Homo sapiens
gcctgggcaacaagg

SEQ ID NO: 306477 - DNA, 15 bp, Homo sapiens
tatcgcaccactgca

SEQ ID NO: 306478 - DNA, 15 bp, Homo sapiens
atatcgcaccactgc

SEQ ID NO: 306479 - DNA, 15 bp, Homo sapiens
aatatcgcaccactg

SEQ ID NO: 306480 - DNA, 15 bp, Homo sapiens
caatatcgcaccact

SEQ ID NO: 306481 - DNA, 15 bp, Homo sapiens
ccaatatcgcaccac

SEQ ID NO: 306482 - DNA, 15 bp, Homo sapiens
gccaatatcgcacca

SEQ ID NO: 306483 - DNA, 15 bp, Homo sapiens
agccaatatcgcacc

SEQ ID NO: 306484 - DNA, 15 bp, Homo sapiens
gagccaatatcgcac

SEQ ID NO: 306485 - DNA, 15 bp, Homo sapiens
cgagccaatatcgca

SEQ ID NO: 306486 - DNA, 15 bp, Homo sapiens
gcgagccaatatcgc

SEQ ID NO: 306487 - DNA, 15 bp, Homo sapiens
agcgagccaatatcg

SEQ ID NO: 306488 - DNA, 15 bp, Homo sapiens
cagcgagccaatatc

SEQ ID NO: 306489 - DNA, 15 bp, Homo sapiens
gcagcgagccaatat

SEQ ID NO: 306490 - DNA, 15 bp, Homo sapiens
tgcagcgagccaata

SEQ ID NO: 306491 - DNA, 15 bp, Homo sapiens
ttgcagcgagccaat

SEQ ID NO: 306492 - DNA, 15 bp, Homo sapiens
gttgcagcgagccaa

SEQ ID NO: 306493 - DNA, 15 bp, Homo sapiens
ggttgcagcgagcca

SEQ ID NO: 306494 - DNA, 15 bp, Homo sapiens
aggttgcagcgagcc

SEQ ID NO: 306495 - DNA, 15 bp, Homo sapiens
gaggttgcagcgagc

SEQ ID NO: 306496 - DNA, 15 bp, Homo sapiens
agaggttgcagcgag

SEQ ID NO: 306497 - DNA, 15 bp, Homo sapiens
cagaggttgcagcga

SEQ ID NO: 306498 - DNA, 15 bp, Homo sapiens
gcagaggttgcagcg

SEQ ID NO: 306499 - DNA, 15 bp, Homo sapiens
ggcagaggttgcagc

SEQ ID NO: 306500 - DNA, 15 bp, Homo sapiens
cccaggaggcagagg

SEQ ID NO: 306501 - DNA, 15 bp, Homo sapiens
cggggaggctgaggc

SEQ ID NO: 306502 - DNA, 15 bp, Homo sapiens
tcggggaggctgagg

SEQ ID NO: 306503 - DNA, 15 bp, Homo sapiens
atcggggaggctgag

SEQ ID NO: 306504 - DNA, 15 bp, Homo sapiens
tatcggggaggctga

SEQ ID NO: 306505 - DNA, 15 bp, Homo sapiens
ctatcggggaggctg

SEQ ID NO: 306506 - DNA, 15 bp, Homo sapiens
gctatcggggaggct

SEQ ID NO: 306507 - DNA, 15 bp, Homo sapiens
agctatcggggaggc

SEQ ID NO: 306508 - DNA, 15 bp, Homo sapiens
gagctatcggggagg

SEQ ID NO: 306509 - DNA, 15 bp, Homo sapiens
tgagctatcggggag

SEQ ID NO: 306510 - DNA, 15 bp, Homo sapiens
ctgagctatcgggga

SEQ ID NO: 306511 - DNA, 15 bp, Homo sapiens
tctgagctatcgggg

SEQ ID NO: 306512 - DNA, 15 bp, Homo sapiens
atctgagctatcggg

SEQ ID NO: 306513 - DNA, 15 bp, Homo sapiens
aatctgagctatcgg

SEQ ID NO: 306514 - DNA, 15 bp, Homo sapiens
taatctgagctatcg

SEQ ID NO: 306515 - DNA, 15 bp, Homo sapiens
gtaatctgagctatc

SEQ ID NO: 306516 - DNA, 15 bp, Homo sapiens
tgtaatctgagctat

SEQ ID NO: 306517 - DNA, 15 bp, Homo sapiens
ctgtaatctgagcta

SEQ ID NO: 306518 - DNA, 15 bp, Homo sapiens
cctgtaatctgagct

SEQ ID NO: 306519 - DNA, 15 bp, Homo sapiens
gcctgtaatctgagc

SEQ ID NO: 306520 - DNA, 15 bp, Homo sapiens
tgcctgtaatctgag

SEQ ID NO: 306521 - DNA, 15 bp, Homo sapiens
gtgcctgtaatctga

SEQ ID NO: 306522 - DNA, 15 bp, Homo sapiens
agtgcctgtaatctg

SEQ ID NO: 306523 - DNA, 15 bp, Homo sapiens
aagtgcctgtaatct

SEQ ID NO: 306524 - DNA, 15 bp, Homo sapiens
caagtgcctgtaatc

SEQ ID NO: 306525 - DNA, 15 bp, Homo sapiens
gcaagtgcctgtaat

SEQ ID NO: 306526 - DNA, 15 bp, Homo sapiens
ggcaagtgcctgtaa

SEQ ID NO: 306527 - DNA, 15 bp, Homo sapiens
tggcaagtgcctgta

SEQ ID NO: 306528 - DNA, 15 bp, Homo sapiens
gtggcaagtgcctgt

SEQ ID NO: 306529 - DNA, 15 bp, Homo sapiens
ggtggcaagtgcctg

SEQ ID NO: 306530 - DNA, 15 bp, Homo sapiens
tggtggcaagtgcct

SEQ ID NO: 306531 - DNA, 15 bp, Homo sapiens
gtggtggcaagtgcc

SEQ ID NO: 306532 - DNA, 15 bp, Homo sapiens
tgtggtggcaagtgc

SEQ ID NO: 306533 - DNA, 15 bp, Homo sapiens
gtgtggtggcaagtg

SEQ ID NO: 306534 - DNA, 15 bp, Homo sapiens
ggtgtggtggcaagt

SEQ ID NO: 306535 - DNA, 15 bp, Homo sapiens
gggtgtggtggcaag

SEQ ID NO: 306536 - DNA, 15 bp, Homo sapiens
tgggtgtggtggcaa

SEQ ID NO: 306537 - DNA, 15 bp, Homo sapiens
cattagctgggtgtg

SEQ ID NO: 306538 - DNA, 15 bp, Homo sapiens
acattagctgggtgt

SEQ ID NO: 306539 - DNA, 15 bp, Homo sapiens
aacattagctgggtg

SEQ ID NO: 306540 - DNA, 15 bp, Homo sapiens
aaacattagctgggt

SEQ ID NO: 306541 - DNA, 15 bp, Homo sapiens
caaacattagctggg

SEQ ID NO: 306542 - DNA, 15 bp, Homo sapiens
acaaacattagctgg

SEQ ID NO: 306543 - DNA, 15 bp, Homo sapiens
tacaaacattagctg

SEQ ID NO: 306544 - DNA, 15 bp, Homo sapiens
atacaaacattagct

SEQ ID NO: 306545 - DNA, 15 bp, Homo sapiens
aatacaaacattagc

SEQ ID NO: 306546 - DNA, 15 bp, Homo sapiens
aaatacaaacattag

SEQ ID NO: 306547 - DNA, 15 bp, Homo sapiens
aaaatacaaacatta

SEQ ID NO: 306548 - DNA, 15 bp, Homo sapiens
aaaaatacaaacatt

SEQ ID NO: 306549 - DNA, 15 bp, Homo sapiens
taaaaatacaaacat

SEQ ID NO: 306550 - DNA, 15 bp, Homo sapiens
ctaaaaatacaaaca

SEQ ID NO: 306551 - DNA, 15 bp, Homo sapiens
actaaaaatacaaac

SEQ ID NO: 306552 - DNA, 15 bp, Homo sapiens
tcccgtctctactaa

SEQ ID NO: 306553 - DNA, 15 bp, Homo sapiens
atcccgtctctacta

SEQ ID NO: 306554 - DNA, 15 bp, Homo sapiens
gatcccgtctctact

SEQ ID NO: 306555 - DNA, 15 bp, Homo sapiens
cgatcccgtctctac

SEQ ID NO: 306556 - DNA, 15 bp, Homo sapiens
gcgatcccgtctcta

SEQ ID NO: 306557 - DNA, 15 bp, Homo sapiens
ggcgatcccgtctct

SEQ ID NO: 306558 - DNA, 15 bp, Homo sapiens
tggcgatcccgtctc

SEQ ID NO: 306559 - DNA, 15 bp, Homo sapiens
atggcgatcccgtct

SEQ ID NO: 306560 - DNA, 15 bp, Homo sapiens
catggcgatcccgtc

SEQ ID NO: 306561 - DNA, 15 bp, Homo sapiens
acatggcgatcccgt

SEQ ID NO: 306562 - DNA, 15 bp, Homo sapiens
aacatggcgatcccg

SEQ ID NO: 306563 - DNA, 15 bp, Homo sapiens
caacatggcgatccc

SEQ ID NO: 306564 - DNA, 15 bp, Homo sapiens
ccaacatggcgatcc

SEQ ID NO: 306565 - DNA, 15 bp, Homo sapiens
gccaacatggcgatc

SEQ ID NO: 306566 - DNA, 15 bp, Homo sapiens
ggccaacatggcgat

SEQ ID NO: 306567 - DNA, 15 bp, Homo sapiens
tggccaacatggcga

SEQ ID NO: 306568 - DNA, 15 bp, Homo sapiens
ctggccaacatggcg

SEQ ID NO: 306569 - DNA, 15 bp, Homo sapiens
gggtagatcacctga

SEQ ID NO: 306570 - DNA, 15 bp, Homo sapiens
cgggtagatcacctg

SEQ ID NO: 306571 - DNA, 15 bp, Homo sapiens
gcgggtagatcacct

SEQ ID NO: 306572 - DNA, 15 bp, Homo sapiens
ggcgggtagatcacc

SEQ ID NO: 306573 - DNA, 15 bp, Homo sapiens
aggcgggtagatcac

SEQ ID NO: 306574 - DNA, 15 bp, Homo sapiens
gaggcgggtagatca

SEQ ID NO: 306575 - DNA, 15 bp, Homo sapiens
tgaggcgggtagatc

SEQ ID NO: 306576 - DNA, 15 bp, Homo sapiens
ctgaggcgggtagat

SEQ ID NO: 306577 - DNA, 15 bp, Homo sapiens
gctgaggcgggtaga

SEQ ID NO: 306578 - DNA, 15 bp, Homo sapiens
ggctgaggcgggtag

SEQ ID NO: 306579 - DNA, 15 bp, Homo sapiens
aggctgaggcgggta

SEQ ID NO: 306580 - DNA, 15 bp, Homo sapiens
ttgtaatcccagcac

SEQ ID NO: 306581 - DNA, 15 bp, Homo sapiens
cttgtaatcccagca

SEQ ID NO: 306582 - DNA, 15 bp, Homo sapiens
acttgtaatcccagc

SEQ ID NO: 306583 - DNA, 15 bp, Homo sapiens
cacttgtaatcccag

SEQ ID NO: 306584 - DNA, 15 bp, Homo sapiens
acacttgtaatccca

SEQ ID NO: 306585 - DNA, 15 bp, Homo sapiens
cacacttgtaatccc

SEQ ID NO: 306586 - DNA, 15 bp, Homo sapiens
tcacacttgtaatcc

SEQ ID NO: 306587 - DNA, 15 bp, Homo sapiens
ctcacacttgtaatc

SEQ ID NO: 306588 - DNA, 15 bp, Homo sapiens
gctcacacttgtaat

SEQ ID NO: 306589 - DNA, 15 bp, Homo sapiens
ggctcacacttgtaa

SEQ ID NO: 306590 - DNA, 15 bp, Homo sapiens
tggctcacacttgta

SEQ ID NO: 306591 - DNA, 15 bp, Homo sapiens
gtggctcacacttgt

SEQ ID NO: 306592 - DNA, 15 bp, Homo sapiens
agtggctcacacttg

SEQ ID NO: 306593 - DNA, 15 bp, Homo sapiens
cagtggctcacactt

SEQ ID NO: 306594 - DNA, 15 bp, Homo sapiens
gcagtggctcacact

SEQ ID NO: 306595 - DNA, 15 bp, Homo sapiens
aggtgcagtggctca

SEQ ID NO: 306596 - DNA, 15 bp, Homo sapiens
aaggtgcagtggctc

SEQ ID NO: 306597 - DNA, 15 bp, Homo sapiens
gcaaggtgcagtggc

SEQ ID NO: 306598 - DNA, 15 bp, Homo sapiens
ggcaaggtgcagtgg

SEQ ID NO: 306599 - DNA, 15 bp, Homo sapiens
aggcaaggtgcagtg

SEQ ID NO: 306600 - DNA, 15 bp, Homo sapiens
caggcaaggtgcagt

SEQ ID NO: 306601 - DNA, 15 bp, Homo sapiens
acaggcaaggtgcag

SEQ ID NO: 306602 - DNA, 15 bp, Homo sapiens
cacaggcaaggtgca

SEQ ID NO: 306603 - DNA, 15 bp, Homo sapiens
acacaggcaaggtgc

SEQ ID NO: 306604 - DNA, 15 bp, Homo sapiens
cacacaggcaaggtg

SEQ ID NO: 306605 - DNA, 15 bp, Homo sapiens
acacacaggcaaggt

SEQ ID NO: 306606 - DNA, 15 bp, Homo sapiens
tacacacaggcaagg

SEQ ID NO: 306607 - DNA, 15 bp, Homo sapiens
atacacacaggcaag

SEQ ID NO: 306608 - DNA, 15 bp, Homo sapiens
catacacacaggcaa

SEQ ID NO: 306609 - DNA, 15 bp, Homo sapiens
acatacacacaggca

SEQ ID NO: 306610 - DNA, 15 bp, Homo sapiens
aacatacacacaggc

SEQ ID NO: 306611 - DNA, 15 bp, Homo sapiens
aaacatacacacagg

SEQ ID NO: 306612 - DNA, 15 bp, Homo sapiens
aaaacatacacacag

SEQ ID NO: 306613 - DNA, 15 bp, Homo sapiens
caaaaacatacacac

SEQ ID NO: 306614 - DNA, 15 bp, Homo sapiens
acaaaaacatacaca

SEQ ID NO: 306615 - DNA, 15 bp, Homo sapiens
aacaaaaacatacac

SEQ ID NO: 306616 - DNA, 15 bp, Homo sapiens
caacaaaaacataca

SEQ ID NO: 306617 - DNA, 15 bp, Homo sapiens
tcaacaaaaacatac

SEQ ID NO: 306618 - DNA, 15 bp, Homo sapiens
ctcaacaaaaacata

SEQ ID NO: 306619 - DNA, 15 bp, Homo sapiens
cctcaacaaaaacat

SEQ ID NO: 306620 - DNA, 15 bp, Homo sapiens
ccctcaacaaaaaca

SEQ ID NO: 306621 - DNA, 15 bp, Homo sapiens
accctcaacaaaaac

SEQ ID NO: 306622 - DNA, 15 bp, Homo sapiens
caccctcaacaaaaa

SEQ ID NO: 306623 - DNA, 15 bp, Homo sapiens
tcaccctcaacaaaa

SEQ ID NO: 306624 - DNA, 15 bp, Homo sapiens
atcaccctcaacaaa

SEQ ID NO: 306625 - DNA, 15 bp, Homo sapiens
gatcaccctcaacaa

SEQ ID NO: 306626 - DNA, 15 bp, Homo sapiens
agatcaccctcaaca

SEQ ID NO: 306627 - DNA, 15 bp, Homo sapiens
aagatcaccctcaac

SEQ ID NO: 306628 - DNA, 15 bp, Homo sapiens
caagatcaccctcaa

SEQ ID NO: 306629 - DNA, 15 bp, Homo sapiens
acaagatcaccctca

SEQ ID NO: 306630 - DNA, 15 bp, Homo sapiens
tacaagatcaccctc

SEQ ID NO: 306631 - DNA, 15 bp, Homo sapiens
ctacaagatcaccct

SEQ ID NO: 306632 - DNA, 15 bp, Homo sapiens
cctacaagatcaccc

SEQ ID NO: 306633 - DNA, 15 bp, Homo sapiens
tcctacaagatcacc

SEQ ID NO: 306634 - DNA, 15 bp, Homo sapiens
atcctacaagatcac

SEQ ID NO: 306635 - DNA, 15 bp, Homo sapiens
aatcctacaagatca

SEQ ID NO: 306636 - DNA, 15 bp, Homo sapiens
aaatcctacaagatc

SEQ ID NO: 306637 - DNA, 15 bp, Homo sapiens
taaatcctacaagat

SEQ ID NO: 306638 - DNA, 15 bp, Homo sapiens
ttaaatcctacaaga

SEQ ID NO: 306639 - DNA, 15 bp, Homo sapiens
tttaaatcctacaag

SEQ ID NO: 306640 - DNA, 15 bp, Homo sapiens
ctttaaatcctacaa

SEQ ID NO: 306641 - DNA, 15 bp, Homo sapiens
tctttaaatcctaca

SEQ ID NO: 306642 - DNA, 15 bp, Homo sapiens
ttctttaaatcctac

SEQ ID NO: 306643 - DNA, 15 bp, Homo sapiens
cttctttaaatccta

SEQ ID NO: 306644 - DNA, 15 bp, Homo sapiens
ccttctttaaatcct

SEQ ID NO: 306645 - DNA, 15 bp, Homo sapiens
cccttctttaaatcc

SEQ ID NO: 306646 - DNA, 15 bp, Homo sapiens
tcccttctttaaatc

SEQ ID NO: 306647 - DNA, 15 bp, Homo sapiens
ctcccttctttaaat

SEQ ID NO: 306648 - DNA, 15 bp, Homo sapiens
actcccttctttaaa

SEQ ID NO: 306649 - DNA, 15 bp, Homo sapiens
tactcccttctttaa

SEQ ID NO: 306650 - DNA, 15 bp, Homo sapiens
ctactcccttcttta

SEQ ID NO: 306651 - DNA, 15 bp, Homo sapiens
cctactcccttcttt

SEQ ID NO: 306652 - DNA, 15 bp, Homo sapiens
tcctactcccttctt

SEQ ID NO: 306653 - DNA, 15 bp, Homo sapiens
ctcctactcccttct

SEQ ID NO: 306654 - DNA, 15 bp, Homo sapiens
cctcctactcccttc

SEQ ID NO: 306655 - DNA, 15 bp, Homo sapiens
tcctcctactccctt

SEQ ID NO: 306656 - DNA, 15 bp, Homo sapiens
ttcctcctactccct

SEQ ID NO: 306657 - DNA, 15 bp, Homo sapiens
tttcctcctactccc

SEQ ID NO: 306658 - DNA, 15 bp, Homo sapiens
ctttcctcctactcc

SEQ ID NO: 306659 - DNA, 15 bp, Homo sapiens
actttcctcctactc

SEQ ID NO: 306660 - DNA, 15 bp, Homo sapiens
tactttcctcctact

SEQ ID NO: 306661 - DNA, 15 bp, Homo sapiens
ttactttcctcctac

SEQ ID NO: 306662 - DNA, 15 bp, Homo sapiens
attactttcctccta

SEQ ID NO: 306663 - DNA, 15 bp, Homo sapiens
cattactttcctcct

SEQ ID NO: 306664 - DNA, 15 bp, Homo sapiens
tcattactttcctcc

SEQ ID NO: 306665 - DNA, 15 bp, Homo sapiens
atcattactttcctc

SEQ ID NO: 306666 - DNA, 15 bp, Homo sapiens
catcattactttcct

SEQ ID NO: 306667 - DNA, 15 bp, Homo sapiens
gcatcattactttcc

SEQ ID NO: 306668 - DNA, 15 bp, Homo sapiens
tgcatcattactttc

SEQ ID NO: 306669 - DNA, 15 bp, Homo sapiens
gtgcatcattacttt

SEQ ID NO: 306670 - DNA, 15 bp, Homo sapiens
agtgcatcattactt

SEQ ID NO: 306671 - DNA, 15 bp, Homo sapiens
gagtgcatcattact

SEQ ID NO: 306672 - DNA, 15 bp, Homo sapiens
tgagtgcatcattac

SEQ ID NO: 306673 - DNA, 15 bp, Homo sapiens
gtgagtgcatcatta

SEQ ID NO: 306674 - DNA, 15 bp, Homo sapiens
ggtgagtgcatcatt

SEQ ID NO: 306675 - DNA, 15 bp, Homo sapiens
tggtgagtgcatcat

SEQ ID NO: 306676 - DNA, 15 bp, Homo sapiens
ctggtgagtgcatca

SEQ ID NO: 306677 - DNA, 15 bp, Homo sapiens
gctggtgagtgcatc

SEQ ID NO: 306678 - DNA, 15 bp, Homo sapiens
ggctggtgagtgcat

SEQ ID NO: 306679 - DNA, 15 bp, Homo sapiens
tggctggtgagtgca

SEQ ID NO: 306680 - DNA, 15 bp, Homo sapiens
ctggctggtgagtgc

SEQ ID NO: 306681 - DNA, 15 bp, Homo sapiens
actggctggtgagtg

SEQ ID NO: 306682 - DNA, 15 bp, Homo sapiens
aactggctggtgagt

SEQ ID NO: 306683 - DNA, 15 bp, Homo sapiens
aaactggctggtgag

SEQ ID NO: 306684 - DNA, 15 bp, Homo sapiens
aaaactggctggtga

SEQ ID NO: 306685 - DNA, 15 bp, Homo sapiens
gaaaactggctggtg

SEQ ID NO: 306686 - DNA, 15 bp, Homo sapiens
agaaaactggctggt

SEQ ID NO: 306687 - DNA, 15 bp, Homo sapiens
tagaaaactggctgg

SEQ ID NO: 306688 - DNA, 15 bp, Homo sapiens
ctagaaaactggctg

SEQ ID NO: 306689 - DNA, 15 bp, Homo sapiens
gctagaaaactggct

SEQ ID NO: 306690 - DNA, 15 bp, Homo sapiens
ggctagaaaactggc

SEQ ID NO: 306691 - DNA, 15 bp, Homo sapiens
gggctagaaaactgg

SEQ ID NO: 306692 - DNA, 15 bp, Homo sapiens
tgggctagaaaactg

SEQ ID NO: 306693 - DNA, 15 bp, Homo sapiens
atgggctagaaaact

SEQ ID NO: 306694 - DNA, 15 bp, Homo sapiens
aatgggctagaaaac

SEQ ID NO: 306695 - DNA, 15 bp, Homo sapiens
aaatgggctagaaaa

SEQ ID NO: 306696 - DNA, 15 bp, Homo sapiens
aaaatgggctagaaa

SEQ ID NO: 306697 - DNA, 15 bp, Homo sapiens
aaaaatgggctagaa

SEQ ID NO: 306698 - DNA, 15 bp, Homo sapiens
taaaaatgggctaga

SEQ ID NO: 306699 - DNA, 15 bp, Homo sapiens
ataaaaatgggctag

SEQ ID NO: 306700 - DNA, 15 bp, Homo sapiens
aataaaaatgggcta

SEQ ID NO: 306701 - DNA, 15 bp, Homo sapiens
taataaaaatgggct

SEQ ID NO: 306702 - DNA, 15 bp, Homo sapiens
gtaataaaaatgggc

SEQ ID NO: 306703 - DNA, 15 bp, Homo sapiens
ggtaataaaaatggg

SEQ ID NO: 306704 - DNA, 15 bp, Homo sapiens
aggtaataaaaatgg

SEQ ID NO: 306705 - DNA, 15 bp, Homo sapiens
taggtaataaaaatg

SEQ ID NO: 306706 - DNA, 15 bp, Homo sapiens
gtaggtaataaaaat

SEQ ID NO: 306707 - DNA, 15 bp, Homo sapiens
agtaggtaataaaaa

SEQ ID NO: 306708 - DNA, 15 bp, Homo sapiens
cagtaggtaataaaa

SEQ ID NO: 306709 - DNA, 15 bp, Homo sapiens
acagtaggtaataaa

SEQ ID NO: 306710 - DNA, 15 bp, Homo sapiens
cacagtaggtaataa

SEQ ID NO: 306711 - DNA, 15 bp, Homo sapiens
acacagtaggtaata

SEQ ID NO: 306712 - DNA, 15 bp, Homo sapiens
cacacagtaggtaat

SEQ ID NO: 306713 - DNA, 15 bp, Homo sapiens
gcacacagtaggtaa

SEQ ID NO: 306714 - DNA, 15 bp, Homo sapiens
agcacacagtaggta

SEQ ID NO: 306715 - DNA, 15 bp, Homo sapiens
gagcacacagtaggt

SEQ ID NO: 306716 - DNA, 15 bp, Homo sapiens
tgagcacacagtagg

SEQ ID NO: 306717 - DNA, 15 bp, Homo sapiens
ctgagcacacagtag

SEQ ID NO: 306718 - DNA, 15 bp, Homo sapiens
gctgagcacacagta

SEQ ID NO: 306719 - DNA, 15 bp, Homo sapiens
tgctgagcacacagt

SEQ ID NO: 306720 - DNA, 15 bp, Homo sapiens
gtgctgagcacacag

SEQ ID NO: 306721 - DNA, 15 bp, Homo sapiens
agtgctgagcacaca

SEQ ID NO: 306722 - DNA, 15 bp, Homo sapiens
cagtgctgagcacac

SEQ ID NO: 306723 - DNA, 15 bp, Homo sapiens
ccagtgctgagcaca

SEQ ID NO: 306724 - DNA, 15 bp, Homo sapiens
cccagtgctgagcac

SEQ ID NO: 306725 - DNA, 15 bp, Homo sapiens
tcccagtgctgagca

SEQ ID NO: 306726 - DNA, 15 bp, Homo sapiens
atcccagtgctgagc

SEQ ID NO: 306727 - DNA, 15 bp, Homo sapiens
catcccagtgctgag

SEQ ID NO: 306728 - DNA, 15 bp, Homo sapiens
tcatcccagtgctga

SEQ ID NO: 306729 - DNA, 15 bp, Homo sapiens
ctcatcccagtgctg

SEQ ID NO: 306730 - DNA, 15 bp, Homo sapiens
tctcatcccagtgct

SEQ ID NO: 306731 - DNA, 15 bp, Homo sapiens
ctctcatcccagtgc

SEQ ID NO: 306732 - DNA, 15 bp, Homo sapiens
cctctcatcccagtg

SEQ ID NO: 306733 - DNA, 15 bp, Homo sapiens
tcctctcatcccagt

SEQ ID NO: 306734 - DNA, 15 bp, Homo sapiens
ttcctctcatcccag

SEQ ID NO: 306735 - DNA, 15 bp, Homo sapiens
gttcctctcatccca

SEQ ID NO: 306736 - DNA, 15 bp, Homo sapiens
tgttcctctcatccc

SEQ ID NO: 306737 - DNA, 15 bp, Homo sapiens
gtgttcctctcatcc

SEQ ID NO: 306738 - DNA, 15 bp, Homo sapiens
tgtgttcctctcatc

SEQ ID NO: 306739 - DNA, 15 bp, Homo sapiens
atgtgttcctctcat

SEQ ID NO: 306740 - DNA, 15 bp, Homo sapiens
catgtgttcctctca

SEQ ID NO: 306741 - DNA, 15 bp, Homo sapiens
gcatgtgttcctctc

SEQ ID NO: 306742 - DNA, 15 bp, Homo sapiens
ggcatgtgttcctct

SEQ ID NO: 306743 - DNA, 15 bp, Homo sapiens
cggcatgtgttcctc

SEQ ID NO: 306744 - DNA, 15 bp, Homo sapiens
ccggcatgtgttcct

SEQ ID NO: 306745 - DNA, 15 bp, Homo sapiens
cccggcatgtgttcc

SEQ ID NO: 306746 - DNA, 15 bp, Homo sapiens
gcccggcatgtgttc

SEQ ID NO: 306747 - DNA, 15 bp, Homo sapiens
ggcccggcatgtgtt

SEQ ID NO: 306748 - DNA, 15 bp, Homo sapiens
tggcccggcatgtgt

SEQ ID NO: 306749 - DNA, 15 bp, Homo sapiens
gtggcccggcatgtg

SEQ ID NO: 306750 - DNA, 15 bp, Homo sapiens
ggtggcccggcatgt

SEQ ID NO: 306751 - DNA, 15 bp, Homo sapiens
gggtggcccggcatg

SEQ ID NO: 306752 - DNA, 15 bp, Homo sapiens
agggtggcccggcat

SEQ ID NO: 306753 - DNA, 15 bp, Homo sapiens
cagggtggcccggca

SEQ ID NO: 306754 - DNA, 15 bp, Homo sapiens
acagggtggcccggc

SEQ ID NO: 306755 - DNA, 15 bp, Homo sapiens
tacagggtggcccgg

SEQ ID NO: 306756 - DNA, 15 bp, Homo sapiens
atacagggtggcccg

SEQ ID NO: 306757 - DNA, 15 bp, Homo sapiens
gatacagggtggccc

SEQ ID NO: 306758 - DNA, 15 bp, Homo sapiens
ggatacagggtggcc

SEQ ID NO: 306759 - DNA, 15 bp, Homo sapiens
aggatacagggtggc

SEQ ID NO: 306760 - DNA, 15 bp, Homo sapiens
taggatacagggtgg

SEQ ID NO: 306761 - DNA, 15 bp, Homo sapiens
gtaggatacagggtg

SEQ ID NO: 306762 - DNA, 15 bp, Homo sapiens
agtaggatacagggt

SEQ ID NO: 306763 - DNA, 15 bp, Homo sapiens
cagtaggatacaggg

SEQ ID NO: 306764 - DNA, 15 bp, Homo sapiens
ccagtaggatacagg

SEQ ID NO: 306765 - DNA, 15 bp, Homo sapiens
accagtaggatacag

SEQ ID NO: 306766 - DNA, 15 bp, Homo sapiens
taccagtaggataca

SEQ ID NO: 306767 - DNA, 15 bp, Homo sapiens
gtaccagtaggatac

SEQ ID NO: 306768 - DNA, 15 bp, Homo sapiens
agtaccagtaggata

SEQ ID NO: 306769 - DNA, 15 bp, Homo sapiens
cagtaccagtaggat

SEQ ID NO: 306770 - DNA, 15 bp, Homo sapiens
acagtaccagtagga

SEQ ID NO: 306771 - DNA, 15 bp, Homo sapiens
cacagtaccagtagg

SEQ ID NO: 306772 - DNA, 15 bp, Homo sapiens
tcacagtaccagtag

SEQ ID NO: 306773 - DNA, 15 bp, Homo sapiens
atcacagtaccagta

SEQ ID NO: 306774 - DNA, 15 bp, Homo sapiens
aatcacagtaccagt

SEQ ID NO: 306775 - DNA, 15 bp, Homo sapiens
aaatcacagtaccag

SEQ ID NO: 306776 - DNA, 15 bp, Homo sapiens
gaaatcacagtacca

SEQ ID NO: 306777 - DNA, 15 bp, Homo sapiens
ggaaatcacagtacc

SEQ ID NO: 306778 - DNA, 15 bp, Homo sapiens
tggaaatcacagtac

SEQ ID NO: 306779 - DNA, 15 bp, Homo sapiens
ttggaaatcacagta

SEQ ID NO: 306780 - DNA, 15 bp, Homo sapiens
gttggaaatcacagt

SEQ ID NO: 306781 - DNA, 15 bp, Homo sapiens
tgttggaaatcacag

SEQ ID NO: 306782 - DNA, 15 bp, Homo sapiens
gtgttggaaatcaca

SEQ ID NO: 306783 - DNA, 15 bp, Homo sapiens
ggtgttggaaatcac

SEQ ID NO: 306784 - DNA, 15 bp, Homo sapiens
tggtgttggaaatca

SEQ ID NO: 306785 - DNA, 15 bp, Homo sapiens
atggtgttggaaatc

SEQ ID NO: 306786 - DNA, 15 bp, Homo sapiens
gatggtgttggaaat

SEQ ID NO: 306787 - DNA, 15 bp, Homo sapiens
ggatggtgttggaaa

SEQ ID NO: 306788 - DNA, 15 bp, Homo sapiens
gggatggtgttggaa

SEQ ID NO: 306789 - DNA, 15 bp, Homo sapiens
ggggatggtgttgga

SEQ ID NO: 306790 - DNA, 15 bp, Homo sapiens
aggggatggtgttgg

SEQ ID NO: 306791 - DNA, 15 bp, Homo sapiens
caggggatggtgttg

SEQ ID NO: 306792 - DNA, 15 bp, Homo sapiens
acaggggatggtgtt

SEQ ID NO: 306793 - DNA, 15 bp, Homo sapiens
aacaggggatggtgt

SEQ ID NO: 306794 - DNA, 15 bp, Homo sapiens
gaacaggggatggtg

SEQ ID NO: 306795 - DNA, 15 bp, Homo sapiens
agaacaggggatggt

SEQ ID NO: 306796 - DNA, 15 bp, Homo sapiens
aagaacaggggatgg

SEQ ID NO: 306797 - DNA, 15 bp, Homo sapiens
aaagaacaggggatg

SEQ ID NO: 306798 - DNA, 15 bp, Homo sapiens
caaagaacaggggat

SEQ ID NO: 306799 - DNA, 15 bp, Homo sapiens
tcaaagaacagggga

SEQ ID NO: 306800 - DNA, 15 bp, Homo sapiens
gtcaaagaacagggg

SEQ ID NO: 306801 - DNA, 15 bp, Homo sapiens
agtcaaagaacaggg

SEQ ID NO: 306802 - DNA, 15 bp, Homo sapiens
cagtcaaagaacagg

SEQ ID NO: 306803 - DNA, 15 bp, Homo sapiens
tcagtcaaagaacag

SEQ ID NO: 306804 - DNA, 15 bp, Homo sapiens
atcagtcaaagaaca

SEQ ID NO: 306805 - DNA, 15 bp, Homo sapiens
catcagtcaaagaac

SEQ ID NO: 306806 - DNA, 15 bp, Homo sapiens
tcatcagtcaaagaa

SEQ ID NO: 306807 - DNA, 15 bp, Homo sapiens
ttcatcagtcaaaga

SEQ ID NO: 306808 - DNA, 15 bp, Homo sapiens
tttcatcagtcaaag

SEQ ID NO: 306809 - DNA, 15 bp, Homo sapiens
atttcatcagtcaaa

SEQ ID NO: 306810 - DNA, 15 bp, Homo sapiens
gatttcatcagtcaa

SEQ ID NO: 306811 - DNA, 15 bp, Homo sapiens
cgatttcatcagtca

SEQ ID NO: 306812 - DNA, 15 bp, Homo sapiens
ccgatttcatcagtc

SEQ ID NO: 306813 - DNA, 15 bp, Homo sapiens
gccgatttcatcagt

SEQ ID NO: 306814 - DNA, 15 bp, Homo sapiens
tgccgatttcatcag

SEQ ID NO: 306815 - DNA, 15 bp, Homo sapiens
atgccgatttcatca

SEQ ID NO: 306816 - DNA, 15 bp, Homo sapiens
tatgccgatttcatc

SEQ ID NO: 306817 - DNA, 15 bp, Homo sapiens
atatgccgatttcat

SEQ ID NO: 306818 - DNA, 15 bp, Homo sapiens
catatgccgatttca

SEQ ID NO: 306819 - DNA, 15 bp, Homo sapiens
tcatatgccgatttc

SEQ ID NO: 306820 - DNA, 15 bp, Homo sapiens
atcatatgccgattt

SEQ ID NO: 306821 - DNA, 15 bp, Homo sapiens
tatcatatgccgatt

SEQ ID NO: 306822 - DNA, 15 bp, Homo sapiens
ttatcatatgccgat

SEQ ID NO: 306823 - DNA, 15 bp, Homo sapiens
cttatcatatgccga

SEQ ID NO: 306824 - DNA, 15 bp, Homo sapiens
ccttatcatatgccg

SEQ ID NO: 306825 - DNA, 15 bp, Homo sapiens
cccttatcatatgcc

SEQ ID NO: 306826 - DNA, 15 bp, Homo sapiens
tcccttatcatatgc

SEQ ID NO: 306827 - DNA, 15 bp, Homo sapiens
gtcccttatcatatg

SEQ ID NO: 306828 - DNA, 15 bp, Homo sapiens
ggtcccttatcatat

SEQ ID NO: 306829 - DNA, 15 bp, Homo sapiens
tggtcccttatcata

SEQ ID NO: 306830 - DNA, 15 bp, Homo sapiens
atggtcccttatcat

SEQ ID NO: 306831 - DNA, 15 bp, Homo sapiens
catggtcccttatca

SEQ ID NO: 306832 - DNA, 15 bp, Homo sapiens
ccatggtcccttatc

SEQ ID NO: 306833 - DNA, 15 bp, Homo sapiens
accatggtcccttat

SEQ ID NO: 306834 - DNA, 15 bp, Homo sapiens
gaccatggtccctta

SEQ ID NO: 306835 - DNA, 15 bp, Homo sapiens
tgaccatggtccctt

SEQ ID NO: 306836 - DNA, 15 bp, Homo sapiens
atgaccatggtccct

SEQ ID NO: 306837 - DNA, 15 bp, Homo sapiens
aatgaccatggtccc

SEQ ID NO: 306838 - DNA, 15 bp, Homo sapiens
caatgaccatggtcc

SEQ ID NO: 306839 - DNA, 15 bp, Homo sapiens
ccaatgaccatggtc

SEQ ID NO: 306840 - DNA, 15 bp, Homo sapiens
tccaatgaccatggt

SEQ ID NO: 306841 - DNA, 15 bp, Homo sapiens
ttccaatgaccatgg

SEQ ID NO: 306842 - DNA, 15 bp, Homo sapiens
gttccaatgaccatg

SEQ ID NO: 306843 - DNA, 15 bp, Homo sapiens
ggttccaatgaccat

SEQ ID NO: 306844 - DNA, 15 bp, Homo sapiens
tggttccaatgacca

SEQ ID NO: 306845 - DNA, 15 bp, Homo sapiens
atggttccaatgacc

SEQ ID NO: 306846 - DNA, 15 bp, Homo sapiens
catggttccaatgac

SEQ ID NO: 306847 - DNA, 15 bp, Homo sapiens
tcatggttccaatga

SEQ ID NO: 306848 - DNA, 15 bp, Homo sapiens
atcatggttccaatg

SEQ ID NO: 306849 - DNA, 15 bp, Homo sapiens
aatcatggttccaat

SEQ ID NO: 306850 - DNA, 15 bp, Homo sapiens
caatcatggttccaa

SEQ ID NO: 306851 - DNA, 15 bp, Homo sapiens
ccaatcatggttcca

SEQ ID NO: 306852 - DNA, 15 bp, Homo sapiens
tccaatcatggttcc

SEQ ID NO: 306853 - DNA, 15 bp, Homo sapiens
ttccaatcatggttc

SEQ ID NO: 306854 - DNA, 15 bp, Homo sapiens
tttccaatcatggtt

SEQ ID NO: 306855 - DNA, 15 bp, Homo sapiens
ttttccaatcatggt

SEQ ID NO: 306856 - DNA, 15 bp, Homo sapiens
gttttccaatcatgg

SEQ ID NO: 306857 - DNA, 15 bp, Homo sapiens
agttttccaatcatg

SEQ ID NO: 306858 - DNA, 15 bp, Homo sapiens
tagttttccaatcat

SEQ ID NO: 306859 - DNA, 15 bp, Homo sapiens
atagttttccaatca

SEQ ID NO: 306860 - DNA, 15 bp, Homo sapiens
tatagttttccaatc

SEQ ID NO: 306861 - DNA, 15 bp, Homo sapiens
ttatagttttccaat

SEQ ID NO: 306862 - DNA, 15 bp, Homo sapiens
tttatagttttccaa

SEQ ID NO: 306863 - DNA, 15 bp, Homo sapiens
gtttatagttttcca

SEQ ID NO: 306864 - DNA, 15 bp, Homo sapiens
agtttatagttttcc

SEQ ID NO: 306865 - DNA, 15 bp, Homo sapiens
aagtttatagttttc

SEQ ID NO: 306866 - DNA, 15 bp, Homo sapiens
caagtttatagtttt

SEQ ID NO: 306867 - DNA, 15 bp, Homo sapiens
tcaagtttatagttt

SEQ ID NO: 306868 - DNA, 15 bp, Homo sapiens
atcaagtttatagtt

SEQ ID NO: 306869 - DNA, 15 bp, Homo sapiens
aatcaagtttatagt

SEQ ID NO: 306870 - DNA, 15 bp, Homo sapiens
gaatcaagtttatag

SEQ ID NO: 306871 - DNA, 15 bp, Homo sapiens
agaatcaagtttata

SEQ ID NO: 306872 - DNA, 15 bp, Homo sapiens
tagaatcaagtttat

SEQ ID NO: 306873 - DNA, 15 bp, Homo sapiens
atagaatcaagttta

SEQ ID NO: 306874 - DNA, 15 bp, Homo sapiens
aatagaatcaagttt

SEQ ID NO: 306875 - DNA, 15 bp, Homo sapiens
caatagaatcaagtt

SEQ ID NO: 306876 - DNA, 15 bp, Homo sapiens
acaatagaatcaagt

SEQ ID NO: 306877 - DNA, 15 bp, Homo sapiens
gacaatagaatcaag

SEQ ID NO: 306878 - DNA, 15 bp, Homo sapiens
agacaatagaatcaa

SEQ ID NO: 306879 - DNA, 15 bp, Homo sapiens
cagacaatagaatca

SEQ ID NO: 306880 - DNA, 15 bp, Homo sapiens
acagacaatagaatc

SEQ ID NO: 306881 - DNA, 15 bp, Homo sapiens
tacagacaatagaat

SEQ ID NO: 306882 - DNA, 15 bp, Homo sapiens
atacagacaatagaa

SEQ ID NO: 306883 - DNA, 15 bp, Homo sapiens
gatacagacaataga

SEQ ID NO: 306884 - DNA, 15 bp, Homo sapiens
tgatacagacaatag

SEQ ID NO: 306885 - DNA, 15 bp, Homo sapiens
ctgatacagacaata

SEQ ID NO: 306886 - DNA, 15 bp, Homo sapiens
tctgatacagacaat

SEQ ID NO: 306887 - DNA, 15 bp, Homo sapiens
ttctgatacagacaa

SEQ ID NO: 306888 - DNA, 15 bp, Homo sapiens
gttctgatacagaca

SEQ ID NO: 306889 - DNA, 15 bp, Homo sapiens
agttctgatacagac

SEQ ID NO: 306890 - DNA, 15 bp, Homo sapiens
cagttctgatacaga

SEQ ID NO: 306891 - DNA, 15 bp, Homo sapiens
ccagttctgatacag

SEQ ID NO: 306892 - DNA, 15 bp, Homo sapiens
gccagttctgataca

SEQ ID NO: 306893 - DNA, 15 bp, Homo sapiens
ggccagttctgatac

SEQ ID NO: 306894 - DNA, 15 bp, Homo sapiens
aggccagttctgata

SEQ ID NO: 306895 - DNA, 15 bp, Homo sapiens
aaggccagttctgat

SEQ ID NO: 306896 - DNA, 15 bp, Homo sapiens
taaggccagttctga

SEQ ID NO: 306897 - DNA, 15 bp, Homo sapiens
ctaaggccagttctg

SEQ ID NO: 306898 - DNA, 15 bp, Homo sapiens
tctaaggccagttct

SEQ ID NO: 306899 - DNA, 15 bp, Homo sapiens
gtctaaggccagttc

SEQ ID NO: 306900 - DNA, 15 bp, Homo sapiens
ggtctaaggccagtt

SEQ ID NO: 306901 - DNA, 15 bp, Homo sapiens
aggtctaaggccagt

SEQ ID NO: 306902 - DNA, 15 bp, Homo sapiens
aaggtctaaggccag

SEQ ID NO: 306903 - DNA, 15 bp, Homo sapiens
taaggtctaaggcca

SEQ ID NO: 306904 - DNA, 15 bp, Homo sapiens
ttaaggtctaaggcc

SEQ ID NO: 306905 - DNA, 15 bp, Homo sapiens
tttaaggtctaaggc

SEQ ID NO: 306906 - DNA, 15 bp, Homo sapiens
gtttaaggtctaagg

SEQ ID NO: 306907 - DNA, 15 bp, Homo sapiens
ggtttaaggtctaag

SEQ ID NO: 306908 - DNA, 15 bp, Homo sapiens
aggtttaaggtctaa

SEQ ID NO: 306909 - DNA, 15 bp, Homo sapiens
aaggtttaaggtcta

SEQ ID NO: 306910 - DNA, 15 bp, Homo sapiens
taaggtttaaggtct

SEQ ID NO: 306911 - DNA, 15 bp, Homo sapiens
ttaaggtttaaggtc

SEQ ID NO: 306912 - DNA, 15 bp, Homo sapiens
tttaaggtttaaggt

SEQ ID NO: 306913 - DNA, 15 bp, Homo sapiens
ttttaaggtttaagg

SEQ ID NO: 306914 - DNA, 15 bp, Homo sapiens
gttttaaggtttaag

SEQ ID NO: 306915 - DNA, 15 bp, Homo sapiens
ggttttaaggtttaa

SEQ ID NO: 306916 - DNA, 15 bp, Homo sapiens
aggttttaaggttta

SEQ ID NO: 306917 - DNA, 15 bp, Homo sapiens
aaggttttaaggttt

SEQ ID NO: 306918 - DNA, 15 bp, Homo sapiens
gaaggttttaaggtt

SEQ ID NO: 306919 - DNA, 15 bp, Homo sapiens
tgaaggttttaaggt

SEQ ID NO: 306920 - DNA, 15 bp, Homo sapiens
ctgaaggttttaagg

SEQ ID NO: 306921 - DNA, 15 bp, Homo sapiens
actgaaggttttaag

SEQ ID NO: 306922 - DNA, 15 bp, Homo sapiens
tactgaaggttttaa

SEQ ID NO: 306923 - DNA, 15 bp, Homo sapiens
ttactgaaggtttta

SEQ ID NO: 306924 - DNA, 15 bp, Homo sapiens
tttactgaaggtttt

SEQ ID NO: 306925 - DNA, 15 bp, Homo sapiens
gtttactgaaggttt

SEQ ID NO: 306926 - DNA, 15 bp, Homo sapiens
agtttactgaaggtt

SEQ ID NO: 306927 - DNA, 15 bp, Homo sapiens
gagtttactgaaggt

SEQ ID NO: 306928 - DNA, 15 bp, Homo sapiens
agagtttactgaagg

SEQ ID NO: 306929 - DNA, 15 bp, Homo sapiens
cagagtttactgaag

SEQ ID NO: 306930 - DNA, 15 bp, Homo sapiens
gcagagtttactgaa

SEQ ID NO: 306931 - DNA, 15 bp, Homo sapiens
agcagagtttactga

SEQ ID NO: 306932 - DNA, 15 bp, Homo sapiens
tagcagagtttactg

SEQ ID NO: 306933 - DNA, 15 bp, Homo sapiens
ctagcagagtttact

SEQ ID NO: 306934 - DNA, 15 bp, Homo sapiens
tctagcagagtttac

SEQ ID NO: 306935 - DNA, 15 bp, Homo sapiens
ttctagcagagttta

SEQ ID NO: 306936 - DNA, 15 bp, Homo sapiens
tttctagcagagttt

SEQ ID NO: 306937 - DNA, 15 bp, Homo sapiens
ttttctagcagagtt

SEQ ID NO: 306938 - DNA, 15 bp, Homo sapiens
attttctagcagagt

SEQ ID NO: 306939 - DNA, 15 bp, Homo sapiens
tattttctagcagag

SEQ ID NO: 306940 - DNA, 15 bp, Homo sapiens
ctattttctagcaga

SEQ ID NO: 306941 - DNA, 15 bp, Homo sapiens
tctattttctagcag

SEQ ID NO: 306942 - DNA, 15 bp, Homo sapiens
ttctattttctagca

SEQ ID NO: 306943 - DNA, 15 bp, Homo sapiens
tttctattttctagc

SEQ ID NO: 306944 - DNA, 15 bp, Homo sapiens
ttttctattttctag

SEQ ID NO: 306945 - DNA, 15 bp, Homo sapiens
tttttctattttcta

SEQ ID NO: 306946 - DNA, 15 bp, Homo sapiens
atttttctattttct

SEQ ID NO: 306947 - DNA, 15 bp, Homo sapiens
catttttctattttc

SEQ ID NO: 306948 - DNA, 15 bp, Homo sapiens
tcatttttctatttt

SEQ ID NO: 306949 - DNA, 15 bp, Homo sapiens
ctcatttttctattt

SEQ ID NO: 306950 - DNA, 15 bp, Homo sapiens
actcatttttctatt

SEQ ID NO: 306951 - DNA, 15 bp, Homo sapiens
aactcatttttctat

SEQ ID NO: 306952 - DNA, 15 bp, Homo sapiens
taactcatttttcta

SEQ ID NO: 306953 - DNA, 15 bp, Homo sapiens
ttaactcatttttct

SEQ ID NO: 306954 - DNA, 15 bp, Homo sapiens
attaactcatttttc

SEQ ID NO: 306955 - DNA, 15 bp, Homo sapiens
cattaactcattttt

SEQ ID NO: 306956 - DNA, 15 bp, Homo sapiens
gcattaactcatttt

SEQ ID NO: 306957 - DNA, 15 bp, Homo sapiens
ggcattaactcattt

SEQ ID NO: 306958 - DNA, 15 bp, Homo sapiens
gggcattaactcatt

SEQ ID NO: 306959 - DNA, 15 bp, Homo sapiens
tgggcattaactcat

SEQ ID NO: 306960 - DNA, 15 bp, Homo sapiens
ttgggcattaactca

SEQ ID NO: 306961 - DNA, 15 bp, Homo sapiens
attgggcattaactc

SEQ ID NO: 306962 - DNA, 15 bp, Homo sapiens
gattgggcattaact

SEQ ID NO: 306963 - DNA, 15 bp, Homo sapiens
tgattgggcattaac

SEQ ID NO: 306964 - DNA, 15 bp, Homo sapiens
gtgattgggcattaa

SEQ ID NO: 306965 - DNA, 15 bp, Homo sapiens
tgtgattgggcatta

SEQ ID NO: 306966 - DNA, 15 bp, Homo sapiens
ctgtgattgggcatt

SEQ ID NO: 306967 - DNA, 15 bp, Homo sapiens
cctgtgattgggcat

SEQ ID NO: 306968 - DNA, 15 bp, Homo sapiens
ccctgtgattgggca

SEQ ID NO: 306969 - DNA, 15 bp, Homo sapiens
gccctgtgattgggc

SEQ ID NO: 306970 - DNA, 15 bp, Homo sapiens
tgccctgtgattggg

SEQ ID NO: 306971 - DNA, 15 bp, Homo sapiens
ctgccctgtgattgg

SEQ ID NO: 306972 - DNA, 15 bp, Homo sapiens
actgccctgtgattg

SEQ ID NO: 306973 - DNA, 15 bp, Homo sapiens
aactgccctgtgatt

SEQ ID NO: 306974 - DNA, 15 bp, Homo sapiens
caactgccctgtgat

SEQ ID NO: 306975 - DNA, 15 bp, Homo sapiens
gcaactgccctgtga

SEQ ID NO: 306976 - DNA, 15 bp, Homo sapiens
tgcaactgccctgtg

SEQ ID NO: 306977 - DNA, 15 bp, Homo sapiens
ttgcaactgccctgt

SEQ ID NO: 306978 - DNA, 15 bp, Homo sapiens
attgcaactgccctg

SEQ ID NO: 306979 - DNA, 15 bp, Homo sapiens
cattgcaactgccct

SEQ ID NO: 306980 - DNA, 15 bp, Homo sapiens
tcattgcaactgccc

SEQ ID NO: 306981 - DNA, 15 bp, Homo sapiens
atcattgcaactgcc

SEQ ID NO: 306982 - DNA, 15 bp, Homo sapiens
catcattgcaactgc

SEQ ID NO: 306983 - DNA, 15 bp, Homo sapiens
acatcattgcaactg

SEQ ID NO: 306984 - DNA, 15 bp, Homo sapiens
tacatcattgcaact

SEQ ID NO: 306985 - DNA, 15 bp, Homo sapiens
ctacatcattgcaac

SEQ ID NO: 306986 - DNA, 15 bp, Homo sapiens
cctacatcattgcaa

SEQ ID NO: 306987 - DNA, 15 bp, Homo sapiens
ccctacatcattgca

SEQ ID NO: 306988 - DNA, 15 bp, Homo sapiens
accctacatcattgc

SEQ ID NO: 306989 - DNA, 15 bp, Homo sapiens
taccctacatcattg

SEQ ID NO: 306990 - DNA, 15 bp, Homo sapiens
ataccctacatcatt

SEQ ID NO: 306991 - DNA, 15 bp, Homo sapiens
gataccctacatcat

SEQ ID NO: 306992 - DNA, 15 bp, Homo sapiens
agataccctacatca

SEQ ID NO: 306993 - DNA, 15 bp, Homo sapiens
cagataccctacatc

SEQ ID NO: 306994 - DNA, 15 bp, Homo sapiens
gcagataccctacat

SEQ ID NO: 306995 - DNA, 15 bp, Homo sapiens
agcagataccctaca

SEQ ID NO: 306996 - DNA, 15 bp, Homo sapiens
aagcagataccctac

SEQ ID NO: 306997 - DNA, 15 bp, Homo sapiens
taagcagatacccta

SEQ ID NO: 306998 - DNA, 15 bp, Homo sapiens
ataagcagataccct

SEQ ID NO: 306999 - DNA, 15 bp, Homo sapiens
tataagcagataccc

SEQ ID NO: 307000 - DNA, 15 bp, Homo sapiens
ttataagcagatacc

SEQ ID NO: 307001 - DNA, 15 bp, Homo sapiens
tttataagcagatac

SEQ ID NO: 307002 - DNA, 15 bp, Homo sapiens
atttataagcagata

SEQ ID NO: 307003 - DNA, 15 bp, Homo sapiens
tatttataagcagat

SEQ ID NO: 307004 - DNA, 15 bp, Homo sapiens
atatttataagcaga

SEQ ID NO: 307005 - DNA, 15 bp, Homo sapiens
tatatttataagcag

SEQ ID NO: 307006 - DNA, 15 bp, Homo sapiens
atatatttataagca

SEQ ID NO: 307007 - DNA, 15 bp, Homo sapiens
catatatttataagc

SEQ ID NO: 307008 - DNA, 15 bp, Homo sapiens
gcatatatttataag

SEQ ID NO: 307009 - DNA, 15 bp, Homo sapiens
ggcatatatttataa

SEQ ID NO: 307010 - DNA, 15 bp, Homo sapiens
gggcatatatttata

SEQ ID NO: 307011 - DNA, 15 bp, Homo sapiens
tgggcatatatttat

SEQ ID NO: 307012 - DNA, 15 bp, Homo sapiens
ttgggcatatattta

SEQ ID NO: 307013 - DNA, 15 bp, Homo sapiens
tttgggcatatattt

SEQ ID NO: 307014 - DNA, 15 bp, Homo sapiens
ttttgggcatatatt

SEQ ID NO: 307015 - DNA, 15 bp, Homo sapiens
attttgggcatatat

SEQ ID NO: 307016 - DNA, 15 bp, Homo sapiens
tattttgggcatata

SEQ ID NO: 307017 - DNA, 15 bp, Homo sapiens
ctattttgggcatat

SEQ ID NO: 307018 - DNA, 15 bp, Homo sapiens
actattttgggcata

SEQ ID NO: 307019 - DNA, 15 bp, Homo sapiens
gactattttgggcat

SEQ ID NO: 307020 - DNA, 15 bp, Homo sapiens
ggactattttgggca

SEQ ID NO: 307021 - DNA, 15 bp, Homo sapiens
aggactattttgggc

SEQ ID NO: 307022 - DNA, 15 bp, Homo sapiens
aaggactattttggg

SEQ ID NO: 307023 - DNA, 15 bp, Homo sapiens
aaaggactattttgg

SEQ ID NO: 307024 - DNA, 15 bp, Homo sapiens
aaaaggactattttg

SEQ ID NO: 307025 - DNA, 15 bp, Homo sapiens
aaaaaggactatttt

SEQ ID NO: 307026 - DNA, 15 bp, Homo sapiens
aaaaaaggactattt

SEQ ID NO: 307027 - DNA, 15 bp, Homo sapiens
aaaaaaaggactatt

SEQ ID NO: 307028 - DNA, 15 bp, Homo sapiens
caaaaaaaggactat

SEQ ID NO: 307029 - DNA, 15 bp, Homo sapiens
acaaaaaaaggacta

SEQ ID NO: 307030 - DNA, 15 bp, Homo sapiens
cacaaaaaaaggact

SEQ ID NO: 307031 - DNA, 15 bp, Homo sapiens
acacaaaaaaaggac

SEQ ID NO: 307032 - DNA, 15 bp, Homo sapiens
gacacaaaaaaagga

SEQ ID NO: 307033 - DNA, 15 bp, Homo sapiens
tgacacaaaaaaagg

SEQ ID NO: 307034 - DNA, 15 bp, Homo sapiens
ctgacacaaaaaaag

SEQ ID NO: 307035 - DNA, 15 bp, Homo sapiens
tctgacacaaaaaaa

SEQ ID NO: 307036 - DNA, 15 bp, Homo sapiens
ttctgacacaaaaaa

SEQ ID NO: 307037 - DNA, 15 bp, Homo sapiens
cttctgacacaaaaa

SEQ ID NO: 307038 - DNA, 15 bp, Homo sapiens
ccttctgacacaaaa

SEQ ID NO: 307039 - DNA, 15 bp, Homo sapiens
gccttctgacacaaa

SEQ ID NO: 307040 - DNA, 15 bp, Homo sapiens
tgccttctgacacaa

SEQ ID NO: 307041 - DNA, 15 bp, Homo sapiens
ttgccttctgacaca

SEQ ID NO: 307042 - DNA, 15 bp, Homo sapiens
attgccttctgacac

SEQ ID NO: 307043 - DNA, 15 bp, Homo sapiens
tattgccttctgaca

SEQ ID NO: 307044 - DNA, 15 bp, Homo sapiens
ttattgccttctgac

SEQ ID NO: 307045 - DNA, 15 bp, Homo sapiens
tttattgccttctga

SEQ ID NO: 307046 - DNA, 15 bp, Homo sapiens
ttttattgccttctg

SEQ ID NO: 307047 - DNA, 15 bp, Homo sapiens
tttttattgccttct

SEQ ID NO: 307048 - DNA, 15 bp, Homo sapiens
gtttttattgccttc

SEQ ID NO: 307049 - DNA, 15 bp, Homo sapiens
tgtttttattgcctt

SEQ ID NO: 307050 - DNA, 15 bp, Homo sapiens
ctgtttttattgcct

SEQ ID NO: 307051 - DNA, 15 bp, Homo sapiens
cctgtttttattgcc

SEQ ID NO: 307052 - DNA, 15 bp, Homo sapiens
tcctgtttttattgc

SEQ ID NO: 307053 - DNA, 15 bp, Homo sapiens
atcctgtttttattg

SEQ ID NO: 307054 - DNA, 15 bp, Homo sapiens
aatcctgtttttatt

SEQ ID NO: 307055 - DNA, 15 bp, Homo sapiens
taatcctgtttttat

SEQ ID NO: 307056 - DNA, 15 bp, Homo sapiens
ataatcctgttttta

SEQ ID NO: 307057 - DNA, 15 bp, Homo sapiens
tataatcctgttttt

SEQ ID NO: 307058 - DNA, 15 bp, Homo sapiens
atataatcctgtttt

SEQ ID NO: 307059 - DNA, 15 bp, Homo sapiens
tatataatcctgttt

SEQ ID NO: 307060 - DNA, 15 bp, Homo sapiens
ttatataatcctgtt

SEQ ID NO: 307061 - DNA, 15 bp, Homo sapiens
tttatataatcctgt

SEQ ID NO: 307062 - DNA, 15 bp, Homo sapiens
ttttatataatcctg

SEQ ID NO: 307063 - DNA, 15 bp, Homo sapiens
tttttatataatcct

SEQ ID NO: 307064 - DNA, 15 bp, Homo sapiens
ttttttatataatcc

SEQ ID NO: 307065 - DNA, 15 bp, Homo sapiens
tttttttatataatc

SEQ ID NO: 307066 - DNA, 15 bp, Homo sapiens
ctttttttatataat

SEQ ID NO: 307067 - DNA, 15 bp, Homo sapiens
gctttttttatataa

SEQ ID NO: 307068 - DNA, 15 bp, Homo sapiens
tgctttttttatata

SEQ ID NO: 307069 - DNA, 15 bp, Homo sapiens
gtgctttttttatat

SEQ ID NO: 307070 - DNA, 15 bp, Homo sapiens
tgtgctttttttata

SEQ ID NO: 307071 - DNA, 15 bp, Homo sapiens
ctgtgctttttttat

SEQ ID NO: 307072 - DNA, 15 bp, Homo sapiens
cctgtgcttttttta

SEQ ID NO: 307073 - DNA, 15 bp, Homo sapiens
acctgtgcttttttt

SEQ ID NO: 307074 - DNA, 15 bp, Homo sapiens
cacctgtgctttttt

SEQ ID NO: 307075 - DNA, 15 bp, Homo sapiens
gcacctgtgcttttt

SEQ ID NO: 307076 - DNA, 15 bp, Homo sapiens
agcacctgtgctttt

SEQ ID NO: 307077 - DNA, 15 bp, Homo sapiens
aagcacctgtgcttt

SEQ ID NO: 307078 - DNA, 15 bp, Homo sapiens
taagcacctgtgctt

SEQ ID NO: 307079 - DNA, 15 bp, Homo sapiens
ttaagcacctgtgct

SEQ ID NO: 307080 - DNA, 15 bp, Homo sapiens
tttaagcacctgtgc

SEQ ID NO: 307081 - DNA, 15 bp, Homo sapiens
ttttaagcacctgtg

SEQ ID NO: 307082 - DNA, 15 bp, Homo sapiens
tttttaagcacctgt

SEQ ID NO: 307083 - DNA, 15 bp, Homo sapiens
gtttttaagcacctg

SEQ ID NO: 307084 - DNA, 15 bp, Homo sapiens
tgtttttaagcacct

SEQ ID NO: 307085 - DNA, 15 bp, Homo sapiens
ttgtttttaagcacc

SEQ ID NO: 307086 - DNA, 15 bp, Homo sapiens
gttgtttttaagcac

SEQ ID NO: 307087 - DNA, 15 bp, Homo sapiens
tgttgtttttaagca

SEQ ID NO: 307088 - DNA, 15 bp, Homo sapiens
ttgttgtttttaagc

SEQ ID NO: 307089 - DNA, 15 bp, Homo sapiens
gttgttgtttttaag

SEQ ID NO: 307090 - DNA, 15 bp, Homo sapiens
tgttgttgtttttaa

SEQ ID NO: 307091 - DNA, 15 bp, Homo sapiens
ttgttgttgttttta

SEQ ID NO: 307092 - DNA, 15 bp, Homo sapiens
gttgttgttgttttt

SEQ ID NO: 307093 - DNA, 15 bp, Homo sapiens
tgttgttgttgtttt

SEQ ID NO: 307094 - DNA, 15 bp, Homo sapiens
cttttgttgttgttg

SEQ ID NO: 307095 - DNA, 15 bp, Homo sapiens
ccttttgttgttgtt

SEQ ID NO: 307096 - DNA, 15 bp, Homo sapiens
tccttttgttgttgt

SEQ ID NO: 307097 - DNA, 15 bp, Homo sapiens
gtccttttgttgttg

SEQ ID NO: 307098 - DNA, 15 bp, Homo sapiens
tgtccttttgttgtt

SEQ ID NO: 307099 - DNA, 15 bp, Homo sapiens
ttgtccttttgttgt

SEQ ID NO: 307100 - DNA, 15 bp, Homo sapiens
tttgtccttttgttg

SEQ ID NO: 307101 - DNA, 15 bp, Homo sapiens
ttttgtccttttgtt

SEQ ID NO: 307102 - DNA, 15 bp, Homo sapiens
gttttgtccttttgt

SEQ ID NO: 307103 - DNA, 15 bp, Homo sapiens
tgttttgtccttttg

SEQ ID NO: 307104 - DNA, 15 bp, Homo sapiens
atgttttgtcctttt

SEQ ID NO: 307105 - DNA, 15 bp, Homo sapiens
aatgttttgtccttt

SEQ ID NO: 307106 - DNA, 15 bp, Homo sapiens
caatgttttgtcctt

SEQ ID NO: 307107 - DNA, 15 bp, Homo sapiens
acaatgttttgtcct

SEQ ID NO: 307108 - DNA, 15 bp, Homo sapiens
aacaatgttttgtcc

SEQ ID NO: 307109 - DNA, 15 bp, Homo sapiens
gaacaatgttttgtc

SEQ ID NO: 307110 - DNA, 15 bp, Homo sapiens
ggaacaatgttttgt

SEQ ID NO: 307111 - DNA, 15 bp, Homo sapiens
aggaacaatgttttg

SEQ ID NO: 307112 - DNA, 15 bp, Homo sapiens
caggaacaatgtttt

SEQ ID NO: 307113 - DNA, 15 bp, Homo sapiens
acaggaacaatgttt

SEQ ID NO: 307114 - DNA, 15 bp, Homo sapiens
aacaggaacaatgtt

SEQ ID NO: 307115 - DNA, 15 bp, Homo sapiens
aaacaggaacaatgt

SEQ ID NO: 307116 - DNA, 15 bp, Homo sapiens
caaacaggaacaatg

SEQ ID NO: 307117 - DNA, 15 bp, Homo sapiens
tcaaacaggaacaat

SEQ ID NO: 307118 - DNA, 15 bp, Homo sapiens
ctcaaacaggaacaa

SEQ ID NO: 307119 - DNA, 15 bp, Homo sapiens
tctcaaacaggaaca

SEQ ID NO: 307120 - DNA, 15 bp, Homo sapiens
gtctcaaacaggaac

SEQ ID NO: 307121 - DNA, 15 bp, Homo sapiens
agtctcaaacaggaa

SEQ ID NO: 307122 - DNA, 15 bp, Homo sapiens
tagtctcaaacagga

SEQ ID NO: 307123 - DNA, 15 bp, Homo sapiens
ttagtctcaaacagg

SEQ ID NO: 307124 - DNA, 15 bp, Homo sapiens
tttagtctcaaacag

SEQ ID NO: 307125 - DNA, 15 bp, Homo sapiens
ctttagtctcaaaca

SEQ ID NO: 307126 - DNA, 15 bp, Homo sapiens
actttagtctcaaac

SEQ ID NO: 307127 - DNA, 15 bp, Homo sapiens
aactttagtctcaaa

SEQ ID NO: 307128 - DNA, 15 bp, Homo sapiens
aaactttagtctcaa

SEQ ID NO: 307129 - DNA, 15 bp, Homo sapiens
gaaactttagtctca

SEQ ID NO: 307130 - DNA, 15 bp, Homo sapiens
tgaaactttagtctc

SEQ ID NO: 307131 - DNA, 15 bp, Homo sapiens
ttgaaactttagtct

SEQ ID NO: 307132 - DNA, 15 bp, Homo sapiens
attgaaactttagtc

SEQ ID NO: 307133 - DNA, 15 bp, Homo sapiens
gattgaaactttagt

SEQ ID NO: 307134 - DNA, 15 bp, Homo sapiens
agattgaaactttag

SEQ ID NO: 307135 - DNA, 15 bp, Homo sapiens
gagattgaaacttta

SEQ ID NO: 307136 - DNA, 15 bp, Homo sapiens
tgagattgaaacttt

SEQ ID NO: 307137 - DNA, 15 bp, Homo sapiens
atgagattgaaactt

SEQ ID NO: 307138 - DNA, 15 bp, Homo sapiens
aatgagattgaaact

SEQ ID NO: 307139 - DNA, 15 bp, Homo sapiens
aaatgagattgaaac

SEQ ID NO: 307140 - DNA, 15 bp, Homo sapiens
aaaatgagattgaaa

SEQ ID NO: 307141 - DNA, 15 bp, Homo sapiens
caaaatgagattgaa

SEQ ID NO: 307142 - DNA, 15 bp, Homo sapiens
ccaaaatgagattga

SEQ ID NO: 307143 - DNA, 15 bp, Homo sapiens
tccaaaatgagattg

SEQ ID NO: 307144 - DNA, 15 bp, Homo sapiens
ttccaaaatgagatt

SEQ ID NO: 307145 - DNA, 15 bp, Homo sapiens
gttccaaaatgagat

SEQ ID NO: 307146 - DNA, 15 bp, Homo sapiens
ggttccaaaatgaga

SEQ ID NO: 307147 - DNA, 15 bp, Homo sapiens
tggttccaaaatgag

SEQ ID NO: 307148 - DNA, 15 bp, Homo sapiens
ttggttccaaaatga

SEQ ID NO: 307149 - DNA, 15 bp, Homo sapiens
tttggttccaaaatg

SEQ ID NO: 307150 - DNA, 15 bp, Homo sapiens
ttttggttccaaaat

SEQ ID NO: 307151 - DNA, 15 bp, Homo sapiens
attttggttccaaaa

SEQ ID NO: 307152 - DNA, 15 bp, Homo sapiens
tattttggttccaaa

SEQ ID NO: 307153 - DNA, 15 bp, Homo sapiens
ttattttggttccaa

SEQ ID NO: 307154 - DNA, 15 bp, Homo sapiens
tttattttggttcca

SEQ ID NO: 307155 - DNA, 15 bp, Homo sapiens
gtttattttggttcc

SEQ ID NO: 307156 - DNA, 15 bp, Homo sapiens
tgtttattttggttc

SEQ ID NO: 307157 - DNA, 15 bp, Homo sapiens
gtgtttattttggtt

SEQ ID NO: 307158 - DNA, 15 bp, Homo sapiens
tgtgtttattttggt

SEQ ID NO: 307159 - DNA, 15 bp, Homo sapiens
gtgtgtttattttgg

SEQ ID NO: 307160 - DNA, 15 bp, Homo sapiens
tgtgtgtttattttg

SEQ ID NO: 307161 - DNA, 15 bp, Homo sapiens
atgtgtgtttatttt

SEQ ID NO: 307162 - DNA, 15 bp, Homo sapiens
catgtgtgtttattt

SEQ ID NO: 307163 - DNA, 15 bp, Homo sapiens
gcatgtgtgtttatt

SEQ ID NO: 307164 - DNA, 15 bp, Homo sapiens
tgcatgtgtgtttat

SEQ ID NO: 307165 - DNA, 15 bp, Homo sapiens
ctgcatgtgtgttta

SEQ ID NO: 307166 - DNA, 15 bp, Homo sapiens
actgcatgtgtgttt

SEQ ID NO: 307167 - DNA, 15 bp, Homo sapiens
cactgcatgtgtgtt

SEQ ID NO: 307168 - DNA, 15 bp, Homo sapiens
tcactgcatgtgtgt

SEQ ID NO: 307169 - DNA, 15 bp, Homo sapiens
gtcactgcatgtgtg

SEQ ID NO: 307170 - DNA, 15 bp, Homo sapiens
tgtcactgcatgtgt

SEQ ID NO: 307171 - DNA, 15 bp, Homo sapiens
ctgtcactgcatgtg

SEQ ID NO: 307172 - DNA, 15 bp, Homo sapiens
gctgtcactgcatgt

SEQ ID NO: 307173 - DNA, 15 bp, Homo sapiens
tgctgtcactgcatg

SEQ ID NO: 307174 - DNA, 15 bp, Homo sapiens
ctgctgtcactgcat

SEQ ID NO: 307175 - DNA, 15 bp, Homo sapiens
cctgctgtcactgca

SEQ ID NO: 307176 - DNA, 15 bp, Homo sapiens
acctgctgtcactgc

SEQ ID NO: 307177 - DNA, 15 bp, Homo sapiens
tacctgctgtcactg

SEQ ID NO: 307178 - DNA, 15 bp, Homo sapiens
ttacctgctgtcact

SEQ ID NO: 307179 - DNA, 15 bp, Homo sapiens
gttacctgctgtcac

SEQ ID NO: 307180 - DNA, 15 bp, Homo sapiens
tgttacctgctgtca

SEQ ID NO: 307181 - DNA, 15 bp, Homo sapiens
gtgttacctgctgtc

SEQ ID NO: 307182 - DNA, 15 bp, Homo sapiens
agtgttacctgctgt

SEQ ID NO: 307183 - DNA, 15 bp, Homo sapiens
tagtgttacctgctg

SEQ ID NO: 307184 - DNA, 15 bp, Homo sapiens
gtagtgttacctgct

SEQ ID NO: 307185 - DNA, 15 bp, Homo sapiens
ggtagtgttacctgc

SEQ ID NO: 307186 - DNA, 15 bp, Homo sapiens
gggtagtgttacctg

SEQ ID NO: 307187 - DNA, 15 bp, Homo sapiens
tgggtagtgttacct

SEQ ID NO: 307188 - DNA, 15 bp, Homo sapiens
gtgggtagtgttacc

SEQ ID NO: 307189 - DNA, 15 bp, Homo sapiens
agtgggtagtgttac

SEQ ID NO: 307190 - DNA, 15 bp, Homo sapiens
tagtgggtagtgtta

SEQ ID NO: 307191 - DNA, 15 bp, Homo sapiens
atagtgggtagtgtt

SEQ ID NO: 307192 - DNA, 15 bp, Homo sapiens
tatagtgggtagtgt

SEQ ID NO: 307193 - DNA, 15 bp, Homo sapiens
atatagtgggtagtg

SEQ ID NO: 307194 - DNA, 15 bp, Homo sapiens
tatatagtgggtagt

SEQ ID NO: 307195 - DNA, 15 bp, Homo sapiens
ttatatagtgggtag

SEQ ID NO: 307196 - DNA, 15 bp, Homo sapiens
attatatagtgggta

SEQ ID NO: 307197 - DNA, 15 bp, Homo sapiens
aattatatagtgggt

SEQ ID NO: 307198 - DNA, 15 bp, Homo sapiens
taattatatagtggg

SEQ ID NO: 307199 - DNA, 15 bp, Homo sapiens
ttaattatatagtgg

SEQ ID NO: 307200 - DNA, 15 bp, Homo sapiens
cttaattatatagtg

SEQ ID NO: 307201 - DNA, 15 bp, Homo sapiens
gcttaattatatagt

SEQ ID NO: 307202 - DNA, 15 bp, Homo sapiens
ggcttaattatatag

SEQ ID NO: 307203 - DNA, 15 bp, Homo sapiens
gggcttaattatata

SEQ ID NO: 307204 - DNA, 15 bp, Homo sapiens
cgggcttaattatat

SEQ ID NO: 307205 - DNA, 15 bp, Homo sapiens
acgggcttaattata

SEQ ID NO: 307206 - DNA, 15 bp, Homo sapiens
tacgggcttaattat

SEQ ID NO: 307207 - DNA, 15 bp, Homo sapiens
ttacgggcttaatta

SEQ ID NO: 307208 - DNA, 15 bp, Homo sapiens
attacgggcttaatt

SEQ ID NO: 307209 - DNA, 15 bp, Homo sapiens
aattacgggcttaat

SEQ ID NO: 307210 - DNA, 15 bp, Homo sapiens
caattacgggcttaa

SEQ ID NO: 307211 - DNA, 15 bp, Homo sapiens
gcaattacgggctta

SEQ ID NO: 307212 - DNA, 15 bp, Homo sapiens
tgcaattacgggctt

SEQ ID NO: 307213 - DNA, 15 bp, Homo sapiens
ttgcaattacgggct

SEQ ID NO: 307214 - DNA, 15 bp, Homo sapiens
cttgcaattacgggc

SEQ ID NO: 307215 - DNA, 15 bp, Homo sapiens
ccttgcaattacggg

SEQ ID NO: 307216 - DNA, 15 bp, Homo sapiens
accttgcaattacgg

SEQ ID NO: 307217 - DNA, 15 bp, Homo sapiens
taccttgcaattacg

SEQ ID NO: 307218 - DNA, 15 bp, Homo sapiens
gtaccttgcaattac

SEQ ID NO: 307219 - DNA, 15 bp, Homo sapiens
tgtaccttgcaatta

SEQ ID NO: 307220 - DNA, 15 bp, Homo sapiens
ctgtaccttgcaatt

SEQ ID NO: 307221 - DNA, 15 bp, Homo sapiens
cctgtaccttgcaat

SEQ ID NO: 307222 - DNA, 15 bp, Homo sapiens
gcctgtaccttgcaa

SEQ ID NO: 307223 - DNA, 15 bp, Homo sapiens
agcctgtaccttgca

SEQ ID NO: 307224 - DNA, 15 bp, Homo sapiens
cagcctgtaccttgc

SEQ ID NO: 307225 - DNA, 15 bp, Homo sapiens
acagcctgtaccttg

SEQ ID NO: 307226 - DNA, 15 bp, Homo sapiens
tacagcctgtacctt

SEQ ID NO: 307227 - DNA, 15 bp, Homo sapiens
ttacagcctgtacct

SEQ ID NO: 307228 - DNA, 15 bp, Homo sapiens
tttacagcctgtacc

SEQ ID NO: 307229 - DNA, 15 bp, Homo sapiens
ctttacagcctgtac

SEQ ID NO: 307230 - DNA, 15 bp, Homo sapiens
cctttacagcctgta

SEQ ID NO: 307231 - DNA, 15 bp, Homo sapiens
gcctttacagcctgt

SEQ ID NO: 307232 - DNA, 15 bp, Homo sapiens
ggcctttacagcctg

SEQ ID NO: 307233 - DNA, 15 bp, Homo sapiens
tggcctttacagcct

SEQ ID NO: 307234 - DNA, 15 bp, Homo sapiens
atggcctttacagcc

SEQ ID NO: 307235 - DNA, 15 bp, Homo sapiens
catggcctttacagc

SEQ ID NO: 307236 - DNA, 15 bp, Homo sapiens
ccatggcctttacag

SEQ ID NO: 307237 - DNA, 15 bp, Homo sapiens
cccatggcctttaca

SEQ ID NO: 307238 - DNA, 15 bp, Homo sapiens
tcccatggcctttac

SEQ ID NO: 307239 - DNA, 15 bp, Homo sapiens
ctcccatggccttta

SEQ ID NO: 307240 - DNA, 15 bp, Homo sapiens
actcccatggccttt

SEQ ID NO: 307241 - DNA, 15 bp, Homo sapiens
aactcccatggcctt

SEQ ID NO: 307242 - DNA, 15 bp, Homo sapiens
gaactcccatggcct

SEQ ID NO: 307243 - DNA, 15 bp, Homo sapiens
tgaactcccatggcc

SEQ ID NO: 307244 - DNA, 15 bp, Homo sapiens
ctgaactcccatggc

SEQ ID NO: 307245 - DNA, 15 bp, Homo sapiens
tctgaactcccatgg

SEQ ID NO: 307246 - DNA, 15 bp, Homo sapiens
ctctgaactcccatg

SEQ ID NO: 307247 - DNA, 15 bp, Homo sapiens
cctctgaactcccat

SEQ ID NO: 307248 - DNA, 15 bp, Homo sapiens
tcctctgaactccca

SEQ ID NO: 307249 - DNA, 15 bp, Homo sapiens
ctcctctgaactccc

SEQ ID NO: 307250 - DNA, 15 bp, Homo sapiens
actcctctgaactcc

SEQ ID NO: 307251 - DNA, 15 bp, Homo sapiens
cactcctctgaactc

SEQ ID NO: 307252 - DNA, 15 bp, Homo sapiens
tcactcctctgaact

SEQ ID NO: 307253 - DNA, 15 bp, Homo sapiens
ctcactcctctgaac

SEQ ID NO: 307254 - DNA, 15 bp, Homo sapiens
tctcactcctctgaa

SEQ ID NO: 307255 - DNA, 15 bp, Homo sapiens
ctctcactcctctga

SEQ ID NO: 307256 - DNA, 15 bp, Homo sapiens
gctctcactcctctg

SEQ ID NO: 307257 - DNA, 15 bp, Homo sapiens
agctctcactcctct

SEQ ID NO: 307258 - DNA, 15 bp, Homo sapiens
gagctctcactcctc

SEQ ID NO: 307259 - DNA, 15 bp, Homo sapiens
tgagctctcactcct

SEQ ID NO: 307260 - DNA, 15 bp, Homo sapiens
atgagctctcactcc

SEQ ID NO: 307261 - DNA, 15 bp, Homo sapiens
catgagctctcactc

SEQ ID NO: 307262 - DNA, 15 bp, Homo sapiens
acatgagctctcact

SEQ ID NO: 307263 - DNA, 15 bp, Homo sapiens
cacatgagctctcac

SEQ ID NO: 307264 - DNA, 15 bp, Homo sapiens
ccacatgagctctca

SEQ ID NO: 307265 - DNA, 15 bp, Homo sapiens
cccacatgagctctc

SEQ ID NO: 307266 - DNA, 15 bp, Homo sapiens
acccacatgagctct

SEQ ID NO: 307267 - DNA, 15 bp, Homo sapiens
cacccacatgagctc

SEQ ID NO: 307268 - DNA, 15 bp, Homo sapiens
ccacccacatgagct

SEQ ID NO: 307269 - DNA, 15 bp, Homo sapiens
cccacccacatgagc

SEQ ID NO: 307270 - DNA, 15 bp, Homo sapiens
tcccacccacatgag

SEQ ID NO: 307271 - DNA, 15 bp, Homo sapiens
ctcccacccacatga

SEQ ID NO: 307272 - DNA, 15 bp, Homo sapiens
tctcccacccacatg

SEQ ID NO: 307273 - DNA, 15 bp, Homo sapiens
ttctcccacccacat

SEQ ID NO: 307274 - DNA, 15 bp, Homo sapiens
attctcccacccaca

SEQ ID NO: 307275 - DNA, 15 bp, Homo sapiens
cattctcccacccac

SEQ ID NO: 307276 - DNA, 15 bp, Homo sapiens
tcattctcccaccca

SEQ ID NO: 307277 - DNA, 15 bp, Homo sapiens
ctcattctcccaccc

SEQ ID NO: 307278 - DNA, 15 bp, Homo sapiens
cctcattctcccacc

SEQ ID NO: 307279 - DNA, 15 bp, Homo sapiens
tcctcattctcccac

SEQ ID NO: 307280 - DNA, 15 bp, Homo sapiens
atcctcattctccca

SEQ ID NO: 307281 - DNA, 15 bp, Homo sapiens
tatcctcattctccc

SEQ ID NO: 307282 - DNA, 15 bp, Homo sapiens
ctatcctcattctcc

SEQ ID NO: 307283 - DNA, 15 bp, Homo sapiens
cctatcctcattctc

SEQ ID NO: 307284 - DNA, 15 bp, Homo sapiens
gcctatcctcattct

SEQ ID NO: 307285 - DNA, 15 bp, Homo sapiens
agcctatcctcattc

SEQ ID NO: 307286 - DNA, 15 bp, Homo sapiens
aagcctatcctcatt

SEQ ID NO: 307287 - DNA, 15 bp, Homo sapiens
gaagcctatcctcat

SEQ ID NO: 307288 - DNA, 15 bp, Homo sapiens
agaagcctatcctca

SEQ ID NO: 307289 - DNA, 15 bp, Homo sapiens
cagaagcctatcctc

SEQ ID NO: 307290 - DNA, 15 bp, Homo sapiens
acagaagcctatcct

SEQ ID NO: 307291 - DNA, 15 bp, Homo sapiens
cacagaagcctatcc

SEQ ID NO: 307292 - DNA, 15 bp, Homo sapiens
tcacagaagcctatc

SEQ ID NO: 307293 - DNA, 15 bp, Homo sapiens
ctcacagaagcctat

SEQ ID NO: 307294 - DNA, 15 bp, Homo sapiens
tctcacagaagccta

SEQ ID NO: 307295 - DNA, 15 bp, Homo sapiens
ctctcacagaagcct

SEQ ID NO: 307296 - DNA, 15 bp, Homo sapiens
cctctcacagaagcc

SEQ ID NO: 307297 - DNA, 15 bp, Homo sapiens
gcctctcacagaagc

SEQ ID NO: 307298 - DNA, 15 bp, Homo sapiens
agcctctcacagaag

SEQ ID NO: 307299 - DNA, 15 bp, Homo sapiens
cagcctctcacagaa

SEQ ID NO: 307300 - DNA, 15 bp, Homo sapiens
ccagcctctcacaga

SEQ ID NO: 307301 - DNA, 15 bp, Homo sapiens
cccagcctctcacag

SEQ ID NO: 307302 - DNA, 15 bp, Homo sapiens
ccccagcctctcaca

SEQ ID NO: 307303 - DNA, 15 bp, Homo sapiens
gccccagcctctcac

SEQ ID NO: 307304 - DNA, 15 bp, Homo sapiens
agccccagcctctca

SEQ ID NO: 307305 - DNA, 15 bp, Homo sapiens
gagccccagcctctc

SEQ ID NO: 307306 - DNA, 15 bp, Homo sapiens
tgagccccagcctct

SEQ ID NO: 307307 - DNA, 15 bp, Homo sapiens
ctgagccccagcctc

SEQ ID NO: 307308 - DNA, 15 bp, Homo sapiens
actgagccccagcct

SEQ ID NO: 307309 - DNA, 15 bp, Homo sapiens
cactgagccccagcc

SEQ ID NO: 307310 - DNA, 15 bp, Homo sapiens
ccactgagccccagc

SEQ ID NO: 307311 - DNA, 15 bp, Homo sapiens
tccactgagccccag

SEQ ID NO: 307312 - DNA, 15 bp, Homo sapiens
ctccactgagcccca

SEQ ID NO: 307313 - DNA, 15 bp, Homo sapiens
cctccactgagcccc

SEQ ID NO: 307314 - DNA, 15 bp, Homo sapiens
gcctccactgagccc

SEQ ID NO: 307315 - DNA, 15 bp, Homo sapiens
agcctccactgagcc

SEQ ID NO: 307316 - DNA, 15 bp, Homo sapiens
cagcctccactgagc

SEQ ID NO: 307317 - DNA, 15 bp, Homo sapiens
gcagcctccactgag

SEQ ID NO: 307318 - DNA, 15 bp, Homo sapiens
tgcagcctccactga

SEQ ID NO: 307319 - DNA, 15 bp, Homo sapiens
ttgcagcctccactg

SEQ ID NO: 307320 - DNA, 15 bp, Homo sapiens
attgcagcctccact

SEQ ID NO: 307321 - DNA, 15 bp, Homo sapiens
cattgcagcctccac

SEQ ID NO: 307322 - DNA, 15 bp, Homo sapiens
tcattgcagcctcca

SEQ ID NO: 307323 - DNA, 15 bp, Homo sapiens
atcattgcagcctcc

SEQ ID NO: 307324 - DNA, 15 bp, Homo sapiens
catcattgcagcctc

SEQ ID NO: 307325 - DNA, 15 bp, Homo sapiens
ccatcattgcagcct

SEQ ID NO: 307326 - DNA, 15 bp, Homo sapiens
cccatcattgcagcc

SEQ ID NO: 307327 - DNA, 15 bp, Homo sapiens
gcccatcattgcagc

SEQ ID NO: 307328 - DNA, 15 bp, Homo sapiens
agcccatcattgcag

SEQ ID NO: 307329 - DNA, 15 bp, Homo sapiens
tagcccatcattgca

SEQ ID NO: 307330 - DNA, 15 bp, Homo sapiens
ttagcccatcattgc

SEQ ID NO: 307331 - DNA, 15 bp, Homo sapiens
cttagcccatcattg

SEQ ID NO: 307332 - DNA, 15 bp, Homo sapiens
tcttagcccatcatt

SEQ ID NO: 307333 - DNA, 15 bp, Homo sapiens
gtcttagcccatcat

SEQ ID NO: 307334 - DNA, 15 bp, Homo sapiens
tgtcttagcccatca

SEQ ID NO: 307335 - DNA, 15 bp, Homo sapiens
ctgtcttagcccatc

SEQ ID NO: 307336 - DNA, 15 bp, Homo sapiens
cctgtcttagcccat

SEQ ID NO: 307337 - DNA, 15 bp, Homo sapiens
ccctgtcttagccca

SEQ ID NO: 307338 - DNA, 15 bp, Homo sapiens
tccctgtcttagccc

SEQ ID NO: 307339 - DNA, 15 bp, Homo sapiens
ctccctgtcttagcc

SEQ ID NO: 307340 - DNA, 15 bp, Homo sapiens
tctccctgtcttagc

SEQ ID NO: 307341 - DNA, 15 bp, Homo sapiens
ttctccctgtcttag

SEQ ID NO: 307342 - DNA, 15 bp, Homo sapiens
attctccctgtctta

SEQ ID NO: 307343 - DNA, 15 bp, Homo sapiens
cattctccctgtctt

SEQ ID NO: 307344 - DNA, 15 bp, Homo sapiens
tcattctccctgtct

SEQ ID NO: 307345 - DNA, 15 bp, Homo sapiens
ttcattctccctgtc

SEQ ID NO: 307346 - DNA, 15 bp, Homo sapiens
cttcattctccctgt

SEQ ID NO: 307347 - DNA, 15 bp, Homo sapiens
gcttcattctccctg

SEQ ID NO: 307348 - DNA, 15 bp, Homo sapiens
ggcttcattctccct

SEQ ID NO: 307349 - DNA, 15 bp, Homo sapiens
aggcttcattctccc

SEQ ID NO: 307350 - DNA, 15 bp, Homo sapiens
taggcttcattctcc

SEQ ID NO: 307351 - DNA, 15 bp, Homo sapiens
ctaggcttcattctc

SEQ ID NO: 307352 - DNA, 15 bp, Homo sapiens
actaggcttcattct

SEQ ID NO: 307353 - DNA, 15 bp, Homo sapiens
tactaggcttcattc

SEQ ID NO: 307354 - DNA, 15 bp, Homo sapiens
atactaggcttcatt

SEQ ID NO: 307355 - DNA, 15 bp, Homo sapiens
catactaggcttcat

SEQ ID NO: 307356 - DNA, 15 bp, Homo sapiens
acatactaggcttca

SEQ ID NO: 307357 - DNA, 15 bp, Homo sapiens
cacatactaggcttc

SEQ ID NO: 307358 - DNA, 15 bp, Homo sapiens
acacatactaggctt

SEQ ID NO: 307359 - DNA, 15 bp, Homo sapiens
cacacatactaggct

SEQ ID NO: 307360 - DNA, 15 bp, Homo sapiens
ccacacatactaggc

SEQ ID NO: 307361 - DNA, 15 bp, Homo sapiens
tccacacatactagg

SEQ ID NO: 307362 - DNA, 15 bp, Homo sapiens
ctccacacatactag

SEQ ID NO: 307363 - DNA, 15 bp, Homo sapiens
gctccacacatacta

SEQ ID NO: 307364 - DNA, 15 bp, Homo sapiens
tgctccacacatact

SEQ ID NO: 307365 - DNA, 15 bp, Homo sapiens
atgctccacacatac

SEQ ID NO: 307366 - DNA, 15 bp, Homo sapiens
catgctccacacata

SEQ ID NO: 307367 - DNA, 15 bp, Homo sapiens
ccatgctccacacat

SEQ ID NO: 307368 - DNA, 15 bp, Homo sapiens
accatgctccacaca

SEQ ID NO: 307369 - DNA, 15 bp, Homo sapiens
caccatgctccacac

SEQ ID NO: 307370 - DNA, 15 bp, Homo sapiens
acaccatgctccaca

SEQ ID NO: 307371 - DNA, 15 bp, Homo sapiens
cacaccatgctccac

SEQ ID NO: 307372 - DNA, 15 bp, Homo sapiens
acacaccatgctcca

SEQ ID NO: 307373 - DNA, 15 bp, Homo sapiens
tacacaccatgctcc

SEQ ID NO: 307374 - DNA, 15 bp, Homo sapiens
gtacacaccatgctc

SEQ ID NO: 307375 - DNA, 15 bp, Homo sapiens
ggtacacaccatgct

SEQ ID NO: 307376 - DNA, 15 bp, Homo sapiens
gggtacacaccatgc

SEQ ID NO: 307377 - DNA, 15 bp, Homo sapiens
tgggtacacaccatg

SEQ ID NO: 307378 - DNA, 15 bp, Homo sapiens
gtgggtacacaccat

SEQ ID NO: 307379 - DNA, 15 bp, Homo sapiens
tgtgggtacacacca

SEQ ID NO: 307380 - DNA, 15 bp, Homo sapiens
ctgtgggtacacacc

SEQ ID NO: 307381 - DNA, 15 bp, Homo sapiens
tctgtgggtacacac

SEQ ID NO: 307382 - DNA, 15 bp, Homo sapiens
ttctgtgggtacaca

SEQ ID NO: 307383 - DNA, 15 bp, Homo sapiens
cttctgtgggtacac

SEQ ID NO: 307384 - DNA, 15 bp, Homo sapiens
gcttctgtgggtaca

SEQ ID NO: 307385 - DNA, 15 bp, Homo sapiens
agcttctgtgggtac

SEQ ID NO: 307386 - DNA, 15 bp, Homo sapiens
tagcttctgtgggta

SEQ ID NO: 307387 - DNA, 15 bp, Homo sapiens
ttagcttctgtgggt

SEQ ID NO: 307388 - DNA, 15 bp, Homo sapiens
attagcttctgtggg

SEQ ID NO: 307389 - DNA, 15 bp, Homo sapiens
tattagcttctgtgg

SEQ ID NO: 307390 - DNA, 15 bp, Homo sapiens
ttattagcttctgtg

SEQ ID NO: 307391 - DNA, 15 bp, Homo sapiens
gttattagcttctgt

SEQ ID NO: 307392 - DNA, 15 bp, Homo sapiens
tgttattagcttctg

SEQ ID NO: 307393 - DNA, 15 bp, Homo sapiens
ctgttattagcttct

SEQ ID NO: 307394 - DNA, 15 bp, Homo sapiens
gctgttattagcttc

SEQ ID NO: 307395 - DNA, 15 bp, Homo sapiens
ggctgttattagctt

SEQ ID NO: 307396 - DNA, 15 bp, Homo sapiens
aggctgttattagct

SEQ ID NO: 307397 - DNA, 15 bp, Homo sapiens
taggctgttattagc

SEQ ID NO: 307398 - DNA, 15 bp, Homo sapiens
ctaggctgttattag

SEQ ID NO: 307399 - DNA, 15 bp, Homo sapiens
tctaggctgttatta

SEQ ID NO: 307400 - DNA, 15 bp, Homo sapiens
ctctaggctgttatt

SEQ ID NO: 307401 - DNA, 15 bp, Homo sapiens
tctctaggctgttat

SEQ ID NO: 307402 - DNA, 15 bp, Homo sapiens
ttctctaggctgtta

SEQ ID NO: 307403 - DNA, 15 bp, Homo sapiens
cttctctaggctgtt

SEQ ID NO: 307404 - DNA, 15 bp, Homo sapiens
tcttctctaggctgt

SEQ ID NO: 307405 - DNA, 15 bp, Homo sapiens
ttcttctctaggctg

SEQ ID NO: 307406 - DNA, 15 bp, Homo sapiens
tttcttctctaggct

SEQ ID NO: 307407 - DNA, 15 bp, Homo sapiens
ctttcttctctaggc

SEQ ID NO: 307408 - DNA, 15 bp, Homo sapiens
actttcttctctagg

SEQ ID NO: 307409 - DNA, 15 bp, Homo sapiens
cactttcttctctag

SEQ ID NO: 307410 - DNA, 15 bp, Homo sapiens
ccactttcttctcta

SEQ ID NO: 307411 - DNA, 15 bp, Homo sapiens
gccactttcttctct

SEQ ID NO: 307412 - DNA, 15 bp, Homo sapiens
ggccactttcttctc

SEQ ID NO: 307413 - DNA, 15 bp, Homo sapiens
aggccactttcttct

SEQ ID NO: 307414 - DNA, 15 bp, Homo sapiens
aaggccactttcttc

SEQ ID NO: 307415 - DNA, 15 bp, Homo sapiens
caaggccactttctt

SEQ ID NO: 307416 - DNA, 15 bp, Homo sapiens
gcaaggccactttct

SEQ ID NO: 307417 - DNA, 15 bp, Homo sapiens
agcaaggccactttc

SEQ ID NO: 307418 - DNA, 15 bp, Homo sapiens
tagcaaggccacttt

SEQ ID NO: 307419 - DNA, 15 bp, Homo sapiens
gtagcaaggccactt

SEQ ID NO: 307420 - DNA, 15 bp, Homo sapiens
agtagcaaggccact

SEQ ID NO: 307421 - DNA, 15 bp, Homo sapiens
cagtagcaaggccac

SEQ ID NO: 307422 - DNA, 15 bp, Homo sapiens
ccagtagcaaggcca

SEQ ID NO: 307423 - DNA, 15 bp, Homo sapiens
cccagtagcaaggcc

SEQ ID NO: 307424 - DNA, 15 bp, Homo sapiens
ccccagtagcaaggc

SEQ ID NO: 307425 - DNA, 15 bp, Homo sapiens
tccccagtagcaagg

SEQ ID NO: 307426 - DNA, 15 bp, Homo sapiens
ctccccagtagcaag

SEQ ID NO: 307427 - DNA, 15 bp, Homo sapiens
cctccccagtagcaa

SEQ ID NO: 307428 - DNA, 15 bp, Homo sapiens
tcctccccagtagca

SEQ ID NO: 307429 - DNA, 15 bp, Homo sapiens
atcctccccagtagc

SEQ ID NO: 307430 - DNA, 15 bp, Homo sapiens
catcctccccagtag

SEQ ID NO: 307431 - DNA, 15 bp, Homo sapiens
tcatcctccccagta

SEQ ID NO: 307432 - DNA, 15 bp, Homo sapiens
ctcatcctccccagt

SEQ ID NO: 307433 - DNA, 15 bp, Homo sapiens
cctcatcctccccag

SEQ ID NO: 307434 - DNA, 15 bp, Homo sapiens
gcctcatcctcccca

SEQ ID NO: 307435 - DNA, 15 bp, Homo sapiens
tgcctcatcctcccc

SEQ ID NO: 307436 - DNA, 15 bp, Homo sapiens
ctgcctcatcctccc

SEQ ID NO: 307437 - DNA, 15 bp, Homo sapiens
cctgcctcatcctcc

SEQ ID NO: 307438 - DNA, 15 bp, Homo sapiens
tcctgcctcatcctc

SEQ ID NO: 307439 - DNA, 15 bp, Homo sapiens
ctcctgcctcatcct

SEQ ID NO: 307440 - DNA, 15 bp, Homo sapiens
cctcctgcctcatcc

SEQ ID NO: 307441 - DNA, 15 bp, Homo sapiens
tcctcctgcctcatc

SEQ ID NO: 307442 - DNA, 15 bp, Homo sapiens
gtcctcctgcctcat

SEQ ID NO: 307443 - DNA, 15 bp, Homo sapiens
ggtcctcctgcctca

SEQ ID NO: 307444 - DNA, 15 bp, Homo sapiens
gggtcctcctgcctc

SEQ ID NO: 307445 - DNA, 15 bp, Homo sapiens
ggggtcctcctgcct

SEQ ID NO: 307446 - DNA, 15 bp, Homo sapiens
aggggtcctcctgcc

SEQ ID NO: 307447 - DNA, 15 bp, Homo sapiens
caggggtcctcctgc

SEQ ID NO: 307448 - DNA, 15 bp, Homo sapiens
tcaggggtcctcctg

SEQ ID NO: 307449 - DNA, 15 bp, Homo sapiens
ctcaggggtcctcct

SEQ ID NO: 307450 - DNA, 15 bp, Homo sapiens
gctcaggggtcctcc

SEQ ID NO: 307451 - DNA, 15 bp, Homo sapiens
agctcaggggtcctc

SEQ ID NO: 307452 - DNA, 15 bp, Homo sapiens
gagctcaggggtcct

SEQ ID NO: 307453 - DNA, 15 bp, Homo sapiens
tgagctcaggggtcc

SEQ ID NO: 307454 - DNA, 15 bp, Homo sapiens
ctgagctcaggggtc

SEQ ID NO: 307455 - DNA, 15 bp, Homo sapiens
cctgagctcaggggt

SEQ ID NO: 307456 - DNA, 15 bp, Homo sapiens
acctgagctcagggg

SEQ ID NO: 307457 - DNA, 15 bp, Homo sapiens
cacctgagctcaggg

SEQ ID NO: 307458 - DNA, 15 bp, Homo sapiens
tgtcagtctatatgc

SEQ ID NO: 307459 - DNA, 15 bp, Homo sapiens
atgtcagtctatatg

SEQ ID NO: 307460 - DNA, 15 bp, Homo sapiens
catgtcagtctatat

SEQ ID NO: 307461 - DNA, 15 bp, Homo sapiens
ccatgtcagtctata

SEQ ID NO: 307462 - DNA, 15 bp, Homo sapiens
cccatgtcagtctat

SEQ ID NO: 307463 - DNA, 15 bp, Homo sapiens
ccccatgtcagtcta

SEQ ID NO: 307464 - DNA, 15 bp, Homo sapiens
gccccatgtcagtct

SEQ ID NO: 307465 - DNA, 15 bp, Homo sapiens
agccccatgtcagtc

SEQ ID NO: 307466 - DNA, 15 bp, Homo sapiens
gagccccatgtcagt

SEQ ID NO: 307467 - DNA, 15 bp, Homo sapiens
agagccccatgtcag

SEQ ID NO: 307468 - DNA, 15 bp, Homo sapiens
tagagccccatgtca

SEQ ID NO: 307469 - DNA, 15 bp, Homo sapiens
gtagagccccatgtc

SEQ ID NO: 307470 - DNA, 15 bp, Homo sapiens
agtagagccccatgt

SEQ ID NO: 307471 - DNA, 15 bp, Homo sapiens
gagtagagccccatg

SEQ ID NO: 307472 - DNA, 15 bp, Homo sapiens
agagtagagccccat

SEQ ID NO: 307473 - DNA, 15 bp, Homo sapiens
aagagtagagcccca

SEQ ID NO: 307474 - DNA, 15 bp, Homo sapiens
caagagtagagcccc

SEQ ID NO: 307475 - DNA, 15 bp, Homo sapiens
ccaagagtagagccc

SEQ ID NO: 307476 - DNA, 15 bp, Homo sapiens
gccaagagtagagcc

SEQ ID NO: 307477 - DNA, 15 bp, Homo sapiens
agccaagagtagagc

SEQ ID NO: 307478 - DNA, 15 bp, Homo sapiens
aagccaagagtagag

SEQ ID NO: 307479 - DNA, 15 bp, Homo sapiens
caagccaagagtaga

SEQ ID NO: 307480 - DNA, 15 bp, Homo sapiens
tcaagccaagagtag

SEQ ID NO: 307481 - DNA, 15 bp, Homo sapiens
ctcaagccaagagta

SEQ ID NO: 307482 - DNA, 15 bp, Homo sapiens
gctcaagccaagagt

SEQ ID NO: 307483 - DNA, 15 bp, Homo sapiens
agctcaagccaagag

SEQ ID NO: 307484 - DNA, 15 bp, Homo sapiens
aagctcaagccaaga

SEQ ID NO: 307485 - DNA, 15 bp, Homo sapiens
aaagctcaagccaag

SEQ ID NO: 307486 - DNA, 15 bp, Homo sapiens
aaaagctcaagccaa

SEQ ID NO: 307487 - DNA, 15 bp, Homo sapiens
aaaaagctcaagcca

SEQ ID NO: 307488 - DNA, 15 bp, Homo sapiens
aaaaaagctcaagcc

SEQ ID NO: 307489 - DNA, 15 bp, Homo sapiens
aaaaaaagctcaagc

SEQ ID NO: 307490 - DNA, 15 bp, Homo sapiens
aaaaaaaagctcaag

SEQ ID NO: 307491 - DNA, 15 bp, Homo sapiens
aaaaaaaaagctcaa

SEQ ID NO: 307492 - DNA, 15 bp, Homo sapiens
aaaaaaaaaagctca

SEQ ID NO: 307493 - DNA, 15 bp, Homo sapiens
aaaaaaaaaaagctc

SEQ ID NO: 307494 - DNA, 15 bp, Homo sapiens
aaaaaaaaaaaagct

SEQ ID NO: 307495 - DNA, 15 bp, Homo sapiens
caaaaaaaaaaaagc

SEQ ID NO: 307496 - DNA, 15 bp, Homo sapiens
aacaaaaaaaaaaaa

SEQ ID NO: 307497 - DNA, 15 bp, Homo sapiens
aaacaaaaaaaaaaa

SEQ ID NO: 307498 - DNA, 15 bp, Homo sapiens
aaaacaaaaaaaaaa

SEQ ID NO: 307499 - DNA, 15 bp, Homo sapiens
aaaaaaacaaaaaaa

SEQ ID NO: 307500 - DNA, 15 bp, Homo sapiens
ctcaaaaaaaaacaa

SEQ ID NO: 307501 - DNA, 15 bp, Homo sapiens
tctcaaaaaaaaaca

SEQ ID NO: 307502 - DNA, 15 bp, Homo sapiens
ttctcaaaaaaaaac

SEQ ID NO: 307503 - DNA, 15 bp, Homo sapiens
tttctcaaaaaaaaa

SEQ ID NO: 307504 - DNA, 15 bp, Homo sapiens
ctttctcaaaaaaaa

SEQ ID NO: 307505 - DNA, 15 bp, Homo sapiens
tctttctcaaaaaaa

SEQ ID NO: 307506 - DNA, 15 bp, Homo sapiens
ttctttctcaaaaaa

SEQ ID NO: 307507 - DNA, 15 bp, Homo sapiens
attctttctcaaaaa

SEQ ID NO: 307508 - DNA, 15 bp, Homo sapiens
aattctttctcaaaa

SEQ ID NO: 307509 - DNA, 15 bp, Homo sapiens
gaattctttctcaaa

SEQ ID NO: 307510 - DNA, 15 bp, Homo sapiens
tgaattctttctcaa

SEQ ID NO: 307511 - DNA, 15 bp, Homo sapiens
ttgaattctttctca

SEQ ID NO: 307512 - DNA, 15 bp, Homo sapiens
attgaattctttctc

SEQ ID NO: 307513 - DNA, 15 bp, Homo sapiens
cattgaattctttct

SEQ ID NO: 307514 - DNA, 15 bp, Homo sapiens
ccattgaattctttc

SEQ ID NO: 307515 - DNA, 15 bp, Homo sapiens
gccattgaattcttt

SEQ ID NO: 307516 - DNA, 15 bp, Homo sapiens
tgccattgaattctt

SEQ ID NO: 307517 - DNA, 15 bp, Homo sapiens
ttgccattgaattct

SEQ ID NO: 307518 - DNA, 15 bp, Homo sapiens
gttgccattgaattc

SEQ ID NO: 307519 - DNA, 15 bp, Homo sapiens
tgttgccattgaatt

SEQ ID NO: 307520 - DNA, 15 bp, Homo sapiens
atgttgccattgaat

SEQ ID NO: 307521 - DNA, 15 bp, Homo sapiens
tatgttgccattgaa

SEQ ID NO: 307522 - DNA, 15 bp, Homo sapiens
gtatgttgccattga

SEQ ID NO: 307523 - DNA, 15 bp, Homo sapiens
tgtatgttgccattg

SEQ ID NO: 307524 - DNA, 15 bp, Homo sapiens
gtgtatgttgccatt

SEQ ID NO: 307525 - DNA, 15 bp, Homo sapiens
ggtgtatgttgccat

SEQ ID NO: 307526 - DNA, 15 bp, Homo sapiens
aggtgtatgttgcca

SEQ ID NO: 307527 - DNA, 15 bp, Homo sapiens
aaggtgtatgttgcc

SEQ ID NO: 307528 - DNA, 15 bp, Homo sapiens
taaggtgtatgttgc

SEQ ID NO: 307529 - DNA, 15 bp, Homo sapiens
ataaggtgtatgttg

SEQ ID NO: 307530 - DNA, 15 bp, Homo sapiens
cataaggtgtatgtt

SEQ ID NO: 307531 - DNA, 15 bp, Homo sapiens
tcataaggtgtatgt

SEQ ID NO: 307532 - DNA, 15 bp, Homo sapiens
ttcataaggtgtatg

SEQ ID NO: 307533 - DNA, 15 bp, Homo sapiens
attcataaggtgtat

SEQ ID NO: 307534 - DNA, 15 bp, Homo sapiens
tattcataaggtgta

SEQ ID NO: 307535 - DNA, 15 bp, Homo sapiens
ctattcataaggtgt

SEQ ID NO: 307536 - DNA, 15 bp, Homo sapiens
gctattcataaggtg

SEQ ID NO: 307537 - DNA, 15 bp, Homo sapiens
tgctattcataaggt

SEQ ID NO: 307538 - DNA, 15 bp, Homo sapiens
atgctattcataagg

SEQ ID NO: 307539 - DNA, 15 bp, Homo sapiens
aatgctattcataag

SEQ ID NO: 307540 - DNA, 15 bp, Homo sapiens
caatgctattcataa

SEQ ID NO: 307541 - DNA, 15 bp, Homo sapiens
gcaatgctattcata

SEQ ID NO: 307542 - DNA, 15 bp, Homo sapiens
tgcaatgctattcat

SEQ ID NO: 307543 - DNA, 15 bp, Homo sapiens
ttgcaatgctattca

SEQ ID NO: 307544 - DNA, 15 bp, Homo sapiens
gttgcaatgctattc

SEQ ID NO: 307545 - DNA, 15 bp, Homo sapiens
agttgcaatgctatt

SEQ ID NO: 307546 - DNA, 15 bp, Homo sapiens
cagttgcaatgctat

SEQ ID NO: 307547 - DNA, 15 bp, Homo sapiens
tcagttgcaatgcta

SEQ ID NO: 307548 - DNA, 15 bp, Homo sapiens
ttcagttgcaatgct

SEQ ID NO: 307549 - DNA, 15 bp, Homo sapiens
attcagttgcaatgc

SEQ ID NO: 307550 - DNA, 15 bp, Homo sapiens
aattcagttgcaatg

SEQ ID NO: 307551 - DNA, 15 bp, Homo sapiens
caattcagttgcaat

SEQ ID NO: 307552 - DNA, 15 bp, Homo sapiens
gcaattcagttgcaa

SEQ ID NO: 307553 - DNA, 15 bp, Homo sapiens
agcaattcagttgca

SEQ ID NO: 307554 - DNA, 15 bp, Homo sapiens
gagcaattcagttgc

SEQ ID NO: 307555 - DNA, 15 bp, Homo sapiens
agagcaattcagttg

SEQ ID NO: 307556 - DNA, 15 bp, Homo sapiens
tagagcaattcagtt

SEQ ID NO: 307557 - DNA, 15 bp, Homo sapiens
ctagagcaattcagt

SEQ ID NO: 307558 - DNA, 15 bp, Homo sapiens
actagagcaattcag

SEQ ID NO: 307559 - DNA, 15 bp, Homo sapiens
cactagagcaattca

SEQ ID NO: 307560 - DNA, 15 bp, Homo sapiens
acactagagcaattc

SEQ ID NO: 307561 - DNA, 15 bp, Homo sapiens
cacactagagcaatt

SEQ ID NO: 307562 - DNA, 15 bp, Homo sapiens
tcacactagagcaat

SEQ ID NO: 307563 - DNA, 15 bp, Homo sapiens
gtcacactagagcaa

SEQ ID NO: 307564 - DNA, 15 bp, Homo sapiens
tgtcacactagagca

SEQ ID NO: 307565 - DNA, 15 bp, Homo sapiens
ttgtcacactagagc

SEQ ID NO: 307566 - DNA, 15 bp, Homo sapiens
cttgtcacactagag

SEQ ID NO: 307567 - DNA, 15 bp, Homo sapiens
tcttgtcacactaga

SEQ ID NO: 307568 - DNA, 15 bp, Homo sapiens
ttcttgtcacactag

SEQ ID NO: 307569 - DNA, 15 bp, Homo sapiens
tttcttgtcacacta

SEQ ID NO: 307570 - DNA, 15 bp, Homo sapiens
ttttcttgtcacact

SEQ ID NO: 307571 - DNA, 15 bp, Homo sapiens
tttttcttgtcacac

SEQ ID NO: 307572 - DNA, 15 bp, Homo sapiens
atttttcttgtcaca

SEQ ID NO: 307573 - DNA, 15 bp, Homo sapiens
catttttcttgtcac

SEQ ID NO: 307574 - DNA, 15 bp, Homo sapiens
tcatttttcttgtca

SEQ ID NO: 307575 - DNA, 15 bp, Homo sapiens
ttcatttttcttgtc

SEQ ID NO: 307576 - DNA, 15 bp, Homo sapiens
gttcatttttcttgt

SEQ ID NO: 307577 - DNA, 15 bp, Homo sapiens
agttcatttttcttg

SEQ ID NO: 307578 - DNA, 15 bp, Homo sapiens
gagttcatttttctt

SEQ ID NO: 307579 - DNA, 15 bp, Homo sapiens
tgagttcatttttct

SEQ ID NO: 307580 - DNA, 15 bp, Homo sapiens
atgagttcatttttc

SEQ ID NO: 307581 - DNA, 15 bp, Homo sapiens
aatgagttcattttt

SEQ ID NO: 307582 - DNA, 15 bp, Homo sapiens
taatgagttcatttt

SEQ ID NO: 307583 - DNA, 15 bp, Homo sapiens
ataatgagttcattt

SEQ ID NO: 307584 - DNA, 15 bp, Homo sapiens
aataatgagttcatt

SEQ ID NO: 307585 - DNA, 15 bp, Homo sapiens
taataatgagttcat

SEQ ID NO: 307586 - DNA, 15 bp, Homo sapiens
ttaataatgagttca

SEQ ID NO: 307587 - DNA, 15 bp, Homo sapiens
cttaataatgagttc

SEQ ID NO: 307588 - DNA, 15 bp, Homo sapiens
acttaataatgagtt

SEQ ID NO: 307589 - DNA, 15 bp, Homo sapiens
aacttaataatgagt

SEQ ID NO: 307590 - DNA, 15 bp, Homo sapiens
gaacttaataatgag

SEQ ID NO: 307591 - DNA, 15 bp, Homo sapiens
agaacttaataatga

SEQ ID NO: 307592 - DNA, 15 bp, Homo sapiens
cagaacttaataatg

SEQ ID NO: 307593 - DNA, 15 bp, Homo sapiens
acagaacttaataat

SEQ ID NO: 307594 - DNA, 15 bp, Homo sapiens
gacagaacttaataa

SEQ ID NO: 307595 - DNA, 15 bp, Homo sapiens
ggacagaacttaata

SEQ ID NO: 307596 - DNA, 15 bp, Homo sapiens
gggacagaacttaat

SEQ ID NO: 307597 - DNA, 15 bp, Homo sapiens
agggacagaacttaa

SEQ ID NO: 307598 - DNA, 15 bp, Homo sapiens
tagggacagaactta

SEQ ID NO: 307599 - DNA, 15 bp, Homo sapiens
atagggacagaactt

SEQ ID NO: 307600 - DNA, 15 bp, Homo sapiens
catagggacagaact

SEQ ID NO: 307601 - DNA, 15 bp, Homo sapiens
tcatagggacagaac

SEQ ID NO: 307602 - DNA, 15 bp, Homo sapiens
atcatagggacagaa

SEQ ID NO: 307603 - DNA, 15 bp, Homo sapiens
aatcatagggacaga

SEQ ID NO: 307604 - DNA, 15 bp, Homo sapiens
caatcatagggacag

SEQ ID NO: 307605 - DNA, 15 bp, Homo sapiens
ccaatcatagggaca

SEQ ID NO: 307606 - DNA, 15 bp, Homo sapiens
cccaatcatagggac

SEQ ID NO: 307607 - DNA, 15 bp, Homo sapiens
gcccaatcataggga

SEQ ID NO: 307608 - DNA, 15 bp, Homo sapiens
agcccaatcataggg

SEQ ID NO: 307609 - DNA, 15 bp, Homo sapiens
gagcccaatcatagg

SEQ ID NO: 307610 - DNA, 15 bp, Homo sapiens
agagcccaatcatag

SEQ ID NO: 307611 - DNA, 15 bp, Homo sapiens
cagagcccaatcata

SEQ ID NO: 307612 - DNA, 15 bp, Homo sapiens
tcagagcccaatcat

SEQ ID NO: 307613 - DNA, 15 bp, Homo sapiens
ttcagagcccaatca

SEQ ID NO: 307614 - DNA, 15 bp, Homo sapiens
cttcagagcccaatc

SEQ ID NO: 307615 - DNA, 15 bp, Homo sapiens
tcttcagagcccaat

SEQ ID NO: 307616 - DNA, 15 bp, Homo sapiens
ttcttcagagcccaa

SEQ ID NO: 307617 - DNA, 15 bp, Homo sapiens
cttcttcagagccca

SEQ ID NO: 307618 - DNA, 15 bp, Homo sapiens
ccttcttcagagccc

SEQ ID NO: 307619 - DNA, 15 bp, Homo sapiens
gccttcttcagagcc

SEQ ID NO: 307620 - DNA, 15 bp, Homo sapiens
tgccttcttcagagc

SEQ ID NO: 307621 - DNA, 15 bp, Homo sapiens
ctgccttcttcagag

SEQ ID NO: 307622 - DNA, 15 bp, Homo sapiens
gctgccttcttcaga

SEQ ID NO: 307623 - DNA, 15 bp, Homo sapiens
ggctgccttcttcag

SEQ ID NO: 307624 - DNA, 15 bp, Homo sapiens
gggctgccttcttca

SEQ ID NO: 307625 - DNA, 15 bp, Homo sapiens
tgggctgccttcttc

SEQ ID NO: 307626 - DNA, 15 bp, Homo sapiens
ctgggctgccttctt

SEQ ID NO: 307627 - DNA, 15 bp, Homo sapiens
gctgggctgccttct

SEQ ID NO: 307628 - DNA, 15 bp, Homo sapiens
ggctgggctgccttc

SEQ ID NO: 307629 - DNA, 15 bp, Homo sapiens
tggctgggctgcctt

SEQ ID NO: 307630 - DNA, 15 bp, Homo sapiens
ttggctgggctgcct

SEQ ID NO: 307631 - DNA, 15 bp, Homo sapiens
cttggctgggctgcc

SEQ ID NO: 307632 - DNA, 15 bp, Homo sapiens
acttggctgggctgc

SEQ ID NO: 307633 - DNA, 15 bp, Homo sapiens
cacttggctgggctg

SEQ ID NO: 307634 - DNA, 15 bp, Homo sapiens
ccacttggctgggct

SEQ ID NO: 307635 - DNA, 15 bp, Homo sapiens
tccacttggctgggc

SEQ ID NO: 307636 - DNA, 15 bp, Homo sapiens
ttccacttggctggg

SEQ ID NO: 307637 - DNA, 15 bp, Homo sapiens
attccacttggctgg

SEQ ID NO: 307638 - DNA, 15 bp, Homo sapiens
tattccacttggctg

SEQ ID NO: 307639 - DNA, 15 bp, Homo sapiens
gtattccacttggct

SEQ ID NO: 307640 - DNA, 15 bp, Homo sapiens
agtattccacttggc

SEQ ID NO: 307641 - DNA, 15 bp, Homo sapiens
tagtattccacttgg

SEQ ID NO: 307642 - DNA, 15 bp, Homo sapiens
ttagtattccacttg

SEQ ID NO: 307643 - DNA, 15 bp, Homo sapiens
tttagtattccactt

SEQ ID NO: 307644 - DNA, 15 bp, Homo sapiens
ttttagtattccact

SEQ ID NO: 307645 - DNA, 15 bp, Homo sapiens
tttttagtattccac

SEQ ID NO: 307646 - DNA, 15 bp, Homo sapiens
atttttagtattcca

SEQ ID NO: 307647 - DNA, 15 bp, Homo sapiens
aatttttagtattcc

SEQ ID NO: 307648 - DNA, 15 bp, Homo sapiens
aaatttttagtattc

SEQ ID NO: 307649 - DNA, 15 bp, Homo sapiens
caaatttttagtatt

SEQ ID NO: 307650 - DNA, 15 bp, Homo sapiens
ccaaatttttagtat

SEQ ID NO: 307651 - DNA, 15 bp, Homo sapiens
tccaaatttttagta

SEQ ID NO: 307652 - DNA, 15 bp, Homo sapiens
atccaaatttttagt

SEQ ID NO: 307653 - DNA, 15 bp, Homo sapiens
catccaaatttttag

SEQ ID NO: 307654 - DNA, 15 bp, Homo sapiens
acatccaaattttta

SEQ ID NO: 307655 - DNA, 15 bp, Homo sapiens
tacatccaaattttt

SEQ ID NO: 307656 - DNA, 15 bp, Homo sapiens
atacatccaaatttt

SEQ ID NO: 307657 - DNA, 15 bp, Homo sapiens
aatacatccaaattt

SEQ ID NO: 307658 - DNA, 15 bp, Homo sapiens
aaatacatccaaatt

SEQ ID NO: 307659 - DNA, 15 bp, Homo sapiens
gaaatacatccaaat

SEQ ID NO: 307660 - DNA, 15 bp, Homo sapiens
tgaaatacatccaaa

SEQ ID NO: 307661 - DNA, 15 bp, Homo sapiens
ctgaaatacatccaa

SEQ ID NO: 307662 - DNA, 15 bp, Homo sapiens
cctgaaatacatcca

SEQ ID NO: 307663 - DNA, 15 bp, Homo sapiens
ccctgaaatacatcc

SEQ ID NO: 307664 - DNA, 15 bp, Homo sapiens
tccctgaaatacatc

SEQ ID NO: 307665 - DNA, 15 bp, Homo sapiens
ctccctgaaatacat

SEQ ID NO: 307666 - DNA, 15 bp, Homo sapiens
gctccctgaaataca

SEQ ID NO: 307667 - DNA, 15 bp, Homo sapiens
agctccctgaaatac

SEQ ID NO: 307668 - DNA, 15 bp, Homo sapiens
gagctccctgaaata

SEQ ID NO: 307669 - DNA, 15 bp, Homo sapiens
tgagctccctgaaat

SEQ ID NO: 307670 - DNA, 15 bp, Homo sapiens
atgagctccctgaaa

SEQ ID NO: 307671 - DNA, 15 bp, Homo sapiens
aatgagctccctgaa

SEQ ID NO: 307672 - DNA, 15 bp, Homo sapiens
caatgagctccctga

SEQ ID NO: 307673 - DNA, 15 bp, Homo sapiens
gcaatgagctccctg

SEQ ID NO: 307674 - DNA, 15 bp, Homo sapiens
agcaatgagctccct

SEQ ID NO: 307675 - DNA, 15 bp, Homo sapiens
cagcaatgagctccc

SEQ ID NO: 307676 - DNA, 15 bp, Homo sapiens
acagcaatgagctcc

SEQ ID NO: 307677 - DNA, 15 bp, Homo sapiens
aacagcaatgagctc

SEQ ID NO: 307678 - DNA, 15 bp, Homo sapiens
gaacagcaatgagct

SEQ ID NO: 307679 - DNA, 15 bp, Homo sapiens
ggaacagcaatgagc

SEQ ID NO: 307680 - DNA, 15 bp, Homo sapiens
cggaacagcaatgag

SEQ ID NO: 307681 - DNA, 15 bp, Homo sapiens
ccggaacagcaatga

SEQ ID NO: 307682 - DNA, 15 bp, Homo sapiens
accggaacagcaatg

SEQ ID NO: 307683 - DNA, 15 bp, Homo sapiens
gaccggaacagcaat

SEQ ID NO: 307684 - DNA, 15 bp, Homo sapiens
cgaccggaacagcaa

SEQ ID NO: 307685 - DNA, 15 bp, Homo sapiens
gcgaccggaacagca

SEQ ID NO: 307686 - DNA, 15 bp, Homo sapiens
agcgaccggaacagc

SEQ ID NO: 307687 - DNA, 15 bp, Homo sapiens
cagcgaccggaacag

SEQ ID NO: 307688 - DNA, 15 bp, Homo sapiens
gcagcgaccggaaca

SEQ ID NO: 307689 - DNA, 15 bp, Homo sapiens
agcagcgaccggaac

SEQ ID NO: 307690 - DNA, 15 bp, Homo sapiens
tagcagcgaccggaa

SEQ ID NO: 307691 - DNA, 15 bp, Homo sapiens
atagcagcgaccgga

SEQ ID NO: 307692 - DNA, 15 bp, Homo sapiens
tatagcagcgaccgg

SEQ ID NO: 307693 - DNA, 15 bp, Homo sapiens
ctatagcagcgaccg

SEQ ID NO: 307694 - DNA, 15 bp, Homo sapiens
gctatagcagcgacc

SEQ ID NO: 307695 - DNA, 15 bp, Homo sapiens
agctatagcagcgac

SEQ ID NO: 307696 - DNA, 15 bp, Homo sapiens
tagctatagcagcga

SEQ ID NO: 307697 - DNA, 15 bp, Homo sapiens
ttagctatagcagcg

SEQ ID NO: 307698 - DNA, 15 bp, Homo sapiens
tttagctatagcagc

SEQ ID NO: 307699 - DNA, 15 bp, Homo sapiens
ttttagctatagcag

SEQ ID NO: 307700 - DNA, 15 bp, Homo sapiens
gttttagctatagca

SEQ ID NO: 307701 - DNA, 15 bp, Homo sapiens
agttttagctatagc

SEQ ID NO: 307702 - DNA, 15 bp, Homo sapiens
cagttttagctatag

SEQ ID NO: 307703 - DNA, 15 bp, Homo sapiens
gcagttttagctata

SEQ ID NO: 307704 - DNA, 15 bp, Homo sapiens
agcagttttagctat

SEQ ID NO: 307705 - DNA, 15 bp, Homo sapiens
aagcagttttagcta

SEQ ID NO: 307706 - DNA, 15 bp, Homo sapiens
gaagcagttttagct

SEQ ID NO: 307707 - DNA, 15 bp, Homo sapiens
agaagcagttttagc

SEQ ID NO: 307708 - DNA, 15 bp, Homo sapiens
tagaagcagttttag

SEQ ID NO: 307709 - DNA, 15 bp, Homo sapiens
ctagaagcagtttta

SEQ ID NO: 307710 - DNA, 15 bp, Homo sapiens
tctagaagcagtttt

SEQ ID NO: 307711 - DNA, 15 bp, Homo sapiens
ctctagaagcagttt

SEQ ID NO: 307712 - DNA, 15 bp, Homo sapiens
tctctagaagcagtt

SEQ ID NO: 307713 - DNA, 15 bp, Homo sapiens
ttctctagaagcagt

SEQ ID NO: 307714 - DNA, 15 bp, Homo sapiens
tttctctagaagcag

SEQ ID NO: 307715 - DNA, 15 bp, Homo sapiens
atttctctagaagca

SEQ ID NO: 307716 - DNA, 15 bp, Homo sapiens
aatttctctagaagc

SEQ ID NO: 307717 - DNA, 15 bp, Homo sapiens
taatttctctagaag

SEQ ID NO: 307718 - DNA, 15 bp, Homo sapiens
gtaatttctctagaa

SEQ ID NO: 307719 - DNA, 15 bp, Homo sapiens
agtaatttctctaga

SEQ ID NO: 307720 - DNA, 15 bp, Homo sapiens
gagtaatttctctag

SEQ ID NO: 307721 - DNA, 15 bp, Homo sapiens
ggagtaatttctcta

SEQ ID NO: 307722 - DNA, 15 bp, Homo sapiens
aggagtaatttctct

SEQ ID NO: 307723 - DNA, 15 bp, Homo sapiens
gaggagtaatttctc

SEQ ID NO: 307724 - DNA, 15 bp, Homo sapiens
agaggagtaatttct

SEQ ID NO: 307725 - DNA, 15 bp, Homo sapiens
gagaggagtaatttc

SEQ ID NO: 307726 - DNA, 15 bp, Homo sapiens
ggagaggagtaattt

SEQ ID NO: 307727 - DNA, 15 bp, Homo sapiens
tggagaggagtaatt

SEQ ID NO: 307728 - DNA, 15 bp, Homo sapiens
ttggagaggagtaat

SEQ ID NO: 307729 - DNA, 15 bp, Homo sapiens
cttggagaggagtaa

SEQ ID NO: 307730 - DNA, 15 bp, Homo sapiens
tcttggagaggagta

SEQ ID NO: 307731 - DNA, 15 bp, Homo sapiens
ctcttggagaggagt

SEQ ID NO: 307732 - DNA, 15 bp, Homo sapiens
tctcttggagaggag

SEQ ID NO: 307733 - DNA, 15 bp, Homo sapiens
atctcttggagagga

SEQ ID NO: 307734 - DNA, 15 bp, Homo sapiens
aatctcttggagagg

SEQ ID NO: 307735 - DNA, 15 bp, Homo sapiens
aaatctcttggagag

SEQ ID NO: 307736 - DNA, 15 bp, Homo sapiens
gaaatctcttggaga

SEQ ID NO: 307737 - DNA, 15 bp, Homo sapiens
ggaaatctcttggag

SEQ ID NO: 307738 - DNA, 15 bp, Homo sapiens
tggaaatctcttgga

SEQ ID NO: 307739 - DNA, 15 bp, Homo sapiens
ttggaaatctcttgg

SEQ ID NO: 307740 - DNA, 15 bp, Homo sapiens
attggaaatctcttg

SEQ ID NO: 307741 - DNA, 15 bp, Homo sapiens
aattggaaatctctt

SEQ ID NO: 307742 - DNA, 15 bp, Homo sapiens
caattggaaatctct

SEQ ID NO: 307743 - DNA, 15 bp, Homo sapiens
acaattggaaatctc

SEQ ID NO: 307744 - DNA, 15 bp, Homo sapiens
cacaattggaaatct

SEQ ID NO: 307745 - DNA, 15 bp, Homo sapiens
acacaattggaaatc

SEQ ID NO: 307746 - DNA, 15 bp, Homo sapiens
aacacaattggaaat

SEQ ID NO: 307747 - DNA, 15 bp, Homo sapiens
gaacacaattggaaa

SEQ ID NO: 307748 - DNA, 15 bp, Homo sapiens
ggaacacaattggaa

SEQ ID NO: 307749 - DNA, 15 bp, Homo sapiens
gggaacacaattgga

SEQ ID NO: 307750 - DNA, 15 bp, Homo sapiens
agggaacacaattgg

SEQ ID NO: 307751 - DNA, 15 bp, Homo sapiens
aagggaacacaattg

SEQ ID NO: 307752 - DNA, 15 bp, Homo sapiens
caagggaacacaatt

SEQ ID NO: 307753 - DNA, 15 bp, Homo sapiens
tcaagggaacacaat

SEQ ID NO: 307754 - DNA, 15 bp, Homo sapiens
atcaagggaacacaa

SEQ ID NO: 307755 - DNA, 15 bp, Homo sapiens
tatcaagggaacaca

SEQ ID NO: 307756 - DNA, 15 bp, Homo sapiens
atatcaagggaacac

SEQ ID NO: 307757 - DNA, 15 bp, Homo sapiens
aatatcaagggaaca

SEQ ID NO: 307758 - DNA, 15 bp, Homo sapiens
caatatcaagggaac

SEQ ID NO: 307759 - DNA, 15 bp, Homo sapiens
gcaatatcaagggaa

SEQ ID NO: 307760 - DNA, 15 bp, Homo sapiens
agcaatatcaaggga

SEQ ID NO: 307761 - DNA, 15 bp, Homo sapiens
aagcaatatcaaggg

SEQ ID NO: 307762 - DNA, 15 bp, Homo sapiens
aaagcaatatcaagg

SEQ ID NO: 307763 - DNA, 15 bp, Homo sapiens
caaagcaatatcaag

SEQ ID NO: 307764 - DNA, 15 bp, Homo sapiens
acaaagcaatatcaa

SEQ ID NO: 307765 - DNA, 15 bp, Homo sapiens
gacaaagcaatatca

SEQ ID NO: 307766 - DNA, 15 bp, Homo sapiens
tgacaaagcaatatc

SEQ ID NO: 307767 - DNA, 15 bp, Homo sapiens
ctgacaaagcaatat

SEQ ID NO: 307768 - DNA, 15 bp, Homo sapiens
cctgacaaagcaata

SEQ ID NO: 307769 - DNA, 15 bp, Homo sapiens
ccctgacaaagcaat

SEQ ID NO: 307770 - DNA, 15 bp, Homo sapiens
tccctgacaaagcaa

SEQ ID NO: 307771 - DNA, 15 bp, Homo sapiens
gtccctgacaaagca

SEQ ID NO: 307772 - DNA, 15 bp, Homo sapiens
tgtccctgacaaagc

SEQ ID NO: 307773 - DNA, 15 bp, Homo sapiens
gtgtccctgacaaag

SEQ ID NO: 307774 - DNA, 15 bp, Homo sapiens
cgtgtccctgacaaa

SEQ ID NO: 307775 - DNA, 15 bp, Homo sapiens
gcgtgtccctgacaa

SEQ ID NO: 307776 - DNA, 15 bp, Homo sapiens
agcgtgtccctgaca

SEQ ID NO: 307777 - DNA, 15 bp, Homo sapiens
aagcgtgtccctgac

SEQ ID NO: 307778 - DNA, 15 bp, Homo sapiens
aaagcgtgtccctga

SEQ ID NO: 307779 - DNA, 15 bp, Homo sapiens
taaagcgtgtccctg

SEQ ID NO: 307780 - DNA, 15 bp, Homo sapiens
ttaaagcgtgtccct

SEQ ID NO: 307781 - DNA, 15 bp, Homo sapiens
tttaaagcgtgtccc

SEQ ID NO: 307782 - DNA, 15 bp, Homo sapiens
atttaaagcgtgtcc

SEQ ID NO: 307783 - DNA, 15 bp, Homo sapiens
tatttaaagcgtgtc

SEQ ID NO: 307784 - DNA, 15 bp, Homo sapiens
ttatttaaagcgtgt

SEQ ID NO: 307785 - DNA, 15 bp, Homo sapiens
cttatttaaagcgtg

SEQ ID NO: 307786 - DNA, 15 bp, Homo sapiens
tcttatttaaagcgt

SEQ ID NO: 307787 - DNA, 15 bp, Homo sapiens
atcttatttaaagcg

SEQ ID NO: 307788 - DNA, 15 bp, Homo sapiens
catcttatttaaagc

SEQ ID NO: 307789 - DNA, 15 bp, Homo sapiens
gcatcttatttaaag

SEQ ID NO: 307790 - DNA, 15 bp, Homo sapiens
ggcatcttatttaaa

SEQ ID NO: 307791 - DNA, 15 bp, Homo sapiens
gggcatcttatttaa

SEQ ID NO: 307792 - DNA, 15 bp, Homo sapiens
agggcatcttattta

SEQ ID NO: 307793 - DNA, 15 bp, Homo sapiens
gagggcatcttattt

SEQ ID NO: 307794 - DNA, 15 bp, Homo sapiens
ggagggcatcttatt

SEQ ID NO: 307795 - DNA, 15 bp, Homo sapiens
cggagggcatcttat

SEQ ID NO: 307796 - DNA, 15 bp, Homo sapiens
acggagggcatctta

SEQ ID NO: 307797 - DNA, 15 bp, Homo sapiens
tacggagggcatctt

SEQ ID NO: 307798 - DNA, 15 bp, Homo sapiens
ttacggagggcatct

SEQ ID NO: 307799 - DNA, 15 bp, Homo sapiens
cttacggagggcatc

SEQ ID NO: 307800 - DNA, 15 bp, Homo sapiens
acttacggagggcat

SEQ ID NO: 307801 - DNA, 15 bp, Homo sapiens
tacttacggagggca

SEQ ID NO: 307802 - DNA, 15 bp, Homo sapiens
ctacttacggagggc

SEQ ID NO: 307803 - DNA, 15 bp, Homo sapiens
tctacttacggaggg

SEQ ID NO: 307804 - DNA, 15 bp, Homo sapiens
ctctacttacggagg

SEQ ID NO: 307805 - DNA, 15 bp, Homo sapiens
tctctacttacggag

SEQ ID NO: 307806 - DNA, 15 bp, Homo sapiens
atctctacttacgga

SEQ ID NO: 307807 - DNA, 15 bp, Homo sapiens
aatctctacttacgg

SEQ ID NO: 307808 - DNA, 15 bp, Homo sapiens
gaatctctacttacg

SEQ ID NO: 307809 - DNA, 15 bp, Homo sapiens
agaatctctacttac

SEQ ID NO: 307810 - DNA, 15 bp, Homo sapiens
tagaatctctactta

SEQ ID NO: 307811 - DNA, 15 bp, Homo sapiens
ttagaatctctactt

SEQ ID NO: 307812 - DNA, 15 bp, Homo sapiens
tttagaatctctact

SEQ ID NO: 307813 - DNA, 15 bp, Homo sapiens
atttagaatctctac

SEQ ID NO: 307814 - DNA, 15 bp, Homo sapiens
gatttagaatctcta

SEQ ID NO: 307815 - DNA, 15 bp, Homo sapiens
ggatttagaatctct

SEQ ID NO: 307816 - DNA, 15 bp, Homo sapiens
aggatttagaatctc

SEQ ID NO: 307817 - DNA, 15 bp, Homo sapiens
gaggatttagaatct

SEQ ID NO: 307818 - DNA, 15 bp, Homo sapiens
tgaggatttagaatc

SEQ ID NO: 307819 - DNA, 15 bp, Homo sapiens
atgaggatttagaat

SEQ ID NO: 307820 - DNA, 15 bp, Homo sapiens
aatgaggatttagaa

SEQ ID NO: 307821 - DNA, 15 bp, Homo sapiens
caatgaggatttaga

SEQ ID NO: 307822 - DNA, 15 bp, Homo sapiens
tcaatgaggatttag

SEQ ID NO: 307823 - DNA, 15 bp, Homo sapiens
atcaatgaggattta

SEQ ID NO: 307824 - DNA, 15 bp, Homo sapiens
aatcaatgaggattt

SEQ ID NO: 307825 - DNA, 15 bp, Homo sapiens
aaatcaatgaggatt

SEQ ID NO: 307826 - DNA, 15 bp, Homo sapiens
caaatcaatgaggat

SEQ ID NO: 307827 - DNA, 15 bp, Homo sapiens
gcaaatcaatgagga

SEQ ID NO: 307828 - DNA, 15 bp, Homo sapiens
tgcaaatcaatgagg

SEQ ID NO: 307829 - DNA, 15 bp, Homo sapiens
atgcaaatcaatgag

SEQ ID NO: 307830 - DNA, 15 bp, Homo sapiens
catgcaaatcaatga

SEQ ID NO: 307831 - DNA, 15 bp, Homo sapiens
ccatgcaaatcaatg

SEQ ID NO: 307832 - DNA, 15 bp, Homo sapiens
gccatgcaaatcaat

SEQ ID NO: 307833 - DNA, 15 bp, Homo sapiens
agccatgcaaatcaa

SEQ ID NO: 307834 - DNA, 15 bp, Homo sapiens
gagccatgcaaatca

SEQ ID NO: 307835 - DNA, 15 bp, Homo sapiens
agagccatgcaaatc

SEQ ID NO: 307836 - DNA, 15 bp, Homo sapiens
cagagccatgcaaat

SEQ ID NO: 307837 - DNA, 15 bp, Homo sapiens
acagagccatgcaaa

SEQ ID NO: 307838 - DNA, 15 bp, Homo sapiens
aacagagccatgcaa

SEQ ID NO: 307839 - DNA, 15 bp, Homo sapiens
taacagagccatgca

SEQ ID NO: 307840 - DNA, 15 bp, Homo sapiens
ataacagagccatgc

SEQ ID NO: 307841 - DNA, 15 bp, Homo sapiens
tataacagagccatg

SEQ ID NO: 307842 - DNA, 15 bp, Homo sapiens
atataacagagccat

SEQ ID NO: 307843 - DNA, 15 bp, Homo sapiens
catataacagagcca

SEQ ID NO: 307844 - DNA, 15 bp, Homo sapiens
gcatataacagagcc

SEQ ID NO: 307845 - DNA, 15 bp, Homo sapiens
ggcatataacagagc

SEQ ID NO: 307846 - DNA, 15 bp, Homo sapiens
tggcatataacagag

SEQ ID NO: 307847 - DNA, 15 bp, Homo sapiens
ttggcatataacaga

SEQ ID NO: 307848 - DNA, 15 bp, Homo sapiens
tttggcatataacag

SEQ ID NO: 307849 - DNA, 15 bp, Homo sapiens
atttggcatataaca

SEQ ID NO: 307850 - DNA, 15 bp, Homo sapiens
aatttggcatataac

SEQ ID NO: 307851 - DNA, 15 bp, Homo sapiens
caatttggcatataa

SEQ ID NO: 307852 - DNA, 15 bp, Homo sapiens
ccaatttggcatata

SEQ ID NO: 307853 - DNA, 15 bp, Homo sapiens
tccaatttggcatat

SEQ ID NO: 307854 - DNA, 15 bp, Homo sapiens
ttccaatttggcata

SEQ ID NO: 307855 - DNA, 15 bp, Homo sapiens
tttccaatttggcat

SEQ ID NO: 307856 - DNA, 15 bp, Homo sapiens
atttccaatttggca

SEQ ID NO: 307857 - DNA, 15 bp, Homo sapiens
tatttccaatttggc

SEQ ID NO: 307858 - DNA, 15 bp, Homo sapiens
gtatttccaatttgg

SEQ ID NO: 307859 - DNA, 15 bp, Homo sapiens
ggtatttccaatttg

SEQ ID NO: 307860 - DNA, 15 bp, Homo sapiens
tggtatttccaattt

SEQ ID NO: 307861 - DNA, 15 bp, Homo sapiens
atggtatttccaatt

SEQ ID NO: 307862 - DNA, 15 bp, Homo sapiens
ggatggtatttccaa

SEQ ID NO: 307863 - DNA, 15 bp, Homo sapiens
aggatggtatttcca

SEQ ID NO: 307864 - DNA, 15 bp, Homo sapiens
taggatggtatttcc

SEQ ID NO: 307865 - DNA, 15 bp, Homo sapiens
ttaggatggtatttc

SEQ ID NO: 307866 - DNA, 15 bp, Homo sapiens
tttaggatggtattt

SEQ ID NO: 307867 - DNA, 15 bp, Homo sapiens
ttttaggatggtatt

SEQ ID NO: 307868 - DNA, 15 bp, Homo sapiens
attttaggatggtat

SEQ ID NO: 307869 - DNA, 15 bp, Homo sapiens
cattttaggatggta

SEQ ID NO: 307870 - DNA, 15 bp, Homo sapiens
tcattttaggatggt

SEQ ID NO: 307871 - DNA, 15 bp, Homo sapiens
ttcattttaggatgg

SEQ ID NO: 307872 - DNA, 15 bp, Homo sapiens
attcattttaggatg

SEQ ID NO: 307873 - DNA, 15 bp, Homo sapiens
cattcattttaggat

SEQ ID NO: 307874 - DNA, 15 bp, Homo sapiens
acattcattttagga

SEQ ID NO: 307875 - DNA, 15 bp, Homo sapiens
gacattcattttagg

SEQ ID NO: 307876 - DNA, 15 bp, Homo sapiens
agacattcattttag

SEQ ID NO: 307877 - DNA, 15 bp, Homo sapiens
aagacattcatttta

SEQ ID NO: 307878 - DNA, 15 bp, Homo sapiens
gaagacattcatttt

SEQ ID NO: 307879 - DNA, 15 bp, Homo sapiens
tgaagacattcattt

SEQ ID NO: 307880 - DNA, 15 bp, Homo sapiens
ttgaagacattcatt

SEQ ID NO: 307881 - DNA, 15 bp, Homo sapiens
cttgaagacattcat

SEQ ID NO: 307882 - DNA, 15 bp, Homo sapiens
ccttgaagacattca

SEQ ID NO: 307883 - DNA, 15 bp, Homo sapiens
tccttgaagacattc

SEQ ID NO: 307884 - DNA, 15 bp, Homo sapiens
ttccttgaagacatt

SEQ ID NO: 307885 - DNA, 15 bp, Homo sapiens
gttccttgaagacat

SEQ ID NO: 307886 - DNA, 15 bp, Homo sapiens
cgttccttgaagaca

SEQ ID NO: 307887 - DNA, 15 bp, Homo sapiens
tcgttccttgaagac

SEQ ID NO: 307888 - DNA, 15 bp, Homo sapiens
ttcgttccttgaaga

SEQ ID NO: 307889 - DNA, 15 bp, Homo sapiens
attcgttccttgaag

SEQ ID NO: 307890 - DNA, 15 bp, Homo sapiens
aattcgttccttgaa

SEQ ID NO: 307891 - DNA, 15 bp, Homo sapiens
gaattcgttccttga

SEQ ID NO: 307892 - DNA, 15 bp, Homo sapiens
tgaattcgttccttg

SEQ ID NO: 307893 - DNA, 15 bp, Homo sapiens
ctgaattcgttcctt

SEQ ID NO: 307894 - DNA, 15 bp, Homo sapiens
gctgaattcgttcct

SEQ ID NO: 307895 - DNA, 15 bp, Homo sapiens
tgctgaattcgttcc

SEQ ID NO: 307896 - DNA, 15 bp, Homo sapiens
ctgctgaattcgttc

SEQ ID NO: 307897 - DNA, 15 bp, Homo sapiens
actgctgaattcgtt

SEQ ID NO: 307898 - DNA, 15 bp, Homo sapiens
tactgctgaattcgt

SEQ ID NO: 307899 - DNA, 15 bp, Homo sapiens
ctactgctgaattcg

SEQ ID NO: 307900 - DNA, 15 bp, Homo sapiens
cctactgctgaattc

SEQ ID NO: 307901 - DNA, 15 bp, Homo sapiens
acctactgctgaatt

SEQ ID NO: 307902 - DNA, 15 bp, Homo sapiens
aacctactgctgaat

SEQ ID NO: 307903 - DNA, 15 bp, Homo sapiens
aaacctactgctgaa

SEQ ID NO: 307904 - DNA, 15 bp, Homo sapiens
caaacctactgctga

SEQ ID NO: 307905 - DNA, 15 bp, Homo sapiens
gcaaacctactgctg

SEQ ID NO: 307906 - DNA, 15 bp, Homo sapiens
tgcaaacctactgct

SEQ ID NO: 307907 - DNA, 15 bp, Homo sapiens
atgcaaacctactgc

SEQ ID NO: 307908 - DNA, 15 bp, Homo sapiens
catgcaaacctactg

SEQ ID NO: 307909 - DNA, 15 bp, Homo sapiens
ccatgcaaacctact

SEQ ID NO: 307910 - DNA, 15 bp, Homo sapiens
tccatgcaaacctac

SEQ ID NO: 307911 - DNA, 15 bp, Homo sapiens
atccatgcaaaccta

SEQ ID NO: 307912 - DNA, 15 bp, Homo sapiens
catccatgcaaacct

SEQ ID NO: 307913 - DNA, 15 bp, Homo sapiens
gcatccatgcaaacc

SEQ ID NO: 307914 - DNA, 15 bp, Homo sapiens
ggcatccatgcaaac

SEQ ID NO: 307915 - DNA, 15 bp, Homo sapiens
tggcatccatgcaaa

SEQ ID NO: 307916 - DNA, 15 bp, Homo sapiens
ttggcatccatgcaa

SEQ ID NO: 307917 - DNA, 15 bp, Homo sapiens
tttggcatccatgca

SEQ ID NO: 307918 - DNA, 15 bp, Homo sapiens
ttttggcatccatgc

SEQ ID NO: 307919 - DNA, 15 bp, Homo sapiens
gttttggcatccatg

SEQ ID NO: 307920 - DNA, 15 bp, Homo sapiens
ggttttggcatccat

SEQ ID NO: 307921 - DNA, 15 bp, Homo sapiens
aggttttggcatcca

SEQ ID NO: 307922 - DNA, 15 bp, Homo sapiens
gaggttttggcatcc

SEQ ID NO: 307923 - DNA, 15 bp, Homo sapiens
agaggttttggcatc

SEQ ID NO: 307924 - DNA, 15 bp, Homo sapiens
gagaggttttggcat

SEQ ID NO: 307925 - DNA, 15 bp, Homo sapiens
ggagaggttttggca

SEQ ID NO: 307926 - DNA, 15 bp, Homo sapiens
tggagaggttttggc

SEQ ID NO: 307927 - DNA, 15 bp, Homo sapiens
ctggagaggttttgg

SEQ ID NO: 307928 - DNA, 15 bp, Homo sapiens
tctggagaggttttg

SEQ ID NO: 307929 - DNA, 15 bp, Homo sapiens
atctggagaggtttt

SEQ ID NO: 307930 - DNA, 15 bp, Homo sapiens
catctggagaggttt

SEQ ID NO: 307931 - DNA, 15 bp, Homo sapiens
ccatctggagaggtt

SEQ ID NO: 307932 - DNA, 15 bp, Homo sapiens
gccatctggagaggt

SEQ ID NO: 307933 - DNA, 15 bp, Homo sapiens
agccatctggagagg

SEQ ID NO: 307934 - DNA, 15 bp, Homo sapiens
cagccatctggagag

SEQ ID NO: 307935 - DNA, 15 bp, Homo sapiens
acagccatctggaga

SEQ ID NO: 307936 - DNA, 15 bp, Homo sapiens
tacagccatctggag

SEQ ID NO: 307937 - DNA, 15 bp, Homo sapiens
gtacagccatctgga

SEQ ID NO: 307938 - DNA, 15 bp, Homo sapiens
agtacagccatctgg

SEQ ID NO: 307939 - DNA, 15 bp, Homo sapiens
aagtacagccatctg

SEQ ID NO: 307940 - DNA, 15 bp, Homo sapiens
gaagtacagccatct

SEQ ID NO: 307941 - DNA, 15 bp, Homo sapiens
tgaagtacagccatc

SEQ ID NO: 307942 - DNA, 15 bp, Homo sapiens
atgaagtacagccat

SEQ ID NO: 307943 - DNA, 15 bp, Homo sapiens
gatgaagtacagcca

SEQ ID NO: 307944 - DNA, 15 bp, Homo sapiens
agatgaagtacagcc

SEQ ID NO: 307945 - DNA, 15 bp, Homo sapiens
cagatgaagtacagc

SEQ ID NO: 307946 - DNA, 15 bp, Homo sapiens
ccagatgaagtacag

SEQ ID NO: 307947 - DNA, 15 bp, Homo sapiens
cccagatgaagtaca

SEQ ID NO: 307948 - DNA, 15 bp, Homo sapiens
ccccagatgaagtac

SEQ ID NO: 307949 - DNA, 15 bp, Homo sapiens
accccagatgaagta

SEQ ID NO: 307950 - DNA, 15 bp, Homo sapiens
taccccagatgaagt

SEQ ID NO: 307951 - DNA, 15 bp, Homo sapiens
ataccccagatgaag

SEQ ID NO: 307952 - DNA, 15 bp, Homo sapiens
aataccccagatgaa

SEQ ID NO: 307953 - DNA, 15 bp, Homo sapiens
taataccccagatga

SEQ ID NO: 307954 - DNA, 15 bp, Homo sapiens
ataataccccagatg

SEQ ID NO: 307955 - DNA, 15 bp, Homo sapiens
aataataccccagat

SEQ ID NO: 307956 - DNA, 15 bp, Homo sapiens
caataataccccaga

SEQ ID NO: 307957 - DNA, 15 bp, Homo sapiens
ccaataataccccag

SEQ ID NO: 307958 - DNA, 15 bp, Homo sapiens
tccaataatacccca

SEQ ID NO: 307959 - DNA, 15 bp, Homo sapiens
ttccaataatacccc

SEQ ID NO: 307960 - DNA, 15 bp, Homo sapiens
gttccaataataccc

SEQ ID NO: 307961 - DNA, 15 bp, Homo sapiens
tgttccaataatacc

SEQ ID NO: 307962 - DNA, 15 bp, Homo sapiens
ctgttccaataatac

SEQ ID NO: 307963 - DNA, 15 bp, Homo sapiens
gctgttccaataata

SEQ ID NO: 307964 - DNA, 15 bp, Homo sapiens
ggctgttccaataat

SEQ ID NO: 307965 - DNA, 15 bp, Homo sapiens
aggctgttccaataa

SEQ ID NO: 307966 - DNA, 15 bp, Homo sapiens
gaggctgttccaata

SEQ ID NO: 307967 - DNA, 15 bp, Homo sapiens
ggaggctgttccaat

SEQ ID NO: 307968 - DNA, 15 bp, Homo sapiens
aggaggctgttccaa

SEQ ID NO: 307969 - DNA, 15 bp, Homo sapiens
gaggaggctgttcca

SEQ ID NO: 307970 - DNA, 15 bp, Homo sapiens
tgaggaggctgttcc

SEQ ID NO: 307971 - DNA, 15 bp, Homo sapiens
ctgaggaggctgttc

SEQ ID NO: 307972 - DNA, 15 bp, Homo sapiens
gctgaggaggctgtt

SEQ ID NO: 307973 - DNA, 15 bp, Homo sapiens
tgctgaggaggctgt

SEQ ID NO: 307974 - DNA, 15 bp, Homo sapiens
ttgctgaggaggctg

SEQ ID NO: 307975 - DNA, 15 bp, Homo sapiens
gttgctgaggaggct

SEQ ID NO: 307976 - DNA, 15 bp, Homo sapiens
ggttgctgaggaggc

SEQ ID NO: 307977 - DNA, 15 bp, Homo sapiens
aggttgctgaggagg

SEQ ID NO: 307978 - DNA, 15 bp, Homo sapiens
taggttgctgaggag

SEQ ID NO: 307979 - DNA, 15 bp, Homo sapiens
ttaggttgctgagga

SEQ ID NO: 307980 - DNA, 15 bp, Homo sapiens
tttaggttgctgagg

SEQ ID NO: 307981 - DNA, 15 bp, Homo sapiens
atttaggttgctgag

SEQ ID NO: 307982 - DNA, 15 bp, Homo sapiens
gatttaggttgctga

SEQ ID NO: 307983 - DNA, 15 bp, Homo sapiens
agatttaggttgctg

SEQ ID NO: 307984 - DNA, 15 bp, Homo sapiens
gagatttaggttgct

SEQ ID NO: 307985 - DNA, 15 bp, Homo sapiens
agagatttaggttgc

SEQ ID NO: 307986 - DNA, 15 bp, Homo sapiens
tagagatttaggttg

SEQ ID NO: 307987 - DNA, 15 bp, Homo sapiens
ctagagatttaggtt

SEQ ID NO: 307988 - DNA, 15 bp, Homo sapiens
cctagagatttaggt

SEQ ID NO: 307989 - DNA, 15 bp, Homo sapiens
tcctagagatttagg

SEQ ID NO: 307990 - DNA, 15 bp, Homo sapiens
gtcctagagatttag

SEQ ID NO: 307991 - DNA, 15 bp, Homo sapiens
agtcctagagattta

SEQ ID NO: 307992 - DNA, 15 bp, Homo sapiens
cagtcctagagattt

SEQ ID NO: 307993 - DNA, 15 bp, Homo sapiens
ccagtcctagagatt

SEQ ID NO: 307994 - DNA, 15 bp, Homo sapiens
tccagtcctagagat

SEQ ID NO: 307995 - DNA, 15 bp, Homo sapiens
gtccagtcctagaga

SEQ ID NO: 307996 - DNA, 15 bp, Homo sapiens
cgtccagtcctagag

SEQ ID NO: 307997 - DNA, 15 bp, Homo sapiens
acgtccagtcctaga

SEQ ID NO: 307998 - DNA, 15 bp, Homo sapiens
tacgtccagtcctag

SEQ ID NO: 307999 - DNA, 15 bp, Homo sapiens
atacgtccagtccta

SEQ ID NO: 308000 - DNA, 15 bp, Homo sapiens
tatacgtccagtcct

SEQ ID NO: 308001 - DNA, 15 bp, Homo sapiens
atatacgtccagtcc

SEQ ID NO: 308002 - DNA, 15 bp, Homo sapiens
aatatacgtccagtc

SEQ ID NO: 308003 - DNA, 15 bp, Homo sapiens
aaatatacgtccagt

SEQ ID NO: 308004 - DNA, 15 bp, Homo sapiens
taaatatacgtccag

SEQ ID NO: 308005 - DNA, 15 bp, Homo sapiens
gtaaatatacgtcca

SEQ ID NO: 308006 - DNA, 15 bp, Homo sapiens
ggtaaatatacgtcc

SEQ ID NO: 308007 - DNA, 15 bp, Homo sapiens
aggtaaatatacgtc

SEQ ID NO: 308008 - DNA, 15 bp, Homo sapiens
aaggtaaatatacgt

SEQ ID NO: 308009 - DNA, 15 bp, Homo sapiens
gaaggtaaatatacg

SEQ ID NO: 308010 - DNA, 15 bp, Homo sapiens
tgaaggtaaatatac

SEQ ID NO: 308011 - DNA, 15 bp, Homo sapiens
gtgaaggtaaatata

SEQ ID NO: 308012 - DNA, 15 bp, Homo sapiens
tgtgaaggtaaatat

SEQ ID NO: 308013 - DNA, 15 bp, Homo sapiens
atgtgaaggtaaata

SEQ ID NO: 308014 - DNA, 15 bp, Homo sapiens
gatgtgaaggtaaat

SEQ ID NO: 308015 - DNA, 15 bp, Homo sapiens
tgatgtgaaggtaaa

SEQ ID NO: 308016 - DNA, 15 bp, Homo sapiens
atgatgtgaaggtaa

SEQ ID NO: 308017 - DNA, 15 bp, Homo sapiens
gatgatgtgaaggta

SEQ ID NO: 308018 - DNA, 15 bp, Homo sapiens
agatgatgtgaaggt

SEQ ID NO: 308019 - DNA, 15 bp, Homo sapiens
aagatgatgtgaagg

SEQ ID NO: 308020 - DNA, 15 bp, Homo sapiens
gaagatgatgtgaag

SEQ ID NO: 308021 - DNA, 15 bp, Homo sapiens
tgaagatgatgtgaa

SEQ ID NO: 308022 - DNA, 15 bp, Homo sapiens
ttgaagatgatgtga

SEQ ID NO: 308023 - DNA, 15 bp, Homo sapiens
tttgaagatgatgtg

SEQ ID NO: 308024 - DNA, 15 bp, Homo sapiens
ttttgaagatgatgt

SEQ ID NO: 308025 - DNA, 15 bp, Homo sapiens
tttttgaagatgatg

SEQ ID NO: 308026 - DNA, 15 bp, Homo sapiens
ttttttgaagatgat

SEQ ID NO: 308027 - DNA, 15 bp, Homo sapiens
attttttgaagatga

SEQ ID NO: 308028 - DNA, 15 bp, Homo sapiens
tattttttgaagatg

SEQ ID NO: 308029 - DNA, 15 bp, Homo sapiens
ctattttttgaagat

SEQ ID NO: 308030 - DNA, 15 bp, Homo sapiens
tctattttttgaaga

SEQ ID NO: 308031 - DNA, 15 bp, Homo sapiens
atctattttttgaag

SEQ ID NO: 308032 - DNA, 15 bp, Homo sapiens
catctattttttgaa

SEQ ID NO: 308033 - DNA, 15 bp, Homo sapiens
gcatctattttttga

SEQ ID NO: 308034 - DNA, 15 bp, Homo sapiens
ggcatctattttttg

SEQ ID NO: 308035 - DNA, 15 bp, Homo sapiens
aggcatctatttttt

SEQ ID NO: 308036 - DNA, 15 bp, Homo sapiens
aaggcatctattttt

SEQ ID NO: 308037 - DNA, 15 bp, Homo sapiens
caaggcatctatttt

SEQ ID NO: 308038 - DNA, 15 bp, Homo sapiens
tcaaggcatctattt

SEQ ID NO: 308039 - DNA, 15 bp, Homo sapiens
atcaaggcatctatt

SEQ ID NO: 308040 - DNA, 15 bp, Homo sapiens
aatcaaggcatctat

SEQ ID NO: 308041 - DNA, 15 bp, Homo sapiens
gaatcaaggcatcta

SEQ ID NO: 308042 - DNA, 15 bp, Homo sapiens
agaatcaaggcatct

SEQ ID NO: 308043 - DNA, 15 bp, Homo sapiens
aagaatcaaggcatc

SEQ ID NO: 308044 - DNA, 15 bp, Homo sapiens
aaagaatcaaggcat

SEQ ID NO: 308045 - DNA, 15 bp, Homo sapiens
aaaagaatcaaggca

SEQ ID NO: 308046 - DNA, 15 bp, Homo sapiens
gaaaagaatcaaggc

SEQ ID NO: 308047 - DNA, 15 bp, Homo sapiens
ggaaaagaatcaagg

SEQ ID NO: 308048 - DNA, 15 bp, Homo sapiens
tggaaaagaatcaag

SEQ ID NO: 308049 - DNA, 15 bp, Homo sapiens
atggaaaagaatcaa

SEQ ID NO: 308050 - DNA, 15 bp, Homo sapiens
catggaaaagaatca

SEQ ID NO: 308051 - DNA, 15 bp, Homo sapiens
tcatggaaaagaatc

SEQ ID NO: 308052 - DNA, 15 bp, Homo sapiens
ctcatggaaaagaat

SEQ ID NO: 308053 - DNA, 15 bp, Homo sapiens
tctcatggaaaagaa

SEQ ID NO: 308054 - DNA, 15 bp, Homo sapiens
gtctcatggaaaaga

SEQ ID NO: 308055 - DNA, 15 bp, Homo sapiens
ggtctcatggaaaag

SEQ ID NO: 308056 - DNA, 15 bp, Homo sapiens
tggtctcatggaaaa

SEQ ID NO: 308057 - DNA, 15 bp, Homo sapiens
ctggtctcatggaaa

SEQ ID NO: 308058 - DNA, 15 bp, Homo sapiens
cctggtctcatggaa

SEQ ID NO: 308059 - DNA, 15 bp, Homo sapiens
ccctggtctcatgga

SEQ ID NO: 308060 - DNA, 15 bp, Homo sapiens
gccctggtctcatgg

SEQ ID NO: 308061 - DNA, 15 bp, Homo sapiens
ggccctggtctcatg

SEQ ID NO: 308062 - DNA, 15 bp, Homo sapiens
tggccctggtctcat

SEQ ID NO: 308063 - DNA, 15 bp, Homo sapiens
atggccctggtctca

SEQ ID NO: 308064 - DNA, 15 bp, Homo sapiens
tatggccctggtctc

SEQ ID NO: 308065 - DNA, 15 bp, Homo sapiens
ttatggccctggtct

SEQ ID NO: 308066 - DNA, 15 bp, Homo sapiens
attatggccctggtc

SEQ ID NO: 308067 - DNA, 15 bp, Homo sapiens
cattatggccctggt

SEQ ID NO: 308068 - DNA, 15 bp, Homo sapiens
ccattatggccctgg

SEQ ID NO: 308069 - DNA, 15 bp, Homo sapiens
tccattatggccctg

SEQ ID NO: 308070 - DNA, 15 bp, Homo sapiens
atccattatggccct

SEQ ID NO: 308071 - DNA, 15 bp, Homo sapiens
aatccattatggccc

SEQ ID NO: 308072 - DNA, 15 bp, Homo sapiens
caatccattatggcc

SEQ ID NO: 308073 - DNA, 15 bp, Homo sapiens
tcaatccattatggc

SEQ ID NO: 308074 - DNA, 15 bp, Homo sapiens
gtcaatccattatgg

SEQ ID NO: 308075 - DNA, 15 bp, Homo sapiens
ggtcaatccattatg

SEQ ID NO: 308076 - DNA, 15 bp, Homo sapiens
aggtcaatccattat

SEQ ID NO: 308077 - DNA, 15 bp, Homo sapiens
caggtcaatccatta

SEQ ID NO: 308078 - DNA, 15 bp, Homo sapiens
ccaggtcaatccatt

SEQ ID NO: 308079 - DNA, 15 bp, Homo sapiens
gccaggtcaatccat

SEQ ID NO: 308080 - DNA, 15 bp, Homo sapiens
agccaggtcaatcca

SEQ ID NO: 308081 - DNA, 15 bp, Homo sapiens
tagccaggtcaatcc

SEQ ID NO: 308082 - DNA, 15 bp, Homo sapiens
ctagccaggtcaatc

SEQ ID NO: 308083 - DNA, 15 bp, Homo sapiens
gctagccaggtcaat

SEQ ID NO: 308084 - DNA, 15 bp, Homo sapiens
tgctagccaggtcaa

SEQ ID NO: 308085 - DNA, 15 bp, Homo sapiens
ctgctagccaggtca

SEQ ID NO: 308086 - DNA, 15 bp, Homo sapiens
tctgctagccaggtc

SEQ ID NO: 308087 - DNA, 15 bp, Homo sapiens
atctgctagccaggt

SEQ ID NO: 308088 - DNA, 15 bp, Homo sapiens
gatctgctagccagg

SEQ ID NO: 308089 - DNA, 15 bp, Homo sapiens
tgatctgctagccag

SEQ ID NO: 308090 - DNA, 15 bp, Homo sapiens
ctgatctgctagcca

SEQ ID NO: 308091 - DNA, 15 bp, Homo sapiens
tctgatctgctagcc

SEQ ID NO: 308092 - DNA, 15 bp, Homo sapiens
atctgatctgctagc

SEQ ID NO: 308093 - DNA, 15 bp, Homo sapiens
tatctgatctgctag

SEQ ID NO: 308094 - DNA, 15 bp, Homo sapiens
ctatctgatctgcta

SEQ ID NO: 308095 - DNA, 15 bp, Homo sapiens
cctatctgatctgct

SEQ ID NO: 308096 - DNA, 15 bp, Homo sapiens
ccctatctgatctgc

SEQ ID NO: 308097 - DNA, 15 bp, Homo sapiens
tccctatctgatctg

SEQ ID NO: 308098 - DNA, 15 bp, Homo sapiens
ctccctatctgatct

SEQ ID NO: 308099 - DNA, 15 bp, Homo sapiens
tctccctatctgatc

SEQ ID NO: 308100 - DNA, 15 bp, Homo sapiens
ttctccctatctgat

SEQ ID NO: 308101 - DNA, 15 bp, Homo sapiens
tttctccctatctga

SEQ ID NO: 308102 - DNA, 15 bp, Homo sapiens
ttttctccctatctg

SEQ ID NO: 308103 - DNA, 15 bp, Homo sapiens
attttctccctatct

SEQ ID NO: 308104 - DNA, 15 bp, Homo sapiens
cattttctccctatc

SEQ ID NO: 308105 - DNA, 15 bp, Homo sapiens
tcattttctccctat

SEQ ID NO: 308106 - DNA, 15 bp, Homo sapiens
ttcattttctcccta

SEQ ID NO: 308107 - DNA, 15 bp, Homo sapiens
gttcattttctccct

SEQ ID NO: 308108 - DNA, 15 bp, Homo sapiens
tgttcattttctccc

SEQ ID NO: 308109 - DNA, 15 bp, Homo sapiens
gtgttcattttctcc

SEQ ID NO: 308110 - DNA, 15 bp, Homo sapiens
ggtgttcattttctc

SEQ ID NO: 308111 - DNA, 15 bp, Homo sapiens
aggtgttcattttct

SEQ ID NO: 308112 - DNA, 15 bp, Homo sapiens
caggtgttcattttc

SEQ ID NO: 308113 - DNA, 15 bp, Homo sapiens
tcaggtgttcatttt

SEQ ID NO: 308114 - DNA, 15 bp, Homo sapiens
ttcaggtgttcattt

SEQ ID NO: 308115 - DNA, 15 bp, Homo sapiens
tttcaggtgttcatt

SEQ ID NO: 308116 - DNA, 15 bp, Homo sapiens
gtttcaggtgttcat

SEQ ID NO: 308117 - DNA, 15 bp, Homo sapiens
ggtttcaggtgttca

SEQ ID NO: 308118 - DNA, 15 bp, Homo sapiens
tggtttcaggtgttc

SEQ ID NO: 308119 - DNA, 15 bp, Homo sapiens
ctggtttcaggtgtt

SEQ ID NO: 308120 - DNA, 15 bp, Homo sapiens
gctggtttcaggtgt

SEQ ID NO: 308121 - DNA, 15 bp, Homo sapiens
agctggtttcaggtg

SEQ ID NO: 308122 - DNA, 15 bp, Homo sapiens
gagctggtttcaggt

SEQ ID NO: 308123 - DNA, 15 bp, Homo sapiens
tgagctggtttcagg

SEQ ID NO: 308124 - DNA, 15 bp, Homo sapiens
ctgagctggtttcag

SEQ ID NO: 308125 - DNA, 15 bp, Homo sapiens
cctgagctggtttca

SEQ ID NO: 308126 - DNA, 15 bp, Homo sapiens
ccctgagctggtttc

SEQ ID NO: 308127 - DNA, 15 bp, Homo sapiens
tccctgagctggttt

SEQ ID NO: 308128 - DNA, 15 bp, Homo sapiens
atccctgagctggtt

SEQ ID NO: 308129 - DNA, 15 bp, Homo sapiens
aatccctgagctggt

SEQ ID NO: 308130 - DNA, 15 bp, Homo sapiens
gaatccctgagctgg

SEQ ID NO: 308131 - DNA, 15 bp, Homo sapiens
cgaatccctgagctg

SEQ ID NO: 308132 - DNA, 15 bp, Homo sapiens
tcgaatccctgagct

SEQ ID NO: 308133 - DNA, 15 bp, Homo sapiens
gtcgaatccctgagc

SEQ ID NO: 308134 - DNA, 15 bp, Homo sapiens
agtcgaatccctgag

SEQ ID NO: 308135 - DNA, 15 bp, Homo sapiens
cagtcgaatccctga

SEQ ID NO: 308136 - DNA, 15 bp, Homo sapiens
gcagtcgaatccctg

SEQ ID NO: 308137 - DNA, 15 bp, Homo sapiens
tgcagtcgaatccct

SEQ ID NO: 308138 - DNA, 15 bp, Homo sapiens
atgcagtcgaatccc

SEQ ID NO: 308139 - DNA, 15 bp, Homo sapiens
aatgcagtcgaatcc

SEQ ID NO: 308140 - DNA, 15 bp, Homo sapiens
taatgcagtcgaatc

SEQ ID NO: 308141 - DNA, 15 bp, Homo sapiens
ataatgcagtcgaat

SEQ ID NO: 308142 - DNA, 15 bp, Homo sapiens
aataatgcagtcgaa

SEQ ID NO: 308143 - DNA, 15 bp, Homo sapiens
gaataatgcagtcga

SEQ ID NO: 308144 - DNA, 15 bp, Homo sapiens
tgaataatgcagtcg

SEQ ID NO: 308145 - DNA, 15 bp, Homo sapiens
ctgaataatgcagtc

SEQ ID NO: 308146 - DNA, 15 bp, Homo sapiens
gctgaataatgcagt

SEQ ID NO: 308147 - DNA, 15 bp, Homo sapiens
agctgaataatgcag

SEQ ID NO: 308148 - DNA, 15 bp, Homo sapiens
cagctgaataatgca

SEQ ID NO: 308149 - DNA, 15 bp, Homo sapiens
tcagctgaataatgc

SEQ ID NO: 308150 - DNA, 15 bp, Homo sapiens
ttcagctgaataatg

SEQ ID NO: 308151 - DNA, 15 bp, Homo sapiens
gttcagctgaataat

SEQ ID NO: 308152 - DNA, 15 bp, Homo sapiens
tgttcagctgaataa

SEQ ID NO: 308153 - DNA, 15 bp, Homo sapiens
gtgttcagctgaata

SEQ ID NO: 308154 - DNA, 15 bp, Homo sapiens
ggtgttcagctgaat

SEQ ID NO: 308155 - DNA, 15 bp, Homo sapiens
aggtgttcagctgaa

SEQ ID NO: 308156 - DNA, 15 bp, Homo sapiens
taggtgttcagctga

SEQ ID NO: 308157 - DNA, 15 bp, Homo sapiens
gtaggtgttcagctg

SEQ ID NO: 308158 - DNA, 15 bp, Homo sapiens
agtaggtgttcagct

SEQ ID NO: 308159 - DNA, 15 bp, Homo sapiens
cagtaggtgttcagc

SEQ ID NO: 308160 - DNA, 15 bp, Homo sapiens
acagtaggtgttcag

SEQ ID NO: 308161 - DNA, 15 bp, Homo sapiens
cacagtaggtgttca

SEQ ID NO: 308162 - DNA, 15 bp, Homo sapiens
acacagtaggtgttc

SEQ ID NO: 308163 - DNA, 15 bp, Homo sapiens
cacacagtaggtgtt

SEQ ID NO: 308164 - DNA, 15 bp, Homo sapiens
gcacacagtaggtgt

SEQ ID NO: 308165 - DNA, 15 bp, Homo sapiens
tgcacacagtaggtg

SEQ ID NO: 308166 - DNA, 15 bp, Homo sapiens
ttgcacacagtaggt

SEQ ID NO: 308167 - DNA, 15 bp, Homo sapiens
tttgcacacagtagg

SEQ ID NO: 308168 - DNA, 15 bp, Homo sapiens
atttgcacacagtag

SEQ ID NO: 308169 - DNA, 15 bp, Homo sapiens
gatttgcacacagta

SEQ ID NO: 308170 - DNA, 15 bp, Homo sapiens
ggatttgcacacagt

SEQ ID NO: 308171 - DNA, 15 bp, Homo sapiens
gggatttgcacacag

SEQ ID NO: 308172 - DNA, 15 bp, Homo sapiens
agggatttgcacaca

SEQ ID NO: 308173 - DNA, 15 bp, Homo sapiens
tagggatttgcacac

SEQ ID NO: 308174 - DNA, 15 bp, Homo sapiens
ctagggatttgcaca

SEQ ID NO: 308175 - DNA, 15 bp, Homo sapiens
cctagggatttgcac

SEQ ID NO: 308176 - DNA, 15 bp, Homo sapiens
acctagggatttgca

SEQ ID NO: 308177 - DNA, 15 bp, Homo sapiens
cacctagggatttgc

SEQ ID NO: 308178 - DNA, 15 bp, Homo sapiens
gcacctagggatttg

SEQ ID NO: 308179 - DNA, 15 bp, Homo sapiens
agcacctagggattt

SEQ ID NO: 308180 - DNA, 15 bp, Homo sapiens
tagcacctagggatt

SEQ ID NO: 308181 - DNA, 15 bp, Homo sapiens
ctagcacctagggat

SEQ ID NO: 308182 - DNA, 15 bp, Homo sapiens
cctagcacctaggga

SEQ ID NO: 308183 - DNA, 15 bp, Homo sapiens
tcctagcacctaggg

SEQ ID NO: 308184 - DNA, 15 bp, Homo sapiens
ctcctagcacctagg

SEQ ID NO: 308185 - DNA, 15 bp, Homo sapiens
actcctagcacctag

SEQ ID NO: 308186 - DNA, 15 bp, Homo sapiens
cactcctagcaccta

SEQ ID NO: 308187 - DNA, 15 bp, Homo sapiens
tcactcctagcacct

SEQ ID NO: 308188 - DNA, 15 bp, Homo sapiens
gtcactcctagcacc

SEQ ID NO: 308189 - DNA, 15 bp, Homo sapiens
ggtcactcctagcac

SEQ ID NO: 308190 - DNA, 15 bp, Homo sapiens
gggtcactcctagca

SEQ ID NO: 308191 - DNA, 15 bp, Homo sapiens
tgggtcactcctagc

SEQ ID NO: 308192 - DNA, 15 bp, Homo sapiens
ttgggtcactcctag

SEQ ID NO: 308193 - DNA, 15 bp, Homo sapiens
tttgggtcactccta

SEQ ID NO: 308194 - DNA, 15 bp, Homo sapiens
ctttgggtcactcct

SEQ ID NO: 308195 - DNA, 15 bp, Homo sapiens
tctttgggtcactcc

SEQ ID NO: 308196 - DNA, 15 bp, Homo sapiens
atctttgggtcactc

SEQ ID NO: 308197 - DNA, 15 bp, Homo sapiens
catctttgggtcact

SEQ ID NO: 308198 - DNA, 15 bp, Homo sapiens
ccatctttgggtcac

SEQ ID NO: 308199 - DNA, 15 bp, Homo sapiens
cccatctttgggtca

SEQ ID NO: 308200 - DNA, 15 bp, Homo sapiens
ccccatctttgggtc

SEQ ID NO: 308201 - DNA, 15 bp, Homo sapiens
tccccatctttgggt

SEQ ID NO: 308202 - DNA, 15 bp, Homo sapiens
ttccccatctttggg

SEQ ID NO: 308203 - DNA, 15 bp, Homo sapiens
tttccccatctttgg

SEQ ID NO: 308204 - DNA, 15 bp, Homo sapiens
ttttccccatctttg

SEQ ID NO: 308205 - DNA, 15 bp, Homo sapiens
gttttccccatcttt

SEQ ID NO: 308206 - DNA, 15 bp, Homo sapiens
tgttttccccatctt

SEQ ID NO: 308207 - DNA, 15 bp, Homo sapiens
atgttttccccatct

SEQ ID NO: 308208 - DNA, 15 bp, Homo sapiens
tatgttttccccatc

SEQ ID NO: 308209 - DNA, 15 bp, Homo sapiens
ctatgttttccccat

SEQ ID NO: 308210 - DNA, 15 bp, Homo sapiens
tctatgttttcccca

SEQ ID NO: 308211 - DNA, 15 bp, Homo sapiens
atctatgttttcccc

SEQ ID NO: 308212 - DNA, 15 bp, Homo sapiens
gatctatgttttccc

SEQ ID NO: 308213 - DNA, 15 bp, Homo sapiens
agatctatgttttcc

SEQ ID NO: 308214 - DNA, 15 bp, Homo sapiens
aagatctatgttttc

SEQ ID NO: 308215 - DNA, 15 bp, Homo sapiens
caagatctatgtttt

SEQ ID NO: 308216 - DNA, 15 bp, Homo sapiens
gcaagatctatgttt

SEQ ID NO: 308217 - DNA, 15 bp, Homo sapiens
ggcaagatctatgtt

SEQ ID NO: 308218 - DNA, 15 bp, Homo sapiens
aggcaagatctatgt

SEQ ID NO: 308219 - DNA, 15 bp, Homo sapiens
gaggcaagatctatg

SEQ ID NO: 308220 - DNA, 15 bp, Homo sapiens
agaggcaagatctat

SEQ ID NO: 308221 - DNA, 15 bp, Homo sapiens
tagaggcaagatcta

SEQ ID NO: 308222 - DNA, 15 bp, Homo sapiens
atagaggcaagatct

SEQ ID NO: 308223 - DNA, 15 bp, Homo sapiens
tatagaggcaagatc

SEQ ID NO: 308224 - DNA, 15 bp, Homo sapiens
ttatagaggcaagat

SEQ ID NO: 308225 - DNA, 15 bp, Homo sapiens
cttatagaggcaaga

SEQ ID NO: 308226 - DNA, 15 bp, Homo sapiens
tcttatagaggcaag

SEQ ID NO: 308227 - DNA, 15 bp, Homo sapiens
atcttatagaggcaa

SEQ ID NO: 308228 - DNA, 15 bp, Homo sapiens
catcttatagaggca

SEQ ID NO: 308229 - DNA, 15 bp, Homo sapiens
acatcttatagaggc

SEQ ID NO: 308230 - DNA, 15 bp, Homo sapiens
aacatcttatagagg

SEQ ID NO: 308231 - DNA, 15 bp, Homo sapiens
taacatcttatagag

SEQ ID NO: 308232 - DNA, 15 bp, Homo sapiens
ttaacatcttataga

SEQ ID NO: 308233 - DNA, 15 bp, Homo sapiens
attaacatcttatag

SEQ ID NO: 308234 - DNA, 15 bp, Homo sapiens
tattaacatcttata

SEQ ID NO: 308235 - DNA, 15 bp, Homo sapiens
ttattaacatcttat

SEQ ID NO: 308236 - DNA, 15 bp, Homo sapiens
gttattaacatctta

SEQ ID NO: 308237 - DNA, 15 bp, Homo sapiens
agttattaacatctt

SEQ ID NO: 308238 - DNA, 15 bp, Homo sapiens
aagttattaacatct

SEQ ID NO: 308239 - DNA, 15 bp, Homo sapiens
taagttattaacatc

SEQ ID NO: 308240 - DNA, 15 bp, Homo sapiens
ttaagttattaacat

SEQ ID NO: 308241 - DNA, 15 bp, Homo sapiens
attaagttattaaca

SEQ ID NO: 308242 - DNA, 15 bp, Homo sapiens
aattaagttattaac

SEQ ID NO: 308243 - DNA, 15 bp, Homo sapiens
caattaagttattaa

SEQ ID NO: 308244 - DNA, 15 bp, Homo sapiens
ccaattaagttatta

SEQ ID NO: 308245 - DNA, 15 bp, Homo sapiens
tccaattaagttatt

SEQ ID NO: 308246 - DNA, 15 bp, Homo sapiens
ctccaattaagttat

SEQ ID NO: 308247 - DNA, 15 bp, Homo sapiens
actccaattaagtta

SEQ ID NO: 308248 - DNA, 15 bp, Homo sapiens
cactccaattaagtt

SEQ ID NO: 308249 - DNA, 15 bp, Homo sapiens
acactccaattaagt

SEQ ID NO: 308250 - DNA, 15 bp, Homo sapiens
gacactccaattaag

SEQ ID NO: 308251 - DNA, 15 bp, Homo sapiens
ggacactccaattaa

SEQ ID NO: 308252 - DNA, 15 bp, Homo sapiens
aggacactccaatta

SEQ ID NO: 308253 - DNA, 15 bp, Homo sapiens
gaggacactccaatt

SEQ ID NO: 308254 - DNA, 15 bp, Homo sapiens
agaggacactccaat

SEQ ID NO: 308255 - DNA, 15 bp, Homo sapiens
tagaggacactccaa

SEQ ID NO: 308256 - DNA, 15 bp, Homo sapiens
ctagaggacactcca

SEQ ID NO: 308257 - DNA, 15 bp, Homo sapiens
tctagaggacactcc

SEQ ID NO: 308258 - DNA, 15 bp, Homo sapiens
ttctagaggacactc

SEQ ID NO: 308259 - DNA, 15 bp, Homo sapiens
tttctagaggacact

SEQ ID NO: 308260 - DNA, 15 bp, Homo sapiens
ctttctagaggacac

SEQ ID NO: 308261 - DNA, 15 bp, Homo sapiens
tctttctagaggaca

SEQ ID NO: 308262 - DNA, 15 bp, Homo sapiens
ttctttctagaggac

SEQ ID NO: 308263 - DNA, 15 bp, Homo sapiens
gttctttctagagga

SEQ ID NO: 308264 - DNA, 15 bp, Homo sapiens
tgttctttctagagg

SEQ ID NO: 308265 - DNA, 15 bp, Homo sapiens
ctgttctttctagag

SEQ ID NO: 308266 - DNA, 15 bp, Homo sapiens
actgttctttctaga

SEQ ID NO: 308267 - DNA, 15 bp, Homo sapiens
tactgttctttctag

SEQ ID NO: 308268 - DNA, 15 bp, Homo sapiens
ttactgttctttcta

SEQ ID NO: 308269 - DNA, 15 bp, Homo sapiens
cttactgttctttct

SEQ ID NO: 308270 - DNA, 15 bp, Homo sapiens
acttactgttctttc

SEQ ID NO: 308271 - DNA, 15 bp, Homo sapiens
aacttactgttcttt

SEQ ID NO: 308272 - DNA, 15 bp, Homo sapiens
aaacttactgttctt

SEQ ID NO: 308273 - DNA, 15 bp, Homo sapiens
taaacttactgttct

SEQ ID NO: 308274 - DNA, 15 bp, Homo sapiens
ataaacttactgttc

SEQ ID NO: 308275 - DNA, 15 bp, Homo sapiens
tataaacttactgtt

SEQ ID NO: 308276 - DNA, 15 bp, Homo sapiens
ctataaacttactgt

SEQ ID NO: 308277 - DNA, 15 bp, Homo sapiens
cctataaacttactg

SEQ ID NO: 308278 - DNA, 15 bp, Homo sapiens
tcctataaacttact

SEQ ID NO: 308279 - DNA, 15 bp, Homo sapiens
ttcctataaacttac

SEQ ID NO: 308280 - DNA, 15 bp, Homo sapiens
attcctataaactta

SEQ ID NO: 308281 - DNA, 15 bp, Homo sapiens
aattcctataaactt

SEQ ID NO: 308282 - DNA, 15 bp, Homo sapiens
aaattcctataaact

SEQ ID NO: 308283 - DNA, 15 bp, Homo sapiens
taaattcctataaac

SEQ ID NO: 308284 - DNA, 15 bp, Homo sapiens
ctaaattcctataaa

SEQ ID NO: 308285 - DNA, 15 bp, Homo sapiens
tctaaattcctataa

SEQ ID NO: 308286 - DNA, 15 bp, Homo sapiens
ctctaaattcctata

SEQ ID NO: 308287 - DNA, 15 bp, Homo sapiens
cctctaaattcctat

SEQ ID NO: 308288 - DNA, 15 bp, Homo sapiens
tcctctaaattccta

SEQ ID NO: 308289 - DNA, 15 bp, Homo sapiens
ctcctctaaattcct

SEQ ID NO: 308290 - DNA, 15 bp, Homo sapiens
cctcctctaaattcc

SEQ ID NO: 308291 - DNA, 15 bp, Homo sapiens
tcctcctctaaattc

SEQ ID NO: 308292 - DNA, 15 bp, Homo sapiens
ttcctcctctaaatt

SEQ ID NO: 308293 - DNA, 15 bp, Homo sapiens
gttcctcctctaaat

SEQ ID NO: 308294 - DNA, 15 bp, Homo sapiens
tgttcctcctctaaa

SEQ ID NO: 308295 - DNA, 15 bp, Homo sapiens
ctgttcctcctctaa

SEQ ID NO: 308296 - DNA, 15 bp, Homo sapiens
tctgttcctcctcta

SEQ ID NO: 308297 - DNA, 15 bp, Homo sapiens
atctgttcctcctct

SEQ ID NO: 308298 - DNA, 15 bp, Homo sapiens
catctgttcctcctc

SEQ ID NO: 308299 - DNA, 15 bp, Homo sapiens
ccatctgttcctcct

SEQ ID NO: 308300 - DNA, 15 bp, Homo sapiens
tccatctgttcctcc

SEQ ID NO: 308301 - DNA, 15 bp, Homo sapiens
ctccatctgttcctc

SEQ ID NO: 308302 - DNA, 15 bp, Homo sapiens
cctccatctgttcct

SEQ ID NO: 308303 - DNA, 15 bp, Homo sapiens
tcctccatctgttcc

SEQ ID NO: 308304 - DNA, 15 bp, Homo sapiens
ttcctccatctgttc

SEQ ID NO: 308305 - DNA, 15 bp, Homo sapiens
tttcctccatctgtt

SEQ ID NO: 308306 - DNA, 15 bp, Homo sapiens
ctttcctccatctgt

SEQ ID NO: 308307 - DNA, 15 bp, Homo sapiens
actttcctccatctg

SEQ ID NO: 308308 - DNA, 15 bp, Homo sapiens
aactttcctccatct

SEQ ID NO: 308309 - DNA, 15 bp, Homo sapiens
caactttcctccatc

SEQ ID NO: 308310 - DNA, 15 bp, Homo sapiens
ccaactttcctccat

SEQ ID NO: 308311 - DNA, 15 bp, Homo sapiens
gccaactttcctcca

SEQ ID NO: 308312 - DNA, 15 bp, Homo sapiens
ggccaactttcctcc

SEQ ID NO: 308313 - DNA, 15 bp, Homo sapiens
tggccaactttcctc

SEQ ID NO: 308314 - DNA, 15 bp, Homo sapiens
atggccaactttcct

SEQ ID NO: 308315 - DNA, 15 bp, Homo sapiens
gatggccaactttcc

SEQ ID NO: 308316 - DNA, 15 bp, Homo sapiens
ggatggccaactttc

SEQ ID NO: 308317 - DNA, 15 bp, Homo sapiens
gggatggccaacttt

SEQ ID NO: 308318 - DNA, 15 bp, Homo sapiens
tgggatggccaactt

SEQ ID NO: 308319 - DNA, 15 bp, Homo sapiens
ctgggatggccaact

SEQ ID NO: 308320 - DNA, 15 bp, Homo sapiens
gctgggatggccaac

SEQ ID NO: 308321 - DNA, 15 bp, Homo sapiens
ggctgggatggccaa

SEQ ID NO: 308322 - DNA, 15 bp, Homo sapiens
gggctgggatggcca

SEQ ID NO: 308323 - DNA, 15 bp, Homo sapiens
tgggctgggatggcc

SEQ ID NO: 308324 - DNA, 15 bp, Homo sapiens
ttgggctgggatggc

SEQ ID NO: 308325 - DNA, 15 bp, Homo sapiens
tttgggctgggatgg

SEQ ID NO: 308326 - DNA, 15 bp, Homo sapiens
ctttgggctgggatg

SEQ ID NO: 308327 - DNA, 15 bp, Homo sapiens
tctttgggctgggat

SEQ ID NO: 308328 - DNA, 15 bp, Homo sapiens
ttctttgggctggga

SEQ ID NO: 308329 - DNA, 15 bp, Homo sapiens
cttctttgggctggg

SEQ ID NO: 308330 - DNA, 15 bp, Homo sapiens
tcttctttgggctgg

SEQ ID NO: 308331 - DNA, 15 bp, Homo sapiens
atcttctttgggctg

SEQ ID NO: 308332 - DNA, 15 bp, Homo sapiens
aatcttctttgggct

SEQ ID NO: 308333 - DNA, 15 bp, Homo sapiens
aaatcttctttgggc

SEQ ID NO: 308334 - DNA, 15 bp, Homo sapiens
gaaatcttctttggg

SEQ ID NO: 308335 - DNA, 15 bp, Homo sapiens
tgaaatcttctttgg

SEQ ID NO: 308336 - DNA, 15 bp, Homo sapiens
ctgaaatcttctttg

SEQ ID NO: 308337 - DNA, 15 bp, Homo sapiens
cctgaaatcttcttt

SEQ ID NO: 308338 - DNA, 15 bp, Homo sapiens
acctgaaatcttctt

SEQ ID NO: 308339 - DNA, 15 bp, Homo sapiens
tacctgaaatcttct

SEQ ID NO: 308340 - DNA, 15 bp, Homo sapiens
atacctgaaatcttc

SEQ ID NO: 308341 - DNA, 15 bp, Homo sapiens
gatacctgaaatctt

SEQ ID NO: 308342 - DNA, 15 bp, Homo sapiens
agatacctgaaatct

SEQ ID NO: 308343 - DNA, 15 bp, Homo sapiens
tagatacctgaaatc

SEQ ID NO: 308344 - DNA, 15 bp, Homo sapiens
ttagatacctgaaat

SEQ ID NO: 308345 - DNA, 15 bp, Homo sapiens
tttagatacctgaaa

SEQ ID NO: 308346 - DNA, 15 bp, Homo sapiens
ttttagatacctgaa

SEQ ID NO: 308347 - DNA, 15 bp, Homo sapiens
attttagatacctga

SEQ ID NO: 308348 - DNA, 15 bp, Homo sapiens
tattttagatacctg

SEQ ID NO: 308349 - DNA, 15 bp, Homo sapiens
atattttagatacct

SEQ ID NO: 308350 - DNA, 15 bp, Homo sapiens
tatattttagatacc

SEQ ID NO: 308351 - DNA, 15 bp, Homo sapiens
ttatattttagatac

SEQ ID NO: 308352 - DNA, 15 bp, Homo sapiens
tttatattttagata

SEQ ID NO: 308353 - DNA, 15 bp, Homo sapiens
gtttatattttagat

SEQ ID NO: 308354 - DNA, 15 bp, Homo sapiens
tgtttatattttaga

SEQ ID NO: 308355 - DNA, 15 bp, Homo sapiens
atgtttatattttag

SEQ ID NO: 308356 - DNA, 15 bp, Homo sapiens
catgtttatatttta

SEQ ID NO: 308357 - DNA, 15 bp, Homo sapiens
acatgtttatatttt

SEQ ID NO: 308358 - DNA, 15 bp, Homo sapiens
aacatgtttatattt

SEQ ID NO: 308359 - DNA, 15 bp, Homo sapiens
aaacatgtttatatt

SEQ ID NO: 308360 - DNA, 15 bp, Homo sapiens
gaaacatgtttatat

SEQ ID NO: 308361 - DNA, 15 bp, Homo sapiens
agaaacatgtttata

SEQ ID NO: 308362 - DNA, 15 bp, Homo sapiens
gagaaacatgtttat

SEQ ID NO: 308363 - DNA, 15 bp, Homo sapiens
ggagaaacatgttta

SEQ ID NO: 308364 - DNA, 15 bp, Homo sapiens
aggagaaacatgttt

SEQ ID NO: 308365 - DNA, 15 bp, Homo sapiens
taggagaaacatgtt

SEQ ID NO: 308366 - DNA, 15 bp, Homo sapiens
ctaggagaaacatgt

SEQ ID NO: 308367 - DNA, 15 bp, Homo sapiens
tctaggagaaacatg

SEQ ID NO: 308368 - DNA, 15 bp, Homo sapiens
ctctaggagaaacat

SEQ ID NO: 308369 - DNA, 15 bp, Homo sapiens
gctctaggagaaaca

SEQ ID NO: 308370 - DNA, 15 bp, Homo sapiens
tgctctaggagaaac

SEQ ID NO: 308371 - DNA, 15 bp, Homo sapiens
ctgctctaggagaaa

SEQ ID NO: 308372 - DNA, 15 bp, Homo sapiens
cctgctctaggagaa

SEQ ID NO: 308373 - DNA, 15 bp, Homo sapiens
tcctgctctaggaga

SEQ ID NO: 308374 - DNA, 15 bp, Homo sapiens
gtcctgctctaggag

SEQ ID NO: 308375 - DNA, 15 bp, Homo sapiens
agtcctgctctagga

SEQ ID NO: 308376 - DNA, 15 bp, Homo sapiens
tagtcctgctctagg

SEQ ID NO: 308377 - DNA, 15 bp, Homo sapiens
gtagtcctgctctag

SEQ ID NO: 308378 - DNA, 15 bp, Homo sapiens
agtagtcctgctcta

SEQ ID NO: 308379 - DNA, 15 bp, Homo sapiens
gagtagtcctgctct

SEQ ID NO: 308380 - DNA, 15 bp, Homo sapiens
cgagtagtcctgctc

SEQ ID NO: 308381 - DNA, 15 bp, Homo sapiens
tcgagtagtcctgct

SEQ ID NO: 308382 - DNA, 15 bp, Homo sapiens
ctcgagtagtcctgc

SEQ ID NO: 308383 - DNA, 15 bp, Homo sapiens
cctcgagtagtcctg

SEQ ID NO: 308384 - DNA, 15 bp, Homo sapiens
acctcgagtagtcct

SEQ ID NO: 308385 - DNA, 15 bp, Homo sapiens
cacctcgagtagtcc

SEQ ID NO: 308386 - DNA, 15 bp, Homo sapiens
gcacctcgagtagtc

SEQ ID NO: 308387 - DNA, 15 bp, Homo sapiens
cgcacctcgagtagt

SEQ ID NO: 308388 - DNA, 15 bp, Homo sapiens
ccgcacctcgagtag

SEQ ID NO: 308389 - DNA, 15 bp, Homo sapiens
accgcacctcgagta

SEQ ID NO: 308390 - DNA, 15 bp, Homo sapiens
gaccgcacctcgagt

SEQ ID NO: 308391 - DNA, 15 bp, Homo sapiens
agaccgcacctcgag

SEQ ID NO: 308392 - DNA, 15 bp, Homo sapiens
cagaccgcacctcga

SEQ ID NO: 308393 - DNA, 15 bp, Homo sapiens
gcagaccgcacctcg

SEQ ID NO: 308394 - DNA, 15 bp, Homo sapiens
tgcagaccgcacctc

SEQ ID NO: 308395 - DNA, 15 bp, Homo sapiens
ttgcagaccgcacct

SEQ ID NO: 308396 - DNA, 15 bp, Homo sapiens
cttgcagaccgcacc

SEQ ID NO: 308397 - DNA, 15 bp, Homo sapiens
gcttgcagaccgcac

SEQ ID NO: 308398 - DNA, 15 bp, Homo sapiens
ggcttgcagaccgca

SEQ ID NO: 308399 - DNA, 15 bp, Homo sapiens
tggcttgcagaccgc

SEQ ID NO: 308400 - DNA, 15 bp, Homo sapiens
ctggcttgcagaccg

SEQ ID NO: 308401 - DNA, 15 bp, Homo sapiens
gctggcttgcagacc

SEQ ID NO: 308402 - DNA, 15 bp, Homo sapiens
tgctggcttgcagac

SEQ ID NO: 308403 - DNA, 15 bp, Homo sapiens
gtgctggcttgcaga

SEQ ID NO: 308404 - DNA, 15 bp, Homo sapiens
tgtgctggcttgcag

SEQ ID NO: 308405 - DNA, 15 bp, Homo sapiens
atgtgctggcttgca

SEQ ID NO: 308406 - DNA, 15 bp, Homo sapiens
catgtgctggcttgc

SEQ ID NO: 308407 - DNA, 15 bp, Homo sapiens
ccatgtgctggcttg

SEQ ID NO: 308408 - DNA, 15 bp, Homo sapiens
gccatgtgctggctt

SEQ ID NO: 308409 - DNA, 15 bp, Homo sapiens
ggccatgtgctggct

SEQ ID NO: 308410 - DNA, 15 bp, Homo sapiens
aggccatgtgctggc

SEQ ID NO: 308411 - DNA, 15 bp, Homo sapiens
caggccatgtgctgg

SEQ ID NO: 308412 - DNA, 15 bp, Homo sapiens
ccaggccatgtgctg

SEQ ID NO: 308413 - DNA, 15 bp, Homo sapiens
cccaggccatgtgct

SEQ ID NO: 308414 - DNA, 15 bp, Homo sapiens
tcccaggccatgtgc

SEQ ID NO: 308415 - DNA, 15 bp, Homo sapiens
ctcccaggccatgtg

SEQ ID NO: 308416 - DNA, 15 bp, Homo sapiens
gctcccaggccatgt

SEQ ID NO: 308417 - DNA, 15 bp, Homo sapiens
agctcccaggccatg

SEQ ID NO: 308418 - DNA, 15 bp, Homo sapiens
aagctcccaggccat

SEQ ID NO: 308419 - DNA, 15 bp, Homo sapiens
taagctcccaggcca

SEQ ID NO: 308420 - DNA, 15 bp, Homo sapiens
ttaagctcccaggcc

SEQ ID NO: 308421 - DNA, 15 bp, Homo sapiens
attaagctcccaggc

SEQ ID NO: 308422 - DNA, 15 bp, Homo sapiens
tattaagctcccagg

SEQ ID NO: 308423 - DNA, 15 bp, Homo sapiens
ctattaagctcccag

SEQ ID NO: 308424 - DNA, 15 bp, Homo sapiens
tctattaagctccca

SEQ ID NO: 308425 - DNA, 15 bp, Homo sapiens
ttctattaagctccc

SEQ ID NO: 308426 - DNA, 15 bp, Homo sapiens
tttctattaagctcc

SEQ ID NO: 308427 - DNA, 15 bp, Homo sapiens
atttctattaagctc

SEQ ID NO: 308428 - DNA, 15 bp, Homo sapiens
tatttctattaagct

SEQ ID NO: 308429 - DNA, 15 bp, Homo sapiens
ttatttctattaagc

SEQ ID NO: 308430 - DNA, 15 bp, Homo sapiens
tttatttctattaag

SEQ ID NO: 308431 - DNA, 15 bp, Homo sapiens
ttttatttctattaa

SEQ ID NO: 308432 - DNA, 15 bp, Homo sapiens
tttttatttctatta

SEQ ID NO: 308433 - DNA, 15 bp, Homo sapiens
atttttatttctatt

SEQ ID NO: 308434 - DNA, 15 bp, Homo sapiens
catttttatttctat

SEQ ID NO: 308435 - DNA, 15 bp, Homo sapiens
acatttttatttcta

SEQ ID NO: 308436 - DNA, 15 bp, Homo sapiens
aacatttttatttct

SEQ ID NO: 308437 - DNA, 15 bp, Homo sapiens
caacatttttatttc

SEQ ID NO: 308438 - DNA, 15 bp, Homo sapiens
ccaacatttttattt

SEQ ID NO: 308439 - DNA, 15 bp, Homo sapiens
tccaacatttttatt

SEQ ID NO: 308440 - DNA, 15 bp, Homo sapiens
ctccaacatttttat

SEQ ID NO: 308441 - DNA, 15 bp, Homo sapiens
actccaacattttta

SEQ ID NO: 308442 - DNA, 15 bp, Homo sapiens
aactccaacattttt

SEQ ID NO: 308443 - DNA, 15 bp, Homo sapiens
gaactccaacatttt

SEQ ID NO: 308444 - DNA, 15 bp, Homo sapiens
tgaactccaacattt

SEQ ID NO: 308445 - DNA, 15 bp, Homo sapiens
ttgaactccaacatt

SEQ ID NO: 308446 - DNA, 15 bp, Homo sapiens
gttgaactccaacat

SEQ ID NO: 308447 - DNA, 15 bp, Homo sapiens
ggttgaactccaaca

SEQ ID NO: 308448 - DNA, 15 bp, Homo sapiens
gggttgaactccaac

SEQ ID NO: 308449 - DNA, 15 bp, Homo sapiens
agggttgaactccaa

SEQ ID NO: 308450 - DNA, 15 bp, Homo sapiens
tagggttgaactcca

SEQ ID NO: 308451 - DNA, 15 bp, Homo sapiens
ttagggttgaactcc

SEQ ID NO: 308452 - DNA, 15 bp, Homo sapiens
tttagggttgaactc

SEQ ID NO: 308453 - DNA, 15 bp, Homo sapiens
gtttagggttgaact

SEQ ID NO: 308454 - DNA, 15 bp, Homo sapiens
ggtttagggttgaac

SEQ ID NO: 308455 - DNA, 15 bp, Homo sapiens
aggtttagggttgaa

SEQ ID NO: 308456 - DNA, 15 bp, Homo sapiens
caggtttagggttga

SEQ ID NO: 308457 - DNA, 15 bp, Homo sapiens
ccaggtttagggttg

SEQ ID NO: 308458 - DNA, 15 bp, Homo sapiens
tccaggtttagggtt

SEQ ID NO: 308459 - DNA, 15 bp, Homo sapiens
ctccaggtttagggt

SEQ ID NO: 308460 - DNA, 15 bp, Homo sapiens
tctccaggtttaggg

SEQ ID NO: 308461 - DNA, 15 bp, Homo sapiens
ttctccaggtttagg

SEQ ID NO: 308462 - DNA, 15 bp, Homo sapiens
attctccaggtttag

SEQ ID NO: 308463 - DNA, 15 bp, Homo sapiens
gattctccaggttta

SEQ ID NO: 308464 - DNA, 15 bp, Homo sapiens
agattctccaggttt

SEQ ID NO: 308465 - DNA, 15 bp, Homo sapiens
gagattctccaggtt

SEQ ID NO: 308466 - DNA, 15 bp, Homo sapiens
agagattctccaggt

SEQ ID NO: 308467 - DNA, 15 bp, Homo sapiens
cagagattctccagg

SEQ ID NO: 308468 - DNA, 15 bp, Homo sapiens
tcagagattctccag

SEQ ID NO: 308469 - DNA, 15 bp, Homo sapiens
ttcagagattctcca

SEQ ID NO: 308470 - DNA, 15 bp, Homo sapiens
tttcagagattctcc

SEQ ID NO: 308471 - DNA, 15 bp, Homo sapiens
ctttcagagattctc

SEQ ID NO: 308472 - DNA, 15 bp, Homo sapiens
cctttcagagattct

SEQ ID NO: 308473 - DNA, 15 bp, Homo sapiens
acctttcagagattc

SEQ ID NO: 308474 - DNA, 15 bp, Homo sapiens
tacctttcagagatt

SEQ ID NO: 308475 - DNA, 15 bp, Homo sapiens
ctacctttcagagat

SEQ ID NO: 308476 - DNA, 15 bp, Homo sapiens
cctacctttcagaga

SEQ ID NO: 308477 - DNA, 15 bp, Homo sapiens
ccctacctttcagag

SEQ ID NO: 308478 - DNA, 15 bp, Homo sapiens
gccctacctttcaga

SEQ ID NO: 308479 - DNA, 15 bp, Homo sapiens
agccctacctttcag

SEQ ID NO: 308480 - DNA, 15 bp, Homo sapiens
cagccctacctttca

SEQ ID NO: 308481 - DNA, 15 bp, Homo sapiens
tcagccctacctttc

SEQ ID NO: 308482 - DNA, 15 bp, Homo sapiens
ctcagccctaccttt

SEQ ID NO: 308483 - DNA, 15 bp, Homo sapiens
cctcagccctacctt

SEQ ID NO: 308484 - DNA, 15 bp, Homo sapiens
tcctcagccctacct

SEQ ID NO: 308485 - DNA, 15 bp, Homo sapiens
ttcctcagccctacc

SEQ ID NO: 308486 - DNA, 15 bp, Homo sapiens
attcctcagccctac

SEQ ID NO: 308487 - DNA, 15 bp, Homo sapiens
gattcctcagcccta

SEQ ID NO: 308488 - DNA, 15 bp, Homo sapiens
agattcctcagccct

SEQ ID NO: 308489 - DNA, 15 bp, Homo sapiens
cagattcctcagccc

SEQ ID NO: 308490 - DNA, 15 bp, Homo sapiens
acagattcctcagcc

SEQ ID NO: 308491 - DNA, 15 bp, Homo sapiens
catgccataatagaa

SEQ ID NO: 308492 - DNA, 15 bp, Homo sapiens
acatgccataataga

SEQ ID NO: 308493 - DNA, 15 bp, Homo sapiens
gacatgccataatag

SEQ ID NO: 308494 - DNA, 15 bp, Homo sapiens
agacatgccataata

SEQ ID NO: 308495 - DNA, 15 bp, Homo sapiens
cagacatgccataat

SEQ ID NO: 308496 - DNA, 15 bp, Homo sapiens
acagacatgccataa

SEQ ID NO: 308497 - DNA, 15 bp, Homo sapiens
gacagacatgccata

SEQ ID NO: 308498 - DNA, 15 bp, Homo sapiens
tgacagacatgccat

SEQ ID NO: 308499 - DNA, 15 bp, Homo sapiens
atgacagacatgcca

SEQ ID NO: 308500 - DNA, 15 bp, Homo sapiens
aatgacagacatgcc

SEQ ID NO: 308501 - DNA, 15 bp, Homo sapiens
aaatgacagacatgc

SEQ ID NO: 308502 - DNA, 15 bp, Homo sapiens
gaaatgacagacatg

SEQ ID NO: 308503 - DNA, 15 bp, Homo sapiens
ggaaatgacagacat

SEQ ID NO: 308504 - DNA, 15 bp, Homo sapiens
aggaaatgacagaca

SEQ ID NO: 308505 - DNA, 15 bp, Homo sapiens
aaggaaatgacagac

SEQ ID NO: 308506 - DNA, 15 bp, Homo sapiens
aaaggaaatgacaga

SEQ ID NO: 308507 - DNA, 15 bp, Homo sapiens
caaaggaaatgacag

SEQ ID NO: 308508 - DNA, 15 bp, Homo sapiens
tcaaaggaaatgaca

SEQ ID NO: 308509 - DNA, 15 bp, Homo sapiens
gtcaaaggaaatgac

SEQ ID NO: 308510 - DNA, 15 bp, Homo sapiens
agtcaaaggaaatga

SEQ ID NO: 308511 - DNA, 15 bp, Homo sapiens
gagtcaaaggaaatg

SEQ ID NO: 308512 - DNA, 15 bp, Homo sapiens
agagtcaaaggaaat

SEQ ID NO: 308513 - DNA, 15 bp, Homo sapiens
gagagtcaaaggaaa

SEQ ID NO: 308514 - DNA, 15 bp, Homo sapiens
agagagtcaaaggaa

SEQ ID NO: 308515 - DNA, 15 bp, Homo sapiens
cagagagtcaaagga

SEQ ID NO: 308516 - DNA, 15 bp, Homo sapiens
ccagagagtcaaagg

SEQ ID NO: 308517 - DNA, 15 bp, Homo sapiens
gccagagagtcaaag

SEQ ID NO: 308518 - DNA, 15 bp, Homo sapiens
agccagagagtcaaa

SEQ ID NO: 308519 - DNA, 15 bp, Homo sapiens
cagccagagagtcaa

SEQ ID NO: 308520 - DNA, 15 bp, Homo sapiens
ccagccagagagtca

SEQ ID NO: 308521 - DNA, 15 bp, Homo sapiens
accagccagagagtc

SEQ ID NO: 308522 - DNA, 15 bp, Homo sapiens
gaccagccagagagt

SEQ ID NO: 308523 - DNA, 15 bp, Homo sapiens
agaccagccagagag

SEQ ID NO: 308524 - DNA, 15 bp, Homo sapiens
aagaccagccagaga

SEQ ID NO: 308525 - DNA, 15 bp, Homo sapiens
gaagaccagccagag

SEQ ID NO: 308526 - DNA, 15 bp, Homo sapiens
tgaagaccagccaga

SEQ ID NO: 308527 - DNA, 15 bp, Homo sapiens
atgaagaccagccag

SEQ ID NO: 308528 - DNA, 15 bp, Homo sapiens
gatgaagaccagcca

SEQ ID NO: 308529 - DNA, 15 bp, Homo sapiens
agatgaagaccagcc

SEQ ID NO: 308530 - DNA, 15 bp, Homo sapiens
gagatgaagaccagc

SEQ ID NO: 308531 - DNA, 15 bp, Homo sapiens
tgagatgaagaccag

SEQ ID NO: 308532 - DNA, 15 bp, Homo sapiens
ctgagatgaagacca

SEQ ID NO: 308533 - DNA, 15 bp, Homo sapiens
gctgagatgaagacc

SEQ ID NO: 308534 - DNA, 15 bp, Homo sapiens
tgctgagatgaagac

SEQ ID NO: 308535 - DNA, 15 bp, Homo sapiens
ttgctgagatgaaga

SEQ ID NO: 308536 - DNA, 15 bp, Homo sapiens
tttgctgagatgaag

SEQ ID NO: 308537 - DNA, 15 bp, Homo sapiens
ctttgctgagatgaa

SEQ ID NO: 308538 - DNA, 15 bp, Homo sapiens
actttgctgagatga

SEQ ID NO: 308539 - DNA, 15 bp, Homo sapiens
cactttgctgagatg

SEQ ID NO: 308540 - DNA, 15 bp, Homo sapiens
ccactttgctgagat

SEQ ID NO: 308541 - DNA, 15 bp, Homo sapiens
tccactttgctgaga

SEQ ID NO: 308542 - DNA, 15 bp, Homo sapiens
ttccactttgctgag

SEQ ID NO: 308543 - DNA, 15 bp, Homo sapiens
tttccactttgctga

SEQ ID NO: 308544 - DNA, 15 bp, Homo sapiens
ttttccactttgctg

SEQ ID NO: 308545 - DNA, 15 bp, Homo sapiens
tttttccactttgct

SEQ ID NO: 308546 - DNA, 15 bp, Homo sapiens
ttttttccactttgc

SEQ ID NO: 308547 - DNA, 15 bp, Homo sapiens
gttttttccactttg

SEQ ID NO: 308548 - DNA, 15 bp, Homo sapiens
tgttttttccacttt

SEQ ID NO: 308549 - DNA, 15 bp, Homo sapiens
atgttttttccactt

SEQ ID NO: 308550 - DNA, 15 bp, Homo sapiens
tatgttttttccact

SEQ ID NO: 308551 - DNA, 15 bp, Homo sapiens
atatgttttttccac

SEQ ID NO: 308552 - DNA, 15 bp, Homo sapiens
aatatgttttttcca

SEQ ID NO: 308553 - DNA, 15 bp, Homo sapiens
aaatatgttttttcc

SEQ ID NO: 308554 - DNA, 15 bp, Homo sapiens
aaaatatgttttttc

SEQ ID NO: 308555 - DNA, 15 bp, Homo sapiens
taaaatatgtttttt

SEQ ID NO: 308556 - DNA, 15 bp, Homo sapiens
ctaaaatatgttttt

SEQ ID NO: 308557 - DNA, 15 bp, Homo sapiens
tctaaaatatgtttt

SEQ ID NO: 308558 - DNA, 15 bp, Homo sapiens
atctaaaatatgttt

SEQ ID NO: 308559 - DNA, 15 bp, Homo sapiens
catctaaaatatgtt

SEQ ID NO: 308560 - DNA, 15 bp, Homo sapiens
ccatctaaaatatgt

SEQ ID NO: 308561 - DNA, 15 bp, Homo sapiens
cccatctaaaatatg

SEQ ID NO: 308562 - DNA, 15 bp, Homo sapiens
tcccatctaaaatat

SEQ ID NO: 308563 - DNA, 15 bp, Homo sapiens
ttcccatctaaaata

SEQ ID NO: 308564 - DNA, 15 bp, Homo sapiens
tttcccatctaaaat

SEQ ID NO: 308565 - DNA, 15 bp, Homo sapiens
ttttcccatctaaaa

SEQ ID NO: 308566 - DNA, 15 bp, Homo sapiens
tttttcccatctaaa

SEQ ID NO: 308567 - DNA, 15 bp, Homo sapiens
ttttttcccatctaa

SEQ ID NO: 308568 - DNA, 15 bp, Homo sapiens
attttttcccatcta

SEQ ID NO: 308569 - DNA, 15 bp, Homo sapiens
cattttttcccatct

SEQ ID NO: 308570 - DNA, 15 bp, Homo sapiens
ccattttttcccatc

SEQ ID NO: 308571 - DNA, 15 bp, Homo sapiens
cccattttttcccat

SEQ ID NO: 308572 - DNA, 15 bp, Homo sapiens
tcccattttttccca

SEQ ID NO: 308573 - DNA, 15 bp, Homo sapiens
ttcccattttttccc

SEQ ID NO: 308574 - DNA, 15 bp, Homo sapiens
cttcccattttttcc

SEQ ID NO: 308575 - DNA, 15 bp, Homo sapiens
tcttcccattttttc

SEQ ID NO: 308576 - DNA, 15 bp, Homo sapiens
ttcttcccatttttt

SEQ ID NO: 308577 - DNA, 15 bp, Homo sapiens
tttcttcccattttt

SEQ ID NO: 308578 - DNA, 15 bp, Homo sapiens
gtttcttcccatttt

SEQ ID NO: 308579 - DNA, 15 bp, Homo sapiens
agtttcttcccattt

SEQ ID NO: 308580 - DNA, 15 bp, Homo sapiens
cagtttcttcccatt

SEQ ID NO: 308581 - DNA, 15 bp, Homo sapiens
tcagtttcttcccat

SEQ ID NO: 308582 - DNA, 15 bp, Homo sapiens
ttcagtttcttccca

SEQ ID NO: 308583 - DNA, 15 bp, Homo sapiens
tttcagtttcttccc

SEQ ID NO: 308584 - DNA, 15 bp, Homo sapiens
ctttcagtttcttcc

SEQ ID NO: 308585 - DNA, 15 bp, Homo sapiens
tctttcagtttcttc

SEQ ID NO: 308586 - DNA, 15 bp, Homo sapiens
ctctttcagtttctt

SEQ ID NO: 308587 - DNA, 15 bp, Homo sapiens
cctctttcagtttct

SEQ ID NO: 308588 - DNA, 15 bp, Homo sapiens
ccctctttcagtttc

SEQ ID NO: 308589 - DNA, 15 bp, Homo sapiens
tccctctttcagttt

SEQ ID NO: 308590 - DNA, 15 bp, Homo sapiens
ttccctctttcagtt

SEQ ID NO: 308591 - DNA, 15 bp, Homo sapiens
tttccctctttcagt

SEQ ID NO: 308592 - DNA, 15 bp, Homo sapiens
ttttccctctttcag

SEQ ID NO: 308593 - DNA, 15 bp, Homo sapiens
attttccctctttca

SEQ ID NO: 308594 - DNA, 15 bp, Homo sapiens
tattttccctctttc

SEQ ID NO: 308595 - DNA, 15 bp, Homo sapiens
atattttccctcttt

SEQ ID NO: 308596 - DNA, 15 bp, Homo sapiens
gatattttccctctt

SEQ ID NO: 308597 - DNA, 15 bp, Homo sapiens
ggatattttccctct

SEQ ID NO: 308598 - DNA, 15 bp, Homo sapiens
gggatattttccctc

SEQ ID NO: 308599 - DNA, 15 bp, Homo sapiens
agggatattttccct

SEQ ID NO: 308600 - DNA, 15 bp, Homo sapiens
tagggatattttccc

SEQ ID NO: 308601 - DNA, 15 bp, Homo sapiens
ttagggatattttcc

SEQ ID NO: 308602 - DNA, 15 bp, Homo sapiens
attagggatattttc

SEQ ID NO: 308603 - DNA, 15 bp, Homo sapiens
tattagggatatttt

SEQ ID NO: 308604 - DNA, 15 bp, Homo sapiens
gtattagggatattt

SEQ ID NO: 308605 - DNA, 15 bp, Homo sapiens
tgtattagggatatt

SEQ ID NO: 308606 - DNA, 15 bp, Homo sapiens
ttgtattagggatat

SEQ ID NO: 308607 - DNA, 15 bp, Homo sapiens
cttgtattagggata

SEQ ID NO: 308608 - DNA, 15 bp, Homo sapiens
ccttgtattagggat

SEQ ID NO: 308609 - DNA, 15 bp, Homo sapiens
tccttgtattaggga

SEQ ID NO: 308610 - DNA, 15 bp, Homo sapiens
ctccttgtattaggg

SEQ ID NO: 308611 - DNA, 15 bp, Homo sapiens
tctccttgtattagg

SEQ ID NO: 308612 - DNA, 15 bp, Homo sapiens
ttctccttgtattag

SEQ ID NO: 308613 - DNA, 15 bp, Homo sapiens
tttctccttgtatta

SEQ ID NO: 308614 - DNA, 15 bp, Homo sapiens
gtttctccttgtatt

SEQ ID NO: 308615 - DNA, 15 bp, Homo sapiens
tgtttctccttgtat

SEQ ID NO: 308616 - DNA, 15 bp, Homo sapiens
gtgtttctccttgta

SEQ ID NO: 308617 - DNA, 15 bp, Homo sapiens
tgtgtttctccttgt

SEQ ID NO: 308618 - DNA, 15 bp, Homo sapiens
ttgtgtttctccttg

SEQ ID NO: 308619 - DNA, 15 bp, Homo sapiens
gttgtgtttctcctt

SEQ ID NO: 308620 - DNA, 15 bp, Homo sapiens
agttgtgtttctcct

SEQ ID NO: 308621 - DNA, 15 bp, Homo sapiens
gagttgtgtttctcc

SEQ ID NO: 308622 - DNA, 15 bp, Homo sapiens
agagttgtgtttctc

SEQ ID NO: 308623 - DNA, 15 bp, Homo sapiens
tagagttgtgtttct

SEQ ID NO: 308624 - DNA, 15 bp, Homo sapiens
ctagagttgtgtttc

SEQ ID NO: 308625 - DNA, 15 bp, Homo sapiens
tctagagttgtgttt

SEQ ID NO: 308626 - DNA, 15 bp, Homo sapiens
atctagagttgtgtt

SEQ ID NO: 308627 - DNA, 15 bp, Homo sapiens
aatctagagttgtgt

SEQ ID NO: 308628 - DNA, 15 bp, Homo sapiens
gaatctagagttgtg

SEQ ID NO: 308629 - DNA, 15 bp, Homo sapiens
ggaatctagagttgt

SEQ ID NO: 308630 - DNA, 15 bp, Homo sapiens
gggaatctagagttg

SEQ ID NO: 308631 - DNA, 15 bp, Homo sapiens
agggaatctagagtt

SEQ ID NO: 308632 - DNA, 15 bp, Homo sapiens
tagggaatctagagt

SEQ ID NO: 308633 - DNA, 15 bp, Homo sapiens
atagggaatctagag

SEQ ID NO: 308634 - DNA, 15 bp, Homo sapiens
aatagggaatctaga

SEQ ID NO: 308635 - DNA, 15 bp, Homo sapiens
caatagggaatctag

SEQ ID NO: 308636 - DNA, 15 bp, Homo sapiens
gcaatagggaatcta

SEQ ID NO: 308637 - DNA, 15 bp, Homo sapiens
ggcaatagggaatct

SEQ ID NO: 308638 - DNA, 15 bp, Homo sapiens
tggcaatagggaatc

SEQ ID NO: 308639 - DNA, 15 bp, Homo sapiens
atggcaatagggaat

SEQ ID NO: 308640 - DNA, 15 bp, Homo sapiens
tatggcaatagggaa

SEQ ID NO: 308641 - DNA, 15 bp, Homo sapiens
atatggcaataggga

SEQ ID NO: 308642 - DNA, 15 bp, Homo sapiens
catatggcaataggg

SEQ ID NO: 308643 - DNA, 15 bp, Homo sapiens
ccatatggcaatagg

SEQ ID NO: 308644 - DNA, 15 bp, Homo sapiens
tccatatggcaatag

SEQ ID NO: 308645 - DNA, 15 bp, Homo sapiens
ttccatatggcaata

SEQ ID NO: 308646 - DNA, 15 bp, Homo sapiens
gttccatatggcaat

SEQ ID NO: 308647 - DNA, 15 bp, Homo sapiens
tgttccatatggcaa

SEQ ID NO: 308648 - DNA, 15 bp, Homo sapiens
atgttccatatggca

SEQ ID NO: 308649 - DNA, 15 bp, Homo sapiens
aatgttccatatggc

SEQ ID NO: 308650 - DNA, 15 bp, Homo sapiens
aaatgttccatatgg

SEQ ID NO: 308651 - DNA, 15 bp, Homo sapiens
taaatgttccatatg

SEQ ID NO: 308652 - DNA, 15 bp, Homo sapiens
ctaaatgttccatat

SEQ ID NO: 308653 - DNA, 15 bp, Homo sapiens
cctaaatgttccata

SEQ ID NO: 308654 - DNA, 15 bp, Homo sapiens
tcctaaatgttccat

SEQ ID NO: 308655 - DNA, 15 bp, Homo sapiens
atcctaaatgttcca

SEQ ID NO: 308656 - DNA, 15 bp, Homo sapiens
aatcctaaatgttcc

SEQ ID NO: 308657 - DNA, 15 bp, Homo sapiens
aaatcctaaatgttc

SEQ ID NO: 308658 - DNA, 15 bp, Homo sapiens
gaaatcctaaatgtt

SEQ ID NO: 308659 - DNA, 15 bp, Homo sapiens
ggaaatcctaaatgt

SEQ ID NO: 308660 - DNA, 15 bp, Homo sapiens
gggaaatcctaaatg

SEQ ID NO: 308661 - DNA, 15 bp, Homo sapiens
tgggaaatcctaaat

SEQ ID NO: 308662 - DNA, 15 bp, Homo sapiens
ctgggaaatcctaaa

SEQ ID NO: 308663 - DNA, 15 bp, Homo sapiens
cctgggaaatcctaa

SEQ ID NO: 308664 - DNA, 15 bp, Homo sapiens
tcctgggaaatccta

SEQ ID NO: 308665 - DNA, 15 bp, Homo sapiens
ctcctgggaaatcct

SEQ ID NO: 308666 - DNA, 15 bp, Homo sapiens
cctcctgggaaatcc

SEQ ID NO: 308667 - DNA, 15 bp, Homo sapiens
tcctcctgggaaatc

SEQ ID NO: 308668 - DNA, 15 bp, Homo sapiens
ttcctcctgggaaat

SEQ ID NO: 308669 - DNA, 15 bp, Homo sapiens
tttcctcctgggaaa

SEQ ID NO: 308670 - DNA, 15 bp, Homo sapiens
gtttcctcctgggaa

SEQ ID NO: 308671 - DNA, 15 bp, Homo sapiens
tgtttcctcctggga

SEQ ID NO: 308672 - DNA, 15 bp, Homo sapiens
gtgtttcctcctggg

SEQ ID NO: 308673 - DNA, 15 bp, Homo sapiens
cgtgtttcctcctgg

SEQ ID NO: 308674 - DNA, 15 bp, Homo sapiens
acgtgtttcctcctg

SEQ ID NO: 308675 - DNA, 15 bp, Homo sapiens
aacgtgtttcctcct

SEQ ID NO: 308676 - DNA, 15 bp, Homo sapiens
gaacgtgtttcctcc

SEQ ID NO: 308677 - DNA, 15 bp, Homo sapiens
tgaacgtgtttcctc

SEQ ID NO: 308678 - DNA, 15 bp, Homo sapiens
ttgaacgtgtttcct

SEQ ID NO: 308679 - DNA, 15 bp, Homo sapiens
gttgaacgtgtttcc

SEQ ID NO: 308680 - DNA, 15 bp, Homo sapiens
ggttgaacgtgtttc

SEQ ID NO: 308681 - DNA, 15 bp, Homo sapiens
tggttgaacgtgttt

SEQ ID NO: 308682 - DNA, 15 bp, Homo sapiens
ctggttgaacgtgtt

SEQ ID NO: 308683 - DNA, 15 bp, Homo sapiens
actggttgaacgtgt

SEQ ID NO: 308684 - DNA, 15 bp, Homo sapiens
aactggttgaacgtg

SEQ ID NO: 308685 - DNA, 15 bp, Homo sapiens
caactggttgaacgt

SEQ ID NO: 308686 - DNA, 15 bp, Homo sapiens
gcaactggttgaacg

SEQ ID NO: 308687 - DNA, 15 bp, Homo sapiens
agcaactggttgaac

SEQ ID NO: 308688 - DNA, 15 bp, Homo sapiens
aagcaactggttgaa

SEQ ID NO: 308689 - DNA, 15 bp, Homo sapiens
gaagcaactggttga

SEQ ID NO: 308690 - DNA, 15 bp, Homo sapiens
agaagcaactggttg

SEQ ID NO: 308691 - DNA, 15 bp, Homo sapiens
cagaagcaactggtt

SEQ ID NO: 308692 - DNA, 15 bp, Homo sapiens
acagaagcaactggt

SEQ ID NO: 308693 - DNA, 15 bp, Homo sapiens
aacagaagcaactgg

SEQ ID NO: 308694 - DNA, 15 bp, Homo sapiens
taacagaagcaactg

SEQ ID NO: 308695 - DNA, 15 bp, Homo sapiens
gtaacagaagcaact

SEQ ID NO: 308696 - DNA, 15 bp, Homo sapiens
ggtaacagaagcaac

SEQ ID NO: 308697 - DNA, 15 bp, Homo sapiens
aggtaacagaagcaa

SEQ ID NO: 308698 - DNA, 15 bp, Homo sapiens
gaggtaacagaagca

SEQ ID NO: 308699 - DNA, 15 bp, Homo sapiens
ggaggtaacagaagc

SEQ ID NO: 308700 - DNA, 15 bp, Homo sapiens
cggaggtaacagaag

SEQ ID NO: 308701 - DNA, 15 bp, Homo sapiens
ccggaggtaacagaa

SEQ ID NO: 308702 - DNA, 15 bp, Homo sapiens
tccggaggtaacaga

SEQ ID NO: 308703 - DNA, 15 bp, Homo sapiens
gtccggaggtaacag

SEQ ID NO: 308704 - DNA, 15 bp, Homo sapiens
agtccggaggtaaca

SEQ ID NO: 308705 - DNA, 15 bp, Homo sapiens
tagtccggaggtaac

SEQ ID NO: 308706 - DNA, 15 bp, Homo sapiens
ttagtccggaggtaa

SEQ ID NO: 308707 - DNA, 15 bp, Homo sapiens
cttagtccggaggta

SEQ ID NO: 308708 - DNA, 15 bp, Homo sapiens
tcttagtccggaggt

SEQ ID NO: 308709 - DNA, 15 bp, Homo sapiens
ctcttagtccggagg

SEQ ID NO: 308710 - DNA, 15 bp, Homo sapiens
cctcttagtccggag

SEQ ID NO: 308711 - DNA, 15 bp, Homo sapiens
ccctcttagtccgga

SEQ ID NO: 308712 - DNA, 15 bp, Homo sapiens
tccctcttagtccgg

SEQ ID NO: 308713 - DNA, 15 bp, Homo sapiens
atccctcttagtccg

SEQ ID NO: 308714 - DNA, 15 bp, Homo sapiens
gatccctcttagtcc

SEQ ID NO: 308715 - DNA, 15 bp, Homo sapiens
ggatccctcttagtc

SEQ ID NO: 308716 - DNA, 15 bp, Homo sapiens
aggatccctcttagt

SEQ ID NO: 308717 - DNA, 15 bp, Homo sapiens
caggatccctcttag

SEQ ID NO: 308718 - DNA, 15 bp, Homo sapiens
tcaggatccctctta

SEQ ID NO: 308719 - DNA, 15 bp, Homo sapiens
atcaggatccctctt

SEQ ID NO: 308720 - DNA, 15 bp, Homo sapiens
tatcaggatccctct

SEQ ID NO: 308721 - DNA, 15 bp, Homo sapiens
ctatcaggatccctc

SEQ ID NO: 308722 - DNA, 15 bp, Homo sapiens
actatcaggatccct

SEQ ID NO: 308723 - DNA, 15 bp, Homo sapiens
tactatcaggatccc

SEQ ID NO: 308724 - DNA, 15 bp, Homo sapiens
ctactatcaggatcc

SEQ ID NO: 308725 - DNA, 15 bp, Homo sapiens
gctactatcaggatc

SEQ ID NO: 308726 - DNA, 15 bp, Homo sapiens
agctactatcaggat

SEQ ID NO: 308727 - DNA, 15 bp, Homo sapiens
cagctactatcagga

SEQ ID NO: 308728 - DNA, 15 bp, Homo sapiens
acagctactatcagg

SEQ ID NO: 308729 - DNA, 15 bp, Homo sapiens
cacagctactatcag

SEQ ID NO: 308730 - DNA, 15 bp, Homo sapiens
ccacagctactatca

SEQ ID NO: 308731 - DNA, 15 bp, Homo sapiens
gccacagctactatc

SEQ ID NO: 308732 - DNA, 15 bp, Homo sapiens
agccacagctactat

SEQ ID NO: 308733 - DNA, 15 bp, Homo sapiens
cagccacagctacta

SEQ ID NO: 308734 - DNA, 15 bp, Homo sapiens
ccagccacagctact

SEQ ID NO: 308735 - DNA, 15 bp, Homo sapiens
accagccacagctac

SEQ ID NO: 308736 - DNA, 15 bp, Homo sapiens
caccagccacagcta

SEQ ID NO: 308737 - DNA, 15 bp, Homo sapiens
tcaccagccacagct

SEQ ID NO: 308738 - DNA, 15 bp, Homo sapiens
ttcaccagccacagc

SEQ ID NO: 308739 - DNA, 15 bp, Homo sapiens
cttcaccagccacag

SEQ ID NO: 308740 - DNA, 15 bp, Homo sapiens
ccttcaccagccaca

SEQ ID NO: 308741 - DNA, 15 bp, Homo sapiens
tccttcaccagccac

SEQ ID NO: 308742 - DNA, 15 bp, Homo sapiens
ttccttcaccagcca

SEQ ID NO: 308743 - DNA, 15 bp, Homo sapiens
gttccttcaccagcc

SEQ ID NO: 308744 - DNA, 15 bp, Homo sapiens
tgttccttcaccagc

SEQ ID NO: 308745 - DNA, 15 bp, Homo sapiens
gtgttccttcaccag

SEQ ID NO: 308746 - DNA, 15 bp, Homo sapiens
ggtgttccttcacca

SEQ ID NO: 308747 - DNA, 15 bp, Homo sapiens
aggtgttccttcacc

SEQ ID NO: 308748 - DNA, 15 bp, Homo sapiens
gaggtgttccttcac

SEQ ID NO: 308749 - DNA, 15 bp, Homo sapiens
agaggtgttccttca

SEQ ID NO: 308750 - DNA, 15 bp, Homo sapiens
tagaggtgttccttc

SEQ ID NO: 308751 - DNA, 15 bp, Homo sapiens
atagaggtgttcctt

SEQ ID NO: 308752 - DNA, 15 bp, Homo sapiens
aatagaggtgttcct

SEQ ID NO: 308753 - DNA, 15 bp, Homo sapiens
taatagaggtgttcc

SEQ ID NO: 308754 - DNA, 15 bp, Homo sapiens
ataatagaggtgttc

SEQ ID NO: 308755 - DNA, 15 bp, Homo sapiens
gataatagaggtgtt

SEQ ID NO: 308756 - DNA, 15 bp, Homo sapiens
agataatagaggtgt

SEQ ID NO: 308757 - DNA, 15 bp, Homo sapiens
cagataatagaggtg

SEQ ID NO: 308758 - DNA, 15 bp, Homo sapiens
ccagataatagaggt

SEQ ID NO: 308759 - DNA, 15 bp, Homo sapiens
gccagataatagagg

SEQ ID NO: 308760 - DNA, 15 bp, Homo sapiens
agccagataatagag

SEQ ID NO: 308761 - DNA, 15 bp, Homo sapiens
gagccagataataga

SEQ ID NO: 308762 - DNA, 15 bp, Homo sapiens
agagccagataatag

SEQ ID NO: 308763 - DNA, 15 bp, Homo sapiens
cagagccagataata

SEQ ID NO: 308764 - DNA, 15 bp, Homo sapiens
ccagagccagataat

SEQ ID NO: 308765 - DNA, 15 bp, Homo sapiens
cccagagccagataa

SEQ ID NO: 308766 - DNA, 15 bp, Homo sapiens
acccagagccagata

SEQ ID NO: 308767 - DNA, 15 bp, Homo sapiens
cacccagagccagat

SEQ ID NO: 308768 - DNA, 15 bp, Homo sapiens
gcacccagagccaga

SEQ ID NO: 308769 - DNA, 15 bp, Homo sapiens
agcacccagagccag

SEQ ID NO: 308770 - DNA, 15 bp, Homo sapiens
cagcacccagagcca

SEQ ID NO: 308771 - DNA, 15 bp, Homo sapiens
gcagcacccagagcc

SEQ ID NO: 308772 - DNA, 15 bp, Homo sapiens
tgcagcacccagagc

SEQ ID NO: 308773 - DNA, 15 bp, Homo sapiens
ctgcagcacccagag

SEQ ID NO: 308774 - DNA, 15 bp, Homo sapiens
tctgcagcacccaga

SEQ ID NO: 308775 - DNA, 15 bp, Homo sapiens
ttctgcagcacccag

SEQ ID NO: 308776 - DNA, 15 bp, Homo sapiens
gttctgcagcaccca

SEQ ID NO: 308777 - DNA, 15 bp, Homo sapiens
ggttctgcagcaccc

SEQ ID NO: 308778 - DNA, 15 bp, Homo sapiens
tggttctgcagcacc

SEQ ID NO: 308779 - DNA, 15 bp, Homo sapiens
ctggttctgcagcac

SEQ ID NO: 308780 - DNA, 15 bp, Homo sapiens
cctggttctgcagca

SEQ ID NO: 308781 - DNA, 15 bp, Homo sapiens
gcctggttctgcagc

SEQ ID NO: 308782 - DNA, 15 bp, Homo sapiens
tgcctggttctgcag

SEQ ID NO: 308783 - DNA, 15 bp, Homo sapiens
ctgcctggttctgca

SEQ ID NO: 308784 - DNA, 15 bp, Homo sapiens
actgcctggttctgc

SEQ ID NO: 308785 - DNA, 15 bp, Homo sapiens
aactgcctggttctg

SEQ ID NO: 308786 - DNA, 15 bp, Homo sapiens
taactgcctggttct

SEQ ID NO: 308787 - DNA, 15 bp, Homo sapiens
ttaactgcctggttc

SEQ ID NO: 308788 - DNA, 15 bp, Homo sapiens
gttaactgcctggtt

SEQ ID NO: 308789 - DNA, 15 bp, Homo sapiens
tgttaactgcctggt

SEQ ID NO: 308790 - DNA, 15 bp, Homo sapiens
ctgttaactgcctgg

SEQ ID NO: 308791 - DNA, 15 bp, Homo sapiens
cctgttaactgcctg

SEQ ID NO: 308792 - DNA, 15 bp, Homo sapiens
tcctgttaactgcct

SEQ ID NO: 308793 - DNA, 15 bp, Homo sapiens
gtcctgttaactgcc

SEQ ID NO: 308794 - DNA, 15 bp, Homo sapiens
tgtcctgttaactgc

SEQ ID NO: 308795 - DNA, 15 bp, Homo sapiens
ttgtcctgttaactg

SEQ ID NO: 308796 - DNA, 15 bp, Homo sapiens
cttgtcctgttaact

SEQ ID NO: 308797 - DNA, 15 bp, Homo sapiens
tcttgtcctgttaac

SEQ ID NO: 308798 - DNA, 15 bp, Homo sapiens
ttcttgtcctgttaa

SEQ ID NO: 308799 - DNA, 15 bp, Homo sapiens
tttcttgtcctgtta

SEQ ID NO: 308800 - DNA, 15 bp, Homo sapiens
ttttcttgtcctgtt

SEQ ID NO: 308801 - DNA, 15 bp, Homo sapiens
gttttcttgtcctgt

SEQ ID NO: 308802 - DNA, 15 bp, Homo sapiens
ggttttcttgtcctg

SEQ ID NO: 308803 - DNA, 15 bp, Homo sapiens
tggttttcttgtcct

SEQ ID NO: 308804 - DNA, 15 bp, Homo sapiens
ttggttttcttgtcc

SEQ ID NO: 308805 - DNA, 15 bp, Homo sapiens
tttggttttcttgtc

SEQ ID NO: 308806 - DNA, 15 bp, Homo sapiens
atttggttttcttgt

SEQ ID NO: 308807 - DNA, 15 bp, Homo sapiens
catttggttttcttg

SEQ ID NO: 308808 - DNA, 15 bp, Homo sapiens
tcatttggttttctt

SEQ ID NO: 308809 - DNA, 15 bp, Homo sapiens
atcatttggttttct

SEQ ID NO: 308810 - DNA, 15 bp, Homo sapiens
gatcatttggttttc

SEQ ID NO: 308811 - DNA, 15 bp, Homo sapiens
ggatcatttggtttt

SEQ ID NO: 308812 - DNA, 15 bp, Homo sapiens
tggatcatttggttt

SEQ ID NO: 308813 - DNA, 15 bp, Homo sapiens
atggatcatttggtt

SEQ ID NO: 308814 - DNA, 15 bp, Homo sapiens
catggatcatttggt

SEQ ID NO: 308815 - DNA, 15 bp, Homo sapiens
ccatggatcatttgg

SEQ ID NO: 308816 - DNA, 15 bp, Homo sapiens
cccatggatcatttg

SEQ ID NO: 308817 - DNA, 15 bp, Homo sapiens
acccatggatcattt

SEQ ID NO: 308818 - DNA, 15 bp, Homo sapiens
cacccatggatcatt

SEQ ID NO: 308819 - DNA, 15 bp, Homo sapiens
gcacccatggatcat

SEQ ID NO: 308820 - DNA, 15 bp, Homo sapiens
tgcacccatggatca

SEQ ID NO: 308821 - DNA, 15 bp, Homo sapiens
ttgcacccatggatc

SEQ ID NO: 308822 - DNA, 15 bp, Homo sapiens
tttgcacccatggat

SEQ ID NO: 308823 - DNA, 15 bp, Homo sapiens
atttgcacccatgga

SEQ ID NO: 308824 - DNA, 15 bp, Homo sapiens
catttgcacccatgg

SEQ ID NO: 308825 - DNA, 15 bp, Homo sapiens
acatttgcacccatg

SEQ ID NO: 308826 - DNA, 15 bp, Homo sapiens
cacatttgcacccat

SEQ ID NO: 308827 - DNA, 15 bp, Homo sapiens
gcacatttgcaccca

SEQ ID NO: 308828 - DNA, 15 bp, Homo sapiens
agcacatttgcaccc

SEQ ID NO: 308829 - DNA, 15 bp, Homo sapiens
aagcacatttgcacc

SEQ ID NO: 308830 - DNA, 15 bp, Homo sapiens
aaagcacatttgcac

SEQ ID NO: 308831 - DNA, 15 bp, Homo sapiens
aaaagcacatttgca

SEQ ID NO: 308832 - DNA, 15 bp, Homo sapiens
caaaagcacatttgc

SEQ ID NO: 308833 - DNA, 15 bp, Homo sapiens
gcaaaagcacatttg

SEQ ID NO: 308834 - DNA, 15 bp, Homo sapiens
ggcaaaagcacattt

SEQ ID NO: 308835 - DNA, 15 bp, Homo sapiens
tggcaaaagcacatt

SEQ ID NO: 308836 - DNA, 15 bp, Homo sapiens
ttggcaaaagcacat

SEQ ID NO: 308837 - DNA, 15 bp, Homo sapiens
tttggcaaaagcaca

SEQ ID NO: 308838 - DNA, 15 bp, Homo sapiens
ctttggcaaaagcac

SEQ ID NO: 308839 - DNA, 15 bp, Homo sapiens
gctttggcaaaagca

SEQ ID NO: 308840 - DNA, 15 bp, Homo sapiens
ggctttggcaaaagc

SEQ ID NO: 308841 - DNA, 15 bp, Homo sapiens
tggctttggcaaaag

SEQ ID NO: 308842 - DNA, 15 bp, Homo sapiens
gtggctttggcaaaa

SEQ ID NO: 308843 - DNA, 15 bp, Homo sapiens
agtggctttggcaaa

SEQ ID NO: 308844 - DNA, 15 bp, Homo sapiens
aagtggctttggcaa

SEQ ID NO: 308845 - DNA, 15 bp, Homo sapiens
gaagtggctttggca

SEQ ID NO: 308846 - DNA, 15 bp, Homo sapiens
ggaagtggctttggc

SEQ ID NO: 308847 - DNA, 15 bp, Homo sapiens
gggaagtggctttgg

SEQ ID NO: 308848 - DNA, 15 bp, Homo sapiens
agggaagtggctttg

SEQ ID NO: 308849 - DNA, 15 bp, Homo sapiens
cagggaagtggcttt

SEQ ID NO: 308850 - DNA, 15 bp, Homo sapiens
ccagggaagtggctt

SEQ ID NO: 308851 - DNA, 15 bp, Homo sapiens
cccagggaagtggct

SEQ ID NO: 308852 - DNA, 15 bp, Homo sapiens
ccccagggaagtggc

SEQ ID NO: 308853 - DNA, 15 bp, Homo sapiens
accccagggaagtgg

SEQ ID NO: 308854 - DNA, 15 bp, Homo sapiens
gaccccagggaagtg

SEQ ID NO: 308855 - DNA, 15 bp, Homo sapiens
agaccccagggaagt

SEQ ID NO: 308856 - DNA, 15 bp, Homo sapiens
tagaccccagggaag

SEQ ID NO: 308857 - DNA, 15 bp, Homo sapiens
ctagaccccagggaa

SEQ ID NO: 308858 - DNA, 15 bp, Homo sapiens
tctagaccccaggga

SEQ ID NO: 308859 - DNA, 15 bp, Homo sapiens
atctagaccccaggg

SEQ ID NO: 308860 - DNA, 15 bp, Homo sapiens
tatctagaccccagg

SEQ ID NO: 308861 - DNA, 15 bp, Homo sapiens
ctatctagaccccag

SEQ ID NO: 308862 - DNA, 15 bp, Homo sapiens
gctatctagacccca

SEQ ID NO: 308863 - DNA, 15 bp, Homo sapiens
cgctatctagacccc

SEQ ID NO: 308864 - DNA, 15 bp, Homo sapiens
tcgctatctagaccc

SEQ ID NO: 308865 - DNA, 15 bp, Homo sapiens
ttcgctatctagacc

SEQ ID NO: 308866 - DNA, 15 bp, Homo sapiens
cttcgctatctagac

SEQ ID NO: 308867 - DNA, 15 bp, Homo sapiens
tcttcgctatctaga

SEQ ID NO: 308868 - DNA, 15 bp, Homo sapiens
ctcttcgctatctag

SEQ ID NO: 308869 - DNA, 15 bp, Homo sapiens
tctcttcgctatcta

SEQ ID NO: 308870 - DNA, 15 bp, Homo sapiens
ttctcttcgctatct

SEQ ID NO: 308871 - DNA, 15 bp, Homo sapiens
tttctcttcgctatc

SEQ ID NO: 308872 - DNA, 15 bp, Homo sapiens
atttctcttcgctat

SEQ ID NO: 308873 - DNA, 15 bp, Homo sapiens
catttctcttcgcta

SEQ ID NO: 308874 - DNA, 15 bp, Homo sapiens
ccatttctcttcgct

SEQ ID NO: 308875 - DNA, 15 bp, Homo sapiens
accatttctcttcgc

SEQ ID NO: 308876 - DNA, 15 bp, Homo sapiens
caccatttctcttcg

SEQ ID NO: 308877 - DNA, 15 bp, Homo sapiens
ccaccatttctcttc

SEQ ID NO: 308878 - DNA, 15 bp, Homo sapiens
gccaccatttctctt

SEQ ID NO: 308879 - DNA, 15 bp, Homo sapiens
agccaccatttctct

SEQ ID NO: 308880 - DNA, 15 bp, Homo sapiens
aagccaccatttctc

SEQ ID NO: 308881 - DNA, 15 bp, Homo sapiens
gaagccaccatttct

SEQ ID NO: 308882 - DNA, 15 bp, Homo sapiens
agaagccaccatttc

SEQ ID NO: 308883 - DNA, 15 bp, Homo sapiens
tagaagccaccattt

SEQ ID NO: 308884 - DNA, 15 bp, Homo sapiens
ctagaagccaccatt

SEQ ID NO: 308885 - DNA, 15 bp, Homo sapiens
tctagaagccaccat

SEQ ID NO: 308886 - DNA, 15 bp, Homo sapiens
ctctagaagccacca

SEQ ID NO: 308887 - DNA, 15 bp, Homo sapiens
cctctagaagccacc

SEQ ID NO: 308888 - DNA, 15 bp, Homo sapiens
tcctctagaagccac

SEQ ID NO: 308889 - DNA, 15 bp, Homo sapiens
ctcctctagaagcca

SEQ ID NO: 308890 - DNA, 15 bp, Homo sapiens
cctcctctagaagcc

SEQ ID NO: 308891 - DNA, 15 bp, Homo sapiens
tcctcctctagaagc

SEQ ID NO: 308892 - DNA, 15 bp, Homo sapiens
ttcctcctctagaag

SEQ ID NO: 308893 - DNA, 15 bp, Homo sapiens
cttcctcctctagaa

SEQ ID NO: 308894 - DNA, 15 bp, Homo sapiens
tcttcctcctctaga

SEQ ID NO: 308895 - DNA, 15 bp, Homo sapiens
ctcttcctcctctag

SEQ ID NO: 308896 - DNA, 15 bp, Homo sapiens
gctcttcctcctcta

SEQ ID NO: 308897 - DNA, 15 bp, Homo sapiens
agctcttcctcctct

SEQ ID NO: 308898 - DNA, 15 bp, Homo sapiens
tagctcttcctcctc

SEQ ID NO: 308899 - DNA, 15 bp, Homo sapiens
ctagctcttcctcct

SEQ ID NO: 308900 - DNA, 15 bp, Homo sapiens
cctagctcttcctcc

SEQ ID NO: 308901 - DNA, 15 bp, Homo sapiens
tcctagctcttcctc

SEQ ID NO: 308902 - DNA, 15 bp, Homo sapiens
ttcctagctcttcct

SEQ ID NO: 308903 - DNA, 15 bp, Homo sapiens
cttcctagctcttcc

SEQ ID NO: 308904 - DNA, 15 bp, Homo sapiens
acttcctagctcttc

SEQ ID NO: 308905 - DNA, 15 bp, Homo sapiens
tacttcctagctctt

SEQ ID NO: 308906 - DNA, 15 bp, Homo sapiens
ttacttcctagctct

SEQ ID NO: 308907 - DNA, 15 bp, Homo sapiens
attacttcctagctc

SEQ ID NO: 308908 - DNA, 15 bp, Homo sapiens
gattacttcctagct

SEQ ID NO: 308909 - DNA, 15 bp, Homo sapiens
ggattacttcctagc

SEQ ID NO: 308910 - DNA, 15 bp, Homo sapiens
aggattacttcctag

SEQ ID NO: 308911 - DNA, 15 bp, Homo sapiens
caggattacttccta

SEQ ID NO: 308912 - DNA, 15 bp, Homo sapiens
ccaggattacttcct

SEQ ID NO: 308913 - DNA, 15 bp, Homo sapiens
tccaggattacttcc

SEQ ID NO: 308914 - DNA, 15 bp, Homo sapiens
ctccaggattacttc

SEQ ID NO: 308915 - DNA, 15 bp, Homo sapiens
actccaggattactt

SEQ ID NO: 308916 - DNA, 15 bp, Homo sapiens
gactccaggattact

SEQ ID NO: 308917 - DNA, 15 bp, Homo sapiens
ggactccaggattac

SEQ ID NO: 308918 - DNA, 15 bp, Homo sapiens
tggactccaggatta

SEQ ID NO: 308919 - DNA, 15 bp, Homo sapiens
ctggactccaggatt

SEQ ID NO: 308920 - DNA, 15 bp, Homo sapiens
actggactccaggat

SEQ ID NO: 308921 - DNA, 15 bp, Homo sapiens
aactggactccagga

SEQ ID NO: 308922 - DNA, 15 bp, Homo sapiens
caactggactccagg

SEQ ID NO: 308923 - DNA, 15 bp, Homo sapiens
acaactggactccag

SEQ ID NO: 308924 - DNA, 15 bp, Homo sapiens
gacaactggactcca

SEQ ID NO: 308925 - DNA, 15 bp, Homo sapiens
agacaactggactcc

SEQ ID NO: 308926 - DNA, 15 bp, Homo sapiens
aagacaactggactc

SEQ ID NO: 308927 - DNA, 15 bp, Homo sapiens
aaagacaactggact

SEQ ID NO: 308928 - DNA, 15 bp, Homo sapiens
aaaagacaactggac

SEQ ID NO: 308929 - DNA, 15 bp, Homo sapiens
gaaaagacaactgga

SEQ ID NO: 308930 - DNA, 15 bp, Homo sapiens
agaaaagacaactgg

SEQ ID NO: 308931 - DNA, 15 bp, Homo sapiens
aagaaaagacaactg

SEQ ID NO: 308932 - DNA, 15 bp, Homo sapiens
taagaaaagacaact

SEQ ID NO: 308933 - DNA, 15 bp, Homo sapiens
ttaagaaaagacaac

SEQ ID NO: 308934 - DNA, 15 bp, Homo sapiens
tttaagaaaagacaa

SEQ ID NO: 308935 - DNA, 15 bp, Homo sapiens
ctttaagaaaagaca

SEQ ID NO: 308936 - DNA, 15 bp, Homo sapiens
tctttaagaaaagac

SEQ ID NO: 308937 - DNA, 15 bp, Homo sapiens
atctttaagaaaaga

SEQ ID NO: 308938 - DNA, 15 bp, Homo sapiens
gatctttaagaaaag

SEQ ID NO: 308939 - DNA, 15 bp, Homo sapiens
tgatctttaagaaaa

SEQ ID NO: 308940 - DNA, 15 bp, Homo sapiens
atgatctttaagaaa

SEQ ID NO: 308941 - DNA, 15 bp, Homo sapiens
catgatctttaagaa

SEQ ID NO: 308942 - DNA, 15 bp, Homo sapiens
acatgatctttaaga

SEQ ID NO: 308943 - DNA, 15 bp, Homo sapiens
aacatgatctttaag

SEQ ID NO: 308944 - DNA, 15 bp, Homo sapiens
aaacatgatctttaa

SEQ ID NO: 308945 - DNA, 15 bp, Homo sapiens
gaaacatgatcttta

SEQ ID NO: 308946 - DNA, 15 bp, Homo sapiens
tgaaacatgatcttt

SEQ ID NO: 308947 - DNA, 15 bp, Homo sapiens
ctgaaacatgatctt

SEQ ID NO: 308948 - DNA, 15 bp, Homo sapiens
cctgaaacatgatct

SEQ ID NO: 308949 - DNA, 15 bp, Homo sapiens
tcctgaaacatgatc

SEQ ID NO: 308950 - DNA, 15 bp, Homo sapiens
atcctgaaacatgat

SEQ ID NO: 308951 - DNA, 15 bp, Homo sapiens
aatcctgaaacatga

SEQ ID NO: 308952 - DNA, 15 bp, Homo sapiens
gaatcctgaaacatg

SEQ ID NO: 308953 - DNA, 15 bp, Homo sapiens
ggaatcctgaaacat

SEQ ID NO: 308954 - DNA, 15 bp, Homo sapiens
tggaatcctgaaaca

SEQ ID NO: 308955 - DNA, 15 bp, Homo sapiens
ttggaatcctgaaac

SEQ ID NO: 308956 - DNA, 15 bp, Homo sapiens
tttggaatcctgaaa

SEQ ID NO: 308957 - DNA, 15 bp, Homo sapiens
ttttggaatcctgaa

SEQ ID NO: 308958 - DNA, 15 bp, Homo sapiens
tttttggaatcctga

SEQ ID NO: 308959 - DNA, 15 bp, Homo sapiens
ttttttggaatcctg

SEQ ID NO: 308960 - DNA, 15 bp, Homo sapiens
tttttttggaatcct

SEQ ID NO: 308961 - DNA, 15 bp, Homo sapiens
ttttttttggaatcc

SEQ ID NO: 308962 - DNA, 15 bp, Homo sapiens
tttttttttggaatc

SEQ ID NO: 308963 - DNA, 15 bp, Homo sapiens
ttttttttttggaat

SEQ ID NO: 308964 - DNA, 15 bp, Homo sapiens
tttttttttttggaa

SEQ ID NO: 308965 - DNA, 15 bp, Homo sapiens
ttttttttttttgga

SEQ ID NO: 308966 - DNA, 15 bp, Homo sapiens
cttttttttttttgg

SEQ ID NO: 308967 - DNA, 15 bp, Homo sapiens
tcttttttttttttg

SEQ ID NO: 308968 - DNA, 15 bp, Homo sapiens
atctttctttttttt

SEQ ID NO: 308969 - DNA, 15 bp, Homo sapiens
gatctttcttttttt

SEQ ID NO: 308970 - DNA, 15 bp, Homo sapiens
tgatctttctttttt

SEQ ID NO: 308971 - DNA, 15 bp, Homo sapiens
ttgatctttcttttt

SEQ ID NO: 308972 - DNA, 15 bp, Homo sapiens
attgatctttctttt

SEQ ID NO: 308973 - DNA, 15 bp, Homo sapiens
cattgatctttcttt

SEQ ID NO: 308974 - DNA, 15 bp, Homo sapiens
ccattgatctttctt

SEQ ID NO: 308975 - DNA, 15 bp, Homo sapiens
gccattgatctttct

SEQ ID NO: 308976 - DNA, 15 bp, Homo sapiens
tgccattgatctttc

SEQ ID NO: 308977 - DNA, 15 bp, Homo sapiens
atgccattgatcttt

SEQ ID NO: 308978 - DNA, 15 bp, Homo sapiens
catgccattgatctt

SEQ ID NO: 308979 - DNA, 15 bp, Homo sapiens
acatgccattgatct

SEQ ID NO: 308980 - DNA, 15 bp, Homo sapiens
tacatgccattgatc

SEQ ID NO: 308981 - DNA, 15 bp, Homo sapiens
ctacatgccattgat

SEQ ID NO: 308982 - DNA, 15 bp, Homo sapiens
cctacatgccattga

SEQ ID NO: 308983 - DNA, 15 bp, Homo sapiens
tcctacatgccattg

SEQ ID NO: 308984 - DNA, 15 bp, Homo sapiens
ctcctacatgccatt

SEQ ID NO: 308985 - DNA, 15 bp, Homo sapiens
cctcctacatgccat

SEQ ID NO: 308986 - DNA, 15 bp, Homo sapiens
ccctcctacatgcca

SEQ ID NO: 308987 - DNA, 15 bp, Homo sapiens
accctcctacatgcc

SEQ ID NO: 308988 - DNA, 15 bp, Homo sapiens
caccctcctacatgc

SEQ ID NO: 308989 - DNA, 15 bp, Homo sapiens
ccaccctcctacatg

SEQ ID NO: 308990 - DNA, 15 bp, Homo sapiens
cccaccctcctacat

SEQ ID NO: 308991 - DNA, 15 bp, Homo sapiens
ccccaccctcctaca

SEQ ID NO: 308992 - DNA, 15 bp, Homo sapiens
cccccaccctcctac

SEQ ID NO: 308993 - DNA, 15 bp, Homo sapiens
tcccccaccctccta

SEQ ID NO: 308994 - DNA, 15 bp, Homo sapiens
gtcccccaccctcct

SEQ ID NO: 308995 - DNA, 15 bp, Homo sapiens
tgtcccccaccctcc

SEQ ID NO: 308996 - DNA, 15 bp, Homo sapiens
ttgtcccccaccctc

SEQ ID NO: 308997 - DNA, 15 bp, Homo sapiens
tttgtcccccaccct

SEQ ID NO: 308998 - DNA, 15 bp, Homo sapiens
ctttgtcccccaccc

SEQ ID NO: 308999 - DNA, 15 bp, Homo sapiens
tctttgtcccccacc

SEQ ID NO: 309000 - DNA, 15 bp, Homo sapiens
ctctttgtcccccac

SEQ ID NO: 309001 - DNA, 15 bp, Homo sapiens
cctctttgtccccca

SEQ ID NO: 309002 - DNA, 15 bp, Homo sapiens
ccctctttgtccccc

SEQ ID NO: 309003 - DNA, 15 bp, Homo sapiens
accctctttgtcccc

SEQ ID NO: 309004 - DNA, 15 bp, Homo sapiens
caccctctttgtccc

SEQ ID NO: 309005 - DNA, 15 bp, Homo sapiens
tcaccctctttgtcc

SEQ ID NO: 309006 - DNA, 15 bp, Homo sapiens
ttcaccctctttgtc

SEQ ID NO: 309007 - DNA, 15 bp, Homo sapiens
attcaccctctttgt

SEQ ID NO: 309008 - DNA, 15 bp, Homo sapiens
aattcaccctctttg

SEQ ID NO: 309009 - DNA, 15 bp, Homo sapiens
taattcaccctcttt

SEQ ID NO: 309010 - DNA, 15 bp, Homo sapiens
ataattcaccctctt

SEQ ID NO: 309011 - DNA, 15 bp, Homo sapiens
cataattcaccctct

SEQ ID NO: 309012 - DNA, 15 bp, Homo sapiens
tcataattcaccctc

SEQ ID NO: 309013 - DNA, 15 bp, Homo sapiens
ctcataattcaccct

SEQ ID NO: 309014 - DNA, 15 bp, Homo sapiens
actcataattcaccc

SEQ ID NO: 309015 - DNA, 15 bp, Homo sapiens
aactcataattcacc

SEQ ID NO: 309016 - DNA, 15 bp, Homo sapiens
aaactcataattcac

SEQ ID NO: 309017 - DNA, 15 bp, Homo sapiens
caaactcataattca

SEQ ID NO: 309018 - DNA, 15 bp, Homo sapiens
acaaactcataattc

SEQ ID NO: 309019 - DNA, 15 bp, Homo sapiens
cacaaactcataatt

SEQ ID NO: 309020 - DNA, 15 bp, Homo sapiens
acacaaactcataat

SEQ ID NO: 309021 - DNA, 15 bp, Homo sapiens
gacacaaactcataa

SEQ ID NO: 309022 - DNA, 15 bp, Homo sapiens
agacacaaactcata

SEQ ID NO: 309023 - DNA, 15 bp, Homo sapiens
cagacacaaactcat

SEQ ID NO: 309024 - DNA, 15 bp, Homo sapiens
acagacacaaactca

SEQ ID NO: 309025 - DNA, 15 bp, Homo sapiens
cacagacacaaactc

SEQ ID NO: 309026 - DNA, 15 bp, Homo sapiens
acacagacacaaact

SEQ ID NO: 309027 - DNA, 15 bp, Homo sapiens
aacacagacacaaac

SEQ ID NO: 309028 - DNA, 15 bp, Homo sapiens
aaacacagacacaaa

SEQ ID NO: 309029 - DNA, 15 bp, Homo sapiens
aaaacacagacacaa

SEQ ID NO: 309030 - DNA, 15 bp, Homo sapiens
taaaacacagacaca

SEQ ID NO: 309031 - DNA, 15 bp, Homo sapiens
ttaaaacacagacac

SEQ ID NO: 309032 - DNA, 15 bp, Homo sapiens
tttaaaacacagaca

SEQ ID NO: 309033 - DNA, 15 bp, Homo sapiens
ttttaaaacacagac

SEQ ID NO: 309034 - DNA, 15 bp, Homo sapiens
attttaaaacacaga

SEQ ID NO: 309035 - DNA, 15 bp, Homo sapiens
tattttaaaacacag

SEQ ID NO: 309036 - DNA, 15 bp, Homo sapiens
ctattttaaaacaca

SEQ ID NO: 309037 - DNA, 15 bp, Homo sapiens
gctattttaaaacac

SEQ ID NO: 309038 - DNA, 15 bp, Homo sapiens
ggctattttaaaaca

SEQ ID NO: 309039 - DNA, 15 bp, Homo sapiens
tggctattttaaaac

SEQ ID NO: 309040 - DNA, 15 bp, Homo sapiens
gtggctattttaaaa

SEQ ID NO: 309041 - DNA, 15 bp, Homo sapiens
ggtggctattttaaa

SEQ ID NO: 309042 - DNA, 15 bp, Homo sapiens
aggtggctattttaa

SEQ ID NO: 309043 - DNA, 15 bp, Homo sapiens
caggtggctatttta

SEQ ID NO: 309044 - DNA, 15 bp, Homo sapiens
gcaggtggctatttt

SEQ ID NO: 309045 - DNA, 15 bp, Homo sapiens
ggcaggtggctattt

SEQ ID NO: 309046 - DNA, 15 bp, Homo sapiens
aggcaggtggctatt

SEQ ID NO: 309047 - DNA, 15 bp, Homo sapiens
aaggcaggtggctat

SEQ ID NO: 309048 - DNA, 15 bp, Homo sapiens
caaggcaggtggcta

SEQ ID NO: 309049 - DNA, 15 bp, Homo sapiens
tcaaggcaggtggct

SEQ ID NO: 309050 - DNA, 15 bp, Homo sapiens
ttcaaggcaggtggc

SEQ ID NO: 309051 - DNA, 15 bp, Homo sapiens
tttcaaggcaggtgg

SEQ ID NO: 309052 - DNA, 15 bp, Homo sapiens
gtttcaaggcaggtg

SEQ ID NO: 309053 - DNA, 15 bp, Homo sapiens
agtttcaaggcaggt

SEQ ID NO: 309054 - DNA, 15 bp, Homo sapiens
cagtttcaaggcagg

SEQ ID NO: 309055 - DNA, 15 bp, Homo sapiens
gcagtttcaaggcag

SEQ ID NO: 309056 - DNA, 15 bp, Homo sapiens
ggcagtttcaaggca

SEQ ID NO: 309057 - DNA, 15 bp, Homo sapiens
tggcagtttcaaggc

SEQ ID NO: 309058 - DNA, 15 bp, Homo sapiens
atggcagtttcaagg

SEQ ID NO: 309059 - DNA, 15 bp, Homo sapiens
aatggcagtttcaag

SEQ ID NO: 309060 - DNA, 15 bp, Homo sapiens
aaatggcagtttcaa

SEQ ID NO: 309061 - DNA, 15 bp, Homo sapiens
taaatggcagtttca

SEQ ID NO: 309062 - DNA, 15 bp, Homo sapiens
ctaaatggcagtttc

SEQ ID NO: 309063 - DNA, 15 bp, Homo sapiens
tctaaatggcagttt

SEQ ID NO: 309064 - DNA, 15 bp, Homo sapiens
ttctaaatggcagtt

SEQ ID NO: 309065 - DNA, 15 bp, Homo sapiens
tttctaaatggcagt

SEQ ID NO: 309066 - DNA, 15 bp, Homo sapiens
atttctaaatggcag

SEQ ID NO: 309067 - DNA, 15 bp, Homo sapiens
catttctaaatggca

SEQ ID NO: 309068 - DNA, 15 bp, Homo sapiens
acatttctaaatggc

SEQ ID NO: 309069 - DNA, 15 bp, Homo sapiens
cacatttctaaatgg

SEQ ID NO: 309070 - DNA, 15 bp, Homo sapiens
gcacatttctaaatg

SEQ ID NO: 309071 - DNA, 15 bp, Homo sapiens
tgcacatttctaaat

SEQ ID NO: 309072 - DNA, 15 bp, Homo sapiens
atgcacatttctaaa

SEQ ID NO: 309073 - DNA, 15 bp, Homo sapiens
catgcacatttctaa

SEQ ID NO: 309074 - DNA, 15 bp, Homo sapiens
ccatgcacatttcta

SEQ ID NO: 309075 - DNA, 15 bp, Homo sapiens
tccatgcacatttct

SEQ ID NO: 309076 - DNA, 15 bp, Homo sapiens
ttccatgcacatttc

SEQ ID NO: 309077 - DNA, 15 bp, Homo sapiens
cttccatgcacattt

SEQ ID NO: 309078 - DNA, 15 bp, Homo sapiens
ccttccatgcacatt

SEQ ID NO: 309079 - DNA, 15 bp, Homo sapiens
tccttccatgcacat

SEQ ID NO: 309080 - DNA, 15 bp, Homo sapiens
ctccttccatgcaca

SEQ ID NO: 309081 - DNA, 15 bp, Homo sapiens
tctccttccatgcac

SEQ ID NO: 309082 - DNA, 15 bp, Homo sapiens
ttctccttccatgca

SEQ ID NO: 309083 - DNA, 15 bp, Homo sapiens
attctccttccatgc

SEQ ID NO: 309084 - DNA, 15 bp, Homo sapiens
gattctccttccatg

SEQ ID NO: 309085 - DNA, 15 bp, Homo sapiens
agattctccttccat

SEQ ID NO: 309086 - DNA, 15 bp, Homo sapiens
aagattctccttcca

SEQ ID NO: 309087 - DNA, 15 bp, Homo sapiens
gaagattctccttcc

SEQ ID NO: 309088 - DNA, 15 bp, Homo sapiens
ggaagattctccttc

SEQ ID NO: 309089 - DNA, 15 bp, Homo sapiens
aggaagattctcctt

SEQ ID NO: 309090 - DNA, 15 bp, Homo sapiens
caggaagattctcct

SEQ ID NO: 309091 - DNA, 15 bp, Homo sapiens
tcaggaagattctcc

SEQ ID NO: 309092 - DNA, 15 bp, Homo sapiens
atcaggaagattctc

SEQ ID NO: 309093 - DNA, 15 bp, Homo sapiens
aatcaggaagattct

SEQ ID NO: 309094 - DNA, 15 bp, Homo sapiens
gaatcaggaagattc

SEQ ID NO: 309095 - DNA, 15 bp, Homo sapiens
agaatcaggaagatt

SEQ ID NO: 309096 - DNA, 15 bp, Homo sapiens
aagaatcaggaagat

SEQ ID NO: 309097 - DNA, 15 bp, Homo sapiens
taagaatcaggaaga

SEQ ID NO: 309098 - DNA, 15 bp, Homo sapiens
ctaagaatcaggaag

SEQ ID NO: 309099 - DNA, 15 bp, Homo sapiens
gctaagaatcaggaa

SEQ ID NO: 309100 - DNA, 15 bp, Homo sapiens
agctaagaatcagga

SEQ ID NO: 309101 - DNA, 15 bp, Homo sapiens
gagctaagaatcagg

SEQ ID NO: 309102 - DNA, 15 bp, Homo sapiens
agagctaagaatcag

SEQ ID NO: 309103 - DNA, 15 bp, Homo sapiens
tagagctaagaatca

SEQ ID NO: 309104 - DNA, 15 bp, Homo sapiens
ttagagctaagaatc

SEQ ID NO: 309105 - DNA, 15 bp, Homo sapiens
attagagctaagaat

SEQ ID NO: 309106 - DNA, 15 bp, Homo sapiens
aattagagctaagaa

SEQ ID NO: 309107 - DNA, 15 bp, Homo sapiens
aaattagagctaaga

SEQ ID NO: 309108 - DNA, 15 bp, Homo sapiens
taaattagagctaag

SEQ ID NO: 309109 - DNA, 15 bp, Homo sapiens
ataaattagagctaa

SEQ ID NO: 309110 - DNA, 15 bp, Homo sapiens
cataaattagagcta

SEQ ID NO: 309111 - DNA, 15 bp, Homo sapiens
ccataaattagagct

SEQ ID NO: 309112 - DNA, 15 bp, Homo sapiens
gccataaattagagc

SEQ ID NO: 309113 - DNA, 15 bp, Homo sapiens
ggccataaattagag

SEQ ID NO: 309114 - DNA, 15 bp, Homo sapiens
tggccataaattaga

SEQ ID NO: 309115 - DNA, 15 bp, Homo sapiens
ttggccataaattag

SEQ ID NO: 309116 - DNA, 15 bp, Homo sapiens
attggccataaatta

SEQ ID NO: 309117 - DNA, 15 bp, Homo sapiens
aattggccataaatt

SEQ ID NO: 309118 - DNA, 15 bp, Homo sapiens
aaattggccataaat

SEQ ID NO: 309119 - DNA, 15 bp, Homo sapiens
taaattggccataaa

SEQ ID NO: 309120 - DNA, 15 bp, Homo sapiens
ataaattggccataa

SEQ ID NO: 309121 - DNA, 15 bp, Homo sapiens
cataaattggccata

SEQ ID NO: 309122 - DNA, 15 bp, Homo sapiens
tcataaattggccat

SEQ ID NO: 309123 - DNA, 15 bp, Homo sapiens
ttcataaattggcca

SEQ ID NO: 309124 - DNA, 15 bp, Homo sapiens
cttcataaattggcc

SEQ ID NO: 309125 - DNA, 15 bp, Homo sapiens
acttcataaattggc

SEQ ID NO: 309126 - DNA, 15 bp, Homo sapiens
gacttcataaattgg

SEQ ID NO: 309127 - DNA, 15 bp, Homo sapiens
tgacttcataaattg

SEQ ID NO: 309128 - DNA, 15 bp, Homo sapiens
ttgacttcataaatt

SEQ ID NO: 309129 - DNA, 15 bp, Homo sapiens
cttgacttcataaat

SEQ ID NO: 309130 - DNA, 15 bp, Homo sapiens
ccttgacttcataaa

SEQ ID NO: 309131 - DNA, 15 bp, Homo sapiens
accttgacttcataa

SEQ ID NO: 309132 - DNA, 15 bp, Homo sapiens
gaccttgacttcata

SEQ ID NO: 309133 - DNA, 15 bp, Homo sapiens
tgaccttgacttcat

SEQ ID NO: 309134 - DNA, 15 bp, Homo sapiens
atgaccttgacttca

SEQ ID NO: 309135 - DNA, 15 bp, Homo sapiens
gatgaccttgacttc

SEQ ID NO: 309136 - DNA, 15 bp, Homo sapiens
agatgaccttgactt

SEQ ID NO: 309137 - DNA, 15 bp, Homo sapiens
gagatgaccttgact

SEQ ID NO: 309138 - DNA, 15 bp, Homo sapiens
agagatgaccttgac

SEQ ID NO: 309139 - DNA, 15 bp, Homo sapiens
gagagatgaccttga

SEQ ID NO: 309140 - DNA, 15 bp, Homo sapiens
agagagatgaccttg

SEQ ID NO: 309141 - DNA, 15 bp, Homo sapiens
aagagagatgacctt

SEQ ID NO: 309142 - DNA, 15 bp, Homo sapiens
gaagagagatgacct

SEQ ID NO: 309143 - DNA, 15 bp, Homo sapiens
ggaagagagatgacc

SEQ ID NO: 309144 - DNA, 15 bp, Homo sapiens
aggaagagagatgac

SEQ ID NO: 309145 - DNA, 15 bp, Homo sapiens
caggaagagagatga

SEQ ID NO: 309146 - DNA, 15 bp, Homo sapiens
gcaggaagagagatg

SEQ ID NO: 309147 - DNA, 15 bp, Homo sapiens
agcaggaagagagat

SEQ ID NO: 309148 - DNA, 15 bp, Homo sapiens
cagcaggaagagaga

SEQ ID NO: 309149 - DNA, 15 bp, Homo sapiens
ccagcaggaagagag

SEQ ID NO: 309150 - DNA, 15 bp, Homo sapiens
accagcaggaagaga

SEQ ID NO: 309151 - DNA, 15 bp, Homo sapiens
caccagcaggaagag

SEQ ID NO: 309152 - DNA, 15 bp, Homo sapiens
acaccagcaggaaga

SEQ ID NO: 309153 - DNA, 15 bp, Homo sapiens
cacaccagcaggaag

SEQ ID NO: 309154 - DNA, 15 bp, Homo sapiens
acacaccagcaggaa

SEQ ID NO: 309155 - DNA, 15 bp, Homo sapiens
cacacaccagcagga

SEQ ID NO: 309156 - DNA, 15 bp, Homo sapiens
acacacaccagcagg

SEQ ID NO: 309157 - DNA, 15 bp, Homo sapiens
aacacacaccagcag

SEQ ID NO: 309158 - DNA, 15 bp, Homo sapiens
gaacacacaccagca

SEQ ID NO: 309159 - DNA, 15 bp, Homo sapiens
tgaacacacaccagc

SEQ ID NO: 309160 - DNA, 15 bp, Homo sapiens
ttgaacacacaccag

SEQ ID NO: 309161 - DNA, 15 bp, Homo sapiens
gttgaacacacacca

SEQ ID NO: 309162 - DNA, 15 bp, Homo sapiens
ggttgaacacacacc

SEQ ID NO: 309163 - DNA, 15 bp, Homo sapiens
aggttgaacacacac

SEQ ID NO: 309164 - DNA, 15 bp, Homo sapiens
caggttgaacacaca

SEQ ID NO: 309165 - DNA, 15 bp, Homo sapiens
ccaggttgaacacac

SEQ ID NO: 309166 - DNA, 15 bp, Homo sapiens
gccaggttgaacaca

SEQ ID NO: 309167 - DNA, 15 bp, Homo sapiens
ggccaggttgaacac

SEQ ID NO: 309168 - DNA, 15 bp, Homo sapiens
aggccaggttgaaca

SEQ ID NO: 309169 - DNA, 15 bp, Homo sapiens
gaggccaggttgaac

SEQ ID NO: 309170 - DNA, 15 bp, Homo sapiens
ggaggccaggttgaa

SEQ ID NO: 309171 - DNA, 15 bp, Homo sapiens
gggaggccaggttga

SEQ ID NO: 309172 - DNA, 15 bp, Homo sapiens
agggaggccaggttg

SEQ ID NO: 309173 - DNA, 15 bp, Homo sapiens
aagggaggccaggtt

SEQ ID NO: 309174 - DNA, 15 bp, Homo sapiens
aaagggaggccaggt

SEQ ID NO: 309175 - DNA, 15 bp, Homo sapiens
taaagggaggccagg

SEQ ID NO: 309176 - DNA, 15 bp, Homo sapiens
ataaagggaggccag

SEQ ID NO: 309177 - DNA, 15 bp, Homo sapiens
cataaagggaggcca

SEQ ID NO: 309178 - DNA, 15 bp, Homo sapiens
gcataaagggaggcc

SEQ ID NO: 309179 - DNA, 15 bp, Homo sapiens
ggcataaagggaggc

SEQ ID NO: 309180 - DNA, 15 bp, Homo sapiens
tggcataaagggagg

SEQ ID NO: 309181 - DNA, 15 bp, Homo sapiens
ttggcataaagggag

SEQ ID NO: 309182 - DNA, 15 bp, Homo sapiens
tttggcataaaggga

SEQ ID NO: 309183 - DNA, 15 bp, Homo sapiens
ctttggcataaaggg

SEQ ID NO: 309184 - DNA, 15 bp, Homo sapiens
tctttggcataaagg

SEQ ID NO: 309185 - DNA, 15 bp, Homo sapiens
gtctttggcataaag

SEQ ID NO: 309186 - DNA, 15 bp, Homo sapiens
ggtctttggcataaa

SEQ ID NO: 309187 - DNA, 15 bp, Homo sapiens
aggtctttggcataa

SEQ ID NO: 309188 - DNA, 15 bp, Homo sapiens
aaggtctttggcata

SEQ ID NO: 309189 - DNA, 15 bp, Homo sapiens
caaggtctttggcat

SEQ ID NO: 309190 - DNA, 15 bp, Homo sapiens
tcaaggtctttggca

SEQ ID NO: 309191 - DNA, 15 bp, Homo sapiens
ctcaaggtctttggc

SEQ ID NO: 309192 - DNA, 15 bp, Homo sapiens
gctcaaggtctttgg

SEQ ID NO: 309193 - DNA, 15 bp, Homo sapiens
tgctcaaggtctttg

SEQ ID NO: 309194 - DNA, 15 bp, Homo sapiens
ctgctcaaggtcttt

SEQ ID NO: 309195 - DNA, 15 bp, Homo sapiens
tctgctcaaggtctt

SEQ ID NO: 309196 - DNA, 15 bp, Homo sapiens
gtctgctcaaggtct

SEQ ID NO: 309197 - DNA, 15 bp, Homo sapiens
ggtctgctcaaggtc

SEQ ID NO: 309198 - DNA, 15 bp, Homo sapiens
aggtctgctcaaggt

SEQ ID NO: 309199 - DNA, 15 bp, Homo sapiens
aaggtctgctcaagg

SEQ ID NO: 309200 - DNA, 15 bp, Homo sapiens
caaggtctgctcaag

SEQ ID NO: 309201 - DNA, 15 bp, Homo sapiens
ccaaggtctgctcaa

SEQ ID NO: 309202 - DNA, 15 bp, Homo sapiens
gccaaggtctgctca

SEQ ID NO: 309203 - DNA, 15 bp, Homo sapiens
agccaaggtctgctc

SEQ ID NO: 309204 - DNA, 15 bp, Homo sapiens
tagccaaggtctgct

SEQ ID NO: 309205 - DNA, 15 bp, Homo sapiens
ttagccaaggtctgc

SEQ ID NO: 309206 - DNA, 15 bp, Homo sapiens
tttagccaaggtctg

SEQ ID NO: 309207 - DNA, 15 bp, Homo sapiens
ttttagccaaggtct

SEQ ID NO: 309208 - DNA, 15 bp, Homo sapiens
gttttagccaaggtc

SEQ ID NO: 309209 - DNA, 15 bp, Homo sapiens
ggttttagccaaggt

SEQ ID NO: 309210 - DNA, 15 bp, Homo sapiens
gggttttagccaagg

SEQ ID NO: 309211 - DNA, 15 bp, Homo sapiens
ggggttttagccaag

SEQ ID NO: 309212 - DNA, 15 bp, Homo sapiens
gggggttttagccaa

SEQ ID NO: 309213 - DNA, 15 bp, Homo sapiens
tgggggttttagcca

SEQ ID NO: 309214 - DNA, 15 bp, Homo sapiens
ctgggggttttagcc

SEQ ID NO: 309215 - DNA, 15 bp, Homo sapiens
cctgggggttttagc

SEQ ID NO: 309216 - DNA, 15 bp, Homo sapiens
acctgggggttttag

SEQ ID NO: 309217 - DNA, 15 bp, Homo sapiens
tacctgggggtttta

SEQ ID NO: 309218 - DNA, 15 bp, Homo sapiens
atacctgggggtttt

SEQ ID NO: 309219 - DNA, 15 bp, Homo sapiens
tatacctgggggttt

SEQ ID NO: 309220 - DNA, 15 bp, Homo sapiens
gtatacctgggggtt

SEQ ID NO: 309221 - DNA, 15 bp, Homo sapiens
agtatacctgggggt

SEQ ID NO: 309222 - DNA, 15 bp, Homo sapiens
gagtatacctggggg

SEQ ID NO: 309223 - DNA, 15 bp, Homo sapiens
ggagtatacctgggg

SEQ ID NO: 309224 - DNA, 15 bp, Homo sapiens
gggagtatacctggg

SEQ ID NO: 309225 - DNA, 15 bp, Homo sapiens
tgggagtatacctgg

SEQ ID NO: 309226 - DNA, 15 bp, Homo sapiens
atgggagtatacctg

SEQ ID NO: 309227 - DNA, 15 bp, Homo sapiens
aatgggagtatacct

SEQ ID NO: 309228 - DNA, 15 bp, Homo sapiens
gaatgggagtatacc

SEQ ID NO: 309229 - DNA, 15 bp, Homo sapiens
tgaatgggagtatac

SEQ ID NO: 309230 - DNA, 15 bp, Homo sapiens
gtgaatgggagtata

SEQ ID NO: 309231 - DNA, 15 bp, Homo sapiens
agtgaatgggagtat

SEQ ID NO: 309232 - DNA, 15 bp, Homo sapiens
cagtgaatgggagta

SEQ ID NO: 309233 - DNA, 15 bp, Homo sapiens
acagtgaatgggagt

SEQ ID NO: 309234 - DNA, 15 bp, Homo sapiens
gacagtgaatgggag

SEQ ID NO: 309235 - DNA, 15 bp, Homo sapiens
tgacagtgaatggga

SEQ ID NO: 309236 - DNA, 15 bp, Homo sapiens
ctgacagtgaatggg

SEQ ID NO: 309237 - DNA, 15 bp, Homo sapiens
gctgacagtgaatgg

SEQ ID NO: 309238 - DNA, 15 bp, Homo sapiens
tgctgacagtgaatg

SEQ ID NO: 309239 - DNA, 15 bp, Homo sapiens
ctgctgacagtgaat

SEQ ID NO: 309240 - DNA, 15 bp, Homo sapiens
actgctgacagtgaa

SEQ ID NO: 309241 - DNA, 15 bp, Homo sapiens
cactgctgacagtga

SEQ ID NO: 309242 - DNA, 15 bp, Homo sapiens
tcactgctgacagtg

SEQ ID NO: 309243 - DNA, 15 bp, Homo sapiens
atcactgctgacagt

SEQ ID NO: 309244 - DNA, 15 bp, Homo sapiens
gatcactgctgacag

SEQ ID NO: 309245 - DNA, 15 bp, Homo sapiens
ggatcactgctgaca

SEQ ID NO: 309246 - DNA, 15 bp, Homo sapiens
cggatcactgctgac

SEQ ID NO: 309247 - DNA, 15 bp, Homo sapiens
acggatcactgctga

SEQ ID NO: 309248 - DNA, 15 bp, Homo sapiens
cacggatcactgctg

SEQ ID NO: 309249 - DNA, 15 bp, Homo sapiens
ccacggatcactgct

SEQ ID NO: 309250 - DNA, 15 bp, Homo sapiens
tccacggatcactgc

SEQ ID NO: 309251 - DNA, 15 bp, Homo sapiens
ttccacggatcactg

SEQ ID NO: 309252 - DNA, 15 bp, Homo sapiens
attccacggatcact

SEQ ID NO: 309253 - DNA, 15 bp, Homo sapiens
cattccacggatcac

SEQ ID NO: 309254 - DNA, 15 bp, Homo sapiens
ccattccacggatca

SEQ ID NO: 309255 - DNA, 15 bp, Homo sapiens
tccattccacggatc

SEQ ID NO: 309256 - DNA, 15 bp, Homo sapiens
atccattccacggat

SEQ ID NO: 309257 - DNA, 15 bp, Homo sapiens
aatccattccacgga

SEQ ID NO: 309258 - DNA, 15 bp, Homo sapiens
caatccattccacgg

SEQ ID NO: 309259 - DNA, 15 bp, Homo sapiens
ccaatccattccacg

SEQ ID NO: 309260 - DNA, 15 bp, Homo sapiens
cccaatccattccac

SEQ ID NO: 309261 - DNA, 15 bp, Homo sapiens
ccccaatccattcca

SEQ ID NO: 309262 - DNA, 15 bp, Homo sapiens
gccccaatccattcc

SEQ ID NO: 309263 - DNA, 15 bp, Homo sapiens
agccccaatccattc

SEQ ID NO: 309264 - DNA, 15 bp, Homo sapiens
cagccccaatccatt

SEQ ID NO: 309265 - DNA, 15 bp, Homo sapiens
ccagccccaatccat

SEQ ID NO: 309266 - DNA, 15 bp, Homo sapiens
gccagccccaatcca

SEQ ID NO: 309267 - DNA, 15 bp, Homo sapiens
ggccagccccaatcc

SEQ ID NO: 309268 - DNA, 15 bp, Homo sapiens
cggccagccccaatc

SEQ ID NO: 309269 - DNA, 15 bp, Homo sapiens
gcggccagccccaat

SEQ ID NO: 309270 - DNA, 15 bp, Homo sapiens
ggcggccagccccaa

SEQ ID NO: 309271 - DNA, 15 bp, Homo sapiens
aggcggccagcccca

SEQ ID NO: 309272 - DNA, 15 bp, Homo sapiens
aaggcggccagcccc

SEQ ID NO: 309273 - DNA, 15 bp, Homo sapiens
caaggcggccagccc

SEQ ID NO: 309274 - DNA, 15 bp, Homo sapiens
gcaaggcggccagcc

SEQ ID NO: 309275 - DNA, 15 bp, Homo sapiens
ggcaaggcggccagc

SEQ ID NO: 309276 - DNA, 15 bp, Homo sapiens
aggcaaggcggccag

SEQ ID NO: 309277 - DNA, 15 bp, Homo sapiens
aaggcaaggcggcca

SEQ ID NO: 309278 - DNA, 15 bp, Homo sapiens
caaggcaaggcggcc

SEQ ID NO: 309279 - DNA, 15 bp, Homo sapiens
ccaaggcaaggcggc

SEQ ID NO: 309280 - DNA, 15 bp, Homo sapiens
cccaaggcaaggcgg

SEQ ID NO: 309281 - DNA, 15 bp, Homo sapiens
gcccaaggcaaggcg

SEQ ID NO: 309282 - DNA, 15 bp, Homo sapiens
tgcccaaggcaaggc

SEQ ID NO: 309283 - DNA, 15 bp, Homo sapiens
ctgcccaaggcaagg

SEQ ID NO: 309284 - DNA, 15 bp, Homo sapiens
tctgcccaaggcaag

SEQ ID NO: 309285 - DNA, 15 bp, Homo sapiens
ctctgcccaaggcaa

SEQ ID NO: 309286 - DNA, 15 bp, Homo sapiens
actctgcccaaggca

SEQ ID NO: 309287 - DNA, 15 bp, Homo sapiens
aactctgcccaaggc

SEQ ID NO: 309288 - DNA, 15 bp, Homo sapiens
gaactctgcccaagg

SEQ ID NO: 309289 - DNA, 15 bp, Homo sapiens
tgaactctgcccaag

SEQ ID NO: 309290 - DNA, 15 bp, Homo sapiens
atgaactctgcccaa

SEQ ID NO: 309291 - DNA, 15 bp, Homo sapiens
catgaactctgccca

SEQ ID NO: 309292 - DNA, 15 bp, Homo sapiens
acatgaactctgccc

SEQ ID NO: 309293 - DNA, 15 bp, Homo sapiens
cacatgaactctgcc

SEQ ID NO: 309294 - DNA, 15 bp, Homo sapiens
acacatgaactctgc

SEQ ID NO: 309295 - DNA, 15 bp, Homo sapiens
gacacatgaactctg

SEQ ID NO: 309296 - DNA, 15 bp, Homo sapiens
tgacacatgaactct

SEQ ID NO: 309297 - DNA, 15 bp, Homo sapiens
gtgacacatgaactc

SEQ ID NO: 309298 - DNA, 15 bp, Homo sapiens
agtgacacatgaact

SEQ ID NO: 309299 - DNA, 15 bp, Homo sapiens
gagtgacacatgaac

SEQ ID NO: 309300 - DNA, 15 bp, Homo sapiens
tgagtgacacatgaa

SEQ ID NO: 309301 - DNA, 15 bp, Homo sapiens
ctgagtgacacatga

SEQ ID NO: 309302 - DNA, 15 bp, Homo sapiens
cctgagtgacacatg

SEQ ID NO: 309303 - DNA, 15 bp, Homo sapiens
tcctgagtgacacat

SEQ ID NO: 309304 - DNA, 15 bp, Homo sapiens
ttcctgagtgacaca

SEQ ID NO: 309305 - DNA, 15 bp, Homo sapiens
cttcctgagtgacac

SEQ ID NO: 309306 - DNA, 15 bp, Homo sapiens
tcttcctgagtgaca

SEQ ID NO: 309307 - DNA, 15 bp, Homo sapiens
atcttcctgagtgac

SEQ ID NO: 309308 - DNA, 15 bp, Homo sapiens
catcttcctgagtga

SEQ ID NO: 309309 - DNA, 15 bp, Homo sapiens
gcatcttcctgagtg

SEQ ID NO: 309310 - DNA, 15 bp, Homo sapiens
tgcatcttcctgagt

SEQ ID NO: 309311 - DNA, 15 bp, Homo sapiens
atgcatcttcctgag

SEQ ID NO: 309312 - DNA, 15 bp, Homo sapiens
gatgcatcttcctga

SEQ ID NO: 309313 - DNA, 15 bp, Homo sapiens
tgatgcatcttcctg

SEQ ID NO: 309314 - DNA, 15 bp, Homo sapiens
ctgatgcatcttcct

SEQ ID NO: 309315 - DNA, 15 bp, Homo sapiens
cctgatgcatcttcc

SEQ ID NO: 309316 - DNA, 15 bp, Homo sapiens
gcctgatgcatcttc

SEQ ID NO: 309317 - DNA, 15 bp, Homo sapiens
agcctgatgcatctt

SEQ ID NO: 309318 - DNA, 15 bp, Homo sapiens
cagcctgatgcatct

SEQ ID NO: 309319 - DNA, 15 bp, Homo sapiens
gcagcctgatgcatc

SEQ ID NO: 309320 - DNA, 15 bp, Homo sapiens
agcagcctgatgcat

SEQ ID NO: 309321 - DNA, 15 bp, Homo sapiens
cagcagcctgatgca

SEQ ID NO: 309322 - DNA, 15 bp, Homo sapiens
tcagcagcctgatgc

SEQ ID NO: 309323 - DNA, 15 bp, Homo sapiens
ctcagcagcctgatg

SEQ ID NO: 309324 - DNA, 15 bp, Homo sapiens
actcagcagcctgat

SEQ ID NO: 309325 - DNA, 15 bp, Homo sapiens
gactcagcagcctga

SEQ ID NO: 309326 - DNA, 15 bp, Homo sapiens
tgactcagcagcctg

SEQ ID NO: 309327 - DNA, 15 bp, Homo sapiens
ctgactcagcagcct

SEQ ID NO: 309328 - DNA, 15 bp, Homo sapiens
tctgactcagcagcc

SEQ ID NO: 309329 - DNA, 15 bp, Homo sapiens
ctctgactcagcagc

SEQ ID NO: 309330 - DNA, 15 bp, Homo sapiens
cctctgactcagcag

SEQ ID NO: 309331 - DNA, 15 bp, Homo sapiens
ccctctgactcagca

SEQ ID NO: 309332 - DNA, 15 bp, Homo sapiens
tccctctgactcagc

SEQ ID NO: 309333 - DNA, 15 bp, Homo sapiens
ctccctctgactcag

SEQ ID NO: 309334 - DNA, 15 bp, Homo sapiens
actccctctgactca

SEQ ID NO: 309335 - DNA, 15 bp, Homo sapiens
gactccctctgactc

SEQ ID NO: 309336 - DNA, 15 bp, Homo sapiens
agactccctctgact

SEQ ID NO: 309337 - DNA, 15 bp, Homo sapiens
cagactccctctgac

SEQ ID NO: 309338 - DNA, 15 bp, Homo sapiens
gcagactccctctga

SEQ ID NO: 309339 - DNA, 15 bp, Homo sapiens
ggcagactccctctg

SEQ ID NO: 309340 - DNA, 15 bp, Homo sapiens
aggcagactccctct

SEQ ID NO: 309341 - DNA, 15 bp, Homo sapiens
aaggcagactccctc

SEQ ID NO: 309342 - DNA, 15 bp, Homo sapiens
taaggcagactccct

SEQ ID NO: 309343 - DNA, 15 bp, Homo sapiens
ataaggcagactccc

SEQ ID NO: 309344 - DNA, 15 bp, Homo sapiens
cataaggcagactcc

SEQ ID NO: 309345 - DNA, 15 bp, Homo sapiens
acataaggcagactc

SEQ ID NO: 309346 - DNA, 15 bp, Homo sapiens
gacataaggcagact

SEQ ID NO: 309347 - DNA, 15 bp, Homo sapiens
ggacataaggcagac

SEQ ID NO: 309348 - DNA, 15 bp, Homo sapiens
tggacataaggcaga

SEQ ID NO: 309349 - DNA, 15 bp, Homo sapiens
gtggacataaggcag

SEQ ID NO: 309350 - DNA, 15 bp, Homo sapiens
tgtggacataaggca

SEQ ID NO: 309351 - DNA, 15 bp, Homo sapiens
ctgtggacataaggc

SEQ ID NO: 309352 - DNA, 15 bp, Homo sapiens
tctgtggacataagg

SEQ ID NO: 309353 - DNA, 15 bp, Homo sapiens
ctctgtggacataag

SEQ ID NO: 309354 - DNA, 15 bp, Homo sapiens
tctctgtggacataa

SEQ ID NO: 309355 - DNA, 15 bp, Homo sapiens
ctctctgtggacata

SEQ ID NO: 309356 - DNA, 15 bp, Homo sapiens
cctctctgtggacat

SEQ ID NO: 309357 - DNA, 15 bp, Homo sapiens
tcctctctgtggaca

SEQ ID NO: 309358 - DNA, 15 bp, Homo sapiens
ctcctctctgtggac

SEQ ID NO: 309359 - DNA, 15 bp, Homo sapiens
actcctctctgtgga

SEQ ID NO: 309360 - DNA, 15 bp, Homo sapiens
cactcctctctgtgg

SEQ ID NO: 309361 - DNA, 15 bp, Homo sapiens
tcactcctctctgtg

SEQ ID NO: 309362 - DNA, 15 bp, Homo sapiens
ttcactcctctctgt

SEQ ID NO: 309363 - DNA, 15 bp, Homo sapiens
attcactcctctctg

SEQ ID NO: 309364 - DNA, 15 bp, Homo sapiens
gattcactcctctct

SEQ ID NO: 309365 - DNA, 15 bp, Homo sapiens
tgattcactcctctc

SEQ ID NO: 309366 - DNA, 15 bp, Homo sapiens
ctgattcactcctct

SEQ ID NO: 309367 - DNA, 15 bp, Homo sapiens
tctgattcactcctc

SEQ ID NO: 309368 - DNA, 15 bp, Homo sapiens
ttctgattcactcct

SEQ ID NO: 309369 - DNA, 15 bp, Homo sapiens
tttctgattcactcc

SEQ ID NO: 309370 - DNA, 15 bp, Homo sapiens
ctttctgattcactc

SEQ ID NO: 309371 - DNA, 15 bp, Homo sapiens
gctttctgattcact

SEQ ID NO: 309372 - DNA, 15 bp, Homo sapiens
ggctttctgattcac

SEQ ID NO: 309373 - DNA, 15 bp, Homo sapiens
tggctttctgattca

SEQ ID NO: 309374 - DNA, 15 bp, Homo sapiens
ctggctttctgattc

SEQ ID NO: 309375 - DNA, 15 bp, Homo sapiens
tctggctttctgatt

SEQ ID NO: 309376 - DNA, 15 bp, Homo sapiens
atctggctttctgat

SEQ ID NO: 309377 - DNA, 15 bp, Homo sapiens
catctggctttctga

SEQ ID NO: 309378 - DNA, 15 bp, Homo sapiens
tcatctggctttctg

SEQ ID NO: 309379 - DNA, 15 bp, Homo sapiens
ctcatctggctttct

SEQ ID NO: 309380 - DNA, 15 bp, Homo sapiens
actcatctggctttc

SEQ ID NO: 309381 - DNA, 15 bp, Homo sapiens
gactcatctggcttt

SEQ ID NO: 309382 - DNA, 15 bp, Homo sapiens
ggactcatctggctt

SEQ ID NO: 309383 - DNA, 15 bp, Homo sapiens
tggactcatctggct

SEQ ID NO: 309384 - DNA, 15 bp, Homo sapiens
ctggactcatctggc

SEQ ID NO: 309385 - DNA, 15 bp, Homo sapiens
gctggactcatctgg

SEQ ID NO: 309386 - DNA, 15 bp, Homo sapiens
agctggactcatctg

SEQ ID NO: 309387 - DNA, 15 bp, Homo sapiens
gagctggactcatct

SEQ ID NO: 309388 - DNA, 15 bp, Homo sapiens
agagctggactcatc

SEQ ID NO: 309389 - DNA, 15 bp, Homo sapiens
gagagctggactcat

SEQ ID NO: 309390 - DNA, 15 bp, Homo sapiens
tgagagctggactca

SEQ ID NO: 309391 - DNA, 15 bp, Homo sapiens
ctgagagctggactc

SEQ ID NO: 309392 - DNA, 15 bp, Homo sapiens
cctgagagctggact

SEQ ID NO: 309393 - DNA, 15 bp, Homo sapiens
tcctgagagctggac

SEQ ID NO: 309394 - DNA, 15 bp, Homo sapiens
gtcctgagagctgga

SEQ ID NO: 309395 - DNA, 15 bp, Homo sapiens
tgtcctgagagctgg

SEQ ID NO: 309396 - DNA, 15 bp, Homo sapiens
atgtcctgagagctg

SEQ ID NO: 309397 - DNA, 15 bp, Homo sapiens
catgtcctgagagct

SEQ ID NO: 309398 - DNA, 15 bp, Homo sapiens
tcatgtcctgagagc

SEQ ID NO: 309399 - DNA, 15 bp, Homo sapiens
gtcatgtcctgagag

SEQ ID NO: 309400 - DNA, 15 bp, Homo sapiens
tgtcatgtcctgaga

SEQ ID NO: 309401 - DNA, 15 bp, Homo sapiens
ttgtcatgtcctgag

SEQ ID NO: 309402 - DNA, 15 bp, Homo sapiens
tttgtcatgtcctga

SEQ ID NO: 309403 - DNA, 15 bp, Homo sapiens
atttgtcatgtcctg

SEQ ID NO: 309404 - DNA, 15 bp, Homo sapiens
aatttgtcatgtcct

SEQ ID NO: 309405 - DNA, 15 bp, Homo sapiens
caatttgtcatgtcc

SEQ ID NO: 309406 - DNA, 15 bp, Homo sapiens
gcaatttgtcatgtc

SEQ ID NO: 309407 - DNA, 15 bp, Homo sapiens
tgcaatttgtcatgt

SEQ ID NO: 309408 - DNA, 15 bp, Homo sapiens
ctgcaatttgtcatg

SEQ ID NO: 309409 - DNA, 15 bp, Homo sapiens
tctgcaatttgtcat

SEQ ID NO: 309410 - DNA, 15 bp, Homo sapiens
ttctgcaatttgtca

SEQ ID NO: 309411 - DNA, 15 bp, Homo sapiens
attctgcaatttgtc

SEQ ID NO: 309412 - DNA, 15 bp, Homo sapiens
cattctgcaatttgt

SEQ ID NO: 309413 - DNA, 15 bp, Homo sapiens
gcattctgcaatttg

SEQ ID NO: 309414 - DNA, 15 bp, Homo sapiens
ggcattctgcaattt

SEQ ID NO: 309415 - DNA, 15 bp, Homo sapiens
cggcattctgcaatt

SEQ ID NO: 309416 - DNA, 15 bp, Homo sapiens
tcggcattctgcaat

SEQ ID NO: 309417 - DNA, 15 bp, Homo sapiens
ctcggcattctgcaa

SEQ ID NO: 309418 - DNA, 15 bp, Homo sapiens
gctcggcattctgca

SEQ ID NO: 309419 - DNA, 15 bp, Homo sapiens
agctcggcattctgc

SEQ ID NO: 309420 - DNA, 15 bp, Homo sapiens
cagctcggcattctg

SEQ ID NO: 309421 - DNA, 15 bp, Homo sapiens
ccagctcggcattct

SEQ ID NO: 309422 - DNA, 15 bp, Homo sapiens
cccagctcggcattc

SEQ ID NO: 309423 - DNA, 15 bp, Homo sapiens
tcccagctcggcatt

SEQ ID NO: 309424 - DNA, 15 bp, Homo sapiens
ctcccagctcggcat

SEQ ID NO: 309425 - DNA, 15 bp, Homo sapiens
cctcccagctcggca

SEQ ID NO: 309426 - DNA, 15 bp, Homo sapiens
gcctcccagctcggc

SEQ ID NO: 309427 - DNA, 15 bp, Homo sapiens
agcctcccagctcgg

SEQ ID NO: 309428 - DNA, 15 bp, Homo sapiens
aagcctcccagctcg

SEQ ID NO: 309429 - DNA, 15 bp, Homo sapiens
caagcctcccagctc

SEQ ID NO: 309430 - DNA, 15 bp, Homo sapiens
tcaagcctcccagct

SEQ ID NO: 309431 - DNA, 15 bp, Homo sapiens
ctcaagcctcccagc

SEQ ID NO: 309432 - DNA, 15 bp, Homo sapiens
actcaagcctcccag

SEQ ID NO: 309433 - DNA, 15 bp, Homo sapiens
tactcaagcctccca

SEQ ID NO: 309434 - DNA, 15 bp, Homo sapiens
gtactcaagcctccc

SEQ ID NO: 309435 - DNA, 15 bp, Homo sapiens
tgtactcaagcctcc

SEQ ID NO: 309436 - DNA, 15 bp, Homo sapiens
atgtactcaagcctc

SEQ ID NO: 309437 - DNA, 15 bp, Homo sapiens
gatgtactcaagcct

SEQ ID NO: 309438 - DNA, 15 bp, Homo sapiens
tgatgtactcaagcc

SEQ ID NO: 309439 - DNA, 15 bp, Homo sapiens
atgatgtactcaagc

SEQ ID NO: 309440 - DNA, 15 bp, Homo sapiens
tatgatgtactcaag

SEQ ID NO: 309441 - DNA, 15 bp, Homo sapiens
atatgatgtactcaa

SEQ ID NO: 309442 - DNA, 15 bp, Homo sapiens
gatatgatgtactca

SEQ ID NO: 309443 - DNA, 15 bp, Homo sapiens
ggatatgatgtactc

SEQ ID NO: 309444 - DNA, 15 bp, Homo sapiens
aggatatgatgtact

SEQ ID NO: 309445 - DNA, 15 bp, Homo sapiens
aaggatatgatgtac

SEQ ID NO: 309446 - DNA, 15 bp, Homo sapiens
gaaggatatgatgta

SEQ ID NO: 309447 - DNA, 15 bp, Homo sapiens
agaaggatatgatgt

SEQ ID NO: 309448 - DNA, 15 bp, Homo sapiens
aagaaggatatgatg

SEQ ID NO: 309449 - DNA, 15 bp, Homo sapiens
taagaaggatatgat

SEQ ID NO: 309450 - DNA, 15 bp, Homo sapiens
ataagaaggatatga

SEQ ID NO: 309451 - DNA, 15 bp, Homo sapiens
aataagaaggatatg

SEQ ID NO: 309452 - DNA, 15 bp, Homo sapiens
gaataagaaggatat

SEQ ID NO: 309453 - DNA, 15 bp, Homo sapiens
agaataagaaggata

SEQ ID NO: 309454 - DNA, 15 bp, Homo sapiens
tagaataagaaggat

SEQ ID NO: 309455 - DNA, 15 bp, Homo sapiens
gtagaataagaagga

SEQ ID NO: 309456 - DNA, 15 bp, Homo sapiens
agtagaataagaagg

SEQ ID NO: 309457 - DNA, 15 bp, Homo sapiens
cagtagaataagaag

SEQ ID NO: 309458 - DNA, 15 bp, Homo sapiens
tcagtagaataagaa

SEQ ID NO: 309459 - DNA, 15 bp, Homo sapiens
atcagtagaataaga

SEQ ID NO: 309460 - DNA, 15 bp, Homo sapiens
catcagtagaataag

SEQ ID NO: 309461 - DNA, 15 bp, Homo sapiens
tcatcagtagaataa

SEQ ID NO: 309462 - DNA, 15 bp, Homo sapiens
ctcatcagtagaata

SEQ ID NO: 309463 - DNA, 15 bp, Homo sapiens
tctcatcagtagaat

SEQ ID NO: 309464 - DNA, 15 bp, Homo sapiens
ttctcatcagtagaa

SEQ ID NO: 309465 - DNA, 15 bp, Homo sapiens
tttctcatcagtaga

SEQ ID NO: 309466 - DNA, 15 bp, Homo sapiens
ttttctcatcagtag

SEQ ID NO: 309467 - DNA, 15 bp, Homo sapiens
gttttctcatcagta

SEQ ID NO: 309468 - DNA, 15 bp, Homo sapiens
agttttctcatcagt

SEQ ID NO: 309469 - DNA, 15 bp, Homo sapiens
cagttttctcatcag

SEQ ID NO: 309470 - DNA, 15 bp, Homo sapiens
ccagttttctcatca

SEQ ID NO: 309471 - DNA, 15 bp, Homo sapiens
cccagttttctcatc

SEQ ID NO: 309472 - DNA, 15 bp, Homo sapiens
ccccagttttctcat

SEQ ID NO: 309473 - DNA, 15 bp, Homo sapiens
gccccagttttctca

SEQ ID NO: 309474 - DNA, 15 bp, Homo sapiens
ggccccagttttctc

SEQ ID NO: 309475 - DNA, 15 bp, Homo sapiens
aggccccagttttct

SEQ ID NO: 309476 - DNA, 15 bp, Homo sapiens
caggccccagttttc

SEQ ID NO: 309477 - DNA, 15 bp, Homo sapiens
ccaggccccagtttt

SEQ ID NO: 309478 - DNA, 15 bp, Homo sapiens
cccaggccccagttt

SEQ ID NO: 309479 - DNA, 15 bp, Homo sapiens
ccccaggccccagtt

SEQ ID NO: 309480 - DNA, 15 bp, Homo sapiens
tccccaggccccagt

SEQ ID NO: 309481 - DNA, 15 bp, Homo sapiens
atccccaggccccag

SEQ ID NO: 309482 - DNA, 15 bp, Homo sapiens
catccccaggcccca

SEQ ID NO: 309483 - DNA, 15 bp, Homo sapiens
gcatccccaggcccc

SEQ ID NO: 309484 - DNA, 15 bp, Homo sapiens
ggcatccccaggccc

SEQ ID NO: 309485 - DNA, 15 bp, Homo sapiens
gggcatccccaggcc

SEQ ID NO: 309486 - DNA, 15 bp, Homo sapiens
tgggcatccccaggc

SEQ ID NO: 309487 - DNA, 15 bp, Homo sapiens
ctgggcatccccagg

SEQ ID NO: 309488 - DNA, 15 bp, Homo sapiens
cctgggcatccccag

SEQ ID NO: 309489 - DNA, 15 bp, Homo sapiens
tcctgggcatcccca

SEQ ID NO: 309490 - DNA, 15 bp, Homo sapiens
ttcctgggcatcccc

SEQ ID NO: 309491 - DNA, 15 bp, Homo sapiens
attcctgggcatccc

SEQ ID NO: 309492 - DNA, 15 bp, Homo sapiens
aattcctgggcatcc

SEQ ID NO: 309493 - DNA, 15 bp, Homo sapiens
aaattcctgggcatc

SEQ ID NO: 309494 - DNA, 15 bp, Homo sapiens
caaattcctgggcat

SEQ ID NO: 309495 - DNA, 15 bp, Homo sapiens
gcaaattcctgggca

SEQ ID NO: 309496 - DNA, 15 bp, Homo sapiens
agcaaattcctgggc

SEQ ID NO: 309497 - DNA, 15 bp, Homo sapiens
aagcaaattcctggg

SEQ ID NO: 309498 - DNA, 15 bp, Homo sapiens
taagcaaattcctgg

SEQ ID NO: 309499 - DNA, 15 bp, Homo sapiens
gtaagcaaattcctg

SEQ ID NO: 309500 - DNA, 15 bp, Homo sapiens
tgtaagcaaattcct

SEQ ID NO: 309501 - DNA, 15 bp, Homo sapiens
atgtaagcaaattcc

SEQ ID NO: 309502 - DNA, 15 bp, Homo sapiens
aatgtaagcaaattc

SEQ ID NO: 309503 - DNA, 15 bp, Homo sapiens
aaatgtaagcaaatt

SEQ ID NO: 309504 - DNA, 15 bp, Homo sapiens
gaaatgtaagcaaat

SEQ ID NO: 309505 - DNA, 15 bp, Homo sapiens
agaaatgtaagcaaa

SEQ ID NO: 309506 - DNA, 15 bp, Homo sapiens
aagaaatgtaagcaa

SEQ ID NO: 309507 - DNA, 15 bp, Homo sapiens
gaagaaatgtaagca

SEQ ID NO: 309508 - DNA, 15 bp, Homo sapiens
agaagaaatgtaagc

SEQ ID NO: 309509 - DNA, 15 bp, Homo sapiens
gagaagaaatgtaag

SEQ ID NO: 309510 - DNA, 15 bp, Homo sapiens
ggagaagaaatgtaa

SEQ ID NO: 309511 - DNA, 15 bp, Homo sapiens
aggagaagaaatgta

SEQ ID NO: 309512 - DNA, 15 bp, Homo sapiens
taggagaagaaatgt

SEQ ID NO: 309513 - DNA, 15 bp, Homo sapiens
ttaggagaagaaatg

SEQ ID NO: 309514 - DNA, 15 bp, Homo sapiens
attaggagaagaaat

SEQ ID NO: 309515 - DNA, 15 bp, Homo sapiens
cattaggagaagaaa

SEQ ID NO: 309516 - DNA, 15 bp, Homo sapiens
tcattaggagaagaa

SEQ ID NO: 309517 - DNA, 15 bp, Homo sapiens
ttcattaggagaaga

SEQ ID NO: 309518 - DNA, 15 bp, Homo sapiens
attcattaggagaag

SEQ ID NO: 309519 - DNA, 15 bp, Homo sapiens
aattcattaggagaa

SEQ ID NO: 309520 - DNA, 15 bp, Homo sapiens
taattcattaggaga

SEQ ID NO: 309521 - DNA, 15 bp, Homo sapiens
ttaattcattaggag

SEQ ID NO: 309522 - DNA, 15 bp, Homo sapiens
attaattcattagga

SEQ ID NO: 309523 - DNA, 15 bp, Homo sapiens
aattaattcattagg

SEQ ID NO: 309524 - DNA, 15 bp, Homo sapiens
gaattaattcattag

SEQ ID NO: 309525 - DNA, 15 bp, Homo sapiens
agaattaattcatta

SEQ ID NO: 309526 - DNA, 15 bp, Homo sapiens
aagaattaattcatt

SEQ ID NO: 309527 - DNA, 15 bp, Homo sapiens
aaagaattaattcat

SEQ ID NO: 309528 - DNA, 15 bp, Homo sapiens
gaaagaattaattca

SEQ ID NO: 309529 - DNA, 15 bp, Homo sapiens
tgaaagaattaattc

SEQ ID NO: 309530 - DNA, 15 bp, Homo sapiens
atgaaagaattaatt

SEQ ID NO: 309531 - DNA, 15 bp, Homo sapiens
aatgaaagaattaat

SEQ ID NO: 309532 - DNA, 15 bp, Homo sapiens
aaatgaaagaattaa

SEQ ID NO: 309533 - DNA, 15 bp, Homo sapiens
caaatgaaagaatta

SEQ ID NO: 309534 - DNA, 15 bp, Homo sapiens
acaaatgaaagaatt

SEQ ID NO: 309535 - DNA, 15 bp, Homo sapiens
aacaaatgaaagaat

SEQ ID NO: 309536 - DNA, 15 bp, Homo sapiens
gaacaaatgaaagaa

SEQ ID NO: 309537 - DNA, 15 bp, Homo sapiens
tgaacaaatgaaaga

SEQ ID NO: 309538 - DNA, 15 bp, Homo sapiens
ttgaacaaatgaaag

SEQ ID NO: 309539 - DNA, 15 bp, Homo sapiens
gttgaacaaatgaaa

SEQ ID NO: 309540 - DNA, 15 bp, Homo sapiens
tgttgaacaaatgaa

SEQ ID NO: 309541 - DNA, 15 bp, Homo sapiens
ctgttgaacaaatga

SEQ ID NO: 309542 - DNA, 15 bp, Homo sapiens
actgttgaacaaatg

SEQ ID NO: 309543 - DNA, 15 bp, Homo sapiens
cactgttgaacaaat

SEQ ID NO: 309544 - DNA, 15 bp, Homo sapiens
tcactgttgaacaaa

SEQ ID NO: 309545 - DNA, 15 bp, Homo sapiens
atcactgttgaacaa

SEQ ID NO: 309546 - DNA, 15 bp, Homo sapiens
catcactgttgaaca

SEQ ID NO: 309547 - DNA, 15 bp, Homo sapiens
gcatcactgttgaac

SEQ ID NO: 309548 - DNA, 15 bp, Homo sapiens
ggcatcactgttgaa

SEQ ID NO: 309549 - DNA, 15 bp, Homo sapiens
gggcatcactgttga

SEQ ID NO: 309550 - DNA, 15 bp, Homo sapiens
agggcatcactgttg

SEQ ID NO: 309551 - DNA, 15 bp, Homo sapiens
cagggcatcactgtt

SEQ ID NO: 309552 - DNA, 15 bp, Homo sapiens
tcagggcatcactgt

SEQ ID NO: 309553 - DNA, 15 bp, Homo sapiens
ctcagggcatcactg

SEQ ID NO: 309554 - DNA, 15 bp, Homo sapiens
actcagggcatcact

SEQ ID NO: 309555 - DNA, 15 bp, Homo sapiens
cactcagggcatcac

SEQ ID NO: 309556 - DNA, 15 bp, Homo sapiens
acactcagggcatca

SEQ ID NO: 309557 - DNA, 15 bp, Homo sapiens
gacactcagggcatc

SEQ ID NO: 309558 - DNA, 15 bp, Homo sapiens
agacactcagggcat

SEQ ID NO: 309559 - DNA, 15 bp, Homo sapiens
gagacactcagggca

SEQ ID NO: 309560 - DNA, 15 bp, Homo sapiens
ggagacactcagggc

SEQ ID NO: 309561 - DNA, 15 bp, Homo sapiens
gggagacactcaggg

SEQ ID NO: 309562 - DNA, 15 bp, Homo sapiens
cgggagacactcagg

SEQ ID NO: 309563 - DNA, 15 bp, Homo sapiens
acgggagacactcag

SEQ ID NO: 309564 - DNA, 15 bp, Homo sapiens
cacgggagacactca

SEQ ID NO: 309565 - DNA, 15 bp, Homo sapiens
acacgggagacactc

SEQ ID NO: 309566 - DNA, 15 bp, Homo sapiens
cacacgggagacact

SEQ ID NO: 309567 - DNA, 15 bp, Homo sapiens
acacacgggagacac

SEQ ID NO: 309568 - DNA, 15 bp, Homo sapiens
gacacacgggagaca

SEQ ID NO: 309569 - DNA, 15 bp, Homo sapiens
tgacacacgggagac

SEQ ID NO: 309570 - DNA, 15 bp, Homo sapiens
ctgacacacgggaga

SEQ ID NO: 309571 - DNA, 15 bp, Homo sapiens
cctgacacacgggag

SEQ ID NO: 309572 - DNA, 15 bp, Homo sapiens
gcctgacacacggga

SEQ ID NO: 309573 - DNA, 15 bp, Homo sapiens
agcctgacacacggg

SEQ ID NO: 309574 - DNA, 15 bp, Homo sapiens
aagcctgacacacgg

SEQ ID NO: 309575 - DNA, 15 bp, Homo sapiens
aaagcctgacacacg

SEQ ID NO: 309576 - DNA, 15 bp, Homo sapiens
caaagcctgacacac

SEQ ID NO: 309577 - DNA, 15 bp, Homo sapiens
acaaagcctgacaca

SEQ ID NO: 309578 - DNA, 15 bp, Homo sapiens
aacaaagcctgacac

SEQ ID NO: 309579 - DNA, 15 bp, Homo sapiens
gaacaaagcctgaca

SEQ ID NO: 309580 - DNA, 15 bp, Homo sapiens
agaacaaagcctgac

SEQ ID NO: 309581 - DNA, 15 bp, Homo sapiens
tagaacaaagcctga

SEQ ID NO: 309582 - DNA, 15 bp, Homo sapiens
ctagaacaaagcctg

SEQ ID NO: 309583 - DNA, 15 bp, Homo sapiens
cctagaacaaagcct

SEQ ID NO: 309584 - DNA, 15 bp, Homo sapiens
acctagaacaaagcc

SEQ ID NO: 309585 - DNA, 15 bp, Homo sapiens
cacctagaacaaagc

SEQ ID NO: 309586 - DNA, 15 bp, Homo sapiens
gcacctagaacaaag

SEQ ID NO: 309587 - DNA, 15 bp, Homo sapiens
agcacctagaacaaa

SEQ ID NO: 309588 - DNA, 15 bp, Homo sapiens
cagcacctagaacaa

SEQ ID NO: 309589 - DNA, 15 bp, Homo sapiens
accccagcacctaga

SEQ ID NO: 309590 - DNA, 15 bp, Homo sapiens
aaccccagcacctag

SEQ ID NO: 309591 - DNA, 15 bp, Homo sapiens
taaccccagcaccta

SEQ ID NO: 309592 - DNA, 15 bp, Homo sapiens
ctaaccccagcacct

SEQ ID NO: 309593 - DNA, 15 bp, Homo sapiens
tctaaccccagcacc

SEQ ID NO: 309594 - DNA, 15 bp, Homo sapiens
ttctaaccccagcac

SEQ ID NO: 309595 - DNA, 15 bp, Homo sapiens
tttctaaccccagca

SEQ ID NO: 309596 - DNA, 15 bp, Homo sapiens
ctttctaaccccagc

SEQ ID NO: 309597 - DNA, 15 bp, Homo sapiens
tctttctaaccccag

SEQ ID NO: 309598 - DNA, 15 bp, Homo sapiens
ctctttctaacccca

SEQ ID NO: 309599 - DNA, 15 bp, Homo sapiens
cctctttctaacccc

SEQ ID NO: 309600 - DNA, 15 bp, Homo sapiens
tcctctttctaaccc

SEQ ID NO: 309601 - DNA, 15 bp, Homo sapiens
ttcctctttctaacc

SEQ ID NO: 309602 - DNA, 15 bp, Homo sapiens
cttcctctttctaac

SEQ ID NO: 309603 - DNA, 15 bp, Homo sapiens
tcttcctctttctaa

SEQ ID NO: 309604 - DNA, 15 bp, Homo sapiens
ctcttcctctttcta

SEQ ID NO: 309605 - DNA, 15 bp, Homo sapiens
actcttcctctttct

SEQ ID NO: 309606 - DNA, 15 bp, Homo sapiens
cactcttcctctttc

SEQ ID NO: 309607 - DNA, 15 bp, Homo sapiens
acactcttcctcttt

SEQ ID NO: 309608 - DNA, 15 bp, Homo sapiens
gacactcttcctctt

SEQ ID NO: 309609 - DNA, 15 bp, Homo sapiens
tgacactcttcctct

SEQ ID NO: 309610 - DNA, 15 bp, Homo sapiens
gtgacactcttcctc

SEQ ID NO: 309611 - DNA, 15 bp, Homo sapiens
tgtgacactcttcct

SEQ ID NO: 309612 - DNA, 15 bp, Homo sapiens
atgtgacactcttcc

SEQ ID NO: 309613 - DNA, 15 bp, Homo sapiens
catgtgacactcttc

SEQ ID NO: 309614 - DNA, 15 bp, Homo sapiens
tcatgtgacactctt

SEQ ID NO: 309615 - DNA, 15 bp, Homo sapiens
ctcatgtgacactct

SEQ ID NO: 309616 - DNA, 15 bp, Homo sapiens
cctcatgtgacactc

SEQ ID NO: 309617 - DNA, 15 bp, Homo sapiens
tcctcatgtgacact

SEQ ID NO: 309618 - DNA, 15 bp, Homo sapiens
ctcctcatgtgacac

SEQ ID NO: 309619 - DNA, 15 bp, Homo sapiens
tctcctcatgtgaca

SEQ ID NO: 309620 - DNA, 15 bp, Homo sapiens
ttctcctcatgtgac

SEQ ID NO: 309621 - DNA, 15 bp, Homo sapiens
cttctcctcatgtga

SEQ ID NO: 309622 - DNA, 15 bp, Homo sapiens
tcttctcctcatgtg

SEQ ID NO: 309623 - DNA, 15 bp, Homo sapiens
gtcttctcctcatgt

SEQ ID NO: 309624 - DNA, 15 bp, Homo sapiens
tgtcttctcctcatg

SEQ ID NO: 309625 - DNA, 15 bp, Homo sapiens
gtgtcttctcctcat

SEQ ID NO: 309626 - DNA, 15 bp, Homo sapiens
tgtgtcttctcctca

SEQ ID NO: 309627 - DNA, 15 bp, Homo sapiens
atgtgtcttctcctc

SEQ ID NO: 309628 - DNA, 15 bp, Homo sapiens
catgtgtcttctcct

SEQ ID NO: 309629 - DNA, 15 bp, Homo sapiens
acatgtgtcttctcc

SEQ ID NO: 309630 - DNA, 15 bp, Homo sapiens
gacatgtgtcttctc

SEQ ID NO: 309631 - DNA, 15 bp, Homo sapiens
tgacatgtgtcttct

SEQ ID NO: 309632 - DNA, 15 bp, Homo sapiens
gtgacatgtgtcttc

SEQ ID NO: 309633 - DNA, 15 bp, Homo sapiens
tgtgacatgtgtctt

SEQ ID NO: 309634 - DNA, 15 bp, Homo sapiens
ctgtgacatgtgtct

SEQ ID NO: 309635 - DNA, 15 bp, Homo sapiens
cctgtgacatgtgtc

SEQ ID NO: 309636 - DNA, 15 bp, Homo sapiens
acctgtgacatgtgt

SEQ ID NO: 309637 - DNA, 15 bp, Homo sapiens
gacctgtgacatgtg

SEQ ID NO: 309638 - DNA, 15 bp, Homo sapiens
tgacctgtgacatgt

SEQ ID NO: 309639 - DNA, 15 bp, Homo sapiens
atgacctgtgacatg

SEQ ID NO: 309640 - DNA, 15 bp, Homo sapiens
aatgacctgtgacat

SEQ ID NO: 309641 - DNA, 15 bp, Homo sapiens
gaatgacctgtgaca

SEQ ID NO: 309642 - DNA, 15 bp, Homo sapiens
agaatgacctgtgac

SEQ ID NO: 309643 - DNA, 15 bp, Homo sapiens
tagaatgacctgtga

SEQ ID NO: 309644 - DNA, 15 bp, Homo sapiens
ttagaatgacctgtg

SEQ ID NO: 309645 - DNA, 15 bp, Homo sapiens
tttagaatgacctgt

SEQ ID NO: 309646 - DNA, 15 bp, Homo sapiens
ttttagaatgacctg

SEQ ID NO: 309647 - DNA, 15 bp, Homo sapiens
cttttagaatgacct

SEQ ID NO: 309648 - DNA, 15 bp, Homo sapiens
ccttttagaatgacc

SEQ ID NO: 309649 - DNA, 15 bp, Homo sapiens
cccttttagaatgac

SEQ ID NO: 309650 - DNA, 15 bp, Homo sapiens
tcccttttagaatga

SEQ ID NO: 309651 - DNA, 15 bp, Homo sapiens
ttcccttttagaatg

SEQ ID NO: 309652 - DNA, 15 bp, Homo sapiens
tttcccttttagaat

SEQ ID NO: 309653 - DNA, 15 bp, Homo sapiens
gtttcccttttagaa

SEQ ID NO: 309654 - DNA, 15 bp, Homo sapiens
ggtttcccttttaga

SEQ ID NO: 309655 - DNA, 15 bp, Homo sapiens
gggtttcccttttag

SEQ ID NO: 309656 - DNA, 15 bp, Homo sapiens
tgggtttccctttta

SEQ ID NO: 309657 - DNA, 15 bp, Homo sapiens
ttgggtttccctttt

SEQ ID NO: 309658 - DNA, 15 bp, Homo sapiens
gttgggtttcccttt

SEQ ID NO: 309659 - DNA, 15 bp, Homo sapiens
agttgggtttccctt

SEQ ID NO: 309660 - DNA, 15 bp, Homo sapiens
cagttgggtttccct

SEQ ID NO: 309661 - DNA, 15 bp, Homo sapiens
tcagttgggtttccc

SEQ ID NO: 309662 - DNA, 15 bp, Homo sapiens
ctcagttgggtttcc

SEQ ID NO: 309663 - DNA, 15 bp, Homo sapiens
tctcagttgggtttc

SEQ ID NO: 309664 - DNA, 15 bp, Homo sapiens
ttctcagttgggttt

SEQ ID NO: 309665 - DNA, 15 bp, Homo sapiens
attctcagttgggtt

SEQ ID NO: 309666 - DNA, 15 bp, Homo sapiens
cattctcagttgggt

SEQ ID NO: 309667 - DNA, 15 bp, Homo sapiens
tcattctcagttggg

SEQ ID NO: 309668 - DNA, 15 bp, Homo sapiens
ttcattctcagttgg

SEQ ID NO: 309669 - DNA, 15 bp, Homo sapiens
cttcattctcagttg

SEQ ID NO: 309670 - DNA, 15 bp, Homo sapiens
tcttcattctcagtt

SEQ ID NO: 309671 - DNA, 15 bp, Homo sapiens
ctcttcattctcagt

SEQ ID NO: 309672 - DNA, 15 bp, Homo sapiens
actcttcattctcag

SEQ ID NO: 309673 - DNA, 15 bp, Homo sapiens
cactcttcattctca

SEQ ID NO: 309674 - DNA, 15 bp, Homo sapiens
acactcttcattctc

SEQ ID NO: 309675 - DNA, 15 bp, Homo sapiens
gacactcttcattct

SEQ ID NO: 309676 - DNA, 15 bp, Homo sapiens
agacactcttcattc

SEQ ID NO: 309677 - DNA, 15 bp, Homo sapiens
gagacactcttcatt

SEQ ID NO: 309678 - DNA, 15 bp, Homo sapiens
tgagacactcttcat

SEQ ID NO: 309679 - DNA, 15 bp, Homo sapiens
ctgagacactcttca

SEQ ID NO: 309680 - DNA, 15 bp, Homo sapiens
cctgagacactcttc

SEQ ID NO: 309681 - DNA, 15 bp, Homo sapiens
ccctgagacactctt

SEQ ID NO: 309682 - DNA, 15 bp, Homo sapiens
gccctgagacactct

SEQ ID NO: 309683 - DNA, 15 bp, Homo sapiens
tgccctgagacactc

SEQ ID NO: 309684 - DNA, 15 bp, Homo sapiens
ctgccctgagacact

SEQ ID NO: 309685 - DNA, 15 bp, Homo sapiens
tctgccctgagacac

SEQ ID NO: 309686 - DNA, 15 bp, Homo sapiens
ttctgccctgagaca

SEQ ID NO: 309687 - DNA, 15 bp, Homo sapiens
tttctgccctgagac

SEQ ID NO: 309688 - DNA, 15 bp, Homo sapiens
ttttctgccctgaga

SEQ ID NO: 309689 - DNA, 15 bp, Homo sapiens
tttttctgccctgag

SEQ ID NO: 309690 - DNA, 15 bp, Homo sapiens
ctttttctgccctga

SEQ ID NO: 309691 - DNA, 15 bp, Homo sapiens
cctttttctgccctg

SEQ ID NO: 309692 - DNA, 15 bp, Homo sapiens
tcctttttctgccct

SEQ ID NO: 309693 - DNA, 15 bp, Homo sapiens
ttcctttttctgccc

SEQ ID NO: 309694 - DNA, 15 bp, Homo sapiens
cttcctttttctgcc

SEQ ID NO: 309695 - DNA, 15 bp, Homo sapiens
ccttcctttttctgc

SEQ ID NO: 309696 - DNA, 15 bp, Homo sapiens
tccttcctttttctg

SEQ ID NO: 309697 - DNA, 15 bp, Homo sapiens
ctccttcctttttct

SEQ ID NO: 309698 - DNA, 15 bp, Homo sapiens
gctccttcctttttc

SEQ ID NO: 309699 - DNA, 15 bp, Homo sapiens
tgctccttccttttt

SEQ ID NO: 309700 - DNA, 15 bp, Homo sapiens
ttgctccttcctttt

SEQ ID NO: 309701 - DNA, 15 bp, Homo sapiens
tttgctccttccttt

SEQ ID NO: 309702 - DNA, 15 bp, Homo sapiens
ctttgctccttcctt

SEQ ID NO: 309703 - DNA, 15 bp, Homo sapiens
tctttgctccttcct

SEQ ID NO: 309704 - DNA, 15 bp, Homo sapiens
gtctttgctccttcc

SEQ ID NO: 309705 - DNA, 15 bp, Homo sapiens
tgtctttgctccttc

SEQ ID NO: 309706 - DNA, 15 bp, Homo sapiens
atgtctttgctcctt

SEQ ID NO: 309707 - DNA, 15 bp, Homo sapiens
gatgtctttgctcct

SEQ ID NO: 309708 - DNA, 15 bp, Homo sapiens
ggatgtctttgctcc

SEQ ID NO: 309709 - DNA, 15 bp, Homo sapiens
tggatgtctttgctc

SEQ ID NO: 309710 - DNA, 15 bp, Homo sapiens
gtggatgtctttgct

SEQ ID NO: 309711 - DNA, 15 bp, Homo sapiens
ggtggatgtctttgc

SEQ ID NO: 309712 - DNA, 15 bp, Homo sapiens
aggtggatgtctttg

SEQ ID NO: 309713 - DNA, 15 bp, Homo sapiens
aaggtggatgtcttt

SEQ ID NO: 309714 - DNA, 15 bp, Homo sapiens
caaggtggatgtctt

SEQ ID NO: 309715 - DNA, 15 bp, Homo sapiens
ccaaggtggatgtct

SEQ ID NO: 309716 - DNA, 15 bp, Homo sapiens
gccaaggtggatgtc

SEQ ID NO: 309717 - DNA, 15 bp, Homo sapiens
tgccaaggtggatgt

SEQ ID NO: 309718 - DNA, 15 bp, Homo sapiens
gtgccaaggtggatg

SEQ ID NO: 309719 - DNA, 15 bp, Homo sapiens
agtgccaaggtggat

SEQ ID NO: 309720 - DNA, 15 bp, Homo sapiens
tagtgccaaggtgga

SEQ ID NO: 309721 - DNA, 15 bp, Homo sapiens
ctagtgccaaggtgg

SEQ ID NO: 309722 - DNA, 15 bp, Homo sapiens
tctagtgccaaggtg

SEQ ID NO: 309723 - DNA, 15 bp, Homo sapiens
gtctagtgccaaggt

SEQ ID NO: 309724 - DNA, 15 bp, Homo sapiens
tgtctagtgccaagg

SEQ ID NO: 309725 - DNA, 15 bp, Homo sapiens
ttgtctagtgccaag

SEQ ID NO: 309726 - DNA, 15 bp, Homo sapiens
attgtctagtgccaa

SEQ ID NO: 309727 - DNA, 15 bp, Homo sapiens
aattgtctagtgcca

SEQ ID NO: 309728 - DNA, 15 bp, Homo sapiens
aaattgtctagtgcc

SEQ ID NO: 309729 - DNA, 15 bp, Homo sapiens
caaattgtctagtgc

SEQ ID NO: 309730 - DNA, 15 bp, Homo sapiens
ccaaattgtctagtg

SEQ ID NO: 309731 - DNA, 15 bp, Homo sapiens
cccaaattgtctagt

SEQ ID NO: 309732 - DNA, 15 bp, Homo sapiens
acccaaattgtctag

SEQ ID NO: 309733 - DNA, 15 bp, Homo sapiens
gacccaaattgtcta

SEQ ID NO: 309734 - DNA, 15 bp, Homo sapiens
ggacccaaattgtct

SEQ ID NO: 309735 - DNA, 15 bp, Homo sapiens
aggacccaaattgtc

SEQ ID NO: 309736 - DNA, 15 bp, Homo sapiens
caggacccaaattgt

SEQ ID NO: 309737 - DNA, 15 bp, Homo sapiens
tcaggacccaaattg

SEQ ID NO: 309738 - DNA, 15 bp, Homo sapiens
atcaggacccaaatt

SEQ ID NO: 309739 - DNA, 15 bp, Homo sapiens
aatcaggacccaaat

SEQ ID NO: 309740 - DNA, 15 bp, Homo sapiens
aaatcaggacccaaa

SEQ ID NO: 309741 - DNA, 15 bp, Homo sapiens
caaatcaggacccaa

SEQ ID NO: 309742 - DNA, 15 bp, Homo sapiens
tcaaatcaggaccca

SEQ ID NO: 309743 - DNA, 15 bp, Homo sapiens
gtcaaatcaggaccc

SEQ ID NO: 309744 - DNA, 15 bp, Homo sapiens
tgtcaaatcaggacc

SEQ ID NO: 309745 - DNA, 15 bp, Homo sapiens
ctgtcaaatcaggac

SEQ ID NO: 309746 - DNA, 15 bp, Homo sapiens
actgtcaaatcagga

SEQ ID NO: 309747 - DNA, 15 bp, Homo sapiens
gactgtcaaatcagg

SEQ ID NO: 309748 - DNA, 15 bp, Homo sapiens
agactgtcaaatcag

SEQ ID NO: 309749 - DNA, 15 bp, Homo sapiens
aagactgtcaaatca

SEQ ID NO: 309750 - DNA, 15 bp, Homo sapiens
aaagactgtcaaatc

SEQ ID NO: 309751 - DNA, 15 bp, Homo sapiens
taaagactgtcaaat

SEQ ID NO: 309752 - DNA, 15 bp, Homo sapiens
ctaaagactgtcaaa

SEQ ID NO: 309753 - DNA, 15 bp, Homo sapiens
actaaagactgtcaa

SEQ ID NO: 309754 - DNA, 15 bp, Homo sapiens
tactaaagactgtca

SEQ ID NO: 309755 - DNA, 15 bp, Homo sapiens
ttactaaagactgtc

SEQ ID NO: 309756 - DNA, 15 bp, Homo sapiens
attactaaagactgt

SEQ ID NO: 309757 - DNA, 15 bp, Homo sapiens
aattactaaagactg

SEQ ID NO: 309758 - DNA, 15 bp, Homo sapiens
taattactaaagact

SEQ ID NO: 309759 - DNA, 15 bp, Homo sapiens
ctaattactaaagac

SEQ ID NO: 309760 - DNA, 15 bp, Homo sapiens
gctaattactaaaga

SEQ ID NO: 309761 - DNA, 15 bp, Homo sapiens
tgctaattactaaag

SEQ ID NO: 309762 - DNA, 15 bp, Homo sapiens
atgctaattactaaa

SEQ ID NO: 309763 - DNA, 15 bp, Homo sapiens
tatgctaattactaa

SEQ ID NO: 309764 - DNA, 15 bp, Homo sapiens
ttatgctaattacta

SEQ ID NO: 309765 - DNA, 15 bp, Homo sapiens
gttatgctaattact

SEQ ID NO: 309766 - DNA, 15 bp, Homo sapiens
ggttatgctaattac

SEQ ID NO: 309767 - DNA, 15 bp, Homo sapiens
tggttatgctaatta

SEQ ID NO: 309768 - DNA, 15 bp, Homo sapiens
atggttatgctaatt

SEQ ID NO: 309769 - DNA, 15 bp, Homo sapiens
gatggttatgctaat

SEQ ID NO: 309770 - DNA, 15 bp, Homo sapiens
tgatggttatgctaa

SEQ ID NO: 309771 - DNA, 15 bp, Homo sapiens
ctgatggttatgcta

SEQ ID NO: 309772 - DNA, 15 bp, Homo sapiens
actgatggttatgct

SEQ ID NO: 309773 - DNA, 15 bp, Homo sapiens
tactgatggttatgc

SEQ ID NO: 309774 - DNA, 15 bp, Homo sapiens
gtactgatggttatg

SEQ ID NO: 309775 - DNA, 15 bp, Homo sapiens
tgtactgatggttat

SEQ ID NO: 309776 - DNA, 15 bp, Homo sapiens
atgtactgatggtta

SEQ ID NO: 309777 - DNA, 15 bp, Homo sapiens
gatgtactgatggtt

SEQ ID NO: 309778 - DNA, 15 bp, Homo sapiens
tgatgtactgatggt

SEQ ID NO: 309779 - DNA, 15 bp, Homo sapiens
atgatgtactgatgg

SEQ ID NO: 309780 - DNA, 15 bp, Homo sapiens
catgatgtactgatg

SEQ ID NO: 309781 - DNA, 15 bp, Homo sapiens
ccatgatgtactgat

SEQ ID NO: 309782 - DNA, 15 bp, Homo sapiens
tccatgatgtactga

SEQ ID NO: 309783 - DNA, 15 bp, Homo sapiens
ttccatgatgtactg

SEQ ID NO: 309784 - DNA, 15 bp, Homo sapiens
cttccatgatgtact

SEQ ID NO: 309785 - DNA, 15 bp, Homo sapiens
gcttccatgatgtac

SEQ ID NO: 309786 - DNA, 15 bp, Homo sapiens
agcttccatgatgta

SEQ ID NO: 309787 - DNA, 15 bp, Homo sapiens
aagcttccatgatgt

SEQ ID NO: 309788 - DNA, 15 bp, Homo sapiens
taagcttccatgatg

SEQ ID NO: 309789 - DNA, 15 bp, Homo sapiens
gtaagcttccatgat

SEQ ID NO: 309790 - DNA, 15 bp, Homo sapiens
ggtaagcttccatga

SEQ ID NO: 309791 - DNA, 15 bp, Homo sapiens
gggtaagcttccatg

SEQ ID NO: 309792 - DNA, 15 bp, Homo sapiens
ggggtaagcttccat

SEQ ID NO: 309793 - DNA, 15 bp, Homo sapiens
tggggtaagcttcca

SEQ ID NO: 309794 - DNA, 15 bp, Homo sapiens
atggggtaagcttcc

SEQ ID NO: 309795 - DNA, 15 bp, Homo sapiens
catggggtaagcttc

SEQ ID NO: 309796 - DNA, 15 bp, Homo sapiens
acatggggtaagctt

SEQ ID NO: 309797 - DNA, 15 bp, Homo sapiens
tacatggggtaagct

SEQ ID NO: 309798 - DNA, 15 bp, Homo sapiens
gtacatggggtaagc

SEQ ID NO: 309799 - DNA, 15 bp, Homo sapiens
ggtacatggggtaag

SEQ ID NO: 309800 - DNA, 15 bp, Homo sapiens
tggtacatggggtaa

SEQ ID NO: 309801 - DNA, 15 bp, Homo sapiens
atggtacatggggta

SEQ ID NO: 309802 - DNA, 15 bp, Homo sapiens
aatggtacatggggt

SEQ ID NO: 309803 - DNA, 15 bp, Homo sapiens
aaatggtacatgggg

SEQ ID NO: 309804 - DNA, 15 bp, Homo sapiens
gaaatggtacatggg

SEQ ID NO: 309805 - DNA, 15 bp, Homo sapiens
agaaatggtacatgg

SEQ ID NO: 309806 - DNA, 15 bp, Homo sapiens
aagaaatggtacatg

SEQ ID NO: 309807 - DNA, 15 bp, Homo sapiens
taagaaatggtacat

SEQ ID NO: 309808 - DNA, 15 bp, Homo sapiens
ctaagaaatggtaca

SEQ ID NO: 309809 - DNA, 15 bp, Homo sapiens
gctaagaaatggtac

SEQ ID NO: 309810 - DNA, 15 bp, Homo sapiens
agctaagaaatggta

SEQ ID NO: 309811 - DNA, 15 bp, Homo sapiens
gagctaagaaatggt

SEQ ID NO: 309812 - DNA, 15 bp, Homo sapiens
agagctaagaaatgg

SEQ ID NO: 309813 - DNA, 15 bp, Homo sapiens
gagagctaagaaatg

SEQ ID NO: 309814 - DNA, 15 bp, Homo sapiens
ggagagctaagaaat

SEQ ID NO: 309815 - DNA, 15 bp, Homo sapiens
aggagagctaagaaa

SEQ ID NO: 309816 - DNA, 15 bp, Homo sapiens
gaggagagctaagaa

SEQ ID NO: 309817 - DNA, 15 bp, Homo sapiens
tgaggagagctaaga

SEQ ID NO: 309818 - DNA, 15 bp, Homo sapiens
gtgaggagagctaag

SEQ ID NO: 309819 - DNA, 15 bp, Homo sapiens
agtgaggagagctaa

SEQ ID NO: 309820 - DNA, 15 bp, Homo sapiens
cagtgaggagagcta

SEQ ID NO: 309821 - DNA, 15 bp, Homo sapiens
acagtgaggagagct

SEQ ID NO: 309822 - DNA, 15 bp, Homo sapiens
aacagtgaggagagc

SEQ ID NO: 309823 - DNA, 15 bp, Homo sapiens
caacagtgaggagag

SEQ ID NO: 309824 - DNA, 15 bp, Homo sapiens
acaacagtgaggaga

SEQ ID NO: 309825 - DNA, 15 bp, Homo sapiens
cacaacagtgaggag

SEQ ID NO: 309826 - DNA, 15 bp, Homo sapiens
tcacaacagtgagga

SEQ ID NO: 309827 - DNA, 15 bp, Homo sapiens
atcacaacagtgagg

SEQ ID NO: 309828 - DNA, 15 bp, Homo sapiens
aatcacaacagtgag

SEQ ID NO: 309829 - DNA, 15 bp, Homo sapiens
caatcacaacagtga

SEQ ID NO: 309830 - DNA, 15 bp, Homo sapiens
gcaatcacaacagtg

SEQ ID NO: 309831 - DNA, 15 bp, Homo sapiens
tgcaatcacaacagt

SEQ ID NO: 309832 - DNA, 15 bp, Homo sapiens
ttgcaatcacaacag

SEQ ID NO: 309833 - DNA, 15 bp, Homo sapiens
tttgcaatcacaaca

SEQ ID NO: 309834 - DNA, 15 bp, Homo sapiens
ctttgcaatcacaac

SEQ ID NO: 309835 - DNA, 15 bp, Homo sapiens
cctttgcaatcacaa

SEQ ID NO: 309836 - DNA, 15 bp, Homo sapiens
acctttgcaatcaca

SEQ ID NO: 309837 - DNA, 15 bp, Homo sapiens
cacctttgcaatcac

SEQ ID NO: 309838 - DNA, 15 bp, Homo sapiens
gcacctttgcaatca

SEQ ID NO: 309839 - DNA, 15 bp, Homo sapiens
agcacctttgcaatc

SEQ ID NO: 309840 - DNA, 15 bp, Homo sapiens
aagcacctttgcaat

SEQ ID NO: 309841 - DNA, 15 bp, Homo sapiens
caagcacctttgcaa

SEQ ID NO: 309842 - DNA, 15 bp, Homo sapiens
ccaagcacctttgca

SEQ ID NO: 309843 - DNA, 15 bp, Homo sapiens
tccaagcacctttgc

SEQ ID NO: 309844 - DNA, 15 bp, Homo sapiens
ttccaagcacctttg

SEQ ID NO: 309845 - DNA, 15 bp, Homo sapiens
cttccaagcaccttt

SEQ ID NO: 309846 - DNA, 15 bp, Homo sapiens
ccttccaagcacctt

SEQ ID NO: 309847 - DNA, 15 bp, Homo sapiens
accttccaagcacct

SEQ ID NO: 309848 - DNA, 15 bp, Homo sapiens
aaccttccaagcacc

SEQ ID NO: 309849 - DNA, 15 bp, Homo sapiens
taaccttccaagcac

SEQ ID NO: 309850 - DNA, 15 bp, Homo sapiens
gtaaccttccaagca

SEQ ID NO: 309851 - DNA, 15 bp, Homo sapiens
agtaaccttccaagc

SEQ ID NO: 309852 - DNA, 15 bp, Homo sapiens
aagtaaccttccaag

SEQ ID NO: 309853 - DNA, 15 bp, Homo sapiens
caagtaaccttccaa

SEQ ID NO: 309854 - DNA, 15 bp, Homo sapiens
tcaagtaaccttcca

SEQ ID NO: 309855 - DNA, 15 bp, Homo sapiens
atcaagtaaccttcc

SEQ ID NO: 309856 - DNA, 15 bp, Homo sapiens
catcaagtaaccttc

SEQ ID NO: 309857 - DNA, 15 bp, Homo sapiens
tcatcaagtaacctt

SEQ ID NO: 309858 - DNA, 15 bp, Homo sapiens
ctcatcaagtaacct

SEQ ID NO: 309859 - DNA, 15 bp, Homo sapiens
gctcatcaagtaacc

SEQ ID NO: 309860 - DNA, 15 bp, Homo sapiens
ggctcatcaagtaac

SEQ ID NO: 309861 - DNA, 15 bp, Homo sapiens
aggctcatcaagtaa

SEQ ID NO: 309862 - DNA, 15 bp, Homo sapiens
gaggctcatcaagta

SEQ ID NO: 309863 - DNA, 15 bp, Homo sapiens
agaggctcatcaagt

SEQ ID NO: 309864 - DNA, 15 bp, Homo sapiens
aagaggctcatcaag

SEQ ID NO: 309865 - DNA, 15 bp, Homo sapiens
aaagaggctcatcaa

SEQ ID NO: 309866 - DNA, 15 bp, Homo sapiens
gaaagaggctcatca

SEQ ID NO: 309867 - DNA, 15 bp, Homo sapiens
agaaagaggctcatc

SEQ ID NO: 309868 - DNA, 15 bp, Homo sapiens
cagaaagaggctcat

SEQ ID NO: 309869 - DNA, 15 bp, Homo sapiens
gcagaaagaggctca

SEQ ID NO: 309870 - DNA, 15 bp, Homo sapiens
agcagaaagaggctc

SEQ ID NO: 309871 - DNA, 15 bp, Homo sapiens
cagcagaaagaggct

SEQ ID NO: 309872 - DNA, 15 bp, Homo sapiens
gcagcagaaagaggc

SEQ ID NO: 309873 - DNA, 15 bp, Homo sapiens
agcagcagaaagagg

SEQ ID NO: 309874 - DNA, 15 bp, Homo sapiens
gagcagcagaaagag

SEQ ID NO: 309875 - DNA, 15 bp, Homo sapiens
ggagcagcagaaaga

SEQ ID NO: 309876 - DNA, 15 bp, Homo sapiens
tggagcagcagaaag

SEQ ID NO: 309877 - DNA, 15 bp, Homo sapiens
ctggagcagcagaaa

SEQ ID NO: 309878 - DNA, 15 bp, Homo sapiens
tctggagcagcagaa

SEQ ID NO: 309879 - DNA, 15 bp, Homo sapiens
gtctggagcagcaga

SEQ ID NO: 309880 - DNA, 15 bp, Homo sapiens
ggtctggagcagcag

SEQ ID NO: 309881 - DNA, 15 bp, Homo sapiens
gggtctggagcagca

SEQ ID NO: 309882 - DNA, 15 bp, Homo sapiens
tgggtctggagcagc

SEQ ID NO: 309883 - DNA, 15 bp, Homo sapiens
ctgggtctggagcag

SEQ ID NO: 309884 - DNA, 15 bp, Homo sapiens
tctgggtctggagca

SEQ ID NO: 309885 - DNA, 15 bp, Homo sapiens
gtctgggtctggagc

SEQ ID NO: 309886 - DNA, 15 bp, Homo sapiens
agtctgggtctggag

SEQ ID NO: 309887 - DNA, 15 bp, Homo sapiens
cagtctgggtctgga

SEQ ID NO: 309888 - DNA, 15 bp, Homo sapiens
acagtctgggtctgg

SEQ ID NO: 309889 - DNA, 15 bp, Homo sapiens
cacagtctgggtctg

SEQ ID NO: 309890 - DNA, 15 bp, Homo sapiens
tcacagtctgggtct

SEQ ID NO: 309891 - DNA, 15 bp, Homo sapiens
ctcacagtctgggtc

SEQ ID NO: 309892 - DNA, 15 bp, Homo sapiens
actcacagtctgggt

SEQ ID NO: 309893 - DNA, 15 bp, Homo sapiens
aactcacagtctggg

SEQ ID NO: 309894 - DNA, 15 bp, Homo sapiens
gaactcacagtctgg

SEQ ID NO: 309895 - DNA, 15 bp, Homo sapiens
ggaactcacagtctg

SEQ ID NO: 309896 - DNA, 15 bp, Homo sapiens
tggaactcacagtct

SEQ ID NO: 309897 - DNA, 15 bp, Homo sapiens
atggaactcacagtc

SEQ ID NO: 309898 - DNA, 15 bp, Homo sapiens
gatggaactcacagt

SEQ ID NO: 309899 - DNA, 15 bp, Homo sapiens
tgatggaactcacag

SEQ ID NO: 309900 - DNA, 15 bp, Homo sapiens
ttgatggaactcaca

SEQ ID NO: 309901 - DNA, 15 bp, Homo sapiens
cttgatggaactcac

SEQ ID NO: 309902 - DNA, 15 bp, Homo sapiens
ccttgatggaactca

SEQ ID NO: 309903 - DNA, 15 bp, Homo sapiens
gccttgatggaactc

SEQ ID NO: 309904 - DNA, 15 bp, Homo sapiens
tgccttgatggaact

SEQ ID NO: 309905 - DNA, 15 bp, Homo sapiens
ctgccttgatggaac

SEQ ID NO: 309906 - DNA, 15 bp, Homo sapiens
cctgccttgatggaa

SEQ ID NO: 309907 - DNA, 15 bp, Homo sapiens
ccctgccttgatgga

SEQ ID NO: 309908 - DNA, 15 bp, Homo sapiens
tccctgccttgatgg

SEQ ID NO: 309909 - DNA, 15 bp, Homo sapiens
atccctgccttgatg

SEQ ID NO: 309910 - DNA, 15 bp, Homo sapiens
gatccctgccttgat

SEQ ID NO: 309911 - DNA, 15 bp, Homo sapiens
agatccctgccttga

SEQ ID NO: 309912 - DNA, 15 bp, Homo sapiens
aagatccctgccttg

SEQ ID NO: 309913 - DNA, 15 bp, Homo sapiens
aaagatccctgcctt

SEQ ID NO: 309914 - DNA, 15 bp, Homo sapiens
gaaagatccctgcct

SEQ ID NO: 309915 - DNA, 15 bp, Homo sapiens
agaaagatccctgcc

SEQ ID NO: 309916 - DNA, 15 bp, Homo sapiens
gagaaagatccctgc

SEQ ID NO: 309917 - DNA, 15 bp, Homo sapiens
tgagaaagatccctg

SEQ ID NO: 309918 - DNA, 15 bp, Homo sapiens
ctgagaaagatccct

SEQ ID NO: 309919 - DNA, 15 bp, Homo sapiens
gctgagaaagatccc

SEQ ID NO: 309920 - DNA, 15 bp, Homo sapiens
agctgagaaagatcc

SEQ ID NO: 309921 - DNA, 15 bp, Homo sapiens
gagctgagaaagatc

SEQ ID NO: 309922 - DNA, 15 bp, Homo sapiens
agagctgagaaagat

SEQ ID NO: 309923 - DNA, 15 bp, Homo sapiens
gagagctgagaaaga

SEQ ID NO: 309924 - DNA, 15 bp, Homo sapiens
agagagctgagaaag

SEQ ID NO: 309925 - DNA, 15 bp, Homo sapiens
cagagagctgagaaa

SEQ ID NO: 309926 - DNA, 15 bp, Homo sapiens
acagagagctgagaa

SEQ ID NO: 309927 - DNA, 15 bp, Homo sapiens
aacagagagctgaga

SEQ ID NO: 309928 - DNA, 15 bp, Homo sapiens
aaacagagagctgag

SEQ ID NO: 309929 - DNA, 15 bp, Homo sapiens
aaaacagagagctga

SEQ ID NO: 309930 - DNA, 15 bp, Homo sapiens
taaaacagagagctg

SEQ ID NO: 309931 - DNA, 15 bp, Homo sapiens
ataaaacagagagct

SEQ ID NO: 309932 - DNA, 15 bp, Homo sapiens
gataaaacagagagc

SEQ ID NO: 309933 - DNA, 15 bp, Homo sapiens
ggataaaacagagag

SEQ ID NO: 309934 - DNA, 15 bp, Homo sapiens
gggataaaacagaga

SEQ ID NO: 309935 - DNA, 15 bp, Homo sapiens
ggggataaaacagag

SEQ ID NO: 309936 - DNA, 15 bp, Homo sapiens
tggggataaaacaga

SEQ ID NO: 309937 - DNA, 15 bp, Homo sapiens
ctggggataaaacag

SEQ ID NO: 309938 - DNA, 15 bp, Homo sapiens
tctggggataaaaca

SEQ ID NO: 309939 - DNA, 15 bp, Homo sapiens
ttctggggataaaac

SEQ ID NO: 309940 - DNA, 15 bp, Homo sapiens
attctggggataaaa

SEQ ID NO: 309941 - DNA, 15 bp, Homo sapiens
cattctggggataaa

SEQ ID NO: 309942 - DNA, 15 bp, Homo sapiens
ccattctggggataa

SEQ ID NO: 309943 - DNA, 15 bp, Homo sapiens
cccattctggggata

SEQ ID NO: 309944 - DNA, 15 bp, Homo sapiens
tcccattctggggat

SEQ ID NO: 309945 - DNA, 15 bp, Homo sapiens
gtcccattctgggga

SEQ ID NO: 309946 - DNA, 15 bp, Homo sapiens
tgtcccattctgggg

SEQ ID NO: 309947 - DNA, 15 bp, Homo sapiens
ctgtcccattctggg

SEQ ID NO: 309948 - DNA, 15 bp, Homo sapiens
tctgtcccattctgg

SEQ ID NO: 309949 - DNA, 15 bp, Homo sapiens
ctctgtcccattctg

SEQ ID NO: 309950 - DNA, 15 bp, Homo sapiens
gctctgtcccattct

SEQ ID NO: 309951 - DNA, 15 bp, Homo sapiens
tgctctgtcccattc

SEQ ID NO: 309952 - DNA, 15 bp, Homo sapiens
gtgctctgtcccatt

SEQ ID NO: 309953 - DNA, 15 bp, Homo sapiens
agtgctctgtcccat

SEQ ID NO: 309954 - DNA, 15 bp, Homo sapiens
cagtgctctgtccca

SEQ ID NO: 309955 - DNA, 15 bp, Homo sapiens
gcagtgctctgtccc

SEQ ID NO: 309956 - DNA, 15 bp, Homo sapiens
tgcagtgctctgtcc

SEQ ID NO: 309957 - DNA, 15 bp, Homo sapiens
gtgcagtgctctgtc

SEQ ID NO: 309958 - DNA, 15 bp, Homo sapiens
cgtgcagtgctctgt

SEQ ID NO: 309959 - DNA, 15 bp, Homo sapiens
gcgtgcagtgctctg

SEQ ID NO: 309960 - DNA, 15 bp, Homo sapiens
tgcgtgcagtgctct

SEQ ID NO: 309961 - DNA, 15 bp, Homo sapiens
atgcgtgcagtgctc

SEQ ID NO: 309962 - DNA, 15 bp, Homo sapiens
catgcgtgcagtgct

SEQ ID NO: 309963 - DNA, 15 bp, Homo sapiens
ccatgcgtgcagtgc

SEQ ID NO: 309964 - DNA, 15 bp, Homo sapiens
cccatgcgtgcagtg

SEQ ID NO: 309965 - DNA, 15 bp, Homo sapiens
tcccatgcgtgcagt

SEQ ID NO: 309966 - DNA, 15 bp, Homo sapiens
ctcccatgcgtgcag

SEQ ID NO: 309967 - DNA, 15 bp, Homo sapiens
tctcccatgcgtgca

SEQ ID NO: 309968 - DNA, 15 bp, Homo sapiens
atctcccatgcgtgc

SEQ ID NO: 309969 - DNA, 15 bp, Homo sapiens
tatctcccatgcgtg

SEQ ID NO: 309970 - DNA, 15 bp, Homo sapiens
gtatctcccatgcgt

SEQ ID NO: 309971 - DNA, 15 bp, Homo sapiens
agtatctcccatgcg

SEQ ID NO: 309972 - DNA, 15 bp, Homo sapiens
gagtatctcccatgc

SEQ ID NO: 309973 - DNA, 15 bp, Homo sapiens
tgagtatctcccatg

SEQ ID NO: 309974 - DNA, 15 bp, Homo sapiens
ctgagtatctcccat

SEQ ID NO: 309975 - DNA, 15 bp, Homo sapiens
actgagtatctccca

SEQ ID NO: 309976 - DNA, 15 bp, Homo sapiens
tactgagtatctccc

SEQ ID NO: 309977 - DNA, 15 bp, Homo sapiens
ttactgagtatctcc

SEQ ID NO: 309978 - DNA, 15 bp, Homo sapiens
tttactgagtatctc

SEQ ID NO: 309979 - DNA, 15 bp, Homo sapiens
atttactgagtatct

SEQ ID NO: 309980 - DNA, 15 bp, Homo sapiens
tatttactgagtatc

SEQ ID NO: 309981 - DNA, 15 bp, Homo sapiens
ctatttactgagtat

SEQ ID NO: 309982 - DNA, 15 bp, Homo sapiens
gctatttactgagta

SEQ ID NO: 309983 - DNA, 15 bp, Homo sapiens
ggctatttactgagt

SEQ ID NO: 309984 - DNA, 15 bp, Homo sapiens
tggctatttactgag

SEQ ID NO: 309985 - DNA, 15 bp, Homo sapiens
gtggctatttactga

SEQ ID NO: 309986 - DNA, 15 bp, Homo sapiens
agtggctatttactg

SEQ ID NO: 309987 - DNA, 15 bp, Homo sapiens
cagtggctatttact

SEQ ID NO: 309988 - DNA, 15 bp, Homo sapiens
tcagtggctatttac

SEQ ID NO: 309989 - DNA, 15 bp, Homo sapiens
ctcagtggctattta

SEQ ID NO: 309990 - DNA, 15 bp, Homo sapiens
actcagtggctattt

SEQ ID NO: 309991 - DNA, 15 bp, Homo sapiens
cactcagtggctatt

SEQ ID NO: 309992 - DNA, 15 bp, Homo sapiens
tcactcagtggctat

SEQ ID NO: 309993 - DNA, 15 bp, Homo sapiens
ttcactcagtggcta

SEQ ID NO: 309994 - DNA, 15 bp, Homo sapiens
gttcactcagtggct

SEQ ID NO: 309995 - DNA, 15 bp, Homo sapiens
tgttcactcagtggc

SEQ ID NO: 309996 - DNA, 15 bp, Homo sapiens
ttgttcactcagtgg

SEQ ID NO: 309997 - DNA, 15 bp, Homo sapiens
attgttcactcagtg

SEQ ID NO: 309998 - DNA, 15 bp, Homo sapiens
cattgttcactcagt

SEQ ID NO: 309999 - DNA, 15 bp, Homo sapiens
ccattgttcactcag

SEQ ID NO: 310000 - DNA, 15 bp, Homo sapiens
tccattgttcactca

SEQ ID NO: 310001 - DNA, 15 bp, Homo sapiens
ttccattgttcactc

SEQ ID NO: 310002 - DNA, 15 bp, Homo sapiens
attccattgttcact

SEQ ID NO: 310003 - DNA, 15 bp, Homo sapiens
cattccattgttcac

SEQ ID NO: 310004 - DNA, 15 bp, Homo sapiens
tcattccattgttca

SEQ ID NO: 310005 - DNA, 15 bp, Homo sapiens
ttcattccattgttc

SEQ ID NO: 310006 - DNA, 15 bp, Homo sapiens
attcattccattgtt

SEQ ID NO: 310007 - DNA, 15 bp, Homo sapiens
cattcattccattgt

SEQ ID NO: 310008 - DNA, 15 bp, Homo sapiens
tcattcattccattg

SEQ ID NO: 310009 - DNA, 15 bp, Homo sapiens
gtcattcattccatt

SEQ ID NO: 310010 - DNA, 15 bp, Homo sapiens
tgtcattcattccat

SEQ ID NO: 310011 - DNA, 15 bp, Homo sapiens
ttgtcattcattcca

SEQ ID NO: 310012 - DNA, 15 bp, Homo sapiens
tttgtcattcattcc

SEQ ID NO: 310013 - DNA, 15 bp, Homo sapiens
atttgtcattcattc

SEQ ID NO: 310014 - DNA, 15 bp, Homo sapiens
catttgtcattcatt

SEQ ID NO: 310015 - DNA, 15 bp, Homo sapiens
tcatttgtcattcat

SEQ ID NO: 310016 - DNA, 15 bp, Homo sapiens
atcatttgtcattca

SEQ ID NO: 310017 - DNA, 15 bp, Homo sapiens
tatcatttgtcattc

SEQ ID NO: 310018 - DNA, 15 bp, Homo sapiens
cttatcatttgtcat

SEQ ID NO: 310019 - DNA, 15 bp, Homo sapiens
ccttatcatttgtca

SEQ ID NO: 310020 - DNA, 15 bp, Homo sapiens
cccttatcatttgtc

SEQ ID NO: 310021 - DNA, 15 bp, Homo sapiens
acccttatcatttgt

SEQ ID NO: 310022 - DNA, 15 bp, Homo sapiens
aacccttatcatttg

SEQ ID NO: 310023 - DNA, 15 bp, Homo sapiens
gaacccttatcattt

SEQ ID NO: 310024 - DNA, 15 bp, Homo sapiens
ggaacccttatcatt

SEQ ID NO: 310025 - DNA, 15 bp, Homo sapiens
gggaacccttatcat

SEQ ID NO: 310026 - DNA, 15 bp, Homo sapiens
tgggaacccttatca

SEQ ID NO: 310027 - DNA, 15 bp, Homo sapiens
ttgggaacccttatc

SEQ ID NO: 310028 - DNA, 15 bp, Homo sapiens
cttgggaacccttat

SEQ ID NO: 310029 - DNA, 15 bp, Homo sapiens
acttgggaaccctta

SEQ ID NO: 310030 - DNA, 15 bp, Homo sapiens
aacttgggaaccctt

SEQ ID NO: 310031 - DNA, 15 bp, Homo sapiens
gaacttgggaaccct

SEQ ID NO: 310032 - DNA, 15 bp, Homo sapiens
ggaacttgggaaccc

SEQ ID NO: 310033 - DNA, 15 bp, Homo sapiens
tggaacttgggaacc

SEQ ID NO: 310034 - DNA, 15 bp, Homo sapiens
atggaacttgggaac

SEQ ID NO: 310035 - DNA, 15 bp, Homo sapiens
aatggaacttgggaa

SEQ ID NO: 310036 - DNA, 15 bp, Homo sapiens
gaatggaacttggga

SEQ ID NO: 310037 - DNA, 15 bp, Homo sapiens
tagaatggaacttgg

SEQ ID NO: 310038 - DNA, 15 bp, Homo sapiens
atagaatggaacttg

SEQ ID NO: 310039 - DNA, 15 bp, Homo sapiens
tatagaatggaactt

SEQ ID NO: 310040 - DNA, 15 bp, Homo sapiens
ctatagaatggaact

SEQ ID NO: 310041 - DNA, 15 bp, Homo sapiens
tctatagaatggaac

SEQ ID NO: 310042 - DNA, 15 bp, Homo sapiens
ttctatagaatggaa

SEQ ID NO: 310043 - DNA, 15 bp, Homo sapiens
attctatagaatgga

SEQ ID NO: 310044 - DNA, 15 bp, Homo sapiens
tattctatagaatgg

SEQ ID NO: 310045 - DNA, 15 bp, Homo sapiens
ttattctatagaatg

SEQ ID NO: 310046 - DNA, 15 bp, Homo sapiens
cttattctatagaat

SEQ ID NO: 310047 - DNA, 15 bp, Homo sapiens
ccttattctatagaa

SEQ ID NO: 310048 - DNA, 15 bp, Homo sapiens
cccttattctataga

SEQ ID NO: 310049 - DNA, 15 bp, Homo sapiens
acccttattctatag

SEQ ID NO: 310050 - DNA, 15 bp, Homo sapiens
gacccttattctata

SEQ ID NO: 310051 - DNA, 15 bp, Homo sapiens
tgacccttattctat

SEQ ID NO: 310052 - DNA, 15 bp, Homo sapiens
ctgacccttattcta

SEQ ID NO: 310053 - DNA, 15 bp, Homo sapiens
gctgacccttattct

SEQ ID NO: 310054 - DNA, 15 bp, Homo sapiens
tgctgacccttattc

SEQ ID NO: 310055 - DNA, 15 bp, Homo sapiens
ttgctgacccttatt

SEQ ID NO: 310056 - DNA, 15 bp, Homo sapiens
tttgctgacccttat

SEQ ID NO: 310057 - DNA, 15 bp, Homo sapiens
ttttgctgaccctta

SEQ ID NO: 310058 - DNA, 15 bp, Homo sapiens
attttgctgaccctt

SEQ ID NO: 310059 - DNA, 15 bp, Homo sapiens
aattttgctgaccct

SEQ ID NO: 310060 - DNA, 15 bp, Homo sapiens
gaattttgctgaccc

SEQ ID NO: 310061 - DNA, 15 bp, Homo sapiens
agaattttgctgacc

SEQ ID NO: 310062 - DNA, 15 bp, Homo sapiens
aagaattttgctgac

SEQ ID NO: 310063 - DNA, 15 bp, Homo sapiens
gaagaattttgctga

SEQ ID NO: 310064 - DNA, 15 bp, Homo sapiens
ggaagaattttgctg

SEQ ID NO: 310065 - DNA, 15 bp, Homo sapiens
tggaagaattttgct

SEQ ID NO: 310066 - DNA, 15 bp, Homo sapiens
atggaagaattttgc

SEQ ID NO: 310067 - DNA, 15 bp, Homo sapiens
tatggaagaattttg

SEQ ID NO: 310068 - DNA, 15 bp, Homo sapiens
ttatggaagaatttt

SEQ ID NO: 310069 - DNA, 15 bp, Homo sapiens
tttatggaagaattt

SEQ ID NO: 310070 - DNA, 15 bp, Homo sapiens
ctttatggaagaatt

SEQ ID NO: 310071 - DNA, 15 bp, Homo sapiens
cctttatggaagaat

SEQ ID NO: 310072 - DNA, 15 bp, Homo sapiens
ccctttatggaagaa

SEQ ID NO: 310073 - DNA, 15 bp, Homo sapiens
gccctttatggaaga

SEQ ID NO: 310074 - DNA, 15 bp, Homo sapiens
ggccctttatggaag

SEQ ID NO: 310075 - DNA, 15 bp, Homo sapiens
aggccctttatggaa

SEQ ID NO: 310076 - DNA, 15 bp, Homo sapiens
caggccctttatgga

SEQ ID NO: 310077 - DNA, 15 bp, Homo sapiens
tcaggccctttatgg

SEQ ID NO: 310078 - DNA, 15 bp, Homo sapiens
atcaggccctttatg

SEQ ID NO: 310079 - DNA, 15 bp, Homo sapiens
tatcaggccctttat

SEQ ID NO: 310080 - DNA, 15 bp, Homo sapiens
ctatcaggcccttta

SEQ ID NO: 310081 - DNA, 15 bp, Homo sapiens
actatcaggcccttt

SEQ ID NO: 310082 - DNA, 15 bp, Homo sapiens
gactatcaggccctt

SEQ ID NO: 310083 - DNA, 15 bp, Homo sapiens
tgactatcaggccct

SEQ ID NO: 310084 - DNA, 15 bp, Homo sapiens
ttgactatcaggccc

SEQ ID NO: 310085 - DNA, 15 bp, Homo sapiens
attgactatcaggcc

SEQ ID NO: 310086 - DNA, 15 bp, Homo sapiens
cattgactatcaggc

SEQ ID NO: 310087 - DNA, 15 bp, Homo sapiens
acattgactatcagg

SEQ ID NO: 310088 - DNA, 15 bp, Homo sapiens
aacattgactatcag

SEQ ID NO: 310089 - DNA, 15 bp, Homo sapiens
aaacattgactatca

SEQ ID NO: 310090 - DNA, 15 bp, Homo sapiens
aaaacattgactatc

SEQ ID NO: 310091 - DNA, 15 bp, Homo sapiens
aaaaacattgactat

SEQ ID NO: 310092 - DNA, 15 bp, Homo sapiens
caaaaacattgacta

SEQ ID NO: 310093 - DNA, 15 bp, Homo sapiens
ccaaaaacattgact

SEQ ID NO: 310094 - DNA, 15 bp, Homo sapiens
gccaaaaacattgac

SEQ ID NO: 310095 - DNA, 15 bp, Homo sapiens
agccaaaaacattga

SEQ ID NO: 310096 - DNA, 15 bp, Homo sapiens
aagccaaaaacattg

SEQ ID NO: 310097 - DNA, 15 bp, Homo sapiens
gaagccaaaaacatt

SEQ ID NO: 310098 - DNA, 15 bp, Homo sapiens
tgaagccaaaaacat

SEQ ID NO: 310099 - DNA, 15 bp, Homo sapiens
ctgaagccaaaaaca

SEQ ID NO: 310100 - DNA, 15 bp, Homo sapiens
cctgaagccaaaaac

SEQ ID NO: 310101 - DNA, 15 bp, Homo sapiens
ccctgaagccaaaaa

SEQ ID NO: 310102 - DNA, 15 bp, Homo sapiens
cccctgaagccaaaa

SEQ ID NO: 310103 - DNA, 15 bp, Homo sapiens
gcccctgaagccaaa

SEQ ID NO: 310104 - DNA, 15 bp, Homo sapiens
agcccctgaagccaa

SEQ ID NO: 310105 - DNA, 15 bp, Homo sapiens
cagcccctgaagcca

SEQ ID NO: 310106 - DNA, 15 bp, Homo sapiens
acagcccctgaagcc

SEQ ID NO: 310107 - DNA, 15 bp, Homo sapiens
tacagcccctgaagc

SEQ ID NO: 310108 - DNA, 15 bp, Homo sapiens
atacagcccctgaag

SEQ ID NO: 310109 - DNA, 15 bp, Homo sapiens
catacagcccctgaa

SEQ ID NO: 310110 - DNA, 15 bp, Homo sapiens
tcatacagcccctga

SEQ ID NO: 310111 - DNA, 15 bp, Homo sapiens
atcatacagcccctg

SEQ ID NO: 310112 - DNA, 15 bp, Homo sapiens
gatcatacagcccct

SEQ ID NO: 310113 - DNA, 15 bp, Homo sapiens
agatcatacagcccc

SEQ ID NO: 310114 - DNA, 15 bp, Homo sapiens
gagatcatacagccc

SEQ ID NO: 310115 - DNA, 15 bp, Homo sapiens
ggagatcatacagcc

SEQ ID NO: 310116 - DNA, 15 bp, Homo sapiens
tggagatcatacagc

SEQ ID NO: 310117 - DNA, 15 bp, Homo sapiens
gtggagatcatacag

SEQ ID NO: 310118 - DNA, 15 bp, Homo sapiens
ggtggagatcataca

SEQ ID NO: 310119 - DNA, 15 bp, Homo sapiens
tggtggagatcatac

SEQ ID NO: 310120 - DNA, 15 bp, Homo sapiens
gtggtggagatcata

SEQ ID NO: 310121 - DNA, 15 bp, Homo sapiens
ggtggtggagatcat

SEQ ID NO: 310122 - DNA, 15 bp, Homo sapiens
tggtggtggagatca

SEQ ID NO: 310123 - DNA, 15 bp, Homo sapiens
gtggtggtggagatc

SEQ ID NO: 310124 - DNA, 15 bp, Homo sapiens
ggtggtggtggagat

SEQ ID NO: 310125 - DNA, 15 bp, Homo sapiens
tggtggtggtggaga

SEQ ID NO: 310126 - DNA, 15 bp, Homo sapiens
atggtggtggtggag

SEQ ID NO: 310127 - DNA, 15 bp, Homo sapiens
aatggtggtggtgga

SEQ ID NO: 310128 - DNA, 15 bp, Homo sapiens
gaatggtggtggtgg

SEQ ID NO: 310129 - DNA, 15 bp, Homo sapiens
tgaatggtggtggtg

SEQ ID NO: 310130 - DNA, 15 bp, Homo sapiens
ttgaatggtggtggt

SEQ ID NO: 310131 - DNA, 15 bp, Homo sapiens
gttgaatggtggtgg

SEQ ID NO: 310132 - DNA, 15 bp, Homo sapiens
agttgaatggtggtg

SEQ ID NO: 310133 - DNA, 15 bp, Homo sapiens
gagttgaatggtggt

SEQ ID NO: 310134 - DNA, 15 bp, Homo sapiens
agagttgaatggtgg

SEQ ID NO: 310135 - DNA, 15 bp, Homo sapiens
cagagttgaatggtg

SEQ ID NO: 310136 - DNA, 15 bp, Homo sapiens
gcagagttgaatggt

SEQ ID NO: 310137 - DNA, 15 bp, Homo sapiens
ggcagagttgaatgg

SEQ ID NO: 310138 - DNA, 15 bp, Homo sapiens
aggcagagttgaatg

SEQ ID NO: 310139 - DNA, 15 bp, Homo sapiens
gaggcagagttgaat

SEQ ID NO: 310140 - DNA, 15 bp, Homo sapiens
agaggcagagttgaa

SEQ ID NO: 310141 - DNA, 15 bp, Homo sapiens
cagaggcagagttga

SEQ ID NO: 310142 - DNA, 15 bp, Homo sapiens
acagaggcagagttg

SEQ ID NO: 310143 - DNA, 15 bp, Homo sapiens
cacagaggcagagtt

SEQ ID NO: 310144 - DNA, 15 bp, Homo sapiens
ccacagaggcagagt

SEQ ID NO: 310145 - DNA, 15 bp, Homo sapiens
gccacagaggcagag

SEQ ID NO: 310146 - DNA, 15 bp, Homo sapiens
tgccacagaggcaga

SEQ ID NO: 310147 - DNA, 15 bp, Homo sapiens
atgccacagaggcag

SEQ ID NO: 310148 - DNA, 15 bp, Homo sapiens
catgccacagaggca

SEQ ID NO: 310149 - DNA, 15 bp, Homo sapiens
tcatgccacagaggc

SEQ ID NO: 310150 - DNA, 15 bp, Homo sapiens
ttcatgccacagagg

SEQ ID NO: 310151 - DNA, 15 bp, Homo sapiens
tttcatgccacagag

SEQ ID NO: 310152 - DNA, 15 bp, Homo sapiens
ctttcatgccacaga

SEQ ID NO: 310153 - DNA, 15 bp, Homo sapiens
gctttcatgccacag

SEQ ID NO: 310154 - DNA, 15 bp, Homo sapiens
tgctttcatgccaca

SEQ ID NO: 310155 - DNA, 15 bp, Homo sapiens
ctgctttcatgccac

SEQ ID NO: 310156 - DNA, 15 bp, Homo sapiens
gctgctttcatgcca

SEQ ID NO: 310157 - DNA, 15 bp, Homo sapiens
ggctgctttcatgcc

SEQ ID NO: 310158 - DNA, 15 bp, Homo sapiens
tggctgctttcatgc

SEQ ID NO: 310159 - DNA, 15 bp, Homo sapiens
atggctgctttcatg

SEQ ID NO: 310160 - DNA, 15 bp, Homo sapiens
tatggctgctttcat

SEQ ID NO: 310161 - DNA, 15 bp, Homo sapiens
ctatggctgctttca

SEQ ID NO: 310162 - DNA, 15 bp, Homo sapiens
cctatggctgctttc

SEQ ID NO: 310163 - DNA, 15 bp, Homo sapiens
gcctatggctgcttt

SEQ ID NO: 310164 - DNA, 15 bp, Homo sapiens
tgcctatggctgctt

SEQ ID NO: 310165 - DNA, 15 bp, Homo sapiens
ttgcctatggctgct

SEQ ID NO: 310166 - DNA, 15 bp, Homo sapiens
attgcctatggctgc

SEQ ID NO: 310167 - DNA, 15 bp, Homo sapiens
tattgcctatggctg

SEQ ID NO: 310168 - DNA, 15 bp, Homo sapiens
ctattgcctatggct

SEQ ID NO: 310169 - DNA, 15 bp, Homo sapiens
cctattgcctatggc

SEQ ID NO: 310170 - DNA, 15 bp, Homo sapiens
acctattgcctatgg

SEQ ID NO: 310171 - DNA, 15 bp, Homo sapiens
tacctattgcctatg

SEQ ID NO: 310172 - DNA, 15 bp, Homo sapiens
ttacctattgcctat

SEQ ID NO: 310173 - DNA, 15 bp, Homo sapiens
tttacctattgccta

SEQ ID NO: 310174 - DNA, 15 bp, Homo sapiens
ttttacctattgcct

SEQ ID NO: 310175 - DNA, 15 bp, Homo sapiens
cttttacctattgcc

SEQ ID NO: 310176 - DNA, 15 bp, Homo sapiens
tcttttacctattgc

SEQ ID NO: 310177 - DNA, 15 bp, Homo sapiens
ctcttttacctattg

SEQ ID NO: 310178 - DNA, 15 bp, Homo sapiens
actcttttacctatt

SEQ ID NO: 310179 - DNA, 15 bp, Homo sapiens
cactcttttacctat

SEQ ID NO: 310180 - DNA, 15 bp, Homo sapiens
ccactcttttaccta

SEQ ID NO: 310181 - DNA, 15 bp, Homo sapiens
tccactcttttacct

SEQ ID NO: 310182 - DNA, 15 bp, Homo sapiens
gtccactcttttacc

SEQ ID NO: 310183 - DNA, 15 bp, Homo sapiens
tgtccactcttttac

SEQ ID NO: 310184 - DNA, 15 bp, Homo sapiens
atgtccactctttta

SEQ ID NO: 310185 - DNA, 15 bp, Homo sapiens
tatgtccactctttt

SEQ ID NO: 310186 - DNA, 15 bp, Homo sapiens
ctatgtccactcttt

SEQ ID NO: 310187 - DNA, 15 bp, Homo sapiens
gctatgtccactctt

SEQ ID NO: 310188 - DNA, 15 bp, Homo sapiens
agctatgtccactct

SEQ ID NO: 310189 - DNA, 15 bp, Homo sapiens
cagctatgtccactc

SEQ ID NO: 310190 - DNA, 15 bp, Homo sapiens
acagctatgtccact

SEQ ID NO: 310191 - DNA, 15 bp, Homo sapiens
cacagctatgtccac

SEQ ID NO: 310192 - DNA, 15 bp, Homo sapiens
acacagctatgtcca

SEQ ID NO: 310193 - DNA, 15 bp, Homo sapiens
gacacagctatgtcc

SEQ ID NO: 310194 - DNA, 15 bp, Homo sapiens
ggacacagctatgtc

SEQ ID NO: 310195 - DNA, 15 bp, Homo sapiens
gggacacagctatgt

SEQ ID NO: 310196 - DNA, 15 bp, Homo sapiens
tgggacacagctatg

SEQ ID NO: 310197 - DNA, 15 bp, Homo sapiens
ttgggacacagctat

SEQ ID NO: 310198 - DNA, 15 bp, Homo sapiens
attgggacacagcta

SEQ ID NO: 310199 - DNA, 15 bp, Homo sapiens
tattgggacacagct

SEQ ID NO: 310200 - DNA, 15 bp, Homo sapiens
ttattgggacacagc

SEQ ID NO: 310201 - DNA, 15 bp, Homo sapiens
tttattgggacacag

SEQ ID NO: 310202 - DNA, 15 bp, Homo sapiens
ttttattgggacaca

SEQ ID NO: 310203 - DNA, 15 bp, Homo sapiens
attttattgggacac

SEQ ID NO: 310204 - DNA, 15 bp, Homo sapiens
aattttattgggaca

SEQ ID NO: 310205 - DNA, 15 bp, Homo sapiens
caattttattgggac

SEQ ID NO: 310206 - DNA, 15 bp, Homo sapiens
acaattttattggga

SEQ ID NO: 310207 - DNA, 15 bp, Homo sapiens
tacaattttattggg

SEQ ID NO: 310208 - DNA, 15 bp, Homo sapiens
atacaattttattgg

SEQ ID NO: 310209 - DNA, 15 bp, Homo sapiens
aatacaattttattg

SEQ ID NO: 310210 - DNA, 15 bp, Homo sapiens
gaatacaattttatt

SEQ ID NO: 310211 - DNA, 15 bp, Homo sapiens
cgaatacaattttat

SEQ ID NO: 310212 - DNA, 15 bp, Homo sapiens
ccgaatacaatttta

SEQ ID NO: 310213 - DNA, 15 bp, Homo sapiens
cccgaatacaatttt

SEQ ID NO: 310214 - DNA, 15 bp, Homo sapiens
tcccgaatacaattt

SEQ ID NO: 310215 - DNA, 15 bp, Homo sapiens
gtcccgaatacaatt

SEQ ID NO: 310216 - DNA, 15 bp, Homo sapiens
tgtcccgaatacaat

SEQ ID NO: 310217 - DNA, 15 bp, Homo sapiens
gtgtcccgaatacaa

SEQ ID NO: 310218 - DNA, 15 bp, Homo sapiens
agtgtcccgaataca

SEQ ID NO: 310219 - DNA, 15 bp, Homo sapiens
cagtgtcccgaatac

SEQ ID NO: 310220 - DNA, 15 bp, Homo sapiens
tcagtgtcccgaata

SEQ ID NO: 310221 - DNA, 15 bp, Homo sapiens
ttcagtgtcccgaat

SEQ ID NO: 310222 - DNA, 15 bp, Homo sapiens
tttcagtgtcccgaa

SEQ ID NO: 310223 - DNA, 15 bp, Homo sapiens
atttcagtgtcccga

SEQ ID NO: 310224 - DNA, 15 bp, Homo sapiens
aatttcagtgtcccg

SEQ ID NO: 310225 - DNA, 15 bp, Homo sapiens
aaatttcagtgtccc

SEQ ID NO: 310226 - DNA, 15 bp, Homo sapiens
caaatttcagtgtcc

SEQ ID NO: 310227 - DNA, 15 bp, Homo sapiens
tcaaatttcagtgtc

SEQ ID NO: 310228 - DNA, 15 bp, Homo sapiens
ttcaaatttcagtgt

SEQ ID NO: 310229 - DNA, 15 bp, Homo sapiens
attcaaatttcagtg

SEQ ID NO: 310230 - DNA, 15 bp, Homo sapiens
aattcaaatttcagt

SEQ ID NO: 310231 - DNA, 15 bp, Homo sapiens
aaattcaaatttcag

SEQ ID NO: 310232 - DNA, 15 bp, Homo sapiens
gaaattcaaatttca

SEQ ID NO: 310233 - DNA, 15 bp, Homo sapiens
tgaaattcaaatttc

SEQ ID NO: 310234 - DNA, 15 bp, Homo sapiens
atgaaattcaaattt

SEQ ID NO: 310235 - DNA, 15 bp, Homo sapiens
tatgaaattcaaatt

SEQ ID NO: 310236 - DNA, 15 bp, Homo sapiens
gtatgaaattcaaat

SEQ ID NO: 310237 - DNA, 15 bp, Homo sapiens
tgtatgaaattcaaa

SEQ ID NO: 310238 - DNA, 15 bp, Homo sapiens
ttgtatgaaattcaa

SEQ ID NO: 310239 - DNA, 15 bp, Homo sapiens
attgtatgaaattca

SEQ ID NO: 310240 - DNA, 15 bp, Homo sapiens
aattgtatgaaattc

SEQ ID NO: 310241 - DNA, 15 bp, Homo sapiens
aaattgtatgaaatt

SEQ ID NO: 310242 - DNA, 15 bp, Homo sapiens
aaaattgtatgaaat

SEQ ID NO: 310243 - DNA, 15 bp, Homo sapiens
gaaaattgtatgaaa

SEQ ID NO: 310244 - DNA, 15 bp, Homo sapiens
tgaaaattgtatgaa

SEQ ID NO: 310245 - DNA, 15 bp, Homo sapiens
atgaaaattgtatga

SEQ ID NO: 310246 - DNA, 15 bp, Homo sapiens
tatgaaaattgtatg

SEQ ID NO: 310247 - DNA, 15 bp, Homo sapiens
atatgaaaattgtat

SEQ ID NO: 310248 - DNA, 15 bp, Homo sapiens
aatatgaaaattgta

SEQ ID NO: 310249 - DNA, 15 bp, Homo sapiens
gaatatgaaaattgt

SEQ ID NO: 310250 - DNA, 15 bp, Homo sapiens
ggaatatgaaaattg

SEQ ID NO: 310251 - DNA, 15 bp, Homo sapiens
tggaatatgaaaatt

SEQ ID NO: 310252 - DNA, 15 bp, Homo sapiens
atggaatatgaaaat

SEQ ID NO: 310253 - DNA, 15 bp, Homo sapiens
tatggaatatgaaaa

SEQ ID NO: 310254 - DNA, 15 bp, Homo sapiens
ttatggaatatgaaa

SEQ ID NO: 310255 - DNA, 15 bp, Homo sapiens
tttatggaatatgaa

SEQ ID NO: 310256 - DNA, 15 bp, Homo sapiens
ttttatggaatatga

SEQ ID NO: 310257 - DNA, 15 bp, Homo sapiens
attttatggaatatg

SEQ ID NO: 310258 - DNA, 15 bp, Homo sapiens
tattttatggaatat

SEQ ID NO: 310259 - DNA, 15 bp, Homo sapiens
atattttatggaata

SEQ ID NO: 310260 - DNA, 15 bp, Homo sapiens
aatattttatggaat

SEQ ID NO: 310261 - DNA, 15 bp, Homo sapiens
gaatattttatggaa

SEQ ID NO: 310262 - DNA, 15 bp, Homo sapiens
agaatattttatgga

SEQ ID NO: 310263 - DNA, 15 bp, Homo sapiens
tagaatattttatgg

SEQ ID NO: 310264 - DNA, 15 bp, Homo sapiens
ttagaatattttatg

SEQ ID NO: 310265 - DNA, 15 bp, Homo sapiens
attagaatattttat

SEQ ID NO: 310266 - DNA, 15 bp, Homo sapiens
aattagaatatttta

SEQ ID NO: 310267 - DNA, 15 bp, Homo sapiens
aaattagaatatttt

SEQ ID NO: 310268 - DNA, 15 bp, Homo sapiens
aaaattagaatattt

SEQ ID NO: 310269 - DNA, 15 bp, Homo sapiens
aaaaattagaatatt

SEQ ID NO: 310270 - DNA, 15 bp, Homo sapiens
aaaaaattagaatat

SEQ ID NO: 310271 - DNA, 15 bp, Homo sapiens
aaaaaaattagaata

SEQ ID NO: 310272 - DNA, 15 bp, Homo sapiens
taaaaaaattagaat

SEQ ID NO: 310273 - DNA, 15 bp, Homo sapiens
ctaaaaaaattagaa

SEQ ID NO: 310274 - DNA, 15 bp, Homo sapiens
gctaaaaaaattaga

SEQ ID NO: 310275 - DNA, 15 bp, Homo sapiens
agctaaaaaaattag

SEQ ID NO: 310276 - DNA, 15 bp, Homo sapiens
cagctaaaaaaatta

SEQ ID NO: 310277 - DNA, 15 bp, Homo sapiens
acagctaaaaaaatt

SEQ ID NO: 310278 - DNA, 15 bp, Homo sapiens
aacagctaaaaaaat

SEQ ID NO: 310279 - DNA, 15 bp, Homo sapiens
aaacagctaaaaaaa

SEQ ID NO: 310280 - DNA, 15 bp, Homo sapiens
aaaacagctaaaaaa

SEQ ID NO: 310281 - DNA, 15 bp, Homo sapiens
taaaacagctaaaaa

SEQ ID NO: 310282 - DNA, 15 bp, Homo sapiens
ttaaaacagctaaaa

SEQ ID NO: 310283 - DNA, 15 bp, Homo sapiens
tttaaaacagctaaa

SEQ ID NO: 310284 - DNA, 15 bp, Homo sapiens
ttttaaaacagctaa

SEQ ID NO: 310285 - DNA, 15 bp, Homo sapiens
attttaaaacagcta

SEQ ID NO: 310286 - DNA, 15 bp, Homo sapiens
cattttaaaacagct

SEQ ID NO: 310287 - DNA, 15 bp, Homo sapiens
acattttaaaacagc

SEQ ID NO: 310288 - DNA, 15 bp, Homo sapiens
tacattttaaaacag

SEQ ID NO: 310289 - DNA, 15 bp, Homo sapiens
ctacattttaaaaca

SEQ ID NO: 310290 - DNA, 15 bp, Homo sapiens
cctacattttaaaac

SEQ ID NO: 310291 - DNA, 15 bp, Homo sapiens
ccctacattttaaaa

SEQ ID NO: 310292 - DNA, 15 bp, Homo sapiens
cccctacattttaaa

SEQ ID NO: 310293 - DNA, 15 bp, Homo sapiens
ccccctacattttaa

SEQ ID NO: 310294 - DNA, 15 bp, Homo sapiens
tccccctacatttta

SEQ ID NO: 310295 - DNA, 15 bp, Homo sapiens
ttccccctacatttt

SEQ ID NO: 310296 - DNA, 15 bp, Homo sapiens
tttccccctacattt

SEQ ID NO: 310297 - DNA, 15 bp, Homo sapiens
ttttccccctacatt

SEQ ID NO: 310298 - DNA, 15 bp, Homo sapiens
gttttccccctacat

SEQ ID NO: 310299 - DNA, 15 bp, Homo sapiens
tgttttccccctaca

SEQ ID NO: 310300 - DNA, 15 bp, Homo sapiens
atgttttccccctac

SEQ ID NO: 310301 - DNA, 15 bp, Homo sapiens
aatgttttcccccta

SEQ ID NO: 310302 - DNA, 15 bp, Homo sapiens
aaatgttttccccct

SEQ ID NO: 310303 - DNA, 15 bp, Homo sapiens
aaaatgttttccccc

SEQ ID NO: 310304 - DNA, 15 bp, Homo sapiens
aaaaatgttttcccc

SEQ ID NO: 310305 - DNA, 15 bp, Homo sapiens
taaaaatgttttccc

SEQ ID NO: 310306 - DNA, 15 bp, Homo sapiens
ctaaaaatgttttcc

SEQ ID NO: 310307 - DNA, 15 bp, Homo sapiens
gctaaaaatgttttc

SEQ ID NO: 310308 - DNA, 15 bp, Homo sapiens
agctaaaaatgtttt

SEQ ID NO: 310309 - DNA, 15 bp, Homo sapiens
cagctaaaaatgttt

SEQ ID NO: 310310 - DNA, 15 bp, Homo sapiens
ccagctaaaaatgtt

SEQ ID NO: 310311 - DNA, 15 bp, Homo sapiens
accagctaaaaatgt

SEQ ID NO: 310312 - DNA, 15 bp, Homo sapiens
caccagctaaaaatg

SEQ ID NO: 310313 - DNA, 15 bp, Homo sapiens
acaccagctaaaaat

SEQ ID NO: 310314 - DNA, 15 bp, Homo sapiens
gacaccagctaaaaa

SEQ ID NO: 310315 - DNA, 15 bp, Homo sapiens
ggacaccagctaaaa

SEQ ID NO: 310316 - DNA, 15 bp, Homo sapiens
aggacaccagctaaa

SEQ ID NO: 310317 - DNA, 15 bp, Homo sapiens
caggacaccagctaa

SEQ ID NO: 310318 - DNA, 15 bp, Homo sapiens
acaggacaccagcta

SEQ ID NO: 310319 - DNA, 15 bp, Homo sapiens
cacaggacaccagct

SEQ ID NO: 310320 - DNA, 15 bp, Homo sapiens
gcacaggacaccagc

SEQ ID NO: 310321 - DNA, 15 bp, Homo sapiens
tgcacaggacaccag

SEQ ID NO: 310322 - DNA, 15 bp, Homo sapiens
ttgcacaggacacca

SEQ ID NO: 310323 - DNA, 15 bp, Homo sapiens
cttgcacaggacacc

SEQ ID NO: 310324 - DNA, 15 bp, Homo sapiens
tcttgcacaggacac

SEQ ID NO: 310325 - DNA, 15 bp, Homo sapiens
ttcttgcacaggaca

SEQ ID NO: 310326 - DNA, 15 bp, Homo sapiens
gttcttgcacaggac

SEQ ID NO: 310327 - DNA, 15 bp, Homo sapiens
agttcttgcacagga

SEQ ID NO: 310328 - DNA, 15 bp, Homo sapiens
cagttcttgcacagg

SEQ ID NO: 310329 - DNA, 15 bp, Homo sapiens
ccagttcttgcacag

SEQ ID NO: 310330 - DNA, 15 bp, Homo sapiens
accagttcttgcaca

SEQ ID NO: 310331 - DNA, 15 bp, Homo sapiens
caccagttcttgcac

SEQ ID NO: 310332 - DNA, 15 bp, Homo sapiens
ccaccagttcttgca

SEQ ID NO: 310333 - DNA, 15 bp, Homo sapiens
accaccagttcttgc

SEQ ID NO: 310334 - DNA, 15 bp, Homo sapiens
caccaccagttcttg

SEQ ID NO: 310335 - DNA, 15 bp, Homo sapiens
ccaccaccagttctt

SEQ ID NO: 310336 - DNA, 15 bp, Homo sapiens
gccaccaccagttct

SEQ ID NO: 310337 - DNA, 15 bp, Homo sapiens
ggccaccaccagttc

SEQ ID NO: 310338 - DNA, 15 bp, Homo sapiens
tggccaccaccagtt

SEQ ID NO: 310339 - DNA, 15 bp, Homo sapiens
ctggccaccaccagt

SEQ ID NO: 310340 - DNA, 15 bp, Homo sapiens
tctggccaccaccag

SEQ ID NO: 310341 - DNA, 15 bp, Homo sapiens
atctggccaccacca

SEQ ID NO: 310342 - DNA, 15 bp, Homo sapiens
aatctggccaccacc

SEQ ID NO: 310343 - DNA, 15 bp, Homo sapiens
aaatctggccaccac

SEQ ID NO: 310344 - DNA, 15 bp, Homo sapiens
caaatctggccacca

SEQ ID NO: 310345 - DNA, 15 bp, Homo sapiens
acaaatctggccacc

SEQ ID NO: 310346 - DNA, 15 bp, Homo sapiens
gacaaatctggccac

SEQ ID NO: 310347 - DNA, 15 bp, Homo sapiens
agacaaatctggcca

SEQ ID NO: 310348 - DNA, 15 bp, Homo sapiens
gagacaaatctggcc

SEQ ID NO: 310349 - DNA, 15 bp, Homo sapiens
tgagacaaatctggc

SEQ ID NO: 310350 - DNA, 15 bp, Homo sapiens
gtgagacaaatctgg

SEQ ID NO: 310351 - DNA, 15 bp, Homo sapiens
tgtgagacaaatctg

SEQ ID NO: 310352 - DNA, 15 bp, Homo sapiens
ctgtgagacaaatct

SEQ ID NO: 310353 - DNA, 15 bp, Homo sapiens
cctgtgagacaaatc

SEQ ID NO: 310354 - DNA, 15 bp, Homo sapiens
gcctgtgagacaaat

SEQ ID NO: 310355 - DNA, 15 bp, Homo sapiens
agcctgtgagacaaa

SEQ ID NO: 310356 - DNA, 15 bp, Homo sapiens
cagcctgtgagacaa

SEQ ID NO: 310357 - DNA, 15 bp, Homo sapiens
acagcctgtgagaca

SEQ ID NO: 310358 - DNA, 15 bp, Homo sapiens
tacagcctgtgagac

SEQ ID NO: 310359 - DNA, 15 bp, Homo sapiens
ctacagcctgtgaga

SEQ ID NO: 310360 - DNA, 15 bp, Homo sapiens
actacagcctgtgag

SEQ ID NO: 310361 - DNA, 15 bp, Homo sapiens
aactacagcctgtga

SEQ ID NO: 310362 - DNA, 15 bp, Homo sapiens
aaactacagcctgtg

SEQ ID NO: 310363 - DNA, 15 bp, Homo sapiens
taaactacagcctgt

SEQ ID NO: 310364 - DNA, 15 bp, Homo sapiens
gtaaactacagcctg

SEQ ID NO: 310365 - DNA, 15 bp, Homo sapiens
ggtaaactacagcct

SEQ ID NO: 310366 - DNA, 15 bp, Homo sapiens
tggtaaactacagcc

SEQ ID NO: 310367 - DNA, 15 bp, Homo sapiens
ttggtaaactacagc

SEQ ID NO: 310368 - DNA, 15 bp, Homo sapiens
gttggtaaactacag

SEQ ID NO: 310369 - DNA, 15 bp, Homo sapiens
ggttggtaaactaca

SEQ ID NO: 310370 - DNA, 15 bp, Homo sapiens
gggttggtaaactac

SEQ ID NO: 310371 - DNA, 15 bp, Homo sapiens
ggggttggtaaacta

SEQ ID NO: 310372 - DNA, 15 bp, Homo sapiens
aggggttggtaaact

SEQ ID NO: 310373 - DNA, 15 bp, Homo sapiens
caggggttggtaaac

SEQ ID NO: 310374 - DNA, 15 bp, Homo sapiens
gcaggggttggtaaa

SEQ ID NO: 310375 - DNA, 15 bp, Homo sapiens
agcaggggttggtaa

SEQ ID NO: 310376 - DNA, 15 bp, Homo sapiens
tagcaggggttggta

SEQ ID NO: 310377 - DNA, 15 bp, Homo sapiens
atagcaggggttggt

SEQ ID NO: 310378 - DNA, 15 bp, Homo sapiens
tatagcaggggttgg

SEQ ID NO: 310379 - DNA, 15 bp, Homo sapiens
ctatagcaggggttg

SEQ ID NO: 310380 - DNA, 15 bp, Homo sapiens
cctatagcaggggtt

SEQ ID NO: 310381 - DNA, 15 bp, Homo sapiens
tcctatagcaggggt

SEQ ID NO: 310382 - DNA, 15 bp, Homo sapiens
ctcctatagcagggg

SEQ ID NO: 310383 - DNA, 15 bp, Homo sapiens
cctcctatagcaggg

SEQ ID NO: 310384 - DNA, 15 bp, Homo sapiens
tcctcctatagcagg

SEQ ID NO: 310385 - DNA, 15 bp, Homo sapiens
ttcctcctatagcag

SEQ ID NO: 310386 - DNA, 15 bp, Homo sapiens
cttcctcctatagca

SEQ ID NO: 310387 - DNA, 15 bp, Homo sapiens
tcttcctcctatagc

SEQ ID NO: 310388 - DNA, 15 bp, Homo sapiens
atcttcctcctatag

SEQ ID NO: 310389 - DNA, 15 bp, Homo sapiens
aatcttcctcctata

SEQ ID NO: 310390 - DNA, 15 bp, Homo sapiens
taatcttcctcctat

SEQ ID NO: 310391 - DNA, 15 bp, Homo sapiens
ttaatcttcctccta

SEQ ID NO: 310392 - DNA, 15 bp, Homo sapiens
attaatcttcctcct

SEQ ID NO: 310393 - DNA, 15 bp, Homo sapiens
tattaatcttcctcc

SEQ ID NO: 310394 - DNA, 15 bp, Homo sapiens
ctattaatcttcctc

SEQ ID NO: 310395 - DNA, 15 bp, Homo sapiens
cctattaatcttcct

SEQ ID NO: 310396 - DNA, 15 bp, Homo sapiens
ccctattaatcttcc

SEQ ID NO: 310397 - DNA, 15 bp, Homo sapiens
accctattaatcttc

SEQ ID NO: 310398 - DNA, 15 bp, Homo sapiens
taccctattaatctt

SEQ ID NO: 310399 - DNA, 15 bp, Homo sapiens
ttaccctattaatct

SEQ ID NO: 310400 - DNA, 15 bp, Homo sapiens
tttaccctattaatc

SEQ ID NO: 310401 - DNA, 15 bp, Homo sapiens
ctttaccctattaat

SEQ ID NO: 310402 - DNA, 15 bp, Homo sapiens
tctttaccctattaa

SEQ ID NO: 310403 - DNA, 15 bp, Homo sapiens
atctttaccctatta

SEQ ID NO: 310404 - DNA, 15 bp, Homo sapiens
aatctttaccctatt

SEQ ID NO: 310405 - DNA, 15 bp, Homo sapiens
aaatctttaccctat

SEQ ID NO: 310406 - DNA, 15 bp, Homo sapiens
aaaatctttacccta

SEQ ID NO: 310407 - DNA, 15 bp, Homo sapiens
taaaatctttaccct

SEQ ID NO: 310408 - DNA, 15 bp, Homo sapiens
ataaaatctttaccc

SEQ ID NO: 310409 - DNA, 15 bp, Homo sapiens
cataaaatctttacc

SEQ ID NO: 310410 - DNA, 15 bp, Homo sapiens
tcataaaatctttac

SEQ ID NO: 310411 - DNA, 15 bp, Homo sapiens
ctcataaaatcttta

SEQ ID NO: 310412 - DNA, 15 bp, Homo sapiens
cctcataaaatcttt

SEQ ID NO: 310413 - DNA, 15 bp, Homo sapiens
acctcataaaatctt

SEQ ID NO: 310414 - DNA, 15 bp, Homo sapiens
aacctcataaaatct

SEQ ID NO: 310415 - DNA, 15 bp, Homo sapiens
aaacctcataaaatc

SEQ ID NO: 310416 - DNA, 15 bp, Homo sapiens
aaaacctcataaaat

SEQ ID NO: 310417 - DNA, 15 bp, Homo sapiens
aaaaacctcataaaa

SEQ ID NO: 310418 - DNA, 15 bp, Homo sapiens
taaaaacctcataaa

SEQ ID NO: 310419 - DNA, 15 bp, Homo sapiens
ttaaaaacctcataa

SEQ ID NO: 310420 - DNA, 15 bp, Homo sapiens
attaaaaacctcata

SEQ ID NO: 310421 - DNA, 15 bp, Homo sapiens
aattaaaaacctcat

SEQ ID NO: 310422 - DNA, 15 bp, Homo sapiens
caattaaaaacctca

SEQ ID NO: 310423 - DNA, 15 bp, Homo sapiens
tcaattaaaaacctc

SEQ ID NO: 310424 - DNA, 15 bp, Homo sapiens
atcaattaaaaacct

SEQ ID NO: 310425 - DNA, 15 bp, Homo sapiens
aatcaattaaaaacc

SEQ ID NO: 310426 - DNA, 15 bp, Homo sapiens
gaatcaattaaaaac

SEQ ID NO: 310427 - DNA, 15 bp, Homo sapiens
tgaatcaattaaaaa

SEQ ID NO: 310428 - DNA, 15 bp, Homo sapiens
atgaatcaattaaaa

SEQ ID NO: 310429 - DNA, 15 bp, Homo sapiens
aatgaatcaattaaa

SEQ ID NO: 310430 - DNA, 15 bp, Homo sapiens
aaatgaatcaattaa

SEQ ID NO: 310431 - DNA, 15 bp, Homo sapiens
taaatgaatcaatta

SEQ ID NO: 310432 - DNA, 15 bp, Homo sapiens
ataaatgaatcaatt

SEQ ID NO: 310433 - DNA, 15 bp, Homo sapiens
gataaatgaatcaat

SEQ ID NO: 310434 - DNA, 15 bp, Homo sapiens
ggataaatgaatcaa

SEQ ID NO: 310435 - DNA, 15 bp, Homo sapiens
tggataaatgaatca

SEQ ID NO: 310436 - DNA, 15 bp, Homo sapiens
atggataaatgaatc

SEQ ID NO: 310437 - DNA, 15 bp, Homo sapiens
tatggataaatgaat

SEQ ID NO: 310438 - DNA, 15 bp, Homo sapiens
atatggataaatgaa

SEQ ID NO: 310439 - DNA, 15 bp, Homo sapiens
catatggataaatga

SEQ ID NO: 310440 - DNA, 15 bp, Homo sapiens
acatatggataaatg

SEQ ID NO: 310441 - DNA, 15 bp, Homo sapiens
aacatatggataaat

SEQ ID NO: 310442 - DNA, 15 bp, Homo sapiens
aaacatatggataaa

SEQ ID NO: 310443 - DNA, 15 bp, Homo sapiens
caaacatatggataa

SEQ ID NO: 310444 - DNA, 15 bp, Homo sapiens
tcaaacatatggata

SEQ ID NO: 310445 - DNA, 15 bp, Homo sapiens
ctcaaacatatggat

SEQ ID NO: 310446 - DNA, 15 bp, Homo sapiens
gctcaaacatatgga

SEQ ID NO: 310447 - DNA, 15 bp, Homo sapiens
tgctcaaacatatgg

SEQ ID NO: 310448 - DNA, 15 bp, Homo sapiens
atgctcaaacatatg

SEQ ID NO: 310449 - DNA, 15 bp, Homo sapiens
aatgctcaaacatat

SEQ ID NO: 310450 - DNA, 15 bp, Homo sapiens
aaatgctcaaacata

SEQ ID NO: 310451 - DNA, 15 bp, Homo sapiens
taaatgctcaaacat

SEQ ID NO: 310452 - DNA, 15 bp, Homo sapiens
gtaaatgctcaaaca

SEQ ID NO: 310453 - DNA, 15 bp, Homo sapiens
agtaaatgctcaaac

SEQ ID NO: 310454 - DNA, 15 bp, Homo sapiens
aagtaaatgctcaaa

SEQ ID NO: 310455 - DNA, 15 bp, Homo sapiens
taagtaaatgctcaa

SEQ ID NO: 310456 - DNA, 15 bp, Homo sapiens
gtaagtaaatgctca

SEQ ID NO: 310457 - DNA, 15 bp, Homo sapiens
agtaagtaaatgctc

SEQ ID NO: 310458 - DNA, 15 bp, Homo sapiens
gagtaagtaaatgct

SEQ ID NO: 310459 - DNA, 15 bp, Homo sapiens
agagtaagtaaatgc

SEQ ID NO: 310460 - DNA, 15 bp, Homo sapiens
tagagtaagtaaatg

SEQ ID NO: 310461 - DNA, 15 bp, Homo sapiens
atagagtaagtaaat

SEQ ID NO: 310462 - DNA, 15 bp, Homo sapiens
catagagtaagtaaa

SEQ ID NO: 310463 - DNA, 15 bp, Homo sapiens
acatagagtaagtaa

SEQ ID NO: 310464 - DNA, 15 bp, Homo sapiens
gacatagagtaagta

SEQ ID NO: 310465 - DNA, 15 bp, Homo sapiens
tgacatagagtaagt

SEQ ID NO: 310466 - DNA, 15 bp, Homo sapiens
ctgacatagagtaag

SEQ ID NO: 310467 - DNA, 15 bp, Homo sapiens
cctgacatagagtaa

SEQ ID NO: 310468 - DNA, 15 bp, Homo sapiens
gcctgacatagagta

SEQ ID NO: 310469 - DNA, 15 bp, Homo sapiens
agcctgacatagagt

SEQ ID NO: 310470 - DNA, 15 bp, Homo sapiens
gagcctgacatagag

SEQ ID NO: 310471 - DNA, 15 bp, Homo sapiens
agagcctgacataga

SEQ ID NO: 310472 - DNA, 15 bp, Homo sapiens
cagagcctgacatag

SEQ ID NO: 310473 - DNA, 15 bp, Homo sapiens
acagagcctgacata

SEQ ID NO: 310474 - DNA, 15 bp, Homo sapiens
tacagagcctgacat

SEQ ID NO: 310475 - DNA, 15 bp, Homo sapiens
ctacagagcctgaca

SEQ ID NO: 310476 - DNA, 15 bp, Homo sapiens
gctacagagcctgac

SEQ ID NO: 310477 - DNA, 15 bp, Homo sapiens
tgctacagagcctga

SEQ ID NO: 310478 - DNA, 15 bp, Homo sapiens
ctgctacagagcctg

SEQ ID NO: 310479 - DNA, 15 bp, Homo sapiens
tctgctacagagcct

SEQ ID NO: 310480 - DNA, 15 bp, Homo sapiens
gtctgctacagagcc

SEQ ID NO: 310481 - DNA, 15 bp, Homo sapiens
tgtctgctacagagc

SEQ ID NO: 310482 - DNA, 15 bp, Homo sapiens
gtgtctgctacagag

SEQ ID NO: 310483 - DNA, 15 bp, Homo sapiens
agtgtctgctacaga

SEQ ID NO: 310484 - DNA, 15 bp, Homo sapiens
cagtgtctgctacag

SEQ ID NO: 310485 - DNA, 15 bp, Homo sapiens
ccagtgtctgctaca

SEQ ID NO: 310486 - DNA, 15 bp, Homo sapiens
tccagtgtctgctac

SEQ ID NO: 310487 - DNA, 15 bp, Homo sapiens
gtccagtgtctgcta

SEQ ID NO: 310488 - DNA, 15 bp, Homo sapiens
tgtccagtgtctgct

SEQ ID NO: 310489 - DNA, 15 bp, Homo sapiens
atgtccagtgtctgc

SEQ ID NO: 310490 - DNA, 15 bp, Homo sapiens
tatgtccagtgtctg

SEQ ID NO: 310491 - DNA, 15 bp, Homo sapiens
gtatgtccagtgtct

SEQ ID NO: 310492 - DNA, 15 bp, Homo sapiens
tgtatgtccagtgtc

SEQ ID NO: 310493 - DNA, 15 bp, Homo sapiens
ttgtatgtccagtgt

SEQ ID NO: 310494 - DNA, 15 bp, Homo sapiens
tttgtatgtccagtg

SEQ ID NO: 310495 - DNA, 15 bp, Homo sapiens
gtttgtatgtccagt

SEQ ID NO: 310496 - DNA, 15 bp, Homo sapiens
tgtttgtatgtccag

SEQ ID NO: 310497 - DNA, 15 bp, Homo sapiens
ctgtttgtatgtcca

SEQ ID NO: 310498 - DNA, 15 bp, Homo sapiens
tctgtttgtatgtcc

SEQ ID NO: 310499 - DNA, 15 bp, Homo sapiens
ttctgtttgtatgtc

SEQ ID NO: 310500 - DNA, 15 bp, Homo sapiens
tttctgtttgtatgt

SEQ ID NO: 310501 - DNA, 15 bp, Homo sapiens
atttctgtttgtatg

SEQ ID NO: 310502 - DNA, 15 bp, Homo sapiens
tatttctgtttgtat

SEQ ID NO: 310503 - DNA, 15 bp, Homo sapiens
atatttctgtttgta

SEQ ID NO: 310504 - DNA, 15 bp, Homo sapiens
aatatttctgtttgt

SEQ ID NO: 310505 - DNA, 15 bp, Homo sapiens
taatatttctgtttg

SEQ ID NO: 310506 - DNA, 15 bp, Homo sapiens
ctaatatttctgttt

SEQ ID NO: 310507 - DNA, 15 bp, Homo sapiens
actaatatttctgtt

SEQ ID NO: 310508 - DNA, 15 bp, Homo sapiens
gactaatatttctgt

SEQ ID NO: 310509 - DNA, 15 bp, Homo sapiens
tgactaatatttctg

SEQ ID NO: 310510 - DNA, 15 bp, Homo sapiens
gtgactaatatttct

SEQ ID NO: 310511 - DNA, 15 bp, Homo sapiens
ggtgactaatatttc

SEQ ID NO: 310512 - DNA, 15 bp, Homo sapiens
tggtgactaatattt

SEQ ID NO: 310513 - DNA, 15 bp, Homo sapiens
ttggtgactaatatt

SEQ ID NO: 310514 - DNA, 15 bp, Homo sapiens
attggtgactaatat

SEQ ID NO: 310515 - DNA, 15 bp, Homo sapiens
tattggtgactaata

SEQ ID NO: 310516 - DNA, 15 bp, Homo sapiens
atattggtgactaat

SEQ ID NO: 310517 - DNA, 15 bp, Homo sapiens
gatattggtgactaa

SEQ ID NO: 310518 - DNA, 15 bp, Homo sapiens
tgatattggtgacta

SEQ ID NO: 310519 - DNA, 15 bp, Homo sapiens
ttgatattggtgact

SEQ ID NO: 310520 - DNA, 15 bp, Homo sapiens
cttgatattggtgac

SEQ ID NO: 310521 - DNA, 15 bp, Homo sapiens
tcttgatattggtga

SEQ ID NO: 310522 - DNA, 15 bp, Homo sapiens
atcttgatattggtg

SEQ ID NO: 310523 - DNA, 15 bp, Homo sapiens
catcttgatattggt

SEQ ID NO: 310524 - DNA, 15 bp, Homo sapiens
tcatcttgatattgg

SEQ ID NO: 310525 - DNA, 15 bp, Homo sapiens
ttcatcttgatattg

SEQ ID NO: 310526 - DNA, 15 bp, Homo sapiens
tttcatcttgatatt

SEQ ID NO: 310527 - DNA, 15 bp, Homo sapiens
atttcatcttgatat

SEQ ID NO: 310528 - DNA, 15 bp, Homo sapiens
gatttcatcttgata

SEQ ID NO: 310529 - DNA, 15 bp, Homo sapiens
tgatttcatcttgat

SEQ ID NO: 310530 - DNA, 15 bp, Homo sapiens
atgatttcatcttga

SEQ ID NO: 310531 - DNA, 15 bp, Homo sapiens
aatgatttcatcttg

SEQ ID NO: 310532 - DNA, 15 bp, Homo sapiens
taatgatttcatctt

SEQ ID NO: 310533 - DNA, 15 bp, Homo sapiens
ataatgatttcatct

SEQ ID NO: 310534 - DNA, 15 bp, Homo sapiens
gataatgatttcatc

SEQ ID NO: 310535 - DNA, 15 bp, Homo sapiens
ggataatgatttcat

SEQ ID NO: 310536 - DNA, 15 bp, Homo sapiens
aggataatgatttca

SEQ ID NO: 310537 - DNA, 15 bp, Homo sapiens
aaggataatgatttc

SEQ ID NO: 310538 - DNA, 15 bp, Homo sapiens
caaggataatgattt

SEQ ID NO: 310539 - DNA, 15 bp, Homo sapiens
tcaaggataatgatt

SEQ ID NO: 310540 - DNA, 15 bp, Homo sapiens
atcaaggataatgat

SEQ ID NO: 310541 - DNA, 15 bp, Homo sapiens
catcaaggataatga

SEQ ID NO: 310542 - DNA, 15 bp, Homo sapiens
ccatcaaggataatg

SEQ ID NO: 310543 - DNA, 15 bp, Homo sapiens
cccatcaaggataat

SEQ ID NO: 310544 - DNA, 15 bp, Homo sapiens
acccatcaaggataa

SEQ ID NO: 310545 - DNA, 15 bp, Homo sapiens
gacccatcaaggata

SEQ ID NO: 310546 - DNA, 15 bp, Homo sapiens
tgacccatcaaggat

SEQ ID NO: 310547 - DNA, 15 bp, Homo sapiens
ctgacccatcaagga

SEQ ID NO: 310548 - DNA, 15 bp, Homo sapiens
tctgacccatcaagg

SEQ ID NO: 310549 - DNA, 15 bp, Homo sapiens
atctgacccatcaag

SEQ ID NO: 310550 - DNA, 15 bp, Homo sapiens
gatctgacccatcaa

SEQ ID NO: 310551 - DNA, 15 bp, Homo sapiens
agatctgacccatca

SEQ ID NO: 310552 - DNA, 15 bp, Homo sapiens
aagatctgacccatc

SEQ ID NO: 310553 - DNA, 15 bp, Homo sapiens
gaagatctgacccat

SEQ ID NO: 310554 - DNA, 15 bp, Homo sapiens
ggaagatctgaccca

SEQ ID NO: 310555 - DNA, 15 bp, Homo sapiens
cggaagatctgaccc

SEQ ID NO: 310556 - DNA, 15 bp, Homo sapiens
tcggaagatctgacc

SEQ ID NO: 310557 - DNA, 15 bp, Homo sapiens
ctcggaagatctgac

SEQ ID NO: 310558 - DNA, 15 bp, Homo sapiens
cctcggaagatctga

SEQ ID NO: 310559 - DNA, 15 bp, Homo sapiens
tcctcggaagatctg

SEQ ID NO: 310560 - DNA, 15 bp, Homo sapiens
atcctcggaagatct

SEQ ID NO: 310561 - DNA, 15 bp, Homo sapiens
catcctcggaagatc

SEQ ID NO: 310562 - DNA, 15 bp, Homo sapiens
tcatcctcggaagat

SEQ ID NO: 310563 - DNA, 15 bp, Homo sapiens
ctcatcctcggaaga

SEQ ID NO: 310564 - DNA, 15 bp, Homo sapiens
actcatcctcggaag

SEQ ID NO: 310565 - DNA, 15 bp, Homo sapiens
gactcatcctcggaa

SEQ ID NO: 310566 - DNA, 15 bp, Homo sapiens
tgactcatcctcgga

SEQ ID NO: 310567 - DNA, 15 bp, Homo sapiens
gtgactcatcctcgg

SEQ ID NO: 310568 - DNA, 15 bp, Homo sapiens
cgtgactcatcctcg

SEQ ID NO: 310569 - DNA, 15 bp, Homo sapiens
tcgtgactcatcctc

SEQ ID NO: 310570 - DNA, 15 bp, Homo sapiens
gtcgtgactcatcct

SEQ ID NO: 310571 - DNA, 15 bp, Homo sapiens
ggtcgtgactcatcc

SEQ ID NO: 310572 - DNA, 15 bp, Homo sapiens
cggtcgtgactcatc

SEQ ID NO: 310573 - DNA, 15 bp, Homo sapiens
acggtcgtgactcat

SEQ ID NO: 310574 - DNA, 15 bp, Homo sapiens
cacggtcgtgactca

SEQ ID NO: 310575 - DNA, 15 bp, Homo sapiens
acacggtcgtgactc

SEQ ID NO: 310576 - DNA, 15 bp, Homo sapiens
tacacggtcgtgact

SEQ ID NO: 310577 - DNA, 15 bp, Homo sapiens
ctacacggtcgtgac

SEQ ID NO: 310578 - DNA, 15 bp, Homo sapiens
cctacacggtcgtga

SEQ ID NO: 310579 - DNA, 15 bp, Homo sapiens
tcctacacggtcgtg

SEQ ID NO: 310580 - DNA, 15 bp, Homo sapiens
ttcctacacggtcgt

SEQ ID NO: 310581 - DNA, 15 bp, Homo sapiens
tttcctacacggtcg

SEQ ID NO: 310582 - DNA, 15 bp, Homo sapiens
atttcctacacggtc

SEQ ID NO: 310583 - DNA, 15 bp, Homo sapiens
tatttcctacacggt

SEQ ID NO: 310584 - DNA, 15 bp, Homo sapiens
atatttcctacacgg

SEQ ID NO: 310585 - DNA, 15 bp, Homo sapiens
catatttcctacacg

SEQ ID NO: 310586 - DNA, 15 bp, Homo sapiens
tcatatttcctacac

SEQ ID NO: 310587 - DNA, 15 bp, Homo sapiens
ttcatatttcctaca

SEQ ID NO: 310588 - DNA, 15 bp, Homo sapiens
gttcatatttcctac

SEQ ID NO: 310589 - DNA, 15 bp, Homo sapiens
ggttcatatttccta

SEQ ID NO: 310590 - DNA, 15 bp, Homo sapiens
gggttcatatttcct

SEQ ID NO: 310591 - DNA, 15 bp, Homo sapiens
ggggttcatatttcc

SEQ ID NO: 310592 - DNA, 15 bp, Homo sapiens
cggggttcatatttc

SEQ ID NO: 310593 - DNA, 15 bp, Homo sapiens
gcggggttcatattt

SEQ ID NO: 310594 - DNA, 15 bp, Homo sapiens
tgcggggttcatatt

SEQ ID NO: 310595 - DNA, 15 bp, Homo sapiens
ctgcggggttcatat

SEQ ID NO: 310596 - DNA, 15 bp, Homo sapiens
actgcggggttcata

SEQ ID NO: 310597 - DNA, 15 bp, Homo sapiens
gactgcggggttcat

SEQ ID NO: 310598 - DNA, 15 bp, Homo sapiens
agactgcggggttca

SEQ ID NO: 310599 - DNA, 15 bp, Homo sapiens
cagactgcggggttc

SEQ ID NO: 310600 - DNA, 15 bp, Homo sapiens
acagactgcggggtt

SEQ ID NO: 310601 - DNA, 15 bp, Homo sapiens
aacagactgcggggt

SEQ ID NO: 310602 - DNA, 15 bp, Homo sapiens
aaacagactgcgggg

SEQ ID NO: 310603 - DNA, 15 bp, Homo sapiens
taaacagactgcggg

SEQ ID NO: 310604 - DNA, 15 bp, Homo sapiens
ttaaacagactgcgg

SEQ ID NO: 310605 - DNA, 15 bp, Homo sapiens
attaaacagactgcg

SEQ ID NO: 310606 - DNA, 15 bp, Homo sapiens
aattaaacagactgc

SEQ ID NO: 310607 - DNA, 15 bp, Homo sapiens
caattaaacagactg

SEQ ID NO: 310608 - DNA, 15 bp, Homo sapiens
tcaattaaacagact

SEQ ID NO: 310609 - DNA, 15 bp, Homo sapiens
atcaattaaacagac

SEQ ID NO: 310610 - DNA, 15 bp, Homo sapiens
catcaattaaacaga

SEQ ID NO: 310611 - DNA, 15 bp, Homo sapiens
acatcaattaaacag

SEQ ID NO: 310612 - DNA, 15 bp, Homo sapiens
tacatcaattaaaca

SEQ ID NO: 310613 - DNA, 15 bp, Homo sapiens
atacatcaattaaac

SEQ ID NO: 310614 - DNA, 15 bp, Homo sapiens
catacatcaattaaa

SEQ ID NO: 310615 - DNA, 15 bp, Homo sapiens
gcatacatcaattaa

SEQ ID NO: 310616 - DNA, 15 bp, Homo sapiens
agcatacatcaatta

SEQ ID NO: 310617 - DNA, 15 bp, Homo sapiens
tagcatacatcaatt

SEQ ID NO: 310618 - DNA, 15 bp, Homo sapiens
atagcatacatcaat

SEQ ID NO: 310619 - DNA, 15 bp, Homo sapiens
catagcatacatcaa

SEQ ID NO: 310620 - DNA, 15 bp, Homo sapiens
gcatagcatacatca

SEQ ID NO: 310621 - DNA, 15 bp, Homo sapiens
tgcatagcatacatc

SEQ ID NO: 310622 - DNA, 15 bp, Homo sapiens
gtgcatagcatacat

SEQ ID NO: 310623 - DNA, 15 bp, Homo sapiens
agtgcatagcataca

SEQ ID NO: 310624 - DNA, 15 bp, Homo sapiens
gagtgcatagcatac

SEQ ID NO: 310625 - DNA, 15 bp, Homo sapiens
agagtgcatagcata

SEQ ID NO: 310626 - DNA, 15 bp, Homo sapiens
tagagtgcatagcat

SEQ ID NO: 310627 - DNA, 15 bp, Homo sapiens
ttagagtgcatagca

SEQ ID NO: 310628 - DNA, 15 bp, Homo sapiens
tttagagtgcatagc

SEQ ID NO: 310629 - DNA, 15 bp, Homo sapiens
ttttagagtgcatag

SEQ ID NO: 310630 - DNA, 15 bp, Homo sapiens
attttagagtgcata

SEQ ID NO: 310631 - DNA, 15 bp, Homo sapiens
aattttagagtgcat

SEQ ID NO: 310632 - DNA, 15 bp, Homo sapiens
taattttagagtgca

SEQ ID NO: 310633 - DNA, 15 bp, Homo sapiens
ttaattttagagtgc

SEQ ID NO: 310634 - DNA, 15 bp, Homo sapiens
attaattttagagtg

SEQ ID NO: 310635 - DNA, 15 bp, Homo sapiens
aattaattttagagt

SEQ ID NO: 310636 - DNA, 15 bp, Homo sapiens
caattaattttagag

SEQ ID NO: 310637 - DNA, 15 bp, Homo sapiens
ccaattaattttaga

SEQ ID NO: 310638 - DNA, 15 bp, Homo sapiens
tccaattaattttag

SEQ ID NO: 310639 - DNA, 15 bp, Homo sapiens
tctccaattaatttt

SEQ ID NO: 310640 - DNA, 15 bp, Homo sapiens
atctccaattaattt

SEQ ID NO: 310641 - DNA, 15 bp, Homo sapiens
aatctccaattaatt

SEQ ID NO: 310642 - DNA, 15 bp, Homo sapiens
aaatctccaattaat

SEQ ID NO: 310643 - DNA, 15 bp, Homo sapiens
gaaatctccaattaa

SEQ ID NO: 310644 - DNA, 15 bp, Homo sapiens
agaaatctccaatta

SEQ ID NO: 310645 - DNA, 15 bp, Homo sapiens
tagaaatctccaatt

SEQ ID NO: 310646 - DNA, 15 bp, Homo sapiens
ctagaaatctccaat

SEQ ID NO: 310647 - DNA, 15 bp, Homo sapiens
tctagaaatctccaa

SEQ ID NO: 310648 - DNA, 15 bp, Homo sapiens
atctagaaatctcca

SEQ ID NO: 310649 - DNA, 15 bp, Homo sapiens
tatctagaaatctcc

SEQ ID NO: 310650 - DNA, 15 bp, Homo sapiens
ttatctagaaatctc

SEQ ID NO: 310651 - DNA, 15 bp, Homo sapiens
tttatctagaaatct

SEQ ID NO: 310652 - DNA, 15 bp, Homo sapiens
ttttatctagaaatc

SEQ ID NO: 310653 - DNA, 15 bp, Homo sapiens
gttttatctagaaat

SEQ ID NO: 310654 - DNA, 15 bp, Homo sapiens
agttttatctagaaa

SEQ ID NO: 310655 - DNA, 15 bp, Homo sapiens
aagttttatctagaa

SEQ ID NO: 310656 - DNA, 15 bp, Homo sapiens
aaagttttatctaga

SEQ ID NO: 310657 - DNA, 15 bp, Homo sapiens
gaaagttttatctag

SEQ ID NO: 310658 - DNA, 15 bp, Homo sapiens
ggaaagttttatcta

SEQ ID NO: 310659 - DNA, 15 bp, Homo sapiens
tggaaagttttatct

SEQ ID NO: 310660 - DNA, 15 bp, Homo sapiens
ttggaaagttttatc

SEQ ID NO: 310661 - DNA, 15 bp, Homo sapiens
tttggaaagttttat

SEQ ID NO: 310662 - DNA, 15 bp, Homo sapiens
atttggaaagtttta

SEQ ID NO: 310663 - DNA, 15 bp, Homo sapiens
catttggaaagtttt

SEQ ID NO: 310664 - DNA, 15 bp, Homo sapiens
acatttggaaagttt

SEQ ID NO: 310665 - DNA, 15 bp, Homo sapiens
gacatttggaaagtt

SEQ ID NO: 310666 - DNA, 15 bp, Homo sapiens
tgacatttggaaagt

SEQ ID NO: 310667 - DNA, 15 bp, Homo sapiens
gtgacatttggaaag

SEQ ID NO: 310668 - DNA, 15 bp, Homo sapiens
tgtgacatttggaaa

SEQ ID NO: 310669 - DNA, 15 bp, Homo sapiens
ttgtgacatttggaa

SEQ ID NO: 310670 - DNA, 15 bp, Homo sapiens
cttgtgacatttgga

SEQ ID NO: 310671 - DNA, 15 bp, Homo sapiens
acttgtgacatttgg

SEQ ID NO: 310672 - DNA, 15 bp, Homo sapiens
tacttgtgacatttg

SEQ ID NO: 310673 - DNA, 15 bp, Homo sapiens
atacttgtgacattt

SEQ ID NO: 310674 - DNA, 15 bp, Homo sapiens
gatacttgtgacatt

SEQ ID NO: 310675 - DNA, 15 bp, Homo sapiens
ggatacttgtgacat

SEQ ID NO: 310676 - DNA, 15 bp, Homo sapiens
aggatacttgtgaca

SEQ ID NO: 310677 - DNA, 15 bp, Homo sapiens
aaggatacttgtgac

SEQ ID NO: 310678 - DNA, 15 bp, Homo sapiens
gaaggatacttgtga

SEQ ID NO: 310679 - DNA, 15 bp, Homo sapiens
ggaaggatacttgtg

SEQ ID NO: 310680 - DNA, 15 bp, Homo sapiens
tggaaggatacttgt

SEQ ID NO: 310681 - DNA, 15 bp, Homo sapiens
ctggaaggatacttg

SEQ ID NO: 310682 - DNA, 15 bp, Homo sapiens
gctggaaggatactt

SEQ ID NO: 310683 - DNA, 15 bp, Homo sapiens
tgctggaaggatact

SEQ ID NO: 310684 - DNA, 15 bp, Homo sapiens
atgctggaaggatac

SEQ ID NO: 310685 - DNA, 15 bp, Homo sapiens
aatgctggaaggata

SEQ ID NO: 310686 - DNA, 15 bp, Homo sapiens
aaatgctggaaggat

SEQ ID NO: 310687 - DNA, 15 bp, Homo sapiens
gaaatgctggaagga

SEQ ID NO: 310688 - DNA, 15 bp, Homo sapiens
tgaaatgctggaagg

SEQ ID NO: 310689 - DNA, 15 bp, Homo sapiens
atgaaatgctggaag

SEQ ID NO: 310690 - DNA, 15 bp, Homo sapiens
tatgaaatgctggaa

SEQ ID NO: 310691 - DNA, 15 bp, Homo sapiens
atatgaaatgctgga

SEQ ID NO: 310692 - DNA, 15 bp, Homo sapiens
aatatgaaatgctgg

SEQ ID NO: 310693 - DNA, 15 bp, Homo sapiens
aaatatgaaatgctg

SEQ ID NO: 310694 - DNA, 15 bp, Homo sapiens
taaatatgaaatgct

SEQ ID NO: 310695 - DNA, 15 bp, Homo sapiens
gtaaatatgaaatgc

SEQ ID NO: 310696 - DNA, 15 bp, Homo sapiens
tgtaaatatgaaatg

SEQ ID NO: 310697 - DNA, 15 bp, Homo sapiens
ctgtaaatatgaaat

SEQ ID NO: 310698 - DNA, 15 bp, Homo sapiens
tctgtaaatatgaaa

SEQ ID NO: 310699 - DNA, 15 bp, Homo sapiens
gtctgtaaatatgaa

SEQ ID NO: 310700 - DNA, 15 bp, Homo sapiens
agtctgtaaatatga

SEQ ID NO: 310701 - DNA, 15 bp, Homo sapiens
cagtctgtaaatatg

SEQ ID NO: 310702 - DNA, 15 bp, Homo sapiens
ccagtctgtaaatat

SEQ ID NO: 310703 - DNA, 15 bp, Homo sapiens
tccagtctgtaaata

SEQ ID NO: 310704 - DNA, 15 bp, Homo sapiens
ttccagtctgtaaat

SEQ ID NO: 310705 - DNA, 15 bp, Homo sapiens
tttccagtctgtaaa

SEQ ID NO: 310706 - DNA, 15 bp, Homo sapiens
ttttccagtctgtaa

SEQ ID NO: 310707 - DNA, 15 bp, Homo sapiens
attttccagtctgta

SEQ ID NO: 310708 - DNA, 15 bp, Homo sapiens
gattttccagtctgt

SEQ ID NO: 310709 - DNA, 15 bp, Homo sapiens
tgattttccagtctg

SEQ ID NO: 310710 - DNA, 15 bp, Homo sapiens
ttgattttccagtct

SEQ ID NO: 310711 - DNA, 15 bp, Homo sapiens
attgattttccagtc

SEQ ID NO: 310712 - DNA, 15 bp, Homo sapiens
cattgattttccagt

SEQ ID NO: 310713 - DNA, 15 bp, Homo sapiens
ccattgattttccag

SEQ ID NO: 310714 - DNA, 15 bp, Homo sapiens
tccattgattttcca

SEQ ID NO: 310715 - DNA, 15 bp, Homo sapiens
ctccattgattttcc

SEQ ID NO: 310716 - DNA, 15 bp, Homo sapiens
tctccattgattttc

SEQ ID NO: 310717 - DNA, 15 bp, Homo sapiens
atctccattgatttt

SEQ ID NO: 310718 - DNA, 15 bp, Homo sapiens
catctccattgattt

SEQ ID NO: 310719 - DNA, 15 bp, Homo sapiens
ccatctccattgatt

SEQ ID NO: 310720 - DNA, 15 bp, Homo sapiens
tccatctccattgat

SEQ ID NO: 310721 - DNA, 15 bp, Homo sapiens
ttccatctccattga

SEQ ID NO: 310722 - DNA, 15 bp, Homo sapiens
attccatctccattg

SEQ ID NO: 310723 - DNA, 15 bp, Homo sapiens
gattccatctccatt

SEQ ID NO: 310724 - DNA, 15 bp, Homo sapiens
tgattccatctccat

SEQ ID NO: 310725 - DNA, 15 bp, Homo sapiens
atgattccatctcca

SEQ ID NO: 310726 - DNA, 15 bp, Homo sapiens
aatgattccatctcc

SEQ ID NO: 310727 - DNA, 15 bp, Homo sapiens
gaatgattccatctc

SEQ ID NO: 310728 - DNA, 15 bp, Homo sapiens
agaatgattccatct

SEQ ID NO: 310729 - DNA, 15 bp, Homo sapiens
gagaatgattccatc

SEQ ID NO: 310730 - DNA, 15 bp, Homo sapiens
ggagaatgattccat

SEQ ID NO: 310731 - DNA, 15 bp, Homo sapiens
gggagaatgattcca

SEQ ID NO: 310732 - DNA, 15 bp, Homo sapiens
tgggagaatgattcc

SEQ ID NO: 310733 - DNA, 15 bp, Homo sapiens
gtgggagaatgattc

SEQ ID NO: 310734 - DNA, 15 bp, Homo sapiens
agtgggagaatgatt

SEQ ID NO: 310735 - DNA, 15 bp, Homo sapiens
cagtgggagaatgat

SEQ ID NO: 310736 - DNA, 15 bp, Homo sapiens
acagtgggagaatga

SEQ ID NO: 310737 - DNA, 15 bp, Homo sapiens
gacagtgggagaatg

SEQ ID NO: 310738 - DNA, 15 bp, Homo sapiens
agacagtgggagaat

SEQ ID NO: 310739 - DNA, 15 bp, Homo sapiens
gagacagtgggagaa

SEQ ID NO: 310740 - DNA, 15 bp, Homo sapiens
agagacagtgggaga

SEQ ID NO: 310741 - DNA, 15 bp, Homo sapiens
tagagacagtgggag

SEQ ID NO: 310742 - DNA, 15 bp, Homo sapiens
ttagagacagtggga

SEQ ID NO: 310743 - DNA, 15 bp, Homo sapiens
cttagagacagtggg

SEQ ID NO: 310744 - DNA, 15 bp, Homo sapiens
acttagagacagtgg

SEQ ID NO: 310745 - DNA, 15 bp, Homo sapiens
aacttagagacagtg

SEQ ID NO: 310746 - DNA, 15 bp, Homo sapiens
taacttagagacagt

SEQ ID NO: 310747 - DNA, 15 bp, Homo sapiens
ttaacttagagacag

SEQ ID NO: 310748 - DNA, 15 bp, Homo sapiens
attaacttagagaca

SEQ ID NO: 310749 - DNA, 15 bp, Homo sapiens
aattaacttagagac

SEQ ID NO: 310750 - DNA, 15 bp, Homo sapiens
aaattaacttagaga

SEQ ID NO: 310751 - DNA, 15 bp, Homo sapiens
caaattaacttagag

SEQ ID NO: 310752 - DNA, 15 bp, Homo sapiens
gcaaattaacttaga

SEQ ID NO: 310753 - DNA, 15 bp, Homo sapiens
ggcaaattaacttag

SEQ ID NO: 310754 - DNA, 15 bp, Homo sapiens
aggcaaattaactta

SEQ ID NO: 310755 - DNA, 15 bp, Homo sapiens
caggcaaattaactt

SEQ ID NO: 310756 - DNA, 15 bp, Homo sapiens
acaggcaaattaact

SEQ ID NO: 310757 - DNA, 15 bp, Homo sapiens
gacaggcaaattaac

SEQ ID NO: 310758 - DNA, 15 bp, Homo sapiens
agacaggcaaattaa

SEQ ID NO: 310759 - DNA, 15 bp, Homo sapiens
tagacaggcaaatta

SEQ ID NO: 310760 - DNA, 15 bp, Homo sapiens
ttagacaggcaaatt

SEQ ID NO: 310761 - DNA, 15 bp, Homo sapiens
attagacaggcaaat

SEQ ID NO: 310762 - DNA, 15 bp, Homo sapiens
cattagacaggcaaa

SEQ ID NO: 310763 - DNA, 15 bp, Homo sapiens
gcattagacaggcaa

SEQ ID NO: 310764 - DNA, 15 bp, Homo sapiens
agcattagacaggca

SEQ ID NO: 310765 - DNA, 15 bp, Homo sapiens
aagcattagacaggc

SEQ ID NO: 310766 - DNA, 15 bp, Homo sapiens
aaagcattagacagg

SEQ ID NO: 310767 - DNA, 15 bp, Homo sapiens
taaagcattagacag

SEQ ID NO: 310768 - DNA, 15 bp, Homo sapiens
ttaaagcattagaca

SEQ ID NO: 310769 - DNA, 15 bp, Homo sapiens
gttaaagcattagac

SEQ ID NO: 310770 - DNA, 15 bp, Homo sapiens
tgttaaagcattaga

SEQ ID NO: 310771 - DNA, 15 bp, Homo sapiens
gtgttaaagcattag

SEQ ID NO: 310772 - DNA, 15 bp, Homo sapiens
agtgttaaagcatta

SEQ ID NO: 310773 - DNA, 15 bp, Homo sapiens
aagtgttaaagcatt

SEQ ID NO: 310774 - DNA, 15 bp, Homo sapiens
aaagtgttaaagcat

SEQ ID NO: 310775 - DNA, 15 bp, Homo sapiens
gaaagtgttaaagca

SEQ ID NO: 310776 - DNA, 15 bp, Homo sapiens
agaaagtgttaaagc

SEQ ID NO: 310777 - DNA, 15 bp, Homo sapiens
cagaaagtgttaaag

SEQ ID NO: 310778 - DNA, 15 bp, Homo sapiens
gcagaaagtgttaaa

SEQ ID NO: 310779 - DNA, 15 bp, Homo sapiens
agcagaaagtgttaa

SEQ ID NO: 310780 - DNA, 15 bp, Homo sapiens
tagcagaaagtgtta

SEQ ID NO: 310781 - DNA, 15 bp, Homo sapiens
ctagcagaaagtgtt

SEQ ID NO: 310782 - DNA, 15 bp, Homo sapiens
actagcagaaagtgt

SEQ ID NO: 310783 - DNA, 15 bp, Homo sapiens
aactagcagaaagtg

SEQ ID NO: 310784 - DNA, 15 bp, Homo sapiens
gaactagcagaaagt

SEQ ID NO: 310785 - DNA, 15 bp, Homo sapiens
agaactagcagaaag

SEQ ID NO: 310786 - DNA, 15 bp, Homo sapiens
cagaactagcagaaa

SEQ ID NO: 310787 - DNA, 15 bp, Homo sapiens
acagaactagcagaa

SEQ ID NO: 310788 - DNA, 15 bp, Homo sapiens
gacagaactagcaga

SEQ ID NO: 310789 - DNA, 15 bp, Homo sapiens
agacagaactagcag

SEQ ID NO: 310790 - DNA, 15 bp, Homo sapiens
gagacagaactagca

SEQ ID NO: 310791 - DNA, 15 bp, Homo sapiens
tgagacagaactagc

SEQ ID NO: 310792 - DNA, 15 bp, Homo sapiens
atgagacagaactag

SEQ ID NO: 310793 - DNA, 15 bp, Homo sapiens
aatgagacagaacta

SEQ ID NO: 310794 - DNA, 15 bp, Homo sapiens
gaatgagacagaact

SEQ ID NO: 310795 - DNA, 15 bp, Homo sapiens
agaatgagacagaac

SEQ ID NO: 310796 - DNA, 15 bp, Homo sapiens
aagaatgagacagaa

SEQ ID NO: 310797 - DNA, 15 bp, Homo sapiens
aaagaatgagacaga

SEQ ID NO: 310798 - DNA, 15 bp, Homo sapiens
taaagaatgagacag

SEQ ID NO: 310799 - DNA, 15 bp, Homo sapiens
gtaaagaatgagaca

SEQ ID NO: 310800 - DNA, 15 bp, Homo sapiens
ggtaaagaatgagac

SEQ ID NO: 310801 - DNA, 15 bp, Homo sapiens
gggtaaagaatgaga

SEQ ID NO: 310802 - DNA, 15 bp, Homo sapiens
tgggtaaagaatgag

SEQ ID NO: 310803 - DNA, 15 bp, Homo sapiens
atgggtaaagaatga

SEQ ID NO: 310804 - DNA, 15 bp, Homo sapiens
aatgggtaaagaatg

SEQ ID NO: 310805 - DNA, 15 bp, Homo sapiens
caatgggtaaagaat

SEQ ID NO: 310806 - DNA, 15 bp, Homo sapiens
ccaatgggtaaagaa

SEQ ID NO: 310807 - DNA, 15 bp, Homo sapiens
tccaatgggtaaaga

SEQ ID NO: 310808 - DNA, 15 bp, Homo sapiens
ctccaatgggtaaag

SEQ ID NO: 310809 - DNA, 15 bp, Homo sapiens
tctccaatgggtaaa

SEQ ID NO: 310810 - DNA, 15 bp, Homo sapiens
ctctccaatgggtaa

SEQ ID NO: 310811 - DNA, 15 bp, Homo sapiens
actctccaatgggta

SEQ ID NO: 310812 - DNA, 15 bp, Homo sapiens
tactctccaatgggt

SEQ ID NO: 310813 - DNA, 15 bp, Homo sapiens
gtactctccaatggg

SEQ ID NO: 310814 - DNA, 15 bp, Homo sapiens
ggtactctccaatgg

SEQ ID NO: 310815 - DNA, 15 bp, Homo sapiens
tggtactctccaatg

SEQ ID NO: 310816 - DNA, 15 bp, Homo sapiens
ctggtactctccaat

SEQ ID NO: 310817 - DNA, 15 bp, Homo sapiens
actggtactctccaa

SEQ ID NO: 310818 - DNA, 15 bp, Homo sapiens
cactggtactctcca

SEQ ID NO: 310819 - DNA, 15 bp, Homo sapiens
ccactggtactctcc

SEQ ID NO: 310820 - DNA, 15 bp, Homo sapiens
cccactggtactctc

SEQ ID NO: 310821 - DNA, 15 bp, Homo sapiens
acccactggtactct

SEQ ID NO: 310822 - DNA, 15 bp, Homo sapiens
aacccactggtactc

SEQ ID NO: 310823 - DNA, 15 bp, Homo sapiens
aaacccactggtact

SEQ ID NO: 310824 - DNA, 15 bp, Homo sapiens
aaaacccactggtac

SEQ ID NO: 310825 - DNA, 15 bp, Homo sapiens
gaaaacccactggta

SEQ ID NO: 310826 - DNA, 15 bp, Homo sapiens
tgaaaacccactggt

SEQ ID NO: 310827 - DNA, 15 bp, Homo sapiens
ctgaaaacccactgg

SEQ ID NO: 310828 - DNA, 15 bp, Homo sapiens
tctgaaaacccactg

SEQ ID NO: 310829 - DNA, 15 bp, Homo sapiens
atctgaaaacccact

SEQ ID NO: 310830 - DNA, 15 bp, Homo sapiens
tatctgaaaacccac

SEQ ID NO: 310831 - DNA, 15 bp, Homo sapiens
ttatctgaaaaccca

SEQ ID NO: 310832 - DNA, 15 bp, Homo sapiens
gttatctgaaaaccc

SEQ ID NO: 310833 - DNA, 15 bp, Homo sapiens
agttatctgaaaacc

SEQ ID NO: 310834 - DNA, 15 bp, Homo sapiens
aagttatctgaaaac

SEQ ID NO: 310835 - DNA, 15 bp, Homo sapiens
gaagttatctgaaaa

SEQ ID NO: 310836 - DNA, 15 bp, Homo sapiens
ggaagttatctgaaa

SEQ ID NO: 310837 - DNA, 15 bp, Homo sapiens
aggaagttatctgaa

SEQ ID NO: 310838 - DNA, 15 bp, Homo sapiens
aaggaagttatctga

SEQ ID NO: 310839 - DNA, 15 bp, Homo sapiens
taaggaagttatctg

SEQ ID NO: 310840 - DNA, 15 bp, Homo sapiens
ttaaggaagttatct

SEQ ID NO: 310841 - DNA, 15 bp, Homo sapiens
tttaaggaagttatc

SEQ ID NO: 310842 - DNA, 15 bp, Homo sapiens
ctttaaggaagttat

SEQ ID NO: 310843 - DNA, 15 bp, Homo sapiens
tctttaaggaagtta

SEQ ID NO: 310844 - DNA, 15 bp, Homo sapiens
gtctttaaggaagtt

SEQ ID NO: 310845 - DNA, 15 bp, Homo sapiens
ggtctttaaggaagt

SEQ ID NO: 310846 - DNA, 15 bp, Homo sapiens
tggtctttaaggaag

SEQ ID NO: 310847 - DNA, 15 bp, Homo sapiens
ctggtctttaaggaa

SEQ ID NO: 310848 - DNA, 15 bp, Homo sapiens
tctggtctttaagga

SEQ ID NO: 310849 - DNA, 15 bp, Homo sapiens
ttctggtctttaagg

SEQ ID NO: 310850 - DNA, 15 bp, Homo sapiens
tttctggtctttaag

SEQ ID NO: 310851 - DNA, 15 bp, Homo sapiens
ctttctggtctttaa

SEQ ID NO: 310852 - DNA, 15 bp, Homo sapiens
tctttctggtcttta

SEQ ID NO: 310853 - DNA, 15 bp, Homo sapiens
ttctttctggtcttt

SEQ ID NO: 310854 - DNA, 15 bp, Homo sapiens
tttctttctggtctt

SEQ ID NO: 310855 - DNA, 15 bp, Homo sapiens
ctttctttctggtct

SEQ ID NO: 310856 - DNA, 15 bp, Homo sapiens
tctttctttctggtc

SEQ ID NO: 310857 - DNA, 15 bp, Homo sapiens
atctttctttctggt

SEQ ID NO: 310858 - DNA, 15 bp, Homo sapiens
aatctttctttctgg

SEQ ID NO: 310859 - DNA, 15 bp, Homo sapiens
aaatctttctttctg

SEQ ID NO: 310860 - DNA, 15 bp, Homo sapiens
taaatctttctttct

SEQ ID NO: 310861 - DNA, 15 bp, Homo sapiens
ttaaatctttctttc

SEQ ID NO: 310862 - DNA, 15 bp, Homo sapiens
tttaaatctttcttt

SEQ ID NO: 310863 - DNA, 15 bp, Homo sapiens
ttttaaatctttctt

SEQ ID NO: 310864 - DNA, 15 bp, Homo sapiens
tttttaaatctttct

SEQ ID NO: 310865 - DNA, 15 bp, Homo sapiens
ttttttaaatctttc

SEQ ID NO: 310866 - DNA, 15 bp, Homo sapiens
tttttttaaatcttt

SEQ ID NO: 310867 - DNA, 15 bp, Homo sapiens
ttttttttaaatctt

SEQ ID NO: 310868 - DNA, 15 bp, Homo sapiens
attttttttaaatct

SEQ ID NO: 310869 - DNA, 15 bp, Homo sapiens
aattttttttaaatc

SEQ ID NO: 310870 - DNA, 15 bp, Homo sapiens
gaattttttttaaat

SEQ ID NO: 310871 - DNA, 15 bp, Homo sapiens
ctggaatttttttta

SEQ ID NO: 310872 - DNA, 15 bp, Homo sapiens
gctggaatttttttt

SEQ ID NO: 310873 - DNA, 15 bp, Homo sapiens
agctggaattttttt

SEQ ID NO: 310874 - DNA, 15 bp, Homo sapiens
gagctggaatttttt

SEQ ID NO: 310875 - DNA, 15 bp, Homo sapiens
ggagctggaattttt

SEQ ID NO: 310876 - DNA, 15 bp, Homo sapiens
aggagctggaatttt

SEQ ID NO: 310877 - DNA, 15 bp, Homo sapiens
aaggagctggaattt

SEQ ID NO: 310878 - DNA, 15 bp, Homo sapiens
gaaggagctggaatt

SEQ ID NO: 310879 - DNA, 15 bp, Homo sapiens
ggaaggagctggaat

SEQ ID NO: 310880 - DNA, 15 bp, Homo sapiens
aggaaggagctggaa

SEQ ID NO: 310881 - DNA, 15 bp, Homo sapiens
aaaggaaggagctgg

SEQ ID NO: 310882 - DNA, 15 bp, Homo sapiens
aaaaggaaggagctg

SEQ ID NO: 310883 - DNA, 15 bp, Homo sapiens
caaaaggaaggagct

SEQ ID NO: 310884 - DNA, 15 bp, Homo sapiens
ccaaaaggaaggagc

SEQ ID NO: 310885 - DNA, 15 bp, Homo sapiens
gccaaaaggaaggag

SEQ ID NO: 310886 - DNA, 15 bp, Homo sapiens
agccaaaaggaagga

SEQ ID NO: 310887 - DNA, 15 bp, Homo sapiens
gagccaaaaggaagg

SEQ ID NO: 310888 - DNA, 15 bp, Homo sapiens
cgagccaaaaggaag

SEQ ID NO: 310889 - DNA, 15 bp, Homo sapiens
ccgagccaaaaggaa

SEQ ID NO: 310890 - DNA, 15 bp, Homo sapiens
cccgagccaaaagga

SEQ ID NO: 310891 - DNA, 15 bp, Homo sapiens
acccgagccaaaagg

SEQ ID NO: 310892 - DNA, 15 bp, Homo sapiens
gacccgagccaaaag

SEQ ID NO: 310893 - DNA, 15 bp, Homo sapiens
agacccgagccaaaa

SEQ ID NO: 310894 - DNA, 15 bp, Homo sapiens
aagacccgagccaaa

SEQ ID NO: 310895 - DNA, 15 bp, Homo sapiens
gaagacccgagccaa

SEQ ID NO: 310896 - DNA, 15 bp, Homo sapiens
ggaagacccgagcca

SEQ ID NO: 310897 - DNA, 15 bp, Homo sapiens
tggaagacccgagcc

SEQ ID NO: 310898 - DNA, 15 bp, Homo sapiens
ctggaagacccgagc

SEQ ID NO: 310899 - DNA, 15 bp, Homo sapiens
cctggaagacccgag

SEQ ID NO: 310900 - DNA, 15 bp, Homo sapiens
acctggaagacccga

SEQ ID NO: 310901 - DNA, 15 bp, Homo sapiens
gacctggaagacccg

SEQ ID NO: 310902 - DNA, 15 bp, Homo sapiens
agacctggaagaccc

SEQ ID NO: 310903 - DNA, 15 bp, Homo sapiens
aagacctggaagacc

SEQ ID NO: 310904 - DNA, 15 bp, Homo sapiens
aaagacctggaagac

SEQ ID NO: 310905 - DNA, 15 bp, Homo sapiens
taaagacctggaaga

SEQ ID NO: 310906 - DNA, 15 bp, Homo sapiens
ataaagacctggaag

SEQ ID NO: 310907 - DNA, 15 bp, Homo sapiens
gataaagacctggaa

SEQ ID NO: 310908 - DNA, 15 bp, Homo sapiens
agataaagacctgga

SEQ ID NO: 310909 - DNA, 15 bp, Homo sapiens
aagataaagacctgg

SEQ ID NO: 310910 - DNA, 15 bp, Homo sapiens
caagataaagacctg

SEQ ID NO: 310911 - DNA, 15 bp, Homo sapiens
tcaagataaagacct

SEQ ID NO: 310912 - DNA, 15 bp, Homo sapiens
atcaagataaagacc

SEQ ID NO: 310913 - DNA, 15 bp, Homo sapiens
catcaagataaagac

SEQ ID NO: 310914 - DNA, 15 bp, Homo sapiens
tcatcaagataaaga

SEQ ID NO: 310915 - DNA, 15 bp, Homo sapiens
ttcatcaagataaag

SEQ ID NO: 310916 - DNA, 15 bp, Homo sapiens
tttcatcaagataaa

SEQ ID NO: 310917 - DNA, 15 bp, Homo sapiens
ttttcatcaagataa

SEQ ID NO: 310918 - DNA, 15 bp, Homo sapiens
gttttcatcaagata

SEQ ID NO: 310919 - DNA, 15 bp, Homo sapiens
agttttcatcaagat

SEQ ID NO: 310920 - DNA, 15 bp, Homo sapiens
cagttttcatcaaga

SEQ ID NO: 310921 - DNA, 15 bp, Homo sapiens
ccagttttcatcaag

SEQ ID NO: 310922 - DNA, 15 bp, Homo sapiens
tccagttttcatcaa

SEQ ID NO: 310923 - DNA, 15 bp, Homo sapiens
ctccagttttcatca

SEQ ID NO: 310924 - DNA, 15 bp, Homo sapiens
cctccagttttcatc

SEQ ID NO: 310925 - DNA, 15 bp, Homo sapiens
gcctccagttttcat

SEQ ID NO: 310926 - DNA, 15 bp, Homo sapiens
tgcctccagttttca

SEQ ID NO: 310927 - DNA, 15 bp, Homo sapiens
ttgcctccagttttc

SEQ ID NO: 310928 - DNA, 15 bp, Homo sapiens
tttgcctccagtttt

SEQ ID NO: 310929 - DNA, 15 bp, Homo sapiens
ctttgcctccagttt

SEQ ID NO: 310930 - DNA, 15 bp, Homo sapiens
tctttgcctccagtt

SEQ ID NO: 310931 - DNA, 15 bp, Homo sapiens
atctttgcctccagt

SEQ ID NO: 310932 - DNA, 15 bp, Homo sapiens
catctttgcctccag

SEQ ID NO: 310933 - DNA, 15 bp, Homo sapiens
acatctttgcctcca

SEQ ID NO: 310934 - DNA, 15 bp, Homo sapiens
aacatctttgcctcc

SEQ ID NO: 310935 - DNA, 15 bp, Homo sapiens
taacatctttgcctc

SEQ ID NO: 310936 - DNA, 15 bp, Homo sapiens
ataacatctttgcct

SEQ ID NO: 310937 - DNA, 15 bp, Homo sapiens
gataacatctttgcc

SEQ ID NO: 310938 - DNA, 15 bp, Homo sapiens
agataacatctttgc

SEQ ID NO: 310939 - DNA, 15 bp, Homo sapiens
gagataacatctttg

SEQ ID NO: 310940 - DNA, 15 bp, Homo sapiens
agagataacatcttt

SEQ ID NO: 310941 - DNA, 15 bp, Homo sapiens
cagagataacatctt

SEQ ID NO: 310942 - DNA, 15 bp, Homo sapiens
ccagagataacatct

SEQ ID NO: 310943 - DNA, 15 bp, Homo sapiens
tccagagataacatc

SEQ ID NO: 310944 - DNA, 15 bp, Homo sapiens
atccagagataacat

SEQ ID NO: 310945 - DNA, 15 bp, Homo sapiens
aatccagagataaca

SEQ ID NO: 310946 - DNA, 15 bp, Homo sapiens
caatccagagataac

SEQ ID NO: 310947 - DNA, 15 bp, Homo sapiens
acaatccagagataa

SEQ ID NO: 310948 - DNA, 15 bp, Homo sapiens
tacaatccagagata

SEQ ID NO: 310949 - DNA, 15 bp, Homo sapiens
ctacaatccagagat

SEQ ID NO: 310950 - DNA, 15 bp, Homo sapiens
actacaatccagaga

SEQ ID NO: 310951 - DNA, 15 bp, Homo sapiens
gactacaatccagag

SEQ ID NO: 310952 - DNA, 15 bp, Homo sapiens
tgactacaatccaga

SEQ ID NO: 310953 - DNA, 15 bp, Homo sapiens
ctgactacaatccag

SEQ ID NO: 310954 - DNA, 15 bp, Homo sapiens
tctgactacaatcca

SEQ ID NO: 310955 - DNA, 15 bp, Homo sapiens
ctctgactacaatcc

SEQ ID NO: 310956 - DNA, 15 bp, Homo sapiens
tctctgactacaatc

SEQ ID NO: 310957 - DNA, 15 bp, Homo sapiens
ttctctgactacaat

SEQ ID NO: 310958 - DNA, 15 bp, Homo sapiens
gttctctgactacaa

SEQ ID NO: 310959 - DNA, 15 bp, Homo sapiens
tgttctctgactaca

SEQ ID NO: 310960 - DNA, 15 bp, Homo sapiens
ttgttctctgactac

SEQ ID NO: 310961 - DNA, 15 bp, Homo sapiens
gttgttctctgacta

SEQ ID NO: 310962 - DNA, 15 bp, Homo sapiens
tgttgttctctgact

SEQ ID NO: 310963 - DNA, 15 bp, Homo sapiens
ttgttgttctctgac

SEQ ID NO: 310964 - DNA, 15 bp, Homo sapiens
tttgttgttctctga

SEQ ID NO: 310965 - DNA, 15 bp, Homo sapiens
ttttgttgttctctg

SEQ ID NO: 310966 - DNA, 15 bp, Homo sapiens
tttttgttgttctct

SEQ ID NO: 310967 - DNA, 15 bp, Homo sapiens
gtttttgttgttctc

SEQ ID NO: 310968 - DNA, 15 bp, Homo sapiens
ggtttttgttgttct

SEQ ID NO: 310969 - DNA, 15 bp, Homo sapiens
gggtttttgttgttc

SEQ ID NO: 310970 - DNA, 15 bp, Homo sapiens
ggggtttttgttgtt

SEQ ID NO: 310971 - DNA, 15 bp, Homo sapiens
gggggtttttgttgt

SEQ ID NO: 310972 - DNA, 15 bp, Homo sapiens
tgggggtttttgttg

SEQ ID NO: 310973 - DNA, 15 bp, Homo sapiens
atgggggtttttgtt

SEQ ID NO: 310974 - DNA, 15 bp, Homo sapiens
gatgggggtttttgt

SEQ ID NO: 310975 - DNA, 15 bp, Homo sapiens
agatgggggtttttg

SEQ ID NO: 310976 - DNA, 15 bp, Homo sapiens
aagatgggggttttt

SEQ ID NO: 310977 - DNA, 15 bp, Homo sapiens
aaagatgggggtttt

SEQ ID NO: 310978 - DNA, 15 bp, Homo sapiens
aaaagatgggggttt

SEQ ID NO: 310979 - DNA, 15 bp, Homo sapiens
gaaaagatgggggtt

SEQ ID NO: 310980 - DNA, 15 bp, Homo sapiens
agaaaagatgggggt

SEQ ID NO: 310981 - DNA, 15 bp, Homo sapiens
aagaaaagatggggg

SEQ ID NO: 310982 - DNA, 15 bp, Homo sapiens
aaagaaaagatgggg

SEQ ID NO: 310983 - DNA, 15 bp, Homo sapiens
gaaagaaaagatggg

SEQ ID NO: 310984 - DNA, 15 bp, Homo sapiens
ggaaagaaaagatgg

SEQ ID NO: 310985 - DNA, 15 bp, Homo sapiens
gggaaagaaaagatg

SEQ ID NO: 310986 - DNA, 15 bp, Homo sapiens
tgggaaagaaaagat

SEQ ID NO: 310987 - DNA, 15 bp, Homo sapiens
ctgggaaagaaaaga

SEQ ID NO: 310988 - DNA, 15 bp, Homo sapiens
cctgggaaagaaaag

SEQ ID NO: 310989 - DNA, 15 bp, Homo sapiens
tcctgggaaagaaaa

SEQ ID NO: 310990 - DNA, 15 bp, Homo sapiens
ttcctgggaaagaaa

SEQ ID NO: 310991 - DNA, 15 bp, Homo sapiens
tttcctgggaaagaa

SEQ ID NO: 310992 - DNA, 15 bp, Homo sapiens
ttttcctgggaaaga

SEQ ID NO: 310993 - DNA, 15 bp, Homo sapiens
attttcctgggaaag

SEQ ID NO: 310994 - DNA, 15 bp, Homo sapiens
tattttcctgggaaa

SEQ ID NO: 310995 - DNA, 15 bp, Homo sapiens
atattttcctgggaa

SEQ ID NO: 310996 - DNA, 15 bp, Homo sapiens
aatattttcctggga

SEQ ID NO: 310997 - DNA, 15 bp, Homo sapiens
taatattttcctggg

SEQ ID NO: 310998 - DNA, 15 bp, Homo sapiens
ttaatattttcctgg

SEQ ID NO: 310999 - DNA, 15 bp, Homo sapiens
attaatattttcctg

SEQ ID NO: 311000 - DNA, 15 bp, Homo sapiens
gattaatattttcct

SEQ ID NO: 311001 - DNA, 15 bp, Homo sapiens
tgattaatattttcc

SEQ ID NO: 311002 - DNA, 15 bp, Homo sapiens
ttgattaatattttc

SEQ ID NO: 311003 - DNA, 15 bp, Homo sapiens
tttgattaatatttt

SEQ ID NO: 311004 - DNA, 15 bp, Homo sapiens
ttttgattaatattt

SEQ ID NO: 311005 - DNA, 15 bp, Homo sapiens
attttgattaatatt

SEQ ID NO: 311006 - DNA, 15 bp, Homo sapiens
tattttgattaatat

SEQ ID NO: 311007 - DNA, 15 bp, Homo sapiens
ctattttgattaata

SEQ ID NO: 311008 - DNA, 15 bp, Homo sapiens
tctattttgattaat

SEQ ID NO: 311009 - DNA, 15 bp, Homo sapiens
ttctattttgattaa

SEQ ID NO: 311010 - DNA, 15 bp, Homo sapiens
tttctattttgatta

SEQ ID NO: 311011 - DNA, 15 bp, Homo sapiens
atttctattttgatt

SEQ ID NO: 311012 - DNA, 15 bp, Homo sapiens
tatttctattttgat

SEQ ID NO: 311013 - DNA, 15 bp, Homo sapiens
ttatttctattttga

SEQ ID NO: 311014 - DNA, 15 bp, Homo sapiens
cttatttctattttg

SEQ ID NO: 311015 - DNA, 15 bp, Homo sapiens
ccttatttctatttt

SEQ ID NO: 311016 - DNA, 15 bp, Homo sapiens
accttatttctattt

SEQ ID NO: 311017 - DNA, 15 bp, Homo sapiens
caccttatttctatt

SEQ ID NO: 311018 - DNA, 15 bp, Homo sapiens
tcaccttatttctat

SEQ ID NO: 311019 - DNA, 15 bp, Homo sapiens
ctcaccttatttcta

SEQ ID NO: 311020 - DNA, 15 bp, Homo sapiens
tctcaccttatttct

SEQ ID NO: 311021 - DNA, 15 bp, Homo sapiens
atctcaccttatttc

SEQ ID NO: 311022 - DNA, 15 bp, Homo sapiens
aatctcaccttattt

SEQ ID NO: 311023 - DNA, 15 bp, Homo sapiens
taatctcaccttatt

SEQ ID NO: 311024 - DNA, 15 bp, Homo sapiens
ctaatctcaccttat

SEQ ID NO: 311025 - DNA, 15 bp, Homo sapiens
tctaatctcacctta

SEQ ID NO: 311026 - DNA, 15 bp, Homo sapiens
ttctaatctcacctt

SEQ ID NO: 311027 - DNA, 15 bp, Homo sapiens
gttctaatctcacct

SEQ ID NO: 311028 - DNA, 15 bp, Homo sapiens
ggttctaatctcacc

SEQ ID NO: 311029 - DNA, 15 bp, Homo sapiens
aggttctaatctcac

SEQ ID NO: 311030 - DNA, 15 bp, Homo sapiens
aaggttctaatctca

SEQ ID NO: 311031 - DNA, 15 bp, Homo sapiens
taaggttctaatctc

SEQ ID NO: 311032 - DNA, 15 bp, Homo sapiens
ctaaggttctaatct

SEQ ID NO: 311033 - DNA, 15 bp, Homo sapiens
tctaaggttctaatc

SEQ ID NO: 311034 - DNA, 15 bp, Homo sapiens
ttctaaggttctaat

SEQ ID NO: 311035 - DNA, 15 bp, Homo sapiens
cttctaaggttctaa

SEQ ID NO: 311036 - DNA, 15 bp, Homo sapiens
ccttctaaggttcta

SEQ ID NO: 311037 - DNA, 15 bp, Homo sapiens
accttctaaggttct

SEQ ID NO: 311038 - DNA, 15 bp, Homo sapiens
aaccttctaaggttc

SEQ ID NO: 311039 - DNA, 15 bp, Homo sapiens
aaaccttctaaggtt

SEQ ID NO: 311040 - DNA, 15 bp, Homo sapiens
aaaaccttctaaggt

SEQ ID NO: 311041 - DNA, 15 bp, Homo sapiens
caaaaccttctaagg

SEQ ID NO: 311042 - DNA, 15 bp, Homo sapiens
gcaaaaccttctaag

SEQ ID NO: 311043 - DNA, 15 bp, Homo sapiens
tgcaaaaccttctaa

SEQ ID NO: 311044 - DNA, 15 bp, Homo sapiens
atgcaaaaccttcta

SEQ ID NO: 311045 - DNA, 15 bp, Homo sapiens
tatgcaaaaccttct

SEQ ID NO: 311046 - DNA, 15 bp, Homo sapiens
ttatgcaaaaccttc

SEQ ID NO: 311047 - DNA, 15 bp, Homo sapiens
attatgcaaaacctt

SEQ ID NO: 311048 - DNA, 15 bp, Homo sapiens
tattatgcaaaacct

SEQ ID NO: 311049 - DNA, 15 bp, Homo sapiens
gtattatgcaaaacc

SEQ ID NO: 311050 - DNA, 15 bp, Homo sapiens
agtattatgcaaaac

SEQ ID NO: 311051 - DNA, 15 bp, Homo sapiens
aagtattatgcaaaa

SEQ ID NO: 311052 - DNA, 15 bp, Homo sapiens
aaagtattatgcaaa

SEQ ID NO: 311053 - DNA, 15 bp, Homo sapiens
aaaagtattatgcaa

SEQ ID NO: 311054 - DNA, 15 bp, Homo sapiens
gaaaagtattatgca

SEQ ID NO: 311055 - DNA, 15 bp, Homo sapiens
agaaaagtattatgc

SEQ ID NO: 311056 - DNA, 15 bp, Homo sapiens
aagaaaagtattatg

SEQ ID NO: 311057 - DNA, 15 bp, Homo sapiens
caagaaaagtattat

SEQ ID NO: 311058 - DNA, 15 bp, Homo sapiens
acaagaaaagtatta

SEQ ID NO: 311059 - DNA, 15 bp, Homo sapiens
aacaagaaaagtatt

SEQ ID NO: 311060 - DNA, 15 bp, Homo sapiens
aaacaagaaaagtat

SEQ ID NO: 311061 - DNA, 15 bp, Homo sapiens
caaacaagaaaagta

SEQ ID NO: 311062 - DNA, 15 bp, Homo sapiens
tcaaacaagaaaagt

SEQ ID NO: 311063 - DNA, 15 bp, Homo sapiens
gtcaaacaagaaaag

SEQ ID NO: 311064 - DNA, 15 bp, Homo sapiens
agtcaaacaagaaaa

SEQ ID NO: 311065 - DNA, 15 bp, Homo sapiens
cagtcaaacaagaaa

SEQ ID NO: 311066 - DNA, 15 bp, Homo sapiens
acagtcaaacaagaa

SEQ ID NO: 311067 - DNA, 15 bp, Homo sapiens
aacagtcaaacaaga

SEQ ID NO: 311068 - DNA, 15 bp, Homo sapiens
aaacagtcaaacaag

SEQ ID NO: 311069 - DNA, 15 bp, Homo sapiens
gaaacagtcaaacaa

SEQ ID NO: 311070 - DNA, 15 bp, Homo sapiens
agaaacagtcaaaca

SEQ ID NO: 311071 - DNA, 15 bp, Homo sapiens
cagaaacagtcaaac

SEQ ID NO: 311072 - DNA, 15 bp, Homo sapiens
ccagaaacagtcaaa

SEQ ID NO: 311073 - DNA, 15 bp, Homo sapiens
gccagaaacagtcaa

SEQ ID NO: 311074 - DNA, 15 bp, Homo sapiens
ggccagaaacagtca

SEQ ID NO: 311075 - DNA, 15 bp, Homo sapiens
aggccagaaacagtc

SEQ ID NO: 311076 - DNA, 15 bp, Homo sapiens
caggccagaaacagt

SEQ ID NO: 311077 - DNA, 15 bp, Homo sapiens
acaggccagaaacag

SEQ ID NO: 311078 - DNA, 15 bp, Homo sapiens
gacaggccagaaaca

SEQ ID NO: 311079 - DNA, 15 bp, Homo sapiens
agacaggccagaaac

SEQ ID NO: 311080 - DNA, 15 bp, Homo sapiens
aagacaggccagaaa

SEQ ID NO: 311081 - DNA, 15 bp, Homo sapiens
taagacaggccagaa

SEQ ID NO: 311082 - DNA, 15 bp, Homo sapiens
ttaagacaggccaga

SEQ ID NO: 311083 - DNA, 15 bp, Homo sapiens
attaagacaggccag

SEQ ID NO: 311084 - DNA, 15 bp, Homo sapiens
gattaagacaggcca

SEQ ID NO: 311085 - DNA, 15 bp, Homo sapiens
ggattaagacaggcc

SEQ ID NO: 311086 - DNA, 15 bp, Homo sapiens
tggattaagacaggc

SEQ ID NO: 311087 - DNA, 15 bp, Homo sapiens
ttggattaagacagg

SEQ ID NO: 311088 - DNA, 15 bp, Homo sapiens
attggattaagacag

SEQ ID NO: 311089 - DNA, 15 bp, Homo sapiens
tattggattaagaca

SEQ ID NO: 311090 - DNA, 15 bp, Homo sapiens
ttattggattaagac

SEQ ID NO: 311091 - DNA, 15 bp, Homo sapiens
attattggattaaga

SEQ ID NO: 311092 - DNA, 15 bp, Homo sapiens
gattattggattaag

SEQ ID NO: 311093 - DNA, 15 bp, Homo sapiens
agattattggattaa

SEQ ID NO: 311094 - DNA, 15 bp, Homo sapiens
tagattattggatta

SEQ ID NO: 311095 - DNA, 15 bp, Homo sapiens
atagattattggatt

SEQ ID NO: 311096 - DNA, 15 bp, Homo sapiens
aatagattattggat

SEQ ID NO: 311097 - DNA, 15 bp, Homo sapiens
taatagattattgga

SEQ ID NO: 311098 - DNA, 15 bp, Homo sapiens
ttaatagattattgg

SEQ ID NO: 311099 - DNA, 15 bp, Homo sapiens
tttaatagattattg

SEQ ID NO: 311100 - DNA, 15 bp, Homo sapiens
gtttaatagattatt

SEQ ID NO: 311101 - DNA, 15 bp, Homo sapiens
agtttaatagattat

SEQ ID NO: 311102 - DNA, 15 bp, Homo sapiens
gagtttaatagatta

SEQ ID NO: 311103 - DNA, 15 bp, Homo sapiens
agagtttaatagatt

SEQ ID NO: 311104 - DNA, 15 bp, Homo sapiens
tagagtttaatagat

SEQ ID NO: 311105 - DNA, 15 bp, Homo sapiens
ctagagtttaataga

SEQ ID NO: 311106 - DNA, 15 bp, Homo sapiens
gctagagtttaatag

SEQ ID NO: 311107 - DNA, 15 bp, Homo sapiens
agctagagtttaata

SEQ ID NO: 311108 - DNA, 15 bp, Homo sapiens
tagctagagtttaat

SEQ ID NO: 311109 - DNA, 15 bp, Homo sapiens
ctagctagagtttaa

SEQ ID NO: 311110 - DNA, 15 bp, Homo sapiens
actagctagagttta

SEQ ID NO: 311111 - DNA, 15 bp, Homo sapiens
tactagctagagttt

SEQ ID NO: 311112 - DNA, 15 bp, Homo sapiens
gtactagctagagtt

SEQ ID NO: 311113 - DNA, 15 bp, Homo sapiens
agtactagctagagt

SEQ ID NO: 311114 - DNA, 15 bp, Homo sapiens
aagtactagctagag

SEQ ID NO: 311115 - DNA, 15 bp, Homo sapiens
aaagtactagctaga

SEQ ID NO: 311116 - DNA, 15 bp, Homo sapiens
gaaagtactagctag

SEQ ID NO: 311117 - DNA, 15 bp, Homo sapiens
agaaagtactagcta

SEQ ID NO: 311118 - DNA, 15 bp, Homo sapiens
aagaaagtactagct

SEQ ID NO: 311119 - DNA, 15 bp, Homo sapiens
aaagaaagtactagc

SEQ ID NO: 311120 - DNA, 15 bp, Homo sapiens
gaaagaaagtactag

SEQ ID NO: 311121 - DNA, 15 bp, Homo sapiens
agaaagaaagtacta

SEQ ID NO: 311122 - DNA, 15 bp, Homo sapiens
aagaaagaaagtact

SEQ ID NO: 311123 - DNA, 15 bp, Homo sapiens
gaagaaagaaagtac

SEQ ID NO: 311124 - DNA, 15 bp, Homo sapiens
tgaagaaagaaagta

SEQ ID NO: 311125 - DNA, 15 bp, Homo sapiens
atgaagaaagaaagt

SEQ ID NO: 311126 - DNA, 15 bp, Homo sapiens
gatgaagaaagaaag

SEQ ID NO: 311127 - DNA, 15 bp, Homo sapiens
ggatgaagaaagaaa

SEQ ID NO: 311128 - DNA, 15 bp, Homo sapiens
gggatgaagaaagaa

SEQ ID NO: 311129 - DNA, 15 bp, Homo sapiens
ggggatgaagaaaga

SEQ ID NO: 311130 - DNA, 15 bp, Homo sapiens
tggggatgaagaaag

SEQ ID NO: 311131 - DNA, 15 bp, Homo sapiens
ctggggatgaagaaa

SEQ ID NO: 311132 - DNA, 15 bp, Homo sapiens
gctggggatgaagaa

SEQ ID NO: 311133 - DNA, 15 bp, Homo sapiens
tgctggggatgaaga

SEQ ID NO: 311134 - DNA, 15 bp, Homo sapiens
ttgctggggatgaag

SEQ ID NO: 311135 - DNA, 15 bp, Homo sapiens
tttgctggggatgaa

SEQ ID NO: 311136 - DNA, 15 bp, Homo sapiens
atttgctggggatga

SEQ ID NO: 311137 - DNA, 15 bp, Homo sapiens
aatttgctggggatg

SEQ ID NO: 311138 - DNA, 15 bp, Homo sapiens
aaatttgctggggat

SEQ ID NO: 311139 - DNA, 15 bp, Homo sapiens
caaatttgctgggga

SEQ ID NO: 311140 - DNA, 15 bp, Homo sapiens
gcaaatttgctgggg

SEQ ID NO: 311141 - DNA, 15 bp, Homo sapiens
tgcaaatttgctggg

SEQ ID NO: 311142 - DNA, 15 bp, Homo sapiens
ttgcaaatttgctgg

SEQ ID NO: 311143 - DNA, 15 bp, Homo sapiens
attgcaaatttgctg

SEQ ID NO: 311144 - DNA, 15 bp, Homo sapiens
gattgcaaatttgct

SEQ ID NO: 311145 - DNA, 15 bp, Homo sapiens
ggattgcaaatttgc

SEQ ID NO: 311146 - DNA, 15 bp, Homo sapiens
aggattgcaaatttg

SEQ ID NO: 311147 - DNA, 15 bp, Homo sapiens
gaggattgcaaattt

SEQ ID NO: 311148 - DNA, 15 bp, Homo sapiens
ggaggattgcaaatt

SEQ ID NO: 311149 - DNA, 15 bp, Homo sapiens
tggaggattgcaaat

SEQ ID NO: 311150 - DNA, 15 bp, Homo sapiens
ctggaggattgcaaa

SEQ ID NO: 311151 - DNA, 15 bp, Homo sapiens
tctggaggattgcaa

SEQ ID NO: 311152 - DNA, 15 bp, Homo sapiens
ttctggaggattgca

SEQ ID NO: 311153 - DNA, 15 bp, Homo sapiens
attctggaggattgc

SEQ ID NO: 311154 - DNA, 15 bp, Homo sapiens
gattctggaggattg

SEQ ID NO: 311155 - DNA, 15 bp, Homo sapiens
ggattctggaggatt

SEQ ID NO: 311156 - DNA, 15 bp, Homo sapiens
aggattctggaggat

SEQ ID NO: 311157 - DNA, 15 bp, Homo sapiens
aaggattctggagga

SEQ ID NO: 311158 - DNA, 15 bp, Homo sapiens
aaaggattctggagg

SEQ ID NO: 311159 - DNA, 15 bp, Homo sapiens
aaaaggattctggag

SEQ ID NO: 311160 - DNA, 15 bp, Homo sapiens
caaaaggattctgga

SEQ ID NO: 311161 - DNA, 15 bp, Homo sapiens
ccaaaaggattctgg

SEQ ID NO: 311162 - DNA, 15 bp, Homo sapiens
cccaaaaggattctg

SEQ ID NO: 311163 - DNA, 15 bp, Homo sapiens
tcccaaaaggattct

SEQ ID NO: 311164 - DNA, 15 bp, Homo sapiens
ttcccaaaaggattc

SEQ ID NO: 311165 - DNA, 15 bp, Homo sapiens
attcccaaaaggatt

SEQ ID NO: 311166 - DNA, 15 bp, Homo sapiens
aattcccaaaaggat

SEQ ID NO: 311167 - DNA, 15 bp, Homo sapiens
gaattcccaaaagga

SEQ ID NO: 311168 - DNA, 15 bp, Homo sapiens
ggaattcccaaaagg

SEQ ID NO: 311169 - DNA, 15 bp, Homo sapiens
tggaattcccaaaag

SEQ ID NO: 311170 - DNA, 15 bp, Homo sapiens
ttggaattcccaaaa

SEQ ID NO: 311171 - DNA, 15 bp, Homo sapiens
cttggaattcccaaa

SEQ ID NO: 311172 - DNA, 15 bp, Homo sapiens
ccttggaattcccaa

SEQ ID NO: 311173 - DNA, 15 bp, Homo sapiens
gccttggaattccca

SEQ ID NO: 311174 - DNA, 15 bp, Homo sapiens
tgccttggaattccc

SEQ ID NO: 311175 - DNA, 15 bp, Homo sapiens
ttgccttggaattcc

SEQ ID NO: 311176 - DNA, 15 bp, Homo sapiens
tttgccttggaattc

SEQ ID NO: 311177 - DNA, 15 bp, Homo sapiens
gtttgccttggaatt

SEQ ID NO: 311178 - DNA, 15 bp, Homo sapiens
cgtttgccttggaat

SEQ ID NO: 311179 - DNA, 15 bp, Homo sapiens
ccgtttgccttggaa

SEQ ID NO: 311180 - DNA, 15 bp, Homo sapiens
gccgtttgccttgga

SEQ ID NO: 311181 - DNA, 15 bp, Homo sapiens
ggccgtttgccttgg

SEQ ID NO: 311182 - DNA, 15 bp, Homo sapiens
aggccgtttgccttg

SEQ ID NO: 311183 - DNA, 15 bp, Homo sapiens
aaggccgtttgcctt

SEQ ID NO: 311184 - DNA, 15 bp, Homo sapiens
taaggccgtttgcct

SEQ ID NO: 311185 - DNA, 15 bp, Homo sapiens
ttaaggccgtttgcc

SEQ ID NO: 311186 - DNA, 15 bp, Homo sapiens
tttaaggccgtttgc

SEQ ID NO: 311187 - DNA, 15 bp, Homo sapiens
gtttaaggccgtttg

SEQ ID NO: 311188 - DNA, 15 bp, Homo sapiens
tgtttaaggccgttt

SEQ ID NO: 311189 - DNA, 15 bp, Homo sapiens
ttgtttaaggccgtt

SEQ ID NO: 311190 - DNA, 15 bp, Homo sapiens
cttgtttaaggccgt

SEQ ID NO: 311191 - DNA, 15 bp, Homo sapiens
tcttgtttaaggccg

SEQ ID NO: 311192 - DNA, 15 bp, Homo sapiens
ttcttgtttaaggcc

SEQ ID NO: 311193 - DNA, 15 bp, Homo sapiens
gttcttgtttaaggc

SEQ ID NO: 311194 - DNA, 15 bp, Homo sapiens
tgttcttgtttaagg

SEQ ID NO: 311195 - DNA, 15 bp, Homo sapiens
atgttcttgtttaag

SEQ ID NO: 311196 - DNA, 15 bp, Homo sapiens
tatgttcttgtttaa

SEQ ID NO: 311197 - DNA, 15 bp, Homo sapiens
ttatgttcttgttta

SEQ ID NO: 311198 - DNA, 15 bp, Homo sapiens
attatgttcttgttt

SEQ ID NO: 311199 - DNA, 15 bp, Homo sapiens
aattatgttcttgtt

SEQ ID NO: 311200 - DNA, 15 bp, Homo sapiens
caattatgttcttgt

SEQ ID NO: 311201 - DNA, 15 bp, Homo sapiens
acaattatgttcttg

SEQ ID NO: 311202 - DNA, 15 bp, Homo sapiens
gacaattatgttctt

SEQ ID NO: 311203 - DNA, 15 bp, Homo sapiens
agacaattatgttct

SEQ ID NO: 311204 - DNA, 15 bp, Homo sapiens
cagacaattatgttc

SEQ ID NO: 311205 - DNA, 15 bp, Homo sapiens
tcagacaattatgtt

SEQ ID NO: 311206 - DNA, 15 bp, Homo sapiens
ctcagacaattatgt

SEQ ID NO: 311207 - DNA, 15 bp, Homo sapiens
tctcagacaattatg

SEQ ID NO: 311208 - DNA, 15 bp, Homo sapiens
ctctcagacaattat

SEQ ID NO: 311209 - DNA, 15 bp, Homo sapiens
tctctcagacaatta

SEQ ID NO: 311210 - DNA, 15 bp, Homo sapiens
atctctcagacaatt

SEQ ID NO: 311211 - DNA, 15 bp, Homo sapiens
aatctctcagacaat

SEQ ID NO: 311212 - DNA, 15 bp, Homo sapiens
aaatctctcagacaa

SEQ ID NO: 311213 - DNA, 15 bp, Homo sapiens
aaaatctctcagaca

SEQ ID NO: 311214 - DNA, 15 bp, Homo sapiens
caaaatctctcagac

SEQ ID NO: 311215 - DNA, 15 bp, Homo sapiens
acaaaatctctcaga

SEQ ID NO: 311216 - DNA, 15 bp, Homo sapiens
aacaaaatctctcag

SEQ ID NO: 311217 - DNA, 15 bp, Homo sapiens
aaacaaaatctctca

SEQ ID NO: 311218 - DNA, 15 bp, Homo sapiens
caaacaaaatctctc

SEQ ID NO: 311219 - DNA, 15 bp, Homo sapiens
gcaaacaaaatctct

SEQ ID NO: 311220 - DNA, 15 bp, Homo sapiens
agcaaacaaaatctc

SEQ ID NO: 311221 - DNA, 15 bp, Homo sapiens
aagcaaacaaaatct

SEQ ID NO: 311222 - DNA, 15 bp, Homo sapiens
taagcaaacaaaatc

SEQ ID NO: 311223 - DNA, 15 bp, Homo sapiens
ataagcaaacaaaat

SEQ ID NO: 311224 - DNA, 15 bp, Homo sapiens
gataagcaaacaaaa

SEQ ID NO: 311225 - DNA, 15 bp, Homo sapiens
cgataagcaaacaaa

SEQ ID NO: 311226 - DNA, 15 bp, Homo sapiens
ccgataagcaaacaa

SEQ ID NO: 311227 - DNA, 15 bp, Homo sapiens
tccgataagcaaaca

SEQ ID NO: 311228 - DNA, 15 bp, Homo sapiens
ttccgataagcaaac

SEQ ID NO: 311229 - DNA, 15 bp, Homo sapiens
gttccgataagcaaa

SEQ ID NO: 311230 - DNA, 15 bp, Homo sapiens
agttccgataagcaa

SEQ ID NO: 311231 - DNA, 15 bp, Homo sapiens
cagttccgataagca

SEQ ID NO: 311232 - DNA, 15 bp, Homo sapiens
acagttccgataagc

SEQ ID NO: 311233 - DNA, 15 bp, Homo sapiens
aacagttccgataag

SEQ ID NO: 311234 - DNA, 15 bp, Homo sapiens
aaacagttccgataa

SEQ ID NO: 311235 - DNA, 15 bp, Homo sapiens
caaacagttccgata

SEQ ID NO: 311236 - DNA, 15 bp, Homo sapiens
ccaaacagttccgat

SEQ ID NO: 311237 - DNA, 15 bp, Homo sapiens
accaaacagttccga

SEQ ID NO: 311238 - DNA, 15 bp, Homo sapiens
gaccaaacagttccg

SEQ ID NO: 311239 - DNA, 15 bp, Homo sapiens
ggaccaaacagttcc

SEQ ID NO: 311240 - DNA, 15 bp, Homo sapiens
tggaccaaacagttc

SEQ ID NO: 311241 - DNA, 15 bp, Homo sapiens
gtggaccaaacagtt

SEQ ID NO: 311242 - DNA, 15 bp, Homo sapiens
tgtggaccaaacagt

SEQ ID NO: 311243 - DNA, 15 bp, Homo sapiens
ctgtggaccaaacag

SEQ ID NO: 311244 - DNA, 15 bp, Homo sapiens
gctgtggaccaaaca

SEQ ID NO: 311245 - DNA, 15 bp, Homo sapiens
tgctgtggaccaaac

SEQ ID NO: 311246 - DNA, 15 bp, Homo sapiens
atgctgtggaccaaa

SEQ ID NO: 311247 - DNA, 15 bp, Homo sapiens
aatgctgtggaccaa

SEQ ID NO: 311248 - DNA, 15 bp, Homo sapiens
taatgctgtggacca

SEQ ID NO: 311249 - DNA, 15 bp, Homo sapiens
ataatgctgtggacc

SEQ ID NO: 311250 - DNA, 15 bp, Homo sapiens
gataatgctgtggac

SEQ ID NO: 311251 - DNA, 15 bp, Homo sapiens
agataatgctgtgga

SEQ ID NO: 311252 - DNA, 15 bp, Homo sapiens
cagataatgctgtgg

SEQ ID NO: 311253 - DNA, 15 bp, Homo sapiens
gcagataatgctgtg

SEQ ID NO: 311254 - DNA, 15 bp, Homo sapiens
tgcagataatgctgt

SEQ ID NO: 311255 - DNA, 15 bp, Homo sapiens
atgcagataatgctg

SEQ ID NO: 311256 - DNA, 15 bp, Homo sapiens
catgcagataatgct

SEQ ID NO: 311257 - DNA, 15 bp, Homo sapiens
ccatgcagataatgc

SEQ ID NO: 311258 - DNA, 15 bp, Homo sapiens
cccatgcagataatg

SEQ ID NO: 311259 - DNA, 15 bp, Homo sapiens
ccccatgcagataat

SEQ ID NO: 311260 - DNA, 15 bp, Homo sapiens
cccccatgcagataa

SEQ ID NO: 311261 - DNA, 15 bp, Homo sapiens
gcccccatgcagata

SEQ ID NO: 311262 - DNA, 15 bp, Homo sapiens
tgcccccatgcagat

SEQ ID NO: 311263 - DNA, 15 bp, Homo sapiens
atgcccccatgcaga

SEQ ID NO: 311264 - DNA, 15 bp, Homo sapiens
tatgcccccatgcag

SEQ ID NO: 311265 - DNA, 15 bp, Homo sapiens
ttatgcccccatgca

SEQ ID NO: 311266 - DNA, 15 bp, Homo sapiens
attatgcccccatgc

SEQ ID NO: 311267 - DNA, 15 bp, Homo sapiens
aattatgcccccatg

SEQ ID NO: 311268 - DNA, 15 bp, Homo sapiens
gaattatgcccccat

SEQ ID NO: 311269 - DNA, 15 bp, Homo sapiens
ggaattatgccccca

SEQ ID NO: 311270 - DNA, 15 bp, Homo sapiens
gggaattatgccccc

SEQ ID NO: 311271 - DNA, 15 bp, Homo sapiens
agggaattatgcccc

SEQ ID NO: 311272 - DNA, 15 bp, Homo sapiens
aagggaattatgccc

SEQ ID NO: 311273 - DNA, 15 bp, Homo sapiens
taagggaattatgcc

SEQ ID NO: 311274 - DNA, 15 bp, Homo sapiens
ctaagggaattatgc

SEQ ID NO: 311275 - DNA, 15 bp, Homo sapiens
gctaagggaattatg

SEQ ID NO: 311276 - DNA, 15 bp, Homo sapiens
agctaagggaattat

SEQ ID NO: 311277 - DNA, 15 bp, Homo sapiens
cagctaagggaatta

SEQ ID NO: 311278 - DNA, 15 bp, Homo sapiens
gcagctaagggaatt

SEQ ID NO: 311279 - DNA, 15 bp, Homo sapiens
tgcagctaagggaat

SEQ ID NO: 311280 - DNA, 15 bp, Homo sapiens
ctgcagctaagggaa

SEQ ID NO: 311281 - DNA, 15 bp, Homo sapiens
actgcagctaaggga

SEQ ID NO: 311282 - DNA, 15 bp, Homo sapiens
gactgcagctaaggg

SEQ ID NO: 311283 - DNA, 15 bp, Homo sapiens
tgactgcagctaagg

SEQ ID NO: 311284 - DNA, 15 bp, Homo sapiens
ctgactgcagctaag

SEQ ID NO: 311285 - DNA, 15 bp, Homo sapiens
actgactgcagctaa

SEQ ID NO: 311286 - DNA, 15 bp, Homo sapiens
aactgactgcagcta

SEQ ID NO: 311287 - DNA, 15 bp, Homo sapiens
aaactgactgcagct

SEQ ID NO: 311288 - DNA, 15 bp, Homo sapiens
aaaactgactgcagc

SEQ ID NO: 311289 - DNA, 15 bp, Homo sapiens
taaaactgactgcag

SEQ ID NO: 311290 - DNA, 15 bp, Homo sapiens
gtaaaactgactgca

SEQ ID NO: 311291 - DNA, 15 bp, Homo sapiens
tgtaaaactgactgc

SEQ ID NO: 311292 - DNA, 15 bp, Homo sapiens
ctgtaaaactgactg

SEQ ID NO: 311293 - DNA, 15 bp, Homo sapiens
cctgtaaaactgact

SEQ ID NO: 311294 - DNA, 15 bp, Homo sapiens
acctgtaaaactgac

SEQ ID NO: 311295 - DNA, 15 bp, Homo sapiens
gacctgtaaaactga

SEQ ID NO: 311296 - DNA, 15 bp, Homo sapiens
agacctgtaaaactg

SEQ ID NO: 311297 - DNA, 15 bp, Homo sapiens
aagacctgtaaaact

SEQ ID NO: 311298 - DNA, 15 bp, Homo sapiens
aaagacctgtaaaac

SEQ ID NO: 311299 - DNA, 15 bp, Homo sapiens
caaagacctgtaaaa

SEQ ID NO: 311300 - DNA, 15 bp, Homo sapiens
gcaaagacctgtaaa

SEQ ID NO: 311301 - DNA, 15 bp, Homo sapiens
agcaaagacctgtaa

SEQ ID NO: 311302 - DNA, 15 bp, Homo sapiens
gagcaaagacctgta

SEQ ID NO: 311303 - DNA, 15 bp, Homo sapiens
tgagcaaagacctgt

SEQ ID NO: 311304 - DNA, 15 bp, Homo sapiens
atgagcaaagacctg

SEQ ID NO: 311305 - DNA, 15 bp, Homo sapiens
tatgagcaaagacct

SEQ ID NO: 311306 - DNA, 15 bp, Homo sapiens
ctatgagcaaagacc

SEQ ID NO: 311307 - DNA, 15 bp, Homo sapiens
cctatgagcaaagac

SEQ ID NO: 311308 - DNA, 15 bp, Homo sapiens
tcctatgagcaaaga

SEQ ID NO: 311309 - DNA, 15 bp, Homo sapiens
atcctatgagcaaag

SEQ ID NO: 311310 - DNA, 15 bp, Homo sapiens
aatcctatgagcaaa

SEQ ID NO: 311311 - DNA, 15 bp, Homo sapiens
taatcctatgagcaa

SEQ ID NO: 311312 - DNA, 15 bp, Homo sapiens
gtaatcctatgagca

SEQ ID NO: 311313 - DNA, 15 bp, Homo sapiens
tgtaatcctatgagc

SEQ ID NO: 311314 - DNA, 15 bp, Homo sapiens
ctgtaatcctatgag

SEQ ID NO: 311315 - DNA, 15 bp, Homo sapiens
actgtaatcctatga

SEQ ID NO: 311316 - DNA, 15 bp, Homo sapiens
aactgtaatcctatg

SEQ ID NO: 311317 - DNA, 15 bp, Homo sapiens
gaactgtaatcctat

SEQ ID NO: 311318 - DNA, 15 bp, Homo sapiens
agaactgtaatccta

SEQ ID NO: 311319 - DNA, 15 bp, Homo sapiens
aagaactgtaatcct

SEQ ID NO: 311320 - DNA, 15 bp, Homo sapiens
aaagaactgtaatcc

SEQ ID NO: 311321 - DNA, 15 bp, Homo sapiens
aaaagaactgtaatc

SEQ ID NO: 311322 - DNA, 15 bp, Homo sapiens
taaaagaactgtaat

SEQ ID NO: 311323 - DNA, 15 bp, Homo sapiens
gtaaaagaactgtaa

SEQ ID NO: 311324 - DNA, 15 bp, Homo sapiens
tgtaaaagaactgta

SEQ ID NO: 311325 - DNA, 15 bp, Homo sapiens
atgtaaaagaactgt

SEQ ID NO: 311326 - DNA, 15 bp, Homo sapiens
tatgtaaaagaactg

SEQ ID NO: 311327 - DNA, 15 bp, Homo sapiens
ttatgtaaaagaact

SEQ ID NO: 311328 - DNA, 15 bp, Homo sapiens
tttatgtaaaagaac

SEQ ID NO: 311329 - DNA, 15 bp, Homo sapiens
ttttatgtaaaagaa

SEQ ID NO: 311330 - DNA, 15 bp, Homo sapiens
cttttatgtaaaaga

SEQ ID NO: 311331 - DNA, 15 bp, Homo sapiens
ccttttatgtaaaag

SEQ ID NO: 311332 - DNA, 15 bp, Homo sapiens
tccttttatgtaaaa

SEQ ID NO: 311333 - DNA, 15 bp, Homo sapiens
atccttttatgtaaa

SEQ ID NO: 311334 - DNA, 15 bp, Homo sapiens
catccttttatgtaa

SEQ ID NO: 311335 - DNA, 15 bp, Homo sapiens
gcatccttttatgta

SEQ ID NO: 311336 - DNA, 15 bp, Homo sapiens
agcatccttttatgt

SEQ ID NO: 311337 - DNA, 15 bp, Homo sapiens
aagcatccttttatg

SEQ ID NO: 311338 - DNA, 15 bp, Homo sapiens
caagcatccttttat

SEQ ID NO: 311339 - DNA, 15 bp, Homo sapiens
ccaagcatcctttta

SEQ ID NO: 311340 - DNA, 15 bp, Homo sapiens
tccaagcatcctttt

SEQ ID NO: 311341 - DNA, 15 bp, Homo sapiens
ttccaagcatccttt

SEQ ID NO: 311342 - DNA, 15 bp, Homo sapiens
attccaagcatcctt

SEQ ID NO: 311343 - DNA, 15 bp, Homo sapiens
cattccaagcatcct

SEQ ID NO: 311344 - DNA, 15 bp, Homo sapiens
ccattccaagcatcc

SEQ ID NO: 311345 - DNA, 15 bp, Homo sapiens
cccattccaagcatc

SEQ ID NO: 311346 - DNA, 15 bp, Homo sapiens
ccccattccaagcat

SEQ ID NO: 311347 - DNA, 15 bp, Homo sapiens
cccccattccaagca

SEQ ID NO: 311348 - DNA, 15 bp, Homo sapiens
gcccccattccaagc

SEQ ID NO: 311349 - DNA, 15 bp, Homo sapiens
ggcccccattccaag

SEQ ID NO: 311350 - DNA, 15 bp, Homo sapiens
tggcccccattccaa

SEQ ID NO: 311351 - DNA, 15 bp, Homo sapiens
gtggcccccattcca

SEQ ID NO: 311352 - DNA, 15 bp, Homo sapiens
ggtggcccccattcc

SEQ ID NO: 311353 - DNA, 15 bp, Homo sapiens
tggtggcccccattc

SEQ ID NO: 311354 - DNA, 15 bp, Homo sapiens
ttggtggcccccatt

SEQ ID NO: 311355 - DNA, 15 bp, Homo sapiens
cttggtggcccccat

SEQ ID NO: 311356 - DNA, 15 bp, Homo sapiens
tcttggtggccccca

SEQ ID NO: 311357 - DNA, 15 bp, Homo sapiens
ctcttggtggccccc

SEQ ID NO: 311358 - DNA, 15 bp, Homo sapiens
actcttggtggcccc

SEQ ID NO: 311359 - DNA, 15 bp, Homo sapiens
cactcttggtggccc

SEQ ID NO: 311360 - DNA, 15 bp, Homo sapiens
gcactcttggtggcc

SEQ ID NO: 311361 - DNA, 15 bp, Homo sapiens
ggcactcttggtggc

SEQ ID NO: 311362 - DNA, 15 bp, Homo sapiens
tggcactcttggtgg

SEQ ID NO: 311363 - DNA, 15 bp, Homo sapiens
ttggcactcttggtg

SEQ ID NO: 311364 - DNA, 15 bp, Homo sapiens
attggcactcttggt

SEQ ID NO: 311365 - DNA, 15 bp, Homo sapiens
tattggcactcttgg

SEQ ID NO: 311366 - DNA, 15 bp, Homo sapiens
atattggcactcttg

SEQ ID NO: 311367 - DNA, 15 bp, Homo sapiens
aatattggcactctt

SEQ ID NO: 311368 - DNA, 15 bp, Homo sapiens
aaatattggcactct

SEQ ID NO: 311369 - DNA, 15 bp, Homo sapiens
taaatattggcactc

SEQ ID NO: 311370 - DNA, 15 bp, Homo sapiens
ctaaatattggcact

SEQ ID NO: 311371 - DNA, 15 bp, Homo sapiens
actaaatattggcac

SEQ ID NO: 311372 - DNA, 15 bp, Homo sapiens
tactaaatattggca

SEQ ID NO: 311373 - DNA, 15 bp, Homo sapiens
atactaaatattggc

SEQ ID NO: 311374 - DNA, 15 bp, Homo sapiens
gatactaaatattgg

SEQ ID NO: 311375 - DNA, 15 bp, Homo sapiens
agatactaaatattg

SEQ ID NO: 311376 - DNA, 15 bp, Homo sapiens
aagatactaaatatt

SEQ ID NO: 311377 - DNA, 15 bp, Homo sapiens
aaagatactaaatat

SEQ ID NO: 311378 - DNA, 15 bp, Homo sapiens
taaagatactaaata

SEQ ID NO: 311379 - DNA, 15 bp, Homo sapiens
ttaaagatactaaat

SEQ ID NO: 311380 - DNA, 15 bp, Homo sapiens
gttaaagatactaaa

SEQ ID NO: 311381 - DNA, 15 bp, Homo sapiens
agttaaagatactaa

SEQ ID NO: 311382 - DNA, 15 bp, Homo sapiens
cagttaaagatacta

SEQ ID NO: 311383 - DNA, 15 bp, Homo sapiens
tcagttaaagatact

SEQ ID NO: 311384 - DNA, 15 bp, Homo sapiens
ctcagttaaagatac

SEQ ID NO: 311385 - DNA, 15 bp, Homo sapiens
gctcagttaaagata

SEQ ID NO: 311386 - DNA, 15 bp, Homo sapiens
agctcagttaaagat

SEQ ID NO: 311387 - DNA, 15 bp, Homo sapiens
gagctcagttaaaga

SEQ ID NO: 311388 - DNA, 15 bp, Homo sapiens
tgagctcagttaaag

SEQ ID NO: 311389 - DNA, 15 bp, Homo sapiens
ttgagctcagttaaa

SEQ ID NO: 311390 - DNA, 15 bp, Homo sapiens
tttgagctcagttaa

SEQ ID NO: 311391 - DNA, 15 bp, Homo sapiens
ctttgagctcagtta

SEQ ID NO: 311392 - DNA, 15 bp, Homo sapiens
actttgagctcagtt

SEQ ID NO: 311393 - DNA, 15 bp, Homo sapiens
tactttgagctcagt

SEQ ID NO: 311394 - DNA, 15 bp, Homo sapiens
ttactttgagctcag

SEQ ID NO: 311395 - DNA, 15 bp, Homo sapiens
attactttgagctca

SEQ ID NO: 311396 - DNA, 15 bp, Homo sapiens
tattactttgagctc

SEQ ID NO: 311397 - DNA, 15 bp, Homo sapiens
ttattactttgagct

SEQ ID NO: 311398 - DNA, 15 bp, Homo sapiens
gttattactttgagc

SEQ ID NO: 311399 - DNA, 15 bp, Homo sapiens
agttattactttgag

SEQ ID NO: 311400 - DNA, 15 bp, Homo sapiens
tagttattactttga

SEQ ID NO: 311401 - DNA, 15 bp, Homo sapiens
gtagttattactttg

SEQ ID NO: 311402 - DNA, 15 bp, Homo sapiens
agtagttattacttt

SEQ ID NO: 311403 - DNA, 15 bp, Homo sapiens
aagtagttattactt

SEQ ID NO: 311404 - DNA, 15 bp, Homo sapiens
taagtagttattact

SEQ ID NO: 311405 - DNA, 15 bp, Homo sapiens
ttaagtagttattac

SEQ ID NO: 311406 - DNA, 15 bp, Homo sapiens
gttaagtagttatta

SEQ ID NO: 311407 - DNA, 15 bp, Homo sapiens
agttaagtagttatt

SEQ ID NO: 311408 - DNA, 15 bp, Homo sapiens
tagttaagtagttat

SEQ ID NO: 311409 - DNA, 15 bp, Homo sapiens
ctagttaagtagtta

SEQ ID NO: 311410 - DNA, 15 bp, Homo sapiens
tctagttaagtagtt

SEQ ID NO: 311411 - DNA, 15 bp, Homo sapiens
ttctagttaagtagt

SEQ ID NO: 311412 - DNA, 15 bp, Homo sapiens
attctagttaagtag

SEQ ID NO: 311413 - DNA, 15 bp, Homo sapiens
gattctagttaagta

SEQ ID NO: 311414 - DNA, 15 bp, Homo sapiens
tgattctagttaagt

SEQ ID NO: 311415 - DNA, 15 bp, Homo sapiens
ctgattctagttaag

SEQ ID NO: 311416 - DNA, 15 bp, Homo sapiens
actgattctagttaa

SEQ ID NO: 311417 - DNA, 15 bp, Homo sapiens
cactgattctagtta

SEQ ID NO: 311418 - DNA, 15 bp, Homo sapiens
acactgattctagtt

SEQ ID NO: 311419 - DNA, 15 bp, Homo sapiens
cacactgattctagt

SEQ ID NO: 311420 - DNA, 15 bp, Homo sapiens
gcacactgattctag

SEQ ID NO: 311421 - DNA, 15 bp, Homo sapiens
agcacactgattcta

SEQ ID NO: 311422 - DNA, 15 bp, Homo sapiens
aagcacactgattct

SEQ ID NO: 311423 - DNA, 15 bp, Homo sapiens
gaagcacactgattc

SEQ ID NO: 311424 - DNA, 15 bp, Homo sapiens
agaagcacactgatt

SEQ ID NO: 311425 - DNA, 15 bp, Homo sapiens
aagaagcacactgat

SEQ ID NO: 311426 - DNA, 15 bp, Homo sapiens
caagaagcacactga

SEQ ID NO: 311427 - DNA, 15 bp, Homo sapiens
tcaagaagcacactg

SEQ ID NO: 311428 - DNA, 15 bp, Homo sapiens
atcaagaagcacact

SEQ ID NO: 311429 - DNA, 15 bp, Homo sapiens
tatcaagaagcacac

SEQ ID NO: 311430 - DNA, 15 bp, Homo sapiens
atatcaagaagcaca

SEQ ID NO: 311431 - DNA, 15 bp, Homo sapiens
gatatcaagaagcac

SEQ ID NO: 311432 - DNA, 15 bp, Homo sapiens
agatatcaagaagca

SEQ ID NO: 311433 - DNA, 15 bp, Homo sapiens
tagatatcaagaagc

SEQ ID NO: 311434 - DNA, 15 bp, Homo sapiens
ctagatatcaagaag

SEQ ID NO: 311435 - DNA, 15 bp, Homo sapiens
cctagatatcaagaa

SEQ ID NO: 311436 - DNA, 15 bp, Homo sapiens
tcctagatatcaaga

SEQ ID NO: 311437 - DNA, 15 bp, Homo sapiens
ttcctagatatcaag

SEQ ID NO: 311438 - DNA, 15 bp, Homo sapiens
tttcctagatatcaa

SEQ ID NO: 311439 - DNA, 15 bp, Homo sapiens
ttttcctagatatca

SEQ ID NO: 311440 - DNA, 15 bp, Homo sapiens
tttttcctagatatc

SEQ ID NO: 311441 - DNA, 15 bp, Homo sapiens
ttttttcctagatat

SEQ ID NO: 311442 - DNA, 15 bp, Homo sapiens
tttttttcctagata

SEQ ID NO: 311443 - DNA, 15 bp, Homo sapiens
ctttttttcctagat

SEQ ID NO: 311444 - DNA, 15 bp, Homo sapiens
cctttttttcctaga

SEQ ID NO: 311445 - DNA, 15 bp, Homo sapiens
gcctttttttcctag

SEQ ID NO: 311446 - DNA, 15 bp, Homo sapiens
tgcctttttttccta

SEQ ID NO: 311447 - DNA, 15 bp, Homo sapiens
ttgcctttttttcct

SEQ ID NO: 311448 - DNA, 15 bp, Homo sapiens
tttgcctttttttcc

SEQ ID NO: 311449 - DNA, 15 bp, Homo sapiens
ctttgcctttttttc

SEQ ID NO: 311450 - DNA, 15 bp, Homo sapiens
cctttgccttttttt

SEQ ID NO: 311451 - DNA, 15 bp, Homo sapiens
tcctttgcctttttt

SEQ ID NO: 311452 - DNA, 15 bp, Homo sapiens
ttcctttgccttttt

SEQ ID NO: 311453 - DNA, 15 bp, Homo sapiens
cttcctttgcctttt

SEQ ID NO: 311454 - DNA, 15 bp, Homo sapiens
ccttcctttgccttt

SEQ ID NO: 311455 - DNA, 15 bp, Homo sapiens
tccttcctttgcctt

SEQ ID NO: 311456 - DNA, 15 bp, Homo sapiens
ttccttcctttgcct

SEQ ID NO: 311457 - DNA, 15 bp, Homo sapiens
tttccttcctttgcc

SEQ ID NO: 311458 - DNA, 15 bp, Homo sapiens
ctttccttcctttgc

SEQ ID NO: 311459 - DNA, 15 bp, Homo sapiens
tctttccttcctttg

SEQ ID NO: 311460 - DNA, 15 bp, Homo sapiens
gttctttccttcctt

SEQ ID NO: 311461 - DNA, 15 bp, Homo sapiens
tgttctttccttcct

SEQ ID NO: 311462 - DNA, 15 bp, Homo sapiens
ctgttctttccttcc

SEQ ID NO: 311463 - DNA, 15 bp, Homo sapiens
cctgttctttccttc

SEQ ID NO: 311464 - DNA, 15 bp, Homo sapiens
tcctgttctttcctt

SEQ ID NO: 311465 - DNA, 15 bp, Homo sapiens
atcctgttctttcct

SEQ ID NO: 311466 - DNA, 15 bp, Homo sapiens
aatcctgttctttcc

SEQ ID NO: 311467 - DNA, 15 bp, Homo sapiens
aaatcctgttctttc

SEQ ID NO: 311468 - DNA, 15 bp, Homo sapiens
caaatcctgttcttt

SEQ ID NO: 311469 - DNA, 15 bp, Homo sapiens
ccaaatcctgttctt

SEQ ID NO: 311470 - DNA, 15 bp, Homo sapiens
cccaaatcctgttct

SEQ ID NO: 311471 - DNA, 15 bp, Homo sapiens
ccccaaatcctgttc

SEQ ID NO: 311472 - DNA, 15 bp, Homo sapiens
tccccaaatcctgtt

SEQ ID NO: 311473 - DNA, 15 bp, Homo sapiens
atccccaaatcctgt

SEQ ID NO: 311474 - DNA, 15 bp, Homo sapiens
catccccaaatcctg

SEQ ID NO: 311475 - DNA, 15 bp, Homo sapiens
acatccccaaatcct

SEQ ID NO: 311476 - DNA, 15 bp, Homo sapiens
tacatccccaaatcc

SEQ ID NO: 311477 - DNA, 15 bp, Homo sapiens
ttacatccccaaatc

SEQ ID NO: 311478 - DNA, 15 bp, Homo sapiens
attacatccccaaat

SEQ ID NO: 311479 - DNA, 15 bp, Homo sapiens
aattacatccccaaa

SEQ ID NO: 311480 - DNA, 15 bp, Homo sapiens
aaattacatccccaa

SEQ ID NO: 311481 - DNA, 15 bp, Homo sapiens
caaattacatcccca

SEQ ID NO: 311482 - DNA, 15 bp, Homo sapiens
tcaaattacatcccc

SEQ ID NO: 311483 - DNA, 15 bp, Homo sapiens
ctcaaattacatccc

SEQ ID NO: 311484 - DNA, 15 bp, Homo sapiens
tctcaaattacatcc

SEQ ID NO: 311485 - DNA, 15 bp, Homo sapiens
atctcaaattacatc

SEQ ID NO: 311486 - DNA, 15 bp, Homo sapiens
aatctcaaattacat

SEQ ID NO: 311487 - DNA, 15 bp, Homo sapiens
taatctcaaattaca

SEQ ID NO: 311488 - DNA, 15 bp, Homo sapiens
ttaatctcaaattac

SEQ ID NO: 311489 - DNA, 15 bp, Homo sapiens
attaatctcaaatta

SEQ ID NO: 311490 - DNA, 15 bp, Homo sapiens
tattaatctcaaatt

SEQ ID NO: 311491 - DNA, 15 bp, Homo sapiens
ttattaatctcaaat

SEQ ID NO: 311492 - DNA, 15 bp, Homo sapiens
tttattaatctcaaa

SEQ ID NO: 311493 - DNA, 15 bp, Homo sapiens
atttattaatctcaa

SEQ ID NO: 311494 - DNA, 15 bp, Homo sapiens
catttattaatctca

SEQ ID NO: 311495 - DNA, 15 bp, Homo sapiens
tcatttattaatctc

SEQ ID NO: 311496 - DNA, 15 bp, Homo sapiens
atcatttattaatct

SEQ ID NO: 311497 - DNA, 15 bp, Homo sapiens
aatcatttattaatc

SEQ ID NO: 311498 - DNA, 15 bp, Homo sapiens
gaatcatttattaat

SEQ ID NO: 311499 - DNA, 15 bp, Homo sapiens
tgaatcatttattaa

SEQ ID NO: 311500 - DNA, 15 bp, Homo sapiens
gtgaatcatttatta

SEQ ID NO: 311501 - DNA, 15 bp, Homo sapiens
agtgaatcatttatt

SEQ ID NO: 311502 - DNA, 15 bp, Homo sapiens
gagtgaatcatttat

SEQ ID NO: 311503 - DNA, 15 bp, Homo sapiens
tgagtgaatcattta

SEQ ID NO: 311504 - DNA, 15 bp, Homo sapiens
ttgagtgaatcattt

SEQ ID NO: 311505 - DNA, 15 bp, Homo sapiens
attgagtgaatcatt

SEQ ID NO: 311506 - DNA, 15 bp, Homo sapiens
tattgagtgaatcat

SEQ ID NO: 311507 - DNA, 15 bp, Homo sapiens
ctattgagtgaatca

SEQ ID NO: 311508 - DNA, 15 bp, Homo sapiens
tctattgagtgaatc

SEQ ID NO: 311509 - DNA, 15 bp, Homo sapiens
atctattgagtgaat

SEQ ID NO: 311510 - DNA, 15 bp, Homo sapiens
tatctattgagtgaa

SEQ ID NO: 311511 - DNA, 15 bp, Homo sapiens
gtatctattgagtga

SEQ ID NO: 311512 - DNA, 15 bp, Homo sapiens
tgtatctattgagtg

SEQ ID NO: 311513 - DNA, 15 bp, Homo sapiens
atgtatctattgagt

SEQ ID NO: 311514 - DNA, 15 bp, Homo sapiens
tatgtatctattgag

SEQ ID NO: 311515 - DNA, 15 bp, Homo sapiens
atatgtatctattga

SEQ ID NO: 311516 - DNA, 15 bp, Homo sapiens
catatgtatctattg

SEQ ID NO: 311517 - DNA, 15 bp, Homo sapiens
ccatatgtatctatt

SEQ ID NO: 311518 - DNA, 15 bp, Homo sapiens
tccatatgtatctat

SEQ ID NO: 311519 - DNA, 15 bp, Homo sapiens
atccatatgtatcta

SEQ ID NO: 311520 - DNA, 15 bp, Homo sapiens
gatccatatgtatct

SEQ ID NO: 311521 - DNA, 15 bp, Homo sapiens
tgatccatatgtatc

SEQ ID NO: 311522 - DNA, 15 bp, Homo sapiens
atgatccatatgtat

SEQ ID NO: 311523 - DNA, 15 bp, Homo sapiens
tatgatccatatgta

SEQ ID NO: 311524 - DNA, 15 bp, Homo sapiens
ctatgatccatatgt

SEQ ID NO: 311525 - DNA, 15 bp, Homo sapiens
gctatgatccatatg

SEQ ID NO: 311526 - DNA, 15 bp, Homo sapiens
tgctatgatccatat

SEQ ID NO: 311527 - DNA, 15 bp, Homo sapiens
gtgctatgatccata

SEQ ID NO: 311528 - DNA, 15 bp, Homo sapiens
agtgctatgatccat

SEQ ID NO: 311529 - DNA, 15 bp, Homo sapiens
gagtgctatgatcca

SEQ ID NO: 311530 - DNA, 15 bp, Homo sapiens
agagtgctatgatcc

SEQ ID NO: 311531 - DNA, 15 bp, Homo sapiens
cagagtgctatgatc

SEQ ID NO: 311532 - DNA, 15 bp, Homo sapiens
gcagagtgctatgat

SEQ ID NO: 311533 - DNA, 15 bp, Homo sapiens
agcagagtgctatga

SEQ ID NO: 311534 - DNA, 15 bp, Homo sapiens
aagcagagtgctatg

SEQ ID NO: 311535 - DNA, 15 bp, Homo sapiens
caagcagagtgctat

SEQ ID NO: 311536 - DNA, 15 bp, Homo sapiens
acaagcagagtgcta

SEQ ID NO: 311537 - DNA, 15 bp, Homo sapiens
aacaagcagagtgct

SEQ ID NO: 311538 - DNA, 15 bp, Homo sapiens
caacaagcagagtgc

SEQ ID NO: 311539 - DNA, 15 bp, Homo sapiens
acaacaagcagagtg

SEQ ID NO: 311540 - DNA, 15 bp, Homo sapiens
cacaacaagcagagt

SEQ ID NO: 311541 - DNA, 15 bp, Homo sapiens
gcacaacaagcagag

SEQ ID NO: 311542 - DNA, 15 bp, Homo sapiens
tgcacaacaagcaga

SEQ ID NO: 311543 - DNA, 15 bp, Homo sapiens
atgcacaacaagcag

SEQ ID NO: 311544 - DNA, 15 bp, Homo sapiens
catgcacaacaagca

SEQ ID NO: 311545 - DNA, 15 bp, Homo sapiens
ccatgcacaacaagc

SEQ ID NO: 311546 - DNA, 15 bp, Homo sapiens
accatgcacaacaag

SEQ ID NO: 311547 - DNA, 15 bp, Homo sapiens
taccatgcacaacaa

SEQ ID NO: 311548 - DNA, 15 bp, Homo sapiens
ataccatgcacaaca

SEQ ID NO: 311549 - DNA, 15 bp, Homo sapiens
tataccatgcacaac

SEQ ID NO: 311550 - DNA, 15 bp, Homo sapiens
gtataccatgcacaa

SEQ ID NO: 311551 - DNA, 15 bp, Homo sapiens
agtataccatgcaca

SEQ ID NO: 311552 - DNA, 15 bp, Homo sapiens
cagtataccatgcac

SEQ ID NO: 311553 - DNA, 15 bp, Homo sapiens
acagtataccatgca

SEQ ID NO: 311554 - DNA, 15 bp, Homo sapiens
cacagtataccatgc

SEQ ID NO: 311555 - DNA, 15 bp, Homo sapiens
tcacagtataccatg

SEQ ID NO: 311556 - DNA, 15 bp, Homo sapiens
ttcacagtataccat

SEQ ID NO: 311557 - DNA, 15 bp, Homo sapiens
tttcacagtatacca

SEQ ID NO: 311558 - DNA, 15 bp, Homo sapiens
atttcacagtatacc

SEQ ID NO: 311559 - DNA, 15 bp, Homo sapiens
catttcacagtatac

SEQ ID NO: 311560 - DNA, 15 bp, Homo sapiens
acatttcacagtata

SEQ ID NO: 311561 - DNA, 15 bp, Homo sapiens
tacatttcacagtat

SEQ ID NO: 311562 - DNA, 15 bp, Homo sapiens
ttacatttcacagta

SEQ ID NO: 311563 - DNA, 15 bp, Homo sapiens
cttacatttcacagt

SEQ ID NO: 311564 - DNA, 15 bp, Homo sapiens
tcttacatttcacag

SEQ ID NO: 311565 - DNA, 15 bp, Homo sapiens
gtcttacatttcaca

SEQ ID NO: 311566 - DNA, 15 bp, Homo sapiens
tgtcttacatttcac

SEQ ID NO: 311567 - DNA, 15 bp, Homo sapiens
gtgtcttacatttca

SEQ ID NO: 311568 - DNA, 15 bp, Homo sapiens
tgtgtcttacatttc

SEQ ID NO: 311569 - DNA, 15 bp, Homo sapiens
ttgtgtcttacattt

SEQ ID NO: 311570 - DNA, 15 bp, Homo sapiens
attgtgtcttacatt

SEQ ID NO: 311571 - DNA, 15 bp, Homo sapiens
aattgtgtcttacat

SEQ ID NO: 311572 - DNA, 15 bp, Homo sapiens
aaattgtgtcttaca

SEQ ID NO: 311573 - DNA, 15 bp, Homo sapiens
gaaattgtgtcttac

SEQ ID NO: 311574 - DNA, 15 bp, Homo sapiens
tgaaattgtgtctta

SEQ ID NO: 311575 - DNA, 15 bp, Homo sapiens
ctgaaattgtgtctt

SEQ ID NO: 311576 - DNA, 15 bp, Homo sapiens
gctgaaattgtgtct

SEQ ID NO: 311577 - DNA, 15 bp, Homo sapiens
ggctgaaattgtgtc

SEQ ID NO: 311578 - DNA, 15 bp, Homo sapiens
aggctgaaattgtgt

SEQ ID NO: 311579 - DNA, 15 bp, Homo sapiens
taggctgaaattgtg

SEQ ID NO: 311580 - DNA, 15 bp, Homo sapiens
ctaggctgaaattgt

SEQ ID NO: 311581 - DNA, 15 bp, Homo sapiens
tctaggctgaaattg

SEQ ID NO: 311582 - DNA, 15 bp, Homo sapiens
ctctaggctgaaatt

SEQ ID NO: 311583 - DNA, 15 bp, Homo sapiens
actctaggctgaaat

SEQ ID NO: 311584 - DNA, 15 bp, Homo sapiens
tactctaggctgaaa

SEQ ID NO: 311585 - DNA, 15 bp, Homo sapiens
ctactctaggctgaa

SEQ ID NO: 311586 - DNA, 15 bp, Homo sapiens
gctactctaggctga

SEQ ID NO: 311587 - DNA, 15 bp, Homo sapiens
agctactctaggctg

SEQ ID NO: 311588 - DNA, 15 bp, Homo sapiens
aagctactctaggct

SEQ ID NO: 311589 - DNA, 15 bp, Homo sapiens
taagctactctaggc

SEQ ID NO: 311590 - DNA, 15 bp, Homo sapiens
ttaagctactctagg

SEQ ID NO: 311591 - DNA, 15 bp, Homo sapiens
attaagctactctag

SEQ ID NO: 311592 - DNA, 15 bp, Homo sapiens
gattaagctactcta

SEQ ID NO: 311593 - DNA, 15 bp, Homo sapiens
agattaagctactct

SEQ ID NO: 311594 - DNA, 15 bp, Homo sapiens
tagattaagctactc

SEQ ID NO: 311595 - DNA, 15 bp, Homo sapiens
ctagattaagctact

SEQ ID NO: 311596 - DNA, 15 bp, Homo sapiens
actagattaagctac

SEQ ID NO: 311597 - DNA, 15 bp, Homo sapiens
aactagattaagcta

SEQ ID NO: 311598 - DNA, 15 bp, Homo sapiens
taactagattaagct

SEQ ID NO: 311599 - DNA, 15 bp, Homo sapiens
ataactagattaagc

SEQ ID NO: 311600 - DNA, 15 bp, Homo sapiens
tataactagattaag

SEQ ID NO: 311601 - DNA, 15 bp, Homo sapiens
ctataactagattaa

SEQ ID NO: 311602 - DNA, 15 bp, Homo sapiens
tctataactagatta

SEQ ID NO: 311603 - DNA, 15 bp, Homo sapiens
atctataactagatt

SEQ ID NO: 311604 - DNA, 15 bp, Homo sapiens
tatctataactagat

SEQ ID NO: 311605 - DNA, 15 bp, Homo sapiens
atatctataactaga

SEQ ID NO: 311606 - DNA, 15 bp, Homo sapiens
catatctataactag

SEQ ID NO: 311607 - DNA, 15 bp, Homo sapiens
ccatatctataacta

SEQ ID NO: 311608 - DNA, 15 bp, Homo sapiens
cccatatctataact

SEQ ID NO: 311609 - DNA, 15 bp, Homo sapiens
tcccatatctataac

SEQ ID NO: 311610 - DNA, 15 bp, Homo sapiens
ttcccatatctataa

SEQ ID NO: 311611 - DNA, 15 bp, Homo sapiens
attcccatatctata

SEQ ID NO: 311612 - DNA, 15 bp, Homo sapiens
aattcccatatctat

SEQ ID NO: 311613 - DNA, 15 bp, Homo sapiens
gaattcccatatcta

SEQ ID NO: 311614 - DNA, 15 bp, Homo sapiens
ggaattcccatatct

SEQ ID NO: 311615 - DNA, 15 bp, Homo sapiens
tggaattcccatatc

SEQ ID NO: 311616 - DNA, 15 bp, Homo sapiens
ttggaattcccatat

SEQ ID NO: 311617 - DNA, 15 bp, Homo sapiens
tttggaattcccata

SEQ ID NO: 311618 - DNA, 15 bp, Homo sapiens
atttggaattcccat

SEQ ID NO: 311619 - DNA, 15 bp, Homo sapiens
tatttggaattccca

SEQ ID NO: 311620 - DNA, 15 bp, Homo sapiens
gtatttggaattccc

SEQ ID NO: 311621 - DNA, 15 bp, Homo sapiens
ggtatttggaattcc

SEQ ID NO: 311622 - DNA, 15 bp, Homo sapiens
aggtatttggaattc

SEQ ID NO: 311623 - DNA, 15 bp, Homo sapiens
aaggtatttggaatt

SEQ ID NO: 311624 - DNA, 15 bp, Homo sapiens
aaaggtatttggaat

SEQ ID NO: 311625 - DNA, 15 bp, Homo sapiens
aaaaggtatttggaa

SEQ ID NO: 311626 - DNA, 15 bp, Homo sapiens
gaaaaggtatttgga

SEQ ID NO: 311627 - DNA, 15 bp, Homo sapiens
agaaaaggtatttgg

SEQ ID NO: 311628 - DNA, 15 bp, Homo sapiens
tagaaaaggtatttg

SEQ ID NO: 311629 - DNA, 15 bp, Homo sapiens
gtagaaaaggtattt

SEQ ID NO: 311630 - DNA, 15 bp, Homo sapiens
tgtagaaaaggtatt

SEQ ID NO: 311631 - DNA, 15 bp, Homo sapiens
ttgtagaaaaggtat

SEQ ID NO: 311632 - DNA, 15 bp, Homo sapiens
gttgtagaaaaggta

SEQ ID NO: 311633 - DNA, 15 bp, Homo sapiens
tgttgtagaaaaggt

SEQ ID NO: 311634 - DNA, 15 bp, Homo sapiens
ttgttgtagaaaagg

SEQ ID NO: 311635 - DNA, 15 bp, Homo sapiens
cttgttgtagaaaag

SEQ ID NO: 311636 - DNA, 15 bp, Homo sapiens
tcttgttgtagaaaa

SEQ ID NO: 311637 - DNA, 15 bp, Homo sapiens
ctcttgttgtagaaa

SEQ ID NO: 311638 - DNA, 15 bp, Homo sapiens
actcttgttgtagaa

SEQ ID NO: 311639 - DNA, 15 bp, Homo sapiens
aactcttgttgtaga

SEQ ID NO: 311640 - DNA, 15 bp, Homo sapiens
gaactcttgttgtag

SEQ ID NO: 311641 - DNA, 15 bp, Homo sapiens
tgaactcttgttgta

SEQ ID NO: 311642 - DNA, 15 bp, Homo sapiens
ttgaactcttgttgt

SEQ ID NO: 311643 - DNA, 15 bp, Homo sapiens
tttgaactcttgttg

SEQ ID NO: 311644 - DNA, 15 bp, Homo sapiens
ctttgaactcttgtt

SEQ ID NO: 311645 - DNA, 15 bp, Homo sapiens
actttgaactcttgt

SEQ ID NO: 311646 - DNA, 15 bp, Homo sapiens
gactttgaactcttg

SEQ ID NO: 311647 - DNA, 15 bp, Homo sapiens
agactttgaactctt

SEQ ID NO: 311648 - DNA, 15 bp, Homo sapiens
aagactttgaactct

SEQ ID NO: 311649 - DNA, 15 bp, Homo sapiens
aaagactttgaactc

SEQ ID NO: 311650 - DNA, 15 bp, Homo sapiens
gaaagactttgaact

SEQ ID NO: 311651 - DNA, 15 bp, Homo sapiens
tgaaagactttgaac

SEQ ID NO: 311652 - DNA, 15 bp, Homo sapiens
atgaaagactttgaa

SEQ ID NO: 311653 - DNA, 15 bp, Homo sapiens
tatgaaagactttga

SEQ ID NO: 311654 - DNA, 15 bp, Homo sapiens
ttatgaaagactttg

SEQ ID NO: 311655 - DNA, 15 bp, Homo sapiens
cttatgaaagacttt

SEQ ID NO: 311656 - DNA, 15 bp, Homo sapiens
acttatgaaagactt

SEQ ID NO: 311657 - DNA, 15 bp, Homo sapiens
gacttatgaaagact

SEQ ID NO: 311658 - DNA, 15 bp, Homo sapiens
tgacttatgaaagac

SEQ ID NO: 311659 - DNA, 15 bp, Homo sapiens
ttgacttatgaaaga

SEQ ID NO: 311660 - DNA, 15 bp, Homo sapiens
attgacttatgaaag

SEQ ID NO: 311661 - DNA, 15 bp, Homo sapiens
tattgacttatgaaa

SEQ ID NO: 311662 - DNA, 15 bp, Homo sapiens
atattgacttatgaa

SEQ ID NO: 311663 - DNA, 15 bp, Homo sapiens
tatattgacttatga

SEQ ID NO: 311664 - DNA, 15 bp, Homo sapiens
ttatattgacttatg

SEQ ID NO: 311665 - DNA, 15 bp, Homo sapiens
gttatattgacttat

SEQ ID NO: 311666 - DNA, 15 bp, Homo sapiens
tgttatattgactta

SEQ ID NO: 311667 - DNA, 15 bp, Homo sapiens
ttgttatattgactt

SEQ ID NO: 311668 - DNA, 15 bp, Homo sapiens
tttgttatattgact

SEQ ID NO: 311669 - DNA, 15 bp, Homo sapiens
ttttgttatattgac

SEQ ID NO: 311670 - DNA, 15 bp, Homo sapiens
cttttgttatattga

SEQ ID NO: 311671 - DNA, 15 bp, Homo sapiens
tcttttgttatattg

SEQ ID NO: 311672 - DNA, 15 bp, Homo sapiens
atcttttgttatatt

SEQ ID NO: 311673 - DNA, 15 bp, Homo sapiens
catcttttgttatat

SEQ ID NO: 311674 - DNA, 15 bp, Homo sapiens
tcatcttttgttata

SEQ ID NO: 311675 - DNA, 15 bp, Homo sapiens
ttcatcttttgttat

SEQ ID NO: 311676 - DNA, 15 bp, Homo sapiens
attcatcttttgtta

SEQ ID NO: 311677 - DNA, 15 bp, Homo sapiens
tattcatcttttgtt

SEQ ID NO: 311678 - DNA, 15 bp, Homo sapiens
ttattcatcttttgt

SEQ ID NO: 311679 - DNA, 15 bp, Homo sapiens
tttattcatcttttg

SEQ ID NO: 311680 - DNA, 15 bp, Homo sapiens
atttattcatctttt

SEQ ID NO: 311681 - DNA, 15 bp, Homo sapiens
tatttattcatcttt

SEQ ID NO: 311682 - DNA, 15 bp, Homo sapiens
ctatttattcatctt

SEQ ID NO: 311683 - DNA, 15 bp, Homo sapiens
actatttattcatct

SEQ ID NO: 311684 - DNA, 15 bp, Homo sapiens
aactatttattcatc

SEQ ID NO: 311685 - DNA, 15 bp, Homo sapiens
taactatttattcat

SEQ ID NO: 311686 - DNA, 15 bp, Homo sapiens
ttaactatttattca

SEQ ID NO: 311687 - DNA, 15 bp, Homo sapiens
tttaactatttattc

SEQ ID NO: 311688 - DNA, 15 bp, Homo sapiens
atttaactatttatt

SEQ ID NO: 311689 - DNA, 15 bp, Homo sapiens
tatttaactatttat

SEQ ID NO: 311690 - DNA, 15 bp, Homo sapiens
ttatttaactattta

SEQ ID NO: 311691 - DNA, 15 bp, Homo sapiens
attatttaactattt

SEQ ID NO: 311692 - DNA, 15 bp, Homo sapiens
tattatttaactatt

SEQ ID NO: 311693 - DNA, 15 bp, Homo sapiens
gtattatttaactat

SEQ ID NO: 311694 - DNA, 15 bp, Homo sapiens
agtattatttaacta

SEQ ID NO: 311695 - DNA, 15 bp, Homo sapiens
tagtattatttaact

SEQ ID NO: 311696 - DNA, 15 bp, Homo sapiens
gtagtattatttaac

SEQ ID NO: 311697 - DNA, 15 bp, Homo sapiens
tgtagtattatttaa

SEQ ID NO: 311698 - DNA, 15 bp, Homo sapiens
ctgtagtattattta

SEQ ID NO: 311699 - DNA, 15 bp, Homo sapiens
tctgtagtattattt

SEQ ID NO: 311700 - DNA, 15 bp, Homo sapiens
ttctgtagtattatt

SEQ ID NO: 311701 - DNA, 15 bp, Homo sapiens
cttctgtagtattat

SEQ ID NO: 311702 - DNA, 15 bp, Homo sapiens
tcttctgtagtatta

SEQ ID NO: 311703 - DNA, 15 bp, Homo sapiens
ctcttctgtagtatt

SEQ ID NO: 311704 - DNA, 15 bp, Homo sapiens
actcttctgtagtat

SEQ ID NO: 311705 - DNA, 15 bp, Homo sapiens
tactcttctgtagta

SEQ ID NO: 311706 - DNA, 15 bp, Homo sapiens
ttactcttctgtagt

SEQ ID NO: 311707 - DNA, 15 bp, Homo sapiens
tttactcttctgtag

SEQ ID NO: 311708 - DNA, 15 bp, Homo sapiens
gtttactcttctgta

SEQ ID NO: 311709 - DNA, 15 bp, Homo sapiens
tgtttactcttctgt

SEQ ID NO: 311710 - DNA, 15 bp, Homo sapiens
atgtttactcttctg

SEQ ID NO: 311711 - DNA, 15 bp, Homo sapiens
catgtttactcttct

SEQ ID NO: 311712 - DNA, 15 bp, Homo sapiens
tcatgtttactcttc

SEQ ID NO: 311713 - DNA, 15 bp, Homo sapiens
ctcatgtttactctt

SEQ ID NO: 311714 - DNA, 15 bp, Homo sapiens
tctcatgtttactct

SEQ ID NO: 311715 - DNA, 15 bp, Homo sapiens
ttctcatgtttactc

SEQ ID NO: 311716 - DNA, 15 bp, Homo sapiens
cttctcatgtttact

SEQ ID NO: 311717 - DNA, 15 bp, Homo sapiens
gtcttctcatgttta

SEQ ID NO: 311718 - DNA, 15 bp, Homo sapiens
tgtcttctcatgttt

SEQ ID NO: 311719 - DNA, 15 bp, Homo sapiens
atgtcttctcatgtt

SEQ ID NO: 311720 - DNA, 15 bp, Homo sapiens
catgtcttctcatgt

SEQ ID NO: 311721 - DNA, 15 bp, Homo sapiens
gcatgtcttctcatg

SEQ ID NO: 311722 - DNA, 15 bp, Homo sapiens
tgcatgtcttctcat

SEQ ID NO: 311723 - DNA, 15 bp, Homo sapiens
atgcatgtcttctca

SEQ ID NO: 311724 - DNA, 15 bp, Homo sapiens
aatgcatgtcttctc

SEQ ID NO: 311725 - DNA, 15 bp, Homo sapiens
aaatgcatgtcttct

SEQ ID NO: 311726 - DNA, 15 bp, Homo sapiens
taaatgcatgtcttc

SEQ ID NO: 311727 - DNA, 15 bp, Homo sapiens
ttaaatgcatgtctt

SEQ ID NO: 311728 - DNA, 15 bp, Homo sapiens
tttaaatgcatgtct

SEQ ID NO: 311729 - DNA, 15 bp, Homo sapiens
atttaaatgcatgtc

SEQ ID NO: 311730 - DNA, 15 bp, Homo sapiens
catttaaatgcatgt

SEQ ID NO: 311731 - DNA, 15 bp, Homo sapiens
acatttaaatgcatg

SEQ ID NO: 311732 - DNA, 15 bp, Homo sapiens
tacatttaaatgcat

SEQ ID NO: 311733 - DNA, 15 bp, Homo sapiens
atacatttaaatgca

SEQ ID NO: 311734 - DNA, 15 bp, Homo sapiens
catacatttaaatgc

SEQ ID NO: 311735 - DNA, 15 bp, Homo sapiens
gcatacatttaaatg

SEQ ID NO: 311736 - DNA, 15 bp, Homo sapiens
tgcatacatttaaat

SEQ ID NO: 311737 - DNA, 15 bp, Homo sapiens
ctgcatacatttaaa

SEQ ID NO: 311738 - DNA, 15 bp, Homo sapiens
tctgcatacatttaa

SEQ ID NO: 311739 - DNA, 15 bp, Homo sapiens
ctctgcatacattta

SEQ ID NO: 311740 - DNA, 15 bp, Homo sapiens
gctctgcatacattt

SEQ ID NO: 311741 - DNA, 15 bp, Homo sapiens
tgctctgcatacatt

SEQ ID NO: 311742 - DNA, 15 bp, Homo sapiens
gtgctctgcatacat

SEQ ID NO: 311743 - DNA, 15 bp, Homo sapiens
agtgctctgcataca

SEQ ID NO: 311744 - DNA, 15 bp, Homo sapiens
aagtgctctgcatac

SEQ ID NO: 311745 - DNA, 15 bp, Homo sapiens
taagtgctctgcata

SEQ ID NO: 311746 - DNA, 15 bp, Homo sapiens
ataagtgctctgcat

SEQ ID NO: 311747 - DNA, 15 bp, Homo sapiens
aataagtgctctgca

SEQ ID NO: 311748 - DNA, 15 bp, Homo sapiens
caataagtgctctgc

SEQ ID NO: 311749 - DNA, 15 bp, Homo sapiens
gcaataagtgctctg

SEQ ID NO: 311750 - DNA, 15 bp, Homo sapiens
agcaataagtgctct

SEQ ID NO: 311751 - DNA, 15 bp, Homo sapiens
aagcaataagtgctc

SEQ ID NO: 311752 - DNA, 15 bp, Homo sapiens
aaagcaataagtgct

SEQ ID NO: 311753 - DNA, 15 bp, Homo sapiens
caaagcaataagtgc

SEQ ID NO: 311754 - DNA, 15 bp, Homo sapiens
ccaaagcaataagtg

SEQ ID NO: 311755 - DNA, 15 bp, Homo sapiens
tccaaagcaataagt

SEQ ID NO: 311756 - DNA, 15 bp, Homo sapiens
atccaaagcaataag

SEQ ID NO: 311757 - DNA, 15 bp, Homo sapiens
tatccaaagcaataa

SEQ ID NO: 311758 - DNA, 15 bp, Homo sapiens
ctatccaaagcaata

SEQ ID NO: 311759 - DNA, 15 bp, Homo sapiens
tctatccaaagcaat

SEQ ID NO: 311760 - DNA, 15 bp, Homo sapiens
ttctatccaaagcaa

SEQ ID NO: 311761 - DNA, 15 bp, Homo sapiens
attctatccaaagca

SEQ ID NO: 311762 - DNA, 15 bp, Homo sapiens
aattctatccaaagc

SEQ ID NO: 311763 - DNA, 15 bp, Homo sapiens
gaattctatccaaag

SEQ ID NO: 311764 - DNA, 15 bp, Homo sapiens
tgaattctatccaaa

SEQ ID NO: 311765 - DNA, 15 bp, Homo sapiens
gtgaattctatccaa

SEQ ID NO: 311766 - DNA, 15 bp, Homo sapiens
tgtgaattctatcca

SEQ ID NO: 311767 - DNA, 15 bp, Homo sapiens
atgtgaattctatcc

SEQ ID NO: 311768 - DNA, 15 bp, Homo sapiens
catgtgaattctatc

SEQ ID NO: 311769 - DNA, 15 bp, Homo sapiens
acatgtgaattctat

SEQ ID NO: 311770 - DNA, 15 bp, Homo sapiens
aacatgtgaattcta

SEQ ID NO: 311771 - DNA, 15 bp, Homo sapiens
taacatgtgaattct

SEQ ID NO: 311772 - DNA, 15 bp, Homo sapiens
ataacatgtgaattc

SEQ ID NO: 311773 - DNA, 15 bp, Homo sapiens
gataacatgtgaatt

SEQ ID NO: 311774 - DNA, 15 bp, Homo sapiens
ggataacatgtgaat

SEQ ID NO: 311775 - DNA, 15 bp, Homo sapiens
tggataacatgtgaa

SEQ ID NO: 311776 - DNA, 15 bp, Homo sapiens
atggataacatgtga

SEQ ID NO: 311777 - DNA, 15 bp, Homo sapiens
catggataacatgtg

SEQ ID NO: 311778 - DNA, 15 bp, Homo sapiens
gcatggataacatgt

SEQ ID NO: 311779 - DNA, 15 bp, Homo sapiens
cgcatggataacatg

SEQ ID NO: 311780 - DNA, 15 bp, Homo sapiens
acgcatggataacat

SEQ ID NO: 311781 - DNA, 15 bp, Homo sapiens
aacgcatggataaca

SEQ ID NO: 311782 - DNA, 15 bp, Homo sapiens
caacgcatggataac

SEQ ID NO: 311783 - DNA, 15 bp, Homo sapiens
tcaacgcatggataa

SEQ ID NO: 311784 - DNA, 15 bp, Homo sapiens
gtcaacgcatggata

SEQ ID NO: 311785 - DNA, 15 bp, Homo sapiens
agtcaacgcatggat

SEQ ID NO: 311786 - DNA, 15 bp, Homo sapiens
tagtcaacgcatgga

SEQ ID NO: 311787 - DNA, 15 bp, Homo sapiens
gtagtcaacgcatgg

SEQ ID NO: 311788 - DNA, 15 bp, Homo sapiens
tgtagtcaacgcatg

SEQ ID NO: 311789 - DNA, 15 bp, Homo sapiens
ttgtagtcaacgcat

SEQ ID NO: 311790 - DNA, 15 bp, Homo sapiens
cttgtagtcaacgca

SEQ ID NO: 311791 - DNA, 15 bp, Homo sapiens
tcttgtagtcaacgc

SEQ ID NO: 311792 - DNA, 15 bp, Homo sapiens
atcttgtagtcaacg

SEQ ID NO: 311793 - DNA, 15 bp, Homo sapiens
tatcttgtagtcaac

SEQ ID NO: 311794 - DNA, 15 bp, Homo sapiens
gtatcttgtagtcaa

SEQ ID NO: 311795 - DNA, 15 bp, Homo sapiens
tgtatcttgtagtca

SEQ ID NO: 311796 - DNA, 15 bp, Homo sapiens
atgtatcttgtagtc

SEQ ID NO: 311797 - DNA, 15 bp, Homo sapiens
catgtatcttgtagt

SEQ ID NO: 311798 - DNA, 15 bp, Homo sapiens
gcatgtatcttgtag

SEQ ID NO: 311799 - DNA, 15 bp, Homo sapiens
tgcatgtatcttgta

SEQ ID NO: 311800 - DNA, 15 bp, Homo sapiens
gtgcatgtatcttgt

SEQ ID NO: 311801 - DNA, 15 bp, Homo sapiens
tgtgcatgtatcttg

SEQ ID NO: 311802 - DNA, 15 bp, Homo sapiens
atgtgcatgtatctt

SEQ ID NO: 311803 - DNA, 15 bp, Homo sapiens
gatgtgcatgtatct

SEQ ID NO: 311804 - DNA, 15 bp, Homo sapiens
agatgtgcatgtatc

SEQ ID NO: 311805 - DNA, 15 bp, Homo sapiens
gagatgtgcatgtat

SEQ ID NO: 311806 - DNA, 15 bp, Homo sapiens
agagatgtgcatgta

SEQ ID NO: 311807 - DNA, 15 bp, Homo sapiens
tagagatgtgcatgt

SEQ ID NO: 311808 - DNA, 15 bp, Homo sapiens
ttagagatgtgcatg

SEQ ID NO: 311809 - DNA, 15 bp, Homo sapiens
tttagagatgtgcat

SEQ ID NO: 311810 - DNA, 15 bp, Homo sapiens
gtttagagatgtgca

SEQ ID NO: 311811 - DNA, 15 bp, Homo sapiens
tgtttagagatgtgc

SEQ ID NO: 311812 - DNA, 15 bp, Homo sapiens
gtgtttagagatgtg

SEQ ID NO: 311813 - DNA, 15 bp, Homo sapiens
tgtgtttagagatgt

SEQ ID NO: 311814 - DNA, 15 bp, Homo sapiens
gtgtgtttagagatg

SEQ ID NO: 311815 - DNA, 15 bp, Homo sapiens
agtgtgtttagagat

SEQ ID NO: 311816 - DNA, 15 bp, Homo sapiens
gagtgtgtttagaga

SEQ ID NO: 311817 - DNA, 15 bp, Homo sapiens
tgagtgtgtttagag

SEQ ID NO: 311818 - DNA, 15 bp, Homo sapiens
atgagtgtgtttaga

SEQ ID NO: 311819 - DNA, 15 bp, Homo sapiens
tatgagtgtgtttag

SEQ ID NO: 311820 - DNA, 15 bp, Homo sapiens
ttatgagtgtgttta

SEQ ID NO: 311821 - DNA, 15 bp, Homo sapiens
gttatgagtgtgttt

SEQ ID NO: 311822 - DNA, 15 bp, Homo sapiens
agttatgagtgtgtt

SEQ ID NO: 311823 - DNA, 15 bp, Homo sapiens
cagttatgagtgtgt

SEQ ID NO: 311824 - DNA, 15 bp, Homo sapiens
tcagttatgagtgtg

SEQ ID NO: 311825 - DNA, 15 bp, Homo sapiens
ttcagttatgagtgt

SEQ ID NO: 311826 - DNA, 15 bp, Homo sapiens
attcagttatgagtg

SEQ ID NO: 311827 - DNA, 15 bp, Homo sapiens
aattcagttatgagt

SEQ ID NO: 311828 - DNA, 15 bp, Homo sapiens
gaattcagttatgag

SEQ ID NO: 311829 - DNA, 15 bp, Homo sapiens
tgaattcagttatga

SEQ ID NO: 311830 - DNA, 15 bp, Homo sapiens
ctgaattcagttatg

SEQ ID NO: 311831 - DNA, 15 bp, Homo sapiens
gctgaattcagttat

SEQ ID NO: 311832 - DNA, 15 bp, Homo sapiens
agctgaattcagtta

SEQ ID NO: 311833 - DNA, 15 bp, Homo sapiens
aagctgaattcagtt

SEQ ID NO: 311834 - DNA, 15 bp, Homo sapiens
taagctgaattcagt

SEQ ID NO: 311835 - DNA, 15 bp, Homo sapiens
ttaagctgaattcag

SEQ ID NO: 311836 - DNA, 15 bp, Homo sapiens
attaagctgaattca

SEQ ID NO: 311837 - DNA, 15 bp, Homo sapiens
tattaagctgaattc

SEQ ID NO: 311838 - DNA, 15 bp, Homo sapiens
ctattaagctgaatt

SEQ ID NO: 311839 - DNA, 15 bp, Homo sapiens
cctattaagctgaat

SEQ ID NO: 311840 - DNA, 15 bp, Homo sapiens
tcctattaagctgaa

SEQ ID NO: 311841 - DNA, 15 bp, Homo sapiens
atcctattaagctga

SEQ ID NO: 311842 - DNA, 15 bp, Homo sapiens
tatcctattaagctg

SEQ ID NO: 311843 - DNA, 15 bp, Homo sapiens
ctatcctattaagct

SEQ ID NO: 311844 - DNA, 15 bp, Homo sapiens
actatcctattaagc

SEQ ID NO: 311845 - DNA, 15 bp, Homo sapiens
tactatcctattaag

SEQ ID NO: 311846 - DNA, 15 bp, Homo sapiens
attactatcctatta

SEQ ID NO: 311847 - DNA, 15 bp, Homo sapiens
aattactatcctatt

SEQ ID NO: 311848 - DNA, 15 bp, Homo sapiens
caattactatcctat

SEQ ID NO: 311849 - DNA, 15 bp, Homo sapiens
tcaattactatccta

SEQ ID NO: 311850 - DNA, 15 bp, Homo sapiens
ttcaattactatcct

SEQ ID NO: 311851 - DNA, 15 bp, Homo sapiens
attcaattactatcc

SEQ ID NO: 311852 - DNA, 15 bp, Homo sapiens
cattcaattactatc

SEQ ID NO: 311853 - DNA, 15 bp, Homo sapiens
tcattcaattactat

SEQ ID NO: 311854 - DNA, 15 bp, Homo sapiens
atcattcaattacta

SEQ ID NO: 311855 - DNA, 15 bp, Homo sapiens
catcattcaattact

SEQ ID NO: 311856 - DNA, 15 bp, Homo sapiens
ccatcattcaattac

SEQ ID NO: 311857 - DNA, 15 bp, Homo sapiens
tccatcattcaatta

SEQ ID NO: 311858 - DNA, 15 bp, Homo sapiens
ttccatcattcaatt

SEQ ID NO: 311859 - DNA, 15 bp, Homo sapiens
gttccatcattcaat

SEQ ID NO: 311860 - DNA, 15 bp, Homo sapiens
ggttccatcattcaa

SEQ ID NO: 311861 - DNA, 15 bp, Homo sapiens
aggttccatcattca

SEQ ID NO: 311862 - DNA, 15 bp, Homo sapiens
taggttccatcattc

SEQ ID NO: 311863 - DNA, 15 bp, Homo sapiens
ctaggttccatcatt

SEQ ID NO: 311864 - DNA, 15 bp, Homo sapiens
actaggttccatcat

SEQ ID NO: 311865 - DNA, 15 bp, Homo sapiens
cactaggttccatca

SEQ ID NO: 311866 - DNA, 15 bp, Homo sapiens
acactaggttccatc

SEQ ID NO: 311867 - DNA, 15 bp, Homo sapiens
cacactaggttccat

SEQ ID NO: 311868 - DNA, 15 bp, Homo sapiens
gcacactaggttcca

SEQ ID NO: 311869 - DNA, 15 bp, Homo sapiens
ggcacactaggttcc

SEQ ID NO: 311870 - DNA, 15 bp, Homo sapiens
aggcacactaggttc

SEQ ID NO: 311871 - DNA, 15 bp, Homo sapiens
caggcacactaggtt

SEQ ID NO: 311872 - DNA, 15 bp, Homo sapiens
tcaggcacactaggt

SEQ ID NO: 311873 - DNA, 15 bp, Homo sapiens
gtcaggcacactagg

SEQ ID NO: 311874 - DNA, 15 bp, Homo sapiens
agtcaggcacactag

SEQ ID NO: 311875 - DNA, 15 bp, Homo sapiens
aagtcaggcacacta

SEQ ID NO: 311876 - DNA, 15 bp, Homo sapiens
aaagtcaggcacact

SEQ ID NO: 311877 - DNA, 15 bp, Homo sapiens
aaaagtcaggcacac

SEQ ID NO: 311878 - DNA, 15 bp, Homo sapiens
gaaaagtcaggcaca

SEQ ID NO: 311879 - DNA, 15 bp, Homo sapiens
agaaaagtcaggcac

SEQ ID NO: 311880 - DNA, 15 bp, Homo sapiens
gagaaaagtcaggca

SEQ ID NO: 311881 - DNA, 15 bp, Homo sapiens
tgagaaaagtcaggc

SEQ ID NO: 311882 - DNA, 15 bp, Homo sapiens
ctgagaaaagtcagg

SEQ ID NO: 311883 - DNA, 15 bp, Homo sapiens
tctgagaaaagtcag

SEQ ID NO: 311884 - DNA, 15 bp, Homo sapiens
atctgagaaaagtca

SEQ ID NO: 311885 - DNA, 15 bp, Homo sapiens
catctgagaaaagtc

SEQ ID NO: 311886 - DNA, 15 bp, Homo sapiens
tcatctgagaaaagt

SEQ ID NO: 311887 - DNA, 15 bp, Homo sapiens
ttcatctgagaaaag

SEQ ID NO: 311888 - DNA, 15 bp, Homo sapiens
tttcatctgagaaaa

SEQ ID NO: 311889 - DNA, 15 bp, Homo sapiens
atttcatctgagaaa

SEQ ID NO: 311890 - DNA, 15 bp, Homo sapiens
tatttcatctgagaa

SEQ ID NO: 311891 - DNA, 15 bp, Homo sapiens
atatttcatctgaga

SEQ ID NO: 311892 - DNA, 15 bp, Homo sapiens
gatatttcatctgag

SEQ ID NO: 311893 - DNA, 15 bp, Homo sapiens
agatatttcatctga

SEQ ID NO: 311894 - DNA, 15 bp, Homo sapiens
cagatatttcatctg

SEQ ID NO: 311895 - DNA, 15 bp, Homo sapiens
ccagatatttcatct

SEQ ID NO: 311896 - DNA, 15 bp, Homo sapiens
gccagatatttcatc

SEQ ID NO: 311897 - DNA, 15 bp, Homo sapiens
agccagatatttcat

SEQ ID NO: 311898 - DNA, 15 bp, Homo sapiens
cagccagatatttca

SEQ ID NO: 311899 - DNA, 15 bp, Homo sapiens
ccagccagatatttc

SEQ ID NO: 311900 - DNA, 15 bp, Homo sapiens
accagccagatattt

SEQ ID NO: 311901 - DNA, 15 bp, Homo sapiens
caccagccagatatt

SEQ ID NO: 311902 - DNA, 15 bp, Homo sapiens
gcaccagccagatat

SEQ ID NO: 311903 - DNA, 15 bp, Homo sapiens
tgcaccagccagata

SEQ ID NO: 311904 - DNA, 15 bp, Homo sapiens
ttgcaccagccagat

SEQ ID NO: 311905 - DNA, 15 bp, Homo sapiens
attgcaccagccaga

SEQ ID NO: 311906 - DNA, 15 bp, Homo sapiens
cattgcaccagccag

SEQ ID NO: 311907 - DNA, 15 bp, Homo sapiens
gcattgcaccagcca

SEQ ID NO: 311908 - DNA, 15 bp, Homo sapiens
tgcattgcaccagcc

SEQ ID NO: 311909 - DNA, 15 bp, Homo sapiens
ctgcattgcaccagc

SEQ ID NO: 311910 - DNA, 15 bp, Homo sapiens
actgcattgcaccag

SEQ ID NO: 311911 - DNA, 15 bp, Homo sapiens
tactgcattgcacca

SEQ ID NO: 311912 - DNA, 15 bp, Homo sapiens
ttactgcattgcacc

SEQ ID NO: 311913 - DNA, 15 bp, Homo sapiens
gttactgcattgcac

SEQ ID NO: 311914 - DNA, 15 bp, Homo sapiens
agttactgcattgca

SEQ ID NO: 311915 - DNA, 15 bp, Homo sapiens
tagttactgcattgc

SEQ ID NO: 311916 - DNA, 15 bp, Homo sapiens
gtagttactgcattg

SEQ ID NO: 311917 - DNA, 15 bp, Homo sapiens
agtagttactgcatt

SEQ ID NO: 311918 - DNA, 15 bp, Homo sapiens
tagtagttactgcat

SEQ ID NO: 311919 - DNA, 15 bp, Homo sapiens
atagtagttactgca

SEQ ID NO: 311920 - DNA, 15 bp, Homo sapiens
aatagtagttactgc

SEQ ID NO: 311921 - DNA, 15 bp, Homo sapiens
taatagtagttactg

SEQ ID NO: 311922 - DNA, 15 bp, Homo sapiens
ttaatagtagttact

SEQ ID NO: 311923 - DNA, 15 bp, Homo sapiens
tttaatagtagttac

SEQ ID NO: 311924 - DNA, 15 bp, Homo sapiens
ttttaatagtagtta

SEQ ID NO: 311925 - DNA, 15 bp, Homo sapiens
gttttaatagtagtt

SEQ ID NO: 311926 - DNA, 15 bp, Homo sapiens
agttttaatagtagt

SEQ ID NO: 311927 - DNA, 15 bp, Homo sapiens
gagttttaatagtag

SEQ ID NO: 311928 - DNA, 15 bp, Homo sapiens
ggagttttaatagta

SEQ ID NO: 311929 - DNA, 15 bp, Homo sapiens
tggagttttaatagt

SEQ ID NO: 311930 - DNA, 15 bp, Homo sapiens
atggagttttaatag

SEQ ID NO: 311931 - DNA, 15 bp, Homo sapiens
gatggagttttaata

SEQ ID NO: 311932 - DNA, 15 bp, Homo sapiens
tgatggagttttaat

SEQ ID NO: 311933 - DNA, 15 bp, Homo sapiens
ctgatggagttttaa

SEQ ID NO: 311934 - DNA, 15 bp, Homo sapiens
cctgatggagtttta

SEQ ID NO: 311935 - DNA, 15 bp, Homo sapiens
gcctgatggagtttt

SEQ ID NO: 311936 - DNA, 15 bp, Homo sapiens
tgcctgatggagttt

SEQ ID NO: 311937 - DNA, 15 bp, Homo sapiens
atgcctgatggagtt

SEQ ID NO: 311938 - DNA, 15 bp, Homo sapiens
catgcctgatggagt

SEQ ID NO: 311939 - DNA, 15 bp, Homo sapiens
ccatgcctgatggag

SEQ ID NO: 311940 - DNA, 15 bp, Homo sapiens
accatgcctgatgga

SEQ ID NO: 311941 - DNA, 15 bp, Homo sapiens
caccatgcctgatgg

SEQ ID NO: 311942 - DNA, 15 bp, Homo sapiens
ccaccatgcctgatg

SEQ ID NO: 311943 - DNA, 15 bp, Homo sapiens
gccaccatgcctgat

SEQ ID NO: 311944 - DNA, 15 bp, Homo sapiens
agccaccatgcctga

SEQ ID NO: 311945 - DNA, 15 bp, Homo sapiens
gagccaccatgcctg

SEQ ID NO: 311946 - DNA, 15 bp, Homo sapiens
tgagccaccatgcct

SEQ ID NO: 311947 - DNA, 15 bp, Homo sapiens
agattacaggtgtga

SEQ ID NO: 311948 - DNA, 15 bp, Homo sapiens
gagattacaggtgtg

SEQ ID NO: 311949 - DNA, 15 bp, Homo sapiens
tgagattacaggtgt

SEQ ID NO: 311950 - DNA, 15 bp, Homo sapiens
tgctgagattacagg

SEQ ID NO: 311951 - DNA, 15 bp, Homo sapiens
ctgctgagattacag

SEQ ID NO: 311952 - DNA, 15 bp, Homo sapiens
gctgctgagattaca

SEQ ID NO: 311953 - DNA, 15 bp, Homo sapiens
agctgctgagattac

SEQ ID NO: 311954 - DNA, 15 bp, Homo sapiens
aagctgctgagatta

SEQ ID NO: 311955 - DNA, 15 bp, Homo sapiens
caagctgctgagatt

SEQ ID NO: 311956 - DNA, 15 bp, Homo sapiens
ccaagctgctgagat

SEQ ID NO: 311957 - DNA, 15 bp, Homo sapiens
cccaagctgctgaga

SEQ ID NO: 311958 - DNA, 15 bp, Homo sapiens
tcccaagctgctgag

SEQ ID NO: 311959 - DNA, 15 bp, Homo sapiens
ctcccaagctgctga

SEQ ID NO: 311960 - DNA, 15 bp, Homo sapiens
cctcccaagctgctg

SEQ ID NO: 311961 - DNA, 15 bp, Homo sapiens
gcctcccaagctgct

SEQ ID NO: 311962 - DNA, 15 bp, Homo sapiens
ggcctcccaagctgc

SEQ ID NO: 311963 - DNA, 15 bp, Homo sapiens
tggcctcccaagctg

SEQ ID NO: 311964 - DNA, 15 bp, Homo sapiens
ctggcctcccaagct

SEQ ID NO: 311965 - DNA, 15 bp, Homo sapiens
cctggcctcccaagc

SEQ ID NO: 311966 - DNA, 15 bp, Homo sapiens
ccctggcctcccaag

SEQ ID NO: 311967 - DNA, 15 bp, Homo sapiens
gccctggcctcccaa

SEQ ID NO: 311968 - DNA, 15 bp, Homo sapiens
tgccctggcctccca

SEQ ID NO: 311969 - DNA, 15 bp, Homo sapiens
ctgccctggcctccc

SEQ ID NO: 311970 - DNA, 15 bp, Homo sapiens
cctgccctggcctcc

SEQ ID NO: 311971 - DNA, 15 bp, Homo sapiens
tcctgccctggcctc

SEQ ID NO: 311972 - DNA, 15 bp, Homo sapiens
ttcctgccctggcct

SEQ ID NO: 311973 - DNA, 15 bp, Homo sapiens
cttcctgccctggcc

SEQ ID NO: 311974 - DNA, 15 bp, Homo sapiens
tcttcctgccctggc

SEQ ID NO: 311975 - DNA, 15 bp, Homo sapiens
atcttcctgccctgg

SEQ ID NO: 311976 - DNA, 15 bp, Homo sapiens
aatcttcctgccctg

SEQ ID NO: 311977 - DNA, 15 bp, Homo sapiens
caatcttcctgccct

SEQ ID NO: 311978 - DNA, 15 bp, Homo sapiens
gcaatcttcctgccc

SEQ ID NO: 311979 - DNA, 15 bp, Homo sapiens
agcaatcttcctgcc

SEQ ID NO: 311980 - DNA, 15 bp, Homo sapiens
aagcaatcttcctgc

SEQ ID NO: 311981 - DNA, 15 bp, Homo sapiens
caagcaatcttcctg

SEQ ID NO: 311982 - DNA, 15 bp, Homo sapiens
tcaagcaatcttcct

SEQ ID NO: 311983 - DNA, 15 bp, Homo sapiens
ctcaagcaatcttcc

SEQ ID NO: 311984 - DNA, 15 bp, Homo sapiens
gctcaagcaatcttc

SEQ ID NO: 311985 - DNA, 15 bp, Homo sapiens
ggctcaagcaatctt

SEQ ID NO: 311986 - DNA, 15 bp, Homo sapiens
gggctcaagcaatct

SEQ ID NO: 311987 - DNA, 15 bp, Homo sapiens
acccctgggctcaag

SEQ ID NO: 311988 - DNA, 15 bp, Homo sapiens
aacccctgggctcaa

SEQ ID NO: 311989 - DNA, 15 bp, Homo sapiens
caacccctgggctca

SEQ ID NO: 311990 - DNA, 15 bp, Homo sapiens
tcaacccctgggctc

SEQ ID NO: 311991 - DNA, 15 bp, Homo sapiens
ttcaacccctgggct

SEQ ID NO: 311992 - DNA, 15 bp, Homo sapiens
cttcaacccctgggc

SEQ ID NO: 311993 - DNA, 15 bp, Homo sapiens
tcttcaacccctggg

SEQ ID NO: 311994 - DNA, 15 bp, Homo sapiens
gtcttcaacccctgg

SEQ ID NO: 311995 - DNA, 15 bp, Homo sapiens
ggtcttcaacccctg

SEQ ID NO: 311996 - DNA, 15 bp, Homo sapiens
tggtcttcaacccct

SEQ ID NO: 311997 - DNA, 15 bp, Homo sapiens
ctggtcttcaacccc

SEQ ID NO: 311998 - DNA, 15 bp, Homo sapiens
gctggtcttcaaccc

SEQ ID NO: 311999 - DNA, 15 bp, Homo sapiens
agctggtcttcaacc

SEQ ID NO: 312000 - DNA, 15 bp, Homo sapiens
aagctggtcttcaac

SEQ ID NO: 312001 - DNA, 15 bp, Homo sapiens
caagctggtcttcaa

SEQ ID NO: 312002 - DNA, 15 bp, Homo sapiens
ccaagctggtcttca

SEQ ID NO: 312003 - DNA, 15 bp, Homo sapiens
cccaagctggtcttc

SEQ ID NO: 312004 - DNA, 15 bp, Homo sapiens
gcccaagctggtctt

SEQ ID NO: 312005 - DNA, 15 bp, Homo sapiens
tgcccaagctggtct

SEQ ID NO: 312006 - DNA, 15 bp, Homo sapiens
ttgcccaagctggtc

SEQ ID NO: 312007 - DNA, 15 bp, Homo sapiens
gttgcccaagctggt

SEQ ID NO: 312008 - DNA, 15 bp, Homo sapiens
tgttgcccaagctgg

SEQ ID NO: 312009 - DNA, 15 bp, Homo sapiens
atgttgcccaagctg

SEQ ID NO: 312010 - DNA, 15 bp, Homo sapiens
tatgttgcccaagct

SEQ ID NO: 312011 - DNA, 15 bp, Homo sapiens
ctatgttgcccaagc

SEQ ID NO: 312012 - DNA, 15 bp, Homo sapiens
actatgttgcccaag

SEQ ID NO: 312013 - DNA, 15 bp, Homo sapiens
cactatgttgcccaa

SEQ ID NO: 312014 - DNA, 15 bp, Homo sapiens
ggtctcactatgttg

SEQ ID NO: 312015 - DNA, 15 bp, Homo sapiens
gggtctcactatgtt

SEQ ID NO: 312016 - DNA, 15 bp, Homo sapiens
ggggtctcactatgt

SEQ ID NO: 312017 - DNA, 15 bp, Homo sapiens
tggggtctcactatg

SEQ ID NO: 312018 - DNA, 15 bp, Homo sapiens
atggggtctcactat

SEQ ID NO: 312019 - DNA, 15 bp, Homo sapiens
gatggggtctcacta

SEQ ID NO: 312020 - DNA, 15 bp, Homo sapiens
ggatggggtctcact

SEQ ID NO: 312021 - DNA, 15 bp, Homo sapiens
gggatggggtctcac

SEQ ID NO: 312022 - DNA, 15 bp, Homo sapiens
agggatggggtctca

SEQ ID NO: 312023 - DNA, 15 bp, Homo sapiens
tagggatggggtctc

SEQ ID NO: 312024 - DNA, 15 bp, Homo sapiens
gtagggatggggtct

SEQ ID NO: 312025 - DNA, 15 bp, Homo sapiens
tgtagggatggggtc

SEQ ID NO: 312026 - DNA, 15 bp, Homo sapiens
ttgtagggatggggt

SEQ ID NO: 312027 - DNA, 15 bp, Homo sapiens
tttgtagggatgggg

SEQ ID NO: 312028 - DNA, 15 bp, Homo sapiens
ttttgtagggatggg

SEQ ID NO: 312029 - DNA, 15 bp, Homo sapiens
tttttgtagggatgg

SEQ ID NO: 312030 - DNA, 15 bp, Homo sapiens
ttttttgtagggatg

SEQ ID NO: 312031 - DNA, 15 bp, Homo sapiens
tttttttgtagggat

SEQ ID NO: 312032 - DNA, 15 bp, Homo sapiens
ttttttttgtaggga

SEQ ID NO: 312033 - DNA, 15 bp, Homo sapiens
tttttttttgtaggg

SEQ ID NO: 312034 - DNA, 15 bp, Homo sapiens
ttttttttttgtagg

SEQ ID NO: 312035 - DNA, 15 bp, Homo sapiens
ctttttttttttgta

SEQ ID NO: 312036 - DNA, 15 bp, Homo sapiens
actttttttttttgt

SEQ ID NO: 312037 - DNA, 15 bp, Homo sapiens
tactttttttttttg

SEQ ID NO: 312038 - DNA, 15 bp, Homo sapiens
ctacttttttttttt

SEQ ID NO: 312039 - DNA, 15 bp, Homo sapiens
actactttttttttt

SEQ ID NO: 312040 - DNA, 15 bp, Homo sapiens
aactacttttttttt

SEQ ID NO: 312041 - DNA, 15 bp, Homo sapiens
caactactttttttt

SEQ ID NO: 312042 - DNA, 15 bp, Homo sapiens
ccaactacttttttt

SEQ ID NO: 312043 - DNA, 15 bp, Homo sapiens
cccaactactttttt

SEQ ID NO: 312044 - DNA, 15 bp, Homo sapiens
gcccaactacttttt

SEQ ID NO: 312045 - DNA, 15 bp, Homo sapiens
cgcccaactactttt

SEQ ID NO: 312046 - DNA, 15 bp, Homo sapiens
acgcccaactacttt

SEQ ID NO: 312047 - DNA, 15 bp, Homo sapiens
cacgcccaactactt

SEQ ID NO: 312048 - DNA, 15 bp, Homo sapiens
ccacgcccaactact

SEQ ID NO: 312049 - DNA, 15 bp, Homo sapiens
accacgcccaactac

SEQ ID NO: 312050 - DNA, 15 bp, Homo sapiens
caccacgcccaacta

SEQ ID NO: 312051 - DNA, 15 bp, Homo sapiens
ccaccacgcccaact

SEQ ID NO: 312052 - DNA, 15 bp, Homo sapiens
gccaccacgcccaac

SEQ ID NO: 312053 - DNA, 15 bp, Homo sapiens
agccaccacgcccaa

SEQ ID NO: 312054 - DNA, 15 bp, Homo sapiens
aagccaccacgccca

SEQ ID NO: 312055 - DNA, 15 bp, Homo sapiens
taagccaccacgccc

SEQ ID NO: 312056 - DNA, 15 bp, Homo sapiens
ctacaggcataagcc

SEQ ID NO: 312057 - DNA, 15 bp, Homo sapiens
actacaggcataagc

SEQ ID NO: 312058 - DNA, 15 bp, Homo sapiens
gactacaggcataag

SEQ ID NO: 312059 - DNA, 15 bp, Homo sapiens
ggactacaggcataa

SEQ ID NO: 312060 - DNA, 15 bp, Homo sapiens
aggactacaggcata

SEQ ID NO: 312061 - DNA, 15 bp, Homo sapiens
taggactacaggcat

SEQ ID NO: 312062 - DNA, 15 bp, Homo sapiens
ttaggactacaggca

SEQ ID NO: 312063 - DNA, 15 bp, Homo sapiens
gttaggactacaggc

SEQ ID NO: 312064 - DNA, 15 bp, Homo sapiens
agttaggactacagg

SEQ ID NO: 312065 - DNA, 15 bp, Homo sapiens
tagttaggactacag

SEQ ID NO: 312066 - DNA, 15 bp, Homo sapiens
aagtagttaggacta

SEQ ID NO: 312067 - DNA, 15 bp, Homo sapiens
caagtagttaggact

SEQ ID NO: 312068 - DNA, 15 bp, Homo sapiens
ccaagtagttaggac

SEQ ID NO: 312069 - DNA, 15 bp, Homo sapiens
cccaagtagttagga

SEQ ID NO: 312070 - DNA, 15 bp, Homo sapiens
tcccaagtagttagg

SEQ ID NO: 312071 - DNA, 15 bp, Homo sapiens
ttcccaagtagttag

SEQ ID NO: 312072 - DNA, 15 bp, Homo sapiens
cttcccaagtagtta

SEQ ID NO: 312073 - DNA, 15 bp, Homo sapiens
gcttcccaagtagtt

SEQ ID NO: 312074 - DNA, 15 bp, Homo sapiens
agcttcccaagtagt

SEQ ID NO: 312075 - DNA, 15 bp, Homo sapiens
cagcttcccaagtag

SEQ ID NO: 312076 - DNA, 15 bp, Homo sapiens
tcagcttcccaagta

SEQ ID NO: 312077 - DNA, 15 bp, Homo sapiens
ctcagcttcccaagt

SEQ ID NO: 312078 - DNA, 15 bp, Homo sapiens
cctcagcttcccaag

SEQ ID NO: 312079 - DNA, 15 bp, Homo sapiens
gcctcagcttcccaa

SEQ ID NO: 312080 - DNA, 15 bp, Homo sapiens
tgcctcagcttccca

SEQ ID NO: 312081 - DNA, 15 bp, Homo sapiens
cctcctgcctcagct

SEQ ID NO: 312082 - DNA, 15 bp, Homo sapiens
tcctcctgcctcagc

SEQ ID NO: 312083 - DNA, 15 bp, Homo sapiens
atcctcctgcctcag

SEQ ID NO: 312084 - DNA, 15 bp, Homo sapiens
gatcctcctgcctca

SEQ ID NO: 312085 - DNA, 15 bp, Homo sapiens
cgatcctcctgcctc

SEQ ID NO: 312086 - DNA, 15 bp, Homo sapiens
gcgatcctcctgcct

SEQ ID NO: 312087 - DNA, 15 bp, Homo sapiens
agcgatcctcctgcc

SEQ ID NO: 312088 - DNA, 15 bp, Homo sapiens
aagcgatcctcctgc

SEQ ID NO: 312089 - DNA, 15 bp, Homo sapiens
caagcgatcctcctg

SEQ ID NO: 312090 - DNA, 15 bp, Homo sapiens
tcaagcgatcctcct

SEQ ID NO: 312091 - DNA, 15 bp, Homo sapiens
cctcaagcgatcctc

SEQ ID NO: 312092 - DNA, 15 bp, Homo sapiens
gcctcaagcgatcct

SEQ ID NO: 312093 - DNA, 15 bp, Homo sapiens
tgcctcaagcgatcc

SEQ ID NO: 312094 - DNA, 15 bp, Homo sapiens
ttgcctcaagcgatc

SEQ ID NO: 312095 - DNA, 15 bp, Homo sapiens
tttgcctcaagcgat

SEQ ID NO: 312096 - DNA, 15 bp, Homo sapiens
ctttgcctcaagcga

SEQ ID NO: 312097 - DNA, 15 bp, Homo sapiens
tctttgcctcaagcg

SEQ ID NO: 312098 - DNA, 15 bp, Homo sapiens
ctctttgcctcaagc

SEQ ID NO: 312099 - DNA, 15 bp, Homo sapiens
cctctttgcctcaag

SEQ ID NO: 312100 - DNA, 15 bp, Homo sapiens
acctctttgcctcaa

SEQ ID NO: 312101 - DNA, 15 bp, Homo sapiens
aacctctttgcctca

SEQ ID NO: 312102 - DNA, 15 bp, Homo sapiens
caacctctttgcctc

SEQ ID NO: 312103 - DNA, 15 bp, Homo sapiens
tcaacctctttgcct

SEQ ID NO: 312104 - DNA, 15 bp, Homo sapiens
ctcaacctctttgcc

SEQ ID NO: 312105 - DNA, 15 bp, Homo sapiens
cctcaacctctttgc

SEQ ID NO: 312106 - DNA, 15 bp, Homo sapiens
gcctcaacctctttg

SEQ ID NO: 312107 - DNA, 15 bp, Homo sapiens
agcctcaacctcttt

SEQ ID NO: 312108 - DNA, 15 bp, Homo sapiens
cagcctcaacctctt

SEQ ID NO: 312109 - DNA, 15 bp, Homo sapiens
gcagcctcaacctct

SEQ ID NO: 312110 - DNA, 15 bp, Homo sapiens
agcagcctcaacctc

SEQ ID NO: 312111 - DNA, 15 bp, Homo sapiens
gagcagcctcaacct

SEQ ID NO: 312112 - DNA, 15 bp, Homo sapiens
tgagcagcctcaacc

SEQ ID NO: 312113 - DNA, 15 bp, Homo sapiens
ctgagcagcctcaac

SEQ ID NO: 312114 - DNA, 15 bp, Homo sapiens
tctgagcagcctcaa

SEQ ID NO: 312115 - DNA, 15 bp, Homo sapiens
ctctgagcagcctca

SEQ ID NO: 312116 - DNA, 15 bp, Homo sapiens
gctctgagcagcctc

SEQ ID NO: 312117 - DNA, 15 bp, Homo sapiens
ggctctgagcagcct

SEQ ID NO: 312118 - DNA, 15 bp, Homo sapiens
atggctctgagcagc

SEQ ID NO: 312119 - DNA, 15 bp, Homo sapiens
tatggctctgagcag

SEQ ID NO: 312120 - DNA, 15 bp, Homo sapiens
ttatggctctgagca

SEQ ID NO: 312121 - DNA, 15 bp, Homo sapiens
attatggctctgagc

SEQ ID NO: 312122 - DNA, 15 bp, Homo sapiens
gattatggctctgag

SEQ ID NO: 312123 - DNA, 15 bp, Homo sapiens
tgattatggctctga

SEQ ID NO: 312124 - DNA, 15 bp, Homo sapiens
atgattatggctctg

SEQ ID NO: 312125 - DNA, 15 bp, Homo sapiens
catgattatggctct

SEQ ID NO: 312126 - DNA, 15 bp, Homo sapiens
gcatgattatggctc

SEQ ID NO: 312127 - DNA, 15 bp, Homo sapiens
ggcatgattatggct

SEQ ID NO: 312128 - DNA, 15 bp, Homo sapiens
cggcatgattatggc

SEQ ID NO: 312129 - DNA, 15 bp, Homo sapiens
gcggcatgattatgg

SEQ ID NO: 312130 - DNA, 15 bp, Homo sapiens
agcggcatgattatg

SEQ ID NO: 312131 - DNA, 15 bp, Homo sapiens
cagcggcatgattat

SEQ ID NO: 312132 - DNA, 15 bp, Homo sapiens
acagcggcatgatta

SEQ ID NO: 312133 - DNA, 15 bp, Homo sapiens
tacagcggcatgatt

SEQ ID NO: 312134 - DNA, 15 bp, Homo sapiens
gtacagcggcatgat

SEQ ID NO: 312135 - DNA, 15 bp, Homo sapiens
ggtacagcggcatga

SEQ ID NO: 312136 - DNA, 15 bp, Homo sapiens
gggtacagcggcatg

SEQ ID NO: 312137 - DNA, 15 bp, Homo sapiens
ggggtacagcggcat

SEQ ID NO: 312138 - DNA, 15 bp, Homo sapiens
tggggtacagcggca

SEQ ID NO: 312139 - DNA, 15 bp, Homo sapiens
ctggggtacagcggc

SEQ ID NO: 312140 - DNA, 15 bp, Homo sapiens
gctggggtacagcgg

SEQ ID NO: 312141 - DNA, 15 bp, Homo sapiens
ggctggggtacagcg

SEQ ID NO: 312142 - DNA, 15 bp, Homo sapiens
aggctggggtacagc

SEQ ID NO: 312143 - DNA, 15 bp, Homo sapiens
caggctggggtacag

SEQ ID NO: 312144 - DNA, 15 bp, Homo sapiens
ccaggctggggtaca

SEQ ID NO: 312145 - DNA, 15 bp, Homo sapiens
cccaggctggggtac

SEQ ID NO: 312146 - DNA, 15 bp, Homo sapiens
acccaggctggggta

SEQ ID NO: 312147 - DNA, 15 bp, Homo sapiens
cacccaggctggggt

SEQ ID NO: 312148 - DNA, 15 bp, Homo sapiens
tcacccaggctgggg

SEQ ID NO: 312149 - DNA, 15 bp, Homo sapiens
gtcacccaggctggg

SEQ ID NO: 312150 - DNA, 15 bp, Homo sapiens
ttgtcacccaggctg

SEQ ID NO: 312151 - DNA, 15 bp, Homo sapiens
tttgtcacccaggct

SEQ ID NO: 312152 - DNA, 15 bp, Homo sapiens
gtttgtcacccaggc

SEQ ID NO: 312153 - DNA, 15 bp, Homo sapiens
tgtttgtcacccagg

SEQ ID NO: 312154 - DNA, 15 bp, Homo sapiens
gtgtttgtcacccag

SEQ ID NO: 312155 - DNA, 15 bp, Homo sapiens
tgtgtttgtcaccca

SEQ ID NO: 312156 - DNA, 15 bp, Homo sapiens
ctgtgtttgtcaccc

SEQ ID NO: 312157 - DNA, 15 bp, Homo sapiens
tctgtgtttgtcacc

SEQ ID NO: 312158 - DNA, 15 bp, Homo sapiens
ctctgtgtttgtcac

SEQ ID NO: 312159 - DNA, 15 bp, Homo sapiens
tctctgtgtttgtca

SEQ ID NO: 312160 - DNA, 15 bp, Homo sapiens
gtctctgtgtttgtc

SEQ ID NO: 312161 - DNA, 15 bp, Homo sapiens
ggtctctgtgtttgt

SEQ ID NO: 312162 - DNA, 15 bp, Homo sapiens
gggtctctgtgtttg

SEQ ID NO: 312163 - DNA, 15 bp, Homo sapiens
agggtctctgtgttt

SEQ ID NO: 312164 - DNA, 15 bp, Homo sapiens
cagggtctctgtgtt

SEQ ID NO: 312165 - DNA, 15 bp, Homo sapiens
acagggtctctgtgt

SEQ ID NO: 312166 - DNA, 15 bp, Homo sapiens
gacagggtctctgtg

SEQ ID NO: 312167 - DNA, 15 bp, Homo sapiens
agacagggtctctgt

SEQ ID NO: 312168 - DNA, 15 bp, Homo sapiens
gagacagggtctctg

SEQ ID NO: 312169 - DNA, 15 bp, Homo sapiens
aagagacagggtctc

SEQ ID NO: 312170 - DNA, 15 bp, Homo sapiens
taagagacagggtct

SEQ ID NO: 312171 - DNA, 15 bp, Homo sapiens
ttaagagacagggtc

SEQ ID NO: 312172 - DNA, 15 bp, Homo sapiens
tttaagagacagggt

SEQ ID NO: 312173 - DNA, 15 bp, Homo sapiens
gtttaagagacaggg

SEQ ID NO: 312174 - DNA, 15 bp, Homo sapiens
tgtttaagagacagg

SEQ ID NO: 312175 - DNA, 15 bp, Homo sapiens
ttgtttaagagacag

SEQ ID NO: 312176 - DNA, 15 bp, Homo sapiens
tttgtttaagagaca

SEQ ID NO: 312177 - DNA, 15 bp, Homo sapiens
ttttgtttaagagac

SEQ ID NO: 312178 - DNA, 15 bp, Homo sapiens
gttttgtttaagaga

SEQ ID NO: 312179 - DNA, 15 bp, Homo sapiens
agttttgtttaagag

SEQ ID NO: 312180 - DNA, 15 bp, Homo sapiens
gagttttgtttaaga

SEQ ID NO: 312181 - DNA, 15 bp, Homo sapiens
tgagttttgtttaag

SEQ ID NO: 312182 - DNA, 15 bp, Homo sapiens
gtgagttttgtttaa

SEQ ID NO: 312183 - DNA, 15 bp, Homo sapiens
agtgagttttgttta

SEQ ID NO: 312184 - DNA, 15 bp, Homo sapiens
tagtgagttttgttt

SEQ ID NO: 312185 - DNA, 15 bp, Homo sapiens
ctagtgagttttgtt

SEQ ID NO: 312186 - DNA, 15 bp, Homo sapiens
cctagtgagttttgt

SEQ ID NO: 312187 - DNA, 15 bp, Homo sapiens
tcctagtgagttttg

SEQ ID NO: 312188 - DNA, 15 bp, Homo sapiens
atcctagtgagtttt

SEQ ID NO: 312189 - DNA, 15 bp, Homo sapiens
tatcctagtgagttt

SEQ ID NO: 312190 - DNA, 15 bp, Homo sapiens
atatcctagtgagtt

SEQ ID NO: 312191 - DNA, 15 bp, Homo sapiens
tatatcctagtgagt

SEQ ID NO: 312192 - DNA, 15 bp, Homo sapiens
gtatatcctagtgag

SEQ ID NO: 312193 - DNA, 15 bp, Homo sapiens
ggtatatcctagtga

SEQ ID NO: 312194 - DNA, 15 bp, Homo sapiens
tggtatatcctagtg

SEQ ID NO: 312195 - DNA, 15 bp, Homo sapiens
ctggtatatcctagt

SEQ ID NO: 312196 - DNA, 15 bp, Homo sapiens
actggtatatcctag

SEQ ID NO: 312197 - DNA, 15 bp, Homo sapiens
cactggtatatccta

SEQ ID NO: 312198 - DNA, 15 bp, Homo sapiens
tcactggtatatcct

SEQ ID NO: 312199 - DNA, 15 bp, Homo sapiens
ctcactggtatatcc

SEQ ID NO: 312200 - DNA, 15 bp, Homo sapiens
actcactggtatatc

SEQ ID NO: 312201 - DNA, 15 bp, Homo sapiens
gactcactggtatat

SEQ ID NO: 312202 - DNA, 15 bp, Homo sapiens
ggactcactggtata

SEQ ID NO: 312203 - DNA, 15 bp, Homo sapiens
tggactcactggtat

SEQ ID NO: 312204 - DNA, 15 bp, Homo sapiens
atggactcactggta

SEQ ID NO: 312205 - DNA, 15 bp, Homo sapiens
tatggactcactggt

SEQ ID NO: 312206 - DNA, 15 bp, Homo sapiens
atatggactcactgg

SEQ ID NO: 312207 - DNA, 15 bp, Homo sapiens
catatggactcactg

SEQ ID NO: 312208 - DNA, 15 bp, Homo sapiens
tcatatggactcact

SEQ ID NO: 312209 - DNA, 15 bp, Homo sapiens
ttcatatggactcac

SEQ ID NO: 312210 - DNA, 15 bp, Homo sapiens
cttcatatggactca

SEQ ID NO: 312211 - DNA, 15 bp, Homo sapiens
tcttcatatggactc

SEQ ID NO: 312212 - DNA, 15 bp, Homo sapiens
ttcttcatatggact

SEQ ID NO: 312213 - DNA, 15 bp, Homo sapiens
attcttcatatggac

SEQ ID NO: 312214 - DNA, 15 bp, Homo sapiens
gattcttcatatgga

SEQ ID NO: 312215 - DNA, 15 bp, Homo sapiens
ggattcttcatatgg

SEQ ID NO: 312216 - DNA, 15 bp, Homo sapiens
aggattcttcatatg

SEQ ID NO: 312217 - DNA, 15 bp, Homo sapiens
taggattcttcatat

SEQ ID NO: 312218 - DNA, 15 bp, Homo sapiens
gtaggattcttcata

SEQ ID NO: 312219 - DNA, 15 bp, Homo sapiens
ggtaggattcttcat

SEQ ID NO: 312220 - DNA, 15 bp, Homo sapiens
gggtaggattcttca

SEQ ID NO: 312221 - DNA, 15 bp, Homo sapiens
tgggtaggattcttc

SEQ ID NO: 312222 - DNA, 15 bp, Homo sapiens
atgggtaggattctt

SEQ ID NO: 312223 - DNA, 15 bp, Homo sapiens
gatgggtaggattct

SEQ ID NO: 312224 - DNA, 15 bp, Homo sapiens
ggatgggtaggattc

SEQ ID NO: 312225 - DNA, 15 bp, Homo sapiens
aggatgggtaggatt

SEQ ID NO: 312226 - DNA, 15 bp, Homo sapiens
aaggatgggtaggat

SEQ ID NO: 312227 - DNA, 15 bp, Homo sapiens
gaaggatgggtagga

SEQ ID NO: 312228 - DNA, 15 bp, Homo sapiens
agaaggatgggtagg

SEQ ID NO: 312229 - DNA, 15 bp, Homo sapiens
gagaaggatgggtag

SEQ ID NO: 312230 - DNA, 15 bp, Homo sapiens
tgagaaggatgggta

SEQ ID NO: 312231 - DNA, 15 bp, Homo sapiens
gtgagaaggatgggt

SEQ ID NO: 312232 - DNA, 15 bp, Homo sapiens
ggtgagaaggatggg

SEQ ID NO: 312233 - DNA, 15 bp, Homo sapiens
aggtgagaaggatgg

SEQ ID NO: 312234 - DNA, 15 bp, Homo sapiens
aaggtgagaaggatg

SEQ ID NO: 312235 - DNA, 15 bp, Homo sapiens
caaggtgagaaggat

SEQ ID NO: 312236 - DNA, 15 bp, Homo sapiens
ccaaggtgagaagga

SEQ ID NO: 312237 - DNA, 15 bp, Homo sapiens
gccaaggtgagaagg

SEQ ID NO: 312238 - DNA, 15 bp, Homo sapiens
ggccaaggtgagaag

SEQ ID NO: 312239 - DNA, 15 bp, Homo sapiens
aggccaaggtgagaa

SEQ ID NO: 312240 - DNA, 15 bp, Homo sapiens
caggccaaggtgaga

SEQ ID NO: 312241 - DNA, 15 bp, Homo sapiens
tcaggccaaggtgag

SEQ ID NO: 312242 - DNA, 15 bp, Homo sapiens
ttcaggccaaggtga

SEQ ID NO: 312243 - DNA, 15 bp, Homo sapiens
attcaggccaaggtg

SEQ ID NO: 312244 - DNA, 15 bp, Homo sapiens
cattcaggccaaggt

SEQ ID NO: 312245 - DNA, 15 bp, Homo sapiens
tcattcaggccaagg

SEQ ID NO: 312246 - DNA, 15 bp, Homo sapiens
ttcattcaggccaag

SEQ ID NO: 312247 - DNA, 15 bp, Homo sapiens
attcattcaggccaa

SEQ ID NO: 312248 - DNA, 15 bp, Homo sapiens
cattcattcaggcca

SEQ ID NO: 312249 - DNA, 15 bp, Homo sapiens
tcattcattcaggcc

SEQ ID NO: 312250 - DNA, 15 bp, Homo sapiens
ctcattcattcaggc

SEQ ID NO: 312251 - DNA, 15 bp, Homo sapiens
actcattcattcagg

SEQ ID NO: 312252 - DNA, 15 bp, Homo sapiens
tactcattcattcag

SEQ ID NO: 312253 - DNA, 15 bp, Homo sapiens
gtactcattcattca

SEQ ID NO: 312254 - DNA, 15 bp, Homo sapiens
tgtactcattcattc

SEQ ID NO: 312255 - DNA, 15 bp, Homo sapiens
ttgtactcattcatt

SEQ ID NO: 312256 - DNA, 15 bp, Homo sapiens
cttgtactcattcat

SEQ ID NO: 312257 - DNA, 15 bp, Homo sapiens
acttgtactcattca

SEQ ID NO: 312258 - DNA, 15 bp, Homo sapiens
cacttgtactcattc

SEQ ID NO: 312259 - DNA, 15 bp, Homo sapiens
acacttgtactcatt

SEQ ID NO: 312260 - DNA, 15 bp, Homo sapiens
gacacttgtactcat

SEQ ID NO: 312261 - DNA, 15 bp, Homo sapiens
tgacacttgtactca

SEQ ID NO: 312262 - DNA, 15 bp, Homo sapiens
ctgacacttgtactc

SEQ ID NO: 312263 - DNA, 15 bp, Homo sapiens
actgacacttgtact

SEQ ID NO: 312264 - DNA, 15 bp, Homo sapiens
tactgacacttgtac

SEQ ID NO: 312265 - DNA, 15 bp, Homo sapiens
ttactgacacttgta

SEQ ID NO: 312266 - DNA, 15 bp, Homo sapiens
tttactgacacttgt

SEQ ID NO: 312267 - DNA, 15 bp, Homo sapiens
ttttactgacacttg

SEQ ID NO: 312268 - DNA, 15 bp, Homo sapiens
gttttactgacactt

SEQ ID NO: 312269 - DNA, 15 bp, Homo sapiens
tgttttactgacact

SEQ ID NO: 312270 - DNA, 15 bp, Homo sapiens
ctgttttactgacac

SEQ ID NO: 312271 - DNA, 15 bp, Homo sapiens
gctgttttactgaca

SEQ ID NO: 312272 - DNA, 15 bp, Homo sapiens
agctgttttactgac

SEQ ID NO: 312273 - DNA, 15 bp, Homo sapiens
cagctgttttactga

SEQ ID NO: 312274 - DNA, 15 bp, Homo sapiens
acagctgttttactg

SEQ ID NO: 312275 - DNA, 15 bp, Homo sapiens
aacagctgttttact

SEQ ID NO: 312276 - DNA, 15 bp, Homo sapiens
taacagctgttttac

SEQ ID NO: 312277 - DNA, 15 bp, Homo sapiens
ataacagctgtttta

SEQ ID NO: 312278 - DNA, 15 bp, Homo sapiens
aataacagctgtttt

SEQ ID NO: 312279 - DNA, 15 bp, Homo sapiens
aaataacagctgttt

SEQ ID NO: 312280 - DNA, 15 bp, Homo sapiens
taaataacagctgtt

SEQ ID NO: 312281 - DNA, 15 bp, Homo sapiens
ataaataacagctgt

SEQ ID NO: 312282 - DNA, 15 bp, Homo sapiens
aataaataacagctg

SEQ ID NO: 312283 - DNA, 15 bp, Homo sapiens
aaataaataacagct

SEQ ID NO: 312284 - DNA, 15 bp, Homo sapiens
gaaataaataacagc

SEQ ID NO: 312285 - DNA, 15 bp, Homo sapiens
ggaaataaataacag

SEQ ID NO: 312286 - DNA, 15 bp, Homo sapiens
aggaaataaataaca

SEQ ID NO: 312287 - DNA, 15 bp, Homo sapiens
aaggaaataaataac

SEQ ID NO: 312288 - DNA, 15 bp, Homo sapiens
taaggaaataaataa

SEQ ID NO: 312289 - DNA, 15 bp, Homo sapiens
ataaggaaataaata

SEQ ID NO: 312290 - DNA, 15 bp, Homo sapiens
gataaggaaataaat

SEQ ID NO: 312291 - DNA, 15 bp, Homo sapiens
ggataaggaaataaa

SEQ ID NO: 312292 - DNA, 15 bp, Homo sapiens
gggataaggaaataa

SEQ ID NO: 312293 - DNA, 15 bp, Homo sapiens
tgggataaggaaata

SEQ ID NO: 312294 - DNA, 15 bp, Homo sapiens
gtgggataaggaaat

SEQ ID NO: 312295 - DNA, 15 bp, Homo sapiens
tgtgggataaggaaa

SEQ ID NO: 312296 - DNA, 15 bp, Homo sapiens
atgtgggataaggaa

SEQ ID NO: 312297 - DNA, 15 bp, Homo sapiens
gatgtgggataagga

SEQ ID NO: 312298 - DNA, 15 bp, Homo sapiens
agatgtgggataagg

SEQ ID NO: 312299 - DNA, 15 bp, Homo sapiens
cagatgtgggataag

SEQ ID NO: 312300 - DNA, 15 bp, Homo sapiens
acagatgtgggataa

SEQ ID NO: 312301 - DNA, 15 bp, Homo sapiens
gacagatgtgggata

SEQ ID NO: 312302 - DNA, 15 bp, Homo sapiens
ggacagatgtgggat

SEQ ID NO: 312303 - DNA, 15 bp, Homo sapiens
aggacagatgtggga

SEQ ID NO: 312304 - DNA, 15 bp, Homo sapiens
aaggacagatgtggg

SEQ ID NO: 312305 - DNA, 15 bp, Homo sapiens
caaggacagatgtgg

SEQ ID NO: 312306 - DNA, 15 bp, Homo sapiens
tcaaggacagatgtg

SEQ ID NO: 312307 - DNA, 15 bp, Homo sapiens
ttcaaggacagatgt

SEQ ID NO: 312308 - DNA, 15 bp, Homo sapiens
cttcaaggacagatg

SEQ ID NO: 312309 - DNA, 15 bp, Homo sapiens
ccttcaaggacagat

SEQ ID NO: 312310 - DNA, 15 bp, Homo sapiens
gccttcaaggacaga

SEQ ID NO: 312311 - DNA, 15 bp, Homo sapiens
agccttcaaggacag

SEQ ID NO: 312312 - DNA, 15 bp, Homo sapiens
cagccttcaaggaca

SEQ ID NO: 312313 - DNA, 15 bp, Homo sapiens
acagccttcaaggac

SEQ ID NO: 312314 - DNA, 15 bp, Homo sapiens
gacagccttcaagga

SEQ ID NO: 312315 - DNA, 15 bp, Homo sapiens
tgacagccttcaagg

SEQ ID NO: 312316 - DNA, 15 bp, Homo sapiens
atgacagccttcaag

SEQ ID NO: 312317 - DNA, 15 bp, Homo sapiens
catgacagccttcaa

SEQ ID NO: 312318 - DNA, 15 bp, Homo sapiens
acatgacagccttca

SEQ ID NO: 312319 - DNA, 15 bp, Homo sapiens
cacatgacagccttc

SEQ ID NO: 312320 - DNA, 15 bp, Homo sapiens
ccacatgacagcctt

SEQ ID NO: 312321 - DNA, 15 bp, Homo sapiens
accacatgacagcct

SEQ ID NO: 312322 - DNA, 15 bp, Homo sapiens
gaccacatgacagcc

SEQ ID NO: 312323 - DNA, 15 bp, Homo sapiens
tgaccacatgacagc

SEQ ID NO: 312324 - DNA, 15 bp, Homo sapiens
ttgaccacatgacag

SEQ ID NO: 312325 - DNA, 15 bp, Homo sapiens
cttgaccacatgaca

SEQ ID NO: 312326 - DNA, 15 bp, Homo sapiens
ccttgaccacatgac

SEQ ID NO: 312327 - DNA, 15 bp, Homo sapiens
tccttgaccacatga

SEQ ID NO: 312328 - DNA, 15 bp, Homo sapiens
gtccttgaccacatg

SEQ ID NO: 312329 - DNA, 15 bp, Homo sapiens
ggtccttgaccacat

SEQ ID NO: 312330 - DNA, 15 bp, Homo sapiens
tggtccttgaccaca

SEQ ID NO: 312331 - DNA, 15 bp, Homo sapiens
atggtccttgaccac

SEQ ID NO: 312332 - DNA, 15 bp, Homo sapiens
catggtccttgacca

SEQ ID NO: 312333 - DNA, 15 bp, Homo sapiens
ccatggtccttgacc

SEQ ID NO: 312334 - DNA, 15 bp, Homo sapiens
tccatggtccttgac

SEQ ID NO: 312335 - DNA, 15 bp, Homo sapiens
ctccatggtccttga

SEQ ID NO: 312336 - DNA, 15 bp, Homo sapiens
gctccatggtccttg

SEQ ID NO: 312337 - DNA, 15 bp, Homo sapiens
ggctccatggtcctt

SEQ ID NO: 312338 - DNA, 15 bp, Homo sapiens
cggctccatggtcct

SEQ ID NO: 312339 - DNA, 15 bp, Homo sapiens
tcggctccatggtcc

SEQ ID NO: 312340 - DNA, 15 bp, Homo sapiens
gtcggctccatggtc

SEQ ID NO: 312341 - DNA, 15 bp, Homo sapiens
tgtcggctccatggt

SEQ ID NO: 312342 - DNA, 15 bp, Homo sapiens
ctgtcggctccatgg

SEQ ID NO: 312343 - DNA, 15 bp, Homo sapiens
tctgtcggctccatg

SEQ ID NO: 312344 - DNA, 15 bp, Homo sapiens
gtctgtcggctccat

SEQ ID NO: 312345 - DNA, 15 bp, Homo sapiens
tgtctgtcggctcca

SEQ ID NO: 312346 - DNA, 15 bp, Homo sapiens
ttgtctgtcggctcc

SEQ ID NO: 312347 - DNA, 15 bp, Homo sapiens
attgtctgtcggctc

SEQ ID NO: 312348 - DNA, 15 bp, Homo sapiens
cattgtctgtcggct

SEQ ID NO: 312349 - DNA, 15 bp, Homo sapiens
acattgtctgtcggc

SEQ ID NO: 312350 - DNA, 15 bp, Homo sapiens
aacattgtctgtcgg

SEQ ID NO: 312351 - DNA, 15 bp, Homo sapiens
aaacattgtctgtcg

SEQ ID NO: 312352 - DNA, 15 bp, Homo sapiens
gaaacattgtctgtc

SEQ ID NO: 312353 - DNA, 15 bp, Homo sapiens
agaaacattgtctgt

SEQ ID NO: 312354 - DNA, 15 bp, Homo sapiens
tagaaacattgtctg

SEQ ID NO: 312355 - DNA, 15 bp, Homo sapiens
atagaaacattgtct

SEQ ID NO: 312356 - DNA, 15 bp, Homo sapiens
gatagaaacattgtc

SEQ ID NO: 312357 - DNA, 15 bp, Homo sapiens
tgatagaaacattgt

SEQ ID NO: 312358 - DNA, 15 bp, Homo sapiens
ttgatagaaacattg

SEQ ID NO: 312359 - DNA, 15 bp, Homo sapiens
gttgatagaaacatt

SEQ ID NO: 312360 - DNA, 15 bp, Homo sapiens
tgttgatagaaacat

SEQ ID NO: 312361 - DNA, 15 bp, Homo sapiens
ctgttgatagaaaca

SEQ ID NO: 312362 - DNA, 15 bp, Homo sapiens
cctgttgatagaaac

SEQ ID NO: 312363 - DNA, 15 bp, Homo sapiens
gcctgttgatagaaa

SEQ ID NO: 312364 - DNA, 15 bp, Homo sapiens
tgcctgttgatagaa

SEQ ID NO: 312365 - DNA, 15 bp, Homo sapiens
ctgcctgttgataga

SEQ ID NO: 312366 - DNA, 15 bp, Homo sapiens
actgcctgttgatag

SEQ ID NO: 312367 - DNA, 15 bp, Homo sapiens
aactgcctgttgata

SEQ ID NO: 312368 - DNA, 15 bp, Homo sapiens
gaactgcctgttgat

SEQ ID NO: 312369 - DNA, 15 bp, Homo sapiens
tgaactgcctgttga

SEQ ID NO: 312370 - DNA, 15 bp, Homo sapiens
ttgaactgcctgttg

SEQ ID NO: 312371 - DNA, 15 bp, Homo sapiens
tttgaactgcctgtt

SEQ ID NO: 312372 - DNA, 15 bp, Homo sapiens
gtttgaactgcctgt

SEQ ID NO: 312373 - DNA, 15 bp, Homo sapiens
ggtttgaactgcctg

SEQ ID NO: 312374 - DNA, 15 bp, Homo sapiens
tggtttgaactgcct

SEQ ID NO: 312375 - DNA, 15 bp, Homo sapiens
ttggtttgaactgcc

SEQ ID NO: 312376 - DNA, 15 bp, Homo sapiens
cttggtttgaactgc

SEQ ID NO: 312377 - DNA, 15 bp, Homo sapiens
gcttggtttgaactg

SEQ ID NO: 312378 - DNA, 15 bp, Homo sapiens
ggcttggtttgaact

SEQ ID NO: 312379 - DNA, 15 bp, Homo sapiens
aggcttggtttgaac

SEQ ID NO: 312380 - DNA, 15 bp, Homo sapiens
caggcttggtttgaa

SEQ ID NO: 312381 - DNA, 15 bp, Homo sapiens
acaggcttggtttga

SEQ ID NO: 312382 - DNA, 15 bp, Homo sapiens
cacaggcttggtttg

SEQ ID NO: 312383 - DNA, 15 bp, Homo sapiens
ccacaggcttggttt

SEQ ID NO: 312384 - DNA, 15 bp, Homo sapiens
gccacaggcttggtt

SEQ ID NO: 312385 - DNA, 15 bp, Homo sapiens
agccacaggcttggt

SEQ ID NO: 312386 - DNA, 15 bp, Homo sapiens
cagccacaggcttgg

SEQ ID NO: 312387 - DNA, 15 bp, Homo sapiens
tcagccacaggcttg

SEQ ID NO: 312388 - DNA, 15 bp, Homo sapiens
gtcagccacaggctt

SEQ ID NO: 312389 - DNA, 15 bp, Homo sapiens
ggtcagccacaggct

SEQ ID NO: 312390 - DNA, 15 bp, Homo sapiens
tggtcagccacaggc

SEQ ID NO: 312391 - DNA, 15 bp, Homo sapiens
atggtcagccacagg

SEQ ID NO: 312392 - DNA, 15 bp, Homo sapiens
tatggtcagccacag

SEQ ID NO: 312393 - DNA, 15 bp, Homo sapiens
atatggtcagccaca

SEQ ID NO: 312394 - DNA, 15 bp, Homo sapiens
aatatggtcagccac

SEQ ID NO: 312395 - DNA, 15 bp, Homo sapiens
caatatggtcagcca

SEQ ID NO: 312396 - DNA, 15 bp, Homo sapiens
tcaatatggtcagcc

SEQ ID NO: 312397 - DNA, 15 bp, Homo sapiens
ctcaatatggtcagc

SEQ ID NO: 312398 - DNA, 15 bp, Homo sapiens
actcaatatggtcag

SEQ ID NO: 312399 - DNA, 15 bp, Homo sapiens
cactcaatatggtca

SEQ ID NO: 312400 - DNA, 15 bp, Homo sapiens
ccactcaatatggtc

SEQ ID NO: 312401 - DNA, 15 bp, Homo sapiens
tccactcaatatggt

SEQ ID NO: 312402 - DNA, 15 bp, Homo sapiens
atccactcaatatgg

SEQ ID NO: 312403 - DNA, 15 bp, Homo sapiens
catccactcaatatg

SEQ ID NO: 312404 - DNA, 15 bp, Homo sapiens
tcatccactcaatat

SEQ ID NO: 312405 - DNA, 15 bp, Homo sapiens
ttcatccactcaata

SEQ ID NO: 312406 - DNA, 15 bp, Homo sapiens
tttcatccactcaat

SEQ ID NO: 312407 - DNA, 15 bp, Homo sapiens
ctttcatccactcaa

SEQ ID NO: 312408 - DNA, 15 bp, Homo sapiens
tctttcatccactca

SEQ ID NO: 312409 - DNA, 15 bp, Homo sapiens
ctctttcatccactc

SEQ ID NO: 312410 - DNA, 15 bp, Homo sapiens
gctctttcatccact

SEQ ID NO: 312411 - DNA, 15 bp, Homo sapiens
ggctctttcatccac

SEQ ID NO: 312412 - DNA, 15 bp, Homo sapiens
aggctctttcatcca

SEQ ID NO: 312413 - DNA, 15 bp, Homo sapiens
aaggctctttcatcc

SEQ ID NO: 312414 - DNA, 15 bp, Homo sapiens
caaggctctttcatc

SEQ ID NO: 312415 - DNA, 15 bp, Homo sapiens
ccaaggctctttcat

SEQ ID NO: 312416 - DNA, 15 bp, Homo sapiens
tccaaggctctttca

SEQ ID NO: 312417 - DNA, 15 bp, Homo sapiens
ctccaaggctctttc

SEQ ID NO: 312418 - DNA, 15 bp, Homo sapiens
cctccaaggctcttt

SEQ ID NO: 312419 - DNA, 15 bp, Homo sapiens
ccctccaaggctctt

SEQ ID NO: 312420 - DNA, 15 bp, Homo sapiens
tccctccaaggctct

SEQ ID NO: 312421 - DNA, 15 bp, Homo sapiens
gtccctccaaggctc

SEQ ID NO: 312422 - DNA, 15 bp, Homo sapiens
agtccctccaaggct

SEQ ID NO: 312423 - DNA, 15 bp, Homo sapiens
cagtccctccaaggc

SEQ ID NO: 312424 - DNA, 15 bp, Homo sapiens
ccagtccctccaagg

SEQ ID NO: 312425 - DNA, 15 bp, Homo sapiens
cccagtccctccaag

SEQ ID NO: 312426 - DNA, 15 bp, Homo sapiens
gcccagtccctccaa

SEQ ID NO: 312427 - DNA, 15 bp, Homo sapiens
ggcccagtccctcca

SEQ ID NO: 312428 - DNA, 15 bp, Homo sapiens
aggcccagtccctcc

SEQ ID NO: 312429 - DNA, 15 bp, Homo sapiens
aaggcccagtccctc

SEQ ID NO: 312430 - DNA, 15 bp, Homo sapiens
aaaggcccagtccct

SEQ ID NO: 312431 - DNA, 15 bp, Homo sapiens
aaaaggcccagtccc

SEQ ID NO: 312432 - DNA, 15 bp, Homo sapiens
taaaaggcccagtcc

SEQ ID NO: 312433 - DNA, 15 bp, Homo sapiens
ctaaaaggcccagtc

SEQ ID NO: 312434 - DNA, 15 bp, Homo sapiens
tctaaaaggcccagt

SEQ ID NO: 312435 - DNA, 15 bp, Homo sapiens
ttctaaaaggcccag

SEQ ID NO: 312436 - DNA, 15 bp, Homo sapiens
tttctaaaaggccca

SEQ ID NO: 312437 - DNA, 15 bp, Homo sapiens
ttttctaaaaggccc

SEQ ID NO: 312438 - DNA, 15 bp, Homo sapiens
tttttctaaaaggcc

SEQ ID NO: 312439 - DNA, 15 bp, Homo sapiens
atttttctaaaaggc

SEQ ID NO: 312440 - DNA, 15 bp, Homo sapiens
tatttttctaaaagg

SEQ ID NO: 312441 - DNA, 15 bp, Homo sapiens
ctatttttctaaaag

SEQ ID NO: 312442 - DNA, 15 bp, Homo sapiens
cctatttttctaaaa

SEQ ID NO: 312443 - DNA, 15 bp, Homo sapiens
gcctatttttctaaa

SEQ ID NO: 312444 - DNA, 15 bp, Homo sapiens
agcctatttttctaa

SEQ ID NO: 312445 - DNA, 15 bp, Homo sapiens
gagcctatttttcta

SEQ ID NO: 312446 - DNA, 15 bp, Homo sapiens
cgagcctatttttct

SEQ ID NO: 312447 - DNA, 15 bp, Homo sapiens
acgagcctatttttc

SEQ ID NO: 312448 - DNA, 15 bp, Homo sapiens
tacgagcctattttt

SEQ ID NO: 312449 - DNA, 15 bp, Homo sapiens
ttacgagcctatttt

SEQ ID NO: 312450 - DNA, 15 bp, Homo sapiens
cttacgagcctattt

SEQ ID NO: 312451 - DNA, 15 bp, Homo sapiens
acttacgagcctatt

SEQ ID NO: 312452 - DNA, 15 bp, Homo sapiens
gacttacgagcctat

SEQ ID NO: 312453 - DNA, 15 bp, Homo sapiens
tgacttacgagccta

SEQ ID NO: 312454 - DNA, 15 bp, Homo sapiens
ttgacttacgagcct

SEQ ID NO: 312455 - DNA, 15 bp, Homo sapiens
cttgacttacgagcc

SEQ ID NO: 312456 - DNA, 15 bp, Homo sapiens
tcttgacttacgagc

SEQ ID NO: 312457 - DNA, 15 bp, Homo sapiens
ctcttgacttacgag

SEQ ID NO: 312458 - DNA, 15 bp, Homo sapiens
gctcttgacttacga

SEQ ID NO: 312459 - DNA, 15 bp, Homo sapiens
tgctcttgacttacg

SEQ ID NO: 312460 - DNA, 15 bp, Homo sapiens
atgctcttgacttac

SEQ ID NO: 312461 - DNA, 15 bp, Homo sapiens
catgctcttgactta

SEQ ID NO: 312462 - DNA, 15 bp, Homo sapiens
ccatgctcttgactt

SEQ ID NO: 312463 - DNA, 15 bp, Homo sapiens
accatgctcttgact

SEQ ID NO: 312464 - DNA, 15 bp, Homo sapiens
caccatgctcttgac

SEQ ID NO: 312465 - DNA, 15 bp, Homo sapiens
acaccatgctcttga

SEQ ID NO: 312466 - DNA, 15 bp, Homo sapiens
gacaccatgctcttg

SEQ ID NO: 312467 - DNA, 15 bp, Homo sapiens
tgacaccatgctctt

SEQ ID NO: 312468 - DNA, 15 bp, Homo sapiens
ctgacaccatgctct

SEQ ID NO: 312469 - DNA, 15 bp, Homo sapiens
gctgacaccatgctc

SEQ ID NO: 312470 - DNA, 15 bp, Homo sapiens
agctgacaccatgct

SEQ ID NO: 312471 - DNA, 15 bp, Homo sapiens
cagctgacaccatgc

SEQ ID NO: 312472 - DNA, 15 bp, Homo sapiens
acagctgacaccatg

SEQ ID NO: 312473 - DNA, 15 bp, Homo sapiens
gacagctgacaccat

SEQ ID NO: 312474 - DNA, 15 bp, Homo sapiens
agacagctgacacca

SEQ ID NO: 312475 - DNA, 15 bp, Homo sapiens
cagacagctgacacc

SEQ ID NO: 312476 - DNA, 15 bp, Homo sapiens
acagacagctgacac

SEQ ID NO: 312477 - DNA, 15 bp, Homo sapiens
cacagacagctgaca

SEQ ID NO: 312478 - DNA, 15 bp, Homo sapiens
acacagacagctgac

SEQ ID NO: 312479 - DNA, 15 bp, Homo sapiens
cacacagacagctga

SEQ ID NO: 312480 - DNA, 15 bp, Homo sapiens
acacacagacagctg

SEQ ID NO: 312481 - DNA, 15 bp, Homo sapiens
tacacacagacagct

SEQ ID NO: 312482 - DNA, 15 bp, Homo sapiens
atacacacagacagc

SEQ ID NO: 312483 - DNA, 15 bp, Homo sapiens
aatacacacagacag

SEQ ID NO: 312484 - DNA, 15 bp, Homo sapiens
aaatacacacagaca

SEQ ID NO: 312485 - DNA, 15 bp, Homo sapiens
gaaatacacacagac

SEQ ID NO: 312486 - DNA, 15 bp, Homo sapiens
tgaaatacacacaga

SEQ ID NO: 312487 - DNA, 15 bp, Homo sapiens
atgaaatacacacag

SEQ ID NO: 312488 - DNA, 15 bp, Homo sapiens
catgaaatacacaca

SEQ ID NO: 312489 - DNA, 15 bp, Homo sapiens
ccatgaaatacacac

SEQ ID NO: 312490 - DNA, 15 bp, Homo sapiens
accatgaaatacaca

SEQ ID NO: 312491 - DNA, 15 bp, Homo sapiens
caccatgaaatacac

SEQ ID NO: 312492 - DNA, 15 bp, Homo sapiens
tcaccatgaaataca

SEQ ID NO: 312493 - DNA, 15 bp, Homo sapiens
ctcaccatgaaatac

SEQ ID NO: 312494 - DNA, 15 bp, Homo sapiens
tctcaccatgaaata

SEQ ID NO: 312495 - DNA, 15 bp, Homo sapiens
ctctcaccatgaaat

SEQ ID NO: 312496 - DNA, 15 bp, Homo sapiens
actctcaccatgaaa

SEQ ID NO: 312497 - DNA, 15 bp, Homo sapiens
cactctcaccatgaa

SEQ ID NO: 312498 - DNA, 15 bp, Homo sapiens
tcactctcaccatga

SEQ ID NO: 312499 - DNA, 15 bp, Homo sapiens
ttcactctcaccatg

SEQ ID NO: 312500 - DNA, 15 bp, Homo sapiens
tttcactctcaccat

SEQ ID NO: 312501 - DNA, 15 bp, Homo sapiens
ctttcactctcacca

SEQ ID NO: 312502 - DNA, 15 bp, Homo sapiens
gctttcactctcacc

SEQ ID NO: 312503 - DNA, 15 bp, Homo sapiens
tgctttcactctcac

SEQ ID NO: 312504 - DNA, 15 bp, Homo sapiens
ctgctttcactctca

SEQ ID NO: 312505 - DNA, 15 bp, Homo sapiens
tctgctttcactctc

SEQ ID NO: 312506 - DNA, 15 bp, Homo sapiens
atctgctttcactct

SEQ ID NO: 312507 - DNA, 15 bp, Homo sapiens
gatctgctttcactc

SEQ ID NO: 312508 - DNA, 15 bp, Homo sapiens
agatctgctttcact

SEQ ID NO: 312509 - DNA, 15 bp, Homo sapiens
tagatctgctttcac

SEQ ID NO: 312510 - DNA, 15 bp, Homo sapiens
ttagatctgctttca

SEQ ID NO: 312511 - DNA, 15 bp, Homo sapiens
tttagatctgctttc

SEQ ID NO: 312512 - DNA, 15 bp, Homo sapiens
atttagatctgcttt

SEQ ID NO: 312513 - DNA, 15 bp, Homo sapiens
aatttagatctgctt

SEQ ID NO: 312514 - DNA, 15 bp, Homo sapiens
taatttagatctgct

SEQ ID NO: 312515 - DNA, 15 bp, Homo sapiens
ataatttagatctgc

SEQ ID NO: 312516 - DNA, 15 bp, Homo sapiens
cataatttagatctg

SEQ ID NO: 312517 - DNA, 15 bp, Homo sapiens
tcataatttagatct

SEQ ID NO: 312518 - DNA, 15 bp, Homo sapiens
ctcataatttagatc

SEQ ID NO: 312519 - DNA, 15 bp, Homo sapiens
actcataatttagat

SEQ ID NO: 312520 - DNA, 15 bp, Homo sapiens
aactcataatttaga

SEQ ID NO: 312521 - DNA, 15 bp, Homo sapiens
caactcataatttag

SEQ ID NO: 312522 - DNA, 15 bp, Homo sapiens
acaactcataattta

SEQ ID NO: 312523 - DNA, 15 bp, Homo sapiens
aacaactcataattt

SEQ ID NO: 312524 - DNA, 15 bp, Homo sapiens
caacaactcataatt

SEQ ID NO: 312525 - DNA, 15 bp, Homo sapiens
tcaacaactcataat

SEQ ID NO: 312526 - DNA, 15 bp, Homo sapiens
ctcaacaactcataa

SEQ ID NO: 312527 - DNA, 15 bp, Homo sapiens
actcaacaactcata

SEQ ID NO: 312528 - DNA, 15 bp, Homo sapiens
gactcaacaactcat

SEQ ID NO: 312529 - DNA, 15 bp, Homo sapiens
tgactcaacaactca

SEQ ID NO: 312530 - DNA, 15 bp, Homo sapiens
gtgactcaacaactc

SEQ ID NO: 312531 - DNA, 15 bp, Homo sapiens
ggtgactcaacaact

SEQ ID NO: 312532 - DNA, 15 bp, Homo sapiens
aggtgactcaacaac

SEQ ID NO: 312533 - DNA, 15 bp, Homo sapiens
caggtgactcaacaa

SEQ ID NO: 312534 - DNA, 15 bp, Homo sapiens
gcaggtgactcaaca

SEQ ID NO: 312535 - DNA, 15 bp, Homo sapiens
tgcaggtgactcaac

SEQ ID NO: 312536 - DNA, 15 bp, Homo sapiens
atgcaggtgactcaa

SEQ ID NO: 312537 - DNA, 15 bp, Homo sapiens
catgcaggtgactca

SEQ ID NO: 312538 - DNA, 15 bp, Homo sapiens
tcatgcaggtgactc

SEQ ID NO: 312539 - DNA, 15 bp, Homo sapiens
ttcatgcaggtgact

SEQ ID NO: 312540 - DNA, 15 bp, Homo sapiens
attcatgcaggtgac

SEQ ID NO: 312541 - DNA, 15 bp, Homo sapiens
gattcatgcaggtga

SEQ ID NO: 312542 - DNA, 15 bp, Homo sapiens
tgattcatgcaggtg

SEQ ID NO: 312543 - DNA, 15 bp, Homo sapiens
ttgattcatgcaggt

SEQ ID NO: 312544 - DNA, 15 bp, Homo sapiens
attgattcatgcagg

SEQ ID NO: 312545 - DNA, 15 bp, Homo sapiens
aattgattcatgcag

SEQ ID NO: 312546 - DNA, 15 bp, Homo sapiens
gaattgattcatgca

SEQ ID NO: 312547 - DNA, 15 bp, Homo sapiens
tgaattgattcatgc

SEQ ID NO: 312548 - DNA, 15 bp, Homo sapiens
ttgaattgattcatg

SEQ ID NO: 312549 - DNA, 15 bp, Homo sapiens
attgaattgattcat

SEQ ID NO: 312550 - DNA, 15 bp, Homo sapiens
aattgaattgattca

SEQ ID NO: 312551 - DNA, 15 bp, Homo sapiens
gaattgaattgattc

SEQ ID NO: 312552 - DNA, 15 bp, Homo sapiens
agaattgaattgatt

SEQ ID NO: 312553 - DNA, 15 bp, Homo sapiens
aagaattgaattgat

SEQ ID NO: 312554 - DNA, 15 bp, Homo sapiens
taagaattgaattga

SEQ ID NO: 312555 - DNA, 15 bp, Homo sapiens
ttaagaattgaattg

SEQ ID NO: 312556 - DNA, 15 bp, Homo sapiens
attaagaattgaatt

SEQ ID NO: 312557 - DNA, 15 bp, Homo sapiens
aattaagaattgaat

SEQ ID NO: 312558 - DNA, 15 bp, Homo sapiens
aaattaagaattgaa

SEQ ID NO: 312559 - DNA, 15 bp, Homo sapiens
caaattaagaattga

SEQ ID NO: 312560 - DNA, 15 bp, Homo sapiens
tcaaattaagaattg

SEQ ID NO: 312561 - DNA, 15 bp, Homo sapiens
ttcaaattaagaatt

SEQ ID NO: 312562 - DNA, 15 bp, Homo sapiens
tttcaaattaagaat

SEQ ID NO: 312563 - DNA, 15 bp, Homo sapiens
ctttcaaattaagaa

SEQ ID NO: 312564 - DNA, 15 bp, Homo sapiens
cctttcaaattaaga

SEQ ID NO: 312565 - DNA, 15 bp, Homo sapiens
tcctttcaaattaag

SEQ ID NO: 312566 - DNA, 15 bp, Homo sapiens
ttcctttcaaattaa

SEQ ID NO: 312567 - DNA, 15 bp, Homo sapiens
cttcctttcaaatta

SEQ ID NO: 312568 - DNA, 15 bp, Homo sapiens
gcttcctttcaaatt

SEQ ID NO: 312569 - DNA, 15 bp, Homo sapiens
agcttcctttcaaat

SEQ ID NO: 312570 - DNA, 15 bp, Homo sapiens
gagcttcctttcaaa

SEQ ID NO: 312571 - DNA, 15 bp, Homo sapiens
tgagcttcctttcaa

SEQ ID NO: 312572 - DNA, 15 bp, Homo sapiens
ctgagcttcctttca

SEQ ID NO: 312573 - DNA, 15 bp, Homo sapiens
actgagcttcctttc

SEQ ID NO: 312574 - DNA, 15 bp, Homo sapiens
cactgagcttccttt

SEQ ID NO: 312575 - DNA, 15 bp, Homo sapiens
gcactgagcttcctt

SEQ ID NO: 312576 - DNA, 15 bp, Homo sapiens
ggcactgagcttcct

SEQ ID NO: 312577 - DNA, 15 bp, Homo sapiens
tggcactgagcttcc

SEQ ID NO: 312578 - DNA, 15 bp, Homo sapiens
ttggcactgagcttc

SEQ ID NO: 312579 - DNA, 15 bp, Homo sapiens
cttggcactgagctt

SEQ ID NO: 312580 - DNA, 15 bp, Homo sapiens
ccttggcactgagct

SEQ ID NO: 312581 - DNA, 15 bp, Homo sapiens
cccttggcactgagc

SEQ ID NO: 312582 - DNA, 15 bp, Homo sapiens
tcccttggcactgag

SEQ ID NO: 312583 - DNA, 15 bp, Homo sapiens
ttcccttggcactga

SEQ ID NO: 312584 - DNA, 15 bp, Homo sapiens
gttcccttggcactg

SEQ ID NO: 312585 - DNA, 15 bp, Homo sapiens
tgttcccttggcact

SEQ ID NO: 312586 - DNA, 15 bp, Homo sapiens
atgttcccttggcac

SEQ ID NO: 312587 - DNA, 15 bp, Homo sapiens
tatgttcccttggca

SEQ ID NO: 312588 - DNA, 15 bp, Homo sapiens
ttatgttcccttggc

SEQ ID NO: 312589 - DNA, 15 bp, Homo sapiens
gttatgttcccttgg

SEQ ID NO: 312590 - DNA, 15 bp, Homo sapiens
tgttatgttcccttg

SEQ ID NO: 312591 - DNA, 15 bp, Homo sapiens
atgttatgttccctt

SEQ ID NO: 312592 - DNA, 15 bp, Homo sapiens
tatgttatgttccct

SEQ ID NO: 312593 - DNA, 15 bp, Homo sapiens
atatgttatgttccc

SEQ ID NO: 312594 - DNA, 15 bp, Homo sapiens
catatgttatgttcc

SEQ ID NO: 312595 - DNA, 15 bp, Homo sapiens
ccatatgttatgttc

SEQ ID NO: 312596 - DNA, 15 bp, Homo sapiens
tccatatgttatgtt

SEQ ID NO: 312597 - DNA, 15 bp, Homo sapiens
ttccatatgttatgt

SEQ ID NO: 312598 - DNA, 15 bp, Homo sapiens
cttccatatgttatg

SEQ ID NO: 312599 - DNA, 15 bp, Homo sapiens
ccttccatatgttat

SEQ ID NO: 312600 - DNA, 15 bp, Homo sapiens
tccttccatatgtta

SEQ ID NO: 312601 - DNA, 15 bp, Homo sapiens
ctccttccatatgtt

SEQ ID NO: 312602 - DNA, 15 bp, Homo sapiens
actccttccatatgt

SEQ ID NO: 312603 - DNA, 15 bp, Homo sapiens
cactccttccatatg

SEQ ID NO: 312604 - DNA, 15 bp, Homo sapiens
ccactccttccatat

SEQ ID NO: 312605 - DNA, 15 bp, Homo sapiens
gccactccttccata

SEQ ID NO: 312606 - DNA, 15 bp, Homo sapiens
ggccactccttccat

SEQ ID NO: 312607 - DNA, 15 bp, Homo sapiens
aggccactccttcca

SEQ ID NO: 312608 - DNA, 15 bp, Homo sapiens
gaggccactccttcc

SEQ ID NO: 312609 - DNA, 15 bp, Homo sapiens
tgaggccactccttc

SEQ ID NO: 312610 - DNA, 15 bp, Homo sapiens
ttgaggccactcctt

SEQ ID NO: 312611 - DNA, 15 bp, Homo sapiens
attgaggccactcct

SEQ ID NO: 312612 - DNA, 15 bp, Homo sapiens
cattgaggccactcc

SEQ ID NO: 312613 - DNA, 15 bp, Homo sapiens
tcattgaggccactc

SEQ ID NO: 312614 - DNA, 15 bp, Homo sapiens
gtcattgaggccact

SEQ ID NO: 312615 - DNA, 15 bp, Homo sapiens
agtcattgaggccac

SEQ ID NO: 312616 - DNA, 15 bp, Homo sapiens
tagtcattgaggcca

SEQ ID NO: 312617 - DNA, 15 bp, Homo sapiens
ttagtcattgaggcc

SEQ ID NO: 312618 - DNA, 15 bp, Homo sapiens
gttagtcattgaggc

SEQ ID NO: 312619 - DNA, 15 bp, Homo sapiens
tgttagtcattgagg

SEQ ID NO: 312620 - DNA, 15 bp, Homo sapiens
ttgttagtcattgag

SEQ ID NO: 312621 - DNA, 15 bp, Homo sapiens
tttgttagtcattga

SEQ ID NO: 312622 - DNA, 15 bp, Homo sapiens
ttttgttagtcattg

SEQ ID NO: 312623 - DNA, 15 bp, Homo sapiens
gttttgttagtcatt

SEQ ID NO: 312624 - DNA, 15 bp, Homo sapiens
ggttttgttagtcat

SEQ ID NO: 312625 - DNA, 15 bp, Homo sapiens
tggttttgttagtca

SEQ ID NO: 312626 - DNA, 15 bp, Homo sapiens
ctggttttgttagtc

SEQ ID NO: 312627 - DNA, 15 bp, Homo sapiens
cctggttttgttagt

SEQ ID NO: 312628 - DNA, 15 bp, Homo sapiens
ccctggttttgttag

SEQ ID NO: 312629 - DNA, 15 bp, Homo sapiens
gccctggttttgtta

SEQ ID NO: 312630 - DNA, 15 bp, Homo sapiens
ggccctggttttgtt

SEQ ID NO: 312631 - DNA, 15 bp, Homo sapiens
aggccctggttttgt

SEQ ID NO: 312632 - DNA, 15 bp, Homo sapiens
taggccctggttttg

SEQ ID NO: 312633 - DNA, 15 bp, Homo sapiens
ataggccctggtttt

SEQ ID NO: 312634 - DNA, 15 bp, Homo sapiens
aataggccctggttt

SEQ ID NO: 312635 - DNA, 15 bp, Homo sapiens
taataggccctggtt

SEQ ID NO: 312636 - DNA, 15 bp, Homo sapiens
ctaataggccctggt

SEQ ID NO: 312637 - DNA, 15 bp, Homo sapiens
cctaataggccctgg

SEQ ID NO: 312638 - DNA, 15 bp, Homo sapiens
ccctaataggccctg

SEQ ID NO: 312639 - DNA, 15 bp, Homo sapiens
accctaataggccct

SEQ ID NO: 312640 - DNA, 15 bp, Homo sapiens
aaccctaataggccc

SEQ ID NO: 312641 - DNA, 15 bp, Homo sapiens
caaccctaataggcc

SEQ ID NO: 312642 - DNA, 15 bp, Homo sapiens
gcaaccctaataggc

SEQ ID NO: 312643 - DNA, 15 bp, Homo sapiens
ggcaaccctaatagg

SEQ ID NO: 312644 - DNA, 15 bp, Homo sapiens
aggcaaccctaatag

SEQ ID NO: 312645 - DNA, 15 bp, Homo sapiens
caggcaaccctaata

SEQ ID NO: 312646 - DNA, 15 bp, Homo sapiens
tcaggcaaccctaat

SEQ ID NO: 312647 - DNA, 15 bp, Homo sapiens
ctcaggcaaccctaa

SEQ ID NO: 312648 - DNA, 15 bp, Homo sapiens
actcaggcaacccta

SEQ ID NO: 312649 - DNA, 15 bp, Homo sapiens
aactcaggcaaccct

SEQ ID NO: 312650 - DNA, 15 bp, Homo sapiens
aaactcaggcaaccc

SEQ ID NO: 312651 - DNA, 15 bp, Homo sapiens
taaactcaggcaacc

SEQ ID NO: 312652 - DNA, 15 bp, Homo sapiens
gtaaactcaggcaac

SEQ ID NO: 312653 - DNA, 15 bp, Homo sapiens
agtaaactcaggcaa

SEQ ID NO: 312654 - DNA, 15 bp, Homo sapiens
aagtaaactcaggca

SEQ ID NO: 312655 - DNA, 15 bp, Homo sapiens
taagtaaactcaggc

SEQ ID NO: 312656 - DNA, 15 bp, Homo sapiens
ctaagtaaactcagg

SEQ ID NO: 312657 - DNA, 15 bp, Homo sapiens
cctaagtaaactcag

SEQ ID NO: 312658 - DNA, 15 bp, Homo sapiens
acctaagtaaactca

SEQ ID NO: 312659 - DNA, 15 bp, Homo sapiens
cacctaagtaaactc

SEQ ID NO: 312660 - DNA, 15 bp, Homo sapiens
gcacctaagtaaact

SEQ ID NO: 312661 - DNA, 15 bp, Homo sapiens
tgcacctaagtaaac

SEQ ID NO: 312662 - DNA, 15 bp, Homo sapiens
atgcacctaagtaaa

SEQ ID NO: 312663 - DNA, 15 bp, Homo sapiens
aatgcacctaagtaa

SEQ ID NO: 312664 - DNA, 15 bp, Homo sapiens
aaatgcacctaagta

SEQ ID NO: 312665 - DNA, 15 bp, Homo sapiens
taaatgcacctaagt

SEQ ID NO: 312666 - DNA, 15 bp, Homo sapiens
ataaatgcacctaag

SEQ ID NO: 312667 - DNA, 15 bp, Homo sapiens
tataaatgcacctaa

SEQ ID NO: 312668 - DNA, 15 bp, Homo sapiens
ttataaatgcaccta

SEQ ID NO: 312669 - DNA, 15 bp, Homo sapiens
cttataaatgcacct

SEQ ID NO: 312670 - DNA, 15 bp, Homo sapiens
tcttataaatgcacc

SEQ ID NO: 312671 - DNA, 15 bp, Homo sapiens
gtcttataaatgcac

SEQ ID NO: 312672 - DNA, 15 bp, Homo sapiens
tgtcttataaatgca

SEQ ID NO: 312673 - DNA, 15 bp, Homo sapiens
atgtcttataaatgc

SEQ ID NO: 312674 - DNA, 15 bp, Homo sapiens
catgtcttataaatg

SEQ ID NO: 312675 - DNA, 15 bp, Homo sapiens
tcatgtcttataaat

SEQ ID NO: 312676 - DNA, 15 bp, Homo sapiens
gtcatgtcttataaa

SEQ ID NO: 312677 - DNA, 15 bp, Homo sapiens
tgtcatgtcttataa

SEQ ID NO: 312678 - DNA, 15 bp, Homo sapiens
atgtcatgtcttata

SEQ ID NO: 312679 - DNA, 15 bp, Homo sapiens
aatgtcatgtcttat

SEQ ID NO: 312680 - DNA, 15 bp, Homo sapiens
aaatgtcatgtctta

SEQ ID NO: 312681 - DNA, 15 bp, Homo sapiens
gaaatgtcatgtctt

SEQ ID NO: 312682 - DNA, 15 bp, Homo sapiens
ggaaatgtcatgtct

SEQ ID NO: 312683 - DNA, 15 bp, Homo sapiens
tggaaatgtcatgtc

SEQ ID NO: 312684 - DNA, 15 bp, Homo sapiens
gtggaaatgtcatgt

SEQ ID NO: 312685 - DNA, 15 bp, Homo sapiens
tgtggaaatgtcatg

SEQ ID NO: 312686 - DNA, 15 bp, Homo sapiens
ctgtggaaatgtcat

SEQ ID NO: 312687 - DNA, 15 bp, Homo sapiens
gctgtggaaatgtca

SEQ ID NO: 312688 - DNA, 15 bp, Homo sapiens
agctgtggaaatgtc

SEQ ID NO: 312689 - DNA, 15 bp, Homo sapiens
cagctgtggaaatgt

SEQ ID NO: 312690 - DNA, 15 bp, Homo sapiens
acagctgtggaaatg

SEQ ID NO: 312691 - DNA, 15 bp, Homo sapiens
aacagctgtggaaat

SEQ ID NO: 312692 - DNA, 15 bp, Homo sapiens
gaacagctgtggaaa

SEQ ID NO: 312693 - DNA, 15 bp, Homo sapiens
tgaacagctgtggaa

SEQ ID NO: 312694 - DNA, 15 bp, Homo sapiens
ttgaacagctgtgga

SEQ ID NO: 312695 - DNA, 15 bp, Homo sapiens
gttgaacagctgtgg

SEQ ID NO: 312696 - DNA, 15 bp, Homo sapiens
agttgaacagctgtg

SEQ ID NO: 312697 - DNA, 15 bp, Homo sapiens
tagttgaacagctgt

SEQ ID NO: 312698 - DNA, 15 bp, Homo sapiens
atagttgaacagctg

SEQ ID NO: 312699 - DNA, 15 bp, Homo sapiens
catagttgaacagct

SEQ ID NO: 312700 - DNA, 15 bp, Homo sapiens
acatagttgaacagc

SEQ ID NO: 312701 - DNA, 15 bp, Homo sapiens
cacatagttgaacag

SEQ ID NO: 312702 - DNA, 15 bp, Homo sapiens
tcacatagttgaaca

SEQ ID NO: 312703 - DNA, 15 bp, Homo sapiens
ttcacatagttgaac

SEQ ID NO: 312704 - DNA, 15 bp, Homo sapiens
tttcacatagttgaa

SEQ ID NO: 312705 - DNA, 15 bp, Homo sapiens
ttttcacatagttga

SEQ ID NO: 312706 - DNA, 15 bp, Homo sapiens
gttttcacatagttg

SEQ ID NO: 312707 - DNA, 15 bp, Homo sapiens
ggttttcacatagtt

SEQ ID NO: 312708 - DNA, 15 bp, Homo sapiens
aggttttcacatagt

SEQ ID NO: 312709 - DNA, 15 bp, Homo sapiens
aaggttttcacatag

SEQ ID NO: 312710 - DNA, 15 bp, Homo sapiens
aaaggttttcacata

SEQ ID NO: 312711 - DNA, 15 bp, Homo sapiens
aaaaggttttcacat

SEQ ID NO: 312712 - DNA, 15 bp, Homo sapiens
caaaaggttttcaca

SEQ ID NO: 312713 - DNA, 15 bp, Homo sapiens
acaaaaggttttcac

SEQ ID NO: 312714 - DNA, 15 bp, Homo sapiens
tacaaaaggttttca

SEQ ID NO: 312715 - DNA, 15 bp, Homo sapiens
ttacaaaaggttttc

SEQ ID NO: 312716 - DNA, 15 bp, Homo sapiens
cttacaaaaggtttt

SEQ ID NO: 312717 - DNA, 15 bp, Homo sapiens
gcttacaaaaggttt

SEQ ID NO: 312718 - DNA, 15 bp, Homo sapiens
tgcttacaaaaggtt

SEQ ID NO: 312719 - DNA, 15 bp, Homo sapiens
atgcttacaaaaggt

SEQ ID NO: 312720 - DNA, 15 bp, Homo sapiens
aatgcttacaaaagg

SEQ ID NO: 312721 - DNA, 15 bp, Homo sapiens
taatgcttacaaaag

SEQ ID NO: 312722 - DNA, 15 bp, Homo sapiens
gtaatgcttacaaaa

SEQ ID NO: 312723 - DNA, 15 bp, Homo sapiens
agtaatgcttacaaa

SEQ ID NO: 312724 - DNA, 15 bp, Homo sapiens
cagtaatgcttacaa

SEQ ID NO: 312725 - DNA, 15 bp, Homo sapiens
acagtaatgcttaca

SEQ ID NO: 312726 - DNA, 15 bp, Homo sapiens
tacagtaatgcttac

SEQ ID NO: 312727 - DNA, 15 bp, Homo sapiens
atacagtaatgctta

SEQ ID NO: 312728 - DNA, 15 bp, Homo sapiens
aatacagtaatgctt

SEQ ID NO: 312729 - DNA, 15 bp, Homo sapiens
aaatacagtaatgct

SEQ ID NO: 312730 - DNA, 15 bp, Homo sapiens
caaatacagtaatgc

SEQ ID NO: 312731 - DNA, 15 bp, Homo sapiens
tcaaatacagtaatg

SEQ ID NO: 312732 - DNA, 15 bp, Homo sapiens
atcaaatacagtaat

SEQ ID NO: 312733 - DNA, 15 bp, Homo sapiens
tatcaaatacagtaa

SEQ ID NO: 312734 - DNA, 15 bp, Homo sapiens
ttatcaaatacagta

SEQ ID NO: 312735 - DNA, 15 bp, Homo sapiens
tttatcaaatacagt

SEQ ID NO: 312736 - DNA, 15 bp, Homo sapiens
gtttatcaaatacag

SEQ ID NO: 312737 - DNA, 15 bp, Homo sapiens
agtttatcaaataca

SEQ ID NO: 312738 - DNA, 15 bp, Homo sapiens
gagtttatcaaatac

SEQ ID NO: 312739 - DNA, 15 bp, Homo sapiens
agagtttatcaaata

SEQ ID NO: 312740 - DNA, 15 bp, Homo sapiens
cagagtttatcaaat

SEQ ID NO: 312741 - DNA, 15 bp, Homo sapiens
acagagtttatcaaa

SEQ ID NO: 312742 - DNA, 15 bp, Homo sapiens
cacagagtttatcaa

SEQ ID NO: 312743 - DNA, 15 bp, Homo sapiens
tcacagagtttatca

SEQ ID NO: 312744 - DNA, 15 bp, Homo sapiens
ctcacagagtttatc

SEQ ID NO: 312745 - DNA, 15 bp, Homo sapiens
tctcacagagtttat

SEQ ID NO: 312746 - DNA, 15 bp, Homo sapiens
atctcacagagttta

SEQ ID NO: 312747 - DNA, 15 bp, Homo sapiens
catctcacagagttt

SEQ ID NO: 312748 - DNA, 15 bp, Homo sapiens
ccatctcacagagtt

SEQ ID NO: 312749 - DNA, 15 bp, Homo sapiens
tccatctcacagagt

SEQ ID NO: 312750 - DNA, 15 bp, Homo sapiens
atccatctcacagag

SEQ ID NO: 312751 - DNA, 15 bp, Homo sapiens
catccatctcacaga

SEQ ID NO: 312752 - DNA, 15 bp, Homo sapiens
acatccatctcacag

SEQ ID NO: 312753 - DNA, 15 bp, Homo sapiens
aacatccatctcaca

SEQ ID NO: 312754 - DNA, 15 bp, Homo sapiens
taacatccatctcac

SEQ ID NO: 312755 - DNA, 15 bp, Homo sapiens
ataacatccatctca

SEQ ID NO: 312756 - DNA, 15 bp, Homo sapiens
aataacatccatctc

SEQ ID NO: 312757 - DNA, 15 bp, Homo sapiens
caataacatccatct

SEQ ID NO: 312758 - DNA, 15 bp, Homo sapiens
acaataacatccatc

SEQ ID NO: 312759 - DNA, 15 bp, Homo sapiens
aacaataacatccat

SEQ ID NO: 312760 - DNA, 15 bp, Homo sapiens
taacaataacatcca

SEQ ID NO: 312761 - DNA, 15 bp, Homo sapiens
ataacaataacatcc

SEQ ID NO: 312762 - DNA, 15 bp, Homo sapiens
gataacaataacatc

SEQ ID NO: 312763 - DNA, 15 bp, Homo sapiens
agataacaataacat

SEQ ID NO: 312764 - DNA, 15 bp, Homo sapiens
gagataacaataaca

SEQ ID NO: 312765 - DNA, 15 bp, Homo sapiens
agagataacaataac

SEQ ID NO: 312766 - DNA, 15 bp, Homo sapiens
cagagataacaataa

SEQ ID NO: 312767 - DNA, 15 bp, Homo sapiens
tcagagataacaata

SEQ ID NO: 312768 - DNA, 15 bp, Homo sapiens
ttcagagataacaat

SEQ ID NO: 312769 - DNA, 15 bp, Homo sapiens
attcagagataacaa

SEQ ID NO: 312770 - DNA, 15 bp, Homo sapiens
aattcagagataaca

SEQ ID NO: 312771 - DNA, 15 bp, Homo sapiens
caattcagagataac

SEQ ID NO: 312772 - DNA, 15 bp, Homo sapiens
ccaattcagagataa

SEQ ID NO: 312773 - DNA, 15 bp, Homo sapiens
gccaattcagagata

SEQ ID NO: 312774 - DNA, 15 bp, Homo sapiens
tgccaattcagagat

SEQ ID NO: 312775 - DNA, 15 bp, Homo sapiens
ctgccaattcagaga

SEQ ID NO: 312776 - DNA, 15 bp, Homo sapiens
tctgccaattcagag

SEQ ID NO: 312777 - DNA, 15 bp, Homo sapiens
atctgccaattcaga

SEQ ID NO: 312778 - DNA, 15 bp, Homo sapiens
tatctgccaattcag

SEQ ID NO: 312779 - DNA, 15 bp, Homo sapiens
atatctgccaattca

SEQ ID NO: 312780 - DNA, 15 bp, Homo sapiens
catatctgccaattc

SEQ ID NO: 312781 - DNA, 15 bp, Homo sapiens
ccatatctgccaatt

SEQ ID NO: 312782 - DNA, 15 bp, Homo sapiens
cccatatctgccaat

SEQ ID NO: 312783 - DNA, 15 bp, Homo sapiens
gcccatatctgccaa

SEQ ID NO: 312784 - DNA, 15 bp, Homo sapiens
tgcccatatctgcca

SEQ ID NO: 312785 - DNA, 15 bp, Homo sapiens
ttgcccatatctgcc

SEQ ID NO: 312786 - DNA, 15 bp, Homo sapiens
cttgcccatatctgc

SEQ ID NO: 312787 - DNA, 15 bp, Homo sapiens
ccttgcccatatctg

SEQ ID NO: 312788 - DNA, 15 bp, Homo sapiens
tccttgcccatatct

SEQ ID NO: 312789 - DNA, 15 bp, Homo sapiens
atccttgcccatatc

SEQ ID NO: 312790 - DNA, 15 bp, Homo sapiens
catccttgcccatat

SEQ ID NO: 312791 - DNA, 15 bp, Homo sapiens
acatccttgcccata

SEQ ID NO: 312792 - DNA, 15 bp, Homo sapiens
aacatccttgcccat

SEQ ID NO: 312793 - DNA, 15 bp, Homo sapiens
gaacatccttgccca

SEQ ID NO: 312794 - DNA, 15 bp, Homo sapiens
ggaacatccttgccc

SEQ ID NO: 312795 - DNA, 15 bp, Homo sapiens
tggaacatccttgcc

SEQ ID NO: 312796 - DNA, 15 bp, Homo sapiens
ttggaacatccttgc

SEQ ID NO: 312797 - DNA, 15 bp, Homo sapiens
cttggaacatccttg

SEQ ID NO: 312798 - DNA, 15 bp, Homo sapiens
tcttggaacatcctt

SEQ ID NO: 312799 - DNA, 15 bp, Homo sapiens
ctcttggaacatcct

SEQ ID NO: 312800 - DNA, 15 bp, Homo sapiens
cctcttggaacatcc

SEQ ID NO: 312801 - DNA, 15 bp, Homo sapiens
acctcttggaacatc

SEQ ID NO: 312802 - DNA, 15 bp, Homo sapiens
gacctcttggaacat

SEQ ID NO: 312803 - DNA, 15 bp, Homo sapiens
agacctcttggaaca

SEQ ID NO: 312804 - DNA, 15 bp, Homo sapiens
cagacctcttggaac

SEQ ID NO: 312805 - DNA, 15 bp, Homo sapiens
gcagacctcttggaa

SEQ ID NO: 312806 - DNA, 15 bp, Homo sapiens
tgcagacctcttgga

SEQ ID NO: 312807 - DNA, 15 bp, Homo sapiens
ctgcagacctcttgg

SEQ ID NO: 312808 - DNA, 15 bp, Homo sapiens
actgcagacctcttg

SEQ ID NO: 312809 - DNA, 15 bp, Homo sapiens
cactgcagacctctt

SEQ ID NO: 312810 - DNA, 15 bp, Homo sapiens
acactgcagacctct

SEQ ID NO: 312811 - DNA, 15 bp, Homo sapiens
gacactgcagacctc

SEQ ID NO: 312812 - DNA, 15 bp, Homo sapiens
tgacactgcagacct

SEQ ID NO: 312813 - DNA, 15 bp, Homo sapiens
gtgacactgcagacc

SEQ ID NO: 312814 - DNA, 15 bp, Homo sapiens
tgtgacactgcagac

SEQ ID NO: 312815 - DNA, 15 bp, Homo sapiens
gtgtgacactgcaga

SEQ ID NO: 312816 - DNA, 15 bp, Homo sapiens
tgtgtgacactgcag

SEQ ID NO: 312817 - DNA, 15 bp, Homo sapiens
ttgtgtgacactgca

SEQ ID NO: 312818 - DNA, 15 bp, Homo sapiens
cttgtgtgacactgc

SEQ ID NO: 312819 - DNA, 15 bp, Homo sapiens
acttgtgtgacactg

SEQ ID NO: 312820 - DNA, 15 bp, Homo sapiens
tacttgtgtgacact

SEQ ID NO: 312821 - DNA, 15 bp, Homo sapiens
ctacttgtgtgacac

SEQ ID NO: 312822 - DNA, 15 bp, Homo sapiens
actacttgtgtgaca

SEQ ID NO: 312823 - DNA, 15 bp, Homo sapiens
tactacttgtgtgac

SEQ ID NO: 312824 - DNA, 15 bp, Homo sapiens
ttactacttgtgtga

SEQ ID NO: 312825 - DNA, 15 bp, Homo sapiens
tttactacttgtgtg

SEQ ID NO: 312826 - DNA, 15 bp, Homo sapiens
atttactacttgtgt

SEQ ID NO: 312827 - DNA, 15 bp, Homo sapiens
tatttactacttgtg

SEQ ID NO: 312828 - DNA, 15 bp, Homo sapiens
ctatttactacttgt

SEQ ID NO: 312829 - DNA, 15 bp, Homo sapiens
gctatttactacttg

SEQ ID NO: 312830 - DNA, 15 bp, Homo sapiens
tgctatttactactt

SEQ ID NO: 312831 - DNA, 15 bp, Homo sapiens
atgctatttactact

SEQ ID NO: 312832 - DNA, 15 bp, Homo sapiens
tatgctatttactac

SEQ ID NO: 312833 - DNA, 15 bp, Homo sapiens
ctatgctatttacta

SEQ ID NO: 312834 - DNA, 15 bp, Homo sapiens
gctatgctatttact

SEQ ID NO: 312835 - DNA, 15 bp, Homo sapiens
ggctatgctatttac

SEQ ID NO: 312836 - DNA, 15 bp, Homo sapiens
aggctatgctattta

SEQ ID NO: 312837 - DNA, 15 bp, Homo sapiens
caggctatgctattt

SEQ ID NO: 312838 - DNA, 15 bp, Homo sapiens
ccaggctatgctatt

SEQ ID NO: 312839 - DNA, 15 bp, Homo sapiens
cccaggctatgctat

SEQ ID NO: 312840 - DNA, 15 bp, Homo sapiens
gcccaggctatgcta

SEQ ID NO: 312841 - DNA, 15 bp, Homo sapiens
agcccaggctatgct

SEQ ID NO: 312842 - DNA, 15 bp, Homo sapiens
tagcccaggctatgc

SEQ ID NO: 312843 - DNA, 15 bp, Homo sapiens
ctagcccaggctatg

SEQ ID NO: 312844 - DNA, 15 bp, Homo sapiens
tctagcccaggctat

SEQ ID NO: 312845 - DNA, 15 bp, Homo sapiens
gtctagcccaggcta

SEQ ID NO: 312846 - DNA, 15 bp, Homo sapiens
agtctagcccaggct

SEQ ID NO: 312847 - DNA, 15 bp, Homo sapiens
aagtctagcccaggc

SEQ ID NO: 312848 - DNA, 15 bp, Homo sapiens
taagtctagcccagg

SEQ ID NO: 312849 - DNA, 15 bp, Homo sapiens
ctaagtctagcccag

SEQ ID NO: 312850 - DNA, 15 bp, Homo sapiens
tctaagtctagccca

SEQ ID NO: 312851 - DNA, 15 bp, Homo sapiens
ctctaagtctagccc

SEQ ID NO: 312852 - DNA, 15 bp, Homo sapiens
cctctaagtctagcc

SEQ ID NO: 312853 - DNA, 15 bp, Homo sapiens
acctctaagtctagc

SEQ ID NO: 312854 - DNA, 15 bp, Homo sapiens
gacctctaagtctag

SEQ ID NO: 312855 - DNA, 15 bp, Homo sapiens
agacctctaagtcta

SEQ ID NO: 312856 - DNA, 15 bp, Homo sapiens
aagacctctaagtct

SEQ ID NO: 312857 - DNA, 15 bp, Homo sapiens
aaagacctctaagtc

SEQ ID NO: 312858 - DNA, 15 bp, Homo sapiens
aaaagacctctaagt

SEQ ID NO: 312859 - DNA, 15 bp, Homo sapiens
taaaagacctctaag

SEQ ID NO: 312860 - DNA, 15 bp, Homo sapiens
ttaaaagacctctaa

SEQ ID NO: 312861 - DNA, 15 bp, Homo sapiens
gttaaaagacctcta

SEQ ID NO: 312862 - DNA, 15 bp, Homo sapiens
ggttaaaagacctct

SEQ ID NO: 312863 - DNA, 15 bp, Homo sapiens
tggttaaaagacctc

SEQ ID NO: 312864 - DNA, 15 bp, Homo sapiens
ctggttaaaagacct

SEQ ID NO: 312865 - DNA, 15 bp, Homo sapiens
actggttaaaagacc

SEQ ID NO: 312866 - DNA, 15 bp, Homo sapiens
gactggttaaaagac

SEQ ID NO: 312867 - DNA, 15 bp, Homo sapiens
tgactggttaaaaga

SEQ ID NO: 312868 - DNA, 15 bp, Homo sapiens
gtgactggttaaaag

SEQ ID NO: 312869 - DNA, 15 bp, Homo sapiens
tgtgactggttaaaa

SEQ ID NO: 312870 - DNA, 15 bp, Homo sapiens
atgtgactggttaaa

SEQ ID NO: 312871 - DNA, 15 bp, Homo sapiens
aatgtgactggttaa

SEQ ID NO: 312872 - DNA, 15 bp, Homo sapiens
gaatgtgactggtta

SEQ ID NO: 312873 - DNA, 15 bp, Homo sapiens
ggaatgtgactggtt

SEQ ID NO: 312874 - DNA, 15 bp, Homo sapiens
gggaatgtgactggt

SEQ ID NO: 312875 - DNA, 15 bp, Homo sapiens
ggggaatgtgactgg

SEQ ID NO: 312876 - DNA, 15 bp, Homo sapiens
gggggaatgtgactg

SEQ ID NO: 312877 - DNA, 15 bp, Homo sapiens
agggggaatgtgact

SEQ ID NO: 312878 - DNA, 15 bp, Homo sapiens
gagggggaatgtgac

SEQ ID NO: 312879 - DNA, 15 bp, Homo sapiens
tgagggggaatgtga

SEQ ID NO: 312880 - DNA, 15 bp, Homo sapiens
ctgagggggaatgtg

SEQ ID NO: 312881 - DNA, 15 bp, Homo sapiens
gctgagggggaatgt

SEQ ID NO: 312882 - DNA, 15 bp, Homo sapiens
tgctgagggggaatg

SEQ ID NO: 312883 - DNA, 15 bp, Homo sapiens
ctgctgagggggaat

SEQ ID NO: 312884 - DNA, 15 bp, Homo sapiens
actgctgagggggaa

SEQ ID NO: 312885 - DNA, 15 bp, Homo sapiens
cactgctgaggggga

SEQ ID NO: 312886 - DNA, 15 bp, Homo sapiens
tcactgctgaggggg

SEQ ID NO: 312887 - DNA, 15 bp, Homo sapiens
ctcactgctgagggg

SEQ ID NO: 312888 - DNA, 15 bp, Homo sapiens
tctcactgctgaggg

SEQ ID NO: 312889 - DNA, 15 bp, Homo sapiens
ttctcactgctgagg

SEQ ID NO: 312890 - DNA, 15 bp, Homo sapiens
gttctcactgctgag

SEQ ID NO: 312891 - DNA, 15 bp, Homo sapiens
agttctcactgctga

SEQ ID NO: 312892 - DNA, 15 bp, Homo sapiens
tagttctcactgctg

SEQ ID NO: 312893 - DNA, 15 bp, Homo sapiens
atagttctcactgct

SEQ ID NO: 312894 - DNA, 15 bp, Homo sapiens
catagttctcactgc

SEQ ID NO: 312895 - DNA, 15 bp, Homo sapiens
ccatagttctcactg

SEQ ID NO: 312896 - DNA, 15 bp, Homo sapiens
accatagttctcact

SEQ ID NO: 312897 - DNA, 15 bp, Homo sapiens
gaccatagttctcac

SEQ ID NO: 312898 - DNA, 15 bp, Homo sapiens
agaccatagttctca

SEQ ID NO: 312899 - DNA, 15 bp, Homo sapiens
cagaccatagttctc

SEQ ID NO: 312900 - DNA, 15 bp, Homo sapiens
gcagaccatagttct

SEQ ID NO: 312901 - DNA, 15 bp, Homo sapiens
ggcagaccatagttc

SEQ ID NO: 312902 - DNA, 15 bp, Homo sapiens
gggcagaccatagtt

SEQ ID NO: 312903 - DNA, 15 bp, Homo sapiens
ggggcagaccatagt

SEQ ID NO: 312904 - DNA, 15 bp, Homo sapiens
aggggcagaccatag

SEQ ID NO: 312905 - DNA, 15 bp, Homo sapiens
caggggcagaccata

SEQ ID NO: 312906 - DNA, 15 bp, Homo sapiens
gcaggggcagaccat

SEQ ID NO: 312907 - DNA, 15 bp, Homo sapiens
agcaggggcagacca

SEQ ID NO: 312908 - DNA, 15 bp, Homo sapiens
gagcaggggcagacc

SEQ ID NO: 312909 - DNA, 15 bp, Homo sapiens
ggagcaggggcagac

SEQ ID NO: 312910 - DNA, 15 bp, Homo sapiens
gggagcaggggcaga

SEQ ID NO: 312911 - DNA, 15 bp, Homo sapiens
agggagcaggggcag

SEQ ID NO: 312912 - DNA, 15 bp, Homo sapiens
gagggagcaggggca

SEQ ID NO: 312913 - DNA, 15 bp, Homo sapiens
tgagggagcaggggc

SEQ ID NO: 312914 - DNA, 15 bp, Homo sapiens
ctgagggagcagggg

SEQ ID NO: 312915 - DNA, 15 bp, Homo sapiens
actgagggagcaggg

SEQ ID NO: 312916 - DNA, 15 bp, Homo sapiens
cactgagggagcagg

SEQ ID NO: 312917 - DNA, 15 bp, Homo sapiens
gcactgagggagcag

SEQ ID NO: 312918 - DNA, 15 bp, Homo sapiens
tgcactgagggagca

SEQ ID NO: 312919 - DNA, 15 bp, Homo sapiens
gtgcactgagggagc

SEQ ID NO: 312920 - DNA, 15 bp, Homo sapiens
cgtgcactgagggag

SEQ ID NO: 312921 - DNA, 15 bp, Homo sapiens
gcgtgcactgaggga

SEQ ID NO: 312922 - DNA, 15 bp, Homo sapiens
ggcgtgcactgaggg

SEQ ID NO: 312923 - DNA, 15 bp, Homo sapiens
tggcgtgcactgagg

SEQ ID NO: 312924 - DNA, 15 bp, Homo sapiens
ttggcgtgcactgag

SEQ ID NO: 312925 - DNA, 15 bp, Homo sapiens
attggcgtgcactga

SEQ ID NO: 312926 - DNA, 15 bp, Homo sapiens
aattggcgtgcactg

SEQ ID NO: 312927 - DNA, 15 bp, Homo sapiens
taattggcgtgcact

SEQ ID NO: 312928 - DNA, 15 bp, Homo sapiens
ctaattggcgtgcac

SEQ ID NO: 312929 - DNA, 15 bp, Homo sapiens
actaattggcgtgca

SEQ ID NO: 312930 - DNA, 15 bp, Homo sapiens
aactaattggcgtgc

SEQ ID NO: 312931 - DNA, 15 bp, Homo sapiens
taactaattggcgtg

SEQ ID NO: 312932 - DNA, 15 bp, Homo sapiens
ctaactaattggcgt

SEQ ID NO: 312933 - DNA, 15 bp, Homo sapiens
cctaactaattggcg

SEQ ID NO: 312934 - DNA, 15 bp, Homo sapiens
gcctaactaattggc

SEQ ID NO: 312935 - DNA, 15 bp, Homo sapiens
ggcctaactaattgg

SEQ ID NO: 312936 - DNA, 15 bp, Homo sapiens
aggcctaactaattg

SEQ ID NO: 312937 - DNA, 15 bp, Homo sapiens
caggcctaactaatt

SEQ ID NO: 312938 - DNA, 15 bp, Homo sapiens
acaggcctaactaat

SEQ ID NO: 312939 - DNA, 15 bp, Homo sapiens
tacaggcctaactaa

SEQ ID NO: 312940 - DNA, 15 bp, Homo sapiens
atacaggcctaacta

SEQ ID NO: 312941 - DNA, 15 bp, Homo sapiens
aatacaggcctaact

SEQ ID NO: 312942 - DNA, 15 bp, Homo sapiens
gaatacaggcctaac

SEQ ID NO: 312943 - DNA, 15 bp, Homo sapiens
tgaatacaggcctaa

SEQ ID NO: 312944 - DNA, 15 bp, Homo sapiens
ctgaatacaggccta

SEQ ID NO: 312945 - DNA, 15 bp, Homo sapiens
tctgaatacaggcct

SEQ ID NO: 312946 - DNA, 15 bp, Homo sapiens
atctgaatacaggcc

SEQ ID NO: 312947 - DNA, 15 bp, Homo sapiens
catctgaatacaggc

SEQ ID NO: 312948 - DNA, 15 bp, Homo sapiens
ccatctgaatacagg

SEQ ID NO: 312949 - DNA, 15 bp, Homo sapiens
cccatctgaatacag

SEQ ID NO: 312950 - DNA, 15 bp, Homo sapiens
tcccatctgaataca

SEQ ID NO: 312951 - DNA, 15 bp, Homo sapiens
atcccatctgaatac

SEQ ID NO: 312952 - DNA, 15 bp, Homo sapiens
catcccatctgaata

SEQ ID NO: 312953 - DNA, 15 bp, Homo sapiens
tcatcccatctgaat

SEQ ID NO: 312954 - DNA, 15 bp, Homo sapiens
ctcatcccatctgaa

SEQ ID NO: 312955 - DNA, 15 bp, Homo sapiens
actcatcccatctga

SEQ ID NO: 312956 - DNA, 15 bp, Homo sapiens
aactcatcccatctg

SEQ ID NO: 312957 - DNA, 15 bp, Homo sapiens
taactcatcccatct

SEQ ID NO: 312958 - DNA, 15 bp, Homo sapiens
ataactcatcccatc

SEQ ID NO: 312959 - DNA, 15 bp, Homo sapiens
cataactcatcccat

SEQ ID NO: 312960 - DNA, 15 bp, Homo sapiens
acataactcatccca

SEQ ID NO: 312961 - DNA, 15 bp, Homo sapiens
aacataactcatccc

SEQ ID NO: 312962 - DNA, 15 bp, Homo sapiens
gaacataactcatcc

SEQ ID NO: 312963 - DNA, 15 bp, Homo sapiens
agaacataactcatc

SEQ ID NO: 312964 - DNA, 15 bp, Homo sapiens
cagaacataactcat

SEQ ID NO: 312965 - DNA, 15 bp, Homo sapiens
tcagaacataactca

SEQ ID NO: 312966 - DNA, 15 bp, Homo sapiens
atcagaacataactc

SEQ ID NO: 312967 - DNA, 15 bp, Homo sapiens
aatcagaacataact

SEQ ID NO: 312968 - DNA, 15 bp, Homo sapiens
taatcagaacataac

SEQ ID NO: 312969 - DNA, 15 bp, Homo sapiens
ctaatcagaacataa

SEQ ID NO: 312970 - DNA, 15 bp, Homo sapiens
cctaatcagaacata

SEQ ID NO: 312971 - DNA, 15 bp, Homo sapiens
tcctaatcagaacat

SEQ ID NO: 312972 - DNA, 15 bp, Homo sapiens
ttcctaatcagaaca

SEQ ID NO: 312973 - DNA, 15 bp, Homo sapiens
gttcctaatcagaac

SEQ ID NO: 312974 - DNA, 15 bp, Homo sapiens
ggttcctaatcagaa

SEQ ID NO: 312975 - DNA, 15 bp, Homo sapiens
tggttcctaatcaga

SEQ ID NO: 312976 - DNA, 15 bp, Homo sapiens
gtggttcctaatcag

SEQ ID NO: 312977 - DNA, 15 bp, Homo sapiens
tgtggttcctaatca

SEQ ID NO: 312978 - DNA, 15 bp, Homo sapiens
atgtggttcctaatc

SEQ ID NO: 312979 - DNA, 15 bp, Homo sapiens
catgtggttcctaat

SEQ ID NO: 312980 - DNA, 15 bp, Homo sapiens
acatgtggttcctaa

SEQ ID NO: 312981 - DNA, 15 bp, Homo sapiens
tacatgtggttccta

SEQ ID NO: 312982 - DNA, 15 bp, Homo sapiens
ctacatgtggttcct

SEQ ID NO: 312983 - DNA, 15 bp, Homo sapiens
actacatgtggttcc

SEQ ID NO: 312984 - DNA, 15 bp, Homo sapiens
tactacatgtggttc

SEQ ID NO: 312985 - DNA, 15 bp, Homo sapiens
atactacatgtggtt

SEQ ID NO: 312986 - DNA, 15 bp, Homo sapiens
tatactacatgtggt

SEQ ID NO: 312987 - DNA, 15 bp, Homo sapiens
atatactacatgtgg

SEQ ID NO: 312988 - DNA, 15 bp, Homo sapiens
catatactacatgtg

SEQ ID NO: 312989 - DNA, 15 bp, Homo sapiens
gcatatactacatgt

SEQ ID NO: 312990 - DNA, 15 bp, Homo sapiens
agcatatactacatg

SEQ ID NO: 312991 - DNA, 15 bp, Homo sapiens
tagcatatactacat

SEQ ID NO: 312992 - DNA, 15 bp, Homo sapiens
atagcatatactaca

SEQ ID NO: 312993 - DNA, 15 bp, Homo sapiens
tatagcatatactac

SEQ ID NO: 312994 - DNA, 15 bp, Homo sapiens
ttatagcatatacta

SEQ ID NO: 312995 - DNA, 15 bp, Homo sapiens
cttatagcatatact

SEQ ID NO: 312996 - DNA, 15 bp, Homo sapiens
acttatagcatatac

SEQ ID NO: 312997 - DNA, 15 bp, Homo sapiens
aacttatagcatata

SEQ ID NO: 312998 - DNA, 15 bp, Homo sapiens
taacttatagcatat

SEQ ID NO: 312999 - DNA, 15 bp, Homo sapiens
ttaacttatagcata

SEQ ID NO: 313000 - DNA, 15 bp, Homo sapiens
tttaacttatagcat

SEQ ID NO: 313001 - DNA, 15 bp, Homo sapiens
ttttaacttatagca

SEQ ID NO: 313002 - DNA, 15 bp, Homo sapiens
cttttaacttatagc

SEQ ID NO: 313003 - DNA, 15 bp, Homo sapiens
acttttaacttatag

SEQ ID NO: 313004 - DNA, 15 bp, Homo sapiens
tacttttaacttata

SEQ ID NO: 313005 - DNA, 15 bp, Homo sapiens
ctacttttaacttat

SEQ ID NO: 313006 - DNA, 15 bp, Homo sapiens
cctacttttaactta

SEQ ID NO: 313007 - DNA, 15 bp, Homo sapiens
gcctacttttaactt

SEQ ID NO: 313008 - DNA, 15 bp, Homo sapiens
tgcctacttttaact

SEQ ID NO: 313009 - DNA, 15 bp, Homo sapiens
ctgcctacttttaac

SEQ ID NO: 313010 - DNA, 15 bp, Homo sapiens
tctgcctacttttaa

SEQ ID NO: 313011 - DNA, 15 bp, Homo sapiens
atctgcctactttta

SEQ ID NO: 313012 - DNA, 15 bp, Homo sapiens
catctgcctactttt

SEQ ID NO: 313013 - DNA, 15 bp, Homo sapiens
acatctgcctacttt

SEQ ID NO: 313014 - DNA, 15 bp, Homo sapiens
cacatctgcctactt

SEQ ID NO: 313015 - DNA, 15 bp, Homo sapiens
gcacatctgcctact

SEQ ID NO: 313016 - DNA, 15 bp, Homo sapiens
ggcacatctgcctac

SEQ ID NO: 313017 - DNA, 15 bp, Homo sapiens
aggcacatctgccta

SEQ ID NO: 313018 - DNA, 15 bp, Homo sapiens
caggcacatctgcct

SEQ ID NO: 313019 - DNA, 15 bp, Homo sapiens
acaggcacatctgcc

SEQ ID NO: 313020 - DNA, 15 bp, Homo sapiens
tacaggcacatctgc

SEQ ID NO: 313021 - DNA, 15 bp, Homo sapiens
ctacaggcacatctg

SEQ ID NO: 313022 - DNA, 15 bp, Homo sapiens
gctacaggcacatct

SEQ ID NO: 313023 - DNA, 15 bp, Homo sapiens
ggctacaggcacatc

SEQ ID NO: 313024 - DNA, 15 bp, Homo sapiens
tggctacaggcacat

SEQ ID NO: 313025 - DNA, 15 bp, Homo sapiens
atggctacaggcaca

SEQ ID NO: 313026 - DNA, 15 bp, Homo sapiens
tatggctacaggcac

SEQ ID NO: 313027 - DNA, 15 bp, Homo sapiens
ctatggctacaggca

SEQ ID NO: 313028 - DNA, 15 bp, Homo sapiens
cctatggctacaggc

SEQ ID NO: 313029 - DNA, 15 bp, Homo sapiens
ccctatggctacagg

SEQ ID NO: 313030 - DNA, 15 bp, Homo sapiens
tccctatggctacag

SEQ ID NO: 313031 - DNA, 15 bp, Homo sapiens
gtccctatggctaca

SEQ ID NO: 313032 - DNA, 15 bp, Homo sapiens
agtccctatggctac

SEQ ID NO: 313033 - DNA, 15 bp, Homo sapiens
aagtccctatggcta

SEQ ID NO: 313034 - DNA, 15 bp, Homo sapiens
caagtccctatggct

SEQ ID NO: 313035 - DNA, 15 bp, Homo sapiens
gcaagtccctatggc

SEQ ID NO: 313036 - DNA, 15 bp, Homo sapiens
agcaagtccctatgg

SEQ ID NO: 313037 - DNA, 15 bp, Homo sapiens
cagcaagtccctatg

SEQ ID NO: 313038 - DNA, 15 bp, Homo sapiens
ccagcaagtccctat

SEQ ID NO: 313039 - DNA, 15 bp, Homo sapiens
cccagcaagtcccta

SEQ ID NO: 313040 - DNA, 15 bp, Homo sapiens
ccccagcaagtccct

SEQ ID NO: 313041 - DNA, 15 bp, Homo sapiens
cccccagcaagtccc

SEQ ID NO: 313042 - DNA, 15 bp, Homo sapiens
tcccccagcaagtcc

SEQ ID NO: 313043 - DNA, 15 bp, Homo sapiens
ctcccccagcaagtc

SEQ ID NO: 313044 - DNA, 15 bp, Homo sapiens
gctcccccagcaagt

SEQ ID NO: 313045 - DNA, 15 bp, Homo sapiens
agctcccccagcaag

SEQ ID NO: 313046 - DNA, 15 bp, Homo sapiens
cagctcccccagcaa

SEQ ID NO: 313047 - DNA, 15 bp, Homo sapiens
ccagctcccccagca

SEQ ID NO: 313048 - DNA, 15 bp, Homo sapiens
tccagctcccccagc

SEQ ID NO: 313049 - DNA, 15 bp, Homo sapiens
gtccagctcccccag

SEQ ID NO: 313050 - DNA, 15 bp, Homo sapiens
agtccagctccccca

SEQ ID NO: 313051 - DNA, 15 bp, Homo sapiens
aagtccagctccccc

SEQ ID NO: 313052 - DNA, 15 bp, Homo sapiens
caagtccagctcccc

SEQ ID NO: 313053 - DNA, 15 bp, Homo sapiens
tcaagtccagctccc

SEQ ID NO: 313054 - DNA, 15 bp, Homo sapiens
ctcaagtccagctcc

SEQ ID NO: 313055 - DNA, 15 bp, Homo sapiens
actcaagtccagctc

SEQ ID NO: 313056 - DNA, 15 bp, Homo sapiens
aactcaagtccagct

SEQ ID NO: 313057 - DNA, 15 bp, Homo sapiens
caactcaagtccagc

SEQ ID NO: 313058 - DNA, 15 bp, Homo sapiens
tcaactcaagtccag

SEQ ID NO: 313059 - DNA, 15 bp, Homo sapiens
ctcaactcaagtcca

SEQ ID NO: 313060 - DNA, 15 bp, Homo sapiens
actcaactcaagtcc

SEQ ID NO: 313061 - DNA, 15 bp, Homo sapiens
gactcaactcaagtc

SEQ ID NO: 313062 - DNA, 15 bp, Homo sapiens
agactcaactcaagt

SEQ ID NO: 313063 - DNA, 15 bp, Homo sapiens
aagactcaactcaag

SEQ ID NO: 313064 - DNA, 15 bp, Homo sapiens
taagactcaactcaa

SEQ ID NO: 313065 - DNA, 15 bp, Homo sapiens
ttaagactcaactca

SEQ ID NO: 313066 - DNA, 15 bp, Homo sapiens
tttaagactcaactc

SEQ ID NO: 313067 - DNA, 15 bp, Homo sapiens
ttttaagactcaact

SEQ ID NO: 313068 - DNA, 15 bp, Homo sapiens
gttttaagactcaac

SEQ ID NO: 313069 - DNA, 15 bp, Homo sapiens
tgttttaagactcaa

SEQ ID NO: 313070 - DNA, 15 bp, Homo sapiens
atgttttaagactca

SEQ ID NO: 313071 - DNA, 15 bp, Homo sapiens
catgttttaagactc

SEQ ID NO: 313072 - DNA, 15 bp, Homo sapiens
ccatgttttaagact

SEQ ID NO: 313073 - DNA, 15 bp, Homo sapiens
tccatgttttaagac

SEQ ID NO: 313074 - DNA, 15 bp, Homo sapiens
ttccatgttttaaga

SEQ ID NO: 313075 - DNA, 15 bp, Homo sapiens
tttccatgttttaag

SEQ ID NO: 313076 - DNA, 15 bp, Homo sapiens
ttttccatgttttaa

SEQ ID NO: 313077 - DNA, 15 bp, Homo sapiens
cttttccatgtttta

SEQ ID NO: 313078 - DNA, 15 bp, Homo sapiens
gcttttccatgtttt

SEQ ID NO: 313079 - DNA, 15 bp, Homo sapiens
ggcttttccatgttt

SEQ ID NO: 313080 - DNA, 15 bp, Homo sapiens
aggcttttccatgtt

SEQ ID NO: 313081 - DNA, 15 bp, Homo sapiens
aaggcttttccatgt

SEQ ID NO: 313082 - DNA, 15 bp, Homo sapiens
taaggcttttccatg

SEQ ID NO: 313083 - DNA, 15 bp, Homo sapiens
ttaaggcttttccat

SEQ ID NO: 313084 - DNA, 15 bp, Homo sapiens
gttaaggcttttcca

SEQ ID NO: 313085 - DNA, 15 bp, Homo sapiens
agttaaggcttttcc

SEQ ID NO: 313086 - DNA, 15 bp, Homo sapiens
tagttaaggcttttc

SEQ ID NO: 313087 - DNA, 15 bp, Homo sapiens
ttagttaaggctttt

SEQ ID NO: 313088 - DNA, 15 bp, Homo sapiens
cttagttaaggcttt

SEQ ID NO: 313089 - DNA, 15 bp, Homo sapiens
acttagttaaggctt

SEQ ID NO: 313090 - DNA, 15 bp, Homo sapiens
cacttagttaaggct

SEQ ID NO: 313091 - DNA, 15 bp, Homo sapiens
ccacttagttaaggc

SEQ ID NO: 313092 - DNA, 15 bp, Homo sapiens
tccacttagttaagg

SEQ ID NO: 313093 - DNA, 15 bp, Homo sapiens
ctccacttagttaag

SEQ ID NO: 313094 - DNA, 15 bp, Homo sapiens
actccacttagttaa

SEQ ID NO: 313095 - DNA, 15 bp, Homo sapiens
cactccacttagtta

SEQ ID NO: 313096 - DNA, 15 bp, Homo sapiens
ccactccacttagtt

SEQ ID NO: 313097 - DNA, 15 bp, Homo sapiens
tccactccacttagt

SEQ ID NO: 313098 - DNA, 15 bp, Homo sapiens
ctccactccacttag

SEQ ID NO: 313099 - DNA, 15 bp, Homo sapiens
cctccactccactta

SEQ ID NO: 313100 - DNA, 15 bp, Homo sapiens
ccctccactccactt

SEQ ID NO: 313101 - DNA, 15 bp, Homo sapiens
gccctccactccact

SEQ ID NO: 313102 - DNA, 15 bp, Homo sapiens
ggccctccactccac

SEQ ID NO: 313103 - DNA, 15 bp, Homo sapiens
tggccctccactcca

SEQ ID NO: 313104 - DNA, 15 bp, Homo sapiens
ttggccctccactcc

SEQ ID NO: 313105 - DNA, 15 bp, Homo sapiens
cttggccctccactc

SEQ ID NO: 313106 - DNA, 15 bp, Homo sapiens
tcttggccctccact

SEQ ID NO: 313107 - DNA, 15 bp, Homo sapiens
ctcttggccctccac

SEQ ID NO: 313108 - DNA, 15 bp, Homo sapiens
gctcttggccctcca

SEQ ID NO: 313109 - DNA, 15 bp, Homo sapiens
tgctcttggccctcc

SEQ ID NO: 313110 - DNA, 15 bp, Homo sapiens
atgctcttggccctc

SEQ ID NO: 313111 - DNA, 15 bp, Homo sapiens
aatgctcttggccct

SEQ ID NO: 313112 - DNA, 15 bp, Homo sapiens
gaatgctcttggccc

SEQ ID NO: 313113 - DNA, 15 bp, Homo sapiens
ggaatgctcttggcc

SEQ ID NO: 313114 - DNA, 15 bp, Homo sapiens
tggaatgctcttggc

SEQ ID NO: 313115 - DNA, 15 bp, Homo sapiens
ctggaatgctcttgg

SEQ ID NO: 313116 - DNA, 15 bp, Homo sapiens
tctggaatgctcttg

SEQ ID NO: 313117 - DNA, 15 bp, Homo sapiens
gtctggaatgctctt

SEQ ID NO: 313118 - DNA, 15 bp, Homo sapiens
tgtctggaatgctct

SEQ ID NO: 313119 - DNA, 15 bp, Homo sapiens
ttgtctggaatgctc

SEQ ID NO: 313120 - DNA, 15 bp, Homo sapiens
cttgtctggaatgct

SEQ ID NO: 313121 - DNA, 15 bp, Homo sapiens
tcttgtctggaatgc

SEQ ID NO: 313122 - DNA, 15 bp, Homo sapiens
ctcttgtctggaatg

SEQ ID NO: 313123 - DNA, 15 bp, Homo sapiens
tctcttgtctggaat

SEQ ID NO: 313124 - DNA, 15 bp, Homo sapiens
ttctcttgtctggaa

SEQ ID NO: 313125 - DNA, 15 bp, Homo sapiens
tttctcttgtctgga

SEQ ID NO: 313126 - DNA, 15 bp, Homo sapiens
ttttctcttgtctgg

SEQ ID NO: 313127 - DNA, 15 bp, Homo sapiens
tttttctcttgtctg

SEQ ID NO: 313128 - DNA, 15 bp, Homo sapiens
ctttttctcttgtct

SEQ ID NO: 313129 - DNA, 15 bp, Homo sapiens
cctttttctcttgtc

SEQ ID NO: 313130 - DNA, 15 bp, Homo sapiens
acctttttctcttgt

SEQ ID NO: 313131 - DNA, 15 bp, Homo sapiens
cacctttttctcttg

SEQ ID NO: 313132 - DNA, 15 bp, Homo sapiens
tcacctttttctctt

SEQ ID NO: 313133 - DNA, 15 bp, Homo sapiens
ctcacctttttctct

SEQ ID NO: 313134 - DNA, 15 bp, Homo sapiens
gctcacctttttctc

SEQ ID NO: 313135 - DNA, 15 bp, Homo sapiens
tgctcacctttttct

SEQ ID NO: 313136 - DNA, 15 bp, Homo sapiens
ctgctcacctttttc

SEQ ID NO: 313137 - DNA, 15 bp, Homo sapiens
cctgctcaccttttt

SEQ ID NO: 313138 - DNA, 15 bp, Homo sapiens
ccctgctcacctttt

SEQ ID NO: 313139 - DNA, 15 bp, Homo sapiens
cccctgctcaccttt

SEQ ID NO: 313140 - DNA, 15 bp, Homo sapiens
ccccctgctcacctt

SEQ ID NO: 313141 - DNA, 15 bp, Homo sapiens
tccccctgctcacct

SEQ ID NO: 313142 - DNA, 15 bp, Homo sapiens
ctccccctgctcacc

SEQ ID NO: 313143 - DNA, 15 bp, Homo sapiens
cctccccctgctcac

SEQ ID NO: 313144 - DNA, 15 bp, Homo sapiens
tcctccccctgctca

SEQ ID NO: 313145 - DNA, 15 bp, Homo sapiens
ttcctccccctgctc

SEQ ID NO: 313146 - DNA, 15 bp, Homo sapiens
attcctccccctgct

SEQ ID NO: 313147 - DNA, 15 bp, Homo sapiens
aattcctccccctgc

SEQ ID NO: 313148 - DNA, 15 bp, Homo sapiens
aaattcctccccctg

SEQ ID NO: 313149 - DNA, 15 bp, Homo sapiens
caaattcctccccct

SEQ ID NO: 313150 - DNA, 15 bp, Homo sapiens
gcaaattcctccccc

SEQ ID NO: 313151 - DNA, 15 bp, Homo sapiens
tgcaaattcctcccc

SEQ ID NO: 313152 - DNA, 15 bp, Homo sapiens
atgcaaattcctccc

SEQ ID NO: 313153 - DNA, 15 bp, Homo sapiens
gatgcaaattcctcc

SEQ ID NO: 313154 - DNA, 15 bp, Homo sapiens
ggatgcaaattcctc

SEQ ID NO: 313155 - DNA, 15 bp, Homo sapiens
aggatgcaaattcct

SEQ ID NO: 313156 - DNA, 15 bp, Homo sapiens
aaggatgcaaattcc

SEQ ID NO: 313157 - DNA, 15 bp, Homo sapiens
gaaggatgcaaattc

SEQ ID NO: 313158 - DNA, 15 bp, Homo sapiens
agaaggatgcaaatt

SEQ ID NO: 313159 - DNA, 15 bp, Homo sapiens
aagaaggatgcaaat

SEQ ID NO: 313160 - DNA, 15 bp, Homo sapiens
aaagaaggatgcaaa

SEQ ID NO: 313161 - DNA, 15 bp, Homo sapiens
caaagaaggatgcaa

SEQ ID NO: 313162 - DNA, 15 bp, Homo sapiens
ccaaagaaggatgca

SEQ ID NO: 313163 - DNA, 15 bp, Homo sapiens
cccaaagaaggatgc

SEQ ID NO: 313164 - DNA, 15 bp, Homo sapiens
ccccaaagaaggatg

SEQ ID NO: 313165 - DNA, 15 bp, Homo sapiens
tccccaaagaaggat

SEQ ID NO: 313166 - DNA, 15 bp, Homo sapiens
ctccccaaagaagga

SEQ ID NO: 313167 - DNA, 15 bp, Homo sapiens
gctccccaaagaagg

SEQ ID NO: 313168 - DNA, 15 bp, Homo sapiens
ggctccccaaagaag

SEQ ID NO: 313169 - DNA, 15 bp, Homo sapiens
tggctccccaaagaa

SEQ ID NO: 313170 - DNA, 15 bp, Homo sapiens
ctggctccccaaaga

SEQ ID NO: 313171 - DNA, 15 bp, Homo sapiens
cctggctccccaaag

SEQ ID NO: 313172 - DNA, 15 bp, Homo sapiens
tcctggctccccaaa

SEQ ID NO: 313173 - DNA, 15 bp, Homo sapiens
ttcctggctccccaa

SEQ ID NO: 313174 - DNA, 15 bp, Homo sapiens
cttcctggctcccca

SEQ ID NO: 313175 - DNA, 15 bp, Homo sapiens
acttcctggctcccc

SEQ ID NO: 313176 - DNA, 15 bp, Homo sapiens
cacttcctggctccc

SEQ ID NO: 313177 - DNA, 15 bp, Homo sapiens
ccacttcctggctcc

SEQ ID NO: 313178 - DNA, 15 bp, Homo sapiens
tccacttcctggctc

SEQ ID NO: 313179 - DNA, 15 bp, Homo sapiens
gtccacttcctggct

SEQ ID NO: 313180 - DNA, 15 bp, Homo sapiens
agtccacttcctggc

SEQ ID NO: 313181 - DNA, 15 bp, Homo sapiens
cagtccacttcctgg

SEQ ID NO: 313182 - DNA, 15 bp, Homo sapiens
ccagtccacttcctg

SEQ ID NO: 313183 - DNA, 15 bp, Homo sapiens
accagtccacttcct

SEQ ID NO: 313184 - DNA, 15 bp, Homo sapiens
caccagtccacttcc

SEQ ID NO: 313185 - DNA, 15 bp, Homo sapiens
acaccagtccacttc

SEQ ID NO: 313186 - DNA, 15 bp, Homo sapiens
cacaccagtccactt

SEQ ID NO: 313187 - DNA, 15 bp, Homo sapiens
tcacaccagtccact

SEQ ID NO: 313188 - DNA, 15 bp, Homo sapiens
ttcacaccagtccac

SEQ ID NO: 313189 - DNA, 15 bp, Homo sapiens
attcacaccagtcca

SEQ ID NO: 313190 - DNA, 15 bp, Homo sapiens
tattcacaccagtcc

SEQ ID NO: 313191 - DNA, 15 bp, Homo sapiens
atattcacaccagtc

SEQ ID NO: 313192 - DNA, 15 bp, Homo sapiens
aatattcacaccagt

SEQ ID NO: 313193 - DNA, 15 bp, Homo sapiens
aaatattcacaccag

SEQ ID NO: 313194 - DNA, 15 bp, Homo sapiens
gaaatattcacacca

SEQ ID NO: 313195 - DNA, 15 bp, Homo sapiens
tgaaatattcacacc

SEQ ID NO: 313196 - DNA, 15 bp, Homo sapiens
ctgaaatattcacac

SEQ ID NO: 313197 - DNA, 15 bp, Homo sapiens
tctgaaatattcaca

SEQ ID NO: 313198 - DNA, 15 bp, Homo sapiens
ctctgaaatattcac

SEQ ID NO: 313199 - DNA, 15 bp, Homo sapiens
actctgaaatattca

SEQ ID NO: 313200 - DNA, 15 bp, Homo sapiens
cactctgaaatattc

SEQ ID NO: 313201 - DNA, 15 bp, Homo sapiens
tcactctgaaatatt

SEQ ID NO: 313202 - DNA, 15 bp, Homo sapiens
atcactctgaaatat

SEQ ID NO: 313203 - DNA, 15 bp, Homo sapiens
gatcactctgaaata

SEQ ID NO: 313204 - DNA, 15 bp, Homo sapiens
tgatcactctgaaat

SEQ ID NO: 313205 - DNA, 15 bp, Homo sapiens
atgatcactctgaaa

SEQ ID NO: 313206 - DNA, 15 bp, Homo sapiens
tatgatcactctgaa

SEQ ID NO: 313207 - DNA, 15 bp, Homo sapiens
atatgatcactctga

SEQ ID NO: 313208 - DNA, 15 bp, Homo sapiens
tatatgatcactctg

SEQ ID NO: 313209 - DNA, 15 bp, Homo sapiens
ctatatgatcactct

SEQ ID NO: 313210 - DNA, 15 bp, Homo sapiens
cctatatgatcactc

SEQ ID NO: 313211 - DNA, 15 bp, Homo sapiens
ccctatatgatcact

SEQ ID NO: 313212 - DNA, 15 bp, Homo sapiens
tccctatatgatcac

SEQ ID NO: 313213 - DNA, 15 bp, Homo sapiens
ctccctatatgatca

SEQ ID NO: 313214 - DNA, 15 bp, Homo sapiens
cctccctatatgatc

SEQ ID NO: 313215 - DNA, 15 bp, Homo sapiens
gcctccctatatgat

SEQ ID NO: 313216 - DNA, 15 bp, Homo sapiens
tgcctccctatatga

SEQ ID NO: 313217 - DNA, 15 bp, Homo sapiens
ctgcctccctatatg

SEQ ID NO: 313218 - DNA, 15 bp, Homo sapiens
gctgcctccctatat

SEQ ID NO: 313219 - DNA, 15 bp, Homo sapiens
agctgcctccctata

SEQ ID NO: 313220 - DNA, 15 bp, Homo sapiens
cagctgcctccctat

SEQ ID NO: 313221 - DNA, 15 bp, Homo sapiens
tcagctgcctcccta

SEQ ID NO: 313222 - DNA, 15 bp, Homo sapiens
ctcagctgcctccct

SEQ ID NO: 313223 - DNA, 15 bp, Homo sapiens
cctcagctgcctccc

SEQ ID NO: 313224 - DNA, 15 bp, Homo sapiens
ccctcagctgcctcc

SEQ ID NO: 313225 - DNA, 15 bp, Homo sapiens
tccctcagctgcctc

SEQ ID NO: 313226 - DNA, 15 bp, Homo sapiens
atccctcagctgcct

SEQ ID NO: 313227 - DNA, 15 bp, Homo sapiens
gatccctcagctgcc

SEQ ID NO: 313228 - DNA, 15 bp, Homo sapiens
ggatccctcagctgc

SEQ ID NO: 313229 - DNA, 15 bp, Homo sapiens
aggatccctcagctg

SEQ ID NO: 313230 - DNA, 15 bp, Homo sapiens
gaggatccctcagct

SEQ ID NO: 313231 - DNA, 15 bp, Homo sapiens
tgaggatccctcagc

SEQ ID NO: 313232 - DNA, 15 bp, Homo sapiens
ctgaggatccctcag

SEQ ID NO: 313233 - DNA, 15 bp, Homo sapiens
actgaggatccctca

SEQ ID NO: 313234 - DNA, 15 bp, Homo sapiens
cactgaggatccctc

SEQ ID NO: 313235 - DNA, 15 bp, Homo sapiens
gcactgaggatccct

SEQ ID NO: 313236 - DNA, 15 bp, Homo sapiens
cgcactgaggatccc

SEQ ID NO: 313237 - DNA, 15 bp, Homo sapiens
acgcactgaggatcc

SEQ ID NO: 313238 - DNA, 15 bp, Homo sapiens
cacgcactgaggatc

SEQ ID NO: 313239 - DNA, 15 bp, Homo sapiens
ccacgcactgaggat

SEQ ID NO: 313240 - DNA, 15 bp, Homo sapiens
accacgcactgagga

SEQ ID NO: 313241 - DNA, 15 bp, Homo sapiens
aaccacgcactgagg

SEQ ID NO: 313242 - DNA, 15 bp, Homo sapiens
taaccacgcactgag

SEQ ID NO: 313243 - DNA, 15 bp, Homo sapiens
ataaccacgcactga

SEQ ID NO: 313244 - DNA, 15 bp, Homo sapiens
tataaccacgcactg

SEQ ID NO: 313245 - DNA, 15 bp, Homo sapiens
ctataaccacgcact

SEQ ID NO: 313246 - DNA, 15 bp, Homo sapiens
actataaccacgcac

SEQ ID NO: 313247 - DNA, 15 bp, Homo sapiens
tactataaccacgca

SEQ ID NO: 313248 - DNA, 15 bp, Homo sapiens
ttactataaccacgc

SEQ ID NO: 313249 - DNA, 15 bp, Homo sapiens
gttactataaccacg

SEQ ID NO: 313250 - DNA, 15 bp, Homo sapiens
agttactataaccac

SEQ ID NO: 313251 - DNA, 15 bp, Homo sapiens
cagttactataacca

SEQ ID NO: 313252 - DNA, 15 bp, Homo sapiens
ccagttactataacc

SEQ ID NO: 313253 - DNA, 15 bp, Homo sapiens
tccagttactataac

SEQ ID NO: 313254 - DNA, 15 bp, Homo sapiens
ctccagttactataa

SEQ ID NO: 313255 - DNA, 15 bp, Homo sapiens
actccagttactata

SEQ ID NO: 313256 - DNA, 15 bp, Homo sapiens
cactccagttactat

SEQ ID NO: 313257 - DNA, 15 bp, Homo sapiens
ccactccagttacta

SEQ ID NO: 313258 - DNA, 15 bp, Homo sapiens
tccactccagttact

SEQ ID NO: 313259 - DNA, 15 bp, Homo sapiens
atccactccagttac

SEQ ID NO: 313260 - DNA, 15 bp, Homo sapiens
aatccactccagtta

SEQ ID NO: 313261 - DNA, 15 bp, Homo sapiens
aaatccactccagtt

SEQ ID NO: 313262 - DNA, 15 bp, Homo sapiens
taaatccactccagt

SEQ ID NO: 313263 - DNA, 15 bp, Homo sapiens
gtaaatccactccag

SEQ ID NO: 313264 - DNA, 15 bp, Homo sapiens
agtaaatccactcca

SEQ ID NO: 313265 - DNA, 15 bp, Homo sapiens
gagtaaatccactcc

SEQ ID NO: 313266 - DNA, 15 bp, Homo sapiens
agagtaaatccactc

SEQ ID NO: 313267 - DNA, 15 bp, Homo sapiens
cagagtaaatccact

SEQ ID NO: 313268 - DNA, 15 bp, Homo sapiens
ccagagtaaatccac

SEQ ID NO: 313269 - DNA, 15 bp, Homo sapiens
cccagagtaaatcca

SEQ ID NO: 313270 - DNA, 15 bp, Homo sapiens
ccccagagtaaatcc

SEQ ID NO: 313271 - DNA, 15 bp, Homo sapiens
gccccagagtaaatc

SEQ ID NO: 313272 - DNA, 15 bp, Homo sapiens
tgccccagagtaaat

SEQ ID NO: 313273 - DNA, 15 bp, Homo sapiens
ctgccccagagtaaa

SEQ ID NO: 313274 - DNA, 15 bp, Homo sapiens
cctgccccagagtaa

SEQ ID NO: 313275 - DNA, 15 bp, Homo sapiens
tcctgccccagagta

SEQ ID NO: 313276 - DNA, 15 bp, Homo sapiens
gtcctgccccagagt

SEQ ID NO: 313277 - DNA, 15 bp, Homo sapiens
agtcctgccccagag

SEQ ID NO: 313278 - DNA, 15 bp, Homo sapiens
aagtcctgccccaga

SEQ ID NO: 313279 - DNA, 15 bp, Homo sapiens
taagtcctgccccag

SEQ ID NO: 313280 - DNA, 15 bp, Homo sapiens
gtaagtcctgcccca

SEQ ID NO: 313281 - DNA, 15 bp, Homo sapiens
agtaagtcctgcccc

SEQ ID NO: 313282 - DNA, 15 bp, Homo sapiens
gagtaagtcctgccc

SEQ ID NO: 313283 - DNA, 15 bp, Homo sapiens
ggagtaagtcctgcc

SEQ ID NO: 313284 - DNA, 15 bp, Homo sapiens
cggagtaagtcctgc

SEQ ID NO: 313285 - DNA, 15 bp, Homo sapiens
acggagtaagtcctg

SEQ ID NO: 313286 - DNA, 15 bp, Homo sapiens
aacggagtaagtcct

SEQ ID NO: 313287 - DNA, 15 bp, Homo sapiens
caacggagtaagtcc

SEQ ID NO: 313288 - DNA, 15 bp, Homo sapiens
tcaacggagtaagtc

SEQ ID NO: 313289 - DNA, 15 bp, Homo sapiens
gtcaacggagtaagt

SEQ ID NO: 313290 - DNA, 15 bp, Homo sapiens
tgtcaacggagtaag

SEQ ID NO: 313291 - DNA, 15 bp, Homo sapiens
gtgtcaacggagtaa

SEQ ID NO: 313292 - DNA, 15 bp, Homo sapiens
ggtgtcaacggagta

SEQ ID NO: 313293 - DNA, 15 bp, Homo sapiens
gggtgtcaacggagt

SEQ ID NO: 313294 - DNA, 15 bp, Homo sapiens
agggtgtcaacggag

SEQ ID NO: 313295 - DNA, 15 bp, Homo sapiens
aagggtgtcaacgga

SEQ ID NO: 313296 - DNA, 15 bp, Homo sapiens
caagggtgtcaacgg

SEQ ID NO: 313297 - DNA, 15 bp, Homo sapiens
ccaagggtgtcaacg

SEQ ID NO: 313298 - DNA, 15 bp, Homo sapiens
tccaagggtgtcaac

SEQ ID NO: 313299 - DNA, 15 bp, Homo sapiens
ctccaagggtgtcaa

SEQ ID NO: 313300 - DNA, 15 bp, Homo sapiens
tctccaagggtgtca

SEQ ID NO: 313301 - DNA, 15 bp, Homo sapiens
ttctccaagggtgtc

SEQ ID NO: 313302 - DNA, 15 bp, Homo sapiens
cttctccaagggtgt

SEQ ID NO: 313303 - DNA, 15 bp, Homo sapiens
tcttctccaagggtg

SEQ ID NO: 313304 - DNA, 15 bp, Homo sapiens
ctcttctccaagggt

SEQ ID NO: 313305 - DNA, 15 bp, Homo sapiens
gctcttctccaaggg

SEQ ID NO: 313306 - DNA, 15 bp, Homo sapiens
tgctcttctccaagg

SEQ ID NO: 313307 - DNA, 15 bp, Homo sapiens
ctgctcttctccaag

SEQ ID NO: 313308 - DNA, 15 bp, Homo sapiens
cctgctcttctccaa

SEQ ID NO: 313309 - DNA, 15 bp, Homo sapiens
ccctgctcttctcca

SEQ ID NO: 313310 - DNA, 15 bp, Homo sapiens
cccctgctcttctcc

SEQ ID NO: 313311 - DNA, 15 bp, Homo sapiens
tcccctgctcttctc

SEQ ID NO: 313312 - DNA, 15 bp, Homo sapiens
ttcccctgctcttct

SEQ ID NO: 313313 - DNA, 15 bp, Homo sapiens
gttcccctgctcttc

SEQ ID NO: 313314 - DNA, 15 bp, Homo sapiens
tgttcccctgctctt

SEQ ID NO: 313315 - DNA, 15 bp, Homo sapiens
ctgttcccctgctct

SEQ ID NO: 313316 - DNA, 15 bp, Homo sapiens
cctgttcccctgctc

SEQ ID NO: 313317 - DNA, 15 bp, Homo sapiens
tcctgttcccctgct

SEQ ID NO: 313318 - DNA, 15 bp, Homo sapiens
ctcctgttcccctgc

SEQ ID NO: 313319 - DNA, 15 bp, Homo sapiens
cctcctgttcccctg

SEQ ID NO: 313320 - DNA, 15 bp, Homo sapiens
tcctcctgttcccct

SEQ ID NO: 313321 - DNA, 15 bp, Homo sapiens
ctcctcctgttcccc

SEQ ID NO: 313322 - DNA, 15 bp, Homo sapiens
tctcctcctgttccc

SEQ ID NO: 313323 - DNA, 15 bp, Homo sapiens
ctctcctcctgttcc

SEQ ID NO: 313324 - DNA, 15 bp, Homo sapiens
gctctcctcctgttc

SEQ ID NO: 313325 - DNA, 15 bp, Homo sapiens
ggctctcctcctgtt

SEQ ID NO: 313326 - DNA, 15 bp, Homo sapiens
aggctctcctcctgt

SEQ ID NO: 313327 - DNA, 15 bp, Homo sapiens
aaggctctcctcctg

SEQ ID NO: 313328 - DNA, 15 bp, Homo sapiens
gaaggctctcctcct

SEQ ID NO: 313329 - DNA, 15 bp, Homo sapiens
ggaaggctctcctcc

SEQ ID NO: 313330 - DNA, 15 bp, Homo sapiens
gggaaggctctcctc

SEQ ID NO: 313331 - DNA, 15 bp, Homo sapiens
tgggaaggctctcct

SEQ ID NO: 313332 - DNA, 15 bp, Homo sapiens
ctgggaaggctctcc

SEQ ID NO: 313333 - DNA, 15 bp, Homo sapiens
actgggaaggctctc

SEQ ID NO: 313334 - DNA, 15 bp, Homo sapiens
aactgggaaggctct

SEQ ID NO: 313335 - DNA, 15 bp, Homo sapiens
taactgggaaggctc

SEQ ID NO: 313336 - DNA, 15 bp, Homo sapiens
gtaactgggaaggct

SEQ ID NO: 313337 - DNA, 15 bp, Homo sapiens
ggtaactgggaaggc

SEQ ID NO: 313338 - DNA, 15 bp, Homo sapiens
gggtaactgggaagg

SEQ ID NO: 313339 - DNA, 15 bp, Homo sapiens
agggtaactgggaag

SEQ ID NO: 313340 - DNA, 15 bp, Homo sapiens
cagggtaactgggaa

SEQ ID NO: 313341 - DNA, 15 bp, Homo sapiens
acagggtaactggga

SEQ ID NO: 313342 - DNA, 15 bp, Homo sapiens
aacagggtaactggg

SEQ ID NO: 313343 - DNA, 15 bp, Homo sapiens
taacagggtaactgg

SEQ ID NO: 313344 - DNA, 15 bp, Homo sapiens
ctaacagggtaactg

SEQ ID NO: 313345 - DNA, 15 bp, Homo sapiens
cctaacagggtaact

SEQ ID NO: 313346 - DNA, 15 bp, Homo sapiens
ccctaacagggtaac

SEQ ID NO: 313347 - DNA, 15 bp, Homo sapiens
tccctaacagggtaa

SEQ ID NO: 313348 - DNA, 15 bp, Homo sapiens
gtccctaacagggta

SEQ ID NO: 313349 - DNA, 15 bp, Homo sapiens
ggtccctaacagggt

SEQ ID NO: 313350 - DNA, 15 bp, Homo sapiens
aggtccctaacaggg

SEQ ID NO: 313351 - DNA, 15 bp, Homo sapiens
aaggtccctaacagg

SEQ ID NO: 313352 - DNA, 15 bp, Homo sapiens
gaaggtccctaacag

SEQ ID NO: 313353 - DNA, 15 bp, Homo sapiens
agaaggtccctaaca

SEQ ID NO: 313354 - DNA, 15 bp, Homo sapiens
gagaaggtccctaac

SEQ ID NO: 313355 - DNA, 15 bp, Homo sapiens
agagaaggtccctaa

SEQ ID NO: 313356 - DNA, 15 bp, Homo sapiens
aagagaaggtcccta

SEQ ID NO: 313357 - DNA, 15 bp, Homo sapiens
aaagagaaggtccct

SEQ ID NO: 313358 - DNA, 15 bp, Homo sapiens
caaagagaaggtccc

SEQ ID NO: 313359 - DNA, 15 bp, Homo sapiens
tcaaagagaaggtcc

SEQ ID NO: 313360 - DNA, 15 bp, Homo sapiens
gtcaaagagaaggtc

SEQ ID NO: 313361 - DNA, 15 bp, Homo sapiens
ggtcaaagagaaggt

SEQ ID NO: 313362 - DNA, 15 bp, Homo sapiens
cggtcaaagagaagg

SEQ ID NO: 313363 - DNA, 15 bp, Homo sapiens
acggtcaaagagaag

SEQ ID NO: 313364 - DNA, 15 bp, Homo sapiens
cacggtcaaagagaa

SEQ ID NO: 313365 - DNA, 15 bp, Homo sapiens
acacggtcaaagaga

SEQ ID NO: 313366 - DNA, 15 bp, Homo sapiens
gacacggtcaaagag

SEQ ID NO: 313367 - DNA, 15 bp, Homo sapiens
ggacacggtcaaaga

SEQ ID NO: 313368 - DNA, 15 bp, Homo sapiens
aggacacggtcaaag

SEQ ID NO: 313369 - DNA, 15 bp, Homo sapiens
caggacacggtcaaa

SEQ ID NO: 313370 - DNA, 15 bp, Homo sapiens
gcaggacacggtcaa

SEQ ID NO: 313371 - DNA, 15 bp, Homo sapiens
tgcaggacacggtca

SEQ ID NO: 313372 - DNA, 15 bp, Homo sapiens
ctgcaggacacggtc

SEQ ID NO: 313373 - DNA, 15 bp, Homo sapiens
tctgcaggacacggt

SEQ ID NO: 313374 - DNA, 15 bp, Homo sapiens
atctgcaggacacgg

SEQ ID NO: 313375 - DNA, 15 bp, Homo sapiens
catctgcaggacacg

SEQ ID NO: 313376 - DNA, 15 bp, Homo sapiens
gcatctgcaggacac

SEQ ID NO: 313377 - DNA, 15 bp, Homo sapiens
tgcatctgcaggaca

SEQ ID NO: 313378 - DNA, 15 bp, Homo sapiens
gtgcatctgcaggac

SEQ ID NO: 313379 - DNA, 15 bp, Homo sapiens
tgtgcatctgcagga

SEQ ID NO: 313380 - DNA, 15 bp, Homo sapiens
ctgtgcatctgcagg

SEQ ID NO: 313381 - DNA, 15 bp, Homo sapiens
actgtgcatctgcag

SEQ ID NO: 313382 - DNA, 15 bp, Homo sapiens
tactgtgcatctgca

SEQ ID NO: 313383 - DNA, 15 bp, Homo sapiens
ctactgtgcatctgc

SEQ ID NO: 313384 - DNA, 15 bp, Homo sapiens
actactgtgcatctg

SEQ ID NO: 313385 - DNA, 15 bp, Homo sapiens
aactactgtgcatct

SEQ ID NO: 313386 - DNA, 15 bp, Homo sapiens
caactactgtgcatc

SEQ ID NO: 313387 - DNA, 15 bp, Homo sapiens
ccaactactgtgcat

SEQ ID NO: 313388 - DNA, 15 bp, Homo sapiens
cccaactactgtgca

SEQ ID NO: 313389 - DNA, 15 bp, Homo sapiens
tcccaactactgtgc

SEQ ID NO: 313390 - DNA, 15 bp, Homo sapiens
atcccaactactgtg

SEQ ID NO: 313391 - DNA, 15 bp, Homo sapiens
aatcccaactactgt

SEQ ID NO: 313392 - DNA, 15 bp, Homo sapiens
gaatcccaactactg

SEQ ID NO: 313393 - DNA, 15 bp, Homo sapiens
tgaatcccaactact

SEQ ID NO: 313394 - DNA, 15 bp, Homo sapiens
atgaatcccaactac

SEQ ID NO: 313395 - DNA, 15 bp, Homo sapiens
gatgaatcccaacta

SEQ ID NO: 313396 - DNA, 15 bp, Homo sapiens
ggatgaatcccaact

SEQ ID NO: 313397 - DNA, 15 bp, Homo sapiens
tggatgaatcccaac

SEQ ID NO: 313398 - DNA, 15 bp, Homo sapiens
gtggatgaatcccaa

SEQ ID NO: 313399 - DNA, 15 bp, Homo sapiens
ggtggatgaatccca

SEQ ID NO: 313400 - DNA, 15 bp, Homo sapiens
aggtggatgaatccc

SEQ ID NO: 313401 - DNA, 15 bp, Homo sapiens
gaggtggatgaatcc

SEQ ID NO: 313402 - DNA, 15 bp, Homo sapiens
ggaggtggatgaatc

SEQ ID NO: 313403 - DNA, 15 bp, Homo sapiens
tggaggtggatgaat

SEQ ID NO: 313404 - DNA, 15 bp, Homo sapiens
atggaggtggatgaa

SEQ ID NO: 313405 - DNA, 15 bp, Homo sapiens
gatggaggtggatga

SEQ ID NO: 313406 - DNA, 15 bp, Homo sapiens
ggatggaggtggatg

SEQ ID NO: 313407 - DNA, 15 bp, Homo sapiens
tggatggaggtggat

SEQ ID NO: 313408 - DNA, 15 bp, Homo sapiens
gtggatggaggtgga

SEQ ID NO: 313409 - DNA, 15 bp, Homo sapiens
agtggatggaggtgg

SEQ ID NO: 313410 - DNA, 15 bp, Homo sapiens
aagtggatggaggtg

SEQ ID NO: 313411 - DNA, 15 bp, Homo sapiens
taagtggatggaggt

SEQ ID NO: 313412 - DNA, 15 bp, Homo sapiens
ataagtggatggagg

SEQ ID NO: 313413 - DNA, 15 bp, Homo sapiens
aataagtggatggag

SEQ ID NO: 313414 - DNA, 15 bp, Homo sapiens
aaataagtggatgga

SEQ ID NO: 313415 - DNA, 15 bp, Homo sapiens
gaaataagtggatgg

SEQ ID NO: 313416 - DNA, 15 bp, Homo sapiens
agaaataagtggatg

SEQ ID NO: 313417 - DNA, 15 bp, Homo sapiens
aagaaataagtggat

SEQ ID NO: 313418 - DNA, 15 bp, Homo sapiens
aaagaaataagtgga

SEQ ID NO: 313419 - DNA, 15 bp, Homo sapiens
aaaagaaataagtgg

SEQ ID NO: 313420 - DNA, 15 bp, Homo sapiens
aaaaagaaataagtg

SEQ ID NO: 313421 - DNA, 15 bp, Homo sapiens
taaaaagaaataagt

SEQ ID NO: 313422 - DNA, 15 bp, Homo sapiens
ctaaaaagaaataag

SEQ ID NO: 313423 - DNA, 15 bp, Homo sapiens
gctaaaaagaaataa

SEQ ID NO: 313424 - DNA, 15 bp, Homo sapiens
agctaaaaagaaata

SEQ ID NO: 313425 - DNA, 15 bp, Homo sapiens
gagctaaaaagaaat

SEQ ID NO: 313426 - DNA, 15 bp, Homo sapiens
tgagctaaaaagaaa

SEQ ID NO: 313427 - DNA, 15 bp, Homo sapiens
atgagctaaaaagaa

SEQ ID NO: 313428 - DNA, 15 bp, Homo sapiens
aatgagctaaaaaga

SEQ ID NO: 313429 - DNA, 15 bp, Homo sapiens
aaatgagctaaaaag

SEQ ID NO: 313430 - DNA, 15 bp, Homo sapiens
aaaatgagctaaaaa

SEQ ID NO: 313431 - DNA, 15 bp, Homo sapiens
caaaatgagctaaaa

SEQ ID NO: 313432 - DNA, 15 bp, Homo sapiens
acaaaatgagctaaa

SEQ ID NO: 313433 - DNA, 15 bp, Homo sapiens
aacaaaatgagctaa

SEQ ID NO: 313434 - DNA, 15 bp, Homo sapiens
aaacaaaatgagcta

SEQ ID NO: 313435 - DNA, 15 bp, Homo sapiens
gaaacaaaatgagct

SEQ ID NO: 313436 - DNA, 15 bp, Homo sapiens
tgaaacaaaatgagc

SEQ ID NO: 313437 - DNA, 15 bp, Homo sapiens
atgaaacaaaatgag

SEQ ID NO: 313438 - DNA, 15 bp, Homo sapiens
aatgaaacaaaatga

SEQ ID NO: 313439 - DNA, 15 bp, Homo sapiens
gaatgaaacaaaatg

SEQ ID NO: 313440 - DNA, 15 bp, Homo sapiens
tgaatgaaacaaaat

SEQ ID NO: 313441 - DNA, 15 bp, Homo sapiens
ttgaatgaaacaaaa

SEQ ID NO: 313442 - DNA, 15 bp, Homo sapiens
gttgaatgaaacaaa

SEQ ID NO: 313443 - DNA, 15 bp, Homo sapiens
tgttgaatgaaacaa

SEQ ID NO: 313444 - DNA, 15 bp, Homo sapiens
ctgttgaatgaaaca

SEQ ID NO: 313445 - DNA, 15 bp, Homo sapiens
tctgttgaatgaaac

SEQ ID NO: 313446 - DNA, 15 bp, Homo sapiens
gtctgttgaatgaaa

SEQ ID NO: 313447 - DNA, 15 bp, Homo sapiens
tgtctgttgaatgaa

SEQ ID NO: 313448 - DNA, 15 bp, Homo sapiens
atgtctgttgaatga

SEQ ID NO: 313449 - DNA, 15 bp, Homo sapiens
aatgtctgttgaatg

SEQ ID NO: 313450 - DNA, 15 bp, Homo sapiens
gaatgtctgttgaat

SEQ ID NO: 313451 - DNA, 15 bp, Homo sapiens
ggaatgtctgttgaa

SEQ ID NO: 313452 - DNA, 15 bp, Homo sapiens
gggaatgtctgttga

SEQ ID NO: 313453 - DNA, 15 bp, Homo sapiens
tgggaatgtctgttg

SEQ ID NO: 313454 - DNA, 15 bp, Homo sapiens
atgggaatgtctgtt

SEQ ID NO: 313455 - DNA, 15 bp, Homo sapiens
aatgggaatgtctgt

SEQ ID NO: 313456 - DNA, 15 bp, Homo sapiens
taatgggaatgtctg

SEQ ID NO: 313457 - DNA, 15 bp, Homo sapiens
gtaatgggaatgtct

SEQ ID NO: 313458 - DNA, 15 bp, Homo sapiens
ggtaatgggaatgtc

SEQ ID NO: 313459 - DNA, 15 bp, Homo sapiens
tggtaatgggaatgt

SEQ ID NO: 313460 - DNA, 15 bp, Homo sapiens
gtggtaatgggaatg

SEQ ID NO: 313461 - DNA, 15 bp, Homo sapiens
tgtggtaatgggaat

SEQ ID NO: 313462 - DNA, 15 bp, Homo sapiens
atgtggtaatgggaa

SEQ ID NO: 313463 - DNA, 15 bp, Homo sapiens
aatgtggtaatggga

SEQ ID NO: 313464 - DNA, 15 bp, Homo sapiens
gaatgtggtaatggg

SEQ ID NO: 313465 - DNA, 15 bp, Homo sapiens
agaatgtggtaatgg

SEQ ID NO: 313466 - DNA, 15 bp, Homo sapiens
tagaatgtggtaatg

SEQ ID NO: 313467 - DNA, 15 bp, Homo sapiens
ctagaatgtggtaat

SEQ ID NO: 313468 - DNA, 15 bp, Homo sapiens
cctagaatgtggtaa

SEQ ID NO: 313469 - DNA, 15 bp, Homo sapiens
gcctagaatgtggta

SEQ ID NO: 313470 - DNA, 15 bp, Homo sapiens
tgcctagaatgtggt

SEQ ID NO: 313471 - DNA, 15 bp, Homo sapiens
gtgcctagaatgtgg

SEQ ID NO: 313472 - DNA, 15 bp, Homo sapiens
agtgcctagaatgtg

SEQ ID NO: 313473 - DNA, 15 bp, Homo sapiens
cagtgcctagaatgt

SEQ ID NO: 313474 - DNA, 15 bp, Homo sapiens
acagtgcctagaatg

SEQ ID NO: 313475 - DNA, 15 bp, Homo sapiens
cacagtgcctagaat

SEQ ID NO: 313476 - DNA, 15 bp, Homo sapiens
acacagtgcctagaa

SEQ ID NO: 313477 - DNA, 15 bp, Homo sapiens
gacacagtgcctaga

SEQ ID NO: 313478 - DNA, 15 bp, Homo sapiens
tgacacagtgcctag

SEQ ID NO: 313479 - DNA, 15 bp, Homo sapiens
ttgacacagtgccta

SEQ ID NO: 313480 - DNA, 15 bp, Homo sapiens
cttgacacagtgcct

SEQ ID NO: 313481 - DNA, 15 bp, Homo sapiens
acttgacacagtgcc

SEQ ID NO: 313482 - DNA, 15 bp, Homo sapiens
gacttgacacagtgc

SEQ ID NO: 313483 - DNA, 15 bp, Homo sapiens
agacttgacacagtg

SEQ ID NO: 313484 - DNA, 15 bp, Homo sapiens
aagacttgacacagt

SEQ ID NO: 313485 - DNA, 15 bp, Homo sapiens
taagacttgacacag

SEQ ID NO: 313486 - DNA, 15 bp, Homo sapiens
gtaagacttgacaca

SEQ ID NO: 313487 - DNA, 15 bp, Homo sapiens
agtaagacttgacac

SEQ ID NO: 313488 - DNA, 15 bp, Homo sapiens
cagtaagacttgaca

SEQ ID NO: 313489 - DNA, 15 bp, Homo sapiens
tcagtaagacttgac

SEQ ID NO: 313490 - DNA, 15 bp, Homo sapiens
ttcagtaagacttga

SEQ ID NO: 313491 - DNA, 15 bp, Homo sapiens
cttcagtaagacttg

SEQ ID NO: 313492 - DNA, 15 bp, Homo sapiens
acttcagtaagactt

SEQ ID NO: 313493 - DNA, 15 bp, Homo sapiens
aacttcagtaagact

SEQ ID NO: 313494 - DNA, 15 bp, Homo sapiens
taacttcagtaagac

SEQ ID NO: 313495 - DNA, 15 bp, Homo sapiens
gtaacttcagtaaga

SEQ ID NO: 313496 - DNA, 15 bp, Homo sapiens
agtaacttcagtaag

SEQ ID NO: 313497 - DNA, 15 bp, Homo sapiens
tagtaacttcagtaa

SEQ ID NO: 313498 - DNA, 15 bp, Homo sapiens
ttagtaacttcagta

SEQ ID NO: 313499 - DNA, 15 bp, Homo sapiens
tttagtaacttcagt

SEQ ID NO: 313500 - DNA, 15 bp, Homo sapiens
ttttagtaacttcag

SEQ ID NO: 313501 - DNA, 15 bp, Homo sapiens
cttttagtaacttca

SEQ ID NO: 313502 - DNA, 15 bp, Homo sapiens
ccttttagtaacttc

SEQ ID NO: 313503 - DNA, 15 bp, Homo sapiens
tccttttagtaactt

SEQ ID NO: 313504 - DNA, 15 bp, Homo sapiens
ttccttttagtaact

SEQ ID NO: 313505 - DNA, 15 bp, Homo sapiens
gttccttttagtaac

SEQ ID NO: 313506 - DNA, 15 bp, Homo sapiens
ggttccttttagtaa

SEQ ID NO: 313507 - DNA, 15 bp, Homo sapiens
gggttccttttagta

SEQ ID NO: 313508 - DNA, 15 bp, Homo sapiens
agggttccttttagt

SEQ ID NO: 313509 - DNA, 15 bp, Homo sapiens
gagggttccttttag

SEQ ID NO: 313510 - DNA, 15 bp, Homo sapiens
tgagggttcctttta

SEQ ID NO: 313511 - DNA, 15 bp, Homo sapiens
ttgagggttcctttt

SEQ ID NO: 313512 - DNA, 15 bp, Homo sapiens
attgagggttccttt

SEQ ID NO: 313513 - DNA, 15 bp, Homo sapiens
cattgagggttcctt

SEQ ID NO: 313514 - DNA, 15 bp, Homo sapiens
tcattgagggttcct

SEQ ID NO: 313515 - DNA, 15 bp, Homo sapiens
ttcattgagggttcc

SEQ ID NO: 313516 - DNA, 15 bp, Homo sapiens
attcattgagggttc

SEQ ID NO: 313517 - DNA, 15 bp, Homo sapiens
cattcattgagggtt

SEQ ID NO: 313518 - DNA, 15 bp, Homo sapiens
acattcattgagggt

SEQ ID NO: 313519 - DNA, 15 bp, Homo sapiens
aacattcattgaggg

SEQ ID NO: 313520 - DNA, 15 bp, Homo sapiens
aaacattcattgagg

SEQ ID NO: 313521 - DNA, 15 bp, Homo sapiens
aaaacattcattgag

SEQ ID NO: 313522 - DNA, 15 bp, Homo sapiens
caaaacattcattga

SEQ ID NO: 313523 - DNA, 15 bp, Homo sapiens
acaaaacattcattg

SEQ ID NO: 313524 - DNA, 15 bp, Homo sapiens
cacaaaacattcatt

SEQ ID NO: 313525 - DNA, 15 bp, Homo sapiens
tcacaaaacattcat

SEQ ID NO: 313526 - DNA, 15 bp, Homo sapiens
ttcacaaaacattca

SEQ ID NO: 313527 - DNA, 15 bp, Homo sapiens
attcacaaaacattc

SEQ ID NO: 313528 - DNA, 15 bp, Homo sapiens
aattcacaaaacatt

SEQ ID NO: 313529 - DNA, 15 bp, Homo sapiens
aaattcacaaaacat

SEQ ID NO: 313530 - DNA, 15 bp, Homo sapiens
taaattcacaaaaca

SEQ ID NO: 313531 - DNA, 15 bp, Homo sapiens
ctaaattcacaaaac

SEQ ID NO: 313532 - DNA, 15 bp, Homo sapiens
tctaaattcacaaaa

SEQ ID NO: 313533 - DNA, 15 bp, Homo sapiens
gtctaaattcacaaa

SEQ ID NO: 313534 - DNA, 15 bp, Homo sapiens
tgtctaaattcacaa

SEQ ID NO: 313535 - DNA, 15 bp, Homo sapiens
atgtctaaattcaca

SEQ ID NO: 313536 - DNA, 15 bp, Homo sapiens
catgtctaaattcac

SEQ ID NO: 313537 - DNA, 15 bp, Homo sapiens
tcatgtctaaattca

SEQ ID NO: 313538 - DNA, 15 bp, Homo sapiens
ttcatgtctaaattc

SEQ ID NO: 313539 - DNA, 15 bp, Homo sapiens
attcatgtctaaatt

SEQ ID NO: 313540 - DNA, 15 bp, Homo sapiens
cattcatgtctaaat

SEQ ID NO: 313541 - DNA, 15 bp, Homo sapiens
tcattcatgtctaaa

SEQ ID NO: 313542 - DNA, 15 bp, Homo sapiens
ttcattcatgtctaa

SEQ ID NO: 313543 - DNA, 15 bp, Homo sapiens
attcattcatgtcta

SEQ ID NO: 313544 - DNA, 15 bp, Homo sapiens
cattcattcatgtct

SEQ ID NO: 313545 - DNA, 15 bp, Homo sapiens
tcattcattcatgtc

SEQ ID NO: 313546 - DNA, 15 bp, Homo sapiens
ttcattcattcatgt

SEQ ID NO: 313547 - DNA, 15 bp, Homo sapiens
gttcattcattcatg

SEQ ID NO: 313548 - DNA, 15 bp, Homo sapiens
ttgttcattcattca

SEQ ID NO: 313549 - DNA, 15 bp, Homo sapiens
ttttgttcattcatt

SEQ ID NO: 313550 - DNA, 15 bp, Homo sapiens
cttttgttcattcat

SEQ ID NO: 313551 - DNA, 15 bp, Homo sapiens
tcttttgttcattca

SEQ ID NO: 313552 - DNA, 15 bp, Homo sapiens
ttcttttgttcattc

SEQ ID NO: 313553 - DNA, 15 bp, Homo sapiens
tttcttttgttcatt

SEQ ID NO: 313554 - DNA, 15 bp, Homo sapiens
ttttcttttgttcat

SEQ ID NO: 313555 - DNA, 15 bp, Homo sapiens
cttttcttttgttca

SEQ ID NO: 313556 - DNA, 15 bp, Homo sapiens
ccttttcttttgttc

SEQ ID NO: 313557 - DNA, 15 bp, Homo sapiens
cccttttcttttgtt

SEQ ID NO: 313558 - DNA, 15 bp, Homo sapiens
tcccttttcttttgt

SEQ ID NO: 313559 - DNA, 15 bp, Homo sapiens
gtcccttttcttttg

SEQ ID NO: 313560 - DNA, 15 bp, Homo sapiens
tgtcccttttctttt

SEQ ID NO: 313561 - DNA, 15 bp, Homo sapiens
ttgtcccttttcttt

SEQ ID NO: 313562 - DNA, 15 bp, Homo sapiens
cttgtcccttttctt

SEQ ID NO: 313563 - DNA, 15 bp, Homo sapiens
ccttgtcccttttct

SEQ ID NO: 313564 - DNA, 15 bp, Homo sapiens
cccttgtcccttttc

SEQ ID NO: 313565 - DNA, 15 bp, Homo sapiens
gcccttgtccctttt

SEQ ID NO: 313566 - DNA, 15 bp, Homo sapiens
agcccttgtcccttt

SEQ ID NO: 313567 - DNA, 15 bp, Homo sapiens
cagcccttgtccctt

SEQ ID NO: 313568 - DNA, 15 bp, Homo sapiens
ccagcccttgtccct

SEQ ID NO: 313569 - DNA, 15 bp, Homo sapiens
accagcccttgtccc

SEQ ID NO: 313570 - DNA, 15 bp, Homo sapiens
caccagcccttgtcc

SEQ ID NO: 313571 - DNA, 15 bp, Homo sapiens
tcaccagcccttgtc

SEQ ID NO: 313572 - DNA, 15 bp, Homo sapiens
ctcaccagcccttgt

SEQ ID NO: 313573 - DNA, 15 bp, Homo sapiens
gctcaccagcccttg

SEQ ID NO: 313574 - DNA, 15 bp, Homo sapiens
agctcaccagccctt

SEQ ID NO: 313575 - DNA, 15 bp, Homo sapiens
gagctcaccagccct

SEQ ID NO: 313576 - DNA, 15 bp, Homo sapiens
tgagctcaccagccc

SEQ ID NO: 313577 - DNA, 15 bp, Homo sapiens
atgagctcaccagcc

SEQ ID NO: 313578 - DNA, 15 bp, Homo sapiens
aatgagctcaccagc

SEQ ID NO: 313579 - DNA, 15 bp, Homo sapiens
gaatgagctcaccag

SEQ ID NO: 313580 - DNA, 15 bp, Homo sapiens
tgaatgagctcacca

SEQ ID NO: 313581 - DNA, 15 bp, Homo sapiens
atgaatgagctcacc

SEQ ID NO: 313582 - DNA, 15 bp, Homo sapiens
catgaatgagctcac

SEQ ID NO: 313583 - DNA, 15 bp, Homo sapiens
ccatgaatgagctca

SEQ ID NO: 313584 - DNA, 15 bp, Homo sapiens
cccatgaatgagctc

SEQ ID NO: 313585 - DNA, 15 bp, Homo sapiens
ccccatgaatgagct

SEQ ID NO: 313586 - DNA, 15 bp, Homo sapiens
cccccatgaatgagc

SEQ ID NO: 313587 - DNA, 15 bp, Homo sapiens
tcccccatgaatgag

SEQ ID NO: 313588 - DNA, 15 bp, Homo sapiens
ctcccccatgaatga

SEQ ID NO: 313589 - DNA, 15 bp, Homo sapiens
tctcccccatgaatg

SEQ ID NO: 313590 - DNA, 15 bp, Homo sapiens
ttctcccccatgaat

SEQ ID NO: 313591 - DNA, 15 bp, Homo sapiens
cttctcccccatgaa

SEQ ID NO: 313592 - DNA, 15 bp, Homo sapiens
ccttctcccccatga

SEQ ID NO: 313593 - DNA, 15 bp, Homo sapiens
tccttctcccccatg

SEQ ID NO: 313594 - DNA, 15 bp, Homo sapiens
ttccttctcccccat

SEQ ID NO: 313595 - DNA, 15 bp, Homo sapiens
cttccttctccccca

SEQ ID NO: 313596 - DNA, 15 bp, Homo sapiens
acttccttctccccc

SEQ ID NO: 313597 - DNA, 15 bp, Homo sapiens
tacttccttctcccc

SEQ ID NO: 313598 - DNA, 15 bp, Homo sapiens
ttacttccttctccc

SEQ ID NO: 313599 - DNA, 15 bp, Homo sapiens
cttacttccttctcc

SEQ ID NO: 313600 - DNA, 15 bp, Homo sapiens
acttacttccttctc

SEQ ID NO: 313601 - DNA, 15 bp, Homo sapiens
tacttacttccttct

SEQ ID NO: 313602 - DNA, 15 bp, Homo sapiens
ttacttacttccttc

SEQ ID NO: 313603 - DNA, 15 bp, Homo sapiens
tttacttacttcctt

SEQ ID NO: 313604 - DNA, 15 bp, Homo sapiens
ctttacttacttcct

SEQ ID NO: 313605 - DNA, 15 bp, Homo sapiens
tctttacttacttcc

SEQ ID NO: 313606 - DNA, 15 bp, Homo sapiens
ttctttacttacttc

SEQ ID NO: 313607 - DNA, 15 bp, Homo sapiens
attctttacttactt

SEQ ID NO: 313608 - DNA, 15 bp, Homo sapiens
aattctttacttact

SEQ ID NO: 313609 - DNA, 15 bp, Homo sapiens
gaattctttacttac

SEQ ID NO: 313610 - DNA, 15 bp, Homo sapiens
ggaattctttactta

SEQ ID NO: 313611 - DNA, 15 bp, Homo sapiens
tggaattctttactt

SEQ ID NO: 313612 - DNA, 15 bp, Homo sapiens
ctggaattctttact

SEQ ID NO: 313613 - DNA, 15 bp, Homo sapiens
actggaattctttac

SEQ ID NO: 313614 - DNA, 15 bp, Homo sapiens
cactggaattcttta

SEQ ID NO: 313615 - DNA, 15 bp, Homo sapiens
acactggaattcttt

SEQ ID NO: 313616 - DNA, 15 bp, Homo sapiens
cacactggaattctt

SEQ ID NO: 313617 - DNA, 15 bp, Homo sapiens
acacactggaattct

SEQ ID NO: 313618 - DNA, 15 bp, Homo sapiens
aacacactggaattc

SEQ ID NO: 313619 - DNA, 15 bp, Homo sapiens
caacacactggaatt

SEQ ID NO: 313620 - DNA, 15 bp, Homo sapiens
gcaacacactggaat

SEQ ID NO: 313621 - DNA, 15 bp, Homo sapiens
tgcaacacactggaa

SEQ ID NO: 313622 - DNA, 15 bp, Homo sapiens
atgcaacacactgga

SEQ ID NO: 313623 - DNA, 15 bp, Homo sapiens
aatgcaacacactgg

SEQ ID NO: 313624 - DNA, 15 bp, Homo sapiens
caatgcaacacactg

SEQ ID NO: 313625 - DNA, 15 bp, Homo sapiens
tcaatgcaacacact

SEQ ID NO: 313626 - DNA, 15 bp, Homo sapiens
ttcaatgcaacacac

SEQ ID NO: 313627 - DNA, 15 bp, Homo sapiens
attcaatgcaacaca

SEQ ID NO: 313628 - DNA, 15 bp, Homo sapiens
tattcaatgcaacac

SEQ ID NO: 313629 - DNA, 15 bp, Homo sapiens
atattcaatgcaaca

SEQ ID NO: 313630 - DNA, 15 bp, Homo sapiens
catattcaatgcaac

SEQ ID NO: 313631 - DNA, 15 bp, Homo sapiens
ccatattcaatgcaa

SEQ ID NO: 313632 - DNA, 15 bp, Homo sapiens
gccatattcaatgca

SEQ ID NO: 313633 - DNA, 15 bp, Homo sapiens
tgccatattcaatgc

SEQ ID NO: 313634 - DNA, 15 bp, Homo sapiens
ctgccatattcaatg

SEQ ID NO: 313635 - DNA, 15 bp, Homo sapiens
cctgccatattcaat

SEQ ID NO: 313636 - DNA, 15 bp, Homo sapiens
tcctgccatattcaa

SEQ ID NO: 313637 - DNA, 15 bp, Homo sapiens
ctcctgccatattca

SEQ ID NO: 313638 - DNA, 15 bp, Homo sapiens
tctcctgccatattc

SEQ ID NO: 313639 - DNA, 15 bp, Homo sapiens
ctctcctgccatatt

SEQ ID NO: 313640 - DNA, 15 bp, Homo sapiens
actctcctgccatat

SEQ ID NO: 313641 - DNA, 15 bp, Homo sapiens
cactctcctgccata

SEQ ID NO: 313642 - DNA, 15 bp, Homo sapiens
gcactctcctgccat

SEQ ID NO: 313643 - DNA, 15 bp, Homo sapiens
agcactctcctgcca

SEQ ID NO: 313644 - DNA, 15 bp, Homo sapiens
cagcactctcctgcc

SEQ ID NO: 313645 - DNA, 15 bp, Homo sapiens
ccagcactctcctgc

SEQ ID NO: 313646 - DNA, 15 bp, Homo sapiens
cccagcactctcctg

SEQ ID NO: 313647 - DNA, 15 bp, Homo sapiens
ccccagcactctcct

SEQ ID NO: 313648 - DNA, 15 bp, Homo sapiens
cccccagcactctcc

SEQ ID NO: 313649 - DNA, 15 bp, Homo sapiens
tcccccagcactctc

SEQ ID NO: 313650 - DNA, 15 bp, Homo sapiens
ttcccccagcactct

SEQ ID NO: 313651 - DNA, 15 bp, Homo sapiens
gttcccccagcactc

SEQ ID NO: 313652 - DNA, 15 bp, Homo sapiens
tgttcccccagcact

SEQ ID NO: 313653 - DNA, 15 bp, Homo sapiens
ctgttcccccagcac

SEQ ID NO: 313654 - DNA, 15 bp, Homo sapiens
cctgttcccccagca

SEQ ID NO: 313655 - DNA, 15 bp, Homo sapiens
gcctgttcccccagc

SEQ ID NO: 313656 - DNA, 15 bp, Homo sapiens
tgcctgttcccccag

SEQ ID NO: 313657 - DNA, 15 bp, Homo sapiens
ctgcctgttccccca

SEQ ID NO: 313658 - DNA, 15 bp, Homo sapiens
tctgcctgttccccc

SEQ ID NO: 313659 - DNA, 15 bp, Homo sapiens
ttctgcctgttcccc

SEQ ID NO: 313660 - DNA, 15 bp, Homo sapiens
tttctgcctgttccc

SEQ ID NO: 313661 - DNA, 15 bp, Homo sapiens
ttttctgcctgttcc

SEQ ID NO: 313662 - DNA, 15 bp, Homo sapiens
cttttctgcctgttc

SEQ ID NO: 313663 - DNA, 15 bp, Homo sapiens
tcttttctgcctgtt

SEQ ID NO: 313664 - DNA, 15 bp, Homo sapiens
ctcttttctgcctgt

SEQ ID NO: 313665 - DNA, 15 bp, Homo sapiens
tctcttttctgcctg

SEQ ID NO: 313666 - DNA, 15 bp, Homo sapiens
gtctcttttctgcct

SEQ ID NO: 313667 - DNA, 15 bp, Homo sapiens
tgtctcttttctgcc

SEQ ID NO: 313668 - DNA, 15 bp, Homo sapiens
ggctgtctcttttct

SEQ ID NO: 313669 - DNA, 15 bp, Homo sapiens
aggctgtctcttttc

SEQ ID NO: 313670 - DNA, 15 bp, Homo sapiens
caggctgtctctttt

SEQ ID NO: 313671 - DNA, 15 bp, Homo sapiens
tcaggctgtctcttt

SEQ ID NO: 313672 - DNA, 15 bp, Homo sapiens
gtcaggctgtctctt

SEQ ID NO: 313673 - DNA, 15 bp, Homo sapiens
cgtcaggctgtctct

SEQ ID NO: 313674 - DNA, 15 bp, Homo sapiens
acgtcaggctgtctc

SEQ ID NO: 313675 - DNA, 15 bp, Homo sapiens
cacgtcaggctgtct

SEQ ID NO: 313676 - DNA, 15 bp, Homo sapiens
acacgtcaggctgtc

SEQ ID NO: 313677 - DNA, 15 bp, Homo sapiens
gacacgtcaggctgt

SEQ ID NO: 313678 - DNA, 15 bp, Homo sapiens
ggacacgtcaggctg

SEQ ID NO: 313679 - DNA, 15 bp, Homo sapiens
gggacacgtcaggct

SEQ ID NO: 313680 - DNA, 15 bp, Homo sapiens
tgggacacgtcaggc

SEQ ID NO: 313681 - DNA, 15 bp, Homo sapiens
ctgggacacgtcagg

SEQ ID NO: 313682 - DNA, 15 bp, Homo sapiens
cctgggacacgtcag

SEQ ID NO: 313683 - DNA, 15 bp, Homo sapiens
ccctgggacacgtca

SEQ ID NO: 313684 - DNA, 15 bp, Homo sapiens
tccctgggacacgtc

SEQ ID NO: 313685 - DNA, 15 bp, Homo sapiens
ttccctgggacacgt

SEQ ID NO: 313686 - DNA, 15 bp, Homo sapiens
cttccctgggacacg

SEQ ID NO: 313687 - DNA, 15 bp, Homo sapiens
tcttccctgggacac

SEQ ID NO: 313688 - DNA, 15 bp, Homo sapiens
gtcttccctgggaca

SEQ ID NO: 313689 - DNA, 15 bp, Homo sapiens
agtcttccctgggac

SEQ ID NO: 313690 - DNA, 15 bp, Homo sapiens
aagtcttccctggga

SEQ ID NO: 313691 - DNA, 15 bp, Homo sapiens
aaagtcttccctggg

SEQ ID NO: 313692 - DNA, 15 bp, Homo sapiens
gaaagtcttccctgg

SEQ ID NO: 313693 - DNA, 15 bp, Homo sapiens
ggaaagtcttccctg

SEQ ID NO: 313694 - DNA, 15 bp, Homo sapiens
tggaaagtcttccct

SEQ ID NO: 313695 - DNA, 15 bp, Homo sapiens
ttggaaagtcttccc

SEQ ID NO: 313696 - DNA, 15 bp, Homo sapiens
tttggaaagtcttcc

SEQ ID NO: 313697 - DNA, 15 bp, Homo sapiens
ttttggaaagtcttc

SEQ ID NO: 313698 - DNA, 15 bp, Homo sapiens
cttttggaaagtctt

SEQ ID NO: 313699 - DNA, 15 bp, Homo sapiens
ccttttggaaagtct

SEQ ID NO: 313700 - DNA, 15 bp, Homo sapiens
tccttttggaaagtc

SEQ ID NO: 313701 - DNA, 15 bp, Homo sapiens
ctccttttggaaagt

SEQ ID NO: 313702 - DNA, 15 bp, Homo sapiens
cctccttttggaaag

SEQ ID NO: 313703 - DNA, 15 bp, Homo sapiens
acctccttttggaaa

SEQ ID NO: 313704 - DNA, 15 bp, Homo sapiens
cacctccttttggaa

SEQ ID NO: 313705 - DNA, 15 bp, Homo sapiens
ccacctccttttgga

SEQ ID NO: 313706 - DNA, 15 bp, Homo sapiens
accacctccttttgg

SEQ ID NO: 313707 - DNA, 15 bp, Homo sapiens
caccacctccttttg

SEQ ID NO: 313708 - DNA, 15 bp, Homo sapiens
acaccacctcctttt

SEQ ID NO: 313709 - DNA, 15 bp, Homo sapiens
aacaccacctccttt

SEQ ID NO: 313710 - DNA, 15 bp, Homo sapiens
gaacaccacctcctt

SEQ ID NO: 313711 - DNA, 15 bp, Homo sapiens
agaacaccacctcct

SEQ ID NO: 313712 - DNA, 15 bp, Homo sapiens
cagaacaccacctcc

SEQ ID NO: 313713 - DNA, 15 bp, Homo sapiens
ccagaacaccacctc

SEQ ID NO: 313714 - DNA, 15 bp, Homo sapiens
gccagaacaccacct

SEQ ID NO: 313715 - DNA, 15 bp, Homo sapiens
agccagaacaccacc

SEQ ID NO: 313716 - DNA, 15 bp, Homo sapiens
cagccagaacaccac

SEQ ID NO: 313717 - DNA, 15 bp, Homo sapiens
ccagccagaacacca

SEQ ID NO: 313718 - DNA, 15 bp, Homo sapiens
accagccagaacacc

SEQ ID NO: 313719 - DNA, 15 bp, Homo sapiens
aaccagccagaacac

SEQ ID NO: 313720 - DNA, 15 bp, Homo sapiens
gaaccagccagaaca

SEQ ID NO: 313721 - DNA, 15 bp, Homo sapiens
ggaaccagccagaac

SEQ ID NO: 313722 - DNA, 15 bp, Homo sapiens
aggaaccagccagaa

SEQ ID NO: 313723 - DNA, 15 bp, Homo sapiens
caggaaccagccaga

SEQ ID NO: 313724 - DNA, 15 bp, Homo sapiens
ccaggaaccagccag

SEQ ID NO: 313725 - DNA, 15 bp, Homo sapiens
tccaggaaccagcca

SEQ ID NO: 313726 - DNA, 15 bp, Homo sapiens
ctccaggaaccagcc

SEQ ID NO: 313727 - DNA, 15 bp, Homo sapiens
actccaggaaccagc

SEQ ID NO: 313728 - DNA, 15 bp, Homo sapiens
gactccaggaaccag

SEQ ID NO: 313729 - DNA, 15 bp, Homo sapiens
agactccaggaacca

SEQ ID NO: 313730 - DNA, 15 bp, Homo sapiens
cagactccaggaacc

SEQ ID NO: 313731 - DNA, 15 bp, Homo sapiens
tcagactccaggaac

SEQ ID NO: 313732 - DNA, 15 bp, Homo sapiens
ttcagactccaggaa

SEQ ID NO: 313733 - DNA, 15 bp, Homo sapiens
cttcagactccagga

SEQ ID NO: 313734 - DNA, 15 bp, Homo sapiens
acttcagactccagg

SEQ ID NO: 313735 - DNA, 15 bp, Homo sapiens
tacttcagactccag

SEQ ID NO: 313736 - DNA, 15 bp, Homo sapiens
ctacttcagactcca

SEQ ID NO: 313737 - DNA, 15 bp, Homo sapiens
tctacttcagactcc

SEQ ID NO: 313738 - DNA, 15 bp, Homo sapiens
ttctacttcagactc

SEQ ID NO: 313739 - DNA, 15 bp, Homo sapiens
tttctacttcagact

SEQ ID NO: 313740 - DNA, 15 bp, Homo sapiens
atttctacttcagac

SEQ ID NO: 313741 - DNA, 15 bp, Homo sapiens
aatttctacttcaga

SEQ ID NO: 313742 - DNA, 15 bp, Homo sapiens
aaatttctacttcag

SEQ ID NO: 313743 - DNA, 15 bp, Homo sapiens
caaatttctacttca

SEQ ID NO: 313744 - DNA, 15 bp, Homo sapiens
acaaatttctacttc

SEQ ID NO: 313745 - DNA, 15 bp, Homo sapiens
aacaaatttctactt

SEQ ID NO: 313746 - DNA, 15 bp, Homo sapiens
taacaaatttctact

SEQ ID NO: 313747 - DNA, 15 bp, Homo sapiens
ctaacaaatttctac

SEQ ID NO: 313748 - DNA, 15 bp, Homo sapiens
gctaacaaatttcta

SEQ ID NO: 313749 - DNA, 15 bp, Homo sapiens
agctaacaaatttct

SEQ ID NO: 313750 - DNA, 15 bp, Homo sapiens
tagctaacaaatttc

SEQ ID NO: 313751 - DNA, 15 bp, Homo sapiens
gtagctaacaaattt

SEQ ID NO: 313752 - DNA, 15 bp, Homo sapiens
tgtagctaacaaatt

SEQ ID NO: 313753 - DNA, 15 bp, Homo sapiens
ctgtagctaacaaat

SEQ ID NO: 313754 - DNA, 15 bp, Homo sapiens
cctgtagctaacaaa

SEQ ID NO: 313755 - DNA, 15 bp, Homo sapiens
tcctgtagctaacaa

SEQ ID NO: 313756 - DNA, 15 bp, Homo sapiens
ctcctgtagctaaca

SEQ ID NO: 313757 - DNA, 15 bp, Homo sapiens
cctcctgtagctaac

SEQ ID NO: 313758 - DNA, 15 bp, Homo sapiens
ccctcctgtagctaa

SEQ ID NO: 313759 - DNA, 15 bp, Homo sapiens
cccctcctgtagcta

SEQ ID NO: 313760 - DNA, 15 bp, Homo sapiens
ccccctcctgtagct

SEQ ID NO: 313761 - DNA, 15 bp, Homo sapiens
cccccctcctgtagc

SEQ ID NO: 313762 - DNA, 15 bp, Homo sapiens
tcccccctcctgtag

SEQ ID NO: 313763 - DNA, 15 bp, Homo sapiens
ttcccccctcctgta

SEQ ID NO: 313764 - DNA, 15 bp, Homo sapiens
attcccccctcctgt

SEQ ID NO: 313765 - DNA, 15 bp, Homo sapiens
tattcccccctcctg

SEQ ID NO: 313766 - DNA, 15 bp, Homo sapiens
ctattcccccctcct

SEQ ID NO: 313767 - DNA, 15 bp, Homo sapiens
cctattcccccctcc

SEQ ID NO: 313768 - DNA, 15 bp, Homo sapiens
gcctattcccccctc

SEQ ID NO: 313769 - DNA, 15 bp, Homo sapiens
tgcctattcccccct

SEQ ID NO: 313770 - DNA, 15 bp, Homo sapiens
ctgcctattcccccc

SEQ ID NO: 313771 - DNA, 15 bp, Homo sapiens
cctgcctattccccc

SEQ ID NO: 313772 - DNA, 15 bp, Homo sapiens
acctgcctattcccc

SEQ ID NO: 313773 - DNA, 15 bp, Homo sapiens
gacctgcctattccc

SEQ ID NO: 313774 - DNA, 15 bp, Homo sapiens
tgacctgcctattcc

SEQ ID NO: 313775 - DNA, 15 bp, Homo sapiens
ttgacctgcctattc

SEQ ID NO: 313776 - DNA, 15 bp, Homo sapiens
tttgacctgcctatt

SEQ ID NO: 313777 - DNA, 15 bp, Homo sapiens
gtttgacctgcctat

SEQ ID NO: 313778 - DNA, 15 bp, Homo sapiens
agtttgacctgccta

SEQ ID NO: 313779 - DNA, 15 bp, Homo sapiens
cagtttgacctgcct

SEQ ID NO: 313780 - DNA, 15 bp, Homo sapiens
tcagtttgacctgcc

SEQ ID NO: 313781 - DNA, 15 bp, Homo sapiens
ctcagtttgacctgc

SEQ ID NO: 313782 - DNA, 15 bp, Homo sapiens
cctcagtttgacctg

SEQ ID NO: 313783 - DNA, 15 bp, Homo sapiens
ccctcagtttgacct

SEQ ID NO: 313784 - DNA, 15 bp, Homo sapiens
gccctcagtttgacc

SEQ ID NO: 313785 - DNA, 15 bp, Homo sapiens
tgccctcagtttgac

SEQ ID NO: 313786 - DNA, 15 bp, Homo sapiens
ttgccctcagtttga

SEQ ID NO: 313787 - DNA, 15 bp, Homo sapiens
cttgccctcagtttg

SEQ ID NO: 313788 - DNA, 15 bp, Homo sapiens
acttgccctcagttt

SEQ ID NO: 313789 - DNA, 15 bp, Homo sapiens
cacttgccctcagtt

SEQ ID NO: 313790 - DNA, 15 bp, Homo sapiens
acacttgccctcagt

SEQ ID NO: 313791 - DNA, 15 bp, Homo sapiens
aacacttgccctcag

SEQ ID NO: 313792 - DNA, 15 bp, Homo sapiens
aaacacttgccctca

SEQ ID NO: 313793 - DNA, 15 bp, Homo sapiens
caaacacttgccctc

SEQ ID NO: 313794 - DNA, 15 bp, Homo sapiens
gcaaacacttgccct

SEQ ID NO: 313795 - DNA, 15 bp, Homo sapiens
tgcaaacacttgccc

SEQ ID NO: 313796 - DNA, 15 bp, Homo sapiens
ttgcaaacacttgcc

SEQ ID NO: 313797 - DNA, 15 bp, Homo sapiens
tttgcaaacacttgc

SEQ ID NO: 313798 - DNA, 15 bp, Homo sapiens
atttgcaaacacttg

SEQ ID NO: 313799 - DNA, 15 bp, Homo sapiens
catttgcaaacactt

SEQ ID NO: 313800 - DNA, 15 bp, Homo sapiens
tcatttgcaaacact

SEQ ID NO: 313801 - DNA, 15 bp, Homo sapiens
gttcatttgcaaaca

SEQ ID NO: 313802 - DNA, 15 bp, Homo sapiens
tgttcatttgcaaac

SEQ ID NO: 313803 - DNA, 15 bp, Homo sapiens
ttgttcatttgcaaa

SEQ ID NO: 313804 - DNA, 15 bp, Homo sapiens
tttgttcatttgcaa

SEQ ID NO: 313805 - DNA, 15 bp, Homo sapiens
ctttgttcatttgca

SEQ ID NO: 313806 - DNA, 15 bp, Homo sapiens
cctttgttcatttgc

SEQ ID NO: 313807 - DNA, 15 bp, Homo sapiens
gcctttgttcatttg

SEQ ID NO: 313808 - DNA, 15 bp, Homo sapiens
ggcctttgttcattt

SEQ ID NO: 313809 - DNA, 15 bp, Homo sapiens
aggcctttgttcatt

SEQ ID NO: 313810 - DNA, 15 bp, Homo sapiens
caggcctttgttcat

SEQ ID NO: 313811 - DNA, 15 bp, Homo sapiens
tcaggcctttgttca

SEQ ID NO: 313812 - DNA, 15 bp, Homo sapiens
ttcaggcctttgttc

SEQ ID NO: 313813 - DNA, 15 bp, Homo sapiens
tttcaggcctttgtt

SEQ ID NO: 313814 - DNA, 15 bp, Homo sapiens
ttttcaggcctttgt

SEQ ID NO: 313815 - DNA, 15 bp, Homo sapiens
attttcaggcctttg

SEQ ID NO: 313816 - DNA, 15 bp, Homo sapiens
aattttcaggccttt

SEQ ID NO: 313817 - DNA, 15 bp, Homo sapiens
taattttcaggcctt

SEQ ID NO: 313818 - DNA, 15 bp, Homo sapiens
ctaattttcaggcct

SEQ ID NO: 313819 - DNA, 15 bp, Homo sapiens
cctaattttcaggcc

SEQ ID NO: 313820 - DNA, 15 bp, Homo sapiens
ccctaattttcaggc

SEQ ID NO: 313821 - DNA, 15 bp, Homo sapiens
cccctaattttcagg

SEQ ID NO: 313822 - DNA, 15 bp, Homo sapiens
tcccctaattttcag

SEQ ID NO: 313823 - DNA, 15 bp, Homo sapiens
ttcccctaattttca

SEQ ID NO: 313824 - DNA, 15 bp, Homo sapiens
tttcccctaattttc

SEQ ID NO: 313825 - DNA, 15 bp, Homo sapiens
ttttcccctaatttt

SEQ ID NO: 313826 - DNA, 15 bp, Homo sapiens
cttttcccctaattt

SEQ ID NO: 313827 - DNA, 15 bp, Homo sapiens
gcttttcccctaatt

SEQ ID NO: 313828 - DNA, 15 bp, Homo sapiens
tgcttttcccctaat

SEQ ID NO: 313829 - DNA, 15 bp, Homo sapiens
ttgcttttcccctaa

SEQ ID NO: 313830 - DNA, 15 bp, Homo sapiens
cttgcttttccccta

SEQ ID NO: 313831 - DNA, 15 bp, Homo sapiens
ccttgcttttcccct

SEQ ID NO: 313832 - DNA, 15 bp, Homo sapiens
tccttgcttttcccc

SEQ ID NO: 313833 - DNA, 15 bp, Homo sapiens
atccttgcttttccc

SEQ ID NO: 313834 - DNA, 15 bp, Homo sapiens
catccttgcttttcc

SEQ ID NO: 313835 - DNA, 15 bp, Homo sapiens
acatccttgcttttc

SEQ ID NO: 313836 - DNA, 15 bp, Homo sapiens
tacatccttgctttt

SEQ ID NO: 313837 - DNA, 15 bp, Homo sapiens
ctacatccttgcttt

SEQ ID NO: 313838 - DNA, 15 bp, Homo sapiens
cctacatccttgctt

SEQ ID NO: 313839 - DNA, 15 bp, Homo sapiens
acctacatccttgct

SEQ ID NO: 313840 - DNA, 15 bp, Homo sapiens
cacctacatccttgc

SEQ ID NO: 313841 - DNA, 15 bp, Homo sapiens
acacctacatccttg

SEQ ID NO: 313842 - DNA, 15 bp, Homo sapiens
tacacctacatcctt

SEQ ID NO: 313843 - DNA, 15 bp, Homo sapiens
ttacacctacatcct

SEQ ID NO: 313844 - DNA, 15 bp, Homo sapiens
gttacacctacatcc

SEQ ID NO: 313845 - DNA, 15 bp, Homo sapiens
agttacacctacatc

SEQ ID NO: 313846 - DNA, 15 bp, Homo sapiens
aagttacacctacat

SEQ ID NO: 313847 - DNA, 15 bp, Homo sapiens
taagttacacctaca

SEQ ID NO: 313848 - DNA, 15 bp, Homo sapiens
ttaagttacacctac

SEQ ID NO: 313849 - DNA, 15 bp, Homo sapiens
cttaagttacaccta

SEQ ID NO: 313850 - DNA, 15 bp, Homo sapiens
acttaagttacacct

SEQ ID NO: 313851 - DNA, 15 bp, Homo sapiens
aacttaagttacacc

SEQ ID NO: 313852 - DNA, 15 bp, Homo sapiens
caacttaagttacac

SEQ ID NO: 313853 - DNA, 15 bp, Homo sapiens
tcaacttaagttaca

SEQ ID NO: 313854 - DNA, 15 bp, Homo sapiens
ttcaacttaagttac

SEQ ID NO: 313855 - DNA, 15 bp, Homo sapiens
cttcaacttaagtta

SEQ ID NO: 313856 - DNA, 15 bp, Homo sapiens
acttcaacttaagtt

SEQ ID NO: 313857 - DNA, 15 bp, Homo sapiens
cacttcaacttaagt

SEQ ID NO: 313858 - DNA, 15 bp, Homo sapiens
ccacttcaacttaag

SEQ ID NO: 313859 - DNA, 15 bp, Homo sapiens
tccacttcaacttaa

SEQ ID NO: 313860 - DNA, 15 bp, Homo sapiens
ctccacttcaactta

SEQ ID NO: 313861 - DNA, 15 bp, Homo sapiens
tctccacttcaactt

SEQ ID NO: 313862 - DNA, 15 bp, Homo sapiens
ttctccacttcaact

SEQ ID NO: 313863 - DNA, 15 bp, Homo sapiens
cttctccacttcaac

SEQ ID NO: 313864 - DNA, 15 bp, Homo sapiens
tcttctccacttcaa

SEQ ID NO: 313865 - DNA, 15 bp, Homo sapiens
ttcttctccacttca

SEQ ID NO: 313866 - DNA, 15 bp, Homo sapiens
cttcttctccacttc

SEQ ID NO: 313867 - DNA, 15 bp, Homo sapiens
ccttcttctccactt

SEQ ID NO: 313868 - DNA, 15 bp, Homo sapiens
accttcttctccact

SEQ ID NO: 313869 - DNA, 15 bp, Homo sapiens
taccttcttctccac

SEQ ID NO: 313870 - DNA, 15 bp, Homo sapiens
ttaccttcttctcca

SEQ ID NO: 313871 - DNA, 15 bp, Homo sapiens
cttaccttcttctcc

SEQ ID NO: 313872 - DNA, 15 bp, Homo sapiens
ccttaccttcttctc

SEQ ID NO: 313873 - DNA, 15 bp, Homo sapiens
tccttaccttcttct

SEQ ID NO: 313874 - DNA, 15 bp, Homo sapiens
gtccttaccttcttc

SEQ ID NO: 313875 - DNA, 15 bp, Homo sapiens
tgtccttaccttctt

SEQ ID NO: 313876 - DNA, 15 bp, Homo sapiens
ctgtccttaccttct

SEQ ID NO: 313877 - DNA, 15 bp, Homo sapiens
tctgtccttaccttc

SEQ ID NO: 313878 - DNA, 15 bp, Homo sapiens
ttctgtccttacctt

SEQ ID NO: 313879 - DNA, 15 bp, Homo sapiens
cttctgtccttacct

SEQ ID NO: 313880 - DNA, 15 bp, Homo sapiens
tcttctgtccttacc

SEQ ID NO: 313881 - DNA, 15 bp, Homo sapiens
gtcttctgtccttac

SEQ ID NO: 313882 - DNA, 15 bp, Homo sapiens
ggtcttctgtcctta

SEQ ID NO: 313883 - DNA, 15 bp, Homo sapiens
tggtcttctgtcctt

SEQ ID NO: 313884 - DNA, 15 bp, Homo sapiens
ctggtcttctgtcct

SEQ ID NO: 313885 - DNA, 15 bp, Homo sapiens
cctggtcttctgtcc

SEQ ID NO: 313886 - DNA, 15 bp, Homo sapiens
ccctggtcttctgtc

SEQ ID NO: 313887 - DNA, 15 bp, Homo sapiens
tccctggtcttctgt

SEQ ID NO: 313888 - DNA, 15 bp, Homo sapiens
ttccctggtcttctg

SEQ ID NO: 313889 - DNA, 15 bp, Homo sapiens
tttccctggtcttct

SEQ ID NO: 313890 - DNA, 15 bp, Homo sapiens
ttttccctggtcttc

SEQ ID NO: 313891 - DNA, 15 bp, Homo sapiens
gttttccctggtctt

SEQ ID NO: 313892 - DNA, 15 bp, Homo sapiens
tgttttccctggtct

SEQ ID NO: 313893 - DNA, 15 bp, Homo sapiens
atgttttccctggtc

SEQ ID NO: 313894 - DNA, 15 bp, Homo sapiens
aatgttttccctggt

SEQ ID NO: 313895 - DNA, 15 bp, Homo sapiens
aaatgttttccctgg

SEQ ID NO: 313896 - DNA, 15 bp, Homo sapiens
gaaatgttttccctg

SEQ ID NO: 313897 - DNA, 15 bp, Homo sapiens
ggaaatgttttccct

SEQ ID NO: 313898 - DNA, 15 bp, Homo sapiens
tggaaatgttttccc

SEQ ID NO: 313899 - DNA, 15 bp, Homo sapiens
gtggaaatgttttcc

SEQ ID NO: 313900 - DNA, 15 bp, Homo sapiens
ggtggaaatgttttc

SEQ ID NO: 313901 - DNA, 15 bp, Homo sapiens
aggtggaaatgtttt

SEQ ID NO: 313902 - DNA, 15 bp, Homo sapiens
caggtggaaatgttt

SEQ ID NO: 313903 - DNA, 15 bp, Homo sapiens
tcaggtggaaatgtt

SEQ ID NO: 313904 - DNA, 15 bp, Homo sapiens
ctcaggtggaaatgt

SEQ ID NO: 313905 - DNA, 15 bp, Homo sapiens
tctcaggtggaaatg

SEQ ID NO: 313906 - DNA, 15 bp, Homo sapiens
gtctcaggtggaaat

SEQ ID NO: 313907 - DNA, 15 bp, Homo sapiens
agtctcaggtggaaa

SEQ ID NO: 313908 - DNA, 15 bp, Homo sapiens
cagtctcaggtggaa

SEQ ID NO: 313909 - DNA, 15 bp, Homo sapiens
tcagtctcaggtgga

SEQ ID NO: 313910 - DNA, 15 bp, Homo sapiens
ttcagtctcaggtgg

SEQ ID NO: 313911 - DNA, 15 bp, Homo sapiens
gttcagtctcaggtg

SEQ ID NO: 313912 - DNA, 15 bp, Homo sapiens
tgttcagtctcaggt

SEQ ID NO: 313913 - DNA, 15 bp, Homo sapiens
ctgttcagtctcagg

SEQ ID NO: 313914 - DNA, 15 bp, Homo sapiens
tctgttcagtctcag

SEQ ID NO: 313915 - DNA, 15 bp, Homo sapiens
ttctgttcagtctca

SEQ ID NO: 313916 - DNA, 15 bp, Homo sapiens
gttctgttcagtctc

SEQ ID NO: 313917 - DNA, 15 bp, Homo sapiens
ggttctgttcagtct

SEQ ID NO: 313918 - DNA, 15 bp, Homo sapiens
tggttctgttcagtc

SEQ ID NO: 313919 - DNA, 15 bp, Homo sapiens
gtggttctgttcagt

SEQ ID NO: 313920 - DNA, 15 bp, Homo sapiens
ggtggttctgttcag

SEQ ID NO: 313921 - DNA, 15 bp, Homo sapiens
aggtggttctgttca

SEQ ID NO: 313922 - DNA, 15 bp, Homo sapiens
caggtggttctgttc

SEQ ID NO: 313923 - DNA, 15 bp, Homo sapiens
ccaggtggttctgtt

SEQ ID NO: 313924 - DNA, 15 bp, Homo sapiens
accaggtggttctgt

SEQ ID NO: 313925 - DNA, 15 bp, Homo sapiens
gaccaggtggttctg

SEQ ID NO: 313926 - DNA, 15 bp, Homo sapiens
ggaccaggtggttct

SEQ ID NO: 313927 - DNA, 15 bp, Homo sapiens
tggaccaggtggttc

SEQ ID NO: 313928 - DNA, 15 bp, Homo sapiens
ttggaccaggtggtt

SEQ ID NO: 313929 - DNA, 15 bp, Homo sapiens
cttggaccaggtggt

SEQ ID NO: 313930 - DNA, 15 bp, Homo sapiens
ccttggaccaggtgg

SEQ ID NO: 313931 - DNA, 15 bp, Homo sapiens
accttggaccaggtg

SEQ ID NO: 313932 - DNA, 15 bp, Homo sapiens
gaccttggaccaggt

SEQ ID NO: 313933 - DNA, 15 bp, Homo sapiens
tgaccttggaccagg

SEQ ID NO: 313934 - DNA, 15 bp, Homo sapiens
gtgaccttggaccag

SEQ ID NO: 313935 - DNA, 15 bp, Homo sapiens
agtgaccttggacca

SEQ ID NO: 313936 - DNA, 15 bp, Homo sapiens
aagtgaccttggacc

SEQ ID NO: 313937 - DNA, 15 bp, Homo sapiens
gaagtgaccttggac

SEQ ID NO: 313938 - DNA, 15 bp, Homo sapiens
cgaagtgaccttgga

SEQ ID NO: 313939 - DNA, 15 bp, Homo sapiens
acgaagtgaccttgg

SEQ ID NO: 313940 - DNA, 15 bp, Homo sapiens
aacgaagtgaccttg

SEQ ID NO: 313941 - DNA, 15 bp, Homo sapiens
taacgaagtgacctt

SEQ ID NO: 313942 - DNA, 15 bp, Homo sapiens
ataacgaagtgacct

SEQ ID NO: 313943 - DNA, 15 bp, Homo sapiens
cataacgaagtgacc

SEQ ID NO: 313944 - DNA, 15 bp, Homo sapiens
acataacgaagtgac

SEQ ID NO: 313945 - DNA, 15 bp, Homo sapiens
gacataacgaagtga

SEQ ID NO: 313946 - DNA, 15 bp, Homo sapiens
agacataacgaagtg

SEQ ID NO: 313947 - DNA, 15 bp, Homo sapiens
aagacataacgaagt

SEQ ID NO: 313948 - DNA, 15 bp, Homo sapiens
aaagacataacgaag

SEQ ID NO: 313949 - DNA, 15 bp, Homo sapiens
taaagacataacgaa

SEQ ID NO: 313950 - DNA, 15 bp, Homo sapiens
ctaaagacataacga

SEQ ID NO: 313951 - DNA, 15 bp, Homo sapiens
cctaaagacataacg

SEQ ID NO: 313952 - DNA, 15 bp, Homo sapiens
gcctaaagacataac

SEQ ID NO: 313953 - DNA, 15 bp, Homo sapiens
tgcctaaagacataa

SEQ ID NO: 313954 - DNA, 15 bp, Homo sapiens
ttgcctaaagacata

SEQ ID NO: 313955 - DNA, 15 bp, Homo sapiens
cttgcctaaagacat

SEQ ID NO: 313956 - DNA, 15 bp, Homo sapiens
gcttgcctaaagaca

SEQ ID NO: 313957 - DNA, 15 bp, Homo sapiens
ggcttgcctaaagac

SEQ ID NO: 313958 - DNA, 15 bp, Homo sapiens
gggcttgcctaaaga

SEQ ID NO: 313959 - DNA, 15 bp, Homo sapiens
agggcttgcctaaag

SEQ ID NO: 313960 - DNA, 15 bp, Homo sapiens
cagggcttgcctaaa

SEQ ID NO: 313961 - DNA, 15 bp, Homo sapiens
ccagggcttgcctaa

SEQ ID NO: 313962 - DNA, 15 bp, Homo sapiens
cccagggcttgccta

SEQ ID NO: 313963 - DNA, 15 bp, Homo sapiens
gcccagggcttgcct

SEQ ID NO: 313964 - DNA, 15 bp, Homo sapiens
ggcccagggcttgcc

SEQ ID NO: 313965 - DNA, 15 bp, Homo sapiens
tggcccagggcttgc

SEQ ID NO: 313966 - DNA, 15 bp, Homo sapiens
ttggcccagggcttg

SEQ ID NO: 313967 - DNA, 15 bp, Homo sapiens
tttggcccagggctt

SEQ ID NO: 313968 - DNA, 15 bp, Homo sapiens
ttttggcccagggct

SEQ ID NO: 313969 - DNA, 15 bp, Homo sapiens
attttggcccagggc

SEQ ID NO: 313970 - DNA, 15 bp, Homo sapiens
cattttggcccaggg

SEQ ID NO: 313971 - DNA, 15 bp, Homo sapiens
ccattttggcccagg

SEQ ID NO: 313972 - DNA, 15 bp, Homo sapiens
accattttggcccag

SEQ ID NO: 313973 - DNA, 15 bp, Homo sapiens
caccattttggccca

SEQ ID NO: 313974 - DNA, 15 bp, Homo sapiens
acaccattttggccc

SEQ ID NO: 313975 - DNA, 15 bp, Homo sapiens
cacaccattttggcc

SEQ ID NO: 313976 - DNA, 15 bp, Homo sapiens
ccacaccattttggc

SEQ ID NO: 313977 - DNA, 15 bp, Homo sapiens
gccacaccattttgg

SEQ ID NO: 313978 - DNA, 15 bp, Homo sapiens
agccacaccattttg

SEQ ID NO: 313979 - DNA, 15 bp, Homo sapiens
gagccacaccatttt

SEQ ID NO: 313980 - DNA, 15 bp, Homo sapiens
agagccacaccattt

SEQ ID NO: 313981 - DNA, 15 bp, Homo sapiens
cagagccacaccatt

SEQ ID NO: 313982 - DNA, 15 bp, Homo sapiens
ccagagccacaccat

SEQ ID NO: 313983 - DNA, 15 bp, Homo sapiens
cccagagccacacca

SEQ ID NO: 313984 - DNA, 15 bp, Homo sapiens
tcccagagccacacc

SEQ ID NO: 313985 - DNA, 15 bp, Homo sapiens
ttcccagagccacac

SEQ ID NO: 313986 - DNA, 15 bp, Homo sapiens
gttcccagagccaca

SEQ ID NO: 313987 - DNA, 15 bp, Homo sapiens
agttcccagagccac

SEQ ID NO: 313988 - DNA, 15 bp, Homo sapiens
aagttcccagagcca

SEQ ID NO: 313989 - DNA, 15 bp, Homo sapiens
aaagttcccagagcc

SEQ ID NO: 313990 - DNA, 15 bp, Homo sapiens
caaagttcccagagc

SEQ ID NO: 313991 - DNA, 15 bp, Homo sapiens
gcaaagttcccagag

SEQ ID NO: 313992 - DNA, 15 bp, Homo sapiens
agcaaagttcccaga

SEQ ID NO: 313993 - DNA, 15 bp, Homo sapiens
gagcaaagttcccag

SEQ ID NO: 313994 - DNA, 15 bp, Homo sapiens
tgagcaaagttccca

SEQ ID NO: 313995 - DNA, 15 bp, Homo sapiens
gtgagcaaagttccc

SEQ ID NO: 313996 - DNA, 15 bp, Homo sapiens
agtgagcaaagttcc

SEQ ID NO: 313997 - DNA, 15 bp, Homo sapiens
gagtgagcaaagttc

SEQ ID NO: 313998 - DNA, 15 bp, Homo sapiens
tgagtgagcaaagtt

SEQ ID NO: 313999 - DNA, 15 bp, Homo sapiens
ttgagtgagcaaagt

SEQ ID NO: 314000 - DNA, 15 bp, Homo sapiens
tttgagtgagcaaag

SEQ ID NO: 314001 - DNA, 15 bp, Homo sapiens
ctttgagtgagcaaa

SEQ ID NO: 314002 - DNA, 15 bp, Homo sapiens
gctttgagtgagcaa

SEQ ID NO: 314003 - DNA, 15 bp, Homo sapiens
ggctttgagtgagca

SEQ ID NO: 314004 - DNA, 15 bp, Homo sapiens
gggctttgagtgagc

SEQ ID NO: 314005 - DNA, 15 bp, Homo sapiens
agggctttgagtgag

SEQ ID NO: 314006 - DNA, 15 bp, Homo sapiens
tagggctttgagtga

SEQ ID NO: 314007 - DNA, 15 bp, Homo sapiens
gtagggctttgagtg

SEQ ID NO: 314008 - DNA, 15 bp, Homo sapiens
tgtagggctttgagt

SEQ ID NO: 314009 - DNA, 15 bp, Homo sapiens
atgtagggctttgag

SEQ ID NO: 314010 - DNA, 15 bp, Homo sapiens
tatgtagggctttga

SEQ ID NO: 314011 - DNA, 15 bp, Homo sapiens
ttatgtagggctttg

SEQ ID NO: 314012 - DNA, 15 bp, Homo sapiens
cttatgtagggcttt

SEQ ID NO: 314013 - DNA, 15 bp, Homo sapiens
gcttatgtagggctt

SEQ ID NO: 314014 - DNA, 15 bp, Homo sapiens
ggcttatgtagggct

SEQ ID NO: 314015 - DNA, 15 bp, Homo sapiens
gggcttatgtagggc

SEQ ID NO: 314016 - DNA, 15 bp, Homo sapiens
tgggcttatgtaggg

SEQ ID NO: 314017 - DNA, 15 bp, Homo sapiens
atgggcttatgtagg

SEQ ID NO: 314018 - DNA, 15 bp, Homo sapiens
gatgggcttatgtag

SEQ ID NO: 314019 - DNA, 15 bp, Homo sapiens
agatgggcttatgta

SEQ ID NO: 314020 - DNA, 15 bp, Homo sapiens
aagatgggcttatgt

SEQ ID NO: 314021 - DNA, 15 bp, Homo sapiens
aaagatgggcttatg

SEQ ID NO: 314022 - DNA, 15 bp, Homo sapiens
gaaagatgggcttat

SEQ ID NO: 314023 - DNA, 15 bp, Homo sapiens
ggaaagatgggctta

SEQ ID NO: 314024 - DNA, 15 bp, Homo sapiens
gggaaagatgggctt

SEQ ID NO: 314025 - DNA, 15 bp, Homo sapiens
tgggaaagatgggct

SEQ ID NO: 314026 - DNA, 15 bp, Homo sapiens
atgggaaagatgggc

SEQ ID NO: 314027 - DNA, 15 bp, Homo sapiens
tatgggaaagatggg

SEQ ID NO: 314028 - DNA, 15 bp, Homo sapiens
ttatgggaaagatgg

SEQ ID NO: 314029 - DNA, 15 bp, Homo sapiens
cttatgggaaagatg

SEQ ID NO: 314030 - DNA, 15 bp, Homo sapiens
tcttatgggaaagat

SEQ ID NO: 314031 - DNA, 15 bp, Homo sapiens
ttcttatgggaaaga

SEQ ID NO: 314032 - DNA, 15 bp, Homo sapiens
cttcttatgggaaag

SEQ ID NO: 314033 - DNA, 15 bp, Homo sapiens
ccttcttatgggaaa

SEQ ID NO: 314034 - DNA, 15 bp, Homo sapiens
gccttcttatgggaa

SEQ ID NO: 314035 - DNA, 15 bp, Homo sapiens
agccttcttatggga

SEQ ID NO: 314036 - DNA, 15 bp, Homo sapiens
cagccttcttatggg

SEQ ID NO: 314037 - DNA, 15 bp, Homo sapiens
tcagccttcttatgg

SEQ ID NO: 314038 - DNA, 15 bp, Homo sapiens
ctcagccttcttatg

SEQ ID NO: 314039 - DNA, 15 bp, Homo sapiens
cctcagccttcttat

SEQ ID NO: 314040 - DNA, 15 bp, Homo sapiens
ccctcagccttctta

SEQ ID NO: 314041 - DNA, 15 bp, Homo sapiens
tccctcagccttctt

SEQ ID NO: 314042 - DNA, 15 bp, Homo sapiens
ttccctcagccttct

SEQ ID NO: 314043 - DNA, 15 bp, Homo sapiens
gttccctcagccttc

SEQ ID NO: 314044 - DNA, 15 bp, Homo sapiens
tgttccctcagcctt

SEQ ID NO: 314045 - DNA, 15 bp, Homo sapiens
atgttccctcagcct

SEQ ID NO: 314046 - DNA, 15 bp, Homo sapiens
gatgttccctcagcc

SEQ ID NO: 314047 - DNA, 15 bp, Homo sapiens
agatgttccctcagc

SEQ ID NO: 314048 - DNA, 15 bp, Homo sapiens
tagatgttccctcag

SEQ ID NO: 314049 - DNA, 15 bp, Homo sapiens
atagatgttccctca

SEQ ID NO: 314050 - DNA, 15 bp, Homo sapiens
gatagatgttccctc

SEQ ID NO: 314051 - DNA, 15 bp, Homo sapiens
agatagatgttccct

SEQ ID NO: 314052 - DNA, 15 bp, Homo sapiens
tagatagatgttccc

SEQ ID NO: 314053 - DNA, 15 bp, Homo sapiens
ttagatagatgttcc

SEQ ID NO: 314054 - DNA, 15 bp, Homo sapiens
cttagatagatgttc

SEQ ID NO: 314055 - DNA, 15 bp, Homo sapiens
tcttagatagatgtt

SEQ ID NO: 314056 - DNA, 15 bp, Homo sapiens
atcttagatagatgt

SEQ ID NO: 314057 - DNA, 15 bp, Homo sapiens
tatcttagatagatg

SEQ ID NO: 314058 - DNA, 15 bp, Homo sapiens
ctatcttagatagat

SEQ ID NO: 314059 - DNA, 15 bp, Homo sapiens
tctatcttagataga

SEQ ID NO: 314060 - DNA, 15 bp, Homo sapiens
atctatcttagatag

SEQ ID NO: 314061 - DNA, 15 bp, Homo sapiens
catctatcttagata

SEQ ID NO: 314062 - DNA, 15 bp, Homo sapiens
gcatctatcttagat

SEQ ID NO: 314063 - DNA, 15 bp, Homo sapiens
agcatctatcttaga

SEQ ID NO: 314064 - DNA, 15 bp, Homo sapiens
tagcatctatcttag

SEQ ID NO: 314065 - DNA, 15 bp, Homo sapiens
ctagcatctatctta

SEQ ID NO: 314066 - DNA, 15 bp, Homo sapiens
actagcatctatctt

SEQ ID NO: 314067 - DNA, 15 bp, Homo sapiens
tactagcatctatct

SEQ ID NO: 314068 - DNA, 15 bp, Homo sapiens
ttactagcatctatc

SEQ ID NO: 314069 - DNA, 15 bp, Homo sapiens
attactagcatctat

SEQ ID NO: 314070 - DNA, 15 bp, Homo sapiens
aattactagcatcta

SEQ ID NO: 314071 - DNA, 15 bp, Homo sapiens
aaattactagcatct

SEQ ID NO: 314072 - DNA, 15 bp, Homo sapiens
taaattactagcatc

SEQ ID NO: 314073 - DNA, 15 bp, Homo sapiens
ttaaattactagcat

SEQ ID NO: 314074 - DNA, 15 bp, Homo sapiens
gttaaattactagca

SEQ ID NO: 314075 - DNA, 15 bp, Homo sapiens
tgttaaattactagc

SEQ ID NO: 314076 - DNA, 15 bp, Homo sapiens
ttgttaaattactag

SEQ ID NO: 314077 - DNA, 15 bp, Homo sapiens
tttgttaaattacta

SEQ ID NO: 314078 - DNA, 15 bp, Homo sapiens
ttttgttaaattact

SEQ ID NO: 314079 - DNA, 15 bp, Homo sapiens
tttttgttaaattac

SEQ ID NO: 314080 - DNA, 15 bp, Homo sapiens
ttttttgttaaatta

SEQ ID NO: 314081 - DNA, 15 bp, Homo sapiens
tttttttgttaaatt

SEQ ID NO: 314082 - DNA, 15 bp, Homo sapiens
atttttttgttaaat

SEQ ID NO: 314083 - DNA, 15 bp, Homo sapiens
tatttttttgttaaa

SEQ ID NO: 314084 - DNA, 15 bp, Homo sapiens
ttatttttttgttaa

SEQ ID NO: 314085 - DNA, 15 bp, Homo sapiens
tttatttttttgtta

SEQ ID NO: 314086 - DNA, 15 bp, Homo sapiens
ttttatttttttgtt

SEQ ID NO: 314087 - DNA, 15 bp, Homo sapiens
cttttatttttttgt

SEQ ID NO: 314088 - DNA, 15 bp, Homo sapiens
ccttttatttttttg

SEQ ID NO: 314089 - DNA, 15 bp, Homo sapiens
gccttttattttttt

SEQ ID NO: 314090 - DNA, 15 bp, Homo sapiens
tgccttttatttttt

SEQ ID NO: 314091 - DNA, 15 bp, Homo sapiens
ttgccttttattttt

SEQ ID NO: 314092 - DNA, 15 bp, Homo sapiens
gttgccttttatttt

SEQ ID NO: 314093 - DNA, 15 bp, Homo sapiens
cgttgccttttattt

SEQ ID NO: 314094 - DNA, 15 bp, Homo sapiens
tcgttgccttttatt

SEQ ID NO: 314095 - DNA, 15 bp, Homo sapiens
atcgttgccttttat

SEQ ID NO: 314096 - DNA, 15 bp, Homo sapiens
tatcgttgcctttta

SEQ ID NO: 314097 - DNA, 15 bp, Homo sapiens
gtatcgttgcctttt

SEQ ID NO: 314098 - DNA, 15 bp, Homo sapiens
agtatcgttgccttt

SEQ ID NO: 314099 - DNA, 15 bp, Homo sapiens
tagtatcgttgcctt

SEQ ID NO: 314100 - DNA, 15 bp, Homo sapiens
atagtatcgttgcct

SEQ ID NO: 314101 - DNA, 15 bp, Homo sapiens
tatagtatcgttgcc

SEQ ID NO: 314102 - DNA, 15 bp, Homo sapiens
ctatagtatcgttgc

SEQ ID NO: 314103 - DNA, 15 bp, Homo sapiens
cctatagtatcgttg

SEQ ID NO: 314104 - DNA, 15 bp, Homo sapiens
ccctatagtatcgtt

SEQ ID NO: 314105 - DNA, 15 bp, Homo sapiens
tccctatagtatcgt

SEQ ID NO: 314106 - DNA, 15 bp, Homo sapiens
ttccctatagtatcg

SEQ ID NO: 314107 - DNA, 15 bp, Homo sapiens
cttccctatagtatc

SEQ ID NO: 314108 - DNA, 15 bp, Homo sapiens
tcttccctatagtat

SEQ ID NO: 314109 - DNA, 15 bp, Homo sapiens
ttcttccctatagta

SEQ ID NO: 314110 - DNA, 15 bp, Homo sapiens
tttcttccctatagt

SEQ ID NO: 314111 - DNA, 15 bp, Homo sapiens
ttttcttccctatag

SEQ ID NO: 314112 - DNA, 15 bp, Homo sapiens
cttttcttccctata

SEQ ID NO: 314113 - DNA, 15 bp, Homo sapiens
tcttttcttccctat

SEQ ID NO: 314114 - DNA, 15 bp, Homo sapiens
ttcttttcttcccta

SEQ ID NO: 314115 - DNA, 15 bp, Homo sapiens
tttcttttcttccct

SEQ ID NO: 314116 - DNA, 15 bp, Homo sapiens
ctttcttttcttccc

SEQ ID NO: 314117 - DNA, 15 bp, Homo sapiens
tctttcttttcttcc

SEQ ID NO: 314118 - DNA, 15 bp, Homo sapiens
ttctttcttttcttc

SEQ ID NO: 314119 - DNA, 15 bp, Homo sapiens
ctcctttctttcttt

SEQ ID NO: 314120 - DNA, 15 bp, Homo sapiens
gctcctttctttctt

SEQ ID NO: 314121 - DNA, 15 bp, Homo sapiens
cgctcctttctttct

SEQ ID NO: 314122 - DNA, 15 bp, Homo sapiens
ccgctcctttctttc

SEQ ID NO: 314123 - DNA, 15 bp, Homo sapiens
tccgctcctttcttt

SEQ ID NO: 314124 - DNA, 15 bp, Homo sapiens
atccgctcctttctt

SEQ ID NO: 314125 - DNA, 15 bp, Homo sapiens
catccgctcctttct

SEQ ID NO: 314126 - DNA, 15 bp, Homo sapiens
tcatccgctcctttc

SEQ ID NO: 314127 - DNA, 15 bp, Homo sapiens
atcatccgctccttt

SEQ ID NO: 314128 - DNA, 15 bp, Homo sapiens
catcatccgctcctt

SEQ ID NO: 314129 - DNA, 15 bp, Homo sapiens
acatcatccgctcct

SEQ ID NO: 314130 - DNA, 15 bp, Homo sapiens
aacatcatccgctcc

SEQ ID NO: 314131 - DNA, 15 bp, Homo sapiens
taacatcatccgctc

SEQ ID NO: 314132 - DNA, 15 bp, Homo sapiens
gtaacatcatccgct

SEQ ID NO: 314133 - DNA, 15 bp, Homo sapiens
agtaacatcatccgc

SEQ ID NO: 314134 - DNA, 15 bp, Homo sapiens
aagtaacatcatccg

SEQ ID NO: 314135 - DNA, 15 bp, Homo sapiens
caagtaacatcatcc

SEQ ID NO: 314136 - DNA, 15 bp, Homo sapiens
ccaagtaacatcatc

SEQ ID NO: 314137 - DNA, 15 bp, Homo sapiens
gccaagtaacatcat

SEQ ID NO: 314138 - DNA, 15 bp, Homo sapiens
agccaagtaacatca

SEQ ID NO: 314139 - DNA, 15 bp, Homo sapiens
tagccaagtaacatc

SEQ ID NO: 314140 - DNA, 15 bp, Homo sapiens
atagccaagtaacat

SEQ ID NO: 314141 - DNA, 15 bp, Homo sapiens
aatagccaagtaaca

SEQ ID NO: 314142 - DNA, 15 bp, Homo sapiens
caatagccaagtaac

SEQ ID NO: 314143 - DNA, 15 bp, Homo sapiens
acaatagccaagtaa

SEQ ID NO: 314144 - DNA, 15 bp, Homo sapiens
aacaatagccaagta

SEQ ID NO: 314145 - DNA, 15 bp, Homo sapiens
aaacaatagccaagt

SEQ ID NO: 314146 - DNA, 15 bp, Homo sapiens
aaaacaatagccaag

SEQ ID NO: 314147 - DNA, 15 bp, Homo sapiens
gaaaacaatagccaa

SEQ ID NO: 314148 - DNA, 15 bp, Homo sapiens
ggaaaacaatagcca

SEQ ID NO: 314149 - DNA, 15 bp, Homo sapiens
aggaaaacaatagcc

SEQ ID NO: 314150 - DNA, 15 bp, Homo sapiens
taggaaaacaatagc

SEQ ID NO: 314151 - DNA, 15 bp, Homo sapiens
ttaggaaaacaatag

SEQ ID NO: 314152 - DNA, 15 bp, Homo sapiens
tttaggaaaacaata

SEQ ID NO: 314153 - DNA, 15 bp, Homo sapiens
ttttaggaaaacaat

SEQ ID NO: 314154 - DNA, 15 bp, Homo sapiens
gttttaggaaaacaa

SEQ ID NO: 314155 - DNA, 15 bp, Homo sapiens
tgttttaggaaaaca

SEQ ID NO: 314156 - DNA, 15 bp, Homo sapiens
ttgttttaggaaaac

SEQ ID NO: 314157 - DNA, 15 bp, Homo sapiens
tttgttttaggaaaa

SEQ ID NO: 314158 - DNA, 15 bp, Homo sapiens
ttttgttttaggaaa

SEQ ID NO: 314159 - DNA, 15 bp, Homo sapiens
cttttgttttaggaa

SEQ ID NO: 314160 - DNA, 15 bp, Homo sapiens
gcttttgttttagga

SEQ ID NO: 314161 - DNA, 15 bp, Homo sapiens
tgcttttgttttagg

SEQ ID NO: 314162 - DNA, 15 bp, Homo sapiens
ttgcttttgttttag

SEQ ID NO: 314163 - DNA, 15 bp, Homo sapiens
cttgcttttgtttta

SEQ ID NO: 314164 - DNA, 15 bp, Homo sapiens
tcttgcttttgtttt

SEQ ID NO: 314165 - DNA, 15 bp, Homo sapiens
ttcttgcttttgttt

SEQ ID NO: 314166 - DNA, 15 bp, Homo sapiens
tttcttgcttttgtt

SEQ ID NO: 314167 - DNA, 15 bp, Homo sapiens
atttcttgcttttgt

SEQ ID NO: 314168 - DNA, 15 bp, Homo sapiens
catttcttgcttttg

SEQ ID NO: 314169 - DNA, 15 bp, Homo sapiens
tcatttcttgctttt

SEQ ID NO: 314170 - DNA, 15 bp, Homo sapiens
ttcatttcttgcttt

SEQ ID NO: 314171 - DNA, 15 bp, Homo sapiens
cttcatttcttgctt

SEQ ID NO: 314172 - DNA, 15 bp, Homo sapiens
gcttcatttcttgct

SEQ ID NO: 314173 - DNA, 15 bp, Homo sapiens
tgcttcatttcttgc

SEQ ID NO: 314174 - DNA, 15 bp, Homo sapiens
atgcttcatttcttg

SEQ ID NO: 314175 - DNA, 15 bp, Homo sapiens
gatgcttcatttctt

SEQ ID NO: 314176 - DNA, 15 bp, Homo sapiens
agatgcttcatttct

SEQ ID NO: 314177 - DNA, 15 bp, Homo sapiens
aagatgcttcatttc

SEQ ID NO: 314178 - DNA, 15 bp, Homo sapiens
aaagatgcttcattt

SEQ ID NO: 314179 - DNA, 15 bp, Homo sapiens
aaaagatgcttcatt

SEQ ID NO: 314180 - DNA, 15 bp, Homo sapiens
taaaagatgcttcat

SEQ ID NO: 314181 - DNA, 15 bp, Homo sapiens
ttaaaagatgcttca

SEQ ID NO: 314182 - DNA, 15 bp, Homo sapiens
cttaaaagatgcttc

SEQ ID NO: 314183 - DNA, 15 bp, Homo sapiens
tcttaaaagatgctt

SEQ ID NO: 314184 - DNA, 15 bp, Homo sapiens
ctcttaaaagatgct

SEQ ID NO: 314185 - DNA, 15 bp, Homo sapiens
gctcttaaaagatgc

SEQ ID NO: 314186 - DNA, 15 bp, Homo sapiens
agctcttaaaagatg

SEQ ID NO: 314187 - DNA, 15 bp, Homo sapiens
cagctcttaaaagat

SEQ ID NO: 314188 - DNA, 15 bp, Homo sapiens
ccagctcttaaaaga

SEQ ID NO: 314189 - DNA, 15 bp, Homo sapiens
gccagctcttaaaag

SEQ ID NO: 314190 - DNA, 15 bp, Homo sapiens
ggccagctcttaaaa

SEQ ID NO: 314191 - DNA, 15 bp, Homo sapiens
aggccagctcttaaa

SEQ ID NO: 314192 - DNA, 15 bp, Homo sapiens
taggccagctcttaa

SEQ ID NO: 314193 - DNA, 15 bp, Homo sapiens
ctaggccagctctta

SEQ ID NO: 314194 - DNA, 15 bp, Homo sapiens
tctaggccagctctt

SEQ ID NO: 314195 - DNA, 15 bp, Homo sapiens
ttctaggccagctct

SEQ ID NO: 314196 - DNA, 15 bp, Homo sapiens
attctaggccagctc

SEQ ID NO: 314197 - DNA, 15 bp, Homo sapiens
cattctaggccagct

SEQ ID NO: 314198 - DNA, 15 bp, Homo sapiens
gcattctaggccagc

SEQ ID NO: 314199 - DNA, 15 bp, Homo sapiens
ggcattctaggccag

SEQ ID NO: 314200 - DNA, 15 bp, Homo sapiens
tggcattctaggcca

SEQ ID NO: 314201 - DNA, 15 bp, Homo sapiens
atggcattctaggcc

SEQ ID NO: 314202 - DNA, 15 bp, Homo sapiens
aatggcattctaggc

SEQ ID NO: 314203 - DNA, 15 bp, Homo sapiens
gaatggcattctagg

SEQ ID NO: 314204 - DNA, 15 bp, Homo sapiens
agaatggcattctag

SEQ ID NO: 314205 - DNA, 15 bp, Homo sapiens
cagaatggcattcta

SEQ ID NO: 314206 - DNA, 15 bp, Homo sapiens
ccagaatggcattct

SEQ ID NO: 314207 - DNA, 15 bp, Homo sapiens
cccagaatggcattc

SEQ ID NO: 314208 - DNA, 15 bp, Homo sapiens
ccccagaatggcatt

SEQ ID NO: 314209 - DNA, 15 bp, Homo sapiens
cccccagaatggcat

SEQ ID NO: 314210 - DNA, 15 bp, Homo sapiens
gcccccagaatggca

SEQ ID NO: 314211 - DNA, 15 bp, Homo sapiens
agcccccagaatggc

SEQ ID NO: 314212 - DNA, 15 bp, Homo sapiens
aagcccccagaatgg

SEQ ID NO: 314213 - DNA, 15 bp, Homo sapiens
taagcccccagaatg

SEQ ID NO: 314214 - DNA, 15 bp, Homo sapiens
ctaagcccccagaat

SEQ ID NO: 314215 - DNA, 15 bp, Homo sapiens
cctaagcccccagaa

SEQ ID NO: 314216 - DNA, 15 bp, Homo sapiens
tcctaagcccccaga

SEQ ID NO: 314217 - DNA, 15 bp, Homo sapiens
ttcctaagcccccag

SEQ ID NO: 314218 - DNA, 15 bp, Homo sapiens
tttcctaagccccca

SEQ ID NO: 314219 - DNA, 15 bp, Homo sapiens
ttttcctaagccccc

SEQ ID NO: 314220 - DNA, 15 bp, Homo sapiens
tttttcctaagcccc

SEQ ID NO: 314221 - DNA, 15 bp, Homo sapiens
ttttttcctaagccc

SEQ ID NO: 314222 - DNA, 15 bp, Homo sapiens
tttttttcctaagcc

SEQ ID NO: 314223 - DNA, 15 bp, Homo sapiens
atttttttcctaagc

SEQ ID NO: 314224 - DNA, 15 bp, Homo sapiens
gatttttttcctaag

SEQ ID NO: 314225 - DNA, 15 bp, Homo sapiens
tgatttttttcctaa

SEQ ID NO: 314226 - DNA, 15 bp, Homo sapiens
ttgatttttttccta

SEQ ID NO: 314227 - DNA, 15 bp, Homo sapiens
tttgatttttttcct

SEQ ID NO: 314228 - DNA, 15 bp, Homo sapiens
ttttgatttttttcc

SEQ ID NO: 314229 - DNA, 15 bp, Homo sapiens
attttgatttttttc

SEQ ID NO: 314230 - DNA, 15 bp, Homo sapiens
cattttgattttttt

SEQ ID NO: 314231 - DNA, 15 bp, Homo sapiens
acattttgatttttt

SEQ ID NO: 314232 - DNA, 15 bp, Homo sapiens
tacattttgattttt

SEQ ID NO: 314233 - DNA, 15 bp, Homo sapiens
atacattttgatttt

SEQ ID NO: 314234 - DNA, 15 bp, Homo sapiens
aatacattttgattt

SEQ ID NO: 314235 - DNA, 15 bp, Homo sapiens
taatacattttgatt

SEQ ID NO: 314236 - DNA, 15 bp, Homo sapiens
ctaatacattttgat

SEQ ID NO: 314237 - DNA, 15 bp, Homo sapiens
tctaatacattttga

SEQ ID NO: 314238 - DNA, 15 bp, Homo sapiens
ctctaatacattttg

SEQ ID NO: 314239 - DNA, 15 bp, Homo sapiens
gctctaatacatttt

SEQ ID NO: 314240 - DNA, 15 bp, Homo sapiens
agctctaatacattt

SEQ ID NO: 314241 - DNA, 15 bp, Homo sapiens
gagctctaatacatt

SEQ ID NO: 314242 - DNA, 15 bp, Homo sapiens
agagctctaatacat

SEQ ID NO: 314243 - DNA, 15 bp, Homo sapiens
gagagctctaataca

SEQ ID NO: 314244 - DNA, 15 bp, Homo sapiens
agagagctctaatac

SEQ ID NO: 314245 - DNA, 15 bp, Homo sapiens
gagagagctctaata

SEQ ID NO: 314246 - DNA, 15 bp, Homo sapiens
tgagagagctctaat

SEQ ID NO: 314247 - DNA, 15 bp, Homo sapiens
ctgagagagctctaa

SEQ ID NO: 314248 - DNA, 15 bp, Homo sapiens
tctgagagagctcta

SEQ ID NO: 314249 - DNA, 15 bp, Homo sapiens
gtctgagagagctct

SEQ ID NO: 314250 - DNA, 15 bp, Homo sapiens
tgtctgagagagctc

SEQ ID NO: 314251 - DNA, 15 bp, Homo sapiens
atgtctgagagagct

SEQ ID NO: 314252 - DNA, 15 bp, Homo sapiens
aatgtctgagagagc

SEQ ID NO: 314253 - DNA, 15 bp, Homo sapiens
caatgtctgagagag

SEQ ID NO: 314254 - DNA, 15 bp, Homo sapiens
ccaatgtctgagaga

SEQ ID NO: 314255 - DNA, 15 bp, Homo sapiens
tccaatgtctgagag

SEQ ID NO: 314256 - DNA, 15 bp, Homo sapiens
atccaatgtctgaga

SEQ ID NO: 314257 - DNA, 15 bp, Homo sapiens
catccaatgtctgag

SEQ ID NO: 314258 - DNA, 15 bp, Homo sapiens
ccatccaatgtctga

SEQ ID NO: 314259 - DNA, 15 bp, Homo sapiens
accatccaatgtctg

SEQ ID NO: 314260 - DNA, 15 bp, Homo sapiens
aaccatccaatgtct

SEQ ID NO: 314261 - DNA, 15 bp, Homo sapiens
aaaccatccaatgtc

SEQ ID NO: 314262 - DNA, 15 bp, Homo sapiens
taaaccatccaatgt

SEQ ID NO: 314263 - DNA, 15 bp, Homo sapiens
ataaaccatccaatg

SEQ ID NO: 314264 - DNA, 15 bp, Homo sapiens
cataaaccatccaat

SEQ ID NO: 314265 - DNA, 15 bp, Homo sapiens
ccataaaccatccaa

SEQ ID NO: 314266 - DNA, 15 bp, Homo sapiens
gccataaaccatcca

SEQ ID NO: 314267 - DNA, 15 bp, Homo sapiens
tgccataaaccatcc

SEQ ID NO: 314268 - DNA, 15 bp, Homo sapiens
ctgccataaaccatc

SEQ ID NO: 314269 - DNA, 15 bp, Homo sapiens
gctgccataaaccat

SEQ ID NO: 314270 - DNA, 15 bp, Homo sapiens
tgctgccataaacca

SEQ ID NO: 314271 - DNA, 15 bp, Homo sapiens
atgctgccataaacc

SEQ ID NO: 314272 - DNA, 15 bp, Homo sapiens
gatgctgccataaac

SEQ ID NO: 314273 - DNA, 15 bp, Homo sapiens
agatgctgccataaa

SEQ ID NO: 314274 - DNA, 15 bp, Homo sapiens
tagatgctgccataa

SEQ ID NO: 314275 - DNA, 15 bp, Homo sapiens
ttagatgctgccata

SEQ ID NO: 314276 - DNA, 15 bp, Homo sapiens
tttagatgctgccat

SEQ ID NO: 314277 - DNA, 15 bp, Homo sapiens
ttttagatgctgcca

SEQ ID NO: 314278 - DNA, 15 bp, Homo sapiens
attttagatgctgcc

SEQ ID NO: 314279 - DNA, 15 bp, Homo sapiens
aattttagatgctgc

SEQ ID NO: 314280 - DNA, 15 bp, Homo sapiens
caattttagatgctg

SEQ ID NO: 314281 - DNA, 15 bp, Homo sapiens
gcaattttagatgct

SEQ ID NO: 314282 - DNA, 15 bp, Homo sapiens
agcaattttagatgc

SEQ ID NO: 314283 - DNA, 15 bp, Homo sapiens
cagcaattttagatg

SEQ ID NO: 314284 - DNA, 15 bp, Homo sapiens
ccagcaattttagat

SEQ ID NO: 314285 - DNA, 15 bp, Homo sapiens
accagcaattttaga

SEQ ID NO: 314286 - DNA, 15 bp, Homo sapiens
taccagcaattttag

SEQ ID NO: 314287 - DNA, 15 bp, Homo sapiens
ttaccagcaatttta

SEQ ID NO: 314288 - DNA, 15 bp, Homo sapiens
tttaccagcaatttt

SEQ ID NO: 314289 - DNA, 15 bp, Homo sapiens
ttttaccagcaattt

SEQ ID NO: 314290 - DNA, 15 bp, Homo sapiens
attttaccagcaatt

SEQ ID NO: 314291 - DNA, 15 bp, Homo sapiens
aattttaccagcaat

SEQ ID NO: 314292 - DNA, 15 bp, Homo sapiens
taattttaccagcaa

SEQ ID NO: 314293 - DNA, 15 bp, Homo sapiens
ataattttaccagca

SEQ ID NO: 314294 - DNA, 15 bp, Homo sapiens
cataattttaccagc

SEQ ID NO: 314295 - DNA, 15 bp, Homo sapiens
tcataattttaccag

SEQ ID NO: 314296 - DNA, 15 bp, Homo sapiens
gtcataattttacca

SEQ ID NO: 314297 - DNA, 15 bp, Homo sapiens
ggtcataattttacc

SEQ ID NO: 314298 - DNA, 15 bp, Homo sapiens
aggtcataattttac

SEQ ID NO: 314299 - DNA, 15 bp, Homo sapiens
aaggtcataatttta

SEQ ID NO: 314300 - DNA, 15 bp, Homo sapiens
caaggtcataatttt

SEQ ID NO: 314301 - DNA, 15 bp, Homo sapiens
acaaggtcataattt

SEQ ID NO: 314302 - DNA, 15 bp, Homo sapiens
tacaaggtcataatt

SEQ ID NO: 314303 - DNA, 15 bp, Homo sapiens
ttacaaggtcataat

SEQ ID NO: 314304 - DNA, 15 bp, Homo sapiens
attacaaggtcataa

SEQ ID NO: 314305 - DNA, 15 bp, Homo sapiens
aattacaaggtcata

SEQ ID NO: 314306 - DNA, 15 bp, Homo sapiens
gaattacaaggtcat

SEQ ID NO: 314307 - DNA, 15 bp, Homo sapiens
tgaattacaaggtca

SEQ ID NO: 314308 - DNA, 15 bp, Homo sapiens
gtgaattacaaggtc

SEQ ID NO: 314309 - DNA, 15 bp, Homo sapiens
tgtgaattacaaggt

SEQ ID NO: 314310 - DNA, 15 bp, Homo sapiens
ctgtgaattacaagg

SEQ ID NO: 314311 - DNA, 15 bp, Homo sapiens
gctgtgaattacaag

SEQ ID NO: 314312 - DNA, 15 bp, Homo sapiens
ggctgtgaattacaa

SEQ ID NO: 314313 - DNA, 15 bp, Homo sapiens
cggctgtgaattaca

SEQ ID NO: 314314 - DNA, 15 bp, Homo sapiens
acggctgtgaattac

SEQ ID NO: 314315 - DNA, 15 bp, Homo sapiens
cacggctgtgaatta

SEQ ID NO: 314316 - DNA, 15 bp, Homo sapiens
acacggctgtgaatt

SEQ ID NO: 314317 - DNA, 15 bp, Homo sapiens
gacacggctgtgaat

SEQ ID NO: 314318 - DNA, 15 bp, Homo sapiens
tgacacggctgtgaa

SEQ ID NO: 314319 - DNA, 15 bp, Homo sapiens
atgacacggctgtga

SEQ ID NO: 314320 - DNA, 15 bp, Homo sapiens
tatgacacggctgtg

SEQ ID NO: 314321 - DNA, 15 bp, Homo sapiens
atatgacacggctgt

SEQ ID NO: 314322 - DNA, 15 bp, Homo sapiens
tatatgacacggctg

SEQ ID NO: 314323 - DNA, 15 bp, Homo sapiens
atatatgacacggct

SEQ ID NO: 314324 - DNA, 15 bp, Homo sapiens
aatatatgacacggc

SEQ ID NO: 314325 - DNA, 15 bp, Homo sapiens
gaatatatgacacgg

SEQ ID NO: 314326 - DNA, 15 bp, Homo sapiens
agaatatatgacacg

SEQ ID NO: 314327 - DNA, 15 bp, Homo sapiens
gagaatatatgacac

SEQ ID NO: 314328 - DNA, 15 bp, Homo sapiens
agagaatatatgaca

SEQ ID NO: 314329 - DNA, 15 bp, Homo sapiens
tagagaatatatgac

SEQ ID NO: 314330 - DNA, 15 bp, Homo sapiens
ctagagaatatatga

SEQ ID NO: 314331 - DNA, 15 bp, Homo sapiens
gctagagaatatatg

SEQ ID NO: 314332 - DNA, 15 bp, Homo sapiens
tgctagagaatatat

SEQ ID NO: 314333 - DNA, 15 bp, Homo sapiens
gtgctagagaatata

SEQ ID NO: 314334 - DNA, 15 bp, Homo sapiens
tgtgctagagaatat

SEQ ID NO: 314335 - DNA, 15 bp, Homo sapiens
gtgtgctagagaata

SEQ ID NO: 314336 - DNA, 15 bp, Homo sapiens
tgtgtgctagagaat

SEQ ID NO: 314337 - DNA, 15 bp, Homo sapiens
ctgtgtgctagagaa

SEQ ID NO: 314338 - DNA, 15 bp, Homo sapiens
actgtgtgctagaga

SEQ ID NO: 314339 - DNA, 15 bp, Homo sapiens
cactgtgtgctagag

SEQ ID NO: 314340 - DNA, 15 bp, Homo sapiens
acactgtgtgctaga

SEQ ID NO: 314341 - DNA, 15 bp, Homo sapiens
tacactgtgtgctag

SEQ ID NO: 314342 - DNA, 15 bp, Homo sapiens
ttacactgtgtgcta

SEQ ID NO: 314343 - DNA, 15 bp, Homo sapiens
attacactgtgtgct

SEQ ID NO: 314344 - DNA, 15 bp, Homo sapiens
aattacactgtgtgc

SEQ ID NO: 314345 - DNA, 15 bp, Homo sapiens
aaattacactgtgtg

SEQ ID NO: 314346 - DNA, 15 bp, Homo sapiens
taaattacactgtgt

SEQ ID NO: 314347 - DNA, 15 bp, Homo sapiens
ataaattacactgtg

SEQ ID NO: 314348 - DNA, 15 bp, Homo sapiens
cataaattacactgt

SEQ ID NO: 314349 - DNA, 15 bp, Homo sapiens
acataaattacactg

SEQ ID NO: 314350 - DNA, 15 bp, Homo sapiens
tacataaattacact

SEQ ID NO: 314351 - DNA, 15 bp, Homo sapiens
gtacataaattacac

SEQ ID NO: 314352 - DNA, 15 bp, Homo sapiens
ggtacataaattaca

SEQ ID NO: 314353 - DNA, 15 bp, Homo sapiens
tggtacataaattac

SEQ ID NO: 314354 - DNA, 15 bp, Homo sapiens
ttggtacataaatta

SEQ ID NO: 314355 - DNA, 15 bp, Homo sapiens
cttggtacataaatt

SEQ ID NO: 314356 - DNA, 15 bp, Homo sapiens
gcttggtacataaat

SEQ ID NO: 314357 - DNA, 15 bp, Homo sapiens
ggcttggtacataaa

SEQ ID NO: 314358 - DNA, 15 bp, Homo sapiens
tggcttggtacataa

SEQ ID NO: 314359 - DNA, 15 bp, Homo sapiens
ctggcttggtacata

SEQ ID NO: 314360 - DNA, 15 bp, Homo sapiens
actggcttggtacat

SEQ ID NO: 314361 - DNA, 15 bp, Homo sapiens
aactggcttggtaca

SEQ ID NO: 314362 - DNA, 15 bp, Homo sapiens
caactggcttggtac

SEQ ID NO: 314363 - DNA, 15 bp, Homo sapiens
gcaactggcttggta

SEQ ID NO: 314364 - DNA, 15 bp, Homo sapiens
agcaactggcttggt

SEQ ID NO: 314365 - DNA, 15 bp, Homo sapiens
aagcaactggcttgg

SEQ ID NO: 314366 - DNA, 15 bp, Homo sapiens
gaagcaactggcttg

SEQ ID NO: 314367 - DNA, 15 bp, Homo sapiens
tgaagcaactggctt

SEQ ID NO: 314368 - DNA, 15 bp, Homo sapiens
ttgaagcaactggct

SEQ ID NO: 314369 - DNA, 15 bp, Homo sapiens
tttgaagcaactggc

SEQ ID NO: 314370 - DNA, 15 bp, Homo sapiens
ttttgaagcaactgg

SEQ ID NO: 314371 - DNA, 15 bp, Homo sapiens
tttttgaagcaactg

SEQ ID NO: 314372 - DNA, 15 bp, Homo sapiens
ttttttgaagcaact

SEQ ID NO: 314373 - DNA, 15 bp, Homo sapiens
cttttttgaagcaac

SEQ ID NO: 314374 - DNA, 15 bp, Homo sapiens
tcttttttgaagcaa

SEQ ID NO: 314375 - DNA, 15 bp, Homo sapiens
ttcttttttgaagca

SEQ ID NO: 314376 - DNA, 15 bp, Homo sapiens
attcttttttgaagc

SEQ ID NO: 314377 - DNA, 15 bp, Homo sapiens
cattcttttttgaag

SEQ ID NO: 314378 - DNA, 15 bp, Homo sapiens
ccattcttttttgaa

SEQ ID NO: 314379 - DNA, 15 bp, Homo sapiens
cccattcttttttga

SEQ ID NO: 314380 - DNA, 15 bp, Homo sapiens
ccccattcttttttg

SEQ ID NO: 314381 - DNA, 15 bp, Homo sapiens
tccccattctttttt

SEQ ID NO: 314382 - DNA, 15 bp, Homo sapiens
ttccccattcttttt

SEQ ID NO: 314383 - DNA, 15 bp, Homo sapiens
tttccccattctttt

SEQ ID NO: 314384 - DNA, 15 bp, Homo sapiens
ttttccccattcttt

SEQ ID NO: 314385 - DNA, 15 bp, Homo sapiens
tttttccccattctt

SEQ ID NO: 314386 - DNA, 15 bp, Homo sapiens
ttttttccccattct

SEQ ID NO: 314387 - DNA, 15 bp, Homo sapiens
gttttttccccattc

SEQ ID NO: 314388 - DNA, 15 bp, Homo sapiens
agttttttccccatt

SEQ ID NO: 314389 - DNA, 15 bp, Homo sapiens
gagttttttccccat

SEQ ID NO: 314390 - DNA, 15 bp, Homo sapiens
tgagttttttcccca

SEQ ID NO: 314391 - DNA, 15 bp, Homo sapiens
gtgagttttttcccc

SEQ ID NO: 314392 - DNA, 15 bp, Homo sapiens
tgtgagttttttccc

SEQ ID NO: 314393 - DNA, 15 bp, Homo sapiens
gtgtgagttttttcc

SEQ ID NO: 314394 - DNA, 15 bp, Homo sapiens
tgtgtgagttttttc

SEQ ID NO: 314395 - DNA, 15 bp, Homo sapiens
ttgtgtgagtttttt

SEQ ID NO: 314396 - DNA, 15 bp, Homo sapiens
gttgtgtgagttttt

SEQ ID NO: 314397 - DNA, 15 bp, Homo sapiens
tgttgtgtgagtttt

SEQ ID NO: 314398 - DNA, 15 bp, Homo sapiens
gtgttgtgtgagttt

SEQ ID NO: 314399 - DNA, 15 bp, Homo sapiens
tgtgttgtgtgagtt

SEQ ID NO: 314400 - DNA, 15 bp, Homo sapiens
ttgtgttgtgtgagt

SEQ ID NO: 314401 - DNA, 15 bp, Homo sapiens
tttgtgttgtgtgag

SEQ ID NO: 314402 - DNA, 15 bp, Homo sapiens
ctttgtgttgtgtga

SEQ ID NO: 314403 - DNA, 15 bp, Homo sapiens
actttgtgttgtgtg

SEQ ID NO: 314404 - DNA, 15 bp, Homo sapiens
aactttgtgttgtgt

SEQ ID NO: 314405 - DNA, 15 bp, Homo sapiens
aaactttgtgttgtg

SEQ ID NO: 314406 - DNA, 15 bp, Homo sapiens
taaactttgtgttgt

SEQ ID NO: 314407 - DNA, 15 bp, Homo sapiens
ataaactttgtgttg

SEQ ID NO: 314408 - DNA, 15 bp, Homo sapiens
tataaactttgtgtt

SEQ ID NO: 314409 - DNA, 15 bp, Homo sapiens
ttataaactttgtgt

SEQ ID NO: 314410 - DNA, 15 bp, Homo sapiens
tttataaactttgtg

SEQ ID NO: 314411 - DNA, 15 bp, Homo sapiens
ttttataaactttgt

SEQ ID NO: 314412 - DNA, 15 bp, Homo sapiens
attttataaactttg

SEQ ID NO: 314413 - DNA, 15 bp, Homo sapiens
cattttataaacttt

SEQ ID NO: 314414 - DNA, 15 bp, Homo sapiens
acattttataaactt

SEQ ID NO: 314415 - DNA, 15 bp, Homo sapiens
cacattttataaact

SEQ ID NO: 314416 - DNA, 15 bp, Homo sapiens
ccacattttataaac

SEQ ID NO: 314417 - DNA, 15 bp, Homo sapiens
accacattttataaa

SEQ ID NO: 314418 - DNA, 15 bp, Homo sapiens
aaccacattttataa

SEQ ID NO: 314419 - DNA, 15 bp, Homo sapiens
taaccacattttata

SEQ ID NO: 314420 - DNA, 15 bp, Homo sapiens
ataaccacattttat

SEQ ID NO: 314421 - DNA, 15 bp, Homo sapiens
aataaccacatttta

SEQ ID NO: 314422 - DNA, 15 bp, Homo sapiens
aaataaccacatttt

SEQ ID NO: 314423 - DNA, 15 bp, Homo sapiens
aaaataaccacattt

SEQ ID NO: 314424 - DNA, 15 bp, Homo sapiens
aaaaataaccacatt

SEQ ID NO: 314425 - DNA, 15 bp, Homo sapiens
taaaaataaccacat

SEQ ID NO: 314426 - DNA, 15 bp, Homo sapiens
ttaaaaataaccaca

SEQ ID NO: 314427 - DNA, 15 bp, Homo sapiens
attaaaaataaccac

SEQ ID NO: 314428 - DNA, 15 bp, Homo sapiens
cattaaaaataacca

SEQ ID NO: 314429 - DNA, 15 bp, Homo sapiens
ccattaaaaataacc

SEQ ID NO: 314430 - DNA, 15 bp, Homo sapiens
tccattaaaaataac

SEQ ID NO: 314431 - DNA, 15 bp, Homo sapiens
atccattaaaaataa

SEQ ID NO: 314432 - DNA, 15 bp, Homo sapiens
tatccattaaaaata

SEQ ID NO: 314433 - DNA, 15 bp, Homo sapiens
ttatccattaaaaat

SEQ ID NO: 314434 - DNA, 15 bp, Homo sapiens
attatccattaaaaa

SEQ ID NO: 314435 - DNA, 15 bp, Homo sapiens
cattatccattaaaa

SEQ ID NO: 314436 - DNA, 15 bp, Homo sapiens
acattatccattaaa

SEQ ID NO: 314437 - DNA, 15 bp, Homo sapiens
gacattatccattaa

SEQ ID NO: 314438 - DNA, 15 bp, Homo sapiens
agacattatccatta

SEQ ID NO: 314439 - DNA, 15 bp, Homo sapiens
aagacattatccatt

SEQ ID NO: 314440 - DNA, 15 bp, Homo sapiens
aaagacattatccat

SEQ ID NO: 314441 - DNA, 15 bp, Homo sapiens
taaagacattatcca

SEQ ID NO: 314442 - DNA, 15 bp, Homo sapiens
ctaaagacattatcc

SEQ ID NO: 314443 - DNA, 15 bp, Homo sapiens
gctaaagacattatc

SEQ ID NO: 314444 - DNA, 15 bp, Homo sapiens
ggctaaagacattat

SEQ ID NO: 314445 - DNA, 15 bp, Homo sapiens
aggctaaagacatta

SEQ ID NO: 314446 - DNA, 15 bp, Homo sapiens
taggctaaagacatt

SEQ ID NO: 314447 - DNA, 15 bp, Homo sapiens
ttaggctaaagacat

SEQ ID NO: 314448 - DNA, 15 bp, Homo sapiens
tttaggctaaagaca

SEQ ID NO: 314449 - DNA, 15 bp, Homo sapiens
gtttaggctaaagac

SEQ ID NO: 314450 - DNA, 15 bp, Homo sapiens
ggtttaggctaaaga

SEQ ID NO: 314451 - DNA, 15 bp, Homo sapiens
aggtttaggctaaag

SEQ ID NO: 314452 - DNA, 15 bp, Homo sapiens
caggtttaggctaaa

SEQ ID NO: 314453 - DNA, 15 bp, Homo sapiens
acaggtttaggctaa

SEQ ID NO: 314454 - DNA, 15 bp, Homo sapiens
cacaggtttaggcta

SEQ ID NO: 314455 - DNA, 15 bp, Homo sapiens
acacaggtttaggct

SEQ ID NO: 314456 - DNA, 15 bp, Homo sapiens
aacacaggtttaggc

SEQ ID NO: 314457 - DNA, 15 bp, Homo sapiens
caacacaggtttagg

SEQ ID NO: 314458 - DNA, 15 bp, Homo sapiens
acaacacaggtttag

SEQ ID NO: 314459 - DNA, 15 bp, Homo sapiens
aacaacacaggttta

SEQ ID NO: 314460 - DNA, 15 bp, Homo sapiens
taacaacacaggttt

SEQ ID NO: 314461 - DNA, 15 bp, Homo sapiens
ctaacaacacaggtt

SEQ ID NO: 314462 - DNA, 15 bp, Homo sapiens
cctaacaacacaggt

SEQ ID NO: 314463 - DNA, 15 bp, Homo sapiens
tcctaacaacacagg

SEQ ID NO: 314464 - DNA, 15 bp, Homo sapiens
ctcctaacaacacag

SEQ ID NO: 314465 - DNA, 15 bp, Homo sapiens
cctcctaacaacaca

SEQ ID NO: 314466 - DNA, 15 bp, Homo sapiens
tcctcctaacaacac

SEQ ID NO: 314467 - DNA, 15 bp, Homo sapiens
ttcctcctaacaaca

SEQ ID NO: 314468 - DNA, 15 bp, Homo sapiens
cttcctcctaacaac

SEQ ID NO: 314469 - DNA, 15 bp, Homo sapiens
ccttcctcctaacaa

SEQ ID NO: 314470 - DNA, 15 bp, Homo sapiens
cccttcctcctaaca

SEQ ID NO: 314471 - DNA, 15 bp, Homo sapiens
acccttcctcctaac

SEQ ID NO: 314472 - DNA, 15 bp, Homo sapiens
cacccttcctcctaa

SEQ ID NO: 314473 - DNA, 15 bp, Homo sapiens
acacccttcctccta

SEQ ID NO: 314474 - DNA, 15 bp, Homo sapiens
cacacccttcctcct

SEQ ID NO: 314475 - DNA, 15 bp, Homo sapiens
gcacacccttcctcc

SEQ ID NO: 314476 - DNA, 15 bp, Homo sapiens
ggcacacccttcctc

SEQ ID NO: 314477 - DNA, 15 bp, Homo sapiens
cggcacacccttcct

SEQ ID NO: 314478 - DNA, 15 bp, Homo sapiens
acggcacacccttcc

SEQ ID NO: 314479 - DNA, 15 bp, Homo sapiens
aacggcacacccttc

SEQ ID NO: 314480 - DNA, 15 bp, Homo sapiens
caacggcacaccctt

SEQ ID NO: 314481 - DNA, 15 bp, Homo sapiens
gcaacggcacaccct

SEQ ID NO: 314482 - DNA, 15 bp, Homo sapiens
agcaacggcacaccc

SEQ ID NO: 314483 - DNA, 15 bp, Homo sapiens
gagcaacggcacacc

SEQ ID NO: 314484 - DNA, 15 bp, Homo sapiens
tgagcaacggcacac

SEQ ID NO: 314485 - DNA, 15 bp, Homo sapiens
ttgagcaacggcaca

SEQ ID NO: 314486 - DNA, 15 bp, Homo sapiens
cttgagcaacggcac

SEQ ID NO: 314487 - DNA, 15 bp, Homo sapiens
ccttgagcaacggca

SEQ ID NO: 314488 - DNA, 15 bp, Homo sapiens
accttgagcaacggc

SEQ ID NO: 314489 - DNA, 15 bp, Homo sapiens
aaccttgagcaacgg

SEQ ID NO: 314490 - DNA, 15 bp, Homo sapiens
taaccttgagcaacg

SEQ ID NO: 314491 - DNA, 15 bp, Homo sapiens
ataaccttgagcaac

SEQ ID NO: 314492 - DNA, 15 bp, Homo sapiens
aataaccttgagcaa

SEQ ID NO: 314493 - DNA, 15 bp, Homo sapiens
taataaccttgagca

SEQ ID NO: 314494 - DNA, 15 bp, Homo sapiens
gtaataaccttgagc

SEQ ID NO: 314495 - DNA, 15 bp, Homo sapiens
ggtaataaccttgag

SEQ ID NO: 314496 - DNA, 15 bp, Homo sapiens
tggtaataaccttga

SEQ ID NO: 314497 - DNA, 15 bp, Homo sapiens
gtggtaataaccttg

SEQ ID NO: 314498 - DNA, 15 bp, Homo sapiens
tgtggtaataacctt

SEQ ID NO: 314499 - DNA, 15 bp, Homo sapiens
ctgtggtaataacct

SEQ ID NO: 314500 - DNA, 15 bp, Homo sapiens
actgtggtaataacc

SEQ ID NO: 314501 - DNA, 15 bp, Homo sapiens
aactgtggtaataac

SEQ ID NO: 314502 - DNA, 15 bp, Homo sapiens
gaactgtggtaataa

SEQ ID NO: 314503 - DNA, 15 bp, Homo sapiens
agaactgtggtaata

SEQ ID NO: 314504 - DNA, 15 bp, Homo sapiens
aagaactgtggtaat

SEQ ID NO: 314505 - DNA, 15 bp, Homo sapiens
caagaactgtggtaa

SEQ ID NO: 314506 - DNA, 15 bp, Homo sapiens
gcaagaactgtggta

SEQ ID NO: 314507 - DNA, 15 bp, Homo sapiens
tgcaagaactgtggt

SEQ ID NO: 314508 - DNA, 15 bp, Homo sapiens
ctgcaagaactgtgg

SEQ ID NO: 314509 - DNA, 15 bp, Homo sapiens
gctgcaagaactgtg

SEQ ID NO: 314510 - DNA, 15 bp, Homo sapiens
tgctgcaagaactgt

SEQ ID NO: 314511 - DNA, 15 bp, Homo sapiens
atgctgcaagaactg

SEQ ID NO: 314512 - DNA, 15 bp, Homo sapiens
catgctgcaagaact

SEQ ID NO: 314513 - DNA, 15 bp, Homo sapiens
ccatgctgcaagaac

SEQ ID NO: 314514 - DNA, 15 bp, Homo sapiens
cccatgctgcaagaa

SEQ ID NO: 314515 - DNA, 15 bp, Homo sapiens
ccccatgctgcaaga

SEQ ID NO: 314516 - DNA, 15 bp, Homo sapiens
accccatgctgcaag

SEQ ID NO: 314517 - DNA, 15 bp, Homo sapiens
caccccatgctgcaa

SEQ ID NO: 314518 - DNA, 15 bp, Homo sapiens
tcaccccatgctgca

SEQ ID NO: 314519 - DNA, 15 bp, Homo sapiens
ctcaccccatgctgc

SEQ ID NO: 314520 - DNA, 15 bp, Homo sapiens
tctcaccccatgctg

SEQ ID NO: 314521 - DNA, 15 bp, Homo sapiens
ctctcaccccatgct

SEQ ID NO: 314522 - DNA, 15 bp, Homo sapiens
actctcaccccatgc

SEQ ID NO: 314523 - DNA, 15 bp, Homo sapiens
tactctcaccccatg

SEQ ID NO: 314524 - DNA, 15 bp, Homo sapiens
atactctcaccccat

SEQ ID NO: 314525 - DNA, 15 bp, Homo sapiens
catactctcacccca

SEQ ID NO: 314526 - DNA, 15 bp, Homo sapiens
tcatactctcacccc

SEQ ID NO: 314527 - DNA, 15 bp, Homo sapiens
ctcatactctcaccc

SEQ ID NO: 314528 - DNA, 15 bp, Homo sapiens
cctcatactctcacc

SEQ ID NO: 314529 - DNA, 15 bp, Homo sapiens
tcctcatactctcac

SEQ ID NO: 314530 - DNA, 15 bp, Homo sapiens
atcctcatactctca

SEQ ID NO: 314531 - DNA, 15 bp, Homo sapiens
aatcctcatactctc

SEQ ID NO: 314532 - DNA, 15 bp, Homo sapiens
taatcctcatactct

SEQ ID NO: 314533 - DNA, 15 bp, Homo sapiens
gtaatcctcatactc

SEQ ID NO: 314534 - DNA, 15 bp, Homo sapiens
agtaatcctcatact

SEQ ID NO: 314535 - DNA, 15 bp, Homo sapiens
aagtaatcctcatac

SEQ ID NO: 314536 - DNA, 15 bp, Homo sapiens
taagtaatcctcata

SEQ ID NO: 314537 - DNA, 15 bp, Homo sapiens
ataagtaatcctcat

SEQ ID NO: 314538 - DNA, 15 bp, Homo sapiens
aataagtaatcctca

SEQ ID NO: 314539 - DNA, 15 bp, Homo sapiens
taataagtaatcctc

SEQ ID NO: 314540 - DNA, 15 bp, Homo sapiens
gtaataagtaatcct

SEQ ID NO: 314541 - DNA, 15 bp, Homo sapiens
tgtaataagtaatcc

SEQ ID NO: 314542 - DNA, 15 bp, Homo sapiens
gtgtaataagtaatc

SEQ ID NO: 314543 - DNA, 15 bp, Homo sapiens
agtgtaataagtaat

SEQ ID NO: 314544 - DNA, 15 bp, Homo sapiens
aagtgtaataagtaa

SEQ ID NO: 314545 - DNA, 15 bp, Homo sapiens
taagtgtaataagta

SEQ ID NO: 314546 - DNA, 15 bp, Homo sapiens
gtaagtgtaataagt

SEQ ID NO: 314547 - DNA, 15 bp, Homo sapiens
cgtaagtgtaataag

SEQ ID NO: 314548 - DNA, 15 bp, Homo sapiens
gcgtaagtgtaataa

SEQ ID NO: 314549 - DNA, 15 bp, Homo sapiens
tgcgtaagtgtaata

SEQ ID NO: 314550 - DNA, 15 bp, Homo sapiens
atgcgtaagtgtaat

SEQ ID NO: 314551 - DNA, 15 bp, Homo sapiens
aatgcgtaagtgtaa

SEQ ID NO: 314552 - DNA, 15 bp, Homo sapiens
caatgcgtaagtgta

SEQ ID NO: 314553 - DNA, 15 bp, Homo sapiens
ccaatgcgtaagtgt

SEQ ID NO: 314554 - DNA, 15 bp, Homo sapiens
gccaatgcgtaagtg

SEQ ID NO: 314555 - DNA, 15 bp, Homo sapiens
agccaatgcgtaagt

SEQ ID NO: 314556 - DNA, 15 bp, Homo sapiens
cagccaatgcgtaag

SEQ ID NO: 314557 - DNA, 15 bp, Homo sapiens
ccagccaatgcgtaa

SEQ ID NO: 314558 - DNA, 15 bp, Homo sapiens
gccagccaatgcgta

SEQ ID NO: 314559 - DNA, 15 bp, Homo sapiens
ggccagccaatgcgt

SEQ ID NO: 314560 - DNA, 15 bp, Homo sapiens
tggccagccaatgcg

SEQ ID NO: 314561 - DNA, 15 bp, Homo sapiens
ctggccagccaatgc

SEQ ID NO: 314562 - DNA, 15 bp, Homo sapiens
cctggccagccaatg

SEQ ID NO: 314563 - DNA, 15 bp, Homo sapiens
gcctggccagccaat

SEQ ID NO: 314564 - DNA, 15 bp, Homo sapiens
agcctggccagccaa

SEQ ID NO: 314565 - DNA, 15 bp, Homo sapiens
tagcctggccagcca

SEQ ID NO: 314566 - DNA, 15 bp, Homo sapiens
gtagcctggccagcc

SEQ ID NO: 314567 - DNA, 15 bp, Homo sapiens
ggtagcctggccagc

SEQ ID NO: 314568 - DNA, 15 bp, Homo sapiens
tggtagcctggccag

SEQ ID NO: 314569 - DNA, 15 bp, Homo sapiens
atggtagcctggcca

SEQ ID NO: 314570 - DNA, 15 bp, Homo sapiens
tatggtagcctggcc

SEQ ID NO: 314571 - DNA, 15 bp, Homo sapiens
atatggtagcctggc

SEQ ID NO: 314572 - DNA, 15 bp, Homo sapiens
gatatggtagcctgg

SEQ ID NO: 314573 - DNA, 15 bp, Homo sapiens
ggatatggtagcctg

SEQ ID NO: 314574 - DNA, 15 bp, Homo sapiens
tggatatggtagcct

SEQ ID NO: 314575 - DNA, 15 bp, Homo sapiens
gtggatatggtagcc

SEQ ID NO: 314576 - DNA, 15 bp, Homo sapiens
tgtggatatggtagc

SEQ ID NO: 314577 - DNA, 15 bp, Homo sapiens
ttgtggatatggtag

SEQ ID NO: 314578 - DNA, 15 bp, Homo sapiens
gttgtggatatggta

SEQ ID NO: 314579 - DNA, 15 bp, Homo sapiens
agttgtggatatggt

SEQ ID NO: 314580 - DNA, 15 bp, Homo sapiens
tagttgtggatatgg

SEQ ID NO: 314581 - DNA, 15 bp, Homo sapiens
gtagttgtggatatg

SEQ ID NO: 314582 - DNA, 15 bp, Homo sapiens
tgtagttgtggatat

SEQ ID NO: 314583 - DNA, 15 bp, Homo sapiens
gtgtagttgtggata

SEQ ID NO: 314584 - DNA, 15 bp, Homo sapiens
tgtgtagttgtggat

SEQ ID NO: 314585 - DNA, 15 bp, Homo sapiens
ctgtgtagttgtgga

SEQ ID NO: 314586 - DNA, 15 bp, Homo sapiens
actgtgtagttgtgg

SEQ ID NO: 314587 - DNA, 15 bp, Homo sapiens
gactgtgtagttgtg

SEQ ID NO: 314588 - DNA, 15 bp, Homo sapiens
ggactgtgtagttgt

SEQ ID NO: 314589 - DNA, 15 bp, Homo sapiens
aggactgtgtagttg

SEQ ID NO: 314590 - DNA, 15 bp, Homo sapiens
gaggactgtgtagtt

SEQ ID NO: 314591 - DNA, 15 bp, Homo sapiens
ggaggactgtgtagt

SEQ ID NO: 314592 - DNA, 15 bp, Homo sapiens
gggaggactgtgtag

SEQ ID NO: 314593 - DNA, 15 bp, Homo sapiens
agggaggactgtgta

SEQ ID NO: 314594 - DNA, 15 bp, Homo sapiens
aagggaggactgtgt

SEQ ID NO: 314595 - DNA, 15 bp, Homo sapiens
gaagggaggactgtg

SEQ ID NO: 314596 - DNA, 15 bp, Homo sapiens
ggaagggaggactgt

SEQ ID NO: 314597 - DNA, 15 bp, Homo sapiens
aggaagggaggactg

SEQ ID NO: 314598 - DNA, 15 bp, Homo sapiens
gaggaagggaggact

SEQ ID NO: 314599 - DNA, 15 bp, Homo sapiens
ggaggaagggaggac

SEQ ID NO: 314600 - DNA, 15 bp, Homo sapiens
gggaggaagggagga

SEQ ID NO: 314601 - DNA, 15 bp, Homo sapiens
tgagggagggaggaa

SEQ ID NO: 314602 - DNA, 15 bp, Homo sapiens
ttgagggagggagga

SEQ ID NO: 314603 - DNA, 15 bp, Homo sapiens
tttgagggagggagg

SEQ ID NO: 314604 - DNA, 15 bp, Homo sapiens
ctttgagggagggag

SEQ ID NO: 314605 - DNA, 15 bp, Homo sapiens
tctttgagggaggga

SEQ ID NO: 314606 - DNA, 15 bp, Homo sapiens
ctctttgagggaggg

SEQ ID NO: 314607 - DNA, 15 bp, Homo sapiens
tctctttgagggagg

SEQ ID NO: 314608 - DNA, 15 bp, Homo sapiens
ctctctttgagggag

SEQ ID NO: 314609 - DNA, 15 bp, Homo sapiens
gctctctttgaggga

SEQ ID NO: 314610 - DNA, 15 bp, Homo sapiens
agctctctttgaggg

SEQ ID NO: 314611 - DNA, 15 bp, Homo sapiens
tagctctctttgagg

SEQ ID NO: 314612 - DNA, 15 bp, Homo sapiens
atagctctctttgag

SEQ ID NO: 314613 - DNA, 15 bp, Homo sapiens
gatagctctctttga

SEQ ID NO: 314614 - DNA, 15 bp, Homo sapiens
tgatagctctctttg

SEQ ID NO: 314615 - DNA, 15 bp, Homo sapiens
gtgatagctctcttt

SEQ ID NO: 314616 - DNA, 15 bp, Homo sapiens
ggtgatagctctctt

SEQ ID NO: 314617 - DNA, 15 bp, Homo sapiens
aggtgatagctctct

SEQ ID NO: 314618 - DNA, 15 bp, Homo sapiens
aaggtgatagctctc

SEQ ID NO: 314619 - DNA, 15 bp, Homo sapiens
caaggtgatagctct

SEQ ID NO: 314620 - DNA, 15 bp, Homo sapiens
tcaaggtgatagctc

SEQ ID NO: 314621 - DNA, 15 bp, Homo sapiens
ttcaaggtgatagct

SEQ ID NO: 314622 - DNA, 15 bp, Homo sapiens
gttcaaggtgatagc

SEQ ID NO: 314623 - DNA, 15 bp, Homo sapiens
agttcaaggtgatag

SEQ ID NO: 314624 - DNA, 15 bp, Homo sapiens
gagttcaaggtgata

SEQ ID NO: 314625 - DNA, 15 bp, Homo sapiens
ggagttcaaggtgat

SEQ ID NO: 314626 - DNA, 15 bp, Homo sapiens
aggagttcaaggtga

SEQ ID NO: 314627 - DNA, 15 bp, Homo sapiens
aaggagttcaaggtg

SEQ ID NO: 314628 - DNA, 15 bp, Homo sapiens
gaaggagttcaaggt

SEQ ID NO: 314629 - DNA, 15 bp, Homo sapiens
agaaggagttcaagg

SEQ ID NO: 314630 - DNA, 15 bp, Homo sapiens
aagaaggagttcaag

SEQ ID NO: 314631 - DNA, 15 bp, Homo sapiens
gaagaaggagttcaa

SEQ ID NO: 314632 - DNA, 15 bp, Homo sapiens
ggaagaaggagttca

SEQ ID NO: 314633 - DNA, 15 bp, Homo sapiens
gggaagaaggagttc

SEQ ID NO: 314634 - DNA, 15 bp, Homo sapiens
agggaagaaggagtt

SEQ ID NO: 314635 - DNA, 15 bp, Homo sapiens
aagggaagaaggagt

SEQ ID NO: 314636 - DNA, 15 bp, Homo sapiens
caagggaagaaggag

SEQ ID NO: 314637 - DNA, 15 bp, Homo sapiens
tcaagggaagaagga

SEQ ID NO: 314638 - DNA, 15 bp, Homo sapiens
ttcaagggaagaagg

SEQ ID NO: 314639 - DNA, 15 bp, Homo sapiens
tttcaagggaagaag

SEQ ID NO: 314640 - DNA, 15 bp, Homo sapiens
atttcaagggaagaa

SEQ ID NO: 314641 - DNA, 15 bp, Homo sapiens
tatttcaagggaaga

SEQ ID NO: 314642 - DNA, 15 bp, Homo sapiens
ttatttcaagggaag

SEQ ID NO: 314643 - DNA, 15 bp, Homo sapiens
tttatttcaagggaa

SEQ ID NO: 314644 - DNA, 15 bp, Homo sapiens
ttttatttcaaggga

SEQ ID NO: 314645 - DNA, 15 bp, Homo sapiens
gttttatttcaaggg

SEQ ID NO: 314646 - DNA, 15 bp, Homo sapiens
ggttttatttcaagg

SEQ ID NO: 314647 - DNA, 15 bp, Homo sapiens
aggttttatttcaag

SEQ ID NO: 314648 - DNA, 15 bp, Homo sapiens
caggttttatttcaa

SEQ ID NO: 314649 - DNA, 15 bp, Homo sapiens
ccaggttttatttca

SEQ ID NO: 314650 - DNA, 15 bp, Homo sapiens
cccaggttttatttc

SEQ ID NO: 314651 - DNA, 15 bp, Homo sapiens
gcccaggttttattt

SEQ ID NO: 314652 - DNA, 15 bp, Homo sapiens
tgcccaggttttatt

SEQ ID NO: 314653 - DNA, 15 bp, Homo sapiens
ttgcccaggttttat

SEQ ID NO: 314654 - DNA, 15 bp, Homo sapiens
gttgcccaggtttta

SEQ ID NO: 314655 - DNA, 15 bp, Homo sapiens
agttgcccaggtttt

SEQ ID NO: 314656 - DNA, 15 bp, Homo sapiens
tagttgcccaggttt

SEQ ID NO: 314657 - DNA, 15 bp, Homo sapiens
gtagttgcccaggtt

SEQ ID NO: 314658 - DNA, 15 bp, Homo sapiens
ggtagttgcccaggt

SEQ ID NO: 314659 - DNA, 15 bp, Homo sapiens
cggtagttgcccagg

SEQ ID NO: 314660 - DNA, 15 bp, Homo sapiens
tcggtagttgcccag

SEQ ID NO: 314661 - DNA, 15 bp, Homo sapiens
ttcggtagttgccca

SEQ ID NO: 314662 - DNA, 15 bp, Homo sapiens
cttcggtagttgccc

SEQ ID NO: 314663 - DNA, 15 bp, Homo sapiens
gcttcggtagttgcc

SEQ ID NO: 314664 - DNA, 15 bp, Homo sapiens
agcttcggtagttgc

SEQ ID NO: 314665 - DNA, 15 bp, Homo sapiens
aagcttcggtagttg

SEQ ID NO: 314666 - DNA, 15 bp, Homo sapiens
caagcttcggtagtt

SEQ ID NO: 314667 - DNA, 15 bp, Homo sapiens
tcaagcttcggtagt

SEQ ID NO: 314668 - DNA, 15 bp, Homo sapiens
gtcaagcttcggtag

SEQ ID NO: 314669 - DNA, 15 bp, Homo sapiens
ggtcaagcttcggta

SEQ ID NO: 314670 - DNA, 15 bp, Homo sapiens
aggtcaagcttcggt

SEQ ID NO: 314671 - DNA, 15 bp, Homo sapiens
aaggtcaagcttcgg

SEQ ID NO: 314672 - DNA, 15 bp, Homo sapiens
caaggtcaagcttcg

SEQ ID NO: 314673 - DNA, 15 bp, Homo sapiens
tcaaggtcaagcttc

SEQ ID NO: 314674 - DNA, 15 bp, Homo sapiens
gtcaaggtcaagctt

SEQ ID NO: 314675 - DNA, 15 bp, Homo sapiens
agtcaaggtcaagct

SEQ ID NO: 314676 - DNA, 15 bp, Homo sapiens
gagtcaaggtcaagc

SEQ ID NO: 314677 - DNA, 15 bp, Homo sapiens
tgagtcaaggtcaag

SEQ ID NO: 314678 - DNA, 15 bp, Homo sapiens
atgagtcaaggtcaa

SEQ ID NO: 314679 - DNA, 15 bp, Homo sapiens
catgagtcaaggtca

SEQ ID NO: 314680 - DNA, 15 bp, Homo sapiens
gcatgagtcaaggtc

SEQ ID NO: 314681 - DNA, 15 bp, Homo sapiens
ggcatgagtcaaggt

SEQ ID NO: 314682 - DNA, 15 bp, Homo sapiens
aggcatgagtcaagg

SEQ ID NO: 314683 - DNA, 15 bp, Homo sapiens
aaggcatgagtcaag

SEQ ID NO: 314684 - DNA, 15 bp, Homo sapiens
taaggcatgagtcaa

SEQ ID NO: 314685 - DNA, 15 bp, Homo sapiens
ttaaggcatgagtca

SEQ ID NO: 314686 - DNA, 15 bp, Homo sapiens
tttaaggcatgagtc

SEQ ID NO: 314687 - DNA, 15 bp, Homo sapiens
gtttaaggcatgagt

SEQ ID NO: 314688 - DNA, 15 bp, Homo sapiens
ggtttaaggcatgag

SEQ ID NO: 314689 - DNA, 15 bp, Homo sapiens
aggtttaaggcatga

SEQ ID NO: 314690 - DNA, 15 bp, Homo sapiens
caggtttaaggcatg

SEQ ID NO: 314691 - DNA, 15 bp, Homo sapiens
tcaggtttaaggcat

SEQ ID NO: 314692 - DNA, 15 bp, Homo sapiens
ctcaggtttaaggca

SEQ ID NO: 314693 - DNA, 15 bp, Homo sapiens
gctcaggtttaaggc

SEQ ID NO: 314694 - DNA, 15 bp, Homo sapiens
tgctcaggtttaagg

SEQ ID NO: 314695 - DNA, 15 bp, Homo sapiens
gtgctcaggtttaag

SEQ ID NO: 314696 - DNA, 15 bp, Homo sapiens
tgtgctcaggtttaa

SEQ ID NO: 314697 - DNA, 15 bp, Homo sapiens
ttgtgctcaggttta

SEQ ID NO: 314698 - DNA, 15 bp, Homo sapiens
tttgtgctcaggttt

SEQ ID NO: 314699 - DNA, 15 bp, Homo sapiens
ttttgtgctcaggtt

SEQ ID NO: 314700 - DNA, 15 bp, Homo sapiens
gttttgtgctcaggt

SEQ ID NO: 314701 - DNA, 15 bp, Homo sapiens
agttttgtgctcagg

SEQ ID NO: 314702 - DNA, 15 bp, Homo sapiens
aagttttgtgctcag

SEQ ID NO: 314703 - DNA, 15 bp, Homo sapiens
taagttttgtgctca

SEQ ID NO: 314704 - DNA, 15 bp, Homo sapiens
ttaagttttgtgctc

SEQ ID NO: 314705 - DNA, 15 bp, Homo sapiens
gttaagttttgtgct

SEQ ID NO: 314706 - DNA, 15 bp, Homo sapiens
ggttaagttttgtgc

SEQ ID NO: 314707 - DNA, 15 bp, Homo sapiens
aggttaagttttgtg

SEQ ID NO: 314708 - DNA, 15 bp, Homo sapiens
gaggttaagttttgt

SEQ ID NO: 314709 - DNA, 15 bp, Homo sapiens
agaggttaagttttg

SEQ ID NO: 314710 - DNA, 15 bp, Homo sapiens
cagaggttaagtttt

SEQ ID NO: 314711 - DNA, 15 bp, Homo sapiens
gcagaggttaagttt

SEQ ID NO: 314712 - DNA, 15 bp, Homo sapiens
agcagaggttaagtt

SEQ ID NO: 314713 - DNA, 15 bp, Homo sapiens
cagcagaggttaagt

SEQ ID NO: 314714 - DNA, 15 bp, Homo sapiens
ccagcagaggttaag

SEQ ID NO: 314715 - DNA, 15 bp, Homo sapiens
cccagcagaggttaa

SEQ ID NO: 314716 - DNA, 15 bp, Homo sapiens
tcccagcagaggtta

SEQ ID NO: 314717 - DNA, 15 bp, Homo sapiens
ttcccagcagaggtt

SEQ ID NO: 314718 - DNA, 15 bp, Homo sapiens
tttcccagcagaggt

SEQ ID NO: 314719 - DNA, 15 bp, Homo sapiens
gtttcccagcagagg

SEQ ID NO: 314720 - DNA, 15 bp, Homo sapiens
ggtttcccagcagag

SEQ ID NO: 314721 - DNA, 15 bp, Homo sapiens
aggtttcccagcaga

SEQ ID NO: 314722 - DNA, 15 bp, Homo sapiens
aaggtttcccagcag

SEQ ID NO: 314723 - DNA, 15 bp, Homo sapiens
gaaggtttcccagca

SEQ ID NO: 314724 - DNA, 15 bp, Homo sapiens
ggaaggtttcccagc

SEQ ID NO: 314725 - DNA, 15 bp, Homo sapiens
aggaaggtttcccag

SEQ ID NO: 314726 - DNA, 15 bp, Homo sapiens
gaggaaggtttccca

SEQ ID NO: 314727 - DNA, 15 bp, Homo sapiens
ggaggaaggtttccc

SEQ ID NO: 314728 - DNA, 15 bp, Homo sapiens
gggaggaaggtttcc

SEQ ID NO: 314729 - DNA, 15 bp, Homo sapiens
agggaggaaggtttc

SEQ ID NO: 314730 - DNA, 15 bp, Homo sapiens
tagggaggaaggttt

SEQ ID NO: 314731 - DNA, 15 bp, Homo sapiens
atagggaggaaggtt

SEQ ID NO: 314732 - DNA, 15 bp, Homo sapiens
catagggaggaaggt

SEQ ID NO: 314733 - DNA, 15 bp, Homo sapiens
tcatagggaggaagg

SEQ ID NO: 314734 - DNA, 15 bp, Homo sapiens
ttcatagggaggaag

SEQ ID NO: 314735 - DNA, 15 bp, Homo sapiens
tttcatagggaggaa

SEQ ID NO: 314736 - DNA, 15 bp, Homo sapiens
gtttcatagggagga

SEQ ID NO: 314737 - DNA, 15 bp, Homo sapiens
tgtttcatagggagg

SEQ ID NO: 314738 - DNA, 15 bp, Homo sapiens
ttgtttcatagggag

SEQ ID NO: 314739 - DNA, 15 bp, Homo sapiens
tttgtttcataggga

SEQ ID NO: 314740 - DNA, 15 bp, Homo sapiens
ctttgtttcataggg

SEQ ID NO: 314741 - DNA, 15 bp, Homo sapiens
cctttgtttcatagg

SEQ ID NO: 314742 - DNA, 15 bp, Homo sapiens
ccctttgtttcatag

SEQ ID NO: 314743 - DNA, 15 bp, Homo sapiens
cccctttgtttcata

SEQ ID NO: 314744 - DNA, 15 bp, Homo sapiens
acccctttgtttcat

SEQ ID NO: 314745 - DNA, 15 bp, Homo sapiens
gacccctttgtttca

SEQ ID NO: 314746 - DNA, 15 bp, Homo sapiens
agacccctttgtttc

SEQ ID NO: 314747 - DNA, 15 bp, Homo sapiens
gagacccctttgttt

SEQ ID NO: 314748 - DNA, 15 bp, Homo sapiens
tgagacccctttgtt

SEQ ID NO: 314749 - DNA, 15 bp, Homo sapiens
ttgagacccctttgt

SEQ ID NO: 314750 - DNA, 15 bp, Homo sapiens
cttgagacccctttg

SEQ ID NO: 314751 - DNA, 15 bp, Homo sapiens
tcttgagaccccttt

SEQ ID NO: 314752 - DNA, 15 bp, Homo sapiens
gtcttgagacccctt

SEQ ID NO: 314753 - DNA, 15 bp, Homo sapiens
tgtcttgagacccct

SEQ ID NO: 314754 - DNA, 15 bp, Homo sapiens
ttgtcttgagacccc

SEQ ID NO: 314755 - DNA, 15 bp, Homo sapiens
gttgtcttgagaccc

SEQ ID NO: 314756 - DNA, 15 bp, Homo sapiens
agttgtcttgagacc

SEQ ID NO: 314757 - DNA, 15 bp, Homo sapiens
aagttgtcttgagac

SEQ ID NO: 314758 - DNA, 15 bp, Homo sapiens
gaagttgtcttgaga

SEQ ID NO: 314759 - DNA, 15 bp, Homo sapiens
agaagttgtcttgag

SEQ ID NO: 314760 - DNA, 15 bp, Homo sapiens
aagaagttgtcttga

SEQ ID NO: 314761 - DNA, 15 bp, Homo sapiens
taagaagttgtcttg

SEQ ID NO: 314762 - DNA, 15 bp, Homo sapiens
ctaagaagttgtctt

SEQ ID NO: 314763 - DNA, 15 bp, Homo sapiens
gctaagaagttgtct

SEQ ID NO: 314764 - DNA, 15 bp, Homo sapiens
tgctaagaagttgtc

SEQ ID NO: 314765 - DNA, 15 bp, Homo sapiens
ttgctaagaagttgt

SEQ ID NO: 314766 - DNA, 15 bp, Homo sapiens
cttgctaagaagttg

SEQ ID NO: 314767 - DNA, 15 bp, Homo sapiens
gcttgctaagaagtt

SEQ ID NO: 314768 - DNA, 15 bp, Homo sapiens
ggcttgctaagaagt

SEQ ID NO: 314769 - DNA, 15 bp, Homo sapiens
tggcttgctaagaag

SEQ ID NO: 314770 - DNA, 15 bp, Homo sapiens
ttggcttgctaagaa

SEQ ID NO: 314771 - DNA, 15 bp, Homo sapiens
tttggcttgctaaga

SEQ ID NO: 314772 - DNA, 15 bp, Homo sapiens
ttttggcttgctaag

SEQ ID NO: 314773 - DNA, 15 bp, Homo sapiens
tttttggcttgctaa

SEQ ID NO: 314774 - DNA, 15 bp, Homo sapiens
atttttggcttgcta

SEQ ID NO: 314775 - DNA, 15 bp, Homo sapiens
catttttggcttgct

SEQ ID NO: 314776 - DNA, 15 bp, Homo sapiens
tcatttttggcttgc

SEQ ID NO: 314777 - DNA, 15 bp, Homo sapiens
ctcatttttggcttg

SEQ ID NO: 314778 - DNA, 15 bp, Homo sapiens
tctcatttttggctt

SEQ ID NO: 314779 - DNA, 15 bp, Homo sapiens
atctcatttttggct

SEQ ID NO: 314780 - DNA, 15 bp, Homo sapiens
aatctcatttttggc

SEQ ID NO: 314781 - DNA, 15 bp, Homo sapiens
aaatctcatttttgg

SEQ ID NO: 314782 - DNA, 15 bp, Homo sapiens
gaaatctcatttttg

SEQ ID NO: 314783 - DNA, 15 bp, Homo sapiens
ggaaatctcattttt

SEQ ID NO: 314784 - DNA, 15 bp, Homo sapiens
tggaaatctcatttt

SEQ ID NO: 314785 - DNA, 15 bp, Homo sapiens
gtggaaatctcattt

SEQ ID NO: 314786 - DNA, 15 bp, Homo sapiens
agtggaaatctcatt

SEQ ID NO: 314787 - DNA, 15 bp, Homo sapiens
gagtggaaatctcat

SEQ ID NO: 314788 - DNA, 15 bp, Homo sapiens
tgagtggaaatctca

SEQ ID NO: 314789 - DNA, 15 bp, Homo sapiens
ctgagtggaaatctc

SEQ ID NO: 314790 - DNA, 15 bp, Homo sapiens
gctgagtggaaatct

SEQ ID NO: 314791 - DNA, 15 bp, Homo sapiens
agctgagtggaaatc

SEQ ID NO: 314792 - DNA, 15 bp, Homo sapiens
aagctgagtggaaat

SEQ ID NO: 314793 - DNA, 15 bp, Homo sapiens
gaagctgagtggaaa

SEQ ID NO: 314794 - DNA, 15 bp, Homo sapiens
agaagctgagtggaa

SEQ ID NO: 314795 - DNA, 15 bp, Homo sapiens
gagaagctgagtgga

SEQ ID NO: 314796 - DNA, 15 bp, Homo sapiens
tgagaagctgagtgg

SEQ ID NO: 314797 - DNA, 15 bp, Homo sapiens
ttgagaagctgagtg

SEQ ID NO: 314798 - DNA, 15 bp, Homo sapiens
cttgagaagctgagt

SEQ ID NO: 314799 - DNA, 15 bp, Homo sapiens
acttgagaagctgag

SEQ ID NO: 314800 - DNA, 15 bp, Homo sapiens
aacttgagaagctga

SEQ ID NO: 314801 - DNA, 15 bp, Homo sapiens
taacttgagaagctg

SEQ ID NO: 314802 - DNA, 15 bp, Homo sapiens
ctaacttgagaagct

SEQ ID NO: 314803 - DNA, 15 bp, Homo sapiens
gctaacttgagaagc

SEQ ID NO: 314804 - DNA, 15 bp, Homo sapiens
ggctaacttgagaag

SEQ ID NO: 314805 - DNA, 15 bp, Homo sapiens
aggctaacttgagaa

SEQ ID NO: 314806 - DNA, 15 bp, Homo sapiens
caggctaacttgaga

SEQ ID NO: 314807 - DNA, 15 bp, Homo sapiens
ccaggctaacttgag

SEQ ID NO: 314808 - DNA, 15 bp, Homo sapiens
gccaggctaacttga

SEQ ID NO: 314809 - DNA, 15 bp, Homo sapiens
agccaggctaacttg

SEQ ID NO: 314810 - DNA, 15 bp, Homo sapiens
aagccaggctaactt

SEQ ID NO: 314811 - DNA, 15 bp, Homo sapiens
aaagccaggctaact

SEQ ID NO: 314812 - DNA, 15 bp, Homo sapiens
caaagccaggctaac

SEQ ID NO: 314813 - DNA, 15 bp, Homo sapiens
tcaaagccaggctaa

SEQ ID NO: 314814 - DNA, 15 bp, Homo sapiens
gtcaaagccaggcta

SEQ ID NO: 314815 - DNA, 15 bp, Homo sapiens
ggtcaaagccaggct

SEQ ID NO: 314816 - DNA, 15 bp, Homo sapiens
gggtcaaagccaggc

SEQ ID NO: 314817 - DNA, 15 bp, Homo sapiens
ggggtcaaagccagg

SEQ ID NO: 314818 - DNA, 15 bp, Homo sapiens
tggggtcaaagccag

SEQ ID NO: 314819 - DNA, 15 bp, Homo sapiens
ctggggtcaaagcca

SEQ ID NO: 314820 - DNA, 15 bp, Homo sapiens
actggggtcaaagcc

SEQ ID NO: 314821 - DNA, 15 bp, Homo sapiens
aactggggtcaaagc

SEQ ID NO: 314822 - DNA, 15 bp, Homo sapiens
taactggggtcaaag

SEQ ID NO: 314823 - DNA, 15 bp, Homo sapiens
ataactggggtcaaa

SEQ ID NO: 314824 - DNA, 15 bp, Homo sapiens
cataactggggtcaa

SEQ ID NO: 314825 - DNA, 15 bp, Homo sapiens
ccataactggggtca

SEQ ID NO: 314826 - DNA, 15 bp, Homo sapiens
tccataactggggtc

SEQ ID NO: 314827 - DNA, 15 bp, Homo sapiens
ctccataactggggt

SEQ ID NO: 314828 - DNA, 15 bp, Homo sapiens
gctccataactgggg

SEQ ID NO: 314829 - DNA, 15 bp, Homo sapiens
agctccataactggg

SEQ ID NO: 314830 - DNA, 15 bp, Homo sapiens
tagctccataactgg

SEQ ID NO: 314831 - DNA, 15 bp, Homo sapiens
ctagctccataactg

SEQ ID NO: 314832 - DNA, 15 bp, Homo sapiens
tctagctccataact

SEQ ID NO: 314833 - DNA, 15 bp, Homo sapiens
ctctagctccataac

SEQ ID NO: 314834 - DNA, 15 bp, Homo sapiens
tctctagctccataa

SEQ ID NO: 314835 - DNA, 15 bp, Homo sapiens
ctctctagctccata

SEQ ID NO: 314836 - DNA, 15 bp, Homo sapiens
cctctctagctccat

SEQ ID NO: 314837 - DNA, 15 bp, Homo sapiens
ccctctctagctcca

SEQ ID NO: 314838 - DNA, 15 bp, Homo sapiens
cccctctctagctcc

SEQ ID NO: 314839 - DNA, 15 bp, Homo sapiens
tcccctctctagctc

SEQ ID NO: 314840 - DNA, 15 bp, Homo sapiens
ctcccctctctagct

SEQ ID NO: 314841 - DNA, 15 bp, Homo sapiens
tctcccctctctagc

SEQ ID NO: 314842 - DNA, 15 bp, Homo sapiens
ctctcccctctctag

SEQ ID NO: 314843 - DNA, 15 bp, Homo sapiens
cctctcccctctcta

SEQ ID NO: 314844 - DNA, 15 bp, Homo sapiens
tcctctcccctctct

SEQ ID NO: 314845 - DNA, 15 bp, Homo sapiens
ctcctctcccctctc

SEQ ID NO: 314846 - DNA, 15 bp, Homo sapiens
gctcctctcccctct

SEQ ID NO: 314847 - DNA, 15 bp, Homo sapiens
agctcctctcccctc

SEQ ID NO: 314848 - DNA, 15 bp, Homo sapiens
cagctcctctcccct

SEQ ID NO: 314849 - DNA, 15 bp, Homo sapiens
ccagctcctctcccc

SEQ ID NO: 314850 - DNA, 15 bp, Homo sapiens
cccagctcctctccc

SEQ ID NO: 314851 - DNA, 15 bp, Homo sapiens
tcccagctcctctcc

SEQ ID NO: 314852 - DNA, 15 bp, Homo sapiens
ctcccagctcctctc

SEQ ID NO: 314853 - DNA, 15 bp, Homo sapiens
gctcccagctcctct

SEQ ID NO: 314854 - DNA, 15 bp, Homo sapiens
tgctcccagctcctc

SEQ ID NO: 314855 - DNA, 15 bp, Homo sapiens
ttgctcccagctcct

SEQ ID NO: 314856 - DNA, 15 bp, Homo sapiens
tttgctcccagctcc

SEQ ID NO: 314857 - DNA, 15 bp, Homo sapiens
gtttgctcccagctc

SEQ ID NO: 314858 - DNA, 15 bp, Homo sapiens
agtttgctcccagct

SEQ ID NO: 314859 - DNA, 15 bp, Homo sapiens
tagtttgctcccagc

SEQ ID NO: 314860 - DNA, 15 bp, Homo sapiens
ctagtttgctcccag

SEQ ID NO: 314861 - DNA, 15 bp, Homo sapiens
cctagtttgctccca

SEQ ID NO: 314862 - DNA, 15 bp, Homo sapiens
tcctagtttgctccc

SEQ ID NO: 314863 - DNA, 15 bp, Homo sapiens
ttcctagtttgctcc

SEQ ID NO: 314864 - DNA, 15 bp, Homo sapiens
attcctagtttgctc

SEQ ID NO: 314865 - DNA, 15 bp, Homo sapiens
gattcctagtttgct

SEQ ID NO: 314866 - DNA, 15 bp, Homo sapiens
tgattcctagtttgc

SEQ ID NO: 314867 - DNA, 15 bp, Homo sapiens
atgattcctagtttg

SEQ ID NO: 314868 - DNA, 15 bp, Homo sapiens
catgattcctagttt

SEQ ID NO: 314869 - DNA, 15 bp, Homo sapiens
ccatgattcctagtt

SEQ ID NO: 314870 - DNA, 15 bp, Homo sapiens
tccatgattcctagt

SEQ ID NO: 314871 - DNA, 15 bp, Homo sapiens
ctccatgattcctag

SEQ ID NO: 314872 - DNA, 15 bp, Homo sapiens
cctccatgattccta

SEQ ID NO: 314873 - DNA, 15 bp, Homo sapiens
ccctccatgattcct

SEQ ID NO: 314874 - DNA, 15 bp, Homo sapiens
cccctccatgattcc

SEQ ID NO: 314875 - DNA, 15 bp, Homo sapiens
ccccctccatgattc

SEQ ID NO: 314876 - DNA, 15 bp, Homo sapiens
cccccctccatgatt

SEQ ID NO: 314877 - DNA, 15 bp, Homo sapiens
ccccccctccatgat

SEQ ID NO: 314878 - DNA, 15 bp, Homo sapiens
tccccccctccatga

SEQ ID NO: 314879 - DNA, 15 bp, Homo sapiens
gtccccccctccatg

SEQ ID NO: 314880 - DNA, 15 bp, Homo sapiens
agtccccccctccat

SEQ ID NO: 314881 - DNA, 15 bp, Homo sapiens
tagtccccccctcca

SEQ ID NO: 314882 - DNA, 15 bp, Homo sapiens
atagtccccccctcc

SEQ ID NO: 314883 - DNA, 15 bp, Homo sapiens
catagtccccccctc

SEQ ID NO: 314884 - DNA, 15 bp, Homo sapiens
ccatagtccccccct

SEQ ID NO: 314885 - DNA, 15 bp, Homo sapiens
cccatagtccccccc

SEQ ID NO: 314886 - DNA, 15 bp, Homo sapiens
ccccatagtcccccc

SEQ ID NO: 314887 - DNA, 15 bp, Homo sapiens
tccccatagtccccc

SEQ ID NO: 314888 - DNA, 15 bp, Homo sapiens
ttccccatagtcccc

SEQ ID NO: 314889 - DNA, 15 bp, Homo sapiens
attccccatagtccc

SEQ ID NO: 314890 - DNA, 15 bp, Homo sapiens
tattccccatagtcc

SEQ ID NO: 314891 - DNA, 15 bp, Homo sapiens
atattccccatagtc

SEQ ID NO: 314892 - DNA, 15 bp, Homo sapiens
gatattccccatagt

SEQ ID NO: 314893 - DNA, 15 bp, Homo sapiens
tgatattccccatag

SEQ ID NO: 314894 - DNA, 15 bp, Homo sapiens
ctgatattccccata

SEQ ID NO: 314895 - DNA, 15 bp, Homo sapiens
tctgatattccccat

SEQ ID NO: 314896 - DNA, 15 bp, Homo sapiens
atctgatattcccca

SEQ ID NO: 314897 - DNA, 15 bp, Homo sapiens
aatctgatattcccc

SEQ ID NO: 314898 - DNA, 15 bp, Homo sapiens
gaatctgatattccc

SEQ ID NO: 314899 - DNA, 15 bp, Homo sapiens
tgaatctgatattcc

SEQ ID NO: 314900 - DNA, 15 bp, Homo sapiens
gtgaatctgatattc

SEQ ID NO: 314901 - DNA, 15 bp, Homo sapiens
tgtgaatctgatatt

SEQ ID NO: 314902 - DNA, 15 bp, Homo sapiens
gtgtgaatctgatat

SEQ ID NO: 314903 - DNA, 15 bp, Homo sapiens
tgtgtgaatctgata

SEQ ID NO: 314904 - DNA, 15 bp, Homo sapiens
ttgtgtgaatctgat

SEQ ID NO: 314905 - DNA, 15 bp, Homo sapiens
gttgtgtgaatctga

SEQ ID NO: 314906 - DNA, 15 bp, Homo sapiens
agttgtgtgaatctg

SEQ ID NO: 314907 - DNA, 15 bp, Homo sapiens
gagttgtgtgaatct

SEQ ID NO: 314908 - DNA, 15 bp, Homo sapiens
agagttgtgtgaatc

SEQ ID NO: 314909 - DNA, 15 bp, Homo sapiens
gagagttgtgtgaat

SEQ ID NO: 314910 - DNA, 15 bp, Homo sapiens
tgagagttgtgtgaa

SEQ ID NO: 314911 - DNA, 15 bp, Homo sapiens
gtgagagttgtgtga

SEQ ID NO: 314912 - DNA, 15 bp, Homo sapiens
agtgagagttgtgtg

SEQ ID NO: 314913 - DNA, 15 bp, Homo sapiens
aagtgagagttgtgt

SEQ ID NO: 314914 - DNA, 15 bp, Homo sapiens
gaagtgagagttgtg

SEQ ID NO: 314915 - DNA, 15 bp, Homo sapiens
ggaagtgagagttgt

SEQ ID NO: 314916 - DNA, 15 bp, Homo sapiens
tggaagtgagagttg

SEQ ID NO: 314917 - DNA, 15 bp, Homo sapiens
atggaagtgagagtt

SEQ ID NO: 314918 - DNA, 15 bp, Homo sapiens
catggaagtgagagt

SEQ ID NO: 314919 - DNA, 15 bp, Homo sapiens
tcatggaagtgagag

SEQ ID NO: 314920 - DNA, 15 bp, Homo sapiens
ttcatggaagtgaga

SEQ ID NO: 314921 - DNA, 15 bp, Homo sapiens
tttcatggaagtgag

SEQ ID NO: 314922 - DNA, 15 bp, Homo sapiens
ttttcatggaagtga

SEQ ID NO: 314923 - DNA, 15 bp, Homo sapiens
cttttcatggaagtg

SEQ ID NO: 314924 - DNA, 15 bp, Homo sapiens
ccttttcatggaagt

SEQ ID NO: 314925 - DNA, 15 bp, Homo sapiens
cccttttcatggaag

SEQ ID NO: 314926 - DNA, 15 bp, Homo sapiens
ccccttttcatggaa

SEQ ID NO: 314927 - DNA, 15 bp, Homo sapiens
cccccttttcatgga

SEQ ID NO: 314928 - DNA, 15 bp, Homo sapiens
tcccccttttcatgg

SEQ ID NO: 314929 - DNA, 15 bp, Homo sapiens
ttcccccttttcatg

SEQ ID NO: 314930 - DNA, 15 bp, Homo sapiens
cttcccccttttcat

SEQ ID NO: 314931 - DNA, 15 bp, Homo sapiens
ccttcccccttttca

SEQ ID NO: 314932 - DNA, 15 bp, Homo sapiens
ccccttccccctttt

SEQ ID NO: 314933 - DNA, 15 bp, Homo sapiens
tccccttcccccttt

SEQ ID NO: 314934 - DNA, 15 bp, Homo sapiens
ctccccttccccctt

SEQ ID NO: 314935 - DNA, 15 bp, Homo sapiens
tctccccttccccct

SEQ ID NO: 314936 - DNA, 15 bp, Homo sapiens
ctctccccttccccc

SEQ ID NO: 314937 - DNA, 15 bp, Homo sapiens
tctctccccttcccc

SEQ ID NO: 314938 - DNA, 15 bp, Homo sapiens
ctctctccccttccc

SEQ ID NO: 314939 - DNA, 15 bp, Homo sapiens
tctctctccccttcc

SEQ ID NO: 314940 - DNA, 15 bp, Homo sapiens
ctctctctccccttc

SEQ ID NO: 314941 - DNA, 15 bp, Homo sapiens
cctctctctcccctt

SEQ ID NO: 314942 - DNA, 15 bp, Homo sapiens
tcctctctctcccct

SEQ ID NO: 314943 - DNA, 15 bp, Homo sapiens
ctcctctctctcccc

SEQ ID NO: 314944 - DNA, 15 bp, Homo sapiens
tctcctctctctccc

SEQ ID NO: 314945 - DNA, 15 bp, Homo sapiens
gtctcctctctctcc

SEQ ID NO: 314946 - DNA, 15 bp, Homo sapiens
agtctcctctctctc

SEQ ID NO: 314947 - DNA, 15 bp, Homo sapiens
gagtctcctctctct

SEQ ID NO: 314948 - DNA, 15 bp, Homo sapiens
ggagtctcctctctc

SEQ ID NO: 314949 - DNA, 15 bp, Homo sapiens
gggagtctcctctct

SEQ ID NO: 314950 - DNA, 15 bp, Homo sapiens
tgggagtctcctctc

SEQ ID NO: 314951 - DNA, 15 bp, Homo sapiens
atgggagtctcctct

SEQ ID NO: 314952 - DNA, 15 bp, Homo sapiens
catgggagtctcctc

SEQ ID NO: 314953 - DNA, 15 bp, Homo sapiens
ccatgggagtctcct

SEQ ID NO: 314954 - DNA, 15 bp, Homo sapiens
gccatgggagtctcc

SEQ ID NO: 314955 - DNA, 15 bp, Homo sapiens
ggccatgggagtctc

SEQ ID NO: 314956 - DNA, 15 bp, Homo sapiens
cggccatgggagtct

SEQ ID NO: 314957 - DNA, 15 bp, Homo sapiens
tcggccatgggagtc

SEQ ID NO: 314958 - DNA, 15 bp, Homo sapiens
ctcggccatgggagt

SEQ ID NO: 314959 - DNA, 15 bp, Homo sapiens
actcggccatgggag

SEQ ID NO: 314960 - DNA, 15 bp, Homo sapiens
cactcggccatggga

SEQ ID NO: 314961 - DNA, 15 bp, Homo sapiens
tcactcggccatggg

SEQ ID NO: 314962 - DNA, 15 bp, Homo sapiens
atcactcggccatgg

SEQ ID NO: 314963 - DNA, 15 bp, Homo sapiens
gatcactcggccatg

SEQ ID NO: 314964 - DNA, 15 bp, Homo sapiens
tgatcactcggccat

SEQ ID NO: 314965 - DNA, 15 bp, Homo sapiens
ctgatcactcggcca

SEQ ID NO: 314966 - DNA, 15 bp, Homo sapiens
cctgatcactcggcc

SEQ ID NO: 314967 - DNA, 15 bp, Homo sapiens
acctgatcactcggc

SEQ ID NO: 314968 - DNA, 15 bp, Homo sapiens
gacctgatcactcgg

SEQ ID NO: 314969 - DNA, 15 bp, Homo sapiens
ggacctgatcactcg

SEQ ID NO: 314970 - DNA, 15 bp, Homo sapiens
tggacctgatcactc

SEQ ID NO: 314971 - DNA, 15 bp, Homo sapiens
ctggacctgatcact

SEQ ID NO: 314972 - DNA, 15 bp, Homo sapiens
tctggacctgatcac

SEQ ID NO: 314973 - DNA, 15 bp, Homo sapiens
ctctggacctgatca

SEQ ID NO: 314974 - DNA, 15 bp, Homo sapiens
tctctggacctgatc

SEQ ID NO: 314975 - DNA, 15 bp, Homo sapiens
gtctctggacctgat

SEQ ID NO: 314976 - DNA, 15 bp, Homo sapiens
ggtctctggacctga

SEQ ID NO: 314977 - DNA, 15 bp, Homo sapiens
aggtctctggacctg

SEQ ID NO: 314978 - DNA, 15 bp, Homo sapiens
gaggtctctggacct

SEQ ID NO: 314979 - DNA, 15 bp, Homo sapiens
ggaggtctctggacc

SEQ ID NO: 314980 - DNA, 15 bp, Homo sapiens
aggaggtctctggac

SEQ ID NO: 314981 - DNA, 15 bp, Homo sapiens
aaggaggtctctgga

SEQ ID NO: 314982 - DNA, 15 bp, Homo sapiens
caaggaggtctctgg

SEQ ID NO: 314983 - DNA, 15 bp, Homo sapiens
acaaggaggtctctg

SEQ ID NO: 314984 - DNA, 15 bp, Homo sapiens
cacaaggaggtctct

SEQ ID NO: 314985 - DNA, 15 bp, Homo sapiens
ccacaaggaggtctc

SEQ ID NO: 314986 - DNA, 15 bp, Homo sapiens
accacaaggaggtct

SEQ ID NO: 314987 - DNA, 15 bp, Homo sapiens
gaccacaaggaggtc

SEQ ID NO: 314988 - DNA, 15 bp, Homo sapiens
ggaccacaaggaggt

SEQ ID NO: 314989 - DNA, 15 bp, Homo sapiens
tggaccacaaggagg

SEQ ID NO: 314990 - DNA, 15 bp, Homo sapiens
ctggaccacaaggag

SEQ ID NO: 314991 - DNA, 15 bp, Homo sapiens
cctggaccacaagga

SEQ ID NO: 314992 - DNA, 15 bp, Homo sapiens
gcctggaccacaagg

SEQ ID NO: 314993 - DNA, 15 bp, Homo sapiens
agcctggaccacaag

SEQ ID NO: 314994 - DNA, 15 bp, Homo sapiens
cagcctggaccacaa

SEQ ID NO: 314995 - DNA, 15 bp, Homo sapiens
gcagcctggaccaca

SEQ ID NO: 314996 - DNA, 15 bp, Homo sapiens
tgcagcctggaccac

SEQ ID NO: 314997 - DNA, 15 bp, Homo sapiens
gtgcagcctggacca

SEQ ID NO: 314998 - DNA, 15 bp, Homo sapiens
ggtgcagcctggacc

SEQ ID NO: 314999 - DNA, 15 bp, Homo sapiens
aggtgcagcctggac

SEQ ID NO: 315000 - DNA, 15 bp, Homo sapiens
caggtgcagcctgga

SEQ ID NO: 315001 - DNA, 15 bp, Homo sapiens
gcaggtgcagcctgg

SEQ ID NO: 315002 - DNA, 15 bp, Homo sapiens
tgcaggtgcagcctg

SEQ ID NO: 315003 - DNA, 15 bp, Homo sapiens
gtgcaggtgcagcct

SEQ ID NO: 315004 - DNA, 15 bp, Homo sapiens
ggtgcaggtgcagcc

SEQ ID NO: 315005 - DNA, 15 bp, Homo sapiens
tggtgcaggtgcagc

SEQ ID NO: 315006 - DNA, 15 bp, Homo sapiens
ctggtgcaggtgcag

SEQ ID NO: 315007 - DNA, 15 bp, Homo sapiens
actggtgcaggtgca

SEQ ID NO: 315008 - DNA, 15 bp, Homo sapiens
gactggtgcaggtgc

SEQ ID NO: 315009 - DNA, 15 bp, Homo sapiens
agactggtgcaggtg

SEQ ID NO: 315010 - DNA, 15 bp, Homo sapiens
cagactggtgcaggt

SEQ ID NO: 315011 - DNA, 15 bp, Homo sapiens
gcagactggtgcagg

SEQ ID NO: 315012 - DNA, 15 bp, Homo sapiens
agcagactggtgcag

SEQ ID NO: 315013 - DNA, 15 bp, Homo sapiens
aagcagactggtgca

SEQ ID NO: 315014 - DNA, 15 bp, Homo sapiens
caagcagactggtgc

SEQ ID NO: 315015 - DNA, 15 bp, Homo sapiens
tcaagcagactggtg

SEQ ID NO: 315016 - DNA, 15 bp, Homo sapiens
gtcaagcagactggt

SEQ ID NO: 315017 - DNA, 15 bp, Homo sapiens
ggtcaagcagactgg

SEQ ID NO: 315018 - DNA, 15 bp, Homo sapiens
aggtcaagcagactg

SEQ ID NO: 315019 - DNA, 15 bp, Homo sapiens
aaggtcaagcagact

SEQ ID NO: 315020 - DNA, 15 bp, Homo sapiens
caaggtcaagcagac

SEQ ID NO: 315021 - DNA, 15 bp, Homo sapiens
tcaaggtcaagcaga

SEQ ID NO: 315022 - DNA, 15 bp, Homo sapiens
ctcaaggtcaagcag

SEQ ID NO: 315023 - DNA, 15 bp, Homo sapiens
gctcaaggtcaagca

SEQ ID NO: 315024 - DNA, 15 bp, Homo sapiens
tgctcaaggtcaagc

SEQ ID NO: 315025 - DNA, 15 bp, Homo sapiens
ttgctcaaggtcaag

SEQ ID NO: 315026 - DNA, 15 bp, Homo sapiens
gttgctcaaggtcaa

SEQ ID NO: 315027 - DNA, 15 bp, Homo sapiens
tgttgctcaaggtca

SEQ ID NO: 315028 - DNA, 15 bp, Homo sapiens
ttgttgctcaaggtc

SEQ ID NO: 315029 - DNA, 15 bp, Homo sapiens
cttgttgctcaaggt

SEQ ID NO: 315030 - DNA, 15 bp, Homo sapiens
gcttgttgctcaagg

SEQ ID NO: 315031 - DNA, 15 bp, Homo sapiens
agcttgttgctcaag

SEQ ID NO: 315032 - DNA, 15 bp, Homo sapiens
tagcttgttgctcaa

SEQ ID NO: 315033 - DNA, 15 bp, Homo sapiens
atagcttgttgctca

SEQ ID NO: 315034 - DNA, 15 bp, Homo sapiens
tatagcttgttgctc

SEQ ID NO: 315035 - DNA, 15 bp, Homo sapiens
ctatagcttgttgct

SEQ ID NO: 315036 - DNA, 15 bp, Homo sapiens
actatagcttgttgc

SEQ ID NO: 315037 - DNA, 15 bp, Homo sapiens
gactatagcttgttg

SEQ ID NO: 315038 - DNA, 15 bp, Homo sapiens
agactatagcttgtt

SEQ ID NO: 315039 - DNA, 15 bp, Homo sapiens
gagactatagcttgt

SEQ ID NO: 315040 - DNA, 15 bp, Homo sapiens
agagactatagcttg

SEQ ID NO: 315041 - DNA, 15 bp, Homo sapiens
cagagactatagctt

SEQ ID NO: 315042 - DNA, 15 bp, Homo sapiens
tcagagactatagct

SEQ ID NO: 315043 - DNA, 15 bp, Homo sapiens
ttcagagactatagc

SEQ ID NO: 315044 - DNA, 15 bp, Homo sapiens
attcagagactatag

SEQ ID NO: 315045 - DNA, 15 bp, Homo sapiens
gattcagagactata

SEQ ID NO: 315046 - DNA, 15 bp, Homo sapiens
ggattcagagactat

SEQ ID NO: 315047 - DNA, 15 bp, Homo sapiens
aggattcagagacta

SEQ ID NO: 315048 - DNA, 15 bp, Homo sapiens
taggattcagagact

SEQ ID NO: 315049 - DNA, 15 bp, Homo sapiens
ataggattcagagac

SEQ ID NO: 315050 - DNA, 15 bp, Homo sapiens
gataggattcagaga

SEQ ID NO: 315051 - DNA, 15 bp, Homo sapiens
tgataggattcagag

SEQ ID NO: 315052 - DNA, 15 bp, Homo sapiens
gtgataggattcaga

SEQ ID NO: 315053 - DNA, 15 bp, Homo sapiens
ggtgataggattcag

SEQ ID NO: 315054 - DNA, 15 bp, Homo sapiens
gggtgataggattca

SEQ ID NO: 315055 - DNA, 15 bp, Homo sapiens
agggtgataggattc

SEQ ID NO: 315056 - DNA, 15 bp, Homo sapiens
gagggtgataggatt

SEQ ID NO: 315057 - DNA, 15 bp, Homo sapiens
tgagggtgataggat

SEQ ID NO: 315058 - DNA, 15 bp, Homo sapiens
gtgagggtgatagga

SEQ ID NO: 315059 - DNA, 15 bp, Homo sapiens
ggtgagggtgatagg

SEQ ID NO: 315060 - DNA, 15 bp, Homo sapiens
aggtgagggtgatag

SEQ ID NO: 315061 - DNA, 15 bp, Homo sapiens
taggtgagggtgata

SEQ ID NO: 315062 - DNA, 15 bp, Homo sapiens
ataggtgagggtgat

SEQ ID NO: 315063 - DNA, 15 bp, Homo sapiens
tataggtgagggtga

SEQ ID NO: 315064 - DNA, 15 bp, Homo sapiens
ttataggtgagggtg

SEQ ID NO: 315065 - DNA, 15 bp, Homo sapiens
attataggtgagggt

SEQ ID NO: 315066 - DNA, 15 bp, Homo sapiens
tattataggtgaggg

SEQ ID NO: 315067 - DNA, 15 bp, Homo sapiens
ttattataggtgagg

SEQ ID NO: 315068 - DNA, 15 bp, Homo sapiens
cttattataggtgag

SEQ ID NO: 315069 - DNA, 15 bp, Homo sapiens
ccttattataggtga

SEQ ID NO: 315070 - DNA, 15 bp, Homo sapiens
tccttattataggtg

SEQ ID NO: 315071 - DNA, 15 bp, Homo sapiens
ctccttattataggt

SEQ ID NO: 315072 - DNA, 15 bp, Homo sapiens
tctccttattatagg

SEQ ID NO: 315073 - DNA, 15 bp, Homo sapiens
atctccttattatag

SEQ ID NO: 315074 - DNA, 15 bp, Homo sapiens
catctccttattata

SEQ ID NO: 315075 - DNA, 15 bp, Homo sapiens
tcatctccttattat

SEQ ID NO: 315076 - DNA, 15 bp, Homo sapiens
ctcatctccttatta

SEQ ID NO: 315077 - DNA, 15 bp, Homo sapiens
gctcatctccttatt

SEQ ID NO: 315078 - DNA, 15 bp, Homo sapiens
agctcatctccttat

SEQ ID NO: 315079 - DNA, 15 bp, Homo sapiens
gagctcatctcctta

SEQ ID NO: 315080 - DNA, 15 bp, Homo sapiens
agagctcatctcctt

SEQ ID NO: 315081 - DNA, 15 bp, Homo sapiens
aagagctcatctcct

SEQ ID NO: 315082 - DNA, 15 bp, Homo sapiens
caagagctcatctcc

SEQ ID NO: 315083 - DNA, 15 bp, Homo sapiens
gcaagagctcatctc

SEQ ID NO: 315084 - DNA, 15 bp, Homo sapiens
ggcaagagctcatct

SEQ ID NO: 315085 - DNA, 15 bp, Homo sapiens
aggcaagagctcatc

SEQ ID NO: 315086 - DNA, 15 bp, Homo sapiens
aaggcaagagctcat

SEQ ID NO: 315087 - DNA, 15 bp, Homo sapiens
gaaggcaagagctca

SEQ ID NO: 315088 - DNA, 15 bp, Homo sapiens
tgaaggcaagagctc

SEQ ID NO: 315089 - DNA, 15 bp, Homo sapiens
gtgaaggcaagagct

SEQ ID NO: 315090 - DNA, 15 bp, Homo sapiens
agtgaaggcaagagc

SEQ ID NO: 315091 - DNA, 15 bp, Homo sapiens
tagtgaaggcaagag

SEQ ID NO: 315092 - DNA, 15 bp, Homo sapiens
gtagtgaaggcaaga

SEQ ID NO: 315093 - DNA, 15 bp, Homo sapiens
ggtagtgaaggcaag

SEQ ID NO: 315094 - DNA, 15 bp, Homo sapiens
aggtagtgaaggcaa

SEQ ID NO: 315095 - DNA, 15 bp, Homo sapiens
taggtagtgaaggca

SEQ ID NO: 315096 - DNA, 15 bp, Homo sapiens
ttaggtagtgaaggc

SEQ ID NO: 315097 - DNA, 15 bp, Homo sapiens
tttaggtagtgaagg

SEQ ID NO: 315098 - DNA, 15 bp, Homo sapiens
ctttaggtagtgaag

SEQ ID NO: 315099 - DNA, 15 bp, Homo sapiens
cctttaggtagtgaa

SEQ ID NO: 315100 - DNA, 15 bp, Homo sapiens
tcctttaggtagtga

SEQ ID NO: 315101 - DNA, 15 bp, Homo sapiens
ctcctttaggtagtg

SEQ ID NO: 315102 - DNA, 15 bp, Homo sapiens
actcctttaggtagt

SEQ ID NO: 315103 - DNA, 15 bp, Homo sapiens
aactcctttaggtag

SEQ ID NO: 315104 - DNA, 15 bp, Homo sapiens
taactcctttaggta

SEQ ID NO: 315105 - DNA, 15 bp, Homo sapiens
gtaactcctttaggt

SEQ ID NO: 315106 - DNA, 15 bp, Homo sapiens
agtaactcctttagg

SEQ ID NO: 315107 - DNA, 15 bp, Homo sapiens
cagtaactcctttag

SEQ ID NO: 315108 - DNA, 15 bp, Homo sapiens
acagtaactccttta

SEQ ID NO: 315109 - DNA, 15 bp, Homo sapiens
cacagtaactccttt

SEQ ID NO: 315110 - DNA, 15 bp, Homo sapiens
tcacagtaactcctt

SEQ ID NO: 315111 - DNA, 15 bp, Homo sapiens
ctcacagtaactcct

SEQ ID NO: 315112 - DNA, 15 bp, Homo sapiens
cctcacagtaactcc

SEQ ID NO: 315113 - DNA, 15 bp, Homo sapiens
tcctcacagtaactc

SEQ ID NO: 315114 - DNA, 15 bp, Homo sapiens
atcctcacagtaact

SEQ ID NO: 315115 - DNA, 15 bp, Homo sapiens
gatcctcacagtaac

SEQ ID NO: 315116 - DNA, 15 bp, Homo sapiens
tgatcctcacagtaa

SEQ ID NO: 315117 - DNA, 15 bp, Homo sapiens
ttgatcctcacagta

SEQ ID NO: 315118 - DNA, 15 bp, Homo sapiens
tttgatcctcacagt

SEQ ID NO: 315119 - DNA, 15 bp, Homo sapiens
ctttgatcctcacag

SEQ ID NO: 315120 - DNA, 15 bp, Homo sapiens
cctttgatcctcaca

SEQ ID NO: 315121 - DNA, 15 bp, Homo sapiens
ccctttgatcctcac

SEQ ID NO: 315122 - DNA, 15 bp, Homo sapiens
accctttgatcctca

SEQ ID NO: 315123 - DNA, 15 bp, Homo sapiens
gaccctttgatcctc

SEQ ID NO: 315124 - DNA, 15 bp, Homo sapiens
agaccctttgatcct

SEQ ID NO: 315125 - DNA, 15 bp, Homo sapiens
tagaccctttgatcc

SEQ ID NO: 315126 - DNA, 15 bp, Homo sapiens
atagaccctttgatc

SEQ ID NO: 315127 - DNA, 15 bp, Homo sapiens
aatagaccctttgat

SEQ ID NO: 315128 - DNA, 15 bp, Homo sapiens
taatagaccctttga

SEQ ID NO: 315129 - DNA, 15 bp, Homo sapiens
ataatagaccctttg

SEQ ID NO: 315130 - DNA, 15 bp, Homo sapiens
tataatagacccttt

SEQ ID NO: 315131 - DNA, 15 bp, Homo sapiens
ctataatagaccctt

SEQ ID NO: 315132 - DNA, 15 bp, Homo sapiens
gctataatagaccct

SEQ ID NO: 315133 - DNA, 15 bp, Homo sapiens
agctataatagaccc

SEQ ID NO: 315134 - DNA, 15 bp, Homo sapiens
aagctataatagacc

SEQ ID NO: 315135 - DNA, 15 bp, Homo sapiens
aaagctataatagac

SEQ ID NO: 315136 - DNA, 15 bp, Homo sapiens
aaaagctataataga

SEQ ID NO: 315137 - DNA, 15 bp, Homo sapiens
taaaagctataatag

SEQ ID NO: 315138 - DNA, 15 bp, Homo sapiens
ttaaaagctataata

SEQ ID NO: 315139 - DNA, 15 bp, Homo sapiens
attaaaagctataat

SEQ ID NO: 315140 - DNA, 15 bp, Homo sapiens
gattaaaagctataa

SEQ ID NO: 315141 - DNA, 15 bp, Homo sapiens
agattaaaagctata

SEQ ID NO: 315142 - DNA, 15 bp, Homo sapiens
aagattaaaagctat

SEQ ID NO: 315143 - DNA, 15 bp, Homo sapiens
caagattaaaagcta

SEQ ID NO: 315144 - DNA, 15 bp, Homo sapiens
tcaagattaaaagct

SEQ ID NO: 315145 - DNA, 15 bp, Homo sapiens
ctcaagattaaaagc

SEQ ID NO: 315146 - DNA, 15 bp, Homo sapiens
gctcaagattaaaag

SEQ ID NO: 315147 - DNA, 15 bp, Homo sapiens
ggctcaagattaaaa

SEQ ID NO: 315148 - DNA, 15 bp, Homo sapiens
tggctcaagattaaa

SEQ ID NO: 315149 - DNA, 15 bp, Homo sapiens
ttggctcaagattaa

SEQ ID NO: 315150 - DNA, 15 bp, Homo sapiens
attggctcaagatta

SEQ ID NO: 315151 - DNA, 15 bp, Homo sapiens
cattggctcaagatt

SEQ ID NO: 315152 - DNA, 15 bp, Homo sapiens
tcattggctcaagat

SEQ ID NO: 315153 - DNA, 15 bp, Homo sapiens
gtcattggctcaaga

SEQ ID NO: 315154 - DNA, 15 bp, Homo sapiens
agtcattggctcaag

SEQ ID NO: 315155 - DNA, 15 bp, Homo sapiens
tagtcattggctcaa

SEQ ID NO: 315156 - DNA, 15 bp, Homo sapiens
ctagtcattggctca

SEQ ID NO: 315157 - DNA, 15 bp, Homo sapiens
cctagtcattggctc

SEQ ID NO: 315158 - DNA, 15 bp, Homo sapiens
acctagtcattggct

SEQ ID NO: 315159 - DNA, 15 bp, Homo sapiens
gacctagtcattggc

SEQ ID NO: 315160 - DNA, 15 bp, Homo sapiens
tgacctagtcattgg

SEQ ID NO: 315161 - DNA, 15 bp, Homo sapiens
atgacctagtcattg

SEQ ID NO: 315162 - DNA, 15 bp, Homo sapiens
aatgacctagtcatt

SEQ ID NO: 315163 - DNA, 15 bp, Homo sapiens
taatgacctagtcat

SEQ ID NO: 315164 - DNA, 15 bp, Homo sapiens
ataatgacctagtca

SEQ ID NO: 315165 - DNA, 15 bp, Homo sapiens
aataatgacctagtc

SEQ ID NO: 315166 - DNA, 15 bp, Homo sapiens
aaataatgacctagt

SEQ ID NO: 315167 - DNA, 15 bp, Homo sapiens
aaaataatgacctag

SEQ ID NO: 315168 - DNA, 15 bp, Homo sapiens
aaaaataatgaccta

SEQ ID NO: 315169 - DNA, 15 bp, Homo sapiens
gaaaaataatgacct

SEQ ID NO: 315170 - DNA, 15 bp, Homo sapiens
agaaaaataatgacc

SEQ ID NO: 315171 - DNA, 15 bp, Homo sapiens
gagaaaaataatgac

SEQ ID NO: 315172 - DNA, 15 bp, Homo sapiens
agagaaaaataatga

SEQ ID NO: 315173 - DNA, 15 bp, Homo sapiens
aagagaaaaataatg

SEQ ID NO: 315174 - DNA, 15 bp, Homo sapiens
caagagaaaaataat

SEQ ID NO: 315175 - DNA, 15 bp, Homo sapiens
gcaagagaaaaataa

SEQ ID NO: 315176 - DNA, 15 bp, Homo sapiens
agcaagagaaaaata

SEQ ID NO: 315177 - DNA, 15 bp, Homo sapiens
gagcaagagaaaaat

SEQ ID NO: 315178 - DNA, 15 bp, Homo sapiens
agagcaagagaaaaa

SEQ ID NO: 315179 - DNA, 15 bp, Homo sapiens
cagagcaagagaaaa

SEQ ID NO: 315180 - DNA, 15 bp, Homo sapiens
gcagagcaagagaaa

SEQ ID NO: 315181 - DNA, 15 bp, Homo sapiens
ggcagagcaagagaa

SEQ ID NO: 315182 - DNA, 15 bp, Homo sapiens
aggcagagcaagaga

SEQ ID NO: 315183 - DNA, 15 bp, Homo sapiens
caggcagagcaagag

SEQ ID NO: 315184 - DNA, 15 bp, Homo sapiens
acaggcagagcaaga

SEQ ID NO: 315185 - DNA, 15 bp, Homo sapiens
tacaggcagagcaag

SEQ ID NO: 315186 - DNA, 15 bp, Homo sapiens
atacaggcagagcaa

SEQ ID NO: 315187 - DNA, 15 bp, Homo sapiens
gatacaggcagagca

SEQ ID NO: 315188 - DNA, 15 bp, Homo sapiens
tgatacaggcagagc

SEQ ID NO: 315189 - DNA, 15 bp, Homo sapiens
atgatacaggcagag

SEQ ID NO: 315190 - DNA, 15 bp, Homo sapiens
aatgatacaggcaga

SEQ ID NO: 315191 - DNA, 15 bp, Homo sapiens
aaatgatacaggcag

SEQ ID NO: 315192 - DNA, 15 bp, Homo sapiens
aaaatgatacaggca

SEQ ID NO: 315193 - DNA, 15 bp, Homo sapiens
gaaaatgatacaggc

SEQ ID NO: 315194 - DNA, 15 bp, Homo sapiens
agaaaatgatacagg

SEQ ID NO: 315195 - DNA, 15 bp, Homo sapiens
gagaaaatgatacag

SEQ ID NO: 315196 - DNA, 15 bp, Homo sapiens
ggagaaaatgataca

SEQ ID NO: 315197 - DNA, 15 bp, Homo sapiens
aggagaaaatgatac

SEQ ID NO: 315198 - DNA, 15 bp, Homo sapiens
gaggagaaaatgata

SEQ ID NO: 315199 - DNA, 15 bp, Homo sapiens
tgaggagaaaatgat

SEQ ID NO: 315200 - DNA, 15 bp, Homo sapiens
atgaggagaaaatga

SEQ ID NO: 315201 - DNA, 15 bp, Homo sapiens
catgaggagaaaatg

SEQ ID NO: 315202 - DNA, 15 bp, Homo sapiens
ccatgaggagaaaat

SEQ ID NO: 315203 - DNA, 15 bp, Homo sapiens
gccatgaggagaaaa

SEQ ID NO: 315204 - DNA, 15 bp, Homo sapiens
tgccatgaggagaaa

SEQ ID NO: 315205 - DNA, 15 bp, Homo sapiens
atgccatgaggagaa

SEQ ID NO: 315206 - DNA, 15 bp, Homo sapiens
tatgccatgaggaga

SEQ ID NO: 315207 - DNA, 15 bp, Homo sapiens
gtatgccatgaggag

SEQ ID NO: 315208 - DNA, 15 bp, Homo sapiens
tgtatgccatgagga

SEQ ID NO: 315209 - DNA, 15 bp, Homo sapiens
ctgtatgccatgagg

SEQ ID NO: 315210 - DNA, 15 bp, Homo sapiens
gctgtatgccatgag

SEQ ID NO: 315211 - DNA, 15 bp, Homo sapiens
agctgtatgccatga

SEQ ID NO: 315212 - DNA, 15 bp, Homo sapiens
gagctgtatgccatg

SEQ ID NO: 315213 - DNA, 15 bp, Homo sapiens
agagctgtatgccat

SEQ ID NO: 315214 - DNA, 15 bp, Homo sapiens
aagagctgtatgcca

SEQ ID NO: 315215 - DNA, 15 bp, Homo sapiens
aaagagctgtatgcc

SEQ ID NO: 315216 - DNA, 15 bp, Homo sapiens
aaaagagctgtatgc

SEQ ID NO: 315217 - DNA, 15 bp, Homo sapiens
caaaagagctgtatg

SEQ ID NO: 315218 - DNA, 15 bp, Homo sapiens
gcaaaagagctgtat

SEQ ID NO: 315219 - DNA, 15 bp, Homo sapiens
ggcaaaagagctgta

SEQ ID NO: 315220 - DNA, 15 bp, Homo sapiens
aggcaaaagagctgt

SEQ ID NO: 315221 - DNA, 15 bp, Homo sapiens
gaggcaaaagagctg

SEQ ID NO: 315222 - DNA, 15 bp, Homo sapiens
tgaggcaaaagagct

SEQ ID NO: 315223 - DNA, 15 bp, Homo sapiens
ttgaggcaaaagagc

SEQ ID NO: 315224 - DNA, 15 bp, Homo sapiens
tttgaggcaaaagag

SEQ ID NO: 315225 - DNA, 15 bp, Homo sapiens
ctttgaggcaaaaga

SEQ ID NO: 315226 - DNA, 15 bp, Homo sapiens
tctttgaggcaaaag

SEQ ID NO: 315227 - DNA, 15 bp, Homo sapiens
ttctttgaggcaaaa

SEQ ID NO: 315228 - DNA, 15 bp, Homo sapiens
cttctttgaggcaaa

SEQ ID NO: 315229 - DNA, 15 bp, Homo sapiens
tcttctttgaggcaa

SEQ ID NO: 315230 - DNA, 15 bp, Homo sapiens
atcttctttgaggca

SEQ ID NO: 315231 - DNA, 15 bp, Homo sapiens
aatcttctttgaggc

SEQ ID NO: 315232 - DNA, 15 bp, Homo sapiens
gaatcttctttgagg

SEQ ID NO: 315233 - DNA, 15 bp, Homo sapiens
agaatcttctttgag

SEQ ID NO: 315234 - DNA, 15 bp, Homo sapiens
aagaatcttctttga

SEQ ID NO: 315235 - DNA, 15 bp, Homo sapiens
caagaatcttctttg

SEQ ID NO: 315236 - DNA, 15 bp, Homo sapiens
tcaagaatcttcttt

SEQ ID NO: 315237 - DNA, 15 bp, Homo sapiens
ctcaagaatcttctt

SEQ ID NO: 315238 - DNA, 15 bp, Homo sapiens
cctcaagaatcttct

SEQ ID NO: 315239 - DNA, 15 bp, Homo sapiens
tcctcaagaatcttc

SEQ ID NO: 315240 - DNA, 15 bp, Homo sapiens
atcctcaagaatctt

SEQ ID NO: 315241 - DNA, 15 bp, Homo sapiens
catcctcaagaatct

SEQ ID NO: 315242 - DNA, 15 bp, Homo sapiens
tcatcctcaagaatc

SEQ ID NO: 315243 - DNA, 15 bp, Homo sapiens
atcatcctcaagaat

SEQ ID NO: 315244 - DNA, 15 bp, Homo sapiens
catcatcctcaagaa

SEQ ID NO: 315245 - DNA, 15 bp, Homo sapiens
tcatcatcctcaaga

SEQ ID NO: 315246 - DNA, 15 bp, Homo sapiens
gtcatcatcctcaag

SEQ ID NO: 315247 - DNA, 15 bp, Homo sapiens
ggtcatcatcctcaa

SEQ ID NO: 315248 - DNA, 15 bp, Homo sapiens
aggtcatcatcctca

SEQ ID NO: 315249 - DNA, 15 bp, Homo sapiens
caggtcatcatcctc

SEQ ID NO: 315250 - DNA, 15 bp, Homo sapiens
gcaggtcatcatcct

SEQ ID NO: 315251 - DNA, 15 bp, Homo sapiens
ggcaggtcatcatcc

SEQ ID NO: 315252 - DNA, 15 bp, Homo sapiens
aggcaggtcatcatc

SEQ ID NO: 315253 - DNA, 15 bp, Homo sapiens
gaggcaggtcatcat

SEQ ID NO: 315254 - DNA, 15 bp, Homo sapiens
tgaggcaggtcatca

SEQ ID NO: 315255 - DNA, 15 bp, Homo sapiens
ttgaggcaggtcatc

SEQ ID NO: 315256 - DNA, 15 bp, Homo sapiens
tttgaggcaggtcat

SEQ ID NO: 315257 - DNA, 15 bp, Homo sapiens
gtttgaggcaggtca

SEQ ID NO: 315258 - DNA, 15 bp, Homo sapiens
agtttgaggcaggtc

SEQ ID NO: 315259 - DNA, 15 bp, Homo sapiens
aagtttgaggcaggt

SEQ ID NO: 315260 - DNA, 15 bp, Homo sapiens
gaagtttgaggcagg

SEQ ID NO: 315261 - DNA, 15 bp, Homo sapiens
ggaagtttgaggcag

SEQ ID NO: 315262 - DNA, 15 bp, Homo sapiens
aggaagtttgaggca

SEQ ID NO: 315263 - DNA, 15 bp, Homo sapiens
aaggaagtttgaggc

SEQ ID NO: 315264 - DNA, 15 bp, Homo sapiens
gaaggaagtttgagg

SEQ ID NO: 315265 - DNA, 15 bp, Homo sapiens
agaaggaagtttgag

SEQ ID NO: 315266 - DNA, 15 bp, Homo sapiens
gagaaggaagtttga

SEQ ID NO: 315267 - DNA, 15 bp, Homo sapiens
ggagaaggaagtttg

SEQ ID NO: 315268 - DNA, 15 bp, Homo sapiens
gggagaaggaagttt

SEQ ID NO: 315269 - DNA, 15 bp, Homo sapiens
agggagaaggaagtt

SEQ ID NO: 315270 - DNA, 15 bp, Homo sapiens
tagggagaaggaagt

SEQ ID NO: 315271 - DNA, 15 bp, Homo sapiens
ttagggagaaggaag

SEQ ID NO: 315272 - DNA, 15 bp, Homo sapiens
tttagggagaaggaa

SEQ ID NO: 315273 - DNA, 15 bp, Homo sapiens
ttttagggagaagga

SEQ ID NO: 315274 - DNA, 15 bp, Homo sapiens
cttttagggagaagg

SEQ ID NO: 315275 - DNA, 15 bp, Homo sapiens
acttttagggagaag

SEQ ID NO: 315276 - DNA, 15 bp, Homo sapiens
cacttttagggagaa

SEQ ID NO: 315277 - DNA, 15 bp, Homo sapiens
acacttttagggaga

SEQ ID NO: 315278 - DNA, 15 bp, Homo sapiens
aacacttttagggag

SEQ ID NO: 315279 - DNA, 15 bp, Homo sapiens
aaacacttttaggga

SEQ ID NO: 315280 - DNA, 15 bp, Homo sapiens
aaaacacttttaggg

SEQ ID NO: 315281 - DNA, 15 bp, Homo sapiens
gaaaacacttttagg

SEQ ID NO: 315282 - DNA, 15 bp, Homo sapiens
agaaaacacttttag

SEQ ID NO: 315283 - DNA, 15 bp, Homo sapiens
aagaaaacactttta

SEQ ID NO: 315284 - DNA, 15 bp, Homo sapiens
aaagaaaacactttt

SEQ ID NO: 315285 - DNA, 15 bp, Homo sapiens
aaaagaaaacacttt

SEQ ID NO: 315286 - DNA, 15 bp, Homo sapiens
caaaagaaaacactt

SEQ ID NO: 315287 - DNA, 15 bp, Homo sapiens
acaaaagaaaacact

SEQ ID NO: 315288 - DNA, 15 bp, Homo sapiens
aacaaaagaaaacac

SEQ ID NO: 315289 - DNA, 15 bp, Homo sapiens
gaacaaaagaaaaca

SEQ ID NO: 315290 - DNA, 15 bp, Homo sapiens
tgaacaaaagaaaac

SEQ ID NO: 315291 - DNA, 15 bp, Homo sapiens
ctgaacaaaagaaaa

SEQ ID NO: 315292 - DNA, 15 bp, Homo sapiens
actgaacaaaagaaa

SEQ ID NO: 315293 - DNA, 15 bp, Homo sapiens
aactgaacaaaagaa

SEQ ID NO: 315294 - DNA, 15 bp, Homo sapiens
aaactgaacaaaaga

SEQ ID NO: 315295 - DNA, 15 bp, Homo sapiens
gaaactgaacaaaag

SEQ ID NO: 315296 - DNA, 15 bp, Homo sapiens
tgaaactgaacaaaa

SEQ ID NO: 315297 - DNA, 15 bp, Homo sapiens
atgaaactgaacaaa

SEQ ID NO: 315298 - DNA, 15 bp, Homo sapiens
aatgaaactgaacaa

SEQ ID NO: 315299 - DNA, 15 bp, Homo sapiens
aaatgaaactgaaca

SEQ ID NO: 315300 - DNA, 15 bp, Homo sapiens
gaaatgaaactgaac

SEQ ID NO: 315301 - DNA, 15 bp, Homo sapiens
agaaatgaaactgaa

SEQ ID NO: 315302 - DNA, 15 bp, Homo sapiens
cagaaatgaaactga

SEQ ID NO: 315303 - DNA, 15 bp, Homo sapiens
acagaaatgaaactg

SEQ ID NO: 315304 - DNA, 15 bp, Homo sapiens
gacagaaatgaaact

SEQ ID NO: 315305 - DNA, 15 bp, Homo sapiens
agacagaaatgaaac

SEQ ID NO: 315306 - DNA, 15 bp, Homo sapiens
aagacagaaatgaaa

SEQ ID NO: 315307 - DNA, 15 bp, Homo sapiens
aaagacagaaatgaa

SEQ ID NO: 315308 - DNA, 15 bp, Homo sapiens
gaaagacagaaatga

SEQ ID NO: 315309 - DNA, 15 bp, Homo sapiens
ggaaagacagaaatg

SEQ ID NO: 315310 - DNA, 15 bp, Homo sapiens
tggaaagacagaaat

SEQ ID NO: 315311 - DNA, 15 bp, Homo sapiens
gtggaaagacagaaa

SEQ ID NO: 315312 - DNA, 15 bp, Homo sapiens
agtggaaagacagaa

SEQ ID NO: 315313 - DNA, 15 bp, Homo sapiens
aagtggaaagacaga

SEQ ID NO: 315314 - DNA, 15 bp, Homo sapiens
taagtggaaagacag

SEQ ID NO: 315315 - DNA, 15 bp, Homo sapiens
ataagtggaaagaca

SEQ ID NO: 315316 - DNA, 15 bp, Homo sapiens
aataagtggaaagac

SEQ ID NO: 315317 - DNA, 15 bp, Homo sapiens
gaataagtggaaaga

SEQ ID NO: 315318 - DNA, 15 bp, Homo sapiens
ggaataagtggaaag

SEQ ID NO: 315319 - DNA, 15 bp, Homo sapiens
aggaataagtggaaa

SEQ ID NO: 315320 - DNA, 15 bp, Homo sapiens
caggaataagtggaa

SEQ ID NO: 315321 - DNA, 15 bp, Homo sapiens
tcaggaataagtgga

SEQ ID NO: 315322 - DNA, 15 bp, Homo sapiens
atcaggaataagtgg

SEQ ID NO: 315323 - DNA, 15 bp, Homo sapiens
aatcaggaataagtg

SEQ ID NO: 315324 - DNA, 15 bp, Homo sapiens
taatcaggaataagt

SEQ ID NO: 315325 - DNA, 15 bp, Homo sapiens
ataatcaggaataag

SEQ ID NO: 315326 - DNA, 15 bp, Homo sapiens
aataatcaggaataa

SEQ ID NO: 315327 - DNA, 15 bp, Homo sapiens
aaataatcaggaata

SEQ ID NO: 315328 - DNA, 15 bp, Homo sapiens
aaaataatcaggaat

SEQ ID NO: 315329 - DNA, 15 bp, Homo sapiens
gaaaataatcaggaa

SEQ ID NO: 315330 - DNA, 15 bp, Homo sapiens
ggaaaataatcagga

SEQ ID NO: 315331 - DNA, 15 bp, Homo sapiens
gggaaaataatcagg

SEQ ID NO: 315332 - DNA, 15 bp, Homo sapiens
agggaaaataatcag

SEQ ID NO: 315333 - DNA, 15 bp, Homo sapiens
cagggaaaataatca

SEQ ID NO: 315334 - DNA, 15 bp, Homo sapiens
tcagggaaaataatc

SEQ ID NO: 315335 - DNA, 15 bp, Homo sapiens
ctcagggaaaataat

SEQ ID NO: 315336 - DNA, 15 bp, Homo sapiens
gctcagggaaaataa

SEQ ID NO: 315337 - DNA, 15 bp, Homo sapiens
ggctcagggaaaata

SEQ ID NO: 315338 - DNA, 15 bp, Homo sapiens
aggctcagggaaaat

SEQ ID NO: 315339 - DNA, 15 bp, Homo sapiens
gaggctcagggaaaa

SEQ ID NO: 315340 - DNA, 15 bp, Homo sapiens
agaggctcagggaaa

SEQ ID NO: 315341 - DNA, 15 bp, Homo sapiens
aagaggctcagggaa

SEQ ID NO: 315342 - DNA, 15 bp, Homo sapiens
taagaggctcaggga

SEQ ID NO: 315343 - DNA, 15 bp, Homo sapiens
ctaagaggctcaggg

SEQ ID NO: 315344 - DNA, 15 bp, Homo sapiens
tctaagaggctcagg

SEQ ID NO: 315345 - DNA, 15 bp, Homo sapiens
ctctaagaggctcag

SEQ ID NO: 315346 - DNA, 15 bp, Homo sapiens
tctctaagaggctca

SEQ ID NO: 315347 - DNA, 15 bp, Homo sapiens
atctctaagaggctc

SEQ ID NO: 315348 - DNA, 15 bp, Homo sapiens
gatctctaagaggct

SEQ ID NO: 315349 - DNA, 15 bp, Homo sapiens
agatctctaagaggc

SEQ ID NO: 315350 - DNA, 15 bp, Homo sapiens
cagatctctaagagg

SEQ ID NO: 315351 - DNA, 15 bp, Homo sapiens
tcagatctctaagag

SEQ ID NO: 315352 - DNA, 15 bp, Homo sapiens
atcagatctctaaga

SEQ ID NO: 315353 - DNA, 15 bp, Homo sapiens
gatcagatctctaag

SEQ ID NO: 315354 - DNA, 15 bp, Homo sapiens
tgatcagatctctaa

SEQ ID NO: 315355 - DNA, 15 bp, Homo sapiens
gtgatcagatctcta

SEQ ID NO: 315356 - DNA, 15 bp, Homo sapiens
ggtgatcagatctct

SEQ ID NO: 315357 - DNA, 15 bp, Homo sapiens
aggtgatcagatctc

SEQ ID NO: 315358 - DNA, 15 bp, Homo sapiens
gaggtgatcagatct

SEQ ID NO: 315359 - DNA, 15 bp, Homo sapiens
tgaggtgatcagatc

SEQ ID NO: 315360 - DNA, 15 bp, Homo sapiens
atgaggtgatcagat

SEQ ID NO: 315361 - DNA, 15 bp, Homo sapiens
aatgaggtgatcaga

SEQ ID NO: 315362 - DNA, 15 bp, Homo sapiens
caatgaggtgatcag

SEQ ID NO: 315363 - DNA, 15 bp, Homo sapiens
acaatgaggtgatca

SEQ ID NO: 315364 - DNA, 15 bp, Homo sapiens
tacaatgaggtgatc

SEQ ID NO: 315365 - DNA, 15 bp, Homo sapiens
atacaatgaggtgat

SEQ ID NO: 315366 - DNA, 15 bp, Homo sapiens
tatacaatgaggtga

SEQ ID NO: 315367 - DNA, 15 bp, Homo sapiens
ctatacaatgaggtg

SEQ ID NO: 315368 - DNA, 15 bp, Homo sapiens
cctatacaatgaggt

SEQ ID NO: 315369 - DNA, 15 bp, Homo sapiens
tcctatacaatgagg

SEQ ID NO: 315370 - DNA, 15 bp, Homo sapiens
ctcctatacaatgag

SEQ ID NO: 315371 - DNA, 15 bp, Homo sapiens
gctcctatacaatga

SEQ ID NO: 315372 - DNA, 15 bp, Homo sapiens
agctcctatacaatg

SEQ ID NO: 315373 - DNA, 15 bp, Homo sapiens
tagctcctatacaat

SEQ ID NO: 315374 - DNA, 15 bp, Homo sapiens
atagctcctatacaa

SEQ ID NO: 315375 - DNA, 15 bp, Homo sapiens
aatagctcctataca

SEQ ID NO: 315376 - DNA, 15 bp, Homo sapiens
aaatagctcctatac

SEQ ID NO: 315377 - DNA, 15 bp, Homo sapiens
taaatagctcctata

SEQ ID NO: 315378 - DNA, 15 bp, Homo sapiens
gtaaatagctcctat

SEQ ID NO: 315379 - DNA, 15 bp, Homo sapiens
tgtaaatagctccta

SEQ ID NO: 315380 - DNA, 15 bp, Homo sapiens
gtgtaaatagctcct

SEQ ID NO: 315381 - DNA, 15 bp, Homo sapiens
agtgtaaatagctcc

SEQ ID NO: 315382 - DNA, 15 bp, Homo sapiens
gagtgtaaatagctc

SEQ ID NO: 315383 - DNA, 15 bp, Homo sapiens
ggagtgtaaatagct

SEQ ID NO: 315384 - DNA, 15 bp, Homo sapiens
aggagtgtaaatagc

SEQ ID NO: 315385 - DNA, 15 bp, Homo sapiens
aaggagtgtaaatag

SEQ ID NO: 315386 - DNA, 15 bp, Homo sapiens
gaaggagtgtaaata

SEQ ID NO: 315387 - DNA, 15 bp, Homo sapiens
agaaggagtgtaaat

SEQ ID NO: 315388 - DNA, 15 bp, Homo sapiens
aagaaggagtgtaaa

SEQ ID NO: 315389 - DNA, 15 bp, Homo sapiens
aaagaaggagtgtaa

SEQ ID NO: 315390 - DNA, 15 bp, Homo sapiens
caaagaaggagtgta

SEQ ID NO: 315391 - DNA, 15 bp, Homo sapiens
tcaaagaaggagtgt

SEQ ID NO: 315392 - DNA, 15 bp, Homo sapiens
atcaaagaaggagtg

SEQ ID NO: 315393 - DNA, 15 bp, Homo sapiens
tatcaaagaaggagt

SEQ ID NO: 315394 - DNA, 15 bp, Homo sapiens
atatcaaagaaggag

SEQ ID NO: 315395 - DNA, 15 bp, Homo sapiens
catatcaaagaagga

SEQ ID NO: 315396 - DNA, 15 bp, Homo sapiens
tcatatcaaagaagg

SEQ ID NO: 315397 - DNA, 15 bp, Homo sapiens
gtcatatcaaagaag

SEQ ID NO: 315398 - DNA, 15 bp, Homo sapiens
ggtcatatcaaagaa

SEQ ID NO: 315399 - DNA, 15 bp, Homo sapiens
tggtcatatcaaaga

SEQ ID NO: 315400 - DNA, 15 bp, Homo sapiens
gtggtcatatcaaag

SEQ ID NO: 315401 - DNA, 15 bp, Homo sapiens
tgtggtcatatcaaa

SEQ ID NO: 315402 - DNA, 15 bp, Homo sapiens
atgtggtcatatcaa

SEQ ID NO: 315403 - DNA, 15 bp, Homo sapiens
catgtggtcatatca

SEQ ID NO: 315404 - DNA, 15 bp, Homo sapiens
gcatgtggtcatatc

SEQ ID NO: 315405 - DNA, 15 bp, Homo sapiens
agcatgtggtcatat

SEQ ID NO: 315406 - DNA, 15 bp, Homo sapiens
aagcatgtggtcata

SEQ ID NO: 315407 - DNA, 15 bp, Homo sapiens
gaagcatgtggtcat

SEQ ID NO: 315408 - DNA, 15 bp, Homo sapiens
agaagcatgtggtca

SEQ ID NO: 315409 - DNA, 15 bp, Homo sapiens
gagaagcatgtggtc

SEQ ID NO: 315410 - DNA, 15 bp, Homo sapiens
agagaagcatgtggt

SEQ ID NO: 315411 - DNA, 15 bp, Homo sapiens
cagagaagcatgtgg

SEQ ID NO: 315412 - DNA, 15 bp, Homo sapiens
ccagagaagcatgtg

SEQ ID NO: 315413 - DNA, 15 bp, Homo sapiens
tccagagaagcatgt

SEQ ID NO: 315414 - DNA, 15 bp, Homo sapiens
atccagagaagcatg

SEQ ID NO: 315415 - DNA, 15 bp, Homo sapiens
gatccagagaagcat

SEQ ID NO: 315416 - DNA, 15 bp, Homo sapiens
agatccagagaagca

SEQ ID NO: 315417 - DNA, 15 bp, Homo sapiens
cagatccagagaagc

SEQ ID NO: 315418 - DNA, 15 bp, Homo sapiens
tcagatccagagaag

SEQ ID NO: 315419 - DNA, 15 bp, Homo sapiens
atcagatccagagaa

SEQ ID NO: 315420 - DNA, 15 bp, Homo sapiens
aatcagatccagaga

SEQ ID NO: 315421 - DNA, 15 bp, Homo sapiens
gaatcagatccagag

SEQ ID NO: 315422 - DNA, 15 bp, Homo sapiens
agaatcagatccaga

SEQ ID NO: 315423 - DNA, 15 bp, Homo sapiens
aagaatcagatccag

SEQ ID NO: 315424 - DNA, 15 bp, Homo sapiens
taagaatcagatcca

SEQ ID NO: 315425 - DNA, 15 bp, Homo sapiens
ttaagaatcagatcc

SEQ ID NO: 315426 - DNA, 15 bp, Homo sapiens
attaagaatcagatc

SEQ ID NO: 315427 - DNA, 15 bp, Homo sapiens
aattaagaatcagat

SEQ ID NO: 315428 - DNA, 15 bp, Homo sapiens
gaattaagaatcaga

SEQ ID NO: 315429 - DNA, 15 bp, Homo sapiens
agaattaagaatcag

SEQ ID NO: 315430 - DNA, 15 bp, Homo sapiens
aagaattaagaatca

SEQ ID NO: 315431 - DNA, 15 bp, Homo sapiens
aaagaattaagaatc

SEQ ID NO: 315432 - DNA, 15 bp, Homo sapiens
caaagaattaagaat

SEQ ID NO: 315433 - DNA, 15 bp, Homo sapiens
gcaaagaattaagaa

SEQ ID NO: 315434 - DNA, 15 bp, Homo sapiens
agcaaagaattaaga

SEQ ID NO: 315435 - DNA, 15 bp, Homo sapiens
tagcaaagaattaag

SEQ ID NO: 315436 - DNA, 15 bp, Homo sapiens
gtagcaaagaattaa

SEQ ID NO: 315437 - DNA, 15 bp, Homo sapiens
agtagcaaagaatta

SEQ ID NO: 315438 - DNA, 15 bp, Homo sapiens
aagtagcaaagaatt

SEQ ID NO: 315439 - DNA, 15 bp, Homo sapiens
gaagtagcaaagaat

SEQ ID NO: 315440 - DNA, 15 bp, Homo sapiens
ggaagtagcaaagaa

SEQ ID NO: 315441 - DNA, 15 bp, Homo sapiens
gggaagtagcaaaga

SEQ ID NO: 315442 - DNA, 15 bp, Homo sapiens
agggaagtagcaaag

SEQ ID NO: 315443 - DNA, 15 bp, Homo sapiens
gagggaagtagcaaa

SEQ ID NO: 315444 - DNA, 15 bp, Homo sapiens
ggagggaagtagcaa

SEQ ID NO: 315445 - DNA, 15 bp, Homo sapiens
gggagggaagtagca

SEQ ID NO: 315446 - DNA, 15 bp, Homo sapiens
agggagggaagtagc

SEQ ID NO: 315447 - DNA, 15 bp, Homo sapiens
cagggagggaagtag

SEQ ID NO: 315448 - DNA, 15 bp, Homo sapiens
gcagggagggaagta

SEQ ID NO: 315449 - DNA, 15 bp, Homo sapiens
ggcagggagggaagt

SEQ ID NO: 315450 - DNA, 15 bp, Homo sapiens
gggggcagggaggga

SEQ ID NO: 315451 - DNA, 15 bp, Homo sapiens
tgggggcagggaggg

SEQ ID NO: 315452 - DNA, 15 bp, Homo sapiens
ttgggggcagggagg

SEQ ID NO: 315453 - DNA, 15 bp, Homo sapiens
gttgggggcagggag

SEQ ID NO: 315454 - DNA, 15 bp, Homo sapiens
ggttgggggcaggga

SEQ ID NO: 315455 - DNA, 15 bp, Homo sapiens
gggttgggggcaggg

SEQ ID NO: 315456 - DNA, 15 bp, Homo sapiens
tgggttgggggcagg

SEQ ID NO: 315457 - DNA, 15 bp, Homo sapiens
atgggttgggggcag

SEQ ID NO: 315458 - DNA, 15 bp, Homo sapiens
catgggttgggggca

SEQ ID NO: 315459 - DNA, 15 bp, Homo sapiens
ccatgggttgggggc

SEQ ID NO: 315460 - DNA, 15 bp, Homo sapiens
cccatgggttggggg

SEQ ID NO: 315461 - DNA, 15 bp, Homo sapiens
ccccatgggttgggg

SEQ ID NO: 315462 - DNA, 15 bp, Homo sapiens
cccccatgggttggg

SEQ ID NO: 315463 - DNA, 15 bp, Homo sapiens
gcccccatgggttgg

SEQ ID NO: 315464 - DNA, 15 bp, Homo sapiens
tgcccccatgggttg

SEQ ID NO: 315465 - DNA, 15 bp, Homo sapiens
gtgcccccatgggtt

SEQ ID NO: 315466 - DNA, 15 bp, Homo sapiens
ggtgcccccatgggt

SEQ ID NO: 315467 - DNA, 15 bp, Homo sapiens
tggtgcccccatggg

SEQ ID NO: 315468 - DNA, 15 bp, Homo sapiens
ctggtgcccccatgg

SEQ ID NO: 315469 - DNA, 15 bp, Homo sapiens
tctggtgcccccatg

SEQ ID NO: 315470 - DNA, 15 bp, Homo sapiens
ttctggtgcccccat

SEQ ID NO: 315471 - DNA, 15 bp, Homo sapiens
cttctggtgccccca

SEQ ID NO: 315472 - DNA, 15 bp, Homo sapiens
gcttctggtgccccc

SEQ ID NO: 315473 - DNA, 15 bp, Homo sapiens
agcttctggtgcccc

SEQ ID NO: 315474 - DNA, 15 bp, Homo sapiens
cagcttctggtgccc

SEQ ID NO: 315475 - DNA, 15 bp, Homo sapiens
acagcttctggtgcc

SEQ ID NO: 315476 - DNA, 15 bp, Homo sapiens
cacagcttctggtgc

SEQ ID NO: 315477 - DNA, 15 bp, Homo sapiens
ccacagcttctggtg

SEQ ID NO: 315478 - DNA, 15 bp, Homo sapiens
cccacagcttctggt

SEQ ID NO: 315479 - DNA, 15 bp, Homo sapiens
tcccacagcttctgg

SEQ ID NO: 315480 - DNA, 15 bp, Homo sapiens
ttcccacagcttctg

SEQ ID NO: 315481 - DNA, 15 bp, Homo sapiens
tttcccacagcttct

SEQ ID NO: 315482 - DNA, 15 bp, Homo sapiens
ctttcccacagcttc

SEQ ID NO: 315483 - DNA, 15 bp, Homo sapiens
cctttcccacagctt

SEQ ID NO: 315484 - DNA, 15 bp, Homo sapiens
tcctttcccacagct

SEQ ID NO: 315485 - DNA, 15 bp, Homo sapiens
ctcctttcccacagc

SEQ ID NO: 315486 - DNA, 15 bp, Homo sapiens
cctcctttcccacag

SEQ ID NO: 315487 - DNA, 15 bp, Homo sapiens
gcctcctttcccaca

SEQ ID NO: 315488 - DNA, 15 bp, Homo sapiens
tgcctcctttcccac

SEQ ID NO: 315489 - DNA, 15 bp, Homo sapiens
ctgcctcctttccca

SEQ ID NO: 315490 - DNA, 15 bp, Homo sapiens
gctgcctcctttccc

SEQ ID NO: 315491 - DNA, 15 bp, Homo sapiens
ggctgcctcctttcc

SEQ ID NO: 315492 - DNA, 15 bp, Homo sapiens
gggctgcctcctttc

SEQ ID NO: 315493 - DNA, 15 bp, Homo sapiens
tgggctgcctccttt

SEQ ID NO: 315494 - DNA, 15 bp, Homo sapiens
atgggctgcctcctt

SEQ ID NO: 315495 - DNA, 15 bp, Homo sapiens
gatgggctgcctcct

SEQ ID NO: 315496 - DNA, 15 bp, Homo sapiens
cgatgggctgcctcc

SEQ ID NO: 315497 - DNA, 15 bp, Homo sapiens
gcgatgggctgcctc

SEQ ID NO: 315498 - DNA, 15 bp, Homo sapiens
agcgatgggctgcct

SEQ ID NO: 315499 - DNA, 15 bp, Homo sapiens
tagcgatgggctgcc

SEQ ID NO: 315500 - DNA, 15 bp, Homo sapiens
ttagcgatgggctgc

SEQ ID NO: 315501 - DNA, 15 bp, Homo sapiens
cttagcgatgggctg

SEQ ID NO: 315502 - DNA, 15 bp, Homo sapiens
ccttagcgatgggct

SEQ ID NO: 315503 - DNA, 15 bp, Homo sapiens
tccttagcgatgggc

SEQ ID NO: 315504 - DNA, 15 bp, Homo sapiens
ctccttagcgatggg

SEQ ID NO: 315505 - DNA, 15 bp, Homo sapiens
cctccttagcgatgg

SEQ ID NO: 315506 - DNA, 15 bp, Homo sapiens
tcctccttagcgatg

SEQ ID NO: 315507 - DNA, 15 bp, Homo sapiens
ctcctccttagcgat

SEQ ID NO: 315508 - DNA, 15 bp, Homo sapiens
cctcctccttagcga

SEQ ID NO: 315509 - DNA, 15 bp, Homo sapiens
tcctcctccttagcg

SEQ ID NO: 315510 - DNA, 15 bp, Homo sapiens
ctcctcctccttagc

SEQ ID NO: 315511 - DNA, 15 bp, Homo sapiens
cctcctcctccttag

SEQ ID NO: 315512 - DNA, 15 bp, Homo sapiens
tcctcctcctcctta

SEQ ID NO: 315513 - DNA, 15 bp, Homo sapiens
gtcctcctcctcctt

SEQ ID NO: 315514 - DNA, 15 bp, Homo sapiens
ggtcctcctcctcct

SEQ ID NO: 315515 - DNA, 15 bp, Homo sapiens
aggtcctcctcctcc

SEQ ID NO: 315516 - DNA, 15 bp, Homo sapiens
aaggtcctcctcctc

SEQ ID NO: 315517 - DNA, 15 bp, Homo sapiens
caaggtcctcctcct

SEQ ID NO: 315518 - DNA, 15 bp, Homo sapiens
acaaggtcctcctcc

SEQ ID NO: 315519 - DNA, 15 bp, Homo sapiens
gacaaggtcctcctc

SEQ ID NO: 315520 - DNA, 15 bp, Homo sapiens
tgacaaggtcctcct

SEQ ID NO: 315521 - DNA, 15 bp, Homo sapiens
ctgacaaggtcctcc

SEQ ID NO: 315522 - DNA, 15 bp, Homo sapiens
cctgacaaggtcctc

SEQ ID NO: 315523 - DNA, 15 bp, Homo sapiens
ccctgacaaggtcct

SEQ ID NO: 315524 - DNA, 15 bp, Homo sapiens
accctgacaaggtcc

SEQ ID NO: 315525 - DNA, 15 bp, Homo sapiens
caccctgacaaggtc

SEQ ID NO: 315526 - DNA, 15 bp, Homo sapiens
acaccctgacaaggt

SEQ ID NO: 315527 - DNA, 15 bp, Homo sapiens
aacaccctgacaagg

SEQ ID NO: 315528 - DNA, 15 bp, Homo sapiens
caacaccctgacaag

SEQ ID NO: 315529 - DNA, 15 bp, Homo sapiens
ccaacaccctgacaa

SEQ ID NO: 315530 - DNA, 15 bp, Homo sapiens
accaacaccctgaca

SEQ ID NO: 315531 - DNA, 15 bp, Homo sapiens
caccaacaccctgac

SEQ ID NO: 315532 - DNA, 15 bp, Homo sapiens
ccaccaacaccctga

SEQ ID NO: 315533 - DNA, 15 bp, Homo sapiens
gccaccaacaccctg

SEQ ID NO: 315534 - DNA, 15 bp, Homo sapiens
cgccaccaacaccct

SEQ ID NO: 315535 - DNA, 15 bp, Homo sapiens
gcgccaccaacaccc

SEQ ID NO: 315536 - DNA, 15 bp, Homo sapiens
tgcgccaccaacacc

SEQ ID NO: 315537 - DNA, 15 bp, Homo sapiens
ctgcgccaccaacac

SEQ ID NO: 315538 - DNA, 15 bp, Homo sapiens
cctgcgccaccaaca

SEQ ID NO: 315539 - DNA, 15 bp, Homo sapiens
acctgcgccaccaac

SEQ ID NO: 315540 - DNA, 15 bp, Homo sapiens
cacctgcgccaccaa

SEQ ID NO: 315541 - DNA, 15 bp, Homo sapiens
tcacctgcgccacca

SEQ ID NO: 315542 - DNA, 15 bp, Homo sapiens
gtcacctgcgccacc

SEQ ID NO: 315543 - DNA, 15 bp, Homo sapiens
ggtcacctgcgccac

SEQ ID NO: 315544 - DNA, 15 bp, Homo sapiens
tggtcacctgcgcca

SEQ ID NO: 315545 - DNA, 15 bp, Homo sapiens
ctggtcacctgcgcc

SEQ ID NO: 315546 - DNA, 15 bp, Homo sapiens
tctggtcacctgcgc

SEQ ID NO: 315547 - DNA, 15 bp, Homo sapiens
ctctggtcacctgcg

SEQ ID NO: 315548 - DNA, 15 bp, Homo sapiens
cctctggtcacctgc

SEQ ID NO: 315549 - DNA, 15 bp, Homo sapiens
tcctctggtcacctg

SEQ ID NO: 315550 - DNA, 15 bp, Homo sapiens
gtcctctggtcacct

SEQ ID NO: 315551 - DNA, 15 bp, Homo sapiens
tgtcctctggtcacc

SEQ ID NO: 315552 - DNA, 15 bp, Homo sapiens
ctgtcctctggtcac

SEQ ID NO: 315553 - DNA, 15 bp, Homo sapiens
tctgtcctctggtca

SEQ ID NO: 315554 - DNA, 15 bp, Homo sapiens
ctctgtcctctggtc

SEQ ID NO: 315555 - DNA, 15 bp, Homo sapiens
gctctgtcctctggt

SEQ ID NO: 315556 - DNA, 15 bp, Homo sapiens
agctctgtcctctgg

SEQ ID NO: 315557 - DNA, 15 bp, Homo sapiens
gagctctgtcctctg

SEQ ID NO: 315558 - DNA, 15 bp, Homo sapiens
tgagctctgtcctct

SEQ ID NO: 315559 - DNA, 15 bp, Homo sapiens
gtgagctctgtcctc

SEQ ID NO: 315560 - DNA, 15 bp, Homo sapiens
agtgagctctgtcct

SEQ ID NO: 315561 - DNA, 15 bp, Homo sapiens
cagtgagctctgtcc

SEQ ID NO: 315562 - DNA, 15 bp, Homo sapiens
gcagtgagctctgtc

SEQ ID NO: 315563 - DNA, 15 bp, Homo sapiens
agcagtgagctctgt

SEQ ID NO: 315564 - DNA, 15 bp, Homo sapiens
cagcagtgagctctg

SEQ ID NO: 315565 - DNA, 15 bp, Homo sapiens
acagcagtgagctct

SEQ ID NO: 315566 - DNA, 15 bp, Homo sapiens
cacagcagtgagctc

SEQ ID NO: 315567 - DNA, 15 bp, Homo sapiens
tcacagcagtgagct

SEQ ID NO: 315568 - DNA, 15 bp, Homo sapiens
atcacagcagtgagc

SEQ ID NO: 315569 - DNA, 15 bp, Homo sapiens
gatcacagcagtgag

SEQ ID NO: 315570 - DNA, 15 bp, Homo sapiens
ggatcacagcagtga

SEQ ID NO: 315571 - DNA, 15 bp, Homo sapiens
aggatcacagcagtg

SEQ ID NO: 315572 - DNA, 15 bp, Homo sapiens
caggatcacagcagt

SEQ ID NO: 315573 - DNA, 15 bp, Homo sapiens
ccaggatcacagcag

SEQ ID NO: 315574 - DNA, 15 bp, Homo sapiens
tccaggatcacagca

SEQ ID NO: 315575 - DNA, 15 bp, Homo sapiens
cagtgtagagtggcc

SEQ ID NO: 315576 - DNA, 15 bp, Homo sapiens
ccagtgtagagtggc

SEQ ID NO: 315577 - DNA, 15 bp, Homo sapiens
tccagtgtagagtgg

SEQ ID NO: 315578 - DNA, 15 bp, Homo sapiens
gtccagtgtagagtg

SEQ ID NO: 315579 - DNA, 15 bp, Homo sapiens
tgtccagtgtagagt

SEQ ID NO: 315580 - DNA, 15 bp, Homo sapiens
atgtccagtgtagag

SEQ ID NO: 315581 - DNA, 15 bp, Homo sapiens
aatgtccagtgtaga

SEQ ID NO: 315582 - DNA, 15 bp, Homo sapiens
caatgtccagtgtag

SEQ ID NO: 315583 - DNA, 15 bp, Homo sapiens
ccaatgtccagtgta

SEQ ID NO: 315584 - DNA, 15 bp, Homo sapiens
cccaatgtccagtgt

SEQ ID NO: 315585 - DNA, 15 bp, Homo sapiens
tcccaatgtccagtg

SEQ ID NO: 315586 - DNA, 15 bp, Homo sapiens
atcccaatgtccagt

SEQ ID NO: 315587 - DNA, 15 bp, Homo sapiens
tatcccaatgtccag

SEQ ID NO: 315588 - DNA, 15 bp, Homo sapiens
atatcccaatgtcca

SEQ ID NO: 315589 - DNA, 15 bp, Homo sapiens
catatcccaatgtcc

SEQ ID NO: 315590 - DNA, 15 bp, Homo sapiens
tcatatcccaatgtc

SEQ ID NO: 315591 - DNA, 15 bp, Homo sapiens
ttcatatcccaatgt

SEQ ID NO: 315592 - DNA, 15 bp, Homo sapiens
gttcatatcccaatg

SEQ ID NO: 315593 - DNA, 15 bp, Homo sapiens
tgttcatatcccaat

SEQ ID NO: 315594 - DNA, 15 bp, Homo sapiens
gtgttcatatcccaa

SEQ ID NO: 315595 - DNA, 15 bp, Homo sapiens
tgtgttcatatccca

SEQ ID NO: 315596 - DNA, 15 bp, Homo sapiens
ttgtgttcatatccc

SEQ ID NO: 315597 - DNA, 15 bp, Homo sapiens
tttgtgttcatatcc

SEQ ID NO: 315598 - DNA, 15 bp, Homo sapiens
ctttgtgttcatatc

SEQ ID NO: 315599 - DNA, 15 bp, Homo sapiens
tctttgtgttcatat

SEQ ID NO: 315600 - DNA, 15 bp, Homo sapiens
ttctttgtgttcata

SEQ ID NO: 315601 - DNA, 15 bp, Homo sapiens
cttctttgtgttcat

SEQ ID NO: 315602 - DNA, 15 bp, Homo sapiens
ccttctttgtgttca

SEQ ID NO: 315603 - DNA, 15 bp, Homo sapiens
tccttctttgtgttc

SEQ ID NO: 315604 - DNA, 15 bp, Homo sapiens
ctccttctttgtgtt

SEQ ID NO: 315605 - DNA, 15 bp, Homo sapiens
tctccttctttgtgt

SEQ ID NO: 315606 - DNA, 15 bp, Homo sapiens
gtctccttctttgtg

SEQ ID NO: 315607 - DNA, 15 bp, Homo sapiens
tgtctccttctttgt

SEQ ID NO: 315608 - DNA, 15 bp, Homo sapiens
ttgtctccttctttg

SEQ ID NO: 315609 - DNA, 15 bp, Homo sapiens
cttgtctccttcttt

SEQ ID NO: 315610 - DNA, 15 bp, Homo sapiens
acttgtctccttctt

SEQ ID NO: 315611 - DNA, 15 bp, Homo sapiens
gacttgtctccttct

SEQ ID NO: 315612 - DNA, 15 bp, Homo sapiens
tgacttgtctccttc

SEQ ID NO: 315613 - DNA, 15 bp, Homo sapiens
gtgacttgtctcctt

SEQ ID NO: 315614 - DNA, 15 bp, Homo sapiens
tgtgacttgtctcct

SEQ ID NO: 315615 - DNA, 15 bp, Homo sapiens
gtgtgacttgtctcc

SEQ ID NO: 315616 - DNA, 15 bp, Homo sapiens
tgtgtgacttgtctc

SEQ ID NO: 315617 - DNA, 15 bp, Homo sapiens
ctgtgtgacttgtct

SEQ ID NO: 315618 - DNA, 15 bp, Homo sapiens
gctgtgtgacttgtc

SEQ ID NO: 315619 - DNA, 15 bp, Homo sapiens
ggctgtgtgacttgt

SEQ ID NO: 315620 - DNA, 15 bp, Homo sapiens
tggctgtgtgacttg

SEQ ID NO: 315621 - DNA, 15 bp, Homo sapiens
atggctgtgtgactt

SEQ ID NO: 315622 - DNA, 15 bp, Homo sapiens
aatggctgtgtgact

SEQ ID NO: 315623 - DNA, 15 bp, Homo sapiens
aaatggctgtgtgac

SEQ ID NO: 315624 - DNA, 15 bp, Homo sapiens
taaatggctgtgtga

SEQ ID NO: 315625 - DNA, 15 bp, Homo sapiens
ataaatggctgtgtg

SEQ ID NO: 315626 - DNA, 15 bp, Homo sapiens
aataaatggctgtgt

SEQ ID NO: 315627 - DNA, 15 bp, Homo sapiens
aaataaatggctgtg

SEQ ID NO: 315628 - DNA, 15 bp, Homo sapiens
taaataaatggctgt

SEQ ID NO: 315629 - DNA, 15 bp, Homo sapiens
ataaataaatggctg

SEQ ID NO: 315630 - DNA, 15 bp, Homo sapiens
tataaataaatggct

SEQ ID NO: 315631 - DNA, 15 bp, Homo sapiens
ctataaataaatggc

SEQ ID NO: 315632 - DNA, 15 bp, Homo sapiens
cctataaataaatgg

SEQ ID NO: 315633 - DNA, 15 bp, Homo sapiens
tcctataaataaatg

SEQ ID NO: 315634 - DNA, 15 bp, Homo sapiens
ttcctataaataaat

SEQ ID NO: 315635 - DNA, 15 bp, Homo sapiens
tttcctataaataaa

SEQ ID NO: 315636 - DNA, 15 bp, Homo sapiens
ttttcctataaataa

SEQ ID NO: 315637 - DNA, 15 bp, Homo sapiens
tttttcctataaata

SEQ ID NO: 315638 - DNA, 15 bp, Homo sapiens
ttttttcctataaat

SEQ ID NO: 315639 - DNA, 15 bp, Homo sapiens
tttttttcctataaa

SEQ ID NO: 315640 - DNA, 15 bp, Homo sapiens
atttttttcctataa

SEQ ID NO: 315641 - DNA, 15 bp, Homo sapiens
catttttttcctata

SEQ ID NO: 315642 - DNA, 15 bp, Homo sapiens
acatttttttcctat

SEQ ID NO: 315643 - DNA, 15 bp, Homo sapiens
aacatttttttccta

SEQ ID NO: 315644 - DNA, 15 bp, Homo sapiens
caacatttttttcct

SEQ ID NO: 315645 - DNA, 15 bp, Homo sapiens
tcaacatttttttcc

SEQ ID NO: 315646 - DNA, 15 bp, Homo sapiens
ttcaacatttttttc

SEQ ID NO: 315647 - DNA, 15 bp, Homo sapiens
tttcaacattttttt

SEQ ID NO: 315648 - DNA, 15 bp, Homo sapiens
atttcaacatttttt

SEQ ID NO: 315649 - DNA, 15 bp, Homo sapiens
tatttcaacattttt

SEQ ID NO: 315650 - DNA, 15 bp, Homo sapiens
ttatttcaacatttt

SEQ ID NO: 315651 - DNA, 15 bp, Homo sapiens
tttatttcaacattt

SEQ ID NO: 315652 - DNA, 15 bp, Homo sapiens
atttatttcaacatt

SEQ ID NO: 315653 - DNA, 15 bp, Homo sapiens
tatttatttcaacat

SEQ ID NO: 315654 - DNA, 15 bp, Homo sapiens
gtatttatttcaaca

SEQ ID NO: 315655 - DNA, 15 bp, Homo sapiens
tgtatttatttcaac

SEQ ID NO: 315656 - DNA, 15 bp, Homo sapiens
atgtatttatttcaa

SEQ ID NO: 315657 - DNA, 15 bp, Homo sapiens
catgtatttatttca

SEQ ID NO: 315658 - DNA, 15 bp, Homo sapiens
tcatgtatttatttc

SEQ ID NO: 315659 - DNA, 15 bp, Homo sapiens
ctcatgtatttattt

SEQ ID NO: 315660 - DNA, 15 bp, Homo sapiens
gctcatgtatttatt

SEQ ID NO: 315661 - DNA, 15 bp, Homo sapiens
agctcatgtatttat

SEQ ID NO: 315662 - DNA, 15 bp, Homo sapiens
cagctcatgtattta

SEQ ID NO: 315663 - DNA, 15 bp, Homo sapiens
tcagctcatgtattt

SEQ ID NO: 315664 - DNA, 15 bp, Homo sapiens
ttcagctcatgtatt

SEQ ID NO: 315665 - DNA, 15 bp, Homo sapiens
cttcagctcatgtat

SEQ ID NO: 315666 - DNA, 15 bp, Homo sapiens
tcttcagctcatgta

SEQ ID NO: 315667 - DNA, 15 bp, Homo sapiens
gtcttcagctcatgt

SEQ ID NO: 315668 - DNA, 15 bp, Homo sapiens
agtcttcagctcatg

SEQ ID NO: 315669 - DNA, 15 bp, Homo sapiens
aagtcttcagctcat

SEQ ID NO: 315670 - DNA, 15 bp, Homo sapiens
aaagtcttcagctca

SEQ ID NO: 315671 - DNA, 15 bp, Homo sapiens
taaagtcttcagctc

SEQ ID NO: 315672 - DNA, 15 bp, Homo sapiens
ctaaagtcttcagct

SEQ ID NO: 315673 - DNA, 15 bp, Homo sapiens
tctaaagtcttcagc

SEQ ID NO: 315674 - DNA, 15 bp, Homo sapiens
ttctaaagtcttcag

SEQ ID NO: 315675 - DNA, 15 bp, Homo sapiens
attctaaagtcttca

SEQ ID NO: 315676 - DNA, 15 bp, Homo sapiens
aattctaaagtcttc

SEQ ID NO: 315677 - DNA, 15 bp, Homo sapiens
taattctaaagtctt

SEQ ID NO: 315678 - DNA, 15 bp, Homo sapiens
gtaattctaaagtct

SEQ ID NO: 315679 - DNA, 15 bp, Homo sapiens
tgtaattctaaagtc

SEQ ID NO: 315680 - DNA, 15 bp, Homo sapiens
ttgtaattctaaagt

SEQ ID NO: 315681 - DNA, 15 bp, Homo sapiens
tttgtaattctaaag

SEQ ID NO: 315682 - DNA, 15 bp, Homo sapiens
ttttgtaattctaaa

SEQ ID NO: 315683 - DNA, 15 bp, Homo sapiens
attttgtaattctaa

SEQ ID NO: 315684 - DNA, 15 bp, Homo sapiens
cattttgtaattcta

SEQ ID NO: 315685 - DNA, 15 bp, Homo sapiens
tcattttgtaattct

SEQ ID NO: 315686 - DNA, 15 bp, Homo sapiens
ctcattttgtaattc

SEQ ID NO: 315687 - DNA, 15 bp, Homo sapiens
tctcattttgtaatt

SEQ ID NO: 315688 - DNA, 15 bp, Homo sapiens
gtctcattttgtaat

SEQ ID NO: 315689 - DNA, 15 bp, Homo sapiens
agtctcattttgtaa

SEQ ID NO: 315690 - DNA, 15 bp, Homo sapiens
aagtctcattttgta

SEQ ID NO: 315691 - DNA, 15 bp, Homo sapiens
caagtctcattttgt

SEQ ID NO: 315692 - DNA, 15 bp, Homo sapiens
gcaagtctcattttg

SEQ ID NO: 315693 - DNA, 15 bp, Homo sapiens
agcaagtctcatttt

SEQ ID NO: 315694 - DNA, 15 bp, Homo sapiens
tagcaagtctcattt

SEQ ID NO: 315695 - DNA, 15 bp, Homo sapiens
ttagcaagtctcatt

SEQ ID NO: 315696 - DNA, 15 bp, Homo sapiens
gttagcaagtctcat

SEQ ID NO: 315697 - DNA, 15 bp, Homo sapiens
agttagcaagtctca

SEQ ID NO: 315698 - DNA, 15 bp, Homo sapiens
aagttagcaagtctc

SEQ ID NO: 315699 - DNA, 15 bp, Homo sapiens
caagttagcaagtct

SEQ ID NO: 315700 - DNA, 15 bp, Homo sapiens
acaagttagcaagtc

SEQ ID NO: 315701 - DNA, 15 bp, Homo sapiens
aacaagttagcaagt

SEQ ID NO: 315702 - DNA, 15 bp, Homo sapiens
aaacaagttagcaag

SEQ ID NO: 315703 - DNA, 15 bp, Homo sapiens
aaaacaagttagcaa

SEQ ID NO: 315704 - DNA, 15 bp, Homo sapiens
caaaacaagttagca

SEQ ID NO: 315705 - DNA, 15 bp, Homo sapiens
ccaaaacaagttagc

SEQ ID NO: 315706 - DNA, 15 bp, Homo sapiens
tccaaaacaagttag

SEQ ID NO: 315707 - DNA, 15 bp, Homo sapiens
atccaaaacaagtta

SEQ ID NO: 315708 - DNA, 15 bp, Homo sapiens
aatccaaaacaagtt

SEQ ID NO: 315709 - DNA, 15 bp, Homo sapiens
caatccaaaacaagt

SEQ ID NO: 315710 - DNA, 15 bp, Homo sapiens
ccaatccaaaacaag

SEQ ID NO: 315711 - DNA, 15 bp, Homo sapiens
tccaatccaaaacaa

SEQ ID NO: 315712 - DNA, 15 bp, Homo sapiens
ttccaatccaaaaca

SEQ ID NO: 315713 - DNA, 15 bp, Homo sapiens
cttccaatccaaaac

SEQ ID NO: 315714 - DNA, 15 bp, Homo sapiens
tcttccaatccaaaa

SEQ ID NO: 315715 - DNA, 15 bp, Homo sapiens
ttcttccaatccaaa

SEQ ID NO: 315716 - DNA, 15 bp, Homo sapiens
tttcttccaatccaa

SEQ ID NO: 315717 - DNA, 15 bp, Homo sapiens
atttcttccaatcca

SEQ ID NO: 315718 - DNA, 15 bp, Homo sapiens
aatttcttccaatcc

SEQ ID NO: 315719 - DNA, 15 bp, Homo sapiens
taatttcttccaatc

SEQ ID NO: 315720 - DNA, 15 bp, Homo sapiens
ctaatttcttccaat

SEQ ID NO: 315721 - DNA, 15 bp, Homo sapiens
actaatttcttccaa

SEQ ID NO: 315722 - DNA, 15 bp, Homo sapiens
aactaatttcttcca

SEQ ID NO: 315723 - DNA, 15 bp, Homo sapiens
aaactaatttcttcc

SEQ ID NO: 315724 - DNA, 15 bp, Homo sapiens
taaactaatttcttc

SEQ ID NO: 315725 - DNA, 15 bp, Homo sapiens
ataaactaatttctt

SEQ ID NO: 315726 - DNA, 15 bp, Homo sapiens
cataaactaatttct

SEQ ID NO: 315727 - DNA, 15 bp, Homo sapiens
gcataaactaatttc

SEQ ID NO: 315728 - DNA, 15 bp, Homo sapiens
ggcataaactaattt

SEQ ID NO: 315729 - DNA, 15 bp, Homo sapiens
gggcataaactaatt

SEQ ID NO: 315730 - DNA, 15 bp, Homo sapiens
tgggcataaactaat

SEQ ID NO: 315731 - DNA, 15 bp, Homo sapiens
atgggcataaactaa

SEQ ID NO: 315732 - DNA, 15 bp, Homo sapiens
catgggcataaacta

SEQ ID NO: 315733 - DNA, 15 bp, Homo sapiens
tcatgggcataaact

SEQ ID NO: 315734 - DNA, 15 bp, Homo sapiens
gtcatgggcataaac

SEQ ID NO: 315735 - DNA, 15 bp, Homo sapiens
tgtcatgggcataaa

SEQ ID NO: 315736 - DNA, 15 bp, Homo sapiens
atgtcatgggcataa

SEQ ID NO: 315737 - DNA, 15 bp, Homo sapiens
gatgtcatgggcata

SEQ ID NO: 315738 - DNA, 15 bp, Homo sapiens
cgatgtcatgggcat

SEQ ID NO: 315739 - DNA, 15 bp, Homo sapiens
gcgatgtcatgggca

SEQ ID NO: 315740 - DNA, 15 bp, Homo sapiens
agcgatgtcatgggc

SEQ ID NO: 315741 - DNA, 15 bp, Homo sapiens
aagcgatgtcatggg

SEQ ID NO: 315742 - DNA, 15 bp, Homo sapiens
aaagcgatgtcatgg

SEQ ID NO: 315743 - DNA, 15 bp, Homo sapiens
taaagcgatgtcatg

SEQ ID NO: 315744 - DNA, 15 bp, Homo sapiens
ataaagcgatgtcat

SEQ ID NO: 315745 - DNA, 15 bp, Homo sapiens
aataaagcgatgtca

SEQ ID NO: 315746 - DNA, 15 bp, Homo sapiens
gaataaagcgatgtc

SEQ ID NO: 315747 - DNA, 15 bp, Homo sapiens
ggaataaagcgatgt

SEQ ID NO: 315748 - DNA, 15 bp, Homo sapiens
tggaataaagcgatg

SEQ ID NO: 315749 - DNA, 15 bp, Homo sapiens
ctggaataaagcgat

SEQ ID NO: 315750 - DNA, 15 bp, Homo sapiens
tctggaataaagcga

SEQ ID NO: 315751 - DNA, 15 bp, Homo sapiens
gtctggaataaagcg

SEQ ID NO: 315752 - DNA, 15 bp, Homo sapiens
agtctggaataaagc

SEQ ID NO: 315753 - DNA, 15 bp, Homo sapiens
cagtctggaataaag

SEQ ID NO: 315754 - DNA, 15 bp, Homo sapiens
tcagtctggaataaa

SEQ ID NO: 315755 - DNA, 15 bp, Homo sapiens
atcagtctggaataa

SEQ ID NO: 315756 - DNA, 15 bp, Homo sapiens
aatcagtctggaata

SEQ ID NO: 315757 - DNA, 15 bp, Homo sapiens
taatcagtctggaat

SEQ ID NO: 315758 - DNA, 15 bp, Homo sapiens
ctaatcagtctggaa

SEQ ID NO: 315759 - DNA, 15 bp, Homo sapiens
tctaatcagtctgga

SEQ ID NO: 315760 - DNA, 15 bp, Homo sapiens
ttctaatcagtctgg

SEQ ID NO: 315761 - DNA, 15 bp, Homo sapiens
cttctaatcagtctg

SEQ ID NO: 315762 - DNA, 15 bp, Homo sapiens
gcttctaatcagtct

SEQ ID NO: 315763 - DNA, 15 bp, Homo sapiens
tgcttctaatcagtc

SEQ ID NO: 315764 - DNA, 15 bp, Homo sapiens
atgcttctaatcagt

SEQ ID NO: 315765 - DNA, 15 bp, Homo sapiens
tatgcttctaatcag

SEQ ID NO: 315766 - DNA, 15 bp, Homo sapiens
ttatgcttctaatca

SEQ ID NO: 315767 - DNA, 15 bp, Homo sapiens
attatgcttctaatc

SEQ ID NO: 315768 - DNA, 15 bp, Homo sapiens
cattatgcttctaat

SEQ ID NO: 315769 - DNA, 15 bp, Homo sapiens
acattatgcttctaa

SEQ ID NO: 315770 - DNA, 15 bp, Homo sapiens
tacattatgcttcta

SEQ ID NO: 315771 - DNA, 15 bp, Homo sapiens
gtacattatgcttct

SEQ ID NO: 315772 - DNA, 15 bp, Homo sapiens
tgtacattatgcttc

SEQ ID NO: 315773 - DNA, 15 bp, Homo sapiens
atgtacattatgctt

SEQ ID NO: 315774 - DNA, 15 bp, Homo sapiens
catgtacattatgct

SEQ ID NO: 315775 - DNA, 15 bp, Homo sapiens
ccatgtacattatgc

SEQ ID NO: 315776 - DNA, 15 bp, Homo sapiens
gccatgtacattatg

SEQ ID NO: 315777 - DNA, 15 bp, Homo sapiens
tgccatgtacattat

SEQ ID NO: 315778 - DNA, 15 bp, Homo sapiens
ctgccatgtacatta

SEQ ID NO: 315779 - DNA, 15 bp, Homo sapiens
cctgccatgtacatt

SEQ ID NO: 315780 - DNA, 15 bp, Homo sapiens
ccctgccatgtacat

SEQ ID NO: 315781 - DNA, 15 bp, Homo sapiens
cccctgccatgtaca

SEQ ID NO: 315782 - DNA, 15 bp, Homo sapiens
gcccctgccatgtac

SEQ ID NO: 315783 - DNA, 15 bp, Homo sapiens
tgcccctgccatgta

SEQ ID NO: 315784 - DNA, 15 bp, Homo sapiens
ctgcccctgccatgt

SEQ ID NO: 315785 - DNA, 15 bp, Homo sapiens
cctgcccctgccatg

SEQ ID NO: 315786 - DNA, 15 bp, Homo sapiens
ccctgcccctgccat

SEQ ID NO: 315787 - DNA, 15 bp, Homo sapiens
tccctgcccctgcca

SEQ ID NO: 315788 - DNA, 15 bp, Homo sapiens
ctccctgcccctgcc

SEQ ID NO: 315789 - DNA, 15 bp, Homo sapiens
tctccctgcccctgc

SEQ ID NO: 315790 - DNA, 15 bp, Homo sapiens
ttctccctgcccctg

SEQ ID NO: 315791 - DNA, 15 bp, Homo sapiens
cttctccctgcccct

SEQ ID NO: 315792 - DNA, 15 bp, Homo sapiens
ccttctccctgcccc

SEQ ID NO: 315793 - DNA, 15 bp, Homo sapiens
cccttctccctgccc

SEQ ID NO: 315794 - DNA, 15 bp, Homo sapiens
ccccttctccctgcc

SEQ ID NO: 315795 - DNA, 15 bp, Homo sapiens
tccccttctccctgc

SEQ ID NO: 315796 - DNA, 15 bp, Homo sapiens
atccccttctccctg

SEQ ID NO: 315797 - DNA, 15 bp, Homo sapiens
catccccttctccct

SEQ ID NO: 315798 - DNA, 15 bp, Homo sapiens
tcatccccttctccc

SEQ ID NO: 315799 - DNA, 15 bp, Homo sapiens
gtcatccccttctcc

SEQ ID NO: 315800 - DNA, 15 bp, Homo sapiens
tgtcatccccttctc

SEQ ID NO: 315801 - DNA, 15 bp, Homo sapiens
ttgtcatccccttct

SEQ ID NO: 315802 - DNA, 15 bp, Homo sapiens
attgtcatccccttc

SEQ ID NO: 315803 - DNA, 15 bp, Homo sapiens
gattgtcatcccctt

SEQ ID NO: 315804 - DNA, 15 bp, Homo sapiens
ggattgtcatcccct

SEQ ID NO: 315805 - DNA, 15 bp, Homo sapiens
tggattgtcatcccc

SEQ ID NO: 315806 - DNA, 15 bp, Homo sapiens
atggattgtcatccc

SEQ ID NO: 315807 - DNA, 15 bp, Homo sapiens
aatggattgtcatcc

SEQ ID NO: 315808 - DNA, 15 bp, Homo sapiens
gaatggattgtcatc

SEQ ID NO: 315809 - DNA, 15 bp, Homo sapiens
agaatggattgtcat

SEQ ID NO: 315810 - DNA, 15 bp, Homo sapiens
aagaatggattgtca

SEQ ID NO: 315811 - DNA, 15 bp, Homo sapiens
aaagaatggattgtc

SEQ ID NO: 315812 - DNA, 15 bp, Homo sapiens
caaagaatggattgt

SEQ ID NO: 315813 - DNA, 15 bp, Homo sapiens
tcaaagaatggattg

SEQ ID NO: 315814 - DNA, 15 bp, Homo sapiens
ttcaaagaatggatt

SEQ ID NO: 315815 - DNA, 15 bp, Homo sapiens
tttcaaagaatggat

SEQ ID NO: 315816 - DNA, 15 bp, Homo sapiens
ctttcaaagaatgga

SEQ ID NO: 315817 - DNA, 15 bp, Homo sapiens
tctttcaaagaatgg

SEQ ID NO: 315818 - DNA, 15 bp, Homo sapiens
ctctttcaaagaatg

SEQ ID NO: 315819 - DNA, 15 bp, Homo sapiens
tctctttcaaagaat

SEQ ID NO: 315820 - DNA, 15 bp, Homo sapiens
gtctctttcaaagaa

SEQ ID NO: 315821 - DNA, 15 bp, Homo sapiens
agtctctttcaaaga

SEQ ID NO: 315822 - DNA, 15 bp, Homo sapiens
gagtctctttcaaag

SEQ ID NO: 315823 - DNA, 15 bp, Homo sapiens
agagtctctttcaaa

SEQ ID NO: 315824 - DNA, 15 bp, Homo sapiens
aagagtctctttcaa

SEQ ID NO: 315825 - DNA, 15 bp, Homo sapiens
gaagagtctctttca

SEQ ID NO: 315826 - DNA, 15 bp, Homo sapiens
agaagagtctctttc

SEQ ID NO: 315827 - DNA, 15 bp, Homo sapiens
gagaagagtctcttt

SEQ ID NO: 315828 - DNA, 15 bp, Homo sapiens
ggagaagagtctctt

SEQ ID NO: 315829 - DNA, 15 bp, Homo sapiens
gggagaagagtctct

SEQ ID NO: 315830 - DNA, 15 bp, Homo sapiens
ggggagaagagtctc

SEQ ID NO: 315831 - DNA, 15 bp, Homo sapiens
aggggagaagagtct

SEQ ID NO: 315832 - DNA, 15 bp, Homo sapiens
aaggggagaagagtc

SEQ ID NO: 315833 - DNA, 15 bp, Homo sapiens
taaggggagaagagt

SEQ ID NO: 315834 - DNA, 15 bp, Homo sapiens
ctaaggggagaagag

SEQ ID NO: 315835 - DNA, 15 bp, Homo sapiens
cctaaggggagaaga

SEQ ID NO: 315836 - DNA, 15 bp, Homo sapiens
acctaaggggagaag

SEQ ID NO: 315837 - DNA, 15 bp, Homo sapiens
aacctaaggggagaa

SEQ ID NO: 315838 - DNA, 15 bp, Homo sapiens
taacctaaggggaga

SEQ ID NO: 315839 - DNA, 15 bp, Homo sapiens
ttaacctaaggggag

SEQ ID NO: 315840 - DNA, 15 bp, Homo sapiens
tttaacctaagggga

SEQ ID NO: 315841 - DNA, 15 bp, Homo sapiens
atttaacctaagggg

SEQ ID NO: 315842 - DNA, 15 bp, Homo sapiens
tatttaacctaaggg

SEQ ID NO: 315843 - DNA, 15 bp, Homo sapiens
ctatttaacctaagg

SEQ ID NO: 315844 - DNA, 15 bp, Homo sapiens
tctatttaacctaag

SEQ ID NO: 315845 - DNA, 15 bp, Homo sapiens
atctatttaacctaa

SEQ ID NO: 315846 - DNA, 15 bp, Homo sapiens
gatctatttaaccta

SEQ ID NO: 315847 - DNA, 15 bp, Homo sapiens
cgatctatttaacct

SEQ ID NO: 315848 - DNA, 15 bp, Homo sapiens
acgatctatttaacc

SEQ ID NO: 315849 - DNA, 15 bp, Homo sapiens
gacgatctatttaac

SEQ ID NO: 315850 - DNA, 15 bp, Homo sapiens
tgacgatctatttaa

SEQ ID NO: 315851 - DNA, 15 bp, Homo sapiens
ttgacgatctattta

SEQ ID NO: 315852 - DNA, 15 bp, Homo sapiens
cttgacgatctattt

SEQ ID NO: 315853 - DNA, 15 bp, Homo sapiens
acttgacgatctatt

SEQ ID NO: 315854 - DNA, 15 bp, Homo sapiens
gacttgacgatctat

SEQ ID NO: 315855 - DNA, 15 bp, Homo sapiens
ggacttgacgatcta

SEQ ID NO: 315856 - DNA, 15 bp, Homo sapiens
aggacttgacgatct

SEQ ID NO: 315857 - DNA, 15 bp, Homo sapiens
aaggacttgacgatc

SEQ ID NO: 315858 - DNA, 15 bp, Homo sapiens
caaggacttgacgat

SEQ ID NO: 315859 - DNA, 15 bp, Homo sapiens
gcaaggacttgacga

SEQ ID NO: 315860 - DNA, 15 bp, Homo sapiens
tgcaaggacttgacg

SEQ ID NO: 315861 - DNA, 15 bp, Homo sapiens
atgcaaggacttgac

SEQ ID NO: 315862 - DNA, 15 bp, Homo sapiens
catgcaaggacttga

SEQ ID NO: 315863 - DNA, 15 bp, Homo sapiens
acatgcaaggacttg

SEQ ID NO: 315864 - DNA, 15 bp, Homo sapiens
gacatgcaaggactt

SEQ ID NO: 315865 - DNA, 15 bp, Homo sapiens
tgacatgcaaggact

SEQ ID NO: 315866 - DNA, 15 bp, Homo sapiens
ttgacatgcaaggac

SEQ ID NO: 315867 - DNA, 15 bp, Homo sapiens
tttgacatgcaagga

SEQ ID NO: 315868 - DNA, 15 bp, Homo sapiens
ttttgacatgcaagg

SEQ ID NO: 315869 - DNA, 15 bp, Homo sapiens
cttttgacatgcaag

SEQ ID NO: 315870 - DNA, 15 bp, Homo sapiens
gcttttgacatgcaa

SEQ ID NO: 315871 - DNA, 15 bp, Homo sapiens
tgcttttgacatgca

SEQ ID NO: 315872 - DNA, 15 bp, Homo sapiens
ctgcttttgacatgc

SEQ ID NO: 315873 - DNA, 15 bp, Homo sapiens
tctgcttttgacatg

SEQ ID NO: 315874 - DNA, 15 bp, Homo sapiens
ctctgcttttgacat

SEQ ID NO: 315875 - DNA, 15 bp, Homo sapiens
tctctgcttttgaca

SEQ ID NO: 315876 - DNA, 15 bp, Homo sapiens
atctctgcttttgac

SEQ ID NO: 315877 - DNA, 15 bp, Homo sapiens
catctctgcttttga

SEQ ID NO: 315878 - DNA, 15 bp, Homo sapiens
acatctctgcttttg

SEQ ID NO: 315879 - DNA, 15 bp, Homo sapiens
cacatctctgctttt

SEQ ID NO: 315880 - DNA, 15 bp, Homo sapiens
tcacatctctgcttt

SEQ ID NO: 315881 - DNA, 15 bp, Homo sapiens
ttcacatctctgctt

SEQ ID NO: 315882 - DNA, 15 bp, Homo sapiens
attcacatctctgct

SEQ ID NO: 315883 - DNA, 15 bp, Homo sapiens
gattcacatctctgc

SEQ ID NO: 315884 - DNA, 15 bp, Homo sapiens
tgattcacatctctg

SEQ ID NO: 315885 - DNA, 15 bp, Homo sapiens
gtgattcacatctct

SEQ ID NO: 315886 - DNA, 15 bp, Homo sapiens
agtgattcacatctc

SEQ ID NO: 315887 - DNA, 15 bp, Homo sapiens
cagtgattcacatct

SEQ ID NO: 315888 - DNA, 15 bp, Homo sapiens
acagtgattcacatc

SEQ ID NO: 315889 - DNA, 15 bp, Homo sapiens
gacagtgattcacat

SEQ ID NO: 315890 - DNA, 15 bp, Homo sapiens
ggacagtgattcaca

SEQ ID NO: 315891 - DNA, 15 bp, Homo sapiens
aggacagtgattcac

SEQ ID NO: 315892 - DNA, 15 bp, Homo sapiens
aaggacagtgattca

SEQ ID NO: 315893 - DNA, 15 bp, Homo sapiens
gaaggacagtgattc

SEQ ID NO: 315894 - DNA, 15 bp, Homo sapiens
tgaaggacagtgatt

SEQ ID NO: 315895 - DNA, 15 bp, Homo sapiens
ctgaaggacagtgat

SEQ ID NO: 315896 - DNA, 15 bp, Homo sapiens
tctgaaggacagtga

SEQ ID NO: 315897 - DNA, 15 bp, Homo sapiens
ttctgaaggacagtg

SEQ ID NO: 315898 - DNA, 15 bp, Homo sapiens
tttctgaaggacagt

SEQ ID NO: 315899 - DNA, 15 bp, Homo sapiens
ctttctgaaggacag

SEQ ID NO: 315900 - DNA, 15 bp, Homo sapiens
cctttctgaaggaca

SEQ ID NO: 315901 - DNA, 15 bp, Homo sapiens
ccctttctgaaggac

SEQ ID NO: 315902 - DNA, 15 bp, Homo sapiens
tccctttctgaagga

SEQ ID NO: 315903 - DNA, 15 bp, Homo sapiens
ttccctttctgaagg

SEQ ID NO: 315904 - DNA, 15 bp, Homo sapiens
cttccctttctgaag

SEQ ID NO: 315905 - DNA, 15 bp, Homo sapiens
tcttccctttctgaa

SEQ ID NO: 315906 - DNA, 15 bp, Homo sapiens
ttcttccctttctga

SEQ ID NO: 315907 - DNA, 15 bp, Homo sapiens
tttcttccctttctg

SEQ ID NO: 315908 - DNA, 15 bp, Homo sapiens
ttttcttccctttct

SEQ ID NO: 315909 - DNA, 15 bp, Homo sapiens
gttttcttccctttc

SEQ ID NO: 315910 - DNA, 15 bp, Homo sapiens
tgttttcttcccttt

SEQ ID NO: 315911 - DNA, 15 bp, Homo sapiens
gtgttttcttccctt

SEQ ID NO: 315912 - DNA, 15 bp, Homo sapiens
agtgttttcttccct

SEQ ID NO: 315913 - DNA, 15 bp, Homo sapiens
aagtgttttcttccc

SEQ ID NO: 315914 - DNA, 15 bp, Homo sapiens
aaagtgttttcttcc

SEQ ID NO: 315915 - DNA, 15 bp, Homo sapiens
taaagtgttttcttc

SEQ ID NO: 315916 - DNA, 15 bp, Homo sapiens
ttaaagtgttttctt

SEQ ID NO: 315917 - DNA, 15 bp, Homo sapiens
cttaaagtgttttct

SEQ ID NO: 315918 - DNA, 15 bp, Homo sapiens
gcttaaagtgttttc

SEQ ID NO: 315919 - DNA, 15 bp, Homo sapiens
tgcttaaagtgtttt

SEQ ID NO: 315920 - DNA, 15 bp, Homo sapiens
ttgcttaaagtgttt

SEQ ID NO: 315921 - DNA, 15 bp, Homo sapiens
cttgcttaaagtgtt

SEQ ID NO: 315922 - DNA, 15 bp, Homo sapiens
acttgcttaaagtgt

SEQ ID NO: 315923 - DNA, 15 bp, Homo sapiens
cacttgcttaaagtg

SEQ ID NO: 315924 - DNA, 15 bp, Homo sapiens
gcacttgcttaaagt

SEQ ID NO: 315925 - DNA, 15 bp, Homo sapiens
tgcacttgcttaaag

SEQ ID NO: 315926 - DNA, 15 bp, Homo sapiens
ttgcacttgcttaaa

SEQ ID NO: 315927 - DNA, 15 bp, Homo sapiens
tttgcacttgcttaa

SEQ ID NO: 315928 - DNA, 15 bp, Homo sapiens
ctttgcacttgctta

SEQ ID NO: 315929 - DNA, 15 bp, Homo sapiens
actttgcacttgctt

SEQ ID NO: 315930 - DNA, 15 bp, Homo sapiens
aactttgcacttgct

SEQ ID NO: 315931 - DNA, 15 bp, Homo sapiens
gaactttgcacttgc

SEQ ID NO: 315932 - DNA, 15 bp, Homo sapiens
ggaactttgcacttg

SEQ ID NO: 315933 - DNA, 15 bp, Homo sapiens
gggaactttgcactt

SEQ ID NO: 315934 - DNA, 15 bp, Homo sapiens
tgggaactttgcact

SEQ ID NO: 315935 - DNA, 15 bp, Homo sapiens
ctgggaactttgcac

SEQ ID NO: 315936 - DNA, 15 bp, Homo sapiens
gctgggaactttgca

SEQ ID NO: 315937 - DNA, 15 bp, Homo sapiens
agctgggaactttgc

SEQ ID NO: 315938 - DNA, 15 bp, Homo sapiens
cagctgggaactttg

SEQ ID NO: 315939 - DNA, 15 bp, Homo sapiens
acagctgggaacttt

SEQ ID NO: 315940 - DNA, 15 bp, Homo sapiens
cacagctgggaactt

SEQ ID NO: 315941 - DNA, 15 bp, Homo sapiens
gcacagctgggaact

SEQ ID NO: 315942 - DNA, 15 bp, Homo sapiens
agcacagctgggaac

SEQ ID NO: 315943 - DNA, 15 bp, Homo sapiens
tagcacagctgggaa

SEQ ID NO: 315944 - DNA, 15 bp, Homo sapiens
ctagcacagctggga

SEQ ID NO: 315945 - DNA, 15 bp, Homo sapiens
cctagcacagctggg

SEQ ID NO: 315946 - DNA, 15 bp, Homo sapiens
gcctagcacagctgg

SEQ ID NO: 315947 - DNA, 15 bp, Homo sapiens
tgcctagcacagctg

SEQ ID NO: 315948 - DNA, 15 bp, Homo sapiens
gtgcctagcacagct

SEQ ID NO: 315949 - DNA, 15 bp, Homo sapiens
cgtgcctagcacagc

SEQ ID NO: 315950 - DNA, 15 bp, Homo sapiens
tcgtgcctagcacag

SEQ ID NO: 315951 - DNA, 15 bp, Homo sapiens
atcgtgcctagcaca

SEQ ID NO: 315952 - DNA, 15 bp, Homo sapiens
catcgtgcctagcac

SEQ ID NO: 315953 - DNA, 15 bp, Homo sapiens
ccatcgtgcctagca

SEQ ID NO: 315954 - DNA, 15 bp, Homo sapiens
tccatcgtgcctagc

SEQ ID NO: 315955 - DNA, 15 bp, Homo sapiens
atccatcgtgcctag

SEQ ID NO: 315956 - DNA, 15 bp, Homo sapiens
aatccatcgtgccta

SEQ ID NO: 315957 - DNA, 15 bp, Homo sapiens
taatccatcgtgcct

SEQ ID NO: 315958 - DNA, 15 bp, Homo sapiens
ataatccatcgtgcc

SEQ ID NO: 315959 - DNA, 15 bp, Homo sapiens
tataatccatcgtgc

SEQ ID NO: 315960 - DNA, 15 bp, Homo sapiens
gtataatccatcgtg

SEQ ID NO: 315961 - DNA, 15 bp, Homo sapiens
ggtataatccatcgt

SEQ ID NO: 315962 - DNA, 15 bp, Homo sapiens
gggtataatccatcg

SEQ ID NO: 315963 - DNA, 15 bp, Homo sapiens
tgggtataatccatc

SEQ ID NO: 315964 - DNA, 15 bp, Homo sapiens
ttgggtataatccat

SEQ ID NO: 315965 - DNA, 15 bp, Homo sapiens
tttgggtataatcca

SEQ ID NO: 315966 - DNA, 15 bp, Homo sapiens
ctttgggtataatcc

SEQ ID NO: 315967 - DNA, 15 bp, Homo sapiens
tctttgggtataatc

SEQ ID NO: 315968 - DNA, 15 bp, Homo sapiens
ttctttgggtataat

SEQ ID NO: 315969 - DNA, 15 bp, Homo sapiens
cttctttgggtataa

SEQ ID NO: 315970 - DNA, 15 bp, Homo sapiens
acttctttgggtata

SEQ ID NO: 315971 - DNA, 15 bp, Homo sapiens
aacttctttgggtat

SEQ ID NO: 315972 - DNA, 15 bp, Homo sapiens
caacttctttgggta

SEQ ID NO: 315973 - DNA, 15 bp, Homo sapiens
ccaacttctttgggt

SEQ ID NO: 315974 - DNA, 15 bp, Homo sapiens
tccaacttctttggg

SEQ ID NO: 315975 - DNA, 15 bp, Homo sapiens
gtccaacttctttgg

SEQ ID NO: 315976 - DNA, 15 bp, Homo sapiens
tgtccaacttctttg

SEQ ID NO: 315977 - DNA, 15 bp, Homo sapiens
ctgtccaacttcttt

SEQ ID NO: 315978 - DNA, 15 bp, Homo sapiens
tctgtccaacttctt

SEQ ID NO: 315979 - DNA, 15 bp, Homo sapiens
ctctgtccaacttct

SEQ ID NO: 315980 - DNA, 15 bp, Homo sapiens
tctctgtccaacttc

SEQ ID NO: 315981 - DNA, 15 bp, Homo sapiens
gtctctgtccaactt

SEQ ID NO: 315982 - DNA, 15 bp, Homo sapiens
ggtctctgtccaact

SEQ ID NO: 315983 - DNA, 15 bp, Homo sapiens
aggtctctgtccaac

SEQ ID NO: 315984 - DNA, 15 bp, Homo sapiens
aaggtctctgtccaa

SEQ ID NO: 315985 - DNA, 15 bp, Homo sapiens
caaggtctctgtcca

SEQ ID NO: 315986 - DNA, 15 bp, Homo sapiens
tcaaggtctctgtcc

SEQ ID NO: 315987 - DNA, 15 bp, Homo sapiens
gtcaaggtctctgtc

SEQ ID NO: 315988 - DNA, 15 bp, Homo sapiens
ggtcaaggtctctgt

SEQ ID NO: 315989 - DNA, 15 bp, Homo sapiens
aggtcaaggtctctg

SEQ ID NO: 315990 - DNA, 15 bp, Homo sapiens
gaggtcaaggtctct

SEQ ID NO: 315991 - DNA, 15 bp, Homo sapiens
tgaggtcaaggtctc

SEQ ID NO: 315992 - DNA, 15 bp, Homo sapiens
ttgaggtcaaggtct

SEQ ID NO: 315993 - DNA, 15 bp, Homo sapiens
cttgaggtcaaggtc

SEQ ID NO: 315994 - DNA, 15 bp, Homo sapiens
ccttgaggtcaaggt

SEQ ID NO: 315995 - DNA, 15 bp, Homo sapiens
tccttgaggtcaagg

SEQ ID NO: 315996 - DNA, 15 bp, Homo sapiens
atccttgaggtcaag

SEQ ID NO: 315997 - DNA, 15 bp, Homo sapiens
aatccttgaggtcaa

SEQ ID NO: 315998 - DNA, 15 bp, Homo sapiens
aaatccttgaggtca

SEQ ID NO: 315999 - DNA, 15 bp, Homo sapiens
gaaatccttgaggtc

SEQ ID NO: 316000 - DNA, 15 bp, Homo sapiens
tgaaatccttgaggt

SEQ ID NO: 316001 - DNA, 15 bp, Homo sapiens
atgaaatccttgagg

SEQ ID NO: 316002 - DNA, 15 bp, Homo sapiens
gatgaaatccttgag

SEQ ID NO: 316003 - DNA, 15 bp, Homo sapiens
cgatgaaatccttga

SEQ ID NO: 316004 - DNA, 15 bp, Homo sapiens
acgatgaaatccttg

SEQ ID NO: 316005 - DNA, 15 bp, Homo sapiens
gacgatgaaatcctt

SEQ ID NO: 316006 - DNA, 15 bp, Homo sapiens
agacgatgaaatcct

SEQ ID NO: 316007 - DNA, 15 bp, Homo sapiens
tagacgatgaaatcc

SEQ ID NO: 316008 - DNA, 15 bp, Homo sapiens
atagacgatgaaatc

SEQ ID NO: 316009 - DNA, 15 bp, Homo sapiens
aatagacgatgaaat

SEQ ID NO: 316010 - DNA, 15 bp, Homo sapiens
aaatagacgatgaaa

SEQ ID NO: 316011 - DNA, 15 bp, Homo sapiens
caaatagacgatgaa

SEQ ID NO: 316012 - DNA, 15 bp, Homo sapiens
tcaaatagacgatga

SEQ ID NO: 316013 - DNA, 15 bp, Homo sapiens
ttcaaatagacgatg

SEQ ID NO: 316014 - DNA, 15 bp, Homo sapiens
attcaaatagacgat

SEQ ID NO: 316015 - DNA, 15 bp, Homo sapiens
tattcaaatagacga

SEQ ID NO: 316016 - DNA, 15 bp, Homo sapiens
ctattcaaatagacg

SEQ ID NO: 316017 - DNA, 15 bp, Homo sapiens
tctattcaaatagac

SEQ ID NO: 316018 - DNA, 15 bp, Homo sapiens
ttctattcaaataga

SEQ ID NO: 316019 - DNA, 15 bp, Homo sapiens
tttctattcaaatag

SEQ ID NO: 316020 - DNA, 15 bp, Homo sapiens
atttctattcaaata

SEQ ID NO: 316021 - DNA, 15 bp, Homo sapiens
catttctattcaaat

SEQ ID NO: 316022 - DNA, 15 bp, Homo sapiens
tcatttctattcaaa

SEQ ID NO: 316023 - DNA, 15 bp, Homo sapiens
atcatttctattcaa

SEQ ID NO: 316024 - DNA, 15 bp, Homo sapiens
aatcatttctattca

SEQ ID NO: 316025 - DNA, 15 bp, Homo sapiens
aaatcatttctattc

SEQ ID NO: 316026 - DNA, 15 bp, Homo sapiens
gaaatcatttctatt

SEQ ID NO: 316027 - DNA, 15 bp, Homo sapiens
agaaatcatttctat

SEQ ID NO: 316028 - DNA, 15 bp, Homo sapiens
tagaaatcatttcta

SEQ ID NO: 316029 - DNA, 15 bp, Homo sapiens
atagaaatcatttct

SEQ ID NO: 316030 - DNA, 15 bp, Homo sapiens
tatagaaatcatttc

SEQ ID NO: 316031 - DNA, 15 bp, Homo sapiens
atatagaaatcattt

SEQ ID NO: 316032 - DNA, 15 bp, Homo sapiens
tatatagaaatcatt

SEQ ID NO: 316033 - DNA, 15 bp, Homo sapiens
ttatatagaaatcat

SEQ ID NO: 316034 - DNA, 15 bp, Homo sapiens
gttatatagaaatca

SEQ ID NO: 316035 - DNA, 15 bp, Homo sapiens
agttatatagaaatc

SEQ ID NO: 316036 - DNA, 15 bp, Homo sapiens
cagttatatagaaat

SEQ ID NO: 316037 - DNA, 15 bp, Homo sapiens
tcagttatatagaaa

SEQ ID NO: 316038 - DNA, 15 bp, Homo sapiens
ttcagttatatagaa

SEQ ID NO: 316039 - DNA, 15 bp, Homo sapiens
attcagttatataga

SEQ ID NO: 316040 - DNA, 15 bp, Homo sapiens
aattcagttatatag

SEQ ID NO: 316041 - DNA, 15 bp, Homo sapiens
taattcagttatata

SEQ ID NO: 316042 - DNA, 15 bp, Homo sapiens
ttaattcagttatat

SEQ ID NO: 316043 - DNA, 15 bp, Homo sapiens
cttaattcagttata

SEQ ID NO: 316044 - DNA, 15 bp, Homo sapiens
gcttaattcagttat

SEQ ID NO: 316045 - DNA, 15 bp, Homo sapiens
ggcttaattcagtta

SEQ ID NO: 316046 - DNA, 15 bp, Homo sapiens
tggcttaattcagtt

SEQ ID NO: 316047 - DNA, 15 bp, Homo sapiens
ctggcttaattcagt

SEQ ID NO: 316048 - DNA, 15 bp, Homo sapiens
tctggcttaattcag

SEQ ID NO: 316049 - DNA, 15 bp, Homo sapiens
ctctggcttaattca

SEQ ID NO: 316050 - DNA, 15 bp, Homo sapiens
gctctggcttaattc

SEQ ID NO: 316051 - DNA, 15 bp, Homo sapiens
tgctctggcttaatt

SEQ ID NO: 316052 - DNA, 15 bp, Homo sapiens
ttgctctggcttaat

SEQ ID NO: 316053 - DNA, 15 bp, Homo sapiens
attgctctggcttaa

SEQ ID NO: 316054 - DNA, 15 bp, Homo sapiens
tattgctctggctta

SEQ ID NO: 316055 - DNA, 15 bp, Homo sapiens
ttattgctctggctt

SEQ ID NO: 316056 - DNA, 15 bp, Homo sapiens
tttattgctctggct

SEQ ID NO: 316057 - DNA, 15 bp, Homo sapiens
ttttattgctctggc

SEQ ID NO: 316058 - DNA, 15 bp, Homo sapiens
tttttattgctctgg

SEQ ID NO: 316059 - DNA, 15 bp, Homo sapiens
atttttattgctctg

SEQ ID NO: 316060 - DNA, 15 bp, Homo sapiens
tatttttattgctct

SEQ ID NO: 316061 - DNA, 15 bp, Homo sapiens
ctatttttattgctc

SEQ ID NO: 316062 - DNA, 15 bp, Homo sapiens
gctatttttattgct

SEQ ID NO: 316063 - DNA, 15 bp, Homo sapiens
tgctatttttattgc

SEQ ID NO: 316064 - DNA, 15 bp, Homo sapiens
atgctatttttattg

SEQ ID NO: 316065 - DNA, 15 bp, Homo sapiens
catgctatttttatt

SEQ ID NO: 316066 - DNA, 15 bp, Homo sapiens
tcatgctatttttat

SEQ ID NO: 316067 - DNA, 15 bp, Homo sapiens
atcatgctattttta

SEQ ID NO: 316068 - DNA, 15 bp, Homo sapiens
tatcatgctattttt

SEQ ID NO: 316069 - DNA, 15 bp, Homo sapiens
atatcatgctatttt

SEQ ID NO: 316070 - DNA, 15 bp, Homo sapiens
aatatcatgctattt

SEQ ID NO: 316071 - DNA, 15 bp, Homo sapiens
taatatcatgctatt

SEQ ID NO: 316072 - DNA, 15 bp, Homo sapiens
ctaatatcatgctat

SEQ ID NO: 316073 - DNA, 15 bp, Homo sapiens
cctaatatcatgcta

SEQ ID NO: 316074 - DNA, 15 bp, Homo sapiens
acctaatatcatgct

SEQ ID NO: 316075 - DNA, 15 bp, Homo sapiens
aacctaatatcatgc

SEQ ID NO: 316076 - DNA, 15 bp, Homo sapiens
gaacctaatatcatg

SEQ ID NO: 316077 - DNA, 15 bp, Homo sapiens
agaacctaatatcat

SEQ ID NO: 316078 - DNA, 15 bp, Homo sapiens
tagaacctaatatca

SEQ ID NO: 316079 - DNA, 15 bp, Homo sapiens
ttagaacctaatatc

SEQ ID NO: 316080 - DNA, 15 bp, Homo sapiens
tttagaacctaatat

SEQ ID NO: 316081 - DNA, 15 bp, Homo sapiens
ctttagaacctaata

SEQ ID NO: 316082 - DNA, 15 bp, Homo sapiens
actttagaacctaat

SEQ ID NO: 316083 - DNA, 15 bp, Homo sapiens
cactttagaacctaa

SEQ ID NO: 316084 - DNA, 15 bp, Homo sapiens
tcactttagaaccta

SEQ ID NO: 316085 - DNA, 15 bp, Homo sapiens
ctcactttagaacct

SEQ ID NO: 316086 - DNA, 15 bp, Homo sapiens
actcactttagaacc

SEQ ID NO: 316087 - DNA, 15 bp, Homo sapiens
cactcactttagaac

SEQ ID NO: 316088 - DNA, 15 bp, Homo sapiens
acactcactttagaa

SEQ ID NO: 316089 - DNA, 15 bp, Homo sapiens
aacactcactttaga

SEQ ID NO: 316090 - DNA, 15 bp, Homo sapiens
caacactcactttag

SEQ ID NO: 316091 - DNA, 15 bp, Homo sapiens
gcaacactcacttta

SEQ ID NO: 316092 - DNA, 15 bp, Homo sapiens
tgcaacactcacttt

SEQ ID NO: 316093 - DNA, 15 bp, Homo sapiens
ctgcaacactcactt

SEQ ID NO: 316094 - DNA, 15 bp, Homo sapiens
cctgcaacactcact

SEQ ID NO: 316095 - DNA, 15 bp, Homo sapiens
tcctgcaacactcac

SEQ ID NO: 316096 - DNA, 15 bp, Homo sapiens
ttcctgcaacactca

SEQ ID NO: 316097 - DNA, 15 bp, Homo sapiens
tttcctgcaacactc

SEQ ID NO: 316098 - DNA, 15 bp, Homo sapiens
gtttcctgcaacact

SEQ ID NO: 316099 - DNA, 15 bp, Homo sapiens
tgtttcctgcaacac

SEQ ID NO: 316100 - DNA, 15 bp, Homo sapiens
ctgtttcctgcaaca

SEQ ID NO: 316101 - DNA, 15 bp, Homo sapiens
tctgtttcctgcaac

SEQ ID NO: 316102 - DNA, 15 bp, Homo sapiens
ttctgtttcctgcaa

SEQ ID NO: 316103 - DNA, 15 bp, Homo sapiens
cttctgtttcctgca

SEQ ID NO: 316104 - DNA, 15 bp, Homo sapiens
ccttctgtttcctgc

SEQ ID NO: 316105 - DNA, 15 bp, Homo sapiens
tccttctgtttcctg

SEQ ID NO: 316106 - DNA, 15 bp, Homo sapiens
ttccttctgtttcct

SEQ ID NO: 316107 - DNA, 15 bp, Homo sapiens
gttccttctgtttcc

SEQ ID NO: 316108 - DNA, 15 bp, Homo sapiens
agttccttctgtttc

SEQ ID NO: 316109 - DNA, 15 bp, Homo sapiens
aagttccttctgttt

SEQ ID NO: 316110 - DNA, 15 bp, Homo sapiens
gaagttccttctgtt

SEQ ID NO: 316111 - DNA, 15 bp, Homo sapiens
ggaagttccttctgt

SEQ ID NO: 316112 - DNA, 15 bp, Homo sapiens
tggaagttccttctg

SEQ ID NO: 316113 - DNA, 15 bp, Homo sapiens
ttggaagttccttct

SEQ ID NO: 316114 - DNA, 15 bp, Homo sapiens
tttggaagttccttc

SEQ ID NO: 316115 - DNA, 15 bp, Homo sapiens
atttggaagttcctt

SEQ ID NO: 316116 - DNA, 15 bp, Homo sapiens
catttggaagttcct

SEQ ID NO: 316117 - DNA, 15 bp, Homo sapiens
acatttggaagttcc

SEQ ID NO: 316118 - DNA, 15 bp, Homo sapiens
aacatttggaagttc

SEQ ID NO: 316119 - DNA, 15 bp, Homo sapiens
caacatttggaagtt

SEQ ID NO: 316120 - DNA, 15 bp, Homo sapiens
acaacatttggaagt

SEQ ID NO: 316121 - DNA, 15 bp, Homo sapiens
aacaacatttggaag

SEQ ID NO: 316122 - DNA, 15 bp, Homo sapiens
taacaacatttggaa

SEQ ID NO: 316123 - DNA, 15 bp, Homo sapiens
ataacaacatttgga

SEQ ID NO: 316124 - DNA, 15 bp, Homo sapiens
aataacaacatttgg

SEQ ID NO: 316125 - DNA, 15 bp, Homo sapiens
aaataacaacatttg

SEQ ID NO: 316126 - DNA, 15 bp, Homo sapiens
taaataacaacattt

SEQ ID NO: 316127 - DNA, 15 bp, Homo sapiens
gtaaataacaacatt

SEQ ID NO: 316128 - DNA, 15 bp, Homo sapiens
tgtaaataacaacat

SEQ ID NO: 316129 - DNA, 15 bp, Homo sapiens
ctgtaaataacaaca

SEQ ID NO: 316130 - DNA, 15 bp, Homo sapiens
tctgtaaataacaac

SEQ ID NO: 316131 - DNA, 15 bp, Homo sapiens
atctgtaaataacaa

SEQ ID NO: 316132 - DNA, 15 bp, Homo sapiens
aatctgtaaataaca

SEQ ID NO: 316133 - DNA, 15 bp, Homo sapiens
aaatctgtaaataac

SEQ ID NO: 316134 - DNA, 15 bp, Homo sapiens
gaaatctgtaaataa

SEQ ID NO: 316135 - DNA, 15 bp, Homo sapiens
agaaatctgtaaata

SEQ ID NO: 316136 - DNA, 15 bp, Homo sapiens
tagaaatctgtaaat

SEQ ID NO: 316137 - DNA, 15 bp, Homo sapiens
gtagaaatctgtaaa

SEQ ID NO: 316138 - DNA, 15 bp, Homo sapiens
ggtagaaatctgtaa

SEQ ID NO: 316139 - DNA, 15 bp, Homo sapiens
aggtagaaatctgta

SEQ ID NO: 316140 - DNA, 15 bp, Homo sapiens
aaggtagaaatctgt

SEQ ID NO: 316141 - DNA, 15 bp, Homo sapiens
caaggtagaaatctg

SEQ ID NO: 316142 - DNA, 15 bp, Homo sapiens
acaaggtagaaatct

SEQ ID NO: 316143 - DNA, 15 bp, Homo sapiens
cacaaggtagaaatc

SEQ ID NO: 316144 - DNA, 15 bp, Homo sapiens
tcacaaggtagaaat

SEQ ID NO: 316145 - DNA, 15 bp, Homo sapiens
ttcacaaggtagaaa

SEQ ID NO: 316146 - DNA, 15 bp, Homo sapiens
tttcacaaggtagaa

SEQ ID NO: 316147 - DNA, 15 bp, Homo sapiens
atttcacaaggtaga

SEQ ID NO: 316148 - DNA, 15 bp, Homo sapiens
catttcacaaggtag

SEQ ID NO: 316149 - DNA, 15 bp, Homo sapiens
acatttcacaaggta

SEQ ID NO: 316150 - DNA, 15 bp, Homo sapiens
tacatttcacaaggt

SEQ ID NO: 316151 - DNA, 15 bp, Homo sapiens
ctacatttcacaagg

SEQ ID NO: 316152 - DNA, 15 bp, Homo sapiens
tctacatttcacaag

SEQ ID NO: 316153 - DNA, 15 bp, Homo sapiens
ttctacatttcacaa

SEQ ID NO: 316154 - DNA, 15 bp, Homo sapiens
cttctacatttcaca

SEQ ID NO: 316155 - DNA, 15 bp, Homo sapiens
acttctacatttcac

SEQ ID NO: 316156 - DNA, 15 bp, Homo sapiens
tacttctacatttca

SEQ ID NO: 316157 - DNA, 15 bp, Homo sapiens
gtacttctacatttc

SEQ ID NO: 316158 - DNA, 15 bp, Homo sapiens
ggtacttctacattt

SEQ ID NO: 316159 - DNA, 15 bp, Homo sapiens
aggtacttctacatt

SEQ ID NO: 316160 - DNA, 15 bp, Homo sapiens
caggtacttctacat

SEQ ID NO: 316161 - DNA, 15 bp, Homo sapiens
acaggtacttctaca

SEQ ID NO: 316162 - DNA, 15 bp, Homo sapiens
aacaggtacttctac

SEQ ID NO: 316163 - DNA, 15 bp, Homo sapiens
gaacaggtacttcta

SEQ ID NO: 316164 - DNA, 15 bp, Homo sapiens
agaacaggtacttct

SEQ ID NO: 316165 - DNA, 15 bp, Homo sapiens
gagaacaggtacttc

SEQ ID NO: 316166 - DNA, 15 bp, Homo sapiens
tgagaacaggtactt

SEQ ID NO: 316167 - DNA, 15 bp, Homo sapiens
ttgagaacaggtact

SEQ ID NO: 316168 - DNA, 15 bp, Homo sapiens
tttgagaacaggtac

SEQ ID NO: 316169 - DNA, 15 bp, Homo sapiens
atttgagaacaggta

SEQ ID NO: 316170 - DNA, 15 bp, Homo sapiens
aatttgagaacaggt

SEQ ID NO: 316171 - DNA, 15 bp, Homo sapiens
taatttgagaacagg

SEQ ID NO: 316172 - DNA, 15 bp, Homo sapiens
ttaatttgagaacag

SEQ ID NO: 316173 - DNA, 15 bp, Homo sapiens
tttaatttgagaaca

SEQ ID NO: 316174 - DNA, 15 bp, Homo sapiens
gtttaatttgagaac

SEQ ID NO: 316175 - DNA, 15 bp, Homo sapiens
tgtttaatttgagaa

SEQ ID NO: 316176 - DNA, 15 bp, Homo sapiens
atgtttaatttgaga

SEQ ID NO: 316177 - DNA, 15 bp, Homo sapiens
aatgtttaatttgag

SEQ ID NO: 316178 - DNA, 15 bp, Homo sapiens
gaatgtttaatttga

SEQ ID NO: 316179 - DNA, 15 bp, Homo sapiens
ggaatgtttaatttg

SEQ ID NO: 316180 - DNA, 15 bp, Homo sapiens
aggaatgtttaattt

SEQ ID NO: 316181 - DNA, 15 bp, Homo sapiens
aaggaatgtttaatt

SEQ ID NO: 316182 - DNA, 15 bp, Homo sapiens
gaaggaatgtttaat

SEQ ID NO: 316183 - DNA, 15 bp, Homo sapiens
ggaaggaatgtttaa

SEQ ID NO: 316184 - DNA, 15 bp, Homo sapiens
aggaaggaatgttta

SEQ ID NO: 316185 - DNA, 15 bp, Homo sapiens
gaggaaggaatgttt

SEQ ID NO: 316186 - DNA, 15 bp, Homo sapiens
tgaggaaggaatgtt

SEQ ID NO: 316187 - DNA, 15 bp, Homo sapiens
atgaggaaggaatgt

SEQ ID NO: 316188 - DNA, 15 bp, Homo sapiens
aatgaggaaggaatg

SEQ ID NO: 316189 - DNA, 15 bp, Homo sapiens
aaatgaggaaggaat

SEQ ID NO: 316190 - DNA, 15 bp, Homo sapiens
gaaatgaggaaggaa

SEQ ID NO: 316191 - DNA, 15 bp, Homo sapiens
tgaaatgaggaagga

SEQ ID NO: 316192 - DNA, 15 bp, Homo sapiens
ttgaaatgaggaagg

SEQ ID NO: 316193 - DNA, 15 bp, Homo sapiens
cttgaaatgaggaag

SEQ ID NO: 316194 - DNA, 15 bp, Homo sapiens
tcttgaaatgaggaa

SEQ ID NO: 316195 - DNA, 15 bp, Homo sapiens
atcttgaaatgagga

SEQ ID NO: 316196 - DNA, 15 bp, Homo sapiens
catcttgaaatgagg

SEQ ID NO: 316197 - DNA, 15 bp, Homo sapiens
acatcttgaaatgag

SEQ ID NO: 316198 - DNA, 15 bp, Homo sapiens
gacatcttgaaatga

SEQ ID NO: 316199 - DNA, 15 bp, Homo sapiens
tgacatcttgaaatg

SEQ ID NO: 316200 - DNA, 15 bp, Homo sapiens
ctgacatcttgaaat

SEQ ID NO: 316201 - DNA, 15 bp, Homo sapiens
gctgacatcttgaaa

SEQ ID NO: 316202 - DNA, 15 bp, Homo sapiens
agctgacatcttgaa

SEQ ID NO: 316203 - DNA, 15 bp, Homo sapiens
tagctgacatcttga

SEQ ID NO: 316204 - DNA, 15 bp, Homo sapiens
gtagctgacatcttg

SEQ ID NO: 316205 - DNA, 15 bp, Homo sapiens
tgtagctgacatctt

SEQ ID NO: 316206 - DNA, 15 bp, Homo sapiens
atgtagctgacatct

SEQ ID NO: 316207 - DNA, 15 bp, Homo sapiens
gatgtagctgacatc

SEQ ID NO: 316208 - DNA, 15 bp, Homo sapiens
tgatgtagctgacat

SEQ ID NO: 316209 - DNA, 15 bp, Homo sapiens
ctgatgtagctgaca

SEQ ID NO: 316210 - DNA, 15 bp, Homo sapiens
tctgatgtagctgac

SEQ ID NO: 316211 - DNA, 15 bp, Homo sapiens
ctctgatgtagctga

SEQ ID NO: 316212 - DNA, 15 bp, Homo sapiens
cctctgatgtagctg

SEQ ID NO: 316213 - DNA, 15 bp, Homo sapiens
acctctgatgtagct

SEQ ID NO: 316214 - DNA, 15 bp, Homo sapiens
aacctctgatgtagc

SEQ ID NO: 316215 - DNA, 15 bp, Homo sapiens
caacctctgatgtag

SEQ ID NO: 316216 - DNA, 15 bp, Homo sapiens
tcaacctctgatgta

SEQ ID NO: 316217 - DNA, 15 bp, Homo sapiens
gtcaacctctgatgt

SEQ ID NO: 316218 - DNA, 15 bp, Homo sapiens
ggtcaacctctgatg

SEQ ID NO: 316219 - DNA, 15 bp, Homo sapiens
tggtcaacctctgat

SEQ ID NO: 316220 - DNA, 15 bp, Homo sapiens
ttggtcaacctctga

SEQ ID NO: 316221 - DNA, 15 bp, Homo sapiens
gttggtcaacctctg

SEQ ID NO: 316222 - DNA, 15 bp, Homo sapiens
agttggtcaacctct

SEQ ID NO: 316223 - DNA, 15 bp, Homo sapiens
tagttggtcaacctc

SEQ ID NO: 316224 - DNA, 15 bp, Homo sapiens
atagttggtcaacct

SEQ ID NO: 316225 - DNA, 15 bp, Homo sapiens
catagttggtcaacc

SEQ ID NO: 316226 - DNA, 15 bp, Homo sapiens
ccatagttggtcaac

SEQ ID NO: 316227 - DNA, 15 bp, Homo sapiens
gccatagttggtcaa

SEQ ID NO: 316228 - DNA, 15 bp, Homo sapiens
ggccatagttggtca

SEQ ID NO: 316229 - DNA, 15 bp, Homo sapiens
aggccatagttggtc

SEQ ID NO: 316230 - DNA, 15 bp, Homo sapiens
taggccatagttggt

SEQ ID NO: 316231 - DNA, 15 bp, Homo sapiens
gtaggccatagttgg

SEQ ID NO: 316232 - DNA, 15 bp, Homo sapiens
tgtaggccatagttg

SEQ ID NO: 316233 - DNA, 15 bp, Homo sapiens
ctgtaggccatagtt

SEQ ID NO: 316234 - DNA, 15 bp, Homo sapiens
cctgtaggccatagt

SEQ ID NO: 316235 - DNA, 15 bp, Homo sapiens
gcctgtaggccatag

SEQ ID NO: 316236 - DNA, 15 bp, Homo sapiens
agcctgtaggccata

SEQ ID NO: 316237 - DNA, 15 bp, Homo sapiens
tagcctgtaggccat

SEQ ID NO: 316238 - DNA, 15 bp, Homo sapiens
gtagcctgtaggcca

SEQ ID NO: 316239 - DNA, 15 bp, Homo sapiens
tgtagcctgtaggcc

SEQ ID NO: 316240 - DNA, 15 bp, Homo sapiens
atgtagcctgtaggc

SEQ ID NO: 316241 - DNA, 15 bp, Homo sapiens
gatgtagcctgtagg

SEQ ID NO: 316242 - DNA, 15 bp, Homo sapiens
agatgtagcctgtag

SEQ ID NO: 316243 - DNA, 15 bp, Homo sapiens
cagatgtagcctgta

SEQ ID NO: 316244 - DNA, 15 bp, Homo sapiens
ccagatgtagcctgt

SEQ ID NO: 316245 - DNA, 15 bp, Homo sapiens
accagatgtagcctg

SEQ ID NO: 316246 - DNA, 15 bp, Homo sapiens
gaccagatgtagcct

SEQ ID NO: 316247 - DNA, 15 bp, Homo sapiens
ggaccagatgtagcc

SEQ ID NO: 316248 - DNA, 15 bp, Homo sapiens
tggaccagatgtagc

SEQ ID NO: 316249 - DNA, 15 bp, Homo sapiens
atggaccagatgtag

SEQ ID NO: 316250 - DNA, 15 bp, Homo sapiens
gatggaccagatgta

SEQ ID NO: 316251 - DNA, 15 bp, Homo sapiens
tgatggaccagatgt

SEQ ID NO: 316252 - DNA, 15 bp, Homo sapiens
gtgatggaccagatg

SEQ ID NO: 316253 - DNA, 15 bp, Homo sapiens
ggtgatggaccagat

SEQ ID NO: 316254 - DNA, 15 bp, Homo sapiens
aggtgatggaccaga

SEQ ID NO: 316255 - DNA, 15 bp, Homo sapiens
taggtgatggaccag

SEQ ID NO: 316256 - DNA, 15 bp, Homo sapiens
ataggtgatggacca

SEQ ID NO: 316257 - DNA, 15 bp, Homo sapiens
aataggtgatggacc

SEQ ID NO: 316258 - DNA, 15 bp, Homo sapiens
aaataggtgatggac

SEQ ID NO: 316259 - DNA, 15 bp, Homo sapiens
aaaataggtgatgga

SEQ ID NO: 316260 - DNA, 15 bp, Homo sapiens
aaaaataggtgatgg

SEQ ID NO: 316261 - DNA, 15 bp, Homo sapiens
caaaaataggtgatg

SEQ ID NO: 316262 - DNA, 15 bp, Homo sapiens
acaaaaataggtgat

SEQ ID NO: 316263 - DNA, 15 bp, Homo sapiens
tacaaaaataggtga

SEQ ID NO: 316264 - DNA, 15 bp, Homo sapiens
ttacaaaaataggtg

SEQ ID NO: 316265 - DNA, 15 bp, Homo sapiens
cttacaaaaataggt

SEQ ID NO: 316266 - DNA, 15 bp, Homo sapiens
ccttacaaaaatagg

SEQ ID NO: 316267 - DNA, 15 bp, Homo sapiens
tccttacaaaaatag

SEQ ID NO: 316268 - DNA, 15 bp, Homo sapiens
ttccttacaaaaata

SEQ ID NO: 316269 - DNA, 15 bp, Homo sapiens
tttccttacaaaaat

SEQ ID NO: 316270 - DNA, 15 bp, Homo sapiens
ctttccttacaaaaa

SEQ ID NO: 316271 - DNA, 15 bp, Homo sapiens
actttccttacaaaa

SEQ ID NO: 316272 - DNA, 15 bp, Homo sapiens
aactttccttacaaa

SEQ ID NO: 316273 - DNA, 15 bp, Homo sapiens
aaactttccttacaa

SEQ ID NO: 316274 - DNA, 15 bp, Homo sapiens
aaaactttccttaca

SEQ ID NO: 316275 - DNA, 15 bp, Homo sapiens
taaaactttccttac

SEQ ID NO: 316276 - DNA, 15 bp, Homo sapiens
gtaaaactttcctta

SEQ ID NO: 316277 - DNA, 15 bp, Homo sapiens
agtaaaactttcctt

SEQ ID NO: 316278 - DNA, 15 bp, Homo sapiens
cagtaaaactttcct

SEQ ID NO: 316279 - DNA, 15 bp, Homo sapiens
ccagtaaaactttcc

SEQ ID NO: 316280 - DNA, 15 bp, Homo sapiens
tccagtaaaactttc

SEQ ID NO: 316281 - DNA, 15 bp, Homo sapiens
ttccagtaaaacttt

SEQ ID NO: 316282 - DNA, 15 bp, Homo sapiens
gttccagtaaaactt

SEQ ID NO: 316283 - DNA, 15 bp, Homo sapiens
cgttccagtaaaact

SEQ ID NO: 316284 - DNA, 15 bp, Homo sapiens
tcgttccagtaaaac

SEQ ID NO: 316285 - DNA, 15 bp, Homo sapiens
ctcgttccagtaaaa

SEQ ID NO: 316286 - DNA, 15 bp, Homo sapiens
cctcgttccagtaaa

SEQ ID NO: 316287 - DNA, 15 bp, Homo sapiens
gcctcgttccagtaa

SEQ ID NO: 316288 - DNA, 15 bp, Homo sapiens
ggcctcgttccagta

SEQ ID NO: 316289 - DNA, 15 bp, Homo sapiens
tggcctcgttccagt

SEQ ID NO: 316290 - DNA, 15 bp, Homo sapiens
ttggcctcgttccag

SEQ ID NO: 316291 - DNA, 15 bp, Homo sapiens
cttggcctcgttcca

SEQ ID NO: 316292 - DNA, 15 bp, Homo sapiens
gcttggcctcgttcc

SEQ ID NO: 316293 - DNA, 15 bp, Homo sapiens
agcttggcctcgttc

SEQ ID NO: 316294 - DNA, 15 bp, Homo sapiens
gagcttggcctcgtt

SEQ ID NO: 316295 - DNA, 15 bp, Homo sapiens
tgagcttggcctcgt

SEQ ID NO: 316296 - DNA, 15 bp, Homo sapiens
atgagcttggcctcg

SEQ ID NO: 316297 - DNA, 15 bp, Homo sapiens
aatgagcttggcctc

SEQ ID NO: 316298 - DNA, 15 bp, Homo sapiens
gaatgagcttggcct

SEQ ID NO: 316299 - DNA, 15 bp, Homo sapiens
tgaatgagcttggcc

SEQ ID NO: 316300 - DNA, 15 bp, Homo sapiens
atgaatgagcttggc

SEQ ID NO: 316301 - DNA, 15 bp, Homo sapiens
aatgaatgagcttgg

SEQ ID NO: 316302 - DNA, 15 bp, Homo sapiens
aaatgaatgagcttg

SEQ ID NO: 316303 - DNA, 15 bp, Homo sapiens
aaaatgaatgagctt

SEQ ID NO: 316304 - DNA, 15 bp, Homo sapiens
aaaaatgaatgagct

SEQ ID NO: 316305 - DNA, 15 bp, Homo sapiens
caaaaatgaatgagc

SEQ ID NO: 316306 - DNA, 15 bp, Homo sapiens
acaaaaatgaatgag

SEQ ID NO: 316307 - DNA, 15 bp, Homo sapiens
tacaaaaatgaatga

SEQ ID NO: 316308 - DNA, 15 bp, Homo sapiens
atacaaaaatgaatg

SEQ ID NO: 316309 - DNA, 15 bp, Homo sapiens
gatacaaaaatgaat

SEQ ID NO: 316310 - DNA, 15 bp, Homo sapiens
tgatacaaaaatgaa

SEQ ID NO: 316311 - DNA, 15 bp, Homo sapiens
atgatacaaaaatga

SEQ ID NO: 316312 - DNA, 15 bp, Homo sapiens
gatgatacaaaaatg

SEQ ID NO: 316313 - DNA, 15 bp, Homo sapiens
agatgatacaaaaat

SEQ ID NO: 316314 - DNA, 15 bp, Homo sapiens
cagatgatacaaaaa

SEQ ID NO: 316315 - DNA, 15 bp, Homo sapiens
acagatgatacaaaa

SEQ ID NO: 316316 - DNA, 15 bp, Homo sapiens
cacagatgatacaaa

SEQ ID NO: 316317 - DNA, 15 bp, Homo sapiens
ccacagatgatacaa

SEQ ID NO: 316318 - DNA, 15 bp, Homo sapiens
gccacagatgataca

SEQ ID NO: 316319 - DNA, 15 bp, Homo sapiens
agccacagatgatac

SEQ ID NO: 316320 - DNA, 15 bp, Homo sapiens
tagccacagatgata

SEQ ID NO: 316321 - DNA, 15 bp, Homo sapiens
ctagccacagatgat

SEQ ID NO: 316322 - DNA, 15 bp, Homo sapiens
actagccacagatga

SEQ ID NO: 316323 - DNA, 15 bp, Homo sapiens
aactagccacagatg

SEQ ID NO: 316324 - DNA, 15 bp, Homo sapiens
aaactagccacagat

SEQ ID NO: 316325 - DNA, 15 bp, Homo sapiens
aaaactagccacaga

SEQ ID NO: 316326 - DNA, 15 bp, Homo sapiens
gaaaactagccacag

SEQ ID NO: 316327 - DNA, 15 bp, Homo sapiens
agaaaactagccaca

SEQ ID NO: 316328 - DNA, 15 bp, Homo sapiens
gagaaaactagccac

SEQ ID NO: 316329 - DNA, 15 bp, Homo sapiens
tgagaaaactagcca

SEQ ID NO: 316330 - DNA, 15 bp, Homo sapiens
gtgagaaaactagcc

SEQ ID NO: 316331 - DNA, 15 bp, Homo sapiens
agtgagaaaactagc

SEQ ID NO: 316332 - DNA, 15 bp, Homo sapiens
gagtgagaaaactag

SEQ ID NO: 316333 - DNA, 15 bp, Homo sapiens
ggagtgagaaaacta

SEQ ID NO: 316334 - DNA, 15 bp, Homo sapiens
tggagtgagaaaact

SEQ ID NO: 316335 - DNA, 15 bp, Homo sapiens
ttggagtgagaaaac

SEQ ID NO: 316336 - DNA, 15 bp, Homo sapiens
attggagtgagaaaa

SEQ ID NO: 316337 - DNA, 15 bp, Homo sapiens
cattggagtgagaaa

SEQ ID NO: 316338 - DNA, 15 bp, Homo sapiens
ccattggagtgagaa

SEQ ID NO: 316339 - DNA, 15 bp, Homo sapiens
gccattggagtgaga

SEQ ID NO: 316340 - DNA, 15 bp, Homo sapiens
ggccattggagtgag

SEQ ID NO: 316341 - DNA, 15 bp, Homo sapiens
cggccattggagtga

SEQ ID NO: 316342 - DNA, 15 bp, Homo sapiens
gcggccattggagtg

SEQ ID NO: 316343 - DNA, 15 bp, Homo sapiens
tgcggccattggagt

SEQ ID NO: 316344 - DNA, 15 bp, Homo sapiens
atgcggccattggag

SEQ ID NO: 316345 - DNA, 15 bp, Homo sapiens
aatgcggccattgga

SEQ ID NO: 316346 - DNA, 15 bp, Homo sapiens
caatgcggccattgg

SEQ ID NO: 316347 - DNA, 15 bp, Homo sapiens
tcaatgcggccattg

SEQ ID NO: 316348 - DNA, 15 bp, Homo sapiens
ctcaatgcggccatt

SEQ ID NO: 316349 - DNA, 15 bp, Homo sapiens
gctcaatgcggccat

SEQ ID NO: 316350 - DNA, 15 bp, Homo sapiens
tgctcaatgcggcca

SEQ ID NO: 316351 - DNA, 15 bp, Homo sapiens
gtgctcaatgcggcc

SEQ ID NO: 316352 - DNA, 15 bp, Homo sapiens
agtgctcaatgcggc

SEQ ID NO: 316353 - DNA, 15 bp, Homo sapiens
aagtgctcaatgcgg

SEQ ID NO: 316354 - DNA, 15 bp, Homo sapiens
caagtgctcaatgcg

SEQ ID NO: 316355 - DNA, 15 bp, Homo sapiens
gcaagtgctcaatgc

SEQ ID NO: 316356 - DNA, 15 bp, Homo sapiens
tgcaagtgctcaatg

SEQ ID NO: 316357 - DNA, 15 bp, Homo sapiens
ttgcaagtgctcaat

SEQ ID NO: 316358 - DNA, 15 bp, Homo sapiens
attgcaagtgctcaa

SEQ ID NO: 316359 - DNA, 15 bp, Homo sapiens
tattgcaagtgctca

SEQ ID NO: 316360 - DNA, 15 bp, Homo sapiens
ctattgcaagtgctc

SEQ ID NO: 316361 - DNA, 15 bp, Homo sapiens
tctattgcaagtgct

SEQ ID NO: 316362 - DNA, 15 bp, Homo sapiens
ctctattgcaagtgc

SEQ ID NO: 316363 - DNA, 15 bp, Homo sapiens
tctctattgcaagtg

SEQ ID NO: 316364 - DNA, 15 bp, Homo sapiens
atctctattgcaagt

SEQ ID NO: 316365 - DNA, 15 bp, Homo sapiens
aatctctattgcaag

SEQ ID NO: 316366 - DNA, 15 bp, Homo sapiens
caatctctattgcaa

SEQ ID NO: 316367 - DNA, 15 bp, Homo sapiens
acaatctctattgca

SEQ ID NO: 316368 - DNA, 15 bp, Homo sapiens
cacaatctctattgc

SEQ ID NO: 316369 - DNA, 15 bp, Homo sapiens
gcacaatctctattg

SEQ ID NO: 316370 - DNA, 15 bp, Homo sapiens
tgcacaatctctatt

SEQ ID NO: 316371 - DNA, 15 bp, Homo sapiens
ctgcacaatctctat

SEQ ID NO: 316372 - DNA, 15 bp, Homo sapiens
gctgcacaatctcta

SEQ ID NO: 316373 - DNA, 15 bp, Homo sapiens
agctgcacaatctct

SEQ ID NO: 316374 - DNA, 15 bp, Homo sapiens
aagctgcacaatctc

SEQ ID NO: 316375 - DNA, 15 bp, Homo sapiens
taagctgcacaatct

SEQ ID NO: 316376 - DNA, 15 bp, Homo sapiens
gtaagctgcacaatc

SEQ ID NO: 316377 - DNA, 15 bp, Homo sapiens
tgtaagctgcacaat

SEQ ID NO: 316378 - DNA, 15 bp, Homo sapiens
ttgtaagctgcacaa

SEQ ID NO: 316379 - DNA, 15 bp, Homo sapiens
tttgtaagctgcaca

SEQ ID NO: 316380 - DNA, 15 bp, Homo sapiens
ctttgtaagctgcac

SEQ ID NO: 316381 - DNA, 15 bp, Homo sapiens
gctttgtaagctgca

SEQ ID NO: 316382 - DNA, 15 bp, Homo sapiens
ggctttgtaagctgc

SEQ ID NO: 316383 - DNA, 15 bp, Homo sapiens
gggctttgtaagctg

SEQ ID NO: 316384 - DNA, 15 bp, Homo sapiens
tgggctttgtaagct

SEQ ID NO: 316385 - DNA, 15 bp, Homo sapiens
ttgggctttgtaagc

SEQ ID NO: 316386 - DNA, 15 bp, Homo sapiens
tttgggctttgtaag

SEQ ID NO: 316387 - DNA, 15 bp, Homo sapiens
ttttgggctttgtaa

SEQ ID NO: 316388 - DNA, 15 bp, Homo sapiens
attttgggctttgta

SEQ ID NO: 316389 - DNA, 15 bp, Homo sapiens
tattttgggctttgt

SEQ ID NO: 316390 - DNA, 15 bp, Homo sapiens
atattttgggctttg

SEQ ID NO: 316391 - DNA, 15 bp, Homo sapiens
aatattttgggcttt

SEQ ID NO: 316392 - DNA, 15 bp, Homo sapiens
aaatattttgggctt

SEQ ID NO: 316393 - DNA, 15 bp, Homo sapiens
taaatattttgggct

SEQ ID NO: 316394 - DNA, 15 bp, Homo sapiens
ataaatattttgggc

SEQ ID NO: 316395 - DNA, 15 bp, Homo sapiens
cataaatattttggg

SEQ ID NO: 316396 - DNA, 15 bp, Homo sapiens
tcataaatattttgg

SEQ ID NO: 316397 - DNA, 15 bp, Homo sapiens
atcataaatattttg

SEQ ID NO: 316398 - DNA, 15 bp, Homo sapiens
gatcataaatatttt

SEQ ID NO: 316399 - DNA, 15 bp, Homo sapiens
agatcataaatattt

SEQ ID NO: 316400 - DNA, 15 bp, Homo sapiens
cagatcataaatatt

SEQ ID NO: 316401 - DNA, 15 bp, Homo sapiens
ccagatcataaatat

SEQ ID NO: 316402 - DNA, 15 bp, Homo sapiens
gccagatcataaata

SEQ ID NO: 316403 - DNA, 15 bp, Homo sapiens
ggccagatcataaat

SEQ ID NO: 316404 - DNA, 15 bp, Homo sapiens
gggccagatcataaa

SEQ ID NO: 316405 - DNA, 15 bp, Homo sapiens
agggccagatcataa

SEQ ID NO: 316406 - DNA, 15 bp, Homo sapiens
aagggccagatcata

SEQ ID NO: 316407 - DNA, 15 bp, Homo sapiens
aaagggccagatcat

SEQ ID NO: 316408 - DNA, 15 bp, Homo sapiens
taaagggccagatca

SEQ ID NO: 316409 - DNA, 15 bp, Homo sapiens
gtaaagggccagatc

SEQ ID NO: 316410 - DNA, 15 bp, Homo sapiens
ttttctgtaaagggc

SEQ ID NO: 316411 - DNA, 15 bp, Homo sapiens
tttttctgtaaaggg

SEQ ID NO: 316412 - DNA, 15 bp, Homo sapiens
ttttttctgtaaagg

SEQ ID NO: 316413 - DNA, 15 bp, Homo sapiens
tttttttctgtaaag

SEQ ID NO: 316414 - DNA, 15 bp, Homo sapiens
atttttttctgtaaa

SEQ ID NO: 316415 - DNA, 15 bp, Homo sapiens
aatttttttctgtaa

SEQ ID NO: 316416 - DNA, 15 bp, Homo sapiens
caatttttttctgta

SEQ ID NO: 316417 - DNA, 15 bp, Homo sapiens
ccaatttttttctgt

SEQ ID NO: 316418 - DNA, 15 bp, Homo sapiens
gccaatttttttctg

SEQ ID NO: 316419 - DNA, 15 bp, Homo sapiens
tgccaatttttttct

SEQ ID NO: 316420 - DNA, 15 bp, Homo sapiens
ttgccaatttttttc

SEQ ID NO: 316421 - DNA, 15 bp, Homo sapiens
gttgccaattttttt

SEQ ID NO: 316422 - DNA, 15 bp, Homo sapiens
ggttgccaatttttt

SEQ ID NO: 316423 - DNA, 15 bp, Homo sapiens
gggttgccaattttt

SEQ ID NO: 316424 - DNA, 15 bp, Homo sapiens
ggggttgccaatttt

SEQ ID NO: 316425 - DNA, 15 bp, Homo sapiens
aggggttgccaattt

SEQ ID NO: 316426 - DNA, 15 bp, Homo sapiens
caggggttgccaatt

SEQ ID NO: 316427 - DNA, 15 bp, Homo sapiens
tcaggggttgccaat

SEQ ID NO: 316428 - DNA, 15 bp, Homo sapiens
atcaggggttgccaa

SEQ ID NO: 316429 - DNA, 15 bp, Homo sapiens
aatcaggggttgcca

SEQ ID NO: 316430 - DNA, 15 bp, Homo sapiens
aaatcaggggttgcc

SEQ ID NO: 316431 - DNA, 15 bp, Homo sapiens
taaatcaggggttgc

SEQ ID NO: 316432 - DNA, 15 bp, Homo sapiens
ctaaatcaggggttg

SEQ ID NO: 316433 - DNA, 15 bp, Homo sapiens
tctaaatcaggggtt

SEQ ID NO: 316434 - DNA, 15 bp, Homo sapiens
atctaaatcaggggt

SEQ ID NO: 316435 - DNA, 15 bp, Homo sapiens
aatctaaatcagggg

SEQ ID NO: 316436 - DNA, 15 bp, Homo sapiens
taatctaaatcaggg

SEQ ID NO: 316437 - DNA, 15 bp, Homo sapiens
ataatctaaatcagg

SEQ ID NO: 316438 - DNA, 15 bp, Homo sapiens
gataatctaaatcag

SEQ ID NO: 316439 - DNA, 15 bp, Homo sapiens
ggataatctaaatca

SEQ ID NO: 316440 - DNA, 15 bp, Homo sapiens
tggataatctaaatc

SEQ ID NO: 316441 - DNA, 15 bp, Homo sapiens
ctggataatctaaat

SEQ ID NO: 316442 - DNA, 15 bp, Homo sapiens
cctggataatctaaa

SEQ ID NO: 316443 - DNA, 15 bp, Homo sapiens
acctggataatctaa

SEQ ID NO: 316444 - DNA, 15 bp, Homo sapiens
aacctggataatcta

SEQ ID NO: 316445 - DNA, 15 bp, Homo sapiens
caacctggataatct

SEQ ID NO: 316446 - DNA, 15 bp, Homo sapiens
tcaacctggataatc

SEQ ID NO: 316447 - DNA, 15 bp, Homo sapiens
atcaacctggataat

SEQ ID NO: 316448 - DNA, 15 bp, Homo sapiens
gatcaacctggataa

SEQ ID NO: 316449 - DNA, 15 bp, Homo sapiens
ggatcaacctggata

SEQ ID NO: 316450 - DNA, 15 bp, Homo sapiens
aggatcaacctggat

SEQ ID NO: 316451 - DNA, 15 bp, Homo sapiens
caggatcaacctgga

SEQ ID NO: 316452 - DNA, 15 bp, Homo sapiens
ccaggatcaacctgg

SEQ ID NO: 316453 - DNA, 15 bp, Homo sapiens
accaggatcaacctg

SEQ ID NO: 316454 - DNA, 15 bp, Homo sapiens
caccaggatcaacct

SEQ ID NO: 316455 - DNA, 15 bp, Homo sapiens
gcaccaggatcaacc

SEQ ID NO: 316456 - DNA, 15 bp, Homo sapiens
agcaccaggatcaac

SEQ ID NO: 316457 - DNA, 15 bp, Homo sapiens
tagcaccaggatcaa

SEQ ID NO: 316458 - DNA, 15 bp, Homo sapiens
ttagcaccaggatca

SEQ ID NO: 316459 - DNA, 15 bp, Homo sapiens
attagcaccaggatc

SEQ ID NO: 316460 - DNA, 15 bp, Homo sapiens
aattagcaccaggat

SEQ ID NO: 316461 - DNA, 15 bp, Homo sapiens
aaattagcaccagga

SEQ ID NO: 316462 - DNA, 15 bp, Homo sapiens
taaattagcaccagg

SEQ ID NO: 316463 - DNA, 15 bp, Homo sapiens
ctaaattagcaccag

SEQ ID NO: 316464 - DNA, 15 bp, Homo sapiens
tctaaattagcacca

SEQ ID NO: 316465 - DNA, 15 bp, Homo sapiens
ctctaaattagcacc

SEQ ID NO: 316466 - DNA, 15 bp, Homo sapiens
gctctaaattagcac

SEQ ID NO: 316467 - DNA, 15 bp, Homo sapiens
agctctaaattagca

SEQ ID NO: 316468 - DNA, 15 bp, Homo sapiens
aagctctaaattagc

SEQ ID NO: 316469 - DNA, 15 bp, Homo sapiens
gaagctctaaattag

SEQ ID NO: 316470 - DNA, 15 bp, Homo sapiens
tgaagctctaaatta

SEQ ID NO: 316471 - DNA, 15 bp, Homo sapiens
ctgaagctctaaatt

SEQ ID NO: 316472 - DNA, 15 bp, Homo sapiens
tctgaagctctaaat

SEQ ID NO: 316473 - DNA, 15 bp, Homo sapiens
ttctgaagctctaaa

SEQ ID NO: 316474 - DNA, 15 bp, Homo sapiens
attctgaagctctaa

SEQ ID NO: 316475 - DNA, 15 bp, Homo sapiens
tattctgaagctcta

SEQ ID NO: 316476 - DNA, 15 bp, Homo sapiens
ttattctgaagctct

SEQ ID NO: 316477 - DNA, 15 bp, Homo sapiens
tttattctgaagctc

SEQ ID NO: 316478 - DNA, 15 bp, Homo sapiens
ttttattctgaagct

SEQ ID NO: 316479 - DNA, 15 bp, Homo sapiens
gttttattctgaagc

SEQ ID NO: 316480 - DNA, 15 bp, Homo sapiens
tgttttattctgaag

SEQ ID NO: 316481 - DNA, 15 bp, Homo sapiens
gtgttttattctgaa

SEQ ID NO: 316482 - DNA, 15 bp, Homo sapiens
tgtgttttattctga

SEQ ID NO: 316483 - DNA, 15 bp, Homo sapiens
ctgtgttttattctg

SEQ ID NO: 316484 - DNA, 15 bp, Homo sapiens
gctgtgttttattct

SEQ ID NO: 316485 - DNA, 15 bp, Homo sapiens
agctgtgttttattc

SEQ ID NO: 316486 - DNA, 15 bp, Homo sapiens
cagctgtgttttatt

SEQ ID NO: 316487 - DNA, 15 bp, Homo sapiens
tcagctgtgttttat

SEQ ID NO: 316488 - DNA, 15 bp, Homo sapiens
ctcagctgtgtttta

SEQ ID NO: 316489 - DNA, 15 bp, Homo sapiens
cctcagctgtgtttt

SEQ ID NO: 316490 - DNA, 15 bp, Homo sapiens
acctcagctgtgttt

SEQ ID NO: 316491 - DNA, 15 bp, Homo sapiens
cacctcagctgtgtt

SEQ ID NO: 316492 - DNA, 15 bp, Homo sapiens
acacctcagctgtgt

SEQ ID NO: 316493 - DNA, 15 bp, Homo sapiens
cacacctcagctgtg

SEQ ID NO: 316494 - DNA, 15 bp, Homo sapiens
gcacacctcagctgt

SEQ ID NO: 316495 - DNA, 15 bp, Homo sapiens
ggcacacctcagctg

SEQ ID NO: 316496 - DNA, 15 bp, Homo sapiens
aggcacacctcagct

SEQ ID NO: 316497 - DNA, 15 bp, Homo sapiens
caggcacacctcagc

SEQ ID NO: 316498 - DNA, 15 bp, Homo sapiens
ccaggcacacctcag

SEQ ID NO: 316499 - DNA, 15 bp, Homo sapiens
accaggcacacctca

SEQ ID NO: 316500 - DNA, 15 bp, Homo sapiens
taccaggcacacctc

SEQ ID NO: 316501 - DNA, 15 bp, Homo sapiens
ctaccaggcacacct

SEQ ID NO: 316502 - DNA, 15 bp, Homo sapiens
gctaccaggcacacc

SEQ ID NO: 316503 - DNA, 15 bp, Homo sapiens
tgctaccaggcacac

SEQ ID NO: 316504 - DNA, 15 bp, Homo sapiens
ttgctaccaggcaca

SEQ ID NO: 316505 - DNA, 15 bp, Homo sapiens
tttgctaccaggcac

SEQ ID NO: 316506 - DNA, 15 bp, Homo sapiens
atttgctaccaggca

SEQ ID NO: 316507 - DNA, 15 bp, Homo sapiens
aatttgctaccaggc

SEQ ID NO: 316508 - DNA, 15 bp, Homo sapiens
taatttgctaccagg

SEQ ID NO: 316509 - DNA, 15 bp, Homo sapiens
ttaatttgctaccag

SEQ ID NO: 316510 - DNA, 15 bp, Homo sapiens
attaatttgctacca

SEQ ID NO: 316511 - DNA, 15 bp, Homo sapiens
gattaatttgctacc

SEQ ID NO: 316512 - DNA, 15 bp, Homo sapiens
ggattaatttgctac

SEQ ID NO: 316513 - DNA, 15 bp, Homo sapiens
gggattaatttgcta

SEQ ID NO: 316514 - DNA, 15 bp, Homo sapiens
ggggattaatttgct

SEQ ID NO: 316515 - DNA, 15 bp, Homo sapiens
gggggattaatttgc

SEQ ID NO: 316516 - DNA, 15 bp, Homo sapiens
ggggggattaatttg

SEQ ID NO: 316517 - DNA, 15 bp, Homo sapiens
gggggggattaattt

SEQ ID NO: 316518 - DNA, 15 bp, Homo sapiens
tgggggggattaatt

SEQ ID NO: 316519 - DNA, 15 bp, Homo sapiens
ttgggggggattaat

SEQ ID NO: 316520 - DNA, 15 bp, Homo sapiens
tttgggggggattaa

SEQ ID NO: 316521 - DNA, 15 bp, Homo sapiens
ttttgggggggatta

SEQ ID NO: 316522 - DNA, 15 bp, Homo sapiens
gttttgggggggatt

SEQ ID NO: 316523 - DNA, 15 bp, Homo sapiens
tgttttgggggggat

SEQ ID NO: 316524 - DNA, 15 bp, Homo sapiens
ttgttttggggggga

SEQ ID NO: 316525 - DNA, 15 bp, Homo sapiens
cttgttttggggggg

SEQ ID NO: 316526 - DNA, 15 bp, Homo sapiens
acttgttttgggggg

SEQ ID NO: 316527 - DNA, 15 bp, Homo sapiens
tacttgttttggggg

SEQ ID NO: 316528 - DNA, 15 bp, Homo sapiens
gtacttgttttgggg

SEQ ID NO: 316529 - DNA, 15 bp, Homo sapiens
agtacttgttttggg

SEQ ID NO: 316530 - DNA, 15 bp, Homo sapiens
aagtacttgttttgg

SEQ ID NO: 316531 - DNA, 15 bp, Homo sapiens
gaagtacttgttttg

SEQ ID NO: 316532 - DNA, 15 bp, Homo sapiens
tgaagtacttgtttt

SEQ ID NO: 316533 - DNA, 15 bp, Homo sapiens
atgaagtacttgttt

SEQ ID NO: 316534 - DNA, 15 bp, Homo sapiens
aatgaagtacttgtt

SEQ ID NO: 316535 - DNA, 15 bp, Homo sapiens
aaatgaagtacttgt

SEQ ID NO: 316536 - DNA, 15 bp, Homo sapiens
aaaatgaagtacttg

SEQ ID NO: 316537 - DNA, 15 bp, Homo sapiens
gaaaatgaagtactt

SEQ ID NO: 316538 - DNA, 15 bp, Homo sapiens
ggaaaatgaagtact

SEQ ID NO: 316539 - DNA, 15 bp, Homo sapiens
aggaaaatgaagtac

SEQ ID NO: 316540 - DNA, 15 bp, Homo sapiens
aaggaaaatgaagta

SEQ ID NO: 316541 - DNA, 15 bp, Homo sapiens
taaggaaaatgaagt

SEQ ID NO: 316542 - DNA, 15 bp, Homo sapiens
ttaaggaaaatgaag

SEQ ID NO: 316543 - DNA, 15 bp, Homo sapiens
tttaaggaaaatgaa

SEQ ID NO: 316544 - DNA, 15 bp, Homo sapiens
atttaaggaaaatga

SEQ ID NO: 316545 - DNA, 15 bp, Homo sapiens
aatttaaggaaaatg

SEQ ID NO: 316546 - DNA, 15 bp, Homo sapiens
taatttaaggaaaat

SEQ ID NO: 316547 - DNA, 15 bp, Homo sapiens
ttaatttaaggaaaa

SEQ ID NO: 316548 - DNA, 15 bp, Homo sapiens
attaatttaaggaaa

SEQ ID NO: 316549 - DNA, 15 bp, Homo sapiens
cattaatttaaggaa

SEQ ID NO: 316550 - DNA, 15 bp, Homo sapiens
acattaatttaagga

SEQ ID NO: 316551 - DNA, 15 bp, Homo sapiens
aacattaatttaagg

SEQ ID NO: 316552 - DNA, 15 bp, Homo sapiens
caacattaatttaag

SEQ ID NO: 316553 - DNA, 15 bp, Homo sapiens
tcaacattaatttaa

SEQ ID NO: 316554 - DNA, 15 bp, Homo sapiens
ctcaacattaattta

SEQ ID NO: 316555 - DNA, 15 bp, Homo sapiens
gctcaacattaattt

SEQ ID NO: 316556 - DNA, 15 bp, Homo sapiens
tgctcaacattaatt

SEQ ID NO: 316557 - DNA, 15 bp, Homo sapiens
atgctcaacattaat

SEQ ID NO: 316558 - DNA, 15 bp, Homo sapiens
gatgctcaacattaa

SEQ ID NO: 316559 - DNA, 15 bp, Homo sapiens
tgatgctcaacatta

SEQ ID NO: 316560 - DNA, 15 bp, Homo sapiens
ctgatgctcaacatt

SEQ ID NO: 316561 - DNA, 15 bp, Homo sapiens
tctgatgctcaacat

SEQ ID NO: 316562 - DNA, 15 bp, Homo sapiens
ttctgatgctcaaca

SEQ ID NO: 316563 - DNA, 15 bp, Homo sapiens
attctgatgctcaac

SEQ ID NO: 316564 - DNA, 15 bp, Homo sapiens
aattctgatgctcaa

SEQ ID NO: 316565 - DNA, 15 bp, Homo sapiens
taattctgatgctca

SEQ ID NO: 316566 - DNA, 15 bp, Homo sapiens
ttaattctgatgctc

SEQ ID NO: 316567 - DNA, 15 bp, Homo sapiens
tttaattctgatgct

SEQ ID NO: 316568 - DNA, 15 bp, Homo sapiens
gtttaattctgatgc

SEQ ID NO: 316569 - DNA, 15 bp, Homo sapiens
tgtttaattctgatg

SEQ ID NO: 316570 - DNA, 15 bp, Homo sapiens
ctgtttaattctgat

SEQ ID NO: 316571 - DNA, 15 bp, Homo sapiens
tctgtttaattctga

SEQ ID NO: 316572 - DNA, 15 bp, Homo sapiens
ctctgtttaattctg

SEQ ID NO: 316573 - DNA, 15 bp, Homo sapiens
gctctgtttaattct

SEQ ID NO: 316574 - DNA, 15 bp, Homo sapiens
agctctgtttaattc

SEQ ID NO: 316575 - DNA, 15 bp, Homo sapiens
tagctctgtttaatt

SEQ ID NO: 316576 - DNA, 15 bp, Homo sapiens
ttagctctgtttaat

SEQ ID NO: 316577 - DNA, 15 bp, Homo sapiens
tttagctctgtttaa

SEQ ID NO: 316578 - DNA, 15 bp, Homo sapiens
atttagctctgttta

SEQ ID NO: 316579 - DNA, 15 bp, Homo sapiens
gatttagctctgttt

SEQ ID NO: 316580 - DNA, 15 bp, Homo sapiens
agatttagctctgtt

SEQ ID NO: 316581 - DNA, 15 bp, Homo sapiens
gagatttagctctgt

SEQ ID NO: 316582 - DNA, 15 bp, Homo sapiens
tgagatttagctctg

SEQ ID NO: 316583 - DNA, 15 bp, Homo sapiens
atgagatttagctct

SEQ ID NO: 316584 - DNA, 15 bp, Homo sapiens
catgagatttagctc

SEQ ID NO: 316585 - DNA, 15 bp, Homo sapiens
tcatgagatttagct

SEQ ID NO: 316586 - DNA, 15 bp, Homo sapiens
atcatgagatttagc

SEQ ID NO: 316587 - DNA, 15 bp, Homo sapiens
tatcatgagatttag

SEQ ID NO: 316588 - DNA, 15 bp, Homo sapiens
gtatcatgagattta

SEQ ID NO: 316589 - DNA, 15 bp, Homo sapiens
ggtatcatgagattt

SEQ ID NO: 316590 - DNA, 15 bp, Homo sapiens
aggtatcatgagatt

SEQ ID NO: 316591 - DNA, 15 bp, Homo sapiens
caggtatcatgagat

SEQ ID NO: 316592 - DNA, 15 bp, Homo sapiens
tcaggtatcatgaga

SEQ ID NO: 316593 - DNA, 15 bp, Homo sapiens
ctcaggtatcatgag

SEQ ID NO: 316594 - DNA, 15 bp, Homo sapiens
cctcaggtatcatga

SEQ ID NO: 316595 - DNA, 15 bp, Homo sapiens
gcctcaggtatcatg

SEQ ID NO: 316596 - DNA, 15 bp, Homo sapiens
ggcctcaggtatcat

SEQ ID NO: 316597 - DNA, 15 bp, Homo sapiens
gggcctcaggtatca

SEQ ID NO: 316598 - DNA, 15 bp, Homo sapiens
agggcctcaggtatc

SEQ ID NO: 316599 - DNA, 15 bp, Homo sapiens
aagggcctcaggtat

SEQ ID NO: 316600 - DNA, 15 bp, Homo sapiens
caagggcctcaggta

SEQ ID NO: 316601 - DNA, 15 bp, Homo sapiens
acaagggcctcaggt

SEQ ID NO: 316602 - DNA, 15 bp, Homo sapiens
cacaagggcctcagg

SEQ ID NO: 316603 - DNA, 15 bp, Homo sapiens
tcacaagggcctcag

SEQ ID NO: 316604 - DNA, 15 bp, Homo sapiens
ttcacaagggcctca

SEQ ID NO: 316605 - DNA, 15 bp, Homo sapiens
tttcacaagggcctc

SEQ ID NO: 316606 - DNA, 15 bp, Homo sapiens
ttttcacaagggcct

SEQ ID NO: 316607 - DNA, 15 bp, Homo sapiens
attttcacaagggcc

SEQ ID NO: 316608 - DNA, 15 bp, Homo sapiens
cattttcacaagggc

SEQ ID NO: 316609 - DNA, 15 bp, Homo sapiens
acattttcacaaggg

SEQ ID NO: 316610 - DNA, 15 bp, Homo sapiens
aacattttcacaagg

SEQ ID NO: 316611 - DNA, 15 bp, Homo sapiens
aaacattttcacaag

SEQ ID NO: 316612 - DNA, 15 bp, Homo sapiens
aaaacattttcacaa

SEQ ID NO: 316613 - DNA, 15 bp, Homo sapiens
aaaaacattttcaca

SEQ ID NO: 316614 - DNA, 15 bp, Homo sapiens
caaaaacattttcac

SEQ ID NO: 316615 - DNA, 15 bp, Homo sapiens
gcaaaaacattttca

SEQ ID NO: 316616 - DNA, 15 bp, Homo sapiens
agcaaaaacattttc

SEQ ID NO: 316617 - DNA, 15 bp, Homo sapiens
cagcaaaaacatttt

SEQ ID NO: 316618 - DNA, 15 bp, Homo sapiens
tcagcaaaaacattt

SEQ ID NO: 316619 - DNA, 15 bp, Homo sapiens
gtcagcaaaaacatt

SEQ ID NO: 316620 - DNA, 15 bp, Homo sapiens
ggtcagcaaaaacat

SEQ ID NO: 316621 - DNA, 15 bp, Homo sapiens
gggtcagcaaaaaca

SEQ ID NO: 316622 - DNA, 15 bp, Homo sapiens
tgggtcagcaaaaac

SEQ ID NO: 316623 - DNA, 15 bp, Homo sapiens
ttgggtcagcaaaaa

SEQ ID NO: 316624 - DNA, 15 bp, Homo sapiens
cttgggtcagcaaaa

SEQ ID NO: 316625 - DNA, 15 bp, Homo sapiens
tcttgggtcagcaaa

SEQ ID NO: 316626 - DNA, 15 bp, Homo sapiens
atcttgggtcagcaa

SEQ ID NO: 316627 - DNA, 15 bp, Homo sapiens
aatcttgggtcagca

SEQ ID NO: 316628 - DNA, 15 bp, Homo sapiens
gaatcttgggtcagc

SEQ ID NO: 316629 - DNA, 15 bp, Homo sapiens
tgaatcttgggtcag

SEQ ID NO: 316630 - DNA, 15 bp, Homo sapiens
ctgaatcttgggtca

SEQ ID NO: 316631 - DNA, 15 bp, Homo sapiens
actgaatcttgggtc

SEQ ID NO: 316632 - DNA, 15 bp, Homo sapiens
cactgaatcttgggt

SEQ ID NO: 316633 - DNA, 15 bp, Homo sapiens
acactgaatcttggg

SEQ ID NO: 316634 - DNA, 15 bp, Homo sapiens
aacactgaatcttgg

SEQ ID NO: 316635 - DNA, 15 bp, Homo sapiens
taacactgaatcttg

SEQ ID NO: 316636 - DNA, 15 bp, Homo sapiens
ataacactgaatctt

SEQ ID NO: 316637 - DNA, 15 bp, Homo sapiens
cataacactgaatct

SEQ ID NO: 316638 - DNA, 15 bp, Homo sapiens
gcataacactgaatc

SEQ ID NO: 316639 - DNA, 15 bp, Homo sapiens
agcataacactgaat

SEQ ID NO: 316640 - DNA, 15 bp, Homo sapiens
aagcataacactgaa

SEQ ID NO: 316641 - DNA, 15 bp, Homo sapiens
aaagcataacactga

SEQ ID NO: 316642 - DNA, 15 bp, Homo sapiens
gaaagcataacactg

SEQ ID NO: 316643 - DNA, 15 bp, Homo sapiens
agaaagcataacact

SEQ ID NO: 316644 - DNA, 15 bp, Homo sapiens
cagaaagcataacac

SEQ ID NO: 316645 - DNA, 15 bp, Homo sapiens
acagaaagcataaca

SEQ ID NO: 316646 - DNA, 15 bp, Homo sapiens
gacagaaagcataac

SEQ ID NO: 316647 - DNA, 15 bp, Homo sapiens
ggacagaaagcataa

SEQ ID NO: 316648 - DNA, 15 bp, Homo sapiens
aggacagaaagcata

SEQ ID NO: 316649 - DNA, 15 bp, Homo sapiens
aaggacagaaagcat

SEQ ID NO: 316650 - DNA, 15 bp, Homo sapiens
taaggacagaaagca

SEQ ID NO: 316651 - DNA, 15 bp, Homo sapiens
gtaaggacagaaagc

SEQ ID NO: 316652 - DNA, 15 bp, Homo sapiens
tgtaaggacagaaag

SEQ ID NO: 316653 - DNA, 15 bp, Homo sapiens
ctgtaaggacagaaa

SEQ ID NO: 316654 - DNA, 15 bp, Homo sapiens
tctgtaaggacagaa

SEQ ID NO: 316655 - DNA, 15 bp, Homo sapiens
ctctgtaaggacaga

SEQ ID NO: 316656 - DNA, 15 bp, Homo sapiens
tctctgtaaggacag

SEQ ID NO: 316657 - DNA, 15 bp, Homo sapiens
ctctctgtaaggaca

SEQ ID NO: 316658 - DNA, 15 bp, Homo sapiens
gctctctgtaaggac

SEQ ID NO: 316659 - DNA, 15 bp, Homo sapiens
agctctctgtaagga

SEQ ID NO: 316660 - DNA, 15 bp, Homo sapiens
tagctctctgtaagg

SEQ ID NO: 316661 - DNA, 15 bp, Homo sapiens
ttagctctctgtaag

SEQ ID NO: 316662 - DNA, 15 bp, Homo sapiens
tttagctctctgtaa

SEQ ID NO: 316663 - DNA, 15 bp, Homo sapiens
atttagctctctgta

SEQ ID NO: 316664 - DNA, 15 bp, Homo sapiens
gatttagctctctgt

SEQ ID NO: 316665 - DNA, 15 bp, Homo sapiens
tgatttagctctctg

SEQ ID NO: 316666 - DNA, 15 bp, Homo sapiens
ttgatttagctctct

SEQ ID NO: 316667 - DNA, 15 bp, Homo sapiens
cttgatttagctctc

SEQ ID NO: 316668 - DNA, 15 bp, Homo sapiens
tcttgatttagctct

SEQ ID NO: 316669 - DNA, 15 bp, Homo sapiens
ctcttgatttagctc

SEQ ID NO: 316670 - DNA, 15 bp, Homo sapiens
actcttgatttagct

SEQ ID NO: 316671 - DNA, 15 bp, Homo sapiens
gactcttgatttagc

SEQ ID NO: 316672 - DNA, 15 bp, Homo sapiens
ggactcttgatttag

SEQ ID NO: 316673 - DNA, 15 bp, Homo sapiens
gggactcttgattta

SEQ ID NO: 316674 - DNA, 15 bp, Homo sapiens
ggggactcttgattt

SEQ ID NO: 316675 - DNA, 15 bp, Homo sapiens
aggggactcttgatt

SEQ ID NO: 316676 - DNA, 15 bp, Homo sapiens
aaggggactcttgat

SEQ ID NO: 316677 - DNA, 15 bp, Homo sapiens
aaaggggactcttga

SEQ ID NO: 316678 - DNA, 15 bp, Homo sapiens
aaaaggggactcttg

SEQ ID NO: 316679 - DNA, 15 bp, Homo sapiens
caaaaggggactctt

SEQ ID NO: 316680 - DNA, 15 bp, Homo sapiens
ccaaaaggggactct

SEQ ID NO: 316681 - DNA, 15 bp, Homo sapiens
tccaaaaggggactc

SEQ ID NO: 316682 - DNA, 15 bp, Homo sapiens
ttccaaaaggggact

SEQ ID NO: 316683 - DNA, 15 bp, Homo sapiens
cttccaaaaggggac

SEQ ID NO: 316684 - DNA, 15 bp, Homo sapiens
ccttccaaaagggga

SEQ ID NO: 316685 - DNA, 15 bp, Homo sapiens
tccttccaaaagggg

SEQ ID NO: 316686 - DNA, 15 bp, Homo sapiens
ctccttccaaaaggg

SEQ ID NO: 316687 - DNA, 15 bp, Homo sapiens
actccttccaaaagg

SEQ ID NO: 316688 - DNA, 15 bp, Homo sapiens
tactccttccaaaag

SEQ ID NO: 316689 - DNA, 15 bp, Homo sapiens
gtactccttccaaaa

SEQ ID NO: 316690 - DNA, 15 bp, Homo sapiens
ggtactccttccaaa

SEQ ID NO: 316691 - DNA, 15 bp, Homo sapiens
aggtactccttccaa

SEQ ID NO: 316692 - DNA, 15 bp, Homo sapiens
gaggtactccttcca

SEQ ID NO: 316693 - DNA, 15 bp, Homo sapiens
agaggtactccttcc

SEQ ID NO: 316694 - DNA, 15 bp, Homo sapiens
cagaggtactccttc

SEQ ID NO: 316695 - DNA, 15 bp, Homo sapiens
acagaggtactcctt

SEQ ID NO: 316696 - DNA, 15 bp, Homo sapiens
aacagaggtactcct

SEQ ID NO: 316697 - DNA, 15 bp, Homo sapiens
gaacagaggtactcc

SEQ ID NO: 316698 - DNA, 15 bp, Homo sapiens
agaacagaggtactc

SEQ ID NO: 316699 - DNA, 15 bp, Homo sapiens
aagaacagaggtact

SEQ ID NO: 316700 - DNA, 15 bp, Homo sapiens
aaagaacagaggtac

SEQ ID NO: 316701 - DNA, 15 bp, Homo sapiens
caaagaacagaggta

SEQ ID NO: 316702 - DNA, 15 bp, Homo sapiens
acaaagaacagaggt

SEQ ID NO: 316703 - DNA, 15 bp, Homo sapiens
tacaaagaacagagg

SEQ ID NO: 316704 - DNA, 15 bp, Homo sapiens
ttacaaagaacagag

SEQ ID NO: 316705 - DNA, 15 bp, Homo sapiens
tttacaaagaacaga

SEQ ID NO: 316706 - DNA, 15 bp, Homo sapiens
gtttacaaagaacag

SEQ ID NO: 316707 - DNA, 15 bp, Homo sapiens
agtttacaaagaaca

SEQ ID NO: 316708 - DNA, 15 bp, Homo sapiens
cagtttacaaagaac

SEQ ID NO: 316709 - DNA, 15 bp, Homo sapiens
acagtttacaaagaa

SEQ ID NO: 316710 - DNA, 15 bp, Homo sapiens
tacagtttacaaaga

SEQ ID NO: 316711 - DNA, 15 bp, Homo sapiens
ttacagtttacaaag

SEQ ID NO: 316712 - DNA, 15 bp, Homo sapiens
attacagtttacaaa

SEQ ID NO: 316713 - DNA, 15 bp, Homo sapiens
aattacagtttacaa

SEQ ID NO: 316714 - DNA, 15 bp, Homo sapiens
caattacagtttaca

SEQ ID NO: 316715 - DNA, 15 bp, Homo sapiens
tcaattacagtttac

SEQ ID NO: 316716 - DNA, 15 bp, Homo sapiens
ttcaattacagttta

SEQ ID NO: 316717 - DNA, 15 bp, Homo sapiens
cttcaattacagttt

SEQ ID NO: 316718 - DNA, 15 bp, Homo sapiens
tcttcaattacagtt

SEQ ID NO: 316719 - DNA, 15 bp, Homo sapiens
atcttcaattacagt

SEQ ID NO: 316720 - DNA, 15 bp, Homo sapiens
tatcttcaattacag

SEQ ID NO: 316721 - DNA, 15 bp, Homo sapiens
atatcttcaattaca

SEQ ID NO: 316722 - DNA, 15 bp, Homo sapiens
tatatcttcaattac

SEQ ID NO: 316723 - DNA, 15 bp, Homo sapiens
ttatatcttcaatta

SEQ ID NO: 316724 - DNA, 15 bp, Homo sapiens
gttatatcttcaatt

SEQ ID NO: 316725 - DNA, 15 bp, Homo sapiens
agttatatcttcaat

SEQ ID NO: 316726 - DNA, 15 bp, Homo sapiens
gagttatatcttcaa

SEQ ID NO: 316727 - DNA, 15 bp, Homo sapiens
tgagttatatcttca

SEQ ID NO: 316728 - DNA, 15 bp, Homo sapiens
gtgagttatatcttc

SEQ ID NO: 316729 - DNA, 15 bp, Homo sapiens
ggtgagttatatctt

SEQ ID NO: 316730 - DNA, 15 bp, Homo sapiens
cggtgagttatatct

SEQ ID NO: 316731 - DNA, 15 bp, Homo sapiens
acggtgagttatatc

SEQ ID NO: 316732 - DNA, 15 bp, Homo sapiens
cacggtgagttatat

SEQ ID NO: 316733 - DNA, 15 bp, Homo sapiens
acacggtgagttata

SEQ ID NO: 316734 - DNA, 15 bp, Homo sapiens
aacacggtgagttat

SEQ ID NO: 316735 - DNA, 15 bp, Homo sapiens
gaacacggtgagtta

SEQ ID NO: 316736 - DNA, 15 bp, Homo sapiens
agaacacggtgagtt

SEQ ID NO: 316737 - DNA, 15 bp, Homo sapiens
aagaacacggtgagt

SEQ ID NO: 316738 - DNA, 15 bp, Homo sapiens
gaagaacacggtgag

SEQ ID NO: 316739 - DNA, 15 bp, Homo sapiens
tgaagaacacggtga

SEQ ID NO: 316740 - DNA, 15 bp, Homo sapiens
ctgaagaacacggtg

SEQ ID NO: 316741 - DNA, 15 bp, Homo sapiens
actgaagaacacggt

SEQ ID NO: 316742 - DNA, 15 bp, Homo sapiens
gactgaagaacacgg

SEQ ID NO: 316743 - DNA, 15 bp, Homo sapiens
agactgaagaacacg

SEQ ID NO: 316744 - DNA, 15 bp, Homo sapiens
aagactgaagaacac

SEQ ID NO: 316745 - DNA, 15 bp, Homo sapiens
aaagactgaagaaca

SEQ ID NO: 316746 - DNA, 15 bp, Homo sapiens
taaagactgaagaac

SEQ ID NO: 316747 - DNA, 15 bp, Homo sapiens
ataaagactgaagaa

SEQ ID NO: 316748 - DNA, 15 bp, Homo sapiens
aataaagactgaaga

SEQ ID NO: 316749 - DNA, 15 bp, Homo sapiens
gaataaagactgaag

SEQ ID NO: 316750 - DNA, 15 bp, Homo sapiens
tgaataaagactgaa

SEQ ID NO: 316751 - DNA, 15 bp, Homo sapiens
ttgaataaagactga

SEQ ID NO: 316752 - DNA, 15 bp, Homo sapiens
tttgaataaagactg

SEQ ID NO: 316753 - DNA, 15 bp, Homo sapiens
ctttgaataaagact

SEQ ID NO: 316754 - DNA, 15 bp, Homo sapiens
gctttgaataaagac

SEQ ID NO: 316755 - DNA, 15 bp, Homo sapiens
ggctttgaataaaga

SEQ ID NO: 316756 - DNA, 15 bp, Homo sapiens
cggctttgaataaag

SEQ ID NO: 316757 - DNA, 15 bp, Homo sapiens
gcggctttgaataaa

SEQ ID NO: 316758 - DNA, 15 bp, Homo sapiens
agcggctttgaataa

SEQ ID NO: 316759 - DNA, 15 bp, Homo sapiens
cagcggctttgaata

SEQ ID NO: 316760 - DNA, 15 bp, Homo sapiens
ccagcggctttgaat

SEQ ID NO: 316761 - DNA, 15 bp, Homo sapiens
gccagcggctttgaa

SEQ ID NO: 316762 - DNA, 15 bp, Homo sapiens
tgccagcggctttga

SEQ ID NO: 316763 - DNA, 15 bp, Homo sapiens
gtgccagcggctttg

SEQ ID NO: 316764 - DNA, 15 bp, Homo sapiens
tgtgccagcggcttt

SEQ ID NO: 316765 - DNA, 15 bp, Homo sapiens
ttgtgccagcggctt

SEQ ID NO: 316766 - DNA, 15 bp, Homo sapiens
tttgtgccagcggct

SEQ ID NO: 316767 - DNA, 15 bp, Homo sapiens
ttttgtgccagcggc

SEQ ID NO: 316768 - DNA, 15 bp, Homo sapiens
tttttgtgccagcgg

SEQ ID NO: 316769 - DNA, 15 bp, Homo sapiens
atttttgtgccagcg

SEQ ID NO: 316770 - DNA, 15 bp, Homo sapiens
aatttttgtgccagc

SEQ ID NO: 316771 - DNA, 15 bp, Homo sapiens
gaatttttgtgccag

SEQ ID NO: 316772 - DNA, 15 bp, Homo sapiens
agaatttttgtgcca

SEQ ID NO: 316773 - DNA, 15 bp, Homo sapiens
cagaatttttgtgcc

SEQ ID NO: 316774 - DNA, 15 bp, Homo sapiens
gcagaatttttgtgc

SEQ ID NO: 316775 - DNA, 15 bp, Homo sapiens
agcagaatttttgtg

SEQ ID NO: 316776 - DNA, 15 bp, Homo sapiens
aagcagaatttttgt

SEQ ID NO: 316777 - DNA, 15 bp, Homo sapiens
caagcagaatttttg

SEQ ID NO: 316778 - DNA, 15 bp, Homo sapiens
tcaagcagaattttt

SEQ ID NO: 316779 - DNA, 15 bp, Homo sapiens
ttcaagcagaatttt

SEQ ID NO: 316780 - DNA, 15 bp, Homo sapiens
attcaagcagaattt

SEQ ID NO: 316781 - DNA, 15 bp, Homo sapiens
aattcaagcagaatt

SEQ ID NO: 316782 - DNA, 15 bp, Homo sapiens
aaattcaagcagaat

SEQ ID NO: 316783 - DNA, 15 bp, Homo sapiens
taaattcaagcagaa

SEQ ID NO: 316784 - DNA, 15 bp, Homo sapiens
ttaaattcaagcaga

SEQ ID NO: 316785 - DNA, 15 bp, Homo sapiens
attaaattcaagcag

SEQ ID NO: 316786 - DNA, 15 bp, Homo sapiens
aattaaattcaagca

SEQ ID NO: 316787 - DNA, 15 bp, Homo sapiens
aaattaaattcaagc

SEQ ID NO: 316788 - DNA, 15 bp, Homo sapiens
aaaattaaattcaag

SEQ ID NO: 316789 - DNA, 15 bp, Homo sapiens
taaaattaaattcaa

SEQ ID NO: 316790 - DNA, 15 bp, Homo sapiens
ctaaaattaaattca

SEQ ID NO: 316791 - DNA, 15 bp, Homo sapiens
cctaaaattaaattc

SEQ ID NO: 316792 - DNA, 15 bp, Homo sapiens
tcctaaaattaaatt

SEQ ID NO: 316793 - DNA, 15 bp, Homo sapiens
atcctaaaattaaat

SEQ ID NO: 316794 - DNA, 15 bp, Homo sapiens
tatcctaaaattaaa

SEQ ID NO: 316795 - DNA, 15 bp, Homo sapiens
ctatcctaaaattaa

SEQ ID NO: 316796 - DNA, 15 bp, Homo sapiens
tctatcctaaaatta

SEQ ID NO: 316797 - DNA, 15 bp, Homo sapiens
atctatcctaaaatt

SEQ ID NO: 316798 - DNA, 15 bp, Homo sapiens
aatctatcctaaaat

SEQ ID NO: 316799 - DNA, 15 bp, Homo sapiens
aaatctatcctaaaa

SEQ ID NO: 316800 - DNA, 15 bp, Homo sapiens
caaatctatcctaaa

SEQ ID NO: 316801 - DNA, 15 bp, Homo sapiens
tcaaatctatcctaa

SEQ ID NO: 316802 - DNA, 15 bp, Homo sapiens
atcaaatctatccta

SEQ ID NO: 316803 - DNA, 15 bp, Homo sapiens
gatcaaatctatcct

SEQ ID NO: 316804 - DNA, 15 bp, Homo sapiens
agatcaaatctatcc

SEQ ID NO: 316805 - DNA, 15 bp, Homo sapiens
gagatcaaatctatc

SEQ ID NO: 316806 - DNA, 15 bp, Homo sapiens
agagatcaaatctat

SEQ ID NO: 316807 - DNA, 15 bp, Homo sapiens
cagagatcaaatcta

SEQ ID NO: 316808 - DNA, 15 bp, Homo sapiens
tcagagatcaaatct

SEQ ID NO: 316809 - DNA, 15 bp, Homo sapiens
ttcagagatcaaatc

SEQ ID NO: 316810 - DNA, 15 bp, Homo sapiens
attcagagatcaaat

SEQ ID NO: 316811 - DNA, 15 bp, Homo sapiens
aattcagagatcaaa

SEQ ID NO: 316812 - DNA, 15 bp, Homo sapiens
caattcagagatcaa

SEQ ID NO: 316813 - DNA, 15 bp, Homo sapiens
ccaattcagagatca

SEQ ID NO: 316814 - DNA, 15 bp, Homo sapiens
gccaattcagagatc

SEQ ID NO: 316815 - DNA, 15 bp, Homo sapiens
agccaattcagagat

SEQ ID NO: 316816 - DNA, 15 bp, Homo sapiens
aagccaattcagaga

SEQ ID NO: 316817 - DNA, 15 bp, Homo sapiens
aaagccaattcagag

SEQ ID NO: 316818 - DNA, 15 bp, Homo sapiens
taaagccaattcaga

SEQ ID NO: 316819 - DNA, 15 bp, Homo sapiens
ataaagccaattcag

SEQ ID NO: 316820 - DNA, 15 bp, Homo sapiens
tataaagccaattca

SEQ ID NO: 316821 - DNA, 15 bp, Homo sapiens
ctataaagccaattc

SEQ ID NO: 316822 - DNA, 15 bp, Homo sapiens
cctataaagccaatt

SEQ ID NO: 316823 - DNA, 15 bp, Homo sapiens
acctataaagccaat

SEQ ID NO: 316824 - DNA, 15 bp, Homo sapiens
aacctataaagccaa

SEQ ID NO: 316825 - DNA, 15 bp, Homo sapiens
aaacctataaagcca

SEQ ID NO: 316826 - DNA, 15 bp, Homo sapiens
aaaacctataaagcc

SEQ ID NO: 316827 - DNA, 15 bp, Homo sapiens
gaaaacctataaagc

SEQ ID NO: 316828 - DNA, 15 bp, Homo sapiens
agaaaacctataaag

SEQ ID NO: 316829 - DNA, 15 bp, Homo sapiens
gagaaaacctataaa

SEQ ID NO: 316830 - DNA, 15 bp, Homo sapiens
tgagaaaacctataa

SEQ ID NO: 316831 - DNA, 15 bp, Homo sapiens
ctgagaaaacctata

SEQ ID NO: 316832 - DNA, 15 bp, Homo sapiens
actgagaaaacctat

SEQ ID NO: 316833 - DNA, 15 bp, Homo sapiens
aactgagaaaaccta

SEQ ID NO: 316834 - DNA, 15 bp, Homo sapiens
gaactgagaaaacct

SEQ ID NO: 316835 - DNA, 15 bp, Homo sapiens
tgaactgagaaaacc

SEQ ID NO: 316836 - DNA, 15 bp, Homo sapiens
gtgaactgagaaaac

SEQ ID NO: 316837 - DNA, 15 bp, Homo sapiens
tgtgaactgagaaaa

SEQ ID NO: 316838 - DNA, 15 bp, Homo sapiens
ttgtgaactgagaaa

SEQ ID NO: 316839 - DNA, 15 bp, Homo sapiens
attgtgaactgagaa

SEQ ID NO: 316840 - DNA, 15 bp, Homo sapiens
tattgtgaactgaga

SEQ ID NO: 316841 - DNA, 15 bp, Homo sapiens
ctattgtgaactgag

SEQ ID NO: 316842 - DNA, 15 bp, Homo sapiens
actattgtgaactga

SEQ ID NO: 316843 - DNA, 15 bp, Homo sapiens
gactattgtgaactg

SEQ ID NO: 316844 - DNA, 15 bp, Homo sapiens
tgactattgtgaact

SEQ ID NO: 316845 - DNA, 15 bp, Homo sapiens
atgactattgtgaac

SEQ ID NO: 316846 - DNA, 15 bp, Homo sapiens
tatgactattgtgaa

SEQ ID NO: 316847 - DNA, 15 bp, Homo sapiens
ttatgactattgtga

SEQ ID NO: 316848 - DNA, 15 bp, Homo sapiens
gttatgactattgtg

SEQ ID NO: 316849 - DNA, 15 bp, Homo sapiens
ggttatgactattgt

SEQ ID NO: 316850 - DNA, 15 bp, Homo sapiens
aggttatgactattg

SEQ ID NO: 316851 - DNA, 15 bp, Homo sapiens
taggttatgactatt

SEQ ID NO: 316852 - DNA, 15 bp, Homo sapiens
ctaggttatgactat

SEQ ID NO: 316853 - DNA, 15 bp, Homo sapiens
actaggttatgacta

SEQ ID NO: 316854 - DNA, 15 bp, Homo sapiens
aactaggttatgact

SEQ ID NO: 316855 - DNA, 15 bp, Homo sapiens
caactaggttatgac

SEQ ID NO: 316856 - DNA, 15 bp, Homo sapiens
acaactaggttatga

SEQ ID NO: 316857 - DNA, 15 bp, Homo sapiens
aacaactaggttatg

SEQ ID NO: 316858 - DNA, 15 bp, Homo sapiens
aaacaactaggttat

SEQ ID NO: 316859 - DNA, 15 bp, Homo sapiens
gaaacaactaggtta

SEQ ID NO: 316860 - DNA, 15 bp, Homo sapiens
agaaacaactaggtt

SEQ ID NO: 316861 - DNA, 15 bp, Homo sapiens
gagaaacaactaggt

SEQ ID NO: 316862 - DNA, 15 bp, Homo sapiens
agagaaacaactagg

SEQ ID NO: 316863 - DNA, 15 bp, Homo sapiens
gagagaaacaactag

SEQ ID NO: 316864 - DNA, 15 bp, Homo sapiens
agagagaaacaacta

SEQ ID NO: 316865 - DNA, 15 bp, Homo sapiens
aagagagaaacaact

SEQ ID NO: 316866 - DNA, 15 bp, Homo sapiens
caagagagaaacaac

SEQ ID NO: 316867 - DNA, 15 bp, Homo sapiens
gcaagagagaaacaa

SEQ ID NO: 316868 - DNA, 15 bp, Homo sapiens
ggcaagagagaaaca

SEQ ID NO: 316869 - DNA, 15 bp, Homo sapiens
tggcaagagagaaac

SEQ ID NO: 316870 - DNA, 15 bp, Homo sapiens
atggcaagagagaaa

SEQ ID NO: 316871 - DNA, 15 bp, Homo sapiens
tatggcaagagagaa

SEQ ID NO: 316872 - DNA, 15 bp, Homo sapiens
ctatggcaagagaga

SEQ ID NO: 316873 - DNA, 15 bp, Homo sapiens
cctatggcaagagag

SEQ ID NO: 316874 - DNA, 15 bp, Homo sapiens
acctatggcaagaga

SEQ ID NO: 316875 - DNA, 15 bp, Homo sapiens
cacctatggcaagag

SEQ ID NO: 316876 - DNA, 15 bp, Homo sapiens
tcacctatggcaaga

SEQ ID NO: 316877 - DNA, 15 bp, Homo sapiens
gtcacctatggcaag

SEQ ID NO: 316878 - DNA, 15 bp, Homo sapiens
tgtcacctatggcaa

SEQ ID NO: 316879 - DNA, 15 bp, Homo sapiens
ctgtcacctatggca

SEQ ID NO: 316880 - DNA, 15 bp, Homo sapiens
cctgtcacctatggc

SEQ ID NO: 316881 - DNA, 15 bp, Homo sapiens
gcctgtcacctatgg

SEQ ID NO: 316882 - DNA, 15 bp, Homo sapiens
tgcctgtcacctatg

SEQ ID NO: 316883 - DNA, 15 bp, Homo sapiens
ttgcctgtcacctat

SEQ ID NO: 316884 - DNA, 15 bp, Homo sapiens
attgcctgtcaccta

SEQ ID NO: 316885 - DNA, 15 bp, Homo sapiens
cattgcctgtcacct

SEQ ID NO: 316886 - DNA, 15 bp, Homo sapiens
gcattgcctgtcacc

SEQ ID NO: 316887 - DNA, 15 bp, Homo sapiens
ctgcattgcctgtca

SEQ ID NO: 316888 - DNA, 15 bp, Homo sapiens
tctgcattgcctgtc

SEQ ID NO: 316889 - DNA, 15 bp, Homo sapiens
ctctgcattgcctgt

SEQ ID NO: 316890 - DNA, 15 bp, Homo sapiens
gctctgcattgcctg

SEQ ID NO: 316891 - DNA, 15 bp, Homo sapiens
ggctctgcattgcct

SEQ ID NO: 316892 - DNA, 15 bp, Homo sapiens
tggctctgcattgcc

SEQ ID NO: 316893 - DNA, 15 bp, Homo sapiens
ttggctctgcattgc

SEQ ID NO: 316894 - DNA, 15 bp, Homo sapiens
attggctctgcattg

SEQ ID NO: 316895 - DNA, 15 bp, Homo sapiens
aattggctctgcatt

SEQ ID NO: 316896 - DNA, 15 bp, Homo sapiens
aaattggctctgcat

SEQ ID NO: 316897 - DNA, 15 bp, Homo sapiens
gaaattggctctgca

SEQ ID NO: 316898 - DNA, 15 bp, Homo sapiens
tgaaattggctctgc

SEQ ID NO: 316899 - DNA, 15 bp, Homo sapiens
ctgaaattggctctg

SEQ ID NO: 316900 - DNA, 15 bp, Homo sapiens
tctgaaattggctct

SEQ ID NO: 316901 - DNA, 15 bp, Homo sapiens
ttctgaaattggctc

SEQ ID NO: 316902 - DNA, 15 bp, Homo sapiens
cttctgaaattggct

SEQ ID NO: 316903 - DNA, 15 bp, Homo sapiens
acttctgaaattggc

SEQ ID NO: 316904 - DNA, 15 bp, Homo sapiens
cacttctgaaattgg

SEQ ID NO: 316905 - DNA, 15 bp, Homo sapiens
tcacttctgaaattg

SEQ ID NO: 316906 - DNA, 15 bp, Homo sapiens
ctcacttctgaaatt

SEQ ID NO: 316907 - DNA, 15 bp, Homo sapiens
gctcacttctgaaat

SEQ ID NO: 316908 - DNA, 15 bp, Homo sapiens
agctcacttctgaaa

SEQ ID NO: 316909 - DNA, 15 bp, Homo sapiens
gagctcacttctgaa

SEQ ID NO: 316910 - DNA, 15 bp, Homo sapiens
tgagctcacttctga

SEQ ID NO: 316911 - DNA, 15 bp, Homo sapiens
ctgagctcacttctg

SEQ ID NO: 316912 - DNA, 15 bp, Homo sapiens
actgagctcacttct

SEQ ID NO: 316913 - DNA, 15 bp, Homo sapiens
tactgagctcacttc

SEQ ID NO: 316914 - DNA, 15 bp, Homo sapiens
ctactgagctcactt

SEQ ID NO: 316915 - DNA, 15 bp, Homo sapiens
actactgagctcact

SEQ ID NO: 316916 - DNA, 15 bp, Homo sapiens
tactactgagctcac

SEQ ID NO: 316917 - DNA, 15 bp, Homo sapiens
ttactactgagctca

SEQ ID NO: 316918 - DNA, 15 bp, Homo sapiens
tttactactgagctc

SEQ ID NO: 316919 - DNA, 15 bp, Homo sapiens
gtttactactgagct

SEQ ID NO: 316920 - DNA, 15 bp, Homo sapiens
agtttactactgagc

SEQ ID NO: 316921 - DNA, 15 bp, Homo sapiens
gagtttactactgag

SEQ ID NO: 316922 - DNA, 15 bp, Homo sapiens
tgagtttactactga

SEQ ID NO: 316923 - DNA, 15 bp, Homo sapiens
atgagtttactactg

SEQ ID NO: 316924 - DNA, 15 bp, Homo sapiens
catgagtttactact

SEQ ID NO: 316925 - DNA, 15 bp, Homo sapiens
ccatgagtttactac

SEQ ID NO: 316926 - DNA, 15 bp, Homo sapiens
gccatgagtttacta

SEQ ID NO: 316927 - DNA, 15 bp, Homo sapiens
tgccatgagtttact

SEQ ID NO: 316928 - DNA, 15 bp, Homo sapiens
ctgccatgagtttac

SEQ ID NO: 316929 - DNA, 15 bp, Homo sapiens
cctgccatgagttta

SEQ ID NO: 316930 - DNA, 15 bp, Homo sapiens
acctgccatgagttt

SEQ ID NO: 316931 - DNA, 15 bp, Homo sapiens
cacctgccatgagtt

SEQ ID NO: 316932 - DNA, 15 bp, Homo sapiens
gcacctgccatgagt

SEQ ID NO: 316933 - DNA, 15 bp, Homo sapiens
tgcacctgccatgag

SEQ ID NO: 316934 - DNA, 15 bp, Homo sapiens
ctgcacctgccatga

SEQ ID NO: 316935 - DNA, 15 bp, Homo sapiens
cctgcacctgccatg

SEQ ID NO: 316936 - DNA, 15 bp, Homo sapiens
tcctgcacctgccat

SEQ ID NO: 316937 - DNA, 15 bp, Homo sapiens
atcctgcacctgcca

SEQ ID NO: 316938 - DNA, 15 bp, Homo sapiens
catcctgcacctgcc

SEQ ID NO: 316939 - DNA, 15 bp, Homo sapiens
tcatcctgcacctgc

SEQ ID NO: 316940 - DNA, 15 bp, Homo sapiens
ctcatcctgcacctg

SEQ ID NO: 316941 - DNA, 15 bp, Homo sapiens
cctcatcctgcacct

SEQ ID NO: 316942 - DNA, 15 bp, Homo sapiens
gcctcatcctgcacc

SEQ ID NO: 316943 - DNA, 15 bp, Homo sapiens
tgcctcatcctgcac

SEQ ID NO: 316944 - DNA, 15 bp, Homo sapiens
ttgcctcatcctgca

SEQ ID NO: 316945 - DNA, 15 bp, Homo sapiens
cttgcctcatcctgc

SEQ ID NO: 316946 - DNA, 15 bp, Homo sapiens
tcttgcctcatcctg

SEQ ID NO: 316947 - DNA, 15 bp, Homo sapiens
ctcttgcctcatcct

SEQ ID NO: 316948 - DNA, 15 bp, Homo sapiens
tctcttgcctcatcc

SEQ ID NO: 316949 - DNA, 15 bp, Homo sapiens
ctctcttgcctcatc

SEQ ID NO: 316950 - DNA, 15 bp, Homo sapiens
tctctcttgcctcat

SEQ ID NO: 316951 - DNA, 15 bp, Homo sapiens
ctctctcttgcctca

SEQ ID NO: 316952 - DNA, 15 bp, Homo sapiens
cctctctcttgcctc

SEQ ID NO: 316953 - DNA, 15 bp, Homo sapiens
gcctctctcttgcct

SEQ ID NO: 316954 - DNA, 15 bp, Homo sapiens
ggcctctctcttgcc

SEQ ID NO: 316955 - DNA, 15 bp, Homo sapiens
aggcctctctcttgc

SEQ ID NO: 316956 - DNA, 15 bp, Homo sapiens
caggcctctctcttg

SEQ ID NO: 316957 - DNA, 15 bp, Homo sapiens
ccaggcctctctctt

SEQ ID NO: 316958 - DNA, 15 bp, Homo sapiens
cccaggcctctctct

SEQ ID NO: 316959 - DNA, 15 bp, Homo sapiens
acccaggcctctctc

SEQ ID NO: 316960 - DNA, 15 bp, Homo sapiens
cacccaggcctctct

SEQ ID NO: 316961 - DNA, 15 bp, Homo sapiens
gcacccaggcctctc

SEQ ID NO: 316962 - DNA, 15 bp, Homo sapiens
tgcacccaggcctct

SEQ ID NO: 316963 - DNA, 15 bp, Homo sapiens
ttgcacccaggcctc

SEQ ID NO: 316964 - DNA, 15 bp, Homo sapiens
tttgcacccaggcct

SEQ ID NO: 316965 - DNA, 15 bp, Homo sapiens
gtttgcacccaggcc

SEQ ID NO: 316966 - DNA, 15 bp, Homo sapiens
tgtttgcacccaggc

SEQ ID NO: 316967 - DNA, 15 bp, Homo sapiens
atgtttgcacccagg

SEQ ID NO: 316968 - DNA, 15 bp, Homo sapiens
catgtttgcacccag

SEQ ID NO: 316969 - DNA, 15 bp, Homo sapiens
tcatgtttgcaccca

SEQ ID NO: 316970 - DNA, 15 bp, Homo sapiens
ctcatgtttgcaccc

SEQ ID NO: 316971 - DNA, 15 bp, Homo sapiens
cctcatgtttgcacc

SEQ ID NO: 316972 - DNA, 15 bp, Homo sapiens
ccctcatgtttgcac

SEQ ID NO: 316973 - DNA, 15 bp, Homo sapiens
accctcatgtttgca

SEQ ID NO: 316974 - DNA, 15 bp, Homo sapiens
caccctcatgtttgc

SEQ ID NO: 316975 - DNA, 15 bp, Homo sapiens
ccaccctcatgtttg

SEQ ID NO: 316976 - DNA, 15 bp, Homo sapiens
gccaccctcatgttt

SEQ ID NO: 316977 - DNA, 15 bp, Homo sapiens
agccaccctcatgtt

SEQ ID NO: 316978 - DNA, 15 bp, Homo sapiens
gagccaccctcatgt

SEQ ID NO: 316979 - DNA, 15 bp, Homo sapiens
tgagccaccctcatg

SEQ ID NO: 316980 - DNA, 15 bp, Homo sapiens
atgagccaccctcat

SEQ ID NO: 316981 - DNA, 15 bp, Homo sapiens
aatgagccaccctca

SEQ ID NO: 316982 - DNA, 15 bp, Homo sapiens
gaatgagccaccctc

SEQ ID NO: 316983 - DNA, 15 bp, Homo sapiens
ggaatgagccaccct

SEQ ID NO: 316984 - DNA, 15 bp, Homo sapiens
gggaatgagccaccc

SEQ ID NO: 316985 - DNA, 15 bp, Homo sapiens
tgggaatgagccacc

SEQ ID NO: 316986 - DNA, 15 bp, Homo sapiens
ctgggaatgagccac

SEQ ID NO: 316987 - DNA, 15 bp, Homo sapiens
cctgggaatgagcca

SEQ ID NO: 316988 - DNA, 15 bp, Homo sapiens
ccctgggaatgagcc

SEQ ID NO: 316989 - DNA, 15 bp, Homo sapiens
gccctgggaatgagc

SEQ ID NO: 316990 - DNA, 15 bp, Homo sapiens
agccctgggaatgag

SEQ ID NO: 316991 - DNA, 15 bp, Homo sapiens
tagccctgggaatga

SEQ ID NO: 316992 - DNA, 15 bp, Homo sapiens
atagccctgggaatg

SEQ ID NO: 316993 - DNA, 15 bp, Homo sapiens
catagccctgggaat

SEQ ID NO: 316994 - DNA, 15 bp, Homo sapiens
gcatagccctgggaa

SEQ ID NO: 316995 - DNA, 15 bp, Homo sapiens
tgcatagccctggga

SEQ ID NO: 316996 - DNA, 15 bp, Homo sapiens
ttgcatagccctggg

SEQ ID NO: 316997 - DNA, 15 bp, Homo sapiens
tttgcatagccctgg

SEQ ID NO: 316998 - DNA, 15 bp, Homo sapiens
ctttgcatagccctg

SEQ ID NO: 316999 - DNA, 15 bp, Homo sapiens
cctttgcatagccct

SEQ ID NO: 317000 - DNA, 15 bp, Homo sapiens
gcctttgcatagccc

SEQ ID NO: 317001 - DNA, 15 bp, Homo sapiens
tgcctttgcatagcc

SEQ ID NO: 317002 - DNA, 15 bp, Homo sapiens
ctgcctttgcatagc

SEQ ID NO: 317003 - DNA, 15 bp, Homo sapiens
cctgcctttgcatag

SEQ ID NO: 317004 - DNA, 15 bp, Homo sapiens
ccctgcctttgcata

SEQ ID NO: 317005 - DNA, 15 bp, Homo sapiens
accctgcctttgcat

SEQ ID NO: 317006 - DNA, 15 bp, Homo sapiens
gaccctgcctttgca

SEQ ID NO: 317007 - DNA, 15 bp, Homo sapiens
tgaccctgcctttgc

SEQ ID NO: 317008 - DNA, 15 bp, Homo sapiens
ctgaccctgcctttg

SEQ ID NO: 317009 - DNA, 15 bp, Homo sapiens
actgaccctgccttt

SEQ ID NO: 317010 - DNA, 15 bp, Homo sapiens
gactgaccctgcctt

SEQ ID NO: 317011 - DNA, 15 bp, Homo sapiens
ggactgaccctgcct

SEQ ID NO: 317012 - DNA, 15 bp, Homo sapiens
gggactgaccctgcc

SEQ ID NO: 317013 - DNA, 15 bp, Homo sapiens
tgggactgaccctgc

SEQ ID NO: 317014 - DNA, 15 bp, Homo sapiens
ttgggactgaccctg

SEQ ID NO: 317015 - DNA, 15 bp, Homo sapiens
tttgggactgaccct

SEQ ID NO: 317016 - DNA, 15 bp, Homo sapiens
ttttgggactgaccc

SEQ ID NO: 317017 - DNA, 15 bp, Homo sapiens
cttttgggactgacc

SEQ ID NO: 317018 - DNA, 15 bp, Homo sapiens
ccttttgggactgac

SEQ ID NO: 317019 - DNA, 15 bp, Homo sapiens
tccttttgggactga

SEQ ID NO: 317020 - DNA, 15 bp, Homo sapiens
ctccttttgggactg

SEQ ID NO: 317021 - DNA, 15 bp, Homo sapiens
gctccttttgggact

SEQ ID NO: 317022 - DNA, 15 bp, Homo sapiens
tgctccttttgggac

SEQ ID NO: 317023 - DNA, 15 bp, Homo sapiens
gtgctccttttggga

SEQ ID NO: 317024 - DNA, 15 bp, Homo sapiens
ggtgctccttttggg

SEQ ID NO: 317025 - DNA, 15 bp, Homo sapiens
aggtgctccttttgg

SEQ ID NO: 317026 - DNA, 15 bp, Homo sapiens
gaggtgctccttttg

SEQ ID NO: 317027 - DNA, 15 bp, Homo sapiens
ggaggtgctcctttt

SEQ ID NO: 317028 - DNA, 15 bp, Homo sapiens
aggaggtgctccttt

SEQ ID NO: 317029 - DNA, 15 bp, Homo sapiens
aaggaggtgctcctt

SEQ ID NO: 317030 - DNA, 15 bp, Homo sapiens
taaggaggtgctcct

SEQ ID NO: 317031 - DNA, 15 bp, Homo sapiens
gtaaggaggtgctcc

SEQ ID NO: 317032 - DNA, 15 bp, Homo sapiens
tgtaaggaggtgctc

SEQ ID NO: 317033 - DNA, 15 bp, Homo sapiens
atgtaaggaggtgct

SEQ ID NO: 317034 - DNA, 15 bp, Homo sapiens
catgtaaggaggtgc

SEQ ID NO: 317035 - DNA, 15 bp, Homo sapiens
acatgtaaggaggtg

SEQ ID NO: 317036 - DNA, 15 bp, Homo sapiens
aacatgtaaggaggt

SEQ ID NO: 317037 - DNA, 15 bp, Homo sapiens
caacatgtaaggagg

SEQ ID NO: 317038 - DNA, 15 bp, Homo sapiens
acaacatgtaaggag

SEQ ID NO: 317039 - DNA, 15 bp, Homo sapiens
cacaacatgtaagga

SEQ ID NO: 317040 - DNA, 15 bp, Homo sapiens
gcacaacatgtaagg

SEQ ID NO: 317041 - DNA, 15 bp, Homo sapiens
ggcacaacatgtaag

SEQ ID NO: 317042 - DNA, 15 bp, Homo sapiens
aggcacaacatgtaa

SEQ ID NO: 317043 - DNA, 15 bp, Homo sapiens
caggcacaacatgta

SEQ ID NO: 317044 - DNA, 15 bp, Homo sapiens
tcaggcacaacatgt

SEQ ID NO: 317045 - DNA, 15 bp, Homo sapiens
ttcaggcacaacatg

SEQ ID NO: 317046 - DNA, 15 bp, Homo sapiens
cttcaggcacaacat

SEQ ID NO: 317047 - DNA, 15 bp, Homo sapiens
acttcaggcacaaca

SEQ ID NO: 317048 - DNA, 15 bp, Homo sapiens
cacttcaggcacaac

SEQ ID NO: 317049 - DNA, 15 bp, Homo sapiens
acacttcaggcacaa

SEQ ID NO: 317050 - DNA, 15 bp, Homo sapiens
gacacttcaggcaca

SEQ ID NO: 317051 - DNA, 15 bp, Homo sapiens
ggacacttcaggcac

SEQ ID NO: 317052 - DNA, 15 bp, Homo sapiens
gggacacttcaggca

SEQ ID NO: 317053 - DNA, 15 bp, Homo sapiens
agggacacttcaggc

SEQ ID NO: 317054 - DNA, 15 bp, Homo sapiens
aagggacacttcagg

SEQ ID NO: 317055 - DNA, 15 bp, Homo sapiens
aaagggacacttcag

SEQ ID NO: 317056 - DNA, 15 bp, Homo sapiens
gaaagggacacttca

SEQ ID NO: 317057 - DNA, 15 bp, Homo sapiens
agaaagggacacttc

SEQ ID NO: 317058 - DNA, 15 bp, Homo sapiens
gagaaagggacactt

SEQ ID NO: 317059 - DNA, 15 bp, Homo sapiens
tgagaaagggacact

SEQ ID NO: 317060 - DNA, 15 bp, Homo sapiens
ctgagaaagggacac

SEQ ID NO: 317061 - DNA, 15 bp, Homo sapiens
actgagaaagggaca

SEQ ID NO: 317062 - DNA, 15 bp, Homo sapiens
gactgagaaagggac

SEQ ID NO: 317063 - DNA, 15 bp, Homo sapiens
agactgagaaaggga

SEQ ID NO: 317064 - DNA, 15 bp, Homo sapiens
aagactgagaaaggg

SEQ ID NO: 317065 - DNA, 15 bp, Homo sapiens
aaagactgagaaagg

SEQ ID NO: 317066 - DNA, 15 bp, Homo sapiens
aaaagactgagaaag

SEQ ID NO: 317067 - DNA, 15 bp, Homo sapiens
gaaaagactgagaaa

SEQ ID NO: 317068 - DNA, 15 bp, Homo sapiens
agaaaagactgagaa

SEQ ID NO: 317069 - DNA, 15 bp, Homo sapiens
aagaaaagactgaga

SEQ ID NO: 317070 - DNA, 15 bp, Homo sapiens
caagaaaagactgag

SEQ ID NO: 317071 - DNA, 15 bp, Homo sapiens
ccaagaaaagactga

SEQ ID NO: 317072 - DNA, 15 bp, Homo sapiens
accaagaaaagactg

SEQ ID NO: 317073 - DNA, 15 bp, Homo sapiens
caccaagaaaagact

SEQ ID NO: 317074 - DNA, 15 bp, Homo sapiens
ccaccaagaaaagac

SEQ ID NO: 317075 - DNA, 15 bp, Homo sapiens
accaccaagaaaaga

SEQ ID NO: 317076 - DNA, 15 bp, Homo sapiens
caccaccaagaaaag

SEQ ID NO: 317077 - DNA, 15 bp, Homo sapiens
ccaccaccaagaaaa

SEQ ID NO: 317078 - DNA, 15 bp, Homo sapiens
gccaccaccaagaaa

SEQ ID NO: 317079 - DNA, 15 bp, Homo sapiens
tgccaccaccaagaa

SEQ ID NO: 317080 - DNA, 15 bp, Homo sapiens
ctgccaccaccaaga

SEQ ID NO: 317081 - DNA, 15 bp, Homo sapiens
cctgccaccaccaag

SEQ ID NO: 317082 - DNA, 15 bp, Homo sapiens
acctgccaccaccaa

SEQ ID NO: 317083 - DNA, 15 bp, Homo sapiens
cacctgccaccacca

SEQ ID NO: 317084 - DNA, 15 bp, Homo sapiens
gcacctgccaccacc

SEQ ID NO: 317085 - DNA, 15 bp, Homo sapiens
agcacctgccaccac

SEQ ID NO: 317086 - DNA, 15 bp, Homo sapiens
cagcacctgccacca

SEQ ID NO: 317087 - DNA, 15 bp, Homo sapiens
gcagcacctgccacc

SEQ ID NO: 317088 - DNA, 15 bp, Homo sapiens
ggcagcacctgccac

SEQ ID NO: 317089 - DNA, 15 bp, Homo sapiens
aggcagcacctgcca

SEQ ID NO: 317090 - DNA, 15 bp, Homo sapiens
caggcagcacctgcc

SEQ ID NO: 317091 - DNA, 15 bp, Homo sapiens
ccaggcagcacctgc

SEQ ID NO: 317092 - DNA, 15 bp, Homo sapiens
gccaggcagcacctg

SEQ ID NO: 317093 - DNA, 15 bp, Homo sapiens
tgccaggcagcacct

SEQ ID NO: 317094 - DNA, 15 bp, Homo sapiens
ttgccaggcagcacc

SEQ ID NO: 317095 - DNA, 15 bp, Homo sapiens
attgccaggcagcac

SEQ ID NO: 317096 - DNA, 15 bp, Homo sapiens
gattgccaggcagca

SEQ ID NO: 317097 - DNA, 15 bp, Homo sapiens
ggattgccaggcagc

SEQ ID NO: 317098 - DNA, 15 bp, Homo sapiens
gggattgccaggcag

SEQ ID NO: 317099 - DNA, 15 bp, Homo sapiens
ggggattgccaggca

SEQ ID NO: 317100 - DNA, 15 bp, Homo sapiens
tggggattgccaggc

SEQ ID NO: 317101 - DNA, 15 bp, Homo sapiens
atggggattgccagg

SEQ ID NO: 317102 - DNA, 15 bp, Homo sapiens
gatggggattgccag

SEQ ID NO: 317103 - DNA, 15 bp, Homo sapiens
ggatggggattgcca

SEQ ID NO: 317104 - DNA, 15 bp, Homo sapiens
gggatggggattgcc

SEQ ID NO: 317105 - DNA, 15 bp, Homo sapiens
agggatggggattgc

SEQ ID NO: 317106 - DNA, 15 bp, Homo sapiens
aagggatggggattg

SEQ ID NO: 317107 - DNA, 15 bp, Homo sapiens
gaagggatggggatt

SEQ ID NO: 317108 - DNA, 15 bp, Homo sapiens
agaagggatggggat

SEQ ID NO: 317109 - DNA, 15 bp, Homo sapiens
tagaagggatgggga

SEQ ID NO: 317110 - DNA, 15 bp, Homo sapiens
gtagaagggatgggg

SEQ ID NO: 317111 - DNA, 15 bp, Homo sapiens
agtagaagggatggg

SEQ ID NO: 317112 - DNA, 15 bp, Homo sapiens
aagtagaagggatgg

SEQ ID NO: 317113 - DNA, 15 bp, Homo sapiens
aaagtagaagggatg

SEQ ID NO: 317114 - DNA, 15 bp, Homo sapiens
aaaagtagaagggat

SEQ ID NO: 317115 - DNA, 15 bp, Homo sapiens
taaaagtagaaggga

SEQ ID NO: 317116 - DNA, 15 bp, Homo sapiens
ctaaaagtagaaggg

SEQ ID NO: 317117 - DNA, 15 bp, Homo sapiens
tctaaaagtagaagg

SEQ ID NO: 317118 - DNA, 15 bp, Homo sapiens
atctaaaagtagaag

SEQ ID NO: 317119 - DNA, 15 bp, Homo sapiens
catctaaaagtagaa

SEQ ID NO: 317120 - DNA, 15 bp, Homo sapiens
ccatctaaaagtaga

SEQ ID NO: 317121 - DNA, 15 bp, Homo sapiens
accatctaaaagtag

SEQ ID NO: 317122 - DNA, 15 bp, Homo sapiens
caccatctaaaagta

SEQ ID NO: 317123 - DNA, 15 bp, Homo sapiens
ccaccatctaaaagt

SEQ ID NO: 317124 - DNA, 15 bp, Homo sapiens
cccaccatctaaaag

SEQ ID NO: 317125 - DNA, 15 bp, Homo sapiens
ccccaccatctaaaa

SEQ ID NO: 317126 - DNA, 15 bp, Homo sapiens
cccccaccatctaaa

SEQ ID NO: 317127 - DNA, 15 bp, Homo sapiens
gcccccaccatctaa

SEQ ID NO: 317128 - DNA, 15 bp, Homo sapiens
ggcccccaccatcta

SEQ ID NO: 317129 - DNA, 15 bp, Homo sapiens
gggcccccaccatct

SEQ ID NO: 317130 - DNA, 15 bp, Homo sapiens
agggcccccaccatc

SEQ ID NO: 317131 - DNA, 15 bp, Homo sapiens
cagggcccccaccat

SEQ ID NO: 317132 - DNA, 15 bp, Homo sapiens
acagggcccccacca

SEQ ID NO: 317133 - DNA, 15 bp, Homo sapiens
gacagggcccccacc

SEQ ID NO: 317134 - DNA, 15 bp, Homo sapiens
ggacagggcccccac

SEQ ID NO: 317135 - DNA, 15 bp, Homo sapiens
aggacagggccccca

SEQ ID NO: 317136 - DNA, 15 bp, Homo sapiens
caggacagggccccc

SEQ ID NO: 317137 - DNA, 15 bp, Homo sapiens
gcaggacagggcccc

SEQ ID NO: 317138 - DNA, 15 bp, Homo sapiens
agcaggacagggccc

SEQ ID NO: 317139 - DNA, 15 bp, Homo sapiens
aagcaggacagggcc

SEQ ID NO: 317140 - DNA, 15 bp, Homo sapiens
aaagcaggacagggc

SEQ ID NO: 317141 - DNA, 15 bp, Homo sapiens
taaagcaggacaggg

SEQ ID NO: 317142 - DNA, 15 bp, Homo sapiens
ataaagcaggacagg

SEQ ID NO: 317143 - DNA, 15 bp, Homo sapiens
gataaagcaggacag

SEQ ID NO: 317144 - DNA, 15 bp, Homo sapiens
ggataaagcaggaca

SEQ ID NO: 317145 - DNA, 15 bp, Homo sapiens
aggataaagcaggac

SEQ ID NO: 317146 - DNA, 15 bp, Homo sapiens
aaggataaagcagga

SEQ ID NO: 317147 - DNA, 15 bp, Homo sapiens
caaggataaagcagg

SEQ ID NO: 317148 - DNA, 15 bp, Homo sapiens
acaaggataaagcag

SEQ ID NO: 317149 - DNA, 15 bp, Homo sapiens
tacaaggataaagca

SEQ ID NO: 317150 - DNA, 15 bp, Homo sapiens
atacaaggataaagc

SEQ ID NO: 317151 - DNA, 15 bp, Homo sapiens
tatacaaggataaag

SEQ ID NO: 317152 - DNA, 15 bp, Homo sapiens
atatacaaggataaa

SEQ ID NO: 317153 - DNA, 15 bp, Homo sapiens
catatacaaggataa

SEQ ID NO: 317154 - DNA, 15 bp, Homo sapiens
ccatatacaaggata

SEQ ID NO: 317155 - DNA, 15 bp, Homo sapiens
gccatatacaaggat

SEQ ID NO: 317156 - DNA, 15 bp, Homo sapiens
cgccatatacaagga

SEQ ID NO: 317157 - DNA, 15 bp, Homo sapiens
gcgccatatacaagg

SEQ ID NO: 317158 - DNA, 15 bp, Homo sapiens
agcgccatatacaag

SEQ ID NO: 317159 - DNA, 15 bp, Homo sapiens
aagcgccatatacaa

SEQ ID NO: 317160 - DNA, 15 bp, Homo sapiens
aaagcgccatataca

SEQ ID NO: 317161 - DNA, 15 bp, Homo sapiens
aaaagcgccatatac

SEQ ID NO: 317162 - DNA, 15 bp, Homo sapiens
taaaagcgccatata

SEQ ID NO: 317163 - DNA, 15 bp, Homo sapiens
ataaaagcgccatat

SEQ ID NO: 317164 - DNA, 15 bp, Homo sapiens
aataaaagcgccata

SEQ ID NO: 317165 - DNA, 15 bp, Homo sapiens
aaataaaagcgccat

SEQ ID NO: 317166 - DNA, 15 bp, Homo sapiens
aaaataaaagcgcca

SEQ ID NO: 317167 - DNA, 15 bp, Homo sapiens
taaaataaaagcgcc

SEQ ID NO: 317168 - DNA, 15 bp, Homo sapiens
ttaaaataaaagcgc

SEQ ID NO: 317169 - DNA, 15 bp, Homo sapiens
gttaaaataaaagcg

SEQ ID NO: 317170 - DNA, 15 bp, Homo sapiens
ggttaaaataaaagc

SEQ ID NO: 317171 - DNA, 15 bp, Homo sapiens
tggttaaaataaaag

SEQ ID NO: 317172 - DNA, 15 bp, Homo sapiens
atggttaaaataaaa

SEQ ID NO: 317173 - DNA, 15 bp, Homo sapiens
catggttaaaataaa

SEQ ID NO: 317174 - DNA, 15 bp, Homo sapiens
acatggttaaaataa

SEQ ID NO: 317175 - DNA, 15 bp, Homo sapiens
tacatggttaaaata

SEQ ID NO: 317176 - DNA, 15 bp, Homo sapiens
ttacatggttaaaat

SEQ ID NO: 317177 - DNA, 15 bp, Homo sapiens
tttacatggttaaaa

SEQ ID NO: 317178 - DNA, 15 bp, Homo sapiens
gtttacatggttaaa

SEQ ID NO: 317179 - DNA, 15 bp, Homo sapiens
agtttacatggttaa

SEQ ID NO: 317180 - DNA, 15 bp, Homo sapiens
cagtttacatggtta

SEQ ID NO: 317181 - DNA, 15 bp, Homo sapiens
tcagtttacatggtt

SEQ ID NO: 317182 - DNA, 15 bp, Homo sapiens
atcagtttacatggt

SEQ ID NO: 317183 - DNA, 15 bp, Homo sapiens
aatcagtttacatgg

SEQ ID NO: 317184 - DNA, 15 bp, Homo sapiens
gaatcagtttacatg

SEQ ID NO: 317185 - DNA, 15 bp, Homo sapiens
tgaatcagtttacat

SEQ ID NO: 317186 - DNA, 15 bp, Homo sapiens
ctgaatcagtttaca

SEQ ID NO: 317187 - DNA, 15 bp, Homo sapiens
cctgaatcagtttac

SEQ ID NO: 317188 - DNA, 15 bp, Homo sapiens
acctgaatcagttta

SEQ ID NO: 317189 - DNA, 15 bp, Homo sapiens
gacctgaatcagttt

SEQ ID NO: 317190 - DNA, 15 bp, Homo sapiens
ggacctgaatcagtt

SEQ ID NO: 317191 - DNA, 15 bp, Homo sapiens
aggacctgaatcagt

SEQ ID NO: 317192 - DNA, 15 bp, Homo sapiens
gaggacctgaatcag

SEQ ID NO: 317193 - DNA, 15 bp, Homo sapiens
ggaggacctgaatca

SEQ ID NO: 317194 - DNA, 15 bp, Homo sapiens
gggaggacctgaatc

SEQ ID NO: 317195 - DNA, 15 bp, Homo sapiens
agggaggacctgaat

SEQ ID NO: 317196 - DNA, 15 bp, Homo sapiens
cagggaggacctgaa

SEQ ID NO: 317197 - DNA, 15 bp, Homo sapiens
acagggaggacctga

SEQ ID NO: 317198 - DNA, 15 bp, Homo sapiens
tacagggaggacctg

SEQ ID NO: 317199 - DNA, 15 bp, Homo sapiens
ctacagggaggacct

SEQ ID NO: 317200 - DNA, 15 bp, Homo sapiens
actacagggaggacc

SEQ ID NO: 317201 - DNA, 15 bp, Homo sapiens
gactacagggaggac

SEQ ID NO: 317202 - DNA, 15 bp, Homo sapiens
tgactacagggagga

SEQ ID NO: 317203 - DNA, 15 bp, Homo sapiens
ttgactacagggagg

SEQ ID NO: 317204 - DNA, 15 bp, Homo sapiens
gttgactacagggag

SEQ ID NO: 317205 - DNA, 15 bp, Homo sapiens
tgttgactacaggga

SEQ ID NO: 317206 - DNA, 15 bp, Homo sapiens
ctgttgactacaggg

SEQ ID NO: 317207 - DNA, 15 bp, Homo sapiens
tctgttgactacagg

SEQ ID NO: 317208 - DNA, 15 bp, Homo sapiens
ctctgttgactacag

SEQ ID NO: 317209 - DNA, 15 bp, Homo sapiens
tctctgttgactaca

SEQ ID NO: 317210 - DNA, 15 bp, Homo sapiens
atctctgttgactac

SEQ ID NO: 317211 - DNA, 15 bp, Homo sapiens
tatctctgttgacta

SEQ ID NO: 317212 - DNA, 15 bp, Homo sapiens
ttatctctgttgact

SEQ ID NO: 317213 - DNA, 15 bp, Homo sapiens
tttatctctgttgac

SEQ ID NO: 317214 - DNA, 15 bp, Homo sapiens
ttttatctctgttga

SEQ ID NO: 317215 - DNA, 15 bp, Homo sapiens
cttttatctctgttg

SEQ ID NO: 317216 - DNA, 15 bp, Homo sapiens
acttttatctctgtt

SEQ ID NO: 317217 - DNA, 15 bp, Homo sapiens
gacttttatctctgt

SEQ ID NO: 317218 - DNA, 15 bp, Homo sapiens
gagacttttatctct

SEQ ID NO: 317219 - DNA, 15 bp, Homo sapiens
tgagacttttatctc

SEQ ID NO: 317220 - DNA, 15 bp, Homo sapiens
ttgagacttttatct

SEQ ID NO: 317221 - DNA, 15 bp, Homo sapiens
attgagacttttatc

SEQ ID NO: 317222 - DNA, 15 bp, Homo sapiens
tattgagacttttat

SEQ ID NO: 317223 - DNA, 15 bp, Homo sapiens
ttattgagactttta

SEQ ID NO: 317224 - DNA, 15 bp, Homo sapiens
attattgagactttt

SEQ ID NO: 317225 - DNA, 15 bp, Homo sapiens
gattattgagacttt

SEQ ID NO: 317226 - DNA, 15 bp, Homo sapiens
tgattattgagactt

SEQ ID NO: 317227 - DNA, 15 bp, Homo sapiens
ttgattattgagact

SEQ ID NO: 317228 - DNA, 15 bp, Homo sapiens
tttgattattgagac

SEQ ID NO: 317229 - DNA, 15 bp, Homo sapiens
gtttgattattgaga

SEQ ID NO: 317230 - DNA, 15 bp, Homo sapiens
ggtttgattattgag

SEQ ID NO: 317231 - DNA, 15 bp, Homo sapiens
aggtttgattattga

SEQ ID NO: 317232 - DNA, 15 bp, Homo sapiens
caggtttgattattg

SEQ ID NO: 317233 - DNA, 15 bp, Homo sapiens
acaggtttgattatt

SEQ ID NO: 317234 - DNA, 15 bp, Homo sapiens
cacaggtttgattat

SEQ ID NO: 317235 - DNA, 15 bp, Homo sapiens
ccacaggtttgatta

SEQ ID NO: 317236 - DNA, 15 bp, Homo sapiens
cccacaggtttgatt

SEQ ID NO: 317237 - DNA, 15 bp, Homo sapiens
acccacaggtttgat

SEQ ID NO: 317238 - DNA, 15 bp, Homo sapiens
tacccacaggtttga

SEQ ID NO: 317239 - DNA, 15 bp, Homo sapiens
gtacccacaggtttg

SEQ ID NO: 317240 - DNA, 15 bp, Homo sapiens
agtacccacaggttt

SEQ ID NO: 317241 - DNA, 15 bp, Homo sapiens
aagtacccacaggtt

SEQ ID NO: 317242 - DNA, 15 bp, Homo sapiens
gaagtacccacaggt

SEQ ID NO: 317243 - DNA, 15 bp, Homo sapiens
tgaagtacccacagg

SEQ ID NO: 317244 - DNA, 15 bp, Homo sapiens
ctgaagtacccacag

SEQ ID NO: 317245 - DNA, 15 bp, Homo sapiens
actgaagtacccaca

SEQ ID NO: 317246 - DNA, 15 bp, Homo sapiens
cactgaagtacccac

SEQ ID NO: 317247 - DNA, 15 bp, Homo sapiens
tcactgaagtaccca

SEQ ID NO: 317248 - DNA, 15 bp, Homo sapiens
gtcactgaagtaccc

SEQ ID NO: 317249 - DNA, 15 bp, Homo sapiens
ggtcactgaagtacc

SEQ ID NO: 317250 - DNA, 15 bp, Homo sapiens
tggtcactgaagtac

SEQ ID NO: 317251 - DNA, 15 bp, Homo sapiens
ctggtcactgaagta

SEQ ID NO: 317252 - DNA, 15 bp, Homo sapiens
cctggtcactgaagt

SEQ ID NO: 317253 - DNA, 15 bp, Homo sapiens
ccctggtcactgaag

SEQ ID NO: 317254 - DNA, 15 bp, Homo sapiens
tccctggtcactgaa

SEQ ID NO: 317255 - DNA, 15 bp, Homo sapiens
gtccctggtcactga

SEQ ID NO: 317256 - DNA, 15 bp, Homo sapiens
ggtccctggtcactg

SEQ ID NO: 317257 - DNA, 15 bp, Homo sapiens
tggtccctggtcact

SEQ ID NO: 317258 - DNA, 15 bp, Homo sapiens
gtggtccctggtcac

SEQ ID NO: 317259 - DNA, 15 bp, Homo sapiens
ggtggtccctggtca

SEQ ID NO: 317260 - DNA, 15 bp, Homo sapiens
tggtggtccctggtc

SEQ ID NO: 317261 - DNA, 15 bp, Homo sapiens
atggtggtccctggt

SEQ ID NO: 317262 - DNA, 15 bp, Homo sapiens
gatggtggtccctgg

SEQ ID NO: 317263 - DNA, 15 bp, Homo sapiens
agatggtggtccctg

SEQ ID NO: 317264 - DNA, 15 bp, Homo sapiens
cagatggtggtccct

SEQ ID NO: 317265 - DNA, 15 bp, Homo sapiens
acagatggtggtccc

SEQ ID NO: 317266 - DNA, 15 bp, Homo sapiens
gacagatggtggtcc

SEQ ID NO: 317267 - DNA, 15 bp, Homo sapiens
ggacagatggtggtc

SEQ ID NO: 317268 - DNA, 15 bp, Homo sapiens
gggacagatggtggt

SEQ ID NO: 317269 - DNA, 15 bp, Homo sapiens
ggggacagatggtgg

SEQ ID NO: 317270 - DNA, 15 bp, Homo sapiens
aggggacagatggtg

SEQ ID NO: 317271 - DNA, 15 bp, Homo sapiens
caggggacagatggt

SEQ ID NO: 317272 - DNA, 15 bp, Homo sapiens
acaggggacagatgg

SEQ ID NO: 317273 - DNA, 15 bp, Homo sapiens
cacaggggacagatg

SEQ ID NO: 317274 - DNA, 15 bp, Homo sapiens
ccacaggggacagat

SEQ ID NO: 317275 - DNA, 15 bp, Homo sapiens
cccacaggggacaga

SEQ ID NO: 317276 - DNA, 15 bp, Homo sapiens
acccacaggggacag

SEQ ID NO: 317277 - DNA, 15 bp, Homo sapiens
gacccacaggggaca

SEQ ID NO: 317278 - DNA, 15 bp, Homo sapiens
ggacccacaggggac

SEQ ID NO: 317279 - DNA, 15 bp, Homo sapiens
tggacccacagggga

SEQ ID NO: 317280 - DNA, 15 bp, Homo sapiens
ctggacccacagggg

SEQ ID NO: 317281 - DNA, 15 bp, Homo sapiens
tctggacccacaggg

SEQ ID NO: 317282 - DNA, 15 bp, Homo sapiens
gtctggacccacagg

SEQ ID NO: 317283 - DNA, 15 bp, Homo sapiens
tgtctggacccacag

SEQ ID NO: 317284 - DNA, 15 bp, Homo sapiens
atgtctggacccaca

SEQ ID NO: 317285 - DNA, 15 bp, Homo sapiens
gatgtctggacccac

SEQ ID NO: 317286 - DNA, 15 bp, Homo sapiens
tgatgtctggaccca

SEQ ID NO: 317287 - DNA, 15 bp, Homo sapiens
ctgatgtctggaccc

SEQ ID NO: 317288 - DNA, 15 bp, Homo sapiens
cctgatgtctggacc

SEQ ID NO: 317289 - DNA, 15 bp, Homo sapiens
gcctgatgtctggac

SEQ ID NO: 317290 - DNA, 15 bp, Homo sapiens
tgcctgatgtctgga

SEQ ID NO: 317291 - DNA, 15 bp, Homo sapiens
ctgcctgatgtctgg

SEQ ID NO: 317292 - DNA, 15 bp, Homo sapiens
cctgcctgatgtctg

SEQ ID NO: 317293 - DNA, 15 bp, Homo sapiens
tcctgcctgatgtct

SEQ ID NO: 317294 - DNA, 15 bp, Homo sapiens
ctcctgcctgatgtc

SEQ ID NO: 317295 - DNA, 15 bp, Homo sapiens
cctcctgcctgatgt

SEQ ID NO: 317296 - DNA, 15 bp, Homo sapiens
tcctcctgcctgatg

SEQ ID NO: 317297 - DNA, 15 bp, Homo sapiens
ttcctcctgcctgat

SEQ ID NO: 317298 - DNA, 15 bp, Homo sapiens
tttcctcctgcctga

SEQ ID NO: 317299 - DNA, 15 bp, Homo sapiens
ttttcctcctgcctg

SEQ ID NO: 317300 - DNA, 15 bp, Homo sapiens
cttttcctcctgcct

SEQ ID NO: 317301 - DNA, 15 bp, Homo sapiens
acttttcctcctgcc

SEQ ID NO: 317302 - DNA, 15 bp, Homo sapiens
aacttttcctcctgc

SEQ ID NO: 317303 - DNA, 15 bp, Homo sapiens
caacttttcctcctg

SEQ ID NO: 317304 - DNA, 15 bp, Homo sapiens
ccaacttttcctcct

SEQ ID NO: 317305 - DNA, 15 bp, Homo sapiens
cccaacttttcctcc

SEQ ID NO: 317306 - DNA, 15 bp, Homo sapiens
ccccaacttttcctc

SEQ ID NO: 317307 - DNA, 15 bp, Homo sapiens
gccccaacttttcct

SEQ ID NO: 317308 - DNA, 15 bp, Homo sapiens
ggccccaacttttcc

SEQ ID NO: 317309 - DNA, 15 bp, Homo sapiens
tggccccaacttttc

SEQ ID NO: 317310 - DNA, 15 bp, Homo sapiens
atggccccaactttt

SEQ ID NO: 317311 - DNA, 15 bp, Homo sapiens
catggccccaacttt

SEQ ID NO: 317312 - DNA, 15 bp, Homo sapiens
acatggccccaactt

SEQ ID NO: 317313 - DNA, 15 bp, Homo sapiens
cacatggccccaact

SEQ ID NO: 317314 - DNA, 15 bp, Homo sapiens
acacatggccccaac

SEQ ID NO: 317315 - DNA, 15 bp, Homo sapiens
gacacatggccccaa

SEQ ID NO: 317316 - DNA, 15 bp, Homo sapiens
tgacacatggcccca

SEQ ID NO: 317317 - DNA, 15 bp, Homo sapiens
ctgacacatggcccc

SEQ ID NO: 317318 - DNA, 15 bp, Homo sapiens
gctgacacatggccc

SEQ ID NO: 317319 - DNA, 15 bp, Homo sapiens
cgctgacacatggcc

SEQ ID NO: 317320 - DNA, 15 bp, Homo sapiens
acgctgacacatggc

SEQ ID NO: 317321 - DNA, 15 bp, Homo sapiens
gacgctgacacatgg

SEQ ID NO: 317322 - DNA, 15 bp, Homo sapiens
ggacgctgacacatg

SEQ ID NO: 317323 - DNA, 15 bp, Homo sapiens
gggacgctgacacat

SEQ ID NO: 317324 - DNA, 15 bp, Homo sapiens
tgggacgctgacaca

SEQ ID NO: 317325 - DNA, 15 bp, Homo sapiens
ctgggacgctgacac

SEQ ID NO: 317326 - DNA, 15 bp, Homo sapiens
gctgggacgctgaca

SEQ ID NO: 317327 - DNA, 15 bp, Homo sapiens
agctgggacgctgac

SEQ ID NO: 317328 - DNA, 15 bp, Homo sapiens
cagctgggacgctga

SEQ ID NO: 317329 - DNA, 15 bp, Homo sapiens
ccagctgggacgctg

SEQ ID NO: 317330 - DNA, 15 bp, Homo sapiens
cccagctgggacgct

SEQ ID NO: 317331 - DNA, 15 bp, Homo sapiens
ccccagctgggacgc

SEQ ID NO: 317332 - DNA, 15 bp, Homo sapiens
gccccagctgggacg

SEQ ID NO: 317333 - DNA, 15 bp, Homo sapiens
agccccagctgggac

SEQ ID NO: 317334 - DNA, 15 bp, Homo sapiens
gagccccagctggga

SEQ ID NO: 317335 - DNA, 15 bp, Homo sapiens
tgagccccagctggg

SEQ ID NO: 317336 - DNA, 15 bp, Homo sapiens
gtgagccccagctgg

SEQ ID NO: 317337 - DNA, 15 bp, Homo sapiens
ggtgagccccagctg

SEQ ID NO: 317338 - DNA, 15 bp, Homo sapiens
tggtgagccccagct

SEQ ID NO: 317339 - DNA, 15 bp, Homo sapiens
atggtgagccccagc

SEQ ID NO: 317340 - DNA, 15 bp, Homo sapiens
catggtgagccccag

SEQ ID NO: 317341 - DNA, 15 bp, Homo sapiens
ccatggtgagcccca

SEQ ID NO: 317342 - DNA, 15 bp, Homo sapiens
cccatggtgagcccc

SEQ ID NO: 317343 - DNA, 15 bp, Homo sapiens
tcccatggtgagccc

SEQ ID NO: 317344 - DNA, 15 bp, Homo sapiens
ttcccatggtgagcc

SEQ ID NO: 317345 - DNA, 15 bp, Homo sapiens
cttcccatggtgagc

SEQ ID NO: 317346 - DNA, 15 bp, Homo sapiens
acttcccatggtgag

SEQ ID NO: 317347 - DNA, 15 bp, Homo sapiens
cacttcccatggtga

SEQ ID NO: 317348 - DNA, 15 bp, Homo sapiens
ccacttcccatggtg

SEQ ID NO: 317349 - DNA, 15 bp, Homo sapiens
cccacttcccatggt

SEQ ID NO: 317350 - DNA, 15 bp, Homo sapiens
tcccacttcccatgg

SEQ ID NO: 317351 - DNA, 15 bp, Homo sapiens
atcccacttcccatg

SEQ ID NO: 317352 - DNA, 15 bp, Homo sapiens
tatcccacttcccat

SEQ ID NO: 317353 - DNA, 15 bp, Homo sapiens
ttatcccacttccca

SEQ ID NO: 317354 - DNA, 15 bp, Homo sapiens
cttatcccacttccc

SEQ ID NO: 317355 - DNA, 15 bp, Homo sapiens
ccttatcccacttcc

SEQ ID NO: 317356 - DNA, 15 bp, Homo sapiens
cccttatcccacttc

SEQ ID NO: 317357 - DNA, 15 bp, Homo sapiens
tcccttatcccactt

SEQ ID NO: 317358 - DNA, 15 bp, Homo sapiens
ctcccttatcccact

SEQ ID NO: 317359 - DNA, 15 bp, Homo sapiens
cctcccttatcccac

SEQ ID NO: 317360 - DNA, 15 bp, Homo sapiens
tcctcccttatccca

SEQ ID NO: 317361 - DNA, 15 bp, Homo sapiens
atcctcccttatccc

SEQ ID NO: 317362 - DNA, 15 bp, Homo sapiens
aatcctcccttatcc

SEQ ID NO: 317363 - DNA, 15 bp, Homo sapiens
taatcctcccttatc

SEQ ID NO: 317364 - DNA, 15 bp, Homo sapiens
ataatcctcccttat

SEQ ID NO: 317365 - DNA, 15 bp, Homo sapiens
aataatcctccctta

SEQ ID NO: 317366 - DNA, 15 bp, Homo sapiens
gaataatcctccctt

SEQ ID NO: 317367 - DNA, 15 bp, Homo sapiens
ggaataatcctccct

SEQ ID NO: 317368 - DNA, 15 bp, Homo sapiens
tggaataatcctccc

SEQ ID NO: 317369 - DNA, 15 bp, Homo sapiens
ctggaataatcctcc

SEQ ID NO: 317370 - DNA, 15 bp, Homo sapiens
actggaataatcctc

SEQ ID NO: 317371 - DNA, 15 bp, Homo sapiens
aactggaataatcct

SEQ ID NO: 317372 - DNA, 15 bp, Homo sapiens
gaactggaataatcc

SEQ ID NO: 317373 - DNA, 15 bp, Homo sapiens
agaactggaataatc

SEQ ID NO: 317374 - DNA, 15 bp, Homo sapiens
gagaactggaataat

SEQ ID NO: 317375 - DNA, 15 bp, Homo sapiens
agagaactggaataa

SEQ ID NO: 317376 - DNA, 15 bp, Homo sapiens
aagagaactggaata

SEQ ID NO: 317377 - DNA, 15 bp, Homo sapiens
gaagagaactggaat

SEQ ID NO: 317378 - DNA, 15 bp, Homo sapiens
agaagagaactggaa

SEQ ID NO: 317379 - DNA, 15 bp, Homo sapiens
aagaagagaactgga

SEQ ID NO: 317380 - DNA, 15 bp, Homo sapiens
aaagaagagaactgg

SEQ ID NO: 317381 - DNA, 15 bp, Homo sapiens
caaagaagagaactg

SEQ ID NO: 317382 - DNA, 15 bp, Homo sapiens
tcaaagaagagaact

SEQ ID NO: 317383 - DNA, 15 bp, Homo sapiens
ctcaaagaagagaac

SEQ ID NO: 317384 - DNA, 15 bp, Homo sapiens
actcaaagaagagaa

SEQ ID NO: 317385 - DNA, 15 bp, Homo sapiens
aactcaaagaagaga

SEQ ID NO: 317386 - DNA, 15 bp, Homo sapiens
gaactcaaagaagag

SEQ ID NO: 317387 - DNA, 15 bp, Homo sapiens
tgaactcaaagaaga

SEQ ID NO: 317388 - DNA, 15 bp, Homo sapiens
ctgaactcaaagaag

SEQ ID NO: 317389 - DNA, 15 bp, Homo sapiens
cctgaactcaaagaa

SEQ ID NO: 317390 - DNA, 15 bp, Homo sapiens
acctgaactcaaaga

SEQ ID NO: 317391 - DNA, 15 bp, Homo sapiens
aacctgaactcaaag

SEQ ID NO: 317392 - DNA, 15 bp, Homo sapiens
aaacctgaactcaaa

SEQ ID NO: 317393 - DNA, 15 bp, Homo sapiens
aaaacctgaactcaa

SEQ ID NO: 317394 - DNA, 15 bp, Homo sapiens
aaaaacctgaactca

SEQ ID NO: 317395 - DNA, 15 bp, Homo sapiens
taaaaacctgaactc

SEQ ID NO: 317396 - DNA, 15 bp, Homo sapiens
ataaaaacctgaact

SEQ ID NO: 317397 - DNA, 15 bp, Homo sapiens
gataaaaacctgaac

SEQ ID NO: 317398 - DNA, 15 bp, Homo sapiens
agataaaaacctgaa

SEQ ID NO: 317399 - DNA, 15 bp, Homo sapiens
tagataaaaacctga

SEQ ID NO: 317400 - DNA, 15 bp, Homo sapiens
gtagataaaaacctg

SEQ ID NO: 317401 - DNA, 15 bp, Homo sapiens
cgtagataaaaacct

SEQ ID NO: 317402 - DNA, 15 bp, Homo sapiens
ccgtagataaaaacc

SEQ ID NO: 317403 - DNA, 15 bp, Homo sapiens
cccgtagataaaaac

SEQ ID NO: 317404 - DNA, 15 bp, Homo sapiens
tcccgtagataaaaa

SEQ ID NO: 317405 - DNA, 15 bp, Homo sapiens
ttcccgtagataaaa

SEQ ID NO: 317406 - DNA, 15 bp, Homo sapiens
cttcccgtagataaa

SEQ ID NO: 317407 - DNA, 15 bp, Homo sapiens
tcttcccgtagataa

SEQ ID NO: 317408 - DNA, 15 bp, Homo sapiens
ttcttcccgtagata

SEQ ID NO: 317409 - DNA, 15 bp, Homo sapiens
cttcttcccgtagat

SEQ ID NO: 317410 - DNA, 15 bp, Homo sapiens
tcttcttcccgtaga

SEQ ID NO: 317411 - DNA, 15 bp, Homo sapiens
ctcttcttcccgtag

SEQ ID NO: 317412 - DNA, 15 bp, Homo sapiens
cctcttcttcccgta

SEQ ID NO: 317413 - DNA, 15 bp, Homo sapiens
ccctcttcttcccgt

SEQ ID NO: 317414 - DNA, 15 bp, Homo sapiens
tccctcttcttcccg

SEQ ID NO: 317415 - DNA, 15 bp, Homo sapiens
ctccctcttcttccc

SEQ ID NO: 317416 - DNA, 15 bp, Homo sapiens
tctccctcttcttcc

SEQ ID NO: 317417 - DNA, 15 bp, Homo sapiens
atctccctcttcttc

SEQ ID NO: 317418 - DNA, 15 bp, Homo sapiens
aatctccctcttctt

SEQ ID NO: 317419 - DNA, 15 bp, Homo sapiens
caatctccctcttct

SEQ ID NO: 317420 - DNA, 15 bp, Homo sapiens
ccaatctccctcttc

SEQ ID NO: 317421 - DNA, 15 bp, Homo sapiens
tccaatctccctctt

SEQ ID NO: 317422 - DNA, 15 bp, Homo sapiens
gtccaatctccctct

SEQ ID NO: 317423 - DNA, 15 bp, Homo sapiens
cgtccaatctccctc

SEQ ID NO: 317424 - DNA, 15 bp, Homo sapiens
tcgtccaatctccct

SEQ ID NO: 317425 - DNA, 15 bp, Homo sapiens
ctcgtccaatctccc

SEQ ID NO: 317426 - DNA, 15 bp, Homo sapiens
cctcgtccaatctcc

SEQ ID NO: 317427 - DNA, 15 bp, Homo sapiens
acctcgtccaatctc

SEQ ID NO: 317428 - DNA, 15 bp, Homo sapiens
aacctcgtccaatct

SEQ ID NO: 317429 - DNA, 15 bp, Homo sapiens
taacctcgtccaatc

SEQ ID NO: 317430 - DNA, 15 bp, Homo sapiens
ctaacctcgtccaat

SEQ ID NO: 317431 - DNA, 15 bp, Homo sapiens
tctaacctcgtccaa

SEQ ID NO: 317432 - DNA, 15 bp, Homo sapiens
atctaacctcgtcca

SEQ ID NO: 317433 - DNA, 15 bp, Homo sapiens
aatctaacctcgtcc

SEQ ID NO: 317434 - DNA, 15 bp, Homo sapiens
gaatctaacctcgtc

SEQ ID NO: 317435 - DNA, 15 bp, Homo sapiens
tgaatctaacctcgt

SEQ ID NO: 317436 - DNA, 15 bp, Homo sapiens
gtgaatctaacctcg

SEQ ID NO: 317437 - DNA, 15 bp, Homo sapiens
agtgaatctaacctc

SEQ ID NO: 317438 - DNA, 15 bp, Homo sapiens
aagtgaatctaacct

SEQ ID NO: 317439 - DNA, 15 bp, Homo sapiens
caagtgaatctaacc

SEQ ID NO: 317440 - DNA, 15 bp, Homo sapiens
acaagtgaatctaac

SEQ ID NO: 317441 - DNA, 15 bp, Homo sapiens
gacaagtgaatctaa

SEQ ID NO: 317442 - DNA, 15 bp, Homo sapiens
agacaagtgaatcta

SEQ ID NO: 317443 - DNA, 15 bp, Homo sapiens
gagacaagtgaatct

SEQ ID NO: 317444 - DNA, 15 bp, Homo sapiens
ggagacaagtgaatc

SEQ ID NO: 317445 - DNA, 15 bp, Homo sapiens
tggagacaagtgaat

SEQ ID NO: 317446 - DNA, 15 bp, Homo sapiens
ttggagacaagtgaa

SEQ ID NO: 317447 - DNA, 15 bp, Homo sapiens
attggagacaagtga

SEQ ID NO: 317448 - DNA, 15 bp, Homo sapiens
cattggagacaagtg

SEQ ID NO: 317449 - DNA, 15 bp, Homo sapiens
acattggagacaagt

SEQ ID NO: 317450 - DNA, 15 bp, Homo sapiens
gacattggagacaag

SEQ ID NO: 317451 - DNA, 15 bp, Homo sapiens
ggacattggagacaa

SEQ ID NO: 317452 - DNA, 15 bp, Homo sapiens
aggacattggagaca

SEQ ID NO: 317453 - DNA, 15 bp, Homo sapiens
caggacattggagac

SEQ ID NO: 317454 - DNA, 15 bp, Homo sapiens
gcaggacattggaga

SEQ ID NO: 317455 - DNA, 15 bp, Homo sapiens
tgcaggacattggag

SEQ ID NO: 317456 - DNA, 15 bp, Homo sapiens
atgcaggacattgga

SEQ ID NO: 317457 - DNA, 15 bp, Homo sapiens
catgcaggacattgg

SEQ ID NO: 317458 - DNA, 15 bp, Homo sapiens
ccatgcaggacattg

SEQ ID NO: 317459 - DNA, 15 bp, Homo sapiens
cccatgcaggacatt

SEQ ID NO: 317460 - DNA, 15 bp, Homo sapiens
ccccatgcaggacat

SEQ ID NO: 317461 - DNA, 15 bp, Homo sapiens
accccatgcaggaca

SEQ ID NO: 317462 - DNA, 15 bp, Homo sapiens
aaccccatgcaggac

SEQ ID NO: 317463 - DNA, 15 bp, Homo sapiens
gaaccccatgcagga

SEQ ID NO: 317464 - DNA, 15 bp, Homo sapiens
agaaccccatgcagg

SEQ ID NO: 317465 - DNA, 15 bp, Homo sapiens
cagaaccccatgcag

SEQ ID NO: 317466 - DNA, 15 bp, Homo sapiens
ccagaaccccatgca

SEQ ID NO: 317467 - DNA, 15 bp, Homo sapiens
cccagaaccccatgc

SEQ ID NO: 317468 - DNA, 15 bp, Homo sapiens
tcccagaaccccatg

SEQ ID NO: 317469 - DNA, 15 bp, Homo sapiens
gtcccagaaccccat

SEQ ID NO: 317470 - DNA, 15 bp, Homo sapiens
tgtcccagaacccca

SEQ ID NO: 317471 - DNA, 15 bp, Homo sapiens
ctgtcccagaacccc

SEQ ID NO: 317472 - DNA, 15 bp, Homo sapiens
tctgtcccagaaccc

SEQ ID NO: 317473 - DNA, 15 bp, Homo sapiens
gtctgtcccagaacc

SEQ ID NO: 317474 - DNA, 15 bp, Homo sapiens
tgtctgtcccagaac

SEQ ID NO: 317475 - DNA, 15 bp, Homo sapiens
ttgtctgtcccagaa

SEQ ID NO: 317476 - DNA, 15 bp, Homo sapiens
attgtctgtcccaga

SEQ ID NO: 317477 - DNA, 15 bp, Homo sapiens
cattgtctgtcccag

SEQ ID NO: 317478 - DNA, 15 bp, Homo sapiens
gcattgtctgtccca

SEQ ID NO: 317479 - DNA, 15 bp, Homo sapiens
ggcattgtctgtccc

SEQ ID NO: 317480 - DNA, 15 bp, Homo sapiens
aggcattgtctgtcc

SEQ ID NO: 317481 - DNA, 15 bp, Homo sapiens
gaggcattgtctgtc

SEQ ID NO: 317482 - DNA, 15 bp, Homo sapiens
tgaggcattgtctgt

SEQ ID NO: 317483 - DNA, 15 bp, Homo sapiens
ctgaggcattgtctg

SEQ ID NO: 317484 - DNA, 15 bp, Homo sapiens
tctgaggcattgtct

SEQ ID NO: 317485 - DNA, 15 bp, Homo sapiens
ttctgaggcattgtc

SEQ ID NO: 317486 - DNA, 15 bp, Homo sapiens
tttctgaggcattgt

SEQ ID NO: 317487 - DNA, 15 bp, Homo sapiens
atttctgaggcattg

SEQ ID NO: 317488 - DNA, 15 bp, Homo sapiens
catttctgaggcatt

SEQ ID NO: 317489 - DNA, 15 bp, Homo sapiens
ccatttctgaggcat

SEQ ID NO: 317490 - DNA, 15 bp, Homo sapiens
cccatttctgaggca

SEQ ID NO: 317491 - DNA, 15 bp, Homo sapiens
tcccatttctgaggc

SEQ ID NO: 317492 - DNA, 15 bp, Homo sapiens
ctcccatttctgagg

SEQ ID NO: 317493 - DNA, 15 bp, Homo sapiens
cctcccatttctgag

SEQ ID NO: 317494 - DNA, 15 bp, Homo sapiens
acctcccatttctga

SEQ ID NO: 317495 - DNA, 15 bp, Homo sapiens
gacctcccatttctg

SEQ ID NO: 317496 - DNA, 15 bp, Homo sapiens
ggacctcccatttct

SEQ ID NO: 317497 - DNA, 15 bp, Homo sapiens
tggacctcccatttc

SEQ ID NO: 317498 - DNA, 15 bp, Homo sapiens
ttggacctcccattt

SEQ ID NO: 317499 - DNA, 15 bp, Homo sapiens
cttggacctcccatt

SEQ ID NO: 317500 - DNA, 15 bp, Homo sapiens
tcttggacctcccat

SEQ ID NO: 317501 - DNA, 15 bp, Homo sapiens
ctcttggacctccca

SEQ ID NO: 317502 - DNA, 15 bp, Homo sapiens
cctcttggacctccc

SEQ ID NO: 317503 - DNA, 15 bp, Homo sapiens
tcctcttggacctcc

SEQ ID NO: 317504 - DNA, 15 bp, Homo sapiens
atcctcttggacctc

SEQ ID NO: 317505 - DNA, 15 bp, Homo sapiens
catcctcttggacct

SEQ ID NO: 317506 - DNA, 15 bp, Homo sapiens
ccatcctcttggacc

SEQ ID NO: 317507 - DNA, 15 bp, Homo sapiens
accatcctcttggac

SEQ ID NO: 317508 - DNA, 15 bp, Homo sapiens
caccatcctcttgga

SEQ ID NO: 317509 - DNA, 15 bp, Homo sapiens
tcaccatcctcttgg

SEQ ID NO: 317510 - DNA, 15 bp, Homo sapiens
gtcaccatcctcttg

SEQ ID NO: 317511 - DNA, 15 bp, Homo sapiens
agtcaccatcctctt

SEQ ID NO: 317512 - DNA, 15 bp, Homo sapiens
aagtcaccatcctct

SEQ ID NO: 317513 - DNA, 15 bp, Homo sapiens
aaagtcaccatcctc

SEQ ID NO: 317514 - DNA, 15 bp, Homo sapiens
gaaagtcaccatcct

SEQ ID NO: 317515 - DNA, 15 bp, Homo sapiens
tgaaagtcaccatcc

SEQ ID NO: 317516 - DNA, 15 bp, Homo sapiens
gtgaaagtcaccatc

SEQ ID NO: 317517 - DNA, 15 bp, Homo sapiens
agtgaaagtcaccat

SEQ ID NO: 317518 - DNA, 15 bp, Homo sapiens
cagtgaaagtcacca

SEQ ID NO: 317519 - DNA, 15 bp, Homo sapiens
gcagtgaaagtcacc

SEQ ID NO: 317520 - DNA, 15 bp, Homo sapiens
agcagtgaaagtcac

SEQ ID NO: 317521 - DNA, 15 bp, Homo sapiens
tagcagtgaaagtca

SEQ ID NO: 317522 - DNA, 15 bp, Homo sapiens
ctagcagtgaaagtc

SEQ ID NO: 317523 - DNA, 15 bp, Homo sapiens
gctagcagtgaaagt

SEQ ID NO: 317524 - DNA, 15 bp, Homo sapiens
agctagcagtgaaag

SEQ ID NO: 317525 - DNA, 15 bp, Homo sapiens
cagctagcagtgaaa

SEQ ID NO: 317526 - DNA, 15 bp, Homo sapiens
tcagctagcagtgaa

SEQ ID NO: 317527 - DNA, 15 bp, Homo sapiens
atcagctagcagtga

SEQ ID NO: 317528 - DNA, 15 bp, Homo sapiens
catcagctagcagtg

SEQ ID NO: 317529 - DNA, 15 bp, Homo sapiens
tcatcagctagcagt

SEQ ID NO: 317530 - DNA, 15 bp, Homo sapiens
atcatcagctagcag

SEQ ID NO: 317531 - DNA, 15 bp, Homo sapiens
catcatcagctagca

SEQ ID NO: 317532 - DNA, 15 bp, Homo sapiens
tcatcatcagctagc

SEQ ID NO: 317533 - DNA, 15 bp, Homo sapiens
ttcatcatcagctag

SEQ ID NO: 317534 - DNA, 15 bp, Homo sapiens
tttcatcatcagcta

SEQ ID NO: 317535 - DNA, 15 bp, Homo sapiens
ctttcatcatcagct

SEQ ID NO: 317536 - DNA, 15 bp, Homo sapiens
cctttcatcatcagc

SEQ ID NO: 317537 - DNA, 15 bp, Homo sapiens
ccctttcatcatcag

SEQ ID NO: 317538 - DNA, 15 bp, Homo sapiens
tccctttcatcatca

SEQ ID NO: 317539 - DNA, 15 bp, Homo sapiens
ttccctttcatcatc

SEQ ID NO: 317540 - DNA, 15 bp, Homo sapiens
tttccctttcatcat

SEQ ID NO: 317541 - DNA, 15 bp, Homo sapiens
ctttccctttcatca

SEQ ID NO: 317542 - DNA, 15 bp, Homo sapiens
cctttccctttcatc

SEQ ID NO: 317543 - DNA, 15 bp, Homo sapiens
ccctttccctttcat

SEQ ID NO: 317544 - DNA, 15 bp, Homo sapiens
tccctttccctttca

SEQ ID NO: 317545 - DNA, 15 bp, Homo sapiens
atccctttccctttc

SEQ ID NO: 317546 - DNA, 15 bp, Homo sapiens
catccctttcccttt

SEQ ID NO: 317547 - DNA, 15 bp, Homo sapiens
tcatccctttccctt

SEQ ID NO: 317548 - DNA, 15 bp, Homo sapiens
ctcatccctttccct

SEQ ID NO: 317549 - DNA, 15 bp, Homo sapiens
cctcatccctttccc

SEQ ID NO: 317550 - DNA, 15 bp, Homo sapiens
ccctcatccctttcc

SEQ ID NO: 317551 - DNA, 15 bp, Homo sapiens
tccctcatccctttc

SEQ ID NO: 317552 - DNA, 15 bp, Homo sapiens
ttccctcatcccttt

SEQ ID NO: 317553 - DNA, 15 bp, Homo sapiens
cttccctcatccctt

SEQ ID NO: 317554 - DNA, 15 bp, Homo sapiens
tcttccctcatccct

SEQ ID NO: 317555 - DNA, 15 bp, Homo sapiens
ttcttccctcatccc

SEQ ID NO: 317556 - DNA, 15 bp, Homo sapiens
attcttccctcatcc

SEQ ID NO: 317557 - DNA, 15 bp, Homo sapiens
cattcttccctcatc

SEQ ID NO: 317558 - DNA, 15 bp, Homo sapiens
ccattcttccctcat

SEQ ID NO: 317559 - DNA, 15 bp, Homo sapiens
cccattcttccctca

SEQ ID NO: 317560 - DNA, 15 bp, Homo sapiens
gcccattcttccctc

SEQ ID NO: 317561 - DNA, 15 bp, Homo sapiens
agcccattcttccct

SEQ ID NO: 317562 - DNA, 15 bp, Homo sapiens
cagcccattcttccc

SEQ ID NO: 317563 - DNA, 15 bp, Homo sapiens
tcagcccattcttcc

SEQ ID NO: 317564 - DNA, 15 bp, Homo sapiens
ttcagcccattcttc

SEQ ID NO: 317565 - DNA, 15 bp, Homo sapiens
attcagcccattctt

SEQ ID NO: 317566 - DNA, 15 bp, Homo sapiens
aattcagcccattct

SEQ ID NO: 317567 - DNA, 15 bp, Homo sapiens
taattcagcccattc

SEQ ID NO: 317568 - DNA, 15 bp, Homo sapiens
ctaattcagcccatt

SEQ ID NO: 317569 - DNA, 15 bp, Homo sapiens
tctaattcagcccat

SEQ ID NO: 317570 - DNA, 15 bp, Homo sapiens
ctctaattcagccca

SEQ ID NO: 317571 - DNA, 15 bp, Homo sapiens
cctctaattcagccc

SEQ ID NO: 317572 - DNA, 15 bp, Homo sapiens
gcctctaattcagcc

SEQ ID NO: 317573 - DNA, 15 bp, Homo sapiens
agcctctaattcagc

SEQ ID NO: 317574 - DNA, 15 bp, Homo sapiens
tagcctctaattcag

SEQ ID NO: 317575 - DNA, 15 bp, Homo sapiens
atagcctctaattca

SEQ ID NO: 317576 - DNA, 15 bp, Homo sapiens
aatagcctctaattc

SEQ ID NO: 317577 - DNA, 15 bp, Homo sapiens
gaatagcctctaatt

SEQ ID NO: 317578 - DNA, 15 bp, Homo sapiens
ggaatagcctctaat

SEQ ID NO: 317579 - DNA, 15 bp, Homo sapiens
tggaatagcctctaa

SEQ ID NO: 317580 - DNA, 15 bp, Homo sapiens
gtggaatagcctcta

SEQ ID NO: 317581 - DNA, 15 bp, Homo sapiens
ggtggaatagcctct

SEQ ID NO: 317582 - DNA, 15 bp, Homo sapiens
gggtggaatagcctc

SEQ ID NO: 317583 - DNA, 15 bp, Homo sapiens
ggggtggaatagcct

SEQ ID NO: 317584 - DNA, 15 bp, Homo sapiens
aggggtggaatagcc

SEQ ID NO: 317585 - DNA, 15 bp, Homo sapiens
gaggggtggaatagc

SEQ ID NO: 317586 - DNA, 15 bp, Homo sapiens
agaggggtggaatag

SEQ ID NO: 317587 - DNA, 15 bp, Homo sapiens
cagaggggtggaata

SEQ ID NO: 317588 - DNA, 15 bp, Homo sapiens
tcagaggggtggaat

SEQ ID NO: 317589 - DNA, 15 bp, Homo sapiens
atcagaggggtggaa

SEQ ID NO: 317590 - DNA, 15 bp, Homo sapiens
catcagaggggtgga

SEQ ID NO: 317591 - DNA, 15 bp, Homo sapiens
ccatcagaggggtgg

SEQ ID NO: 317592 - DNA, 15 bp, Homo sapiens
accatcagaggggtg

SEQ ID NO: 317593 - DNA, 15 bp, Homo sapiens
aaccatcagaggggt

SEQ ID NO: 317594 - DNA, 15 bp, Homo sapiens
taaccatcagagggg

SEQ ID NO: 317595 - DNA, 15 bp, Homo sapiens
ctaaccatcagaggg

SEQ ID NO: 317596 - DNA, 15 bp, Homo sapiens
gctaaccatcagagg

SEQ ID NO: 317597 - DNA, 15 bp, Homo sapiens
agctaaccatcagag

SEQ ID NO: 317598 - DNA, 15 bp, Homo sapiens
aagctaaccatcaga

SEQ ID NO: 317599 - DNA, 15 bp, Homo sapiens
aaagctaaccatcag

SEQ ID NO: 317600 - DNA, 15 bp, Homo sapiens
gaaagctaaccatca

SEQ ID NO: 317601 - DNA, 15 bp, Homo sapiens
tgaaagctaaccatc

SEQ ID NO: 317602 - DNA, 15 bp, Homo sapiens
ctgaaagctaaccat

SEQ ID NO: 317603 - DNA, 15 bp, Homo sapiens
cctgaaagctaacca

SEQ ID NO: 317604 - DNA, 15 bp, Homo sapiens
ccctgaaagctaacc

SEQ ID NO: 317605 - DNA, 15 bp, Homo sapiens
cccctgaaagctaac

SEQ ID NO: 317606 - DNA, 15 bp, Homo sapiens
ccccctgaaagctaa

SEQ ID NO: 317607 - DNA, 15 bp, Homo sapiens
tccccctgaaagcta

SEQ ID NO: 317608 - DNA, 15 bp, Homo sapiens
ttccccctgaaagct

SEQ ID NO: 317609 - DNA, 15 bp, Homo sapiens
cttccccctgaaagc

SEQ ID NO: 317610 - DNA, 15 bp, Homo sapiens
ccttccccctgaaag

SEQ ID NO: 317611 - DNA, 15 bp, Homo sapiens
cccttccccctgaaa

SEQ ID NO: 317612 - DNA, 15 bp, Homo sapiens
tcccttccccctgaa

SEQ ID NO: 317613 - DNA, 15 bp, Homo sapiens
ttcccttccccctga

SEQ ID NO: 317614 - DNA, 15 bp, Homo sapiens
cttcccttccccctg

SEQ ID NO: 317615 - DNA, 15 bp, Homo sapiens
ccttcccttccccct

SEQ ID NO: 317616 - DNA, 15 bp, Homo sapiens
tccttcccttccccc

SEQ ID NO: 317617 - DNA, 15 bp, Homo sapiens
ctccttcccttcccc

SEQ ID NO: 317618 - DNA, 15 bp, Homo sapiens
cctccttcccttccc

SEQ ID NO: 317619 - DNA, 15 bp, Homo sapiens
ccctccttcccttcc

SEQ ID NO: 317620 - DNA, 15 bp, Homo sapiens
cctccctccttccct

SEQ ID NO: 317621 - DNA, 15 bp, Homo sapiens
ccctccctccttccc

SEQ ID NO: 317622 - DNA, 15 bp, Homo sapiens
tccctccctccttcc

SEQ ID NO: 317623 - DNA, 15 bp, Homo sapiens
ctccctccctccttc

SEQ ID NO: 317624 - DNA, 15 bp, Homo sapiens
cctccctccctcctt

SEQ ID NO: 317625 - DNA, 15 bp, Homo sapiens
gcctccctccctcct

SEQ ID NO: 317626 - DNA, 15 bp, Homo sapiens
agcctccctccctcc

SEQ ID NO: 317627 - DNA, 15 bp, Homo sapiens
cagcctccctccctc

SEQ ID NO: 317628 - DNA, 15 bp, Homo sapiens
ccagcctccctccct

SEQ ID NO: 317629 - DNA, 15 bp, Homo sapiens
accagcctccctccc

SEQ ID NO: 317630 - DNA, 15 bp, Homo sapiens
caccagcctccctcc

SEQ ID NO: 317631 - DNA, 15 bp, Homo sapiens
ccaccagcctccctc

SEQ ID NO: 317632 - DNA, 15 bp, Homo sapiens
cccaccagcctccct

SEQ ID NO: 317633 - DNA, 15 bp, Homo sapiens
ccccaccagcctccc

SEQ ID NO: 317634 - DNA, 15 bp, Homo sapiens
accccaccagcctcc

SEQ ID NO: 317635 - DNA, 15 bp, Homo sapiens
caccccaccagcctc

SEQ ID NO: 317636 - DNA, 15 bp, Homo sapiens
ccaccccaccagcct

SEQ ID NO: 317637 - DNA, 15 bp, Homo sapiens
cccaccccaccagcc

SEQ ID NO: 317638 - DNA, 15 bp, Homo sapiens
tcccaccccaccagc

SEQ ID NO: 317639 - DNA, 15 bp, Homo sapiens
ctcccaccccaccag

SEQ ID NO: 317640 - DNA, 15 bp, Homo sapiens
tctcccaccccacca

SEQ ID NO: 317641 - DNA, 15 bp, Homo sapiens
gtctcccaccccacc

SEQ ID NO: 317642 - DNA, 15 bp, Homo sapiens
tgtctcccaccccac

SEQ ID NO: 317643 - DNA, 15 bp, Homo sapiens
ttgtctcccacccca

SEQ ID NO: 317644 - DNA, 15 bp, Homo sapiens
tttgtctcccacccc

SEQ ID NO: 317645 - DNA, 15 bp, Homo sapiens
ctttgtctcccaccc

SEQ ID NO: 317646 - DNA, 15 bp, Homo sapiens
tctttgtctcccacc

SEQ ID NO: 317647 - DNA, 15 bp, Homo sapiens
gtctttgtctcccac

SEQ ID NO: 317648 - DNA, 15 bp, Homo sapiens
cgtctttgtctccca

SEQ ID NO: 317649 - DNA, 15 bp, Homo sapiens
tcgtctttgtctccc

SEQ ID NO: 317650 - DNA, 15 bp, Homo sapiens
ttcgtctttgtctcc

SEQ ID NO: 317651 - DNA, 15 bp, Homo sapiens
attcgtctttgtctc

SEQ ID NO: 317652 - DNA, 15 bp, Homo sapiens
aattcgtctttgtct

SEQ ID NO: 317653 - DNA, 15 bp, Homo sapiens
caattcgtctttgtc

SEQ ID NO: 317654 - DNA, 15 bp, Homo sapiens
ccaattcgtctttgt

SEQ ID NO: 317655 - DNA, 15 bp, Homo sapiens
tccaattcgtctttg

SEQ ID NO: 317656 - DNA, 15 bp, Homo sapiens
ctccaattcgtcttt

SEQ ID NO: 317657 - DNA, 15 bp, Homo sapiens
tctccaattcgtctt

SEQ ID NO: 317658 - DNA, 15 bp, Homo sapiens
atctccaattcgtct

SEQ ID NO: 317659 - DNA, 15 bp, Homo sapiens
aatctccaattcgtc

SEQ ID NO: 317660 - DNA, 15 bp, Homo sapiens
taatctccaattcgt

SEQ ID NO: 317661 - DNA, 15 bp, Homo sapiens
ctaatctccaattcg

SEQ ID NO: 317662 - DNA, 15 bp, Homo sapiens
cctaatctccaattc

SEQ ID NO: 317663 - DNA, 15 bp, Homo sapiens
tcctaatctccaatt

SEQ ID NO: 317664 - DNA, 15 bp, Homo sapiens
ttcctaatctccaat

SEQ ID NO: 317665 - DNA, 15 bp, Homo sapiens
tttcctaatctccaa

SEQ ID NO: 317666 - DNA, 15 bp, Homo sapiens
ctttcctaatctcca

SEQ ID NO: 317667 - DNA, 15 bp, Homo sapiens
tctttcctaatctcc

SEQ ID NO: 317668 - DNA, 15 bp, Homo sapiens
atctttcctaatctc

SEQ ID NO: 317669 - DNA, 15 bp, Homo sapiens
aatctttcctaatct

SEQ ID NO: 317670 - DNA, 15 bp, Homo sapiens
gaatctttcctaatc

SEQ ID NO: 317671 - DNA, 15 bp, Homo sapiens
agaatctttcctaat

SEQ ID NO: 317672 - DNA, 15 bp, Homo sapiens
aagaatctttcctaa

SEQ ID NO: 317673 - DNA, 15 bp, Homo sapiens
aaagaatctttccta

SEQ ID NO: 317674 - DNA, 15 bp, Homo sapiens
caaagaatctttcct

SEQ ID NO: 317675 - DNA, 15 bp, Homo sapiens
ccaaagaatctttcc

SEQ ID NO: 317676 - DNA, 15 bp, Homo sapiens
tccaaagaatctttc

SEQ ID NO: 317677 - DNA, 15 bp, Homo sapiens
ttccaaagaatcttt

SEQ ID NO: 317678 - DNA, 15 bp, Homo sapiens
attccaaagaatctt

SEQ ID NO: 317679 - DNA, 15 bp, Homo sapiens
tattccaaagaatct

SEQ ID NO: 317680 - DNA, 15 bp, Homo sapiens
ctattccaaagaatc

SEQ ID NO: 317681 - DNA, 15 bp, Homo sapiens
actattccaaagaat

SEQ ID NO: 317682 - DNA, 15 bp, Homo sapiens
gactattccaaagaa

SEQ ID NO: 317683 - DNA, 15 bp, Homo sapiens
tgactattccaaaga

SEQ ID NO: 317684 - DNA, 15 bp, Homo sapiens
ttgactattccaaag

SEQ ID NO: 317685 - DNA, 15 bp, Homo sapiens
tttgactattccaaa

SEQ ID NO: 317686 - DNA, 15 bp, Homo sapiens
gtttgactattccaa

SEQ ID NO: 317687 - DNA, 15 bp, Homo sapiens
ggtttgactattcca

SEQ ID NO: 317688 - DNA, 15 bp, Homo sapiens
tggtttgactattcc

SEQ ID NO: 317689 - DNA, 15 bp, Homo sapiens
ctggtttgactattc

SEQ ID NO: 317690 - DNA, 15 bp, Homo sapiens
tctggtttgactatt

SEQ ID NO: 317691 - DNA, 15 bp, Homo sapiens
ctctggtttgactat

SEQ ID NO: 317692 - DNA, 15 bp, Homo sapiens
tctctggtttgacta

SEQ ID NO: 317693 - DNA, 15 bp, Homo sapiens
gtctctggtttgact

SEQ ID NO: 317694 - DNA, 15 bp, Homo sapiens
ggtctctggtttgac

SEQ ID NO: 317695 - DNA, 15 bp, Homo sapiens
tggtctctggtttga

SEQ ID NO: 317696 - DNA, 15 bp, Homo sapiens
ttggtctctggtttg

SEQ ID NO: 317697 - DNA, 15 bp, Homo sapiens
cttggtctctggttt

SEQ ID NO: 317698 - DNA, 15 bp, Homo sapiens
gcttggtctctggtt

SEQ ID NO: 317699 - DNA, 15 bp, Homo sapiens
tgcttggtctctggt

SEQ ID NO: 317700 - DNA, 15 bp, Homo sapiens
ttgcttggtctctgg

SEQ ID NO: 317701 - DNA, 15 bp, Homo sapiens
tttgcttggtctctg

SEQ ID NO: 317702 - DNA, 15 bp, Homo sapiens
ctttgcttggtctct

SEQ ID NO: 317703 - DNA, 15 bp, Homo sapiens
gctttgcttggtctc

SEQ ID NO: 317704 - DNA, 15 bp, Homo sapiens
tgctttgcttggtct

SEQ ID NO: 317705 - DNA, 15 bp, Homo sapiens
atgctttgcttggtc

SEQ ID NO: 317706 - DNA, 15 bp, Homo sapiens
gatgctttgcttggt

SEQ ID NO: 317707 - DNA, 15 bp, Homo sapiens
agatgctttgcttgg

SEQ ID NO: 317708 - DNA, 15 bp, Homo sapiens
aagatgctttgcttg

SEQ ID NO: 317709 - DNA, 15 bp, Homo sapiens
aaagatgctttgctt

SEQ ID NO: 317710 - DNA, 15 bp, Homo sapiens
aaaagatgctttgct

SEQ ID NO: 317711 - DNA, 15 bp, Homo sapiens
aaaaagatgctttgc

SEQ ID NO: 317712 - DNA, 15 bp, Homo sapiens
gaaaaagatgctttg

SEQ ID NO: 317713 - DNA, 15 bp, Homo sapiens
ggaaaaagatgcttt

SEQ ID NO: 317714 - DNA, 15 bp, Homo sapiens
gggaaaaagatgctt

SEQ ID NO: 317715 - DNA, 15 bp, Homo sapiens
agggaaaaagatgct

SEQ ID NO: 317716 - DNA, 15 bp, Homo sapiens
aagggaaaaagatgc

SEQ ID NO: 317717 - DNA, 15 bp, Homo sapiens
caagggaaaaagatg

SEQ ID NO: 317718 - DNA, 15 bp, Homo sapiens
acaagggaaaaagat

SEQ ID NO: 317719 - DNA, 15 bp, Homo sapiens
tacaagggaaaaaga

SEQ ID NO: 317720 - DNA, 15 bp, Homo sapiens
ttacaagggaaaaag

SEQ ID NO: 317721 - DNA, 15 bp, Homo sapiens
gttacaagggaaaaa

SEQ ID NO: 317722 - DNA, 15 bp, Homo sapiens
agttacaagggaaaa

SEQ ID NO: 317723 - DNA, 15 bp, Homo sapiens
aagttacaagggaaa

SEQ ID NO: 317724 - DNA, 15 bp, Homo sapiens
caagttacaagggaa

SEQ ID NO: 317725 - DNA, 15 bp, Homo sapiens
tcaagttacaaggga

SEQ ID NO: 317726 - DNA, 15 bp, Homo sapiens
ctcaagttacaaggg

SEQ ID NO: 317727 - DNA, 15 bp, Homo sapiens
tctcaagttacaagg

SEQ ID NO: 317728 - DNA, 15 bp, Homo sapiens
gtctcaagttacaag

SEQ ID NO: 317729 - DNA, 15 bp, Homo sapiens
ggtctcaagttacaa

SEQ ID NO: 317730 - DNA, 15 bp, Homo sapiens
aggtctcaagttaca

SEQ ID NO: 317731 - DNA, 15 bp, Homo sapiens
caggtctcaagttac

SEQ ID NO: 317732 - DNA, 15 bp, Homo sapiens
acaggtctcaagtta

SEQ ID NO: 317733 - DNA, 15 bp, Homo sapiens
cacaggtctcaagtt

SEQ ID NO: 317734 - DNA, 15 bp, Homo sapiens
gcacaggtctcaagt

SEQ ID NO: 317735 - DNA, 15 bp, Homo sapiens
tgcacaggtctcaag

SEQ ID NO: 317736 - DNA, 15 bp, Homo sapiens
ttgcacaggtctcaa

SEQ ID NO: 317737 - DNA, 15 bp, Homo sapiens
tttgcacaggtctca

SEQ ID NO: 317738 - DNA, 15 bp, Homo sapiens
atttgcacaggtctc

SEQ ID NO: 317739 - DNA, 15 bp, Homo sapiens
catttgcacaggtct

SEQ ID NO: 317740 - DNA, 15 bp, Homo sapiens
tcatttgcacaggtc

SEQ ID NO: 317741 - DNA, 15 bp, Homo sapiens
gtcatttgcacaggt

SEQ ID NO: 317742 - DNA, 15 bp, Homo sapiens
tgtcatttgcacagg

SEQ ID NO: 317743 - DNA, 15 bp, Homo sapiens
gtgtcatttgcacag

SEQ ID NO: 317744 - DNA, 15 bp, Homo sapiens
tgtgtcatttgcaca

SEQ ID NO: 317745 - DNA, 15 bp, Homo sapiens
ctgtgtcatttgcac

SEQ ID NO: 317746 - DNA, 15 bp, Homo sapiens
cctgtgtcatttgca

SEQ ID NO: 317747 - DNA, 15 bp, Homo sapiens
gcctgtgtcatttgc

SEQ ID NO: 317748 - DNA, 15 bp, Homo sapiens
agcctgtgtcatttg

SEQ ID NO: 317749 - DNA, 15 bp, Homo sapiens
aagcctgtgtcattt

SEQ ID NO: 317750 - DNA, 15 bp, Homo sapiens
gaagcctgtgtcatt

SEQ ID NO: 317751 - DNA, 15 bp, Homo sapiens
agaagcctgtgtcat

SEQ ID NO: 317752 - DNA, 15 bp, Homo sapiens
tagaagcctgtgtca

SEQ ID NO: 317753 - DNA, 15 bp, Homo sapiens
ctagaagcctgtgtc

SEQ ID NO: 317754 - DNA, 15 bp, Homo sapiens
actagaagcctgtgt

SEQ ID NO: 317755 - DNA, 15 bp, Homo sapiens
aactagaagcctgtg

SEQ ID NO: 317756 - DNA, 15 bp, Homo sapiens
gaactagaagcctgt

SEQ ID NO: 317757 - DNA, 15 bp, Homo sapiens
ggaactagaagcctg

SEQ ID NO: 317758 - DNA, 15 bp, Homo sapiens
gggaactagaagcct

SEQ ID NO: 317759 - DNA, 15 bp, Homo sapiens
tgggaactagaagcc

SEQ ID NO: 317760 - DNA, 15 bp, Homo sapiens
ttgggaactagaagc

SEQ ID NO: 317761 - DNA, 15 bp, Homo sapiens
tttgggaactagaag

SEQ ID NO: 317762 - DNA, 15 bp, Homo sapiens
gtttgggaactagaa

SEQ ID NO: 317763 - DNA, 15 bp, Homo sapiens
agtttgggaactaga

SEQ ID NO: 317764 - DNA, 15 bp, Homo sapiens
aagtttgggaactag

SEQ ID NO: 317765 - DNA, 15 bp, Homo sapiens
taagtttgggaacta

SEQ ID NO: 317766 - DNA, 15 bp, Homo sapiens
ttaagtttgggaact

SEQ ID NO: 317767 - DNA, 15 bp, Homo sapiens
attaagtttgggaac

SEQ ID NO: 317768 - DNA, 15 bp, Homo sapiens
tattaagtttgggaa

SEQ ID NO: 317769 - DNA, 15 bp, Homo sapiens
ttattaagtttggga

SEQ ID NO: 317770 - DNA, 15 bp, Homo sapiens
cttattaagtttggg

SEQ ID NO: 317771 - DNA, 15 bp, Homo sapiens
tcttattaagtttgg

SEQ ID NO: 317772 - DNA, 15 bp, Homo sapiens
ctcttattaagtttg

SEQ ID NO: 317773 - DNA, 15 bp, Homo sapiens
actcttattaagttt

SEQ ID NO: 317774 - DNA, 15 bp, Homo sapiens
tactcttattaagtt

SEQ ID NO: 317775 - DNA, 15 bp, Homo sapiens
ttactcttattaagt

SEQ ID NO: 317776 - DNA, 15 bp, Homo sapiens
cttactcttattaag

SEQ ID NO: 317777 - DNA, 15 bp, Homo sapiens
acttactcttattaa

SEQ ID NO: 317778 - DNA, 15 bp, Homo sapiens
cacttactcttatta

SEQ ID NO: 317779 - DNA, 15 bp, Homo sapiens
gcacttactcttatt

SEQ ID NO: 317780 - DNA, 15 bp, Homo sapiens
cgcacttactcttat

SEQ ID NO: 317781 - DNA, 15 bp, Homo sapiens
acgcacttactctta

SEQ ID NO: 317782 - DNA, 15 bp, Homo sapiens
cacgcacttactctt

SEQ ID NO: 317783 - DNA, 15 bp, Homo sapiens
tcacgcacttactct

SEQ ID NO: 317784 - DNA, 15 bp, Homo sapiens
ttcacgcacttactc

SEQ ID NO: 317785 - DNA, 15 bp, Homo sapiens
cttcacgcacttact

SEQ ID NO: 317786 - DNA, 15 bp, Homo sapiens
tcttcacgcacttac

SEQ ID NO: 317787 - DNA, 15 bp, Homo sapiens
ttcttcacgcactta

SEQ ID NO: 317788 - DNA, 15 bp, Homo sapiens
cttcttcacgcactt

SEQ ID NO: 317789 - DNA, 15 bp, Homo sapiens
tcttcttcacgcact

SEQ ID NO: 317790 - DNA, 15 bp, Homo sapiens
ctcttcttcacgcac

SEQ ID NO: 317791 - DNA, 15 bp, Homo sapiens
tctcttcttcacgca

SEQ ID NO: 317792 - DNA, 15 bp, Homo sapiens
gtctcttcttcacgc

SEQ ID NO: 317793 - DNA, 15 bp, Homo sapiens
ggtctcttcttcacg

SEQ ID NO: 317794 - DNA, 15 bp, Homo sapiens
aggtctcttcttcac

SEQ ID NO: 317795 - DNA, 15 bp, Homo sapiens
caggtctcttcttca

SEQ ID NO: 317796 - DNA, 15 bp, Homo sapiens
gcaggtctcttcttc

SEQ ID NO: 317797 - DNA, 15 bp, Homo sapiens
tgcaggtctcttctt

SEQ ID NO: 317798 - DNA, 15 bp, Homo sapiens
ctgcaggtctcttct

SEQ ID NO: 317799 - DNA, 15 bp, Homo sapiens
tctgcaggtctcttc

SEQ ID NO: 317800 - DNA, 15 bp, Homo sapiens
gtctgcaggtctctt

SEQ ID NO: 317801 - DNA, 15 bp, Homo sapiens
tgtctgcaggtctct

SEQ ID NO: 317802 - DNA, 15 bp, Homo sapiens
gtgtctgcaggtctc

SEQ ID NO: 317803 - DNA, 15 bp, Homo sapiens
agtgtctgcaggtct

SEQ ID NO: 317804 - DNA, 15 bp, Homo sapiens
aagtgtctgcaggtc

SEQ ID NO: 317805 - DNA, 15 bp, Homo sapiens
taagtgtctgcaggt

SEQ ID NO: 317806 - DNA, 15 bp, Homo sapiens
ttaagtgtctgcagg

SEQ ID NO: 317807 - DNA, 15 bp, Homo sapiens
attaagtgtctgcag

SEQ ID NO: 317808 - DNA, 15 bp, Homo sapiens
aattaagtgtctgca

SEQ ID NO: 317809 - DNA, 15 bp, Homo sapiens
gaattaagtgtctgc

SEQ ID NO: 317810 - DNA, 15 bp, Homo sapiens
tgaattaagtgtctg

SEQ ID NO: 317811 - DNA, 15 bp, Homo sapiens
ttgaattaagtgtct

SEQ ID NO: 317812 - DNA, 15 bp, Homo sapiens
tttgaattaagtgtc

SEQ ID NO: 317813 - DNA, 15 bp, Homo sapiens
gtttgaattaagtgt

SEQ ID NO: 317814 - DNA, 15 bp, Homo sapiens
tgtttgaattaagtg

SEQ ID NO: 317815 - DNA, 15 bp, Homo sapiens
ctgtttgaattaagt

SEQ ID NO: 317816 - DNA, 15 bp, Homo sapiens
actgtttgaattaag

SEQ ID NO: 317817 - DNA, 15 bp, Homo sapiens
gactgtttgaattaa

SEQ ID NO: 317818 - DNA, 15 bp, Homo sapiens
agactgtttgaatta

SEQ ID NO: 317819 - DNA, 15 bp, Homo sapiens
tagactgtttgaatt

SEQ ID NO: 317820 - DNA, 15 bp, Homo sapiens
ctagactgtttgaat

SEQ ID NO: 317821 - DNA, 15 bp, Homo sapiens
tctagactgtttgaa

SEQ ID NO: 317822 - DNA, 15 bp, Homo sapiens
ttctagactgtttga

SEQ ID NO: 317823 - DNA, 15 bp, Homo sapiens
attctagactgtttg

SEQ ID NO: 317824 - DNA, 15 bp, Homo sapiens
aattctagactgttt

SEQ ID NO: 317825 - DNA, 15 bp, Homo sapiens
gaattctagactgtt

SEQ ID NO: 317826 - DNA, 15 bp, Homo sapiens
agaattctagactgt

SEQ ID NO: 317827 - DNA, 15 bp, Homo sapiens
cagaattctagactg

SEQ ID NO: 317828 - DNA, 15 bp, Homo sapiens
ccagaattctagact

SEQ ID NO: 317829 - DNA, 15 bp, Homo sapiens
cccagaattctagac

SEQ ID NO: 317830 - DNA, 15 bp, Homo sapiens
tcccagaattctaga

SEQ ID NO: 317831 - DNA, 15 bp, Homo sapiens
ttcccagaattctag

SEQ ID NO: 317832 - DNA, 15 bp, Homo sapiens
attcccagaattcta

SEQ ID NO: 317833 - DNA, 15 bp, Homo sapiens
tattcccagaattct

SEQ ID NO: 317834 - DNA, 15 bp, Homo sapiens
ttattcccagaattc

SEQ ID NO: 317835 - DNA, 15 bp, Homo sapiens
cttattcccagaatt

SEQ ID NO: 317836 - DNA, 15 bp, Homo sapiens
acttattcccagaat

SEQ ID NO: 317837 - DNA, 15 bp, Homo sapiens
aacttattcccagaa

SEQ ID NO: 317838 - DNA, 15 bp, Homo sapiens
taacttattcccaga

SEQ ID NO: 317839 - DNA, 15 bp, Homo sapiens
ataacttattcccag

SEQ ID NO: 317840 - DNA, 15 bp, Homo sapiens
tataacttattccca

SEQ ID NO: 317841 - DNA, 15 bp, Homo sapiens
ctataacttattccc

SEQ ID NO: 317842 - DNA, 15 bp, Homo sapiens
actataacttattcc

SEQ ID NO: 317843 - DNA, 15 bp, Homo sapiens
tactataacttattc

SEQ ID NO: 317844 - DNA, 15 bp, Homo sapiens
gtactataacttatt

SEQ ID NO: 317845 - DNA, 15 bp, Homo sapiens
tgtactataacttat

SEQ ID NO: 317846 - DNA, 15 bp, Homo sapiens
ttgtactataactta

SEQ ID NO: 317847 - DNA, 15 bp, Homo sapiens
cttgtactataactt

SEQ ID NO: 317848 - DNA, 15 bp, Homo sapiens
acttgtactataact

SEQ ID NO: 317849 - DNA, 15 bp, Homo sapiens
aacttgtactataac

SEQ ID NO: 317850 - DNA, 15 bp, Homo sapiens
taacttgtactataa

SEQ ID NO: 317851 - DNA, 15 bp, Homo sapiens
ataacttgtactata

SEQ ID NO: 317852 - DNA, 15 bp, Homo sapiens
tataacttgtactat

SEQ ID NO: 317853 - DNA, 15 bp, Homo sapiens
atataacttgtacta

SEQ ID NO: 317854 - DNA, 15 bp, Homo sapiens
catataacttgtact

SEQ ID NO: 317855 - DNA, 15 bp, Homo sapiens
acatataacttgtac

SEQ ID NO: 317856 - DNA, 15 bp, Homo sapiens
cacatataacttgta

SEQ ID NO: 317857 - DNA, 15 bp, Homo sapiens
ccacatataacttgt

SEQ ID NO: 317858 - DNA, 15 bp, Homo sapiens
gccacatataacttg

SEQ ID NO: 317859 - DNA, 15 bp, Homo sapiens
agccacatataactt

SEQ ID NO: 317860 - DNA, 15 bp, Homo sapiens
cagccacatataact

SEQ ID NO: 317861 - DNA, 15 bp, Homo sapiens
ccagccacatataac

SEQ ID NO: 317862 - DNA, 15 bp, Homo sapiens
accagccacatataa

SEQ ID NO: 317863 - DNA, 15 bp, Homo sapiens
aaccagccacatata

SEQ ID NO: 317864 - DNA, 15 bp, Homo sapiens
taaccagccacatat

SEQ ID NO: 317865 - DNA, 15 bp, Homo sapiens
ataaccagccacata

SEQ ID NO: 317866 - DNA, 15 bp, Homo sapiens
tataaccagccacat

SEQ ID NO: 317867 - DNA, 15 bp, Homo sapiens
ctataaccagccaca

SEQ ID NO: 317868 - DNA, 15 bp, Homo sapiens
tctataaccagccac

SEQ ID NO: 317869 - DNA, 15 bp, Homo sapiens
atctataaccagcca

SEQ ID NO: 317870 - DNA, 15 bp, Homo sapiens
aatctataaccagcc

SEQ ID NO: 317871 - DNA, 15 bp, Homo sapiens
gaatctataaccagc

SEQ ID NO: 317872 - DNA, 15 bp, Homo sapiens
tgaatctataaccag

SEQ ID NO: 317873 - DNA, 15 bp, Homo sapiens
ctgaatctataacca

SEQ ID NO: 317874 - DNA, 15 bp, Homo sapiens
gctgaatctataacc

SEQ ID NO: 317875 - DNA, 15 bp, Homo sapiens
ggctgaatctataac

SEQ ID NO: 317876 - DNA, 15 bp, Homo sapiens
aggctgaatctataa

SEQ ID NO: 317877 - DNA, 15 bp, Homo sapiens
aaggctgaatctata

SEQ ID NO: 317878 - DNA, 15 bp, Homo sapiens
caaggctgaatctat

SEQ ID NO: 317879 - DNA, 15 bp, Homo sapiens
tcaaggctgaatcta

SEQ ID NO: 317880 - DNA, 15 bp, Homo sapiens
atcaaggctgaatct

SEQ ID NO: 317881 - DNA, 15 bp, Homo sapiens
catcaaggctgaatc

SEQ ID NO: 317882 - DNA, 15 bp, Homo sapiens
acatcaaggctgaat

SEQ ID NO: 317883 - DNA, 15 bp, Homo sapiens
aacatcaaggctgaa

SEQ ID NO: 317884 - DNA, 15 bp, Homo sapiens
aaacatcaaggctga

SEQ ID NO: 317885 - DNA, 15 bp, Homo sapiens
taaacatcaaggctg

SEQ ID NO: 317886 - DNA, 15 bp, Homo sapiens
ataaacatcaaggct

SEQ ID NO: 317887 - DNA, 15 bp, Homo sapiens
cataaacatcaaggc

SEQ ID NO: 317888 - DNA, 15 bp, Homo sapiens
acataaacatcaagg

SEQ ID NO: 317889 - DNA, 15 bp, Homo sapiens
aacataaacatcaag

SEQ ID NO: 317890 - DNA, 15 bp, Homo sapiens
gaacataaacatcaa

SEQ ID NO: 317891 - DNA, 15 bp, Homo sapiens
ggaacataaacatca

SEQ ID NO: 317892 - DNA, 15 bp, Homo sapiens
gggaacataaacatc

SEQ ID NO: 317893 - DNA, 15 bp, Homo sapiens
agggaacataaacat

SEQ ID NO: 317894 - DNA, 15 bp, Homo sapiens
cagggaacataaaca

SEQ ID NO: 317895 - DNA, 15 bp, Homo sapiens
acagggaacataaac

SEQ ID NO: 317896 - DNA, 15 bp, Homo sapiens
aacagggaacataaa

SEQ ID NO: 317897 - DNA, 15 bp, Homo sapiens
aaacagggaacataa

SEQ ID NO: 317898 - DNA, 15 bp, Homo sapiens
gaaacagggaacata

SEQ ID NO: 317899 - DNA, 15 bp, Homo sapiens
tgaaacagggaacat

SEQ ID NO: 317900 - DNA, 15 bp, Homo sapiens
ttgaaacagggaaca

SEQ ID NO: 317901 - DNA, 15 bp, Homo sapiens
cttgaaacagggaac

SEQ ID NO: 317902 - DNA, 15 bp, Homo sapiens
acttgaaacagggaa

SEQ ID NO: 317903 - DNA, 15 bp, Homo sapiens
gacttgaaacaggga

SEQ ID NO: 317904 - DNA, 15 bp, Homo sapiens
tgacttgaaacaggg

SEQ ID NO: 317905 - DNA, 15 bp, Homo sapiens
gtgacttgaaacagg

SEQ ID NO: 317906 - DNA, 15 bp, Homo sapiens
tgtgacttgaaacag

SEQ ID NO: 317907 - DNA, 15 bp, Homo sapiens
gtgtgacttgaaaca

SEQ ID NO: 317908 - DNA, 15 bp, Homo sapiens
tgtgtgacttgaaac

SEQ ID NO: 317909 - DNA, 15 bp, Homo sapiens
gtgtgtgacttgaaa

SEQ ID NO: 317910 - DNA, 15 bp, Homo sapiens
tgtgtgtgacttgaa

SEQ ID NO: 317911 - DNA, 15 bp, Homo sapiens
atgtgtgtgacttga

SEQ ID NO: 317912 - DNA, 15 bp, Homo sapiens
gatgtgtgtgacttg

SEQ ID NO: 317913 - DNA, 15 bp, Homo sapiens
tgatgtgtgtgactt

SEQ ID NO: 317914 - DNA, 15 bp, Homo sapiens
ctgatgtgtgtgact

SEQ ID NO: 317915 - DNA, 15 bp, Homo sapiens
tctgatgtgtgtgac

SEQ ID NO: 317916 - DNA, 15 bp, Homo sapiens
atctgatgtgtgtga

SEQ ID NO: 317917 - DNA, 15 bp, Homo sapiens
aatctgatgtgtgtg

SEQ ID NO: 317918 - DNA, 15 bp, Homo sapiens
taatctgatgtgtgt

SEQ ID NO: 317919 - DNA, 15 bp, Homo sapiens
gtaatctgatgtgtg

SEQ ID NO: 317920 - DNA, 15 bp, Homo sapiens
agtaatctgatgtgt

SEQ ID NO: 317921 - DNA, 15 bp, Homo sapiens
gagtaatctgatgtg

SEQ ID NO: 317922 - DNA, 15 bp, Homo sapiens
tgagtaatctgatgt

SEQ ID NO: 317923 - DNA, 15 bp, Homo sapiens
gtgagtaatctgatg

SEQ ID NO: 317924 - DNA, 15 bp, Homo sapiens
agtgagtaatctgat

SEQ ID NO: 317925 - DNA, 15 bp, Homo sapiens
aagtgagtaatctga

SEQ ID NO: 317926 - DNA, 15 bp, Homo sapiens
caagtgagtaatctg

SEQ ID NO: 317927 - DNA, 15 bp, Homo sapiens
acaagtgagtaatct

SEQ ID NO: 317928 - DNA, 15 bp, Homo sapiens
gacaagtgagtaatc

SEQ ID NO: 317929 - DNA, 15 bp, Homo sapiens
tgacaagtgagtaat

SEQ ID NO: 317930 - DNA, 15 bp, Homo sapiens
ctgacaagtgagtaa

SEQ ID NO: 317931 - DNA, 15 bp, Homo sapiens
gctgacaagtgagta

SEQ ID NO: 317932 - DNA, 15 bp, Homo sapiens
agctgacaagtgagt

SEQ ID NO: 317933 - DNA, 15 bp, Homo sapiens
tagctgacaagtgag

SEQ ID NO: 317934 - DNA, 15 bp, Homo sapiens
ttagctgacaagtga

SEQ ID NO: 317935 - DNA, 15 bp, Homo sapiens
tttagctgacaagtg

SEQ ID NO: 317936 - DNA, 15 bp, Homo sapiens
ttttagctgacaagt

SEQ ID NO: 317937 - DNA, 15 bp, Homo sapiens
tttttagctgacaag

SEQ ID NO: 317938 - DNA, 15 bp, Homo sapiens
atttttagctgacaa

SEQ ID NO: 317939 - DNA, 15 bp, Homo sapiens
tatttttagctgaca

SEQ ID NO: 317940 - DNA, 15 bp, Homo sapiens
ctatttttagctgac

SEQ ID NO: 317941 - DNA, 15 bp, Homo sapiens
cctatttttagctga

SEQ ID NO: 317942 - DNA, 15 bp, Homo sapiens
ccctatttttagctg

SEQ ID NO: 317943 - DNA, 15 bp, Homo sapiens
gccctatttttagct

SEQ ID NO: 317944 - DNA, 15 bp, Homo sapiens
ggccctatttttagc

SEQ ID NO: 317945 - DNA, 15 bp, Homo sapiens
tggccctatttttag

SEQ ID NO: 317946 - DNA, 15 bp, Homo sapiens
atggccctattttta

SEQ ID NO: 317947 - DNA, 15 bp, Homo sapiens
gatggccctattttt

SEQ ID NO: 317948 - DNA, 15 bp, Homo sapiens
tgatggccctatttt

SEQ ID NO: 317949 - DNA, 15 bp, Homo sapiens
gtgatggccctattt

SEQ ID NO: 317950 - DNA, 15 bp, Homo sapiens
agtgatggccctatt

SEQ ID NO: 317951 - DNA, 15 bp, Homo sapiens
cagtgatggccctat

SEQ ID NO: 317952 - DNA, 15 bp, Homo sapiens
ccagtgatggcccta

SEQ ID NO: 317953 - DNA, 15 bp, Homo sapiens
gccagtgatggccct

SEQ ID NO: 317954 - DNA, 15 bp, Homo sapiens
agccagtgatggccc

SEQ ID NO: 317955 - DNA, 15 bp, Homo sapiens
aagccagtgatggcc

SEQ ID NO: 317956 - DNA, 15 bp, Homo sapiens
caagccagtgatggc

SEQ ID NO: 317957 - DNA, 15 bp, Homo sapiens
gcaagccagtgatgg

SEQ ID NO: 317958 - DNA, 15 bp, Homo sapiens
tgcaagccagtgatg

SEQ ID NO: 317959 - DNA, 15 bp, Homo sapiens
ttgcaagccagtgat

SEQ ID NO: 317960 - DNA, 15 bp, Homo sapiens
cttgcaagccagtga

SEQ ID NO: 317961 - DNA, 15 bp, Homo sapiens
acttgcaagccagtg

SEQ ID NO: 317962 - DNA, 15 bp, Homo sapiens
gacttgcaagccagt

SEQ ID NO: 317963 - DNA, 15 bp, Homo sapiens
cgacttgcaagccag

SEQ ID NO: 317964 - DNA, 15 bp, Homo sapiens
tcgacttgcaagcca

SEQ ID NO: 317965 - DNA, 15 bp, Homo sapiens
ctcgacttgcaagcc

SEQ ID NO: 317966 - DNA, 15 bp, Homo sapiens
actcgacttgcaagc

SEQ ID NO: 317967 - DNA, 15 bp, Homo sapiens
aactcgacttgcaag

SEQ ID NO: 317968 - DNA, 15 bp, Homo sapiens
taactcgacttgcaa

SEQ ID NO: 317969 - DNA, 15 bp, Homo sapiens
ctaactcgacttgca

SEQ ID NO: 317970 - DNA, 15 bp, Homo sapiens
cctaactcgacttgc

SEQ ID NO: 317971 - DNA, 15 bp, Homo sapiens
acctaactcgacttg

SEQ ID NO: 317972 - DNA, 15 bp, Homo sapiens
aacctaactcgactt

SEQ ID NO: 317973 - DNA, 15 bp, Homo sapiens
aaacctaactcgact

SEQ ID NO: 317974 - DNA, 15 bp, Homo sapiens
aaaacctaactcgac

SEQ ID NO: 317975 - DNA, 15 bp, Homo sapiens
taaaacctaactcga

SEQ ID NO: 317976 - DNA, 15 bp, Homo sapiens
ataaaacctaactcg

SEQ ID NO: 317977 - DNA, 15 bp, Homo sapiens
aataaaacctaactc

SEQ ID NO: 317978 - DNA, 15 bp, Homo sapiens
aaataaaacctaact

SEQ ID NO: 317979 - DNA, 15 bp, Homo sapiens
gaaataaaacctaac

SEQ ID NO: 317980 - DNA, 15 bp, Homo sapiens
agaaataaaacctaa

SEQ ID NO: 317981 - DNA, 15 bp, Homo sapiens
gagaaataaaaccta

SEQ ID NO: 317982 - DNA, 15 bp, Homo sapiens
agagaaataaaacct

SEQ ID NO: 317983 - DNA, 15 bp, Homo sapiens
tagagaaataaaacc

SEQ ID NO: 317984 - DNA, 15 bp, Homo sapiens
atagagaaataaaac

SEQ ID NO: 317985 - DNA, 15 bp, Homo sapiens
catagagaaataaaa

SEQ ID NO: 317986 - DNA, 15 bp, Homo sapiens
acatagagaaataaa

SEQ ID NO: 317987 - DNA, 15 bp, Homo sapiens
cacatagagaaataa

SEQ ID NO: 317988 - DNA, 15 bp, Homo sapiens
gcacatagagaaata

SEQ ID NO: 317989 - DNA, 15 bp, Homo sapiens
agcacatagagaaat

SEQ ID NO: 317990 - DNA, 15 bp, Homo sapiens
aagcacatagagaaa

SEQ ID NO: 317991 - DNA, 15 bp, Homo sapiens
gaagcacatagagaa

SEQ ID NO: 317992 - DNA, 15 bp, Homo sapiens
tgaagcacatagaga

SEQ ID NO: 317993 - DNA, 15 bp, Homo sapiens
atgaagcacatagag

SEQ ID NO: 317994 - DNA, 15 bp, Homo sapiens
aatgaagcacataga

SEQ ID NO: 317995 - DNA, 15 bp, Homo sapiens
caatgaagcacatag

SEQ ID NO: 317996 - DNA, 15 bp, Homo sapiens
acaatgaagcacata

SEQ ID NO: 317997 - DNA, 15 bp, Homo sapiens
aacaatgaagcacat

SEQ ID NO: 317998 - DNA, 15 bp, Homo sapiens
gaacaatgaagcaca

SEQ ID NO: 317999 - DNA, 15 bp, Homo sapiens
cgaacaatgaagcac

SEQ ID NO: 318000 - DNA, 15 bp, Homo sapiens
acgaacaatgaagca

SEQ ID NO: 318001 - DNA, 15 bp, Homo sapiens
aacgaacaatgaagc

SEQ ID NO: 318002 - DNA, 15 bp, Homo sapiens
gaacgaacaatgaag

SEQ ID NO: 318003 - DNA, 15 bp, Homo sapiens
agaacgaacaatgaa

SEQ ID NO: 318004 - DNA, 15 bp, Homo sapiens
aagaacgaacaatga

SEQ ID NO: 318005 - DNA, 15 bp, Homo sapiens
aaagaacgaacaatg

SEQ ID NO: 318006 - DNA, 15 bp, Homo sapiens
aaaagaacgaacaat

SEQ ID NO: 318007 - DNA, 15 bp, Homo sapiens
caaaagaacgaacaa

SEQ ID NO: 318008 - DNA, 15 bp, Homo sapiens
acaaaagaacgaaca

SEQ ID NO: 318009 - DNA, 15 bp, Homo sapiens
cacaaaagaacgaac

SEQ ID NO: 318010 - DNA, 15 bp, Homo sapiens
gcacaaaagaacgaa

SEQ ID NO: 318011 - DNA, 15 bp, Homo sapiens
agcacaaaagaacga

SEQ ID NO: 318012 - DNA, 15 bp, Homo sapiens
gagcacaaaagaacg

SEQ ID NO: 318013 - DNA, 15 bp, Homo sapiens
ggagcacaaaagaac

SEQ ID NO: 318014 - DNA, 15 bp, Homo sapiens
gggagcacaaaagaa

SEQ ID NO: 318015 - DNA, 15 bp, Homo sapiens
agggagcacaaaaga

SEQ ID NO: 318016 - DNA, 15 bp, Homo sapiens
gagggagcacaaaag

SEQ ID NO: 318017 - DNA, 15 bp, Homo sapiens
ggagggagcacaaaa

SEQ ID NO: 318018 - DNA, 15 bp, Homo sapiens
aggagggagcacaaa

SEQ ID NO: 318019 - DNA, 15 bp, Homo sapiens
gaggagggagcacaa

SEQ ID NO: 318020 - DNA, 15 bp, Homo sapiens
agaggagggagcaca

SEQ ID NO: 318021 - DNA, 15 bp, Homo sapiens
cagaggagggagcac

SEQ ID NO: 318022 - DNA, 15 bp, Homo sapiens
acagaggagggagca

SEQ ID NO: 318023 - DNA, 15 bp, Homo sapiens
cacagaggagggagc

SEQ ID NO: 318024 - DNA, 15 bp, Homo sapiens
gcacagaggagggag

SEQ ID NO: 318025 - DNA, 15 bp, Homo sapiens
ggcacagaggaggga

SEQ ID NO: 318026 - DNA, 15 bp, Homo sapiens
aggcacagaggaggg

SEQ ID NO: 318027 - DNA, 15 bp, Homo sapiens
caggcacagaggagg

SEQ ID NO: 318028 - DNA, 15 bp, Homo sapiens
ccaggcacagaggag

SEQ ID NO: 318029 - DNA, 15 bp, Homo sapiens
gccaggcacagagga

SEQ ID NO: 318030 - DNA, 15 bp, Homo sapiens
ggccaggcacagagg

SEQ ID NO: 318031 - DNA, 15 bp, Homo sapiens
gggccaggcacagag

SEQ ID NO: 318032 - DNA, 15 bp, Homo sapiens
ggggccaggcacaga

SEQ ID NO: 318033 - DNA, 15 bp, Homo sapiens
gggggccaggcacag

SEQ ID NO: 318034 - DNA, 15 bp, Homo sapiens
agggggccaggcaca

SEQ ID NO: 318035 - DNA, 15 bp, Homo sapiens
gagggggccaggcac

SEQ ID NO: 318036 - DNA, 15 bp, Homo sapiens
agagggggccaggca

SEQ ID NO: 318037 - DNA, 15 bp, Homo sapiens
cagagggggccaggc

SEQ ID NO: 318038 - DNA, 15 bp, Homo sapiens
gcagagggggccagg

SEQ ID NO: 318039 - DNA, 15 bp, Homo sapiens
ggcagagggggccag

SEQ ID NO: 318040 - DNA, 15 bp, Homo sapiens
tggcagagggggcca

SEQ ID NO: 318041 - DNA, 15 bp, Homo sapiens
atggcagagggggcc

SEQ ID NO: 318042 - DNA, 15 bp, Homo sapiens
catggcagagggggc

SEQ ID NO: 318043 - DNA, 15 bp, Homo sapiens
gcatggcagaggggg

SEQ ID NO: 318044 - DNA, 15 bp, Homo sapiens
ggcatggcagagggg

SEQ ID NO: 318045 - DNA, 15 bp, Homo sapiens
gggcatggcagaggg

SEQ ID NO: 318046 - DNA, 15 bp, Homo sapiens
tgggcatggcagagg

SEQ ID NO: 318047 - DNA, 15 bp, Homo sapiens
ctgggcatggcagag

SEQ ID NO: 318048 - DNA, 15 bp, Homo sapiens
cctgggcatggcaga

SEQ ID NO: 318049 - DNA, 15 bp, Homo sapiens
acctgggcatggcag

SEQ ID NO: 318050 - DNA, 15 bp, Homo sapiens
cacctgggcatggca

SEQ ID NO: 318051 - DNA, 15 bp, Homo sapiens
ccacctgggcatggc

SEQ ID NO: 318052 - DNA, 15 bp, Homo sapiens
gccacctgggcatgg

SEQ ID NO: 318053 - DNA, 15 bp, Homo sapiens
agccacctgggcatg

SEQ ID NO: 318054 - DNA, 15 bp, Homo sapiens
aagccacctgggcat

SEQ ID NO: 318055 - DNA, 15 bp, Homo sapiens
gaagccacctgggca

SEQ ID NO: 318056 - DNA, 15 bp, Homo sapiens
tgaagccacctgggc

SEQ ID NO: 318057 - DNA, 15 bp, Homo sapiens
gtgaagccacctggg

SEQ ID NO: 318058 - DNA, 15 bp, Homo sapiens
tgtgaagccacctgg

SEQ ID NO: 318059 - DNA, 15 bp, Homo sapiens
ctgtgaagccacctg

SEQ ID NO: 318060 - DNA, 15 bp, Homo sapiens
actgtgaagccacct

SEQ ID NO: 318061 - DNA, 15 bp, Homo sapiens
gactgtgaagccacc

SEQ ID NO: 318062 - DNA, 15 bp, Homo sapiens
ggactgtgaagccac

SEQ ID NO: 318063 - DNA, 15 bp, Homo sapiens
gggactgtgaagcca

SEQ ID NO: 318064 - DNA, 15 bp, Homo sapiens
ggggactgtgaagcc

SEQ ID NO: 318065 - DNA, 15 bp, Homo sapiens
gggggactgtgaagc

SEQ ID NO: 318066 - DNA, 15 bp, Homo sapiens
agggggactgtgaag

SEQ ID NO: 318067 - DNA, 15 bp, Homo sapiens
aagggggactgtgaa

SEQ ID NO: 318068 - DNA, 15 bp, Homo sapiens
gaagggggactgtga

SEQ ID NO: 318069 - DNA, 15 bp, Homo sapiens
ggaagggggactgtg

SEQ ID NO: 318070 - DNA, 15 bp, Homo sapiens
gggaagggggactgt

SEQ ID NO: 318071 - DNA, 15 bp, Homo sapiens
ggggaagggggactg

SEQ ID NO: 318072 - DNA, 15 bp, Homo sapiens
tggggaagggggact

SEQ ID NO: 318073 - DNA, 15 bp, Homo sapiens
atggggaagggggac

SEQ ID NO: 318074 - DNA, 15 bp, Homo sapiens
catggggaaggggga

SEQ ID NO: 318075 - DNA, 15 bp, Homo sapiens
ccatggggaaggggg

SEQ ID NO: 318076 - DNA, 15 bp, Homo sapiens
accatggggaagggg

SEQ ID NO: 318077 - DNA, 15 bp, Homo sapiens
gaccatggggaaggg

SEQ ID NO: 318078 - DNA, 15 bp, Homo sapiens
tgaccatggggaagg

SEQ ID NO: 318079 - DNA, 15 bp, Homo sapiens
ttgaccatggggaag

SEQ ID NO: 318080 - DNA, 15 bp, Homo sapiens
attgaccatggggaa

SEQ ID NO: 318081 - DNA, 15 bp, Homo sapiens
tattgaccatgggga

SEQ ID NO: 318082 - DNA, 15 bp, Homo sapiens
gtattgaccatgggg

SEQ ID NO: 318083 - DNA, 15 bp, Homo sapiens
agtattgaccatggg

SEQ ID NO: 318084 - DNA, 15 bp, Homo sapiens
aagtattgaccatgg

SEQ ID NO: 318085 - DNA, 15 bp, Homo sapiens
gaagtattgaccatg

SEQ ID NO: 318086 - DNA, 15 bp, Homo sapiens
agaagtattgaccat

SEQ ID NO: 318087 - DNA, 15 bp, Homo sapiens
aagaagtattgacca

SEQ ID NO: 318088 - DNA, 15 bp, Homo sapiens
aaagaagtattgacc

SEQ ID NO: 318089 - DNA, 15 bp, Homo sapiens
gaaagaagtattgac

SEQ ID NO: 318090 - DNA, 15 bp, Homo sapiens
agaaagaagtattga

SEQ ID NO: 318091 - DNA, 15 bp, Homo sapiens
tagaaagaagtattg

SEQ ID NO: 318092 - DNA, 15 bp, Homo sapiens
ttagaaagaagtatt

SEQ ID NO: 318093 - DNA, 15 bp, Homo sapiens
gttagaaagaagtat

SEQ ID NO: 318094 - DNA, 15 bp, Homo sapiens
agttagaaagaagta

SEQ ID NO: 318095 - DNA, 15 bp, Homo sapiens
cagttagaaagaagt

SEQ ID NO: 318096 - DNA, 15 bp, Homo sapiens
tcagttagaaagaag

SEQ ID NO: 318097 - DNA, 15 bp, Homo sapiens
ctcagttagaaagaa

SEQ ID NO: 318098 - DNA, 15 bp, Homo sapiens
cctcagttagaaaga

SEQ ID NO: 318099 - DNA, 15 bp, Homo sapiens
ccctcagttagaaag

SEQ ID NO: 318100 - DNA, 15 bp, Homo sapiens
tccctcagttagaaa

SEQ ID NO: 318101 - DNA, 15 bp, Homo sapiens
atccctcagttagaa

SEQ ID NO: 318102 - DNA, 15 bp, Homo sapiens
tatccctcagttaga

SEQ ID NO: 318103 - DNA, 15 bp, Homo sapiens
ttatccctcagttag

SEQ ID NO: 318104 - DNA, 15 bp, Homo sapiens
tttatccctcagtta

SEQ ID NO: 318105 - DNA, 15 bp, Homo sapiens
atttatccctcagtt

SEQ ID NO: 318106 - DNA, 15 bp, Homo sapiens
catttatccctcagt

SEQ ID NO: 318107 - DNA, 15 bp, Homo sapiens
tcatttatccctcag

SEQ ID NO: 318108 - DNA, 15 bp, Homo sapiens
gtcatttatccctca

SEQ ID NO: 318109 - DNA, 15 bp, Homo sapiens
agtcatttatccctc

SEQ ID NO: 318110 - DNA, 15 bp, Homo sapiens
gagtcatttatccct

SEQ ID NO: 318111 - DNA, 15 bp, Homo sapiens
agagtcatttatccc

SEQ ID NO: 318112 - DNA, 15 bp, Homo sapiens
cagagtcatttatcc

SEQ ID NO: 318113 - DNA, 15 bp, Homo sapiens
tcagagtcatttatc

SEQ ID NO: 318114 - DNA, 15 bp, Homo sapiens
ttcagagtcatttat

SEQ ID NO: 318115 - DNA, 15 bp, Homo sapiens
tttcagagtcattta

SEQ ID NO: 318116 - DNA, 15 bp, Homo sapiens
ttttcagagtcattt

SEQ ID NO: 318117 - DNA, 15 bp, Homo sapiens
cttttcagagtcatt

SEQ ID NO: 318118 - DNA, 15 bp, Homo sapiens
ccttttcagagtcat

SEQ ID NO: 318119 - DNA, 15 bp, Homo sapiens
tccttttcagagtca

SEQ ID NO: 318120 - DNA, 15 bp, Homo sapiens
ttccttttcagagtc

SEQ ID NO: 318121 - DNA, 15 bp, Homo sapiens
tttccttttcagagt

SEQ ID NO: 318122 - DNA, 15 bp, Homo sapiens
atttccttttcagag

SEQ ID NO: 318123 - DNA, 15 bp, Homo sapiens
catttccttttcaga

SEQ ID NO: 318124 - DNA, 15 bp, Homo sapiens
acatttccttttcag

SEQ ID NO: 318125 - DNA, 15 bp, Homo sapiens
tacatttccttttca

SEQ ID NO: 318126 - DNA, 15 bp, Homo sapiens
atacatttccttttc

SEQ ID NO: 318127 - DNA, 15 bp, Homo sapiens
aatacatttcctttt

SEQ ID NO: 318128 - DNA, 15 bp, Homo sapiens
aaatacatttccttt

SEQ ID NO: 318129 - DNA, 15 bp, Homo sapiens
gaaatacatttcctt

SEQ ID NO: 318130 - DNA, 15 bp, Homo sapiens
tgaaatacatttcct

SEQ ID NO: 318131 - DNA, 15 bp, Homo sapiens
ttgaaatacatttcc

SEQ ID NO: 318132 - DNA, 15 bp, Homo sapiens
attgaaatacatttc

SEQ ID NO: 318133 - DNA, 15 bp, Homo sapiens
cattgaaatacattt

SEQ ID NO: 318134 - DNA, 15 bp, Homo sapiens
ccattgaaatacatt

SEQ ID NO: 318135 - DNA, 15 bp, Homo sapiens
cccattgaaatacat

SEQ ID NO: 318136 - DNA, 15 bp, Homo sapiens
ccccattgaaataca

SEQ ID NO: 318137 - DNA, 15 bp, Homo sapiens
tccccattgaaatac

SEQ ID NO: 318138 - DNA, 15 bp, Homo sapiens
gtccccattgaaata

SEQ ID NO: 318139 - DNA, 15 bp, Homo sapiens
ggtccccattgaaat

SEQ ID NO: 318140 - DNA, 15 bp, Homo sapiens
tggtccccattgaaa

SEQ ID NO: 318141 - DNA, 15 bp, Homo sapiens
ttggtccccattgaa

SEQ ID NO: 318142 - DNA, 15 bp, Homo sapiens
attggtccccattga

SEQ ID NO: 318143 - DNA, 15 bp, Homo sapiens
gattggtccccattg

SEQ ID NO: 318144 - DNA, 15 bp, Homo sapiens
ggattggtccccatt

SEQ ID NO: 318145 - DNA, 15 bp, Homo sapiens
tggattggtccccat

SEQ ID NO: 318146 - DNA, 15 bp, Homo sapiens
atggattggtcccca

SEQ ID NO: 318147 - DNA, 15 bp, Homo sapiens
aatggattggtcccc

SEQ ID NO: 318148 - DNA, 15 bp, Homo sapiens
taatggattggtccc

SEQ ID NO: 318149 - DNA, 15 bp, Homo sapiens
gtaatggattggtcc

SEQ ID NO: 318150 - DNA, 15 bp, Homo sapiens
tgtaatggattggtc

SEQ ID NO: 318151 - DNA, 15 bp, Homo sapiens
gtgtaatggattggt

SEQ ID NO: 318152 - DNA, 15 bp, Homo sapiens
ggtgtaatggattgg

SEQ ID NO: 318153 - DNA, 15 bp, Homo sapiens
gggtgtaatggattg

SEQ ID NO: 318154 - DNA, 15 bp, Homo sapiens
cgggtgtaatggatt

SEQ ID NO: 318155 - DNA, 15 bp, Homo sapiens
tcgggtgtaatggat

SEQ ID NO: 318156 - DNA, 15 bp, Homo sapiens
ctcgggtgtaatgga

SEQ ID NO: 318157 - DNA, 15 bp, Homo sapiens
tctcgggtgtaatgg

SEQ ID NO: 318158 - DNA, 15 bp, Homo sapiens
ctctcgggtgtaatg

SEQ ID NO: 318159 - DNA, 15 bp, Homo sapiens
tctctcgggtgtaat

SEQ ID NO: 318160 - DNA, 15 bp, Homo sapiens
ctctctcgggtgtaa

SEQ ID NO: 318161 - DNA, 15 bp, Homo sapiens
tctctctcgggtgta

SEQ ID NO: 318162 - DNA, 15 bp, Homo sapiens
ctctctctcgggtgt

SEQ ID NO: 318163 - DNA, 15 bp, Homo sapiens
tctctctctcgggtg

SEQ ID NO: 318164 - DNA, 15 bp, Homo sapiens
ctctctctctcgggt

SEQ ID NO: 318165 - DNA, 15 bp, Homo sapiens
cctctctctctcggg

SEQ ID NO: 318166 - DNA, 15 bp, Homo sapiens
gcctctctctctcgg

SEQ ID NO: 318167 - DNA, 15 bp, Homo sapiens
ggcctctctctctcg

SEQ ID NO: 318168 - DNA, 15 bp, Homo sapiens
tggcctctctctctc

SEQ ID NO: 318169 - DNA, 15 bp, Homo sapiens
ttggcctctctctct

SEQ ID NO: 318170 - DNA, 15 bp, Homo sapiens
cttggcctctctctc

SEQ ID NO: 318171 - DNA, 15 bp, Homo sapiens
acttggcctctctct

SEQ ID NO: 318172 - DNA, 15 bp, Homo sapiens
cacttggcctctctc

SEQ ID NO: 318173 - DNA, 15 bp, Homo sapiens
gcacttggcctctct

SEQ ID NO: 318174 - DNA, 15 bp, Homo sapiens
tgcacttggcctctc

SEQ ID NO: 318175 - DNA, 15 bp, Homo sapiens
ctgcacttggcctct

SEQ ID NO: 318176 - DNA, 15 bp, Homo sapiens
cctgcacttggcctc

SEQ ID NO: 318177 - DNA, 15 bp, Homo sapiens
ccctgcacttggcct

SEQ ID NO: 318178 - DNA, 15 bp, Homo sapiens
tccctgcacttggcc

SEQ ID NO: 318179 - DNA, 15 bp, Homo sapiens
gtccctgcacttggc

SEQ ID NO: 318180 - DNA, 15 bp, Homo sapiens
agtccctgcacttgg

SEQ ID NO: 318181 - DNA, 15 bp, Homo sapiens
aagtccctgcacttg

SEQ ID NO: 318182 - DNA, 15 bp, Homo sapiens
gaagtccctgcactt

SEQ ID NO: 318183 - DNA, 15 bp, Homo sapiens
agaagtccctgcact

SEQ ID NO: 318184 - DNA, 15 bp, Homo sapiens
cagaagtccctgcac

SEQ ID NO: 318185 - DNA, 15 bp, Homo sapiens
ccagaagtccctgca

SEQ ID NO: 318186 - DNA, 15 bp, Homo sapiens
tccagaagtccctgc

SEQ ID NO: 318187 - DNA, 15 bp, Homo sapiens
ctccagaagtccctg

SEQ ID NO: 318188 - DNA, 15 bp, Homo sapiens
cctccagaagtccct

SEQ ID NO: 318189 - DNA, 15 bp, Homo sapiens
tcctccagaagtccc

SEQ ID NO: 318190 - DNA, 15 bp, Homo sapiens
ctcctccagaagtcc

SEQ ID NO: 318191 - DNA, 15 bp, Homo sapiens
tctcctccagaagtc

SEQ ID NO: 318192 - DNA, 15 bp, Homo sapiens
gtctcctccagaagt

SEQ ID NO: 318193 - DNA, 15 bp, Homo sapiens
ggtctcctccagaag

SEQ ID NO: 318194 - DNA, 15 bp, Homo sapiens
tggtctcctccagaa

SEQ ID NO: 318195 - DNA, 15 bp, Homo sapiens
ctggtctcctccaga

SEQ ID NO: 318196 - DNA, 15 bp, Homo sapiens
cctggtctcctccag

SEQ ID NO: 318197 - DNA, 15 bp, Homo sapiens
tcctggtctcctcca

SEQ ID NO: 318198 - DNA, 15 bp, Homo sapiens
ttcctggtctcctcc

SEQ ID NO: 318199 - DNA, 15 bp, Homo sapiens
attcctggtctcctc

SEQ ID NO: 318200 - DNA, 15 bp, Homo sapiens
cattcctggtctcct

SEQ ID NO: 318201 - DNA, 15 bp, Homo sapiens
tcattcctggtctcc

SEQ ID NO: 318202 - DNA, 15 bp, Homo sapiens
ctcattcctggtctc

SEQ ID NO: 318203 - DNA, 15 bp, Homo sapiens
actcattcctggtct

SEQ ID NO: 318204 - DNA, 15 bp, Homo sapiens
cactcattcctggtc

SEQ ID NO: 318205 - DNA, 15 bp, Homo sapiens
tcactcattcctggt

SEQ ID NO: 318206 - DNA, 15 bp, Homo sapiens
atcactcattcctgg

SEQ ID NO: 318207 - DNA, 15 bp, Homo sapiens
aatcactcattcctg

SEQ ID NO: 318208 - DNA, 15 bp, Homo sapiens
taatcactcattcct

SEQ ID NO: 318209 - DNA, 15 bp, Homo sapiens
ataatcactcattcc

SEQ ID NO: 318210 - DNA, 15 bp, Homo sapiens
cataatcactcattc

SEQ ID NO: 318211 - DNA, 15 bp, Homo sapiens
acataatcactcatt

SEQ ID NO: 318212 - DNA, 15 bp, Homo sapiens
tacataatcactcat

SEQ ID NO: 318213 - DNA, 15 bp, Homo sapiens
ctacataatcactca

SEQ ID NO: 318214 - DNA, 15 bp, Homo sapiens
gctacataatcactc

SEQ ID NO: 318215 - DNA, 15 bp, Homo sapiens
tgctacataatcact

SEQ ID NO: 318216 - DNA, 15 bp, Homo sapiens
atgctacataatcac

SEQ ID NO: 318217 - DNA, 15 bp, Homo sapiens
tatgctacataatca

SEQ ID NO: 318218 - DNA, 15 bp, Homo sapiens
atatgctacataatc

SEQ ID NO: 318219 - DNA, 15 bp, Homo sapiens
aatatgctacataat

SEQ ID NO: 318220 - DNA, 15 bp, Homo sapiens
gaatatgctacataa

SEQ ID NO: 318221 - DNA, 15 bp, Homo sapiens
agaatatgctacata

SEQ ID NO: 318222 - DNA, 15 bp, Homo sapiens
cagaatatgctacat

SEQ ID NO: 318223 - DNA, 15 bp, Homo sapiens
acagaatatgctaca

SEQ ID NO: 318224 - DNA, 15 bp, Homo sapiens
cacagaatatgctac

SEQ ID NO: 318225 - DNA, 15 bp, Homo sapiens
acacagaatatgcta

SEQ ID NO: 318226 - DNA, 15 bp, Homo sapiens
cacacagaatatgct

SEQ ID NO: 318227 - DNA, 15 bp, Homo sapiens
tcacacagaatatgc

SEQ ID NO: 318228 - DNA, 15 bp, Homo sapiens
ttcacacagaatatg

SEQ ID NO: 318229 - DNA, 15 bp, Homo sapiens
tttcacacagaatat

SEQ ID NO: 318230 - DNA, 15 bp, Homo sapiens
ctttcacacagaata

SEQ ID NO: 318231 - DNA, 15 bp, Homo sapiens
cctttcacacagaat

SEQ ID NO: 318232 - DNA, 15 bp, Homo sapiens
gcctttcacacagaa

SEQ ID NO: 318233 - DNA, 15 bp, Homo sapiens
tgcctttcacacaga

SEQ ID NO: 318234 - DNA, 15 bp, Homo sapiens
atgcctttcacacag

SEQ ID NO: 318235 - DNA, 15 bp, Homo sapiens
aatgcctttcacaca

SEQ ID NO: 318236 - DNA, 15 bp, Homo sapiens
aaatgcctttcacac

SEQ ID NO: 318237 - DNA, 15 bp, Homo sapiens
aaaatgcctttcaca

SEQ ID NO: 318238 - DNA, 15 bp, Homo sapiens
taaaatgcctttcac

SEQ ID NO: 318239 - DNA, 15 bp, Homo sapiens
ttaaaatgcctttca

SEQ ID NO: 318240 - DNA, 15 bp, Homo sapiens
tttaaaatgcctttc

SEQ ID NO: 318241 - DNA, 15 bp, Homo sapiens
ttttaaaatgccttt

SEQ ID NO: 318242 - DNA, 15 bp, Homo sapiens
gttttaaaatgcctt

SEQ ID NO: 318243 - DNA, 15 bp, Homo sapiens
tgttttaaaatgcct

SEQ ID NO: 318244 - DNA, 15 bp, Homo sapiens
gtgttttaaaatgcc

SEQ ID NO: 318245 - DNA, 15 bp, Homo sapiens
tgtgttttaaaatgc

SEQ ID NO: 318246 - DNA, 15 bp, Homo sapiens
gtgtgttttaaaatg

SEQ ID NO: 318247 - DNA, 15 bp, Homo sapiens
cgtgtgttttaaaat

SEQ ID NO: 318248 - DNA, 15 bp, Homo sapiens
acgtgtgttttaaaa

SEQ ID NO: 318249 - DNA, 15 bp, Homo sapiens
tacgtgtgttttaaa

SEQ ID NO: 318250 - DNA, 15 bp, Homo sapiens
ctacgtgtgttttaa

SEQ ID NO: 318251 - DNA, 15 bp, Homo sapiens
tctacgtgtgtttta

SEQ ID NO: 318252 - DNA, 15 bp, Homo sapiens
atctacgtgtgtttt

SEQ ID NO: 318253 - DNA, 15 bp, Homo sapiens
gatctacgtgtgttt

SEQ ID NO: 318254 - DNA, 15 bp, Homo sapiens
tgatctacgtgtgtt

SEQ ID NO: 318255 - DNA, 15 bp, Homo sapiens
ttgatctacgtgtgt

SEQ ID NO: 318256 - DNA, 15 bp, Homo sapiens
attgatctacgtgtg

SEQ ID NO: 318257 - DNA, 15 bp, Homo sapiens
aattgatctacgtgt

SEQ ID NO: 318258 - DNA, 15 bp, Homo sapiens
aaattgatctacgtg

SEQ ID NO: 318259 - DNA, 15 bp, Homo sapiens
taaattgatctacgt

SEQ ID NO: 318260 - DNA, 15 bp, Homo sapiens
ataaattgatctacg

SEQ ID NO: 318261 - DNA, 15 bp, Homo sapiens
aataaattgatctac

SEQ ID NO: 318262 - DNA, 15 bp, Homo sapiens
caataaattgatcta

SEQ ID NO: 318263 - DNA, 15 bp, Homo sapiens
acaataaattgatct

SEQ ID NO: 318264 - DNA, 15 bp, Homo sapiens
gacaataaattgatc

SEQ ID NO: 318265 - DNA, 15 bp, Homo sapiens
tgacaataaattgat

SEQ ID NO: 318266 - DNA, 15 bp, Homo sapiens
gtgacaataaattga

SEQ ID NO: 318267 - DNA, 15 bp, Homo sapiens
tgtgacaataaattg

SEQ ID NO: 318268 - DNA, 15 bp, Homo sapiens
ctgtgacaataaatt

SEQ ID NO: 318269 - DNA, 15 bp, Homo sapiens
gctgtgacaataaat

SEQ ID NO: 318270 - DNA, 15 bp, Homo sapiens
ggctgtgacaataaa

SEQ ID NO: 318271 - DNA, 15 bp, Homo sapiens
gggctgtgacaataa

SEQ ID NO: 318272 - DNA, 15 bp, Homo sapiens
ggggctgtgacaata

SEQ ID NO: 318273 - DNA, 15 bp, Homo sapiens
aggggctgtgacaat

SEQ ID NO: 318274 - DNA, 15 bp, Homo sapiens
caggggctgtgacaa

SEQ ID NO: 318275 - DNA, 15 bp, Homo sapiens
tcaggggctgtgaca

SEQ ID NO: 318276 - DNA, 15 bp, Homo sapiens
ctcaggggctgtgac

SEQ ID NO: 318277 - DNA, 15 bp, Homo sapiens
tctcaggggctgtga

SEQ ID NO: 318278 - DNA, 15 bp, Homo sapiens
ctctcaggggctgtg

SEQ ID NO: 318279 - DNA, 15 bp, Homo sapiens
cctctcaggggctgt

SEQ ID NO: 318280 - DNA, 15 bp, Homo sapiens
gcctctcaggggctg

SEQ ID NO: 318281 - DNA, 15 bp, Homo sapiens
tgcctctcaggggct

SEQ ID NO: 318282 - DNA, 15 bp, Homo sapiens
atgcctctcaggggc

SEQ ID NO: 318283 - DNA, 15 bp, Homo sapiens
tatgcctctcagggg

SEQ ID NO: 318284 - DNA, 15 bp, Homo sapiens
ttatgcctctcaggg

SEQ ID NO: 318285 - DNA, 15 bp, Homo sapiens
attatgcctctcagg

SEQ ID NO: 318286 - DNA, 15 bp, Homo sapiens
aattatgcctctcag

SEQ ID NO: 318287 - DNA, 15 bp, Homo sapiens
gaattatgcctctca

SEQ ID NO: 318288 - DNA, 15 bp, Homo sapiens
agaattatgcctctc

SEQ ID NO: 318289 - DNA, 15 bp, Homo sapiens
gagaattatgcctct

SEQ ID NO: 318290 - DNA, 15 bp, Homo sapiens
tgagaattatgcctc

SEQ ID NO: 318291 - DNA, 15 bp, Homo sapiens
atgagaattatgcct

SEQ ID NO: 318292 - DNA, 15 bp, Homo sapiens
gatgagaattatgcc

SEQ ID NO: 318293 - DNA, 15 bp, Homo sapiens
agatgagaattatgc

SEQ ID NO: 318294 - DNA, 15 bp, Homo sapiens
aagatgagaattatg

SEQ ID NO: 318295 - DNA, 15 bp, Homo sapiens
aaagatgagaattat

SEQ ID NO: 318296 - DNA, 15 bp, Homo sapiens
aaaagatgagaatta

SEQ ID NO: 318297 - DNA, 15 bp, Homo sapiens
aaaaagatgagaatt

SEQ ID NO: 318298 - DNA, 15 bp, Homo sapiens
aaaaaagatgagaat

SEQ ID NO: 318299 - DNA, 15 bp, Homo sapiens
gaaaaaagatgagaa

SEQ ID NO: 318300 - DNA, 15 bp, Homo sapiens
agaaaaaagatgaga

SEQ ID NO: 318301 - DNA, 15 bp, Homo sapiens
aagaaaaaagatgag

SEQ ID NO: 318302 - DNA, 15 bp, Homo sapiens
aaagaaaaaagatga

SEQ ID NO: 318303 - DNA, 15 bp, Homo sapiens
gaaagaaaaaagatg

SEQ ID NO: 318304 - DNA, 15 bp, Homo sapiens
ggaaagaaaaaagat

SEQ ID NO: 318305 - DNA, 15 bp, Homo sapiens
aggaaagaaaaaaga

SEQ ID NO: 318306 - DNA, 15 bp, Homo sapiens
aaggaaagaaaaaag

SEQ ID NO: 318307 - DNA, 15 bp, Homo sapiens
gaaggaaagaaaaaa

SEQ ID NO: 318308 - DNA, 15 bp, Homo sapiens
agaaggaaagaaaaa

SEQ ID NO: 318309 - DNA, 15 bp, Homo sapiens
aagaaggaaagaaaa

SEQ ID NO: 318310 - DNA, 15 bp, Homo sapiens
aaagaaggaaagaaa

SEQ ID NO: 318311 - DNA, 15 bp, Homo sapiens
gaaagaaggaaagaa

SEQ ID NO: 318312 - DNA, 15 bp, Homo sapiens
agaaagaaggaaaga

SEQ ID NO: 318313 - DNA, 15 bp, Homo sapiens
aagaaagaaggaaag

SEQ ID NO: 318314 - DNA, 15 bp, Homo sapiens
aaagaaagaaggaaa

SEQ ID NO: 318315 - DNA, 15 bp, Homo sapiens
gaaagaaagaaggaa

SEQ ID NO: 318316 - DNA, 15 bp, Homo sapiens
agaaagaaagaagga

SEQ ID NO: 318317 - DNA, 15 bp, Homo sapiens
aagaaagaaagaagg

SEQ ID NO: 318318 - DNA, 15 bp, Homo sapiens
aaagaaagaaagaag

SEQ ID NO: 318319 - DNA, 15 bp, Homo sapiens
tcatctcaaaaaaaa

SEQ ID NO: 318320 - DNA, 15 bp, Homo sapiens
ttcatctcaaaaaaa

SEQ ID NO: 318321 - DNA, 15 bp, Homo sapiens
cttcatctcaaaaaa

SEQ ID NO: 318322 - DNA, 15 bp, Homo sapiens
acttcatctcaaaaa

SEQ ID NO: 318323 - DNA, 15 bp, Homo sapiens
gacttcatctcaaaa

SEQ ID NO: 318324 - DNA, 15 bp, Homo sapiens
agacttcatctcaaa

SEQ ID NO: 318325 - DNA, 15 bp, Homo sapiens
aagacttcatctcaa

SEQ ID NO: 318326 - DNA, 15 bp, Homo sapiens
caagacttcatctca

SEQ ID NO: 318327 - DNA, 15 bp, Homo sapiens
gcaagacttcatctc

SEQ ID NO: 318328 - DNA, 15 bp, Homo sapiens
agcaagacttcatct

SEQ ID NO: 318329 - DNA, 15 bp, Homo sapiens
gagcaagacttcatc

SEQ ID NO: 318330 - DNA, 15 bp, Homo sapiens
agagcaagacttcat

SEQ ID NO: 318331 - DNA, 15 bp, Homo sapiens
cagagcaagacttca

SEQ ID NO: 318332 - DNA, 15 bp, Homo sapiens
acagagcaagacttc

SEQ ID NO: 318333 - DNA, 15 bp, Homo sapiens
gacagagcaagactt

SEQ ID NO: 318334 - DNA, 15 bp, Homo sapiens
acactccagcctggg

SEQ ID NO: 318335 - DNA, 15 bp, Homo sapiens
gtgccactacactcc

SEQ ID NO: 318336 - DNA, 15 bp, Homo sapiens
ggtgccactacactc

SEQ ID NO: 318337 - DNA, 15 bp, Homo sapiens
tggtgccactacact

SEQ ID NO: 318338 - DNA, 15 bp, Homo sapiens
atggtgccactacac

SEQ ID NO: 318339 - DNA, 15 bp, Homo sapiens
gatggtgccactaca

SEQ ID NO: 318340 - DNA, 15 bp, Homo sapiens
agatggtgccactac

SEQ ID NO: 318341 - DNA, 15 bp, Homo sapiens
gagatggtgccacta

SEQ ID NO: 318342 - DNA, 15 bp, Homo sapiens
ggagatggtgccact

SEQ ID NO: 318343 - DNA, 15 bp, Homo sapiens
cggagatggtgccac

SEQ ID NO: 318344 - DNA, 15 bp, Homo sapiens
gcggagatggtgcca

SEQ ID NO: 318345 - DNA, 15 bp, Homo sapiens
agcggagatggtgcc

SEQ ID NO: 318346 - DNA, 15 bp, Homo sapiens
gagcggagatggtgc

SEQ ID NO: 318347 - DNA, 15 bp, Homo sapiens
tgagcggagatggtg

SEQ ID NO: 318348 - DNA, 15 bp, Homo sapiens
gtgagcggagatggt

SEQ ID NO: 318349 - DNA, 15 bp, Homo sapiens
agtgagcggagatgg

SEQ ID NO: 318350 - DNA, 15 bp, Homo sapiens
cagtgagcggagatg

SEQ ID NO: 318351 - DNA, 15 bp, Homo sapiens
gcagtgagcggagat

SEQ ID NO: 318352 - DNA, 15 bp, Homo sapiens
tgcagtgagcggaga

SEQ ID NO: 318353 - DNA, 15 bp, Homo sapiens
ttgcagtgagcggag

SEQ ID NO: 318354 - DNA, 15 bp, Homo sapiens
gttgcagtgagcgga

SEQ ID NO: 318355 - DNA, 15 bp, Homo sapiens
ggttgcagtgagcgg

SEQ ID NO: 318356 - DNA, 15 bp, Homo sapiens
aggttgcagtgagcg

SEQ ID NO: 318357 - DNA, 15 bp, Homo sapiens
ggggaggctgaagca

SEQ ID NO: 318358 - DNA, 15 bp, Homo sapiens
tggggaggctgaagc

SEQ ID NO: 318359 - DNA, 15 bp, Homo sapiens
ctggggaggctgaag

SEQ ID NO: 318360 - DNA, 15 bp, Homo sapiens
actggggaggctgaa

SEQ ID NO: 318361 - DNA, 15 bp, Homo sapiens
tgcacctgtagtccc

SEQ ID NO: 318362 - DNA, 15 bp, Homo sapiens
ctgcacctgtagtcc

SEQ ID NO: 318363 - DNA, 15 bp, Homo sapiens
cctgcacctgtagtc

SEQ ID NO: 318364 - DNA, 15 bp, Homo sapiens
gcctgcacctgtagt

SEQ ID NO: 318365 - DNA, 15 bp, Homo sapiens
ggcctgcacctgtag

SEQ ID NO: 318366 - DNA, 15 bp, Homo sapiens
gtggtggcctgcacc

SEQ ID NO: 318367 - DNA, 15 bp, Homo sapiens
cgtggtggcctgcac

SEQ ID NO: 318368 - DNA, 15 bp, Homo sapiens
gcgtggtggcctgca

SEQ ID NO: 318369 - DNA, 15 bp, Homo sapiens
ggcgtggtggcctgc

SEQ ID NO: 318370 - DNA, 15 bp, Homo sapiens
aggcgtggtggcctg

SEQ ID NO: 318371 - DNA, 15 bp, Homo sapiens
caggcgtggtggcct

SEQ ID NO: 318372 - DNA, 15 bp, Homo sapiens
ccaggcgtggtggcc

SEQ ID NO: 318373 - DNA, 15 bp, Homo sapiens
tctaaaaaatacaaa

SEQ ID NO: 318374 - DNA, 15 bp, Homo sapiens
ttctaaaaaatacaa

SEQ ID NO: 318375 - DNA, 15 bp, Homo sapiens
cttctaaaaaataca

SEQ ID NO: 318376 - DNA, 15 bp, Homo sapiens
tcttctaaaaaatac

SEQ ID NO: 318377 - DNA, 15 bp, Homo sapiens
ctcttctaaaaaata

SEQ ID NO: 318378 - DNA, 15 bp, Homo sapiens
tctcttctaaaaaat

SEQ ID NO: 318379 - DNA, 15 bp, Homo sapiens
gtctcttctaaaaaa

SEQ ID NO: 318380 - DNA, 15 bp, Homo sapiens
cgtctcttctaaaaa

SEQ ID NO: 318381 - DNA, 15 bp, Homo sapiens
tcgtctcttctaaaa

SEQ ID NO: 318382 - DNA, 15 bp, Homo sapiens
ttcgtctcttctaaa

SEQ ID NO: 318383 - DNA, 15 bp, Homo sapiens
cttcgtctcttctaa

SEQ ID NO: 318384 - DNA, 15 bp, Homo sapiens
acttcgtctcttcta

SEQ ID NO: 318385 - DNA, 15 bp, Homo sapiens
aacttcgtctcttct

SEQ ID NO: 318386 - DNA, 15 bp, Homo sapiens
aaacttcgtctcttc

SEQ ID NO: 318387 - DNA, 15 bp, Homo sapiens
aaaacttcgtctctt

SEQ ID NO: 318388 - DNA, 15 bp, Homo sapiens
caaaacttcgtctct

SEQ ID NO: 318389 - DNA, 15 bp, Homo sapiens
gcaaaacttcgtctc

SEQ ID NO: 318390 - DNA, 15 bp, Homo sapiens
ggcaaaacttcgtct

SEQ ID NO: 318391 - DNA, 15 bp, Homo sapiens
tggcaaaacttcgtc

SEQ ID NO: 318392 - DNA, 15 bp, Homo sapiens
atggcaaaacttcgt

SEQ ID NO: 318393 - DNA, 15 bp, Homo sapiens
catggcaaaacttcg

SEQ ID NO: 318394 - DNA, 15 bp, Homo sapiens
acatggcaaaacttc

SEQ ID NO: 318395 - DNA, 15 bp, Homo sapiens
aacatggcaaaactt

SEQ ID NO: 318396 - DNA, 15 bp, Homo sapiens
tcaacatggcaaaac

SEQ ID NO: 318397 - DNA, 15 bp, Homo sapiens
gtcaacatggcaaaa

SEQ ID NO: 318398 - DNA, 15 bp, Homo sapiens
agtcaacatggcaaa

SEQ ID NO: 318399 - DNA, 15 bp, Homo sapiens
tagtcaacatggcaa

SEQ ID NO: 318400 - DNA, 15 bp, Homo sapiens
ctagtcaacatggca

SEQ ID NO: 318401 - DNA, 15 bp, Homo sapiens
cctagtcaacatggc

SEQ ID NO: 318402 - DNA, 15 bp, Homo sapiens
gcctagtcaacatgg

SEQ ID NO: 318403 - DNA, 15 bp, Homo sapiens
agcctagtcaacatg

SEQ ID NO: 318404 - DNA, 15 bp, Homo sapiens
cagcctagtcaacat

SEQ ID NO: 318405 - DNA, 15 bp, Homo sapiens
ccagcctagtcaaca

SEQ ID NO: 318406 - DNA, 15 bp, Homo sapiens
accagcctagtcaac

SEQ ID NO: 318407 - DNA, 15 bp, Homo sapiens
gaccagcctagtcaa

SEQ ID NO: 318408 - DNA, 15 bp, Homo sapiens
agaccagcctagtca

SEQ ID NO: 318409 - DNA, 15 bp, Homo sapiens
gagaccagcctagtc

SEQ ID NO: 318410 - DNA, 15 bp, Homo sapiens
tgagaccagcctagt

SEQ ID NO: 318411 - DNA, 15 bp, Homo sapiens
ttgagaccagcctag

SEQ ID NO: 318412 - DNA, 15 bp, Homo sapiens
tttgagaccagccta

SEQ ID NO: 318413 - DNA, 15 bp, Homo sapiens
gccaggagtttgaga

SEQ ID NO: 318414 - DNA, 15 bp, Homo sapiens
ggccaggagtttgag

SEQ ID NO: 318415 - DNA, 15 bp, Homo sapiens
gttgaggccaggagt

SEQ ID NO: 318416 - DNA, 15 bp, Homo sapiens
ggttgaggccaggag

SEQ ID NO: 318417 - DNA, 15 bp, Homo sapiens
aggttgaggccagga

SEQ ID NO: 318418 - DNA, 15 bp, Homo sapiens
taggttgaggccagg

SEQ ID NO: 318419 - DNA, 15 bp, Homo sapiens
ataggttgaggccag

SEQ ID NO: 318420 - DNA, 15 bp, Homo sapiens
gataggttgaggcca

SEQ ID NO: 318421 - DNA, 15 bp, Homo sapiens
agataggttgaggcc

SEQ ID NO: 318422 - DNA, 15 bp, Homo sapiens
cagataggttgaggc

SEQ ID NO: 318423 - DNA, 15 bp, Homo sapiens
gcagataggttgagg

SEQ ID NO: 318424 - DNA, 15 bp, Homo sapiens
ggcagataggttgag

SEQ ID NO: 318425 - DNA, 15 bp, Homo sapiens
aggcagataggttga

SEQ ID NO: 318426 - DNA, 15 bp, Homo sapiens
caggcagataggttg

SEQ ID NO: 318427 - DNA, 15 bp, Homo sapiens
gcaggcagataggtt

SEQ ID NO: 318428 - DNA, 15 bp, Homo sapiens
ggcaggcagataggt

SEQ ID NO: 318429 - DNA, 15 bp, Homo sapiens
aggcaggcagatagg

SEQ ID NO: 318430 - DNA, 15 bp, Homo sapiens
aaggcaggcagatag

SEQ ID NO: 318431 - DNA, 15 bp, Homo sapiens
caaggcaggcagata

SEQ ID NO: 318432 - DNA, 15 bp, Homo sapiens
ccaaggcaggcagat

SEQ ID NO: 318433 - DNA, 15 bp, Homo sapiens
gccaaggcaggcaga

SEQ ID NO: 318434 - DNA, 15 bp, Homo sapiens
ggccaaggcaggcag

SEQ ID NO: 318435 - DNA, 15 bp, Homo sapiens
aggccaaggcaggca

SEQ ID NO: 318436 - DNA, 15 bp, Homo sapiens
tgggcgcggtggctc

SEQ ID NO: 318437 - DNA, 15 bp, Homo sapiens
agctgggcgcggtgg

SEQ ID NO: 318438 - DNA, 15 bp, Homo sapiens
aagctgggcgcggtg

SEQ ID NO: 318439 - DNA, 15 bp, Homo sapiens
gaagctgggcgcggt

SEQ ID NO: 318440 - DNA, 15 bp, Homo sapiens
agaagctgggcgcgg

SEQ ID NO: 318441 - DNA, 15 bp, Homo sapiens
gagaagctgggcgcg

SEQ ID NO: 318442 - DNA, 15 bp, Homo sapiens
tgagaagctgggcgc

SEQ ID NO: 318443 - DNA, 15 bp, Homo sapiens
atgagaagctgggcg

SEQ ID NO: 318444 - DNA, 15 bp, Homo sapiens
gatgagaagctgggc

SEQ ID NO: 318445 - DNA, 15 bp, Homo sapiens
agatgagaagctggg

SEQ ID NO: 318446 - DNA, 15 bp, Homo sapiens
aagatgagaagctgg

SEQ ID NO: 318447 - DNA, 15 bp, Homo sapiens
aaagatgagaagctg

SEQ ID NO: 318448 - DNA, 15 bp, Homo sapiens
taaagatgagaagct

SEQ ID NO: 318449 - DNA, 15 bp, Homo sapiens
ataaagatgagaagc

SEQ ID NO: 318450 - DNA, 15 bp, Homo sapiens
aataaagatgagaag

SEQ ID NO: 318451 - DNA, 15 bp, Homo sapiens
aaataaagatgagaa

SEQ ID NO: 318452 - DNA, 15 bp, Homo sapiens
aaaataaagatgaga

SEQ ID NO: 318453 - DNA, 15 bp, Homo sapiens
aaaaataaagatgag

SEQ ID NO: 318454 - DNA, 15 bp, Homo sapiens
aaaaaataaagatga

SEQ ID NO: 318455 - DNA, 15 bp, Homo sapiens
taaaaaataaagatg

SEQ ID NO: 318456 - DNA, 15 bp, Homo sapiens
gtaaaaaataaagat

SEQ ID NO: 318457 - DNA, 15 bp, Homo sapiens
tgtaaaaaataaaga

SEQ ID NO: 318458 - DNA, 15 bp, Homo sapiens
atgtaaaaaataaag

SEQ ID NO: 318459 - DNA, 15 bp, Homo sapiens
catgtaaaaaataaa

SEQ ID NO: 318460 - DNA, 15 bp, Homo sapiens
gcatgtaaaaaataa

SEQ ID NO: 318461 - DNA, 15 bp, Homo sapiens
tgcatgtaaaaaata

SEQ ID NO: 318462 - DNA, 15 bp, Homo sapiens
ctgcatgtaaaaaat

SEQ ID NO: 318463 - DNA, 15 bp, Homo sapiens
actgcatgtaaaaaa

SEQ ID NO: 318464 - DNA, 15 bp, Homo sapiens
gactgcatgtaaaaa

SEQ ID NO: 318465 - DNA, 15 bp, Homo sapiens
tgactgcatgtaaaa

SEQ ID NO: 318466 - DNA, 15 bp, Homo sapiens
atgactgcatgtaaa

SEQ ID NO: 318467 - DNA, 15 bp, Homo sapiens
tatgactgcatgtaa

SEQ ID NO: 318468 - DNA, 15 bp, Homo sapiens
ctatgactgcatgta

SEQ ID NO: 318469 - DNA, 15 bp, Homo sapiens
tctatgactgcatgt

SEQ ID NO: 318470 - DNA, 15 bp, Homo sapiens
gtctatgactgcatg

SEQ ID NO: 318471 - DNA, 15 bp, Homo sapiens
tgtctatgactgcat

SEQ ID NO: 318472 - DNA, 15 bp, Homo sapiens
atgtctatgactgca

SEQ ID NO: 318473 - DNA, 15 bp, Homo sapiens
aatgtctatgactgc

SEQ ID NO: 318474 - DNA, 15 bp, Homo sapiens
gaatgtctatgactg

SEQ ID NO: 318475 - DNA, 15 bp, Homo sapiens
tgaatgtctatgact

SEQ ID NO: 318476 - DNA, 15 bp, Homo sapiens
ctgaatgtctatgac

SEQ ID NO: 318477 - DNA, 15 bp, Homo sapiens
cctgaatgtctatga

SEQ ID NO: 318478 - DNA, 15 bp, Homo sapiens
acctgaatgtctatg

SEQ ID NO: 318479 - DNA, 15 bp, Homo sapiens
aacctgaatgtctat

SEQ ID NO: 318480 - DNA, 15 bp, Homo sapiens
aaacctgaatgtcta

SEQ ID NO: 318481 - DNA, 15 bp, Homo sapiens
gaaacctgaatgtct

SEQ ID NO: 318482 - DNA, 15 bp, Homo sapiens
tgaaacctgaatgtc

SEQ ID NO: 318483 - DNA, 15 bp, Homo sapiens
atgaaacctgaatgt

SEQ ID NO: 318484 - DNA, 15 bp, Homo sapiens
tatgaaacctgaatg

SEQ ID NO: 318485 - DNA, 15 bp, Homo sapiens
atatgaaacctgaat

SEQ ID NO: 318486 - DNA, 15 bp, Homo sapiens
tatatgaaacctgaa

SEQ ID NO: 318487 - DNA, 15 bp, Homo sapiens
ttatatgaaacctga

SEQ ID NO: 318488 - DNA, 15 bp, Homo sapiens
cttatatgaaacctg

SEQ ID NO: 318489 - DNA, 15 bp, Homo sapiens
gcttatatgaaacct

SEQ ID NO: 318490 - DNA, 15 bp, Homo sapiens
tgcttatatgaaacc

SEQ ID NO: 318491 - DNA, 15 bp, Homo sapiens
ctgcttatatgaaac

SEQ ID NO: 318492 - DNA, 15 bp, Homo sapiens
gctgcttatatgaaa

SEQ ID NO: 318493 - DNA, 15 bp, Homo sapiens
ggctgcttatatgaa

SEQ ID NO: 318494 - DNA, 15 bp, Homo sapiens
tggctgcttatatga

SEQ ID NO: 318495 - DNA, 15 bp, Homo sapiens
ctggctgcttatatg

SEQ ID NO: 318496 - DNA, 15 bp, Homo sapiens
cctggctgcttatat

SEQ ID NO: 318497 - DNA, 15 bp, Homo sapiens
ccctggctgcttata

SEQ ID NO: 318498 - DNA, 15 bp, Homo sapiens
accctggctgcttat

SEQ ID NO: 318499 - DNA, 15 bp, Homo sapiens
gaccctggctgctta

SEQ ID NO: 318500 - DNA, 15 bp, Homo sapiens
agaccctggctgctt

SEQ ID NO: 318501 - DNA, 15 bp, Homo sapiens
gagaccctggctgct

SEQ ID NO: 318502 - DNA, 15 bp, Homo sapiens
agagaccctggctgc

SEQ ID NO: 318503 - DNA, 15 bp, Homo sapiens
gagagaccctggctg

SEQ ID NO: 318504 - DNA, 15 bp, Homo sapiens
tgagagaccctggct

SEQ ID NO: 318505 - DNA, 15 bp, Homo sapiens
gcactgagagaccct

SEQ ID NO: 318506 - DNA, 15 bp, Homo sapiens
tgcactgagagaccc

SEQ ID NO: 318507 - DNA, 15 bp, Homo sapiens
atgcactgagagacc

SEQ ID NO: 318508 - DNA, 15 bp, Homo sapiens
gatgcactgagagac

SEQ ID NO: 318509 - DNA, 15 bp, Homo sapiens
tgatgcactgagaga

SEQ ID NO: 318510 - DNA, 15 bp, Homo sapiens
ctgatgcactgagag

SEQ ID NO: 318511 - DNA, 15 bp, Homo sapiens
cctgatgcactgaga

SEQ ID NO: 318512 - DNA, 15 bp, Homo sapiens
tcctgatgcactgag

SEQ ID NO: 318513 - DNA, 15 bp, Homo sapiens
ctcctgatgcactga

SEQ ID NO: 318514 - DNA, 15 bp, Homo sapiens
gctcctgatgcactg

SEQ ID NO: 318515 - DNA, 15 bp, Homo sapiens
tgctcctgatgcact

SEQ ID NO: 318516 - DNA, 15 bp, Homo sapiens
ctgctcctgatgcac

SEQ ID NO: 318517 - DNA, 15 bp, Homo sapiens
tctgctcctgatgca

SEQ ID NO: 318518 - DNA, 15 bp, Homo sapiens
ctctgctcctgatgc

SEQ ID NO: 318519 - DNA, 15 bp, Homo sapiens
gctctgctcctgatg

SEQ ID NO: 318520 - DNA, 15 bp, Homo sapiens
ggctctgctcctgat

SEQ ID NO: 318521 - DNA, 15 bp, Homo sapiens
tggctctgctcctga

SEQ ID NO: 318522 - DNA, 15 bp, Homo sapiens
ctggctctgctcctg

SEQ ID NO: 318523 - DNA, 15 bp, Homo sapiens
cctggctctgctcct

SEQ ID NO: 318524 - DNA, 15 bp, Homo sapiens
ccctggctctgctcc

SEQ ID NO: 318525 - DNA, 15 bp, Homo sapiens
accctggctctgctc

SEQ ID NO: 318526 - DNA, 15 bp, Homo sapiens
gaccctggctctgct

SEQ ID NO: 318527 - DNA, 15 bp, Homo sapiens
tgaccctggctctgc

SEQ ID NO: 318528 - DNA, 15 bp, Homo sapiens
ttgaccctggctctg

SEQ ID NO: 318529 - DNA, 15 bp, Homo sapiens
tttgaccctggctct

SEQ ID NO: 318530 - DNA, 15 bp, Homo sapiens
ttttgaccctggctc

SEQ ID NO: 318531 - DNA, 15 bp, Homo sapiens
gttttgaccctggct

SEQ ID NO: 318532 - DNA, 15 bp, Homo sapiens
agttttgaccctggc

SEQ ID NO: 318533 - DNA, 15 bp, Homo sapiens
aagttttgaccctgg

SEQ ID NO: 318534 - DNA, 15 bp, Homo sapiens
taagttttgaccctg

SEQ ID NO: 318535 - DNA, 15 bp, Homo sapiens
gtaagttttgaccct

SEQ ID NO: 318536 - DNA, 15 bp, Homo sapiens
tgtaagttttgaccc

SEQ ID NO: 318537 - DNA, 15 bp, Homo sapiens
atgtaagttttgacc

SEQ ID NO: 318538 - DNA, 15 bp, Homo sapiens
gatgtaagttttgac

SEQ ID NO: 318539 - DNA, 15 bp, Homo sapiens
ggatgtaagttttga

SEQ ID NO: 318540 - DNA, 15 bp, Homo sapiens
tggatgtaagttttg

SEQ ID NO: 318541 - DNA, 15 bp, Homo sapiens
atggatgtaagtttt

SEQ ID NO: 318542 - DNA, 15 bp, Homo sapiens
aatggatgtaagttt

SEQ ID NO: 318543 - DNA, 15 bp, Homo sapiens
aaatggatgtaagtt

SEQ ID NO: 318544 - DNA, 15 bp, Homo sapiens
caaatggatgtaagt

SEQ ID NO: 318545 - DNA, 15 bp, Homo sapiens
tcaaatggatgtaag

SEQ ID NO: 318546 - DNA, 15 bp, Homo sapiens
ttcaaatggatgtaa

SEQ ID NO: 318547 - DNA, 15 bp, Homo sapiens
gttcaaatggatgta

SEQ ID NO: 318548 - DNA, 15 bp, Homo sapiens
ggttcaaatggatgt

SEQ ID NO: 318549 - DNA, 15 bp, Homo sapiens
gggttcaaatggatg

SEQ ID NO: 318550 - DNA, 15 bp, Homo sapiens
tgggttcaaatggat

SEQ ID NO: 318551 - DNA, 15 bp, Homo sapiens
ttgggttcaaatgga

SEQ ID NO: 318552 - DNA, 15 bp, Homo sapiens
cttgggttcaaatgg

SEQ ID NO: 318553 - DNA, 15 bp, Homo sapiens
ccttgggttcaaatg

SEQ ID NO: 318554 - DNA, 15 bp, Homo sapiens
gccttgggttcaaat

SEQ ID NO: 318555 - DNA, 15 bp, Homo sapiens
tgccttgggttcaaa

SEQ ID NO: 318556 - DNA, 15 bp, Homo sapiens
gtgccttgggttcaa

SEQ ID NO: 318557 - DNA, 15 bp, Homo sapiens
tgtgccttgggttca

SEQ ID NO: 318558 - DNA, 15 bp, Homo sapiens
ctgtgccttgggttc

SEQ ID NO: 318559 - DNA, 15 bp, Homo sapiens
actgtgccttgggtt

SEQ ID NO: 318560 - DNA, 15 bp, Homo sapiens
aactgtgccttgggt

SEQ ID NO: 318561 - DNA, 15 bp, Homo sapiens
aaactgtgccttggg

SEQ ID NO: 318562 - DNA, 15 bp, Homo sapiens
aaaactgtgccttgg

SEQ ID NO: 318563 - DNA, 15 bp, Homo sapiens
aaaaactgtgccttg

SEQ ID NO: 318564 - DNA, 15 bp, Homo sapiens
aaaaaactgtgcctt

SEQ ID NO: 318565 - DNA, 15 bp, Homo sapiens
gaaaaaactgtgcct

SEQ ID NO: 318566 - DNA, 15 bp, Homo sapiens
agaaaaaactgtgcc

SEQ ID NO: 318567 - DNA, 15 bp, Homo sapiens
aagaaaaaactgtgc

SEQ ID NO: 318568 - DNA, 15 bp, Homo sapiens
taagaaaaaactgtg

SEQ ID NO: 318569 - DNA, 15 bp, Homo sapiens
gtaagaaaaaactgt

SEQ ID NO: 318570 - DNA, 15 bp, Homo sapiens
agtaagaaaaaactg

SEQ ID NO: 318571 - DNA, 15 bp, Homo sapiens
cagtaagaaaaaact

SEQ ID NO: 318572 - DNA, 15 bp, Homo sapiens
ccagtaagaaaaaac

SEQ ID NO: 318573 - DNA, 15 bp, Homo sapiens
cccagtaagaaaaaa

SEQ ID NO: 318574 - DNA, 15 bp, Homo sapiens
acccagtaagaaaaa

SEQ ID NO: 318575 - DNA, 15 bp, Homo sapiens
tacccagtaagaaaa

SEQ ID NO: 318576 - DNA, 15 bp, Homo sapiens
ttacccagtaagaaa

SEQ ID NO: 318577 - DNA, 15 bp, Homo sapiens
attacccagtaagaa

SEQ ID NO: 318578 - DNA, 15 bp, Homo sapiens
cattacccagtaaga

SEQ ID NO: 318579 - DNA, 15 bp, Homo sapiens
gcattacccagtaag

SEQ ID NO: 318580 - DNA, 15 bp, Homo sapiens
agcattacccagtaa

SEQ ID NO: 318581 - DNA, 15 bp, Homo sapiens
cagcattacccagta

SEQ ID NO: 318582 - DNA, 15 bp, Homo sapiens
gcagcattacccagt

SEQ ID NO: 318583 - DNA, 15 bp, Homo sapiens
agcagcattacccag

SEQ ID NO: 318584 - DNA, 15 bp, Homo sapiens
cagcagcattaccca

SEQ ID NO: 318585 - DNA, 15 bp, Homo sapiens
acagcagcattaccc

SEQ ID NO: 318586 - DNA, 15 bp, Homo sapiens
gacagcagcattacc

SEQ ID NO: 318587 - DNA, 15 bp, Homo sapiens
agacagcagcattac

SEQ ID NO: 318588 - DNA, 15 bp, Homo sapiens
aagacagcagcatta

SEQ ID NO: 318589 - DNA, 15 bp, Homo sapiens
taagacagcagcatt

SEQ ID NO: 318590 - DNA, 15 bp, Homo sapiens
ataagacagcagcat

SEQ ID NO: 318591 - DNA, 15 bp, Homo sapiens
cataagacagcagca

SEQ ID NO: 318592 - DNA, 15 bp, Homo sapiens
ccataagacagcagc

SEQ ID NO: 318593 - DNA, 15 bp, Homo sapiens
cccataagacagcag

SEQ ID NO: 318594 - DNA, 15 bp, Homo sapiens
ccccataagacagca

SEQ ID NO: 318595 - DNA, 15 bp, Homo sapiens
cccccataagacagc

SEQ ID NO: 318596 - DNA, 15 bp, Homo sapiens
tcccccataagacag

SEQ ID NO: 318597 - DNA, 15 bp, Homo sapiens
ttcccccataagaca

SEQ ID NO: 318598 - DNA, 15 bp, Homo sapiens
attcccccataagac

SEQ ID NO: 318599 - DNA, 15 bp, Homo sapiens
aattcccccataaga

SEQ ID NO: 318600 - DNA, 15 bp, Homo sapiens
aaattcccccataag

SEQ ID NO: 318601 - DNA, 15 bp, Homo sapiens
aaaattcccccataa

SEQ ID NO: 318602 - DNA, 15 bp, Homo sapiens
taaaattcccccata

SEQ ID NO: 318603 - DNA, 15 bp, Homo sapiens
ctaaaattcccccat

SEQ ID NO: 318604 - DNA, 15 bp, Homo sapiens
cctaaaattccccca

SEQ ID NO: 318605 - DNA, 15 bp, Homo sapiens
gcctaaaattccccc

SEQ ID NO: 318606 - DNA, 15 bp, Homo sapiens
tgcctaaaattcccc

SEQ ID NO: 318607 - DNA, 15 bp, Homo sapiens
atgcctaaaattccc

SEQ ID NO: 318608 - DNA, 15 bp, Homo sapiens
gatgcctaaaattcc

SEQ ID NO: 318609 - DNA, 15 bp, Homo sapiens
tgatgcctaaaattc

SEQ ID NO: 318610 - DNA, 15 bp, Homo sapiens
ttgatgcctaaaatt

SEQ ID NO: 318611 - DNA, 15 bp, Homo sapiens
attgatgcctaaaat

SEQ ID NO: 318612 - DNA, 15 bp, Homo sapiens
tattgatgcctaaaa

SEQ ID NO: 318613 - DNA, 15 bp, Homo sapiens
ttattgatgcctaaa

SEQ ID NO: 318614 - DNA, 15 bp, Homo sapiens
tttattgatgcctaa

SEQ ID NO: 318615 - DNA, 15 bp, Homo sapiens
gtttattgatgccta

SEQ ID NO: 318616 - DNA, 15 bp, Homo sapiens
tgtttattgatgcct

SEQ ID NO: 318617 - DNA, 15 bp, Homo sapiens
ttgtttattgatgcc

SEQ ID NO: 318618 - DNA, 15 bp, Homo sapiens
cttgtttattgatgc

SEQ ID NO: 318619 - DNA, 15 bp, Homo sapiens
ccttgtttattgatg

SEQ ID NO: 318620 - DNA, 15 bp, Homo sapiens
tccttgtttattgat

SEQ ID NO: 318621 - DNA, 15 bp, Homo sapiens
ttccttgtttattga

SEQ ID NO: 318622 - DNA, 15 bp, Homo sapiens
cttccttgtttattg

SEQ ID NO: 318623 - DNA, 15 bp, Homo sapiens
tcttccttgtttatt

SEQ ID NO: 318624 - DNA, 15 bp, Homo sapiens
ctcttccttgtttat

SEQ ID NO: 318625 - DNA, 15 bp, Homo sapiens
tctcttccttgttta

SEQ ID NO: 318626 - DNA, 15 bp, Homo sapiens
ttctcttccttgttt

SEQ ID NO: 318627 - DNA, 15 bp, Homo sapiens
cttctcttccttgtt

SEQ ID NO: 318628 - DNA, 15 bp, Homo sapiens
tcttctcttccttgt

SEQ ID NO: 318629 - DNA, 15 bp, Homo sapiens
ttcttctcttccttg

SEQ ID NO: 318630 - DNA, 15 bp, Homo sapiens
cttcttctcttcctt

SEQ ID NO: 318631 - DNA, 15 bp, Homo sapiens
ccttcttctcttcct

SEQ ID NO: 318632 - DNA, 15 bp, Homo sapiens
gccttcttctcttcc

SEQ ID NO: 318633 - DNA, 15 bp, Homo sapiens
agccttcttctcttc

SEQ ID NO: 318634 - DNA, 15 bp, Homo sapiens
tagccttcttctctt

SEQ ID NO: 318635 - DNA, 15 bp, Homo sapiens
ttagccttcttctct

SEQ ID NO: 318636 - DNA, 15 bp, Homo sapiens
attagccttcttctc

SEQ ID NO: 318637 - DNA, 15 bp, Homo sapiens
aattagccttcttct

SEQ ID NO: 318638 - DNA, 15 bp, Homo sapiens
aaattagccttcttc

SEQ ID NO: 318639 - DNA, 15 bp, Homo sapiens
gaaattagccttctt

SEQ ID NO: 318640 - DNA, 15 bp, Homo sapiens
agaaattagccttct

SEQ ID NO: 318641 - DNA, 15 bp, Homo sapiens
aagaaattagccttc

SEQ ID NO: 318642 - DNA, 15 bp, Homo sapiens
aaagaaattagcctt

SEQ ID NO: 318643 - DNA, 15 bp, Homo sapiens
aaaagaaattagcct

SEQ ID NO: 318644 - DNA, 15 bp, Homo sapiens
caaaagaaattagcc

SEQ ID NO: 318645 - DNA, 15 bp, Homo sapiens
ccaaaagaaattagc

SEQ ID NO: 318646 - DNA, 15 bp, Homo sapiens
cccaaaagaaattag

SEQ ID NO: 318647 - DNA, 15 bp, Homo sapiens
ccccaaaagaaatta

SEQ ID NO: 318648 - DNA, 15 bp, Homo sapiens
cccccaaaagaaatt

SEQ ID NO: 318649 - DNA, 15 bp, Homo sapiens
gcccccaaaagaaat

SEQ ID NO: 318650 - DNA, 15 bp, Homo sapiens
agcccccaaaagaaa

SEQ ID NO: 318651 - DNA, 15 bp, Homo sapiens
cagcccccaaaagaa

SEQ ID NO: 318652 - DNA, 15 bp, Homo sapiens
ccagcccccaaaaga

SEQ ID NO: 318653 - DNA, 15 bp, Homo sapiens
accagcccccaaaag

SEQ ID NO: 318654 - DNA, 15 bp, Homo sapiens
caccagcccccaaaa

SEQ ID NO: 318655 - DNA, 15 bp, Homo sapiens
ccaccagcccccaaa

SEQ ID NO: 318656 - DNA, 15 bp, Homo sapiens
tccaccagcccccaa

SEQ ID NO: 318657 - DNA, 15 bp, Homo sapiens
atccaccagccccca

SEQ ID NO: 318658 - DNA, 15 bp, Homo sapiens
gatccaccagccccc

SEQ ID NO: 318659 - DNA, 15 bp, Homo sapiens
cgatccaccagcccc

SEQ ID NO: 318660 - DNA, 15 bp, Homo sapiens
acgatccaccagccc

SEQ ID NO: 318661 - DNA, 15 bp, Homo sapiens
gacgatccaccagcc

SEQ ID NO: 318662 - DNA, 15 bp, Homo sapiens
ggacgatccaccagc

SEQ ID NO: 318663 - DNA, 15 bp, Homo sapiens
gggacgatccaccag

SEQ ID NO: 318664 - DNA, 15 bp, Homo sapiens
ggggacgatccacca

SEQ ID NO: 318665 - DNA, 15 bp, Homo sapiens
aggggacgatccacc

SEQ ID NO: 318666 - DNA, 15 bp, Homo sapiens
taggggacgatccac

SEQ ID NO: 318667 - DNA, 15 bp, Homo sapiens
ttaggggacgatcca

SEQ ID NO: 318668 - DNA, 15 bp, Homo sapiens
tttaggggacgatcc

SEQ ID NO: 318669 - DNA, 15 bp, Homo sapiens
ttttaggggacgatc

SEQ ID NO: 318670 - DNA, 15 bp, Homo sapiens
attttaggggacgat

SEQ ID NO: 318671 - DNA, 15 bp, Homo sapiens
aattttaggggacga

SEQ ID NO: 318672 - DNA, 15 bp, Homo sapiens
taattttaggggacg

SEQ ID NO: 318673 - DNA, 15 bp, Homo sapiens
ataattttaggggac

SEQ ID NO: 318674 - DNA, 15 bp, Homo sapiens
cataattttagggga

SEQ ID NO: 318675 - DNA, 15 bp, Homo sapiens
acataattttagggg

SEQ ID NO: 318676 - DNA, 15 bp, Homo sapiens
tacataattttaggg

SEQ ID NO: 318677 - DNA, 15 bp, Homo sapiens
ctacataattttagg

SEQ ID NO: 318678 - DNA, 15 bp, Homo sapiens
tctacataattttag

SEQ ID NO: 318679 - DNA, 15 bp, Homo sapiens
atctacataatttta

SEQ ID NO: 318680 - DNA, 15 bp, Homo sapiens
tatctacataatttt

SEQ ID NO: 318681 - DNA, 15 bp, Homo sapiens
ctatctacataattt

SEQ ID NO: 318682 - DNA, 15 bp, Homo sapiens
actatctacataatt

SEQ ID NO: 318683 - DNA, 15 bp, Homo sapiens
gactatctacataat

SEQ ID NO: 318684 - DNA, 15 bp, Homo sapiens
tgactatctacataa

SEQ ID NO: 318685 - DNA, 15 bp, Homo sapiens
atgactatctacata

SEQ ID NO: 318686 - DNA, 15 bp, Homo sapiens
gatgactatctacat

SEQ ID NO: 318687 - DNA, 15 bp, Homo sapiens
agatgactatctaca

SEQ ID NO: 318688 - DNA, 15 bp, Homo sapiens
aagatgactatctac

SEQ ID NO: 318689 - DNA, 15 bp, Homo sapiens
aaagatgactatcta

SEQ ID NO: 318690 - DNA, 15 bp, Homo sapiens
gaaagatgactatct

SEQ ID NO: 318691 - DNA, 15 bp, Homo sapiens
ggaaagatgactatc

SEQ ID NO: 318692 - DNA, 15 bp, Homo sapiens
aggaaagatgactat

SEQ ID NO: 318693 - DNA, 15 bp, Homo sapiens
taggaaagatgacta

SEQ ID NO: 318694 - DNA, 15 bp, Homo sapiens
ataggaaagatgact

SEQ ID NO: 318695 - DNA, 15 bp, Homo sapiens
gataggaaagatgac

SEQ ID NO: 318696 - DNA, 15 bp, Homo sapiens
agataggaaagatga

SEQ ID NO: 318697 - DNA, 15 bp, Homo sapiens
aagataggaaagatg

SEQ ID NO: 318698 - DNA, 15 bp, Homo sapiens
taagataggaaagat

SEQ ID NO: 318699 - DNA, 15 bp, Homo sapiens
ctaagataggaaaga

SEQ ID NO: 318700 - DNA, 15 bp, Homo sapiens
gctaagataggaaag

SEQ ID NO: 318701 - DNA, 15 bp, Homo sapiens
agctaagataggaaa

SEQ ID NO: 318702 - DNA, 15 bp, Homo sapiens
tagctaagataggaa

SEQ ID NO: 318703 - DNA, 15 bp, Homo sapiens
ttagctaagatagga

SEQ ID NO: 318704 - DNA, 15 bp, Homo sapiens
tttagctaagatagg

SEQ ID NO: 318705 - DNA, 15 bp, Homo sapiens
atttagctaagatag

SEQ ID NO: 318706 - DNA, 15 bp, Homo sapiens
tatttagctaagata

SEQ ID NO: 318707 - DNA, 15 bp, Homo sapiens
gtatttagctaagat

SEQ ID NO: 318708 - DNA, 15 bp, Homo sapiens
tgtatttagctaaga

SEQ ID NO: 318709 - DNA, 15 bp, Homo sapiens
ttgtatttagctaag

SEQ ID NO: 318710 - DNA, 15 bp, Homo sapiens
tttgtatttagctaa

SEQ ID NO: 318711 - DNA, 15 bp, Homo sapiens
atttgtatttagcta

SEQ ID NO: 318712 - DNA, 15 bp, Homo sapiens
catttgtatttagct

SEQ ID NO: 318713 - DNA, 15 bp, Homo sapiens
acatttgtatttagc

SEQ ID NO: 318714 - DNA, 15 bp, Homo sapiens
tacatttgtatttag

SEQ ID NO: 318715 - DNA, 15 bp, Homo sapiens
ctacatttgtattta

SEQ ID NO: 318716 - DNA, 15 bp, Homo sapiens
tctacatttgtattt

SEQ ID NO: 318717 - DNA, 15 bp, Homo sapiens
atctacatttgtatt

SEQ ID NO: 318718 - DNA, 15 bp, Homo sapiens
aatctacatttgtat

SEQ ID NO: 318719 - DNA, 15 bp, Homo sapiens
caatctacatttgta

SEQ ID NO: 318720 - DNA, 15 bp, Homo sapiens
acaatctacatttgt

SEQ ID NO: 318721 - DNA, 15 bp, Homo sapiens
tacaatctacatttg

SEQ ID NO: 318722 - DNA, 15 bp, Homo sapiens
ttacaatctacattt

SEQ ID NO: 318723 - DNA, 15 bp, Homo sapiens
tttacaatctacatt

SEQ ID NO: 318724 - DNA, 15 bp, Homo sapiens
gtttacaatctacat

SEQ ID NO: 318725 - DNA, 15 bp, Homo sapiens
tgtttacaatctaca

SEQ ID NO: 318726 - DNA, 15 bp, Homo sapiens
ctgtttacaatctac

SEQ ID NO: 318727 - DNA, 15 bp, Homo sapiens
gctgtttacaatcta

SEQ ID NO: 318728 - DNA, 15 bp, Homo sapiens
agctgtttacaatct

SEQ ID NO: 318729 - DNA, 15 bp, Homo sapiens
gagctgtttacaatc

SEQ ID NO: 318730 - DNA, 15 bp, Homo sapiens
ggagctgtttacaat

SEQ ID NO: 318731 - DNA, 15 bp, Homo sapiens
aggagctgtttacaa

SEQ ID NO: 318732 - DNA, 15 bp, Homo sapiens
gaggagctgtttaca

SEQ ID NO: 318733 - DNA, 15 bp, Homo sapiens
tgaggagctgtttac

SEQ ID NO: 318734 - DNA, 15 bp, Homo sapiens
ttgaggagctgttta

SEQ ID NO: 318735 - DNA, 15 bp, Homo sapiens
cttgaggagctgttt

SEQ ID NO: 318736 - DNA, 15 bp, Homo sapiens
tcttgaggagctgtt

SEQ ID NO: 318737 - DNA, 15 bp, Homo sapiens
gtcttgaggagctgt

SEQ ID NO: 318738 - DNA, 15 bp, Homo sapiens
agtcttgaggagctg

SEQ ID NO: 318739 - DNA, 15 bp, Homo sapiens
cagtcttgaggagct

SEQ ID NO: 318740 - DNA, 15 bp, Homo sapiens
acagtcttgaggagc

SEQ ID NO: 318741 - DNA, 15 bp, Homo sapiens
tacagtcttgaggag

SEQ ID NO: 318742 - DNA, 15 bp, Homo sapiens
gtacagtcttgagga

SEQ ID NO: 318743 - DNA, 15 bp, Homo sapiens
tgtacagtcttgagg

SEQ ID NO: 318744 - DNA, 15 bp, Homo sapiens
atgtacagtcttgag

SEQ ID NO: 318745 - DNA, 15 bp, Homo sapiens
aatgtacagtcttga

SEQ ID NO: 318746 - DNA, 15 bp, Homo sapiens
aaatgtacagtcttg

SEQ ID NO: 318747 - DNA, 15 bp, Homo sapiens
aaaatgtacagtctt

SEQ ID NO: 318748 - DNA, 15 bp, Homo sapiens
aaaaatgtacagtct

SEQ ID NO: 318749 - DNA, 15 bp, Homo sapiens
aaaaaatgtacagtc

SEQ ID NO: 318750 - DNA, 15 bp, Homo sapiens
caaaaaatgtacagt

SEQ ID NO: 318751 - DNA, 15 bp, Homo sapiens
tcaaaaaatgtacag

SEQ ID NO: 318752 - DNA, 15 bp, Homo sapiens
ctcaaaaaatgtaca

SEQ ID NO: 318753 - DNA, 15 bp, Homo sapiens
cctcaaaaaatgtac

SEQ ID NO: 318754 - DNA, 15 bp, Homo sapiens
tcctcaaaaaatgta

SEQ ID NO: 318755 - DNA, 15 bp, Homo sapiens
atcctcaaaaaatgt

SEQ ID NO: 318756 - DNA, 15 bp, Homo sapiens
tatcctcaaaaaatg

SEQ ID NO: 318757 - DNA, 15 bp, Homo sapiens
ctatcctcaaaaaat

SEQ ID NO: 318758 - DNA, 15 bp, Homo sapiens
tctatcctcaaaaaa

SEQ ID NO: 318759 - DNA, 15 bp, Homo sapiens
atctatcctcaaaaa

SEQ ID NO: 318760 - DNA, 15 bp, Homo sapiens
aatctatcctcaaaa

SEQ ID NO: 318761 - DNA, 15 bp, Homo sapiens
aaatctatcctcaaa

SEQ ID NO: 318762 - DNA, 15 bp, Homo sapiens
taaatctatcctcaa

SEQ ID NO: 318763 - DNA, 15 bp, Homo sapiens
ctaaatctatcctca

SEQ ID NO: 318764 - DNA, 15 bp, Homo sapiens
tctaaatctatcctc

SEQ ID NO: 318765 - DNA, 15 bp, Homo sapiens
ctctaaatctatcct

SEQ ID NO: 318766 - DNA, 15 bp, Homo sapiens
gctctaaatctatcc

SEQ ID NO: 318767 - DNA, 15 bp, Homo sapiens
tgctctaaatctatc

SEQ ID NO: 318768 - DNA, 15 bp, Homo sapiens
ttgctctaaatctat

SEQ ID NO: 318769 - DNA, 15 bp, Homo sapiens
tttgctctaaatcta

SEQ ID NO: 318770 - DNA, 15 bp, Homo sapiens
atttgctctaaatct

SEQ ID NO: 318771 - DNA, 15 bp, Homo sapiens
gatttgctctaaatc

SEQ ID NO: 318772 - DNA, 15 bp, Homo sapiens
tgatttgctctaaat

SEQ ID NO: 318773 - DNA, 15 bp, Homo sapiens
gtgatttgctctaaa

SEQ ID NO: 318774 - DNA, 15 bp, Homo sapiens
tgtgatttgctctaa

SEQ ID NO: 318775 - DNA, 15 bp, Homo sapiens
atgtgatttgctcta

SEQ ID NO: 318776 - DNA, 15 bp, Homo sapiens
aatgtgatttgctct

SEQ ID NO: 318777 - DNA, 15 bp, Homo sapiens
aaatgtgatttgctc

SEQ ID NO: 318778 - DNA, 15 bp, Homo sapiens
caaatgtgatttgct

SEQ ID NO: 318779 - DNA, 15 bp, Homo sapiens
acaaatgtgatttgc

SEQ ID NO: 318780 - DNA, 15 bp, Homo sapiens
tacaaatgtgatttg

SEQ ID NO: 318781 - DNA, 15 bp, Homo sapiens
atacaaatgtgattt

SEQ ID NO: 318782 - DNA, 15 bp, Homo sapiens
gatacaaatgtgatt

SEQ ID NO: 318783 - DNA, 15 bp, Homo sapiens
ggatacaaatgtgat

SEQ ID NO: 318784 - DNA, 15 bp, Homo sapiens
gggatacaaatgtga

SEQ ID NO: 318785 - DNA, 15 bp, Homo sapiens
ggggatacaaatgtg

SEQ ID NO: 318786 - DNA, 15 bp, Homo sapiens
tggggatacaaatgt

SEQ ID NO: 318787 - DNA, 15 bp, Homo sapiens
ttggggatacaaatg

SEQ ID NO: 318788 - DNA, 15 bp, Homo sapiens
attggggatacaaat

SEQ ID NO: 318789 - DNA, 15 bp, Homo sapiens
tattggggatacaaa

SEQ ID NO: 318790 - DNA, 15 bp, Homo sapiens
atattggggatacaa

SEQ ID NO: 318791 - DNA, 15 bp, Homo sapiens
catattggggataca

SEQ ID NO: 318792 - DNA, 15 bp, Homo sapiens
ccatattggggatac

SEQ ID NO: 318793 - DNA, 15 bp, Homo sapiens
accatattggggata

SEQ ID NO: 318794 - DNA, 15 bp, Homo sapiens
aaccatattggggat

SEQ ID NO: 318795 - DNA, 15 bp, Homo sapiens
taaccatattgggga

SEQ ID NO: 318796 - DNA, 15 bp, Homo sapiens
ctaaccatattgggg

SEQ ID NO: 318797 - DNA, 15 bp, Homo sapiens
gctaaccatattggg

SEQ ID NO: 318798 - DNA, 15 bp, Homo sapiens
ggctaaccatattgg

SEQ ID NO: 318799 - DNA, 15 bp, Homo sapiens
gggctaaccatattg

SEQ ID NO: 318800 - DNA, 15 bp, Homo sapiens
tgggctaaccatatt

SEQ ID NO: 318801 - DNA, 15 bp, Homo sapiens
ctgggctaaccatat

SEQ ID NO: 318802 - DNA, 15 bp, Homo sapiens
actgggctaaccata

SEQ ID NO: 318803 - DNA, 15 bp, Homo sapiens
tactgggctaaccat

SEQ ID NO: 318804 - DNA, 15 bp, Homo sapiens
atactgggctaacca

SEQ ID NO: 318805 - DNA, 15 bp, Homo sapiens
gatactgggctaacc

SEQ ID NO: 318806 - DNA, 15 bp, Homo sapiens
agatactgggctaac

SEQ ID NO: 318807 - DNA, 15 bp, Homo sapiens
cagatactgggctaa

SEQ ID NO: 318808 - DNA, 15 bp, Homo sapiens
ccagatactgggcta

SEQ ID NO: 318809 - DNA, 15 bp, Homo sapiens
gccagatactgggct

SEQ ID NO: 318810 - DNA, 15 bp, Homo sapiens
agccagatactgggc

SEQ ID NO: 318811 - DNA, 15 bp, Homo sapiens
gagccagatactggg

SEQ ID NO: 318812 - DNA, 15 bp, Homo sapiens
ggagccagatactgg

SEQ ID NO: 318813 - DNA, 15 bp, Homo sapiens
aggagccagatactg

SEQ ID NO: 318814 - DNA, 15 bp, Homo sapiens
taggagccagatact

SEQ ID NO: 318815 - DNA, 15 bp, Homo sapiens
ctaggagccagatac

SEQ ID NO: 318816 - DNA, 15 bp, Homo sapiens
actaggagccagata

SEQ ID NO: 318817 - DNA, 15 bp, Homo sapiens
tactaggagccagat

SEQ ID NO: 318818 - DNA, 15 bp, Homo sapiens
ttactaggagccaga

SEQ ID NO: 318819 - DNA, 15 bp, Homo sapiens
attactaggagccag

SEQ ID NO: 318820 - DNA, 15 bp, Homo sapiens
tattactaggagcca

SEQ ID NO: 318821 - DNA, 15 bp, Homo sapiens
ttattactaggagcc

SEQ ID NO: 318822 - DNA, 15 bp, Homo sapiens
attattactaggagc

SEQ ID NO: 318823 - DNA, 15 bp, Homo sapiens
aattattactaggag

SEQ ID NO: 318824 - DNA, 15 bp, Homo sapiens
taattattactagga

SEQ ID NO: 318825 - DNA, 15 bp, Homo sapiens
ataattattactagg

SEQ ID NO: 318826 - DNA, 15 bp, Homo sapiens
tataattattactag

SEQ ID NO: 318827 - DNA, 15 bp, Homo sapiens
ctataattattacta

SEQ ID NO: 318828 - DNA, 15 bp, Homo sapiens
gctataattattact

SEQ ID NO: 318829 - DNA, 15 bp, Homo sapiens
tgctataattattac

SEQ ID NO: 318830 - DNA, 15 bp, Homo sapiens
ttgctataattatta

SEQ ID NO: 318831 - DNA, 15 bp, Homo sapiens
cttgctataattatt

SEQ ID NO: 318832 - DNA, 15 bp, Homo sapiens
gcttgctataattat

SEQ ID NO: 318833 - DNA, 15 bp, Homo sapiens
tgcttgctataatta

SEQ ID NO: 318834 - DNA, 15 bp, Homo sapiens
gtgcttgctataatt

SEQ ID NO: 318835 - DNA, 15 bp, Homo sapiens
agtgcttgctataat

SEQ ID NO: 318836 - DNA, 15 bp, Homo sapiens
cagtgcttgctataa

SEQ ID NO: 318837 - DNA, 15 bp, Homo sapiens
tcagtgcttgctata

SEQ ID NO: 318838 - DNA, 15 bp, Homo sapiens
gtcagtgcttgctat

SEQ ID NO: 318839 - DNA, 15 bp, Homo sapiens
agtcagtgcttgcta

SEQ ID NO: 318840 - DNA, 15 bp, Homo sapiens
cagtcagtgcttgct

SEQ ID NO: 318841 - DNA, 15 bp, Homo sapiens
tcagtcagtgcttgc

SEQ ID NO: 318842 - DNA, 15 bp, Homo sapiens
ttcagtcagtgcttg

SEQ ID NO: 318843 - DNA, 15 bp, Homo sapiens
gttcagtcagtgctt

SEQ ID NO: 318844 - DNA, 15 bp, Homo sapiens
tgttcagtcagtgct

SEQ ID NO: 318845 - DNA, 15 bp, Homo sapiens
atgttcagtcagtgc

SEQ ID NO: 318846 - DNA, 15 bp, Homo sapiens
aatgttcagtcagtg

SEQ ID NO: 318847 - DNA, 15 bp, Homo sapiens
aaatgttcagtcagt

SEQ ID NO: 318848 - DNA, 15 bp, Homo sapiens
gaaatgttcagtcag

SEQ ID NO: 318849 - DNA, 15 bp, Homo sapiens
ggaaatgttcagtca

SEQ ID NO: 318850 - DNA, 15 bp, Homo sapiens
aggaaatgttcagtc

SEQ ID NO: 318851 - DNA, 15 bp, Homo sapiens
taggaaatgttcagt

SEQ ID NO: 318852 - DNA, 15 bp, Homo sapiens
ataggaaatgttcag

SEQ ID NO: 318853 - DNA, 15 bp, Homo sapiens
cataggaaatgttca

SEQ ID NO: 318854 - DNA, 15 bp, Homo sapiens
acataggaaatgttc

SEQ ID NO: 318855 - DNA, 15 bp, Homo sapiens
cacataggaaatgtt

SEQ ID NO: 318856 - DNA, 15 bp, Homo sapiens
gcacataggaaatgt

SEQ ID NO: 318857 - DNA, 15 bp, Homo sapiens
ggcacataggaaatg

SEQ ID NO: 318858 - DNA, 15 bp, Homo sapiens
tggcacataggaaat

SEQ ID NO: 318859 - DNA, 15 bp, Homo sapiens
ttggcacataggaaa

SEQ ID NO: 318860 - DNA, 15 bp, Homo sapiens
cttggcacataggaa

SEQ ID NO: 318861 - DNA, 15 bp, Homo sapiens
ccttggcacatagga

SEQ ID NO: 318862 - DNA, 15 bp, Homo sapiens
tccttggcacatagg

SEQ ID NO: 318863 - DNA, 15 bp, Homo sapiens
tgtccttggcacata

SEQ ID NO: 318864 - DNA, 15 bp, Homo sapiens
ttgtccttggcacat

SEQ ID NO: 318865 - DNA, 15 bp, Homo sapiens
attgtccttggcaca

SEQ ID NO: 318866 - DNA, 15 bp, Homo sapiens
aattgtccttggcac

SEQ ID NO: 318867 - DNA, 15 bp, Homo sapiens
aaattgtccttggca

SEQ ID NO: 318868 - DNA, 15 bp, Homo sapiens
aaaattgtccttggc

SEQ ID NO: 318869 - DNA, 15 bp, Homo sapiens
taaaattgtccttgg

SEQ ID NO: 318870 - DNA, 15 bp, Homo sapiens
ttaaaattgtccttg

SEQ ID NO: 318871 - DNA, 15 bp, Homo sapiens
gttaaaattgtcctt

SEQ ID NO: 318872 - DNA, 15 bp, Homo sapiens
ggttaaaattgtcct

SEQ ID NO: 318873 - DNA, 15 bp, Homo sapiens
cggttaaaattgtcc

SEQ ID NO: 318874 - DNA, 15 bp, Homo sapiens
acggttaaaattgtc

SEQ ID NO: 318875 - DNA, 15 bp, Homo sapiens
aacggttaaaattgt

SEQ ID NO: 318876 - DNA, 15 bp, Homo sapiens
taacggttaaaattg

SEQ ID NO: 318877 - DNA, 15 bp, Homo sapiens
ataacggttaaaatt

SEQ ID NO: 318878 - DNA, 15 bp, Homo sapiens
tataacggttaaaat

SEQ ID NO: 318879 - DNA, 15 bp, Homo sapiens
ctataacggttaaaa

SEQ ID NO: 318880 - DNA, 15 bp, Homo sapiens
tctataacggttaaa

SEQ ID NO: 318881 - DNA, 15 bp, Homo sapiens
atctataacggttaa

SEQ ID NO: 318882 - DNA, 15 bp, Homo sapiens
tatctataacggtta

SEQ ID NO: 318883 - DNA, 15 bp, Homo sapiens
atatctataacggtt

SEQ ID NO: 318884 - DNA, 15 bp, Homo sapiens
aatatctataacggt

SEQ ID NO: 318885 - DNA, 15 bp, Homo sapiens
taatatctataacgg

SEQ ID NO: 318886 - DNA, 15 bp, Homo sapiens
ttaatatctataacg

SEQ ID NO: 318887 - DNA, 15 bp, Homo sapiens
attaatatctataac

SEQ ID NO: 318888 - DNA, 15 bp, Homo sapiens
aattaatatctataa

SEQ ID NO: 318889 - DNA, 15 bp, Homo sapiens
gaattaatatctata

SEQ ID NO: 318890 - DNA, 15 bp, Homo sapiens
tgaattaatatctat

SEQ ID NO: 318891 - DNA, 15 bp, Homo sapiens
atgaattaatatcta

SEQ ID NO: 318892 - DNA, 15 bp, Homo sapiens
aatgaattaatatct

SEQ ID NO: 318893 - DNA, 15 bp, Homo sapiens
gaatgaattaatatc

SEQ ID NO: 318894 - DNA, 15 bp, Homo sapiens
ggaatgaattaatat

SEQ ID NO: 318895 - DNA, 15 bp, Homo sapiens
aggaatgaattaata

SEQ ID NO: 318896 - DNA, 15 bp, Homo sapiens
gaggaatgaattaat

SEQ ID NO: 318897 - DNA, 15 bp, Homo sapiens
tgaggaatgaattaa

SEQ ID NO: 318898 - DNA, 15 bp, Homo sapiens
gtgaggaatgaatta

SEQ ID NO: 318899 - DNA, 15 bp, Homo sapiens
tgtgaggaatgaatt

SEQ ID NO: 318900 - DNA, 15 bp, Homo sapiens
ttgtgaggaatgaat

SEQ ID NO: 318901 - DNA, 15 bp, Homo sapiens
attgtgaggaatgaa

SEQ ID NO: 318902 - DNA, 15 bp, Homo sapiens
tattgtgaggaatga

SEQ ID NO: 318903 - DNA, 15 bp, Homo sapiens
ttattgtgaggaatg

SEQ ID NO: 318904 - DNA, 15 bp, Homo sapiens
gttattgtgaggaat

SEQ ID NO: 318905 - DNA, 15 bp, Homo sapiens
ggttattgtgaggaa

SEQ ID NO: 318906 - DNA, 15 bp, Homo sapiens
gggttattgtgagga

SEQ ID NO: 318907 - DNA, 15 bp, Homo sapiens
ggggttattgtgagg

SEQ ID NO: 318908 - DNA, 15 bp, Homo sapiens
tggggttattgtgag

SEQ ID NO: 318909 - DNA, 15 bp, Homo sapiens
atggggttattgtga

SEQ ID NO: 318910 - DNA, 15 bp, Homo sapiens
catggggttattgtg

SEQ ID NO: 318911 - DNA, 15 bp, Homo sapiens
tcatggggttattgt

SEQ ID NO: 318912 - DNA, 15 bp, Homo sapiens
ctcatggggttattg

SEQ ID NO: 318913 - DNA, 15 bp, Homo sapiens
cctcatggggttatt

SEQ ID NO: 318914 - DNA, 15 bp, Homo sapiens
acctcatggggttat

SEQ ID NO: 318915 - DNA, 15 bp, Homo sapiens
tacctcatggggtta

SEQ ID NO: 318916 - DNA, 15 bp, Homo sapiens
ctacctcatggggtt

SEQ ID NO: 318917 - DNA, 15 bp, Homo sapiens
cctacctcatggggt

SEQ ID NO: 318918 - DNA, 15 bp, Homo sapiens
acctacctcatgggg

SEQ ID NO: 318919 - DNA, 15 bp, Homo sapiens
aacctacctcatggg

SEQ ID NO: 318920 - DNA, 15 bp, Homo sapiens
taacctacctcatgg

SEQ ID NO: 318921 - DNA, 15 bp, Homo sapiens
gtaacctacctcatg

SEQ ID NO: 318922 - DNA, 15 bp, Homo sapiens
agtaacctacctcat

SEQ ID NO: 318923 - DNA, 15 bp, Homo sapiens
tagtaacctacctca

SEQ ID NO: 318924 - DNA, 15 bp, Homo sapiens
atagtaacctacctc

SEQ ID NO: 318925 - DNA, 15 bp, Homo sapiens
aatagtaacctacct

SEQ ID NO: 318926 - DNA, 15 bp, Homo sapiens
taatagtaacctacc

SEQ ID NO: 318927 - DNA, 15 bp, Homo sapiens
gtaatagtaacctac

SEQ ID NO: 318928 - DNA, 15 bp, Homo sapiens
agtaatagtaaccta

SEQ ID NO: 318929 - DNA, 15 bp, Homo sapiens
cagtaatagtaacct

SEQ ID NO: 318930 - DNA, 15 bp, Homo sapiens
acagtaatagtaacc

SEQ ID NO: 318931 - DNA, 15 bp, Homo sapiens
aacagtaatagtaac

SEQ ID NO: 318932 - DNA, 15 bp, Homo sapiens
gaacagtaatagtaa

SEQ ID NO: 318933 - DNA, 15 bp, Homo sapiens
ggaacagtaatagta

SEQ ID NO: 318934 - DNA, 15 bp, Homo sapiens
gggaacagtaatagt

SEQ ID NO: 318935 - DNA, 15 bp, Homo sapiens
tgggaacagtaatag

SEQ ID NO: 318936 - DNA, 15 bp, Homo sapiens
atgggaacagtaata

SEQ ID NO: 318937 - DNA, 15 bp, Homo sapiens
aatgggaacagtaat

SEQ ID NO: 318938 - DNA, 15 bp, Homo sapiens
aaatgggaacagtaa

SEQ ID NO: 318939 - DNA, 15 bp, Homo sapiens
aaaatgggaacagta

SEQ ID NO: 318940 - DNA, 15 bp, Homo sapiens
taaaatgggaacagt

SEQ ID NO: 318941 - DNA, 15 bp, Homo sapiens
ataaaatgggaacag

SEQ ID NO: 318942 - DNA, 15 bp, Homo sapiens
tataaaatgggaaca

SEQ ID NO: 318943 - DNA, 15 bp, Homo sapiens
ctataaaatgggaac

SEQ ID NO: 318944 - DNA, 15 bp, Homo sapiens
actataaaatgggaa

SEQ ID NO: 318945 - DNA, 15 bp, Homo sapiens
aactataaaatggga

SEQ ID NO: 318946 - DNA, 15 bp, Homo sapiens
caactataaaatggg

SEQ ID NO: 318947 - DNA, 15 bp, Homo sapiens
ccaactataaaatgg

SEQ ID NO: 318948 - DNA, 15 bp, Homo sapiens
cccaactataaaatg

SEQ ID NO: 318949 - DNA, 15 bp, Homo sapiens
ccccaactataaaat

SEQ ID NO: 318950 - DNA, 15 bp, Homo sapiens
tccccaactataaaa

SEQ ID NO: 318951 - DNA, 15 bp, Homo sapiens
ttccccaactataaa

SEQ ID NO: 318952 - DNA, 15 bp, Homo sapiens
tttccccaactataa

SEQ ID NO: 318953 - DNA, 15 bp, Homo sapiens
gtttccccaactata

SEQ ID NO: 318954 - DNA, 15 bp, Homo sapiens
agtttccccaactat

SEQ ID NO: 318955 - DNA, 15 bp, Homo sapiens
cagtttccccaacta

SEQ ID NO: 318956 - DNA, 15 bp, Homo sapiens
tcagtttccccaact

SEQ ID NO: 318957 - DNA, 15 bp, Homo sapiens
ctcagtttccccaac

SEQ ID NO: 318958 - DNA, 15 bp, Homo sapiens
tctcagtttccccaa

SEQ ID NO: 318959 - DNA, 15 bp, Homo sapiens
atctcagtttcccca

SEQ ID NO: 318960 - DNA, 15 bp, Homo sapiens
tatctcagtttcccc

SEQ ID NO: 318961 - DNA, 15 bp, Homo sapiens
gtatctcagtttccc

SEQ ID NO: 318962 - DNA, 15 bp, Homo sapiens
agtatctcagtttcc

SEQ ID NO: 318963 - DNA, 15 bp, Homo sapiens
aagtatctcagtttc

SEQ ID NO: 318964 - DNA, 15 bp, Homo sapiens
aaagtatctcagttt

SEQ ID NO: 318965 - DNA, 15 bp, Homo sapiens
caaagtatctcagtt

SEQ ID NO: 318966 - DNA, 15 bp, Homo sapiens
tcaaagtatctcagt

SEQ ID NO: 318967 - DNA, 15 bp, Homo sapiens
ctcaaagtatctcag

SEQ ID NO: 318968 - DNA, 15 bp, Homo sapiens
actcaaagtatctca

SEQ ID NO: 318969 - DNA, 15 bp, Homo sapiens
aactcaaagtatctc

SEQ ID NO: 318970 - DNA, 15 bp, Homo sapiens
caactcaaagtatct

SEQ ID NO: 318971 - DNA, 15 bp, Homo sapiens
tcaactcaaagtatc

SEQ ID NO: 318972 - DNA, 15 bp, Homo sapiens
ttcaactcaaagtat

SEQ ID NO: 318973 - DNA, 15 bp, Homo sapiens
cttcaactcaaagta

SEQ ID NO: 318974 - DNA, 15 bp, Homo sapiens
ccttcaactcaaagt

SEQ ID NO: 318975 - DNA, 15 bp, Homo sapiens
tccttcaactcaaag

SEQ ID NO: 318976 - DNA, 15 bp, Homo sapiens
ttccttcaactcaaa

SEQ ID NO: 318977 - DNA, 15 bp, Homo sapiens
gttccttcaactcaa

SEQ ID NO: 318978 - DNA, 15 bp, Homo sapiens
agttccttcaactca

SEQ ID NO: 318979 - DNA, 15 bp, Homo sapiens
aagttccttcaactc

SEQ ID NO: 318980 - DNA, 15 bp, Homo sapiens
caagttccttcaact

SEQ ID NO: 318981 - DNA, 15 bp, Homo sapiens
gcaagttccttcaac

SEQ ID NO: 318982 - DNA, 15 bp, Homo sapiens
agcaagttccttcaa

SEQ ID NO: 318983 - DNA, 15 bp, Homo sapiens
tagcaagttccttca

SEQ ID NO: 318984 - DNA, 15 bp, Homo sapiens
ttagcaagttccttc

SEQ ID NO: 318985 - DNA, 15 bp, Homo sapiens
attagcaagttcctt

SEQ ID NO: 318986 - DNA, 15 bp, Homo sapiens
cattagcaagttcct

SEQ ID NO: 318987 - DNA, 15 bp, Homo sapiens
gcattagcaagttcc

SEQ ID NO: 318988 - DNA, 15 bp, Homo sapiens
agcattagcaagttc

SEQ ID NO: 318989 - DNA, 15 bp, Homo sapiens
gagcattagcaagtt

SEQ ID NO: 318990 - DNA, 15 bp, Homo sapiens
tgagcattagcaagt

SEQ ID NO: 318991 - DNA, 15 bp, Homo sapiens
gtgagcattagcaag

SEQ ID NO: 318992 - DNA, 15 bp, Homo sapiens
agtgagcattagcaa

SEQ ID NO: 318993 - DNA, 15 bp, Homo sapiens
gagtgagcattagca

SEQ ID NO: 318994 - DNA, 15 bp, Homo sapiens
ggagtgagcattagc

SEQ ID NO: 318995 - DNA, 15 bp, Homo sapiens
gggagtgagcattag

SEQ ID NO: 318996 - DNA, 15 bp, Homo sapiens
tgggagtgagcatta

SEQ ID NO: 318997 - DNA, 15 bp, Homo sapiens
ttgggagtgagcatt

SEQ ID NO: 318998 - DNA, 15 bp, Homo sapiens
attgggagtgagcat

SEQ ID NO: 318999 - DNA, 15 bp, Homo sapiens
aattgggagtgagca

SEQ ID NO: 319000 - DNA, 15 bp, Homo sapiens
taattgggagtgagc

SEQ ID NO: 319001 - DNA, 15 bp, Homo sapiens
ttaattgggagtgag

SEQ ID NO: 319002 - DNA, 15 bp, Homo sapiens
attaattgggagtga

SEQ ID NO: 319003 - DNA, 15 bp, Homo sapiens
cattaattgggagtg

SEQ ID NO: 319004 - DNA, 15 bp, Homo sapiens
ccattaattgggagt

SEQ ID NO: 319005 - DNA, 15 bp, Homo sapiens
gccattaattgggag

SEQ ID NO: 319006 - DNA, 15 bp, Homo sapiens
tgccattaattggga

SEQ ID NO: 319007 - DNA, 15 bp, Homo sapiens
ctgccattaattggg

SEQ ID NO: 319008 - DNA, 15 bp, Homo sapiens
tctgccattaattgg

SEQ ID NO: 319009 - DNA, 15 bp, Homo sapiens
ctctgccattaattg

SEQ ID NO: 319010 - DNA, 15 bp, Homo sapiens
gctctgccattaatt

SEQ ID NO: 319011 - DNA, 15 bp, Homo sapiens
agctctgccattaat

SEQ ID NO: 319012 - DNA, 15 bp, Homo sapiens
cagctctgccattaa

SEQ ID NO: 319013 - DNA, 15 bp, Homo sapiens
ccagctctgccatta

SEQ ID NO: 319014 - DNA, 15 bp, Homo sapiens
cccagctctgccatt

SEQ ID NO: 319015 - DNA, 15 bp, Homo sapiens
tcccagctctgccat

SEQ ID NO: 319016 - DNA, 15 bp, Homo sapiens
atcccagctctgcca

SEQ ID NO: 319017 - DNA, 15 bp, Homo sapiens
aatcccagctctgcc

SEQ ID NO: 319018 - DNA, 15 bp, Homo sapiens
aaatcccagctctgc

SEQ ID NO: 319019 - DNA, 15 bp, Homo sapiens
attcaaatcccagct

SEQ ID NO: 319020 - DNA, 15 bp, Homo sapiens
gattcaaatcccagc

SEQ ID NO: 319021 - DNA, 15 bp, Homo sapiens
ggattcaaatcccag

SEQ ID NO: 319022 - DNA, 15 bp, Homo sapiens
aggattcaaatccca

SEQ ID NO: 319023 - DNA, 15 bp, Homo sapiens
taggattcaaatccc

SEQ ID NO: 319024 - DNA, 15 bp, Homo sapiens
ataggattcaaatcc

SEQ ID NO: 319025 - DNA, 15 bp, Homo sapiens
tataggattcaaatc

SEQ ID NO: 319026 - DNA, 15 bp, Homo sapiens
ttataggattcaaat

SEQ ID NO: 319027 - DNA, 15 bp, Homo sapiens
gttataggattcaaa

SEQ ID NO: 319028 - DNA, 15 bp, Homo sapiens
tgttataggattcaa

SEQ ID NO: 319029 - DNA, 15 bp, Homo sapiens
gtgttataggattca

SEQ ID NO: 319030 - DNA, 15 bp, Homo sapiens
agtgttataggattc

SEQ ID NO: 319031 - DNA, 15 bp, Homo sapiens
cagtgttataggatt

SEQ ID NO: 319032 - DNA, 15 bp, Homo sapiens
ccagtgttataggat

SEQ ID NO: 319033 - DNA, 15 bp, Homo sapiens
cccagtgttatagga

SEQ ID NO: 319034 - DNA, 15 bp, Homo sapiens
gcccagtgttatagg

SEQ ID NO: 319035 - DNA, 15 bp, Homo sapiens
ggcccagtgttatag

SEQ ID NO: 319036 - DNA, 15 bp, Homo sapiens
gggcccagtgttata

SEQ ID NO: 319037 - DNA, 15 bp, Homo sapiens
tgggcccagtgttat

SEQ ID NO: 319038 - DNA, 15 bp, Homo sapiens
ctgggcccagtgtta

SEQ ID NO: 319039 - DNA, 15 bp, Homo sapiens
tctgggcccagtgtt

SEQ ID NO: 319040 - DNA, 15 bp, Homo sapiens
atctgggcccagtgt

SEQ ID NO: 319041 - DNA, 15 bp, Homo sapiens
aatctgggcccagtg

SEQ ID NO: 319042 - DNA, 15 bp, Homo sapiens
gaatctgggcccagt

SEQ ID NO: 319043 - DNA, 15 bp, Homo sapiens
ggaatctgggcccag

SEQ ID NO: 319044 - DNA, 15 bp, Homo sapiens
cggaatctgggccca

SEQ ID NO: 319045 - DNA, 15 bp, Homo sapiens
acggaatctgggccc

SEQ ID NO: 319046 - DNA, 15 bp, Homo sapiens
gacggaatctgggcc

SEQ ID NO: 319047 - DNA, 15 bp, Homo sapiens
agacggaatctgggc

SEQ ID NO: 319048 - DNA, 15 bp, Homo sapiens
gagacggaatctggg

SEQ ID NO: 319049 - DNA, 15 bp, Homo sapiens
agagacggaatctgg

SEQ ID NO: 319050 - DNA, 15 bp, Homo sapiens
aagagacggaatctg

SEQ ID NO: 319051 - DNA, 15 bp, Homo sapiens
aaagagacggaatct

SEQ ID NO: 319052 - DNA, 15 bp, Homo sapiens
aaaagagacggaatc

SEQ ID NO: 319053 - DNA, 15 bp, Homo sapiens
gaaaagagacggaat

SEQ ID NO: 319054 - DNA, 15 bp, Homo sapiens
agaaaagagacggaa

SEQ ID NO: 319055 - DNA, 15 bp, Homo sapiens
tagaaaagagacgga

SEQ ID NO: 319056 - DNA, 15 bp, Homo sapiens
ttagaaaagagacgg

SEQ ID NO: 319057 - DNA, 15 bp, Homo sapiens
tttagaaaagagacg

SEQ ID NO: 319058 - DNA, 15 bp, Homo sapiens
atttagaaaagagac

SEQ ID NO: 319059 - DNA, 15 bp, Homo sapiens
tatttagaaaagaga

SEQ ID NO: 319060 - DNA, 15 bp, Homo sapiens
ctatttagaaaagag

SEQ ID NO: 319061 - DNA, 15 bp, Homo sapiens
cctatttagaaaaga

SEQ ID NO: 319062 - DNA, 15 bp, Homo sapiens
acctatttagaaaag

SEQ ID NO: 319063 - DNA, 15 bp, Homo sapiens
tacctatttagaaaa

SEQ ID NO: 319064 - DNA, 15 bp, Homo sapiens
gtacctatttagaaa

SEQ ID NO: 319065 - DNA, 15 bp, Homo sapiens
agtacctatttagaa

SEQ ID NO: 319066 - DNA, 15 bp, Homo sapiens
gagtacctatttaga

SEQ ID NO: 319067 - DNA, 15 bp, Homo sapiens
ggagtacctatttag

SEQ ID NO: 319068 - DNA, 15 bp, Homo sapiens
tggagtacctattta

SEQ ID NO: 319069 - DNA, 15 bp, Homo sapiens
atggagtacctattt

SEQ ID NO: 319070 - DNA, 15 bp, Homo sapiens
catggagtacctatt

SEQ ID NO: 319071 - DNA, 15 bp, Homo sapiens
tcatggagtacctat

SEQ ID NO: 319072 - DNA, 15 bp, Homo sapiens
ttcatggagtaccta

SEQ ID NO: 319073 - DNA, 15 bp, Homo sapiens
tttcatggagtacct

SEQ ID NO: 319074 - DNA, 15 bp, Homo sapiens
ttttcatggagtacc

SEQ ID NO: 319075 - DNA, 15 bp, Homo sapiens
attttcatggagtac

SEQ ID NO: 319076 - DNA, 15 bp, Homo sapiens
tattttcatggagta

SEQ ID NO: 319077 - DNA, 15 bp, Homo sapiens
atattttcatggagt

SEQ ID NO: 319078 - DNA, 15 bp, Homo sapiens
catattttcatggag

SEQ ID NO: 319079 - DNA, 15 bp, Homo sapiens
acatattttcatgga

SEQ ID NO: 319080 - DNA, 15 bp, Homo sapiens
aacatattttcatgg

SEQ ID NO: 319081 - DNA, 15 bp, Homo sapiens
caacatattttcatg

SEQ ID NO: 319082 - DNA, 15 bp, Homo sapiens
acaacatattttcat

SEQ ID NO: 319083 - DNA, 15 bp, Homo sapiens
aacaacatattttca

SEQ ID NO: 319084 - DNA, 15 bp, Homo sapiens
caacaacatattttc

SEQ ID NO: 319085 - DNA, 15 bp, Homo sapiens
tcaacaacatatttt

SEQ ID NO: 319086 - DNA, 15 bp, Homo sapiens
ttcaacaacatattt

SEQ ID NO: 319087 - DNA, 15 bp, Homo sapiens
attcaacaacatatt

SEQ ID NO: 319088 - DNA, 15 bp, Homo sapiens
tattcaacaacatat

SEQ ID NO: 319089 - DNA, 15 bp, Homo sapiens
ttattcaacaacata

SEQ ID NO: 319090 - DNA, 15 bp, Homo sapiens
tttattcaacaacat

SEQ ID NO: 319091 - DNA, 15 bp, Homo sapiens
atttattcaacaaca

SEQ ID NO: 319092 - DNA, 15 bp, Homo sapiens
catttattcaacaac

SEQ ID NO: 319093 - DNA, 15 bp, Homo sapiens
acatttattcaacaa

SEQ ID NO: 319094 - DNA, 15 bp, Homo sapiens
tacatttattcaaca

SEQ ID NO: 319095 - DNA, 15 bp, Homo sapiens
gtacatttattcaac

SEQ ID NO: 319096 - DNA, 15 bp, Homo sapiens
agtacatttattcaa

SEQ ID NO: 319097 - DNA, 15 bp, Homo sapiens
tagtacatttattca

SEQ ID NO: 319098 - DNA, 15 bp, Homo sapiens
atagtacatttattc

SEQ ID NO: 319099 - DNA, 15 bp, Homo sapiens
aatagtacatttatt

SEQ ID NO: 319100 - DNA, 15 bp, Homo sapiens
taatagtacatttat

SEQ ID NO: 319101 - DNA, 15 bp, Homo sapiens
gtaatagtacattta

SEQ ID NO: 319102 - DNA, 15 bp, Homo sapiens
agtaatagtacattt

SEQ ID NO: 319103 - DNA, 15 bp, Homo sapiens
aagtaatagtacatt

SEQ ID NO: 319104 - DNA, 15 bp, Homo sapiens
aaagtaatagtacat

SEQ ID NO: 319105 - DNA, 15 bp, Homo sapiens
caaagtaatagtaca

SEQ ID NO: 319106 - DNA, 15 bp, Homo sapiens
acaaagtaatagtac

SEQ ID NO: 319107 - DNA, 15 bp, Homo sapiens
tacaaagtaatagta

SEQ ID NO: 319108 - DNA, 15 bp, Homo sapiens
gtacaaagtaatagt

SEQ ID NO: 319109 - DNA, 15 bp, Homo sapiens
tgtacaaagtaatag

SEQ ID NO: 319110 - DNA, 15 bp, Homo sapiens
ctgtacaaagtaata

SEQ ID NO: 319111 - DNA, 15 bp, Homo sapiens
cctgtacaaagtaat

SEQ ID NO: 319112 - DNA, 15 bp, Homo sapiens
ccctgtacaaagtaa

SEQ ID NO: 319113 - DNA, 15 bp, Homo sapiens
accctgtacaaagta

SEQ ID NO: 319114 - DNA, 15 bp, Homo sapiens
aaccctgtacaaagt

SEQ ID NO: 319115 - DNA, 15 bp, Homo sapiens
caaccctgtacaaag

SEQ ID NO: 319116 - DNA, 15 bp, Homo sapiens
tcaaccctgtacaaa

SEQ ID NO: 319117 - DNA, 15 bp, Homo sapiens
ctcaaccctgtacaa

SEQ ID NO: 319118 - DNA, 15 bp, Homo sapiens
cctcaaccctgtaca

SEQ ID NO: 319119 - DNA, 15 bp, Homo sapiens
ccctcaaccctgtac

SEQ ID NO: 319120 - DNA, 15 bp, Homo sapiens
tccctcaaccctgta

SEQ ID NO: 319121 - DNA, 15 bp, Homo sapiens
ttccctcaaccctgt

SEQ ID NO: 319122 - DNA, 15 bp, Homo sapiens
attccctcaaccctg

SEQ ID NO: 319123 - DNA, 15 bp, Homo sapiens
aattccctcaaccct

SEQ ID NO: 319124 - DNA, 15 bp, Homo sapiens
taattccctcaaccc

SEQ ID NO: 319125 - DNA, 15 bp, Homo sapiens
ctaattccctcaacc

SEQ ID NO: 319126 - DNA, 15 bp, Homo sapiens
tctaattccctcaac

SEQ ID NO: 319127 - DNA, 15 bp, Homo sapiens
atctaattccctcaa

SEQ ID NO: 319128 - DNA, 15 bp, Homo sapiens
tatctaattccctca

SEQ ID NO: 319129 - DNA, 15 bp, Homo sapiens
atatctaattccctc

SEQ ID NO: 319130 - DNA, 15 bp, Homo sapiens
catatctaattccct

SEQ ID NO: 319131 - DNA, 15 bp, Homo sapiens
tcatatctaattccc

SEQ ID NO: 319132 - DNA, 15 bp, Homo sapiens
gtcatatctaattcc

SEQ ID NO: 319133 - DNA, 15 bp, Homo sapiens
agtcatatctaattc

SEQ ID NO: 319134 - DNA, 15 bp, Homo sapiens
aagtcatatctaatt

SEQ ID NO: 319135 - DNA, 15 bp, Homo sapiens
gaagtcatatctaat

SEQ ID NO: 319136 - DNA, 15 bp, Homo sapiens
tgaagtcatatctaa

SEQ ID NO: 319137 - DNA, 15 bp, Homo sapiens
gtgaagtcatatcta

SEQ ID NO: 319138 - DNA, 15 bp, Homo sapiens
agtgaagtcatatct

SEQ ID NO: 319139 - DNA, 15 bp, Homo sapiens
cagtgaagtcatatc

SEQ ID NO: 319140 - DNA, 15 bp, Homo sapiens
tcagtgaagtcatat

SEQ ID NO: 319141 - DNA, 15 bp, Homo sapiens
ttcagtgaagtcata

SEQ ID NO: 319142 - DNA, 15 bp, Homo sapiens
cttcagtgaagtcat

SEQ ID NO: 319143 - DNA, 15 bp, Homo sapiens
tcttcagtgaagtca

SEQ ID NO: 319144 - DNA, 15 bp, Homo sapiens
ctcttcagtgaagtc

SEQ ID NO: 319145 - DNA, 15 bp, Homo sapiens
cctcttcagtgaagt

SEQ ID NO: 319146 - DNA, 15 bp, Homo sapiens
acctcttcagtgaag

SEQ ID NO: 319147 - DNA, 15 bp, Homo sapiens
gacctcttcagtgaa

SEQ ID NO: 319148 - DNA, 15 bp, Homo sapiens
tgacctcttcagtga

SEQ ID NO: 319149 - DNA, 15 bp, Homo sapiens
ttgacctcttcagtg

SEQ ID NO: 319150 - DNA, 15 bp, Homo sapiens
attgacctcttcagt

SEQ ID NO: 319151 - DNA, 15 bp, Homo sapiens
aattgacctcttcag

SEQ ID NO: 319152 - DNA, 15 bp, Homo sapiens
aaattgacctcttca

SEQ ID NO: 319153 - DNA, 15 bp, Homo sapiens
gaaattgacctcttc

SEQ ID NO: 319154 - DNA, 15 bp, Homo sapiens
cgaaattgacctctt

SEQ ID NO: 319155 - DNA, 15 bp, Homo sapiens
acgaaattgacctct

SEQ ID NO: 319156 - DNA, 15 bp, Homo sapiens
gacgaaattgacctc

SEQ ID NO: 319157 - DNA, 15 bp, Homo sapiens
agacgaaattgacct

SEQ ID NO: 319158 - DNA, 15 bp, Homo sapiens
cagacgaaattgacc

SEQ ID NO: 319159 - DNA, 15 bp, Homo sapiens
tcagacgaaattgac

SEQ ID NO: 319160 - DNA, 15 bp, Homo sapiens
ctcagacgaaattga

SEQ ID NO: 319161 - DNA, 15 bp, Homo sapiens
actcagacgaaattg

SEQ ID NO: 319162 - DNA, 15 bp, Homo sapiens
aactcagacgaaatt

SEQ ID NO: 319163 - DNA, 15 bp, Homo sapiens
gaactcagacgaaat

SEQ ID NO: 319164 - DNA, 15 bp, Homo sapiens
tgaactcagacgaaa

SEQ ID NO: 319165 - DNA, 15 bp, Homo sapiens
atgaactcagacgaa

SEQ ID NO: 319166 - DNA, 15 bp, Homo sapiens
aatgaactcagacga

SEQ ID NO: 319167 - DNA, 15 bp, Homo sapiens
aaatgaactcagacg

SEQ ID NO: 319168 - DNA, 15 bp, Homo sapiens
gaaatgaactcagac

SEQ ID NO: 319169 - DNA, 15 bp, Homo sapiens
agaaatgaactcaga

SEQ ID NO: 319170 - DNA, 15 bp, Homo sapiens
aagaaatgaactcag

SEQ ID NO: 319171 - DNA, 15 bp, Homo sapiens
caagaaatgaactca

SEQ ID NO: 319172 - DNA, 15 bp, Homo sapiens
ccaagaaatgaactc

SEQ ID NO: 319173 - DNA, 15 bp, Homo sapiens
accaagaaatgaact

SEQ ID NO: 319174 - DNA, 15 bp, Homo sapiens
gaccaagaaatgaac

SEQ ID NO: 319175 - DNA, 15 bp, Homo sapiens
tgaccaagaaatgaa

SEQ ID NO: 319176 - DNA, 15 bp, Homo sapiens
ttgaccaagaaatga

SEQ ID NO: 319177 - DNA, 15 bp, Homo sapiens
attgaccaagaaatg

SEQ ID NO: 319178 - DNA, 15 bp, Homo sapiens
tattgaccaagaaat

SEQ ID NO: 319179 - DNA, 15 bp, Homo sapiens
atattgaccaagaaa

SEQ ID NO: 319180 - DNA, 15 bp, Homo sapiens
aatattgaccaagaa

SEQ ID NO: 319181 - DNA, 15 bp, Homo sapiens
aaatattgaccaaga

SEQ ID NO: 319182 - DNA, 15 bp, Homo sapiens
aaaatattgaccaag

SEQ ID NO: 319183 - DNA, 15 bp, Homo sapiens
aaaaatattgaccaa

SEQ ID NO: 319184 - DNA, 15 bp, Homo sapiens
taaaaatattgacca

SEQ ID NO: 319185 - DNA, 15 bp, Homo sapiens
ttaaaaatattgacc

SEQ ID NO: 319186 - DNA, 15 bp, Homo sapiens
tttaaaaatattgac

SEQ ID NO: 319187 - DNA, 15 bp, Homo sapiens
atttaaaaatattga

SEQ ID NO: 319188 - DNA, 15 bp, Homo sapiens
catttaaaaatattg

SEQ ID NO: 319189 - DNA, 15 bp, Homo sapiens
tcatttaaaaatatt

SEQ ID NO: 319190 - DNA, 15 bp, Homo sapiens
ttcatttaaaaatat

SEQ ID NO: 319191 - DNA, 15 bp, Homo sapiens
attcatttaaaaata

SEQ ID NO: 319192 - DNA, 15 bp, Homo sapiens
cattcatttaaaaat

SEQ ID NO: 319193 - DNA, 15 bp, Homo sapiens
tcattcatttaaaaa

SEQ ID NO: 319194 - DNA, 15 bp, Homo sapiens
ttcattcatttaaaa

SEQ ID NO: 319195 - DNA, 15 bp, Homo sapiens
attcattcatttaaa

SEQ ID NO: 319196 - DNA, 15 bp, Homo sapiens
cattcattcatttaa

SEQ ID NO: 319197 - DNA, 15 bp, Homo sapiens
ccattcattcattta

SEQ ID NO: 319198 - DNA, 15 bp, Homo sapiens
tccattcattcattt

SEQ ID NO: 319199 - DNA, 15 bp, Homo sapiens
atccattcattcatt

SEQ ID NO: 319200 - DNA, 15 bp, Homo sapiens
aatccattcattcat

SEQ ID NO: 319201 - DNA, 15 bp, Homo sapiens
gaatccattcattca

SEQ ID NO: 319202 - DNA, 15 bp, Homo sapiens
ggaatccattcattc

SEQ ID NO: 319203 - DNA, 15 bp, Homo sapiens
tggaatccattcatt

SEQ ID NO: 319204 - DNA, 15 bp, Homo sapiens
ctggaatccattcat

SEQ ID NO: 319205 - DNA, 15 bp, Homo sapiens
actggaatccattca

SEQ ID NO: 319206 - DNA, 15 bp, Homo sapiens
cactggaatccattc

SEQ ID NO: 319207 - DNA, 15 bp, Homo sapiens
acactggaatccatt

SEQ ID NO: 319208 - DNA, 15 bp, Homo sapiens
gacactggaatccat

SEQ ID NO: 319209 - DNA, 15 bp, Homo sapiens
ggacactggaatcca

SEQ ID NO: 319210 - DNA, 15 bp, Homo sapiens
aggacactggaatcc

SEQ ID NO: 319211 - DNA, 15 bp, Homo sapiens
aaggacactggaatc

SEQ ID NO: 319212 - DNA, 15 bp, Homo sapiens
aaaggacactggaat

SEQ ID NO: 319213 - DNA, 15 bp, Homo sapiens
aaaaggacactggaa

SEQ ID NO: 319214 - DNA, 15 bp, Homo sapiens
aaaaaggacactgga

SEQ ID NO: 319215 - DNA, 15 bp, Homo sapiens
gaaaaaggacactgg

SEQ ID NO: 319216 - DNA, 15 bp, Homo sapiens
agaaaaaggacactg

SEQ ID NO: 319217 - DNA, 15 bp, Homo sapiens
gagaaaaaggacact

SEQ ID NO: 319218 - DNA, 15 bp, Homo sapiens
agagaaaaaggacac

SEQ ID NO: 319219 - DNA, 15 bp, Homo sapiens
cagagaaaaaggaca

SEQ ID NO: 319220 - DNA, 15 bp, Homo sapiens
tcagagaaaaaggac

SEQ ID NO: 319221 - DNA, 15 bp, Homo sapiens
gtcagagaaaaagga

SEQ ID NO: 319222 - DNA, 15 bp, Homo sapiens
ggtcagagaaaaagg

SEQ ID NO: 319223 - DNA, 15 bp, Homo sapiens
tggtcagagaaaaag

SEQ ID NO: 319224 - DNA, 15 bp, Homo sapiens
gtggtcagagaaaaa

SEQ ID NO: 319225 - DNA, 15 bp, Homo sapiens
agtggtcagagaaaa

SEQ ID NO: 319226 - DNA, 15 bp, Homo sapiens
aagtggtcagagaaa

SEQ ID NO: 319227 - DNA, 15 bp, Homo sapiens
gaagtggtcagagaa

SEQ ID NO: 319228 - DNA, 15 bp, Homo sapiens
agaagtggtcagaga

SEQ ID NO: 319229 - DNA, 15 bp, Homo sapiens
cagaagtggtcagag

SEQ ID NO: 319230 - DNA, 15 bp, Homo sapiens
acagaagtggtcaga

SEQ ID NO: 319231 - DNA, 15 bp, Homo sapiens
gacagaagtggtcag

SEQ ID NO: 319232 - DNA, 15 bp, Homo sapiens
agacagaagtggtca

SEQ ID NO: 319233 - DNA, 15 bp, Homo sapiens
gagacagaagtggtc

SEQ ID NO: 319234 - DNA, 15 bp, Homo sapiens
tgagacagaagtggt

SEQ ID NO: 319235 - DNA, 15 bp, Homo sapiens
ctgagacagaagtgg

SEQ ID NO: 319236 - DNA, 15 bp, Homo sapiens
tctgagacagaagtg

SEQ ID NO: 319237 - DNA, 15 bp, Homo sapiens
ttctgagacagaagt

SEQ ID NO: 319238 - DNA, 15 bp, Homo sapiens
tttctgagacagaag

SEQ ID NO: 319239 - DNA, 15 bp, Homo sapiens
ttttctgagacagaa

SEQ ID NO: 319240 - DNA, 15 bp, Homo sapiens
tttttctgagacaga

SEQ ID NO: 319241 - DNA, 15 bp, Homo sapiens
gtttttctgagacag

SEQ ID NO: 319242 - DNA, 15 bp, Homo sapiens
tgtttttctgagaca

SEQ ID NO: 319243 - DNA, 15 bp, Homo sapiens
ttgtttttctgagac

SEQ ID NO: 319244 - DNA, 15 bp, Homo sapiens
cttgtttttctgaga

SEQ ID NO: 319245 - DNA, 15 bp, Homo sapiens
gcttgtttttctgag

SEQ ID NO: 319246 - DNA, 15 bp, Homo sapiens
ggcttgtttttctga

SEQ ID NO: 319247 - DNA, 15 bp, Homo sapiens
aggcttgtttttctg

SEQ ID NO: 319248 - DNA, 15 bp, Homo sapiens
taggcttgtttttct

SEQ ID NO: 319249 - DNA, 15 bp, Homo sapiens
ttaggcttgtttttc

SEQ ID NO: 319250 - DNA, 15 bp, Homo sapiens
attaggcttgttttt

SEQ ID NO: 319251 - DNA, 15 bp, Homo sapiens
cattaggcttgtttt

SEQ ID NO: 319252 - DNA, 15 bp, Homo sapiens
gcattaggcttgttt

SEQ ID NO: 319253 - DNA, 15 bp, Homo sapiens
tgcattaggcttgtt

SEQ ID NO: 319254 - DNA, 15 bp, Homo sapiens
ctgcattaggcttgt

SEQ ID NO: 319255 - DNA, 15 bp, Homo sapiens
tctgcattaggcttg

SEQ ID NO: 319256 - DNA, 15 bp, Homo sapiens
ctctgcattaggctt

SEQ ID NO: 319257 - DNA, 15 bp, Homo sapiens
cctctgcattaggct

SEQ ID NO: 319258 - DNA, 15 bp, Homo sapiens
tcctctgcattaggc

SEQ ID NO: 319259 - DNA, 15 bp, Homo sapiens
ttcctctgcattagg

SEQ ID NO: 319260 - DNA, 15 bp, Homo sapiens
cttcctctgcattag

SEQ ID NO: 319261 - DNA, 15 bp, Homo sapiens
tcttcctctgcatta

SEQ ID NO: 319262 - DNA, 15 bp, Homo sapiens
ctcttcctctgcatt

SEQ ID NO: 319263 - DNA, 15 bp, Homo sapiens
cctcttcctctgcat

SEQ ID NO: 319264 - DNA, 15 bp, Homo sapiens
tcctcttcctctgca

SEQ ID NO: 319265 - DNA, 15 bp, Homo sapiens
ctcctcttcctctgc

SEQ ID NO: 319266 - DNA, 15 bp, Homo sapiens
gctcctcttcctctg

SEQ ID NO: 319267 - DNA, 15 bp, Homo sapiens
tgctcctcttcctct

SEQ ID NO: 319268 - DNA, 15 bp, Homo sapiens
ttgctcctcttcctc

SEQ ID NO: 319269 - DNA, 15 bp, Homo sapiens
cttgctcctcttcct

SEQ ID NO: 319270 - DNA, 15 bp, Homo sapiens
ccttgctcctcttcc

SEQ ID NO: 319271 - DNA, 15 bp, Homo sapiens
cccttgctcctcttc

SEQ ID NO: 319272 - DNA, 15 bp, Homo sapiens
tcccttgctcctctt

SEQ ID NO: 319273 - DNA, 15 bp, Homo sapiens
ctcccttgctcctct

SEQ ID NO: 319274 - DNA, 15 bp, Homo sapiens
actcccttgctcctc

SEQ ID NO: 319275 - DNA, 15 bp, Homo sapiens
aactcccttgctcct

SEQ ID NO: 319276 - DNA, 15 bp, Homo sapiens
aaactcccttgctcc

SEQ ID NO: 319277 - DNA, 15 bp, Homo sapiens
aaaactcccttgctc

SEQ ID NO: 319278 - DNA, 15 bp, Homo sapiens
gaaaactcccttgct

SEQ ID NO: 319279 - DNA, 15 bp, Homo sapiens
ggaaaactcccttgc

SEQ ID NO: 319280 - DNA, 15 bp, Homo sapiens
gggaaaactcccttg

SEQ ID NO: 319281 - DNA, 15 bp, Homo sapiens
tgggaaaactccctt

SEQ ID NO: 319282 - DNA, 15 bp, Homo sapiens
ctgggaaaactccct

SEQ ID NO: 319283 - DNA, 15 bp, Homo sapiens
actgggaaaactccc

SEQ ID NO: 319284 - DNA, 15 bp, Homo sapiens
tactgggaaaactcc

SEQ ID NO: 319285 - DNA, 15 bp, Homo sapiens
atactgggaaaactc

SEQ ID NO: 319286 - DNA, 15 bp, Homo sapiens
aatactgggaaaact

SEQ ID NO: 319287 - DNA, 15 bp, Homo sapiens
caatactgggaaaac

SEQ ID NO: 319288 - DNA, 15 bp, Homo sapiens
ccaatactgggaaaa

SEQ ID NO: 319289 - DNA, 15 bp, Homo sapiens
accaatactgggaaa

SEQ ID NO: 319290 - DNA, 15 bp, Homo sapiens
taccaatactgggaa

SEQ ID NO: 319291 - DNA, 15 bp, Homo sapiens
ctaccaatactggga

SEQ ID NO: 319292 - DNA, 15 bp, Homo sapiens
tctaccaatactggg

SEQ ID NO: 319293 - DNA, 15 bp, Homo sapiens
atctaccaatactgg

SEQ ID NO: 319294 - DNA, 15 bp, Homo sapiens
catctaccaatactg

SEQ ID NO: 319295 - DNA, 15 bp, Homo sapiens
tcatctaccaatact

SEQ ID NO: 319296 - DNA, 15 bp, Homo sapiens
ttcatctaccaatac

SEQ ID NO: 319297 - DNA, 15 bp, Homo sapiens
cttcatctaccaata

SEQ ID NO: 319298 - DNA, 15 bp, Homo sapiens
tcttcatctaccaat

SEQ ID NO: 319299 - DNA, 15 bp, Homo sapiens
atcttcatctaccaa

SEQ ID NO: 319300 - DNA, 15 bp, Homo sapiens
gatcttcatctacca

SEQ ID NO: 319301 - DNA, 15 bp, Homo sapiens
agatcttcatctacc

SEQ ID NO: 319302 - DNA, 15 bp, Homo sapiens
tagatcttcatctac

SEQ ID NO: 319303 - DNA, 15 bp, Homo sapiens
atagatcttcatcta

SEQ ID NO: 319304 - DNA, 15 bp, Homo sapiens
catagatcttcatct

SEQ ID NO: 319305 - DNA, 15 bp, Homo sapiens
tcatagatcttcatc

SEQ ID NO: 319306 - DNA, 15 bp, Homo sapiens
gtcatagatcttcat

SEQ ID NO: 319307 - DNA, 15 bp, Homo sapiens
agtcatagatcttca

SEQ ID NO: 319308 - DNA, 15 bp, Homo sapiens
aagtcatagatcttc

SEQ ID NO: 319309 - DNA, 15 bp, Homo sapiens
gaagtcatagatctt

SEQ ID NO: 319310 - DNA, 15 bp, Homo sapiens
tgaagtcatagatct

SEQ ID NO: 319311 - DNA, 15 bp, Homo sapiens
ctgaagtcatagatc

SEQ ID NO: 319312 - DNA, 15 bp, Homo sapiens
tctgaagtcatagat

SEQ ID NO: 319313 - DNA, 15 bp, Homo sapiens
ctctgaagtcataga

SEQ ID NO: 319314 - DNA, 15 bp, Homo sapiens
tctctgaagtcatag

SEQ ID NO: 319315 - DNA, 15 bp, Homo sapiens
gtctctgaagtcata

SEQ ID NO: 319316 - DNA, 15 bp, Homo sapiens
tgtctctgaagtcat

SEQ ID NO: 319317 - DNA, 15 bp, Homo sapiens
ttgtctctgaagtca

SEQ ID NO: 319318 - DNA, 15 bp, Homo sapiens
tttgtctctgaagtc

SEQ ID NO: 319319 - DNA, 15 bp, Homo sapiens
atttgtctctgaagt

SEQ ID NO: 319320 - DNA, 15 bp, Homo sapiens
catttgtctctgaag

SEQ ID NO: 319321 - DNA, 15 bp, Homo sapiens
tcatttgtctctgaa

SEQ ID NO: 319322 - DNA, 15 bp, Homo sapiens
ttcatttgtctctga

SEQ ID NO: 319323 - DNA, 15 bp, Homo sapiens
cttcatttgtctctg

SEQ ID NO: 319324 - DNA, 15 bp, Homo sapiens
gcttcatttgtctct

SEQ ID NO: 319325 - DNA, 15 bp, Homo sapiens
ggcttcatttgtctc

SEQ ID NO: 319326 - DNA, 15 bp, Homo sapiens
gggcttcatttgtct

SEQ ID NO: 319327 - DNA, 15 bp, Homo sapiens
agggcttcatttgtc

SEQ ID NO: 319328 - DNA, 15 bp, Homo sapiens
gagggcttcatttgt

SEQ ID NO: 319329 - DNA, 15 bp, Homo sapiens
ggagggcttcatttg

SEQ ID NO: 319330 - DNA, 15 bp, Homo sapiens
aggagggcttcattt

SEQ ID NO: 319331 - DNA, 15 bp, Homo sapiens
taggagggcttcatt

SEQ ID NO: 319332 - DNA, 15 bp, Homo sapiens
ctaggagggcttcat

SEQ ID NO: 319333 - DNA, 15 bp, Homo sapiens
tctaggagggcttca

SEQ ID NO: 319334 - DNA, 15 bp, Homo sapiens
ttctaggagggcttc

SEQ ID NO: 319335 - DNA, 15 bp, Homo sapiens
attctaggagggctt

SEQ ID NO: 319336 - DNA, 15 bp, Homo sapiens
aattctaggagggct

SEQ ID NO: 319337 - DNA, 15 bp, Homo sapiens
gaattctaggagggc

SEQ ID NO: 319338 - DNA, 15 bp, Homo sapiens
agaattctaggaggg

SEQ ID NO: 319339 - DNA, 15 bp, Homo sapiens
aagaattctaggagg

SEQ ID NO: 319340 - DNA, 15 bp, Homo sapiens
aaagaattctaggag

SEQ ID NO: 319341 - DNA, 15 bp, Homo sapiens
gaaagaattctagga

SEQ ID NO: 319342 - DNA, 15 bp, Homo sapiens
tgaaagaattctagg

SEQ ID NO: 319343 - DNA, 15 bp, Homo sapiens
ctgaaagaattctag

SEQ ID NO: 319344 - DNA, 15 bp, Homo sapiens
cctgaaagaattcta

SEQ ID NO: 319345 - DNA, 15 bp, Homo sapiens
gcctgaaagaattct

SEQ ID NO: 319346 - DNA, 15 bp, Homo sapiens
tgcctgaaagaattc

SEQ ID NO: 319347 - DNA, 15 bp, Homo sapiens
ctgcctgaaagaatt

SEQ ID NO: 319348 - DNA, 15 bp, Homo sapiens
tctgcctgaaagaat

SEQ ID NO: 319349 - DNA, 15 bp, Homo sapiens
gtctgcctgaaagaa

SEQ ID NO: 319350 - DNA, 15 bp, Homo sapiens
tgtctgcctgaaaga

SEQ ID NO: 319351 - DNA, 15 bp, Homo sapiens
ttgtctgcctgaaag

SEQ ID NO: 319352 - DNA, 15 bp, Homo sapiens
attgtctgcctgaaa

SEQ ID NO: 319353 - DNA, 15 bp, Homo sapiens
tattgtctgcctgaa

SEQ ID NO: 319354 - DNA, 15 bp, Homo sapiens
gtattgtctgcctga

SEQ ID NO: 319355 - DNA, 15 bp, Homo sapiens
ggtattgtctgcctg

SEQ ID NO: 319356 - DNA, 15 bp, Homo sapiens
tggtattgtctgcct

SEQ ID NO: 319357 - DNA, 15 bp, Homo sapiens
ctggtattgtctgcc

SEQ ID NO: 319358 - DNA, 15 bp, Homo sapiens
cctggtattgtctgc

SEQ ID NO: 319359 - DNA, 15 bp, Homo sapiens
acctggtattgtctg

SEQ ID NO: 319360 - DNA, 15 bp, Homo sapiens
cacctggtattgtct

SEQ ID NO: 319361 - DNA, 15 bp, Homo sapiens
ccacctggtattgtc

SEQ ID NO: 319362 - DNA, 15 bp, Homo sapiens
gccacctggtattgt

SEQ ID NO: 319363 - DNA, 15 bp, Homo sapiens
tgccacctggtattg

SEQ ID NO: 319364 - DNA, 15 bp, Homo sapiens
gtgccacctggtatt

SEQ ID NO: 319365 - DNA, 15 bp, Homo sapiens
ggtgccacctggtat

SEQ ID NO: 319366 - DNA, 15 bp, Homo sapiens
tggtgccacctggta

SEQ ID NO: 319367 - DNA, 15 bp, Homo sapiens
atggtgccacctggt

SEQ ID NO: 319368 - DNA, 15 bp, Homo sapiens
catggtgccacctgg

SEQ ID NO: 319369 - DNA, 15 bp, Homo sapiens
ccatggtgccacctg

SEQ ID NO: 319370 - DNA, 15 bp, Homo sapiens
cccatggtgccacct

SEQ ID NO: 319371 - DNA, 15 bp, Homo sapiens
tcccatggtgccacc

SEQ ID NO: 319372 - DNA, 15 bp, Homo sapiens
gtcccatggtgccac

SEQ ID NO: 319373 - DNA, 15 bp, Homo sapiens
tgtcccatggtgcca

SEQ ID NO: 319374 - DNA, 15 bp, Homo sapiens
gtgtcccatggtgcc

SEQ ID NO: 319375 - DNA, 15 bp, Homo sapiens
tgtgtcccatggtgc

SEQ ID NO: 319376 - DNA, 15 bp, Homo sapiens
gtgtgtcccatggtg

SEQ ID NO: 319377 - DNA, 15 bp, Homo sapiens
agtgtgtcccatggt

SEQ ID NO: 319378 - DNA, 15 bp, Homo sapiens
cagtgtgtcccatgg

SEQ ID NO: 319379 - DNA, 15 bp, Homo sapiens
ccagtgtgtcccatg

SEQ ID NO: 319380 - DNA, 15 bp, Homo sapiens
accagtgtgtcccat

SEQ ID NO: 319381 - DNA, 15 bp, Homo sapiens
caccagtgtgtccca

SEQ ID NO: 319382 - DNA, 15 bp, Homo sapiens
ccaccagtgtgtccc

SEQ ID NO: 319383 - DNA, 15 bp, Homo sapiens
cccaccagtgtgtcc

SEQ ID NO: 319384 - DNA, 15 bp, Homo sapiens
tcccaccagtgtgtc

SEQ ID NO: 319385 - DNA, 15 bp, Homo sapiens
ctcccaccagtgtgt

SEQ ID NO: 319386 - DNA, 15 bp, Homo sapiens
cctcccaccagtgtg

SEQ ID NO: 319387 - DNA, 15 bp, Homo sapiens
tcctcccaccagtgt

SEQ ID NO: 319388 - DNA, 15 bp, Homo sapiens
ctcctcccaccagtg

SEQ ID NO: 319389 - DNA, 15 bp, Homo sapiens
actcctcccaccagt

SEQ ID NO: 319390 - DNA, 15 bp, Homo sapiens
cactcctcccaccag

SEQ ID NO: 319391 - DNA, 15 bp, Homo sapiens
gcactcctcccacca

SEQ ID NO: 319392 - DNA, 15 bp, Homo sapiens
tgcactcctcccacc

SEQ ID NO: 319393 - DNA, 15 bp, Homo sapiens
ttgcactcctcccac

SEQ ID NO: 319394 - DNA, 15 bp, Homo sapiens
tttgcactcctccca

SEQ ID NO: 319395 - DNA, 15 bp, Homo sapiens
ttttgcactcctccc

SEQ ID NO: 319396 - DNA, 15 bp, Homo sapiens
attttgcactcctcc

SEQ ID NO: 319397 - DNA, 15 bp, Homo sapiens
cattttgcactcctc

SEQ ID NO: 319398 - DNA, 15 bp, Homo sapiens
tcattttgcactcct

SEQ ID NO: 319399 - DNA, 15 bp, Homo sapiens
ctcattttgcactcc

SEQ ID NO: 319400 - DNA, 15 bp, Homo sapiens
cctcattttgcactc

SEQ ID NO: 319401 - DNA, 15 bp, Homo sapiens
tcctcattttgcact

SEQ ID NO: 319402 - DNA, 15 bp, Homo sapiens
atcctcattttgcac

SEQ ID NO: 319403 - DNA, 15 bp, Homo sapiens
tatcctcattttgca

SEQ ID NO: 319404 - DNA, 15 bp, Homo sapiens
gtatcctcattttgc

SEQ ID NO: 319405 - DNA, 15 bp, Homo sapiens
tgtatcctcattttg

SEQ ID NO: 319406 - DNA, 15 bp, Homo sapiens
ctgtatcctcatttt

SEQ ID NO: 319407 - DNA, 15 bp, Homo sapiens
actgtatcctcattt

SEQ ID NO: 319408 - DNA, 15 bp, Homo sapiens
aactgtatcctcatt

SEQ ID NO: 319409 - DNA, 15 bp, Homo sapiens
aaactgtatcctcat

SEQ ID NO: 319410 - DNA, 15 bp, Homo sapiens
taaactgtatcctca

SEQ ID NO: 319411 - DNA, 15 bp, Homo sapiens
ataaactgtatcctc

SEQ ID NO: 319412 - DNA, 15 bp, Homo sapiens
cataaactgtatcct

SEQ ID NO: 319413 - DNA, 15 bp, Homo sapiens
tcataaactgtatcc

SEQ ID NO: 319414 - DNA, 15 bp, Homo sapiens
gtcataaactgtatc

SEQ ID NO: 319415 - DNA, 15 bp, Homo sapiens
tgtcataaactgtat

SEQ ID NO: 319416 - DNA, 15 bp, Homo sapiens
ctgtcataaactgta

SEQ ID NO: 319417 - DNA, 15 bp, Homo sapiens
actgtcataaactgt

SEQ ID NO: 319418 - DNA, 15 bp, Homo sapiens
aactgtcataaactg

SEQ ID NO: 319419 - DNA, 15 bp, Homo sapiens
aaactgtcataaact

SEQ ID NO: 319420 - DNA, 15 bp, Homo sapiens
aaaactgtcataaac

SEQ ID NO: 319421 - DNA, 15 bp, Homo sapiens
aaaaactgtcataaa

SEQ ID NO: 319422 - DNA, 15 bp, Homo sapiens
aaaaaactgtcataa

SEQ ID NO: 319423 - DNA, 15 bp, Homo sapiens
aaaaaaactgtcata

SEQ ID NO: 319424 - DNA, 15 bp, Homo sapiens
aaaaaaaactgtcat

SEQ ID NO: 319425 - DNA, 15 bp, Homo sapiens
caaaaaaaactgtca

SEQ ID NO: 319426 - DNA, 15 bp, Homo sapiens
ccaaaaaaaactgtc

SEQ ID NO: 319427 - DNA, 15 bp, Homo sapiens
tccaaaaaaaactgt

SEQ ID NO: 319428 - DNA, 15 bp, Homo sapiens
ttccaaaaaaaactg

SEQ ID NO: 319429 - DNA, 15 bp, Homo sapiens
attccaaaaaaaact

SEQ ID NO: 319430 - DNA, 15 bp, Homo sapiens
tattccaaaaaaaac

SEQ ID NO: 319431 - DNA, 15 bp, Homo sapiens
ctattccaaaaaaaa

SEQ ID NO: 319432 - DNA, 15 bp, Homo sapiens
tctattccaaaaaaa

SEQ ID NO: 319433 - DNA, 15 bp, Homo sapiens
gtctattccaaaaaa

SEQ ID NO: 319434 - DNA, 15 bp, Homo sapiens
tgtctattccaaaaa

SEQ ID NO: 319435 - DNA, 15 bp, Homo sapiens
gtgtctattccaaaa

SEQ ID NO: 319436 - DNA, 15 bp, Homo sapiens
tgtgtctattccaaa

SEQ ID NO: 319437 - DNA, 15 bp, Homo sapiens
atgtgtctattccaa

SEQ ID NO: 319438 - DNA, 15 bp, Homo sapiens
catgtgtctattcca

SEQ ID NO: 319439 - DNA, 15 bp, Homo sapiens
acatgtgtctattcc

SEQ ID NO: 319440 - DNA, 15 bp, Homo sapiens
gacatgtgtctattc

SEQ ID NO: 319441 - DNA, 15 bp, Homo sapiens
ggacatgtgtctatt

SEQ ID NO: 319442 - DNA, 15 bp, Homo sapiens
tggacatgtgtctat

SEQ ID NO: 319443 - DNA, 15 bp, Homo sapiens
ctggacatgtgtcta

SEQ ID NO: 319444 - DNA, 15 bp, Homo sapiens
tctggacatgtgtct

SEQ ID NO: 319445 - DNA, 15 bp, Homo sapiens
ctctggacatgtgtc

SEQ ID NO: 319446 - DNA, 15 bp, Homo sapiens
tctctggacatgtgt

SEQ ID NO: 319447 - DNA, 15 bp, Homo sapiens
ttctctggacatgtg

SEQ ID NO: 319448 - DNA, 15 bp, Homo sapiens
tttctctggacatgt

SEQ ID NO: 319449 - DNA, 15 bp, Homo sapiens
atttctctggacatg

SEQ ID NO: 319450 - DNA, 15 bp, Homo sapiens
catttctctggacat

SEQ ID NO: 319451 - DNA, 15 bp, Homo sapiens
ccatttctctggaca

SEQ ID NO: 319452 - DNA, 15 bp, Homo sapiens
cccatttctctggac

SEQ ID NO: 319453 - DNA, 15 bp, Homo sapiens
gcccatttctctgga

SEQ ID NO: 319454 - DNA, 15 bp, Homo sapiens
ggcccatttctctgg

SEQ ID NO: 319455 - DNA, 15 bp, Homo sapiens
gggcccatttctctg

SEQ ID NO: 319456 - DNA, 15 bp, Homo sapiens
tgggcccatttctct

SEQ ID NO: 319457 - DNA, 15 bp, Homo sapiens
gtgggcccatttctc

SEQ ID NO: 319458 - DNA, 15 bp, Homo sapiens
tgtgggcccatttct

SEQ ID NO: 319459 - DNA, 15 bp, Homo sapiens
atgtgggcccatttc

SEQ ID NO: 319460 - DNA, 15 bp, Homo sapiens
aatgtgggcccattt

SEQ ID NO: 319461 - DNA, 15 bp, Homo sapiens
gaatgtgggcccatt

SEQ ID NO: 319462 - DNA, 15 bp, Homo sapiens
tgaatgtgggcccat

SEQ ID NO: 319463 - DNA, 15 bp, Homo sapiens
gtgaatgtgggccca

SEQ ID NO: 319464 - DNA, 15 bp, Homo sapiens
agtgaatgtgggccc

SEQ ID NO: 319465 - DNA, 15 bp, Homo sapiens
aagtgaatgtgggcc

SEQ ID NO: 319466 - DNA, 15 bp, Homo sapiens
caagtgaatgtgggc

SEQ ID NO: 319467 - DNA, 15 bp, Homo sapiens
acaagtgaatgtggg

SEQ ID NO: 319468 - DNA, 15 bp, Homo sapiens
tacaagtgaatgtgg

SEQ ID NO: 319469 - DNA, 15 bp, Homo sapiens
atacaagtgaatgtg

SEQ ID NO: 319470 - DNA, 15 bp, Homo sapiens
catacaagtgaatgt

SEQ ID NO: 319471 - DNA, 15 bp, Homo sapiens
acatacaagtgaatg

SEQ ID NO: 319472 - DNA, 15 bp, Homo sapiens
cacatacaagtgaat

SEQ ID NO: 319473 - DNA, 15 bp, Homo sapiens
acacatacaagtgaa

SEQ ID NO: 319474 - DNA, 15 bp, Homo sapiens
cacacatacaagtga

SEQ ID NO: 319475 - DNA, 15 bp, Homo sapiens
gcacacatacaagtg

SEQ ID NO: 319476 - DNA, 15 bp, Homo sapiens
tgcacacatacaagt

SEQ ID NO: 319477 - DNA, 15 bp, Homo sapiens
atgcacacatacaag

SEQ ID NO: 319478 - DNA, 15 bp, Homo sapiens
tatgcacacatacaa

SEQ ID NO: 319479 - DNA, 15 bp, Homo sapiens
gtatgcacacataca

SEQ ID NO: 319480 - DNA, 15 bp, Homo sapiens
cgtatgcacacatac

SEQ ID NO: 319481 - DNA, 15 bp, Homo sapiens
acgtatgcacacata

SEQ ID NO: 319482 - DNA, 15 bp, Homo sapiens
aacgtatgcacacat

SEQ ID NO: 319483 - DNA, 15 bp, Homo sapiens
aaacgtatgcacaca

SEQ ID NO: 319484 - DNA, 15 bp, Homo sapiens
caaacgtatgcacac

SEQ ID NO: 319485 - DNA, 15 bp, Homo sapiens
gcaaacgtatgcaca

SEQ ID NO: 319486 - DNA, 15 bp, Homo sapiens
tgcaaacgtatgcac

SEQ ID NO: 319487 - DNA, 15 bp, Homo sapiens
atgcaaacgtatgca

SEQ ID NO: 319488 - DNA, 15 bp, Homo sapiens
tatgcaaacgtatgc

SEQ ID NO: 319489 - DNA, 15 bp, Homo sapiens
ctatgcaaacgtatg

SEQ ID NO: 319490 - DNA, 15 bp, Homo sapiens
tctatgcaaacgtat

SEQ ID NO: 319491 - DNA, 15 bp, Homo sapiens
ttctatgcaaacgta

SEQ ID NO: 319492 - DNA, 15 bp, Homo sapiens
attctatgcaaacgt

SEQ ID NO: 319493 - DNA, 15 bp, Homo sapiens
aattctatgcaaacg

SEQ ID NO: 319494 - DNA, 15 bp, Homo sapiens
gaattctatgcaaac

SEQ ID NO: 319495 - DNA, 15 bp, Homo sapiens
agaattctatgcaaa

SEQ ID NO: 319496 - DNA, 15 bp, Homo sapiens
gagaattctatgcaa

SEQ ID NO: 319497 - DNA, 15 bp, Homo sapiens
agagaattctatgca

SEQ ID NO: 319498 - DNA, 15 bp, Homo sapiens
aagagaattctatgc

SEQ ID NO: 319499 - DNA, 15 bp, Homo sapiens
aaagagaattctatg

SEQ ID NO: 319500 - DNA, 15 bp, Homo sapiens
aaaagagaattctat

SEQ ID NO: 319501 - DNA, 15 bp, Homo sapiens
taaaagagaattcta

SEQ ID NO: 319502 - DNA, 15 bp, Homo sapiens
ttaaaagagaattct

SEQ ID NO: 319503 - DNA, 15 bp, Homo sapiens
tttaaaagagaattc

SEQ ID NO: 319504 - DNA, 15 bp, Homo sapiens
atttaaaagagaatt

SEQ ID NO: 319505 - DNA, 15 bp, Homo sapiens
tatttaaaagagaat

SEQ ID NO: 319506 - DNA, 15 bp, Homo sapiens
atatttaaaagagaa

SEQ ID NO: 319507 - DNA, 15 bp, Homo sapiens
aatatttaaaagaga

SEQ ID NO: 319508 - DNA, 15 bp, Homo sapiens
aaatatttaaaagag

SEQ ID NO: 319509 - DNA, 15 bp, Homo sapiens
gaaatatttaaaaga

SEQ ID NO: 319510 - DNA, 15 bp, Homo sapiens
tgaaatatttaaaag

SEQ ID NO: 319511 - DNA, 15 bp, Homo sapiens
ttgaaatatttaaaa

SEQ ID NO: 319512 - DNA, 15 bp, Homo sapiens
tttgaaatatttaaa

SEQ ID NO: 319513 - DNA, 15 bp, Homo sapiens
atttgaaatatttaa

SEQ ID NO: 319514 - DNA, 15 bp, Homo sapiens
aatttgaaatattta

SEQ ID NO: 319515 - DNA, 15 bp, Homo sapiens
aaatttgaaatattt

SEQ ID NO: 319516 - DNA, 15 bp, Homo sapiens
taaatttgaaatatt

SEQ ID NO: 319517 - DNA, 15 bp, Homo sapiens
ataaatttgaaatat

SEQ ID NO: 319518 - DNA, 15 bp, Homo sapiens
tataaatttgaaata

SEQ ID NO: 319519 - DNA, 15 bp, Homo sapiens
ttataaatttgaaat

SEQ ID NO: 319520 - DNA, 15 bp, Homo sapiens
cttataaatttgaaa

SEQ ID NO: 319521 - DNA, 15 bp, Homo sapiens
tcttataaatttgaa

SEQ ID NO: 319522 - DNA, 15 bp, Homo sapiens
ttcttataaatttga

SEQ ID NO: 319523 - DNA, 15 bp, Homo sapiens
tttcttataaatttg

SEQ ID NO: 319524 - DNA, 15 bp, Homo sapiens
atttcttataaattt

SEQ ID NO: 319525 - DNA, 15 bp, Homo sapiens
gatttcttataaatt

SEQ ID NO: 319526 - DNA, 15 bp, Homo sapiens
ggatttcttataaat

SEQ ID NO: 319527 - DNA, 15 bp, Homo sapiens
aggatttcttataaa

SEQ ID NO: 319528 - DNA, 15 bp, Homo sapiens
aaggatttcttataa

SEQ ID NO: 319529 - DNA, 15 bp, Homo sapiens
aaaggatttcttata

SEQ ID NO: 319530 - DNA, 15 bp, Homo sapiens
gaaaggatttcttat

SEQ ID NO: 319531 - DNA, 15 bp, Homo sapiens
agaaaggatttctta

SEQ ID NO: 319532 - DNA, 15 bp, Homo sapiens
aagaaaggatttctt

SEQ ID NO: 319533 - DNA, 15 bp, Homo sapiens
caagaaaggatttct

SEQ ID NO: 319534 - DNA, 15 bp, Homo sapiens
acaagaaaggatttc

SEQ ID NO: 319535 - DNA, 15 bp, Homo sapiens
cacaagaaaggattt

SEQ ID NO: 319536 - DNA, 15 bp, Homo sapiens
tcacaagaaaggatt

SEQ ID NO: 319537 - DNA, 15 bp, Homo sapiens
atcacaagaaaggat

SEQ ID NO: 319538 - DNA, 15 bp, Homo sapiens
catcacaagaaagga

SEQ ID NO: 319539 - DNA, 15 bp, Homo sapiens
tcatcacaagaaagg

SEQ ID NO: 319540 - DNA, 15 bp, Homo sapiens
ttcatcacaagaaag

SEQ ID NO: 319541 - DNA, 15 bp, Homo sapiens
gttcatcacaagaaa

SEQ ID NO: 319542 - DNA, 15 bp, Homo sapiens
tgttcatcacaagaa

SEQ ID NO: 319543 - DNA, 15 bp, Homo sapiens
ctgttcatcacaaga

SEQ ID NO: 319544 - DNA, 15 bp, Homo sapiens
tctgttcatcacaag

SEQ ID NO: 319545 - DNA, 15 bp, Homo sapiens
atctgttcatcacaa

SEQ ID NO: 319546 - DNA, 15 bp, Homo sapiens
aatctgttcatcaca

SEQ ID NO: 319547 - DNA, 15 bp, Homo sapiens
aaatctgttcatcac

SEQ ID NO: 319548 - DNA, 15 bp, Homo sapiens
taaatctgttcatca

SEQ ID NO: 319549 - DNA, 15 bp, Homo sapiens
ataaatctgttcatc

SEQ ID NO: 319550 - DNA, 15 bp, Homo sapiens
gataaatctgttcat

SEQ ID NO: 319551 - DNA, 15 bp, Homo sapiens
agataaatctgttca

SEQ ID NO: 319552 - DNA, 15 bp, Homo sapiens
aagataaatctgttc

SEQ ID NO: 319553 - DNA, 15 bp, Homo sapiens
caagataaatctgtt

SEQ ID NO: 319554 - DNA, 15 bp, Homo sapiens
tcaagataaatctgt

SEQ ID NO: 319555 - DNA, 15 bp, Homo sapiens
ttcaagataaatctg

SEQ ID NO: 319556 - DNA, 15 bp, Homo sapiens
tttcaagataaatct

SEQ ID NO: 319557 - DNA, 15 bp, Homo sapiens
ttttcaagataaatc

SEQ ID NO: 319558 - DNA, 15 bp, Homo sapiens
cttttcaagataaat

SEQ ID NO: 319559 - DNA, 15 bp, Homo sapiens
acttttcaagataaa

SEQ ID NO: 319560 - DNA, 15 bp, Homo sapiens
cacttttcaagataa

SEQ ID NO: 319561 - DNA, 15 bp, Homo sapiens
acacttttcaagata

SEQ ID NO: 319562 - DNA, 15 bp, Homo sapiens
aacacttttcaagat

SEQ ID NO: 319563 - DNA, 15 bp, Homo sapiens
aaacacttttcaaga

SEQ ID NO: 319564 - DNA, 15 bp, Homo sapiens
gaaacacttttcaag

SEQ ID NO: 319565 - DNA, 15 bp, Homo sapiens
ggaaacacttttcaa

SEQ ID NO: 319566 - DNA, 15 bp, Homo sapiens
gggaaacacttttca

SEQ ID NO: 319567 - DNA, 15 bp, Homo sapiens
tgggaaacacttttc

SEQ ID NO: 319568 - DNA, 15 bp, Homo sapiens
atgggaaacactttt

SEQ ID NO: 319569 - DNA, 15 bp, Homo sapiens
aatgggaaacacttt

SEQ ID NO: 319570 - DNA, 15 bp, Homo sapiens
aaatgggaaacactt

SEQ ID NO: 319571 - DNA, 15 bp, Homo sapiens
aaaatgggaaacact

SEQ ID NO: 319572 - DNA, 15 bp, Homo sapiens
taaaatgggaaacac

SEQ ID NO: 319573 - DNA, 15 bp, Homo sapiens
ttaaaatgggaaaca

SEQ ID NO: 319574 - DNA, 15 bp, Homo sapiens
tttaaaatgggaaac

SEQ ID NO: 319575 - DNA, 15 bp, Homo sapiens
ttttaaaatgggaaa

SEQ ID NO: 319576 - DNA, 15 bp, Homo sapiens
cttttaaaatgggaa

SEQ ID NO: 319577 - DNA, 15 bp, Homo sapiens
acttttaaaatggga

SEQ ID NO: 319578 - DNA, 15 bp, Homo sapiens
gacttttaaaatggg

SEQ ID NO: 319579 - DNA, 15 bp, Homo sapiens
tgacttttaaaatgg

SEQ ID NO: 319580 - DNA, 15 bp, Homo sapiens
ctgacttttaaaatg

SEQ ID NO: 319581 - DNA, 15 bp, Homo sapiens
tctgacttttaaaat

SEQ ID NO: 319582 - DNA, 15 bp, Homo sapiens
ctctgacttttaaaa

SEQ ID NO: 319583 - DNA, 15 bp, Homo sapiens
tctctgacttttaaa

SEQ ID NO: 319584 - DNA, 15 bp, Homo sapiens
gtctctgacttttaa

SEQ ID NO: 319585 - DNA, 15 bp, Homo sapiens
agtctctgactttta

SEQ ID NO: 319586 - DNA, 15 bp, Homo sapiens
aagtctctgactttt

SEQ ID NO: 319587 - DNA, 15 bp, Homo sapiens
caagtctctgacttt

SEQ ID NO: 319588 - DNA, 15 bp, Homo sapiens
tcaagtctctgactt

SEQ ID NO: 319589 - DNA, 15 bp, Homo sapiens
ctcaagtctctgact

SEQ ID NO: 319590 - DNA, 15 bp, Homo sapiens
cctcaagtctctgac

SEQ ID NO: 319591 - DNA, 15 bp, Homo sapiens
gcctcaagtctctga

SEQ ID NO: 319592 - DNA, 15 bp, Homo sapiens
tgcctcaagtctctg

SEQ ID NO: 319593 - DNA, 15 bp, Homo sapiens
ctgcctcaagtctct

SEQ ID NO: 319594 - DNA, 15 bp, Homo sapiens
cctgcctcaagtctc

SEQ ID NO: 319595 - DNA, 15 bp, Homo sapiens
ccctgcctcaagtct

SEQ ID NO: 319596 - DNA, 15 bp, Homo sapiens
accctgcctcaagtc

SEQ ID NO: 319597 - DNA, 15 bp, Homo sapiens
aaccctgcctcaagt

SEQ ID NO: 319598 - DNA, 15 bp, Homo sapiens
caaccctgcctcaag

SEQ ID NO: 319599 - DNA, 15 bp, Homo sapiens
ccaaccctgcctcaa

SEQ ID NO: 319600 - DNA, 15 bp, Homo sapiens
tccaaccctgcctca

SEQ ID NO: 319601 - DNA, 15 bp, Homo sapiens
ttccaaccctgcctc

SEQ ID NO: 319602 - DNA, 15 bp, Homo sapiens
attccaaccctgcct

SEQ ID NO: 319603 - DNA, 15 bp, Homo sapiens
tattccaaccctgcc

SEQ ID NO: 319604 - DNA, 15 bp, Homo sapiens
ttattccaaccctgc

SEQ ID NO: 319605 - DNA, 15 bp, Homo sapiens
gttattccaaccctg

SEQ ID NO: 319606 - DNA, 15 bp, Homo sapiens
agttattccaaccct

SEQ ID NO: 319607 - DNA, 15 bp, Homo sapiens
aagttattccaaccc

SEQ ID NO: 319608 - DNA, 15 bp, Homo sapiens
gaagttattccaacc

SEQ ID NO: 319609 - DNA, 15 bp, Homo sapiens
ggaagttattccaac

SEQ ID NO: 319610 - DNA, 15 bp, Homo sapiens
tggaagttattccaa

SEQ ID NO: 319611 - DNA, 15 bp, Homo sapiens
ttggaagttattcca

SEQ ID NO: 319612 - DNA, 15 bp, Homo sapiens
cttggaagttattcc

SEQ ID NO: 319613 - DNA, 15 bp, Homo sapiens
tcttggaagttattc

SEQ ID NO: 319614 - DNA, 15 bp, Homo sapiens
ctcttggaagttatt

SEQ ID NO: 319615 - DNA, 15 bp, Homo sapiens
gctcttggaagttat

SEQ ID NO: 319616 - DNA, 15 bp, Homo sapiens
tgctcttggaagtta

SEQ ID NO: 319617 - DNA, 15 bp, Homo sapiens
atgctcttggaagtt

SEQ ID NO: 319618 - DNA, 15 bp, Homo sapiens
catgctcttggaagt

SEQ ID NO: 319619 - DNA, 15 bp, Homo sapiens
acatgctcttggaag

SEQ ID NO: 319620 - DNA, 15 bp, Homo sapiens
cacatgctcttggaa

SEQ ID NO: 319621 - DNA, 15 bp, Homo sapiens
ccacatgctcttgga

SEQ ID NO: 319622 - DNA, 15 bp, Homo sapiens
gccacatgctcttgg

SEQ ID NO: 319623 - DNA, 15 bp, Homo sapiens
agccacatgctcttg

SEQ ID NO: 319624 - DNA, 15 bp, Homo sapiens
gagccacatgctctt

SEQ ID NO: 319625 - DNA, 15 bp, Homo sapiens
cgagccacatgctct

SEQ ID NO: 319626 - DNA, 15 bp, Homo sapiens
acgagccacatgctc

SEQ ID NO: 319627 - DNA, 15 bp, Homo sapiens
tacgagccacatgct

SEQ ID NO: 319628 - DNA, 15 bp, Homo sapiens
atacgagccacatgc

SEQ ID NO: 319629 - DNA, 15 bp, Homo sapiens
catacgagccacatg

SEQ ID NO: 319630 - DNA, 15 bp, Homo sapiens
acatacgagccacat

SEQ ID NO: 319631 - DNA, 15 bp, Homo sapiens
cacatacgagccaca

SEQ ID NO: 319632 - DNA, 15 bp, Homo sapiens
ccacatacgagccac

SEQ ID NO: 319633 - DNA, 15 bp, Homo sapiens
tccacatacgagcca

SEQ ID NO: 319634 - DNA, 15 bp, Homo sapiens
ctccacatacgagcc

SEQ ID NO: 319635 - DNA, 15 bp, Homo sapiens
tctccacatacgagc

SEQ ID NO: 319636 - DNA, 15 bp, Homo sapiens
atctccacatacgag

SEQ ID NO: 319637 - DNA, 15 bp, Homo sapiens
catctccacatacga

SEQ ID NO: 319638 - DNA, 15 bp, Homo sapiens
gcatctccacatacg

SEQ ID NO: 319639 - DNA, 15 bp, Homo sapiens
ggcatctccacatac

SEQ ID NO: 319640 - DNA, 15 bp, Homo sapiens
tggcatctccacata

SEQ ID NO: 319641 - DNA, 15 bp, Homo sapiens
ctggcatctccacat

SEQ ID NO: 319642 - DNA, 15 bp, Homo sapiens
cctggcatctccaca

SEQ ID NO: 319643 - DNA, 15 bp, Homo sapiens
tcctggcatctccac

SEQ ID NO: 319644 - DNA, 15 bp, Homo sapiens
ttcctggcatctcca

SEQ ID NO: 319645 - DNA, 15 bp, Homo sapiens
gttcctggcatctcc

SEQ ID NO: 319646 - DNA, 15 bp, Homo sapiens
ggttcctggcatctc

SEQ ID NO: 319647 - DNA, 15 bp, Homo sapiens
tggttcctggcatct

SEQ ID NO: 319648 - DNA, 15 bp, Homo sapiens
ttggttcctggcatc

SEQ ID NO: 319649 - DNA, 15 bp, Homo sapiens
tttggttcctggcat

SEQ ID NO: 319650 - DNA, 15 bp, Homo sapiens
atttggttcctggca

SEQ ID NO: 319651 - DNA, 15 bp, Homo sapiens
gatttggttcctggc

SEQ ID NO: 319652 - DNA, 15 bp, Homo sapiens
ggatttggttcctgg

SEQ ID NO: 319653 - DNA, 15 bp, Homo sapiens
gggatttggttcctg

SEQ ID NO: 319654 - DNA, 15 bp, Homo sapiens
ggggatttggttcct

SEQ ID NO: 319655 - DNA, 15 bp, Homo sapiens
aggggatttggttcc

SEQ ID NO: 319656 - DNA, 15 bp, Homo sapiens
caggggatttggttc

SEQ ID NO: 319657 - DNA, 15 bp, Homo sapiens
gcaggggatttggtt

SEQ ID NO: 319658 - DNA, 15 bp, Homo sapiens
agcaggggatttggt

SEQ ID NO: 319659 - DNA, 15 bp, Homo sapiens
cagcaggggatttgg

SEQ ID NO: 319660 - DNA, 15 bp, Homo sapiens
gcagcaggggatttg

SEQ ID NO: 319661 - DNA, 15 bp, Homo sapiens
agcagcaggggattt

SEQ ID NO: 319662 - DNA, 15 bp, Homo sapiens
cagcagcaggggatt

SEQ ID NO: 319663 - DNA, 15 bp, Homo sapiens
ccagcagcaggggat

SEQ ID NO: 319664 - DNA, 15 bp, Homo sapiens
accagcagcagggga

SEQ ID NO: 319665 - DNA, 15 bp, Homo sapiens
aaccagcagcagggg

SEQ ID NO: 319666 - DNA, 15 bp, Homo sapiens
gaaccagcagcaggg

SEQ ID NO: 319667 - DNA, 15 bp, Homo sapiens
ggaaccagcagcagg

SEQ ID NO: 319668 - DNA, 15 bp, Homo sapiens
tggaaccagcagcag

SEQ ID NO: 319669 - DNA, 15 bp, Homo sapiens
ctggaaccagcagca

SEQ ID NO: 319670 - DNA, 15 bp, Homo sapiens
cctggaaccagcagc

SEQ ID NO: 319671 - DNA, 15 bp, Homo sapiens
ccctggaaccagcag

SEQ ID NO: 319672 - DNA, 15 bp, Homo sapiens
tccctggaaccagca

SEQ ID NO: 319673 - DNA, 15 bp, Homo sapiens
gtccctggaaccagc

SEQ ID NO: 319674 - DNA, 15 bp, Homo sapiens
ggtccctggaaccag

SEQ ID NO: 319675 - DNA, 15 bp, Homo sapiens
tggtccctggaacca

SEQ ID NO: 319676 - DNA, 15 bp, Homo sapiens
gtggtccctggaacc

SEQ ID NO: 319677 - DNA, 15 bp, Homo sapiens
tgtggtccctggaac

SEQ ID NO: 319678 - DNA, 15 bp, Homo sapiens
atgtggtccctggaa

SEQ ID NO: 319679 - DNA, 15 bp, Homo sapiens
aatgtggtccctgga

SEQ ID NO: 319680 - DNA, 15 bp, Homo sapiens
aaatgtggtccctgg

SEQ ID NO: 319681 - DNA, 15 bp, Homo sapiens
taaatgtggtccctg

SEQ ID NO: 319682 - DNA, 15 bp, Homo sapiens
ataaatgtggtccct

SEQ ID NO: 319683 - DNA, 15 bp, Homo sapiens
aataaatgtggtccc

SEQ ID NO: 319684 - DNA, 15 bp, Homo sapiens
caataaatgtggtcc

SEQ ID NO: 319685 - DNA, 15 bp, Homo sapiens
gcaataaatgtggtc

SEQ ID NO: 319686 - DNA, 15 bp, Homo sapiens
ggcaataaatgtggt

SEQ ID NO: 319687 - DNA, 15 bp, Homo sapiens
tggcaataaatgtgg

SEQ ID NO: 319688 - DNA, 15 bp, Homo sapiens
gtggcaataaatgtg

SEQ ID NO: 319689 - DNA, 15 bp, Homo sapiens
tgtggcaataaatgt

SEQ ID NO: 319690 - DNA, 15 bp, Homo sapiens
gtgtggcaataaatg

SEQ ID NO: 319691 - DNA, 15 bp, Homo sapiens
ggtgtggcaataaat

SEQ ID NO: 319692 - DNA, 15 bp, Homo sapiens
aggtgtggcaataaa

SEQ ID NO: 319693 - DNA, 15 bp, Homo sapiens
taggtgtggcaataa

SEQ ID NO: 319694 - DNA, 15 bp, Homo sapiens
gtaggtgtggcaata

SEQ ID NO: 319695 - DNA, 15 bp, Homo sapiens
tgtaggtgtggcaat

SEQ ID NO: 319696 - DNA, 15 bp, Homo sapiens
ctgtaggtgtggcaa

SEQ ID NO: 319697 - DNA, 15 bp, Homo sapiens
cctgtaggtgtggca

SEQ ID NO: 319698 - DNA, 15 bp, Homo sapiens
ccctgtaggtgtggc

SEQ ID NO: 319699 - DNA, 15 bp, Homo sapiens
accctgtaggtgtgg

SEQ ID NO: 319700 - DNA, 15 bp, Homo sapiens
gaccctgtaggtgtg

SEQ ID NO: 319701 - DNA, 15 bp, Homo sapiens
ggaccctgtaggtgt

SEQ ID NO: 319702 - DNA, 15 bp, Homo sapiens
aggaccctgtaggtg

SEQ ID NO: 319703 - DNA, 15 bp, Homo sapiens
taggaccctgtaggt

SEQ ID NO: 319704 - DNA, 15 bp, Homo sapiens
ctaggaccctgtagg

SEQ ID NO: 319705 - DNA, 15 bp, Homo sapiens
cctaggaccctgtag

SEQ ID NO: 319706 - DNA, 15 bp, Homo sapiens
tcctaggaccctgta

SEQ ID NO: 319707 - DNA, 15 bp, Homo sapiens
ttcctaggaccctgt

SEQ ID NO: 319708 - DNA, 15 bp, Homo sapiens
cttcctaggaccctg

SEQ ID NO: 319709 - DNA, 15 bp, Homo sapiens
tcttcctaggaccct

SEQ ID NO: 319710 - DNA, 15 bp, Homo sapiens
ctcttcctaggaccc

SEQ ID NO: 319711 - DNA, 15 bp, Homo sapiens
cctcttcctaggacc

SEQ ID NO: 319712 - DNA, 15 bp, Homo sapiens
gcctcttcctaggac

SEQ ID NO: 319713 - DNA, 15 bp, Homo sapiens
agcctcttcctagga

SEQ ID NO: 319714 - DNA, 15 bp, Homo sapiens
cagcctcttcctagg

SEQ ID NO: 319715 - DNA, 15 bp, Homo sapiens
ccagcctcttcctag

SEQ ID NO: 319716 - DNA, 15 bp, Homo sapiens
gccagcctcttccta

SEQ ID NO: 319717 - DNA, 15 bp, Homo sapiens
tgccagcctcttcct

SEQ ID NO: 319718 - DNA, 15 bp, Homo sapiens
ctgccagcctcttcc

SEQ ID NO: 319719 - DNA, 15 bp, Homo sapiens
tctgccagcctcttc

SEQ ID NO: 319720 - DNA, 15 bp, Homo sapiens
atctgccagcctctt

SEQ ID NO: 319721 - DNA, 15 bp, Homo sapiens
catctgccagcctct

SEQ ID NO: 319722 - DNA, 15 bp, Homo sapiens
acatctgccagcctc

SEQ ID NO: 319723 - DNA, 15 bp, Homo sapiens
cacatctgccagcct

SEQ ID NO: 319724 - DNA, 15 bp, Homo sapiens
gcacatctgccagcc

SEQ ID NO: 319725 - DNA, 15 bp, Homo sapiens
ggcacatctgccagc

SEQ ID NO: 319726 - DNA, 15 bp, Homo sapiens
gggcacatctgccag

SEQ ID NO: 319727 - DNA, 15 bp, Homo sapiens
ggggcacatctgcca

SEQ ID NO: 319728 - DNA, 15 bp, Homo sapiens
tggggcacatctgcc

SEQ ID NO: 319729 - DNA, 15 bp, Homo sapiens
atggggcacatctgc

SEQ ID NO: 319730 - DNA, 15 bp, Homo sapiens
catggggcacatctg

SEQ ID NO: 319731 - DNA, 15 bp, Homo sapiens
ccatggggcacatct

SEQ ID NO: 319732 - DNA, 15 bp, Homo sapiens
tccatggggcacatc

SEQ ID NO: 319733 - DNA, 15 bp, Homo sapiens
ctccatggggcacat

SEQ ID NO: 319734 - DNA, 15 bp, Homo sapiens
tctccatggggcaca

SEQ ID NO: 319735 - DNA, 15 bp, Homo sapiens
atctccatggggcac

SEQ ID NO: 319736 - DNA, 15 bp, Homo sapiens
tatctccatggggca

SEQ ID NO: 319737 - DNA, 15 bp, Homo sapiens
ctatctccatggggc

SEQ ID NO: 319738 - DNA, 15 bp, Homo sapiens
cctatctccatgggg

SEQ ID NO: 319739 - DNA, 15 bp, Homo sapiens
acctatctccatggg

SEQ ID NO: 319740 - DNA, 15 bp, Homo sapiens
cacctatctccatgg

SEQ ID NO: 319741 - DNA, 15 bp, Homo sapiens
ccacctatctccatg

SEQ ID NO: 319742 - DNA, 15 bp, Homo sapiens
cccacctatctccat

SEQ ID NO: 319743 - DNA, 15 bp, Homo sapiens
ccccacctatctcca

SEQ ID NO: 319744 - DNA, 15 bp, Homo sapiens
accccacctatctcc

SEQ ID NO: 319745 - DNA, 15 bp, Homo sapiens
aaccccacctatctc

SEQ ID NO: 319746 - DNA, 15 bp, Homo sapiens
aaaccccacctatct

SEQ ID NO: 319747 - DNA, 15 bp, Homo sapiens
aaaaccccacctatc

SEQ ID NO: 319748 - DNA, 15 bp, Homo sapiens
aaaaaccccacctat

SEQ ID NO: 319749 - DNA, 15 bp, Homo sapiens
taaaaaccccaccta

SEQ ID NO: 319750 - DNA, 15 bp, Homo sapiens
ataaaaaccccacct

SEQ ID NO: 319751 - DNA, 15 bp, Homo sapiens
aataaaaaccccacc

SEQ ID NO: 319752 - DNA, 15 bp, Homo sapiens
aaataaaaaccccac

SEQ ID NO: 319753 - DNA, 15 bp, Homo sapiens
taaataaaaacccca

SEQ ID NO: 319754 - DNA, 15 bp, Homo sapiens
gtaaataaaaacccc

SEQ ID NO: 319755 - DNA, 15 bp, Homo sapiens
tgtaaataaaaaccc

SEQ ID NO: 319756 - DNA, 15 bp, Homo sapiens
ctgtaaataaaaacc

SEQ ID NO: 319757 - DNA, 15 bp, Homo sapiens
actgtaaataaaaac

SEQ ID NO: 319758 - DNA, 15 bp, Homo sapiens
tactgtaaataaaaa

SEQ ID NO: 319759 - DNA, 15 bp, Homo sapiens
ctactgtaaataaaa

SEQ ID NO: 319760 - DNA, 15 bp, Homo sapiens
cctactgtaaataaa

SEQ ID NO: 319761 - DNA, 15 bp, Homo sapiens
tcctactgtaaataa

SEQ ID NO: 319762 - DNA, 15 bp, Homo sapiens
ctcctactgtaaata

SEQ ID NO: 319763 - DNA, 15 bp, Homo sapiens
tctcctactgtaaat

SEQ ID NO: 319764 - DNA, 15 bp, Homo sapiens
gtctcctactgtaaa

SEQ ID NO: 319765 - DNA, 15 bp, Homo sapiens
ggtctcctactgtaa

SEQ ID NO: 319766 - DNA, 15 bp, Homo sapiens
tggtctcctactgta

SEQ ID NO: 319767 - DNA, 15 bp, Homo sapiens
ctggtctcctactgt

SEQ ID NO: 319768 - DNA, 15 bp, Homo sapiens
tctggtctcctactg

SEQ ID NO: 319769 - DNA, 15 bp, Homo sapiens
atctggtctcctact

SEQ ID NO: 319770 - DNA, 15 bp, Homo sapiens
aatctggtctcctac

SEQ ID NO: 319771 - DNA, 15 bp, Homo sapiens
caatctggtctccta

SEQ ID NO: 319772 - DNA, 15 bp, Homo sapiens
gcaatctggtctcct

SEQ ID NO: 319773 - DNA, 15 bp, Homo sapiens
ggcaatctggtctcc

SEQ ID NO: 319774 - DNA, 15 bp, Homo sapiens
gggcaatctggtctc

SEQ ID NO: 319775 - DNA, 15 bp, Homo sapiens
tgggcaatctggtct

SEQ ID NO: 319776 - DNA, 15 bp, Homo sapiens
ctgggcaatctggtc

SEQ ID NO: 319777 - DNA, 15 bp, Homo sapiens
actgggcaatctggt

SEQ ID NO: 319778 - DNA, 15 bp, Homo sapiens
cactgggcaatctgg

SEQ ID NO: 319779 - DNA, 15 bp, Homo sapiens
tcactgggcaatctg

SEQ ID NO: 319780 - DNA, 15 bp, Homo sapiens
atcactgggcaatct

SEQ ID NO: 319781 - DNA, 15 bp, Homo sapiens
catcactgggcaatc

SEQ ID NO: 319782 - DNA, 15 bp, Homo sapiens
tcatcactgggcaat

SEQ ID NO: 319783 - DNA, 15 bp, Homo sapiens
atcatcactgggcaa

SEQ ID NO: 319784 - DNA, 15 bp, Homo sapiens
catcatcactgggca

SEQ ID NO: 319785 - DNA, 15 bp, Homo sapiens
ccatcatcactgggc

SEQ ID NO: 319786 - DNA, 15 bp, Homo sapiens
cccatcatcactggg

SEQ ID NO: 319787 - DNA, 15 bp, Homo sapiens
ccccatcatcactgg

SEQ ID NO: 319788 - DNA, 15 bp, Homo sapiens
gccccatcatcactg

SEQ ID NO: 319789 - DNA, 15 bp, Homo sapiens
tgccccatcatcact

SEQ ID NO: 319790 - DNA, 15 bp, Homo sapiens
atgccccatcatcac

SEQ ID NO: 319791 - DNA, 15 bp, Homo sapiens
aatgccccatcatca

SEQ ID NO: 319792 - DNA, 15 bp, Homo sapiens
gaatgccccatcatc

SEQ ID NO: 319793 - DNA, 15 bp, Homo sapiens
cgaatgccccatcat

SEQ ID NO: 319794 - DNA, 15 bp, Homo sapiens
tcgaatgccccatca

SEQ ID NO: 319795 - DNA, 15 bp, Homo sapiens
atcgaatgccccatc

SEQ ID NO: 319796 - DNA, 15 bp, Homo sapiens
catcgaatgccccat

SEQ ID NO: 319797 - DNA, 15 bp, Homo sapiens
ccatcgaatgcccca

SEQ ID NO: 319798 - DNA, 15 bp, Homo sapiens
gccatcgaatgcccc

SEQ ID NO: 319799 - DNA, 15 bp, Homo sapiens
tgccatcgaatgccc

SEQ ID NO: 319800 - DNA, 15 bp, Homo sapiens
ctgccatcgaatgcc

SEQ ID NO: 319801 - DNA, 15 bp, Homo sapiens
tctgccatcgaatgc

SEQ ID NO: 319802 - DNA, 15 bp, Homo sapiens
ttctgccatcgaatg

SEQ ID NO: 319803 - DNA, 15 bp, Homo sapiens
attctgccatcgaat

SEQ ID NO: 319804 - DNA, 15 bp, Homo sapiens
tattctgccatcgaa

SEQ ID NO: 319805 - DNA, 15 bp, Homo sapiens
atattctgccatcga

SEQ ID NO: 319806 - DNA, 15 bp, Homo sapiens
tatattctgccatcg

SEQ ID NO: 319807 - DNA, 15 bp, Homo sapiens
ctatattctgccatc

SEQ ID NO: 319808 - DNA, 15 bp, Homo sapiens
tctatattctgccat

SEQ ID NO: 319809 - DNA, 15 bp, Homo sapiens
gtctatattctgcca

SEQ ID NO: 319810 - DNA, 15 bp, Homo sapiens
ggtctatattctgcc

SEQ ID NO: 319811 - DNA, 15 bp, Homo sapiens
tggtctatattctgc

SEQ ID NO: 319812 - DNA, 15 bp, Homo sapiens
ctggtctatattctg

SEQ ID NO: 319813 - DNA, 15 bp, Homo sapiens
actggtctatattct

SEQ ID NO: 319814 - DNA, 15 bp, Homo sapiens
aactggtctatattc

SEQ ID NO: 319815 - DNA, 15 bp, Homo sapiens
aaactggtctatatt

SEQ ID NO: 319816 - DNA, 15 bp, Homo sapiens
caaactggtctatat

SEQ ID NO: 319817 - DNA, 15 bp, Homo sapiens
tcaaactggtctata

SEQ ID NO: 319818 - DNA, 15 bp, Homo sapiens
gtcaaactggtctat

SEQ ID NO: 319819 - DNA, 15 bp, Homo sapiens
agtcaaactggtcta

SEQ ID NO: 319820 - DNA, 15 bp, Homo sapiens
cagtcaaactggtct

SEQ ID NO: 319821 - DNA, 15 bp, Homo sapiens
ccagtcaaactggtc

SEQ ID NO: 319822 - DNA, 15 bp, Homo sapiens
cccagtcaaactggt

SEQ ID NO: 319823 - DNA, 15 bp, Homo sapiens
gcccagtcaaactgg

SEQ ID NO: 319824 - DNA, 15 bp, Homo sapiens
ggcccagtcaaactg

SEQ ID NO: 319825 - DNA, 15 bp, Homo sapiens
gggcccagtcaaact

SEQ ID NO: 319826 - DNA, 15 bp, Homo sapiens
agggcccagtcaaac

SEQ ID NO: 319827 - DNA, 15 bp, Homo sapiens
tagggcccagtcaaa

SEQ ID NO: 319828 - DNA, 15 bp, Homo sapiens
ctagggcccagtcaa

SEQ ID NO: 319829 - DNA, 15 bp, Homo sapiens
actagggcccagtca

SEQ ID NO: 319830 - DNA, 15 bp, Homo sapiens
cactagggcccagtc

SEQ ID NO: 319831 - DNA, 15 bp, Homo sapiens
gcactagggcccagt

SEQ ID NO: 319832 - DNA, 15 bp, Homo sapiens
agcactagggcccag

SEQ ID NO: 319833 - DNA, 15 bp, Homo sapiens
aagcactagggccca

SEQ ID NO: 319834 - DNA, 15 bp, Homo sapiens
aaagcactagggccc

SEQ ID NO: 319835 - DNA, 15 bp, Homo sapiens
caaagcactagggcc

SEQ ID NO: 319836 - DNA, 15 bp, Homo sapiens
ccaaagcactagggc

SEQ ID NO: 319837 - DNA, 15 bp, Homo sapiens
gccaaagcactaggg

SEQ ID NO: 319838 - DNA, 15 bp, Homo sapiens
tgccaaagcactagg

SEQ ID NO: 319839 - DNA, 15 bp, Homo sapiens
ctgccaaagcactag

SEQ ID NO: 319840 - DNA, 15 bp, Homo sapiens
tctgccaaagcacta

SEQ ID NO: 319841 - DNA, 15 bp, Homo sapiens
atctgccaaagcact

SEQ ID NO: 319842 - DNA, 15 bp, Homo sapiens
aatctgccaaagcac

SEQ ID NO: 319843 - DNA, 15 bp, Homo sapiens
aaatctgccaaagca

SEQ ID NO: 319844 - DNA, 15 bp, Homo sapiens
aaaatctgccaaagc

SEQ ID NO: 319845 - DNA, 15 bp, Homo sapiens
aaaaatctgccaaag

SEQ ID NO: 319846 - DNA, 15 bp, Homo sapiens
caaaaatctgccaaa

SEQ ID NO: 319847 - DNA, 15 bp, Homo sapiens
ccaaaaatctgccaa

SEQ ID NO: 319848 - DNA, 15 bp, Homo sapiens
tccaaaaatctgcca

SEQ ID NO: 319849 - DNA, 15 bp, Homo sapiens
ctccaaaaatctgcc

SEQ ID NO: 319850 - DNA, 15 bp, Homo sapiens
cctccaaaaatctgc

SEQ ID NO: 319851 - DNA, 15 bp, Homo sapiens
tcctccaaaaatctg

SEQ ID NO: 319852 - DNA, 15 bp, Homo sapiens
ctcctccaaaaatct

SEQ ID NO: 319853 - DNA, 15 bp, Homo sapiens
tctcctccaaaaatc

SEQ ID NO: 319854 - DNA, 15 bp, Homo sapiens
ttctcctccaaaaat

SEQ ID NO: 319855 - DNA, 15 bp, Homo sapiens
attctcctccaaaaa

SEQ ID NO: 319856 - DNA, 15 bp, Homo sapiens
aattctcctccaaaa

SEQ ID NO: 319857 - DNA, 15 bp, Homo sapiens
aaattctcctccaaa

SEQ ID NO: 319858 - DNA, 15 bp, Homo sapiens
caaattctcctccaa

SEQ ID NO: 319859 - DNA, 15 bp, Homo sapiens
gcaaattctcctcca

SEQ ID NO: 319860 - DNA, 15 bp, Homo sapiens
agcaaattctcctcc

SEQ ID NO: 319861 - DNA, 15 bp, Homo sapiens
cagcaaattctcctc

SEQ ID NO: 319862 - DNA, 15 bp, Homo sapiens
tcagcaaattctcct

SEQ ID NO: 319863 - DNA, 15 bp, Homo sapiens
ctcagcaaattctcc

SEQ ID NO: 319864 - DNA, 15 bp, Homo sapiens
actcagcaaattctc

SEQ ID NO: 319865 - DNA, 15 bp, Homo sapiens
cactcagcaaattct

SEQ ID NO: 319866 - DNA, 15 bp, Homo sapiens
acactcagcaaattc

SEQ ID NO: 319867 - DNA, 15 bp, Homo sapiens
gacactcagcaaatt

SEQ ID NO: 319868 - DNA, 15 bp, Homo sapiens
tgacactcagcaaat

SEQ ID NO: 319869 - DNA, 15 bp, Homo sapiens
ctgacactcagcaaa

SEQ ID NO: 319870 - DNA, 15 bp, Homo sapiens
tctgacactcagcaa

SEQ ID NO: 319871 - DNA, 15 bp, Homo sapiens
gtctgacactcagca

SEQ ID NO: 319872 - DNA, 15 bp, Homo sapiens
ggtctgacactcagc

SEQ ID NO: 319873 - DNA, 15 bp, Homo sapiens
gggtctgacactcag

SEQ ID NO: 319874 - DNA, 15 bp, Homo sapiens
agggtctgacactca

SEQ ID NO: 319875 - DNA, 15 bp, Homo sapiens
cagggtctgacactc

SEQ ID NO: 319876 - DNA, 15 bp, Homo sapiens
acagggtctgacact

SEQ ID NO: 319877 - DNA, 15 bp, Homo sapiens
cacagggtctgacac

SEQ ID NO: 319878 - DNA, 15 bp, Homo sapiens
gcacagggtctgaca

SEQ ID NO: 319879 - DNA, 15 bp, Homo sapiens
tgcacagggtctgac

SEQ ID NO: 319880 - DNA, 15 bp, Homo sapiens
ctgcacagggtctga

SEQ ID NO: 319881 - DNA, 15 bp, Homo sapiens
tctgcacagggtctg

SEQ ID NO: 319882 - DNA, 15 bp, Homo sapiens
ctctgcacagggtct

SEQ ID NO: 319883 - DNA, 15 bp, Homo sapiens
gctctgcacagggtc

SEQ ID NO: 319884 - DNA, 15 bp, Homo sapiens
agctctgcacagggt

SEQ ID NO: 319885 - DNA, 15 bp, Homo sapiens
aagctctgcacaggg

SEQ ID NO: 319886 - DNA, 15 bp, Homo sapiens
aaagctctgcacagg

SEQ ID NO: 319887 - DNA, 15 bp, Homo sapiens
caaagctctgcacag

SEQ ID NO: 319888 - DNA, 15 bp, Homo sapiens
gcaaagctctgcaca

SEQ ID NO: 319889 - DNA, 15 bp, Homo sapiens
tgcaaagctctgcac

SEQ ID NO: 319890 - DNA, 15 bp, Homo sapiens
ttgcaaagctctgca

SEQ ID NO: 319891 - DNA, 15 bp, Homo sapiens
tttgcaaagctctgc

SEQ ID NO: 319892 - DNA, 15 bp, Homo sapiens
gtttgcaaagctctg

SEQ ID NO: 319893 - DNA, 15 bp, Homo sapiens
tgtttgcaaagctct

SEQ ID NO: 319894 - DNA, 15 bp, Homo sapiens
atgtttgcaaagctc

SEQ ID NO: 319895 - DNA, 15 bp, Homo sapiens
gatgtttgcaaagct

SEQ ID NO: 319896 - DNA, 15 bp, Homo sapiens
cgatgtttgcaaagc

SEQ ID NO: 319897 - DNA, 15 bp, Homo sapiens
acgatgtttgcaaag

SEQ ID NO: 319898 - DNA, 15 bp, Homo sapiens
aacgatgtttgcaaa

SEQ ID NO: 319899 - DNA, 15 bp, Homo sapiens
aaacgatgtttgcaa

SEQ ID NO: 319900 - DNA, 15 bp, Homo sapiens
aaaacgatgtttgca

SEQ ID NO: 319901 - DNA, 15 bp, Homo sapiens
gaaaacgatgtttgc

SEQ ID NO: 319902 - DNA, 15 bp, Homo sapiens
agaaaacgatgtttg

SEQ ID NO: 319903 - DNA, 15 bp, Homo sapiens
aagaaaacgatgttt

SEQ ID NO: 319904 - DNA, 15 bp, Homo sapiens
aaagaaaacgatgtt

SEQ ID NO: 319905 - DNA, 15 bp, Homo sapiens
taaagaaaacgatgt

SEQ ID NO: 319906 - DNA, 15 bp, Homo sapiens
ttaaagaaaacgatg

SEQ ID NO: 319907 - DNA, 15 bp, Homo sapiens
attaaagaaaacgat

SEQ ID NO: 319908 - DNA, 15 bp, Homo sapiens
gattaaagaaaacga

SEQ ID NO: 319909 - DNA, 15 bp, Homo sapiens
agattaaagaaaacg

SEQ ID NO: 319910 - DNA, 15 bp, Homo sapiens
cagattaaagaaaac

SEQ ID NO: 319911 - DNA, 15 bp, Homo sapiens
ccagattaaagaaaa

SEQ ID NO: 319912 - DNA, 15 bp, Homo sapiens
tccagattaaagaaa

SEQ ID NO: 319913 - DNA, 15 bp, Homo sapiens
atccagattaaagaa

SEQ ID NO: 319914 - DNA, 15 bp, Homo sapiens
tatccagattaaaga

SEQ ID NO: 319915 - DNA, 15 bp, Homo sapiens
ctatccagattaaag

SEQ ID NO: 319916 - DNA, 15 bp, Homo sapiens
actatccagattaaa

SEQ ID NO: 319917 - DNA, 15 bp, Homo sapiens
aactatccagattaa

SEQ ID NO: 319918 - DNA, 15 bp, Homo sapiens
gaactatccagatta

SEQ ID NO: 319919 - DNA, 15 bp, Homo sapiens
cgaactatccagatt

SEQ ID NO: 319920 - DNA, 15 bp, Homo sapiens
acgaactatccagat

SEQ ID NO: 319921 - DNA, 15 bp, Homo sapiens
gacgaactatccaga

SEQ ID NO: 319922 - DNA, 15 bp, Homo sapiens
agacgaactatccag

SEQ ID NO: 319923 - DNA, 15 bp, Homo sapiens
cagacgaactatcca

SEQ ID NO: 319924 - DNA, 15 bp, Homo sapiens
acagacgaactatcc

SEQ ID NO: 319925 - DNA, 15 bp, Homo sapiens
cacagacgaactatc

SEQ ID NO: 319926 - DNA, 15 bp, Homo sapiens
tcacagacgaactat

SEQ ID NO: 319927 - DNA, 15 bp, Homo sapiens
ttcacagacgaacta

SEQ ID NO: 319928 - DNA, 15 bp, Homo sapiens
cttcacagacgaact

SEQ ID NO: 319929 - DNA, 15 bp, Homo sapiens
acttcacagacgaac

SEQ ID NO: 319930 - DNA, 15 bp, Homo sapiens
tacttcacagacgaa

SEQ ID NO: 319931 - DNA, 15 bp, Homo sapiens
ctacttcacagacga

SEQ ID NO: 319932 - DNA, 15 bp, Homo sapiens
tctacttcacagacg

SEQ ID NO: 319933 - DNA, 15 bp, Homo sapiens
atctacttcacagac

SEQ ID NO: 319934 - DNA, 15 bp, Homo sapiens
catctacttcacaga

SEQ ID NO: 319935 - DNA, 15 bp, Homo sapiens
acatctacttcacag

SEQ ID NO: 319936 - DNA, 15 bp, Homo sapiens
gacatctacttcaca

SEQ ID NO: 319937 - DNA, 15 bp, Homo sapiens
tgacatctacttcac

SEQ ID NO: 319938 - DNA, 15 bp, Homo sapiens
atgacatctacttca

SEQ ID NO: 319939 - DNA, 15 bp, Homo sapiens
tatgacatctacttc

SEQ ID NO: 319940 - DNA, 15 bp, Homo sapiens
ttatgacatctactt

SEQ ID NO: 319941 - DNA, 15 bp, Homo sapiens
attatgacatctact

SEQ ID NO: 319942 - DNA, 15 bp, Homo sapiens
gattatgacatctac

SEQ ID NO: 319943 - DNA, 15 bp, Homo sapiens
ggattatgacatcta

SEQ ID NO: 319944 - DNA, 15 bp, Homo sapiens
gggattatgacatct

SEQ ID NO: 319945 - DNA, 15 bp, Homo sapiens
agggattatgacatc

SEQ ID NO: 319946 - DNA, 15 bp, Homo sapiens
tagggattatgacat

SEQ ID NO: 319947 - DNA, 15 bp, Homo sapiens
atagggattatgaca

SEQ ID NO: 319948 - DNA, 15 bp, Homo sapiens
aatagggattatgac

SEQ ID NO: 319949 - DNA, 15 bp, Homo sapiens
aaatagggattatga

SEQ ID NO: 319950 - DNA, 15 bp, Homo sapiens
gaaatagggattatg

SEQ ID NO: 319951 - DNA, 15 bp, Homo sapiens
cgaaatagggattat

SEQ ID NO: 319952 - DNA, 15 bp, Homo sapiens
ccgaaatagggatta

SEQ ID NO: 319953 - DNA, 15 bp, Homo sapiens
tccgaaatagggatt

SEQ ID NO: 319954 - DNA, 15 bp, Homo sapiens
ctccgaaatagggat

SEQ ID NO: 319955 - DNA, 15 bp, Homo sapiens
tctccgaaataggga

SEQ ID NO: 319956 - DNA, 15 bp, Homo sapiens
atctccgaaataggg

SEQ ID NO: 319957 - DNA, 15 bp, Homo sapiens
catctccgaaatagg

SEQ ID NO: 319958 - DNA, 15 bp, Homo sapiens
tcatctccgaaatag

SEQ ID NO: 319959 - DNA, 15 bp, Homo sapiens
ctcatctccgaaata

SEQ ID NO: 319960 - DNA, 15 bp, Homo sapiens
cctcatctccgaaat

SEQ ID NO: 319961 - DNA, 15 bp, Homo sapiens
tcctcatctccgaaa

SEQ ID NO: 319962 - DNA, 15 bp, Homo sapiens
ttcctcatctccgaa

SEQ ID NO: 319963 - DNA, 15 bp, Homo sapiens
tttcctcatctccga

SEQ ID NO: 319964 - DNA, 15 bp, Homo sapiens
atttcctcatctccg

SEQ ID NO: 319965 - DNA, 15 bp, Homo sapiens
catttcctcatctcc

SEQ ID NO: 319966 - DNA, 15 bp, Homo sapiens
tcatttcctcatctc

SEQ ID NO: 319967 - DNA, 15 bp, Homo sapiens
ctcatttcctcatct

SEQ ID NO: 319968 - DNA, 15 bp, Homo sapiens
cctcatttcctcatc

SEQ ID NO: 319969 - DNA, 15 bp, Homo sapiens
gcctcatttcctcat

SEQ ID NO: 319970 - DNA, 15 bp, Homo sapiens
agcctcatttcctca

SEQ ID NO: 319971 - DNA, 15 bp, Homo sapiens
tagcctcatttcctc

SEQ ID NO: 319972 - DNA, 15 bp, Homo sapiens
ctagcctcatttcct

SEQ ID NO: 319973 - DNA, 15 bp, Homo sapiens
cctagcctcatttcc

SEQ ID NO: 319974 - DNA, 15 bp, Homo sapiens
tcctagcctcatttc

SEQ ID NO: 319975 - DNA, 15 bp, Homo sapiens
ctcctagcctcattt

SEQ ID NO: 319976 - DNA, 15 bp, Homo sapiens
actcctagcctcatt

SEQ ID NO: 319977 - DNA, 15 bp, Homo sapiens
aactcctagcctcat

SEQ ID NO: 319978 - DNA, 15 bp, Homo sapiens
taactcctagcctca

SEQ ID NO: 319979 - DNA, 15 bp, Homo sapiens
gtaactcctagcctc

SEQ ID NO: 319980 - DNA, 15 bp, Homo sapiens
tgtaactcctagcct

SEQ ID NO: 319981 - DNA, 15 bp, Homo sapiens
atgtaactcctagcc

SEQ ID NO: 319982 - DNA, 15 bp, Homo sapiens
tatgtaactcctagc

SEQ ID NO: 319983 - DNA, 15 bp, Homo sapiens
ttatgtaactcctag

SEQ ID NO: 319984 - DNA, 15 bp, Homo sapiens
gttatgtaactccta

SEQ ID NO: 319985 - DNA, 15 bp, Homo sapiens
agttatgtaactcct

SEQ ID NO: 319986 - DNA, 15 bp, Homo sapiens
aagttatgtaactcc

SEQ ID NO: 319987 - DNA, 15 bp, Homo sapiens
taagttatgtaactc

SEQ ID NO: 319988 - DNA, 15 bp, Homo sapiens
gtaagttatgtaact

SEQ ID NO: 319989 - DNA, 15 bp, Homo sapiens
agtaagttatgtaac

SEQ ID NO: 319990 - DNA, 15 bp, Homo sapiens
gagtaagttatgtaa

SEQ ID NO: 319991 - DNA, 15 bp, Homo sapiens
tgagtaagttatgta

SEQ ID NO: 319992 - DNA, 15 bp, Homo sapiens
ctgagtaagttatgt

SEQ ID NO: 319993 - DNA, 15 bp, Homo sapiens
tctgagtaagttatg

SEQ ID NO: 319994 - DNA, 15 bp, Homo sapiens
atctgagtaagttat

SEQ ID NO: 319995 - DNA, 15 bp, Homo sapiens
catctgagtaagtta

SEQ ID NO: 319996 - DNA, 15 bp, Homo sapiens
acatctgagtaagtt

SEQ ID NO: 319997 - DNA, 15 bp, Homo sapiens
cacatctgagtaagt

SEQ ID NO: 319998 - DNA, 15 bp, Homo sapiens
gcacatctgagtaag

SEQ ID NO: 319999 - DNA, 15 bp, Homo sapiens
tgcacatctgagtaa

SEQ ID NO: 320000 - DNA, 15 bp, Homo sapiens
ctgcacatctgagta

SEQ ID NO: 320001 - DNA, 15 bp, Homo sapiens
gctgcacatctgagt

SEQ ID NO: 320002 - DNA, 15 bp, Homo sapiens
agctgcacatctgag

SEQ ID NO: 320003 - DNA, 15 bp, Homo sapiens
cagctgcacatctga

SEQ ID NO: 320004 - DNA, 15 bp, Homo sapiens
gcagctgcacatctg

SEQ ID NO: 320005 - DNA, 15 bp, Homo sapiens
agcagctgcacatct

SEQ ID NO: 320006 - DNA, 15 bp, Homo sapiens
cagcagctgcacatc

SEQ ID NO: 320007 - DNA, 15 bp, Homo sapiens
ccagcagctgcacat

SEQ ID NO: 320008 - DNA, 15 bp, Homo sapiens
accagcagctgcaca

SEQ ID NO: 320009 - DNA, 15 bp, Homo sapiens
caccagcagctgcac

SEQ ID NO: 320010 - DNA, 15 bp, Homo sapiens
ccaccagcagctgca

SEQ ID NO: 320011 - DNA, 15 bp, Homo sapiens
gccaccagcagctgc

SEQ ID NO: 320012 - DNA, 15 bp, Homo sapiens
tgccaccagcagctg

SEQ ID NO: 320013 - DNA, 15 bp, Homo sapiens
ctgccaccagcagct

SEQ ID NO: 320014 - DNA, 15 bp, Homo sapiens
tctgccaccagcagc

SEQ ID NO: 320015 - DNA, 15 bp, Homo sapiens
ctctgccaccagcag

SEQ ID NO: 320016 - DNA, 15 bp, Homo sapiens
gctctgccaccagca

SEQ ID NO: 320017 - DNA, 15 bp, Homo sapiens
ggctctgccaccagc

SEQ ID NO: 320018 - DNA, 15 bp, Homo sapiens
aggctctgccaccag

SEQ ID NO: 320019 - DNA, 15 bp, Homo sapiens
caggctctgccacca

SEQ ID NO: 320020 - DNA, 15 bp, Homo sapiens
tcaggctctgccacc

SEQ ID NO: 320021 - DNA, 15 bp, Homo sapiens
ttcaggctctgccac

SEQ ID NO: 320022 - DNA, 15 bp, Homo sapiens
attcaggctctgcca

SEQ ID NO: 320023 - DNA, 15 bp, Homo sapiens
tattcaggctctgcc

SEQ ID NO: 320024 - DNA, 15 bp, Homo sapiens
gtattcaggctctgc

SEQ ID NO: 320025 - DNA, 15 bp, Homo sapiens
tgtattcaggctctg

SEQ ID NO: 320026 - DNA, 15 bp, Homo sapiens
ttgtattcaggctct

SEQ ID NO: 320027 - DNA, 15 bp, Homo sapiens
tttgtattcaggctc

SEQ ID NO: 320028 - DNA, 15 bp, Homo sapiens
atttgtattcaggct

SEQ ID NO: 320029 - DNA, 15 bp, Homo sapiens
gatttgtattcaggc

SEQ ID NO: 320030 - DNA, 15 bp, Homo sapiens
ggatttgtattcagg

SEQ ID NO: 320031 - DNA, 15 bp, Homo sapiens
aggatttgtattcag

SEQ ID NO: 320032 - DNA, 15 bp, Homo sapiens
aaggatttgtattca

SEQ ID NO: 320033 - DNA, 15 bp, Homo sapiens
gaaggatttgtattc

SEQ ID NO: 320034 - DNA, 15 bp, Homo sapiens
tgaaggatttgtatt

SEQ ID NO: 320035 - DNA, 15 bp, Homo sapiens
gtgaaggatttgtat

SEQ ID NO: 320036 - DNA, 15 bp, Homo sapiens
agtgaaggatttgta

SEQ ID NO: 320037 - DNA, 15 bp, Homo sapiens
aagtgaaggatttgt

SEQ ID NO: 320038 - DNA, 15 bp, Homo sapiens
gaagtgaaggatttg

SEQ ID NO: 320039 - DNA, 15 bp, Homo sapiens
agaagtgaaggattt

SEQ ID NO: 320040 - DNA, 15 bp, Homo sapiens
gagaagtgaaggatt

SEQ ID NO: 320041 - DNA, 15 bp, Homo sapiens
ggagaagtgaaggat

SEQ ID NO: 320042 - DNA, 15 bp, Homo sapiens
tggagaagtgaagga

SEQ ID NO: 320043 - DNA, 15 bp, Homo sapiens
ttggagaagtgaagg

SEQ ID NO: 320044 - DNA, 15 bp, Homo sapiens
attggagaagtgaag

SEQ ID NO: 320045 - DNA, 15 bp, Homo sapiens
aattggagaagtgaa

SEQ ID NO: 320046 - DNA, 15 bp, Homo sapiens
taattggagaagtga

SEQ ID NO: 320047 - DNA, 15 bp, Homo sapiens
ttaattggagaagtg

SEQ ID NO: 320048 - DNA, 15 bp, Homo sapiens
tttaattggagaagt

SEQ ID NO: 320049 - DNA, 15 bp, Homo sapiens
gtttaattggagaag

SEQ ID NO: 320050 - DNA, 15 bp, Homo sapiens
ggtttaattggagaa

SEQ ID NO: 320051 - DNA, 15 bp, Homo sapiens
tggtttaattggaga

SEQ ID NO: 320052 - DNA, 15 bp, Homo sapiens
ctggtttaattggag

SEQ ID NO: 320053 - DNA, 15 bp, Homo sapiens
gctggtttaattgga

SEQ ID NO: 320054 - DNA, 15 bp, Homo sapiens
ggctggtttaattgg

SEQ ID NO: 320055 - DNA, 15 bp, Homo sapiens
tggctggtttaattg

SEQ ID NO: 320056 - DNA, 15 bp, Homo sapiens
atggctggtttaatt

SEQ ID NO: 320057 - DNA, 15 bp, Homo sapiens
gatggctggtttaat

SEQ ID NO: 320058 - DNA, 15 bp, Homo sapiens
agatggctggtttaa

SEQ ID NO: 320059 - DNA, 15 bp, Homo sapiens
gagatggctggttta

SEQ ID NO: 320060 - DNA, 15 bp, Homo sapiens
agagatggctggttt

SEQ ID NO: 320061 - DNA, 15 bp, Homo sapiens
cagagatggctggtt

SEQ ID NO: 320062 - DNA, 15 bp, Homo sapiens
tcagagatggctggt

SEQ ID NO: 320063 - DNA, 15 bp, Homo sapiens
ctcagagatggctgg

SEQ ID NO: 320064 - DNA, 15 bp, Homo sapiens
actcagagatggctg

SEQ ID NO: 320065 - DNA, 15 bp, Homo sapiens
aactcagagatggct

SEQ ID NO: 320066 - DNA, 15 bp, Homo sapiens
caactcagagatggc

SEQ ID NO: 320067 - DNA, 15 bp, Homo sapiens
gcaactcagagatgg

SEQ ID NO: 320068 - DNA, 15 bp, Homo sapiens
tgcaactcagagatg

SEQ ID NO: 320069 - DNA, 15 bp, Homo sapiens
ctgcaactcagagat

SEQ ID NO: 320070 - DNA, 15 bp, Homo sapiens
cctgcaactcagaga

SEQ ID NO: 320071 - DNA, 15 bp, Homo sapiens
ccctgcaactcagag

SEQ ID NO: 320072 - DNA, 15 bp, Homo sapiens
cccctgcaactcaga

SEQ ID NO: 320073 - DNA, 15 bp, Homo sapiens
acccctgcaactcag

SEQ ID NO: 320074 - DNA, 15 bp, Homo sapiens
aacccctgcaactca

SEQ ID NO: 320075 - DNA, 15 bp, Homo sapiens
aaacccctgcaactc

SEQ ID NO: 320076 - DNA, 15 bp, Homo sapiens
gaaacccctgcaact

SEQ ID NO: 320077 - DNA, 15 bp, Homo sapiens
tgaaacccctgcaac

SEQ ID NO: 320078 - DNA, 15 bp, Homo sapiens
atgaaacccctgcaa

SEQ ID NO: 320079 - DNA, 15 bp, Homo sapiens
catgaaacccctgca

SEQ ID NO: 320080 - DNA, 15 bp, Homo sapiens
gcatgaaacccctgc

SEQ ID NO: 320081 - DNA, 15 bp, Homo sapiens
ggcatgaaacccctg

SEQ ID NO: 320082 - DNA, 15 bp, Homo sapiens
tggcatgaaacccct

SEQ ID NO: 320083 - DNA, 15 bp, Homo sapiens
atggcatgaaacccc

SEQ ID NO: 320084 - DNA, 15 bp, Homo sapiens
tatggcatgaaaccc

SEQ ID NO: 320085 - DNA, 15 bp, Homo sapiens
gtatggcatgaaacc

SEQ ID NO: 320086 - DNA, 15 bp, Homo sapiens
agtatggcatgaaac

SEQ ID NO: 320087 - DNA, 15 bp, Homo sapiens
cagtatggcatgaaa

SEQ ID NO: 320088 - DNA, 15 bp, Homo sapiens
gcagtatggcatgaa

SEQ ID NO: 320089 - DNA, 15 bp, Homo sapiens
ggcagtatggcatga

SEQ ID NO: 320090 - DNA, 15 bp, Homo sapiens
gggcagtatggcatg

SEQ ID NO: 320091 - DNA, 15 bp, Homo sapiens
tgggcagtatggcat

SEQ ID NO: 320092 - DNA, 15 bp, Homo sapiens
gtgggcagtatggca

SEQ ID NO: 320093 - DNA, 15 bp, Homo sapiens
agtgggcagtatggc

SEQ ID NO: 320094 - DNA, 15 bp, Homo sapiens
cagtgggcagtatgg

SEQ ID NO: 320095 - DNA, 15 bp, Homo sapiens
ccagtgggcagtatg

SEQ ID NO: 320096 - DNA, 15 bp, Homo sapiens
tccagtgggcagtat

SEQ ID NO: 320097 - DNA, 15 bp, Homo sapiens
ttccagtgggcagta

SEQ ID NO: 320098 - DNA, 15 bp, Homo sapiens
cttccagtgggcagt

SEQ ID NO: 320099 - DNA, 15 bp, Homo sapiens
acttccagtgggcag

SEQ ID NO: 320100 - DNA, 15 bp, Homo sapiens
aacttccagtgggca

SEQ ID NO: 320101 - DNA, 15 bp, Homo sapiens
caacttccagtgggc

SEQ ID NO: 320102 - DNA, 15 bp, Homo sapiens
ccaacttccagtggg

SEQ ID NO: 320103 - DNA, 15 bp, Homo sapiens
cccaacttccagtgg

SEQ ID NO: 320104 - DNA, 15 bp, Homo sapiens
tcccaacttccagtg

SEQ ID NO: 320105 - DNA, 15 bp, Homo sapiens
ctcccaacttccagt

SEQ ID NO: 320106 - DNA, 15 bp, Homo sapiens
cctcccaacttccag

SEQ ID NO: 320107 - DNA, 15 bp, Homo sapiens
ccctcccaacttcca

SEQ ID NO: 320108 - DNA, 15 bp, Homo sapiens
tccctcccaacttcc

SEQ ID NO: 320109 - DNA, 15 bp, Homo sapiens
ttccctcccaacttc

SEQ ID NO: 320110 - DNA, 15 bp, Homo sapiens
attccctcccaactt

SEQ ID NO: 320111 - DNA, 15 bp, Homo sapiens
aattccctcccaact

SEQ ID NO: 320112 - DNA, 15 bp, Homo sapiens
aaattccctcccaac

SEQ ID NO: 320113 - DNA, 15 bp, Homo sapiens
taaattccctcccaa

SEQ ID NO: 320114 - DNA, 15 bp, Homo sapiens
gtaaattccctccca

SEQ ID NO: 320115 - DNA, 15 bp, Homo sapiens
tgtaaattccctccc

SEQ ID NO: 320116 - DNA, 15 bp, Homo sapiens
ctgtaaattccctcc

SEQ ID NO: 320117 - DNA, 15 bp, Homo sapiens
cctgtaaattccctc

SEQ ID NO: 320118 - DNA, 15 bp, Homo sapiens
ccctgtaaattccct

SEQ ID NO: 320119 - DNA, 15 bp, Homo sapiens
accctgtaaattccc

SEQ ID NO: 320120 - DNA, 15 bp, Homo sapiens
aaccctgtaaattcc

SEQ ID NO: 320121 - DNA, 15 bp, Homo sapiens
taaccctgtaaattc

SEQ ID NO: 320122 - DNA, 15 bp, Homo sapiens
gtaaccctgtaaatt

SEQ ID NO: 320123 - DNA, 15 bp, Homo sapiens
tgtaaccctgtaaat

SEQ ID NO: 320124 - DNA, 15 bp, Homo sapiens
ctgtaaccctgtaaa

SEQ ID NO: 320125 - DNA, 15 bp, Homo sapiens
gctgtaaccctgtaa

SEQ ID NO: 320126 - DNA, 15 bp, Homo sapiens
tgctgtaaccctgta

SEQ ID NO: 320127 - DNA, 15 bp, Homo sapiens
ctgctgtaaccctgt

SEQ ID NO: 320128 - DNA, 15 bp, Homo sapiens
tctgctgtaaccctg

SEQ ID NO: 320129 - DNA, 15 bp, Homo sapiens
atctgctgtaaccct

SEQ ID NO: 320130 - DNA, 15 bp, Homo sapiens
catctgctgtaaccc

SEQ ID NO: 320131 - DNA, 15 bp, Homo sapiens
tcatctgctgtaacc

SEQ ID NO: 320132 - DNA, 15 bp, Homo sapiens
atcatctgctgtaac

SEQ ID NO: 320133 - DNA, 15 bp, Homo sapiens
gatcatctgctgtaa

SEQ ID NO: 320134 - DNA, 15 bp, Homo sapiens
agatcatctgctgta

SEQ ID NO: 320135 - DNA, 15 bp, Homo sapiens
gagatcatctgctgt

SEQ ID NO: 320136 - DNA, 15 bp, Homo sapiens
agagatcatctgctg

SEQ ID NO: 320137 - DNA, 15 bp, Homo sapiens
cagagatcatctgct

SEQ ID NO: 320138 - DNA, 15 bp, Homo sapiens
acagagatcatctgc

SEQ ID NO: 320139 - DNA, 15 bp, Homo sapiens
aacagagatcatctg

SEQ ID NO: 320140 - DNA, 15 bp, Homo sapiens
aaacagagatcatct

SEQ ID NO: 320141 - DNA, 15 bp, Homo sapiens
taaacagagatcatc

SEQ ID NO: 320142 - DNA, 15 bp, Homo sapiens
ctaaacagagatcat

SEQ ID NO: 320143 - DNA, 15 bp, Homo sapiens
cctaaacagagatca

SEQ ID NO: 320144 - DNA, 15 bp, Homo sapiens
gcctaaacagagatc

SEQ ID NO: 320145 - DNA, 15 bp, Homo sapiens
tgcctaaacagagat

SEQ ID NO: 320146 - DNA, 15 bp, Homo sapiens
atgcctaaacagaga

SEQ ID NO: 320147 - DNA, 15 bp, Homo sapiens
gatgcctaaacagag

SEQ ID NO: 320148 - DNA, 15 bp, Homo sapiens
tgatgcctaaacaga

SEQ ID NO: 320149 - DNA, 15 bp, Homo sapiens
ctgatgcctaaacag

SEQ ID NO: 320150 - DNA, 15 bp, Homo sapiens
cctgatgcctaaaca

SEQ ID NO: 320151 - DNA, 15 bp, Homo sapiens
acctgatgcctaaac

SEQ ID NO: 320152 - DNA, 15 bp, Homo sapiens
cacctgatgcctaaa

SEQ ID NO: 320153 - DNA, 15 bp, Homo sapiens
tcacctgatgcctaa

SEQ ID NO: 320154 - DNA, 15 bp, Homo sapiens
ttcacctgatgccta

SEQ ID NO: 320155 - DNA, 15 bp, Homo sapiens
tttcacctgatgcct

SEQ ID NO: 320156 - DNA, 15 bp, Homo sapiens
gtttcacctgatgcc

SEQ ID NO: 320157 - DNA, 15 bp, Homo sapiens
agtttcacctgatgc

SEQ ID NO: 320158 - DNA, 15 bp, Homo sapiens
aagtttcacctgatg

SEQ ID NO: 320159 - DNA, 15 bp, Homo sapiens
aaagtttcacctgat

SEQ ID NO: 320160 - DNA, 15 bp, Homo sapiens
taaagtttcacctga

SEQ ID NO: 320161 - DNA, 15 bp, Homo sapiens
ctaaagtttcacctg

SEQ ID NO: 320162 - DNA, 15 bp, Homo sapiens
actaaagtttcacct

SEQ ID NO: 320163 - DNA, 15 bp, Homo sapiens
cactaaagtttcacc

SEQ ID NO: 320164 - DNA, 15 bp, Homo sapiens
acactaaagtttcac

SEQ ID NO: 320165 - DNA, 15 bp, Homo sapiens
aacactaaagtttca

SEQ ID NO: 320166 - DNA, 15 bp, Homo sapiens
gaacactaaagtttc

SEQ ID NO: 320167 - DNA, 15 bp, Homo sapiens
ggaacactaaagttt

SEQ ID NO: 320168 - DNA, 15 bp, Homo sapiens
gggaacactaaagtt

SEQ ID NO: 320169 - DNA, 15 bp, Homo sapiens
agggaacactaaagt

SEQ ID NO: 320170 - DNA, 15 bp, Homo sapiens
tagggaacactaaag

SEQ ID NO: 320171 - DNA, 15 bp, Homo sapiens
ttagggaacactaaa

SEQ ID NO: 320172 - DNA, 15 bp, Homo sapiens
tttagggaacactaa

SEQ ID NO: 320173 - DNA, 15 bp, Homo sapiens
atttagggaacacta

SEQ ID NO: 320174 - DNA, 15 bp, Homo sapiens
aatttagggaacact

SEQ ID NO: 320175 - DNA, 15 bp, Homo sapiens
caatttagggaacac

SEQ ID NO: 320176 - DNA, 15 bp, Homo sapiens
ccaatttagggaaca

SEQ ID NO: 320177 - DNA, 15 bp, Homo sapiens
accaatttagggaac

SEQ ID NO: 320178 - DNA, 15 bp, Homo sapiens
taccaatttagggaa

SEQ ID NO: 320179 - DNA, 15 bp, Homo sapiens
gtaccaatttaggga

SEQ ID NO: 320180 - DNA, 15 bp, Homo sapiens
tgtaccaatttaggg

SEQ ID NO: 320181 - DNA, 15 bp, Homo sapiens
ttgtaccaatttagg

SEQ ID NO: 320182 - DNA, 15 bp, Homo sapiens
cttgtaccaatttag

SEQ ID NO: 320183 - DNA, 15 bp, Homo sapiens
gcttgtaccaattta

SEQ ID NO: 320184 - DNA, 15 bp, Homo sapiens
tgcttgtaccaattt

SEQ ID NO: 320185 - DNA, 15 bp, Homo sapiens
ctgcttgtaccaatt

SEQ ID NO: 320186 - DNA, 15 bp, Homo sapiens
tctgcttgtaccaat

SEQ ID NO: 320187 - DNA, 15 bp, Homo sapiens
gtctgcttgtaccaa

SEQ ID NO: 320188 - DNA, 15 bp, Homo sapiens
agtctgcttgtacca

SEQ ID NO: 320189 - DNA, 15 bp, Homo sapiens
gagtctgcttgtacc

SEQ ID NO: 320190 - DNA, 15 bp, Homo sapiens
agagtctgcttgtac

SEQ ID NO: 320191 - DNA, 15 bp, Homo sapiens
cagagtctgcttgta

SEQ ID NO: 320192 - DNA, 15 bp, Homo sapiens
acagagtctgcttgt

SEQ ID NO: 320193 - DNA, 15 bp, Homo sapiens
aacagagtctgcttg

SEQ ID NO: 320194 - DNA, 15 bp, Homo sapiens
aaacagagtctgctt

SEQ ID NO: 320195 - DNA, 15 bp, Homo sapiens
caaacagagtctgct

SEQ ID NO: 320196 - DNA, 15 bp, Homo sapiens
tcaaacagagtctgc

SEQ ID NO: 320197 - DNA, 15 bp, Homo sapiens
ctcaaacagagtctg

SEQ ID NO: 320198 - DNA, 15 bp, Homo sapiens
actcaaacagagtct

SEQ ID NO: 320199 - DNA, 15 bp, Homo sapiens
tactcaaacagagtc

SEQ ID NO: 320200 - DNA, 15 bp, Homo sapiens
atactcaaacagagt

SEQ ID NO: 320201 - DNA, 15 bp, Homo sapiens
gatactcaaacagag

SEQ ID NO: 320202 - DNA, 15 bp, Homo sapiens
agatactcaaacaga

SEQ ID NO: 320203 - DNA, 15 bp, Homo sapiens
gagatactcaaacag

SEQ ID NO: 320204 - DNA, 15 bp, Homo sapiens
agagatactcaaaca

SEQ ID NO: 320205 - DNA, 15 bp, Homo sapiens
cagagatactcaaac

SEQ ID NO: 320206 - DNA, 15 bp, Homo sapiens
acagagatactcaaa

SEQ ID NO: 320207 - DNA, 15 bp, Homo sapiens
aacagagatactcaa

SEQ ID NO: 320208 - DNA, 15 bp, Homo sapiens
caacagagatactca

SEQ ID NO: 320209 - DNA, 15 bp, Homo sapiens
tcaacagagatactc

SEQ ID NO: 320210 - DNA, 15 bp, Homo sapiens
gtcaacagagatact

SEQ ID NO: 320211 - DNA, 15 bp, Homo sapiens
tgtcaacagagatac

SEQ ID NO: 320212 - DNA, 15 bp, Homo sapiens
ctgtcaacagagata

SEQ ID NO: 320213 - DNA, 15 bp, Homo sapiens
cctgtcaacagagat

SEQ ID NO: 320214 - DNA, 15 bp, Homo sapiens
ccctgtcaacagaga

SEQ ID NO: 320215 - DNA, 15 bp, Homo sapiens
tccctgtcaacagag

SEQ ID NO: 320216 - DNA, 15 bp, Homo sapiens
ctccctgtcaacaga

SEQ ID NO: 320217 - DNA, 15 bp, Homo sapiens
tctccctgtcaacag

SEQ ID NO: 320218 - DNA, 15 bp, Homo sapiens
atctccctgtcaaca

SEQ ID NO: 320219 - DNA, 15 bp, Homo sapiens
tatctccctgtcaac

SEQ ID NO: 320220 - DNA, 15 bp, Homo sapiens
gtatctccctgtcaa

SEQ ID NO: 320221 - DNA, 15 bp, Homo sapiens
ggtatctccctgtca

SEQ ID NO: 320222 - DNA, 15 bp, Homo sapiens
tggtatctccctgtc

SEQ ID NO: 320223 - DNA, 15 bp, Homo sapiens
atggtatctccctgt

SEQ ID NO: 320224 - DNA, 15 bp, Homo sapiens
gatggtatctccctg

SEQ ID NO: 320225 - DNA, 15 bp, Homo sapiens
agatggtatctccct

SEQ ID NO: 320226 - DNA, 15 bp, Homo sapiens
tagatggtatctccc

SEQ ID NO: 320227 - DNA, 15 bp, Homo sapiens
ttagatggtatctcc

SEQ ID NO: 320228 - DNA, 15 bp, Homo sapiens
gttagatggtatctc

SEQ ID NO: 320229 - DNA, 15 bp, Homo sapiens
tgttagatggtatct

SEQ ID NO: 320230 - DNA, 15 bp, Homo sapiens
atgttagatggtatc

SEQ ID NO: 320231 - DNA, 15 bp, Homo sapiens
catgttagatggtat

SEQ ID NO: 320232 - DNA, 15 bp, Homo sapiens
ccatgttagatggta

SEQ ID NO: 320233 - DNA, 15 bp, Homo sapiens
gccatgttagatggt

SEQ ID NO: 320234 - DNA, 15 bp, Homo sapiens
tgccatgttagatgg

SEQ ID NO: 320235 - DNA, 15 bp, Homo sapiens
ctgccatgttagatg

SEQ ID NO: 320236 - DNA, 15 bp, Homo sapiens
gctgccatgttagat

SEQ ID NO: 320237 - DNA, 15 bp, Homo sapiens
ggctgccatgttaga

SEQ ID NO: 320238 - DNA, 15 bp, Homo sapiens
gggctgccatgttag

SEQ ID NO: 320239 - DNA, 15 bp, Homo sapiens
tgggctgccatgtta

SEQ ID NO: 320240 - DNA, 15 bp, Homo sapiens
atgggctgccatgtt

SEQ ID NO: 320241 - DNA, 15 bp, Homo sapiens
gatgggctgccatgt

SEQ ID NO: 320242 - DNA, 15 bp, Homo sapiens
agatgggctgccatg

SEQ ID NO: 320243 - DNA, 15 bp, Homo sapiens
gagatgggctgccat

SEQ ID NO: 320244 - DNA, 15 bp, Homo sapiens
tgagatgggctgcca

SEQ ID NO: 320245 - DNA, 15 bp, Homo sapiens
ttgagatgggctgcc

SEQ ID NO: 320246 - DNA, 15 bp, Homo sapiens
attgagatgggctgc

SEQ ID NO: 320247 - DNA, 15 bp, Homo sapiens
cattgagatgggctg

SEQ ID NO: 320248 - DNA, 15 bp, Homo sapiens
acattgagatgggct

SEQ ID NO: 320249 - DNA, 15 bp, Homo sapiens
aacattgagatgggc

SEQ ID NO: 320250 - DNA, 15 bp, Homo sapiens
aaacattgagatggg

SEQ ID NO: 320251 - DNA, 15 bp, Homo sapiens
aaaacattgagatgg

SEQ ID NO: 320252 - DNA, 15 bp, Homo sapiens
aaaaacattgagatg

SEQ ID NO: 320253 - DNA, 15 bp, Homo sapiens
taaaaacattgagat

SEQ ID NO: 320254 - DNA, 15 bp, Homo sapiens
ttaaaaacattgaga

SEQ ID NO: 320255 - DNA, 15 bp, Homo sapiens
attaaaaacattgag

SEQ ID NO: 320256 - DNA, 15 bp, Homo sapiens
tattaaaaacattga

SEQ ID NO: 320257 - DNA, 15 bp, Homo sapiens
ttattaaaaacattg

SEQ ID NO: 320258 - DNA, 15 bp, Homo sapiens
cttattaaaaacatt

SEQ ID NO: 320259 - DNA, 15 bp, Homo sapiens
acttattaaaaacat

SEQ ID NO: 320260 - DNA, 15 bp, Homo sapiens
tacttattaaaaaca

SEQ ID NO: 320261 - DNA, 15 bp, Homo sapiens
atacttattaaaaac

SEQ ID NO: 320262 - DNA, 15 bp, Homo sapiens
tatacttattaaaaa

SEQ ID NO: 320263 - DNA, 15 bp, Homo sapiens
atatacttattaaaa

SEQ ID NO: 320264 - DNA, 15 bp, Homo sapiens
aatatacttattaaa

SEQ ID NO: 320265 - DNA, 15 bp, Homo sapiens
taatatacttattaa

SEQ ID NO: 320266 - DNA, 15 bp, Homo sapiens
ataatatacttatta

SEQ ID NO: 320267 - DNA, 15 bp, Homo sapiens
tataatatacttatt

SEQ ID NO: 320268 - DNA, 15 bp, Homo sapiens
gtataatatacttat

SEQ ID NO: 320269 - DNA, 15 bp, Homo sapiens
tgtataatatactta

SEQ ID NO: 320270 - DNA, 15 bp, Homo sapiens
atgtataatatactt

SEQ ID NO: 320271 - DNA, 15 bp, Homo sapiens
catgtataatatact

SEQ ID NO: 320272 - DNA, 15 bp, Homo sapiens
gcatgtataatatac

SEQ ID NO: 320273 - DNA, 15 bp, Homo sapiens
tgcatgtataatata

SEQ ID NO: 320274 - DNA, 15 bp, Homo sapiens
ttgcatgtataatat

SEQ ID NO: 320275 - DNA, 15 bp, Homo sapiens
attgcatgtataata

SEQ ID NO: 320276 - DNA, 15 bp, Homo sapiens
tattgcatgtataat

SEQ ID NO: 320277 - DNA, 15 bp, Homo sapiens
ttattgcatgtataa

SEQ ID NO: 320278 - DNA, 15 bp, Homo sapiens
tttattgcatgtata

SEQ ID NO: 320279 - DNA, 15 bp, Homo sapiens
ttttattgcatgtat

SEQ ID NO: 320280 - DNA, 15 bp, Homo sapiens
attttattgcatgta

SEQ ID NO: 320281 - DNA, 15 bp, Homo sapiens
cattttattgcatgt

SEQ ID NO: 320282 - DNA, 15 bp, Homo sapiens
gcattttattgcatg

SEQ ID NO: 320283 - DNA, 15 bp, Homo sapiens
tgcattttattgcat

SEQ ID NO: 320284 - DNA, 15 bp, Homo sapiens
atgcattttattgca

SEQ ID NO: 320285 - DNA, 15 bp, Homo sapiens
tatgcattttattgc

SEQ ID NO: 320286 - DNA, 15 bp, Homo sapiens
ctatgcattttattg

SEQ ID NO: 320287 - DNA, 15 bp, Homo sapiens
tctatgcattttatt

SEQ ID NO: 320288 - DNA, 15 bp, Homo sapiens
atctatgcattttat

SEQ ID NO: 320289 - DNA, 15 bp, Homo sapiens
gatctatgcatttta

SEQ ID NO: 320290 - DNA, 15 bp, Homo sapiens
ggatctatgcatttt

SEQ ID NO: 320291 - DNA, 15 bp, Homo sapiens
aggatctatgcattt

SEQ ID NO: 320292 - DNA, 15 bp, Homo sapiens
caggatctatgcatt

SEQ ID NO: 320293 - DNA, 15 bp, Homo sapiens
tcaggatctatgcat

SEQ ID NO: 320294 - DNA, 15 bp, Homo sapiens
ctcaggatctatgca

SEQ ID NO: 320295 - DNA, 15 bp, Homo sapiens
cctcaggatctatgc

SEQ ID NO: 320296 - DNA, 15 bp, Homo sapiens
ccctcaggatctatg

SEQ ID NO: 320297 - DNA, 15 bp, Homo sapiens
accctcaggatctat

SEQ ID NO: 320298 - DNA, 15 bp, Homo sapiens
caccctcaggatcta

SEQ ID NO: 320299 - DNA, 15 bp, Homo sapiens
gcaccctcaggatct

SEQ ID NO: 320300 - DNA, 15 bp, Homo sapiens
tgcaccctcaggatc

SEQ ID NO: 320301 - DNA, 15 bp, Homo sapiens
atgcaccctcaggat

SEQ ID NO: 320302 - DNA, 15 bp, Homo sapiens
aatgcaccctcagga

SEQ ID NO: 320303 - DNA, 15 bp, Homo sapiens
gaatgcaccctcagg

SEQ ID NO: 320304 - DNA, 15 bp, Homo sapiens
tgaatgcaccctcag

SEQ ID NO: 320305 - DNA, 15 bp, Homo sapiens
ctgaatgcaccctca

SEQ ID NO: 320306 - DNA, 15 bp, Homo sapiens
actgaatgcaccctc

SEQ ID NO: 320307 - DNA, 15 bp, Homo sapiens
cactgaatgcaccct

SEQ ID NO: 320308 - DNA, 15 bp, Homo sapiens
tcactgaatgcaccc

SEQ ID NO: 320309 - DNA, 15 bp, Homo sapiens
ctcactgaatgcacc

SEQ ID NO: 320310 - DNA, 15 bp, Homo sapiens
actcactgaatgcac

SEQ ID NO: 320311 - DNA, 15 bp, Homo sapiens
aactcactgaatgca

SEQ ID NO: 320312 - DNA, 15 bp, Homo sapiens
gaactcactgaatgc

SEQ ID NO: 320313 - DNA, 15 bp, Homo sapiens
agaactcactgaatg

SEQ ID NO: 320314 - DNA, 15 bp, Homo sapiens
cagaactcactgaat

SEQ ID NO: 320315 - DNA, 15 bp, Homo sapiens
tcagaactcactgaa

SEQ ID NO: 320316 - DNA, 15 bp, Homo sapiens
gtcagaactcactga

SEQ ID NO: 320317 - DNA, 15 bp, Homo sapiens
tgtcagaactcactg

SEQ ID NO: 320318 - DNA, 15 bp, Homo sapiens
ctgtcagaactcact

SEQ ID NO: 320319 - DNA, 15 bp, Homo sapiens
tctgtcagaactcac

SEQ ID NO: 320320 - DNA, 15 bp, Homo sapiens
ctctgtcagaactca

SEQ ID NO: 320321 - DNA, 15 bp, Homo sapiens
tctctgtcagaactc

SEQ ID NO: 320322 - DNA, 15 bp, Homo sapiens
atctctgtcagaact

SEQ ID NO: 320323 - DNA, 15 bp, Homo sapiens
tatctctgtcagaac

SEQ ID NO: 320324 - DNA, 15 bp, Homo sapiens
atatctctgtcagaa

SEQ ID NO: 320325 - DNA, 15 bp, Homo sapiens
catatctctgtcaga

SEQ ID NO: 320326 - DNA, 15 bp, Homo sapiens
gcatatctctgtcag

SEQ ID NO: 320327 - DNA, 15 bp, Homo sapiens
tgcatatctctgtca

SEQ ID NO: 320328 - DNA, 15 bp, Homo sapiens
gtgcatatctctgtc

SEQ ID NO: 320329 - DNA, 15 bp, Homo sapiens
ggtgcatatctctgt

SEQ ID NO: 320330 - DNA, 15 bp, Homo sapiens
tggtgcatatctctg

SEQ ID NO: 320331 - DNA, 15 bp, Homo sapiens
gtggtgcatatctct

SEQ ID NO: 320332 - DNA, 15 bp, Homo sapiens
agtggtgcatatctc

SEQ ID NO: 320333 - DNA, 15 bp, Homo sapiens
cagtggtgcatatct

SEQ ID NO: 320334 - DNA, 15 bp, Homo sapiens
acagtggtgcatatc

SEQ ID NO: 320335 - DNA, 15 bp, Homo sapiens
tacagtggtgcatat

SEQ ID NO: 320336 - DNA, 15 bp, Homo sapiens
ttacagtggtgcata

SEQ ID NO: 320337 - DNA, 15 bp, Homo sapiens
tttacagtggtgcat

SEQ ID NO: 320338 - DNA, 15 bp, Homo sapiens
ttttacagtggtgca

SEQ ID NO: 320339 - DNA, 15 bp, Homo sapiens
attttacagtggtgc

SEQ ID NO: 320340 - DNA, 15 bp, Homo sapiens
cattttacagtggtg

SEQ ID NO: 320341 - DNA, 15 bp, Homo sapiens
ccattttacagtggt

SEQ ID NO: 320342 - DNA, 15 bp, Homo sapiens
accattttacagtgg

SEQ ID NO: 320343 - DNA, 15 bp, Homo sapiens
gaccattttacagtg

SEQ ID NO: 320344 - DNA, 15 bp, Homo sapiens
agaccattttacagt

SEQ ID NO: 320345 - DNA, 15 bp, Homo sapiens
cagaccattttacag

SEQ ID NO: 320346 - DNA, 15 bp, Homo sapiens
acagaccattttaca

SEQ ID NO: 320347 - DNA, 15 bp, Homo sapiens
gacagaccattttac

SEQ ID NO: 320348 - DNA, 15 bp, Homo sapiens
tgacagaccatttta

SEQ ID NO: 320349 - DNA, 15 bp, Homo sapiens
atgacagaccatttt

SEQ ID NO: 320350 - DNA, 15 bp, Homo sapiens
gatgacagaccattt

SEQ ID NO: 320351 - DNA, 15 bp, Homo sapiens
ggatgacagaccatt

SEQ ID NO: 320352 - DNA, 15 bp, Homo sapiens
tggatgacagaccat

SEQ ID NO: 320353 - DNA, 15 bp, Homo sapiens
atggatgacagacca

SEQ ID NO: 320354 - DNA, 15 bp, Homo sapiens
tatggatgacagacc

SEQ ID NO: 320355 - DNA, 15 bp, Homo sapiens
atatggatgacagac

SEQ ID NO: 320356 - DNA, 15 bp, Homo sapiens
gatatggatgacaga

SEQ ID NO: 320357 - DNA, 15 bp, Homo sapiens
tgatatggatgacag

SEQ ID NO: 320358 - DNA, 15 bp, Homo sapiens
ttgatatggatgaca

SEQ ID NO: 320359 - DNA, 15 bp, Homo sapiens
gttgatatggatgac

SEQ ID NO: 320360 - DNA, 15 bp, Homo sapiens
tgttgatatggatga

SEQ ID NO: 320361 - DNA, 15 bp, Homo sapiens
atgttgatatggatg

SEQ ID NO: 320362 - DNA, 15 bp, Homo sapiens
tatgttgatatggat

SEQ ID NO: 320363 - DNA, 15 bp, Homo sapiens
ctatgttgatatgga

SEQ ID NO: 320364 - DNA, 15 bp, Homo sapiens
tctatgttgatatgg

SEQ ID NO: 320365 - DNA, 15 bp, Homo sapiens
ctctatgttgatatg

SEQ ID NO: 320366 - DNA, 15 bp, Homo sapiens
tctctatgttgatat

SEQ ID NO: 320367 - DNA, 15 bp, Homo sapiens
ttctctatgttgata

SEQ ID NO: 320368 - DNA, 15 bp, Homo sapiens
gttctctatgttgat

SEQ ID NO: 320369 - DNA, 15 bp, Homo sapiens
tgttctctatgttga

SEQ ID NO: 320370 - DNA, 15 bp, Homo sapiens
atgttctctatgttg

SEQ ID NO: 320371 - DNA, 15 bp, Homo sapiens
aatgttctctatgtt

SEQ ID NO: 320372 - DNA, 15 bp, Homo sapiens
aaatgttctctatgt

SEQ ID NO: 320373 - DNA, 15 bp, Homo sapiens
aaaatgttctctatg

SEQ ID NO: 320374 - DNA, 15 bp, Homo sapiens
aaaaatgttctctat

SEQ ID NO: 320375 - DNA, 15 bp, Homo sapiens
taaaaatgttctcta

SEQ ID NO: 320376 - DNA, 15 bp, Homo sapiens
gtaaaaatgttctct

SEQ ID NO: 320377 - DNA, 15 bp, Homo sapiens
agtaaaaatgttctc

SEQ ID NO: 320378 - DNA, 15 bp, Homo sapiens
tagtaaaaatgttct

SEQ ID NO: 320379 - DNA, 15 bp, Homo sapiens
atagtaaaaatgttc

SEQ ID NO: 320380 - DNA, 15 bp, Homo sapiens
gatagtaaaaatgtt

SEQ ID NO: 320381 - DNA, 15 bp, Homo sapiens
ggatagtaaaaatgt

SEQ ID NO: 320382 - DNA, 15 bp, Homo sapiens
aggatagtaaaaatg

SEQ ID NO: 320383 - DNA, 15 bp, Homo sapiens
caggatagtaaaaat

SEQ ID NO: 320384 - DNA, 15 bp, Homo sapiens
ccaggatagtaaaaa

SEQ ID NO: 320385 - DNA, 15 bp, Homo sapiens
tccaggatagtaaaa

SEQ ID NO: 320386 - DNA, 15 bp, Homo sapiens
ttccaggatagtaaa

SEQ ID NO: 320387 - DNA, 15 bp, Homo sapiens
attccaggatagtaa

SEQ ID NO: 320388 - DNA, 15 bp, Homo sapiens
cattccaggatagta

SEQ ID NO: 320389 - DNA, 15 bp, Homo sapiens
acattccaggatagt

SEQ ID NO: 320390 - DNA, 15 bp, Homo sapiens
aacattccaggatag

SEQ ID NO: 320391 - DNA, 15 bp, Homo sapiens
aaacattccaggata

SEQ ID NO: 320392 - DNA, 15 bp, Homo sapiens
gaaacattccaggat

SEQ ID NO: 320393 - DNA, 15 bp, Homo sapiens
agaaacattccagga

SEQ ID NO: 320394 - DNA, 15 bp, Homo sapiens
aagaaacattccagg

SEQ ID NO: 320395 - DNA, 15 bp, Homo sapiens
aaagaaacattccag

SEQ ID NO: 320396 - DNA, 15 bp, Homo sapiens
taaagaaacattcca

SEQ ID NO: 320397 - DNA, 15 bp, Homo sapiens
ataaagaaacattcc

SEQ ID NO: 320398 - DNA, 15 bp, Homo sapiens
cataaagaaacattc

SEQ ID NO: 320399 - DNA, 15 bp, Homo sapiens
gcataaagaaacatt

SEQ ID NO: 320400 - DNA, 15 bp, Homo sapiens
agcataaagaaacat

SEQ ID NO: 320401 - DNA, 15 bp, Homo sapiens
gagcataaagaaaca

SEQ ID NO: 320402 - DNA, 15 bp, Homo sapiens
tgagcataaagaaac

SEQ ID NO: 320403 - DNA, 15 bp, Homo sapiens
atgagcataaagaaa

SEQ ID NO: 320404 - DNA, 15 bp, Homo sapiens
aatgagcataaagaa

SEQ ID NO: 320405 - DNA, 15 bp, Homo sapiens
aaatgagcataaaga

SEQ ID NO: 320406 - DNA, 15 bp, Homo sapiens
gaaatgagcataaag

SEQ ID NO: 320407 - DNA, 15 bp, Homo sapiens
agaaatgagcataaa

SEQ ID NO: 320408 - DNA, 15 bp, Homo sapiens
cagaaatgagcataa

SEQ ID NO: 320409 - DNA, 15 bp, Homo sapiens
acagaaatgagcata

SEQ ID NO: 320410 - DNA, 15 bp, Homo sapiens
gacagaaatgagcat

SEQ ID NO: 320411 - DNA, 15 bp, Homo sapiens
tgacagaaatgagca

SEQ ID NO: 320412 - DNA, 15 bp, Homo sapiens
ttgacagaaatgagc

SEQ ID NO: 320413 - DNA, 15 bp, Homo sapiens
attgacagaaatgag

SEQ ID NO: 320414 - DNA, 15 bp, Homo sapiens
tattgacagaaatga

SEQ ID NO: 320415 - DNA, 15 bp, Homo sapiens
atattgacagaaatg

SEQ ID NO: 320416 - DNA, 15 bp, Homo sapiens
gatattgacagaaat

SEQ ID NO: 320417 - DNA, 15 bp, Homo sapiens
agatattgacagaaa

SEQ ID NO: 320418 - DNA, 15 bp, Homo sapiens
cagatattgacagaa

SEQ ID NO: 320419 - DNA, 15 bp, Homo sapiens
gcagatattgacaga

SEQ ID NO: 320420 - DNA, 15 bp, Homo sapiens
agcagatattgacag

SEQ ID NO: 320421 - DNA, 15 bp, Homo sapiens
gagcagatattgaca

SEQ ID NO: 320422 - DNA, 15 bp, Homo sapiens
agagcagatattgac

SEQ ID NO: 320423 - DNA, 15 bp, Homo sapiens
gagagcagatattga

SEQ ID NO: 320424 - DNA, 15 bp, Homo sapiens
agagagcagatattg

SEQ ID NO: 320425 - DNA, 15 bp, Homo sapiens
gagagagcagatatt

SEQ ID NO: 320426 - DNA, 15 bp, Homo sapiens
ggagagagcagatat

SEQ ID NO: 320427 - DNA, 15 bp, Homo sapiens
aggagagagcagata

SEQ ID NO: 320428 - DNA, 15 bp, Homo sapiens
gaggagagagcagat

SEQ ID NO: 320429 - DNA, 15 bp, Homo sapiens
ggaggagagagcaga

SEQ ID NO: 320430 - DNA, 15 bp, Homo sapiens
gggaggagagagcag

SEQ ID NO: 320431 - DNA, 15 bp, Homo sapiens
agggaggagagagca

SEQ ID NO: 320432 - DNA, 15 bp, Homo sapiens
aagggaggagagagc

SEQ ID NO: 320433 - DNA, 15 bp, Homo sapiens
caagggaggagagag

SEQ ID NO: 320434 - DNA, 15 bp, Homo sapiens
tcaagggaggagaga

SEQ ID NO: 320435 - DNA, 15 bp, Homo sapiens
ttcaagggaggagag

SEQ ID NO: 320436 - DNA, 15 bp, Homo sapiens
gttcaagggaggaga

SEQ ID NO: 320437 - DNA, 15 bp, Homo sapiens
tgttcaagggaggag

SEQ ID NO: 320438 - DNA, 15 bp, Homo sapiens
atgttcaagggagga

SEQ ID NO: 320439 - DNA, 15 bp, Homo sapiens
tatgttcaagggagg

SEQ ID NO: 320440 - DNA, 15 bp, Homo sapiens
ttatgttcaagggag

SEQ ID NO: 320441 - DNA, 15 bp, Homo sapiens
tttatgttcaaggga

SEQ ID NO: 320442 - DNA, 15 bp, Homo sapiens
ttttatgttcaaggg

SEQ ID NO: 320443 - DNA, 15 bp, Homo sapiens
tttttatgttcaagg

SEQ ID NO: 320444 - DNA, 15 bp, Homo sapiens
ttttttatgttcaag

SEQ ID NO: 320445 - DNA, 15 bp, Homo sapiens
tttttttatgttcaa

SEQ ID NO: 320446 - DNA, 15 bp, Homo sapiens
atttttttatgttca

SEQ ID NO: 320447 - DNA, 15 bp, Homo sapiens
gatttttttatgttc

SEQ ID NO: 320448 - DNA, 15 bp, Homo sapiens
tgatttttttatgtt

SEQ ID NO: 320449 - DNA, 15 bp, Homo sapiens
gtgatttttttatgt

SEQ ID NO: 320450 - DNA, 15 bp, Homo sapiens
agtgatttttttatg

SEQ ID NO: 320451 - DNA, 15 bp, Homo sapiens
tagtgatttttttat

SEQ ID NO: 320452 - DNA, 15 bp, Homo sapiens
atagtgattttttta

SEQ ID NO: 320453 - DNA, 15 bp, Homo sapiens
gatagtgattttttt

SEQ ID NO: 320454 - DNA, 15 bp, Homo sapiens
agatagtgatttttt

SEQ ID NO: 320455 - DNA, 15 bp, Homo sapiens
aagatagtgattttt

SEQ ID NO: 320456 - DNA, 15 bp, Homo sapiens
caagatagtgatttt

SEQ ID NO: 320457 - DNA, 15 bp, Homo sapiens
ccaagatagtgattt

SEQ ID NO: 320458 - DNA, 15 bp, Homo sapiens
gccaagatagtgatt

SEQ ID NO: 320459 - DNA, 15 bp, Homo sapiens
agccaagatagtgat

SEQ ID NO: 320460 - DNA, 15 bp, Homo sapiens
aagccaagatagtga

SEQ ID NO: 320461 - DNA, 15 bp, Homo sapiens
gaagccaagatagtg

SEQ ID NO: 320462 - DNA, 15 bp, Homo sapiens
tgaagccaagatagt

SEQ ID NO: 320463 - DNA, 15 bp, Homo sapiens
ttgaagccaagatag

SEQ ID NO: 320464 - DNA, 15 bp, Homo sapiens
attgaagccaagata

SEQ ID NO: 320465 - DNA, 15 bp, Homo sapiens
gattgaagccaagat

SEQ ID NO: 320466 - DNA, 15 bp, Homo sapiens
tgattgaagccaaga

SEQ ID NO: 320467 - DNA, 15 bp, Homo sapiens
gtgattgaagccaag

SEQ ID NO: 320468 - DNA, 15 bp, Homo sapiens
agtgattgaagccaa

SEQ ID NO: 320469 - DNA, 15 bp, Homo sapiens
tagtgattgaagcca

SEQ ID NO: 320470 - DNA, 15 bp, Homo sapiens
atagtgattgaagcc

SEQ ID NO: 320471 - DNA, 15 bp, Homo sapiens
tatagtgattgaagc

SEQ ID NO: 320472 - DNA, 15 bp, Homo sapiens
ctatagtgattgaag

SEQ ID NO: 320473 - DNA, 15 bp, Homo sapiens
tctatagtgattgaa

SEQ ID NO: 320474 - DNA, 15 bp, Homo sapiens
atctatagtgattga

SEQ ID NO: 320475 - DNA, 15 bp, Homo sapiens
aatctatagtgattg

SEQ ID NO: 320476 - DNA, 15 bp, Homo sapiens
taatctatagtgatt

SEQ ID NO: 320477 - DNA, 15 bp, Homo sapiens
ctaatctatagtgat

SEQ ID NO: 320478 - DNA, 15 bp, Homo sapiens
actaatctatagtga

SEQ ID NO: 320479 - DNA, 15 bp, Homo sapiens
gactaatctatagtg

SEQ ID NO: 320480 - DNA, 15 bp, Homo sapiens
agactaatctatagt

SEQ ID NO: 320481 - DNA, 15 bp, Homo sapiens
aagactaatctatag

SEQ ID NO: 320482 - DNA, 15 bp, Homo sapiens
caagactaatctata

SEQ ID NO: 320483 - DNA, 15 bp, Homo sapiens
acaagactaatctat

SEQ ID NO: 320484 - DNA, 15 bp, Homo sapiens
gacaagactaatcta

SEQ ID NO: 320485 - DNA, 15 bp, Homo sapiens
agacaagactaatct

SEQ ID NO: 320486 - DNA, 15 bp, Homo sapiens
cagacaagactaatc

SEQ ID NO: 320487 - DNA, 15 bp, Homo sapiens
gcagacaagactaat

SEQ ID NO: 320488 - DNA, 15 bp, Homo sapiens
agcagacaagactaa

SEQ ID NO: 320489 - DNA, 15 bp, Homo sapiens
gagcagacaagacta

SEQ ID NO: 320490 - DNA, 15 bp, Homo sapiens
agagcagacaagact

SEQ ID NO: 320491 - DNA, 15 bp, Homo sapiens
gagagcagacaagac

SEQ ID NO: 320492 - DNA, 15 bp, Homo sapiens
tgagagcagacaaga

SEQ ID NO: 320493 - DNA, 15 bp, Homo sapiens
ttgagagcagacaag

SEQ ID NO: 320494 - DNA, 15 bp, Homo sapiens
attgagagcagacaa

SEQ ID NO: 320495 - DNA, 15 bp, Homo sapiens
aattgagagcagaca

SEQ ID NO: 320496 - DNA, 15 bp, Homo sapiens
aaattgagagcagac

SEQ ID NO: 320497 - DNA, 15 bp, Homo sapiens
aaaattgagagcaga

SEQ ID NO: 320498 - DNA, 15 bp, Homo sapiens
aaaaattgagagcag

SEQ ID NO: 320499 - DNA, 15 bp, Homo sapiens
caaaaattgagagca

SEQ ID NO: 320500 - DNA, 15 bp, Homo sapiens
acaaaaattgagagc

SEQ ID NO: 320501 - DNA, 15 bp, Homo sapiens
tacaaaaattgagag

SEQ ID NO: 320502 - DNA, 15 bp, Homo sapiens
atacaaaaattgaga

SEQ ID NO: 320503 - DNA, 15 bp, Homo sapiens
catacaaaaattgag

SEQ ID NO: 320504 - DNA, 15 bp, Homo sapiens
tcatacaaaaattga

SEQ ID NO: 320505 - DNA, 15 bp, Homo sapiens
ttcatacaaaaattg

SEQ ID NO: 320506 - DNA, 15 bp, Homo sapiens
attcatacaaaaatt

SEQ ID NO: 320507 - DNA, 15 bp, Homo sapiens
cattcatacaaaaat

SEQ ID NO: 320508 - DNA, 15 bp, Homo sapiens
ccattcatacaaaaa

SEQ ID NO: 320509 - DNA, 15 bp, Homo sapiens
tccattcatacaaaa

SEQ ID NO: 320510 - DNA, 15 bp, Homo sapiens
ttccattcatacaaa

SEQ ID NO: 320511 - DNA, 15 bp, Homo sapiens
attccattcatacaa

SEQ ID NO: 320512 - DNA, 15 bp, Homo sapiens
gattccattcataca

SEQ ID NO: 320513 - DNA, 15 bp, Homo sapiens
tgattccattcatac

SEQ ID NO: 320514 - DNA, 15 bp, Homo sapiens
atgattccattcata

SEQ ID NO: 320515 - DNA, 15 bp, Homo sapiens
catgattccattcat

SEQ ID NO: 320516 - DNA, 15 bp, Homo sapiens
gcatgattccattca

SEQ ID NO: 320517 - DNA, 15 bp, Homo sapiens
tgcatgattccattc

SEQ ID NO: 320518 - DNA, 15 bp, Homo sapiens
ctgcatgattccatt

SEQ ID NO: 320519 - DNA, 15 bp, Homo sapiens
cctgcatgattccat

SEQ ID NO: 320520 - DNA, 15 bp, Homo sapiens
ccctgcatgattcca

SEQ ID NO: 320521 - DNA, 15 bp, Homo sapiens
accctgcatgattcc

SEQ ID NO: 320522 - DNA, 15 bp, Homo sapiens
taccctgcatgattc

SEQ ID NO: 320523 - DNA, 15 bp, Homo sapiens
ataccctgcatgatt

SEQ ID NO: 320524 - DNA, 15 bp, Homo sapiens
aataccctgcatgat

SEQ ID NO: 320525 - DNA, 15 bp, Homo sapiens
gaataccctgcatga

SEQ ID NO: 320526 - DNA, 15 bp, Homo sapiens
tgaataccctgcatg

SEQ ID NO: 320527 - DNA, 15 bp, Homo sapiens
gtgaataccctgcat

SEQ ID NO: 320528 - DNA, 15 bp, Homo sapiens
agtgaataccctgca

SEQ ID NO: 320529 - DNA, 15 bp, Homo sapiens
aagtgaataccctgc

SEQ ID NO: 320530 - DNA, 15 bp, Homo sapiens
aaagtgaataccctg

SEQ ID NO: 320531 - DNA, 15 bp, Homo sapiens
aaaagtgaataccct

SEQ ID NO: 320532 - DNA, 15 bp, Homo sapiens
gaaaagtgaataccc

SEQ ID NO: 320533 - DNA, 15 bp, Homo sapiens
agaaaagtgaatacc

SEQ ID NO: 320534 - DNA, 15 bp, Homo sapiens
tagaaaagtgaatac

SEQ ID NO: 320535 - DNA, 15 bp, Homo sapiens
ttagaaaagtgaata

SEQ ID NO: 320536 - DNA, 15 bp, Homo sapiens
gttagaaaagtgaat

SEQ ID NO: 320537 - DNA, 15 bp, Homo sapiens
agttagaaaagtgaa

SEQ ID NO: 320538 - DNA, 15 bp, Homo sapiens
tagttagaaaagtga

SEQ ID NO: 320539 - DNA, 15 bp, Homo sapiens
ctagttagaaaagtg

SEQ ID NO: 320540 - DNA, 15 bp, Homo sapiens
gctagttagaaaagt

SEQ ID NO: 320541 - DNA, 15 bp, Homo sapiens
agctagttagaaaag

SEQ ID NO: 320542 - DNA, 15 bp, Homo sapiens
gagctagttagaaaa

SEQ ID NO: 320543 - DNA, 15 bp, Homo sapiens
ggagctagttagaaa

SEQ ID NO: 320544 - DNA, 15 bp, Homo sapiens
aggagctagttagaa

SEQ ID NO: 320545 - DNA, 15 bp, Homo sapiens
aaggagctagttaga

SEQ ID NO: 320546 - DNA, 15 bp, Homo sapiens
aaaggagctagttag

SEQ ID NO: 320547 - DNA, 15 bp, Homo sapiens
gaaaggagctagtta

SEQ ID NO: 320548 - DNA, 15 bp, Homo sapiens
ggaaaggagctagtt

SEQ ID NO: 320549 - DNA, 15 bp, Homo sapiens
aggaaaggagctagt

SEQ ID NO: 320550 - DNA, 15 bp, Homo sapiens
aaggaaaggagctag

SEQ ID NO: 320551 - DNA, 15 bp, Homo sapiens
gaaggaaaggagcta

SEQ ID NO: 320552 - DNA, 15 bp, Homo sapiens
tgaaggaaaggagct

SEQ ID NO: 320553 - DNA, 15 bp, Homo sapiens
ttgaaggaaaggagc

SEQ ID NO: 320554 - DNA, 15 bp, Homo sapiens
tttgaaggaaaggag

SEQ ID NO: 320555 - DNA, 15 bp, Homo sapiens
ttttgaaggaaagga

SEQ ID NO: 320556 - DNA, 15 bp, Homo sapiens
attttgaaggaaagg

SEQ ID NO: 320557 - DNA, 15 bp, Homo sapiens
tattttgaaggaaag

SEQ ID NO: 320558 - DNA, 15 bp, Homo sapiens
ttattttgaaggaaa

SEQ ID NO: 320559 - DNA, 15 bp, Homo sapiens
cttattttgaaggaa

SEQ ID NO: 320560 - DNA, 15 bp, Homo sapiens
ccttattttgaagga

SEQ ID NO: 320561 - DNA, 15 bp, Homo sapiens
accttattttgaagg

SEQ ID NO: 320562 - DNA, 15 bp, Homo sapiens
aaccttattttgaag

SEQ ID NO: 320563 - DNA, 15 bp, Homo sapiens
aaaccttattttgaa

SEQ ID NO: 320564 - DNA, 15 bp, Homo sapiens
aaaaccttattttga

SEQ ID NO: 320565 - DNA, 15 bp, Homo sapiens
aaaaaccttattttg

SEQ ID NO: 320566 - DNA, 15 bp, Homo sapiens
caaaaaccttatttt

SEQ ID NO: 320567 - DNA, 15 bp, Homo sapiens
tcaaaaaccttattt

SEQ ID NO: 320568 - DNA, 15 bp, Homo sapiens
atcaaaaaccttatt

SEQ ID NO: 320569 - DNA, 15 bp, Homo sapiens
tatcaaaaaccttat

SEQ ID NO: 320570 - DNA, 15 bp, Homo sapiens
atatcaaaaacctta

SEQ ID NO: 320571 - DNA, 15 bp, Homo sapiens
aatatcaaaaacctt

SEQ ID NO: 320572 - DNA, 15 bp, Homo sapiens
aaatatcaaaaacct

SEQ ID NO: 320573 - DNA, 15 bp, Homo sapiens
caaatatcaaaaacc

SEQ ID NO: 320574 - DNA, 15 bp, Homo sapiens
acaaatatcaaaaac

SEQ ID NO: 320575 - DNA, 15 bp, Homo sapiens
tacaaatatcaaaaa

SEQ ID NO: 320576 - DNA, 15 bp, Homo sapiens
atacaaatatcaaaa

SEQ ID NO: 320577 - DNA, 15 bp, Homo sapiens
tatacaaatatcaaa

SEQ ID NO: 320578 - DNA, 15 bp, Homo sapiens
atatacaaatatcaa

SEQ ID NO: 320579 - DNA, 15 bp, Homo sapiens
tatatacaaatatca

SEQ ID NO: 320580 - DNA, 15 bp, Homo sapiens
atatatacaaatatc

SEQ ID NO: 320581 - DNA, 15 bp, Homo sapiens
aatatatacaaatat

SEQ ID NO: 320582 - DNA, 15 bp, Homo sapiens
caatatatacaaata

SEQ ID NO: 320583 - DNA, 15 bp, Homo sapiens
acaatatatacaaat

SEQ ID NO: 320584 - DNA, 15 bp, Homo sapiens
aacaatatatacaaa

SEQ ID NO: 320585 - DNA, 15 bp, Homo sapiens
caacaatatatacaa

SEQ ID NO: 320586 - DNA, 15 bp, Homo sapiens
acaacaatatataca

SEQ ID NO: 320587 - DNA, 15 bp, Homo sapiens
tacaacaatatatac

SEQ ID NO: 320588 - DNA, 15 bp, Homo sapiens
atacaacaatatata

SEQ ID NO: 320589 - DNA, 15 bp, Homo sapiens
tatacaacaatatat

SEQ ID NO: 320590 - DNA, 15 bp, Homo sapiens
atatacaacaatata

SEQ ID NO: 320591 - DNA, 15 bp, Homo sapiens
tatatacaacaatat

SEQ ID NO: 320592 - DNA, 15 bp, Homo sapiens
atatatacaacaata

SEQ ID NO: 320593 - DNA, 15 bp, Homo sapiens
aatatatacaacaat

SEQ ID NO: 320594 - DNA, 15 bp, Homo sapiens
taatatatacaacaa

SEQ ID NO: 320595 - DNA, 15 bp, Homo sapiens
ttaatatatacaaca

SEQ ID NO: 320596 - DNA, 15 bp, Homo sapiens
attaatatatacaac

SEQ ID NO: 320597 - DNA, 15 bp, Homo sapiens
tattaatatatacaa

SEQ ID NO: 320598 - DNA, 15 bp, Homo sapiens
ttattaatatataca

SEQ ID NO: 320599 - DNA, 15 bp, Homo sapiens
attattaatatatac

SEQ ID NO: 320600 - DNA, 15 bp, Homo sapiens
aattattaatatata

SEQ ID NO: 320601 - DNA, 15 bp, Homo sapiens
aaattattaatatat

SEQ ID NO: 320602 - DNA, 15 bp, Homo sapiens
gaaattattaatata

SEQ ID NO: 320603 - DNA, 15 bp, Homo sapiens
agaaattattaatat

SEQ ID NO: 320604 - DNA, 15 bp, Homo sapiens
aagaaattattaata

SEQ ID NO: 320605 - DNA, 15 bp, Homo sapiens
gaagaaattattaat

SEQ ID NO: 320606 - DNA, 15 bp, Homo sapiens
ggaagaaattattaa

SEQ ID NO: 320607 - DNA, 15 bp, Homo sapiens
tggaagaaattatta

SEQ ID NO: 320608 - DNA, 15 bp, Homo sapiens
atggaagaaattatt

SEQ ID NO: 320609 - DNA, 15 bp, Homo sapiens
aatggaagaaattat

SEQ ID NO: 320610 - DNA, 15 bp, Homo sapiens
aaatggaagaaatta

SEQ ID NO: 320611 - DNA, 15 bp, Homo sapiens
aaaatggaagaaatt

SEQ ID NO: 320612 - DNA, 15 bp, Homo sapiens
taaaatggaagaaat

SEQ ID NO: 320613 - DNA, 15 bp, Homo sapiens
ataaaatggaagaaa

SEQ ID NO: 320614 - DNA, 15 bp, Homo sapiens
aataaaatggaagaa

SEQ ID NO: 320615 - DNA, 15 bp, Homo sapiens
caataaaatggaaga

SEQ ID NO: 320616 - DNA, 15 bp, Homo sapiens
gcaataaaatggaag

SEQ ID NO: 320617 - DNA, 15 bp, Homo sapiens
agcaataaaatggaa

SEQ ID NO: 320618 - DNA, 15 bp, Homo sapiens
cagcaataaaatgga

SEQ ID NO: 320619 - DNA, 15 bp, Homo sapiens
gcagcaataaaatgg

SEQ ID NO: 320620 - DNA, 15 bp, Homo sapiens
agcagcaataaaatg

SEQ ID NO: 320621 - DNA, 15 bp, Homo sapiens
tagcagcaataaaat

SEQ ID NO: 320622 - DNA, 15 bp, Homo sapiens
ttagcagcaataaaa

SEQ ID NO: 320623 - DNA, 15 bp, Homo sapiens
attagcagcaataaa

SEQ ID NO: 320624 - DNA, 15 bp, Homo sapiens
tattagcagcaataa

SEQ ID NO: 320625 - DNA, 15 bp, Homo sapiens
atattagcagcaata

SEQ ID NO: 320626 - DNA, 15 bp, Homo sapiens
aatattagcagcaat

SEQ ID NO: 320627 - DNA, 15 bp, Homo sapiens
gaatattagcagcaa

SEQ ID NO: 320628 - DNA, 15 bp, Homo sapiens
ggaatattagcagca

SEQ ID NO: 320629 - DNA, 15 bp, Homo sapiens
tggaatattagcagc

SEQ ID NO: 320630 - DNA, 15 bp, Homo sapiens
atggaatattagcag

SEQ ID NO: 320631 - DNA, 15 bp, Homo sapiens
aatggaatattagca

SEQ ID NO: 320632 - DNA, 15 bp, Homo sapiens
taatggaatattagc

SEQ ID NO: 320633 - DNA, 15 bp, Homo sapiens
ataatggaatattag

SEQ ID NO: 320634 - DNA, 15 bp, Homo sapiens
cataatggaatatta

SEQ ID NO: 320635 - DNA, 15 bp, Homo sapiens
ccataatggaatatt

SEQ ID NO: 320636 - DNA, 15 bp, Homo sapiens
cccataatggaatat

SEQ ID NO: 320637 - DNA, 15 bp, Homo sapiens
tcccataatggaata

SEQ ID NO: 320638 - DNA, 15 bp, Homo sapiens
atcccataatggaat

SEQ ID NO: 320639 - DNA, 15 bp, Homo sapiens
tatcccataatggaa

SEQ ID NO: 320640 - DNA, 15 bp, Homo sapiens
atatcccataatgga

SEQ ID NO: 320641 - DNA, 15 bp, Homo sapiens
tatatcccataatgg

SEQ ID NO: 320642 - DNA, 15 bp, Homo sapiens
gtatatcccataatg

SEQ ID NO: 320643 - DNA, 15 bp, Homo sapiens
ggtatatcccataat

SEQ ID NO: 320644 - DNA, 15 bp, Homo sapiens
tggtatatcccataa

SEQ ID NO: 320645 - DNA, 15 bp, Homo sapiens
gtggtatatcccata

SEQ ID NO: 320646 - DNA, 15 bp, Homo sapiens
tgtggtatatcccat

SEQ ID NO: 320647 - DNA, 15 bp, Homo sapiens
ttgtggtatatccca

SEQ ID NO: 320648 - DNA, 15 bp, Homo sapiens
attgtggtatatccc

SEQ ID NO: 320649 - DNA, 15 bp, Homo sapiens
aattgtggtatatcc

SEQ ID NO: 320650 - DNA, 15 bp, Homo sapiens
aaattgtggtatatc

SEQ ID NO: 320651 - DNA, 15 bp, Homo sapiens
caaattgtggtatat

SEQ ID NO: 320652 - DNA, 15 bp, Homo sapiens
acaaattgtggtata

SEQ ID NO: 320653 - DNA, 15 bp, Homo sapiens
aacaaattgtggtat

SEQ ID NO: 320654 - DNA, 15 bp, Homo sapiens
aaacaaattgtggta

SEQ ID NO: 320655 - DNA, 15 bp, Homo sapiens
taaacaaattgtggt

SEQ ID NO: 320656 - DNA, 15 bp, Homo sapiens
ataaacaaattgtgg

SEQ ID NO: 320657 - DNA, 15 bp, Homo sapiens
gataaacaaattgtg

SEQ ID NO: 320658 - DNA, 15 bp, Homo sapiens
tgataaacaaattgt

SEQ ID NO: 320659 - DNA, 15 bp, Homo sapiens
ttgataaacaaattg

SEQ ID NO: 320660 - DNA, 15 bp, Homo sapiens
tttgataaacaaatt

SEQ ID NO: 320661 - DNA, 15 bp, Homo sapiens
gtttgataaacaaat

SEQ ID NO: 320662 - DNA, 15 bp, Homo sapiens
ggtttgataaacaaa

SEQ ID NO: 320663 - DNA, 15 bp, Homo sapiens
tggtttgataaacaa

SEQ ID NO: 320664 - DNA, 15 bp, Homo sapiens
gtggtttgataaaca

SEQ ID NO: 320665 - DNA, 15 bp, Homo sapiens
ggtggtttgataaac

SEQ ID NO: 320666 - DNA, 15 bp, Homo sapiens
gggtggtttgataaa

SEQ ID NO: 320667 - DNA, 15 bp, Homo sapiens
agggtggtttgataa

SEQ ID NO: 320668 - DNA, 15 bp, Homo sapiens
cagggtggtttgata

SEQ ID NO: 320669 - DNA, 15 bp, Homo sapiens
acagggtggtttgat

SEQ ID NO: 320670 - DNA, 15 bp, Homo sapiens
aacagggtggtttga

SEQ ID NO: 320671 - DNA, 15 bp, Homo sapiens
caacagggtggtttg

SEQ ID NO: 320672 - DNA, 15 bp, Homo sapiens
tcaacagggtggttt

SEQ ID NO: 320673 - DNA, 15 bp, Homo sapiens
atcaacagggtggtt

SEQ ID NO: 320674 - DNA, 15 bp, Homo sapiens
catcaacagggtggt

SEQ ID NO: 320675 - DNA, 15 bp, Homo sapiens
ccatcaacagggtgg

SEQ ID NO: 320676 - DNA, 15 bp, Homo sapiens
gccatcaacagggtg

SEQ ID NO: 320677 - DNA, 15 bp, Homo sapiens
ggccatcaacagggt

SEQ ID NO: 320678 - DNA, 15 bp, Homo sapiens
tggccatcaacaggg

SEQ ID NO: 320679 - DNA, 15 bp, Homo sapiens
atggccatcaacagg

SEQ ID NO: 320680 - DNA, 15 bp, Homo sapiens
aatggccatcaacag

SEQ ID NO: 320681 - DNA, 15 bp, Homo sapiens
taatggccatcaaca

SEQ ID NO: 320682 - DNA, 15 bp, Homo sapiens
ctaatggccatcaac

SEQ ID NO: 320683 - DNA, 15 bp, Homo sapiens
cctaatggccatcaa

SEQ ID NO: 320684 - DNA, 15 bp, Homo sapiens
acctaatggccatca

SEQ ID NO: 320685 - DNA, 15 bp, Homo sapiens
aacctaatggccatc

SEQ ID NO: 320686 - DNA, 15 bp, Homo sapiens
caacctaatggccat

SEQ ID NO: 320687 - DNA, 15 bp, Homo sapiens
acaacctaatggcca

SEQ ID NO: 320688 - DNA, 15 bp, Homo sapiens
aacaacctaatggcc

SEQ ID NO: 320689 - DNA, 15 bp, Homo sapiens
aaacaacctaatggc

SEQ ID NO: 320690 - DNA, 15 bp, Homo sapiens
gaaacaacctaatgg

SEQ ID NO: 320691 - DNA, 15 bp, Homo sapiens
ggaaacaacctaatg

SEQ ID NO: 320692 - DNA, 15 bp, Homo sapiens
tggaaacaacctaat

SEQ ID NO: 320693 - DNA, 15 bp, Homo sapiens
ttggaaacaacctaa

SEQ ID NO: 320694 - DNA, 15 bp, Homo sapiens
gttggaaacaaccta

SEQ ID NO: 320695 - DNA, 15 bp, Homo sapiens
agttggaaacaacct

SEQ ID NO: 320696 - DNA, 15 bp, Homo sapiens
aagttggaaacaacc

SEQ ID NO: 320697 - DNA, 15 bp, Homo sapiens
aaagttggaaacaac

SEQ ID NO: 320698 - DNA, 15 bp, Homo sapiens
caaagttggaaacaa

SEQ ID NO: 320699 - DNA, 15 bp, Homo sapiens
ccaaagttggaaaca

SEQ ID NO: 320700 - DNA, 15 bp, Homo sapiens
gccaaagttggaaac

SEQ ID NO: 320701 - DNA, 15 bp, Homo sapiens
agccaaagttggaaa

SEQ ID NO: 320702 - DNA, 15 bp, Homo sapiens
aagccaaagttggaa

SEQ ID NO: 320703 - DNA, 15 bp, Homo sapiens
taagccaaagttgga

SEQ ID NO: 320704 - DNA, 15 bp, Homo sapiens
ataagccaaagttgg

SEQ ID NO: 320705 - DNA, 15 bp, Homo sapiens
aataagccaaagttg

SEQ ID NO: 320706 - DNA, 15 bp, Homo sapiens
aaataagccaaagtt

SEQ ID NO: 320707 - DNA, 15 bp, Homo sapiens
aaaataagccaaagt

SEQ ID NO: 320708 - DNA, 15 bp, Homo sapiens
caaaataagccaaag

SEQ ID NO: 320709 - DNA, 15 bp, Homo sapiens
tcaaaataagccaaa

SEQ ID NO: 320710 - DNA, 15 bp, Homo sapiens
ttcaaaataagccaa

SEQ ID NO: 320711 - DNA, 15 bp, Homo sapiens
attcaaaataagcca

SEQ ID NO: 320712 - DNA, 15 bp, Homo sapiens
tattcaaaataagcc

SEQ ID NO: 320713 - DNA, 15 bp, Homo sapiens
ttattcaaaataagc

SEQ ID NO: 320714 - DNA, 15 bp, Homo sapiens
tttattcaaaataag

SEQ ID NO: 320715 - DNA, 15 bp, Homo sapiens
ctttattcaaaataa

SEQ ID NO: 320716 - DNA, 15 bp, Homo sapiens
gctttattcaaaata

SEQ ID NO: 320717 - DNA, 15 bp, Homo sapiens
agctttattcaaaat

SEQ ID NO: 320718 - DNA, 15 bp, Homo sapiens
cagctttattcaaaa

SEQ ID NO: 320719 - DNA, 15 bp, Homo sapiens
acagctttattcaaa

SEQ ID NO: 320720 - DNA, 15 bp, Homo sapiens
aacagctttattcaa

SEQ ID NO: 320721 - DNA, 15 bp, Homo sapiens
taacagctttattca

SEQ ID NO: 320722 - DNA, 15 bp, Homo sapiens
ataacagctttattc

SEQ ID NO: 320723 - DNA, 15 bp, Homo sapiens
cataacagctttatt

SEQ ID NO: 320724 - DNA, 15 bp, Homo sapiens
tcataacagctttat

SEQ ID NO: 320725 - DNA, 15 bp, Homo sapiens
ttcataacagcttta

SEQ ID NO: 320726 - DNA, 15 bp, Homo sapiens
gttcataacagcttt

SEQ ID NO: 320727 - DNA, 15 bp, Homo sapiens
tgttcataacagctt

SEQ ID NO: 320728 - DNA, 15 bp, Homo sapiens
atgttcataacagct

SEQ ID NO: 320729 - DNA, 15 bp, Homo sapiens
gatgttcataacagc

SEQ ID NO: 320730 - DNA, 15 bp, Homo sapiens
ggatgttcataacag

SEQ ID NO: 320731 - DNA, 15 bp, Homo sapiens
aggatgttcataaca

SEQ ID NO: 320732 - DNA, 15 bp, Homo sapiens
aaggatgttcataac

SEQ ID NO: 320733 - DNA, 15 bp, Homo sapiens
caaggatgttcataa

SEQ ID NO: 320734 - DNA, 15 bp, Homo sapiens
acaaggatgttcata

SEQ ID NO: 320735 - DNA, 15 bp, Homo sapiens
tacaaggatgttcat

SEQ ID NO: 320736 - DNA, 15 bp, Homo sapiens
gtacaaggatgttca

SEQ ID NO: 320737 - DNA, 15 bp, Homo sapiens
tgtacaaggatgttc

SEQ ID NO: 320738 - DNA, 15 bp, Homo sapiens
ttgtacaaggatgtt

SEQ ID NO: 320739 - DNA, 15 bp, Homo sapiens
tttgtacaaggatgt

SEQ ID NO: 320740 - DNA, 15 bp, Homo sapiens
atttgtacaaggatg

SEQ ID NO: 320741 - DNA, 15 bp, Homo sapiens
catttgtacaaggat

SEQ ID NO: 320742 - DNA, 15 bp, Homo sapiens
tcatttgtacaagga

SEQ ID NO: 320743 - DNA, 15 bp, Homo sapiens
atcatttgtacaagg

SEQ ID NO: 320744 - DNA, 15 bp, Homo sapiens
aatcatttgtacaag

SEQ ID NO: 320745 - DNA, 15 bp, Homo sapiens
aaatcatttgtacaa

SEQ ID NO: 320746 - DNA, 15 bp, Homo sapiens
aaaatcatttgtaca

SEQ ID NO: 320747 - DNA, 15 bp, Homo sapiens
caaaatcatttgtac

SEQ ID NO: 320748 - DNA, 15 bp, Homo sapiens
acaaaatcatttgta

SEQ ID NO: 320749 - DNA, 15 bp, Homo sapiens
cacaaaatcatttgt

SEQ ID NO: 320750 - DNA, 15 bp, Homo sapiens
ccacaaaatcatttg

SEQ ID NO: 320751 - DNA, 15 bp, Homo sapiens
tccacaaaatcattt

SEQ ID NO: 320752 - DNA, 15 bp, Homo sapiens
gtccacaaaatcatt

SEQ ID NO: 320753 - DNA, 15 bp, Homo sapiens
tgtccacaaaatcat

SEQ ID NO: 320754 - DNA, 15 bp, Homo sapiens
atgtccacaaaatca

SEQ ID NO: 320755 - DNA, 15 bp, Homo sapiens
tatgtccacaaaatc

SEQ ID NO: 320756 - DNA, 15 bp, Homo sapiens
atatgtccacaaaat

SEQ ID NO: 320757 - DNA, 15 bp, Homo sapiens
tatatgtccacaaaa

SEQ ID NO: 320758 - DNA, 15 bp, Homo sapiens
atatatgtccacaaa

SEQ ID NO: 320759 - DNA, 15 bp, Homo sapiens
aatatatgtccacaa

SEQ ID NO: 320760 - DNA, 15 bp, Homo sapiens
aaatatatgtccaca

SEQ ID NO: 320761 - DNA, 15 bp, Homo sapiens
aaaatatatgtccac

SEQ ID NO: 320762 - DNA, 15 bp, Homo sapiens
aaaaatatatgtcca

SEQ ID NO: 320763 - DNA, 15 bp, Homo sapiens
aaaaaatatatgtcc

SEQ ID NO: 320764 - DNA, 15 bp, Homo sapiens
aaaaaaatatatgtc

SEQ ID NO: 320765 - DNA, 15 bp, Homo sapiens
aaaaaaaatatatgt

SEQ ID NO: 320766 - DNA, 15 bp, Homo sapiens
aaaaaaaaatatatg

SEQ ID NO: 320767 - DNA, 15 bp, Homo sapiens
gaaaaaaaaatatat

SEQ ID NO: 320768 - DNA, 15 bp, Homo sapiens
agaaaaaaaaatata

SEQ ID NO: 320769 - DNA, 15 bp, Homo sapiens
aagaaaaaaaaatat

SEQ ID NO: 320770 - DNA, 15 bp, Homo sapiens
caagaaaaaaaaata

SEQ ID NO: 320771 - DNA, 15 bp, Homo sapiens
ccaagaaaaaaaaat

SEQ ID NO: 320772 - DNA, 15 bp, Homo sapiens
cccaagaaaaaaaaa

SEQ ID NO: 320773 - DNA, 15 bp, Homo sapiens
acccaagaaaaaaaa

SEQ ID NO: 320774 - DNA, 15 bp, Homo sapiens
tacccaagaaaaaaa

SEQ ID NO: 320775 - DNA, 15 bp, Homo sapiens
ttacccaagaaaaaa

SEQ ID NO: 320776 - DNA, 15 bp, Homo sapiens
tttacccaagaaaaa

SEQ ID NO: 320777 - DNA, 15 bp, Homo sapiens
atttacccaagaaaa

SEQ ID NO: 320778 - DNA, 15 bp, Homo sapiens
tatttacccaagaaa

SEQ ID NO: 320779 - DNA, 15 bp, Homo sapiens
gtatttacccaagaa

SEQ ID NO: 320780 - DNA, 15 bp, Homo sapiens
agtatttacccaaga

SEQ ID NO: 320781 - DNA, 15 bp, Homo sapiens
aagtatttacccaag

SEQ ID NO: 320782 - DNA, 15 bp, Homo sapiens
taagtatttacccaa

SEQ ID NO: 320783 - DNA, 15 bp, Homo sapiens
ctaagtatttaccca

SEQ ID NO: 320784 - DNA, 15 bp, Homo sapiens
tctaagtatttaccc

SEQ ID NO: 320785 - DNA, 15 bp, Homo sapiens
ttctaagtatttacc

SEQ ID NO: 320786 - DNA, 15 bp, Homo sapiens
tttctaagtatttac

SEQ ID NO: 320787 - DNA, 15 bp, Homo sapiens
atttctaagtattta

SEQ ID NO: 320788 - DNA, 15 bp, Homo sapiens
aatttctaagtattt

SEQ ID NO: 320789 - DNA, 15 bp, Homo sapiens
caatttctaagtatt

SEQ ID NO: 320790 - DNA, 15 bp, Homo sapiens
tcaatttctaagtat

SEQ ID NO: 320791 - DNA, 15 bp, Homo sapiens
ctcaatttctaagta

SEQ ID NO: 320792 - DNA, 15 bp, Homo sapiens
actcaatttctaagt

SEQ ID NO: 320793 - DNA, 15 bp, Homo sapiens
gactcaatttctaag

SEQ ID NO: 320794 - DNA, 15 bp, Homo sapiens
agactcaatttctaa

SEQ ID NO: 320795 - DNA, 15 bp, Homo sapiens
gagactcaatttcta

SEQ ID NO: 320796 - DNA, 15 bp, Homo sapiens
agagactcaatttct

SEQ ID NO: 320797 - DNA, 15 bp, Homo sapiens
cagagactcaatttc

SEQ ID NO: 320798 - DNA, 15 bp, Homo sapiens
ccagagactcaattt

SEQ ID NO: 320799 - DNA, 15 bp, Homo sapiens
cccagagactcaatt

SEQ ID NO: 320800 - DNA, 15 bp, Homo sapiens
acccagagactcaat

SEQ ID NO: 320801 - DNA, 15 bp, Homo sapiens
gacccagagactcaa

SEQ ID NO: 320802 - DNA, 15 bp, Homo sapiens
tgacccagagactca

SEQ ID NO: 320803 - DNA, 15 bp, Homo sapiens
atgacccagagactc

SEQ ID NO: 320804 - DNA, 15 bp, Homo sapiens
tatgacccagagact

SEQ ID NO: 320805 - DNA, 15 bp, Homo sapiens
ctatgacccagagac

SEQ ID NO: 320806 - DNA, 15 bp, Homo sapiens
cctatgacccagaga

SEQ ID NO: 320807 - DNA, 15 bp, Homo sapiens
tcctatgacccagag

SEQ ID NO: 320808 - DNA, 15 bp, Homo sapiens
atcctatgacccaga

SEQ ID NO: 320809 - DNA, 15 bp, Homo sapiens
tatcctatgacccag

SEQ ID NO: 320810 - DNA, 15 bp, Homo sapiens
ctatcctatgaccca

SEQ ID NO: 320811 - DNA, 15 bp, Homo sapiens
tctatcctatgaccc

SEQ ID NO: 320812 - DNA, 15 bp, Homo sapiens
atctatcctatgacc

SEQ ID NO: 320813 - DNA, 15 bp, Homo sapiens
catctatcctatgac

SEQ ID NO: 320814 - DNA, 15 bp, Homo sapiens
gcatctatcctatga

SEQ ID NO: 320815 - DNA, 15 bp, Homo sapiens
tgcatctatcctatg

SEQ ID NO: 320816 - DNA, 15 bp, Homo sapiens
atgcatctatcctat

SEQ ID NO: 320817 - DNA, 15 bp, Homo sapiens
catgcatctatccta

SEQ ID NO: 320818 - DNA, 15 bp, Homo sapiens
acatgcatctatcct

SEQ ID NO: 320819 - DNA, 15 bp, Homo sapiens
aacatgcatctatcc

SEQ ID NO: 320820 - DNA, 15 bp, Homo sapiens
aaacatgcatctatc

SEQ ID NO: 320821 - DNA, 15 bp, Homo sapiens
taaacatgcatctat

SEQ ID NO: 320822 - DNA, 15 bp, Homo sapiens
ttaaacatgcatcta

SEQ ID NO: 320823 - DNA, 15 bp, Homo sapiens
gttaaacatgcatct

SEQ ID NO: 320824 - DNA, 15 bp, Homo sapiens
tgttaaacatgcatc

SEQ ID NO: 320825 - DNA, 15 bp, Homo sapiens
atgttaaacatgcat

SEQ ID NO: 320826 - DNA, 15 bp, Homo sapiens
aatgttaaacatgca

SEQ ID NO: 320827 - DNA, 15 bp, Homo sapiens
taatgttaaacatgc

SEQ ID NO: 320828 - DNA, 15 bp, Homo sapiens
gtaatgttaaacatg

SEQ ID NO: 320829 - DNA, 15 bp, Homo sapiens
tgtaatgttaaacat

SEQ ID NO: 320830 - DNA, 15 bp, Homo sapiens
ttgtaatgttaaaca

SEQ ID NO: 320831 - DNA, 15 bp, Homo sapiens
cttgtaatgttaaac

SEQ ID NO: 320832 - DNA, 15 bp, Homo sapiens
tcttgtaatgttaaa

SEQ ID NO: 320833 - DNA, 15 bp, Homo sapiens
ttcttgtaatgttaa

SEQ ID NO: 320834 - DNA, 15 bp, Homo sapiens
tttcttgtaatgtta

SEQ ID NO: 320835 - DNA, 15 bp, Homo sapiens
gtttcttgtaatgtt

SEQ ID NO: 320836 - DNA, 15 bp, Homo sapiens
agtttcttgtaatgt

SEQ ID NO: 320837 - DNA, 15 bp, Homo sapiens
cagtttcttgtaatg

SEQ ID NO: 320838 - DNA, 15 bp, Homo sapiens
gcagtttcttgtaat

SEQ ID NO: 320839 - DNA, 15 bp, Homo sapiens
ggcagtttcttgtaa

SEQ ID NO: 320840 - DNA, 15 bp, Homo sapiens
tggcagtttcttgta

SEQ ID NO: 320841 - DNA, 15 bp, Homo sapiens
ctggcagtttcttgt

SEQ ID NO: 320842 - DNA, 15 bp, Homo sapiens
actggcagtttcttg

SEQ ID NO: 320843 - DNA, 15 bp, Homo sapiens
aactggcagtttctt

SEQ ID NO: 320844 - DNA, 15 bp, Homo sapiens
aaactggcagtttct

SEQ ID NO: 320845 - DNA, 15 bp, Homo sapiens
aaaactggcagtttc

SEQ ID NO: 320846 - DNA, 15 bp, Homo sapiens
gaaaactggcagttt

SEQ ID NO: 320847 - DNA, 15 bp, Homo sapiens
ggaaaactggcagtt

SEQ ID NO: 320848 - DNA, 15 bp, Homo sapiens
tggaaaactggcagt

SEQ ID NO: 320849 - DNA, 15 bp, Homo sapiens
ttggaaaactggcag

SEQ ID NO: 320850 - DNA, 15 bp, Homo sapiens
tttggaaaactggca

SEQ ID NO: 320851 - DNA, 15 bp, Homo sapiens
ctttggaaaactggc

SEQ ID NO: 320852 - DNA, 15 bp, Homo sapiens
cctttggaaaactgg

SEQ ID NO: 320853 - DNA, 15 bp, Homo sapiens
tcctttggaaaactg

SEQ ID NO: 320854 - DNA, 15 bp, Homo sapiens
ttcctttggaaaact

SEQ ID NO: 320855 - DNA, 15 bp, Homo sapiens
cttcctttggaaaac

SEQ ID NO: 320856 - DNA, 15 bp, Homo sapiens
tcttcctttggaaaa

SEQ ID NO: 320857 - DNA, 15 bp, Homo sapiens
atcttcctttggaaa

SEQ ID NO: 320858 - DNA, 15 bp, Homo sapiens
tatcttcctttggaa

SEQ ID NO: 320859 - DNA, 15 bp, Homo sapiens
gtatcttcctttgga

SEQ ID NO: 320860 - DNA, 15 bp, Homo sapiens
tgtatcttcctttgg

SEQ ID NO: 320861 - DNA, 15 bp, Homo sapiens
gtgtatcttcctttg

SEQ ID NO: 320862 - DNA, 15 bp, Homo sapiens
ggtgtatcttccttt

SEQ ID NO: 320863 - DNA, 15 bp, Homo sapiens
tggtgtatcttcctt

SEQ ID NO: 320864 - DNA, 15 bp, Homo sapiens
atggtgtatcttcct

SEQ ID NO: 320865 - DNA, 15 bp, Homo sapiens
aatggtgtatcttcc

SEQ ID NO: 320866 - DNA, 15 bp, Homo sapiens
aaatggtgtatcttc

SEQ ID NO: 320867 - DNA, 15 bp, Homo sapiens
aaaatggtgtatctt

SEQ ID NO: 320868 - DNA, 15 bp, Homo sapiens
taaaatggtgtatct

SEQ ID NO: 320869 - DNA, 15 bp, Homo sapiens
gtaaaatggtgtatc

SEQ ID NO: 320870 - DNA, 15 bp, Homo sapiens
tgtaaaatggtgtat

SEQ ID NO: 320871 - DNA, 15 bp, Homo sapiens
gtgtaaaatggtgta

SEQ ID NO: 320872 - DNA, 15 bp, Homo sapiens
agtgtaaaatggtgt

SEQ ID NO: 320873 - DNA, 15 bp, Homo sapiens
aagtgtaaaatggtg

SEQ ID NO: 320874 - DNA, 15 bp, Homo sapiens
gaagtgtaaaatggt

SEQ ID NO: 320875 - DNA, 15 bp, Homo sapiens
agaagtgtaaaatgg

SEQ ID NO: 320876 - DNA, 15 bp, Homo sapiens
tagaagtgtaaaatg

SEQ ID NO: 320877 - DNA, 15 bp, Homo sapiens
gtagaagtgtaaaat

SEQ ID NO: 320878 - DNA, 15 bp, Homo sapiens
agtagaagtgtaaaa

SEQ ID NO: 320879 - DNA, 15 bp, Homo sapiens
tagtagaagtgtaaa

SEQ ID NO: 320880 - DNA, 15 bp, Homo sapiens
ctagtagaagtgtaa

SEQ ID NO: 320881 - DNA, 15 bp, Homo sapiens
gctagtagaagtgta

SEQ ID NO: 320882 - DNA, 15 bp, Homo sapiens
tgctagtagaagtgt

SEQ ID NO: 320883 - DNA, 15 bp, Homo sapiens
ttgctagtagaagtg

SEQ ID NO: 320884 - DNA, 15 bp, Homo sapiens
gttgctagtagaagt

SEQ ID NO: 320885 - DNA, 15 bp, Homo sapiens
cgttgctagtagaag

SEQ ID NO: 320886 - DNA, 15 bp, Homo sapiens
acgttgctagtagaa

SEQ ID NO: 320887 - DNA, 15 bp, Homo sapiens
cacgttgctagtaga

SEQ ID NO: 320888 - DNA, 15 bp, Homo sapiens
acacgttgctagtag

SEQ ID NO: 320889 - DNA, 15 bp, Homo sapiens
cacacgttgctagta

SEQ ID NO: 320890 - DNA, 15 bp, Homo sapiens
tcacacgttgctagt

SEQ ID NO: 320891 - DNA, 15 bp, Homo sapiens
ctcacacgttgctag

SEQ ID NO: 320892 - DNA, 15 bp, Homo sapiens
cctcacacgttgcta

SEQ ID NO: 320893 - DNA, 15 bp, Homo sapiens
ccctcacacgttgct

SEQ ID NO: 320894 - DNA, 15 bp, Homo sapiens
accctcacacgttgc

SEQ ID NO: 320895 - DNA, 15 bp, Homo sapiens
caccctcacacgttg

SEQ ID NO: 320896 - DNA, 15 bp, Homo sapiens
gcaccctcacacgtt

SEQ ID NO: 320897 - DNA, 15 bp, Homo sapiens
ggcaccctcacacgt

SEQ ID NO: 320898 - DNA, 15 bp, Homo sapiens
tggcaccctcacacg

SEQ ID NO: 320899 - DNA, 15 bp, Homo sapiens
ctggcaccctcacac

SEQ ID NO: 320900 - DNA, 15 bp, Homo sapiens
gctggcaccctcaca

SEQ ID NO: 320901 - DNA, 15 bp, Homo sapiens
agctggcaccctcac

SEQ ID NO: 320902 - DNA, 15 bp, Homo sapiens
cagctggcaccctca

SEQ ID NO: 320903 - DNA, 15 bp, Homo sapiens
gcagctggcaccctc

SEQ ID NO: 320904 - DNA, 15 bp, Homo sapiens
agcagctggcaccct

SEQ ID NO: 320905 - DNA, 15 bp, Homo sapiens
aagcagctggcaccc

SEQ ID NO: 320906 - DNA, 15 bp, Homo sapiens
aaagcagctggcacc

SEQ ID NO: 320907 - DNA, 15 bp, Homo sapiens
caaagcagctggcac

SEQ ID NO: 320908 - DNA, 15 bp, Homo sapiens
acaaagcagctggca

SEQ ID NO: 320909 - DNA, 15 bp, Homo sapiens
aacaaagcagctggc

SEQ ID NO: 320910 - DNA, 15 bp, Homo sapiens
aaacaaagcagctgg

SEQ ID NO: 320911 - DNA, 15 bp, Homo sapiens
gaaacaaagcagctg

SEQ ID NO: 320912 - DNA, 15 bp, Homo sapiens
agaaacaaagcagct

SEQ ID NO: 320913 - DNA, 15 bp, Homo sapiens
aagaaacaaagcagc

SEQ ID NO: 320914 - DNA, 15 bp, Homo sapiens
gaagaaacaaagcag

SEQ ID NO: 320915 - DNA, 15 bp, Homo sapiens
tgaagaaacaaagca

SEQ ID NO: 320916 - DNA, 15 bp, Homo sapiens
gtgaagaaacaaagc

SEQ ID NO: 320917 - DNA, 15 bp, Homo sapiens
ggtgaagaaacaaag

SEQ ID NO: 320918 - DNA, 15 bp, Homo sapiens
tggtgaagaaacaaa

SEQ ID NO: 320919 - DNA, 15 bp, Homo sapiens
ttggtgaagaaacaa

SEQ ID NO: 320920 - DNA, 15 bp, Homo sapiens
gttggtgaagaaaca

SEQ ID NO: 320921 - DNA, 15 bp, Homo sapiens
tgttggtgaagaaac

SEQ ID NO: 320922 - DNA, 15 bp, Homo sapiens
gtgttggtgaagaaa

SEQ ID NO: 320923 - DNA, 15 bp, Homo sapiens
agtgttggtgaagaa

SEQ ID NO: 320924 - DNA, 15 bp, Homo sapiens
aagtgttggtgaaga

SEQ ID NO: 320925 - DNA, 15 bp, Homo sapiens
caagtgttggtgaag

SEQ ID NO: 320926 - DNA, 15 bp, Homo sapiens
tcaagtgttggtgaa

SEQ ID NO: 320927 - DNA, 15 bp, Homo sapiens
atcaagtgttggtga

SEQ ID NO: 320928 - DNA, 15 bp, Homo sapiens
tatcaagtgttggtg

SEQ ID NO: 320929 - DNA, 15 bp, Homo sapiens
ttatcaagtgttggt

SEQ ID NO: 320930 - DNA, 15 bp, Homo sapiens
attatcaagtgttgg

SEQ ID NO: 320931 - DNA, 15 bp, Homo sapiens
cattatcaagtgttg

SEQ ID NO: 320932 - DNA, 15 bp, Homo sapiens
acattatcaagtgtt

SEQ ID NO: 320933 - DNA, 15 bp, Homo sapiens
gacattatcaagtgt

SEQ ID NO: 320934 - DNA, 15 bp, Homo sapiens
tgacattatcaagtg

SEQ ID NO: 320935 - DNA, 15 bp, Homo sapiens
ttgacattatcaagt

SEQ ID NO: 320936 - DNA, 15 bp, Homo sapiens
gttgacattatcaag

SEQ ID NO: 320937 - DNA, 15 bp, Homo sapiens
agttgacattatcaa

SEQ ID NO: 320938 - DNA, 15 bp, Homo sapiens
aagttgacattatca

SEQ ID NO: 320939 - DNA, 15 bp, Homo sapiens
aaagttgacattatc

SEQ ID NO: 320940 - DNA, 15 bp, Homo sapiens
aaaagttgacattat

SEQ ID NO: 320941 - DNA, 15 bp, Homo sapiens
taaaagttgacatta

SEQ ID NO: 320942 - DNA, 15 bp, Homo sapiens
ttaaaagttgacatt

SEQ ID NO: 320943 - DNA, 15 bp, Homo sapiens
tttaaaagttgacat

SEQ ID NO: 320944 - DNA, 15 bp, Homo sapiens
atttaaaagttgaca

SEQ ID NO: 320945 - DNA, 15 bp, Homo sapiens
aatttaaaagttgac

SEQ ID NO: 320946 - DNA, 15 bp, Homo sapiens
aaatttaaaagttga

SEQ ID NO: 320947 - DNA, 15 bp, Homo sapiens
aaaatttaaaagttg

SEQ ID NO: 320948 - DNA, 15 bp, Homo sapiens
taaaatttaaaagtt

SEQ ID NO: 320949 - DNA, 15 bp, Homo sapiens
ctaaaatttaaaagt

SEQ ID NO: 320950 - DNA, 15 bp, Homo sapiens
gctaaaatttaaaag

SEQ ID NO: 320951 - DNA, 15 bp, Homo sapiens
ggctaaaatttaaaa

SEQ ID NO: 320952 - DNA, 15 bp, Homo sapiens
tggctaaaatttaaa

SEQ ID NO: 320953 - DNA, 15 bp, Homo sapiens
atggctaaaatttaa

SEQ ID NO: 320954 - DNA, 15 bp, Homo sapiens
aatggctaaaattta

SEQ ID NO: 320955 - DNA, 15 bp, Homo sapiens
gaatggctaaaattt

SEQ ID NO: 320956 - DNA, 15 bp, Homo sapiens
agaatggctaaaatt

SEQ ID NO: 320957 - DNA, 15 bp, Homo sapiens
tagaatggctaaaat

SEQ ID NO: 320958 - DNA, 15 bp, Homo sapiens
ttagaatggctaaaa

SEQ ID NO: 320959 - DNA, 15 bp, Homo sapiens
attagaatggctaaa

SEQ ID NO: 320960 - DNA, 15 bp, Homo sapiens
cattagaatggctaa

SEQ ID NO: 320961 - DNA, 15 bp, Homo sapiens
ccattagaatggcta

SEQ ID NO: 320962 - DNA, 15 bp, Homo sapiens
tccattagaatggct

SEQ ID NO: 320963 - DNA, 15 bp, Homo sapiens
atccattagaatggc

SEQ ID NO: 320964 - DNA, 15 bp, Homo sapiens
aatccattagaatgg

SEQ ID NO: 320965 - DNA, 15 bp, Homo sapiens
aaatccattagaatg

SEQ ID NO: 320966 - DNA, 15 bp, Homo sapiens
caaatccattagaat

SEQ ID NO: 320967 - DNA, 15 bp, Homo sapiens
acaaatccattagaa

SEQ ID NO: 320968 - DNA, 15 bp, Homo sapiens
cacaaatccattaga

SEQ ID NO: 320969 - DNA, 15 bp, Homo sapiens
ccacaaatccattag

SEQ ID NO: 320970 - DNA, 15 bp, Homo sapiens
accacaaatccatta

SEQ ID NO: 320971 - DNA, 15 bp, Homo sapiens
caccacaaatccatt

SEQ ID NO: 320972 - DNA, 15 bp, Homo sapiens
gcaccacaaatccat

SEQ ID NO: 320973 - DNA, 15 bp, Homo sapiens
ggcaccacaaatcca

SEQ ID NO: 320974 - DNA, 15 bp, Homo sapiens
tggcaccacaaatcc

SEQ ID NO: 320975 - DNA, 15 bp, Homo sapiens
atggcaccacaaatc

SEQ ID NO: 320976 - DNA, 15 bp, Homo sapiens
gatggcaccacaaat

SEQ ID NO: 320977 - DNA, 15 bp, Homo sapiens
agatggcaccacaaa

SEQ ID NO: 320978 - DNA, 15 bp, Homo sapiens
aagatggcaccacaa

SEQ ID NO: 320979 - DNA, 15 bp, Homo sapiens
caagatggcaccaca

SEQ ID NO: 320980 - DNA, 15 bp, Homo sapiens
acaagatggcaccac

SEQ ID NO: 320981 - DNA, 15 bp, Homo sapiens
aacaagatggcacca

SEQ ID NO: 320982 - DNA, 15 bp, Homo sapiens
caacaagatggcacc

SEQ ID NO: 320983 - DNA, 15 bp, Homo sapiens
acaacaagatggcac

SEQ ID NO: 320984 - DNA, 15 bp, Homo sapiens
tacaacaagatggca

SEQ ID NO: 320985 - DNA, 15 bp, Homo sapiens
ctacaacaagatggc

SEQ ID NO: 320986 - DNA, 15 bp, Homo sapiens
actacaacaagatgg

SEQ ID NO: 320987 - DNA, 15 bp, Homo sapiens
aactacaacaagatg

SEQ ID NO: 320988 - DNA, 15 bp, Homo sapiens
aaactacaacaagat

SEQ ID NO: 320989 - DNA, 15 bp, Homo sapiens
aaaactacaacaaga

SEQ ID NO: 320990 - DNA, 15 bp, Homo sapiens
taaaactacaacaag

SEQ ID NO: 320991 - DNA, 15 bp, Homo sapiens
ttaaaactacaacaa

SEQ ID NO: 320992 - DNA, 15 bp, Homo sapiens
attaaaactacaaca

SEQ ID NO: 320993 - DNA, 15 bp, Homo sapiens
aattaaaactacaac

SEQ ID NO: 320994 - DNA, 15 bp, Homo sapiens
aaattaaaactacaa

SEQ ID NO: 320995 - DNA, 15 bp, Homo sapiens
aaaattaaaactaca

SEQ ID NO: 320996 - DNA, 15 bp, Homo sapiens
aaaaattaaaactac

SEQ ID NO: 320997 - DNA, 15 bp, Homo sapiens
taaaaattaaaacta

SEQ ID NO: 320998 - DNA, 15 bp, Homo sapiens
ataaaaattaaaact

SEQ ID NO: 320999 - DNA, 15 bp, Homo sapiens
aataaaaattaaaac

SEQ ID NO: 321000 - DNA, 15 bp, Homo sapiens
aaataaaaattaaaa

SEQ ID NO: 321001 - DNA, 15 bp, Homo sapiens
gaaataaaaattaaa

SEQ ID NO: 321002 - DNA, 15 bp, Homo sapiens
agaaataaaaattaa

SEQ ID NO: 321003 - DNA, 15 bp, Homo sapiens
cagaaataaaaatta

SEQ ID NO: 321004 - DNA, 15 bp, Homo sapiens
acagaaataaaaatt

SEQ ID NO: 321005 - DNA, 15 bp, Homo sapiens
tacagaaataaaaat

SEQ ID NO: 321006 - DNA, 15 bp, Homo sapiens
ttacagaaataaaaa

SEQ ID NO: 321007 - DNA, 15 bp, Homo sapiens
cttacagaaataaaa

SEQ ID NO: 321008 - DNA, 15 bp, Homo sapiens
acttacagaaataaa

SEQ ID NO: 321009 - DNA, 15 bp, Homo sapiens
aacttacagaaataa

SEQ ID NO: 321010 - DNA, 15 bp, Homo sapiens
gaacttacagaaata

SEQ ID NO: 321011 - DNA, 15 bp, Homo sapiens
agaacttacagaaat

SEQ ID NO: 321012 - DNA, 15 bp, Homo sapiens
aagaacttacagaaa

SEQ ID NO: 321013 - DNA, 15 bp, Homo sapiens
aaagaacttacagaa

SEQ ID NO: 321014 - DNA, 15 bp, Homo sapiens
caaagaacttacaga

SEQ ID NO: 321015 - DNA, 15 bp, Homo sapiens
acaaagaacttacag

SEQ ID NO: 321016 - DNA, 15 bp, Homo sapiens
gacaaagaacttaca

SEQ ID NO: 321017 - DNA, 15 bp, Homo sapiens
tgacaaagaacttac

SEQ ID NO: 321018 - DNA, 15 bp, Homo sapiens
atgacaaagaactta

SEQ ID NO: 321019 - DNA, 15 bp, Homo sapiens
tatgacaaagaactt

SEQ ID NO: 321020 - DNA, 15 bp, Homo sapiens
atatgacaaagaact

SEQ ID NO: 321021 - DNA, 15 bp, Homo sapiens
tatatgacaaagaac

SEQ ID NO: 321022 - DNA, 15 bp, Homo sapiens
atgcaggagcaagac

SEQ ID NO: 321023 - DNA, 15 bp, Homo sapiens
gatgcaggagcaaga

SEQ ID NO: 321024 - DNA, 15 bp, Homo sapiens
tgatgcaggagcaag

SEQ ID NO: 321025 - DNA, 15 bp, Homo sapiens
gtgatgcaggagcaa

SEQ ID NO: 321026 - DNA, 15 bp, Homo sapiens
ggtgatgcaggagca

SEQ ID NO: 321027 - DNA, 15 bp, Homo sapiens
gggtgatgcaggagc

SEQ ID NO: 321028 - DNA, 15 bp, Homo sapiens
agggtgatgcaggag

SEQ ID NO: 321029 - DNA, 15 bp, Homo sapiens
cagggtgatgcagga

SEQ ID NO: 321030 - DNA, 15 bp, Homo sapiens
ccagggtgatgcagg

SEQ ID NO: 321031 - DNA, 15 bp, Homo sapiens
cccagggtgatgcag

SEQ ID NO: 321032 - DNA, 15 bp, Homo sapiens
acccagggtgatgca

SEQ ID NO: 321033 - DNA, 15 bp, Homo sapiens
gacccagggtgatgc

SEQ ID NO: 321034 - DNA, 15 bp, Homo sapiens
ggacccagggtgatg

SEQ ID NO: 321035 - DNA, 15 bp, Homo sapiens
gggacccagggtgat

SEQ ID NO: 321036 - DNA, 15 bp, Homo sapiens
agggacccagggtga

SEQ ID NO: 321037 - DNA, 15 bp, Homo sapiens
aagggacccagggtg

SEQ ID NO: 321038 - DNA, 15 bp, Homo sapiens
aaagggacccagggt

SEQ ID NO: 321039 - DNA, 15 bp, Homo sapiens
aaaagggacccaggg

SEQ ID NO: 321040 - DNA, 15 bp, Homo sapiens
caaaagggacccagg

SEQ ID NO: 321041 - DNA, 15 bp, Homo sapiens
gcaaaagggacccag

SEQ ID NO: 321042 - DNA, 15 bp, Homo sapiens
tgcaaaagggaccca

SEQ ID NO: 321043 - DNA, 15 bp, Homo sapiens
ttgcaaaagggaccc

SEQ ID NO: 321044 - DNA, 15 bp, Homo sapiens
cttgcaaaagggacc

SEQ ID NO: 321045 - DNA, 15 bp, Homo sapiens
ccttgcaaaagggac

SEQ ID NO: 321046 - DNA, 15 bp, Homo sapiens
tccttgcaaaaggga

SEQ ID NO: 321047 - DNA, 15 bp, Homo sapiens
ctccttgcaaaaggg

SEQ ID NO: 321048 - DNA, 15 bp, Homo sapiens
tctccttgcaaaagg

SEQ ID NO: 321049 - DNA, 15 bp, Homo sapiens
atctccttgcaaaag

SEQ ID NO: 321050 - DNA, 15 bp, Homo sapiens
tatctccttgcaaaa

SEQ ID NO: 321051 - DNA, 15 bp, Homo sapiens
atatctccttgcaaa

SEQ ID NO: 321052 - DNA, 15 bp, Homo sapiens
aatatctccttgcaa

SEQ ID NO: 321053 - DNA, 15 bp, Homo sapiens
aaatatctccttgca

SEQ ID NO: 321054 - DNA, 15 bp, Homo sapiens
gaaatatctccttgc

SEQ ID NO: 321055 - DNA, 15 bp, Homo sapiens
ggaaatatctccttg

SEQ ID NO: 321056 - DNA, 15 bp, Homo sapiens
gggaaatatctcctt

SEQ ID NO: 321057 - DNA, 15 bp, Homo sapiens
agggaaatatctcct

SEQ ID NO: 321058 - DNA, 15 bp, Homo sapiens
gagggaaatatctcc

SEQ ID NO: 321059 - DNA, 15 bp, Homo sapiens
agagggaaatatctc

SEQ ID NO: 321060 - DNA, 15 bp, Homo sapiens
cagagggaaatatct

SEQ ID NO: 321061 - DNA, 15 bp, Homo sapiens
ccagagggaaatatc

SEQ ID NO: 321062 - DNA, 15 bp, Homo sapiens
accagagggaaatat

SEQ ID NO: 321063 - DNA, 15 bp, Homo sapiens
gaccagagggaaata

SEQ ID NO: 321064 - DNA, 15 bp, Homo sapiens
agaccagagggaaat

SEQ ID NO: 321065 - DNA, 15 bp, Homo sapiens
gagaccagagggaaa

SEQ ID NO: 321066 - DNA, 15 bp, Homo sapiens
ggagaccagagggaa

SEQ ID NO: 321067 - DNA, 15 bp, Homo sapiens
tggagaccagaggga

SEQ ID NO: 321068 - DNA, 15 bp, Homo sapiens
atggagaccagaggg

SEQ ID NO: 321069 - DNA, 15 bp, Homo sapiens
catggagaccagagg

SEQ ID NO: 321070 - DNA, 15 bp, Homo sapiens
acatggagaccagag

SEQ ID NO: 321071 - DNA, 15 bp, Homo sapiens
aacatggagaccaga

SEQ ID NO: 321072 - DNA, 15 bp, Homo sapiens
caacatggagaccag

SEQ ID NO: 321073 - DNA, 15 bp, Homo sapiens
ccaacatggagacca

SEQ ID NO: 321074 - DNA, 15 bp, Homo sapiens
cccaacatggagacc

SEQ ID NO: 321075 - DNA, 15 bp, Homo sapiens
tcccaacatggagac

SEQ ID NO: 321076 - DNA, 15 bp, Homo sapiens
ttcccaacatggaga

SEQ ID NO: 321077 - DNA, 15 bp, Homo sapiens
tttcccaacatggag

SEQ ID NO: 321078 - DNA, 15 bp, Homo sapiens
ttttcccaacatgga

SEQ ID NO: 321079 - DNA, 15 bp, Homo sapiens
tttttcccaacatgg

SEQ ID NO: 321080 - DNA, 15 bp, Homo sapiens
atttttcccaacatg

SEQ ID NO: 321081 - DNA, 15 bp, Homo sapiens
tatttttcccaacat

SEQ ID NO: 321082 - DNA, 15 bp, Homo sapiens
ttatttttcccaaca

SEQ ID NO: 321083 - DNA, 15 bp, Homo sapiens
tttatttttcccaac

SEQ ID NO: 321084 - DNA, 15 bp, Homo sapiens
atttatttttcccaa

SEQ ID NO: 321085 - DNA, 15 bp, Homo sapiens
catttatttttccca

SEQ ID NO: 321086 - DNA, 15 bp, Homo sapiens
tcatttatttttccc

SEQ ID NO: 321087 - DNA, 15 bp, Homo sapiens
atcatttatttttcc

SEQ ID NO: 321088 - DNA, 15 bp, Homo sapiens
aatcatttatttttc

SEQ ID NO: 321089 - DNA, 15 bp, Homo sapiens
gaatcatttattttt

SEQ ID NO: 321090 - DNA, 15 bp, Homo sapiens
agaatcatttatttt

SEQ ID NO: 321091 - DNA, 15 bp, Homo sapiens
gagaatcatttattt

SEQ ID NO: 321092 - DNA, 15 bp, Homo sapiens
ggagaatcatttatt

SEQ ID NO: 321093 - DNA, 15 bp, Homo sapiens
aggagaatcatttat

SEQ ID NO: 321094 - DNA, 15 bp, Homo sapiens
caggagaatcattta

SEQ ID NO: 321095 - DNA, 15 bp, Homo sapiens
gcaggagaatcattt

SEQ ID NO: 321096 - DNA, 15 bp, Homo sapiens
tgcaggagaatcatt

SEQ ID NO: 321097 - DNA, 15 bp, Homo sapiens
ttgcaggagaatcat

SEQ ID NO: 321098 - DNA, 15 bp, Homo sapiens
cttgcaggagaatca

SEQ ID NO: 321099 - DNA, 15 bp, Homo sapiens
gcttgcaggagaatc

SEQ ID NO: 321100 - DNA, 15 bp, Homo sapiens
ggcttgcaggagaat

SEQ ID NO: 321101 - DNA, 15 bp, Homo sapiens
tggcttgcaggagaa

SEQ ID NO: 321102 - DNA, 15 bp, Homo sapiens
ctggcttgcaggaga

SEQ ID NO: 321103 - DNA, 15 bp, Homo sapiens
actggcttgcaggag

SEQ ID NO: 321104 - DNA, 15 bp, Homo sapiens
aactggcttgcagga

SEQ ID NO: 321105 - DNA, 15 bp, Homo sapiens
aaactggcttgcagg

SEQ ID NO: 321106 - DNA, 15 bp, Homo sapiens
caaactggcttgcag

SEQ ID NO: 321107 - DNA, 15 bp, Homo sapiens
acaaactggcttgca

SEQ ID NO: 321108 - DNA, 15 bp, Homo sapiens
aacaaactggcttgc

SEQ ID NO: 321109 - DNA, 15 bp, Homo sapiens
aaacaaactggcttg

SEQ ID NO: 321110 - DNA, 15 bp, Homo sapiens
aaaacaaactggctt

SEQ ID NO: 321111 - DNA, 15 bp, Homo sapiens
aaaaacaaactggct

SEQ ID NO: 321112 - DNA, 15 bp, Homo sapiens
gaaaaacaaactggc

SEQ ID NO: 321113 - DNA, 15 bp, Homo sapiens
agaaaaacaaactgg

SEQ ID NO: 321114 - DNA, 15 bp, Homo sapiens
gagaaaaacaaactg

SEQ ID NO: 321115 - DNA, 15 bp, Homo sapiens
agagaaaaacaaact

SEQ ID NO: 321116 - DNA, 15 bp, Homo sapiens
gagagaaaaacaaac

SEQ ID NO: 321117 - DNA, 15 bp, Homo sapiens
tgagagaaaaacaaa

SEQ ID NO: 321118 - DNA, 15 bp, Homo sapiens
atgagagaaaaacaa

SEQ ID NO: 321119 - DNA, 15 bp, Homo sapiens
tatgagagaaaaaca

SEQ ID NO: 321120 - DNA, 15 bp, Homo sapiens
atatgagagaaaaac

SEQ ID NO: 321121 - DNA, 15 bp, Homo sapiens
catatgagagaaaaa

SEQ ID NO: 321122 - DNA, 15 bp, Homo sapiens
acatatgagagaaaa

SEQ ID NO: 321123 - DNA, 15 bp, Homo sapiens
tacatatgagagaaa

SEQ ID NO: 321124 - DNA, 15 bp, Homo sapiens
atacatatgagagaa

SEQ ID NO: 321125 - DNA, 15 bp, Homo sapiens
tatacatatgagaga

SEQ ID NO: 321126 - DNA, 15 bp, Homo sapiens
gtatacatatgagag

SEQ ID NO: 321127 - DNA, 15 bp, Homo sapiens
tgtatacatatgaga

SEQ ID NO: 321128 - DNA, 15 bp, Homo sapiens
gtgtatacatatgag

SEQ ID NO: 321129 - DNA, 15 bp, Homo sapiens
agtgtatacatatga

SEQ ID NO: 321130 - DNA, 15 bp, Homo sapiens
tagtgtatacatatg

SEQ ID NO: 321131 - DNA, 15 bp, Homo sapiens
atagtgtatacatat

SEQ ID NO: 321132 - DNA, 15 bp, Homo sapiens
aatagtgtatacata

SEQ ID NO: 321133 - DNA, 15 bp, Homo sapiens
caatagtgtatacat

SEQ ID NO: 321134 - DNA, 15 bp, Homo sapiens
tcaatagtgtataca

SEQ ID NO: 321135 - DNA, 15 bp, Homo sapiens
atcaatagtgtatac

SEQ ID NO: 321136 - DNA, 15 bp, Homo sapiens
gatcaatagtgtata

SEQ ID NO: 321137 - DNA, 15 bp, Homo sapiens
agatcaatagtgtat

SEQ ID NO: 321138 - DNA, 15 bp, Homo sapiens
aagatcaatagtgta

SEQ ID NO: 321139 - DNA, 15 bp, Homo sapiens
taagatcaatagtgt

SEQ ID NO: 321140 - DNA, 15 bp, Homo sapiens
ataagatcaatagtg

SEQ ID NO: 321141 - DNA, 15 bp, Homo sapiens
gataagatcaatagt

SEQ ID NO: 321142 - DNA, 15 bp, Homo sapiens
ggataagatcaatag

SEQ ID NO: 321143 - DNA, 15 bp, Homo sapiens
aggataagatcaata

SEQ ID NO: 321144 - DNA, 15 bp, Homo sapiens
caggataagatcaat

SEQ ID NO: 321145 - DNA, 15 bp, Homo sapiens
acaggataagatcaa

SEQ ID NO: 321146 - DNA, 15 bp, Homo sapiens
gacaggataagatca

SEQ ID NO: 321147 - DNA, 15 bp, Homo sapiens
agacaggataagatc

SEQ ID NO: 321148 - DNA, 15 bp, Homo sapiens
cagacaggataagat

SEQ ID NO: 321149 - DNA, 15 bp, Homo sapiens
gcagacaggataaga

SEQ ID NO: 321150 - DNA, 15 bp, Homo sapiens
ggcagacaggataag

SEQ ID NO: 321151 - DNA, 15 bp, Homo sapiens
aggcagacaggataa

SEQ ID NO: 321152 - DNA, 15 bp, Homo sapiens
caggcagacaggata

SEQ ID NO: 321153 - DNA, 15 bp, Homo sapiens
gcaggcagacaggat

SEQ ID NO: 321154 - DNA, 15 bp, Homo sapiens
agcaggcagacagga

SEQ ID NO: 321155 - DNA, 15 bp, Homo sapiens
aagcaggcagacagg

SEQ ID NO: 321156 - DNA, 15 bp, Homo sapiens
caagcaggcagacag

SEQ ID NO: 321157 - DNA, 15 bp, Homo sapiens
gcaagcaggcagaca

SEQ ID NO: 321158 - DNA, 15 bp, Homo sapiens
agcaagcaggcagac

SEQ ID NO: 321159 - DNA, 15 bp, Homo sapiens
aagcaagcaggcaga

SEQ ID NO: 321160 - DNA, 15 bp, Homo sapiens
aaagcaagcaggcag

SEQ ID NO: 321161 - DNA, 15 bp, Homo sapiens
aaaagcaagcaggca

SEQ ID NO: 321162 - DNA, 15 bp, Homo sapiens
caaaagcaagcaggc

SEQ ID NO: 321163 - DNA, 15 bp, Homo sapiens
acaaaagcaagcagg

SEQ ID NO: 321164 - DNA, 15 bp, Homo sapiens
aacaaaagcaagcag

SEQ ID NO: 321165 - DNA, 15 bp, Homo sapiens
taacaaaagcaagca

SEQ ID NO: 321166 - DNA, 15 bp, Homo sapiens
ttaacaaaagcaagc

SEQ ID NO: 321167 - DNA, 15 bp, Homo sapiens
cttaacaaaagcaag

SEQ ID NO: 321168 - DNA, 15 bp, Homo sapiens
tcttaacaaaagcaa

SEQ ID NO: 321169 - DNA, 15 bp, Homo sapiens
ttcttaacaaaagca

SEQ ID NO: 321170 - DNA, 15 bp, Homo sapiens
cttcttaacaaaagc

SEQ ID NO: 321171 - DNA, 15 bp, Homo sapiens
ccttcttaacaaaag

SEQ ID NO: 321172 - DNA, 15 bp, Homo sapiens
accttcttaacaaaa

SEQ ID NO: 321173 - DNA, 15 bp, Homo sapiens
caccttcttaacaaa

SEQ ID NO: 321174 - DNA, 15 bp, Homo sapiens
gcaccttcttaacaa

SEQ ID NO: 321175 - DNA, 15 bp, Homo sapiens
agcaccttcttaaca

SEQ ID NO: 321176 - DNA, 15 bp, Homo sapiens
gagcaccttcttaac

SEQ ID NO: 321177 - DNA, 15 bp, Homo sapiens
tgagcaccttcttaa

SEQ ID NO: 321178 - DNA, 15 bp, Homo sapiens
ctgagcaccttctta

SEQ ID NO: 321179 - DNA, 15 bp, Homo sapiens
tctgagcaccttctt

SEQ ID NO: 321180 - DNA, 15 bp, Homo sapiens
ctctgagcaccttct

SEQ ID NO: 321181 - DNA, 15 bp, Homo sapiens
gctctgagcaccttc

SEQ ID NO: 321182 - DNA, 15 bp, Homo sapiens
agctctgagcacctt

SEQ ID NO: 321183 - DNA, 15 bp, Homo sapiens
tagctctgagcacct

SEQ ID NO: 321184 - DNA, 15 bp, Homo sapiens
ctagctctgagcacc

SEQ ID NO: 321185 - DNA, 15 bp, Homo sapiens
tctagctctgagcac

SEQ ID NO: 321186 - DNA, 15 bp, Homo sapiens
atctagctctgagca

SEQ ID NO: 321187 - DNA, 15 bp, Homo sapiens
gatctagctctgagc

SEQ ID NO: 321188 - DNA, 15 bp, Homo sapiens
agatctagctctgag

SEQ ID NO: 321189 - DNA, 15 bp, Homo sapiens
cagatctagctctga

SEQ ID NO: 321190 - DNA, 15 bp, Homo sapiens
gcagatctagctctg

SEQ ID NO: 321191 - DNA, 15 bp, Homo sapiens
tgcagatctagctct

SEQ ID NO: 321192 - DNA, 15 bp, Homo sapiens
ctgcagatctagctc

SEQ ID NO: 321193 - DNA, 15 bp, Homo sapiens
actgcagatctagct

SEQ ID NO: 321194 - DNA, 15 bp, Homo sapiens
aactgcagatctagc

SEQ ID NO: 321195 - DNA, 15 bp, Homo sapiens
aaactgcagatctag

SEQ ID NO: 321196 - DNA, 15 bp, Homo sapiens
caaactgcagatcta

SEQ ID NO: 321197 - DNA, 15 bp, Homo sapiens
acaaactgcagatct

SEQ ID NO: 321198 - DNA, 15 bp, Homo sapiens
cacaaactgcagatc

SEQ ID NO: 321199 - DNA, 15 bp, Homo sapiens
acacaaactgcagat

SEQ ID NO: 321200 - DNA, 15 bp, Homo sapiens
gacacaaactgcaga

SEQ ID NO: 321201 - DNA, 15 bp, Homo sapiens
agacacaaactgcag

SEQ ID NO: 321202 - DNA, 15 bp, Homo sapiens
tagacacaaactgca

SEQ ID NO: 321203 - DNA, 15 bp, Homo sapiens
ctagacacaaactgc

SEQ ID NO: 321204 - DNA, 15 bp, Homo sapiens
gctagacacaaactg

SEQ ID NO: 321205 - DNA, 15 bp, Homo sapiens
tgctagacacaaact

SEQ ID NO: 321206 - DNA, 15 bp, Homo sapiens
ttgctagacacaaac

SEQ ID NO: 321207 - DNA, 15 bp, Homo sapiens
cttgctagacacaaa

SEQ ID NO: 321208 - DNA, 15 bp, Homo sapiens
tcttgctagacacaa

SEQ ID NO: 321209 - DNA, 15 bp, Homo sapiens
ctcttgctagacaca

SEQ ID NO: 321210 - DNA, 15 bp, Homo sapiens
actcttgctagacac

SEQ ID NO: 321211 - DNA, 15 bp, Homo sapiens
tactcttgctagaca

SEQ ID NO: 321212 - DNA, 15 bp, Homo sapiens
atactcttgctagac

SEQ ID NO: 321213 - DNA, 15 bp, Homo sapiens
tatactcttgctaga

SEQ ID NO: 321214 - DNA, 15 bp, Homo sapiens
ctatactcttgctag

SEQ ID NO: 321215 - DNA, 15 bp, Homo sapiens
cctatactcttgcta

SEQ ID NO: 321216 - DNA, 15 bp, Homo sapiens
tcctatactcttgct

SEQ ID NO: 321217 - DNA, 15 bp, Homo sapiens
gtcctatactcttgc

SEQ ID NO: 321218 - DNA, 15 bp, Homo sapiens
ggtcctatactcttg

SEQ ID NO: 321219 - DNA, 15 bp, Homo sapiens
aggtcctatactctt

SEQ ID NO: 321220 - DNA, 15 bp, Homo sapiens
aaggtcctatactct

SEQ ID NO: 321221 - DNA, 15 bp, Homo sapiens
caaggtcctatactc

SEQ ID NO: 321222 - DNA, 15 bp, Homo sapiens
acaaggtcctatact

SEQ ID NO: 321223 - DNA, 15 bp, Homo sapiens
cacaaggtcctatac

SEQ ID NO: 321224 - DNA, 15 bp, Homo sapiens
ccacaaggtcctata

SEQ ID NO: 321225 - DNA, 15 bp, Homo sapiens
gccacaaggtcctat

SEQ ID NO: 321226 - DNA, 15 bp, Homo sapiens
ggccacaaggtccta

SEQ ID NO: 321227 - DNA, 15 bp, Homo sapiens
aggccacaaggtcct

SEQ ID NO: 321228 - DNA, 15 bp, Homo sapiens
gaggccacaaggtcc

SEQ ID NO: 321229 - DNA, 15 bp, Homo sapiens
agaggccacaaggtc

SEQ ID NO: 321230 - DNA, 15 bp, Homo sapiens
cagaggccacaaggt

SEQ ID NO: 321231 - DNA, 15 bp, Homo sapiens
gcagaggccacaagg

SEQ ID NO: 321232 - DNA, 15 bp, Homo sapiens
tgcagaggccacaag

SEQ ID NO: 321233 - DNA, 15 bp, Homo sapiens
atgcagaggccacaa

SEQ ID NO: 321234 - DNA, 15 bp, Homo sapiens
aatgcagaggccaca

SEQ ID NO: 321235 - DNA, 15 bp, Homo sapiens
gaatgcagaggccac

SEQ ID NO: 321236 - DNA, 15 bp, Homo sapiens
tgaatgcagaggcca

SEQ ID NO: 321237 - DNA, 15 bp, Homo sapiens
atgaatgcagaggcc

SEQ ID NO: 321238 - DNA, 15 bp, Homo sapiens
aatgaatgcagaggc

SEQ ID NO: 321239 - DNA, 15 bp, Homo sapiens
aaatgaatgcagagg

SEQ ID NO: 321240 - DNA, 15 bp, Homo sapiens
gaaatgaatgcagag

SEQ ID NO: 321241 - DNA, 15 bp, Homo sapiens
agaaatgaatgcaga

SEQ ID NO: 321242 - DNA, 15 bp, Homo sapiens
aagaaatgaatgcag

SEQ ID NO: 321243 - DNA, 15 bp, Homo sapiens
aaagaaatgaatgca

SEQ ID NO: 321244 - DNA, 15 bp, Homo sapiens
gaaagaaatgaatgc

SEQ ID NO: 321245 - DNA, 15 bp, Homo sapiens
ggaaagaaatgaatg

SEQ ID NO: 321246 - DNA, 15 bp, Homo sapiens
aggaaagaaatgaat

SEQ ID NO: 321247 - DNA, 15 bp, Homo sapiens
caggaaagaaatgaa

SEQ ID NO: 321248 - DNA, 15 bp, Homo sapiens
gcaggaaagaaatga

SEQ ID NO: 321249 - DNA, 15 bp, Homo sapiens
ggcaggaaagaaatg

SEQ ID NO: 321250 - DNA, 15 bp, Homo sapiens
gggcaggaaagaaat

SEQ ID NO: 321251 - DNA, 15 bp, Homo sapiens
agggcaggaaagaaa

SEQ ID NO: 321252 - DNA, 15 bp, Homo sapiens
aagggcaggaaagaa

SEQ ID NO: 321253 - DNA, 15 bp, Homo sapiens
taagggcaggaaaga

SEQ ID NO: 321254 - DNA, 15 bp, Homo sapiens
gtaagggcaggaaag

SEQ ID NO: 321255 - DNA, 15 bp, Homo sapiens
agtaagggcaggaaa

SEQ ID NO: 321256 - DNA, 15 bp, Homo sapiens
aagtaagggcaggaa

SEQ ID NO: 321257 - DNA, 15 bp, Homo sapiens
aaagtaagggcagga

SEQ ID NO: 321258 - DNA, 15 bp, Homo sapiens
gaaagtaagggcagg

SEQ ID NO: 321259 - DNA, 15 bp, Homo sapiens
tgaaagtaagggcag

SEQ ID NO: 321260 - DNA, 15 bp, Homo sapiens
atgaaagtaagggca

SEQ ID NO: 321261 - DNA, 15 bp, Homo sapiens
catgaaagtaagggc

SEQ ID NO: 321262 - DNA, 15 bp, Homo sapiens
gcatgaaagtaaggg

SEQ ID NO: 321263 - DNA, 15 bp, Homo sapiens
tgcatgaaagtaagg

SEQ ID NO: 321264 - DNA, 15 bp, Homo sapiens
gtgcatgaaagtaag

SEQ ID NO: 321265 - DNA, 15 bp, Homo sapiens
ggtgcatgaaagtaa

SEQ ID NO: 321266 - DNA, 15 bp, Homo sapiens
aggtgcatgaaagta

SEQ ID NO: 321267 - DNA, 15 bp, Homo sapiens
aaggtgcatgaaagt

SEQ ID NO: 321268 - DNA, 15 bp, Homo sapiens
taaggtgcatgaaag

SEQ ID NO: 321269 - DNA, 15 bp, Homo sapiens
ttaaggtgcatgaaa

SEQ ID NO: 321270 - DNA, 15 bp, Homo sapiens
attaaggtgcatgaa

SEQ ID NO: 321271 - DNA, 15 bp, Homo sapiens
aattaaggtgcatga

SEQ ID NO: 321272 - DNA, 15 bp, Homo sapiens
taattaaggtgcatg

SEQ ID NO: 321273 - DNA, 15 bp, Homo sapiens
ttaattaaggtgcat

SEQ ID NO: 321274 - DNA, 15 bp, Homo sapiens
tttaattaaggtgca

SEQ ID NO: 321275 - DNA, 15 bp, Homo sapiens
ttttaattaaggtgc

SEQ ID NO: 321276 - DNA, 15 bp, Homo sapiens
cttttaattaaggtg

SEQ ID NO: 321277 - DNA, 15 bp, Homo sapiens
tcttttaattaaggt

SEQ ID NO: 321278 - DNA, 15 bp, Homo sapiens
ttcttttaattaagg

SEQ ID NO: 321279 - DNA, 15 bp, Homo sapiens
tttcttttaattaag

SEQ ID NO: 321280 - DNA, 15 bp, Homo sapiens
ttttcttttaattaa

SEQ ID NO: 321281 - DNA, 15 bp, Homo sapiens
cttttcttttaatta

SEQ ID NO: 321282 - DNA, 15 bp, Homo sapiens
gcttttcttttaatt

SEQ ID NO: 321283 - DNA, 15 bp, Homo sapiens
agcttttcttttaat

SEQ ID NO: 321284 - DNA, 15 bp, Homo sapiens
aagcttttcttttaa

SEQ ID NO: 321285 - DNA, 15 bp, Homo sapiens
aaagcttttctttta

SEQ ID NO: 321286 - DNA, 15 bp, Homo sapiens
aaaagcttttctttt

SEQ ID NO: 321287 - DNA, 15 bp, Homo sapiens
taaaagcttttcttt

SEQ ID NO: 321288 - DNA, 15 bp, Homo sapiens
ataaaagcttttctt

SEQ ID NO: 321289 - DNA, 15 bp, Homo sapiens
aataaaagcttttct

SEQ ID NO: 321290 - DNA, 15 bp, Homo sapiens
gaataaaagcttttc

SEQ ID NO: 321291 - DNA, 15 bp, Homo sapiens
agaataaaagctttt

SEQ ID NO: 321292 - DNA, 15 bp, Homo sapiens
tagaataaaagcttt

SEQ ID NO: 321293 - DNA, 15 bp, Homo sapiens
gtagaataaaagctt

SEQ ID NO: 321294 - DNA, 15 bp, Homo sapiens
agtagaataaaagct

SEQ ID NO: 321295 - DNA, 15 bp, Homo sapiens
tagtagaataaaagc

SEQ ID NO: 321296 - DNA, 15 bp, Homo sapiens
atagtagaataaaag

SEQ ID NO: 321297 - DNA, 15 bp, Homo sapiens
tatagtagaataaaa

SEQ ID NO: 321298 - DNA, 15 bp, Homo sapiens
atatagtagaataaa

SEQ ID NO: 321299 - DNA, 15 bp, Homo sapiens
aatatagtagaataa

SEQ ID NO: 321300 - DNA, 15 bp, Homo sapiens
aaatatagtagaata

SEQ ID NO: 321301 - DNA, 15 bp, Homo sapiens
caaatatagtagaat

SEQ ID NO: 321302 - DNA, 15 bp, Homo sapiens
acaaatatagtagaa

SEQ ID NO: 321303 - DNA, 15 bp, Homo sapiens
cacaaatatagtaga

SEQ ID NO: 321304 - DNA, 15 bp, Homo sapiens
acacaaatatagtag

SEQ ID NO: 321305 - DNA, 15 bp, Homo sapiens
tacacaaatatagta

SEQ ID NO: 321306 - DNA, 15 bp, Homo sapiens
ttacacaaatatagt

SEQ ID NO: 321307 - DNA, 15 bp, Homo sapiens
gttacacaaatatag

SEQ ID NO: 321308 - DNA, 15 bp, Homo sapiens
agttacacaaatata

SEQ ID NO: 321309 - DNA, 15 bp, Homo sapiens
gagttacacaaatat

SEQ ID NO: 321310 - DNA, 15 bp, Homo sapiens
tgagttacacaaata

SEQ ID NO: 321311 - DNA, 15 bp, Homo sapiens
gtgagttacacaaat

SEQ ID NO: 321312 - DNA, 15 bp, Homo sapiens
agtgagttacacaaa

SEQ ID NO: 321313 - DNA, 15 bp, Homo sapiens
gagtgagttacacaa

SEQ ID NO: 321314 - DNA, 15 bp, Homo sapiens
tgagtgagttacaca

SEQ ID NO: 321315 - DNA, 15 bp, Homo sapiens
ttgagtgagttacac

SEQ ID NO: 321316 - DNA, 15 bp, Homo sapiens
tttgagtgagttaca

SEQ ID NO: 321317 - DNA, 15 bp, Homo sapiens
atttgagtgagttac

SEQ ID NO: 321318 - DNA, 15 bp, Homo sapiens
catttgagtgagtta

SEQ ID NO: 321319 - DNA, 15 bp, Homo sapiens
acatttgagtgagtt

SEQ ID NO: 321320 - DNA, 15 bp, Homo sapiens
cacatttgagtgagt

SEQ ID NO: 321321 - DNA, 15 bp, Homo sapiens
ccacatttgagtgag

SEQ ID NO: 321322 - DNA, 15 bp, Homo sapiens
gccacatttgagtga

SEQ ID NO: 321323 - DNA, 15 bp, Homo sapiens
tgccacatttgagtg

SEQ ID NO: 321324 - DNA, 15 bp, Homo sapiens
ttgccacatttgagt

SEQ ID NO: 321325 - DNA, 15 bp, Homo sapiens
cttgccacatttgag

SEQ ID NO: 321326 - DNA, 15 bp, Homo sapiens
gcttgccacatttga

SEQ ID NO: 321327 - DNA, 15 bp, Homo sapiens
agcttgccacatttg

SEQ ID NO: 321328 - DNA, 15 bp, Homo sapiens
cagcttgccacattt

SEQ ID NO: 321329 - DNA, 15 bp, Homo sapiens
gcagcttgccacatt

SEQ ID NO: 321330 - DNA, 15 bp, Homo sapiens
ggcagcttgccacat

SEQ ID NO: 321331 - DNA, 15 bp, Homo sapiens
tggcagcttgccaca

SEQ ID NO: 321332 - DNA, 15 bp, Homo sapiens
ttggcagcttgccac

SEQ ID NO: 321333 - DNA, 15 bp, Homo sapiens
attggcagcttgcca

SEQ ID NO: 321334 - DNA, 15 bp, Homo sapiens
gattggcagcttgcc

SEQ ID NO: 321335 - DNA, 15 bp, Homo sapiens
tgattggcagcttgc

SEQ ID NO: 321336 - DNA, 15 bp, Homo sapiens
ctgattggcagcttg

SEQ ID NO: 321337 - DNA, 15 bp, Homo sapiens
gctgattggcagctt

SEQ ID NO: 321338 - DNA, 15 bp, Homo sapiens
tgctgattggcagct

SEQ ID NO: 321339 - DNA, 15 bp, Homo sapiens
ttgctgattggcagc

SEQ ID NO: 321340 - DNA, 15 bp, Homo sapiens
attgctgattggcag

SEQ ID NO: 321341 - DNA, 15 bp, Homo sapiens
cattgctgattggca

SEQ ID NO: 321342 - DNA, 15 bp, Homo sapiens
ccattgctgattggc

SEQ ID NO: 321343 - DNA, 15 bp, Homo sapiens
tccattgctgattgg

SEQ ID NO: 321344 - DNA, 15 bp, Homo sapiens
atccattgctgattg

SEQ ID NO: 321345 - DNA, 15 bp, Homo sapiens
tatccattgctgatt

SEQ ID NO: 321346 - DNA, 15 bp, Homo sapiens
atatccattgctgat

SEQ ID NO: 321347 - DNA, 15 bp, Homo sapiens
tatatccattgctga

SEQ ID NO: 321348 - DNA, 15 bp, Homo sapiens
gtatatccattgctg

SEQ ID NO: 321349 - DNA, 15 bp, Homo sapiens
cgtatatccattgct

SEQ ID NO: 321350 - DNA, 15 bp, Homo sapiens
tcgtatatccattgc

SEQ ID NO: 321351 - DNA, 15 bp, Homo sapiens
atcgtatatccattg

SEQ ID NO: 321352 - DNA, 15 bp, Homo sapiens
tatcgtatatccatt

SEQ ID NO: 321353 - DNA, 15 bp, Homo sapiens
gtatcgtatatccat

SEQ ID NO: 321354 - DNA, 15 bp, Homo sapiens
tgtatcgtatatcca

SEQ ID NO: 321355 - DNA, 15 bp, Homo sapiens
ttgtatcgtatatcc

SEQ ID NO: 321356 - DNA, 15 bp, Homo sapiens
tttgtatcgtatatc

SEQ ID NO: 321357 - DNA, 15 bp, Homo sapiens
gtttgtatcgtatat

SEQ ID NO: 321358 - DNA, 15 bp, Homo sapiens
tgtttgtatcgtata

SEQ ID NO: 321359 - DNA, 15 bp, Homo sapiens
gtgtttgtatcgtat

SEQ ID NO: 321360 - DNA, 15 bp, Homo sapiens
ggtgtttgtatcgta

SEQ ID NO: 321361 - DNA, 15 bp, Homo sapiens
tggtgtttgtatcgt

SEQ ID NO: 321362 - DNA, 15 bp, Homo sapiens
atggtgtttgtatcg

SEQ ID NO: 321363 - DNA, 15 bp, Homo sapiens
gatggtgtttgtatc

SEQ ID NO: 321364 - DNA, 15 bp, Homo sapiens
cgatggtgtttgtat

SEQ ID NO: 321365 - DNA, 15 bp, Homo sapiens
acgatggtgtttgta

SEQ ID NO: 321366 - DNA, 15 bp, Homo sapiens
aacgatggtgtttgt

SEQ ID NO: 321367 - DNA, 15 bp, Homo sapiens
aaacgatggtgtttg

SEQ ID NO: 321368 - DNA, 15 bp, Homo sapiens
taaacgatggtgttt

SEQ ID NO: 321369 - DNA, 15 bp, Homo sapiens
ttaaacgatggtgtt

SEQ ID NO: 321370 - DNA, 15 bp, Homo sapiens
tttaaacgatggtgt

SEQ ID NO: 321371 - DNA, 15 bp, Homo sapiens
ctttaaacgatggtg

SEQ ID NO: 321372 - DNA, 15 bp, Homo sapiens
tctttaaacgatggt

SEQ ID NO: 321373 - DNA, 15 bp, Homo sapiens
atctttaaacgatgg

SEQ ID NO: 321374 - DNA, 15 bp, Homo sapiens
tatctttaaacgatg

SEQ ID NO: 321375 - DNA, 15 bp, Homo sapiens
ttatctttaaacgat

SEQ ID NO: 321376 - DNA, 15 bp, Homo sapiens
tttatctttaaacga

SEQ ID NO: 321377 - DNA, 15 bp, Homo sapiens
ttttatctttaaacg

SEQ ID NO: 321378 - DNA, 15 bp, Homo sapiens
tttttatctttaaac

SEQ ID NO: 321379 - DNA, 15 bp, Homo sapiens
ctttttatctttaaa

SEQ ID NO: 321380 - DNA, 15 bp, Homo sapiens
tctttttatctttaa

SEQ ID NO: 321381 - DNA, 15 bp, Homo sapiens
ttctttttatcttta

SEQ ID NO: 321382 - DNA, 15 bp, Homo sapiens
cttctttttatcttt

SEQ ID NO: 321383 - DNA, 15 bp, Homo sapiens
tcttctttttatctt

SEQ ID NO: 321384 - DNA, 15 bp, Homo sapiens
ttcttctttttatct

SEQ ID NO: 321385 - DNA, 15 bp, Homo sapiens
tttcttctttttatc

SEQ ID NO: 321386 - DNA, 15 bp, Homo sapiens
atttcttctttttat

SEQ ID NO: 321387 - DNA, 15 bp, Homo sapiens
gatttcttcttttta

SEQ ID NO: 321388 - DNA, 15 bp, Homo sapiens
ggatttcttcttttt

SEQ ID NO: 321389 - DNA, 15 bp, Homo sapiens
tggatttcttctttt

SEQ ID NO: 321390 - DNA, 15 bp, Homo sapiens
ctggatttcttcttt

SEQ ID NO: 321391 - DNA, 15 bp, Homo sapiens
actggatttcttctt

SEQ ID NO: 321392 - DNA, 15 bp, Homo sapiens
aactggatttcttct

SEQ ID NO: 321393 - DNA, 15 bp, Homo sapiens
aaactggatttcttc

SEQ ID NO: 321394 - DNA, 15 bp, Homo sapiens
caaactggatttctt

SEQ ID NO: 321395 - DNA, 15 bp, Homo sapiens
tcaaactggatttct

SEQ ID NO: 321396 - DNA, 15 bp, Homo sapiens
ttcaaactggatttc

SEQ ID NO: 321397 - DNA, 15 bp, Homo sapiens
cttcaaactggattt

SEQ ID NO: 321398 - DNA, 15 bp, Homo sapiens
acttcaaactggatt

SEQ ID NO: 321399 - DNA, 15 bp, Homo sapiens
aacttcaaactggat

SEQ ID NO: 321400 - DNA, 15 bp, Homo sapiens
gaacttcaaactgga

SEQ ID NO: 321401 - DNA, 15 bp, Homo sapiens
tgaacttcaaactgg

SEQ ID NO: 321402 - DNA, 15 bp, Homo sapiens
ctgaacttcaaactg

SEQ ID NO: 321403 - DNA, 15 bp, Homo sapiens
cctgaacttcaaact

SEQ ID NO: 321404 - DNA, 15 bp, Homo sapiens
acctgaacttcaaac

SEQ ID NO: 321405 - DNA, 15 bp, Homo sapiens
aacctgaacttcaaa

SEQ ID NO: 321406 - DNA, 15 bp, Homo sapiens
caacctgaacttcaa

SEQ ID NO: 321407 - DNA, 15 bp, Homo sapiens
acaacctgaacttca

SEQ ID NO: 321408 - DNA, 15 bp, Homo sapiens
aacaacctgaacttc

SEQ ID NO: 321409 - DNA, 15 bp, Homo sapiens
aaacaacctgaactt

SEQ ID NO: 321410 - DNA, 15 bp, Homo sapiens
caaacaacctgaact

SEQ ID NO: 321411 - DNA, 15 bp, Homo sapiens
acaaacaacctgaac

SEQ ID NO: 321412 - DNA, 15 bp, Homo sapiens
tacaaacaacctgaa

SEQ ID NO: 321413 - DNA, 15 bp, Homo sapiens
atacaaacaacctga

SEQ ID NO: 321414 - DNA, 15 bp, Homo sapiens
aatacaaacaacctg

SEQ ID NO: 321415 - DNA, 15 bp, Homo sapiens
gaatacaaacaacct

SEQ ID NO: 321416 - DNA, 15 bp, Homo sapiens
agaatacaaacaacc

SEQ ID NO: 321417 - DNA, 15 bp, Homo sapiens
tagaatacaaacaac

SEQ ID NO: 321418 - DNA, 15 bp, Homo sapiens
atagaatacaaacaa

SEQ ID NO: 321419 - DNA, 15 bp, Homo sapiens
aatagaatacaaaca

SEQ ID NO: 321420 - DNA, 15 bp, Homo sapiens
aaatagaatacaaac

SEQ ID NO: 321421 - DNA, 15 bp, Homo sapiens
aaaatagaatacaaa

SEQ ID NO: 321422 - DNA, 15 bp, Homo sapiens
aaaaatagaatacaa

SEQ ID NO: 321423 - DNA, 15 bp, Homo sapiens
taaaaatagaataca

SEQ ID NO: 321424 - DNA, 15 bp, Homo sapiens
ctaaaaatagaatac

SEQ ID NO: 321425 - DNA, 15 bp, Homo sapiens
actaaaaatagaata

SEQ ID NO: 321426 - DNA, 15 bp, Homo sapiens
gaactaaaaatagaa

SEQ ID NO: 321427 - DNA, 15 bp, Homo sapiens
ggaactaaaaataga

SEQ ID NO: 321428 - DNA, 15 bp, Homo sapiens
tggaactaaaaatag

SEQ ID NO: 321429 - DNA, 15 bp, Homo sapiens
atggaactaaaaata

SEQ ID NO: 321430 - DNA, 15 bp, Homo sapiens
tatggaactaaaaat

SEQ ID NO: 321431 - DNA, 15 bp, Homo sapiens
ttatggaactaaaaa

SEQ ID NO: 321432 - DNA, 15 bp, Homo sapiens
tttatggaactaaaa

SEQ ID NO: 321433 - DNA, 15 bp, Homo sapiens
atttatggaactaaa

SEQ ID NO: 321434 - DNA, 15 bp, Homo sapiens
tatttatggaactaa

SEQ ID NO: 321435 - DNA, 15 bp, Homo sapiens
ttatttatggaacta

SEQ ID NO: 321436 - DNA, 15 bp, Homo sapiens
tttatttatggaact

SEQ ID NO: 321437 - DNA, 15 bp, Homo sapiens
ttttatttatggaac

SEQ ID NO: 321438 - DNA, 15 bp, Homo sapiens
cttttatttatggaa

SEQ ID NO: 321439 - DNA, 15 bp, Homo sapiens
gcttttatttatgga

SEQ ID NO: 321440 - DNA, 15 bp, Homo sapiens
tgcttttatttatgg

SEQ ID NO: 321441 - DNA, 15 bp, Homo sapiens
atgcttttatttatg

SEQ ID NO: 321442 - DNA, 15 bp, Homo sapiens
tatgcttttatttat

SEQ ID NO: 321443 - DNA, 15 bp, Homo sapiens
atatgcttttattta

SEQ ID NO: 321444 - DNA, 15 bp, Homo sapiens
gatatgcttttattt

SEQ ID NO: 321445 - DNA, 15 bp, Homo sapiens
agatatgcttttatt

SEQ ID NO: 321446 - DNA, 15 bp, Homo sapiens
tagatatgcttttat

SEQ ID NO: 321447 - DNA, 15 bp, Homo sapiens
atagatatgctttta

SEQ ID NO: 321448 - DNA, 15 bp, Homo sapiens
catagatatgctttt

SEQ ID NO: 321449 - DNA, 15 bp, Homo sapiens
gcatagatatgcttt

SEQ ID NO: 321450 - DNA, 15 bp, Homo sapiens
tgcatagatatgctt

SEQ ID NO: 321451 - DNA, 15 bp, Homo sapiens
gtgcatagatatgct

SEQ ID NO: 321452 - DNA, 15 bp, Homo sapiens
tgtgcatagatatgc

SEQ ID NO: 321453 - DNA, 15 bp, Homo sapiens
gtgtgcatagatatg

SEQ ID NO: 321454 - DNA, 15 bp, Homo sapiens
tgtgtgcatagatat

SEQ ID NO: 321455 - DNA, 15 bp, Homo sapiens
gtgtgtgcatagata

SEQ ID NO: 321456 - DNA, 15 bp, Homo sapiens
tgtgtgtgcatagat

SEQ ID NO: 321457 - DNA, 15 bp, Homo sapiens
ctgtgtgtgcataga

SEQ ID NO: 321458 - DNA, 15 bp, Homo sapiens
tctgtgtgtgcatag

SEQ ID NO: 321459 - DNA, 15 bp, Homo sapiens
ttctgtgtgtgcata

SEQ ID NO: 321460 - DNA, 15 bp, Homo sapiens
attctgtgtgtgcat

SEQ ID NO: 321461 - DNA, 15 bp, Homo sapiens
cattctgtgtgtgca

SEQ ID NO: 321462 - DNA, 15 bp, Homo sapiens
acattctgtgtgtgc

SEQ ID NO: 321463 - DNA, 15 bp, Homo sapiens
aacattctgtgtgtg

SEQ ID NO: 321464 - DNA, 15 bp, Homo sapiens
gaacattctgtgtgt

SEQ ID NO: 321465 - DNA, 15 bp, Homo sapiens
tgaacattctgtgtg

SEQ ID NO: 321466 - DNA, 15 bp, Homo sapiens
ctgaacattctgtgt

SEQ ID NO: 321467 - DNA, 15 bp, Homo sapiens
cctgaacattctgtg

SEQ ID NO: 321468 - DNA, 15 bp, Homo sapiens
tcctgaacattctgt

SEQ ID NO: 321469 - DNA, 15 bp, Homo sapiens
atcctgaacattctg

SEQ ID NO: 321470 - DNA, 15 bp, Homo sapiens
aatcctgaacattct

SEQ ID NO: 321471 - DNA, 15 bp, Homo sapiens
taatcctgaacattc

SEQ ID NO: 321472 - DNA, 15 bp, Homo sapiens
ttaatcctgaacatt

SEQ ID NO: 321473 - DNA, 15 bp, Homo sapiens
tttaatcctgaacat

SEQ ID NO: 321474 - DNA, 15 bp, Homo sapiens
gtttaatcctgaaca

SEQ ID NO: 321475 - DNA, 15 bp, Homo sapiens
tgtttaatcctgaac

SEQ ID NO: 321476 - DNA, 15 bp, Homo sapiens
gtgtttaatcctgaa

SEQ ID NO: 321477 - DNA, 15 bp, Homo sapiens
agtgtttaatcctga

SEQ ID NO: 321478 - DNA, 15 bp, Homo sapiens
tagtgtttaatcctg

SEQ ID NO: 321479 - DNA, 15 bp, Homo sapiens
ttagtgtttaatcct

SEQ ID NO: 321480 - DNA, 15 bp, Homo sapiens
tttagtgtttaatcc

SEQ ID NO: 321481 - DNA, 15 bp, Homo sapiens
atttagtgtttaatc

SEQ ID NO: 321482 - DNA, 15 bp, Homo sapiens
catttagtgtttaat

SEQ ID NO: 321483 - DNA, 15 bp, Homo sapiens
ccatttagtgtttaa

SEQ ID NO: 321484 - DNA, 15 bp, Homo sapiens
gccatttagtgttta

SEQ ID NO: 321485 - DNA, 15 bp, Homo sapiens
agccatttagtgttt

SEQ ID NO: 321486 - DNA, 15 bp, Homo sapiens
tagccatttagtgtt

SEQ ID NO: 321487 - DNA, 15 bp, Homo sapiens
ttagccatttagtgt

SEQ ID NO: 321488 - DNA, 15 bp, Homo sapiens
attagccatttagtg

SEQ ID NO: 321489 - DNA, 15 bp, Homo sapiens
tattagccatttagt

SEQ ID NO: 321490 - DNA, 15 bp, Homo sapiens
gtattagccatttag

SEQ ID NO: 321491 - DNA, 15 bp, Homo sapiens
tgtattagccattta

SEQ ID NO: 321492 - DNA, 15 bp, Homo sapiens
atgtattagccattt

SEQ ID NO: 321493 - DNA, 15 bp, Homo sapiens
aatgtattagccatt

SEQ ID NO: 321494 - DNA, 15 bp, Homo sapiens
caatgtattagccat

SEQ ID NO: 321495 - DNA, 15 bp, Homo sapiens
gcaatgtattagcca

SEQ ID NO: 321496 - DNA, 15 bp, Homo sapiens
agcaatgtattagcc

SEQ ID NO: 321497 - DNA, 15 bp, Homo sapiens
tagcaatgtattagc

SEQ ID NO: 321498 - DNA, 15 bp, Homo sapiens
ctagcaatgtattag

SEQ ID NO: 321499 - DNA, 15 bp, Homo sapiens
gctagcaatgtatta

SEQ ID NO: 321500 - DNA, 15 bp, Homo sapiens
tgctagcaatgtatt

SEQ ID NO: 321501 - DNA, 15 bp, Homo sapiens
atgctagcaatgtat

SEQ ID NO: 321502 - DNA, 15 bp, Homo sapiens
catgctagcaatgta

SEQ ID NO: 321503 - DNA, 15 bp, Homo sapiens
acatgctagcaatgt

SEQ ID NO: 321504 - DNA, 15 bp, Homo sapiens
tacatgctagcaatg

SEQ ID NO: 321505 - DNA, 15 bp, Homo sapiens
atacatgctagcaat

SEQ ID NO: 321506 - DNA, 15 bp, Homo sapiens
aatacatgctagcaa

SEQ ID NO: 321507 - DNA, 15 bp, Homo sapiens
aaatacatgctagca

SEQ ID NO: 321508 - DNA, 15 bp, Homo sapiens
gaaatacatgctagc

SEQ ID NO: 321509 - DNA, 15 bp, Homo sapiens
agaaatacatgctag

SEQ ID NO: 321510 - DNA, 15 bp, Homo sapiens
tagaaatacatgcta

SEQ ID NO: 321511 - DNA, 15 bp, Homo sapiens
gtagaaatacatgct

SEQ ID NO: 321512 - DNA, 15 bp, Homo sapiens
tgtagaaatacatgc

SEQ ID NO: 321513 - DNA, 15 bp, Homo sapiens
ctgtagaaatacatg

SEQ ID NO: 321514 - DNA, 15 bp, Homo sapiens
cctgtagaaatacat

SEQ ID NO: 321515 - DNA, 15 bp, Homo sapiens
tcctgtagaaataca

SEQ ID NO: 321516 - DNA, 15 bp, Homo sapiens
ctcctgtagaaatac

SEQ ID NO: 321517 - DNA, 15 bp, Homo sapiens
actcctgtagaaata

SEQ ID NO: 321518 - DNA, 15 bp, Homo sapiens
cactcctgtagaaat

SEQ ID NO: 321519 - DNA, 15 bp, Homo sapiens
gcactcctgtagaaa

SEQ ID NO: 321520 - DNA, 15 bp, Homo sapiens
ggcactcctgtagaa

SEQ ID NO: 321521 - DNA, 15 bp, Homo sapiens
aggcactcctgtaga

SEQ ID NO: 321522 - DNA, 15 bp, Homo sapiens
gaggcactcctgtag

SEQ ID NO: 321523 - DNA, 15 bp, Homo sapiens
agaggcactcctgta

SEQ ID NO: 321524 - DNA, 15 bp, Homo sapiens
aagaggcactcctgt

SEQ ID NO: 321525 - DNA, 15 bp, Homo sapiens
taagaggcactcctg

SEQ ID NO: 321526 - DNA, 15 bp, Homo sapiens
ataagaggcactcct

SEQ ID NO: 321527 - DNA, 15 bp, Homo sapiens
gataagaggcactcc

SEQ ID NO: 321528 - DNA, 15 bp, Homo sapiens
agataagaggcactc

SEQ ID NO: 321529 - DNA, 15 bp, Homo sapiens
tagataagaggcact

SEQ ID NO: 321530 - DNA, 15 bp, Homo sapiens
atagataagaggcac

SEQ ID NO: 321531 - DNA, 15 bp, Homo sapiens
catagataagaggca

SEQ ID NO: 321532 - DNA, 15 bp, Homo sapiens
ccatagataagaggc

SEQ ID NO: 321533 - DNA, 15 bp, Homo sapiens
accatagataagagg

SEQ ID NO: 321534 - DNA, 15 bp, Homo sapiens
aaccatagataagag

SEQ ID NO: 321535 - DNA, 15 bp, Homo sapiens
aaaccatagataaga

SEQ ID NO: 321536 - DNA, 15 bp, Homo sapiens
aaaaccatagataag

SEQ ID NO: 321537 - DNA, 15 bp, Homo sapiens
caaaaccatagataa

SEQ ID NO: 321538 - DNA, 15 bp, Homo sapiens
gcaaaaccatagata

SEQ ID NO: 321539 - DNA, 15 bp, Homo sapiens
agcaaaaccatagat

SEQ ID NO: 321540 - DNA, 15 bp, Homo sapiens
aagcaaaaccataga

SEQ ID NO: 321541 - DNA, 15 bp, Homo sapiens
gaagcaaaaccatag

SEQ ID NO: 321542 - DNA, 15 bp, Homo sapiens
ggaagcaaaaccata

SEQ ID NO: 321543 - DNA, 15 bp, Homo sapiens
aggaagcaaaaccat

SEQ ID NO: 321544 - DNA, 15 bp, Homo sapiens
caggaagcaaaacca

SEQ ID NO: 321545 - DNA, 15 bp, Homo sapiens
tcaggaagcaaaacc

SEQ ID NO: 321546 - DNA, 15 bp, Homo sapiens
ctcaggaagcaaaac

SEQ ID NO: 321547 - DNA, 15 bp, Homo sapiens
cctcaggaagcaaaa

SEQ ID NO: 321548 - DNA, 15 bp, Homo sapiens
acctcaggaagcaaa

SEQ ID NO: 321549 - DNA, 15 bp, Homo sapiens
aacctcaggaagcaa

SEQ ID NO: 321550 - DNA, 15 bp, Homo sapiens
aaacctcaggaagca

SEQ ID NO: 321551 - DNA, 15 bp, Homo sapiens
gaaacctcaggaagc

SEQ ID NO: 321552 - DNA, 15 bp, Homo sapiens
tgaaacctcaggaag

SEQ ID NO: 321553 - DNA, 15 bp, Homo sapiens
ctgaaacctcaggaa

SEQ ID NO: 321554 - DNA, 15 bp, Homo sapiens
actgaaacctcagga

SEQ ID NO: 321555 - DNA, 15 bp, Homo sapiens
aactgaaacctcagg

SEQ ID NO: 321556 - DNA, 15 bp, Homo sapiens
taactgaaacctcag

SEQ ID NO: 321557 - DNA, 15 bp, Homo sapiens
ataactgaaacctca

SEQ ID NO: 321558 - DNA, 15 bp, Homo sapiens
gataactgaaacctc

SEQ ID NO: 321559 - DNA, 15 bp, Homo sapiens
ggataactgaaacct

SEQ ID NO: 321560 - DNA, 15 bp, Homo sapiens
gggataactgaaacc

SEQ ID NO: 321561 - DNA, 15 bp, Homo sapiens
ggggataactgaaac

SEQ ID NO: 321562 - DNA, 15 bp, Homo sapiens
tggggataactgaaa

SEQ ID NO: 321563 - DNA, 15 bp, Homo sapiens
ctggggataactgaa

SEQ ID NO: 321564 - DNA, 15 bp, Homo sapiens
cctggggataactga

SEQ ID NO: 321565 - DNA, 15 bp, Homo sapiens
gcctggggataactg

SEQ ID NO: 321566 - DNA, 15 bp, Homo sapiens
tgcctggggataact

SEQ ID NO: 321567 - DNA, 15 bp, Homo sapiens
ttgcctggggataac

SEQ ID NO: 321568 - DNA, 15 bp, Homo sapiens
gttgcctggggataa

SEQ ID NO: 321569 - DNA, 15 bp, Homo sapiens
ggttgcctggggata

SEQ ID NO: 321570 - DNA, 15 bp, Homo sapiens
cggttgcctggggat

SEQ ID NO: 321571 - DNA, 15 bp, Homo sapiens
acggttgcctgggga

SEQ ID NO: 321572 - DNA, 15 bp, Homo sapiens
tacggttgcctgggg

SEQ ID NO: 321573 - DNA, 15 bp, Homo sapiens
ctacggttgcctggg

SEQ ID NO: 321574 - DNA, 15 bp, Homo sapiens
actacggttgcctgg

SEQ ID NO: 321575 - DNA, 15 bp, Homo sapiens
gactacggttgcctg

SEQ ID NO: 321576 - DNA, 15 bp, Homo sapiens
agactacggttgcct

SEQ ID NO: 321577 - DNA, 15 bp, Homo sapiens
cagactacggttgcc

SEQ ID NO: 321578 - DNA, 15 bp, Homo sapiens
tcagactacggttgc

SEQ ID NO: 321579 - DNA, 15 bp, Homo sapiens
ttcagactacggttg

SEQ ID NO: 321580 - DNA, 15 bp, Homo sapiens
tttcagactacggtt

SEQ ID NO: 321581 - DNA, 15 bp, Homo sapiens
ttttcagactacggt

SEQ ID NO: 321582 - DNA, 15 bp, Homo sapiens
attttcagactacgg

SEQ ID NO: 321583 - DNA, 15 bp, Homo sapiens
tattttcagactacg

SEQ ID NO: 321584 - DNA, 15 bp, Homo sapiens
atattttcagactac

SEQ ID NO: 321585 - DNA, 15 bp, Homo sapiens
aatattttcagacta

SEQ ID NO: 321586 - DNA, 15 bp, Homo sapiens
taatattttcagact

SEQ ID NO: 321587 - DNA, 15 bp, Homo sapiens
ttaatattttcagac

SEQ ID NO: 321588 - DNA, 15 bp, Homo sapiens
tttaatattttcaga

SEQ ID NO: 321589 - DNA, 15 bp, Homo sapiens
atttaatattttcag

SEQ ID NO: 321590 - DNA, 15 bp, Homo sapiens
tatttaatattttca

SEQ ID NO: 321591 - DNA, 15 bp, Homo sapiens
ctatttaatattttc

SEQ ID NO: 321592 - DNA, 15 bp, Homo sapiens
cctatttaatatttt

SEQ ID NO: 321593 - DNA, 15 bp, Homo sapiens
tcctatttaatattt

SEQ ID NO: 321594 - DNA, 15 bp, Homo sapiens
ttcctatttaatatt

SEQ ID NO: 321595 - DNA, 15 bp, Homo sapiens
tttcctatttaatat

SEQ ID NO: 321596 - DNA, 15 bp, Homo sapiens
atttcctatttaata

SEQ ID NO: 321597 - DNA, 15 bp, Homo sapiens
aatttcctatttaat

SEQ ID NO: 321598 - DNA, 15 bp, Homo sapiens
gaatttcctatttaa

SEQ ID NO: 321599 - DNA, 15 bp, Homo sapiens
agaatttcctattta

SEQ ID NO: 321600 - DNA, 15 bp, Homo sapiens
tagaatttcctattt

SEQ ID NO: 321601 - DNA, 15 bp, Homo sapiens
ctagaatttcctatt

SEQ ID NO: 321602 - DNA, 15 bp, Homo sapiens
tctagaatttcctat

SEQ ID NO: 321603 - DNA, 15 bp, Homo sapiens
ttctagaatttccta

SEQ ID NO: 321604 - DNA, 15 bp, Homo sapiens
tttctagaatttcct

SEQ ID NO: 321605 - DNA, 15 bp, Homo sapiens
atttctagaatttcc

SEQ ID NO: 321606 - DNA, 15 bp, Homo sapiens
tatttctagaatttc

SEQ ID NO: 321607 - DNA, 15 bp, Homo sapiens
ttatttctagaattt

SEQ ID NO: 321608 - DNA, 15 bp, Homo sapiens
tttatttctagaatt

SEQ ID NO: 321609 - DNA, 15 bp, Homo sapiens
gtttatttctagaat

SEQ ID NO: 321610 - DNA, 15 bp, Homo sapiens
tgtttatttctagaa

SEQ ID NO: 321611 - DNA, 15 bp, Homo sapiens
ttgtttatttctaga

SEQ ID NO: 321612 - DNA, 15 bp, Homo sapiens
attgtttatttctag

SEQ ID NO: 321613 - DNA, 15 bp, Homo sapiens
aattgtttatttcta

SEQ ID NO: 321614 - DNA, 15 bp, Homo sapiens
attatgaattgttta

SEQ ID NO: 321615 - DNA, 15 bp, Homo sapiens
cattatgaattgttt

SEQ ID NO: 321616 - DNA, 15 bp, Homo sapiens
acattatgaattgtt

SEQ ID NO: 321617 - DNA, 15 bp, Homo sapiens
aacattatgaattgt

SEQ ID NO: 321618 - DNA, 15 bp, Homo sapiens
aaacattatgaattg

SEQ ID NO: 321619 - DNA, 15 bp, Homo sapiens
taaacattatgaatt

SEQ ID NO: 321620 - DNA, 15 bp, Homo sapiens
ttaaacattatgaat

SEQ ID NO: 321621 - DNA, 15 bp, Homo sapiens
cttaaacattatgaa

SEQ ID NO: 321622 - DNA, 15 bp, Homo sapiens
acttaaacattatga

SEQ ID NO: 321623 - DNA, 15 bp, Homo sapiens
aacttaaacattatg

SEQ ID NO: 321624 - DNA, 15 bp, Homo sapiens
caacttaaacattat

SEQ ID NO: 321625 - DNA, 15 bp, Homo sapiens
gcaacttaaacatta

SEQ ID NO: 321626 - DNA, 15 bp, Homo sapiens
tgcaacttaaacatt

SEQ ID NO: 321627 - DNA, 15 bp, Homo sapiens
atgcaacttaaacat

SEQ ID NO: 321628 - DNA, 15 bp, Homo sapiens
catgcaacttaaaca

SEQ ID NO: 321629 - DNA, 15 bp, Homo sapiens
gcatgcaacttaaac

SEQ ID NO: 321630 - DNA, 15 bp, Homo sapiens
agcatgcaacttaaa

SEQ ID NO: 321631 - DNA, 15 bp, Homo sapiens
cagcatgcaacttaa

SEQ ID NO: 321632 - DNA, 15 bp, Homo sapiens
acagcatgcaactta

SEQ ID NO: 321633 - DNA, 15 bp, Homo sapiens
gacagcatgcaactt

SEQ ID NO: 321634 - DNA, 15 bp, Homo sapiens
ggacagcatgcaact

SEQ ID NO: 321635 - DNA, 15 bp, Homo sapiens
aggacagcatgcaac

SEQ ID NO: 321636 - DNA, 15 bp, Homo sapiens
caggacagcatgcaa

SEQ ID NO: 321637 - DNA, 15 bp, Homo sapiens
gcaggacagcatgca

SEQ ID NO: 321638 - DNA, 15 bp, Homo sapiens
agcaggacagcatgc

SEQ ID NO: 321639 - DNA, 15 bp, Homo sapiens
aagcaggacagcatg

SEQ ID NO: 321640 - DNA, 15 bp, Homo sapiens
caagcaggacagcat

SEQ ID NO: 321641 - DNA, 15 bp, Homo sapiens
ccaagcaggacagca

SEQ ID NO: 321642 - DNA, 15 bp, Homo sapiens
accaagcaggacagc

SEQ ID NO: 321643 - DNA, 15 bp, Homo sapiens
aaccaagcaggacag

SEQ ID NO: 321644 - DNA, 15 bp, Homo sapiens
gaaccaagcaggaca

SEQ ID NO: 321645 - DNA, 15 bp, Homo sapiens
ggaaccaagcaggac

SEQ ID NO: 321646 - DNA, 15 bp, Homo sapiens
tggaaccaagcagga

SEQ ID NO: 321647 - DNA, 15 bp, Homo sapiens
atggaaccaagcagg

SEQ ID NO: 321648 - DNA, 15 bp, Homo sapiens
gatggaaccaagcag

SEQ ID NO: 321649 - DNA, 15 bp, Homo sapiens
agatggaaccaagca

SEQ ID NO: 321650 - DNA, 15 bp, Homo sapiens
cagatggaaccaagc

SEQ ID NO: 321651 - DNA, 15 bp, Homo sapiens
ccagatggaaccaag

SEQ ID NO: 321652 - DNA, 15 bp, Homo sapiens
cccagatggaaccaa

SEQ ID NO: 321653 - DNA, 15 bp, Homo sapiens
tcccagatggaacca

SEQ ID NO: 321654 - DNA, 15 bp, Homo sapiens
gtcccagatggaacc

SEQ ID NO: 321655 - DNA, 15 bp, Homo sapiens
tgtcccagatggaac

SEQ ID NO: 321656 - DNA, 15 bp, Homo sapiens
ttgtcccagatggaa

SEQ ID NO: 321657 - DNA, 15 bp, Homo sapiens
cttgtcccagatgga

SEQ ID NO: 321658 - DNA, 15 bp, Homo sapiens
tcttgtcccagatgg

SEQ ID NO: 321659 - DNA, 15 bp, Homo sapiens
ttcttgtcccagatg

SEQ ID NO: 321660 - DNA, 15 bp, Homo sapiens
attcttgtcccagat

SEQ ID NO: 321661 - DNA, 15 bp, Homo sapiens
gattcttgtcccaga

SEQ ID NO: 321662 - DNA, 15 bp, Homo sapiens
ggattcttgtcccag

SEQ ID NO: 321663 - DNA, 15 bp, Homo sapiens
aggattcttgtccca

SEQ ID NO: 321664 - DNA, 15 bp, Homo sapiens
gaggattcttgtccc

SEQ ID NO: 321665 - DNA, 15 bp, Homo sapiens
ggaggattcttgtcc

SEQ ID NO: 321666 - DNA, 15 bp, Homo sapiens
gggaggattcttgtc

SEQ ID NO: 321667 - DNA, 15 bp, Homo sapiens
agggaggattcttgt

SEQ ID NO: 321668 - DNA, 15 bp, Homo sapiens
aagggaggattcttg

SEQ ID NO: 321669 - DNA, 15 bp, Homo sapiens
aaagggaggattctt

SEQ ID NO: 321670 - DNA, 15 bp, Homo sapiens
caaagggaggattct

SEQ ID NO: 321671 - DNA, 15 bp, Homo sapiens
acaaagggaggattc

SEQ ID NO: 321672 - DNA, 15 bp, Homo sapiens
gacaaagggaggatt

SEQ ID NO: 321673 - DNA, 15 bp, Homo sapiens
ggacaaagggaggat

SEQ ID NO: 321674 - DNA, 15 bp, Homo sapiens
tggacaaagggagga

SEQ ID NO: 321675 - DNA, 15 bp, Homo sapiens
ctggacaaagggagg

SEQ ID NO: 321676 - DNA, 15 bp, Homo sapiens
gctggacaaagggag

SEQ ID NO: 321677 - DNA, 15 bp, Homo sapiens
tgctggacaaaggga

SEQ ID NO: 321678 - DNA, 15 bp, Homo sapiens
gtgctggacaaaggg

SEQ ID NO: 321679 - DNA, 15 bp, Homo sapiens
tgtgctggacaaagg

SEQ ID NO: 321680 - DNA, 15 bp, Homo sapiens
atgtgctggacaaag

SEQ ID NO: 321681 - DNA, 15 bp, Homo sapiens
gatgtgctggacaaa

SEQ ID NO: 321682 - DNA, 15 bp, Homo sapiens
ggatgtgctggacaa

SEQ ID NO: 321683 - DNA, 15 bp, Homo sapiens
cggatgtgctggaca

SEQ ID NO: 321684 - DNA, 15 bp, Homo sapiens
acggatgtgctggac

SEQ ID NO: 321685 - DNA, 15 bp, Homo sapiens
cacggatgtgctgga

SEQ ID NO: 321686 - DNA, 15 bp, Homo sapiens
gcacggatgtgctgg

SEQ ID NO: 321687 - DNA, 15 bp, Homo sapiens
ggcacggatgtgctg

SEQ ID NO: 321688 - DNA, 15 bp, Homo sapiens
tggcacggatgtgct

SEQ ID NO: 321689 - DNA, 15 bp, Homo sapiens
atggcacggatgtgc

SEQ ID NO: 321690 - DNA, 15 bp, Homo sapiens
gatggcacggatgtg

SEQ ID NO: 321691 - DNA, 15 bp, Homo sapiens
agatggcacggatgt

SEQ ID NO: 321692 - DNA, 15 bp, Homo sapiens
cagatggcacggatg

SEQ ID NO: 321693 - DNA, 15 bp, Homo sapiens
gcagatggcacggat

SEQ ID NO: 321694 - DNA, 15 bp, Homo sapiens
tgcagatggcacgga

SEQ ID NO: 321695 - DNA, 15 bp, Homo sapiens
gtgcagatggcacgg

SEQ ID NO: 321696 - DNA, 15 bp, Homo sapiens
agtgcagatggcacg

SEQ ID NO: 321697 - DNA, 15 bp, Homo sapiens
gagtgcagatggcac

SEQ ID NO: 321698 - DNA, 15 bp, Homo sapiens
ggagtgcagatggca

SEQ ID NO: 321699 - DNA, 15 bp, Homo sapiens
gggagtgcagatggc

SEQ ID NO: 321700 - DNA, 15 bp, Homo sapiens
agggagtgcagatgg

SEQ ID NO: 321701 - DNA, 15 bp, Homo sapiens
cagggagtgcagatg

SEQ ID NO: 321702 - DNA, 15 bp, Homo sapiens
ccagggagtgcagat

SEQ ID NO: 321703 - DNA, 15 bp, Homo sapiens
gccagggagtgcaga

SEQ ID NO: 321704 - DNA, 15 bp, Homo sapiens
ggccagggagtgcag

SEQ ID NO: 321705 - DNA, 15 bp, Homo sapiens
tggccagggagtgca

SEQ ID NO: 321706 - DNA, 15 bp, Homo sapiens
atggccagggagtgc

SEQ ID NO: 321707 - DNA, 15 bp, Homo sapiens
aatggccagggagtg

SEQ ID NO: 321708 - DNA, 15 bp, Homo sapiens
taatggccagggagt

SEQ ID NO: 321709 - DNA, 15 bp, Homo sapiens
ctaatggccagggag

SEQ ID NO: 321710 - DNA, 15 bp, Homo sapiens
actaatggccaggga

SEQ ID NO: 321711 - DNA, 15 bp, Homo sapiens
gactaatggccaggg

SEQ ID NO: 321712 - DNA, 15 bp, Homo sapiens
agactaatggccagg

SEQ ID NO: 321713 - DNA, 15 bp, Homo sapiens
gagactaatggccag

SEQ ID NO: 321714 - DNA, 15 bp, Homo sapiens
agagactaatggcca

SEQ ID NO: 321715 - DNA, 15 bp, Homo sapiens
gagagactaatggcc

SEQ ID NO: 321716 - DNA, 15 bp, Homo sapiens
tgagagactaatggc

SEQ ID NO: 321717 - DNA, 15 bp, Homo sapiens
ctgagagactaatgg

SEQ ID NO: 321718 - DNA, 15 bp, Homo sapiens
cctgagagactaatg

SEQ ID NO: 321719 - DNA, 15 bp, Homo sapiens
ccctgagagactaat

SEQ ID NO: 321720 - DNA, 15 bp, Homo sapiens
gccctgagagactaa

SEQ ID NO: 321721 - DNA, 15 bp, Homo sapiens
tgccctgagagacta

SEQ ID NO: 321722 - DNA, 15 bp, Homo sapiens
gtgccctgagagact

SEQ ID NO: 321723 - DNA, 15 bp, Homo sapiens
agtgccctgagagac

SEQ ID NO: 321724 - DNA, 15 bp, Homo sapiens
aagtgccctgagaga

SEQ ID NO: 321725 - DNA, 15 bp, Homo sapiens
gaagtgccctgagag

SEQ ID NO: 321726 - DNA, 15 bp, Homo sapiens
tgaagtgccctgaga

SEQ ID NO: 321727 - DNA, 15 bp, Homo sapiens
ctgaagtgccctgag

SEQ ID NO: 321728 - DNA, 15 bp, Homo sapiens
actgaagtgccctga

SEQ ID NO: 321729 - DNA, 15 bp, Homo sapiens
cactgaagtgccctg

SEQ ID NO: 321730 - DNA, 15 bp, Homo sapiens
ccactgaagtgccct

SEQ ID NO: 321731 - DNA, 15 bp, Homo sapiens
cccactgaagtgccc

SEQ ID NO: 321732 - DNA, 15 bp, Homo sapiens
gcccactgaagtgcc

SEQ ID NO: 321733 - DNA, 15 bp, Homo sapiens
tgcccactgaagtgc

SEQ ID NO: 321734 - DNA, 15 bp, Homo sapiens
ctgcccactgaagtg

SEQ ID NO: 321735 - DNA, 15 bp, Homo sapiens
tctgcccactgaagt

SEQ ID NO: 321736 - DNA, 15 bp, Homo sapiens
gtctgcccactgaag

SEQ ID NO: 321737 - DNA, 15 bp, Homo sapiens
ggtctgcccactgaa

SEQ ID NO: 321738 - DNA, 15 bp, Homo sapiens
cggtctgcccactga

SEQ ID NO: 321739 - DNA, 15 bp, Homo sapiens
tcggtctgcccactg

SEQ ID NO: 321740 - DNA, 15 bp, Homo sapiens
atcggtctgcccact

SEQ ID NO: 321741 - DNA, 15 bp, Homo sapiens
catcggtctgcccac

SEQ ID NO: 321742 - DNA, 15 bp, Homo sapiens
acatcggtctgccca

SEQ ID NO: 321743 - DNA, 15 bp, Homo sapiens
gacatcggtctgccc

SEQ ID NO: 321744 - DNA, 15 bp, Homo sapiens
agacatcggtctgcc

SEQ ID NO: 321745 - DNA, 15 bp, Homo sapiens
aagacatcggtctgc

SEQ ID NO: 321746 - DNA, 15 bp, Homo sapiens
caagacatcggtctg

SEQ ID NO: 321747 - DNA, 15 bp, Homo sapiens
gcaagacatcggtct

SEQ ID NO: 321748 - DNA, 15 bp, Homo sapiens
agcaagacatcggtc

SEQ ID NO: 321749 - DNA, 15 bp, Homo sapiens
cagcaagacatcggt

SEQ ID NO: 321750 - DNA, 15 bp, Homo sapiens
acagcaagacatcgg

SEQ ID NO: 321751 - DNA, 15 bp, Homo sapiens
tacagcaagacatcg

SEQ ID NO: 321752 - DNA, 15 bp, Homo sapiens
ttacagcaagacatc

SEQ ID NO: 321753 - DNA, 15 bp, Homo sapiens
gttacagcaagacat

SEQ ID NO: 321754 - DNA, 15 bp, Homo sapiens
ggttacagcaagaca

SEQ ID NO: 321755 - DNA, 15 bp, Homo sapiens
gggttacagcaagac

SEQ ID NO: 321756 - DNA, 15 bp, Homo sapiens
tgggttacagcaaga

SEQ ID NO: 321757 - DNA, 15 bp, Homo sapiens
atgggttacagcaag

SEQ ID NO: 321758 - DNA, 15 bp, Homo sapiens
catgggttacagcaa

SEQ ID NO: 321759 - DNA, 15 bp, Homo sapiens
acatgggttacagca

SEQ ID NO: 321760 - DNA, 15 bp, Homo sapiens
aacatgggttacagc

SEQ ID NO: 321761 - DNA, 15 bp, Homo sapiens
taacatgggttacag

SEQ ID NO: 321762 - DNA, 15 bp, Homo sapiens
gtaacatgggttaca

SEQ ID NO: 321763 - DNA, 15 bp, Homo sapiens
ggtaacatgggttac

SEQ ID NO: 321764 - DNA, 15 bp, Homo sapiens
aggtaacatgggtta

SEQ ID NO: 321765 - DNA, 15 bp, Homo sapiens
caggtaacatgggtt

SEQ ID NO: 321766 - DNA, 15 bp, Homo sapiens
acaggtaacatgggt

SEQ ID NO: 321767 - DNA, 15 bp, Homo sapiens
cacaggtaacatggg

SEQ ID NO: 321768 - DNA, 15 bp, Homo sapiens
acacaggtaacatgg

SEQ ID NO: 321769 - DNA, 15 bp, Homo sapiens
aacacaggtaacatg

SEQ ID NO: 321770 - DNA, 15 bp, Homo sapiens
gaacacaggtaacat

SEQ ID NO: 321771 - DNA, 15 bp, Homo sapiens
tgaacacaggtaaca

SEQ ID NO: 321772 - DNA, 15 bp, Homo sapiens
ttgaacacaggtaac

SEQ ID NO: 321773 - DNA, 15 bp, Homo sapiens
gttgaacacaggtaa

SEQ ID NO: 321774 - DNA, 15 bp, Homo sapiens
agttgaacacaggta

SEQ ID NO: 321775 - DNA, 15 bp, Homo sapiens
tagttgaacacaggt

SEQ ID NO: 321776 - DNA, 15 bp, Homo sapiens
ttagttgaacacagg

SEQ ID NO: 321777 - DNA, 15 bp, Homo sapiens
gttagttgaacacag

SEQ ID NO: 321778 - DNA, 15 bp, Homo sapiens
ggttagttgaacaca

SEQ ID NO: 321779 - DNA, 15 bp, Homo sapiens
gggttagttgaacac

SEQ ID NO: 321780 - DNA, 15 bp, Homo sapiens
agggttagttgaaca

SEQ ID NO: 321781 - DNA, 15 bp, Homo sapiens
aagggttagttgaac

SEQ ID NO: 321782 - DNA, 15 bp, Homo sapiens
taagggttagttgaa

SEQ ID NO: 321783 - DNA, 15 bp, Homo sapiens
ataagggttagttga

SEQ ID NO: 321784 - DNA, 15 bp, Homo sapiens
aataagggttagttg

SEQ ID NO: 321785 - DNA, 15 bp, Homo sapiens
aaataagggttagtt

SEQ ID NO: 321786 - DNA, 15 bp, Homo sapiens
aaaataagggttagt

SEQ ID NO: 321787 - DNA, 15 bp, Homo sapiens
taaaataagggttag

SEQ ID NO: 321788 - DNA, 15 bp, Homo sapiens
gtaaaataagggtta

SEQ ID NO: 321789 - DNA, 15 bp, Homo sapiens
agtaaaataagggtt

SEQ ID NO: 321790 - DNA, 15 bp, Homo sapiens
aagtaaaataagggt

SEQ ID NO: 321791 - DNA, 15 bp, Homo sapiens
taagtaaaataaggg

SEQ ID NO: 321792 - DNA, 15 bp, Homo sapiens
ttaagtaaaataagg

SEQ ID NO: 321793 - DNA, 15 bp, Homo sapiens
attaagtaaaataag

SEQ ID NO: 321794 - DNA, 15 bp, Homo sapiens
tattaagtaaaataa

SEQ ID NO: 321795 - DNA, 15 bp, Homo sapiens
ttattaagtaaaata

SEQ ID NO: 321796 - DNA, 15 bp, Homo sapiens
gttattaagtaaaat

SEQ ID NO: 321797 - DNA, 15 bp, Homo sapiens
cgttattaagtaaaa

SEQ ID NO: 321798 - DNA, 15 bp, Homo sapiens
ccgttattaagtaaa

SEQ ID NO: 321799 - DNA, 15 bp, Homo sapiens
gccgttattaagtaa

SEQ ID NO: 321800 - DNA, 15 bp, Homo sapiens
ggccgttattaagta

SEQ ID NO: 321801 - DNA, 15 bp, Homo sapiens
gggccgttattaagt

SEQ ID NO: 321802 - DNA, 15 bp, Homo sapiens
ggggccgttattaag

SEQ ID NO: 321803 - DNA, 15 bp, Homo sapiens
tggggccgttattaa

SEQ ID NO: 321804 - DNA, 15 bp, Homo sapiens
ttggggccgttatta

SEQ ID NO: 321805 - DNA, 15 bp, Homo sapiens
tttggggccgttatt

SEQ ID NO: 321806 - DNA, 15 bp, Homo sapiens
ctttggggccgttat

SEQ ID NO: 321807 - DNA, 15 bp, Homo sapiens
gctttggggccgtta

SEQ ID NO: 321808 - DNA, 15 bp, Homo sapiens
cgctttggggccgtt

SEQ ID NO: 321809 - DNA, 15 bp, Homo sapiens
gcgctttggggccgt

SEQ ID NO: 321810 - DNA, 15 bp, Homo sapiens
tgcgctttggggccg

SEQ ID NO: 321811 - DNA, 15 bp, Homo sapiens
ttgcgctttggggcc

SEQ ID NO: 321812 - DNA, 15 bp, Homo sapiens
cttgcgctttggggc

SEQ ID NO: 321813 - DNA, 15 bp, Homo sapiens
acttgcgctttgggg

SEQ ID NO: 321814 - DNA, 15 bp, Homo sapiens
tacttgcgctttggg

SEQ ID NO: 321815 - DNA, 15 bp, Homo sapiens
atacttgcgctttgg

SEQ ID NO: 321816 - DNA, 15 bp, Homo sapiens
tatacttgcgctttg

SEQ ID NO: 321817 - DNA, 15 bp, Homo sapiens
ctatacttgcgcttt

SEQ ID NO: 321818 - DNA, 15 bp, Homo sapiens
actatacttgcgctt

SEQ ID NO: 321819 - DNA, 15 bp, Homo sapiens
cactatacttgcgct

SEQ ID NO: 321820 - DNA, 15 bp, Homo sapiens
tcactatacttgcgc

SEQ ID NO: 321821 - DNA, 15 bp, Homo sapiens
atcactatacttgcg

SEQ ID NO: 321822 - DNA, 15 bp, Homo sapiens
catcactatacttgc

SEQ ID NO: 321823 - DNA, 15 bp, Homo sapiens
gcatcactatacttg

SEQ ID NO: 321824 - DNA, 15 bp, Homo sapiens
agcatcactatactt

SEQ ID NO: 321825 - DNA, 15 bp, Homo sapiens
cagcatcactatact

SEQ ID NO: 321826 - DNA, 15 bp, Homo sapiens
ccagcatcactatac

SEQ ID NO: 321827 - DNA, 15 bp, Homo sapiens
accagcatcactata

SEQ ID NO: 321828 - DNA, 15 bp, Homo sapiens
taccagcatcactat

SEQ ID NO: 321829 - DNA, 15 bp, Homo sapiens
gtaccagcatcacta

SEQ ID NO: 321830 - DNA, 15 bp, Homo sapiens
tgtaccagcatcact

SEQ ID NO: 321831 - DNA, 15 bp, Homo sapiens
atgtaccagcatcac

SEQ ID NO: 321832 - DNA, 15 bp, Homo sapiens
tatgtaccagcatca

SEQ ID NO: 321833 - DNA, 15 bp, Homo sapiens
atatgtaccagcatc

SEQ ID NO: 321834 - DNA, 15 bp, Homo sapiens
aatatgtaccagcat

SEQ ID NO: 321835 - DNA, 15 bp, Homo sapiens
caatatgtaccagca

SEQ ID NO: 321836 - DNA, 15 bp, Homo sapiens
acaatatgtaccagc

SEQ ID NO: 321837 - DNA, 15 bp, Homo sapiens
gacaatatgtaccag

SEQ ID NO: 321838 - DNA, 15 bp, Homo sapiens
tgacaatatgtacca

SEQ ID NO: 321839 - DNA, 15 bp, Homo sapiens
atgacaatatgtacc

SEQ ID NO: 321840 - DNA, 15 bp, Homo sapiens
tatgacaatatgtac

SEQ ID NO: 321841 - DNA, 15 bp, Homo sapiens
ttatgacaatatgta

SEQ ID NO: 321842 - DNA, 15 bp, Homo sapiens
attatgacaatatgt

SEQ ID NO: 321843 - DNA, 15 bp, Homo sapiens
aattatgacaatatg

SEQ ID NO: 321844 - DNA, 15 bp, Homo sapiens
caattatgacaatat

SEQ ID NO: 321845 - DNA, 15 bp, Homo sapiens
acaattatgacaata

SEQ ID NO: 321846 - DNA, 15 bp, Homo sapiens
aacaattatgacaat

SEQ ID NO: 321847 - DNA, 15 bp, Homo sapiens
gaacaattatgacaa

SEQ ID NO: 321848 - DNA, 15 bp, Homo sapiens
agaacaattatgaca

SEQ ID NO: 321849 - DNA, 15 bp, Homo sapiens
tagaacaattatgac

SEQ ID NO: 321850 - DNA, 15 bp, Homo sapiens
atagaacaattatga

SEQ ID NO: 321851 - DNA, 15 bp, Homo sapiens
aatagaacaattatg

SEQ ID NO: 321852 - DNA, 15 bp, Homo sapiens
aaatagaacaattat

SEQ ID NO: 321853 - DNA, 15 bp, Homo sapiens
aaaatagaacaatta

SEQ ID NO: 321854 - DNA, 15 bp, Homo sapiens
taaaatagaacaatt

SEQ ID NO: 321855 - DNA, 15 bp, Homo sapiens
ataaaatagaacaat

SEQ ID NO: 321856 - DNA, 15 bp, Homo sapiens
aataaaatagaacaa

SEQ ID NO: 321857 - DNA, 15 bp, Homo sapiens
taataaaatagaaca

SEQ ID NO: 321858 - DNA, 15 bp, Homo sapiens
ataataaaatagaac

SEQ ID NO: 321859 - DNA, 15 bp, Homo sapiens
aataataaaatagaa

SEQ ID NO: 321860 - DNA, 15 bp, Homo sapiens
caataataaaataga

SEQ ID NO: 321861 - DNA, 15 bp, Homo sapiens
gcaataataaaatag

SEQ ID NO: 321862 - DNA, 15 bp, Homo sapiens
ggcaataataaaata

SEQ ID NO: 321863 - DNA, 15 bp, Homo sapiens
tggcaataataaaat

SEQ ID NO: 321864 - DNA, 15 bp, Homo sapiens
atggcaataataaaa

SEQ ID NO: 321865 - DNA, 15 bp, Homo sapiens
aatggcaataataaa

SEQ ID NO: 321866 - DNA, 15 bp, Homo sapiens
caatggcaataataa

SEQ ID NO: 321867 - DNA, 15 bp, Homo sapiens
acaatggcaataata

SEQ ID NO: 321868 - DNA, 15 bp, Homo sapiens
aacaatggcaataat

SEQ ID NO: 321869 - DNA, 15 bp, Homo sapiens
taacaatggcaataa

SEQ ID NO: 321870 - DNA, 15 bp, Homo sapiens
ttaacaatggcaata

SEQ ID NO: 321871 - DNA, 15 bp, Homo sapiens
attaacaatggcaat

SEQ ID NO: 321872 - DNA, 15 bp, Homo sapiens
gattaacaatggcaa

SEQ ID NO: 321873 - DNA, 15 bp, Homo sapiens
ggattaacaatggca

SEQ ID NO: 321874 - DNA, 15 bp, Homo sapiens
gggattaacaatggc

SEQ ID NO: 321875 - DNA, 15 bp, Homo sapiens
agggattaacaatgg

SEQ ID NO: 321876 - DNA, 15 bp, Homo sapiens
aagggattaacaatg

SEQ ID NO: 321877 - DNA, 15 bp, Homo sapiens
gaagggattaacaat

SEQ ID NO: 321878 - DNA, 15 bp, Homo sapiens
ggaagggattaacaa

SEQ ID NO: 321879 - DNA, 15 bp, Homo sapiens
aggaagggattaaca

SEQ ID NO: 321880 - DNA, 15 bp, Homo sapiens
caggaagggattaac

SEQ ID NO: 321881 - DNA, 15 bp, Homo sapiens
acaggaagggattaa

SEQ ID NO: 321882 - DNA, 15 bp, Homo sapiens
cacaggaagggatta

SEQ ID NO: 321883 - DNA, 15 bp, Homo sapiens
gcacaggaagggatt

SEQ ID NO: 321884 - DNA, 15 bp, Homo sapiens
agcacaggaagggat

SEQ ID NO: 321885 - DNA, 15 bp, Homo sapiens
tagcacaggaaggga

SEQ ID NO: 321886 - DNA, 15 bp, Homo sapiens
ttagcacaggaaggg

SEQ ID NO: 321887 - DNA, 15 bp, Homo sapiens
attagcacaggaagg

SEQ ID NO: 321888 - DNA, 15 bp, Homo sapiens
aattagcacaggaag

SEQ ID NO: 321889 - DNA, 15 bp, Homo sapiens
aaattagcacaggaa

SEQ ID NO: 321890 - DNA, 15 bp, Homo sapiens
taaattagcacagga

SEQ ID NO: 321891 - DNA, 15 bp, Homo sapiens
ataaattagcacagg

SEQ ID NO: 321892 - DNA, 15 bp, Homo sapiens
tataaattagcacag

SEQ ID NO: 321893 - DNA, 15 bp, Homo sapiens
ttataaattagcaca

SEQ ID NO: 321894 - DNA, 15 bp, Homo sapiens
cttataaattagcac

SEQ ID NO: 321895 - DNA, 15 bp, Homo sapiens
acttataaattagca

SEQ ID NO: 321896 - DNA, 15 bp, Homo sapiens
aacttataaattagc

SEQ ID NO: 321897 - DNA, 15 bp, Homo sapiens
taacttataaattag

SEQ ID NO: 321898 - DNA, 15 bp, Homo sapiens
ttaacttataaatta

SEQ ID NO: 321899 - DNA, 15 bp, Homo sapiens
tttaacttataaatt

SEQ ID NO: 321900 - DNA, 15 bp, Homo sapiens
atttaacttataaat

SEQ ID NO: 321901 - DNA, 15 bp, Homo sapiens
aatttaacttataaa

SEQ ID NO: 321902 - DNA, 15 bp, Homo sapiens
aaatttaacttataa

SEQ ID NO: 321903 - DNA, 15 bp, Homo sapiens
aaaatttaacttata

SEQ ID NO: 321904 - DNA, 15 bp, Homo sapiens
taaaatttaacttat

SEQ ID NO: 321905 - DNA, 15 bp, Homo sapiens
gtaaaatttaactta

SEQ ID NO: 321906 - DNA, 15 bp, Homo sapiens
ggtaaaatttaactt

SEQ ID NO: 321907 - DNA, 15 bp, Homo sapiens
cggtaaaatttaact

SEQ ID NO: 321908 - DNA, 15 bp, Homo sapiens
acggtaaaatttaac

SEQ ID NO: 321909 - DNA, 15 bp, Homo sapiens
tacggtaaaatttaa

SEQ ID NO: 321910 - DNA, 15 bp, Homo sapiens
ctacggtaaaattta

SEQ ID NO: 321911 - DNA, 15 bp, Homo sapiens
cctacggtaaaattt

SEQ ID NO: 321912 - DNA, 15 bp, Homo sapiens
acctacggtaaaatt

SEQ ID NO: 321913 - DNA, 15 bp, Homo sapiens
cacctacggtaaaat

SEQ ID NO: 321914 - DNA, 15 bp, Homo sapiens
acacctacggtaaaa

SEQ ID NO: 321915 - DNA, 15 bp, Homo sapiens
cacacctacggtaaa

SEQ ID NO: 321916 - DNA, 15 bp, Homo sapiens
acacacctacggtaa

SEQ ID NO: 321917 - DNA, 15 bp, Homo sapiens
cacacacctacggta

SEQ ID NO: 321918 - DNA, 15 bp, Homo sapiens
acacacacctacggt

SEQ ID NO: 321919 - DNA, 15 bp, Homo sapiens
tacacacacctacgg

SEQ ID NO: 321920 - DNA, 15 bp, Homo sapiens
atacacacacctacg

SEQ ID NO: 321921 - DNA, 15 bp, Homo sapiens
tatacacacacctac

SEQ ID NO: 321922 - DNA, 15 bp, Homo sapiens
atatacacacaccta

SEQ ID NO: 321923 - DNA, 15 bp, Homo sapiens
tatatacacacacct

SEQ ID NO: 321924 - DNA, 15 bp, Homo sapiens
ttatatacacacacc

SEQ ID NO: 321925 - DNA, 15 bp, Homo sapiens
attatatacacacac

SEQ ID NO: 321926 - DNA, 15 bp, Homo sapiens
cattatatacacaca

SEQ ID NO: 321927 - DNA, 15 bp, Homo sapiens
gcattatatacacac

SEQ ID NO: 321928 - DNA, 15 bp, Homo sapiens
tgcattatatacaca

SEQ ID NO: 321929 - DNA, 15 bp, Homo sapiens
atgcattatatacac

SEQ ID NO: 321930 - DNA, 15 bp, Homo sapiens
tatgcattatataca

SEQ ID NO: 321931 - DNA, 15 bp, Homo sapiens
atatgcattatatac

SEQ ID NO: 321932 - DNA, 15 bp, Homo sapiens
tatatgcattatata

SEQ ID NO: 321933 - DNA, 15 bp, Homo sapiens
ctatatgcattatat

SEQ ID NO: 321934 - DNA, 15 bp, Homo sapiens
cctatatgcattata

SEQ ID NO: 321935 - DNA, 15 bp, Homo sapiens
tcctatatgcattat

SEQ ID NO: 321936 - DNA, 15 bp, Homo sapiens
atcctatatgcatta

SEQ ID NO: 321937 - DNA, 15 bp, Homo sapiens
aatcctatatgcatt

SEQ ID NO: 321938 - DNA, 15 bp, Homo sapiens
aaatcctatatgcat

SEQ ID NO: 321939 - DNA, 15 bp, Homo sapiens
caaatcctatatgca

SEQ ID NO: 321940 - DNA, 15 bp, Homo sapiens
ccaaatcctatatgc

SEQ ID NO: 321941 - DNA, 15 bp, Homo sapiens
gccaaatcctatatg

SEQ ID NO: 321942 - DNA, 15 bp, Homo sapiens
tgccaaatcctatat

SEQ ID NO: 321943 - DNA, 15 bp, Homo sapiens
gtgccaaatcctata

SEQ ID NO: 321944 - DNA, 15 bp, Homo sapiens
agtgccaaatcctat

SEQ ID NO: 321945 - DNA, 15 bp, Homo sapiens
tagtgccaaatccta

SEQ ID NO: 321946 - DNA, 15 bp, Homo sapiens
atagtgccaaatcct

SEQ ID NO: 321947 - DNA, 15 bp, Homo sapiens
gatagtgccaaatcc

SEQ ID NO: 321948 - DNA, 15 bp, Homo sapiens
agatagtgccaaatc

SEQ ID NO: 321949 - DNA, 15 bp, Homo sapiens
cagatagtgccaaat

SEQ ID NO: 321950 - DNA, 15 bp, Homo sapiens
tcagatagtgccaaa

SEQ ID NO: 321951 - DNA, 15 bp, Homo sapiens
ctcagatagtgccaa

SEQ ID NO: 321952 - DNA, 15 bp, Homo sapiens
cctcagatagtgcca

SEQ ID NO: 321953 - DNA, 15 bp, Homo sapiens
acctcagatagtgcc

SEQ ID NO: 321954 - DNA, 15 bp, Homo sapiens
aacctcagatagtgc

SEQ ID NO: 321955 - DNA, 15 bp, Homo sapiens
aaacctcagatagtg

SEQ ID NO: 321956 - DNA, 15 bp, Homo sapiens
gaaacctcagatagt

SEQ ID NO: 321957 - DNA, 15 bp, Homo sapiens
tgaaacctcagatag

SEQ ID NO: 321958 - DNA, 15 bp, Homo sapiens
ctgaaacctcagata

SEQ ID NO: 321959 - DNA, 15 bp, Homo sapiens
cctgaaacctcagat

SEQ ID NO: 321960 - DNA, 15 bp, Homo sapiens
gcctgaaacctcaga

SEQ ID NO: 321961 - DNA, 15 bp, Homo sapiens
tgcctgaaacctcag

SEQ ID NO: 321962 - DNA, 15 bp, Homo sapiens
atgcctgaaacctca

SEQ ID NO: 321963 - DNA, 15 bp, Homo sapiens
gatgcctgaaacctc

SEQ ID NO: 321964 - DNA, 15 bp, Homo sapiens
ggatgcctgaaacct

SEQ ID NO: 321965 - DNA, 15 bp, Homo sapiens
tggatgcctgaaacc

SEQ ID NO: 321966 - DNA, 15 bp, Homo sapiens
gtggatgcctgaaac

SEQ ID NO: 321967 - DNA, 15 bp, Homo sapiens
agtggatgcctgaaa

SEQ ID NO: 321968 - DNA, 15 bp, Homo sapiens
cagtggatgcctgaa

SEQ ID NO: 321969 - DNA, 15 bp, Homo sapiens
ccagtggatgcctga

SEQ ID NO: 321970 - DNA, 15 bp, Homo sapiens
cccagtggatgcctg

SEQ ID NO: 321971 - DNA, 15 bp, Homo sapiens
tcccagtggatgcct

SEQ ID NO: 321972 - DNA, 15 bp, Homo sapiens
ctcccagtggatgcc

SEQ ID NO: 321973 - DNA, 15 bp, Homo sapiens
cctcccagtggatgc

SEQ ID NO: 321974 - DNA, 15 bp, Homo sapiens
acctcccagtggatg

SEQ ID NO: 321975 - DNA, 15 bp, Homo sapiens
gacctcccagtggat

SEQ ID NO: 321976 - DNA, 15 bp, Homo sapiens
agacctcccagtgga

SEQ ID NO: 321977 - DNA, 15 bp, Homo sapiens
aagacctcccagtgg

SEQ ID NO: 321978 - DNA, 15 bp, Homo sapiens
caagacctcccagtg

SEQ ID NO: 321979 - DNA, 15 bp, Homo sapiens
ccaagacctcccagt

SEQ ID NO: 321980 - DNA, 15 bp, Homo sapiens
tccaagacctcccag

SEQ ID NO: 321981 - DNA, 15 bp, Homo sapiens
ttccaagacctccca

SEQ ID NO: 321982 - DNA, 15 bp, Homo sapiens
attccaagacctccc

SEQ ID NO: 321983 - DNA, 15 bp, Homo sapiens
cattccaagacctcc

SEQ ID NO: 321984 - DNA, 15 bp, Homo sapiens
acattccaagacctc

SEQ ID NO: 321985 - DNA, 15 bp, Homo sapiens
tacattccaagacct

SEQ ID NO: 321986 - DNA, 15 bp, Homo sapiens
atacattccaagacc

SEQ ID NO: 321987 - DNA, 15 bp, Homo sapiens
gatacattccaagac

SEQ ID NO: 321988 - DNA, 15 bp, Homo sapiens
ggatacattccaaga

SEQ ID NO: 321989 - DNA, 15 bp, Homo sapiens
gggatacattccaag

SEQ ID NO: 321990 - DNA, 15 bp, Homo sapiens
agggatacattccaa

SEQ ID NO: 321991 - DNA, 15 bp, Homo sapiens
gagggatacattcca

SEQ ID NO: 321992 - DNA, 15 bp, Homo sapiens
tgagggatacattcc

SEQ ID NO: 321993 - DNA, 15 bp, Homo sapiens
ttgagggatacattc

SEQ ID NO: 321994 - DNA, 15 bp, Homo sapiens
cttgagggatacatt

SEQ ID NO: 321995 - DNA, 15 bp, Homo sapiens
ccttgagggatacat

SEQ ID NO: 321996 - DNA, 15 bp, Homo sapiens
tccttgagggataca

SEQ ID NO: 321997 - DNA, 15 bp, Homo sapiens
ttccttgagggatac

SEQ ID NO: 321998 - DNA, 15 bp, Homo sapiens
gttccttgagggata

SEQ ID NO: 321999 - DNA, 15 bp, Homo sapiens
tgttccttgagggat

SEQ ID NO: 322000 - DNA, 15 bp, Homo sapiens
atgttccttgaggga

SEQ ID NO: 322001 - DNA, 15 bp, Homo sapiens
catgttccttgaggg

SEQ ID NO: 322002 - DNA, 15 bp, Homo sapiens
ccatgttccttgagg

SEQ ID NO: 322003 - DNA, 15 bp, Homo sapiens
tccatgttccttgag

SEQ ID NO: 322004 - DNA, 15 bp, Homo sapiens
ttccatgttccttga

SEQ ID NO: 322005 - DNA, 15 bp, Homo sapiens
cttccatgttccttg

SEQ ID NO: 322006 - DNA, 15 bp, Homo sapiens
tcttccatgttcctt

SEQ ID NO: 322007 - DNA, 15 bp, Homo sapiens
ctcttccatgttcct

SEQ ID NO: 322008 - DNA, 15 bp, Homo sapiens
actcttccatgttcc

SEQ ID NO: 322009 - DNA, 15 bp, Homo sapiens
cactcttccatgttc

SEQ ID NO: 322010 - DNA, 15 bp, Homo sapiens
acactcttccatgtt

SEQ ID NO: 322011 - DNA, 15 bp, Homo sapiens
aacactcttccatgt

SEQ ID NO: 322012 - DNA, 15 bp, Homo sapiens
caacactcttccatg

SEQ ID NO: 322013 - DNA, 15 bp, Homo sapiens
acaacactcttccat

SEQ ID NO: 322014 - DNA, 15 bp, Homo sapiens
aacaacactcttcca

SEQ ID NO: 322015 - DNA, 15 bp, Homo sapiens
taacaacactcttcc

SEQ ID NO: 322016 - DNA, 15 bp, Homo sapiens
ataacaacactcttc

SEQ ID NO: 322017 - DNA, 15 bp, Homo sapiens
gataacaacactctt

SEQ ID NO: 322018 - DNA, 15 bp, Homo sapiens
agataacaacactct

SEQ ID NO: 322019 - DNA, 15 bp, Homo sapiens
aagataacaacactc

SEQ ID NO: 322020 - DNA, 15 bp, Homo sapiens
aaagataacaacact

SEQ ID NO: 322021 - DNA, 15 bp, Homo sapiens
gaaagataacaacac

SEQ ID NO: 322022 - DNA, 15 bp, Homo sapiens
tgaaagataacaaca

SEQ ID NO: 322023 - DNA, 15 bp, Homo sapiens
atgaaagataacaac

SEQ ID NO: 322024 - DNA, 15 bp, Homo sapiens
tatgaaagataacaa

SEQ ID NO: 322025 - DNA, 15 bp, Homo sapiens
ctatgaaagataaca

SEQ ID NO: 322026 - DNA, 15 bp, Homo sapiens
actatgaaagataac

SEQ ID NO: 322027 - DNA, 15 bp, Homo sapiens
aactatgaaagataa

SEQ ID NO: 322028 - DNA, 15 bp, Homo sapiens
aaactatgaaagata

SEQ ID NO: 322029 - DNA, 15 bp, Homo sapiens
gaaactatgaaagat

SEQ ID NO: 322030 - DNA, 15 bp, Homo sapiens
tgaaactatgaaaga

SEQ ID NO: 322031 - DNA, 15 bp, Homo sapiens
ctgaaactatgaaag

SEQ ID NO: 322032 - DNA, 15 bp, Homo sapiens
actgaaactatgaaa

SEQ ID NO: 322033 - DNA, 15 bp, Homo sapiens
cactgaaactatgaa

SEQ ID NO: 322034 - DNA, 15 bp, Homo sapiens
gcactgaaactatga

SEQ ID NO: 322035 - DNA, 15 bp, Homo sapiens
agcactgaaactatg

SEQ ID NO: 322036 - DNA, 15 bp, Homo sapiens
tagcactgaaactat

SEQ ID NO: 322037 - DNA, 15 bp, Homo sapiens
ttagcactgaaacta

SEQ ID NO: 322038 - DNA, 15 bp, Homo sapiens
gttagcactgaaact

SEQ ID NO: 322039 - DNA, 15 bp, Homo sapiens
agttagcactgaaac

SEQ ID NO: 322040 - DNA, 15 bp, Homo sapiens
cagttagcactgaaa

SEQ ID NO: 322041 - DNA, 15 bp, Homo sapiens
gcagttagcactgaa

SEQ ID NO: 322042 - DNA, 15 bp, Homo sapiens
ggcagttagcactga

SEQ ID NO: 322043 - DNA, 15 bp, Homo sapiens
tggcagttagcactg

SEQ ID NO: 322044 - DNA, 15 bp, Homo sapiens
ctggcagttagcact

SEQ ID NO: 322045 - DNA, 15 bp, Homo sapiens
actggcagttagcac

SEQ ID NO: 322046 - DNA, 15 bp, Homo sapiens
gactggcagttagca

SEQ ID NO: 322047 - DNA, 15 bp, Homo sapiens
cgactggcagttagc

SEQ ID NO: 322048 - DNA, 15 bp, Homo sapiens
gcgactggcagttag

SEQ ID NO: 322049 - DNA, 15 bp, Homo sapiens
ggcgactggcagtta

SEQ ID NO: 322050 - DNA, 15 bp, Homo sapiens
aggcgactggcagtt

SEQ ID NO: 322051 - DNA, 15 bp, Homo sapiens
aaggcgactggcagt

SEQ ID NO: 322052 - DNA, 15 bp, Homo sapiens
gaaggcgactggcag

SEQ ID NO: 322053 - DNA, 15 bp, Homo sapiens
agaaggcgactggca

SEQ ID NO: 322054 - DNA, 15 bp, Homo sapiens
tagaaggcgactggc

SEQ ID NO: 322055 - DNA, 15 bp, Homo sapiens
gtagaaggcgactgg

SEQ ID NO: 322056 - DNA, 15 bp, Homo sapiens
agtagaaggcgactg

SEQ ID NO: 322057 - DNA, 15 bp, Homo sapiens
gagtagaaggcgact

SEQ ID NO: 322058 - DNA, 15 bp, Homo sapiens
ggagtagaaggcgac

SEQ ID NO: 322059 - DNA, 15 bp, Homo sapiens
tggagtagaaggcga

SEQ ID NO: 322060 - DNA, 15 bp, Homo sapiens
gtggagtagaaggcg

SEQ ID NO: 322061 - DNA, 15 bp, Homo sapiens
cgtggagtagaaggc

SEQ ID NO: 322062 - DNA, 15 bp, Homo sapiens
acgtggagtagaagg

SEQ ID NO: 322063 - DNA, 15 bp, Homo sapiens
aacgtggagtagaag

SEQ ID NO: 322064 - DNA, 15 bp, Homo sapiens
aaacgtggagtagaa

SEQ ID NO: 322065 - DNA, 15 bp, Homo sapiens
gaaacgtggagtaga

SEQ ID NO: 322066 - DNA, 15 bp, Homo sapiens
agaaacgtggagtag

SEQ ID NO: 322067 - DNA, 15 bp, Homo sapiens
tagaaacgtggagta

SEQ ID NO: 322068 - DNA, 15 bp, Homo sapiens
gtagaaacgtggagt

SEQ ID NO: 322069 - DNA, 15 bp, Homo sapiens
tgtagaaacgtggag

SEQ ID NO: 322070 - DNA, 15 bp, Homo sapiens
atgtagaaacgtgga

SEQ ID NO: 322071 - DNA, 15 bp, Homo sapiens
aatgtagaaacgtgg

SEQ ID NO: 322072 - DNA, 15 bp, Homo sapiens
aaatgtagaaacgtg

SEQ ID NO: 322073 - DNA, 15 bp, Homo sapiens
caaatgtagaaacgt

SEQ ID NO: 322074 - DNA, 15 bp, Homo sapiens
acaaatgtagaaacg

SEQ ID NO: 322075 - DNA, 15 bp, Homo sapiens
gacaaatgtagaaac

SEQ ID NO: 322076 - DNA, 15 bp, Homo sapiens
cgacaaatgtagaaa

SEQ ID NO: 322077 - DNA, 15 bp, Homo sapiens
acgacaaatgtagaa

SEQ ID NO: 322078 - DNA, 15 bp, Homo sapiens
aacgacaaatgtaga

SEQ ID NO: 322079 - DNA, 15 bp, Homo sapiens
aaacgacaaatgtag

SEQ ID NO: 322080 - DNA, 15 bp, Homo sapiens
aaaacgacaaatgta

SEQ ID NO: 322081 - DNA, 15 bp, Homo sapiens
taaaacgacaaatgt

SEQ ID NO: 322082 - DNA, 15 bp, Homo sapiens
ctaaaacgacaaatg

SEQ ID NO: 322083 - DNA, 15 bp, Homo sapiens
gctaaaacgacaaat

SEQ ID NO: 322084 - DNA, 15 bp, Homo sapiens
agctaaaacgacaaa

SEQ ID NO: 322085 - DNA, 15 bp, Homo sapiens
gagctaaaacgacaa

SEQ ID NO: 322086 - DNA, 15 bp, Homo sapiens
tgagctaaaacgaca

SEQ ID NO: 322087 - DNA, 15 bp, Homo sapiens
ctgagctaaaacgac

SEQ ID NO: 322088 - DNA, 15 bp, Homo sapiens
gctgagctaaaacga

SEQ ID NO: 322089 - DNA, 15 bp, Homo sapiens
tgctgagctaaaacg

SEQ ID NO: 322090 - DNA, 15 bp, Homo sapiens
ttgctgagctaaaac

SEQ ID NO: 322091 - DNA, 15 bp, Homo sapiens
attgctgagctaaaa

SEQ ID NO: 322092 - DNA, 15 bp, Homo sapiens
tattgctgagctaaa

SEQ ID NO: 322093 - DNA, 15 bp, Homo sapiens
atattgctgagctaa

SEQ ID NO: 322094 - DNA, 15 bp, Homo sapiens
catattgctgagcta

SEQ ID NO: 322095 - DNA, 15 bp, Homo sapiens
gcatattgctgagct

SEQ ID NO: 322096 - DNA, 15 bp, Homo sapiens
cgcatattgctgagc

SEQ ID NO: 322097 - DNA, 15 bp, Homo sapiens
tcgcatattgctgag

SEQ ID NO: 322098 - DNA, 15 bp, Homo sapiens
gtcgcatattgctga

SEQ ID NO: 322099 - DNA, 15 bp, Homo sapiens
tgtcgcatattgctg

SEQ ID NO: 322100 - DNA, 15 bp, Homo sapiens
ctgtcgcatattgct

SEQ ID NO: 322101 - DNA, 15 bp, Homo sapiens
actgtcgcatattgc

SEQ ID NO: 322102 - DNA, 15 bp, Homo sapiens
cactgtcgcatattg

SEQ ID NO: 322103 - DNA, 15 bp, Homo sapiens
tcactgtcgcatatt

SEQ ID NO: 322104 - DNA, 15 bp, Homo sapiens
atcactgtcgcatat

SEQ ID NO: 322105 - DNA, 15 bp, Homo sapiens
tatcactgtcgcata

SEQ ID NO: 322106 - DNA, 15 bp, Homo sapiens
gtatcactgtcgcat

SEQ ID NO: 322107 - DNA, 15 bp, Homo sapiens
agtatcactgtcgca

SEQ ID NO: 322108 - DNA, 15 bp, Homo sapiens
cagtatcactgtcgc

SEQ ID NO: 322109 - DNA, 15 bp, Homo sapiens
ccagtatcactgtcg

SEQ ID NO: 322110 - DNA, 15 bp, Homo sapiens
accagtatcactgtc

SEQ ID NO: 322111 - DNA, 15 bp, Homo sapiens
taccagtatcactgt

SEQ ID NO: 322112 - DNA, 15 bp, Homo sapiens
ataccagtatcactg

SEQ ID NO: 322113 - DNA, 15 bp, Homo sapiens
cataccagtatcact

SEQ ID NO: 322114 - DNA, 15 bp, Homo sapiens
tcataccagtatcac

SEQ ID NO: 322115 - DNA, 15 bp, Homo sapiens
ctcataccagtatca

SEQ ID NO: 322116 - DNA, 15 bp, Homo sapiens
tctcataccagtatc

SEQ ID NO: 322117 - DNA, 15 bp, Homo sapiens
atctcataccagtat

SEQ ID NO: 322118 - DNA, 15 bp, Homo sapiens
tatctcataccagta

SEQ ID NO: 322119 - DNA, 15 bp, Homo sapiens
ttatctcataccagt

SEQ ID NO: 322120 - DNA, 15 bp, Homo sapiens
gttatctcataccag

SEQ ID NO: 322121 - DNA, 15 bp, Homo sapiens
tgttatctcatacca

SEQ ID NO: 322122 - DNA, 15 bp, Homo sapiens
ctgttatctcatacc

SEQ ID NO: 322123 - DNA, 15 bp, Homo sapiens
actgttatctcatac

SEQ ID NO: 322124 - DNA, 15 bp, Homo sapiens
gactgttatctcata

SEQ ID NO: 322125 - DNA, 15 bp, Homo sapiens
agactgttatctcat

SEQ ID NO: 322126 - DNA, 15 bp, Homo sapiens
tagactgttatctca

SEQ ID NO: 322127 - DNA, 15 bp, Homo sapiens
ctagactgttatctc

SEQ ID NO: 322128 - DNA, 15 bp, Homo sapiens
cctagactgttatct

SEQ ID NO: 322129 - DNA, 15 bp, Homo sapiens
acctagactgttatc

SEQ ID NO: 322130 - DNA, 15 bp, Homo sapiens
aacctagactgttat

SEQ ID NO: 322131 - DNA, 15 bp, Homo sapiens
caacctagactgtta

SEQ ID NO: 322132 - DNA, 15 bp, Homo sapiens
ccaacctagactgtt

SEQ ID NO: 322133 - DNA, 15 bp, Homo sapiens
cccaacctagactgt

SEQ ID NO: 322134 - DNA, 15 bp, Homo sapiens
gcccaacctagactg

SEQ ID NO: 322135 - DNA, 15 bp, Homo sapiens
agcccaacctagact

SEQ ID NO: 322136 - DNA, 15 bp, Homo sapiens
cagcccaacctagac

SEQ ID NO: 322137 - DNA, 15 bp, Homo sapiens
ccagcccaacctaga

SEQ ID NO: 322138 - DNA, 15 bp, Homo sapiens
tccagcccaacctag

SEQ ID NO: 322139 - DNA, 15 bp, Homo sapiens
ttccagcccaaccta

SEQ ID NO: 322140 - DNA, 15 bp, Homo sapiens
cttccagcccaacct

SEQ ID NO: 322141 - DNA, 15 bp, Homo sapiens
ccttccagcccaacc

SEQ ID NO: 322142 - DNA, 15 bp, Homo sapiens
accttccagcccaac

SEQ ID NO: 322143 - DNA, 15 bp, Homo sapiens
aaccttccagcccaa

SEQ ID NO: 322144 - DNA, 15 bp, Homo sapiens
taaccttccagccca

SEQ ID NO: 322145 - DNA, 15 bp, Homo sapiens
ctaaccttccagccc

SEQ ID NO: 322146 - DNA, 15 bp, Homo sapiens
cctaaccttccagcc

SEQ ID NO: 322147 - DNA, 15 bp, Homo sapiens
tcctaaccttccagc

SEQ ID NO: 322148 - DNA, 15 bp, Homo sapiens
gtcctaaccttccag

SEQ ID NO: 322149 - DNA, 15 bp, Homo sapiens
ggtcctaaccttcca

SEQ ID NO: 322150 - DNA, 15 bp, Homo sapiens
tggtcctaaccttcc

SEQ ID NO: 322151 - DNA, 15 bp, Homo sapiens
ctggtcctaaccttc

SEQ ID NO: 322152 - DNA, 15 bp, Homo sapiens
gctggtcctaacctt

SEQ ID NO: 322153 - DNA, 15 bp, Homo sapiens
tgctggtcctaacct

SEQ ID NO: 322154 - DNA, 15 bp, Homo sapiens
ctgctggtcctaacc

SEQ ID NO: 322155 - DNA, 15 bp, Homo sapiens
actgctggtcctaac

SEQ ID NO: 322156 - DNA, 15 bp, Homo sapiens
tactgctggtcctaa

SEQ ID NO: 322157 - DNA, 15 bp, Homo sapiens
ctactgctggtccta

SEQ ID NO: 322158 - DNA, 15 bp, Homo sapiens
tctactgctggtcct

SEQ ID NO: 322159 - DNA, 15 bp, Homo sapiens
ctctactgctggtcc

SEQ ID NO: 322160 - DNA, 15 bp, Homo sapiens
actctactgctggtc

SEQ ID NO: 322161 - DNA, 15 bp, Homo sapiens
gactctactgctggt

SEQ ID NO: 322162 - DNA, 15 bp, Homo sapiens
agactctactgctgg

SEQ ID NO: 322163 - DNA, 15 bp, Homo sapiens
cagactctactgctg

SEQ ID NO: 322164 - DNA, 15 bp, Homo sapiens
acagactctactgct

SEQ ID NO: 322165 - DNA, 15 bp, Homo sapiens
aacagactctactgc

SEQ ID NO: 322166 - DNA, 15 bp, Homo sapiens
taacagactctactg

SEQ ID NO: 322167 - DNA, 15 bp, Homo sapiens
ataacagactctact

SEQ ID NO: 322168 - DNA, 15 bp, Homo sapiens
tataacagactctac

SEQ ID NO: 322169 - DNA, 15 bp, Homo sapiens
ttataacagactcta

SEQ ID NO: 322170 - DNA, 15 bp, Homo sapiens
tttataacagactct

SEQ ID NO: 322171 - DNA, 15 bp, Homo sapiens
atttataacagactc

SEQ ID NO: 322172 - DNA, 15 bp, Homo sapiens
aatttataacagact

SEQ ID NO: 322173 - DNA, 15 bp, Homo sapiens
aaatttataacagac

SEQ ID NO: 322174 - DNA, 15 bp, Homo sapiens
taaatttataacaga

SEQ ID NO: 322175 - DNA, 15 bp, Homo sapiens
ttaaatttataacag

SEQ ID NO: 322176 - DNA, 15 bp, Homo sapiens
attaaatttataaca

SEQ ID NO: 322177 - DNA, 15 bp, Homo sapiens
aattaaatttataac

SEQ ID NO: 322178 - DNA, 15 bp, Homo sapiens
aaattaaatttataa

SEQ ID NO: 322179 - DNA, 15 bp, Homo sapiens
gaaattaaatttata

SEQ ID NO: 322180 - DNA, 15 bp, Homo sapiens
ggaaattaaatttat

SEQ ID NO: 322181 - DNA, 15 bp, Homo sapiens
tggaaattaaattta

SEQ ID NO: 322182 - DNA, 15 bp, Homo sapiens
ctggaaattaaattt

SEQ ID NO: 322183 - DNA, 15 bp, Homo sapiens
gctggaaattaaatt

SEQ ID NO: 322184 - DNA, 15 bp, Homo sapiens
ggctggaaattaaat

SEQ ID NO: 322185 - DNA, 15 bp, Homo sapiens
gggctggaaattaaa

SEQ ID NO: 322186 - DNA, 15 bp, Homo sapiens
agggctggaaattaa

SEQ ID NO: 322187 - DNA, 15 bp, Homo sapiens
aagggctggaaatta

SEQ ID NO: 322188 - DNA, 15 bp, Homo sapiens
caagggctggaaatt

SEQ ID NO: 322189 - DNA, 15 bp, Homo sapiens
gcaagggctggaaat

SEQ ID NO: 322190 - DNA, 15 bp, Homo sapiens
ggcaagggctggaaa

SEQ ID NO: 322191 - DNA, 15 bp, Homo sapiens
gggcaagggctggaa

SEQ ID NO: 322192 - DNA, 15 bp, Homo sapiens
ggggcaagggctgga

SEQ ID NO: 322193 - DNA, 15 bp, Homo sapiens
gggggcaagggctgg

SEQ ID NO: 322194 - DNA, 15 bp, Homo sapiens
agggggcaagggctg

SEQ ID NO: 322195 - DNA, 15 bp, Homo sapiens
gagggggcaagggct

SEQ ID NO: 322196 - DNA, 15 bp, Homo sapiens
ggagggggcaagggc

SEQ ID NO: 322197 - DNA, 15 bp, Homo sapiens
gggagggggcaaggg

SEQ ID NO: 322198 - DNA, 15 bp, Homo sapiens
tgggagggggcaagg

SEQ ID NO: 322199 - DNA, 15 bp, Homo sapiens
atgggagggggcaag

SEQ ID NO: 322200 - DNA, 15 bp, Homo sapiens
aatgggagggggcaa

SEQ ID NO: 322201 - DNA, 15 bp, Homo sapiens
gaatgggagggggca

SEQ ID NO: 322202 - DNA, 15 bp, Homo sapiens
agaatgggagggggc

SEQ ID NO: 322203 - DNA, 15 bp, Homo sapiens
cagaatgggaggggg

SEQ ID NO: 322204 - DNA, 15 bp, Homo sapiens
tcagaatgggagggg

SEQ ID NO: 322205 - DNA, 15 bp, Homo sapiens
atcagaatgggaggg

SEQ ID NO: 322206 - DNA, 15 bp, Homo sapiens
aatcagaatgggagg

SEQ ID NO: 322207 - DNA, 15 bp, Homo sapiens
aaatcagaatgggag

SEQ ID NO: 322208 - DNA, 15 bp, Homo sapiens
taaatcagaatggga

SEQ ID NO: 322209 - DNA, 15 bp, Homo sapiens
ctaaatcagaatggg

SEQ ID NO: 322210 - DNA, 15 bp, Homo sapiens
gctaaatcagaatgg

SEQ ID NO: 322211 - DNA, 15 bp, Homo sapiens
tgctaaatcagaatg

SEQ ID NO: 322212 - DNA, 15 bp, Homo sapiens
ttgctaaatcagaat

SEQ ID NO: 322213 - DNA, 15 bp, Homo sapiens
cttgctaaatcagaa

SEQ ID NO: 322214 - DNA, 15 bp, Homo sapiens
acttgctaaatcaga

SEQ ID NO: 322215 - DNA, 15 bp, Homo sapiens
gacttgctaaatcag

SEQ ID NO: 322216 - DNA, 15 bp, Homo sapiens
agacttgctaaatca

SEQ ID NO: 322217 - DNA, 15 bp, Homo sapiens
aagacttgctaaatc

SEQ ID NO: 322218 - DNA, 15 bp, Homo sapiens
caagacttgctaaat

SEQ ID NO: 322219 - DNA, 15 bp, Homo sapiens
acaagacttgctaaa

SEQ ID NO: 322220 - DNA, 15 bp, Homo sapiens
cacaagacttgctaa

SEQ ID NO: 322221 - DNA, 15 bp, Homo sapiens
tcacaagacttgcta

SEQ ID NO: 322222 - DNA, 15 bp, Homo sapiens
ttcacaagacttgct

SEQ ID NO: 322223 - DNA, 15 bp, Homo sapiens
gttcacaagacttgc

SEQ ID NO: 322224 - DNA, 15 bp, Homo sapiens
ggttcacaagacttg

SEQ ID NO: 322225 - DNA, 15 bp, Homo sapiens
aggttcacaagactt

SEQ ID NO: 322226 - DNA, 15 bp, Homo sapiens
gaggttcacaagact

SEQ ID NO: 322227 - DNA, 15 bp, Homo sapiens
agaggttcacaagac

SEQ ID NO: 322228 - DNA, 15 bp, Homo sapiens
aagaggttcacaaga

SEQ ID NO: 322229 - DNA, 15 bp, Homo sapiens
aaagaggttcacaag

SEQ ID NO: 322230 - DNA, 15 bp, Homo sapiens
caaagaggttcacaa

SEQ ID NO: 322231 - DNA, 15 bp, Homo sapiens
ccaaagaggttcaca

SEQ ID NO: 322232 - DNA, 15 bp, Homo sapiens
tccaaagaggttcac

SEQ ID NO: 322233 - DNA, 15 bp, Homo sapiens
ttccaaagaggttca

SEQ ID NO: 322234 - DNA, 15 bp, Homo sapiens
tttccaaagaggttc

SEQ ID NO: 322235 - DNA, 15 bp, Homo sapiens
gtttccaaagaggtt

SEQ ID NO: 322236 - DNA, 15 bp, Homo sapiens
agtttccaaagaggt

SEQ ID NO: 322237 - DNA, 15 bp, Homo sapiens
aagtttccaaagagg

SEQ ID NO: 322238 - DNA, 15 bp, Homo sapiens
aaagtttccaaagag

SEQ ID NO: 322239 - DNA, 15 bp, Homo sapiens
taaagtttccaaaga

SEQ ID NO: 322240 - DNA, 15 bp, Homo sapiens
ataaagtttccaaag

SEQ ID NO: 322241 - DNA, 15 bp, Homo sapiens
cataaagtttccaaa

SEQ ID NO: 322242 - DNA, 15 bp, Homo sapiens
gcataaagtttccaa

SEQ ID NO: 322243 - DNA, 15 bp, Homo sapiens
tgcataaagtttcca

SEQ ID NO: 322244 - DNA, 15 bp, Homo sapiens
gtgcataaagtttcc

SEQ ID NO: 322245 - DNA, 15 bp, Homo sapiens
tgtgcataaagtttc

SEQ ID NO: 322246 - DNA, 15 bp, Homo sapiens
gtgtgcataaagttt

SEQ ID NO: 322247 - DNA, 15 bp, Homo sapiens
tgtgtgcataaagtt

SEQ ID NO: 322248 - DNA, 15 bp, Homo sapiens
gtgtgtgcataaagt

SEQ ID NO: 322249 - DNA, 15 bp, Homo sapiens
agtgtgtgcataaag

SEQ ID NO: 322250 - DNA, 15 bp, Homo sapiens
cagtgtgtgcataaa

SEQ ID NO: 322251 - DNA, 15 bp, Homo sapiens
tcagtgtgtgcataa

SEQ ID NO: 322252 - DNA, 15 bp, Homo sapiens
ctcagtgtgtgcata

SEQ ID NO: 322253 - DNA, 15 bp, Homo sapiens
gctcagtgtgtgcat

SEQ ID NO: 322254 - DNA, 15 bp, Homo sapiens
tgctcagtgtgtgca

SEQ ID NO: 322255 - DNA, 15 bp, Homo sapiens
ttgctcagtgtgtgc

SEQ ID NO: 322256 - DNA, 15 bp, Homo sapiens
tttgctcagtgtgtg

SEQ ID NO: 322257 - DNA, 15 bp, Homo sapiens
gtttgctcagtgtgt

SEQ ID NO: 322258 - DNA, 15 bp, Homo sapiens
tgtttgctcagtgtg

SEQ ID NO: 322259 - DNA, 15 bp, Homo sapiens
ttgtttgctcagtgt

SEQ ID NO: 322260 - DNA, 15 bp, Homo sapiens
attgtttgctcagtg

SEQ ID NO: 322261 - DNA, 15 bp, Homo sapiens
cattgtttgctcagt

SEQ ID NO: 322262 - DNA, 15 bp, Homo sapiens
acattgtttgctcag

SEQ ID NO: 322263 - DNA, 15 bp, Homo sapiens
tacattgtttgctca

SEQ ID NO: 322264 - DNA, 15 bp, Homo sapiens
atacattgtttgctc

SEQ ID NO: 322265 - DNA, 15 bp, Homo sapiens
aatacattgtttgct

SEQ ID NO: 322266 - DNA, 15 bp, Homo sapiens
aaatacattgtttgc

SEQ ID NO: 322267 - DNA, 15 bp, Homo sapiens
aaaatacattgtttg

SEQ ID NO: 322268 - DNA, 15 bp, Homo sapiens
aaaaatacattgttt

SEQ ID NO: 322269 - DNA, 15 bp, Homo sapiens
aaaaaatacattgtt

SEQ ID NO: 322270 - DNA, 15 bp, Homo sapiens
caaaaaatacattgt

SEQ ID NO: 322271 - DNA, 15 bp, Homo sapiens
tcaaaaaatacattg

SEQ ID NO: 322272 - DNA, 15 bp, Homo sapiens
ctcaaaaaatacatt

SEQ ID NO: 322273 - DNA, 15 bp, Homo sapiens
tctcaaaaaatacat

SEQ ID NO: 322274 - DNA, 15 bp, Homo sapiens
gtctcaaaaaataca

SEQ ID NO: 322275 - DNA, 15 bp, Homo sapiens
ggtctcaaaaaatac

SEQ ID NO: 322276 - DNA, 15 bp, Homo sapiens
aggtctcaaaaaata

SEQ ID NO: 322277 - DNA, 15 bp, Homo sapiens
aaggtctcaaaaaat

SEQ ID NO: 322278 - DNA, 15 bp, Homo sapiens
taaggtctcaaaaaa

SEQ ID NO: 322279 - DNA, 15 bp, Homo sapiens
ctaaggtctcaaaaa

SEQ ID NO: 322280 - DNA, 15 bp, Homo sapiens
tctaaggtctcaaaa

SEQ ID NO: 322281 - DNA, 15 bp, Homo sapiens
ttctaaggtctcaaa

SEQ ID NO: 322282 - DNA, 15 bp, Homo sapiens
attctaaggtctcaa

SEQ ID NO: 322283 - DNA, 15 bp, Homo sapiens
aattctaaggtctca

SEQ ID NO: 322284 - DNA, 15 bp, Homo sapiens
aaattctaaggtctc

SEQ ID NO: 322285 - DNA, 15 bp, Homo sapiens
caaattctaaggtct

SEQ ID NO: 322286 - DNA, 15 bp, Homo sapiens
tcaaattctaaggtc

SEQ ID NO: 322287 - DNA, 15 bp, Homo sapiens
ttcaaattctaaggt

SEQ ID NO: 322288 - DNA, 15 bp, Homo sapiens
tttcaaattctaagg

SEQ ID NO: 322289 - DNA, 15 bp, Homo sapiens
atttcaaattctaag

SEQ ID NO: 322290 - DNA, 15 bp, Homo sapiens
aatttcaaattctaa

SEQ ID NO: 322291 - DNA, 15 bp, Homo sapiens
aaatttcaaattcta

SEQ ID NO: 322292 - DNA, 15 bp, Homo sapiens
aaaatttcaaattct

SEQ ID NO: 322293 - DNA, 15 bp, Homo sapiens
aaaaatttcaaattc

SEQ ID NO: 322294 - DNA, 15 bp, Homo sapiens
aaaaaatttcaaatt

SEQ ID NO: 322295 - DNA, 15 bp, Homo sapiens
aaaaaaatttcaaat

SEQ ID NO: 322296 - DNA, 15 bp, Homo sapiens
aaaaaaaatttcaaa

SEQ ID NO: 322297 - DNA, 15 bp, Homo sapiens
caaaaaaaatttcaa

SEQ ID NO: 322298 - DNA, 15 bp, Homo sapiens
acaaaaaaaatttca

SEQ ID NO: 322299 - DNA, 15 bp, Homo sapiens
aacaaaaaaaatttc

SEQ ID NO: 322300 - DNA, 15 bp, Homo sapiens
taacaaaaaaaattt

SEQ ID NO: 322301 - DNA, 15 bp, Homo sapiens
gtaacaaaaaaaatt

SEQ ID NO: 322302 - DNA, 15 bp, Homo sapiens
agtaacaaaaaaaat

SEQ ID NO: 322303 - DNA, 15 bp, Homo sapiens
aagtaacaaaaaaaa

SEQ ID NO: 322304 - DNA, 15 bp, Homo sapiens
aaagtaacaaaaaaa

SEQ ID NO: 322305 - DNA, 15 bp, Homo sapiens
aaaagtaacaaaaaa

SEQ ID NO: 322306 - DNA, 15 bp, Homo sapiens
taaaagtaacaaaaa

SEQ ID NO: 322307 - DNA, 15 bp, Homo sapiens
ataaaagtaacaaaa

SEQ ID NO: 322308 - DNA, 15 bp, Homo sapiens
aataaaagtaacaaa

SEQ ID NO: 322309 - DNA, 15 bp, Homo sapiens
gaataaaagtaacaa

SEQ ID NO: 322310 - DNA, 15 bp, Homo sapiens
agaataaaagtaaca

SEQ ID NO: 322311 - DNA, 15 bp, Homo sapiens
aagaataaaagtaac

SEQ ID NO: 322312 - DNA, 15 bp, Homo sapiens
caagaataaaagtaa

SEQ ID NO: 322313 - DNA, 15 bp, Homo sapiens
tcaagaataaaagta

SEQ ID NO: 322314 - DNA, 15 bp, Homo sapiens
ttcaagaataaaagt

SEQ ID NO: 322315 - DNA, 15 bp, Homo sapiens
gttcaagaataaaag

SEQ ID NO: 322316 - DNA, 15 bp, Homo sapiens
tgttcaagaataaaa

SEQ ID NO: 322317 - DNA, 15 bp, Homo sapiens
ttgttcaagaataaa

SEQ ID NO: 322318 - DNA, 15 bp, Homo sapiens
gttgttcaagaataa

SEQ ID NO: 322319 - DNA, 15 bp, Homo sapiens
ggttgttcaagaata

SEQ ID NO: 322320 - DNA, 15 bp, Homo sapiens
tggttgttcaagaat

SEQ ID NO: 322321 - DNA, 15 bp, Homo sapiens
gtggttgttcaagaa

SEQ ID NO: 322322 - DNA, 15 bp, Homo sapiens
agtggttgttcaaga

SEQ ID NO: 322323 - DNA, 15 bp, Homo sapiens
aagtggttgttcaag

SEQ ID NO: 322324 - DNA, 15 bp, Homo sapiens
caagtggttgttcaa

SEQ ID NO: 322325 - DNA, 15 bp, Homo sapiens
tcaagtggttgttca

SEQ ID NO: 322326 - DNA, 15 bp, Homo sapiens
gtcaagtggttgttc

SEQ ID NO: 322327 - DNA, 15 bp, Homo sapiens
agtcaagtggttgtt

SEQ ID NO: 322328 - DNA, 15 bp, Homo sapiens
cagtcaagtggttgt

SEQ ID NO: 322329 - DNA, 15 bp, Homo sapiens
ccagtcaagtggttg

SEQ ID NO: 322330 - DNA, 15 bp, Homo sapiens
cccagtcaagtggtt

SEQ ID NO: 322331 - DNA, 15 bp, Homo sapiens
acccagtcaagtggt

SEQ ID NO: 322332 - DNA, 15 bp, Homo sapiens
tacccagtcaagtgg

SEQ ID NO: 322333 - DNA, 15 bp, Homo sapiens
atacccagtcaagtg

SEQ ID NO: 322334 - DNA, 15 bp, Homo sapiens
tatacccagtcaagt

SEQ ID NO: 322335 - DNA, 15 bp, Homo sapiens
ttatacccagtcaag

SEQ ID NO: 322336 - DNA, 15 bp, Homo sapiens
tttatacccagtcaa

SEQ ID NO: 322337 - DNA, 15 bp, Homo sapiens
ttttatacccagtca

SEQ ID NO: 322338 - DNA, 15 bp, Homo sapiens
tttttatacccagtc

SEQ ID NO: 322339 - DNA, 15 bp, Homo sapiens
atttttatacccagt

SEQ ID NO: 322340 - DNA, 15 bp, Homo sapiens
gatttttatacccag

SEQ ID NO: 322341 - DNA, 15 bp, Homo sapiens
agatttttataccca

SEQ ID NO: 322342 - DNA, 15 bp, Homo sapiens
aagatttttataccc

SEQ ID NO: 322343 - DNA, 15 bp, Homo sapiens
caagatttttatacc

SEQ ID NO: 322344 - DNA, 15 bp, Homo sapiens
ccaagatttttatac

SEQ ID NO: 322345 - DNA, 15 bp, Homo sapiens
cccaagatttttata

SEQ ID NO: 322346 - DNA, 15 bp, Homo sapiens
acccaagatttttat

SEQ ID NO: 322347 - DNA, 15 bp, Homo sapiens
gacccaagattttta

SEQ ID NO: 322348 - DNA, 15 bp, Homo sapiens
tgacccaagattttt

SEQ ID NO: 322349 - DNA, 15 bp, Homo sapiens
ttgacccaagatttt

SEQ ID NO: 322350 - DNA, 15 bp, Homo sapiens
tttgacccaagattt

SEQ ID NO: 322351 - DNA, 15 bp, Homo sapiens
atttgacccaagatt

SEQ ID NO: 322352 - DNA, 15 bp, Homo sapiens
aatttgacccaagat

SEQ ID NO: 322353 - DNA, 15 bp, Homo sapiens
gaatttgacccaaga

SEQ ID NO: 322354 - DNA, 15 bp, Homo sapiens
agaatttgacccaag

SEQ ID NO: 322355 - DNA, 15 bp, Homo sapiens
cagaatttgacccaa

SEQ ID NO: 322356 - DNA, 15 bp, Homo sapiens
acagaatttgaccca

SEQ ID NO: 322357 - DNA, 15 bp, Homo sapiens
aacagaatttgaccc

SEQ ID NO: 322358 - DNA, 15 bp, Homo sapiens
aaacagaatttgacc

SEQ ID NO: 322359 - DNA, 15 bp, Homo sapiens
caaacagaatttgac

SEQ ID NO: 322360 - DNA, 15 bp, Homo sapiens
acaaacagaatttga

SEQ ID NO: 322361 - DNA, 15 bp, Homo sapiens
gacaaacagaatttg

SEQ ID NO: 322362 - DNA, 15 bp, Homo sapiens
agacaaacagaattt

SEQ ID NO: 322363 - DNA, 15 bp, Homo sapiens
tagacaaacagaatt

SEQ ID NO: 322364 - DNA, 15 bp, Homo sapiens
ttagacaaacagaat

SEQ ID NO: 322365 - DNA, 15 bp, Homo sapiens
tttagacaaacagaa

SEQ ID NO: 322366 - DNA, 15 bp, Homo sapiens
ttttagacaaacaga

SEQ ID NO: 322367 - DNA, 15 bp, Homo sapiens
tttttagacaaacag

SEQ ID NO: 322368 - DNA, 15 bp, Homo sapiens
atttttagacaaaca

SEQ ID NO: 322369 - DNA, 15 bp, Homo sapiens
aatttttagacaaac

SEQ ID NO: 322370 - DNA, 15 bp, Homo sapiens
gaatttttagacaaa

SEQ ID NO: 322371 - DNA, 15 bp, Homo sapiens
agaatttttagacaa

SEQ ID NO: 322372 - DNA, 15 bp, Homo sapiens
cagaatttttagaca

SEQ ID NO: 322373 - DNA, 15 bp, Homo sapiens
tcagaatttttagac

SEQ ID NO: 322374 - DNA, 15 bp, Homo sapiens
ttcagaatttttaga

SEQ ID NO: 322375 - DNA, 15 bp, Homo sapiens
tttcagaatttttag

SEQ ID NO: 322376 - DNA, 15 bp, Homo sapiens
ttttcagaattttta

SEQ ID NO: 322377 - DNA, 15 bp, Homo sapiens
attttcagaattttt

SEQ ID NO: 322378 - DNA, 15 bp, Homo sapiens
aattttcagaatttt

SEQ ID NO: 322379 - DNA, 15 bp, Homo sapiens
caattttcagaattt

SEQ ID NO: 322380 - DNA, 15 bp, Homo sapiens
gcaattttcagaatt

SEQ ID NO: 322381 - DNA, 15 bp, Homo sapiens
ggcaattttcagaat

SEQ ID NO: 322382 - DNA, 15 bp, Homo sapiens
gggcaattttcagaa

SEQ ID NO: 322383 - DNA, 15 bp, Homo sapiens
tgggcaattttcaga

SEQ ID NO: 322384 - DNA, 15 bp, Homo sapiens
ttgggcaattttcag

SEQ ID NO: 322385 - DNA, 15 bp, Homo sapiens
attgggcaattttca

SEQ ID NO: 322386 - DNA, 15 bp, Homo sapiens
aattgggcaattttc

SEQ ID NO: 322387 - DNA, 15 bp, Homo sapiens
caattgggcaatttt

SEQ ID NO: 322388 - DNA, 15 bp, Homo sapiens
gcaattgggcaattt

SEQ ID NO: 322389 - DNA, 15 bp, Homo sapiens
agcaattgggcaatt

SEQ ID NO: 322390 - DNA, 15 bp, Homo sapiens
cagcaattgggcaat

SEQ ID NO: 322391 - DNA, 15 bp, Homo sapiens
acagcaattgggcaa

SEQ ID NO: 322392 - DNA, 15 bp, Homo sapiens
aacagcaattgggca

SEQ ID NO: 322393 - DNA, 15 bp, Homo sapiens
aaacagcaattgggc

SEQ ID NO: 322394 - DNA, 15 bp, Homo sapiens
taaacagcaattggg

SEQ ID NO: 322395 - DNA, 15 bp, Homo sapiens
ttaaacagcaattgg

SEQ ID NO: 322396 - DNA, 15 bp, Homo sapiens
gttaaacagcaattg

SEQ ID NO: 322397 - DNA, 15 bp, Homo sapiens
tgttaaacagcaatt

SEQ ID NO: 322398 - DNA, 15 bp, Homo sapiens
gtgttaaacagcaat

SEQ ID NO: 322399 - DNA, 15 bp, Homo sapiens
agtgttaaacagcaa

SEQ ID NO: 322400 - DNA, 15 bp, Homo sapiens
aagtgttaaacagca

SEQ ID NO: 322401 - DNA, 15 bp, Homo sapiens
aaagtgttaaacagc

SEQ ID NO: 322402 - DNA, 15 bp, Homo sapiens
aaaagtgttaaacag

SEQ ID NO: 322403 - DNA, 15 bp, Homo sapiens
aaaaagtgttaaaca

SEQ ID NO: 322404 - DNA, 15 bp, Homo sapiens
aaaaaagtgttaaac

SEQ ID NO: 322405 - DNA, 15 bp, Homo sapiens
aaaaaaagtgttaaa

SEQ ID NO: 322406 - DNA, 15 bp, Homo sapiens
aaaaaaaagtgttaa

SEQ ID NO: 322407 - DNA, 15 bp, Homo sapiens
aaaaaaaaagtgtta

SEQ ID NO: 322408 - DNA, 15 bp, Homo sapiens
aaaaaaaaaagtgtt

SEQ ID NO: 322409 - DNA, 15 bp, Homo sapiens
aaaaaaaaaaagtgt

SEQ ID NO: 322410 - DNA, 15 bp, Homo sapiens
cgagatcgcgccact

SEQ ID NO: 322411 - DNA, 15 bp, Homo sapiens
ccgagatcgcgccac

SEQ ID NO: 322412 - DNA, 15 bp, Homo sapiens
gccgagatcgcgcca

SEQ ID NO: 322413 - DNA, 15 bp, Homo sapiens
agccgagatcgcgcc

SEQ ID NO: 322414 - DNA, 15 bp, Homo sapiens
aagccgagatcgcgc

SEQ ID NO: 322415 - DNA, 15 bp, Homo sapiens
taagccgagatcgcg

SEQ ID NO: 322416 - DNA, 15 bp, Homo sapiens
gtaagccgagatcgc

SEQ ID NO: 322417 - DNA, 15 bp, Homo sapiens
agtaagccgagatcg

SEQ ID NO: 322418 - DNA, 15 bp, Homo sapiens
cttgcagtaagccga

SEQ ID NO: 322419 - DNA, 15 bp, Homo sapiens
gcttgcagtaagccg

SEQ ID NO: 322420 - DNA, 15 bp, Homo sapiens
cggagcttgcagtaa

SEQ ID NO: 322421 - DNA, 15 bp, Homo sapiens
gcggagcttgcagta

SEQ ID NO: 322422 - DNA, 15 bp, Homo sapiens
tacccgggaggcgga

SEQ ID NO: 322423 - DNA, 15 bp, Homo sapiens
gtacccgggaggcgg

SEQ ID NO: 322424 - DNA, 15 bp, Homo sapiens
tgtacccgggaggcg

SEQ ID NO: 322425 - DNA, 15 bp, Homo sapiens
gtgtacccgggaggc

SEQ ID NO: 322426 - DNA, 15 bp, Homo sapiens
cgtgtacccgggagg

SEQ ID NO: 322427 - DNA, 15 bp, Homo sapiens
gcgtgtacccgggag

SEQ ID NO: 322428 - DNA, 15 bp, Homo sapiens
ggcgtgtacccggga

SEQ ID NO: 322429 - DNA, 15 bp, Homo sapiens
tggcgtgtacccggg

SEQ ID NO: 322430 - DNA, 15 bp, Homo sapiens
atggcgtgtacccgg

SEQ ID NO: 322431 - DNA, 15 bp, Homo sapiens
aatggcgtgtacccg

SEQ ID NO: 322432 - DNA, 15 bp, Homo sapiens
gaatggcgtgtaccc

SEQ ID NO: 322433 - DNA, 15 bp, Homo sapiens
agaatggcgtgtacc

SEQ ID NO: 322434 - DNA, 15 bp, Homo sapiens
gagaatggcgtgtac

SEQ ID NO: 322435 - DNA, 15 bp, Homo sapiens
ggagaatggcgtgta

SEQ ID NO: 322436 - DNA, 15 bp, Homo sapiens
aggagaatggcgtgt

SEQ ID NO: 322437 - DNA, 15 bp, Homo sapiens
gcgggaggctgaggc

SEQ ID NO: 322438 - DNA, 15 bp, Homo sapiens
cgcgggaggctgagg

SEQ ID NO: 322439 - DNA, 15 bp, Homo sapiens
acgcgggaggctgag

SEQ ID NO: 322440 - DNA, 15 bp, Homo sapiens
tacgcgggaggctga

SEQ ID NO: 322441 - DNA, 15 bp, Homo sapiens
ctacgcgggaggctg

SEQ ID NO: 322442 - DNA, 15 bp, Homo sapiens
gctacgcgggaggct

SEQ ID NO: 322443 - DNA, 15 bp, Homo sapiens
agctacgcgggaggc

SEQ ID NO: 322444 - DNA, 15 bp, Homo sapiens
cagctacgcgggagg

SEQ ID NO: 322445 - DNA, 15 bp, Homo sapiens
ccagctacgcgggag

SEQ ID NO: 322446 - DNA, 15 bp, Homo sapiens
cccagctacgcggga

SEQ ID NO: 322447 - DNA, 15 bp, Homo sapiens
tcccagctacgcggg

SEQ ID NO: 322448 - DNA, 15 bp, Homo sapiens
gtcccagctacgcgg

SEQ ID NO: 322449 - DNA, 15 bp, Homo sapiens
agtcccagctacgcg

SEQ ID NO: 322450 - DNA, 15 bp, Homo sapiens
tagtcccagctacgc

SEQ ID NO: 322451 - DNA, 15 bp, Homo sapiens
gtagtcccagctacg

SEQ ID NO: 322452 - DNA, 15 bp, Homo sapiens
caaaaaaattagccg

SEQ ID NO: 322453 - DNA, 15 bp, Homo sapiens
cacaaaaaaattagc

SEQ ID NO: 322454 - DNA, 15 bp, Homo sapiens
acacaaaaaaattag

SEQ ID NO: 322455 - DNA, 15 bp, Homo sapiens
aacacaaaaaaatta

SEQ ID NO: 322456 - DNA, 15 bp, Homo sapiens
aaacacaaaaaaatt

SEQ ID NO: 322457 - DNA, 15 bp, Homo sapiens
aaaacacaaaaaaat

SEQ ID NO: 322458 - DNA, 15 bp, Homo sapiens
aaaaacacaaaaaaa

SEQ ID NO: 322459 - DNA, 15 bp, Homo sapiens
aaaaaacacaaaaaa

SEQ ID NO: 322460 - DNA, 15 bp, Homo sapiens
taaaaaacacaaaaa

SEQ ID NO: 322461 - DNA, 15 bp, Homo sapiens
ctaaaaaacacaaaa

SEQ ID NO: 322462 - DNA, 15 bp, Homo sapiens
actaaaaaacacaaa

SEQ ID NO: 322463 - DNA, 15 bp, Homo sapiens
tactaaaaaacacaa

SEQ ID NO: 322464 - DNA, 15 bp, Homo sapiens
ctactaaaaaacaca

SEQ ID NO: 322465 - DNA, 15 bp, Homo sapiens
tctactaaaaaacac

SEQ ID NO: 322466 - DNA, 15 bp, Homo sapiens
ctctactaaaaaaca

SEQ ID NO: 322467 - DNA, 15 bp, Homo sapiens
cagtgaaaccccgtc

SEQ ID NO: 322468 - DNA, 15 bp, Homo sapiens
acagtgaaaccccgt

SEQ ID NO: 322469 - DNA, 15 bp, Homo sapiens
cacagtgaaaccccg

SEQ ID NO: 322470 - DNA, 15 bp, Homo sapiens
acacagtgaaacccc

SEQ ID NO: 322471 - DNA, 15 bp, Homo sapiens
aggatcacgaggtca

SEQ ID NO: 322472 - DNA, 15 bp, Homo sapiens
gaggatcacgaggtc

SEQ ID NO: 322473 - DNA, 15 bp, Homo sapiens
ggaggatcacgaggt

SEQ ID NO: 322474 - DNA, 15 bp, Homo sapiens
gggaggatcacgagg

SEQ ID NO: 322475 - DNA, 15 bp, Homo sapiens
cgggaggatcacgag

SEQ ID NO: 322476 - DNA, 15 bp, Homo sapiens
gcgggaggatcacga

SEQ ID NO: 322477 - DNA, 15 bp, Homo sapiens
ggcgggaggatcacg

SEQ ID NO: 322478 - DNA, 15 bp, Homo sapiens
aggcgggaggatcac

SEQ ID NO: 322479 - DNA, 15 bp, Homo sapiens
gaggcgggaggatca

SEQ ID NO: 322480 - DNA, 15 bp, Homo sapiens
cgaggcgggaggatc

SEQ ID NO: 322481 - DNA, 15 bp, Homo sapiens
ccgaggcgggaggat

SEQ ID NO: 322482 - DNA, 15 bp, Homo sapiens
gccgaggcgggagga

SEQ ID NO: 322483 - DNA, 15 bp, Homo sapiens
ggccgaggcgggagg

SEQ ID NO: 322484 - DNA, 15 bp, Homo sapiens
aggccgaggcgggag

SEQ ID NO: 322485 - DNA, 15 bp, Homo sapiens
gaggccgaggcggga

SEQ ID NO: 322486 - DNA, 15 bp, Homo sapiens
tggccgggcacggtg

SEQ ID NO: 322487 - DNA, 15 bp, Homo sapiens
ttggccgggcacggt

SEQ ID NO: 322488 - DNA, 15 bp, Homo sapiens
gttggccgggcacgg

SEQ ID NO: 322489 - DNA, 15 bp, Homo sapiens
tgttggccgggcacg

SEQ ID NO: 322490 - DNA, 15 bp, Homo sapiens
gtgttggccgggcac

SEQ ID NO: 322491 - DNA, 15 bp, Homo sapiens
agtgttggccgggca

SEQ ID NO: 322492 - DNA, 15 bp, Homo sapiens
aagtgttggccgggc

SEQ ID NO: 322493 - DNA, 15 bp, Homo sapiens
aaagtgttggccggg

SEQ ID NO: 322494 - DNA, 15 bp, Homo sapiens
aaaagtgttggccgg

SEQ ID NO: 322495 - DNA, 15 bp, Homo sapiens
aaaaagtgttggccg

SEQ ID NO: 322496 - DNA, 15 bp, Homo sapiens
caaaaagtgttggcc

SEQ ID NO: 322497 - DNA, 15 bp, Homo sapiens
acaaaaagtgttggc

SEQ ID NO: 322498 - DNA, 15 bp, Homo sapiens
aacaaaaagtgttgg

SEQ ID NO: 322499 - DNA, 15 bp, Homo sapiens
taacaaaaagtgttg

SEQ ID NO: 322500 - DNA, 15 bp, Homo sapiens
ttaacaaaaagtgtt

SEQ ID NO: 322501 - DNA, 15 bp, Homo sapiens
tttaacaaaaagtgt

SEQ ID NO: 322502 - DNA, 15 bp, Homo sapiens
atttaacaaaaagtg

SEQ ID NO: 322503 - DNA, 15 bp, Homo sapiens
tatttaacaaaaagt

SEQ ID NO: 322504 - DNA, 15 bp, Homo sapiens
atatttaacaaaaag

SEQ ID NO: 322505 - DNA, 15 bp, Homo sapiens
tatatttaacaaaaa

SEQ ID NO: 322506 - DNA, 15 bp, Homo sapiens
ttatatttaacaaaa

SEQ ID NO: 322507 - DNA, 15 bp, Homo sapiens
attatatttaacaaa

SEQ ID NO: 322508 - DNA, 15 bp, Homo sapiens
cattatatttaacaa

SEQ ID NO: 322509 - DNA, 15 bp, Homo sapiens
tcattatatttaaca

SEQ ID NO: 322510 - DNA, 15 bp, Homo sapiens
atcattatatttaac

SEQ ID NO: 322511 - DNA, 15 bp, Homo sapiens
gatcattatatttaa

SEQ ID NO: 322512 - DNA, 15 bp, Homo sapiens
agatcattatattta

SEQ ID NO: 322513 - DNA, 15 bp, Homo sapiens
aagatcattatattt

SEQ ID NO: 322514 - DNA, 15 bp, Homo sapiens
taagatcattatatt

SEQ ID NO: 322515 - DNA, 15 bp, Homo sapiens
ctaagatcattatat

SEQ ID NO: 322516 - DNA, 15 bp, Homo sapiens
actaagatcattata

SEQ ID NO: 322517 - DNA, 15 bp, Homo sapiens
aactaagatcattat

SEQ ID NO: 322518 - DNA, 15 bp, Homo sapiens
taactaagatcatta

SEQ ID NO: 322519 - DNA, 15 bp, Homo sapiens
gtaactaagatcatt

SEQ ID NO: 322520 - DNA, 15 bp, Homo sapiens
tgtaactaagatcat

SEQ ID NO: 322521 - DNA, 15 bp, Homo sapiens
atgtaactaagatca

SEQ ID NO: 322522 - DNA, 15 bp, Homo sapiens
aatgtaactaagatc

SEQ ID NO: 322523 - DNA, 15 bp, Homo sapiens
taatgtaactaagat

SEQ ID NO: 322524 - DNA, 15 bp, Homo sapiens
ttaatgtaactaaga

SEQ ID NO: 322525 - DNA, 15 bp, Homo sapiens
gttaatgtaactaag

SEQ ID NO: 322526 - DNA, 15 bp, Homo sapiens
cgttaatgtaactaa

SEQ ID NO: 322527 - DNA, 15 bp, Homo sapiens
ccgttaatgtaacta

SEQ ID NO: 322528 - DNA, 15 bp, Homo sapiens
accgttaatgtaact

SEQ ID NO: 322529 - DNA, 15 bp, Homo sapiens
taccgttaatgtaac

SEQ ID NO: 322530 - DNA, 15 bp, Homo sapiens
ttaccgttaatgtaa

SEQ ID NO: 322531 - DNA, 15 bp, Homo sapiens
tttaccgttaatgta

SEQ ID NO: 322532 - DNA, 15 bp, Homo sapiens
atttaccgttaatgt

SEQ ID NO: 322533 - DNA, 15 bp, Homo sapiens
tatttaccgttaatg

SEQ ID NO: 322534 - DNA, 15 bp, Homo sapiens
ttatttaccgttaat

SEQ ID NO: 322535 - DNA, 15 bp, Homo sapiens
gttatttaccgttaa

SEQ ID NO: 322536 - DNA, 15 bp, Homo sapiens
ggttatttaccgtta

SEQ ID NO: 322537 - DNA, 15 bp, Homo sapiens
gggttatttaccgtt

SEQ ID NO: 322538 - DNA, 15 bp, Homo sapiens
ggggttatttaccgt

SEQ ID NO: 322539 - DNA, 15 bp, Homo sapiens
tggggttatttaccg

SEQ ID NO: 322540 - DNA, 15 bp, Homo sapiens
atggggttatttacc

SEQ ID NO: 322541 - DNA, 15 bp, Homo sapiens
gatggggttatttac

SEQ ID NO: 322542 - DNA, 15 bp, Homo sapiens
tgatggggttattta

SEQ ID NO: 322543 - DNA, 15 bp, Homo sapiens
ttgatggggttattt

SEQ ID NO: 322544 - DNA, 15 bp, Homo sapiens
gttgatggggttatt

SEQ ID NO: 322545 - DNA, 15 bp, Homo sapiens
tgttgatggggttat

SEQ ID NO: 322546 - DNA, 15 bp, Homo sapiens
gtgttgatggggtta

SEQ ID NO: 322547 - DNA, 15 bp, Homo sapiens
agtgttgatggggtt

SEQ ID NO: 322548 - DNA, 15 bp, Homo sapiens
cagtgttgatggggt

SEQ ID NO: 322549 - DNA, 15 bp, Homo sapiens
ccagtgttgatgggg

SEQ ID NO: 322550 - DNA, 15 bp, Homo sapiens
accagtgttgatggg

SEQ ID NO: 322551 - DNA, 15 bp, Homo sapiens
caccagtgttgatgg

SEQ ID NO: 322552 - DNA, 15 bp, Homo sapiens
ccaccagtgttgatg

SEQ ID NO: 322553 - DNA, 15 bp, Homo sapiens
accaccagtgttgat

SEQ ID NO: 322554 - DNA, 15 bp, Homo sapiens
aaccaccagtgttga

SEQ ID NO: 322555 - DNA, 15 bp, Homo sapiens
aaaccaccagtgttg

SEQ ID NO: 322556 - DNA, 15 bp, Homo sapiens
taaaccaccagtgtt

SEQ ID NO: 322557 - DNA, 15 bp, Homo sapiens
ataaaccaccagtgt

SEQ ID NO: 322558 - DNA, 15 bp, Homo sapiens
aataaaccaccagtg

SEQ ID NO: 322559 - DNA, 15 bp, Homo sapiens
aaataaaccaccagt

SEQ ID NO: 322560 - DNA, 15 bp, Homo sapiens
aaaataaaccaccag

SEQ ID NO: 322561 - DNA, 15 bp, Homo sapiens
aaaaataaaccacca

SEQ ID NO: 322562 - DNA, 15 bp, Homo sapiens
taaaaataaaccacc

SEQ ID NO: 322563 - DNA, 15 bp, Homo sapiens
ataaaaataaaccac

SEQ ID NO: 322564 - DNA, 15 bp, Homo sapiens
aataaaaataaacca

SEQ ID NO: 322565 - DNA, 15 bp, Homo sapiens
caataaaaataaacc

SEQ ID NO: 322566 - DNA, 15 bp, Homo sapiens
gcaataaaaataaac

SEQ ID NO: 322567 - DNA, 15 bp, Homo sapiens
agcaataaaaataaa

SEQ ID NO: 322568 - DNA, 15 bp, Homo sapiens
aagcaataaaaataa

SEQ ID NO: 322569 - DNA, 15 bp, Homo sapiens
caagcaataaaaata

SEQ ID NO: 322570 - DNA, 15 bp, Homo sapiens
tcaagcaataaaaat

SEQ ID NO: 322571 - DNA, 15 bp, Homo sapiens
atcaagcaataaaaa

SEQ ID NO: 322572 - DNA, 15 bp, Homo sapiens
aatcaagcaataaaa

SEQ ID NO: 322573 - DNA, 15 bp, Homo sapiens
aaatcaagcaataaa

SEQ ID NO: 322574 - DNA, 15 bp, Homo sapiens
aaaatcaagcaataa

SEQ ID NO: 322575 - DNA, 15 bp, Homo sapiens
taaaatcaagcaata

SEQ ID NO: 322576 - DNA, 15 bp, Homo sapiens
ttaaaatcaagcaat

SEQ ID NO: 322577 - DNA, 15 bp, Homo sapiens
attaaaatcaagcaa

SEQ ID NO: 322578 - DNA, 15 bp, Homo sapiens
tattaaaatcaagca

SEQ ID NO: 322579 - DNA, 15 bp, Homo sapiens
gtattaaaatcaagc

SEQ ID NO: 322580 - DNA, 15 bp, Homo sapiens
agtattaaaatcaag

SEQ ID NO: 322581 - DNA, 15 bp, Homo sapiens
aagtattaaaatcaa

SEQ ID NO: 322582 - DNA, 15 bp, Homo sapiens
caagtattaaaatca

SEQ ID NO: 322583 - DNA, 15 bp, Homo sapiens
tcaagtattaaaatc

SEQ ID NO: 322584 - DNA, 15 bp, Homo sapiens
ttcaagtattaaaat

SEQ ID NO: 322585 - DNA, 15 bp, Homo sapiens
tttcaagtattaaaa

SEQ ID NO: 322586 - DNA, 15 bp, Homo sapiens
atttcaagtattaaa

SEQ ID NO: 322587 - DNA, 15 bp, Homo sapiens
catttcaagtattaa

SEQ ID NO: 322588 - DNA, 15 bp, Homo sapiens
acatttcaagtatta

SEQ ID NO: 322589 - DNA, 15 bp, Homo sapiens
cacatttcaagtatt

SEQ ID NO: 322590 - DNA, 15 bp, Homo sapiens
tcacatttcaagtat

SEQ ID NO: 322591 - DNA, 15 bp, Homo sapiens
ttcacatttcaagta

SEQ ID NO: 322592 - DNA, 15 bp, Homo sapiens
tttcacatttcaagt

SEQ ID NO: 322593 - DNA, 15 bp, Homo sapiens
ttttcacatttcaag

SEQ ID NO: 322594 - DNA, 15 bp, Homo sapiens
attttcacatttcaa

SEQ ID NO: 322595 - DNA, 15 bp, Homo sapiens
cattttcacatttca

SEQ ID NO: 322596 - DNA, 15 bp, Homo sapiens
tcattttcacatttc

SEQ ID NO: 322597 - DNA, 15 bp, Homo sapiens
ttcattttcacattt

SEQ ID NO: 322598 - DNA, 15 bp, Homo sapiens
tttcattttcacatt

SEQ ID NO: 322599 - DNA, 15 bp, Homo sapiens
ttttcattttcacat

SEQ ID NO: 322600 - DNA, 15 bp, Homo sapiens
cttttcattttcaca

SEQ ID NO: 322601 - DNA, 15 bp, Homo sapiens
gcttttcattttcac

SEQ ID NO: 322602 - DNA, 15 bp, Homo sapiens
ggcttttcattttca

SEQ ID NO: 322603 - DNA, 15 bp, Homo sapiens
tggcttttcattttc

SEQ ID NO: 322604 - DNA, 15 bp, Homo sapiens
ctggcttttcatttt

SEQ ID NO: 322605 - DNA, 15 bp, Homo sapiens
tctggcttttcattt

SEQ ID NO: 322606 - DNA, 15 bp, Homo sapiens
atctggcttttcatt

SEQ ID NO: 322607 - DNA, 15 bp, Homo sapiens
catctggcttttcat

SEQ ID NO: 322608 - DNA, 15 bp, Homo sapiens
gcatctggcttttca

SEQ ID NO: 322609 - DNA, 15 bp, Homo sapiens
agcatctggcttttc

SEQ ID NO: 322610 - DNA, 15 bp, Homo sapiens
aagcatctggctttt

SEQ ID NO: 322611 - DNA, 15 bp, Homo sapiens
gaagcatctggcttt

SEQ ID NO: 322612 - DNA, 15 bp, Homo sapiens
agaagcatctggctt

SEQ ID NO: 322613 - DNA, 15 bp, Homo sapiens
aagaagcatctggct

SEQ ID NO: 322614 - DNA, 15 bp, Homo sapiens
caagaagcatctggc

SEQ ID NO: 322615 - DNA, 15 bp, Homo sapiens
ccaagaagcatctgg

SEQ ID NO: 322616 - DNA, 15 bp, Homo sapiens
gccaagaagcatctg

SEQ ID NO: 322617 - DNA, 15 bp, Homo sapiens
tgccaagaagcatct

SEQ ID NO: 322618 - DNA, 15 bp, Homo sapiens
atgccaagaagcatc

SEQ ID NO: 322619 - DNA, 15 bp, Homo sapiens
aatgccaagaagcat

SEQ ID NO: 322620 - DNA, 15 bp, Homo sapiens
caatgccaagaagca

SEQ ID NO: 322621 - DNA, 15 bp, Homo sapiens
ccaatgccaagaagc

SEQ ID NO: 322622 - DNA, 15 bp, Homo sapiens
accaatgccaagaag

SEQ ID NO: 322623 - DNA, 15 bp, Homo sapiens
gaccaatgccaagaa

SEQ ID NO: 322624 - DNA, 15 bp, Homo sapiens
agaccaatgccaaga

SEQ ID NO: 322625 - DNA, 15 bp, Homo sapiens
gagaccaatgccaag

SEQ ID NO: 322626 - DNA, 15 bp, Homo sapiens
agagaccaatgccaa

SEQ ID NO: 322627 - DNA, 15 bp, Homo sapiens
tagagaccaatgcca

SEQ ID NO: 322628 - DNA, 15 bp, Homo sapiens
ttagagaccaatgcc

SEQ ID NO: 322629 - DNA, 15 bp, Homo sapiens
cttagagaccaatgc

SEQ ID NO: 322630 - DNA, 15 bp, Homo sapiens
tcttagagaccaatg

SEQ ID NO: 322631 - DNA, 15 bp, Homo sapiens
ttcttagagaccaat

SEQ ID NO: 322632 - DNA, 15 bp, Homo sapiens
gttcttagagaccaa

SEQ ID NO: 322633 - DNA, 15 bp, Homo sapiens
agttcttagagacca

SEQ ID NO: 322634 - DNA, 15 bp, Homo sapiens
cagttcttagagacc

SEQ ID NO: 322635 - DNA, 15 bp, Homo sapiens
tcagttcttagagac

SEQ ID NO: 322636 - DNA, 15 bp, Homo sapiens
atcagttcttagaga

SEQ ID NO: 322637 - DNA, 15 bp, Homo sapiens
gatcagttcttagag

SEQ ID NO: 322638 - DNA, 15 bp, Homo sapiens
ggatcagttcttaga

SEQ ID NO: 322639 - DNA, 15 bp, Homo sapiens
aggatcagttcttag

SEQ ID NO: 322640 - DNA, 15 bp, Homo sapiens
aaggatcagttctta

SEQ ID NO: 322641 - DNA, 15 bp, Homo sapiens
gaaggatcagttctt

SEQ ID NO: 322642 - DNA, 15 bp, Homo sapiens
tgaaggatcagttct

SEQ ID NO: 322643 - DNA, 15 bp, Homo sapiens
atgaaggatcagttc

SEQ ID NO: 322644 - DNA, 15 bp, Homo sapiens
aatgaaggatcagtt

SEQ ID NO: 322645 - DNA, 15 bp, Homo sapiens
aaatgaaggatcagt

SEQ ID NO: 322646 - DNA, 15 bp, Homo sapiens
aaaatgaaggatcag

SEQ ID NO: 322647 - DNA, 15 bp, Homo sapiens
taaaatgaaggatca

SEQ ID NO: 322648 - DNA, 15 bp, Homo sapiens
gtaaaatgaaggatc

SEQ ID NO: 322649 - DNA, 15 bp, Homo sapiens
ggtaaaatgaaggat

SEQ ID NO: 322650 - DNA, 15 bp, Homo sapiens
aggtaaaatgaagga

SEQ ID NO: 322651 - DNA, 15 bp, Homo sapiens
aaggtaaaatgaagg

SEQ ID NO: 322652 - DNA, 15 bp, Homo sapiens
aaaggtaaaatgaag

SEQ ID NO: 322653 - DNA, 15 bp, Homo sapiens
aaaaggtaaaatgaa

SEQ ID NO: 322654 - DNA, 15 bp, Homo sapiens
taaaaggtaaaatga

SEQ ID NO: 322655 - DNA, 15 bp, Homo sapiens
ctaaaaggtaaaatg

SEQ ID NO: 322656 - DNA, 15 bp, Homo sapiens
actaaaaggtaaaat

SEQ ID NO: 322657 - DNA, 15 bp, Homo sapiens
gactaaaaggtaaaa

SEQ ID NO: 322658 - DNA, 15 bp, Homo sapiens
agactaaaaggtaaa

SEQ ID NO: 322659 - DNA, 15 bp, Homo sapiens
gagactaaaaggtaa

SEQ ID NO: 322660 - DNA, 15 bp, Homo sapiens
ggagactaaaaggta

SEQ ID NO: 322661 - DNA, 15 bp, Homo sapiens
tggagactaaaaggt

SEQ ID NO: 322662 - DNA, 15 bp, Homo sapiens
ctggagactaaaagg

SEQ ID NO: 322663 - DNA, 15 bp, Homo sapiens
actggagactaaaag

SEQ ID NO: 322664 - DNA, 15 bp, Homo sapiens
gactggagactaaaa

SEQ ID NO: 322665 - DNA, 15 bp, Homo sapiens
tgactggagactaaa

SEQ ID NO: 322666 - DNA, 15 bp, Homo sapiens
atgactggagactaa

SEQ ID NO: 322667 - DNA, 15 bp, Homo sapiens
aatgactggagacta

SEQ ID NO: 322668 - DNA, 15 bp, Homo sapiens
aaatgactggagact

SEQ ID NO: 322669 - DNA, 15 bp, Homo sapiens
aaaatgactggagac

SEQ ID NO: 322670 - DNA, 15 bp, Homo sapiens
aaaaatgactggaga

SEQ ID NO: 322671 - DNA, 15 bp, Homo sapiens
aaaaaatgactggag

SEQ ID NO: 322672 - DNA, 15 bp, Homo sapiens
gaaaaaatgactgga

SEQ ID NO: 322673 - DNA, 15 bp, Homo sapiens
tgaaaaaatgactgg

SEQ ID NO: 322674 - DNA, 15 bp, Homo sapiens
atgaaaaaatgactg

SEQ ID NO: 322675 - DNA, 15 bp, Homo sapiens
tatgaaaaaatgact

SEQ ID NO: 322676 - DNA, 15 bp, Homo sapiens
atatgaaaaaatgac

SEQ ID NO: 322677 - DNA, 15 bp, Homo sapiens
gatatgaaaaaatga

SEQ ID NO: 322678 - DNA, 15 bp, Homo sapiens
agatatgaaaaaatg

SEQ ID NO: 322679 - DNA, 15 bp, Homo sapiens
gagatatgaaaaaat

SEQ ID NO: 322680 - DNA, 15 bp, Homo sapiens
tgagatatgaaaaaa

SEQ ID NO: 322681 - DNA, 15 bp, Homo sapiens
ttgagatatgaaaaa

SEQ ID NO: 322682 - DNA, 15 bp, Homo sapiens
ttttgagatatgaaa

SEQ ID NO: 322683 - DNA, 15 bp, Homo sapiens
cttttgagatatgaa

SEQ ID NO: 322684 - DNA, 15 bp, Homo sapiens
acttttgagatatga

SEQ ID NO: 322685 - DNA, 15 bp, Homo sapiens
aacttttgagatatg

SEQ ID NO: 322686 - DNA, 15 bp, Homo sapiens
gaacttttgagatat

SEQ ID NO: 322687 - DNA, 15 bp, Homo sapiens
agaacttttgagata

SEQ ID NO: 322688 - DNA, 15 bp, Homo sapiens
aagaacttttgagat

SEQ ID NO: 322689 - DNA, 15 bp, Homo sapiens
aaagaacttttgaga

SEQ ID NO: 322690 - DNA, 15 bp, Homo sapiens
aaaagaacttttgag

SEQ ID NO: 322691 - DNA, 15 bp, Homo sapiens
gaaaagaacttttga

SEQ ID NO: 322692 - DNA, 15 bp, Homo sapiens
agaaaagaacttttg

SEQ ID NO: 322693 - DNA, 15 bp, Homo sapiens
cagaaaagaactttt

SEQ ID NO: 322694 - DNA, 15 bp, Homo sapiens
acagaaaagaacttt

SEQ ID NO: 322695 - DNA, 15 bp, Homo sapiens
aacagaaaagaactt

SEQ ID NO: 322696 - DNA, 15 bp, Homo sapiens
taacagaaaagaact

SEQ ID NO: 322697 - DNA, 15 bp, Homo sapiens
ataacagaaaagaac

SEQ ID NO: 322698 - DNA, 15 bp, Homo sapiens
cataacagaaaagaa

SEQ ID NO: 322699 - DNA, 15 bp, Homo sapiens
acataacagaaaaga

SEQ ID NO: 322700 - DNA, 15 bp, Homo sapiens
gacataacagaaaag

SEQ ID NO: 322701 - DNA, 15 bp, Homo sapiens
ggacataacagaaaa

SEQ ID NO: 322702 - DNA, 15 bp, Homo sapiens
aggacataacagaaa

SEQ ID NO: 322703 - DNA, 15 bp, Homo sapiens
caggacataacagaa

SEQ ID NO: 322704 - DNA, 15 bp, Homo sapiens
ccaggacataacaga

SEQ ID NO: 322705 - DNA, 15 bp, Homo sapiens
gccaggacataacag

SEQ ID NO: 322706 - DNA, 15 bp, Homo sapiens
ggccaggacataaca

SEQ ID NO: 322707 - DNA, 15 bp, Homo sapiens
aggccaggacataac

SEQ ID NO: 322708 - DNA, 15 bp, Homo sapiens
aaggccaggacataa

SEQ ID NO: 322709 - DNA, 15 bp, Homo sapiens
aaaggccaggacata

SEQ ID NO: 322710 - DNA, 15 bp, Homo sapiens
caaaggccaggacat

SEQ ID NO: 322711 - DNA, 15 bp, Homo sapiens
gcaaaggccaggaca

SEQ ID NO: 322712 - DNA, 15 bp, Homo sapiens
agcaaaggccaggac

SEQ ID NO: 322713 - DNA, 15 bp, Homo sapiens
aagcaaaggccagga

SEQ ID NO: 322714 - DNA, 15 bp, Homo sapiens
taagcaaaggccagg

SEQ ID NO: 322715 - DNA, 15 bp, Homo sapiens
ataagcaaaggccag

SEQ ID NO: 322716 - DNA, 15 bp, Homo sapiens
cataagcaaaggcca

SEQ ID NO: 322717 - DNA, 15 bp, Homo sapiens
tcataagcaaaggcc

SEQ ID NO: 322718 - DNA, 15 bp, Homo sapiens
atcataagcaaaggc

SEQ ID NO: 322719 - DNA, 15 bp, Homo sapiens
gatcataagcaaagg

SEQ ID NO: 322720 - DNA, 15 bp, Homo sapiens
tgatcataagcaaag

SEQ ID NO: 322721 - DNA, 15 bp, Homo sapiens
ttgatcataagcaaa

SEQ ID NO: 322722 - DNA, 15 bp, Homo sapiens
attgatcataagcaa

SEQ ID NO: 322723 - DNA, 15 bp, Homo sapiens
cattgatcataagca

SEQ ID NO: 322724 - DNA, 15 bp, Homo sapiens
acattgatcataagc

SEQ ID NO: 322725 - DNA, 15 bp, Homo sapiens
cacattgatcataag

SEQ ID NO: 322726 - DNA, 15 bp, Homo sapiens
tcacattgatcataa

SEQ ID NO: 322727 - DNA, 15 bp, Homo sapiens
atcacattgatcata

SEQ ID NO: 322728 - DNA, 15 bp, Homo sapiens
catcacattgatcat

SEQ ID NO: 322729 - DNA, 15 bp, Homo sapiens
acatcacattgatca

SEQ ID NO: 322730 - DNA, 15 bp, Homo sapiens
aacatcacattgatc

SEQ ID NO: 322731 - DNA, 15 bp, Homo sapiens
aaacatcacattgat

SEQ ID NO: 322732 - DNA, 15 bp, Homo sapiens
aaaacatcacattga

SEQ ID NO: 322733 - DNA, 15 bp, Homo sapiens
caaaacatcacattg

SEQ ID NO: 322734 - DNA, 15 bp, Homo sapiens
tcaaaacatcacatt

SEQ ID NO: 322735 - DNA, 15 bp, Homo sapiens
gtcaaaacatcacat

SEQ ID NO: 322736 - DNA, 15 bp, Homo sapiens
agtcaaaacatcaca

SEQ ID NO: 322737 - DNA, 15 bp, Homo sapiens
aagtcaaaacatcac

SEQ ID NO: 322738 - DNA, 15 bp, Homo sapiens
gaagtcaaaacatca

SEQ ID NO: 322739 - DNA, 15 bp, Homo sapiens
ggaagtcaaaacatc

SEQ ID NO: 322740 - DNA, 15 bp, Homo sapiens
gggaagtcaaaacat

SEQ ID NO: 322741 - DNA, 15 bp, Homo sapiens
agggaagtcaaaaca

SEQ ID NO: 322742 - DNA, 15 bp, Homo sapiens
aagggaagtcaaaac

SEQ ID NO: 322743 - DNA, 15 bp, Homo sapiens
aaagggaagtcaaaa

SEQ ID NO: 322744 - DNA, 15 bp, Homo sapiens
caaagggaagtcaaa

SEQ ID NO: 322745 - DNA, 15 bp, Homo sapiens
ccaaagggaagtcaa

SEQ ID NO: 322746 - DNA, 15 bp, Homo sapiens
gccaaagggaagtca

SEQ ID NO: 322747 - DNA, 15 bp, Homo sapiens
ggccaaagggaagtc

SEQ ID NO: 322748 - DNA, 15 bp, Homo sapiens
tggccaaagggaagt

SEQ ID NO: 322749 - DNA, 15 bp, Homo sapiens
ttggccaaagggaag

SEQ ID NO: 322750 - DNA, 15 bp, Homo sapiens
gttggccaaagggaa

SEQ ID NO: 322751 - DNA, 15 bp, Homo sapiens
tgttggccaaaggga

SEQ ID NO: 322752 - DNA, 15 bp, Homo sapiens
gtgttggccaaaggg

SEQ ID NO: 322753 - DNA, 15 bp, Homo sapiens
tgtgttggccaaagg

SEQ ID NO: 322754 - DNA, 15 bp, Homo sapiens
atgtgttggccaaag

SEQ ID NO: 322755 - DNA, 15 bp, Homo sapiens
aatgtgttggccaaa

SEQ ID NO: 322756 - DNA, 15 bp, Homo sapiens
aaatgtgttggccaa

SEQ ID NO: 322757 - DNA, 15 bp, Homo sapiens
aaaatgtgttggcca

SEQ ID NO: 322758 - DNA, 15 bp, Homo sapiens
taaaatgtgttggcc

SEQ ID NO: 322759 - DNA, 15 bp, Homo sapiens
ataaaatgtgttggc

SEQ ID NO: 322760 - DNA, 15 bp, Homo sapiens
gataaaatgtgttgg

SEQ ID NO: 322761 - DNA, 15 bp, Homo sapiens
ggataaaatgtgttg

SEQ ID NO: 322762 - DNA, 15 bp, Homo sapiens
tggataaaatgtgtt

SEQ ID NO: 322763 - DNA, 15 bp, Homo sapiens
atggataaaatgtgt

SEQ ID NO: 322764 - DNA, 15 bp, Homo sapiens
catggataaaatgtg

SEQ ID NO: 322765 - DNA, 15 bp, Homo sapiens
ccatggataaaatgt

SEQ ID NO: 322766 - DNA, 15 bp, Homo sapiens
cccatggataaaatg

SEQ ID NO: 322767 - DNA, 15 bp, Homo sapiens
acccatggataaaat

SEQ ID NO: 322768 - DNA, 15 bp, Homo sapiens
aacccatggataaaa

SEQ ID NO: 322769 - DNA, 15 bp, Homo sapiens
caacccatggataaa

SEQ ID NO: 322770 - DNA, 15 bp, Homo sapiens
ccaacccatggataa

SEQ ID NO: 322771 - DNA, 15 bp, Homo sapiens
tccaacccatggata

SEQ ID NO: 322772 - DNA, 15 bp, Homo sapiens
atccaacccatggat

SEQ ID NO: 322773 - DNA, 15 bp, Homo sapiens
gatccaacccatgga

SEQ ID NO: 322774 - DNA, 15 bp, Homo sapiens
agatccaacccatgg

SEQ ID NO: 322775 - DNA, 15 bp, Homo sapiens
gagatccaacccatg

SEQ ID NO: 322776 - DNA, 15 bp, Homo sapiens
agagatccaacccat

SEQ ID NO: 322777 - DNA, 15 bp, Homo sapiens
cagagatccaaccca

SEQ ID NO: 322778 - DNA, 15 bp, Homo sapiens
acagagatccaaccc

SEQ ID NO: 322779 - DNA, 15 bp, Homo sapiens
cacagagatccaacc

SEQ ID NO: 322780 - DNA, 15 bp, Homo sapiens
tcacagagatccaac

SEQ ID NO: 322781 - DNA, 15 bp, Homo sapiens
atcacagagatccaa

SEQ ID NO: 322782 - DNA, 15 bp, Homo sapiens
aatcacagagatcca

SEQ ID NO: 322783 - DNA, 15 bp, Homo sapiens
aaatcacagagatcc

SEQ ID NO: 322784 - DNA, 15 bp, Homo sapiens
gaaatcacagagatc

SEQ ID NO: 322785 - DNA, 15 bp, Homo sapiens
agaaatcacagagat

SEQ ID NO: 322786 - DNA, 15 bp, Homo sapiens
tagaaatcacagaga

SEQ ID NO: 322787 - DNA, 15 bp, Homo sapiens
gtagaaatcacagag

SEQ ID NO: 322788 - DNA, 15 bp, Homo sapiens
agtagaaatcacaga

SEQ ID NO: 322789 - DNA, 15 bp, Homo sapiens
cagtagaaatcacag

SEQ ID NO: 322790 - DNA, 15 bp, Homo sapiens
acagtagaaatcaca

SEQ ID NO: 322791 - DNA, 15 bp, Homo sapiens
cacagtagaaatcac

SEQ ID NO: 322792 - DNA, 15 bp, Homo sapiens
acacagtagaaatca

SEQ ID NO: 322793 - DNA, 15 bp, Homo sapiens
aacacagtagaaatc

SEQ ID NO: 322794 - DNA, 15 bp, Homo sapiens
aaacacagtagaaat

SEQ ID NO: 322795 - DNA, 15 bp, Homo sapiens
gaaacacagtagaaa

SEQ ID NO: 322796 - DNA, 15 bp, Homo sapiens
agaaacacagtagaa

SEQ ID NO: 322797 - DNA, 15 bp, Homo sapiens
tagaaacacagtaga

SEQ ID NO: 322798 - DNA, 15 bp, Homo sapiens
atagaaacacagtag

SEQ ID NO: 322799 - DNA, 15 bp, Homo sapiens
aatagaaacacagta

SEQ ID NO: 322800 - DNA, 15 bp, Homo sapiens
aaatagaaacacagt

SEQ ID NO: 322801 - DNA, 15 bp, Homo sapiens
aaaatagaaacacag

SEQ ID NO: 322802 - DNA, 15 bp, Homo sapiens
gaaaatagaaacaca

SEQ ID NO: 322803 - DNA, 15 bp, Homo sapiens
agaaaatagaaacac

SEQ ID NO: 322804 - DNA, 15 bp, Homo sapiens
cagaaaatagaaaca

SEQ ID NO: 322805 - DNA, 15 bp, Homo sapiens
tcagaaaatagaaac

SEQ ID NO: 322806 - DNA, 15 bp, Homo sapiens
ttcagaaaatagaaa

SEQ ID NO: 322807 - DNA, 15 bp, Homo sapiens
cttcagaaaatagaa

SEQ ID NO: 322808 - DNA, 15 bp, Homo sapiens
acttcagaaaataga

SEQ ID NO: 322809 - DNA, 15 bp, Homo sapiens
aacttcagaaaatag

SEQ ID NO: 322810 - DNA, 15 bp, Homo sapiens
aaacttcagaaaata

SEQ ID NO: 322811 - DNA, 15 bp, Homo sapiens
gaaacttcagaaaat

SEQ ID NO: 322812 - DNA, 15 bp, Homo sapiens
tgaaacttcagaaaa

SEQ ID NO: 322813 - DNA, 15 bp, Homo sapiens
atgaaacttcagaaa

SEQ ID NO: 322814 - DNA, 15 bp, Homo sapiens
gatgaaacttcagaa

SEQ ID NO: 322815 - DNA, 15 bp, Homo sapiens
agatgaaacttcaga

SEQ ID NO: 322816 - DNA, 15 bp, Homo sapiens
aagatgaaacttcag

SEQ ID NO: 322817 - DNA, 15 bp, Homo sapiens
aaagatgaaacttca

SEQ ID NO: 322818 - DNA, 15 bp, Homo sapiens
aaaagatgaaacttc

SEQ ID NO: 322819 - DNA, 15 bp, Homo sapiens
aaaaagatgaaactt

SEQ ID NO: 322820 - DNA, 15 bp, Homo sapiens
aaaaaagatgaaact

SEQ ID NO: 322821 - DNA, 15 bp, Homo sapiens
aaaaaaagatgaaac

SEQ ID NO: 322822 - DNA, 15 bp, Homo sapiens
aaaaaaaagatgaaa

SEQ ID NO: 322823 - DNA, 15 bp, Homo sapiens
aaaaaaaaagatgaa

SEQ ID NO: 322824 - DNA, 15 bp, Homo sapiens
aaaaaaaaaagatga

SEQ ID NO: 322825 - DNA, 15 bp, Homo sapiens
gaaaaaaaaaagatg

SEQ ID NO: 322826 - DNA, 15 bp, Homo sapiens
agaaaaaaaaaagat

SEQ ID NO: 322827 - DNA, 15 bp, Homo sapiens
gagaaaaaaaaaaga

SEQ ID NO: 322828 - DNA, 15 bp, Homo sapiens
ggagaaaaaaaaaag

SEQ ID NO: 322829 - DNA, 15 bp, Homo sapiens
gggagaaaaaaaaaa

SEQ ID NO: 322830 - DNA, 15 bp, Homo sapiens
agggagaaaaaaaaa

SEQ ID NO: 322831 - DNA, 15 bp, Homo sapiens
aagggagaaaaaaaa

SEQ ID NO: 322832 - DNA, 15 bp, Homo sapiens
aaagggagaaaaaaa

SEQ ID NO: 322833 - DNA, 15 bp, Homo sapiens
agaaagggagaaaaa

SEQ ID NO: 322834 - DNA, 15 bp, Homo sapiens
gagaaagggagaaaa

SEQ ID NO: 322835 - DNA, 15 bp, Homo sapiens
tgagaaagggagaaa

SEQ ID NO: 322836 - DNA, 15 bp, Homo sapiens
atgagaaagggagaa

SEQ ID NO: 322837 - DNA, 15 bp, Homo sapiens
tatgagaaagggaga

SEQ ID NO: 322838 - DNA, 15 bp, Homo sapiens
atatgagaaagggag

SEQ ID NO: 322839 - DNA, 15 bp, Homo sapiens
aatatgagaaaggga

SEQ ID NO: 322840 - DNA, 15 bp, Homo sapiens
aaatatgagaaaggg

SEQ ID NO: 322841 - DNA, 15 bp, Homo sapiens
aaaatatgagaaagg

SEQ ID NO: 322842 - DNA, 15 bp, Homo sapiens
gaaaatatgagaaag

SEQ ID NO: 322843 - DNA, 15 bp, Homo sapiens
agaaaatatgagaaa

SEQ ID NO: 322844 - DNA, 15 bp, Homo sapiens
gagaaaatatgagaa

SEQ ID NO: 322845 - DNA, 15 bp, Homo sapiens
agagaaaatatgaga

SEQ ID NO: 322846 - DNA, 15 bp, Homo sapiens
cagagaaaatatgag

SEQ ID NO: 322847 - DNA, 15 bp, Homo sapiens
gcagagaaaatatga

SEQ ID NO: 322848 - DNA, 15 bp, Homo sapiens
agcagagaaaatatg

SEQ ID NO: 322849 - DNA, 15 bp, Homo sapiens
aagcagagaaaatat

SEQ ID NO: 322850 - DNA, 15 bp, Homo sapiens
aaagcagagaaaata

SEQ ID NO: 322851 - DNA, 15 bp, Homo sapiens
gaaagcagagaaaat

SEQ ID NO: 322852 - DNA, 15 bp, Homo sapiens
agaaagcagagaaaa

SEQ ID NO: 322853 - DNA, 15 bp, Homo sapiens
cagaaagcagagaaa

SEQ ID NO: 322854 - DNA, 15 bp, Homo sapiens
tcagaaagcagagaa

SEQ ID NO: 322855 - DNA, 15 bp, Homo sapiens
ctcagaaagcagaga

SEQ ID NO: 322856 - DNA, 15 bp, Homo sapiens
cctcagaaagcagag

SEQ ID NO: 322857 - DNA, 15 bp, Homo sapiens
acctcagaaagcaga

SEQ ID NO: 322858 - DNA, 15 bp, Homo sapiens
cacctcagaaagcag

SEQ ID NO: 322859 - DNA, 15 bp, Homo sapiens
tcacctcagaaagca

SEQ ID NO: 322860 - DNA, 15 bp, Homo sapiens
gtcacctcagaaagc

SEQ ID NO: 322861 - DNA, 15 bp, Homo sapiens
agtcacctcagaaag

SEQ ID NO: 322862 - DNA, 15 bp, Homo sapiens
aagtcacctcagaaa

SEQ ID NO: 322863 - DNA, 15 bp, Homo sapiens
gaagtcacctcagaa

SEQ ID NO: 322864 - DNA, 15 bp, Homo sapiens
agaagtcacctcaga

SEQ ID NO: 322865 - DNA, 15 bp, Homo sapiens
aagaagtcacctcag

SEQ ID NO: 322866 - DNA, 15 bp, Homo sapiens
taagaagtcacctca

SEQ ID NO: 322867 - DNA, 15 bp, Homo sapiens
ctaagaagtcacctc

SEQ ID NO: 322868 - DNA, 15 bp, Homo sapiens
actaagaagtcacct

SEQ ID NO: 322869 - DNA, 15 bp, Homo sapiens
aactaagaagtcacc

SEQ ID NO: 322870 - DNA, 15 bp, Homo sapiens
aaactaagaagtcac

SEQ ID NO: 322871 - DNA, 15 bp, Homo sapiens
aaaactaagaagtca

SEQ ID NO: 322872 - DNA, 15 bp, Homo sapiens
caaaactaagaagtc

SEQ ID NO: 322873 - DNA, 15 bp, Homo sapiens
acaaaactaagaagt

SEQ ID NO: 322874 - DNA, 15 bp, Homo sapiens
tacaaaactaagaag

SEQ ID NO: 322875 - DNA, 15 bp, Homo sapiens
gtacaaaactaagaa

SEQ ID NO: 322876 - DNA, 15 bp, Homo sapiens
agtacaaaactaaga

SEQ ID NO: 322877 - DNA, 15 bp, Homo sapiens
gagtacaaaactaag

SEQ ID NO: 322878 - DNA, 15 bp, Homo sapiens
agagtacaaaactaa

SEQ ID NO: 322879 - DNA, 15 bp, Homo sapiens
cagagtacaaaacta

SEQ ID NO: 322880 - DNA, 15 bp, Homo sapiens
gcagagtacaaaact

SEQ ID NO: 322881 - DNA, 15 bp, Homo sapiens
cgcagagtacaaaac

SEQ ID NO: 322882 - DNA, 15 bp, Homo sapiens
gcgcagagtacaaaa

SEQ ID NO: 322883 - DNA, 15 bp, Homo sapiens
ggcgcagagtacaaa

SEQ ID NO: 322884 - DNA, 15 bp, Homo sapiens
cggcgcagagtacaa

SEQ ID NO: 322885 - DNA, 15 bp, Homo sapiens
acggcgcagagtaca

SEQ ID NO: 322886 - DNA, 15 bp, Homo sapiens
cacggcgcagagtac

SEQ ID NO: 322887 - DNA, 15 bp, Homo sapiens
ccacggcgcagagta

SEQ ID NO: 322888 - DNA, 15 bp, Homo sapiens
accacggcgcagagt

SEQ ID NO: 322889 - DNA, 15 bp, Homo sapiens
gaccacggcgcagag

SEQ ID NO: 322890 - DNA, 15 bp, Homo sapiens
cgaccacggcgcaga

SEQ ID NO: 322891 - DNA, 15 bp, Homo sapiens
ccgaccacggcgcag

SEQ ID NO: 322892 - DNA, 15 bp, Homo sapiens
accgaccacggcgca

SEQ ID NO: 322893 - DNA, 15 bp, Homo sapiens
aaccgaccacggcgc

SEQ ID NO: 322894 - DNA, 15 bp, Homo sapiens
aaaccgaccacggcg

SEQ ID NO: 322895 - DNA, 15 bp, Homo sapiens
aaaaccgaccacggc

SEQ ID NO: 322896 - DNA, 15 bp, Homo sapiens
gaaaaccgaccacgg

SEQ ID NO: 322897 - DNA, 15 bp, Homo sapiens
tgaaaaccgaccacg

SEQ ID NO: 322898 - DNA, 15 bp, Homo sapiens
ctgaaaaccgaccac

SEQ ID NO: 322899 - DNA, 15 bp, Homo sapiens
gctgaaaaccgacca

SEQ ID NO: 322900 - DNA, 15 bp, Homo sapiens
cgctgaaaaccgacc

SEQ ID NO: 322901 - DNA, 15 bp, Homo sapiens
ccgctgaaaaccgac

SEQ ID NO: 322902 - DNA, 15 bp, Homo sapiens
accgctgaaaaccga

SEQ ID NO: 322903 - DNA, 15 bp, Homo sapiens
caccgctgaaaaccg

SEQ ID NO: 322904 - DNA, 15 bp, Homo sapiens
gcaccgctgaaaacc

SEQ ID NO: 322905 - DNA, 15 bp, Homo sapiens
agcaccgctgaaaac

SEQ ID NO: 322906 - DNA, 15 bp, Homo sapiens
tagcaccgctgaaaa

SEQ ID NO: 322907 - DNA, 15 bp, Homo sapiens
ttagcaccgctgaaa

SEQ ID NO: 322908 - DNA, 15 bp, Homo sapiens
cttagcaccgctgaa

SEQ ID NO: 322909 - DNA, 15 bp, Homo sapiens
acttagcaccgctga

SEQ ID NO: 322910 - DNA, 15 bp, Homo sapiens
gacttagcaccgctg

SEQ ID NO: 322911 - DNA, 15 bp, Homo sapiens
tgacttagcaccgct

SEQ ID NO: 322912 - DNA, 15 bp, Homo sapiens
ctgacttagcaccgc

SEQ ID NO: 322913 - DNA, 15 bp, Homo sapiens
gctgacttagcaccg

SEQ ID NO: 322914 - DNA, 15 bp, Homo sapiens
ggctgacttagcacc

SEQ ID NO: 322915 - DNA, 15 bp, Homo sapiens
aggctgacttagcac

SEQ ID NO: 322916 - DNA, 15 bp, Homo sapiens
aaggctgacttagca

SEQ ID NO: 322917 - DNA, 15 bp, Homo sapiens
aaaggctgacttagc

SEQ ID NO: 322918 - DNA, 15 bp, Homo sapiens
gaaaggctgacttag

SEQ ID NO: 322919 - DNA, 15 bp, Homo sapiens
tgaaaggctgactta

SEQ ID NO: 322920 - DNA, 15 bp, Homo sapiens
atgaaaggctgactt

SEQ ID NO: 322921 - DNA, 15 bp, Homo sapiens
gatgaaaggctgact

SEQ ID NO: 322922 - DNA, 15 bp, Homo sapiens
tgatgaaaggctgac

SEQ ID NO: 322923 - DNA, 15 bp, Homo sapiens
ctgatgaaaggctga

SEQ ID NO: 322924 - DNA, 15 bp, Homo sapiens
gctgatgaaaggctg

SEQ ID NO: 322925 - DNA, 15 bp, Homo sapiens
agctgatgaaaggct

SEQ ID NO: 322926 - DNA, 15 bp, Homo sapiens
gagctgatgaaaggc

SEQ ID NO: 322927 - DNA, 15 bp, Homo sapiens
tgagctgatgaaagg

SEQ ID NO: 322928 - DNA, 15 bp, Homo sapiens
ctgagctgatgaaag

SEQ ID NO: 322929 - DNA, 15 bp, Homo sapiens
actgagctgatgaaa

SEQ ID NO: 322930 - DNA, 15 bp, Homo sapiens
aactgagctgatgaa

SEQ ID NO: 322931 - DNA, 15 bp, Homo sapiens
taactgagctgatga

SEQ ID NO: 322932 - DNA, 15 bp, Homo sapiens
gtaactgagctgatg

SEQ ID NO: 322933 - DNA, 15 bp, Homo sapiens
tgtaactgagctgat

SEQ ID NO: 322934 - DNA, 15 bp, Homo sapiens
ttgtaactgagctga

SEQ ID NO: 322935 - DNA, 15 bp, Homo sapiens
gttgtaactgagctg

SEQ ID NO: 322936 - DNA, 15 bp, Homo sapiens
agttgtaactgagct

SEQ ID NO: 322937 - DNA, 15 bp, Homo sapiens
cagttgtaactgagc

SEQ ID NO: 322938 - DNA, 15 bp, Homo sapiens
acagttgtaactgag

SEQ ID NO: 322939 - DNA, 15 bp, Homo sapiens
cacagttgtaactga

SEQ ID NO: 322940 - DNA, 15 bp, Homo sapiens
gcacagttgtaactg

SEQ ID NO: 322941 - DNA, 15 bp, Homo sapiens
agcacagttgtaact

SEQ ID NO: 322942 - DNA, 15 bp, Homo sapiens
aagcacagttgtaac

SEQ ID NO: 322943 - DNA, 15 bp, Homo sapiens
aaagcacagttgtaa

SEQ ID NO: 322944 - DNA, 15 bp, Homo sapiens
aaaagcacagttgta

SEQ ID NO: 322945 - DNA, 15 bp, Homo sapiens
caaaagcacagttgt

SEQ ID NO: 322946 - DNA, 15 bp, Homo sapiens
ccaaaagcacagttg

SEQ ID NO: 322947 - DNA, 15 bp, Homo sapiens
gccaaaagcacagtt

SEQ ID NO: 322948 - DNA, 15 bp, Homo sapiens
ggccaaaagcacagt

SEQ ID NO: 322949 - DNA, 15 bp, Homo sapiens
cggccaaaagcacag

SEQ ID NO: 322950 - DNA, 15 bp, Homo sapiens
acggccaaaagcaca

SEQ ID NO: 322951 - DNA, 15 bp, Homo sapiens
cacggccaaaagcac

SEQ ID NO: 322952 - DNA, 15 bp, Homo sapiens
tcacggccaaaagca

SEQ ID NO: 322953 - DNA, 15 bp, Homo sapiens
ctcacggccaaaagc

SEQ ID NO: 322954 - DNA, 15 bp, Homo sapiens
gctcacggccaaaag

SEQ ID NO: 322955 - DNA, 15 bp, Homo sapiens
ggctcacggccaaaa

SEQ ID NO: 322956 - DNA, 15 bp, Homo sapiens
aggctcacggccaaa

SEQ ID NO: 322957 - DNA, 15 bp, Homo sapiens
aaggctcacggccaa

SEQ ID NO: 322958 - DNA, 15 bp, Homo sapiens
aaaggctcacggcca

SEQ ID NO: 322959 - DNA, 15 bp, Homo sapiens
aaaaggctcacggcc

SEQ ID NO: 322960 - DNA, 15 bp, Homo sapiens
aaaaaggctcacggc

SEQ ID NO: 322961 - DNA, 15 bp, Homo sapiens
taaaaaggctcacgg

SEQ ID NO: 322962 - DNA, 15 bp, Homo sapiens
ataaaaaggctcacg

SEQ ID NO: 322963 - DNA, 15 bp, Homo sapiens
aataaaaaggctcac

SEQ ID NO: 322964 - DNA, 15 bp, Homo sapiens
aaataaaaaggctca

SEQ ID NO: 322965 - DNA, 15 bp, Homo sapiens
gaaataaaaaggctc

SEQ ID NO: 322966 - DNA, 15 bp, Homo sapiens
tgaaataaaaaggct

SEQ ID NO: 322967 - DNA, 15 bp, Homo sapiens
atgaaataaaaaggc

SEQ ID NO: 322968 - DNA, 15 bp, Homo sapiens
gatgaaataaaaagg

SEQ ID NO: 322969 - DNA, 15 bp, Homo sapiens
tgatgaaataaaaag

SEQ ID NO: 322970 - DNA, 15 bp, Homo sapiens
ttgatgaaataaaaa

SEQ ID NO: 322971 - DNA, 15 bp, Homo sapiens
gttgatgaaataaaa

SEQ ID NO: 322972 - DNA, 15 bp, Homo sapiens
tgttgatgaaataaa

SEQ ID NO: 322973 - DNA, 15 bp, Homo sapiens
atgttgatgaaataa

SEQ ID NO: 322974 - DNA, 15 bp, Homo sapiens
gatgttgatgaaata

SEQ ID NO: 322975 - DNA, 15 bp, Homo sapiens
ggatgttgatgaaat

SEQ ID NO: 322976 - DNA, 15 bp, Homo sapiens
gggatgttgatgaaa

SEQ ID NO: 322977 - DNA, 15 bp, Homo sapiens
cgggatgttgatgaa

SEQ ID NO: 322978 - DNA, 15 bp, Homo sapiens
acgggatgttgatga

SEQ ID NO: 322979 - DNA, 15 bp, Homo sapiens
gacgggatgttgatg

SEQ ID NO: 322980 - DNA, 15 bp, Homo sapiens
agacgggatgttgat

SEQ ID NO: 322981 - DNA, 15 bp, Homo sapiens
gagacgggatgttga

SEQ ID NO: 322982 - DNA, 15 bp, Homo sapiens
tgagacgggatgttg

SEQ ID NO: 322983 - DNA, 15 bp, Homo sapiens
atgagacgggatgtt

SEQ ID NO: 322984 - DNA, 15 bp, Homo sapiens
gatgagacgggatgt

SEQ ID NO: 322985 - DNA, 15 bp, Homo sapiens
agatgagacgggatg

SEQ ID NO: 322986 - DNA, 15 bp, Homo sapiens
gagatgagacgggat

SEQ ID NO: 322987 - DNA, 15 bp, Homo sapiens
agagatgagacggga

SEQ ID NO: 322988 - DNA, 15 bp, Homo sapiens
cagagatgagacggg

SEQ ID NO: 322989 - DNA, 15 bp, Homo sapiens
gcagagatgagacgg

SEQ ID NO: 322990 - DNA, 15 bp, Homo sapiens
tgcagagatgagacg

SEQ ID NO: 322991 - DNA, 15 bp, Homo sapiens
ttgcagagatgagac

SEQ ID NO: 322992 - DNA, 15 bp, Homo sapiens
attgcagagatgaga

SEQ ID NO: 322993 - DNA, 15 bp, Homo sapiens
aattgcagagatgag

SEQ ID NO: 322994 - DNA, 15 bp, Homo sapiens
taattgcagagatga

SEQ ID NO: 322995 - DNA, 15 bp, Homo sapiens
ataattgcagagatg

SEQ ID NO: 322996 - DNA, 15 bp, Homo sapiens
aataattgcagagat

SEQ ID NO: 322997 - DNA, 15 bp, Homo sapiens
aaataattgcagaga

SEQ ID NO: 322998 - DNA, 15 bp, Homo sapiens
taaataattgcagag

SEQ ID NO: 322999 - DNA, 15 bp, Homo sapiens
ttaaataattgcaga

SEQ ID NO: 323000 - DNA, 15 bp, Homo sapiens
attaaataattgcag

SEQ ID NO: 323001 - DNA, 15 bp, Homo sapiens
tattaaataattgca

SEQ ID NO: 323002 - DNA, 15 bp, Homo sapiens
ttattaaataattgc

SEQ ID NO: 323003 - DNA, 15 bp, Homo sapiens
tttattaaataattg

SEQ ID NO: 323004 - DNA, 15 bp, Homo sapiens
ttttattaaataatt

SEQ ID NO: 323005 - DNA, 15 bp, Homo sapiens
cttttattaaataat

SEQ ID NO: 323006 - DNA, 15 bp, Homo sapiens
acttttattaaataa

SEQ ID NO: 323007 - DNA, 15 bp, Homo sapiens
aacttttattaaata

SEQ ID NO: 323008 - DNA, 15 bp, Homo sapiens
taacttttattaaat

SEQ ID NO: 323009 - DNA, 15 bp, Homo sapiens
ataacttttattaaa

SEQ ID NO: 323010 - DNA, 15 bp, Homo sapiens
tataacttttattaa

SEQ ID NO: 323011 - DNA, 15 bp, Homo sapiens
atataacttttatta

SEQ ID NO: 323012 - DNA, 15 bp, Homo sapiens
tatataacttttatt

SEQ ID NO: 323013 - DNA, 15 bp, Homo sapiens
ttatataacttttat

SEQ ID NO: 323014 - DNA, 15 bp, Homo sapiens
cttatataactttta

SEQ ID NO: 323015 - DNA, 15 bp, Homo sapiens
acttatataactttt

SEQ ID NO: 323016 - DNA, 15 bp, Homo sapiens
tacttatataacttt

SEQ ID NO: 323017 - DNA, 15 bp, Homo sapiens
atacttatataactt

SEQ ID NO: 323018 - DNA, 15 bp, Homo sapiens
aatacttatataact

SEQ ID NO: 323019 - DNA, 15 bp, Homo sapiens
taatacttatataac

SEQ ID NO: 323020 - DNA, 15 bp, Homo sapiens
ataatacttatataa

SEQ ID NO: 323021 - DNA, 15 bp, Homo sapiens
aataatacttatata

SEQ ID NO: 323022 - DNA, 15 bp, Homo sapiens
aaataatacttatat

SEQ ID NO: 323023 - DNA, 15 bp, Homo sapiens
taaataatacttata

SEQ ID NO: 323024 - DNA, 15 bp, Homo sapiens
ctaaataatacttat

SEQ ID NO: 323025 - DNA, 15 bp, Homo sapiens
gctaaataatactta

SEQ ID NO: 323026 - DNA, 15 bp, Homo sapiens
tgctaaataatactt

SEQ ID NO: 323027 - DNA, 15 bp, Homo sapiens
atgctaaataatact

SEQ ID NO: 323028 - DNA, 15 bp, Homo sapiens
tatgctaaataatac

SEQ ID NO: 323029 - DNA, 15 bp, Homo sapiens
ctatgctaaataata

SEQ ID NO: 323030 - DNA, 15 bp, Homo sapiens
tctatgctaaataat

SEQ ID NO: 323031 - DNA, 15 bp, Homo sapiens
ttctatgctaaataa

SEQ ID NO: 323032 - DNA, 15 bp, Homo sapiens
cttctatgctaaata

SEQ ID NO: 323033 - DNA, 15 bp, Homo sapiens
ccttctatgctaaat

SEQ ID NO: 323034 - DNA, 15 bp, Homo sapiens
tccttctatgctaaa

SEQ ID NO: 323035 - DNA, 15 bp, Homo sapiens
ctccttctatgctaa

SEQ ID NO: 323036 - DNA, 15 bp, Homo sapiens
tctccttctatgcta

SEQ ID NO: 323037 - DNA, 15 bp, Homo sapiens
ttctccttctatgct

SEQ ID NO: 323038 - DNA, 15 bp, Homo sapiens
attctccttctatgc

SEQ ID NO: 323039 - DNA, 15 bp, Homo sapiens
cattctccttctatg

SEQ ID NO: 323040 - DNA, 15 bp, Homo sapiens
acattctccttctat

SEQ ID NO: 323041 - DNA, 15 bp, Homo sapiens
aacattctccttcta

SEQ ID NO: 323042 - DNA, 15 bp, Homo sapiens
aaacattctccttct

SEQ ID NO: 323043 - DNA, 15 bp, Homo sapiens
aaaacattctccttc

SEQ ID NO: 323044 - DNA, 15 bp, Homo sapiens
gaaaacattctcctt

SEQ ID NO: 323045 - DNA, 15 bp, Homo sapiens
tgaaaacattctcct

SEQ ID NO: 323046 - DNA, 15 bp, Homo sapiens
ttgaaaacattctcc

SEQ ID NO: 323047 - DNA, 15 bp, Homo sapiens
tttgaaaacattctc

SEQ ID NO: 323048 - DNA, 15 bp, Homo sapiens
ttttgaaaacattct

SEQ ID NO: 323049 - DNA, 15 bp, Homo sapiens
tttttgaaaacattc

SEQ ID NO: 323050 - DNA, 15 bp, Homo sapiens
ttttttgaaaacatt

SEQ ID NO: 323051 - DNA, 15 bp, Homo sapiens
tttttttgaaaacat

SEQ ID NO: 323052 - DNA, 15 bp, Homo sapiens
ctttttttgaaaaca

SEQ ID NO: 323053 - DNA, 15 bp, Homo sapiens
actttttttgaaaac

SEQ ID NO: 323054 - DNA, 15 bp, Homo sapiens
gactttttttgaaaa

SEQ ID NO: 323055 - DNA, 15 bp, Homo sapiens
agactttttttgaaa

SEQ ID NO: 323056 - DNA, 15 bp, Homo sapiens
aagactttttttgaa

SEQ ID NO: 323057 - DNA, 15 bp, Homo sapiens
gaagactttttttga

SEQ ID NO: 323058 - DNA, 15 bp, Homo sapiens
agaagactttttttg

SEQ ID NO: 323059 - DNA, 15 bp, Homo sapiens
cagaagacttttttt

SEQ ID NO: 323060 - DNA, 15 bp, Homo sapiens
acagaagactttttt

SEQ ID NO: 323061 - DNA, 15 bp, Homo sapiens
aacagaagacttttt

SEQ ID NO: 323062 - DNA, 15 bp, Homo sapiens
gaacagaagactttt

SEQ ID NO: 323063 - DNA, 15 bp, Homo sapiens
tgaacagaagacttt

SEQ ID NO: 323064 - DNA, 15 bp, Homo sapiens
atgaacagaagactt

SEQ ID NO: 323065 - DNA, 15 bp, Homo sapiens
catgaacagaagact

SEQ ID NO: 323066 - DNA, 15 bp, Homo sapiens
tcatgaacagaagac

SEQ ID NO: 323067 - DNA, 15 bp, Homo sapiens
atcatgaacagaaga

SEQ ID NO: 323068 - DNA, 15 bp, Homo sapiens
catcatgaacagaag

SEQ ID NO: 323069 - DNA, 15 bp, Homo sapiens
ccatcatgaacagaa

SEQ ID NO: 323070 - DNA, 15 bp, Homo sapiens
accatcatgaacaga

SEQ ID NO: 323071 - DNA, 15 bp, Homo sapiens
aaccatcatgaacag

SEQ ID NO: 323072 - DNA, 15 bp, Homo sapiens
taaccatcatgaaca

SEQ ID NO: 323073 - DNA, 15 bp, Homo sapiens
ttaaccatcatgaac

SEQ ID NO: 323074 - DNA, 15 bp, Homo sapiens
attaaccatcatgaa

SEQ ID NO: 323075 - DNA, 15 bp, Homo sapiens
gattaaccatcatga

SEQ ID NO: 323076 - DNA, 15 bp, Homo sapiens
ggattaaccatcatg

SEQ ID NO: 323077 - DNA, 15 bp, Homo sapiens
aggattaaccatcat

SEQ ID NO: 323078 - DNA, 15 bp, Homo sapiens
aaggattaaccatca

SEQ ID NO: 323079 - DNA, 15 bp, Homo sapiens
aaaggattaaccatc

SEQ ID NO: 323080 - DNA, 15 bp, Homo sapiens
aaaaggattaaccat

SEQ ID NO: 323081 - DNA, 15 bp, Homo sapiens
gaaaaggattaacca

SEQ ID NO: 323082 - DNA, 15 bp, Homo sapiens
tgaaaaggattaacc

SEQ ID NO: 323083 - DNA, 15 bp, Homo sapiens
ctgaaaaggattaac

SEQ ID NO: 323084 - DNA, 15 bp, Homo sapiens
tctgaaaaggattaa

SEQ ID NO: 323085 - DNA, 15 bp, Homo sapiens
atctgaaaaggatta

SEQ ID NO: 323086 - DNA, 15 bp, Homo sapiens
catctgaaaaggatt

SEQ ID NO: 323087 - DNA, 15 bp, Homo sapiens
tcatctgaaaaggat

SEQ ID NO: 323088 - DNA, 15 bp, Homo sapiens
ctcatctgaaaagga

SEQ ID NO: 323089 - DNA, 15 bp, Homo sapiens
tctcatctgaaaagg

SEQ ID NO: 323090 - DNA, 15 bp, Homo sapiens
ttctcatctgaaaag

SEQ ID NO: 323091 - DNA, 15 bp, Homo sapiens
tttctcatctgaaaa

SEQ ID NO: 323092 - DNA, 15 bp, Homo sapiens
atttctcatctgaaa

SEQ ID NO: 323093 - DNA, 15 bp, Homo sapiens
aatttctcatctgaa

SEQ ID NO: 323094 - DNA, 15 bp, Homo sapiens
taatttctcatctga

SEQ ID NO: 323095 - DNA, 15 bp, Homo sapiens
ataatttctcatctg

SEQ ID NO: 323096 - DNA, 15 bp, Homo sapiens
aataatttctcatct

SEQ ID NO: 323097 - DNA, 15 bp, Homo sapiens
aaataatttctcatc

SEQ ID NO: 323098 - DNA, 15 bp, Homo sapiens
aaaataatttctcat

SEQ ID NO: 323099 - DNA, 15 bp, Homo sapiens
aaaaataatttctca

SEQ ID NO: 323100 - DNA, 15 bp, Homo sapiens
aaaaaataatttctc

SEQ ID NO: 323101 - DNA, 15 bp, Homo sapiens
aaaaaaataatttct

SEQ ID NO: 323102 - DNA, 15 bp, Homo sapiens
caaaaaaataatttc

SEQ ID NO: 323103 - DNA, 15 bp, Homo sapiens
tcaaaaaaataattt

SEQ ID NO: 323104 - DNA, 15 bp, Homo sapiens
ctcaaaaaaataatt

SEQ ID NO: 323105 - DNA, 15 bp, Homo sapiens
gctcaaaaaaataat

SEQ ID NO: 323106 - DNA, 15 bp, Homo sapiens
ggctcaaaaaaataa

SEQ ID NO: 323107 - DNA, 15 bp, Homo sapiens
tggctcaaaaaaata

SEQ ID NO: 323108 - DNA, 15 bp, Homo sapiens
ttggctcaaaaaaat

SEQ ID NO: 323109 - DNA, 15 bp, Homo sapiens
attggctcaaaaaaa

SEQ ID NO: 323110 - DNA, 15 bp, Homo sapiens
gattggctcaaaaaa

SEQ ID NO: 323111 - DNA, 15 bp, Homo sapiens
ggattggctcaaaaa

SEQ ID NO: 323112 - DNA, 15 bp, Homo sapiens
aggattggctcaaaa

SEQ ID NO: 323113 - DNA, 15 bp, Homo sapiens
aaggattggctcaaa

SEQ ID NO: 323114 - DNA, 15 bp, Homo sapiens
aaaggattggctcaa

SEQ ID NO: 323115 - DNA, 15 bp, Homo sapiens
aaaaggattggctca

SEQ ID NO: 323116 - DNA, 15 bp, Homo sapiens
gaaaaggattggctc

SEQ ID NO: 323117 - DNA, 15 bp, Homo sapiens
agaaaaggattggct

SEQ ID NO: 323118 - DNA, 15 bp, Homo sapiens
gagaaaaggattggc

SEQ ID NO: 323119 - DNA, 15 bp, Homo sapiens
ggagaaaaggattgg

SEQ ID NO: 323120 - DNA, 15 bp, Homo sapiens
gggagaaaaggattg

SEQ ID NO: 323121 - DNA, 15 bp, Homo sapiens
agggagaaaaggatt

SEQ ID NO: 323122 - DNA, 15 bp, Homo sapiens
gagggagaaaaggat

SEQ ID NO: 323123 - DNA, 15 bp, Homo sapiens
agagggagaaaagga

SEQ ID NO: 323124 - DNA, 15 bp, Homo sapiens
aagagggagaaaagg

SEQ ID NO: 323125 - DNA, 15 bp, Homo sapiens
aaagagggagaaaag

SEQ ID NO: 323126 - DNA, 15 bp, Homo sapiens
gaaagagggagaaaa

SEQ ID NO: 323127 - DNA, 15 bp, Homo sapiens
ggaaagagggagaaa

SEQ ID NO: 323128 - DNA, 15 bp, Homo sapiens
aggaaagagggagaa

SEQ ID NO: 323129 - DNA, 15 bp, Homo sapiens
aaggaaagagggaga

SEQ ID NO: 323130 - DNA, 15 bp, Homo sapiens
caaggaaagagggag

SEQ ID NO: 323131 - DNA, 15 bp, Homo sapiens
acaaggaaagaggga

SEQ ID NO: 323132 - DNA, 15 bp, Homo sapiens
tacaaggaaagaggg

SEQ ID NO: 323133 - DNA, 15 bp, Homo sapiens
gtacaaggaaagagg

SEQ ID NO: 323134 - DNA, 15 bp, Homo sapiens
tgtacaaggaaagag

SEQ ID NO: 323135 - DNA, 15 bp, Homo sapiens
ctgtacaaggaaaga

SEQ ID NO: 323136 - DNA, 15 bp, Homo sapiens
tctgtacaaggaaag

SEQ ID NO: 323137 - DNA, 15 bp, Homo sapiens
atctgtacaaggaaa

SEQ ID NO: 323138 - DNA, 15 bp, Homo sapiens
aatctgtacaaggaa

SEQ ID NO: 323139 - DNA, 15 bp, Homo sapiens
aaatctgtacaagga

SEQ ID NO: 323140 - DNA, 15 bp, Homo sapiens
aaaatctgtacaagg

SEQ ID NO: 323141 - DNA, 15 bp, Homo sapiens
gaaaatctgtacaag

SEQ ID NO: 323142 - DNA, 15 bp, Homo sapiens
ggaaaatctgtacaa

SEQ ID NO: 323143 - DNA, 15 bp, Homo sapiens
gggaaaatctgtaca

SEQ ID NO: 323144 - DNA, 15 bp, Homo sapiens
ggggaaaatctgtac

SEQ ID NO: 323145 - DNA, 15 bp, Homo sapiens
gggggaaaatctgta

SEQ ID NO: 323146 - DNA, 15 bp, Homo sapiens
tgggggaaaatctgt

SEQ ID NO: 323147 - DNA, 15 bp, Homo sapiens
gtgggggaaaatctg

SEQ ID NO: 323148 - DNA, 15 bp, Homo sapiens
ggtgggggaaaatct

SEQ ID NO: 323149 - DNA, 15 bp, Homo sapiens
gggtgggggaaaatc

SEQ ID NO: 323150 - DNA, 15 bp, Homo sapiens
ggggtgggggaaaat

SEQ ID NO: 323151 - DNA, 15 bp, Homo sapiens
tggggtgggggaaaa

SEQ ID NO: 323152 - DNA, 15 bp, Homo sapiens
atggggtgggggaaa

SEQ ID NO: 323153 - DNA, 15 bp, Homo sapiens
catggggtgggggaa

SEQ ID NO: 323154 - DNA, 15 bp, Homo sapiens
tcatggggtggggga

SEQ ID NO: 323155 - DNA, 15 bp, Homo sapiens
ttcatggggtggggg

SEQ ID NO: 323156 - DNA, 15 bp, Homo sapiens
gttcatggggtgggg

SEQ ID NO: 323157 - DNA, 15 bp, Homo sapiens
agttcatggggtggg

SEQ ID NO: 323158 - DNA, 15 bp, Homo sapiens
aagttcatggggtgg

SEQ ID NO: 323159 - DNA, 15 bp, Homo sapiens
aaagttcatggggtg

SEQ ID NO: 323160 - DNA, 15 bp, Homo sapiens
taaagttcatggggt

SEQ ID NO: 323161 - DNA, 15 bp, Homo sapiens
ttaaagttcatgggg

SEQ ID NO: 323162 - DNA, 15 bp, Homo sapiens
cttaaagttcatggg

SEQ ID NO: 323163 - DNA, 15 bp, Homo sapiens
acttaaagttcatgg

SEQ ID NO: 323164 - DNA, 15 bp, Homo sapiens
aacttaaagttcatg

SEQ ID NO: 323165 - DNA, 15 bp, Homo sapiens
taacttaaagttcat

SEQ ID NO: 323166 - DNA, 15 bp, Homo sapiens
ttaacttaaagttca

SEQ ID NO: 323167 - DNA, 15 bp, Homo sapiens
attaacttaaagttc

SEQ ID NO: 323168 - DNA, 15 bp, Homo sapiens
aattaacttaaagtt

SEQ ID NO: 323169 - DNA, 15 bp, Homo sapiens
aaattaacttaaagt

SEQ ID NO: 323170 - DNA, 15 bp, Homo sapiens
aaaattaacttaaag

SEQ ID NO: 323171 - DNA, 15 bp, Homo sapiens
gaaaattaacttaaa

SEQ ID NO: 323172 - DNA, 15 bp, Homo sapiens
ggaaaattaacttaa

SEQ ID NO: 323173 - DNA, 15 bp, Homo sapiens
gggaaaattaactta

SEQ ID NO: 323174 - DNA, 15 bp, Homo sapiens
agggaaaattaactt

SEQ ID NO: 323175 - DNA, 15 bp, Homo sapiens
aagggaaaattaact

SEQ ID NO: 323176 - DNA, 15 bp, Homo sapiens
taagggaaaattaac

SEQ ID NO: 323177 - DNA, 15 bp, Homo sapiens
ataagggaaaattaa

SEQ ID NO: 323178 - DNA, 15 bp, Homo sapiens
aataagggaaaatta

SEQ ID NO: 323179 - DNA, 15 bp, Homo sapiens
taataagggaaaatt

SEQ ID NO: 323180 - DNA, 15 bp, Homo sapiens
gtaataagggaaaat

SEQ ID NO: 323181 - DNA, 15 bp, Homo sapiens
ggtaataagggaaaa

SEQ ID NO: 323182 - DNA, 15 bp, Homo sapiens
aggtaataagggaaa

SEQ ID NO: 323183 - DNA, 15 bp, Homo sapiens
taggtaataagggaa

SEQ ID NO: 323184 - DNA, 15 bp, Homo sapiens
ttaggtaataaggga

SEQ ID NO: 323185 - DNA, 15 bp, Homo sapiens
tttaggtaataaggg

SEQ ID NO: 323186 - DNA, 15 bp, Homo sapiens
gtttaggtaataagg

SEQ ID NO: 323187 - DNA, 15 bp, Homo sapiens
tgtttaggtaataag

SEQ ID NO: 323188 - DNA, 15 bp, Homo sapiens
ctgtttaggtaataa

SEQ ID NO: 323189 - DNA, 15 bp, Homo sapiens
gctgtttaggtaata

SEQ ID NO: 323190 - DNA, 15 bp, Homo sapiens
agctgtttaggtaat

SEQ ID NO: 323191 - DNA, 15 bp, Homo sapiens
gagctgtttaggtaa

SEQ ID NO: 323192 - DNA, 15 bp, Homo sapiens
ggagctgtttaggta

SEQ ID NO: 323193 - DNA, 15 bp, Homo sapiens
tggagctgtttaggt

SEQ ID NO: 323194 - DNA, 15 bp, Homo sapiens
gtggagctgtttagg

SEQ ID NO: 323195 - DNA, 15 bp, Homo sapiens
cgtggagctgtttag

SEQ ID NO: 323196 - DNA, 15 bp, Homo sapiens
acgtggagctgttta

SEQ ID NO: 323197 - DNA, 15 bp, Homo sapiens
aacgtggagctgttt

SEQ ID NO: 323198 - DNA, 15 bp, Homo sapiens
caacgtggagctgtt

SEQ ID NO: 323199 - DNA, 15 bp, Homo sapiens
gcaacgtggagctgt

SEQ ID NO: 323200 - DNA, 15 bp, Homo sapiens
cgcaacgtggagctg

SEQ ID NO: 323201 - DNA, 15 bp, Homo sapiens
acgcaacgtggagct

SEQ ID NO: 323202 - DNA, 15 bp, Homo sapiens
cacgcaacgtggagc

SEQ ID NO: 323203 - DNA, 15 bp, Homo sapiens
gcacgcaacgtggag

SEQ ID NO: 323204 - DNA, 15 bp, Homo sapiens
tgcacgcaacgtgga

SEQ ID NO: 323205 - DNA, 15 bp, Homo sapiens
ctgcacgcaacgtgg

SEQ ID NO: 323206 - DNA, 15 bp, Homo sapiens
actgcacgcaacgtg

SEQ ID NO: 323207 - DNA, 15 bp, Homo sapiens
aactgcacgcaacgt

SEQ ID NO: 323208 - DNA, 15 bp, Homo sapiens
taactgcacgcaacg

SEQ ID NO: 323209 - DNA, 15 bp, Homo sapiens
ctaactgcacgcaac

SEQ ID NO: 323210 - DNA, 15 bp, Homo sapiens
actaactgcacgcaa

SEQ ID NO: 323211 - DNA, 15 bp, Homo sapiens
cactaactgcacgca

SEQ ID NO: 323212 - DNA, 15 bp, Homo sapiens
acactaactgcacgc

SEQ ID NO: 323213 - DNA, 15 bp, Homo sapiens
tacactaactgcacg

SEQ ID NO: 323214 - DNA, 15 bp, Homo sapiens
gtacactaactgcac

SEQ ID NO: 323215 - DNA, 15 bp, Homo sapiens
agtacactaactgca

SEQ ID NO: 323216 - DNA, 15 bp, Homo sapiens
gagtacactaactgc

SEQ ID NO: 323217 - DNA, 15 bp, Homo sapiens
ggagtacactaactg

SEQ ID NO: 323218 - DNA, 15 bp, Homo sapiens
aggagtacactaact

SEQ ID NO: 323219 - DNA, 15 bp, Homo sapiens
gaggagtacactaac

SEQ ID NO: 323220 - DNA, 15 bp, Homo sapiens
tgaggagtacactaa

SEQ ID NO: 323221 - DNA, 15 bp, Homo sapiens
atgaggagtacacta

SEQ ID NO: 323222 - DNA, 15 bp, Homo sapiens
aatgaggagtacact

SEQ ID NO: 323223 - DNA, 15 bp, Homo sapiens
gaatgaggagtacac

SEQ ID NO: 323224 - DNA, 15 bp, Homo sapiens
tgaatgaggagtaca

SEQ ID NO: 323225 - DNA, 15 bp, Homo sapiens
ttgaatgaggagtac

SEQ ID NO: 323226 - DNA, 15 bp, Homo sapiens
cttgaatgaggagta

SEQ ID NO: 323227 - DNA, 15 bp, Homo sapiens
acttgaatgaggagt

SEQ ID NO: 323228 - DNA, 15 bp, Homo sapiens
tacttgaatgaggag

SEQ ID NO: 323229 - DNA, 15 bp, Homo sapiens
ctacttgaatgagga

SEQ ID NO: 323230 - DNA, 15 bp, Homo sapiens
tctacttgaatgagg

SEQ ID NO: 323231 - DNA, 15 bp, Homo sapiens
ttctacttgaatgag

SEQ ID NO: 323232 - DNA, 15 bp, Homo sapiens
cttctacttgaatga

SEQ ID NO: 323233 - DNA, 15 bp, Homo sapiens
ccttctacttgaatg

SEQ ID NO: 323234 - DNA, 15 bp, Homo sapiens
accttctacttgaat

SEQ ID NO: 323235 - DNA, 15 bp, Homo sapiens
taccttctacttgaa

SEQ ID NO: 323236 - DNA, 15 bp, Homo sapiens
ctaccttctacttga

SEQ ID NO: 323237 - DNA, 15 bp, Homo sapiens
actaccttctacttg

SEQ ID NO: 323238 - DNA, 15 bp, Homo sapiens
tactaccttctactt

SEQ ID NO: 323239 - DNA, 15 bp, Homo sapiens
ttactaccttctact

SEQ ID NO: 323240 - DNA, 15 bp, Homo sapiens
cttactaccttctac

SEQ ID NO: 323241 - DNA, 15 bp, Homo sapiens
ccttactaccttcta

SEQ ID NO: 323242 - DNA, 15 bp, Homo sapiens
tccttactaccttct

SEQ ID NO: 323243 - DNA, 15 bp, Homo sapiens
atccttactaccttc

SEQ ID NO: 323244 - DNA, 15 bp, Homo sapiens
aatccttactacctt

SEQ ID NO: 323245 - DNA, 15 bp, Homo sapiens
gaatccttactacct

SEQ ID NO: 323246 - DNA, 15 bp, Homo sapiens
ggaatccttactacc

SEQ ID NO: 323247 - DNA, 15 bp, Homo sapiens
aggaatccttactac

SEQ ID NO: 323248 - DNA, 15 bp, Homo sapiens
aaggaatccttacta

SEQ ID NO: 323249 - DNA, 15 bp, Homo sapiens
gaaggaatccttact

SEQ ID NO: 323250 - DNA, 15 bp, Homo sapiens
ggaaggaatccttac

SEQ ID NO: 323251 - DNA, 15 bp, Homo sapiens
gggaaggaatcctta

SEQ ID NO: 323252 - DNA, 15 bp, Homo sapiens
tgggaaggaatcctt

SEQ ID NO: 323253 - DNA, 15 bp, Homo sapiens
gtgggaaggaatcct

SEQ ID NO: 323254 - DNA, 15 bp, Homo sapiens
ggtgggaaggaatcc

SEQ ID NO: 323255 - DNA, 15 bp, Homo sapiens
tggtgggaaggaatc

SEQ ID NO: 323256 - DNA, 15 bp, Homo sapiens
gtggtgggaaggaat

SEQ ID NO: 323257 - DNA, 15 bp, Homo sapiens
agtggtgggaaggaa

SEQ ID NO: 323258 - DNA, 15 bp, Homo sapiens
cagtggtgggaagga

SEQ ID NO: 323259 - DNA, 15 bp, Homo sapiens
acagtggtgggaagg

SEQ ID NO: 323260 - DNA, 15 bp, Homo sapiens
cacagtggtgggaag

SEQ ID NO: 323261 - DNA, 15 bp, Homo sapiens
gcacagtggtgggaa

SEQ ID NO: 323262 - DNA, 15 bp, Homo sapiens
ggcacagtggtggga

SEQ ID NO: 323263 - DNA, 15 bp, Homo sapiens
gggcacagtggtggg

SEQ ID NO: 323264 - DNA, 15 bp, Homo sapiens
agggcacagtggtgg

SEQ ID NO: 323265 - DNA, 15 bp, Homo sapiens
tagggcacagtggtg

SEQ ID NO: 323266 - DNA, 15 bp, Homo sapiens
ctagggcacagtggt

SEQ ID NO: 323267 - DNA, 15 bp, Homo sapiens
cctagggcacagtgg

SEQ ID NO: 323268 - DNA, 15 bp, Homo sapiens
gcctagggcacagtg

SEQ ID NO: 323269 - DNA, 15 bp, Homo sapiens
agcctagggcacagt

SEQ ID NO: 323270 - DNA, 15 bp, Homo sapiens
cagcctagggcacag

SEQ ID NO: 323271 - DNA, 15 bp, Homo sapiens
gcagcctagggcaca

SEQ ID NO: 323272 - DNA, 15 bp, Homo sapiens
ggcagcctagggcac

SEQ ID NO: 323273 - DNA, 15 bp, Homo sapiens
gggcagcctagggca

SEQ ID NO: 323274 - DNA, 15 bp, Homo sapiens
agggcagcctagggc

SEQ ID NO: 323275 - DNA, 15 bp, Homo sapiens
aagggcagcctaggg

SEQ ID NO: 323276 - DNA, 15 bp, Homo sapiens
aaagggcagcctagg

SEQ ID NO: 323277 - DNA, 15 bp, Homo sapiens
taaagggcagcctag

SEQ ID NO: 323278 - DNA, 15 bp, Homo sapiens
gtaaagggcagccta

SEQ ID NO: 323279 - DNA, 15 bp, Homo sapiens
agtaaagggcagcct

SEQ ID NO: 323280 - DNA, 15 bp, Homo sapiens
cagtaaagggcagcc

SEQ ID NO: 323281 - DNA, 15 bp, Homo sapiens
ccagtaaagggcagc

SEQ ID NO: 323282 - DNA, 15 bp, Homo sapiens
gccagtaaagggcag

SEQ ID NO: 323283 - DNA, 15 bp, Homo sapiens
agccagtaaagggca

SEQ ID NO: 323284 - DNA, 15 bp, Homo sapiens
gagccagtaaagggc

SEQ ID NO: 323285 - DNA, 15 bp, Homo sapiens
tgagccagtaaaggg

SEQ ID NO: 323286 - DNA, 15 bp, Homo sapiens
gtgagccagtaaagg

SEQ ID NO: 323287 - DNA, 15 bp, Homo sapiens
cgtgagccagtaaag

SEQ ID NO: 323288 - DNA, 15 bp, Homo sapiens
ccgtgagccagtaaa

SEQ ID NO: 323289 - DNA, 15 bp, Homo sapiens
cccgtgagccagtaa

SEQ ID NO: 323290 - DNA, 15 bp, Homo sapiens
gcccgtgagccagta

SEQ ID NO: 323291 - DNA, 15 bp, Homo sapiens
cgcccgtgagccagt

SEQ ID NO: 323292 - DNA, 15 bp, Homo sapiens
acgcccgtgagccag

SEQ ID NO: 323293 - DNA, 15 bp, Homo sapiens
cacgcccgtgagcca

SEQ ID NO: 323294 - DNA, 15 bp, Homo sapiens
ccacgcccgtgagcc

SEQ ID NO: 323295 - DNA, 15 bp, Homo sapiens
cccacgcccgtgagc

SEQ ID NO: 323296 - DNA, 15 bp, Homo sapiens
tcccacgcccgtgag

SEQ ID NO: 323297 - DNA, 15 bp, Homo sapiens
ctcccacgcccgtga

SEQ ID NO: 323298 - DNA, 15 bp, Homo sapiens
tctcccacgcccgtg

SEQ ID NO: 323299 - DNA, 15 bp, Homo sapiens
ttctcccacgcccgt

SEQ ID NO: 323300 - DNA, 15 bp, Homo sapiens
gttctcccacgcccg

SEQ ID NO: 323301 - DNA, 15 bp, Homo sapiens
tgttctcccacgccc

SEQ ID NO: 323302 - DNA, 15 bp, Homo sapiens
ttgttctcccacgcc

SEQ ID NO: 323303 - DNA, 15 bp, Homo sapiens
tttgttctcccacgc

SEQ ID NO: 323304 - DNA, 15 bp, Homo sapiens
ctttgttctcccacg

SEQ ID NO: 323305 - DNA, 15 bp, Homo sapiens
gctttgttctcccac

SEQ ID NO: 323306 - DNA, 15 bp, Homo sapiens
ggctttgttctccca

SEQ ID NO: 323307 - DNA, 15 bp, Homo sapiens
gggctttgttctccc

SEQ ID NO: 323308 - DNA, 15 bp, Homo sapiens
ggggctttgttctcc

SEQ ID NO: 323309 - DNA, 15 bp, Homo sapiens
tggggctttgttctc

SEQ ID NO: 323310 - DNA, 15 bp, Homo sapiens
gtggggctttgttct

SEQ ID NO: 323311 - DNA, 15 bp, Homo sapiens
ggtggggctttgttc

SEQ ID NO: 323312 - DNA, 15 bp, Homo sapiens
gggtggggctttgtt

SEQ ID NO: 323313 - DNA, 15 bp, Homo sapiens
tgggtggggctttgt

SEQ ID NO: 323314 - DNA, 15 bp, Homo sapiens
gtgggtggggctttg

SEQ ID NO: 323315 - DNA, 15 bp, Homo sapiens
cgtgggtggggcttt

SEQ ID NO: 323316 - DNA, 15 bp, Homo sapiens
ccgtgggtggggctt

SEQ ID NO: 323317 - DNA, 15 bp, Homo sapiens
cccgtgggtggggct

SEQ ID NO: 323318 - DNA, 15 bp, Homo sapiens
gcccgtgggtggggc

SEQ ID NO: 323319 - DNA, 15 bp, Homo sapiens
cgcccgtgggtgggg

SEQ ID NO: 323320 - DNA, 15 bp, Homo sapiens
acgcccgtgggtggg

SEQ ID NO: 323321 - DNA, 15 bp, Homo sapiens
cacgcccgtgggtgg

SEQ ID NO: 323322 - DNA, 15 bp, Homo sapiens
ccacgcccgtgggtg

SEQ ID NO: 323323 - DNA, 15 bp, Homo sapiens
tccacgcccgtgggt

SEQ ID NO: 323324 - DNA, 15 bp, Homo sapiens
ctccacgcccgtggg

SEQ ID NO: 323325 - DNA, 15 bp, Homo sapiens
actccacgcccgtgg

SEQ ID NO: 323326 - DNA, 15 bp, Homo sapiens
aactccacgcccgtg

SEQ ID NO: 323327 - DNA, 15 bp, Homo sapiens
caactccacgcccgt

SEQ ID NO: 323328 - DNA, 15 bp, Homo sapiens
acaactccacgcccg

SEQ ID NO: 323329 - DNA, 15 bp, Homo sapiens
gacaactccacgccc

SEQ ID NO: 323330 - DNA, 15 bp, Homo sapiens
agacaactccacgcc

SEQ ID NO: 323331 - DNA, 15 bp, Homo sapiens
cagacaactccacgc

SEQ ID NO: 323332 - DNA, 15 bp, Homo sapiens
acagacaactccacg

SEQ ID NO: 323333 - DNA, 15 bp, Homo sapiens
gacagacaactccac

SEQ ID NO: 323334 - DNA, 15 bp, Homo sapiens
tgacagacaactcca

SEQ ID NO: 323335 - DNA, 15 bp, Homo sapiens
ttgacagacaactcc

SEQ ID NO: 323336 - DNA, 15 bp, Homo sapiens
gttgacagacaactc

SEQ ID NO: 323337 - DNA, 15 bp, Homo sapiens
agttgacagacaact

SEQ ID NO: 323338 - DNA, 15 bp, Homo sapiens
gagttgacagacaac

SEQ ID NO: 323339 - DNA, 15 bp, Homo sapiens
tgagttgacagacaa

SEQ ID NO: 323340 - DNA, 15 bp, Homo sapiens
ctgagttgacagaca

SEQ ID NO: 323341 - DNA, 15 bp, Homo sapiens
actgagttgacagac

SEQ ID NO: 323342 - DNA, 15 bp, Homo sapiens
cactgagttgacaga

SEQ ID NO: 323343 - DNA, 15 bp, Homo sapiens
gcactgagttgacag

SEQ ID NO: 323344 - DNA, 15 bp, Homo sapiens
tgcactgagttgaca

SEQ ID NO: 323345 - DNA, 15 bp, Homo sapiens
gtgcactgagttgac

SEQ ID NO: 323346 - DNA, 15 bp, Homo sapiens
agtgcactgagttga

SEQ ID NO: 323347 - DNA, 15 bp, Homo sapiens
cagtgcactgagttg

SEQ ID NO: 323348 - DNA, 15 bp, Homo sapiens
ccagtgcactgagtt

SEQ ID NO: 323349 - DNA, 15 bp, Homo sapiens
tccagtgcactgagt

SEQ ID NO: 323350 - DNA, 15 bp, Homo sapiens
ctccagtgcactgag

SEQ ID NO: 323351 - DNA, 15 bp, Homo sapiens
cctccagtgcactga

SEQ ID NO: 323352 - DNA, 15 bp, Homo sapiens
ccctccagtgcactg

SEQ ID NO: 323353 - DNA, 15 bp, Homo sapiens
gccctccagtgcact

SEQ ID NO: 323354 - DNA, 15 bp, Homo sapiens
agccctccagtgcac

SEQ ID NO: 323355 - DNA, 15 bp, Homo sapiens
aagccctccagtgca

SEQ ID NO: 323356 - DNA, 15 bp, Homo sapiens
gaagccctccagtgc

SEQ ID NO: 323357 - DNA, 15 bp, Homo sapiens
cgaagccctccagtg

SEQ ID NO: 323358 - DNA, 15 bp, Homo sapiens
gcgaagccctccagt

SEQ ID NO: 323359 - DNA, 15 bp, Homo sapiens
tgcgaagccctccag

SEQ ID NO: 323360 - DNA, 15 bp, Homo sapiens
gtgcgaagccctcca

SEQ ID NO: 323361 - DNA, 15 bp, Homo sapiens
agtgcgaagccctcc

SEQ ID NO: 323362 - DNA, 15 bp, Homo sapiens
cagtgcgaagccctc

SEQ ID NO: 323363 - DNA, 15 bp, Homo sapiens
gcagtgcgaagccct

SEQ ID NO: 323364 - DNA, 15 bp, Homo sapiens
ggcagtgcgaagccc

SEQ ID NO: 323365 - DNA, 15 bp, Homo sapiens
aggcagtgcgaagcc

SEQ ID NO: 323366 - DNA, 15 bp, Homo sapiens
aaggcagtgcgaagc

SEQ ID NO: 323367 - DNA, 15 bp, Homo sapiens
aaaggcagtgcgaag

SEQ ID NO: 323368 - DNA, 15 bp, Homo sapiens
caaaggcagtgcgaa

SEQ ID NO: 323369 - DNA, 15 bp, Homo sapiens
ccaaaggcagtgcga

SEQ ID NO: 323370 - DNA, 15 bp, Homo sapiens
gccaaaggcagtgcg

SEQ ID NO: 323371 - DNA, 15 bp, Homo sapiens
tgccaaaggcagtgc

SEQ ID NO: 323372 - DNA, 15 bp, Homo sapiens
gtgccaaaggcagtg

SEQ ID NO: 323373 - DNA, 15 bp, Homo sapiens
cgtgccaaaggcagt

SEQ ID NO: 323374 - DNA, 15 bp, Homo sapiens
acgtgccaaaggcag

SEQ ID NO: 323375 - DNA, 15 bp, Homo sapiens
cacgtgccaaaggca

SEQ ID NO: 323376 - DNA, 15 bp, Homo sapiens
ccacgtgccaaaggc

SEQ ID NO: 323377 - DNA, 15 bp, Homo sapiens
gccacgtgccaaagg

SEQ ID NO: 323378 - DNA, 15 bp, Homo sapiens
cgccacgtgccaaag

SEQ ID NO: 323379 - DNA, 15 bp, Homo sapiens
ccgccacgtgccaaa

SEQ ID NO: 323380 - DNA, 15 bp, Homo sapiens
accgccacgtgccaa

SEQ ID NO: 323381 - DNA, 15 bp, Homo sapiens
caccgccacgtgcca

SEQ ID NO: 323382 - DNA, 15 bp, Homo sapiens
gcaccgccacgtgcc

SEQ ID NO: 323383 - DNA, 15 bp, Homo sapiens
agcaccgccacgtgc

SEQ ID NO: 323384 - DNA, 15 bp, Homo sapiens
aagcaccgccacgtg

SEQ ID NO: 323385 - DNA, 15 bp, Homo sapiens
taagcaccgccacgt

SEQ ID NO: 323386 - DNA, 15 bp, Homo sapiens
ttaagcaccgccacg

SEQ ID NO: 323387 - DNA, 15 bp, Homo sapiens
attaagcaccgccac

SEQ ID NO: 323388 - DNA, 15 bp, Homo sapiens
tattaagcaccgcca

SEQ ID NO: 323389 - DNA, 15 bp, Homo sapiens
ttattaagcaccgcc

SEQ ID NO: 323390 - DNA, 15 bp, Homo sapiens
tttattaagcaccgc

SEQ ID NO: 323391 - DNA, 15 bp, Homo sapiens
ttttattaagcaccg

SEQ ID NO: 323392 - DNA, 15 bp, Homo sapiens
attttattaagcacc

SEQ ID NO: 323393 - DNA, 15 bp, Homo sapiens
cattttattaagcac

SEQ ID NO: 323394 - DNA, 15 bp, Homo sapiens
gcattttattaagca

SEQ ID NO: 323395 - DNA, 15 bp, Homo sapiens
agcattttattaagc

SEQ ID NO: 323396 - DNA, 15 bp, Homo sapiens
aagcattttattaag

SEQ ID NO: 323397 - DNA, 15 bp, Homo sapiens
gaagcattttattaa

SEQ ID NO: 323398 - DNA, 15 bp, Homo sapiens
agaagcattttatta

SEQ ID NO: 323399 - DNA, 15 bp, Homo sapiens
tagaagcattttatt

SEQ ID NO: 323400 - DNA, 15 bp, Homo sapiens
ctagaagcattttat

SEQ ID NO: 323401 - DNA, 15 bp, Homo sapiens
tctagaagcatttta

SEQ ID NO: 323402 - DNA, 15 bp, Homo sapiens
ttctagaagcatttt

SEQ ID NO: 323403 - DNA, 15 bp, Homo sapiens
tttctagaagcattt

SEQ ID NO: 323404 - DNA, 15 bp, Homo sapiens
ctttctagaagcatt

SEQ ID NO: 323405 - DNA, 15 bp, Homo sapiens
actttctagaagcat

SEQ ID NO: 323406 - DNA, 15 bp, Homo sapiens
gactttctagaagca

SEQ ID NO: 323407 - DNA, 15 bp, Homo sapiens
agactttctagaagc

SEQ ID NO: 323408 - DNA, 15 bp, Homo sapiens
cagactttctagaag

SEQ ID NO: 323409 - DNA, 15 bp, Homo sapiens
gcagactttctagaa

SEQ ID NO: 323410 - DNA, 15 bp, Homo sapiens
tgcagactttctaga

SEQ ID NO: 323411 - DNA, 15 bp, Homo sapiens
ttgcagactttctag

SEQ ID NO: 323412 - DNA, 15 bp, Homo sapiens
tttgcagactttcta

SEQ ID NO: 323413 - DNA, 15 bp, Homo sapiens
ttttgcagactttct

SEQ ID NO: 323414 - DNA, 15 bp, Homo sapiens
cttttgcagactttc

SEQ ID NO: 323415 - DNA, 15 bp, Homo sapiens
tcttttgcagacttt

SEQ ID NO: 323416 - DNA, 15 bp, Homo sapiens
ttcttttgcagactt

SEQ ID NO: 323417 - DNA, 15 bp, Homo sapiens
tttcttttgcagact

SEQ ID NO: 323418 - DNA, 15 bp, Homo sapiens
ttttcttttgcagac

SEQ ID NO: 323419 - DNA, 15 bp, Homo sapiens
attttcttttgcaga

SEQ ID NO: 323420 - DNA, 15 bp, Homo sapiens
gattttcttttgcag

SEQ ID NO: 323421 - DNA, 15 bp, Homo sapiens
ggattttcttttgca

SEQ ID NO: 323422 - DNA, 15 bp, Homo sapiens
gggattttcttttgc

SEQ ID NO: 323423 - DNA, 15 bp, Homo sapiens
ggggattttcttttg

SEQ ID NO: 323424 - DNA, 15 bp, Homo sapiens
aggggattttctttt

SEQ ID NO: 323425 - DNA, 15 bp, Homo sapiens
aaggggattttcttt

SEQ ID NO: 323426 - DNA, 15 bp, Homo sapiens
caaggggattttctt

SEQ ID NO: 323427 - DNA, 15 bp, Homo sapiens
ccaaggggattttct

SEQ ID NO: 323428 - DNA, 15 bp, Homo sapiens
cccaaggggattttc

SEQ ID NO: 323429 - DNA, 15 bp, Homo sapiens
tcccaaggggatttt

SEQ ID NO: 323430 - DNA, 15 bp, Homo sapiens
ctcccaaggggattt

SEQ ID NO: 323431 - DNA, 15 bp, Homo sapiens
actcccaaggggatt

SEQ ID NO: 323432 - DNA, 15 bp, Homo sapiens
cactcccaaggggat

SEQ ID NO: 323433 - DNA, 15 bp, Homo sapiens
ccactcccaagggga

SEQ ID NO: 323434 - DNA, 15 bp, Homo sapiens
cccactcccaagggg

SEQ ID NO: 323435 - DNA, 15 bp, Homo sapiens
acccactcccaaggg

SEQ ID NO: 323436 - DNA, 15 bp, Homo sapiens
cacccactcccaagg

SEQ ID NO: 323437 - DNA, 15 bp, Homo sapiens
acacccactcccaag

SEQ ID NO: 323438 - DNA, 15 bp, Homo sapiens
cacacccactcccaa

SEQ ID NO: 323439 - DNA, 15 bp, Homo sapiens
tcacacccactccca

SEQ ID NO: 323440 - DNA, 15 bp, Homo sapiens
gtcacacccactccc

SEQ ID NO: 323441 - DNA, 15 bp, Homo sapiens
tgtcacacccactcc

SEQ ID NO: 323442 - DNA, 15 bp, Homo sapiens
atgtcacacccactc

SEQ ID NO: 323443 - DNA, 15 bp, Homo sapiens
aatgtcacacccact

SEQ ID NO: 323444 - DNA, 15 bp, Homo sapiens
gaatgtcacacccac

SEQ ID NO: 323445 - DNA, 15 bp, Homo sapiens
tgaatgtcacaccca

SEQ ID NO: 323446 - DNA, 15 bp, Homo sapiens
ttgaatgtcacaccc

SEQ ID NO: 323447 - DNA, 15 bp, Homo sapiens
attgaatgtcacacc

SEQ ID NO: 323448 - DNA, 15 bp, Homo sapiens
cattgaatgtcacac

SEQ ID NO: 323449 - DNA, 15 bp, Homo sapiens
acattgaatgtcaca

SEQ ID NO: 323450 - DNA, 15 bp, Homo sapiens
cacattgaatgtcac

SEQ ID NO: 323451 - DNA, 15 bp, Homo sapiens
acacattgaatgtca

SEQ ID NO: 323452 - DNA, 15 bp, Homo sapiens
gacacattgaatgtc

SEQ ID NO: 323453 - DNA, 15 bp, Homo sapiens
agacacattgaatgt

SEQ ID NO: 323454 - DNA, 15 bp, Homo sapiens
gagacacattgaatg

SEQ ID NO: 323455 - DNA, 15 bp, Homo sapiens
tgagacacattgaat

SEQ ID NO: 323456 - DNA, 15 bp, Homo sapiens
ttgagacacattgaa

SEQ ID NO: 323457 - DNA, 15 bp, Homo sapiens
tttgagacacattga

SEQ ID NO: 323458 - DNA, 15 bp, Homo sapiens
ctttgagacacattg

SEQ ID NO: 323459 - DNA, 15 bp, Homo sapiens
gctttgagacacatt

SEQ ID NO: 323460 - DNA, 15 bp, Homo sapiens
cgctttgagacacat

SEQ ID NO: 323461 - DNA, 15 bp, Homo sapiens
ccgctttgagacaca

SEQ ID NO: 323462 - DNA, 15 bp, Homo sapiens
accgctttgagacac

SEQ ID NO: 323463 - DNA, 15 bp, Homo sapiens
caccgctttgagaca

SEQ ID NO: 323464 - DNA, 15 bp, Homo sapiens
tcaccgctttgagac

SEQ ID NO: 323465 - DNA, 15 bp, Homo sapiens
gtcaccgctttgaga

SEQ ID NO: 323466 - DNA, 15 bp, Homo sapiens
tgtcaccgctttgag

SEQ ID NO: 323467 - DNA, 15 bp, Homo sapiens
ttgtcaccgctttga

SEQ ID NO: 323468 - DNA, 15 bp, Homo sapiens
tttgtcaccgctttg

SEQ ID NO: 323469 - DNA, 15 bp, Homo sapiens
gtttgtcaccgcttt

SEQ ID NO: 323470 - DNA, 15 bp, Homo sapiens
ggtttgtcaccgctt

SEQ ID NO: 323471 - DNA, 15 bp, Homo sapiens
tggtttgtcaccgct

SEQ ID NO: 323472 - DNA, 15 bp, Homo sapiens
ctggtttgtcaccgc

SEQ ID NO: 323473 - DNA, 15 bp, Homo sapiens
gctggtttgtcaccg

SEQ ID NO: 323474 - DNA, 15 bp, Homo sapiens
tgctggtttgtcacc

SEQ ID NO: 323475 - DNA, 15 bp, Homo sapiens
atgctggtttgtcac

SEQ ID NO: 323476 - DNA, 15 bp, Homo sapiens
aatgctggtttgtca

SEQ ID NO: 323477 - DNA, 15 bp, Homo sapiens
aaatgctggtttgtc

SEQ ID NO: 323478 - DNA, 15 bp, Homo sapiens
aaaatgctggtttgt

SEQ ID NO: 323479 - DNA, 15 bp, Homo sapiens
caaaatgctggtttg

SEQ ID NO: 323480 - DNA, 15 bp, Homo sapiens
acaaaatgctggttt

SEQ ID NO: 323481 - DNA, 15 bp, Homo sapiens
tacaaaatgctggtt

SEQ ID NO: 323482 - DNA, 15 bp, Homo sapiens
ttacaaaatgctggt

SEQ ID NO: 323483 - DNA, 15 bp, Homo sapiens
cttacaaaatgctgg

SEQ ID NO: 323484 - DNA, 15 bp, Homo sapiens
acttacaaaatgctg

SEQ ID NO: 323485 - DNA, 15 bp, Homo sapiens
tacttacaaaatgct

SEQ ID NO: 323486 - DNA, 15 bp, Homo sapiens
ttacttacaaaatgc

SEQ ID NO: 323487 - DNA, 15 bp, Homo sapiens
attacttacaaaatg

SEQ ID NO: 323488 - DNA, 15 bp, Homo sapiens
aattacttacaaaat

SEQ ID NO: 323489 - DNA, 15 bp, Homo sapiens
gaattacttacaaaa

SEQ ID NO: 323490 - DNA, 15 bp, Homo sapiens
ggaattacttacaaa

SEQ ID NO: 323491 - DNA, 15 bp, Homo sapiens
gggaattacttacaa

SEQ ID NO: 323492 - DNA, 15 bp, Homo sapiens
agggaattacttaca

SEQ ID NO: 323493 - DNA, 15 bp, Homo sapiens
aagggaattacttac

SEQ ID NO: 323494 - DNA, 15 bp, Homo sapiens
caagggaattactta

SEQ ID NO: 323495 - DNA, 15 bp, Homo sapiens
gcaagggaattactt

SEQ ID NO: 323496 - DNA, 15 bp, Homo sapiens
tgcaagggaattact

SEQ ID NO: 323497 - DNA, 15 bp, Homo sapiens
atgcaagggaattac

SEQ ID NO: 323498 - DNA, 15 bp, Homo sapiens
catgcaagggaatta

SEQ ID NO: 323499 - DNA, 15 bp, Homo sapiens
tcatgcaagggaatt

SEQ ID NO: 323500 - DNA, 15 bp, Homo sapiens
atcatgcaagggaat

SEQ ID NO: 323501 - DNA, 15 bp, Homo sapiens
tatcatgcaagggaa

SEQ ID NO: 323502 - DNA, 15 bp, Homo sapiens
ctatcatgcaaggga

SEQ ID NO: 323503 - DNA, 15 bp, Homo sapiens
gctatcatgcaaggg

SEQ ID NO: 323504 - DNA, 15 bp, Homo sapiens
ggctatcatgcaagg

SEQ ID NO: 323505 - DNA, 15 bp, Homo sapiens
tggctatcatgcaag

SEQ ID NO: 323506 - DNA, 15 bp, Homo sapiens
ttggctatcatgcaa

SEQ ID NO: 323507 - DNA, 15 bp, Homo sapiens
tttggctatcatgca

SEQ ID NO: 323508 - DNA, 15 bp, Homo sapiens
atttggctatcatgc

SEQ ID NO: 323509 - DNA, 15 bp, Homo sapiens
aatttggctatcatg

SEQ ID NO: 323510 - DNA, 15 bp, Homo sapiens
taatttggctatcat

SEQ ID NO: 323511 - DNA, 15 bp, Homo sapiens
ataatttggctatca

SEQ ID NO: 323512 - DNA, 15 bp, Homo sapiens
aataatttggctatc

SEQ ID NO: 323513 - DNA, 15 bp, Homo sapiens
taataatttggctat

SEQ ID NO: 323514 - DNA, 15 bp, Homo sapiens
ataataatttggcta

SEQ ID NO: 323515 - DNA, 15 bp, Homo sapiens
tataataatttggct

SEQ ID NO: 323516 - DNA, 15 bp, Homo sapiens
ctataataatttggc

SEQ ID NO: 323517 - DNA, 15 bp, Homo sapiens
gctataataatttgg

SEQ ID NO: 323518 - DNA, 15 bp, Homo sapiens
ggctataataatttg

SEQ ID NO: 323519 - DNA, 15 bp, Homo sapiens
gggctataataattt

SEQ ID NO: 323520 - DNA, 15 bp, Homo sapiens
tgggctataataatt

SEQ ID NO: 323521 - DNA, 15 bp, Homo sapiens
ctgggctataataat

SEQ ID NO: 323522 - DNA, 15 bp, Homo sapiens
cctgggctataataa

SEQ ID NO: 323523 - DNA, 15 bp, Homo sapiens
tcctgggctataata

SEQ ID NO: 323524 - DNA, 15 bp, Homo sapiens
gtcctgggctataat

SEQ ID NO: 323525 - DNA, 15 bp, Homo sapiens
agtcctgggctataa

SEQ ID NO: 323526 - DNA, 15 bp, Homo sapiens
cagtcctgggctata

SEQ ID NO: 323527 - DNA, 15 bp, Homo sapiens
tcagtcctgggctat

SEQ ID NO: 323528 - DNA, 15 bp, Homo sapiens
gtcagtcctgggcta

SEQ ID NO: 323529 - DNA, 15 bp, Homo sapiens
agtcagtcctgggct

SEQ ID NO: 323530 - DNA, 15 bp, Homo sapiens
cagtcagtcctgggc

SEQ ID NO: 323531 - DNA, 15 bp, Homo sapiens
tcagtcagtcctggg

SEQ ID NO: 323532 - DNA, 15 bp, Homo sapiens
ttcagtcagtcctgg

SEQ ID NO: 323533 - DNA, 15 bp, Homo sapiens
attcagtcagtcctg

SEQ ID NO: 323534 - DNA, 15 bp, Homo sapiens
cattcagtcagtcct

SEQ ID NO: 323535 - DNA, 15 bp, Homo sapiens
acattcagtcagtcc

SEQ ID NO: 323536 - DNA, 15 bp, Homo sapiens
aacattcagtcagtc

SEQ ID NO: 323537 - DNA, 15 bp, Homo sapiens
aaacattcagtcagt

SEQ ID NO: 323538 - DNA, 15 bp, Homo sapiens
aaaacattcagtcag

SEQ ID NO: 323539 - DNA, 15 bp, Homo sapiens
caaaacattcagtca

SEQ ID NO: 323540 - DNA, 15 bp, Homo sapiens
tcaaaacattcagtc

SEQ ID NO: 323541 - DNA, 15 bp, Homo sapiens
gtcaaaacattcagt

SEQ ID NO: 323542 - DNA, 15 bp, Homo sapiens
ggtcaaaacattcag

SEQ ID NO: 323543 - DNA, 15 bp, Homo sapiens
tggtcaaaacattca

SEQ ID NO: 323544 - DNA, 15 bp, Homo sapiens
atggtcaaaacattc

SEQ ID NO: 323545 - DNA, 15 bp, Homo sapiens
catggtcaaaacatt

SEQ ID NO: 323546 - DNA, 15 bp, Homo sapiens
tcatggtcaaaacat

SEQ ID NO: 323547 - DNA, 15 bp, Homo sapiens
ttcatggtcaaaaca

SEQ ID NO: 323548 - DNA, 15 bp, Homo sapiens
attcatggtcaaaac

SEQ ID NO: 323549 - DNA, 15 bp, Homo sapiens
aattcatggtcaaaa

SEQ ID NO: 323550 - DNA, 15 bp, Homo sapiens
aaattcatggtcaaa

SEQ ID NO: 323551 - DNA, 15 bp, Homo sapiens
gaaattcatggtcaa

SEQ ID NO: 323552 - DNA, 15 bp, Homo sapiens
tgaaattcatggtca

SEQ ID NO: 323553 - DNA, 15 bp, Homo sapiens
gtgaaattcatggtc

SEQ ID NO: 323554 - DNA, 15 bp, Homo sapiens
ggtgaaattcatggt

SEQ ID NO: 323555 - DNA, 15 bp, Homo sapiens
aggtgaaattcatgg

SEQ ID NO: 323556 - DNA, 15 bp, Homo sapiens
caggtgaaattcatg

SEQ ID NO: 323557 - DNA, 15 bp, Homo sapiens
tcaggtgaaattcat

SEQ ID NO: 323558 - DNA, 15 bp, Homo sapiens
ttcaggtgaaattca

SEQ ID NO: 323559 - DNA, 15 bp, Homo sapiens
gttcaggtgaaattc

SEQ ID NO: 323560 - DNA, 15 bp, Homo sapiens
tgttcaggtgaaatt

SEQ ID NO: 323561 - DNA, 15 bp, Homo sapiens
ctgttcaggtgaaat

SEQ ID NO: 323562 - DNA, 15 bp, Homo sapiens
tctgttcaggtgaaa

SEQ ID NO: 323563 - DNA, 15 bp, Homo sapiens
ttctgttcaggtgaa

SEQ ID NO: 323564 - DNA, 15 bp, Homo sapiens
tttctgttcaggtga

SEQ ID NO: 323565 - DNA, 15 bp, Homo sapiens
atttctgttcaggtg

SEQ ID NO: 323566 - DNA, 15 bp, Homo sapiens
tatttctgttcaggt

SEQ ID NO: 323567 - DNA, 15 bp, Homo sapiens
atatttctgttcagg

SEQ ID NO: 323568 - DNA, 15 bp, Homo sapiens
tatatttctgttcag

SEQ ID NO: 323569 - DNA, 15 bp, Homo sapiens
ttatatttctgttca

SEQ ID NO: 323570 - DNA, 15 bp, Homo sapiens
attatatttctgttc

SEQ ID NO: 323571 - DNA, 15 bp, Homo sapiens
aattatatttctgtt

SEQ ID NO: 323572 - DNA, 15 bp, Homo sapiens
gaattatatttctgt

SEQ ID NO: 323573 - DNA, 15 bp, Homo sapiens
tgaattatatttctg

SEQ ID NO: 323574 - DNA, 15 bp, Homo sapiens
gtgaattatatttct

SEQ ID NO: 323575 - DNA, 15 bp, Homo sapiens
agtgaattatatttc

SEQ ID NO: 323576 - DNA, 15 bp, Homo sapiens
gagtgaattatattt

SEQ ID NO: 323577 - DNA, 15 bp, Homo sapiens
agagtgaattatatt

SEQ ID NO: 323578 - DNA, 15 bp, Homo sapiens
aagagtgaattatat

SEQ ID NO: 323579 - DNA, 15 bp, Homo sapiens
taagagtgaattata

SEQ ID NO: 323580 - DNA, 15 bp, Homo sapiens
ctaagagtgaattat

SEQ ID NO: 323581 - DNA, 15 bp, Homo sapiens
gctaagagtgaatta

SEQ ID NO: 323582 - DNA, 15 bp, Homo sapiens
agctaagagtgaatt

SEQ ID NO: 323583 - DNA, 15 bp, Homo sapiens
tagctaagagtgaat

SEQ ID NO: 323584 - DNA, 15 bp, Homo sapiens
atagctaagagtgaa

SEQ ID NO: 323585 - DNA, 15 bp, Homo sapiens
aatagctaagagtga

SEQ ID NO: 323586 - DNA, 15 bp, Homo sapiens
taatagctaagagtg

SEQ ID NO: 323587 - DNA, 15 bp, Homo sapiens
ttaatagctaagagt

SEQ ID NO: 323588 - DNA, 15 bp, Homo sapiens
tttaatagctaagag

SEQ ID NO: 323589 - DNA, 15 bp, Homo sapiens
ttttaatagctaaga

SEQ ID NO: 323590 - DNA, 15 bp, Homo sapiens
gttttaatagctaag

SEQ ID NO: 323591 - DNA, 15 bp, Homo sapiens
tgttttaatagctaa

SEQ ID NO: 323592 - DNA, 15 bp, Homo sapiens
atgttttaatagcta

SEQ ID NO: 323593 - DNA, 15 bp, Homo sapiens
tatgttttaatagct

SEQ ID NO: 323594 - DNA, 15 bp, Homo sapiens
ttatgttttaatagc

SEQ ID NO: 323595 - DNA, 15 bp, Homo sapiens
attatgttttaatag

SEQ ID NO: 323596 - DNA, 15 bp, Homo sapiens
tattatgttttaata

SEQ ID NO: 323597 - DNA, 15 bp, Homo sapiens
ttattatgttttaat

SEQ ID NO: 323598 - DNA, 15 bp, Homo sapiens
attattatgttttaa

SEQ ID NO: 323599 - DNA, 15 bp, Homo sapiens
aattattatgtttta

SEQ ID NO: 323600 - DNA, 15 bp, Homo sapiens
aaattattatgtttt

SEQ ID NO: 323601 - DNA, 15 bp, Homo sapiens
caaattattatgttt

SEQ ID NO: 323602 - DNA, 15 bp, Homo sapiens
gcaaattattatgtt

SEQ ID NO: 323603 - DNA, 15 bp, Homo sapiens
tgcaaattattatgt

SEQ ID NO: 323604 - DNA, 15 bp, Homo sapiens
atgcaaattattatg

SEQ ID NO: 323605 - DNA, 15 bp, Homo sapiens
aatgcaaattattat

SEQ ID NO: 323606 - DNA, 15 bp, Homo sapiens
aaatgcaaattatta

SEQ ID NO: 323607 - DNA, 15 bp, Homo sapiens
aaaatgcaaattatt

SEQ ID NO: 323608 - DNA, 15 bp, Homo sapiens
aaaaatgcaaattat

SEQ ID NO: 323609 - DNA, 15 bp, Homo sapiens
taaaaatgcaaatta

SEQ ID NO: 323610 - DNA, 15 bp, Homo sapiens
ttaaaaatgcaaatt

SEQ ID NO: 323611 - DNA, 15 bp, Homo sapiens
tttaaaaatgcaaat

SEQ ID NO: 323612 - DNA, 15 bp, Homo sapiens
ttttaaaaatgcaaa

SEQ ID NO: 323613 - DNA, 15 bp, Homo sapiens
attttaaaaatgcaa

SEQ ID NO: 323614 - DNA, 15 bp, Homo sapiens
cattttaaaaatgca

SEQ ID NO: 323615 - DNA, 15 bp, Homo sapiens
acattttaaaaatgc

SEQ ID NO: 323616 - DNA, 15 bp, Homo sapiens
gacattttaaaaatg

SEQ ID NO: 323617 - DNA, 15 bp, Homo sapiens
ggacattttaaaaat

SEQ ID NO: 323618 - DNA, 15 bp, Homo sapiens
aggacattttaaaaa

SEQ ID NO: 323619 - DNA, 15 bp, Homo sapiens
aaggacattttaaaa

SEQ ID NO: 323620 - DNA, 15 bp, Homo sapiens
caaggacattttaaa

SEQ ID NO: 323621 - DNA, 15 bp, Homo sapiens
tcaaggacattttaa

SEQ ID NO: 323622 - DNA, 15 bp, Homo sapiens
atcaaggacatttta

SEQ ID NO: 323623 - DNA, 15 bp, Homo sapiens
catcaaggacatttt

SEQ ID NO: 323624 - DNA, 15 bp, Homo sapiens
acatcaaggacattt

SEQ ID NO: 323625 - DNA, 15 bp, Homo sapiens
cacatcaaggacatt

SEQ ID NO: 323626 - DNA, 15 bp, Homo sapiens
acacatcaaggacat

SEQ ID NO: 323627 - DNA, 15 bp, Homo sapiens
aacacatcaaggaca

SEQ ID NO: 323628 - DNA, 15 bp, Homo sapiens
aaacacatcaaggac

SEQ ID NO: 323629 - DNA, 15 bp, Homo sapiens
aaaacacatcaagga

SEQ ID NO: 323630 - DNA, 15 bp, Homo sapiens
gaaaacacatcaagg

SEQ ID NO: 323631 - DNA, 15 bp, Homo sapiens
ggaaaacacatcaag

SEQ ID NO: 323632 - DNA, 15 bp, Homo sapiens
aggaaaacacatcaa

SEQ ID NO: 323633 - DNA, 15 bp, Homo sapiens
aaggaaaacacatca

SEQ ID NO: 323634 - DNA, 15 bp, Homo sapiens
gaaggaaaacacatc

SEQ ID NO: 323635 - DNA, 15 bp, Homo sapiens
agaaggaaaacacat

SEQ ID NO: 323636 - DNA, 15 bp, Homo sapiens
gagaaggaaaacaca

SEQ ID NO: 323637 - DNA, 15 bp, Homo sapiens
ggagaaggaaaacac

SEQ ID NO: 323638 - DNA, 15 bp, Homo sapiens
tggagaaggaaaaca

SEQ ID NO: 323639 - DNA, 15 bp, Homo sapiens
atggagaaggaaaac

SEQ ID NO: 323640 - DNA, 15 bp, Homo sapiens
gatggagaaggaaaa

SEQ ID NO: 323641 - DNA, 15 bp, Homo sapiens
agatggagaaggaaa

SEQ ID NO: 323642 - DNA, 15 bp, Homo sapiens
gagatggagaaggaa

SEQ ID NO: 323643 - DNA, 15 bp, Homo sapiens
agagatggagaagga

SEQ ID NO: 323644 - DNA, 15 bp, Homo sapiens
gagagatggagaagg

SEQ ID NO: 323645 - DNA, 15 bp, Homo sapiens
agagagatggagaag

SEQ ID NO: 323646 - DNA, 15 bp, Homo sapiens
aagagagatggagaa

SEQ ID NO: 323647 - DNA, 15 bp, Homo sapiens
gaagagagatggaga

SEQ ID NO: 323648 - DNA, 15 bp, Homo sapiens
agaagagagatggag

SEQ ID NO: 323649 - DNA, 15 bp, Homo sapiens
cagaagagagatgga

SEQ ID NO: 323650 - DNA, 15 bp, Homo sapiens
gcagaagagagatgg

SEQ ID NO: 323651 - DNA, 15 bp, Homo sapiens
ggcagaagagagatg

SEQ ID NO: 323652 - DNA, 15 bp, Homo sapiens
tggcagaagagagat

SEQ ID NO: 323653 - DNA, 15 bp, Homo sapiens
gtggcagaagagaga

SEQ ID NO: 323654 - DNA, 15 bp, Homo sapiens
ggtggcagaagagag

SEQ ID NO: 323655 - DNA, 15 bp, Homo sapiens
aggtggcagaagaga

SEQ ID NO: 323656 - DNA, 15 bp, Homo sapiens
taggtggcagaagag

SEQ ID NO: 323657 - DNA, 15 bp, Homo sapiens
ttaggtggcagaaga

SEQ ID NO: 323658 - DNA, 15 bp, Homo sapiens
tttaggtggcagaag

SEQ ID NO: 323659 - DNA, 15 bp, Homo sapiens
gtttaggtggcagaa

SEQ ID NO: 323660 - DNA, 15 bp, Homo sapiens
tgtttaggtggcaga

SEQ ID NO: 323661 - DNA, 15 bp, Homo sapiens
gtgtttaggtggcag

SEQ ID NO: 323662 - DNA, 15 bp, Homo sapiens
agtgtttaggtggca

SEQ ID NO: 323663 - DNA, 15 bp, Homo sapiens
cagtgtttaggtggc

SEQ ID NO: 323664 - DNA, 15 bp, Homo sapiens
tcagtgtttaggtgg

SEQ ID NO: 323665 - DNA, 15 bp, Homo sapiens
atcagtgtttaggtg

SEQ ID NO: 323666 - DNA, 15 bp, Homo sapiens
catcagtgtttaggt

SEQ ID NO: 323667 - DNA, 15 bp, Homo sapiens
gcatcagtgtttagg

SEQ ID NO: 323668 - DNA, 15 bp, Homo sapiens
agcatcagtgtttag

SEQ ID NO: 323669 - DNA, 15 bp, Homo sapiens
aagcatcagtgttta

SEQ ID NO: 323670 - DNA, 15 bp, Homo sapiens
gaagcatcagtgttt

SEQ ID NO: 323671 - DNA, 15 bp, Homo sapiens
agaagcatcagtgtt

SEQ ID NO: 323672 - DNA, 15 bp, Homo sapiens
aagaagcatcagtgt

SEQ ID NO: 323673 - DNA, 15 bp, Homo sapiens
aaagaagcatcagtg

SEQ ID NO: 323674 - DNA, 15 bp, Homo sapiens
aaaagaagcatcagt

SEQ ID NO: 323675 - DNA, 15 bp, Homo sapiens
aaaaagaagcatcag

SEQ ID NO: 323676 - DNA, 15 bp, Homo sapiens
tgaaaaagaagcatc

SEQ ID NO: 323677 - DNA, 15 bp, Homo sapiens
atgaaaaagaagcat

SEQ ID NO: 323678 - DNA, 15 bp, Homo sapiens
aatgaaaaagaagca

SEQ ID NO: 323679 - DNA, 15 bp, Homo sapiens
gaatgaaaaagaagc

SEQ ID NO: 323680 - DNA, 15 bp, Homo sapiens
tgaatgaaaaagaag

SEQ ID NO: 323681 - DNA, 15 bp, Homo sapiens
ttgaatgaaaaagaa

SEQ ID NO: 323682 - DNA, 15 bp, Homo sapiens
cttgaatgaaaaaga

SEQ ID NO: 323683 - DNA, 15 bp, Homo sapiens
tcttgaatgaaaaag

SEQ ID NO: 323684 - DNA, 15 bp, Homo sapiens
ctcttgaatgaaaaa

SEQ ID NO: 323685 - DNA, 15 bp, Homo sapiens
tctcttgaatgaaaa

SEQ ID NO: 323686 - DNA, 15 bp, Homo sapiens
ctctcttgaatgaaa

SEQ ID NO: 323687 - DNA, 15 bp, Homo sapiens
cctctcttgaatgaa

SEQ ID NO: 323688 - DNA, 15 bp, Homo sapiens
acctctcttgaatga

SEQ ID NO: 323689 - DNA, 15 bp, Homo sapiens
aacctctcttgaatg

SEQ ID NO: 323690 - DNA, 15 bp, Homo sapiens
caacctctcttgaat

SEQ ID NO: 323691 - DNA, 15 bp, Homo sapiens
acaacctctcttgaa

SEQ ID NO: 323692 - DNA, 15 bp, Homo sapiens
aacaacctctcttga

SEQ ID NO: 323693 - DNA, 15 bp, Homo sapiens
caacaacctctcttg

SEQ ID NO: 323694 - DNA, 15 bp, Homo sapiens
tcaacaacctctctt

SEQ ID NO: 323695 - DNA, 15 bp, Homo sapiens
atcaacaacctctct

SEQ ID NO: 323696 - DNA, 15 bp, Homo sapiens
aatcaacaacctctc

SEQ ID NO: 323697 - DNA, 15 bp, Homo sapiens
aaatcaacaacctct

SEQ ID NO: 323698 - DNA, 15 bp, Homo sapiens
taaatcaacaacctc

SEQ ID NO: 323699 - DNA, 15 bp, Homo sapiens
ctaaatcaacaacct

SEQ ID NO: 323700 - DNA, 15 bp, Homo sapiens
tctaaatcaacaacc

SEQ ID NO: 323701 - DNA, 15 bp, Homo sapiens
ttctaaatcaacaac

SEQ ID NO: 323702 - DNA, 15 bp, Homo sapiens
tttctaaatcaacaa

SEQ ID NO: 323703 - DNA, 15 bp, Homo sapiens
ctttctaaatcaaca

SEQ ID NO: 323704 - DNA, 15 bp, Homo sapiens
cctttctaaatcaac

SEQ ID NO: 323705 - DNA, 15 bp, Homo sapiens
tcctttctaaatcaa

SEQ ID NO: 323706 - DNA, 15 bp, Homo sapiens
gtcctttctaaatca

SEQ ID NO: 323707 - DNA, 15 bp, Homo sapiens
tgtcctttctaaatc

SEQ ID NO: 323708 - DNA, 15 bp, Homo sapiens
ttgtcctttctaaat

SEQ ID NO: 323709 - DNA, 15 bp, Homo sapiens
tttgtcctttctaaa

SEQ ID NO: 323710 - DNA, 15 bp, Homo sapiens
gtttgtcctttctaa

SEQ ID NO: 323711 - DNA, 15 bp, Homo sapiens
ggtttgtcctttcta

SEQ ID NO: 323712 - DNA, 15 bp, Homo sapiens
tggtttgtcctttct

SEQ ID NO: 323713 - DNA, 15 bp, Homo sapiens
atggtttgtcctttc

SEQ ID NO: 323714 - DNA, 15 bp, Homo sapiens
aatggtttgtccttt

SEQ ID NO: 323715 - DNA, 15 bp, Homo sapiens
aaatggtttgtcctt

SEQ ID NO: 323716 - DNA, 15 bp, Homo sapiens
taaatggtttgtcct

SEQ ID NO: 323717 - DNA, 15 bp, Homo sapiens
ataaatggtttgtcc

SEQ ID NO: 323718 - DNA, 15 bp, Homo sapiens
gataaatggtttgtc

SEQ ID NO: 323719 - DNA, 15 bp, Homo sapiens
agataaatggtttgt

SEQ ID NO: 323720 - DNA, 15 bp, Homo sapiens
aagataaatggtttg

SEQ ID NO: 323721 - DNA, 15 bp, Homo sapiens
taagataaatggttt

SEQ ID NO: 323722 - DNA, 15 bp, Homo sapiens
ttaagataaatggtt

SEQ ID NO: 323723 - DNA, 15 bp, Homo sapiens
gttaagataaatggt

SEQ ID NO: 323724 - DNA, 15 bp, Homo sapiens
tgttaagataaatgg

SEQ ID NO: 323725 - DNA, 15 bp, Homo sapiens
gtgttaagataaatg

SEQ ID NO: 323726 - DNA, 15 bp, Homo sapiens
agtgttaagataaat

SEQ ID NO: 323727 - DNA, 15 bp, Homo sapiens
aagtgttaagataaa

SEQ ID NO: 323728 - DNA, 15 bp, Homo sapiens
taagtgttaagataa

SEQ ID NO: 323729 - DNA, 15 bp, Homo sapiens
ttaagtgttaagata

SEQ ID NO: 323730 - DNA, 15 bp, Homo sapiens
attaagtgttaagat

SEQ ID NO: 323731 - DNA, 15 bp, Homo sapiens
tattaagtgttaaga

SEQ ID NO: 323732 - DNA, 15 bp, Homo sapiens
ttattaagtgttaag

SEQ ID NO: 323733 - DNA, 15 bp, Homo sapiens
tttattaagtgttaa

SEQ ID NO: 323734 - DNA, 15 bp, Homo sapiens
ttttattaagtgtta

SEQ ID NO: 323735 - DNA, 15 bp, Homo sapiens
cttttattaagtgtt

SEQ ID NO: 323736 - DNA, 15 bp, Homo sapiens
ccttttattaagtgt

SEQ ID NO: 323737 - DNA, 15 bp, Homo sapiens
cccttttattaagtg

SEQ ID NO: 323738 - DNA, 15 bp, Homo sapiens
ccccttttattaagt

SEQ ID NO: 323739 - DNA, 15 bp, Homo sapiens
tccccttttattaag

SEQ ID NO: 323740 - DNA, 15 bp, Homo sapiens
ttccccttttattaa

SEQ ID NO: 323741 - DNA, 15 bp, Homo sapiens
gttccccttttatta

SEQ ID NO: 323742 - DNA, 15 bp, Homo sapiens
agttccccttttatt

SEQ ID NO: 323743 - DNA, 15 bp, Homo sapiens
tagttccccttttat

SEQ ID NO: 323744 - DNA, 15 bp, Homo sapiens
atagttcccctttta

SEQ ID NO: 323745 - DNA, 15 bp, Homo sapiens
tatagttcccctttt

SEQ ID NO: 323746 - DNA, 15 bp, Homo sapiens
atatagttccccttt

SEQ ID NO: 323747 - DNA, 15 bp, Homo sapiens
tatatagttcccctt

SEQ ID NO: 323748 - DNA, 15 bp, Homo sapiens
ttatatagttcccct

SEQ ID NO: 323749 - DNA, 15 bp, Homo sapiens
tttatatagttcccc

SEQ ID NO: 323750 - DNA, 15 bp, Homo sapiens
atttatatagttccc

SEQ ID NO: 323751 - DNA, 15 bp, Homo sapiens
aatttatatagttcc

SEQ ID NO: 323752 - DNA, 15 bp, Homo sapiens
aaatttatatagttc

SEQ ID NO: 323753 - DNA, 15 bp, Homo sapiens
aaaatttatatagtt

SEQ ID NO: 323754 - DNA, 15 bp, Homo sapiens
caaaatttatatagt

SEQ ID NO: 323755 - DNA, 15 bp, Homo sapiens
tcaaaatttatatag

SEQ ID NO: 323756 - DNA, 15 bp, Homo sapiens
ttcaaaatttatata

SEQ ID NO: 323757 - DNA, 15 bp, Homo sapiens
attcaaaatttatat

SEQ ID NO: 323758 - DNA, 15 bp, Homo sapiens
gattcaaaatttata

SEQ ID NO: 323759 - DNA, 15 bp, Homo sapiens
ggattcaaaatttat

SEQ ID NO: 323760 - DNA, 15 bp, Homo sapiens
aggattcaaaattta

SEQ ID NO: 323761 - DNA, 15 bp, Homo sapiens
caggattcaaaattt

SEQ ID NO: 323762 - DNA, 15 bp, Homo sapiens
tcaggattcaaaatt

SEQ ID NO: 323763 - DNA, 15 bp, Homo sapiens
ttcaggattcaaaat

SEQ ID NO: 323764 - DNA, 15 bp, Homo sapiens
cttcaggattcaaaa

SEQ ID NO: 323765 - DNA, 15 bp, Homo sapiens
acttcaggattcaaa

SEQ ID NO: 323766 - DNA, 15 bp, Homo sapiens
aacttcaggattcaa

SEQ ID NO: 323767 - DNA, 15 bp, Homo sapiens
caacttcaggattca

SEQ ID NO: 323768 - DNA, 15 bp, Homo sapiens
acaacttcaggattc

SEQ ID NO: 323769 - DNA, 15 bp, Homo sapiens
cacaacttcaggatt

SEQ ID NO: 323770 - DNA, 15 bp, Homo sapiens
ccacaacttcaggat

SEQ ID NO: 323771 - DNA, 15 bp, Homo sapiens
cccacaacttcagga

SEQ ID NO: 323772 - DNA, 15 bp, Homo sapiens
ccccacaacttcagg

SEQ ID NO: 323773 - DNA, 15 bp, Homo sapiens
accccacaacttcag

SEQ ID NO: 323774 - DNA, 15 bp, Homo sapiens
caccccacaacttca

SEQ ID NO: 323775 - DNA, 15 bp, Homo sapiens
acaccccacaacttc

SEQ ID NO: 323776 - DNA, 15 bp, Homo sapiens
cacaccccacaactt

SEQ ID NO: 323777 - DNA, 15 bp, Homo sapiens
tcacaccccacaact

SEQ ID NO: 323778 - DNA, 15 bp, Homo sapiens
atcacaccccacaac

SEQ ID NO: 323779 - DNA, 15 bp, Homo sapiens
tatcacaccccacaa

SEQ ID NO: 323780 - DNA, 15 bp, Homo sapiens
atatcacaccccaca

SEQ ID NO: 323781 - DNA, 15 bp, Homo sapiens
gatatcacaccccac

SEQ ID NO: 323782 - DNA, 15 bp, Homo sapiens
agatatcacacccca

SEQ ID NO: 323783 - DNA, 15 bp, Homo sapiens
gagatatcacacccc

SEQ ID NO: 323784 - DNA, 15 bp, Homo sapiens
tgagatatcacaccc

SEQ ID NO: 323785 - DNA, 15 bp, Homo sapiens
gtgagatatcacacc

SEQ ID NO: 323786 - DNA, 15 bp, Homo sapiens
agtgagatatcacac

SEQ ID NO: 323787 - DNA, 15 bp, Homo sapiens
cagtgagatatcaca

SEQ ID NO: 323788 - DNA, 15 bp, Homo sapiens
tcagtgagatatcac

SEQ ID NO: 323789 - DNA, 15 bp, Homo sapiens
atcagtgagatatca

SEQ ID NO: 323790 - DNA, 15 bp, Homo sapiens
gatcagtgagatatc

SEQ ID NO: 323791 - DNA, 15 bp, Homo sapiens
agatcagtgagatat

SEQ ID NO: 323792 - DNA, 15 bp, Homo sapiens
aagatcagtgagata

SEQ ID NO: 323793 - DNA, 15 bp, Homo sapiens
aaagatcagtgagat

SEQ ID NO: 323794 - DNA, 15 bp, Homo sapiens
aaaagatcagtgaga

SEQ ID NO: 323795 - DNA, 15 bp, Homo sapiens
aaaaagatcagtgag

SEQ ID NO: 323796 - DNA, 15 bp, Homo sapiens
aaaaaagatcagtga

SEQ ID NO: 323797 - DNA, 15 bp, Homo sapiens
aaaaaaagatcagtg

SEQ ID NO: 323798 - DNA, 15 bp, Homo sapiens
aaaaaaaagatcagt

SEQ ID NO: 323799 - DNA, 15 bp, Homo sapiens
aaaaaaaaagatcag

SEQ ID NO: 323800 - DNA, 15 bp, Homo sapiens
aaaaaaaaaagatca

SEQ ID NO: 323801 - DNA, 15 bp, Homo sapiens
aaaaaaaaaaagatc

SEQ ID NO: 323802 - DNA, 15 bp, Homo sapiens
ataaaaaaaaaaaaa

SEQ ID NO: 323803 - DNA, 15 bp, Homo sapiens
aataaaaaaaaaaaa

SEQ ID NO: 323804 - DNA, 15 bp, Homo sapiens
caataaaaaaaaaaa

SEQ ID NO: 323805 - DNA, 15 bp, Homo sapiens
ccaataaaaaaaaaa

SEQ ID NO: 323806 - DNA, 15 bp, Homo sapiens
cccaataaaaaaaaa

SEQ ID NO: 323807 - DNA, 15 bp, Homo sapiens
tcccaataaaaaaaa

SEQ ID NO: 323808 - DNA, 15 bp, Homo sapiens
ctcccaataaaaaaa

SEQ ID NO: 323809 - DNA, 15 bp, Homo sapiens
cctcccaataaaaaa

SEQ ID NO: 323810 - DNA, 15 bp, Homo sapiens
tcctcccaataaaaa

SEQ ID NO: 323811 - DNA, 15 bp, Homo sapiens
ttcctcccaataaaa

SEQ ID NO: 323812 - DNA, 15 bp, Homo sapiens
tttcctcccaataaa

SEQ ID NO: 323813 - DNA, 15 bp, Homo sapiens
ttttcctcccaataa

SEQ ID NO: 323814 - DNA, 15 bp, Homo sapiens
attttcctcccaata

SEQ ID NO: 323815 - DNA, 15 bp, Homo sapiens
tattttcctcccaat

SEQ ID NO: 323816 - DNA, 15 bp, Homo sapiens
atattttcctcccaa

SEQ ID NO: 323817 - DNA, 15 bp, Homo sapiens
tatattttcctccca

SEQ ID NO: 323818 - DNA, 15 bp, Homo sapiens
ctatattttcctccc

SEQ ID NO: 323819 - DNA, 15 bp, Homo sapiens
tctatattttcctcc

SEQ ID NO: 323820 - DNA, 15 bp, Homo sapiens
ttctatattttcctc

SEQ ID NO: 323821 - DNA, 15 bp, Homo sapiens
cttctatattttcct

SEQ ID NO: 323822 - DNA, 15 bp, Homo sapiens
acttctatattttcc

SEQ ID NO: 323823 - DNA, 15 bp, Homo sapiens
aacttctatattttc

SEQ ID NO: 323824 - DNA, 15 bp, Homo sapiens
aaacttctatatttt

SEQ ID NO: 323825 - DNA, 15 bp, Homo sapiens
caaacttctatattt

SEQ ID NO: 323826 - DNA, 15 bp, Homo sapiens
acaaacttctatatt

SEQ ID NO: 323827 - DNA, 15 bp, Homo sapiens
tacaaacttctatat

SEQ ID NO: 323828 - DNA, 15 bp, Homo sapiens
ctacaaacttctata

SEQ ID NO: 323829 - DNA, 15 bp, Homo sapiens
tctacaaacttctat

SEQ ID NO: 323830 - DNA, 15 bp, Homo sapiens
ttctacaaacttcta

SEQ ID NO: 323831 - DNA, 15 bp, Homo sapiens
tttctacaaacttct

SEQ ID NO: 323832 - DNA, 15 bp, Homo sapiens
ttttctacaaacttc

SEQ ID NO: 323833 - DNA, 15 bp, Homo sapiens
gttttctacaaactt

SEQ ID NO: 323834 - DNA, 15 bp, Homo sapiens
tgttttctacaaact

SEQ ID NO: 323835 - DNA, 15 bp, Homo sapiens
ctgttttctacaaac

SEQ ID NO: 323836 - DNA, 15 bp, Homo sapiens
tctgttttctacaaa

SEQ ID NO: 323837 - DNA, 15 bp, Homo sapiens
atctgttttctacaa

SEQ ID NO: 323838 - DNA, 15 bp, Homo sapiens
tatctgttttctaca

SEQ ID NO: 323839 - DNA, 15 bp, Homo sapiens
ttatctgttttctac

SEQ ID NO: 323840 - DNA, 15 bp, Homo sapiens
gttatctgttttcta

SEQ ID NO: 323841 - DNA, 15 bp, Homo sapiens
tgttatctgttttct

SEQ ID NO: 323842 - DNA, 15 bp, Homo sapiens
gtgttatctgttttc

SEQ ID NO: 323843 - DNA, 15 bp, Homo sapiens
agtgttatctgtttt

SEQ ID NO: 323844 - DNA, 15 bp, Homo sapiens
cagtgttatctgttt

SEQ ID NO: 323845 - DNA, 15 bp, Homo sapiens
acagtgttatctgtt

SEQ ID NO: 323846 - DNA, 15 bp, Homo sapiens
cacagtgttatctgt

SEQ ID NO: 323847 - DNA, 15 bp, Homo sapiens
ccacagtgttatctg

SEQ ID NO: 323848 - DNA, 15 bp, Homo sapiens
cccacagtgttatct

SEQ ID NO: 323849 - DNA, 15 bp, Homo sapiens
gcccacagtgttatc

SEQ ID NO: 323850 - DNA, 15 bp, Homo sapiens
agcccacagtgttat

SEQ ID NO: 323851 - DNA, 15 bp, Homo sapiens
cagcccacagtgtta

SEQ ID NO: 323852 - DNA, 15 bp, Homo sapiens
acagcccacagtgtt

SEQ ID NO: 323853 - DNA, 15 bp, Homo sapiens
tacagcccacagtgt

SEQ ID NO: 323854 - DNA, 15 bp, Homo sapiens
gtacagcccacagtg

SEQ ID NO: 323855 - DNA, 15 bp, Homo sapiens
agtacagcccacagt

SEQ ID NO: 323856 - DNA, 15 bp, Homo sapiens
gagtacagcccacag

SEQ ID NO: 323857 - DNA, 15 bp, Homo sapiens
agagtacagcccaca

SEQ ID NO: 323858 - DNA, 15 bp, Homo sapiens
aagagtacagcccac

SEQ ID NO: 323859 - DNA, 15 bp, Homo sapiens
gaagagtacagccca

SEQ ID NO: 323860 - DNA, 15 bp, Homo sapiens
tgaagagtacagccc

SEQ ID NO: 323861 - DNA, 15 bp, Homo sapiens
atgaagagtacagcc

SEQ ID NO: 323862 - DNA, 15 bp, Homo sapiens
aatgaagagtacagc

SEQ ID NO: 323863 - DNA, 15 bp, Homo sapiens
aaatgaagagtacag

SEQ ID NO: 323864 - DNA, 15 bp, Homo sapiens
aaaatgaagagtaca

SEQ ID NO: 323865 - DNA, 15 bp, Homo sapiens
ataaaatgaagagta

SEQ ID NO: 323866 - DNA, 15 bp, Homo sapiens
gataaaatgaagagt

SEQ ID NO: 323867 - DNA, 15 bp, Homo sapiens
tgataaaatgaagag

SEQ ID NO: 323868 - DNA, 15 bp, Homo sapiens
ctgataaaatgaaga

SEQ ID NO: 323869 - DNA, 15 bp, Homo sapiens
cctgataaaatgaag

SEQ ID NO: 323870 - DNA, 15 bp, Homo sapiens
ccctgataaaatgaa

SEQ ID NO: 323871 - DNA, 15 bp, Homo sapiens
gccctgataaaatga

SEQ ID NO: 323872 - DNA, 15 bp, Homo sapiens
agccctgataaaatg

SEQ ID NO: 323873 - DNA, 15 bp, Homo sapiens
cagccctgataaaat

SEQ ID NO: 323874 - DNA, 15 bp, Homo sapiens
ttcagccctgataaa

SEQ ID NO: 323875 - DNA, 15 bp, Homo sapiens
cttcagccctgataa

SEQ ID NO: 323876 - DNA, 15 bp, Homo sapiens
tcttcagccctgata

SEQ ID NO: 323877 - DNA, 15 bp, Homo sapiens
atcttcagccctgat

SEQ ID NO: 323878 - DNA, 15 bp, Homo sapiens
tatcttcagccctga

SEQ ID NO: 323879 - DNA, 15 bp, Homo sapiens
ttatcttcagccctg

SEQ ID NO: 323880 - DNA, 15 bp, Homo sapiens
tttatcttcagccct

SEQ ID NO: 323881 - DNA, 15 bp, Homo sapiens
ctttatcttcagccc

SEQ ID NO: 323882 - DNA, 15 bp, Homo sapiens
tctttatcttcagcc

SEQ ID NO: 323883 - DNA, 15 bp, Homo sapiens
atctttatcttcagc

SEQ ID NO: 323884 - DNA, 15 bp, Homo sapiens
tatctttatcttcag

SEQ ID NO: 323885 - DNA, 15 bp, Homo sapiens
ttatctttatcttca

SEQ ID NO: 323886 - DNA, 15 bp, Homo sapiens
tttatctttatcttc

SEQ ID NO: 323887 - DNA, 15 bp, Homo sapiens
ttttatctttatctt

SEQ ID NO: 323888 - DNA, 15 bp, Homo sapiens
tttttatctttatct

SEQ ID NO: 323889 - DNA, 15 bp, Homo sapiens
ttttttatctttatc

SEQ ID NO: 323890 - DNA, 15 bp, Homo sapiens
attttttatctttat

SEQ ID NO: 323891 - DNA, 15 bp, Homo sapiens
tattttttatcttta

SEQ ID NO: 323892 - DNA, 15 bp, Homo sapiens
ttattttttatcttt

SEQ ID NO: 323893 - DNA, 15 bp, Homo sapiens
tttattttttatctt

SEQ ID NO: 323894 - DNA, 15 bp, Homo sapiens
ttttattttttatct

SEQ ID NO: 323895 - DNA, 15 bp, Homo sapiens
attttattttttatc

SEQ ID NO: 323896 - DNA, 15 bp, Homo sapiens
gattttattttttat

SEQ ID NO: 323897 - DNA, 15 bp, Homo sapiens
ggattttatttttta

SEQ ID NO: 323898 - DNA, 15 bp, Homo sapiens
tggattttatttttt

SEQ ID NO: 323899 - DNA, 15 bp, Homo sapiens
atggattttattttt

SEQ ID NO: 323900 - DNA, 15 bp, Homo sapiens
gatggattttatttt

SEQ ID NO: 323901 - DNA, 15 bp, Homo sapiens
tgatggattttattt

SEQ ID NO: 323902 - DNA, 15 bp, Homo sapiens
ttgatggattttatt

SEQ ID NO: 323903 - DNA, 15 bp, Homo sapiens
tttgatggattttat

SEQ ID NO: 323904 - DNA, 15 bp, Homo sapiens
ctttgatggatttta

SEQ ID NO: 323905 - DNA, 15 bp, Homo sapiens
tctttgatggatttt

SEQ ID NO: 323906 - DNA, 15 bp, Homo sapiens
gtctttgatggattt

SEQ ID NO: 323907 - DNA, 15 bp, Homo sapiens
tgtctttgatggatt

SEQ ID NO: 323908 - DNA, 15 bp, Homo sapiens
atgtctttgatggat

SEQ ID NO: 323909 - DNA, 15 bp, Homo sapiens
tatgtctttgatgga

SEQ ID NO: 323910 - DNA, 15 bp, Homo sapiens
ttatgtctttgatgg

SEQ ID NO: 323911 - DNA, 15 bp, Homo sapiens
cttatgtctttgatg

SEQ ID NO: 323912 - DNA, 15 bp, Homo sapiens
ccttatgtctttgat

SEQ ID NO: 323913 - DNA, 15 bp, Homo sapiens
accttatgtctttga

SEQ ID NO: 323914 - DNA, 15 bp, Homo sapiens
aaccttatgtctttg

SEQ ID NO: 323915 - DNA, 15 bp, Homo sapiens
taaccttatgtcttt

SEQ ID NO: 323916 - DNA, 15 bp, Homo sapiens
ataaccttatgtctt

SEQ ID NO: 323917 - DNA, 15 bp, Homo sapiens
gataaccttatgtct

SEQ ID NO: 323918 - DNA, 15 bp, Homo sapiens
ggataaccttatgtc

SEQ ID NO: 323919 - DNA, 15 bp, Homo sapiens
cggataaccttatgt

SEQ ID NO: 323920 - DNA, 15 bp, Homo sapiens
tcggataaccttatg

SEQ ID NO: 323921 - DNA, 15 bp, Homo sapiens
atcggataaccttat

SEQ ID NO: 323922 - DNA, 15 bp, Homo sapiens
aatcggataacctta

SEQ ID NO: 323923 - DNA, 15 bp, Homo sapiens
aaatcggataacctt

SEQ ID NO: 323924 - DNA, 15 bp, Homo sapiens
taaatcggataacct

SEQ ID NO: 323925 - DNA, 15 bp, Homo sapiens
ataaatcggataacc

SEQ ID NO: 323926 - DNA, 15 bp, Homo sapiens
aataaatcggataac

SEQ ID NO: 323927 - DNA, 15 bp, Homo sapiens
gaataaatcggataa

SEQ ID NO: 323928 - DNA, 15 bp, Homo sapiens
agaataaatcggata

SEQ ID NO: 323929 - DNA, 15 bp, Homo sapiens
gagaataaatcggat

SEQ ID NO: 323930 - DNA, 15 bp, Homo sapiens
tgagaataaatcgga

SEQ ID NO: 323931 - DNA, 15 bp, Homo sapiens
ttgagaataaatcgg

SEQ ID NO: 323932 - DNA, 15 bp, Homo sapiens
attgagaataaatcg

SEQ ID NO: 323933 - DNA, 15 bp, Homo sapiens
gattgagaataaatc

SEQ ID NO: 323934 - DNA, 15 bp, Homo sapiens
agattgagaataaat

SEQ ID NO: 323935 - DNA, 15 bp, Homo sapiens
cagattgagaataaa

SEQ ID NO: 323936 - DNA, 15 bp, Homo sapiens
gcagattgagaataa

SEQ ID NO: 323937 - DNA, 15 bp, Homo sapiens
agcagattgagaata

SEQ ID NO: 323938 - DNA, 15 bp, Homo sapiens
gagcagattgagaat

SEQ ID NO: 323939 - DNA, 15 bp, Homo sapiens
agagcagattgagaa

SEQ ID NO: 323940 - DNA, 15 bp, Homo sapiens
aagagcagattgaga

SEQ ID NO: 323941 - DNA, 15 bp, Homo sapiens
taagagcagattgag

SEQ ID NO: 323942 - DNA, 15 bp, Homo sapiens
ctaagagcagattga

SEQ ID NO: 323943 - DNA, 15 bp, Homo sapiens
gctaagagcagattg

SEQ ID NO: 323944 - DNA, 15 bp, Homo sapiens
tgctaagagcagatt

SEQ ID NO: 323945 - DNA, 15 bp, Homo sapiens
gtgctaagagcagat

SEQ ID NO: 323946 - DNA, 15 bp, Homo sapiens
tgtgctaagagcaga

SEQ ID NO: 323947 - DNA, 15 bp, Homo sapiens
ttgtgctaagagcag

SEQ ID NO: 323948 - DNA, 15 bp, Homo sapiens
cttgtgctaagagca

SEQ ID NO: 323949 - DNA, 15 bp, Homo sapiens
ccttgtgctaagagc

SEQ ID NO: 323950 - DNA, 15 bp, Homo sapiens
cccttgtgctaagag

SEQ ID NO: 323951 - DNA, 15 bp, Homo sapiens
acccttgtgctaaga

SEQ ID NO: 323952 - DNA, 15 bp, Homo sapiens
aacccttgtgctaag

SEQ ID NO: 323953 - DNA, 15 bp, Homo sapiens
taacccttgtgctaa

SEQ ID NO: 323954 - DNA, 15 bp, Homo sapiens
gtaacccttgtgcta

SEQ ID NO: 323955 - DNA, 15 bp, Homo sapiens
ggtaacccttgtgct

SEQ ID NO: 323956 - DNA, 15 bp, Homo sapiens
gggtaacccttgtgc

SEQ ID NO: 323957 - DNA, 15 bp, Homo sapiens
agggtaacccttgtg

SEQ ID NO: 323958 - DNA, 15 bp, Homo sapiens
cagggtaacccttgt

SEQ ID NO: 323959 - DNA, 15 bp, Homo sapiens
tcagggtaacccttg

SEQ ID NO: 323960 - DNA, 15 bp, Homo sapiens
ctcagggtaaccctt

SEQ ID NO: 323961 - DNA, 15 bp, Homo sapiens
gctcagggtaaccct

SEQ ID NO: 323962 - DNA, 15 bp, Homo sapiens
agctcagggtaaccc

SEQ ID NO: 323963 - DNA, 15 bp, Homo sapiens
tagctcagggtaacc

SEQ ID NO: 323964 - DNA, 15 bp, Homo sapiens
atagctcagggtaac

SEQ ID NO: 323965 - DNA, 15 bp, Homo sapiens
gatagctcagggtaa

SEQ ID NO: 323966 - DNA, 15 bp, Homo sapiens
tgatagctcagggta

SEQ ID NO: 323967 - DNA, 15 bp, Homo sapiens
gtgatagctcagggt

SEQ ID NO: 323968 - DNA, 15 bp, Homo sapiens
tgtgatagctcaggg

SEQ ID NO: 323969 - DNA, 15 bp, Homo sapiens
ttgtgatagctcagg

SEQ ID NO: 323970 - DNA, 15 bp, Homo sapiens
attgtgatagctcag

SEQ ID NO: 323971 - DNA, 15 bp, Homo sapiens
aattgtgatagctca

SEQ ID NO: 323972 - DNA, 15 bp, Homo sapiens
gaattgtgatagctc

SEQ ID NO: 323973 - DNA, 15 bp, Homo sapiens
ggaattgtgatagct

SEQ ID NO: 323974 - DNA, 15 bp, Homo sapiens
aggaattgtgatagc

SEQ ID NO: 323975 - DNA, 15 bp, Homo sapiens
taggaattgtgatag

SEQ ID NO: 323976 - DNA, 15 bp, Homo sapiens
ctaggaattgtgata

SEQ ID NO: 323977 - DNA, 15 bp, Homo sapiens
cctaggaattgtgat

SEQ ID NO: 323978 - DNA, 15 bp, Homo sapiens
tcctaggaattgtga

SEQ ID NO: 323979 - DNA, 15 bp, Homo sapiens
atcctaggaattgtg

SEQ ID NO: 323980 - DNA, 15 bp, Homo sapiens
aatcctaggaattgt

SEQ ID NO: 323981 - DNA, 15 bp, Homo sapiens
aaatcctaggaattg

SEQ ID NO: 323982 - DNA, 15 bp, Homo sapiens
aaaatcctaggaatt

SEQ ID NO: 323983 - DNA, 15 bp, Homo sapiens
aaaaatcctaggaat

SEQ ID NO: 323984 - DNA, 15 bp, Homo sapiens
gaaaaatcctaggaa

SEQ ID NO: 323985 - DNA, 15 bp, Homo sapiens
tgaaaaatcctagga

SEQ ID NO: 323986 - DNA, 15 bp, Homo sapiens
ctgaaaaatcctagg

SEQ ID NO: 323987 - DNA, 15 bp, Homo sapiens
tctgaaaaatcctag

SEQ ID NO: 323988 - DNA, 15 bp, Homo sapiens
ctctgaaaaatccta

SEQ ID NO: 323989 - DNA, 15 bp, Homo sapiens
tctctgaaaaatcct

SEQ ID NO: 323990 - DNA, 15 bp, Homo sapiens
gtctctgaaaaatcc

SEQ ID NO: 323991 - DNA, 15 bp, Homo sapiens
tgtctctgaaaaatc

SEQ ID NO: 323992 - DNA, 15 bp, Homo sapiens
ttgtctctgaaaaat

SEQ ID NO: 323993 - DNA, 15 bp, Homo sapiens
tttgtctctgaaaaa

SEQ ID NO: 323994 - DNA, 15 bp, Homo sapiens
ttttgtctctgaaaa

SEQ ID NO: 323995 - DNA, 15 bp, Homo sapiens
attttgtctctgaaa

SEQ ID NO: 323996 - DNA, 15 bp, Homo sapiens
gattttgtctctgaa

SEQ ID NO: 323997 - DNA, 15 bp, Homo sapiens
ggattttgtctctga

SEQ ID NO: 323998 - DNA, 15 bp, Homo sapiens
aggattttgtctctg

SEQ ID NO: 323999 - DNA, 15 bp, Homo sapiens
caggattttgtctct

SEQ ID NO: 324000 - DNA, 15 bp, Homo sapiens
gcaggattttgtctc

SEQ ID NO: 324001 - DNA, 15 bp, Homo sapiens
ggcaggattttgtct

SEQ ID NO: 324002 - DNA, 15 bp, Homo sapiens
tggcaggattttgtc

SEQ ID NO: 324003 - DNA, 15 bp, Homo sapiens
ctggcaggattttgt

SEQ ID NO: 324004 - DNA, 15 bp, Homo sapiens
tctggcaggattttg

SEQ ID NO: 324005 - DNA, 15 bp, Homo sapiens
atctggcaggatttt

SEQ ID NO: 324006 - DNA, 15 bp, Homo sapiens
tatctggcaggattt

SEQ ID NO: 324007 - DNA, 15 bp, Homo sapiens
ttatctggcaggatt

SEQ ID NO: 324008 - DNA, 15 bp, Homo sapiens
gttatctggcaggat

SEQ ID NO: 324009 - DNA, 15 bp, Homo sapiens
agttatctggcagga

SEQ ID NO: 324010 - DNA, 15 bp, Homo sapiens
tagttatctggcagg

SEQ ID NO: 324011 - DNA, 15 bp, Homo sapiens
ctagttatctggcag

SEQ ID NO: 324012 - DNA, 15 bp, Homo sapiens
cctagttatctggca

SEQ ID NO: 324013 - DNA, 15 bp, Homo sapiens
acctagttatctggc

SEQ ID NO: 324014 - DNA, 15 bp, Homo sapiens
tacctagttatctgg

SEQ ID NO: 324015 - DNA, 15 bp, Homo sapiens
ttacctagttatctg

SEQ ID NO: 324016 - DNA, 15 bp, Homo sapiens
gttacctagttatct

SEQ ID NO: 324017 - DNA, 15 bp, Homo sapiens
agttacctagttatc

SEQ ID NO: 324018 - DNA, 15 bp, Homo sapiens
aagttacctagttat

SEQ ID NO: 324019 - DNA, 15 bp, Homo sapiens
taagttacctagtta

SEQ ID NO: 324020 - DNA, 15 bp, Homo sapiens
ctaagttacctagtt

SEQ ID NO: 324021 - DNA, 15 bp, Homo sapiens
tctaagttacctagt

SEQ ID NO: 324022 - DNA, 15 bp, Homo sapiens
ttctaagttacctag

SEQ ID NO: 324023 - DNA, 15 bp, Homo sapiens
tttctaagttaccta

SEQ ID NO: 324024 - DNA, 15 bp, Homo sapiens
gtttctaagttacct

SEQ ID NO: 324025 - DNA, 15 bp, Homo sapiens
tgtttctaagttacc

SEQ ID NO: 324026 - DNA, 15 bp, Homo sapiens
ctgtttctaagttac

SEQ ID NO: 324027 - DNA, 15 bp, Homo sapiens
actgtttctaagtta

SEQ ID NO: 324028 - DNA, 15 bp, Homo sapiens
cactgtttctaagtt

SEQ ID NO: 324029 - DNA, 15 bp, Homo sapiens
gcactgtttctaagt

SEQ ID NO: 324030 - DNA, 15 bp, Homo sapiens
agcactgtttctaag

SEQ ID NO: 324031 - DNA, 15 bp, Homo sapiens
aagcactgtttctaa

SEQ ID NO: 324032 - DNA, 15 bp, Homo sapiens
aaagcactgtttcta

SEQ ID NO: 324033 - DNA, 15 bp, Homo sapiens
gaaagcactgtttct

SEQ ID NO: 324034 - DNA, 15 bp, Homo sapiens
tgaaagcactgtttc

SEQ ID NO: 324035 - DNA, 15 bp, Homo sapiens
ttgaaagcactgttt

SEQ ID NO: 324036 - DNA, 15 bp, Homo sapiens
attgaaagcactgtt

SEQ ID NO: 324037 - DNA, 15 bp, Homo sapiens
gattgaaagcactgt

SEQ ID NO: 324038 - DNA, 15 bp, Homo sapiens
tgattgaaagcactg

SEQ ID NO: 324039 - DNA, 15 bp, Homo sapiens
ctgattgaaagcact

SEQ ID NO: 324040 - DNA, 15 bp, Homo sapiens
tctgattgaaagcac

SEQ ID NO: 324041 - DNA, 15 bp, Homo sapiens
ctctgattgaaagca

SEQ ID NO: 324042 - DNA, 15 bp, Homo sapiens
tctctgattgaaagc

SEQ ID NO: 324043 - DNA, 15 bp, Homo sapiens
atctctgattgaaag

SEQ ID NO: 324044 - DNA, 15 bp, Homo sapiens
gatctctgattgaaa

SEQ ID NO: 324045 - DNA, 15 bp, Homo sapiens
tgatctctgattgaa

SEQ ID NO: 324046 - DNA, 15 bp, Homo sapiens
gtgatctctgattga

SEQ ID NO: 324047 - DNA, 15 bp, Homo sapiens
ggtgatctctgattg

SEQ ID NO: 324048 - DNA, 15 bp, Homo sapiens
tggtgatctctgatt

SEQ ID NO: 324049 - DNA, 15 bp, Homo sapiens
ttggtgatctctgat

SEQ ID NO: 324050 - DNA, 15 bp, Homo sapiens
tttggtgatctctga

SEQ ID NO: 324051 - DNA, 15 bp, Homo sapiens
atttggtgatctctg

SEQ ID NO: 324052 - DNA, 15 bp, Homo sapiens
catttggtgatctct

SEQ ID NO: 324053 - DNA, 15 bp, Homo sapiens
tcatttggtgatctc

SEQ ID NO: 324054 - DNA, 15 bp, Homo sapiens
ttcatttggtgatct

SEQ ID NO: 324055 - DNA, 15 bp, Homo sapiens
tttcatttggtgatc

SEQ ID NO: 324056 - DNA, 15 bp, Homo sapiens
ttttcatttggtgat

SEQ ID NO: 324057 - DNA, 15 bp, Homo sapiens
cttttcatttggtga

SEQ ID NO: 324058 - DNA, 15 bp, Homo sapiens
acttttcatttggtg

SEQ ID NO: 324059 - DNA, 15 bp, Homo sapiens
gacttttcatttggt

SEQ ID NO: 324060 - DNA, 15 bp, Homo sapiens
agacttttcatttgg

SEQ ID NO: 324061 - DNA, 15 bp, Homo sapiens
gagacttttcatttg

SEQ ID NO: 324062 - DNA, 15 bp, Homo sapiens
tgagacttttcattt

SEQ ID NO: 324063 - DNA, 15 bp, Homo sapiens
atgagacttttcatt

SEQ ID NO: 324064 - DNA, 15 bp, Homo sapiens
aatgagacttttcat

SEQ ID NO: 324065 - DNA, 15 bp, Homo sapiens
taatgagacttttca

SEQ ID NO: 324066 - DNA, 15 bp, Homo sapiens
ttaatgagacttttc

SEQ ID NO: 324067 - DNA, 15 bp, Homo sapiens
gttaatgagactttt

SEQ ID NO: 324068 - DNA, 15 bp, Homo sapiens
ggttaatgagacttt

SEQ ID NO: 324069 - DNA, 15 bp, Homo sapiens
aggttaatgagactt

SEQ ID NO: 324070 - DNA, 15 bp, Homo sapiens
caggttaatgagact

SEQ ID NO: 324071 - DNA, 15 bp, Homo sapiens
ccaggttaatgagac

SEQ ID NO: 324072 - DNA, 15 bp, Homo sapiens
gccaggttaatgaga

SEQ ID NO: 324073 - DNA, 15 bp, Homo sapiens
agccaggttaatgag

SEQ ID NO: 324074 - DNA, 15 bp, Homo sapiens
aagccaggttaatga

SEQ ID NO: 324075 - DNA, 15 bp, Homo sapiens
gaagccaggttaatg

SEQ ID NO: 324076 - DNA, 15 bp, Homo sapiens
agaagccaggttaat

SEQ ID NO: 324077 - DNA, 15 bp, Homo sapiens
gagaagccaggttaa

SEQ ID NO: 324078 - DNA, 15 bp, Homo sapiens
ggagaagccaggtta

SEQ ID NO: 324079 - DNA, 15 bp, Homo sapiens
gggagaagccaggtt

SEQ ID NO: 324080 - DNA, 15 bp, Homo sapiens
ggggagaagccaggt

SEQ ID NO: 324081 - DNA, 15 bp, Homo sapiens
tggggagaagccagg

SEQ ID NO: 324082 - DNA, 15 bp, Homo sapiens
atggggagaagccag

SEQ ID NO: 324083 - DNA, 15 bp, Homo sapiens
catggggagaagcca

SEQ ID NO: 324084 - DNA, 15 bp, Homo sapiens
tcatggggagaagcc

SEQ ID NO: 324085 - DNA, 15 bp, Homo sapiens
ctcatggggagaagc

SEQ ID NO: 324086 - DNA, 15 bp, Homo sapiens
gctcatggggagaag

SEQ ID NO: 324087 - DNA, 15 bp, Homo sapiens
ggctcatggggagaa

SEQ ID NO: 324088 - DNA, 15 bp, Homo sapiens
gggctcatggggaga

SEQ ID NO: 324089 - DNA, 15 bp, Homo sapiens
agggctcatggggag

SEQ ID NO: 324090 - DNA, 15 bp, Homo sapiens
aagggctcatgggga

SEQ ID NO: 324091 - DNA, 15 bp, Homo sapiens
gaagggctcatgggg

SEQ ID NO: 324092 - DNA, 15 bp, Homo sapiens
ggaagggctcatggg

SEQ ID NO: 324093 - DNA, 15 bp, Homo sapiens
aggaagggctcatgg

SEQ ID NO: 324094 - DNA, 15 bp, Homo sapiens
gaggaagggctcatg

SEQ ID NO: 324095 - DNA, 15 bp, Homo sapiens
tagaggaagggctca

SEQ ID NO: 324096 - DNA, 15 bp, Homo sapiens
ttagaggaagggctc

SEQ ID NO: 324097 - DNA, 15 bp, Homo sapiens
tttagaggaagggct

SEQ ID NO: 324098 - DNA, 15 bp, Homo sapiens
ctttagaggaagggc

SEQ ID NO: 324099 - DNA, 15 bp, Homo sapiens
tctttagaggaaggg

SEQ ID NO: 324100 - DNA, 15 bp, Homo sapiens
ctctttagaggaagg

SEQ ID NO: 324101 - DNA, 15 bp, Homo sapiens
cctctttagaggaag

SEQ ID NO: 324102 - DNA, 15 bp, Homo sapiens
acctctttagaggaa

SEQ ID NO: 324103 - DNA, 15 bp, Homo sapiens
aacctctttagagga

SEQ ID NO: 324104 - DNA, 15 bp, Homo sapiens
gaacctctttagagg

SEQ ID NO: 324105 - DNA, 15 bp, Homo sapiens
ggaacctctttagag

SEQ ID NO: 324106 - DNA, 15 bp, Homo sapiens
tggaacctctttaga

SEQ ID NO: 324107 - DNA, 15 bp, Homo sapiens
ttggaacctctttag

SEQ ID NO: 324108 - DNA, 15 bp, Homo sapiens
tttggaacctcttta

SEQ ID NO: 324109 - DNA, 15 bp, Homo sapiens
gtttggaacctcttt

SEQ ID NO: 324110 - DNA, 15 bp, Homo sapiens
tgtttggaacctctt

SEQ ID NO: 324111 - DNA, 15 bp, Homo sapiens
ctgtttggaacctct

SEQ ID NO: 324112 - DNA, 15 bp, Homo sapiens
cctgtttggaacctc

SEQ ID NO: 324113 - DNA, 15 bp, Homo sapiens
gcctgtttggaacct

SEQ ID NO: 324114 - DNA, 15 bp, Homo sapiens
ggcctgtttggaacc

SEQ ID NO: 324115 - DNA, 15 bp, Homo sapiens
tggcctgtttggaac

SEQ ID NO: 324116 - DNA, 15 bp, Homo sapiens
gtggcctgtttggaa

SEQ ID NO: 324117 - DNA, 15 bp, Homo sapiens
ggtggcctgtttgga

SEQ ID NO: 324118 - DNA, 15 bp, Homo sapiens
aggtggcctgtttgg

SEQ ID NO: 324119 - DNA, 15 bp, Homo sapiens
aaggtggcctgtttg

SEQ ID NO: 324120 - DNA, 15 bp, Homo sapiens
aaaggtggcctgttt

SEQ ID NO: 324121 - DNA, 15 bp, Homo sapiens
taaaggtggcctgtt

SEQ ID NO: 324122 - DNA, 15 bp, Homo sapiens
ataaaggtggcctgt

SEQ ID NO: 324123 - DNA, 15 bp, Homo sapiens
tataaaggtggcctg

SEQ ID NO: 324124 - DNA, 15 bp, Homo sapiens
ttataaaggtggcct

SEQ ID NO: 324125 - DNA, 15 bp, Homo sapiens
tttataaaggtggcc

SEQ ID NO: 324126 - DNA, 15 bp, Homo sapiens
ctttataaaggtggc

SEQ ID NO: 324127 - DNA, 15 bp, Homo sapiens
tctttataaaggtgg

SEQ ID NO: 324128 - DNA, 15 bp, Homo sapiens
ctctttataaaggtg

SEQ ID NO: 324129 - DNA, 15 bp, Homo sapiens
tctctttataaaggt

SEQ ID NO: 324130 - DNA, 15 bp, Homo sapiens
ttctctttataaagg

SEQ ID NO: 324131 - DNA, 15 bp, Homo sapiens
tttctctttataaag

SEQ ID NO: 324132 - DNA, 15 bp, Homo sapiens
ctttctctttataaa

SEQ ID NO: 324133 - DNA, 15 bp, Homo sapiens
actttctctttataa

SEQ ID NO: 324134 - DNA, 15 bp, Homo sapiens
gactttctctttata

SEQ ID NO: 324135 - DNA, 15 bp, Homo sapiens
ggactttctctttat

SEQ ID NO: 324136 - DNA, 15 bp, Homo sapiens
tggactttctcttta

SEQ ID NO: 324137 - DNA, 15 bp, Homo sapiens
atggactttctcttt

SEQ ID NO: 324138 - DNA, 15 bp, Homo sapiens
aatggactttctctt

SEQ ID NO: 324139 - DNA, 15 bp, Homo sapiens
aaatggactttctct

SEQ ID NO: 324140 - DNA, 15 bp, Homo sapiens
gaaatggactttctc

SEQ ID NO: 324141 - DNA, 15 bp, Homo sapiens
ggaaatggactttct

SEQ ID NO: 324142 - DNA, 15 bp, Homo sapiens
gggaaatggactttc

SEQ ID NO: 324143 - DNA, 15 bp, Homo sapiens
tgggaaatggacttt

SEQ ID NO: 324144 - DNA, 15 bp, Homo sapiens
ctgggaaatggactt

SEQ ID NO: 324145 - DNA, 15 bp, Homo sapiens
actgggaaatggact

SEQ ID NO: 324146 - DNA, 15 bp, Homo sapiens
gactgggaaatggac

SEQ ID NO: 324147 - DNA, 15 bp, Homo sapiens
cgactgggaaatgga

SEQ ID NO: 324148 - DNA, 15 bp, Homo sapiens
tcgactgggaaatgg

SEQ ID NO: 324149 - DNA, 15 bp, Homo sapiens
ctcgactgggaaatg

SEQ ID NO: 324150 - DNA, 15 bp, Homo sapiens
tctcgactgggaaat

SEQ ID NO: 324151 - DNA, 15 bp, Homo sapiens
atctcgactgggaaa

SEQ ID NO: 324152 - DNA, 15 bp, Homo sapiens
aatctcgactgggaa

SEQ ID NO: 324153 - DNA, 15 bp, Homo sapiens
taatctcgactggga

SEQ ID NO: 324154 - DNA, 15 bp, Homo sapiens
ttaatctcgactggg

SEQ ID NO: 324155 - DNA, 15 bp, Homo sapiens
tttaatctcgactgg

SEQ ID NO: 324156 - DNA, 15 bp, Homo sapiens
gtttaatctcgactg

SEQ ID NO: 324157 - DNA, 15 bp, Homo sapiens
ggtttaatctcgact

SEQ ID NO: 324158 - DNA, 15 bp, Homo sapiens
tggtttaatctcgac

SEQ ID NO: 324159 - DNA, 15 bp, Homo sapiens
ctggtttaatctcga

SEQ ID NO: 324160 - DNA, 15 bp, Homo sapiens
actggtttaatctcg

SEQ ID NO: 324161 - DNA, 15 bp, Homo sapiens
gactggtttaatctc

SEQ ID NO: 324162 - DNA, 15 bp, Homo sapiens
tgactggtttaatct

SEQ ID NO: 324163 - DNA, 15 bp, Homo sapiens
ttgactggtttaatc

SEQ ID NO: 324164 - DNA, 15 bp, Homo sapiens
cttgactggtttaat

SEQ ID NO: 324165 - DNA, 15 bp, Homo sapiens
tcttgactggtttaa

SEQ ID NO: 324166 - DNA, 15 bp, Homo sapiens
ttcttgactggttta

SEQ ID NO: 324167 - DNA, 15 bp, Homo sapiens
attcttgactggttt

SEQ ID NO: 324168 - DNA, 15 bp, Homo sapiens
gattcttgactggtt

SEQ ID NO: 324169 - DNA, 15 bp, Homo sapiens
tgattcttgactggt

SEQ ID NO: 324170 - DNA, 15 bp, Homo sapiens
ctgattcttgactgg

SEQ ID NO: 324171 - DNA, 15 bp, Homo sapiens
tctgattcttgactg

SEQ ID NO: 324172 - DNA, 15 bp, Homo sapiens
ttctgattcttgact

SEQ ID NO: 324173 - DNA, 15 bp, Homo sapiens
attctgattcttgac

SEQ ID NO: 324174 - DNA, 15 bp, Homo sapiens
cattctgattcttga

SEQ ID NO: 324175 - DNA, 15 bp, Homo sapiens
tcattctgattcttg

SEQ ID NO: 324176 - DNA, 15 bp, Homo sapiens
ttcattctgattctt

SEQ ID NO: 324177 - DNA, 15 bp, Homo sapiens
cttcattctgattct

SEQ ID NO: 324178 - DNA, 15 bp, Homo sapiens
ccttcattctgattc

SEQ ID NO: 324179 - DNA, 15 bp, Homo sapiens
tccttcattctgatt

SEQ ID NO: 324180 - DNA, 15 bp, Homo sapiens
ttccttcattctgat

SEQ ID NO: 324181 - DNA, 15 bp, Homo sapiens
attccttcattctga

SEQ ID NO: 324182 - DNA, 15 bp, Homo sapiens
tattccttcattctg

SEQ ID NO: 324183 - DNA, 15 bp, Homo sapiens
atattccttcattct

SEQ ID NO: 324184 - DNA, 15 bp, Homo sapiens
catattccttcattc

SEQ ID NO: 324185 - DNA, 15 bp, Homo sapiens
acatattccttcatt

SEQ ID NO: 324186 - DNA, 15 bp, Homo sapiens
gacatattccttcat

SEQ ID NO: 324187 - DNA, 15 bp, Homo sapiens
agacatattccttca

SEQ ID NO: 324188 - DNA, 15 bp, Homo sapiens
cagacatattccttc

SEQ ID NO: 324189 - DNA, 15 bp, Homo sapiens
tcagacatattcctt

SEQ ID NO: 324190 - DNA, 15 bp, Homo sapiens
ctcagacatattcct

SEQ ID NO: 324191 - DNA, 15 bp, Homo sapiens
cctcagacatattcc

SEQ ID NO: 324192 - DNA, 15 bp, Homo sapiens
acctcagacatattc

SEQ ID NO: 324193 - DNA, 15 bp, Homo sapiens
tacctcagacatatt

SEQ ID NO: 324194 - DNA, 15 bp, Homo sapiens
gtacctcagacatat

SEQ ID NO: 324195 - DNA, 15 bp, Homo sapiens
ggtacctcagacata

SEQ ID NO: 324196 - DNA, 15 bp, Homo sapiens
tggtacctcagacat

SEQ ID NO: 324197 - DNA, 15 bp, Homo sapiens
ctggtacctcagaca

SEQ ID NO: 324198 - DNA, 15 bp, Homo sapiens
gctggtacctcagac

SEQ ID NO: 324199 - DNA, 15 bp, Homo sapiens
agctggtacctcaga

SEQ ID NO: 324200 - DNA, 15 bp, Homo sapiens
cagctggtacctcag

SEQ ID NO: 324201 - DNA, 15 bp, Homo sapiens
ccagctggtacctca

SEQ ID NO: 324202 - DNA, 15 bp, Homo sapiens
accagctggtacctc

SEQ ID NO: 324203 - DNA, 15 bp, Homo sapiens
aaccagctggtacct

SEQ ID NO: 324204 - DNA, 15 bp, Homo sapiens
aaaccagctggtacc

SEQ ID NO: 324205 - DNA, 15 bp, Homo sapiens
taaaccagctggtac

SEQ ID NO: 324206 - DNA, 15 bp, Homo sapiens
ataaaccagctggta

SEQ ID NO: 324207 - DNA, 15 bp, Homo sapiens
gataaaccagctggt

SEQ ID NO: 324208 - DNA, 15 bp, Homo sapiens
agataaaccagctgg

SEQ ID NO: 324209 - DNA, 15 bp, Homo sapiens
aagataaaccagctg

SEQ ID NO: 324210 - DNA, 15 bp, Homo sapiens
gaagataaaccagct

SEQ ID NO: 324211 - DNA, 15 bp, Homo sapiens
agaagataaaccagc

SEQ ID NO: 324212 - DNA, 15 bp, Homo sapiens
cagaagataaaccag

SEQ ID NO: 324213 - DNA, 15 bp, Homo sapiens
gcagaagataaacca

SEQ ID NO: 324214 - DNA, 15 bp, Homo sapiens
tgcagaagataaacc

SEQ ID NO: 324215 - DNA, 15 bp, Homo sapiens
ttgcagaagataaac

SEQ ID NO: 324216 - DNA, 15 bp, Homo sapiens
cttgcagaagataaa

SEQ ID NO: 324217 - DNA, 15 bp, Homo sapiens
tcttgcagaagataa

SEQ ID NO: 324218 - DNA, 15 bp, Homo sapiens
ttcttgcagaagata

SEQ ID NO: 324219 - DNA, 15 bp, Homo sapiens
gttcttgcagaagat

SEQ ID NO: 324220 - DNA, 15 bp, Homo sapiens
agttcttgcagaaga

SEQ ID NO: 324221 - DNA, 15 bp, Homo sapiens
aagttcttgcagaag

SEQ ID NO: 324222 - DNA, 15 bp, Homo sapiens
gaagttcttgcagaa

SEQ ID NO: 324223 - DNA, 15 bp, Homo sapiens
ggaagttcttgcaga

SEQ ID NO: 324224 - DNA, 15 bp, Homo sapiens
gggaagttcttgcag

SEQ ID NO: 324225 - DNA, 15 bp, Homo sapiens
tgggaagttcttgca

SEQ ID NO: 324226 - DNA, 15 bp, Homo sapiens
atgggaagttcttgc

SEQ ID NO: 324227 - DNA, 15 bp, Homo sapiens
gatgggaagttcttg

SEQ ID NO: 324228 - DNA, 15 bp, Homo sapiens
ggatgggaagttctt

SEQ ID NO: 324229 - DNA, 15 bp, Homo sapiens
gggatgggaagttct

SEQ ID NO: 324230 - DNA, 15 bp, Homo sapiens
agggatgggaagttc

SEQ ID NO: 324231 - DNA, 15 bp, Homo sapiens
aagggatgggaagtt

SEQ ID NO: 324232 - DNA, 15 bp, Homo sapiens
gaagggatgggaagt

SEQ ID NO: 324233 - DNA, 15 bp, Homo sapiens
cgaagggatgggaag

SEQ ID NO: 324234 - DNA, 15 bp, Homo sapiens
tcgaagggatgggaa

SEQ ID NO: 324235 - DNA, 15 bp, Homo sapiens
gtcgaagggatggga

SEQ ID NO: 324236 - DNA, 15 bp, Homo sapiens
ggtcgaagggatggg

SEQ ID NO: 324237 - DNA, 15 bp, Homo sapiens
gggtcgaagggatgg

SEQ ID NO: 324238 - DNA, 15 bp, Homo sapiens
agggtcgaagggatg

SEQ ID NO: 324239 - DNA, 15 bp, Homo sapiens
aagggtcgaagggat

SEQ ID NO: 324240 - DNA, 15 bp, Homo sapiens
caagggtcgaaggga

SEQ ID NO: 324241 - DNA, 15 bp, Homo sapiens
ccaagggtcgaaggg

SEQ ID NO: 324242 - DNA, 15 bp, Homo sapiens
cccaagggtcgaagg

SEQ ID NO: 324243 - DNA, 15 bp, Homo sapiens
tcccaagggtcgaag

SEQ ID NO: 324244 - DNA, 15 bp, Homo sapiens
ttcccaagggtcgaa

SEQ ID NO: 324245 - DNA, 15 bp, Homo sapiens
gttcccaagggtcga

SEQ ID NO: 324246 - DNA, 15 bp, Homo sapiens
agttcccaagggtcg

SEQ ID NO: 324247 - DNA, 15 bp, Homo sapiens
cagttcccaagggtc

SEQ ID NO: 324248 - DNA, 15 bp, Homo sapiens
acagttcccaagggt

SEQ ID NO: 324249 - DNA, 15 bp, Homo sapiens
tacagttcccaaggg

SEQ ID NO: 324250 - DNA, 15 bp, Homo sapiens
ttacagttcccaagg

SEQ ID NO: 324251 - DNA, 15 bp, Homo sapiens
tttacagttcccaag

SEQ ID NO: 324252 - DNA, 15 bp, Homo sapiens
atttacagttcccaa

SEQ ID NO: 324253 - DNA, 15 bp, Homo sapiens
gatttacagttccca

SEQ ID NO: 324254 - DNA, 15 bp, Homo sapiens
tgatttacagttccc

SEQ ID NO: 324255 - DNA, 15 bp, Homo sapiens
ttgatttacagttcc

SEQ ID NO: 324256 - DNA, 15 bp, Homo sapiens
tttgatttacagttc

SEQ ID NO: 324257 - DNA, 15 bp, Homo sapiens
atttgatttacagtt

SEQ ID NO: 324258 - DNA, 15 bp, Homo sapiens
catttgatttacagt

SEQ ID NO: 324259 - DNA, 15 bp, Homo sapiens
ccatttgatttacag

SEQ ID NO: 324260 - DNA, 15 bp, Homo sapiens
gccatttgatttaca

SEQ ID NO: 324261 - DNA, 15 bp, Homo sapiens
tgccatttgatttac

SEQ ID NO: 324262 - DNA, 15 bp, Homo sapiens
ctgccatttgattta

SEQ ID NO: 324263 - DNA, 15 bp, Homo sapiens
tctgccatttgattt

SEQ ID NO: 324264 - DNA, 15 bp, Homo sapiens
gtctgccatttgatt

SEQ ID NO: 324265 - DNA, 15 bp, Homo sapiens
agtctgccatttgat

SEQ ID NO: 324266 - DNA, 15 bp, Homo sapiens
cagtctgccatttga

SEQ ID NO: 324267 - DNA, 15 bp, Homo sapiens
acagtctgccatttg

SEQ ID NO: 324268 - DNA, 15 bp, Homo sapiens
cacagtctgccattt

SEQ ID NO: 324269 - DNA, 15 bp, Homo sapiens
tcacagtctgccatt

SEQ ID NO: 324270 - DNA, 15 bp, Homo sapiens
ttcacagtctgccat

SEQ ID NO: 324271 - DNA, 15 bp, Homo sapiens
gttcacagtctgcca

SEQ ID NO: 324272 - DNA, 15 bp, Homo sapiens
tgttcacagtctgcc

SEQ ID NO: 324273 - DNA, 15 bp, Homo sapiens
atgttcacagtctgc

SEQ ID NO: 324274 - DNA, 15 bp, Homo sapiens
aatgttcacagtctg

SEQ ID NO: 324275 - DNA, 15 bp, Homo sapiens
taatgttcacagtct

SEQ ID NO: 324276 - DNA, 15 bp, Homo sapiens
ttaatgttcacagtc

SEQ ID NO: 324277 - DNA, 15 bp, Homo sapiens
tttaatgttcacagt

SEQ ID NO: 324278 - DNA, 15 bp, Homo sapiens
ttttaatgttcacag

SEQ ID NO: 324279 - DNA, 15 bp, Homo sapiens
attttaatgttcaca

SEQ ID NO: 324280 - DNA, 15 bp, Homo sapiens
gattttaatgttcac

SEQ ID NO: 324281 - DNA, 15 bp, Homo sapiens
tgattttaatgttca

SEQ ID NO: 324282 - DNA, 15 bp, Homo sapiens
gtgattttaatgttc

SEQ ID NO: 324283 - DNA, 15 bp, Homo sapiens
tgtgattttaatgtt

SEQ ID NO: 324284 - DNA, 15 bp, Homo sapiens
gtgtgattttaatgt

SEQ ID NO: 324285 - DNA, 15 bp, Homo sapiens
tgtgtgattttaatg

SEQ ID NO: 324286 - DNA, 15 bp, Homo sapiens
atgtgtgattttaat

SEQ ID NO: 324287 - DNA, 15 bp, Homo sapiens
aatgtgtgattttaa

SEQ ID NO: 324288 - DNA, 15 bp, Homo sapiens
caatgtgtgatttta

SEQ ID NO: 324289 - DNA, 15 bp, Homo sapiens
tcaatgtgtgatttt

SEQ ID NO: 324290 - DNA, 15 bp, Homo sapiens
ttcaatgtgtgattt

SEQ ID NO: 324291 - DNA, 15 bp, Homo sapiens
tttcaatgtgtgatt

SEQ ID NO: 324292 - DNA, 15 bp, Homo sapiens
ttttcaatgtgtgat

SEQ ID NO: 324293 - DNA, 15 bp, Homo sapiens
attttcaatgtgtga

SEQ ID NO: 324294 - DNA, 15 bp, Homo sapiens
tattttcaatgtgtg

SEQ ID NO: 324295 - DNA, 15 bp, Homo sapiens
ttattttcaatgtgt

SEQ ID NO: 324296 - DNA, 15 bp, Homo sapiens
attattttcaatgtg

SEQ ID NO: 324297 - DNA, 15 bp, Homo sapiens
cattattttcaatgt

SEQ ID NO: 324298 - DNA, 15 bp, Homo sapiens
gcattattttcaatg

SEQ ID NO: 324299 - DNA, 15 bp, Homo sapiens
tgcattattttcaat

SEQ ID NO: 324300 - DNA, 15 bp, Homo sapiens
atgcattattttcaa

SEQ ID NO: 324301 - DNA, 15 bp, Homo sapiens
gatgcattattttca

SEQ ID NO: 324302 - DNA, 15 bp, Homo sapiens
agatgcattattttc

SEQ ID NO: 324303 - DNA, 15 bp, Homo sapiens
gagatgcattatttt

SEQ ID NO: 324304 - DNA, 15 bp, Homo sapiens
agagatgcattattt

SEQ ID NO: 324305 - DNA, 15 bp, Homo sapiens
tagagatgcattatt

SEQ ID NO: 324306 - DNA, 15 bp, Homo sapiens
atagagatgcattat

SEQ ID NO: 324307 - DNA, 15 bp, Homo sapiens
aatagagatgcatta

SEQ ID NO: 324308 - DNA, 15 bp, Homo sapiens
aaatagagatgcatt

SEQ ID NO: 324309 - DNA, 15 bp, Homo sapiens
gaaatagagatgcat

SEQ ID NO: 324310 - DNA, 15 bp, Homo sapiens
tgaaatagagatgca

SEQ ID NO: 324311 - DNA, 15 bp, Homo sapiens
atgaaatagagatgc

SEQ ID NO: 324312 - DNA, 15 bp, Homo sapiens
aatgaaatagagatg

SEQ ID NO: 324313 - DNA, 15 bp, Homo sapiens
gaatgaaatagagat

SEQ ID NO: 324314 - DNA, 15 bp, Homo sapiens
agaatgaaatagaga

SEQ ID NO: 324315 - DNA, 15 bp, Homo sapiens
aagaatgaaatagag

SEQ ID NO: 324316 - DNA, 15 bp, Homo sapiens
aaagaatgaaataga

SEQ ID NO: 324317 - DNA, 15 bp, Homo sapiens
aaaagaatgaaatag

SEQ ID NO: 324318 - DNA, 15 bp, Homo sapiens
aaaaagaatgaaata

SEQ ID NO: 324319 - DNA, 15 bp, Homo sapiens
aaaaaagaatgaaat

SEQ ID NO: 324320 - DNA, 15 bp, Homo sapiens
gaaaaaagaatgaaa

SEQ ID NO: 324321 - DNA, 15 bp, Homo sapiens
ggaaaaaagaatgaa

SEQ ID NO: 324322 - DNA, 15 bp, Homo sapiens
tggaaaaaagaatga

SEQ ID NO: 324323 - DNA, 15 bp, Homo sapiens
ctggaaaaaagaatg

SEQ ID NO: 324324 - DNA, 15 bp, Homo sapiens
cctggaaaaaagaat

SEQ ID NO: 324325 - DNA, 15 bp, Homo sapiens
acctggaaaaaagaa

SEQ ID NO: 324326 - DNA, 15 bp, Homo sapiens
aacctggaaaaaaga

SEQ ID NO: 324327 - DNA, 15 bp, Homo sapiens
aaacctggaaaaaag

SEQ ID NO: 324328 - DNA, 15 bp, Homo sapiens
caaacctggaaaaaa

SEQ ID NO: 324329 - DNA, 15 bp, Homo sapiens
tcaaacctggaaaaa

SEQ ID NO: 324330 - DNA, 15 bp, Homo sapiens
ctcaaacctggaaaa

SEQ ID NO: 324331 - DNA, 15 bp, Homo sapiens
tctcaaacctggaaa

SEQ ID NO: 324332 - DNA, 15 bp, Homo sapiens
atctcaaacctggaa

SEQ ID NO: 324333 - DNA, 15 bp, Homo sapiens
aatctcaaacctgga

SEQ ID NO: 324334 - DNA, 15 bp, Homo sapiens
aaatctcaaacctgg

SEQ ID NO: 324335 - DNA, 15 bp, Homo sapiens
aaaatctcaaacctg

SEQ ID NO: 324336 - DNA, 15 bp, Homo sapiens
aaaaatctcaaacct

SEQ ID NO: 324337 - DNA, 15 bp, Homo sapiens
taaaaatctcaaacc

SEQ ID NO: 324338 - DNA, 15 bp, Homo sapiens
ttaaaaatctcaaac

SEQ ID NO: 324339 - DNA, 15 bp, Homo sapiens
cttaaaaatctcaaa

SEQ ID NO: 324340 - DNA, 15 bp, Homo sapiens
tcttaaaaatctcaa

SEQ ID NO: 324341 - DNA, 15 bp, Homo sapiens
ctcttaaaaatctca

SEQ ID NO: 324342 - DNA, 15 bp, Homo sapiens
gctcttaaaaatctc

SEQ ID NO: 324343 - DNA, 15 bp, Homo sapiens
agctcttaaaaatct

SEQ ID NO: 324344 - DNA, 15 bp, Homo sapiens
gagctcttaaaaatc

SEQ ID NO: 324345 - DNA, 15 bp, Homo sapiens
agagctcttaaaaat

SEQ ID NO: 324346 - DNA, 15 bp, Homo sapiens
cagagctcttaaaaa

SEQ ID NO: 324347 - DNA, 15 bp, Homo sapiens
tcagagctcttaaaa

SEQ ID NO: 324348 - DNA, 15 bp, Homo sapiens
ctcagagctcttaaa

SEQ ID NO: 324349 - DNA, 15 bp, Homo sapiens
tctcagagctcttaa

SEQ ID NO: 324350 - DNA, 15 bp, Homo sapiens
gtctcagagctctta

SEQ ID NO: 324351 - DNA, 15 bp, Homo sapiens
agtctcagagctctt

SEQ ID NO: 324352 - DNA, 15 bp, Homo sapiens
cagtctcagagctct

SEQ ID NO: 324353 - DNA, 15 bp, Homo sapiens
tcagtctcagagctc

SEQ ID NO: 324354 - DNA, 15 bp, Homo sapiens
atcagtctcagagct

SEQ ID NO: 324355 - DNA, 15 bp, Homo sapiens
tatcagtctcagagc

SEQ ID NO: 324356 - DNA, 15 bp, Homo sapiens
gtatcagtctcagag

SEQ ID NO: 324357 - DNA, 15 bp, Homo sapiens
tgtatcagtctcaga

SEQ ID NO: 324358 - DNA, 15 bp, Homo sapiens
ctgtatcagtctcag

SEQ ID NO: 324359 - DNA, 15 bp, Homo sapiens
actgtatcagtctca

SEQ ID NO: 324360 - DNA, 15 bp, Homo sapiens
aactgtatcagtctc

SEQ ID NO: 324361 - DNA, 15 bp, Homo sapiens
aaactgtatcagtct

SEQ ID NO: 324362 - DNA, 15 bp, Homo sapiens
aaaactgtatcagtc

SEQ ID NO: 324363 - DNA, 15 bp, Homo sapiens
gaaaactgtatcagt

SEQ ID NO: 324364 - DNA, 15 bp, Homo sapiens
tgaaaactgtatcag

SEQ ID NO: 324365 - DNA, 15 bp, Homo sapiens
ctgaaaactgtatca

SEQ ID NO: 324366 - DNA, 15 bp, Homo sapiens
tctgaaaactgtatc

SEQ ID NO: 324367 - DNA, 15 bp, Homo sapiens
ttctgaaaactgtat

SEQ ID NO: 324368 - DNA, 15 bp, Homo sapiens
tttctgaaaactgta

SEQ ID NO: 324369 - DNA, 15 bp, Homo sapiens
atttctgaaaactgt

SEQ ID NO: 324370 - DNA, 15 bp, Homo sapiens
aatttctgaaaactg

SEQ ID NO: 324371 - DNA, 15 bp, Homo sapiens
aaatttctgaaaact

SEQ ID NO: 324372 - DNA, 15 bp, Homo sapiens
aaaatttctgaaaac

SEQ ID NO: 324373 - DNA, 15 bp, Homo sapiens
caaaatttctgaaaa

SEQ ID NO: 324374 - DNA, 15 bp, Homo sapiens
gcaaaatttctgaaa

SEQ ID NO: 324375 - DNA, 15 bp, Homo sapiens
tgcaaaatttctgaa

SEQ ID NO: 324376 - DNA, 15 bp, Homo sapiens
ctgcaaaatttctga

SEQ ID NO: 324377 - DNA, 15 bp, Homo sapiens
actgcaaaatttctg

SEQ ID NO: 324378 - DNA, 15 bp, Homo sapiens
aactgcaaaatttct

SEQ ID NO: 324379 - DNA, 15 bp, Homo sapiens
aaactgcaaaatttc

SEQ ID NO: 324380 - DNA, 15 bp, Homo sapiens
gaaactgcaaaattt

SEQ ID NO: 324381 - DNA, 15 bp, Homo sapiens
agaaactgcaaaatt

SEQ ID NO: 324382 - DNA, 15 bp, Homo sapiens
cagaaactgcaaaat

SEQ ID NO: 324383 - DNA, 15 bp, Homo sapiens
tcagaaactgcaaaa

SEQ ID NO: 324384 - DNA, 15 bp, Homo sapiens
ttcagaaactgcaaa

SEQ ID NO: 324385 - DNA, 15 bp, Homo sapiens
attcagaaactgcaa

SEQ ID NO: 324386 - DNA, 15 bp, Homo sapiens
tattcagaaactgca

SEQ ID NO: 324387 - DNA, 15 bp, Homo sapiens
atattcagaaactgc

SEQ ID NO: 324388 - DNA, 15 bp, Homo sapiens
aatattcagaaactg

SEQ ID NO: 324389 - DNA, 15 bp, Homo sapiens
gaatattcagaaact

SEQ ID NO: 324390 - DNA, 15 bp, Homo sapiens
agaatattcagaaac

SEQ ID NO: 324391 - DNA, 15 bp, Homo sapiens
aagaatattcagaaa

SEQ ID NO: 324392 - DNA, 15 bp, Homo sapiens
taagaatattcagaa

SEQ ID NO: 324393 - DNA, 15 bp, Homo sapiens
ttaagaatattcaga

SEQ ID NO: 324394 - DNA, 15 bp, Homo sapiens
tttaagaatattcag

SEQ ID NO: 324395 - DNA, 15 bp, Homo sapiens
ttttaagaatattca

SEQ ID NO: 324396 - DNA, 15 bp, Homo sapiens
gttttaagaatattc

SEQ ID NO: 324397 - DNA, 15 bp, Homo sapiens
tgttttaagaatatt

SEQ ID NO: 324398 - DNA, 15 bp, Homo sapiens
ttgttttaagaatat

SEQ ID NO: 324399 - DNA, 15 bp, Homo sapiens
cttgttttaagaata

SEQ ID NO: 324400 - DNA, 15 bp, Homo sapiens
ccttgttttaagaat

SEQ ID NO: 324401 - DNA, 15 bp, Homo sapiens
accttgttttaagaa

SEQ ID NO: 324402 - DNA, 15 bp, Homo sapiens
taccttgttttaaga

SEQ ID NO: 324403 - DNA, 15 bp, Homo sapiens
ttaccttgttttaag

SEQ ID NO: 324404 - DNA, 15 bp, Homo sapiens
cttaccttgttttaa

SEQ ID NO: 324405 - DNA, 15 bp, Homo sapiens
tcttaccttgtttta

SEQ ID NO: 324406 - DNA, 15 bp, Homo sapiens
atcttaccttgtttt

SEQ ID NO: 324407 - DNA, 15 bp, Homo sapiens
catcttaccttgttt

SEQ ID NO: 324408 - DNA, 15 bp, Homo sapiens
acatcttaccttgtt

SEQ ID NO: 324409 - DNA, 15 bp, Homo sapiens
aacatcttaccttgt

SEQ ID NO: 324410 - DNA, 15 bp, Homo sapiens
gaacatcttaccttg

SEQ ID NO: 324411 - DNA, 15 bp, Homo sapiens
agaacatcttacctt

SEQ ID NO: 324412 - DNA, 15 bp, Homo sapiens
aagaacatcttacct

SEQ ID NO: 324413 - DNA, 15 bp, Homo sapiens
gaagaacatcttacc

SEQ ID NO: 324414 - DNA, 15 bp, Homo sapiens
cgaagaacatcttac

SEQ ID NO: 324415 - DNA, 15 bp, Homo sapiens
acgaagaacatctta

SEQ ID NO: 324416 - DNA, 15 bp, Homo sapiens
gacgaagaacatctt

SEQ ID NO: 324417 - DNA, 15 bp, Homo sapiens
tgacgaagaacatct

SEQ ID NO: 324418 - DNA, 15 bp, Homo sapiens
atgacgaagaacatc

SEQ ID NO: 324419 - DNA, 15 bp, Homo sapiens
tatgacgaagaacat

SEQ ID NO: 324420 - DNA, 15 bp, Homo sapiens
atatgacgaagaaca

SEQ ID NO: 324421 - DNA, 15 bp, Homo sapiens
aatatgacgaagaac

SEQ ID NO: 324422 - DNA, 15 bp, Homo sapiens
aaatatgacgaagaa

SEQ ID NO: 324423 - DNA, 15 bp, Homo sapiens
aaaatatgacgaaga

SEQ ID NO: 324424 - DNA, 15 bp, Homo sapiens
aaaaatatgacgaag

SEQ ID NO: 324425 - DNA, 15 bp, Homo sapiens
aaaaaatatgacgaa

SEQ ID NO: 324426 - DNA, 15 bp, Homo sapiens
aaaaaaatatgacga

SEQ ID NO: 324427 - DNA, 15 bp, Homo sapiens
gaaaaaaatatgacg

SEQ ID NO: 324428 - DNA, 15 bp, Homo sapiens
tgaaaaaaatatgac

SEQ ID NO: 324429 - DNA, 15 bp, Homo sapiens
atgaaaaaaatatga

SEQ ID NO: 324430 - DNA, 15 bp, Homo sapiens
aatgaaaaaaatatg

SEQ ID NO: 324431 - DNA, 15 bp, Homo sapiens
gaatgaaaaaaatat

SEQ ID NO: 324432 - DNA, 15 bp, Homo sapiens
ggaatgaaaaaaata

SEQ ID NO: 324433 - DNA, 15 bp, Homo sapiens
tggaatgaaaaaaat

SEQ ID NO: 324434 - DNA, 15 bp, Homo sapiens
ctggaatgaaaaaaa

SEQ ID NO: 324435 - DNA, 15 bp, Homo sapiens
actggaatgaaaaaa

SEQ ID NO: 324436 - DNA, 15 bp, Homo sapiens
gactggaatgaaaaa

SEQ ID NO: 324437 - DNA, 15 bp, Homo sapiens
ggactggaatgaaaa

SEQ ID NO: 324438 - DNA, 15 bp, Homo sapiens
gggactggaatgaaa

SEQ ID NO: 324439 - DNA, 15 bp, Homo sapiens
ggggactggaatgaa

SEQ ID NO: 324440 - DNA, 15 bp, Homo sapiens
aggggactggaatga

SEQ ID NO: 324441 - DNA, 15 bp, Homo sapiens
taggggactggaatg

SEQ ID NO: 324442 - DNA, 15 bp, Homo sapiens
ataggggactggaat

SEQ ID NO: 324443 - DNA, 15 bp, Homo sapiens
cataggggactggaa

SEQ ID NO: 324444 - DNA, 15 bp, Homo sapiens
gcataggggactgga

SEQ ID NO: 324445 - DNA, 15 bp, Homo sapiens
ggcataggggactgg

SEQ ID NO: 324446 - DNA, 15 bp, Homo sapiens
tggcataggggactg

SEQ ID NO: 324447 - DNA, 15 bp, Homo sapiens
ttggcataggggact

SEQ ID NO: 324448 - DNA, 15 bp, Homo sapiens
cttggcataggggac

SEQ ID NO: 324449 - DNA, 15 bp, Homo sapiens
acttggcatagggga

SEQ ID NO: 324450 - DNA, 15 bp, Homo sapiens
aacttggcatagggg

SEQ ID NO: 324451 - DNA, 15 bp, Homo sapiens
caacttggcataggg

SEQ ID NO: 324452 - DNA, 15 bp, Homo sapiens
gcaacttggcatagg

SEQ ID NO: 324453 - DNA, 15 bp, Homo sapiens
tgcaacttggcatag

SEQ ID NO: 324454 - DNA, 15 bp, Homo sapiens
ttgcaacttggcata

SEQ ID NO: 324455 - DNA, 15 bp, Homo sapiens
tttgcaacttggcat

SEQ ID NO: 324456 - DNA, 15 bp, Homo sapiens
atttgcaacttggca

SEQ ID NO: 324457 - DNA, 15 bp, Homo sapiens
tatttgcaacttggc

SEQ ID NO: 324458 - DNA, 15 bp, Homo sapiens
atatttgcaacttgg

SEQ ID NO: 324459 - DNA, 15 bp, Homo sapiens
gatatttgcaacttg

SEQ ID NO: 324460 - DNA, 15 bp, Homo sapiens
tgatatttgcaactt

SEQ ID NO: 324461 - DNA, 15 bp, Homo sapiens
ctgatatttgcaact

SEQ ID NO: 324462 - DNA, 15 bp, Homo sapiens
cctgatatttgcaac

SEQ ID NO: 324463 - DNA, 15 bp, Homo sapiens
acctgatatttgcaa

SEQ ID NO: 324464 - DNA, 15 bp, Homo sapiens
cacctgatatttgca

SEQ ID NO: 324465 - DNA, 15 bp, Homo sapiens
acacctgatatttgc

SEQ ID NO: 324466 - DNA, 15 bp, Homo sapiens
cacacctgatatttg

SEQ ID NO: 324467 - DNA, 15 bp, Homo sapiens
gcacacctgatattt

SEQ ID NO: 324468 - DNA, 15 bp, Homo sapiens
agcacacctgatatt

SEQ ID NO: 324469 - DNA, 15 bp, Homo sapiens
aagcacacctgatat

SEQ ID NO: 324470 - DNA, 15 bp, Homo sapiens
caagcacacctgata

SEQ ID NO: 324471 - DNA, 15 bp, Homo sapiens
gcaagcacacctgat

SEQ ID NO: 324472 - DNA, 15 bp, Homo sapiens
agcaagcacacctga

SEQ ID NO: 324473 - DNA, 15 bp, Homo sapiens
aagcaagcacacctg

SEQ ID NO: 324474 - DNA, 15 bp, Homo sapiens
aaagcaagcacacct

SEQ ID NO: 324475 - DNA, 15 bp, Homo sapiens
gaaagcaagcacacc

SEQ ID NO: 324476 - DNA, 15 bp, Homo sapiens
tgaaagcaagcacac

SEQ ID NO: 324477 - DNA, 15 bp, Homo sapiens
atgaaagcaagcaca

SEQ ID NO: 324478 - DNA, 15 bp, Homo sapiens
gatgaaagcaagcac

SEQ ID NO: 324479 - DNA, 15 bp, Homo sapiens
tgatgaaagcaagca

SEQ ID NO: 324480 - DNA, 15 bp, Homo sapiens
gtgatgaaagcaagc

SEQ ID NO: 324481 - DNA, 15 bp, Homo sapiens
tgtgatgaaagcaag

SEQ ID NO: 324482 - DNA, 15 bp, Homo sapiens
ttgtgatgaaagcaa

SEQ ID NO: 324483 - DNA, 15 bp, Homo sapiens
attgtgatgaaagca

SEQ ID NO: 324484 - DNA, 15 bp, Homo sapiens
cattgtgatgaaagc

SEQ ID NO: 324485 - DNA, 15 bp, Homo sapiens
tcattgtgatgaaag

SEQ ID NO: 324486 - DNA, 15 bp, Homo sapiens
gtcattgtgatgaaa

SEQ ID NO: 324487 - DNA, 15 bp, Homo sapiens
tgtcattgtgatgaa

SEQ ID NO: 324488 - DNA, 15 bp, Homo sapiens
atgtcattgtgatga

SEQ ID NO: 324489 - DNA, 15 bp, Homo sapiens
aatgtcattgtgatg

SEQ ID NO: 324490 - DNA, 15 bp, Homo sapiens
taatgtcattgtgat

SEQ ID NO: 324491 - DNA, 15 bp, Homo sapiens
ataatgtcattgtga

SEQ ID NO: 324492 - DNA, 15 bp, Homo sapiens
aataatgtcattgtg

SEQ ID NO: 324493 - DNA, 15 bp, Homo sapiens
taataatgtcattgt

SEQ ID NO: 324494 - DNA, 15 bp, Homo sapiens
ttaataatgtcattg

SEQ ID NO: 324495 - DNA, 15 bp, Homo sapiens
attaataatgtcatt

SEQ ID NO: 324496 - DNA, 15 bp, Homo sapiens
tattaataatgtcat

SEQ ID NO: 324497 - DNA, 15 bp, Homo sapiens
ctattaataatgtca

SEQ ID NO: 324498 - DNA, 15 bp, Homo sapiens
actattaataatgtc

SEQ ID NO: 324499 - DNA, 15 bp, Homo sapiens
aactattaataatgt

SEQ ID NO: 324500 - DNA, 15 bp, Homo sapiens
taactattaataatg

SEQ ID NO: 324501 - DNA, 15 bp, Homo sapiens
ataactattaataat

SEQ ID NO: 324502 - DNA, 15 bp, Homo sapiens
tataactattaataa

SEQ ID NO: 324503 - DNA, 15 bp, Homo sapiens
atataactattaata

SEQ ID NO: 324504 - DNA, 15 bp, Homo sapiens
aatataactattaat

SEQ ID NO: 324505 - DNA, 15 bp, Homo sapiens
taatataactattaa

SEQ ID NO: 324506 - DNA, 15 bp, Homo sapiens
ataatataactatta

SEQ ID NO: 324507 - DNA, 15 bp, Homo sapiens
aataatataactatt

SEQ ID NO: 324508 - DNA, 15 bp, Homo sapiens
gaataatataactat

SEQ ID NO: 324509 - DNA, 15 bp, Homo sapiens
tgaataatataacta

SEQ ID NO: 324510 - DNA, 15 bp, Homo sapiens
gtgaataatataact

SEQ ID NO: 324511 - DNA, 15 bp, Homo sapiens
tgtgaataatataac

SEQ ID NO: 324512 - DNA, 15 bp, Homo sapiens
ctgtgaataatataa

SEQ ID NO: 324513 - DNA, 15 bp, Homo sapiens
tctgtgaataatata

SEQ ID NO: 324514 - DNA, 15 bp, Homo sapiens
ttctgtgaataatat

SEQ ID NO: 324515 - DNA, 15 bp, Homo sapiens
tttctgtgaataata

SEQ ID NO: 324516 - DNA, 15 bp, Homo sapiens
ctttctgtgaataat

SEQ ID NO: 324517 - DNA, 15 bp, Homo sapiens
tctttctgtgaataa

SEQ ID NO: 324518 - DNA, 15 bp, Homo sapiens
ctctttctgtgaata

SEQ ID NO: 324519 - DNA, 15 bp, Homo sapiens
actctttctgtgaat

SEQ ID NO: 324520 - DNA, 15 bp, Homo sapiens
cactctttctgtgaa

SEQ ID NO: 324521 - DNA, 15 bp, Homo sapiens
tcactctttctgtga

SEQ ID NO: 324522 - DNA, 15 bp, Homo sapiens
atcactctttctgtg

SEQ ID NO: 324523 - DNA, 15 bp, Homo sapiens
gatcactctttctgt

SEQ ID NO: 324524 - DNA, 15 bp, Homo sapiens
agatcactctttctg

SEQ ID NO: 324525 - DNA, 15 bp, Homo sapiens
tagatcactctttct

SEQ ID NO: 324526 - DNA, 15 bp, Homo sapiens
ttagatcactctttc

SEQ ID NO: 324527 - DNA, 15 bp, Homo sapiens
gttagatcactcttt

SEQ ID NO: 324528 - DNA, 15 bp, Homo sapiens
tgttagatcactctt

SEQ ID NO: 324529 - DNA, 15 bp, Homo sapiens
gtgttagatcactct

SEQ ID NO: 324530 - DNA, 15 bp, Homo sapiens
tgtgttagatcactc

SEQ ID NO: 324531 - DNA, 15 bp, Homo sapiens
ctgtgttagatcact

SEQ ID NO: 324532 - DNA, 15 bp, Homo sapiens
tctgtgttagatcac

SEQ ID NO: 324533 - DNA, 15 bp, Homo sapiens
ctctgtgttagatca

SEQ ID NO: 324534 - DNA, 15 bp, Homo sapiens
tctctgtgttagatc

SEQ ID NO: 324535 - DNA, 15 bp, Homo sapiens
ctctctgtgttagat

SEQ ID NO: 324536 - DNA, 15 bp, Homo sapiens
cctctctgtgttaga

SEQ ID NO: 324537 - DNA, 15 bp, Homo sapiens
ccctctctgtgttag

SEQ ID NO: 324538 - DNA, 15 bp, Homo sapiens
tccctctctgtgtta

SEQ ID NO: 324539 - DNA, 15 bp, Homo sapiens
ctccctctctgtgtt

SEQ ID NO: 324540 - DNA, 15 bp, Homo sapiens
tctccctctctgtgt

SEQ ID NO: 324541 - DNA, 15 bp, Homo sapiens
ctctccctctctgtg

SEQ ID NO: 324542 - DNA, 15 bp, Homo sapiens
tctctccctctctgt

SEQ ID NO: 324543 - DNA, 15 bp, Homo sapiens
ttctctccctctctg

SEQ ID NO: 324544 - DNA, 15 bp, Homo sapiens
ttttctctccctctc

SEQ ID NO: 324545 - DNA, 15 bp, Homo sapiens
gttttctctccctct

SEQ ID NO: 324546 - DNA, 15 bp, Homo sapiens
ggttttctctccctc

SEQ ID NO: 324547 - DNA, 15 bp, Homo sapiens
tggttttctctccct

SEQ ID NO: 324548 - DNA, 15 bp, Homo sapiens
ctggttttctctccc

SEQ ID NO: 324549 - DNA, 15 bp, Homo sapiens
tctggttttctctcc

SEQ ID NO: 324550 - DNA, 15 bp, Homo sapiens
ctctggttttctctc

SEQ ID NO: 324551 - DNA, 15 bp, Homo sapiens
actctggttttctct

SEQ ID NO: 324552 - DNA, 15 bp, Homo sapiens
tactctggttttctc

SEQ ID NO: 324553 - DNA, 15 bp, Homo sapiens
ctactctggttttct

SEQ ID NO: 324554 - DNA, 15 bp, Homo sapiens
cctactctggttttc

SEQ ID NO: 324555 - DNA, 15 bp, Homo sapiens
ccctactctggtttt

SEQ ID NO: 324556 - DNA, 15 bp, Homo sapiens
accctactctggttt

SEQ ID NO: 324557 - DNA, 15 bp, Homo sapiens
aaccctactctggtt

SEQ ID NO: 324558 - DNA, 15 bp, Homo sapiens
aaaccctactctggt

SEQ ID NO: 324559 - DNA, 15 bp, Homo sapiens
caaaccctactctgg

SEQ ID NO: 324560 - DNA, 15 bp, Homo sapiens
tcaaaccctactctg

SEQ ID NO: 324561 - DNA, 15 bp, Homo sapiens
ctcaaaccctactct

SEQ ID NO: 324562 - DNA, 15 bp, Homo sapiens
actcaaaccctactc

SEQ ID NO: 324563 - DNA, 15 bp, Homo sapiens
aactcaaaccctact

SEQ ID NO: 324564 - DNA, 15 bp, Homo sapiens
caactcaaaccctac

SEQ ID NO: 324565 - DNA, 15 bp, Homo sapiens
gcaactcaaacccta

SEQ ID NO: 324566 - DNA, 15 bp, Homo sapiens
agcaactcaaaccct

SEQ ID NO: 324567 - DNA, 15 bp, Homo sapiens
gagcaactcaaaccc

SEQ ID NO: 324568 - DNA, 15 bp, Homo sapiens
agagcaactcaaacc

SEQ ID NO: 324569 - DNA, 15 bp, Homo sapiens
gagagcaactcaaac

SEQ ID NO: 324570 - DNA, 15 bp, Homo sapiens
agagagcaactcaaa

SEQ ID NO: 324571 - DNA, 15 bp, Homo sapiens
aagagagcaactcaa

SEQ ID NO: 324572 - DNA, 15 bp, Homo sapiens
gaagagagcaactca

SEQ ID NO: 324573 - DNA, 15 bp, Homo sapiens
agaagagagcaactc

SEQ ID NO: 324574 - DNA, 15 bp, Homo sapiens
cagaagagagcaact

SEQ ID NO: 324575 - DNA, 15 bp, Homo sapiens
gcagaagagagcaac

SEQ ID NO: 324576 - DNA, 15 bp, Homo sapiens
tgcagaagagagcaa

SEQ ID NO: 324577 - DNA, 15 bp, Homo sapiens
ctgcagaagagagca

SEQ ID NO: 324578 - DNA, 15 bp, Homo sapiens
cctgcagaagagagc

SEQ ID NO: 324579 - DNA, 15 bp, Homo sapiens
ccctgcagaagagag

SEQ ID NO: 324580 - DNA, 15 bp, Homo sapiens
gccctgcagaagaga

SEQ ID NO: 324581 - DNA, 15 bp, Homo sapiens
ggccctgcagaagag

SEQ ID NO: 324582 - DNA, 15 bp, Homo sapiens
tggccctgcagaaga

SEQ ID NO: 324583 - DNA, 15 bp, Homo sapiens
ctggccctgcagaag

SEQ ID NO: 324584 - DNA, 15 bp, Homo sapiens
cctggccctgcagaa

SEQ ID NO: 324585 - DNA, 15 bp, Homo sapiens
ccctggccctgcaga

SEQ ID NO: 324586 - DNA, 15 bp, Homo sapiens
tccctggccctgcag

SEQ ID NO: 324587 - DNA, 15 bp, Homo sapiens
ttccctggccctgca

SEQ ID NO: 324588 - DNA, 15 bp, Homo sapiens
gttccctggccctgc

SEQ ID NO: 324589 - DNA, 15 bp, Homo sapiens
agttccctggccctg

SEQ ID NO: 324590 - DNA, 15 bp, Homo sapiens
tagttccctggccct

SEQ ID NO: 324591 - DNA, 15 bp, Homo sapiens
atagttccctggccc

SEQ ID NO: 324592 - DNA, 15 bp, Homo sapiens
catagttccctggcc

SEQ ID NO: 324593 - DNA, 15 bp, Homo sapiens
acatagttccctggc

SEQ ID NO: 324594 - DNA, 15 bp, Homo sapiens
cacatagttccctgg

SEQ ID NO: 324595 - DNA, 15 bp, Homo sapiens
ccacatagttccctg

SEQ ID NO: 324596 - DNA, 15 bp, Homo sapiens
accacatagttccct

SEQ ID NO: 324597 - DNA, 15 bp, Homo sapiens
caccacatagttccc

SEQ ID NO: 324598 - DNA, 15 bp, Homo sapiens
tcaccacatagttcc

SEQ ID NO: 324599 - DNA, 15 bp, Homo sapiens
ttcaccacatagttc

SEQ ID NO: 324600 - DNA, 15 bp, Homo sapiens
tttcaccacatagtt

SEQ ID NO: 324601 - DNA, 15 bp, Homo sapiens
ttttcaccacatagt

SEQ ID NO: 324602 - DNA, 15 bp, Homo sapiens
cttttcaccacatag

SEQ ID NO: 324603 - DNA, 15 bp, Homo sapiens
tcttttcaccacata

SEQ ID NO: 324604 - DNA, 15 bp, Homo sapiens
ctcttttcaccacat

SEQ ID NO: 324605 - DNA, 15 bp, Homo sapiens
tctcttttcaccaca

SEQ ID NO: 324606 - DNA, 15 bp, Homo sapiens
ctctcttttcaccac

SEQ ID NO: 324607 - DNA, 15 bp, Homo sapiens
tctctcttttcacca

SEQ ID NO: 324608 - DNA, 15 bp, Homo sapiens
ttctctcttttcacc

SEQ ID NO: 324609 - DNA, 15 bp, Homo sapiens
tatttctctcttttc

SEQ ID NO: 324610 - DNA, 15 bp, Homo sapiens
ctatttctctctttt

SEQ ID NO: 324611 - DNA, 15 bp, Homo sapiens
gctatttctctcttt

SEQ ID NO: 324612 - DNA, 15 bp, Homo sapiens
agctatttctctctt

SEQ ID NO: 324613 - DNA, 15 bp, Homo sapiens
cagctatttctctct

SEQ ID NO: 324614 - DNA, 15 bp, Homo sapiens
acagctatttctctc

SEQ ID NO: 324615 - DNA, 15 bp, Homo sapiens
cacagctatttctct

SEQ ID NO: 324616 - DNA, 15 bp, Homo sapiens
gcacagctatttctc

SEQ ID NO: 324617 - DNA, 15 bp, Homo sapiens
tgcacagctatttct

SEQ ID NO: 324618 - DNA, 15 bp, Homo sapiens
atgcacagctatttc

SEQ ID NO: 324619 - DNA, 15 bp, Homo sapiens
catgcacagctattt

SEQ ID NO: 324620 - DNA, 15 bp, Homo sapiens
gcatgcacagctatt

SEQ ID NO: 324621 - DNA, 15 bp, Homo sapiens
tgcatgcacagctat

SEQ ID NO: 324622 - DNA, 15 bp, Homo sapiens
ctgcatgcacagcta

SEQ ID NO: 324623 - DNA, 15 bp, Homo sapiens
cctgcatgcacagct

SEQ ID NO: 324624 - DNA, 15 bp, Homo sapiens
ccctgcatgcacagc

SEQ ID NO: 324625 - DNA, 15 bp, Homo sapiens
tccctgcatgcacag

SEQ ID NO: 324626 - DNA, 15 bp, Homo sapiens
ttccctgcatgcaca

SEQ ID NO: 324627 - DNA, 15 bp, Homo sapiens
cttccctgcatgcac

SEQ ID NO: 324628 - DNA, 15 bp, Homo sapiens
acttccctgcatgca

SEQ ID NO: 324629 - DNA, 15 bp, Homo sapiens
tacttccctgcatgc

SEQ ID NO: 324630 - DNA, 15 bp, Homo sapiens
ctacttccctgcatg

SEQ ID NO: 324631 - DNA, 15 bp, Homo sapiens
cctacttccctgcat

SEQ ID NO: 324632 - DNA, 15 bp, Homo sapiens
ccctacttccctgca

SEQ ID NO: 324633 - DNA, 15 bp, Homo sapiens
tccctacttccctgc

SEQ ID NO: 324634 - DNA, 15 bp, Homo sapiens
gtccctacttccctg

SEQ ID NO: 324635 - DNA, 15 bp, Homo sapiens
tgtccctacttccct

SEQ ID NO: 324636 - DNA, 15 bp, Homo sapiens
gtgtccctacttccc

SEQ ID NO: 324637 - DNA, 15 bp, Homo sapiens
agtgtccctacttcc

SEQ ID NO: 324638 - DNA, 15 bp, Homo sapiens
aagtgtccctacttc

SEQ ID NO: 324639 - DNA, 15 bp, Homo sapiens
aaagtgtccctactt

SEQ ID NO: 324640 - DNA, 15 bp, Homo sapiens
aaaagtgtccctact

SEQ ID NO: 324641 - DNA, 15 bp, Homo sapiens
taaaagtgtccctac

SEQ ID NO: 324642 - DNA, 15 bp, Homo sapiens
ctaaaagtgtcccta

SEQ ID NO: 324643 - DNA, 15 bp, Homo sapiens
cctaaaagtgtccct

SEQ ID NO: 324644 - DNA, 15 bp, Homo sapiens
ccctaaaagtgtccc

SEQ ID NO: 324645 - DNA, 15 bp, Homo sapiens
tccctaaaagtgtcc

SEQ ID NO: 324646 - DNA, 15 bp, Homo sapiens
gtccctaaaagtgtc

SEQ ID NO: 324647 - DNA, 15 bp, Homo sapiens
tgtccctaaaagtgt

SEQ ID NO: 324648 - DNA, 15 bp, Homo sapiens
gtgtccctaaaagtg

SEQ ID NO: 324649 - DNA, 15 bp, Homo sapiens
tgtgtccctaaaagt

SEQ ID NO: 324650 - DNA, 15 bp, Homo sapiens
atgtgtccctaaaag

SEQ ID NO: 324651 - DNA, 15 bp, Homo sapiens
tatgtgtccctaaaa

SEQ ID NO: 324652 - DNA, 15 bp, Homo sapiens
ctatgtgtccctaaa

SEQ ID NO: 324653 - DNA, 15 bp, Homo sapiens
gctatgtgtccctaa

SEQ ID NO: 324654 - DNA, 15 bp, Homo sapiens
agctatgtgtcccta

SEQ ID NO: 324655 - DNA, 15 bp, Homo sapiens
cagctatgtgtccct

SEQ ID NO: 324656 - DNA, 15 bp, Homo sapiens
tcagctatgtgtccc

SEQ ID NO: 324657 - DNA, 15 bp, Homo sapiens
atcagctatgtgtcc

SEQ ID NO: 324658 - DNA, 15 bp, Homo sapiens
tatcagctatgtgtc

SEQ ID NO: 324659 - DNA, 15 bp, Homo sapiens
atatcagctatgtgt

SEQ ID NO: 324660 - DNA, 15 bp, Homo sapiens
gatatcagctatgtg

SEQ ID NO: 324661 - DNA, 15 bp, Homo sapiens
agatatcagctatgt

SEQ ID NO: 324662 - DNA, 15 bp, Homo sapiens
cagatatcagctatg

SEQ ID NO: 324663 - DNA, 15 bp, Homo sapiens
acagatatcagctat

SEQ ID NO: 324664 - DNA, 15 bp, Homo sapiens
cacagatatcagcta

SEQ ID NO: 324665 - DNA, 15 bp, Homo sapiens
acacagatatcagct

SEQ ID NO: 324666 - DNA, 15 bp, Homo sapiens
cacacagatatcagc

SEQ ID NO: 324667 - DNA, 15 bp, Homo sapiens
gcacacagatatcag

SEQ ID NO: 324668 - DNA, 15 bp, Homo sapiens
ggcacacagatatca

SEQ ID NO: 324669 - DNA, 15 bp, Homo sapiens
gggcacacagatatc

SEQ ID NO: 324670 - DNA, 15 bp, Homo sapiens
tgggcacacagatat

SEQ ID NO: 324671 - DNA, 15 bp, Homo sapiens
ctgggcacacagata

SEQ ID NO: 324672 - DNA, 15 bp, Homo sapiens
actgggcacacagat

SEQ ID NO: 324673 - DNA, 15 bp, Homo sapiens
cactgggcacacaga

SEQ ID NO: 324674 - DNA, 15 bp, Homo sapiens
ccactgggcacacag

SEQ ID NO: 324675 - DNA, 15 bp, Homo sapiens
cccactgggcacaca

SEQ ID NO: 324676 - DNA, 15 bp, Homo sapiens
ccccactgggcacac

SEQ ID NO: 324677 - DNA, 15 bp, Homo sapiens
accccactgggcaca

SEQ ID NO: 324678 - DNA, 15 bp, Homo sapiens
aaccccactgggcac

SEQ ID NO: 324679 - DNA, 15 bp, Homo sapiens
caaccccactgggca

SEQ ID NO: 324680 - DNA, 15 bp, Homo sapiens
gcaaccccactgggc

SEQ ID NO: 324681 - DNA, 15 bp, Homo sapiens
ggcaaccccactggg

SEQ ID NO: 324682 - DNA, 15 bp, Homo sapiens
gggcaaccccactgg

SEQ ID NO: 324683 - DNA, 15 bp, Homo sapiens
tgggcaaccccactg

SEQ ID NO: 324684 - DNA, 15 bp, Homo sapiens
ctgggcaaccccact

SEQ ID NO: 324685 - DNA, 15 bp, Homo sapiens
tctgggcaaccccac

SEQ ID NO: 324686 - DNA, 15 bp, Homo sapiens
atctgggcaacccca

SEQ ID NO: 324687 - DNA, 15 bp, Homo sapiens
tatctgggcaacccc

SEQ ID NO: 324688 - DNA, 15 bp, Homo sapiens
ttatctgggcaaccc

SEQ ID NO: 324689 - DNA, 15 bp, Homo sapiens
cttatctgggcaacc

SEQ ID NO: 324690 - DNA, 15 bp, Homo sapiens
tcttatctgggcaac

SEQ ID NO: 324691 - DNA, 15 bp, Homo sapiens
ctcttatctgggcaa

SEQ ID NO: 324692 - DNA, 15 bp, Homo sapiens
gctcttatctgggca

SEQ ID NO: 324693 - DNA, 15 bp, Homo sapiens
ggctcttatctgggc

SEQ ID NO: 324694 - DNA, 15 bp, Homo sapiens
tggctcttatctggg

SEQ ID NO: 324695 - DNA, 15 bp, Homo sapiens
gtggctcttatctgg

SEQ ID NO: 324696 - DNA, 15 bp, Homo sapiens
cgtggctcttatctg

SEQ ID NO: 324697 - DNA, 15 bp, Homo sapiens
ccgtggctcttatct

SEQ ID NO: 324698 - DNA, 15 bp, Homo sapiens
accgtggctcttatc

SEQ ID NO: 324699 - DNA, 15 bp, Homo sapiens
caccgtggctcttat

SEQ ID NO: 324700 - DNA, 15 bp, Homo sapiens
acaccgtggctctta

SEQ ID NO: 324701 - DNA, 15 bp, Homo sapiens
gacaccgtggctctt

SEQ ID NO: 324702 - DNA, 15 bp, Homo sapiens
tgacaccgtggctct

SEQ ID NO: 324703 - DNA, 15 bp, Homo sapiens
ttgacaccgtggctc

SEQ ID NO: 324704 - DNA, 15 bp, Homo sapiens
cttgacaccgtggct

SEQ ID NO: 324705 - DNA, 15 bp, Homo sapiens
ccttgacaccgtggc

SEQ ID NO: 324706 - DNA, 15 bp, Homo sapiens
cccttgacaccgtgg

SEQ ID NO: 324707 - DNA, 15 bp, Homo sapiens
ccccttgacaccgtg

SEQ ID NO: 324708 - DNA, 15 bp, Homo sapiens
tccccttgacaccgt

SEQ ID NO: 324709 - DNA, 15 bp, Homo sapiens
ttccccttgacaccg

SEQ ID NO: 324710 - DNA, 15 bp, Homo sapiens
tttccccttgacacc

SEQ ID NO: 324711 - DNA, 15 bp, Homo sapiens
ctttccccttgacac

SEQ ID NO: 324712 - DNA, 15 bp, Homo sapiens
cctttccccttgaca

SEQ ID NO: 324713 - DNA, 15 bp, Homo sapiens
acctttccccttgac

SEQ ID NO: 324714 - DNA, 15 bp, Homo sapiens
cacctttccccttga

SEQ ID NO: 324715 - DNA, 15 bp, Homo sapiens
gcacctttccccttg

SEQ ID NO: 324716 - DNA, 15 bp, Homo sapiens
tgcacctttcccctt

SEQ ID NO: 324717 - DNA, 15 bp, Homo sapiens
gtgcacctttcccct

SEQ ID NO: 324718 - DNA, 15 bp, Homo sapiens
tgtgcacctttcccc

SEQ ID NO: 324719 - DNA, 15 bp, Homo sapiens
ctgtgcacctttccc

SEQ ID NO: 324720 - DNA, 15 bp, Homo sapiens
actgtgcacctttcc

SEQ ID NO: 324721 - DNA, 15 bp, Homo sapiens
cactgtgcacctttc

SEQ ID NO: 324722 - DNA, 15 bp, Homo sapiens
tcactgtgcaccttt

SEQ ID NO: 324723 - DNA, 15 bp, Homo sapiens
ttcactgtgcacctt

SEQ ID NO: 324724 - DNA, 15 bp, Homo sapiens
attcactgtgcacct

SEQ ID NO: 324725 - DNA, 15 bp, Homo sapiens
cattcactgtgcacc

SEQ ID NO: 324726 - DNA, 15 bp, Homo sapiens
tcattcactgtgcac

SEQ ID NO: 324727 - DNA, 15 bp, Homo sapiens
ctcattcactgtgca

SEQ ID NO: 324728 - DNA, 15 bp, Homo sapiens
cctcattcactgtgc

SEQ ID NO: 324729 - DNA, 15 bp, Homo sapiens
ccctcattcactgtg

SEQ ID NO: 324730 - DNA, 15 bp, Homo sapiens
tccctcattcactgt

SEQ ID NO: 324731 - DNA, 15 bp, Homo sapiens
atccctcattcactg

SEQ ID NO: 324732 - DNA, 15 bp, Homo sapiens
tatccctcattcact

SEQ ID NO: 324733 - DNA, 15 bp, Homo sapiens
ctatccctcattcac

SEQ ID NO: 324734 - DNA, 15 bp, Homo sapiens
tctatccctcattca

SEQ ID NO: 324735 - DNA, 15 bp, Homo sapiens
atctatccctcattc

SEQ ID NO: 324736 - DNA, 15 bp, Homo sapiens
aatctatccctcatt

SEQ ID NO: 324737 - DNA, 15 bp, Homo sapiens
aaatctatccctcat

SEQ ID NO: 324738 - DNA, 15 bp, Homo sapiens
caaatctatccctca

SEQ ID NO: 324739 - DNA, 15 bp, Homo sapiens
gcaaatctatccctc

SEQ ID NO: 324740 - DNA, 15 bp, Homo sapiens
agcaaatctatccct

SEQ ID NO: 324741 - DNA, 15 bp, Homo sapiens
gagcaaatctatccc

SEQ ID NO: 324742 - DNA, 15 bp, Homo sapiens
tgagcaaatctatcc

SEQ ID NO: 324743 - DNA, 15 bp, Homo sapiens
atgagcaaatctatc

SEQ ID NO: 324744 - DNA, 15 bp, Homo sapiens
aatgagcaaatctat

SEQ ID NO: 324745 - DNA, 15 bp, Homo sapiens
caatgagcaaatcta

SEQ ID NO: 324746 - DNA, 15 bp, Homo sapiens
tcaatgagcaaatct

SEQ ID NO: 324747 - DNA, 15 bp, Homo sapiens
atcaatgagcaaatc

SEQ ID NO: 324748 - DNA, 15 bp, Homo sapiens
aatcaatgagcaaat

SEQ ID NO: 324749 - DNA, 15 bp, Homo sapiens
caatcaatgagcaaa

SEQ ID NO: 324750 - DNA, 15 bp, Homo sapiens
ccaatcaatgagcaa

SEQ ID NO: 324751 - DNA, 15 bp, Homo sapiens
cccaatcaatgagca

SEQ ID NO: 324752 - DNA, 15 bp, Homo sapiens
tcccaatcaatgagc

SEQ ID NO: 324753 - DNA, 15 bp, Homo sapiens
ttcccaatcaatgag

SEQ ID NO: 324754 - DNA, 15 bp, Homo sapiens
cttcccaatcaatga

SEQ ID NO: 324755 - DNA, 15 bp, Homo sapiens
acttcccaatcaatg

SEQ ID NO: 324756 - DNA, 15 bp, Homo sapiens
gacttcccaatcaat

SEQ ID NO: 324757 - DNA, 15 bp, Homo sapiens
ggacttcccaatcaa

SEQ ID NO: 324758 - DNA, 15 bp, Homo sapiens
aggacttcccaatca

SEQ ID NO: 324759 - DNA, 15 bp, Homo sapiens
aaggacttcccaatc

SEQ ID NO: 324760 - DNA, 15 bp, Homo sapiens
caaggacttcccaat

SEQ ID NO: 324761 - DNA, 15 bp, Homo sapiens
gcaaggacttcccaa

SEQ ID NO: 324762 - DNA, 15 bp, Homo sapiens
agcaaggacttccca

SEQ ID NO: 324763 - DNA, 15 bp, Homo sapiens
cagcaaggacttccc

SEQ ID NO: 324764 - DNA, 15 bp, Homo sapiens
gcagcaaggacttcc

SEQ ID NO: 324765 - DNA, 15 bp, Homo sapiens
ggcagcaaggacttc

SEQ ID NO: 324766 - DNA, 15 bp, Homo sapiens
tggcagcaaggactt

SEQ ID NO: 324767 - DNA, 15 bp, Homo sapiens
ctggcagcaaggact

SEQ ID NO: 324768 - DNA, 15 bp, Homo sapiens
tctggcagcaaggac

SEQ ID NO: 324769 - DNA, 15 bp, Homo sapiens
aatctggcagcaagg

SEQ ID NO: 324770 - DNA, 15 bp, Homo sapiens
gaatctggcagcaag

SEQ ID NO: 324771 - DNA, 15 bp, Homo sapiens
agaatctggcagcaa

SEQ ID NO: 324772 - DNA, 15 bp, Homo sapiens
tagaatctggcagca

SEQ ID NO: 324773 - DNA, 15 bp, Homo sapiens
ttagaatctggcagc

SEQ ID NO: 324774 - DNA, 15 bp, Homo sapiens
tttagaatctggcag

SEQ ID NO: 324775 - DNA, 15 bp, Homo sapiens
atttagaatctggca

SEQ ID NO: 324776 - DNA, 15 bp, Homo sapiens
gatttagaatctggc

SEQ ID NO: 324777 - DNA, 15 bp, Homo sapiens
cgatttagaatctgg

SEQ ID NO: 324778 - DNA, 15 bp, Homo sapiens
gcgatttagaatctg

SEQ ID NO: 324779 - DNA, 15 bp, Homo sapiens
ggcgatttagaatct

SEQ ID NO: 324780 - DNA, 15 bp, Homo sapiens
gggcgatttagaatc

SEQ ID NO: 324781 - DNA, 15 bp, Homo sapiens
ggggcgatttagaat

SEQ ID NO: 324782 - DNA, 15 bp, Homo sapiens
aggggcgatttagaa

SEQ ID NO: 324783 - DNA, 15 bp, Homo sapiens
aaggggcgatttaga

SEQ ID NO: 324784 - DNA, 15 bp, Homo sapiens
aaaggggcgatttag

SEQ ID NO: 324785 - DNA, 15 bp, Homo sapiens
taaaggggcgattta

SEQ ID NO: 324786 - DNA, 15 bp, Homo sapiens
ataaaggggcgattt

SEQ ID NO: 324787 - DNA, 15 bp, Homo sapiens
aataaaggggcgatt

SEQ ID NO: 324788 - DNA, 15 bp, Homo sapiens
taataaaggggcgat

SEQ ID NO: 324789 - DNA, 15 bp, Homo sapiens
gtaataaaggggcga

SEQ ID NO: 324790 - DNA, 15 bp, Homo sapiens
tgtaataaaggggcg

SEQ ID NO: 324791 - DNA, 15 bp, Homo sapiens
atgtaataaaggggc

SEQ ID NO: 324792 - DNA, 15 bp, Homo sapiens
gatgtaataaagggg

SEQ ID NO: 324793 - DNA, 15 bp, Homo sapiens
tgatgtaataaaggg

SEQ ID NO: 324794 - DNA, 15 bp, Homo sapiens
gtgatgtaataaagg

SEQ ID NO: 324795 - DNA, 15 bp, Homo sapiens
agtgatgtaataaag

SEQ ID NO: 324796 - DNA, 15 bp, Homo sapiens
tagtgatgtaataaa

SEQ ID NO: 324797 - DNA, 15 bp, Homo sapiens
ttagtgatgtaataa

SEQ ID NO: 324798 - DNA, 15 bp, Homo sapiens
tttagtgatgtaata

SEQ ID NO: 324799 - DNA, 15 bp, Homo sapiens
atttagtgatgtaat

SEQ ID NO: 324800 - DNA, 15 bp, Homo sapiens
tatttagtgatgtaa

SEQ ID NO: 324801 - DNA, 15 bp, Homo sapiens
ttatttagtgatgta

SEQ ID NO: 324802 - DNA, 15 bp, Homo sapiens
cttatttagtgatgt

SEQ ID NO: 324803 - DNA, 15 bp, Homo sapiens
tcttatttagtgatg

SEQ ID NO: 324804 - DNA, 15 bp, Homo sapiens
ttcttatttagtgat

SEQ ID NO: 324805 - DNA, 15 bp, Homo sapiens
tttcttatttagtga

SEQ ID NO: 324806 - DNA, 15 bp, Homo sapiens
atttcttatttagtg

SEQ ID NO: 324807 - DNA, 15 bp, Homo sapiens
aatttcttatttagt

SEQ ID NO: 324808 - DNA, 15 bp, Homo sapiens
caatttcttatttag

SEQ ID NO: 324809 - DNA, 15 bp, Homo sapiens
tcaatttcttattta

SEQ ID NO: 324810 - DNA, 15 bp, Homo sapiens
ttcaatttcttattt

SEQ ID NO: 324811 - DNA, 15 bp, Homo sapiens
gttcaatttcttatt

SEQ ID NO: 324812 - DNA, 15 bp, Homo sapiens
ggttcaatttcttat

SEQ ID NO: 324813 - DNA, 15 bp, Homo sapiens
gggttcaatttctta

SEQ ID NO: 324814 - DNA, 15 bp, Homo sapiens
tgggttcaatttctt

SEQ ID NO: 324815 - DNA, 15 bp, Homo sapiens
ctgggttcaatttct

SEQ ID NO: 324816 - DNA, 15 bp, Homo sapiens
actgggttcaatttc

SEQ ID NO: 324817 - DNA, 15 bp, Homo sapiens
gactgggttcaattt

SEQ ID NO: 324818 - DNA, 15 bp, Homo sapiens
cgactgggttcaatt

SEQ ID NO: 324819 - DNA, 15 bp, Homo sapiens
acgactgggttcaat

SEQ ID NO: 324820 - DNA, 15 bp, Homo sapiens
tacgactgggttcaa

SEQ ID NO: 324821 - DNA, 15 bp, Homo sapiens
ttacgactgggttca

SEQ ID NO: 324822 - DNA, 15 bp, Homo sapiens
tttacgactgggttc

SEQ ID NO: 324823 - DNA, 15 bp, Homo sapiens
ctttacgactgggtt

SEQ ID NO: 324824 - DNA, 15 bp, Homo sapiens
cctttacgactgggt

SEQ ID NO: 324825 - DNA, 15 bp, Homo sapiens
gcctttacgactggg

SEQ ID NO: 324826 - DNA, 15 bp, Homo sapiens
tgcctttacgactgg

SEQ ID NO: 324827 - DNA, 15 bp, Homo sapiens
ttgcctttacgactg

SEQ ID NO: 324828 - DNA, 15 bp, Homo sapiens
attgcctttacgact

SEQ ID NO: 324829 - DNA, 15 bp, Homo sapiens
tattgcctttacgac

SEQ ID NO: 324830 - DNA, 15 bp, Homo sapiens
ctattgcctttacga

SEQ ID NO: 324831 - DNA, 15 bp, Homo sapiens
tctattgcctttacg

SEQ ID NO: 324832 - DNA, 15 bp, Homo sapiens
ttctattgcctttac

SEQ ID NO: 324833 - DNA, 15 bp, Homo sapiens
cttctattgccttta

SEQ ID NO: 324834 - DNA, 15 bp, Homo sapiens
gcttctattgccttt

SEQ ID NO: 324835 - DNA, 15 bp, Homo sapiens
tgcttctattgcctt

SEQ ID NO: 324836 - DNA, 15 bp, Homo sapiens
ttgcttctattgcct

SEQ ID NO: 324837 - DNA, 15 bp, Homo sapiens
attgcttctattgcc

SEQ ID NO: 324838 - DNA, 15 bp, Homo sapiens
cattgcttctattgc

SEQ ID NO: 324839 - DNA, 15 bp, Homo sapiens
gcattgcttctattg

SEQ ID NO: 324840 - DNA, 15 bp, Homo sapiens
agcattgcttctatt

SEQ ID NO: 324841 - DNA, 15 bp, Homo sapiens
cagcattgcttctat

SEQ ID NO: 324842 - DNA, 15 bp, Homo sapiens
acagcattgcttcta

SEQ ID NO: 324843 - DNA, 15 bp, Homo sapiens
cacagcattgcttct

SEQ ID NO: 324844 - DNA, 15 bp, Homo sapiens
tcacagcattgcttc

SEQ ID NO: 324845 - DNA, 15 bp, Homo sapiens
ctcacagcattgctt

SEQ ID NO: 324846 - DNA, 15 bp, Homo sapiens
tctcacagcattgct

SEQ ID NO: 324847 - DNA, 15 bp, Homo sapiens
ctctcacagcattgc

SEQ ID NO: 324848 - DNA, 15 bp, Homo sapiens
cctctcacagcattg

SEQ ID NO: 324849 - DNA, 15 bp, Homo sapiens
gcctctcacagcatt

SEQ ID NO: 324850 - DNA, 15 bp, Homo sapiens
tgcctctcacagcat

SEQ ID NO: 324851 - DNA, 15 bp, Homo sapiens
ttgcctctcacagca

SEQ ID NO: 324852 - DNA, 15 bp, Homo sapiens
attgcctctcacagc

SEQ ID NO: 324853 - DNA, 15 bp, Homo sapiens
gattgcctctcacag

SEQ ID NO: 324854 - DNA, 15 bp, Homo sapiens
tgattgcctctcaca

SEQ ID NO: 324855 - DNA, 15 bp, Homo sapiens
gtgattgcctctcac

SEQ ID NO: 324856 - DNA, 15 bp, Homo sapiens
tgtgattgcctctca

SEQ ID NO: 324857 - DNA, 15 bp, Homo sapiens
ttgtgattgcctctc

SEQ ID NO: 324858 - DNA, 15 bp, Homo sapiens
tttgtgattgcctct

SEQ ID NO: 324859 - DNA, 15 bp, Homo sapiens
gtttgtgattgcctc

SEQ ID NO: 324860 - DNA, 15 bp, Homo sapiens
ggtttgtgattgcct

SEQ ID NO: 324861 - DNA, 15 bp, Homo sapiens
aggtttgtgattgcc

SEQ ID NO: 324862 - DNA, 15 bp, Homo sapiens
gaggtttgtgattgc

SEQ ID NO: 324863 - DNA, 15 bp, Homo sapiens
tgaggtttgtgattg

SEQ ID NO: 324864 - DNA, 15 bp, Homo sapiens
atgaggtttgtgatt

SEQ ID NO: 324865 - DNA, 15 bp, Homo sapiens
tatgaggtttgtgat

SEQ ID NO: 324866 - DNA, 15 bp, Homo sapiens
gtatgaggtttgtga

SEQ ID NO: 324867 - DNA, 15 bp, Homo sapiens
cgtatgaggtttgtg

SEQ ID NO: 324868 - DNA, 15 bp, Homo sapiens
ccgtatgaggtttgt

SEQ ID NO: 324869 - DNA, 15 bp, Homo sapiens
gccgtatgaggtttg

SEQ ID NO: 324870 - DNA, 15 bp, Homo sapiens
tgccgtatgaggttt

SEQ ID NO: 324871 - DNA, 15 bp, Homo sapiens
ttgccgtatgaggtt

SEQ ID NO: 324872 - DNA, 15 bp, Homo sapiens
tttgccgtatgaggt

SEQ ID NO: 324873 - DNA, 15 bp, Homo sapiens
gtttgccgtatgagg

SEQ ID NO: 324874 - DNA, 15 bp, Homo sapiens
tgtttgccgtatgag

SEQ ID NO: 324875 - DNA, 15 bp, Homo sapiens
ctgtttgccgtatga

SEQ ID NO: 324876 - DNA, 15 bp, Homo sapiens
tctgtttgccgtatg

SEQ ID NO: 324877 - DNA, 15 bp, Homo sapiens
ttctgtttgccgtat

SEQ ID NO: 324878 - DNA, 15 bp, Homo sapiens
tttctgtttgccgta

SEQ ID NO: 324879 - DNA, 15 bp, Homo sapiens
ttttctgtttgccgt

SEQ ID NO: 324880 - DNA, 15 bp, Homo sapiens
attttctgtttgccg

SEQ ID NO: 324881 - DNA, 15 bp, Homo sapiens
gattttctgtttgcc

SEQ ID NO: 324882 - DNA, 15 bp, Homo sapiens
tgattttctgtttgc

SEQ ID NO: 324883 - DNA, 15 bp, Homo sapiens
atgattttctgtttg

SEQ ID NO: 324884 - DNA, 15 bp, Homo sapiens
aatgattttctgttt

SEQ ID NO: 324885 - DNA, 15 bp, Homo sapiens
aaatgattttctgtt

SEQ ID NO: 324886 - DNA, 15 bp, Homo sapiens
gaaatgattttctgt

SEQ ID NO: 324887 - DNA, 15 bp, Homo sapiens
tgaaatgattttctg

SEQ ID NO: 324888 - DNA, 15 bp, Homo sapiens
atgaaatgattttct

SEQ ID NO: 324889 - DNA, 15 bp, Homo sapiens
aatgaaatgattttc

SEQ ID NO: 324890 - DNA, 15 bp, Homo sapiens
aaatgaaatgatttt

SEQ ID NO: 324891 - DNA, 15 bp, Homo sapiens
gaaatgaaatgattt

SEQ ID NO: 324892 - DNA, 15 bp, Homo sapiens
tgaaatgaaatgatt

SEQ ID NO: 324893 - DNA, 15 bp, Homo sapiens
ttgaaatgaaatgat

SEQ ID NO: 324894 - DNA, 15 bp, Homo sapiens
tttgaaatgaaatga

SEQ ID NO: 324895 - DNA, 15 bp, Homo sapiens
ctttgaaatgaaatg

SEQ ID NO: 324896 - DNA, 15 bp, Homo sapiens
gctttgaaatgaaat

SEQ ID NO: 324897 - DNA, 15 bp, Homo sapiens
tgctttgaaatgaaa

SEQ ID NO: 324898 - DNA, 15 bp, Homo sapiens
gtgctttgaaatgaa

SEQ ID NO: 324899 - DNA, 15 bp, Homo sapiens
tgtgctttgaaatga

SEQ ID NO: 324900 - DNA, 15 bp, Homo sapiens
atgtgctttgaaatg

SEQ ID NO: 324901 - DNA, 15 bp, Homo sapiens
aatgtgctttgaaat

SEQ ID NO: 324902 - DNA, 15 bp, Homo sapiens
aaatgtgctttgaaa

SEQ ID NO: 324903 - DNA, 15 bp, Homo sapiens
aaaatgtgctttgaa

SEQ ID NO: 324904 - DNA, 15 bp, Homo sapiens
taaaatgtgctttga

SEQ ID NO: 324905 - DNA, 15 bp, Homo sapiens
ctaaaatgtgctttg

SEQ ID NO: 324906 - DNA, 15 bp, Homo sapiens
tctaaaatgtgcttt

SEQ ID NO: 324907 - DNA, 15 bp, Homo sapiens
atctaaaatgtgctt

SEQ ID NO: 324908 - DNA, 15 bp, Homo sapiens
catctaaaatgtgct

SEQ ID NO: 324909 - DNA, 15 bp, Homo sapiens
acatctaaaatgtgc

SEQ ID NO: 324910 - DNA, 15 bp, Homo sapiens
aacatctaaaatgtg

SEQ ID NO: 324911 - DNA, 15 bp, Homo sapiens
gaacatctaaaatgt

SEQ ID NO: 324912 - DNA, 15 bp, Homo sapiens
tgaacatctaaaatg

SEQ ID NO: 324913 - DNA, 15 bp, Homo sapiens
gtgaacatctaaaat

SEQ ID NO: 324914 - DNA, 15 bp, Homo sapiens
agtgaacatctaaaa

SEQ ID NO: 324915 - DNA, 15 bp, Homo sapiens
aagtgaacatctaaa

SEQ ID NO: 324916 - DNA, 15 bp, Homo sapiens
aaagtgaacatctaa

SEQ ID NO: 324917 - DNA, 15 bp, Homo sapiens
taaagtgaacatcta

SEQ ID NO: 324918 - DNA, 15 bp, Homo sapiens
ataaagtgaacatct

SEQ ID NO: 324919 - DNA, 15 bp, Homo sapiens
tataaagtgaacatc

SEQ ID NO: 324920 - DNA, 15 bp, Homo sapiens
atataaagtgaacat

SEQ ID NO: 324921 - DNA, 15 bp, Homo sapiens
gatataaagtgaaca

SEQ ID NO: 324922 - DNA, 15 bp, Homo sapiens
ggatataaagtgaac

SEQ ID NO: 324923 - DNA, 15 bp, Homo sapiens
cggatataaagtgaa

SEQ ID NO: 324924 - DNA, 15 bp, Homo sapiens
acggatataaagtga

SEQ ID NO: 324925 - DNA, 15 bp, Homo sapiens
tacggatataaagtg

SEQ ID NO: 324926 - DNA, 15 bp, Homo sapiens
atacggatataaagt

SEQ ID NO: 324927 - DNA, 15 bp, Homo sapiens
tatacggatataaag

SEQ ID NO: 324928 - DNA, 15 bp, Homo sapiens
ctatacggatataaa

SEQ ID NO: 324929 - DNA, 15 bp, Homo sapiens
gctatacggatataa

SEQ ID NO: 324930 - DNA, 15 bp, Homo sapiens
ggctatacggatata

SEQ ID NO: 324931 - DNA, 15 bp, Homo sapiens
gggctatacggatat

SEQ ID NO: 324932 - DNA, 15 bp, Homo sapiens
agggctatacggata

SEQ ID NO: 324933 - DNA, 15 bp, Homo sapiens
aagggctatacggat

SEQ ID NO: 324934 - DNA, 15 bp, Homo sapiens
caagggctatacgga

SEQ ID NO: 324935 - DNA, 15 bp, Homo sapiens
ccaagggctatacgg

SEQ ID NO: 324936 - DNA, 15 bp, Homo sapiens
cccaagggctatacg

SEQ ID NO: 324937 - DNA, 15 bp, Homo sapiens
ccccaagggctatac

SEQ ID NO: 324938 - DNA, 15 bp, Homo sapiens
gccccaagggctata

SEQ ID NO: 324939 - DNA, 15 bp, Homo sapiens
agccccaagggctat

SEQ ID NO: 324940 - DNA, 15 bp, Homo sapiens
aagccccaagggcta

SEQ ID NO: 324941 - DNA, 15 bp, Homo sapiens
aaagccccaagggct

SEQ ID NO: 324942 - DNA, 15 bp, Homo sapiens
gaaagccccaagggc

SEQ ID NO: 324943 - DNA, 15 bp, Homo sapiens
agaaagccccaaggg

SEQ ID NO: 324944 - DNA, 15 bp, Homo sapiens
gagaaagccccaagg

SEQ ID NO: 324945 - DNA, 15 bp, Homo sapiens
agagaaagccccaag

SEQ ID NO: 324946 - DNA, 15 bp, Homo sapiens
cagagaaagccccaa

SEQ ID NO: 324947 - DNA, 15 bp, Homo sapiens
acagagaaagcccca

SEQ ID NO: 324948 - DNA, 15 bp, Homo sapiens
cacagagaaagcccc

SEQ ID NO: 324949 - DNA, 15 bp, Homo sapiens
tcacagagaaagccc

SEQ ID NO: 324950 - DNA, 15 bp, Homo sapiens
ttcacagagaaagcc

SEQ ID NO: 324951 - DNA, 15 bp, Homo sapiens
attcacagagaaagc

SEQ ID NO: 324952 - DNA, 15 bp, Homo sapiens
aattcacagagaaag

SEQ ID NO: 324953 - DNA, 15 bp, Homo sapiens
caattcacagagaaa

SEQ ID NO: 324954 - DNA, 15 bp, Homo sapiens
gcaattcacagagaa

SEQ ID NO: 324955 - DNA, 15 bp, Homo sapiens
ggcaattcacagaga

SEQ ID NO: 324956 - DNA, 15 bp, Homo sapiens
aggcaattcacagag

SEQ ID NO: 324957 - DNA, 15 bp, Homo sapiens
aaggcaattcacaga

SEQ ID NO: 324958 - DNA, 15 bp, Homo sapiens
aaaggcaattcacag

SEQ ID NO: 324959 - DNA, 15 bp, Homo sapiens
aaaaggcaattcaca

SEQ ID NO: 324960 - DNA, 15 bp, Homo sapiens
caaaaggcaattcac

SEQ ID NO: 324961 - DNA, 15 bp, Homo sapiens
ccaaaaggcaattca

SEQ ID NO: 324962 - DNA, 15 bp, Homo sapiens
cccaaaaggcaattc

SEQ ID NO: 324963 - DNA, 15 bp, Homo sapiens
ccccaaaaggcaatt

SEQ ID NO: 324964 - DNA, 15 bp, Homo sapiens
tcccccaaaaggcaa

SEQ ID NO: 324965 - DNA, 15 bp, Homo sapiens
ttcccccaaaaggca

SEQ ID NO: 324966 - DNA, 15 bp, Homo sapiens
tttcccccaaaaggc

SEQ ID NO: 324967 - DNA, 15 bp, Homo sapiens
ttttcccccaaaagg

SEQ ID NO: 324968 - DNA, 15 bp, Homo sapiens
gttttcccccaaaag

SEQ ID NO: 324969 - DNA, 15 bp, Homo sapiens
ggttttcccccaaaa

SEQ ID NO: 324970 - DNA, 15 bp, Homo sapiens
aggttttcccccaaa

SEQ ID NO: 324971 - DNA, 15 bp, Homo sapiens
taggttttcccccaa

SEQ ID NO: 324972 - DNA, 15 bp, Homo sapiens
gtaggttttccccca

SEQ ID NO: 324973 - DNA, 15 bp, Homo sapiens
tgtaggttttccccc

SEQ ID NO: 324974 - DNA, 15 bp, Homo sapiens
ttgtaggttttcccc

SEQ ID NO: 324975 - DNA, 15 bp, Homo sapiens
tttgtaggttttccc

SEQ ID NO: 324976 - DNA, 15 bp, Homo sapiens
gtttgtaggttttcc

SEQ ID NO: 324977 - DNA, 15 bp, Homo sapiens
ggtttgtaggttttc

SEQ ID NO: 324978 - DNA, 15 bp, Homo sapiens
aggtttgtaggtttt

SEQ ID NO: 324979 - DNA, 15 bp, Homo sapiens
gaggtttgtaggttt

SEQ ID NO: 324980 - DNA, 15 bp, Homo sapiens
ggaggtttgtaggtt

SEQ ID NO: 324981 - DNA, 15 bp, Homo sapiens
aggaggtttgtaggt

SEQ ID NO: 324982 - DNA, 15 bp, Homo sapiens
caggaggtttgtagg

SEQ ID NO: 324983 - DNA, 15 bp, Homo sapiens
gcaggaggtttgtag

SEQ ID NO: 324984 - DNA, 15 bp, Homo sapiens
ggcaggaggtttgta

SEQ ID NO: 324985 - DNA, 15 bp, Homo sapiens
cggcaggaggtttgt

SEQ ID NO: 324986 - DNA, 15 bp, Homo sapiens
tcggcaggaggtttg

SEQ ID NO: 324987 - DNA, 15 bp, Homo sapiens
ttcggcaggaggttt

SEQ ID NO: 324988 - DNA, 15 bp, Homo sapiens
attcggcaggaggtt

SEQ ID NO: 324989 - DNA, 15 bp, Homo sapiens
cattcggcaggaggt

SEQ ID NO: 324990 - DNA, 15 bp, Homo sapiens
gcattcggcaggagg

SEQ ID NO: 324991 - DNA, 15 bp, Homo sapiens
tgcattcggcaggag

SEQ ID NO: 324992 - DNA, 15 bp, Homo sapiens
gtgcattcggcagga

SEQ ID NO: 324993 - DNA, 15 bp, Homo sapiens
ggtgcattcggcagg

SEQ ID NO: 324994 - DNA, 15 bp, Homo sapiens
tggtgcattcggcag

SEQ ID NO: 324995 - DNA, 15 bp, Homo sapiens
atggtgcattcggca

SEQ ID NO: 324996 - DNA, 15 bp, Homo sapiens
catggtgcattcggc

SEQ ID NO: 324997 - DNA, 15 bp, Homo sapiens
tcatggtgcattcgg

SEQ ID NO: 324998 - DNA, 15 bp, Homo sapiens
ttcatggtgcattcg

SEQ ID NO: 324999 - DNA, 15 bp, Homo sapiens
attcatggtgcattc

SEQ ID NO: 325000 - DNA, 15 bp, Homo sapiens
tattcatggtgcatt

SEQ ID NO: 325001 - DNA, 15 bp, Homo sapiens
gtattcatggtgcat

SEQ ID NO: 325002 - DNA, 15 bp, Homo sapiens
agtattcatggtgca

SEQ ID NO: 325003 - DNA, 15 bp, Homo sapiens
aagtattcatggtgc

SEQ ID NO: 325004 - DNA, 15 bp, Homo sapiens
gaagtattcatggtg

SEQ ID NO: 325005 - DNA, 15 bp, Homo sapiens
agaagtattcatggt

SEQ ID NO: 325006 - DNA, 15 bp, Homo sapiens
cagaagtattcatgg

SEQ ID NO: 325007 - DNA, 15 bp, Homo sapiens
acagaagtattcatg

SEQ ID NO: 325008 - DNA, 15 bp, Homo sapiens
aacagaagtattcat

SEQ ID NO: 325009 - DNA, 15 bp, Homo sapiens
taacagaagtattca

SEQ ID NO: 325010 - DNA, 15 bp, Homo sapiens
ttaacagaagtattc

SEQ ID NO: 325011 - DNA, 15 bp, Homo sapiens
gttaacagaagtatt

SEQ ID NO: 325012 - DNA, 15 bp, Homo sapiens
agttaacagaagtat

SEQ ID NO: 325013 - DNA, 15 bp, Homo sapiens
cagttaacagaagta

SEQ ID NO: 325014 - DNA, 15 bp, Homo sapiens
gcagttaacagaagt

SEQ ID NO: 325015 - DNA, 15 bp, Homo sapiens
cgcagttaacagaag

SEQ ID NO: 325016 - DNA, 15 bp, Homo sapiens
acgcagttaacagaa

SEQ ID NO: 325017 - DNA, 15 bp, Homo sapiens
aacgcagttaacaga

SEQ ID NO: 325018 - DNA, 15 bp, Homo sapiens
taacgcagttaacag

SEQ ID NO: 325019 - DNA, 15 bp, Homo sapiens
ataacgcagttaaca

SEQ ID NO: 325020 - DNA, 15 bp, Homo sapiens
cataacgcagttaac

SEQ ID NO: 325021 - DNA, 15 bp, Homo sapiens
tcataacgcagttaa

SEQ ID NO: 325022 - DNA, 15 bp, Homo sapiens
atcataacgcagtta

SEQ ID NO: 325023 - DNA, 15 bp, Homo sapiens
gatcataacgcagtt

SEQ ID NO: 325024 - DNA, 15 bp, Homo sapiens
agatcataacgcagt

SEQ ID NO: 325025 - DNA, 15 bp, Homo sapiens
cagatcataacgcag

SEQ ID NO: 325026 - DNA, 15 bp, Homo sapiens
ccagatcataacgca

SEQ ID NO: 325027 - DNA, 15 bp, Homo sapiens
tccagatcataacgc

SEQ ID NO: 325028 - DNA, 15 bp, Homo sapiens
ttccagatcataacg

SEQ ID NO: 325029 - DNA, 15 bp, Homo sapiens
tttccagatcataac

SEQ ID NO: 325030 - DNA, 15 bp, Homo sapiens
ttttccagatcataa

SEQ ID NO: 325031 - DNA, 15 bp, Homo sapiens
gttttccagatcata

SEQ ID NO: 325032 - DNA, 15 bp, Homo sapiens
tgttttccagatcat

SEQ ID NO: 325033 - DNA, 15 bp, Homo sapiens
gtgttttccagatca

SEQ ID NO: 325034 - DNA, 15 bp, Homo sapiens
tgtgttttccagatc

SEQ ID NO: 325035 - DNA, 15 bp, Homo sapiens
ttgtgttttccagat

SEQ ID NO: 325036 - DNA, 15 bp, Homo sapiens
gttgtgttttccaga

SEQ ID NO: 325037 - DNA, 15 bp, Homo sapiens
agttgtgttttccag

SEQ ID NO: 325038 - DNA, 15 bp, Homo sapiens
cagttgtgttttcca

SEQ ID NO: 325039 - DNA, 15 bp, Homo sapiens
ccagttgtgttttcc

SEQ ID NO: 325040 - DNA, 15 bp, Homo sapiens
tccagttgtgttttc

SEQ ID NO: 325041 - DNA, 15 bp, Homo sapiens
gtccagttgtgtttt

SEQ ID NO: 325042 - DNA, 15 bp, Homo sapiens
ggtccagttgtgttt

SEQ ID NO: 325043 - DNA, 15 bp, Homo sapiens
tggtccagttgtgtt

SEQ ID NO: 325044 - DNA, 15 bp, Homo sapiens
ctggtccagttgtgt

SEQ ID NO: 325045 - DNA, 15 bp, Homo sapiens
cctggtccagttgtg

SEQ ID NO: 325046 - DNA, 15 bp, Homo sapiens
tcctggtccagttgt

SEQ ID NO: 325047 - DNA, 15 bp, Homo sapiens
ctcctggtccagttg

SEQ ID NO: 325048 - DNA, 15 bp, Homo sapiens
cctcctggtccagtt

SEQ ID NO: 325049 - DNA, 15 bp, Homo sapiens
tcctcctggtccagt

SEQ ID NO: 325050 - DNA, 15 bp, Homo sapiens
ttcctcctggtccag

SEQ ID NO: 325051 - DNA, 15 bp, Homo sapiens
tttcctcctggtcca

SEQ ID NO: 325052 - DNA, 15 bp, Homo sapiens
ttttcctcctggtcc

SEQ ID NO: 325053 - DNA, 15 bp, Homo sapiens
cttttcctcctggtc

SEQ ID NO: 325054 - DNA, 15 bp, Homo sapiens
gcttttcctcctggt

SEQ ID NO: 325055 - DNA, 15 bp, Homo sapiens
ggcttttcctcctgg

SEQ ID NO: 325056 - DNA, 15 bp, Homo sapiens
gggcttttcctcctg

SEQ ID NO: 325057 - DNA, 15 bp, Homo sapiens
ggggcttttcctcct

SEQ ID NO: 325058 - DNA, 15 bp, Homo sapiens
gggggcttttcctcc

SEQ ID NO: 325059 - DNA, 15 bp, Homo sapiens
tgggggcttttcctc

SEQ ID NO: 325060 - DNA, 15 bp, Homo sapiens
ctgggggcttttcct

SEQ ID NO: 325061 - DNA, 15 bp, Homo sapiens
tctgggggcttttcc

SEQ ID NO: 325062 - DNA, 15 bp, Homo sapiens
ctctgggggcttttc

SEQ ID NO: 325063 - DNA, 15 bp, Homo sapiens
cctctgggggctttt

SEQ ID NO: 325064 - DNA, 15 bp, Homo sapiens
tcctctgggggcttt

SEQ ID NO: 325065 - DNA, 15 bp, Homo sapiens
atcctctgggggctt

SEQ ID NO: 325066 - DNA, 15 bp, Homo sapiens
gatcctctgggggct

SEQ ID NO: 325067 - DNA, 15 bp, Homo sapiens
ggatcctctgggggc

SEQ ID NO: 325068 - DNA, 15 bp, Homo sapiens
gggatcctctggggg

SEQ ID NO: 325069 - DNA, 15 bp, Homo sapiens
agggatcctctgggg

SEQ ID NO: 325070 - DNA, 15 bp, Homo sapiens
aagggatcctctggg

SEQ ID NO: 325071 - DNA, 15 bp, Homo sapiens
aaagggatcctctgg

SEQ ID NO: 325072 - DNA, 15 bp, Homo sapiens
gaaagggatcctctg

SEQ ID NO: 325073 - DNA, 15 bp, Homo sapiens
ggaaagggatcctct

SEQ ID NO: 325074 - DNA, 15 bp, Homo sapiens
aggaaagggatcctc

SEQ ID NO: 325075 - DNA, 15 bp, Homo sapiens
caggaaagggatcct

SEQ ID NO: 325076 - DNA, 15 bp, Homo sapiens
tcaggaaagggatcc

SEQ ID NO: 325077 - DNA, 15 bp, Homo sapiens
atcaggaaagggatc

SEQ ID NO: 325078 - DNA, 15 bp, Homo sapiens
catcaggaaagggat

SEQ ID NO: 325079 - DNA, 15 bp, Homo sapiens
tcatcaggaaaggga

SEQ ID NO: 325080 - DNA, 15 bp, Homo sapiens
gtcatcaggaaaggg

SEQ ID NO: 325081 - DNA, 15 bp, Homo sapiens
ggtcatcaggaaagg

SEQ ID NO: 325082 - DNA, 15 bp, Homo sapiens
aggtcatcaggaaag

SEQ ID NO: 325083 - DNA, 15 bp, Homo sapiens
caggtcatcaggaaa

SEQ ID NO: 325084 - DNA, 15 bp, Homo sapiens
gcaggtcatcaggaa

SEQ ID NO: 325085 - DNA, 15 bp, Homo sapiens
ggcaggtcatcagga

SEQ ID NO: 325086 - DNA, 15 bp, Homo sapiens
cggcaggtcatcagg

SEQ ID NO: 325087 - DNA, 15 bp, Homo sapiens
ccggcaggtcatcag

SEQ ID NO: 325088 - DNA, 15 bp, Homo sapiens
gccggcaggtcatca

SEQ ID NO: 325089 - DNA, 15 bp, Homo sapiens
agccggcaggtcatc

SEQ ID NO: 325090 - DNA, 15 bp, Homo sapiens
aagccggcaggtcat

SEQ ID NO: 325091 - DNA, 15 bp, Homo sapiens
caagccggcaggtca

SEQ ID NO: 325092 - DNA, 15 bp, Homo sapiens
gcaagccggcaggtc

SEQ ID NO: 325093 - DNA, 15 bp, Homo sapiens
tgcaagccggcaggt

SEQ ID NO: 325094 - DNA, 15 bp, Homo sapiens
ctgcaagccggcagg

SEQ ID NO: 325095 - DNA, 15 bp, Homo sapiens
tctgcaagccggcag

SEQ ID NO: 325096 - DNA, 15 bp, Homo sapiens
ctctgcaagccggca

SEQ ID NO: 325097 - DNA, 15 bp, Homo sapiens
gctctgcaagccggc

SEQ ID NO: 325098 - DNA, 15 bp, Homo sapiens
agctctgcaagccgg

SEQ ID NO: 325099 - DNA, 15 bp, Homo sapiens
cagctctgcaagccg

SEQ ID NO: 325100 - DNA, 15 bp, Homo sapiens
ccagctctgcaagcc

SEQ ID NO: 325101 - DNA, 15 bp, Homo sapiens
gccagctctgcaagc

SEQ ID NO: 325102 - DNA, 15 bp, Homo sapiens
ggccagctctgcaag

SEQ ID NO: 325103 - DNA, 15 bp, Homo sapiens
aggccagctctgcaa

SEQ ID NO: 325104 - DNA, 15 bp, Homo sapiens
caggccagctctgca

SEQ ID NO: 325105 - DNA, 15 bp, Homo sapiens
tcaggccagctctgc

SEQ ID NO: 325106 - DNA, 15 bp, Homo sapiens
ttcaggccagctctg

SEQ ID NO: 325107 - DNA, 15 bp, Homo sapiens
tttcaggccagctct

SEQ ID NO: 325108 - DNA, 15 bp, Homo sapiens
gtttcaggccagctc

SEQ ID NO: 325109 - DNA, 15 bp, Homo sapiens
ggtttcaggccagct

SEQ ID NO: 325110 - DNA, 15 bp, Homo sapiens
tggtttcaggccagc

SEQ ID NO: 325111 - DNA, 15 bp, Homo sapiens
ttggtttcaggccag

SEQ ID NO: 325112 - DNA, 15 bp, Homo sapiens
cttggtttcaggcca

SEQ ID NO: 325113 - DNA, 15 bp, Homo sapiens
ccttggtttcaggcc

SEQ ID NO: 325114 - DNA, 15 bp, Homo sapiens
gccttggtttcaggc

SEQ ID NO: 325115 - DNA, 15 bp, Homo sapiens
agccttggtttcagg

SEQ ID NO: 325116 - DNA, 15 bp, Homo sapiens
cagccttggtttcag

SEQ ID NO: 325117 - DNA, 15 bp, Homo sapiens
acagccttggtttca

SEQ ID NO: 325118 - DNA, 15 bp, Homo sapiens
gacagccttggtttc

SEQ ID NO: 325119 - DNA, 15 bp, Homo sapiens
agacagccttggttt

SEQ ID NO: 325120 - DNA, 15 bp, Homo sapiens
aagacagccttggtt

SEQ ID NO: 325121 - DNA, 15 bp, Homo sapiens
caagacagccttggt

SEQ ID NO: 325122 - DNA, 15 bp, Homo sapiens
tcaagacagccttgg

SEQ ID NO: 325123 - DNA, 15 bp, Homo sapiens
atcaagacagccttg

SEQ ID NO: 325124 - DNA, 15 bp, Homo sapiens
catcaagacagcctt

SEQ ID NO: 325125 - DNA, 15 bp, Homo sapiens
tcatcaagacagcct

SEQ ID NO: 325126 - DNA, 15 bp, Homo sapiens
ttcatcaagacagcc

SEQ ID NO: 325127 - DNA, 15 bp, Homo sapiens
attcatcaagacagc

SEQ ID NO: 325128 - DNA, 15 bp, Homo sapiens
tattcatcaagacag

SEQ ID NO: 325129 - DNA, 15 bp, Homo sapiens
ttattcatcaagaca

SEQ ID NO: 325130 - DNA, 15 bp, Homo sapiens
tttattcatcaagac

SEQ ID NO: 325131 - DNA, 15 bp, Homo sapiens
gtttattcatcaaga

SEQ ID NO: 325132 - DNA, 15 bp, Homo sapiens
agtttattcatcaag

SEQ ID NO: 325133 - DNA, 15 bp, Homo sapiens
tagtttattcatcaa

SEQ ID NO: 325134 - DNA, 15 bp, Homo sapiens
ttagtttattcatca

SEQ ID NO: 325135 - DNA, 15 bp, Homo sapiens
attagtttattcatc

SEQ ID NO: 325136 - DNA, 15 bp, Homo sapiens
tattagtttattcat

SEQ ID NO: 325137 - DNA, 15 bp, Homo sapiens
ttattagtttattca

SEQ ID NO: 325138 - DNA, 15 bp, Homo sapiens
tttattagtttattc

SEQ ID NO: 325139 - DNA, 15 bp, Homo sapiens
ttttattagtttatt

SEQ ID NO: 325140 - DNA, 15 bp, Homo sapiens
cttttattagtttat

SEQ ID NO: 325141 - DNA, 15 bp, Homo sapiens
tcttttattagttta

SEQ ID NO: 325142 - DNA, 15 bp, Homo sapiens
ctcttttattagttt

SEQ ID NO: 325143 - DNA, 15 bp, Homo sapiens
cctcttttattagtt

SEQ ID NO: 325144 - DNA, 15 bp, Homo sapiens
acctcttttattagt

SEQ ID NO: 325145 - DNA, 15 bp, Homo sapiens
aacctcttttattag

SEQ ID NO: 325146 - DNA, 15 bp, Homo sapiens
taacctcttttatta

SEQ ID NO: 325147 - DNA, 15 bp, Homo sapiens
ctaacctcttttatt

SEQ ID NO: 325148 - DNA, 15 bp, Homo sapiens
tctaacctcttttat

SEQ ID NO: 325149 - DNA, 15 bp, Homo sapiens
gtctaacctctttta

SEQ ID NO: 325150 - DNA, 15 bp, Homo sapiens
cgtctaacctctttt

SEQ ID NO: 325151 - DNA, 15 bp, Homo sapiens
acgtctaacctcttt

SEQ ID NO: 325152 - DNA, 15 bp, Homo sapiens
cacgtctaacctctt

SEQ ID NO: 325153 - DNA, 15 bp, Homo sapiens
gcacgtctaacctct

SEQ ID NO: 325154 - DNA, 15 bp, Homo sapiens
agcacgtctaacctc

SEQ ID NO: 325155 - DNA, 15 bp, Homo sapiens
gagcacgtctaacct

SEQ ID NO: 325156 - DNA, 15 bp, Homo sapiens
agagcacgtctaacc

SEQ ID NO: 325157 - DNA, 15 bp, Homo sapiens
tagagcacgtctaac

SEQ ID NO: 325158 - DNA, 15 bp, Homo sapiens
ttagagcacgtctaa

SEQ ID NO: 325159 - DNA, 15 bp, Homo sapiens
attagagcacgtcta

SEQ ID NO: 325160 - DNA, 15 bp, Homo sapiens
cattagagcacgtct

SEQ ID NO: 325161 - DNA, 15 bp, Homo sapiens
ccattagagcacgtc

SEQ ID NO: 325162 - DNA, 15 bp, Homo sapiens
tccattagagcacgt

SEQ ID NO: 325163 - DNA, 15 bp, Homo sapiens
ctccattagagcacg

SEQ ID NO: 325164 - DNA, 15 bp, Homo sapiens
tctccattagagcac

SEQ ID NO: 325165 - DNA, 15 bp, Homo sapiens
ttctccattagagca

SEQ ID NO: 325166 - DNA, 15 bp, Homo sapiens
attctccattagagc

SEQ ID NO: 325167 - DNA, 15 bp, Homo sapiens
tattctccattagag

SEQ ID NO: 325168 - DNA, 15 bp, Homo sapiens
ttattctccattaga

SEQ ID NO: 325169 - DNA, 15 bp, Homo sapiens
cttattctccattag

SEQ ID NO: 325170 - DNA, 15 bp, Homo sapiens
acttattctccatta

SEQ ID NO: 325171 - DNA, 15 bp, Homo sapiens
tacttattctccatt

SEQ ID NO: 325172 - DNA, 15 bp, Homo sapiens
gtacttattctccat

SEQ ID NO: 325173 - DNA, 15 bp, Homo sapiens
tgtacttattctcca

SEQ ID NO: 325174 - DNA, 15 bp, Homo sapiens
ctgtacttattctcc

SEQ ID NO: 325175 - DNA, 15 bp, Homo sapiens
cctgtacttattctc

SEQ ID NO: 325176 - DNA, 15 bp, Homo sapiens
gcctgtacttattct

SEQ ID NO: 325177 - DNA, 15 bp, Homo sapiens
ggcctgtacttattc

SEQ ID NO: 325178 - DNA, 15 bp, Homo sapiens
tggcctgtacttatt

SEQ ID NO: 325179 - DNA, 15 bp, Homo sapiens
atggcctgtacttat

SEQ ID NO: 325180 - DNA, 15 bp, Homo sapiens
tatggcctgtactta

SEQ ID NO: 325181 - DNA, 15 bp, Homo sapiens
ttatggcctgtactt

SEQ ID NO: 325182 - DNA, 15 bp, Homo sapiens
tttatggcctgtact

SEQ ID NO: 325183 - DNA, 15 bp, Homo sapiens
atttatggcctgtac

SEQ ID NO: 325184 - DNA, 15 bp, Homo sapiens
aatttatggcctgta

SEQ ID NO: 325185 - DNA, 15 bp, Homo sapiens
aaatttatggcctgt

SEQ ID NO: 325186 - DNA, 15 bp, Homo sapiens
gaaatttatggcctg

SEQ ID NO: 325187 - DNA, 15 bp, Homo sapiens
agaaatttatggcct

SEQ ID NO: 325188 - DNA, 15 bp, Homo sapiens
gagaaatttatggcc

SEQ ID NO: 325189 - DNA, 15 bp, Homo sapiens
agagaaatttatggc

SEQ ID NO: 325190 - DNA, 15 bp, Homo sapiens
aagagaaatttatgg

SEQ ID NO: 325191 - DNA, 15 bp, Homo sapiens
gaagagaaatttatg

SEQ ID NO: 325192 - DNA, 15 bp, Homo sapiens
agaagagaaatttat

SEQ ID NO: 325193 - DNA, 15 bp, Homo sapiens
tagaagagaaattta

SEQ ID NO: 325194 - DNA, 15 bp, Homo sapiens
ctagaagagaaattt

SEQ ID NO: 325195 - DNA, 15 bp, Homo sapiens
cctagaagagaaatt

SEQ ID NO: 325196 - DNA, 15 bp, Homo sapiens
tcctagaagagaaat

SEQ ID NO: 325197 - DNA, 15 bp, Homo sapiens
ttcctagaagagaaa

SEQ ID NO: 325198 - DNA, 15 bp, Homo sapiens
tttcctagaagagaa

SEQ ID NO: 325199 - DNA, 15 bp, Homo sapiens
atttcctagaagaga

SEQ ID NO: 325200 - DNA, 15 bp, Homo sapiens
aatttcctagaagag

SEQ ID NO: 325201 - DNA, 15 bp, Homo sapiens
taatttcctagaaga

SEQ ID NO: 325202 - DNA, 15 bp, Homo sapiens
gtaatttcctagaag

SEQ ID NO: 325203 - DNA, 15 bp, Homo sapiens
tgtaatttcctagaa

SEQ ID NO: 325204 - DNA, 15 bp, Homo sapiens
gtgtaatttcctaga

SEQ ID NO: 325205 - DNA, 15 bp, Homo sapiens
agtgtaatttcctag

SEQ ID NO: 325206 - DNA, 15 bp, Homo sapiens
gagtgtaatttccta

SEQ ID NO: 325207 - DNA, 15 bp, Homo sapiens
agagtgtaatttcct

SEQ ID NO: 325208 - DNA, 15 bp, Homo sapiens
tagagtgtaatttcc

SEQ ID NO: 325209 - DNA, 15 bp, Homo sapiens
ttagagtgtaatttc

SEQ ID NO: 325210 - DNA, 15 bp, Homo sapiens
cttagagtgtaattt

SEQ ID NO: 325211 - DNA, 15 bp, Homo sapiens
tcttagagtgtaatt

SEQ ID NO: 325212 - DNA, 15 bp, Homo sapiens
ttcttagagtgtaat

SEQ ID NO: 325213 - DNA, 15 bp, Homo sapiens
cttcttagagtgtaa

SEQ ID NO: 325214 - DNA, 15 bp, Homo sapiens
gcttcttagagtgta

SEQ ID NO: 325215 - DNA, 15 bp, Homo sapiens
agcttcttagagtgt

SEQ ID NO: 325216 - DNA, 15 bp, Homo sapiens
tagcttcttagagtg

SEQ ID NO: 325217 - DNA, 15 bp, Homo sapiens
ttagcttcttagagt

SEQ ID NO: 325218 - DNA, 15 bp, Homo sapiens
gttagcttcttagag

SEQ ID NO: 325219 - DNA, 15 bp, Homo sapiens
agttagcttcttaga

SEQ ID NO: 325220 - DNA, 15 bp, Homo sapiens
aagttagcttcttag

SEQ ID NO: 325221 - DNA, 15 bp, Homo sapiens
gaagttagcttctta

SEQ ID NO: 325222 - DNA, 15 bp, Homo sapiens
agaagttagcttctt

SEQ ID NO: 325223 - DNA, 15 bp, Homo sapiens
tagaagttagcttct

SEQ ID NO: 325224 - DNA, 15 bp, Homo sapiens
ttagaagttagcttc

SEQ ID NO: 325225 - DNA, 15 bp, Homo sapiens
attagaagttagctt

SEQ ID NO: 325226 - DNA, 15 bp, Homo sapiens
cattagaagttagct

SEQ ID NO: 325227 - DNA, 15 bp, Homo sapiens
acattagaagttagc

SEQ ID NO: 325228 - DNA, 15 bp, Homo sapiens
aacattagaagttag

SEQ ID NO: 325229 - DNA, 15 bp, Homo sapiens
gaacattagaagtta

SEQ ID NO: 325230 - DNA, 15 bp, Homo sapiens
ggaacattagaagtt

SEQ ID NO: 325231 - DNA, 15 bp, Homo sapiens
tggaacattagaagt

SEQ ID NO: 325232 - DNA, 15 bp, Homo sapiens
atggaacattagaag

SEQ ID NO: 325233 - DNA, 15 bp, Homo sapiens
aatggaacattagaa

SEQ ID NO: 325234 - DNA, 15 bp, Homo sapiens
aaatggaacattaga

SEQ ID NO: 325235 - DNA, 15 bp, Homo sapiens
gaaatggaacattag

SEQ ID NO: 325236 - DNA, 15 bp, Homo sapiens
ggaaatggaacatta

SEQ ID NO: 325237 - DNA, 15 bp, Homo sapiens
aggaaatggaacatt

SEQ ID NO: 325238 - DNA, 15 bp, Homo sapiens
gaggaaatggaacat

SEQ ID NO: 325239 - DNA, 15 bp, Homo sapiens
agaggaaatggaaca

SEQ ID NO: 325240 - DNA, 15 bp, Homo sapiens
aagaggaaatggaac

SEQ ID NO: 325241 - DNA, 15 bp, Homo sapiens
aaagaggaaatggaa

SEQ ID NO: 325242 - DNA, 15 bp, Homo sapiens
caaagaggaaatgga

SEQ ID NO: 325243 - DNA, 15 bp, Homo sapiens
ccaaagaggaaatgg

SEQ ID NO: 325244 - DNA, 15 bp, Homo sapiens
accaaagaggaaatg

SEQ ID NO: 325245 - DNA, 15 bp, Homo sapiens
aaccaaagaggaaat

SEQ ID NO: 325246 - DNA, 15 bp, Homo sapiens
caaccaaagaggaaa

SEQ ID NO: 325247 - DNA, 15 bp, Homo sapiens
gcaaccaaagaggaa

SEQ ID NO: 325248 - DNA, 15 bp, Homo sapiens
ggcaaccaaagagga

SEQ ID NO: 325249 - DNA, 15 bp, Homo sapiens
gggcaaccaaagagg

SEQ ID NO: 325250 - DNA, 15 bp, Homo sapiens
agggcaaccaaagag

SEQ ID NO: 325251 - DNA, 15 bp, Homo sapiens
aagggcaaccaaaga

SEQ ID NO: 325252 - DNA, 15 bp, Homo sapiens
gaagggcaaccaaag

SEQ ID NO: 325253 - DNA, 15 bp, Homo sapiens
tgaagggcaaccaaa

SEQ ID NO: 325254 - DNA, 15 bp, Homo sapiens
atgaagggcaaccaa

SEQ ID NO: 325255 - DNA, 15 bp, Homo sapiens
catgaagggcaacca

SEQ ID NO: 325256 - DNA, 15 bp, Homo sapiens
gcatgaagggcaacc

SEQ ID NO: 325257 - DNA, 15 bp, Homo sapiens
tgcatgaagggcaac

SEQ ID NO: 325258 - DNA, 15 bp, Homo sapiens
atgcatgaagggcaa

SEQ ID NO: 325259 - DNA, 15 bp, Homo sapiens
aatgcatgaagggca

SEQ ID NO: 325260 - DNA, 15 bp, Homo sapiens
aaatgcatgaagggc

SEQ ID NO: 325261 - DNA, 15 bp, Homo sapiens
caaatgcatgaaggg

SEQ ID NO: 325262 - DNA, 15 bp, Homo sapiens
tcaaatgcatgaagg

SEQ ID NO: 325263 - DNA, 15 bp, Homo sapiens
atcaaatgcatgaag

SEQ ID NO: 325264 - DNA, 15 bp, Homo sapiens
tatcaaatgcatgaa

SEQ ID NO: 325265 - DNA, 15 bp, Homo sapiens
ttatcaaatgcatga

SEQ ID NO: 325266 - DNA, 15 bp, Homo sapiens
tttatcaaatgcatg

SEQ ID NO: 325267 - DNA, 15 bp, Homo sapiens
atttatcaaatgcat

SEQ ID NO: 325268 - DNA, 15 bp, Homo sapiens
catttatcaaatgca

SEQ ID NO: 325269 - DNA, 15 bp, Homo sapiens
tcatttatcaaatgc

SEQ ID NO: 325270 - DNA, 15 bp, Homo sapiens
atcatttatcaaatg

SEQ ID NO: 325271 - DNA, 15 bp, Homo sapiens
aatcatttatcaaat

SEQ ID NO: 325272 - DNA, 15 bp, Homo sapiens
taatcatttatcaaa

SEQ ID NO: 325273 - DNA, 15 bp, Homo sapiens
ttaatcatttatcaa

SEQ ID NO: 325274 - DNA, 15 bp, Homo sapiens
tttaatcatttatca

SEQ ID NO: 325275 - DNA, 15 bp, Homo sapiens
ttttaatcatttatc

SEQ ID NO: 325276 - DNA, 15 bp, Homo sapiens
tttttaatcatttat

SEQ ID NO: 325277 - DNA, 15 bp, Homo sapiens
gtttttaatcattta

SEQ ID NO: 325278 - DNA, 15 bp, Homo sapiens
tgtttttaatcattt

SEQ ID NO: 325279 - DNA, 15 bp, Homo sapiens
ctgtttttaatcatt

SEQ ID NO: 325280 - DNA, 15 bp, Homo sapiens
cctgtttttaatcat

SEQ ID NO: 325281 - DNA, 15 bp, Homo sapiens
tcctgtttttaatca

SEQ ID NO: 325282 - DNA, 15 bp, Homo sapiens
gtcctgtttttaatc

SEQ ID NO: 325283 - DNA, 15 bp, Homo sapiens
tgtcctgtttttaat

SEQ ID NO: 325284 - DNA, 15 bp, Homo sapiens
gtgtcctgtttttaa

SEQ ID NO: 325285 - DNA, 15 bp, Homo sapiens
ggtgtcctgttttta

SEQ ID NO: 325286 - DNA, 15 bp, Homo sapiens
aggtgtcctgttttt

SEQ ID NO: 325287 - DNA, 15 bp, Homo sapiens
gaggtgtcctgtttt

SEQ ID NO: 325288 - DNA, 15 bp, Homo sapiens
ggaggtgtcctgttt

SEQ ID NO: 325289 - DNA, 15 bp, Homo sapiens
tggaggtgtcctgtt

SEQ ID NO: 325290 - DNA, 15 bp, Homo sapiens
atggaggtgtcctgt

SEQ ID NO: 325291 - DNA, 15 bp, Homo sapiens
tatggaggtgtcctg

SEQ ID NO: 325292 - DNA, 15 bp, Homo sapiens
atatggaggtgtcct

SEQ ID NO: 325293 - DNA, 15 bp, Homo sapiens
aatatggaggtgtcc

SEQ ID NO: 325294 - DNA, 15 bp, Homo sapiens
aaatatggaggtgtc

SEQ ID NO: 325295 - DNA, 15 bp, Homo sapiens
aaaatatggaggtgt

SEQ ID NO: 325296 - DNA, 15 bp, Homo sapiens
caaaatatggaggtg

SEQ ID NO: 325297 - DNA, 15 bp, Homo sapiens
acaaaatatggaggt

SEQ ID NO: 325298 - DNA, 15 bp, Homo sapiens
cacaaaatatggagg

SEQ ID NO: 325299 - DNA, 15 bp, Homo sapiens
tcacaaaatatggag

SEQ ID NO: 325300 - DNA, 15 bp, Homo sapiens
atcacaaaatatgga

SEQ ID NO: 325301 - DNA, 15 bp, Homo sapiens
aatcacaaaatatgg

SEQ ID NO: 325302 - DNA, 15 bp, Homo sapiens
aaatcacaaaatatg

SEQ ID NO: 325303 - DNA, 15 bp, Homo sapiens
caaatcacaaaatat

SEQ ID NO: 325304 - DNA, 15 bp, Homo sapiens
acaaatcacaaaata

SEQ ID NO: 325305 - DNA, 15 bp, Homo sapiens
tacaaatcacaaaat

SEQ ID NO: 325306 - DNA, 15 bp, Homo sapiens
ttacaaatcacaaaa

SEQ ID NO: 325307 - DNA, 15 bp, Homo sapiens
attacaaatcacaaa

SEQ ID NO: 325308 - DNA, 15 bp, Homo sapiens
aattacaaatcacaa

SEQ ID NO: 325309 - DNA, 15 bp, Homo sapiens
taattacaaatcaca

SEQ ID NO: 325310 - DNA, 15 bp, Homo sapiens
ttaattacaaatcac

SEQ ID NO: 325311 - DNA, 15 bp, Homo sapiens
attaattacaaatca

SEQ ID NO: 325312 - DNA, 15 bp, Homo sapiens
tattaattacaaatc

SEQ ID NO: 325313 - DNA, 15 bp, Homo sapiens
atattaattacaaat

SEQ ID NO: 325314 - DNA, 15 bp, Homo sapiens
tatattaattacaaa

SEQ ID NO: 325315 - DNA, 15 bp, Homo sapiens
atatattaattacaa

SEQ ID NO: 325316 - DNA, 15 bp, Homo sapiens
gatatattaattaca

SEQ ID NO: 325317 - DNA, 15 bp, Homo sapiens
agatatattaattac

SEQ ID NO: 325318 - DNA, 15 bp, Homo sapiens
cagatatattaatta

SEQ ID NO: 325319 - DNA, 15 bp, Homo sapiens
acagatatattaatt

SEQ ID NO: 325320 - DNA, 15 bp, Homo sapiens
tacagatatattaat

SEQ ID NO: 325321 - DNA, 15 bp, Homo sapiens
ctacagatatattaa

SEQ ID NO: 325322 - DNA, 15 bp, Homo sapiens
actacagatatatta

SEQ ID NO: 325323 - DNA, 15 bp, Homo sapiens
aactacagatatatt

SEQ ID NO: 325324 - DNA, 15 bp, Homo sapiens
aaactacagatatat

SEQ ID NO: 325325 - DNA, 15 bp, Homo sapiens
aaaactacagatata

SEQ ID NO: 325326 - DNA, 15 bp, Homo sapiens
caaaactacagatat

SEQ ID NO: 325327 - DNA, 15 bp, Homo sapiens
tcaaaactacagata

SEQ ID NO: 325328 - DNA, 15 bp, Homo sapiens
ctcaaaactacagat

SEQ ID NO: 325329 - DNA, 15 bp, Homo sapiens
cctcaaaactacaga

SEQ ID NO: 325330 - DNA, 15 bp, Homo sapiens
tcctcaaaactacag

SEQ ID NO: 325331 - DNA, 15 bp, Homo sapiens
atcctcaaaactaca

SEQ ID NO: 325332 - DNA, 15 bp, Homo sapiens
aatcctcaaaactac

SEQ ID NO: 325333 - DNA, 15 bp, Homo sapiens
taatcctcaaaacta

SEQ ID NO: 325334 - DNA, 15 bp, Homo sapiens
ctaatcctcaaaact

SEQ ID NO: 325335 - DNA, 15 bp, Homo sapiens
tctaatcctcaaaac

SEQ ID NO: 325336 - DNA, 15 bp, Homo sapiens
atctaatcctcaaaa

SEQ ID NO: 325337 - DNA, 15 bp, Homo sapiens
aatctaatcctcaaa

SEQ ID NO: 325338 - DNA, 15 bp, Homo sapiens
gaatctaatcctcaa

SEQ ID NO: 325339 - DNA, 15 bp, Homo sapiens
tgaatctaatcctca

SEQ ID NO: 325340 - DNA, 15 bp, Homo sapiens
ctgaatctaatcctc

SEQ ID NO: 325341 - DNA, 15 bp, Homo sapiens
gctgaatctaatcct

SEQ ID NO: 325342 - DNA, 15 bp, Homo sapiens
tgctgaatctaatcc

SEQ ID NO: 325343 - DNA, 15 bp, Homo sapiens
atgctgaatctaatc

SEQ ID NO: 325344 - DNA, 15 bp, Homo sapiens
gatgctgaatctaat

SEQ ID NO: 325345 - DNA, 15 bp, Homo sapiens
tgatgctgaatctaa

SEQ ID NO: 325346 - DNA, 15 bp, Homo sapiens
atgatgctgaatcta

SEQ ID NO: 325347 - DNA, 15 bp, Homo sapiens
aatgatgctgaatct

SEQ ID NO: 325348 - DNA, 15 bp, Homo sapiens
aaatgatgctgaatc

SEQ ID NO: 325349 - DNA, 15 bp, Homo sapiens
aaaatgatgctgaat

SEQ ID NO: 325350 - DNA, 15 bp, Homo sapiens
gaaaatgatgctgaa

SEQ ID NO: 325351 - DNA, 15 bp, Homo sapiens
ggaaaatgatgctga

SEQ ID NO: 325352 - DNA, 15 bp, Homo sapiens
aggaaaatgatgctg

SEQ ID NO: 325353 - DNA, 15 bp, Homo sapiens
caggaaaatgatgct

SEQ ID NO: 325354 - DNA, 15 bp, Homo sapiens
ccaggaaaatgatgc

SEQ ID NO: 325355 - DNA, 15 bp, Homo sapiens
accaggaaaatgatg

SEQ ID NO: 325356 - DNA, 15 bp, Homo sapiens
taccaggaaaatgat

SEQ ID NO: 325357 - DNA, 15 bp, Homo sapiens
ttaccaggaaaatga

SEQ ID NO: 325358 - DNA, 15 bp, Homo sapiens
gttaccaggaaaatg

SEQ ID NO: 325359 - DNA, 15 bp, Homo sapiens
tgttaccaggaaaat

SEQ ID NO: 325360 - DNA, 15 bp, Homo sapiens
gtgttaccaggaaaa

SEQ ID NO: 325361 - DNA, 15 bp, Homo sapiens
tgtgttaccaggaaa

SEQ ID NO: 325362 - DNA, 15 bp, Homo sapiens
ctgtgttaccaggaa

SEQ ID NO: 325363 - DNA, 15 bp, Homo sapiens
cctgtgttaccagga

SEQ ID NO: 325364 - DNA, 15 bp, Homo sapiens
gcctgtgttaccagg

SEQ ID NO: 325365 - DNA, 15 bp, Homo sapiens
agcctgtgttaccag

SEQ ID NO: 325366 - DNA, 15 bp, Homo sapiens
cagcctgtgttacca

SEQ ID NO: 325367 - DNA, 15 bp, Homo sapiens
ccagcctgtgttacc

SEQ ID NO: 325368 - DNA, 15 bp, Homo sapiens
cccagcctgtgttac

SEQ ID NO: 325369 - DNA, 15 bp, Homo sapiens
tcccagcctgtgtta

SEQ ID NO: 325370 - DNA, 15 bp, Homo sapiens
gtcccagcctgtgtt

SEQ ID NO: 325371 - DNA, 15 bp, Homo sapiens
ggtcccagcctgtgt

SEQ ID NO: 325372 - DNA, 15 bp, Homo sapiens
aggtcccagcctgtg

SEQ ID NO: 325373 - DNA, 15 bp, Homo sapiens
taggtcccagcctgt

SEQ ID NO: 325374 - DNA, 15 bp, Homo sapiens
ctaggtcccagcctg

SEQ ID NO: 325375 - DNA, 15 bp, Homo sapiens
gctaggtcccagcct

SEQ ID NO: 325376 - DNA, 15 bp, Homo sapiens
agctaggtcccagcc

SEQ ID NO: 325377 - DNA, 15 bp, Homo sapiens
aagctaggtcccagc

SEQ ID NO: 325378 - DNA, 15 bp, Homo sapiens
gaagctaggtcccag

SEQ ID NO: 325379 - DNA, 15 bp, Homo sapiens
ggaagctaggtccca

SEQ ID NO: 325380 - DNA, 15 bp, Homo sapiens
aggaagctaggtccc

SEQ ID NO: 325381 - DNA, 15 bp, Homo sapiens
caggaagctaggtcc

SEQ ID NO: 325382 - DNA, 15 bp, Homo sapiens
tcaggaagctaggtc

SEQ ID NO: 325383 - DNA, 15 bp, Homo sapiens
ttcaggaagctaggt

SEQ ID NO: 325384 - DNA, 15 bp, Homo sapiens
attcaggaagctagg

SEQ ID NO: 325385 - DNA, 15 bp, Homo sapiens
cattcaggaagctag

SEQ ID NO: 325386 - DNA, 15 bp, Homo sapiens
tcattcaggaagcta

SEQ ID NO: 325387 - DNA, 15 bp, Homo sapiens
ttcattcaggaagct

SEQ ID NO: 325388 - DNA, 15 bp, Homo sapiens
gttcattcaggaagc

SEQ ID NO: 325389 - DNA, 15 bp, Homo sapiens
ggttcattcaggaag

SEQ ID NO: 325390 - DNA, 15 bp, Homo sapiens
aggttcattcaggaa

SEQ ID NO: 325391 - DNA, 15 bp, Homo sapiens
caggttcattcagga

SEQ ID NO: 325392 - DNA, 15 bp, Homo sapiens
tcaggttcattcagg

SEQ ID NO: 325393 - DNA, 15 bp, Homo sapiens
gtcaggttcattcag

SEQ ID NO: 325394 - DNA, 15 bp, Homo sapiens
tgtcaggttcattca

SEQ ID NO: 325395 - DNA, 15 bp, Homo sapiens
gtgtcaggttcattc

SEQ ID NO: 325396 - DNA, 15 bp, Homo sapiens
tgtgtcaggttcatt

SEQ ID NO: 325397 - DNA, 15 bp, Homo sapiens
ctgtgtcaggttcat

SEQ ID NO: 325398 - DNA, 15 bp, Homo sapiens
gctgtgtcaggttca

SEQ ID NO: 325399 - DNA, 15 bp, Homo sapiens
ggctgtgtcaggttc

SEQ ID NO: 325400 - DNA, 15 bp, Homo sapiens
tggctgtgtcaggtt

SEQ ID NO: 325401 - DNA, 15 bp, Homo sapiens
ttggctgtgtcaggt

SEQ ID NO: 325402 - DNA, 15 bp, Homo sapiens
gttggctgtgtcagg

SEQ ID NO: 325403 - DNA, 15 bp, Homo sapiens
tgttggctgtgtcag

SEQ ID NO: 325404 - DNA, 15 bp, Homo sapiens
ttgttggctgtgtca

SEQ ID NO: 325405 - DNA, 15 bp, Homo sapiens
tttgttggctgtgtc

SEQ ID NO: 325406 - DNA, 15 bp, Homo sapiens
atttgttggctgtgt

SEQ ID NO: 325407 - DNA, 15 bp, Homo sapiens
aatttgttggctgtg

SEQ ID NO: 325408 - DNA, 15 bp, Homo sapiens
gaatttgttggctgt

SEQ ID NO: 325409 - DNA, 15 bp, Homo sapiens
tgaatttgttggctg

SEQ ID NO: 325410 - DNA, 15 bp, Homo sapiens
ttgaatttgttggct

SEQ ID NO: 325411 - DNA, 15 bp, Homo sapiens
gttgaatttgttggc

SEQ ID NO: 325412 - DNA, 15 bp, Homo sapiens
ggttgaatttgttgg

SEQ ID NO: 325413 - DNA, 15 bp, Homo sapiens
aggttgaatttgttg

SEQ ID NO: 325414 - DNA, 15 bp, Homo sapiens
taggttgaatttgtt

SEQ ID NO: 325415 - DNA, 15 bp, Homo sapiens
ataggttgaatttgt

SEQ ID NO: 325416 - DNA, 15 bp, Homo sapiens
cataggttgaatttg

SEQ ID NO: 325417 - DNA, 15 bp, Homo sapiens
tcataggttgaattt

SEQ ID NO: 325418 - DNA, 15 bp, Homo sapiens
atcataggttgaatt

SEQ ID NO: 325419 - DNA, 15 bp, Homo sapiens
aatcataggttgaat

SEQ ID NO: 325420 - DNA, 15 bp, Homo sapiens
caatcataggttgaa

SEQ ID NO: 325421 - DNA, 15 bp, Homo sapiens
ccaatcataggttga

SEQ ID NO: 325422 - DNA, 15 bp, Homo sapiens
gccaatcataggttg

SEQ ID NO: 325423 - DNA, 15 bp, Homo sapiens
agccaatcataggtt

SEQ ID NO: 325424 - DNA, 15 bp, Homo sapiens
aagccaatcataggt

SEQ ID NO: 325425 - DNA, 15 bp, Homo sapiens
aaagccaatcatagg

SEQ ID NO: 325426 - DNA, 15 bp, Homo sapiens
taaagccaatcatag

SEQ ID NO: 325427 - DNA, 15 bp, Homo sapiens
gtaaagccaatcata

SEQ ID NO: 325428 - DNA, 15 bp, Homo sapiens
agtaaagccaatcat

SEQ ID NO: 325429 - DNA, 15 bp, Homo sapiens
gagtaaagccaatca

SEQ ID NO: 325430 - DNA, 15 bp, Homo sapiens
ggagtaaagccaatc

SEQ ID NO: 325431 - DNA, 15 bp, Homo sapiens
aggagtaaagccaat

SEQ ID NO: 325432 - DNA, 15 bp, Homo sapiens
aaggagtaaagccaa

SEQ ID NO: 325433 - DNA, 15 bp, Homo sapiens
caaggagtaaagcca

SEQ ID NO: 325434 - DNA, 15 bp, Homo sapiens
ccaaggagtaaagcc

SEQ ID NO: 325435 - DNA, 15 bp, Homo sapiens
cccaaggagtaaagc

SEQ ID NO: 325436 - DNA, 15 bp, Homo sapiens
acccaaggagtaaag

SEQ ID NO: 325437 - DNA, 15 bp, Homo sapiens
cacccaaggagtaaa

SEQ ID NO: 325438 - DNA, 15 bp, Homo sapiens
acacccaaggagtaa

SEQ ID NO: 325439 - DNA, 15 bp, Homo sapiens
aacacccaaggagta

SEQ ID NO: 325440 - DNA, 15 bp, Homo sapiens
taacacccaaggagt

SEQ ID NO: 325441 - DNA, 15 bp, Homo sapiens
ctaacacccaaggag

SEQ ID NO: 325442 - DNA, 15 bp, Homo sapiens
actaacacccaagga

SEQ ID NO: 325443 - DNA, 15 bp, Homo sapiens
cactaacacccaagg

SEQ ID NO: 325444 - DNA, 15 bp, Homo sapiens
acactaacacccaag

SEQ ID NO: 325445 - DNA, 15 bp, Homo sapiens
aacactaacacccaa

SEQ ID NO: 325446 - DNA, 15 bp, Homo sapiens
aaacactaacaccca

SEQ ID NO: 325447 - DNA, 15 bp, Homo sapiens
aaaacactaacaccc

SEQ ID NO: 325448 - DNA, 15 bp, Homo sapiens
aaaaacactaacacc

SEQ ID NO: 325449 - DNA, 15 bp, Homo sapiens
aaaaaacactaacac

SEQ ID NO: 325450 - DNA, 15 bp, Homo sapiens
aaaaaaacactaaca

SEQ ID NO: 325451 - DNA, 15 bp, Homo sapiens
aaaaaaaacactaac

SEQ ID NO: 325452 - DNA, 15 bp, Homo sapiens
caaaaaaaacactaa

SEQ ID NO: 325453 - DNA, 15 bp, Homo sapiens
gcaaaaaaaacacta

SEQ ID NO: 325454 - DNA, 15 bp, Homo sapiens
agcaaaaaaaacact

SEQ ID NO: 325455 - DNA, 15 bp, Homo sapiens
aagcaaaaaaaacac

SEQ ID NO: 325456 - DNA, 15 bp, Homo sapiens
caagcaaaaaaaaca

SEQ ID NO: 325457 - DNA, 15 bp, Homo sapiens
acaagcaaaaaaaac

SEQ ID NO: 325458 - DNA, 15 bp, Homo sapiens
aacaagcaaaaaaaa

SEQ ID NO: 325459 - DNA, 15 bp, Homo sapiens
aaacaagcaaaaaaa

SEQ ID NO: 325460 - DNA, 15 bp, Homo sapiens
taaacaagcaaaaaa

SEQ ID NO: 325461 - DNA, 15 bp, Homo sapiens
ataaacaagcaaaaa

SEQ ID NO: 325462 - DNA, 15 bp, Homo sapiens
aataaacaagcaaaa

SEQ ID NO: 325463 - DNA, 15 bp, Homo sapiens
aaataaacaagcaaa

SEQ ID NO: 325464 - DNA, 15 bp, Homo sapiens
aaaataaacaagcaa

SEQ ID NO: 325465 - DNA, 15 bp, Homo sapiens
taaaataaacaagca

SEQ ID NO: 325466 - DNA, 15 bp, Homo sapiens
ataaaataaacaagc

SEQ ID NO: 325467 - DNA, 15 bp, Homo sapiens
aataaaataaacaag

SEQ ID NO: 325468 - DNA, 15 bp, Homo sapiens
aaataaaataaacaa

SEQ ID NO: 325469 - DNA, 15 bp, Homo sapiens
aaaataaaataaaca

SEQ ID NO: 325470 - DNA, 15 bp, Homo sapiens
caaaataaaataaac

SEQ ID NO: 325471 - DNA, 15 bp, Homo sapiens
gcaaaataaaataaa

SEQ ID NO: 325472 - DNA, 15 bp, Homo sapiens
agcaaaataaaataa

SEQ ID NO: 325473 - DNA, 15 bp, Homo sapiens
aagcaaaataaaata

SEQ ID NO: 325474 - DNA, 15 bp, Homo sapiens
aaagcaaaataaaat

SEQ ID NO: 325475 - DNA, 15 bp, Homo sapiens
taaagcaaaataaaa

SEQ ID NO: 325476 - DNA, 15 bp, Homo sapiens
ttaaagcaaaataaa

SEQ ID NO: 325477 - DNA, 15 bp, Homo sapiens
attaaagcaaaataa

SEQ ID NO: 325478 - DNA, 15 bp, Homo sapiens
aattaaagcaaaata

SEQ ID NO: 325479 - DNA, 15 bp, Homo sapiens
gaattaaagcaaaat

SEQ ID NO: 325480 - DNA, 15 bp, Homo sapiens
ggaattaaagcaaaa

SEQ ID NO: 325481 - DNA, 15 bp, Homo sapiens
tggaattaaagcaaa

SEQ ID NO: 325482 - DNA, 15 bp, Homo sapiens
ttggaattaaagcaa

SEQ ID NO: 325483 - DNA, 15 bp, Homo sapiens
tttggaattaaagca

SEQ ID NO: 325484 - DNA, 15 bp, Homo sapiens
atttggaattaaagc

SEQ ID NO: 325485 - DNA, 15 bp, Homo sapiens
aatttggaattaaag

SEQ ID NO: 325486 - DNA, 15 bp, Homo sapiens
caatttggaattaaa

SEQ ID NO: 325487 - DNA, 15 bp, Homo sapiens
ccaatttggaattaa

SEQ ID NO: 325488 - DNA, 15 bp, Homo sapiens
accaatttggaatta

SEQ ID NO: 325489 - DNA, 15 bp, Homo sapiens
aaccaatttggaatt

SEQ ID NO: 325490 - DNA, 15 bp, Homo sapiens
aaaccaatttggaat

SEQ ID NO: 325491 - DNA, 15 bp, Homo sapiens
gaaaccaatttggaa

SEQ ID NO: 325492 - DNA, 15 bp, Homo sapiens
ggaaaccaatttgga

SEQ ID NO: 325493 - DNA, 15 bp, Homo sapiens
aggaaaccaatttgg

SEQ ID NO: 325494 - DNA, 15 bp, Homo sapiens
gaggaaaccaatttg

SEQ ID NO: 325495 - DNA, 15 bp, Homo sapiens
agaggaaaccaattt

SEQ ID NO: 325496 - DNA, 15 bp, Homo sapiens
gagaggaaaccaatt

SEQ ID NO: 325497 - DNA, 15 bp, Homo sapiens
agagaggaaaccaat

SEQ ID NO: 325498 - DNA, 15 bp, Homo sapiens
gagagaggaaaccaa

SEQ ID NO: 325499 - DNA, 15 bp, Homo sapiens
agagagaggaaacca

SEQ ID NO: 325500 - DNA, 15 bp, Homo sapiens
cagagagaggaaacc

SEQ ID NO: 325501 - DNA, 15 bp, Homo sapiens
tcagagagaggaaac

SEQ ID NO: 325502 - DNA, 15 bp, Homo sapiens
gtcagagagaggaaa

SEQ ID NO: 325503 - DNA, 15 bp, Homo sapiens
agtcagagagaggaa

SEQ ID NO: 325504 - DNA, 15 bp, Homo sapiens
cagtcagagagagga

SEQ ID NO: 325505 - DNA, 15 bp, Homo sapiens
gcagtcagagagagg

SEQ ID NO: 325506 - DNA, 15 bp, Homo sapiens
agcagtcagagagag

SEQ ID NO: 325507 - DNA, 15 bp, Homo sapiens
gagcagtcagagaga

SEQ ID NO: 325508 - DNA, 15 bp, Homo sapiens
tgagcagtcagagag

SEQ ID NO: 325509 - DNA, 15 bp, Homo sapiens
atgagcagtcagaga

SEQ ID NO: 325510 - DNA, 15 bp, Homo sapiens
gatgagcagtcagag

SEQ ID NO: 325511 - DNA, 15 bp, Homo sapiens
agatgagcagtcaga

SEQ ID NO: 325512 - DNA, 15 bp, Homo sapiens
tagatgagcagtcag

SEQ ID NO: 325513 - DNA, 15 bp, Homo sapiens
atagatgagcagtca

SEQ ID NO: 325514 - DNA, 15 bp, Homo sapiens
catagatgagcagtc

SEQ ID NO: 325515 - DNA, 15 bp, Homo sapiens
acatagatgagcagt

SEQ ID NO: 325516 - DNA, 15 bp, Homo sapiens
cacatagatgagcag

SEQ ID NO: 325517 - DNA, 15 bp, Homo sapiens
tcacatagatgagca

SEQ ID NO: 325518 - DNA, 15 bp, Homo sapiens
gtcacatagatgagc

SEQ ID NO: 325519 - DNA, 15 bp, Homo sapiens
agtcacatagatgag

SEQ ID NO: 325520 - DNA, 15 bp, Homo sapiens
cagtcacatagatga

SEQ ID NO: 325521 - DNA, 15 bp, Homo sapiens
acagtcacatagatg

SEQ ID NO: 325522 - DNA, 15 bp, Homo sapiens
cacagtcacatagat

SEQ ID NO: 325523 - DNA, 15 bp, Homo sapiens
tcacagtcacataga

SEQ ID NO: 325524 - DNA, 15 bp, Homo sapiens
ctcacagtcacatag

SEQ ID NO: 325525 - DNA, 15 bp, Homo sapiens
cctcacagtcacata

SEQ ID NO: 325526 - DNA, 15 bp, Homo sapiens
acctcacagtcacat

SEQ ID NO: 325527 - DNA, 15 bp, Homo sapiens
gacctcacagtcaca

SEQ ID NO: 325528 - DNA, 15 bp, Homo sapiens
tgacctcacagtcac

SEQ ID NO: 325529 - DNA, 15 bp, Homo sapiens
ttgacctcacagtca

SEQ ID NO: 325530 - DNA, 15 bp, Homo sapiens
tttgacctcacagtc

SEQ ID NO: 325531 - DNA, 15 bp, Homo sapiens
atttgacctcacagt

SEQ ID NO: 325532 - DNA, 15 bp, Homo sapiens
aatttgacctcacag

SEQ ID NO: 325533 - DNA, 15 bp, Homo sapiens
gaatttgacctcaca

SEQ ID NO: 325534 - DNA, 15 bp, Homo sapiens
tgaatttgacctcac

SEQ ID NO: 325535 - DNA, 15 bp, Homo sapiens
gtgaatttgacctca

SEQ ID NO: 325536 - DNA, 15 bp, Homo sapiens
agtgaatttgacctc

SEQ ID NO: 325537 - DNA, 15 bp, Homo sapiens
aagtgaatttgacct

SEQ ID NO: 325538 - DNA, 15 bp, Homo sapiens
aaagtgaatttgacc

SEQ ID NO: 325539 - DNA, 15 bp, Homo sapiens
gaaagtgaatttgac

SEQ ID NO: 325540 - DNA, 15 bp, Homo sapiens
agaaagtgaatttga

SEQ ID NO: 325541 - DNA, 15 bp, Homo sapiens
tagaaagtgaatttg

SEQ ID NO: 325542 - DNA, 15 bp, Homo sapiens
atagaaagtgaattt

SEQ ID NO: 325543 - DNA, 15 bp, Homo sapiens
aatagaaagtgaatt

SEQ ID NO: 325544 - DNA, 15 bp, Homo sapiens
taatagaaagtgaat

SEQ ID NO: 325545 - DNA, 15 bp, Homo sapiens
ctaatagaaagtgaa

SEQ ID NO: 325546 - DNA, 15 bp, Homo sapiens
actaatagaaagtga

SEQ ID NO: 325547 - DNA, 15 bp, Homo sapiens
gactaatagaaagtg

SEQ ID NO: 325548 - DNA, 15 bp, Homo sapiens
tgactaatagaaagt

SEQ ID NO: 325549 - DNA, 15 bp, Homo sapiens
ttgactaatagaaag

SEQ ID NO: 325550 - DNA, 15 bp, Homo sapiens
cttgactaatagaaa

SEQ ID NO: 325551 - DNA, 15 bp, Homo sapiens
acttgactaatagaa

SEQ ID NO: 325552 - DNA, 15 bp, Homo sapiens
aacttgactaataga

SEQ ID NO: 325553 - DNA, 15 bp, Homo sapiens
caacttgactaatag

SEQ ID NO: 325554 - DNA, 15 bp, Homo sapiens
tcaacttgactaata

SEQ ID NO: 325555 - DNA, 15 bp, Homo sapiens
ttcaacttgactaat

SEQ ID NO: 325556 - DNA, 15 bp, Homo sapiens
tttcaacttgactaa

SEQ ID NO: 325557 - DNA, 15 bp, Homo sapiens
ttttcaacttgacta

SEQ ID NO: 325558 - DNA, 15 bp, Homo sapiens
cttttcaacttgact

SEQ ID NO: 325559 - DNA, 15 bp, Homo sapiens
tcttttcaacttgac

SEQ ID NO: 325560 - DNA, 15 bp, Homo sapiens
ttcttttcaacttga

SEQ ID NO: 325561 - DNA, 15 bp, Homo sapiens
tttcttttcaacttg

SEQ ID NO: 325562 - DNA, 15 bp, Homo sapiens
ttttcttttcaactt

SEQ ID NO: 325563 - DNA, 15 bp, Homo sapiens
tttttcttttcaact

SEQ ID NO: 325564 - DNA, 15 bp, Homo sapiens
ctttttcttttcaac

SEQ ID NO: 325565 - DNA, 15 bp, Homo sapiens
tctttttcttttcaa

SEQ ID NO: 325566 - DNA, 15 bp, Homo sapiens
ctctttttcttttca

SEQ ID NO: 325567 - DNA, 15 bp, Homo sapiens
tctctttttcttttc

SEQ ID NO: 325568 - DNA, 15 bp, Homo sapiens
ttctctttttctttt

SEQ ID NO: 325569 - DNA, 15 bp, Homo sapiens
attctctttttcttt

SEQ ID NO: 325570 - DNA, 15 bp, Homo sapiens
gattctctttttctt

SEQ ID NO: 325571 - DNA, 15 bp, Homo sapiens
ggattctctttttct

SEQ ID NO: 325572 - DNA, 15 bp, Homo sapiens
tggattctctttttc

SEQ ID NO: 325573 - DNA, 15 bp, Homo sapiens
ttggattctcttttt

SEQ ID NO: 325574 - DNA, 15 bp, Homo sapiens
attggattctctttt

SEQ ID NO: 325575 - DNA, 15 bp, Homo sapiens
cattggattctcttt

SEQ ID NO: 325576 - DNA, 15 bp, Homo sapiens
ccattggattctctt

SEQ ID NO: 325577 - DNA, 15 bp, Homo sapiens
gccattggattctct

SEQ ID NO: 325578 - DNA, 15 bp, Homo sapiens
tgccattggattctc

SEQ ID NO: 325579 - DNA, 15 bp, Homo sapiens
gtgccattggattct

SEQ ID NO: 325580 - DNA, 15 bp, Homo sapiens
agtgccattggattc

SEQ ID NO: 325581 - DNA, 15 bp, Homo sapiens
cagtgccattggatt

SEQ ID NO: 325582 - DNA, 15 bp, Homo sapiens
tcagtgccattggat

SEQ ID NO: 325583 - DNA, 15 bp, Homo sapiens
ttcagtgccattgga

SEQ ID NO: 325584 - DNA, 15 bp, Homo sapiens
cttcagtgccattgg

SEQ ID NO: 325585 - DNA, 15 bp, Homo sapiens
acttcagtgccattg

SEQ ID NO: 325586 - DNA, 15 bp, Homo sapiens
gacttcagtgccatt

SEQ ID NO: 325587 - DNA, 15 bp, Homo sapiens
agacttcagtgccat

SEQ ID NO: 325588 - DNA, 15 bp, Homo sapiens
aagacttcagtgcca

SEQ ID NO: 325589 - DNA, 15 bp, Homo sapiens
aaagacttcagtgcc

SEQ ID NO: 325590 - DNA, 15 bp, Homo sapiens
taaagacttcagtgc

SEQ ID NO: 325591 - DNA, 15 bp, Homo sapiens
ttaaagacttcagtg

SEQ ID NO: 325592 - DNA, 15 bp, Homo sapiens
tttaaagacttcagt

SEQ ID NO: 325593 - DNA, 15 bp, Homo sapiens
ttttaaagacttcag

SEQ ID NO: 325594 - DNA, 15 bp, Homo sapiens
cttttaaagacttca

SEQ ID NO: 325595 - DNA, 15 bp, Homo sapiens
acttttaaagacttc

SEQ ID NO: 325596 - DNA, 15 bp, Homo sapiens
tacttttaaagactt

SEQ ID NO: 325597 - DNA, 15 bp, Homo sapiens
atacttttaaagact

SEQ ID NO: 325598 - DNA, 15 bp, Homo sapiens
catacttttaaagac

SEQ ID NO: 325599 - DNA, 15 bp, Homo sapiens
acatacttttaaaga

SEQ ID NO: 325600 - DNA, 15 bp, Homo sapiens
gacatacttttaaag

SEQ ID NO: 325601 - DNA, 15 bp, Homo sapiens
ggacatacttttaaa

SEQ ID NO: 325602 - DNA, 15 bp, Homo sapiens
aggacatacttttaa

SEQ ID NO: 325603 - DNA, 15 bp, Homo sapiens
gaggacatactttta

SEQ ID NO: 325604 - DNA, 15 bp, Homo sapiens
ggaggacatactttt

SEQ ID NO: 325605 - DNA, 15 bp, Homo sapiens
aggaggacatacttt

SEQ ID NO: 325606 - DNA, 15 bp, Homo sapiens
caggaggacatactt

SEQ ID NO: 325607 - DNA, 15 bp, Homo sapiens
gcaggaggacatact

SEQ ID NO: 325608 - DNA, 15 bp, Homo sapiens
ggcaggaggacatac

SEQ ID NO: 325609 - DNA, 15 bp, Homo sapiens
aggcaggaggacata

SEQ ID NO: 325610 - DNA, 15 bp, Homo sapiens
aaaaggcaggaggac

SEQ ID NO: 325611 - DNA, 15 bp, Homo sapiens
taaaaggcaggagga

SEQ ID NO: 325612 - DNA, 15 bp, Homo sapiens
gtaaaaggcaggagg

SEQ ID NO: 325613 - DNA, 15 bp, Homo sapiens
agtaaaaggcaggag

SEQ ID NO: 325614 - DNA, 15 bp, Homo sapiens
cagtaaaaggcagga

SEQ ID NO: 325615 - DNA, 15 bp, Homo sapiens
acagtaaaaggcagg

SEQ ID NO: 325616 - DNA, 15 bp, Homo sapiens
aacagtaaaaggcag

SEQ ID NO: 325617 - DNA, 15 bp, Homo sapiens
gaacagtaaaaggca

SEQ ID NO: 325618 - DNA, 15 bp, Homo sapiens
tgaacagtaaaaggc

SEQ ID NO: 325619 - DNA, 15 bp, Homo sapiens
atgaacagtaaaagg

SEQ ID NO: 325620 - DNA, 15 bp, Homo sapiens
aatgaacagtaaaag

SEQ ID NO: 325621 - DNA, 15 bp, Homo sapiens
taatgaacagtaaaa

SEQ ID NO: 325622 - DNA, 15 bp, Homo sapiens
ataatgaacagtaaa

SEQ ID NO: 325623 - DNA, 15 bp, Homo sapiens
gataatgaacagtaa

SEQ ID NO: 325624 - DNA, 15 bp, Homo sapiens
ggataatgaacagta

SEQ ID NO: 325625 - DNA, 15 bp, Homo sapiens
aggataatgaacagt

SEQ ID NO: 325626 - DNA, 15 bp, Homo sapiens
caggataatgaacag

SEQ ID NO: 325627 - DNA, 15 bp, Homo sapiens
tcaggataatgaaca

SEQ ID NO: 325628 - DNA, 15 bp, Homo sapiens
ctcaggataatgaac

SEQ ID NO: 325629 - DNA, 15 bp, Homo sapiens
tctcaggataatgaa

SEQ ID NO: 325630 - DNA, 15 bp, Homo sapiens
atctcaggataatga

SEQ ID NO: 325631 - DNA, 15 bp, Homo sapiens
tatctcaggataatg

SEQ ID NO: 325632 - DNA, 15 bp, Homo sapiens
ttatctcaggataat

SEQ ID NO: 325633 - DNA, 15 bp, Homo sapiens
cttatctcaggataa

SEQ ID NO: 325634 - DNA, 15 bp, Homo sapiens
tcttatctcaggata

SEQ ID NO: 325635 - DNA, 15 bp, Homo sapiens
ttcttatctcaggat

SEQ ID NO: 325636 - DNA, 15 bp, Homo sapiens
attcttatctcagga

SEQ ID NO: 325637 - DNA, 15 bp, Homo sapiens
aattcttatctcagg

SEQ ID NO: 325638 - DNA, 15 bp, Homo sapiens
aaattcttatctcag

SEQ ID NO: 325639 - DNA, 15 bp, Homo sapiens
taaattcttatctca

SEQ ID NO: 325640 - DNA, 15 bp, Homo sapiens
ataaattcttatctc

SEQ ID NO: 325641 - DNA, 15 bp, Homo sapiens
gataaattcttatct

SEQ ID NO: 325642 - DNA, 15 bp, Homo sapiens
tgataaattcttatc

SEQ ID NO: 325643 - DNA, 15 bp, Homo sapiens
ctgataaattcttat

SEQ ID NO: 325644 - DNA, 15 bp, Homo sapiens
actgataaattctta

SEQ ID NO: 325645 - DNA, 15 bp, Homo sapiens
gactgataaattctt

SEQ ID NO: 325646 - DNA, 15 bp, Homo sapiens
ggactgataaattct

SEQ ID NO: 325647 - DNA, 15 bp, Homo sapiens
aggactgataaattc

SEQ ID NO: 325648 - DNA, 15 bp, Homo sapiens
gaggactgataaatt

SEQ ID NO: 325649 - DNA, 15 bp, Homo sapiens
agaggactgataaat

SEQ ID NO: 325650 - DNA, 15 bp, Homo sapiens
cagaggactgataaa

SEQ ID NO: 325651 - DNA, 15 bp, Homo sapiens
acagaggactgataa

SEQ ID NO: 325652 - DNA, 15 bp, Homo sapiens
aacagaggactgata

SEQ ID NO: 325653 - DNA, 15 bp, Homo sapiens
aaacagaggactgat

SEQ ID NO: 325654 - DNA, 15 bp, Homo sapiens
taaacagaggactga

SEQ ID NO: 325655 - DNA, 15 bp, Homo sapiens
ataaacagaggactg

SEQ ID NO: 325656 - DNA, 15 bp, Homo sapiens
aataaacagaggact

SEQ ID NO: 325657 - DNA, 15 bp, Homo sapiens
taataaacagaggac

SEQ ID NO: 325658 - DNA, 15 bp, Homo sapiens
ctaataaacagagga

SEQ ID NO: 325659 - DNA, 15 bp, Homo sapiens
gctaataaacagagg

SEQ ID NO: 325660 - DNA, 15 bp, Homo sapiens
tgctaataaacagag

SEQ ID NO: 325661 - DNA, 15 bp, Homo sapiens
ttgctaataaacaga

SEQ ID NO: 325662 - DNA, 15 bp, Homo sapiens
attgctaataaacag

SEQ ID NO: 325663 - DNA, 15 bp, Homo sapiens
tattgctaataaaca

SEQ ID NO: 325664 - DNA, 15 bp, Homo sapiens
ttattgctaataaac

SEQ ID NO: 325665 - DNA, 15 bp, Homo sapiens
attattgctaataaa

SEQ ID NO: 325666 - DNA, 15 bp, Homo sapiens
cattattgctaataa

SEQ ID NO: 325667 - DNA, 15 bp, Homo sapiens
acattattgctaata

SEQ ID NO: 325668 - DNA, 15 bp, Homo sapiens
tacattattgctaat

SEQ ID NO: 325669 - DNA, 15 bp, Homo sapiens
ttacattattgctaa

SEQ ID NO: 325670 - DNA, 15 bp, Homo sapiens
attacattattgcta

SEQ ID NO: 325671 - DNA, 15 bp, Homo sapiens
tattacattattgct

SEQ ID NO: 325672 - DNA, 15 bp, Homo sapiens
atattacattattgc

SEQ ID NO: 325673 - DNA, 15 bp, Homo sapiens
aatattacattattg

SEQ ID NO: 325674 - DNA, 15 bp, Homo sapiens
taatattacattatt

SEQ ID NO: 325675 - DNA, 15 bp, Homo sapiens
ataatattacattat

SEQ ID NO: 325676 - DNA, 15 bp, Homo sapiens
aataatattacatta

SEQ ID NO: 325677 - DNA, 15 bp, Homo sapiens
gaataatattacatt

SEQ ID NO: 325678 - DNA, 15 bp, Homo sapiens
tgaataatattacat

SEQ ID NO: 325679 - DNA, 15 bp, Homo sapiens
gtgaataatattaca

SEQ ID NO: 325680 - DNA, 15 bp, Homo sapiens
tgtgaataatattac

SEQ ID NO: 325681 - DNA, 15 bp, Homo sapiens
atgtgaataatatta

SEQ ID NO: 325682 - DNA, 15 bp, Homo sapiens
tatgtgaataatatt

SEQ ID NO: 325683 - DNA, 15 bp, Homo sapiens
gtatgtgaataatat

SEQ ID NO: 325684 - DNA, 15 bp, Homo sapiens
tgtatgtgaataata

SEQ ID NO: 325685 - DNA, 15 bp, Homo sapiens
ctgtatgtgaataat

SEQ ID NO: 325686 - DNA, 15 bp, Homo sapiens
actgtatgtgaataa

SEQ ID NO: 325687 - DNA, 15 bp, Homo sapiens
cactgtatgtgaata

SEQ ID NO: 325688 - DNA, 15 bp, Homo sapiens
tcactgtatgtgaat

SEQ ID NO: 325689 - DNA, 15 bp, Homo sapiens
ttcactgtatgtgaa

SEQ ID NO: 325690 - DNA, 15 bp, Homo sapiens
attcactgtatgtga

SEQ ID NO: 325691 - DNA, 15 bp, Homo sapiens
tattcactgtatgtg

SEQ ID NO: 325692 - DNA, 15 bp, Homo sapiens
atattcactgtatgt

SEQ ID NO: 325693 - DNA, 15 bp, Homo sapiens
aatattcactgtatg

SEQ ID NO: 325694 - DNA, 15 bp, Homo sapiens
caatattcactgtat

SEQ ID NO: 325695 - DNA, 15 bp, Homo sapiens
acaatattcactgta

SEQ ID NO: 325696 - DNA, 15 bp, Homo sapiens
tacaatattcactgt

SEQ ID NO: 325697 - DNA, 15 bp, Homo sapiens
atacaatattcactg

SEQ ID NO: 325698 - DNA, 15 bp, Homo sapiens
aatacaatattcact

SEQ ID NO: 325699 - DNA, 15 bp, Homo sapiens
aaatacaatattcac

SEQ ID NO: 325700 - DNA, 15 bp, Homo sapiens
gaaatacaatattca

SEQ ID NO: 325701 - DNA, 15 bp, Homo sapiens
agaaatacaatattc

SEQ ID NO: 325702 - DNA, 15 bp, Homo sapiens
aagaaatacaatatt

SEQ ID NO: 325703 - DNA, 15 bp, Homo sapiens
gaagaaatacaatat

SEQ ID NO: 325704 - DNA, 15 bp, Homo sapiens
tgaagaaatacaata

SEQ ID NO: 325705 - DNA, 15 bp, Homo sapiens
atgaagaaatacaat

SEQ ID NO: 325706 - DNA, 15 bp, Homo sapiens
catgaagaaatacaa

SEQ ID NO: 325707 - DNA, 15 bp, Homo sapiens
acatgaagaaataca

SEQ ID NO: 325708 - DNA, 15 bp, Homo sapiens
aacatgaagaaatac

SEQ ID NO: 325709 - DNA, 15 bp, Homo sapiens
aaacatgaagaaata

SEQ ID NO: 325710 - DNA, 15 bp, Homo sapiens
aaaacatgaagaaat

SEQ ID NO: 325711 - DNA, 15 bp, Homo sapiens
aaaaacatgaagaaa

SEQ ID NO: 325712 - DNA, 15 bp, Homo sapiens
gaaaaacatgaagaa

SEQ ID NO: 325713 - DNA, 15 bp, Homo sapiens
agaaaaacatgaaga

SEQ ID NO: 325714 - DNA, 15 bp, Homo sapiens
cagaaaaacatgaag

SEQ ID NO: 325715 - DNA, 15 bp, Homo sapiens
tcagaaaaacatgaa

SEQ ID NO: 325716 - DNA, 15 bp, Homo sapiens
atcagaaaaacatga

SEQ ID NO: 325717 - DNA, 15 bp, Homo sapiens
aatcagaaaaacatg

SEQ ID NO: 325718 - DNA, 15 bp, Homo sapiens
caatcagaaaaacat

SEQ ID NO: 325719 - DNA, 15 bp, Homo sapiens
gcaatcagaaaaaca

SEQ ID NO: 325720 - DNA, 15 bp, Homo sapiens
ggcaatcagaaaaac

SEQ ID NO: 325721 - DNA, 15 bp, Homo sapiens
tggcaatcagaaaaa

SEQ ID NO: 325722 - DNA, 15 bp, Homo sapiens
ttggcaatcagaaaa

SEQ ID NO: 325723 - DNA, 15 bp, Homo sapiens
attggcaatcagaaa

SEQ ID NO: 325724 - DNA, 15 bp, Homo sapiens
tattggcaatcagaa

SEQ ID NO: 325725 - DNA, 15 bp, Homo sapiens
ttattggcaatcaga

SEQ ID NO: 325726 - DNA, 15 bp, Homo sapiens
gttattggcaatcag

SEQ ID NO: 325727 - DNA, 15 bp, Homo sapiens
ggttattggcaatca

SEQ ID NO: 325728 - DNA, 15 bp, Homo sapiens
aggttattggcaatc

SEQ ID NO: 325729 - DNA, 15 bp, Homo sapiens
aaggttattggcaat

SEQ ID NO: 325730 - DNA, 15 bp, Homo sapiens
caaggttattggcaa

SEQ ID NO: 325731 - DNA, 15 bp, Homo sapiens
tcaaggttattggca

SEQ ID NO: 325732 - DNA, 15 bp, Homo sapiens
atcaaggttattggc

SEQ ID NO: 325733 - DNA, 15 bp, Homo sapiens
aatcaaggttattgg

SEQ ID NO: 325734 - DNA, 15 bp, Homo sapiens
aaatcaaggttattg

SEQ ID NO: 325735 - DNA, 15 bp, Homo sapiens
gaaatcaaggttatt

SEQ ID NO: 325736 - DNA, 15 bp, Homo sapiens
agaaatcaaggttat

SEQ ID NO: 325737 - DNA, 15 bp, Homo sapiens
cagaaatcaaggtta

SEQ ID NO: 325738 - DNA, 15 bp, Homo sapiens
gcagaaatcaaggtt

SEQ ID NO: 325739 - DNA, 15 bp, Homo sapiens
ggcagaaatcaaggt

SEQ ID NO: 325740 - DNA, 15 bp, Homo sapiens
aggcagaaatcaagg

SEQ ID NO: 325741 - DNA, 15 bp, Homo sapiens
aaggcagaaatcaag

SEQ ID NO: 325742 - DNA, 15 bp, Homo sapiens
aaaggcagaaatcaa

SEQ ID NO: 325743 - DNA, 15 bp, Homo sapiens
aaaaggcagaaatca

SEQ ID NO: 325744 - DNA, 15 bp, Homo sapiens
taaaaggcagaaatc

SEQ ID NO: 325745 - DNA, 15 bp, Homo sapiens
ttaaaaggcagaaat

SEQ ID NO: 325746 - DNA, 15 bp, Homo sapiens
attaaaaggcagaaa

SEQ ID NO: 325747 - DNA, 15 bp, Homo sapiens
aattaaaaggcagaa

SEQ ID NO: 325748 - DNA, 15 bp, Homo sapiens
taattaaaaggcaga

SEQ ID NO: 325749 - DNA, 15 bp, Homo sapiens
ataattaaaaggcag

SEQ ID NO: 325750 - DNA, 15 bp, Homo sapiens
aataattaaaaggca

SEQ ID NO: 325751 - DNA, 15 bp, Homo sapiens
gaataattaaaaggc

SEQ ID NO: 325752 - DNA, 15 bp, Homo sapiens
agaataattaaaagg

SEQ ID NO: 325753 - DNA, 15 bp, Homo sapiens
aagaataattaaaag

SEQ ID NO: 325754 - DNA, 15 bp, Homo sapiens
gaagaataattaaaa

SEQ ID NO: 325755 - DNA, 15 bp, Homo sapiens
agaagaataattaaa

SEQ ID NO: 325756 - DNA, 15 bp, Homo sapiens
tagaagaataattaa

SEQ ID NO: 325757 - DNA, 15 bp, Homo sapiens
atagaagaataatta

SEQ ID NO: 325758 - DNA, 15 bp, Homo sapiens
catagaagaataatt

SEQ ID NO: 325759 - DNA, 15 bp, Homo sapiens
acatagaagaataat

SEQ ID NO: 325760 - DNA, 15 bp, Homo sapiens
cacatagaagaataa

SEQ ID NO: 325761 - DNA, 15 bp, Homo sapiens
gcacatagaagaata

SEQ ID NO: 325762 - DNA, 15 bp, Homo sapiens
agcacatagaagaat

SEQ ID NO: 325763 - DNA, 15 bp, Homo sapiens
tagcacatagaagaa

SEQ ID NO: 325764 - DNA, 15 bp, Homo sapiens
ctagcacatagaaga

SEQ ID NO: 325765 - DNA, 15 bp, Homo sapiens
tctagcacatagaag

SEQ ID NO: 325766 - DNA, 15 bp, Homo sapiens
ttctagcacatagaa

SEQ ID NO: 325767 - DNA, 15 bp, Homo sapiens
attctagcacataga

SEQ ID NO: 325768 - DNA, 15 bp, Homo sapiens
gattctagcacatag

SEQ ID NO: 325769 - DNA, 15 bp, Homo sapiens
tgattctagcacata

SEQ ID NO: 325770 - DNA, 15 bp, Homo sapiens
atgattctagcacat

SEQ ID NO: 325771 - DNA, 15 bp, Homo sapiens
tatgattctagcaca

SEQ ID NO: 325772 - DNA, 15 bp, Homo sapiens
atatgattctagcac

SEQ ID NO: 325773 - DNA, 15 bp, Homo sapiens
aatatgattctagca

SEQ ID NO: 325774 - DNA, 15 bp, Homo sapiens
taatatgattctagc

SEQ ID NO: 325775 - DNA, 15 bp, Homo sapiens
gtaatatgattctag

SEQ ID NO: 325776 - DNA, 15 bp, Homo sapiens
agtaatatgattcta

SEQ ID NO: 325777 - DNA, 15 bp, Homo sapiens
aagtaatatgattct

SEQ ID NO: 325778 - DNA, 15 bp, Homo sapiens
aaagtaatatgattc

SEQ ID NO: 325779 - DNA, 15 bp, Homo sapiens
aaaagtaatatgatt

SEQ ID NO: 325780 - DNA, 15 bp, Homo sapiens
caaaagtaatatgat

SEQ ID NO: 325781 - DNA, 15 bp, Homo sapiens
tcaaaagtaatatga

SEQ ID NO: 325782 - DNA, 15 bp, Homo sapiens
ttcaaaagtaatatg

SEQ ID NO: 325783 - DNA, 15 bp, Homo sapiens
tttcaaaagtaatat

SEQ ID NO: 325784 - DNA, 15 bp, Homo sapiens
atttcaaaagtaata

SEQ ID NO: 325785 - DNA, 15 bp, Homo sapiens
catttcaaaagtaat

SEQ ID NO: 325786 - DNA, 15 bp, Homo sapiens
acatttcaaaagtaa

SEQ ID NO: 325787 - DNA, 15 bp, Homo sapiens
tacatttcaaaagta

SEQ ID NO: 325788 - DNA, 15 bp, Homo sapiens
ttacatttcaaaagt

SEQ ID NO: 325789 - DNA, 15 bp, Homo sapiens
tttacatttcaaaag

SEQ ID NO: 325790 - DNA, 15 bp, Homo sapiens
gtttacatttcaaaa

SEQ ID NO: 325791 - DNA, 15 bp, Homo sapiens
cgtttacatttcaaa

SEQ ID NO: 325792 - DNA, 15 bp, Homo sapiens
tcgtttacatttcaa

SEQ ID NO: 325793 - DNA, 15 bp, Homo sapiens
atcgtttacatttca

SEQ ID NO: 325794 - DNA, 15 bp, Homo sapiens
gatcgtttacatttc

SEQ ID NO: 325795 - DNA, 15 bp, Homo sapiens
tgatcgtttacattt

SEQ ID NO: 325796 - DNA, 15 bp, Homo sapiens
ttgatcgtttacatt

SEQ ID NO: 325797 - DNA, 15 bp, Homo sapiens
attgatcgtttacat

SEQ ID NO: 325798 - DNA, 15 bp, Homo sapiens
cattgatcgtttaca

SEQ ID NO: 325799 - DNA, 15 bp, Homo sapiens
tcattgatcgtttac

SEQ ID NO: 325800 - DNA, 15 bp, Homo sapiens
ttcattgatcgttta

SEQ ID NO: 325801 - DNA, 15 bp, Homo sapiens
cttcattgatcgttt

SEQ ID NO: 325802 - DNA, 15 bp, Homo sapiens
gcttcattgatcgtt

SEQ ID NO: 325803 - DNA, 15 bp, Homo sapiens
agcttcattgatcgt

SEQ ID NO: 325804 - DNA, 15 bp, Homo sapiens
tagcttcattgatcg

SEQ ID NO: 325805 - DNA, 15 bp, Homo sapiens
ctagcttcattgatc

SEQ ID NO: 325806 - DNA, 15 bp, Homo sapiens
gctagcttcattgat

SEQ ID NO: 325807 - DNA, 15 bp, Homo sapiens
tgctagcttcattga

SEQ ID NO: 325808 - DNA, 15 bp, Homo sapiens
atgctagcttcattg

SEQ ID NO: 325809 - DNA, 15 bp, Homo sapiens
gatgctagcttcatt

SEQ ID NO: 325810 - DNA, 15 bp, Homo sapiens
agatgctagcttcat

SEQ ID NO: 325811 - DNA, 15 bp, Homo sapiens
gagatgctagcttca

SEQ ID NO: 325812 - DNA, 15 bp, Homo sapiens
cgagatgctagcttc

SEQ ID NO: 325813 - DNA, 15 bp, Homo sapiens
gcgagatgctagctt

SEQ ID NO: 325814 - DNA, 15 bp, Homo sapiens
ggcgagatgctagct

SEQ ID NO: 325815 - DNA, 15 bp, Homo sapiens
tggcgagatgctagc

SEQ ID NO: 325816 - DNA, 15 bp, Homo sapiens
ttggcgagatgctag

SEQ ID NO: 325817 - DNA, 15 bp, Homo sapiens
attggcgagatgcta

SEQ ID NO: 325818 - DNA, 15 bp, Homo sapiens
tattggcgagatgct

SEQ ID NO: 325819 - DNA, 15 bp, Homo sapiens
atattggcgagatgc

SEQ ID NO: 325820 - DNA, 15 bp, Homo sapiens
aatattggcgagatg

SEQ ID NO: 325821 - DNA, 15 bp, Homo sapiens
aaatattggcgagat

SEQ ID NO: 325822 - DNA, 15 bp, Homo sapiens
taaatattggcgaga

SEQ ID NO: 325823 - DNA, 15 bp, Homo sapiens
gtaaatattggcgag

SEQ ID NO: 325824 - DNA, 15 bp, Homo sapiens
cgtaaatattggcga

SEQ ID NO: 325825 - DNA, 15 bp, Homo sapiens
acgtaaatattggcg

SEQ ID NO: 325826 - DNA, 15 bp, Homo sapiens
tacgtaaatattggc

SEQ ID NO: 325827 - DNA, 15 bp, Homo sapiens
atacgtaaatattgg

SEQ ID NO: 325828 - DNA, 15 bp, Homo sapiens
catacgtaaatattg

SEQ ID NO: 325829 - DNA, 15 bp, Homo sapiens
acatacgtaaatatt

SEQ ID NO: 325830 - DNA, 15 bp, Homo sapiens
gacatacgtaaatat

SEQ ID NO: 325831 - DNA, 15 bp, Homo sapiens
tgacatacgtaaata

SEQ ID NO: 325832 - DNA, 15 bp, Homo sapiens
ctgacatacgtaaat

SEQ ID NO: 325833 - DNA, 15 bp, Homo sapiens
tctgacatacgtaaa

SEQ ID NO: 325834 - DNA, 15 bp, Homo sapiens
atctgacatacgtaa

SEQ ID NO: 325835 - DNA, 15 bp, Homo sapiens
aatctgacatacgta

SEQ ID NO: 325836 - DNA, 15 bp, Homo sapiens
gaatctgacatacgt

SEQ ID NO: 325837 - DNA, 15 bp, Homo sapiens
tgaatctgacatacg

SEQ ID NO: 325838 - DNA, 15 bp, Homo sapiens
gtgaatctgacatac

SEQ ID NO: 325839 - DNA, 15 bp, Homo sapiens
agtgaatctgacata

SEQ ID NO: 325840 - DNA, 15 bp, Homo sapiens
gagtgaatctgacat

SEQ ID NO: 325841 - DNA, 15 bp, Homo sapiens
ggagtgaatctgaca

SEQ ID NO: 325842 - DNA, 15 bp, Homo sapiens
tggagtgaatctgac

SEQ ID NO: 325843 - DNA, 15 bp, Homo sapiens
gtggagtgaatctga

SEQ ID NO: 325844 - DNA, 15 bp, Homo sapiens
agtggagtgaatctg

SEQ ID NO: 325845 - DNA, 15 bp, Homo sapiens
tagtggagtgaatct

SEQ ID NO: 325846 - DNA, 15 bp, Homo sapiens
ctagtggagtgaatc

SEQ ID NO: 325847 - DNA, 15 bp, Homo sapiens
tctagtggagtgaat

SEQ ID NO: 325848 - DNA, 15 bp, Homo sapiens
gtctagtggagtgaa

SEQ ID NO: 325849 - DNA, 15 bp, Homo sapiens
agtctagtggagtga

SEQ ID NO: 325850 - DNA, 15 bp, Homo sapiens
cagtctagtggagtg

SEQ ID NO: 325851 - DNA, 15 bp, Homo sapiens
acagtctagtggagt

SEQ ID NO: 325852 - DNA, 15 bp, Homo sapiens
cacagtctagtggag

SEQ ID NO: 325853 - DNA, 15 bp, Homo sapiens
acacagtctagtgga

SEQ ID NO: 325854 - DNA, 15 bp, Homo sapiens
aacacagtctagtgg

SEQ ID NO: 325855 - DNA, 15 bp, Homo sapiens
aaacacagtctagtg

SEQ ID NO: 325856 - DNA, 15 bp, Homo sapiens
aaaacacagtctagt

SEQ ID NO: 325857 - DNA, 15 bp, Homo sapiens
taaaacacagtctag

SEQ ID NO: 325858 - DNA, 15 bp, Homo sapiens
ttaaaacacagtcta

SEQ ID NO: 325859 - DNA, 15 bp, Homo sapiens
tttaaaacacagtct

SEQ ID NO: 325860 - DNA, 15 bp, Homo sapiens
ctttaaaacacagtc

SEQ ID NO: 325861 - DNA, 15 bp, Homo sapiens
tctttaaaacacagt

SEQ ID NO: 325862 - DNA, 15 bp, Homo sapiens
atctttaaaacacag

SEQ ID NO: 325863 - DNA, 15 bp, Homo sapiens
catctttaaaacaca

SEQ ID NO: 325864 - DNA, 15 bp, Homo sapiens
ccatctttaaaacac

SEQ ID NO: 325865 - DNA, 15 bp, Homo sapiens
tccatctttaaaaca

SEQ ID NO: 325866 - DNA, 15 bp, Homo sapiens
ttccatctttaaaac

SEQ ID NO: 325867 - DNA, 15 bp, Homo sapiens
gttccatctttaaaa

SEQ ID NO: 325868 - DNA, 15 bp, Homo sapiens
cgttccatctttaaa

SEQ ID NO: 325869 - DNA, 15 bp, Homo sapiens
gcgttccatctttaa

SEQ ID NO: 325870 - DNA, 15 bp, Homo sapiens
cgcgttccatcttta

SEQ ID NO: 325871 - DNA, 15 bp, Homo sapiens
acgcgttccatcttt

SEQ ID NO: 325872 - DNA, 15 bp, Homo sapiens
cacgcgttccatctt

SEQ ID NO: 325873 - DNA, 15 bp, Homo sapiens
tcacgcgttccatct

SEQ ID NO: 325874 - DNA, 15 bp, Homo sapiens
ctcacgcgttccatc

SEQ ID NO: 325875 - DNA, 15 bp, Homo sapiens
actcacgcgttccat

SEQ ID NO: 325876 - DNA, 15 bp, Homo sapiens
tactcacgcgttcca

SEQ ID NO: 325877 - DNA, 15 bp, Homo sapiens
gtactcacgcgttcc

SEQ ID NO: 325878 - DNA, 15 bp, Homo sapiens
ggtactcacgcgttc

SEQ ID NO: 325879 - DNA, 15 bp, Homo sapiens
gggtactcacgcgtt

SEQ ID NO: 325880 - DNA, 15 bp, Homo sapiens
tgggtactcacgcgt

SEQ ID NO: 325881 - DNA, 15 bp, Homo sapiens
ctgggtactcacgcg

SEQ ID NO: 325882 - DNA, 15 bp, Homo sapiens
gctgggtactcacgc

SEQ ID NO: 325883 - DNA, 15 bp, Homo sapiens
tgctgggtactcacg

SEQ ID NO: 325884 - DNA, 15 bp, Homo sapiens
gtgctgggtactcac

SEQ ID NO: 325885 - DNA, 15 bp, Homo sapiens
ggtgctgggtactca

SEQ ID NO: 325886 - DNA, 15 bp, Homo sapiens
tggtgctgggtactc

SEQ ID NO: 325887 - DNA, 15 bp, Homo sapiens
ttggtgctgggtact

SEQ ID NO: 325888 - DNA, 15 bp, Homo sapiens
cttggtgctgggtac

SEQ ID NO: 325889 - DNA, 15 bp, Homo sapiens
gcttggtgctgggta

SEQ ID NO: 325890 - DNA, 15 bp, Homo sapiens
tgcttggtgctgggt

SEQ ID NO: 325891 - DNA, 15 bp, Homo sapiens
atgcttggtgctggg

SEQ ID NO: 325892 - DNA, 15 bp, Homo sapiens
tatgcttggtgctgg

SEQ ID NO: 325893 - DNA, 15 bp, Homo sapiens
ctatgcttggtgctg

SEQ ID NO: 325894 - DNA, 15 bp, Homo sapiens
tctatgcttggtgct

SEQ ID NO: 325895 - DNA, 15 bp, Homo sapiens
ctctatgcttggtgc

SEQ ID NO: 325896 - DNA, 15 bp, Homo sapiens
gctctatgcttggtg

SEQ ID NO: 325897 - DNA, 15 bp, Homo sapiens
ggctctatgcttggt

SEQ ID NO: 325898 - DNA, 15 bp, Homo sapiens
aggctctatgcttgg

SEQ ID NO: 325899 - DNA, 15 bp, Homo sapiens
aaggctctatgcttg

SEQ ID NO: 325900 - DNA, 15 bp, Homo sapiens
caaggctctatgctt

SEQ ID NO: 325901 - DNA, 15 bp, Homo sapiens
acaaggctctatgct

SEQ ID NO: 325902 - DNA, 15 bp, Homo sapiens
gacaaggctctatgc

SEQ ID NO: 325903 - DNA, 15 bp, Homo sapiens
ggacaaggctctatg

SEQ ID NO: 325904 - DNA, 15 bp, Homo sapiens
aggacaaggctctat

SEQ ID NO: 325905 - DNA, 15 bp, Homo sapiens
aaggacaaggctcta

SEQ ID NO: 325906 - DNA, 15 bp, Homo sapiens
taaggacaaggctct

SEQ ID NO: 325907 - DNA, 15 bp, Homo sapiens
ttaaggacaaggctc

SEQ ID NO: 325908 - DNA, 15 bp, Homo sapiens
cttaaggacaaggct

SEQ ID NO: 325909 - DNA, 15 bp, Homo sapiens
tcttaaggacaaggc

SEQ ID NO: 325910 - DNA, 15 bp, Homo sapiens
ctcttaaggacaagg

SEQ ID NO: 325911 - DNA, 15 bp, Homo sapiens
tctcttaaggacaag

SEQ ID NO: 325912 - DNA, 15 bp, Homo sapiens
gtctcttaaggacaa

SEQ ID NO: 325913 - DNA, 15 bp, Homo sapiens
tgtctcttaaggaca

SEQ ID NO: 325914 - DNA, 15 bp, Homo sapiens
gtgtctcttaaggac

SEQ ID NO: 325915 - DNA, 15 bp, Homo sapiens
agtgtctcttaagga

SEQ ID NO: 325916 - DNA, 15 bp, Homo sapiens
aagtgtctcttaagg

SEQ ID NO: 325917 - DNA, 15 bp, Homo sapiens
taagtgtctcttaag

SEQ ID NO: 325918 - DNA, 15 bp, Homo sapiens
gtaagtgtctcttaa

SEQ ID NO: 325919 - DNA, 15 bp, Homo sapiens
agtaagtgtctctta

SEQ ID NO: 325920 - DNA, 15 bp, Homo sapiens
aagtaagtgtctctt

SEQ ID NO: 325921 - DNA, 15 bp, Homo sapiens
aaagtaagtgtctct

SEQ ID NO: 325922 - DNA, 15 bp, Homo sapiens
aaaagtaagtgtctc

SEQ ID NO: 325923 - DNA, 15 bp, Homo sapiens
aaaaagtaagtgtct

SEQ ID NO: 325924 - DNA, 15 bp, Homo sapiens
aaaaaagtaagtgtc

SEQ ID NO: 325925 - DNA, 15 bp, Homo sapiens
caaaaaagtaagtgt

SEQ ID NO: 325926 - DNA, 15 bp, Homo sapiens
ccaaaaaagtaagtg

SEQ ID NO: 325927 - DNA, 15 bp, Homo sapiens
accaaaaaagtaagt

SEQ ID NO: 325928 - DNA, 15 bp, Homo sapiens
taccaaaaaagtaag

SEQ ID NO: 325929 - DNA, 15 bp, Homo sapiens
ctaccaaaaaagtaa

SEQ ID NO: 325930 - DNA, 15 bp, Homo sapiens
cctaccaaaaaagta

SEQ ID NO: 325931 - DNA, 15 bp, Homo sapiens
ccctaccaaaaaagt

SEQ ID NO: 325932 - DNA, 15 bp, Homo sapiens
tccctaccaaaaaag

SEQ ID NO: 325933 - DNA, 15 bp, Homo sapiens
atccctaccaaaaaa

SEQ ID NO: 325934 - DNA, 15 bp, Homo sapiens
catccctaccaaaaa

SEQ ID NO: 325935 - DNA, 15 bp, Homo sapiens
ccatccctaccaaaa

SEQ ID NO: 325936 - DNA, 15 bp, Homo sapiens
accatccctaccaaa

SEQ ID NO: 325937 - DNA, 15 bp, Homo sapiens
caccatccctaccaa

SEQ ID NO: 325938 - DNA, 15 bp, Homo sapiens
acaccatccctacca

SEQ ID NO: 325939 - DNA, 15 bp, Homo sapiens
aacaccatccctacc

SEQ ID NO: 325940 - DNA, 15 bp, Homo sapiens
aaacaccatccctac

SEQ ID NO: 325941 - DNA, 15 bp, Homo sapiens
aaaacaccatcccta

SEQ ID NO: 325942 - DNA, 15 bp, Homo sapiens
caaaacaccatccct

SEQ ID NO: 325943 - DNA, 15 bp, Homo sapiens
acaaaacaccatccc

SEQ ID NO: 325944 - DNA, 15 bp, Homo sapiens
cacaaaacaccatcc

SEQ ID NO: 325945 - DNA, 15 bp, Homo sapiens
tcacaaaacaccatc

SEQ ID NO: 325946 - DNA, 15 bp, Homo sapiens
gtcacaaaacaccat

SEQ ID NO: 325947 - DNA, 15 bp, Homo sapiens
tgtcacaaaacacca

SEQ ID NO: 325948 - DNA, 15 bp, Homo sapiens
gtgtcacaaaacacc

SEQ ID NO: 325949 - DNA, 15 bp, Homo sapiens
agtgtcacaaaacac

SEQ ID NO: 325950 - DNA, 15 bp, Homo sapiens
gagtgtcacaaaaca

SEQ ID NO: 325951 - DNA, 15 bp, Homo sapiens
agagtgtcacaaaac

SEQ ID NO: 325952 - DNA, 15 bp, Homo sapiens
gagagtgtcacaaaa

SEQ ID NO: 325953 - DNA, 15 bp, Homo sapiens
agagagtgtcacaaa

SEQ ID NO: 325954 - DNA, 15 bp, Homo sapiens
tagagagtgtcacaa

SEQ ID NO: 325955 - DNA, 15 bp, Homo sapiens
ttagagagtgtcaca

SEQ ID NO: 325956 - DNA, 15 bp, Homo sapiens
gttagagagtgtcac

SEQ ID NO: 325957 - DNA, 15 bp, Homo sapiens
tgttagagagtgtca

SEQ ID NO: 325958 - DNA, 15 bp, Homo sapiens
atgttagagagtgtc

SEQ ID NO: 325959 - DNA, 15 bp, Homo sapiens
aatgttagagagtgt

SEQ ID NO: 325960 - DNA, 15 bp, Homo sapiens
caatgttagagagtg

SEQ ID NO: 325961 - DNA, 15 bp, Homo sapiens
ccaatgttagagagt

SEQ ID NO: 325962 - DNA, 15 bp, Homo sapiens
cccaatgttagagag

SEQ ID NO: 325963 - DNA, 15 bp, Homo sapiens
acccaatgttagaga

SEQ ID NO: 325964 - DNA, 15 bp, Homo sapiens
tacccaatgttagag

SEQ ID NO: 325965 - DNA, 15 bp, Homo sapiens
ctacccaatgttaga

SEQ ID NO: 325966 - DNA, 15 bp, Homo sapiens
actacccaatgttag

SEQ ID NO: 325967 - DNA, 15 bp, Homo sapiens
cactacccaatgtta

SEQ ID NO: 325968 - DNA, 15 bp, Homo sapiens
acactacccaatgtt

SEQ ID NO: 325969 - DNA, 15 bp, Homo sapiens
gacactacccaatgt

SEQ ID NO: 325970 - DNA, 15 bp, Homo sapiens
agacactacccaatg

SEQ ID NO: 325971 - DNA, 15 bp, Homo sapiens
cagacactacccaat

SEQ ID NO: 325972 - DNA, 15 bp, Homo sapiens
acagacactacccaa

SEQ ID NO: 325973 - DNA, 15 bp, Homo sapiens
gacagacactaccca

SEQ ID NO: 325974 - DNA, 15 bp, Homo sapiens
agacagacactaccc

SEQ ID NO: 325975 - DNA, 15 bp, Homo sapiens
gagacagacactacc

SEQ ID NO: 325976 - DNA, 15 bp, Homo sapiens
agagacagacactac

SEQ ID NO: 325977 - DNA, 15 bp, Homo sapiens
gagagacagacacta

SEQ ID NO: 325978 - DNA, 15 bp, Homo sapiens
ggagagacagacact

SEQ ID NO: 325979 - DNA, 15 bp, Homo sapiens
gggagagacagacac

SEQ ID NO: 325980 - DNA, 15 bp, Homo sapiens
agggagagacagaca

SEQ ID NO: 325981 - DNA, 15 bp, Homo sapiens
cagggagagacagac

SEQ ID NO: 325982 - DNA, 15 bp, Homo sapiens
acagggagagacaga

SEQ ID NO: 325983 - DNA, 15 bp, Homo sapiens
aacagggagagacag

SEQ ID NO: 325984 - DNA, 15 bp, Homo sapiens
aaacagggagagaca

SEQ ID NO: 325985 - DNA, 15 bp, Homo sapiens
gaaacagggagagac

SEQ ID NO: 325986 - DNA, 15 bp, Homo sapiens
tgaaacagggagaga

SEQ ID NO: 325987 - DNA, 15 bp, Homo sapiens
gtgaaacagggagag

SEQ ID NO: 325988 - DNA, 15 bp, Homo sapiens
tgtgaaacagggaga

SEQ ID NO: 325989 - DNA, 15 bp, Homo sapiens
ttgtgaaacagggag

SEQ ID NO: 325990 - DNA, 15 bp, Homo sapiens
attgtgaaacaggga

SEQ ID NO: 325991 - DNA, 15 bp, Homo sapiens
aattgtgaaacaggg

SEQ ID NO: 325992 - DNA, 15 bp, Homo sapiens
taattgtgaaacagg

SEQ ID NO: 325993 - DNA, 15 bp, Homo sapiens
gtaattgtgaaacag

SEQ ID NO: 325994 - DNA, 15 bp, Homo sapiens
tgtaattgtgaaaca

SEQ ID NO: 325995 - DNA, 15 bp, Homo sapiens
atgtaattgtgaaac

SEQ ID NO: 325996 - DNA, 15 bp, Homo sapiens
gatgtaattgtgaaa

SEQ ID NO: 325997 - DNA, 15 bp, Homo sapiens
tgatgtaattgtgaa

SEQ ID NO: 325998 - DNA, 15 bp, Homo sapiens
atgatgtaattgtga

SEQ ID NO: 325999 - DNA, 15 bp, Homo sapiens
tatgatgtaattgtg

SEQ ID NO: 326000 - DNA, 15 bp, Homo sapiens
atatgatgtaattgt

SEQ ID NO: 326001 - DNA, 15 bp, Homo sapiens
catatgatgtaattg

SEQ ID NO: 326002 - DNA, 15 bp, Homo sapiens
acatatgatgtaatt

SEQ ID NO: 326003 - DNA, 15 bp, Homo sapiens
aacatatgatgtaat

SEQ ID NO: 326004 - DNA, 15 bp, Homo sapiens
taacatatgatgtaa

SEQ ID NO: 326005 - DNA, 15 bp, Homo sapiens
ctaacatatgatgta

SEQ ID NO: 326006 - DNA, 15 bp, Homo sapiens
cctaacatatgatgt

SEQ ID NO: 326007 - DNA, 15 bp, Homo sapiens
ccctaacatatgatg

SEQ ID NO: 326008 - DNA, 15 bp, Homo sapiens
cccctaacatatgat

SEQ ID NO: 326009 - DNA, 15 bp, Homo sapiens
ccccctaacatatga

SEQ ID NO: 326010 - DNA, 15 bp, Homo sapiens
tccccctaacatatg

SEQ ID NO: 326011 - DNA, 15 bp, Homo sapiens
atccccctaacatat

SEQ ID NO: 326012 - DNA, 15 bp, Homo sapiens
aatccccctaacata

SEQ ID NO: 326013 - DNA, 15 bp, Homo sapiens
aaatccccctaacat

SEQ ID NO: 326014 - DNA, 15 bp, Homo sapiens
aaaatccccctaaca

SEQ ID NO: 326015 - DNA, 15 bp, Homo sapiens
aaaaatccccctaac

SEQ ID NO: 326016 - DNA, 15 bp, Homo sapiens
taaaaatccccctaa

SEQ ID NO: 326017 - DNA, 15 bp, Homo sapiens
ataaaaatcccccta

SEQ ID NO: 326018 - DNA, 15 bp, Homo sapiens
aataaaaatccccct

SEQ ID NO: 326019 - DNA, 15 bp, Homo sapiens
gaataaaaatccccc

SEQ ID NO: 326020 - DNA, 15 bp, Homo sapiens
agaataaaaatcccc

SEQ ID NO: 326021 - DNA, 15 bp, Homo sapiens
gagaataaaaatccc

SEQ ID NO: 326022 - DNA, 15 bp, Homo sapiens
agagaataaaaatcc

SEQ ID NO: 326023 - DNA, 15 bp, Homo sapiens
cagagaataaaaatc

SEQ ID NO: 326024 - DNA, 15 bp, Homo sapiens
tcagagaataaaaat

SEQ ID NO: 326025 - DNA, 15 bp, Homo sapiens
atcagagaataaaaa

SEQ ID NO: 326026 - DNA, 15 bp, Homo sapiens
catcagagaataaaa

SEQ ID NO: 326027 - DNA, 15 bp, Homo sapiens
gcatcagagaataaa

SEQ ID NO: 326028 - DNA, 15 bp, Homo sapiens
ggcatcagagaataa

SEQ ID NO: 326029 - DNA, 15 bp, Homo sapiens
tggcatcagagaata

SEQ ID NO: 326030 - DNA, 15 bp, Homo sapiens
ctggcatcagagaat

SEQ ID NO: 326031 - DNA, 15 bp, Homo sapiens
gctggcatcagagaa

SEQ ID NO: 326032 - DNA, 15 bp, Homo sapiens
tgctggcatcagaga

SEQ ID NO: 326033 - DNA, 15 bp, Homo sapiens
atgctggcatcagag

SEQ ID NO: 326034 - DNA, 15 bp, Homo sapiens
aatgctggcatcaga

SEQ ID NO: 326035 - DNA, 15 bp, Homo sapiens
aaatgctggcatcag

SEQ ID NO: 326036 - DNA, 15 bp, Homo sapiens
aaaatgctggcatca

SEQ ID NO: 326037 - DNA, 15 bp, Homo sapiens
caaaatgctggcatc

SEQ ID NO: 326038 - DNA, 15 bp, Homo sapiens
tcaaaatgctggcat

SEQ ID NO: 326039 - DNA, 15 bp, Homo sapiens
ctcaaaatgctggca

SEQ ID NO: 326040 - DNA, 15 bp, Homo sapiens
tctcaaaatgctggc

SEQ ID NO: 326041 - DNA, 15 bp, Homo sapiens
ttctcaaaatgctgg

SEQ ID NO: 326042 - DNA, 15 bp, Homo sapiens
cttctcaaaatgctg

SEQ ID NO: 326043 - DNA, 15 bp, Homo sapiens
ccttctcaaaatgct

SEQ ID NO: 326044 - DNA, 15 bp, Homo sapiens
accttctcaaaatgc

SEQ ID NO: 326045 - DNA, 15 bp, Homo sapiens
aaccttctcaaaatg

SEQ ID NO: 326046 - DNA, 15 bp, Homo sapiens
gaaccttctcaaaat

SEQ ID NO: 326047 - DNA, 15 bp, Homo sapiens
ggaaccttctcaaaa

SEQ ID NO: 326048 - DNA, 15 bp, Homo sapiens
tggaaccttctcaaa

SEQ ID NO: 326049 - DNA, 15 bp, Homo sapiens
atggaaccttctcaa

SEQ ID NO: 326050 - DNA, 15 bp, Homo sapiens
aatggaaccttctca

SEQ ID NO: 326051 - DNA, 15 bp, Homo sapiens
caatggaaccttctc

SEQ ID NO: 326052 - DNA, 15 bp, Homo sapiens
gcaatggaaccttct

SEQ ID NO: 326053 - DNA, 15 bp, Homo sapiens
agcaatggaaccttc

SEQ ID NO: 326054 - DNA, 15 bp, Homo sapiens
gagcaatggaacctt

SEQ ID NO: 326055 - DNA, 15 bp, Homo sapiens
agagcaatggaacct

SEQ ID NO: 326056 - DNA, 15 bp, Homo sapiens
cagagcaatggaacc

SEQ ID NO: 326057 - DNA, 15 bp, Homo sapiens
tcagagcaatggaac

SEQ ID NO: 326058 - DNA, 15 bp, Homo sapiens
ctcagagcaatggaa

SEQ ID NO: 326059 - DNA, 15 bp, Homo sapiens
cctcagagcaatgga

SEQ ID NO: 326060 - DNA, 15 bp, Homo sapiens
tcctcagagcaatgg

SEQ ID NO: 326061 - DNA, 15 bp, Homo sapiens
ttcctcagagcaatg

SEQ ID NO: 326062 - DNA, 15 bp, Homo sapiens
attcctcagagcaat

SEQ ID NO: 326063 - DNA, 15 bp, Homo sapiens
tattcctcagagcaa

SEQ ID NO: 326064 - DNA, 15 bp, Homo sapiens
gtattcctcagagca

SEQ ID NO: 326065 - DNA, 15 bp, Homo sapiens
agtattcctcagagc

SEQ ID NO: 326066 - DNA, 15 bp, Homo sapiens
cagtattcctcagag

SEQ ID NO: 326067 - DNA, 15 bp, Homo sapiens
acagtattcctcaga

SEQ ID NO: 326068 - DNA, 15 bp, Homo sapiens
gacagtattcctcag

SEQ ID NO: 326069 - DNA, 15 bp, Homo sapiens
agacagtattcctca

SEQ ID NO: 326070 - DNA, 15 bp, Homo sapiens
tagacagtattcctc

SEQ ID NO: 326071 - DNA, 15 bp, Homo sapiens
gtagacagtattcct

SEQ ID NO: 326072 - DNA, 15 bp, Homo sapiens
agtagacagtattcc

SEQ ID NO: 326073 - DNA, 15 bp, Homo sapiens
gagtagacagtattc

SEQ ID NO: 326074 - DNA, 15 bp, Homo sapiens
ggagtagacagtatt

SEQ ID NO: 326075 - DNA, 15 bp, Homo sapiens
gggagtagacagtat

SEQ ID NO: 326076 - DNA, 15 bp, Homo sapiens
agggagtagacagta

SEQ ID NO: 326077 - DNA, 15 bp, Homo sapiens
cagggagtagacagt

SEQ ID NO: 326078 - DNA, 15 bp, Homo sapiens
ccagggagtagacag

SEQ ID NO: 326079 - DNA, 15 bp, Homo sapiens
tccagggagtagaca

SEQ ID NO: 326080 - DNA, 15 bp, Homo sapiens
gtccagggagtagac

SEQ ID NO: 326081 - DNA, 15 bp, Homo sapiens
ggtccagggagtaga

SEQ ID NO: 326082 - DNA, 15 bp, Homo sapiens
cggtccagggagtag

SEQ ID NO: 326083 - DNA, 15 bp, Homo sapiens
acggtccagggagta

SEQ ID NO: 326084 - DNA, 15 bp, Homo sapiens
aacggtccagggagt

SEQ ID NO: 326085 - DNA, 15 bp, Homo sapiens
aaacggtccagggag

SEQ ID NO: 326086 - DNA, 15 bp, Homo sapiens
aaaacggtccaggga

SEQ ID NO: 326087 - DNA, 15 bp, Homo sapiens
taaaacggtccaggg

SEQ ID NO: 326088 - DNA, 15 bp, Homo sapiens
ctaaaacggtccagg

SEQ ID NO: 326089 - DNA, 15 bp, Homo sapiens
tctaaaacggtccag

SEQ ID NO: 326090 - DNA, 15 bp, Homo sapiens
ttctaaaacggtcca

SEQ ID NO: 326091 - DNA, 15 bp, Homo sapiens
gttctaaaacggtcc

SEQ ID NO: 326092 - DNA, 15 bp, Homo sapiens
agttctaaaacggtc

SEQ ID NO: 326093 - DNA, 15 bp, Homo sapiens
aagttctaaaacggt

SEQ ID NO: 326094 - DNA, 15 bp, Homo sapiens
caagttctaaaacgg

SEQ ID NO: 326095 - DNA, 15 bp, Homo sapiens
tcaagttctaaaacg

SEQ ID NO: 326096 - DNA, 15 bp, Homo sapiens
ctcaagttctaaaac

SEQ ID NO: 326097 - DNA, 15 bp, Homo sapiens
tctcaagttctaaaa

SEQ ID NO: 326098 - DNA, 15 bp, Homo sapiens
ttctcaagttctaaa

SEQ ID NO: 326099 - DNA, 15 bp, Homo sapiens
tttctcaagttctaa

SEQ ID NO: 326100 - DNA, 15 bp, Homo sapiens
ttttctcaagttcta

SEQ ID NO: 326101 - DNA, 15 bp, Homo sapiens
cattttctcaagttc

SEQ ID NO: 326102 - DNA, 15 bp, Homo sapiens
tcattttctcaagtt

SEQ ID NO: 326103 - DNA, 15 bp, Homo sapiens
atcattttctcaagt

SEQ ID NO: 326104 - DNA, 15 bp, Homo sapiens
catcattttctcaag

SEQ ID NO: 326105 - DNA, 15 bp, Homo sapiens
ccatcattttctcaa

SEQ ID NO: 326106 - DNA, 15 bp, Homo sapiens
tccatcattttctca

SEQ ID NO: 326107 - DNA, 15 bp, Homo sapiens
gtccatcattttctc

SEQ ID NO: 326108 - DNA, 15 bp, Homo sapiens
ggtccatcattttct

SEQ ID NO: 326109 - DNA, 15 bp, Homo sapiens
tggtccatcattttc

SEQ ID NO: 326110 - DNA, 15 bp, Homo sapiens
atggtccatcatttt

SEQ ID NO: 326111 - DNA, 15 bp, Homo sapiens
gatggtccatcattt

SEQ ID NO: 326112 - DNA, 15 bp, Homo sapiens
agatggtccatcatt

SEQ ID NO: 326113 - DNA, 15 bp, Homo sapiens
cagatggtccatcat

SEQ ID NO: 326114 - DNA, 15 bp, Homo sapiens
tcagatggtccatca

SEQ ID NO: 326115 - DNA, 15 bp, Homo sapiens
ttcagatggtccatc

SEQ ID NO: 326116 - DNA, 15 bp, Homo sapiens
attcagatggtccat

SEQ ID NO: 326117 - DNA, 15 bp, Homo sapiens
tattcagatggtcca

SEQ ID NO: 326118 - DNA, 15 bp, Homo sapiens
atattcagatggtcc

SEQ ID NO: 326119 - DNA, 15 bp, Homo sapiens
gatattcagatggtc

SEQ ID NO: 326120 - DNA, 15 bp, Homo sapiens
agatattcagatggt

SEQ ID NO: 326121 - DNA, 15 bp, Homo sapiens
aagatattcagatgg

SEQ ID NO: 326122 - DNA, 15 bp, Homo sapiens
aaagatattcagatg

SEQ ID NO: 326123 - DNA, 15 bp, Homo sapiens
aaaagatattcagat

SEQ ID NO: 326124 - DNA, 15 bp, Homo sapiens
aaaaagatattcaga

SEQ ID NO: 326125 - DNA, 15 bp, Homo sapiens
gaaaaagatattcag

SEQ ID NO: 326126 - DNA, 15 bp, Homo sapiens
agaaaaagatattca

SEQ ID NO: 326127 - DNA, 15 bp, Homo sapiens
cagaaaaagatattc

SEQ ID NO: 326128 - DNA, 15 bp, Homo sapiens
tcagaaaaagatatt

SEQ ID NO: 326129 - DNA, 15 bp, Homo sapiens
gtcagaaaaagatat

SEQ ID NO: 326130 - DNA, 15 bp, Homo sapiens
agtcagaaaaagata

SEQ ID NO: 326131 - DNA, 15 bp, Homo sapiens
aagtcagaaaaagat

SEQ ID NO: 326132 - DNA, 15 bp, Homo sapiens
aaagtcagaaaaaga

SEQ ID NO: 326133 - DNA, 15 bp, Homo sapiens
gaaagtcagaaaaag

SEQ ID NO: 326134 - DNA, 15 bp, Homo sapiens
agaaagtcagaaaaa

SEQ ID NO: 326135 - DNA, 15 bp, Homo sapiens
cagaaagtcagaaaa

SEQ ID NO: 326136 - DNA, 15 bp, Homo sapiens
gcagaaagtcagaaa

SEQ ID NO: 326137 - DNA, 15 bp, Homo sapiens
agcagaaagtcagaa

SEQ ID NO: 326138 - DNA, 15 bp, Homo sapiens
tagcagaaagtcaga

SEQ ID NO: 326139 - DNA, 15 bp, Homo sapiens
ctagcagaaagtcag

SEQ ID NO: 326140 - DNA, 15 bp, Homo sapiens
cctagcagaaagtca

SEQ ID NO: 326141 - DNA, 15 bp, Homo sapiens
tcctagcagaaagtc

SEQ ID NO: 326142 - DNA, 15 bp, Homo sapiens
gtcctagcagaaagt

SEQ ID NO: 326143 - DNA, 15 bp, Homo sapiens
tgtcctagcagaaag

SEQ ID NO: 326144 - DNA, 15 bp, Homo sapiens
gtgtcctagcagaaa

SEQ ID NO: 326145 - DNA, 15 bp, Homo sapiens
agtgtcctagcagaa

SEQ ID NO: 326146 - DNA, 15 bp, Homo sapiens
gagtgtcctagcaga

SEQ ID NO: 326147 - DNA, 15 bp, Homo sapiens
tgagtgtcctagcag

SEQ ID NO: 326148 - DNA, 15 bp, Homo sapiens
gtgagtgtcctagca

SEQ ID NO: 326149 - DNA, 15 bp, Homo sapiens
ggtgagtgtcctagc

SEQ ID NO: 326150 - DNA, 15 bp, Homo sapiens
aggtgagtgtcctag

SEQ ID NO: 326151 - DNA, 15 bp, Homo sapiens
gaggtgagtgtccta

SEQ ID NO: 326152 - DNA, 15 bp, Homo sapiens
agaggtgagtgtcct

SEQ ID NO: 326153 - DNA, 15 bp, Homo sapiens
gagaggtgagtgtcc

SEQ ID NO: 326154 - DNA, 15 bp, Homo sapiens
agagaggtgagtgtc

SEQ ID NO: 326155 - DNA, 15 bp, Homo sapiens
aagagaggtgagtgt

SEQ ID NO: 326156 - DNA, 15 bp, Homo sapiens
aaagagaggtgagtg

SEQ ID NO: 326157 - DNA, 15 bp, Homo sapiens
gaaagagaggtgagt

SEQ ID NO: 326158 - DNA, 15 bp, Homo sapiens
ggaaagagaggtgag

SEQ ID NO: 326159 - DNA, 15 bp, Homo sapiens
aggaaagagaggtga

SEQ ID NO: 326160 - DNA, 15 bp, Homo sapiens
aaggaaagagaggtg

SEQ ID NO: 326161 - DNA, 15 bp, Homo sapiens
aaaggaaagagaggt

SEQ ID NO: 326162 - DNA, 15 bp, Homo sapiens
caaaggaaagagagg

SEQ ID NO: 326163 - DNA, 15 bp, Homo sapiens
ccaaaggaaagagag

SEQ ID NO: 326164 - DNA, 15 bp, Homo sapiens
tccaaaggaaagaga

SEQ ID NO: 326165 - DNA, 15 bp, Homo sapiens
atccaaaggaaagag

SEQ ID NO: 326166 - DNA, 15 bp, Homo sapiens
catccaaaggaaaga

SEQ ID NO: 326167 - DNA, 15 bp, Homo sapiens
gcatccaaaggaaag

SEQ ID NO: 326168 - DNA, 15 bp, Homo sapiens
cgcatccaaaggaaa

SEQ ID NO: 326169 - DNA, 15 bp, Homo sapiens
ccgcatccaaaggaa

SEQ ID NO: 326170 - DNA, 15 bp, Homo sapiens
cccgcatccaaagga

SEQ ID NO: 326171 - DNA, 15 bp, Homo sapiens
tcccgcatccaaagg

SEQ ID NO: 326172 - DNA, 15 bp, Homo sapiens
ttcccgcatccaaag

SEQ ID NO: 326173 - DNA, 15 bp, Homo sapiens
cttcccgcatccaaa

SEQ ID NO: 326174 - DNA, 15 bp, Homo sapiens
acttcccgcatccaa

SEQ ID NO: 326175 - DNA, 15 bp, Homo sapiens
cacttcccgcatcca

SEQ ID NO: 326176 - DNA, 15 bp, Homo sapiens
ccacttcccgcatcc

SEQ ID NO: 326177 - DNA, 15 bp, Homo sapiens
gccacttcccgcatc

SEQ ID NO: 326178 - DNA, 15 bp, Homo sapiens
agccacttcccgcat

SEQ ID NO: 326179 - DNA, 15 bp, Homo sapiens
cagccacttcccgca

SEQ ID NO: 326180 - DNA, 15 bp, Homo sapiens
acagccacttcccgc

SEQ ID NO: 326181 - DNA, 15 bp, Homo sapiens
cacagccacttcccg

SEQ ID NO: 326182 - DNA, 15 bp, Homo sapiens
ccacagccacttccc

SEQ ID NO: 326183 - DNA, 15 bp, Homo sapiens
cccacagccacttcc

SEQ ID NO: 326184 - DNA, 15 bp, Homo sapiens
tcccacagccacttc

SEQ ID NO: 326185 - DNA, 15 bp, Homo sapiens
atcccacagccactt

SEQ ID NO: 326186 - DNA, 15 bp, Homo sapiens
gatcccacagccact

SEQ ID NO: 326187 - DNA, 15 bp, Homo sapiens
ggatcccacagccac

SEQ ID NO: 326188 - DNA, 15 bp, Homo sapiens
gggatcccacagcca

SEQ ID NO: 326189 - DNA, 15 bp, Homo sapiens
agggatcccacagcc

SEQ ID NO: 326190 - DNA, 15 bp, Homo sapiens
cagggatcccacagc

SEQ ID NO: 326191 - DNA, 15 bp, Homo sapiens
ccagggatcccacag

SEQ ID NO: 326192 - DNA, 15 bp, Homo sapiens
accagggatcccaca

SEQ ID NO: 326193 - DNA, 15 bp, Homo sapiens
caccagggatcccac

SEQ ID NO: 326194 - DNA, 15 bp, Homo sapiens
acaccagggatccca

SEQ ID NO: 326195 - DNA, 15 bp, Homo sapiens
gacaccagggatccc

SEQ ID NO: 326196 - DNA, 15 bp, Homo sapiens
tgacaccagggatcc

SEQ ID NO: 326197 - DNA, 15 bp, Homo sapiens
ctgacaccagggatc

SEQ ID NO: 326198 - DNA, 15 bp, Homo sapiens
gctgacaccagggat

SEQ ID NO: 326199 - DNA, 15 bp, Homo sapiens
agctgacaccaggga

SEQ ID NO: 326200 - DNA, 15 bp, Homo sapiens
gagctgacaccaggg

SEQ ID NO: 326201 - DNA, 15 bp, Homo sapiens
tgagctgacaccagg

SEQ ID NO: 326202 - DNA, 15 bp, Homo sapiens
gtgagctgacaccag

SEQ ID NO: 326203 - DNA, 15 bp, Homo sapiens
ggtgagctgacacca

SEQ ID NO: 326204 - DNA, 15 bp, Homo sapiens
aggtgagctgacacc

SEQ ID NO: 326205 - DNA, 15 bp, Homo sapiens
caggtgagctgacac

SEQ ID NO: 326206 - DNA, 15 bp, Homo sapiens
gcaggtgagctgaca

SEQ ID NO: 326207 - DNA, 15 bp, Homo sapiens
ggcaggtgagctgac

SEQ ID NO: 326208 - DNA, 15 bp, Homo sapiens
tggcaggtgagctga

SEQ ID NO: 326209 - DNA, 15 bp, Homo sapiens
ttggcaggtgagctg

SEQ ID NO: 326210 - DNA, 15 bp, Homo sapiens
gttggcaggtgagct

SEQ ID NO: 326211 - DNA, 15 bp, Homo sapiens
agttggcaggtgagc

SEQ ID NO: 326212 - DNA, 15 bp, Homo sapiens
cagttggcaggtgag

SEQ ID NO: 326213 - DNA, 15 bp, Homo sapiens
gcagttggcaggtga

SEQ ID NO: 326214 - DNA, 15 bp, Homo sapiens
tgcagttggcaggtg

SEQ ID NO: 326215 - DNA, 15 bp, Homo sapiens
gtgcagttggcaggt

SEQ ID NO: 326216 - DNA, 15 bp, Homo sapiens
agtgcagttggcagg

SEQ ID NO: 326217 - DNA, 15 bp, Homo sapiens
gagtgcagttggcag

SEQ ID NO: 326218 - DNA, 15 bp, Homo sapiens
tgagtgcagttggca

SEQ ID NO: 326219 - DNA, 15 bp, Homo sapiens
ctgagtgcagttggc

SEQ ID NO: 326220 - DNA, 15 bp, Homo sapiens
actgagtgcagttgg

SEQ ID NO: 326221 - DNA, 15 bp, Homo sapiens
cactgagtgcagttg

SEQ ID NO: 326222 - DNA, 15 bp, Homo sapiens
gcactgagtgcagtt

SEQ ID NO: 326223 - DNA, 15 bp, Homo sapiens
agcactgagtgcagt

SEQ ID NO: 326224 - DNA, 15 bp, Homo sapiens
cagcactgagtgcag

SEQ ID NO: 326225 - DNA, 15 bp, Homo sapiens
gcagcactgagtgca

SEQ ID NO: 326226 - DNA, 15 bp, Homo sapiens
ggcagcactgagtgc

SEQ ID NO: 326227 - DNA, 15 bp, Homo sapiens
aggcagcactgagtg

SEQ ID NO: 326228 - DNA, 15 bp, Homo sapiens
gaggcagcactgagt

SEQ ID NO: 326229 - DNA, 15 bp, Homo sapiens
agaggcagcactgag

SEQ ID NO: 326230 - DNA, 15 bp, Homo sapiens
gagaggcagcactga

SEQ ID NO: 326231 - DNA, 15 bp, Homo sapiens
agagaggcagcactg

SEQ ID NO: 326232 - DNA, 15 bp, Homo sapiens
gagagaggcagcact

SEQ ID NO: 326233 - DNA, 15 bp, Homo sapiens
tgagagaggcagcac

SEQ ID NO: 326234 - DNA, 15 bp, Homo sapiens
ctgagagaggcagca

SEQ ID NO: 326235 - DNA, 15 bp, Homo sapiens
actgagagaggcagc

SEQ ID NO: 326236 - DNA, 15 bp, Homo sapiens
cactgagagaggcag

SEQ ID NO: 326237 - DNA, 15 bp, Homo sapiens
gcactgagagaggca

SEQ ID NO: 326238 - DNA, 15 bp, Homo sapiens
tgcactgagagaggc

SEQ ID NO: 326239 - DNA, 15 bp, Homo sapiens
ctgcactgagagagg

SEQ ID NO: 326240 - DNA, 15 bp, Homo sapiens
tctgcactgagagag

SEQ ID NO: 326241 - DNA, 15 bp, Homo sapiens
ctctgcactgagaga

SEQ ID NO: 326242 - DNA, 15 bp, Homo sapiens
gctctgcactgagag

SEQ ID NO: 326243 - DNA, 15 bp, Homo sapiens
cgctctgcactgaga

SEQ ID NO: 326244 - DNA, 15 bp, Homo sapiens
ccgctctgcactgag

SEQ ID NO: 326245 - DNA, 15 bp, Homo sapiens
cccgctctgcactga

SEQ ID NO: 326246 - DNA, 15 bp, Homo sapiens
ccccgctctgcactg

SEQ ID NO: 326247 - DNA, 15 bp, Homo sapiens
tccccgctctgcact

SEQ ID NO: 326248 - DNA, 15 bp, Homo sapiens
ttccccgctctgcac

SEQ ID NO: 326249 - DNA, 15 bp, Homo sapiens
cttccccgctctgca

SEQ ID NO: 326250 - DNA, 15 bp, Homo sapiens
gcttccccgctctgc

SEQ ID NO: 326251 - DNA, 15 bp, Homo sapiens
agcttccccgctctg

SEQ ID NO: 326252 - DNA, 15 bp, Homo sapiens
cagcttccccgctct

SEQ ID NO: 326253 - DNA, 15 bp, Homo sapiens
tcagcttccccgctc

SEQ ID NO: 326254 - DNA, 15 bp, Homo sapiens
ttcagcttccccgct

SEQ ID NO: 326255 - DNA, 15 bp, Homo sapiens
cttcagcttccccgc

SEQ ID NO: 326256 - DNA, 15 bp, Homo sapiens
gcttcagcttccccg

SEQ ID NO: 326257 - DNA, 15 bp, Homo sapiens
tgcttcagcttcccc

SEQ ID NO: 326258 - DNA, 15 bp, Homo sapiens
ctgcttcagcttccc

SEQ ID NO: 326259 - DNA, 15 bp, Homo sapiens
gctgcttcagcttcc

SEQ ID NO: 326260 - DNA, 15 bp, Homo sapiens
ggctgcttcagcttc

SEQ ID NO: 326261 - DNA, 15 bp, Homo sapiens
tggctgcttcagctt

SEQ ID NO: 326262 - DNA, 15 bp, Homo sapiens
ctggctgcttcagct

SEQ ID NO: 326263 - DNA, 15 bp, Homo sapiens
gctggctgcttcagc

SEQ ID NO: 326264 - DNA, 15 bp, Homo sapiens
ggctggctgcttcag

SEQ ID NO: 326265 - DNA, 15 bp, Homo sapiens
tggctggctgcttca

SEQ ID NO: 326266 - DNA, 15 bp, Homo sapiens
ctggctggctgcttc

SEQ ID NO: 326267 - DNA, 15 bp, Homo sapiens
cctggctggctgctt

SEQ ID NO: 326268 - DNA, 15 bp, Homo sapiens
ccctggctggctgct

SEQ ID NO: 326269 - DNA, 15 bp, Homo sapiens
cccctggctggctgc

SEQ ID NO: 326270 - DNA, 15 bp, Homo sapiens
tcccctggctggctg

SEQ ID NO: 326271 - DNA, 15 bp, Homo sapiens
gtcccctggctggct

SEQ ID NO: 326272 - DNA, 15 bp, Homo sapiens
cgtcccctggctggc

SEQ ID NO: 326273 - DNA, 15 bp, Homo sapiens
tcgtcccctggctgg

SEQ ID NO: 326274 - DNA, 15 bp, Homo sapiens
ctcgtcccctggctg

SEQ ID NO: 326275 - DNA, 15 bp, Homo sapiens
cctcgtcccctggct

SEQ ID NO: 326276 - DNA, 15 bp, Homo sapiens
ccctcgtcccctggc

SEQ ID NO: 326277 - DNA, 15 bp, Homo sapiens
tccctcgtcccctgg

SEQ ID NO: 326278 - DNA, 15 bp, Homo sapiens
ctccctcgtcccctg

SEQ ID NO: 326279 - DNA, 15 bp, Homo sapiens
tctccctcgtcccct

SEQ ID NO: 326280 - DNA, 15 bp, Homo sapiens
ctctccctcgtcccc

SEQ ID NO: 326281 - DNA, 15 bp, Homo sapiens
tctctccctcgtccc

SEQ ID NO: 326282 - DNA, 15 bp, Homo sapiens
ttctctccctcgtcc

SEQ ID NO: 326283 - DNA, 15 bp, Homo sapiens
attctctccctcgtc

SEQ ID NO: 326284 - DNA, 15 bp, Homo sapiens
cattctctccctcgt

SEQ ID NO: 326285 - DNA, 15 bp, Homo sapiens
ccattctctccctcg

SEQ ID NO: 326286 - DNA, 15 bp, Homo sapiens
gccattctctccctc

SEQ ID NO: 326287 - DNA, 15 bp, Homo sapiens
ggccattctctccct

SEQ ID NO: 326288 - DNA, 15 bp, Homo sapiens
gggccattctctccc

SEQ ID NO: 326289 - DNA, 15 bp, Homo sapiens
agggccattctctcc

SEQ ID NO: 326290 - DNA, 15 bp, Homo sapiens
tagggccattctctc

SEQ ID NO: 326291 - DNA, 15 bp, Homo sapiens
ctagggccattctct

SEQ ID NO: 326292 - DNA, 15 bp, Homo sapiens
cctagggccattctc

SEQ ID NO: 326293 - DNA, 15 bp, Homo sapiens
ccctagggccattct

SEQ ID NO: 326294 - DNA, 15 bp, Homo sapiens
tccctagggccattc

SEQ ID NO: 326295 - DNA, 15 bp, Homo sapiens
ttccctagggccatt

SEQ ID NO: 326296 - DNA, 15 bp, Homo sapiens
cttccctagggccat

SEQ ID NO: 326297 - DNA, 15 bp, Homo sapiens
tcttccctagggcca

SEQ ID NO: 326298 - DNA, 15 bp, Homo sapiens
ctcttccctagggcc

SEQ ID NO: 326299 - DNA, 15 bp, Homo sapiens
actcttccctagggc

SEQ ID NO: 326300 - DNA, 15 bp, Homo sapiens
gactcttccctaggg

SEQ ID NO: 326301 - DNA, 15 bp, Homo sapiens
tgactcttccctagg

SEQ ID NO: 326302 - DNA, 15 bp, Homo sapiens
gtgactcttccctag

SEQ ID NO: 326303 - DNA, 15 bp, Homo sapiens
cgtgactcttcccta

SEQ ID NO: 326304 - DNA, 15 bp, Homo sapiens
ccgtgactcttccct

SEQ ID NO: 326305 - DNA, 15 bp, Homo sapiens
cccgtgactcttccc

SEQ ID NO: 326306 - DNA, 15 bp, Homo sapiens
ccccgtgactcttcc

SEQ ID NO: 326307 - DNA, 15 bp, Homo sapiens
accccgtgactcttc

SEQ ID NO: 326308 - DNA, 15 bp, Homo sapiens
caccccgtgactctt

SEQ ID NO: 326309 - DNA, 15 bp, Homo sapiens
ccaccccgtgactct

SEQ ID NO: 326310 - DNA, 15 bp, Homo sapiens
tccaccccgtgactc

SEQ ID NO: 326311 - DNA, 15 bp, Homo sapiens
ttccaccccgtgact

SEQ ID NO: 326312 - DNA, 15 bp, Homo sapiens
cttccaccccgtgac

SEQ ID NO: 326313 - DNA, 15 bp, Homo sapiens
ccttccaccccgtga

SEQ ID NO: 326314 - DNA, 15 bp, Homo sapiens
gccttccaccccgtg

SEQ ID NO: 326315 - DNA, 15 bp, Homo sapiens
agccttccaccccgt

SEQ ID NO: 326316 - DNA, 15 bp, Homo sapiens
cagccttccaccccg

SEQ ID NO: 326317 - DNA, 15 bp, Homo sapiens
acagccttccacccc

SEQ ID NO: 326318 - DNA, 15 bp, Homo sapiens
gacagccttccaccc

SEQ ID NO: 326319 - DNA, 15 bp, Homo sapiens
agacagccttccacc

SEQ ID NO: 326320 - DNA, 15 bp, Homo sapiens
cagacagccttccac

SEQ ID NO: 326321 - DNA, 15 bp, Homo sapiens
ccagacagccttcca

SEQ ID NO: 326322 - DNA, 15 bp, Homo sapiens
cccagacagccttcc

SEQ ID NO: 326323 - DNA, 15 bp, Homo sapiens
gcccagacagccttc

SEQ ID NO: 326324 - DNA, 15 bp, Homo sapiens
tgcccagacagcctt

SEQ ID NO: 326325 - DNA, 15 bp, Homo sapiens
atgcccagacagcct

SEQ ID NO: 326326 - DNA, 15 bp, Homo sapiens
gatgcccagacagcc

SEQ ID NO: 326327 - DNA, 15 bp, Homo sapiens
agatgcccagacagc

SEQ ID NO: 326328 - DNA, 15 bp, Homo sapiens
cagatgcccagacag

SEQ ID NO: 326329 - DNA, 15 bp, Homo sapiens
gcagatgcccagaca

SEQ ID NO: 326330 - DNA, 15 bp, Homo sapiens
ggcagatgcccagac

SEQ ID NO: 326331 - DNA, 15 bp, Homo sapiens
tggcagatgcccaga

SEQ ID NO: 326332 - DNA, 15 bp, Homo sapiens
atggcagatgcccag

SEQ ID NO: 326333 - DNA, 15 bp, Homo sapiens
gatggcagatgccca

SEQ ID NO: 326334 - DNA, 15 bp, Homo sapiens
ggatggcagatgccc

SEQ ID NO: 326335 - DNA, 15 bp, Homo sapiens
cggatggcagatgcc

SEQ ID NO: 326336 - DNA, 15 bp, Homo sapiens
ccggatggcagatgc

SEQ ID NO: 326337 - DNA, 15 bp, Homo sapiens
cccggatggcagatg

SEQ ID NO: 326338 - DNA, 15 bp, Homo sapiens
gcccggatggcagat

SEQ ID NO: 326339 - DNA, 15 bp, Homo sapiens
ggcccggatggcaga

SEQ ID NO: 326340 - DNA, 15 bp, Homo sapiens
gggcccggatggcag

SEQ ID NO: 326341 - DNA, 15 bp, Homo sapiens
ggggcccggatggca

SEQ ID NO: 326342 - DNA, 15 bp, Homo sapiens
tggggcccggatggc

SEQ ID NO: 326343 - DNA, 15 bp, Homo sapiens
ttggggcccggatgg

SEQ ID NO: 326344 - DNA, 15 bp, Homo sapiens
tttggggcccggatg

SEQ ID NO: 326345 - DNA, 15 bp, Homo sapiens
ttttggggcccggat

SEQ ID NO: 326346 - DNA, 15 bp, Homo sapiens
gttttggggcccgga

SEQ ID NO: 326347 - DNA, 15 bp, Homo sapiens
tgttttggggcccgg

SEQ ID NO: 326348 - DNA, 15 bp, Homo sapiens
ctgttttggggcccg

SEQ ID NO: 326349 - DNA, 15 bp, Homo sapiens
gctgttttggggccc

SEQ ID NO: 326350 - DNA, 15 bp, Homo sapiens
ggctgttttggggcc

SEQ ID NO: 326351 - DNA, 15 bp, Homo sapiens
aggctgttttggggc

SEQ ID NO: 326352 - DNA, 15 bp, Homo sapiens
aaggctgttttgggg

SEQ ID NO: 326353 - DNA, 15 bp, Homo sapiens
aaaggctgttttggg

SEQ ID NO: 326354 - DNA, 15 bp, Homo sapiens
aaaaggctgttttgg

SEQ ID NO: 326355 - DNA, 15 bp, Homo sapiens
aaaaaggctgttttg

SEQ ID NO: 326356 - DNA, 15 bp, Homo sapiens
gaaaaaggctgtttt

SEQ ID NO: 326357 - DNA, 15 bp, Homo sapiens
ggaaaaaggctgttt

SEQ ID NO: 326358 - DNA, 15 bp, Homo sapiens
tggaaaaaggctgtt

SEQ ID NO: 326359 - DNA, 15 bp, Homo sapiens
ctggaaaaaggctgt

SEQ ID NO: 326360 - DNA, 15 bp, Homo sapiens
gctggaaaaaggctg

SEQ ID NO: 326361 - DNA, 15 bp, Homo sapiens
tgctggaaaaaggct

SEQ ID NO: 326362 - DNA, 15 bp, Homo sapiens
gtgctggaaaaaggc

SEQ ID NO: 326363 - DNA, 15 bp, Homo sapiens
ggtgctggaaaaagg

SEQ ID NO: 326364 - DNA, 15 bp, Homo sapiens
gggtgctggaaaaag

SEQ ID NO: 326365 - DNA, 15 bp, Homo sapiens
ggggtgctggaaaaa

SEQ ID NO: 326366 - DNA, 15 bp, Homo sapiens
tggggtgctggaaaa

SEQ ID NO: 326367 - DNA, 15 bp, Homo sapiens
gtggggtgctggaaa

SEQ ID NO: 326368 - DNA, 15 bp, Homo sapiens
agtggggtgctggaa

SEQ ID NO: 326369 - DNA, 15 bp, Homo sapiens
aagtggggtgctgga

SEQ ID NO: 326370 - DNA, 15 bp, Homo sapiens
gaagtggggtgctgg

SEQ ID NO: 326371 - DNA, 15 bp, Homo sapiens
ggaagtggggtgctg

SEQ ID NO: 326372 - DNA, 15 bp, Homo sapiens
gggaagtggggtgct

SEQ ID NO: 326373 - DNA, 15 bp, Homo sapiens
tgggaagtggggtgc

SEQ ID NO: 326374 - DNA, 15 bp, Homo sapiens
gtgggaagtggggtg

SEQ ID NO: 326375 - DNA, 15 bp, Homo sapiens
agtgggaagtggggt

SEQ ID NO: 326376 - DNA, 15 bp, Homo sapiens
tagtgggaagtgggg

SEQ ID NO: 326377 - DNA, 15 bp, Homo sapiens
atagtgggaagtggg

SEQ ID NO: 326378 - DNA, 15 bp, Homo sapiens
tatagtgggaagtgg

SEQ ID NO: 326379 - DNA, 15 bp, Homo sapiens
atatagtgggaagtg

SEQ ID NO: 326380 - DNA, 15 bp, Homo sapiens
catatagtgggaagt

SEQ ID NO: 326381 - DNA, 15 bp, Homo sapiens
tcatatagtgggaag

SEQ ID NO: 326382 - DNA, 15 bp, Homo sapiens
ttcatatagtgggaa

SEQ ID NO: 326383 - DNA, 15 bp, Homo sapiens
tttcatatagtggga

SEQ ID NO: 326384 - DNA, 15 bp, Homo sapiens
gtttcatatagtggg

SEQ ID NO: 326385 - DNA, 15 bp, Homo sapiens
agtttcatatagtgg

SEQ ID NO: 326386 - DNA, 15 bp, Homo sapiens
gagtttcatatagtg

SEQ ID NO: 326387 - DNA, 15 bp, Homo sapiens
agagtttcatatagt

SEQ ID NO: 326388 - DNA, 15 bp, Homo sapiens
aagagtttcatatag

SEQ ID NO: 326389 - DNA, 15 bp, Homo sapiens
caagagtttcatata

SEQ ID NO: 326390 - DNA, 15 bp, Homo sapiens
acaagagtttcatat

SEQ ID NO: 326391 - DNA, 15 bp, Homo sapiens
aacaagagtttcata

SEQ ID NO: 326392 - DNA, 15 bp, Homo sapiens
caacaagagtttcat

SEQ ID NO: 326393 - DNA, 15 bp, Homo sapiens
acaacaagagtttca

SEQ ID NO: 326394 - DNA, 15 bp, Homo sapiens
aacaacaagagtttc

SEQ ID NO: 326395 - DNA, 15 bp, Homo sapiens
taacaacaagagttt

SEQ ID NO: 326396 - DNA, 15 bp, Homo sapiens
ctaacaacaagagtt

SEQ ID NO: 326397 - DNA, 15 bp, Homo sapiens
tctaacaacaagagt

SEQ ID NO: 326398 - DNA, 15 bp, Homo sapiens
ctctaacaacaagag

SEQ ID NO: 326399 - DNA, 15 bp, Homo sapiens
cctctaacaacaaga

SEQ ID NO: 326400 - DNA, 15 bp, Homo sapiens
ccctctaacaacaag

SEQ ID NO: 326401 - DNA, 15 bp, Homo sapiens
accctctaacaacaa

SEQ ID NO: 326402 - DNA, 15 bp, Homo sapiens
caccctctaacaaca

SEQ ID NO: 326403 - DNA, 15 bp, Homo sapiens
gcaccctctaacaac

SEQ ID NO: 326404 - DNA, 15 bp, Homo sapiens
agcaccctctaacaa

SEQ ID NO: 326405 - DNA, 15 bp, Homo sapiens
aagcaccctctaaca

SEQ ID NO: 326406 - DNA, 15 bp, Homo sapiens
aaagcaccctctaac

SEQ ID NO: 326407 - DNA, 15 bp, Homo sapiens
aaaagcaccctctaa

SEQ ID NO: 326408 - DNA, 15 bp, Homo sapiens
aaaaagcaccctcta

SEQ ID NO: 326409 - DNA, 15 bp, Homo sapiens
caaaaagcaccctct

SEQ ID NO: 326410 - DNA, 15 bp, Homo sapiens
gcaaaaagcaccctc

SEQ ID NO: 326411 - DNA, 15 bp, Homo sapiens
ggcaaaaagcaccct

SEQ ID NO: 326412 - DNA, 15 bp, Homo sapiens
tggcaaaaagcaccc

SEQ ID NO: 326413 - DNA, 15 bp, Homo sapiens
gtggcaaaaagcacc

SEQ ID NO: 326414 - DNA, 15 bp, Homo sapiens
tgtggcaaaaagcac

SEQ ID NO: 326415 - DNA, 15 bp, Homo sapiens
ttgtggcaaaaagca

SEQ ID NO: 326416 - DNA, 15 bp, Homo sapiens
tttgtggcaaaaagc

SEQ ID NO: 326417 - DNA, 15 bp, Homo sapiens
gtttgtggcaaaaag

SEQ ID NO: 326418 - DNA, 15 bp, Homo sapiens
ggtttgtggcaaaaa

SEQ ID NO: 326419 - DNA, 15 bp, Homo sapiens
gggtttgtggcaaaa

SEQ ID NO: 326420 - DNA, 15 bp, Homo sapiens
tgggtttgtggcaaa

SEQ ID NO: 326421 - DNA, 15 bp, Homo sapiens
gtgggtttgtggcaa

SEQ ID NO: 326422 - DNA, 15 bp, Homo sapiens
tgtgggtttgtggca

SEQ ID NO: 326423 - DNA, 15 bp, Homo sapiens
ttgtgggtttgtggc

SEQ ID NO: 326424 - DNA, 15 bp, Homo sapiens
gttgtgggtttgtgg

SEQ ID NO: 326425 - DNA, 15 bp, Homo sapiens
ggttgtgggtttgtg

SEQ ID NO: 326426 - DNA, 15 bp, Homo sapiens
aggttgtgggtttgt

SEQ ID NO: 326427 - DNA, 15 bp, Homo sapiens
caggttgtgggtttg

SEQ ID NO: 326428 - DNA, 15 bp, Homo sapiens
ccaggttgtgggttt

SEQ ID NO: 326429 - DNA, 15 bp, Homo sapiens
cccaggttgtgggtt

SEQ ID NO: 326430 - DNA, 15 bp, Homo sapiens
acccaggttgtgggt

SEQ ID NO: 326431 - DNA, 15 bp, Homo sapiens
aacccaggttgtggg

SEQ ID NO: 326432 - DNA, 15 bp, Homo sapiens
aaacccaggttgtgg

SEQ ID NO: 326433 - DNA, 15 bp, Homo sapiens
aaaacccaggttgtg

SEQ ID NO: 326434 - DNA, 15 bp, Homo sapiens
gaaaacccaggttgt

SEQ ID NO: 326435 - DNA, 15 bp, Homo sapiens
tgaaaacccaggttg

SEQ ID NO: 326436 - DNA, 15 bp, Homo sapiens
ctgaaaacccaggtt

SEQ ID NO: 326437 - DNA, 15 bp, Homo sapiens
tctgaaaacccaggt

SEQ ID NO: 326438 - DNA, 15 bp, Homo sapiens
ctctgaaaacccagg

SEQ ID NO: 326439 - DNA, 15 bp, Homo sapiens
actctgaaaacccag

SEQ ID NO: 326440 - DNA, 15 bp, Homo sapiens
aactctgaaaaccca

SEQ ID NO: 326441 - DNA, 15 bp, Homo sapiens
gaactctgaaaaccc

SEQ ID NO: 326442 - DNA, 15 bp, Homo sapiens
ggaactctgaaaacc

SEQ ID NO: 326443 - DNA, 15 bp, Homo sapiens
aggaactctgaaaac

SEQ ID NO: 326444 - DNA, 15 bp, Homo sapiens
aaggaactctgaaaa

SEQ ID NO: 326445 - DNA, 15 bp, Homo sapiens
aaaggaactctgaaa

SEQ ID NO: 326446 - DNA, 15 bp, Homo sapiens
gaaaggaactctgaa

SEQ ID NO: 326447 - DNA, 15 bp, Homo sapiens
tgaaaggaactctga

SEQ ID NO: 326448 - DNA, 15 bp, Homo sapiens
gtgaaaggaactctg

SEQ ID NO: 326449 - DNA, 15 bp, Homo sapiens
agtgaaaggaactct

SEQ ID NO: 326450 - DNA, 15 bp, Homo sapiens
aagtgaaaggaactc

SEQ ID NO: 326451 - DNA, 15 bp, Homo sapiens
taagtgaaaggaact

SEQ ID NO: 326452 - DNA, 15 bp, Homo sapiens
ataagtgaaaggaac

SEQ ID NO: 326453 - DNA, 15 bp, Homo sapiens
cataagtgaaaggaa

SEQ ID NO: 326454 - DNA, 15 bp, Homo sapiens
ccataagtgaaagga

SEQ ID NO: 326455 - DNA, 15 bp, Homo sapiens
accataagtgaaagg

SEQ ID NO: 326456 - DNA, 15 bp, Homo sapiens
gaccataagtgaaag

SEQ ID NO: 326457 - DNA, 15 bp, Homo sapiens
tgaccataagtgaaa

SEQ ID NO: 326458 - DNA, 15 bp, Homo sapiens
atgaccataagtgaa

SEQ ID NO: 326459 - DNA, 15 bp, Homo sapiens
tatgaccataagtga

SEQ ID NO: 326460 - DNA, 15 bp, Homo sapiens
ttatgaccataagtg

SEQ ID NO: 326461 - DNA, 15 bp, Homo sapiens
gttatgaccataagt

SEQ ID NO: 326462 - DNA, 15 bp, Homo sapiens
ggttatgaccataag

SEQ ID NO: 326463 - DNA, 15 bp, Homo sapiens
tggttatgaccataa

SEQ ID NO: 326464 - DNA, 15 bp, Homo sapiens
ctggttatgaccata

SEQ ID NO: 326465 - DNA, 15 bp, Homo sapiens
tctggttatgaccat

SEQ ID NO: 326466 - DNA, 15 bp, Homo sapiens
atctggttatgacca

SEQ ID NO: 326467 - DNA, 15 bp, Homo sapiens
catctggttatgacc

SEQ ID NO: 326468 - DNA, 15 bp, Homo sapiens
ccatctggttatgac

SEQ ID NO: 326469 - DNA, 15 bp, Homo sapiens
accatctggttatga

SEQ ID NO: 326470 - DNA, 15 bp, Homo sapiens
aaccatctggttatg

SEQ ID NO: 326471 - DNA, 15 bp, Homo sapiens
caaccatctggttat

SEQ ID NO: 326472 - DNA, 15 bp, Homo sapiens
tcaaccatctggtta

SEQ ID NO: 326473 - DNA, 15 bp, Homo sapiens
ctcaaccatctggtt

SEQ ID NO: 326474 - DNA, 15 bp, Homo sapiens
tctcaaccatctggt

SEQ ID NO: 326475 - DNA, 15 bp, Homo sapiens
atctcaaccatctgg

SEQ ID NO: 326476 - DNA, 15 bp, Homo sapiens
tatctcaaccatctg

SEQ ID NO: 326477 - DNA, 15 bp, Homo sapiens
ttatctcaaccatct

SEQ ID NO: 326478 - DNA, 15 bp, Homo sapiens
attatctcaaccatc

SEQ ID NO: 326479 - DNA, 15 bp, Homo sapiens
aattatctcaaccat

SEQ ID NO: 326480 - DNA, 15 bp, Homo sapiens
gaattatctcaacca

SEQ ID NO: 326481 - DNA, 15 bp, Homo sapiens
tgaattatctcaacc

SEQ ID NO: 326482 - DNA, 15 bp, Homo sapiens
ctgaattatctcaac

SEQ ID NO: 326483 - DNA, 15 bp, Homo sapiens
gctgaattatctcaa

SEQ ID NO: 326484 - DNA, 15 bp, Homo sapiens
tgctgaattatctca

SEQ ID NO: 326485 - DNA, 15 bp, Homo sapiens
ttgctgaattatctc

SEQ ID NO: 326486 - DNA, 15 bp, Homo sapiens
cttgctgaattatct

SEQ ID NO: 326487 - DNA, 15 bp, Homo sapiens
gcttgctgaattatc

SEQ ID NO: 326488 - DNA, 15 bp, Homo sapiens
ggcttgctgaattat

SEQ ID NO: 326489 - DNA, 15 bp, Homo sapiens
aggcttgctgaatta

SEQ ID NO: 326490 - DNA, 15 bp, Homo sapiens
caggcttgctgaatt

SEQ ID NO: 326491 - DNA, 15 bp, Homo sapiens
ccaggcttgctgaat

SEQ ID NO: 326492 - DNA, 15 bp, Homo sapiens
tccaggcttgctgaa

SEQ ID NO: 326493 - DNA, 15 bp, Homo sapiens
ctccaggcttgctga

SEQ ID NO: 326494 - DNA, 15 bp, Homo sapiens
actccaggcttgctg

SEQ ID NO: 326495 - DNA, 15 bp, Homo sapiens
cactccaggcttgct

SEQ ID NO: 326496 - DNA, 15 bp, Homo sapiens
tcactccaggcttgc

SEQ ID NO: 326497 - DNA, 15 bp, Homo sapiens
ctcactccaggcttg

SEQ ID NO: 326498 - DNA, 15 bp, Homo sapiens
gctcactccaggctt

SEQ ID NO: 326499 - DNA, 15 bp, Homo sapiens
tgctcactccaggct

SEQ ID NO: 326500 - DNA, 15 bp, Homo sapiens
gtgctcactccaggc

SEQ ID NO: 326501 - DNA, 15 bp, Homo sapiens
ggtgctcactccagg

SEQ ID NO: 326502 - DNA, 15 bp, Homo sapiens
gggtgctcactccag

SEQ ID NO: 326503 - DNA, 15 bp, Homo sapiens
tgggtgctcactcca

SEQ ID NO: 326504 - DNA, 15 bp, Homo sapiens
atgggtgctcactcc

SEQ ID NO: 326505 - DNA, 15 bp, Homo sapiens
aatgggtgctcactc

SEQ ID NO: 326506 - DNA, 15 bp, Homo sapiens
caatgggtgctcact

SEQ ID NO: 326507 - DNA, 15 bp, Homo sapiens
ccaatgggtgctcac

SEQ ID NO: 326508 - DNA, 15 bp, Homo sapiens
accaatgggtgctca

SEQ ID NO: 326509 - DNA, 15 bp, Homo sapiens
taccaatgggtgctc

SEQ ID NO: 326510 - DNA, 15 bp, Homo sapiens
ataccaatgggtgct

SEQ ID NO: 326511 - DNA, 15 bp, Homo sapiens
gataccaatgggtgc

SEQ ID NO: 326512 - DNA, 15 bp, Homo sapiens
tgataccaatgggtg

SEQ ID NO: 326513 - DNA, 15 bp, Homo sapiens
ctgataccaatgggt

SEQ ID NO: 326514 - DNA, 15 bp, Homo sapiens
gctgataccaatggg

SEQ ID NO: 326515 - DNA, 15 bp, Homo sapiens
tgctgataccaatgg

SEQ ID NO: 326516 - DNA, 15 bp, Homo sapiens
ctgctgataccaatg

SEQ ID NO: 326517 - DNA, 15 bp, Homo sapiens
gctgctgataccaat

SEQ ID NO: 326518 - DNA, 15 bp, Homo sapiens
tgctgctgataccaa

SEQ ID NO: 326519 - DNA, 15 bp, Homo sapiens
ttgctgctgatacca

SEQ ID NO: 326520 - DNA, 15 bp, Homo sapiens
cttgctgctgatacc

SEQ ID NO: 326521 - DNA, 15 bp, Homo sapiens
ccttgctgctgatac

SEQ ID NO: 326522 - DNA, 15 bp, Homo sapiens
accttgctgctgata

SEQ ID NO: 326523 - DNA, 15 bp, Homo sapiens
caccttgctgctgat

SEQ ID NO: 326524 - DNA, 15 bp, Homo sapiens
gcaccttgctgctga

SEQ ID NO: 326525 - DNA, 15 bp, Homo sapiens
tgcaccttgctgctg

SEQ ID NO: 326526 - DNA, 15 bp, Homo sapiens
atgcaccttgctgct

SEQ ID NO: 326527 - DNA, 15 bp, Homo sapiens
catgcaccttgctgc

SEQ ID NO: 326528 - DNA, 15 bp, Homo sapiens
gcatgcaccttgctg

SEQ ID NO: 326529 - DNA, 15 bp, Homo sapiens
agcatgcaccttgct

SEQ ID NO: 326530 - DNA, 15 bp, Homo sapiens
tagcatgcaccttgc

SEQ ID NO: 326531 - DNA, 15 bp, Homo sapiens
ctagcatgcaccttg

SEQ ID NO: 326532 - DNA, 15 bp, Homo sapiens
cctagcatgcacctt

SEQ ID NO: 326533 - DNA, 15 bp, Homo sapiens
tcctagcatgcacct

SEQ ID NO: 326534 - DNA, 15 bp, Homo sapiens
ctcctagcatgcacc

SEQ ID NO: 326535 - DNA, 15 bp, Homo sapiens
actcctagcatgcac

SEQ ID NO: 326536 - DNA, 15 bp, Homo sapiens
gactcctagcatgca

SEQ ID NO: 326537 - DNA, 15 bp, Homo sapiens
ggactcctagcatgc

SEQ ID NO: 326538 - DNA, 15 bp, Homo sapiens
aggactcctagcatg

SEQ ID NO: 326539 - DNA, 15 bp, Homo sapiens
caggactcctagcat

SEQ ID NO: 326540 - DNA, 15 bp, Homo sapiens
gcaggactcctagca

SEQ ID NO: 326541 - DNA, 15 bp, Homo sapiens
agcaggactcctagc

SEQ ID NO: 326542 - DNA, 15 bp, Homo sapiens
cagcaggactcctag

SEQ ID NO: 326543 - DNA, 15 bp, Homo sapiens
acagcaggactccta

SEQ ID NO: 326544 - DNA, 15 bp, Homo sapiens
gacagcaggactcct

SEQ ID NO: 326545 - DNA, 15 bp, Homo sapiens
tgacagcaggactcc

SEQ ID NO: 326546 - DNA, 15 bp, Homo sapiens
ctgacagcaggactc

SEQ ID NO: 326547 - DNA, 15 bp, Homo sapiens
tctgacagcaggact

SEQ ID NO: 326548 - DNA, 15 bp, Homo sapiens
ctctgacagcaggac

SEQ ID NO: 326549 - DNA, 15 bp, Homo sapiens
tctctgacagcagga

SEQ ID NO: 326550 - DNA, 15 bp, Homo sapiens
ttctctgacagcagg

SEQ ID NO: 326551 - DNA, 15 bp, Homo sapiens
gttctctgacagcag

SEQ ID NO: 326552 - DNA, 15 bp, Homo sapiens
agttctctgacagca

SEQ ID NO: 326553 - DNA, 15 bp, Homo sapiens
aagttctctgacagc

SEQ ID NO: 326554 - DNA, 15 bp, Homo sapiens
caagttctctgacag

SEQ ID NO: 326555 - DNA, 15 bp, Homo sapiens
gcaagttctctgaca

SEQ ID NO: 326556 - DNA, 15 bp, Homo sapiens
agcaagttctctgac

SEQ ID NO: 326557 - DNA, 15 bp, Homo sapiens
cagcaagttctctga

SEQ ID NO: 326558 - DNA, 15 bp, Homo sapiens
gcagcaagttctctg

SEQ ID NO: 326559 - DNA, 15 bp, Homo sapiens
cgcagcaagttctct

SEQ ID NO: 326560 - DNA, 15 bp, Homo sapiens
acgcagcaagttctc

SEQ ID NO: 326561 - DNA, 15 bp, Homo sapiens
tacgcagcaagttct

SEQ ID NO: 326562 - DNA, 15 bp, Homo sapiens
ctacgcagcaagttc

SEQ ID NO: 326563 - DNA, 15 bp, Homo sapiens
cctacgcagcaagtt

SEQ ID NO: 326564 - DNA, 15 bp, Homo sapiens
ccctacgcagcaagt

SEQ ID NO: 326565 - DNA, 15 bp, Homo sapiens
cccctacgcagcaag

SEQ ID NO: 326566 - DNA, 15 bp, Homo sapiens
ccccctacgcagcaa

SEQ ID NO: 326567 - DNA, 15 bp, Homo sapiens
gccccctacgcagca

SEQ ID NO: 326568 - DNA, 15 bp, Homo sapiens
ggccccctacgcagc

SEQ ID NO: 326569 - DNA, 15 bp, Homo sapiens
tggccccctacgcag

SEQ ID NO: 326570 - DNA, 15 bp, Homo sapiens
ctggccccctacgca

SEQ ID NO: 326571 - DNA, 15 bp, Homo sapiens
cctggccccctacgc

SEQ ID NO: 326572 - DNA, 15 bp, Homo sapiens
gcctggccccctacg

SEQ ID NO: 326573 - DNA, 15 bp, Homo sapiens
ggcctggccccctac

SEQ ID NO: 326574 - DNA, 15 bp, Homo sapiens
tggcctggcccccta

SEQ ID NO: 326575 - DNA, 15 bp, Homo sapiens
gtggcctggccccct

SEQ ID NO: 326576 - DNA, 15 bp, Homo sapiens
ggtggcctggccccc

SEQ ID NO: 326577 - DNA, 15 bp, Homo sapiens
aggtggcctggcccc

SEQ ID NO: 326578 - DNA, 15 bp, Homo sapiens
caggtggcctggccc

SEQ ID NO: 326579 - DNA, 15 bp, Homo sapiens
tcaggtggcctggcc

SEQ ID NO: 326580 - DNA, 15 bp, Homo sapiens
gtcaggtggcctggc

SEQ ID NO: 326581 - DNA, 15 bp, Homo sapiens
cgtcaggtggcctgg

SEQ ID NO: 326582 - DNA, 15 bp, Homo sapiens
ccgtcaggtggcctg

SEQ ID NO: 326583 - DNA, 15 bp, Homo sapiens
accgtcaggtggcct

SEQ ID NO: 326584 - DNA, 15 bp, Homo sapiens
caccgtcaggtggcc

SEQ ID NO: 326585 - DNA, 15 bp, Homo sapiens
acaccgtcaggtggc

SEQ ID NO: 326586 - DNA, 15 bp, Homo sapiens
cacaccgtcaggtgg

SEQ ID NO: 326587 - DNA, 15 bp, Homo sapiens
ccacaccgtcaggtg

SEQ ID NO: 326588 - DNA, 15 bp, Homo sapiens
accacaccgtcaggt

SEQ ID NO: 326589 - DNA, 15 bp, Homo sapiens
aaccacaccgtcagg

SEQ ID NO: 326590 - DNA, 15 bp, Homo sapiens
taaccacaccgtcag

SEQ ID NO: 326591 - DNA, 15 bp, Homo sapiens
ttaaccacaccgtca

SEQ ID NO: 326592 - DNA, 15 bp, Homo sapiens
attaaccacaccgtc

SEQ ID NO: 326593 - DNA, 15 bp, Homo sapiens
cattaaccacaccgt

SEQ ID NO: 326594 - DNA, 15 bp, Homo sapiens
gcattaaccacaccg

SEQ ID NO: 326595 - DNA, 15 bp, Homo sapiens
agcattaaccacacc

SEQ ID NO: 326596 - DNA, 15 bp, Homo sapiens
cagcattaaccacac

SEQ ID NO: 326597 - DNA, 15 bp, Homo sapiens
tcagcattaaccaca

SEQ ID NO: 326598 - DNA, 15 bp, Homo sapiens
atcagcattaaccac

SEQ ID NO: 326599 - DNA, 15 bp, Homo sapiens
catcagcattaacca

SEQ ID NO: 326600 - DNA, 15 bp, Homo sapiens
acatcagcattaacc

SEQ ID NO: 326601 - DNA, 15 bp, Homo sapiens
gacatcagcattaac

SEQ ID NO: 326602 - DNA, 15 bp, Homo sapiens
tgacatcagcattaa

SEQ ID NO: 326603 - DNA, 15 bp, Homo sapiens
ctgacatcagcatta

SEQ ID NO: 326604 - DNA, 15 bp, Homo sapiens
gctgacatcagcatt

SEQ ID NO: 326605 - DNA, 15 bp, Homo sapiens
tgctgacatcagcat

SEQ ID NO: 326606 - DNA, 15 bp, Homo sapiens
atgctgacatcagca

SEQ ID NO: 326607 - DNA, 15 bp, Homo sapiens
catgctgacatcagc

SEQ ID NO: 326608 - DNA, 15 bp, Homo sapiens
gcatgctgacatcag

SEQ ID NO: 326609 - DNA, 15 bp, Homo sapiens
ggcatgctgacatca

SEQ ID NO: 326610 - DNA, 15 bp, Homo sapiens
gggcatgctgacatc

SEQ ID NO: 326611 - DNA, 15 bp, Homo sapiens
tgggcatgctgacat

SEQ ID NO: 326612 - DNA, 15 bp, Homo sapiens
ctgggcatgctgaca

SEQ ID NO: 326613 - DNA, 15 bp, Homo sapiens
cctgggcatgctgac

SEQ ID NO: 326614 - DNA, 15 bp, Homo sapiens
ccctgggcatgctga

SEQ ID NO: 326615 - DNA, 15 bp, Homo sapiens
cccctgggcatgctg

SEQ ID NO: 326616 - DNA, 15 bp, Homo sapiens
acccctgggcatgct

SEQ ID NO: 326617 - DNA, 15 bp, Homo sapiens
aacccctgggcatgc

SEQ ID NO: 326618 - DNA, 15 bp, Homo sapiens
caacccctgggcatg

SEQ ID NO: 326619 - DNA, 15 bp, Homo sapiens
tcaacccctgggcat

SEQ ID NO: 326620 - DNA, 15 bp, Homo sapiens
ctcaacccctgggca

SEQ ID NO: 326621 - DNA, 15 bp, Homo sapiens
tctcaacccctgggc

SEQ ID NO: 326622 - DNA, 15 bp, Homo sapiens
ctctcaacccctggg

SEQ ID NO: 326623 - DNA, 15 bp, Homo sapiens
cctctcaacccctgg

SEQ ID NO: 326624 - DNA, 15 bp, Homo sapiens
ccctctcaacccctg

SEQ ID NO: 326625 - DNA, 15 bp, Homo sapiens
cccctctcaacccct

SEQ ID NO: 326626 - DNA, 15 bp, Homo sapiens
tcccctctcaacccc

SEQ ID NO: 326627 - DNA, 15 bp, Homo sapiens
ctcccctctcaaccc

SEQ ID NO: 326628 - DNA, 15 bp, Homo sapiens
actcccctctcaacc

SEQ ID NO: 326629 - DNA, 15 bp, Homo sapiens
tactcccctctcaac

SEQ ID NO: 326630 - DNA, 15 bp, Homo sapiens
ttactcccctctcaa

SEQ ID NO: 326631 - DNA, 15 bp, Homo sapiens
gttactcccctctca

SEQ ID NO: 326632 - DNA, 15 bp, Homo sapiens
agttactcccctctc

SEQ ID NO: 326633 - DNA, 15 bp, Homo sapiens
tagttactcccctct

SEQ ID NO: 326634 - DNA, 15 bp, Homo sapiens
ttagttactcccctc

SEQ ID NO: 326635 - DNA, 15 bp, Homo sapiens
cttagttactcccct

SEQ ID NO: 326636 - DNA, 15 bp, Homo sapiens
gcttagttactcccc

SEQ ID NO: 326637 - DNA, 15 bp, Homo sapiens
agcttagttactccc

SEQ ID NO: 326638 - DNA, 15 bp, Homo sapiens
cagcttagttactcc

SEQ ID NO: 326639 - DNA, 15 bp, Homo sapiens
ccagcttagttactc

SEQ ID NO: 326640 - DNA, 15 bp, Homo sapiens
cccagcttagttact

SEQ ID NO: 326641 - DNA, 15 bp, Homo sapiens
gcccagcttagttac

SEQ ID NO: 326642 - DNA, 15 bp, Homo sapiens
agcccagcttagtta

SEQ ID NO: 326643 - DNA, 15 bp, Homo sapiens
aagcccagcttagtt

SEQ ID NO: 326644 - DNA, 15 bp, Homo sapiens
taagcccagcttagt

SEQ ID NO: 326645 - DNA, 15 bp, Homo sapiens
ctaagcccagcttag

SEQ ID NO: 326646 - DNA, 15 bp, Homo sapiens
gctaagcccagctta

SEQ ID NO: 326647 - DNA, 15 bp, Homo sapiens
ggctaagcccagctt

SEQ ID NO: 326648 - DNA, 15 bp, Homo sapiens
aggctaagcccagct

SEQ ID NO: 326649 - DNA, 15 bp, Homo sapiens
caggctaagcccagc

SEQ ID NO: 326650 - DNA, 15 bp, Homo sapiens
tcaggctaagcccag

SEQ ID NO: 326651 - DNA, 15 bp, Homo sapiens
ctcaggctaagccca

SEQ ID NO: 326652 - DNA, 15 bp, Homo sapiens
actcaggctaagccc

SEQ ID NO: 326653 - DNA, 15 bp, Homo sapiens
aactcaggctaagcc

SEQ ID NO: 326654 - DNA, 15 bp, Homo sapiens
caactcaggctaagc

SEQ ID NO: 326655 - DNA, 15 bp, Homo sapiens
gcaactcaggctaag

SEQ ID NO: 326656 - DNA, 15 bp, Homo sapiens
tgcaactcaggctaa

SEQ ID NO: 326657 - DNA, 15 bp, Homo sapiens
ctgcaactcaggcta

SEQ ID NO: 326658 - DNA, 15 bp, Homo sapiens
cctgcaactcaggct

SEQ ID NO: 326659 - DNA, 15 bp, Homo sapiens
ccctgcaactcaggc

SEQ ID NO: 326660 - DNA, 15 bp, Homo sapiens
gccctgcaactcagg

SEQ ID NO: 326661 - DNA, 15 bp, Homo sapiens
tgccctgcaactcag

SEQ ID NO: 326662 - DNA, 15 bp, Homo sapiens
ctgccctgcaactca

SEQ ID NO: 326663 - DNA, 15 bp, Homo sapiens
actgccctgcaactc

SEQ ID NO: 326664 - DNA, 15 bp, Homo sapiens
gactgccctgcaact

SEQ ID NO: 326665 - DNA, 15 bp, Homo sapiens
tgactgccctgcaac

SEQ ID NO: 326666 - DNA, 15 bp, Homo sapiens
ttgactgccctgcaa

SEQ ID NO: 326667 - DNA, 15 bp, Homo sapiens
cttgactgccctgca

SEQ ID NO: 326668 - DNA, 15 bp, Homo sapiens
ccttgactgccctgc

SEQ ID NO: 326669 - DNA, 15 bp, Homo sapiens
tccttgactgccctg

SEQ ID NO: 326670 - DNA, 15 bp, Homo sapiens
atccttgactgccct

SEQ ID NO: 326671 - DNA, 15 bp, Homo sapiens
gatccttgactgccc

SEQ ID NO: 326672 - DNA, 15 bp, Homo sapiens
agatccttgactgcc

SEQ ID NO: 326673 - DNA, 15 bp, Homo sapiens
aagatccttgactgc

SEQ ID NO: 326674 - DNA, 15 bp, Homo sapiens
aaagatccttgactg

SEQ ID NO: 326675 - DNA, 15 bp, Homo sapiens
aaaagatccttgact

SEQ ID NO: 326676 - DNA, 15 bp, Homo sapiens
gaaaagatccttgac

SEQ ID NO: 326677 - DNA, 15 bp, Homo sapiens
cgaaaagatccttga

SEQ ID NO: 326678 - DNA, 15 bp, Homo sapiens
tcgaaaagatccttg

SEQ ID NO: 326679 - DNA, 15 bp, Homo sapiens
ctcgaaaagatcctt

SEQ ID NO: 326680 - DNA, 15 bp, Homo sapiens
cctcgaaaagatcct

SEQ ID NO: 326681 - DNA, 15 bp, Homo sapiens
tcctcgaaaagatcc

SEQ ID NO: 326682 - DNA, 15 bp, Homo sapiens
ctcctcgaaaagatc

SEQ ID NO: 326683 - DNA, 15 bp, Homo sapiens
tctcctcgaaaagat

SEQ ID NO: 326684 - DNA, 15 bp, Homo sapiens
ttctcctcgaaaaga

SEQ ID NO: 326685 - DNA, 15 bp, Homo sapiens
cttctcctcgaaaag

SEQ ID NO: 326686 - DNA, 15 bp, Homo sapiens
ccttctcctcgaaaa

SEQ ID NO: 326687 - DNA, 15 bp, Homo sapiens
accttctcctcgaaa

SEQ ID NO: 326688 - DNA, 15 bp, Homo sapiens
aaccttctcctcgaa

SEQ ID NO: 326689 - DNA, 15 bp, Homo sapiens
taaccttctcctcga

SEQ ID NO: 326690 - DNA, 15 bp, Homo sapiens
gtaaccttctcctcg

SEQ ID NO: 326691 - DNA, 15 bp, Homo sapiens
agtaaccttctcctc

SEQ ID NO: 326692 - DNA, 15 bp, Homo sapiens
aagtaaccttctcct

SEQ ID NO: 326693 - DNA, 15 bp, Homo sapiens
aaagtaaccttctcc

SEQ ID NO: 326694 - DNA, 15 bp, Homo sapiens
aaaagtaaccttctc

SEQ ID NO: 326695 - DNA, 15 bp, Homo sapiens
taaaagtaaccttct

SEQ ID NO: 326696 - DNA, 15 bp, Homo sapiens
ctaaaagtaaccttc

SEQ ID NO: 326697 - DNA, 15 bp, Homo sapiens
cctaaaagtaacctt

SEQ ID NO: 326698 - DNA, 15 bp, Homo sapiens
acctaaaagtaacct

SEQ ID NO: 326699 - DNA, 15 bp, Homo sapiens
tacctaaaagtaacc

SEQ ID NO: 326700 - DNA, 15 bp, Homo sapiens
ttacctaaaagtaac

SEQ ID NO: 326701 - DNA, 15 bp, Homo sapiens
cttacctaaaagtaa

SEQ ID NO: 326702 - DNA, 15 bp, Homo sapiens
gcttacctaaaagta

SEQ ID NO: 326703 - DNA, 15 bp, Homo sapiens
ggcttacctaaaagt

SEQ ID NO: 326704 - DNA, 15 bp, Homo sapiens
aggcttacctaaaag

SEQ ID NO: 326705 - DNA, 15 bp, Homo sapiens
aaggcttacctaaaa

SEQ ID NO: 326706 - DNA, 15 bp, Homo sapiens
caaggcttacctaaa

SEQ ID NO: 326707 - DNA, 15 bp, Homo sapiens
acaaggcttacctaa

SEQ ID NO: 326708 - DNA, 15 bp, Homo sapiens
tacaaggcttaccta

SEQ ID NO: 326709 - DNA, 15 bp, Homo sapiens
ctacaaggcttacct

SEQ ID NO: 326710 - DNA, 15 bp, Homo sapiens
tctacaaggcttacc

SEQ ID NO: 326711 - DNA, 15 bp, Homo sapiens
ttctacaaggcttac

SEQ ID NO: 326712 - DNA, 15 bp, Homo sapiens
tttctacaaggctta

SEQ ID NO: 326713 - DNA, 15 bp, Homo sapiens
ttttctacaaggctt

SEQ ID NO: 326714 - DNA, 15 bp, Homo sapiens
tttttctacaaggct

SEQ ID NO: 326715 - DNA, 15 bp, Homo sapiens
ttttttctacaaggc

SEQ ID NO: 326716 - DNA, 15 bp, Homo sapiens
cttttttctacaagg

SEQ ID NO: 326717 - DNA, 15 bp, Homo sapiens
acttttttctacaag

SEQ ID NO: 326718 - DNA, 15 bp, Homo sapiens
cacttttttctacaa

SEQ ID NO: 326719 - DNA, 15 bp, Homo sapiens
acacttttttctaca

SEQ ID NO: 326720 - DNA, 15 bp, Homo sapiens
gacacttttttctac

SEQ ID NO: 326721 - DNA, 15 bp, Homo sapiens
tgacacttttttcta

SEQ ID NO: 326722 - DNA, 15 bp, Homo sapiens
atgacacttttttct

SEQ ID NO: 326723 - DNA, 15 bp, Homo sapiens
gatgacacttttttc

SEQ ID NO: 326724 - DNA, 15 bp, Homo sapiens
ggatgacactttttt

SEQ ID NO: 326725 - DNA, 15 bp, Homo sapiens
aggatgacacttttt

SEQ ID NO: 326726 - DNA, 15 bp, Homo sapiens
gaggatgacactttt

SEQ ID NO: 326727 - DNA, 15 bp, Homo sapiens
tgaggatgacacttt

SEQ ID NO: 326728 - DNA, 15 bp, Homo sapiens
atgaggatgacactt

SEQ ID NO: 326729 - DNA, 15 bp, Homo sapiens
catgaggatgacact

SEQ ID NO: 326730 - DNA, 15 bp, Homo sapiens
ccatgaggatgacac

SEQ ID NO: 326731 - DNA, 15 bp, Homo sapiens
cccatgaggatgaca

SEQ ID NO: 326732 - DNA, 15 bp, Homo sapiens
ccccatgaggatgac

SEQ ID NO: 326733 - DNA, 15 bp, Homo sapiens
gccccatgaggatga

SEQ ID NO: 326734 - DNA, 15 bp, Homo sapiens
agccccatgaggatg

SEQ ID NO: 326735 - DNA, 15 bp, Homo sapiens
cagccccatgaggat

SEQ ID NO: 326736 - DNA, 15 bp, Homo sapiens
ccagccccatgagga

SEQ ID NO: 326737 - DNA, 15 bp, Homo sapiens
cccagccccatgagg

SEQ ID NO: 326738 - DNA, 15 bp, Homo sapiens
gcccagccccatgag

SEQ ID NO: 326739 - DNA, 15 bp, Homo sapiens
tgcccagccccatga

SEQ ID NO: 326740 - DNA, 15 bp, Homo sapiens
atgcccagccccatg

SEQ ID NO: 326741 - DNA, 15 bp, Homo sapiens
catgcccagccccat

SEQ ID NO: 326742 - DNA, 15 bp, Homo sapiens
acatgcccagcccca

SEQ ID NO: 326743 - DNA, 15 bp, Homo sapiens
cacatgcccagcccc

SEQ ID NO: 326744 - DNA, 15 bp, Homo sapiens
tcacatgcccagccc

SEQ ID NO: 326745 - DNA, 15 bp, Homo sapiens
ctcacatgcccagcc

SEQ ID NO: 326746 - DNA, 15 bp, Homo sapiens
cctcacatgcccagc

SEQ ID NO: 326747 - DNA, 15 bp, Homo sapiens
ccctcacatgcccag

SEQ ID NO: 326748 - DNA, 15 bp, Homo sapiens
cccctcacatgccca

SEQ ID NO: 326749 - DNA, 15 bp, Homo sapiens
acccctcacatgccc

SEQ ID NO: 326750 - DNA, 15 bp, Homo sapiens
tacccctcacatgcc

SEQ ID NO: 326751 - DNA, 15 bp, Homo sapiens
ctacccctcacatgc

SEQ ID NO: 326752 - DNA, 15 bp, Homo sapiens
cctacccctcacatg

SEQ ID NO: 326753 - DNA, 15 bp, Homo sapiens
ccctacccctcacat

SEQ ID NO: 326754 - DNA, 15 bp, Homo sapiens
accctacccctcaca

SEQ ID NO: 326755 - DNA, 15 bp, Homo sapiens
caccctacccctcac

SEQ ID NO: 326756 - DNA, 15 bp, Homo sapiens
ccaccctacccctca

SEQ ID NO: 326757 - DNA, 15 bp, Homo sapiens
cccaccctacccctc

SEQ ID NO: 326758 - DNA, 15 bp, Homo sapiens
ccccaccctacccct

SEQ ID NO: 326759 - DNA, 15 bp, Homo sapiens
cccccaccctacccc

SEQ ID NO: 326760 - DNA, 15 bp, Homo sapiens
acccccaccctaccc

SEQ ID NO: 326761 - DNA, 15 bp, Homo sapiens
aacccccaccctacc

SEQ ID NO: 326762 - DNA, 15 bp, Homo sapiens
caacccccaccctac

SEQ ID NO: 326763 - DNA, 15 bp, Homo sapiens
tcaacccccacccta

SEQ ID NO: 326764 - DNA, 15 bp, Homo sapiens
gtcaacccccaccct

SEQ ID NO: 326765 - DNA, 15 bp, Homo sapiens
agtcaacccccaccc

SEQ ID NO: 326766 - DNA, 15 bp, Homo sapiens
aagtcaacccccacc

SEQ ID NO: 326767 - DNA, 15 bp, Homo sapiens
gaagtcaacccccac

SEQ ID NO: 326768 - DNA, 15 bp, Homo sapiens
agaagtcaaccccca

SEQ ID NO: 326769 - DNA, 15 bp, Homo sapiens
tagaagtcaaccccc

SEQ ID NO: 326770 - DNA, 15 bp, Homo sapiens
ttagaagtcaacccc

SEQ ID NO: 326771 - DNA, 15 bp, Homo sapiens
attagaagtcaaccc

SEQ ID NO: 326772 - DNA, 15 bp, Homo sapiens
gattagaagtcaacc

SEQ ID NO: 326773 - DNA, 15 bp, Homo sapiens
tgattagaagtcaac

SEQ ID NO: 326774 - DNA, 15 bp, Homo sapiens
ttgattagaagtcaa

SEQ ID NO: 326775 - DNA, 15 bp, Homo sapiens
cttgattagaagtca

SEQ ID NO: 326776 - DNA, 15 bp, Homo sapiens
ccttgattagaagtc

SEQ ID NO: 326777 - DNA, 15 bp, Homo sapiens
tccttgattagaagt

SEQ ID NO: 326778 - DNA, 15 bp, Homo sapiens
ttccttgattagaag

SEQ ID NO: 326779 - DNA, 15 bp, Homo sapiens
cttccttgattagaa

SEQ ID NO: 326780 - DNA, 15 bp, Homo sapiens
tcttccttgattaga

SEQ ID NO: 326781 - DNA, 15 bp, Homo sapiens
atcttccttgattag

SEQ ID NO: 326782 - DNA, 15 bp, Homo sapiens
catcttccttgatta

SEQ ID NO: 326783 - DNA, 15 bp, Homo sapiens
gcatcttccttgatt

SEQ ID NO: 326784 - DNA, 15 bp, Homo sapiens
agcatcttccttgat

SEQ ID NO: 326785 - DNA, 15 bp, Homo sapiens
tagcatcttccttga

SEQ ID NO: 326786 - DNA, 15 bp, Homo sapiens
ttagcatcttccttg

SEQ ID NO: 326787 - DNA, 15 bp, Homo sapiens
gttagcatcttcctt

SEQ ID NO: 326788 - DNA, 15 bp, Homo sapiens
tgttagcatcttcct

SEQ ID NO: 326789 - DNA, 15 bp, Homo sapiens
ctgttagcatcttcc

SEQ ID NO: 326790 - DNA, 15 bp, Homo sapiens
gctgttagcatcttc

SEQ ID NO: 326791 - DNA, 15 bp, Homo sapiens
tgctgttagcatctt

SEQ ID NO: 326792 - DNA, 15 bp, Homo sapiens
gtgctgttagcatct

SEQ ID NO: 326793 - DNA, 15 bp, Homo sapiens
tgtgctgttagcatc

SEQ ID NO: 326794 - DNA, 15 bp, Homo sapiens
gtgtgctgttagcat

SEQ ID NO: 326795 - DNA, 15 bp, Homo sapiens
agtgtgctgttagca

SEQ ID NO: 326796 - DNA, 15 bp, Homo sapiens
cagtgtgctgttagc

SEQ ID NO: 326797 - DNA, 15 bp, Homo sapiens
ccagtgtgctgttag

SEQ ID NO: 326798 - DNA, 15 bp, Homo sapiens
accagtgtgctgtta

SEQ ID NO: 326799 - DNA, 15 bp, Homo sapiens
caccagtgtgctgtt

SEQ ID NO: 326800 - DNA, 15 bp, Homo sapiens
acaccagtgtgctgt

SEQ ID NO: 326801 - DNA, 15 bp, Homo sapiens
cacaccagtgtgctg

SEQ ID NO: 326802 - DNA, 15 bp, Homo sapiens
tcacaccagtgtgct

SEQ ID NO: 326803 - DNA, 15 bp, Homo sapiens
ctcacaccagtgtgc

SEQ ID NO: 326804 - DNA, 15 bp, Homo sapiens
tctcacaccagtgtg

SEQ ID NO: 326805 - DNA, 15 bp, Homo sapiens
ctctcacaccagtgt

SEQ ID NO: 326806 - DNA, 15 bp, Homo sapiens
gctctcacaccagtg

SEQ ID NO: 326807 - DNA, 15 bp, Homo sapiens
tgctctcacaccagt

SEQ ID NO: 326808 - DNA, 15 bp, Homo sapiens
atgctctcacaccag

SEQ ID NO: 326809 - DNA, 15 bp, Homo sapiens
tatgctctcacacca

SEQ ID NO: 326810 - DNA, 15 bp, Homo sapiens
ttatgctctcacacc

SEQ ID NO: 326811 - DNA, 15 bp, Homo sapiens
gttatgctctcacac

SEQ ID NO: 326812 - DNA, 15 bp, Homo sapiens
tgttatgctctcaca

SEQ ID NO: 326813 - DNA, 15 bp, Homo sapiens
gtgttatgctctcac

SEQ ID NO: 326814 - DNA, 15 bp, Homo sapiens
agtgttatgctctca

SEQ ID NO: 326815 - DNA, 15 bp, Homo sapiens
aagtgttatgctctc

SEQ ID NO: 326816 - DNA, 15 bp, Homo sapiens
caagtgttatgctct

SEQ ID NO: 326817 - DNA, 15 bp, Homo sapiens
ccaagtgttatgctc

SEQ ID NO: 326818 - DNA, 15 bp, Homo sapiens
cccaagtgttatgct

SEQ ID NO: 326819 - DNA, 15 bp, Homo sapiens
ccccaagtgttatgc

SEQ ID NO: 326820 - DNA, 15 bp, Homo sapiens
tccccaagtgttatg

SEQ ID NO: 326821 - DNA, 15 bp, Homo sapiens
ttccccaagtgttat

SEQ ID NO: 326822 - DNA, 15 bp, Homo sapiens
tttccccaagtgtta

SEQ ID NO: 326823 - DNA, 15 bp, Homo sapiens
gtttccccaagtgtt

SEQ ID NO: 326824 - DNA, 15 bp, Homo sapiens
agtttccccaagtgt

SEQ ID NO: 326825 - DNA, 15 bp, Homo sapiens
aagtttccccaagtg

SEQ ID NO: 326826 - DNA, 15 bp, Homo sapiens
aaagtttccccaagt

SEQ ID NO: 326827 - DNA, 15 bp, Homo sapiens
caaagtttccccaag

SEQ ID NO: 326828 - DNA, 15 bp, Homo sapiens
ccaaagtttccccaa

SEQ ID NO: 326829 - DNA, 15 bp, Homo sapiens
cccaaagtttcccca

SEQ ID NO: 326830 - DNA, 15 bp, Homo sapiens
acccaaagtttcccc

SEQ ID NO: 326831 - DNA, 15 bp, Homo sapiens
tacccaaagtttccc

SEQ ID NO: 326832 - DNA, 15 bp, Homo sapiens
ttacccaaagtttcc

SEQ ID NO: 326833 - DNA, 15 bp, Homo sapiens
attacccaaagtttc

SEQ ID NO: 326834 - DNA, 15 bp, Homo sapiens
aattacccaaagttt

SEQ ID NO: 326835 - DNA, 15 bp, Homo sapiens
gaattacccaaagtt

SEQ ID NO: 326836 - DNA, 15 bp, Homo sapiens
agaattacccaaagt

SEQ ID NO: 326837 - DNA, 15 bp, Homo sapiens
cagaattacccaaag

SEQ ID NO: 326838 - DNA, 15 bp, Homo sapiens
gcagaattacccaaa

SEQ ID NO: 326839 - DNA, 15 bp, Homo sapiens
tgcagaattacccaa

SEQ ID NO: 326840 - DNA, 15 bp, Homo sapiens
gtgcagaattaccca

SEQ ID NO: 326841 - DNA, 15 bp, Homo sapiens
agtgcagaattaccc

SEQ ID NO: 326842 - DNA, 15 bp, Homo sapiens
gagtgcagaattacc

SEQ ID NO: 326843 - DNA, 15 bp, Homo sapiens
ggagtgcagaattac

SEQ ID NO: 326844 - DNA, 15 bp, Homo sapiens
aggagtgcagaatta

SEQ ID NO: 326845 - DNA, 15 bp, Homo sapiens
caggagtgcagaatt

SEQ ID NO: 326846 - DNA, 15 bp, Homo sapiens
ccaggagtgcagaat

SEQ ID NO: 326847 - DNA, 15 bp, Homo sapiens
tccaggagtgcagaa

SEQ ID NO: 326848 - DNA, 15 bp, Homo sapiens
gtccaggagtgcaga

SEQ ID NO: 326849 - DNA, 15 bp, Homo sapiens
tgtccaggagtgcag

SEQ ID NO: 326850 - DNA, 15 bp, Homo sapiens
atgtccaggagtgca

SEQ ID NO: 326851 - DNA, 15 bp, Homo sapiens
aatgtccaggagtgc

SEQ ID NO: 326852 - DNA, 15 bp, Homo sapiens
taatgtccaggagtg

SEQ ID NO: 326853 - DNA, 15 bp, Homo sapiens
ttaatgtccaggagt

SEQ ID NO: 326854 - DNA, 15 bp, Homo sapiens
cttaatgtccaggag

SEQ ID NO: 326855 - DNA, 15 bp, Homo sapiens
gcttaatgtccagga

SEQ ID NO: 326856 - DNA, 15 bp, Homo sapiens
cgcttaatgtccagg

SEQ ID NO: 326857 - DNA, 15 bp, Homo sapiens
acgcttaatgtccag

SEQ ID NO: 326858 - DNA, 15 bp, Homo sapiens
aacgcttaatgtcca

SEQ ID NO: 326859 - DNA, 15 bp, Homo sapiens
gaacgcttaatgtcc

SEQ ID NO: 326860 - DNA, 15 bp, Homo sapiens
agaacgcttaatgtc

SEQ ID NO: 326861 - DNA, 15 bp, Homo sapiens
cagaacgcttaatgt

SEQ ID NO: 326862 - DNA, 15 bp, Homo sapiens
acagaacgcttaatg

SEQ ID NO: 326863 - DNA, 15 bp, Homo sapiens
cacagaacgcttaat

SEQ ID NO: 326864 - DNA, 15 bp, Homo sapiens
tcacagaacgcttaa

SEQ ID NO: 326865 - DNA, 15 bp, Homo sapiens
atcacagaacgctta

SEQ ID NO: 326866 - DNA, 15 bp, Homo sapiens
catcacagaacgctt

SEQ ID NO: 326867 - DNA, 15 bp, Homo sapiens
ccatcacagaacgct

SEQ ID NO: 326868 - DNA, 15 bp, Homo sapiens
tccatcacagaacgc

SEQ ID NO: 326869 - DNA, 15 bp, Homo sapiens
ttccatcacagaacg

SEQ ID NO: 326870 - DNA, 15 bp, Homo sapiens
tttccatcacagaac

SEQ ID NO: 326871 - DNA, 15 bp, Homo sapiens
ctttccatcacagaa

SEQ ID NO: 326872 - DNA, 15 bp, Homo sapiens
tctttccatcacaga

SEQ ID NO: 326873 - DNA, 15 bp, Homo sapiens
ctctttccatcacag

SEQ ID NO: 326874 - DNA, 15 bp, Homo sapiens
cctctttccatcaca

SEQ ID NO: 326875 - DNA, 15 bp, Homo sapiens
tcctctttccatcac

SEQ ID NO: 326876 - DNA, 15 bp, Homo sapiens
ctcctctttccatca

SEQ ID NO: 326877 - DNA, 15 bp, Homo sapiens
cctcctctttccatc

SEQ ID NO: 326878 - DNA, 15 bp, Homo sapiens
tcctcctctttccat

SEQ ID NO: 326879 - DNA, 15 bp, Homo sapiens
atcctcctctttcca

SEQ ID NO: 326880 - DNA, 15 bp, Homo sapiens
catcctcctctttcc

SEQ ID NO: 326881 - DNA, 15 bp, Homo sapiens
tcatcctcctctttc

SEQ ID NO: 326882 - DNA, 15 bp, Homo sapiens
ctcatcctcctcttt

SEQ ID NO: 326883 - DNA, 15 bp, Homo sapiens
cctcatcctcctctt

SEQ ID NO: 326884 - DNA, 15 bp, Homo sapiens
acctcatcctcctct

SEQ ID NO: 326885 - DNA, 15 bp, Homo sapiens
aacctcatcctcctc

SEQ ID NO: 326886 - DNA, 15 bp, Homo sapiens
taacctcatcctcct

SEQ ID NO: 326887 - DNA, 15 bp, Homo sapiens
ttaacctcatcctcc

SEQ ID NO: 326888 - DNA, 15 bp, Homo sapiens
cttaacctcatcctc

SEQ ID NO: 326889 - DNA, 15 bp, Homo sapiens
tcttaacctcatcct

SEQ ID NO: 326890 - DNA, 15 bp, Homo sapiens
ctcttaacctcatcc

SEQ ID NO: 326891 - DNA, 15 bp, Homo sapiens
cctcttaacctcatc

SEQ ID NO: 326892 - DNA, 15 bp, Homo sapiens
ccctcttaacctcat

SEQ ID NO: 326893 - DNA, 15 bp, Homo sapiens
accctcttaacctca

SEQ ID NO: 326894 - DNA, 15 bp, Homo sapiens
taccctcttaacctc

SEQ ID NO: 326895 - DNA, 15 bp, Homo sapiens
ctaccctcttaacct

SEQ ID NO: 326896 - DNA, 15 bp, Homo sapiens
cctaccctcttaacc

SEQ ID NO: 326897 - DNA, 15 bp, Homo sapiens
tcctaccctcttaac

SEQ ID NO: 326898 - DNA, 15 bp, Homo sapiens
ttcctaccctcttaa

SEQ ID NO: 326899 - DNA, 15 bp, Homo sapiens
tttcctaccctctta

SEQ ID NO: 326900 - DNA, 15 bp, Homo sapiens
ctttcctaccctctt

SEQ ID NO: 326901 - DNA, 15 bp, Homo sapiens
cctttcctaccctct

SEQ ID NO: 326902 - DNA, 15 bp, Homo sapiens
gcctttcctaccctc

SEQ ID NO: 326903 - DNA, 15 bp, Homo sapiens
ggcctttcctaccct

SEQ ID NO: 326904 - DNA, 15 bp, Homo sapiens
tggcctttcctaccc

SEQ ID NO: 326905 - DNA, 15 bp, Homo sapiens
ctggcctttcctacc

SEQ ID NO: 326906 - DNA, 15 bp, Homo sapiens
cctggcctttcctac

SEQ ID NO: 326907 - DNA, 15 bp, Homo sapiens
acctggcctttccta

SEQ ID NO: 326908 - DNA, 15 bp, Homo sapiens
gacctggcctttcct

SEQ ID NO: 326909 - DNA, 15 bp, Homo sapiens
tgacctggcctttcc

SEQ ID NO: 326910 - DNA, 15 bp, Homo sapiens
gtgacctggcctttc

SEQ ID NO: 326911 - DNA, 15 bp, Homo sapiens
ggtgacctggccttt

SEQ ID NO: 326912 - DNA, 15 bp, Homo sapiens
tggtgacctggcctt

SEQ ID NO: 326913 - DNA, 15 bp, Homo sapiens
ctggtgacctggcct

SEQ ID NO: 326914 - DNA, 15 bp, Homo sapiens
cctggtgacctggcc

SEQ ID NO: 326915 - DNA, 15 bp, Homo sapiens
gcctggtgacctggc

SEQ ID NO: 326916 - DNA, 15 bp, Homo sapiens
tgcctggtgacctgg

SEQ ID NO: 326917 - DNA, 15 bp, Homo sapiens
gtgcctggtgacctg

SEQ ID NO: 326918 - DNA, 15 bp, Homo sapiens
tgtgcctggtgacct

SEQ ID NO: 326919 - DNA, 15 bp, Homo sapiens
ctgtgcctggtgacc

SEQ ID NO: 326920 - DNA, 15 bp, Homo sapiens
tctgtgcctggtgac

SEQ ID NO: 326921 - DNA, 15 bp, Homo sapiens
ttctgtgcctggtga

SEQ ID NO: 326922 - DNA, 15 bp, Homo sapiens
cttctgtgcctggtg

SEQ ID NO: 326923 - DNA, 15 bp, Homo sapiens
gcttctgtgcctggt

SEQ ID NO: 326924 - DNA, 15 bp, Homo sapiens
tgcttctgtgcctgg

SEQ ID NO: 326925 - DNA, 15 bp, Homo sapiens
ttgcttctgtgcctg

SEQ ID NO: 326926 - DNA, 15 bp, Homo sapiens
tttgcttctgtgcct

SEQ ID NO: 326927 - DNA, 15 bp, Homo sapiens
gtttgcttctgtgcc

SEQ ID NO: 326928 - DNA, 15 bp, Homo sapiens
cgtttgcttctgtgc

SEQ ID NO: 326929 - DNA, 15 bp, Homo sapiens
acgtttgcttctgtg

SEQ ID NO: 326930 - DNA, 15 bp, Homo sapiens
gacgtttgcttctgt

SEQ ID NO: 326931 - DNA, 15 bp, Homo sapiens
tgacgtttgcttctg

SEQ ID NO: 326932 - DNA, 15 bp, Homo sapiens
atgacgtttgcttct

SEQ ID NO: 326933 - DNA, 15 bp, Homo sapiens
catgacgtttgcttc

SEQ ID NO: 326934 - DNA, 15 bp, Homo sapiens
acatgacgtttgctt

SEQ ID NO: 326935 - DNA, 15 bp, Homo sapiens
tacatgacgtttgct

SEQ ID NO: 326936 - DNA, 15 bp, Homo sapiens
ttacatgacgtttgc

SEQ ID NO: 326937 - DNA, 15 bp, Homo sapiens
attacatgacgtttg

SEQ ID NO: 326938 - DNA, 15 bp, Homo sapiens
aattacatgacgttt

SEQ ID NO: 326939 - DNA, 15 bp, Homo sapiens
caattacatgacgtt

SEQ ID NO: 326940 - DNA, 15 bp, Homo sapiens
acaattacatgacgt

SEQ ID NO: 326941 - DNA, 15 bp, Homo sapiens
tacaattacatgacg

SEQ ID NO: 326942 - DNA, 15 bp, Homo sapiens
ttacaattacatgac

SEQ ID NO: 326943 - DNA, 15 bp, Homo sapiens
cttacaattacatga

SEQ ID NO: 326944 - DNA, 15 bp, Homo sapiens
tcttacaattacatg

SEQ ID NO: 326945 - DNA, 15 bp, Homo sapiens
ttcttacaattacat

SEQ ID NO: 326946 - DNA, 15 bp, Homo sapiens
tttcttacaattaca

SEQ ID NO: 326947 - DNA, 15 bp, Homo sapiens
atttcttacaattac

SEQ ID NO: 326948 - DNA, 15 bp, Homo sapiens
gatttcttacaatta

SEQ ID NO: 326949 - DNA, 15 bp, Homo sapiens
agatttcttacaatt

SEQ ID NO: 326950 - DNA, 15 bp, Homo sapiens
tagatttcttacaat

SEQ ID NO: 326951 - DNA, 15 bp, Homo sapiens
ctagatttcttacaa

SEQ ID NO: 326952 - DNA, 15 bp, Homo sapiens
tctagatttcttaca

SEQ ID NO: 326953 - DNA, 15 bp, Homo sapiens
ttctagatttcttac

SEQ ID NO: 326954 - DNA, 15 bp, Homo sapiens
cttctagatttctta

SEQ ID NO: 326955 - DNA, 15 bp, Homo sapiens
gcttctagatttctt

SEQ ID NO: 326956 - DNA, 15 bp, Homo sapiens
agcttctagatttct

SEQ ID NO: 326957 - DNA, 15 bp, Homo sapiens
aagcttctagatttc

SEQ ID NO: 326958 - DNA, 15 bp, Homo sapiens
aaagcttctagattt

SEQ ID NO: 326959 - DNA, 15 bp, Homo sapiens
taaagcttctagatt

SEQ ID NO: 326960 - DNA, 15 bp, Homo sapiens
ctaaagcttctagat

SEQ ID NO: 326961 - DNA, 15 bp, Homo sapiens
cctaaagcttctaga

SEQ ID NO: 326962 - DNA, 15 bp, Homo sapiens
tcctaaagcttctag

SEQ ID NO: 326963 - DNA, 15 bp, Homo sapiens
gtcctaaagcttcta

SEQ ID NO: 326964 - DNA, 15 bp, Homo sapiens
tgtcctaaagcttct

SEQ ID NO: 326965 - DNA, 15 bp, Homo sapiens
ttgtcctaaagcttc

SEQ ID NO: 326966 - DNA, 15 bp, Homo sapiens
gttgtcctaaagctt

SEQ ID NO: 326967 - DNA, 15 bp, Homo sapiens
agttgtcctaaagct

SEQ ID NO: 326968 - DNA, 15 bp, Homo sapiens
gagttgtcctaaagc

SEQ ID NO: 326969 - DNA, 15 bp, Homo sapiens
agagttgtcctaaag

SEQ ID NO: 326970 - DNA, 15 bp, Homo sapiens
gagagttgtcctaaa

SEQ ID NO: 326971 - DNA, 15 bp, Homo sapiens
agagagttgtcctaa

SEQ ID NO: 326972 - DNA, 15 bp, Homo sapiens
cagagagttgtccta

SEQ ID NO: 326973 - DNA, 15 bp, Homo sapiens
tcagagagttgtcct

SEQ ID NO: 326974 - DNA, 15 bp, Homo sapiens
ctcagagagttgtcc

SEQ ID NO: 326975 - DNA, 15 bp, Homo sapiens
cctcagagagttgtc

SEQ ID NO: 326976 - DNA, 15 bp, Homo sapiens
gcctcagagagttgt

SEQ ID NO: 326977 - DNA, 15 bp, Homo sapiens
ggcctcagagagttg

SEQ ID NO: 326978 - DNA, 15 bp, Homo sapiens
tggcctcagagagtt

SEQ ID NO: 326979 - DNA, 15 bp, Homo sapiens
atggcctcagagagt

SEQ ID NO: 326980 - DNA, 15 bp, Homo sapiens
aatggcctcagagag

SEQ ID NO: 326981 - DNA, 15 bp, Homo sapiens
gaatggcctcagaga

SEQ ID NO: 326982 - DNA, 15 bp, Homo sapiens
agaatggcctcagag

SEQ ID NO: 326983 - DNA, 15 bp, Homo sapiens
gagaatggcctcaga

SEQ ID NO: 326984 - DNA, 15 bp, Homo sapiens
agagaatggcctcag

SEQ ID NO: 326985 - DNA, 15 bp, Homo sapiens
gagagaatggcctca

SEQ ID NO: 326986 - DNA, 15 bp, Homo sapiens
agagagaatggcctc

SEQ ID NO: 326987 - DNA, 15 bp, Homo sapiens
gagagagaatggcct

SEQ ID NO: 326988 - DNA, 15 bp, Homo sapiens
ggagagagaatggcc

SEQ ID NO: 326989 - DNA, 15 bp, Homo sapiens
tggagagagaatggc

SEQ ID NO: 326990 - DNA, 15 bp, Homo sapiens
ctggagagagaatgg

SEQ ID NO: 326991 - DNA, 15 bp, Homo sapiens
cctggagagagaatg

SEQ ID NO: 326992 - DNA, 15 bp, Homo sapiens
acctggagagagaat

SEQ ID NO: 326993 - DNA, 15 bp, Homo sapiens
cacctggagagagaa

SEQ ID NO: 326994 - DNA, 15 bp, Homo sapiens
gcacctggagagaga

SEQ ID NO: 326995 - DNA, 15 bp, Homo sapiens
ggcacctggagagag

SEQ ID NO: 326996 - DNA, 15 bp, Homo sapiens
tggcacctggagaga

SEQ ID NO: 326997 - DNA, 15 bp, Homo sapiens
ctggcacctggagag

SEQ ID NO: 326998 - DNA, 15 bp, Homo sapiens
gctggcacctggaga

SEQ ID NO: 326999 - DNA, 15 bp, Homo sapiens
ggctggcacctggag

SEQ ID NO: 327000 - DNA, 15 bp, Homo sapiens
aggctggcacctgga

SEQ ID NO: 327001 - DNA, 15 bp, Homo sapiens
caggctggcacctgg

SEQ ID NO: 327002 - DNA, 15 bp, Homo sapiens
ccaggctggcacctg

SEQ ID NO: 327003 - DNA, 15 bp, Homo sapiens
gccaggctggcacct

SEQ ID NO: 327004 - DNA, 15 bp, Homo sapiens
agccaggctggcacc

SEQ ID NO: 327005 - DNA, 15 bp, Homo sapiens
tagccaggctggcac

SEQ ID NO: 327006 - DNA, 15 bp, Homo sapiens
ttagccaggctggca

SEQ ID NO: 327007 - DNA, 15 bp, Homo sapiens
attagccaggctggc

SEQ ID NO: 327008 - DNA, 15 bp, Homo sapiens
gattagccaggctgg

SEQ ID NO: 327009 - DNA, 15 bp, Homo sapiens
agattagccaggctg

SEQ ID NO: 327010 - DNA, 15 bp, Homo sapiens
aagattagccaggct

SEQ ID NO: 327011 - DNA, 15 bp, Homo sapiens
caagattagccaggc

SEQ ID NO: 327012 - DNA, 15 bp, Homo sapiens
ccaagattagccagg

SEQ ID NO: 327013 - DNA, 15 bp, Homo sapiens
gccaagattagccag

SEQ ID NO: 327014 - DNA, 15 bp, Homo sapiens
agccaagattagcca

SEQ ID NO: 327015 - DNA, 15 bp, Homo sapiens
gagccaagattagcc

SEQ ID NO: 327016 - DNA, 15 bp, Homo sapiens
ggagccaagattagc

SEQ ID NO: 327017 - DNA, 15 bp, Homo sapiens
aggagccaagattag

SEQ ID NO: 327018 - DNA, 15 bp, Homo sapiens
aaggagccaagatta

SEQ ID NO: 327019 - DNA, 15 bp, Homo sapiens
gaaggagccaagatt

SEQ ID NO: 327020 - DNA, 15 bp, Homo sapiens
ggaaggagccaagat

SEQ ID NO: 327021 - DNA, 15 bp, Homo sapiens
aggaaggagccaaga

SEQ ID NO: 327022 - DNA, 15 bp, Homo sapiens
aaggaaggagccaag

SEQ ID NO: 327023 - DNA, 15 bp, Homo sapiens
aaaggaaggagccaa

SEQ ID NO: 327024 - DNA, 15 bp, Homo sapiens
aaaaggaaggagcca

SEQ ID NO: 327025 - DNA, 15 bp, Homo sapiens
caaaaggaaggagcc

SEQ ID NO: 327026 - DNA, 15 bp, Homo sapiens
cccaaaaggaaggag

SEQ ID NO: 327027 - DNA, 15 bp, Homo sapiens
gcccaaaaggaagga

SEQ ID NO: 327028 - DNA, 15 bp, Homo sapiens
tgcccaaaaggaagg

SEQ ID NO: 327029 - DNA, 15 bp, Homo sapiens
atgcccaaaaggaag

SEQ ID NO: 327030 - DNA, 15 bp, Homo sapiens
gatgcccaaaaggaa

SEQ ID NO: 327031 - DNA, 15 bp, Homo sapiens
ggatgcccaaaagga

SEQ ID NO: 327032 - DNA, 15 bp, Homo sapiens
gggatgcccaaaagg

SEQ ID NO: 327033 - DNA, 15 bp, Homo sapiens
ggggatgcccaaaag

SEQ ID NO: 327034 - DNA, 15 bp, Homo sapiens
tggggatgcccaaaa

SEQ ID NO: 327035 - DNA, 15 bp, Homo sapiens
ttggggatgcccaaa

SEQ ID NO: 327036 - DNA, 15 bp, Homo sapiens
cttggggatgcccaa

SEQ ID NO: 327037 - DNA, 15 bp, Homo sapiens
acttggggatgccca

SEQ ID NO: 327038 - DNA, 15 bp, Homo sapiens
cacttggggatgccc

SEQ ID NO: 327039 - DNA, 15 bp, Homo sapiens
acacttggggatgcc

SEQ ID NO: 327040 - DNA, 15 bp, Homo sapiens
cacacttggggatgc

SEQ ID NO: 327041 - DNA, 15 bp, Homo sapiens
ccacacttggggatg

SEQ ID NO: 327042 - DNA, 15 bp, Homo sapiens
tccacacttggggat

SEQ ID NO: 327043 - DNA, 15 bp, Homo sapiens
atccacacttgggga

SEQ ID NO: 327044 - DNA, 15 bp, Homo sapiens
gatccacacttgggg

SEQ ID NO: 327045 - DNA, 15 bp, Homo sapiens
ggatccacacttggg

SEQ ID NO: 327046 - DNA, 15 bp, Homo sapiens
gggatccacacttgg

SEQ ID NO: 327047 - DNA, 15 bp, Homo sapiens
tgggatccacacttg

SEQ ID NO: 327048 - DNA, 15 bp, Homo sapiens
ttgggatccacactt

SEQ ID NO: 327049 - DNA, 15 bp, Homo sapiens
tttgggatccacact

SEQ ID NO: 327050 - DNA, 15 bp, Homo sapiens
ctttgggatccacac

SEQ ID NO: 327051 - DNA, 15 bp, Homo sapiens
actttgggatccaca

SEQ ID NO: 327052 - DNA, 15 bp, Homo sapiens
aactttgggatccac

SEQ ID NO: 327053 - DNA, 15 bp, Homo sapiens
gaactttgggatcca

SEQ ID NO: 327054 - DNA, 15 bp, Homo sapiens
agaactttgggatcc

SEQ ID NO: 327055 - DNA, 15 bp, Homo sapiens
cagaactttgggatc

SEQ ID NO: 327056 - DNA, 15 bp, Homo sapiens
acagaactttgggat

SEQ ID NO: 327057 - DNA, 15 bp, Homo sapiens
gacagaactttggga

SEQ ID NO: 327058 - DNA, 15 bp, Homo sapiens
ggacagaactttggg

SEQ ID NO: 327059 - DNA, 15 bp, Homo sapiens
gggacagaactttgg

SEQ ID NO: 327060 - DNA, 15 bp, Homo sapiens
tgggacagaactttg

SEQ ID NO: 327061 - DNA, 15 bp, Homo sapiens
ctgggacagaacttt

SEQ ID NO: 327062 - DNA, 15 bp, Homo sapiens
tctgggacagaactt

SEQ ID NO: 327063 - DNA, 15 bp, Homo sapiens
ctctgggacagaact

SEQ ID NO: 327064 - DNA, 15 bp, Homo sapiens
tctctgggacagaac

SEQ ID NO: 327065 - DNA, 15 bp, Homo sapiens
ttctctgggacagaa

SEQ ID NO: 327066 - DNA, 15 bp, Homo sapiens
tttctctgggacaga

SEQ ID NO: 327067 - DNA, 15 bp, Homo sapiens
ctttctctgggacag

SEQ ID NO: 327068 - DNA, 15 bp, Homo sapiens
actttctctgggaca

SEQ ID NO: 327069 - DNA, 15 bp, Homo sapiens
cactttctctgggac

SEQ ID NO: 327070 - DNA, 15 bp, Homo sapiens
gcactttctctggga

SEQ ID NO: 327071 - DNA, 15 bp, Homo sapiens
tgcactttctctggg

SEQ ID NO: 327072 - DNA, 15 bp, Homo sapiens
ctgcactttctctgg

SEQ ID NO: 327073 - DNA, 15 bp, Homo sapiens
gctgcactttctctg

SEQ ID NO: 327074 - DNA, 15 bp, Homo sapiens
ggctgcactttctct

SEQ ID NO: 327075 - DNA, 15 bp, Homo sapiens
aggctgcactttctc

SEQ ID NO: 327076 - DNA, 15 bp, Homo sapiens
aaggctgcactttct

SEQ ID NO: 327077 - DNA, 15 bp, Homo sapiens
caaggctgcactttc

SEQ ID NO: 327078 - DNA, 15 bp, Homo sapiens
ccaaggctgcacttt

SEQ ID NO: 327079 - DNA, 15 bp, Homo sapiens
gccaaggctgcactt

SEQ ID NO: 327080 - DNA, 15 bp, Homo sapiens
agccaaggctgcact

SEQ ID NO: 327081 - DNA, 15 bp, Homo sapiens
aagccaaggctgcac

SEQ ID NO: 327082 - DNA, 15 bp, Homo sapiens
aaagccaaggctgca

SEQ ID NO: 327083 - DNA, 15 bp, Homo sapiens
aaaagccaaggctgc

SEQ ID NO: 327084 - DNA, 15 bp, Homo sapiens
caaaagccaaggctg

SEQ ID NO: 327085 - DNA, 15 bp, Homo sapiens
acaaaagccaaggct

SEQ ID NO: 327086 - DNA, 15 bp, Homo sapiens
tacaaaagccaaggc

SEQ ID NO: 327087 - DNA, 15 bp, Homo sapiens
ctacaaaagccaagg

SEQ ID NO: 327088 - DNA, 15 bp, Homo sapiens
cctacaaaagccaag

SEQ ID NO: 327089 - DNA, 15 bp, Homo sapiens
ccctacaaaagccaa

SEQ ID NO: 327090 - DNA, 15 bp, Homo sapiens
accctacaaaagcca

SEQ ID NO: 327091 - DNA, 15 bp, Homo sapiens
aaccctacaaaagcc

SEQ ID NO: 327092 - DNA, 15 bp, Homo sapiens
aaaccctacaaaagc

SEQ ID NO: 327093 - DNA, 15 bp, Homo sapiens
aaaaccctacaaaag

SEQ ID NO: 327094 - DNA, 15 bp, Homo sapiens
caaaaccctacaaaa

SEQ ID NO: 327095 - DNA, 15 bp, Homo sapiens
ccaaaaccctacaaa

SEQ ID NO: 327096 - DNA, 15 bp, Homo sapiens
tccaaaaccctacaa

SEQ ID NO: 327097 - DNA, 15 bp, Homo sapiens
gtccaaaaccctaca

SEQ ID NO: 327098 - DNA, 15 bp, Homo sapiens
agtccaaaaccctac

SEQ ID NO: 327099 - DNA, 15 bp, Homo sapiens
aagtccaaaacccta

SEQ ID NO: 327100 - DNA, 15 bp, Homo sapiens
aaagtccaaaaccct

SEQ ID NO: 327101 - DNA, 15 bp, Homo sapiens
aaaagtccaaaaccc

SEQ ID NO: 327102 - DNA, 15 bp, Homo sapiens
caaaagtccaaaacc

SEQ ID NO: 327103 - DNA, 15 bp, Homo sapiens
tcaaaagtccaaaac

SEQ ID NO: 327104 - DNA, 15 bp, Homo sapiens
ctcaaaagtccaaaa

SEQ ID NO: 327105 - DNA, 15 bp, Homo sapiens
gctcaaaagtccaaa

SEQ ID NO: 327106 - DNA, 15 bp, Homo sapiens
cgctcaaaagtccaa

SEQ ID NO: 327107 - DNA, 15 bp, Homo sapiens
tcgctcaaaagtcca

SEQ ID NO: 327108 - DNA, 15 bp, Homo sapiens
atcgctcaaaagtcc

SEQ ID NO: 327109 - DNA, 15 bp, Homo sapiens
aatcgctcaaaagtc

SEQ ID NO: 327110 - DNA, 15 bp, Homo sapiens
gaatcgctcaaaagt

SEQ ID NO: 327111 - DNA, 15 bp, Homo sapiens
agaatcgctcaaaag

SEQ ID NO: 327112 - DNA, 15 bp, Homo sapiens
gagaatcgctcaaaa

SEQ ID NO: 327113 - DNA, 15 bp, Homo sapiens
ggagaatcgctcaaa

SEQ ID NO: 327114 - DNA, 15 bp, Homo sapiens
aggagaatcgctcaa

SEQ ID NO: 327115 - DNA, 15 bp, Homo sapiens
caggagaatcgctca

SEQ ID NO: 327116 - DNA, 15 bp, Homo sapiens
acaggagaatcgctc

SEQ ID NO: 327117 - DNA, 15 bp, Homo sapiens
cacaggagaatcgct

SEQ ID NO: 327118 - DNA, 15 bp, Homo sapiens
tcacaggagaatcgc

SEQ ID NO: 327119 - DNA, 15 bp, Homo sapiens
gtcacaggagaatcg

SEQ ID NO: 327120 - DNA, 15 bp, Homo sapiens
agtcacaggagaatc

SEQ ID NO: 327121 - DNA, 15 bp, Homo sapiens
gagtcacaggagaat

SEQ ID NO: 327122 - DNA, 15 bp, Homo sapiens
agagtcacaggagaa

SEQ ID NO: 327123 - DNA, 15 bp, Homo sapiens
aagagtcacaggaga

SEQ ID NO: 327124 - DNA, 15 bp, Homo sapiens
gaagagtcacaggag

SEQ ID NO: 327125 - DNA, 15 bp, Homo sapiens
ggaagagtcacagga

SEQ ID NO: 327126 - DNA, 15 bp, Homo sapiens
tggaagagtcacagg

SEQ ID NO: 327127 - DNA, 15 bp, Homo sapiens
atggaagagtcacag

SEQ ID NO: 327128 - DNA, 15 bp, Homo sapiens
tatggaagagtcaca

SEQ ID NO: 327129 - DNA, 15 bp, Homo sapiens
gtatggaagagtcac

SEQ ID NO: 327130 - DNA, 15 bp, Homo sapiens
agtatggaagagtca

SEQ ID NO: 327131 - DNA, 15 bp, Homo sapiens
gagtatggaagagtc

SEQ ID NO: 327132 - DNA, 15 bp, Homo sapiens
agagtatggaagagt

SEQ ID NO: 327133 - DNA, 15 bp, Homo sapiens
cagagtatggaagag

SEQ ID NO: 327134 - DNA, 15 bp, Homo sapiens
gcagagtatggaaga

SEQ ID NO: 327135 - DNA, 15 bp, Homo sapiens
agcagagtatggaag

SEQ ID NO: 327136 - DNA, 15 bp, Homo sapiens
cagcagagtatggaa

SEQ ID NO: 327137 - DNA, 15 bp, Homo sapiens
gcagcagagtatgga

SEQ ID NO: 327138 - DNA, 15 bp, Homo sapiens
agcagcagagtatgg

SEQ ID NO: 327139 - DNA, 15 bp, Homo sapiens
aagcagcagagtatg

SEQ ID NO: 327140 - DNA, 15 bp, Homo sapiens
aaagcagcagagtat

SEQ ID NO: 327141 - DNA, 15 bp, Homo sapiens
gaaagcagcagagta

SEQ ID NO: 327142 - DNA, 15 bp, Homo sapiens
tgaaagcagcagagt

SEQ ID NO: 327143 - DNA, 15 bp, Homo sapiens
atgaaagcagcagag

SEQ ID NO: 327144 - DNA, 15 bp, Homo sapiens
tatgaaagcagcaga

SEQ ID NO: 327145 - DNA, 15 bp, Homo sapiens
ctatgaaagcagcag

SEQ ID NO: 327146 - DNA, 15 bp, Homo sapiens
gctatgaaagcagca

SEQ ID NO: 327147 - DNA, 15 bp, Homo sapiens
cgctatgaaagcagc

SEQ ID NO: 327148 - DNA, 15 bp, Homo sapiens
ccgctatgaaagcag

SEQ ID NO: 327149 - DNA, 15 bp, Homo sapiens
accgctatgaaagca

SEQ ID NO: 327150 - DNA, 15 bp, Homo sapiens
gaccgctatgaaagc

SEQ ID NO: 327151 - DNA, 15 bp, Homo sapiens
ggaccgctatgaaag

SEQ ID NO: 327152 - DNA, 15 bp, Homo sapiens
aggaccgctatgaaa

SEQ ID NO: 327153 - DNA, 15 bp, Homo sapiens
aaggaccgctatgaa

SEQ ID NO: 327154 - DNA, 15 bp, Homo sapiens
gaaggaccgctatga

SEQ ID NO: 327155 - DNA, 15 bp, Homo sapiens
ggaaggaccgctatg

SEQ ID NO: 327156 - DNA, 15 bp, Homo sapiens
tggaaggaccgctat

SEQ ID NO: 327157 - DNA, 15 bp, Homo sapiens
ctggaaggaccgcta

SEQ ID NO: 327158 - DNA, 15 bp, Homo sapiens
tctggaaggaccgct

SEQ ID NO: 327159 - DNA, 15 bp, Homo sapiens
ttctggaaggaccgc

SEQ ID NO: 327160 - DNA, 15 bp, Homo sapiens
cttctggaaggaccg

SEQ ID NO: 327161 - DNA, 15 bp, Homo sapiens
ccttctggaaggacc

SEQ ID NO: 327162 - DNA, 15 bp, Homo sapiens
cccttctggaaggac

SEQ ID NO: 327163 - DNA, 15 bp, Homo sapiens
acccttctggaagga

SEQ ID NO: 327164 - DNA, 15 bp, Homo sapiens
cacccttctggaagg

SEQ ID NO: 327165 - DNA, 15 bp, Homo sapiens
ccacccttctggaag

SEQ ID NO: 327166 - DNA, 15 bp, Homo sapiens
cccacccttctggaa

SEQ ID NO: 327167 - DNA, 15 bp, Homo sapiens
acccacccttctgga

SEQ ID NO: 327168 - DNA, 15 bp, Homo sapiens
aacccacccttctgg

SEQ ID NO: 327169 - DNA, 15 bp, Homo sapiens
caacccacccttctg

SEQ ID NO: 327170 - DNA, 15 bp, Homo sapiens
ccaacccacccttct

SEQ ID NO: 327171 - DNA, 15 bp, Homo sapiens
cccaacccacccttc

SEQ ID NO: 327172 - DNA, 15 bp, Homo sapiens
ccccaacccaccctt

SEQ ID NO: 327173 - DNA, 15 bp, Homo sapiens
cccccaacccaccct

SEQ ID NO: 327174 - DNA, 15 bp, Homo sapiens
tcccccaacccaccc

SEQ ID NO: 327175 - DNA, 15 bp, Homo sapiens
gtcccccaacccacc

SEQ ID NO: 327176 - DNA, 15 bp, Homo sapiens
ggtcccccaacccac

SEQ ID NO: 327177 - DNA, 15 bp, Homo sapiens
gggtcccccaaccca

SEQ ID NO: 327178 - DNA, 15 bp, Homo sapiens
tgggtcccccaaccc

SEQ ID NO: 327179 - DNA, 15 bp, Homo sapiens
atgggtcccccaacc

SEQ ID NO: 327180 - DNA, 15 bp, Homo sapiens
catgggtcccccaac

SEQ ID NO: 327181 - DNA, 15 bp, Homo sapiens
acatgggtcccccaa

SEQ ID NO: 327182 - DNA, 15 bp, Homo sapiens
tacatgggtccccca

SEQ ID NO: 327183 - DNA, 15 bp, Homo sapiens
ttacatgggtccccc

SEQ ID NO: 327184 - DNA, 15 bp, Homo sapiens
attacatgggtcccc

SEQ ID NO: 327185 - DNA, 15 bp, Homo sapiens
gattacatgggtccc

SEQ ID NO: 327186 - DNA, 15 bp, Homo sapiens
cgattacatgggtcc

SEQ ID NO: 327187 - DNA, 15 bp, Homo sapiens
acgattacatgggtc

SEQ ID NO: 327188 - DNA, 15 bp, Homo sapiens
gacgattacatgggt

SEQ ID NO: 327189 - DNA, 15 bp, Homo sapiens
agacgattacatggg

SEQ ID NO: 327190 - DNA, 15 bp, Homo sapiens
aagacgattacatgg

SEQ ID NO: 327191 - DNA, 15 bp, Homo sapiens
aaagacgattacatg

SEQ ID NO: 327192 - DNA, 15 bp, Homo sapiens
taaagacgattacat

SEQ ID NO: 327193 - DNA, 15 bp, Homo sapiens
ctaaagacgattaca

SEQ ID NO: 327194 - DNA, 15 bp, Homo sapiens
cctaaagacgattac

SEQ ID NO: 327195 - DNA, 15 bp, Homo sapiens
ccctaaagacgatta

SEQ ID NO: 327196 - DNA, 15 bp, Homo sapiens
tccctaaagacgatt

SEQ ID NO: 327197 - DNA, 15 bp, Homo sapiens
ctccctaaagacgat

SEQ ID NO: 327198 - DNA, 15 bp, Homo sapiens
tctccctaaagacga

SEQ ID NO: 327199 - DNA, 15 bp, Homo sapiens
atctccctaaagacg

SEQ ID NO: 327200 - DNA, 15 bp, Homo sapiens
aatctccctaaagac

SEQ ID NO: 327201 - DNA, 15 bp, Homo sapiens
aaatctccctaaaga

SEQ ID NO: 327202 - DNA, 15 bp, Homo sapiens
aaaatctccctaaag

SEQ ID NO: 327203 - DNA, 15 bp, Homo sapiens
caaaatctccctaaa

SEQ ID NO: 327204 - DNA, 15 bp, Homo sapiens
acaaaatctccctaa

SEQ ID NO: 327205 - DNA, 15 bp, Homo sapiens
gacaaaatctcccta

SEQ ID NO: 327206 - DNA, 15 bp, Homo sapiens
agacaaaatctccct

SEQ ID NO: 327207 - DNA, 15 bp, Homo sapiens
cagacaaaatctccc

SEQ ID NO: 327208 - DNA, 15 bp, Homo sapiens
ccagacaaaatctcc

SEQ ID NO: 327209 - DNA, 15 bp, Homo sapiens
gccagacaaaatctc

SEQ ID NO: 327210 - DNA, 15 bp, Homo sapiens
agccagacaaaatct

SEQ ID NO: 327211 - DNA, 15 bp, Homo sapiens
gagccagacaaaatc

SEQ ID NO: 327212 - DNA, 15 bp, Homo sapiens
agagccagacaaaat

SEQ ID NO: 327213 - DNA, 15 bp, Homo sapiens
gagagccagacaaaa

SEQ ID NO: 327214 - DNA, 15 bp, Homo sapiens
agagagccagacaaa

SEQ ID NO: 327215 - DNA, 15 bp, Homo sapiens
aagagagccagacaa

SEQ ID NO: 327216 - DNA, 15 bp, Homo sapiens
aaagagagccagaca

SEQ ID NO: 327217 - DNA, 15 bp, Homo sapiens
caaagagagccagac

SEQ ID NO: 327218 - DNA, 15 bp, Homo sapiens
ccaaagagagccaga

SEQ ID NO: 327219 - DNA, 15 bp, Homo sapiens
gccaaagagagccag

SEQ ID NO: 327220 - DNA, 15 bp, Homo sapiens
cgccaaagagagcca

SEQ ID NO: 327221 - DNA, 15 bp, Homo sapiens
ccgccaaagagagcc

SEQ ID NO: 327222 - DNA, 15 bp, Homo sapiens
accgccaaagagagc

SEQ ID NO: 327223 - DNA, 15 bp, Homo sapiens
caccgccaaagagag

SEQ ID NO: 327224 - DNA, 15 bp, Homo sapiens
tcaccgccaaagaga

SEQ ID NO: 327225 - DNA, 15 bp, Homo sapiens
ttcaccgccaaagag

SEQ ID NO: 327226 - DNA, 15 bp, Homo sapiens
attcaccgccaaaga

SEQ ID NO: 327227 - DNA, 15 bp, Homo sapiens
aattcaccgccaaag

SEQ ID NO: 327228 - DNA, 15 bp, Homo sapiens
gaattcaccgccaaa

SEQ ID NO: 327229 - DNA, 15 bp, Homo sapiens
ggaattcaccgccaa

SEQ ID NO: 327230 - DNA, 15 bp, Homo sapiens
aggaattcaccgcca

SEQ ID NO: 327231 - DNA, 15 bp, Homo sapiens
caggaattcaccgcc

SEQ ID NO: 327232 - DNA, 15 bp, Homo sapiens
gcaggaattcaccgc

SEQ ID NO: 327233 - DNA, 15 bp, Homo sapiens
ggcaggaattcaccg

SEQ ID NO: 327234 - DNA, 15 bp, Homo sapiens
tggcaggaattcacc

SEQ ID NO: 327235 - DNA, 15 bp, Homo sapiens
ttggcaggaattcac

SEQ ID NO: 327236 - DNA, 15 bp, Homo sapiens
attggcaggaattca

SEQ ID NO: 327237 - DNA, 15 bp, Homo sapiens
gattggcaggaattc

SEQ ID NO: 327238 - DNA, 15 bp, Homo sapiens
agattggcaggaatt

SEQ ID NO: 327239 - DNA, 15 bp, Homo sapiens
cagattggcaggaat

SEQ ID NO: 327240 - DNA, 15 bp, Homo sapiens
acagattggcaggaa

SEQ ID NO: 327241 - DNA, 15 bp, Homo sapiens
cacagattggcagga

SEQ ID NO: 327242 - DNA, 15 bp, Homo sapiens
ccacagattggcagg

SEQ ID NO: 327243 - DNA, 15 bp, Homo sapiens
gccacagattggcag

SEQ ID NO: 327244 - DNA, 15 bp, Homo sapiens
tgccacagattggca

SEQ ID NO: 327245 - DNA, 15 bp, Homo sapiens
atgccacagattggc

SEQ ID NO: 327246 - DNA, 15 bp, Homo sapiens
aatgccacagattgg

SEQ ID NO: 327247 - DNA, 15 bp, Homo sapiens
taatgccacagattg

SEQ ID NO: 327248 - DNA, 15 bp, Homo sapiens
ctaatgccacagatt

SEQ ID NO: 327249 - DNA, 15 bp, Homo sapiens
cctaatgccacagat

SEQ ID NO: 327250 - DNA, 15 bp, Homo sapiens
gcctaatgccacaga

SEQ ID NO: 327251 - DNA, 15 bp, Homo sapiens
tgcctaatgccacag

SEQ ID NO: 327252 - DNA, 15 bp, Homo sapiens
ctgcctaatgccaca

SEQ ID NO: 327253 - DNA, 15 bp, Homo sapiens
cctgcctaatgccac

SEQ ID NO: 327254 - DNA, 15 bp, Homo sapiens
ccctgcctaatgcca

SEQ ID NO: 327255 - DNA, 15 bp, Homo sapiens
tccctgcctaatgcc

SEQ ID NO: 327256 - DNA, 15 bp, Homo sapiens
atccctgcctaatgc

SEQ ID NO: 327257 - DNA, 15 bp, Homo sapiens
catccctgcctaatg

SEQ ID NO: 327258 - DNA, 15 bp, Homo sapiens
ccatccctgcctaat

SEQ ID NO: 327259 - DNA, 15 bp, Homo sapiens
tccatccctgcctaa

SEQ ID NO: 327260 - DNA, 15 bp, Homo sapiens
ctccatccctgccta

SEQ ID NO: 327261 - DNA, 15 bp, Homo sapiens
cctccatccctgcct

SEQ ID NO: 327262 - DNA, 15 bp, Homo sapiens
gcctccatccctgcc

SEQ ID NO: 327263 - DNA, 15 bp, Homo sapiens
agcctccatccctgc

SEQ ID NO: 327264 - DNA, 15 bp, Homo sapiens
aagcctccatccctg

SEQ ID NO: 327265 - DNA, 15 bp, Homo sapiens
aaagcctccatccct

SEQ ID NO: 327266 - DNA, 15 bp, Homo sapiens
caaagcctccatccc

SEQ ID NO: 327267 - DNA, 15 bp, Homo sapiens
gcaaagcctccatcc

SEQ ID NO: 327268 - DNA, 15 bp, Homo sapiens
tgcaaagcctccatc

SEQ ID NO: 327269 - DNA, 15 bp, Homo sapiens
ttgcaaagcctccat

SEQ ID NO: 327270 - DNA, 15 bp, Homo sapiens
attgcaaagcctcca

SEQ ID NO: 327271 - DNA, 15 bp, Homo sapiens
cattgcaaagcctcc

SEQ ID NO: 327272 - DNA, 15 bp, Homo sapiens
gcattgcaaagcctc

SEQ ID NO: 327273 - DNA, 15 bp, Homo sapiens
tgcattgcaaagcct

SEQ ID NO: 327274 - DNA, 15 bp, Homo sapiens
ttgcattgcaaagcc

SEQ ID NO: 327275 - DNA, 15 bp, Homo sapiens
attgcattgcaaagc

SEQ ID NO: 327276 - DNA, 15 bp, Homo sapiens
aattgcattgcaaag

SEQ ID NO: 327277 - DNA, 15 bp, Homo sapiens
aaattgcattgcaaa

SEQ ID NO: 327278 - DNA, 15 bp, Homo sapiens
caaattgcattgcaa

SEQ ID NO: 327279 - DNA, 15 bp, Homo sapiens
tcaaattgcattgca

SEQ ID NO: 327280 - DNA, 15 bp, Homo sapiens
ttcaaattgcattgc

SEQ ID NO: 327281 - DNA, 15 bp, Homo sapiens
tttcaaattgcattg

SEQ ID NO: 327282 - DNA, 15 bp, Homo sapiens
atttcaaattgcatt

SEQ ID NO: 327283 - DNA, 15 bp, Homo sapiens
tatttcaaattgcat

SEQ ID NO: 327284 - DNA, 15 bp, Homo sapiens
ttatttcaaattgca

SEQ ID NO: 327285 - DNA, 15 bp, Homo sapiens
attatttcaaattgc

SEQ ID NO: 327286 - DNA, 15 bp, Homo sapiens
cattatttcaaattg

SEQ ID NO: 327287 - DNA, 15 bp, Homo sapiens
tcattatttcaaatt

SEQ ID NO: 327288 - DNA, 15 bp, Homo sapiens
atcattatttcaaat

SEQ ID NO: 327289 - DNA, 15 bp, Homo sapiens
aatcattatttcaaa

SEQ ID NO: 327290 - DNA, 15 bp, Homo sapiens
aaatcattatttcaa

SEQ ID NO: 327291 - DNA, 15 bp, Homo sapiens
caaatcattatttca

SEQ ID NO: 327292 - DNA, 15 bp, Homo sapiens
ccaaatcattatttc

SEQ ID NO: 327293 - DNA, 15 bp, Homo sapiens
tccaaatcattattt

SEQ ID NO: 327294 - DNA, 15 bp, Homo sapiens
ctccaaatcattatt

SEQ ID NO: 327295 - DNA, 15 bp, Homo sapiens
actccaaatcattat

SEQ ID NO: 327296 - DNA, 15 bp, Homo sapiens
aactccaaatcatta

SEQ ID NO: 327297 - DNA, 15 bp, Homo sapiens
gcaactccaaatcat

SEQ ID NO: 327298 - DNA, 15 bp, Homo sapiens
agcaactccaaatca

SEQ ID NO: 327299 - DNA, 15 bp, Homo sapiens
cagcaactccaaatc

SEQ ID NO: 327300 - DNA, 15 bp, Homo sapiens
acagcaactccaaat

SEQ ID NO: 327301 - DNA, 15 bp, Homo sapiens
aacagcaactccaaa

SEQ ID NO: 327302 - DNA, 15 bp, Homo sapiens
aaacagcaactccaa

SEQ ID NO: 327303 - DNA, 15 bp, Homo sapiens
gaaacagcaactcca

SEQ ID NO: 327304 - DNA, 15 bp, Homo sapiens
tgaaacagcaactcc

SEQ ID NO: 327305 - DNA, 15 bp, Homo sapiens
atgaaacagcaactc

SEQ ID NO: 327306 - DNA, 15 bp, Homo sapiens
aatgaaacagcaact

SEQ ID NO: 327307 - DNA, 15 bp, Homo sapiens
aaatgaaacagcaac

SEQ ID NO: 327308 - DNA, 15 bp, Homo sapiens
gaaatgaaacagcaa

SEQ ID NO: 327309 - DNA, 15 bp, Homo sapiens
ggaaatgaaacagca

SEQ ID NO: 327310 - DNA, 15 bp, Homo sapiens
tggaaatgaaacagc

SEQ ID NO: 327311 - DNA, 15 bp, Homo sapiens
ctggaaatgaaacag

SEQ ID NO: 327312 - DNA, 15 bp, Homo sapiens
actggaaatgaaaca

SEQ ID NO: 327313 - DNA, 15 bp, Homo sapiens
tactggaaatgaaac

SEQ ID NO: 327314 - DNA, 15 bp, Homo sapiens
gtactggaaatgaaa

SEQ ID NO: 327315 - DNA, 15 bp, Homo sapiens
agtactggaaatgaa

SEQ ID NO: 327316 - DNA, 15 bp, Homo sapiens
aagtactggaaatga

SEQ ID NO: 327317 - DNA, 15 bp, Homo sapiens
aaagtactggaaatg

SEQ ID NO: 327318 - DNA, 15 bp, Homo sapiens
caaagtactggaaat

SEQ ID NO: 327319 - DNA, 15 bp, Homo sapiens
ccaaagtactggaaa

SEQ ID NO: 327320 - DNA, 15 bp, Homo sapiens
gccaaagtactggaa

SEQ ID NO: 327321 - DNA, 15 bp, Homo sapiens
agccaaagtactgga

SEQ ID NO: 327322 - DNA, 15 bp, Homo sapiens
cagccaaagtactgg

SEQ ID NO: 327323 - DNA, 15 bp, Homo sapiens
gcagccaaagtactg

SEQ ID NO: 327324 - DNA, 15 bp, Homo sapiens
ggcagccaaagtact

SEQ ID NO: 327325 - DNA, 15 bp, Homo sapiens
aggcagccaaagtac

SEQ ID NO: 327326 - DNA, 15 bp, Homo sapiens
gaggcagccaaagta

SEQ ID NO: 327327 - DNA, 15 bp, Homo sapiens
tgaggcagccaaagt

SEQ ID NO: 327328 - DNA, 15 bp, Homo sapiens
gtgaggcagccaaag

SEQ ID NO: 327329 - DNA, 15 bp, Homo sapiens
agtgaggcagccaaa

SEQ ID NO: 327330 - DNA, 15 bp, Homo sapiens
cagtgaggcagccaa

SEQ ID NO: 327331 - DNA, 15 bp, Homo sapiens
ccagtgaggcagcca

SEQ ID NO: 327332 - DNA, 15 bp, Homo sapiens
cccagtgaggcagcc

SEQ ID NO: 327333 - DNA, 15 bp, Homo sapiens
gcccagtgaggcagc

SEQ ID NO: 327334 - DNA, 15 bp, Homo sapiens
ggcccagtgaggcag

SEQ ID NO: 327335 - DNA, 15 bp, Homo sapiens
tggcccagtgaggca

SEQ ID NO: 327336 - DNA, 15 bp, Homo sapiens
ttggcccagtgaggc

SEQ ID NO: 327337 - DNA, 15 bp, Homo sapiens
cttggcccagtgagg

SEQ ID NO: 327338 - DNA, 15 bp, Homo sapiens
tcttggcccagtgag

SEQ ID NO: 327339 - DNA, 15 bp, Homo sapiens
ctcttggcccagtga

SEQ ID NO: 327340 - DNA, 15 bp, Homo sapiens
gctcttggcccagtg

SEQ ID NO: 327341 - DNA, 15 bp, Homo sapiens
agctcttggcccagt

SEQ ID NO: 327342 - DNA, 15 bp, Homo sapiens
cagctcttggcccag

SEQ ID NO: 327343 - DNA, 15 bp, Homo sapiens
tcagctcttggccca

SEQ ID NO: 327344 - DNA, 15 bp, Homo sapiens
ttcagctcttggccc

SEQ ID NO: 327345 - DNA, 15 bp, Homo sapiens
tttcagctcttggcc

SEQ ID NO: 327346 - DNA, 15 bp, Homo sapiens
ctttcagctcttggc

SEQ ID NO: 327347 - DNA, 15 bp, Homo sapiens
tctttcagctcttgg

SEQ ID NO: 327348 - DNA, 15 bp, Homo sapiens
ttctttcagctcttg

SEQ ID NO: 327349 - DNA, 15 bp, Homo sapiens
tttctttcagctctt

SEQ ID NO: 327350 - DNA, 15 bp, Homo sapiens
atttctttcagctct

SEQ ID NO: 327351 - DNA, 15 bp, Homo sapiens
tatttctttcagctc

SEQ ID NO: 327352 - DNA, 15 bp, Homo sapiens
ttatttctttcagct

SEQ ID NO: 327353 - DNA, 15 bp, Homo sapiens
cttatttctttcagc

SEQ ID NO: 327354 - DNA, 15 bp, Homo sapiens
ccttatttctttcag

SEQ ID NO: 327355 - DNA, 15 bp, Homo sapiens
gccttatttctttca

SEQ ID NO: 327356 - DNA, 15 bp, Homo sapiens
tgccttatttctttc

SEQ ID NO: 327357 - DNA, 15 bp, Homo sapiens
ctgccttatttcttt

SEQ ID NO: 327358 - DNA, 15 bp, Homo sapiens
tctgccttatttctt

SEQ ID NO: 327359 - DNA, 15 bp, Homo sapiens
ctctgccttatttct

SEQ ID NO: 327360 - DNA, 15 bp, Homo sapiens
tctctgccttatttc

SEQ ID NO: 327361 - DNA, 15 bp, Homo sapiens
ttctctgccttattt

SEQ ID NO: 327362 - DNA, 15 bp, Homo sapiens
cttctctgccttatt

SEQ ID NO: 327363 - DNA, 15 bp, Homo sapiens
gcttctctgccttat

SEQ ID NO: 327364 - DNA, 15 bp, Homo sapiens
tgcttctctgcctta

SEQ ID NO: 327365 - DNA, 15 bp, Homo sapiens
atgcttctctgcctt

SEQ ID NO: 327366 - DNA, 15 bp, Homo sapiens
tatgcttctctgcct

SEQ ID NO: 327367 - DNA, 15 bp, Homo sapiens
ttatgcttctctgcc

SEQ ID NO: 327368 - DNA, 15 bp, Homo sapiens
cttatgcttctctgc

SEQ ID NO: 327369 - DNA, 15 bp, Homo sapiens
ccttatgcttctctg

SEQ ID NO: 327370 - DNA, 15 bp, Homo sapiens
accttatgcttctct

SEQ ID NO: 327371 - DNA, 15 bp, Homo sapiens
caccttatgcttctc

SEQ ID NO: 327372 - DNA, 15 bp, Homo sapiens
ccaccttatgcttct

SEQ ID NO: 327373 - DNA, 15 bp, Homo sapiens
cccaccttatgcttc

SEQ ID NO: 327374 - DNA, 15 bp, Homo sapiens
gcccaccttatgctt

SEQ ID NO: 327375 - DNA, 15 bp, Homo sapiens
tgcccaccttatgct

SEQ ID NO: 327376 - DNA, 15 bp, Homo sapiens
ctgcccaccttatgc

SEQ ID NO: 327377 - DNA, 15 bp, Homo sapiens
tctgcccaccttatg

SEQ ID NO: 327378 - DNA, 15 bp, Homo sapiens
ttctgcccaccttat

SEQ ID NO: 327379 - DNA, 15 bp, Homo sapiens
tttctgcccacctta

SEQ ID NO: 327380 - DNA, 15 bp, Homo sapiens
ctttctgcccacctt

SEQ ID NO: 327381 - DNA, 15 bp, Homo sapiens
tctttctgcccacct

SEQ ID NO: 327382 - DNA, 15 bp, Homo sapiens
atctttctgcccacc

SEQ ID NO: 327383 - DNA, 15 bp, Homo sapiens
aatctttctgcccac

SEQ ID NO: 327384 - DNA, 15 bp, Homo sapiens
caatctttctgccca

SEQ ID NO: 327385 - DNA, 15 bp, Homo sapiens
tcaatctttctgccc

SEQ ID NO: 327386 - DNA, 15 bp, Homo sapiens
atcaatctttctgcc

SEQ ID NO: 327387 - DNA, 15 bp, Homo sapiens
tatcaatctttctgc

SEQ ID NO: 327388 - DNA, 15 bp, Homo sapiens
ttatcaatctttctg

SEQ ID NO: 327389 - DNA, 15 bp, Homo sapiens
tttatcaatctttct

SEQ ID NO: 327390 - DNA, 15 bp, Homo sapiens
ctttatcaatctttc

SEQ ID NO: 327391 - DNA, 15 bp, Homo sapiens
tctttatcaatcttt

SEQ ID NO: 327392 - DNA, 15 bp, Homo sapiens
ttctttatcaatctt

SEQ ID NO: 327393 - DNA, 15 bp, Homo sapiens
attctttatcaatct

SEQ ID NO: 327394 - DNA, 15 bp, Homo sapiens
aattctttatcaatc

SEQ ID NO: 327395 - DNA, 15 bp, Homo sapiens
taattctttatcaat

SEQ ID NO: 327396 - DNA, 15 bp, Homo sapiens
ttaattctttatcaa

SEQ ID NO: 327397 - DNA, 15 bp, Homo sapiens
cttaattctttatca

SEQ ID NO: 327398 - DNA, 15 bp, Homo sapiens
tcttaattctttatc

SEQ ID NO: 327399 - DNA, 15 bp, Homo sapiens
ttcttaattctttat

SEQ ID NO: 327400 - DNA, 15 bp, Homo sapiens
attcttaattcttta

SEQ ID NO: 327401 - DNA, 15 bp, Homo sapiens
cattcttaattcttt

SEQ ID NO: 327402 - DNA, 15 bp, Homo sapiens
gcattcttaattctt

SEQ ID NO: 327403 - DNA, 15 bp, Homo sapiens
tgcattcttaattct

SEQ ID NO: 327404 - DNA, 15 bp, Homo sapiens
ctgcattcttaattc

SEQ ID NO: 327405 - DNA, 15 bp, Homo sapiens
gctgcattcttaatt

SEQ ID NO: 327406 - DNA, 15 bp, Homo sapiens
tgctgcattcttaat

SEQ ID NO: 327407 - DNA, 15 bp, Homo sapiens
ctgctgcattcttaa

SEQ ID NO: 327408 - DNA, 15 bp, Homo sapiens
tctgctgcattctta

SEQ ID NO: 327409 - DNA, 15 bp, Homo sapiens
ttctgctgcattctt

SEQ ID NO: 327410 - DNA, 15 bp, Homo sapiens
cttctgctgcattct

SEQ ID NO: 327411 - DNA, 15 bp, Homo sapiens
ccttctgctgcattc

SEQ ID NO: 327412 - DNA, 15 bp, Homo sapiens
tccttctgctgcatt

SEQ ID NO: 327413 - DNA, 15 bp, Homo sapiens
ttccttctgctgcat

SEQ ID NO: 327414 - DNA, 15 bp, Homo sapiens
tttccttctgctgca

SEQ ID NO: 327415 - DNA, 15 bp, Homo sapiens
ttttccttctgctgc

SEQ ID NO: 327416 - DNA, 15 bp, Homo sapiens
attttccttctgctg

SEQ ID NO: 327417 - DNA, 15 bp, Homo sapiens
aattttccttctgct

SEQ ID NO: 327418 - DNA, 15 bp, Homo sapiens
taattttccttctgc

SEQ ID NO: 327419 - DNA, 15 bp, Homo sapiens
ttaattttccttctg

SEQ ID NO: 327420 - DNA, 15 bp, Homo sapiens
tttaattttccttct

SEQ ID NO: 327421 - DNA, 15 bp, Homo sapiens
ctttaattttccttc

SEQ ID NO: 327422 - DNA, 15 bp, Homo sapiens
actttaattttcctt

SEQ ID NO: 327423 - DNA, 15 bp, Homo sapiens
cactttaattttcct

SEQ ID NO: 327424 - DNA, 15 bp, Homo sapiens
gcactttaattttcc

SEQ ID NO: 327425 - DNA, 15 bp, Homo sapiens
tgcactttaattttc

SEQ ID NO: 327426 - DNA, 15 bp, Homo sapiens
atgcactttaatttt

SEQ ID NO: 327427 - DNA, 15 bp, Homo sapiens
catgcactttaattt

SEQ ID NO: 327428 - DNA, 15 bp, Homo sapiens
ccatgcactttaatt

SEQ ID NO: 327429 - DNA, 15 bp, Homo sapiens
cccatgcactttaat

SEQ ID NO: 327430 - DNA, 15 bp, Homo sapiens
tcccatgcactttaa

SEQ ID NO: 327431 - DNA, 15 bp, Homo sapiens
atcccatgcacttta

SEQ ID NO: 327432 - DNA, 15 bp, Homo sapiens
catcccatgcacttt

SEQ ID NO: 327433 - DNA, 15 bp, Homo sapiens
tcatcccatgcactt

SEQ ID NO: 327434 - DNA, 15 bp, Homo sapiens
ttcatcccatgcact

SEQ ID NO: 327435 - DNA, 15 bp, Homo sapiens
tttcatcccatgcac

SEQ ID NO: 327436 - DNA, 15 bp, Homo sapiens
atttcatcccatgca

SEQ ID NO: 327437 - DNA, 15 bp, Homo sapiens
catttcatcccatgc

SEQ ID NO: 327438 - DNA, 15 bp, Homo sapiens
ccatttcatcccatg

SEQ ID NO: 327439 - DNA, 15 bp, Homo sapiens
cccatttcatcccat

SEQ ID NO: 327440 - DNA, 15 bp, Homo sapiens
gcccatttcatccca

SEQ ID NO: 327441 - DNA, 15 bp, Homo sapiens
tgcccatttcatccc

SEQ ID NO: 327442 - DNA, 15 bp, Homo sapiens
ttgcccatttcatcc

SEQ ID NO: 327443 - DNA, 15 bp, Homo sapiens
tttgcccatttcatc

SEQ ID NO: 327444 - DNA, 15 bp, Homo sapiens
atttgcccatttcat

SEQ ID NO: 327445 - DNA, 15 bp, Homo sapiens
gatttgcccatttca

SEQ ID NO: 327446 - DNA, 15 bp, Homo sapiens
tgatttgcccatttc

SEQ ID NO: 327447 - DNA, 15 bp, Homo sapiens
gtgatttgcccattt

SEQ ID NO: 327448 - DNA, 15 bp, Homo sapiens
tgtgatttgcccatt

SEQ ID NO: 327449 - DNA, 15 bp, Homo sapiens
ttgtgatttgcccat

SEQ ID NO: 327450 - DNA, 15 bp, Homo sapiens
attgtgatttgccca

SEQ ID NO: 327451 - DNA, 15 bp, Homo sapiens
aattgtgatttgccc

SEQ ID NO: 327452 - DNA, 15 bp, Homo sapiens
taattgtgatttgcc

SEQ ID NO: 327453 - DNA, 15 bp, Homo sapiens
ataattgtgatttgc

SEQ ID NO: 327454 - DNA, 15 bp, Homo sapiens
cataattgtgatttg

SEQ ID NO: 327455 - DNA, 15 bp, Homo sapiens
acataattgtgattt

SEQ ID NO: 327456 - DNA, 15 bp, Homo sapiens
cacataattgtgatt

SEQ ID NO: 327457 - DNA, 15 bp, Homo sapiens
tcacataattgtgat

SEQ ID NO: 327458 - DNA, 15 bp, Homo sapiens
gtcacataattgtga

SEQ ID NO: 327459 - DNA, 15 bp, Homo sapiens
ggtcacataattgtg

SEQ ID NO: 327460 - DNA, 15 bp, Homo sapiens
tggtcacataattgt

SEQ ID NO: 327461 - DNA, 15 bp, Homo sapiens
ctggtcacataattg

SEQ ID NO: 327462 - DNA, 15 bp, Homo sapiens
gctggtcacataatt

SEQ ID NO: 327463 - DNA, 15 bp, Homo sapiens
tgctggtcacataat

SEQ ID NO: 327464 - DNA, 15 bp, Homo sapiens
atgctggtcacataa

SEQ ID NO: 327465 - DNA, 15 bp, Homo sapiens
gatgctggtcacata

SEQ ID NO: 327466 - DNA, 15 bp, Homo sapiens
tgatgctggtcacat

SEQ ID NO: 327467 - DNA, 15 bp, Homo sapiens
ctgatgctggtcaca

SEQ ID NO: 327468 - DNA, 15 bp, Homo sapiens
cctgatgctggtcac

SEQ ID NO: 327469 - DNA, 15 bp, Homo sapiens
ccctgatgctggtca

SEQ ID NO: 327470 - DNA, 15 bp, Homo sapiens
gccctgatgctggtc

SEQ ID NO: 327471 - DNA, 15 bp, Homo sapiens
ggccctgatgctggt

SEQ ID NO: 327472 - DNA, 15 bp, Homo sapiens
gggccctgatgctgg

SEQ ID NO: 327473 - DNA, 15 bp, Homo sapiens
agggccctgatgctg

SEQ ID NO: 327474 - DNA, 15 bp, Homo sapiens
aagggccctgatgct

SEQ ID NO: 327475 - DNA, 15 bp, Homo sapiens
aaagggccctgatgc

SEQ ID NO: 327476 - DNA, 15 bp, Homo sapiens
gaaagggccctgatg

SEQ ID NO: 327477 - DNA, 15 bp, Homo sapiens
ggaaagggccctgat

SEQ ID NO: 327478 - DNA, 15 bp, Homo sapiens
gggaaagggccctga

SEQ ID NO: 327479 - DNA, 15 bp, Homo sapiens
tgggaaagggccctg

SEQ ID NO: 327480 - DNA, 15 bp, Homo sapiens
ttgggaaagggccct

SEQ ID NO: 327481 - DNA, 15 bp, Homo sapiens
tttgggaaagggccc

SEQ ID NO: 327482 - DNA, 15 bp, Homo sapiens
gtttgggaaagggcc

SEQ ID NO: 327483 - DNA, 15 bp, Homo sapiens
agtttgggaaagggc

SEQ ID NO: 327484 - DNA, 15 bp, Homo sapiens
cagtttgggaaaggg

SEQ ID NO: 327485 - DNA, 15 bp, Homo sapiens
gcagtttgggaaagg

SEQ ID NO: 327486 - DNA, 15 bp, Homo sapiens
tgcagtttgggaaag

SEQ ID NO: 327487 - DNA, 15 bp, Homo sapiens
ttgcagtttgggaaa

SEQ ID NO: 327488 - DNA, 15 bp, Homo sapiens
cttgcagtttgggaa

SEQ ID NO: 327489 - DNA, 15 bp, Homo sapiens
gcttgcagtttggga

SEQ ID NO: 327490 - DNA, 15 bp, Homo sapiens
ggcttgcagtttggg

SEQ ID NO: 327491 - DNA, 15 bp, Homo sapiens
gggcttgcagtttgg

SEQ ID NO: 327492 - DNA, 15 bp, Homo sapiens
tgggcttgcagtttg

SEQ ID NO: 327493 - DNA, 15 bp, Homo sapiens
atgggcttgcagttt

SEQ ID NO: 327494 - DNA, 15 bp, Homo sapiens
tatgggcttgcagtt

SEQ ID NO: 327495 - DNA, 15 bp, Homo sapiens
ctatgggcttgcagt

SEQ ID NO: 327496 - DNA, 15 bp, Homo sapiens
cctatgggcttgcag

SEQ ID NO: 327497 - DNA, 15 bp, Homo sapiens
ccctatgggcttgca

SEQ ID NO: 327498 - DNA, 15 bp, Homo sapiens
cccctatgggcttgc

SEQ ID NO: 327499 - DNA, 15 bp, Homo sapiens
ccccctatgggcttg

SEQ ID NO: 327500 - DNA, 15 bp, Homo sapiens
gccccctatgggctt

SEQ ID NO: 327501 - DNA, 15 bp, Homo sapiens
ggccccctatgggct

SEQ ID NO: 327502 - DNA, 15 bp, Homo sapiens
aggccccctatgggc

SEQ ID NO: 327503 - DNA, 15 bp, Homo sapiens
taggccccctatggg

SEQ ID NO: 327504 - DNA, 15 bp, Homo sapiens
ctaggccccctatgg

SEQ ID NO: 327505 - DNA, 15 bp, Homo sapiens
tctaggccccctatg

SEQ ID NO: 327506 - DNA, 15 bp, Homo sapiens
ttctaggccccctat

SEQ ID NO: 327507 - DNA, 15 bp, Homo sapiens
attctaggcccccta

SEQ ID NO: 327508 - DNA, 15 bp, Homo sapiens
tattctaggccccct

SEQ ID NO: 327509 - DNA, 15 bp, Homo sapiens
gtattctaggccccc

SEQ ID NO: 327510 - DNA, 15 bp, Homo sapiens
agtattctaggcccc

SEQ ID NO: 327511 - DNA, 15 bp, Homo sapiens
gagtattctaggccc

SEQ ID NO: 327512 - DNA, 15 bp, Homo sapiens
ggagtattctaggcc

SEQ ID NO: 327513 - DNA, 15 bp, Homo sapiens
tggagtattctaggc

SEQ ID NO: 327514 - DNA, 15 bp, Homo sapiens
atggagtattctagg

SEQ ID NO: 327515 - DNA, 15 bp, Homo sapiens
tatggagtattctag

SEQ ID NO: 327516 - DNA, 15 bp, Homo sapiens
ctatggagtattcta

SEQ ID NO: 327517 - DNA, 15 bp, Homo sapiens
gctatggagtattct

SEQ ID NO: 327518 - DNA, 15 bp, Homo sapiens
ggctatggagtattc

SEQ ID NO: 327519 - DNA, 15 bp, Homo sapiens
aggctatggagtatt

SEQ ID NO: 327520 - DNA, 15 bp, Homo sapiens
caggctatggagtat

SEQ ID NO: 327521 - DNA, 15 bp, Homo sapiens
tcaggctatggagta

SEQ ID NO: 327522 - DNA, 15 bp, Homo sapiens
ttcaggctatggagt

SEQ ID NO: 327523 - DNA, 15 bp, Homo sapiens
tttcaggctatggag

SEQ ID NO: 327524 - DNA, 15 bp, Homo sapiens
gtttcaggctatgga

SEQ ID NO: 327525 - DNA, 15 bp, Homo sapiens
cgtttcaggctatgg

SEQ ID NO: 327526 - DNA, 15 bp, Homo sapiens
ccgtttcaggctatg

SEQ ID NO: 327527 - DNA, 15 bp, Homo sapiens
gccgtttcaggctat

SEQ ID NO: 327528 - DNA, 15 bp, Homo sapiens
ggccgtttcaggcta

SEQ ID NO: 327529 - DNA, 15 bp, Homo sapiens
tggccgtttcaggct

SEQ ID NO: 327530 - DNA, 15 bp, Homo sapiens
ttggccgtttcaggc

SEQ ID NO: 327531 - DNA, 15 bp, Homo sapiens
attggccgtttcagg

SEQ ID NO: 327532 - DNA, 15 bp, Homo sapiens
aattggccgtttcag

SEQ ID NO: 327533 - DNA, 15 bp, Homo sapiens
taattggccgtttca

SEQ ID NO: 327534 - DNA, 15 bp, Homo sapiens
ttaattggccgtttc

SEQ ID NO: 327535 - DNA, 15 bp, Homo sapiens
tttaattggccgttt

SEQ ID NO: 327536 - DNA, 15 bp, Homo sapiens
ctttaattggccgtt

SEQ ID NO: 327537 - DNA, 15 bp, Homo sapiens
cctttaattggccgt

SEQ ID NO: 327538 - DNA, 15 bp, Homo sapiens
ccctttaattggccg

SEQ ID NO: 327539 - DNA, 15 bp, Homo sapiens
cccctttaattggcc

SEQ ID NO: 327540 - DNA, 15 bp, Homo sapiens
tcccctttaattggc

SEQ ID NO: 327541 - DNA, 15 bp, Homo sapiens
ctcccctttaattgg

SEQ ID NO: 327542 - DNA, 15 bp, Homo sapiens
tctcccctttaattg

SEQ ID NO: 327543 - DNA, 15 bp, Homo sapiens
gtctcccctttaatt

SEQ ID NO: 327544 - DNA, 15 bp, Homo sapiens
tgtctcccctttaat

SEQ ID NO: 327545 - DNA, 15 bp, Homo sapiens
ttgtctcccctttaa

SEQ ID NO: 327546 - DNA, 15 bp, Homo sapiens
cttgtctccccttta

SEQ ID NO: 327547 - DNA, 15 bp, Homo sapiens
ccttgtctccccttt

SEQ ID NO: 327548 - DNA, 15 bp, Homo sapiens
tccttgtctcccctt

SEQ ID NO: 327549 - DNA, 15 bp, Homo sapiens
ctccttgtctcccct

SEQ ID NO: 327550 - DNA, 15 bp, Homo sapiens
tctccttgtctcccc

SEQ ID NO: 327551 - DNA, 15 bp, Homo sapiens
gtctccttgtctccc

SEQ ID NO: 327552 - DNA, 15 bp, Homo sapiens
agtctccttgtctcc

SEQ ID NO: 327553 - DNA, 15 bp, Homo sapiens
gagtctccttgtctc

SEQ ID NO: 327554 - DNA, 15 bp, Homo sapiens
ggagtctccttgtct

SEQ ID NO: 327555 - DNA, 15 bp, Homo sapiens
gggagtctccttgtc

SEQ ID NO: 327556 - DNA, 15 bp, Homo sapiens
agggagtctccttgt

SEQ ID NO: 327557 - DNA, 15 bp, Homo sapiens
gagggagtctccttg

SEQ ID NO: 327558 - DNA, 15 bp, Homo sapiens
agagggagtctcctt

SEQ ID NO: 327559 - DNA, 15 bp, Homo sapiens
gagagggagtctcct

SEQ ID NO: 327560 - DNA, 15 bp, Homo sapiens
tgagagggagtctcc

SEQ ID NO: 327561 - DNA, 15 bp, Homo sapiens
gtgagagggagtctc

SEQ ID NO: 327562 - DNA, 15 bp, Homo sapiens
agtgagagggagtct

SEQ ID NO: 327563 - DNA, 15 bp, Homo sapiens
tagtgagagggagtc

SEQ ID NO: 327564 - DNA, 15 bp, Homo sapiens
atagtgagagggagt

SEQ ID NO: 327565 - DNA, 15 bp, Homo sapiens
gatagtgagagggag

SEQ ID NO: 327566 - DNA, 15 bp, Homo sapiens
agatagtgagaggga

SEQ ID NO: 327567 - DNA, 15 bp, Homo sapiens
cagatagtgagaggg

SEQ ID NO: 327568 - DNA, 15 bp, Homo sapiens
tcagatagtgagagg

SEQ ID NO: 327569 - DNA, 15 bp, Homo sapiens
ctcagatagtgagag

SEQ ID NO: 327570 - DNA, 15 bp, Homo sapiens
cctcagatagtgaga

SEQ ID NO: 327571 - DNA, 15 bp, Homo sapiens
acctcagatagtgag

SEQ ID NO: 327572 - DNA, 15 bp, Homo sapiens
aacctcagatagtga

SEQ ID NO: 327573 - DNA, 15 bp, Homo sapiens
aaaacctcagatagt

SEQ ID NO: 327574 - DNA, 15 bp, Homo sapiens
caaaacctcagatag

SEQ ID NO: 327575 - DNA, 15 bp, Homo sapiens
ccaaaacctcagata

SEQ ID NO: 327576 - DNA, 15 bp, Homo sapiens
gccaaaacctcagat

SEQ ID NO: 327577 - DNA, 15 bp, Homo sapiens
tgccaaaacctcaga

SEQ ID NO: 327578 - DNA, 15 bp, Homo sapiens
ctgccaaaacctcag

SEQ ID NO: 327579 - DNA, 15 bp, Homo sapiens
actgccaaaacctca

SEQ ID NO: 327580 - DNA, 15 bp, Homo sapiens
aactgccaaaacctc

SEQ ID NO: 327581 - DNA, 15 bp, Homo sapiens
aaactgccaaaacct

SEQ ID NO: 327582 - DNA, 15 bp, Homo sapiens
gaaactgccaaaacc

SEQ ID NO: 327583 - DNA, 15 bp, Homo sapiens
agaaactgccaaaac

SEQ ID NO: 327584 - DNA, 15 bp, Homo sapiens
gagaaactgccaaaa

SEQ ID NO: 327585 - DNA, 15 bp, Homo sapiens
tgagaaactgccaaa

SEQ ID NO: 327586 - DNA, 15 bp, Homo sapiens
ctgagaaactgccaa

SEQ ID NO: 327587 - DNA, 15 bp, Homo sapiens
actgagaaactgcca

SEQ ID NO: 327588 - DNA, 15 bp, Homo sapiens
aactgagaaactgcc

SEQ ID NO: 327589 - DNA, 15 bp, Homo sapiens
caactgagaaactgc

SEQ ID NO: 327590 - DNA, 15 bp, Homo sapiens
gcaactgagaaactg

SEQ ID NO: 327591 - DNA, 15 bp, Homo sapiens
ggcaactgagaaact

SEQ ID NO: 327592 - DNA, 15 bp, Homo sapiens
gggcaactgagaaac

SEQ ID NO: 327593 - DNA, 15 bp, Homo sapiens
agggcaactgagaaa

SEQ ID NO: 327594 - DNA, 15 bp, Homo sapiens
cagggcaactgagaa

SEQ ID NO: 327595 - DNA, 15 bp, Homo sapiens
gcagggcaactgaga

SEQ ID NO: 327596 - DNA, 15 bp, Homo sapiens
tgcagggcaactgag

SEQ ID NO: 327597 - DNA, 15 bp, Homo sapiens
ttgcagggcaactga

SEQ ID NO: 327598 - DNA, 15 bp, Homo sapiens
tttgcagggcaactg

SEQ ID NO: 327599 - DNA, 15 bp, Homo sapiens
gtttgcagggcaact

SEQ ID NO: 327600 - DNA, 15 bp, Homo sapiens
agtttgcagggcaac

SEQ ID NO: 327601 - DNA, 15 bp, Homo sapiens
cagtttgcagggcaa

SEQ ID NO: 327602 - DNA, 15 bp, Homo sapiens
ccagtttgcagggca

SEQ ID NO: 327603 - DNA, 15 bp, Homo sapiens
tccagtttgcagggc

SEQ ID NO: 327604 - DNA, 15 bp, Homo sapiens
ctccagtttgcaggg

SEQ ID NO: 327605 - DNA, 15 bp, Homo sapiens
tctccagtttgcagg

SEQ ID NO: 327606 - DNA, 15 bp, Homo sapiens
atctccagtttgcag

SEQ ID NO: 327607 - DNA, 15 bp, Homo sapiens
gatctccagtttgca

SEQ ID NO: 327608 - DNA, 15 bp, Homo sapiens
agatctccagtttgc

SEQ ID NO: 327609 - DNA, 15 bp, Homo sapiens
tagatctccagtttg

SEQ ID NO: 327610 - DNA, 15 bp, Homo sapiens
ttagatctccagttt

SEQ ID NO: 327611 - DNA, 15 bp, Homo sapiens
gttagatctccagtt

SEQ ID NO: 327612 - DNA, 15 bp, Homo sapiens
tgttagatctccagt

SEQ ID NO: 327613 - DNA, 15 bp, Homo sapiens
gtgttagatctccag

SEQ ID NO: 327614 - DNA, 15 bp, Homo sapiens
tgtgttagatctcca

SEQ ID NO: 327615 - DNA, 15 bp, Homo sapiens
gtgtgttagatctcc

SEQ ID NO: 327616 - DNA, 15 bp, Homo sapiens
tgtgtgttagatctc

SEQ ID NO: 327617 - DNA, 15 bp, Homo sapiens
ctgtgtgttagatct

SEQ ID NO: 327618 - DNA, 15 bp, Homo sapiens
cctgtgtgttagatc

SEQ ID NO: 327619 - DNA, 15 bp, Homo sapiens
acctgtgtgttagat

SEQ ID NO: 327620 - DNA, 15 bp, Homo sapiens
cacctgtgtgttaga

SEQ ID NO: 327621 - DNA, 15 bp, Homo sapiens
gcacctgtgtgttag

SEQ ID NO: 327622 - DNA, 15 bp, Homo sapiens
agcacctgtgtgtta

SEQ ID NO: 327623 - DNA, 15 bp, Homo sapiens
tagcacctgtgtgtt

SEQ ID NO: 327624 - DNA, 15 bp, Homo sapiens
ctagcacctgtgtgt

SEQ ID NO: 327625 - DNA, 15 bp, Homo sapiens
tctagcacctgtgtg

SEQ ID NO: 327626 - DNA, 15 bp, Homo sapiens
ttctagcacctgtgt

SEQ ID NO: 327627 - DNA, 15 bp, Homo sapiens
gttctagcacctgtg

SEQ ID NO: 327628 - DNA, 15 bp, Homo sapiens
tgttctagcacctgt

SEQ ID NO: 327629 - DNA, 15 bp, Homo sapiens
gtgttctagcacctg

SEQ ID NO: 327630 - DNA, 15 bp, Homo sapiens
agtgttctagcacct

SEQ ID NO: 327631 - DNA, 15 bp, Homo sapiens
aagtgttctagcacc

SEQ ID NO: 327632 - DNA, 15 bp, Homo sapiens
taagtgttctagcac

SEQ ID NO: 327633 - DNA, 15 bp, Homo sapiens
ataagtgttctagca

SEQ ID NO: 327634 - DNA, 15 bp, Homo sapiens
aataagtgttctagc

SEQ ID NO: 327635 - DNA, 15 bp, Homo sapiens
gaataagtgttctag

SEQ ID NO: 327636 - DNA, 15 bp, Homo sapiens
agaataagtgttcta

SEQ ID NO: 327637 - DNA, 15 bp, Homo sapiens
tagaataagtgttct

SEQ ID NO: 327638 - DNA, 15 bp, Homo sapiens
gtagaataagtgttc

SEQ ID NO: 327639 - DNA, 15 bp, Homo sapiens
agtagaataagtgtt

SEQ ID NO: 327640 - DNA, 15 bp, Homo sapiens
cagtagaataagtgt

SEQ ID NO: 327641 - DNA, 15 bp, Homo sapiens
acagtagaataagtg

SEQ ID NO: 327642 - DNA, 15 bp, Homo sapiens
gacagtagaataagt

SEQ ID NO: 327643 - DNA, 15 bp, Homo sapiens
tgacagtagaataag

SEQ ID NO: 327644 - DNA, 15 bp, Homo sapiens
ctgacagtagaataa

SEQ ID NO: 327645 - DNA, 15 bp, Homo sapiens
tctgacagtagaata

SEQ ID NO: 327646 - DNA, 15 bp, Homo sapiens
ctctgacagtagaat

SEQ ID NO: 327647 - DNA, 15 bp, Homo sapiens
cctctgacagtagaa

SEQ ID NO: 327648 - DNA, 15 bp, Homo sapiens
tcctctgacagtaga

SEQ ID NO: 327649 - DNA, 15 bp, Homo sapiens
ttcctctgacagtag

SEQ ID NO: 327650 - DNA, 15 bp, Homo sapiens
tttcctctgacagta

SEQ ID NO: 327651 - DNA, 15 bp, Homo sapiens
ctttcctctgacagt

SEQ ID NO: 327652 - DNA, 15 bp, Homo sapiens
actttcctctgacag

SEQ ID NO: 327653 - DNA, 15 bp, Homo sapiens
gactttcctctgaca

SEQ ID NO: 327654 - DNA, 15 bp, Homo sapiens
tgactttcctctgac

SEQ ID NO: 327655 - DNA, 15 bp, Homo sapiens
ctgactttcctctga

SEQ ID NO: 327656 - DNA, 15 bp, Homo sapiens
gctgactttcctctg

SEQ ID NO: 327657 - DNA, 15 bp, Homo sapiens
tgctgactttcctct

SEQ ID NO: 327658 - DNA, 15 bp, Homo sapiens
ctgctgactttcctc

SEQ ID NO: 327659 - DNA, 15 bp, Homo sapiens
gctgctgactttcct

SEQ ID NO: 327660 - DNA, 15 bp, Homo sapiens
agctgctgactttcc

SEQ ID NO: 327661 - DNA, 15 bp, Homo sapiens
cagctgctgactttc

SEQ ID NO: 327662 - DNA, 15 bp, Homo sapiens
acagctgctgacttt

SEQ ID NO: 327663 - DNA, 15 bp, Homo sapiens
cacagctgctgactt

SEQ ID NO: 327664 - DNA, 15 bp, Homo sapiens
acacagctgctgact

SEQ ID NO: 327665 - DNA, 15 bp, Homo sapiens
aacacagctgctgac

SEQ ID NO: 327666 - DNA, 15 bp, Homo sapiens
aaacacagctgctga

SEQ ID NO: 327667 - DNA, 15 bp, Homo sapiens
taaacacagctgctg

SEQ ID NO: 327668 - DNA, 15 bp, Homo sapiens
ttaaacacagctgct

SEQ ID NO: 327669 - DNA, 15 bp, Homo sapiens
tttaaacacagctgc

SEQ ID NO: 327670 - DNA, 15 bp, Homo sapiens
ctttaaacacagctg

SEQ ID NO: 327671 - DNA, 15 bp, Homo sapiens
cctttaaacacagct

SEQ ID NO: 327672 - DNA, 15 bp, Homo sapiens
gcctttaaacacagc

SEQ ID NO: 327673 - DNA, 15 bp, Homo sapiens
agcctttaaacacag

SEQ ID NO: 327674 - DNA, 15 bp, Homo sapiens
cagcctttaaacaca

SEQ ID NO: 327675 - DNA, 15 bp, Homo sapiens
acagcctttaaacac

SEQ ID NO: 327676 - DNA, 15 bp, Homo sapiens
tacagcctttaaaca

SEQ ID NO: 327677 - DNA, 15 bp, Homo sapiens
ttacagcctttaaac

SEQ ID NO: 327678 - DNA, 15 bp, Homo sapiens
attacagcctttaaa

SEQ ID NO: 327679 - DNA, 15 bp, Homo sapiens
aattacagcctttaa

SEQ ID NO: 327680 - DNA, 15 bp, Homo sapiens
gaattacagccttta

SEQ ID NO: 327681 - DNA, 15 bp, Homo sapiens
ggaattacagccttt

SEQ ID NO: 327682 - DNA, 15 bp, Homo sapiens
tggaattacagcctt

SEQ ID NO: 327683 - DNA, 15 bp, Homo sapiens
gtggaattacagcct

SEQ ID NO: 327684 - DNA, 15 bp, Homo sapiens
tgtggaattacagcc

SEQ ID NO: 327685 - DNA, 15 bp, Homo sapiens
atgtggaattacagc

SEQ ID NO: 327686 - DNA, 15 bp, Homo sapiens
gatgtggaattacag

SEQ ID NO: 327687 - DNA, 15 bp, Homo sapiens
agatgtggaattaca

SEQ ID NO: 327688 - DNA, 15 bp, Homo sapiens
gagatgtggaattac

SEQ ID NO: 327689 - DNA, 15 bp, Homo sapiens
tgagatgtggaatta

SEQ ID NO: 327690 - DNA, 15 bp, Homo sapiens
atgagatgtggaatt

SEQ ID NO: 327691 - DNA, 15 bp, Homo sapiens
aatgagatgtggaat

SEQ ID NO: 327692 - DNA, 15 bp, Homo sapiens
caatgagatgtggaa

SEQ ID NO: 327693 - DNA, 15 bp, Homo sapiens
tcaatgagatgtgga

SEQ ID NO: 327694 - DNA, 15 bp, Homo sapiens
gtcaatgagatgtgg

SEQ ID NO: 327695 - DNA, 15 bp, Homo sapiens
agtcaatgagatgtg

SEQ ID NO: 327696 - DNA, 15 bp, Homo sapiens
cagtcaatgagatgt

SEQ ID NO: 327697 - DNA, 15 bp, Homo sapiens
acagtcaatgagatg

SEQ ID NO: 327698 - DNA, 15 bp, Homo sapiens
cacagtcaatgagat

SEQ ID NO: 327699 - DNA, 15 bp, Homo sapiens
ccacagtcaatgaga

SEQ ID NO: 327700 - DNA, 15 bp, Homo sapiens
accacagtcaatgag

SEQ ID NO: 327701 - DNA, 15 bp, Homo sapiens
taccacagtcaatga

SEQ ID NO: 327702 - DNA, 15 bp, Homo sapiens
ttaccacagtcaatg

SEQ ID NO: 327703 - DNA, 15 bp, Homo sapiens
tttaccacagtcaat

SEQ ID NO: 327704 - DNA, 15 bp, Homo sapiens
atttaccacagtcaa

SEQ ID NO: 327705 - DNA, 15 bp, Homo sapiens
tatttaccacagtca

SEQ ID NO: 327706 - DNA, 15 bp, Homo sapiens
atatttaccacagtc

SEQ ID NO: 327707 - DNA, 15 bp, Homo sapiens
aatatttaccacagt

SEQ ID NO: 327708 - DNA, 15 bp, Homo sapiens
caatatttaccacag

SEQ ID NO: 327709 - DNA, 15 bp, Homo sapiens
tcaatatttaccaca

SEQ ID NO: 327710 - DNA, 15 bp, Homo sapiens
atcaatatttaccac

SEQ ID NO: 327711 - DNA, 15 bp, Homo sapiens
catcaatatttacca

SEQ ID NO: 327712 - DNA, 15 bp, Homo sapiens
tcatcaatatttacc

SEQ ID NO: 327713 - DNA, 15 bp, Homo sapiens
gtcatcaatatttac

SEQ ID NO: 327714 - DNA, 15 bp, Homo sapiens
agtcatcaatattta

SEQ ID NO: 327715 - DNA, 15 bp, Homo sapiens
tagtcatcaatattt

SEQ ID NO: 327716 - DNA, 15 bp, Homo sapiens
ttagtcatcaatatt

SEQ ID NO: 327717 - DNA, 15 bp, Homo sapiens
tttagtcatcaatat

SEQ ID NO: 327718 - DNA, 15 bp, Homo sapiens
ttttagtcatcaata

SEQ ID NO: 327719 - DNA, 15 bp, Homo sapiens
gttttagtcatcaat

SEQ ID NO: 327720 - DNA, 15 bp, Homo sapiens
tgttttagtcatcaa

SEQ ID NO: 327721 - DNA, 15 bp, Homo sapiens
atgttttagtcatca

SEQ ID NO: 327722 - DNA, 15 bp, Homo sapiens
catgttttagtcatc

SEQ ID NO: 327723 - DNA, 15 bp, Homo sapiens
ccatgttttagtcat

SEQ ID NO: 327724 - DNA, 15 bp, Homo sapiens
tccatgttttagtca

SEQ ID NO: 327725 - DNA, 15 bp, Homo sapiens
atccatgttttagtc

SEQ ID NO: 327726 - DNA, 15 bp, Homo sapiens
gatccatgttttagt

SEQ ID NO: 327727 - DNA, 15 bp, Homo sapiens
tgatccatgttttag

SEQ ID NO: 327728 - DNA, 15 bp, Homo sapiens
gtgatccatgtttta

SEQ ID NO: 327729 - DNA, 15 bp, Homo sapiens
agtgatccatgtttt

SEQ ID NO: 327730 - DNA, 15 bp, Homo sapiens
gagtgatccatgttt

SEQ ID NO: 327731 - DNA, 15 bp, Homo sapiens
tgagtgatccatgtt

SEQ ID NO: 327732 - DNA, 15 bp, Homo sapiens
ctgagtgatccatgt

SEQ ID NO: 327733 - DNA, 15 bp, Homo sapiens
gctgagtgatccatg

SEQ ID NO: 327734 - DNA, 15 bp, Homo sapiens
tgctgagtgatccat

SEQ ID NO: 327735 - DNA, 15 bp, Homo sapiens
ttgctgagtgatcca

SEQ ID NO: 327736 - DNA, 15 bp, Homo sapiens
attgctgagtgatcc

SEQ ID NO: 327737 - DNA, 15 bp, Homo sapiens
aattgctgagtgatc

SEQ ID NO: 327738 - DNA, 15 bp, Homo sapiens
aaattgctgagtgat

SEQ ID NO: 327739 - DNA, 15 bp, Homo sapiens
aaaaattgctgagtg

SEQ ID NO: 327740 - DNA, 15 bp, Homo sapiens
aaaaaattgctgagt

SEQ ID NO: 327741 - DNA, 15 bp, Homo sapiens
gaaaaaattgctgag

SEQ ID NO: 327742 - DNA, 15 bp, Homo sapiens
ggaaaaaattgctga

SEQ ID NO: 327743 - DNA, 15 bp, Homo sapiens
tggaaaaaattgctg

SEQ ID NO: 327744 - DNA, 15 bp, Homo sapiens
ttggaaaaaattgct

SEQ ID NO: 327745 - DNA, 15 bp, Homo sapiens
tttggaaaaaattgc

SEQ ID NO: 327746 - DNA, 15 bp, Homo sapiens
ttttggaaaaaattg

SEQ ID NO: 327747 - DNA, 15 bp, Homo sapiens
attttggaaaaaatt

SEQ ID NO: 327748 - DNA, 15 bp, Homo sapiens
cattttggaaaaaat

SEQ ID NO: 327749 - DNA, 15 bp, Homo sapiens
ccattttggaaaaaa

SEQ ID NO: 327750 - DNA, 15 bp, Homo sapiens
cccattttggaaaaa

SEQ ID NO: 327751 - DNA, 15 bp, Homo sapiens
tcccattttggaaaa

SEQ ID NO: 327752 - DNA, 15 bp, Homo sapiens
ttcccattttggaaa

SEQ ID NO: 327753 - DNA, 15 bp, Homo sapiens
attcccattttggaa

SEQ ID NO: 327754 - DNA, 15 bp, Homo sapiens
aattcccattttgga

SEQ ID NO: 327755 - DNA, 15 bp, Homo sapiens
aaattcccattttgg

SEQ ID NO: 327756 - DNA, 15 bp, Homo sapiens
gaaattcccattttg

SEQ ID NO: 327757 - DNA, 15 bp, Homo sapiens
ggaaattcccatttt

SEQ ID NO: 327758 - DNA, 15 bp, Homo sapiens
aggaaattcccattt

SEQ ID NO: 327759 - DNA, 15 bp, Homo sapiens
aaggaaattcccatt

SEQ ID NO: 327760 - DNA, 15 bp, Homo sapiens
taaggaaattcccat

SEQ ID NO: 327761 - DNA, 15 bp, Homo sapiens
ataaggaaattccca

SEQ ID NO: 327762 - DNA, 15 bp, Homo sapiens
aataaggaaattccc

SEQ ID NO: 327763 - DNA, 15 bp, Homo sapiens
caataaggaaattcc

SEQ ID NO: 327764 - DNA, 15 bp, Homo sapiens
acaataaggaaattc

SEQ ID NO: 327765 - DNA, 15 bp, Homo sapiens
aacaataaggaaatt

SEQ ID NO: 327766 - DNA, 15 bp, Homo sapiens
aaacaataaggaaat

SEQ ID NO: 327767 - DNA, 15 bp, Homo sapiens
gaaacaataaggaaa

SEQ ID NO: 327768 - DNA, 15 bp, Homo sapiens
ggaaacaataaggaa

SEQ ID NO: 327769 - DNA, 15 bp, Homo sapiens
aggaaacaataagga

SEQ ID NO: 327770 - DNA, 15 bp, Homo sapiens
gaggaaacaataagg

SEQ ID NO: 327771 - DNA, 15 bp, Homo sapiens
agaggaaacaataag

SEQ ID NO: 327772 - DNA, 15 bp, Homo sapiens
tagaggaaacaataa

SEQ ID NO: 327773 - DNA, 15 bp, Homo sapiens
ttagaggaaacaata

SEQ ID NO: 327774 - DNA, 15 bp, Homo sapiens
attagaggaaacaat

SEQ ID NO: 327775 - DNA, 15 bp, Homo sapiens
aattagaggaaacaa

SEQ ID NO: 327776 - DNA, 15 bp, Homo sapiens
aaattagaggaaaca

SEQ ID NO: 327777 - DNA, 15 bp, Homo sapiens
aaaattagaggaaac

SEQ ID NO: 327778 - DNA, 15 bp, Homo sapiens
aaaaattagaggaaa

SEQ ID NO: 327779 - DNA, 15 bp, Homo sapiens
gaaaaattagaggaa

SEQ ID NO: 327780 - DNA, 15 bp, Homo sapiens
agaaaaattagagga

SEQ ID NO: 327781 - DNA, 15 bp, Homo sapiens
aagaaaaattagagg

SEQ ID NO: 327782 - DNA, 15 bp, Homo sapiens
aaagaaaaattagag

SEQ ID NO: 327783 - DNA, 15 bp, Homo sapiens
aaaagaaaaattaga

SEQ ID NO: 327784 - DNA, 15 bp, Homo sapiens
gaaaagaaaaattag

SEQ ID NO: 327785 - DNA, 15 bp, Homo sapiens
agaaaagaaaaatta

SEQ ID NO: 327786 - DNA, 15 bp, Homo sapiens
aagaaaagaaaaatt

SEQ ID NO: 327787 - DNA, 15 bp, Homo sapiens
aaagaaaagaaaaat

SEQ ID NO: 327788 - DNA, 15 bp, Homo sapiens
tctatctcaaaaaaa

SEQ ID NO: 327789 - DNA, 15 bp, Homo sapiens
gtctatctcaaaaaa

SEQ ID NO: 327790 - DNA, 15 bp, Homo sapiens
agtctatctcaaaaa

SEQ ID NO: 327791 - DNA, 15 bp, Homo sapiens
gagtctatctcaaaa

SEQ ID NO: 327792 - DNA, 15 bp, Homo sapiens
agagtctatctcaaa

SEQ ID NO: 327793 - DNA, 15 bp, Homo sapiens
aagagtctatctcaa

SEQ ID NO: 327794 - DNA, 15 bp, Homo sapiens
caagagtctatctca

SEQ ID NO: 327795 - DNA, 15 bp, Homo sapiens
gcaagagtctatctc

SEQ ID NO: 327796 - DNA, 15 bp, Homo sapiens
agcaagagtctatct

SEQ ID NO: 327797 - DNA, 15 bp, Homo sapiens
gagcaagagtctatc

SEQ ID NO: 327798 - DNA, 15 bp, Homo sapiens
agagcaagagtctat

SEQ ID NO: 327799 - DNA, 15 bp, Homo sapiens
cagagcaagagtcta

SEQ ID NO: 327800 - DNA, 15 bp, Homo sapiens
acagagcaagagtct

SEQ ID NO: 327801 - DNA, 15 bp, Homo sapiens
aacagagcaagagtc

SEQ ID NO: 327802 - DNA, 15 bp, Homo sapiens
caacagagcaagagt

SEQ ID NO: 327803 - DNA, 15 bp, Homo sapiens
acaacagagcaagag

SEQ ID NO: 327804 - DNA, 15 bp, Homo sapiens
cccagcctggacaac

SEQ ID NO: 327805 - DNA, 15 bp, Homo sapiens
gcccagcctggacaa

SEQ ID NO: 327806 - DNA, 15 bp, Homo sapiens
cgcccagcctggaca

SEQ ID NO: 327807 - DNA, 15 bp, Homo sapiens
acgcccagcctggac

SEQ ID NO: 327808 - DNA, 15 bp, Homo sapiens
cacgcccagcctgga

SEQ ID NO: 327809 - DNA, 15 bp, Homo sapiens
tcacgcccagcctgg

SEQ ID NO: 327810 - DNA, 15 bp, Homo sapiens
atcacgcccagcctg

SEQ ID NO: 327811 - DNA, 15 bp, Homo sapiens
gatcacgcccagcct

SEQ ID NO: 327812 - DNA, 15 bp, Homo sapiens
agatcacgcccagcc

SEQ ID NO: 327813 - DNA, 15 bp, Homo sapiens
gagatcacgcccagc

SEQ ID NO: 327814 - DNA, 15 bp, Homo sapiens
tgagatcacgcccag

SEQ ID NO: 327815 - DNA, 15 bp, Homo sapiens
ctgagatcacgccca

SEQ ID NO: 327816 - DNA, 15 bp, Homo sapiens
gctgagatcacgccc

SEQ ID NO: 327817 - DNA, 15 bp, Homo sapiens
agctgagatcacgcc

SEQ ID NO: 327818 - DNA, 15 bp, Homo sapiens
gagctgagatcacgc

SEQ ID NO: 327819 - DNA, 15 bp, Homo sapiens
tgagctgagatcacg

SEQ ID NO: 327820 - DNA, 15 bp, Homo sapiens
gtgagctgagatcac

SEQ ID NO: 327821 - DNA, 15 bp, Homo sapiens
acggaggttgcagtg

SEQ ID NO: 327822 - DNA, 15 bp, Homo sapiens
gacggaggttgcagt

SEQ ID NO: 327823 - DNA, 15 bp, Homo sapiens
agacggaggttgcag

SEQ ID NO: 327824 - DNA, 15 bp, Homo sapiens
gagacggaggttgca

SEQ ID NO: 327825 - DNA, 15 bp, Homo sapiens
ggagacggaggttgc

SEQ ID NO: 327826 - DNA, 15 bp, Homo sapiens
tggagacggaggttg

SEQ ID NO: 327827 - DNA, 15 bp, Homo sapiens
ctggagacggaggtt

SEQ ID NO: 327828 - DNA, 15 bp, Homo sapiens
cctggagacggaggt

SEQ ID NO: 327829 - DNA, 15 bp, Homo sapiens
ccctggagacggagg

SEQ ID NO: 327830 - DNA, 15 bp, Homo sapiens
accctggagacggag

SEQ ID NO: 327831 - DNA, 15 bp, Homo sapiens
aaccctggagacgga

SEQ ID NO: 327832 - DNA, 15 bp, Homo sapiens
gaaccctggagacgg

SEQ ID NO: 327833 - DNA, 15 bp, Homo sapiens
tgaaccctggagacg

SEQ ID NO: 327834 - DNA, 15 bp, Homo sapiens
ttgaaccctggagac

SEQ ID NO: 327835 - DNA, 15 bp, Homo sapiens
cttgaaccctggaga

SEQ ID NO: 327836 - DNA, 15 bp, Homo sapiens
gcttgaaccctggag

SEQ ID NO: 327837 - DNA, 15 bp, Homo sapiens
ggcttgaaccctgga

SEQ ID NO: 327838 - DNA, 15 bp, Homo sapiens
tggcttgaaccctgg

SEQ ID NO: 327839 - DNA, 15 bp, Homo sapiens
atggcttgaaccctg

SEQ ID NO: 327840 - DNA, 15 bp, Homo sapiens
aatggcttgaaccct

SEQ ID NO: 327841 - DNA, 15 bp, Homo sapiens
gaatggcttgaaccc

SEQ ID NO: 327842 - DNA, 15 bp, Homo sapiens
gtggtggcaggcacc

SEQ ID NO: 327843 - DNA, 15 bp, Homo sapiens
tgtggtggcaggcac

SEQ ID NO: 327844 - DNA, 15 bp, Homo sapiens
gtgtggtggcaggca

SEQ ID NO: 327845 - DNA, 15 bp, Homo sapiens
ggtgtggtggcaggc

SEQ ID NO: 327846 - DNA, 15 bp, Homo sapiens
aggtgtggtggcagg

SEQ ID NO: 327847 - DNA, 15 bp, Homo sapiens
caggtgtggtggcag

SEQ ID NO: 327848 - DNA, 15 bp, Homo sapiens
gtagccaggtgtggt

SEQ ID NO: 327849 - DNA, 15 bp, Homo sapiens
agtagccaggtgtgg

SEQ ID NO: 327850 - DNA, 15 bp, Homo sapiens
aagtagccaggtgtg

SEQ ID NO: 327851 - DNA, 15 bp, Homo sapiens
aaagtagccaggtgt

SEQ ID NO: 327852 - DNA, 15 bp, Homo sapiens
aaaagtagccaggtg

SEQ ID NO: 327853 - DNA, 15 bp, Homo sapiens
aaaaagtagccaggt

SEQ ID NO: 327854 - DNA, 15 bp, Homo sapiens
caaaaagtagccagg

SEQ ID NO: 327855 - DNA, 15 bp, Homo sapiens
acaaaaagtagccag

SEQ ID NO: 327856 - DNA, 15 bp, Homo sapiens
tacaaaaagtagcca

SEQ ID NO: 327857 - DNA, 15 bp, Homo sapiens
atacaaaaagtagcc

SEQ ID NO: 327858 - DNA, 15 bp, Homo sapiens
aatacaaaaagtagc

SEQ ID NO: 327859 - DNA, 15 bp, Homo sapiens
aaatacaaaaagtag

SEQ ID NO: 327860 - DNA, 15 bp, Homo sapiens
aaaatacaaaaagta

SEQ ID NO: 327861 - DNA, 15 bp, Homo sapiens
ggccaacacggtgaa

SEQ ID NO: 327862 - DNA, 15 bp, Homo sapiens
tggccaacacggtga

SEQ ID NO: 327863 - DNA, 15 bp, Homo sapiens
gtggccaacacggtg

SEQ ID NO: 327864 - DNA, 15 bp, Homo sapiens
cgtggccaacacggt

SEQ ID NO: 327865 - DNA, 15 bp, Homo sapiens
gcgtggccaacacgg

SEQ ID NO: 327866 - DNA, 15 bp, Homo sapiens
agcgtggccaacacg

SEQ ID NO: 327867 - DNA, 15 bp, Homo sapiens
cagcgtggccaacac

SEQ ID NO: 327868 - DNA, 15 bp, Homo sapiens
ccagcgtggccaaca

SEQ ID NO: 327869 - DNA, 15 bp, Homo sapiens
accagcgtggccaac

SEQ ID NO: 327870 - DNA, 15 bp, Homo sapiens
gaccagcgtggccaa

SEQ ID NO: 327871 - DNA, 15 bp, Homo sapiens
agaccagcgtggcca

SEQ ID NO: 327872 - DNA, 15 bp, Homo sapiens
gagaccagcgtggcc

SEQ ID NO: 327873 - DNA, 15 bp, Homo sapiens
cgagaccagcgtggc

SEQ ID NO: 327874 - DNA, 15 bp, Homo sapiens
tcgagaccagcgtgg

SEQ ID NO: 327875 - DNA, 15 bp, Homo sapiens
ttcgagaccagcgtg

SEQ ID NO: 327876 - DNA, 15 bp, Homo sapiens
gttcgagaccagcgt

SEQ ID NO: 327877 - DNA, 15 bp, Homo sapiens
agttcgagaccagcg

SEQ ID NO: 327878 - DNA, 15 bp, Homo sapiens
aagttcgagaccagc

SEQ ID NO: 327879 - DNA, 15 bp, Homo sapiens
aaagttcgagaccag

SEQ ID NO: 327880 - DNA, 15 bp, Homo sapiens
aaaagttcgagacca

SEQ ID NO: 327881 - DNA, 15 bp, Homo sapiens
caaaagttcgagacc

SEQ ID NO: 327882 - DNA, 15 bp, Homo sapiens
tcaaaagttcgagac

SEQ ID NO: 327883 - DNA, 15 bp, Homo sapiens
gtcaaaagttcgaga

SEQ ID NO: 327884 - DNA, 15 bp, Homo sapiens
ggtcaaaagttcgag

SEQ ID NO: 327885 - DNA, 15 bp, Homo sapiens
aggtcaaaagttcga

SEQ ID NO: 327886 - DNA, 15 bp, Homo sapiens
gaggtcaaaagttcg

SEQ ID NO: 327887 - DNA, 15 bp, Homo sapiens
tgaggtcaaaagttc

SEQ ID NO: 327888 - DNA, 15 bp, Homo sapiens
ctgaggtcaaaagtt

SEQ ID NO: 327889 - DNA, 15 bp, Homo sapiens
cctgaggtcaaaagt

SEQ ID NO: 327890 - DNA, 15 bp, Homo sapiens
acctgaggtcaaaag

SEQ ID NO: 327891 - DNA, 15 bp, Homo sapiens
cacctgaggtcaaaa

SEQ ID NO: 327892 - DNA, 15 bp, Homo sapiens
tcacctgaggtcaaa

SEQ ID NO: 327893 - DNA, 15 bp, Homo sapiens
agtgggcagatcacc

SEQ ID NO: 327894 - DNA, 15 bp, Homo sapiens
aagtgggcagatcac

SEQ ID NO: 327895 - DNA, 15 bp, Homo sapiens
aaagtgggcagatca

SEQ ID NO: 327896 - DNA, 15 bp, Homo sapiens
caaagtgggcagatc

SEQ ID NO: 327897 - DNA, 15 bp, Homo sapiens
ccaaagtgggcagat

SEQ ID NO: 327898 - DNA, 15 bp, Homo sapiens
gccaaagtgggcaga

SEQ ID NO: 327899 - DNA, 15 bp, Homo sapiens
ggccaaagtgggcag

SEQ ID NO: 327900 - DNA, 15 bp, Homo sapiens
aggccaaagtgggca

SEQ ID NO: 327901 - DNA, 15 bp, Homo sapiens
gaggccaaagtgggc

SEQ ID NO: 327902 - DNA, 15 bp, Homo sapiens
ggaggccaaagtggg

SEQ ID NO: 327903 - DNA, 15 bp, Homo sapiens
gggaggccaaagtgg

SEQ ID NO: 327904 - DNA, 15 bp, Homo sapiens
tgggaggccaaagtg

SEQ ID NO: 327905 - DNA, 15 bp, Homo sapiens
ttgggaggccaaagt

SEQ ID NO: 327906 - DNA, 15 bp, Homo sapiens
tttgggaggccaaag

SEQ ID NO: 327907 - DNA, 15 bp, Homo sapiens
ctttgggaggccaaa

SEQ ID NO: 327908 - DNA, 15 bp, Homo sapiens
acaggctgggcacag

SEQ ID NO: 327909 - DNA, 15 bp, Homo sapiens
aacaggctgggcaca

SEQ ID NO: 327910 - DNA, 15 bp, Homo sapiens
aaacaggctgggcac

SEQ ID NO: 327911 - DNA, 15 bp, Homo sapiens
gaaacaggctgggca

SEQ ID NO: 327912 - DNA, 15 bp, Homo sapiens
ggaaacaggctgggc

SEQ ID NO: 327913 - DNA, 15 bp, Homo sapiens
aggaaacaggctggg

SEQ ID NO: 327914 - DNA, 15 bp, Homo sapiens
gaggaaacaggctgg

SEQ ID NO: 327915 - DNA, 15 bp, Homo sapiens
agaggaaacaggctg

SEQ ID NO: 327916 - DNA, 15 bp, Homo sapiens
tagaggaaacaggct

SEQ ID NO: 327917 - DNA, 15 bp, Homo sapiens
ttagaggaaacaggc

SEQ ID NO: 327918 - DNA, 15 bp, Homo sapiens
attagaggaaacagg

SEQ ID NO: 327919 - DNA, 15 bp, Homo sapiens
aattagaggaaacag

SEQ ID NO: 327920 - DNA, 15 bp, Homo sapiens
caaaattagaggaaa

SEQ ID NO: 327921 - DNA, 15 bp, Homo sapiens
tcaaaattagaggaa

SEQ ID NO: 327922 - DNA, 15 bp, Homo sapiens
ttcaaaattagagga

SEQ ID NO: 327923 - DNA, 15 bp, Homo sapiens
tttcaaaattagagg

SEQ ID NO: 327924 - DNA, 15 bp, Homo sapiens
ttttcaaaattagag

SEQ ID NO: 327925 - DNA, 15 bp, Homo sapiens
attttcaaaattaga

SEQ ID NO: 327926 - DNA, 15 bp, Homo sapiens
tattttcaaaattag

SEQ ID NO: 327927 - DNA, 15 bp, Homo sapiens
atattttcaaaatta

SEQ ID NO: 327928 - DNA, 15 bp, Homo sapiens
catattttcaaaatt

SEQ ID NO: 327929 - DNA, 15 bp, Homo sapiens
acatattttcaaaat

SEQ ID NO: 327930 - DNA, 15 bp, Homo sapiens
aacatattttcaaaa

SEQ ID NO: 327931 - DNA, 15 bp, Homo sapiens
gaacatattttcaaa

SEQ ID NO: 327932 - DNA, 15 bp, Homo sapiens
tgaacatattttcaa

SEQ ID NO: 327933 - DNA, 15 bp, Homo sapiens
atgaacatattttca

SEQ ID NO: 327934 - DNA, 15 bp, Homo sapiens
catgaacatattttc

SEQ ID NO: 327935 - DNA, 15 bp, Homo sapiens
ccatgaacatatttt

SEQ ID NO: 327936 - DNA, 15 bp, Homo sapiens
accatgaacatattt

SEQ ID NO: 327937 - DNA, 15 bp, Homo sapiens
taccatgaacatatt

SEQ ID NO: 327938 - DNA, 15 bp, Homo sapiens
ttaccatgaacatat

SEQ ID NO: 327939 - DNA, 15 bp, Homo sapiens
tttaccatgaacata

SEQ ID NO: 327940 - DNA, 15 bp, Homo sapiens
gtttaccatgaacat

SEQ ID NO: 327941 - DNA, 15 bp, Homo sapiens
tgtttaccatgaaca

SEQ ID NO: 327942 - DNA, 15 bp, Homo sapiens
atgtttaccatgaac

SEQ ID NO: 327943 - DNA, 15 bp, Homo sapiens
aatgtttaccatgaa

SEQ ID NO: 327944 - DNA, 15 bp, Homo sapiens
caatgtttaccatga

SEQ ID NO: 327945 - DNA, 15 bp, Homo sapiens
gcaatgtttaccatg

SEQ ID NO: 327946 - DNA, 15 bp, Homo sapiens
tgcaatgtttaccat

SEQ ID NO: 327947 - DNA, 15 bp, Homo sapiens
ttgcaatgtttacca

SEQ ID NO: 327948 - DNA, 15 bp, Homo sapiens
gttgcaatgtttacc

SEQ ID NO: 327949 - DNA, 15 bp, Homo sapiens
tgttgcaatgtttac

SEQ ID NO: 327950 - DNA, 15 bp, Homo sapiens
ttgttgcaatgttta

SEQ ID NO: 327951 - DNA, 15 bp, Homo sapiens
gttgttgcaatgttt

SEQ ID NO: 327952 - DNA, 15 bp, Homo sapiens
tgttgttgcaatgtt

SEQ ID NO: 327953 - DNA, 15 bp, Homo sapiens
gtgttgttgcaatgt

SEQ ID NO: 327954 - DNA, 15 bp, Homo sapiens
tgtgttgttgcaatg

SEQ ID NO: 327955 - DNA, 15 bp, Homo sapiens
gtgtgttgttgcaat

SEQ ID NO: 327956 - DNA, 15 bp, Homo sapiens
tgtgtgttgttgcaa

SEQ ID NO: 327957 - DNA, 15 bp, Homo sapiens
ttgtgtgttgttgca

SEQ ID NO: 327958 - DNA, 15 bp, Homo sapiens
tttgtgtgttgttgc

SEQ ID NO: 327959 - DNA, 15 bp, Homo sapiens
ttttgtgtgttgttg

SEQ ID NO: 327960 - DNA, 15 bp, Homo sapiens
attttgtgtgttgtt

SEQ ID NO: 327961 - DNA, 15 bp, Homo sapiens
gattttgtgtgttgt

SEQ ID NO: 327962 - DNA, 15 bp, Homo sapiens
tgattttgtgtgttg

SEQ ID NO: 327963 - DNA, 15 bp, Homo sapiens
gtgattttgtgtgtt

SEQ ID NO: 327964 - DNA, 15 bp, Homo sapiens
tgtgattttgtgtgt

SEQ ID NO: 327965 - DNA, 15 bp, Homo sapiens
atgtgattttgtgtg

SEQ ID NO: 327966 - DNA, 15 bp, Homo sapiens
tatgtgattttgtgt

SEQ ID NO: 327967 - DNA, 15 bp, Homo sapiens
ctatgtgattttgtg

SEQ ID NO: 327968 - DNA, 15 bp, Homo sapiens
cctatgtgattttgt

SEQ ID NO: 327969 - DNA, 15 bp, Homo sapiens
tcctatgtgattttg

SEQ ID NO: 327970 - DNA, 15 bp, Homo sapiens
atcctatgtgatttt

SEQ ID NO: 327971 - DNA, 15 bp, Homo sapiens
tatcctatgtgattt

SEQ ID NO: 327972 - DNA, 15 bp, Homo sapiens
ttatcctatgtgatt

SEQ ID NO: 327973 - DNA, 15 bp, Homo sapiens
tttatcctatgtgat

SEQ ID NO: 327974 - DNA, 15 bp, Homo sapiens
ctttatcctatgtga

SEQ ID NO: 327975 - DNA, 15 bp, Homo sapiens
actttatcctatgtg

SEQ ID NO: 327976 - DNA, 15 bp, Homo sapiens
tactttatcctatgt

SEQ ID NO: 327977 - DNA, 15 bp, Homo sapiens
ttactttatcctatg

SEQ ID NO: 327978 - DNA, 15 bp, Homo sapiens
tttactttatcctat

SEQ ID NO: 327979 - DNA, 15 bp, Homo sapiens
ttttactttatccta

SEQ ID NO: 327980 - DNA, 15 bp, Homo sapiens
attttactttatcct

SEQ ID NO: 327981 - DNA, 15 bp, Homo sapiens
aattttactttatcc

SEQ ID NO: 327982 - DNA, 15 bp, Homo sapiens
caattttactttatc

SEQ ID NO: 327983 - DNA, 15 bp, Homo sapiens
gcaattttactttat

SEQ ID NO: 327984 - DNA, 15 bp, Homo sapiens
ggcaattttacttta

SEQ ID NO: 327985 - DNA, 15 bp, Homo sapiens
aggcaattttacttt

SEQ ID NO: 327986 - DNA, 15 bp, Homo sapiens
gaggcaattttactt

SEQ ID NO: 327987 - DNA, 15 bp, Homo sapiens
ggaggcaattttact

SEQ ID NO: 327988 - DNA, 15 bp, Homo sapiens
tggaggcaattttac

SEQ ID NO: 327989 - DNA, 15 bp, Homo sapiens
gtggaggcaatttta

SEQ ID NO: 327990 - DNA, 15 bp, Homo sapiens
tgtggaggcaatttt

SEQ ID NO: 327991 - DNA, 15 bp, Homo sapiens
atgtggaggcaattt

SEQ ID NO: 327992 - DNA, 15 bp, Homo sapiens
gatgtggaggcaatt

SEQ ID NO: 327993 - DNA, 15 bp, Homo sapiens
tgatgtggaggcaat

SEQ ID NO: 327994 - DNA, 15 bp, Homo sapiens
gtgatgtggaggcaa

SEQ ID NO: 327995 - DNA, 15 bp, Homo sapiens
tgtgatgtggaggca

SEQ ID NO: 327996 - DNA, 15 bp, Homo sapiens
gtgtgatgtggaggc

SEQ ID NO: 327997 - DNA, 15 bp, Homo sapiens
agtgtgatgtggagg

SEQ ID NO: 327998 - DNA, 15 bp, Homo sapiens
tagtgtgatgtggag

SEQ ID NO: 327999 - DNA, 15 bp, Homo sapiens
gtagtgtgatgtgga

SEQ ID NO: 328000 - DNA, 15 bp, Homo sapiens
agtagtgtgatgtgg

SEQ ID NO: 328001 - DNA, 15 bp, Homo sapiens
aagtagtgtgatgtg

SEQ ID NO: 328002 - DNA, 15 bp, Homo sapiens
aaagtagtgtgatgt

SEQ ID NO: 328003 - DNA, 15 bp, Homo sapiens
caaagtagtgtgatg

SEQ ID NO: 328004 - DNA, 15 bp, Homo sapiens
tcaaagtagtgtgat

SEQ ID NO: 328005 - DNA, 15 bp, Homo sapiens
ctcaaagtagtgtga

SEQ ID NO: 328006 - DNA, 15 bp, Homo sapiens
tctcaaagtagtgtg

SEQ ID NO: 328007 - DNA, 15 bp, Homo sapiens
atctcaaagtagtgt

SEQ ID NO: 328008 - DNA, 15 bp, Homo sapiens
tatctcaaagtagtg

SEQ ID NO: 328009 - DNA, 15 bp, Homo sapiens
ttatctcaaagtagt

SEQ ID NO: 328010 - DNA, 15 bp, Homo sapiens
attatctcaaagtag

SEQ ID NO: 328011 - DNA, 15 bp, Homo sapiens
cattatctcaaagta

SEQ ID NO: 328012 - DNA, 15 bp, Homo sapiens
tcattatctcaaagt

SEQ ID NO: 328013 - DNA, 15 bp, Homo sapiens
atcattatctcaaag

SEQ ID NO: 328014 - DNA, 15 bp, Homo sapiens
aatcattatctcaaa

SEQ ID NO: 328015 - DNA, 15 bp, Homo sapiens
taatcattatctcaa

SEQ ID NO: 328016 - DNA, 15 bp, Homo sapiens
gtaatcattatctca

SEQ ID NO: 328017 - DNA, 15 bp, Homo sapiens
tgtaatcattatctc

SEQ ID NO: 328018 - DNA, 15 bp, Homo sapiens
atgtaatcattatct

SEQ ID NO: 328019 - DNA, 15 bp, Homo sapiens
gatgtaatcattatc

SEQ ID NO: 328020 - DNA, 15 bp, Homo sapiens
agatgtaatcattat

SEQ ID NO: 328021 - DNA, 15 bp, Homo sapiens
tagatgtaatcatta

SEQ ID NO: 328022 - DNA, 15 bp, Homo sapiens
gtagatgtaatcatt

SEQ ID NO: 328023 - DNA, 15 bp, Homo sapiens
agtagatgtaatcat

SEQ ID NO: 328024 - DNA, 15 bp, Homo sapiens
tagtagatgtaatca

SEQ ID NO: 328025 - DNA, 15 bp, Homo sapiens
atagtagatgtaatc

SEQ ID NO: 328026 - DNA, 15 bp, Homo sapiens
catagtagatgtaat

SEQ ID NO: 328027 - DNA, 15 bp, Homo sapiens
acatagtagatgtaa

SEQ ID NO: 328028 - DNA, 15 bp, Homo sapiens
gacatagtagatgta

SEQ ID NO: 328029 - DNA, 15 bp, Homo sapiens
tgacatagtagatgt

SEQ ID NO: 328030 - DNA, 15 bp, Homo sapiens
gtgacatagtagatg

SEQ ID NO: 328031 - DNA, 15 bp, Homo sapiens
ggtgacatagtagat

SEQ ID NO: 328032 - DNA, 15 bp, Homo sapiens
aggtgacatagtaga

SEQ ID NO: 328033 - DNA, 15 bp, Homo sapiens
aaggtgacatagtag

SEQ ID NO: 328034 - DNA, 15 bp, Homo sapiens
aaaggtgacatagta

SEQ ID NO: 328035 - DNA, 15 bp, Homo sapiens
aaaaggtgacatagt

SEQ ID NO: 328036 - DNA, 15 bp, Homo sapiens
caaaaggtgacatag

SEQ ID NO: 328037 - DNA, 15 bp, Homo sapiens
acaaaaggtgacata

SEQ ID NO: 328038 - DNA, 15 bp, Homo sapiens
aacaaaaggtgacat

SEQ ID NO: 328039 - DNA, 15 bp, Homo sapiens
aaacaaaaggtgaca

SEQ ID NO: 328040 - DNA, 15 bp, Homo sapiens
gaaacaaaaggtgac

SEQ ID NO: 328041 - DNA, 15 bp, Homo sapiens
agaaacaaaaggtga

SEQ ID NO: 328042 - DNA, 15 bp, Homo sapiens
gagaaacaaaaggtg

SEQ ID NO: 328043 - DNA, 15 bp, Homo sapiens
tgagaaacaaaaggt

SEQ ID NO: 328044 - DNA, 15 bp, Homo sapiens
gtgagaaacaaaagg

SEQ ID NO: 328045 - DNA, 15 bp, Homo sapiens
tgtgagaaacaaaag

SEQ ID NO: 328046 - DNA, 15 bp, Homo sapiens
atgtgagaaacaaaa

SEQ ID NO: 328047 - DNA, 15 bp, Homo sapiens
tatgtgagaaacaaa

SEQ ID NO: 328048 - DNA, 15 bp, Homo sapiens
ctatgtgagaaacaa

SEQ ID NO: 328049 - DNA, 15 bp, Homo sapiens
gctatgtgagaaaca

SEQ ID NO: 328050 - DNA, 15 bp, Homo sapiens
tgctatgtgagaaac

SEQ ID NO: 328051 - DNA, 15 bp, Homo sapiens
atgctatgtgagaaa

SEQ ID NO: 328052 - DNA, 15 bp, Homo sapiens
aatgctatgtgagaa

SEQ ID NO: 328053 - DNA, 15 bp, Homo sapiens
gaatgctatgtgaga

SEQ ID NO: 328054 - DNA, 15 bp, Homo sapiens
ggaatgctatgtgag

SEQ ID NO: 328055 - DNA, 15 bp, Homo sapiens
tggaatgctatgtga

SEQ ID NO: 328056 - DNA, 15 bp, Homo sapiens
atggaatgctatgtg

SEQ ID NO: 328057 - DNA, 15 bp, Homo sapiens
catggaatgctatgt

SEQ ID NO: 328058 - DNA, 15 bp, Homo sapiens
tcatggaatgctatg

SEQ ID NO: 328059 - DNA, 15 bp, Homo sapiens
atcatggaatgctat

SEQ ID NO: 328060 - DNA, 15 bp, Homo sapiens
tatcatggaatgcta

SEQ ID NO: 328061 - DNA, 15 bp, Homo sapiens
atatcatggaatgct

SEQ ID NO: 328062 - DNA, 15 bp, Homo sapiens
catatcatggaatgc

SEQ ID NO: 328063 - DNA, 15 bp, Homo sapiens
gcatatcatggaatg

SEQ ID NO: 328064 - DNA, 15 bp, Homo sapiens
tgcatatcatggaat

SEQ ID NO: 328065 - DNA, 15 bp, Homo sapiens
atgcatatcatggaa

SEQ ID NO: 328066 - DNA, 15 bp, Homo sapiens
catgcatatcatgga

SEQ ID NO: 328067 - DNA, 15 bp, Homo sapiens
tcatgcatatcatgg

SEQ ID NO: 328068 - DNA, 15 bp, Homo sapiens
ctcatgcatatcatg

SEQ ID NO: 328069 - DNA, 15 bp, Homo sapiens
actcatgcatatcat

SEQ ID NO: 328070 - DNA, 15 bp, Homo sapiens
gactcatgcatatca

SEQ ID NO: 328071 - DNA, 15 bp, Homo sapiens
tgactcatgcatatc

SEQ ID NO: 328072 - DNA, 15 bp, Homo sapiens
atgactcatgcatat

SEQ ID NO: 328073 - DNA, 15 bp, Homo sapiens
gatgactcatgcata

SEQ ID NO: 328074 - DNA, 15 bp, Homo sapiens
cgatgactcatgcat

SEQ ID NO: 328075 - DNA, 15 bp, Homo sapiens
acgatgactcatgca

SEQ ID NO: 328076 - DNA, 15 bp, Homo sapiens
cacgatgactcatgc

SEQ ID NO: 328077 - DNA, 15 bp, Homo sapiens
acacgatgactcatg

SEQ ID NO: 328078 - DNA, 15 bp, Homo sapiens
tacacgatgactcat

SEQ ID NO: 328079 - DNA, 15 bp, Homo sapiens
gtacacgatgactca

SEQ ID NO: 328080 - DNA, 15 bp, Homo sapiens
ggtacacgatgactc

SEQ ID NO: 328081 - DNA, 15 bp, Homo sapiens
aggtacacgatgact

SEQ ID NO: 328082 - DNA, 15 bp, Homo sapiens
taggtacacgatgac

SEQ ID NO: 328083 - DNA, 15 bp, Homo sapiens
ttaggtacacgatga

SEQ ID NO: 328084 - DNA, 15 bp, Homo sapiens
gttaggtacacgatg

SEQ ID NO: 328085 - DNA, 15 bp, Homo sapiens
ggttaggtacacgat

SEQ ID NO: 328086 - DNA, 15 bp, Homo sapiens
tggttaggtacacga

SEQ ID NO: 328087 - DNA, 15 bp, Homo sapiens
ttggttaggtacacg

SEQ ID NO: 328088 - DNA, 15 bp, Homo sapiens
attggttaggtacac

SEQ ID NO: 328089 - DNA, 15 bp, Homo sapiens
tattggttaggtaca

SEQ ID NO: 328090 - DNA, 15 bp, Homo sapiens
atattggttaggtac

SEQ ID NO: 328091 - DNA, 15 bp, Homo sapiens
catattggttaggta

SEQ ID NO: 328092 - DNA, 15 bp, Homo sapiens
ccatattggttaggt

SEQ ID NO: 328093 - DNA, 15 bp, Homo sapiens
accatattggttagg

SEQ ID NO: 328094 - DNA, 15 bp, Homo sapiens
aaccatattggttag

SEQ ID NO: 328095 - DNA, 15 bp, Homo sapiens
aaaccatattggtta

SEQ ID NO: 328096 - DNA, 15 bp, Homo sapiens
aaaaccatattggtt

SEQ ID NO: 328097 - DNA, 15 bp, Homo sapiens
caaaaccatattggt

SEQ ID NO: 328098 - DNA, 15 bp, Homo sapiens
ccaaaaccatattgg

SEQ ID NO: 328099 - DNA, 15 bp, Homo sapiens
cccaaaaccatattg

SEQ ID NO: 328100 - DNA, 15 bp, Homo sapiens
tcccaaaaccatatt

SEQ ID NO: 328101 - DNA, 15 bp, Homo sapiens
ctcccaaaaccatat

SEQ ID NO: 328102 - DNA, 15 bp, Homo sapiens
cctcccaaaaccata

SEQ ID NO: 328103 - DNA, 15 bp, Homo sapiens
gcctcccaaaaccat

SEQ ID NO: 328104 - DNA, 15 bp, Homo sapiens
cgcctcccaaaacca

SEQ ID NO: 328105 - DNA, 15 bp, Homo sapiens
acgcctcccaaaacc

SEQ ID NO: 328106 - DNA, 15 bp, Homo sapiens
aacgcctcccaaaac

SEQ ID NO: 328107 - DNA, 15 bp, Homo sapiens
aaacgcctcccaaaa

SEQ ID NO: 328108 - DNA, 15 bp, Homo sapiens
aaaacgcctcccaaa

SEQ ID NO: 328109 - DNA, 15 bp, Homo sapiens
aaaaacgcctcccaa

SEQ ID NO: 328110 - DNA, 15 bp, Homo sapiens
caaaaacgcctccca

SEQ ID NO: 328111 - DNA, 15 bp, Homo sapiens
tcaaaaacgcctccc

SEQ ID NO: 328112 - DNA, 15 bp, Homo sapiens
ttcaaaaacgcctcc

SEQ ID NO: 328113 - DNA, 15 bp, Homo sapiens
tttcaaaaacgcctc

SEQ ID NO: 328114 - DNA, 15 bp, Homo sapiens
gtttcaaaaacgcct

SEQ ID NO: 328115 - DNA, 15 bp, Homo sapiens
agtttcaaaaacgcc

SEQ ID NO: 328116 - DNA, 15 bp, Homo sapiens
tagtttcaaaaacgc

SEQ ID NO: 328117 - DNA, 15 bp, Homo sapiens
ttagtttcaaaaacg

SEQ ID NO: 328118 - DNA, 15 bp, Homo sapiens
tttagtttcaaaaac

SEQ ID NO: 328119 - DNA, 15 bp, Homo sapiens
ttttagtttcaaaaa

SEQ ID NO: 328120 - DNA, 15 bp, Homo sapiens
gttttagtttcaaaa

SEQ ID NO: 328121 - DNA, 15 bp, Homo sapiens
tgttttagtttcaaa

SEQ ID NO: 328122 - DNA, 15 bp, Homo sapiens
atgttttagtttcaa

SEQ ID NO: 328123 - DNA, 15 bp, Homo sapiens
aatgttttagtttca

SEQ ID NO: 328124 - DNA, 15 bp, Homo sapiens
taatgttttagtttc

SEQ ID NO: 328125 - DNA, 15 bp, Homo sapiens
gtaatgttttagttt

SEQ ID NO: 328126 - DNA, 15 bp, Homo sapiens
agtaatgttttagtt

SEQ ID NO: 328127 - DNA, 15 bp, Homo sapiens
tagtaatgttttagt

SEQ ID NO: 328128 - DNA, 15 bp, Homo sapiens
gtagtaatgttttag

SEQ ID NO: 328129 - DNA, 15 bp, Homo sapiens
agtagtaatgtttta

SEQ ID NO: 328130 - DNA, 15 bp, Homo sapiens
cagtagtaatgtttt

SEQ ID NO: 328131 - DNA, 15 bp, Homo sapiens
tcagtagtaatgttt

SEQ ID NO: 328132 - DNA, 15 bp, Homo sapiens
gtcagtagtaatgtt

SEQ ID NO: 328133 - DNA, 15 bp, Homo sapiens
tgtcagtagtaatgt

SEQ ID NO: 328134 - DNA, 15 bp, Homo sapiens
atgtcagtagtaatg

SEQ ID NO: 328135 - DNA, 15 bp, Homo sapiens
catgtcagtagtaat

SEQ ID NO: 328136 - DNA, 15 bp, Homo sapiens
tcatgtcagtagtaa

SEQ ID NO: 328137 - DNA, 15 bp, Homo sapiens
ttcatgtcagtagta

SEQ ID NO: 328138 - DNA, 15 bp, Homo sapiens
gttcatgtcagtagt

SEQ ID NO: 328139 - DNA, 15 bp, Homo sapiens
agttcatgtcagtag

SEQ ID NO: 328140 - DNA, 15 bp, Homo sapiens
aagttcatgtcagta

SEQ ID NO: 328141 - DNA, 15 bp, Homo sapiens
taagttcatgtcagt

SEQ ID NO: 328142 - DNA, 15 bp, Homo sapiens
ctaagttcatgtcag

SEQ ID NO: 328143 - DNA, 15 bp, Homo sapiens
tctaagttcatgtca

SEQ ID NO: 328144 - DNA, 15 bp, Homo sapiens
ttctaagttcatgtc

SEQ ID NO: 328145 - DNA, 15 bp, Homo sapiens
tttctaagttcatgt

SEQ ID NO: 328146 - DNA, 15 bp, Homo sapiens
atttctaagttcatg

SEQ ID NO: 328147 - DNA, 15 bp, Homo sapiens
catttctaagttcat

SEQ ID NO: 328148 - DNA, 15 bp, Homo sapiens
ccatttctaagttca

SEQ ID NO: 328149 - DNA, 15 bp, Homo sapiens
gccatttctaagttc

SEQ ID NO: 328150 - DNA, 15 bp, Homo sapiens
agccatttctaagtt

SEQ ID NO: 328151 - DNA, 15 bp, Homo sapiens
gagccatttctaagt

SEQ ID NO: 328152 - DNA, 15 bp, Homo sapiens
ggagccatttctaag

SEQ ID NO: 328153 - DNA, 15 bp, Homo sapiens
tggagccatttctaa

SEQ ID NO: 328154 - DNA, 15 bp, Homo sapiens
ttggagccatttcta

SEQ ID NO: 328155 - DNA, 15 bp, Homo sapiens
cttggagccatttct

SEQ ID NO: 328156 - DNA, 15 bp, Homo sapiens
tcttggagccatttc

SEQ ID NO: 328157 - DNA, 15 bp, Homo sapiens
atcttggagccattt

SEQ ID NO: 328158 - DNA, 15 bp, Homo sapiens
tatcttggagccatt

SEQ ID NO: 328159 - DNA, 15 bp, Homo sapiens
ttatcttggagccat

SEQ ID NO: 328160 - DNA, 15 bp, Homo sapiens
tttatcttggagcca

SEQ ID NO: 328161 - DNA, 15 bp, Homo sapiens
ctttatcttggagcc

SEQ ID NO: 328162 - DNA, 15 bp, Homo sapiens
actttatcttggagc

SEQ ID NO: 328163 - DNA, 15 bp, Homo sapiens
aactttatcttggag

SEQ ID NO: 328164 - DNA, 15 bp, Homo sapiens
aaactttatcttgga

SEQ ID NO: 328165 - DNA, 15 bp, Homo sapiens
caaactttatcttgg

SEQ ID NO: 328166 - DNA, 15 bp, Homo sapiens
acaaactttatcttg

SEQ ID NO: 328167 - DNA, 15 bp, Homo sapiens
tacaaactttatctt

SEQ ID NO: 328168 - DNA, 15 bp, Homo sapiens
ttacaaactttatct

SEQ ID NO: 328169 - DNA, 15 bp, Homo sapiens
tttacaaactttatc

SEQ ID NO: 328170 - DNA, 15 bp, Homo sapiens
ctttacaaactttat

SEQ ID NO: 328171 - DNA, 15 bp, Homo sapiens
tctttacaaacttta

SEQ ID NO: 328172 - DNA, 15 bp, Homo sapiens
ttctttacaaacttt

SEQ ID NO: 328173 - DNA, 15 bp, Homo sapiens
cttctttacaaactt

SEQ ID NO: 328174 - DNA, 15 bp, Homo sapiens
tcttctttacaaact

SEQ ID NO: 328175 - DNA, 15 bp, Homo sapiens
ctcttctttacaaac

SEQ ID NO: 328176 - DNA, 15 bp, Homo sapiens
actcttctttacaaa

SEQ ID NO: 328177 - DNA, 15 bp, Homo sapiens
tactcttctttacaa

SEQ ID NO: 328178 - DNA, 15 bp, Homo sapiens
atactcttctttaca

SEQ ID NO: 328179 - DNA, 15 bp, Homo sapiens
aatactcttctttac

SEQ ID NO: 328180 - DNA, 15 bp, Homo sapiens
gaatactcttcttta

SEQ ID NO: 328181 - DNA, 15 bp, Homo sapiens
agaatactcttcttt

SEQ ID NO: 328182 - DNA, 15 bp, Homo sapiens
tagaatactcttctt

SEQ ID NO: 328183 - DNA, 15 bp, Homo sapiens
atagaatactcttct

SEQ ID NO: 328184 - DNA, 15 bp, Homo sapiens
tatagaatactcttc

SEQ ID NO: 328185 - DNA, 15 bp, Homo sapiens
atatagaatactctt

SEQ ID NO: 328186 - DNA, 15 bp, Homo sapiens
catatagaatactct

SEQ ID NO: 328187 - DNA, 15 bp, Homo sapiens
ccatatagaatactc

SEQ ID NO: 328188 - DNA, 15 bp, Homo sapiens
tccatatagaatact

SEQ ID NO: 328189 - DNA, 15 bp, Homo sapiens
ctccatatagaatac

SEQ ID NO: 328190 - DNA, 15 bp, Homo sapiens
tctccatatagaata

SEQ ID NO: 328191 - DNA, 15 bp, Homo sapiens
gtctccatatagaat

SEQ ID NO: 328192 - DNA, 15 bp, Homo sapiens
agtctccatatagaa

SEQ ID NO: 328193 - DNA, 15 bp, Homo sapiens
cagtctccatataga

SEQ ID NO: 328194 - DNA, 15 bp, Homo sapiens
gcagtctccatatag

SEQ ID NO: 328195 - DNA, 15 bp, Homo sapiens
tgcagtctccatata

SEQ ID NO: 328196 - DNA, 15 bp, Homo sapiens
ttgcagtctccatat

SEQ ID NO: 328197 - DNA, 15 bp, Homo sapiens
cttgcagtctccata

SEQ ID NO: 328198 - DNA, 15 bp, Homo sapiens
tcttgcagtctccat

SEQ ID NO: 328199 - DNA, 15 bp, Homo sapiens
ctcttgcagtctcca

SEQ ID NO: 328200 - DNA, 15 bp, Homo sapiens
tctcttgcagtctcc

SEQ ID NO: 328201 - DNA, 15 bp, Homo sapiens
atctcttgcagtctc

SEQ ID NO: 328202 - DNA, 15 bp, Homo sapiens
catctcttgcagtct

SEQ ID NO: 328203 - DNA, 15 bp, Homo sapiens
acatctcttgcagtc

SEQ ID NO: 328204 - DNA, 15 bp, Homo sapiens
cacatctcttgcagt

SEQ ID NO: 328205 - DNA, 15 bp, Homo sapiens
gcacatctcttgcag

SEQ ID NO: 328206 - DNA, 15 bp, Homo sapiens
tgcacatctcttgca

SEQ ID NO: 328207 - DNA, 15 bp, Homo sapiens
ctgcacatctcttgc

SEQ ID NO: 328208 - DNA, 15 bp, Homo sapiens
cctgcacatctcttg

SEQ ID NO: 328209 - DNA, 15 bp, Homo sapiens
ccctgcacatctctt

SEQ ID NO: 328210 - DNA, 15 bp, Homo sapiens
tccctgcacatctct

SEQ ID NO: 328211 - DNA, 15 bp, Homo sapiens
ctccctgcacatctc

SEQ ID NO: 328212 - DNA, 15 bp, Homo sapiens
tctccctgcacatct

SEQ ID NO: 328213 - DNA, 15 bp, Homo sapiens
ctctccctgcacatc

SEQ ID NO: 328214 - DNA, 15 bp, Homo sapiens
cctctccctgcacat

SEQ ID NO: 328215 - DNA, 15 bp, Homo sapiens
gcctctccctgcaca

SEQ ID NO: 328216 - DNA, 15 bp, Homo sapiens
ggcctctccctgcac

SEQ ID NO: 328217 - DNA, 15 bp, Homo sapiens
tggcctctccctgca

SEQ ID NO: 328218 - DNA, 15 bp, Homo sapiens
ttggcctctccctgc

SEQ ID NO: 328219 - DNA, 15 bp, Homo sapiens
tttggcctctccctg

SEQ ID NO: 328220 - DNA, 15 bp, Homo sapiens
atttggcctctccct

SEQ ID NO: 328221 - DNA, 15 bp, Homo sapiens
gatttggcctctccc

SEQ ID NO: 328222 - DNA, 15 bp, Homo sapiens
tgatttggcctctcc

SEQ ID NO: 328223 - DNA, 15 bp, Homo sapiens
atgatttggcctctc

SEQ ID NO: 328224 - DNA, 15 bp, Homo sapiens
catgatttggcctct

SEQ ID NO: 328225 - DNA, 15 bp, Homo sapiens
gcatgatttggcctc

SEQ ID NO: 328226 - DNA, 15 bp, Homo sapiens
tgcatgatttggcct

SEQ ID NO: 328227 - DNA, 15 bp, Homo sapiens
ctgcatgatttggcc

SEQ ID NO: 328228 - DNA, 15 bp, Homo sapiens
cctgcatgatttggc

SEQ ID NO: 328229 - DNA, 15 bp, Homo sapiens
acctgcatgatttgg

SEQ ID NO: 328230 - DNA, 15 bp, Homo sapiens
aacctgcatgatttg

SEQ ID NO: 328231 - DNA, 15 bp, Homo sapiens
gaacctgcatgattt

SEQ ID NO: 328232 - DNA, 15 bp, Homo sapiens
agaacctgcatgatt

SEQ ID NO: 328233 - DNA, 15 bp, Homo sapiens
aagaacctgcatgat

SEQ ID NO: 328234 - DNA, 15 bp, Homo sapiens
taagaacctgcatga

SEQ ID NO: 328235 - DNA, 15 bp, Homo sapiens
ctaagaacctgcatg

SEQ ID NO: 328236 - DNA, 15 bp, Homo sapiens
tctaagaacctgcat

SEQ ID NO: 328237 - DNA, 15 bp, Homo sapiens
atctaagaacctgca

SEQ ID NO: 328238 - DNA, 15 bp, Homo sapiens
aatctaagaacctgc

SEQ ID NO: 328239 - DNA, 15 bp, Homo sapiens
gaatctaagaacctg

SEQ ID NO: 328240 - DNA, 15 bp, Homo sapiens
tgaatctaagaacct

SEQ ID NO: 328241 - DNA, 15 bp, Homo sapiens
atgaatctaagaacc

SEQ ID NO: 328242 - DNA, 15 bp, Homo sapiens
catgaatctaagaac

SEQ ID NO: 328243 - DNA, 15 bp, Homo sapiens
ccatgaatctaagaa

SEQ ID NO: 328244 - DNA, 15 bp, Homo sapiens
tccatgaatctaaga

SEQ ID NO: 328245 - DNA, 15 bp, Homo sapiens
gtccatgaatctaag

SEQ ID NO: 328246 - DNA, 15 bp, Homo sapiens
agtccatgaatctaa

SEQ ID NO: 328247 - DNA, 15 bp, Homo sapiens
aagtccatgaatcta

SEQ ID NO: 328248 - DNA, 15 bp, Homo sapiens
aaagtccatgaatct

SEQ ID NO: 328249 - DNA, 15 bp, Homo sapiens
taaagtccatgaatc

SEQ ID NO: 328250 - DNA, 15 bp, Homo sapiens
gtaaagtccatgaat

SEQ ID NO: 328251 - DNA, 15 bp, Homo sapiens
agtaaagtccatgaa

SEQ ID NO: 328252 - DNA, 15 bp, Homo sapiens
cagtaaagtccatga

SEQ ID NO: 328253 - DNA, 15 bp, Homo sapiens
tcagtaaagtccatg

SEQ ID NO: 328254 - DNA, 15 bp, Homo sapiens
ctcagtaaagtccat

SEQ ID NO: 328255 - DNA, 15 bp, Homo sapiens
tctcagtaaagtcca

SEQ ID NO: 328256 - DNA, 15 bp, Homo sapiens
ttctcagtaaagtcc

SEQ ID NO: 328257 - DNA, 15 bp, Homo sapiens
gttctcagtaaagtc

SEQ ID NO: 328258 - DNA, 15 bp, Homo sapiens
tgttctcagtaaagt

SEQ ID NO: 328259 - DNA, 15 bp, Homo sapiens
ttgttctcagtaaag

SEQ ID NO: 328260 - DNA, 15 bp, Homo sapiens
tttgttctcagtaaa

SEQ ID NO: 328261 - DNA, 15 bp, Homo sapiens
atttgttctcagtaa

SEQ ID NO: 328262 - DNA, 15 bp, Homo sapiens
catttgttctcagta

SEQ ID NO: 328263 - DNA, 15 bp, Homo sapiens
tcatttgttctcagt

SEQ ID NO: 328264 - DNA, 15 bp, Homo sapiens
ctcatttgttctcag

SEQ ID NO: 328265 - DNA, 15 bp, Homo sapiens
tctcatttgttctca

SEQ ID NO: 328266 - DNA, 15 bp, Homo sapiens
ctctcatttgttctc

SEQ ID NO: 328267 - DNA, 15 bp, Homo sapiens
gctctcatttgttct

SEQ ID NO: 328268 - DNA, 15 bp, Homo sapiens
agctctcatttgttc

SEQ ID NO: 328269 - DNA, 15 bp, Homo sapiens
cagctctcatttgtt

SEQ ID NO: 328270 - DNA, 15 bp, Homo sapiens
acagctctcatttgt

SEQ ID NO: 328271 - DNA, 15 bp, Homo sapiens
aacagctctcatttg

SEQ ID NO: 328272 - DNA, 15 bp, Homo sapiens
caacagctctcattt

SEQ ID NO: 328273 - DNA, 15 bp, Homo sapiens
tcaacagctctcatt

SEQ ID NO: 328274 - DNA, 15 bp, Homo sapiens
ttcaacagctctcat

SEQ ID NO: 328275 - DNA, 15 bp, Homo sapiens
cttcaacagctctca

SEQ ID NO: 328276 - DNA, 15 bp, Homo sapiens
ccttcaacagctctc

SEQ ID NO: 328277 - DNA, 15 bp, Homo sapiens
tccttcaacagctct

SEQ ID NO: 328278 - DNA, 15 bp, Homo sapiens
atccttcaacagctc

SEQ ID NO: 328279 - DNA, 15 bp, Homo sapiens
aatccttcaacagct

SEQ ID NO: 328280 - DNA, 15 bp, Homo sapiens
aaatccttcaacagc

SEQ ID NO: 328281 - DNA, 15 bp, Homo sapiens
aaaatccttcaacag

SEQ ID NO: 328282 - DNA, 15 bp, Homo sapiens
taaaatccttcaaca

SEQ ID NO: 328283 - DNA, 15 bp, Homo sapiens
ttaaaatccttcaac

SEQ ID NO: 328284 - DNA, 15 bp, Homo sapiens
attaaaatccttcaa

SEQ ID NO: 328285 - DNA, 15 bp, Homo sapiens
gattaaaatccttca

SEQ ID NO: 328286 - DNA, 15 bp, Homo sapiens
tgattaaaatccttc

SEQ ID NO: 328287 - DNA, 15 bp, Homo sapiens
ctgattaaaatcctt

SEQ ID NO: 328288 - DNA, 15 bp, Homo sapiens
cctgattaaaatcct

SEQ ID NO: 328289 - DNA, 15 bp, Homo sapiens
tcctgattaaaatcc

SEQ ID NO: 328290 - DNA, 15 bp, Homo sapiens
ctcctgattaaaatc

SEQ ID NO: 328291 - DNA, 15 bp, Homo sapiens
tctcctgattaaaat

SEQ ID NO: 328292 - DNA, 15 bp, Homo sapiens
ctctcctgattaaaa

SEQ ID NO: 328293 - DNA, 15 bp, Homo sapiens
cctctcctgattaaa

SEQ ID NO: 328294 - DNA, 15 bp, Homo sapiens
tcctctcctgattaa

SEQ ID NO: 328295 - DNA, 15 bp, Homo sapiens
ttcctctcctgatta

SEQ ID NO: 328296 - DNA, 15 bp, Homo sapiens
tttcctctcctgatt

SEQ ID NO: 328297 - DNA, 15 bp, Homo sapiens
atttcctctcctgat

SEQ ID NO: 328298 - DNA, 15 bp, Homo sapiens
catttcctctcctga

SEQ ID NO: 328299 - DNA, 15 bp, Homo sapiens
acatttcctctcctg

SEQ ID NO: 328300 - DNA, 15 bp, Homo sapiens
cacatttcctctcct

SEQ ID NO: 328301 - DNA, 15 bp, Homo sapiens
ccacatttcctctcc

SEQ ID NO: 328302 - DNA, 15 bp, Homo sapiens
accacatttcctctc

SEQ ID NO: 328303 - DNA, 15 bp, Homo sapiens
aaccacatttcctct

SEQ ID NO: 328304 - DNA, 15 bp, Homo sapiens
taaccacatttcctc

SEQ ID NO: 328305 - DNA, 15 bp, Homo sapiens
ctaaccacatttcct

SEQ ID NO: 328306 - DNA, 15 bp, Homo sapiens
tctaaccacatttcc

SEQ ID NO: 328307 - DNA, 15 bp, Homo sapiens
gtctaaccacatttc

SEQ ID NO: 328308 - DNA, 15 bp, Homo sapiens
agtctaaccacattt

SEQ ID NO: 328309 - DNA, 15 bp, Homo sapiens
cagtctaaccacatt

SEQ ID NO: 328310 - DNA, 15 bp, Homo sapiens
tcagtctaaccacat

SEQ ID NO: 328311 - DNA, 15 bp, Homo sapiens
gtcagtctaaccaca

SEQ ID NO: 328312 - DNA, 15 bp, Homo sapiens
tgtcagtctaaccac

SEQ ID NO: 328313 - DNA, 15 bp, Homo sapiens
atgtcagtctaacca

SEQ ID NO: 328314 - DNA, 15 bp, Homo sapiens
aatgtcagtctaacc

SEQ ID NO: 328315 - DNA, 15 bp, Homo sapiens
aaatgtcagtctaac

SEQ ID NO: 328316 - DNA, 15 bp, Homo sapiens
aaaatgtcagtctaa

SEQ ID NO: 328317 - DNA, 15 bp, Homo sapiens
taaaatgtcagtcta

SEQ ID NO: 328318 - DNA, 15 bp, Homo sapiens
ctaaaatgtcagtct

SEQ ID NO: 328319 - DNA, 15 bp, Homo sapiens
tctaaaatgtcagtc

SEQ ID NO: 328320 - DNA, 15 bp, Homo sapiens
ttctaaaatgtcagt

SEQ ID NO: 328321 - DNA, 15 bp, Homo sapiens
tttctaaaatgtcag

SEQ ID NO: 328322 - DNA, 15 bp, Homo sapiens
ctttctaaaatgtca

SEQ ID NO: 328323 - DNA, 15 bp, Homo sapiens
tctttctaaaatgtc

SEQ ID NO: 328324 - DNA, 15 bp, Homo sapiens
atctttctaaaatgt

SEQ ID NO: 328325 - DNA, 15 bp, Homo sapiens
gatctttctaaaatg

SEQ ID NO: 328326 - DNA, 15 bp, Homo sapiens
ggatctttctaaaat

SEQ ID NO: 328327 - DNA, 15 bp, Homo sapiens
tggatctttctaaaa

SEQ ID NO: 328328 - DNA, 15 bp, Homo sapiens
gtggatctttctaaa

SEQ ID NO: 328329 - DNA, 15 bp, Homo sapiens
agtggatctttctaa

SEQ ID NO: 328330 - DNA, 15 bp, Homo sapiens
tagtggatctttcta

SEQ ID NO: 328331 - DNA, 15 bp, Homo sapiens
atagtggatctttct

SEQ ID NO: 328332 - DNA, 15 bp, Homo sapiens
aatagtggatctttc

SEQ ID NO: 328333 - DNA, 15 bp, Homo sapiens
gaatagtggatcttt

SEQ ID NO: 328334 - DNA, 15 bp, Homo sapiens
ggaatagtggatctt

SEQ ID NO: 328335 - DNA, 15 bp, Homo sapiens
tggaatagtggatct

SEQ ID NO: 328336 - DNA, 15 bp, Homo sapiens
ttggaatagtggatc

SEQ ID NO: 328337 - DNA, 15 bp, Homo sapiens
gttggaatagtggat

SEQ ID NO: 328338 - DNA, 15 bp, Homo sapiens
tgttggaatagtgga

SEQ ID NO: 328339 - DNA, 15 bp, Homo sapiens
ctgttggaatagtgg

SEQ ID NO: 328340 - DNA, 15 bp, Homo sapiens
actgttggaatagtg

SEQ ID NO: 328341 - DNA, 15 bp, Homo sapiens
aactgttggaatagt

SEQ ID NO: 328342 - DNA, 15 bp, Homo sapiens
caactgttggaatag

SEQ ID NO: 328343 - DNA, 15 bp, Homo sapiens
acaactgttggaata

SEQ ID NO: 328344 - DNA, 15 bp, Homo sapiens
tacaactgttggaat

SEQ ID NO: 328345 - DNA, 15 bp, Homo sapiens
atacaactgttggaa

SEQ ID NO: 328346 - DNA, 15 bp, Homo sapiens
tatacaactgttgga

SEQ ID NO: 328347 - DNA, 15 bp, Homo sapiens
ctatacaactgttgg

SEQ ID NO: 328348 - DNA, 15 bp, Homo sapiens
tctatacaactgttg

SEQ ID NO: 328349 - DNA, 15 bp, Homo sapiens
ctctatacaactgtt

SEQ ID NO: 328350 - DNA, 15 bp, Homo sapiens
tctctatacaactgt

SEQ ID NO: 328351 - DNA, 15 bp, Homo sapiens
ttctctatacaactg

SEQ ID NO: 328352 - DNA, 15 bp, Homo sapiens
attctctatacaact

SEQ ID NO: 328353 - DNA, 15 bp, Homo sapiens
cattctctatacaac

SEQ ID NO: 328354 - DNA, 15 bp, Homo sapiens
ccattctctatacaa

SEQ ID NO: 328355 - DNA, 15 bp, Homo sapiens
cccattctctataca

SEQ ID NO: 328356 - DNA, 15 bp, Homo sapiens
ccccattctctatac

SEQ ID NO: 328357 - DNA, 15 bp, Homo sapiens
accccattctctata

SEQ ID NO: 328358 - DNA, 15 bp, Homo sapiens
aaccccattctctat

SEQ ID NO: 328359 - DNA, 15 bp, Homo sapiens
caaccccattctcta

SEQ ID NO: 328360 - DNA, 15 bp, Homo sapiens
tcaaccccattctct

SEQ ID NO: 328361 - DNA, 15 bp, Homo sapiens
ttcaaccccattctc

SEQ ID NO: 328362 - DNA, 15 bp, Homo sapiens
cttcaaccccattct

SEQ ID NO: 328363 - DNA, 15 bp, Homo sapiens
gcttcaaccccattc

SEQ ID NO: 328364 - DNA, 15 bp, Homo sapiens
tgcttcaaccccatt

SEQ ID NO: 328365 - DNA, 15 bp, Homo sapiens
atgcttcaaccccat

SEQ ID NO: 328366 - DNA, 15 bp, Homo sapiens
gatgcttcaacccca

SEQ ID NO: 328367 - DNA, 15 bp, Homo sapiens
tgatgcttcaacccc

SEQ ID NO: 328368 - DNA, 15 bp, Homo sapiens
ttgatgcttcaaccc

SEQ ID NO: 328369 - DNA, 15 bp, Homo sapiens
tttgatgcttcaacc

SEQ ID NO: 328370 - DNA, 15 bp, Homo sapiens
ctttgatgcttcaac

SEQ ID NO: 328371 - DNA, 15 bp, Homo sapiens
tctttgatgcttcaa

SEQ ID NO: 328372 - DNA, 15 bp, Homo sapiens
gtctttgatgcttca

SEQ ID NO: 328373 - DNA, 15 bp, Homo sapiens
ggtctttgatgcttc

SEQ ID NO: 328374 - DNA, 15 bp, Homo sapiens
aggtctttgatgctt

SEQ ID NO: 328375 - DNA, 15 bp, Homo sapiens
gaggtctttgatgct

SEQ ID NO: 328376 - DNA, 15 bp, Homo sapiens
tgaggtctttgatgc

SEQ ID NO: 328377 - DNA, 15 bp, Homo sapiens
atgaggtctttgatg

SEQ ID NO: 328378 - DNA, 15 bp, Homo sapiens
tatgaggtctttgat

SEQ ID NO: 328379 - DNA, 15 bp, Homo sapiens
ctatgaggtctttga

SEQ ID NO: 328380 - DNA, 15 bp, Homo sapiens
tctatgaggtctttg

SEQ ID NO: 328381 - DNA, 15 bp, Homo sapiens
gtctatgaggtcttt

SEQ ID NO: 328382 - DNA, 15 bp, Homo sapiens
ggtctatgaggtctt

SEQ ID NO: 328383 - DNA, 15 bp, Homo sapiens
tggtctatgaggtct

SEQ ID NO: 328384 - DNA, 15 bp, Homo sapiens
atggtctatgaggtc

SEQ ID NO: 328385 - DNA, 15 bp, Homo sapiens
tatggtctatgaggt

SEQ ID NO: 328386 - DNA, 15 bp, Homo sapiens
ttatggtctatgagg

SEQ ID NO: 328387 - DNA, 15 bp, Homo sapiens
cttatggtctatgag

SEQ ID NO: 328388 - DNA, 15 bp, Homo sapiens
tcttatggtctatga

SEQ ID NO: 328389 - DNA, 15 bp, Homo sapiens
gtcttatggtctatg

SEQ ID NO: 328390 - DNA, 15 bp, Homo sapiens
ggtcttatggtctat

SEQ ID NO: 328391 - DNA, 15 bp, Homo sapiens
tggtcttatggtcta

SEQ ID NO: 328392 - DNA, 15 bp, Homo sapiens
ttggtcttatggtct

SEQ ID NO: 328393 - DNA, 15 bp, Homo sapiens
attggtcttatggtc

SEQ ID NO: 328394 - DNA, 15 bp, Homo sapiens
aattggtcttatggt

SEQ ID NO: 328395 - DNA, 15 bp, Homo sapiens
taattggtcttatgg

SEQ ID NO: 328396 - DNA, 15 bp, Homo sapiens
ctaattggtcttatg

SEQ ID NO: 328397 - DNA, 15 bp, Homo sapiens
cctaattggtcttat

SEQ ID NO: 328398 - DNA, 15 bp, Homo sapiens
tcctaattggtctta

SEQ ID NO: 328399 - DNA, 15 bp, Homo sapiens
ctcctaattggtctt

SEQ ID NO: 328400 - DNA, 15 bp, Homo sapiens
cctcctaattggtct

SEQ ID NO: 328401 - DNA, 15 bp, Homo sapiens
gcctcctaattggtc

SEQ ID NO: 328402 - DNA, 15 bp, Homo sapiens
tgcctcctaattggt

SEQ ID NO: 328403 - DNA, 15 bp, Homo sapiens
ctgcctcctaattgg

SEQ ID NO: 328404 - DNA, 15 bp, Homo sapiens
actgcctcctaattg

SEQ ID NO: 328405 - DNA, 15 bp, Homo sapiens
tactgcctcctaatt

SEQ ID NO: 328406 - DNA, 15 bp, Homo sapiens
ctactgcctcctaat

SEQ ID NO: 328407 - DNA, 15 bp, Homo sapiens
actactgcctcctaa

SEQ ID NO: 328408 - DNA, 15 bp, Homo sapiens
gactactgcctccta

SEQ ID NO: 328409 - DNA, 15 bp, Homo sapiens
ggactactgcctcct

SEQ ID NO: 328410 - DNA, 15 bp, Homo sapiens
tggactactgcctcc

SEQ ID NO: 328411 - DNA, 15 bp, Homo sapiens
ctggactactgcctc

SEQ ID NO: 328412 - DNA, 15 bp, Homo sapiens
cctggactactgcct

SEQ ID NO: 328413 - DNA, 15 bp, Homo sapiens
ccctggactactgcc

SEQ ID NO: 328414 - DNA, 15 bp, Homo sapiens
tccctggactactgc

SEQ ID NO: 328415 - DNA, 15 bp, Homo sapiens
ttccctggactactg

SEQ ID NO: 328416 - DNA, 15 bp, Homo sapiens
cttccctggactact

SEQ ID NO: 328417 - DNA, 15 bp, Homo sapiens
tcttccctggactac

SEQ ID NO: 328418 - DNA, 15 bp, Homo sapiens
ctcttccctggacta

SEQ ID NO: 328419 - DNA, 15 bp, Homo sapiens
cctcttccctggact

SEQ ID NO: 328420 - DNA, 15 bp, Homo sapiens
acctcttccctggac

SEQ ID NO: 328421 - DNA, 15 bp, Homo sapiens
tacctcttccctgga

SEQ ID NO: 328422 - DNA, 15 bp, Homo sapiens
atacctcttccctgg

SEQ ID NO: 328423 - DNA, 15 bp, Homo sapiens
aatacctcttccctg

SEQ ID NO: 328424 - DNA, 15 bp, Homo sapiens
taatacctcttccct

SEQ ID NO: 328425 - DNA, 15 bp, Homo sapiens
ctaatacctcttccc

SEQ ID NO: 328426 - DNA, 15 bp, Homo sapiens
cctaatacctcttcc

SEQ ID NO: 328427 - DNA, 15 bp, Homo sapiens
ccctaatacctcttc

SEQ ID NO: 328428 - DNA, 15 bp, Homo sapiens
gccctaatacctctt

SEQ ID NO: 328429 - DNA, 15 bp, Homo sapiens
tgccctaatacctct

SEQ ID NO: 328430 - DNA, 15 bp, Homo sapiens
atgccctaatacctc

SEQ ID NO: 328431 - DNA, 15 bp, Homo sapiens
catgccctaatacct

SEQ ID NO: 328432 - DNA, 15 bp, Homo sapiens
ccatgccctaatacc

SEQ ID NO: 328433 - DNA, 15 bp, Homo sapiens
gccatgccctaatac

SEQ ID NO: 328434 - DNA, 15 bp, Homo sapiens
ggccatgccctaata

SEQ ID NO: 328435 - DNA, 15 bp, Homo sapiens
aggccatgccctaat

SEQ ID NO: 328436 - DNA, 15 bp, Homo sapiens
aaggccatgccctaa

SEQ ID NO: 328437 - DNA, 15 bp, Homo sapiens
taaggccatgcccta

SEQ ID NO: 328438 - DNA, 15 bp, Homo sapiens
ctaaggccatgccct

SEQ ID NO: 328439 - DNA, 15 bp, Homo sapiens
cctaaggccatgccc

SEQ ID NO: 328440 - DNA, 15 bp, Homo sapiens
gcctaaggccatgcc

SEQ ID NO: 328441 - DNA, 15 bp, Homo sapiens
tgcctaaggccatgc

SEQ ID NO: 328442 - DNA, 15 bp, Homo sapiens
ctgcctaaggccatg

SEQ ID NO: 328443 - DNA, 15 bp, Homo sapiens
actgcctaaggccat

SEQ ID NO: 328444 - DNA, 15 bp, Homo sapiens
cactgcctaaggcca

SEQ ID NO: 328445 - DNA, 15 bp, Homo sapiens
gcactgcctaaggcc

SEQ ID NO: 328446 - DNA, 15 bp, Homo sapiens
tgcactgcctaaggc

SEQ ID NO: 328447 - DNA, 15 bp, Homo sapiens
ttgcactgcctaagg

SEQ ID NO: 328448 - DNA, 15 bp, Homo sapiens
tttgcactgcctaag

SEQ ID NO: 328449 - DNA, 15 bp, Homo sapiens
atttgcactgcctaa

SEQ ID NO: 328450 - DNA, 15 bp, Homo sapiens
aatttgcactgccta

SEQ ID NO: 328451 - DNA, 15 bp, Homo sapiens
caatttgcactgcct

SEQ ID NO: 328452 - DNA, 15 bp, Homo sapiens
ccaatttgcactgcc

SEQ ID NO: 328453 - DNA, 15 bp, Homo sapiens
cccaatttgcactgc

SEQ ID NO: 328454 - DNA, 15 bp, Homo sapiens
ccccaatttgcactg

SEQ ID NO: 328455 - DNA, 15 bp, Homo sapiens
gccccaatttgcact

SEQ ID NO: 328456 - DNA, 15 bp, Homo sapiens
tgccccaatttgcac

SEQ ID NO: 328457 - DNA, 15 bp, Homo sapiens
ctgccccaatttgca

SEQ ID NO: 328458 - DNA, 15 bp, Homo sapiens
tctgccccaatttgc

SEQ ID NO: 328459 - DNA, 15 bp, Homo sapiens
ctctgccccaatttg

SEQ ID NO: 328460 - DNA, 15 bp, Homo sapiens
tctctgccccaattt

SEQ ID NO: 328461 - DNA, 15 bp, Homo sapiens
ttctctgccccaatt

SEQ ID NO: 328462 - DNA, 15 bp, Homo sapiens
tttctctgccccaat

SEQ ID NO: 328463 - DNA, 15 bp, Homo sapiens
ctttctctgccccaa

SEQ ID NO: 328464 - DNA, 15 bp, Homo sapiens
tctttctctgcccca

SEQ ID NO: 328465 - DNA, 15 bp, Homo sapiens
ttctttctctgcccc

SEQ ID NO: 328466 - DNA, 15 bp, Homo sapiens
cttctttctctgccc

SEQ ID NO: 328467 - DNA, 15 bp, Homo sapiens
tcttctttctctgcc

SEQ ID NO: 328468 - DNA, 15 bp, Homo sapiens
ttcttctttctctgc

SEQ ID NO: 328469 - DNA, 15 bp, Homo sapiens
cttcttctttctctg

SEQ ID NO: 328470 - DNA, 15 bp, Homo sapiens
ccttcttctttctct

SEQ ID NO: 328471 - DNA, 15 bp, Homo sapiens
cccttcttctttctc

SEQ ID NO: 328472 - DNA, 15 bp, Homo sapiens
tcccttcttctttct

SEQ ID NO: 328473 - DNA, 15 bp, Homo sapiens
atcccttcttctttc

SEQ ID NO: 328474 - DNA, 15 bp, Homo sapiens
gatcccttcttcttt

SEQ ID NO: 328475 - DNA, 15 bp, Homo sapiens
agatcccttcttctt

SEQ ID NO: 328476 - DNA, 15 bp, Homo sapiens
tagatcccttcttct

SEQ ID NO: 328477 - DNA, 15 bp, Homo sapiens
ctagatcccttcttc

SEQ ID NO: 328478 - DNA, 15 bp, Homo sapiens
tctagatcccttctt

SEQ ID NO: 328479 - DNA, 15 bp, Homo sapiens
ctctagatcccttct

SEQ ID NO: 328480 - DNA, 15 bp, Homo sapiens
tctctagatcccttc

SEQ ID NO: 328481 - DNA, 15 bp, Homo sapiens
atctctagatccctt

SEQ ID NO: 328482 - DNA, 15 bp, Homo sapiens
tatctctagatccct

SEQ ID NO: 328483 - DNA, 15 bp, Homo sapiens
ttatctctagatccc

SEQ ID NO: 328484 - DNA, 15 bp, Homo sapiens
attatctctagatcc

SEQ ID NO: 328485 - DNA, 15 bp, Homo sapiens
aattatctctagatc

SEQ ID NO: 328486 - DNA, 15 bp, Homo sapiens
taattatctctagat

SEQ ID NO: 328487 - DNA, 15 bp, Homo sapiens
ttaattatctctaga

SEQ ID NO: 328488 - DNA, 15 bp, Homo sapiens
cttaattatctctag

SEQ ID NO: 328489 - DNA, 15 bp, Homo sapiens
ccttaattatctcta

SEQ ID NO: 328490 - DNA, 15 bp, Homo sapiens
cccttaattatctct

SEQ ID NO: 328491 - DNA, 15 bp, Homo sapiens
tcccttaattatctc

SEQ ID NO: 328492 - DNA, 15 bp, Homo sapiens
atcccttaattatct

SEQ ID NO: 328493 - DNA, 15 bp, Homo sapiens
aatcccttaattatc

SEQ ID NO: 328494 - DNA, 15 bp, Homo sapiens
caatcccttaattat

SEQ ID NO: 328495 - DNA, 15 bp, Homo sapiens
tcaatcccttaatta

SEQ ID NO: 328496 - DNA, 15 bp, Homo sapiens
ttcaatcccttaatt

SEQ ID NO: 328497 - DNA, 15 bp, Homo sapiens
attcaatcccttaat

SEQ ID NO: 328498 - DNA, 15 bp, Homo sapiens
aattcaatcccttaa

SEQ ID NO: 328499 - DNA, 15 bp, Homo sapiens
caattcaatccctta

SEQ ID NO: 328500 - DNA, 15 bp, Homo sapiens
ccaattcaatccctt

SEQ ID NO: 328501 - DNA, 15 bp, Homo sapiens
gccaattcaatccct

SEQ ID NO: 328502 - DNA, 15 bp, Homo sapiens
tgccaattcaatccc

SEQ ID NO: 328503 - DNA, 15 bp, Homo sapiens
ctgccaattcaatcc

SEQ ID NO: 328504 - DNA, 15 bp, Homo sapiens
tctgccaattcaatc

SEQ ID NO: 328505 - DNA, 15 bp, Homo sapiens
ttctgccaattcaat

SEQ ID NO: 328506 - DNA, 15 bp, Homo sapiens
attctgccaattcaa

SEQ ID NO: 328507 - DNA, 15 bp, Homo sapiens
aattctgccaattca

SEQ ID NO: 328508 - DNA, 15 bp, Homo sapiens
aaattctgccaattc

SEQ ID NO: 328509 - DNA, 15 bp, Homo sapiens
gaaattctgccaatt

SEQ ID NO: 328510 - DNA, 15 bp, Homo sapiens
tgaaattctgccaat

SEQ ID NO: 328511 - DNA, 15 bp, Homo sapiens
gtgaaattctgccaa

SEQ ID NO: 328512 - DNA, 15 bp, Homo sapiens
agtgaaattctgcca

SEQ ID NO: 328513 - DNA, 15 bp, Homo sapiens
aagtgaaattctgcc

SEQ ID NO: 328514 - DNA, 15 bp, Homo sapiens
aaagtgaaattctgc

SEQ ID NO: 328515 - DNA, 15 bp, Homo sapiens
caaagtgaaattctg

SEQ ID NO: 328516 - DNA, 15 bp, Homo sapiens
acaaagtgaaattct

SEQ ID NO: 328517 - DNA, 15 bp, Homo sapiens
aacaaagtgaaattc

SEQ ID NO: 328518 - DNA, 15 bp, Homo sapiens
gaacaaagtgaaatt

SEQ ID NO: 328519 - DNA, 15 bp, Homo sapiens
ggaacaaagtgaaat

SEQ ID NO: 328520 - DNA, 15 bp, Homo sapiens
tggaacaaagtgaaa

SEQ ID NO: 328521 - DNA, 15 bp, Homo sapiens
gtggaacaaagtgaa

SEQ ID NO: 328522 - DNA, 15 bp, Homo sapiens
agtggaacaaagtga

SEQ ID NO: 328523 - DNA, 15 bp, Homo sapiens
gagtggaacaaagtg

SEQ ID NO: 328524 - DNA, 15 bp, Homo sapiens
tgagtggaacaaagt

SEQ ID NO: 328525 - DNA, 15 bp, Homo sapiens
atgagtggaacaaag

SEQ ID NO: 328526 - DNA, 15 bp, Homo sapiens
catgagtggaacaaa

SEQ ID NO: 328527 - DNA, 15 bp, Homo sapiens
acatgagtggaacaa

SEQ ID NO: 328528 - DNA, 15 bp, Homo sapiens
aacatgagtggaaca

SEQ ID NO: 328529 - DNA, 15 bp, Homo sapiens
caacatgagtggaac

SEQ ID NO: 328530 - DNA, 15 bp, Homo sapiens
acaacatgagtggaa

SEQ ID NO: 328531 - DNA, 15 bp, Homo sapiens
gacaacatgagtgga

SEQ ID NO: 328532 - DNA, 15 bp, Homo sapiens
tgacaacatgagtgg

SEQ ID NO: 328533 - DNA, 15 bp, Homo sapiens
atgacaacatgagtg

SEQ ID NO: 328534 - DNA, 15 bp, Homo sapiens
aatgacaacatgagt

SEQ ID NO: 328535 - DNA, 15 bp, Homo sapiens
gaatgacaacatgag

SEQ ID NO: 328536 - DNA, 15 bp, Homo sapiens
tgaatgacaacatga

SEQ ID NO: 328537 - DNA, 15 bp, Homo sapiens
ctgaatgacaacatg

SEQ ID NO: 328538 - DNA, 15 bp, Homo sapiens
tctgaatgacaacat

SEQ ID NO: 328539 - DNA, 15 bp, Homo sapiens
gtctgaatgacaaca

SEQ ID NO: 328540 - DNA, 15 bp, Homo sapiens
ggtctgaatgacaac

SEQ ID NO: 328541 - DNA, 15 bp, Homo sapiens
tggtctgaatgacaa

SEQ ID NO: 328542 - DNA, 15 bp, Homo sapiens
atggtctgaatgaca

SEQ ID NO: 328543 - DNA, 15 bp, Homo sapiens
aatggtctgaatgac

SEQ ID NO: 328544 - DNA, 15 bp, Homo sapiens
aaatggtctgaatga

SEQ ID NO: 328545 - DNA, 15 bp, Homo sapiens
taaatggtctgaatg

SEQ ID NO: 328546 - DNA, 15 bp, Homo sapiens
ataaatggtctgaat

SEQ ID NO: 328547 - DNA, 15 bp, Homo sapiens
cataaatggtctgaa

SEQ ID NO: 328548 - DNA, 15 bp, Homo sapiens
acataaatggtctga

SEQ ID NO: 328549 - DNA, 15 bp, Homo sapiens
aacataaatggtctg

SEQ ID NO: 328550 - DNA, 15 bp, Homo sapiens
taacataaatggtct

SEQ ID NO: 328551 - DNA, 15 bp, Homo sapiens
ctaacataaatggtc

SEQ ID NO: 328552 - DNA, 15 bp, Homo sapiens
actaacataaatggt

SEQ ID NO: 328553 - DNA, 15 bp, Homo sapiens
cactaacataaatgg

SEQ ID NO: 328554 - DNA, 15 bp, Homo sapiens
acactaacataaatg

SEQ ID NO: 328555 - DNA, 15 bp, Homo sapiens
ccacactaacataaa

SEQ ID NO: 328556 - DNA, 15 bp, Homo sapiens
accacactaacataa

SEQ ID NO: 328557 - DNA, 15 bp, Homo sapiens
caccacactaacata

SEQ ID NO: 328558 - DNA, 15 bp, Homo sapiens
gcaccacactaacat

SEQ ID NO: 328559 - DNA, 15 bp, Homo sapiens
tgcaccacactaaca

SEQ ID NO: 328560 - DNA, 15 bp, Homo sapiens
ctgcaccacactaac

SEQ ID NO: 328561 - DNA, 15 bp, Homo sapiens
actgcaccacactaa

SEQ ID NO: 328562 - DNA, 15 bp, Homo sapiens
gactgcaccacacta

SEQ ID NO: 328563 - DNA, 15 bp, Homo sapiens
ggactgcaccacact

SEQ ID NO: 328564 - DNA, 15 bp, Homo sapiens
tggactgcaccacac

SEQ ID NO: 328565 - DNA, 15 bp, Homo sapiens
ctggactgcaccaca

SEQ ID NO: 328566 - DNA, 15 bp, Homo sapiens
actggactgcaccac

SEQ ID NO: 328567 - DNA, 15 bp, Homo sapiens
aactggactgcacca

SEQ ID NO: 328568 - DNA, 15 bp, Homo sapiens
taactggactgcacc

SEQ ID NO: 328569 - DNA, 15 bp, Homo sapiens
ttaactggactgcac

SEQ ID NO: 328570 - DNA, 15 bp, Homo sapiens
gttaactggactgca

SEQ ID NO: 328571 - DNA, 15 bp, Homo sapiens
agttaactggactgc

SEQ ID NO: 328572 - DNA, 15 bp, Homo sapiens
aagttaactggactg

SEQ ID NO: 328573 - DNA, 15 bp, Homo sapiens
aaagttaactggact

SEQ ID NO: 328574 - DNA, 15 bp, Homo sapiens
aaaagttaactggac

SEQ ID NO: 328575 - DNA, 15 bp, Homo sapiens
aaaaagttaactgga

SEQ ID NO: 328576 - DNA, 15 bp, Homo sapiens
taaaaagttaactgg

SEQ ID NO: 328577 - DNA, 15 bp, Homo sapiens
ctaaaaagttaactg

SEQ ID NO: 328578 - DNA, 15 bp, Homo sapiens
cctaaaaagttaact

SEQ ID NO: 328579 - DNA, 15 bp, Homo sapiens
ccctaaaaagttaac

SEQ ID NO: 328580 - DNA, 15 bp, Homo sapiens
cccctaaaaagttaa

SEQ ID NO: 328581 - DNA, 15 bp, Homo sapiens
ccccctaaaaagtta

SEQ ID NO: 328582 - DNA, 15 bp, Homo sapiens
accccctaaaaagtt

SEQ ID NO: 328583 - DNA, 15 bp, Homo sapiens
caccccctaaaaagt

SEQ ID NO: 328584 - DNA, 15 bp, Homo sapiens
ccaccccctaaaaag

SEQ ID NO: 328585 - DNA, 15 bp, Homo sapiens
cccaccccctaaaaa

SEQ ID NO: 328586 - DNA, 15 bp, Homo sapiens
acccaccccctaaaa

SEQ ID NO: 328587 - DNA, 15 bp, Homo sapiens
tacccaccccctaaa

SEQ ID NO: 328588 - DNA, 15 bp, Homo sapiens
atacccaccccctaa

SEQ ID NO: 328589 - DNA, 15 bp, Homo sapiens
aatacccacccccta

SEQ ID NO: 328590 - DNA, 15 bp, Homo sapiens
aaatacccaccccct

SEQ ID NO: 328591 - DNA, 15 bp, Homo sapiens
aaaatacccaccccc

SEQ ID NO: 328592 - DNA, 15 bp, Homo sapiens
taaaatacccacccc

SEQ ID NO: 328593 - DNA, 15 bp, Homo sapiens
gtaaaatacccaccc

SEQ ID NO: 328594 - DNA, 15 bp, Homo sapiens
tgtaaaatacccacc

SEQ ID NO: 328595 - DNA, 15 bp, Homo sapiens
atgtaaaatacccac

SEQ ID NO: 328596 - DNA, 15 bp, Homo sapiens
gatgtaaaataccca

SEQ ID NO: 328597 - DNA, 15 bp, Homo sapiens
agatgtaaaataccc

SEQ ID NO: 328598 - DNA, 15 bp, Homo sapiens
cagatgtaaaatacc

SEQ ID NO: 328599 - DNA, 15 bp, Homo sapiens
acagatgtaaaatac

SEQ ID NO: 328600 - DNA, 15 bp, Homo sapiens
gacagatgtaaaata

SEQ ID NO: 328601 - DNA, 15 bp, Homo sapiens
ggacagatgtaaaat

SEQ ID NO: 328602 - DNA, 15 bp, Homo sapiens
tggacagatgtaaaa

SEQ ID NO: 328603 - DNA, 15 bp, Homo sapiens
ctggacagatgtaaa

SEQ ID NO: 328604 - DNA, 15 bp, Homo sapiens
gctggacagatgtaa

SEQ ID NO: 328605 - DNA, 15 bp, Homo sapiens
tgctggacagatgta

SEQ ID NO: 328606 - DNA, 15 bp, Homo sapiens
ttgctggacagatgt

SEQ ID NO: 328607 - DNA, 15 bp, Homo sapiens
tttgctggacagatg

SEQ ID NO: 328608 - DNA, 15 bp, Homo sapiens
ctttgctggacagat

SEQ ID NO: 328609 - DNA, 15 bp, Homo sapiens
tctttgctggacaga

SEQ ID NO: 328610 - DNA, 15 bp, Homo sapiens
ctctttgctggacag

SEQ ID NO: 328611 - DNA, 15 bp, Homo sapiens
tctctttgctggaca

SEQ ID NO: 328612 - DNA, 15 bp, Homo sapiens
ctctctttgctggac

SEQ ID NO: 328613 - DNA, 15 bp, Homo sapiens
gctctctttgctgga

SEQ ID NO: 328614 - DNA, 15 bp, Homo sapiens
tgctctctttgctgg

SEQ ID NO: 328615 - DNA, 15 bp, Homo sapiens
ctgctctctttgctg

SEQ ID NO: 328616 - DNA, 15 bp, Homo sapiens
actgctctctttgct

SEQ ID NO: 328617 - DNA, 15 bp, Homo sapiens
tactgctctctttgc

SEQ ID NO: 328618 - DNA, 15 bp, Homo sapiens
ttactgctctctttg

SEQ ID NO: 328619 - DNA, 15 bp, Homo sapiens
tttactgctctcttt

SEQ ID NO: 328620 - DNA, 15 bp, Homo sapiens
ttttactgctctctt

SEQ ID NO: 328621 - DNA, 15 bp, Homo sapiens
gttttactgctctct

SEQ ID NO: 328622 - DNA, 15 bp, Homo sapiens
tgttttactgctctc

SEQ ID NO: 328623 - DNA, 15 bp, Homo sapiens
ttgttttactgctct

SEQ ID NO: 328624 - DNA, 15 bp, Homo sapiens
tttgttttactgctc

SEQ ID NO: 328625 - DNA, 15 bp, Homo sapiens
gtttgttttactgct

SEQ ID NO: 328626 - DNA, 15 bp, Homo sapiens
tgtttgttttactgc

SEQ ID NO: 328627 - DNA, 15 bp, Homo sapiens
ttgtttgttttactg

SEQ ID NO: 328628 - DNA, 15 bp, Homo sapiens
cttgtttgttttact

SEQ ID NO: 328629 - DNA, 15 bp, Homo sapiens
ccttgtttgttttac

SEQ ID NO: 328630 - DNA, 15 bp, Homo sapiens
gccttgtttgtttta

SEQ ID NO: 328631 - DNA, 15 bp, Homo sapiens
ggccttgtttgtttt

SEQ ID NO: 328632 - DNA, 15 bp, Homo sapiens
tggccttgtttgttt

SEQ ID NO: 328633 - DNA, 15 bp, Homo sapiens
ctggccttgtttgtt

SEQ ID NO: 328634 - DNA, 15 bp, Homo sapiens
gctggccttgtttgt

SEQ ID NO: 328635 - DNA, 15 bp, Homo sapiens
tgctggccttgtttg

SEQ ID NO: 328636 - DNA, 15 bp, Homo sapiens
ctgctggccttgttt

SEQ ID NO: 328637 - DNA, 15 bp, Homo sapiens
gctgctggccttgtt

SEQ ID NO: 328638 - DNA, 15 bp, Homo sapiens
tgctgctggccttgt

SEQ ID NO: 328639 - DNA, 15 bp, Homo sapiens
gtgctgctggccttg

SEQ ID NO: 328640 - DNA, 15 bp, Homo sapiens
ggtgctgctggcctt

SEQ ID NO: 328641 - DNA, 15 bp, Homo sapiens
aggtgctgctggcct

SEQ ID NO: 328642 - DNA, 15 bp, Homo sapiens
caggtgctgctggcc

SEQ ID NO: 328643 - DNA, 15 bp, Homo sapiens
ccaggtgctgctggc

SEQ ID NO: 328644 - DNA, 15 bp, Homo sapiens
tgccaggtgctgctg

SEQ ID NO: 328645 - DNA, 15 bp, Homo sapiens
ctgccaggtgctgct

SEQ ID NO: 328646 - DNA, 15 bp, Homo sapiens
actgccaggtgctgc

SEQ ID NO: 328647 - DNA, 15 bp, Homo sapiens
tactgccaggtgctg

SEQ ID NO: 328648 - DNA, 15 bp, Homo sapiens
gtactgccaggtgct

SEQ ID NO: 328649 - DNA, 15 bp, Homo sapiens
ggtactgccaggtgc

SEQ ID NO: 328650 - DNA, 15 bp, Homo sapiens
tggtactgccaggtg

SEQ ID NO: 328651 - DNA, 15 bp, Homo sapiens
ctggtactgccaggt

SEQ ID NO: 328652 - DNA, 15 bp, Homo sapiens
tctggtactgccagg

SEQ ID NO: 328653 - DNA, 15 bp, Homo sapiens
ttctggtactgccag

SEQ ID NO: 328654 - DNA, 15 bp, Homo sapiens
tttctggtactgcca

SEQ ID NO: 328655 - DNA, 15 bp, Homo sapiens
gtttctggtactgcc

SEQ ID NO: 328656 - DNA, 15 bp, Homo sapiens
tgtttctggtactgc

SEQ ID NO: 328657 - DNA, 15 bp, Homo sapiens
ttgtttctggtactg

SEQ ID NO: 328658 - DNA, 15 bp, Homo sapiens
tttgtttctggtact

SEQ ID NO: 328659 - DNA, 15 bp, Homo sapiens
ctttgtttctggtac

SEQ ID NO: 328660 - DNA, 15 bp, Homo sapiens
tctttgtttctggta

SEQ ID NO: 328661 - DNA, 15 bp, Homo sapiens
ctctttgtttctggt

SEQ ID NO: 328662 - DNA, 15 bp, Homo sapiens
tctctttgtttctgg

SEQ ID NO: 328663 - DNA, 15 bp, Homo sapiens
ttctctttgtttctg

SEQ ID NO: 328664 - DNA, 15 bp, Homo sapiens
tttctctttgtttct

SEQ ID NO: 328665 - DNA, 15 bp, Homo sapiens
ttttctctttgtttc

SEQ ID NO: 328666 - DNA, 15 bp, Homo sapiens
tttttctctttgttt

SEQ ID NO: 328667 - DNA, 15 bp, Homo sapiens
atttttctctttgtt

SEQ ID NO: 328668 - DNA, 15 bp, Homo sapiens
aatttttctctttgt

SEQ ID NO: 328669 - DNA, 15 bp, Homo sapiens
taatttttctctttg

SEQ ID NO: 328670 - DNA, 15 bp, Homo sapiens
ctaatttttctcttt

SEQ ID NO: 328671 - DNA, 15 bp, Homo sapiens
tctaatttttctctt

SEQ ID NO: 328672 - DNA, 15 bp, Homo sapiens
ctctaatttttctct

SEQ ID NO: 328673 - DNA, 15 bp, Homo sapiens
tctctaatttttctc

SEQ ID NO: 328674 - DNA, 15 bp, Homo sapiens
gtctctaatttttct

SEQ ID NO: 328675 - DNA, 15 bp, Homo sapiens
tgtctctaatttttc

SEQ ID NO: 328676 - DNA, 15 bp, Homo sapiens
ttgtctctaattttt

SEQ ID NO: 328677 - DNA, 15 bp, Homo sapiens
cttgtctctaatttt

SEQ ID NO: 328678 - DNA, 15 bp, Homo sapiens
gcttgtctctaattt

SEQ ID NO: 328679 - DNA, 15 bp, Homo sapiens
tgcttgtctctaatt

SEQ ID NO: 328680 - DNA, 15 bp, Homo sapiens
ctgcttgtctctaat

SEQ ID NO: 328681 - DNA, 15 bp, Homo sapiens
tctgcttgtctctaa

SEQ ID NO: 328682 - DNA, 15 bp, Homo sapiens
ttctgcttgtctcta

SEQ ID NO: 328683 - DNA, 15 bp, Homo sapiens
gttctgcttgtctct

SEQ ID NO: 328684 - DNA, 15 bp, Homo sapiens
tgttctgcttgtctc

SEQ ID NO: 328685 - DNA, 15 bp, Homo sapiens
ctgttctgcttgtct

SEQ ID NO: 328686 - DNA, 15 bp, Homo sapiens
cctgttctgcttgtc

SEQ ID NO: 328687 - DNA, 15 bp, Homo sapiens
ccctgttctgcttgt

SEQ ID NO: 328688 - DNA, 15 bp, Homo sapiens
tccctgttctgcttg

SEQ ID NO: 328689 - DNA, 15 bp, Homo sapiens
gtccctgttctgctt

SEQ ID NO: 328690 - DNA, 15 bp, Homo sapiens
tgtccctgttctgct

SEQ ID NO: 328691 - DNA, 15 bp, Homo sapiens
ttgtccctgttctgc

SEQ ID NO: 328692 - DNA, 15 bp, Homo sapiens
tttgtccctgttctg

SEQ ID NO: 328693 - DNA, 15 bp, Homo sapiens
gtttgtccctgttct

SEQ ID NO: 328694 - DNA, 15 bp, Homo sapiens
cgtttgtccctgttc

SEQ ID NO: 328695 - DNA, 15 bp, Homo sapiens
acgtttgtccctgtt

SEQ ID NO: 328696 - DNA, 15 bp, Homo sapiens
tacgtttgtccctgt

SEQ ID NO: 328697 - DNA, 15 bp, Homo sapiens
gtacgtttgtccctg

SEQ ID NO: 328698 - DNA, 15 bp, Homo sapiens
tgtacgtttgtccct

SEQ ID NO: 328699 - DNA, 15 bp, Homo sapiens
gtgtacgtttgtccc

SEQ ID NO: 328700 - DNA, 15 bp, Homo sapiens
agtgtacgtttgtcc

SEQ ID NO: 328701 - DNA, 15 bp, Homo sapiens
aagtgtacgtttgtc

SEQ ID NO: 328702 - DNA, 15 bp, Homo sapiens
gaagtgtacgtttgt

SEQ ID NO: 328703 - DNA, 15 bp, Homo sapiens
agaagtgtacgtttg

SEQ ID NO: 328704 - DNA, 15 bp, Homo sapiens
aagaagtgtacgttt

SEQ ID NO: 328705 - DNA, 15 bp, Homo sapiens
aaagaagtgtacgtt

SEQ ID NO: 328706 - DNA, 15 bp, Homo sapiens
caaagaagtgtacgt

SEQ ID NO: 328707 - DNA, 15 bp, Homo sapiens
acaaagaagtgtacg

SEQ ID NO: 328708 - DNA, 15 bp, Homo sapiens
tacaaagaagtgtac

SEQ ID NO: 328709 - DNA, 15 bp, Homo sapiens
gtacaaagaagtgta

SEQ ID NO: 328710 - DNA, 15 bp, Homo sapiens
tgtacaaagaagtgt

SEQ ID NO: 328711 - DNA, 15 bp, Homo sapiens
ttgtacaaagaagtg

SEQ ID NO: 328712 - DNA, 15 bp, Homo sapiens
tttgtacaaagaagt

SEQ ID NO: 328713 - DNA, 15 bp, Homo sapiens
ctttgtacaaagaag

SEQ ID NO: 328714 - DNA, 15 bp, Homo sapiens
actttgtacaaagaa

SEQ ID NO: 328715 - DNA, 15 bp, Homo sapiens
cactttgtacaaaga

SEQ ID NO: 328716 - DNA, 15 bp, Homo sapiens
gcactttgtacaaag

SEQ ID NO: 328717 - DNA, 15 bp, Homo sapiens
tgcactttgtacaaa

SEQ ID NO: 328718 - DNA, 15 bp, Homo sapiens
atgcactttgtacaa

SEQ ID NO: 328719 - DNA, 15 bp, Homo sapiens
catgcactttgtaca

SEQ ID NO: 328720 - DNA, 15 bp, Homo sapiens
ccatgcactttgtac

SEQ ID NO: 328721 - DNA, 15 bp, Homo sapiens
gccatgcactttgta

SEQ ID NO: 328722 - DNA, 15 bp, Homo sapiens
tgccatgcactttgt

SEQ ID NO: 328723 - DNA, 15 bp, Homo sapiens
atgccatgcactttg

SEQ ID NO: 328724 - DNA, 15 bp, Homo sapiens
aatgccatgcacttt

SEQ ID NO: 328725 - DNA, 15 bp, Homo sapiens
aaatgccatgcactt

SEQ ID NO: 328726 - DNA, 15 bp, Homo sapiens
aaaatgccatgcact

SEQ ID NO: 328727 - DNA, 15 bp, Homo sapiens
gaaaatgccatgcac

SEQ ID NO: 328728 - DNA, 15 bp, Homo sapiens
agaaaatgccatgca

SEQ ID NO: 328729 - DNA, 15 bp, Homo sapiens
cagaaaatgccatgc

SEQ ID NO: 328730 - DNA, 15 bp, Homo sapiens
acagaaaatgccatg

SEQ ID NO: 328731 - DNA, 15 bp, Homo sapiens
cacagaaaatgccat

SEQ ID NO: 328732 - DNA, 15 bp, Homo sapiens
acacagaaaatgcca

SEQ ID NO: 328733 - DNA, 15 bp, Homo sapiens
aacacagaaaatgcc

SEQ ID NO: 328734 - DNA, 15 bp, Homo sapiens
taacacagaaaatgc

SEQ ID NO: 328735 - DNA, 15 bp, Homo sapiens
ttaacacagaaaatg

SEQ ID NO: 328736 - DNA, 15 bp, Homo sapiens
gttaacacagaaaat

SEQ ID NO: 328737 - DNA, 15 bp, Homo sapiens
agttaacacagaaaa

SEQ ID NO: 328738 - DNA, 15 bp, Homo sapiens
cagttaacacagaaa

SEQ ID NO: 328739 - DNA, 15 bp, Homo sapiens
tcagttaacacagaa

SEQ ID NO: 328740 - DNA, 15 bp, Homo sapiens
ttcagttaacacaga

SEQ ID NO: 328741 - DNA, 15 bp, Homo sapiens
tttcagttaacacag

SEQ ID NO: 328742 - DNA, 15 bp, Homo sapiens
gtttcagttaacaca

SEQ ID NO: 328743 - DNA, 15 bp, Homo sapiens
tgtttcagttaacac

SEQ ID NO: 328744 - DNA, 15 bp, Homo sapiens
atgtttcagttaaca

SEQ ID NO: 328745 - DNA, 15 bp, Homo sapiens
catgtttcagttaac

SEQ ID NO: 328746 - DNA, 15 bp, Homo sapiens
acatgtttcagttaa

SEQ ID NO: 328747 - DNA, 15 bp, Homo sapiens
gacatgtttcagtta

SEQ ID NO: 328748 - DNA, 15 bp, Homo sapiens
agacatgtttcagtt

SEQ ID NO: 328749 - DNA, 15 bp, Homo sapiens
aagacatgtttcagt

SEQ ID NO: 328750 - DNA, 15 bp, Homo sapiens
caagacatgtttcag

SEQ ID NO: 328751 - DNA, 15 bp, Homo sapiens
acaagacatgtttca

SEQ ID NO: 328752 - DNA, 15 bp, Homo sapiens
aacaagacatgtttc

SEQ ID NO: 328753 - DNA, 15 bp, Homo sapiens
taacaagacatgttt

SEQ ID NO: 328754 - DNA, 15 bp, Homo sapiens
ttaacaagacatgtt

SEQ ID NO: 328755 - DNA, 15 bp, Homo sapiens
tttaacaagacatgt

SEQ ID NO: 328756 - DNA, 15 bp, Homo sapiens
gtttaacaagacatg

SEQ ID NO: 328757 - DNA, 15 bp, Homo sapiens
tgtttaacaagacat

SEQ ID NO: 328758 - DNA, 15 bp, Homo sapiens
atgtttaacaagaca

SEQ ID NO: 328759 - DNA, 15 bp, Homo sapiens
tatgtttaacaagac

SEQ ID NO: 328760 - DNA, 15 bp, Homo sapiens
atatgtttaacaaga

SEQ ID NO: 328761 - DNA, 15 bp, Homo sapiens
tatatgtttaacaag

SEQ ID NO: 328762 - DNA, 15 bp, Homo sapiens
ctatatgtttaacaa

SEQ ID NO: 328763 - DNA, 15 bp, Homo sapiens
tctatatgtttaaca

SEQ ID NO: 328764 - DNA, 15 bp, Homo sapiens
ctctatatgtttaac

SEQ ID NO: 328765 - DNA, 15 bp, Homo sapiens
cctctatatgtttaa

SEQ ID NO: 328766 - DNA, 15 bp, Homo sapiens
tcctctatatgttta

SEQ ID NO: 328767 - DNA, 15 bp, Homo sapiens
gtcctctatatgttt

SEQ ID NO: 328768 - DNA, 15 bp, Homo sapiens
tgtcctctatatgtt

SEQ ID NO: 328769 - DNA, 15 bp, Homo sapiens
ttgtcctctatatgt

SEQ ID NO: 328770 - DNA, 15 bp, Homo sapiens
tttgtcctctatatg

SEQ ID NO: 328771 - DNA, 15 bp, Homo sapiens
ctttgtcctctatat

SEQ ID NO: 328772 - DNA, 15 bp, Homo sapiens
cctttgtcctctata

SEQ ID NO: 328773 - DNA, 15 bp, Homo sapiens
tcctttgtcctctat

SEQ ID NO: 328774 - DNA, 15 bp, Homo sapiens
ctcctttgtcctcta

SEQ ID NO: 328775 - DNA, 15 bp, Homo sapiens
cctcctttgtcctct

SEQ ID NO: 328776 - DNA, 15 bp, Homo sapiens
gcctcctttgtcctc

SEQ ID NO: 328777 - DNA, 15 bp, Homo sapiens
ggcctcctttgtcct

SEQ ID NO: 328778 - DNA, 15 bp, Homo sapiens
gggcctcctttgtcc

SEQ ID NO: 328779 - DNA, 15 bp, Homo sapiens
ggggcctcctttgtc

SEQ ID NO: 328780 - DNA, 15 bp, Homo sapiens
tggggcctcctttgt

SEQ ID NO: 328781 - DNA, 15 bp, Homo sapiens
ctggggcctcctttg

SEQ ID NO: 328782 - DNA, 15 bp, Homo sapiens
tctggggcctccttt

SEQ ID NO: 328783 - DNA, 15 bp, Homo sapiens
ttctggggcctcctt

SEQ ID NO: 328784 - DNA, 15 bp, Homo sapiens
cttctggggcctcct

SEQ ID NO: 328785 - DNA, 15 bp, Homo sapiens
gcttctggggcctcc

SEQ ID NO: 328786 - DNA, 15 bp, Homo sapiens
agcttctggggcctc

SEQ ID NO: 328787 - DNA, 15 bp, Homo sapiens
gagcttctggggcct

SEQ ID NO: 328788 - DNA, 15 bp, Homo sapiens
agagcttctggggcc

SEQ ID NO: 328789 - DNA, 15 bp, Homo sapiens
cagagcttctggggc

SEQ ID NO: 328790 - DNA, 15 bp, Homo sapiens
cccagagcttctggg

SEQ ID NO: 328791 - DNA, 15 bp, Homo sapiens
acccagagcttctgg

SEQ ID NO: 328792 - DNA, 15 bp, Homo sapiens
aacccagagcttctg

SEQ ID NO: 328793 - DNA, 15 bp, Homo sapiens
aaacccagagcttct

SEQ ID NO: 328794 - DNA, 15 bp, Homo sapiens
taaacccagagcttc

SEQ ID NO: 328795 - DNA, 15 bp, Homo sapiens
gtaaacccagagctt

SEQ ID NO: 328796 - DNA, 15 bp, Homo sapiens
tgtaaacccagagct

SEQ ID NO: 328797 - DNA, 15 bp, Homo sapiens
ctgtaaacccagagc

SEQ ID NO: 328798 - DNA, 15 bp, Homo sapiens
gctgtaaacccagag

SEQ ID NO: 328799 - DNA, 15 bp, Homo sapiens
agctgtaaacccaga

SEQ ID NO: 328800 - DNA, 15 bp, Homo sapiens
cagctgtaaacccag

SEQ ID NO: 328801 - DNA, 15 bp, Homo sapiens
acagctgtaaaccca

SEQ ID NO: 328802 - DNA, 15 bp, Homo sapiens
tacagctgtaaaccc

SEQ ID NO: 328803 - DNA, 15 bp, Homo sapiens
ttacagctgtaaacc

SEQ ID NO: 328804 - DNA, 15 bp, Homo sapiens
attacagctgtaaac

SEQ ID NO: 328805 - DNA, 15 bp, Homo sapiens
gattacagctgtaaa

SEQ ID NO: 328806 - DNA, 15 bp, Homo sapiens
agattacagctgtaa

SEQ ID NO: 328807 - DNA, 15 bp, Homo sapiens
gagattacagctgta

SEQ ID NO: 328808 - DNA, 15 bp, Homo sapiens
agagattacagctgt

SEQ ID NO: 328809 - DNA, 15 bp, Homo sapiens
cagagattacagctg

SEQ ID NO: 328810 - DNA, 15 bp, Homo sapiens
ccagagattacagct

SEQ ID NO: 328811 - DNA, 15 bp, Homo sapiens
tccagagattacagc

SEQ ID NO: 328812 - DNA, 15 bp, Homo sapiens
ctccagagattacag

SEQ ID NO: 328813 - DNA, 15 bp, Homo sapiens
gctccagagattaca

SEQ ID NO: 328814 - DNA, 15 bp, Homo sapiens
ggctccagagattac

SEQ ID NO: 328815 - DNA, 15 bp, Homo sapiens
tggctccagagatta

SEQ ID NO: 328816 - DNA, 15 bp, Homo sapiens
ctggctccagagatt

SEQ ID NO: 328817 - DNA, 15 bp, Homo sapiens
tctggctccagagat

SEQ ID NO: 328818 - DNA, 15 bp, Homo sapiens
gtctggctccagaga

SEQ ID NO: 328819 - DNA, 15 bp, Homo sapiens
ggtctggctccagag

SEQ ID NO: 328820 - DNA, 15 bp, Homo sapiens
aggtctggctccaga

SEQ ID NO: 328821 - DNA, 15 bp, Homo sapiens
aaggtctggctccag

SEQ ID NO: 328822 - DNA, 15 bp, Homo sapiens
gaaggtctggctcca

SEQ ID NO: 328823 - DNA, 15 bp, Homo sapiens
agaaggtctggctcc

SEQ ID NO: 328824 - DNA, 15 bp, Homo sapiens
gagaaggtctggctc

SEQ ID NO: 328825 - DNA, 15 bp, Homo sapiens
agagaaggtctggct

SEQ ID NO: 328826 - DNA, 15 bp, Homo sapiens
aagagaaggtctggc

SEQ ID NO: 328827 - DNA, 15 bp, Homo sapiens
caagagaaggtctgg

SEQ ID NO: 328828 - DNA, 15 bp, Homo sapiens
gcaagagaaggtctg

SEQ ID NO: 328829 - DNA, 15 bp, Homo sapiens
tgcaagagaaggtct

SEQ ID NO: 328830 - DNA, 15 bp, Homo sapiens
ctgcaagagaaggtc

SEQ ID NO: 328831 - DNA, 15 bp, Homo sapiens
gctgcaagagaaggt

SEQ ID NO: 328832 - DNA, 15 bp, Homo sapiens
tgctgcaagagaagg

SEQ ID NO: 328833 - DNA, 15 bp, Homo sapiens
atgctgcaagagaag

SEQ ID NO: 328834 - DNA, 15 bp, Homo sapiens
gatgctgcaagagaa

SEQ ID NO: 328835 - DNA, 15 bp, Homo sapiens
ggatgctgcaagaga

SEQ ID NO: 328836 - DNA, 15 bp, Homo sapiens
tggatgctgcaagag

SEQ ID NO: 328837 - DNA, 15 bp, Homo sapiens
gtggatgctgcaaga

SEQ ID NO: 328838 - DNA, 15 bp, Homo sapiens
tgtggatgctgcaag

SEQ ID NO: 328839 - DNA, 15 bp, Homo sapiens
ctgtggatgctgcaa

SEQ ID NO: 328840 - DNA, 15 bp, Homo sapiens
actgtggatgctgca

SEQ ID NO: 328841 - DNA, 15 bp, Homo sapiens
aactgtggatgctgc

SEQ ID NO: 328842 - DNA, 15 bp, Homo sapiens
aaactgtggatgctg

SEQ ID NO: 328843 - DNA, 15 bp, Homo sapiens
gaaactgtggatgct

SEQ ID NO: 328844 - DNA, 15 bp, Homo sapiens
agaaactgtggatgc

SEQ ID NO: 328845 - DNA, 15 bp, Homo sapiens
aagaaactgtggatg

SEQ ID NO: 328846 - DNA, 15 bp, Homo sapiens
caagaaactgtggat

SEQ ID NO: 328847 - DNA, 15 bp, Homo sapiens
ccaagaaactgtgga

SEQ ID NO: 328848 - DNA, 15 bp, Homo sapiens
tccaagaaactgtgg

SEQ ID NO: 328849 - DNA, 15 bp, Homo sapiens
ttccaagaaactgtg

SEQ ID NO: 328850 - DNA, 15 bp, Homo sapiens
cttccaagaaactgt

SEQ ID NO: 328851 - DNA, 15 bp, Homo sapiens
tcttccaagaaactg

SEQ ID NO: 328852 - DNA, 15 bp, Homo sapiens
ctcttccaagaaact

SEQ ID NO: 328853 - DNA, 15 bp, Homo sapiens
cctcttccaagaaac

SEQ ID NO: 328854 - DNA, 15 bp, Homo sapiens
acctcttccaagaaa

SEQ ID NO: 328855 - DNA, 15 bp, Homo sapiens
gacctcttccaagaa

SEQ ID NO: 328856 - DNA, 15 bp, Homo sapiens
agacctcttccaaga

SEQ ID NO: 328857 - DNA, 15 bp, Homo sapiens
gagacctcttccaag

SEQ ID NO: 328858 - DNA, 15 bp, Homo sapiens
agagacctcttccaa

SEQ ID NO: 328859 - DNA, 15 bp, Homo sapiens
tagagacctcttcca

SEQ ID NO: 328860 - DNA, 15 bp, Homo sapiens
ttagagacctcttcc

SEQ ID NO: 328861 - DNA, 15 bp, Homo sapiens
attagagacctcttc

SEQ ID NO: 328862 - DNA, 15 bp, Homo sapiens
gattagagacctctt

SEQ ID NO: 328863 - DNA, 15 bp, Homo sapiens
agattagagacctct

SEQ ID NO: 328864 - DNA, 15 bp, Homo sapiens
tagattagagacctc

SEQ ID NO: 328865 - DNA, 15 bp, Homo sapiens
gtagattagagacct

SEQ ID NO: 328866 - DNA, 15 bp, Homo sapiens
tgtagattagagacc

SEQ ID NO: 328867 - DNA, 15 bp, Homo sapiens
ttgtagattagagac

SEQ ID NO: 328868 - DNA, 15 bp, Homo sapiens
cttgtagattagaga

SEQ ID NO: 328869 - DNA, 15 bp, Homo sapiens
tcttgtagattagag

SEQ ID NO: 328870 - DNA, 15 bp, Homo sapiens
ttcttgtagattaga

SEQ ID NO: 328871 - DNA, 15 bp, Homo sapiens
attcttgtagattag

SEQ ID NO: 328872 - DNA, 15 bp, Homo sapiens
gattcttgtagatta

SEQ ID NO: 328873 - DNA, 15 bp, Homo sapiens
ggattcttgtagatt

SEQ ID NO: 328874 - DNA, 15 bp, Homo sapiens
aggattcttgtagat

SEQ ID NO: 328875 - DNA, 15 bp, Homo sapiens
caggattcttgtaga

SEQ ID NO: 328876 - DNA, 15 bp, Homo sapiens
acaggattcttgtag

SEQ ID NO: 328877 - DNA, 15 bp, Homo sapiens
cacaggattcttgta

SEQ ID NO: 328878 - DNA, 15 bp, Homo sapiens
gcacaggattcttgt

SEQ ID NO: 328879 - DNA, 15 bp, Homo sapiens
ggcacaggattcttg

SEQ ID NO: 328880 - DNA, 15 bp, Homo sapiens
aggcacaggattctt

SEQ ID NO: 328881 - DNA, 15 bp, Homo sapiens
caggcacaggattct

SEQ ID NO: 328882 - DNA, 15 bp, Homo sapiens
tcaggcacaggattc

SEQ ID NO: 328883 - DNA, 15 bp, Homo sapiens
gtcaggcacaggatt

SEQ ID NO: 328884 - DNA, 15 bp, Homo sapiens
ggtcaggcacaggat

SEQ ID NO: 328885 - DNA, 15 bp, Homo sapiens
aggtcaggcacagga

SEQ ID NO: 328886 - DNA, 15 bp, Homo sapiens
taggtcaggcacagg

SEQ ID NO: 328887 - DNA, 15 bp, Homo sapiens
ataggtcaggcacag

SEQ ID NO: 328888 - DNA, 15 bp, Homo sapiens
gataggtcaggcaca

SEQ ID NO: 328889 - DNA, 15 bp, Homo sapiens
tgataggtcaggcac

SEQ ID NO: 328890 - DNA, 15 bp, Homo sapiens
atgataggtcaggca

SEQ ID NO: 328891 - DNA, 15 bp, Homo sapiens
catgataggtcaggc

SEQ ID NO: 328892 - DNA, 15 bp, Homo sapiens
tcatgataggtcagg

SEQ ID NO: 328893 - DNA, 15 bp, Homo sapiens
atcatgataggtcag

SEQ ID NO: 328894 - DNA, 15 bp, Homo sapiens
aatcatgataggtca

SEQ ID NO: 328895 - DNA, 15 bp, Homo sapiens
gaatcatgataggtc

SEQ ID NO: 328896 - DNA, 15 bp, Homo sapiens
tgaatcatgataggt

SEQ ID NO: 328897 - DNA, 15 bp, Homo sapiens
gtgaatcatgatagg

SEQ ID NO: 328898 - DNA, 15 bp, Homo sapiens
agtgaatcatgatag

SEQ ID NO: 328899 - DNA, 15 bp, Homo sapiens
cagtgaatcatgata

SEQ ID NO: 328900 - DNA, 15 bp, Homo sapiens
acagtgaatcatgat

SEQ ID NO: 328901 - DNA, 15 bp, Homo sapiens
cacagtgaatcatga

SEQ ID NO: 328902 - DNA, 15 bp, Homo sapiens
acacagtgaatcatg

SEQ ID NO: 328903 - DNA, 15 bp, Homo sapiens
gacacagtgaatcat

SEQ ID NO: 328904 - DNA, 15 bp, Homo sapiens
ggacacagtgaatca

SEQ ID NO: 328905 - DNA, 15 bp, Homo sapiens
tggacacagtgaatc

SEQ ID NO: 328906 - DNA, 15 bp, Homo sapiens
atggacacagtgaat

SEQ ID NO: 328907 - DNA, 15 bp, Homo sapiens
gatggacacagtgaa

SEQ ID NO: 328908 - DNA, 15 bp, Homo sapiens
cgatggacacagtga

SEQ ID NO: 328909 - DNA, 15 bp, Homo sapiens
tcgatggacacagtg

SEQ ID NO: 328910 - DNA, 15 bp, Homo sapiens
atcgatggacacagt

SEQ ID NO: 328911 - DNA, 15 bp, Homo sapiens
catcgatggacacag

SEQ ID NO: 328912 - DNA, 15 bp, Homo sapiens
acatcgatggacaca

SEQ ID NO: 328913 - DNA, 15 bp, Homo sapiens
cacatcgatggacac

SEQ ID NO: 328914 - DNA, 15 bp, Homo sapiens
tcacatcgatggaca

SEQ ID NO: 328915 - DNA, 15 bp, Homo sapiens
ttcacatcgatggac

SEQ ID NO: 328916 - DNA, 15 bp, Homo sapiens
attcacatcgatgga

SEQ ID NO: 328917 - DNA, 15 bp, Homo sapiens
aattcacatcgatgg

SEQ ID NO: 328918 - DNA, 15 bp, Homo sapiens
taattcacatcgatg

SEQ ID NO: 328919 - DNA, 15 bp, Homo sapiens
ctaattcacatcgat

SEQ ID NO: 328920 - DNA, 15 bp, Homo sapiens
tctaattcacatcga

SEQ ID NO: 328921 - DNA, 15 bp, Homo sapiens
ttctaattcacatcg

SEQ ID NO: 328922 - DNA, 15 bp, Homo sapiens
gttctaattcacatc

SEQ ID NO: 328923 - DNA, 15 bp, Homo sapiens
agttctaattcacat

SEQ ID NO: 328924 - DNA, 15 bp, Homo sapiens
gagttctaattcaca

SEQ ID NO: 328925 - DNA, 15 bp, Homo sapiens
tgagttctaattcac

SEQ ID NO: 328926 - DNA, 15 bp, Homo sapiens
atgagttctaattca

SEQ ID NO: 328927 - DNA, 15 bp, Homo sapiens
catgagttctaattc

SEQ ID NO: 328928 - DNA, 15 bp, Homo sapiens
ccatgagttctaatt

SEQ ID NO: 328929 - DNA, 15 bp, Homo sapiens
cccatgagttctaat

SEQ ID NO: 328930 - DNA, 15 bp, Homo sapiens
tcccatgagttctaa

SEQ ID NO: 328931 - DNA, 15 bp, Homo sapiens
atcccatgagttcta

SEQ ID NO: 328932 - DNA, 15 bp, Homo sapiens
catcccatgagttct

SEQ ID NO: 328933 - DNA, 15 bp, Homo sapiens
ccatcccatgagttc

SEQ ID NO: 328934 - DNA, 15 bp, Homo sapiens
tccatcccatgagtt

SEQ ID NO: 328935 - DNA, 15 bp, Homo sapiens
ctccatcccatgagt

SEQ ID NO: 328936 - DNA, 15 bp, Homo sapiens
tctccatcccatgag

SEQ ID NO: 328937 - DNA, 15 bp, Homo sapiens
gtctccatcccatga

SEQ ID NO: 328938 - DNA, 15 bp, Homo sapiens
agtctccatcccatg

SEQ ID NO: 328939 - DNA, 15 bp, Homo sapiens
gagtctccatcccat

SEQ ID NO: 328940 - DNA, 15 bp, Homo sapiens
tgagtctccatccca

SEQ ID NO: 328941 - DNA, 15 bp, Homo sapiens
ctgagtctccatccc

SEQ ID NO: 328942 - DNA, 15 bp, Homo sapiens
cctgagtctccatcc

SEQ ID NO: 328943 - DNA, 15 bp, Homo sapiens
tcctgagtctccatc

SEQ ID NO: 328944 - DNA, 15 bp, Homo sapiens
ttcctgagtctccat

SEQ ID NO: 328945 - DNA, 15 bp, Homo sapiens
attcctgagtctcca

SEQ ID NO: 328946 - DNA, 15 bp, Homo sapiens
aattcctgagtctcc

SEQ ID NO: 328947 - DNA, 15 bp, Homo sapiens
caattcctgagtctc

SEQ ID NO: 328948 - DNA, 15 bp, Homo sapiens
acaattcctgagtct

SEQ ID NO: 328949 - DNA, 15 bp, Homo sapiens
tacaattcctgagtc

SEQ ID NO: 328950 - DNA, 15 bp, Homo sapiens
atacaattcctgagt

SEQ ID NO: 328951 - DNA, 15 bp, Homo sapiens
tatacaattcctgag

SEQ ID NO: 328952 - DNA, 15 bp, Homo sapiens
ctatacaattcctga

SEQ ID NO: 328953 - DNA, 15 bp, Homo sapiens
cctatacaattcctg

SEQ ID NO: 328954 - DNA, 15 bp, Homo sapiens
gcctatacaattcct

SEQ ID NO: 328955 - DNA, 15 bp, Homo sapiens
tgcctatacaattcc

SEQ ID NO: 328956 - DNA, 15 bp, Homo sapiens
ttgcctatacaattc

SEQ ID NO: 328957 - DNA, 15 bp, Homo sapiens
gttgcctatacaatt

SEQ ID NO: 328958 - DNA, 15 bp, Homo sapiens
tgttgcctatacaat

SEQ ID NO: 328959 - DNA, 15 bp, Homo sapiens
atgttgcctatacaa

SEQ ID NO: 328960 - DNA, 15 bp, Homo sapiens
catgttgcctataca

SEQ ID NO: 328961 - DNA, 15 bp, Homo sapiens
tcatgttgcctatac

SEQ ID NO: 328962 - DNA, 15 bp, Homo sapiens
ctcatgttgcctata

SEQ ID NO: 328963 - DNA, 15 bp, Homo sapiens
tctcatgttgcctat

SEQ ID NO: 328964 - DNA, 15 bp, Homo sapiens
ttctcatgttgccta

SEQ ID NO: 328965 - DNA, 15 bp, Homo sapiens
attctcatgttgcct

SEQ ID NO: 328966 - DNA, 15 bp, Homo sapiens
cattctcatgttgcc

SEQ ID NO: 328967 - DNA, 15 bp, Homo sapiens
tcattctcatgttgc

SEQ ID NO: 328968 - DNA, 15 bp, Homo sapiens
atcattctcatgttg

SEQ ID NO: 328969 - DNA, 15 bp, Homo sapiens
aatcattctcatgtt

SEQ ID NO: 328970 - DNA, 15 bp, Homo sapiens
caatcattctcatgt

SEQ ID NO: 328971 - DNA, 15 bp, Homo sapiens
tcaatcattctcatg

SEQ ID NO: 328972 - DNA, 15 bp, Homo sapiens
gtcaatcattctcat

SEQ ID NO: 328973 - DNA, 15 bp, Homo sapiens
agtcaatcattctca

SEQ ID NO: 328974 - DNA, 15 bp, Homo sapiens
aagtcaatcattctc

SEQ ID NO: 328975 - DNA, 15 bp, Homo sapiens
aaagtcaatcattct

SEQ ID NO: 328976 - DNA, 15 bp, Homo sapiens
taaagtcaatcattc

SEQ ID NO: 328977 - DNA, 15 bp, Homo sapiens
ctaaagtcaatcatt

SEQ ID NO: 328978 - DNA, 15 bp, Homo sapiens
actaaagtcaatcat

SEQ ID NO: 328979 - DNA, 15 bp, Homo sapiens
aactaaagtcaatca

SEQ ID NO: 328980 - DNA, 15 bp, Homo sapiens
caactaaagtcaatc

SEQ ID NO: 328981 - DNA, 15 bp, Homo sapiens
ccaactaaagtcaat

SEQ ID NO: 328982 - DNA, 15 bp, Homo sapiens
tccaactaaagtcaa

SEQ ID NO: 328983 - DNA, 15 bp, Homo sapiens
atccaactaaagtca

SEQ ID NO: 328984 - DNA, 15 bp, Homo sapiens
gatccaactaaagtc

SEQ ID NO: 328985 - DNA, 15 bp, Homo sapiens
tgatccaactaaagt

SEQ ID NO: 328986 - DNA, 15 bp, Homo sapiens
ctgatccaactaaag

SEQ ID NO: 328987 - DNA, 15 bp, Homo sapiens
cctgatccaactaaa

SEQ ID NO: 328988 - DNA, 15 bp, Homo sapiens
acctgatccaactaa

SEQ ID NO: 328989 - DNA, 15 bp, Homo sapiens
cacctgatccaacta

SEQ ID NO: 328990 - DNA, 15 bp, Homo sapiens
acacctgatccaact

SEQ ID NO: 328991 - DNA, 15 bp, Homo sapiens
aacacctgatccaac

SEQ ID NO: 328992 - DNA, 15 bp, Homo sapiens
caacacctgatccaa

SEQ ID NO: 328993 - DNA, 15 bp, Homo sapiens
tcaacacctgatcca

SEQ ID NO: 328994 - DNA, 15 bp, Homo sapiens
atcaacacctgatcc

SEQ ID NO: 328995 - DNA, 15 bp, Homo sapiens
catcaacacctgatc

SEQ ID NO: 328996 - DNA, 15 bp, Homo sapiens
tcatcaacacctgat

SEQ ID NO: 328997 - DNA, 15 bp, Homo sapiens
atcatcaacacctga

SEQ ID NO: 328998 - DNA, 15 bp, Homo sapiens
tatcatcaacacctg

SEQ ID NO: 328999 - DNA, 15 bp, Homo sapiens
ttatcatcaacacct

SEQ ID NO: 329000 - DNA, 15 bp, Homo sapiens
cttatcatcaacacc

SEQ ID NO: 329001 - DNA, 15 bp, Homo sapiens
tcttatcatcaacac

SEQ ID NO: 329002 - DNA, 15 bp, Homo sapiens
atcttatcatcaaca

SEQ ID NO: 329003 - DNA, 15 bp, Homo sapiens
gatcttatcatcaac

SEQ ID NO: 329004 - DNA, 15 bp, Homo sapiens
tgatcttatcatcaa

SEQ ID NO: 329005 - DNA, 15 bp, Homo sapiens
atgatcttatcatca

SEQ ID NO: 329006 - DNA, 15 bp, Homo sapiens
tatgatcttatcatc

SEQ ID NO: 329007 - DNA, 15 bp, Homo sapiens
ttatgatcttatcat

SEQ ID NO: 329008 - DNA, 15 bp, Homo sapiens
attatgatcttatca

SEQ ID NO: 329009 - DNA, 15 bp, Homo sapiens
gattatgatcttatc

SEQ ID NO: 329010 - DNA, 15 bp, Homo sapiens
agattatgatcttat

SEQ ID NO: 329011 - DNA, 15 bp, Homo sapiens
gagattatgatctta

SEQ ID NO: 329012 - DNA, 15 bp, Homo sapiens
ggagattatgatctt

SEQ ID NO: 329013 - DNA, 15 bp, Homo sapiens
gggagattatgatct

SEQ ID NO: 329014 - DNA, 15 bp, Homo sapiens
agggagattatgatc

SEQ ID NO: 329015 - DNA, 15 bp, Homo sapiens
gagggagattatgat

SEQ ID NO: 329016 - DNA, 15 bp, Homo sapiens
tgagggagattatga

SEQ ID NO: 329017 - DNA, 15 bp, Homo sapiens
ttgagggagattatg

SEQ ID NO: 329018 - DNA, 15 bp, Homo sapiens
tttgagggagattat

SEQ ID NO: 329019 - DNA, 15 bp, Homo sapiens
ctttgagggagatta

SEQ ID NO: 329020 - DNA, 15 bp, Homo sapiens
gctttgagggagatt

SEQ ID NO: 329021 - DNA, 15 bp, Homo sapiens
agctttgagggagat

SEQ ID NO: 329022 - DNA, 15 bp, Homo sapiens
aagctttgagggaga

SEQ ID NO: 329023 - DNA, 15 bp, Homo sapiens
taagctttgagggag

SEQ ID NO: 329024 - DNA, 15 bp, Homo sapiens
ctaagctttgaggga

SEQ ID NO: 329025 - DNA, 15 bp, Homo sapiens
cctaagctttgaggg

SEQ ID NO: 329026 - DNA, 15 bp, Homo sapiens
tcctaagctttgagg

SEQ ID NO: 329027 - DNA, 15 bp, Homo sapiens
ttcctaagctttgag

SEQ ID NO: 329028 - DNA, 15 bp, Homo sapiens
cttcctaagctttga

SEQ ID NO: 329029 - DNA, 15 bp, Homo sapiens
gcttcctaagctttg

SEQ ID NO: 329030 - DNA, 15 bp, Homo sapiens
tgcttcctaagcttt

SEQ ID NO: 329031 - DNA, 15 bp, Homo sapiens
ctgcttcctaagctt

SEQ ID NO: 329032 - DNA, 15 bp, Homo sapiens
cctgcttcctaagct

SEQ ID NO: 329033 - DNA, 15 bp, Homo sapiens
gcctgcttcctaagc

SEQ ID NO: 329034 - DNA, 15 bp, Homo sapiens
agcctgcttcctaag

SEQ ID NO: 329035 - DNA, 15 bp, Homo sapiens
tagcctgcttcctaa

SEQ ID NO: 329036 - DNA, 15 bp, Homo sapiens
ctagcctgcttccta

SEQ ID NO: 329037 - DNA, 15 bp, Homo sapiens
tctagcctgcttcct

SEQ ID NO: 329038 - DNA, 15 bp, Homo sapiens
ttctagcctgcttcc

SEQ ID NO: 329039 - DNA, 15 bp, Homo sapiens
attctagcctgcttc

SEQ ID NO: 329040 - DNA, 15 bp, Homo sapiens
gattctagcctgctt

SEQ ID NO: 329041 - DNA, 15 bp, Homo sapiens
agattctagcctgct

SEQ ID NO: 329042 - DNA, 15 bp, Homo sapiens
cagattctagcctgc

SEQ ID NO: 329043 - DNA, 15 bp, Homo sapiens
tcagattctagcctg

SEQ ID NO: 329044 - DNA, 15 bp, Homo sapiens
ttcagattctagcct

SEQ ID NO: 329045 - DNA, 15 bp, Homo sapiens
attcagattctagcc

SEQ ID NO: 329046 - DNA, 15 bp, Homo sapiens
cattcagattctagc

SEQ ID NO: 329047 - DNA, 15 bp, Homo sapiens
ccattcagattctag

SEQ ID NO: 329048 - DNA, 15 bp, Homo sapiens
accattcagattcta

SEQ ID NO: 329049 - DNA, 15 bp, Homo sapiens
aaccattcagattct

SEQ ID NO: 329050 - DNA, 15 bp, Homo sapiens
gaaccattcagattc

SEQ ID NO: 329051 - DNA, 15 bp, Homo sapiens
tgaaccattcagatt

SEQ ID NO: 329052 - DNA, 15 bp, Homo sapiens
ttgaaccattcagat

SEQ ID NO: 329053 - DNA, 15 bp, Homo sapiens
tttgaaccattcaga

SEQ ID NO: 329054 - DNA, 15 bp, Homo sapiens
atttgaaccattcag

SEQ ID NO: 329055 - DNA, 15 bp, Homo sapiens
gatttgaaccattca

SEQ ID NO: 329056 - DNA, 15 bp, Homo sapiens
tgatttgaaccattc

SEQ ID NO: 329057 - DNA, 15 bp, Homo sapiens
atgatttgaaccatt

SEQ ID NO: 329058 - DNA, 15 bp, Homo sapiens
aatgatttgaaccat

SEQ ID NO: 329059 - DNA, 15 bp, Homo sapiens
gaatgatttgaacca

SEQ ID NO: 329060 - DNA, 15 bp, Homo sapiens
agaatgatttgaacc

SEQ ID NO: 329061 - DNA, 15 bp, Homo sapiens
tagaatgatttgaac

SEQ ID NO: 329062 - DNA, 15 bp, Homo sapiens
ttagaatgatttgaa

SEQ ID NO: 329063 - DNA, 15 bp, Homo sapiens
gttagaatgatttga

SEQ ID NO: 329064 - DNA, 15 bp, Homo sapiens
ggttagaatgatttg

SEQ ID NO: 329065 - DNA, 15 bp, Homo sapiens
cggttagaatgattt

SEQ ID NO: 329066 - DNA, 15 bp, Homo sapiens
gcggttagaatgatt

SEQ ID NO: 329067 - DNA, 15 bp, Homo sapiens
agcggttagaatgat

SEQ ID NO: 329068 - DNA, 15 bp, Homo sapiens
cagcggttagaatga

SEQ ID NO: 329069 - DNA, 15 bp, Homo sapiens
ccagcggttagaatg

SEQ ID NO: 329070 - DNA, 15 bp, Homo sapiens
accagcggttagaat

SEQ ID NO: 329071 - DNA, 15 bp, Homo sapiens
taccagcggttagaa

SEQ ID NO: 329072 - DNA, 15 bp, Homo sapiens
ctaccagcggttaga

SEQ ID NO: 329073 - DNA, 15 bp, Homo sapiens
gctaccagcggttag

SEQ ID NO: 329074 - DNA, 15 bp, Homo sapiens
agctaccagcggtta

SEQ ID NO: 329075 - DNA, 15 bp, Homo sapiens
aagctaccagcggtt

SEQ ID NO: 329076 - DNA, 15 bp, Homo sapiens
gaagctaccagcggt

SEQ ID NO: 329077 - DNA, 15 bp, Homo sapiens
cgaagctaccagcgg

SEQ ID NO: 329078 - DNA, 15 bp, Homo sapiens
acgaagctaccagcg

SEQ ID NO: 329079 - DNA, 15 bp, Homo sapiens
cacgaagctaccagc

SEQ ID NO: 329080 - DNA, 15 bp, Homo sapiens
acacgaagctaccag

SEQ ID NO: 329081 - DNA, 15 bp, Homo sapiens
aacacgaagctacca

SEQ ID NO: 329082 - DNA, 15 bp, Homo sapiens
aaacacgaagctacc

SEQ ID NO: 329083 - DNA, 15 bp, Homo sapiens
caaacacgaagctac

SEQ ID NO: 329084 - DNA, 15 bp, Homo sapiens
ccaaacacgaagcta

SEQ ID NO: 329085 - DNA, 15 bp, Homo sapiens
gccaaacacgaagct

SEQ ID NO: 329086 - DNA, 15 bp, Homo sapiens
ggccaaacacgaagc

SEQ ID NO: 329087 - DNA, 15 bp, Homo sapiens
gggccaaacacgaag

SEQ ID NO: 329088 - DNA, 15 bp, Homo sapiens
tgggccaaacacgaa

SEQ ID NO: 329089 - DNA, 15 bp, Homo sapiens
ctgggccaaacacga

SEQ ID NO: 329090 - DNA, 15 bp, Homo sapiens
tctgggccaaacacg

SEQ ID NO: 329091 - DNA, 15 bp, Homo sapiens
atctgggccaaacac

SEQ ID NO: 329092 - DNA, 15 bp, Homo sapiens
gatctgggccaaaca

SEQ ID NO: 329093 - DNA, 15 bp, Homo sapiens
ggatctgggccaaac

SEQ ID NO: 329094 - DNA, 15 bp, Homo sapiens
gggatctgggccaaa

SEQ ID NO: 329095 - DNA, 15 bp, Homo sapiens
agggatctgggccaa

SEQ ID NO: 329096 - DNA, 15 bp, Homo sapiens
cagggatctgggcca

SEQ ID NO: 329097 - DNA, 15 bp, Homo sapiens
ccagggatctgggcc

SEQ ID NO: 329098 - DNA, 15 bp, Homo sapiens
cccagggatctgggc

SEQ ID NO: 329099 - DNA, 15 bp, Homo sapiens
gcccagggatctggg

SEQ ID NO: 329100 - DNA, 15 bp, Homo sapiens
agcccagggatctgg

SEQ ID NO: 329101 - DNA, 15 bp, Homo sapiens
aagcccagggatctg

SEQ ID NO: 329102 - DNA, 15 bp, Homo sapiens
caagcccagggatct

SEQ ID NO: 329103 - DNA, 15 bp, Homo sapiens
tcaagcccagggatc

SEQ ID NO: 329104 - DNA, 15 bp, Homo sapiens
gtcaagcccagggat

SEQ ID NO: 329105 - DNA, 15 bp, Homo sapiens
ggtcaagcccaggga

SEQ ID NO: 329106 - DNA, 15 bp, Homo sapiens
tggtcaagcccaggg

SEQ ID NO: 329107 - DNA, 15 bp, Homo sapiens
ctggtcaagcccagg

SEQ ID NO: 329108 - DNA, 15 bp, Homo sapiens
cctggtcaagcccag

SEQ ID NO: 329109 - DNA, 15 bp, Homo sapiens
tcctggtcaagccca

SEQ ID NO: 329110 - DNA, 15 bp, Homo sapiens
ttcctggtcaagccc

SEQ ID NO: 329111 - DNA, 15 bp, Homo sapiens
cttcctggtcaagcc

SEQ ID NO: 329112 - DNA, 15 bp, Homo sapiens
ccttcctggtcaagc

SEQ ID NO: 329113 - DNA, 15 bp, Homo sapiens
gccttcctggtcaag

SEQ ID NO: 329114 - DNA, 15 bp, Homo sapiens
agccttcctggtcaa

SEQ ID NO: 329115 - DNA, 15 bp, Homo sapiens
tagccttcctggtca

SEQ ID NO: 329116 - DNA, 15 bp, Homo sapiens
atagccttcctggtc

SEQ ID NO: 329117 - DNA, 15 bp, Homo sapiens
catagccttcctggt

SEQ ID NO: 329118 - DNA, 15 bp, Homo sapiens
tcatagccttcctgg

SEQ ID NO: 329119 - DNA, 15 bp, Homo sapiens
gtcatagccttcctg

SEQ ID NO: 329120 - DNA, 15 bp, Homo sapiens
agtcatagccttcct

SEQ ID NO: 329121 - DNA, 15 bp, Homo sapiens
tagtcatagccttcc

SEQ ID NO: 329122 - DNA, 15 bp, Homo sapiens
atagtcatagccttc

SEQ ID NO: 329123 - DNA, 15 bp, Homo sapiens
gatagtcatagcctt

SEQ ID NO: 329124 - DNA, 15 bp, Homo sapiens
agatagtcatagcct

SEQ ID NO: 329125 - DNA, 15 bp, Homo sapiens
gagatagtcatagcc

SEQ ID NO: 329126 - DNA, 15 bp, Homo sapiens
ggagatagtcatagc

SEQ ID NO: 329127 - DNA, 15 bp, Homo sapiens
tggagatagtcatag

SEQ ID NO: 329128 - DNA, 15 bp, Homo sapiens
gtggagatagtcata

SEQ ID NO: 329129 - DNA, 15 bp, Homo sapiens
tgtggagatagtcat

SEQ ID NO: 329130 - DNA, 15 bp, Homo sapiens
gtgtggagatagtca

SEQ ID NO: 329131 - DNA, 15 bp, Homo sapiens
tgtgtggagatagtc

SEQ ID NO: 329132 - DNA, 15 bp, Homo sapiens
ctgtgtggagatagt

SEQ ID NO: 329133 - DNA, 15 bp, Homo sapiens
tctgtgtggagatag

SEQ ID NO: 329134 - DNA, 15 bp, Homo sapiens
ctctgtgtggagata

SEQ ID NO: 329135 - DNA, 15 bp, Homo sapiens
tctctgtgtggagat

SEQ ID NO: 329136 - DNA, 15 bp, Homo sapiens
atctctgtgtggaga

SEQ ID NO: 329137 - DNA, 15 bp, Homo sapiens
tatctctgtgtggag

SEQ ID NO: 329138 - DNA, 15 bp, Homo sapiens
atatctctgtgtgga

SEQ ID NO: 329139 - DNA, 15 bp, Homo sapiens
tatatctctgtgtgg

SEQ ID NO: 329140 - DNA, 15 bp, Homo sapiens
atatatctctgtgtg

SEQ ID NO: 329141 - DNA, 15 bp, Homo sapiens
tatatatctctgtgt

SEQ ID NO: 329142 - DNA, 15 bp, Homo sapiens
ttatatatctctgtg

SEQ ID NO: 329143 - DNA, 15 bp, Homo sapiens
gttatatatctctgt

SEQ ID NO: 329144 - DNA, 15 bp, Homo sapiens
ggttatatatctctg

SEQ ID NO: 329145 - DNA, 15 bp, Homo sapiens
aggttatatatctct

SEQ ID NO: 329146 - DNA, 15 bp, Homo sapiens
aaggttatatatctc

SEQ ID NO: 329147 - DNA, 15 bp, Homo sapiens
aaaggttatatatct

SEQ ID NO: 329148 - DNA, 15 bp, Homo sapiens
caaaggttatatatc

SEQ ID NO: 329149 - DNA, 15 bp, Homo sapiens
gcaaaggttatatat

SEQ ID NO: 329150 - DNA, 15 bp, Homo sapiens
agcaaaggttatata

SEQ ID NO: 329151 - DNA, 15 bp, Homo sapiens
tagcaaaggttatat

SEQ ID NO: 329152 - DNA, 15 bp, Homo sapiens
atagcaaaggttata

SEQ ID NO: 329153 - DNA, 15 bp, Homo sapiens
catagcaaaggttat

SEQ ID NO: 329154 - DNA, 15 bp, Homo sapiens
gcatagcaaaggtta

SEQ ID NO: 329155 - DNA, 15 bp, Homo sapiens
tgcatagcaaaggtt

SEQ ID NO: 329156 - DNA, 15 bp, Homo sapiens
ctgcatagcaaaggt

SEQ ID NO: 329157 - DNA, 15 bp, Homo sapiens
tctgcatagcaaagg

SEQ ID NO: 329158 - DNA, 15 bp, Homo sapiens
ctctgcatagcaaag

SEQ ID NO: 329159 - DNA, 15 bp, Homo sapiens
gctctgcatagcaaa

SEQ ID NO: 329160 - DNA, 15 bp, Homo sapiens
tgctctgcatagcaa

SEQ ID NO: 329161 - DNA, 15 bp, Homo sapiens
gtgctctgcatagca

SEQ ID NO: 329162 - DNA, 15 bp, Homo sapiens
tgtgctctgcatagc

SEQ ID NO: 329163 - DNA, 15 bp, Homo sapiens
gtgtgctctgcatag

SEQ ID NO: 329164 - DNA, 15 bp, Homo sapiens
tgtgtgctctgcata

SEQ ID NO: 329165 - DNA, 15 bp, Homo sapiens
ctgtgtgctctgcat

SEQ ID NO: 329166 - DNA, 15 bp, Homo sapiens
gctgtgtgctctgca

SEQ ID NO: 329167 - DNA, 15 bp, Homo sapiens
ggctgtgtgctctgc

SEQ ID NO: 329168 - DNA, 15 bp, Homo sapiens
gggctgtgtgctctg

SEQ ID NO: 329169 - DNA, 15 bp, Homo sapiens
agggctgtgtgctct

SEQ ID NO: 329170 - DNA, 15 bp, Homo sapiens
cagggctgtgtgctc

SEQ ID NO: 329171 - DNA, 15 bp, Homo sapiens
gcagggctgtgtgct

SEQ ID NO: 329172 - DNA, 15 bp, Homo sapiens
agcagggctgtgtgc

SEQ ID NO: 329173 - DNA, 15 bp, Homo sapiens
gagcagggctgtgtg

SEQ ID NO: 329174 - DNA, 15 bp, Homo sapiens
ggagcagggctgtgt

SEQ ID NO: 329175 - DNA, 15 bp, Homo sapiens
aggagcagggctgtg

SEQ ID NO: 329176 - DNA, 15 bp, Homo sapiens
caggagcagggctgt

SEQ ID NO: 329177 - DNA, 15 bp, Homo sapiens
ccaggagcagggctg

SEQ ID NO: 329178 - DNA, 15 bp, Homo sapiens
gccaggagcagggct

SEQ ID NO: 329179 - DNA, 15 bp, Homo sapiens
cgccaggagcagggc

SEQ ID NO: 329180 - DNA, 15 bp, Homo sapiens
acgccaggagcaggg

SEQ ID NO: 329181 - DNA, 15 bp, Homo sapiens
cacgccaggagcagg

SEQ ID NO: 329182 - DNA, 15 bp, Homo sapiens
gcacgccaggagcag

SEQ ID NO: 329183 - DNA, 15 bp, Homo sapiens
ggcacgccaggagca

SEQ ID NO: 329184 - DNA, 15 bp, Homo sapiens
aggcacgccaggagc

SEQ ID NO: 329185 - DNA, 15 bp, Homo sapiens
gaggcacgccaggag

SEQ ID NO: 329186 - DNA, 15 bp, Homo sapiens
tgaggcacgccagga

SEQ ID NO: 329187 - DNA, 15 bp, Homo sapiens
gtgaggcacgccagg

SEQ ID NO: 329188 - DNA, 15 bp, Homo sapiens
agtgaggcacgccag

SEQ ID NO: 329189 - DNA, 15 bp, Homo sapiens
gagtgaggcacgcca

SEQ ID NO: 329190 - DNA, 15 bp, Homo sapiens
agagtgaggcacgcc

SEQ ID NO: 329191 - DNA, 15 bp, Homo sapiens
aagagtgaggcacgc

SEQ ID NO: 329192 - DNA, 15 bp, Homo sapiens
aaagagtgaggcacg

SEQ ID NO: 329193 - DNA, 15 bp, Homo sapiens
gaaagagtgaggcac

SEQ ID NO: 329194 - DNA, 15 bp, Homo sapiens
agaaagagtgaggca

SEQ ID NO: 329195 - DNA, 15 bp, Homo sapiens
aagaaagagtgaggc

SEQ ID NO: 329196 - DNA, 15 bp, Homo sapiens
gaagaaagagtgagg

SEQ ID NO: 329197 - DNA, 15 bp, Homo sapiens
ggaagaaagagtgag

SEQ ID NO: 329198 - DNA, 15 bp, Homo sapiens
gggaagaaagagtga

SEQ ID NO: 329199 - DNA, 15 bp, Homo sapiens
tgggaagaaagagtg

SEQ ID NO: 329200 - DNA, 15 bp, Homo sapiens
ttgggaagaaagagt

SEQ ID NO: 329201 - DNA, 15 bp, Homo sapiens
cttgggaagaaagag

SEQ ID NO: 329202 - DNA, 15 bp, Homo sapiens
ccttgggaagaaaga

SEQ ID NO: 329203 - DNA, 15 bp, Homo sapiens
tccttgggaagaaag

SEQ ID NO: 329204 - DNA, 15 bp, Homo sapiens
ctccttgggaagaaa

SEQ ID NO: 329205 - DNA, 15 bp, Homo sapiens
gctccttgggaagaa

SEQ ID NO: 329206 - DNA, 15 bp, Homo sapiens
ggctccttgggaaga

SEQ ID NO: 329207 - DNA, 15 bp, Homo sapiens
gggctccttgggaag

SEQ ID NO: 329208 - DNA, 15 bp, Homo sapiens
agggctccttgggaa

SEQ ID NO: 329209 - DNA, 15 bp, Homo sapiens
tagggctccttggga

SEQ ID NO: 329210 - DNA, 15 bp, Homo sapiens
gtagggctccttggg

SEQ ID NO: 329211 - DNA, 15 bp, Homo sapiens
agtagggctccttgg

SEQ ID NO: 329212 - DNA, 15 bp, Homo sapiens
aagtagggctccttg

SEQ ID NO: 329213 - DNA, 15 bp, Homo sapiens
taagtagggctcctt

SEQ ID NO: 329214 - DNA, 15 bp, Homo sapiens
ttaagtagggctcct

SEQ ID NO: 329215 - DNA, 15 bp, Homo sapiens
gttaagtagggctcc

SEQ ID NO: 329216 - DNA, 15 bp, Homo sapiens
ggttaagtagggctc

SEQ ID NO: 329217 - DNA, 15 bp, Homo sapiens
aggttaagtagggct

SEQ ID NO: 329218 - DNA, 15 bp, Homo sapiens
caggttaagtagggc

SEQ ID NO: 329219 - DNA, 15 bp, Homo sapiens
ccaggttaagtaggg

SEQ ID NO: 329220 - DNA, 15 bp, Homo sapiens
gccaggttaagtagg

SEQ ID NO: 329221 - DNA, 15 bp, Homo sapiens
tgccaggttaagtag

SEQ ID NO: 329222 - DNA, 15 bp, Homo sapiens
ttgccaggttaagta

SEQ ID NO: 329223 - DNA, 15 bp, Homo sapiens
cttgccaggttaagt

SEQ ID NO: 329224 - DNA, 15 bp, Homo sapiens
ccttgccaggttaag

SEQ ID NO: 329225 - DNA, 15 bp, Homo sapiens
accttgccaggttaa

SEQ ID NO: 329226 - DNA, 15 bp, Homo sapiens
aaccttgccaggtta

SEQ ID NO: 329227 - DNA, 15 bp, Homo sapiens
gaaccttgccaggtt

SEQ ID NO: 329228 - DNA, 15 bp, Homo sapiens
tgaaccttgccaggt

SEQ ID NO: 329229 - DNA, 15 bp, Homo sapiens
gtgaaccttgccagg

SEQ ID NO: 329230 - DNA, 15 bp, Homo sapiens
tgtgaaccttgccag

SEQ ID NO: 329231 - DNA, 15 bp, Homo sapiens
atgtgaaccttgcca

SEQ ID NO: 329232 - DNA, 15 bp, Homo sapiens
aatgtgaaccttgcc

SEQ ID NO: 329233 - DNA, 15 bp, Homo sapiens
aaatgtgaaccttgc

SEQ ID NO: 329234 - DNA, 15 bp, Homo sapiens
gaaatgtgaaccttg

SEQ ID NO: 329235 - DNA, 15 bp, Homo sapiens
tgaaatgtgaacctt

SEQ ID NO: 329236 - DNA, 15 bp, Homo sapiens
ctgaaatgtgaacct

SEQ ID NO: 329237 - DNA, 15 bp, Homo sapiens
tctgaaatgtgaacc

SEQ ID NO: 329238 - DNA, 15 bp, Homo sapiens
gtctgaaatgtgaac

SEQ ID NO: 329239 - DNA, 15 bp, Homo sapiens
agtctgaaatgtgaa

SEQ ID NO: 329240 - DNA, 15 bp, Homo sapiens
cagtctgaaatgtga

SEQ ID NO: 329241 - DNA, 15 bp, Homo sapiens
acagtctgaaatgtg

SEQ ID NO: 329242 - DNA, 15 bp, Homo sapiens
cacagtctgaaatgt

SEQ ID NO: 329243 - DNA, 15 bp, Homo sapiens
ccacagtctgaaatg

SEQ ID NO: 329244 - DNA, 15 bp, Homo sapiens
tccacagtctgaaat

SEQ ID NO: 329245 - DNA, 15 bp, Homo sapiens
ctccacagtctgaaa

SEQ ID NO: 329246 - DNA, 15 bp, Homo sapiens
tctccacagtctgaa

SEQ ID NO: 329247 - DNA, 15 bp, Homo sapiens
ttctccacagtctga

SEQ ID NO: 329248 - DNA, 15 bp, Homo sapiens
attctccacagtctg

SEQ ID NO: 329249 - DNA, 15 bp, Homo sapiens
cattctccacagtct

SEQ ID NO: 329250 - DNA, 15 bp, Homo sapiens
gcattctccacagtc

SEQ ID NO: 329251 - DNA, 15 bp, Homo sapiens
ggcattctccacagt

SEQ ID NO: 329252 - DNA, 15 bp, Homo sapiens
gggcattctccacag

SEQ ID NO: 329253 - DNA, 15 bp, Homo sapiens
tgggcattctccaca

SEQ ID NO: 329254 - DNA, 15 bp, Homo sapiens
gtgggcattctccac

SEQ ID NO: 329255 - DNA, 15 bp, Homo sapiens
ggtgggcattctcca

SEQ ID NO: 329256 - DNA, 15 bp, Homo sapiens
tggtgggcattctcc

SEQ ID NO: 329257 - DNA, 15 bp, Homo sapiens
ctggtgggcattctc

SEQ ID NO: 329258 - DNA, 15 bp, Homo sapiens
cctggtgggcattct

SEQ ID NO: 329259 - DNA, 15 bp, Homo sapiens
ccctggtgggcattc

SEQ ID NO: 329260 - DNA, 15 bp, Homo sapiens
cccctggtgggcatt

SEQ ID NO: 329261 - DNA, 15 bp, Homo sapiens
acccctggtgggcat

SEQ ID NO: 329262 - DNA, 15 bp, Homo sapiens
aacccctggtgggca

SEQ ID NO: 329263 - DNA, 15 bp, Homo sapiens
taacccctggtgggc

SEQ ID NO: 329264 - DNA, 15 bp, Homo sapiens
ttaacccctggtggg

SEQ ID NO: 329265 - DNA, 15 bp, Homo sapiens
gttaacccctggtgg

SEQ ID NO: 329266 - DNA, 15 bp, Homo sapiens
ggttaacccctggtg

SEQ ID NO: 329267 - DNA, 15 bp, Homo sapiens
aggttaacccctggt

SEQ ID NO: 329268 - DNA, 15 bp, Homo sapiens
aaggttaacccctgg

SEQ ID NO: 329269 - DNA, 15 bp, Homo sapiens
caaggttaacccctg

SEQ ID NO: 329270 - DNA, 15 bp, Homo sapiens
gcaaggttaacccct

SEQ ID NO: 329271 - DNA, 15 bp, Homo sapiens
tgcaaggttaacccc

SEQ ID NO: 329272 - DNA, 15 bp, Homo sapiens
atgcaaggttaaccc

SEQ ID NO: 329273 - DNA, 15 bp, Homo sapiens
gatgcaaggttaacc

SEQ ID NO: 329274 - DNA, 15 bp, Homo sapiens
agatgcaaggttaac

SEQ ID NO: 329275 - DNA, 15 bp, Homo sapiens
aagatgcaaggttaa

SEQ ID NO: 329276 - DNA, 15 bp, Homo sapiens
aaagatgcaaggtta

SEQ ID NO: 329277 - DNA, 15 bp, Homo sapiens
aaaagatgcaaggtt

SEQ ID NO: 329278 - DNA, 15 bp, Homo sapiens
caaaagatgcaaggt

SEQ ID NO: 329279 - DNA, 15 bp, Homo sapiens
gcaaaagatgcaagg

SEQ ID NO: 329280 - DNA, 15 bp, Homo sapiens
agcaaaagatgcaag

SEQ ID NO: 329281 - DNA, 15 bp, Homo sapiens
aagcaaaagatgcaa

SEQ ID NO: 329282 - DNA, 15 bp, Homo sapiens
caagcaaaagatgca

SEQ ID NO: 329283 - DNA, 15 bp, Homo sapiens
acaagcaaaagatgc

SEQ ID NO: 329284 - DNA, 15 bp, Homo sapiens
tacaagcaaaagatg

SEQ ID NO: 329285 - DNA, 15 bp, Homo sapiens
ctacaagcaaaagat

SEQ ID NO: 329286 - DNA, 15 bp, Homo sapiens
gctacaagcaaaaga

SEQ ID NO: 329287 - DNA, 15 bp, Homo sapiens
agctacaagcaaaag

SEQ ID NO: 329288 - DNA, 15 bp, Homo sapiens
aagctacaagcaaaa

SEQ ID NO: 329289 - DNA, 15 bp, Homo sapiens
aaagctacaagcaaa

SEQ ID NO: 329290 - DNA, 15 bp, Homo sapiens
gaaagctacaagcaa

SEQ ID NO: 329291 - DNA, 15 bp, Homo sapiens
tgaaagctacaagca

SEQ ID NO: 329292 - DNA, 15 bp, Homo sapiens
ctgaaagctacaagc

SEQ ID NO: 329293 - DNA, 15 bp, Homo sapiens
tctgaaagctacaag

SEQ ID NO: 329294 - DNA, 15 bp, Homo sapiens
atctgaaagctacaa

SEQ ID NO: 329295 - DNA, 15 bp, Homo sapiens
catctgaaagctaca

SEQ ID NO: 329296 - DNA, 15 bp, Homo sapiens
acatctgaaagctac

SEQ ID NO: 329297 - DNA, 15 bp, Homo sapiens
cacatctgaaagcta

SEQ ID NO: 329298 - DNA, 15 bp, Homo sapiens
acacatctgaaagct

SEQ ID NO: 329299 - DNA, 15 bp, Homo sapiens
cacacatctgaaagc

SEQ ID NO: 329300 - DNA, 15 bp, Homo sapiens
ccacacatctgaaag

SEQ ID NO: 329301 - DNA, 15 bp, Homo sapiens
accacacatctgaaa

SEQ ID NO: 329302 - DNA, 15 bp, Homo sapiens
gaccacacatctgaa

SEQ ID NO: 329303 - DNA, 15 bp, Homo sapiens
tgaccacacatctga

SEQ ID NO: 329304 - DNA, 15 bp, Homo sapiens
atgaccacacatctg

SEQ ID NO: 329305 - DNA, 15 bp, Homo sapiens
tatgaccacacatct

SEQ ID NO: 329306 - DNA, 15 bp, Homo sapiens
gtatgaccacacatc

SEQ ID NO: 329307 - DNA, 15 bp, Homo sapiens
tgtatgaccacacat

SEQ ID NO: 329308 - DNA, 15 bp, Homo sapiens
ctgtatgaccacaca

SEQ ID NO: 329309 - DNA, 15 bp, Homo sapiens
actgtatgaccacac

SEQ ID NO: 329310 - DNA, 15 bp, Homo sapiens
aactgtatgaccaca

SEQ ID NO: 329311 - DNA, 15 bp, Homo sapiens
aaactgtatgaccac

SEQ ID NO: 329312 - DNA, 15 bp, Homo sapiens
gaaactgtatgacca

SEQ ID NO: 329313 - DNA, 15 bp, Homo sapiens
tgaaactgtatgacc

SEQ ID NO: 329314 - DNA, 15 bp, Homo sapiens
atgaaactgtatgac

SEQ ID NO: 329315 - DNA, 15 bp, Homo sapiens
aatgaaactgtatga

SEQ ID NO: 329316 - DNA, 15 bp, Homo sapiens
aaatgaaactgtatg

SEQ ID NO: 329317 - DNA, 15 bp, Homo sapiens
taaatgaaactgtat

SEQ ID NO: 329318 - DNA, 15 bp, Homo sapiens
ctaaatgaaactgta

SEQ ID NO: 329319 - DNA, 15 bp, Homo sapiens
tctaaatgaaactgt

SEQ ID NO: 329320 - DNA, 15 bp, Homo sapiens
ttctaaatgaaactg

SEQ ID NO: 329321 - DNA, 15 bp, Homo sapiens
tttctaaatgaaact

SEQ ID NO: 329322 - DNA, 15 bp, Homo sapiens
ctttctaaatgaaac

SEQ ID NO: 329323 - DNA, 15 bp, Homo sapiens
gctttctaaatgaaa

SEQ ID NO: 329324 - DNA, 15 bp, Homo sapiens
tgctttctaaatgaa

SEQ ID NO: 329325 - DNA, 15 bp, Homo sapiens
ttgctttctaaatga

SEQ ID NO: 329326 - DNA, 15 bp, Homo sapiens
tttgctttctaaatg

SEQ ID NO: 329327 - DNA, 15 bp, Homo sapiens
atttgctttctaaat

SEQ ID NO: 329328 - DNA, 15 bp, Homo sapiens
aatttgctttctaaa

SEQ ID NO: 329329 - DNA, 15 bp, Homo sapiens
gaatttgctttctaa

SEQ ID NO: 329330 - DNA, 15 bp, Homo sapiens
ggaatttgctttcta

SEQ ID NO: 329331 - DNA, 15 bp, Homo sapiens
aggaatttgctttct

SEQ ID NO: 329332 - DNA, 15 bp, Homo sapiens
taggaatttgctttc

SEQ ID NO: 329333 - DNA, 15 bp, Homo sapiens
ttaggaatttgcttt

SEQ ID NO: 329334 - DNA, 15 bp, Homo sapiens
tttaggaatttgctt

SEQ ID NO: 329335 - DNA, 15 bp, Homo sapiens
gtttaggaatttgct

SEQ ID NO: 329336 - DNA, 15 bp, Homo sapiens
ggtttaggaatttgc

SEQ ID NO: 329337 - DNA, 15 bp, Homo sapiens
aggtttaggaatttg

SEQ ID NO: 329338 - DNA, 15 bp, Homo sapiens
taggtttaggaattt

SEQ ID NO: 329339 - DNA, 15 bp, Homo sapiens
ctaggtttaggaatt

SEQ ID NO: 329340 - DNA, 15 bp, Homo sapiens
cctaggtttaggaat

SEQ ID NO: 329341 - DNA, 15 bp, Homo sapiens
ccctaggtttaggaa

SEQ ID NO: 329342 - DNA, 15 bp, Homo sapiens
tccctaggtttagga

SEQ ID NO: 329343 - DNA, 15 bp, Homo sapiens
atccctaggtttagg

SEQ ID NO: 329344 - DNA, 15 bp, Homo sapiens
gatccctaggtttag

SEQ ID NO: 329345 - DNA, 15 bp, Homo sapiens
agatccctaggttta

SEQ ID NO: 329346 - DNA, 15 bp, Homo sapiens
cagatccctaggttt

SEQ ID NO: 329347 - DNA, 15 bp, Homo sapiens
acagatccctaggtt

SEQ ID NO: 329348 - DNA, 15 bp, Homo sapiens
cacagatccctaggt

SEQ ID NO: 329349 - DNA, 15 bp, Homo sapiens
tcacagatccctagg

SEQ ID NO: 329350 - DNA, 15 bp, Homo sapiens
atcacagatccctag

SEQ ID NO: 329351 - DNA, 15 bp, Homo sapiens
tatcacagatcccta

SEQ ID NO: 329352 - DNA, 15 bp, Homo sapiens
ttatcacagatccct

SEQ ID NO: 329353 - DNA, 15 bp, Homo sapiens
attatcacagatccc

SEQ ID NO: 329354 - DNA, 15 bp, Homo sapiens
tattatcacagatcc

SEQ ID NO: 329355 - DNA, 15 bp, Homo sapiens
gtattatcacagatc

SEQ ID NO: 329356 - DNA, 15 bp, Homo sapiens
agtattatcacagat

SEQ ID NO: 329357 - DNA, 15 bp, Homo sapiens
cagtattatcacaga

SEQ ID NO: 329358 - DNA, 15 bp, Homo sapiens
tcagtattatcacag

SEQ ID NO: 329359 - DNA, 15 bp, Homo sapiens
atcagtattatcaca

SEQ ID NO: 329360 - DNA, 15 bp, Homo sapiens
catcagtattatcac

SEQ ID NO: 329361 - DNA, 15 bp, Homo sapiens
acatcagtattatca

SEQ ID NO: 329362 - DNA, 15 bp, Homo sapiens
gacatcagtattatc

SEQ ID NO: 329363 - DNA, 15 bp, Homo sapiens
tgacatcagtattat

SEQ ID NO: 329364 - DNA, 15 bp, Homo sapiens
atgacatcagtatta

SEQ ID NO: 329365 - DNA, 15 bp, Homo sapiens
tatgacatcagtatt

SEQ ID NO: 329366 - DNA, 15 bp, Homo sapiens
ttatgacatcagtat

SEQ ID NO: 329367 - DNA, 15 bp, Homo sapiens
tttatgacatcagta

SEQ ID NO: 329368 - DNA, 15 bp, Homo sapiens
ttttatgacatcagt

SEQ ID NO: 329369 - DNA, 15 bp, Homo sapiens
tttttatgacatcag

SEQ ID NO: 329370 - DNA, 15 bp, Homo sapiens
atttttatgacatca

SEQ ID NO: 329371 - DNA, 15 bp, Homo sapiens
tatttttatgacatc

SEQ ID NO: 329372 - DNA, 15 bp, Homo sapiens
ttatttttatgacat

SEQ ID NO: 329373 - DNA, 15 bp, Homo sapiens
attatttttatgaca

SEQ ID NO: 329374 - DNA, 15 bp, Homo sapiens
gattatttttatgac

SEQ ID NO: 329375 - DNA, 15 bp, Homo sapiens
tgattatttttatga

SEQ ID NO: 329376 - DNA, 15 bp, Homo sapiens
ctgattatttttatg

SEQ ID NO: 329377 - DNA, 15 bp, Homo sapiens
tctgattatttttat

SEQ ID NO: 329378 - DNA, 15 bp, Homo sapiens
atctgattattttta

SEQ ID NO: 329379 - DNA, 15 bp, Homo sapiens
aatctgattattttt

SEQ ID NO: 329380 - DNA, 15 bp, Homo sapiens
aaatctgattatttt

SEQ ID NO: 329381 - DNA, 15 bp, Homo sapiens
gaaatctgattattt

SEQ ID NO: 329382 - DNA, 15 bp, Homo sapiens
tgaaatctgattatt

SEQ ID NO: 329383 - DNA, 15 bp, Homo sapiens
ctgaaatctgattat

SEQ ID NO: 329384 - DNA, 15 bp, Homo sapiens
tctgaaatctgatta

SEQ ID NO: 329385 - DNA, 15 bp, Homo sapiens
ctctgaaatctgatt

SEQ ID NO: 329386 - DNA, 15 bp, Homo sapiens
gctctgaaatctgat

SEQ ID NO: 329387 - DNA, 15 bp, Homo sapiens
agctctgaaatctga

SEQ ID NO: 329388 - DNA, 15 bp, Homo sapiens
tagctctgaaatctg

SEQ ID NO: 329389 - DNA, 15 bp, Homo sapiens
ttagctctgaaatct

SEQ ID NO: 329390 - DNA, 15 bp, Homo sapiens
tttagctctgaaatc

SEQ ID NO: 329391 - DNA, 15 bp, Homo sapiens
gtttagctctgaaat

SEQ ID NO: 329392 - DNA, 15 bp, Homo sapiens
tgtttagctctgaaa

SEQ ID NO: 329393 - DNA, 15 bp, Homo sapiens
atgtttagctctgaa

SEQ ID NO: 329394 - DNA, 15 bp, Homo sapiens
catgtttagctctga

SEQ ID NO: 329395 - DNA, 15 bp, Homo sapiens
ccatgtttagctctg

SEQ ID NO: 329396 - DNA, 15 bp, Homo sapiens
tccatgtttagctct

SEQ ID NO: 329397 - DNA, 15 bp, Homo sapiens
gtccatgtttagctc

SEQ ID NO: 329398 - DNA, 15 bp, Homo sapiens
agtccatgtttagct

SEQ ID NO: 329399 - DNA, 15 bp, Homo sapiens
cagtccatgtttagc

SEQ ID NO: 329400 - DNA, 15 bp, Homo sapiens
acagtccatgtttag

SEQ ID NO: 329401 - DNA, 15 bp, Homo sapiens
aacagtccatgttta

SEQ ID NO: 329402 - DNA, 15 bp, Homo sapiens
aaacagtccatgttt

SEQ ID NO: 329403 - DNA, 15 bp, Homo sapiens
aaaacagtccatgtt

SEQ ID NO: 329404 - DNA, 15 bp, Homo sapiens
taaaacagtccatgt

SEQ ID NO: 329405 - DNA, 15 bp, Homo sapiens
ctaaaacagtccatg

SEQ ID NO: 329406 - DNA, 15 bp, Homo sapiens
gctaaaacagtccat

SEQ ID NO: 329407 - DNA, 15 bp, Homo sapiens
tgctaaaacagtcca

SEQ ID NO: 329408 - DNA, 15 bp, Homo sapiens
ttgctaaaacagtcc

SEQ ID NO: 329409 - DNA, 15 bp, Homo sapiens
gttgctaaaacagtc

SEQ ID NO: 329410 - DNA, 15 bp, Homo sapiens
tgttgctaaaacagt

SEQ ID NO: 329411 - DNA, 15 bp, Homo sapiens
ttgttgctaaaacag

SEQ ID NO: 329412 - DNA, 15 bp, Homo sapiens
attgttgctaaaaca

SEQ ID NO: 329413 - DNA, 15 bp, Homo sapiens
cattgttgctaaaac

SEQ ID NO: 329414 - DNA, 15 bp, Homo sapiens
tcattgttgctaaaa

SEQ ID NO: 329415 - DNA, 15 bp, Homo sapiens
atcattgttgctaaa

SEQ ID NO: 329416 - DNA, 15 bp, Homo sapiens
aatcattgttgctaa

SEQ ID NO: 329417 - DNA, 15 bp, Homo sapiens
taatcattgttgcta

SEQ ID NO: 329418 - DNA, 15 bp, Homo sapiens
ttaatcattgttgct

SEQ ID NO: 329419 - DNA, 15 bp, Homo sapiens
tttaatcattgttgc

SEQ ID NO: 329420 - DNA, 15 bp, Homo sapiens
atttaatcattgttg

SEQ ID NO: 329421 - DNA, 15 bp, Homo sapiens
catttaatcattgtt

SEQ ID NO: 329422 - DNA, 15 bp, Homo sapiens
acatttaatcattgt

SEQ ID NO: 329423 - DNA, 15 bp, Homo sapiens
aacatttaatcattg

SEQ ID NO: 329424 - DNA, 15 bp, Homo sapiens
gaacatttaatcatt

SEQ ID NO: 329425 - DNA, 15 bp, Homo sapiens
agaacatttaatcat

SEQ ID NO: 329426 - DNA, 15 bp, Homo sapiens
cagaacatttaatca

SEQ ID NO: 329427 - DNA, 15 bp, Homo sapiens
gcagaacatttaatc

SEQ ID NO: 329428 - DNA, 15 bp, Homo sapiens
tgcagaacatttaat

SEQ ID NO: 329429 - DNA, 15 bp, Homo sapiens
atgcagaacatttaa

SEQ ID NO: 329430 - DNA, 15 bp, Homo sapiens
tatgcagaacattta

SEQ ID NO: 329431 - DNA, 15 bp, Homo sapiens
atatgcagaacattt

SEQ ID NO: 329432 - DNA, 15 bp, Homo sapiens
catatgcagaacatt

SEQ ID NO: 329433 - DNA, 15 bp, Homo sapiens
ccatatgcagaacat

SEQ ID NO: 329434 - DNA, 15 bp, Homo sapiens
gccatatgcagaaca

SEQ ID NO: 329435 - DNA, 15 bp, Homo sapiens
tgccatatgcagaac

SEQ ID NO: 329436 - DNA, 15 bp, Homo sapiens
ttgccatatgcagaa

SEQ ID NO: 329437 - DNA, 15 bp, Homo sapiens
cttgccatatgcaga

SEQ ID NO: 329438 - DNA, 15 bp, Homo sapiens
tcttgccatatgcag

SEQ ID NO: 329439 - DNA, 15 bp, Homo sapiens
gctcttgccatatgc

SEQ ID NO: 329440 - DNA, 15 bp, Homo sapiens
agctcttgccatatg

SEQ ID NO: 329441 - DNA, 15 bp, Homo sapiens
gagctcttgccatat

SEQ ID NO: 329442 - DNA, 15 bp, Homo sapiens
ggagctcttgccata

SEQ ID NO: 329443 - DNA, 15 bp, Homo sapiens
gggagctcttgccat

SEQ ID NO: 329444 - DNA, 15 bp, Homo sapiens
agggagctcttgcca

SEQ ID NO: 329445 - DNA, 15 bp, Homo sapiens
tagggagctcttgcc

SEQ ID NO: 329446 - DNA, 15 bp, Homo sapiens
ttagggagctcttgc

SEQ ID NO: 329447 - DNA, 15 bp, Homo sapiens
gttagggagctcttg

SEQ ID NO: 329448 - DNA, 15 bp, Homo sapiens
cgttagggagctctt

SEQ ID NO: 329449 - DNA, 15 bp, Homo sapiens
gcgttagggagctct

SEQ ID NO: 329450 - DNA, 15 bp, Homo sapiens
tgcgttagggagctc

SEQ ID NO: 329451 - DNA, 15 bp, Homo sapiens
gtgcgttagggagct

SEQ ID NO: 329452 - DNA, 15 bp, Homo sapiens
agtgcgttagggagc

SEQ ID NO: 329453 - DNA, 15 bp, Homo sapiens
tagtgcgttagggag

SEQ ID NO: 329454 - DNA, 15 bp, Homo sapiens
gtagtgcgttaggga

SEQ ID NO: 329455 - DNA, 15 bp, Homo sapiens
agtagtgcgttaggg

SEQ ID NO: 329456 - DNA, 15 bp, Homo sapiens
tagtagtgcgttagg

SEQ ID NO: 329457 - DNA, 15 bp, Homo sapiens
ttagtagtgcgttag

SEQ ID NO: 329458 - DNA, 15 bp, Homo sapiens
attagtagtgcgtta

SEQ ID NO: 329459 - DNA, 15 bp, Homo sapiens
tattagtagtgcgtt

SEQ ID NO: 329460 - DNA, 15 bp, Homo sapiens
atattagtagtgcgt

SEQ ID NO: 329461 - DNA, 15 bp, Homo sapiens
gatattagtagtgcg

SEQ ID NO: 329462 - DNA, 15 bp, Homo sapiens
tgatattagtagtgc

SEQ ID NO: 329463 - DNA, 15 bp, Homo sapiens
gtgatattagtagtg

SEQ ID NO: 329464 - DNA, 15 bp, Homo sapiens
agtgatattagtagt

SEQ ID NO: 329465 - DNA, 15 bp, Homo sapiens
cagtgatattagtag

SEQ ID NO: 329466 - DNA, 15 bp, Homo sapiens
acagtgatattagta

SEQ ID NO: 329467 - DNA, 15 bp, Homo sapiens
tacagtgatattagt

SEQ ID NO: 329468 - DNA, 15 bp, Homo sapiens
ttacagtgatattag

SEQ ID NO: 329469 - DNA, 15 bp, Homo sapiens
gttacagtgatatta

SEQ ID NO: 329470 - DNA, 15 bp, Homo sapiens
ggttacagtgatatt

SEQ ID NO: 329471 - DNA, 15 bp, Homo sapiens
tggttacagtgatat

SEQ ID NO: 329472 - DNA, 15 bp, Homo sapiens
atggttacagtgata

SEQ ID NO: 329473 - DNA, 15 bp, Homo sapiens
gatggttacagtgat

SEQ ID NO: 329474 - DNA, 15 bp, Homo sapiens
tgatggttacagtga

SEQ ID NO: 329475 - DNA, 15 bp, Homo sapiens
atgatggttacagtg

SEQ ID NO: 329476 - DNA, 15 bp, Homo sapiens
aatgatggttacagt

SEQ ID NO: 329477 - DNA, 15 bp, Homo sapiens
aaatgatggttacag

SEQ ID NO: 329478 - DNA, 15 bp, Homo sapiens
taaatgatggttaca

SEQ ID NO: 329479 - DNA, 15 bp, Homo sapiens
ctaaatgatggttac

SEQ ID NO: 329480 - DNA, 15 bp, Homo sapiens
tctaaatgatggtta

SEQ ID NO: 329481 - DNA, 15 bp, Homo sapiens
ctctaaatgatggtt

SEQ ID NO: 329482 - DNA, 15 bp, Homo sapiens
actctaaatgatggt

SEQ ID NO: 329483 - DNA, 15 bp, Homo sapiens
aactctaaatgatgg

SEQ ID NO: 329484 - DNA, 15 bp, Homo sapiens
aaactctaaatgatg

SEQ ID NO: 329485 - DNA, 15 bp, Homo sapiens
taaactctaaatgat

SEQ ID NO: 329486 - DNA, 15 bp, Homo sapiens
ctaaactctaaatga

SEQ ID NO: 329487 - DNA, 15 bp, Homo sapiens
actaaactctaaatg

SEQ ID NO: 329488 - DNA, 15 bp, Homo sapiens
tactaaactctaaat

SEQ ID NO: 329489 - DNA, 15 bp, Homo sapiens
ttactaaactctaaa

SEQ ID NO: 329490 - DNA, 15 bp, Homo sapiens
attactaaactctaa

SEQ ID NO: 329491 - DNA, 15 bp, Homo sapiens
gattactaaactcta

SEQ ID NO: 329492 - DNA, 15 bp, Homo sapiens
tgattactaaactct

SEQ ID NO: 329493 - DNA, 15 bp, Homo sapiens
gtgattactaaactc

SEQ ID NO: 329494 - DNA, 15 bp, Homo sapiens
ggtgattactaaact

SEQ ID NO: 329495 - DNA, 15 bp, Homo sapiens
tggtgattactaaac

SEQ ID NO: 329496 - DNA, 15 bp, Homo sapiens
atggtgattactaaa

SEQ ID NO: 329497 - DNA, 15 bp, Homo sapiens
tatggtgattactaa

SEQ ID NO: 329498 - DNA, 15 bp, Homo sapiens
atatggtgattacta

SEQ ID NO: 329499 - DNA, 15 bp, Homo sapiens
aatatggtgattact

SEQ ID NO: 329500 - DNA, 15 bp, Homo sapiens
aaatatggtgattac

SEQ ID NO: 329501 - DNA, 15 bp, Homo sapiens
taaatatggtgatta

SEQ ID NO: 329502 - DNA, 15 bp, Homo sapiens
ctaaatatggtgatt

SEQ ID NO: 329503 - DNA, 15 bp, Homo sapiens
cctaaatatggtgat

SEQ ID NO: 329504 - DNA, 15 bp, Homo sapiens
acctaaatatggtga

SEQ ID NO: 329505 - DNA, 15 bp, Homo sapiens
gacctaaatatggtg

SEQ ID NO: 329506 - DNA, 15 bp, Homo sapiens
tgacctaaatatggt

SEQ ID NO: 329507 - DNA, 15 bp, Homo sapiens
atgacctaaatatgg

SEQ ID NO: 329508 - DNA, 15 bp, Homo sapiens
aatgacctaaatatg

SEQ ID NO: 329509 - DNA, 15 bp, Homo sapiens
aaatgacctaaatat

SEQ ID NO: 329510 - DNA, 15 bp, Homo sapiens
aaaatgacctaaata

SEQ ID NO: 329511 - DNA, 15 bp, Homo sapiens
aaaaatgacctaaat

SEQ ID NO: 329512 - DNA, 15 bp, Homo sapiens
gaaaaatgacctaaa

SEQ ID NO: 329513 - DNA, 15 bp, Homo sapiens
ggaaaaatgacctaa

SEQ ID NO: 329514 - DNA, 15 bp, Homo sapiens
tggaaaaatgaccta

SEQ ID NO: 329515 - DNA, 15 bp, Homo sapiens
ttggaaaaatgacct

SEQ ID NO: 329516 - DNA, 15 bp, Homo sapiens
tttggaaaaatgacc

SEQ ID NO: 329517 - DNA, 15 bp, Homo sapiens
ctttggaaaaatgac

SEQ ID NO: 329518 - DNA, 15 bp, Homo sapiens
gctttggaaaaatga

SEQ ID NO: 329519 - DNA, 15 bp, Homo sapiens
tgctttggaaaaatg

SEQ ID NO: 329520 - DNA, 15 bp, Homo sapiens
gtgctttggaaaaat

SEQ ID NO: 329521 - DNA, 15 bp, Homo sapiens
ggtgctttggaaaaa

SEQ ID NO: 329522 - DNA, 15 bp, Homo sapiens
tggtgctttggaaaa

SEQ ID NO: 329523 - DNA, 15 bp, Homo sapiens
ttggtgctttggaaa

SEQ ID NO: 329524 - DNA, 15 bp, Homo sapiens
cttggtgctttggaa

SEQ ID NO: 329525 - DNA, 15 bp, Homo sapiens
ccttggtgctttgga

SEQ ID NO: 329526 - DNA, 15 bp, Homo sapiens
tccttggtgctttgg

SEQ ID NO: 329527 - DNA, 15 bp, Homo sapiens
ctccttggtgctttg

SEQ ID NO: 329528 - DNA, 15 bp, Homo sapiens
tctccttggtgcttt

SEQ ID NO: 329529 - DNA, 15 bp, Homo sapiens
gtctccttggtgctt

SEQ ID NO: 329530 - DNA, 15 bp, Homo sapiens
agtctccttggtgct

SEQ ID NO: 329531 - DNA, 15 bp, Homo sapiens
gagtctccttggtgc

SEQ ID NO: 329532 - DNA, 15 bp, Homo sapiens
tgagtctccttggtg

SEQ ID NO: 329533 - DNA, 15 bp, Homo sapiens
ctgagtctccttggt

SEQ ID NO: 329534 - DNA, 15 bp, Homo sapiens
tctgagtctccttgg

SEQ ID NO: 329535 - DNA, 15 bp, Homo sapiens
gtctgagtctccttg

SEQ ID NO: 329536 - DNA, 15 bp, Homo sapiens
agtctgagtctcctt

SEQ ID NO: 329537 - DNA, 15 bp, Homo sapiens
gagtctgagtctcct

SEQ ID NO: 329538 - DNA, 15 bp, Homo sapiens
agagtctgagtctcc

SEQ ID NO: 329539 - DNA, 15 bp, Homo sapiens
tagagtctgagtctc

SEQ ID NO: 329540 - DNA, 15 bp, Homo sapiens
ttagagtctgagtct

SEQ ID NO: 329541 - DNA, 15 bp, Homo sapiens
tttagagtctgagtc

SEQ ID NO: 329542 - DNA, 15 bp, Homo sapiens
atttagagtctgagt

SEQ ID NO: 329543 - DNA, 15 bp, Homo sapiens
tatttagagtctgag

SEQ ID NO: 329544 - DNA, 15 bp, Homo sapiens
ctatttagagtctga

SEQ ID NO: 329545 - DNA, 15 bp, Homo sapiens
cctatttagagtctg

SEQ ID NO: 329546 - DNA, 15 bp, Homo sapiens
acctatttagagtct

SEQ ID NO: 329547 - DNA, 15 bp, Homo sapiens
aacctatttagagtc

SEQ ID NO: 329548 - DNA, 15 bp, Homo sapiens
aaacctatttagagt

SEQ ID NO: 329549 - DNA, 15 bp, Homo sapiens
taaacctatttagag

SEQ ID NO: 329550 - DNA, 15 bp, Homo sapiens
ttaaacctatttaga

SEQ ID NO: 329551 - DNA, 15 bp, Homo sapiens
attaaacctatttag

SEQ ID NO: 329552 - DNA, 15 bp, Homo sapiens
tattaaacctattta

SEQ ID NO: 329553 - DNA, 15 bp, Homo sapiens
atattaaacctattt

SEQ ID NO: 329554 - DNA, 15 bp, Homo sapiens
gatattaaacctatt

SEQ ID NO: 329555 - DNA, 15 bp, Homo sapiens
agatattaaacctat

SEQ ID NO: 329556 - DNA, 15 bp, Homo sapiens
gagatattaaaccta

SEQ ID NO: 329557 - DNA, 15 bp, Homo sapiens
tgagatattaaacct

SEQ ID NO: 329558 - DNA, 15 bp, Homo sapiens
ttgagatattaaacc

SEQ ID NO: 329559 - DNA, 15 bp, Homo sapiens
cttgagatattaaac

SEQ ID NO: 329560 - DNA, 15 bp, Homo sapiens
tcttgagatattaaa

SEQ ID NO: 329561 - DNA, 15 bp, Homo sapiens
ctcttgagatattaa

SEQ ID NO: 329562 - DNA, 15 bp, Homo sapiens
cctcttgagatatta

SEQ ID NO: 329563 - DNA, 15 bp, Homo sapiens
tcctcttgagatatt

SEQ ID NO: 329564 - DNA, 15 bp, Homo sapiens
gtcctcttgagatat

SEQ ID NO: 329565 - DNA, 15 bp, Homo sapiens
agtcctcttgagata

SEQ ID NO: 329566 - DNA, 15 bp, Homo sapiens
gagtcctcttgagat

SEQ ID NO: 329567 - DNA, 15 bp, Homo sapiens
agagtcctcttgaga

SEQ ID NO: 329568 - DNA, 15 bp, Homo sapiens
tagagtcctcttgag

SEQ ID NO: 329569 - DNA, 15 bp, Homo sapiens
gtagagtcctcttga

SEQ ID NO: 329570 - DNA, 15 bp, Homo sapiens
tgtagagtcctcttg

SEQ ID NO: 329571 - DNA, 15 bp, Homo sapiens
atgtagagtcctctt

SEQ ID NO: 329572 - DNA, 15 bp, Homo sapiens
catgtagagtcctct

SEQ ID NO: 329573 - DNA, 15 bp, Homo sapiens
ccatgtagagtcctc

SEQ ID NO: 329574 - DNA, 15 bp, Homo sapiens
accatgtagagtcct

SEQ ID NO: 329575 - DNA, 15 bp, Homo sapiens
aaccatgtagagtcc

SEQ ID NO: 329576 - DNA, 15 bp, Homo sapiens
caaccatgtagagtc

SEQ ID NO: 329577 - DNA, 15 bp, Homo sapiens
acaaccatgtagagt

SEQ ID NO: 329578 - DNA, 15 bp, Homo sapiens
aacaaccatgtagag

SEQ ID NO: 329579 - DNA, 15 bp, Homo sapiens
caacaaccatgtaga

SEQ ID NO: 329580 - DNA, 15 bp, Homo sapiens
ccaacaaccatgtag

SEQ ID NO: 329581 - DNA, 15 bp, Homo sapiens
accaacaaccatgta

SEQ ID NO: 329582 - DNA, 15 bp, Homo sapiens
caccaacaaccatgt

SEQ ID NO: 329583 - DNA, 15 bp, Homo sapiens
ccaccaacaaccatg

SEQ ID NO: 329584 - DNA, 15 bp, Homo sapiens
cccaccaacaaccat

SEQ ID NO: 329585 - DNA, 15 bp, Homo sapiens
tcccaccaacaacca

SEQ ID NO: 329586 - DNA, 15 bp, Homo sapiens
gtcccaccaacaacc

SEQ ID NO: 329587 - DNA, 15 bp, Homo sapiens
tgtcccaccaacaac

SEQ ID NO: 329588 - DNA, 15 bp, Homo sapiens
gtgtcccaccaacaa

SEQ ID NO: 329589 - DNA, 15 bp, Homo sapiens
agtgtcccaccaaca

SEQ ID NO: 329590 - DNA, 15 bp, Homo sapiens
cagtgtcccaccaac

SEQ ID NO: 329591 - DNA, 15 bp, Homo sapiens
gcagtgtcccaccaa

SEQ ID NO: 329592 - DNA, 15 bp, Homo sapiens
agcagtgtcccacca

SEQ ID NO: 329593 - DNA, 15 bp, Homo sapiens
cagcagtgtcccacc

SEQ ID NO: 329594 - DNA, 15 bp, Homo sapiens
acagcagtgtcccac

SEQ ID NO: 329595 - DNA, 15 bp, Homo sapiens
cacagcagtgtccca

SEQ ID NO: 329596 - DNA, 15 bp, Homo sapiens
acacagcagtgtccc

SEQ ID NO: 329597 - DNA, 15 bp, Homo sapiens
aacacagcagtgtcc

SEQ ID NO: 329598 - DNA, 15 bp, Homo sapiens
gaacacagcagtgtc

SEQ ID NO: 329599 - DNA, 15 bp, Homo sapiens
tgaacacagcagtgt

SEQ ID NO: 329600 - DNA, 15 bp, Homo sapiens
ctgaacacagcagtg

SEQ ID NO: 329601 - DNA, 15 bp, Homo sapiens
cctgaacacagcagt

SEQ ID NO: 329602 - DNA, 15 bp, Homo sapiens
acctgaacacagcag

SEQ ID NO: 329603 - DNA, 15 bp, Homo sapiens
gacctgaacacagca

SEQ ID NO: 329604 - DNA, 15 bp, Homo sapiens
ggacctgaacacagc

SEQ ID NO: 329605 - DNA, 15 bp, Homo sapiens
gggacctgaacacag

SEQ ID NO: 329606 - DNA, 15 bp, Homo sapiens
tgggacctgaacaca

SEQ ID NO: 329607 - DNA, 15 bp, Homo sapiens
ttgggacctgaacac

SEQ ID NO: 329608 - DNA, 15 bp, Homo sapiens
cttgggacctgaaca

SEQ ID NO: 329609 - DNA, 15 bp, Homo sapiens
tcttgggacctgaac

SEQ ID NO: 329610 - DNA, 15 bp, Homo sapiens
ttcttgggacctgaa

SEQ ID NO: 329611 - DNA, 15 bp, Homo sapiens
attcttgggacctga

SEQ ID NO: 329612 - DNA, 15 bp, Homo sapiens
gattcttgggacctg

SEQ ID NO: 329613 - DNA, 15 bp, Homo sapiens
ggattcttgggacct

SEQ ID NO: 329614 - DNA, 15 bp, Homo sapiens
tggattcttgggacc

SEQ ID NO: 329615 - DNA, 15 bp, Homo sapiens
ctggattcttgggac

SEQ ID NO: 329616 - DNA, 15 bp, Homo sapiens
cctggattcttggga

SEQ ID NO: 329617 - DNA, 15 bp, Homo sapiens
tcctggattcttggg

SEQ ID NO: 329618 - DNA, 15 bp, Homo sapiens
ctcctggattcttgg

SEQ ID NO: 329619 - DNA, 15 bp, Homo sapiens
actcctggattcttg

SEQ ID NO: 329620 - DNA, 15 bp, Homo sapiens
tactcctggattctt

SEQ ID NO: 329621 - DNA, 15 bp, Homo sapiens
atactcctggattct

SEQ ID NO: 329622 - DNA, 15 bp, Homo sapiens
catactcctggattc

SEQ ID NO: 329623 - DNA, 15 bp, Homo sapiens
acatactcctggatt

SEQ ID NO: 329624 - DNA, 15 bp, Homo sapiens
tacatactcctggat

SEQ ID NO: 329625 - DNA, 15 bp, Homo sapiens
ttacatactcctgga

SEQ ID NO: 329626 - DNA, 15 bp, Homo sapiens
cttacatactcctgg

SEQ ID NO: 329627 - DNA, 15 bp, Homo sapiens
acttacatactcctg

SEQ ID NO: 329628 - DNA, 15 bp, Homo sapiens
cacttacatactcct

SEQ ID NO: 329629 - DNA, 15 bp, Homo sapiens
tcacttacatactcc

SEQ ID NO: 329630 - DNA, 15 bp, Homo sapiens
ttcacttacatactc

SEQ ID NO: 329631 - DNA, 15 bp, Homo sapiens
cttcacttacatact

SEQ ID NO: 329632 - DNA, 15 bp, Homo sapiens
gcttcacttacatac

SEQ ID NO: 329633 - DNA, 15 bp, Homo sapiens
ggcttcacttacata

SEQ ID NO: 329634 - DNA, 15 bp, Homo sapiens
tggcttcacttacat

SEQ ID NO: 329635 - DNA, 15 bp, Homo sapiens
gtggcttcacttaca

SEQ ID NO: 329636 - DNA, 15 bp, Homo sapiens
agtggcttcacttac

SEQ ID NO: 329637 - DNA, 15 bp, Homo sapiens
aagtggcttcactta

SEQ ID NO: 329638 - DNA, 15 bp, Homo sapiens
caagtggcttcactt

SEQ ID NO: 329639 - DNA, 15 bp, Homo sapiens
ccaagtggcttcact

SEQ ID NO: 329640 - DNA, 15 bp, Homo sapiens
accaagtggcttcac

SEQ ID NO: 329641 - DNA, 15 bp, Homo sapiens
taccaagtggcttca

SEQ ID NO: 329642 - DNA, 15 bp, Homo sapiens
ataccaagtggcttc

SEQ ID NO: 329643 - DNA, 15 bp, Homo sapiens
aataccaagtggctt

SEQ ID NO: 329644 - DNA, 15 bp, Homo sapiens
aaataccaagtggct

SEQ ID NO: 329645 - DNA, 15 bp, Homo sapiens
taaataccaagtggc

SEQ ID NO: 329646 - DNA, 15 bp, Homo sapiens
ttaaataccaagtgg

SEQ ID NO: 329647 - DNA, 15 bp, Homo sapiens
gttaaataccaagtg

SEQ ID NO: 329648 - DNA, 15 bp, Homo sapiens
cgttaaataccaagt

SEQ ID NO: 329649 - DNA, 15 bp, Homo sapiens
tcgttaaataccaag

SEQ ID NO: 329650 - DNA, 15 bp, Homo sapiens
atcgttaaataccaa

SEQ ID NO: 329651 - DNA, 15 bp, Homo sapiens
tatcgttaaatacca

SEQ ID NO: 329652 - DNA, 15 bp, Homo sapiens
gtatcgttaaatacc

SEQ ID NO: 329653 - DNA, 15 bp, Homo sapiens
ggtatcgttaaatac

SEQ ID NO: 329654 - DNA, 15 bp, Homo sapiens
gggtatcgttaaata

SEQ ID NO: 329655 - DNA, 15 bp, Homo sapiens
agggtatcgttaaat

SEQ ID NO: 329656 - DNA, 15 bp, Homo sapiens
cagggtatcgttaaa

SEQ ID NO: 329657 - DNA, 15 bp, Homo sapiens
tcagggtatcgttaa

SEQ ID NO: 329658 - DNA, 15 bp, Homo sapiens
ctcagggtatcgtta

SEQ ID NO: 329659 - DNA, 15 bp, Homo sapiens
tctcagggtatcgtt

SEQ ID NO: 329660 - DNA, 15 bp, Homo sapiens
ttctcagggtatcgt

SEQ ID NO: 329661 - DNA, 15 bp, Homo sapiens
tttctcagggtatcg

SEQ ID NO: 329662 - DNA, 15 bp, Homo sapiens
ttttctcagggtatc

SEQ ID NO: 329663 - DNA, 15 bp, Homo sapiens
attttctcagggtat

SEQ ID NO: 329664 - DNA, 15 bp, Homo sapiens
cattttctcagggta

SEQ ID NO: 329665 - DNA, 15 bp, Homo sapiens
tcattttctcagggt

SEQ ID NO: 329666 - DNA, 15 bp, Homo sapiens
ttcattttctcaggg

SEQ ID NO: 329667 - DNA, 15 bp, Homo sapiens
gttcattttctcagg

SEQ ID NO: 329668 - DNA, 15 bp, Homo sapiens
tgttcattttctcag

SEQ ID NO: 329669 - DNA, 15 bp, Homo sapiens
ttgttcattttctca

SEQ ID NO: 329670 - DNA, 15 bp, Homo sapiens
gttgttcattttctc

SEQ ID NO: 329671 - DNA, 15 bp, Homo sapiens
tgttgttcattttct

SEQ ID NO: 329672 - DNA, 15 bp, Homo sapiens
gtgttgttcattttc

SEQ ID NO: 329673 - DNA, 15 bp, Homo sapiens
tgtgttgttcatttt

SEQ ID NO: 329674 - DNA, 15 bp, Homo sapiens
gtgtgttgttcattt

SEQ ID NO: 329675 - DNA, 15 bp, Homo sapiens
tgtgtgttgttcatt

SEQ ID NO: 329676 - DNA, 15 bp, Homo sapiens
gtgtgtgttgttcat

SEQ ID NO: 329677 - DNA, 15 bp, Homo sapiens
ggtgtgtgttgttca

SEQ ID NO: 329678 - DNA, 15 bp, Homo sapiens
aggtgtgtgttgttc

SEQ ID NO: 329679 - DNA, 15 bp, Homo sapiens
gaggtgtgtgttgtt

SEQ ID NO: 329680 - DNA, 15 bp, Homo sapiens
ggaggtgtgtgttgt

SEQ ID NO: 329681 - DNA, 15 bp, Homo sapiens
gggaggtgtgtgttg

SEQ ID NO: 329682 - DNA, 15 bp, Homo sapiens
agggaggtgtgtgtt

SEQ ID NO: 329683 - DNA, 15 bp, Homo sapiens
tagggaggtgtgtgt

SEQ ID NO: 329684 - DNA, 15 bp, Homo sapiens
ttagggaggtgtgtg

SEQ ID NO: 329685 - DNA, 15 bp, Homo sapiens
cttagggaggtgtgt

SEQ ID NO: 329686 - DNA, 15 bp, Homo sapiens
tcttagggaggtgtg

SEQ ID NO: 329687 - DNA, 15 bp, Homo sapiens
ctcttagggaggtgt

SEQ ID NO: 329688 - DNA, 15 bp, Homo sapiens
cctcttagggaggtg

SEQ ID NO: 329689 - DNA, 15 bp, Homo sapiens
gcctcttagggaggt

SEQ ID NO: 329690 - DNA, 15 bp, Homo sapiens
ggcctcttagggagg

SEQ ID NO: 329691 - DNA, 15 bp, Homo sapiens
aggcctcttagggag

SEQ ID NO: 329692 - DNA, 15 bp, Homo sapiens
gaggcctcttaggga

SEQ ID NO: 329693 - DNA, 15 bp, Homo sapiens
ggaggcctcttaggg

SEQ ID NO: 329694 - DNA, 15 bp, Homo sapiens
gggaggcctcttagg

SEQ ID NO: 329695 - DNA, 15 bp, Homo sapiens
agggaggcctcttag

SEQ ID NO: 329696 - DNA, 15 bp, Homo sapiens
aagggaggcctctta

SEQ ID NO: 329697 - DNA, 15 bp, Homo sapiens
aaagggaggcctctt

SEQ ID NO: 329698 - DNA, 15 bp, Homo sapiens
caaagggaggcctct

SEQ ID NO: 329699 - DNA, 15 bp, Homo sapiens
acaaagggaggcctc

SEQ ID NO: 329700 - DNA, 15 bp, Homo sapiens
gacaaagggaggcct

SEQ ID NO: 329701 - DNA, 15 bp, Homo sapiens
cgacaaagggaggcc

SEQ ID NO: 329702 - DNA, 15 bp, Homo sapiens
gcgacaaagggaggc

SEQ ID NO: 329703 - DNA, 15 bp, Homo sapiens
ggcgacaaagggagg

SEQ ID NO: 329704 - DNA, 15 bp, Homo sapiens
cggcgacaaagggag

SEQ ID NO: 329705 - DNA, 15 bp, Homo sapiens
ccggcgacaaaggga

SEQ ID NO: 329706 - DNA, 15 bp, Homo sapiens
gccggcgacaaaggg

SEQ ID NO: 329707 - DNA, 15 bp, Homo sapiens
agccggcgacaaagg

SEQ ID NO: 329708 - DNA, 15 bp, Homo sapiens
tagccggcgacaaag

SEQ ID NO: 329709 - DNA, 15 bp, Homo sapiens
atagccggcgacaaa

SEQ ID NO: 329710 - DNA, 15 bp, Homo sapiens
gatagccggcgacaa

SEQ ID NO: 329711 - DNA, 15 bp, Homo sapiens
tgatagccggcgaca

SEQ ID NO: 329712 - DNA, 15 bp, Homo sapiens
ctgatagccggcgac

SEQ ID NO: 329713 - DNA, 15 bp, Homo sapiens
actgatagccggcga

SEQ ID NO: 329714 - DNA, 15 bp, Homo sapiens
aactgatagccggcg

SEQ ID NO: 329715 - DNA, 15 bp, Homo sapiens
gaactgatagccggc

SEQ ID NO: 329716 - DNA, 15 bp, Homo sapiens
agaactgatagccgg

SEQ ID NO: 329717 - DNA, 15 bp, Homo sapiens
aagaactgatagccg

SEQ ID NO: 329718 - DNA, 15 bp, Homo sapiens
gaagaactgatagcc

SEQ ID NO: 329719 - DNA, 15 bp, Homo sapiens
tgaagaactgatagc

SEQ ID NO: 329720 - DNA, 15 bp, Homo sapiens
atgaagaactgatag

SEQ ID NO: 329721 - DNA, 15 bp, Homo sapiens
gatgaagaactgata

SEQ ID NO: 329722 - DNA, 15 bp, Homo sapiens
agatgaagaactgat

SEQ ID NO: 329723 - DNA, 15 bp, Homo sapiens
tagatgaagaactga

SEQ ID NO: 329724 - DNA, 15 bp, Homo sapiens
atagatgaagaactg

SEQ ID NO: 329725 - DNA, 15 bp, Homo sapiens
aatagatgaagaact

SEQ ID NO: 329726 - DNA, 15 bp, Homo sapiens
aaatagatgaagaac

SEQ ID NO: 329727 - DNA, 15 bp, Homo sapiens
gaaatagatgaagaa

SEQ ID NO: 329728 - DNA, 15 bp, Homo sapiens
agaaatagatgaaga

SEQ ID NO: 329729 - DNA, 15 bp, Homo sapiens
aagaaatagatgaag

SEQ ID NO: 329730 - DNA, 15 bp, Homo sapiens
taagaaatagatgaa

SEQ ID NO: 329731 - DNA, 15 bp, Homo sapiens
gtaagaaatagatga

SEQ ID NO: 329732 - DNA, 15 bp, Homo sapiens
ggtaagaaatagatg

SEQ ID NO: 329733 - DNA, 15 bp, Homo sapiens
gggtaagaaatagat

SEQ ID NO: 329734 - DNA, 15 bp, Homo sapiens
agggtaagaaataga

SEQ ID NO: 329735 - DNA, 15 bp, Homo sapiens
gagggtaagaaatag

SEQ ID NO: 329736 - DNA, 15 bp, Homo sapiens
ggagggtaagaaata

SEQ ID NO: 329737 - DNA, 15 bp, Homo sapiens
tggagggtaagaaat

SEQ ID NO: 329738 - DNA, 15 bp, Homo sapiens
ttggagggtaagaaa

SEQ ID NO: 329739 - DNA, 15 bp, Homo sapiens
attggagggtaagaa

SEQ ID NO: 329740 - DNA, 15 bp, Homo sapiens
cattggagggtaaga

SEQ ID NO: 329741 - DNA, 15 bp, Homo sapiens
acattggagggtaag

SEQ ID NO: 329742 - DNA, 15 bp, Homo sapiens
cacattggagggtaa

SEQ ID NO: 329743 - DNA, 15 bp, Homo sapiens
ccacattggagggta

SEQ ID NO: 329744 - DNA, 15 bp, Homo sapiens
cccacattggagggt

SEQ ID NO: 329745 - DNA, 15 bp, Homo sapiens
tcccacattggaggg

SEQ ID NO: 329746 - DNA, 15 bp, Homo sapiens
ctcccacattggagg

SEQ ID NO: 329747 - DNA, 15 bp, Homo sapiens
gctcccacattggag

SEQ ID NO: 329748 - DNA, 15 bp, Homo sapiens
tgctcccacattgga

SEQ ID NO: 329749 - DNA, 15 bp, Homo sapiens
gtgctcccacattgg

SEQ ID NO: 329750 - DNA, 15 bp, Homo sapiens
tgtgctcccacattg

SEQ ID NO: 329751 - DNA, 15 bp, Homo sapiens
gtgtgctcccacatt

SEQ ID NO: 329752 - DNA, 15 bp, Homo sapiens
ggtgtgctcccacat

SEQ ID NO: 329753 - DNA, 15 bp, Homo sapiens
aggtgtgctcccaca

SEQ ID NO: 329754 - DNA, 15 bp, Homo sapiens
aaggtgtgctcccac

SEQ ID NO: 329755 - DNA, 15 bp, Homo sapiens
taaggtgtgctccca

SEQ ID NO: 329756 - DNA, 15 bp, Homo sapiens
ctaaggtgtgctccc

SEQ ID NO: 329757 - DNA, 15 bp, Homo sapiens
tctaaggtgtgctcc

SEQ ID NO: 329758 - DNA, 15 bp, Homo sapiens
ctctaaggtgtgctc

SEQ ID NO: 329759 - DNA, 15 bp, Homo sapiens
cctctaaggtgtgct

SEQ ID NO: 329760 - DNA, 15 bp, Homo sapiens
tcctctaaggtgtgc

SEQ ID NO: 329761 - DNA, 15 bp, Homo sapiens
gtcctctaaggtgtg

SEQ ID NO: 329762 - DNA, 15 bp, Homo sapiens
agtcctctaaggtgt

SEQ ID NO: 329763 - DNA, 15 bp, Homo sapiens
aagtcctctaaggtg

SEQ ID NO: 329764 - DNA, 15 bp, Homo sapiens
taagtcctctaaggt

SEQ ID NO: 329765 - DNA, 15 bp, Homo sapiens
gtaagtcctctaagg

SEQ ID NO: 329766 - DNA, 15 bp, Homo sapiens
tgtaagtcctctaag

SEQ ID NO: 329767 - DNA, 15 bp, Homo sapiens
ttgtaagtcctctaa

SEQ ID NO: 329768 - DNA, 15 bp, Homo sapiens
cttgtaagtcctcta

SEQ ID NO: 329769 - DNA, 15 bp, Homo sapiens
ccttgtaagtcctct

SEQ ID NO: 329770 - DNA, 15 bp, Homo sapiens
accttgtaagtcctc

SEQ ID NO: 329771 - DNA, 15 bp, Homo sapiens
taccttgtaagtcct

SEQ ID NO: 329772 - DNA, 15 bp, Homo sapiens
gtaccttgtaagtcc

SEQ ID NO: 329773 - DNA, 15 bp, Homo sapiens
tgtaccttgtaagtc

SEQ ID NO: 329774 - DNA, 15 bp, Homo sapiens
ctgtaccttgtaagt

SEQ ID NO: 329775 - DNA, 15 bp, Homo sapiens
cctgtaccttgtaag

SEQ ID NO: 329776 - DNA, 15 bp, Homo sapiens
gcctgtaccttgtaa

SEQ ID NO: 329777 - DNA, 15 bp, Homo sapiens
tgcctgtaccttgta

SEQ ID NO: 329778 - DNA, 15 bp, Homo sapiens
ctgcctgtaccttgt

SEQ ID NO: 329779 - DNA, 15 bp, Homo sapiens
cctgcctgtaccttg

SEQ ID NO: 329780 - DNA, 15 bp, Homo sapiens
tcctgcctgtacctt

SEQ ID NO: 329781 - DNA, 15 bp, Homo sapiens
ctcctgcctgtacct

SEQ ID NO: 329782 - DNA, 15 bp, Homo sapiens
tctcctgcctgtacc

SEQ ID NO: 329783 - DNA, 15 bp, Homo sapiens
ctctcctgcctgtac

SEQ ID NO: 329784 - DNA, 15 bp, Homo sapiens
tctctcctgcctgta

SEQ ID NO: 329785 - DNA, 15 bp, Homo sapiens
ttctctcctgcctgt

SEQ ID NO: 329786 - DNA, 15 bp, Homo sapiens
attctctcctgcctg

SEQ ID NO: 329787 - DNA, 15 bp, Homo sapiens
aattctctcctgcct

SEQ ID NO: 329788 - DNA, 15 bp, Homo sapiens
gaattctctcctgcc

SEQ ID NO: 329789 - DNA, 15 bp, Homo sapiens
agaattctctcctgc

SEQ ID NO: 329790 - DNA, 15 bp, Homo sapiens
cagaattctctcctg

SEQ ID NO: 329791 - DNA, 15 bp, Homo sapiens
gcagaattctctcct

SEQ ID NO: 329792 - DNA, 15 bp, Homo sapiens
agcagaattctctcc

SEQ ID NO: 329793 - DNA, 15 bp, Homo sapiens
aagcagaattctctc

SEQ ID NO: 329794 - DNA, 15 bp, Homo sapiens
taagcagaattctct

SEQ ID NO: 329795 - DNA, 15 bp, Homo sapiens
ttaagcagaattctc

SEQ ID NO: 329796 - DNA, 15 bp, Homo sapiens
gttaagcagaattct

SEQ ID NO: 329797 - DNA, 15 bp, Homo sapiens
tgttaagcagaattc

SEQ ID NO: 329798 - DNA, 15 bp, Homo sapiens
gtgttaagcagaatt

SEQ ID NO: 329799 - DNA, 15 bp, Homo sapiens
tgtgttaagcagaat

SEQ ID NO: 329800 - DNA, 15 bp, Homo sapiens
ttgtgttaagcagaa

SEQ ID NO: 329801 - DNA, 15 bp, Homo sapiens
gttgtgttaagcaga

SEQ ID NO: 329802 - DNA, 15 bp, Homo sapiens
tgttgtgttaagcag

SEQ ID NO: 329803 - DNA, 15 bp, Homo sapiens
atgttgtgttaagca

SEQ ID NO: 329804 - DNA, 15 bp, Homo sapiens
gatgttgtgttaagc

SEQ ID NO: 329805 - DNA, 15 bp, Homo sapiens
agatgttgtgttaag

SEQ ID NO: 329806 - DNA, 15 bp, Homo sapiens
tagatgttgtgttaa

SEQ ID NO: 329807 - DNA, 15 bp, Homo sapiens
ttagatgttgtgtta

SEQ ID NO: 329808 - DNA, 15 bp, Homo sapiens
gttagatgttgtgtt

SEQ ID NO: 329809 - DNA, 15 bp, Homo sapiens
tgttagatgttgtgt

SEQ ID NO: 329810 - DNA, 15 bp, Homo sapiens
gtgttagatgttgtg

SEQ ID NO: 329811 - DNA, 15 bp, Homo sapiens
tgtgttagatgttgt

SEQ ID NO: 329812 - DNA, 15 bp, Homo sapiens
atgtgttagatgttg

SEQ ID NO: 329813 - DNA, 15 bp, Homo sapiens
tatgtgttagatgtt

SEQ ID NO: 329814 - DNA, 15 bp, Homo sapiens
ttatgtgttagatgt

SEQ ID NO: 329815 - DNA, 15 bp, Homo sapiens
attatgtgttagatg

SEQ ID NO: 329816 - DNA, 15 bp, Homo sapiens
tattatgtgttagat

SEQ ID NO: 329817 - DNA, 15 bp, Homo sapiens
ttattatgtgttaga

SEQ ID NO: 329818 - DNA, 15 bp, Homo sapiens
cttattatgtgttag

SEQ ID NO: 329819 - DNA, 15 bp, Homo sapiens
ccttattatgtgtta

SEQ ID NO: 329820 - DNA, 15 bp, Homo sapiens
cccttattatgtgtt

SEQ ID NO: 329821 - DNA, 15 bp, Homo sapiens
gcccttattatgtgt

SEQ ID NO: 329822 - DNA, 15 bp, Homo sapiens
agcccttattatgtg

SEQ ID NO: 329823 - DNA, 15 bp, Homo sapiens
gagcccttattatgt

SEQ ID NO: 329824 - DNA, 15 bp, Homo sapiens
tgagcccttattatg

SEQ ID NO: 329825 - DNA, 15 bp, Homo sapiens
ttgagcccttattat

SEQ ID NO: 329826 - DNA, 15 bp, Homo sapiens
attgagcccttatta

SEQ ID NO: 329827 - DNA, 15 bp, Homo sapiens
tattgagcccttatt

SEQ ID NO: 329828 - DNA, 15 bp, Homo sapiens
ttattgagcccttat

SEQ ID NO: 329829 - DNA, 15 bp, Homo sapiens
tttattgagccctta

SEQ ID NO: 329830 - DNA, 15 bp, Homo sapiens
atttattgagccctt

SEQ ID NO: 329831 - DNA, 15 bp, Homo sapiens
tatttattgagccct

SEQ ID NO: 329832 - DNA, 15 bp, Homo sapiens
atatttattgagccc

SEQ ID NO: 329833 - DNA, 15 bp, Homo sapiens
aatatttattgagcc

SEQ ID NO: 329834 - DNA, 15 bp, Homo sapiens
caatatttattgagc

SEQ ID NO: 329835 - DNA, 15 bp, Homo sapiens
ccaatatttattgag

SEQ ID NO: 329836 - DNA, 15 bp, Homo sapiens
gccaatatttattga

SEQ ID NO: 329837 - DNA, 15 bp, Homo sapiens
tgccaatatttattg

SEQ ID NO: 329838 - DNA, 15 bp, Homo sapiens
ttgccaatatttatt

SEQ ID NO: 329839 - DNA, 15 bp, Homo sapiens
attgccaatatttat

SEQ ID NO: 329840 - DNA, 15 bp, Homo sapiens
aattgccaatattta

SEQ ID NO: 329841 - DNA, 15 bp, Homo sapiens
taattgccaatattt

SEQ ID NO: 329842 - DNA, 15 bp, Homo sapiens
ataattgccaatatt

SEQ ID NO: 329843 - DNA, 15 bp, Homo sapiens
aataattgccaatat

SEQ ID NO: 329844 - DNA, 15 bp, Homo sapiens
taataattgccaata

SEQ ID NO: 329845 - DNA, 15 bp, Homo sapiens
ataataattgccaat

SEQ ID NO: 329846 - DNA, 15 bp, Homo sapiens
tataataattgccaa

SEQ ID NO: 329847 - DNA, 15 bp, Homo sapiens
ttataataattgcca

SEQ ID NO: 329848 - DNA, 15 bp, Homo sapiens
attataataattgcc

SEQ ID NO: 329849 - DNA, 15 bp, Homo sapiens
gattataataattgc

SEQ ID NO: 329850 - DNA, 15 bp, Homo sapiens
agattataataattg

SEQ ID NO: 329851 - DNA, 15 bp, Homo sapiens
cagattataataatt

SEQ ID NO: 329852 - DNA, 15 bp, Homo sapiens
ccagattataataat

SEQ ID NO: 329853 - DNA, 15 bp, Homo sapiens
accagattataataa

SEQ ID NO: 329854 - DNA, 15 bp, Homo sapiens
taccagattataata

SEQ ID NO: 329855 - DNA, 15 bp, Homo sapiens
ttaccagattataat

SEQ ID NO: 329856 - DNA, 15 bp, Homo sapiens
gttaccagattataa

SEQ ID NO: 329857 - DNA, 15 bp, Homo sapiens
agttaccagattata

SEQ ID NO: 329858 - DNA, 15 bp, Homo sapiens
gagttaccagattat

SEQ ID NO: 329859 - DNA, 15 bp, Homo sapiens
agagttaccagatta

SEQ ID NO: 329860 - DNA, 15 bp, Homo sapiens
tagagttaccagatt

SEQ ID NO: 329861 - DNA, 15 bp, Homo sapiens
ctagagttaccagat

SEQ ID NO: 329862 - DNA, 15 bp, Homo sapiens
tctagagttaccaga

SEQ ID NO: 329863 - DNA, 15 bp, Homo sapiens
ttctagagttaccag

SEQ ID NO: 329864 - DNA, 15 bp, Homo sapiens
tttctagagttacca

SEQ ID NO: 329865 - DNA, 15 bp, Homo sapiens
atttctagagttacc

SEQ ID NO: 329866 - DNA, 15 bp, Homo sapiens
catttctagagttac

SEQ ID NO: 329867 - DNA, 15 bp, Homo sapiens
tcatttctagagtta

SEQ ID NO: 329868 - DNA, 15 bp, Homo sapiens
gtcatttctagagtt

SEQ ID NO: 329869 - DNA, 15 bp, Homo sapiens
ggtcatttctagagt

SEQ ID NO: 329870 - DNA, 15 bp, Homo sapiens
tggtcatttctagag

SEQ ID NO: 329871 - DNA, 15 bp, Homo sapiens
ttggtcatttctaga

SEQ ID NO: 329872 - DNA, 15 bp, Homo sapiens
cttggtcatttctag

SEQ ID NO: 329873 - DNA, 15 bp, Homo sapiens
tcttggtcatttcta

SEQ ID NO: 329874 - DNA, 15 bp, Homo sapiens
ctcttggtcatttct

SEQ ID NO: 329875 - DNA, 15 bp, Homo sapiens
tctcttggtcatttc

SEQ ID NO: 329876 - DNA, 15 bp, Homo sapiens
ctctcttggtcattt

SEQ ID NO: 329877 - DNA, 15 bp, Homo sapiens
tctctcttggtcatt

SEQ ID NO: 329878 - DNA, 15 bp, Homo sapiens
gtctctcttggtcat

SEQ ID NO: 329879 - DNA, 15 bp, Homo sapiens
tgtctctcttggtca

SEQ ID NO: 329880 - DNA, 15 bp, Homo sapiens
ctgtctctcttggtc

SEQ ID NO: 329881 - DNA, 15 bp, Homo sapiens
tctgtctctcttggt

SEQ ID NO: 329882 - DNA, 15 bp, Homo sapiens
ttctgtctctcttgg

SEQ ID NO: 329883 - DNA, 15 bp, Homo sapiens
attctgtctctcttg

SEQ ID NO: 329884 - DNA, 15 bp, Homo sapiens
cattctgtctctctt

SEQ ID NO: 329885 - DNA, 15 bp, Homo sapiens
ccattctgtctctct

SEQ ID NO: 329886 - DNA, 15 bp, Homo sapiens
tccattctgtctctc

SEQ ID NO: 329887 - DNA, 15 bp, Homo sapiens
gtccattctgtctct

SEQ ID NO: 329888 - DNA, 15 bp, Homo sapiens
tgtccattctgtctc

SEQ ID NO: 329889 - DNA, 15 bp, Homo sapiens
atgtccattctgtct

SEQ ID NO: 329890 - DNA, 15 bp, Homo sapiens
aatgtccattctgtc

SEQ ID NO: 329891 - DNA, 15 bp, Homo sapiens
aaatgtccattctgt

SEQ ID NO: 329892 - DNA, 15 bp, Homo sapiens
aaaatgtccattctg

SEQ ID NO: 329893 - DNA, 15 bp, Homo sapiens
caaaatgtccattct

SEQ ID NO: 329894 - DNA, 15 bp, Homo sapiens
ccaaaatgtccattc

SEQ ID NO: 329895 - DNA, 15 bp, Homo sapiens
gccaaaatgtccatt

SEQ ID NO: 329896 - DNA, 15 bp, Homo sapiens
agccaaaatgtccat

SEQ ID NO: 329897 - DNA, 15 bp, Homo sapiens
cagccaaaatgtcca

SEQ ID NO: 329898 - DNA, 15 bp, Homo sapiens
acagccaaaatgtcc

SEQ ID NO: 329899 - DNA, 15 bp, Homo sapiens
aacagccaaaatgtc

SEQ ID NO: 329900 - DNA, 15 bp, Homo sapiens
aaacagccaaaatgt

SEQ ID NO: 329901 - DNA, 15 bp, Homo sapiens
aaaacagccaaaatg

SEQ ID NO: 329902 - DNA, 15 bp, Homo sapiens
aaaaacagccaaaat

SEQ ID NO: 329903 - DNA, 15 bp, Homo sapiens
gaaaaacagccaaaa

SEQ ID NO: 329904 - DNA, 15 bp, Homo sapiens
ggaaaaacagccaaa

SEQ ID NO: 329905 - DNA, 15 bp, Homo sapiens
tggaaaaacagccaa

SEQ ID NO: 329906 - DNA, 15 bp, Homo sapiens
ttggaaaaacagcca

SEQ ID NO: 329907 - DNA, 15 bp, Homo sapiens
cttggaaaaacagcc

SEQ ID NO: 329908 - DNA, 15 bp, Homo sapiens
acttggaaaaacagc

SEQ ID NO: 329909 - DNA, 15 bp, Homo sapiens
aacttggaaaaacag

SEQ ID NO: 329910 - DNA, 15 bp, Homo sapiens
aaacttggaaaaaca

SEQ ID NO: 329911 - DNA, 15 bp, Homo sapiens
aaaacttggaaaaac

SEQ ID NO: 329912 - DNA, 15 bp, Homo sapiens
gaaaacttggaaaaa

SEQ ID NO: 329913 - DNA, 15 bp, Homo sapiens
cgaaaacttggaaaa

SEQ ID NO: 329914 - DNA, 15 bp, Homo sapiens
tcgaaaacttggaaa

SEQ ID NO: 329915 - DNA, 15 bp, Homo sapiens
ctcgaaaacttggaa

SEQ ID NO: 329916 - DNA, 15 bp, Homo sapiens
gctcgaaaacttgga

SEQ ID NO: 329917 - DNA, 15 bp, Homo sapiens
ggctcgaaaacttgg

SEQ ID NO: 329918 - DNA, 15 bp, Homo sapiens
tggctcgaaaacttg

SEQ ID NO: 329919 - DNA, 15 bp, Homo sapiens
ctggctcgaaaactt

SEQ ID NO: 329920 - DNA, 15 bp, Homo sapiens
tctggctcgaaaact

SEQ ID NO: 329921 - DNA, 15 bp, Homo sapiens
ttctggctcgaaaac

SEQ ID NO: 329922 - DNA, 15 bp, Homo sapiens
cttctggctcgaaaa

SEQ ID NO: 329923 - DNA, 15 bp, Homo sapiens
tcttctggctcgaaa

SEQ ID NO: 329924 - DNA, 15 bp, Homo sapiens
ttcttctggctcgaa

SEQ ID NO: 329925 - DNA, 15 bp, Homo sapiens
tttcttctggctcga

SEQ ID NO: 329926 - DNA, 15 bp, Homo sapiens
ctttcttctggctcg

SEQ ID NO: 329927 - DNA, 15 bp, Homo sapiens
actttcttctggctc

SEQ ID NO: 329928 - DNA, 15 bp, Homo sapiens
aactttcttctggct

SEQ ID NO: 329929 - DNA, 15 bp, Homo sapiens
caactttcttctggc

SEQ ID NO: 329930 - DNA, 15 bp, Homo sapiens
acaactttcttctgg

SEQ ID NO: 329931 - DNA, 15 bp, Homo sapiens
aacaactttcttctg

SEQ ID NO: 329932 - DNA, 15 bp, Homo sapiens
gaacaactttcttct

SEQ ID NO: 329933 - DNA, 15 bp, Homo sapiens
ggaacaactttcttc

SEQ ID NO: 329934 - DNA, 15 bp, Homo sapiens
tggaacaactttctt

SEQ ID NO: 329935 - DNA, 15 bp, Homo sapiens
gtggaacaactttct

SEQ ID NO: 329936 - DNA, 15 bp, Homo sapiens
tgtggaacaactttc

SEQ ID NO: 329937 - DNA, 15 bp, Homo sapiens
gtgtggaacaacttt

SEQ ID NO: 329938 - DNA, 15 bp, Homo sapiens
tgtgtggaacaactt

SEQ ID NO: 329939 - DNA, 15 bp, Homo sapiens
atgtgtggaacaact

SEQ ID NO: 329940 - DNA, 15 bp, Homo sapiens
aatgtgtggaacaac

SEQ ID NO: 329941 - DNA, 15 bp, Homo sapiens
aaatgtgtggaacaa

SEQ ID NO: 329942 - DNA, 15 bp, Homo sapiens
aaaatgtgtggaaca

SEQ ID NO: 329943 - DNA, 15 bp, Homo sapiens
caaaatgtgtggaac

SEQ ID NO: 329944 - DNA, 15 bp, Homo sapiens
tcaaaatgtgtggaa

SEQ ID NO: 329945 - DNA, 15 bp, Homo sapiens
ttcaaaatgtgtgga

SEQ ID NO: 329946 - DNA, 15 bp, Homo sapiens
tttcaaaatgtgtgg

SEQ ID NO: 329947 - DNA, 15 bp, Homo sapiens
atttcaaaatgtgtg

SEQ ID NO: 329948 - DNA, 15 bp, Homo sapiens
tatttcaaaatgtgt

SEQ ID NO: 329949 - DNA, 15 bp, Homo sapiens
atatttcaaaatgtg

SEQ ID NO: 329950 - DNA, 15 bp, Homo sapiens
gatatttcaaaatgt

SEQ ID NO: 329951 - DNA, 15 bp, Homo sapiens
tgatatttcaaaatg

SEQ ID NO: 329952 - DNA, 15 bp, Homo sapiens
ctgatatttcaaaat

SEQ ID NO: 329953 - DNA, 15 bp, Homo sapiens
actgatatttcaaaa

SEQ ID NO: 329954 - DNA, 15 bp, Homo sapiens
gactgatatttcaaa

SEQ ID NO: 329955 - DNA, 15 bp, Homo sapiens
agactgatatttcaa

SEQ ID NO: 329956 - DNA, 15 bp, Homo sapiens
gagactgatatttca

SEQ ID NO: 329957 - DNA, 15 bp, Homo sapiens
tgagactgatatttc

SEQ ID NO: 329958 - DNA, 15 bp, Homo sapiens
gtgagactgatattt

SEQ ID NO: 329959 - DNA, 15 bp, Homo sapiens
ggtgagactgatatt

SEQ ID NO: 329960 - DNA, 15 bp, Homo sapiens
gggtgagactgatat

SEQ ID NO: 329961 - DNA, 15 bp, Homo sapiens
tgggtgagactgata

SEQ ID NO: 329962 - DNA, 15 bp, Homo sapiens
gtgggtgagactgat

SEQ ID NO: 329963 - DNA, 15 bp, Homo sapiens
tgtgggtgagactga

SEQ ID NO: 329964 - DNA, 15 bp, Homo sapiens
ttgtgggtgagactg

SEQ ID NO: 329965 - DNA, 15 bp, Homo sapiens
tttgtgggtgagact

SEQ ID NO: 329966 - DNA, 15 bp, Homo sapiens
ctttgtgggtgagac

SEQ ID NO: 329967 - DNA, 15 bp, Homo sapiens
actttgtgggtgaga

SEQ ID NO: 329968 - DNA, 15 bp, Homo sapiens
aactttgtgggtgag

SEQ ID NO: 329969 - DNA, 15 bp, Homo sapiens
caactttgtgggtga

SEQ ID NO: 329970 - DNA, 15 bp, Homo sapiens
tcaactttgtgggtg

SEQ ID NO: 329971 - DNA, 15 bp, Homo sapiens
ttcaactttgtgggt

SEQ ID NO: 329972 - DNA, 15 bp, Homo sapiens
attcaactttgtggg

SEQ ID NO: 329973 - DNA, 15 bp, Homo sapiens
gattcaactttgtgg

SEQ ID NO: 329974 - DNA, 15 bp, Homo sapiens
agattcaactttgtg

SEQ ID NO: 329975 - DNA, 15 bp, Homo sapiens
cagattcaactttgt

SEQ ID NO: 329976 - DNA, 15 bp, Homo sapiens
acagattcaactttg

SEQ ID NO: 329977 - DNA, 15 bp, Homo sapiens
aacagattcaacttt

SEQ ID NO: 329978 - DNA, 15 bp, Homo sapiens
aaacagattcaactt

SEQ ID NO: 329979 - DNA, 15 bp, Homo sapiens
taaacagattcaact

SEQ ID NO: 329980 - DNA, 15 bp, Homo sapiens
ataaacagattcaac

SEQ ID NO: 329981 - DNA, 15 bp, Homo sapiens
aataaacagattcaa

SEQ ID NO: 329982 - DNA, 15 bp, Homo sapiens
gaataaacagattca

SEQ ID NO: 329983 - DNA, 15 bp, Homo sapiens
agaataaacagattc

SEQ ID NO: 329984 - DNA, 15 bp, Homo sapiens
aagaataaacagatt

SEQ ID NO: 329985 - DNA, 15 bp, Homo sapiens
aaagaataaacagat

SEQ ID NO: 329986 - DNA, 15 bp, Homo sapiens
gaaagaataaacaga

SEQ ID NO: 329987 - DNA, 15 bp, Homo sapiens
ggaaagaataaacag

SEQ ID NO: 329988 - DNA, 15 bp, Homo sapiens
tggaaagaataaaca

SEQ ID NO: 329989 - DNA, 15 bp, Homo sapiens
atggaaagaataaac

SEQ ID NO: 329990 - DNA, 15 bp, Homo sapiens
catggaaagaataaa

SEQ ID NO: 329991 - DNA, 15 bp, Homo sapiens
tcatggaaagaataa

SEQ ID NO: 329992 - DNA, 15 bp, Homo sapiens
ttcatggaaagaata

SEQ ID NO: 329993 - DNA, 15 bp, Homo sapiens
gttcatggaaagaat

SEQ ID NO: 329994 - DNA, 15 bp, Homo sapiens
agttcatggaaagaa

SEQ ID NO: 329995 - DNA, 15 bp, Homo sapiens
cagttcatggaaaga

SEQ ID NO: 329996 - DNA, 15 bp, Homo sapiens
acagttcatggaaag

SEQ ID NO: 329997 - DNA, 15 bp, Homo sapiens
gacagttcatggaaa

SEQ ID NO: 329998 - DNA, 15 bp, Homo sapiens
tgacagttcatggaa

SEQ ID NO: 329999 - DNA, 15 bp, Homo sapiens
ctgacagttcatgga

SEQ ID NO: 330000 - DNA, 15 bp, Homo sapiens
tctgacagttcatgg

SEQ ID NO: 330001 - DNA, 15 bp, Homo sapiens
ttctgacagttcatg

SEQ ID NO: 330002 - DNA, 15 bp, Homo sapiens
attctgacagttcat

SEQ ID NO: 330003 - DNA, 15 bp, Homo sapiens
gattctgacagttca

SEQ ID NO: 330004 - DNA, 15 bp, Homo sapiens
tgattctgacagttc

SEQ ID NO: 330005 - DNA, 15 bp, Homo sapiens
ttgattctgacagtt

SEQ ID NO: 330006 - DNA, 15 bp, Homo sapiens
gttgattctgacagt

SEQ ID NO: 330007 - DNA, 15 bp, Homo sapiens
agttgattctgacag

SEQ ID NO: 330008 - DNA, 15 bp, Homo sapiens
gagttgattctgaca

SEQ ID NO: 330009 - DNA, 15 bp, Homo sapiens
agagttgattctgac

SEQ ID NO: 330010 - DNA, 15 bp, Homo sapiens
cagagttgattctga

SEQ ID NO: 330011 - DNA, 15 bp, Homo sapiens
ccagagttgattctg

SEQ ID NO: 330012 - DNA, 15 bp, Homo sapiens
tccagagttgattct

SEQ ID NO: 330013 - DNA, 15 bp, Homo sapiens
ttccagagttgattc

SEQ ID NO: 330014 - DNA, 15 bp, Homo sapiens
tttccagagttgatt

SEQ ID NO: 330015 - DNA, 15 bp, Homo sapiens
ttttccagagttgat

SEQ ID NO: 330016 - DNA, 15 bp, Homo sapiens
tttttccagagttga

SEQ ID NO: 330017 - DNA, 15 bp, Homo sapiens
gtttttccagagttg

SEQ ID NO: 330018 - DNA, 15 bp, Homo sapiens
agtttttccagagtt

SEQ ID NO: 330019 - DNA, 15 bp, Homo sapiens
tagtttttccagagt

SEQ ID NO: 330020 - DNA, 15 bp, Homo sapiens
ttagtttttccagag

SEQ ID NO: 330021 - DNA, 15 bp, Homo sapiens
cttagtttttccaga

SEQ ID NO: 330022 - DNA, 15 bp, Homo sapiens
tcttagtttttccag

SEQ ID NO: 330023 - DNA, 15 bp, Homo sapiens
gtcttagtttttcca

SEQ ID NO: 330024 - DNA, 15 bp, Homo sapiens
agtcttagtttttcc

SEQ ID NO: 330025 - DNA, 15 bp, Homo sapiens
tagtcttagtttttc

SEQ ID NO: 330026 - DNA, 15 bp, Homo sapiens
atagtcttagttttt

SEQ ID NO: 330027 - DNA, 15 bp, Homo sapiens
catagtcttagtttt

SEQ ID NO: 330028 - DNA, 15 bp, Homo sapiens
ccatagtcttagttt

SEQ ID NO: 330029 - DNA, 15 bp, Homo sapiens
tccatagtcttagtt

SEQ ID NO: 330030 - DNA, 15 bp, Homo sapiens
atccatagtcttagt

SEQ ID NO: 330031 - DNA, 15 bp, Homo sapiens
aatccatagtcttag

SEQ ID NO: 330032 - DNA, 15 bp, Homo sapiens
gaatccatagtctta

SEQ ID NO: 330033 - DNA, 15 bp, Homo sapiens
ggaatccatagtctt

SEQ ID NO: 330034 - DNA, 15 bp, Homo sapiens
aggaatccatagtct

SEQ ID NO: 330035 - DNA, 15 bp, Homo sapiens
gaggaatccatagtc

SEQ ID NO: 330036 - DNA, 15 bp, Homo sapiens
agaggaatccatagt

SEQ ID NO: 330037 - DNA, 15 bp, Homo sapiens
cagaggaatccatag

SEQ ID NO: 330038 - DNA, 15 bp, Homo sapiens
acagaggaatccata

SEQ ID NO: 330039 - DNA, 15 bp, Homo sapiens
cacagaggaatccat

SEQ ID NO: 330040 - DNA, 15 bp, Homo sapiens
gcacagaggaatcca

SEQ ID NO: 330041 - DNA, 15 bp, Homo sapiens
agcacagaggaatcc

SEQ ID NO: 330042 - DNA, 15 bp, Homo sapiens
gagcacagaggaatc

SEQ ID NO: 330043 - DNA, 15 bp, Homo sapiens
agagcacagaggaat

SEQ ID NO: 330044 - DNA, 15 bp, Homo sapiens
aagagcacagaggaa

SEQ ID NO: 330045 - DNA, 15 bp, Homo sapiens
gaagagcacagagga

SEQ ID NO: 330046 - DNA, 15 bp, Homo sapiens
ggaagagcacagagg

SEQ ID NO: 330047 - DNA, 15 bp, Homo sapiens
tggaagagcacagag

SEQ ID NO: 330048 - DNA, 15 bp, Homo sapiens
atggaagagcacaga

SEQ ID NO: 330049 - DNA, 15 bp, Homo sapiens
tatggaagagcacag

SEQ ID NO: 330050 - DNA, 15 bp, Homo sapiens
ctatggaagagcaca

SEQ ID NO: 330051 - DNA, 15 bp, Homo sapiens
tctatggaagagcac

SEQ ID NO: 330052 - DNA, 15 bp, Homo sapiens
ttctatggaagagca

SEQ ID NO: 330053 - DNA, 15 bp, Homo sapiens
cttctatggaagagc

SEQ ID NO: 330054 - DNA, 15 bp, Homo sapiens
tcttctatggaagag

SEQ ID NO: 330055 - DNA, 15 bp, Homo sapiens
ttcttctatggaaga

SEQ ID NO: 330056 - DNA, 15 bp, Homo sapiens
cttcttctatggaag

SEQ ID NO: 330057 - DNA, 15 bp, Homo sapiens
tcttcttctatggaa

SEQ ID NO: 330058 - DNA, 15 bp, Homo sapiens
ttcttcttctatgga

SEQ ID NO: 330059 - DNA, 15 bp, Homo sapiens
tttcttcttctatgg

SEQ ID NO: 330060 - DNA, 15 bp, Homo sapiens
ctttcttcttctatg

SEQ ID NO: 330061 - DNA, 15 bp, Homo sapiens
tctttcttcttctat

SEQ ID NO: 330062 - DNA, 15 bp, Homo sapiens
atctttcttcttcta

SEQ ID NO: 330063 - DNA, 15 bp, Homo sapiens
aatctttcttcttct

SEQ ID NO: 330064 - DNA, 15 bp, Homo sapiens
caatctttcttcttc

SEQ ID NO: 330065 - DNA, 15 bp, Homo sapiens
acaatctttcttctt

SEQ ID NO: 330066 - DNA, 15 bp, Homo sapiens
aacaatctttcttct

SEQ ID NO: 330067 - DNA, 15 bp, Homo sapiens
caacaatctttcttc

SEQ ID NO: 330068 - DNA, 15 bp, Homo sapiens
acaacaatctttctt

SEQ ID NO: 330069 - DNA, 15 bp, Homo sapiens
aacaacaatctttct

SEQ ID NO: 330070 - DNA, 15 bp, Homo sapiens
taacaacaatctttc

SEQ ID NO: 330071 - DNA, 15 bp, Homo sapiens
ataacaacaatcttt

SEQ ID NO: 330072 - DNA, 15 bp, Homo sapiens
cataacaacaatctt

SEQ ID NO: 330073 - DNA, 15 bp, Homo sapiens
tcataacaacaatct

SEQ ID NO: 330074 - DNA, 15 bp, Homo sapiens
ctcataacaacaatc

SEQ ID NO: 330075 - DNA, 15 bp, Homo sapiens
gctcataacaacaat

SEQ ID NO: 330076 - DNA, 15 bp, Homo sapiens
tgctcataacaacaa

SEQ ID NO: 330077 - DNA, 15 bp, Homo sapiens
atgctcataacaaca

SEQ ID NO: 330078 - DNA, 15 bp, Homo sapiens
aatgctcataacaac

SEQ ID NO: 330079 - DNA, 15 bp, Homo sapiens
taatgctcataacaa

SEQ ID NO: 330080 - DNA, 15 bp, Homo sapiens
ttaatgctcataaca

SEQ ID NO: 330081 - DNA, 15 bp, Homo sapiens
tttaatgctcataac

SEQ ID NO: 330082 - DNA, 15 bp, Homo sapiens
catttaatgctcata

SEQ ID NO: 330083 - DNA, 15 bp, Homo sapiens
tcatttaatgctcat

SEQ ID NO: 330084 - DNA, 15 bp, Homo sapiens
gtcatttaatgctca

SEQ ID NO: 330085 - DNA, 15 bp, Homo sapiens
agtcatttaatgctc

SEQ ID NO: 330086 - DNA, 15 bp, Homo sapiens
aagtcatttaatgct

SEQ ID NO: 330087 - DNA, 15 bp, Homo sapiens
taagtcatttaatgc

SEQ ID NO: 330088 - DNA, 15 bp, Homo sapiens
ctaagtcatttaatg

SEQ ID NO: 330089 - DNA, 15 bp, Homo sapiens
actaagtcatttaat

SEQ ID NO: 330090 - DNA, 15 bp, Homo sapiens
tactaagtcatttaa

SEQ ID NO: 330091 - DNA, 15 bp, Homo sapiens
atactaagtcattta

SEQ ID NO: 330092 - DNA, 15 bp, Homo sapiens
tatactaagtcattt

SEQ ID NO: 330093 - DNA, 15 bp, Homo sapiens
gtatactaagtcatt

SEQ ID NO: 330094 - DNA, 15 bp, Homo sapiens
tgtatactaagtcat

SEQ ID NO: 330095 - DNA, 15 bp, Homo sapiens
atgtatactaagtca

SEQ ID NO: 330096 - DNA, 15 bp, Homo sapiens
tatgtatactaagtc

SEQ ID NO: 330097 - DNA, 15 bp, Homo sapiens
ttatgtatactaagt

SEQ ID NO: 330098 - DNA, 15 bp, Homo sapiens
tttatgtatactaag

SEQ ID NO: 330099 - DNA, 15 bp, Homo sapiens
ctttatgtatactaa

SEQ ID NO: 330100 - DNA, 15 bp, Homo sapiens
gctttatgtatacta

SEQ ID NO: 330101 - DNA, 15 bp, Homo sapiens
tgctttatgtatact

SEQ ID NO: 330102 - DNA, 15 bp, Homo sapiens
gtgctttatgtatac

SEQ ID NO: 330103 - DNA, 15 bp, Homo sapiens
tgtgctttatgtata

SEQ ID NO: 330104 - DNA, 15 bp, Homo sapiens
ctgtgctttatgtat

SEQ ID NO: 330105 - DNA, 15 bp, Homo sapiens
cctgtgctttatgta

SEQ ID NO: 330106 - DNA, 15 bp, Homo sapiens
acctgtgctttatgt

SEQ ID NO: 330107 - DNA, 15 bp, Homo sapiens
cacctgtgctttatg

SEQ ID NO: 330108 - DNA, 15 bp, Homo sapiens
tcacctgtgctttat

SEQ ID NO: 330109 - DNA, 15 bp, Homo sapiens
atcacctgtgcttta

SEQ ID NO: 330110 - DNA, 15 bp, Homo sapiens
gatcacctgtgcttt

SEQ ID NO: 330111 - DNA, 15 bp, Homo sapiens
ggatcacctgtgctt

SEQ ID NO: 330112 - DNA, 15 bp, Homo sapiens
aggatcacctgtgct

SEQ ID NO: 330113 - DNA, 15 bp, Homo sapiens
taggatcacctgtgc

SEQ ID NO: 330114 - DNA, 15 bp, Homo sapiens
ttaggatcacctgtg

SEQ ID NO: 330115 - DNA, 15 bp, Homo sapiens
tttaggatcacctgt

SEQ ID NO: 330116 - DNA, 15 bp, Homo sapiens
ctttaggatcacctg

SEQ ID NO: 330117 - DNA, 15 bp, Homo sapiens
gctttaggatcacct

SEQ ID NO: 330118 - DNA, 15 bp, Homo sapiens
tgctttaggatcacc

SEQ ID NO: 330119 - DNA, 15 bp, Homo sapiens
gtgctttaggatcac

SEQ ID NO: 330120 - DNA, 15 bp, Homo sapiens
agtgctttaggatca

SEQ ID NO: 330121 - DNA, 15 bp, Homo sapiens
aagtgctttaggatc

SEQ ID NO: 330122 - DNA, 15 bp, Homo sapiens
taagtgctttaggat

SEQ ID NO: 330123 - DNA, 15 bp, Homo sapiens
ctaagtgctttagga

SEQ ID NO: 330124 - DNA, 15 bp, Homo sapiens
cctaagtgctttagg

SEQ ID NO: 330125 - DNA, 15 bp, Homo sapiens
tcctaagtgctttag

SEQ ID NO: 330126 - DNA, 15 bp, Homo sapiens
atcctaagtgcttta

SEQ ID NO: 330127 - DNA, 15 bp, Homo sapiens
catcctaagtgcttt

SEQ ID NO: 330128 - DNA, 15 bp, Homo sapiens
ccatcctaagtgctt

SEQ ID NO: 330129 - DNA, 15 bp, Homo sapiens
accatcctaagtgct

SEQ ID NO: 330130 - DNA, 15 bp, Homo sapiens
caccatcctaagtgc

SEQ ID NO: 330131 - DNA, 15 bp, Homo sapiens
ccaccatcctaagtg

SEQ ID NO: 330132 - DNA, 15 bp, Homo sapiens
gccaccatcctaagt

SEQ ID NO: 330133 - DNA, 15 bp, Homo sapiens
tgccaccatcctaag

SEQ ID NO: 330134 - DNA, 15 bp, Homo sapiens
gtgccaccatcctaa

SEQ ID NO: 330135 - DNA, 15 bp, Homo sapiens
tgtgccaccatccta

SEQ ID NO: 330136 - DNA, 15 bp, Homo sapiens
atgtgccaccatcct

SEQ ID NO: 330137 - DNA, 15 bp, Homo sapiens
catgtgccaccatcc

SEQ ID NO: 330138 - DNA, 15 bp, Homo sapiens
acatgtgccaccatc

SEQ ID NO: 330139 - DNA, 15 bp, Homo sapiens
cacatgtgccaccat

SEQ ID NO: 330140 - DNA, 15 bp, Homo sapiens
ccacatgtgccacca

SEQ ID NO: 330141 - DNA, 15 bp, Homo sapiens
accacatgtgccacc

SEQ ID NO: 330142 - DNA, 15 bp, Homo sapiens
caccacatgtgccac

SEQ ID NO: 330143 - DNA, 15 bp, Homo sapiens
tcaccacatgtgcca

SEQ ID NO: 330144 - DNA, 15 bp, Homo sapiens
ctcaccacatgtgcc

SEQ ID NO: 330145 - DNA, 15 bp, Homo sapiens
gctcaccacatgtgc

SEQ ID NO: 330146 - DNA, 15 bp, Homo sapiens
tgctcaccacatgtg

SEQ ID NO: 330147 - DNA, 15 bp, Homo sapiens
gtgctcaccacatgt

SEQ ID NO: 330148 - DNA, 15 bp, Homo sapiens
agtgctcaccacatg

SEQ ID NO: 330149 - DNA, 15 bp, Homo sapiens
cagtgctcaccacat

SEQ ID NO: 330150 - DNA, 15 bp, Homo sapiens
ccagtgctcaccaca

SEQ ID NO: 330151 - DNA, 15 bp, Homo sapiens
cccagtgctcaccac

SEQ ID NO: 330152 - DNA, 15 bp, Homo sapiens
tcccagtgctcacca

SEQ ID NO: 330153 - DNA, 15 bp, Homo sapiens
ttcccagtgctcacc

SEQ ID NO: 330154 - DNA, 15 bp, Homo sapiens
tttcccagtgctcac

SEQ ID NO: 330155 - DNA, 15 bp, Homo sapiens
ctttcccagtgctca

SEQ ID NO: 330156 - DNA, 15 bp, Homo sapiens
tctttcccagtgctc

SEQ ID NO: 330157 - DNA, 15 bp, Homo sapiens
ttctttcccagtgct

SEQ ID NO: 330158 - DNA, 15 bp, Homo sapiens
gttctttcccagtgc

SEQ ID NO: 330159 - DNA, 15 bp, Homo sapiens
agttctttcccagtg

SEQ ID NO: 330160 - DNA, 15 bp, Homo sapiens
cagttctttcccagt

SEQ ID NO: 330161 - DNA, 15 bp, Homo sapiens
acagttctttcccag

SEQ ID NO: 330162 - DNA, 15 bp, Homo sapiens
tacagttctttccca

SEQ ID NO: 330163 - DNA, 15 bp, Homo sapiens
ttacagttctttccc

SEQ ID NO: 330164 - DNA, 15 bp, Homo sapiens
tttacagttctttcc

SEQ ID NO: 330165 - DNA, 15 bp, Homo sapiens
gtttacagttctttc

SEQ ID NO: 330166 - DNA, 15 bp, Homo sapiens
tgtttacagttcttt

SEQ ID NO: 330167 - DNA, 15 bp, Homo sapiens
ttgtttacagttctt

SEQ ID NO: 330168 - DNA, 15 bp, Homo sapiens
cttgtttacagttct

SEQ ID NO: 330169 - DNA, 15 bp, Homo sapiens
gcttgtttacagttc

SEQ ID NO: 330170 - DNA, 15 bp, Homo sapiens
agcttgtttacagtt

SEQ ID NO: 330171 - DNA, 15 bp, Homo sapiens
tagcttgtttacagt

SEQ ID NO: 330172 - DNA, 15 bp, Homo sapiens
ctagcttgtttacag

SEQ ID NO: 330173 - DNA, 15 bp, Homo sapiens
gctagcttgtttaca

SEQ ID NO: 330174 - DNA, 15 bp, Homo sapiens
agctagcttgtttac

SEQ ID NO: 330175 - DNA, 15 bp, Homo sapiens
cagctagcttgttta

SEQ ID NO: 330176 - DNA, 15 bp, Homo sapiens
tcagctagcttgttt

SEQ ID NO: 330177 - DNA, 15 bp, Homo sapiens
ttcagctagcttgtt

SEQ ID NO: 330178 - DNA, 15 bp, Homo sapiens
tttcagctagcttgt

SEQ ID NO: 330179 - DNA, 15 bp, Homo sapiens
gtttcagctagcttg

SEQ ID NO: 330180 - DNA, 15 bp, Homo sapiens
agtttcagctagctt

SEQ ID NO: 330181 - DNA, 15 bp, Homo sapiens
tagtttcagctagct

SEQ ID NO: 330182 - DNA, 15 bp, Homo sapiens
atagtttcagctagc

SEQ ID NO: 330183 - DNA, 15 bp, Homo sapiens
aatagtttcagctag

SEQ ID NO: 330184 - DNA, 15 bp, Homo sapiens
taatagtttcagcta

SEQ ID NO: 330185 - DNA, 15 bp, Homo sapiens
gtaatagtttcagct

SEQ ID NO: 330186 - DNA, 15 bp, Homo sapiens
agtaatagtttcagc

SEQ ID NO: 330187 - DNA, 15 bp, Homo sapiens
cagtaatagtttcag

SEQ ID NO: 330188 - DNA, 15 bp, Homo sapiens
acagtaatagtttca

SEQ ID NO: 330189 - DNA, 15 bp, Homo sapiens
cacagtaatagtttc

SEQ ID NO: 330190 - DNA, 15 bp, Homo sapiens
tcacagtaatagttt

SEQ ID NO: 330191 - DNA, 15 bp, Homo sapiens
atcacagtaatagtt

SEQ ID NO: 330192 - DNA, 15 bp, Homo sapiens
gatcacagtaatagt

SEQ ID NO: 330193 - DNA, 15 bp, Homo sapiens
agatcacagtaatag

SEQ ID NO: 330194 - DNA, 15 bp, Homo sapiens
aagatcacagtaata

SEQ ID NO: 330195 - DNA, 15 bp, Homo sapiens
taagatcacagtaat

SEQ ID NO: 330196 - DNA, 15 bp, Homo sapiens
ttaagatcacagtaa

SEQ ID NO: 330197 - DNA, 15 bp, Homo sapiens
tttaagatcacagta

SEQ ID NO: 330198 - DNA, 15 bp, Homo sapiens
atttaagatcacagt

SEQ ID NO: 330199 - DNA, 15 bp, Homo sapiens
catttaagatcacag

SEQ ID NO: 330200 - DNA, 15 bp, Homo sapiens
gcatttaagatcaca

SEQ ID NO: 330201 - DNA, 15 bp, Homo sapiens
ggcatttaagatcac

SEQ ID NO: 330202 - DNA, 15 bp, Homo sapiens
aggcatttaagatca

SEQ ID NO: 330203 - DNA, 15 bp, Homo sapiens
taggcatttaagatc

SEQ ID NO: 330204 - DNA, 15 bp, Homo sapiens
ctaggcatttaagat

SEQ ID NO: 330205 - DNA, 15 bp, Homo sapiens
tctaggcatttaaga

SEQ ID NO: 330206 - DNA, 15 bp, Homo sapiens
ttctaggcatttaag

SEQ ID NO: 330207 - DNA, 15 bp, Homo sapiens
attctaggcatttaa

SEQ ID NO: 330208 - DNA, 15 bp, Homo sapiens
aattctaggcattta

SEQ ID NO: 330209 - DNA, 15 bp, Homo sapiens
aaattctaggcattt

SEQ ID NO: 330210 - DNA, 15 bp, Homo sapiens
taaattctaggcatt

SEQ ID NO: 330211 - DNA, 15 bp, Homo sapiens
ttaaattctaggcat

SEQ ID NO: 330212 - DNA, 15 bp, Homo sapiens
tttaaattctaggca

SEQ ID NO: 330213 - DNA, 15 bp, Homo sapiens
atttaaattctaggc

SEQ ID NO: 330214 - DNA, 15 bp, Homo sapiens
gatttaaattctagg

SEQ ID NO: 330215 - DNA, 15 bp, Homo sapiens
tgatttaaattctag

SEQ ID NO: 330216 - DNA, 15 bp, Homo sapiens
atgatttaaattcta

SEQ ID NO: 330217 - DNA, 15 bp, Homo sapiens
aatgatttaaattct

SEQ ID NO: 330218 - DNA, 15 bp, Homo sapiens
caatgatttaaattc

SEQ ID NO: 330219 - DNA, 15 bp, Homo sapiens
ccaatgatttaaatt

SEQ ID NO: 330220 - DNA, 15 bp, Homo sapiens
accaatgatttaaat

SEQ ID NO: 330221 - DNA, 15 bp, Homo sapiens
aaccaatgatttaaa

SEQ ID NO: 330222 - DNA, 15 bp, Homo sapiens
gaaccaatgatttaa

SEQ ID NO: 330223 - DNA, 15 bp, Homo sapiens
agaaccaatgattta

SEQ ID NO: 330224 - DNA, 15 bp, Homo sapiens
gagaaccaatgattt

SEQ ID NO: 330225 - DNA, 15 bp, Homo sapiens
ggagaaccaatgatt

SEQ ID NO: 330226 - DNA, 15 bp, Homo sapiens
tggagaaccaatgat

SEQ ID NO: 330227 - DNA, 15 bp, Homo sapiens
ttggagaaccaatga

SEQ ID NO: 330228 - DNA, 15 bp, Homo sapiens
tttggagaaccaatg

SEQ ID NO: 330229 - DNA, 15 bp, Homo sapiens
ttttggagaaccaat

SEQ ID NO: 330230 - DNA, 15 bp, Homo sapiens
cttttggagaaccaa

SEQ ID NO: 330231 - DNA, 15 bp, Homo sapiens
tcttttggagaacca

SEQ ID NO: 330232 - DNA, 15 bp, Homo sapiens
ctcttttggagaacc

SEQ ID NO: 330233 - DNA, 15 bp, Homo sapiens
tctcttttggagaac

SEQ ID NO: 330234 - DNA, 15 bp, Homo sapiens
ctctcttttggagaa

SEQ ID NO: 330235 - DNA, 15 bp, Homo sapiens
cctctcttttggaga

SEQ ID NO: 330236 - DNA, 15 bp, Homo sapiens
acctctcttttggag

SEQ ID NO: 330237 - DNA, 15 bp, Homo sapiens
tacctctcttttgga

SEQ ID NO: 330238 - DNA, 15 bp, Homo sapiens
ttacctctcttttgg

SEQ ID NO: 330239 - DNA, 15 bp, Homo sapiens
cttacctctcttttg

SEQ ID NO: 330240 - DNA, 15 bp, Homo sapiens
tcttacctctctttt

SEQ ID NO: 330241 - DNA, 15 bp, Homo sapiens
ctcttacctctcttt

SEQ ID NO: 330242 - DNA, 15 bp, Homo sapiens
tctcttacctctctt

SEQ ID NO: 330243 - DNA, 15 bp, Homo sapiens
ctctcttacctctct

SEQ ID NO: 330244 - DNA, 15 bp, Homo sapiens
cctctcttacctctc

SEQ ID NO: 330245 - DNA, 15 bp, Homo sapiens
ccctctcttacctct

SEQ ID NO: 330246 - DNA, 15 bp, Homo sapiens
gccctctcttacctc

SEQ ID NO: 330247 - DNA, 15 bp, Homo sapiens
tgccctctcttacct

SEQ ID NO: 330248 - DNA, 15 bp, Homo sapiens
ctgccctctcttacc

SEQ ID NO: 330249 - DNA, 15 bp, Homo sapiens
actgccctctcttac

SEQ ID NO: 330250 - DNA, 15 bp, Homo sapiens
gactgccctctctta

SEQ ID NO: 330251 - DNA, 15 bp, Homo sapiens
tgactgccctctctt

SEQ ID NO: 330252 - DNA, 15 bp, Homo sapiens
atgactgccctctct

SEQ ID NO: 330253 - DNA, 15 bp, Homo sapiens
tatgactgccctctc

SEQ ID NO: 330254 - DNA, 15 bp, Homo sapiens
ttatgactgccctct

SEQ ID NO: 330255 - DNA, 15 bp, Homo sapiens
gttatgactgccctc

SEQ ID NO: 330256 - DNA, 15 bp, Homo sapiens
tgttatgactgccct

SEQ ID NO: 330257 - DNA, 15 bp, Homo sapiens
ctgttatgactgccc

SEQ ID NO: 330258 - DNA, 15 bp, Homo sapiens
tctgttatgactgcc

SEQ ID NO: 330259 - DNA, 15 bp, Homo sapiens
ctctgttatgactgc

SEQ ID NO: 330260 - DNA, 15 bp, Homo sapiens
tctctgttatgactg

SEQ ID NO: 330261 - DNA, 15 bp, Homo sapiens
atctctgttatgact

SEQ ID NO: 330262 - DNA, 15 bp, Homo sapiens
catctctgttatgac

SEQ ID NO: 330263 - DNA, 15 bp, Homo sapiens
tcatctctgttatga

SEQ ID NO: 330264 - DNA, 15 bp, Homo sapiens
ttcatctctgttatg

SEQ ID NO: 330265 - DNA, 15 bp, Homo sapiens
gttcatctctgttat

SEQ ID NO: 330266 - DNA, 15 bp, Homo sapiens
agttcatctctgtta

SEQ ID NO: 330267 - DNA, 15 bp, Homo sapiens
cagttcatctctgtt

SEQ ID NO: 330268 - DNA, 15 bp, Homo sapiens
tcagttcatctctgt

SEQ ID NO: 330269 - DNA, 15 bp, Homo sapiens
gtcagttcatctctg

SEQ ID NO: 330270 - DNA, 15 bp, Homo sapiens
ggtcagttcatctct

SEQ ID NO: 330271 - DNA, 15 bp, Homo sapiens
tggtcagttcatctc

SEQ ID NO: 330272 - DNA, 15 bp, Homo sapiens
ttggtcagttcatct

SEQ ID NO: 330273 - DNA, 15 bp, Homo sapiens
tttggtcagttcatc

SEQ ID NO: 330274 - DNA, 15 bp, Homo sapiens
ttttggtcagttcat

SEQ ID NO: 330275 - DNA, 15 bp, Homo sapiens
gttttggtcagttca

SEQ ID NO: 330276 - DNA, 15 bp, Homo sapiens
agttttggtcagttc

SEQ ID NO: 330277 - DNA, 15 bp, Homo sapiens
tagttttggtcagtt

SEQ ID NO: 330278 - DNA, 15 bp, Homo sapiens
ttagttttggtcagt

SEQ ID NO: 330279 - DNA, 15 bp, Homo sapiens
attagttttggtcag

SEQ ID NO: 330280 - DNA, 15 bp, Homo sapiens
cattagttttggtca

SEQ ID NO: 330281 - DNA, 15 bp, Homo sapiens
ccattagttttggtc

SEQ ID NO: 330282 - DNA, 15 bp, Homo sapiens
cccattagttttggt

SEQ ID NO: 330283 - DNA, 15 bp, Homo sapiens
acccattagttttgg

SEQ ID NO: 330284 - DNA, 15 bp, Homo sapiens
aacccattagttttg

SEQ ID NO: 330285 - DNA, 15 bp, Homo sapiens
caacccattagtttt

SEQ ID NO: 330286 - DNA, 15 bp, Homo sapiens
ccaacccattagttt

SEQ ID NO: 330287 - DNA, 15 bp, Homo sapiens
cccaacccattagtt

SEQ ID NO: 330288 - DNA, 15 bp, Homo sapiens
gcccaacccattagt

SEQ ID NO: 330289 - DNA, 15 bp, Homo sapiens
tgcccaacccattag

SEQ ID NO: 330290 - DNA, 15 bp, Homo sapiens
ttgcccaacccatta

SEQ ID NO: 330291 - DNA, 15 bp, Homo sapiens
gttgcccaacccatt

SEQ ID NO: 330292 - DNA, 15 bp, Homo sapiens
ggttgcccaacccat

SEQ ID NO: 330293 - DNA, 15 bp, Homo sapiens
gggttgcccaaccca

SEQ ID NO: 330294 - DNA, 15 bp, Homo sapiens
agggttgcccaaccc

SEQ ID NO: 330295 - DNA, 15 bp, Homo sapiens
cagggttgcccaacc

SEQ ID NO: 330296 - DNA, 15 bp, Homo sapiens
acagggttgcccaac

SEQ ID NO: 330297 - DNA, 15 bp, Homo sapiens
tacagggttgcccaa

SEQ ID NO: 330298 - DNA, 15 bp, Homo sapiens
ctacagggttgccca

SEQ ID NO: 330299 - DNA, 15 bp, Homo sapiens
cctacagggttgccc

SEQ ID NO: 330300 - DNA, 15 bp, Homo sapiens
gcctacagggttgcc

SEQ ID NO: 330301 - DNA, 15 bp, Homo sapiens
agcctacagggttgc

SEQ ID NO: 330302 - DNA, 15 bp, Homo sapiens
cagcctacagggttg

SEQ ID NO: 330303 - DNA, 15 bp, Homo sapiens
gcagcctacagggtt

SEQ ID NO: 330304 - DNA, 15 bp, Homo sapiens
tgcagcctacagggt

SEQ ID NO: 330305 - DNA, 15 bp, Homo sapiens
atgcagcctacaggg

SEQ ID NO: 330306 - DNA, 15 bp, Homo sapiens
aatgcagcctacagg

SEQ ID NO: 330307 - DNA, 15 bp, Homo sapiens
taatgcagcctacag

SEQ ID NO: 330308 - DNA, 15 bp, Homo sapiens
ttaatgcagcctaca

SEQ ID NO: 330309 - DNA, 15 bp, Homo sapiens
cttaatgcagcctac

SEQ ID NO: 330310 - DNA, 15 bp, Homo sapiens
gcttaatgcagccta

SEQ ID NO: 330311 - DNA, 15 bp, Homo sapiens
ggcttaatgcagcct

SEQ ID NO: 330312 - DNA, 15 bp, Homo sapiens
tggcttaatgcagcc

SEQ ID NO: 330313 - DNA, 15 bp, Homo sapiens
gtggcttaatgcagc

SEQ ID NO: 330314 - DNA, 15 bp, Homo sapiens
agtggcttaatgcag

SEQ ID NO: 330315 - DNA, 15 bp, Homo sapiens
tagtggcttaatgca

SEQ ID NO: 330316 - DNA, 15 bp, Homo sapiens
gtagtggcttaatgc

SEQ ID NO: 330317 - DNA, 15 bp, Homo sapiens
agtagtggcttaatg

SEQ ID NO: 330318 - DNA, 15 bp, Homo sapiens
cagtagtggcttaat

SEQ ID NO: 330319 - DNA, 15 bp, Homo sapiens
ccagtagtggcttaa

SEQ ID NO: 330320 - DNA, 15 bp, Homo sapiens
cccagtagtggctta

SEQ ID NO: 330321 - DNA, 15 bp, Homo sapiens
tcccagtagtggctt

SEQ ID NO: 330322 - DNA, 15 bp, Homo sapiens
ttcccagtagtggct

SEQ ID NO: 330323 - DNA, 15 bp, Homo sapiens
tttcccagtagtggc

SEQ ID NO: 330324 - DNA, 15 bp, Homo sapiens
ttttcccagtagtgg

SEQ ID NO: 330325 - DNA, 15 bp, Homo sapiens
attttcccagtagtg

SEQ ID NO: 330326 - DNA, 15 bp, Homo sapiens
cattttcccagtagt

SEQ ID NO: 330327 - DNA, 15 bp, Homo sapiens
gcattttcccagtag

SEQ ID NO: 330328 - DNA, 15 bp, Homo sapiens
tgcattttcccagta

SEQ ID NO: 330329 - DNA, 15 bp, Homo sapiens
ttgcattttcccagt

SEQ ID NO: 330330 - DNA, 15 bp, Homo sapiens
cttgcattttcccag

SEQ ID NO: 330331 - DNA, 15 bp, Homo sapiens
tcttgcattttccca

SEQ ID NO: 330332 - DNA, 15 bp, Homo sapiens
ctcttgcattttccc

SEQ ID NO: 330333 - DNA, 15 bp, Homo sapiens
gctcttgcattttcc

SEQ ID NO: 330334 - DNA, 15 bp, Homo sapiens
agctcttgcattttc

SEQ ID NO: 330335 - DNA, 15 bp, Homo sapiens
tagctcttgcatttt

SEQ ID NO: 330336 - DNA, 15 bp, Homo sapiens
ctagctcttgcattt

SEQ ID NO: 330337 - DNA, 15 bp, Homo sapiens
tctagctcttgcatt

SEQ ID NO: 330338 - DNA, 15 bp, Homo sapiens
ttctagctcttgcat

SEQ ID NO: 330339 - DNA, 15 bp, Homo sapiens
tttctagctcttgca

SEQ ID NO: 330340 - DNA, 15 bp, Homo sapiens
ttttctagctcttgc

SEQ ID NO: 330341 - DNA, 15 bp, Homo sapiens
cttttctagctcttg

SEQ ID NO: 330342 - DNA, 15 bp, Homo sapiens
tcttttctagctctt

SEQ ID NO: 330343 - DNA, 15 bp, Homo sapiens
ctcttttctagctct

SEQ ID NO: 330344 - DNA, 15 bp, Homo sapiens
tctcttttctagctc

SEQ ID NO: 330345 - DNA, 15 bp, Homo sapiens
ctctcttttctagct

SEQ ID NO: 330346 - DNA, 15 bp, Homo sapiens
actctcttttctagc

SEQ ID NO: 330347 - DNA, 15 bp, Homo sapiens
aactctcttttctag

SEQ ID NO: 330348 - DNA, 15 bp, Homo sapiens
gaactctcttttcta

SEQ ID NO: 330349 - DNA, 15 bp, Homo sapiens
agaactctcttttct

SEQ ID NO: 330350 - DNA, 15 bp, Homo sapiens
aagaactctcttttc

SEQ ID NO: 330351 - DNA, 15 bp, Homo sapiens
aaagaactctctttt

SEQ ID NO: 330352 - DNA, 15 bp, Homo sapiens
aaaagaactctcttt

SEQ ID NO: 330353 - DNA, 15 bp, Homo sapiens
gaaaagaactctctt

SEQ ID NO: 330354 - DNA, 15 bp, Homo sapiens
agaaaagaactctct

SEQ ID NO: 330355 - DNA, 15 bp, Homo sapiens
cagaaaagaactctc

SEQ ID NO: 330356 - DNA, 15 bp, Homo sapiens
gcagaaaagaactct

SEQ ID NO: 330357 - DNA, 15 bp, Homo sapiens
tgcagaaaagaactc

SEQ ID NO: 330358 - DNA, 15 bp, Homo sapiens
ttgcagaaaagaact

SEQ ID NO: 330359 - DNA, 15 bp, Homo sapiens
cttgcagaaaagaac

SEQ ID NO: 330360 - DNA, 15 bp, Homo sapiens
tcttgcagaaaagaa

SEQ ID NO: 330361 - DNA, 15 bp, Homo sapiens
atcttgcagaaaaga

SEQ ID NO: 330362 - DNA, 15 bp, Homo sapiens
catcttgcagaaaag

SEQ ID NO: 330363 - DNA, 15 bp, Homo sapiens
gcatcttgcagaaaa

SEQ ID NO: 330364 - DNA, 15 bp, Homo sapiens
tgcatcttgcagaaa

SEQ ID NO: 330365 - DNA, 15 bp, Homo sapiens
ctgcatcttgcagaa

SEQ ID NO: 330366 - DNA, 15 bp, Homo sapiens
gctgcatcttgcaga

SEQ ID NO: 330367 - DNA, 15 bp, Homo sapiens
tgctgcatcttgcag

SEQ ID NO: 330368 - DNA, 15 bp, Homo sapiens
ttgctgcatcttgca

SEQ ID NO: 330369 - DNA, 15 bp, Homo sapiens
cttgctgcatcttgc

SEQ ID NO: 330370 - DNA, 15 bp, Homo sapiens
ccttgctgcatcttg

SEQ ID NO: 330371 - DNA, 15 bp, Homo sapiens
tccttgctgcatctt

SEQ ID NO: 330372 - DNA, 15 bp, Homo sapiens
ttccttgctgcatct

SEQ ID NO: 330373 - DNA, 15 bp, Homo sapiens
gttccttgctgcatc

SEQ ID NO: 330374 - DNA, 15 bp, Homo sapiens
tgttccttgctgcat

SEQ ID NO: 330375 - DNA, 15 bp, Homo sapiens
gtgttccttgctgca

SEQ ID NO: 330376 - DNA, 15 bp, Homo sapiens
tgtgttccttgctgc

SEQ ID NO: 330377 - DNA, 15 bp, Homo sapiens
ttgtgttccttgctg

SEQ ID NO: 330378 - DNA, 15 bp, Homo sapiens
cttgtgttccttgct

SEQ ID NO: 330379 - DNA, 15 bp, Homo sapiens
tcttgtgttccttgc

SEQ ID NO: 330380 - DNA, 15 bp, Homo sapiens
ctcttgtgttccttg

SEQ ID NO: 330381 - DNA, 15 bp, Homo sapiens
actcttgtgttcctt

SEQ ID NO: 330382 - DNA, 15 bp, Homo sapiens
gactcttgtgttcct

SEQ ID NO: 330383 - DNA, 15 bp, Homo sapiens
tgactcttgtgttcc

SEQ ID NO: 330384 - DNA, 15 bp, Homo sapiens
ttgactcttgtgttc

SEQ ID NO: 330385 - DNA, 15 bp, Homo sapiens
tttgactcttgtgtt

SEQ ID NO: 330386 - DNA, 15 bp, Homo sapiens
atttgactcttgtgt

SEQ ID NO: 330387 - DNA, 15 bp, Homo sapiens
tatttgactcttgtg

SEQ ID NO: 330388 - DNA, 15 bp, Homo sapiens
ctatttgactcttgt

SEQ ID NO: 330389 - DNA, 15 bp, Homo sapiens
gctatttgactcttg

SEQ ID NO: 330390 - DNA, 15 bp, Homo sapiens
tgctatttgactctt

SEQ ID NO: 330391 - DNA, 15 bp, Homo sapiens
ttgctatttgactct

SEQ ID NO: 330392 - DNA, 15 bp, Homo sapiens
gttgctatttgactc

SEQ ID NO: 330393 - DNA, 15 bp, Homo sapiens
ggttgctatttgact

SEQ ID NO: 330394 - DNA, 15 bp, Homo sapiens
aggttgctatttgac

SEQ ID NO: 330395 - DNA, 15 bp, Homo sapiens
taggttgctatttga

SEQ ID NO: 330396 - DNA, 15 bp, Homo sapiens
ttaggttgctatttg

SEQ ID NO: 330397 - DNA, 15 bp, Homo sapiens
tttaggttgctattt

SEQ ID NO: 330398 - DNA, 15 bp, Homo sapiens
ttttaggttgctatt

SEQ ID NO: 330399 - DNA, 15 bp, Homo sapiens
gttttaggttgctat

SEQ ID NO: 330400 - DNA, 15 bp, Homo sapiens
agttttaggttgcta

SEQ ID NO: 330401 - DNA, 15 bp, Homo sapiens
aagttttaggttgct

SEQ ID NO: 330402 - DNA, 15 bp, Homo sapiens
aaagttttaggttgc

SEQ ID NO: 330403 - DNA, 15 bp, Homo sapiens
taaagttttaggttg

SEQ ID NO: 330404 - DNA, 15 bp, Homo sapiens
gtaaagttttaggtt

SEQ ID NO: 330405 - DNA, 15 bp, Homo sapiens
tgtaaagttttaggt

SEQ ID NO: 330406 - DNA, 15 bp, Homo sapiens
ttgtaaagttttagg

SEQ ID NO: 330407 - DNA, 15 bp, Homo sapiens
tttgtaaagttttag

SEQ ID NO: 330408 - DNA, 15 bp, Homo sapiens
ttttgtaaagtttta

SEQ ID NO: 330409 - DNA, 15 bp, Homo sapiens
cttttgtaaagtttt

SEQ ID NO: 330410 - DNA, 15 bp, Homo sapiens
tcttttgtaaagttt

SEQ ID NO: 330411 - DNA, 15 bp, Homo sapiens
gtcttttgtaaagtt

SEQ ID NO: 330412 - DNA, 15 bp, Homo sapiens
tgtcttttgtaaagt

SEQ ID NO: 330413 - DNA, 15 bp, Homo sapiens
atgtcttttgtaaag

SEQ ID NO: 330414 - DNA, 15 bp, Homo sapiens
gatgtcttttgtaaa

SEQ ID NO: 330415 - DNA, 15 bp, Homo sapiens
agatgtcttttgtaa

SEQ ID NO: 330416 - DNA, 15 bp, Homo sapiens
aagatgtcttttgta

SEQ ID NO: 330417 - DNA, 15 bp, Homo sapiens
taagatgtcttttgt

SEQ ID NO: 330418 - DNA, 15 bp, Homo sapiens
ttaagatgtcttttg

SEQ ID NO: 330419 - DNA, 15 bp, Homo sapiens
cttaagatgtctttt

SEQ ID NO: 330420 - DNA, 15 bp, Homo sapiens
acttaagatgtcttt

SEQ ID NO: 330421 - DNA, 15 bp, Homo sapiens
gacttaagatgtctt

SEQ ID NO: 330422 - DNA, 15 bp, Homo sapiens
tgacttaagatgtct

SEQ ID NO: 330423 - DNA, 15 bp, Homo sapiens
ctgacttaagatgtc

SEQ ID NO: 330424 - DNA, 15 bp, Homo sapiens
actgacttaagatgt

SEQ ID NO: 330425 - DNA, 15 bp, Homo sapiens
tactgacttaagatg

SEQ ID NO: 330426 - DNA, 15 bp, Homo sapiens
ctactgacttaagat

SEQ ID NO: 330427 - DNA, 15 bp, Homo sapiens
cctactgacttaaga

SEQ ID NO: 330428 - DNA, 15 bp, Homo sapiens
tcctactgacttaag

SEQ ID NO: 330429 - DNA, 15 bp, Homo sapiens
atcctactgacttaa

SEQ ID NO: 330430 - DNA, 15 bp, Homo sapiens
gatcctactgactta

SEQ ID NO: 330431 - DNA, 15 bp, Homo sapiens
tgatcctactgactt

SEQ ID NO: 330432 - DNA, 15 bp, Homo sapiens
ttgatcctactgact

SEQ ID NO: 330433 - DNA, 15 bp, Homo sapiens
attgatcctactgac

SEQ ID NO: 330434 - DNA, 15 bp, Homo sapiens
aattgatcctactga

SEQ ID NO: 330435 - DNA, 15 bp, Homo sapiens
taattgatcctactg

SEQ ID NO: 330436 - DNA, 15 bp, Homo sapiens
gtaattgatcctact

SEQ ID NO: 330437 - DNA, 15 bp, Homo sapiens
ggtaattgatcctac

SEQ ID NO: 330438 - DNA, 15 bp, Homo sapiens
tggtaattgatccta

SEQ ID NO: 330439 - DNA, 15 bp, Homo sapiens
ttggtaattgatcct

SEQ ID NO: 330440 - DNA, 15 bp, Homo sapiens
attggtaattgatcc

SEQ ID NO: 330441 - DNA, 15 bp, Homo sapiens
cattggtaattgatc

SEQ ID NO: 330442 - DNA, 15 bp, Homo sapiens
tcattggtaattgat

SEQ ID NO: 330443 - DNA, 15 bp, Homo sapiens
ttcattggtaattga

SEQ ID NO: 330444 - DNA, 15 bp, Homo sapiens
attcattggtaattg

SEQ ID NO: 330445 - DNA, 15 bp, Homo sapiens
cattcattggtaatt

SEQ ID NO: 330446 - DNA, 15 bp, Homo sapiens
ccattcattggtaat

SEQ ID NO: 330447 - DNA, 15 bp, Homo sapiens
gccattcattggtaa

SEQ ID NO: 330448 - DNA, 15 bp, Homo sapiens
agccattcattggta

SEQ ID NO: 330449 - DNA, 15 bp, Homo sapiens
cagccattcattggt

SEQ ID NO: 330450 - DNA, 15 bp, Homo sapiens
ccagccattcattgg

SEQ ID NO: 330451 - DNA, 15 bp, Homo sapiens
tccagccattcattg

SEQ ID NO: 330452 - DNA, 15 bp, Homo sapiens
ctccagccattcatt

SEQ ID NO: 330453 - DNA, 15 bp, Homo sapiens
actccagccattcat

SEQ ID NO: 330454 - DNA, 15 bp, Homo sapiens
aactccagccattca

SEQ ID NO: 330455 - DNA, 15 bp, Homo sapiens
caactccagccattc

SEQ ID NO: 330456 - DNA, 15 bp, Homo sapiens
tcaactccagccatt

SEQ ID NO: 330457 - DNA, 15 bp, Homo sapiens
ctcaactccagccat

SEQ ID NO: 330458 - DNA, 15 bp, Homo sapiens
tctcaactccagcca

SEQ ID NO: 330459 - DNA, 15 bp, Homo sapiens
ctctcaactccagcc

SEQ ID NO: 330460 - DNA, 15 bp, Homo sapiens
gctctcaactccagc

SEQ ID NO: 330461 - DNA, 15 bp, Homo sapiens
ggctctcaactccag

SEQ ID NO: 330462 - DNA, 15 bp, Homo sapiens
cggctctcaactcca

SEQ ID NO: 330463 - DNA, 15 bp, Homo sapiens
ccggctctcaactcc

SEQ ID NO: 330464 - DNA, 15 bp, Homo sapiens
cccggctctcaactc

SEQ ID NO: 330465 - DNA, 15 bp, Homo sapiens
ccccggctctcaact

SEQ ID NO: 330466 - DNA, 15 bp, Homo sapiens
tccccggctctcaac

SEQ ID NO: 330467 - DNA, 15 bp, Homo sapiens
ttccccggctctcaa

SEQ ID NO: 330468 - DNA, 15 bp, Homo sapiens
tttccccggctctca

SEQ ID NO: 330469 - DNA, 15 bp, Homo sapiens
ctttccccggctctc

SEQ ID NO: 330470 - DNA, 15 bp, Homo sapiens
actttccccggctct

SEQ ID NO: 330471 - DNA, 15 bp, Homo sapiens
gactttccccggctc

SEQ ID NO: 330472 - DNA, 15 bp, Homo sapiens
tgactttccccggct

SEQ ID NO: 330473 - DNA, 15 bp, Homo sapiens
gtgactttccccggc

SEQ ID NO: 330474 - DNA, 15 bp, Homo sapiens
agtgactttccccgg

SEQ ID NO: 330475 - DNA, 15 bp, Homo sapiens
aagtgactttccccg

SEQ ID NO: 330476 - DNA, 15 bp, Homo sapiens
aaagtgactttcccc

SEQ ID NO: 330477 - DNA, 15 bp, Homo sapiens
caaagtgactttccc

SEQ ID NO: 330478 - DNA, 15 bp, Homo sapiens
acaaagtgactttcc

SEQ ID NO: 330479 - DNA, 15 bp, Homo sapiens
gacaaagtgactttc

SEQ ID NO: 330480 - DNA, 15 bp, Homo sapiens
agacaaagtgacttt

SEQ ID NO: 330481 - DNA, 15 bp, Homo sapiens
aagacaaagtgactt

SEQ ID NO: 330482 - DNA, 15 bp, Homo sapiens
caagacaaagtgact

SEQ ID NO: 330483 - DNA, 15 bp, Homo sapiens
gcaagacaaagtgac

SEQ ID NO: 330484 - DNA, 15 bp, Homo sapiens
tgcaagacaaagtga

SEQ ID NO: 330485 - DNA, 15 bp, Homo sapiens
ctgcaagacaaagtg

SEQ ID NO: 330486 - DNA, 15 bp, Homo sapiens
tctgcaagacaaagt

SEQ ID NO: 330487 - DNA, 15 bp, Homo sapiens
atctgcaagacaaag

SEQ ID NO: 330488 - DNA, 15 bp, Homo sapiens
catctgcaagacaaa

SEQ ID NO: 330489 - DNA, 15 bp, Homo sapiens
ccatctgcaagacaa

SEQ ID NO: 330490 - DNA, 15 bp, Homo sapiens
tccatctgcaagaca

SEQ ID NO: 330491 - DNA, 15 bp, Homo sapiens
atccatctgcaagac

SEQ ID NO: 330492 - DNA, 15 bp, Homo sapiens
catccatctgcaaga

SEQ ID NO: 330493 - DNA, 15 bp, Homo sapiens
ccatccatctgcaag

SEQ ID NO: 330494 - DNA, 15 bp, Homo sapiens
tccatccatctgcaa

SEQ ID NO: 330495 - DNA, 15 bp, Homo sapiens
ttccatccatctgca

SEQ ID NO: 330496 - DNA, 15 bp, Homo sapiens
gttccatccatctgc

SEQ ID NO: 330497 - DNA, 15 bp, Homo sapiens
cgttccatccatctg

SEQ ID NO: 330498 - DNA, 15 bp, Homo sapiens
tcgttccatccatct

SEQ ID NO: 330499 - DNA, 15 bp, Homo sapiens
gtcgttccatccatc

SEQ ID NO: 330500 - DNA, 15 bp, Homo sapiens
agtcgttccatccat

SEQ ID NO: 330501 - DNA, 15 bp, Homo sapiens
aagtcgttccatcca

SEQ ID NO: 330502 - DNA, 15 bp, Homo sapiens
aaagtcgttccatcc

SEQ ID NO: 330503 - DNA, 15 bp, Homo sapiens
taaagtcgttccatc

SEQ ID NO: 330504 - DNA, 15 bp, Homo sapiens
ttaaagtcgttccat

SEQ ID NO: 330505 - DNA, 15 bp, Homo sapiens
cttaaagtcgttcca

SEQ ID NO: 330506 - DNA, 15 bp, Homo sapiens
ccttaaagtcgttcc

SEQ ID NO: 330507 - DNA, 15 bp, Homo sapiens
tccttaaagtcgttc

SEQ ID NO: 330508 - DNA, 15 bp, Homo sapiens
ttccttaaagtcgtt

SEQ ID NO: 330509 - DNA, 15 bp, Homo sapiens
cttccttaaagtcgt

SEQ ID NO: 330510 - DNA, 15 bp, Homo sapiens
gcttccttaaagtcg

SEQ ID NO: 330511 - DNA, 15 bp, Homo sapiens
tgcttccttaaagtc

SEQ ID NO: 330512 - DNA, 15 bp, Homo sapiens
ctgcttccttaaagt

SEQ ID NO: 330513 - DNA, 15 bp, Homo sapiens
actgcttccttaaag

SEQ ID NO: 330514 - DNA, 15 bp, Homo sapiens
tactgcttccttaaa

SEQ ID NO: 330515 - DNA, 15 bp, Homo sapiens
ctactgcttccttaa

SEQ ID NO: 330516 - DNA, 15 bp, Homo sapiens
cctactgcttcctta

SEQ ID NO: 330517 - DNA, 15 bp, Homo sapiens
ccctactgcttcctt

SEQ ID NO: 330518 - DNA, 15 bp, Homo sapiens
tccctactgcttcct

SEQ ID NO: 330519 - DNA, 15 bp, Homo sapiens
atccctactgcttcc

SEQ ID NO: 330520 - DNA, 15 bp, Homo sapiens
aatccctactgcttc

SEQ ID NO: 330521 - DNA, 15 bp, Homo sapiens
caatccctactgctt

SEQ ID NO: 330522 - DNA, 15 bp, Homo sapiens
tcaatccctactgct

SEQ ID NO: 330523 - DNA, 15 bp, Homo sapiens
ttcaatccctactgc

SEQ ID NO: 330524 - DNA, 15 bp, Homo sapiens
gttcaatccctactg

SEQ ID NO: 330525 - DNA, 15 bp, Homo sapiens
agttcaatccctact

SEQ ID NO: 330526 - DNA, 15 bp, Homo sapiens
cagttcaatccctac

SEQ ID NO: 330527 - DNA, 15 bp, Homo sapiens
ccagttcaatcccta

SEQ ID NO: 330528 - DNA, 15 bp, Homo sapiens
cccagttcaatccct

SEQ ID NO: 330529 - DNA, 15 bp, Homo sapiens
gcccagttcaatccc

SEQ ID NO: 330530 - DNA, 15 bp, Homo sapiens
agcccagttcaatcc

SEQ ID NO: 330531 - DNA, 15 bp, Homo sapiens
aagcccagttcaatc

SEQ ID NO: 330532 - DNA, 15 bp, Homo sapiens
aaagcccagttcaat

SEQ ID NO: 330533 - DNA, 15 bp, Homo sapiens
caaagcccagttcaa

SEQ ID NO: 330534 - DNA, 15 bp, Homo sapiens
tcaaagcccagttca

SEQ ID NO: 330535 - DNA, 15 bp, Homo sapiens
ttcaaagcccagttc

SEQ ID NO: 330536 - DNA, 15 bp, Homo sapiens
cttcaaagcccagtt

SEQ ID NO: 330537 - DNA, 15 bp, Homo sapiens
tcttcaaagcccagt

SEQ ID NO: 330538 - DNA, 15 bp, Homo sapiens
ttcttcaaagcccag

SEQ ID NO: 330539 - DNA, 15 bp, Homo sapiens
attcttcaaagccca

SEQ ID NO: 330540 - DNA, 15 bp, Homo sapiens
cattcttcaaagccc

SEQ ID NO: 330541 - DNA, 15 bp, Homo sapiens
ccattcttcaaagcc

SEQ ID NO: 330542 - DNA, 15 bp, Homo sapiens
cccattcttcaaagc

SEQ ID NO: 330543 - DNA, 15 bp, Homo sapiens
ccccattcttcaaag

SEQ ID NO: 330544 - DNA, 15 bp, Homo sapiens
tccccattcttcaaa

SEQ ID NO: 330545 - DNA, 15 bp, Homo sapiens
ttccccattcttcaa

SEQ ID NO: 330546 - DNA, 15 bp, Homo sapiens
tttccccattcttca

SEQ ID NO: 330547 - DNA, 15 bp, Homo sapiens
atttccccattcttc

SEQ ID NO: 330548 - DNA, 15 bp, Homo sapiens
aatttccccattctt

SEQ ID NO: 330549 - DNA, 15 bp, Homo sapiens
aaatttccccattct

SEQ ID NO: 330550 - DNA, 15 bp, Homo sapiens
caaatttccccattc

SEQ ID NO: 330551 - DNA, 15 bp, Homo sapiens
tcaaatttccccatt

SEQ ID NO: 330552 - DNA, 15 bp, Homo sapiens
gtcaaatttccccat

SEQ ID NO: 330553 - DNA, 15 bp, Homo sapiens
agtcaaatttcccca

SEQ ID NO: 330554 - DNA, 15 bp, Homo sapiens
tagtcaaatttcccc

SEQ ID NO: 330555 - DNA, 15 bp, Homo sapiens
ctagtcaaatttccc

SEQ ID NO: 330556 - DNA, 15 bp, Homo sapiens
tctagtcaaatttcc

SEQ ID NO: 330557 - DNA, 15 bp, Homo sapiens
atctagtcaaatttc

SEQ ID NO: 330558 - DNA, 15 bp, Homo sapiens
catctagtcaaattt

SEQ ID NO: 330559 - DNA, 15 bp, Homo sapiens
ccatctagtcaaatt

SEQ ID NO: 330560 - DNA, 15 bp, Homo sapiens
cccatctagtcaaat

SEQ ID NO: 330561 - DNA, 15 bp, Homo sapiens
tcccatctagtcaaa

SEQ ID NO: 330562 - DNA, 15 bp, Homo sapiens
ttcccatctagtcaa

SEQ ID NO: 330563 - DNA, 15 bp, Homo sapiens
cttcccatctagtca

SEQ ID NO: 330564 - DNA, 15 bp, Homo sapiens
ccttcccatctagtc

SEQ ID NO: 330565 - DNA, 15 bp, Homo sapiens
cccttcccatctagt

SEQ ID NO: 330566 - DNA, 15 bp, Homo sapiens
gcccttcccatctag

SEQ ID NO: 330567 - DNA, 15 bp, Homo sapiens
agcccttcccatcta

SEQ ID NO: 330568 - DNA, 15 bp, Homo sapiens
aagcccttcccatct

SEQ ID NO: 330569 - DNA, 15 bp, Homo sapiens
aaagcccttcccatc

SEQ ID NO: 330570 - DNA, 15 bp, Homo sapiens
gaaagcccttcccat

SEQ ID NO: 330571 - DNA, 15 bp, Homo sapiens
tgaaagcccttccca

SEQ ID NO: 330572 - DNA, 15 bp, Homo sapiens
ttgaaagcccttccc

SEQ ID NO: 330573 - DNA, 15 bp, Homo sapiens
cttgaaagcccttcc

SEQ ID NO: 330574 - DNA, 15 bp, Homo sapiens
acttgaaagcccttc

SEQ ID NO: 330575 - DNA, 15 bp, Homo sapiens
aacttgaaagccctt

SEQ ID NO: 330576 - DNA, 15 bp, Homo sapiens
caacttgaaagccct

SEQ ID NO: 330577 - DNA, 15 bp, Homo sapiens
tcaacttgaaagccc

SEQ ID NO: 330578 - DNA, 15 bp, Homo sapiens
ctcaacttgaaagcc

SEQ ID NO: 330579 - DNA, 15 bp, Homo sapiens
actcaacttgaaagc

SEQ ID NO: 330580 - DNA, 15 bp, Homo sapiens
tactcaacttgaaag

SEQ ID NO: 330581 - DNA, 15 bp, Homo sapiens
ttactcaacttgaaa

SEQ ID NO: 330582 - DNA, 15 bp, Homo sapiens
tttactcaacttgaa

SEQ ID NO: 330583 - DNA, 15 bp, Homo sapiens
atttactcaacttga

SEQ ID NO: 330584 - DNA, 15 bp, Homo sapiens
tatttactcaacttg

SEQ ID NO: 330585 - DNA, 15 bp, Homo sapiens
ctatttactcaactt

SEQ ID NO: 330586 - DNA, 15 bp, Homo sapiens
actatttactcaact

SEQ ID NO: 330587 - DNA, 15 bp, Homo sapiens
cactatttactcaac

SEQ ID NO: 330588 - DNA, 15 bp, Homo sapiens
acactatttactcaa

SEQ ID NO: 330589 - DNA, 15 bp, Homo sapiens
tacactatttactca

SEQ ID NO: 330590 - DNA, 15 bp, Homo sapiens
ttacactatttactc

SEQ ID NO: 330591 - DNA, 15 bp, Homo sapiens
tttacactatttact

SEQ ID NO: 330592 - DNA, 15 bp, Homo sapiens
gtttacactatttac

SEQ ID NO: 330593 - DNA, 15 bp, Homo sapiens
tgtttacactattta

SEQ ID NO: 330594 - DNA, 15 bp, Homo sapiens
ttgtttacactattt

SEQ ID NO: 330595 - DNA, 15 bp, Homo sapiens
attgtttacactatt

SEQ ID NO: 330596 - DNA, 15 bp, Homo sapiens
tattgtttacactat

SEQ ID NO: 330597 - DNA, 15 bp, Homo sapiens
ctattgtttacacta

SEQ ID NO: 330598 - DNA, 15 bp, Homo sapiens
gctattgtttacact

SEQ ID NO: 330599 - DNA, 15 bp, Homo sapiens
agctattgtttacac

SEQ ID NO: 330600 - DNA, 15 bp, Homo sapiens
tagctattgtttaca

SEQ ID NO: 330601 - DNA, 15 bp, Homo sapiens
atagctattgtttac

SEQ ID NO: 330602 - DNA, 15 bp, Homo sapiens
tatagctattgttta

SEQ ID NO: 330603 - DNA, 15 bp, Homo sapiens
ctatagctattgttt

SEQ ID NO: 330604 - DNA, 15 bp, Homo sapiens
actatagctattgtt

SEQ ID NO: 330605 - DNA, 15 bp, Homo sapiens
tactatagctattgt

SEQ ID NO: 330606 - DNA, 15 bp, Homo sapiens
ttactatagctattg

SEQ ID NO: 330607 - DNA, 15 bp, Homo sapiens
tttactatagctatt

SEQ ID NO: 330608 - DNA, 15 bp, Homo sapiens
atttactatagctat

SEQ ID NO: 330609 - DNA, 15 bp, Homo sapiens
tatttactatagcta

SEQ ID NO: 330610 - DNA, 15 bp, Homo sapiens
ctatttactatagct

SEQ ID NO: 330611 - DNA, 15 bp, Homo sapiens
cctatttactatagc

SEQ ID NO: 330612 - DNA, 15 bp, Homo sapiens
acctatttactatag

SEQ ID NO: 330613 - DNA, 15 bp, Homo sapiens
aacctatttactata

SEQ ID NO: 330614 - DNA, 15 bp, Homo sapiens
aaacctatttactat

SEQ ID NO: 330615 - DNA, 15 bp, Homo sapiens
taaacctatttacta

SEQ ID NO: 330616 - DNA, 15 bp, Homo sapiens
ctaaacctatttact

SEQ ID NO: 330617 - DNA, 15 bp, Homo sapiens
gctaaacctatttac

SEQ ID NO: 330618 - DNA, 15 bp, Homo sapiens
agctaaacctattta

SEQ ID NO: 330619 - DNA, 15 bp, Homo sapiens
cagctaaacctattt

SEQ ID NO: 330620 - DNA, 15 bp, Homo sapiens
ccagctaaacctatt

SEQ ID NO: 330621 - DNA, 15 bp, Homo sapiens
gccagctaaacctat

SEQ ID NO: 330622 - DNA, 15 bp, Homo sapiens
tgccagctaaaccta

SEQ ID NO: 330623 - DNA, 15 bp, Homo sapiens
atgccagctaaacct

SEQ ID NO: 330624 - DNA, 15 bp, Homo sapiens
catgccagctaaacc

SEQ ID NO: 330625 - DNA, 15 bp, Homo sapiens
ccatgccagctaaac

SEQ ID NO: 330626 - DNA, 15 bp, Homo sapiens
gccatgccagctaaa

SEQ ID NO: 330627 - DNA, 15 bp, Homo sapiens
tgccatgccagctaa

SEQ ID NO: 330628 - DNA, 15 bp, Homo sapiens
ctgccatgccagcta

SEQ ID NO: 330629 - DNA, 15 bp, Homo sapiens
actgccatgccagct

SEQ ID NO: 330630 - DNA, 15 bp, Homo sapiens
aactgccatgccagc

SEQ ID NO: 330631 - DNA, 15 bp, Homo sapiens
aaactgccatgccag

SEQ ID NO: 330632 - DNA, 15 bp, Homo sapiens
gaaactgccatgcca

SEQ ID NO: 330633 - DNA, 15 bp, Homo sapiens
tgaaactgccatgcc

SEQ ID NO: 330634 - DNA, 15 bp, Homo sapiens
ttgaaactgccatgc

SEQ ID NO: 330635 - DNA, 15 bp, Homo sapiens
cttgaaactgccatg

SEQ ID NO: 330636 - DNA, 15 bp, Homo sapiens
tcttgaaactgccat

SEQ ID NO: 330637 - DNA, 15 bp, Homo sapiens
ctcttgaaactgcca

SEQ ID NO: 330638 - DNA, 15 bp, Homo sapiens
actcttgaaactgcc

SEQ ID NO: 330639 - DNA, 15 bp, Homo sapiens
aactcttgaaactgc

SEQ ID NO: 330640 - DNA, 15 bp, Homo sapiens
aaactcttgaaactg

SEQ ID NO: 330641 - DNA, 15 bp, Homo sapiens
taaactcttgaaact

SEQ ID NO: 330642 - DNA, 15 bp, Homo sapiens
ataaactcttgaaac

SEQ ID NO: 330643 - DNA, 15 bp, Homo sapiens
cataaactcttgaaa

SEQ ID NO: 330644 - DNA, 15 bp, Homo sapiens
acataaactcttgaa

SEQ ID NO: 330645 - DNA, 15 bp, Homo sapiens
cacataaactcttga

SEQ ID NO: 330646 - DNA, 15 bp, Homo sapiens
tcacataaactcttg

SEQ ID NO: 330647 - DNA, 15 bp, Homo sapiens
ttcacataaactctt

SEQ ID NO: 330648 - DNA, 15 bp, Homo sapiens
tttcacataaactct

SEQ ID NO: 330649 - DNA, 15 bp, Homo sapiens
ctttcacataaactc

SEQ ID NO: 330650 - DNA, 15 bp, Homo sapiens
tctttcacataaact

SEQ ID NO: 330651 - DNA, 15 bp, Homo sapiens
ctctttcacataaac

SEQ ID NO: 330652 - DNA, 15 bp, Homo sapiens
cctctttcacataaa

SEQ ID NO: 330653 - DNA, 15 bp, Homo sapiens
ccctctttcacataa

SEQ ID NO: 330654 - DNA, 15 bp, Homo sapiens
cccctctttcacata

SEQ ID NO: 330655 - DNA, 15 bp, Homo sapiens
acccctctttcacat

SEQ ID NO: 330656 - DNA, 15 bp, Homo sapiens
cacccctctttcaca

SEQ ID NO: 330657 - DNA, 15 bp, Homo sapiens
ccacccctctttcac

SEQ ID NO: 330658 - DNA, 15 bp, Homo sapiens
accacccctctttca

SEQ ID NO: 330659 - DNA, 15 bp, Homo sapiens
caccacccctctttc

SEQ ID NO: 330660 - DNA, 15 bp, Homo sapiens
ccaccacccctcttt

SEQ ID NO: 330661 - DNA, 15 bp, Homo sapiens
cccaccacccctctt

SEQ ID NO: 330662 - DNA, 15 bp, Homo sapiens
tcccaccacccctct

SEQ ID NO: 330663 - DNA, 15 bp, Homo sapiens
ctcccaccacccctc

SEQ ID NO: 330664 - DNA, 15 bp, Homo sapiens
tctcccaccacccct

SEQ ID NO: 330665 - DNA, 15 bp, Homo sapiens
ctctcccaccacccc

SEQ ID NO: 330666 - DNA, 15 bp, Homo sapiens
tctctcccaccaccc

SEQ ID NO: 330667 - DNA, 15 bp, Homo sapiens
gtctctcccaccacc

SEQ ID NO: 330668 - DNA, 15 bp, Homo sapiens
agtctctcccaccac

SEQ ID NO: 330669 - DNA, 15 bp, Homo sapiens
cagtctctcccacca

SEQ ID NO: 330670 - DNA, 15 bp, Homo sapiens
ccagtctctcccacc

SEQ ID NO: 330671 - DNA, 15 bp, Homo sapiens
cccagtctctcccac

SEQ ID NO: 330672 - DNA, 15 bp, Homo sapiens
tcccagtctctccca

SEQ ID NO: 330673 - DNA, 15 bp, Homo sapiens
gtcccagtctctccc

SEQ ID NO: 330674 - DNA, 15 bp, Homo sapiens
agtcccagtctctcc

SEQ ID NO: 330675 - DNA, 15 bp, Homo sapiens
aagtcccagtctctc

SEQ ID NO: 330676 - DNA, 15 bp, Homo sapiens
gaagtcccagtctct

SEQ ID NO: 330677 - DNA, 15 bp, Homo sapiens
tgaagtcccagtctc

SEQ ID NO: 330678 - DNA, 15 bp, Homo sapiens
gtgaagtcccagtct

SEQ ID NO: 330679 - DNA, 15 bp, Homo sapiens
tgtgaagtcccagtc

SEQ ID NO: 330680 - DNA, 15 bp, Homo sapiens
ttgtgaagtcccagt

SEQ ID NO: 330681 - DNA, 15 bp, Homo sapiens
cttgtgaagtcccag

SEQ ID NO: 330682 - DNA, 15 bp, Homo sapiens
ccttgtgaagtccca

SEQ ID NO: 330683 - DNA, 15 bp, Homo sapiens
accttgtgaagtccc

SEQ ID NO: 330684 - DNA, 15 bp, Homo sapiens
caccttgtgaagtcc

SEQ ID NO: 330685 - DNA, 15 bp, Homo sapiens
acaccttgtgaagtc

SEQ ID NO: 330686 - DNA, 15 bp, Homo sapiens
aacaccttgtgaagt

SEQ ID NO: 330687 - DNA, 15 bp, Homo sapiens
caacaccttgtgaag

SEQ ID NO: 330688 - DNA, 15 bp, Homo sapiens
tcaacaccttgtgaa

SEQ ID NO: 330689 - DNA, 15 bp, Homo sapiens
gtcaacaccttgtga

SEQ ID NO: 330690 - DNA, 15 bp, Homo sapiens
tgtcaacaccttgtg

SEQ ID NO: 330691 - DNA, 15 bp, Homo sapiens
ttgtcaacaccttgt

SEQ ID NO: 330692 - DNA, 15 bp, Homo sapiens
attgtcaacaccttg

SEQ ID NO: 330693 - DNA, 15 bp, Homo sapiens
cattgtcaacacctt

SEQ ID NO: 330694 - DNA, 15 bp, Homo sapiens
ccattgtcaacacct

SEQ ID NO: 330695 - DNA, 15 bp, Homo sapiens
tccattgtcaacacc

SEQ ID NO: 330696 - DNA, 15 bp, Homo sapiens
ttccattgtcaacac

SEQ ID NO: 330697 - DNA, 15 bp, Homo sapiens
cttccattgtcaaca

SEQ ID NO: 330698 - DNA, 15 bp, Homo sapiens
ccttccattgtcaac

SEQ ID NO: 330699 - DNA, 15 bp, Homo sapiens
tccttccattgtcaa

SEQ ID NO: 330700 - DNA, 15 bp, Homo sapiens
ctccttccattgtca

SEQ ID NO: 330701 - DNA, 15 bp, Homo sapiens
tctccttccattgtc

SEQ ID NO: 330702 - DNA, 15 bp, Homo sapiens
ctctccttccattgt

SEQ ID NO: 330703 - DNA, 15 bp, Homo sapiens
tctctccttccattg

SEQ ID NO: 330704 - DNA, 15 bp, Homo sapiens
ctctctccttccatt

SEQ ID NO: 330705 - DNA, 15 bp, Homo sapiens
actctctccttccat

SEQ ID NO: 330706 - DNA, 15 bp, Homo sapiens
aactctctccttcca

SEQ ID NO: 330707 - DNA, 15 bp, Homo sapiens
aaactctctccttcc

SEQ ID NO: 330708 - DNA, 15 bp, Homo sapiens
caaactctctccttc

SEQ ID NO: 330709 - DNA, 15 bp, Homo sapiens
tcaaactctctcctt

SEQ ID NO: 330710 - DNA, 15 bp, Homo sapiens
ttcaaactctctcct

SEQ ID NO: 330711 - DNA, 15 bp, Homo sapiens
attcaaactctctcc

SEQ ID NO: 330712 - DNA, 15 bp, Homo sapiens
cattcaaactctctc

SEQ ID NO: 330713 - DNA, 15 bp, Homo sapiens
acattcaaactctct

SEQ ID NO: 330714 - DNA, 15 bp, Homo sapiens
gacattcaaactctc

SEQ ID NO: 330715 - DNA, 15 bp, Homo sapiens
tgacattcaaactct

SEQ ID NO: 330716 - DNA, 15 bp, Homo sapiens
atgacattcaaactc

SEQ ID NO: 330717 - DNA, 15 bp, Homo sapiens
gatgacattcaaact

SEQ ID NO: 330718 - DNA, 15 bp, Homo sapiens
agatgacattcaaac

SEQ ID NO: 330719 - DNA, 15 bp, Homo sapiens
aagatgacattcaaa

SEQ ID NO: 330720 - DNA, 15 bp, Homo sapiens
aaagatgacattcaa

SEQ ID NO: 330721 - DNA, 15 bp, Homo sapiens
aaaagatgacattca

SEQ ID NO: 330722 - DNA, 15 bp, Homo sapiens
taaaagatgacattc

SEQ ID NO: 330723 - DNA, 15 bp, Homo sapiens
ctaaaagatgacatt

SEQ ID NO: 330724 - DNA, 15 bp, Homo sapiens
actaaaagatgacat

SEQ ID NO: 330725 - DNA, 15 bp, Homo sapiens
gactaaaagatgaca

SEQ ID NO: 330726 - DNA, 15 bp, Homo sapiens
tgactaaaagatgac

SEQ ID NO: 330727 - DNA, 15 bp, Homo sapiens
ttgactaaaagatga

SEQ ID NO: 330728 - DNA, 15 bp, Homo sapiens
gttgactaaaagatg

SEQ ID NO: 330729 - DNA, 15 bp, Homo sapiens
tgttgactaaaagat

SEQ ID NO: 330730 - DNA, 15 bp, Homo sapiens
ttgttgactaaaaga

SEQ ID NO: 330731 - DNA, 15 bp, Homo sapiens
cttgttgactaaaag

SEQ ID NO: 330732 - DNA, 15 bp, Homo sapiens
tcttgttgactaaaa

SEQ ID NO: 330733 - DNA, 15 bp, Homo sapiens
ttcttgttgactaaa

SEQ ID NO: 330734 - DNA, 15 bp, Homo sapiens
cttcttgttgactaa

SEQ ID NO: 330735 - DNA, 15 bp, Homo sapiens
gcttcttgttgacta

SEQ ID NO: 330736 - DNA, 15 bp, Homo sapiens
ggcttcttgttgact

SEQ ID NO: 330737 - DNA, 15 bp, Homo sapiens
aggcttcttgttgac

SEQ ID NO: 330738 - DNA, 15 bp, Homo sapiens
aaggcttcttgttga

SEQ ID NO: 330739 - DNA, 15 bp, Homo sapiens
aaaggcttcttgttg

SEQ ID NO: 330740 - DNA, 15 bp, Homo sapiens
caaaggcttcttgtt

SEQ ID NO: 330741 - DNA, 15 bp, Homo sapiens
ccaaaggcttcttgt

SEQ ID NO: 330742 - DNA, 15 bp, Homo sapiens
tccaaaggcttcttg

SEQ ID NO: 330743 - DNA, 15 bp, Homo sapiens
gtccaaaggcttctt

SEQ ID NO: 330744 - DNA, 15 bp, Homo sapiens
tgtccaaaggcttct

SEQ ID NO: 330745 - DNA, 15 bp, Homo sapiens
ctgtccaaaggcttc

SEQ ID NO: 330746 - DNA, 15 bp, Homo sapiens
actgtccaaaggctt

SEQ ID NO: 330747 - DNA, 15 bp, Homo sapiens
cactgtccaaaggct

SEQ ID NO: 330748 - DNA, 15 bp, Homo sapiens
tcactgtccaaaggc

SEQ ID NO: 330749 - DNA, 15 bp, Homo sapiens
ttcactgtccaaagg

SEQ ID NO: 330750 - DNA, 15 bp, Homo sapiens
cttcactgtccaaag

SEQ ID NO: 330751 - DNA, 15 bp, Homo sapiens
acttcactgtccaaa

SEQ ID NO: 330752 - DNA, 15 bp, Homo sapiens
cacttcactgtccaa

SEQ ID NO: 330753 - DNA, 15 bp, Homo sapiens
tcacttcactgtcca

SEQ ID NO: 330754 - DNA, 15 bp, Homo sapiens
gtcacttcactgtcc

SEQ ID NO: 330755 - DNA, 15 bp, Homo sapiens
ggtcacttcactgtc

SEQ ID NO: 330756 - DNA, 15 bp, Homo sapiens
aggtcacttcactgt

SEQ ID NO: 330757 - DNA, 15 bp, Homo sapiens
caggtcacttcactg

SEQ ID NO: 330758 - DNA, 15 bp, Homo sapiens
gcaggtcacttcact

SEQ ID NO: 330759 - DNA, 15 bp, Homo sapiens
agcaggtcacttcac

SEQ ID NO: 330760 - DNA, 15 bp, Homo sapiens
cagcaggtcacttca

SEQ ID NO: 330761 - DNA, 15 bp, Homo sapiens
tcagcaggtcacttc

SEQ ID NO: 330762 - DNA, 15 bp, Homo sapiens
gtcagcaggtcactt

SEQ ID NO: 330763 - DNA, 15 bp, Homo sapiens
tgtcagcaggtcact

SEQ ID NO: 330764 - DNA, 15 bp, Homo sapiens
ctgtcagcaggtcac

SEQ ID NO: 330765 - DNA, 15 bp, Homo sapiens
gctgtcagcaggtca

SEQ ID NO: 330766 - DNA, 15 bp, Homo sapiens
tgctgtcagcaggtc

SEQ ID NO: 330767 - DNA, 15 bp, Homo sapiens
ctgctgtcagcaggt

SEQ ID NO: 330768 - DNA, 15 bp, Homo sapiens
gctgctgtcagcagg

SEQ ID NO: 330769 - DNA, 15 bp, Homo sapiens
cgctgctgtcagcag

SEQ ID NO: 330770 - DNA, 15 bp, Homo sapiens
acgctgctgtcagca

SEQ ID NO: 330771 - DNA, 15 bp, Homo sapiens
aacgctgctgtcagc

SEQ ID NO: 330772 - DNA, 15 bp, Homo sapiens
gaacgctgctgtcag

SEQ ID NO: 330773 - DNA, 15 bp, Homo sapiens
tgaacgctgctgtca

SEQ ID NO: 330774 - DNA, 15 bp, Homo sapiens
ctgaacgctgctgtc

SEQ ID NO: 330775 - DNA, 15 bp, Homo sapiens
cctgaacgctgctgt

SEQ ID NO: 330776 - DNA, 15 bp, Homo sapiens
acctgaacgctgctg

SEQ ID NO: 330777 - DNA, 15 bp, Homo sapiens
tacctgaacgctgct

SEQ ID NO: 330778 - DNA, 15 bp, Homo sapiens
atacctgaacgctgc

SEQ ID NO: 330779 - DNA, 15 bp, Homo sapiens
tatacctgaacgctg

SEQ ID NO: 330780 - DNA, 15 bp, Homo sapiens
gtatacctgaacgct

SEQ ID NO: 330781 - DNA, 15 bp, Homo sapiens
ggtatacctgaacgc

SEQ ID NO: 330782 - DNA, 15 bp, Homo sapiens
gggtatacctgaacg

SEQ ID NO: 330783 - DNA, 15 bp, Homo sapiens
ggggtatacctgaac

SEQ ID NO: 330784 - DNA, 15 bp, Homo sapiens
tggggtatacctgaa

SEQ ID NO: 330785 - DNA, 15 bp, Homo sapiens
ctggggtatacctga

SEQ ID NO: 330786 - DNA, 15 bp, Homo sapiens
actggggtatacctg

SEQ ID NO: 330787 - DNA, 15 bp, Homo sapiens
cactggggtatacct

SEQ ID NO: 330788 - DNA, 15 bp, Homo sapiens
ccactggggtatacc

SEQ ID NO: 330789 - DNA, 15 bp, Homo sapiens
cccactggggtatac

SEQ ID NO: 330790 - DNA, 15 bp, Homo sapiens
tcccactggggtata

SEQ ID NO: 330791 - DNA, 15 bp, Homo sapiens
gtcccactggggtat

SEQ ID NO: 330792 - DNA, 15 bp, Homo sapiens
agtcccactggggta

SEQ ID NO: 330793 - DNA, 15 bp, Homo sapiens
cagtcccactggggt

SEQ ID NO: 330794 - DNA, 15 bp, Homo sapiens
tcagtcccactgggg

SEQ ID NO: 330795 - DNA, 15 bp, Homo sapiens
ttcagtcccactggg

SEQ ID NO: 330796 - DNA, 15 bp, Homo sapiens
gttcagtcccactgg

SEQ ID NO: 330797 - DNA, 15 bp, Homo sapiens
tgttcagtcccactg

SEQ ID NO: 330798 - DNA, 15 bp, Homo sapiens
ctgttcagtcccact

SEQ ID NO: 330799 - DNA, 15 bp, Homo sapiens
cctgttcagtcccac

SEQ ID NO: 330800 - DNA, 15 bp, Homo sapiens
tcctgttcagtccca

SEQ ID NO: 330801 - DNA, 15 bp, Homo sapiens
atcctgttcagtccc

SEQ ID NO: 330802 - DNA, 15 bp, Homo sapiens
catcctgttcagtcc

SEQ ID NO: 330803 - DNA, 15 bp, Homo sapiens
gcatcctgttcagtc

SEQ ID NO: 330804 - DNA, 15 bp, Homo sapiens
tgcatcctgttcagt

SEQ ID NO: 330805 - DNA, 15 bp, Homo sapiens
ctgcatcctgttcag

SEQ ID NO: 330806 - DNA, 15 bp, Homo sapiens
actgcatcctgttca

SEQ ID NO: 330807 - DNA, 15 bp, Homo sapiens
aactgcatcctgttc

SEQ ID NO: 330808 - DNA, 15 bp, Homo sapiens
aaactgcatcctgtt

SEQ ID NO: 330809 - DNA, 15 bp, Homo sapiens
taaactgcatcctgt

SEQ ID NO: 330810 - DNA, 15 bp, Homo sapiens
ctaaactgcatcctg

SEQ ID NO: 330811 - DNA, 15 bp, Homo sapiens
tctaaactgcatcct

SEQ ID NO: 330812 - DNA, 15 bp, Homo sapiens
ttctaaactgcatcc

SEQ ID NO: 330813 - DNA, 15 bp, Homo sapiens
tttctaaactgcatc

SEQ ID NO: 330814 - DNA, 15 bp, Homo sapiens
ctttctaaactgcat

SEQ ID NO: 330815 - DNA, 15 bp, Homo sapiens
tctttctaaactgca

SEQ ID NO: 330816 - DNA, 15 bp, Homo sapiens
ctctttctaaactgc

SEQ ID NO: 330817 - DNA, 15 bp, Homo sapiens
tctctttctaaactg

SEQ ID NO: 330818 - DNA, 15 bp, Homo sapiens
ctctctttctaaact

SEQ ID NO: 330819 - DNA, 15 bp, Homo sapiens
gctctctttctaaac

SEQ ID NO: 330820 - DNA, 15 bp, Homo sapiens
tgctctctttctaaa

SEQ ID NO: 330821 - DNA, 15 bp, Homo sapiens
ctgctctctttctaa

SEQ ID NO: 330822 - DNA, 15 bp, Homo sapiens
cctgctctctttcta

SEQ ID NO: 330823 - DNA, 15 bp, Homo sapiens
ccctgctctctttct

SEQ ID NO: 330824 - DNA, 15 bp, Homo sapiens
cccctgctctctttc

SEQ ID NO: 330825 - DNA, 15 bp, Homo sapiens
gcccctgctctcttt

SEQ ID NO: 330826 - DNA, 15 bp, Homo sapiens
tgcccctgctctctt

SEQ ID NO: 330827 - DNA, 15 bp, Homo sapiens
ctgcccctgctctct

SEQ ID NO: 330828 - DNA, 15 bp, Homo sapiens
tctgcccctgctctc

SEQ ID NO: 330829 - DNA, 15 bp, Homo sapiens
atctgcccctgctct

SEQ ID NO: 330830 - DNA, 15 bp, Homo sapiens
tatctgcccctgctc

SEQ ID NO: 330831 - DNA, 15 bp, Homo sapiens
gtatctgcccctgct

SEQ ID NO: 330832 - DNA, 15 bp, Homo sapiens
ggtatctgcccctgc

SEQ ID NO: 330833 - DNA, 15 bp, Homo sapiens
tggtatctgcccctg

SEQ ID NO: 330834 - DNA, 15 bp, Homo sapiens
ctggtatctgcccct

SEQ ID NO: 330835 - DNA, 15 bp, Homo sapiens
actggtatctgcccc

SEQ ID NO: 330836 - DNA, 15 bp, Homo sapiens
cactggtatctgccc

SEQ ID NO: 330837 - DNA, 15 bp, Homo sapiens
gcactggtatctgcc

SEQ ID NO: 330838 - DNA, 15 bp, Homo sapiens
tgcactggtatctgc

SEQ ID NO: 330839 - DNA, 15 bp, Homo sapiens
gtgcactggtatctg

SEQ ID NO: 330840 - DNA, 15 bp, Homo sapiens
agtgcactggtatct

SEQ ID NO: 330841 - DNA, 15 bp, Homo sapiens
gagtgcactggtatc

SEQ ID NO: 330842 - DNA, 15 bp, Homo sapiens
tgagtgcactggtat

SEQ ID NO: 330843 - DNA, 15 bp, Homo sapiens
ctgagtgcactggta

SEQ ID NO: 330844 - DNA, 15 bp, Homo sapiens
actgagtgcactggt

SEQ ID NO: 330845 - DNA, 15 bp, Homo sapiens
cactgagtgcactgg

SEQ ID NO: 330846 - DNA, 15 bp, Homo sapiens
gcactgagtgcactg

SEQ ID NO: 330847 - DNA, 15 bp, Homo sapiens
tgcactgagtgcact

SEQ ID NO: 330848 - DNA, 15 bp, Homo sapiens
ctgcactgagtgcac

SEQ ID NO: 330849 - DNA, 15 bp, Homo sapiens
tctgcactgagtgca

SEQ ID NO: 330850 - DNA, 15 bp, Homo sapiens
ctctgcactgagtgc

SEQ ID NO: 330851 - DNA, 15 bp, Homo sapiens
actctgcactgagtg

SEQ ID NO: 330852 - DNA, 15 bp, Homo sapiens
gactctgcactgagt

SEQ ID NO: 330853 - DNA, 15 bp, Homo sapiens
tgactctgcactgag

SEQ ID NO: 330854 - DNA, 15 bp, Homo sapiens
gtgactctgcactga

SEQ ID NO: 330855 - DNA, 15 bp, Homo sapiens
cgtgactctgcactg

SEQ ID NO: 330856 - DNA, 15 bp, Homo sapiens
ccgtgactctgcact

SEQ ID NO: 330857 - DNA, 15 bp, Homo sapiens
cccgtgactctgcac

SEQ ID NO: 330858 - DNA, 15 bp, Homo sapiens
acccgtgactctgca

SEQ ID NO: 330859 - DNA, 15 bp, Homo sapiens
gacccgtgactctgc

SEQ ID NO: 330860 - DNA, 15 bp, Homo sapiens
agacccgtgactctg

SEQ ID NO: 330861 - DNA, 15 bp, Homo sapiens
cagacccgtgactct

SEQ ID NO: 330862 - DNA, 15 bp, Homo sapiens
gcagacccgtgactc

SEQ ID NO: 330863 - DNA, 15 bp, Homo sapiens
agcagacccgtgact

SEQ ID NO: 330864 - DNA, 15 bp, Homo sapiens
tagcagacccgtgac

SEQ ID NO: 330865 - DNA, 15 bp, Homo sapiens
atagcagacccgtga

SEQ ID NO: 330866 - DNA, 15 bp, Homo sapiens
catagcagacccgtg

SEQ ID NO: 330867 - DNA, 15 bp, Homo sapiens
gcatagcagacccgt

SEQ ID NO: 330868 - DNA, 15 bp, Homo sapiens
agcatagcagacccg

SEQ ID NO: 330869 - DNA, 15 bp, Homo sapiens
gagcatagcagaccc

SEQ ID NO: 330870 - DNA, 15 bp, Homo sapiens
ggagcatagcagacc

SEQ ID NO: 330871 - DNA, 15 bp, Homo sapiens
tggagcatagcagac

SEQ ID NO: 330872 - DNA, 15 bp, Homo sapiens
ctggagcatagcaga

SEQ ID NO: 330873 - DNA, 15 bp, Homo sapiens
cctggagcatagcag

SEQ ID NO: 330874 - DNA, 15 bp, Homo sapiens
ccctggagcatagca

SEQ ID NO: 330875 - DNA, 15 bp, Homo sapiens
tccctggagcatagc

SEQ ID NO: 330876 - DNA, 15 bp, Homo sapiens
gtccctggagcatag

SEQ ID NO: 330877 - DNA, 15 bp, Homo sapiens
ggtccctggagcata

SEQ ID NO: 330878 - DNA, 15 bp, Homo sapiens
gggtccctggagcat

SEQ ID NO: 330879 - DNA, 15 bp, Homo sapiens
tgggtccctggagca

SEQ ID NO: 330880 - DNA, 15 bp, Homo sapiens
ctgggtccctggagc

SEQ ID NO: 330881 - DNA, 15 bp, Homo sapiens
cctgggtccctggag

SEQ ID NO: 330882 - DNA, 15 bp, Homo sapiens
ccctgggtccctgga

SEQ ID NO: 330883 - DNA, 15 bp, Homo sapiens
gccctgggtccctgg

SEQ ID NO: 330884 - DNA, 15 bp, Homo sapiens
agccctgggtccctg

SEQ ID NO: 330885 - DNA, 15 bp, Homo sapiens
gagccctgggtccct

SEQ ID NO: 330886 - DNA, 15 bp, Homo sapiens
ggagccctgggtccc

SEQ ID NO: 330887 - DNA, 15 bp, Homo sapiens
aggagccctgggtcc

SEQ ID NO: 330888 - DNA, 15 bp, Homo sapiens
caggagccctgggtc

SEQ ID NO: 330889 - DNA, 15 bp, Homo sapiens
ccaggagccctgggt

SEQ ID NO: 330890 - DNA, 15 bp, Homo sapiens
tccaggagccctggg

SEQ ID NO: 330891 - DNA, 15 bp, Homo sapiens
ttccaggagccctgg

SEQ ID NO: 330892 - DNA, 15 bp, Homo sapiens
attccaggagccctg

SEQ ID NO: 330893 - DNA, 15 bp, Homo sapiens
gattccaggagccct

SEQ ID NO: 330894 - DNA, 15 bp, Homo sapiens
ggattccaggagccc

SEQ ID NO: 330895 - DNA, 15 bp, Homo sapiens
tggattccaggagcc

SEQ ID NO: 330896 - DNA, 15 bp, Homo sapiens
ctggattccaggagc

SEQ ID NO: 330897 - DNA, 15 bp, Homo sapiens
tctggattccaggag

SEQ ID NO: 330898 - DNA, 15 bp, Homo sapiens
gtctggattccagga

SEQ ID NO: 330899 - DNA, 15 bp, Homo sapiens
tgtctggattccagg

SEQ ID NO: 330900 - DNA, 15 bp, Homo sapiens
ctgtctggattccag

SEQ ID NO: 330901 - DNA, 15 bp, Homo sapiens
tctgtctggattcca

SEQ ID NO: 330902 - DNA, 15 bp, Homo sapiens
gtctgtctggattcc

SEQ ID NO: 330903 - DNA, 15 bp, Homo sapiens
tgtctgtctggattc

SEQ ID NO: 330904 - DNA, 15 bp, Homo sapiens
ttgtctgtctggatt

SEQ ID NO: 330905 - DNA, 15 bp, Homo sapiens
cttgtctgtctggat

SEQ ID NO: 330906 - DNA, 15 bp, Homo sapiens
ccttgtctgtctgga

SEQ ID NO: 330907 - DNA, 15 bp, Homo sapiens
gccttgtctgtctgg

SEQ ID NO: 330908 - DNA, 15 bp, Homo sapiens
ggccttgtctgtctg

SEQ ID NO: 330909 - DNA, 15 bp, Homo sapiens
aggccttgtctgtct

SEQ ID NO: 330910 - DNA, 15 bp, Homo sapiens
gaggccttgtctgtc

SEQ ID NO: 330911 - DNA, 15 bp, Homo sapiens
tgaggccttgtctgt

SEQ ID NO: 330912 - DNA, 15 bp, Homo sapiens
ctgaggccttgtctg

SEQ ID NO: 330913 - DNA, 15 bp, Homo sapiens
gctgaggccttgtct

SEQ ID NO: 330914 - DNA, 15 bp, Homo sapiens
agctgaggccttgtc

SEQ ID NO: 330915 - DNA, 15 bp, Homo sapiens
gagctgaggccttgt

SEQ ID NO: 330916 - DNA, 15 bp, Homo sapiens
agagctgaggccttg

SEQ ID NO: 330917 - DNA, 15 bp, Homo sapiens
aagagctgaggcctt

SEQ ID NO: 330918 - DNA, 15 bp, Homo sapiens
taagagctgaggcct

SEQ ID NO: 330919 - DNA, 15 bp, Homo sapiens
ctaagagctgaggcc

SEQ ID NO: 330920 - DNA, 15 bp, Homo sapiens
cctaagagctgaggc

SEQ ID NO: 330921 - DNA, 15 bp, Homo sapiens
ccctaagagctgagg

SEQ ID NO: 330922 - DNA, 15 bp, Homo sapiens
tccctaagagctgag

SEQ ID NO: 330923 - DNA, 15 bp, Homo sapiens
gtccctaagagctga

SEQ ID NO: 330924 - DNA, 15 bp, Homo sapiens
ggtccctaagagctg

SEQ ID NO: 330925 - DNA, 15 bp, Homo sapiens
aggtccctaagagct

SEQ ID NO: 330926 - DNA, 15 bp, Homo sapiens
gaggtccctaagagc

SEQ ID NO: 330927 - DNA, 15 bp, Homo sapiens
tgaggtccctaagag

SEQ ID NO: 330928 - DNA, 15 bp, Homo sapiens
ttgaggtccctaaga

SEQ ID NO: 330929 - DNA, 15 bp, Homo sapiens
tttgaggtccctaag

SEQ ID NO: 330930 - DNA, 15 bp, Homo sapiens
ttttgaggtccctaa

SEQ ID NO: 330931 - DNA, 15 bp, Homo sapiens
attttgaggtcccta

SEQ ID NO: 330932 - DNA, 15 bp, Homo sapiens
cattttgaggtccct

SEQ ID NO: 330933 - DNA, 15 bp, Homo sapiens
acattttgaggtccc

SEQ ID NO: 330934 - DNA, 15 bp, Homo sapiens
gacattttgaggtcc

SEQ ID NO: 330935 - DNA, 15 bp, Homo sapiens
tgacattttgaggtc

SEQ ID NO: 330936 - DNA, 15 bp, Homo sapiens
atgacattttgaggt

SEQ ID NO: 330937 - DNA, 15 bp, Homo sapiens
tatgacattttgagg

SEQ ID NO: 330938 - DNA, 15 bp, Homo sapiens
ttatgacattttgag

SEQ ID NO: 330939 - DNA, 15 bp, Homo sapiens
cttatgacattttga

SEQ ID NO: 330940 - DNA, 15 bp, Homo sapiens
ccttatgacattttg

SEQ ID NO: 330941 - DNA, 15 bp, Homo sapiens
accttatgacatttt

SEQ ID NO: 330942 - DNA, 15 bp, Homo sapiens
gaccttatgacattt

SEQ ID NO: 330943 - DNA, 15 bp, Homo sapiens
ggaccttatgacatt

SEQ ID NO: 330944 - DNA, 15 bp, Homo sapiens
tggaccttatgacat

SEQ ID NO: 330945 - DNA, 15 bp, Homo sapiens
ctggaccttatgaca

SEQ ID NO: 330946 - DNA, 15 bp, Homo sapiens
actggaccttatgac

SEQ ID NO: 330947 - DNA, 15 bp, Homo sapiens
aactggaccttatga

SEQ ID NO: 330948 - DNA, 15 bp, Homo sapiens
caactggaccttatg

SEQ ID NO: 330949 - DNA, 15 bp, Homo sapiens
tcaactggaccttat

SEQ ID NO: 330950 - DNA, 15 bp, Homo sapiens
atcaactggacctta

SEQ ID NO: 330951 - DNA, 15 bp, Homo sapiens
gatcaactggacctt

SEQ ID NO: 330952 - DNA, 15 bp, Homo sapiens
ggatcaactggacct

SEQ ID NO: 330953 - DNA, 15 bp, Homo sapiens
tggatcaactggacc

SEQ ID NO: 330954 - DNA, 15 bp, Homo sapiens
gtggatcaactggac

SEQ ID NO: 330955 - DNA, 15 bp, Homo sapiens
agtggatcaactgga

SEQ ID NO: 330956 - DNA, 15 bp, Homo sapiens
gagtggatcaactgg

SEQ ID NO: 330957 - DNA, 15 bp, Homo sapiens
tgagtggatcaactg

SEQ ID NO: 330958 - DNA, 15 bp, Homo sapiens
ttgagtggatcaact

SEQ ID NO: 330959 - DNA, 15 bp, Homo sapiens
cttgagtggatcaac

SEQ ID NO: 330960 - DNA, 15 bp, Homo sapiens
ccttgagtggatcaa

SEQ ID NO: 330961 - DNA, 15 bp, Homo sapiens
tccttgagtggatca

SEQ ID NO: 330962 - DNA, 15 bp, Homo sapiens
ttccttgagtggatc

SEQ ID NO: 330963 - DNA, 15 bp, Homo sapiens
gttccttgagtggat

SEQ ID NO: 330964 - DNA, 15 bp, Homo sapiens
tgttccttgagtgga

SEQ ID NO: 330965 - DNA, 15 bp, Homo sapiens
gtgttccttgagtgg

SEQ ID NO: 330966 - DNA, 15 bp, Homo sapiens
ggtgttccttgagtg

SEQ ID NO: 330967 - DNA, 15 bp, Homo sapiens
tggtgttccttgagt

SEQ ID NO: 330968 - DNA, 15 bp, Homo sapiens
ctggtgttccttgag

SEQ ID NO: 330969 - DNA, 15 bp, Homo sapiens
actggtgttccttga

SEQ ID NO: 330970 - DNA, 15 bp, Homo sapiens
cactggtgttccttg

SEQ ID NO: 330971 - DNA, 15 bp, Homo sapiens
tcactggtgttcctt

SEQ ID NO: 330972 - DNA, 15 bp, Homo sapiens
ttcactggtgttcct

SEQ ID NO: 330973 - DNA, 15 bp, Homo sapiens
attcactggtgttcc

SEQ ID NO: 330974 - DNA, 15 bp, Homo sapiens
cattcactggtgttc

SEQ ID NO: 330975 - DNA, 15 bp, Homo sapiens
gcattcactggtgtt

SEQ ID NO: 330976 - DNA, 15 bp, Homo sapiens
agcattcactggtgt

SEQ ID NO: 330977 - DNA, 15 bp, Homo sapiens
tagcattcactggtg

SEQ ID NO: 330978 - DNA, 15 bp, Homo sapiens
ttagcattcactggt

SEQ ID NO: 330979 - DNA, 15 bp, Homo sapiens
tttagcattcactgg

SEQ ID NO: 330980 - DNA, 15 bp, Homo sapiens
ctttagcattcactg

SEQ ID NO: 330981 - DNA, 15 bp, Homo sapiens
gctttagcattcact

SEQ ID NO: 330982 - DNA, 15 bp, Homo sapiens
agctttagcattcac

SEQ ID NO: 330983 - DNA, 15 bp, Homo sapiens
tagctttagcattca

SEQ ID NO: 330984 - DNA, 15 bp, Homo sapiens
atagctttagcattc

SEQ ID NO: 330985 - DNA, 15 bp, Homo sapiens
aatagctttagcatt

SEQ ID NO: 330986 - DNA, 15 bp, Homo sapiens
taatagctttagcat

SEQ ID NO: 330987 - DNA, 15 bp, Homo sapiens
ctaatagctttagca

SEQ ID NO: 330988 - DNA, 15 bp, Homo sapiens
cctaatagctttagc

SEQ ID NO: 330989 - DNA, 15 bp, Homo sapiens
acctaatagctttag

SEQ ID NO: 330990 - DNA, 15 bp, Homo sapiens
tacctaatagcttta

SEQ ID NO: 330991 - DNA, 15 bp, Homo sapiens
atacctaatagcttt

SEQ ID NO: 330992 - DNA, 15 bp, Homo sapiens
tatacctaatagctt

SEQ ID NO: 330993 - DNA, 15 bp, Homo sapiens
ttatacctaatagct

SEQ ID NO: 330994 - DNA, 15 bp, Homo sapiens
cttatacctaatagc

SEQ ID NO: 330995 - DNA, 15 bp, Homo sapiens
ccttatacctaatag

SEQ ID NO: 330996 - DNA, 15 bp, Homo sapiens
accttatacctaata

SEQ ID NO: 330997 - DNA, 15 bp, Homo sapiens
aaccttatacctaat

SEQ ID NO: 330998 - DNA, 15 bp, Homo sapiens
aaaccttatacctaa

SEQ ID NO: 330999 - DNA, 15 bp, Homo sapiens
aaaaccttataccta

SEQ ID NO: 331000 - DNA, 15 bp, Homo sapiens
aaaaaccttatacct

SEQ ID NO: 331001 - DNA, 15 bp, Homo sapiens
caaaaaccttatacc

SEQ ID NO: 331002 - DNA, 15 bp, Homo sapiens
ccaaaaaccttatac

SEQ ID NO: 331003 - DNA, 15 bp, Homo sapiens
cccaaaaaccttata

SEQ ID NO: 331004 - DNA, 15 bp, Homo sapiens
ccccaaaaaccttat

SEQ ID NO: 331005 - DNA, 15 bp, Homo sapiens
tccccaaaaacctta

SEQ ID NO: 331006 - DNA, 15 bp, Homo sapiens
ctccccaaaaacctt

SEQ ID NO: 331007 - DNA, 15 bp, Homo sapiens
gctccccaaaaacct

SEQ ID NO: 331008 - DNA, 15 bp, Homo sapiens
tgctccccaaaaacc

SEQ ID NO: 331009 - DNA, 15 bp, Homo sapiens
ctgctccccaaaaac

SEQ ID NO: 331010 - DNA, 15 bp, Homo sapiens
cctgctccccaaaaa

SEQ ID NO: 331011 - DNA, 15 bp, Homo sapiens
tcctgctccccaaaa

SEQ ID NO: 331012 - DNA, 15 bp, Homo sapiens
atcctgctccccaaa

SEQ ID NO: 331013 - DNA, 15 bp, Homo sapiens
tatcctgctccccaa

SEQ ID NO: 331014 - DNA, 15 bp, Homo sapiens
atatcctgctcccca

SEQ ID NO: 331015 - DNA, 15 bp, Homo sapiens
aatatcctgctcccc

SEQ ID NO: 331016 - DNA, 15 bp, Homo sapiens
gaatatcctgctccc

SEQ ID NO: 331017 - DNA, 15 bp, Homo sapiens
ggaatatcctgctcc

SEQ ID NO: 331018 - DNA, 15 bp, Homo sapiens
aggaatatcctgctc

SEQ ID NO: 331019 - DNA, 15 bp, Homo sapiens
caggaatatcctgct

SEQ ID NO: 331020 - DNA, 15 bp, Homo sapiens
gcaggaatatcctgc

SEQ ID NO: 331021 - DNA, 15 bp, Homo sapiens
tgcaggaatatcctg

SEQ ID NO: 331022 - DNA, 15 bp, Homo sapiens
ctgcaggaatatcct

SEQ ID NO: 331023 - DNA, 15 bp, Homo sapiens
actgcaggaatatcc

SEQ ID NO: 331024 - DNA, 15 bp, Homo sapiens
gactgcaggaatatc

SEQ ID NO: 331025 - DNA, 15 bp, Homo sapiens
agactgcaggaatat

SEQ ID NO: 331026 - DNA, 15 bp, Homo sapiens
gagactgcaggaata

SEQ ID NO: 331027 - DNA, 15 bp, Homo sapiens
cgagactgcaggaat

SEQ ID NO: 331028 - DNA, 15 bp, Homo sapiens
ccgagactgcaggaa

SEQ ID NO: 331029 - DNA, 15 bp, Homo sapiens
cccgagactgcagga

SEQ ID NO: 331030 - DNA, 15 bp, Homo sapiens
ccccgagactgcagg

SEQ ID NO: 331031 - DNA, 15 bp, Homo sapiens
gccccgagactgcag

SEQ ID NO: 331032 - DNA, 15 bp, Homo sapiens
ggccccgagactgca

SEQ ID NO: 331033 - DNA, 15 bp, Homo sapiens
aggccccgagactgc

SEQ ID NO: 331034 - DNA, 15 bp, Homo sapiens
gaggccccgagactg

SEQ ID NO: 331035 - DNA, 15 bp, Homo sapiens
tgaggccccgagact

SEQ ID NO: 331036 - DNA, 15 bp, Homo sapiens
gtgaggccccgagac

SEQ ID NO: 331037 - DNA, 15 bp, Homo sapiens
agtgaggccccgaga

SEQ ID NO: 331038 - DNA, 15 bp, Homo sapiens
gagtgaggccccgag

SEQ ID NO: 331039 - DNA, 15 bp, Homo sapiens
tgagtgaggccccga

SEQ ID NO: 331040 - DNA, 15 bp, Homo sapiens
ttgagtgaggccccg

SEQ ID NO: 331041 - DNA, 15 bp, Homo sapiens
cttgagtgaggcccc

SEQ ID NO: 331042 - DNA, 15 bp, Homo sapiens
ccttgagtgaggccc

SEQ ID NO: 331043 - DNA, 15 bp, Homo sapiens
accttgagtgaggcc

SEQ ID NO: 331044 - DNA, 15 bp, Homo sapiens
caccttgagtgaggc

SEQ ID NO: 331045 - DNA, 15 bp, Homo sapiens
ccaccttgagtgagg

SEQ ID NO: 331046 - DNA, 15 bp, Homo sapiens
gccaccttgagtgag

SEQ ID NO: 331047 - DNA, 15 bp, Homo sapiens
tgccaccttgagtga

SEQ ID NO: 331048 - DNA, 15 bp, Homo sapiens
atgccaccttgagtg

SEQ ID NO: 331049 - DNA, 15 bp, Homo sapiens
tatgccaccttgagt

SEQ ID NO: 331050 - DNA, 15 bp, Homo sapiens
atatgccaccttgag

SEQ ID NO: 331051 - DNA, 15 bp, Homo sapiens
aatatgccaccttga

SEQ ID NO: 331052 - DNA, 15 bp, Homo sapiens
gaatatgccaccttg

SEQ ID NO: 331053 - DNA, 15 bp, Homo sapiens
tgaatatgccacctt

SEQ ID NO: 331054 - DNA, 15 bp, Homo sapiens
atgaatatgccacct

SEQ ID NO: 331055 - DNA, 15 bp, Homo sapiens
aatgaatatgccacc

SEQ ID NO: 331056 - DNA, 15 bp, Homo sapiens
taatgaatatgccac

SEQ ID NO: 331057 - DNA, 15 bp, Homo sapiens
gtaatgaatatgcca

SEQ ID NO: 331058 - DNA, 15 bp, Homo sapiens
tgtaatgaatatgcc

SEQ ID NO: 331059 - DNA, 15 bp, Homo sapiens
ttgtaatgaatatgc

SEQ ID NO: 331060 - DNA, 15 bp, Homo sapiens
tttgtaatgaatatg

SEQ ID NO: 331061 - DNA, 15 bp, Homo sapiens
ctttgtaatgaatat

SEQ ID NO: 331062 - DNA, 15 bp, Homo sapiens
cctttgtaatgaata

SEQ ID NO: 331063 - DNA, 15 bp, Homo sapiens
ccctttgtaatgaat

SEQ ID NO: 331064 - DNA, 15 bp, Homo sapiens
tccctttgtaatgaa

SEQ ID NO: 331065 - DNA, 15 bp, Homo sapiens
ttccctttgtaatga

SEQ ID NO: 331066 - DNA, 15 bp, Homo sapiens
tttccctttgtaatg

SEQ ID NO: 331067 - DNA, 15 bp, Homo sapiens
atttccctttgtaat

SEQ ID NO: 331068 - DNA, 15 bp, Homo sapiens
catttccctttgtaa

SEQ ID NO: 331069 - DNA, 15 bp, Homo sapiens
ccatttccctttgta

SEQ ID NO: 331070 - DNA, 15 bp, Homo sapiens
cccatttccctttgt

SEQ ID NO: 331071 - DNA, 15 bp, Homo sapiens
gcccatttccctttg

SEQ ID NO: 331072 - DNA, 15 bp, Homo sapiens
tgcccatttcccttt

SEQ ID NO: 331073 - DNA, 15 bp, Homo sapiens
gtgcccatttccctt

SEQ ID NO: 331074 - DNA, 15 bp, Homo sapiens
ggtgcccatttccct

SEQ ID NO: 331075 - DNA, 15 bp, Homo sapiens
aggtgcccatttccc

SEQ ID NO: 331076 - DNA, 15 bp, Homo sapiens
gaggtgcccatttcc

SEQ ID NO: 331077 - DNA, 15 bp, Homo sapiens
agaggtgcccatttc

SEQ ID NO: 331078 - DNA, 15 bp, Homo sapiens
gagaggtgcccattt

SEQ ID NO: 331079 - DNA, 15 bp, Homo sapiens
tgagaggtgcccatt

SEQ ID NO: 331080 - DNA, 15 bp, Homo sapiens
ctgagaggtgcccat

SEQ ID NO: 331081 - DNA, 15 bp, Homo sapiens
actgagaggtgccca

SEQ ID NO: 331082 - DNA, 15 bp, Homo sapiens
cactgagaggtgccc

SEQ ID NO: 331083 - DNA, 15 bp, Homo sapiens
ccactgagaggtgcc

SEQ ID NO: 331084 - DNA, 15 bp, Homo sapiens
tccactgagaggtgc

SEQ ID NO: 331085 - DNA, 15 bp, Homo sapiens
ctccactgagaggtg

SEQ ID NO: 331086 - DNA, 15 bp, Homo sapiens
tctccactgagaggt

SEQ ID NO: 331087 - DNA, 15 bp, Homo sapiens
gtctccactgagagg

SEQ ID NO: 331088 - DNA, 15 bp, Homo sapiens
tgtctccactgagag

SEQ ID NO: 331089 - DNA, 15 bp, Homo sapiens
atgtctccactgaga

SEQ ID NO: 331090 - DNA, 15 bp, Homo sapiens
aatgtctccactgag

SEQ ID NO: 331091 - DNA, 15 bp, Homo sapiens
taatgtctccactga

SEQ ID NO: 331092 - DNA, 15 bp, Homo sapiens
ctaatgtctccactg

SEQ ID NO: 331093 - DNA, 15 bp, Homo sapiens
gctaatgtctccact

SEQ ID NO: 331094 - DNA, 15 bp, Homo sapiens
tgctaatgtctccac

SEQ ID NO: 331095 - DNA, 15 bp, Homo sapiens
atgctaatgtctcca

SEQ ID NO: 331096 - DNA, 15 bp, Homo sapiens
aatgctaatgtctcc

SEQ ID NO: 331097 - DNA, 15 bp, Homo sapiens
aaatgctaatgtctc

SEQ ID NO: 331098 - DNA, 15 bp, Homo sapiens
gaaatgctaatgtct

SEQ ID NO: 331099 - DNA, 15 bp, Homo sapiens
agaaatgctaatgtc

SEQ ID NO: 331100 - DNA, 15 bp, Homo sapiens
cagaaatgctaatgt

SEQ ID NO: 331101 - DNA, 15 bp, Homo sapiens
gcagaaatgctaatg

SEQ ID NO: 331102 - DNA, 15 bp, Homo sapiens
ggcagaaatgctaat

SEQ ID NO: 331103 - DNA, 15 bp, Homo sapiens
aggcagaaatgctaa

SEQ ID NO: 331104 - DNA, 15 bp, Homo sapiens
aaggcagaaatgcta

SEQ ID NO: 331105 - DNA, 15 bp, Homo sapiens
taaggcagaaatgct

SEQ ID NO: 331106 - DNA, 15 bp, Homo sapiens
ctaaggcagaaatgc

SEQ ID NO: 331107 - DNA, 15 bp, Homo sapiens
gctaaggcagaaatg

SEQ ID NO: 331108 - DNA, 15 bp, Homo sapiens
ggctaaggcagaaat

SEQ ID NO: 331109 - DNA, 15 bp, Homo sapiens
tggctaaggcagaaa

SEQ ID NO: 331110 - DNA, 15 bp, Homo sapiens
gtggctaaggcagaa

SEQ ID NO: 331111 - DNA, 15 bp, Homo sapiens
tgtggctaaggcaga

SEQ ID NO: 331112 - DNA, 15 bp, Homo sapiens
atgtggctaaggcag

SEQ ID NO: 331113 - DNA, 15 bp, Homo sapiens
catgtggctaaggca

SEQ ID NO: 331114 - DNA, 15 bp, Homo sapiens
ccatgtggctaaggc

SEQ ID NO: 331115 - DNA, 15 bp, Homo sapiens
tccatgtggctaagg

SEQ ID NO: 331116 - DNA, 15 bp, Homo sapiens
atccatgtggctaag

SEQ ID NO: 331117 - DNA, 15 bp, Homo sapiens
catccatgtggctaa

SEQ ID NO: 331118 - DNA, 15 bp, Homo sapiens
ccatccatgtggcta

SEQ ID NO: 331119 - DNA, 15 bp, Homo sapiens
tccatccatgtggct

SEQ ID NO: 331120 - DNA, 15 bp, Homo sapiens
ctccatccatgtggc

SEQ ID NO: 331121 - DNA, 15 bp, Homo sapiens
gctccatccatgtgg

SEQ ID NO: 331122 - DNA, 15 bp, Homo sapiens
agctccatccatgtg

SEQ ID NO: 331123 - DNA, 15 bp, Homo sapiens
tagctccatccatgt

SEQ ID NO: 331124 - DNA, 15 bp, Homo sapiens
ctagctccatccatg

SEQ ID NO: 331125 - DNA, 15 bp, Homo sapiens
actagctccatccat

SEQ ID NO: 331126 - DNA, 15 bp, Homo sapiens
gactagctccatcca

SEQ ID NO: 331127 - DNA, 15 bp, Homo sapiens
tgactagctccatcc

SEQ ID NO: 331128 - DNA, 15 bp, Homo sapiens
atgactagctccatc

SEQ ID NO: 331129 - DNA, 15 bp, Homo sapiens
aatgactagctccat

SEQ ID NO: 331130 - DNA, 15 bp, Homo sapiens
caatgactagctcca

SEQ ID NO: 331131 - DNA, 15 bp, Homo sapiens
ccaatgactagctcc

SEQ ID NO: 331132 - DNA, 15 bp, Homo sapiens
cccaatgactagctc

SEQ ID NO: 331133 - DNA, 15 bp, Homo sapiens
gcccaatgactagct

SEQ ID NO: 331134 - DNA, 15 bp, Homo sapiens
agcccaatgactagc

SEQ ID NO: 331135 - DNA, 15 bp, Homo sapiens
cagcccaatgactag

SEQ ID NO: 331136 - DNA, 15 bp, Homo sapiens
ccagcccaatgacta

SEQ ID NO: 331137 - DNA, 15 bp, Homo sapiens
cccagcccaatgact

SEQ ID NO: 331138 - DNA, 15 bp, Homo sapiens
tcccagcccaatgac

SEQ ID NO: 331139 - DNA, 15 bp, Homo sapiens
atcccagcccaatga

SEQ ID NO: 331140 - DNA, 15 bp, Homo sapiens
tatcccagcccaatg

SEQ ID NO: 331141 - DNA, 15 bp, Homo sapiens
atatcccagcccaat

SEQ ID NO: 331142 - DNA, 15 bp, Homo sapiens
gatatcccagcccaa

SEQ ID NO: 331143 - DNA, 15 bp, Homo sapiens
ggatatcccagccca

SEQ ID NO: 331144 - DNA, 15 bp, Homo sapiens
aggatatcccagccc

SEQ ID NO: 331145 - DNA, 15 bp, Homo sapiens
caggatatcccagcc

SEQ ID NO: 331146 - DNA, 15 bp, Homo sapiens
tcaggatatcccagc

SEQ ID NO: 331147 - DNA, 15 bp, Homo sapiens
atcaggatatcccag

SEQ ID NO: 331148 - DNA, 15 bp, Homo sapiens
catcaggatatccca

SEQ ID NO: 331149 - DNA, 15 bp, Homo sapiens
acatcaggatatccc

SEQ ID NO: 331150 - DNA, 15 bp, Homo sapiens
cacatcaggatatcc

SEQ ID NO: 331151 - DNA, 15 bp, Homo sapiens
tcacatcaggatatc

SEQ ID NO: 331152 - DNA, 15 bp, Homo sapiens
atcacatcaggatat

SEQ ID NO: 331153 - DNA, 15 bp, Homo sapiens
catcacatcaggata

SEQ ID NO: 331154 - DNA, 15 bp, Homo sapiens
gcatcacatcaggat

SEQ ID NO: 331155 - DNA, 15 bp, Homo sapiens
ggcatcacatcagga

SEQ ID NO: 331156 - DNA, 15 bp, Homo sapiens
tggcatcacatcagg

SEQ ID NO: 331157 - DNA, 15 bp, Homo sapiens
atggcatcacatcag

SEQ ID NO: 331158 - DNA, 15 bp, Homo sapiens
gatggcatcacatca

SEQ ID NO: 331159 - DNA, 15 bp, Homo sapiens
ggatggcatcacatc

SEQ ID NO: 331160 - DNA, 15 bp, Homo sapiens
gggatggcatcacat

SEQ ID NO: 331161 - DNA, 15 bp, Homo sapiens
ggggatggcatcaca

SEQ ID NO: 331162 - DNA, 15 bp, Homo sapiens
cggggatggcatcac

SEQ ID NO: 331163 - DNA, 15 bp, Homo sapiens
tcggggatggcatca

SEQ ID NO: 331164 - DNA, 15 bp, Homo sapiens
ttcggggatggcatc

SEQ ID NO: 331165 - DNA, 15 bp, Homo sapiens
cttcggggatggcat

SEQ ID NO: 331166 - DNA, 15 bp, Homo sapiens
tcttcggggatggca

SEQ ID NO: 331167 - DNA, 15 bp, Homo sapiens
ctcttcggggatggc

SEQ ID NO: 331168 - DNA, 15 bp, Homo sapiens
tctcttcggggatgg

SEQ ID NO: 331169 - DNA, 15 bp, Homo sapiens
atctcttcggggatg

SEQ ID NO: 331170 - DNA, 15 bp, Homo sapiens
aatctcttcggggat

SEQ ID NO: 331171 - DNA, 15 bp, Homo sapiens
gaatctcttcgggga

SEQ ID NO: 331172 - DNA, 15 bp, Homo sapiens
agaatctcttcgggg

SEQ ID NO: 331173 - DNA, 15 bp, Homo sapiens
aagaatctcttcggg

SEQ ID NO: 331174 - DNA, 15 bp, Homo sapiens
taagaatctcttcgg

SEQ ID NO: 331175 - DNA, 15 bp, Homo sapiens
ttaagaatctcttcg

SEQ ID NO: 331176 - DNA, 15 bp, Homo sapiens
gttaagaatctcttc

SEQ ID NO: 331177 - DNA, 15 bp, Homo sapiens
tgttaagaatctctt

SEQ ID NO: 331178 - DNA, 15 bp, Homo sapiens
ctgttaagaatctct

SEQ ID NO: 331179 - DNA, 15 bp, Homo sapiens
tctgttaagaatctc

SEQ ID NO: 331180 - DNA, 15 bp, Homo sapiens
ttctgttaagaatct

SEQ ID NO: 331181 - DNA, 15 bp, Homo sapiens
tttctgttaagaatc

SEQ ID NO: 331182 - DNA, 15 bp, Homo sapiens
atttctgttaagaat

SEQ ID NO: 331183 - DNA, 15 bp, Homo sapiens
tatttctgttaagaa

SEQ ID NO: 331184 - DNA, 15 bp, Homo sapiens
gtatttctgttaaga

SEQ ID NO: 331185 - DNA, 15 bp, Homo sapiens
agtatttctgttaag

SEQ ID NO: 331186 - DNA, 15 bp, Homo sapiens
aagtatttctgttaa

SEQ ID NO: 331187 - DNA, 15 bp, Homo sapiens
taagtatttctgtta

SEQ ID NO: 331188 - DNA, 15 bp, Homo sapiens
ttaagtatttctgtt

SEQ ID NO: 331189 - DNA, 15 bp, Homo sapiens
cttaagtatttctgt

SEQ ID NO: 331190 - DNA, 15 bp, Homo sapiens
acttaagtatttctg

SEQ ID NO: 331191 - DNA, 15 bp, Homo sapiens
tacttaagtatttct

SEQ ID NO: 331192 - DNA, 15 bp, Homo sapiens
ctacttaagtatttc

SEQ ID NO: 331193 - DNA, 15 bp, Homo sapiens
cctacttaagtattt

SEQ ID NO: 331194 - DNA, 15 bp, Homo sapiens
ccctacttaagtatt

SEQ ID NO: 331195 - DNA, 15 bp, Homo sapiens
tccctacttaagtat

SEQ ID NO: 331196 - DNA, 15 bp, Homo sapiens
ctccctacttaagta

SEQ ID NO: 331197 - DNA, 15 bp, Homo sapiens
gctccctacttaagt

SEQ ID NO: 331198 - DNA, 15 bp, Homo sapiens
agctccctacttaag

SEQ ID NO: 331199 - DNA, 15 bp, Homo sapiens
tagctccctacttaa

SEQ ID NO: 331200 - DNA, 15 bp, Homo sapiens
atagctccctactta

SEQ ID NO: 331201 - DNA, 15 bp, Homo sapiens
catagctccctactt

SEQ ID NO: 331202 - DNA, 15 bp, Homo sapiens
acatagctccctact

SEQ ID NO: 331203 - DNA, 15 bp, Homo sapiens
tacatagctccctac

SEQ ID NO: 331204 - DNA, 15 bp, Homo sapiens
ctacatagctcccta

SEQ ID NO: 331205 - DNA, 15 bp, Homo sapiens
cctacatagctccct

SEQ ID NO: 331206 - DNA, 15 bp, Homo sapiens
tcctacatagctccc

SEQ ID NO: 331207 - DNA, 15 bp, Homo sapiens
atcctacatagctcc

SEQ ID NO: 331208 - DNA, 15 bp, Homo sapiens
catcctacatagctc

SEQ ID NO: 331209 - DNA, 15 bp, Homo sapiens
tcatcctacatagct

SEQ ID NO: 331210 - DNA, 15 bp, Homo sapiens
atcatcctacatagc

SEQ ID NO: 331211 - DNA, 15 bp, Homo sapiens
gatcatcctacatag

SEQ ID NO: 331212 - DNA, 15 bp, Homo sapiens
tgatcatcctacata

SEQ ID NO: 331213 - DNA, 15 bp, Homo sapiens
ttgatcatcctacat

SEQ ID NO: 331214 - DNA, 15 bp, Homo sapiens
cttgatcatcctaca

SEQ ID NO: 331215 - DNA, 15 bp, Homo sapiens
acttgatcatcctac

SEQ ID NO: 331216 - DNA, 15 bp, Homo sapiens
gacttgatcatccta

SEQ ID NO: 331217 - DNA, 15 bp, Homo sapiens
agacttgatcatcct

SEQ ID NO: 331218 - DNA, 15 bp, Homo sapiens
tagacttgatcatcc

SEQ ID NO: 331219 - DNA, 15 bp, Homo sapiens
ctagacttgatcatc

SEQ ID NO: 331220 - DNA, 15 bp, Homo sapiens
tctagacttgatcat

SEQ ID NO: 331221 - DNA, 15 bp, Homo sapiens
ctctagacttgatca

SEQ ID NO: 331222 - DNA, 15 bp, Homo sapiens
cctctagacttgatc

SEQ ID NO: 331223 - DNA, 15 bp, Homo sapiens
acctctagacttgat

SEQ ID NO: 331224 - DNA, 15 bp, Homo sapiens
gacctctagacttga

SEQ ID NO: 331225 - DNA, 15 bp, Homo sapiens
agacctctagacttg

SEQ ID NO: 331226 - DNA, 15 bp, Homo sapiens
tagacctctagactt

SEQ ID NO: 331227 - DNA, 15 bp, Homo sapiens
ttagacctctagact

SEQ ID NO: 331228 - DNA, 15 bp, Homo sapiens
attagacctctagac

SEQ ID NO: 331229 - DNA, 15 bp, Homo sapiens
cattagacctctaga

SEQ ID NO: 331230 - DNA, 15 bp, Homo sapiens
acattagacctctag

SEQ ID NO: 331231 - DNA, 15 bp, Homo sapiens
tacattagacctcta

SEQ ID NO: 331232 - DNA, 15 bp, Homo sapiens
gtacattagacctct

SEQ ID NO: 331233 - DNA, 15 bp, Homo sapiens
tgtacattagacctc

SEQ ID NO: 331234 - DNA, 15 bp, Homo sapiens
ttgtacattagacct

SEQ ID NO: 331235 - DNA, 15 bp, Homo sapiens
gttgtacattagacc

SEQ ID NO: 331236 - DNA, 15 bp, Homo sapiens
tgttgtacattagac

SEQ ID NO: 331237 - DNA, 15 bp, Homo sapiens
atgttgtacattaga

SEQ ID NO: 331238 - DNA, 15 bp, Homo sapiens
catgttgtacattag

SEQ ID NO: 331239 - DNA, 15 bp, Homo sapiens
tcatgttgtacatta

SEQ ID NO: 331240 - DNA, 15 bp, Homo sapiens
ctcatgttgtacatt

SEQ ID NO: 331241 - DNA, 15 bp, Homo sapiens
cctcatgttgtacat

SEQ ID NO: 331242 - DNA, 15 bp, Homo sapiens
tcctcatgttgtaca

SEQ ID NO: 331243 - DNA, 15 bp, Homo sapiens
gtcctcatgttgtac

SEQ ID NO: 331244 - DNA, 15 bp, Homo sapiens
agtcctcatgttgta

SEQ ID NO: 331245 - DNA, 15 bp, Homo sapiens
tagtcctcatgttgt

SEQ ID NO: 331246 - DNA, 15 bp, Homo sapiens
atagtcctcatgttg

SEQ ID NO: 331247 - DNA, 15 bp, Homo sapiens
aatagtcctcatgtt

SEQ ID NO: 331248 - DNA, 15 bp, Homo sapiens
caatagtcctcatgt

SEQ ID NO: 331249 - DNA, 15 bp, Homo sapiens
gcaatagtcctcatg

SEQ ID NO: 331250 - DNA, 15 bp, Homo sapiens
agcaatagtcctcat

SEQ ID NO: 331251 - DNA, 15 bp, Homo sapiens
tagcaatagtcctca

SEQ ID NO: 331252 - DNA, 15 bp, Homo sapiens
ttagcaatagtcctc

SEQ ID NO: 331253 - DNA, 15 bp, Homo sapiens
attagcaatagtcct

SEQ ID NO: 331254 - DNA, 15 bp, Homo sapiens
tattagcaatagtcc

SEQ ID NO: 331255 - DNA, 15 bp, Homo sapiens
ttattagcaatagtc

SEQ ID NO: 331256 - DNA, 15 bp, Homo sapiens
tttattagcaatagt

SEQ ID NO: 331257 - DNA, 15 bp, Homo sapiens
ttttattagcaatag

SEQ ID NO: 331258 - DNA, 15 bp, Homo sapiens
attttattagcaata

SEQ ID NO: 331259 - DNA, 15 bp, Homo sapiens
aattttattagcaat

SEQ ID NO: 331260 - DNA, 15 bp, Homo sapiens
caattttattagcaa

SEQ ID NO: 331261 - DNA, 15 bp, Homo sapiens
acaattttattagca

SEQ ID NO: 331262 - DNA, 15 bp, Homo sapiens
tacaattttattagc

SEQ ID NO: 331263 - DNA, 15 bp, Homo sapiens
atacaattttattag

SEQ ID NO: 331264 - DNA, 15 bp, Homo sapiens
catacaattttatta

SEQ ID NO: 331265 - DNA, 15 bp, Homo sapiens
ccatacaattttatt

SEQ ID NO: 331266 - DNA, 15 bp, Homo sapiens
accatacaattttat

SEQ ID NO: 331267 - DNA, 15 bp, Homo sapiens
taccatacaatttta

SEQ ID NO: 331268 - DNA, 15 bp, Homo sapiens
ataccatacaatttt

SEQ ID NO: 331269 - DNA, 15 bp, Homo sapiens
aataccatacaattt

SEQ ID NO: 331270 - DNA, 15 bp, Homo sapiens
aaataccatacaatt

SEQ ID NO: 331271 - DNA, 15 bp, Homo sapiens
caaataccatacaat

SEQ ID NO: 331272 - DNA, 15 bp, Homo sapiens
ccaaataccatacaa

SEQ ID NO: 331273 - DNA, 15 bp, Homo sapiens
cccaaataccataca

SEQ ID NO: 331274 - DNA, 15 bp, Homo sapiens
tcccaaataccatac

SEQ ID NO: 331275 - DNA, 15 bp, Homo sapiens
atcccaaataccata

SEQ ID NO: 331276 - DNA, 15 bp, Homo sapiens
aatcccaaataccat

SEQ ID NO: 331277 - DNA, 15 bp, Homo sapiens
aaatcccaaatacca

SEQ ID NO: 331278 - DNA, 15 bp, Homo sapiens
aaaatcccaaatacc

SEQ ID NO: 331279 - DNA, 15 bp, Homo sapiens
aaaaatcccaaatac

SEQ ID NO: 331280 - DNA, 15 bp, Homo sapiens
caaaaatcccaaata

SEQ ID NO: 331281 - DNA, 15 bp, Homo sapiens
acaaaaatcccaaat

SEQ ID NO: 331282 - DNA, 15 bp, Homo sapiens
aacaaaaatcccaaa

SEQ ID NO: 331283 - DNA, 15 bp, Homo sapiens
taacaaaaatcccaa

SEQ ID NO: 331284 - DNA, 15 bp, Homo sapiens
ttaacaaaaatccca

SEQ ID NO: 331285 - DNA, 15 bp, Homo sapiens
tttaacaaaaatccc

SEQ ID NO: 331286 - DNA, 15 bp, Homo sapiens
atttaacaaaaatcc

SEQ ID NO: 331287 - DNA, 15 bp, Homo sapiens
tatttaacaaaaatc

SEQ ID NO: 331288 - DNA, 15 bp, Homo sapiens
atatttaacaaaaat

SEQ ID NO: 331289 - DNA, 15 bp, Homo sapiens
catatttaacaaaaa

SEQ ID NO: 331290 - DNA, 15 bp, Homo sapiens
acatatttaacaaaa

SEQ ID NO: 331291 - DNA, 15 bp, Homo sapiens
tacatatttaacaaa

SEQ ID NO: 331292 - DNA, 15 bp, Homo sapiens
ctacatatttaacaa

SEQ ID NO: 331293 - DNA, 15 bp, Homo sapiens
tctacatatttaaca

SEQ ID NO: 331294 - DNA, 15 bp, Homo sapiens
atctacatatttaac

SEQ ID NO: 331295 - DNA, 15 bp, Homo sapiens
aatctacatatttaa

SEQ ID NO: 331296 - DNA, 15 bp, Homo sapiens
aaatctacatattta

SEQ ID NO: 331297 - DNA, 15 bp, Homo sapiens
aaaatctacatattt

SEQ ID NO: 331298 - DNA, 15 bp, Homo sapiens
taaaatctacatatt

SEQ ID NO: 331299 - DNA, 15 bp, Homo sapiens
ctaaaatctacatat

SEQ ID NO: 331300 - DNA, 15 bp, Homo sapiens
gctaaaatctacata

SEQ ID NO: 331301 - DNA, 15 bp, Homo sapiens
agctaaaatctacat

SEQ ID NO: 331302 - DNA, 15 bp, Homo sapiens
cagctaaaatctaca

SEQ ID NO: 331303 - DNA, 15 bp, Homo sapiens
gcagctaaaatctac

SEQ ID NO: 331304 - DNA, 15 bp, Homo sapiens
agcagctaaaatcta

SEQ ID NO: 331305 - DNA, 15 bp, Homo sapiens
gagcagctaaaatct

SEQ ID NO: 331306 - DNA, 15 bp, Homo sapiens
agagcagctaaaatc

SEQ ID NO: 331307 - DNA, 15 bp, Homo sapiens
aagagcagctaaaat

SEQ ID NO: 331308 - DNA, 15 bp, Homo sapiens
caagagcagctaaaa

SEQ ID NO: 331309 - DNA, 15 bp, Homo sapiens
acaagagcagctaaa

SEQ ID NO: 331310 - DNA, 15 bp, Homo sapiens
gacaagagcagctaa

SEQ ID NO: 331311 - DNA, 15 bp, Homo sapiens
tgacaagagcagcta

SEQ ID NO: 331312 - DNA, 15 bp, Homo sapiens
gtgacaagagcagct

SEQ ID NO: 331313 - DNA, 15 bp, Homo sapiens
tgtgacaagagcagc

SEQ ID NO: 331314 - DNA, 15 bp, Homo sapiens
gtgtgacaagagcag

SEQ ID NO: 331315 - DNA, 15 bp, Homo sapiens
tgtgtgacaagagca

SEQ ID NO: 331316 - DNA, 15 bp, Homo sapiens
gtgtgtgacaagagc

SEQ ID NO: 331317 - DNA, 15 bp, Homo sapiens
tgtgtgtgacaagag

SEQ ID NO: 331318 - DNA, 15 bp, Homo sapiens
ttgtgtgtgacaaga

SEQ ID NO: 331319 - DNA, 15 bp, Homo sapiens
tttgtgtgtgacaag

SEQ ID NO: 331320 - DNA, 15 bp, Homo sapiens
ttttgtgtgtgacaa

SEQ ID NO: 331321 - DNA, 15 bp, Homo sapiens
tttttgtgtgtgaca

SEQ ID NO: 331322 - DNA, 15 bp, Homo sapiens
gtttttgtgtgtgac

SEQ ID NO: 331323 - DNA, 15 bp, Homo sapiens
cgtttttgtgtgtga

SEQ ID NO: 331324 - DNA, 15 bp, Homo sapiens
acgtttttgtgtgtg

SEQ ID NO: 331325 - DNA, 15 bp, Homo sapiens
tacgtttttgtgtgt

SEQ ID NO: 331326 - DNA, 15 bp, Homo sapiens
ttacgtttttgtgtg

SEQ ID NO: 331327 - DNA, 15 bp, Homo sapiens
gttacgtttttgtgt

SEQ ID NO: 331328 - DNA, 15 bp, Homo sapiens
agttacgtttttgtg

SEQ ID NO: 331329 - DNA, 15 bp, Homo sapiens
tagttacgtttttgt

SEQ ID NO: 331330 - DNA, 15 bp, Homo sapiens
atagttacgtttttg

SEQ ID NO: 331331 - DNA, 15 bp, Homo sapiens
catagttacgttttt

SEQ ID NO: 331332 - DNA, 15 bp, Homo sapiens
acatagttacgtttt

SEQ ID NO: 331333 - DNA, 15 bp, Homo sapiens
cacatagttacgttt

SEQ ID NO: 331334 - DNA, 15 bp, Homo sapiens
tcacatagttacgtt

SEQ ID NO: 331335 - DNA, 15 bp, Homo sapiens
ctcacatagttacgt

SEQ ID NO: 331336 - DNA, 15 bp, Homo sapiens
tctcacatagttacg

SEQ ID NO: 331337 - DNA, 15 bp, Homo sapiens
atctcacatagttac

SEQ ID NO: 331338 - DNA, 15 bp, Homo sapiens
catctcacatagtta

SEQ ID NO: 331339 - DNA, 15 bp, Homo sapiens
ccatctcacatagtt

SEQ ID NO: 331340 - DNA, 15 bp, Homo sapiens
accatctcacatagt

SEQ ID NO: 331341 - DNA, 15 bp, Homo sapiens
taccatctcacatag

SEQ ID NO: 331342 - DNA, 15 bp, Homo sapiens
ctaccatctcacata

SEQ ID NO: 331343 - DNA, 15 bp, Homo sapiens
cctaccatctcacat

SEQ ID NO: 331344 - DNA, 15 bp, Homo sapiens
acctaccatctcaca

SEQ ID NO: 331345 - DNA, 15 bp, Homo sapiens
tacctaccatctcac

SEQ ID NO: 331346 - DNA, 15 bp, Homo sapiens
ttacctaccatctca

SEQ ID NO: 331347 - DNA, 15 bp, Homo sapiens
attacctaccatctc

SEQ ID NO: 331348 - DNA, 15 bp, Homo sapiens
tattacctaccatct

SEQ ID NO: 331349 - DNA, 15 bp, Homo sapiens
atattacctaccatc

SEQ ID NO: 331350 - DNA, 15 bp, Homo sapiens
gatattacctaccat

SEQ ID NO: 331351 - DNA, 15 bp, Homo sapiens
tgatattacctacca

SEQ ID NO: 331352 - DNA, 15 bp, Homo sapiens
atgatattacctacc

SEQ ID NO: 331353 - DNA, 15 bp, Homo sapiens
catgatattacctac

SEQ ID NO: 331354 - DNA, 15 bp, Homo sapiens
acatgatattaccta

SEQ ID NO: 331355 - DNA, 15 bp, Homo sapiens
aacatgatattacct

SEQ ID NO: 331356 - DNA, 15 bp, Homo sapiens
caacatgatattacc

SEQ ID NO: 331357 - DNA, 15 bp, Homo sapiens
acaacatgatattac

SEQ ID NO: 331358 - DNA, 15 bp, Homo sapiens
tacaacatgatatta

SEQ ID NO: 331359 - DNA, 15 bp, Homo sapiens
ttacaacatgatatt

SEQ ID NO: 331360 - DNA, 15 bp, Homo sapiens
tttacaacatgatat

SEQ ID NO: 331361 - DNA, 15 bp, Homo sapiens
gtttacaacatgata

SEQ ID NO: 331362 - DNA, 15 bp, Homo sapiens
ggtttacaacatgat

SEQ ID NO: 331363 - DNA, 15 bp, Homo sapiens
aggtttacaacatga

SEQ ID NO: 331364 - DNA, 15 bp, Homo sapiens
gaggtttacaacatg

SEQ ID NO: 331365 - DNA, 15 bp, Homo sapiens
tgaggtttacaacat

SEQ ID NO: 331366 - DNA, 15 bp, Homo sapiens
ttgaggtttacaaca

SEQ ID NO: 331367 - DNA, 15 bp, Homo sapiens
tttgaggtttacaac

SEQ ID NO: 331368 - DNA, 15 bp, Homo sapiens
gtttgaggtttacaa

SEQ ID NO: 331369 - DNA, 15 bp, Homo sapiens
tgtttgaggtttaca

SEQ ID NO: 331370 - DNA, 15 bp, Homo sapiens
atgtttgaggtttac

SEQ ID NO: 331371 - DNA, 15 bp, Homo sapiens
tatgtttgaggttta

SEQ ID NO: 331372 - DNA, 15 bp, Homo sapiens
gtatgtttgaggttt

SEQ ID NO: 331373 - DNA, 15 bp, Homo sapiens
tgtatgtttgaggtt

SEQ ID NO: 331374 - DNA, 15 bp, Homo sapiens
gtgtatgtttgaggt

SEQ ID NO: 331375 - DNA, 15 bp, Homo sapiens
tgtgtatgtttgagg

SEQ ID NO: 331376 - DNA, 15 bp, Homo sapiens
ttgtgtatgtttgag

SEQ ID NO: 331377 - DNA, 15 bp, Homo sapiens
attgtgtatgtttga

SEQ ID NO: 331378 - DNA, 15 bp, Homo sapiens
tattgtgtatgtttg

SEQ ID NO: 331379 - DNA, 15 bp, Homo sapiens
ttattgtgtatgttt

SEQ ID NO: 331380 - DNA, 15 bp, Homo sapiens
gttattgtgtatgtt

SEQ ID NO: 331381 - DNA, 15 bp, Homo sapiens
tgttattgtgtatgt

SEQ ID NO: 331382 - DNA, 15 bp, Homo sapiens
atgttattgtgtatg

SEQ ID NO: 331383 - DNA, 15 bp, Homo sapiens
aatgttattgtgtat

SEQ ID NO: 331384 - DNA, 15 bp, Homo sapiens
aaatgttattgtgta

SEQ ID NO: 331385 - DNA, 15 bp, Homo sapiens
taaatgttattgtgt

SEQ ID NO: 331386 - DNA, 15 bp, Homo sapiens
ataaatgttattgtg

SEQ ID NO: 331387 - DNA, 15 bp, Homo sapiens
aataaatgttattgt

SEQ ID NO: 331388 - DNA, 15 bp, Homo sapiens
aaataaatgttattg

SEQ ID NO: 331389 - DNA, 15 bp, Homo sapiens
taaataaatgttatt

SEQ ID NO: 331390 - DNA, 15 bp, Homo sapiens
ttaaataaatgttat

SEQ ID NO: 331391 - DNA, 15 bp, Homo sapiens
tttaaataaatgtta

SEQ ID NO: 331392 - DNA, 15 bp, Homo sapiens
ttttaaataaatgtt

SEQ ID NO: 331393 - DNA, 15 bp, Homo sapiens
tttttaaataaatgt

SEQ ID NO: 331394 - DNA, 15 bp, Homo sapiens
ttttttaaataaatg

SEQ ID NO: 331395 - DNA, 15 bp, Homo sapiens
attttttaaataaat

SEQ ID NO: 331396 - DNA, 15 bp, Homo sapiens
tattttttaaataaa

SEQ ID NO: 331397 - DNA, 15 bp, Homo sapiens
ttattttttaaataa

SEQ ID NO: 331398 - DNA, 15 bp, Homo sapiens
tttattttttaaata

SEQ ID NO: 331399 - DNA, 15 bp, Homo sapiens
gtttattttttaaat

SEQ ID NO: 331400 - DNA, 15 bp, Homo sapiens
agtttattttttaaa

SEQ ID NO: 331401 - DNA, 15 bp, Homo sapiens
cagtttattttttaa

SEQ ID NO: 331402 - DNA, 15 bp, Homo sapiens
ccagtttatttttta

SEQ ID NO: 331403 - DNA, 15 bp, Homo sapiens
cccagtttatttttt

SEQ ID NO: 331404 - DNA, 15 bp, Homo sapiens
gcccagtttattttt

SEQ ID NO: 331405 - DNA, 15 bp, Homo sapiens
agcccagtttatttt

SEQ ID NO: 331406 - DNA, 15 bp, Homo sapiens
cagcccagtttattt

SEQ ID NO: 331407 - DNA, 15 bp, Homo sapiens
ccagcccagtttatt

SEQ ID NO: 331408 - DNA, 15 bp, Homo sapiens
cccagcccagtttat

SEQ ID NO: 331409 - DNA, 15 bp, Homo sapiens
gcccagcccagttta

SEQ ID NO: 331410 - DNA, 15 bp, Homo sapiens
cgcccagcccagttt

SEQ ID NO: 331411 - DNA, 15 bp, Homo sapiens
gcgcccagcccagtt

SEQ ID NO: 331412 - DNA, 15 bp, Homo sapiens
cgcgcccagcccagt

SEQ ID NO: 331413 - DNA, 15 bp, Homo sapiens
ccgcgcccagcccag

SEQ ID NO: 331414 - DNA, 15 bp, Homo sapiens
accgcgcccagccca

SEQ ID NO: 331415 - DNA, 15 bp, Homo sapiens
caccgcgcccagccc

SEQ ID NO: 331416 - DNA, 15 bp, Homo sapiens
ccaccgcgcccagcc

SEQ ID NO: 331417 - DNA, 15 bp, Homo sapiens
tccaccgcgcccagc

SEQ ID NO: 331418 - DNA, 15 bp, Homo sapiens
atccaccgcgcccag

SEQ ID NO: 331419 - DNA, 15 bp, Homo sapiens
gatccaccgcgccca

SEQ ID NO: 331420 - DNA, 15 bp, Homo sapiens
tgatccaccgcgccc

SEQ ID NO: 331421 - DNA, 15 bp, Homo sapiens
gtgatccaccgcgcc

SEQ ID NO: 331422 - DNA, 15 bp, Homo sapiens
tgtgatccaccgcgc

SEQ ID NO: 331423 - DNA, 15 bp, Homo sapiens
gtgtgatccaccgcg

SEQ ID NO: 331424 - DNA, 15 bp, Homo sapiens
ggtgtgatccaccgc

SEQ ID NO: 331425 - DNA, 15 bp, Homo sapiens
aggtgtgatccaccg

SEQ ID NO: 331426 - DNA, 15 bp, Homo sapiens
caggtgtgatccacc

SEQ ID NO: 331427 - DNA, 15 bp, Homo sapiens
acaggtgtgatccac

SEQ ID NO: 331428 - DNA, 15 bp, Homo sapiens
tacaggtgtgatcca

SEQ ID NO: 331429 - DNA, 15 bp, Homo sapiens
ttacaggtgtgatcc

SEQ ID NO: 331430 - DNA, 15 bp, Homo sapiens
attacaggtgtgatc

SEQ ID NO: 331431 - DNA, 15 bp, Homo sapiens
gattacaggtgtgat

SEQ ID NO: 331432 - DNA, 15 bp, Homo sapiens
cgccttggcctccca

SEQ ID NO: 331433 - DNA, 15 bp, Homo sapiens
ccgccttggcctccc

SEQ ID NO: 331434 - DNA, 15 bp, Homo sapiens
cccgccttggcctcc

SEQ ID NO: 331435 - DNA, 15 bp, Homo sapiens
gcccgccttggcctc

SEQ ID NO: 331436 - DNA, 15 bp, Homo sapiens
tgcccgccttggcct

SEQ ID NO: 331437 - DNA, 15 bp, Homo sapiens
ctgcccgccttggcc

SEQ ID NO: 331438 - DNA, 15 bp, Homo sapiens
tctgcccgccttggc

SEQ ID NO: 331439 - DNA, 15 bp, Homo sapiens
atctgcccgccttgg

SEQ ID NO: 331440 - DNA, 15 bp, Homo sapiens
gatctgcccgccttg

SEQ ID NO: 331441 - DNA, 15 bp, Homo sapiens
tgatctgcccgcctt

SEQ ID NO: 331442 - DNA, 15 bp, Homo sapiens
ggtgatctgcccgcc

SEQ ID NO: 331443 - DNA, 15 bp, Homo sapiens
aggtgatctgcccgc

SEQ ID NO: 331444 - DNA, 15 bp, Homo sapiens
caggtgatctgcccg

SEQ ID NO: 331445 - DNA, 15 bp, Homo sapiens
tcaggtgatctgccc

SEQ ID NO: 331446 - DNA, 15 bp, Homo sapiens
atctcgaactcttga

SEQ ID NO: 331447 - DNA, 15 bp, Homo sapiens
gatctcgaactcttg

SEQ ID NO: 331448 - DNA, 15 bp, Homo sapiens
tgatctcgaactctt

SEQ ID NO: 331449 - DNA, 15 bp, Homo sapiens
ctgatctcgaactct

SEQ ID NO: 331450 - DNA, 15 bp, Homo sapiens
gctgatctcgaactc

SEQ ID NO: 331451 - DNA, 15 bp, Homo sapiens
ggctgatctcgaact

SEQ ID NO: 331452 - DNA, 15 bp, Homo sapiens
aggctgatctcgaac

SEQ ID NO: 331453 - DNA, 15 bp, Homo sapiens
caggctgatctcgaa

SEQ ID NO: 331454 - DNA, 15 bp, Homo sapiens
ccaggctgatctcga

SEQ ID NO: 331455 - DNA, 15 bp, Homo sapiens
gccaggctgatctcg

SEQ ID NO: 331456 - DNA, 15 bp, Homo sapiens
aggaatggttttgtc

SEQ ID NO: 331457 - DNA, 15 bp, Homo sapiens
aaggaatggttttgt

SEQ ID NO: 331458 - DNA, 15 bp, Homo sapiens
gaaggaatggttttg

SEQ ID NO: 331459 - DNA, 15 bp, Homo sapiens
ggaaggaatggtttt

SEQ ID NO: 331460 - DNA, 15 bp, Homo sapiens
aggaaggaatggttt

SEQ ID NO: 331461 - DNA, 15 bp, Homo sapiens
aaggaaggaatggtt

SEQ ID NO: 331462 - DNA, 15 bp, Homo sapiens
aaaggaaggaatggt

SEQ ID NO: 331463 - DNA, 15 bp, Homo sapiens
taaaggaaggaatgg

SEQ ID NO: 331464 - DNA, 15 bp, Homo sapiens
ataaaggaaggaatg

SEQ ID NO: 331465 - DNA, 15 bp, Homo sapiens
aataaaggaaggaat

SEQ ID NO: 331466 - DNA, 15 bp, Homo sapiens
aaataaaggaaggaa

SEQ ID NO: 331467 - DNA, 15 bp, Homo sapiens
aaaataaaggaagga

SEQ ID NO: 331468 - DNA, 15 bp, Homo sapiens
aaaaataaaggaagg

SEQ ID NO: 331469 - DNA, 15 bp, Homo sapiens
gaaaaataaaggaag

SEQ ID NO: 331470 - DNA, 15 bp, Homo sapiens
ggaaaaataaaggaa

SEQ ID NO: 331471 - DNA, 15 bp, Homo sapiens
gggaaaaataaagga

SEQ ID NO: 331472 - DNA, 15 bp, Homo sapiens
tgggaaaaataaagg

SEQ ID NO: 331473 - DNA, 15 bp, Homo sapiens
atgggaaaaataaag

SEQ ID NO: 331474 - DNA, 15 bp, Homo sapiens
aatgggaaaaataaa

SEQ ID NO: 331475 - DNA, 15 bp, Homo sapiens
aaatgggaaaaataa

SEQ ID NO: 331476 - DNA, 15 bp, Homo sapiens
caaatgggaaaaata

SEQ ID NO: 331477 - DNA, 15 bp, Homo sapiens
ccaaatgggaaaaat

SEQ ID NO: 331478 - DNA, 15 bp, Homo sapiens
accaaatgggaaaaa

SEQ ID NO: 331479 - DNA, 15 bp, Homo sapiens
aaccaaatgggaaaa

SEQ ID NO: 331480 - DNA, 15 bp, Homo sapiens
taaccaaatgggaaa

SEQ ID NO: 331481 - DNA, 15 bp, Homo sapiens
ctaaccaaatgggaa

SEQ ID NO: 331482 - DNA, 15 bp, Homo sapiens
tctaaccaaatggga

SEQ ID NO: 331483 - DNA, 15 bp, Homo sapiens
gtctaaccaaatggg

SEQ ID NO: 331484 - DNA, 15 bp, Homo sapiens
agtctaaccaaatgg

SEQ ID NO: 331485 - DNA, 15 bp, Homo sapiens
tagtctaaccaaatg

SEQ ID NO: 331486 - DNA, 15 bp, Homo sapiens
ctagtctaaccaaat

SEQ ID NO: 331487 - DNA, 15 bp, Homo sapiens
tctagtctaaccaaa

SEQ ID NO: 331488 - DNA, 15 bp, Homo sapiens
ttctagtctaaccaa

SEQ ID NO: 331489 - DNA, 15 bp, Homo sapiens
attctagtctaacca

SEQ ID NO: 331490 - DNA, 15 bp, Homo sapiens
aattctagtctaacc

SEQ ID NO: 331491 - DNA, 15 bp, Homo sapiens
gaattctagtctaac

SEQ ID NO: 331492 - DNA, 15 bp, Homo sapiens
agaattctagtctaa

SEQ ID NO: 331493 - DNA, 15 bp, Homo sapiens
tagaattctagtcta

SEQ ID NO: 331494 - DNA, 15 bp, Homo sapiens
ttagaattctagtct

SEQ ID NO: 331495 - DNA, 15 bp, Homo sapiens
attagaattctagtc

SEQ ID NO: 331496 - DNA, 15 bp, Homo sapiens
aattagaattctagt

SEQ ID NO: 331497 - DNA, 15 bp, Homo sapiens
gaattagaattctag

SEQ ID NO: 331498 - DNA, 15 bp, Homo sapiens
ggaattagaattcta

SEQ ID NO: 331499 - DNA, 15 bp, Homo sapiens
gggaattagaattct

SEQ ID NO: 331500 - DNA, 15 bp, Homo sapiens
agggaattagaattc

SEQ ID NO: 331501 - DNA, 15 bp, Homo sapiens
gagggaattagaatt

SEQ ID NO: 331502 - DNA, 15 bp, Homo sapiens
agagggaattagaat

SEQ ID NO: 331503 - DNA, 15 bp, Homo sapiens
aagagggaattagaa

SEQ ID NO: 331504 - DNA, 15 bp, Homo sapiens
caagagggaattaga

SEQ ID NO: 331505 - DNA, 15 bp, Homo sapiens
tcaagagggaattag

SEQ ID NO: 331506 - DNA, 15 bp, Homo sapiens
ttcaagagggaatta

SEQ ID NO: 331507 - DNA, 15 bp, Homo sapiens
gttcaagagggaatt

SEQ ID NO: 331508 - DNA, 15 bp, Homo sapiens
tgttcaagagggaat

SEQ ID NO: 331509 - DNA, 15 bp, Homo sapiens
gtgttcaagagggaa

SEQ ID NO: 331510 - DNA, 15 bp, Homo sapiens
agtgttcaagaggga

SEQ ID NO: 331511 - DNA, 15 bp, Homo sapiens
aagtgttcaagaggg

SEQ ID NO: 331512 - DNA, 15 bp, Homo sapiens
gaagtgttcaagagg

SEQ ID NO: 331513 - DNA, 15 bp, Homo sapiens
agaagtgttcaagag

SEQ ID NO: 331514 - DNA, 15 bp, Homo sapiens
tagaagtgttcaaga

SEQ ID NO: 331515 - DNA, 15 bp, Homo sapiens
ctagaagtgttcaag

SEQ ID NO: 331516 - DNA, 15 bp, Homo sapiens
gctagaagtgttcaa

SEQ ID NO: 331517 - DNA, 15 bp, Homo sapiens
tgctagaagtgttca

SEQ ID NO: 331518 - DNA, 15 bp, Homo sapiens
ttgctagaagtgttc

SEQ ID NO: 331519 - DNA, 15 bp, Homo sapiens
attgctagaagtgtt

SEQ ID NO: 331520 - DNA, 15 bp, Homo sapiens
cattgctagaagtgt

SEQ ID NO: 331521 - DNA, 15 bp, Homo sapiens
tcattgctagaagtg

SEQ ID NO: 331522 - DNA, 15 bp, Homo sapiens
ttcattgctagaagt

SEQ ID NO: 331523 - DNA, 15 bp, Homo sapiens
tttcattgctagaag

SEQ ID NO: 331524 - DNA, 15 bp, Homo sapiens
ctttcattgctagaa

SEQ ID NO: 331525 - DNA, 15 bp, Homo sapiens
cctttcattgctaga

SEQ ID NO: 331526 - DNA, 15 bp, Homo sapiens
gcctttcattgctag

SEQ ID NO: 331527 - DNA, 15 bp, Homo sapiens
agcctttcattgcta

SEQ ID NO: 331528 - DNA, 15 bp, Homo sapiens
gagcctttcattgct

SEQ ID NO: 331529 - DNA, 15 bp, Homo sapiens
agagcctttcattgc

SEQ ID NO: 331530 - DNA, 15 bp, Homo sapiens
gagagcctttcattg

SEQ ID NO: 331531 - DNA, 15 bp, Homo sapiens
tgagagcctttcatt

SEQ ID NO: 331532 - DNA, 15 bp, Homo sapiens
ttgagagcctttcat

SEQ ID NO: 331533 - DNA, 15 bp, Homo sapiens
cttgagagcctttca

SEQ ID NO: 331534 - DNA, 15 bp, Homo sapiens
ccttgagagcctttc

SEQ ID NO: 331535 - DNA, 15 bp, Homo sapiens
tccttgagagccttt

SEQ ID NO: 331536 - DNA, 15 bp, Homo sapiens
gtccttgagagcctt

SEQ ID NO: 331537 - DNA, 15 bp, Homo sapiens
tgtccttgagagcct

SEQ ID NO: 331538 - DNA, 15 bp, Homo sapiens
ctgtccttgagagcc

SEQ ID NO: 331539 - DNA, 15 bp, Homo sapiens
tctgtccttgagagc

SEQ ID NO: 331540 - DNA, 15 bp, Homo sapiens
gtctgtccttgagag

SEQ ID NO: 331541 - DNA, 15 bp, Homo sapiens
tgtctgtccttgaga

SEQ ID NO: 331542 - DNA, 15 bp, Homo sapiens
ctgtctgtccttgag

SEQ ID NO: 331543 - DNA, 15 bp, Homo sapiens
tctgtctgtccttga

SEQ ID NO: 331544 - DNA, 15 bp, Homo sapiens
atctgtctgtccttg

SEQ ID NO: 331545 - DNA, 15 bp, Homo sapiens
catctgtctgtcctt

SEQ ID NO: 331546 - DNA, 15 bp, Homo sapiens
tcatctgtctgtcct

SEQ ID NO: 331547 - DNA, 15 bp, Homo sapiens
ttcatctgtctgtcc

SEQ ID NO: 331548 - DNA, 15 bp, Homo sapiens
gttcatctgtctgtc

SEQ ID NO: 331549 - DNA, 15 bp, Homo sapiens
ggttcatctgtctgt

SEQ ID NO: 331550 - DNA, 15 bp, Homo sapiens
tggttcatctgtctg

SEQ ID NO: 331551 - DNA, 15 bp, Homo sapiens
gtggttcatctgtct

SEQ ID NO: 331552 - DNA, 15 bp, Homo sapiens
tgtggttcatctgtc

SEQ ID NO: 331553 - DNA, 15 bp, Homo sapiens
gtgtggttcatctgt

SEQ ID NO: 331554 - DNA, 15 bp, Homo sapiens
ggtgtggttcatctg

SEQ ID NO: 331555 - DNA, 15 bp, Homo sapiens
aggtgtggttcatct

SEQ ID NO: 331556 - DNA, 15 bp, Homo sapiens
taggtgtggttcatc

SEQ ID NO: 331557 - DNA, 15 bp, Homo sapiens
ttaggtgtggttcat

SEQ ID NO: 331558 - DNA, 15 bp, Homo sapiens
tttaggtgtggttca

SEQ ID NO: 331559 - DNA, 15 bp, Homo sapiens
ctttaggtgtggttc

SEQ ID NO: 331560 - DNA, 15 bp, Homo sapiens
actttaggtgtggtt

SEQ ID NO: 331561 - DNA, 15 bp, Homo sapiens
cactttaggtgtggt

SEQ ID NO: 331562 - DNA, 15 bp, Homo sapiens
tcactttaggtgtgg

SEQ ID NO: 331563 - DNA, 15 bp, Homo sapiens
ctcactttaggtgtg

SEQ ID NO: 331564 - DNA, 15 bp, Homo sapiens
tctcactttaggtgt

SEQ ID NO: 331565 - DNA, 15 bp, Homo sapiens
ttctcactttaggtg

SEQ ID NO: 331566 - DNA, 15 bp, Homo sapiens
attctcactttaggt

SEQ ID NO: 331567 - DNA, 15 bp, Homo sapiens
aattctcactttagg

SEQ ID NO: 331568 - DNA, 15 bp, Homo sapiens
caattctcactttag

SEQ ID NO: 331569 - DNA, 15 bp, Homo sapiens
acaattctcacttta

SEQ ID NO: 331570 - DNA, 15 bp, Homo sapiens
cacaattctcacttt

SEQ ID NO: 331571 - DNA, 15 bp, Homo sapiens
gcacaattctcactt

SEQ ID NO: 331572 - DNA, 15 bp, Homo sapiens
ggcacaattctcact

SEQ ID NO: 331573 - DNA, 15 bp, Homo sapiens
aggcacaattctcac

SEQ ID NO: 331574 - DNA, 15 bp, Homo sapiens
aaggcacaattctca

SEQ ID NO: 331575 - DNA, 15 bp, Homo sapiens
aaaggcacaattctc

SEQ ID NO: 331576 - DNA, 15 bp, Homo sapiens
aaaaggcacaattct

SEQ ID NO: 331577 - DNA, 15 bp, Homo sapiens
aaaaaggcacaattc

SEQ ID NO: 331578 - DNA, 15 bp, Homo sapiens
aaaaaaggcacaatt

SEQ ID NO: 331579 - DNA, 15 bp, Homo sapiens
caaaaaaggcacaat

SEQ ID NO: 331580 - DNA, 15 bp, Homo sapiens
acaaaaaaggcacaa

SEQ ID NO: 331581 - DNA, 15 bp, Homo sapiens
cacaaaaaaggcaca

SEQ ID NO: 331582 - DNA, 15 bp, Homo sapiens
ccacaaaaaaggcac

SEQ ID NO: 331583 - DNA, 15 bp, Homo sapiens
tccacaaaaaaggca

SEQ ID NO: 331584 - DNA, 15 bp, Homo sapiens
atccacaaaaaaggc

SEQ ID NO: 331585 - DNA, 15 bp, Homo sapiens
aatccacaaaaaagg

SEQ ID NO: 331586 - DNA, 15 bp, Homo sapiens
aaatccacaaaaaag

SEQ ID NO: 331587 - DNA, 15 bp, Homo sapiens
gaaatccacaaaaaa

SEQ ID NO: 331588 - DNA, 15 bp, Homo sapiens
tgaaatccacaaaaa

SEQ ID NO: 331589 - DNA, 15 bp, Homo sapiens
ttgaaatccacaaaa

SEQ ID NO: 331590 - DNA, 15 bp, Homo sapiens
gttgaaatccacaaa

SEQ ID NO: 331591 - DNA, 15 bp, Homo sapiens
tgttgaaatccacaa

SEQ ID NO: 331592 - DNA, 15 bp, Homo sapiens
atgttgaaatccaca

SEQ ID NO: 331593 - DNA, 15 bp, Homo sapiens
aatgttgaaatccac

SEQ ID NO: 331594 - DNA, 15 bp, Homo sapiens
aaatgttgaaatcca

SEQ ID NO: 331595 - DNA, 15 bp, Homo sapiens
aaaatgttgaaatcc

SEQ ID NO: 331596 - DNA, 15 bp, Homo sapiens
gaaaatgttgaaatc

SEQ ID NO: 331597 - DNA, 15 bp, Homo sapiens
agaaaatgttgaaat

SEQ ID NO: 331598 - DNA, 15 bp, Homo sapiens
aagaaaatgttgaaa

SEQ ID NO: 331599 - DNA, 15 bp, Homo sapiens
gaagaaaatgttgaa

SEQ ID NO: 331600 - DNA, 15 bp, Homo sapiens
ggaagaaaatgttga

SEQ ID NO: 331601 - DNA, 15 bp, Homo sapiens
gggaagaaaatgttg

SEQ ID NO: 331602 - DNA, 15 bp, Homo sapiens
ggggaagaaaatgtt

SEQ ID NO: 331603 - DNA, 15 bp, Homo sapiens
aggggaagaaaatgt

SEQ ID NO: 331604 - DNA, 15 bp, Homo sapiens
aaggggaagaaaatg

SEQ ID NO: 331605 - DNA, 15 bp, Homo sapiens
gaaggggaagaaaat

SEQ ID NO: 331606 - DNA, 15 bp, Homo sapiens
ggaaggggaagaaaa

SEQ ID NO: 331607 - DNA, 15 bp, Homo sapiens
aggaaggggaagaaa

SEQ ID NO: 331608 - DNA, 15 bp, Homo sapiens
caggaaggggaagaa

SEQ ID NO: 331609 - DNA, 15 bp, Homo sapiens
ccaggaaggggaaga

SEQ ID NO: 331610 - DNA, 15 bp, Homo sapiens
gccaggaaggggaag

SEQ ID NO: 331611 - DNA, 15 bp, Homo sapiens
agccaggaaggggaa

SEQ ID NO: 331612 - DNA, 15 bp, Homo sapiens
gagccaggaagggga

SEQ ID NO: 331613 - DNA, 15 bp, Homo sapiens
ggagccaggaagggg

SEQ ID NO: 331614 - DNA, 15 bp, Homo sapiens
tggagccaggaaggg

SEQ ID NO: 331615 - DNA, 15 bp, Homo sapiens
atggagccaggaagg

SEQ ID NO: 331616 - DNA, 15 bp, Homo sapiens
gatggagccaggaag

SEQ ID NO: 331617 - DNA, 15 bp, Homo sapiens
ggatggagccaggaa

SEQ ID NO: 331618 - DNA, 15 bp, Homo sapiens
aggatggagccagga

SEQ ID NO: 331619 - DNA, 15 bp, Homo sapiens
aaggatggagccagg

SEQ ID NO: 331620 - DNA, 15 bp, Homo sapiens
aaaggatggagccag

SEQ ID NO: 331621 - DNA, 15 bp, Homo sapiens
taaaggatggagcca

SEQ ID NO: 331622 - DNA, 15 bp, Homo sapiens
ttaaaggatggagcc

SEQ ID NO: 331623 - DNA, 15 bp, Homo sapiens
tttaaaggatggagc

SEQ ID NO: 331624 - DNA, 15 bp, Homo sapiens
ctttaaaggatggag

SEQ ID NO: 331625 - DNA, 15 bp, Homo sapiens
cctttaaaggatgga

SEQ ID NO: 331626 - DNA, 15 bp, Homo sapiens
acctttaaaggatgg

SEQ ID NO: 331627 - DNA, 15 bp, Homo sapiens
tacctttaaaggatg

SEQ ID NO: 331628 - DNA, 15 bp, Homo sapiens
ctacctttaaaggat

SEQ ID NO: 331629 - DNA, 15 bp, Homo sapiens
actacctttaaagga

SEQ ID NO: 331630 - DNA, 15 bp, Homo sapiens
aactacctttaaagg

SEQ ID NO: 331631 - DNA, 15 bp, Homo sapiens
gaactacctttaaag

SEQ ID NO: 331632 - DNA, 15 bp, Homo sapiens
ggaactacctttaaa

SEQ ID NO: 331633 - DNA, 15 bp, Homo sapiens
tggaactacctttaa

SEQ ID NO: 331634 - DNA, 15 bp, Homo sapiens
atggaactaccttta

SEQ ID NO: 331635 - DNA, 15 bp, Homo sapiens
catggaactaccttt

SEQ ID NO: 331636 - DNA, 15 bp, Homo sapiens
ccatggaactacctt

SEQ ID NO: 331637 - DNA, 15 bp, Homo sapiens
tccatggaactacct

SEQ ID NO: 331638 - DNA, 15 bp, Homo sapiens
ctccatggaactacc

SEQ ID NO: 331639 - DNA, 15 bp, Homo sapiens
tctccatggaactac

SEQ ID NO: 331640 - DNA, 15 bp, Homo sapiens
ttctccatggaacta

SEQ ID NO: 331641 - DNA, 15 bp, Homo sapiens
attctccatggaact

SEQ ID NO: 331642 - DNA, 15 bp, Homo sapiens
aattctccatggaac

SEQ ID NO: 331643 - DNA, 15 bp, Homo sapiens
caattctccatggaa

SEQ ID NO: 331644 - DNA, 15 bp, Homo sapiens
acaattctccatgga

SEQ ID NO: 331645 - DNA, 15 bp, Homo sapiens
tacaattctccatgg

SEQ ID NO: 331646 - DNA, 15 bp, Homo sapiens
ctacaattctccatg

SEQ ID NO: 331647 - DNA, 15 bp, Homo sapiens
actacaattctccat

SEQ ID NO: 331648 - DNA, 15 bp, Homo sapiens
cactacaattctcca

SEQ ID NO: 331649 - DNA, 15 bp, Homo sapiens
tcactacaattctcc

SEQ ID NO: 331650 - DNA, 15 bp, Homo sapiens
atcactacaattctc

SEQ ID NO: 331651 - DNA, 15 bp, Homo sapiens
gatcactacaattct

SEQ ID NO: 331652 - DNA, 15 bp, Homo sapiens
agatcactacaattc

SEQ ID NO: 331653 - DNA, 15 bp, Homo sapiens
cagatcactacaatt

SEQ ID NO: 331654 - DNA, 15 bp, Homo sapiens
gcagatcactacaat

SEQ ID NO: 331655 - DNA, 15 bp, Homo sapiens
agcagatcactacaa

SEQ ID NO: 331656 - DNA, 15 bp, Homo sapiens
tagcagatcactaca

SEQ ID NO: 331657 - DNA, 15 bp, Homo sapiens
ttagcagatcactac

SEQ ID NO: 331658 - DNA, 15 bp, Homo sapiens
tttagcagatcacta

SEQ ID NO: 331659 - DNA, 15 bp, Homo sapiens
gtttagcagatcact

SEQ ID NO: 331660 - DNA, 15 bp, Homo sapiens
agtttagcagatcac

SEQ ID NO: 331661 - DNA, 15 bp, Homo sapiens
aagtttagcagatca

SEQ ID NO: 331662 - DNA, 15 bp, Homo sapiens
caagtttagcagatc

SEQ ID NO: 331663 - DNA, 15 bp, Homo sapiens
ccaagtttagcagat

SEQ ID NO: 331664 - DNA, 15 bp, Homo sapiens
tccaagtttagcaga

SEQ ID NO: 331665 - DNA, 15 bp, Homo sapiens
gtccaagtttagcag

SEQ ID NO: 331666 - DNA, 15 bp, Homo sapiens
agtccaagtttagca

SEQ ID NO: 331667 - DNA, 15 bp, Homo sapiens
aagtccaagtttagc

SEQ ID NO: 331668 - DNA, 15 bp, Homo sapiens
gaagtccaagtttag

SEQ ID NO: 331669 - DNA, 15 bp, Homo sapiens
ggaagtccaagttta

SEQ ID NO: 331670 - DNA, 15 bp, Homo sapiens
gggaagtccaagttt

SEQ ID NO: 331671 - DNA, 15 bp, Homo sapiens
agggaagtccaagtt

SEQ ID NO: 331672 - DNA, 15 bp, Homo sapiens
cagggaagtccaagt

SEQ ID NO: 331673 - DNA, 15 bp, Homo sapiens
gcagggaagtccaag

SEQ ID NO: 331674 - DNA, 15 bp, Homo sapiens
agcagggaagtccaa

SEQ ID NO: 331675 - DNA, 15 bp, Homo sapiens
cagcagggaagtcca

SEQ ID NO: 331676 - DNA, 15 bp, Homo sapiens
ccagcagggaagtcc

SEQ ID NO: 331677 - DNA, 15 bp, Homo sapiens
cccagcagggaagtc

SEQ ID NO: 331678 - DNA, 15 bp, Homo sapiens
gcccagcagggaagt

SEQ ID NO: 331679 - DNA, 15 bp, Homo sapiens
tgcccagcagggaag

SEQ ID NO: 331680 - DNA, 15 bp, Homo sapiens
ctgcccagcagggaa

SEQ ID NO: 331681 - DNA, 15 bp, Homo sapiens
tctgcccagcaggga

SEQ ID NO: 331682 - DNA, 15 bp, Homo sapiens
atctgcccagcaggg

SEQ ID NO: 331683 - DNA, 15 bp, Homo sapiens
gatctgcccagcagg

SEQ ID NO: 331684 - DNA, 15 bp, Homo sapiens
agatctgcccagcag

SEQ ID NO: 331685 - DNA, 15 bp, Homo sapiens
gagatctgcccagca

SEQ ID NO: 331686 - DNA, 15 bp, Homo sapiens
tgagatctgcccagc

SEQ ID NO: 331687 - DNA, 15 bp, Homo sapiens
gtgagatctgcccag

SEQ ID NO: 331688 - DNA, 15 bp, Homo sapiens
ggtgagatctgccca

SEQ ID NO: 331689 - DNA, 15 bp, Homo sapiens
aggtgagatctgccc

SEQ ID NO: 331690 - DNA, 15 bp, Homo sapiens
caggtgagatctgcc

SEQ ID NO: 331691 - DNA, 15 bp, Homo sapiens
gcaggtgagatctgc

SEQ ID NO: 331692 - DNA, 15 bp, Homo sapiens
tgcaggtgagatctg

SEQ ID NO: 331693 - DNA, 15 bp, Homo sapiens
ctgcaggtgagatct

SEQ ID NO: 331694 - DNA, 15 bp, Homo sapiens
tctgcaggtgagatc

SEQ ID NO: 331695 - DNA, 15 bp, Homo sapiens
ctctgcaggtgagat

SEQ ID NO: 331696 - DNA, 15 bp, Homo sapiens
gctctgcaggtgaga

SEQ ID NO: 331697 - DNA, 15 bp, Homo sapiens
ggctctgcaggtgag

SEQ ID NO: 331698 - DNA, 15 bp, Homo sapiens
aggctctgcaggtga

SEQ ID NO: 331699 - DNA, 15 bp, Homo sapiens
aaggctctgcaggtg

SEQ ID NO: 331700 - DNA, 15 bp, Homo sapiens
gaaggctctgcaggt

SEQ ID NO: 331701 - DNA, 15 bp, Homo sapiens
agaaggctctgcagg

SEQ ID NO: 331702 - DNA, 15 bp, Homo sapiens
tagaaggctctgcag

SEQ ID NO: 331703 - DNA, 15 bp, Homo sapiens
atagaaggctctgca

SEQ ID NO: 331704 - DNA, 15 bp, Homo sapiens
tatagaaggctctgc

SEQ ID NO: 331705 - DNA, 15 bp, Homo sapiens
gtatagaaggctctg

SEQ ID NO: 331706 - DNA, 15 bp, Homo sapiens
ggtatagaaggctct

SEQ ID NO: 331707 - DNA, 15 bp, Homo sapiens
gggtatagaaggctc

SEQ ID NO: 331708 - DNA, 15 bp, Homo sapiens
agggtatagaaggct

SEQ ID NO: 331709 - DNA, 15 bp, Homo sapiens
aagggtatagaaggc

SEQ ID NO: 331710 - DNA, 15 bp, Homo sapiens
caagggtatagaagg

SEQ ID NO: 331711 - DNA, 15 bp, Homo sapiens
gcaagggtatagaag

SEQ ID NO: 331712 - DNA, 15 bp, Homo sapiens
tgcaagggtatagaa

SEQ ID NO: 331713 - DNA, 15 bp, Homo sapiens
ctgcaagggtataga

SEQ ID NO: 331714 - DNA, 15 bp, Homo sapiens
tctgcaagggtatag

SEQ ID NO: 331715 - DNA, 15 bp, Homo sapiens
atctgcaagggtata

SEQ ID NO: 331716 - DNA, 15 bp, Homo sapiens
catctgcaagggtat

SEQ ID NO: 331717 - DNA, 15 bp, Homo sapiens
ccatctgcaagggta

SEQ ID NO: 331718 - DNA, 15 bp, Homo sapiens
tccatctgcaagggt

SEQ ID NO: 331719 - DNA, 15 bp, Homo sapiens
ttccatctgcaaggg

SEQ ID NO: 331720 - DNA, 15 bp, Homo sapiens
gttccatctgcaagg

SEQ ID NO: 331721 - DNA, 15 bp, Homo sapiens
ggttccatctgcaag

SEQ ID NO: 331722 - DNA, 15 bp, Homo sapiens
tggttccatctgcaa

SEQ ID NO: 331723 - DNA, 15 bp, Homo sapiens
gtggttccatctgca

SEQ ID NO: 331724 - DNA, 15 bp, Homo sapiens
ggtggttccatctgc

SEQ ID NO: 331725 - DNA, 15 bp, Homo sapiens
aggtggttccatctg

SEQ ID NO: 331726 - DNA, 15 bp, Homo sapiens
caggtggttccatct

SEQ ID NO: 331727 - DNA, 15 bp, Homo sapiens
acaggtggttccatc

SEQ ID NO: 331728 - DNA, 15 bp, Homo sapiens
aacaggtggttccat

SEQ ID NO: 331729 - DNA, 15 bp, Homo sapiens
gaacaggtggttcca

SEQ ID NO: 331730 - DNA, 15 bp, Homo sapiens
ggaacaggtggttcc

SEQ ID NO: 331731 - DNA, 15 bp, Homo sapiens
gggaacaggtggttc

SEQ ID NO: 331732 - DNA, 15 bp, Homo sapiens
agggaacaggtggtt

SEQ ID NO: 331733 - DNA, 15 bp, Homo sapiens
aagggaacaggtggt

SEQ ID NO: 331734 - DNA, 15 bp, Homo sapiens
aaagggaacaggtgg

SEQ ID NO: 331735 - DNA, 15 bp, Homo sapiens
gaaagggaacaggtg

SEQ ID NO: 331736 - DNA, 15 bp, Homo sapiens
tgaaagggaacaggt

SEQ ID NO: 331737 - DNA, 15 bp, Homo sapiens
gtgaaagggaacagg

SEQ ID NO: 331738 - DNA, 15 bp, Homo sapiens
agtgaaagggaacag

SEQ ID NO: 331739 - DNA, 15 bp, Homo sapiens
gagtgaaagggaaca

SEQ ID NO: 331740 - DNA, 15 bp, Homo sapiens
ggagtgaaagggaac

SEQ ID NO: 331741 - DNA, 15 bp, Homo sapiens
aggagtgaaagggaa

SEQ ID NO: 331742 - DNA, 15 bp, Homo sapiens
aaggagtgaaaggga

SEQ ID NO: 331743 - DNA, 15 bp, Homo sapiens
taaggagtgaaaggg

SEQ ID NO: 331744 - DNA, 15 bp, Homo sapiens
ctaaggagtgaaagg

SEQ ID NO: 331745 - DNA, 15 bp, Homo sapiens
actaaggagtgaaag

SEQ ID NO: 331746 - DNA, 15 bp, Homo sapiens
aactaaggagtgaaa

SEQ ID NO: 331747 - DNA, 15 bp, Homo sapiens
taactaaggagtgaa

SEQ ID NO: 331748 - DNA, 15 bp, Homo sapiens
ctaactaaggagtga

SEQ ID NO: 331749 - DNA, 15 bp, Homo sapiens
actaactaaggagtg

SEQ ID NO: 331750 - DNA, 15 bp, Homo sapiens
gactaactaaggagt

SEQ ID NO: 331751 - DNA, 15 bp, Homo sapiens
agactaactaaggag

SEQ ID NO: 331752 - DNA, 15 bp, Homo sapiens
cagactaactaagga

SEQ ID NO: 331753 - DNA, 15 bp, Homo sapiens
gcagactaactaagg

SEQ ID NO: 331754 - DNA, 15 bp, Homo sapiens
ggcagactaactaag

SEQ ID NO: 331755 - DNA, 15 bp, Homo sapiens
cggcagactaactaa

SEQ ID NO: 331756 - DNA, 15 bp, Homo sapiens
gcggcagactaacta

SEQ ID NO: 331757 - DNA, 15 bp, Homo sapiens
tgcggcagactaact

SEQ ID NO: 331758 - DNA, 15 bp, Homo sapiens
gtgcggcagactaac

SEQ ID NO: 331759 - DNA, 15 bp, Homo sapiens
tgtgcggcagactaa

SEQ ID NO: 331760 - DNA, 15 bp, Homo sapiens
ctgtgcggcagacta

SEQ ID NO: 331761 - DNA, 15 bp, Homo sapiens
gctgtgcggcagact

SEQ ID NO: 331762 - DNA, 15 bp, Homo sapiens
tgctgtgcggcagac

SEQ ID NO: 331763 - DNA, 15 bp, Homo sapiens
gtgctgtgcggcaga

SEQ ID NO: 331764 - DNA, 15 bp, Homo sapiens
tgtgctgtgcggcag

SEQ ID NO: 331765 - DNA, 15 bp, Homo sapiens
ctgtgctgtgcggca

SEQ ID NO: 331766 - DNA, 15 bp, Homo sapiens
tctgtgctgtgcggc

SEQ ID NO: 331767 - DNA, 15 bp, Homo sapiens
ctctgtgctgtgcgg

SEQ ID NO: 331768 - DNA, 15 bp, Homo sapiens
gctctgtgctgtgcg

SEQ ID NO: 331769 - DNA, 15 bp, Homo sapiens
tgctctgtgctgtgc

SEQ ID NO: 331770 - DNA, 15 bp, Homo sapiens
ctgctctgtgctgtg

SEQ ID NO: 331771 - DNA, 15 bp, Homo sapiens
actgctctgtgctgt

SEQ ID NO: 331772 - DNA, 15 bp, Homo sapiens
tactgctctgtgctg

SEQ ID NO: 331773 - DNA, 15 bp, Homo sapiens
atactgctctgtgct

SEQ ID NO: 331774 - DNA, 15 bp, Homo sapiens
gatactgctctgtgc

SEQ ID NO: 331775 - DNA, 15 bp, Homo sapiens
agatactgctctgtg

SEQ ID NO: 331776 - DNA, 15 bp, Homo sapiens
cagatactgctctgt

SEQ ID NO: 331777 - DNA, 15 bp, Homo sapiens
ccagatactgctctg

SEQ ID NO: 331778 - DNA, 15 bp, Homo sapiens
tccagatactgctct

SEQ ID NO: 331779 - DNA, 15 bp, Homo sapiens
ctccagatactgctc

SEQ ID NO: 331780 - DNA, 15 bp, Homo sapiens
cctccagatactgct

SEQ ID NO: 331781 - DNA, 15 bp, Homo sapiens
acctccagatactgc

SEQ ID NO: 331782 - DNA, 15 bp, Homo sapiens
cacctccagatactg

SEQ ID NO: 331783 - DNA, 15 bp, Homo sapiens
ccacctccagatact

SEQ ID NO: 331784 - DNA, 15 bp, Homo sapiens
accacctccagatac

SEQ ID NO: 331785 - DNA, 15 bp, Homo sapiens
aaccacctccagata

SEQ ID NO: 331786 - DNA, 15 bp, Homo sapiens
aaaccacctccagat

SEQ ID NO: 331787 - DNA, 15 bp, Homo sapiens
gaaaccacctccaga

SEQ ID NO: 331788 - DNA, 15 bp, Homo sapiens
agaaaccacctccag

SEQ ID NO: 331789 - DNA, 15 bp, Homo sapiens
aagaaaccacctcca

SEQ ID NO: 331790 - DNA, 15 bp, Homo sapiens
gaagaaaccacctcc

SEQ ID NO: 331791 - DNA, 15 bp, Homo sapiens
ggaagaaaccacctc

SEQ ID NO: 331792 - DNA, 15 bp, Homo sapiens
aggaagaaaccacct

SEQ ID NO: 331793 - DNA, 15 bp, Homo sapiens
aaggaagaaaccacc

SEQ ID NO: 331794 - DNA, 15 bp, Homo sapiens
taaggaagaaaccac

SEQ ID NO: 331795 - DNA, 15 bp, Homo sapiens
ataaggaagaaacca

SEQ ID NO: 331796 - DNA, 15 bp, Homo sapiens
gataaggaagaaacc

SEQ ID NO: 331797 - DNA, 15 bp, Homo sapiens
tgataaggaagaaac

SEQ ID NO: 331798 - DNA, 15 bp, Homo sapiens
ctgataaggaagaaa

SEQ ID NO: 331799 - DNA, 15 bp, Homo sapiens
actgataaggaagaa

SEQ ID NO: 331800 - DNA, 15 bp, Homo sapiens
cactgataaggaaga

SEQ ID NO: 331801 - DNA, 15 bp, Homo sapiens
tcactgataaggaag

SEQ ID NO: 331802 - DNA, 15 bp, Homo sapiens
ttcactgataaggaa

SEQ ID NO: 331803 - DNA, 15 bp, Homo sapiens
tttcactgataagga

SEQ ID NO: 331804 - DNA, 15 bp, Homo sapiens
ctttcactgataagg

SEQ ID NO: 331805 - DNA, 15 bp, Homo sapiens
cctttcactgataag

SEQ ID NO: 331806 - DNA, 15 bp, Homo sapiens
gcctttcactgataa

SEQ ID NO: 331807 - DNA, 15 bp, Homo sapiens
tgcctttcactgata

SEQ ID NO: 331808 - DNA, 15 bp, Homo sapiens
gtgcctttcactgat

SEQ ID NO: 331809 - DNA, 15 bp, Homo sapiens
tgtgcctttcactga

SEQ ID NO: 331810 - DNA, 15 bp, Homo sapiens
ctgtgcctttcactg

SEQ ID NO: 331811 - DNA, 15 bp, Homo sapiens
actgtgcctttcact

SEQ ID NO: 331812 - DNA, 15 bp, Homo sapiens
tactgtgcctttcac

SEQ ID NO: 331813 - DNA, 15 bp, Homo sapiens
ctactgtgcctttca

SEQ ID NO: 331814 - DNA, 15 bp, Homo sapiens
tctactgtgcctttc

SEQ ID NO: 331815 - DNA, 15 bp, Homo sapiens
ctctactgtgccttt

SEQ ID NO: 331816 - DNA, 15 bp, Homo sapiens
gctctactgtgcctt

SEQ ID NO: 331817 - DNA, 15 bp, Homo sapiens
ggctctactgtgcct

SEQ ID NO: 331818 - DNA, 15 bp, Homo sapiens
gggctctactgtgcc

SEQ ID NO: 331819 - DNA, 15 bp, Homo sapiens
ggggctctactgtgc

SEQ ID NO: 331820 - DNA, 15 bp, Homo sapiens
tggggctctactgtg

SEQ ID NO: 331821 - DNA, 15 bp, Homo sapiens
gtggggctctactgt

SEQ ID NO: 331822 - DNA, 15 bp, Homo sapiens
cgtggggctctactg

SEQ ID NO: 331823 - DNA, 15 bp, Homo sapiens
acgtggggctctact

SEQ ID NO: 331824 - DNA, 15 bp, Homo sapiens
cacgtggggctctac

SEQ ID NO: 331825 - DNA, 15 bp, Homo sapiens
tcacgtggggctcta

SEQ ID NO: 331826 - DNA, 15 bp, Homo sapiens
gtcacgtggggctct

SEQ ID NO: 331827 - DNA, 15 bp, Homo sapiens
ggtcacgtggggctc

SEQ ID NO: 331828 - DNA, 15 bp, Homo sapiens
tggtcacgtggggct

SEQ ID NO: 331829 - DNA, 15 bp, Homo sapiens
ctggtcacgtggggc

SEQ ID NO: 331830 - DNA, 15 bp, Homo sapiens
actggtcacgtgggg

SEQ ID NO: 331831 - DNA, 15 bp, Homo sapiens
aactggtcacgtggg

SEQ ID NO: 331832 - DNA, 15 bp, Homo sapiens
gaactggtcacgtgg

SEQ ID NO: 331833 - DNA, 15 bp, Homo sapiens
agaactggtcacgtg

SEQ ID NO: 331834 - DNA, 15 bp, Homo sapiens
cagaactggtcacgt

SEQ ID NO: 331835 - DNA, 15 bp, Homo sapiens
gcagaactggtcacg

SEQ ID NO: 331836 - DNA, 15 bp, Homo sapiens
tgcagaactggtcac

SEQ ID NO: 331837 - DNA, 15 bp, Homo sapiens
ctgcagaactggtca

SEQ ID NO: 331838 - DNA, 15 bp, Homo sapiens
cctgcagaactggtc

SEQ ID NO: 331839 - DNA, 15 bp, Homo sapiens
ccctgcagaactggt

SEQ ID NO: 331840 - DNA, 15 bp, Homo sapiens
accctgcagaactgg

SEQ ID NO: 331841 - DNA, 15 bp, Homo sapiens
caccctgcagaactg

SEQ ID NO: 331842 - DNA, 15 bp, Homo sapiens
gcaccctgcagaact

SEQ ID NO: 331843 - DNA, 15 bp, Homo sapiens
tgcaccctgcagaac

SEQ ID NO: 331844 - DNA, 15 bp, Homo sapiens
atgcaccctgcagaa

SEQ ID NO: 331845 - DNA, 15 bp, Homo sapiens
aatgcaccctgcaga

SEQ ID NO: 331846 - DNA, 15 bp, Homo sapiens
gaatgcaccctgcag

SEQ ID NO: 331847 - DNA, 15 bp, Homo sapiens
agaatgcaccctgca

SEQ ID NO: 331848 - DNA, 15 bp, Homo sapiens
cagaatgcaccctgc

SEQ ID NO: 331849 - DNA, 15 bp, Homo sapiens
acagaatgcaccctg

SEQ ID NO: 331850 - DNA, 15 bp, Homo sapiens
cacagaatgcaccct

SEQ ID NO: 331851 - DNA, 15 bp, Homo sapiens
acacagaatgcaccc

SEQ ID NO: 331852 - DNA, 15 bp, Homo sapiens
cacacagaatgcacc

SEQ ID NO: 331853 - DNA, 15 bp, Homo sapiens
acacacagaatgcac

SEQ ID NO: 331854 - DNA, 15 bp, Homo sapiens
aacacacagaatgca

SEQ ID NO: 331855 - DNA, 15 bp, Homo sapiens
aaacacacagaatgc

SEQ ID NO: 331856 - DNA, 15 bp, Homo sapiens
caaacacacagaatg

SEQ ID NO: 331857 - DNA, 15 bp, Homo sapiens
acaaacacacagaat

SEQ ID NO: 331858 - DNA, 15 bp, Homo sapiens
aacaaacacacagaa

SEQ ID NO: 331859 - DNA, 15 bp, Homo sapiens
aaacaaacacacaga

SEQ ID NO: 331860 - DNA, 15 bp, Homo sapiens
gaaacaaacacacag

SEQ ID NO: 331861 - DNA, 15 bp, Homo sapiens
tgaaacaaacacaca

SEQ ID NO: 331862 - DNA, 15 bp, Homo sapiens
atgaaacaaacacac

SEQ ID NO: 331863 - DNA, 15 bp, Homo sapiens
tatgaaacaaacaca

SEQ ID NO: 331864 - DNA, 15 bp, Homo sapiens
ctatgaaacaaacac

SEQ ID NO: 331865 - DNA, 15 bp, Homo sapiens
gctatgaaacaaaca

SEQ ID NO: 331866 - DNA, 15 bp, Homo sapiens
agctatgaaacaaac

SEQ ID NO: 331867 - DNA, 15 bp, Homo sapiens
aagctatgaaacaaa

SEQ ID NO: 331868 - DNA, 15 bp, Homo sapiens
aaagctatgaaacaa

SEQ ID NO: 331869 - DNA, 15 bp, Homo sapiens
caaagctatgaaaca

SEQ ID NO: 331870 - DNA, 15 bp, Homo sapiens
tcaaagctatgaaac

SEQ ID NO: 331871 - DNA, 15 bp, Homo sapiens
gtcaaagctatgaaa

SEQ ID NO: 331872 - DNA, 15 bp, Homo sapiens
agtcaaagctatgaa

SEQ ID NO: 331873 - DNA, 15 bp, Homo sapiens
aagtcaaagctatga

SEQ ID NO: 331874 - DNA, 15 bp, Homo sapiens
caagtcaaagctatg

SEQ ID NO: 331875 - DNA, 15 bp, Homo sapiens
ccaagtcaaagctat

SEQ ID NO: 331876 - DNA, 15 bp, Homo sapiens
tccaagtcaaagcta

SEQ ID NO: 331877 - DNA, 15 bp, Homo sapiens
ttccaagtcaaagct

SEQ ID NO: 331878 - DNA, 15 bp, Homo sapiens
attccaagtcaaagc

SEQ ID NO: 331879 - DNA, 15 bp, Homo sapiens
tattccaagtcaaag

SEQ ID NO: 331880 - DNA, 15 bp, Homo sapiens
atattccaagtcaaa

SEQ ID NO: 331881 - DNA, 15 bp, Homo sapiens
aatattccaagtcaa

SEQ ID NO: 331882 - DNA, 15 bp, Homo sapiens
gaatattccaagtca

SEQ ID NO: 331883 - DNA, 15 bp, Homo sapiens
tgaatattccaagtc

SEQ ID NO: 331884 - DNA, 15 bp, Homo sapiens
gtgaatattccaagt

SEQ ID NO: 331885 - DNA, 15 bp, Homo sapiens
ggtgaatattccaag

SEQ ID NO: 331886 - DNA, 15 bp, Homo sapiens
gggtgaatattccaa

SEQ ID NO: 331887 - DNA, 15 bp, Homo sapiens
agggtgaatattcca

SEQ ID NO: 331888 - DNA, 15 bp, Homo sapiens
gagggtgaatattcc

SEQ ID NO: 331889 - DNA, 15 bp, Homo sapiens
tgagggtgaatattc

SEQ ID NO: 331890 - DNA, 15 bp, Homo sapiens
ctgagggtgaatatt

SEQ ID NO: 331891 - DNA, 15 bp, Homo sapiens
cctgagggtgaatat

SEQ ID NO: 331892 - DNA, 15 bp, Homo sapiens
tcctgagggtgaata

SEQ ID NO: 331893 - DNA, 15 bp, Homo sapiens
ctcctgagggtgaat

SEQ ID NO: 331894 - DNA, 15 bp, Homo sapiens
gctcctgagggtgaa

SEQ ID NO: 331895 - DNA, 15 bp, Homo sapiens
ggctcctgagggtga

SEQ ID NO: 331896 - DNA, 15 bp, Homo sapiens
aggctcctgagggtg

SEQ ID NO: 331897 - DNA, 15 bp, Homo sapiens
caggctcctgagggt

SEQ ID NO: 331898 - DNA, 15 bp, Homo sapiens
acaggctcctgaggg

SEQ ID NO: 331899 - DNA, 15 bp, Homo sapiens
tacaggctcctgagg

SEQ ID NO: 331900 - DNA, 15 bp, Homo sapiens
atacaggctcctgag

SEQ ID NO: 331901 - DNA, 15 bp, Homo sapiens
gatacaggctcctga

SEQ ID NO: 331902 - DNA, 15 bp, Homo sapiens
ggatacaggctcctg

SEQ ID NO: 331903 - DNA, 15 bp, Homo sapiens
gggatacaggctcct

SEQ ID NO: 331904 - DNA, 15 bp, Homo sapiens
cgggatacaggctcc

SEQ ID NO: 331905 - DNA, 15 bp, Homo sapiens
gcgggatacaggctc

SEQ ID NO: 331906 - DNA, 15 bp, Homo sapiens
agcgggatacaggct

SEQ ID NO: 331907 - DNA, 15 bp, Homo sapiens
cagcgggatacaggc

SEQ ID NO: 331908 - DNA, 15 bp, Homo sapiens
ccagcgggatacagg

SEQ ID NO: 331909 - DNA, 15 bp, Homo sapiens
tccagcgggatacag

SEQ ID NO: 331910 - DNA, 15 bp, Homo sapiens
ctccagcgggataca

SEQ ID NO: 331911 - DNA, 15 bp, Homo sapiens
cctccagcgggatac

SEQ ID NO: 331912 - DNA, 15 bp, Homo sapiens
ccctccagcgggata

SEQ ID NO: 331913 - DNA, 15 bp, Homo sapiens
tccctccagcgggat

SEQ ID NO: 331914 - DNA, 15 bp, Homo sapiens
ctccctccagcggga

SEQ ID NO: 331915 - DNA, 15 bp, Homo sapiens
actccctccagcggg

SEQ ID NO: 331916 - DNA, 15 bp, Homo sapiens
aactccctccagcgg

SEQ ID NO: 331917 - DNA, 15 bp, Homo sapiens
taactccctccagcg

SEQ ID NO: 331918 - DNA, 15 bp, Homo sapiens
ctaactccctccagc

SEQ ID NO: 331919 - DNA, 15 bp, Homo sapiens
cctaactccctccag

SEQ ID NO: 331920 - DNA, 15 bp, Homo sapiens
ccctaactccctcca

SEQ ID NO: 331921 - DNA, 15 bp, Homo sapiens
gccctaactccctcc

SEQ ID NO: 331922 - DNA, 15 bp, Homo sapiens
agccctaactccctc

SEQ ID NO: 331923 - DNA, 15 bp, Homo sapiens
cagccctaactccct

SEQ ID NO: 331924 - DNA, 15 bp, Homo sapiens
acagccctaactccc

SEQ ID NO: 331925 - DNA, 15 bp, Homo sapiens
gacagccctaactcc

SEQ ID NO: 331926 - DNA, 15 bp, Homo sapiens
agacagccctaactc

SEQ ID NO: 331927 - DNA, 15 bp, Homo sapiens
cagacagccctaact

SEQ ID NO: 331928 - DNA, 15 bp, Homo sapiens
gcagacagccctaac

SEQ ID NO: 331929 - DNA, 15 bp, Homo sapiens
ggcagacagccctaa

SEQ ID NO: 331930 - DNA, 15 bp, Homo sapiens
aggcagacagcccta

SEQ ID NO: 331931 - DNA, 15 bp, Homo sapiens
aaggcagacagccct

SEQ ID NO: 331932 - DNA, 15 bp, Homo sapiens
gaaggcagacagccc

SEQ ID NO: 331933 - DNA, 15 bp, Homo sapiens
tgaaggcagacagcc

SEQ ID NO: 331934 - DNA, 15 bp, Homo sapiens
ttgaaggcagacagc

SEQ ID NO: 331935 - DNA, 15 bp, Homo sapiens
gttgaaggcagacag

SEQ ID NO: 331936 - DNA, 15 bp, Homo sapiens
ggttgaaggcagaca

SEQ ID NO: 331937 - DNA, 15 bp, Homo sapiens
aggttgaaggcagac

SEQ ID NO: 331938 - DNA, 15 bp, Homo sapiens
gaggttgaaggcaga

SEQ ID NO: 331939 - DNA, 15 bp, Homo sapiens
cgaggttgaaggcag

SEQ ID NO: 331940 - DNA, 15 bp, Homo sapiens
ccgaggttgaaggca

SEQ ID NO: 331941 - DNA, 15 bp, Homo sapiens
tccgaggttgaaggc

SEQ ID NO: 331942 - DNA, 15 bp, Homo sapiens
atccgaggttgaagg

SEQ ID NO: 331943 - DNA, 15 bp, Homo sapiens
catccgaggttgaag

SEQ ID NO: 331944 - DNA, 15 bp, Homo sapiens
acatccgaggttgaa

SEQ ID NO: 331945 - DNA, 15 bp, Homo sapiens
cacatccgaggttga

SEQ ID NO: 331946 - DNA, 15 bp, Homo sapiens
ccacatccgaggttg

SEQ ID NO: 331947 - DNA, 15 bp, Homo sapiens
accacatccgaggtt

SEQ ID NO: 331948 - DNA, 15 bp, Homo sapiens
gaccacatccgaggt

SEQ ID NO: 331949 - DNA, 15 bp, Homo sapiens
agaccacatccgagg

SEQ ID NO: 331950 - DNA, 15 bp, Homo sapiens
gagaccacatccgag

SEQ ID NO: 331951 - DNA, 15 bp, Homo sapiens
ggagaccacatccga

SEQ ID NO: 331952 - DNA, 15 bp, Homo sapiens
tggagaccacatccg

SEQ ID NO: 331953 - DNA, 15 bp, Homo sapiens
gtggagaccacatcc

SEQ ID NO: 331954 - DNA, 15 bp, Homo sapiens
tgtggagaccacatc

SEQ ID NO: 331955 - DNA, 15 bp, Homo sapiens
atgtggagaccacat

SEQ ID NO: 331956 - DNA, 15 bp, Homo sapiens
aatgtggagaccaca

SEQ ID NO: 331957 - DNA, 15 bp, Homo sapiens
caatgtggagaccac

SEQ ID NO: 331958 - DNA, 15 bp, Homo sapiens
ccaatgtggagacca

SEQ ID NO: 331959 - DNA, 15 bp, Homo sapiens
tccaatgtggagacc

SEQ ID NO: 331960 - DNA, 15 bp, Homo sapiens
ttccaatgtggagac

SEQ ID NO: 331961 - DNA, 15 bp, Homo sapiens
tttccaatgtggaga

SEQ ID NO: 331962 - DNA, 15 bp, Homo sapiens
ctttccaatgtggag

SEQ ID NO: 331963 - DNA, 15 bp, Homo sapiens
tctttccaatgtgga

SEQ ID NO: 331964 - DNA, 15 bp, Homo sapiens
ctctttccaatgtgg

SEQ ID NO: 331965 - DNA, 15 bp, Homo sapiens
gctctttccaatgtg

SEQ ID NO: 331966 - DNA, 15 bp, Homo sapiens
ggctctttccaatgt

SEQ ID NO: 331967 - DNA, 15 bp, Homo sapiens
aggctctttccaatg

SEQ ID NO: 331968 - DNA, 15 bp, Homo sapiens
aaggctctttccaat

SEQ ID NO: 331969 - DNA, 15 bp, Homo sapiens
taaggctctttccaa

SEQ ID NO: 331970 - DNA, 15 bp, Homo sapiens
gtaaggctctttcca

SEQ ID NO: 331971 - DNA, 15 bp, Homo sapiens
tgtaaggctctttcc

SEQ ID NO: 331972 - DNA, 15 bp, Homo sapiens
atgtaaggctctttc

SEQ ID NO: 331973 - DNA, 15 bp, Homo sapiens
aatgtaaggctcttt

SEQ ID NO: 331974 - DNA, 15 bp, Homo sapiens
gaatgtaaggctctt

SEQ ID NO: 331975 - DNA, 15 bp, Homo sapiens
tgaatgtaaggctct

SEQ ID NO: 331976 - DNA, 15 bp, Homo sapiens
ctgaatgtaaggctc

SEQ ID NO: 331977 - DNA, 15 bp, Homo sapiens
tctgaatgtaaggct

SEQ ID NO: 331978 - DNA, 15 bp, Homo sapiens
ctctgaatgtaaggc

SEQ ID NO: 331979 - DNA, 15 bp, Homo sapiens
tctctgaatgtaagg

SEQ ID NO: 331980 - DNA, 15 bp, Homo sapiens
ctctctgaatgtaag

SEQ ID NO: 331981 - DNA, 15 bp, Homo sapiens
tctctctgaatgtaa

SEQ ID NO: 331982 - DNA, 15 bp, Homo sapiens
atctctctgaatgta

SEQ ID NO: 331983 - DNA, 15 bp, Homo sapiens
catctctctgaatgt

SEQ ID NO: 331984 - DNA, 15 bp, Homo sapiens
ccatctctctgaatg

SEQ ID NO: 331985 - DNA, 15 bp, Homo sapiens
cccatctctctgaat

SEQ ID NO: 331986 - DNA, 15 bp, Homo sapiens
ccccatctctctgaa

SEQ ID NO: 331987 - DNA, 15 bp, Homo sapiens
tccccatctctctga

SEQ ID NO: 331988 - DNA, 15 bp, Homo sapiens
gtccccatctctctg

SEQ ID NO: 331989 - DNA, 15 bp, Homo sapiens
tgtccccatctctct

SEQ ID NO: 331990 - DNA, 15 bp, Homo sapiens
ctgtccccatctctc

SEQ ID NO: 331991 - DNA, 15 bp, Homo sapiens
actgtccccatctct

SEQ ID NO: 331992 - DNA, 15 bp, Homo sapiens
aactgtccccatctc

SEQ ID NO: 331993 - DNA, 15 bp, Homo sapiens
aaactgtccccatct

SEQ ID NO: 331994 - DNA, 15 bp, Homo sapiens
caaactgtccccatc

SEQ ID NO: 331995 - DNA, 15 bp, Homo sapiens
acaaactgtccccat

SEQ ID NO: 331996 - DNA, 15 bp, Homo sapiens
gacaaactgtcccca

SEQ ID NO: 331997 - DNA, 15 bp, Homo sapiens
tgacaaactgtcccc

SEQ ID NO: 331998 - DNA, 15 bp, Homo sapiens
atgacaaactgtccc

SEQ ID NO: 331999 - DNA, 15 bp, Homo sapiens
catgacaaactgtcc

SEQ ID NO: 332000 - DNA, 15 bp, Homo sapiens
gcatgacaaactgtc

SEQ ID NO: 332001 - DNA, 15 bp, Homo sapiens
agcatgacaaactgt

SEQ ID NO: 332002 - DNA, 15 bp, Homo sapiens
aagcatgacaaactg

SEQ ID NO: 332003 - DNA, 15 bp, Homo sapiens
aaagcatgacaaact

SEQ ID NO: 332004 - DNA, 15 bp, Homo sapiens
aaaagcatgacaaac

SEQ ID NO: 332005 - DNA, 15 bp, Homo sapiens
gaaaagcatgacaaa

SEQ ID NO: 332006 - DNA, 15 bp, Homo sapiens
agaaaagcatgacaa

SEQ ID NO: 332007 - DNA, 15 bp, Homo sapiens
tagaaaagcatgaca

SEQ ID NO: 332008 - DNA, 15 bp, Homo sapiens
atagaaaagcatgac

SEQ ID NO: 332009 - DNA, 15 bp, Homo sapiens
aatagaaaagcatga

SEQ ID NO: 332010 - DNA, 15 bp, Homo sapiens
aaatagaaaagcatg

SEQ ID NO: 332011 - DNA, 15 bp, Homo sapiens
taaatagaaaagcat

SEQ ID NO: 332012 - DNA, 15 bp, Homo sapiens
ttaaatagaaaagca

SEQ ID NO: 332013 - DNA, 15 bp, Homo sapiens
tttaaatagaaaagc

SEQ ID NO: 332014 - DNA, 15 bp, Homo sapiens
atttaaatagaaaag

SEQ ID NO: 332015 - DNA, 15 bp, Homo sapiens
tatttaaatagaaaa

SEQ ID NO: 332016 - DNA, 15 bp, Homo sapiens
atatttaaatagaaa

SEQ ID NO: 332017 - DNA, 15 bp, Homo sapiens
catatttaaatagaa

SEQ ID NO: 332018 - DNA, 15 bp, Homo sapiens
tcatatttaaataga

SEQ ID NO: 332019 - DNA, 15 bp, Homo sapiens
ttcatatttaaatag

SEQ ID NO: 332020 - DNA, 15 bp, Homo sapiens
tttcatatttaaata

SEQ ID NO: 332021 - DNA, 15 bp, Homo sapiens
gtttcatatttaaat

SEQ ID NO: 332022 - DNA, 15 bp, Homo sapiens
agtttcatatttaaa

SEQ ID NO: 332023 - DNA, 15 bp, Homo sapiens
tagtttcatatttaa

SEQ ID NO: 332024 - DNA, 15 bp, Homo sapiens
ctagtttcatattta

SEQ ID NO: 332025 - DNA, 15 bp, Homo sapiens
tctagtttcatattt

SEQ ID NO: 332026 - DNA, 15 bp, Homo sapiens
ctctagtttcatatt

SEQ ID NO: 332027 - DNA, 15 bp, Homo sapiens
actctagtttcatat

SEQ ID NO: 332028 - DNA, 15 bp, Homo sapiens
tactctagtttcata

SEQ ID NO: 332029 - DNA, 15 bp, Homo sapiens
gtactctagtttcat

SEQ ID NO: 332030 - DNA, 15 bp, Homo sapiens
agtactctagtttca

SEQ ID NO: 332031 - DNA, 15 bp, Homo sapiens
aagtactctagtttc

SEQ ID NO: 332032 - DNA, 15 bp, Homo sapiens
taagtactctagttt

SEQ ID NO: 332033 - DNA, 15 bp, Homo sapiens
ttaagtactctagtt

SEQ ID NO: 332034 - DNA, 15 bp, Homo sapiens
attaagtactctagt

SEQ ID NO: 332035 - DNA, 15 bp, Homo sapiens
aattaagtactctag

SEQ ID NO: 332036 - DNA, 15 bp, Homo sapiens
taattaagtactcta

SEQ ID NO: 332037 - DNA, 15 bp, Homo sapiens
ataattaagtactct

SEQ ID NO: 332038 - DNA, 15 bp, Homo sapiens
gataattaagtactc

SEQ ID NO: 332039 - DNA, 15 bp, Homo sapiens
agataattaagtact

SEQ ID NO: 332040 - DNA, 15 bp, Homo sapiens
aagataattaagtac

SEQ ID NO: 332041 - DNA, 15 bp, Homo sapiens
gaagataattaagta

SEQ ID NO: 332042 - DNA, 15 bp, Homo sapiens
agaagataattaagt

SEQ ID NO: 332043 - DNA, 15 bp, Homo sapiens
aagaagataattaag

SEQ ID NO: 332044 - DNA, 15 bp, Homo sapiens
aaagaagataattaa

SEQ ID NO: 332045 - DNA, 15 bp, Homo sapiens
taaagaagataatta

SEQ ID NO: 332046 - DNA, 15 bp, Homo sapiens
ataaagaagataatt

SEQ ID NO: 332047 - DNA, 15 bp, Homo sapiens
aataaagaagataat

SEQ ID NO: 332048 - DNA, 15 bp, Homo sapiens
caataaagaagataa

SEQ ID NO: 332049 - DNA, 15 bp, Homo sapiens
acaataaagaagata

SEQ ID NO: 332050 - DNA, 15 bp, Homo sapiens
tacaataaagaagat

SEQ ID NO: 332051 - DNA, 15 bp, Homo sapiens
ttacaataaagaaga

SEQ ID NO: 332052 - DNA, 15 bp, Homo sapiens
tttacaataaagaag

SEQ ID NO: 332053 - DNA, 15 bp, Homo sapiens
atttacaataaagaa

SEQ ID NO: 332054 - DNA, 15 bp, Homo sapiens
catttacaataaaga

SEQ ID NO: 332055 - DNA, 15 bp, Homo sapiens
gcatttacaataaag

SEQ ID NO: 332056 - DNA, 15 bp, Homo sapiens
agcatttacaataaa

SEQ ID NO: 332057 - DNA, 15 bp, Homo sapiens
gagcatttacaataa

SEQ ID NO: 332058 - DNA, 15 bp, Homo sapiens
tgagcatttacaata

SEQ ID NO: 332059 - DNA, 15 bp, Homo sapiens
atgagcatttacaat

SEQ ID NO: 332060 - DNA, 15 bp, Homo sapiens
tatgagcatttacaa

SEQ ID NO: 332061 - DNA, 15 bp, Homo sapiens
atatgagcatttaca

SEQ ID NO: 332062 - DNA, 15 bp, Homo sapiens
aatatgagcatttac

SEQ ID NO: 332063 - DNA, 15 bp, Homo sapiens
aaatatgagcattta

SEQ ID NO: 332064 - DNA, 15 bp, Homo sapiens
aaaatatgagcattt

SEQ ID NO: 332065 - DNA, 15 bp, Homo sapiens
taaaatatgagcatt

SEQ ID NO: 332066 - DNA, 15 bp, Homo sapiens
ttaaaatatgagcat

SEQ ID NO: 332067 - DNA, 15 bp, Homo sapiens
tttaaaatatgagca

SEQ ID NO: 332068 - DNA, 15 bp, Homo sapiens
ctttaaaatatgagc

SEQ ID NO: 332069 - DNA, 15 bp, Homo sapiens
tctttaaaatatgag

SEQ ID NO: 332070 - DNA, 15 bp, Homo sapiens
ctctttaaaatatga

SEQ ID NO: 332071 - DNA, 15 bp, Homo sapiens
cctctttaaaatatg

SEQ ID NO: 332072 - DNA, 15 bp, Homo sapiens
tcctctttaaaatat

SEQ ID NO: 332073 - DNA, 15 bp, Homo sapiens
atcctctttaaaata

SEQ ID NO: 332074 - DNA, 15 bp, Homo sapiens
aatcctctttaaaat

SEQ ID NO: 332075 - DNA, 15 bp, Homo sapiens
gaatcctctttaaaa

SEQ ID NO: 332076 - DNA, 15 bp, Homo sapiens
ggaatcctctttaaa

SEQ ID NO: 332077 - DNA, 15 bp, Homo sapiens
tggaatcctctttaa

SEQ ID NO: 332078 - DNA, 15 bp, Homo sapiens
atggaatcctcttta

SEQ ID NO: 332079 - DNA, 15 bp, Homo sapiens
tatggaatcctcttt

SEQ ID NO: 332080 - DNA, 15 bp, Homo sapiens
gtatggaatcctctt

SEQ ID NO: 332081 - DNA, 15 bp, Homo sapiens
agtatggaatcctct

SEQ ID NO: 332082 - DNA, 15 bp, Homo sapiens
aagtatggaatcctc

SEQ ID NO: 332083 - DNA, 15 bp, Homo sapiens
aaagtatggaatcct

SEQ ID NO: 332084 - DNA, 15 bp, Homo sapiens
taaagtatggaatcc

SEQ ID NO: 332085 - DNA, 15 bp, Homo sapiens
ctaaagtatggaatc

SEQ ID NO: 332086 - DNA, 15 bp, Homo sapiens
tctaaagtatggaat

SEQ ID NO: 332087 - DNA, 15 bp, Homo sapiens
ttctaaagtatggaa

SEQ ID NO: 332088 - DNA, 15 bp, Homo sapiens
cttctaaagtatgga

SEQ ID NO: 332089 - DNA, 15 bp, Homo sapiens
tcttctaaagtatgg

SEQ ID NO: 332090 - DNA, 15 bp, Homo sapiens
ttcttctaaagtatg

SEQ ID NO: 332091 - DNA, 15 bp, Homo sapiens
tttcttctaaagtat

SEQ ID NO: 332092 - DNA, 15 bp, Homo sapiens
atttcttctaaagta

SEQ ID NO: 332093 - DNA, 15 bp, Homo sapiens
tatttcttctaaagt

SEQ ID NO: 332094 - DNA, 15 bp, Homo sapiens
ttatttcttctaaag

SEQ ID NO: 332095 - DNA, 15 bp, Homo sapiens
attatttcttctaaa

SEQ ID NO: 332096 - DNA, 15 bp, Homo sapiens
aattatttcttctaa

SEQ ID NO: 332097 - DNA, 15 bp, Homo sapiens
caattatttcttcta

SEQ ID NO: 332098 - DNA, 15 bp, Homo sapiens
tcaattatttcttct

SEQ ID NO: 332099 - DNA, 15 bp, Homo sapiens
ctcaattatttcttc

SEQ ID NO: 332100 - DNA, 15 bp, Homo sapiens
actcaattatttctt

SEQ ID NO: 332101 - DNA, 15 bp, Homo sapiens
tactcaattatttct

SEQ ID NO: 332102 - DNA, 15 bp, Homo sapiens
atactcaattatttc

SEQ ID NO: 332103 - DNA, 15 bp, Homo sapiens
aatactcaattattt

SEQ ID NO: 332104 - DNA, 15 bp, Homo sapiens
gaatactcaattatt

SEQ ID NO: 332105 - DNA, 15 bp, Homo sapiens
tgaatactcaattat

SEQ ID NO: 332106 - DNA, 15 bp, Homo sapiens
ttgaatactcaatta

SEQ ID NO: 332107 - DNA, 15 bp, Homo sapiens
attgaatactcaatt

SEQ ID NO: 332108 - DNA, 15 bp, Homo sapiens
tattgaatactcaat

SEQ ID NO: 332109 - DNA, 15 bp, Homo sapiens
ctattgaatactcaa

SEQ ID NO: 332110 - DNA, 15 bp, Homo sapiens
actattgaatactca

SEQ ID NO: 332111 - DNA, 15 bp, Homo sapiens
aactattgaatactc

SEQ ID NO: 332112 - DNA, 15 bp, Homo sapiens
caactattgaatact

SEQ ID NO: 332113 - DNA, 15 bp, Homo sapiens
tcaactattgaatac

SEQ ID NO: 332114 - DNA, 15 bp, Homo sapiens
ctcaactattgaata

SEQ ID NO: 332115 - DNA, 15 bp, Homo sapiens
tctcaactattgaat

SEQ ID NO: 332116 - DNA, 15 bp, Homo sapiens
ttctcaactattgaa

SEQ ID NO: 332117 - DNA, 15 bp, Homo sapiens
gttctcaactattga

SEQ ID NO: 332118 - DNA, 15 bp, Homo sapiens
tgttctcaactattg

SEQ ID NO: 332119 - DNA, 15 bp, Homo sapiens
ttgttctcaactatt

SEQ ID NO: 332120 - DNA, 15 bp, Homo sapiens
tttgttctcaactat

SEQ ID NO: 332121 - DNA, 15 bp, Homo sapiens
ttttgttctcaacta

SEQ ID NO: 332122 - DNA, 15 bp, Homo sapiens
attttgttctcaact

SEQ ID NO: 332123 - DNA, 15 bp, Homo sapiens
aattttgttctcaac

SEQ ID NO: 332124 - DNA, 15 bp, Homo sapiens
gaattttgttctcaa

SEQ ID NO: 332125 - DNA, 15 bp, Homo sapiens
tgaattttgttctca

SEQ ID NO: 332126 - DNA, 15 bp, Homo sapiens
ttgaattttgttctc

SEQ ID NO: 332127 - DNA, 15 bp, Homo sapiens
cttgaattttgttct

SEQ ID NO: 332128 - DNA, 15 bp, Homo sapiens
tcttgaattttgttc

SEQ ID NO: 332129 - DNA, 15 bp, Homo sapiens
ttcttgaattttgtt

SEQ ID NO: 332130 - DNA, 15 bp, Homo sapiens
gttcttgaattttgt

SEQ ID NO: 332131 - DNA, 15 bp, Homo sapiens
agttcttgaattttg

SEQ ID NO: 332132 - DNA, 15 bp, Homo sapiens
tagttcttgaatttt

SEQ ID NO: 332133 - DNA, 15 bp, Homo sapiens
ttagttcttgaattt

SEQ ID NO: 332134 - DNA, 15 bp, Homo sapiens
tttagttcttgaatt

SEQ ID NO: 332135 - DNA, 15 bp, Homo sapiens
ttttagttcttgaat

SEQ ID NO: 332136 - DNA, 15 bp, Homo sapiens
tttttagttcttgaa

SEQ ID NO: 332137 - DNA, 15 bp, Homo sapiens
gtttttagttcttga

SEQ ID NO: 332138 - DNA, 15 bp, Homo sapiens
tgtttttagttcttg

SEQ ID NO: 332139 - DNA, 15 bp, Homo sapiens
ctgtttttagttctt

SEQ ID NO: 332140 - DNA, 15 bp, Homo sapiens
gctgtttttagttct

SEQ ID NO: 332141 - DNA, 15 bp, Homo sapiens
ggctgtttttagttc

SEQ ID NO: 332142 - DNA, 15 bp, Homo sapiens
gggctgtttttagtt

SEQ ID NO: 332143 - DNA, 15 bp, Homo sapiens
tgggctgtttttagt

SEQ ID NO: 332144 - DNA, 15 bp, Homo sapiens
ctgggctgtttttag

SEQ ID NO: 332145 - DNA, 15 bp, Homo sapiens
gctgggctgttttta

SEQ ID NO: 332146 - DNA, 15 bp, Homo sapiens
tgctgggctgttttt

SEQ ID NO: 332147 - DNA, 15 bp, Homo sapiens
gtgctgggctgtttt

SEQ ID NO: 332148 - DNA, 15 bp, Homo sapiens
tgtgctgggctgttt

SEQ ID NO: 332149 - DNA, 15 bp, Homo sapiens
ctgtgctgggctgtt

SEQ ID NO: 332150 - DNA, 15 bp, Homo sapiens
actgtgctgggctgt

SEQ ID NO: 332151 - DNA, 15 bp, Homo sapiens
aactgtgctgggctg

SEQ ID NO: 332152 - DNA, 15 bp, Homo sapiens
taactgtgctgggct

SEQ ID NO: 332153 - DNA, 15 bp, Homo sapiens
ctaactgtgctgggc

SEQ ID NO: 332154 - DNA, 15 bp, Homo sapiens
actaactgtgctggg

SEQ ID NO: 332155 - DNA, 15 bp, Homo sapiens
cactaactgtgctgg

SEQ ID NO: 332156 - DNA, 15 bp, Homo sapiens
tcactaactgtgctg

SEQ ID NO: 332157 - DNA, 15 bp, Homo sapiens
gtcactaactgtgct

SEQ ID NO: 332158 - DNA, 15 bp, Homo sapiens
ggtcactaactgtgc

SEQ ID NO: 332159 - DNA, 15 bp, Homo sapiens
aggtcactaactgtg

SEQ ID NO: 332160 - DNA, 15 bp, Homo sapiens
caggtcactaactgt

SEQ ID NO: 332161 - DNA, 15 bp, Homo sapiens
gcaggtcactaactg

SEQ ID NO: 332162 - DNA, 15 bp, Homo sapiens
ggcaggtcactaact

SEQ ID NO: 332163 - DNA, 15 bp, Homo sapiens
aggcaggtcactaac

SEQ ID NO: 332164 - DNA, 15 bp, Homo sapiens
gaggcaggtcactaa

SEQ ID NO: 332165 - DNA, 15 bp, Homo sapiens
tgaggcaggtcacta

SEQ ID NO: 332166 - DNA, 15 bp, Homo sapiens
gtgaggcaggtcact

SEQ ID NO: 332167 - DNA, 15 bp, Homo sapiens
agtgaggcaggtcac

SEQ ID NO: 332168 - DNA, 15 bp, Homo sapiens
cagtgaggcaggtca

SEQ ID NO: 332169 - DNA, 15 bp, Homo sapiens
acagtgaggcaggtc

SEQ ID NO: 332170 - DNA, 15 bp, Homo sapiens
gacagtgaggcaggt

SEQ ID NO: 332171 - DNA, 15 bp, Homo sapiens
ggacagtgaggcagg

SEQ ID NO: 332172 - DNA, 15 bp, Homo sapiens
tggacagtgaggcag

SEQ ID NO: 332173 - DNA, 15 bp, Homo sapiens
atggacagtgaggca

SEQ ID NO: 332174 - DNA, 15 bp, Homo sapiens
aatggacagtgaggc

SEQ ID NO: 332175 - DNA, 15 bp, Homo sapiens
gaatggacagtgagg

SEQ ID NO: 332176 - DNA, 15 bp, Homo sapiens
ggaatggacagtgag

SEQ ID NO: 332177 - DNA, 15 bp, Homo sapiens
aggaatggacagtga

SEQ ID NO: 332178 - DNA, 15 bp, Homo sapiens
caggaatggacagtg

SEQ ID NO: 332179 - DNA, 15 bp, Homo sapiens
acaggaatggacagt

SEQ ID NO: 332180 - DNA, 15 bp, Homo sapiens
cacaggaatggacag

SEQ ID NO: 332181 - DNA, 15 bp, Homo sapiens
ccacaggaatggaca

SEQ ID NO: 332182 - DNA, 15 bp, Homo sapiens
gccacaggaatggac

SEQ ID NO: 332183 - DNA, 15 bp, Homo sapiens
ggccacaggaatgga

SEQ ID NO: 332184 - DNA, 15 bp, Homo sapiens
gggccacaggaatgg

SEQ ID NO: 332185 - DNA, 15 bp, Homo sapiens
ggggccacaggaatg

SEQ ID NO: 332186 - DNA, 15 bp, Homo sapiens
aggggccacaggaat

SEQ ID NO: 332187 - DNA, 15 bp, Homo sapiens
gaggggccacaggaa

SEQ ID NO: 332188 - DNA, 15 bp, Homo sapiens
agaggggccacagga

SEQ ID NO: 332189 - DNA, 15 bp, Homo sapiens
gagaggggccacagg

SEQ ID NO: 332190 - DNA, 15 bp, Homo sapiens
ggagaggggccacag

SEQ ID NO: 332191 - DNA, 15 bp, Homo sapiens
tggagaggggccaca

SEQ ID NO: 332192 - DNA, 15 bp, Homo sapiens
atggagaggggccac

SEQ ID NO: 332193 - DNA, 15 bp, Homo sapiens
gatggagaggggcca

SEQ ID NO: 332194 - DNA, 15 bp, Homo sapiens
cgatggagaggggcc

SEQ ID NO: 332195 - DNA, 15 bp, Homo sapiens
ccgatggagaggggc

SEQ ID NO: 332196 - DNA, 15 bp, Homo sapiens
accgatggagagggg

SEQ ID NO: 332197 - DNA, 15 bp, Homo sapiens
aaccgatggagaggg

SEQ ID NO: 332198 - DNA, 15 bp, Homo sapiens
gaaccgatggagagg

SEQ ID NO: 332199 - DNA, 15 bp, Homo sapiens
tgaaccgatggagag

SEQ ID NO: 332200 - DNA, 15 bp, Homo sapiens
atgaaccgatggaga

SEQ ID NO: 332201 - DNA, 15 bp, Homo sapiens
aatgaaccgatggag

SEQ ID NO: 332202 - DNA, 15 bp, Homo sapiens
gaatgaaccgatgga

SEQ ID NO: 332203 - DNA, 15 bp, Homo sapiens
tgaatgaaccgatgg

SEQ ID NO: 332204 - DNA, 15 bp, Homo sapiens
gtgaatgaaccgatg

SEQ ID NO: 332205 - DNA, 15 bp, Homo sapiens
agtgaatgaaccgat

SEQ ID NO: 332206 - DNA, 15 bp, Homo sapiens
gagtgaatgaaccga

SEQ ID NO: 332207 - DNA, 15 bp, Homo sapiens
tgagtgaatgaaccg

SEQ ID NO: 332208 - DNA, 15 bp, Homo sapiens
gtgagtgaatgaacc

SEQ ID NO: 332209 - DNA, 15 bp, Homo sapiens
agtgagtgaatgaac

SEQ ID NO: 332210 - DNA, 15 bp, Homo sapiens
gagtgagtgaatgaa

SEQ ID NO: 332211 - DNA, 15 bp, Homo sapiens
cgagtgagtgaatga

SEQ ID NO: 332212 - DNA, 15 bp, Homo sapiens
ccgagtgagtgaatg

SEQ ID NO: 332213 - DNA, 15 bp, Homo sapiens
gccgagtgagtgaat

SEQ ID NO: 332214 - DNA, 15 bp, Homo sapiens
tgccgagtgagtgaa

SEQ ID NO: 332215 - DNA, 15 bp, Homo sapiens
ctgccgagtgagtga

SEQ ID NO: 332216 - DNA, 15 bp, Homo sapiens
cctgccgagtgagtg

SEQ ID NO: 332217 - DNA, 15 bp, Homo sapiens
gcctgccgagtgagt

SEQ ID NO: 332218 - DNA, 15 bp, Homo sapiens
tgcctgccgagtgag

SEQ ID NO: 332219 - DNA, 15 bp, Homo sapiens
ctgcctgccgagtga

SEQ ID NO: 332220 - DNA, 15 bp, Homo sapiens
cctgcctgccgagtg

SEQ ID NO: 332221 - DNA, 15 bp, Homo sapiens
gcctgcctgccgagt

SEQ ID NO: 332222 - DNA, 15 bp, Homo sapiens
tgcctgcctgccgag

SEQ ID NO: 332223 - DNA, 15 bp, Homo sapiens
atgcctgcctgccga

SEQ ID NO: 332224 - DNA, 15 bp, Homo sapiens
aatgcctgcctgccg

SEQ ID NO: 332225 - DNA, 15 bp, Homo sapiens
gaatgcctgcctgcc

SEQ ID NO: 332226 - DNA, 15 bp, Homo sapiens
agaatgcctgcctgc

SEQ ID NO: 332227 - DNA, 15 bp, Homo sapiens
gagaatgcctgcctg

SEQ ID NO: 332228 - DNA, 15 bp, Homo sapiens
agagaatgcctgcct

SEQ ID NO: 332229 - DNA, 15 bp, Homo sapiens
cagagaatgcctgcc

SEQ ID NO: 332230 - DNA, 15 bp, Homo sapiens
acagagaatgcctgc

SEQ ID NO: 332231 - DNA, 15 bp, Homo sapiens
cacagagaatgcctg

SEQ ID NO: 332232 - DNA, 15 bp, Homo sapiens
acacagagaatgcct

SEQ ID NO: 332233 - DNA, 15 bp, Homo sapiens
aacacagagaatgcc

SEQ ID NO: 332234 - DNA, 15 bp, Homo sapiens
taacacagagaatgc

SEQ ID NO: 332235 - DNA, 15 bp, Homo sapiens
ataacacagagaatg

SEQ ID NO: 332236 - DNA, 15 bp, Homo sapiens
cataacacagagaat

SEQ ID NO: 332237 - DNA, 15 bp, Homo sapiens
gcataacacagagaa

SEQ ID NO: 332238 - DNA, 15 bp, Homo sapiens
tgcataacacagaga

SEQ ID NO: 332239 - DNA, 15 bp, Homo sapiens
atgcataacacagag

SEQ ID NO: 332240 - DNA, 15 bp, Homo sapiens
gatgcataacacaga

SEQ ID NO: 332241 - DNA, 15 bp, Homo sapiens
tgatgcataacacag

SEQ ID NO: 332242 - DNA, 15 bp, Homo sapiens
ctgatgcataacaca

SEQ ID NO: 332243 - DNA, 15 bp, Homo sapiens
cctgatgcataacac

SEQ ID NO: 332244 - DNA, 15 bp, Homo sapiens
gcctgatgcataaca

SEQ ID NO: 332245 - DNA, 15 bp, Homo sapiens
tgcctgatgcataac

SEQ ID NO: 332246 - DNA, 15 bp, Homo sapiens
atgcctgatgcataa

SEQ ID NO: 332247 - DNA, 15 bp, Homo sapiens
catgcctgatgcata

SEQ ID NO: 332248 - DNA, 15 bp, Homo sapiens
tcatgcctgatgcat

SEQ ID NO: 332249 - DNA, 15 bp, Homo sapiens
atcatgcctgatgca

SEQ ID NO: 332250 - DNA, 15 bp, Homo sapiens
catcatgcctgatgc

SEQ ID NO: 332251 - DNA, 15 bp, Homo sapiens
gcatcatgcctgatg

SEQ ID NO: 332252 - DNA, 15 bp, Homo sapiens
agcatcatgcctgat

SEQ ID NO: 332253 - DNA, 15 bp, Homo sapiens
cagcatcatgcctga

SEQ ID NO: 332254 - DNA, 15 bp, Homo sapiens
ccagcatcatgcctg

SEQ ID NO: 332255 - DNA, 15 bp, Homo sapiens
cccagcatcatgcct

SEQ ID NO: 332256 - DNA, 15 bp, Homo sapiens
acccagcatcatgcc

SEQ ID NO: 332257 - DNA, 15 bp, Homo sapiens
aacccagcatcatgc

SEQ ID NO: 332258 - DNA, 15 bp, Homo sapiens
aaacccagcatcatg

SEQ ID NO: 332259 - DNA, 15 bp, Homo sapiens
aaaacccagcatcat

SEQ ID NO: 332260 - DNA, 15 bp, Homo sapiens
caaaacccagcatca

SEQ ID NO: 332261 - DNA, 15 bp, Homo sapiens
acaaaacccagcatc

SEQ ID NO: 332262 - DNA, 15 bp, Homo sapiens
aacaaaacccagcat

SEQ ID NO: 332263 - DNA, 15 bp, Homo sapiens
caacaaaacccagca

SEQ ID NO: 332264 - DNA, 15 bp, Homo sapiens
ccaacaaaacccagc

SEQ ID NO: 332265 - DNA, 15 bp, Homo sapiens
cccaacaaaacccag

SEQ ID NO: 332266 - DNA, 15 bp, Homo sapiens
acccaacaaaaccca

SEQ ID NO: 332267 - DNA, 15 bp, Homo sapiens
cacccaacaaaaccc

SEQ ID NO: 332268 - DNA, 15 bp, Homo sapiens
gcacccaacaaaacc

SEQ ID NO: 332269 - DNA, 15 bp, Homo sapiens
agcacccaacaaaac

SEQ ID NO: 332270 - DNA, 15 bp, Homo sapiens
gagcacccaacaaaa

SEQ ID NO: 332271 - DNA, 15 bp, Homo sapiens
tgagcacccaacaaa

SEQ ID NO: 332272 - DNA, 15 bp, Homo sapiens
ctgagcacccaacaa

SEQ ID NO: 332273 - DNA, 15 bp, Homo sapiens
cctgagcacccaaca

SEQ ID NO: 332274 - DNA, 15 bp, Homo sapiens
ccctgagcacccaac

SEQ ID NO: 332275 - DNA, 15 bp, Homo sapiens
accctgagcacccaa

SEQ ID NO: 332276 - DNA, 15 bp, Homo sapiens
aaccctgagcaccca

SEQ ID NO: 332277 - DNA, 15 bp, Homo sapiens
gaaccctgagcaccc

SEQ ID NO: 332278 - DNA, 15 bp, Homo sapiens
tgaaccctgagcacc

SEQ ID NO: 332279 - DNA, 15 bp, Homo sapiens
atgaaccctgagcac

SEQ ID NO: 332280 - DNA, 15 bp, Homo sapiens
aatgaaccctgagca

SEQ ID NO: 332281 - DNA, 15 bp, Homo sapiens
caatgaaccctgagc

SEQ ID NO: 332282 - DNA, 15 bp, Homo sapiens
ccaatgaaccctgag

SEQ ID NO: 332283 - DNA, 15 bp, Homo sapiens
gccaatgaaccctga

SEQ ID NO: 332284 - DNA, 15 bp, Homo sapiens
cgccaatgaaccctg

SEQ ID NO: 332285 - DNA, 15 bp, Homo sapiens
tcgccaatgaaccct

SEQ ID NO: 332286 - DNA, 15 bp, Homo sapiens
ttcgccaatgaaccc

SEQ ID NO: 332287 - DNA, 15 bp, Homo sapiens
gttcgccaatgaacc

SEQ ID NO: 332288 - DNA, 15 bp, Homo sapiens
tgttcgccaatgaac

SEQ ID NO: 332289 - DNA, 15 bp, Homo sapiens
ttgttcgccaatgaa

SEQ ID NO: 332290 - DNA, 15 bp, Homo sapiens
tttgttcgccaatga

SEQ ID NO: 332291 - DNA, 15 bp, Homo sapiens
gtttgttcgccaatg

SEQ ID NO: 332292 - DNA, 15 bp, Homo sapiens
agtttgttcgccaat

SEQ ID NO: 332293 - DNA, 15 bp, Homo sapiens
tagtttgttcgccaa

SEQ ID NO: 332294 - DNA, 15 bp, Homo sapiens
gtagtttgttcgcca

SEQ ID NO: 332295 - DNA, 15 bp, Homo sapiens
ggtagtttgttcgcc

SEQ ID NO: 332296 - DNA, 15 bp, Homo sapiens
gggtagtttgttcgc

SEQ ID NO: 332297 - DNA, 15 bp, Homo sapiens
agggtagtttgttcg

SEQ ID NO: 332298 - DNA, 15 bp, Homo sapiens
gagggtagtttgttc

SEQ ID NO: 332299 - DNA, 15 bp, Homo sapiens
cgagggtagtttgtt

SEQ ID NO: 332300 - DNA, 15 bp, Homo sapiens
ccgagggtagtttgt

SEQ ID NO: 332301 - DNA, 15 bp, Homo sapiens
tccgagggtagtttg

SEQ ID NO: 332302 - DNA, 15 bp, Homo sapiens
ttccgagggtagttt

SEQ ID NO: 332303 - DNA, 15 bp, Homo sapiens
gttccgagggtagtt

SEQ ID NO: 332304 - DNA, 15 bp, Homo sapiens
ggttccgagggtagt

SEQ ID NO: 332305 - DNA, 15 bp, Homo sapiens
aggttccgagggtag

SEQ ID NO: 332306 - DNA, 15 bp, Homo sapiens
caggttccgagggta

SEQ ID NO: 332307 - DNA, 15 bp, Homo sapiens
acaggttccgagggt

SEQ ID NO: 332308 - DNA, 15 bp, Homo sapiens
gacaggttccgaggg

SEQ ID NO: 332309 - DNA, 15 bp, Homo sapiens
ggacaggttccgagg

SEQ ID NO: 332310 - DNA, 15 bp, Homo sapiens
aggacaggttccgag

SEQ ID NO: 332311 - DNA, 15 bp, Homo sapiens
gaggacaggttccga

SEQ ID NO: 332312 - DNA, 15 bp, Homo sapiens
ggaggacaggttccg

SEQ ID NO: 332313 - DNA, 15 bp, Homo sapiens
aggaggacaggttcc

SEQ ID NO: 332314 - DNA, 15 bp, Homo sapiens
caggaggacaggttc

SEQ ID NO: 332315 - DNA, 15 bp, Homo sapiens
ccaggaggacaggtt

SEQ ID NO: 332316 - DNA, 15 bp, Homo sapiens
tccaggaggacaggt

SEQ ID NO: 332317 - DNA, 15 bp, Homo sapiens
ctccaggaggacagg

SEQ ID NO: 332318 - DNA, 15 bp, Homo sapiens
actccaggaggacag

SEQ ID NO: 332319 - DNA, 15 bp, Homo sapiens
aactccaggaggaca

SEQ ID NO: 332320 - DNA, 15 bp, Homo sapiens
aaactccaggaggac

SEQ ID NO: 332321 - DNA, 15 bp, Homo sapiens
taaactccaggagga

SEQ ID NO: 332322 - DNA, 15 bp, Homo sapiens
gtaaactccaggagg

SEQ ID NO: 332323 - DNA, 15 bp, Homo sapiens
tgtaaactccaggag

SEQ ID NO: 332324 - DNA, 15 bp, Homo sapiens
ctgtaaactccagga

SEQ ID NO: 332325 - DNA, 15 bp, Homo sapiens
actgtaaactccagg

SEQ ID NO: 332326 - DNA, 15 bp, Homo sapiens
gactgtaaactccag

SEQ ID NO: 332327 - DNA, 15 bp, Homo sapiens
agactgtaaactcca

SEQ ID NO: 332328 - DNA, 15 bp, Homo sapiens
gagactgtaaactcc

SEQ ID NO: 332329 - DNA, 15 bp, Homo sapiens
tgagactgtaaactc

SEQ ID NO: 332330 - DNA, 15 bp, Homo sapiens
ttgagactgtaaact

SEQ ID NO: 332331 - DNA, 15 bp, Homo sapiens
cttgagactgtaaac

SEQ ID NO: 332332 - DNA, 15 bp, Homo sapiens
ccttgagactgtaaa

SEQ ID NO: 332333 - DNA, 15 bp, Homo sapiens
tccttgagactgtaa

SEQ ID NO: 332334 - DNA, 15 bp, Homo sapiens
ctccttgagactgta

SEQ ID NO: 332335 - DNA, 15 bp, Homo sapiens
cctccttgagactgt

SEQ ID NO: 332336 - DNA, 15 bp, Homo sapiens
acctccttgagactg

SEQ ID NO: 332337 - DNA, 15 bp, Homo sapiens
aacctccttgagact

SEQ ID NO: 332338 - DNA, 15 bp, Homo sapiens
caacctccttgagac

SEQ ID NO: 332339 - DNA, 15 bp, Homo sapiens
gcaacctccttgaga

SEQ ID NO: 332340 - DNA, 15 bp, Homo sapiens
tgcaacctccttgag

SEQ ID NO: 332341 - DNA, 15 bp, Homo sapiens
ttgcaacctccttga

SEQ ID NO: 332342 - DNA, 15 bp, Homo sapiens
cttgcaacctccttg

SEQ ID NO: 332343 - DNA, 15 bp, Homo sapiens
gcttgcaacctcctt

SEQ ID NO: 332344 - DNA, 15 bp, Homo sapiens
tgcttgcaacctcct

SEQ ID NO: 332345 - DNA, 15 bp, Homo sapiens
gtgcttgcaacctcc

SEQ ID NO: 332346 - DNA, 15 bp, Homo sapiens
agtgcttgcaacctc

SEQ ID NO: 332347 - DNA, 15 bp, Homo sapiens
cagtgcttgcaacct

SEQ ID NO: 332348 - DNA, 15 bp, Homo sapiens
tcagtgcttgcaacc

SEQ ID NO: 332349 - DNA, 15 bp, Homo sapiens
ctcagtgcttgcaac

SEQ ID NO: 332350 - DNA, 15 bp, Homo sapiens
gctcagtgcttgcaa

SEQ ID NO: 332351 - DNA, 15 bp, Homo sapiens
tgctcagtgcttgca

SEQ ID NO: 332352 - DNA, 15 bp, Homo sapiens
ttgctcagtgcttgc

SEQ ID NO: 332353 - DNA, 15 bp, Homo sapiens
cttgctcagtgcttg

SEQ ID NO: 332354 - DNA, 15 bp, Homo sapiens
ccttgctcagtgctt

SEQ ID NO: 332355 - DNA, 15 bp, Homo sapiens
cccttgctcagtgct

SEQ ID NO: 332356 - DNA, 15 bp, Homo sapiens
acccttgctcagtgc

SEQ ID NO: 332357 - DNA, 15 bp, Homo sapiens
tacccttgctcagtg

SEQ ID NO: 332358 - DNA, 15 bp, Homo sapiens
gtacccttgctcagt

SEQ ID NO: 332359 - DNA, 15 bp, Homo sapiens
tgtacccttgctcag

SEQ ID NO: 332360 - DNA, 15 bp, Homo sapiens
ttgtacccttgctca

SEQ ID NO: 332361 - DNA, 15 bp, Homo sapiens
gttgtacccttgctc

SEQ ID NO: 332362 - DNA, 15 bp, Homo sapiens
agttgtacccttgct

SEQ ID NO: 332363 - DNA, 15 bp, Homo sapiens
tagttgtacccttgc

SEQ ID NO: 332364 - DNA, 15 bp, Homo sapiens
ttagttgtacccttg

SEQ ID NO: 332365 - DNA, 15 bp, Homo sapiens
tttagttgtaccctt

SEQ ID NO: 332366 - DNA, 15 bp, Homo sapiens
ctttagttgtaccct

SEQ ID NO: 332367 - DNA, 15 bp, Homo sapiens
gctttagttgtaccc

SEQ ID NO: 332368 - DNA, 15 bp, Homo sapiens
tgctttagttgtacc

SEQ ID NO: 332369 - DNA, 15 bp, Homo sapiens
ttgctttagttgtac

SEQ ID NO: 332370 - DNA, 15 bp, Homo sapiens
tttgctttagttgta

SEQ ID NO: 332371 - DNA, 15 bp, Homo sapiens
atttgctttagttgt

SEQ ID NO: 332372 - DNA, 15 bp, Homo sapiens
catttgctttagttg

SEQ ID NO: 332373 - DNA, 15 bp, Homo sapiens
gcatttgctttagtt

SEQ ID NO: 332374 - DNA, 15 bp, Homo sapiens
ggcatttgctttagt

SEQ ID NO: 332375 - DNA, 15 bp, Homo sapiens
tggcatttgctttag

SEQ ID NO: 332376 - DNA, 15 bp, Homo sapiens
ttggcatttgcttta

SEQ ID NO: 332377 - DNA, 15 bp, Homo sapiens
attggcatttgcttt

SEQ ID NO: 332378 - DNA, 15 bp, Homo sapiens
aattggcatttgctt

SEQ ID NO: 332379 - DNA, 15 bp, Homo sapiens
taattggcatttgct

SEQ ID NO: 332380 - DNA, 15 bp, Homo sapiens
gtaattggcatttgc

SEQ ID NO: 332381 - DNA, 15 bp, Homo sapiens
tgtaattggcatttg

SEQ ID NO: 332382 - DNA, 15 bp, Homo sapiens
gtgtaattggcattt

SEQ ID NO: 332383 - DNA, 15 bp, Homo sapiens
tgtgtaattggcatt

SEQ ID NO: 332384 - DNA, 15 bp, Homo sapiens
atgtgtaattggcat

SEQ ID NO: 332385 - DNA, 15 bp, Homo sapiens
aatgtgtaattggca

SEQ ID NO: 332386 - DNA, 15 bp, Homo sapiens
aaatgtgtaattggc

SEQ ID NO: 332387 - DNA, 15 bp, Homo sapiens
aaaatgtgtaattgg

SEQ ID NO: 332388 - DNA, 15 bp, Homo sapiens
aaaaatgtgtaattg

SEQ ID NO: 332389 - DNA, 15 bp, Homo sapiens
taaaaatgtgtaatt

SEQ ID NO: 332390 - DNA, 15 bp, Homo sapiens
ttaaaaatgtgtaat

SEQ ID NO: 332391 - DNA, 15 bp, Homo sapiens
attaaaaatgtgtaa

SEQ ID NO: 332392 - DNA, 15 bp, Homo sapiens
cattaaaaatgtgta

SEQ ID NO: 332393 - DNA, 15 bp, Homo sapiens
acattaaaaatgtgt

SEQ ID NO: 332394 - DNA, 15 bp, Homo sapiens
cacattaaaaatgtg

SEQ ID NO: 332395 - DNA, 15 bp, Homo sapiens
acacattaaaaatgt

SEQ ID NO: 332396 - DNA, 15 bp, Homo sapiens
cacacattaaaaatg

SEQ ID NO: 332397 - DNA, 15 bp, Homo sapiens
gcacacattaaaaat

SEQ ID NO: 332398 - DNA, 15 bp, Homo sapiens
agcacacattaaaaa

SEQ ID NO: 332399 - DNA, 15 bp, Homo sapiens
cagcacacattaaaa

SEQ ID NO: 332400 - DNA, 15 bp, Homo sapiens
gcagcacacattaaa

SEQ ID NO: 332401 - DNA, 15 bp, Homo sapiens
tgcagcacacattaa

SEQ ID NO: 332402 - DNA, 15 bp, Homo sapiens
ttgcagcacacatta

SEQ ID NO: 332403 - DNA, 15 bp, Homo sapiens
tttgcagcacacatt

SEQ ID NO: 332404 - DNA, 15 bp, Homo sapiens
ttttgcagcacacat

SEQ ID NO: 332405 - DNA, 15 bp, Homo sapiens
gttttgcagcacaca

SEQ ID NO: 332406 - DNA, 15 bp, Homo sapiens
ggttttgcagcacac

SEQ ID NO: 332407 - DNA, 15 bp, Homo sapiens
tggttttgcagcaca

SEQ ID NO: 332408 - DNA, 15 bp, Homo sapiens
ctggttttgcagcac

SEQ ID NO: 332409 - DNA, 15 bp, Homo sapiens
tctggttttgcagca

SEQ ID NO: 332410 - DNA, 15 bp, Homo sapiens
ttctggttttgcagc

SEQ ID NO: 332411 - DNA, 15 bp, Homo sapiens
tttctggttttgcag

SEQ ID NO: 332412 - DNA, 15 bp, Homo sapiens
ttttctggttttgca

SEQ ID NO: 332413 - DNA, 15 bp, Homo sapiens
cttttctggttttgc

SEQ ID NO: 332414 - DNA, 15 bp, Homo sapiens
tcttttctggttttg

SEQ ID NO: 332415 - DNA, 15 bp, Homo sapiens
gtcttttctggtttt

SEQ ID NO: 332416 - DNA, 15 bp, Homo sapiens
agtcttttctggttt

SEQ ID NO: 332417 - DNA, 15 bp, Homo sapiens
tagtcttttctggtt

SEQ ID NO: 332418 - DNA, 15 bp, Homo sapiens
ttagtcttttctggt

SEQ ID NO: 332419 - DNA, 15 bp, Homo sapiens
cttagtcttttctgg

SEQ ID NO: 332420 - DNA, 15 bp, Homo sapiens
tcttagtcttttctg

SEQ ID NO: 332421 - DNA, 15 bp, Homo sapiens
atcttagtcttttct

SEQ ID NO: 332422 - DNA, 15 bp, Homo sapiens
aatcttagtcttttc

SEQ ID NO: 332423 - DNA, 15 bp, Homo sapiens
gaatcttagtctttt

SEQ ID NO: 332424 - DNA, 15 bp, Homo sapiens
agaatcttagtcttt

SEQ ID NO: 332425 - DNA, 15 bp, Homo sapiens
cagaatcttagtctt

SEQ ID NO: 332426 - DNA, 15 bp, Homo sapiens
gcagaatcttagtct

SEQ ID NO: 332427 - DNA, 15 bp, Homo sapiens
tgcagaatcttagtc

SEQ ID NO: 332428 - DNA, 15 bp, Homo sapiens
ttgcagaatcttagt

SEQ ID NO: 332429 - DNA, 15 bp, Homo sapiens
gttgcagaatcttag

SEQ ID NO: 332430 - DNA, 15 bp, Homo sapiens
agttgcagaatctta

SEQ ID NO: 332431 - DNA, 15 bp, Homo sapiens
cagttgcagaatctt

SEQ ID NO: 332432 - DNA, 15 bp, Homo sapiens
tcagttgcagaatct

SEQ ID NO: 332433 - DNA, 15 bp, Homo sapiens
ctcagttgcagaatc

SEQ ID NO: 332434 - DNA, 15 bp, Homo sapiens
tctcagttgcagaat

SEQ ID NO: 332435 - DNA, 15 bp, Homo sapiens
ttctcagttgcagaa

SEQ ID NO: 332436 - DNA, 15 bp, Homo sapiens
tttctcagttgcaga

SEQ ID NO: 332437 - DNA, 15 bp, Homo sapiens
ttttctcagttgcag

SEQ ID NO: 332438 - DNA, 15 bp, Homo sapiens
tttttctcagttgca

SEQ ID NO: 332439 - DNA, 15 bp, Homo sapiens
gtttttctcagttgc

SEQ ID NO: 332440 - DNA, 15 bp, Homo sapiens
tgtttttctcagttg

SEQ ID NO: 332441 - DNA, 15 bp, Homo sapiens
ctgtttttctcagtt

SEQ ID NO: 332442 - DNA, 15 bp, Homo sapiens
cctgtttttctcagt

SEQ ID NO: 332443 - DNA, 15 bp, Homo sapiens
ccctgtttttctcag

SEQ ID NO: 332444 - DNA, 15 bp, Homo sapiens
tccctgtttttctca

SEQ ID NO: 332445 - DNA, 15 bp, Homo sapiens
atccctgtttttctc

SEQ ID NO: 332446 - DNA, 15 bp, Homo sapiens
aatccctgtttttct

SEQ ID NO: 332447 - DNA, 15 bp, Homo sapiens
taatccctgtttttc

SEQ ID NO: 332448 - DNA, 15 bp, Homo sapiens
ctaatccctgttttt

SEQ ID NO: 332449 - DNA, 15 bp, Homo sapiens
actaatccctgtttt

SEQ ID NO: 332450 - DNA, 15 bp, Homo sapiens
aactaatccctgttt

SEQ ID NO: 332451 - DNA, 15 bp, Homo sapiens
taactaatccctgtt

SEQ ID NO: 332452 - DNA, 15 bp, Homo sapiens
gtaactaatccctgt

SEQ ID NO: 332453 - DNA, 15 bp, Homo sapiens
tgtaactaatccctg

SEQ ID NO: 332454 - DNA, 15 bp, Homo sapiens
gtgtaactaatccct

SEQ ID NO: 332455 - DNA, 15 bp, Homo sapiens
agtgtaactaatccc

SEQ ID NO: 332456 - DNA, 15 bp, Homo sapiens
cagtgtaactaatcc

SEQ ID NO: 332457 - DNA, 15 bp, Homo sapiens
ccagtgtaactaatc

SEQ ID NO: 332458 - DNA, 15 bp, Homo sapiens
tccagtgtaactaat

SEQ ID NO: 332459 - DNA, 15 bp, Homo sapiens
atccagtgtaactaa

SEQ ID NO: 332460 - DNA, 15 bp, Homo sapiens
tatccagtgtaacta

SEQ ID NO: 332461 - DNA, 15 bp, Homo sapiens
ttatccagtgtaact

SEQ ID NO: 332462 - DNA, 15 bp, Homo sapiens
tttatccagtgtaac

SEQ ID NO: 332463 - DNA, 15 bp, Homo sapiens
ctttatccagtgtaa

SEQ ID NO: 332464 - DNA, 15 bp, Homo sapiens
actttatccagtgta

SEQ ID NO: 332465 - DNA, 15 bp, Homo sapiens
tactttatccagtgt

SEQ ID NO: 332466 - DNA, 15 bp, Homo sapiens
ctactttatccagtg

SEQ ID NO: 332467 - DNA, 15 bp, Homo sapiens
actactttatccagt

SEQ ID NO: 332468 - DNA, 15 bp, Homo sapiens
gactactttatccag

SEQ ID NO: 332469 - DNA, 15 bp, Homo sapiens
ggactactttatcca

SEQ ID NO: 332470 - DNA, 15 bp, Homo sapiens
tggactactttatcc

SEQ ID NO: 332471 - DNA, 15 bp, Homo sapiens
ttggactactttatc

SEQ ID NO: 332472 - DNA, 15 bp, Homo sapiens
cttggactactttat

SEQ ID NO: 332473 - DNA, 15 bp, Homo sapiens
ccttggactacttta

SEQ ID NO: 332474 - DNA, 15 bp, Homo sapiens
tccttggactacttt

SEQ ID NO: 332475 - DNA, 15 bp, Homo sapiens
ttccttggactactt

SEQ ID NO: 332476 - DNA, 15 bp, Homo sapiens
cttccttggactact

SEQ ID NO: 332477 - DNA, 15 bp, Homo sapiens
gcttccttggactac

SEQ ID NO: 332478 - DNA, 15 bp, Homo sapiens
cgcttccttggacta

SEQ ID NO: 332479 - DNA, 15 bp, Homo sapiens
tcgcttccttggact

SEQ ID NO: 332480 - DNA, 15 bp, Homo sapiens
gtcgcttccttggac

SEQ ID NO: 332481 - DNA, 15 bp, Homo sapiens
tgtcgcttccttgga

SEQ ID NO: 332482 - DNA, 15 bp, Homo sapiens
gtgtcgcttccttgg

SEQ ID NO: 332483 - DNA, 15 bp, Homo sapiens
ggtgtcgcttccttg

SEQ ID NO: 332484 - DNA, 15 bp, Homo sapiens
aggtgtcgcttcctt

SEQ ID NO: 332485 - DNA, 15 bp, Homo sapiens
gaggtgtcgcttcct

SEQ ID NO: 332486 - DNA, 15 bp, Homo sapiens
tgaggtgtcgcttcc

SEQ ID NO: 332487 - DNA, 15 bp, Homo sapiens
ctgaggtgtcgcttc

SEQ ID NO: 332488 - DNA, 15 bp, Homo sapiens
tctgaggtgtcgctt

SEQ ID NO: 332489 - DNA, 15 bp, Homo sapiens
ctctgaggtgtcgct

SEQ ID NO: 332490 - DNA, 15 bp, Homo sapiens
cctctgaggtgtcgc

SEQ ID NO: 332491 - DNA, 15 bp, Homo sapiens
tcctctgaggtgtcg

SEQ ID NO: 332492 - DNA, 15 bp, Homo sapiens
ctcctctgaggtgtc

SEQ ID NO: 332493 - DNA, 15 bp, Homo sapiens
cctcctctgaggtgt

SEQ ID NO: 332494 - DNA, 15 bp, Homo sapiens
tcctcctctgaggtg

SEQ ID NO: 332495 - DNA, 15 bp, Homo sapiens
ctcctcctctgaggt

SEQ ID NO: 332496 - DNA, 15 bp, Homo sapiens
tctcctcctctgagg

SEQ ID NO: 332497 - DNA, 15 bp, Homo sapiens
atctcctcctctgag

SEQ ID NO: 332498 - DNA, 15 bp, Homo sapiens
catctcctcctctga

SEQ ID NO: 332499 - DNA, 15 bp, Homo sapiens
gcatctcctcctctg

SEQ ID NO: 332500 - DNA, 15 bp, Homo sapiens
agcatctcctcctct

SEQ ID NO: 332501 - DNA, 15 bp, Homo sapiens
tagcatctcctcctc

SEQ ID NO: 332502 - DNA, 15 bp, Homo sapiens
ttagcatctcctcct

SEQ ID NO: 332503 - DNA, 15 bp, Homo sapiens
gttagcatctcctcc

SEQ ID NO: 332504 - DNA, 15 bp, Homo sapiens
agttagcatctcctc

SEQ ID NO: 332505 - DNA, 15 bp, Homo sapiens
tagttagcatctcct

SEQ ID NO: 332506 - DNA, 15 bp, Homo sapiens
ttagttagcatctcc

SEQ ID NO: 332507 - DNA, 15 bp, Homo sapiens
gttagttagcatctc

SEQ ID NO: 332508 - DNA, 15 bp, Homo sapiens
cgttagttagcatct

SEQ ID NO: 332509 - DNA, 15 bp, Homo sapiens
gcgttagttagcatc

SEQ ID NO: 332510 - DNA, 15 bp, Homo sapiens
agcgttagttagcat

SEQ ID NO: 332511 - DNA, 15 bp, Homo sapiens
aagcgttagttagca

SEQ ID NO: 332512 - DNA, 15 bp, Homo sapiens
caagcgttagttagc

SEQ ID NO: 332513 - DNA, 15 bp, Homo sapiens
acaagcgttagttag

SEQ ID NO: 332514 - DNA, 15 bp, Homo sapiens
aacaagcgttagtta

SEQ ID NO: 332515 - DNA, 15 bp, Homo sapiens
gaacaagcgttagtt

SEQ ID NO: 332516 - DNA, 15 bp, Homo sapiens
tgaacaagcgttagt

SEQ ID NO: 332517 - DNA, 15 bp, Homo sapiens
ttgaacaagcgttag

SEQ ID NO: 332518 - DNA, 15 bp, Homo sapiens
attgaacaagcgtta

SEQ ID NO: 332519 - DNA, 15 bp, Homo sapiens
cattgaacaagcgtt

SEQ ID NO: 332520 - DNA, 15 bp, Homo sapiens
tcattgaacaagcgt

SEQ ID NO: 332521 - DNA, 15 bp, Homo sapiens
gtcattgaacaagcg

SEQ ID NO: 332522 - DNA, 15 bp, Homo sapiens
ggtcattgaacaagc

SEQ ID NO: 332523 - DNA, 15 bp, Homo sapiens
aggtcattgaacaag

SEQ ID NO: 332524 - DNA, 15 bp, Homo sapiens
aaggtcattgaacaa

SEQ ID NO: 332525 - DNA, 15 bp, Homo sapiens
caaggtcattgaaca

SEQ ID NO: 332526 - DNA, 15 bp, Homo sapiens
tcaaggtcattgaac

SEQ ID NO: 332527 - DNA, 15 bp, Homo sapiens
gtcaaggtcattgaa

SEQ ID NO: 332528 - DNA, 15 bp, Homo sapiens
ggtcaaggtcattga

SEQ ID NO: 332529 - DNA, 15 bp, Homo sapiens
gggtcaaggtcattg

SEQ ID NO: 332530 - DNA, 15 bp, Homo sapiens
tgggtcaaggtcatt

SEQ ID NO: 332531 - DNA, 15 bp, Homo sapiens
ctgggtcaaggtcat

SEQ ID NO: 332532 - DNA, 15 bp, Homo sapiens
gctgggtcaaggtca

SEQ ID NO: 332533 - DNA, 15 bp, Homo sapiens
agctgggtcaaggtc

SEQ ID NO: 332534 - DNA, 15 bp, Homo sapiens
aagctgggtcaaggt

SEQ ID NO: 332535 - DNA, 15 bp, Homo sapiens
caagctgggtcaagg

SEQ ID NO: 332536 - DNA, 15 bp, Homo sapiens
gcaagctgggtcaag

SEQ ID NO: 332537 - DNA, 15 bp, Homo sapiens
tgcaagctgggtcaa

SEQ ID NO: 332538 - DNA, 15 bp, Homo sapiens
atgcaagctgggtca

SEQ ID NO: 332539 - DNA, 15 bp, Homo sapiens
aatgcaagctgggtc

SEQ ID NO: 332540 - DNA, 15 bp, Homo sapiens
taatgcaagctgggt

SEQ ID NO: 332541 - DNA, 15 bp, Homo sapiens
gtaatgcaagctggg

SEQ ID NO: 332542 - DNA, 15 bp, Homo sapiens
ggtaatgcaagctgg

SEQ ID NO: 332543 - DNA, 15 bp, Homo sapiens
gggtaatgcaagctg

SEQ ID NO: 332544 - DNA, 15 bp, Homo sapiens
tgggtaatgcaagct

SEQ ID NO: 332545 - DNA, 15 bp, Homo sapiens
gtgggtaatgcaagc

SEQ ID NO: 332546 - DNA, 15 bp, Homo sapiens
agtgggtaatgcaag

SEQ ID NO: 332547 - DNA, 15 bp, Homo sapiens
tagtgggtaatgcaa

SEQ ID NO: 332548 - DNA, 15 bp, Homo sapiens
ttagtgggtaatgca

SEQ ID NO: 332549 - DNA, 15 bp, Homo sapiens
cttagtgggtaatgc

SEQ ID NO: 332550 - DNA, 15 bp, Homo sapiens
gcttagtgggtaatg

SEQ ID NO: 332551 - DNA, 15 bp, Homo sapiens
agcttagtgggtaat

SEQ ID NO: 332552 - DNA, 15 bp, Homo sapiens
cagcttagtgggtaa

SEQ ID NO: 332553 - DNA, 15 bp, Homo sapiens
ccagcttagtgggta

SEQ ID NO: 332554 - DNA, 15 bp, Homo sapiens
cccagcttagtgggt

SEQ ID NO: 332555 - DNA, 15 bp, Homo sapiens
ccccagcttagtggg

SEQ ID NO: 332556 - DNA, 15 bp, Homo sapiens
cccccagcttagtgg

SEQ ID NO: 332557 - DNA, 15 bp, Homo sapiens
tcccccagcttagtg

SEQ ID NO: 332558 - DNA, 15 bp, Homo sapiens
ctcccccagcttagt

SEQ ID NO: 332559 - DNA, 15 bp, Homo sapiens
gctcccccagcttag

SEQ ID NO: 332560 - DNA, 15 bp, Homo sapiens
agctcccccagctta

SEQ ID NO: 332561 - DNA, 15 bp, Homo sapiens
tagctcccccagctt

SEQ ID NO: 332562 - DNA, 15 bp, Homo sapiens
ttagctcccccagct

SEQ ID NO: 332563 - DNA, 15 bp, Homo sapiens
gttagctcccccagc

SEQ ID NO: 332564 - DNA, 15 bp, Homo sapiens
tgttagctcccccag

SEQ ID NO: 332565 - DNA, 15 bp, Homo sapiens
gtgttagctccccca

SEQ ID NO: 332566 - DNA, 15 bp, Homo sapiens
agtgttagctccccc

SEQ ID NO: 332567 - DNA, 15 bp, Homo sapiens
gagtgttagctcccc

SEQ ID NO: 332568 - DNA, 15 bp, Homo sapiens
agagtgttagctccc

SEQ ID NO: 332569 - DNA, 15 bp, Homo sapiens
aagagtgttagctcc

SEQ ID NO: 332570 - DNA, 15 bp, Homo sapiens
caagagtgttagctc

SEQ ID NO: 332571 - DNA, 15 bp, Homo sapiens
gcaagagtgttagct

SEQ ID NO: 332572 - DNA, 15 bp, Homo sapiens
agcaagagtgttagc

SEQ ID NO: 332573 - DNA, 15 bp, Homo sapiens
aagcaagagtgttag

SEQ ID NO: 332574 - DNA, 15 bp, Homo sapiens
aaagcaagagtgtta

SEQ ID NO: 332575 - DNA, 15 bp, Homo sapiens
aaaagcaagagtgtt

SEQ ID NO: 332576 - DNA, 15 bp, Homo sapiens
taaaagcaagagtgt

SEQ ID NO: 332577 - DNA, 15 bp, Homo sapiens
ttaaaagcaagagtg

SEQ ID NO: 332578 - DNA, 15 bp, Homo sapiens
tttaaaagcaagagt

SEQ ID NO: 332579 - DNA, 15 bp, Homo sapiens
ttttaaaagcaagag

SEQ ID NO: 332580 - DNA, 15 bp, Homo sapiens
attttaaaagcaaga

SEQ ID NO: 332581 - DNA, 15 bp, Homo sapiens
gattttaaaagcaag

SEQ ID NO: 332582 - DNA, 15 bp, Homo sapiens
ggattttaaaagcaa

SEQ ID NO: 332583 - DNA, 15 bp, Homo sapiens
tggattttaaaagca

SEQ ID NO: 332584 - DNA, 15 bp, Homo sapiens
ctggattttaaaagc

SEQ ID NO: 332585 - DNA, 15 bp, Homo sapiens
cctggattttaaaag

SEQ ID NO: 332586 - DNA, 15 bp, Homo sapiens
acctggattttaaaa

SEQ ID NO: 332587 - DNA, 15 bp, Homo sapiens
aacctggattttaaa

SEQ ID NO: 332588 - DNA, 15 bp, Homo sapiens
taacctggattttaa

SEQ ID NO: 332589 - DNA, 15 bp, Homo sapiens
ataacctggatttta

SEQ ID NO: 332590 - DNA, 15 bp, Homo sapiens
cataacctggatttt

SEQ ID NO: 332591 - DNA, 15 bp, Homo sapiens
gcataacctggattt

SEQ ID NO: 332592 - DNA, 15 bp, Homo sapiens
tgcataacctggatt

SEQ ID NO: 332593 - DNA, 15 bp, Homo sapiens
ttgcataacctggat

SEQ ID NO: 332594 - DNA, 15 bp, Homo sapiens
cttgcataacctgga

SEQ ID NO: 332595 - DNA, 15 bp, Homo sapiens
gcttgcataacctgg

SEQ ID NO: 332596 - DNA, 15 bp, Homo sapiens
ggcttgcataacctg

SEQ ID NO: 332597 - DNA, 15 bp, Homo sapiens
gggcttgcataacct

SEQ ID NO: 332598 - DNA, 15 bp, Homo sapiens
ggggcttgcataacc

SEQ ID NO: 332599 - DNA, 15 bp, Homo sapiens
tggggcttgcataac

SEQ ID NO: 332600 - DNA, 15 bp, Homo sapiens
gtggggcttgcataa

SEQ ID NO: 332601 - DNA, 15 bp, Homo sapiens
agtggggcttgcata

SEQ ID NO: 332602 - DNA, 15 bp, Homo sapiens
aagtggggcttgcat

SEQ ID NO: 332603 - DNA, 15 bp, Homo sapiens
caagtggggcttgca

SEQ ID NO: 332604 - DNA, 15 bp, Homo sapiens
gcaagtggggcttgc

SEQ ID NO: 332605 - DNA, 15 bp, Homo sapiens
tgcaagtggggcttg

SEQ ID NO: 332606 - DNA, 15 bp, Homo sapiens
ttgcaagtggggctt

SEQ ID NO: 332607 - DNA, 15 bp, Homo sapiens
tttgcaagtggggct

SEQ ID NO: 332608 - DNA, 15 bp, Homo sapiens
gtttgcaagtggggc

SEQ ID NO: 332609 - DNA, 15 bp, Homo sapiens
tgtttgcaagtgggg

SEQ ID NO: 332610 - DNA, 15 bp, Homo sapiens
atgtttgcaagtggg

SEQ ID NO: 332611 - DNA, 15 bp, Homo sapiens
tatgtttgcaagtgg

SEQ ID NO: 332612 - DNA, 15 bp, Homo sapiens
ctatgtttgcaagtg

SEQ ID NO: 332613 - DNA, 15 bp, Homo sapiens
cctatgtttgcaagt

SEQ ID NO: 332614 - DNA, 15 bp, Homo sapiens
acctatgtttgcaag

SEQ ID NO: 332615 - DNA, 15 bp, Homo sapiens
gacctatgtttgcaa

SEQ ID NO: 332616 - DNA, 15 bp, Homo sapiens
agacctatgtttgca

SEQ ID NO: 332617 - DNA, 15 bp, Homo sapiens
aagacctatgtttgc

SEQ ID NO: 332618 - DNA, 15 bp, Homo sapiens
gaagacctatgtttg

SEQ ID NO: 332619 - DNA, 15 bp, Homo sapiens
tgaagacctatgttt

SEQ ID NO: 332620 - DNA, 15 bp, Homo sapiens
ctgaagacctatgtt

SEQ ID NO: 332621 - DNA, 15 bp, Homo sapiens
actgaagacctatgt

SEQ ID NO: 332622 - DNA, 15 bp, Homo sapiens
aactgaagacctatg

SEQ ID NO: 332623 - DNA, 15 bp, Homo sapiens
gaactgaagacctat

SEQ ID NO: 332624 - DNA, 15 bp, Homo sapiens
agaactgaagaccta

SEQ ID NO: 332625 - DNA, 15 bp, Homo sapiens
tagaactgaagacct

SEQ ID NO: 332626 - DNA, 15 bp, Homo sapiens
gtagaactgaagacc

SEQ ID NO: 332627 - DNA, 15 bp, Homo sapiens
ggtagaactgaagac

SEQ ID NO: 332628 - DNA, 15 bp, Homo sapiens
aggtagaactgaaga

SEQ ID NO: 332629 - DNA, 15 bp, Homo sapiens
gaggtagaactgaag

SEQ ID NO: 332630 - DNA, 15 bp, Homo sapiens
ggaggtagaactgaa

SEQ ID NO: 332631 - DNA, 15 bp, Homo sapiens
tggaggtagaactga

SEQ ID NO: 332632 - DNA, 15 bp, Homo sapiens
gtggaggtagaactg

SEQ ID NO: 332633 - DNA, 15 bp, Homo sapiens
agtggaggtagaact

SEQ ID NO: 332634 - DNA, 15 bp, Homo sapiens
tagtggaggtagaac

SEQ ID NO: 332635 - DNA, 15 bp, Homo sapiens
ctagtggaggtagaa

SEQ ID NO: 332636 - DNA, 15 bp, Homo sapiens
tctagtggaggtaga

SEQ ID NO: 332637 - DNA, 15 bp, Homo sapiens
ctctagtggaggtag

SEQ ID NO: 332638 - DNA, 15 bp, Homo sapiens
cctctagtggaggta

SEQ ID NO: 332639 - DNA, 15 bp, Homo sapiens
tcctctagtggaggt

SEQ ID NO: 332640 - DNA, 15 bp, Homo sapiens
ttcctctagtggagg

SEQ ID NO: 332641 - DNA, 15 bp, Homo sapiens
cttcctctagtggag

SEQ ID NO: 332642 - DNA, 15 bp, Homo sapiens
acttcctctagtgga

SEQ ID NO: 332643 - DNA, 15 bp, Homo sapiens
gacttcctctagtgg

SEQ ID NO: 332644 - DNA, 15 bp, Homo sapiens
agacttcctctagtg

SEQ ID NO: 332645 - DNA, 15 bp, Homo sapiens
aagacttcctctagt

SEQ ID NO: 332646 - DNA, 15 bp, Homo sapiens
taagacttcctctag

SEQ ID NO: 332647 - DNA, 15 bp, Homo sapiens
ttaagacttcctcta

SEQ ID NO: 332648 - DNA, 15 bp, Homo sapiens
tttaagacttcctct

SEQ ID NO: 332649 - DNA, 15 bp, Homo sapiens
ttttaagacttcctc

SEQ ID NO: 332650 - DNA, 15 bp, Homo sapiens
tttttaagacttcct

SEQ ID NO: 332651 - DNA, 15 bp, Homo sapiens
gtttttaagacttcc

SEQ ID NO: 332652 - DNA, 15 bp, Homo sapiens
agtttttaagacttc

SEQ ID NO: 332653 - DNA, 15 bp, Homo sapiens
cagtttttaagactt

SEQ ID NO: 332654 - DNA, 15 bp, Homo sapiens
tcagtttttaagact

SEQ ID NO: 332655 - DNA, 15 bp, Homo sapiens
atcagtttttaagac

SEQ ID NO: 332656 - DNA, 15 bp, Homo sapiens
aatcagtttttaaga

SEQ ID NO: 332657 - DNA, 15 bp, Homo sapiens
caatcagtttttaag

SEQ ID NO: 332658 - DNA, 15 bp, Homo sapiens
gcaatcagtttttaa

SEQ ID NO: 332659 - DNA, 15 bp, Homo sapiens
agcaatcagttttta

SEQ ID NO: 332660 - DNA, 15 bp, Homo sapiens
gagcaatcagttttt

SEQ ID NO: 332661 - DNA, 15 bp, Homo sapiens
cgagcaatcagtttt

SEQ ID NO: 332662 - DNA, 15 bp, Homo sapiens
gcgagcaatcagttt

SEQ ID NO: 332663 - DNA, 15 bp, Homo sapiens
agcgagcaatcagtt

SEQ ID NO: 332664 - DNA, 15 bp, Homo sapiens
gagcgagcaatcagt

SEQ ID NO: 332665 - DNA, 15 bp, Homo sapiens
tgagcgagcaatcag

SEQ ID NO: 332666 - DNA, 15 bp, Homo sapiens
ctgagcgagcaatca

SEQ ID NO: 332667 - DNA, 15 bp, Homo sapiens
tctgagcgagcaatc

SEQ ID NO: 332668 - DNA, 15 bp, Homo sapiens
gtctgagcgagcaat

SEQ ID NO: 332669 - DNA, 15 bp, Homo sapiens
ggtctgagcgagcaa

SEQ ID NO: 332670 - DNA, 15 bp, Homo sapiens
gggtctgagcgagca

SEQ ID NO: 332671 - DNA, 15 bp, Homo sapiens
ggggtctgagcgagc

SEQ ID NO: 332672 - DNA, 15 bp, Homo sapiens
tggggtctgagcgag

SEQ ID NO: 332673 - DNA, 15 bp, Homo sapiens
ttggggtctgagcga

SEQ ID NO: 332674 - DNA, 15 bp, Homo sapiens
gttggggtctgagcg

SEQ ID NO: 332675 - DNA, 15 bp, Homo sapiens
ggttggggtctgagc

SEQ ID NO: 332676 - DNA, 15 bp, Homo sapiens
aggttggggtctgag

SEQ ID NO: 332677 - DNA, 15 bp, Homo sapiens
caggttggggtctga

SEQ ID NO: 332678 - DNA, 15 bp, Homo sapiens
gcaggttggggtctg

SEQ ID NO: 332679 - DNA, 15 bp, Homo sapiens
ggcaggttggggtct

SEQ ID NO: 332680 - DNA, 15 bp, Homo sapiens
aggcaggttggggtc

SEQ ID NO: 332681 - DNA, 15 bp, Homo sapiens
caggcaggttggggt

SEQ ID NO: 332682 - DNA, 15 bp, Homo sapiens
tcaggcaggttgggg

SEQ ID NO: 332683 - DNA, 15 bp, Homo sapiens
ctcaggcaggttggg

SEQ ID NO: 332684 - DNA, 15 bp, Homo sapiens
gctcaggcaggttgg

SEQ ID NO: 332685 - DNA, 15 bp, Homo sapiens
tgctcaggcaggttg

SEQ ID NO: 332686 - DNA, 15 bp, Homo sapiens
ctgctcaggcaggtt

SEQ ID NO: 332687 - DNA, 15 bp, Homo sapiens
actgctcaggcaggt

SEQ ID NO: 332688 - DNA, 15 bp, Homo sapiens
cactgctcaggcagg

SEQ ID NO: 332689 - DNA, 15 bp, Homo sapiens
gcactgctcaggcag

SEQ ID NO: 332690 - DNA, 15 bp, Homo sapiens
agcactgctcaggca

SEQ ID NO: 332691 - DNA, 15 bp, Homo sapiens
aagcactgctcaggc

SEQ ID NO: 332692 - DNA, 15 bp, Homo sapiens
caagcactgctcagg

SEQ ID NO: 332693 - DNA, 15 bp, Homo sapiens
gcaagcactgctcag

SEQ ID NO: 332694 - DNA, 15 bp, Homo sapiens
agcaagcactgctca

SEQ ID NO: 332695 - DNA, 15 bp, Homo sapiens
aagcaagcactgctc

SEQ ID NO: 332696 - DNA, 15 bp, Homo sapiens
caagcaagcactgct

SEQ ID NO: 332697 - DNA, 15 bp, Homo sapiens
tcaagcaagcactgc

SEQ ID NO: 332698 - DNA, 15 bp, Homo sapiens
gtcaagcaagcactg

SEQ ID NO: 332699 - DNA, 15 bp, Homo sapiens
agtcaagcaagcact

SEQ ID NO: 332700 - DNA, 15 bp, Homo sapiens
aagtcaagcaagcac

SEQ ID NO: 332701 - DNA, 15 bp, Homo sapiens
taagtcaagcaagca

SEQ ID NO: 332702 - DNA, 15 bp, Homo sapiens
ataagtcaagcaagc

SEQ ID NO: 332703 - DNA, 15 bp, Homo sapiens
gataagtcaagcaag

SEQ ID NO: 332704 - DNA, 15 bp, Homo sapiens
cgataagtcaagcaa

SEQ ID NO: 332705 - DNA, 15 bp, Homo sapiens
ccgataagtcaagca

SEQ ID NO: 332706 - DNA, 15 bp, Homo sapiens
cccgataagtcaagc

SEQ ID NO: 332707 - DNA, 15 bp, Homo sapiens
tcccgataagtcaag

SEQ ID NO: 332708 - DNA, 15 bp, Homo sapiens
ctcccgataagtcaa

SEQ ID NO: 332709 - DNA, 15 bp, Homo sapiens
tctcccgataagtca

SEQ ID NO: 332710 - DNA, 15 bp, Homo sapiens
atctcccgataagtc

SEQ ID NO: 332711 - DNA, 15 bp, Homo sapiens
catctcccgataagt

SEQ ID NO: 332712 - DNA, 15 bp, Homo sapiens
ccatctcccgataag

SEQ ID NO: 332713 - DNA, 15 bp, Homo sapiens
gccatctcccgataa

SEQ ID NO: 332714 - DNA, 15 bp, Homo sapiens
tgccatctcccgata

SEQ ID NO: 332715 - DNA, 15 bp, Homo sapiens
atgccatctcccgat

SEQ ID NO: 332716 - DNA, 15 bp, Homo sapiens
gatgccatctcccga

SEQ ID NO: 332717 - DNA, 15 bp, Homo sapiens
ggatgccatctcccg

SEQ ID NO: 332718 - DNA, 15 bp, Homo sapiens
aggatgccatctccc

SEQ ID NO: 332719 - DNA, 15 bp, Homo sapiens
caggatgccatctcc

SEQ ID NO: 332720 - DNA, 15 bp, Homo sapiens
gcaggatgccatctc

SEQ ID NO: 332721 - DNA, 15 bp, Homo sapiens
cgcaggatgccatct

SEQ ID NO: 332722 - DNA, 15 bp, Homo sapiens
acgcaggatgccatc

SEQ ID NO: 332723 - DNA, 15 bp, Homo sapiens
tacgcaggatgccat

SEQ ID NO: 332724 - DNA, 15 bp, Homo sapiens
atacgcaggatgcca

SEQ ID NO: 332725 - DNA, 15 bp, Homo sapiens
gatacgcaggatgcc

SEQ ID NO: 332726 - DNA, 15 bp, Homo sapiens
agatacgcaggatgc

SEQ ID NO: 332727 - DNA, 15 bp, Homo sapiens
aagatacgcaggatg

SEQ ID NO: 332728 - DNA, 15 bp, Homo sapiens
gaagatacgcaggat

SEQ ID NO: 332729 - DNA, 15 bp, Homo sapiens
ggaagatacgcagga

SEQ ID NO: 332730 - DNA, 15 bp, Homo sapiens
gggaagatacgcagg

SEQ ID NO: 332731 - DNA, 15 bp, Homo sapiens
agggaagatacgcag

SEQ ID NO: 332732 - DNA, 15 bp, Homo sapiens
cagggaagatacgca

SEQ ID NO: 332733 - DNA, 15 bp, Homo sapiens
gcagggaagatacgc

SEQ ID NO: 332734 - DNA, 15 bp, Homo sapiens
agcagggaagatacg

SEQ ID NO: 332735 - DNA, 15 bp, Homo sapiens
aagcagggaagatac

SEQ ID NO: 332736 - DNA, 15 bp, Homo sapiens
gaagcagggaagata

SEQ ID NO: 332737 - DNA, 15 bp, Homo sapiens
ggaagcagggaagat

SEQ ID NO: 332738 - DNA, 15 bp, Homo sapiens
aggaagcagggaaga

SEQ ID NO: 332739 - DNA, 15 bp, Homo sapiens
caggaagcagggaag

SEQ ID NO: 332740 - DNA, 15 bp, Homo sapiens
tcaggaagcagggaa

SEQ ID NO: 332741 - DNA, 15 bp, Homo sapiens
atcaggaagcaggga

SEQ ID NO: 332742 - DNA, 15 bp, Homo sapiens
aatcaggaagcaggg

SEQ ID NO: 332743 - DNA, 15 bp, Homo sapiens
taatcaggaagcagg

SEQ ID NO: 332744 - DNA, 15 bp, Homo sapiens
ataatcaggaagcag

SEQ ID NO: 332745 - DNA, 15 bp, Homo sapiens
aataatcaggaagca

SEQ ID NO: 332746 - DNA, 15 bp, Homo sapiens
caataatcaggaagc

SEQ ID NO: 332747 - DNA, 15 bp, Homo sapiens
ccaataatcaggaag

SEQ ID NO: 332748 - DNA, 15 bp, Homo sapiens
cccaataatcaggaa

SEQ ID NO: 332749 - DNA, 15 bp, Homo sapiens
acccaataatcagga

SEQ ID NO: 332750 - DNA, 15 bp, Homo sapiens
aacccaataatcagg

SEQ ID NO: 332751 - DNA, 15 bp, Homo sapiens
taacccaataatcag

SEQ ID NO: 332752 - DNA, 15 bp, Homo sapiens
ataacccaataatca

SEQ ID NO: 332753 - DNA, 15 bp, Homo sapiens
aataacccaataatc

SEQ ID NO: 332754 - DNA, 15 bp, Homo sapiens
aaataacccaataat

SEQ ID NO: 332755 - DNA, 15 bp, Homo sapiens
aaaataacccaataa

SEQ ID NO: 332756 - DNA, 15 bp, Homo sapiens
aaaaataacccaata

SEQ ID NO: 332757 - DNA, 15 bp, Homo sapiens
taaaaataacccaat

SEQ ID NO: 332758 - DNA, 15 bp, Homo sapiens
ttaaaaataacccaa

SEQ ID NO: 332759 - DNA, 15 bp, Homo sapiens
tttaaaaataaccca

SEQ ID NO: 332760 - DNA, 15 bp, Homo sapiens
gtttaaaaataaccc

SEQ ID NO: 332761 - DNA, 15 bp, Homo sapiens
agtttaaaaataacc

SEQ ID NO: 332762 - DNA, 15 bp, Homo sapiens
gagtttaaaaataac

SEQ ID NO: 332763 - DNA, 15 bp, Homo sapiens
agagtttaaaaataa

SEQ ID NO: 332764 - DNA, 15 bp, Homo sapiens
cagagtttaaaaata

SEQ ID NO: 332765 - DNA, 15 bp, Homo sapiens
acagagtttaaaaat

SEQ ID NO: 332766 - DNA, 15 bp, Homo sapiens
cacagagtttaaaaa

SEQ ID NO: 332767 - DNA, 15 bp, Homo sapiens
acacagagtttaaaa

SEQ ID NO: 332768 - DNA, 15 bp, Homo sapiens
gacacagagtttaaa

SEQ ID NO: 332769 - DNA, 15 bp, Homo sapiens
agacacagagtttaa

SEQ ID NO: 332770 - DNA, 15 bp, Homo sapiens
aagacacagagttta

SEQ ID NO: 332771 - DNA, 15 bp, Homo sapiens
aaagacacagagttt

SEQ ID NO: 332772 - DNA, 15 bp, Homo sapiens
gaaagacacagagtt

SEQ ID NO: 332773 - DNA, 15 bp, Homo sapiens
ggaaagacacagagt

SEQ ID NO: 332774 - DNA, 15 bp, Homo sapiens
aggaaagacacagag

SEQ ID NO: 332775 - DNA, 15 bp, Homo sapiens
aaggaaagacacaga

SEQ ID NO: 332776 - DNA, 15 bp, Homo sapiens
taaggaaagacacag

SEQ ID NO: 332777 - DNA, 15 bp, Homo sapiens
ataaggaaagacaca

SEQ ID NO: 332778 - DNA, 15 bp, Homo sapiens
tataaggaaagacac

SEQ ID NO: 332779 - DNA, 15 bp, Homo sapiens
atataaggaaagaca

SEQ ID NO: 332780 - DNA, 15 bp, Homo sapiens
gatataaggaaagac

SEQ ID NO: 332781 - DNA, 15 bp, Homo sapiens
tgatataaggaaaga

SEQ ID NO: 332782 - DNA, 15 bp, Homo sapiens
ctgatataaggaaag

SEQ ID NO: 332783 - DNA, 15 bp, Homo sapiens
tctgatataaggaaa

SEQ ID NO: 332784 - DNA, 15 bp, Homo sapiens
ttctgatataaggaa

SEQ ID NO: 332785 - DNA, 15 bp, Homo sapiens
attctgatataagga

SEQ ID NO: 332786 - DNA, 15 bp, Homo sapiens
aattctgatataagg

SEQ ID NO: 332787 - DNA, 15 bp, Homo sapiens
aaattctgatataag

SEQ ID NO: 332788 - DNA, 15 bp, Homo sapiens
caaattctgatataa

SEQ ID NO: 332789 - DNA, 15 bp, Homo sapiens
ccaaattctgatata

SEQ ID NO: 332790 - DNA, 15 bp, Homo sapiens
tccaaattctgatat

SEQ ID NO: 332791 - DNA, 15 bp, Homo sapiens
gtccaaattctgata

SEQ ID NO: 332792 - DNA, 15 bp, Homo sapiens
agtccaaattctgat

SEQ ID NO: 332793 - DNA, 15 bp, Homo sapiens
gagtccaaattctga

SEQ ID NO: 332794 - DNA, 15 bp, Homo sapiens
agagtccaaattctg

SEQ ID NO: 332795 - DNA, 15 bp, Homo sapiens
gagagtccaaattct

SEQ ID NO: 332796 - DNA, 15 bp, Homo sapiens
ggagagtccaaattc

SEQ ID NO: 332797 - DNA, 15 bp, Homo sapiens
aggagagtccaaatt

SEQ ID NO: 332798 - DNA, 15 bp, Homo sapiens
aaggagagtccaaat

SEQ ID NO: 332799 - DNA, 15 bp, Homo sapiens
gaaggagagtccaaa

SEQ ID NO: 332800 - DNA, 15 bp, Homo sapiens
agaaggagagtccaa

SEQ ID NO: 332801 - DNA, 15 bp, Homo sapiens
gagaaggagagtcca

SEQ ID NO: 332802 - DNA, 15 bp, Homo sapiens
tgagaaggagagtcc

SEQ ID NO: 332803 - DNA, 15 bp, Homo sapiens
gtgagaaggagagtc

SEQ ID NO: 332804 - DNA, 15 bp, Homo sapiens
agtgagaaggagagt

SEQ ID NO: 332805 - DNA, 15 bp, Homo sapiens
gagtgagaaggagag

SEQ ID NO: 332806 - DNA, 15 bp, Homo sapiens
tgagtgagaaggaga

SEQ ID NO: 332807 - DNA, 15 bp, Homo sapiens
ctgagtgagaaggag

SEQ ID NO: 332808 - DNA, 15 bp, Homo sapiens
tctgagtgagaagga

SEQ ID NO: 332809 - DNA, 15 bp, Homo sapiens
ttctgagtgagaagg

SEQ ID NO: 332810 - DNA, 15 bp, Homo sapiens
gttctgagtgagaag

SEQ ID NO: 332811 - DNA, 15 bp, Homo sapiens
ggttctgagtgagaa

SEQ ID NO: 332812 - DNA, 15 bp, Homo sapiens
aggttctgagtgaga

SEQ ID NO: 332813 - DNA, 15 bp, Homo sapiens
aaggttctgagtgag

SEQ ID NO: 332814 - DNA, 15 bp, Homo sapiens
aaaggttctgagtga

SEQ ID NO: 332815 - DNA, 15 bp, Homo sapiens
caaaggttctgagtg

SEQ ID NO: 332816 - DNA, 15 bp, Homo sapiens
acaaaggttctgagt

SEQ ID NO: 332817 - DNA, 15 bp, Homo sapiens
aacaaaggttctgag

SEQ ID NO: 332818 - DNA, 15 bp, Homo sapiens
gaacaaaggttctga

SEQ ID NO: 332819 - DNA, 15 bp, Homo sapiens
ggaacaaaggttctg

SEQ ID NO: 332820 - DNA, 15 bp, Homo sapiens
aggaacaaaggttct

SEQ ID NO: 332821 - DNA, 15 bp, Homo sapiens
aaggaacaaaggttc

SEQ ID NO: 332822 - DNA, 15 bp, Homo sapiens
gaaggaacaaaggtt

SEQ ID NO: 332823 - DNA, 15 bp, Homo sapiens
ggaaggaacaaaggt

SEQ ID NO: 332824 - DNA, 15 bp, Homo sapiens
aggaaggaacaaagg

SEQ ID NO: 332825 - DNA, 15 bp, Homo sapiens
caggaaggaacaaag

SEQ ID NO: 332826 - DNA, 15 bp, Homo sapiens
tcaggaaggaacaaa

SEQ ID NO: 332827 - DNA, 15 bp, Homo sapiens
ctcaggaaggaacaa

SEQ ID NO: 332828 - DNA, 15 bp, Homo sapiens
tctcaggaaggaaca

SEQ ID NO: 332829 - DNA, 15 bp, Homo sapiens
ctctcaggaaggaac

SEQ ID NO: 332830 - DNA, 15 bp, Homo sapiens
gctctcaggaaggaa

SEQ ID NO: 332831 - DNA, 15 bp, Homo sapiens
cgctctcaggaagga

SEQ ID NO: 332832 - DNA, 15 bp, Homo sapiens
gcgctctcaggaagg

SEQ ID NO: 332833 - DNA, 15 bp, Homo sapiens
tgcgctctcaggaag

SEQ ID NO: 332834 - DNA, 15 bp, Homo sapiens
gtgcgctctcaggaa

SEQ ID NO: 332835 - DNA, 15 bp, Homo sapiens
tgtgcgctctcagga

SEQ ID NO: 332836 - DNA, 15 bp, Homo sapiens
gtgtgcgctctcagg

SEQ ID NO: 332837 - DNA, 15 bp, Homo sapiens
agtgtgcgctctcag

SEQ ID NO: 332838 - DNA, 15 bp, Homo sapiens
tagtgtgcgctctca

SEQ ID NO: 332839 - DNA, 15 bp, Homo sapiens
atagtgtgcgctctc

SEQ ID NO: 332840 - DNA, 15 bp, Homo sapiens
aatagtgtgcgctct

SEQ ID NO: 332841 - DNA, 15 bp, Homo sapiens
gaatagtgtgcgctc

SEQ ID NO: 332842 - DNA, 15 bp, Homo sapiens
ggaatagtgtgcgct

SEQ ID NO: 332843 - DNA, 15 bp, Homo sapiens
gggaatagtgtgcgc

SEQ ID NO: 332844 - DNA, 15 bp, Homo sapiens
agggaatagtgtgcg

SEQ ID NO: 332845 - DNA, 15 bp, Homo sapiens
gagggaatagtgtgc

SEQ ID NO: 332846 - DNA, 15 bp, Homo sapiens
ggagggaatagtgtg

SEQ ID NO: 332847 - DNA, 15 bp, Homo sapiens
aggagggaatagtgt

SEQ ID NO: 332848 - DNA, 15 bp, Homo sapiens
caggagggaatagtg

SEQ ID NO: 332849 - DNA, 15 bp, Homo sapiens
gcaggagggaatagt

SEQ ID NO: 332850 - DNA, 15 bp, Homo sapiens
ggcaggagggaatag

SEQ ID NO: 332851 - DNA, 15 bp, Homo sapiens
aggcaggagggaata

SEQ ID NO: 332852 - DNA, 15 bp, Homo sapiens
caggcaggagggaat

SEQ ID NO: 332853 - DNA, 15 bp, Homo sapiens
ccaggcaggagggaa

SEQ ID NO: 332854 - DNA, 15 bp, Homo sapiens
gccaggcaggaggga

SEQ ID NO: 332855 - DNA, 15 bp, Homo sapiens
agccaggcaggaggg

SEQ ID NO: 332856 - DNA, 15 bp, Homo sapiens
cagccaggcaggagg

SEQ ID NO: 332857 - DNA, 15 bp, Homo sapiens
acagccaggcaggag

SEQ ID NO: 332858 - DNA, 15 bp, Homo sapiens
gacagccaggcagga

SEQ ID NO: 332859 - DNA, 15 bp, Homo sapiens
agacagccaggcagg

SEQ ID NO: 332860 - DNA, 15 bp, Homo sapiens
aagacagccaggcag

SEQ ID NO: 332861 - DNA, 15 bp, Homo sapiens
caagacagccaggca

SEQ ID NO: 332862 - DNA, 15 bp, Homo sapiens
acaagacagccaggc

SEQ ID NO: 332863 - DNA, 15 bp, Homo sapiens
tacaagacagccagg

SEQ ID NO: 332864 - DNA, 15 bp, Homo sapiens
atacaagacagccag

SEQ ID NO: 332865 - DNA, 15 bp, Homo sapiens
gatacaagacagcca

SEQ ID NO: 332866 - DNA, 15 bp, Homo sapiens
tgatacaagacagcc

SEQ ID NO: 332867 - DNA, 15 bp, Homo sapiens
ttgatacaagacagc

SEQ ID NO: 332868 - DNA, 15 bp, Homo sapiens
gttgatacaagacag

SEQ ID NO: 332869 - DNA, 15 bp, Homo sapiens
cgttgatacaagaca

SEQ ID NO: 332870 - DNA, 15 bp, Homo sapiens
acgttgatacaagac

SEQ ID NO: 332871 - DNA, 15 bp, Homo sapiens
cacgttgatacaaga

SEQ ID NO: 332872 - DNA, 15 bp, Homo sapiens
ccacgttgatacaag

SEQ ID NO: 332873 - DNA, 15 bp, Homo sapiens
tccacgttgatacaa

SEQ ID NO: 332874 - DNA, 15 bp, Homo sapiens
ttccacgttgataca

SEQ ID NO: 332875 - DNA, 15 bp, Homo sapiens
attccacgttgatac

SEQ ID NO: 332876 - DNA, 15 bp, Homo sapiens
aattccacgttgata

SEQ ID NO: 332877 - DNA, 15 bp, Homo sapiens
gaattccacgttgat

SEQ ID NO: 332878 - DNA, 15 bp, Homo sapiens
ggaattccacgttga

SEQ ID NO: 332879 - DNA, 15 bp, Homo sapiens
tggaattccacgttg

SEQ ID NO: 332880 - DNA, 15 bp, Homo sapiens
gtggaattccacgtt

SEQ ID NO: 332881 - DNA, 15 bp, Homo sapiens
agtggaattccacgt

SEQ ID NO: 332882 - DNA, 15 bp, Homo sapiens
gagtggaattccacg

SEQ ID NO: 332883 - DNA, 15 bp, Homo sapiens
ggagtggaattccac

SEQ ID NO: 332884 - DNA, 15 bp, Homo sapiens
tggagtggaattcca

SEQ ID NO: 332885 - DNA, 15 bp, Homo sapiens
atggagtggaattcc

SEQ ID NO: 332886 - DNA, 15 bp, Homo sapiens
aatggagtggaattc

SEQ ID NO: 332887 - DNA, 15 bp, Homo sapiens
aaatggagtggaatt

SEQ ID NO: 332888 - DNA, 15 bp, Homo sapiens
gaaatggagtggaat

SEQ ID NO: 332889 - DNA, 15 bp, Homo sapiens
ggaaatggagtggaa

SEQ ID NO: 332890 - DNA, 15 bp, Homo sapiens
aggaaatggagtgga

SEQ ID NO: 332891 - DNA, 15 bp, Homo sapiens
gaggaaatggagtgg

SEQ ID NO: 332892 - DNA, 15 bp, Homo sapiens
ggaggaaatggagtg

SEQ ID NO: 332893 - DNA, 15 bp, Homo sapiens
tggaggaaatggagt

SEQ ID NO: 332894 - DNA, 15 bp, Homo sapiens
gtggaggaaatggag

SEQ ID NO: 332895 - DNA, 15 bp, Homo sapiens
ggtggaggaaatgga

SEQ ID NO: 332896 - DNA, 15 bp, Homo sapiens
tggtggaggaaatgg

SEQ ID NO: 332897 - DNA, 15 bp, Homo sapiens
gtggtggaggaaatg

SEQ ID NO: 332898 - DNA, 15 bp, Homo sapiens
tgtggtggaggaaat

SEQ ID NO: 332899 - DNA, 15 bp, Homo sapiens
gtgtggtggaggaaa

SEQ ID NO: 332900 - DNA, 15 bp, Homo sapiens
agtgtggtggaggaa

SEQ ID NO: 332901 - DNA, 15 bp, Homo sapiens
gagtgtggtggagga

SEQ ID NO: 332902 - DNA, 15 bp, Homo sapiens
tgagtgtggtggagg

SEQ ID NO: 332903 - DNA, 15 bp, Homo sapiens
atgagtgtggtggag

SEQ ID NO: 332904 - DNA, 15 bp, Homo sapiens
catgagtgtggtgga

SEQ ID NO: 332905 - DNA, 15 bp, Homo sapiens
acatgagtgtggtgg

SEQ ID NO: 332906 - DNA, 15 bp, Homo sapiens
gacatgagtgtggtg

SEQ ID NO: 332907 - DNA, 15 bp, Homo sapiens
agacatgagtgtggt

SEQ ID NO: 332908 - DNA, 15 bp, Homo sapiens
aagacatgagtgtgg

SEQ ID NO: 332909 - DNA, 15 bp, Homo sapiens
caagacatgagtgtg

SEQ ID NO: 332910 - DNA, 15 bp, Homo sapiens
acaagacatgagtgt

SEQ ID NO: 332911 - DNA, 15 bp, Homo sapiens
gacaagacatgagtg

SEQ ID NO: 332912 - DNA, 15 bp, Homo sapiens
ggacaagacatgagt

SEQ ID NO: 332913 - DNA, 15 bp, Homo sapiens
tggacaagacatgag

SEQ ID NO: 332914 - DNA, 15 bp, Homo sapiens
gtggacaagacatga

SEQ ID NO: 332915 - DNA, 15 bp, Homo sapiens
ggtggacaagacatg

SEQ ID NO: 332916 - DNA, 15 bp, Homo sapiens
tggtggacaagacat

SEQ ID NO: 332917 - DNA, 15 bp, Homo sapiens
ctggtggacaagaca

SEQ ID NO: 332918 - DNA, 15 bp, Homo sapiens
cctggtggacaagac

SEQ ID NO: 332919 - DNA, 15 bp, Homo sapiens
ccctggtggacaaga

SEQ ID NO: 332920 - DNA, 15 bp, Homo sapiens
accctggtggacaag

SEQ ID NO: 332921 - DNA, 15 bp, Homo sapiens
aaccctggtggacaa

SEQ ID NO: 332922 - DNA, 15 bp, Homo sapiens
gaaccctggtggaca

SEQ ID NO: 332923 - DNA, 15 bp, Homo sapiens
agaaccctggtggac

SEQ ID NO: 332924 - DNA, 15 bp, Homo sapiens
tagaaccctggtgga

SEQ ID NO: 332925 - DNA, 15 bp, Homo sapiens
ctagaaccctggtgg

SEQ ID NO: 332926 - DNA, 15 bp, Homo sapiens
tctagaaccctggtg

SEQ ID NO: 332927 - DNA, 15 bp, Homo sapiens
gtctagaaccctggt

SEQ ID NO: 332928 - DNA, 15 bp, Homo sapiens
agtctagaaccctgg

SEQ ID NO: 332929 - DNA, 15 bp, Homo sapiens
cagtctagaaccctg

SEQ ID NO: 332930 - DNA, 15 bp, Homo sapiens
tcagtctagaaccct

SEQ ID NO: 332931 - DNA, 15 bp, Homo sapiens
atcagtctagaaccc

SEQ ID NO: 332932 - DNA, 15 bp, Homo sapiens
aatcagtctagaacc

SEQ ID NO: 332933 - DNA, 15 bp, Homo sapiens
aaatcagtctagaac

SEQ ID NO: 332934 - DNA, 15 bp, Homo sapiens
gaaatcagtctagaa

SEQ ID NO: 332935 - DNA, 15 bp, Homo sapiens
agaaatcagtctaga

SEQ ID NO: 332936 - DNA, 15 bp, Homo sapiens
tagaaatcagtctag

SEQ ID NO: 332937 - DNA, 15 bp, Homo sapiens
ttagaaatcagtcta

SEQ ID NO: 332938 - DNA, 15 bp, Homo sapiens
tttagaaatcagtct

SEQ ID NO: 332939 - DNA, 15 bp, Homo sapiens
ctttagaaatcagtc

SEQ ID NO: 332940 - DNA, 15 bp, Homo sapiens
cctttagaaatcagt

SEQ ID NO: 332941 - DNA, 15 bp, Homo sapiens
tcctttagaaatcag

SEQ ID NO: 332942 - DNA, 15 bp, Homo sapiens
atcctttagaaatca

SEQ ID NO: 332943 - DNA, 15 bp, Homo sapiens
aatcctttagaaatc

SEQ ID NO: 332944 - DNA, 15 bp, Homo sapiens
aaatcctttagaaat

SEQ ID NO: 332945 - DNA, 15 bp, Homo sapiens
caaatcctttagaaa

SEQ ID NO: 332946 - DNA, 15 bp, Homo sapiens
ccaaatcctttagaa

SEQ ID NO: 332947 - DNA, 15 bp, Homo sapiens
tccaaatcctttaga

SEQ ID NO: 332948 - DNA, 15 bp, Homo sapiens
ttccaaatcctttag

SEQ ID NO: 332949 - DNA, 15 bp, Homo sapiens
attccaaatccttta

SEQ ID NO: 332950 - DNA, 15 bp, Homo sapiens
aattccaaatccttt

SEQ ID NO: 332951 - DNA, 15 bp, Homo sapiens
aaattccaaatcctt

SEQ ID NO: 332952 - DNA, 15 bp, Homo sapiens
aaaattccaaatcct

SEQ ID NO: 332953 - DNA, 15 bp, Homo sapiens
taaaattccaaatcc

SEQ ID NO: 332954 - DNA, 15 bp, Homo sapiens
ttaaaattccaaatc

SEQ ID NO: 332955 - DNA, 15 bp, Homo sapiens
tttaaaattccaaat

SEQ ID NO: 332956 - DNA, 15 bp, Homo sapiens
atttaaaattccaaa

SEQ ID NO: 332957 - DNA, 15 bp, Homo sapiens
aatttaaaattccaa

SEQ ID NO: 332958 - DNA, 15 bp, Homo sapiens
caatttaaaattcca

SEQ ID NO: 332959 - DNA, 15 bp, Homo sapiens
acaatttaaaattcc

SEQ ID NO: 332960 - DNA, 15 bp, Homo sapiens
gacaatttaaaattc

SEQ ID NO: 332961 - DNA, 15 bp, Homo sapiens
agacaatttaaaatt

SEQ ID NO: 332962 - DNA, 15 bp, Homo sapiens
tagacaatttaaaat

SEQ ID NO: 332963 - DNA, 15 bp, Homo sapiens
ctagacaatttaaaa

SEQ ID NO: 332964 - DNA, 15 bp, Homo sapiens
actagacaatttaaa

SEQ ID NO: 332965 - DNA, 15 bp, Homo sapiens
cactagacaatttaa

SEQ ID NO: 332966 - DNA, 15 bp, Homo sapiens
acactagacaattta

SEQ ID NO: 332967 - DNA, 15 bp, Homo sapiens
cacactagacaattt

SEQ ID NO: 332968 - DNA, 15 bp, Homo sapiens
gcacactagacaatt

SEQ ID NO: 332969 - DNA, 15 bp, Homo sapiens
ggcacactagacaat

SEQ ID NO: 332970 - DNA, 15 bp, Homo sapiens
tggcacactagacaa

SEQ ID NO: 332971 - DNA, 15 bp, Homo sapiens
ctggcacactagaca

SEQ ID NO: 332972 - DNA, 15 bp, Homo sapiens
tctggcacactagac

SEQ ID NO: 332973 - DNA, 15 bp, Homo sapiens
ctctggcacactaga

SEQ ID NO: 332974 - DNA, 15 bp, Homo sapiens
gctctggcacactag

SEQ ID NO: 332975 - DNA, 15 bp, Homo sapiens
tgctctggcacacta

SEQ ID NO: 332976 - DNA, 15 bp, Homo sapiens
atgctctggcacact

SEQ ID NO: 332977 - DNA, 15 bp, Homo sapiens
catgctctggcacac

SEQ ID NO: 332978 - DNA, 15 bp, Homo sapiens
ccatgctctggcaca

SEQ ID NO: 332979 - DNA, 15 bp, Homo sapiens
tccatgctctggcac

SEQ ID NO: 332980 - DNA, 15 bp, Homo sapiens
atccatgctctggca

SEQ ID NO: 332981 - DNA, 15 bp, Homo sapiens
gatccatgctctggc

SEQ ID NO: 332982 - DNA, 15 bp, Homo sapiens
tgatccatgctctgg

SEQ ID NO: 332983 - DNA, 15 bp, Homo sapiens
atgatccatgctctg

SEQ ID NO: 332984 - DNA, 15 bp, Homo sapiens
aatgatccatgctct

SEQ ID NO: 332985 - DNA, 15 bp, Homo sapiens
aaatgatccatgctc

SEQ ID NO: 332986 - DNA, 15 bp, Homo sapiens
taaatgatccatgct

SEQ ID NO: 332987 - DNA, 15 bp, Homo sapiens
ataaatgatccatgc

SEQ ID NO: 332988 - DNA, 15 bp, Homo sapiens
aataaatgatccatg

SEQ ID NO: 332989 - DNA, 15 bp, Homo sapiens
aaataaatgatccat

SEQ ID NO: 332990 - DNA, 15 bp, Homo sapiens
taaataaatgatcca

SEQ ID NO: 332991 - DNA, 15 bp, Homo sapiens
gtaaataaatgatcc

SEQ ID NO: 332992 - DNA, 15 bp, Homo sapiens
tgtaaataaatgatc

SEQ ID NO: 332993 - DNA, 15 bp, Homo sapiens
ttgtaaataaatgat

SEQ ID NO: 332994 - DNA, 15 bp, Homo sapiens
tttgtaaataaatga

SEQ ID NO: 332995 - DNA, 15 bp, Homo sapiens
ctttgtaaataaatg

SEQ ID NO: 332996 - DNA, 15 bp, Homo sapiens
tctttgtaaataaat

SEQ ID NO: 332997 - DNA, 15 bp, Homo sapiens
gtctttgtaaataaa

SEQ ID NO: 332998 - DNA, 15 bp, Homo sapiens
agtctttgtaaataa

SEQ ID NO: 332999 - DNA, 15 bp, Homo sapiens
gagtctttgtaaata

SEQ ID NO: 333000 - DNA, 15 bp, Homo sapiens
tgagtctttgtaaat

SEQ ID NO: 333001 - DNA, 15 bp, Homo sapiens
atgagtctttgtaaa

SEQ ID NO: 333002 - DNA, 15 bp, Homo sapiens
aatgagtctttgtaa

SEQ ID NO: 333003 - DNA, 15 bp, Homo sapiens
aaatgagtctttgta

SEQ ID NO: 333004 - DNA, 15 bp, Homo sapiens
taaatgagtctttgt

SEQ ID NO: 333005 - DNA, 15 bp, Homo sapiens
ttaaatgagtctttg

SEQ ID NO: 333006 - DNA, 15 bp, Homo sapiens
attaaatgagtcttt

SEQ ID NO: 333007 - DNA, 15 bp, Homo sapiens
gattaaatgagtctt

SEQ ID NO: 333008 - DNA, 15 bp, Homo sapiens
agattaaatgagtct

SEQ ID NO: 333009 - DNA, 15 bp, Homo sapiens
tagattaaatgagtc

SEQ ID NO: 333010 - DNA, 15 bp, Homo sapiens
atagattaaatgagt

SEQ ID NO: 333011 - DNA, 15 bp, Homo sapiens
catagattaaatgag

SEQ ID NO: 333012 - DNA, 15 bp, Homo sapiens
ccatagattaaatga

SEQ ID NO: 333013 - DNA, 15 bp, Homo sapiens
gccatagattaaatg

SEQ ID NO: 333014 - DNA, 15 bp, Homo sapiens
ggccatagattaaat

SEQ ID NO: 333015 - DNA, 15 bp, Homo sapiens
gggccatagattaaa

SEQ ID NO: 333016 - DNA, 15 bp, Homo sapiens
ggggccatagattaa

SEQ ID NO: 333017 - DNA, 15 bp, Homo sapiens
tggggccatagatta

SEQ ID NO: 333018 - DNA, 15 bp, Homo sapiens
atggggccatagatt

SEQ ID NO: 333019 - DNA, 15 bp, Homo sapiens
tatggggccatagat

SEQ ID NO: 333020 - DNA, 15 bp, Homo sapiens
ctatggggccataga

SEQ ID NO: 333021 - DNA, 15 bp, Homo sapiens
gctatggggccatag

SEQ ID NO: 333022 - DNA, 15 bp, Homo sapiens
ggctatggggccata

SEQ ID NO: 333023 - DNA, 15 bp, Homo sapiens
aggctatggggccat

SEQ ID NO: 333024 - DNA, 15 bp, Homo sapiens
taggctatggggcca

SEQ ID NO: 333025 - DNA, 15 bp, Homo sapiens
gtaggctatggggcc

SEQ ID NO: 333026 - DNA, 15 bp, Homo sapiens
ggtaggctatggggc

SEQ ID NO: 333027 - DNA, 15 bp, Homo sapiens
gggtaggctatgggg

SEQ ID NO: 333028 - DNA, 15 bp, Homo sapiens
agggtaggctatggg

SEQ ID NO: 333029 - DNA, 15 bp, Homo sapiens
tagggtaggctatgg

SEQ ID NO: 333030 - DNA, 15 bp, Homo sapiens
gtagggtaggctatg

SEQ ID NO: 333031 - DNA, 15 bp, Homo sapiens
ggtagggtaggctat

SEQ ID NO: 333032 - DNA, 15 bp, Homo sapiens
aggtagggtaggcta

SEQ ID NO: 333033 - DNA, 15 bp, Homo sapiens
aaggtagggtaggct

SEQ ID NO: 333034 - DNA, 15 bp, Homo sapiens
taaggtagggtaggc

SEQ ID NO: 333035 - DNA, 15 bp, Homo sapiens
ttaaggtagggtagg

SEQ ID NO: 333036 - DNA, 15 bp, Homo sapiens
tttaaggtagggtag

SEQ ID NO: 333037 - DNA, 15 bp, Homo sapiens
ctttaaggtagggta

SEQ ID NO: 333038 - DNA, 15 bp, Homo sapiens
cctttaaggtagggt

SEQ ID NO: 333039 - DNA, 15 bp, Homo sapiens
tcctttaaggtaggg

SEQ ID NO: 333040 - DNA, 15 bp, Homo sapiens
ttcctttaaggtagg

SEQ ID NO: 333041 - DNA, 15 bp, Homo sapiens
attcctttaaggtag

SEQ ID NO: 333042 - DNA, 15 bp, Homo sapiens
aattcctttaaggta

SEQ ID NO: 333043 - DNA, 15 bp, Homo sapiens
taattcctttaaggt

SEQ ID NO: 333044 - DNA, 15 bp, Homo sapiens
ttaattcctttaagg

SEQ ID NO: 333045 - DNA, 15 bp, Homo sapiens
gttaattcctttaag

SEQ ID NO: 333046 - DNA, 15 bp, Homo sapiens
tgttaattcctttaa

SEQ ID NO: 333047 - DNA, 15 bp, Homo sapiens
gtgttaattccttta

SEQ ID NO: 333048 - DNA, 15 bp, Homo sapiens
cgtgttaattccttt

SEQ ID NO: 333049 - DNA, 15 bp, Homo sapiens
tcgtgttaattcctt

SEQ ID NO: 333050 - DNA, 15 bp, Homo sapiens
ctcgtgttaattcct

SEQ ID NO: 333051 - DNA, 15 bp, Homo sapiens
actcgtgttaattcc

SEQ ID NO: 333052 - DNA, 15 bp, Homo sapiens
gactcgtgttaattc

SEQ ID NO: 333053 - DNA, 15 bp, Homo sapiens
tgactcgtgttaatt

SEQ ID NO: 333054 - DNA, 15 bp, Homo sapiens
atgactcgtgttaat

SEQ ID NO: 333055 - DNA, 15 bp, Homo sapiens
catgactcgtgttaa

SEQ ID NO: 333056 - DNA, 15 bp, Homo sapiens
gcatgactcgtgtta

SEQ ID NO: 333057 - DNA, 15 bp, Homo sapiens
ggcatgactcgtgtt

SEQ ID NO: 333058 - DNA, 15 bp, Homo sapiens
aggcatgactcgtgt

SEQ ID NO: 333059 - DNA, 15 bp, Homo sapiens
aaggcatgactcgtg

SEQ ID NO: 333060 - DNA, 15 bp, Homo sapiens
gaaggcatgactcgt

SEQ ID NO: 333061 - DNA, 15 bp, Homo sapiens
tgaaggcatgactcg

SEQ ID NO: 333062 - DNA, 15 bp, Homo sapiens
atgaaggcatgactc

SEQ ID NO: 333063 - DNA, 15 bp, Homo sapiens
catgaaggcatgact

SEQ ID NO: 333064 - DNA, 15 bp, Homo sapiens
acatgaaggcatgac

SEQ ID NO: 333065 - DNA, 15 bp, Homo sapiens
gacatgaaggcatga

SEQ ID NO: 333066 - DNA, 15 bp, Homo sapiens
ggacatgaaggcatg

SEQ ID NO: 333067 - DNA, 15 bp, Homo sapiens
tggacatgaaggcat

SEQ ID NO: 333068 - DNA, 15 bp, Homo sapiens
atggacatgaaggca

SEQ ID NO: 333069 - DNA, 15 bp, Homo sapiens
gatggacatgaaggc

SEQ ID NO: 333070 - DNA, 15 bp, Homo sapiens
ggatggacatgaagg

SEQ ID NO: 333071 - DNA, 15 bp, Homo sapiens
tggatggacatgaag

SEQ ID NO: 333072 - DNA, 15 bp, Homo sapiens
atggatggacatgaa

SEQ ID NO: 333073 - DNA, 15 bp, Homo sapiens
aatggatggacatga

SEQ ID NO: 333074 - DNA, 15 bp, Homo sapiens
gaatggatggacatg

SEQ ID NO: 333075 - DNA, 15 bp, Homo sapiens
ggaatggatggacat

SEQ ID NO: 333076 - DNA, 15 bp, Homo sapiens
tggaatggatggaca

SEQ ID NO: 333077 - DNA, 15 bp, Homo sapiens
gtggaatggatggac

SEQ ID NO: 333078 - DNA, 15 bp, Homo sapiens
tgtggaatggatgga

SEQ ID NO: 333079 - DNA, 15 bp, Homo sapiens
atgtggaatggatgg

SEQ ID NO: 333080 - DNA, 15 bp, Homo sapiens
catgtggaatggatg

SEQ ID NO: 333081 - DNA, 15 bp, Homo sapiens
acatgtggaatggat

SEQ ID NO: 333082 - DNA, 15 bp, Homo sapiens
cacatgtggaatgga

SEQ ID NO: 333083 - DNA, 15 bp, Homo sapiens
acacatgtggaatgg

SEQ ID NO: 333084 - DNA, 15 bp, Homo sapiens
aacacatgtggaatg

SEQ ID NO: 333085 - DNA, 15 bp, Homo sapiens
aaacacatgtggaat

SEQ ID NO: 333086 - DNA, 15 bp, Homo sapiens
taaacacatgtggaa

SEQ ID NO: 333087 - DNA, 15 bp, Homo sapiens
gtaaacacatgtgga

SEQ ID NO: 333088 - DNA, 15 bp, Homo sapiens
agtaaacacatgtgg

SEQ ID NO: 333089 - DNA, 15 bp, Homo sapiens
cagtaaacacatgtg

SEQ ID NO: 333090 - DNA, 15 bp, Homo sapiens
tcagtaaacacatgt

SEQ ID NO: 333091 - DNA, 15 bp, Homo sapiens
ctcagtaaacacatg

SEQ ID NO: 333092 - DNA, 15 bp, Homo sapiens
cctcagtaaacacat

SEQ ID NO: 333093 - DNA, 15 bp, Homo sapiens
ccctcagtaaacaca

SEQ ID NO: 333094 - DNA, 15 bp, Homo sapiens
gccctcagtaaacac

SEQ ID NO: 333095 - DNA, 15 bp, Homo sapiens
agccctcagtaaaca

SEQ ID NO: 333096 - DNA, 15 bp, Homo sapiens
aagccctcagtaaac

SEQ ID NO: 333097 - DNA, 15 bp, Homo sapiens
caagccctcagtaaa

SEQ ID NO: 333098 - DNA, 15 bp, Homo sapiens
gcaagccctcagtaa

SEQ ID NO: 333099 - DNA, 15 bp, Homo sapiens
agcaagccctcagta

SEQ ID NO: 333100 - DNA, 15 bp, Homo sapiens
tagcaagccctcagt

SEQ ID NO: 333101 - DNA, 15 bp, Homo sapiens
gtagcaagccctcag

SEQ ID NO: 333102 - DNA, 15 bp, Homo sapiens
ggtagcaagccctca

SEQ ID NO: 333103 - DNA, 15 bp, Homo sapiens
tggtagcaagccctc

SEQ ID NO: 333104 - DNA, 15 bp, Homo sapiens
ctggtagcaagccct

SEQ ID NO: 333105 - DNA, 15 bp, Homo sapiens
cctggtagcaagccc

SEQ ID NO: 333106 - DNA, 15 bp, Homo sapiens
gcctggtagcaagcc

SEQ ID NO: 333107 - DNA, 15 bp, Homo sapiens
tgcctggtagcaagc

SEQ ID NO: 333108 - DNA, 15 bp, Homo sapiens
gtgcctggtagcaag

SEQ ID NO: 333109 - DNA, 15 bp, Homo sapiens
agtgcctggtagcaa

SEQ ID NO: 333110 - DNA, 15 bp, Homo sapiens
cagtgcctggtagca

SEQ ID NO: 333111 - DNA, 15 bp, Homo sapiens
ccagtgcctggtagc

SEQ ID NO: 333112 - DNA, 15 bp, Homo sapiens
cccagtgcctggtag

SEQ ID NO: 333113 - DNA, 15 bp, Homo sapiens
ccccagtgcctggta

SEQ ID NO: 333114 - DNA, 15 bp, Homo sapiens
tccccagtgcctggt

SEQ ID NO: 333115 - DNA, 15 bp, Homo sapiens
gtccccagtgcctgg

SEQ ID NO: 333116 - DNA, 15 bp, Homo sapiens
tgtccccagtgcctg

SEQ ID NO: 333117 - DNA, 15 bp, Homo sapiens
ctgtccccagtgcct

SEQ ID NO: 333118 - DNA, 15 bp, Homo sapiens
tctgtccccagtgcc

SEQ ID NO: 333119 - DNA, 15 bp, Homo sapiens
atctgtccccagtgc

SEQ ID NO: 333120 - DNA, 15 bp, Homo sapiens
catctgtccccagtg

SEQ ID NO: 333121 - DNA, 15 bp, Homo sapiens
gcatctgtccccagt

SEQ ID NO: 333122 - DNA, 15 bp, Homo sapiens
tgcatctgtccccag

SEQ ID NO: 333123 - DNA, 15 bp, Homo sapiens
atgcatctgtcccca

SEQ ID NO: 333124 - DNA, 15 bp, Homo sapiens
aatgcatctgtcccc

SEQ ID NO: 333125 - DNA, 15 bp, Homo sapiens
aaatgcatctgtccc

SEQ ID NO: 333126 - DNA, 15 bp, Homo sapiens
gaaatgcatctgtcc

SEQ ID NO: 333127 - DNA, 15 bp, Homo sapiens
agaaatgcatctgtc

SEQ ID NO: 333128 - DNA, 15 bp, Homo sapiens
tagaaatgcatctgt

SEQ ID NO: 333129 - DNA, 15 bp, Homo sapiens
gtagaaatgcatctg

SEQ ID NO: 333130 - DNA, 15 bp, Homo sapiens
tgtagaaatgcatct

SEQ ID NO: 333131 - DNA, 15 bp, Homo sapiens
gtgtagaaatgcatc

SEQ ID NO: 333132 - DNA, 15 bp, Homo sapiens
tgtgtagaaatgcat

SEQ ID NO: 333133 - DNA, 15 bp, Homo sapiens
atgtgtagaaatgca

SEQ ID NO: 333134 - DNA, 15 bp, Homo sapiens
gatgtgtagaaatgc

SEQ ID NO: 333135 - DNA, 15 bp, Homo sapiens
ggatgtgtagaaatg

SEQ ID NO: 333136 - DNA, 15 bp, Homo sapiens
tggatgtgtagaaat

SEQ ID NO: 333137 - DNA, 15 bp, Homo sapiens
atggatgtgtagaaa

SEQ ID NO: 333138 - DNA, 15 bp, Homo sapiens
tatggatgtgtagaa

SEQ ID NO: 333139 - DNA, 15 bp, Homo sapiens
ttatggatgtgtaga

SEQ ID NO: 333140 - DNA, 15 bp, Homo sapiens
tttatggatgtgtag

SEQ ID NO: 333141 - DNA, 15 bp, Homo sapiens
ttttatggatgtgta

SEQ ID NO: 333142 - DNA, 15 bp, Homo sapiens
tttttatggatgtgt

SEQ ID NO: 333143 - DNA, 15 bp, Homo sapiens
atttttatggatgtg

SEQ ID NO: 333144 - DNA, 15 bp, Homo sapiens
gatttttatggatgt

SEQ ID NO: 333145 - DNA, 15 bp, Homo sapiens
agatttttatggatg

SEQ ID NO: 333146 - DNA, 15 bp, Homo sapiens
gagatttttatggat

SEQ ID NO: 333147 - DNA, 15 bp, Homo sapiens
ggagatttttatgga

SEQ ID NO: 333148 - DNA, 15 bp, Homo sapiens
tggagatttttatgg

SEQ ID NO: 333149 - DNA, 15 bp, Homo sapiens
ttggagatttttatg

SEQ ID NO: 333150 - DNA, 15 bp, Homo sapiens
gttggagatttttat

SEQ ID NO: 333151 - DNA, 15 bp, Homo sapiens
agttggagattttta

SEQ ID NO: 333152 - DNA, 15 bp, Homo sapiens
tagttggagattttt

SEQ ID NO: 333153 - DNA, 15 bp, Homo sapiens
atagttggagatttt

SEQ ID NO: 333154 - DNA, 15 bp, Homo sapiens
tatagttggagattt

SEQ ID NO: 333155 - DNA, 15 bp, Homo sapiens
gtatagttggagatt

SEQ ID NO: 333156 - DNA, 15 bp, Homo sapiens
ggtatagttggagat

SEQ ID NO: 333157 - DNA, 15 bp, Homo sapiens
tggtatagttggaga

SEQ ID NO: 333158 - DNA, 15 bp, Homo sapiens
gtggtatagttggag

SEQ ID NO: 333159 - DNA, 15 bp, Homo sapiens
tgtggtatagttgga

SEQ ID NO: 333160 - DNA, 15 bp, Homo sapiens
ctgtggtatagttgg

SEQ ID NO: 333161 - DNA, 15 bp, Homo sapiens
gctgtggtatagttg

SEQ ID NO: 333162 - DNA, 15 bp, Homo sapiens
agctgtggtatagtt

SEQ ID NO: 333163 - DNA, 15 bp, Homo sapiens
aagctgtggtatagt

SEQ ID NO: 333164 - DNA, 15 bp, Homo sapiens
aaagctgtggtatag

SEQ ID NO: 333165 - DNA, 15 bp, Homo sapiens
aaaagctgtggtata

SEQ ID NO: 333166 - DNA, 15 bp, Homo sapiens
gaaaagctgtggtat

SEQ ID NO: 333167 - DNA, 15 bp, Homo sapiens
agaaaagctgtggta

SEQ ID NO: 333168 - DNA, 15 bp, Homo sapiens
cagaaaagctgtggt

SEQ ID NO: 333169 - DNA, 15 bp, Homo sapiens
tcagaaaagctgtgg

SEQ ID NO: 333170 - DNA, 15 bp, Homo sapiens
ctcagaaaagctgtg

SEQ ID NO: 333171 - DNA, 15 bp, Homo sapiens
gctcagaaaagctgt

SEQ ID NO: 333172 - DNA, 15 bp, Homo sapiens
agctcagaaaagctg

SEQ ID NO: 333173 - DNA, 15 bp, Homo sapiens
tagctcagaaaagct

SEQ ID NO: 333174 - DNA, 15 bp, Homo sapiens
gtagctcagaaaagc

SEQ ID NO: 333175 - DNA, 15 bp, Homo sapiens
tgtagctcagaaaag

SEQ ID NO: 333176 - DNA, 15 bp, Homo sapiens
gtgtagctcagaaaa

SEQ ID NO: 333177 - DNA, 15 bp, Homo sapiens
tgtgtagctcagaaa

SEQ ID NO: 333178 - DNA, 15 bp, Homo sapiens
atgtgtagctcagaa

SEQ ID NO: 333179 - DNA, 15 bp, Homo sapiens
gatgtgtagctcaga

SEQ ID NO: 333180 - DNA, 15 bp, Homo sapiens
cgatgtgtagctcag

SEQ ID NO: 333181 - DNA, 15 bp, Homo sapiens
acgatgtgtagctca

SEQ ID NO: 333182 - DNA, 15 bp, Homo sapiens
tacgatgtgtagctc

SEQ ID NO: 333183 - DNA, 15 bp, Homo sapiens
gtacgatgtgtagct

SEQ ID NO: 333184 - DNA, 15 bp, Homo sapiens
agtacgatgtgtagc

SEQ ID NO: 333185 - DNA, 15 bp, Homo sapiens
tagtacgatgtgtag

SEQ ID NO: 333186 - DNA, 15 bp, Homo sapiens
atagtacgatgtgta

SEQ ID NO: 333187 - DNA, 15 bp, Homo sapiens
aatagtacgatgtgt

SEQ ID NO: 333188 - DNA, 15 bp, Homo sapiens
aaatagtacgatgtg

SEQ ID NO: 333189 - DNA, 15 bp, Homo sapiens
caaatagtacgatgt

SEQ ID NO: 333190 - DNA, 15 bp, Homo sapiens
ccaaatagtacgatg

SEQ ID NO: 333191 - DNA, 15 bp, Homo sapiens
gccaaatagtacgat

SEQ ID NO: 333192 - DNA, 15 bp, Homo sapiens
ggccaaatagtacga

SEQ ID NO: 333193 - DNA, 15 bp, Homo sapiens
tggccaaatagtacg

SEQ ID NO: 333194 - DNA, 15 bp, Homo sapiens
gtggccaaatagtac

SEQ ID NO: 333195 - DNA, 15 bp, Homo sapiens
ggtggccaaatagta

SEQ ID NO: 333196 - DNA, 15 bp, Homo sapiens
aggtggccaaatagt

SEQ ID NO: 333197 - DNA, 15 bp, Homo sapiens
taggtggccaaatag

SEQ ID NO: 333198 - DNA, 15 bp, Homo sapiens
ttaggtggccaaata

SEQ ID NO: 333199 - DNA, 15 bp, Homo sapiens
cttaggtggccaaat

SEQ ID NO: 333200 - DNA, 15 bp, Homo sapiens
acttaggtggccaaa

SEQ ID NO: 333201 - DNA, 15 bp, Homo sapiens
cacttaggtggccaa

SEQ ID NO: 333202 - DNA, 15 bp, Homo sapiens
ccacttaggtggcca

SEQ ID NO: 333203 - DNA, 15 bp, Homo sapiens
accacttaggtggcc

SEQ ID NO: 333204 - DNA, 15 bp, Homo sapiens
aaccacttaggtggc

SEQ ID NO: 333205 - DNA, 15 bp, Homo sapiens
caaccacttaggtgg

SEQ ID NO: 333206 - DNA, 15 bp, Homo sapiens
ccaaccacttaggtg

SEQ ID NO: 333207 - DNA, 15 bp, Homo sapiens
cccaaccacttaggt

SEQ ID NO: 333208 - DNA, 15 bp, Homo sapiens
tcccaaccacttagg

SEQ ID NO: 333209 - DNA, 15 bp, Homo sapiens
ttcccaaccacttag

SEQ ID NO: 333210 - DNA, 15 bp, Homo sapiens
cttcccaaccactta

SEQ ID NO: 333211 - DNA, 15 bp, Homo sapiens
acttcccaaccactt

SEQ ID NO: 333212 - DNA, 15 bp, Homo sapiens
gacttcccaaccact

SEQ ID NO: 333213 - DNA, 15 bp, Homo sapiens
ggacttcccaaccac

SEQ ID NO: 333214 - DNA, 15 bp, Homo sapiens
tggacttcccaacca

SEQ ID NO: 333215 - DNA, 15 bp, Homo sapiens
ttggacttcccaacc

SEQ ID NO: 333216 - DNA, 15 bp, Homo sapiens
attggacttcccaac

SEQ ID NO: 333217 - DNA, 15 bp, Homo sapiens
tattggacttcccaa

SEQ ID NO: 333218 - DNA, 15 bp, Homo sapiens
atattggacttccca

SEQ ID NO: 333219 - DNA, 15 bp, Homo sapiens
gatattggacttccc

SEQ ID NO: 333220 - DNA, 15 bp, Homo sapiens
tgatattggacttcc

SEQ ID NO: 333221 - DNA, 15 bp, Homo sapiens
ctgatattggacttc

SEQ ID NO: 333222 - DNA, 15 bp, Homo sapiens
cctgatattggactt

SEQ ID NO: 333223 - DNA, 15 bp, Homo sapiens
ccctgatattggact

SEQ ID NO: 333224 - DNA, 15 bp, Homo sapiens
gccctgatattggac

SEQ ID NO: 333225 - DNA, 15 bp, Homo sapiens
agccctgatattgga

SEQ ID NO: 333226 - DNA, 15 bp, Homo sapiens
aagccctgatattgg

SEQ ID NO: 333227 - DNA, 15 bp, Homo sapiens
taagccctgatattg

SEQ ID NO: 333228 - DNA, 15 bp, Homo sapiens
ataagccctgatatt

SEQ ID NO: 333229 - DNA, 15 bp, Homo sapiens
aataagccctgatat

SEQ ID NO: 333230 - DNA, 15 bp, Homo sapiens
caataagccctgata

SEQ ID NO: 333231 - DNA, 15 bp, Homo sapiens
tcaataagccctgat

SEQ ID NO: 333232 - DNA, 15 bp, Homo sapiens
ttcaataagccctga

SEQ ID NO: 333233 - DNA, 15 bp, Homo sapiens
tttcaataagccctg

SEQ ID NO: 333234 - DNA, 15 bp, Homo sapiens
gtttcaataagccct

SEQ ID NO: 333235 - DNA, 15 bp, Homo sapiens
ggtttcaataagccc

SEQ ID NO: 333236 - DNA, 15 bp, Homo sapiens
aggtttcaataagcc

SEQ ID NO: 333237 - DNA, 15 bp, Homo sapiens
gaggtttcaataagc

SEQ ID NO: 333238 - DNA, 15 bp, Homo sapiens
agaggtttcaataag

SEQ ID NO: 333239 - DNA, 15 bp, Homo sapiens
aagaggtttcaataa

SEQ ID NO: 333240 - DNA, 15 bp, Homo sapiens
gaagaggtttcaata

SEQ ID NO: 333241 - DNA, 15 bp, Homo sapiens
agaagaggtttcaat

SEQ ID NO: 333242 - DNA, 15 bp, Homo sapiens
gagaagaggtttcaa

SEQ ID NO: 333243 - DNA, 15 bp, Homo sapiens
agagaagaggtttca

SEQ ID NO: 333244 - DNA, 15 bp, Homo sapiens
aagagaagaggtttc

SEQ ID NO: 333245 - DNA, 15 bp, Homo sapiens
caagagaagaggttt

SEQ ID NO: 333246 - DNA, 15 bp, Homo sapiens
ccaagagaagaggtt

SEQ ID NO: 333247 - DNA, 15 bp, Homo sapiens
accaagagaagaggt

SEQ ID NO: 333248 - DNA, 15 bp, Homo sapiens
aaccaagagaagagg

SEQ ID NO: 333249 - DNA, 15 bp, Homo sapiens
gaaccaagagaagag

SEQ ID NO: 333250 - DNA, 15 bp, Homo sapiens
agaaccaagagaaga

SEQ ID NO: 333251 - DNA, 15 bp, Homo sapiens
cagaaccaagagaag

SEQ ID NO: 333252 - DNA, 15 bp, Homo sapiens
tcagaaccaagagaa

SEQ ID NO: 333253 - DNA, 15 bp, Homo sapiens
ctcagaaccaagaga

SEQ ID NO: 333254 - DNA, 15 bp, Homo sapiens
tctcagaaccaagag

SEQ ID NO: 333255 - DNA, 15 bp, Homo sapiens
ctctcagaaccaaga

SEQ ID NO: 333256 - DNA, 15 bp, Homo sapiens
tctctcagaaccaag

SEQ ID NO: 333257 - DNA, 15 bp, Homo sapiens
ctctctcagaaccaa

SEQ ID NO: 333258 - DNA, 15 bp, Homo sapiens
actctctcagaacca

SEQ ID NO: 333259 - DNA, 15 bp, Homo sapiens
gactctctcagaacc

SEQ ID NO: 333260 - DNA, 15 bp, Homo sapiens
agactctctcagaac

SEQ ID NO: 333261 - DNA, 15 bp, Homo sapiens
aagactctctcagaa

SEQ ID NO: 333262 - DNA, 15 bp, Homo sapiens
caagactctctcaga

SEQ ID NO: 333263 - DNA, 15 bp, Homo sapiens
gcaagactctctcag

SEQ ID NO: 333264 - DNA, 15 bp, Homo sapiens
agcaagactctctca

SEQ ID NO: 333265 - DNA, 15 bp, Homo sapiens
tagcaagactctctc

SEQ ID NO: 333266 - DNA, 15 bp, Homo sapiens
gtagcaagactctct

SEQ ID NO: 333267 - DNA, 15 bp, Homo sapiens
tgtagcaagactctc

SEQ ID NO: 333268 - DNA, 15 bp, Homo sapiens
ttgtagcaagactct

SEQ ID NO: 333269 - DNA, 15 bp, Homo sapiens
gttgtagcaagactc

SEQ ID NO: 333270 - DNA, 15 bp, Homo sapiens
tgttgtagcaagact

SEQ ID NO: 333271 - DNA, 15 bp, Homo sapiens
gtgttgtagcaagac

SEQ ID NO: 333272 - DNA, 15 bp, Homo sapiens
ggtgttgtagcaaga

SEQ ID NO: 333273 - DNA, 15 bp, Homo sapiens
tggtgttgtagcaag

SEQ ID NO: 333274 - DNA, 15 bp, Homo sapiens
atggtgttgtagcaa

SEQ ID NO: 333275 - DNA, 15 bp, Homo sapiens
aatggtgttgtagca

SEQ ID NO: 333276 - DNA, 15 bp, Homo sapiens
aaatggtgttgtagc

SEQ ID NO: 333277 - DNA, 15 bp, Homo sapiens
gaaatggtgttgtag

SEQ ID NO: 333278 - DNA, 15 bp, Homo sapiens
ggaaatggtgttgta

SEQ ID NO: 333279 - DNA, 15 bp, Homo sapiens
gggaaatggtgttgt

SEQ ID NO: 333280 - DNA, 15 bp, Homo sapiens
agggaaatggtgttg

SEQ ID NO: 333281 - DNA, 15 bp, Homo sapiens
gagggaaatggtgtt

SEQ ID NO: 333282 - DNA, 15 bp, Homo sapiens
agagggaaatggtgt

SEQ ID NO: 333283 - DNA, 15 bp, Homo sapiens
gagagggaaatggtg

SEQ ID NO: 333284 - DNA, 15 bp, Homo sapiens
cgagagggaaatggt

SEQ ID NO: 333285 - DNA, 15 bp, Homo sapiens
tcgagagggaaatgg

SEQ ID NO: 333286 - DNA, 15 bp, Homo sapiens
gtcgagagggaaatg

SEQ ID NO: 333287 - DNA, 15 bp, Homo sapiens
agtcgagagggaaat

SEQ ID NO: 333288 - DNA, 15 bp, Homo sapiens
gagtcgagagggaaa

SEQ ID NO: 333289 - DNA, 15 bp, Homo sapiens
agagtcgagagggaa

SEQ ID NO: 333290 - DNA, 15 bp, Homo sapiens
aagagtcgagaggga

SEQ ID NO: 333291 - DNA, 15 bp, Homo sapiens
aaagagtcgagaggg

SEQ ID NO: 333292 - DNA, 15 bp, Homo sapiens
gaaagagtcgagagg

SEQ ID NO: 333293 - DNA, 15 bp, Homo sapiens
agaaagagtcgagag

SEQ ID NO: 333294 - DNA, 15 bp, Homo sapiens
cagaaagagtcgaga

SEQ ID NO: 333295 - DNA, 15 bp, Homo sapiens
ccagaaagagtcgag

SEQ ID NO: 333296 - DNA, 15 bp, Homo sapiens
cccagaaagagtcga

SEQ ID NO: 333297 - DNA, 15 bp, Homo sapiens
tcccagaaagagtcg

SEQ ID NO: 333298 - DNA, 15 bp, Homo sapiens
ttcccagaaagagtc

SEQ ID NO: 333299 - DNA, 15 bp, Homo sapiens
cttcccagaaagagt

SEQ ID NO: 333300 - DNA, 15 bp, Homo sapiens
ccttcccagaaagag

SEQ ID NO: 333301 - DNA, 15 bp, Homo sapiens
gccttcccagaaaga

SEQ ID NO: 333302 - DNA, 15 bp, Homo sapiens
tgccttcccagaaag

SEQ ID NO: 333303 - DNA, 15 bp, Homo sapiens
atgccttcccagaaa

SEQ ID NO: 333304 - DNA, 15 bp, Homo sapiens
catgccttcccagaa

SEQ ID NO: 333305 - DNA, 15 bp, Homo sapiens
ccatgccttcccaga

SEQ ID NO: 333306 - DNA, 15 bp, Homo sapiens
gccatgccttcccag

SEQ ID NO: 333307 - DNA, 15 bp, Homo sapiens
ggccatgccttccca

SEQ ID NO: 333308 - DNA, 15 bp, Homo sapiens
aggccatgccttccc

SEQ ID NO: 333309 - DNA, 15 bp, Homo sapiens
gaggccatgccttcc

SEQ ID NO: 333310 - DNA, 15 bp, Homo sapiens
agaggccatgccttc

SEQ ID NO: 333311 - DNA, 15 bp, Homo sapiens
tagaggccatgcctt

SEQ ID NO: 333312 - DNA, 15 bp, Homo sapiens
ctagaggccatgcct

SEQ ID NO: 333313 - DNA, 15 bp, Homo sapiens
gctagaggccatgcc

SEQ ID NO: 333314 - DNA, 15 bp, Homo sapiens
tgctagaggccatgc

SEQ ID NO: 333315 - DNA, 15 bp, Homo sapiens
gtgctagaggccatg

SEQ ID NO: 333316 - DNA, 15 bp, Homo sapiens
agtgctagaggccat

SEQ ID NO: 333317 - DNA, 15 bp, Homo sapiens
aagtgctagaggcca

SEQ ID NO: 333318 - DNA, 15 bp, Homo sapiens
caagtgctagaggcc

SEQ ID NO: 333319 - DNA, 15 bp, Homo sapiens
ccaagtgctagaggc

SEQ ID NO: 333320 - DNA, 15 bp, Homo sapiens
cccaagtgctagagg

SEQ ID NO: 333321 - DNA, 15 bp, Homo sapiens
tcccaagtgctagag

SEQ ID NO: 333322 - DNA, 15 bp, Homo sapiens
ttcccaagtgctaga

SEQ ID NO: 333323 - DNA, 15 bp, Homo sapiens
attcccaagtgctag

SEQ ID NO: 333324 - DNA, 15 bp, Homo sapiens
gattcccaagtgcta

SEQ ID NO: 333325 - DNA, 15 bp, Homo sapiens
cgattcccaagtgct

SEQ ID NO: 333326 - DNA, 15 bp, Homo sapiens
ccgattcccaagtgc

SEQ ID NO: 333327 - DNA, 15 bp, Homo sapiens
tccgattcccaagtg

SEQ ID NO: 333328 - DNA, 15 bp, Homo sapiens
atccgattcccaagt

SEQ ID NO: 333329 - DNA, 15 bp, Homo sapiens
aatccgattcccaag

SEQ ID NO: 333330 - DNA, 15 bp, Homo sapiens
aaatccgattcccaa

SEQ ID NO: 333331 - DNA, 15 bp, Homo sapiens
caaatccgattccca

SEQ ID NO: 333332 - DNA, 15 bp, Homo sapiens
tcaaatccgattccc

SEQ ID NO: 333333 - DNA, 15 bp, Homo sapiens
ctcaaatccgattcc

SEQ ID NO: 333334 - DNA, 15 bp, Homo sapiens
tctcaaatccgattc

SEQ ID NO: 333335 - DNA, 15 bp, Homo sapiens
atctcaaatccgatt

SEQ ID NO: 333336 - DNA, 15 bp, Homo sapiens
catctcaaatccgat

SEQ ID NO: 333337 - DNA, 15 bp, Homo sapiens
tcatctcaaatccga

SEQ ID NO: 333338 - DNA, 15 bp, Homo sapiens
atcatctcaaatccg

SEQ ID NO: 333339 - DNA, 15 bp, Homo sapiens
aatcatctcaaatcc

SEQ ID NO: 333340 - DNA, 15 bp, Homo sapiens
aaatcatctcaaatc

SEQ ID NO: 333341 - DNA, 15 bp, Homo sapiens
gaaatcatctcaaat

SEQ ID NO: 333342 - DNA, 15 bp, Homo sapiens
tgaaatcatctcaaa

SEQ ID NO: 333343 - DNA, 15 bp, Homo sapiens
atgaaatcatctcaa

SEQ ID NO: 333344 - DNA, 15 bp, Homo sapiens
catgaaatcatctca

SEQ ID NO: 333345 - DNA, 15 bp, Homo sapiens
acatgaaatcatctc

SEQ ID NO: 333346 - DNA, 15 bp, Homo sapiens
aacatgaaatcatct

SEQ ID NO: 333347 - DNA, 15 bp, Homo sapiens
taacatgaaatcatc

SEQ ID NO: 333348 - DNA, 15 bp, Homo sapiens
ataacatgaaatcat

SEQ ID NO: 333349 - DNA, 15 bp, Homo sapiens
tataacatgaaatca

SEQ ID NO: 333350 - DNA, 15 bp, Homo sapiens
gtataacatgaaatc

SEQ ID NO: 333351 - DNA, 15 bp, Homo sapiens
agtataacatgaaat

SEQ ID NO: 333352 - DNA, 15 bp, Homo sapiens
cagtataacatgaaa

SEQ ID NO: 333353 - DNA, 15 bp, Homo sapiens
tcagtataacatgaa

SEQ ID NO: 333354 - DNA, 15 bp, Homo sapiens
gtcagtataacatga

SEQ ID NO: 333355 - DNA, 15 bp, Homo sapiens
agtcagtataacatg

SEQ ID NO: 333356 - DNA, 15 bp, Homo sapiens
aagtcagtataacat

SEQ ID NO: 333357 - DNA, 15 bp, Homo sapiens
caagtcagtataaca

SEQ ID NO: 333358 - DNA, 15 bp, Homo sapiens
ccaagtcagtataac

SEQ ID NO: 333359 - DNA, 15 bp, Homo sapiens
cccaagtcagtataa

SEQ ID NO: 333360 - DNA, 15 bp, Homo sapiens
gcccaagtcagtata

SEQ ID NO: 333361 - DNA, 15 bp, Homo sapiens
ggcccaagtcagtat

SEQ ID NO: 333362 - DNA, 15 bp, Homo sapiens
cggcccaagtcagta

SEQ ID NO: 333363 - DNA, 15 bp, Homo sapiens
tcggcccaagtcagt

SEQ ID NO: 333364 - DNA, 15 bp, Homo sapiens
atcggcccaagtcag

SEQ ID NO: 333365 - DNA, 15 bp, Homo sapiens
gatcggcccaagtca

SEQ ID NO: 333366 - DNA, 15 bp, Homo sapiens
ggatcggcccaagtc

SEQ ID NO: 333367 - DNA, 15 bp, Homo sapiens
tggatcggcccaagt

SEQ ID NO: 333368 - DNA, 15 bp, Homo sapiens
gtggatcggcccaag

SEQ ID NO: 333369 - DNA, 15 bp, Homo sapiens
tgtggatcggcccaa

SEQ ID NO: 333370 - DNA, 15 bp, Homo sapiens
ctgtggatcggccca

SEQ ID NO: 333371 - DNA, 15 bp, Homo sapiens
cctgtggatcggccc

SEQ ID NO: 333372 - DNA, 15 bp, Homo sapiens
gcctgtggatcggcc

SEQ ID NO: 333373 - DNA, 15 bp, Homo sapiens
ggcctgtggatcggc

SEQ ID NO: 333374 - DNA, 15 bp, Homo sapiens
aggcctgtggatcgg

SEQ ID NO: 333375 - DNA, 15 bp, Homo sapiens
aaggcctgtggatcg

SEQ ID NO: 333376 - DNA, 15 bp, Homo sapiens
aaaggcctgtggatc

SEQ ID NO: 333377 - DNA, 15 bp, Homo sapiens
aaaaggcctgtggat

SEQ ID NO: 333378 - DNA, 15 bp, Homo sapiens
gaaaaggcctgtgga

SEQ ID NO: 333379 - DNA, 15 bp, Homo sapiens
agaaaaggcctgtgg

SEQ ID NO: 333380 - DNA, 15 bp, Homo sapiens
aagaaaaggcctgtg

SEQ ID NO: 333381 - DNA, 15 bp, Homo sapiens
aaagaaaaggcctgt

SEQ ID NO: 333382 - DNA, 15 bp, Homo sapiens
gaaagaaaaggcctg

SEQ ID NO: 333383 - DNA, 15 bp, Homo sapiens
ggaaagaaaaggcct

SEQ ID NO: 333384 - DNA, 15 bp, Homo sapiens
tggaaagaaaaggcc

SEQ ID NO: 333385 - DNA, 15 bp, Homo sapiens
atggaaagaaaaggc

SEQ ID NO: 333386 - DNA, 15 bp, Homo sapiens
catggaaagaaaagg

SEQ ID NO: 333387 - DNA, 15 bp, Homo sapiens
acatggaaagaaaag

SEQ ID NO: 333388 - DNA, 15 bp, Homo sapiens
aacatggaaagaaaa

SEQ ID NO: 333389 - DNA, 15 bp, Homo sapiens
aaacatggaaagaaa

SEQ ID NO: 333390 - DNA, 15 bp, Homo sapiens
taaacatggaaagaa

SEQ ID NO: 333391 - DNA, 15 bp, Homo sapiens
gtaaacatggaaaga

SEQ ID NO: 333392 - DNA, 15 bp, Homo sapiens
agtaaacatggaaag

SEQ ID NO: 333393 - DNA, 15 bp, Homo sapiens
aagtaaacatggaaa

SEQ ID NO: 333394 - DNA, 15 bp, Homo sapiens
caagtaaacatggaa

SEQ ID NO: 333395 - DNA, 15 bp, Homo sapiens
acaagtaaacatgga

SEQ ID NO: 333396 - DNA, 15 bp, Homo sapiens
cacaagtaaacatgg

SEQ ID NO: 333397 - DNA, 15 bp, Homo sapiens
acacaagtaaacatg

SEQ ID NO: 333398 - DNA, 15 bp, Homo sapiens
gacacaagtaaacat

SEQ ID NO: 333399 - DNA, 15 bp, Homo sapiens
agacacaagtaaaca

SEQ ID NO: 333400 - DNA, 15 bp, Homo sapiens
aagacacaagtaaac

SEQ ID NO: 333401 - DNA, 15 bp, Homo sapiens
caagacacaagtaaa

SEQ ID NO: 333402 - DNA, 15 bp, Homo sapiens
ccaagacacaagtaa

SEQ ID NO: 333403 - DNA, 15 bp, Homo sapiens
cccaagacacaagta

SEQ ID NO: 333404 - DNA, 15 bp, Homo sapiens
gcccaagacacaagt

SEQ ID NO: 333405 - DNA, 15 bp, Homo sapiens
tgcccaagacacaag

SEQ ID NO: 333406 - DNA, 15 bp, Homo sapiens
ttgcccaagacacaa

SEQ ID NO: 333407 - DNA, 15 bp, Homo sapiens
gttgcccaagacaca

SEQ ID NO: 333408 - DNA, 15 bp, Homo sapiens
tgttgcccaagacac

SEQ ID NO: 333409 - DNA, 15 bp, Homo sapiens
ctgttgcccaagaca

SEQ ID NO: 333410 - DNA, 15 bp, Homo sapiens
gctgttgcccaagac

SEQ ID NO: 333411 - DNA, 15 bp, Homo sapiens
agctgttgcccaaga

SEQ ID NO: 333412 - DNA, 15 bp, Homo sapiens
tagctgttgcccaag

SEQ ID NO: 333413 - DNA, 15 bp, Homo sapiens
atagctgttgcccaa

SEQ ID NO: 333414 - DNA, 15 bp, Homo sapiens
aatagctgttgccca

SEQ ID NO: 333415 - DNA, 15 bp, Homo sapiens
gaatagctgttgccc

SEQ ID NO: 333416 - DNA, 15 bp, Homo sapiens
agaatagctgttgcc

SEQ ID NO: 333417 - DNA, 15 bp, Homo sapiens
gagaatagctgttgc

SEQ ID NO: 333418 - DNA, 15 bp, Homo sapiens
tgagaatagctgttg

SEQ ID NO: 333419 - DNA, 15 bp, Homo sapiens
gtgagaatagctgtt

SEQ ID NO: 333420 - DNA, 15 bp, Homo sapiens
agtgagaatagctgt

SEQ ID NO: 333421 - DNA, 15 bp, Homo sapiens
aagtgagaatagctg

SEQ ID NO: 333422 - DNA, 15 bp, Homo sapiens
aaagtgagaatagct

SEQ ID NO: 333423 - DNA, 15 bp, Homo sapiens
aaaagtgagaatagc

SEQ ID NO: 333424 - DNA, 15 bp, Homo sapiens
gaaaagtgagaatag

SEQ ID NO: 333425 - DNA, 15 bp, Homo sapiens
ggaaaagtgagaata

SEQ ID NO: 333426 - DNA, 15 bp, Homo sapiens
aggaaaagtgagaat

SEQ ID NO: 333427 - DNA, 15 bp, Homo sapiens
gaggaaaagtgagaa

SEQ ID NO: 333428 - DNA, 15 bp, Homo sapiens
cgaggaaaagtgaga

SEQ ID NO: 333429 - DNA, 15 bp, Homo sapiens
gcgaggaaaagtgag

SEQ ID NO: 333430 - DNA, 15 bp, Homo sapiens
ggcgaggaaaagtga

SEQ ID NO: 333431 - DNA, 15 bp, Homo sapiens
aggcgaggaaaagtg

SEQ ID NO: 333432 - DNA, 15 bp, Homo sapiens
caggcgaggaaaagt

SEQ ID NO: 333433 - DNA, 15 bp, Homo sapiens
gcaggcgaggaaaag

SEQ ID NO: 333434 - DNA, 15 bp, Homo sapiens
tgcaggcgaggaaaa

SEQ ID NO: 333435 - DNA, 15 bp, Homo sapiens
ttgcaggcgaggaaa

SEQ ID NO: 333436 - DNA, 15 bp, Homo sapiens
cttgcaggcgaggaa

SEQ ID NO: 333437 - DNA, 15 bp, Homo sapiens
ccttgcaggcgagga

SEQ ID NO: 333438 - DNA, 15 bp, Homo sapiens
cccttgcaggcgagg

SEQ ID NO: 333439 - DNA, 15 bp, Homo sapiens
ccccttgcaggcgag

SEQ ID NO: 333440 - DNA, 15 bp, Homo sapiens
gccccttgcaggcga

SEQ ID NO: 333441 - DNA, 15 bp, Homo sapiens
cgccccttgcaggcg

SEQ ID NO: 333442 - DNA, 15 bp, Homo sapiens
ccgccccttgcaggc

SEQ ID NO: 333443 - DNA, 15 bp, Homo sapiens
tccgccccttgcagg

SEQ ID NO: 333444 - DNA, 15 bp, Homo sapiens
gtccgccccttgcag

SEQ ID NO: 333445 - DNA, 15 bp, Homo sapiens
agtccgccccttgca

SEQ ID NO: 333446 - DNA, 15 bp, Homo sapiens
cagtccgccccttgc

SEQ ID NO: 333447 - DNA, 15 bp, Homo sapiens
gcagtccgccccttg

SEQ ID NO: 333448 - DNA, 15 bp, Homo sapiens
agcagtccgcccctt

SEQ ID NO: 333449 - DNA, 15 bp, Homo sapiens
gagcagtccgcccct

SEQ ID NO: 333450 - DNA, 15 bp, Homo sapiens
agagcagtccgcccc

SEQ ID NO: 333451 - DNA, 15 bp, Homo sapiens
gagagcagtccgccc

SEQ ID NO: 333452 - DNA, 15 bp, Homo sapiens
tgagagcagtccgcc

SEQ ID NO: 333453 - DNA, 15 bp, Homo sapiens
atgagagcagtccgc

SEQ ID NO: 333454 - DNA, 15 bp, Homo sapiens
catgagagcagtccg

SEQ ID NO: 333455 - DNA, 15 bp, Homo sapiens
tcatgagagcagtcc

SEQ ID NO: 333456 - DNA, 15 bp, Homo sapiens
ctcatgagagcagtc

SEQ ID NO: 333457 - DNA, 15 bp, Homo sapiens
cctcatgagagcagt

SEQ ID NO: 333458 - DNA, 15 bp, Homo sapiens
ccctcatgagagcag

SEQ ID NO: 333459 - DNA, 15 bp, Homo sapiens
cccctcatgagagca

SEQ ID NO: 333460 - DNA, 15 bp, Homo sapiens
acccctcatgagagc

SEQ ID NO: 333461 - DNA, 15 bp, Homo sapiens
cacccctcatgagag

SEQ ID NO: 333462 - DNA, 15 bp, Homo sapiens
acacccctcatgaga

SEQ ID NO: 333463 - DNA, 15 bp, Homo sapiens
aacacccctcatgag

SEQ ID NO: 333464 - DNA, 15 bp, Homo sapiens
aaacacccctcatga

SEQ ID NO: 333465 - DNA, 15 bp, Homo sapiens
gaaacacccctcatg

SEQ ID NO: 333466 - DNA, 15 bp, Homo sapiens
ggaaacacccctcat

SEQ ID NO: 333467 - DNA, 15 bp, Homo sapiens
aggaaacacccctca

SEQ ID NO: 333468 - DNA, 15 bp, Homo sapiens
taggaaacacccctc

SEQ ID NO: 333469 - DNA, 15 bp, Homo sapiens
ataggaaacacccct

SEQ ID NO: 333470 - DNA, 15 bp, Homo sapiens
tataggaaacacccc

SEQ ID NO: 333471 - DNA, 15 bp, Homo sapiens
ttataggaaacaccc

SEQ ID NO: 333472 - DNA, 15 bp, Homo sapiens
tttataggaaacacc

SEQ ID NO: 333473 - DNA, 15 bp, Homo sapiens
ttttataggaaacac

SEQ ID NO: 333474 - DNA, 15 bp, Homo sapiens
attttataggaaaca

SEQ ID NO: 333475 - DNA, 15 bp, Homo sapiens
cattttataggaaac

SEQ ID NO: 333476 - DNA, 15 bp, Homo sapiens
acattttataggaaa

SEQ ID NO: 333477 - DNA, 15 bp, Homo sapiens
gacattttataggaa

SEQ ID NO: 333478 - DNA, 15 bp, Homo sapiens
tgacattttatagga

SEQ ID NO: 333479 - DNA, 15 bp, Homo sapiens
atgacattttatagg

SEQ ID NO: 333480 - DNA, 15 bp, Homo sapiens
aatgacattttatag

SEQ ID NO: 333481 - DNA, 15 bp, Homo sapiens
aaatgacattttata

SEQ ID NO: 333482 - DNA, 15 bp, Homo sapiens
taaatgacattttat

SEQ ID NO: 333483 - DNA, 15 bp, Homo sapiens
gtaaatgacatttta

SEQ ID NO: 333484 - DNA, 15 bp, Homo sapiens
cgtaaatgacatttt

SEQ ID NO: 333485 - DNA, 15 bp, Homo sapiens
tcgtaaatgacattt

SEQ ID NO: 333486 - DNA, 15 bp, Homo sapiens
atcgtaaatgacatt

SEQ ID NO: 333487 - DNA, 15 bp, Homo sapiens
aatcgtaaatgacat

SEQ ID NO: 333488 - DNA, 15 bp, Homo sapiens
aaatcgtaaatgaca

SEQ ID NO: 333489 - DNA, 15 bp, Homo sapiens
gaaatcgtaaatgac

SEQ ID NO: 333490 - DNA, 15 bp, Homo sapiens
agaaatcgtaaatga

SEQ ID NO: 333491 - DNA, 15 bp, Homo sapiens
gagaaatcgtaaatg

SEQ ID NO: 333492 - DNA, 15 bp, Homo sapiens
agagaaatcgtaaat

SEQ ID NO: 333493 - DNA, 15 bp, Homo sapiens
tagagaaatcgtaaa

SEQ ID NO: 333494 - DNA, 15 bp, Homo sapiens
atagagaaatcgtaa

SEQ ID NO: 333495 - DNA, 15 bp, Homo sapiens
aatagagaaatcgta

SEQ ID NO: 333496 - DNA, 15 bp, Homo sapiens
caatagagaaatcgt

SEQ ID NO: 333497 - DNA, 15 bp, Homo sapiens
gcaatagagaaatcg

SEQ ID NO: 333498 - DNA, 15 bp, Homo sapiens
tgcaatagagaaatc

SEQ ID NO: 333499 - DNA, 15 bp, Homo sapiens
ctgcaatagagaaat

SEQ ID NO: 333500 - DNA, 15 bp, Homo sapiens
tctgcaatagagaaa

SEQ ID NO: 333501 - DNA, 15 bp, Homo sapiens
gtctgcaatagagaa

SEQ ID NO: 333502 - DNA, 15 bp, Homo sapiens
tgtctgcaatagaga

SEQ ID NO: 333503 - DNA, 15 bp, Homo sapiens
atgtctgcaatagag

SEQ ID NO: 333504 - DNA, 15 bp, Homo sapiens
catgtctgcaataga

SEQ ID NO: 333505 - DNA, 15 bp, Homo sapiens
ccatgtctgcaatag

SEQ ID NO: 333506 - DNA, 15 bp, Homo sapiens
gccatgtctgcaata

SEQ ID NO: 333507 - DNA, 15 bp, Homo sapiens
agccatgtctgcaat

SEQ ID NO: 333508 - DNA, 15 bp, Homo sapiens
gagccatgtctgcaa

SEQ ID NO: 333509 - DNA, 15 bp, Homo sapiens
agagccatgtctgca

SEQ ID NO: 333510 - DNA, 15 bp, Homo sapiens
cagagccatgtctgc

SEQ ID NO: 333511 - DNA, 15 bp, Homo sapiens
ccagagccatgtctg

SEQ ID NO: 333512 - DNA, 15 bp, Homo sapiens
accagagccatgtct

SEQ ID NO: 333513 - DNA, 15 bp, Homo sapiens
gaccagagccatgtc

SEQ ID NO: 333514 - DNA, 15 bp, Homo sapiens
cgaccagagccatgt

SEQ ID NO: 333515 - DNA, 15 bp, Homo sapiens
tcgaccagagccatg

SEQ ID NO: 333516 - DNA, 15 bp, Homo sapiens
ttcgaccagagccat

SEQ ID NO: 333517 - DNA, 15 bp, Homo sapiens
tttcgaccagagcca

SEQ ID NO: 333518 - DNA, 15 bp, Homo sapiens
atttcgaccagagcc

SEQ ID NO: 333519 - DNA, 15 bp, Homo sapiens
catttcgaccagagc

SEQ ID NO: 333520 - DNA, 15 bp, Homo sapiens
acatttcgaccagag

SEQ ID NO: 333521 - DNA, 15 bp, Homo sapiens
cacatttcgaccaga

SEQ ID NO: 333522 - DNA, 15 bp, Homo sapiens
tcacatttcgaccag

SEQ ID NO: 333523 - DNA, 15 bp, Homo sapiens
gtcacatttcgacca

SEQ ID NO: 333524 - DNA, 15 bp, Homo sapiens
agtcacatttcgacc

SEQ ID NO: 333525 - DNA, 15 bp, Homo sapiens
cagtcacatttcgac

SEQ ID NO: 333526 - DNA, 15 bp, Homo sapiens
tcagtcacatttcga

SEQ ID NO: 333527 - DNA, 15 bp, Homo sapiens
ttcagtcacatttcg

SEQ ID NO: 333528 - DNA, 15 bp, Homo sapiens
cttcagtcacatttc

SEQ ID NO: 333529 - DNA, 15 bp, Homo sapiens
gcttcagtcacattt

SEQ ID NO: 333530 - DNA, 15 bp, Homo sapiens
agcttcagtcacatt

SEQ ID NO: 333531 - DNA, 15 bp, Homo sapiens
aagcttcagtcacat

SEQ ID NO: 333532 - DNA, 15 bp, Homo sapiens
aaagcttcagtcaca

SEQ ID NO: 333533 - DNA, 15 bp, Homo sapiens
caaagcttcagtcac

SEQ ID NO: 333534 - DNA, 15 bp, Homo sapiens
gcaaagcttcagtca

SEQ ID NO: 333535 - DNA, 15 bp, Homo sapiens
tgcaaagcttcagtc

SEQ ID NO: 333536 - DNA, 15 bp, Homo sapiens
atgcaaagcttcagt

SEQ ID NO: 333537 - DNA, 15 bp, Homo sapiens
gatgcaaagcttcag

SEQ ID NO: 333538 - DNA, 15 bp, Homo sapiens
ggatgcaaagcttca

SEQ ID NO: 333539 - DNA, 15 bp, Homo sapiens
aggatgcaaagcttc

SEQ ID NO: 333540 - DNA, 15 bp, Homo sapiens
taggatgcaaagctt

SEQ ID NO: 333541 - DNA, 15 bp, Homo sapiens
gtaggatgcaaagct

SEQ ID NO: 333542 - DNA, 15 bp, Homo sapiens
tgtaggatgcaaagc

SEQ ID NO: 333543 - DNA, 15 bp, Homo sapiens
gtgtaggatgcaaag

SEQ ID NO: 333544 - DNA, 15 bp, Homo sapiens
tgtgtaggatgcaaa

SEQ ID NO: 333545 - DNA, 15 bp, Homo sapiens
ctgtgtaggatgcaa

SEQ ID NO: 333546 - DNA, 15 bp, Homo sapiens
tctgtgtaggatgca

SEQ ID NO: 333547 - DNA, 15 bp, Homo sapiens
gtctgtgtaggatgc

SEQ ID NO: 333548 - DNA, 15 bp, Homo sapiens
agtctgtgtaggatg

SEQ ID NO: 333549 - DNA, 15 bp, Homo sapiens
aagtctgtgtaggat

SEQ ID NO: 333550 - DNA, 15 bp, Homo sapiens
taagtctgtgtagga

SEQ ID NO: 333551 - DNA, 15 bp, Homo sapiens
ctaagtctgtgtagg

SEQ ID NO: 333552 - DNA, 15 bp, Homo sapiens
tctaagtctgtgtag

SEQ ID NO: 333553 - DNA, 15 bp, Homo sapiens
atctaagtctgtgta

SEQ ID NO: 333554 - DNA, 15 bp, Homo sapiens
gatctaagtctgtgt

SEQ ID NO: 333555 - DNA, 15 bp, Homo sapiens
ggatctaagtctgtg

SEQ ID NO: 333556 - DNA, 15 bp, Homo sapiens
gggatctaagtctgt

SEQ ID NO: 333557 - DNA, 15 bp, Homo sapiens
agggatctaagtctg

SEQ ID NO: 333558 - DNA, 15 bp, Homo sapiens
gagggatctaagtct

SEQ ID NO: 333559 - DNA, 15 bp, Homo sapiens
tgagggatctaagtc

SEQ ID NO: 333560 - DNA, 15 bp, Homo sapiens
atgagggatctaagt

SEQ ID NO: 333561 - DNA, 15 bp, Homo sapiens
gatgagggatctaag

SEQ ID NO: 333562 - DNA, 15 bp, Homo sapiens
tgatgagggatctaa

SEQ ID NO: 333563 - DNA, 15 bp, Homo sapiens
ttgatgagggatcta

SEQ ID NO: 333564 - DNA, 15 bp, Homo sapiens
cttgatgagggatct

SEQ ID NO: 333565 - DNA, 15 bp, Homo sapiens
acttgatgagggatc

SEQ ID NO: 333566 - DNA, 15 bp, Homo sapiens
tacttgatgagggat

SEQ ID NO: 333567 - DNA, 15 bp, Homo sapiens
ctacttgatgaggga

SEQ ID NO: 333568 - DNA, 15 bp, Homo sapiens
gctacttgatgaggg

SEQ ID NO: 333569 - DNA, 15 bp, Homo sapiens
ggctacttgatgagg

SEQ ID NO: 333570 - DNA, 15 bp, Homo sapiens
tggctacttgatgag

SEQ ID NO: 333571 - DNA, 15 bp, Homo sapiens
atggctacttgatga

SEQ ID NO: 333572 - DNA, 15 bp, Homo sapiens
aatggctacttgatg

SEQ ID NO: 333573 - DNA, 15 bp, Homo sapiens
gaatggctacttgat

SEQ ID NO: 333574 - DNA, 15 bp, Homo sapiens
tgaatggctacttga

SEQ ID NO: 333575 - DNA, 15 bp, Homo sapiens
ctgaatggctacttg

SEQ ID NO: 333576 - DNA, 15 bp, Homo sapiens
gctgaatggctactt

SEQ ID NO: 333577 - DNA, 15 bp, Homo sapiens
ggctgaatggctact

SEQ ID NO: 333578 - DNA, 15 bp, Homo sapiens
gggctgaatggctac

SEQ ID NO: 333579 - DNA, 15 bp, Homo sapiens
agggctgaatggcta

SEQ ID NO: 333580 - DNA, 15 bp, Homo sapiens
gagggctgaatggct

SEQ ID NO: 333581 - DNA, 15 bp, Homo sapiens
tgagggctgaatggc

SEQ ID NO: 333582 - DNA, 15 bp, Homo sapiens
atgagggctgaatgg

SEQ ID NO: 333583 - DNA, 15 bp, Homo sapiens
aatgagggctgaatg

SEQ ID NO: 333584 - DNA, 15 bp, Homo sapiens
caatgagggctgaat

SEQ ID NO: 333585 - DNA, 15 bp, Homo sapiens
gcaatgagggctgaa

SEQ ID NO: 333586 - DNA, 15 bp, Homo sapiens
tgcaatgagggctga

SEQ ID NO: 333587 - DNA, 15 bp, Homo sapiens
atgcaatgagggctg

SEQ ID NO: 333588 - DNA, 15 bp, Homo sapiens
catgcaatgagggct

SEQ ID NO: 333589 - DNA, 15 bp, Homo sapiens
tcatgcaatgagggc

SEQ ID NO: 333590 - DNA, 15 bp, Homo sapiens
ctcatgcaatgaggg

SEQ ID NO: 333591 - DNA, 15 bp, Homo sapiens
gctcatgcaatgagg

SEQ ID NO: 333592 - DNA, 15 bp, Homo sapiens
ggctcatgcaatgag

SEQ ID NO: 333593 - DNA, 15 bp, Homo sapiens
tggctcatgcaatga

SEQ ID NO: 333594 - DNA, 15 bp, Homo sapiens
gtggctcatgcaatg

SEQ ID NO: 333595 - DNA, 15 bp, Homo sapiens
cgtggctcatgcaat

SEQ ID NO: 333596 - DNA, 15 bp, Homo sapiens
acgtggctcatgcaa

SEQ ID NO: 333597 - DNA, 15 bp, Homo sapiens
cacgtggctcatgca

SEQ ID NO: 333598 - DNA, 15 bp, Homo sapiens
tcacgtggctcatgc

SEQ ID NO: 333599 - DNA, 15 bp, Homo sapiens
gtcacgtggctcatg

SEQ ID NO: 333600 - DNA, 15 bp, Homo sapiens
agtcacgtggctcat

SEQ ID NO: 333601 - DNA, 15 bp, Homo sapiens
aagtcacgtggctca

SEQ ID NO: 333602 - DNA, 15 bp, Homo sapiens
gaagtcacgtggctc

SEQ ID NO: 333603 - DNA, 15 bp, Homo sapiens
ggaagtcacgtggct

SEQ ID NO: 333604 - DNA, 15 bp, Homo sapiens
gggaagtcacgtggc

SEQ ID NO: 333605 - DNA, 15 bp, Homo sapiens
ggggaagtcacgtgg

SEQ ID NO: 333606 - DNA, 15 bp, Homo sapiens
tggggaagtcacgtg

SEQ ID NO: 333607 - DNA, 15 bp, Homo sapiens
ctggggaagtcacgt

SEQ ID NO: 333608 - DNA, 15 bp, Homo sapiens
gctggggaagtcacg

SEQ ID NO: 333609 - DNA, 15 bp, Homo sapiens
ggctggggaagtcac

SEQ ID NO: 333610 - DNA, 15 bp, Homo sapiens
aggctggggaagtca

SEQ ID NO: 333611 - DNA, 15 bp, Homo sapiens
caggctggggaagtc

SEQ ID NO: 333612 - DNA, 15 bp, Homo sapiens
tcaggctggggaagt

SEQ ID NO: 333613 - DNA, 15 bp, Homo sapiens
ttcaggctggggaag

SEQ ID NO: 333614 - DNA, 15 bp, Homo sapiens
gttcaggctggggaa

SEQ ID NO: 333615 - DNA, 15 bp, Homo sapiens
ggttcaggctgggga

SEQ ID NO: 333616 - DNA, 15 bp, Homo sapiens
gggttcaggctgggg

SEQ ID NO: 333617 - DNA, 15 bp, Homo sapiens
ggggttcaggctggg

SEQ ID NO: 333618 - DNA, 15 bp, Homo sapiens
aggggttcaggctgg

SEQ ID NO: 333619 - DNA, 15 bp, Homo sapiens
gaggggttcaggctg

SEQ ID NO: 333620 - DNA, 15 bp, Homo sapiens
tgaggggttcaggct

SEQ ID NO: 333621 - DNA, 15 bp, Homo sapiens
ctgaggggttcaggc

SEQ ID NO: 333622 - DNA, 15 bp, Homo sapiens
gctgaggggttcagg

SEQ ID NO: 333623 - DNA, 15 bp, Homo sapiens
tgctgaggggttcag

SEQ ID NO: 333624 - DNA, 15 bp, Homo sapiens
ttgctgaggggttca

SEQ ID NO: 333625 - DNA, 15 bp, Homo sapiens
attgctgaggggttc

SEQ ID NO: 333626 - DNA, 15 bp, Homo sapiens
cattgctgaggggtt

SEQ ID NO: 333627 - DNA, 15 bp, Homo sapiens
acattgctgaggggt

SEQ ID NO: 333628 - DNA, 15 bp, Homo sapiens
gacattgctgagggg

SEQ ID NO: 333629 - DNA, 15 bp, Homo sapiens
agacattgctgaggg

SEQ ID NO: 333630 - DNA, 15 bp, Homo sapiens
aagacattgctgagg

SEQ ID NO: 333631 - DNA, 15 bp, Homo sapiens
aaagacattgctgag

SEQ ID NO: 333632 - DNA, 15 bp, Homo sapiens
caaagacattgctga

SEQ ID NO: 333633 - DNA, 15 bp, Homo sapiens
ccaaagacattgctg

SEQ ID NO: 333634 - DNA, 15 bp, Homo sapiens
tccaaagacattgct

SEQ ID NO: 333635 - DNA, 15 bp, Homo sapiens
atccaaagacattgc

SEQ ID NO: 333636 - DNA, 15 bp, Homo sapiens
aatccaaagacattg

SEQ ID NO: 333637 - DNA, 15 bp, Homo sapiens
gaatccaaagacatt

SEQ ID NO: 333638 - DNA, 15 bp, Homo sapiens
ggaatccaaagacat

SEQ ID NO: 333639 - DNA, 15 bp, Homo sapiens
aggaatccaaagaca

SEQ ID NO: 333640 - DNA, 15 bp, Homo sapiens
taggaatccaaagac

SEQ ID NO: 333641 - DNA, 15 bp, Homo sapiens
ctaggaatccaaaga

SEQ ID NO: 333642 - DNA, 15 bp, Homo sapiens
tctaggaatccaaag

SEQ ID NO: 333643 - DNA, 15 bp, Homo sapiens
atctaggaatccaaa

SEQ ID NO: 333644 - DNA, 15 bp, Homo sapiens
aatctaggaatccaa

SEQ ID NO: 333645 - DNA, 15 bp, Homo sapiens
aaatctaggaatcca

SEQ ID NO: 333646 - DNA, 15 bp, Homo sapiens
aaaatctaggaatcc

SEQ ID NO: 333647 - DNA, 15 bp, Homo sapiens
taaaatctaggaatc

SEQ ID NO: 333648 - DNA, 15 bp, Homo sapiens
ttaaaatctaggaat

SEQ ID NO: 333649 - DNA, 15 bp, Homo sapiens
tttaaaatctaggaa

SEQ ID NO: 333650 - DNA, 15 bp, Homo sapiens
ttttaaaatctagga

SEQ ID NO: 333651 - DNA, 15 bp, Homo sapiens
cttttaaaatctagg

SEQ ID NO: 333652 - DNA, 15 bp, Homo sapiens
gcttttaaaatctag

SEQ ID NO: 333653 - DNA, 15 bp, Homo sapiens
ggcttttaaaatcta

SEQ ID NO: 333654 - DNA, 15 bp, Homo sapiens
tggcttttaaaatct

SEQ ID NO: 333655 - DNA, 15 bp, Homo sapiens
atggcttttaaaatc

SEQ ID NO: 333656 - DNA, 15 bp, Homo sapiens
tatggcttttaaaat

SEQ ID NO: 333657 - DNA, 15 bp, Homo sapiens
ttatggcttttaaaa

SEQ ID NO: 333658 - DNA, 15 bp, Homo sapiens
tttatggcttttaaa

SEQ ID NO: 333659 - DNA, 15 bp, Homo sapiens
atttatggcttttaa

SEQ ID NO: 333660 - DNA, 15 bp, Homo sapiens
aatttatggctttta

SEQ ID NO: 333661 - DNA, 15 bp, Homo sapiens
taatttatggctttt

SEQ ID NO: 333662 - DNA, 15 bp, Homo sapiens
ctaatttatggcttt

SEQ ID NO: 333663 - DNA, 15 bp, Homo sapiens
gctaatttatggctt

SEQ ID NO: 333664 - DNA, 15 bp, Homo sapiens
tgctaatttatggct

SEQ ID NO: 333665 - DNA, 15 bp, Homo sapiens
ttgctaatttatggc

SEQ ID NO: 333666 - DNA, 15 bp, Homo sapiens
tttgctaatttatgg

SEQ ID NO: 333667 - DNA, 15 bp, Homo sapiens
atttgctaatttatg

SEQ ID NO: 333668 - DNA, 15 bp, Homo sapiens
gatttgctaatttat

SEQ ID NO: 333669 - DNA, 15 bp, Homo sapiens
tgatttgctaattta

SEQ ID NO: 333670 - DNA, 15 bp, Homo sapiens
atgatttgctaattt

SEQ ID NO: 333671 - DNA, 15 bp, Homo sapiens
gatgatttgctaatt

SEQ ID NO: 333672 - DNA, 15 bp, Homo sapiens
tgatgatttgctaat

SEQ ID NO: 333673 - DNA, 15 bp, Homo sapiens
ttgatgatttgctaa

SEQ ID NO: 333674 - DNA, 15 bp, Homo sapiens
gttgatgatttgcta

SEQ ID NO: 333675 - DNA, 15 bp, Homo sapiens
tgttgatgatttgct

SEQ ID NO: 333676 - DNA, 15 bp, Homo sapiens
atgttgatgatttgc

SEQ ID NO: 333677 - DNA, 15 bp, Homo sapiens
tatgttgatgatttg

SEQ ID NO: 333678 - DNA, 15 bp, Homo sapiens
atatgttgatgattt

SEQ ID NO: 333679 - DNA, 15 bp, Homo sapiens
gatatgttgatgatt

SEQ ID NO: 333680 - DNA, 15 bp, Homo sapiens
tgatatgttgatgat

SEQ ID NO: 333681 - DNA, 15 bp, Homo sapiens
gtgatatgttgatga

SEQ ID NO: 333682 - DNA, 15 bp, Homo sapiens
ggtgatatgttgatg

SEQ ID NO: 333683 - DNA, 15 bp, Homo sapiens
tggtgatatgttgat

SEQ ID NO: 333684 - DNA, 15 bp, Homo sapiens
ctggtgatatgttga

SEQ ID NO: 333685 - DNA, 15 bp, Homo sapiens
cctggtgatatgttg

SEQ ID NO: 333686 - DNA, 15 bp, Homo sapiens
tcctggtgatatgtt

SEQ ID NO: 333687 - DNA, 15 bp, Homo sapiens
ttcctggtgatatgt

SEQ ID NO: 333688 - DNA, 15 bp, Homo sapiens
cttcctggtgatatg

SEQ ID NO: 333689 - DNA, 15 bp, Homo sapiens
ccttcctggtgatat

SEQ ID NO: 333690 - DNA, 15 bp, Homo sapiens
tccttcctggtgata

SEQ ID NO: 333691 - DNA, 15 bp, Homo sapiens
atccttcctggtgat

SEQ ID NO: 333692 - DNA, 15 bp, Homo sapiens
gatccttcctggtga

SEQ ID NO: 333693 - DNA, 15 bp, Homo sapiens
tgatccttcctggtg

SEQ ID NO: 333694 - DNA, 15 bp, Homo sapiens
atgatccttcctggt

SEQ ID NO: 333695 - DNA, 15 bp, Homo sapiens
gatgatccttcctgg

SEQ ID NO: 333696 - DNA, 15 bp, Homo sapiens
agatgatccttcctg

SEQ ID NO: 333697 - DNA, 15 bp, Homo sapiens
cagatgatccttcct

SEQ ID NO: 333698 - DNA, 15 bp, Homo sapiens
ccagatgatccttcc

SEQ ID NO: 333699 - DNA, 15 bp, Homo sapiens
accagatgatccttc

SEQ ID NO: 333700 - DNA, 15 bp, Homo sapiens
taccagatgatcctt

SEQ ID NO: 333701 - DNA, 15 bp, Homo sapiens
ctaccagatgatcct

SEQ ID NO: 333702 - DNA, 15 bp, Homo sapiens
gctaccagatgatcc

SEQ ID NO: 333703 - DNA, 15 bp, Homo sapiens
cgctaccagatgatc

SEQ ID NO: 333704 - DNA, 15 bp, Homo sapiens
tcgctaccagatgat

SEQ ID NO: 333705 - DNA, 15 bp, Homo sapiens
atcgctaccagatga

SEQ ID NO: 333706 - DNA, 15 bp, Homo sapiens
aatcgctaccagatg

SEQ ID NO: 333707 - DNA, 15 bp, Homo sapiens
gaatcgctaccagat

SEQ ID NO: 333708 - DNA, 15 bp, Homo sapiens
agaatcgctaccaga

SEQ ID NO: 333709 - DNA, 15 bp, Homo sapiens
tagaatcgctaccag

SEQ ID NO: 333710 - DNA, 15 bp, Homo sapiens
ctagaatcgctacca

SEQ ID NO: 333711 - DNA, 15 bp, Homo sapiens
actagaatcgctacc

SEQ ID NO: 333712 - DNA, 15 bp, Homo sapiens
gactagaatcgctac

SEQ ID NO: 333713 - DNA, 15 bp, Homo sapiens
tgactagaatcgcta

SEQ ID NO: 333714 - DNA, 15 bp, Homo sapiens
ctgactagaatcgct

SEQ ID NO: 333715 - DNA, 15 bp, Homo sapiens
tctgactagaatcgc

SEQ ID NO: 333716 - DNA, 15 bp, Homo sapiens
ttctgactagaatcg

SEQ ID NO: 333717 - DNA, 15 bp, Homo sapiens
cttctgactagaatc

SEQ ID NO: 333718 - DNA, 15 bp, Homo sapiens
ccttctgactagaat

SEQ ID NO: 333719 - DNA, 15 bp, Homo sapiens
tccttctgactagaa

SEQ ID NO: 333720 - DNA, 15 bp, Homo sapiens
ttccttctgactaga

SEQ ID NO: 333721 - DNA, 15 bp, Homo sapiens
tttccttctgactag

SEQ ID NO: 333722 - DNA, 15 bp, Homo sapiens
gtttccttctgacta

SEQ ID NO: 333723 - DNA, 15 bp, Homo sapiens
tgtttccttctgact

SEQ ID NO: 333724 - DNA, 15 bp, Homo sapiens
gtgtttccttctgac

SEQ ID NO: 333725 - DNA, 15 bp, Homo sapiens
tgtgtttccttctga

SEQ ID NO: 333726 - DNA, 15 bp, Homo sapiens
ctgtgtttccttctg

SEQ ID NO: 333727 - DNA, 15 bp, Homo sapiens
cctgtgtttccttct

SEQ ID NO: 333728 - DNA, 15 bp, Homo sapiens
gcctgtgtttccttc

SEQ ID NO: 333729 - DNA, 15 bp, Homo sapiens
ggcctgtgtttcctt

SEQ ID NO: 333730 - DNA, 15 bp, Homo sapiens
gggcctgtgtttcct

SEQ ID NO: 333731 - DNA, 15 bp, Homo sapiens
ggggcctgtgtttcc

SEQ ID NO: 333732 - DNA, 15 bp, Homo sapiens
tggggcctgtgtttc

SEQ ID NO: 333733 - DNA, 15 bp, Homo sapiens
ttggggcctgtgttt

SEQ ID NO: 333734 - DNA, 15 bp, Homo sapiens
attggggcctgtgtt

SEQ ID NO: 333735 - DNA, 15 bp, Homo sapiens
tattggggcctgtgt

SEQ ID NO: 333736 - DNA, 15 bp, Homo sapiens
ttattggggcctgtg

SEQ ID NO: 333737 - DNA, 15 bp, Homo sapiens
gttattggggcctgt

SEQ ID NO: 333738 - DNA, 15 bp, Homo sapiens
ggttattggggcctg

SEQ ID NO: 333739 - DNA, 15 bp, Homo sapiens
cggttattggggcct

SEQ ID NO: 333740 - DNA, 15 bp, Homo sapiens
tcggttattggggcc

SEQ ID NO: 333741 - DNA, 15 bp, Homo sapiens
atcggttattggggc

SEQ ID NO: 333742 - DNA, 15 bp, Homo sapiens
gatcggttattgggg

SEQ ID NO: 333743 - DNA, 15 bp, Homo sapiens
agatcggttattggg

SEQ ID NO: 333744 - DNA, 15 bp, Homo sapiens
aagatcggttattgg

SEQ ID NO: 333745 - DNA, 15 bp, Homo sapiens
aaagatcggttattg

SEQ ID NO: 333746 - DNA, 15 bp, Homo sapiens
taaagatcggttatt

SEQ ID NO: 333747 - DNA, 15 bp, Homo sapiens
ataaagatcggttat

SEQ ID NO: 333748 - DNA, 15 bp, Homo sapiens
tataaagatcggtta

SEQ ID NO: 333749 - DNA, 15 bp, Homo sapiens
ttataaagatcggtt

SEQ ID NO: 333750 - DNA, 15 bp, Homo sapiens
tttataaagatcggt

SEQ ID NO: 333751 - DNA, 15 bp, Homo sapiens
ctttataaagatcgg

SEQ ID NO: 333752 - DNA, 15 bp, Homo sapiens
tctttataaagatcg

SEQ ID NO: 333753 - DNA, 15 bp, Homo sapiens
atctttataaagatc

SEQ ID NO: 333754 - DNA, 15 bp, Homo sapiens
tatctttataaagat

SEQ ID NO: 333755 - DNA, 15 bp, Homo sapiens
atatctttataaaga

SEQ ID NO: 333756 - DNA, 15 bp, Homo sapiens
catatctttataaag

SEQ ID NO: 333757 - DNA, 15 bp, Homo sapiens
tcatatctttataaa

SEQ ID NO: 333758 - DNA, 15 bp, Homo sapiens
ttcatatctttataa

SEQ ID NO: 333759 - DNA, 15 bp, Homo sapiens
cttcatatctttata

SEQ ID NO: 333760 - DNA, 15 bp, Homo sapiens
tcttcatatctttat

SEQ ID NO: 333761 - DNA, 15 bp, Homo sapiens
ttcttcatatcttta

SEQ ID NO: 333762 - DNA, 15 bp, Homo sapiens
gttcttcatatcttt

SEQ ID NO: 333763 - DNA, 15 bp, Homo sapiens
agttcttcatatctt

SEQ ID NO: 333764 - DNA, 15 bp, Homo sapiens
cagttcttcatatct

SEQ ID NO: 333765 - DNA, 15 bp, Homo sapiens
acagttcttcatatc

SEQ ID NO: 333766 - DNA, 15 bp, Homo sapiens
tacagttcttcatat

SEQ ID NO: 333767 - DNA, 15 bp, Homo sapiens
ctacagttcttcata

SEQ ID NO: 333768 - DNA, 15 bp, Homo sapiens
tctacagttcttcat

SEQ ID NO: 333769 - DNA, 15 bp, Homo sapiens
gtctacagttcttca

SEQ ID NO: 333770 - DNA, 15 bp, Homo sapiens
tgtctacagttcttc

SEQ ID NO: 333771 - DNA, 15 bp, Homo sapiens
ctgtctacagttctt

SEQ ID NO: 333772 - DNA, 15 bp, Homo sapiens
tctgtctacagttct

SEQ ID NO: 333773 - DNA, 15 bp, Homo sapiens
gtctgtctacagttc

SEQ ID NO: 333774 - DNA, 15 bp, Homo sapiens
tgtctgtctacagtt

SEQ ID NO: 333775 - DNA, 15 bp, Homo sapiens
ctgtctgtctacagt

SEQ ID NO: 333776 - DNA, 15 bp, Homo sapiens
tctgtctgtctacag

SEQ ID NO: 333777 - DNA, 15 bp, Homo sapiens
atctgtctgtctaca

SEQ ID NO: 333778 - DNA, 15 bp, Homo sapiens
tatctgtctgtctac

SEQ ID NO: 333779 - DNA, 15 bp, Homo sapiens
gtatctgtctgtcta

SEQ ID NO: 333780 - DNA, 15 bp, Homo sapiens
tgtatctgtctgtct

SEQ ID NO: 333781 - DNA, 15 bp, Homo sapiens
ctgtatctgtctgtc

SEQ ID NO: 333782 - DNA, 15 bp, Homo sapiens
actgtatctgtctgt

SEQ ID NO: 333783 - DNA, 15 bp, Homo sapiens
tactgtatctgtctg

SEQ ID NO: 333784 - DNA, 15 bp, Homo sapiens
ttactgtatctgtct

SEQ ID NO: 333785 - DNA, 15 bp, Homo sapiens
tttactgtatctgtc

SEQ ID NO: 333786 - DNA, 15 bp, Homo sapiens
atttactgtatctgt

SEQ ID NO: 333787 - DNA, 15 bp, Homo sapiens
tatttactgtatctg

SEQ ID NO: 333788 - DNA, 15 bp, Homo sapiens
ttatttactgtatct

SEQ ID NO: 333789 - DNA, 15 bp, Homo sapiens
cttatttactgtatc

SEQ ID NO: 333790 - DNA, 15 bp, Homo sapiens
tcttatttactgtat

SEQ ID NO: 333791 - DNA, 15 bp, Homo sapiens
ttcttatttactgta

SEQ ID NO: 333792 - DNA, 15 bp, Homo sapiens
cttcttatttactgt

SEQ ID NO: 333793 - DNA, 15 bp, Homo sapiens
tcttcttatttactg

SEQ ID NO: 333794 - DNA, 15 bp, Homo sapiens
gtcttcttatttact

SEQ ID NO: 333795 - DNA, 15 bp, Homo sapiens
tgtcttcttatttac

SEQ ID NO: 333796 - DNA, 15 bp, Homo sapiens
ttgtcttcttattta

SEQ ID NO: 333797 - DNA, 15 bp, Homo sapiens
tttgtcttcttattt

SEQ ID NO: 333798 - DNA, 15 bp, Homo sapiens
atttgtcttcttatt

SEQ ID NO: 333799 - DNA, 15 bp, Homo sapiens
tatttgtcttcttat

SEQ ID NO: 333800 - DNA, 15 bp, Homo sapiens
ctatttgtcttctta

SEQ ID NO: 333801 - DNA, 15 bp, Homo sapiens
tctatttgtcttctt

SEQ ID NO: 333802 - DNA, 15 bp, Homo sapiens
atctatttgtcttct

SEQ ID NO: 333803 - DNA, 15 bp, Homo sapiens
tatctatttgtcttc

SEQ ID NO: 333804 - DNA, 15 bp, Homo sapiens
ttatctatttgtctt

SEQ ID NO: 333805 - DNA, 15 bp, Homo sapiens
attatctatttgtct

SEQ ID NO: 333806 - DNA, 15 bp, Homo sapiens
aattatctatttgtc

SEQ ID NO: 333807 - DNA, 15 bp, Homo sapiens
gaattatctatttgt

SEQ ID NO: 333808 - DNA, 15 bp, Homo sapiens
tgaattatctatttg

SEQ ID NO: 333809 - DNA, 15 bp, Homo sapiens
ttgaattatctattt

SEQ ID NO: 333810 - DNA, 15 bp, Homo sapiens
cttgaattatctatt

SEQ ID NO: 333811 - DNA, 15 bp, Homo sapiens
acttgaattatctat

SEQ ID NO: 333812 - DNA, 15 bp, Homo sapiens
aacttgaattatcta

SEQ ID NO: 333813 - DNA, 15 bp, Homo sapiens
caacttgaattatct

SEQ ID NO: 333814 - DNA, 15 bp, Homo sapiens
tcaacttgaattatc

SEQ ID NO: 333815 - DNA, 15 bp, Homo sapiens
gtcaacttgaattat

SEQ ID NO: 333816 - DNA, 15 bp, Homo sapiens
tgtcaacttgaatta

SEQ ID NO: 333817 - DNA, 15 bp, Homo sapiens
ctgtcaacttgaatt

SEQ ID NO: 333818 - DNA, 15 bp, Homo sapiens
tctgtcaacttgaat

SEQ ID NO: 333819 - DNA, 15 bp, Homo sapiens
ttctgtcaacttgaa

SEQ ID NO: 333820 - DNA, 15 bp, Homo sapiens
gttctgtcaacttga

SEQ ID NO: 333821 - DNA, 15 bp, Homo sapiens
tgttctgtcaacttg

SEQ ID NO: 333822 - DNA, 15 bp, Homo sapiens
atgttctgtcaactt

SEQ ID NO: 333823 - DNA, 15 bp, Homo sapiens
gatgttctgtcaact

SEQ ID NO: 333824 - DNA, 15 bp, Homo sapiens
agatgttctgtcaac

SEQ ID NO: 333825 - DNA, 15 bp, Homo sapiens
aagatgttctgtcaa

SEQ ID NO: 333826 - DNA, 15 bp, Homo sapiens
caagatgttctgtca

SEQ ID NO: 333827 - DNA, 15 bp, Homo sapiens
ccaagatgttctgtc

SEQ ID NO: 333828 - DNA, 15 bp, Homo sapiens
tccaagatgttctgt

SEQ ID NO: 333829 - DNA, 15 bp, Homo sapiens
gtccaagatgttctg

SEQ ID NO: 333830 - DNA, 15 bp, Homo sapiens
agtccaagatgttct

SEQ ID NO: 333831 - DNA, 15 bp, Homo sapiens
cagtccaagatgttc

SEQ ID NO: 333832 - DNA, 15 bp, Homo sapiens
tcagtccaagatgtt

SEQ ID NO: 333833 - DNA, 15 bp, Homo sapiens
atcagtccaagatgt

SEQ ID NO: 333834 - DNA, 15 bp, Homo sapiens
aatcagtccaagatg

SEQ ID NO: 333835 - DNA, 15 bp, Homo sapiens
taatcagtccaagat

SEQ ID NO: 333836 - DNA, 15 bp, Homo sapiens
ctaatcagtccaaga

SEQ ID NO: 333837 - DNA, 15 bp, Homo sapiens
cctaatcagtccaag

SEQ ID NO: 333838 - DNA, 15 bp, Homo sapiens
gcctaatcagtccaa

SEQ ID NO: 333839 - DNA, 15 bp, Homo sapiens
tgcctaatcagtcca

SEQ ID NO: 333840 - DNA, 15 bp, Homo sapiens
atgcctaatcagtcc

SEQ ID NO: 333841 - DNA, 15 bp, Homo sapiens
aatgcctaatcagtc

SEQ ID NO: 333842 - DNA, 15 bp, Homo sapiens
gaatgcctaatcagt

SEQ ID NO: 333843 - DNA, 15 bp, Homo sapiens
agaatgcctaatcag

SEQ ID NO: 333844 - DNA, 15 bp, Homo sapiens
cagaatgcctaatca

SEQ ID NO: 333845 - DNA, 15 bp, Homo sapiens
gcagaatgcctaatc

SEQ ID NO: 333846 - DNA, 15 bp, Homo sapiens
agcagaatgcctaat

SEQ ID NO: 333847 - DNA, 15 bp, Homo sapiens
aagcagaatgcctaa

SEQ ID NO: 333848 - DNA, 15 bp, Homo sapiens
aaagcagaatgccta

SEQ ID NO: 333849 - DNA, 15 bp, Homo sapiens
caaagcagaatgcct

SEQ ID NO: 333850 - DNA, 15 bp, Homo sapiens
tcaaagcagaatgcc

SEQ ID NO: 333851 - DNA, 15 bp, Homo sapiens
atcaaagcagaatgc

SEQ ID NO: 333852 - DNA, 15 bp, Homo sapiens
aatcaaagcagaatg

SEQ ID NO: 333853 - DNA, 15 bp, Homo sapiens
taatcaaagcagaat

SEQ ID NO: 333854 - DNA, 15 bp, Homo sapiens
ctaatcaaagcagaa

SEQ ID NO: 333855 - DNA, 15 bp, Homo sapiens
gctaatcaaagcaga

SEQ ID NO: 333856 - DNA, 15 bp, Homo sapiens
tgctaatcaaagcag

SEQ ID NO: 333857 - DNA, 15 bp, Homo sapiens
atgctaatcaaagca

SEQ ID NO: 333858 - DNA, 15 bp, Homo sapiens
aatgctaatcaaagc

SEQ ID NO: 333859 - DNA, 15 bp, Homo sapiens
taatgctaatcaaag

SEQ ID NO: 333860 - DNA, 15 bp, Homo sapiens
ttaatgctaatcaaa

SEQ ID NO: 333861 - DNA, 15 bp, Homo sapiens
tttaatgctaatcaa

SEQ ID NO: 333862 - DNA, 15 bp, Homo sapiens
gtttaatgctaatca

SEQ ID NO: 333863 - DNA, 15 bp, Homo sapiens
agtttaatgctaatc

SEQ ID NO: 333864 - DNA, 15 bp, Homo sapiens
aagtttaatgctaat

SEQ ID NO: 333865 - DNA, 15 bp, Homo sapiens
gaagtttaatgctaa

SEQ ID NO: 333866 - DNA, 15 bp, Homo sapiens
agaagtttaatgcta

SEQ ID NO: 333867 - DNA, 15 bp, Homo sapiens
aagaagtttaatgct

SEQ ID NO: 333868 - DNA, 15 bp, Homo sapiens
caagaagtttaatgc

SEQ ID NO: 333869 - DNA, 15 bp, Homo sapiens
ccaagaagtttaatg

SEQ ID NO: 333870 - DNA, 15 bp, Homo sapiens
cccaagaagtttaat

SEQ ID NO: 333871 - DNA, 15 bp, Homo sapiens
tcccaagaagtttaa

SEQ ID NO: 333872 - DNA, 15 bp, Homo sapiens
ttcccaagaagttta

SEQ ID NO: 333873 - DNA, 15 bp, Homo sapiens
gttcccaagaagttt

SEQ ID NO: 333874 - DNA, 15 bp, Homo sapiens
tgttcccaagaagtt

SEQ ID NO: 333875 - DNA, 15 bp, Homo sapiens
ctgttcccaagaagt

SEQ ID NO: 333876 - DNA, 15 bp, Homo sapiens
cctgttcccaagaag

SEQ ID NO: 333877 - DNA, 15 bp, Homo sapiens
ccctgttcccaagaa

SEQ ID NO: 333878 - DNA, 15 bp, Homo sapiens
tccctgttcccaaga

SEQ ID NO: 333879 - DNA, 15 bp, Homo sapiens
ttccctgttcccaag

SEQ ID NO: 333880 - DNA, 15 bp, Homo sapiens
tttccctgttcccaa

SEQ ID NO: 333881 - DNA, 15 bp, Homo sapiens
ttttccctgttccca

SEQ ID NO: 333882 - DNA, 15 bp, Homo sapiens
gttttccctgttccc

SEQ ID NO: 333883 - DNA, 15 bp, Homo sapiens
tgttttccctgttcc

SEQ ID NO: 333884 - DNA, 15 bp, Homo sapiens
ttgttttccctgttc

SEQ ID NO: 333885 - DNA, 15 bp, Homo sapiens
tttgttttccctgtt

SEQ ID NO: 333886 - DNA, 15 bp, Homo sapiens
ttttgttttccctgt

SEQ ID NO: 333887 - DNA, 15 bp, Homo sapiens
tttttgttttccctg

SEQ ID NO: 333888 - DNA, 15 bp, Homo sapiens
ttttttgttttccct

SEQ ID NO: 333889 - DNA, 15 bp, Homo sapiens
attttttgttttccc

SEQ ID NO: 333890 - DNA, 15 bp, Homo sapiens
cattttttgttttcc

SEQ ID NO: 333891 - DNA, 15 bp, Homo sapiens
tcattttttgttttc

SEQ ID NO: 333892 - DNA, 15 bp, Homo sapiens
ctcattttttgtttt

SEQ ID NO: 333893 - DNA, 15 bp, Homo sapiens
gctcattttttgttt

SEQ ID NO: 333894 - DNA, 15 bp, Homo sapiens
agctcattttttgtt

SEQ ID NO: 333895 - DNA, 15 bp, Homo sapiens
aagctcattttttgt

SEQ ID NO: 333896 - DNA, 15 bp, Homo sapiens
caagctcattttttg

SEQ ID NO: 333897 - DNA, 15 bp, Homo sapiens
gcaagctcatttttt

SEQ ID NO: 333898 - DNA, 15 bp, Homo sapiens
ggcaagctcattttt

SEQ ID NO: 333899 - DNA, 15 bp, Homo sapiens
gggcaagctcatttt

SEQ ID NO: 333900 - DNA, 15 bp, Homo sapiens
agggcaagctcattt

SEQ ID NO: 333901 - DNA, 15 bp, Homo sapiens
tagggcaagctcatt

SEQ ID NO: 333902 - DNA, 15 bp, Homo sapiens
ttagggcaagctcat

SEQ ID NO: 333903 - DNA, 15 bp, Homo sapiens
attagggcaagctca

SEQ ID NO: 333904 - DNA, 15 bp, Homo sapiens
tattagggcaagctc

SEQ ID NO: 333905 - DNA, 15 bp, Homo sapiens
gtattagggcaagct

SEQ ID NO: 333906 - DNA, 15 bp, Homo sapiens
agtattagggcaagc

SEQ ID NO: 333907 - DNA, 15 bp, Homo sapiens
aagtattagggcaag

SEQ ID NO: 333908 - DNA, 15 bp, Homo sapiens
aaagtattagggcaa

SEQ ID NO: 333909 - DNA, 15 bp, Homo sapiens
caaagtattagggca

SEQ ID NO: 333910 - DNA, 15 bp, Homo sapiens
ccaaagtattagggc

SEQ ID NO: 333911 - DNA, 15 bp, Homo sapiens
tccaaagtattaggg

SEQ ID NO: 333912 - DNA, 15 bp, Homo sapiens
ttccaaagtattagg

SEQ ID NO: 333913 - DNA, 15 bp, Homo sapiens
tttccaaagtattag

SEQ ID NO: 333914 - DNA, 15 bp, Homo sapiens
ttttccaaagtatta

SEQ ID NO: 333915 - DNA, 15 bp, Homo sapiens
tttttccaaagtatt

SEQ ID NO: 333916 - DNA, 15 bp, Homo sapiens
atttttccaaagtat

SEQ ID NO: 333917 - DNA, 15 bp, Homo sapiens
catttttccaaagta

SEQ ID NO: 333918 - DNA, 15 bp, Homo sapiens
tcatttttccaaagt

SEQ ID NO: 333919 - DNA, 15 bp, Homo sapiens
gtcatttttccaaag

SEQ ID NO: 333920 - DNA, 15 bp, Homo sapiens
ggtcatttttccaaa

SEQ ID NO: 333921 - DNA, 15 bp, Homo sapiens
aggtcatttttccaa

SEQ ID NO: 333922 - DNA, 15 bp, Homo sapiens
gaggtcatttttcca

SEQ ID NO: 333923 - DNA, 15 bp, Homo sapiens
agaggtcatttttcc

SEQ ID NO: 333924 - DNA, 15 bp, Homo sapiens
aagaggtcatttttc

SEQ ID NO: 333925 - DNA, 15 bp, Homo sapiens
caagaggtcattttt

SEQ ID NO: 333926 - DNA, 15 bp, Homo sapiens
tcaagaggtcatttt

SEQ ID NO: 333927 - DNA, 15 bp, Homo sapiens
gtcaagaggtcattt

SEQ ID NO: 333928 - DNA, 15 bp, Homo sapiens
agtcaagaggtcatt

SEQ ID NO: 333929 - DNA, 15 bp, Homo sapiens
tagtcaagaggtcat

SEQ ID NO: 333930 - DNA, 15 bp, Homo sapiens
gtagtcaagaggtca

SEQ ID NO: 333931 - DNA, 15 bp, Homo sapiens
agtagtcaagaggtc

SEQ ID NO: 333932 - DNA, 15 bp, Homo sapiens
aagtagtcaagaggt

SEQ ID NO: 333933 - DNA, 15 bp, Homo sapiens
gaagtagtcaagagg

SEQ ID NO: 333934 - DNA, 15 bp, Homo sapiens
agaagtagtcaagag

SEQ ID NO: 333935 - DNA, 15 bp, Homo sapiens
cagaagtagtcaaga

SEQ ID NO: 333936 - DNA, 15 bp, Homo sapiens
tcagaagtagtcaag

SEQ ID NO: 333937 - DNA, 15 bp, Homo sapiens
ttcagaagtagtcaa

SEQ ID NO: 333938 - DNA, 15 bp, Homo sapiens
tttcagaagtagtca

SEQ ID NO: 333939 - DNA, 15 bp, Homo sapiens
gtttcagaagtagtc

SEQ ID NO: 333940 - DNA, 15 bp, Homo sapiens
cgtttcagaagtagt

SEQ ID NO: 333941 - DNA, 15 bp, Homo sapiens
acgtttcagaagtag

SEQ ID NO: 333942 - DNA, 15 bp, Homo sapiens
cacgtttcagaagta

SEQ ID NO: 333943 - DNA, 15 bp, Homo sapiens
ccacgtttcagaagt

SEQ ID NO: 333944 - DNA, 15 bp, Homo sapiens
accacgtttcagaag

SEQ ID NO: 333945 - DNA, 15 bp, Homo sapiens
caccacgtttcagaa

SEQ ID NO: 333946 - DNA, 15 bp, Homo sapiens
gcaccacgtttcaga

SEQ ID NO: 333947 - DNA, 15 bp, Homo sapiens
agcaccacgtttcag

SEQ ID NO: 333948 - DNA, 15 bp, Homo sapiens
cagcaccacgtttca

SEQ ID NO: 333949 - DNA, 15 bp, Homo sapiens
tcagcaccacgtttc

SEQ ID NO: 333950 - DNA, 15 bp, Homo sapiens
ctcagcaccacgttt

SEQ ID NO: 333951 - DNA, 15 bp, Homo sapiens
cctcagcaccacgtt

SEQ ID NO: 333952 - DNA, 15 bp, Homo sapiens
ccctcagcaccacgt

SEQ ID NO: 333953 - DNA, 15 bp, Homo sapiens
cccctcagcaccacg

SEQ ID NO: 333954 - DNA, 15 bp, Homo sapiens
acccctcagcaccac

SEQ ID NO: 333955 - DNA, 15 bp, Homo sapiens
tacccctcagcacca

SEQ ID NO: 333956 - DNA, 15 bp, Homo sapiens
ctacccctcagcacc

SEQ ID NO: 333957 - DNA, 15 bp, Homo sapiens
tctacccctcagcac

SEQ ID NO: 333958 - DNA, 15 bp, Homo sapiens
atctacccctcagca

SEQ ID NO: 333959 - DNA, 15 bp, Homo sapiens
tatctacccctcagc

SEQ ID NO: 333960 - DNA, 15 bp, Homo sapiens
gtatctacccctcag

SEQ ID NO: 333961 - DNA, 15 bp, Homo sapiens
ggtatctacccctca

SEQ ID NO: 333962 - DNA, 15 bp, Homo sapiens
gggtatctacccctc

SEQ ID NO: 333963 - DNA, 15 bp, Homo sapiens
tgggtatctacccct

SEQ ID NO: 333964 - DNA, 15 bp, Homo sapiens
ttgggtatctacccc

SEQ ID NO: 333965 - DNA, 15 bp, Homo sapiens
tttgggtatctaccc

SEQ ID NO: 333966 - DNA, 15 bp, Homo sapiens
ctttgggtatctacc

SEQ ID NO: 333967 - DNA, 15 bp, Homo sapiens
gctttgggtatctac

SEQ ID NO: 333968 - DNA, 15 bp, Homo sapiens
cgctttgggtatcta

SEQ ID NO: 333969 - DNA, 15 bp, Homo sapiens
gcgctttgggtatct

SEQ ID NO: 333970 - DNA, 15 bp, Homo sapiens
agcgctttgggtatc

SEQ ID NO: 333971 - DNA, 15 bp, Homo sapiens
aagcgctttgggtat

SEQ ID NO: 333972 - DNA, 15 bp, Homo sapiens
caagcgctttgggta

SEQ ID NO: 333973 - DNA, 15 bp, Homo sapiens
acaagcgctttgggt

SEQ ID NO: 333974 - DNA, 15 bp, Homo sapiens
gacaagcgctttggg

SEQ ID NO: 333975 - DNA, 15 bp, Homo sapiens
tgacaagcgctttgg

SEQ ID NO: 333976 - DNA, 15 bp, Homo sapiens
atgacaagcgctttg

SEQ ID NO: 333977 - DNA, 15 bp, Homo sapiens
aatgacaagcgcttt

SEQ ID NO: 333978 - DNA, 15 bp, Homo sapiens
taatgacaagcgctt

SEQ ID NO: 333979 - DNA, 15 bp, Homo sapiens
ctaatgacaagcgct

SEQ ID NO: 333980 - DNA, 15 bp, Homo sapiens
tctaatgacaagcgc

SEQ ID NO: 333981 - DNA, 15 bp, Homo sapiens
atctaatgacaagcg

SEQ ID NO: 333982 - DNA, 15 bp, Homo sapiens
catctaatgacaagc

SEQ ID NO: 333983 - DNA, 15 bp, Homo sapiens
gcatctaatgacaag

SEQ ID NO: 333984 - DNA, 15 bp, Homo sapiens
ggcatctaatgacaa

SEQ ID NO: 333985 - DNA, 15 bp, Homo sapiens
tggcatctaatgaca

SEQ ID NO: 333986 - DNA, 15 bp, Homo sapiens
atggcatctaatgac

SEQ ID NO: 333987 - DNA, 15 bp, Homo sapiens
catggcatctaatga

SEQ ID NO: 333988 - DNA, 15 bp, Homo sapiens
acatggcatctaatg

SEQ ID NO: 333989 - DNA, 15 bp, Homo sapiens
gacatggcatctaat

SEQ ID NO: 333990 - DNA, 15 bp, Homo sapiens
agacatggcatctaa

SEQ ID NO: 333991 - DNA, 15 bp, Homo sapiens
aagacatggcatcta

SEQ ID NO: 333992 - DNA, 15 bp, Homo sapiens
gaagacatggcatct

SEQ ID NO: 333993 - DNA, 15 bp, Homo sapiens
agaagacatggcatc

SEQ ID NO: 333994 - DNA, 15 bp, Homo sapiens
cagaagacatggcat

SEQ ID NO: 333995 - DNA, 15 bp, Homo sapiens
tcagaagacatggca

SEQ ID NO: 333996 - DNA, 15 bp, Homo sapiens
atcagaagacatggc

SEQ ID NO: 333997 - DNA, 15 bp, Homo sapiens
catcagaagacatgg

SEQ ID NO: 333998 - DNA, 15 bp, Homo sapiens
acatcagaagacatg

SEQ ID NO: 333999 - DNA, 15 bp, Homo sapiens
cacatcagaagacat

SEQ ID NO: 334000 - DNA, 15 bp, Homo sapiens
tcacatcagaagaca

SEQ ID NO: 334001 - DNA, 15 bp, Homo sapiens
atcacatcagaagac

SEQ ID NO: 334002 - DNA, 15 bp, Homo sapiens
catcacatcagaaga

SEQ ID NO: 334003 - DNA, 15 bp, Homo sapiens
acatcacatcagaag

SEQ ID NO: 334004 - DNA, 15 bp, Homo sapiens
cacatcacatcagaa

SEQ ID NO: 334005 - DNA, 15 bp, Homo sapiens
gcacatcacatcaga

SEQ ID NO: 334006 - DNA, 15 bp, Homo sapiens
agcacatcacatcag

SEQ ID NO: 334007 - DNA, 15 bp, Homo sapiens
tagcacatcacatca

SEQ ID NO: 334008 - DNA, 15 bp, Homo sapiens
ctagcacatcacatc

SEQ ID NO: 334009 - DNA, 15 bp, Homo sapiens
cctagcacatcacat

SEQ ID NO: 334010 - DNA, 15 bp, Homo sapiens
acctagcacatcaca

SEQ ID NO: 334011 - DNA, 15 bp, Homo sapiens
tacctagcacatcac

SEQ ID NO: 334012 - DNA, 15 bp, Homo sapiens
atacctagcacatca

SEQ ID NO: 334013 - DNA, 15 bp, Homo sapiens
gatacctagcacatc

SEQ ID NO: 334014 - DNA, 15 bp, Homo sapiens
ggatacctagcacat

SEQ ID NO: 334015 - DNA, 15 bp, Homo sapiens
gggatacctagcaca

SEQ ID NO: 334016 - DNA, 15 bp, Homo sapiens
agggatacctagcac

SEQ ID NO: 334017 - DNA, 15 bp, Homo sapiens
aagggatacctagca

SEQ ID NO: 334018 - DNA, 15 bp, Homo sapiens
gaagggatacctagc

SEQ ID NO: 334019 - DNA, 15 bp, Homo sapiens
ggaagggatacctag

SEQ ID NO: 334020 - DNA, 15 bp, Homo sapiens
aggaagggataccta

SEQ ID NO: 334021 - DNA, 15 bp, Homo sapiens
caggaagggatacct

SEQ ID NO: 334022 - DNA, 15 bp, Homo sapiens
tcaggaagggatacc

SEQ ID NO: 334023 - DNA, 15 bp, Homo sapiens
atcaggaagggatac

SEQ ID NO: 334024 - DNA, 15 bp, Homo sapiens
catcaggaagggata

SEQ ID NO: 334025 - DNA, 15 bp, Homo sapiens
tcatcaggaagggat

SEQ ID NO: 334026 - DNA, 15 bp, Homo sapiens
ctcatcaggaaggga

SEQ ID NO: 334027 - DNA, 15 bp, Homo sapiens
tctcatcaggaaggg

SEQ ID NO: 334028 - DNA, 15 bp, Homo sapiens
ctctcatcaggaagg

SEQ ID NO: 334029 - DNA, 15 bp, Homo sapiens
cctctcatcaggaag

SEQ ID NO: 334030 - DNA, 15 bp, Homo sapiens
ccctctcatcaggaa

SEQ ID NO: 334031 - DNA, 15 bp, Homo sapiens
cccctctcatcagga

SEQ ID NO: 334032 - DNA, 15 bp, Homo sapiens
acccctctcatcagg

SEQ ID NO: 334033 - DNA, 15 bp, Homo sapiens
gacccctctcatcag

SEQ ID NO: 334034 - DNA, 15 bp, Homo sapiens
agacccctctcatca

SEQ ID NO: 334035 - DNA, 15 bp, Homo sapiens
aagacccctctcatc

SEQ ID NO: 334036 - DNA, 15 bp, Homo sapiens
caagacccctctcat

SEQ ID NO: 334037 - DNA, 15 bp, Homo sapiens
ccaagacccctctca

SEQ ID NO: 334038 - DNA, 15 bp, Homo sapiens
accaagacccctctc

SEQ ID NO: 334039 - DNA, 15 bp, Homo sapiens
caccaagacccctct

SEQ ID NO: 334040 - DNA, 15 bp, Homo sapiens
ccaccaagacccctc

SEQ ID NO: 334041 - DNA, 15 bp, Homo sapiens
cccaccaagacccct

SEQ ID NO: 334042 - DNA, 15 bp, Homo sapiens
gcccaccaagacccc

SEQ ID NO: 334043 - DNA, 15 bp, Homo sapiens
cgcccaccaagaccc

SEQ ID NO: 334044 - DNA, 15 bp, Homo sapiens
acgcccaccaagacc

SEQ ID NO: 334045 - DNA, 15 bp, Homo sapiens
cacgcccaccaagac

SEQ ID NO: 334046 - DNA, 15 bp, Homo sapiens
ccacgcccaccaaga

SEQ ID NO: 334047 - DNA, 15 bp, Homo sapiens
cccacgcccaccaag

SEQ ID NO: 334048 - DNA, 15 bp, Homo sapiens
tcccacgcccaccaa

SEQ ID NO: 334049 - DNA, 15 bp, Homo sapiens
gtcccacgcccacca

SEQ ID NO: 334050 - DNA, 15 bp, Homo sapiens
tgtcccacgcccacc

SEQ ID NO: 334051 - DNA, 15 bp, Homo sapiens
atgtcccacgcccac

SEQ ID NO: 334052 - DNA, 15 bp, Homo sapiens
catgtcccacgccca

SEQ ID NO: 334053 - DNA, 15 bp, Homo sapiens
ccatgtcccacgccc

SEQ ID NO: 334054 - DNA, 15 bp, Homo sapiens
cccatgtcccacgcc

SEQ ID NO: 334055 - DNA, 15 bp, Homo sapiens
gcccatgtcccacgc

SEQ ID NO: 334056 - DNA, 15 bp, Homo sapiens
tgcccatgtcccacg

SEQ ID NO: 334057 - DNA, 15 bp, Homo sapiens
gtgcccatgtcccac

SEQ ID NO: 334058 - DNA, 15 bp, Homo sapiens
agtgcccatgtccca

SEQ ID NO: 334059 - DNA, 15 bp, Homo sapiens
aagtgcccatgtccc

SEQ ID NO: 334060 - DNA, 15 bp, Homo sapiens
gaagtgcccatgtcc

SEQ ID NO: 334061 - DNA, 15 bp, Homo sapiens
agaagtgcccatgtc

SEQ ID NO: 334062 - DNA, 15 bp, Homo sapiens
aagaagtgcccatgt

SEQ ID NO: 334063 - DNA, 15 bp, Homo sapiens
aaagaagtgcccatg

SEQ ID NO: 334064 - DNA, 15 bp, Homo sapiens
gaaagaagtgcccat

SEQ ID NO: 334065 - DNA, 15 bp, Homo sapiens
agaaagaagtgccca

SEQ ID NO: 334066 - DNA, 15 bp, Homo sapiens
aagaaagaagtgccc

SEQ ID NO: 334067 - DNA, 15 bp, Homo sapiens
caagaaagaagtgcc

SEQ ID NO: 334068 - DNA, 15 bp, Homo sapiens
ccaagaaagaagtgc

SEQ ID NO: 334069 - DNA, 15 bp, Homo sapiens
gccaagaaagaagtg

SEQ ID NO: 334070 - DNA, 15 bp, Homo sapiens
tgccaagaaagaagt

SEQ ID NO: 334071 - DNA, 15 bp, Homo sapiens
atgccaagaaagaag

SEQ ID NO: 334072 - DNA, 15 bp, Homo sapiens
gatgccaagaaagaa

SEQ ID NO: 334073 - DNA, 15 bp, Homo sapiens
agatgccaagaaaga

SEQ ID NO: 334074 - DNA, 15 bp, Homo sapiens
cagatgccaagaaag

SEQ ID NO: 334075 - DNA, 15 bp, Homo sapiens
acagatgccaagaaa

SEQ ID NO: 334076 - DNA, 15 bp, Homo sapiens
aacagatgccaagaa

SEQ ID NO: 334077 - DNA, 15 bp, Homo sapiens
aaacagatgccaaga

SEQ ID NO: 334078 - DNA, 15 bp, Homo sapiens
aaaacagatgccaag

SEQ ID NO: 334079 - DNA, 15 bp, Homo sapiens
caaaacagatgccaa

SEQ ID NO: 334080 - DNA, 15 bp, Homo sapiens
ccaaaacagatgcca

SEQ ID NO: 334081 - DNA, 15 bp, Homo sapiens
tccaaaacagatgcc

SEQ ID NO: 334082 - DNA, 15 bp, Homo sapiens
atccaaaacagatgc

SEQ ID NO: 334083 - DNA, 15 bp, Homo sapiens
aatccaaaacagatg

SEQ ID NO: 334084 - DNA, 15 bp, Homo sapiens
gaatccaaaacagat

SEQ ID NO: 334085 - DNA, 15 bp, Homo sapiens
ggaatccaaaacaga

SEQ ID NO: 334086 - DNA, 15 bp, Homo sapiens
aggaatccaaaacag

SEQ ID NO: 334087 - DNA, 15 bp, Homo sapiens
gaggaatccaaaaca

SEQ ID NO: 334088 - DNA, 15 bp, Homo sapiens
agaggaatccaaaac

SEQ ID NO: 334089 - DNA, 15 bp, Homo sapiens
tagaggaatccaaaa

SEQ ID NO: 334090 - DNA, 15 bp, Homo sapiens
ttagaggaatccaaa

SEQ ID NO: 334091 - DNA, 15 bp, Homo sapiens
cttagaggaatccaa

SEQ ID NO: 334092 - DNA, 15 bp, Homo sapiens
gcttagaggaatcca

SEQ ID NO: 334093 - DNA, 15 bp, Homo sapiens
ggcttagaggaatcc

SEQ ID NO: 334094 - DNA, 15 bp, Homo sapiens
tggcttagaggaatc

SEQ ID NO: 334095 - DNA, 15 bp, Homo sapiens
atggcttagaggaat

SEQ ID NO: 334096 - DNA, 15 bp, Homo sapiens
tatggcttagaggaa

SEQ ID NO: 334097 - DNA, 15 bp, Homo sapiens
atatggcttagagga

SEQ ID NO: 334098 - DNA, 15 bp, Homo sapiens
gatatggcttagagg

SEQ ID NO: 334099 - DNA, 15 bp, Homo sapiens
agatatggcttagag

SEQ ID NO: 334100 - DNA, 15 bp, Homo sapiens
aagatatggcttaga

SEQ ID NO: 334101 - DNA, 15 bp, Homo sapiens
gaagatatggcttag

SEQ ID NO: 334102 - DNA, 15 bp, Homo sapiens
tgaagatatggctta

SEQ ID NO: 334103 - DNA, 15 bp, Homo sapiens
ctgaagatatggctt

SEQ ID NO: 334104 - DNA, 15 bp, Homo sapiens
actgaagatatggct

SEQ ID NO: 334105 - DNA, 15 bp, Homo sapiens
gactgaagatatggc

SEQ ID NO: 334106 - DNA, 15 bp, Homo sapiens
ggactgaagatatgg

SEQ ID NO: 334107 - DNA, 15 bp, Homo sapiens
gggactgaagatatg

SEQ ID NO: 334108 - DNA, 15 bp, Homo sapiens
agggactgaagatat

SEQ ID NO: 334109 - DNA, 15 bp, Homo sapiens
aagggactgaagata

SEQ ID NO: 334110 - DNA, 15 bp, Homo sapiens
aaagggactgaagat

SEQ ID NO: 334111 - DNA, 15 bp, Homo sapiens
gaaagggactgaaga

SEQ ID NO: 334112 - DNA, 15 bp, Homo sapiens
tgaaagggactgaag

SEQ ID NO: 334113 - DNA, 15 bp, Homo sapiens
ttgaaagggactgaa

SEQ ID NO: 334114 - DNA, 15 bp, Homo sapiens
tttgaaagggactga

SEQ ID NO: 334115 - DNA, 15 bp, Homo sapiens
gtttgaaagggactg

SEQ ID NO: 334116 - DNA, 15 bp, Homo sapiens
agtttgaaagggact

SEQ ID NO: 334117 - DNA, 15 bp, Homo sapiens
aagtttgaaagggac

SEQ ID NO: 334118 - DNA, 15 bp, Homo sapiens
caagtttgaaaggga

SEQ ID NO: 334119 - DNA, 15 bp, Homo sapiens
tcaagtttgaaaggg

SEQ ID NO: 334120 - DNA, 15 bp, Homo sapiens
ttcaagtttgaaagg

SEQ ID NO: 334121 - DNA, 15 bp, Homo sapiens
cttcaagtttgaaag

SEQ ID NO: 334122 - DNA, 15 bp, Homo sapiens
gcttcaagtttgaaa

SEQ ID NO: 334123 - DNA, 15 bp, Homo sapiens
agcttcaagtttgaa

SEQ ID NO: 334124 - DNA, 15 bp, Homo sapiens
gagcttcaagtttga

SEQ ID NO: 334125 - DNA, 15 bp, Homo sapiens
agagcttcaagtttg

SEQ ID NO: 334126 - DNA, 15 bp, Homo sapiens
tagagcttcaagttt

SEQ ID NO: 334127 - DNA, 15 bp, Homo sapiens
atagagcttcaagtt

SEQ ID NO: 334128 - DNA, 15 bp, Homo sapiens
aatagagcttcaagt

SEQ ID NO: 334129 - DNA, 15 bp, Homo sapiens
aaatagagcttcaag

SEQ ID NO: 334130 - DNA, 15 bp, Homo sapiens
taaatagagcttcaa

SEQ ID NO: 334131 - DNA, 15 bp, Homo sapiens
ttaaatagagcttca

SEQ ID NO: 334132 - DNA, 15 bp, Homo sapiens
tttaaatagagcttc

SEQ ID NO: 334133 - DNA, 15 bp, Homo sapiens
ctttaaatagagctt

SEQ ID NO: 334134 - DNA, 15 bp, Homo sapiens
tctttaaatagagct

SEQ ID NO: 334135 - DNA, 15 bp, Homo sapiens
ctctttaaatagagc

SEQ ID NO: 334136 - DNA, 15 bp, Homo sapiens
tctctttaaatagag

SEQ ID NO: 334137 - DNA, 15 bp, Homo sapiens
gtctctttaaataga

SEQ ID NO: 334138 - DNA, 15 bp, Homo sapiens
agtctctttaaatag

SEQ ID NO: 334139 - DNA, 15 bp, Homo sapiens
aagtctctttaaata

SEQ ID NO: 334140 - DNA, 15 bp, Homo sapiens
caagtctctttaaat

SEQ ID NO: 334141 - DNA, 15 bp, Homo sapiens
ccaagtctctttaaa

SEQ ID NO: 334142 - DNA, 15 bp, Homo sapiens
tccaagtctctttaa

SEQ ID NO: 334143 - DNA, 15 bp, Homo sapiens
ttccaagtctcttta

SEQ ID NO: 334144 - DNA, 15 bp, Homo sapiens
cttccaagtctcttt

SEQ ID NO: 334145 - DNA, 15 bp, Homo sapiens
gcttccaagtctctt

SEQ ID NO: 334146 - DNA, 15 bp, Homo sapiens
tgcttccaagtctct

SEQ ID NO: 334147 - DNA, 15 bp, Homo sapiens
atgcttccaagtctc

SEQ ID NO: 334148 - DNA, 15 bp, Homo sapiens
tatgcttccaagtct

SEQ ID NO: 334149 - DNA, 15 bp, Homo sapiens
atatgcttccaagtc

SEQ ID NO: 334150 - DNA, 15 bp, Homo sapiens
aatatgcttccaagt

SEQ ID NO: 334151 - DNA, 15 bp, Homo sapiens
taatatgcttccaag

SEQ ID NO: 334152 - DNA, 15 bp, Homo sapiens
ttaatatgcttccaa

SEQ ID NO: 334153 - DNA, 15 bp, Homo sapiens
tttaatatgcttcca

SEQ ID NO: 334154 - DNA, 15 bp, Homo sapiens
atttaatatgcttcc

SEQ ID NO: 334155 - DNA, 15 bp, Homo sapiens
gatttaatatgcttc

SEQ ID NO: 334156 - DNA, 15 bp, Homo sapiens
tgatttaatatgctt

SEQ ID NO: 334157 - DNA, 15 bp, Homo sapiens
ttgatttaatatgct

SEQ ID NO: 334158 - DNA, 15 bp, Homo sapiens
attgatttaatatgc

SEQ ID NO: 334159 - DNA, 15 bp, Homo sapiens
aattgatttaatatg

SEQ ID NO: 334160 - DNA, 15 bp, Homo sapiens
aaattgatttaatat

SEQ ID NO: 334161 - DNA, 15 bp, Homo sapiens
gaaattgatttaata

SEQ ID NO: 334162 - DNA, 15 bp, Homo sapiens
ggaaattgatttaat

SEQ ID NO: 334163 - DNA, 15 bp, Homo sapiens
aggaaattgatttaa

SEQ ID NO: 334164 - DNA, 15 bp, Homo sapiens
caggaaattgattta

SEQ ID NO: 334165 - DNA, 15 bp, Homo sapiens
tcaggaaattgattt

SEQ ID NO: 334166 - DNA, 15 bp, Homo sapiens
atcaggaaattgatt

SEQ ID NO: 334167 - DNA, 15 bp, Homo sapiens
tatcaggaaattgat

SEQ ID NO: 334168 - DNA, 15 bp, Homo sapiens
ttatcaggaaattga

SEQ ID NO: 334169 - DNA, 15 bp, Homo sapiens
attatcaggaaattg

SEQ ID NO: 334170 - DNA, 15 bp, Homo sapiens
tattatcaggaaatt

SEQ ID NO: 334171 - DNA, 15 bp, Homo sapiens
gtattatcaggaaat

SEQ ID NO: 334172 - DNA, 15 bp, Homo sapiens
agtattatcaggaaa

SEQ ID NO: 334173 - DNA, 15 bp, Homo sapiens
cagtattatcaggaa

SEQ ID NO: 334174 - DNA, 15 bp, Homo sapiens
tcagtattatcagga

SEQ ID NO: 334175 - DNA, 15 bp, Homo sapiens
atcagtattatcagg

SEQ ID NO: 334176 - DNA, 15 bp, Homo sapiens
tatcagtattatcag

SEQ ID NO: 334177 - DNA, 15 bp, Homo sapiens
ctatcagtattatca

SEQ ID NO: 334178 - DNA, 15 bp, Homo sapiens
tctatcagtattatc

SEQ ID NO: 334179 - DNA, 15 bp, Homo sapiens
ttctatcagtattat

SEQ ID NO: 334180 - DNA, 15 bp, Homo sapiens
attctatcagtatta

SEQ ID NO: 334181 - DNA, 15 bp, Homo sapiens
cattctatcagtatt

SEQ ID NO: 334182 - DNA, 15 bp, Homo sapiens
tcattctatcagtat

SEQ ID NO: 334183 - DNA, 15 bp, Homo sapiens
ttcattctatcagta

SEQ ID NO: 334184 - DNA, 15 bp, Homo sapiens
cttcattctatcagt

SEQ ID NO: 334185 - DNA, 15 bp, Homo sapiens
gcttcattctatcag

SEQ ID NO: 334186 - DNA, 15 bp, Homo sapiens
agcttcattctatca

SEQ ID NO: 334187 - DNA, 15 bp, Homo sapiens
gagcttcattctatc

SEQ ID NO: 334188 - DNA, 15 bp, Homo sapiens
ggagcttcattctat

SEQ ID NO: 334189 - DNA, 15 bp, Homo sapiens
gggagcttcattcta

SEQ ID NO: 334190 - DNA, 15 bp, Homo sapiens
ggggagcttcattct

SEQ ID NO: 334191 - DNA, 15 bp, Homo sapiens
aggggagcttcattc

SEQ ID NO: 334192 - DNA, 15 bp, Homo sapiens
gaggggagcttcatt

SEQ ID NO: 334193 - DNA, 15 bp, Homo sapiens
ggaggggagcttcat

SEQ ID NO: 334194 - DNA, 15 bp, Homo sapiens
aggaggggagcttca

SEQ ID NO: 334195 - DNA, 15 bp, Homo sapiens
aaggaggggagcttc

SEQ ID NO: 334196 - DNA, 15 bp, Homo sapiens
aaaggaggggagctt

SEQ ID NO: 334197 - DNA, 15 bp, Homo sapiens
gaaaggaggggagct

SEQ ID NO: 334198 - DNA, 15 bp, Homo sapiens
ggaaaggaggggagc

SEQ ID NO: 334199 - DNA, 15 bp, Homo sapiens
aggaaaggaggggag

SEQ ID NO: 334200 - DNA, 15 bp, Homo sapiens
caggaaaggagggga

SEQ ID NO: 334201 - DNA, 15 bp, Homo sapiens
gcaggaaaggagggg

SEQ ID NO: 334202 - DNA, 15 bp, Homo sapiens
agcaggaaaggaggg

SEQ ID NO: 334203 - DNA, 15 bp, Homo sapiens
cagcaggaaaggagg

SEQ ID NO: 334204 - DNA, 15 bp, Homo sapiens
acagcaggaaaggag

SEQ ID NO: 334205 - DNA, 15 bp, Homo sapiens
gacagcaggaaagga

SEQ ID NO: 334206 - DNA, 15 bp, Homo sapiens
tgacagcaggaaagg

SEQ ID NO: 334207 - DNA, 15 bp, Homo sapiens
gtgacagcaggaaag

SEQ ID NO: 334208 - DNA, 15 bp, Homo sapiens
agtgacagcaggaaa

SEQ ID NO: 334209 - DNA, 15 bp, Homo sapiens
gagtgacagcaggaa

SEQ ID NO: 334210 - DNA, 15 bp, Homo sapiens
agagtgacagcagga

SEQ ID NO: 334211 - DNA, 15 bp, Homo sapiens
aagagtgacagcagg

SEQ ID NO: 334212 - DNA, 15 bp, Homo sapiens
gaagagtgacagcag

SEQ ID NO: 334213 - DNA, 15 bp, Homo sapiens
ggaagagtgacagca

SEQ ID NO: 334214 - DNA, 15 bp, Homo sapiens
gggaagagtgacagc

SEQ ID NO: 334215 - DNA, 15 bp, Homo sapiens
agggaagagtgacag

SEQ ID NO: 334216 - DNA, 15 bp, Homo sapiens
aagggaagagtgaca

SEQ ID NO: 334217 - DNA, 15 bp, Homo sapiens
gaagggaagagtgac

SEQ ID NO: 334218 - DNA, 15 bp, Homo sapiens
ggaagggaagagtga

SEQ ID NO: 334219 - DNA, 15 bp, Homo sapiens
tggaagggaagagtg

SEQ ID NO: 334220 - DNA, 15 bp, Homo sapiens
gtggaagggaagagt

SEQ ID NO: 334221 - DNA, 15 bp, Homo sapiens
tgtggaagggaagag

SEQ ID NO: 334222 - DNA, 15 bp, Homo sapiens
gtgtggaagggaaga

SEQ ID NO: 334223 - DNA, 15 bp, Homo sapiens
tgtgtggaagggaag

SEQ ID NO: 334224 - DNA, 15 bp, Homo sapiens
gtgtgtggaagggaa

SEQ ID NO: 334225 - DNA, 15 bp, Homo sapiens
agtgtgtggaaggga

SEQ ID NO: 334226 - DNA, 15 bp, Homo sapiens
aagtgtgtggaaggg

SEQ ID NO: 334227 - DNA, 15 bp, Homo sapiens
taagtgtgtggaagg

SEQ ID NO: 334228 - DNA, 15 bp, Homo sapiens
ctaagtgtgtggaag

SEQ ID NO: 334229 - DNA, 15 bp, Homo sapiens
gctaagtgtgtggaa

SEQ ID NO: 334230 - DNA, 15 bp, Homo sapiens
tgctaagtgtgtgga

SEQ ID NO: 334231 - DNA, 15 bp, Homo sapiens
ttgctaagtgtgtgg

SEQ ID NO: 334232 - DNA, 15 bp, Homo sapiens
tttgctaagtgtgtg

SEQ ID NO: 334233 - DNA, 15 bp, Homo sapiens
ttttgctaagtgtgt

SEQ ID NO: 334234 - DNA, 15 bp, Homo sapiens
attttgctaagtgtg

SEQ ID NO: 334235 - DNA, 15 bp, Homo sapiens
cattttgctaagtgt

SEQ ID NO: 334236 - DNA, 15 bp, Homo sapiens
acattttgctaagtg

SEQ ID NO: 334237 - DNA, 15 bp, Homo sapiens
aacattttgctaagt

SEQ ID NO: 334238 - DNA, 15 bp, Homo sapiens
gaacattttgctaag

SEQ ID NO: 334239 - DNA, 15 bp, Homo sapiens
ggaacattttgctaa

SEQ ID NO: 334240 - DNA, 15 bp, Homo sapiens
tggaacattttgcta

SEQ ID NO: 334241 - DNA, 15 bp, Homo sapiens
ctggaacattttgct

SEQ ID NO: 334242 - DNA, 15 bp, Homo sapiens
gctggaacattttgc

SEQ ID NO: 334243 - DNA, 15 bp, Homo sapiens
agctggaacattttg

SEQ ID NO: 334244 - DNA, 15 bp, Homo sapiens
tagctggaacatttt

SEQ ID NO: 334245 - DNA, 15 bp, Homo sapiens
atagctggaacattt

SEQ ID NO: 334246 - DNA, 15 bp, Homo sapiens
aatagctggaacatt

SEQ ID NO: 334247 - DNA, 15 bp, Homo sapiens
caatagctggaacat

SEQ ID NO: 334248 - DNA, 15 bp, Homo sapiens
acaatagctggaaca

SEQ ID NO: 334249 - DNA, 15 bp, Homo sapiens
aacaatagctggaac

SEQ ID NO: 334250 - DNA, 15 bp, Homo sapiens
gaacaatagctggaa

SEQ ID NO: 334251 - DNA, 15 bp, Homo sapiens
agaacaatagctgga

SEQ ID NO: 334252 - DNA, 15 bp, Homo sapiens
cagaacaatagctgg

SEQ ID NO: 334253 - DNA, 15 bp, Homo sapiens
tcagaacaatagctg

SEQ ID NO: 334254 - DNA, 15 bp, Homo sapiens
ttcagaacaatagct

SEQ ID NO: 334255 - DNA, 15 bp, Homo sapiens
tttcagaacaatagc

SEQ ID NO: 334256 - DNA, 15 bp, Homo sapiens
ttttcagaacaatag

SEQ ID NO: 334257 - DNA, 15 bp, Homo sapiens
gttttcagaacaata

SEQ ID NO: 334258 - DNA, 15 bp, Homo sapiens
tgttttcagaacaat

SEQ ID NO: 334259 - DNA, 15 bp, Homo sapiens
ttgttttcagaacaa

SEQ ID NO: 334260 - DNA, 15 bp, Homo sapiens
cttgttttcagaaca

SEQ ID NO: 334261 - DNA, 15 bp, Homo sapiens
tcttgttttcagaac

SEQ ID NO: 334262 - DNA, 15 bp, Homo sapiens
ttcttgttttcagaa

SEQ ID NO: 334263 - DNA, 15 bp, Homo sapiens
attcttgttttcaga

SEQ ID NO: 334264 - DNA, 15 bp, Homo sapiens
tattcttgttttcag

SEQ ID NO: 334265 - DNA, 15 bp, Homo sapiens
ctattcttgttttca

SEQ ID NO: 334266 - DNA, 15 bp, Homo sapiens
tctattcttgttttc

SEQ ID NO: 334267 - DNA, 15 bp, Homo sapiens
ttctattcttgtttt

SEQ ID NO: 334268 - DNA, 15 bp, Homo sapiens
tttctattcttgttt

SEQ ID NO: 334269 - DNA, 15 bp, Homo sapiens
atttctattcttgtt

SEQ ID NO: 334270 - DNA, 15 bp, Homo sapiens
catttctattcttgt

SEQ ID NO: 334271 - DNA, 15 bp, Homo sapiens
acatttctattcttg

SEQ ID NO: 334272 - DNA, 15 bp, Homo sapiens
tacatttctattctt

SEQ ID NO: 334273 - DNA, 15 bp, Homo sapiens
ctacatttctattct

SEQ ID NO: 334274 - DNA, 15 bp, Homo sapiens
cctacatttctattc

SEQ ID NO: 334275 - DNA, 15 bp, Homo sapiens
acctacatttctatt

SEQ ID NO: 334276 - DNA, 15 bp, Homo sapiens
cacctacatttctat

SEQ ID NO: 334277 - DNA, 15 bp, Homo sapiens
ccacctacatttcta

SEQ ID NO: 334278 - DNA, 15 bp, Homo sapiens
cccacctacatttct

SEQ ID NO: 334279 - DNA, 15 bp, Homo sapiens
tcccacctacatttc

SEQ ID NO: 334280 - DNA, 15 bp, Homo sapiens
ctcccacctacattt

SEQ ID NO: 334281 - DNA, 15 bp, Homo sapiens
tctcccacctacatt

SEQ ID NO: 334282 - DNA, 15 bp, Homo sapiens
atctcccacctacat

SEQ ID NO: 334283 - DNA, 15 bp, Homo sapiens
catctcccacctaca

SEQ ID NO: 334284 - DNA, 15 bp, Homo sapiens
tcatctcccacctac

SEQ ID NO: 334285 - DNA, 15 bp, Homo sapiens
ttcatctcccaccta

SEQ ID NO: 334286 - DNA, 15 bp, Homo sapiens
gttcatctcccacct

SEQ ID NO: 334287 - DNA, 15 bp, Homo sapiens
agttcatctcccacc

SEQ ID NO: 334288 - DNA, 15 bp, Homo sapiens
cagttcatctcccac

SEQ ID NO: 334289 - DNA, 15 bp, Homo sapiens
acagttcatctccca

SEQ ID NO: 334290 - DNA, 15 bp, Homo sapiens
cacagttcatctccc

SEQ ID NO: 334291 - DNA, 15 bp, Homo sapiens
acacagttcatctcc

SEQ ID NO: 334292 - DNA, 15 bp, Homo sapiens
tacacagttcatctc

SEQ ID NO: 334293 - DNA, 15 bp, Homo sapiens
gtacacagttcatct

SEQ ID NO: 334294 - DNA, 15 bp, Homo sapiens
ggtacacagttcatc

SEQ ID NO: 334295 - DNA, 15 bp, Homo sapiens
aggtacacagttcat

SEQ ID NO: 334296 - DNA, 15 bp, Homo sapiens
aaggtacacagttca

SEQ ID NO: 334297 - DNA, 15 bp, Homo sapiens
taaggtacacagttc

SEQ ID NO: 334298 - DNA, 15 bp, Homo sapiens
ttaaggtacacagtt

SEQ ID NO: 334299 - DNA, 15 bp, Homo sapiens
tttaaggtacacagt

SEQ ID NO: 334300 - DNA, 15 bp, Homo sapiens
ttttaaggtacacag

SEQ ID NO: 334301 - DNA, 15 bp, Homo sapiens
tttttaaggtacaca

SEQ ID NO: 334302 - DNA, 15 bp, Homo sapiens
ttttttaaggtacac

SEQ ID NO: 334303 - DNA, 15 bp, Homo sapiens
tttttttaaggtaca

SEQ ID NO: 334304 - DNA, 15 bp, Homo sapiens
ttttttttaaggtac

SEQ ID NO: 334305 - DNA, 15 bp, Homo sapiens
tttttttttaaggta

SEQ ID NO: 334306 - DNA, 15 bp, Homo sapiens
ctttttttttaaggt

SEQ ID NO: 334307 - DNA, 15 bp, Homo sapiens
actttttttttaagg

SEQ ID NO: 334308 - DNA, 15 bp, Homo sapiens
gactttttttttaag

SEQ ID NO: 334309 - DNA, 15 bp, Homo sapiens
cgactttttttttaa

SEQ ID NO: 334310 - DNA, 15 bp, Homo sapiens
acgacttttttttta

SEQ ID NO: 334311 - DNA, 15 bp, Homo sapiens
tacgacttttttttt

SEQ ID NO: 334312 - DNA, 15 bp, Homo sapiens
atacgactttttttt

SEQ ID NO: 334313 - DNA, 15 bp, Homo sapiens
aatacgacttttttt

SEQ ID NO: 334314 - DNA, 15 bp, Homo sapiens
gaatacgactttttt

SEQ ID NO: 334315 - DNA, 15 bp, Homo sapiens
tgaatacgacttttt

SEQ ID NO: 334316 - DNA, 15 bp, Homo sapiens
ttgaatacgactttt

SEQ ID NO: 334317 - DNA, 15 bp, Homo sapiens
cttgaatacgacttt

SEQ ID NO: 334318 - DNA, 15 bp, Homo sapiens
gcttgaatacgactt

SEQ ID NO: 334319 - DNA, 15 bp, Homo sapiens
ggcttgaatacgact

SEQ ID NO: 334320 - DNA, 15 bp, Homo sapiens
aggcttgaatacgac

SEQ ID NO: 334321 - DNA, 15 bp, Homo sapiens
taggcttgaatacga

SEQ ID NO: 334322 - DNA, 15 bp, Homo sapiens
ctaggcttgaatacg

SEQ ID NO: 334323 - DNA, 15 bp, Homo sapiens
tctaggcttgaatac

SEQ ID NO: 334324 - DNA, 15 bp, Homo sapiens
atctaggcttgaata

SEQ ID NO: 334325 - DNA, 15 bp, Homo sapiens
aatctaggcttgaat

SEQ ID NO: 334326 - DNA, 15 bp, Homo sapiens
aaatctaggcttgaa

SEQ ID NO: 334327 - DNA, 15 bp, Homo sapiens
aaaatctaggcttga

SEQ ID NO: 334328 - DNA, 15 bp, Homo sapiens
gaaaatctaggcttg

SEQ ID NO: 334329 - DNA, 15 bp, Homo sapiens
tgaaaatctaggctt

SEQ ID NO: 334330 - DNA, 15 bp, Homo sapiens
gtgaaaatctaggct

SEQ ID NO: 334331 - DNA, 15 bp, Homo sapiens
agtgaaaatctaggc

SEQ ID NO: 334332 - DNA, 15 bp, Homo sapiens
gagtgaaaatctagg

SEQ ID NO: 334333 - DNA, 15 bp, Homo sapiens
agagtgaaaatctag

SEQ ID NO: 334334 - DNA, 15 bp, Homo sapiens
gagagtgaaaatcta

SEQ ID NO: 334335 - DNA, 15 bp, Homo sapiens
tgagagtgaaaatct

SEQ ID NO: 334336 - DNA, 15 bp, Homo sapiens
ttgagagtgaaaatc

SEQ ID NO: 334337 - DNA, 15 bp, Homo sapiens
tttgagagtgaaaat

SEQ ID NO: 334338 - DNA, 15 bp, Homo sapiens
atttgagagtgaaaa

SEQ ID NO: 334339 - DNA, 15 bp, Homo sapiens
tatttgagagtgaaa

SEQ ID NO: 334340 - DNA, 15 bp, Homo sapiens
atatttgagagtgaa

SEQ ID NO: 334341 - DNA, 15 bp, Homo sapiens
aatatttgagagtga

SEQ ID NO: 334342 - DNA, 15 bp, Homo sapiens
gaatatttgagagtg

SEQ ID NO: 334343 - DNA, 15 bp, Homo sapiens
agaatatttgagagt

SEQ ID NO: 334344 - DNA, 15 bp, Homo sapiens
aagaatatttgagag

SEQ ID NO: 334345 - DNA, 15 bp, Homo sapiens
aaagaatatttgaga

SEQ ID NO: 334346 - DNA, 15 bp, Homo sapiens
gaaagaatatttgag

SEQ ID NO: 334347 - DNA, 15 bp, Homo sapiens
agaaagaatatttga

SEQ ID NO: 334348 - DNA, 15 bp, Homo sapiens
gaagaaagaatattt

SEQ ID NO: 334349 - DNA, 15 bp, Homo sapiens
ggaagaaagaatatt

SEQ ID NO: 334350 - DNA, 15 bp, Homo sapiens
tggaagaaagaatat

SEQ ID NO: 334351 - DNA, 15 bp, Homo sapiens
atggaagaaagaata

SEQ ID NO: 334352 - DNA, 15 bp, Homo sapiens
aatggaagaaagaat

SEQ ID NO: 334353 - DNA, 15 bp, Homo sapiens
taatggaagaaagaa

SEQ ID NO: 334354 - DNA, 15 bp, Homo sapiens
ttaatggaagaaaga

SEQ ID NO: 334355 - DNA, 15 bp, Homo sapiens
tttaatggaagaaag

SEQ ID NO: 334356 - DNA, 15 bp, Homo sapiens
ttttaatggaagaaa

SEQ ID NO: 334357 - DNA, 15 bp, Homo sapiens
tttttaatggaagaa

SEQ ID NO: 334358 - DNA, 15 bp, Homo sapiens
ttttttaatggaaga

SEQ ID NO: 334359 - DNA, 15 bp, Homo sapiens
attttttaatggaag

SEQ ID NO: 334360 - DNA, 15 bp, Homo sapiens
tattttttaatggaa

SEQ ID NO: 334361 - DNA, 15 bp, Homo sapiens
ttattttttaatgga

SEQ ID NO: 334362 - DNA, 15 bp, Homo sapiens
attattttttaatgg

SEQ ID NO: 334363 - DNA, 15 bp, Homo sapiens
aattattttttaatg

SEQ ID NO: 334364 - DNA, 15 bp, Homo sapiens
gaattattttttaat

SEQ ID NO: 334365 - DNA, 15 bp, Homo sapiens
cgaattattttttaa

SEQ ID NO: 334366 - DNA, 15 bp, Homo sapiens
tcgaattatttttta

SEQ ID NO: 334367 - DNA, 15 bp, Homo sapiens
ttcgaattatttttt

SEQ ID NO: 334368 - DNA, 15 bp, Homo sapiens
attcgaattattttt

SEQ ID NO: 334369 - DNA, 15 bp, Homo sapiens
tattcgaattatttt

SEQ ID NO: 334370 - DNA, 15 bp, Homo sapiens
atattcgaattattt

SEQ ID NO: 334371 - DNA, 15 bp, Homo sapiens
catattcgaattatt

SEQ ID NO: 334372 - DNA, 15 bp, Homo sapiens
tcatattcgaattat

SEQ ID NO: 334373 - DNA, 15 bp, Homo sapiens
atcatattcgaatta

SEQ ID NO: 334374 - DNA, 15 bp, Homo sapiens
aatcatattcgaatt

SEQ ID NO: 334375 - DNA, 15 bp, Homo sapiens
aaatcatattcgaat

SEQ ID NO: 334376 - DNA, 15 bp, Homo sapiens
gaaatcatattcgaa

SEQ ID NO: 334377 - DNA, 15 bp, Homo sapiens
agaaatcatattcga

SEQ ID NO: 334378 - DNA, 15 bp, Homo sapiens
gagaaatcatattcg

SEQ ID NO: 334379 - DNA, 15 bp, Homo sapiens
tgagaaatcatattc

SEQ ID NO: 334380 - DNA, 15 bp, Homo sapiens
ttgagaaatcatatt

SEQ ID NO: 334381 - DNA, 15 bp, Homo sapiens
tttgagaaatcatat

SEQ ID NO: 334382 - DNA, 15 bp, Homo sapiens
atttgagaaatcata

SEQ ID NO: 334383 - DNA, 15 bp, Homo sapiens
aatttgagaaatcat

SEQ ID NO: 334384 - DNA, 15 bp, Homo sapiens
taatttgagaaatca

SEQ ID NO: 334385 - DNA, 15 bp, Homo sapiens
ataatttgagaaatc

SEQ ID NO: 334386 - DNA, 15 bp, Homo sapiens
tataatttgagaaat

SEQ ID NO: 334387 - DNA, 15 bp, Homo sapiens
ttataatttgagaaa

SEQ ID NO: 334388 - DNA, 15 bp, Homo sapiens
attataatttgagaa

SEQ ID NO: 334389 - DNA, 15 bp, Homo sapiens
aattataatttgaga

SEQ ID NO: 334390 - DNA, 15 bp, Homo sapiens
caattataatttgag

SEQ ID NO: 334391 - DNA, 15 bp, Homo sapiens
gcaattataatttga

SEQ ID NO: 334392 - DNA, 15 bp, Homo sapiens
agcaattataatttg

SEQ ID NO: 334393 - DNA, 15 bp, Homo sapiens
cagcaattataattt

SEQ ID NO: 334394 - DNA, 15 bp, Homo sapiens
tcagcaattataatt

SEQ ID NO: 334395 - DNA, 15 bp, Homo sapiens
ttcagcaattataat

SEQ ID NO: 334396 - DNA, 15 bp, Homo sapiens
cttcagcaattataa

SEQ ID NO: 334397 - DNA, 15 bp, Homo sapiens
tcttcagcaattata

SEQ ID NO: 334398 - DNA, 15 bp, Homo sapiens
atcttcagcaattat

SEQ ID NO: 334399 - DNA, 15 bp, Homo sapiens
aatcttcagcaatta

SEQ ID NO: 334400 - DNA, 15 bp, Homo sapiens
gaatcttcagcaatt

SEQ ID NO: 334401 - DNA, 15 bp, Homo sapiens
agaatcttcagcaat

SEQ ID NO: 334402 - DNA, 15 bp, Homo sapiens
cagaatcttcagcaa

SEQ ID NO: 334403 - DNA, 15 bp, Homo sapiens
tcagaatcttcagca

SEQ ID NO: 334404 - DNA, 15 bp, Homo sapiens
atcagaatcttcagc

SEQ ID NO: 334405 - DNA, 15 bp, Homo sapiens
gatcagaatcttcag

SEQ ID NO: 334406 - DNA, 15 bp, Homo sapiens
tgatcagaatcttca

SEQ ID NO: 334407 - DNA, 15 bp, Homo sapiens
ttgatcagaatcttc

SEQ ID NO: 334408 - DNA, 15 bp, Homo sapiens
attgatcagaatctt

SEQ ID NO: 334409 - DNA, 15 bp, Homo sapiens
cattgatcagaatct

SEQ ID NO: 334410 - DNA, 15 bp, Homo sapiens
ccattgatcagaatc

SEQ ID NO: 334411 - DNA, 15 bp, Homo sapiens
gccattgatcagaat

SEQ ID NO: 334412 - DNA, 15 bp, Homo sapiens
agccattgatcagaa

SEQ ID NO: 334413 - DNA, 15 bp, Homo sapiens
gagccattgatcaga

SEQ ID NO: 334414 - DNA, 15 bp, Homo sapiens
ggagccattgatcag

SEQ ID NO: 334415 - DNA, 15 bp, Homo sapiens
aggagccattgatca

SEQ ID NO: 334416 - DNA, 15 bp, Homo sapiens
aaggagccattgatc

SEQ ID NO: 334417 - DNA, 15 bp, Homo sapiens
aaaggagccattgat

SEQ ID NO: 334418 - DNA, 15 bp, Homo sapiens
caaaggagccattga

SEQ ID NO: 334419 - DNA, 15 bp, Homo sapiens
tcaaaggagccattg

SEQ ID NO: 334420 - DNA, 15 bp, Homo sapiens
atcaaaggagccatt

SEQ ID NO: 334421 - DNA, 15 bp, Homo sapiens
aatcaaaggagccat

SEQ ID NO: 334422 - DNA, 15 bp, Homo sapiens
caatcaaaggagcca

SEQ ID NO: 334423 - DNA, 15 bp, Homo sapiens
ccaatcaaaggagcc

SEQ ID NO: 334424 - DNA, 15 bp, Homo sapiens
cccaatcaaaggagc

SEQ ID NO: 334425 - DNA, 15 bp, Homo sapiens
acccaatcaaaggag

SEQ ID NO: 334426 - DNA, 15 bp, Homo sapiens
cacccaatcaaagga

SEQ ID NO: 334427 - DNA, 15 bp, Homo sapiens
tcacccaatcaaagg

SEQ ID NO: 334428 - DNA, 15 bp, Homo sapiens
ttcacccaatcaaag

SEQ ID NO: 334429 - DNA, 15 bp, Homo sapiens
attcacccaatcaaa

SEQ ID NO: 334430 - DNA, 15 bp, Homo sapiens
gattcacccaatcaa

SEQ ID NO: 334431 - DNA, 15 bp, Homo sapiens
ggattcacccaatca

SEQ ID NO: 334432 - DNA, 15 bp, Homo sapiens
aggattcacccaatc

SEQ ID NO: 334433 - DNA, 15 bp, Homo sapiens
aaggattcacccaat

SEQ ID NO: 334434 - DNA, 15 bp, Homo sapiens
caaggattcacccaa

SEQ ID NO: 334435 - DNA, 15 bp, Homo sapiens
gcaaggattcaccca

SEQ ID NO: 334436 - DNA, 15 bp, Homo sapiens
ggcaaggattcaccc

SEQ ID NO: 334437 - DNA, 15 bp, Homo sapiens
cggcaaggattcacc

SEQ ID NO: 334438 - DNA, 15 bp, Homo sapiens
ccggcaaggattcac

SEQ ID NO: 334439 - DNA, 15 bp, Homo sapiens
cccggcaaggattca

SEQ ID NO: 334440 - DNA, 15 bp, Homo sapiens
acccggcaaggattc

SEQ ID NO: 334441 - DNA, 15 bp, Homo sapiens
tacccggcaaggatt

SEQ ID NO: 334442 - DNA, 15 bp, Homo sapiens
ctacccggcaaggat

SEQ ID NO: 334443 - DNA, 15 bp, Homo sapiens
tctacccggcaagga

SEQ ID NO: 334444 - DNA, 15 bp, Homo sapiens
atctacccggcaagg

SEQ ID NO: 334445 - DNA, 15 bp, Homo sapiens
aatctacccggcaag

SEQ ID NO: 334446 - DNA, 15 bp, Homo sapiens
gaatctacccggcaa

SEQ ID NO: 334447 - DNA, 15 bp, Homo sapiens
tgaatctacccggca

SEQ ID NO: 334448 - DNA, 15 bp, Homo sapiens
ctgaatctacccggc

SEQ ID NO: 334449 - DNA, 15 bp, Homo sapiens
tctgaatctacccgg

SEQ ID NO: 334450 - DNA, 15 bp, Homo sapiens
ttctgaatctacccg

SEQ ID NO: 334451 - DNA, 15 bp, Homo sapiens
attctgaatctaccc

SEQ ID NO: 334452 - DNA, 15 bp, Homo sapiens
gattctgaatctacc

SEQ ID NO: 334453 - DNA, 15 bp, Homo sapiens
agattctgaatctac

SEQ ID NO: 334454 - DNA, 15 bp, Homo sapiens
gagattctgaatcta

SEQ ID NO: 334455 - DNA, 15 bp, Homo sapiens
tgagattctgaatct

SEQ ID NO: 334456 - DNA, 15 bp, Homo sapiens
ctgagattctgaatc

SEQ ID NO: 334457 - DNA, 15 bp, Homo sapiens
cctgagattctgaat

SEQ ID NO: 334458 - DNA, 15 bp, Homo sapiens
tcctgagattctgaa

SEQ ID NO: 334459 - DNA, 15 bp, Homo sapiens
ttcctgagattctga

SEQ ID NO: 334460 - DNA, 15 bp, Homo sapiens
gttcctgagattctg

SEQ ID NO: 334461 - DNA, 15 bp, Homo sapiens
tgttcctgagattct

SEQ ID NO: 334462 - DNA, 15 bp, Homo sapiens
ttgttcctgagattc

SEQ ID NO: 334463 - DNA, 15 bp, Homo sapiens
attgttcctgagatt

SEQ ID NO: 334464 - DNA, 15 bp, Homo sapiens
aattgttcctgagat

SEQ ID NO: 334465 - DNA, 15 bp, Homo sapiens
caattgttcctgaga

SEQ ID NO: 334466 - DNA, 15 bp, Homo sapiens
gcaattgttcctgag

SEQ ID NO: 334467 - DNA, 15 bp, Homo sapiens
tgcaattgttcctga

SEQ ID NO: 334468 - DNA, 15 bp, Homo sapiens
ctgcaattgttcctg

SEQ ID NO: 334469 - DNA, 15 bp, Homo sapiens
gctgcaattgttcct

SEQ ID NO: 334470 - DNA, 15 bp, Homo sapiens
ggctgcaattgttcc

SEQ ID NO: 334471 - DNA, 15 bp, Homo sapiens
tggctgcaattgttc

SEQ ID NO: 334472 - DNA, 15 bp, Homo sapiens
atggctgcaattgtt

SEQ ID NO: 334473 - DNA, 15 bp, Homo sapiens
gatggctgcaattgt

SEQ ID NO: 334474 - DNA, 15 bp, Homo sapiens
ggatggctgcaattg

SEQ ID NO: 334475 - DNA, 15 bp, Homo sapiens
tggatggctgcaatt

SEQ ID NO: 334476 - DNA, 15 bp, Homo sapiens
ctggatggctgcaat

SEQ ID NO: 334477 - DNA, 15 bp, Homo sapiens
tctggatggctgcaa

SEQ ID NO: 334478 - DNA, 15 bp, Homo sapiens
gtctggatggctgca

SEQ ID NO: 334479 - DNA, 15 bp, Homo sapiens
agtctggatggctgc

SEQ ID NO: 334480 - DNA, 15 bp, Homo sapiens
tagtctggatggctg

SEQ ID NO: 334481 - DNA, 15 bp, Homo sapiens
ctagtctggatggct

SEQ ID NO: 334482 - DNA, 15 bp, Homo sapiens
cctagtctggatggc

SEQ ID NO: 334483 - DNA, 15 bp, Homo sapiens
acctagtctggatgg

SEQ ID NO: 334484 - DNA, 15 bp, Homo sapiens
aacctagtctggatg

SEQ ID NO: 334485 - DNA, 15 bp, Homo sapiens
caacctagtctggat

SEQ ID NO: 334486 - DNA, 15 bp, Homo sapiens
gcaacctagtctgga

SEQ ID NO: 334487 - DNA, 15 bp, Homo sapiens
ggcaacctagtctgg

SEQ ID NO: 334488 - DNA, 15 bp, Homo sapiens
gggcaacctagtctg

SEQ ID NO: 334489 - DNA, 15 bp, Homo sapiens
ggggcaacctagtct

SEQ ID NO: 334490 - DNA, 15 bp, Homo sapiens
gggggcaacctagtc

SEQ ID NO: 334491 - DNA, 15 bp, Homo sapiens
agggggcaacctagt

SEQ ID NO: 334492 - DNA, 15 bp, Homo sapiens
cagggggcaacctag

SEQ ID NO: 334493 - DNA, 15 bp, Homo sapiens
acagggggcaaccta

SEQ ID NO: 334494 - DNA, 15 bp, Homo sapiens
aacagggggcaacct

SEQ ID NO: 334495 - DNA, 15 bp, Homo sapiens
aaacagggggcaacc

SEQ ID NO: 334496 - DNA, 15 bp, Homo sapiens
aaaacagggggcaac

SEQ ID NO: 334497 - DNA, 15 bp, Homo sapiens
gaaaacagggggcaa

SEQ ID NO: 334498 - DNA, 15 bp, Homo sapiens
agaaaacagggggca

SEQ ID NO: 334499 - DNA, 15 bp, Homo sapiens
cagaaaacagggggc

SEQ ID NO: 334500 - DNA, 15 bp, Homo sapiens
acagaaaacaggggg

SEQ ID NO: 334501 - DNA, 15 bp, Homo sapiens
gacagaaaacagggg

SEQ ID NO: 334502 - DNA, 15 bp, Homo sapiens
agacagaaaacaggg

SEQ ID NO: 334503 - DNA, 15 bp, Homo sapiens
aagacagaaaacagg

SEQ ID NO: 334504 - DNA, 15 bp, Homo sapiens
gaagacagaaaacag

SEQ ID NO: 334505 - DNA, 15 bp, Homo sapiens
cgaagacagaaaaca

SEQ ID NO: 334506 - DNA, 15 bp, Homo sapiens
acgaagacagaaaac

SEQ ID NO: 334507 - DNA, 15 bp, Homo sapiens
tacgaagacagaaaa

SEQ ID NO: 334508 - DNA, 15 bp, Homo sapiens
gtacgaagacagaaa

SEQ ID NO: 334509 - DNA, 15 bp, Homo sapiens
ggtacgaagacagaa

SEQ ID NO: 334510 - DNA, 15 bp, Homo sapiens
tggtacgaagacaga

SEQ ID NO: 334511 - DNA, 15 bp, Homo sapiens
atggtacgaagacag

SEQ ID NO: 334512 - DNA, 15 bp, Homo sapiens
catggtacgaagaca

SEQ ID NO: 334513 - DNA, 15 bp, Homo sapiens
acatggtacgaagac

SEQ ID NO: 334514 - DNA, 15 bp, Homo sapiens
gacatggtacgaaga

SEQ ID NO: 334515 - DNA, 15 bp, Homo sapiens
tgacatggtacgaag

SEQ ID NO: 334516 - DNA, 15 bp, Homo sapiens
atgacatggtacgaa

SEQ ID NO: 334517 - DNA, 15 bp, Homo sapiens
aatgacatggtacga

SEQ ID NO: 334518 - DNA, 15 bp, Homo sapiens
gaatgacatggtacg

SEQ ID NO: 334519 - DNA, 15 bp, Homo sapiens
tgaatgacatggtac

SEQ ID NO: 334520 - DNA, 15 bp, Homo sapiens
gtgaatgacatggta

SEQ ID NO: 334521 - DNA, 15 bp, Homo sapiens
agtgaatgacatggt

SEQ ID NO: 334522 - DNA, 15 bp, Homo sapiens
gagtgaatgacatgg

SEQ ID NO: 334523 - DNA, 15 bp, Homo sapiens
agagtgaatgacatg

SEQ ID NO: 334524 - DNA, 15 bp, Homo sapiens
cagagtgaatgacat

SEQ ID NO: 334525 - DNA, 15 bp, Homo sapiens
gcagagtgaatgaca

SEQ ID NO: 334526 - DNA, 15 bp, Homo sapiens
agcagagtgaatgac

SEQ ID NO: 334527 - DNA, 15 bp, Homo sapiens
cagcagagtgaatga

SEQ ID NO: 334528 - DNA, 15 bp, Homo sapiens
ccagcagagtgaatg

SEQ ID NO: 334529 - DNA, 15 bp, Homo sapiens
tccagcagagtgaat

SEQ ID NO: 334530 - DNA, 15 bp, Homo sapiens
gtccagcagagtgaa

SEQ ID NO: 334531 - DNA, 15 bp, Homo sapiens
agtccagcagagtga

SEQ ID NO: 334532 - DNA, 15 bp, Homo sapiens
aagtccagcagagtg

SEQ ID NO: 334533 - DNA, 15 bp, Homo sapiens
gaagtccagcagagt

SEQ ID NO: 334534 - DNA, 15 bp, Homo sapiens
agaagtccagcagag

SEQ ID NO: 334535 - DNA, 15 bp, Homo sapiens
aagaagtccagcaga

SEQ ID NO: 334536 - DNA, 15 bp, Homo sapiens
aaagaagtccagcag

SEQ ID NO: 334537 - DNA, 15 bp, Homo sapiens
gaaagaagtccagca

SEQ ID NO: 334538 - DNA, 15 bp, Homo sapiens
ggaaagaagtccagc

SEQ ID NO: 334539 - DNA, 15 bp, Homo sapiens
tggaaagaagtccag

SEQ ID NO: 334540 - DNA, 15 bp, Homo sapiens
ctggaaagaagtcca

SEQ ID NO: 334541 - DNA, 15 bp, Homo sapiens
tctggaaagaagtcc

SEQ ID NO: 334542 - DNA, 15 bp, Homo sapiens
ctctggaaagaagtc

SEQ ID NO: 334543 - DNA, 15 bp, Homo sapiens
gctctggaaagaagt

SEQ ID NO: 334544 - DNA, 15 bp, Homo sapiens
agctctggaaagaag

SEQ ID NO: 334545 - DNA, 15 bp, Homo sapiens
cagctctggaaagaa

SEQ ID NO: 334546 - DNA, 15 bp, Homo sapiens
acagctctggaaaga

SEQ ID NO: 334547 - DNA, 15 bp, Homo sapiens
cacagctctggaaag

SEQ ID NO: 334548 - DNA, 15 bp, Homo sapiens
gcacagctctggaaa

SEQ ID NO: 334549 - DNA, 15 bp, Homo sapiens
tgcacagctctggaa

SEQ ID NO: 334550 - DNA, 15 bp, Homo sapiens
ttgcacagctctgga

SEQ ID NO: 334551 - DNA, 15 bp, Homo sapiens
tttgcacagctctgg

SEQ ID NO: 334552 - DNA, 15 bp, Homo sapiens
ttttgcacagctctg

SEQ ID NO: 334553 - DNA, 15 bp, Homo sapiens
attttgcacagctct

SEQ ID NO: 334554 - DNA, 15 bp, Homo sapiens
cattttgcacagctc

SEQ ID NO: 334555 - DNA, 15 bp, Homo sapiens
ccattttgcacagct

SEQ ID NO: 334556 - DNA, 15 bp, Homo sapiens
accattttgcacagc

SEQ ID NO: 334557 - DNA, 15 bp, Homo sapiens
aaccattttgcacag

SEQ ID NO: 334558 - DNA, 15 bp, Homo sapiens
gaaccattttgcaca

SEQ ID NO: 334559 - DNA, 15 bp, Homo sapiens
ggaaccattttgcac

SEQ ID NO: 334560 - DNA, 15 bp, Homo sapiens
aggaaccattttgca

SEQ ID NO: 334561 - DNA, 15 bp, Homo sapiens
caggaaccattttgc

SEQ ID NO: 334562 - DNA, 15 bp, Homo sapiens
ccaggaaccattttg

SEQ ID NO: 334563 - DNA, 15 bp, Homo sapiens
accaggaaccatttt

SEQ ID NO: 334564 - DNA, 15 bp, Homo sapiens
taccaggaaccattt

SEQ ID NO: 334565 - DNA, 15 bp, Homo sapiens
ctaccaggaaccatt

SEQ ID NO: 334566 - DNA, 15 bp, Homo sapiens
gctaccaggaaccat

SEQ ID NO: 334567 - DNA, 15 bp, Homo sapiens
agctaccaggaacca

SEQ ID NO: 334568 - DNA, 15 bp, Homo sapiens
aagctaccaggaacc

SEQ ID NO: 334569 - DNA, 15 bp, Homo sapiens
aaagctaccaggaac

SEQ ID NO: 334570 - DNA, 15 bp, Homo sapiens
caaagctaccaggaa

SEQ ID NO: 334571 - DNA, 15 bp, Homo sapiens
ccaaagctaccagga

SEQ ID NO: 334572 - DNA, 15 bp, Homo sapiens
cccaaagctaccagg

SEQ ID NO: 334573 - DNA, 15 bp, Homo sapiens
ccccaaagctaccag

SEQ ID NO: 334574 - DNA, 15 bp, Homo sapiens
accccaaagctacca

SEQ ID NO: 334575 - DNA, 15 bp, Homo sapiens
aaccccaaagctacc

SEQ ID NO: 334576 - DNA, 15 bp, Homo sapiens
gaaccccaaagctac

SEQ ID NO: 334577 - DNA, 15 bp, Homo sapiens
ggaaccccaaagcta

SEQ ID NO: 334578 - DNA, 15 bp, Homo sapiens
aggaaccccaaagct

SEQ ID NO: 334579 - DNA, 15 bp, Homo sapiens
aaggaaccccaaagc

SEQ ID NO: 334580 - DNA, 15 bp, Homo sapiens
gaaggaaccccaaag

SEQ ID NO: 334581 - DNA, 15 bp, Homo sapiens
ggaaggaaccccaaa

SEQ ID NO: 334582 - DNA, 15 bp, Homo sapiens
tggaaggaaccccaa

SEQ ID NO: 334583 - DNA, 15 bp, Homo sapiens
atggaaggaacccca

SEQ ID NO: 334584 - DNA, 15 bp, Homo sapiens
catggaaggaacccc

SEQ ID NO: 334585 - DNA, 15 bp, Homo sapiens
gcatggaaggaaccc

SEQ ID NO: 334586 - DNA, 15 bp, Homo sapiens
agcatggaaggaacc

SEQ ID NO: 334587 - DNA, 15 bp, Homo sapiens
cagcatggaaggaac

SEQ ID NO: 334588 - DNA, 15 bp, Homo sapiens
gcagcatggaaggaa

SEQ ID NO: 334589 - DNA, 15 bp, Homo sapiens
agcagcatggaagga

SEQ ID NO: 334590 - DNA, 15 bp, Homo sapiens
cagcagcatggaagg

SEQ ID NO: 334591 - DNA, 15 bp, Homo sapiens
acagcagcatggaag

SEQ ID NO: 334592 - DNA, 15 bp, Homo sapiens
gacagcagcatggaa

SEQ ID NO: 334593 - DNA, 15 bp, Homo sapiens
tgacagcagcatgga

SEQ ID NO: 334594 - DNA, 15 bp, Homo sapiens
atgacagcagcatgg

SEQ ID NO: 334595 - DNA, 15 bp, Homo sapiens
gatgacagcagcatg

SEQ ID NO: 334596 - DNA, 15 bp, Homo sapiens
tgatgacagcagcat

SEQ ID NO: 334597 - DNA, 15 bp, Homo sapiens
atgatgacagcagca

SEQ ID NO: 334598 - DNA, 15 bp, Homo sapiens
tatgatgacagcagc

SEQ ID NO: 334599 - DNA, 15 bp, Homo sapiens
gtatgatgacagcag

SEQ ID NO: 334600 - DNA, 15 bp, Homo sapiens
agtatgatgacagca

SEQ ID NO: 334601 - DNA, 15 bp, Homo sapiens
tagtatgatgacagc

SEQ ID NO: 334602 - DNA, 15 bp, Homo sapiens
atagtatgatgacag

SEQ ID NO: 334603 - DNA, 15 bp, Homo sapiens
catagtatgatgaca

SEQ ID NO: 334604 - DNA, 15 bp, Homo sapiens
tcatagtatgatgac

SEQ ID NO: 334605 - DNA, 15 bp, Homo sapiens
ttcatagtatgatga

SEQ ID NO: 334606 - DNA, 15 bp, Homo sapiens
tttcatagtatgatg

SEQ ID NO: 334607 - DNA, 15 bp, Homo sapiens
gtttcatagtatgat

SEQ ID NO: 334608 - DNA, 15 bp, Homo sapiens
agtttcatagtatga

SEQ ID NO: 334609 - DNA, 15 bp, Homo sapiens
tagtttcatagtatg

SEQ ID NO: 334610 - DNA, 15 bp, Homo sapiens
ttagtttcatagtat

SEQ ID NO: 334611 - DNA, 15 bp, Homo sapiens
tttagtttcatagta

SEQ ID NO: 334612 - DNA, 15 bp, Homo sapiens
gtttagtttcatagt

SEQ ID NO: 334613 - DNA, 15 bp, Homo sapiens
ggtttagtttcatag

SEQ ID NO: 334614 - DNA, 15 bp, Homo sapiens
tggtttagtttcata

SEQ ID NO: 334615 - DNA, 15 bp, Homo sapiens
ctggtttagtttcat

SEQ ID NO: 334616 - DNA, 15 bp, Homo sapiens
cctggtttagtttca

SEQ ID NO: 334617 - DNA, 15 bp, Homo sapiens
tcctggtttagtttc

SEQ ID NO: 334618 - DNA, 15 bp, Homo sapiens
ttcctggtttagttt

SEQ ID NO: 334619 - DNA, 15 bp, Homo sapiens
tttcctggtttagtt

SEQ ID NO: 334620 - DNA, 15 bp, Homo sapiens
gtttcctggtttagt

SEQ ID NO: 334621 - DNA, 15 bp, Homo sapiens
agtttcctggtttag

SEQ ID NO: 334622 - DNA, 15 bp, Homo sapiens
aagtttcctggttta

SEQ ID NO: 334623 - DNA, 15 bp, Homo sapiens
aaagtttcctggttt

SEQ ID NO: 334624 - DNA, 15 bp, Homo sapiens
gaaagtttcctggtt

SEQ ID NO: 334625 - DNA, 15 bp, Homo sapiens
agaaagtttcctggt

SEQ ID NO: 334626 - DNA, 15 bp, Homo sapiens
tagaaagtttcctgg

SEQ ID NO: 334627 - DNA, 15 bp, Homo sapiens
ttagaaagtttcctg

SEQ ID NO: 334628 - DNA, 15 bp, Homo sapiens
gttagaaagtttcct

SEQ ID NO: 334629 - DNA, 15 bp, Homo sapiens
agttagaaagtttcc

SEQ ID NO: 334630 - DNA, 15 bp, Homo sapiens
cagttagaaagtttc

SEQ ID NO: 334631 - DNA, 15 bp, Homo sapiens
ccagttagaaagttt

SEQ ID NO: 334632 - DNA, 15 bp, Homo sapiens
gccagttagaaagtt

SEQ ID NO: 334633 - DNA, 15 bp, Homo sapiens
ggccagttagaaagt

SEQ ID NO: 334634 - DNA, 15 bp, Homo sapiens
tggccagttagaaag

SEQ ID NO: 334635 - DNA, 15 bp, Homo sapiens
ttggccagttagaaa

SEQ ID NO: 334636 - DNA, 15 bp, Homo sapiens
cttggccagttagaa

SEQ ID NO: 334637 - DNA, 15 bp, Homo sapiens
acttggccagttaga

SEQ ID NO: 334638 - DNA, 15 bp, Homo sapiens
gacttggccagttag

SEQ ID NO: 334639 - DNA, 15 bp, Homo sapiens
ggacttggccagtta

SEQ ID NO: 334640 - DNA, 15 bp, Homo sapiens
tggacttggccagtt

SEQ ID NO: 334641 - DNA, 15 bp, Homo sapiens
ctggacttggccagt

SEQ ID NO: 334642 - DNA, 15 bp, Homo sapiens
actggacttggccag

SEQ ID NO: 334643 - DNA, 15 bp, Homo sapiens
cactggacttggcca

SEQ ID NO: 334644 - DNA, 15 bp, Homo sapiens
acactggacttggcc

SEQ ID NO: 334645 - DNA, 15 bp, Homo sapiens
gacactggacttggc

SEQ ID NO: 334646 - DNA, 15 bp, Homo sapiens
agacactggacttgg

SEQ ID NO: 334647 - DNA, 15 bp, Homo sapiens
gagacactggacttg

SEQ ID NO: 334648 - DNA, 15 bp, Homo sapiens
agagacactggactt

SEQ ID NO: 334649 - DNA, 15 bp, Homo sapiens
aagagacactggact

SEQ ID NO: 334650 - DNA, 15 bp, Homo sapiens
aaagagacactggac

SEQ ID NO: 334651 - DNA, 15 bp, Homo sapiens
aaaagagacactgga

SEQ ID NO: 334652 - DNA, 15 bp, Homo sapiens
aaaaagagacactgg

SEQ ID NO: 334653 - DNA, 15 bp, Homo sapiens
taaaaagagacactg

SEQ ID NO: 334654 - DNA, 15 bp, Homo sapiens
ataaaaagagacact

SEQ ID NO: 334655 - DNA, 15 bp, Homo sapiens
aataaaaagagacac

SEQ ID NO: 334656 - DNA, 15 bp, Homo sapiens
taataaaaagagaca

SEQ ID NO: 334657 - DNA, 15 bp, Homo sapiens
ttaataaaaagagac

SEQ ID NO: 334658 - DNA, 15 bp, Homo sapiens
tttaataaaaagaga

SEQ ID NO: 334659 - DNA, 15 bp, Homo sapiens
ttttaataaaaagag

SEQ ID NO: 334660 - DNA, 15 bp, Homo sapiens
gttttaataaaaaga

SEQ ID NO: 334661 - DNA, 15 bp, Homo sapiens
tgttttaataaaaag

SEQ ID NO: 334662 - DNA, 15 bp, Homo sapiens
atgttttaataaaaa

SEQ ID NO: 334663 - DNA, 15 bp, Homo sapiens
aatgttttaataaaa

SEQ ID NO: 334664 - DNA, 15 bp, Homo sapiens
taatgttttaataaa

SEQ ID NO: 334665 - DNA, 15 bp, Homo sapiens
ataatgttttaataa

SEQ ID NO: 334666 - DNA, 15 bp, Homo sapiens
tataatgttttaata

SEQ ID NO: 334667 - DNA, 15 bp, Homo sapiens
ctataatgttttaat

SEQ ID NO: 334668 - DNA, 15 bp, Homo sapiens
tctataatgttttaa

SEQ ID NO: 334669 - DNA, 15 bp, Homo sapiens
ctctataatgtttta

SEQ ID NO: 334670 - DNA, 15 bp, Homo sapiens
cctctataatgtttt

SEQ ID NO: 334671 - DNA, 15 bp, Homo sapiens
acctctataatgttt

SEQ ID NO: 334672 - DNA, 15 bp, Homo sapiens
gacctctataatgtt

SEQ ID NO: 334673 - DNA, 15 bp, Homo sapiens
tgacctctataatgt

SEQ ID NO: 334674 - DNA, 15 bp, Homo sapiens
ttgacctctataatg

SEQ ID NO: 334675 - DNA, 15 bp, Homo sapiens
attgacctctataat

SEQ ID NO: 334676 - DNA, 15 bp, Homo sapiens
tattgacctctataa

SEQ ID NO: 334677 - DNA, 15 bp, Homo sapiens
gtattgacctctata

SEQ ID NO: 334678 - DNA, 15 bp, Homo sapiens
tgtattgacctctat

SEQ ID NO: 334679 - DNA, 15 bp, Homo sapiens
atgtattgacctcta

SEQ ID NO: 334680 - DNA, 15 bp, Homo sapiens
aatgtattgacctct

SEQ ID NO: 334681 - DNA, 15 bp, Homo sapiens
caatgtattgacctc

SEQ ID NO: 334682 - DNA, 15 bp, Homo sapiens
acaatgtattgacct

SEQ ID NO: 334683 - DNA, 15 bp, Homo sapiens
cacaatgtattgacc

SEQ ID NO: 334684 - DNA, 15 bp, Homo sapiens
tcacaatgtattgac

SEQ ID NO: 334685 - DNA, 15 bp, Homo sapiens
ctcacaatgtattga

SEQ ID NO: 334686 - DNA, 15 bp, Homo sapiens
tctcacaatgtattg

SEQ ID NO: 334687 - DNA, 15 bp, Homo sapiens
ctctcacaatgtatt

SEQ ID NO: 334688 - DNA, 15 bp, Homo sapiens
actctcacaatgtat

SEQ ID NO: 334689 - DNA, 15 bp, Homo sapiens
aactctcacaatgta

SEQ ID NO: 334690 - DNA, 15 bp, Homo sapiens
caactctcacaatgt

SEQ ID NO: 334691 - DNA, 15 bp, Homo sapiens
acaactctcacaatg

SEQ ID NO: 334692 - DNA, 15 bp, Homo sapiens
cacaactctcacaat

SEQ ID NO: 334693 - DNA, 15 bp, Homo sapiens
ccacaactctcacaa

SEQ ID NO: 334694 - DNA, 15 bp, Homo sapiens
tccacaactctcaca

SEQ ID NO: 334695 - DNA, 15 bp, Homo sapiens
ttccacaactctcac

SEQ ID NO: 334696 - DNA, 15 bp, Homo sapiens
tttccacaactctca

SEQ ID NO: 334697 - DNA, 15 bp, Homo sapiens
atttccacaactctc

SEQ ID NO: 334698 - DNA, 15 bp, Homo sapiens
gatttccacaactct

SEQ ID NO: 334699 - DNA, 15 bp, Homo sapiens
agatttccacaactc

SEQ ID NO: 334700 - DNA, 15 bp, Homo sapiens
cagatttccacaact

SEQ ID NO: 334701 - DNA, 15 bp, Homo sapiens
tcagatttccacaac

SEQ ID NO: 334702 - DNA, 15 bp, Homo sapiens
atcagatttccacaa

SEQ ID NO: 334703 - DNA, 15 bp, Homo sapiens
aatcagatttccaca

SEQ ID NO: 334704 - DNA, 15 bp, Homo sapiens
gaatcagatttccac

SEQ ID NO: 334705 - DNA, 15 bp, Homo sapiens
agaatcagatttcca

SEQ ID NO: 334706 - DNA, 15 bp, Homo sapiens
gagaatcagatttcc

SEQ ID NO: 334707 - DNA, 15 bp, Homo sapiens
agagaatcagatttc

SEQ ID NO: 334708 - DNA, 15 bp, Homo sapiens
aagagaatcagattt

SEQ ID NO: 334709 - DNA, 15 bp, Homo sapiens
caagagaatcagatt

SEQ ID NO: 334710 - DNA, 15 bp, Homo sapiens
acaagagaatcagat

SEQ ID NO: 334711 - DNA, 15 bp, Homo sapiens
gacaagagaatcaga

SEQ ID NO: 334712 - DNA, 15 bp, Homo sapiens
ggacaagagaatcag

SEQ ID NO: 334713 - DNA, 15 bp, Homo sapiens
gggacaagagaatca

SEQ ID NO: 334714 - DNA, 15 bp, Homo sapiens
tgggacaagagaatc

SEQ ID NO: 334715 - DNA, 15 bp, Homo sapiens
ttgggacaagagaat

SEQ ID NO: 334716 - DNA, 15 bp, Homo sapiens
cttgggacaagagaa

SEQ ID NO: 334717 - DNA, 15 bp, Homo sapiens
ccttgggacaagaga

SEQ ID NO: 334718 - DNA, 15 bp, Homo sapiens
cccttgggacaagag

SEQ ID NO: 334719 - DNA, 15 bp, Homo sapiens
acccttgggacaaga

SEQ ID NO: 334720 - DNA, 15 bp, Homo sapiens
aacccttgggacaag

SEQ ID NO: 334721 - DNA, 15 bp, Homo sapiens
gaacccttgggacaa

SEQ ID NO: 334722 - DNA, 15 bp, Homo sapiens
ggaacccttgggaca

SEQ ID NO: 334723 - DNA, 15 bp, Homo sapiens
tggaacccttgggac

SEQ ID NO: 334724 - DNA, 15 bp, Homo sapiens
ctggaacccttggga

SEQ ID NO: 334725 - DNA, 15 bp, Homo sapiens
actggaacccttggg

SEQ ID NO: 334726 - DNA, 15 bp, Homo sapiens
gactggaacccttgg

SEQ ID NO: 334727 - DNA, 15 bp, Homo sapiens
agactggaacccttg

SEQ ID NO: 334728 - DNA, 15 bp, Homo sapiens
gagactggaaccctt

SEQ ID NO: 334729 - DNA, 15 bp, Homo sapiens
ggagactggaaccct

SEQ ID NO: 334730 - DNA, 15 bp, Homo sapiens
tggagactggaaccc

SEQ ID NO: 334731 - DNA, 15 bp, Homo sapiens
gtggagactggaacc

SEQ ID NO: 334732 - DNA, 15 bp, Homo sapiens
tgtggagactggaac

SEQ ID NO: 334733 - DNA, 15 bp, Homo sapiens
ctgtggagactggaa

SEQ ID NO: 334734 - DNA, 15 bp, Homo sapiens
gctgtggagactgga

SEQ ID NO: 334735 - DNA, 15 bp, Homo sapiens
ggctgtggagactgg

SEQ ID NO: 334736 - DNA, 15 bp, Homo sapiens
tggctgtggagactg

SEQ ID NO: 334737 - DNA, 15 bp, Homo sapiens
ctggctgtggagact

SEQ ID NO: 334738 - DNA, 15 bp, Homo sapiens
actggctgtggagac

SEQ ID NO: 334739 - DNA, 15 bp, Homo sapiens
tactggctgtggaga

SEQ ID NO: 334740 - DNA, 15 bp, Homo sapiens
gtactggctgtggag

SEQ ID NO: 334741 - DNA, 15 bp, Homo sapiens
agtactggctgtgga

SEQ ID NO: 334742 - DNA, 15 bp, Homo sapiens
cagtactggctgtgg

SEQ ID NO: 334743 - DNA, 15 bp, Homo sapiens
ccagtactggctgtg

SEQ ID NO: 334744 - DNA, 15 bp, Homo sapiens
accagtactggctgt

SEQ ID NO: 334745 - DNA, 15 bp, Homo sapiens
caccagtactggctg

SEQ ID NO: 334746 - DNA, 15 bp, Homo sapiens
acaccagtactggct

SEQ ID NO: 334747 - DNA, 15 bp, Homo sapiens
aacaccagtactggc

SEQ ID NO: 334748 - DNA, 15 bp, Homo sapiens
caacaccagtactgg

SEQ ID NO: 334749 - DNA, 15 bp, Homo sapiens
gcaacaccagtactg

SEQ ID NO: 334750 - DNA, 15 bp, Homo sapiens
tgcaacaccagtact

SEQ ID NO: 334751 - DNA, 15 bp, Homo sapiens
atgcaacaccagtac

SEQ ID NO: 334752 - DNA, 15 bp, Homo sapiens
gatgcaacaccagta

SEQ ID NO: 334753 - DNA, 15 bp, Homo sapiens
tgatgcaacaccagt

SEQ ID NO: 334754 - DNA, 15 bp, Homo sapiens
gtgatgcaacaccag

SEQ ID NO: 334755 - DNA, 15 bp, Homo sapiens
tgtgatgcaacacca

SEQ ID NO: 334756 - DNA, 15 bp, Homo sapiens
ttgtgatgcaacacc

SEQ ID NO: 334757 - DNA, 15 bp, Homo sapiens
attgtgatgcaacac

SEQ ID NO: 334758 - DNA, 15 bp, Homo sapiens
cattgtgatgcaaca

SEQ ID NO: 334759 - DNA, 15 bp, Homo sapiens
ccattgtgatgcaac

SEQ ID NO: 334760 - DNA, 15 bp, Homo sapiens
gccattgtgatgcaa

SEQ ID NO: 334761 - DNA, 15 bp, Homo sapiens
ggccattgtgatgca

SEQ ID NO: 334762 - DNA, 15 bp, Homo sapiens
aggccattgtgatgc

SEQ ID NO: 334763 - DNA, 15 bp, Homo sapiens
caggccattgtgatg

SEQ ID NO: 334764 - DNA, 15 bp, Homo sapiens
gcaggccattgtgat

SEQ ID NO: 334765 - DNA, 15 bp, Homo sapiens
agcaggccattgtga

SEQ ID NO: 334766 - DNA, 15 bp, Homo sapiens
cagcaggccattgtg

SEQ ID NO: 334767 - DNA, 15 bp, Homo sapiens
acagcaggccattgt

SEQ ID NO: 334768 - DNA, 15 bp, Homo sapiens
gacagcaggccattg

SEQ ID NO: 334769 - DNA, 15 bp, Homo sapiens
tgacagcaggccatt

SEQ ID NO: 334770 - DNA, 15 bp, Homo sapiens
gtgacagcaggccat

SEQ ID NO: 334771 - DNA, 15 bp, Homo sapiens
ggtgacagcaggcca

SEQ ID NO: 334772 - DNA, 15 bp, Homo sapiens
gggtgacagcaggcc

SEQ ID NO: 334773 - DNA, 15 bp, Homo sapiens
ggggtgacagcaggc

SEQ ID NO: 334774 - DNA, 15 bp, Homo sapiens
gggggtgacagcagg

SEQ ID NO: 334775 - DNA, 15 bp, Homo sapiens
tgggggtgacagcag

SEQ ID NO: 334776 - DNA, 15 bp, Homo sapiens
ctgggggtgacagca

SEQ ID NO: 334777 - DNA, 15 bp, Homo sapiens
tctgggggtgacagc

SEQ ID NO: 334778 - DNA, 15 bp, Homo sapiens
ttctgggggtgacag

SEQ ID NO: 334779 - DNA, 15 bp, Homo sapiens
gttctgggggtgaca

SEQ ID NO: 334780 - DNA, 15 bp, Homo sapiens
ggttctgggggtgac

SEQ ID NO: 334781 - DNA, 15 bp, Homo sapiens
tggttctgggggtga

SEQ ID NO: 334782 - DNA, 15 bp, Homo sapiens
gtggttctgggggtg

SEQ ID NO: 334783 - DNA, 15 bp, Homo sapiens
tgtggttctgggggt

SEQ ID NO: 334784 - DNA, 15 bp, Homo sapiens
ctgtggttctggggg

SEQ ID NO: 334785 - DNA, 15 bp, Homo sapiens
cctgtggttctgggg

SEQ ID NO: 334786 - DNA, 15 bp, Homo sapiens
ccctgtggttctggg

SEQ ID NO: 334787 - DNA, 15 bp, Homo sapiens
tccctgtggttctgg

SEQ ID NO: 334788 - DNA, 15 bp, Homo sapiens
gtccctgtggttctg

SEQ ID NO: 334789 - DNA, 15 bp, Homo sapiens
agtccctgtggttct

SEQ ID NO: 334790 - DNA, 15 bp, Homo sapiens
cagtccctgtggttc

SEQ ID NO: 334791 - DNA, 15 bp, Homo sapiens
acagtccctgtggtt

SEQ ID NO: 334792 - DNA, 15 bp, Homo sapiens
aacagtccctgtggt

SEQ ID NO: 334793 - DNA, 15 bp, Homo sapiens
gaacagtccctgtgg

SEQ ID NO: 334794 - DNA, 15 bp, Homo sapiens
ggaacagtccctgtg

SEQ ID NO: 334795 - DNA, 15 bp, Homo sapiens
tggaacagtccctgt

SEQ ID NO: 334796 - DNA, 15 bp, Homo sapiens
ttggaacagtccctg

SEQ ID NO: 334797 - DNA, 15 bp, Homo sapiens
tttggaacagtccct

SEQ ID NO: 334798 - DNA, 15 bp, Homo sapiens
atttggaacagtccc

SEQ ID NO: 334799 - DNA, 15 bp, Homo sapiens
tatttggaacagtcc

SEQ ID NO: 334800 - DNA, 15 bp, Homo sapiens
atatttggaacagtc

SEQ ID NO: 334801 - DNA, 15 bp, Homo sapiens
catatttggaacagt

SEQ ID NO: 334802 - DNA, 15 bp, Homo sapiens
ccatatttggaacag

SEQ ID NO: 334803 - DNA, 15 bp, Homo sapiens
cccatatttggaaca

SEQ ID NO: 334804 - DNA, 15 bp, Homo sapiens
acccatatttggaac

SEQ ID NO: 334805 - DNA, 15 bp, Homo sapiens
tacccatatttggaa

SEQ ID NO: 334806 - DNA, 15 bp, Homo sapiens
gtacccatatttgga

SEQ ID NO: 334807 - DNA, 15 bp, Homo sapiens
ggtacccatatttgg

SEQ ID NO: 334808 - DNA, 15 bp, Homo sapiens
tggtacccatatttg

SEQ ID NO: 334809 - DNA, 15 bp, Homo sapiens
ctggtacccatattt

SEQ ID NO: 334810 - DNA, 15 bp, Homo sapiens
actggtacccatatt
